(19) United States
(12) Patent Application Publication
(10) Pub. No.: US 2008/0083042 A1
(43) Pub. Date: Apr. 3, 2008

(54) Maize polymorphisms and methods of genotyping

(76) Inventors: David Butruille, Urbandale, IA (US); Cathy Laurie, Saratoga, CA (US); Anju Gupta, Ankeny, IA (US); Dick Johnson, Urbana, IL (US); Sam Eathington, Ames, IA (US); Jason Bull, St. Louis, MO (US); Marlin Edwards, Davis, CA (US)

Correspondence Address: THOMPSON COBURN, LLP, ONE US BANK PLAZA, ST. LOUIS, MO, 63101, US

(21) Appl. No.: 11/504,538

(22) Filed: Aug. 14, 2006

(51) Int. Cl. A01H 1/04; C12Q 1/68; C07H 21/04

(52) U.S. Cl. 800/267; 536/24.3; 435/6

(57) ABSTRACT

Polymorphic maize DNA loci useful for genotyping between at least two varieties of maize. Sequences of the loci are useful for designing primers and probe oligonucleotides for detecting polymorphisms in maize DNA. Polymorphisms are useful for genotyping applications in maize. The polymorphic markers are useful to establish marker/trait associations, e.g. in linkage disequilibrium mapping and association studies, positional cloning and transgenic applications, marker-aided breeding and marker-assisted selection, hybrid prediction and identity by descent studies. The polymorphic markers are also useful in mapping libraries of DNA clones, e.g. for maize QTLs and genes linked to polymorphisms.

### INCORPORATION OF SEQUENCE LISTING

[0001] Two copies of the sequence listing (Copy 1 and Copy 2) and a computer readable form (CRF) of the sequence listing, all on CD-ROMs, each containing the file named “pa_{—}00358B.rpt”, which is 10.8 MB (measured in MS-DOS), all of which were created on Aug. 10, 2006, are herein incorporated by reference.

### INCORPORATION OF TABLES

[0002] Two copies of tables on CD-ROMs (copy 1 and copy 2) each containing the files named “Table 1.txt” which is 3 MB (measured in MS-DOS) and “Table 3.doc” which is 2.2 MB (measured in MS-DOS), all of which were created on Aug. 11, 2006, are herein incorporated by reference.

### FIELD OF THE INVENTION

[0003] Disclosed herein are maize polymorphisms, nucleic acid molecules related to such polymorphisms and methods of using such polymorphisms and molecules, e.g. in genotyping.

### BACKGROUND

[0004] Polymorphisms are useful as genetic markers for genotyping applications in the agriculture field, e.g. in plant genetic studies and commercial breeding. See for instance U.S. Pat. Nos. 5,385,835; 5,437,697; 5,385,835; 5,492,547; 5,746,023; 5,962,764; 5,981,832 and 6,100,030, the disclosures of all of which are incorporated herein by reference. The highly conserved nature of DNA combined with the rare occurrences of stable polymorphisms provide genetic markers which are both predictable and discerning of different genotypes. Among the classes of existing genetic markers are a variety of polymorphisms indicating genetic variation including restriction-fragment-length polymorphisms (RFLPs), amplified fragment-length polymorphisms (AFLPs), simple sequence repeats (SSRs), single nucleotide polymorphisms (SNPs) and insertion/deletion polymorphisms (Indels). Because the number of genetic markers for a plant species is limited, the discovery of additional genetic markers will facilitate genotyping applications including marker-trait association studies, gene mapping, gene discovery, marker-assisted selection and marker-assisted breeding. Evolving technologies make certain genetic markers more amenable for rapid, large scale use. For instance, technologies for SNP detection indicate that SNPs may be preferred genetic markers.

### SUMMARY OF THE INVENTION

[0005] This invention provides a large number of genetic markers for maize. These genetic markers comprise maize DNA loci which are useful for genotyping applications between at least two varieties of maize. A polymorphic maize locus of this invention comprises at least 20 consecutive nucleotides which include or are adjacent to a polymorphism which is identified herein, e.g. in Table 1. More particularly, a polymorphic maize locus of this invention has a nucleic acid sequence which is at least 90%, preferably at least 95%, identical to the sequence of the same number of nucleotides in either strand of a segment of maize DNA which includes or is adjacent to the polymorphism. As indicated in Table 1 the nucleic acid sequences of SEQ ID NO: 1 through SEQ ID NO: 10373 comprise one or more polymorphisms, e.g. single nucleotide polymorphisms (SNPs) and insertion/deletion polymorphisms (Indels).

[0006] In one aspect of the invention the polymorphic maize loci are provided in one or more data sets of DNA sequences, i.e. data sets comprising up to a finite number of distinct sequences of polymorphic loci. The finite number of polymorphic loci in a data set can be as few as 2 or up to 1000 or more, e.g. 5, 10, 25, 40, 75, 100 or 500 loci. Such data sets are useful for genotyping applications of a large scale or involving large numbers of plants. In a useful aspect of the invention the data set of polymorphic maize loci is recorded on a computer readable medium.

[0007] In another aspect of the invention the polymorphism in the loci of the invention are mapped onto the maize genome, e.g. as a genetic map of the maize genome comprising map positions of two or more polymorphisms, as indicated in Table 1, more preferably as indicated in Table 3. Such a genetic map is illustrated in FIG. 1. The genetic map data can also be recorded on computer readable medium. Preferred embodiments of the invention provide genetic maps of polymorphisms at high densities, e.g. at least 150 or more, say at least 500 or 1000, polymorphisms across a map of the maize genome. Especially useful genetic maps comprise polymorphisms at an average distance of not more than 10 centiMorgans (cM) on a linkage group.

[0008] This invention also provides nucleic acid molecules for identifying the polymorphisms, such molecules are preferably oligonucleotides which are useful as PCR primers for amplifying a segment of a maize genome, e.g. a polymorphic locus, and hybridization probes for use in assays to identify in maize DNA the presence or absence of particular polymorphisms.

[0009] Nucleic acid molecules useful as PCR primers are typically provided in pairs for amplify a segment of maize DNA comprising at least one polymorphism, where each molecule comprises at least 15 nucleotide bases. The nucleotide sequence of one of the primer molecules is preferably at least 90 percent identical to a sequence of the same number of consecutive nucleotides in one strand of a segment of maize DNA in a polymorphic locus and the sequence of the other of the primer molecules is at least 90 percent identical to a sequence of the same number of consecutive nucleotides in the other strand of said segment of maize DNA in the polymorphic locus. Preferably the primers are capable of hybridizing under high stringency conditions to the strands of DNA in the polymorphic locus. Preferably such primers are provided and used in pairs which flank at least one polymorphism in the segment of maize DNA in a polymorphic locus.

[0010] Nucleic acid molecules useful as hybridization probes for detecting a polymorphism in maize DNA can be designed for a variety of assays. For assays, where the probe is intended to hybridize to a segment including the polymorphism, such molecules can comprise at least 12 nucleotide bases and a detectable label. The sequence of the nucleotide bases is preferably at least 90 percent, more preferably at least 95%, identical to a sequence of the same number of consecutive nucleotides in either strand of a segment of maize DNA in a polymorphic locus of this invention. In preferred aspects of the invention the detectable label is a dye at one end of the molecule. In more preferred aspects the molecule comprises a dye and dye quencher at the ends thereof. For SNP assays it is useful to provide such molecules in pairs, e.g. where each molecule has a distinct fluorescent dye at the 5′ end and has identical nucleotide sequence except for a single nucleotide polymorphism.

[0011] For assays where the molecule is designed to hybridize adjacent to a polymorphism which is detected by single base extension, e.g. of a labeled dideoxynucleotide, such molecules can comprise at least 15, more preferably at least 16 or 17, nucleotide bases in a sequence which is at least 90 percent, preferably at least 95%, identical to a sequence of the same number of consecutive nucleotides in either strand of a segment of polymorphic maize DNA.

[0012] Another aspect of the invention is a complex of hybridization probe and a fragment maize genomic DNA.

[0013] Still another aspect of this invention provides a set of oligonucleotides comprising a pair of nucleic acid molecules primers for PCR amplification of a segment of polymorphic maize DNA and at least one detector nucleic acid molecule for detecting a polymorphism in the segment. Such sets can be provided in collections of at least 2 or up to 1000 or more, e.g. up to 5, 10, 25, 40, 75, 100 or 500 sets of primer pairs and hybridization probes.

[0014] Another aspect of this invention provides methods for determining polymorphisms which are likely to be useful as markers for genotyping applications in eukaryotic genomes. Such method comprises the construction of reduced representation libraries by separating repetitive sequence from fragments of genomic DNA of at least two varieties of a species, fractionating the separated genomic DNA fragments based on size of nucleotide sequence and comparing the sequence of a fragments in a fraction to determine polymorphisms. More particularly, the method of identifying polymorphisms in genomic DNA comprises digesting total genomic DNA from at least two variants of a eukaryotic species with a methylation sensitive endonuclease to provide a pool of digested DNA fragments. The average nucleotide length of fragments is smaller for DNA regions characterized by a lower percent of 5-methylated cytosine. Such fragments are separable, e.g. by gel electrophoresis, based on nucleotide length. A fraction of DNA with less than average nucleotide length is separated from the pool of digested DNA. Sequences of the DNA is a fraction is compared to identify polymorphisms. As compared to coding sequence, repetitive sequence is more likely to comprise 5-methylated cytosine, e.g. in —CG- and —CNG-sequence segments. In a preferred aspect of the method genomic DNA from at least two different inbred varieties of a crop plant is digested with a with a methylation sensitive endonuclease selected from the group consisting of Aci I, Apa I, Age I, Bsr F I, BssH II, Eag I, Eae I, Hha I, HinP1 I, Hpa II, Msp I, MspM II, Nar I, Not I, Pst I, Pvu I, Sac II, Sma I, Stu I and Xho I to provide a pool of digested DNA which is physically separated, e.g. by gel electrophoresis. Comparable size fractions of DNA are obtained from digested DNA of each of said varieties. DNA molecules from the comparable fractions are inserted into vectors to construct reduced representation libraries of genomic DNA clones which are sequenced and compared to identify polymorphisms.

[0015] In an alternative method polymorphisms in genomic DNA are identified by digesting total genomic DNA from at least two variants of a eukaryotic species with endonuclease to provide a pool of digested DNA fragments. The digested DNA fragments are segregated in an array on a substrate and contacted with one or more labeled oligonucleotides having repetitive sequence elements which are characteristic of DNA in the species. Hybridization identifies DNA fragments characterized by repetitive sequence. The sequence of DNA fragments which do not hybridize to repetitive sequence oligonucleotides is compared for polymorphisms. Such methods provide segments of reduced representation genomic DNA from a plant which has genomic DNA comprising regions of DNA with relatively higher levels of methylated cytosine and regions of DNA with relatively lower levels of methylated cytosine. The reduced representation segments of this invention comprise genomic DNA from a region of DNA with relatively lower levels of methylated cytosine and are provided in fractions characterized by nucleotide size of said segments, e.g. in the range of 500 to 3000 bp.

[0016] This invention also provides methods of using the loci and polymorphism of this invention, e.g. in genotyping and related applications One aspect. of this invention provides methods of finding polymorphisms in maize DNA by comparing DNA sequence in at least two maize lines where the sequence is selected by using a segment of polymorphic maize DNA locus. The DNA sequence for comparison is preferably selected as being at least 80% identical to sequence of a polymorphic locus. More preferably such sequence is selected as being linked to a polymorphic locus.

[0017] This invention also provides methods of genotyping by assaying DNA or mRNA from tissue of at least one maize line to identify the presence of a nucleic acid polymorphism linked to a polymorphic locus of this invention. In preferred aspects of the invention genotyping uses a polymorphism identified in the genetic map of FIG. 1 as amplified by Table 3. In another preferred aspect of the invention genotyping comprises identifying one or more phenotypic traits for at least two maize lines and determining associations between traits and polymorphisms, e.g. lines with complementary traits are identified and selected for breeding to improve heterosis. Assays for such genotyping can employ sufficient nucleic acid molecules to identify the presence of at least 2 and up to 5000 or more distinct polymorphisms, e.g. where the number of distinct polymorphisms is 5, 10, 25, 40, 75, 100, 500, 1000, 2000, 3000 or 4000.

[0018] This invention also provides methods of investigating a maize allele by determining the presence of a polymorphism in the nucleic acid sequence of nucleic acid molecules isolated from one or more maize plants where the polymorphism is linked to a polymorphic locus of the invention.

[0019] This invention also provides methods of mapping maize genomic sequence by identifying the presence of a mapped polymorphism in the genomic sequence where the mapped polymorphism is linked to a polymorphic locus of the invention, e.g. a mapped polymorphism on a genetic map of this invention.

[0020] This invention also provides methods of breeding maize by selecting a maize line having a polymorphism associated by linkage disequilibrium to a trait of interest where the polymorphism is linked to a polymorphic locus of the invention.

[0021] This invention also provides methods of associating a phenotype trait to a genotype in maize plants by identifying a set of one or more distinct phenotypic traits characterizing the maize plants. DNA or mRNA in tissue from at least two maize plants having allelic DNA is assayed to identify the presence or absence of a set of distinct polymorphisms. Associations between the set of polymorphisms and set of phenotypic traits are identified where the set of polymorphisms comprises at least one, more preferably at least 10, polymorphisms linked to a polymorphic locus of the invention, e.g. at least 10 polymorphisms linked to mapped polymorphisms, e.g. as identified in Table 3. In a more preferred aspect traits are associated to genotypes in a segregating population of maize plants having allelic DNA in loci of a chromosome which confers a phenotypic effect on a trait of interest and where a polymorphism is located in such loci and where the degree of association among the polymorphisms and between the polymorphisms and the traits permits determination of a linear order of the polymorphism and the trait loci. In such methods at least 5 polymorphisms are linked to loci permitting disequilibrium mapping of the loci.

[0022] This invention also provides methods of identifying genes associated with a trait of interest by identifying linkage of at least one polymorphism to a trait of interest where the polymorphism is linked to a polymorphic locus of the invention, identifying a genomic clone containing the locus and identifying genes linked to the locus. In preferred aspects of the invention such association is useful in marker assisted breeding an/or marker assisted selection.

[0023] This invention further provides methods for improving heterosis in hybrid maize. In such methods associations are developed between a plurality of polymorphisms which are linked to polymorphic loci of the invention and traits in more than two inbred lines of maize. Two of such inbred lines having complementary heterotic groups which are predicted to improve heterosis are selected for breeding.

[0024] This invention also provides methods to screen for traits by interrogating a collection of SNPs at an average density of less than 10 cM on a genetic map of maize. The presence or absence of a SNP linked to a polymorphic locus of the invention is correlated such traits. In another aspect of the invention the polymorphisms are used to identify haplotypes which are allelic segments of genomic DNA characterized by at least two polymorphisms in linkage disequilibrium and wherein said polymorphisms are in a genomic windows of not more than 10 centimorgans in length, e.g. not more than about 8 centimorgans or smaller windows, e.g. in the range of say 1 to 5 centimorgans. Especially useful methods of the invention use such polymorphisms to identify a plurality of haplotypes in a series of adjacent genomic windows in each corn chromosome, e.g. providing essentially full genome coverage with such windows. With a sufficiently large and diverse breeding population of corns, it is possible to identify a high quantity of haplotypes in each window, thus providing allelic DNA that can be associated with one or more traits to allow focused marker assisted breeding. Thus, an aspect of the corn analysis of this invention further comprises the steps of characterizing one or more traits for said population of corn plants and associating said traits with said allelic SNP or Indel polymorphisms, preferably organized to define haplotypes. Such traits include yield, lodging, maturity, plant height and disease resistance, e.g. resistance to corn cyst nematode, corn rust, brown stem rot, sudden death syndrome and the like. To facilitate breeding it is useful to compute a value for each trait or a value for a combination of traits, e.g. a multiple trait index. The weight allocated to various traits in a multiple trait index can vary depending of the objectives of breeding. For instance, if yield is a key objective, the yield value may be weighted at 50 to 80%, maturity, lodging, plant height or disease resistance may be weighted at lower percentages in a multiple trait index.

[0025] Another aspect of this invention provides a method of genotyping further comprising identifying one or more phenotypic traits for at least two corn lines and determining associations between said traits and polymorphisms.

[0026] Still another aspect of this invention is directed to the use of a selected set of polymorphic corn DNA sequences in corn breeding, e.g. by selecting a corn line on the basis of its genotype at a polymorphic locus has a sequence within the selected set of polymorphic corn DNA sequences

[0027] Another aspect of this invention provides a method of breeding corn plants comprising the steps of:

[0028] (a) identifying trait values for at least two haplotypes in at least two genomic windows of up to 10 centimorgans for a breeding population of at least two corn plants;

[0029] (b) breeding two corn plants in said breeding population to produce a population of progeny seed;

[0030] (c) identifying the allelic state of polymorphisms in each of said windows in said progeny seed to determine the presence of said haplotypes; and

[0031] (c) selecting progeny seed having the higher trait values identified for determined haplotypes in said progeny seed.

In aspects of the breeding method trait values are identified for at least two haplotypes in each adjacent genomic window over essentially the entirety of each chromosome. In another useful aspect of the method progeny seed is selected for a higher trait value for yield for a haplotype in a genomic window of up to 10 centimorgans in each chromosome. In another aspect of the invention, the breeding method is directed to increased yield, where the trait value is for the yield trait, where trait values are ranked for haplotypes in each window, and where a progeny seed is selected which has a trait value for yield in a window that is higher than the mean trait value for yield in said window. In certain aspects of the breeding methods the haplotypes are defined using the polymorphisms identified in Table 1 or are defined as being in the set of DNA sequences that comprises all of the DNA sequences of SEQ ID NO: 1 through SEQ ID NO:10,373, or as being in linkage disequilibrium with one of those polymorphisms.

[0032] The methods of this invention characterized by marker identification can be carried out using oligonucleotide primers and oligonucleotides detectors. Thus, another aspect of the invention is directed to such oligonucleotides, e.g. sets of oligonucleotides functional with a marker. More particularly, this invention provides a pair of isolated nucleic acid molecules comprising oligonucleotide primers for amplifying corn DNA to identify the presence of a polymorphism in the DNA, e.g. oligonucleotides comprising at least 12 consecutive nucleotides which are at least 90% identical to ends of a segment of DNA of the same number of nucleotides in opposite strands of a polymorphic corn DNA locus having a sequence which is at least 90% identical to a sequence in a subset of polymorphic corn DNA sequences disclosed herein (or a complement thereof). More preferably such a pair of oligonucleotides comprise at least 15 consecutive nucleotides, or more, e.g. at least 20 consecutive nucleotides. More particularly, when hybridization to a SNP is contemplated for marker assay for identifying a polymorphism in corn DNA, a set will comprise four oligonucleotides, e.g. a pair of isolated nucleic acid molecules for amplifying DNA which can hybridize to DNA which flanks a polymorphism and a pair of detector nucleic acid molecules which are useful for detecting each nucleotide in a single nucleotide polymorphism in a segment of the amplified DNA. In preferred aspects of the invention such detector nucleic acid molecules comprise at least 12 nucleotide bases and a detectable label, or at least 15 nucleotide bases, and the sequence of the detector nucleic acid molecules is identical except for the nucleotide polymorphism (e.g. SNP or Indel) and is at least 95 percent identical to a sequence of the same number of consecutive nucleotides in either strand of the segment of polymorphic corn DNA locus containing the polymorphism.

### BRIEF DESCRIPTION OF THE DRAWINGS

[0033] FIG. 1 is a genetic map of maize showing the density of mapped polymorphisms of this invention.

[0034] FIG. 2 is an allelogram illustrating results of a genotyping assay.

### DEFINITIONS

### As used herein certain terms are defined as follows.

[0035] An “allele” means an alternative sequence at a particular locus; the length of an allele can be as small as 1 nucleotide base, but is typically larger. Allelic sequence can be amino acid sequence or nucleic acid sequence. A “locus” is a short sequence that is usually unique and usually found at one particular location in the genome by a point of reference, e.g. a short DNA sequence that is a gene, or part of a gene or intergenic region. A locus of this invention can be a unique PCR product at a particular location in the genome. The loci of this invention comprise one or more polymorphisms i.e. alternative alleles present in some individuals. “Genotype” means the specification of an allelic composition at one or more loci within an individual organism. In the case of diploid organisms, there are two alleles at each locus; a diploid genotype is said to be homozygous when the alleles are the same, and heterozygous when the alleles are different. “Haplotype” means an allelic segment of genomic DNA that tends to be inherited as a unit; such haplotypes can be characterized by two or more polymorphisms and can be defined by a size of not greater than 10 centimorgans, e.g. not greater 8 centimorgans. With higher precision, from higher density of polymorphisms, haplotypes can be characterized by genomic windows in the range of 1-5 centimorgans.

[0036] “Consensus sequence” means a constructed DNA sequence which identifies SNP and Indel polymorphisms in alleles at a locus. Consensus sequence can be based on either strand of DNA at the locus and states the nucleotide base of either one of each SNP in the locus and the nucleotide bases of all Indels in the locus. Thus, although a consensus sequence may not be a copy of an actual DNA sequence, a consensus sequence is useful for precisely designing primers and probes for actual polymorphisms in the locus.

[0037] “Phenotype” means the detectable characteristics of a cell or organism which are a manifestation of gene expression.

[0038] “Marker” mean polymorphic sequence. A “polymorphism” is a variation among individuals in sequence, particularly in DNA sequence. Useful polymorphisms include a single nucleotide polymorphisms (SNPs), insertions or deletions in DNA sequence (Indels) and simple sequence repeats of DNA sequence (SSRs).

[0039] “Marker Assay” means an method for detecting a polymorphism at a particular locus using a particular method, e.g. phenotype (such as seed color, flower color, or other visually detectable trait), restriction fragment length polymorphism (RFLP), single base extension, electrophoresis, sequence alignment, allelic specific oligonucleotide hybridization (ASO), RAPID, etc. Preferred marker assays include single base extension as disclosed in U.S. Pat. No. 6,013,431 and allelic discrimination where endonuclease activity releases a reporter dye from a hybridization probe as disclosed in U.S. Pat. No. 5,538,848 the disclosures of both of which are incorporated herein by reference.

[0040] “Linkage” refers to relative frequency at which types of gametes are produced in a cross. For example, if locus A has genes “A” or “a” and locus B has genes “B” or “b” and a cross between parent I with AABB and parent B with aabb will produce four possible gametes where the genes are segregated into AB, Ab, aB and ab. The null expectation is that there will be independent equal segregation into each of the four possible genotypes, i.e. with no linkage ¼ of the gametes will of each genotype. Segregation of gametes into a genotypes differing from ¼ are attributed to linkage.

[0041] “Linkage disequilibrium” is defined in the context of the relative frequency of gamete types in a population of many individuals in a single generation. If the frequency of allele A is p, a is p′, B is q and b is q′, then the expected frequency (with no linkage disequilibrium) of genotype AB is pq, Ab is pq′, aB is p′q and ab is p′q′. Any deviation from the expected frequency is called linkage disequilibrium. Two loci are said to be “genetically linked” when they are in linkage disequilibrium.

[0042] “Quantitative Trait Locus (QTL)” means a locus that controls to some degree numerically representable traits that are usually continuously distributed.

[0043] Nucleic acid molecules or fragments thereof of the present invention are capable of hybridizing to other nucleic acid molecules under certain circumstances. As used herein, two nucleic acid molecules are said to be capable of hybridizing to one another if the two molecules are capable of forming an anti-parallel, double-stranded nucleic acid structure. A nucleic acid molecule is said to be the “complement” of another nucleic acid molecule if they exhibit “complete complementarity” i.e. each nucleotide in one sequence is complementary to its base pairing partner nucleotide in another sequence. Two molecules are said to be “minimally complementary” if they can hybridize to one another with sufficient stability to permit them to remain annealed to one another under at least conventional “low-stringency” conditions. Similarly, the molecules are said to be “complementary” if they can hybridize to one another with sufficient stability to permit them to remain annealed to one another under conventional “high-stringency” conditions. Nucleic acid molecules which hybridize to other nucleic acid molecules, e.g. at least under low stringency conditions are said to be “hybridizable cognates” of the other nucleic acid molecules. Conventional stringency conditions are described by Sambrook et al., Molecular Cloning, A Laboratory Manual, 2nd Ed., Cold Spring Harbor Press, Cold Spring Harbor, N.Y. (1989) and by Haymes et al., Nucleic Acid Hybridization, A Practical Approach, IRL Press, Washington, D.C. (1985), each of which is incorporated herein by reference. Departures from complete complementarity are therefore permissible, as long as such departures do not completely preclude the capacity of the molecules to form a double-stranded structure. Thus, in order for a nucleic acid molecule to serve as a primer or probe it need only be sufficiently complementary in sequence to be able to form a stable double-stranded structure under the particular solvent and salt concentrations employed.

[0044] Appropriate stringency conditions which promote DNA hybridization, for example, 6.0× sodium chloride/sodium citrate (SSC) at about 45° C., followed by a wash of 2.0×SSC at 50° C., are known to those skilled in the art or can be found in Current Protocols in Molecular Biology, John Wiley & Sons, N.Y. (1989), 6.3.1-6.3.6, incorporated herein by reference. For example, the salt concentration in the wash step can be selected from a low stringency of about 2.0×SSC at 50° C. to a high stringency of about 0.2×SSC at 50° C. In addition, the temperature in the wash step can be increased from low stringency conditions at room temperature, about 22° C., to high stringency conditions at about 65° C. Both temperature and salt may be varied, or either the temperature or the salt concentration may be held constant while the other variable is changed.

[0045] In a preferred embodiment, a nucleic acid molecule of the present invention will specifically hybridize to one strand of a segment of maize DNA having a nucleic acid sequence as set forth in SEQ ID NO: 1 through SEQ ID NO: 10373 under moderately stringent conditions, for example at about 2.0×SSC and about 65° C., more preferably under high stringency conditions such as 0.2×SSC and about 65° C.

[0046] As used herein “sequence identity” refers to the extent to which two optimally aligned polynucleotide or peptide sequences are invariant throughout a window of alignment of components, e.g. nucleotides or amino acids. An “identity fraction” for aligned segments of a test sequence and a reference sequence is the number of identical components which are shared by the two aligned sequences divided by the total number of components in reference sequence segment, i.e. the entire reference sequence or a smaller defined part of the reference sequence. “Percent identity” is the identity fraction times 100.

### DETAILED DESCRIPTION OF PREFERRED EMBODIMENTS

### A. Nucleic Acid Molecules—Loci, Primers and Probes

[0047] The maize loci of this invention comprise DNA sequence which comprises at least 20 consecutive nucleotides and includes or is adjacent to one or more polymorphisms identified in Table 1. Such maize loci have a nucleic acid sequence having at least 90% sequence identity, more preferably at least 95% or even more preferably for some alleles at least 98% and in many cases at least 99% sequence identity, to the sequence of the same number of nucleotides in either strand of a segment of maize DNA which includes or is adjacent to the polymorphism. The nucleotide sequence of one strand of such a segment of maize DNA may be found in a sequence in the group consisting of SEQ ID NO: 1 through SEQ ID NO: 10373. It is understood by the very nature of polymorphisms that for at least some alleles there will be no identity to the polymorphism, per se. Thus, sequence identity can be determined for sequence that is exclusive of the polymorphism sequence. The polymorphisms in each locus are identified more particularly in Table 1.

[0048] For many genotyping applications it is useful to employ as markers polymorphisms from more than one locus. Thus, one aspect of the invention provides a collection of different loci. The number of loci in such a collection can vary but will be a finite number, e.g. as few as 2 or 5 or 10 or 25 loci or more, for instance up to 40 or 75 or 100 or more loci.

[0049] Another aspect of the invention provides nucleic acid molecules which are capable of hybridizing to the polymorphic maize loci of this invention. In certain embodiments of the invention, e.g. which provide PCR primers, such molecules comprises at least 15 nucleotide bases. Molecules useful as primers can hybridize under high stringency conditions to a one of the strands of a segment of DNA in a polymorphic locus of this invention. Primers for amplifying DNA are provided in pairs, i.e. a forward primer and a reverse primer. One primer will be complementary to one strand of DNA in the locus and the other primer will be complementary to the other strand of DNA in the locus, i.e. the sequence of a primer is preferably at least 90%, more preferably at least 95%, identical to a sequence of the same number of nucleotides in one of the strands. It is understood that such primers can hybridize to sequence in the locus which is distant from the polymorphism, e.g. at least 5, 10, 20, 50 or up to about 100 nucleotide bases away from the polymorphism. Design of a primer of this invention will depend on factors well known in the art, e.g. avoidance or repetitive sequence.

[0050] Another aspect of the nucleic acid molecules of this invention are hybridization probes for polymorphism assays. In one aspect of the invention such probes are oligonucleotides comprising at least 12 nucleotide bases and a detectable label. The purpose of such a molecule is to hybridize, e.g. under high stringency conditions, to one strand of DNA in a segment of nucleotide bases which includes or is adjacent to the polymorphism of interest in an amplified part of a polymorphic locus. Such oligonucleotides are preferably at least 90%, more preferably at least 95%, identical to the sequence of a segment of the same number of nucleotides in one strand of maize DNA in a polymorphic locus. The detectable label can be a radioactive element or a dye. In preferred aspects of the invention, the hybridization probe further comprises a fluorescent label and a quencher, e.g. for use hybridization probe assays of the type known as Taqman assays, available from AB Biosystems.

[0051] For assays where the molecule is designed to hybridize adjacent to a polymorphism which is detected by single base extension, e.g. of a labeled dideoxynucleotide, such molecules can comprise at least 15, more preferably at least 16 or 17, nucleotide bases in a sequence which is at least 90 percent, preferably at least 95%, identical to a sequence of the same number of consecutive nucleotides in either strand of a segment of polymorphic maize DNA. Oligonucleotides for single base extension assays are available from Orchid Bioystems.

[0052] Such primer and probe molecules are generally provided in groups of two primers and one or more probes for use in genotyping assays. Moreover, it is often desirable to conduct a plurality of genotyping assays for a plurality of polymorphisms. Thus, this invention also provides collections of nucleic acid molecules, e.g. in sets which characterize a plurality of polymorphisms.

### B. Identifying Polymorphisms

[0053] Polymorphisms in a genome can be determined by comparing cDNA sequence from different lines. While the detection of polymorphisms by comparing cDNA sequence is relatively convenient, evaluation of cDNA sequence allows no information about the position of introns in the corresponding genomic DNA. Moreover, polymorphisms in non-coding sequence cannot be identified from cDNA. This can be a disadvantage, e.g. when using cDNA-derived polymorphisms as markers for genotyping of genomic DNA. More efficient genotyping assays can be designed if the scope of polymorphisms includes those present in non-coding unique sequence.

[0054] Genomic DNA sequence is more useful than cDNA for identifying and detecting polymorphisms. Polymorphisms in a genome can be determined by comparing genomic DNA sequence from different lines. However, the genomic DNA of higher eukaryotes typically contain a large fraction of repetitive sequence and transposons. Genomic DNA can be more efficiently sequenced if the coding/unique fraction is enriched by subtracting or eliminating the repetitive sequence.

[0055] There are a number of strategies that can be employed to enrich for coding/unique sequence. Examples of these include the use of enzymes which are sensitive to cytosine methylation, the use of the McrBC endonuclease to cleave repetitive sequence, and the printing of microarrays of genomic libraries which are then hybridized with repetitive sequence probes.

a. Methylated Cytosine Sensitive Enzymes:

[0056] The DNA of higher eukaryotes tends to be very heavily methylated, however it is not uniformly methylated. In fact, repetitive sequence is much more highly methylated than coding sequence. Coding/unique sequence can therefore be enriched by exploiting this difference in methylation pattern. See U.S. Pat. No. 6,017,704 for methods of mapping and assessment of DNA methylation patterns in CG islands. Some restriction endonucleases are sensitive to the presence of methylated cytosine residues in their recognition site. Such methylation sensitive restriction endonucleases may not cleave at their recognition site if the cytosine residue in either an overlapping 5′-CG-3′ or an overlapping 5′-CNG-3′ is methylated. Methylation sensitive restriction endonucleases include the 4 base cutters: Aci I, Hha I, HinP1 I, HpaII and Msp I, the 6 base cutters: Apa I, Age 1, Bsr F I, BssH II, Eag I, Eae I, MspM II, Nar I, Pst I, Pvu I, Sac II, Sma I, Stu I and Xho I and the 8 base cutter: Not I. For example, DNA cleavage at the site CTGCAG by Pst I is inhibited when the C residues are methylated. In order to enrich for coding/unique sequence maize libraries can be constructed from genomic DNA digested with Pst I (or other methylation sensitive enzymes), and size fractionated by agarose gel electrophoresis. Regions of the genome which are heavily methylated (i.e., regions with a high fraction of repetitive sequences) have a higher number of Pst I sites that are methylated. Therefore, most of the Pst I sites in repetitive DNA will not be cleaved during Pst I digestion, and the repetitive sequence will tend to consist mostly of high molecular weight, uncleaved DNA. In contrast, regions of the genome that are not heavily methylated (i.e. regions containing a large fraction of coding/unique sequence) should contain a large fraction of unmethylated Pst I sites which will be cleaved during digestion, producing relatively smaller fragments. When digested DNA is electrophoresed through agarose, relatively larger fragments from heavily methylated, non-coding DNA regions are separated from relatively smaller fragments derived from coding/unique sequence. Coding region-enriched DNA fragments (commonly between 500-3000 bp) can be excised from the gel, purified and ligated into a Pst I digested vector, e.g. pUC18. The ligation products are transformed by electroporation into a plurality of suitable bacterial hosts, e.g. DH10B, to produce a library of clones enriched for coding/unique sequence. Individual clones can be sequenced to provide the sequence of the inserted coding region DNA.

[0057] In order to reduce the sequence complexity of any particular library, the DNA in the range 500 to 10,000 bp can be further size-fractionated by incrementally excising fragments from the gel. Useful ranges of size-fractionated fragments include 500-600 bp, 600-700 bp, 700-800 bp, 800-900 bp, 900-1100 bp, 1100-1500 bp, 1500-2000 bp, 2000-2500 bp and 2500-3000 bp. A series of size-fractionated reduced representation libraries are constructed by ligating purified DNA from each size fraction separately to the vector. A small sample of clones from each library (for example about 400 clones) is sequenced to determine the fraction of repetitive sequence present in each particular library. Comparison of reduced representation libraries prepared from a variety of different maize lines indicates that many fractions contain less than 10% repetitive sequence and some fractions contain more than 20% repetitive sequence. Preferred reduced representation libraries contain less than 20% repetitive sequence, more preferably less than 15% repetitive sequence and even more preferably less than 10% repetitive sequence. By determining the fraction of repetitive sequence throughout the whole series of size fractionated reduced representation libraries, the libraries with the smallest fraction of repetitive sequence can be selected for deep sequencing (usually 10,000 clones). Since the purpose of obtaining sequence is for polymorphism detection, the equivalent libraries representing the same size fraction for both maize strains are sequenced. Another advantage of using reduced representation libraries for polymorphism detection is that it increases the probability of recovering the equivalent sequences from both maize lines. Polymorphisms can only be detected if the equivalent sequence is available from both lines.

[0058] b. McrBC Endonuclease

[0059] An alternative method for enriching coding region DNA sequence enrichment uses McrBC endonuclease restriction. As a defense against invading foreign DNA from phage/viruses, E. coli contain endonucleases, e.g. McrBC endonuclease, which cleave methylated cytosine-containing DNA. This feature can be exploited to enrich DNA with regions of the genome which are not heavily methylated, e.g. the presumed coding region DNA. Reduced representation libraries can be constructed using genomic DNA fragments which are cleaved by physical shearing or digestion with any restriction enzyme. DNA fragments are transformed into an E. coli host that contains an McrBC endonuclease, e.g. E. coli strain JM107 or DH5a. When the bacterial host is transformed with a DNA fragment which contains methylated DNA region, the McrBC endonuclease will cleave the inserted DNA and the plasmid will not be propagated. When the bacterial host is transformed with a DNA fragment that is not methylated, the plasmid will be propagated, and a colony will grow on the agar plate allowing the clone to be sequenced. A small sample of clones from libraries generated in this manner are sampled, and the fraction of repetitive sequenced determined. McrBC endonuclease can also be used with methylated cytosine sensitive endonuclease to further reduce the fraction of repetitive sequence in libraries that are not suitable for sequencing, e.g. sequences that contain more than 15% repetitive sequence.

c. Microarraying Reduced Representation Libraries

[0060] Another method to enrich for coding/unique sequence is to construct reduced representation libraries (using methylation sensitive or non-methylation sensitive enzymes), print microarrays of the library on nylon membrane, and hybridize with probes made from repetitive elements known to be present in the library. The repetitive sequence elements are identified, and the library is re-arrayed by picking only the negative clones. This process is performed by randomly picking clones from a reduced representation library into 384-well plates and culturing them. Micro-arrays can be prepared by printing clone DNA from the collection of 384-well plates in determined patterns on supports, such as glass supports or nylon membranes. The fabrication of microarrays comprising thousands of distinct clones, e.g. up to about 25,000 clones or more, are well known in the art. See for instance, U.S. Pat. No. 5,807,522 for methods for fabricating microarrays of spotted polynucleotides at high density. A small sample of clones from the reduced representation library, e.g. about 400 clones, can be sequenced to identify repetitive sequence elements. Clones containing the repetitive sequences are retrieved, and the clones used to make radioactive probes which are hybridized on the nylon arrays. Radioactive isotope label elements include ³²P, ³³P, ³⁵S, ¹²⁵I, and the like with ³³P being especially preferred. The arrays are analyzed for hybridization by detecting radiation, e.g. using a Fuji Phosphoimager™ imaging screen. After an appropriate exposure time the array image is read as a digital file representing the hybridization intensity from each array element which is proportional to amount of labeled repeat sequence. This radiation image identifies all the clones on the array which correspond to repetitive sequence clones, and also identifies the 384-well plate and well location of each repetitive sequence clone. With this information, all the non-repetitive sequence clones can be picked from the original plates and relocated onto a new set of plates which do not contain repetitive sequence clones. This method can be used to lower the fraction of repetitive sequence in reduced representation libraries from approximately 25% to about 1-2%.

### C. Detecting Polymorphisms

[0061] Polymorphisms in DNA sequences can be detected by a variety of effective methods well known in the art including those disclosed in U.S. Pat. Nos. 5,468,613 and 5,217,863; 5,210,015; 5,876,930; 6,030,787 6,004,744; 6,013,431; 5,595,890; 5,762,876; 5,945,283; 5,468,613; 6,090,558; 5,800,944 and 5,616,464, all of which are incorporated herein by reference in their entireties. For instance, polymorphisms in DNA sequences can be detected by hybridization to allele-specific oligonucleotide (ASO) probes as disclosed in U.S. Pat. Nos. 5,468,613 and 5,217,863. The nucleotide sequence of an ASO probe is designed to form either a perfectly matched hybrid or to contain a mismatched base pair at the site of the variable nucleotide residues. The distinction between a matched and a mismatched hybrid is based on differences in the thermal stability of the hybrids in the conditions used during hybridization or washing, differences in the stability of the hybrids analyzed by denaturing gradient electrophoresis or chemical cleavage at the site of the mismatch.

[0062] U.S. Pat. No. 5,468,613 discloses allele specific oligonucleotide hybridizations where single or multiple nucleotide variations in nucleic acid sequence can be detected in nucleic acids by a process in which the sequence containing the nucleotide variation is amplified, spotted on a membrane and treated with a labeled sequence-specific oligonucleotide probe.

[0063] Length variation in DNA nucleotide sequence repeats such as microsatellites, simple sequence repeats (SSRs) and short tandem repeats (STRs) can be detected by mass spectroscopy methods as disclosed in U.S. Pat. No. 6,090,558 The advantages of using mass spectrometry include a dramatic increase in both the speed of analysis (a few seconds per sample) and the accuracy of direct mass measurements.

[0064] Target nucleic acid sequence can also be detected by probe ligation methods as disclosed in U.S. Pat. No. 5,800,944 where sequence of interest is amplified and hybridized to probes followed by ligation to detect a labeled part of the probe.

[0065] Target nucleic acid sequence can also be detected by probe linking methods as disclosed in U.S. Pat. No. 5,616,464 employing at least one pair of probes having sequences homologous to adjacent portions of the target nucleic acid sequence and having side chains which non-covalently bind to form a stem upon base pairing of said probes to said target nucleic acid sequence. At least one of the side chains has a photoactivatable group which can form a covalent cross-link with the other side chain member of the stem.

a. Primer Base Extension Assay

[0066] A preferred method for detecting SNPs and Indels is a labeled base extension method as disclosed in U.S. Pat. Nos. 6,004,744; 6,013,431; 5,595,890; 5,762,876; and 5,945,283. These methods are based on primer extension and incorporation of detectable nucleoside triphosphates. The primer is designed to anneal to the sequence immediately adjacent to the variable nucleotide which can be can be detected after incorporation of as few as one labeled nucleoside triphosphate. The method uses three synthetic oligonucleotides. Two of the oligonucleotides serve as PCR primers and are complementary to sequence of the locus of maize genomic DNA which flanks a region containing the polymorphism to be assayed. Using maize genomic DNA as a template the primer oligonucleotides are used in PCR to produce sufficient copies of the region of the locus containing the polymorphisms so that allelic discrimination can be conducted. Following amplification of the region of the maize genome containing the polymorphism, the PCR product is mixed with the third oligonucleotide (called an extension primer) which is designed to hybridize to the amplified DNA immediately adjacent to the polymorphism in the presence of DNA polymerase and two differentially labeled dideoxynucleosidetriphosphates. If the polymorphism is present on the template, one of the labeled dideoxynucleosidetriphosphates can be added to the primer in a single base chain extension. The allele present is then inferred by determining which of the two differential labels was added to the extension primer. Homozygous samples will result in only one of the two labeled bases being incorporated and thus only one of the two labels will be detected. Heterozygous samples have both alleles present, and will thus direct incorporation of both labels (into different molecules of the extension primer) and thus both labels will be detected.

[0067] To design primers for maize polymorphism detection by single base extension the sequence of the locus is first masked to prevent design of any of the three primers to sites that match known maize repetitive elements (e.g., transposons) or are of very low sequence complexity (di- or tri-nucleotide repeat sequences). Design of primers to such repetitive elements will result in assays of low specificity, through amplification of multiple loci or annealing of the extension primer to multiple sites.

[0068] PCR primers are preferably designed (a) to have an optimal annealing temperature for PCR in the range of 55 to 60° C., (b) to have lengths in the range of 18 to 25 bases, and (c) to produce a product in the size range 75 to 200 base pairs with the polymorphism to be assayed located at least 25 bases from the 3′ end of each primer. The extension primers must be chosen to contain minimal self- or inter-primer complementarity, or the efficiency and/or specificity of the PCR reaction will be reduced.

[0069] The extension primer is designed to anneal immediately adjacent to the polymorphism, such that the 3′ end of the annealed extension primer immediately abuts the polymorphic site. The extension primer can lie either to the 5′ or 3′ side of the polymorphism; however, if it is designed to lie on the 3′ side, then the sequence of the extension primer must match the reverse complement of the sequence adjacent to the polymorphism. The extension primer must contain no self-complementarity that will enable self-annealing, or the incorporation of the labeled ddNTPs may result from self-priming of the extension primer, obscuring the results of polymorphism-directed incorporation. If the nature of the sequence adjacent to the polymorphic site makes it impossible to design an extension primer that is fully non-self-complementary, the extent of self-annealing may be limited by replacing one or two bases of the extension primer with abasic sites, as long as the abasic sites are not introduced into the three 3′ most positions.

[0070] The labeled ddNTPs chosen for inclusion in the reaction are determined by the nature of the polymorphism, and whether the extension primer lies those that match the first base of the polymorphism, if the extension primer lies 5′ or 3′ of the polymorphism. If the extension primer is located 5′ of the polymorphism, then the ddNTPs are those of the polymorphism itself For example, in the case of an AG polymorphism, the ddNTPs would be ddATP-label(1) and ddGTP-label(2). If the extension primer lies 3′ of the polymorphic site, then the ddNTPs are the complements of the bases involved in the polymorphism; in the present example, ddTTP-label(1) and ddCTP-label(2). Labels can be chosen from among a wide variety of chemical moieties, including affinity or immunological labels, fluorescent dyes and mass tags. In the most common embodiment of the process, affinity and immunological labels are used, followed by appropriate detection reagents. In the present example, ddATP-FITC and ddGTP-biotin might be employed, followed by incubation with anti-FITC-antibody conjugated to the enzyme horseradish peroxidase (HRP-anti-FITC), and streptavidin conjugated to the enzyme alkaline phosphatase (AP-streptavidin).

b. Labeled Probe Degradation Assay

[0071] In another preferred method for detecting polymorphisms SNPs and Indels can be detected by methods disclosed in U.S. Pat. Nos. 5,210,015; 5,876,930 and 6,030,787 in which an oligonucleotide probe having a 5′ fluorescent reporter dye and a 3′quencher dye covalently linked to the 5′ and 3′ ends of the probe. When the probe is intact, the proximity of the reporter dye to the quencher dye results in the suppression of the reporter fluorescence, e.g. by Forster-type energy transfer. During PCR forward and reverse primers hybridize to a specific sequence of the target DNA flanking a polymorphism. The hybridization probe hybridizes to polymorphism-containing sequence within the amplified PCR product. In the subsequent PCR cycle DNA polymerase with 5′→3′ exonuclease activity cleaves the probe and separates the reporter dye from the quencher dye resulting in increased fluorescence of the reporter. A useful assay is available from AB Biosystems as the Taqman® assay which employs four synthetic oligonucleotides in a single reaction that concurrently amplifies the maize genomic DNA, discriminates between the alleles present, and directly provides a signal for discrimination and detection. Two of the four oligonucleotides serve as PCR primers and generate a PCR product encompassing the polymorphism to be detected. Two others are allele-specific fluorescence-resonance-energy-transfer (FRET) probes. FRET probes incorporate a fluorophore and a quencher molecule in close proximity so that the fluorescence of the fluorophore is quenched. The signal from a FRET probes is generated by degradation of the FRET oligonucleotide, so that the fluorophore is released from proximity to the quencher, and is thus able to emit light when excited at an appropriate wavelength. In the assay, two FRET probes bearing different fluorescent reporter dyes are used, where a unique dye is incorporated into an oligonucleotide that can anneal with high specificity to only one of the two alleles. Useful reporter dyes include 6-carboxy-4,7,2′,7′-tetrachlorofluorecein (TET), (VIC) and 6-carboxyfluorescein phosphoramidite (FAM). A useful quencher is 6-carboxy-N,N,N′,N′-tetramethylrhodamine (TAMRA). Additionally, the 3′ end of each FRET probe is chemically blocked so that it can not act as a PCR primer. During the assay, maize genomic DNA is added to a buffer containing the two PCR primers and two FRET probes. Also present is a third fluorophore used as a passive reference, e.g., rhodamine X (ROX) to aid in later normalization of the relevant fluorescence values (correcting for volumetric errors in reaction assembly). Amplification of the genomic DNA is initiated. During each cycle of the PCR, the FRET probes anneal in an allele-specific manner to the template DNA molecules. Annealed (but not non-annealed) FRET probes are degraded by TAQ DNA polymerase as the enzyme encounters the 5′ end of the annealed probe, thus releasing the fluorophore from proximity to its quencher. Following the PCR reaction, the fluorescence of each of the two fluorescers, as well as that of the passive reference, is determined fluorometrically. The normalized intensity of fluorescence for each of the two dyes will be proportional to the amounts of each allele initially present in the sample, and thus the genotype of the sample can be inferred.

[0072] To design primers and probes for the assay the locus sequence is first masked to prevent design of any of the three primers to sites that match known maize repetitive elements (e.g., transposons) or are of very low sequence complexity (di- or tri-nucleotide repeat sequences). Design of primers to such repetitive elements will result in assays of low specificity, through amplification of multiple loci or annealing of the FRET probes to multiple sites.

[0073] PCR primers are designed (a) to have a length in the size range of 18 to 25 bases and matching sequences in the polymorphic locus, (b) to have a calculated melting temperature in the range of 57 to 60° C., e.g. corresponding to an optimal PCR annealing temperature of 52 to 55° C., (c) to produce a product which includes the polymorphic site and has a length in the size range of 75 to 250 base pairs. The PCR primers are preferably located on the locus so that the polymorphic site is at least one base away from the 3′ end of each PCR primer. The PCR primers must not be contain regions that are extensively self- or inter-complementary.

[0074] FRET probes are designed to span the sequence of the polymorphic site, preferably with the polymorphism located in the 3′ most ⅔ of the oligonucleotide. In the preferred embodiment, the FRET probes will have incorporated at their 3′ end a chemical moiety which, when the probe is annealed to the template DNA, binds to the minor groove of the DNA, thus enhancing the stability of the probe-template complex. The probes should have a length in the range of 12 to 17 bases, and with the 3′MGB, have a calculated melting temperature of 5 to 7° C. above that of the PCR primers. Probe design is disclosed in U.S. Pat. Nos. 5,538,848; 6,084,102 and 6,127,121.

### D. Use Of Polymorphisms To Establish Marker/Trait Associations

[0075] The polymorphisms in the loci of this invention can be used in marker/trait associations which are inferred from statistical analysis of genotypes and phenotypes of the members of a population. These members may be individual organisms, e.g. maize, families of closely related individuals, inbred lines, dihaploids or other groups of closely related individuals. Such maize groups are referred to as “lines”, indicating line of descent. The population may be descended from a single cross between two individuals or two lines (e.g. a mapping population) or it may consist of individuals with many lines of descent. Each individual or line is characterized by a single or average trait phenotype and by the genotypes at one or more marker loci.

[0076] Several types of statistical analysis can be used to infer marker/trait association from the phenotype/genotype data, but a basic idea is to detect markers, i.e. polymorphisms, for which alternative genotypes have significantly different average phenotypes. For example, if a given marker locus A has three alternative genotypes (AA, Aa and aa), and if those three classes of individuals have significantly different phenotypes, then one infers that locus A is associated with the trait. The significance of differences in phenotype may be tested by several types of standard statistical tests such as linear regression of marker genotypes on phenotype or analysis of variance (ANOVA). Commercially available, statistical software packages commonly used to do this type of analysis include SAS Enterprise Miner (SAS Institute Inc., Cary, N.C.) and Splus (Insightful Corporation. Cambridge, Mass.). When many markers are tested simultaneously, an adjustment such as Bonferonni correction is made in the level of significance required to declare an association.

[0077] Often the goal of an association study is not simply to detect marker/trait associations, but to estimate the location of genes affecting the trait directly (i.e. QTLs) relative to the marker locations. In a simple approach to this goal, one makes a comparison among marker loci of the magnitude of difference among alternative genotypes or the level of significance of that difference. Trait genes are inferred to be located nearest the marker(s) that have the greatest associated genotypic difference. In a more complex analysis, such as interval mapping (Lander and Botstein, Genetics 121:185-199 (1989), each of many positions along the genetic map (say at 1 cM intervals) is tested for the likelihood that a QTL is located at that position. The genotype/phenotype data are used to calculate for each test position a LOD score (log of likelihood ratio). When the LOD score exceeds a critical threshold value, there is significant evidence for the location of a QTL at that position on the genetic map (which will fall between two particular marker loci).

a. Linkage Disequilibrium Mapping and Association Studies

[0078] Another approach to determining trait gene location is to analyze trait-marker associations in a population within which individuals differ at both trait and marker loci. Certain marker alleles may be associated with certain trait locus alleles in this population due to population genetic process such as the unique origin of mutations, founder events, random drift and population structure. This association is referred to as linkage disequilibrium. In linkage disequilibrium mapping, one compares the trait values of individuals with different genotypes at a marker locus. Typically, a significant trait difference indicates close proximity between marker locus and one or more trait loci. If the marker density is appropriately high and the linkage disequilibrium occurs only between very closely linked sites on a chromosome, the location of trait loci can be very precise.

[0079] A specific type of linkage disequilibrium mapping is known as association studies. This approach makes use of markers within candidate genes, which are genes that are thought to be functionally involved in development of the trait because of information such as biochemistry, physiology, transcriptional profiling and reverse genetic experiments in model organisms. In association studies, markers within candidate genes are tested for association with trait variation. If linkage disequilibrium in the study population is restricted to very closely linked sites (i.e. within a gene or between adjacent genes), a positive association provides nearly conclusive evidence that the candidate gene is a trait gene.

b. Positional Cloning and Transgenic Applications

[0080] Traditional linkage mapping typically localizes a trait gene to an interval between two genetic markers (referred to as flanking markers). When this interval is relatively small (say less than 1 Mb), it becomes feasible to precisely identify the trait gene by a positional cloning procedure. A high marker density is required to narrow down the interval length sufficiently. This procedure requires a library of large insert genomic clones (such as a BAC library), where the inserts are pieces (usually 100-150 kb in length) of genomic DNA from the species of interest. The library is screened by probe hybridization or PCR to identify clones that contain the flanking marker sequences. Then a series of partially overlapping clones that connects the two flanking clones (a “contig”) is built up through physical mapping procedures. These procedures include fingerprinting, STS content mapping and sequence-tagged connector methodologies. Once the physical contig is constructed and sequenced, the sequence is searched for all transcriptional units. The transcriptional unit that corresponds to the trait gene can be determined by comparing sequences between mutant and wild type strains, by additional fine-scale genetic mapping, and/or by functional testing through plant transformation. Trait genes identified in this way become leads for transgenic product development. Similarly, trait genes identified by association studies with candidate genes become leads for transgenic product development.

c. Marker-Aided Breeding and Marker-Assisted Selection

[0081] When a trait gene has been localized in the vicinity of genetic markers, those markers can be used to select for improved values of the trait without the need for phenotypic analysis at each cycle of selection. In marker aided breeding and marker-assisted selection, associations between trait genes and markers are established initially through genetic mapping analysis (as in A.1 or A.2). In the same process, one determines which marker alleles are linked to favorable trait gene alleles. Subsequently, marker alleles associated with favorable trait gene alleles are selected in the population. This procedure will improve the value of the trait provided that there is sufficiently close linkage between markers and trait genes. The degree of linkage required depends upon the number of generations of selection because, at each generation, there is opportunity for breakdown of the association through recombination. Prediction of crosses for new inbred line development

[0082] The associations between specific marker alleles and favorable trait gene alleles also can be used to predict what types of progeny may segregate from a given cross. This prediction may allow selection of appropriate parents to generation populations from which new combinations of favorable trait gene alleles are assembled to produce a new inbred line. For example, if line A has marker alleles previously known to be associated with favorable trait alleles at loci 1, 20 and 31, while line B has marker alleles associated with favorable effects at loci 15, 27 and 29, then a new line could be developed by crossing A×B and selecting progeny that have favorable alleles at all 6 trait loci.

d. Hybrid Prediction

[0083] Commercial corn seed is produced by making hybrids between two elite inbred lines that belong to different “heterotic groups”. These groups are sufficiently distinct genetically that hybrids between them show high levels of heterosis or hybrid vigor (i.e. increased performance relative to the parental lines). By analyzing the marker constitution of good hybrids, one can identify sets of alleles at different loci in both male and female lines that combine well to produce heterosis. Understanding these patterns, and knowing the marker constitution of different inbred lines, can allow prediction of the level of heterosis between different pairs of lines. These predictions can narrow down the possibilities of which line(s) of opposite heterotic group should be used to test the performance of a new inbred line.

e. Identity by Descent
One theory of heterosis predicts that regions of identity by descent (IBD) between the male and female lines used to produce a hybrid will reduce hybrid performance. Identity by descent can be inferred from patterns of marker alleles in different lines. An identical string of markers at a series of adjacent loci may be considered identical by descent if it is unlikely to occur independently by chance. Analysis of marker fingerprints in male and female lines can identify regions of IBD. Knowledge of these regions can inform the choice of hybrid parents, since avoiding IBD in hybrids is likely to improve performance. This knowledge may also inform breeding programs in that crosses could be designed to produce pairs of inbred lines (one male and one female) that show little or no IBD.

[0084] A fingerprint of an inbred line is the combination of alleles at a set of marker loci. High density fingerprints can be used to establish and trace the identity of germplasm, which has utility in germplasm ownership protection.

[0085] Genetic markers are used to accelerate introgression of transgenes into new genetic backgrounds (i.e. into a diverse range of germplasm). Simple introgression involves crossing a transgenic line to an elite inbred line and then backcrossing the hybrid repeatedly to the elite (recurrent) parent, while selecting for maintenance of the transgene. Over multiple backcross generations, the genetic background of the original transgenic line is replaced gradually by the genetic background of the elite inbred through recombination and segregation. This process can be accelerated by selection on marker alleles that derive from the recurrent parent.

### E. Use of Polymorphism Assay for Mapping a Library of DNA clones

[0086] The polymorphisms and loci of this invention are useful for identifying and mapping DNA sequence of QTLs and genes linked to the polymorphisms. For instance, BAC or YAC clone libraries can be queried using polymorphisms linked to a trait to find a clone containing specific QTLs and genes associated with the trait. For instance, QTLs and genes in a plurality, e.g. hundreds or thousands, of large, multi-gene sequences can be identified by hybridization with an oligonucleotide probe which hybridizes to a mapped and/or linked polymorphism. Such hybridization screening can be improved by providing clone sequence in a high density array. The screening method is more preferably enhanced by employing a pooling strategy to significantly reduce the number of hybridizations required to identify a clone containing the polymorphism. When the polymorphisms are mapped, the screening effectively maps the clones.

[0087] For instance, in a case where thousands of clones are arranged in a defined array, e.g. in 96 well plates, the plates can be arbitrarily arranged in three-dimensionally, arrayed stacks of wells each comprising a unique DNA clone. The wells in each stack can be represented as discrete elements in a three dimensional array of rows, columns and plates. In one aspect of the invention the number of stacks and plates in a stack are about equal to minimize the number of assays. The stacks of plates allow the construction of pools of cloned DNA.

[0088] For a three-dimensionally arrayed stack pools of cloned DNA can be created for (a) all of the elements in each row, (b) all of the elements of each column, and (c) all of the elements of each plate. Hybridization screening of the pools with an oligonucleotide probe which hybridizes to a polymorphism unique to one of the clones will provide a positive indication for one column pool, one row pool and one plate pool, thereby indicating the well element containing the target clone.

[0089] In the case of multiple stacks, additional pools of all of the clone DNA in each stack allows indication of the stack having the row-column-plate coordinates of the target clone. For instance, a 4608 clone set can be disposed in 48 96-well plates. The 48 plates can be arranged in 8 sets of 6 plate stacks providing 6×12×8 three-dimensional arrays of elements, i.e. each stack comprises 6 stacks of 8 rows and 12 columns. For the entire clone set there are 36 pools, i.e. 6 stack pools, 8 row pools, 12 column pools and 8 stack pools. Thus, a maximum of 36 hybridization reactions is required to find the clone harboring QTLs or genes associated or linked to each mapped polymorphism.

[0090] Once a clone is identified, oligonucleotide primers designed from the locus of the polymorphism can be used for positional cloning of the linked QTL and/or genes.

### F. Computer Readable Media and Databases

[0091] The sequences of nucleic acid molecules of this invention can be “provided” in a variety of mediums to facilitate use, e.g. a database or computer readable medium, which can also contain descriptive annotations in a form that allows a skilled artisan to examine or query the sequences and obtain useful information. In one embodiment of the invention computer readable media may be prepared that comprise nucleic acid sequences where at least 10% or more, e.g. at least 25%, or even at least 50% or more of the sequences of the loci and nucleic acid molecules of this invention. For instance, such database or computer readable medium may comprise sets of the loci of this invention or sets of primers and probes useful for assaying the polymorphisms of this invention. In addition such database or computer readable medium may comprise a figure or table of the mapped or unmapped polymorphisms or this invention and genetic maps.

[0092] As used herein “database” refers to any representation of retrievable collected data including computer files such as text files, database files, spreadsheet files and image files, printed tabulations and graphical representations and combinations of digital and image data collections. In a preferred aspect of the invention, “database” means a memory system that can store computer searchable information. Currently, preferred database applications include those provided by DB2, Sybase and Oracle.

[0093] As used herein, “computer readable media” refers to any medium that can be read and accessed directly by a computer. Such media include, but are not limited to: magnetic storage media, such as floppy discs, hard disc, storage medium and magnetic tape; optical storage media such as CD-ROM; electrical storage media such as RAM and ROM; and hybrids of these categories such as magnetic/optical storage media. A skilled artisan can readily appreciate how any of the presently known computer readable mediums can be used to create a manufacture comprising computer readable medium having recorded thereon a nucleotide sequence of the present invention.

[0094] As used herein, “recorded” refers to the result of a process for storing information in a retrievable database or computer readable medium. For instance, a skilled artisan can readily adopt any of the presently known methods for recording information on computer readable medium to generate media comprising the mapped polymorphisms and other nucleotide sequence information of the present invention. A variety of data storage structures are available to a skilled artisan for creating a computer readable medium where the choice of the data storage structure will generally be based on the means chosen to access the stored information. In addition, a variety of data processor programs and formats can be used to store the polymorphisms and nucleotide sequence information of the present invention on computer readable medium.

[0095] Computer software is publicly available which allows a skilled artisan to access sequence information provided in a computer readable medium. The examples which follow demonstrate how software which implements a search algorithm such as the BLAST algorithm (Altschul et al., J. Mol. Biol. 215:403-410 (1990), incorporated herein by reference) and the BLAZE algorithm (Brutlag et al., Comp. Chem. 17:203-207 (1993), incorporated herein by reference) on a Sybase system can be used to identify DNA sequence which is homologous to the sequence of loci of this invention with a high level of identity. Sequence of high identity can be compared to find polymorphic markers useful with a maize varieties.

[0096] The present invention further provides systems, particularly computer-based systems, which contain the sequence information described herein. Such systems are designed to identify commercially important sequence segments of the nucleic acid molecules of this invention. As used herein, “a computer-based system” refers to the hardware, software and memory used to analyze the nucleotide sequence information. A skilled artisan can readily appreciate that any one of the currently available computer-based system are suitable for use in the present invention.

[0097] As indicated above, the computer-based systems of the present invention comprise a database having stored therein polymorphic markers, genetic maps, and/or the sequence of nucleic acid molecules of the present invention and the necessary hardware and software for supporting and implementing genotyping applications.

### EXAMPLE 1

[0098] This example illustrates the preparation of reduced representation libraries using enzymes which are sensitive to methylated cytosine residues in order to enrich for unique/coding-sequence genomic DNA.

[0099] There are general methods for preparing genomic DNA from maize (or other plants) that are suitable for use in construction of reduced representation libraries. There are commercially available kits, for example the “DNeasy Plant Maxi Kit” from Qiagen (Valencia, Calif.). The preferred method however which maximizes both yield and convenience is to extract DNA using “Plant DNAzol Reagent” from Life Technologies (Grand Island, N.Y.). Briefly, frozen leaf tissue is ground in liquid nitrogen in a mortar and pestle. The ground tissue is then extracted with DNAzol reagent. This removes cellular proteins, cell wall material and other debris. Following extraction with this reagent, the DNA is precipitated, washed, resuspended, and treated with RNAse to remove RNA. The DNA is precipitated again, and resuspended in a suitable volume of TE (so that concentration is 1 μg/μl). The genomic DNA is ready to use in library construction.

[0100] Genomic DNA from two maize lines which are to be compared for polymorphism detection are digested separately with Pst I restriction endonuclease which provides the ends of the DNA fragments with sticky ends which can ligate into a plasmid with the same restriction site. For instance, 100 units of Pst I is added to 20 μg of DNA and incubated at 37° C. for 8 hours. The digested DNA product is separated by electrophoresis on a 1% low-melting-temperature-agarose gel to separate the DNA fragments by size. The digested DNA from the two maize lines is loaded side by side on the gel (with one lane in between as a spacer). Both a 1 KB DNA ladder marker and a 100 bp DNA ladder marker are loaded on each side of the two maize DNA lanes. These markers act as a guide for size fractionation of the digested maize DNA. Fragments in the range of 500 to 3000 bp are excised incrementally from the gel in size fractions of 500-600 bp, 600-700 bp, 700-800 bp, 800-900 bp, 900-1100 bp, 1100-1500 bp, 1500-2000 bp, 2000-2500 bp and 2500-3000 bp. DNA in each fraction is purified using β-agarase and ligated into the Pst I cloning site of pUC18. The plasmid ligation products are transformed by electroporation into DH10B E. coli bacterial hosts to produce reduced representation libraries. For instance, about 500 nanograms of the size-selected DNA is ligated to 50 ng dephosphorylated pUC18 vector.

[0101] Transformation is carried out by electroporation and the transformation efficiency for reduced representation Pst I libraries is approximately 50,000 transformants from one microliter of ligation product or 1000 to 6000 transformants/ng DNA.

[0102] Basic tests to evaluate the quality include the average insert size, chloroplast/mitochondrial DNA content, and the fraction of repetitive sequence.

[0103] The determination of the average insert size of the library is assessed during library construction. Every ligation is tested to determine the average insert size by assaying 10-20 clones per ligation. DNA is isolated from recombinant clones using a standard mini preparation protocol, digested with Pst I to free the insert from the vector and then sized using 1% agarose gel electrophoresis (Maule, Molecular Biotechnology 9:107-126 (1998), the entirety of which is herein incorporated by reference).

[0104] The chloroplast/mitochondrial DNA content, and the percentage of repetitive sequence in the library is estimated by sequencing a small sample of clones (400), and cross checking the sequence obtained against various sequence databases. Some repetitive elements are not present in the databases, but can nevertheless often be identified by the large number of copies of the same sequence. For instance, after sequencing a set of 400 clones any sequence that is not filtered by the repetitive element database, but yet is present more than 10 times in the sample is considered a repetitive element.

[0105] Maize reduced representation libraries of the present invention are constructed by inserting coding region enriched DNA obtained from the following maize lines: B73, MO17, LH82 and 5CM1.

### EXAMPLE 2

[0106] This example illustrates the determination of maize genomic DNA sequence from clones in reduced representation libraries prepared in Example 1. Two basic methods can be used for DNA sequencing, the chain termination method of Sanger et al., Proc. Natl. Acad. Sci. USA 74:5463-5467 (1977) and the chemical degradation method of Maxam and Gilbert, Proc. Natl. Acad. Sci. USA 74:560-564 (1977). Automation and advances in technology such as the replacement of radioisotopes with fluorescence-based sequencing have reduced the effort required to sequence DNA (Craxton, Methods, 2:20-26 (1991), Ju et al, Proc. Natl. Acad. Sci. USA 92:4347-4351 (1995) and Tabor and Richardson, Proc. Natl. Acad. Sci. USA 92:6339-6343 (1995). Automated sequencers are available from, for example, Applied Biosystems, Foster City, Calif. (ABI Prism® systems); Pharmacia Biotech, Inc., Piscataway, N.J. (Pharmacia ALF), LI-COR, Inc., Lincoln, Nebr. (LI-COR 4,000) and Millipore, Bedford, Mass. (Millipore BaseStation).

[0107] In addition, advances in capillary gel electrophoresis have also reduced the effort required to sequence DNA and such advances provide a rapid high resolution approach for sequencing DNA samples (Swerdlow and Gesteland, Nucleic Acids Res. 18:1415-1419 (1990); Smith, Nature 349:812-813 (1991); Luckey et al., Methods Enzymol. 218:154-172 (1993); Lu et al., J. Chromatog. A. 680:497-501 (1994); Carson et al., Anal. Chem. 65:3219-3226 (1993); Huang et al., Anal. Chem. 64:2149-2154 (1992); Kheterpal et al., Electrophoresis 17:1852-1859 (1996); Quesada and Zhang, Electrophoresis 17:1841-1851 (1996); Baba, Yakugaku Zasshi 117:265-281 (1997).

[0108] A number of sequencing techniques are known in the art, including fluorescence-based sequencing methodologies. These methods have the detection, automation and instrumentation capability necessary for the analysis of large volumes of sequence data. An ABI Prism®377 DNA Sequencer (Applied Biosystems, Foster City, Calif.) allows rapid electrophoresis and data collection. With these types of automated systems, fluorescent dye-labeled sequence reaction products are detected and data entered directly into the computer, producing a chromatogram that is subsequently viewed, stored, and analyzed using the corresponding software programs. These methods are known to those of skill in the art and have been described and reviewed (Birren et al., Genome Analysis: Analyzing DNA, 1, Cold Spring Harbor, N.Y. (1999).

[0109] Sequence base calling from trace files and quality scores are assigned by PHRED which is available from CodonCode Corporation, Dedham, Mass. and is described by Brent Ewing, et al. “Base-calling of automated sequencer traces using phred”, 1998, Genome Research, Vol. 8, pages 175-185 and 186-194, incorporated herein by reference.

[0110] After the base calling is completed, sequence quality is improved by cutting poor quality end sequence. If the resulting sequence is less than 50 bp, it is deleted. Sequence with an overall quality of less than 12.5 is deleted. And, contaminating sequence, e.g. E. coli BAC and vector sequences and sub-cloning vector, are removed. Contigs are assembled using Pangea Clustering and Alignment Tools which is available from DoubleTwist Inc., Oakland, Calif. by comparing pairs of sequences for overlapping bases. The overlap is determined using the following high stringency parameters: word size=8; window size=60; and identity is 93%. The clusters are reassembled using PHRAP fragment assembly program which is available from CodonCode Corporation using a “repeat stringency” parameter of 0.5 or lower. The final assembly output contains a collection of sequences including contig sequences which represent the consensus sequence of overlapping clustered sequences (contigs) and singleton sequences which are not present in any cluster of related sequences (singletons). Collectively, the contigs and singletons resulting from a DNA assembly are referred to as islands.

### EXAMPLE 3

[0111] This example illustrates identification of SNP and Indel polymorphisms by comparing alignments of the sequences of contigs and singletons from at least two separate maize lines as prepared as in example 2. Sequence from multiple maize lines is assembled to into loci having one or more polymorphisms, i.e. SNPs and/or Indels. Candidate polymorphisms are qualified by the following parameters:
[0112] (a) The minimum length of a contig or singleton for a consensus alignment is 200 bases.
[0113] (b) The percentage identity of observed bases in a region of 15 bases on each side of a candidate SNP, is 75%.
[0114] (c) The minimum BLAST quality in each contig at a polymorphism site is 35.
[0115] (d) The minimum BLAST quality in a region of 15 bases on each side of the polymorphism site is 20.

[0116] A plurality of loci having qualified polymorphisms are identified as having consensus sequence as reported as SEQ ID NO: 1 through SEQ ID NO: 10373. The qualified SNP and Indel polymorphisms in each locus are identified in Table 1. More particularly, Table 1 identifies the type and location of the polymorphisms as follows:

[0117] SEQ_NUM refers to the sequence number of the polymorphic maize DNA locus, e.g. a SEQ ID NO.

[0118] SEQ_ID refers to an arbitrary identifying name for the polymorphic maize DNA locus.

[0119] MUTATION_ID refers to an arbitrary identifying name for each polymorphism.

[0120] START_POS refers to the position in the nucleotide sequence of the polymorphic maize DNA locus where the polymorphism begins.

[0121] END_POS refers to the position in the nucleotide sequence of the polymorphic maize DNA locus where the polymorphism ends; for SNPs the START_POS and END_POS are common.

[0122] TYPE refers to the identification of the polymorphism as an SNP or IND (Indel).

[0123] ALLELEn and STRAINn refers to the nucleotide sequence of a polymorphism in a specific allelic maize variety.

[0124] CHROMOSOME refers to the chromosome for a mapped polymorphism.

[0125] POSITION refers to the distance of a mapped polymorphism measured in cM from the 5′ end of the chromosome.

### EXAMPLE 4

[0126] This example illustrates the use of primer base extension for detecting a SNP polymorphism, i.e. with Mutation ID 3972 in the maize locus of SEQ ID NO: 5378 which is described more particularly in the following Table 2.

TABLE 2

| | MUTA- | | | | | |
|---|---|---|---|---|---|---|
| SEQ | TION | START | END | | ALLELE1/ | ALLELE2/ |
| NUM | ID | POS | POS | TYPE | STRAIN1 | STRAIN 2 |
| 5738 | 3971 | 66 | 66 | SNP | A/b73 | C/mo17 |
| 5738 | 3972 | 126 | 126 | SNP | A/mo17 | G/b73 |
| 5738 | 3973 | 149 | 150 | IND | **/mo17 | TG/b73 |
| 5738 | 3974 | 338 | 338 | SNP | A/b73 | G/mo17 |

[0127] A small quantity of maize genomic DNA (e.g. about 10 ng) is amplified using the forward and reverse PCR primers, i.e. SEQ ID NO: 10379 and SEQ ID NO: 10378, respectively, which are designed to have an annealing temperature of 55° C. to template in the locus of SEQ ID NO: 5738 around polymorphism of Mutation ID 3972 which is an A/G SNP. The PCR product is added to a new plate in which the extension primer SEQ ID NO: 10380 is covalently bound to the surface of the reaction wells in a GBA plate. Extension mix containing DNA polymerase, the two differentially labeled ddNTPs, and extension buffer is added. The GBA plate is incubated at 42° C. for 15 min to allow extension. The reaction mix is removed from the wells by washing with a suitable buffer. The two labels are detected by sequential incubation with primary and secondary detection reagents for each of the labels. In the present example, incorporation of ddATP-FITC is measured by incubation with HRP-anti-FITC, followed by washing the wells, followed by incubation in a buffer containing a chromogenic substrate for HRP. The extent of the reaction is determined spectrophotometrically for each well at the wavelength appropriate for the product of the HRP reaction. The wells are washed again, and the procedure is repeated with AP-streptavidin, followed by a chromogenic substrate for AP, and spectrophotometry at the wavelength appropriate for the AP reaction product.

[0128] Analysis of Results.

[0129] The extent of incorporation of each labeled ddNTP is inferred from the absorbance measured for the reaction products of the detection steps specific label, and the genotype of the sample is inferred from the ratios of these absorbances as compared to a standards of known genotype and a no-template control reactions. In the most common practice, the absorbances observed for each data point are plotted against each other in a scatter plot, producing an “allelogram”. A successful genotyping assay using the single base extension assay of this example provides an allelogram as illustrated in FIG. 2 where the data points are grouped into four clusters: Homozygote 1 (e.g., the A allele), homozygote 2 (e.g., the G allele), heterozygotes (each sample containing both alleles), and a “no signal” cluster resulting from no-template controls, or failed amplification or detection.

### EXAMPLE 5

[0130] This example illustrates the use of a labeled probe degradation assay for detecting the SNP polymorphism assayed in Example 4, i.e. the polymorphism of Mutation ID 3972 in the locus of SEQ ID NO: 5738. A quantity of maize genomic template DNA (e.g. about 2-20 ng) is mixed in 5 ul total volume with four oligonucleotides, i.e. forward primer SEQ ID NO: 10376, reverse primer SEQ ID NO: 10377 and hybridization probe having a VIC reporter attached to the 5′ end designed as VIC-TGTGTGAGCTGCTG where the oligonucleotide segment of the probe has SEQ ID NO: 10374 and hybridization probe having a FAM reporter attached to the 5′ end designed as FAM-TTGTGTGGGCTGCT where the oligonucleotide segment of the probe has SEQ ID NO:10375 as well as PCR reaction buffer containing the passive reference dye ROX. The PCR reaction is conducted for 35 cycles using a 60° C. annealing-extension temperature. Following the reaction, the fluorescence of each fluorophore as well as that of the passive reference is determined in a fluorimeter. The fluorescence value for each fluorophore is normalized to the fluorescence value of the passive reference. The normalized values are plotted against each other for each sample to produce an allelogram. A successful genotyping assay using the primers and hybridization probes of this example provides an allelogram with data points in clearly separable clusters as illustrated in FIG. 2.

[0131] To confirm that an assay produces accurate results, each new assay is performed on a number of replicates of samples of known genotypic identity representing each of the three possible genotypes, i.e. two homozygous alleles and a heterozygous sample. To be a valid and useful assay, it must produce clearly separable clusters of data points, such that one of the three genotypes can be assigned for at least 90% of the data points, and the assignment is observed to be correct for at least 98% of the data points. Subsequent to this validation step, the assay is applied to progeny of a cross between two highly inbred individuals to obtain segregation data, which are then used to calculate a genetic map position for the polymorphic locus.

### EXAMPLE 6

[0132] This example illustrates the genetic mapping of polymorphisms in loci of this invention based on the genotypes of over 1000 SNPs for 78 recombinant inbred lines (RILs) originating from the cross of maize lines B73 and Mol 7. The genotypes are combined with genotypes for about 80 public core SSR and RFLP markers scored on 203 RILs. Before mapping, any loci showing distorted segregation (P<0.01 for a Chi-square test of a 1:1 segregation ratio) are removed. These loci can be added to the map later but without allowing them to change marker order.

[0133] A map is constructed using the JoinMap version 2.0 software which is described by Stam, P. “Construction of integrated genetic linkage maps by means of a new computer package: JoinMap, The Plant Journal, 3: 739-744 (1993); Stam, P. and van Ooijen, J. W. “JoinMap version 2.0: Software for the calculation of genetic linkage maps (1995) CPRO-DLO, Wageningen. JoinMap implements a weighted-least squares approach to multipoint mapping in which information from all pairs of linked loci (adjacent or not) is incorporated. Linkage groups are formed using a LOD threshold of 5.0. The SSR and RFLP public markers are used to assign linkage groups to chromosomes. Linkage groups are merged within chromosomes before map construction.

[0134] Haldane's mapping function is used to convert recombination fractions to map distances. Lenient criteria are applied for excluding pairwise linkage data; only data with a LOD not greater than 0.001 or a recombination fraction not less than 0.499 are excluded. For ordering loci, we used a jump threshold of 5.0, a triplet threshold of 7.0 and a ripple value of 3. About 38% of the loci (424 of 1108) are ordered in two rounds of map construction with a jump threshold of 5.0 which prevents the addition of a locus to the map if such addition results in a jump of more than 5.0 to a goodness-of-fit criterion. The remaining loci are added to the map without application of such a jump threshold. Addition of these loci has a negligible effect on the map order and distances for the initial 424 loci. Mapped SNP polymorphisms are identified in Table 3 where “Chromosome” and “Position” identify the distance measured in cM from the 5′ end of a maize chromosome for the SNP identified by “Mutation ID”. “Public Name” provides the published name of reference public markers which are not part of this invention. For certain of the mapped polymorphic markers listed in Table 3, the Mutation ID is listed more than once which indicates that the mapping was conducted based on multiple genotyping assays. The map locations for multiple genotyping assays generally serve to confirm map location except in the case where map locations are divergent, e.g. due to error in the design or practice of an assay. The density and distribution of the mapped polymorphisms is shown in FIG. 1.

[0135] An alternative approach for linkage map construction based on finding a locus order to minimize the total number of recombination events is disclosed by Jansen, J. et al. “Constructing dense genetic linkage maps”, Theor Appl Genet (in press). This approach yields under many conditions a close approximation to a maximum-likelihood map. A map estimated by this approach agrees quite closely with the map obtained using JoinMap 2.0.

### EXAMPLE 7

[0136] This example illustrates methods of the invention using polymorphisms disclosed in Table 1 and in the DNA sequences of SEQ ID NO:1-10,373.

[0137] A breeding population of corn with diverse heritage is analyzed using primer pairs and probe pairs prepared as indicated in Example 5 for each of the polymorphisms identified in Table 1 based on sequences of SEQ ID NO: 1-10,373. Closely linked polymorphisms are identified as characterizing haplotypes in adjacent genomic windows of about 8 centimorgans across the corn genome. Haplotypes representing at least 4% of the population are associated with trait values identified for each member of the corn population including the trait values for yield, maturity, lodging, plant height, rust resistance, drought tolerance and cold germination. The trait values for each haplotype are ranked in each 8 centimorgan window. Progeny seed from randomly-mated members of the population are analyzed for the identity of haplotypes in each window. Progeny seed are selected for planting based on high trait values for haplotypes identified in said seeds.

1. A polymorphic maize DNA locus which is useful for genotyping between at least two varieties of maize; wherein said locus comprises at least 20 consecutive nucleotides which include or are adjacent to a polymorphism identified in Table 1; and wherein the sequence of said at least 20 consecutive nucleotides is at least 90% identical to the sequence of the same number of nucleotides in either strand of a segment of maize DNA which includes or is adjacent to said polymorphism.

2-10. (canceled)

11. A method of investigating a maize allele comprising determining the presence of a polymorphism in the nucleic acid sequence of nucleic acid molecules isolated from one or more maize plants wherein said polymorphism is linked to a locus of claim 1.

12. A method of mapping maize genomic sequence comprising identifying the presence of a mapped polymorphism in said sequence, wherein said mapped polymorphism is linked to a locus of claim 1.

13. A method according to claim 12 wherein said mapped polymorphism is identified in Table 3.

14. A method of breeding maize comprising selecting a maize line having a polymorphism associated by linkage disequilibrium to a trait of interest wherein said polymorphism is linked to a locus of claim 1.

15. A method of associating a phenotype trait to a genotype in maize comprising
(a) identifying a set of one or more distinct phenotypic traits characterizing said maize plants,
(b) selecting tissue from at least two maize plants having allelic DNA and assaying DNA or mRNA from said tissue to identify the presence or absence of a set of distinct polymorphisms,
(c) identifying associations between said set of polymorphisms and said set of phenotypic traits,
wherein said set of polymorphisms comprises at least one polymorphism linked to a locus of claim 1.

16. A method of associating a phenotype trait to a genotype in maize according to claim 15 wherein said set of polymorphisms comprises at least 10 polymorphisms linked to mapped polymorphisms identified in Table 3.

17. A method of associating a trait to a genotype in maize according to claim 16 wherein the maize plants are in a segregating population; wherein said DNA is allelic in a loci of a chromosome which confers a phenotypic effect on a trait of interest and wherein a polymorphism is located in said loci; and wherein the degree of association among said polymorphisms and between said polymorphisms and the traits permits determination of a linear order of the polymorphism and the trait loci.

18. A method of identifying genes associated with a trait of interest comprising identifying linkage of at least one polymorphism to said trait of interest, wherein said polymorphism is linked to a locus of claim 1, identifying a genomic clone containing said locus and identifying genes linked to said locus.

19. A method for improving heterosis in hybrid maize comprising
(a) developing associations between a plurality of polymorphisms and traits in more than two inbred lines of maize,
(b) selecting for breeding two of said inbred lines having complementary heterotic groups which are predicted to improve heterosis
wherein said polymorphisms are linked to loci of claim 1.

20. A method comprising screening for a trait comprising:
(a) interrogating a collection of SNPs wherein said collection has an average density of less than 10 cM on a genetic map of maize; and
(b) correlating the presence or absence of a SNP within said collection of SNPs with said trait.
wherein said SNPs are linked to loci of claim 1.

21. A method of claim 20 wherein said polymorphisms are used to identify a plurality of haplotypes in a series of adjacent genomic windows of up to 10 centimorgans in length in each corn chromosome.

22. A method of claim 21 wherein a trait value is computed for each of said haplotypes.

23. A method of claim 22 wherein said trait value identifies a trait selected from the group consisting of yield, lodging, maturity, plant height, disease resistance, or a combination of traits as a multiple trait index.

24. A method of breeding corn plants comprising the steps of
(a) identifying trait values for at least two haplotypes in at least two genomic windows of up to 10 centimorgans for a breeding population of at least two corn plants;
(b) breeding two corn plants in said breeding population to produce a population of progeny seed;
(c) identifying the allelic state of polymorphisms in each of said windows in said progeny seed to determine the presence of said haplotypes;
(c) selecting progeny seed having the higher trait values identified for determined haplotypes in said progeny seed.

25. A method of claim 24 wherein trait values are identified for at least two haplotypes in each adjacent genomic window over essentially the entirety of each chromosome.

26. A method of claim 25 wherein progeny seed is selected for a higher trait value for yield for a haplotype in a genomic window of up to 10 centimorgans in each chromosome.

27. A method of claim 25 wherein said trait value is for the yield trait and trait values are ranked for haplotypes in each window; and wherein a progeny seed is selected which has a trait value for yield in a window that is higher than the mean trait value for yield in said window.

28. A method of claim 25 wherein said polymorphisms in said haplotypes are in Table 1.

29. A method of claim 25 wherein said polymorphisms in said haplotypes are in a set of DNA sequences that comprises all of the DNA sequences of SEQ ID NO: 1 through SEQ ID NO:25,043.

The application's sequence listing, which the Patent Office published only in electronic form, follows.

SEQUENCE LISTING (10380 sequences)

SEQ ID NO: 1 - DNA, 651 bp, Zea mays
tgccactgatcccttcgtcgccatcgtcgtcctgcccgatggtcccggaggcgtcggtgacgcacgacgacgtggacgacgcgctctccaccgccgcgtgctgctcttcttcctcttcctcttcttcttcttgcctgtcaccaaggcgggcgcggtgggctggcctggccctcctgaaaatgcgacagaccacccagtcggccaccgccgcgccaccgccatgggagctcacctggattacagattcatccccatcaaaacagcagattagccgcccgcctggtcgcgatgcacgagctacggtgagcgcgagctttacatacattagtgggcggaggcgcgttggcggcgcagccgtggaggtggaggccggcggggaggaggcggtactcgtgcatgacccagtcggtgcgggcgccgccgccgcggcggcgcgggcagaagacgagcgtccgcttggtgccgacggggcgcttgcagcgcggcgacacgacgacggtctccttcccggacggcctccagacgccggcgccggccgccctggccgcgccgcctcccctgcgccagcaccgcgtcgcggggcggtggaagaagaagcgctccccgctggcgtcgcggctccccccgcaggggtaccgagatcgaattcga

SEQ ID NO: 2 - DNA, 807 bp, Zea mays
tgacaccgtgaaacccgatgatggccaagggctccgtctccgctctccgacgaaacggcccctccaaaatagtcagaacagcaacgcgcagaggtgtgccgtgtgcgcgactagccatcttctccctcggtctttccgttctctaacgcctggacggaactgaagccagccggggtgaccggagaccagtaaaatctccccagggccgcccagtcgacggtctcgccggccttctcagaccacaaacattgcgcttgcggcttgccgcccagctatataagtactctcgggaataggcggtcactcatccatcccatctccatctcggagcaaaggcaatccagcaagagtcgctcctttcccttttcgggatacagccagcagaagcaatccggctaacaagtttcttcttcttcttcttcctggtaaggacgagatcccgcggccctgattcgtcgcgttctcctctgcgaaatgctttcgcgaggccactggcaaaggggaatcctctgcgggcctgcgcatttgcggcatatctcggtgacgcccgctgctagcgttcatctcttaggtcataatgccaagacattgcggtcgcttttaggtccaagatttggtcgttctatcattcgtttagctaagcccaatcagtgaagcgtgcatggtgccttttttgttttttccctagtggtagaagcaggagccttgcacttgtgtgtatgtgtgggtggagagaaaaaaagacatgctttgatgttctcagaaacctgagttcagatctaaatagtgcatggaaatcctcaaccc

SEQ ID NO: 3 - DNA, 538 bp, Zea mays
tgaattatattgggggattcttgtatcattgaggaggttcatccggacactctgttgcagaaaactcttccatcctttgtagcatgggcttggtgcttccaaccgaaacaactgcaccgtgatatgattctgcatattctggagccaggcccacaaagctctgaacggagatgcttagcctataatataagcgtaagggtacttgcaatctgccatgatggtattagaggttcctcgctgctgactccaccggaggatggcgatcagtctgatggttcggacgacatggatgaccaaaggaatgttgagcctcggcgtttgggcagttccttgccccagcgacggtctgttcaccttcgccttgggcctctcccgccgtccggacatggaaggacttcacatacatctaggggacatgaacagccactctttgacgcaccggagttacagcagatggcctcggataatgggatgatactccttaatgagttgcctacagaggagccaaatagtctccttgatgaggcccctattgaca

SEQ ID NO: 4 - DNA, 631 bp, Zea mays
attcgagctcggtacccctgtttgataaaccaaagctcaaataagcaagtcctttttcacagtaaggaataacagtgtgtacaggaatgcataggttgtattagttgaatcttgaatgccatgcatgcgatgaaatggggacaagacaatatagagtttagtggatgaggaagcaacaatgtcaccttcctgatgaccagcaaatgctgaagcaactgagatcgttccgtccttggactccacaactacaagagggggaaagatcatacacgagccatctagattaactaatatttagcaagtacaaatccaaaaggaagaaagatataactccttagctagattaattgtacacttcagctcatgtgaacattctattcacgaatgatgaaaaaatagcaaccatattatcatatataagcaggcaagatgcttttggaggtaagaagatcaaggccatgaaggaagattggtgtacacagattattttagcacagcatctcacggttccacggcaggaaaactggattgccagcagatggataccgtacaactgccacgtagatggtataattgatcggtttgtaggcttgtagcagagagggagcagacaacgcactccctgcttagc

SEQ ID NO: 5 - DNA, 658 bp, Zea mays
tgtgctttactacctctgtctgtgacatataccagaatgcatgcagtcaaatattctaacttcgaccagtttagattttttttaaaaaaaactcgacctgaaggggtaagacagcccccgggcattataataagaccttttcacgcaagtcaaaaaaacctctgaacctatgccccacccatacacagcggcaccgtagcccatatgagaaataaccacgaccgggaccggaccttagacttgtgctttggcgtgggacagacgaggggttttttttaaccacaggctaaaattcgctcccacggggagtcaaacccaggacttgaggagtgctactaagaccatataaccaaatcggctagaagccctttcaagaccaatttagaatttagattgatcgtaaggtatagaatgaaaatatactttcataatataatagtttacatgtttctattctcatgttcatatagaatgttctggtcaaagttgcacaccgaagactgtcatgcatttatgtacgattagagtactcaatatgaatagaagaaatcaattctgtcaagattttaggtattctgaaagcagtaatacaaaataaaattactaggaaaatgatgaagcatgtacctcgaagcctccccaacaggggtaccgagct

SEQ ID NO: 6 - DNA, 636 bp, Zea mays
tgggaagcctatcagcaatcttctccacccagttaagcagatttgatcttctaagcttccggttggagatggggagccctagatatatgcaagggaaggacccaaatggtgcagtgaagggaattagagatgaccacagttcgacaactatacctgcctgctttcttagcacagtacattgatctcctttaccgtgtttgaaaaattaggacctgttctctagcttatatagttagatttgtctttctatgcatactaggaaaatcttgtgccagttgatcctgcattatataagcggtatttgctaatctggacccatttatgatgccttgcagcgtgagctaacgaagaagcaaatagagaaattgaaaaaccaaaaggagacacttgagtccctgtgtcgatcactacaggcagaaaggaaacaaggccgctccgccagtattccagacgccccttctagccaagaagacatgccagcgacaagtcaagaatcttagcatatgtgcttgtcaatataccgttggtgtccgttacagcttgccgggacttctgaagcctgagaaatgaatatgttactgatatcttgttttgcttgagtttgcgggagttctggtcccatttaacacatactca

SEQ ID NO: 7 - DNA, 646 bp, Zea mays
tgacgctgctgtcgtagccccggcgtcgacgcggtcgatgcgcaccccgttcagctcgtcggccttgaggacgacgcgcgtctcgacggcagcgatggtgctgagcccgccgaggcacacggcgagggcgccggcgacctcgccgatgctgtcgtcgtcgacgaaggagtaggtgccgtgagactcttgggccatgtggagcaggacctcgggatcgtgcgccgcgccgaggccgaaggcgtggacggggtacctgccgagagcgcgtcggatcacctctcggcgccgctcgctcagcgcggacacggtcgtgccctcgccatcggtgaggaggataatgaaccctaagcggtcccggccgtctcccacccgctcgtccaggatgttcaccgcctcctcgaaggccgggacaagcgcagtgccgctgccggcgcgggcctcgagccgatccacgcttcttattgcgtttctcctgccgtcggcggtcatgtatagcaagccggagctaagttctctaacgggtcggtcgctgaacgctacgatggagaggcggtctccgtcttcgagtttgtcaaccatgaacttgacggccgtcctcagcaggtccagcctcgacgttgtcgtcctcctctccggcggcactgca

SEQ ID NO: 8 - DNA, 690 bp, Zea mays
attcgagctcggtacccctggtgatcatgttcctggcggtgatccgcgcgcgcggcgtggcggcgccgctcaacccggcctacacgcaggaggagttcgagttctacctctccgactccgaggcgcgcctcctcgtcaccaacgcggagggcaacgcggcggcgcaggcggccgctgccaagctcgggctcgcccacgccgccgccagcctccacgacgcggccggccctgtccacctcgccggcctcccggtcccggctctggagaacgggtctcacggcggcggcgcggcgggctctctctcccccaacgatccgtcggacgtggccctgttcctgcacacctccggcacgacgagccggcccaagggcgtgccgctgaagcagcgcaacctggcggcgtcggtgcggaacatccggtccgtgtatcgcctcgccgagacggacgccacggtggtggtgctgccgctgttccacgtgcacgggctcctctgcgccctgctgagctcgctggcttcgggcgcgtccgtggcgctgccggcggcggggcggttctcggcgtccacgttctgggccgacatgcgggcgtcgggcgccacgtggtacacggcggtgccgacgatccaccagatcatcctggaccggcacgcgtcgcggccggaggcgtacccggcgctccgattcatccgca

SEQ ID NO: 9 - DNA, 662 bp, Zea mays
tgaggtggagttagctagctagctagctgttggtcagtgtgtgcggcgcgagagaggagaggactagcgcggtgctgtatttaaggcggctgaggacgctagctgtgtggggaagaagaagaagatgctgctggctggctgctgtaactgtaacaacaagacagtgaggagccaggtggcggtgctcgtctgcgactgcaacgctgacgacgggctttcaccgtgacgcgtcagacaaaatacatgccgtctctcatgtttcagacgacgccggccgaggtaatacacaatgattcccgtctgttgcgcaatgcagtctacgagcttgacaggtcgtaccaatattgcttctgaatgacaggggagtaccttgcagataaagaaacattcaggacagtatgcagtgtaattatgcatgctaggaatatttcgaagctgtacaagatactctagcaagcaaagcacctacgagttattaggaagagacacaggatcacatagtgtcttatcttggcgattgtttttctctaatgacggcaccccggttgccttgtcgcatcggttgttaagtggtctaataatgacggcaccccggcggccgatgatttatattttaattaacttgtcgtaaacacaaatcgcagtttccacatactacacca

SEQ ID NO: 10 - DNA, 635 bp, Zea mays
attcgagctcggtacccctggcctcctgcttttgcttatcgaaacctcgctcctaaatatcccatcgtcgtcgtttgccatccgccgccggcccgccgccaccactgcaccgcccactagctagtagctagacgaccggccggagatggatccagttccggtgtggttagagtggttcgacagggacggggcggagctcgccaaccgcggccgtcggccggatcatcttgatgatgaggacgatctctacgtagccttggccttggctccctacgttgatcgccaccggcctcgaacccgtccccgatccccatccccatccccgccctcacacgaggacgccggggacgacactgctgctcgcaacaacaagcgtccttgcatccccgcgtacagcgaagccatcctggggctcaaggaggtggtgccaaccgctaagcacgacgacgactgtgccatctgcctcaacccattggccgatatcgctggtcctgatcacaagaaggacgacgcggcagctacgtcgatgcttcgggccatgccctgctcccatatcttccaccagcactgcatcttccagtggctccatcgcaacgccgtctgtcctctctgtcgctaccaggggtaccgagctc

SEQ ID NO: 11 - DNA, 634 bp, Zea mays
tgattagatacaatctatggtcctatatgcagagtagccagagcatgttgaaactgaccctcaactgtacaagcgttcacgtaaacctttttcttcttcttatacatggacgcattcatgacaattgccaagctcacaataaagataagactctattggcatccagtttatattatatgttgttatgcacattctgaacttaactcatgcatattgaagtttgtgatgtttagcttgtgcccgagacttatgtcaagcatgatgctccacaatccacatataccttgtgtggggagcatttgttagtttgtagttattttttctacttttaccaaacagtagacagaaaaacctcagttttatttttttttcctacttccagcacagaggctctcacccattcgagcccagcccaagttgatctgagacagacaagcatggccggccaaaattttcccccacatcctttttgaccgcgtcgaatcatcaaggacagccgtaattacacacgcagagcaaaaaaaaacatgcggtactcctagatgagatccatggatcggcgcgggtggaagtggacgtaccatgccgccgctgaggtagcggaggaggatgcaggcgagggaggacgccagca

SEQ ID NO: 12 - DNA, 685 bp, Zea mays
tttttggttaccaattcgagctcggtacccctgcaatgtaaatataaatttacattaccggtatgtttgtttccatcccgatgcaagtgacagcgttatgcacaaacccagtaagcttgtgtgactcctcttctggtgccaacctcactgcatgaaacaaagtaaacagcaaggttggtttcagacggcagcaataggcctgcagcaattgaaattgcctaaactacggtaagagccacagctcattaataggcactgaaaatgtttaaatagaaaagcagaagtacaatggcataatgaagaaaacagttaatgccaattgccaaggaatttactttcagtgcctactacataatatgcaatgcaccaatgtttcagaaatcagtagtgaaccagttacttgttccccagcggcaggtttatgtcagtttctcagtaccaacagtaataaagtaaagggcaaaagaaatagcctgtaatctggccaggaatgtgttagcagtacacacagccctgtcgtgaaagttgtaaaagctaaaattttattgaaatgtgttagcagcacattcaacatcttttcattgtcaacattaagactctacacccatcaggaatatcataatcagcccgctgcaatttgtacagtggcggaggacgccaaagaaacaaggtatggccgctggca

SEQ ID NO: 13 - DNA, 652 bp, Zea mays
tggagatctcatgatgtgtttgagcactttaggagcttttggatttagagctgattcctgcaagttaaaagcatgaacaaaaattactagcgaattaacacagacattcacacaagacaatactgagaagttcaaaatatggtgattaaattttctgcctattgccataaaagagataactagtatctaggataataaatgcactacagtaggtttttttaagctccataaaatgtatttagaagataaactagaaatttgacatttgagagcacaagtccttataaaattttttgatgccacatggtgcgtttcttcagtaatacacaggatctcaaaacagaaaaaagaacaagctataatataaggtatataaggtaaggtttacaattaaatgaatctgatccttatcatctcattctaggaactttggtagttccacggtgttttttttaaagattacgacatagagtgaataatctcttgtaaactttaatatgaaatcatcaagtacaatataatattggttccacataatagtaaaaaaagactattgtaaaaacttggcccatggggagagacccccaagggccaaggcattacaattaaggctgtaaaagggcccaaacgccagggggatcctctagagtcg

SEQ ID NO: 14 - DNA, 627 bp, Zea mays
tgccaattcagctagggtggctggagtccttttgtggactgttcttggattacacagaagagttgtagtggaatttttctgggctcgccccaggctgcagccacccccagccctggggcctgaatccgcctctggctcgtacaatactttttgtattataacatttgtcgactagccctagatcccaagttatcacattacctttttatttgtactgtatttccttatagtcttaaatcacaccactgaatcatgtagtttcctaggtttaaggctgcagtgcggcatagttagtaggtggtacacaaaagaatttctggtgttcttttgtgtgccagttcactgaattttgattgattgttttggtgtgtcagttatcgggaaagtgaaggatttcttgggggagattgcaagggccaaccagaagttgcagcttgatgcacaggtacaattataagattctaaccagttttcattaatcatgttattcacggcgtggttaaatcgtatccgtgcaattgcagaacaagcctcctgtggagtacgatattgaagcccttactgggaacgaggaggaatacattgagatggtgagagggatagtatatttgtaatatgttgtctcaa

SEQ ID NO: 15 - DNA, 662 bp, Zea mays
attcgagctcggtacccctgaattttgctagggcttatattctgacgtagtaaactacacatgtactgattatgaccataacaaaaaatgttgcactgattattttccatcgactgttaaatattatatgtaataaagttaacatcaaagctaatttacaccatgactttattttattgtgttttatgatgaataccttgatttttcttttataggttgtatctcctgtaagcatgtgatgtcgtgatgatccatttcatgttctgactatgatatttcttagtttaatataacatctgtaatgaaaaaataggaattgaaaattggagcttgcatttattgattatctgttaaaaatcgaaccagttctattttattttcaggaactgtgacacaagtatgctatgtccactggttgcttgaaatgataatatatttttttatttagcagacatcattttgatttgtaagagaaagtgttcctggatgcatcttgactttgagggttaaacattttgatatgcttctggtccttttctgtaggtcctgtctttgcttccttcatatgaaggaaaatctgtactagagcttggtgctggaataggccgtttcactggagaactcgctaaaacaggggtaccgagctcgaaatagtgtcatca

SEQ ID NO: 16 - DNA, 628 bp, Zea mays
tgcatcaagctcatcaactttgtccgctccaaggtgtgtcagcaacacccttctgctgacagttatattttttttgggacacgttaatgcctgcagtagtgttacaggctcaactgctttgcttaggccctgattggttacgcttctccaccacgcttagattcgtggaaacgccaagtttctcgcaatcattcgattttcacttattacttcacagataaactgtcgattctgtaagaacaaaaataatctaggtgtttgttgagattctcgcttattttcatccataagcggattataagcgaaaccaaacagggcctggtatgaacggctgattaaggttacaattttatcaatttatgagcgtactctgcttgatttctagctgttgttgattcataggttgcagagaaaaaatgctggagctgtggccaagcattctcttccaacacagaactctgcagccacttgcacacagtggagaattgcctaattgagggaaaggtgccatgggaggacgatgtgtacttgaaacctttcatggaagatgactcccttttgcacagcttgtcaatcgatgacgatgatgaagatggggactgtggagtgtcaatggaaaagggacaat

SEQ ID NO: 17 - DNA, 609 bp, Zea mays
tggtttggcagtggatttaagatacactactaaagcaagcatgcttgcatattttatttgaattaattgggtataaattaaagcctcatgtgcagattcaaggaacacacaacgtcagccatgagcccatgacacaaagaatctgcacttacgatgtttattctttcatttttttctccaataagacggatagagacaagctacagcagccaggaccactaatactagctctgttaatacgtctatttccaagctaacgacccgctcttggtcgcagcatcgtggagagcgtcggagagggcgtgaccgagctcgcgccaggcgaccacgtcctcccggtgttcaccggcgagtgcaaggagtgcgcccactgcaagtcggaggagagcaacatgtgcgacctcctcaggatcaacgtcgaccgcggcgtgatgatcggcgacggtaagtcccgcttcaccatcagcgggcagcccatcttccacttcgtcgggacgtccaccttcagcgagtacaccgtcatccatgtcggctgcctggccaagatcaaccccgaggcgcctctcgacaaagtctgcatcctcagggggatcctctagagtcgccaaa

SEQ ID NO: 18 - DNA, 623 bp, Zea mays
tgttgattcctggctaagaacctgcaagagaatgagcaattttgtcattgatggaggctgagttttctgcagtgcaatatttgggaaacagttatattcttccatgttcagggaagtgattccgataggtatgtatacattatttggatgctgagacctgaactaaaaaatatcttcagaattgtttgggtctacaacatgggtcctgcctaaggaaacaattcttatacttgcaggaaactctcatggttgatcatgtttcatgcaaacccgtgttgccctatcgccatgccaagctagtactgtgtctctacactaaacacatgtcacaggctcacaaccaggtgaccatgatttcagtttaggaagctaggaattcactttaccaaatttgtaaagcagcaaatctaagaaggcatactctatgcacagcagcctttaagatggcaagcaaaagaaattgcaatgatgagtaagaaaaaataggcaaaccgtgagaacttctttagatcccatatcatcgccgccataaacaaaaagatgccctcctttcttagaatgtacttctgacccaacagaccaatgcaagacaataacaggaagcctatgactccctgagacca

SEQ ID NO: 19 - DNA, 621 bp, Zea mays
agctcggtacccctgtaagtatctgcagtcagaaacactagtgcacgaccgcagaaaatgattgtgaactgtctctgtgatgcagaaaatggcgaatgcacacaacttcatatgcggctttcccgaccaatataagactgtcgtcggcgagcgggggatcaggttatccggcgggcagaagcagaggatcgccattgcgagagctttgcttatgaacccacgagtgcttctcctggacgaagccaccagtgccctggatgctgaaagcgaatatcttgtacaggtaagcacgaacggacatctcctgatctgctggttccagcaagaaacgaaccacactcttaaccgcgatctacttatcagttaaatgtgctttggttcttgcttggcgagctggaacgtgacgttggttttcccctacatgtgccacaggatgcaatggactccttgatgaaagggaggactgtccttgtgatagcccaccggctctcgaccgtcaagagcgccgacaccgtcgccgtcatctccgacggcctaatcgtggagagcggcacgcacgacgaactcctggaccgcgacggcatatacacggccttggtgaagaggcagggggatcctcta

SEQ ID NO: 20 - DNA, 626 bp, Zea mays
tgcttgaggcgggtcacttcgtccgcggattcctgcagcttacaacgttgattgtccaattcctccattgtaaagcggtgactcctctccaagatggtcagcgagtttctagaatcacgatacaatctgtcaagattgtcacgagaaacagcaaggatacgcttttcttcctgcgagcaaaaatcaactcctttaaaaaccaagcaagtaataggaacacagcaaggcaaagcacagttttgtaaattaccttttcagaatcgagctgagcatgaagagaagaactcagtgcattggcgtcatccaaggcagcagagacttgacccagttcagtttggctctgagagtacttctcctcaaagtcagcacaccgctgaaccaattcagcctgatcccgggaatttttttcctcaagaattgaaatctgccgagtcattcctagcaagagataatcaaacaaaacggggtcagaaggtaaagcagtccacagcgaaggaaaagagaagcaaaaaagcactaaccagcgttggttgcctccaattcagagacacgatgttgaagtgacactggattccaacacgcaagagacgaagccacttctgggacggaagcaccctgcaatctca

SEQ ID NO: 21 - DNA, 1256 bp, Zea mays
tgcggttacagggtgcttctgtcccagaagtagcttcttctcttgcatgttggaatccagtgtcacttcaacgtcgtgtctctgaattggaggcaaccaacgctggttagtgcttttttgcttctctttgccttcactgtggactgctttacattctgacccctttttgtttgattgtctcctgctaggaatgactcggcagatttccactcttgaggaaaaacattcccgagatcaggctgaattggtccagcggtgcactgactttgaggaaaagtactctcagagccagactgaactgggtcaggtctccgctgccttagatgatgccaatgcactgagttcttctcttcatgctcagctcaattctgaaaaggtgatttatgaaactgtgctttgccttgttgtgctcctattacttgcttggttttttgagggagttgacttttgtttgcaggaagaaaaacgtatccttgctgcttctcgcgacagtcttgacagattgtatcgtgattctagcaactcgctgactatcctggagaggagtcatcgcttcaccatggaagagttggacaatcaacgttgtaagctgcaggaatcttcggatgaggtgactcggctcaagcagctgggcactcggtagtattgccatgtggcaagccaagaagatctcgaagttgttgggcttctgtcaggatagctttgagctcgttcatcttgctaattagccttctgttcccagggagcaagttgcgtgccctgttcatagcagaatgaaaaggcttcatgacagtggttgcagtggaggagctttcatcctctcggagcaggggaccttttccgctcttggccttggccttaaggacgttgtactcatgctcgtctagcaggtcctcggcatcatagaaggcttctttgagacgccgaagccaggattccagcttgcccctatgggggctcttctgggccgcttgaatcaccaactcgaactgtggcaggacaatgtcttgtagtcgttcgatctcacgcaccatgtccacactgaggtaagctgaagctttagtaagaagctccttgacaatcggcgatgctgcccaccttaagccaactagcgccaagtccaccatgaagttggagtagtttgtgcttcctcttactttgtgaaccaagaaaaaaaaatatgaatggatgaacgatgggaagtagtaacaaagctgttctttttttttttctttttcttctgcagaaggcaagca

SEQ ID NO: 22 - DNA, 633 bp, Zea mays
tgctgaaaggtggcgctgttcgtcaggtccgtgaagagcggcgctctgaataccatctttccggcgtaggggtatgcgcagccgcagtttgcagggttcaggctctggtcactggaacacgaggccgtagaggagcacttggccaggctggtgttgtacgctatcattctctcctgcttgaggctgcagaagactttcaattctgggtccacgcagcccgggttccccagtagcctggatgcaggtttggcaagcaagaaatggaagtttgtttctcagttgtttgggtggagaaaagaagcagcttttatggatcttggggctgagtgtttcttacactagagtcttgttgtagcttggggtgacattggcagcagcaatgtcgttattcatgagattgatagcctgaagctgactgctgatgttgcctgtgacctcaagtgtcccgttgaacgcgttgttgctcagcacactgtctggtcagttacaaaaggaggtcaacgtgataaaaaatgagcacagcaccaaaactaagggcacgaaattaaaaacccttaaaaaataataattcttccttgtctaaacttattctttttagtttataaaagttgccagaacattacacttgctgca

SEQ ID NO: 23 - DNA, 618 bp, Zea mays
tcgagctcggtacccctgcttctcctcggcgacaatgaagtcagcgaaggaaccgaggccggtaaaggagcagacgcggtcgccgggctggagcccacgcacgctgggaccgactgcgtacgtcacatgcattgtccttatcgtccaagacaggctcgggcgaggcgaacatggctgccctgggatgagggggcctcgggcgaggaggagattctcccgagctcacgccatgtacaagatcgggctcgagcgaggcagagtttttggaaaacccctgaggaggacctcgggcgaggcggggttcgatccttttgacctcggggacgtaccttgatgatgcccttgagttttaaatgcgtttttgggaataatctgggtaccactaattatcatacccgacaacatgtaatccacaagatacttagattctttcaacagccagctccatagtcagatactcaaaaaagcttgtaaaaaaggctaaaccaaacaggtccttaccggtttcaaaaaacagcaaatatttctgctcctaagacccccacctacacctaacgtggcctcaatcaagcagaaaaagaaaaccaaaaggaattatatcacaattaagaactcaca

SEQ ID NO: 24 - DNA, 659 bp, Zea mays
ttgaagcttttgtacaattaatacaaaagctaatctcccggtagattagccatctttaggtgcaagaagcccaacaagctttcatcactcttcgtgaattcgtcttggctgaggagtatcatcttgcccagcaaagtacaccatgacaaacagaagggcgatgacaaatataaggatgtacagcgagttcaggctgaccagagagttcaggaaacccatgaaagaagggccggtgattttcttctttgttgttcttcctgctctgtatccctcaaggaattggcttatttgagatgcttggtcaccttcttctaatctctctgaaccatccaccttcaccaggaaaattcaatacataaaataatgaattcttatttaatgattatcagagagacagtagcagtttctatcttaatcaactattaactttttcagggaattatgggggtaaacaaacaggaacctataaaagcaatacctccattgatagaaaaaccgtgccatcactagtaagaaacatgccagtaacgcagtggtttttatatggatgctggtattagaaaatatataattaactactgaggatgctttacttactagctcatactcctcatctctatcccacacaagtagctttggcaggggtaccgagctcgaat

SEQ ID NO: 25 - DNA, 569 bp, Zea mays
tgggacagtactgttagcatatcatacgcagcagtacagtagcgaacttacgattgttaggagtttgtattcattgtcagtgaacagcaaagtttcaccttggtttggccttccaactctcgttgaactgttacattaataattcattgctaattcttaggttggagactttgggttgacaaggttcaagcgcaacactctggtttctggtggtgtacgcgacactcttccatggatggcaccagagctactaaatggcagcagcagcaaagtttatgagaaggcaagtatgcatcgtggtgctatcatatgtatgtacctgcgatgcccatccaaccttttgtttgcctttcagcactggtacatttctcgaatgcgtcagcgttgaacatttaatgagaaaagtggggcaggcctaatgccgaaggctcacagatgagtggggtctagaaaagggataaaccgaggcaagtttttcctccgtatttgcaaatacggagaggctgcttcgaacctgaaacgaaaattcagcaaggcgtcatcaccttccttggcggccgtagcttgca

SEQ ID NO: 26 - DNA, 598 bp, Zea mays
tggtcgatggtgctccaccactgcgacacggacggggacggtgccggcggcgaggcggcggcggtggtgagggaccggaggaagtcggtgaccacggccttctgcgccggcgtgaagcggccgtaccagattatggacaccgggatgcggccctgcagcacggcgccgttgtggtacgtcaggagcgcgctggccggcggcttgtacagctccagcaggctcctcctgccgcccgcggagagacgtgccgagctcaggatcagcacggacaccagcgcaactgcgacgtggctcgtgctctgccagccgcgaaagcagctatgaggtgatgccatttctgactctctctctcgcggagggattggcgacttgttatgctagtagcctggtaagtgatgatagagtgaaagtgcaggagtcaggagtggtttatgaagagtgaagaggtcaaatatttataggtccgaattcctcatgtgccaggtagtttcgtgaagccttccctgcccatccctggggtagctgtttttttttttttttttggagcggatagctttgaagctgactcagtgggaggcaggggtaccgagctcgtatt

SEQ ID NO: 27 - DNA, 617 bp, Zea mays
tgcaagcagtcgaggagcaaggtcttcaattttctttccatggacccaacgatcttgccaaaatgagtttgaagaaccattcccaatttcagtgagcatggcagtggaaaagaaggccttcatttttttggaaaaccgcataggcattgagaccacggtttatccagttccgttttgctcagccacagccatctcattcttaaggcccatcccaattctttgagactagaaataccaagaccgccaatttcgagaggtctacagactctgccccaagccactaaacaatgtcctcctcttacatctttccttccgcgccagataaagccttttctgatcttgtcaatagctttgagtgatcctgggggtatgtcaactgccaatctgccatggctaaataaatgagcatgcatgtcatcacatactggacatgtactcttctgccagcccttgtcattagatccgttttccacccagacaattgatcagccactctgtcaataatgggttgcacctgatttttggacagtttttttaaagacagaggcagaccaaggtatttgcaggggaaagaagagagctcacatggaagccgatcatgtagggttatcagttca

SEQ ID NO: 28 - DNA, 600 bp, Zea mays
aatgactgcttacatatttagttccttaattttctttgttggttggcaagattcctttgtcaagcccaggttaatgtatagttaatagatgatactaggaactctatgtgtttctgttggtttggtggatttagtctttgtctccttgagaaggcattcttgtacaaatatattaagttcatatgaaaagacatcattatgaataccgtttccagactgtaagaacttcaatgtagctaatgttgatgaattattacttgtgtaaacttgtttagtgaaacattaaataaaaaagtaccgcattatgaagaatgcgtaaacaaattcagtctgaaatacactacatgaccactttgtcccaactacgatgacactttcctcttcatccgtggtttgttttcaaactactatactacacatgtttgtgttgaggttgctccctacctaagcataatcattttttagcttgtgaaaaatgttgtgaatcaataacatcaagttaactgcctgagttttttttttggttcaaacttcaaagagcacattttcttgttttattgcaataaaatgatctcagttatccttttggacatcaaagca

SEQ ID NO: 29 - DNA, 598 bp, Zea mays
tgacccttaagggcctcagcctggctcacgacctcggcagcttggctccgggattgctcccgctcgctggtgacctggccaagctccagctgccgctgctgcatctcctcggcctgggaagccacctgctcccgggccgacgaagcctccgctcgtgccgacgccgcctctgtccgcgccgccgctgcctccgaattcagctcatcgcagagcagccgaaggttcgccacctcggcgctccgttggacgaggcgctcattagcctcggtaagcgcagcccgctaggaccgcagcgaatcccagaggttgctctgacggcggatgaacaacgacttggtggtgctcacgtccgcaagttcctaaggaaggaaaacatgatattacaaagaatgccctggtcatgcaaggtatacatctaaatccttacctggaagaccctaggaacgtccctggaaaggaaatccatggtcgaccgaagcgacctcatcgccgcctcagtatactcatggaaattatcccgagacctctcctctagctcatcattaagagagaggaggggttccgagtccgaggtggtgcggctccagaacaggagcag

SEQ ID NO: 30 - DNA, 700 bp, Zea mays
tgcaggggacctgacgcctcggtggaggggcatgcagaatcgtggcctgtcctggggagcagcggccttactcctgcgtagctcaatcccaatgagtggtgtgggcagccgctccggttctggggccacggcacctcagagccccttctcttcctcaacgatgagttggaggagaaggctcgggatagtttccgtgagtataccgaggcggcgatgaggtctcttcggttgaccatggaaaccctttctagggacgttcccagggttttccaggtaaggatttagacgtacaccttgcgtgaccagggcattcttggtgacatcttgttttccttcctcaggagctcgcggacgcgagcaccgccaagtcgctgttcatccgccgcgaaagcgacgtttgggagtcgctgcgatcccagcgggccgtgctcgccgaggccaatgagcgcctagcacaacggagcgccgaggttgcggaccttcggttgctctgcgatgggctgaagtcggaggcagcagcagtgcggtcagaggcagtgtcggcacgagcggaggctttgtcggcccgggagcaggtggcttcccaggccaaggagatgcggcagtggcagctggagcttggctaggctatcagcgagcgggaccaatctcggagccaagctgccgaggccgtgagctaggctgaggcccttacgggtca

SEQ ID NO: 31 - DNA, 596 bp, Zea mays
tgaaaaaatagatcacagttgcctcgggcaggtacataagctaatgtaatagtgcaatgaacaaaatggaactagggatctagccaaatagcaaatagtacttgtcaacgcattaagagttttcagggacaaaacataccaataaaagcatagcataaactatctccagtcttgtagtcacgaattatttcagctctgcaagcaaaaattaagaaattgaaagacgagaataaacaagcaaatgcacacaattagtaataagaaaggcactaacgatgtcacagttccaaaacgagaaaagattgtgtataaatcttcatcctgcaaaatgattgaagttaatcagcaaaagatgttcaaatttcaggcctaaaataaccagcaatgttgccacagcagtagaaaaccaggtacttctatgaacagaggttgaagaacaagtacatcttaaaaaatccaatgaagtggaaaaaacccggaaagaagacaagctgcaagcaatcaggaactaacactaacctgtgttactgggttgagcttacaaacaaataagacattatctggcggtttaacctcagcatctggaatatctgcca

SEQ ID NO: 32 - DNA, 687 bp, Zea mays
gagctcggtacccctgcggctgccactgtcccttcctcattgttgaacagaactccccaaaacacccccgcccttcgcacgctgtctcggtatctcctctgcgccttctctctctccatctcctcaccaaccaaggcactctcgcctcccgtcttctcccccctcttcttctctctctagttgccaaatcggagcggcagcaacgacagatccaatacatataggttccattgcatcacacatcagtcactccaaaaccatcaaatcacacgcccatcagatcacacaggcaaagaggagagagagagagaggagggtgggtgaggaggaagatgatgagagatatatactactaaactatccatccatccatcgatcaggtagcccggcagcaatcgcgtgccgcctttccactcacgtacaccaccaccacctctcagtctcagcacagcagtcggctcggttcgttcgttgccgcgtcaaatcggggcaagaagccagcagctagccagccccctgtcgcagtgttgcttcgcgtgccctgctgttgcttgcaccgcgcacgtacgtacctggagcaagctgcacggtcgattgatcgaccggtggttcgctgtcgccacggtgggcatgtcgtcctcgtcctcgtcgtcctccgccgccacggtgttcccgccgtccccgcag

SEQ ID NO: 33 - DNA, 633 bp, Zea mays
tggttggtgatgcaatcatacaatagatggatcttgtgaaaacttgatttcataggagtgattctagggtgagtctattgaatgggagtagggagttattaggcagacatatgtaattatgaatttgagaggttaacagaaaccaaatacaagtggaggagggagcaccaatacaatctgctgaaatttgtggatcgtcttttttctactttgaaccaatgcacacgtccccaaccatttcataggaattaggatcttatgttatttagagaatccaaaaactcctgggacttgtcaaaaacaaattaccgaaactgaataccactgcataaccaagggattcaggctttcaggtccatgtggtaaacattgcaaaatatgtgctatcttcacttttctgatgtttattatgaatgcatctttttttttgaaagtcattatgaatgcatcttctgaaaattgagttcactctgcaggtttcttttgtatttgtataacctataaaggtctcagcacccagtatgatttggttggcaaaggatgttttctccagaataatgaaagtttagcttctggttcattttattgtctggtcgatcttttttatactgtgataaaatggggaagcactca

SEQ ID NO: 34 - DNA, 628 bp, Zea mays
tgcttgtctgcatcgaagatcaacagccaatcgcgcgcgcggtccatcatacgtctctgactctgaggtccacagtcatcgcaacaatgcatggttcgcaggcggcagaagaatcgttgacgacgccgccggctgttactgtcggcggcaacaagtacgtacgtacacggctgccgccttccgtcgctgtcgccgcgtctgaagtctaaagtctaaacaatcaatcaagtcgacgtacacgaccagtcgagagctctagcctgacttgacttggtggaagcagccgccactggcaccaccgcgacctacaaattgaagagcgaggcaccatggctggctgcactgcacacctccacgaaagacggacagcatagagatagagagagccggccggccggcgcacagcaacaagataaaaatggaggcgcctcgccgtccctgctcctcgctggtacttctgctgcgtttcttggcgatcttggcagcggcggcgttcttcatcgttctcgccgtgcacgttgagcctgtgcaaggtactacgtactattactactatatatatatcctccggttccttcagttcacaagctgcatgctagaacgttcagctacacgttgagattaagca

SEQ ID NO: 35 - DNA, 632 bp, Zea mays
tgcagttctgtgcaacatacaaaatttttacgcttactcaccatgtagatatgtttttttagtactcagtgcaatagcctataatgtatttttttttccaacctagaaacttgtggctatttgacatactgaatatgtgaaaccatactgactatgcaaaactatagtttcttccttagataagtgcaaaaactaacttgatattgtttcctgtggggattattatttattcattctggctagaagtttggggaatatatagtcacagatctttgatgtaccataacctttttcattcgcttggtctggactctagaaaacttttgggcattttgtgaaggttgcctgcaggctaaacactctgtagggactgactgttagactgttgttttcttgtgttgttttcctgtctaaatgttatgggcctagagcccagcccatgtaatgtgatatatgggtttagggtttagggtttcacttctcgtaacagtgacgcctaatagggggcgggggaggtgaattatgggtatttgtttacttggcccagggtgcctgcatctgctgggctgggccaaggcaggatcggtcaggacttgccggtgcagggtctcttgtttggttgggtggaccag

SEQ ID NO: 36 - DNA, 639 bp, Zea mays
tgataaagcaacgctagttccctcaaagctaccttcggttgataaagctactccagttcctcaaaaatctccgttggtaaacaaagtagctcaggcccgtcccaaatctccagcagttgacaaagcaactccacatcgtcccaaatctccagcagttgacaaagcaactccagttcgttctcaatctccagcagttgacaaagccactctagttcgccctcaatctccagcagttgacaaagcaactccagttcgtcctcaatccgcagcagttgacaaagcaactccagttcgcccaaaatctccagccattgataaagcaactccaattgctcccaaatctccaccagttgataaagcctctcaagctctgccaaaatcattatcaggtgctaaagatgcgctttttccttctaggtcgctgcagattgataagtttactccagccgccccaaggttatcacaagatgataaggctgctctgccttcttcagaacagtcacatatatctccagctactagttctgaagctcaaggggcaactactaggaaggtcacaaccaccacctcactttcagaggctgctgcagcatggaggccttcaagtgctcctgtgttacccacaccaagatcaaccgg

SEQ ID NO: 37 - DNA, 612 bp, Zea mays
cgggacccctccgagacctcgtctcgcgagacaggctgctccggatcccgctctccagctgcgtgatgtcgccgaacgttcctgcgtcggtttcttcgtcggcgggattctcgctgaggtggttcttctccaggcgcggtcggttcatcgtcagagacggcgggcgactctgctctcccgatgaagaggacgtcgggatagaacggtactgctgtcgcggcgattttctttccgttctcctttgaggccggaggaacgggaagaacgacttgcctctccctggtctccttctttctcacgacccgtgtccattctttcgtcggggaagtagacagcggagtcttccgggtcagcgagcttctagctccagcctccccggagacgatctttttccgaagagccggaagtagcgtctttccagcattttcggagtttgttggaggagacttctgttccggcagatctgcgaggcggtgtagaattccttcttcatccgctacggacgagattgtcccgaagcagaatacagatctgggacgcacggcgatcttgctgtggaaggtgacggccattgagctagcttggatcgtcgacacaccccctacctggcgc

SEQ ID NO: 38 - DNA, 671 bp, Zea mays
tgcgcttacccgactgtctgcggcgcgtacggcgtctgcgtcagcgggcagtgcacgtgcccatccgcgacgtacttcaggcaggtcgacgaccgccggaccgacctcggctgcgtgcccgtggccccgatctcctgtgcctcgacgcaggaccaccggctcctcgctctgagcaacgtttcttacttcaactacgtggataccaaggccgcgctgcctcggatggtcgacgaagagagctgcaagaaggcgtgcttgcagaactgctcctgcaaagccgcgttcttccagtacggcggcaacgacacctcccagggctcctgttacctgccgacgcaggtcttctcgatgcaggtgaaccagtggcaagaaactcactacagctcttctgcgtacctcaaggtgcaggtcacaaggtctcctcctcctcctcctgtccctggtccctcgaattcgaatgggacggccatacccgcagggaaaggaaggagaaggactcgtgaagctgccatcgttggctccgcacttgcgggggccattgctttactagccgtgatcgtcgttacctcggttgttctccggaggagatatcggcgtagagatgacgaggacgacgaggatggccttggagaagtgccaggtatgatgacgagccggttcacgttcgagca

SEQ ID NO: 39 - DNA, 650 bp, Zea mays
tgcggatcttggcccagttctgcgagttctccaccctcctctgcagccaggtggagtagtccccgaggcggtactccttgtaccccctgccggagacgacccacccggcgccgcggttggtgacgacgaacgcgaagacggtgaatgcgaagaggagcaggatgaggaggaagagcgcgaggaggtagagccagaggaggcaggaggcgcggcacagcgcgccggccaggcccgcgagggagagcgcgaggaggagcacgcccagcgcgatgacgggccgctcgaggaaccgctcgcagtcggtggtggacgcgcggtggctgagccaggcgccgccccccagcgcgacgatggcgaggaccagcacgcccgcgttgaggaggcccaggaggccgttgctgcaccgcgccatggcgaccgccgctcgcgttcggctcttgggagttgggacgggatggggcttgcgagctgggagttgggacacggcgaggagtgcgtgcgcttgtgcggcgatgacggttggttgctggtttttatggtggtttcggtttctcttgggacgtttcgaattttgaacttggaaaggagactccctttttggccttctttctttgtccggttctcagttgttgtttggaggagatttcgca

SEQ ID NO: 40 - DNA, 642 bp, Zea mays
tgctgtccgacggcaaaaggcggccgtgcctgttgtaaaggcggccagagcacgacggaaaggcatgcggccgacgcgatcgcggattagttactgttgtactcgttcgttcgtgcgtgcgtgcgtgcgcgggggctccacccctccgatccccatccgattccacagtccaccccccggccccgccggcagataaggatggcttctttaatggatgcgctagattaacacaggctacatttaccggcagcttttctgcttggtttgtgcgttccagtggaaaaagcacatgctgacaggaaaggctcgttacgtagcagcggtccgacgtgccgaccgggcgtggtggcctcagggtcccccccggcccggcttacgtcgcacacgcttgctgctgcgccagcagcatgcccttcccagtcactgctgattcggctctcgactagaactagcgttgggactcggcacggcaccttttgctcgtgcgccgcacgccgtggccgtggcactcgttggagggtcagcactcagcaagccgttatatatgttggggaccggcaggccggcacctcctgcaggtccgggcagctttccgtcgggttttgagtcgctgtccggtgctattggagagcttgcttgcag

SEQ ID NO: 41 - DNA, 676 bp, Zea mays
tgtagcctttttttgctttaccagtctggacctgatgctgtttgttgctatcctccatatccctgatgcttatctgcattcggcagtggcttagcgactcggccttatcgccattttgttggccaccggtttcggtgagcctgacctcgcttgtccacacacgtcttcggccctgaaacacgcgcgcaggtaggccgtcatgttactcatgtctcgtcgccgacttgctcccatgaaaccatcgttatcgtcgtgctcctgacaccacagctccatgcaaaagattgtcgtcctgctcctgctcgtgagaccagaactggtccaaaagatatgcatcgacggcatccagattttctgacagcgacaccagtaaaaataaaaatagataggcaagaacctgggaatgaagaagcggcatgagcacatcaatggcaggtcgaaagcaaatcactcaaatggtcaggacagtcgttccaacatttgtaccaggaatatcaaagggcagtagaaaagtttgctggacacttccactgacaactacaaactgaataatcactaccattactgggcagggaggaagctattctctgtggcagcagcacccccccaactcccacacacacacacacacacaaacacaaacaaacaatattgtagcagacaatacaggggggat

SEQ ID NO: 42 - DNA, 634 bp, Zea mays
tgatgggggtgggaggactcaccatatctcatgtcaaaagccatctgcaggtcctctctagaacttggtctcggattatggtcttcatctccttctgctatctactacagttaactagtatatatggagtatatatcatagtttcctttttttatgagagtgcgcactgactggatagttttttttttccttctgaatgtgtcgaagcagatgtacaggaacatgagaaatgatcttggaatgcaaggtacataccctaaatgatcaagtagttcaggcacagctagctcttctctttgctcccagaaacgttagtaaaactgaaaagaaagcacgtatatatatccttttcccctcctgtagcttcttgggtcctccagagacactatacaaatggctaccgagattctcgccaaacaaatcaagtctatattttttttaaaaaaagtataaatccatggagtgagtgaaatgacagtctaattaaccagactaagaatgatttagaccaaaaaaagtacagtattacgtgatcattcactagtcatcaaacaaatgctgctgctgtctctttgtcttgaagggaattgaactcatcatgcatgggagagaaaaacaaaaactgatctctcca

SEQ ID NO: 43 - DNA, 709 bp, Zea mays
tgcaggaagacacatagagtaaaaatacatttttatcacctttcgtacgacgcaggagaactaccttcagcacagcctgaagtttcttgtatccattaattgcatctctagcaattgggtgcttaatcattgtgcaaaacgagttatacgtgcaatacggatcatatttcaagaaacggaaatagctaaacagatcatcaattgcattttgtataggtgttcctgataagcaccatctccgctttgctcttagcccacaacaggctctggccactacagttcggaagttttttattgtctgagcttcatcaagcacaaccctaaaccatcgcactcttgcaattggaccactgtcaaggtcaaagtttgagtccttaagtttcttcttctttttcttagccttgttttgcatattcgccgatggctttcttttattgctagcagagggttcttcactgttcttttgatctgcgtcatcatcagccatctgtttaggtacttcattggccacaattgtatatgtagtaacaactacatcgtattttgccagctcacgtggatctttggtccttgcaccaccatggtagactaaaacagataatttagcactttcgctaaccttgtcagttaattcgttagaccacgcttaagaacactagcagggcacactactagagtacctgcaggggtaccgaggtcgaattcggta

SEQ ID NO: 44 - DNA, 710 bp, Zea mays
  unsure (1)..(710): unsure at all n locations
ctcatccctgcaaggcgactctatagaacccccttgcagagaggaaggccaaactaggaagggcaggcaaggtaattaactaattaatataaggcgcgagagctggctggcgcacgcgcacacttgattattaattataactatcaataactaactaactaactaactaactaacttgttgatggttgtctgacttgtggggacggctcgtgatctcctcctcgatccctgtggctgtgacgccgcgcgcagtctatctcggtaagcagagcactcacacattcacgcagatgcagctctactagagggggccggggtagaaagtaaaaaaaaaagcatggtggtaaagatttccttgcattgtgtgtgtatgtggccgtgggtgtttaggcgggtacgacgtggaggagaaggcggcgagagcctacgacctggcggcgctcaagtactggggcccttccacgcacatcaacttcccggtaaaatattctctctctctctcgtaacattttggtttttttttttaccgtggcgtgcatggcaggacacgcatggtaaatctgtaacaatagatacaatacaatggtgtctgcgtgcctgatactgttgctgagggagctgagctgagcttattgtactatataataatggttataaaaaaaacatgtctgcnatgtgtgcctgcgtgcaggggggttcttctagagtcg

SEQ ID NO: 45 - DNA, 626 bp, Zea mays
tgattgaggaattttcagcagatgacatttgtctgggatctcattttactgaaacaccttcgaaatctgcagcacaaaatggaaaactgcaccacaaatctatggaggtgatcggtcttgttcgtgatagataaggaacaacgaaacacctgtgaaattttatcagtttgttcttatattactatgatggcacctctgcaggttattccattcggatttgtttttgaagatgatactctccttgaagcatctgacagctcagtagaacctcacttgcgacatctgccatgtaacagcgttcttgatgttgaccggcttcttaattcggtatctacttatctcctggttcttctacattgttcaaaatgctctggaaaaaagagcatttttaatagaagttaataaattctaagaagggttataatttatgtataggttttggaaacatctcagcatgttggaaggatgtcagtttcaacagaccaggatttgcctttcaaggaggtagccaaccaatgtgaagcacttctgattgggaagcagcaaaagctatctatctgcatgagtgttcgtgaaaaaaaggttagagatcgtgagcagcttgagctgtccacacagggggatcc

SEQ ID NO: 46 - DNA, 666 bp, Zea mays
tgcagatgatgcaccttcattcacagaatggtttagctgaccccaatcaatttagtccctggtctacttccatcaaacatgagacaaagttctgccaaataccccaaatccaacatgatgcctagcagtagaccatagcagtaagataattgatgagctagtcagctatattgcttctctgatacaaacaagggctcaatcactatattttcttttgtacagtttgattccaaagtagttcaagggcaagagatctatccagatttcagcgggagcacaaaagaactacctttggcgatctaattggtagtctttcttctgaaaaaacaactgttggtatagatacaagaaactatcaaaatattagtgctctgttctgcacatgcattctggacatcgtggatgtctaaatatgcttcttgcaacaggcctctcatgaacttgcttagtttgctgtatgagtttccttactctactttcaaattcattccactcaatcgtggcattcttcacaagtatgctggctagccggcgcttgtttggccttattgtgggaaagttcccaccaccatagtacatgcggtaaccttgaacaagagaagagaattgacttcctgggtcagtcatagcaaatgcatcggcaggggtaccgagctagaagtaggt

SEQ ID NO: 47 - DNA, 588 bp, Zea mays
tgcatctgccatcatggtcaagaagcaacagcttgctgttggcggcttcacttgtattctcagcagcagcagcagcaagagttttaataagcagcagtacaatgctgcatgtcctagtgttgcttctgctattagtccagtgttgccgcgccatccgtcctcttcctcctctgcatggcaatggccatggacatcctgcggcatgcacccaagaacgctctcgttccgccagcagccagagcaaggggagactactgggcatggccgtcaccaccatgacagtcacagtgatgacaagtaccacggcgtcagggtggcgaagcagcagcaggaggaggagaaggctgcttatcacaagacctggaactcggtctcctccggcgacttcagcttcacgtccacagcgtcgtctgacgcggaggctgtcatcatccaggctctgcgctcggaccgcctcttgtacgagcctgcagatcatatggacgaccacgacgacgcctcctgctgcaggcttatcaagcagccgccgcacagcaagcagtccatcagcaggcagaagcaggccgccgtgggcgacgacgagccgca

SEQ ID NO: 48 - DNA, 674 bp, Zea mays
ctgctgtacatgctgatcagagaattgctgacgaacacgttactccggccgaacccgtcctttacggcgcgtgcatgcacttgcctcccaaacgcaaggagtgccagcaccgagcagatgtgcagaactgttgtgtatattgaggcgtttacctcggcatcgccgccacaatggccatacgatctgaccagatcgatgaagaggcggagagcgtcttcaccgagtctgttctcccccaggcagcatattatgatgttccacgtcgaggtatcctttttcctcatacttctgaagagatcaagggccctgtcgacgagcttatgccgggaatatccgtccatcatgatgttccaagagcagatgtccctttgccgcattccgtggaacaccttctcggcgtccgacagtgcgcccagcttggcgtgcgcatcaaccaaagcattccacacgaaacaggacctgctcctctcgtccaggagcttgaagacgaccccatggagctgcaacagcatggctggtgactggacacccacgcaggccttgagcagggagctgaacgtgtgcgagttgggcagcaccccccgcgcaaagaactcggcgtagagcgccacgaagagctccaccgccttaccaggctcgccgttccggacgtggcacgacaccatggccgtcca

SEQ ID NO: 49 - DNA, 622 bp, Zea mays
agaggatccccctgcgagcctgcgactgcgccgcgagcgaccgcggcgggacaacattccgacacggacgacccgacccctctgtagccggcgagctgcctaggcccgctcgtaccgacgtgtgcaccacccatcatttccccgtaccccgagccggcggtcggtctcgtctcgggtccctttgcatccaggagggacgggggcaggggctagggcggacagccggccaggccatctctgtgcgcggcgttttctcggttctcgcaacgctggtgtcaccgtctgggttttttttttttggtcacgcccgcgatgcgacggcgcgccttggagcagtgtctctgaacatggccgggcgccgtcggttcacgggcttacggcaagcaggcaggtcgggcgtctgaggaggtgaacggaggaccggcgtgtgggacgggagacttatggcgatcggtgcctttcgggcgggccccatcacggcagcgatggcgcagatttgcagttaagtcaacaggactagctagctagctagtgtgtgtgtgtgtgtctgctgctctcgaccaagctgatgagggtccgcatccgtccagccggagctcggactcggtagcgttaattggca

SEQ ID NO: 50 - DNA, 655 bp, Zea mays
tgcatataatcatatctgttcttcatttaaatgttttgtttttggtgtctccagaaagctgccataaagaaaatggatatgcaggcttctcacgagttccttgctgagttaaaagttttgacacatgttcatcatttgaatctggttagtgacttctttttatttactgcaatggcatatttgatatgcgattttccccttagatttctttacttcctcacatataaatccaacaggcatacatttatgtttgtagtacatgtgactctgatgtacacagcaatttagattgcatattctgtcattacttgtatacttgtttatattgcctggatttcaaatttctacaaagtctaattgatatggagcagaaaatttctgggaaaaaatctaaacttacttcataggcgaggttactagaaaatttagcatcctatggataaaaatagcacttttagatgtgtcaggtagccctcattgtgggaagttgaaactctcaagagcacaatagtatgggatcagtggcggatctaaatctgtggggccaaagcttgttgattttagattaattaacatcatcaacatatatagttacagaatttataagggatgtaagcctaatttggaataagctgtggggccaggtggctccaca

SEQ ID NO: 51 - DNA, 582 bp, Zea mays
attcgagctcggtacccctggtattaatcattacatcacgcctcctccctgatgatgatccttgccttttgcattcaggcttttttctaatgtttcacagcatgcaagcatcatgctgcctagggcagagaaacatgcatgttgggaaaaactagaaggaaattgtgcgactctgagctgttgtaaccaactagtgaagtgactaataactacaccaaagtccagaatatgttttgtgtggtcagttatagctccagaatcattgtttttcttctttttatccatgcataaaaagttgttgttggtgtgtgtgggtggggtagcaaattcccccgacaagagaaaaatttgctattttagcccttctaacgtgggctctctgctattatgtgaccctctgtctatgacttgtgggaccatttgtgtctatgatttgtgggtttagtggtaaaatagagaaattcacaactgagagtgataaaatagcaaattccccacaagcaagacctataccctgcatatcatgtgatactgtactatttggccaaaaaaaaaaaccaaccatacttctctattttcgca

SEQ ID NO: 52 - DNA, 660 bp, Zea mays
tggtccaggaaggcttaaagtacatgttccaggagaagggccttgtaactgtgagttctcgttcacatataaattgacacccagatattgtgtagtattctactatagtagtatacatttgtatttcagtgtgaccatattgaattgttatgatgcccatattaacgtatcttttgttctccaggtgtggtctgcacccaattattgctacagatgtggcaatgtagcttctatattaagcttcgatgagaagatggtatgttagttcttttgtcttcaaggatgtgcttgaagcatttcacacacgtggttacttttgagtcaatttatacaataagtttatctcaatccttagtaggttttagtgtgcatttgtacaagcaacttttgtactgataaatgtttctgatgtgcaacccactgttttaaaggcgtcgcctaggcgttcaggcggtggtccaacgcctaggcgccttgctcgcctacctcgcctaggcgttcaggcggcagtccaacactttgtctcgccataccgctttaaaaaccatgatgccactaaaagatatattatgcaaccagtgtgtctggctatttttggatatttatcttagtctagattttacacaagttaatgctctgtacagctaaatggagtcacca

SEQ ID NO: 53 - DNA, 628 bp, Zea mays
tggttgtaggctagatggatccagtactaaatcctctcttcactgaaaagctcagttctacactcatccgattaaaagcacacagacacgtgtcgttgtaattatgatgtgttggcacactaagcaacggtgactacgaaacatgattgacgcctaggatttttaatactcagccagtcacatttttaacttgattaggtagctaatccccaattgagaattgggcatcaaaggcgattgcagcacattggagacgccaagttgctgctagcaaggggacagcatgatccggctacatcccaaagtgagctacgtagctattcctaccatgtctttcccaatgacttgaaaatttgcgcaatcagagaaccaaaaggcggcgcccgcccgcctgcccgcctttgttcgctttacaatggtacactgtcctcttcttgtgcaccccagttgcctacccgcgccactgtcctctcctcccaatatagtactacatctcagtctgtttctgcagatctgtcagtgattaggatgaagaaagcaggacttgcatcctttgatggtatgtttttcaaactttggttaatgttactttgaggttttatataaaagtcaggggtaccgagctcga

SEQ ID NO: 54 - DNA, 635 bp, Zea mays
tgcccactttagccaaatgggacatttgctgagtacgttgatgtgtactcacccttgctttacaaaccaccccaccccaggttgtccccactgtactcagtgatcaggaggagaggttgccaacttggaggactttgaggagttccaggactatgatgagttctagtttattttagtggcaacccccagtcagctgcatgtgtaggcttatcttctatgtttcgtttctccacattttaatattaatgttgaactctatggatatgtattagactctgtggcggacatcttgatgtaattaaagtattttccgctatttatttcgagcattgtgtgatgatgtccaattatgtaagccttgtgtacgtgagttctgatcctggcacgtacatggttcgcattcggtttaccttccaaaaccgggtgtgacaccacagtgcacccctggatccgagttgagagagaggagctcctctccgcagcgggtgtcgaagggggcacggctgcgcgtcgaagggggccactgtagccgccaaatgaagcacaacgataggggagagagacacaagtgtcgccagcccgctgtagttagtctaaagggcagagagagacacggtggcagcaatctctcacca

SEQ ID NO: 55 - DNA, 1225 bp, Zea mays
  unsure (1)..(1225): unsure at all n locations
tgaaatggtgagccagcgggacaaggttttctgtgcaagtggggaggacaaacagaggagaggaaccataccagtggcagtgctaactgctaagctctaacaacttctgggccggccggcagccaagtgccagaaaatgccgtatgtgtgtgccagtttgactgactgctgcaacgcaatttcgtgatgtaatatatcaactcggctctttttatcctatgatgtgcacgaatcagcgacgagaggagctggacaagacaaattgctgactgcgagactagcggaacagagaagaaaccaatgcattccttgtttgtttttggcaagaagggcgcacacgcctggagccccaactgacttccaagctggcacagcagcaggcagcagcacacaaccacaacaccagctcacgcgtccagcacaatccccattccccccgtaaccacgcattaagcatgggtttgcgctctaatccgcacacgcacaatccggactgggaacagtgtttcgaaatctgaacaagacggtcggtggcactgtactgccagccaggctaggatgaggctgctgcggacgttttgaagcgagaaggaagcacagcgacaacgtcgtctctctgttttgtgtgctactgctttctggtgttatttctctgggtttcagcccctttgtgactgtagtatgtagacttcatcgcccagtctaggtggatgcttgattgatgtgttgtcgcacttgttgtggtctgatggttgtgatgcctcaatcaggtactccaccatgatgtaataatgggttctgaacttggccaccatgctgttatgcgctgaaaacctttctgtaaacatgttgtatttctattatgcaagtaagagttgggggtatccctctcataaaaaatataatatcatccgctcaaactcgcaatccaattgaatttatttcaaaaccaagtcaacttaacttcgcatccatctttctcccacaattcaactggcgccggagcagatggaacgagctcaacacttcaccacagcaaagtagcagcaaccaacaaatcatcgtatctttttatattgcaagcatgcgtgtgcaagtcacaaacaggttacaatcacatatgtccattaaaaggcaggacatatgccagcatcattcaactaatctaacagtcttatttctctgaccaccagggggagctntagagcgaccgcaggcagcaagt

SEQ ID NO: 56 - DNA, 607 bp, Zea mays
tgcccgtacatcgagctgccggagccggacctcacgacgtcggcgttgctgccggtgcagctacagttctaccacgtcagtagatgcgccatctatctcatcctgcaaactttaaatggattcgttttttctttcaagtctcgatccttcacgctacctctgagctctgattgctgaaatttctgcattgtctgtcgatgttgtaacaggaagccggcacgaaggtacgtctcgcgattactcctatattttgttgcgttgcgttgcatcccataaatggacatgacgaccgtgcggctgatctgctctcctcgatcgaggtggtggtgcagatggcggtgttcatgggctgcgacaacggagagatcgaggtcgggttgtcgtcgagcacctcggcgccagcggtggctacccacgtgcaggactcgctcctggaggagctcaagcaggcagcgccaacggtggcttcgtcttcatcgtcctccatgccgtccctctccatcgggagccccgagtactcctcgctcatccgctcaatggccacatcgtctgctgccgcagcggctgccgccaccggcaccaccgagccatcttctcaacaacggca

SEQ ID NO: 57 - DNA, 599 bp, Zea mays
agaagcaaatgagcacctagacatgcatcaccaagagatccatggtggggaggctgacgaggacgttgacatcgagggaggagacgagtctgcttccagtatagacactgctggctcgggaagaccaccttcccccgagtcaagtgttgcttcgttcgctcactaggtgtccagggtaggcttagaagttggacagtcggactcctcgccgctagcttagcttttgcacccttgggggtactaggctaggtagagttgagtcattttggaacaatttgatgtaaccgtgttaaactctcttgggagcttgtttgatggatgcttttatcagtttaaaattggaaggaaaaatttatgcctctttaaactcccttttgttgaagttagagcctatcatgctgttttaactttttccccgtgatgaaatcttgaaattggaactgtggtgttaagtaagtatgtggtttttcagatggctgggaggcagcgtcgtggccagaacgagcacgttccaccaccacccccacctcccactctgcaggagctcatggctcagcagaatgagatcctgaggcaggggtacccgaggtcgaattcgt

SEQ ID NO: 58 - DNA, 596 bp, Zea mays
tgacatcgagatggggcactattcgtgcaggcgctttctccctgcactgtaaaagatggtccaggttttttggatcctcaggtgcaagtttacctatccctgtggaattcgagcttagtggcatcccaattcatgcctgggaactttccactgtccagcacattttgaaccctttcgcctgggtgcagaaggtacatgaggagactcttgagctcaagaatttggagacctttcgctgttctggttggtgttatgatttggcctcaatccctcattctagagatctctggattactgaaccgctgggaataggatcatgcgctgaaaggctatctcttgcctatcgtgttcagattaaggtgttggatggaccacgtgttgtccccgaccccgtccaaatcccaacagatatgaatggttccacacgtcagaggcggcgttttcgttcgcgttcgccaccaggggaccgtgatggccaaaggggttctacgggagacaacgtacttttgggcagacgttctgctcttgaacgtctaggcccacggtccgaagttcagcctagcaaggaaggcgatgccagtcagtgtgtccagaca

SEQ ID NO: 59 - DNA, 657 bp, Zea mays
ctgagctgaccagcggcctcccacaagttgcacgttctgttgcttgctcttgcacgttttgttctgtttcatggcatagtacggtcccgtacctcgtactctgaatctcttatagtagtaactgagaacagaggaagcaatggcttcgatttttggtacacttggaatacttgtatgcagtcaaattggactgtgcgtgcaaacacatggaagcgccttactactagctaattgtttgataataactgctctgaactcaaggttactacttactactacagtatttgtctgcatctttacatgttactaccacctgcttccacttgaggatattactaactgtcttggtaattgattaccactaattgttgacaacttgagaccgatggctgcagttaggattaggaatgtttaaccatgctcctttatgagagtaacatcagagtcaacatcagaatctggtaaattaatggattgaaagccagtgactagcaaaatgggaaacggtcatgctcatgcctccttttagtttcagagataaacagcttaaactgcccatataggaaatcaggtgcacacctattcttttgtataagttttagaatagtttgatgattcaaaatcaaagcatatagataatttctgggctcaatgtca

SEQ ID NO: 60 - DNA, 637 bp, Zea mays
ctagaggatccccctgagttttagtgagatttttgcagttttggagctctctattgctctatccatagggttataggttatgatcattataacacaattatataactaaatgaggagtataagtttgattaagacacctagccctaaagctagttggaacccaggaaaaatagtggttccaagtggtgctgctgtattctgaattttcagattggaagcagtaactgaaactgaatttcagtgttttgatagcagtttggaagctggtttgtggctagcttataaggttttaggctatggtgtttgtagatgaaataatgaccatatgatggtgaataatcttcagtaagtgggtatagcatgatcctacacgaaaagtagagtaaaactagctcaaagttggactgtttatggctgaaactgaattatattcagttattgaaaactgaatttcagtgaaagttgcccagtttagagccctattgcgacaaactcttgtggtttcggactatgaactatgtagaaaagttggagtccatggtacagagaataagtttcctaaagagagttggacttggtgctacataaaaataggagtaaaatgggtcccaaccttccctgttcaggggtaccgagc

SEQ ID NO: 61 - DNA, 626 bp, Zea mays
tcgagctcggtacccctgatatagatgacgaccgacaagttgggtaagtgcataacttacagctcatcctcagcatccctcttccatactagtcaatatatttttcctaaactgttccaaatgatactgatacttgaaattgatgtgtacagtgctgctgaatttgtactttacaagctaaaagagctgggcaagatcagccaagaggagatatcttgttttctcgaggagtttgacaagcttgatgttgaccagtctggcacactctcaacttacgaccttactctaggacaaacaattcaatgactgatgatgcatatgtgattttgctgactgaatgattttgtttgatgtcgttagcatttctgttgtccatatgtaacacgctataatgttgtaaagatgtaaattaagatgattgagaaattgtgccccaccttctctccaaagcaacttgaatcaaggctgtaaagaacaaatacttgctggagacagagacgacatacctgcaaatttatgattggtttagctctgcccctcatgccgtgtccgtgtttccagcatataatgtgaaaattgttatgtagttgtgatgaatactttgacttgttaccattggctctgca

SEQ ID NO: 62 - DNA, 593 bp, Zea mays
tgggaagcgcgtcaggaagcatgccgagaccaccggtgaagaggccaactttcgcagcgccgatgggctcgccgggcaaaatgccggagaaggggagggagcccgcggcgatgctgggggcggctgcgctggtagggacggcactgttgatgacgacgcgtgcagaaagcacgctagaagcatggggcacagccggtggtgggatctaggcagatgtggcgtcagaggccggagtaatgacgccgacggcgttgaggacgaggctagggcaggggaagaacctcggcggccccgagacacgcggctggcgaccagacatggcatcggcgacgaggacagttgcgacgacggcgaatggttggcccacggatggggagccatgccgaaggggcacacgacgggggagaccagggaagcgcgcgcagcaggccgtgccgagggaggtgttcaacggccagcggcccacaatgaggtcacgccagaggggcgcatgacggggagggaggggtgcgcagaaggccgcgctaggggaggtgaccggcgacagaggcacgtagacggcacagagaagcggccagcagtaaattgtagca

SEQ ID NO: 63 - DNA, 681 bp, Zea mays
tggagggacatgaacccttgcccatcgtagaagaaccggagcttgtccttgtttggatggaagactcctctccatgccttggaaccgcctccgctcgtgaaatactggagtggactgagacagaagaagcaatttcacaaggttcagtagcttggaaacggactgaaagttacttgaattcatctctgtatcgtatggtgcttgtacctgtctctgctgctaatgtgctccagacagtgatcgtgtccattgatgtagaagtcgacgccattgtcctgaacggtgtgaatttttttcccacagaaacagtgttattattatggacctttctgaaagttgaaaccgattgagtttgagatagcttctgaaatgtaaccttgaggactggaagtagtaattccagaagctcctcggtgtccctgtgctcactcacactcctcatggtgtgatgcccaaccacaatcttccaccttgcagttgatttcttcatagccacatccagatcctgcatcgcagaacaacaacaacaaaaaaaggttctataaaacgagcttcctttcacccgcactgacatggctgtgttcggagtgcgcaccttcagcaaattggcaatgtacttgcctcgaggcgccacccctctccagtcataacgatgcttgcccgggtgagtccaatactcca

SEQ ID NO: 64 - DNA, 644 bp, Zea mays
  unsure (1)..(644): unsure at all n locations
tgttaaggtgccagttggaagatcgggcctacctctgaagtcttcaggaagtgtggacccttcgcctgctagagttatgagaagatttgatcctccacctgttaagatgatgtcacagagagttcaccatccagcttccatggtgtcgcagaaagttgatcctccgtttccgaaggtattacataaggaaaccggatctgttgttcgcctaccagaagctacccggcctactgttcttcaaaaacccaaggacttgcctgctatcaagcagcaggatatcaggacctcttcctcaaaagaagagccctgcttctctggtaggaatgcagaagcagttcaagtgcaagatactaagctctcccggtcagacatgaagaaaatccgcaaagctgagaaaaaagataagaagttcagagatctgtttgttacctggaatccggtattgatagagaatgaaggttcagatcttggtgatgaagactggctgttcagcagtaaaaggaactccgatgctatcatggttcaaagcagagctactgatagttcagtgccgatccatccaatggtgcagcagaagccttctttacaacccagggcaacatttttgccggaccttaatatgtaccagggggatcctctanagt

SEQ ID NO: 65 - DNA, 594 bp, Zea mays
tgtcagcgcagactgcgcgcggactgacggcgcgacggccaaaaccggttcaaccggtttttagaccggttcaaccggtttccaccaggaagaaaccggttgagtggtctactcagccggtttactcaaccagaattcaaatattgcccggaagggctgtaatatcacttagcaaatatgacatgagatattttaaagataaaaatgacatttctcaattcatgttgctcaaacaaacaattttcaatcatcaaatttgatcaaaattttagttattaagtcacgtttcgagaatccaagatatttagctcactcctaagaaaacaaaacctagtctcatcaaggggttttgtgaagatatcggctagttgattttcggtgctcacatgaaaaagttcgatatctcctttggcttcatggtctctcaagaaatggtgtctgatgtcaatatgtttagttctagagtgttgcactggattgtttgcaagttttatggcactctcattgtcacacaaaagtggaattttgttaaactcacaaccaaaatctctaagggtttgcttcatccatagcaactgtgcacaacatgctcca

SEQ ID NO: 66 - DNA, 589 bp, Zea mays
tgctaatggcggaggctgagcgccgccatggatctgacacggtgtggaatggggaggagccgaagcggagattggatcaaagtggactgggcaggagccaagcaaatcgtgagtatttttgtttagtatttggatccctgtattccctccctgttgtgcaaattaagcacatgaaccctaaatttagttttttttattcgaatcattcttatcgaagtgtaatactaatacatgtattctgcctatgctatttctttggaatgcagccgccaacttgaggtgttgttggctcatcattccaagaagatttacctgactgcctatgctatttttcattacttagtttgtatttaaaattttagaatatgagaaaggttttttgacactcactattttgattgaagatacttttgactaggtgtccaggacgactgggttcgctatgctaagatgactgaagaaattggagagcaactgcatattgtcggtgatgaccttgtcactaatcccactgttagtacattgttttctttccttctaaaatagaagttaaaattccagtttggttgttgcaatacccttatgtcag

SEQ ID NO: 67 - DNA, 709 bp, Zea mays
ggttcatgagaagaattacccaatccatgatctagagttggcagcagtggttcacgcactgaagacatggaggcactatctgtatggacagaaatgcgatgtttacacagaccacaagagtctgaagtacatattcactcagtcagaattgaacatgaggcaacgaagatggttagaattgattaaagactatgagttggagattcattaccatccaggcaaagcaaacgtagtggcagatgctctgagcagaaagagtcaagtcaatctgatggttgctcgcccgatgccttatgagttggccaaggagtttgacaggttgagtctcggatttctgaacaattcgcgaggagtcacagttgaattggaacctaccttggagcgcgaaatcaaagaagcgcagaagaatgatgggaaaatcagtgagatccggcgactgattctagaaggcaaaggcaaagattttcgagaagatgcagaaggcgtgatatggttcaaagaccgcttgtgtgttcccaatgtccagtctattcgggagttgattcttaaggaagctcatgagacagcttattcgattcaccctggcagtgagaagatgtatcaggatctgaagaagaaattctggtggtacggaatgaaaagagaaatcgcagagcatgtggctatgtgcgatagttgtcgaagaattaaggcagaacaccagagacca

SEQ ID NO: 68 - DNA, 659 bp, Zea mays
ccccctgtaacatatatctgcctgatgaatactcagtttacaataactcctaaagcaatagtatctactgataatgaaaattttaaatggttcaagaaagcaatcaagtagttaacgagcatcctacaatgcatactcaatgcgatctaagcctagttcctaaaatgacaaagtacttaacatatttgtcactatgattattctagtgtgctttttgcaaacgatgtagtgctagttgatgaaagtcgggcaagagtaagggtgtgtttggttcagctttctaaatcagattcgcagccaaaaatctggaatctcaactaaacgggtacaacagcagaatagattcttgaaaatctatagattcctctagttcaattcagaatcacgtcctaccctagattttccagatttctgtcatccatgttacaagctgtcatgctcttatagaatcaatagttaacatttgtttcaaccagaattttatcgccaagttcaaggtggttaatcaattggtcacttctcaggagggaaaacagcaaacagccctggagttatatgaatccttgtttgggtcggctgtggaaagggagttcactctgaaccttcaagctctcggacaccaacaacataacctctctgatcttgatgatcccttcaca

SEQ ID NO: 69 - DNA, 589 bp, Zea mays
tgagcagcccatcttctacggttctacctccagtcctccactctcttctccggcctatcttctaccaccagtccaaccgaagatgagcagctcttctgaaggtatggatgtcgtgctgcttttgcctgttcttcactcctctttgttctctgctctctctccccctctgtttttcactcctctttgttcagcaaggtctggactctggaggaagagctgctattaagatgtttgacgtcgcagatgtgcatggacatcatggtgatggacgtcgtgctgctgctgatcaagtcatcttcctgcagtcccaaattgcctgagggaagacgtcctctgtggctgaaactggcatcaaaggctatgcaagttggtctatgtgagctacaacaggaagatgaacaacagatttacaaagataagagagcaaggttcaaagggaaagaaaagcaacccactagtgcttgaagagcttttgtgggaaaatgagtgggttcaggagtctgaagaagatgaggagctttggagtgcagtagatgaagttttaggtgcaactcaagctacccagggcagaaacttgcctagggcatca

SEQ ID NO: 70 - DNA, 666 bp, Zea mays
tgagtaaacaaaaggcattgttaaaaaaacatttgcaatcaatgtgtcctagagccagaaattaaagctaaacttcccaacggagctcacttaggagggctcaattgatatattatgcaaataaaaaaaactcagccagggaaggaatgaccgccatcccggtattatatcaagatagactaaaacaatggtctcggccgagaaaatccccaaactctgccccccccccctccccatcactaacgagccgacgtcaaccgtcccctctacagcggtccaaccggagggtggcgcacaggaagccggaaaattcgcccctgaggggaatcgaacccgagacttggaggtgctatactgctattcggaagcctttaaccactaggctagaggccatttcgcatatattatgcaaataacaaataagattgaatgcacgagtatctaacctctgaagtgatgtgaccatgtgatggcttcagttcaacatctttctctgaagtagcttttctgcgcgcagcattcctagtatgtgggcctttaggttcatccaaactcaatttaagaacagcttttccttttccctttgaggtgtttatgcttccctcctgataatccttcttaattgcaccactggtggcagggggatcctatagagtgagcgcagca

SEQ ID NO: 71 - DNA, 660 bp, Zea mays
ctagaagagaattccccctgaagggcaaatcatccctaccacggccaagcttgcattggtgaaacctgggcagtccttgattgtaaggaaacgaagtgaacggcaaaaaggaagttgtggcacagagcagatatccttgatccccatgcatttcaccaaagagagagccctgaacttctggctgcagttgaggaggaaagcaagaataccaacaagagtaacacggttgcattcctcaagctgtaagttctcaaacacctttgctgattctgtgaaggccttaaggccagcatccgacacatgtccgcacttcctcaggtaaagcttcttcaagcttgggcagaacttggcaatagaagcgagcgcaagatcagtgactccagggcaagaggtaacactcatgcacctgagattctgcaggccagcagcattagccatcacccagaaacccctctcaccaacagtagcaagacgagtaagtgaaaggtcagtgatggccttcccgtagtatccaatcacagcaagtgaagcatcagttatgttcagtccctggagccggatcttagcaagcgaagcagtggcagagcacaccaggctggagatgccttggtcaccaacaagaggacagttcttgatgttcacagcttgcagtttcatgca

SEQ ID NO: 72 - DNA, 600 bp, Zea mays
tggtgataaacagccaagagtttcactctgggagattgaaccactgatggcctttccgatgtacccaactgcctttccattaaggctaaagcgtccgtgggcttcagggctacctatgttcaatggtaggctgactgttgaccagaatgtccagtattcatggtaatggttcatttcagtttatattcaaaccaatttctctttgtatgcaggtgggaggagtgatgagttcgctcgttattcttctctcatgtggctccgagatggaaacagaggggctcaatcactgaacttccagggacttggagcatcatcatggcttcaaccaagaatagattatccattattaggtctgaagccagatacttaccagcagatggctgctgctgcactggaagaaattagagctggggatcatttgaagcagatatcttctctcctgccagtgcaacagcctcaaaatttgagtggtggattagatcctttatatggaaatcctgttctgcagcagatgcagttccaatctcagcagtcatccttgcaagttgtgcagcaaggttatggtccaaatgcaagcgactctgggttccttcaaaatca

SEQ ID NO: 73 - DNA, 619 bp, Zea mays
tgatcaaacctctgaaaagtctagacacgccaagaaatatcttcccttgctccacttcgtcctcctgcagtccatcgccatcccaggttacagcaaattcaaattcatccaggctggaagaagaacacggcacaccaactcgacacctgcaatgcatcatcgatgcgtgaagggaacgacagcagagtcatccgaagacggctgcagcgcgctgatcctgaccacgtagctcttctgcctcgacgcgacgctgctgcggcccgagccggagctcgggcgcgtgtcatccgaggagccgtcaccgccgaagaggctggaggagctggagtccctggcgtcctcctcctcctccccgtagccgtaggcgctgccgatgtgccccccgcacttgcggcagagcaggcgcgaccgcctcctgaagaggccccaggagcgggcggagcggaagtagggcgtgcaggtgagctcgtgggccagcgtgaaccggctctcgtcgaccgcgacgaaggcgacgacgcccttcctgatctgcttgcggtacttgggcccgatgccctccgtgtcacgcgccgaggagctcaggttgagcgcgtacccgcagtacccgcagggggatcct

SEQ ID NO: 74 - DNA, 607 bp, Zea mays
tgctggtgcactgcgcgaacgccatcgaggccaacgacgccacgctcacgcagcagatcctgtgggtgctcaacaacatcgcgccgcccgatggggactccaaccagcgcctcacggcggcgttcctctgcgcgctcgtcgcgcgcgcgtccaggaccggcgcgtgcaaggcggtcaccgccgccgtcgccgccgagtcggccgcgctccacgtgcaccgcttcacggccgtcgagctcgccggcttcgtcgacctcacgccctggcaccgcttcggctacacggccgccaacgccgccatcctcgaggccgccgagggcttccccgtcgtgcatgtcgtcgagctcggcaccacgcactgcatgcagatccccacgctcatcgacatgctcgccacccgcgccgaaggccccccgatcctccgcctcacggtcgccgacgtcgcgcccagcgcgccgccgccagccctcgacatgtcctacgaggagctcggcgcgaagctggtcaacttcgcgcggtcgcgaaacgtgtccatggacttccgggtggtgcccaccgcgccggccgacgcgttcacgtccctggtgaaccagctcagggtgcagca

SEQ ID NO: 75 - DNA, 622 bp, Zea mays
tgctgcaccctgagctggtccaccagggacgtgaacgcgtcggccggcgtggtgggcaccacccggaagtccatggacatattgcgcgatcgcgcgaaattggtcagcttcgcgcccagctcctcgtaggacatgtcgagggccggcggcggcgcgcagggcgcgacgtcagcgaccgtgagccggaggatcgggggcccctcgggccggctggcgagcatgtcgatgagcgtcgggatctgcatgcagtgcgtcgtgccgagctcgacgacgtgcacggcggggaagccctcgacggcctcgaggatggcggcgttggcggccgtgtagccgaagcggtgccagggcgtgaggtcgacgaagctggcgagctcgacggccgtgaagcggtgcacgtggagcgcggccgactcgacggcggcggcgacggcggcggtgaccgccttgcacgcgccggtcctggacgcgcgcgcgacgagcgcgcagaggaacgccgccgtgaggcgctggttggagtccccgtccggcggcgcgatgttgttgagcacccacaggatctgctgcgtgagcgtggcgtcgttggcctcgatggcgttggcgcagtgcaccagcaggggtacca

SEQ ID NO: 76 - DNA, 621 bp, Zea mays
catggggtggacctcgccacttcagctcgtctttgcagttgccacgctcttctgggcactcaagcttggggctcttcctggtctagtcccgctagtcatctttggtttcctcaacgtgccattcgcgaaaatgctgcaggggtaccaggccaagttcatggttgcacaggacgagaggctccggtccacgtcggagatactcaacagcatgaagatcatcaagctgcagtcgtgggaagacaagttccgcagcacgatcgagtcgctcagggacggcgagttcaaatggctgagggagacccagatgaagaaggcctatggtgcagtcatgtactggatgtccccgacggtcgtctctgctgtcatgtacacagcaacggccatcatggggagtgctcccctgaatgctagcacgctcttcacggtcttggccaccctgagggtaatgtctgagccagtgaggatgcttccggaggtcctcacaatgatgatccagtacaaggtgtcattagatcgaattgagaagttccttctcgaagacgagatcagagaggaggatgtgaaaagggtaccttcagatgactctggtgtcagagttcgagtccaagccggaaatttcag

SEQ ID NO: 77 - DNA, 638 bp, Zea mays
tgcaaattatctcaaagacaccataggagcagaaggcgtccaggagcttatcagcaatctttctaaagacaacggtgcttacattcaacatccatgtctatcatattgatgaaaagcataaaatgtttcttttattctggtatatcactaagcccttttatatgcctaacagaagggaatatccttgtggaagacattgtgaagctggcgtcacaaacagaggaaaacaacgaagctgaagaaactgcacgatgatttggaatagcagccacattcttggctcttaaaactcgacggtccattccttttttaaaaggaaccgcacataataaagctagttcctggcagtctcatgcaaaaatcaccaagcaggatggtcattctttttgttctgactggcggctgcagagaaaattgtatcctcctgttgaaagatattcatttatacagttaagtcccagcacaaccgatcgttaggttaggaattctgtccgaaatggcaacttgcatttcaaacgtctgccatgaaaatgagaataaattcggcgggctctacagatttttcatctattgtctgaacaaaagtataggcatcaaataagtatctgggtaagtttatactatttgaataagaatca

SEQ ID NO: 78 - DNA, 663 bp, Zea mays
tgctgcacttgagcagcttctggttcagcccccttagctttcttcctctctccagttgtcttggtctttctggttctcttcctacaaaggatgaatagttagtaggcatttctaacataagtacaaaggatgaaacattcataacttaacctctttttcgttccagttagaggcatttccaacttcccttcctatggtcattttcaccacagttggcgcacttaacttgtcgtctagccttacctgtcctctctagaggagataagaatctgtttttcttctgccttcccacacctctcctcttgaatattggtggctgcaatttgaaatctttatccaccttaggccattgtgacatgtcagtaatgttaggccatcccttgtcatatgctgcccttagcattgaaacaaagaaagccatgtccacgtagggttctagctgaggttgtctgcaagtagtgattacaacgaaagcatgtgggcatggcttccttgtcacctgccactacctacatgtgcattcctttttctctaagtatacaacatgcctcctcacttcttgatccctatacatcactgtcacctcagtctggtcaggtataccctttgtcactttcaaatggttcagtcctttggaggcagcattcaactgttgcacaacag

SEQ ID NO: 79 - DNA, 646 bp, Zea mays
gcaacactaatacgagctcggtacccctgaagagatttcagcccctgagctagatatggcagcagttttgtacagaaaacgctagtgggcagcagcaacatggtgtcgatcggtcggtgggtcggttgttgtaggacatgttccatagaaaaagcatagacgagtctacaggttttggagccttggtttggtcctctgtgtattcacctttctgtacaatcttagtagcgttgtgtaccttcccctggaaggaaggatagcttcagttagcgcttcagaaagtcaagtgtgtagcatattggcttattgtttgctttgcttggacaatggagatttgggagtggagttcataaccctgctgaataaatactcttagctggctatgtgtatgttggacgacaatatgatccctaatgtagtacacgtgaccacctcaaactgaatctggctttgtttaaatgacaccctcacaattggtcacaggttcagagatcatctcacactttgtcctgcaatgcatgtttcgcttcgtctttggagtgtcctggcacgtacgatgtttccgttcatctgttgttcgatgaattgcgtgatgattgccggacgccatgtgcgtttttgaacgaaagaacgtttgggtttggca

SEQ ID NO: 80 - DNA, 644 bp, Zea mays
tgctccgcgtacaccggaggatgacctcacgccgtcattcccgacgttgcaccccgcggcgccatctccaacgacgccggcggcggcgatccctgctgctccgtcgtcgtcgtcgtcggaagacgacgacgacgccgccactgccatcggcagcgccgtcttggcgtccgcctccttctcccgcgtctccttctccttgccccagaggacggagtagagcccagccacgatgatcacggcgccgaggacggccccgaggtagatcttctcggagaggatgaacgagcccatgacggcgacgatgatcatcatgagcgggctgaacgccgacgcgaacaccggcccggtcttctggatcaccaggccctgcacgtagtacgcgatgctcgacgtcacgatgccctggaacggaacggagtcacaatcatcagcgcaagagcaatatggtggccaggccagcccaccaccgtcagcatcgaacatcgatcatatgtatatcggatcggatcccttacggcgtaggcggcggcgagcaggttcatgtcgaatccgatggtccagaccggaggcgcggcgctccatggcgaaggtgaccacgacggcctgcagcgtgccgacgaagcagacgagcgtggtgagcgaca

SEQ ID NO: 81 - DNA, 643 bp, Zea mays
tgcaggatatataggaacagcacattgctcagtcagccactcgtccgtccaacgtacgaggcagggtttgcctgccatggcgcgcgtcctggttttgtttcggtaccttgtggtacaccctgggatgctggacggccgccagagggtccatgccgacgatgaagtggttcacgaacacctggaccaccgtggcgatgatgttcgtgcccccgctgcctccgaggacgccggcgagctcaccgtcctgcgcgcacagctcaacggctttcagcttcagtatggagcgagacgtgcatgctcgtgccgtcagactcagtcactcagacgaccaacgggctcagctcatgcagtgcaagccagacggcacgcggcgattagaatagagataccttgagtatgatcagcggcgtcatggaggacaggggccgcttcccgggcgctatgaagttggccggcgcgggcgggaggctgtccggcgtgcgcttcgcggggacggagaagtcgtccatctcgtcgttcagcacgatgcccgtcgacggagacagcaccttggcgccgaagtatgcgttgacggtcgtcgtcatcgccaccgcgttccggtcgccgtccaccacgcacaggtggctggtgccgtggtcgtcca

SEQ ID NO: 82 - DNA, 599 bp, Zea mays
tggaaatttacacagataccaagctagcaagaagaagccgccttctttacttaccaggtcgattgctctgcaaatttgccattaccacgacgtaaagatgcagagaacgtgcacccaaacagacgatgtgcttgttagttgttactcttgggagctcaggcgtgtccagttcttttttccttctttttgttagaagtaatgtgtattttgcattttgctgctaacccatatatacgtgtttatgagtaagttacgtcgacaaagaaatggcattccaatagaaagtttatttcctgcaatgcagttatttgttgtcaaatttcttttctttcctcaggtaattggatcgcagtgttctttcgctgtggatgatcggcggcgctcaaagaaatgcaattacctggcttacattatatattaattctttcgtgtacagaagagcatgctcttacatgagacctgatggtcaatttctcgggctactaattctttccgataacttgaaactgtcatatattcaaactttatataggaactatttatatacgtatcaagtcaactatatatatggaagcatgcatgttgtagagaggcacgca

SEQ ID NO: 83 - DNA, 663 bp, Zea mays
gtacccctgttgaacatgacctaataattgcttcgttgataaacaccgccgaaatgctgaagaaagaaaagtcaagtaattggctttgtgaatttaaggagtggatggatgacaatacagagaaaacagaaggcgacaacctatctgttggcttaactaatggcaatgggaagtatatcaaacaaaagaaaaggcagaaagcacacaaggagacttcaaataacatgtcggatttggtacaagtttcagaaggtggtagtagctcaaaccttttggaatcagattcatctttcacagataatgcattttctggttcaaatggagtcatcaaacaatcgtcaaatgaacttaattttgaccaagatcatctaaaaatgcacttgaattcttttcaacgacctcctcctctagagttagtagccacttcacaaactgaccccttttctgagttggaaaatggctctagaaatatgctggcaaatgggacaccatccaatacaatgagcaagttaatagaatcaagtccaccccatacatattcaagtccacagtcacctccacaatacaaggaggacattctacatcgaagactttttatggaggaagaatttttgcagatttcaggacatcttcattctattggttcacttggtagtggtagca

SEQ ID NO: 84 - DNA, 959 bp, Zea mays
tgctgtgtgggaatgggatacgataccgatacgatacgccgggcggggcggcgggaatctggagaggcgtgcggtccggtgcggtggtgctctggtctcggcctcggtctgcgtgagacgacgaggagccttgcggcgcgctcgctcatgtgctgcactgctggctgctgcgcctgtccctgcgcccctatttgtttcagctttttgcagcttctggccaccaaaagctgatgtggactgccaaacgcgtcagcttttcagccagcttctataaaattcgtttaggtaaaaactatttaaaatcaacataaacatataatcggttgagttgttgcaataataggaatccgtcactttctagatcctgacccctataaacatttttatcttcctccgcatgtaatcctaataatactcagattctccccacagccagattctcttcacagctagattttcagaaaagctgttcagaaaaaagctgaaccaaacaggctcatagtcttctgcagcggtggagccaccgtgcagctagactaaattattagttagattgtttgtatgtttttagctaatttttagtagctaactattagctttaatatatttaaatagggctatagtttaataataataatctattattaaagaaaaccgtgaaacagggagagagaaaccaggcggacgtaacggctagtggtgttgtgggtgtgggatgtggacagccggtgcggtcccgacgcctaccccttgtacagttctgttctagatctgtgtggcggactccggcaaggcggttgccaacggtggcgcggaggcagccaaccaccatgccgcgtaccctgatctacgagacaggcagcgggcatcgcgcagcggcatgcatgacttgattgtctctatggtatggtatagtatgctctcgaagcgtcttggctttgcaggcaggcgtagcagca

SEQ ID NO: 85 - DNA, 693 bp, Zea mays
caagctcggaacccctggccgacgccggcggtgccgtgcctcctccgaacaacatctccctcgctgacgagctgggctggttcgacgccatgaaacccgcgctctgcggctcaccccaaggtacgtaactgatccggccgccgttgccgtttgagacgccacgtacgacaccatcatcctatcatcatcacattgccgatgcatgcgctctctgtagcatgcaaggactacttcgcgaaggcgctgttcgtcgtgggcgagctgggctggaacgactacggggtcatggtggtcggcggcaaaagcgtcgccgaagcgcaatcctacgtgcctcagatcgtcgcaacaatcgtcgctgccacggaggcacgtataccataccaaatgtagttgacatgcatgcattgtgcttaattgtgcatggtccatatatatatgccctcacgatcacacatccacgcaactacgcaaggcgccgatcactcacactccacctctattgccgtcgtgtgcatgatgcatgcagaagctgatcaacgacggcgccacgacggtcgtggtgtcggggatctcgccgatgggctgcgcgccggggaacttggtgctgctggcgagccaggacccggccgactacgagcccgacacggggtgcctcaagggaatgaacgagctatctagggaccacaacgcgca

SEQ ID NO: 86 - DNA, 640 bp, Zea mays
tgcgcgttgtggtccctggatagctcgttcattcccttgaggcaccccgtgtcgggctcgtagtcggccgggtcctggctcgccagcagcaccaggttccccggcgcgcagcccatcggcgagatccccgacaccacgaccgtcgtggcgccgtcgttgatcagcttctgcatgcatcatgcacacggcgtcaatagaggtggagtgagtgatcggcgccttgcgttgatgtgcgatcatatggaccatgcacaatgcatgcatgtcagctacagttggtatggtatacgtgcctccgtggcagcgacgattgttgcgacgatctgaggcacgtaggattgcgcttcggcgacgcttttgccgccgaccaccatgaccccgtagtcgttccagcccagctcgcccacgacgaacagcgccttcgtgaagtagtccttgcatgctacagagagcgcatgcatcggcaatgtgatgatgataggatgatggcgtcgtacgtggcgtctcaaacggcgatggcggccggatcagttacgtaccttggggtgagctgcagagcgcgggtttcatggcgtcgaaccagcccagctcgtcagcgagggagatgttgttcggaggaggcacggcaccgccggcgacg

SEQ ID NO: 87 - DNA, 641 bp, Zea mays
gaagaagccagagacttgatttcttcagcccagttatgcctttcaactccaggagtcatcaacatccttggatgaggaagcagcgcaccagtgacatctccccagtaatcaggattggtggtgtaccactccatcgtcttcttcaagccctcttcccatggtgtgcgctctgcccatcccaatctctttagcttctgatcatctaagaagtacctctggtcattgaagggcctgttctcaacaaacctgatgactttctcagtatccaagccaaagagcttgcatatgtccttggctacatcaatcaccctcctctccttcacagtaccaatattatacacatgtccaacttctcctttgtgaaggaccacctcaaaagcttcggccacatcctcacagtacaggtagctcctgacgttggagccatctccatgaattggaagaggcagaccttgcatggccaaaagaatgaatttgggaatgagtttctcaggaaattgatttggcccatacacattgttgccacgagtggtaatcacaggaagaccataagaccttccgtatgccatcacaagcatttcagccccagcctttgtagctgaatatggatttgttggaagcaggggtaccgagctcgaagt

SEQ ID NO: 88 - DNA, 616 bp, Zea mays
ctgcatggtcaacatcatttaaaagtgcatatatgcctccttgtcgttcaacagaagataaaccccctccccagcgcataacacgtgataggtcatttccagttccgagaggaagaatggcgacagggggaggagattcgtagttctgcttttcaatagcatcaagaacccatgctacagttccatccccaccacaaacaaggattctgaagtgtttcacattgtggaatagttgtaatccaacttcaggtgcctgagaagcacttagctcaaatatctgaaacaagggttgtaattttcaggtcaagctaagagtattaaatcagttgcaatcaggagtgccaataaacgaattaagtaaccatattttaactacaacacgtatggatagatttcagtgcctataataaaatgcaagtgcatacaaaagaaatgcaagtgcatacaaaagagaaaacataaagcacgattactacagcagaatagtgctaaatggtgacaggtcgttcagtacttatatcaggtagaacaattggattacatctgtacatctacaattctagaatgacctaagctaaactattgttcaaaatatttcagaggatttgactcagca

SEQ ID NO: 89 - DNA, 663 bp, Zea mays
tactctagaggatccccctggcaaatggaggtaactttctactgattgccttttttttatttgatatggtgggtatagagttgttccagtagtatatgggcatatggccatgacgtggccgcgagtgtgccagtggttgaagcgcaatgctggaattttttacgcctcctccatgcactgcagggcggcgcggtgccggtgagcgagatgttcggcacgtttgcgctctccgtcggcgcggcggtacgcggcgctgcgctcctcggcagctctagctccaaccttttttttcccctttcctgacgcgaaaggcgaaactgggctgatttccgtgggcgcgtccttgcgtgtgcgtgcaggtcgggatggagttctgggcgcgatgggcgcaccgggcgctgtggcacgcctccctgtggcacatgcacgagtcgcaccaccggccgcgcgagggcccattcgagctcaacgacgtgttcgccatcgtcaacgccgtgccggccatctccctcctcgcctacggcttcttccaccgcggcctcgtgcccggcctatgcttcggcgcggtaagctagccacgtacagtatctcggtgtgttgtgtctggttagttagttggctggctcgctggacccaggggtaccgagctcgaatatggtataa

SEQ ID NO: 90 - DNA, 622 bp, Zea mays
aattcgagctcggtacccctgatttcctctcccgggagctggaggaccaggacgaatccgaactgctgctcgcgtacttggatcgtgactctgagttcatcagagtgttgtaagcgtgcttgatccgcagaaacttctcctgagcattgggctgcattggcaacaaaatccacgaggctggcggtgagcagagccatctcaatccccagcgttccaataaatccggtagagatcatttcaaaagtgcgaaggtgactaaagagcgcgagcaatcagcagggttcggtcgccacacgcacctccttgttcacgtccgggtggtacttgagcgcgaggcggcggtacgcgcgcttgatctcgttgggcgccgccgacggcgacacgccgagcacctcgtatggggactccctctgcccgccgccgccgccggccccggtgcgcgccctcacgctcgaacgtcgccagcgaggcgccgggccgcggcaggagaggggcgcggaggggcccgggctggaggcggcggcgacagctatgctgaccaagggaggcggaggccaaggtgcaacgaggcggccatggaaggcggtgagtggcaggggcggacagagagcggcggcccgca

SEQ ID NO: 91 - DNA, 655 bp, Zea mays
attcgagctcggtacccctggttcctctcctccgcccactgctgcgcgtgctgctgccttctctcgtgcagcctagtagcaccttcagaaccgggaaatgaaaaggagctttcaggactcggtcgtcactgactgaacagtagtgaaggttcagacggaagatgaaacgagaaaagactaacgatgtagcaggctagcagcagcagctttgcagcaaatgtacgtatacgactcaccagctccctcttgttgatgcagcgatgaaccgaagactaagactaccaggagcacgaaggcgaccagcctcgcaatcccaagtgacaccatgcttctgccgctagctgctgctgattcttcttctctatctcacctcacctgcgttcgttctcaccacactcccacacctacccctccttgcatctgcgagcgtgtgcgtgcatatatagaggcaaccggcaaggctcgtcaaaggcagctcgcaagtcaaaagacacaggagatttggctctaggcggcggcactgcagggttccgagttttaataccgtactacctccgtcctgtccccctcctcggccggcctcggccatcggacgagggaccgcatcccatgagaagaatctatggtctctggagctcgcgccttttgtttaata

SEQ ID NO: 92 - DNA, 683 bp, Zea mays
ctgctaaagaggctgtagcgtcatctgacactgttcctggagcaaaaatcagattgtggcgtagaataagggagtttaatgcatgtgtaccatacactggagtgcctgtcaatattgaagtacctgaagtggtcttaatggccttaatcagccttcttccgaccataccacatagccttcctgctgatgctcctcctcttccgcctccatctccaaaagcagcagcaacaataatgggttttgttgcatgcttacacaggctacttacatcaagaagtatggcatcacatatgatggcgtttcctgtcgctgttgggagaataatgggtttgcttaggaatggttcggaaggagtagctgctgaagctgctggacttgtggctatgctaattggtggtggtccttgtgattcatctatcttaatggatacaaggggagaatcccatgccacctacatgcatgcaaagtctgtactattctcgcaaccaatgtatgttccgattcttgttaaccggttgaggccaatatcggtgtcaccattgttatctctgtctgttgtggaagtccttgaagctatgctttgtgaaccccatggtgaaacgacccaacatgctacatttgttgagctactgcggcaagttgctggtttgcgccgccgtttgttttcattatttgcacatcca

SEQ ID NO: 93 - DNA, 651 bp, Zea mays
ccttcttgtcgactctaagagaccccctggcagggctgcctgtccagctccaactggacgacctgccgacgttcttcgttgacaaggaccgtcccccgggacttctggagttgctgacgagtcagttcttgggtttgggcaccgcggaccacgtgcttgtcaactcattctacgacttggagccgcaggtgagtaagcgaagcgcccacacacaaatgcacgtcggacatcatgtcatcctctgtgtatcactttcacaggaagcagattacttggcttccacttggggtgccaagacggtaggcccaaacatgccatcgacggtgtgcctcgacaaccacctctcggacgacgacggcaacgccgacgacgtagtatcctacggcgtccacctccacaccccgatgacggcagaatgcaaggcttggctggacgcccagccgccggtctccgtcgtgtacgtctccttcggcagcatagcgtccctgggcgcgcgacagatggaggaagtagccgaggggctttgcggcagcggtatgccattcctgtgggtcgtccgggccacggagacccacaagctacccaagaacttctccctcgaggcgaaggcggcggggctcatcgtgccgtggtgcccgcaggggtaccgag

SEQ ID NO: 94 - DNA, 592 bp, Zea mays
tgcagagacctttcattagatagacaagatcatgtttgtgaaagtttttccagttataaacatatgtggagacattttcattcagaaagaatgatagagaaggtcagtgtttatggagttattacaagtttctaggttttaacaattatctatggtgaaggtgaagtaaacattgagatcctatgggaatgaataaaagaaaaaagaacaaatcacaccaatcaagagttgcattactcgcgtacatgcctgcttccaatttctctcctcacaggacttgcaagtgcagtgaaccctgcattctgattccgaaagagacccttttcaccattcacaagagggctactaacactccctgatacaattctcctaggagaggcctcagaatctgcaggaacatctaactgaaggactctacacgacagaagagaatggttgtaagttataaccaatagtaatcaaatttgtttgcagaaagcctgcatcatcacacagcactgtgttaacactgaaccatattagctaaaatttgaaaataaggatcaagtcaaaccaaaattcgaacataatgatcaagctaaatactgaaaca

SEQ ID NO: 95 - DNA, 700 bp, Zea mays
tgagattaggagtcttgggtgtacccctaattatggtccccgacaatagcccccgaggctcgaagggagtgttaatactcgcttggaggcttttgtcgcacttttttgcaaggggaccgacctttctcggttgcgttttgttccggtgggtgcgcgcgagcgcacccgccgggtgtagcccccgaggcctcggagtagtggtttgactccttcgaggtcttaatgcgtttcgtgatgcttcggacggtctggttgttccctcatgcgagctggtcgtagcccgggtgctcagttgagttccaagttctcgggctggtatgttgacgctgtcaacggtttggtcggagccgggttcgcgagagcagcccccgagcctccgcacagagcgagaggacggtcaaagacagactcgacttttttacatacgcccctgcgtcgcctttctacaaggaggagggggggaaagcgccatgttgcccttggagggcgccgaacatggtgtctccagtgagctgctaacgggtaatccgagtggatgcccgtgccccatttgttaggggtcggctagtggcccagaggtgtgctccaaaagtacctgcgggtgatctgccggacccggtcccctggcgacggggtccgagggctcgatgcctccctccgatgggattccgttacaggatcgctcctgctgggtcgagct

SEQ ID NO: 96 - DNA, 575 bp, Zea mays
tgcatgccctgatggagacaagacaacacggcggggggccccaagccgtgcgagggcagggcagtggcgctctccgtcgtccagtctaatccaatccgacatcggatgcgtcggttccaaaaggcggacactaccgccaccagcgccagctccgagagagctcgtaccagtggtgtgtgagtgtgtggagctagcagtacgagtatacgacgcctgcctccacgcttactctagctagctagctagctctggcttttgctttgcctctcttttccccgatcaaatcgagccagaaaagctcgatggctccattgatcgctgcatgcacgcggacctactactactagctttagccgcgcatgcatgcacccgcgcactgtctgggacggacgaggcttgcgagtgcgtgctgctggctgctggcacagaaacacttgctgcctgcatgcgcttgccgagacccgagttggcagatccgatgccgcgcctgctcccctccccgtgccggccgggagagccaccgtagcggggccgcgggcgggctctctcccgatcgaaggtcaggtcaggtctca

SEQ ID NO: 97 - DNA, 662 bp, Zea mays
tgcggcacgtcgccgggcgtccatatcgtattgacttgagccgcctgtggccaaccaaccggatccgccgggccctgagccctggtgccgcgcgcgcgcgtcacggcgtggtcgtagcgtgtttatgagctcgcgacttgcgatcccggccggccggtcagtcagtcaaattaatggggtagcggcaagctatggctacgagcctacggaccggaccgtttgtttaagcggcggcggcggccacccacgcagaggaagtcgccgtcctgctgttcctttctttcacctgcgcttgattgcttttgtaacgtcgaacgaaccactctgctcgcacgttggaaacgccggccggtgacgttctcggccactgctcaacaacagtcatcgccggtactcggacgcgtgcaattgggttagtacaagtcagtggttagcgctttttgggtttccttcagaaaatgaaaaggcccctaatagctagggaggctttagataaacacctccgtgtgtattcagaacatgctgtatgtcccgtgtattcaaaagcaagcttaggcctgttgttagctgaagcaaataaagcgatgttaacagcggcagaaataaagcaaagtgaggcatacgtgacgacggggaaagcatgaatgaaaatatcgctagca

SEQ ID NO: 98 - DNA, 594 bp, Zea mays
tgcatgtgcgagattaatttgccgggtcaagctagaggatatctgcaggccgccgatgctggatgcatgggattgggatggaggtcggggctgtggatggaatgatggtatgcttttggagttgtggagtgtggactgccggtgctaggatgtatatataggacataaaccccggcacagacaaggagtagctagttcgcttagcctgcaagggagagagagagagagagagatgtggtgccggctccgcatctaccactgctgtgctgtgctgtgctgtgatggccggcgacatttggataaattcttccgatccccagccccaccatggctttttctccttttcggttggtaggaggcgggcggttttctctgcctccgtctctgtctcgctgcgtgctgcatgctttgcgtgcgccacccaccggcctgttcgctgccggccggccgccaccccaccacccgccactgatcaaccgctgcactgcacgcacgggcgaagcaagcagaagaaggaaagcaccattatatgcgcagcgcacaccatggccctgaattgcccgccgccccttcgttctgccgggcacgtacaca

SEQ ID NO: 99 - DNA, 611 bp, Zea mays
tggtgggccggcgctcggtttaaacggccagcatcgtcacgttctgctaggttgcgttgcgtgccatcgacagcagcatatccgctgaacggcgccgatggagccaaagaagccaatttgagtgccgtgtggctgcgcgtggtcacgggcgcctggcgcctggcacgcacatctgtctctatctctccccgttcctgtaggcactagacaacgagttgagttccggccgtcactgcgttcagagaggtcgccgcctgcctgtggatggacggaagggcaggcagatgatttccagagcgcgacgacggacggacacggccgggatatgcacgatcgaccacgaggacgttggccgctggccgcgtgtgcgtgtgcgtgtgcgtgtgcatgtgcagtgcgtgccctgggtttggccgccgcggcagggagcaaggagctggatttgctggagaaggagtggcgtacacggacccgaaagccgaaatcatcatcagaagacagaggcgatgacagcagcagatgcatgggcctaaactaaactaaaacaacgccgatgactgaagctcgcaggcccagcatgcagtgcgcccgtgctgctgcaacagccaaca

SEQ ID NO: 100 - DNA, 617 bp, Zea mays
tggaccctagtccgattggcatcgtccaccttcctgcggtagacttccaggcactctctttcgatgtccagcaacgccttgttcttctcgccctcactttcccctacttctgcccagatttgctgatcgcaagaaccagcattgcacgagttaatgagcaaacactagaatagtattattacttggattattaaatacagataaaaaggacacaggcagtttcagagtacattttggttagtctggcctaactcatgaactatctgaccaataatagcaatattaatttgtaaaggtaaacggtaaagctcaattaggttaaaaagagttgctattgtcccatcttaactgcctgcttgcgctagcagagccagccggaatagcttttttcggttgctcaagaagacaagaaccataaaggtggggaaaaaaagagagccgttcacaataaagctactgcactgcatcagggaattcgcctgccgagcagagcagttcaccgcccggaaaaggagagaatacagagaaaatcgccttgcataactcaaggggcggattttttttttcttttcttttaacttctctgcaaccatgggggaaaaaaactaaacaggggg

SEQ ID NO: 101 - DNA, 683 bp, Zea mays
tgcatgcattttggacaccggaaacggaaagtcagaaccgtcctgtgactctctctgtcagtgataggacggtactatggccgatgggcatgggccgggtagccggcgggaggctgtgacctggaggacggcaatccagaagtgaccgtccgacccgagacggatgttgtccggccaccccggaaggtcgacgaacgtctctgcctcgccggccttatcccctttcagccacactttgatgcacctgaacctgcagcatgcgagcagtttattatgacgatccgagctccgagtgaaaggttcgttcgttcagttcacctcatggtctcgcagacgacgacgaaggcctcgtccctcggcagcgcaacgccgttggcgaagccgagtcggtcgagcacgacggacgtctcgccgctgcgcgggtcgtaccggagcaggcggccggtggagctgaactctaggaagtcgtggaaccacaaatcgaagccgaacctggtgctggcgtcgctgaagtagaccgtgccgtcggatgcctcgatcgccgcgtctgcgaacctggcggcggaacggccggccggcggcgcgcgcgcgcgcgcgagagagatcagaactgtcgatcactagcaactagcatgagagagagagagagagagagaatcaggggtaccgagaacgagtttgta

SEQ ID NO: 102 - DNA, 633 bp, Zea mays
tgcagcatgttgagctgtcgcagcctgcgatggctcacctgaaaagtgccaaccgtcaggctgcaacgccaccagatccaggcatactatatacccatcaaaattcacaacaggaaagctaccgcattgcatgtatcttatataagcaaagcaaccattatggattatgatagccaaccttgtacattggcgccgctggactttctcctccttacagaaggtaatacctagataaaactcacaatcaaatcaaccaagacggcctgggtagcactagggtttgctgcagttaggtgtaatgaccaacaaggcaccttatgatgggtagcatctcttttatctgatgagccctcgctcccaccggcactgctttgtgtttgtgcaccgcacataatttcaaaatcagctcaataaatcaaccgaggaggtgagagaaactggcagtgcagtgcacatggatgcagcaaatgaaatagcaccttccggaagtgcaaccgccagagagggcgccagagctcttcctcttgctcttcgcttccgccaccgccaccggctcgggagtcgggtagggcacactctgcatagaaccaaccaaacccagcaaggaatttcacatttcaggggtgccgagag

SEQ ID NO: 103 - DNA, 571 bp, Zea mays
tgcttgcaggtggaagcgcatagctcgtaacagaacagaagcctaggttaccgcccgtagcctgttgtagtaggcccagtatcctgttgtcgccatagaggttccttgtccatgttcacgccatgtcgtcgtatggaatgtacaaatggcgagtgtaggaaaggaataaagtgtcatactcttcgcacggttgaaacgaaacgatgccatgaaggttttaatcataatctgttgttggtttcaaaagtcctggcaataatctgttgtcatgaagatgagttcatggcttaagctgcgacactaagtttctgaacttgctgtgttccaaattttcagtctggttcttccggtccccttcggtctgtatgattgatggtttgctggtggtgccctgtagtgttacagaaccatgtggacgtgatgcagtttggagtcgacttccagaaaatcttttcaccgatctcctgcaagtgacaacctgacattgtggctttgattgcccgggttggaggttgctttccagtcgcagcgagtgggttgggcgtgccggtgctgctgaaggcgtggagca

SEQ ID NO: 104 - DNA, 604 bp, Zea mays
tgcactcaaatctgaagttcattcagctctttagaagagaaacaaagctaatttcagaagtcgaatattacctgactaacctcatttcagcaaagatgtttataatagatgtcagtgctcactcgctctcaatggaggaaagcgagtttcagaaacatatggaatcggcaagactagctactcaagtatctgttgcaagcccaagtagctcacaggggcttcccacatctgcaagggcaaatcaggaggaaactgatatggcaggtttgcttactatactattcaatttattcggagaagtttgtttgaccatgaatttgcattccaaaacagtttgttttttgccaccaagcaaaatgtgttctttttttgtttgaaaacaacataatgtggtttttattgcggtcctgttcaggaaccattttacctgtcaaataaaacaaaatgctaagctcttacagattttcctttaaatggttgttgtgtgtccgtacccgttttgaggttgaatgatcatagcattcaaagcgatacatttgacaggttccagattccctttcatggactcagaaactgaaagcttgactccaggggaagtcaagca

SEQ ID NO: 105 - DNA, 639 bp, Zea mays
tgagatggtgaagtcctgcaaggcgtgtcagttccacgcaaaacaaatacacacaccagctcaggctctgcaaatgattccaccctcttggccattcgctgtatggggggtggatatcctgggaccatttcccagggctgttggcgggtaccggtacctcttcgtcgccatcgacaagttcaccaagtggccagaggccacccctgtggtcaacatcacccaaggtgccgctgtcgccttcctcaagtccatcgtctgtagatttggggtcccaaaccgtatcattacggataacggaacctagtttacaaatcagatctttcaggaatattgcgagggcattggcacccaactctgttttgcattcgtggcccaccccagaagcaatggccaagcagaaagggcaaatgcagagatcctcaggggactcaagacgcgcacctacgactacttgaagaagcatggtgcgaattgggtcagtgaactcccttccgtgctatgggggaaccggacaacacccagccgagccaccggggagaccccgttcttcctggtctacggggccgaagcctgtcttcccccggaaatcatcatgggctcccctcgggtccaggcctttgaggaatctatgcagggaca

SEQ ID NO: 106 - DNA, 614 bp, Zea mays
tagttcgagctcggtacccctggttttcgtgctagcgtgactatatcgttcggtggcgtggatgatagagcatcccactgcaggcagcctaatataggatagataattttgctgaccagcataggatatttttttttaaaaaaaatatgaatttggagtagtatagatgcggatagccttataacagtatcactgtagcaacctacctcagaacaaaacttttttttttgcctttcctggcctacgtttctctctcccccctcttttgtgaaaggtacctgtgcttgtcttgactcttgtgtttgtatgcttgtggccttgattgatccgctagaggacctccatggctctatgacaattgtcatgttcatgttctgcacgaaccattccttctgaaaatccccatgctcatccaatgtccatgtcctggcaacaatttcaatctggaccttccagtgtgtcagtaactcccattccattcctccacattatgggtttgatttgttggactggtcggatgaagggttaaaaaaaaagcttttccgtgttatcaaatggtaaatagtaatgtacctggtggctggtgctgagctcgatcaagagtttggtaggca

SEQ ID NO: 107 - DNA, 664 bp, Zea mays
tgacatgcgcacattctgcgagacgattagtttcagagagacggagagtccaaaacaaacatgagaattaacgccgtgcttaattttctggagcaccccaaaaaaaatcgaagcaggcagtacggggtagttaaaggtcttccctcctccggtcaaagccggtcaagaggcaacaataatgatgaatgaagccgacacgcgggcccgcgccttccttgtcacgcgcgaccgtggccccacccaccaccaccaagcacccccgcggtgacggctgacgcgcgtgcccacctcacctgacgcctgctgcctgctggtggtccctctcgtcagcttctgaccccgtgtgggtgtgccccgtccgctttttgccggctcgcgccaacgcccaccaaaccaaaacaaaacccatctttgtggagcatatgaggttgtcaatcaggtcaagattagtattcactaaatactactgtaatagcatatcacagttgtttctttccacaattttagaatcaagagtggctgagcgtgtgctgttgttggatggtaccacgagactgcacaaaatctcttcagttcgagaacaaaccgaccaagttcaagccaaactctagtgctgacatgacccaacaccaaatacctcagcagggggatcctttagagtcga

SEQ ID NO: 108 - DNA, 626 bp, Zea mays
tgccgtcggttggtcggagaaccggaactcgctgccaaacccacgggactgctggagtgtctgggcgaaggcctggtacttgcggatgtcggcatcactgacactgcggcgggcgtacttcatggactcctcgaagtgggcagccatgatctcggcaatgtcgtccacctcgtcttcctccatggcctcagggttgtccttcctgcgccgctcccgctcgatgtcctgaaaccaaaatgcctcgggggttagcaaaacaactctgcatagccaaatactgcaaaccgattccgagcaaagggattattaccttctcgatgttctccctgatggcatacttgcacgcacgctggcagatctcggtgatatctgctccgctgaaaccctgggtgtacttggcaagagcatgcaagtcaacgtccttagccacaggagacttcctgaggcaggctttgaagatctgaagcctggactgctcatcgggcagaggaatgtagataagctggtcgaggcgtcctggcctcagcaaggcagggtcaatgatatctggtctgttagtcgcgccgataatgaaaaccgtcttcttggcattcatgccatccatctcagtaagcaggggtaccgag

SEQ ID NO: 109 - DNA, 597 bp, Zea mays
tgccaggtaacggccacggattccatcactggaccgcctgtgtcctcgccaacagcaacccgcacgccggaaggggggttgcggacgccttcagattatcttcaaccattcctcctcctaaatcctacaatttatactttcagtttatatttaaataacacttccataactatatattattcatatgaacccaacaacaacgccgacgcctatataaacgtagttcacccacccaaagttgcgtgcagcagagcagcgtcgtatcgtattccatcctttgcttctattccacttcaaatcacaggcggccgcgcatccatccactccccccctctttcctgtcgcatcgcattgcatgctttgctccccacgcaatcaatcggagatcgatctcgtttccctctcttccttctcctatacaataccctgctcacttcttgaattgctccgcgccgaaacgcgcgcatgcaccccatgaacatgacgagctgcgaattcgccgccgtccgcctccctggccacccggcgctccggccgagccgcagtcgaccatctccgacgcccccgccgccacccgccgtagccaataagaaacca

SEQ ID NO: 110 - DNA, 699 bp, Zea mays
ctgttttgtcgactctagaaggatccccctgagcttctagccttctatgctgccgcggttaatatagtaataaaatgcttgacacgcgtctgtaatatctaccttgctgacaaaggcgaagaagaaattcgcgtacccgaaaaaaaaatactccactctggcataaccgaacctcacgtccgcccaaacccccgaacctgcgagactcctcgcgtccacctttcggtctcctcttctctgcgaatcccgtaatcccatctctctcgcctccactgccgcctctccgtctccagctttccaccgccgccgctggatgtctacgcagtagatccatagagccctgatctcctcgaggtgattcccctcgtcgccagaggtatcctcgggcagcaatatccactggcgacgcagccgccacagccgctacgttccgtcctccaccgccatcaccacggctaggtggaagcgctcggcgaggtagtggctcgggggaaagacatggtgctgatcgagctggagcccgaggaggcgacgcgcccctcgttgccggtggcggaggagcaggcggtcgccggggacgcggcgcgcccctcgtcttcagcggcgcccgaggaggaggaggcagccgctggagggaaggcgtcgagggcgccggaagaagaggaggatgcctttgaggacgcgctcaccgacgagcag

SEQ ID NO: 111 - DNA, 684 bp, Zea mays
tggccttgatgaccgtcttccacatgccgtcgccgacgaacatgatgttggtcttgtcgctccccacctccacgttgtcgaactaaccccctgcctttatgtagattacccaccgcgcctggttgttgttgggttccactgccaccgcgtcgctcaccgtcctaaagtccccactcccgtccttggccacaccaccgtgttcgctgccggcaacgcgccctgctactgcagccgccttcgattgcccaccaacacccacatcgggaaatcgcgccgcacgcgcccgtacccctcgaacgactcctcctttcgccgttgtgggaggcgacgcaacatcgcgagtgagttggacaccaggtgtgccatgtggtagatgcggccctagatgtacggtcggacgcgaccgtcctccgaggtagacgatcccagaaagtcgtccatgcaggtctactggttcgtcagccgccgagagcacggtctgcacgccagcgacgacggactcctcctctgtcgccgacgtcgatgtgagagccccacgaccgccgtgtccagcagcttcagtgtgtgcctgaacagctctaggcattcggacagcgccagggtccaaccaaactaaaaacaacgctatcgggtagcgctgtgaacgggtgcgggcccaaacaaaaaaaaaggccggaccaaaca

SEQ ID NO: 112 - DNA, 624 bp, Zea mays
tgcgcgtcgactctataggatccccctgcctgcacccggacccccgcggtgattgatatgcacctcccatccgtcgcatctatccgggccgtcgatctcggattccttcctccgtggtctctgcacaacaaaaccttccaagaagtggaaaagaatagcacctgcaccaatctgatccaagcttgcattctttcattctttcttttttgccaatcgtggacgcctgggatcgaccttaatttgacacacctttcatttcgatcgcatatttgcatccgtctgatgtgtcttttttttccatattaaattacatgcttcggtggttgcaagtttgcacgtaacaatttactgttggtgcatgaataatgtcacgtacgtccggcctttggatccccaggtggtgaatctccaggccgagctgacctacctgcaagcgcacctcgcgacgctggagctgccgtccccgcctccgctgccggccccgccgcagatgccgatgccaggcccgttctccatcgccgaccttccgtcgtcgaccagcgtccccaccaccgtcgacctgtccacgctcttcgacccgccgccgcagtgggcggtccaccagccgcaccaccaccaccaaca

SEQ ID NO: 113 - DNA, 687 bp, Zea mays
tcgatttagagatccccctgtctccttcatcttggtcagcacaaatgcaccgacctgactcggtgagtactgcttgccatctgttgtttcaacccaagcatcaccatttggagccttcacgattttgtatggcaccatcttcatctctttctgtgtctgtggatcatcaaagcgtcgcccaatcatcctctttgttccaaagaaagtattctggggattggttactgcctggcgcttggctggagtaccaacaagtctttcacccttctgagtaaatgcgacaacagatggtgttgttctcgcaccttcagcattctcaataacttttgggttctgcagtcatttaatatagttatttaactcagcaataaaacaaatatgagagacaaaaatcatgaagggcaaaaatccttatgagtaactcacctttccttccataacagcaacacaagagttagttgtccccaaatcaatcccaataacctcatttccagcagcttttgcactgaaagcagttaccatgcaaattagcattactaaaatcagaaaagcgttaagaactcaagcaggagataattattacctaaaaggtcttgcaaaatttccccattttgagcatatgttggcagcacatgttgactgtaagttggcacccaggggtaccgagatcgaattcgtacacaaagg

SEQ ID NO: 114 - DNA, 630 bp, Zea mays
cttaatccctccgcaagaattaatcatatcagttcattttgcatttggctgaagacacacttactgaactacatggagcaacaacttttggtataaagggggcagagaaagcaacggagtaaagagtactacgagtagggagggaccggccgcattaccatggcctcgaggtggccgtcgaagctctcaagctgcgcgcggacgaaggagagcgcctcagaggcggcgatgaacgcggcgtagttttccaccgccacctcctgcatctgccgccgcacccgctccgcgtcgaccctcaaaagctccggctcctacaatcgttcagcaagccaacaaattcggaattaccatcgccgccaataaagggtcgcgcagcaaatgttggcgtatgaaccttgtggaggcgctcgatggagaaggaaagaagctcagaaacgtagggctggtaggcggcaccggcgagcgggagccccatgttggaggcggcatcttgggaggagctcaaatccggcgtgtggcggtgcctcgcgtcgaggaggtccatggcgagcggtgcgagatctggagtcgtgactcagtggtgatggggaactggagaagaagggtgggtggttttaacaggggtaccga

SEQ ID NO: 115 - DNA, 584 bp, Zea mays
tgttatgaatggcagattgatttctgtctgagaagtcgacgaaagttcaacctttgccttctcagcagcttcacgaagcctttgcagggccaatctatctttcgacagatctatgccctcagttttcttgaaatcactcaccaagaactccaatagtgtattatcaaaatcttcaccacccaagaaagtatcaccatttgttgctttgacctgagtagcaatacatagaatcaaatcagaacagtgtgtaattcagaagatgtttccacaatgaaaaaaagagtgattcagaaaacgtttccacgatgagttcacttgaaggttatggagagatacctcaaaaactccatttgagatctccagaatagagatatcaaaagttcctcctccaagatcaaataccgctatcaagccttccttgttgttcattccataagacagagcggctgctgtaggttcattgatgatcctttcaacatcaaggccagcaatgcggcctgcatcctttgtggcctgacgctgagcatcattgaaataagctggaacagtaatcactgcctttgagatagacttgccaaggtaag

SEQ ID NO: 116 - DNA, 709 bp, Zea mays
cactctagaggatccccctgcttgacaggttccttgcttgccgccccactggtggcgcgaagcacagcaggatggtgctggttgcgctgtatcagattgtgagggagagcttccagctctacgccgatatctgcgaggtgctggcggtgctgctggacaggttctttgacatggagtatgctgagtgcgtgaaggcttttgaggcttatgctagtgctgcaaagcagatcgatgagctctgtgcattctatgcatggtgtaaagatactggagttgcaaggtcatctgagtacccagaggtgcagcgtgtcaccgataagttgctggagacgctggaagaatttatgagggaccgggcaaagaggcccaagagcccatcaccggagcctgaacctgagcctgtcaaggaagaacctgagccggatatgaacagcatcaaggcgcttccagcaccagaagattataaggagcctgaacctgagaaggtggaggaagaggtgaagccagagccacccctgcagccacagggtgacttggtggatctcagagaagatactgttagtgcagatgagcaaggtaataggcttgctctagcactcttccaggggccacccgctgctggtggaaacaatggttcatgggaggctttcccttcaaatggtggcaacgaggtgacttcggcatggcagaatcctaaggggtaggagct

SEQ ID NO: 117 - DNA, 674 bp, Zea mays
tgcagtaccaagctacctgatacaggtagctcaaaaaacacaccaggaacatgcttaaataatgctgcaaaagggaatggcaagttgatcagaggcagcagcaagctacctgatacatatagttcacaaaacacaccaggaacatgcctacatactgctgtaaaagggaatggcaagttgatcagcggcagcagcaagctacctgatacagatccactggagtcaccttgcagcaactttactgaggtcgacatgattgtctcaccttcaccacttgtctcatggaacactggatcttgtatggtcgagagcggaaagcagttgtttctcttgacaccactgccaaaaacaaaagcatgctcatcaaggtgccaaacatcaaaaccccagatgaagacagtttctagcactgaccaattgaacaatcttctaaggcctgtttcaaagctaaccatttctgataataatcatcctgatctagagcaaagtgtgaaggtaaaggaatcatggactagcactacgacacctcatgttgctctagcaaacaaggcctcactagaagacaagctctgttcgcctcgtactttctcagttcagaagagcagaacactgcctagatcatgcctgaagacagcattatctagcaagcagcagcaggggtaccgagctcgaat

SEQ ID NO: 118 - DNA, 691 bp, Zea mays
gtacccctgtggcaaataactttgtatccttcgtgctgctggtgcaacagcctgaacaccacaatttctggagcaccggatctagaggagagggaggaaaacgaggatagaaacgatccatcggcttcaactcagttttcgtgatttctacggtcattggagcgagtgtcgacttggtttcgtttctgagaaaccacttctctctttcttcattaaactccttgccacatcatcaaattggtgacatggcagtataattaattctctagaaactggatgatctggtgtgttgggactgctctaatgctcgtgcaccgctatactgcctctctcggcgttctctcttgtgctagcttttggctcgatcgccgtcatgcggggaccggtaagcgtcacgtcgagcggcttcgtgcgggccggcctaggactaggagggataataatggaagtgaaaagctagcaagcggcggtcagagcggtcctgccggccgcgcgggtactgcgggtcacaagcgattagcccgcgtcgtgggacatgggatgggagccaagttcgctgccgatatctttgattgcaagcatgcagaagcgtacaccttctccatgtctgagtaactttattcttgtcggcatatttgccgatgcatgttacaaacgccacataaaccaggggtaccgagccgatatcgta

SEQ ID NO: 119 - DNA, 612 bp, Zea mays
gagcgagcgaggtagaccagctcagaactgcattaaagcaacaggcacagcgtactgtaaaaaaaaaagaaaaaaaacagtagccggaagtgtatccattccaatctcaactcatgcatggccagattgtcgtgagtcgtgaggagagcgaaaaatccacaggagaacttacaagtgtcagtgccctgctggatgatggctgattaagctgagatcaacggatttggcaggaagctaagacgaatctgaatcgataagataacctaacactagttggagatatctggacagttcttgtgccgagttgtcggtggacggacacctcttgttcgatcgagagcaggagggcagcccgaccggagcatgtgcaggcaacggggtttggggggggcttttaacaaatggccaggccagaaggccagatgcgccggcaatgatgatggcagcctggaatgagtgcaacaaacaaatgtgtctgtgcggatacgtacgccagcggacgacgatcatgcatgccgtcggttccttccttccttgtgtttcgttagtccagtgtgtagtcactcaaacaaacgcgtgtccaacggccccgcgcggccaaatcgttcgaca

SEQ ID NO: 120 - DNA, 602 bp, Zea mays
tgtatcatcacgacgaaaatcgtacacatataatccaaagctaatcctcagaacccctaaaccctagaagaataagtcgaggtgataatccaaaggctaatcctcagaacccctgaaccctagaagaataaatcgagcacaatggaaagcaacgcttgaaccgaataactagctgcaaaagtcctactcgaaccaatcaaagcaagcaattcgacgaagcaacagcagcgaaccaatcaaagcaagcaattcaacgaagccactgcattagcgaaccaatcgaagcaagcaatccgacgaaataacagctcacacagttggagcgcctcgacccgcacgcgaatgacgaaaacggaggacgccgggcggaggataacggggtcactagagaaattaacaaaatccgcacggattgatcgagcaaccggaaaatgcggaggggttttagagcgtgactaacctccttggcacggttctcgatgaggccgatcacgaagctagaacgctcaccacttcctcctccgcctcctccgtcagctccggtggcgtcgccctccatctccgcggcgttgagccgggcaccgcaggggtaccgagctcga

SEQ ID NO: 121 - DNA, 675 bp, Zea mays
tattcgagctcggtacccctgctacactactattccctggcaaacgcattacagccgcagtactgctcctttggagcttccctgtcttgatcgggtggcgtcactcgttccatacttccatgggctgctagctgaacgctagccgacgatcacgactagacctggtggtgctcctgatctgtactgtacttcttttttgagcgaaccaacaaagcggcgagaagctctccaaaataaagccgctcgacgtacgcgacagcaacgtgtgccccctcgccgcacatctgcgtccaccaccgcatagcatcatcagtcggcatcatcattggatcgaactccaaagctagcactgcaggatgtacacatatatatataaacatcgtgagggagttggttgcatgcagtcgtcttgcttgcaggtagcgaggatcacacacacacacacacacttccttcagtgcgcgcactactacctgtcagtgagtcactcagtcagtcagtcagtcactcactcgcttcctcttcagttcgttcctctcgagaaccatatcccttttaattcgcatattctccctgcgtcgaacagcgcctttgcatgcgtctccgatcccttccacaccggctgcgccgccatctccggcgctagcgctactacggagagagatagcatcagct

SEQ ID NO: 122 - DNA, 696 bp, Zea mays
tggtttttccacgcagttctctaatgaatccaccaaacaataattgcacccatccttgatatgatttttcttgctgcccgggtgaccacaatgtgagcagtgcggcgatttaattgggcttttcttggacgatgatgggagatcatcaatatgtggattgtcaaatcctttgaggaacggatacacccctttaccaatttcatgcaacctggagaagtataaataagatgagtagctccatgaatgcaccatgggaggaattatgccaaaaaaaaaaaacaagtacagcacatacttatctaaaatttcatcttcatcaaatagctgcacaaaacgaagtgcagtctccaggccaaaaccaggcaccccatgcaaatcatggtcactgccaataagaagcgccatggccaccaattgcttcctctttagtccaagaccagactcaatatctgctatgtggtagcactcaaaaggttcctgaagaaaagttgatagtcttgatactattgcacatggaaaataataaaaaacacctgctgtgaacatagaactacagtggagcccttaccttgcaatttgatctgaggacctttacgacagtcttagccccgaagaggaaagcatcactgtctgcagtgatgcaagcacctacatgaccttcattattcaggggtactgagccgcaattagagggct

SEQ ID NO: 123 - DNA, 669 bp, Zea mays
tggataacaccgggggtccgtaaatatcatgccgaggatacactccggccactattttactccatccactgtacccgagcagaccacggtcgatttggatgggttcgccggagatagccacttcgcggccttgctccacgttccttggcacattaatctcatcgccgtgactcacgttagctcgtctggtggtcgccgaggagcttgccacggtaattgccaccaatcgcgcacgccagtaaccttcttctccggccgccatgcgtctttctcaaattcactggccaccgctgtgggagcctataaattgctgacctcgcctgctccgctaagtaattgtgcaactagtgaagcaacccgtgtctcgaatcatccactagaactccccaatttgggatttcccccaaatcactcaagaacaccgagcagtgtgacctcgccgtggtccgctcgtctcaggtccgctcataccctatgcccttccgttttagtgttcttgtgtgctcctgatactcgtcgaccaacttaattgagctaaggtaccttagatcgccgggaccgcattagaatgtccgttgatcatacggtcaccgtggacagagcaggttagagcgctgttcgtgaaattagttgaggggaaacgattattagggcttgaatttggtttca

SEQ ID NO: 124 - DNA, 669 bp, Zea mays
tgcaagcggaacaaacctgcaggatctctgaaaatctctctctctgtcgatccctctcggcctcgtttattgttccacgcatagtcgcctttaattccaggtgacagcaagggcaggtcgactgcgcttgttgcttactgctactccgatcgattcagattccctgcaccggccggtaatttcccgtcgtttatctgtctatctctgcatttatatgcatatttctgtattccatacattatttattcctcctctagtctagctacctgtctgaaacgctgtactgtgtgtcgcaattttgtcacatgtacgtacacagatcgcgatcagattgaggaggcatcctgtccagccatccatccaccaccagagaagagcatacagtagtgcaccaccactcatctcatccccttctgctgtgcccctgtggtatagcaatagcttcattaatttgcttgtggtgctgctgtgctgtgtgcctacctgccctgccactgccacacacaccacatataactccctggtgtccgtgtcctcagatgagtgcacggccctgcccctgccgctgcggcctcggcgccgcgcaccacgcgcacgccccttgctcctccggggcgccgtcgtccacgtccatggagccgcgtgccggcacggacttctcctgcctca

SEQ ID NO: 125 - DNA, 628 bp, Zea mays
ctaagacgagctcggtacccctgctggtccctaaagatccatcctaccaaggaagtctgataacctggaagagaaacatgaaggtgagagggtaagttgagggtgaaaatacaagaatacaaagaaacttgatagagaacagatacctgatactttttgcaattactgtacttccatcatcagcatcaagatgccgcagtattacctcttccaagcggccatctctgtaggcatgctgcaaaacatgcaggcaacaagggttcagtgttgttgactgaaaagtcaaaatgatgggctttactgaacagttaatactacagttcacactaacaaattaccaacgtgagccacacaggaaaacaataatcacaagacttcaagtttcctgcaccttcaaacagctatccaggacatcggtgagaacaatacgctctactgccaatgaacaagaatcgagaattgcacaaaattaatgtagcaacaaatctcaaggttcaaccatctataacaaatatgctaactaaataagttccacaacaatatgtagaacttcttatagcagcaataaaaatgaaccagattgaactaaagaggagctgatgttgactatcatcattggaaagtatcc

SEQ ID NO: 126 - DNA, 621 bp, Zea mays
ctgcttgcctgcttttgtgacacatgcgacaaaatgggaaagtgaagaggcgcgagaatcccaaaatcaaacagtgaaaaggaaccccaatcggacggcgcacaaggggagcacaaacagccacagaaacacgcgcgcgtccgttagcttttccctaattttattttatttttgccttaagagggaagggtgaggtagaaaggtcgttgaaactgttgttttaatatagtatagatagagatagaggtatacattaccaataactaatgtgtggaagaaaatttacaatttatttctaaggcccaataatgaaactggcttcaagtgatactagctgggatttagctcgaaatggcccacgtgccgatcggagctgggccggaaaatgcttgttcaggctttgaaattaacaccaaataaaaagaagaatggcgggcgcgtagagcattcgcagtagcagataaggcgcgttgcgttatctaatccgtccaagaggctgcggtgctcgctcaggctcactgctcagtgctcactgctcactagctaaaaacatctcctttcttatccatggagacggcagcgctcacctcccactccctgcagcgcccagcagcagcagca

SEQ ID NO: 127 - DNA, 576 bp, Zea mays
tggatacagcaccagaaattaagaatctaggcaaacggaaaatgggttccgattcaaccatagacaaagtaccaagaacagataaatttattacaaagaagacactagacaatctgatggttcaccctgaatcgcacgagtccatacaggcagcagtttgtgtcccgctccaggatatggaccatttaagcatcagcatacctgcaccccagaagagtaaacgatcagatttgttccactgaccaatcacacattgtgcaaccaatggttactcaccccagttcggagagcttgaggtgggcctctttgtagtcatcaaagaatgccttctcatcctacagagcacacgataatcagtacttgcctccctatgaatctccataccctggataataatgaccaaggacatactgcagcatatttctccacaagagggcggaagacagggtcgctcagcagggctttgtcacttgggagctgaagaaggccctccttgtcgccactcagaagttccctatgaaaatatgggaatagtaggatatatgggacggctgttaatttctagcacagcattca

SEQ ID NO: 128 - DNA, 645 bp, Zea mays
gactctagaggatccccctgctgacttcactttagattgtccaacatatgcttctttatgaattatctgagagagtttgagaacaaaaaacaaggttagcattgatatgtatgaccgccgcagattaaaataaccaattttgatcatcggctatgttcaaaattccgttatcaagcgtaaatctctcacttcacgacaaatttgctagcttatgggtgcatatttacgttccccttctaattgatttaccaagaacaagaatatatcacgctgatgatttggtgtttagatacaatccaaagaaaatatcgagaacactagataatagggacagaagacatgccaagctatttcacctgtcgatgaagattattcaattcaacatcatcaccatccacaatgcccaagcaacctaataagataacaagctgtaagcaacggtacattagtaaatacaacaaattagtgaactagagagcccaccaacaaattcactttacacatatgacatataaaaaaactttggcaaggaccacatctagaaatctgtattatcattaaagaaatataatttcttccttgagaaactatcattcaacacaacttcacagcagagtatgaggcaggggtaccgagctgtaccga

SEQ ID NO: 129 - DNA, 587 bp, Zea mays
agaggatccccctgcaaaggcgtcgatcggctcgtccttgccggccttccagagcttcttcactgcgatgatgtccccgttcggcatctcagctctgtacaccacccccgagcaacctttgccgatcacgttctcgtcctttaggcatgccaagatgtggtcgatgcagaagttaagcttctggaacggcgtaaacgtccaggggttggagaaatcatcaccacaagcacctgacaagctcatcgccttctggctggccagcttcctgctcctgttgatcagaatccaaaccacaacaagcagcagcgccaccgaccccagaacgccgcagacgagaatcacggtcttgaccgtcttcagggcagtcctgcgaaccgtgtccgccgcacaggagtggccatcgtaggactcacagaggttggcattgccaatataggagttggacgacaatgtcttgaagaacggcgtcactgggatagcgccagagaagttgttgtacgagatgttgagggaagtcaggctggtgagctcaccaaggaccgagatgctgccgtagaggccattgctcgcgaggttgagtgactgca

SEQ ID NO: 130 - DNA, 610 bp, Zea mays
gacccagagtggtatcttgcgctcaacgattctttggagcgtaggcagcatgtcgatgttgccgtcggtgttgctgtagttgaggaaactggggcacacgcggcacgacccacagcgtcagttcaaactaactagttcctagctacaacaggagcatctataggttctggacactgttacttactcgctgcacatgctccattggtacttcaagtgcgtcctgttagcgtgcagggcctgctgcacctctggtaggttgaaatagaagaacctttcgtaggacatgcagacatccactcccacactgatctttgtcgcctgcaacagcagcaacaacaacgacaacaaaaaaaaaagccaatcatgcatacgaggaagaaacagatgattagatttttgtgttgcaacgaccgtatgtaaagctcctgcgtacaaactgtctcaaccgtagctcctgcatcacaatcgatgggtagcagacgtcaagaatgacatcgtagttgttgacgtagtctccaactacggcgttggcttctgcgatggcatcgttgcacggcttgctctcgttgtgggggctgtcgttgttgaaggtgtaatcctcgaaatcgca

SEQ ID NO: 131 - DNA, 650 bp, Zea mays
ctgttttgtcgactctagagatccccctgcaacaacaacttcaacaacagcaacaacaacaacaacaacaacagcaacaagtaccattgcctccaccaccaccaccagttccaccccgagataagcatagggagttcatgagtcataagccacctacattcgctagctcacctgatccactggacgcggatgattggctgaagtccgttgagaagatgttgaatattgcacaatgcactaaccgggagaaggttttatatgcttctggacgtctgacaggtcctgctgctgattggtgggattcatatactgctgcccacgatgctgctgatactatcacttgggcagagttcagtacacagttccggaattatcatataccagctggattgatgaagattaagaagaaggaatttctatcgctgaagcaaggaagtatgtcaattagtgagtatcgcgacaagtttattcagttatccagtctccagatatgcccctgatgaagttgctgaagatgagaggaagcaggagcattttattgaaggacttaatggacccctgtagtatgctctagtggcacacacatttccatcatttcagaggctacttgataaggccctggctattgaacacaagcgtgttcaggggtc

SEQ ID NO: 132 - DNA, 598 bp, Zea mays
tgctatttatacgcctcgccccgctccagtctcagcagaaccaccagtcctccactccatcttctactccgaccacaaccacagcgaccacgaccgtgcacgtacgtacaggagcacaccaggcaacggcaatggaagcaccacgcccgcgtctctccatcgtcgccgcgctgtcggcgtcgctgctgctcgtcctcgcccacgcccacggcgcttcctcctcccccgctggcggcccgacgcccgtcgccgtgcggccctgggtggcgcggctgcaggcactccacgacctgtccgtgtccggcgagcagcagcagggcggcgggttcggggagtgctggggcgccgtgatggggctgagctcgtgctacggcgagatcctgctcttcttcgtcaacggcgagtcgtacatcgggcccgactgctgcgtcgccatccgcggcgccacgcgctactgctggcccgccatgctcgcctccgtcggcttcaccgccgaggaggccgacgtgctgcgcggcttctgcgacggcgaggaggcggaggccacccgcgcgccgccgcctgctgtgcccgctcctcccgcccggggactgggcca

SEQ ID NO: 133 - DNA, 636 bp, Zea mays
tgcttcgtcgtcgtcgacgacgacgccgagagagacagaagacaccacaagaaacctcctctcgtcgtccacacaccccacccatccatgatccatccatgcatctaaacttgatagttgggtccgacgatccgtccgcgcggccgagagaacacgcgtcgcggtcaaatatttacacgcgacagatctacacacagaccagaaaaacgcttcgcccttcacgtgctcgatcgttcgcccgccggccggccggtcgagctgagctctttttacagatatataattcccacatgtacttatttaattattcccgtgtacttttccttgcgcgcgcgaacgtaagcttatagtatatagtagcgtgtgtgttatataataatcagcatggaaatggaaaacttataggtgtgcgcgtttttgtaagaaaggtacagcagcgcacgcgtgcatgcagtagttcacgtcagtttgccgtagagagctgctatctagcaggcgccttgtgtgtgattgtgtctcccgccggaccccggaagccgacaagcccagccattgcacgcgccgcgccggtaacttgtgcatctgaaagactgccaacaaaaaaaaaaagtttcgaccaaccggccgcccgcccca

SEQ ID NO: 134 - DNA, 644 bp, Zea mays
ctggcgcatcatcttccagtcagctctgcacgtgccacactgccactgccaaatctccgtgatggtggtgggctgcatgtttgcgcaaactttctgccgaggccgaataccaacgagtcgagtagacgaaggaatcaccggcgagttcgatcggccccaatgcaaggttctctgtgtgtgcgtgggtgtgtggacggtggtggagaggtagatggcgaggcggaggagatggagatggggagatctatttatacatgatgatgacgcgtgcggaggctgcgatcaccagtcggtcggcaaacgagagcgtttcccacagcgtcgtttccaagcgacccttggcacctgttcagttgcttccttcagtcggaaggtccctctgcttccgacgtgaatcgcacgcagggtttagaggttcagtctcagtacgcagcctaatctctcacaataaggagaagacgccaatttgatctctctcatgtcgtgtataccgtttgacaaacatggtaatgctcttgccacacccgtgacatatctttgcctttatcttttatgttcggtcggttacgagattcctcgctactcacattcacacgactgactacgactacacgagaggcggttggccttgatcagacagacag

SEQ ID NO: 135 - DNA, 583 bp, Zea mays
ctgccagctaggtccacagatagtgtcatatgtacttatgggttctgattgtagttttttggtaacaatggtatgcttatataattcagactttgtgtaatattggtgagttcttaggaacattatagtaaaccagtagcaaaagaaggtttattcattctttatgctgaagaaaattatgagcattgctaggtaccacaatgtcctattcataattttgtaagcaaaaggactaattttgtgttgcgcctaaggtacttaacctaatcgactggacttggtgaagtatcctcacgtctagtttgggttgactcaattaccctctttgcaaaagagggcaaacagaatgatgtcgtgtggatctgaaaatatagaaatagaatagaatcaggaaacaacttgagttctaatgcaaaggagtgaaatcagcaaaaatacacacctctgagttgtagaacttaagggatccatttgatttcgtagaatgttcatcctcctcgatgttgaaaacagggtgctggaaatccgttcatcctcctccgagaagaagaaatatactgcaaaccgtatagtgtagagggca

SEQ ID NO: 136 - DNA, 633 bp, Zea mays
tgtggaagttcatatctttttttttgcccacatggtgcagatttcagattttggtcttgcagtgaccagtgggaatattgacaagggaagcatgaagctttctgggaccttgggttatgtggcccctgagtacctattagatggtattgtgtcagcttaattgtcaacttcgactcacatacataaacaacttctttatcgacagtgaagttctacttccatcccgtatctttcagctactgtgtcgatttcagggaagctgactgaaaagagtgacgtatatgcatttggagtggtgcttcttgagctactaatgggaaggaagcctgtcgagaagatgagtcaaactcagtgccaatcaattgtgacgtgggtacggtgcacacaaagttacactaaacatagtatatctctgatcaagtcaaattcctcaacttggaactttagtagtaatggacaattgtcaactcccattttcacgcaatgtttattgcatcttagttttatttttatcatatactagaaaaacatcaacttcacgatcagtgctaacatttaaggagtcaaatgcagtttctttgtgtgctgatatttgacatgctgaaaaaaaaatgacaaacaggccatgccgca

SEQ ID NO: 137 - DNA, 685 bp, Zea mays
tcgactctataggatccccctgatggtgcaaacaacacagaacgttagctatatatttaattaaataaacatataatgtacacccgtcaggtcaggtcacgtcacacaagagtaagtggtatcgtcgctactggagttgcatgaagtcatcaacatatttggagtttacccatcatttctaggaaaatagcattagatgattatcattagaaattatttaataatatcgtttcactgtttgtagagtgaagtttaaatatagggaggatgatgtgtaagctgcggagataactatcgatgggaatattatatatagtttacaaaaaagggattagtttgacttaaggataaagtcaacatgaactatagtttacaagaaagggaatattattagttagtgcctagaggagtatgatcaaaacagcattgctttgccattattaggtagggtgagcgcagattgcatttcaggatggagactccatgtcccggtgtagtctacaaaaagtttctttatcagagtgaaggcaggttgttatgtgttgtagctacatatttatgtgggattgattatttggacatataattggtcttcattggaaggtattataattatgtaattatacatgttgttggtcgatgtagctatatatctggaacgatttggtatcttctcattcaaggg

SEQ ID NO: 138 - DNA, 662 bp, Zea mays
ttcgagctcggtacccctgggtttgacgaatcgcatcaacttcgtgcaggtctcgacggccccatgccatggatgacgaggatgaagatcgccgtcggcgcggccaagggcctcgccttcctccacggcgcggacacgccggtgatctaccgggacttcaaggcctccaacatcctgcttgaccaggtgaagacgactctctgcctattcttttcgttgctgtctagtgctagtttcgacggcagctattgcgtagctgtagaaaaggatagtgacgacatacacctgcctggtgtctgcgtctgccttaacaaaatccagaaaaattccttcgctacgaacggaattcataaaaaaaagctcagtacaaaataaactttccaagagatttgaccctgaatcgtccataggagttggatgtcaaagtcgtctgctacgcgtcccaaaactgttggctggtttggaacgaagaccagccctgccccggcgaccggcgtgattggaactcggaagtttcttcgatatacccaattcctagcaatcccagctcatggagtctacgtacctagctcaataatggatacatgtatctgccattattttttaagagagagagagagaagaatctgcagggggatcctatagagtcgacgagcgggcat

SEQ ID NO: 139 - DNA, 659 bp, Zea mays
ctgtgtaaagggtccagcccccctcctctataaatagataggtatacgaccgatttgtaatcatcaatcgaataaaaaacacttctatttcgcatttatttcttaggagtatttctattctagttctagtttagccttccgatctccaaattcttcgcttctcttcgactctacgtcgattagagaagtctaggtcggcctgcccgagcctaaacaactcctaggatctctcctccccgacggggtccctcctgggagcgagatccagacgccaccggcgatcttccgccgcccctacgcacgaacatctaacatagactttaaaagaaattataattttatttttctaacatctaactaatactctaaactatattttaagggtttacacctcgaatatgtaggtcaacagggaccgtgactgtagcaaatgacccagaaaaagcagggacacgtgctatagcccaggccaccagaacacttggcttggcttttccggtggcggtgggaattgacggagcagagtggagtccactgtcctgtccaccacacacctctgctcctaaacccacccccaccctccagttcccggcgcaccgcaccaccgatggccacgaccgtccgcctgcagggggatttcctagagtcgacaaacaggc

SEQ ID NO: 140 - DNA, 620 bp, Zea mays
tggagcatgacttccccgcctatcccaagtacttcgacatgagcaactgatggttactatgctcccattcatatgagcagcaaatgcagagcagaattggcgaagagagctgcaggaatgggatagctgaattgtctgatgagaccattgaaagatatgaaaacatgaaacatgttggcaaagaaacgtgtacaagtggctccatatgctcttggataccaacaagatcatgtttctcaaggtgaacaagataatgccgaggagaagagatgagcagcaaaagcagagtagaattgacaaagaaagctgaaattgaagtcaccaaaagagaaccattgcacaaatgcttagattagttttggttggggtgcgccaggcttaggtagtagtgcaacacctaagcgacgctcaagagctccagtagcaagctactgttgcgagctctaccccacaaaaaataaatttaatatcaaagtagacacatggtctacatatcagatattaaactgataagaacagatactacacttgatcttagccaaaaggccgagaaaggtatgatttgttggccggcacctcggcatccctttgtagcgcgccccgcgcctctccgcagctca

SEQ ID NO: 141 - DNA, 714 bp, Zea mays
tccctgacctcatgatgagtaacccaccagatgacaccggaagaactgaacccaccagtcaaacacaagtgattttgcgccatggaggtgatgttggccagcaagagttccaggcagtagatgttgggagcttaacgccaccaaggctattgttaggcgccacatcttctgttggtgatgttggccacttgacccctcaaaggcacaaaaagcgagcagtaggcaagaagttgacaccgaagaagaaaagtgtttgacagtccctatgtgcatgtggtcaaactatgtgtgtgaaattaagtgtatgactcagtcagtcagttagtacctattatgtgtctgttagtcctattatgtgtatggcaaaccaaacctattgccactttcggtttatgtttgtttatgtctgcaatggcttttttatgttgaactatgtgctgtccattttctgtacgactcaagaaacagaatctgcaatggcttttctgtttatgtctgcacagattgttccaatagtagggaaacagaatctgttttcaagaatctatttttagtgaaccagaaacagttttctgaaaacagattgttcagttttagtgaccagaaacaggttggcaaactggtaaacagaaaactggcataggttggcacagattgttttcgagaatcgttttcaagtgaacagaaaacaggggtacgagaaaaggagttgta

SEQ ID NO: 142 - DNA, 582 bp, Zea mays
gggacacttgcccagatagttgtaaaacaagtggcacaaactgacaaagagcataagatgctcctccagttgcaggagagcgggggccgtaggacgattctccattactgctaaatttagagcccctagacataatatcctactttttctgtggtgtttggtttaatcttcaaagataaagaaaagatagaatagtcccggtaataatattgtctctatgtgggtccatcccttgcctggaaatttccaggacgaggttgctttatgcgcgacgaccaccgtacccatgatcgggaggaagaggagacatgcgtaggagagaaagaagaggaggtgcaccaggtgcgggtgcgggtgcgggtgcgtgtgatatctccagtgccgccgctgcataggtgagctggacgtgcagccaccatgagggcgagcgctacggccttgccggcttgtgagagagctctagccacgacgccacattgacgcgaaaaaactatcttcgtttgggatacacatcctctgtctaacgtcccgctgctgctgtgtggagccgggtcacagccggccccacacatcagacgcaca

SEQ ID NO: 143 - DNA, 616 bp, Zea mays
ctggtgtttggtcttgtgacgaggagagcggccgacagtgcgcctgcagtggtagctatctcgtcggccgtcaggaacatatctgagtcagtttttcttattatatatgtacggcctggatgatatgttgtggttcttcaactattctatataactaaaaaatctatttataacgtaacgtatataagtcttgtattttattcattataatatttaagatatgacttatttacgtggattgtatgagtataagtatataaccatatctaaactctgagaactcttcactaaaatatcgtctcttatgtgtgttttttacacttcggtcatttaagagcttgttcgattattcccaatacacatggattggatgggattggaaaaaattgtgaagaagtttgagctgtttgggatttaaactcattcaatcccgctcaatccacatggattgagagctaaccgaacaagccctaagtgggttgcaagttaggagtagtacgataaaatgcagattatttatcaaccacgagtttattaacacaagtgctgcgtgccaatgatgatgccgaacgcaaaatgagtggagcctgggagtgcacatgcagggggatcctct

SEQ ID NO: 144 - DNA, 1070 bp, Zea mays
cgcgactctctaggatccccctgatgagcaagctagccgctgtgtttaagaagctgaagctggaaagccctggacgtgtgctccatcattccagtggctgatcaaccgaggcaaccgcatacttcacgtccaaaacacatgcacaaaagtatacgagttcgatactttggttccctatgggctaacgtgccttactgtcacaactcacaagtggtgatgattagacttggtcagtcttccgtccggtttagcctactactagccgaggtaaatattgcgtacaaactcttatatatgcggtatacaaaaacaatgtaaatatgcataaatagaaagtctagcgagggttaattattctgaaaatacacaatgtatgggcttggcaccactgcagcaccgcctgcacaagctaggtcactgccttaattaattgacctaagcttcctctgctccgccatcttcgtcctagaagagcctgcaatcgacttgtccctcttcttgggctatgtagctgacctcttgtttccccatggtacggatgtacgcatggactttgactcgcattcgacaatgagggcatgggttaaggcttagcgacataataagatagagcatataggaacagtggcgggtccaggatttagaggtgggtattcaaaatttttataaggtgattttttggaagattaaaacatatatatcaacatatatagttaatttatatatatataacctataattaatcacacacgctatggtcataattgattcaataactagtctactaaactcaaatttcatacaactatttcaaaaaatttaaatcgaaatgcatctgttagttattgttcagttgctagctggctgcttgtcctctatgtcattttccaatcgctaatgccccatctgcagcccagtactgcaagcagcaaagcaggggaggtcaggtcgggtggccactagctgggtaggcttagacattggcacgatgggacattacccttggttgtctgtcctggcacgcggtgatgccctgactactatacggtagtgtcggcgttttcgagggt

SEQ ID NO: 145 - DNA, 857 bp, Zea mays
attagagctcggtacccctgtgatggctgagttgtaggagcatcctgcaactgtgatggtccaatctcctcctgacctgcggcgccagcgccagtgtcgtcgtcgtcgtcgtcgtcctcgtcctcgtcgtcgtgggccacgtcctcaaacgtgtcccgcgtcgatcgtgaggagctcagtcttgctgtagatggtccaactgcacagatgggaggctgaacgtcctgctgcatacgaggcacaggcagctgcacgtcaacgctcgctagagaccggtatccacaccgagccattgcacgacgaagacaacgtgataccctatgtaattgaaagatgatttacacacatatgttagaacatacaaataaacaatttcgcttctaaacattcatactcactggtagtaacgaaagtgtagtactgtctgaagttctctgtgagatgcgctcaagttcaacaacagatacgagcatagagtttccctattcacaagttagaacattaggatgcacaaaacaagacataatgcattgaattaacagaactaaatttagtaaagaacttggtaccactttgtcaaggattggagcagcctcaatttgggaccctagccgagcagctatgtcgaacgaagtgtcttcgtcgtttgacgattcttgctctacatagtctgcagctatccactgtcccttaagcttgcacctagtcacaccagcataccaaatcaaatacctttggaagtggtagtttgtgtgcggctggtcgttgatatagtttagatccccctgctgatcccattcatcaatataatcacggtggtgggtctcaaagtctgtgaccttcttctgcctttgttt

SEQ ID NO: 146 - DNA, 667 bp, Zea mays
taattcgagctcggtacccctgaaacttctacaactctttcgtgaaatccagaaatttcaacaggctcctacatgaaaagggaaaaaacaaattatatatagtagaatagtagataatggaaggacacagtatgtggaataataagattcataaggtccaagtttataaaaagaacatcaaattcattcaaagcatcgataggaaaaccaaagctaattgaagttatatagaataaaatgtcaataaatgttgtgaatgaccagtaatccctgctttgcttcttaagcctgatgtatctagcaacagatgtagatggctaaacttgactctgaaaagtgctagtaaaataatatcatctacttccaaaggaatttttgtcctcgaggcaatacaaaatatacattttactgagatgcatgataatcttatggtaaattggttttcgttacatgaaataggagatgtgattgctcccatttgtcccccagttaaatgttaatgcatgcagctttcaattacttagccatggcttttcttccattggctaggaagatccatgccaaagttctgataatagacaatgtggaagaaaacatatgaaataagaagggaaagatttggtaccagcatatgtgtaacagaggttcctatcccaggggtccgaga

SEQ ID NO: 147 - DNA, 637 bp, Zea mays
tggtttagatctactgttgatggggagctttggtaccgtgcaaaaattgtctagttcttttttccaatgatcgagtgttggtgattggtgtagatagcaacatggtggaactgctgctggtgtatatgacgtcaacatcggtgttggtttgctgatcaatgcgcaaacattgttgacaatatggtagaagttgttcccaaatagaagataccctaaatgcatcccatccatagaataaaaatttgggggtagttagtttggatgtagaatgcattggttgttggagttgtcggtagaaaaacgacgataggcacctccagcaccttgctcttagattggttcaggactattgttgggggcattgatatcgtgccgaactcttgtccaattccctcgtctctcgattgtagatgttgccgaacctctccatagtggtgatcgagacatggccacgactaggcgtcaacagcaatggcatcgagccacatctttgtccatgcgttcatggtgttgttgcccaaaggatcaatccggtctctggatgccagatatagcagtccttgatctgagggccgtttagagaaaattagagggggaagggaaggcagggggatcctaaagagtcgacgtgcaggaa

SEQ ID NO: 148 - DNA, 625 bp, Zea mays
tcgagctcggtacccctgaaggccttttcgcaaaatagatgtatctcacatttcggcatatatatatagtgcttgggtttgaaatcttccgacgcttgtgtcacaacataaaagcaagaatcaaaagggaacatgaaattcatgcagatgctgaaagagtcttgtacaacaataacaacagggttcatttaaacaaaatccacggctcacaaaaggagttctaaatcattaaagtacgagtgttctgccactcatgcacaccaagatactcttaccattttgcaaaataggtagcgaagcaacaaccggccggagcccccggtctctgcctagctcacttgaacctggccaagccaagacgcacctcgtcacaggagggcatgaagaactccctcgacgctaggtcaaggtcgtcattgttggtggtgtcgtcatcagcttggccgtcaccaccgctgccaccgacgttgcttggccctgcttcactgtagtagccggcgttgccggaggatccaccgacgtcgtacgacgacggaccagatgcgtgctctccgttcagcgccatgcgaggtccaccaaacgggagccaagtgaaggtggcttgccggggctcttggctaaccag

SEQ ID NO: 149 - DNA, 684 bp, Zea mays
cgagctcggtacccctgccagatcggcagaggaagaagagaggaggaggagatcggcgcagcggctacgacaagaacaggacgctgcttacatggagtccctccggaaggaccaggtagtcttttcttgtcatggcagcacatgtctagtccctcttgaattgaatcccctgctctgacgaaccttactcaactcttttggctgcaggaaaaagaaagatccagaaagagccatcaacagggagctgccattgccattgccaagccgagagcaggtaacgagcttcgcccaagacgtgcaggccaggcatcaagagaacctatcaagacgacgactcagatcggagcatcccctaacaaggaaactgcaccttcgcacagaactgaaccaaataccaaggtagggtaacgcgggcaccttaactgcacgtgtcgtactctggtagattatgcatgcatactaccgattctctggtctaagctatatatatcagttattatatgaactgtgcatgcttttgcagatcctgataagatttcccaacggtgagagaaggcagcagagcttccatcacacggacaccatcagagaggtctacaggtacgtggactccttgagcataccaggcattggaagctatcagttcgtacgaagctacccaaggaagacgtacggtcagcagca

SEQ ID NO: 150 - DNA, 616 bp, Zea mays
tgcacgtggttcctgtgacgaccgcctcaagtcaagtgggatgggagctccaacgttttccatttgccacacaggtagtgaaggcgagtttggcgtgtgtgctatgccgatgccagtgcgtactgcgtagcctagtcccgtccatcacattgcagtttcaattgtcaatggaacacatatatctgcgtagtttccttcactgatctctatcggtgcatcatcaaaactcaaagtcagagtaatctccactacaaatctcgagaacaaatgacaatctgacaagaaatctaacgtacgaataactatttccttcttggcacggctgtaactattacgtactattctttttttattatttgaaatggtgtacaagtgacatggtacaacacaagagaaccccaaaaaaaaaactttcggtgttttcttgtgacatcctcggtacagtcacccaggtgacagatttgcagtcaagaagaagaggcgatgagctacggacattttcagtggtaatcatattagaccagaagatccgcaaaaaaaaagttgccattgctggacagtaatagtacacattttttttccttcctttgctaagtcatacgattcaaaccgcaga

SEQ ID NO: 151 - DNA, 722 bp, Zea mays
  unsure (1)..(722): unsure at all n locations
tgagcaggtctctttgactgaaagaggtcttgttgatgtatctgccagttgcccaatgctggagtcagtcctctacttttgcagacggatgaccaacgaggcccttattaccatcgcgaagaaccggcccaacttcacttgcttccgcctatgcatcattgagcctcacacaccagattacattacacaccagcctcttgatgcaggttttagtgccattgtggaatcatgcaagggcctcaggcggctttctgtttcaggccttctcacggacagtgtatttaaatccatcggggcacatgctgaccgtcttgagatgctctcgattgccttcgccgggaacagtgatttgggcctccattacatcctatcgggctgcaagagcttgaagaagctagagattagggactgcccatttggtgacaagcccttgctggcaaacgctgccaagctggagacaatgcgatccctttggatgtcgacgtgctcaatgaccttgggcgcatgccggcagcttgcgcgcaagatgccccgtcttagtgtggaggtcatgaatgatcctcgacggggattccccttggactctctaacagatgagagccctgttgagacgttgtatgtctaccggacaatttcaggtccaaggtccgacacaccagcttgtgtccagattctctaaggggcagggggatattntagagtcgaactgcgggctgcaacaa

SEQ ID NO: 152 - DNA, 596 bp, Zea mays
tgagctagcagactctgccttgagttgggatatttcaactctgtcagttccgcttccgatatttttgatagttctatttctggaattatatttttattccagttttgagaagaaaaaaagaatctgaaagtggtttaaggcacagatggactccaattgttatcacccttacacataagtacactgttttcttgtgtctcttgcaagtttttgattcttgtattatatgtgaaaattgtaggctgtccttgaaaagcaaagttatattctcctttcaaggaatgacattgagagtttaatgcgcctggaaccagcaaacatttctttgcaaaattctactggtgaacatgataacaatgtaacaggtgcagaggcagtcgaagtagagattgaactaagtgatctcttattagatatgtgcccaataaaacaggtacttttttattatttacaaatttgtgaatacttttatttgtgttggtaagttctattcctatatttgttttattttgaatttgtatgatatttcatttgaatcaatgaccaaccatgttgtcgttcttcaagatatactggacatttgataattggttcag

SEQ ID NO: 153 - DNA, 651 bp, Zea mays
tgtacaggcatcccgccagtgcattctcatgtcatcgtatatatagcgctgcacttcttcgctatacgtaccacggtagcagtagtctacgacagatgatgtacgtagcctagcctagctagctggaacacgccactaccgcaacttacgctgcctgcatgcaagaagagggatcagcttcgctatagtcctgtactccaccgatcactccggctcgatcgcgtgtgaggtagagaaacacagatcgaggatagatgctgacacatacactaataacgtacacgtacatgatgcatgtagtgcttccatgcatccggaaacccggccggatatataccacagctagctagcacgtacgtacgtacgctgtactacgcatggtttatattaatttgaatgaatctggtatcttttgcttggcctagctacttcccgttgatccatgcgatacgatgcgtgcactgagagctcgaccggagggagagacaagaaggaacgaactttttattttgctataagaagatgcatggagggagagaatcttggcactcagccctacgattttggacctgtggataccatgtccctgcaggcaatccttcgggacatgactataccttctctggttcccaggggtaccgagctcggatt

SEQ ID NO: 154 - DNA, 585 bp, Zea mays
tgacaaattccaattaccaccaaatacaatgcgggcttgatgtcataccaggatgaaggtaaagccagatacaacataggatatttgatggcccaattctacatataattaattccataccaatatcaaatagaaacatgtgtttaaattgagtaccataagacggtgtagatatataacagtaacaacttatgaattaaggaaacttgaaatagtcaaataatatatctctgaataaaactgttgacaaatacaatttgggtaccgagaaccacactcacattgaatcattgacaaatgactatcattaagtacagctataactacatggatgagaatgcataactgctgctatatgaatgcatccagggaaaacagtagtctctggtagaaaactaaccttcaacagcaggctgaattgcagtatgctgaccattttcagatttgaaaccagtagatgacaagatagcctctgctgactctaagcgtagcaaattcaaactctttattgcagaatccaagtcatctccagatgcttccagagctttttcaagcaactacaattatttataacaagcatagtca

SEQ ID NO: 155 - DNA, 587 bp, Zea mays
ctgcatgagcctggagaagaccccgaccatgggcgccgtgttgtacgtgcaggcctcggtctgcatgtacgcgccgcggtggtcgttgaagacgtcctcgccgttgggcccgccgacgacggcgccgacgaggtcgtgcgggttctcctgccgcgcgctgtaccacgagtcgaacccctgcaggcagccgatgaagtcccggtcgtgccggtacgacgcgctcgacgccgcgcggtggtgcaccctccgcgggtacgccgcgccgtacccgaccaggtagctggtgcgcatcgggttcgtgcccaggatgtagtcggcctgtgacttggcgaacgccataacgtcgcccgcgtcgccggcggccggttcgccaccgtcgtcgccggagccgcagcgtaggggctggcccagcgaggcgaggacgtccgagtagacggtgaggaggaaggcggcgccggagacgtactgcaggttgttccagggccggatgaagagcagccccgccggggtgcgtccggcgttgtgcttcgcgccgccggggttccggttcatgcacgagcacacgtagtactccgcgttggaccgca

SEQ ID NO: 156 - DNA, 643 bp, Zea mays
gttgactctaggaaatccccctgctgcagaagcagcaaaaccacttccaccttcttcaccagtaaatataggagtgctggataaagatagaaaaataaggttaacatatatgcagcataagaaaacttagaacccaggaacatggcacccaattaccttaggaggacatcagaaagagcattttcaccaggagggacatgaacaatgtgactgctatcactgctgttaacagcagcgatcaatgcttccagtttctcaggcttttcatcatcggattcaccaaagtcaacaatgtcaagagcaacattgttctttttcagcttcttcccgattgtctccaaaactttcttgtcgtacttcacaggactgacacacatgacaagattcattaacctaaattcaaagagaattaataattgtcatacaagttaacccacccaggcctaccttccgatgaatgctataatcctctgctgctgcctcttattctggcgatgctttagcgcaagctgagcaacctggattgctgcagccaagtttgcctcagcaccaacttccaaccctatacagcacattgttgtgcaccaactggtcaggaaactacaagtaccatgatctaacaacttatgagacagcttaagca

SEQ ID NO: 157 - DNA, 642 bp, Zea mays
ttgatgacactacttttagctcggtacccctgattttagcaccttgtccgcatccccggagtgttgattgggtaatcatgtacaggggccatattggacagtcaacagctcaaaaggctggattagttggtgcgaacgcctgattgcggaggcgccgactgctgaatgtccatgcatcaatggacgacagtgctttgcatgctgttctagttgcttcgctccggtttggttatcattgcatctcaatgcttgagccaataattcctaagctgagacatgtgcaggagtatctcatcccggccctggttggtcacgctgctcgtcatgatccaaggaggcgcggcctcgaagtattcgcggattaggccctggaaagtttccacgttttcttcaggtttcctgccgccgttcttcttcttcttgcgcttgtcacattttgtgaacacaagggtcatgggaacctgaacagaacaggtataaaacatatactaaaaactgaaatgtgccagatttattgctcaacaaccgataaattcttcacatgggtaaacaataatgcatgcctggatgcagatgtgacggcaatcacattactagttactaaatctgactgtacacaagtacatcaattactgtatgtca

SEQ ID NO: 158 - DNA, 601 bp, Zea mays
tgctttcatcattttactagctttctgcacattccagttccttgctcgaagaaatcgcactaacgaggcatctgaaaggaagtctttaatggcttctgatgagtgttcgccaagctccttgcgtaattcatttatctgctcacagagacacagtgcagcaagttagaacttactagaaagtgcttaactcaatcccagcagagatgtctaggtaaggttgctcttactttttctcgctgttcttctggggatgggattttttcagtggtgccgccattgctagacttgaatagaaaggacattagagtagcttgaaggaggcaactccactagataactgcaacccgtgcataaatgcaattagaagaatgaacatacataaaccaatttcaatcgtctactctgcaaaaagtcaaaaagaaaagctaacaaaataacataaccaaaacttaacagaattattaaagtggtggtattcaggtaaataacataacgcaaagatctatatagccttgctctcatggcctcagtgcagacaaaacaaaaataatctagggataacaaatacatagagcagcatccagggggatcctctagagtc

SEQ ID NO: 159 - DNA, 611 bp, Zea mays
cgtcgactcttatagatccccctgttctgagcatgatgggctgttcagcactgaactgctgcatagacggatggagaaaacagcagaaacgctgggtttagctggtatcacaatggatagtgctgagcttctgaatattgctctggacaagtacatgaaaaacctgattaggtcatctgttgagttagtaggaggtagtgttcagagggatgcaaggaaagggacaccaacctacaagcagcaagcctatggaaagcagattaatggagtccggctgccaaaccatgttcatatgcaatcagccagtggatcaccaggagccaagaatgagattggaattaaccatttgatctccatcaatgactttaaggtagccatgcagctaaaccctcaacatctcggggagaactggccagtccttctggagaagatatgtctatgttcttcagaggaaaatgactgacatatggcacttttttacttcacagcgaagttttgtaccaatgtgcttactggtgcccatccgatgtacatttgagctggaagtggcaagattgcaggcacaacacaaaatatgcacatgtggggtcaaggcagaaatctgctcaacg

SEQ ID NO: 160 - DNA, 585 bp, Zea mays
tgccgattcgaaagccctcgtcctgtcccctcgcaaaaccctagccccaaccaccatgaagggcaaggccaacgcctccaagaaggatgagggcaggtacgatctccgcgccttgcgctgctcctgtggcggaacgatggttcctcttttccttgcgatggctgcacggtgctcttggttaagattttgtgcggttgttgttgcaggctccggcccggcggcggcggcgccggaaagcgcaagaaggccgccgcgagcggcaagcccaagcgccctccctccgccttcttcgtcttcatgtgagttctggctgcgtcggcgagtcattgtactcagatctcagatctctagatctattctccatttttgttaagagtgtggatcccccaccctcccacccccaattattgagcgtaccgtggcgtttgtttgcttttcaggtctgaattcaggcaggagtaccaggcgcagcaccctggcaacaagagcgttgcggccgtgagccactttgcactctgttctccctttattttttttccatgtgcgtctgccgatgatgtcttattttttcgtgttggtggatca

SEQ ID NO: 161 - DNA, 860 bp, Zea mays
ttcggtacccctgctcaaatacgactactatagcaaatggccaacacaatgacagaaatgcaagcacagatccatcaagaacgacagaaaatgaggcaagaacgccaagaaatatgtcaggaacgacatgaacgacaacaattaccacctccaccaccacctgctccgcccaaggataagcatagggagtttatgagccataagccaccgatattctctaattcctccgacccattacaagctaatgattggctaaagtccatggacaagatgctctacatagctcagtgctccgacagtgagaaagtactatatgcatcgggtcgccttactggccccgctgcggattggtgggatgcatactgcgctgctcatgctgctgccaacaccattacatgggcagaattctccactcacttcaggaattaccatattcctgctggcctaatgaagattaaaaaggagttcctatccctcaaatagggagggatgtcagtaagcgaatacagggacaagttcatccagttatcccgatatgctcctggtgaagttgatgatgacgagaaaaagcatgagctatttctagagggtttgatcgggccactacaatgccaggtgatatcacacacattttcatccttccagagactaatggacaaagctattgctcttgaaaacaagagggttgagcttggagagaagagaagggctactaactagggacatgctgggggtagtactcgtccccgttatgctacacctcaaggcacaccagctcgtggcagctccgagcaacaaactcaaacgacacaaactgctcctcctcaagcaagggggatttcctagagtcgacatacagg

SEQ ID NO: 162 - DNA, 668 bp, Zea mays
ccgactctagaggatccccctgcgggccacaggctgcggctgttcgggggcgtgttctacaagactacaaccccagggctgacaccatggtggtgccggccagggaggtcatagtggctctggcctcccccggtccctacaggttcaaagactacctcaagtcatactaccaggcactgttttaaaggtgccgcctaggcgtccaggcgcccagaagatccaaggcgtccccgtcgcctaggtaagaatcagcaagaggacaaagggcagaggggaaggagaagggggtaccgaatcagggcggcggccaaatcaggggcagcgacagtcagatcagaggaggcggcggcggctcaatcagcggcggcggcgaatcgtgggggagaaggacaccggtggctgaatcatggaggagagaggcaaccgagggcaaccgggcgaaggattatatgggctggctagtgggctgggcctcctactccttccttcttttttccttctttttgtttctttttcttcctcctccatgttcctgttttgctggtccaacgccttgtctcgccttaccaccttaagaactatgccaccagggcaccaagatcagtgacaaggatgccatattccttggtcgtcaagaagctgctcggttaagcgagcagggggatcct

SEQ ID NO: 163 - DNA, 652 bp, Zea mays
tgctgctgtcctggggctcaccctcttcaccttctggggcgtcaagaggggctacgacttcaccttcacgttccccttcctgttcgcctgcctcgtcgtgctgctggtgtacatcatcatccaggttaattcgcctgcctgcatgacgagggcactgtcttcctcgttttgaaatagatctgtgctagctctcccatgcatgtcacatgtctagctcacggtttaataatgttgatccactgcaggtctgcttcccgctgggaagggtagccatgaccatctacggcgtcctggccaccgtggtgttctcgggcttcatcgtctatgacaccaacaagctgctgaagcgccacgcctacaaccagtacgtggtggcagccatctccctctacctggacgtcatcaacctcttcatggcccagatggccatctccttccagtgatggattgcgggtctcacctgtacggctgtaccccatgcatgacggcgcctcgcccgtctggtacatggtggatcacacatccacatagcttcgcaagtcgagctgtctttcattatccttatcctaatactggtagtaccaatagcattacagtcctacagatctgtaattggctggccacccttcaggggtaccgagctcgtattaag

SEQ ID NO: 164 - DNA, 618 bp, Zea mays
aacccctgacgcgggagctcgggcacaagacggacggcgagaccatcgagtggctgctgcagcaggccgagccggcggtgatcgcggccaccggcaccggcaccatcccggccaacttcacctcccttaacatctccctgcgctcctcgggctcctcgttctccgccccgccccacctccgcggcgcccccttattgcctagccccaccagcgccgccgcccggttcggcggccatgctgctgacgcgtgggaccgggtcgtcggccttggcttccctcccgagggcccggcctcgtcgtcgtcgtcgccgtcccctctgctgcttaacttctccggcagcgtcggtctcgacgtgcagccgtcgccgtctgccgcagccgcagccgcagccgccgatatgtcgaggaagaggcggtgggaacaagaaatgcagcagcagcagcagcaataccagcagcagatggcggggtacacgcaaagccaaatgccgggcaccgtgtggatggtgccgagcaacaacgcgccgcagggtggtgcagcttccagcggaggcagcggcgagtctatctggacgttcccgcagatgggcagcgccgccgccgccgcaggggtaccaa

SEQ ID NO: 165 - DNA, 628 bp, Zea mays
aggacccccctgtgcacgcacagcctcacaaggctccaccactccccctcggctggtgtcggcggcgccacggacgcgcccttcttggcgccgccgtcgtcatgggcgccgtacattccgcggaagtagacgtacgccacgaggaaaagcaagaagttgaggttggtccagacccctccgagcgcgacgccacggacgccgaggccgaggccgctcacgaggaggaagttgatgggcacgtggaggagcagcgcggcggcggcgccgtaggtgagcggcagcgtgacggactgcgcgcggaggtagatgcggatcgggtggaggaagcactgcagcacgaggtcggggaggcagcagaggatgtaggcgtacgcggtggccgcgatgtcggggtcctgccccgtggagacgaggacccggtgcatggccgcccagagcaggccgatgggcacggacgcggccaggagcagcagaacggtgcgccggagcgcggcgcggaggaggtccgtccgccccgcgccgaacgcctggccgcagacggggtccatcccgccggcgagccctgagaggacggagtagccggtgatgtttgcgaagccgagcgcgagggagcccccggcgaggggca

SEQ ID NO: 166 - DNA, 619 bp, Zea mays
tggagccagttcagtgcagtgcaccggcaccgaccggccctccgtctgtctcgtcgtgtgtgtgtgatcaatcagtaagcagtacacatcatccgtgtgcgtgccgcgccaagggcatgtgtaccctcgccagcacatcggcaactcggcgtcgtgccatgcgtttggcttggcggtccctcccggctcatgaattaggtgtgttttggttgcgggacagtaatgataactgaaaataatattagaactacttcaaggtctgaaagctcaaactcattcttcaatcgatttatccaccggaaattgtgctttgttgagttttggcttagatttgatacggccttggagtgccaacgacatgaggagttgaaggctgacaatattagtatgcatagcacacctgtcttacggaccccatggacagtggagaaacaagcaagcatgttgtacacgaataaagtgttcaacatatttcaggaagaagtggttgctgctagggatcattgctctattctacaaaccacacaacaagaggatgttaagtatgttatagttggtgatggttctatgagagatagaatggtgcagtggtgcacaaaagatatttttggacgatgca

SEQ ID NO: 167 - DNA, 688 bp, Zea mays
cctaagcccagctcggtacccctgcattcccttctgaagtcggagtactctagtgaagaaatgcaatccatcggtatgttgccgatacctgacctgcagtctcagcttgacagccttttgtagtttgcatacaccatacagcggcgctgctgtagtccatgttgacgttgcagtgcagttctttcaagtaacgcaagtaaagttgttaccacaatttcgaacctctctaccatatcgttgttgtaacttttcattgtttatattgaaaaatggaaatggaacgcctcccatgattcatgtgattgtggacaatctggaagtttgaactcatatcccgtggtgacttatgtatattgtacacgcacgttggatcctcctctgaaattgactggaatagtttcaacagatcatgggttgttcatcctcttgtgagatctgcctatctgtggcatggcttcccaatcctcactgttatgttttagaagaattatgccttctcaccgaaatccattggaagtttcctactcttctagacatctaggcaggccgggtcaaatggctcggttccatttgctagagattccgggccccactggttgcaccagattcatgtgtaaaataatgtgatgcctctcgacgcctggggtttctggccggcgaggtggcgacacgcaggggtaccgagctc

SEQ ID NO: 168 - DNA, 609 bp, Zea mays
tgagagagggacgagagtgtgtcagggatgccatcagtcaggttcatccctgacaaccacagcaacttgagcttcgtcaacttgccaaagccatcggggatagggcccggcgcgaaggggttatctgccagcgttagcgtctcgagccgcgtcaggttgccgatggcggcgcccgggtagctcccgttgaagccattagtgtcgacgaccaacgacttgagcttcgggaacccggcgatcgccaacggcacgctgccgctaaagctgttgcttgacaggttgaggtgctccatcgtccccggagacagcctgtcgatgtcagtcgggaggacgccggagaagatgttgttggacaggtcgaggaaccgcagagccgagcagccgtggagcgctgccgccgggaactccccggagaggttgttgtaggagaggtctaggtacgccaggttcttgaggctacaaatggacgccgggattgggcggcctatgttgaagttttggaaggagaaggcggtcacttgaccgctgctgctgcatgcaaccccagcccagttgcagtgggtagtggacgaagcagaggcactgctgttcttccatgacctgagggca

SEQ ID NO: 169 - DNA, 631 bp, Zea mays
tgtgcctccgcccaagcagcaattcaaacaggagtgcgtctaaatatttctttaaatatttcttcacagcaagttagtacctttaattaattttagtttaaaaataatttaaaatagaattaaatcctaatatgatttgataattaaattttatagcgtaaaatttagatcctattaccatccctacgtgcgacagcggacagcacagacggtgccacagcgcagactgagaaaaatgatcaaatttaggccaacaaaacaattattggctttgaccccgacgaaatatttttgagtacaagcatgattctgttacagttcactgttctgccgtctgtatgagtgtatgactgtcatgctaatacggaaagcctagacaattcttagctgccgcttgcacttacagactccgcagactctgaaagcagagggcgataattagaatccctgtttttacgtgagccagtcagtagattagtgagattggctcccgccgactccagattcccagaagttctgatagatccattgcgctgctcgacctgctggagtatgttaacggcgctaggctgatacaggttcttcaagtacctgaaagccaccaccggtcccattcctactgcaaccgtca

SEQ ID NO: 170 - DNA, 663 bp, Zea mays
actctagaagaacccccctggtacccgcacttctacgacaaggcgtgcccggcggcgctccccaccatcaagaggctcgtggaggaggctgtggccgcggagccccgcatgggcgcgtcgctgctgcggctgcacttccacgactgcttcgtcaacgtacgtacgtacgcagatgcatgcgtgcataattcgacttcggttctctctccgatgtcgtcttcgtctgtgtgttcggcctcaccatctcttctgcgtttccattggtgcttgttggttcaggggtgcgacgggtccatcctgctggacgacacgcccttcttcaccggcgagaagatggccgcgccgaacgccaactccgtccgcggcttcgacgtgatcgaccgcattaagggcgccgtcaacgccgcctgcaggggcaacgtggtctcctgcgccgacgtcgtcgccatcgcggcacgcgactccgtcgtcgcggttcgttcgattcatccattcgcctccatctatcgtcttgtcgcacgcacgaaaacctttacccgtcgtccatgcacgcaacgcaacgcaaacacggcagagagctagtgcagctaatagcctaataataactaactaactgaactaattagttgcgcatgcatgcatacgtacgtgcaggggtaccaa

SEQ ID NO: 171 - DNA, 581 bp, Zea mays
tgctgaaagggctactagagaagctaggataaaagcagaacgtgcggcagtcgagcgagcaactgctgaagctcgggagcgggcaatagaaaaggcaaaggctgagaaggctcttgcagaggcaagagaacggagggaacgatacaaatcctctttcaaggagagttttaagtccaccaatcaggtaggtttgtttcattggtatggtacattgagtgatgcagtttgaaattcagactctactatgcaaccttctttcctttttctcttcccttttcagagaaaatgctgactagatataaatctgggttctggatgcaggatattcgacaggagtcacaatttcagagggcaacttctagtaatttcatccgaaacccagattccggcaacagaggtacttaatatattcagaagactttattgtaaatcatgttttctgaggtagccttgcatgcattttgtaaaaaaaaagtatttggctgttactagtctaattttcttcactttgatatttgttggcagcaatgattgaggttgagtccgctttaagacataaagcaagattagagaggcatcaa

SEQ ID NO: 172 - DNA, 747 bp, Zea mays
ttgctgccctgcatgttcgactctagaatatccccctgaggccgcgtcgatggcgtcctcgatcttcttcttgtcgtcggcagccagcttggacgcgatcttctcgtccttgatcgtgttgcgcatgttgtaggcgtagttctccagcgagttcttggactccaccttcttcttgtgctcctcgtcctccgacttgtacttctccgcgtcctgcaccatcttctcgatctcctccttggacagacggcccttgtcgttggtgatggtaatcttgttcttctgccccgtcgtcttgtcctcggcagacacgttcaggatgccgttggcgtcgatgtcgaagcagaccgtgatctgggggacaccacggggagccggtgggatgccggagagctcgaacttcccaagcaggttgttgtcgcgggtccgggtcctctcaccctcgtacacctggatcaacacaccaggctggttgtccgagtaggtggagaacacctgctccttcttggtggggatggtggtgttcctcgggataaggacggtcatcactcctccggcagtctccagacccagagagagaggagtgacgtcaagcagaagcaggtcctgcaccttctcgttgccctcaccactgaggatagcagcctggacagcagcaccataggcaacggcctcatcaggattgatgttcttgcacagctccttgccgttgaagaagtctggagcaggggtaccgaggtcgaattcgta

SEQ ID NO: 173 - DNA, 601 bp, Zea mays
tgaacccgaagactaaagttgtctttgcttatgctattatgtacagtggtcatagctgactattgtgaattgctagtcctatttggttcgtgatggaggttacgagtcacaacatggtatggtgaattgaacttgggttgacggtgccatctgtggatgtgaggaaggtagcttgaatctcaatcagagcccatctgtggatctgaggaaggaaaactcagaatatcaatgaaagcgtaatgaagcttctgactggtatatagactgaatggttgtaagttaactagttgctacgttcatgttgtatattcagacatctctgggcctatagatttcttgaaaaaaaaaggaaagaaaaaacaagaatacatcattacatagactgtaatcttaaacatctgacatgaagggtgtggctacgttgttcgtggccgtggagaactgtaaatgatgagggtgtggcttctggtaaaatggtcagaaccaggcagtggtgacagatatctcgttgcattgagtcatcagggcgcagattcgaacaggtgcggagctaggccgcggattcgaacaggcgcagagctaggcctgtttatcggtgtca

SEQ ID NO: 174 - DNA, 606 bp, Zea mays
tggagggatccttcataaagaacgacgtcccttattatttttgggccttctttccaaaaggagacctcacaggtatatactgttctgaaacttctgatagtaggaatatccttcatttttaagcactaacatgcttactctgaagtctgaacactacatgacatgaagaacgtcgtactattttcgtagtttaggatatagattcctgttttctaagcaacagaagaatgtagaatagcgcatggtttgcagaacaatgtagaatgcgaataaaagccttcgttgttactcattagccattaccatgcatattctctttggaaaaaaaatgcaggagctcagctatgccttccgattattgaatgatgtatagcatagctagatgggtaccatcagttttgtggccatctactctgctgtaggatatgtagcacgtaaacccacacattatattcctttgtcgctaatggctagtttgacaactctatttttatttttctaagggattcttatttttttcaaaggaaaataaactaattttccttagaaaaatgagaatcccttaaaaaatgggttgccaaactagccataaagataaaaaaaaca

SEQ ID NO: 175 - DNA, 628 bp, Zea mays
tgggtatttgaattcctgctgcactacttagaccaactccagcagactccctctccgtatccctaaaacgcgcggccaacacattctctctcctctccgtatccgtctccgtttccagcaacactccctatcccactccgcatgcagtctatgacacctggggcccgccagcaggcgcacgcgcacgcagagagctgcggagaggagagagaaagtgtggaaatagggagcgcagggacacggcgtccattttgcggagagggatacggagcctgctggagcgcgcaatagtgcctcagaccgtgcaaaatgcggatgcggagtggtatacggagtgttgctggagttggtcttactcattgctctctgtctctgcccaaattaaattccaattcccggcaccccacccgcgcaaaaccatgtgccggggaaaccaaactgaaagaagtctgaaacggttgcggaggtgggggcgagtggcgtgcgccgtgggctgggcggcgggggaggaggacgaccgaccgaccgaccgacccacctggatgacgtggttcctgaagctgacgccctccttctccttccgggcgcggtactcgacgtagagcacgctgatgaggtaggcggtcca

SEQ ID NO: 176 - DNA, 664 bp, Zea mays
tgcgtgggcgtggcgacggtagtggtgcggtcgaactcgccgacgaggcgctcgttggtggggttccggggatagaagggttcgtgggtcaccgacggcttgatccggtacagccacctgtaataacagaaggagcaaactgaatccgatccccatccctatctctatccccacggaggggaagcttgtgtgattgcctatggaaagtggaaaggcagagcgagagagagatagagggacgtacgtgcgcaggttccgggcgcgcggggtggtgaaggaggtgccggagagctgctcggcgtagagtcccagcgggcacaccagcgggttgttctgccccacggggagcgaccccggcaccgcctccgacgtgaaggtgttgcccaggcccgagaggtagcgcagctcgggtggtgtctgctcctcctccatggccattgcttgtcgaggatccaaggaggaaacagatggacgcacggacggggcaagccggcaacggcgagaccagcagagcaggcaaggagggagcagacggcacggcacgacttgcctcctgccgctgactgcttgccacctgccattgtacatatcctcatctggaccgtccgatgagggaagcaacgatccagatggattgctcagcagcggctccctccaggggtac

SEQ ID NO: 177 - DNA, 609 bp, Zea mays
tgcagccgacatggcggcttcgggagggctcgagcagtggcagaaggacgggttcttccaggcggccgaggaggtgcaggagtccgcggacttgtgagtgccttcgtcatcttggcttcgattcgttgcgccaggggcttcaaaacttttaactttatgtatatatatgcatgtctacctcttggcgattgtctttgccgtaaattttgatcgatccctttttcgaaggttggattgctgttcctttattttgtggattatgggtgtgctgtgtttaagatgggattctgatctgaaccgtgcttgttcgcggtccttgcagactcgagaactctagactcttgaattttctactaattttgtattaagtgattgctgggctaggttgtgaattgtgtaagatgagatttggatgcttattttctctctgattggttaactgctggctctatttgtccgttctctccttctattagttgagattgtgatttcgtaaaaaaaaactggttctttggcggcacctcatatcttattgggttcatttatgtcgctattttgtattgtatggctgggccaagtagtgctctgttctaatcaagtcagctttgc

SEQ ID NO: 178 - DNA, 618 bp, Zea mays
tggtcaacaacaacaaaaccagaacagaccgactaattaagcaaaggtacacacgtacctgcagctagcatttcttcgacgtcgtcgctgatgcacgtacgttacgttacgtaacgtaacgtaggtgcttacatcaaggacttgagcgaccgcgccttcacgggcttcctccaccgcttccacgggatcttcgtcttgacatcaccactgctagctttgggatcgccattcccgttcatgctgtggccagagataccaagtccatcgaagtcgtcgtcgtcgctgctcccctcatcgacgccggcgatcgtccctgctatgtcatcttcgcagctagacgtatcaccataggctgcagtggcggtctggttggtggtggtgtcatcatgatgaccctcatcgacctcagccttctgacccggagaagcatgttttgcctgattaccctcgtcgtcttcccttgcaggcgcaggttcgttcgtgccgccgcttttacactgcctcttcgttgaccggaatgggccgaacccagcgtagtagtagaagccctcagtcgcactcacgtcactgccaggcttcttcttcctcggcttgttgcgtgcggaggacttgggggca

SEQ ID NO: 179 - DNA, 432 bp, Zea mays
tgcttgcagagtgagagttcggccaaggcgtcggtgtctgggcggtacccttggaagttgagcaggaatttgtcccggagacttctccaggagtcgatggacaacgggggcaacctggtgtaccaggtgagagctgggccctcgagggcgatgatgaatgacttggccatcgtggcgtcgtcccctccggatgatgcaacggcgacctgatagctcatgatgtactgtgctgggtcagtgctgccgttgtacttgggataggtccctgcccggaagttggcgggccatggtgacacttgcaggtgtggcgccaggggacttcgctcgtcaaggtagttgacaccttggaatgctgcggcgtgtgggatggcgtgtccgcgctgagggaaagtgcaggtcttcgatttgtgcgcgctgttgcaggggtggccc

SEQ ID NO: 180 - DNA, 630 bp, Zea mays
tgcttgcagagtgaaagttcagccaaggcgtcggtgtctgggcggtacccttggaagttgagcaggaatttgtcccgaagacttctccaggagtcgatggacagcggggacaacctggtgtaccaggtgagggccgggccttcgagggcgatgatgaatgacttggccatcgtggcgtcgtcccctccggatgatgcaacggcgacctgatagctcatgatatactgtgctgggtcggtgctgccgttgtacttgggataggtccctgccctgaagttggcgggccatggtgatacttgcaggtggggcgccaggggactccgctcgtcaaggtagttgacaccttggaatgctgcggcgtgcggaatggcgtgtccgcgctgagggatgaacatgtcttcgatttgcgcatgctgttggaggggtgggccattttgtagaccgagttggccttcgcgctgcatgagtgcgatttcttgctcaagctcctgagccttttgctcttcgtcgcgtatcatctggcgcaccttggcttgagcagacacacgttggcgtttggcctcgaggatctccttttgcttttggaggttgcggttcttgatgcgcaaggcacgcaggggtaccgagctc

SEQ ID NO: 181 - DNA, 650 bp, Zea mays
tgaatgcctgcttgtcgactctagaggatccccctgcgggccttgcgtatcaagaaccgtaacctccagaagcagaaagagatcctcgaggccaagcgccaacgtgtctctgcgcagggcaaggtgcgccagatgatacgagacgaggagcagaggactcaggtacttgagcaagagattgcgctcatgcagcgcgaaggccaacatgatctccaacacggcccacccctccaacagcgcgcgccaatcgaagacctattcattcctcagcgcggacccgtcatcccgcacaccacaacattccaaggcgtcaactaccttgatgagcggagtcctctggcgccgcacctgcaagtgtcaccatggcccgccaacttcagggcagggacctaccccaaatacaacggcagcaccgacccagcacaatatatcatgagctatcaagtcgccgttgcatcatccggaggggacgacgccacgatggccaagtccttcatcatcgccctcgaaggtccggctctaacctggaacaccaggttgcccccgttatccatcgactcctggagaagtctccgggacaaatttctgctcaacttctaagggtaccgcccagacaccgacgccttggccgaactgtcactctgcaagca

SEQ ID NO: 182 - DNA, 616 bp, Zea mays
tgcttgcagagtgaaagttcagccaaggcgtcggtgtctgggcggtacccttggaagttgagcaggaatttgtcccggaggcttctccaggagtcgatgggcagcaggggcaacctggtgtaccaggtgagggctgggccttcgagggcgatgatgaatgacttggccatcgtggcgtcgtcccctccggaagatgcaacgacgacctgataactcatgatgtactgtgctgggtcagtgctgtcgttgtacttgggataggtccctgcccggaagttggcgggccaatttgtcacttgcaggtgtggcgccaggggacttcgctcatcgaggtagttaacaccttggaatgccgcggcgtgtgggatagtgtggctgcgctgggggaagtatgggtcttcgacttgtgcgcgctgttgcaggggtgggccgtcttgcaggccgaggtggccttcgcgctgcattagcgagatttcttgttcgagctcctgggccttctgctcttcgttgcgtatcatttgccgcaccttgccttgtgcaaacacacgttggcgtttggcctcgagtatttctttttgcttctggagattacagttcttgatgcgcaaggcgcgca

SEQ ID NO: 183 - DNA, 709 bp, Zea mays
attcggcctcggtacccctgcgcgccctgcgcctcaagaaccgcaatctccagaggcaaaaggagatactggaggccaagcgccagcgcgtgtctgcactagccaaggtgcggcaaatgatacgcgacgaagagcagaaggcccaggacctcgagcgggagatcgcgctgatgcagcgcgaaggccacctcggcttgcagcacgggccacccctgcaacagcgcgcacaactggaagacccgcgcttcccccagcgcgactacacctttccacacgccgcgccatttcaaggggtcaactacctcgacgagcgaagtcccctggcaccacatctgcaagtgacaccctggcctgccaacttccgagaagggacctatcccaagtacaacggcagcacggacccagcacagtacatcatgagttatcaggtcgccgttgcatcttccggaggggacgacgccacaatggccaagtctttcatcatcgccctcgaaggcccagctctcacctggttcaccaggttgcccccgctgtccattgactcctggagaagcctaagggacaaattcctgctcaacttccaagggtaccgcccagacaccgacgccttggccgaactctcactctgcaagcagctggaaaaggagactctgcgggagtattaccgcaagtttctaacactcaagtcacaggggtaccaaaatcgaat

SEQ ID NO: 184 - DNA, 696 bp, Zea mays
tgtgactggagtgttaaaaatttgcggtaatactcccgcagagtctccttttccagctgcttgcagagcgagagctcggccaaagcgtcggtgtctgggcggtacccttggaagttgagcaggaacttgtccctgagacttctccaggaatcaatggacagcggaggcaatctggtgaaccaggtgagtgctgggccctctagggcgatgatgaaagacttcgccattgtggcgtcgtcccctccggcggatgcaacggcgacctgataactcattatgtattgcgccgggtcggtgctgccgttgtacttgggataggtccctgctcggaagttggctggccaaggcgtcacttgcaggtgtggcgccaggggacttcgctcgtcgaggtagttgaccccttggaatggcgcggcgtgctggaaggtgtagtcgcgctgggggaaacgcgggtcttccggttgtgctcggtgttgtaggggtggcccatgctgcaggccgaggtggccttcgcgctgcatcagcgcgatctcgcgctcgaggtcctgggccttctgctcctcgtcgcgtatcatttgccgcaccttggctagtgcggacacacgctggcgcttggcctccagtatctctttctgcctctggagattgcggttcttgaggcgcagggcgcgcaggggtaccgagccgaattcgtat

SEQ ID NO: 185 - DNA, 614 bp, Zea mays
tgcgcggaggatacacacgcgtaggcgcttagcgcggggcagcgtgcgtgattaggggtcggccccagccggccgtggtccttggcacccccaacgtgcggccatgtgcgcgggcacatcacgtggacctgggcctagtgaaatgagaccctcgcgcgccacatcgatcggttggtggcgcgcggcagccggtccacccgactctctccgctaatcgcgctgcaccaacctgatggcaataagcagcaacgtacgggccgaccgacagtataatctcgttcctccgccatttgaccatcgaatcgactaagggggtgtttgtttgaaattataatctatccgaattatataatctaacaacttttgaactaatagttagtttaaaaattgctggattatataatctaggtggattataatcctaaacaaacaccccctaatacttacttgattgcatacccgacactactcgcgtttactaatgctgctccgtgtgtacactgcattcgcagtcgcacacatgtcaccattttttttactacctcgatcgaatggaccgcaacggcacgctgacttcacatggcattaattgacgtgcagggcctcgatccgca

SEQ ID NO: 186 - DNA, 635 bp, Zea mays
tgcagcagtataattttagggttttagctctagtagtactcatccattcataattctggtttatatatgttcaatattccacatgtttatgagaggacaactaaacgtattttgttgaaatgaagtcatcggtcaacaacataggtacatgttctttctatcagatggcattatgaaagcatatttcatagttgtaagaatgtgaagtccctgttgtattgcataggatggttacatatatatatatagactcggaaccctaaccctaataggtcagcagcccaacagtggtgccagtctaactacatatataggaacacacacacactccaacaatagttgcgtccatggtaagcagtttcatgtttttatcagggttcaggatgcttcacatagtggttctaaatcctgaatttgttattaactgatttttagttacttctccttttgagcagctctgaggcatcctagtttgtatccgttttcagttaaccgctttgtacgaaaacaagcattaatcctatcttgatttcctttttaacttgtaatttatgttttttggtcaattgtcatgaataggcatttggctgggcgtatgttaacaattggcacaacacatgggagcaggggtacaa

SEQ ID NO: 187 - DNA, 601 bp, Zea mays
ctgagcagggagctggggctggagccccggcagatcaagttctggttccagaaccgccggacgcagatgaaggtgtgtagttgcaccgcaccttgccattgttttaccttctctccctctcagtcgtcccttggtggtgtggtgttggtcctctgtttggttcgcgcccgatcctgttcgagatgacggccattaacttgggtgtcggttgtttgtttgttaatttggccgctggacggggtgtgtactatacgtactgcgcaggcgcagcacgagcgccaggacaactgcttcctgcgcgcggagaacgacaagatccggtgcgagaacatcgccatgcgggaggcgctccggagcgtcatctgccccacctgcggcggcccgcccgtcgccgacgactacttcgacgagcagaagctgcgcatggagaacgcgcgactcaaagaagaggcaagccgtttcgcattcaccgttgcgcttgcgccccgccattggtgtatttgtaccgcgctctcgtttcacacgcgcgtttcatgcggtatgggcagcttgaccgggtgtccagcctgacgtccaagtacctggggcggcccatcacgca

SEQ ID NO: 188 - DNA, 631 bp, Zea mays
tgcatacatgcatgcagcaggagatggaaatcatccatggccccctgctgcgcgcgtcgtcgtcgtggtcgtcgtcacgcagtgtgccggataggaggattaagagggtgtttggtcagagagactaaaaattagcctctagttttagtctcatttagtctttttttttgtcaaacactaagactaaaatatggactaaaataatttagtctttagtccttcacatatgtgctaaaagagactaaaccatattaattccacatttacccctcatttagttcaattgtactaatagcaggagaatgttaaaggctattttaatcttcttataagtcatttagtatattcttacttttttttagcctctagaatcaaacatgttagggactaaactttagtttcctaactaaattttagtccctaaactaaagaaaccaaacatggcctaaacattcctgtcgcctccaacgttcatgaatattttatgggcagaatttttattttgtgcagcagttggggtaagcagtcagaagatagattgggaataatatatataagcatccatgccatgtcccatttgtcgatcaatcaggctggctagctgcttggtcctttttttttcaagggtacg

SEQ ID NO: 189 - DNA, 693 bp, Zea mays
cccccctgccgtacacgtacagtacgtgcgcgcgcgcgcgtacacctgcccagagccggccggacgcagtttaagccagcgcagtacacatgcggcgtagggtgacggaagagggtcgactcgactacggctacggctacgggcagcagtgcaaacagggccacgtaccacgtaccgtaggtttccttccacaaaggaaaaaaggaaagaagtcttcaaatttacttcacgaacgctttggttgcaagcgcggtatccgccaccgccaggcgtgccgtgtggaagatggcaggcaggtatatgcggtgtatatgttcgtcgacagggaccgagggatcggagatcaaatcaactcacgttccaggctgaaataaagaaaattggccagacgggaagcttctaggtgcacctggagaagagttactggccgatcccggcagaattccgaggacatgtgtgcgttttctgcgcctacgcggagcggatcacggtgttccaaaacgtaagggcgtgcgtgtcaggtattccgacgacgtcgtggtagtaggagagtatgaacaaggtggcaagccgcagccacaggaagctgcggcgacaacatgcagccagatgggcgccgtctgcgtcgcgcgcggtacgtacggaggggatggagcgaaagggaggctccaggggtaccagagttggggtttt

SEQ ID NO: 190 - DNA, 690 bp, Zea mays
tggtttaggcgtgagcagaaggatcgtcctctcatataaggaccggtttgtcatctttcattacctgtactctttaaaagtacaaccactcgaggctgtgtgggcagccactcaatctgaactcgtacggtcccaccccagggttatgaaggctggggtagcaccgggaggataaggaaggggagtgttttgtccggtttggacatggtggtggcctgactccttccggtataaccattaaggttcggacgtacaaggaaggaaagagtttcggattcgggtctcattggccatgagatcgcagagccggactagtgggtaaagtgtacccctctgcgcagagtctaaacctattcgaatagtccgtgtccactggtatggacgagtctggtatggtatgacaattagtgtttctactacaactgggaacagggaaatgtgtgtgtatgttctggaaagaaagtagtaccacgggagcgggaagctcagtggtagttaagcatgttgttacttctatcgtttttgggaaaaccctcactattgagtactgcctttctctgaaaaagtatgagtgacttcaactccaccataaaaagcatgtacaatataggtcactttctctttatgggagtcgggtgggcttgcggaatacctagtgtattcacccagatttatttatgtttttcagca

SEQ ID NO: 191 - DNA, 661 bp, Zea mays
tgcatcttccctttgttacctaaacatggagcagctaacaaaatgcctgctttctctgtatgatatgtatcatgtacttcataagtgtgattcacacagcaaaaaggaggctgagtattattccttctatgtgcttctacatttgggatgcaagatacacaaaatggtaatttgttttccctttctcacttcttccatgttcaaatttgttcttaatccttttcaagagctttatgctttaccttactccaacttgtatccaaaattaactttctatttatcttcagatagattcactctctttgtggtatggtcaattggctactccagtcagacggtcaaaggaaatgatatttgctagatctttattaaggtaacatctagacgaattgattgccaacatgaaccttcattctttgcatgctcctatttctgttcacatagttaagcccagagtctatatgtgttttcattttctctatgcctgaccacttgtatgatttggtcataagtacttattgttgattcatagttggctacttcagtgctgagccatgttgttttaaatcttagataattgtatatatcttatgtagatgctatcgcctaggaaacttcaagcgtttcttttgcatggtagcaggggtaccgagctcgaatt

SEQ ID NO: 192 - DNA, 621 bp, Zea mays
ctgttgtattcagttttgcacaaagtgccctcagtttaagaaggtcatcggtaactgcaatgtcacttgagccaggctcggaagggaaatatttatccttaaatgactttgcatgattactaactaaagcacgaagactattatttggaacttcagccatgcttgggggtgaattggcaatcatagaattggaaccttttggtccatcaggcaagttatttccagtgttcacagcattatttctacggcggttgcgcctattatgtgaagatgtaatggaatccacatgaggagtcacctgaccagataattctgggcatataagtgactcaacagcatgaacaacgccttccctcacaaacatcttcaaaaaaatctctggaagtttttccattaaaacttctgctatctgaagagcagggatcaacacttgtggatctttccaagctaaaatgccagccaaaaagctgcaatggttgatatagaagttaatagcttgaaacaaatatttggaattcatgtgataagatagtttctaataacatgagataactcgatgaaatatattgtgttaagcacctggaaatgtttgttgtgctaaggagagactggatcatctca

SEQ ID NO: 193 - DNA, 668 bp, Zea mays
atccgatctcggtacccctgatctcatggaatcatggttcgacgaatgctgaacaacgagttaaatagcctgacagacccacagaaaaaggggtgcatgttgaaatcacctcgcagaaatactatacttatctcgatcggattaatactctttcgtagattgtcagatactttgcatagaagcgtctcttccatctcagatgttgtttagttcacgaaaatgtaacataaatagcaacgatcatgattcacacttggtaacaagtttgaatagaccggtatcagtttctagtatgttattcgattacggttgaactttaacaaacgtggtttaatgttacctatcccattataaatatgtgaaccaaacaacacctttgataacacttcacataagtaattcatcacaaaatcttctatcttcaaagttcagccgtctacggtctaccacatacaaactgcatacgtgcagtagttgccactgagagctgaaggggacgaacgcgatcgctacgatacggagttaaaattgaataaatgcgcagttagtacgaatgcaagatgtctgtgggaagttaattctcctactcggctttttcatcacagcaagagctggaccacattgcattgccttttcatcaacagttaaacaaaacggaaactcgatca

SEQ ID NO: 194 - DNA, 608 bp, Zea mays
gcactagctcggtacccctgctctcgcatggtgaggagttgaccggcgactcgtatcggctgttggtcgacagcgatgccccgttcgcgccacggcgtgtttccctcgcgagaagaaacctggccgcgatacctgagaagatcctcaagttagaaagggtaagaacgctgcttcttcaaaagaacccacttacggttgaaggaagcatcttcacaagattgcagcagcaccttaaagtattagacctcagcgaaacagcagtggagctcattccagaggacctgggcaatcttgtttacctgaggttcctgaacctgtctcacacgagaattcaggcaattccagaatccataggcaacctgtggaacctgaaattcctcctgctgagagggtgcagggcactgcacgcgctgccaaaagggattgagcatctgagagggctcagggaccttgaccttgccggcacagtgatcgacgatgccgcattcagagtaggccatctgagaagcatcacgtcgctctgctgcttcacggtgacgagcaaagaggcgcgtgccgctcaggataggagcgggtggcctctggatgagctcaagaacttgtctcag

SEQ ID NO: 195 - DNA, 630 bp, Zea mays
ataaattgatcatcagcaatcaaaccagtgaactcatatatgttgttgaatattgcacccacatttcttgcatcacttgagtaatatatataatggttgccactcaaaacacatgtctttgcatgctcaatgagactttcccacatcctatttgacatgttactgccaagaatctgcagagtaaccagagagaagaaataaaatggtattggtcacaagactacagaggtggatgaaacatagttaaagtagagatgctaaacttacacttcttaatttctgttggtctctaacaaggaattgaagaaagtgttcaactgtatagattccacttgagtttaatctcttgtggaatgaaccgtcctttccaatcttttctaatctccatacctcatcctttagtgcaggaggataatgcttcttatacactacaaaagagtcagttaacgtattcatgtttaaagcctatatgttagattatttaacaatgacgtcacactaaataaacatacattcgcctctgtgatctttaacagtaaaagcctctgtttttgcttccatcacacgaattccttgacaaaaccctgacgagactctcaacccaagtctaaattttcggcttcttatcca

SEQ ID NO: 196 - DNA, 644 bp, Zea mays
tgacaagagcggagtgccatccccaaccaatccatcactggccatgacctgctcgacgtctacactgtccattgttcccaggacagcccggctgtcacctacattcatgaggtacatgtcctcccctttcataagcatggctagaacgcaagagcccataagcgcaagctccgggaactcgccgaccatcttatcggccacgtccaggtaggcctcctcggtcttgcgaagcgcgcgcgcaagcgccttaagcacggcgaggtggtcgttctggctgctgccccgaggagggcgctgggtcggcggcttcagggcgctggagcagtcgcgctcccactcgcacttccaccgccgctggtcgtcgtcggcgccgcgcggcggtctcgaccggcgggcgcggcggcggcggtcctggtgatctgaggccgccgtggtgctggtcggctggtcggggtgcgcgtcgcgctggtcccagagcaggccgcggagctcgcggtgcacggcggcgtagagatgggagacgaggaagtccgtggcgtcggggccgttgaagccgtcgtagatgccgacgaacacccagccccgctcctccgacaccacgacgtggacgcggtcctcgccggccttcccctgcgcccactgca

SEQ ID NO: 197 - DNA, 583 bp, Zea mays
tgccgatgatgccgatgacgcccacggcgagacgctggagccggtccgacgccaacaccgtgctccgcgtgctgtgctaccgagacgatgagcctgccaacagattcttgaagaaaacctttaatctgcccaagaggaggtagccgattacgcagttctatcgccggcccataggatcggattggatctatcattcgcgacccaaagggcctgttcgtttctgttgggtttcacaaaaattatttcggctaatcaaaccttatataaattagacaagcaatctacgtaggaattgttccgagtgttcaattctctggaaccgaacaaggcctaatactttttttgaaagcacgttcttattatacacatgtaacaggaaacaggaaagcacgtagacggtggtgtaggtttggtgaggtgagaaacgggaggtcttgcattcctattgatttttcatcgatctgtgttgtttttatttacaccattggccgatattatttaatgatgtcatgagccatgtggtatacatgagcatgcatctccaccgcacctaacatgttcatgttagggctagttcgtttca

SEQ ID NO: 198 - DNA, 555 bp, Zea mays
cgaatacgagctcggtacccctgggagagagaagcttgcgaccaaatagtaggcatcgtagagaaaaccgtagcgggcagttgagttgtttccgtaattaaaaaaatattttgctattttttggatttttttgtgattcttaatttgtcgaggacactcggcaaaaaatgtgagtccggtagtgaatcaccccacacctgtacgcgcaacgagattcttcacgaagcacgcgcgaacaagtggaagacgaagcacgaaactagcgcgacgtcgtagtgtccccctcagctgggagagagaagcttgcgaccaaatagtaggcatcgtagagaaaaccgtagcgggcagttgagttgtttccgtaattaaaaaaatattttgctattttttggatttttttgtgattcttaatttgtcgaggacactcggcaaaaaatgtgagtccggtagtgaatcaccccacacctgtacgcgcaacgagattcttcatgaagcacgcgcgaacaagtggaagacgaagcacgaaactagcacgacggcgtagtgcccccccca

SEQ ID NO: 199 - DNA, 555 bp, Zea mays
tgcggccttgagcgcgaggtggaggccgccgccgtcatccagaaggccttcagaggctacttggtgagttcatccgtcgtagtattgcccctacaagaaatgcattctttctttctttctttccgttcatgattcgttgcaggctttttttgtttgtttgtttgacactttcactcacaaaaacgaaatcgaaatggttctgctacgtatggaggagcactgctcagccgaagattttaggtggttttggccattcctttgctctctgtcggtccagttttccagttccaagataatgaacggattacgggtgaaacagatgcgcatgaatttcgcagattctttttgcattcgcattgggcaagacacatttgacttgtctagccgctgcaaacccatacggagtactcctagctgcttgctggtgtttctttccgtcgagccgtttagccactgctcgtttgtttaatcaatcccttcctttttgttaattggtagagtgcttcgtgaaccgcgcagcgtgacgcacctagtcgtcacccccaggggtaccaa

SEQ ID NO: 200 - DNA, 647 bp, Zea mays
tgcgccgcgatggcgtccttgaggcaccggaagtgccgcgacattgccttctgcgccagcgccgtgtacggcgtcgccgcaccgaaccccatcaccgagtcgaagaagttcaccaccatctgcatctggtcgcagtagtggttgtaccgccggtccacctgctcgtacgatcacgcatacccaagaaattgttattacttgttgcatatccaccagaaaattaattaatcgttctatccctagtattcccttgctagtaattaaatcaaagtaataatcgaaacgtggaatgcatgcatgaagaaagaggaggaggaagaagaagaagaagaagaagaaattcctactactcagtacttactggctatagctaggtacgtagcttgtagtacgatcgaaagcaatgtatgctggatcgatcgatcgaacgaaacacgagaagcaaaactcgatgggggtgtggtgcagcacacagcagtagttaaggcatgggcatggcgttgcatgtcatgtgtcgctggcacaattatgagaaatggggtggggaagcaacaaaagcaggcgaggcccaccggtatttggcaacagccgggcgatgaggcagccacaccatacgcatctaccagtgtgaccagcaggggcacgat

SEQ ID NO: 201 - DNA, 573 bp, Zea mays
tggagctggaggaggaggacccttctgccgcgtgcgccggcatcgcgcgacgcgagccgcgaggaatcaggacgggaataaatttttttgcagccccatcacataacagcgtggtcaaacgggtggcaatggcatccataaagaacgcaaatcggatacatgctgatcacaaatcatgtttttttcactctggttatatgaaaggctgtagagatctagatttacagccggtctgcacaattgttttttttacagtgcagctcaggcgtgttcgtcgactacctagtaggctttggtgggactaatcaccaattcaccatatcctctctcgtttttttttaaaaaaaaacactgtttctctaatctgaaaacgaaaattttcagagaaattcaagggacggaacgcgtgagagggaatgctatattttgttcaaacgcaacatatatactgccagcataaattgtcctagcgtgaaaattggacaaatttcacagttcgccaatcgaacgcaacgacaaccaccagtccgtcgccttgcatcgacatcgatcgataacctacgcacggaacca

SEQ ID NO: 202 - DNA, 661 bp, Zea mays
ctgctggtcatgttgcacttaatttatcttgatgaatgttctagagattctggggaataaatttcaagatccatttcacttgattggaaataggtctcagcagttctaattcaattttcttaacatatttgtgtcttgatatgcatcttgtctgctatttggccaagatttactggatctgctttctgactatatgtttaaaagaaaatttaaatcaatggagttgctcaaggggtcaatcatactggtaaactggaaagaggcttagttctgtagtttttctatgctattttccttaaatgtgaaggaaaggaagtgacgatatccataggggctctttctttgctttctatttgtttgagttcagaatttagcatggaacatccagtaattttgaagcgtgtaaaattagtgttatggattagaacaagactaaaaagtaaattaaaaaacaactttgagaacgaccataaccggagccacgctgtgctttggcgtgaaacaaacgagatgatttttttaacactaaactaaaatttgcccctacagtgagtcaaacttaggacctaatcaatgctattcagactgcctaactaattcaggtagatgcccttttgctaaaaaagactagctccatcttcacaaagctatatgtctgaca

SEQ ID NO: 203 - DNA, 668 bp, Zea mays
tgctgcgatcctaacgttgagcctcctgagccagacggagtggaggatcatgtggaacgcgtcgtaccggcggggcggcccgccgtgcagcatgaagtggcggcgcaccatcctcacccggcgctgcatccggatgtactgccgcggcgacacggccgccaggatctccttgaggcgggggatgtcggcgacgcgcaggcgcagggcgaaggcgtcccagtcgagcacgtcggcgaagggcagcgcgtactcgccgtcgtccaccacgacggggacgcagcccaggtacagggcctccgccaggcgcggggacgccacctcgtagccgccggggcagaggcagaagcggctgcgccgcatcatgtccgcgtacgacggcgcgccgccgccgcggggaaggtactcgctgacccgcacgtccgggtcgcctcccccgcgccgcccgccggggccccagtgcgccagcagcgccggccggaccggcccgtggttgccgcccgcaaagaaggccaggaccgggcgccgcgacgccgacggcccgcccacctgccgctccaccgcgtcgctccgcaggttgacctccggcagcgacacgtccacgtccctggccgggtcgaacccctccgacgtgttggcgttgcacagcacgcggatggagttgccgaaca

SEQ ID NO: 204 - DNA, 625 bp, Zea mays
tgtagtaaattaaaaccagtgctagaatcaaccatacatgaccatacttcatagtaacaggctgcatggtgcataacctagctaaggtcatgtttaaatgcactatagctaatagttagctgctaaaattagctgaagacatccaaacagtttagctaatattttaactattagctatttttagcaaaatagctaataattggctagatatttgttagctagctaattccactagcaattttttagccaacgaactattagctctagtgcattcaaaaaccccctaaatagaaaaggaaacatattctgggattagttaggccaggacgtggttacctgcagcttctccaaagttctagagagggatgaaaatatccagatgataaaggtagcatcaagtacagcaacaggcagcactaggaatagccttgtctttccagagaagtcattgatatttcccagattttcaactagttcaagagcttctgaagcaacaaaatatatgaaaccaagagcagcaactcttgatgttatgccacccaatgtgggtagaacaacaccatagcccatcgaaactactaatagaagaaaacgagaaacagtcttcttcacaggggtaccgagc

SEQ ID NO: 205 - DNA, 635 bp, Zea mays
actatttcgagctcggtacccctggtggtcccagcgagagcgagcgcgagagcgagcgcgagccgccgcactagccggccagccgcagcagcaggagtgggggctggcggtgcgccgaacgcatggacggggatgccaccgccacctgcagctcggcggaccgtgagggccaaggccggcgcggccgaggcgcggccgtcgtcgccgccggacgccgtgacatacagcgcgagcatctccacggacacgcccctccacgaaccccccggggtaagccacctactaaccaacctatgacattctctgcgagtgcggccatggatagatgtggattggggcaagaactgaagctggccggccccgacgggccctgtgcgcgcgcgtgcaggtctccttcgacgagtacatccaggaccgcgcgcgcgtgttccgcgccatgttccccgacgagagcaggagccagcgggtcggcgacgtacgtattaaccacctcatcacgcgcacgctcctgccgatttcttcagctcgcccggcgaaacctatcgattttgggttattgtgcagggggaatggcaggtccacatgctgccgctgcagttcctcctcctcaccgtgcgccccgtcgtcgtcatgca

SEQ ID NO: 206 - DNA, 692 bp, Zea mays
gcactgcgcgtcgactctagaggatccccctgacattagagttgcttcggtaggctttctgttagactgttactggttttggatcgctagcttgttgagcaatttcagcatcacctgtggcagactaaaacgacgcctttaggtaaacacctactatatatctgtacatggatatgataagagtgaggtgaaagggctaatggttaaggctctcgtttagcgcctttaggtcccggttcgatcccccttggaagcgaatctcgggtttggttaaaaaaatctttgctgtgctccacccgctctcaaggttacgtcctgcgcaccaccctctagctggaccgttgtagagtgaacgatgacggcacgctagtgatggggagccatatttctgtctcttcttaatataatatcaatatcgggagaacggttttttcttccacggtcgagtttttttttttttatgataagagcgagtatacctcataattctgatttctccaggttggaagttggcctcttctgatgaacactcggtattgtggcagtcattggattctcgtctatagaagggcaccatgcaagcatgtgccgcttatttctttaatttggttccctggctcttgtggagtaattctagcactcagaagatgtttctcttgatgatatatatatacactgtcaccagcaaaaca

SEQ ID NO: 207 - DNA, 586 bp, Zea mays
tgatacgtccgcgtgatcttcgcatagcatagggtcgccaatttcaaaacagtaaatcagaaccttttacaataaccaagctcaggcggcgagcagagcagagctgagcagtagcaacgacagatcaaagatgaacatacagatttcttcagccagcgaggcgacatgggcacggagtgtggagagtcggtcgacaagatccttggaaactattcccctgagcggatgagctatgtcagaggccactgggatgcggatggtgggcacgaacacggcaacctcctgtatgacgctccggcgcttgcgccccttcccacctatcgtgtacttgtcggggatcgatgggccacaccccatctctttacagtttctgggtagcagtcgaattaagaggagcttagttgccatcaaatgttttgaaacggcatggagagtttgagactctctgactggctgataattaacaacagtgtgaatcgaatgaagagaacagagtcacacggaaaaaagaaaacaacgaactaaactctcgatgcagtgaacacagaaaagaaatagacaatggatcaaacttcaaatactttca

SEQ ID NO: 208 - DNA, 577 bp, Zea mays
tggacaggaacataactcttttgttgttgaggtgtggtgaacacaatctttttttttctcgaacaacgcaggagagctatgtgtcatttcattaagaaataagggaacaaatacagaagattaggggagccccctccccgcctcccttctcaatccttgcaccccaacacacgacgaacacaatctgattctgaaattctattgttactttcaaaagaaacttgttggctggagtacacttgtttttgacaaaggtgtacttctttatgaagtctaatcatgccatgtagctgttactacttacttttttcgaaagagtggcatgagcattactgcacatattattagaagaaaagagttgacccattttttatggtggaaccaggcccagaaatcgagcaacccctaggctaaaaaagcgagcaagacccgctactagaggagcaacccatactgcgaagaaagccaactacgcagtttgaaacagtagaaaaaactggtcacgaaagcaattacgacaaaccattaacaaaagagggcggtcacacctatgacaaatcattaacaactacaaaca

SEQ ID NO: 209 - DNA, 598 bp, Zea mays
tgcatactttactacgtggccgaaatatctgcggccgcgctggatggcatgggactgactcaccgctccgtgctgtgtgcgcgccagagccaccccactgcgtggagttcagtcagtgcagtccagtgcagtgcaacgctccccgcgcaagcgcccggccggtgcctcatgcactgcacttgagtgacagcgcacacgcaccgagtgacggacgcaacaacattacaacaacaacaaaaaagcggctgggtttgggcgtttggcgcacgtgctcgtgcgtcgcgggaccagcgacagcgacggcgacgggcgcacgggccctcccggtcgagtcgggacaagcgaggcccatgcctccccgcgccttttgtgcgacgcctttcgtctcggcgccacgcgcgcaacgcaggtcgcgctcgggcgctggtttattattactcgacttttttttttaaataaaaaaatgtttcgacgcggacgggtgcggtgcgcgtgggcagaaaccggagagcgcgtttgggcaccggcgcgctgggccatgtggtgtggaggcggaagcgacggagacggacggacggacagacgaagcagctcagca

SEQ ID NO: 210 - DNA, 584 bp, Zea mays
tgaaaacatctttctcctctctgtgctggctacatatcgattttgtgctcagtgacagtgctccataggaagtatgattggtaaagttccattaactccttacaaaatttctcagtcatacctttctgaaatgctttacagtacttactttcatcttcaatggataaaacggtgaagttgtggcacatttcgagcgcttcctgtctaaaaacattttcacacagtgactatggtaagaatcacccgccacttgcccttaatctttgtcactctgccagcatgctgaattttcttttgttgaatctgtatcctagtgacatgcatccagttcaaccctgttgatgatagatacttcattagtggttcactggatgaaaaagtccgcatatggagcattcaaaaccgtgaaattgttgattggaaagatttgcatgaaatggtcactgctgcttgctataccccagatggacaggttttaatcatctatacataattctttgatttaatatcttcttcatgttaagatctgacacatttctttctttctttctcgaagagtgcactaattggttcccataaaggca

SEQ ID NO: 211 - DNA, 633 bp, Zea mays
tgatgacagcgcggttggcagaccagaggctgggtccacgatgaggccgcagcccccgttcatgaccgccgccgcagtcgcctgcgggaacgacgggagcgcgtcctcggtcatcacctgcatcggcatgggcgccggcggcagcgcgaccgcgtcggcggggaagtcgcccgtgcggcggcgccggccacggcgtggcctggaagacttggcggactcaccgttggcggcggcgtcgatggcgaagggggcgaaggtggcgtcgtggacgttgccgccgccgccaccgccgccctcgtcgtcggagtcgcggccgtgcttgtcggaggcggggcgccagatggtgcgggcgatctcaaagatggcctgctcgtgcggggagcggaaggtgaagccggagccggcgacgcggaggcgctcgacgcagttacggtacttgcgcttgaggcggcggatcttctcggcgagctggttcttggtgaagccggtgttgaggcggcggcgcatgtcctcgtagaagggggtggtgtcgtactggtgcgacgcgaaggaggtgccacgctgcgccgtgaactccgcgaaggcgcgcaggatcacgatctcgtcctcgtccgtccacaggcgctggaacag

SEQ ID NO: 212 - DNA, 637 bp, Zea mays
ggccaaggctctcaagatgctttgcaccagccctacaccaacactccacttcatctataagaagtctttgaatggtgctcaaggaagggcagcagtcctttgttgcaatcgtagccatacccaatcaccaatgttgaattccacctataggcgtcgtttatcctgataactcttcatagttacttgagcttgcactagtcggtccttgatttcagcaagaaattcatccctgtcccacaactgggcgtcaatcgcagccacttttgagtcccctgcttgataggagaccatcggaggagggtcccgtccgtagacagccttgaatggagaacatttcagtgccgattgatatgatgaattatagcaaaattctgcccatggtaaccatttcagccatgatttaggacggtccctagctagacaacgaagatacatggtgattattctgttaacaacttctgactgaccatcggattgtgggtggaatgtcgagctcatctgtaacttgactccagccatggtaaactgttcagtccagaactggctagtgaaaactatgtcccgatcactgactatcgagcatggcagaccatgaagtttgacaatttcgtcaaagaaggcctttgcaactgatgca

SEQ ID NO: 213 - DNA, 661 bp, Zea mays
tcgactctaggaaacccccctgctcgaagaagagcacctgcaggaccgcccgcagcgggagccgctcgttctgcgccgcgtgcgtgcacgcctccaccgtcagcttccggcagtccaccacgcccaccacccggtcccgctcctccgctgtcagccgcgggtgcgcctgcaaattttagtagccagtcggtgggtggccaaaagagacggaggtctttgggcgtgagcgtgacagctcgaaaggagacatattttctttgtccttttagcgtggacgacatgttccgtggtgatctggcacgtaccttgaggtagatgtcgacggcgcggtagacgccatcgtcgtagatacgggcatggtcgggcaacgaaagcgcgaggtcgcagaacttggcgggcttgaggttggcgtctgacgcgacctcggcgaggtaattgtccaccagcttgcccacctgcaccatgaccacggcggacggccgcgccgccacggccaccgcttcctcctcctcgatcgcggccgaagacgacgcctccccgccgagctcctcctccgcgaggaaatacctgacgatccgctggacgcagtccacgtcgtagagcgtctccgcggtgccggagtagctcgggatgagcacgtcctccagcgcggcctgctgca

SEQ ID NO: 214 - DNA, 662 bp, Zea mays
atctaagagaccccctggcacttccattttcacaacgtgctcgtcaaagtcgcgtcgcattgacatattgagctgtacaatagtattctattctctgtaccaaactatatatctgatatatacacccatcaacctccttcgtcctctcccatggcgcggttgggttgaccattaccgtcgtgtctgttttctccaatatttccattgatcagccacacggatgtactgtactataaatctctcctcgcctggtccaagcttcttccactcgatcacaagctaaactaagctactcccatatatacatacatataacgacgagccatggacgattatggcgccggagcaagccgcagcgacgacggcgaggaatcgccgcggctgccggcggagcggcgttacaagggcgtgcgcctgcggaaatggggccggtgggtgtcggagatccggatgcccaacagccgcgagagggtctggttgggctcatacgagtcagcggagaaggcggcgcgggcgttcgacgccgctgccgtctgcctccgcggctcccgggccgggtcgctcaacttccccgagtctccgcccaacgtccggtacgtccctggcgcgctgctgacgcctgagcagattcaggcagaagctgcaaggcacgctaaccagca

SEQ ID NO: 215 - DNA, 641 bp, Zea mays
  unsure (1)..(641): unsure at all n locations
tcgactctagaagnatccccctggcattttccatgaagttttgcaggaagtgtatcttgtaccatattgagttcagttgccggataaagttttgttggtaggtcagaaagtctgctgcaagtcatcggtgtaaattttcttttattagtttcattaaggtcgtcaatagtcagtgtttccaagtaggagaaagaaaagaatccaacttcatatacacatggaaagaggaaaaattgtgttagattagttactgtatcatggggttgttctggagaagagcatggtgtatctctcttccgaaatgtctgaaccactgaagagattatctcttttcctttttcttttgagacatgtggctctaacatattcttcagccactgttgacatgtctgatgtacgaaaattattgtcaaaaggatctgattacgaatctaacatcgaaagctccactatagcgagacgttttggaaagctaattattgtctgttcctcacaatgttattcgaaaataattttggtaaaagcatgtcgtgttccctcttttgacctgcgaagagtcgtgcggcatgcccgtgcagtgaacaccttgtttctgtcaacagaatacgacgaatgccttgccactttggtgaagtagatca

SEQ ID NO: 216 - DNA, 626 bp, Zea mays
tagaggatccccctgggagcatccccagggacagccctgctggcaagtacctgcttgagcgtggtgtgcagccaaaggatttcaattcttatggaagccgtcggggcaacgatgaagtgatggcacgaggaacctttgcaaatatcaggattgtgaataggctgttaaatggagaagttggaccgaagacgattcacatccctacaaacgagaaacttttcgtgttcgatgctgcaacggtcagttcttcttcaccaagctacgtttctatcaacatactattcagcattatattaagacaaataaggcactcgattcgccttgtcagccaactgagctaggctcagttcactggattaattatgaaacataaagtgtccttttacctcatactaaccagacttgtcatttcaacaaataatgcatatgaacttgacatcattattcttgtcaacgagtatttctcttgtactcctattaggtcattacactggttatgcttatttcagagatacaaagctgatgggcatcacaccatagtgttggctggagaggaatatggcagtggaagttctcgggattgggctgccaaggggccaatgttactggtatatgcatatcataca

SEQ ID NO: 217 - DNA, 664 bp, Zea mays
attcgagctcggtacccctgctggctcattgagccataggctcggtgcaagagagcgcagttgcaactccaggcaacaagaggatagctttagtgtccttgttaatgcaggcagcggcagcgacgggcacatcattttcaccttgcagatcaactgctctttcattggcaacttgcagtggtgcagtgtcacagagcagagtgcagtgcacgtccctgtgcagttttgtgtggccatggacgattgagacatgtccatgaacctgatactgctcaccttgcatgaacatgccttcgcggcgttcgtactctcacagcctatgatggctgcttcatcgcctcattggctaattgacagtgctgtcggataggatctggcattctggccttcatctgcgatgacaccaccatcatttgtggaaggtgacgcatggacttcgttgagctcaggggcggcgctaggaagcagtatgcagcaatggggtgtactgctatggctcatactctggcttcactctatttggttgctttcctaattccttctcaatgaccttgctggtgctagcataaactgaagtggacaaagaagggaagggaacacagaaagcaaagacgagaactagaggatggaaaaacaacagagtatggacactggtttcggcaca

SEQ ID NO: 218 - DNA, 622 bp, Zea mays
tggcagcacgtctacagtagaggatccccctggcacaagccccacattcctagcccaattagtcaccaactcggaccacctagtcgataaaactgcccagactatcgactgtgctcttgtgtggcagaatggtggcgataaacgcctaggtagcagcatattctaccttctagaacactatctaaaatattgatggaggaagcaataccagtccctttagcaacggtaagaatggtcagttcactatatataggccttcagctagcatgcgacaatagatgaataaacaaaatgcacactctcccttaaagctaaaaactttttaaccagagcttttgtaagatgtcaagacttcgggaacaagctactgtatctactatgttaatcataagtaggtcaatgaaattttggccatgtagaacaaaatcatttagcacaccaaagtaacaggcattagatcaagtgcattcacgcaccaggatcatcatcatcaccatcgctatcccagaagggtggggatgttgaaggggtgtcactgtctgcccgctcacaggacctccactcggagaaggactcgccagagagactgcgttcatcatccctcattccagttgtgctagca

SEQ ID NO: 219 - DNA, 693 bp, Zea mays
aattcgagctcggtacccctgttacctcctttttagattggtgggaaaatgcctcagaaatagctactgggctctccaaaaagggtctcaattcccttatcatcttgggagcttggttgatctggcttcatcgcgatagatgcatttttgaaaatgggtctccttgcttgtctttaatcctcaagcagtttgaagacgagagtaggtggatggctgctggtgccaaaggattatcttacctggcagcccctctccctgctatttgagggttggaggcatctttgtctcgcctggttgatggttgtgttcctatggaccagtttatgtatgcttgttttgcctccgtaaggagttcttagtttttgtatttattttcttttgtaattttcttttgtaattttctggtcttctaatgaccatgtaccctctcttcttaagttataaaatggtgcaatcctcctgcgcactcgagaaaaaaatggctttccaggatgtcatattctacataagagaggactttgtcagggagatcctctttcacccatgttgtttattttagtaatggatgtccttggttccttgttttcaaaggctgaagaagagggggtgctgcaacaactttcatgcaggaggaaacttcacagggtctccatgtatgcagacgatgttgctctcttattgcatccatctcca

SEQ ID NO: 220 - DNA, 621 bp, Zea mays
cacttcgtccgaggattcttgcagctgacgacgctgattgtccagctcctccatcgtaaaacggtggctcctctccaagatggtcagcgagttgctggaatcttggtacaatctgtcaaggttgtcgcgagaagcagcaaggatgtgtttttcttcctacaagcaaaaaatcaactcattcagaacccaagagcatgataaggcaaagcacgggttcgtaagctaccttctcagagtcaagctgagcatgaagagaagaactcagagcattggcatcatccaaagccgcagagacctgactcaactcgatctgactctgagaatacttctcctcgaagtcagcgcaccgttgagccatttcagcttgatcttgggaatgtttttcttcaagaactgcaatctgccgagtcattcctatcaaggggtaatcaaatgaaataaggtcagaaggtaaaacaatccacgagcaaaggcaaagaagaagaaggaaaagagcaccgaccagcatttgttgcctccaactcagacacacgacgttgaagcgacactggattccagcatgcaagagacgaagccacttccgggacagaagcaccctgcaatctcaggggtaccgagctc

SEQ ID NO: 221 - DNA, 587 bp, Zea mays
tgatcaagatacctagtggaatgcagaggtgagaatggttaaaaaacaatgatgtgtaaagatgtgagtttttttttcttttcatctgacaagtgatcaccagaagctattgagaaaagtattggatacaagtcggctgccgctgttatatgcaccgccagattcgccaacccacggagcagaccatggtccatggcgctgtatggtgagctggagacctctgaatatatcagaagtccggctcagatactgcgggctcaaaatcctgtttggaacttggggatcatcacctaatcaggattgaagttaagcacagttgtgtccccccctggatgcaaagacataaaaacagaatttcctcaaggagtagagccagcattatgtccagaaagggctcaccagcaccaagattgtagatatgatgggtcactgcattgagaacgtttggcccggaggcctcgagaagctgagcaaaccacttttggtcatagaatcctcctggggctacaaccagtggtttgctggaatctccgtatagctcgttgacgatggtttgaagtacgactaggtcttttccatattgctca

SEQ ID NO: 222 - DNA, 599 bp, Zea mays
tgtccttgtttcgatcattccaatcgcattctcgacaggagagaactccagagattcagatttgataactggcagacggttcaccaaagcgggaaaggaaccctctgtttggagcactgtgcgcctcttccactggtcttctagaccaccttgtgtttttccattttttgtgaatggtgtatcgaaaagaaaacggtcaaaaacacgtgcacgaacagtaccagtagataaagaaaatattctttccctcctgctacccaagtcctcatcctccatcacaggatcaacagcagtgatctgtaaatagcagaagccaggctgcaactcatcagcgttgacttgtctagagtctggaattatgtgtaaagtgtgacttccatctattttagcctcatatatatgactaagcttctccataatatcaccaagacgtacatcccgtggttctctaaatacatactcctttttattgagcttgccaaaacgctcaccatagaaaccaactcggtagtatgtggcatcaatgaatggtataggacttgcctcctgttcaagaattgactcatagatgtttgtgagcgatgtgtggcatttggcca

SEQ ID NO: 223 - DNA, 611 bp, Zea mays
tgctcgctgtaccgctccaccaccgcccgccacgccgccggcttgtccggccaccgggagtagtcgcgggccttcaccgggtacgagaagtaggtcacgatctcacgccagtcctgcaccgcctccccctgcgagagcgagaccatatatatatgcatgcaaccatgcatgagtaaatcacatcagcatgtagtaggcgcacccggcatgagtaaatatacaaaacctggaggtggctggagacgatgaagccgcccttcttcccgccggacatgtcgaagcggagcttgtcctcgggcgggagcgcgaagaagtcgcgcgcgaggcgcgccatgtcggccacgagcgcggcgtccacgccgtggtccaccacctggaagatgccccagtcctcgcaggccgcggccacgcgcgcgcggatctcggcccgccgcgcgccgtcgatgccctcgagcgacaccaccggcacctcgtcgctgaagcggtcgtgcggcaccttggggcgctcgtcctcctcgcgcacgaacgacgcgcgcagcttcgtctccccctccgccgccgtcgggaggaacggaacagcgctgatgctcacgggagccatggtgccagca

SEQ ID NO: 224 - DNA, 617 bp, Zea mays
cgactctagaggatccccctgccaacgacgcttctacctcgctttccccagcaagcagaagcaacagaatgtactagcaagcatcgattatcgcgcgtcgcccatgatgagctctgaaagctaatcactcactcgttgccgcgttctctctgtttttttttcttcttcttcttctttttggttaaatcctggggattatttcgctgtaaaagaacaaacgtacacactaacgtcgaagccgacactctcgctgtagcctgtaagaacacatcgcacaagcattctgaatgagatagtaaaattgggcaggtaaattaaagcgtcatagtagtatgattgcatcggagagatggacgaggcgtgtttgctgcttcaatttccttctggtccggctctggcatcaccagttcaccactatcgacgaatattactgtgcctttgcctacgccggcggccgaatgattccaagcgcgccagctcttccaccgccaccggtgcgctacctggagtcgctagctgtgtcatgtcatgtacgtgtgctccggtcggcggcttcatccagctcttctcccagaatttcaggtctctgccggccggtcgcggcagccgtgcctgca

SEQ ID NO: 225 - DNA, 654 bp, Zea mays
ttgctgaccaccacctagagcctaaatgttcccttggtaggcggatttttagaatactggtttgatggggcagaaaaacatcaaagttgccattatttaccagctataagtagaaattcctgccttatctctgcttccctgcagctatcctatttattcttgtggcggttcctctgtaccaatttgatatttgaatctgtttgattgttccccatccgcaatttcttctatattaagggccagtgtgattgcaggttaagttgttcctgtatcctgtctcttccctgctgcatattgtatattgttatgacaggggattgggacttgaggtggtttggagcctgaaaatgtttctggttccccaaactcatggtctgaaattccatattgttgtttaacgtcactatttgtattgagttttactgtagtctacattttgcattgtaaagtagtactagatctaaagttttatgccctgctcataattctatggtaagctaaatccacataactaggtgatcaagatttcgtaggagtagcaaagcatgcccacagtatgttgtttgttgtgaccttgtcgacctatcatgatttcatctatgacatgaaacaatgtatgccacagtttctgatctgtctccactagtttgctca

SEQ ID NO: 226 - DNA, 593 bp, Zea mays
tgccaacactgaagttcgagctgacaaacttgctacaagaccagcctttgcaatagaaacacattgctgctccatggcttcaagtaaagcctgagaaccagaaacaattagaaacacaaatagataggcatgggaacttcctcactggtgaaaacttcatgagaaagcttcatataaggtgaaaaataattgtaatacctgatgctctgtaaacattttatcaaactcatcaatacagcatattccacgatcagcaaggaccatggcacctgtaagtcaaggactcaacttaattttgaatttttgatcgcattgcaaattctaaaaccacaaagaaaacgtacaccagaacaaagagcatttggaacggcaattggtataacaaggaaaaaaacaaaaatgccatcgccaagacacgattttgaatagaagacttaaaaaatcataatgaacgaatatatgttttgtggttaccagcctcaaatgcataatcatttgtcatagaatctttaaccacagcaacagttaggccagcctttgttgtcgtattcccacatacatatattcctcgtggggaaacaggggttccgagc

SEQ ID NO: 227 - DNA, 640 bp, Zea mays
aacactattaagagctcctcacccctgagaatcaccaaatgccttcacatgttttactcccatacaatttaaaagttccaagccaaacaaaagggcctcatatttggcttgattgttagtgcaataagttttcaatcggctagagaagtcgaaggagacattacttggtgaaacaagcacgatgccaattctttgtccttcattgcaaaccgatccatcaaaatataaagtctagggagtaacaatgaggtatgatatatctagtttatgagtatcatcaatccgatgttctacaataaaatctgctacgacctggcctttcatagatttcaatggttcataggccaagtcatattctatgagtgcataagcccatttaccaattctaccactcataatcgggttttgcaacatgtatttgatcacatcgatttgaccggcaacggtgcaatgactagatagtaaataacatctacacttggtgcatgcataaaacaggcataagcataacttctcgataaaagtgtacctcgtttcagcatccaccagcctccgacttaggtaggttaccacatgctcctttcctccggtctcttgcgtcagaacagctccaataaccttatcttcagggggatcctct

SEQ ID NO: 228 - DNA, 1191 bp, Zea mays
  unsure (1)..(1191): unsure at all n locations
agcccggtacccctgtaaccgatttaaatttgtattcaggtaatatattttgacttgtgttcagcaaacaaatttcctttgatgttatcactctgttgctaatagtagcttgtacaggttcaagattatgggaaatggtgagtcagtggcacttttttggagagcaaggtgcaagagtacaagtctgcgaggatatcaatgggcaaaggcacatttgtatttttttgactccaaagcgatttcagttgtaatagaaataacttattgtgtgagatcttagaaactcatgctgatagtattcaaaattgctggtcttatattgtgacaatgagagattattagtcactatatttttgtggtcttatattgtgacaatgagagattaacagtcagtcactatatttttatggtcttatattgtgacaatgagagattattagtcacttagtcactatattttttgttttttgagtgcaaggcacaacatacaactacgttggtgtatcacttgtaggtattcttgtttttttaatacaaaacagagcaacgtggggtgtatttagaagttaggtatatggattgatccactgagaatcaccaaataccttcacatgttttactcccataccatttaacagttctaaaccgaataagagggcctcatattcggcttgattattagtgcaataagttttcaatcggctagagaagtcaaaggagacattactcggtgaaacaagtacgatgccaattccttgcccttcattgcaaaccgatccatcaaaatataaagtccaaggagtaataatgaggtatgacgtgtctagtttatgaatatcatcaacccgatgttctacaatgaaatccgctatgacatggcctttcatagatttcaatggttcataggccaagtcatattctatgagtgcataagcccacttaccaattctaccactcataattgggttatgcaacatgtacttgattacccgcgcctgaccagaaacagtgcaacgactagacagtaaataacatctacatttggtgcatgcatagaacaagcataagcataacttttcaataaaagtgtaccttgtttcagcatccnnaccacaccttcggcttagatatgtttcacncacatgctccttcccgtcagttttttgtgtcagaacagcaacaataacctgt

SEQ ID NO: 229 - DNA, 608 bp, Zea mays
aataccaaataccttcacatgttttactcccataccatttaacagttctaaaccgaataggagggcctcatattcagcttgattattagtgcaatacgtttccaatcggctagagaagtcaaaggagacattacttggtgaaacaagcacaatgccaattccttgcccttcattgcaaaccgatccatcaaaatataaagtccaaggagtaatagtgaggtatgacatgtctagttcatgaatatcattaacccgatgttctacaataaaatccgctacaacttggcctttcatagatttcaatggttcataagccaagtcatattctatgagtgcataagcccacttaccaattctaccactcataattgggttatgcaacatgtatttgattacatcggcttgaccagaaacagtgcaatgactagacagtaaataacatctacatttggtgcatgcataaaacaagcataagcataacttttcaataaaagtgtaccttgtttcagcatccaccaaccttcggcttagatatgtcaccacatgctccttcccctcagtttcttgtgtcagaacagccccaataaccttgtcttcaggggtaccga

SEQ ID NO: 230 - DNA, 617 bp, Zea mays
gctggcggatgcagcagcaccagagcagcccagcagctcaacgtgattcatcacagcgtgggcaggagactgcgggaagcccgtggagtcgagaacgaaggcagaacttgtgccatagatactagctagctagtatccctttcacttctccgggggatctgtgttgctgctgttcttgttcttgaatcttgatgttttttttttggctactagatggatgaactagtgtgtgtatagtggtggagattgtagtggtaggctcacattacgttacatatttttcacatattgttgtcatgaggcgtgcatggtttgtgcatcaccacgtgtccataaaaggacctcctgaactatgtatgggtgggaggccatgcgattgttcttgcactgcactgcatgcatcgagggagaaatgatgcgcgtatcccattcaagtaacatccgttaacttacaagcagagacagaggccggcgacgtcgatcgcgtcgcgatgcatctacctaggccgtgacatcgatgccaccgtcggcctcttcttccgctgccgccgcgcgctcctccttatcctcagcaggtggagcagcacgctgtagcacgcgcttcagcacggcgagca

SEQ ID NO: 231 - DNA, 626 bp, Zea mays
tgatgagtaaatctgtcctgttactgtaaggcgctaactttctggaaaagcaaaagagactgttgcttttcgagatgctgttgtatagatcggcagatagttgtagggactaactcaagtttgtgagctaagaaacacctaatcactgaggaggggaaaagaagatattgcagcaatctgcattctgaactctgaagacgatgtatatacatgtctgtgtttaatttttttttttttgaaaagaaatacatgtctgtatttccagttcaggcttactaatgtttcaggtacatcaccacaccagatctttcctcttgttccttccatccttcagttagaaaaaaatttcccatgagaaaaagacataaaaacgtgaaaagaaaagacaaataaagaggaaacaaatgtacataccatgcagcacaatcacatgtttagccgaaaccaacaagtcagctcatcttcaacagttgaaatctaatcgaataaacaattatccggcagaaaaacacctacctgcccaccaagaatcaatggtgcagcctctcttattcacacacccagcaaagccacactacagaggccaatggccagtcactcatttcccggctagcactcctccatca

SEQ ID NO: 232 - DNA, 680 bp, Zea mays
gacactagttcgagctcggtacccctgacagcaaagaacaatgcatgctattaaatctgttagatggttcagaaatttctgagaaacacaaaataggttctgcatagaactgaacgtgaagacagggacaaaccgcagtgagaacccggtccttctgtacaagattaagaatgaacccagcctccttactgttatttgcttcagtagaatcatctctgcctactatattagttgtaagcatagactttccatagatcacagtttcaagaatcaagtgtgacatgacatggaaacgtgcaccatcatcaagttgcccatactgggatcttacccttagtaaggacctgcagcaataagttactaaactgtcaaattaaccatcatcaagcgaatgattatatataaaataagattacaaatcctaccaaatcaagaaatgcagtctatttttgcactgatcatcttcagagataatattagggagcagtgatataaattgctgaacacatttggatgcgttttctaagccagctttgcagagatacataatgatgagatggaagataattcttggaaatctctcccctcttagcatcatagctttgtcagcaactttgttagtctttccacctaatgcgctactgatgcctcctgttacaactacagcagccatttctgca

SEQ ID NO: 233 - DNA, 616 bp, Zea mays
tgcggactttgacctggcgatctcaacactaggcttttccctggatactgatcgaactgaaactgttggttcagcagcctgttgatcatcagccctactctcagatttcagttgtccctcagatgaaactagaggaacattgcaaacagctaggtctgtttctggactaatatccgagtcaccttcgtcattggaactttgaacagtaggctctgaagttccagttctcacttccacagcattgctatcaagaaaatgtgaagtctcagaattcttggaaaagttattcatcatagcttgttcctcagaagcagatggagcagactctttcagcaactgctcctgattatttactataggggatgcatatgaatcatcagtattagaagtcactgctgatgcctgttcagtagggtccactgcacatgcatcaggcaattcatgtttggtagcatcagaagaaatattatccttgctaggatctgtcgcaacttcatcagtccgcttccttttgtcacattcaacagccaaaacagtgaagctttctactgcaggctcaccagtaccctcgggagatggtcttcttgagcttctatctgtcccaggaacatcagca

SEQ ID NO: 234 - DNA, 623 bp, Zea mays
ctcggggatctgctgatgttcctgggacagatacaagctcaagaagaccatcttctgagggtactggtgagcctggagtggaaagcttcactgtttccgctgttgaatgtgacgaaagcaagaggactcacaaagttgtgaaagatcctagcaaggataatatttcttctgatgctaccaaacatgaattgcctaaggaatgtgcagtggactctactgaacaagcatcagcagtgacttctaacactgatgattcatatgcagcacctctagtaactaatcaggagcagttgctgaaagggtctgcttctgagaaacaagctgtgatgaataactcatccatgaattccgatacttcagcacatttttttgatggcaatgatgtgggcgtgacaacttctggaacttcagagcctactgctcaaacttccaatgatgaaggtgactcagatattagtccagaaacagacctagctgtttataatgtccctctaggttcatctgagctacaactgaaatctgagagtagggcaaatgatcaacagcctgctgcaccaacagtatcagttcgaccggtatccagggaaaagcctagtacaaagtccacaggggtaccgagctcg

SEQ ID NO: 235 - DNA, 614 bp, Zea mays
tgagtaggtgtgcccttgtgccatgcaaacttcaagcatgtgtgaaacagaaaacttaagaattcttatattattacagttaccaaatttcattcatagttacttttgtgggccgaacagaagaaaacataaacattgaagctgagttcatttttatcaaatgatattttgttgaagctatatggctagatcagtgtatagaaggtgcagtttgatttgcacttttgcatgccttgtgccagttcttgaaatatttcagcacaggggtttcctctttcatgaagaaaccatcgttcttggtgattggcaatttatgtggacacaaacatattttatgcatgaataacaaacaaacaatatggatatggatatgcattcactgatctcgtctgtcaagtgcaaatggcacaaggtagaacaaacagaaagtcaggtgctatcttttctcatgctgataggttacacaagatattatactagaatcacaatacctttgtgtagctcttgaaatgtctttggctcattggcttttgtgttgtgatgcccgcgccatttgttgtcctgcaggaatggatgtcatcaccagcatcgcaaccatacctacctacaaacca

SEQ ID NO: 236 - DNA, 655 bp, Zea mays
tgagtatgatccaaaggtggtaagtgcgccttcaaggatcggcgtggccatatcgctcaagccttgagatatgggtcaagtcaccttctgtaaaacagtacaagcgttacgtactgatactcgtgtccaagaacataaacttttggagcgatgcctagaacaaccctctcccttttagccttgtttttggtaagagccttgggcaaagaagtgttgtcagggagttggacttgttttgtggaatgtttccattaagagccaaccccacaccgatgattgcaaacagaggtttgtattagtgcagaagtttcactctgcgatattttttccccatgttttcctagtcgacgcaaaatgattttggaggtgattgaacacctaacgtcttgagttgacggcagctttaacagctctgattataaaggggccacttgtacccagcaacagaagaatttgctcccaattcgtcgaattggctattctggtggaacatttttttgttgtcgttggattggttcttttgaaattcatgtattcagagcagtctagttttgcttcctcgataaagtatgttgtgttggatatttgtgatgtgaggtgaatgcgcccaggctggagatcagccgatggaggcttatcgagcaggggtactgag

SEQ ID NO: 237 - DNA, 582 bp, Zea mays
agttgaggagaagctggtggtagctaggtagctaggtgtaggttcagcaaatcagcatcgtcgtcatgctgcggccaccgtgcccccagccttgccggagccggcgcggcggcccttgaccttggccgagcccgcggcagcgtccttgatcgacgtcaccgcgcacttgtccttccactcctcctgcgtcatgtgccgctccctgcactccaggctgcagaacgccgcctcgcccctgcaggcagaccacgtaacgagacggtaagtgacgagggacaaaaaacaaggagtcttgctgcggggcaggtggcgagcgagcggacacgtacttgtacatgaaggtgtctcggccgggcccgaggcggcgccggcagagcccgcaggcgcgcaggaacgcggcggtctcgacggcggagtagtcggccgagttccggcggagccccgcccgcgccggcgccgcgcgggcgtggtacgccgcgagccagtcctcctgcgccgcggcgcccccgacgccgccgccgccgccgccgagcgcggacagccagtcctgctgcccgccgtcacggctgctgtcgtcggaca

SEQ ID NO: 238 - DNA, 652 bp, Zea mays
tgttgtatggtttgttgaccgtctaattatgatggcaggagaagaaaagcatcatcctgcaaatctggtatgtacattgcacaaaatttaatgtaatgccaaaagttttcaccaactggagagagatagtaactgtagatgttggagattaagaacattctgaataacattatgcactgaatatgtactgtctatttcttaccgatttccatgaaaatccggaagcacatgggtgtcttgagttaatgcagaaagaaacggactattctgctcttgtgacatagaaagcaacatcttgttcagtagctcaaatatggatatacctggtaatttgagcaaaaagttaaagttctttttgctggtttcaggcagctacaaagataacgtgcttgagagtacatgaaacatactttgagaagcagcatggttagaaagaagaggagaagcaacatggttttcaataatgtaatcgagcagagcgccagttgcactttggccaccttctgtgagccaaaactcagggatcatcgctgaatttggaagcacaatgtaatattagccaaactgaagcacaagagatagaaaagaaaccaacataaatgctggttgaatttgtttttaagggaaattaaaatatatatttgagaaggca

SEQ ID NO: 239 - DNA, 617 bp, Zea mays
tgctctaccagaagcaaagactcgctccgcccgcccatgccgttcacgaggacgtcgaccgtgcgcgctttggacacgatggcagggaagaattccgtccacttgctctgcaagaacaatgacgaccgtgcacgtcacgcttcacgacgacgtggtggtaggtgcgaaccgtatgtaaatagtgctatgtattttactcctattaattgcagccatgaactttaccgagtccatgaacatgtcgacgaggccgatggcgctcatgaagacgagccccgtctcgcgggagccctcgacgtgcacgtccgggccgcggaacgagccgtcgggcttggcgaagatgctgtcgtacgtgtcgacattgagcacctcgcggccgcctgtcttgacccacaggtgctcgccggcctgcgccatcctgatgagctcgtccatggcgcgcgccgccatctcggccatcatgggccgctccatctccgacaccgccatcgggaggaggtggaacgggggataccccgaggagccgccgctgaggaggtcgaggtccagcgacgggccgccgagcccgccgacggacaggtccagcgacgacatggacagcgcctgcgccgacggca

SEQ ID NO: 240 - DNA, 578 bp, Zea mays
tgcatgcttgctggcaccggccatccaaattttgacatgggagtacgtccacccagtttcctggtgacagtgagatttttggccatggcttccatgatatgctctagttttgctgttaaacttcaactgattgttctatggcagcaacaagagaacagcaccttgtgattgttccggaggcacatcatgggtcgttgcagcggatgcaatcatcatatggtggatagtggatagtgaatagttggcgtcacaatttttgttcccatagtcgtcacgattagccatctgtcaaagtactctctctctctctctctcttcgttgaataaggtcatcaagaaggccggtcatttacttgtgtattctgtactttatttagtttgtagacaaatgaacaacgagctgaaatactatatcacaggtctattgtcatttttatcacacactgttgtatttacatgaataatacacaagcatttgaggattcaaatagaccaatcctgtgcaaatgttcgtactctgagatattagcaccagagtgtaacatctgagaccaacgcaactccaggccatcttctca

SEQ ID NO: 241 - DNA, 661 bp, Zea mays
gggggggggctgagagcctttaggagagctcggtacccctgcgtgactgcgttccgtcccctcacgtacgcaggcgtggagtacatcgtctccgacaccatcttcgagggcctggccccggacgagcagaggctgtggcactcgcacgcgtacgaggtgaaggccgggctgtggaccgacgtcggcgtgccggaggcgctgcagagctcggagatggcgagcctcgcaaggacgtacggcaagttctggtgcacctggcaggcggaccgcggcgacgcgctgcccctcggcgcgccggcgctcatggtgtcgccgcaggccgccgagcccggccgcgtgcgcggcgagctggtgcgcagccgtgacgagaggtacgggatcgacagctcggcaggggggctcaaggcggcgagggtggagatggacgagccggagtggatcaacccgaacgccgactactggcggctgcacggcaaggggttcgcggtagacgtcgtcccggccgagatgaagcgacacgcgcccttcccgtgagctgccggtcttcgttgttgtgacacatccgtaaggagcaaaaagatcgttcttgtagccagaggcgttttctgaagaagaagaaaaaagcttgtgttgtgtgcctgctgttgcttctctgtttgca

SEQ ID NO: 242 - DNA, 636 bp, Zea mays
tgcacatacatatacacattataatcacacacatgcacacacaccgggtctaggcataacgattactcttcctcgccagacaagcccaagctcaccggcgtgccagtctccggtatccagtccgcgccgtgcaagaagtgccccaccgtgaactgcagcgccctgtccttgcccatcacgtggaacccctgcatctccttccgcccggtgacgttggcgccgtcgccgccgttcctgaactctccgaagaaggccgtgcccaggttgtccttgccctcccagggcatgtacccctggcggtgcacgaatccgtcaatgacggactccatcaccaccgtcctcgcgaactccttccacggccggcccaggtacgtattgaccggcgcggacccggacttgttgctgttgctgctgctggcgagctgctcgtcggcgacgatctggctccggtggatgacgaagcccgtggtctgctggtggtcacgccgcgcctgcgcggtgaccacggccggctgtcccggccggggcttccgcaccagcagcaggcagcgctggaacacggccgcggcgtcgcccatgatgaaatccacggtgccggagatgacgcaggggtaccgagctcgaaataagagtcat

SEQ ID NO: 243 - DNA, 721 bp, Zea mays
attcgagctcggtacccctggagcttctcacacgaaccgagctcgggcgggatgccaccggtcagccggttgtttcccatgtacagcttcgtcagctccggcaatgacccgatgctggagctcaacggcccggtgagctggttgtcggagacgtcaatgagctggagactgcgcggcaacgtgtccggcaatgcgccggacagagcattggagtgcaggtcgaggaactcgaggctggcgcaccccgatatggccgcgggcaccgggccgacgaggtggttctcactcatgtcgaggaagtttaggttcttgaggttgccgatctcggcgggaatcgcgccggaaagcctgttgccgttgagccggagtctgtacaggttggtgcagttaccgatctccgacggtatgagcccggtcagctcgttgttgagaagcagcagcttggtcaagttctggagcccgaacagcgccttggggatgggaccggtgaggttgttgtatgacaggtcaaccgcttgcaagctcggggcctcggcgaggctcgccggcacgccgccagtgagccggttcttccacgcgtagaacagggtgaggttgcgcagtctcgggaagtcgatgctgatcgccccggacagcaagttgttgtcgacctcgatgtccgtcagcgacgtgcagttggagagctccggcggtatggtgccagtgagctggttcgtgctca

SEQ ID NO: 244 - DNA, 591 bp, Zea mays
tgtatcggacggcccaaaactgtgccgcgtgttccgttcaacggctatttcagcccgcagaacgcacatcagaagggtaaagccacgaaccccccggtccgcgcctgcgccgccttccctctcctgccttctccgcttcaaatttgcgtagcgttgatttcacgcccggatctcacaacgctcaatccaaacgctagccgcaaccctaaccctagcaaccggtgagtaatggcgcgccctaggggcaagaagcgcacggcgccccgggcggccgccactgattcggtccagccggaggcggcggcgacggagacagcggcggcggagccggcaaatcgggggcggtggaagcgcgtcaaggcgccgcccaagcccaagcccgagacggattacttcgccgagaaaagaaatctggtgagttggttttgtaggatggcctggctcgggttaggttgttggtatccccgagtagttgtttggtcctcatctgattagctcgcggacggcttcactctcgattctagctctagcgtcaagatttgcagtgctttgatttgtcgaaaaaacttgggatgatggctccattctgca

SEQ ID NO: 245 - DNA, 637 bp, Zea mays
tgccaaacacaccctaatcaataataggcatgttgggttactacttactagccttagttgctttatgtgattcgtttgtgatgaccgacatgtgtcatgattagccttgattggtgtgagcatattatatgtggcaagccaacaagtgccaggcttacgttttttgtgatgtctatgtgacgcatatccaccagattgaacaaatggaatctcttcttcctataaccagcaataaaggagattcaaggataccatctacaaagtgtttttgtccatgaattgggcttgggccagctaagattatggccaccccttgcattctacaaataaaatcatgggttctggcaacaaggatgctatagtcaaacaaatgctaactaccacccagcccgttctgtgctcaagtgagttagggcaccaatggttcaatactactgattcataacaacaaatggacagcattactttaacaaaagactatgatagtacaacagcaataagttcaggccaaacatacacagggaacaaactcgatatgcttttattttctcaagttaagtatgcataccttagactactctttacaggtttggattcagacaagtagacaaacaccagttagttaagatggcagggg

SEQ ID NO: 246 - DNA, 668 bp, Zea mays
  unsure (1)..(668): unsure at all n locations
tgcgcctcgagtcggcgcccggactcggtgtacagcaggtggaccagcgtggtggggcgccacccggcgagccagtacgcggcgccgcgctccgcgggggtggcccacggcgccgacagcgtccacaccgggtccagcccggcgcgcgcggcgcagtacgactccaggtgggccacgaagcggcccacctgcgcggggagctgggccgtcgggtcgtccgaccaccgggccgacgccaggtcccggcgcagcgagcgcagcccgcggaaccagaggtggaagcgccgggccgccgcctccagctccagctccattcccgcgccccccgacgaatcgggcagcagggcgcaccgcgcaccggtgcagggggggcgcgcggcgggcggggctcgggaggtgtgtcaacgacgaccacgcgtgggcggtggactttatagggtgcggccgatcatgcaggcgggccacgcgtggagcggaggcgaacggacggctgcgggcgtatgaggtggcgcgcatgcagggggccgtgtgtgcccagagcactggccgtttggttctggacggcgacgccgtcacgccgggcggaggggtgacatgtggcccggacgtgccaatgggtgtggtgtgtagcgatagcgacgcacggtttggtcggtncccagtagtca

SEQ ID NO: 247 - DNA, 583 bp, Zea mays
tgcttaatctatatgcgtcaaccggggaataataataagagaggctgcctaatgactcatcttgagatgaggattattgaggaggtttggcctgatcaaggccacgaactccatacattgttaatggttcattagatcgattgattatactacatgcctaatcccaactcccaagcacctacgttaccggccagcagcagctagcaaatcccgatcatatctcatcaagaactttacttactccagtgctagcttaattattcaaagattcaccataaaatactagcagcacccagattcttcatcagcaagctaaggaccacgcacggcacagttggaggaggagccggcggcctattgtattgttttgtatggcgtctgaacgaaggaatcacgggatccacaacacagcgtggtataggcgcgtgtagatctctgccatgtacgtatatgcacaccgatggccatgtcaatgagctgtccccatcgtacaatacacgcgcaaaaagtattcaggggctcgtcgccgtatataatatcaggcgttcgtaccccagtgaccgcggctgctcgacacgaatca

SEQ ID NO: 248 - DNA, 619 bp, Zea mays
aagttgatcatcagacactcgtacatatatatccatcttgtacatccattgcccctagctagtaggtcctatttaggatgttgtttggttcatataattgtaacgtgatatcgataacgctaaatcatgtttgtttaagtccaatataatcagataccacactaaaaatggatacaggtttattcaaatttattaccgttgtgaatcattaatgttgtttagttcacaaaatgtaacgtaaatggtaacggtaatgattcacgcttgagtatcagcggtaacaaatttgaataggccgatatcaaatcgtaatgtggtatgcgattacggttggacttaaggtttaacgttatcagttatctgtcacattacaaatatgtgaatcaaatagtacttggtgacaggaaaacaaaattgaatgaagaaacataagcgtggtccctggatgatatatagatagatgatgtgtactctagctgccgctgctagcagagcttattagcaaggacatagtaccagcagcaagtaggaagtgtgcagcattaataatttgctagctcgcgcagacagtgccgtatggtacatgcaattgcgaaatgcaggggtaccgagctcgaat

SEQ ID NO: 249 - DNA, 663 bp, Zea mays
gactctataggatccccctgatcacaacaatgagcttattgaagctggcaaggtggaagatgaggaaaggaatccacatcccgactacgaccatctcacaccggcggagcgacgctatatagaacagaagcagaagatcgacatgcaaaagctggccaaagttgccaacaagtcacacagggaccgtatccaggacttcaaccagtatctggcgaacctcagcgagcactatgacatccctaaagttggccctggctaacatatatagccaaactgttgtgtacgcacaaacaattgtaattgtatgttgggtgggcttcaagaacattaaaaatatataaatgtatgttgggtgattgggtctatccagctttttgttagcatgttatatctgtcctagtattttccacttttcttttaaaaaacataatttagattcttatgtgtattgatttgaattgaattacgtctacatatgttctcttttgaaagtaacaagactcaatttgcctttgaaattagcttccatcagggatatatcagcggtgttttaaattgaacttctgagaacagcgcgctatcttgcgtatcacttttctaaacaacaattgactacgtttttttcttaatcatgttttatacggctatcgtacggtggcacca

SEQ ID NO: 250 - DNA, 630 bp, Zea mays
gtccagcccctctcgcaccacgtccccaatctaccaagctctgacggacaaagtgaagaagatgacgttcgcgagcgacaccgccgattccgcgaggagggctgcgagacggagctctctggggagcgagaggaccgtgacattctgcaagccatcccccgagcgcaactccgtcagctccacgcggagcatcaaggagtacacgacgacgacccagagtgctagggagctctctgtcggcagcagcctgcaggtcgacgatgaggtcacgagtaaggccgttgtgacgaagacggcaggcgttctacggactccctgcaagagccgtgctccggcatctaagatgttggtggcggctagaagccggctggatcctccgaagacgtcctatgccagaacgaaccgtgccgaggtatagtagtagggatctttgtctgcatcgctggtttgcgttgacatgaccatatatgttacctttttttggggttatatgttgtgtagttggactcaagaacgcctctgagcaagagcagcgcgcggacggcaaggagagcatccctcccgctggcggcgtacagagcacccagcggcggccgcgccggtagcttcctggagcaggggtaccgagct

SEQ ID NO: 251 - DNA, 672 bp, Zea mays
tgcaagggcccaggggcgagcacgaggaaccgggtgccttggtcccgctcgctcacctacgacgaggcgcggccgttcctcggcccgagcttcatcaacggcgagcagtggctcaggctgtagatccgatccgtcctcccggctgccgagctgagcttcgtcgacggcgagctatggtccctccgtccgagctgtgtgtaggtcatgcgacttctctggtcttcttcggtgcatatagcgtgacaagcaagcagctagtcagactgtagacatgtacgctgtaccatatactactagtaccatgtacaaacctgatacccatatgtgtagtgagatactgagatggccatgtccatcattcatggcaagatacatagtagtttgcatgcatgtatgtgaaggaaaacaggggaggccaaagtccgatacgtgacacgtacgcctcatgcagatgggtcatggggcctccacctcaggcccgcccaacataccagaaaatcaaaatgatgagatcactgcatggctttcctgatttctagcacgggcaagttcagatccagtatgccaaatgccacaaatagatggcgcatggctttgggagtgagaaaatgctctcattctgcaaccctttcagatcaacatgcgcaggggtaccgaggtcgaattcggtaa

SEQ ID NO: 252 - DNA, 568 bp, Zea mays
tggtgtgcaatcaaagtccatagcaagatacaagttgaagcagtcaaaaatagctgcaataccaaacatggagtaagaaacagcagtacaaaagaaaaaaaaaacagagccaaaggaggatggatacaagaatactcgataatatcagaatattgtgaagatacatcatcaactctttctgcttcaaatcggttgctttccaaaattactactaagcattttacaaaaagcatttatgtaggccaattacaagtaaatcacaaatatgtgaaaacgacaaattaatttttcaatatgtaaaccgagttgaacagaaggaactatttgctgcttgtgtgtgttatgggcctagagcccagctcattaggcgtagactatatgtactattgtaatactgcagttcatttatgaatcagggtttctctattcaccccaaaactattgttcatttgttcttaatgtaaaaggatgaaaaacactaagttagaaagtcagcataggtagataattcagaaggtaagattactagattagacttcactacttcagtatcctcaaatgttcatca

SEQ ID NO: 253 - DNA, 684 bp, Zea mays
attcgagctcggtacccctgttgcctgtagcagccgtcggcgacgacggtcgacgtcgaaggaagaagagcaggcacgctgaggtggacgaggaagctcttcacctcgccggcgtagatggcgccgacggcgacctcgacgtacgtcttgtcgtctctggtggtgatggggcgagtcctgctgtatgtgtatccccccgactggatcctctcgatggtgaccccgctcccgaccggcgcctcgaggcggacgcgcgcgccgacggcgaccacattcttgagcccgctgaggcagacggcgatggcgccggtgatgccgtccgtgttctggtcgtccacgaatgagtaggtgccctgggattccctggcgatgtgcaacagctccctggggtcgtgcgccgcgccgagccccaacgtgtgcaccgggggtagagagagggactcgcgcggcagcttgttgaataatctgctgctgccctctgccactgccctgtccgtcaccaagatgacgaagcgcgcgcggctgctccggctcgccgtcgccggtagctcctccaggatctgaaattccagtcggtaagaccaggtagcagttgtgaaatgaagatgcatggagaaacgtcgcaagtaccttgatggcctcctccaagccggcgcccgacgtgaactcaccacggtgctgcag

SEQ ID NO: 254 - DNA, 635 bp, Zea mays
ctctaaagacccccctgatggatcgatcgagcgtagcgatctctcatcgtcggctacacgcagtagtataagttgcactcttccctcgtttcgaagcataggcagagagcatttaattttaacagcctatgtaggcacagttcgcgagtcgtgacaaaacgccaagttcacggcggaaccgctgccgccattgactgacgccgtggcattgccattgctgctgctcgcctcgtcggtgtcgagtggctcaaggtgcctgctacaatattacccgttgaaaaaattatagtacatttaattttaatttaatctaaaattaaagcactattacgatgacaaacagagcctatgtataagatctaaatatatgcatcatgtgacataaaattaaatcttgcttagcttagcaaaaacatgtctaaatagattatcagccgcagtaggaaagacatggttaaaggaagatggttctacatttctttcgtgatgacgattatataagacaagacaacgtcaaagttcagcacaattttattcttgctgacgacataaaaaacgagtgtgacgaggagaaaggcgagtcgtggtgatgaagttgacaaagacgacaagtcaagtaagcaatcgagccttca

SEQ ID NO: 255 - DNA, 557 bp, Zea mays
tggtgaacaaaaacttcgctgaactcaaactcctcatggtcatgtacttcctcatgatgttcccccagctctgctcccactgattcatcaacgtcctgaagcattgcgtactggtgaccttgatgcctctgattgaaaagaaatggaaaaacagtcagtgtaaaagtgaactgcagccacataacatcaagtcaccgatagaatatgggatactgtataaacgtacttgctgatgttgcttcttcaatagaagaggttttggaatcaacatccaaggcacagacaccagagcaagcagaagtagaacaagctgcattggaaaaggcaaaaatggttaggcatgatagaccagtctgcttcacagaagagaacttatcaacaaggaatatagacctgcactgtcttctggccactaaacaactggttttcaccaatatcatctgttgggctaaggaacatgtagatcataacatggtatagatctgcttttgaccccgtgcaccacttaataataataagcaaggacaggtaaccaaataagctgttcaagaagatca

SEQ ID NO: 256 - DNA, 640 bp, Zea mays
taatcctagctcggtacccctgtgttgtgtcttgtgtttcggaagtggagggtttcatatattccagttccagtggttggaatttcgaccttgctggtctggattcgggtggtttgattatttctgtcggaaaggcgaaaaaaaaggtgctcttgagcacaaaccacgcatgcaggctgttagcagcaaagatggatcggatcgatcaagaactgggtgaatatataataaaacaaataaaacaatgattcatcttttttctgaagagatgattattggtgcgtgcaatgatatgaggcatcagtctcaagctcattggaagaacagccggagaagaacaaattcagaggaatgctcaagctcagccggagaagaacagccgatccacaagaacctactgactgcttaattggaagaagggagttcctccgacacgcgtagcgccgcggcggccgcctcgaagtccgacacgaaagcagacgacttgctctccgggccgacgcggttcacgccgctgccggacgccggctcgccatcggcctcctcctcttccggagccggaaccaggtggaggttcccgtgatcgtcgtcgtcgctgcccgagtggcgggccgtcggcagggggatcctctagaagcga

SEQ ID NO: 257 - DNA, 615 bp, Zea mays
ttcggtacccctgctcggccgacatgtccgccgacaggtcgtacgacgccgcggcggcctcgtagtgctggcagtccgcttcctggaggacactgatgttctgtgagcaccattcgtcgaacagcgtctcggtgctgaagctcgactttctgaatatctccttcacgtagcggaactcggtctcgtgccttgggtctacttggaggccgtcgaagccgctttcttgtagtactacggcagcgatgccggttgaagcgtcagcgtcatttgaatggagaactcttgggtccaagtccaacaacgtacctgcaagaacagacactggggctttcagtttcttggccacagcttaggcttacgtctgcttcaagttcgtgactggggtaaggagcacaagaagtaccttctgttggctctgaagtatggaacaggtgcgtttggttgccatgagaaactggagtacgttcttctgaaacggtggtctcctctgacgacagagcagcatatgcatcagcagcctgtgttgacgagtggatctgattatcaccatcagaatgttcttctggtacgccaacttctggtgatatagagcaggcgtcacacagctcgacttca

SEQ ID NO: 258 - DNA, 655 bp, Zea mays
tgttgcaaggccacaggaggccgttggtgatggcaacctgataaagtgaacaatgctggtttgccaatgaactgcacagttgcttgtctctgggtctgttctgtttttagccttgttctttcacaacatgtgccgtgcagcctggtattaagaattctgtggtatgtgtgtagaatgcaatgggatgggatattcatgtcgttcatttacactcctgtcttttgttcttgttgtctactgttgaatgttatgatatgcttgaaccttcatctttttcagctattcagtcacgactttatgttgtcgataactgaactgcacatgagaactatcttttcaatctaagatgtgtttgccagaagcataggtttgactcttctgacttaggactcttgtgttactgttactgatgcgagggacagaggaaggtaaggggctgcagactaagtttagatcttacctctgctctaaacacaaaggtaggtgttgaagttgactgagtacaattctgattcttgaggctgacctagttgatgcacctgaaggttcaagttttctgaacacaagtttggatatttatggacatctaaagcaacatatagatattttcgttttcttggaaaaaacaggggtaccgagctcgaactagtgtcat

SEQ ID NO: 259 - DNA, 591 bp, Zea mays
tggaacacccatcagccacacacaaccggatctcaagattgcttctgtcatgtggtggacgagagcaatagtccaaatacaaatagtctctgtatttaataagaatgctgctccaaggacaaaacccatcaggagatccacaatgatacttgaccacaaagcatgcttccgaattgcagctttgtgtgcatattcaacattcacagtggagctgagccgataataattaagtgaagcttagtattttcaataatctgcacttgagcatatgataactactatgtactaaatgtaaatgcacttaaatattcataatacaaagattacatgaaacaacaaaatggaagtgaaccagtaaactctcttttgtatattaaaataaccatgtaagattagtaataacagaatcactatgttattgcctttgtatatgttaatttataaggatagcacaaaatgttatgacaatatgacacaatagatattaaacaacgactaaagttacagtgcagattaagaagttacggatccactgttaatttaccttaaggaagcatcttggaagacaattggccagtagagaatttgaca

SEQ ID NO: 260 - DNA, 574 bp, Zea mays
ggtacccctgtcttaggggcaggggagcatccgaaccatgggaatttccccgccggagttcgtgggcagaggaagatccgcaccacgcctacatcatcgctctgggtatacgatgtggtcgaggatattcgccattgcatgtggatgttcatcgtagcagcgcctgggcggaatcgctctccgggccatcggaattcgtcgccggagatgtgccccgccgcggagccgcaacgaggatgggactctgcatagtgcaatcatcggtgagcaacactctacctattttgccaggacctctccatcgtataacgcgtgtaagcatgtgatatgggtcaccaggggggctgattgcctgacctggacgagggcgccaccgtgaaataggggggcatcatcactgctggctgtagtggggcaaatgatggccgctagtcgttgatcagctattgggcggccaggattatatcccgtttgcataaaatctggatcgttggtcatagatctggcggctcgcagtgagtaccggttcaccatggagatgttctaatatgagtcgtgcatttatgatcgggca

SEQ ID NO: 261 - DNA, 635 bp, Zea mays
cgtgaccacgttgtcatcttcccgttcatggcgaaaggccacacgcttccgctgctccacttcgccacggccctctcggtgcaccataaaagcctgagcgtcaccctactcacgaccccggccaaccgcgcgttcgccgccagacgccttccctcctcggcgcgcctcgtcgagctccccttcccgtcgctgccgccactgccggccggcgtcgagtccaccgacgccctcccgtccatgtccctcttcccgacgttcctgcgtgctacggcgctcctacgggagcccttcgcccagttcctgacgtcgctgccgtccccgccgctcgcgctcgtctccgacttcttcctcggtttcacgcaccgcgtcgcgacggccaccggcgtccgccgtgtcgtgttccacggtatgtcctgcttctccatggccatctgcaaggcactcgtcacccgcccaccggcggtggccagcgtcgacctcggcgctccgttccacgtgcacggcatgccggaacacgtggcgatcacggcggatgaggtccccgacgtggtggtgaagttcgcggacatggaggatcccgtgacccgcttcttcatcgacgaagtgggcttctcggacgtgctcaggggtaccga

SEQ ID NO: 262 - DNA, 548 bp, Zea mays
tgctggcggaacgcccgcaccacctccgcgagcaccgcggccgggaggagcgtgagcgccgtgccggagtcgacgatcacgccgcccgagccgtcgggccggagcgcgaacgctgactccggtatccgcagccgcctggcgccgacggtcaggcccgtgaagtgtacgtagtagaaggtcgggttctgggggctctggaggagcggcgtggtctgcacgcggcccgtggcgtcaccgtagactccgtcggacagggagccaaacaggagggtgctctgcctgcggctggggtaggacgtgaggcagtaggagaagcggcggatggagagctgggacaccagcgagagcgggttccggccgaagcccacgatgccggagccgttgttgaggctgccgacgttcacggagccgcacccgaagccgagcgggacggtagtcgtgagcccgccgccgcccgacgacgcgaaggtgaagcgctccgtggcgtacacgcccacggtcatcgtgccgtcgccgtagttgtagcggtaggtgcacgtgtcgggcct

SEQ ID NO: 263 - DNA, 642 bp, Zea mays
acctcggtacccctgcagcaaacaatttgtgcactacaacacactttaattgagaactccgaccgaggctttaagtgatcagttttttgtagcgacggccatcgaacccgcaaggcccaaccaaggttccagagatcactaatccctagaccacccatctcttttggccgggtgacattagaccatgccaagagacaatgaccacccttcccttcttttctaccttgccacaaaaaattccttcgaattatatcaattgctttgatgacccaagccggaagatccaaagccatgtttggctctaccagcccgagacataagatccgctttccatcccggcaatagaatggctacccgatcaacaatggcctgaaattggtgccttggaagcttccgaagtgaaagaggcaatccgagatacttacacggaaaatctgaaacgggacagggaagaagctcttgaagacaattaagctcctcatcgcccctctgcttgtatctcccgcccgcatggaagtcgctgacccggactgtttttgagtttgtggttttgctgcagcagaaacagtgaaagaagtgatggcagcctgagcaatcttctttgtttgcttaacttttgttccagaacttggtactgctaca

SEQ ID NO: 264 - DNA, 624 bp, Zea mays
tgcagctagcggagcagatcgacgcgggcagcagcatgaaatgatcggctgtagcacactagctagtagaaagcaaatcctgaggcagcacaaacgaaccagaaggcggctgctgctgccatgccagccaactgaccaccatgcatggaagtggaactggggaagcaggcgtggaggaccagacagcaggccatggtgggtggtggccgaaaacggcaagagcagcatgagctttcgggtcggggatcggcggctgcgagccaaaaacggcagcacagccaggttggtggcatggcatggcatggcatggtatggcgcacacacacaacagcagcacgaagcagaaagatgaactgatggcgaacggatggaccatactgacaggcagctagcatagcaggcacgtattcaattcaacaaacacactgcctgtgtgacgaattgaaggtggtcgtacgtaccgggagtccgtggcgtactcgtagagcttgcccttgggggagaagacgatgacggcgacctcggcgtcgcagaggacggagatctcgtgcgccttcttgagcaggccgttccggcgcttggagaaggtcacctgccggtttatcttgttctctatccgcttca

SEQ ID NO: 265 - DNA, 603 bp, Zea mays
tgccaactcggccaagatagtagacggtcctatatacctcggaccaagctttcctgacaccaaatcaatcattgacatatgcaagtacttcaaggaatgtatatatgaatgcaattcatataatgttcctatagcctaaaccaaacttagccaaacaagagcaacttcaagagagcaacttaatgcttgcatatttctagatagcagcacagcggttaattgttttgctcctaactcacaaaatatgcatcgaaaattagtaaactaggactttatggaaagcttataaagtccactatacccttggtattatcatcacaacaagatttgacacttagaaaggtcaaacaatgctaaacgtaaattctgtccagacttggacataattcaactactcaattcaaaaatccataattggagtctcaatcatccaattcaggtgctcccagactttttagaaagctagtagaattgtctataattcatttataaacatatcaagttaattcaatgcatatcaaggtcaaaagacacgagaaaggctctgctgtccaaatttggacagattcagagatcacacttaaaacaggggtccaaagctcg

SEQ ID NO: 266 - DNA, 615 bp, Zea mays
tgcttggagtgctagagagcttgaaaggaataacatcgaaccaagtcgcttctcagtgcgtgctccagtcatatacaagtggaaatgcccagcttgtgaatagaactgatgtgcagacactctcgcagtttactgcgcatttcataagcgatacaaatgaagacagaggttgcaactttgcagcatatgtacccttagaagagggcacaccattgcaggtaaaacaataaaaggaacctgagttcagtctggaacttgtctagttatgtacagcctaaaactatatactatctattaaatggttctctccagatggctgagtggatcaagtacctgggaactttcacaaattctgaaaacagggctaatgctgtctacgatgcagttaagaccactaaatgcatctttatttggattgatatgaataagtaataaagtatggttctacggcatctgacagtgccataaaaccgcactttgcgaactatttgtctcatctctccagcacgccattgcaggtaaagacaaactacctgtgcttaagcaaagtagctgcaaaccttggcacaagattcaagcctgtagtagcgtggattgaattcacacaggtatgca

SEQ ID NO: 267 - DNA, 643 bp, Zea mays
ggagctcggtacccctgtgacttctgaaggttcacaactttcagagttccagcaagatgtgattgctcgtaactatattattacttcagtggaggaatccattcaagtaatcaattcagcaattcagcaattggtaatagagcggactagtatcctttaaaatcgtttatactctatagtttctgattattcaacttttagtgtgttagtgttttgttttgtgaataaccttgtattggaaagatattaggtacttggattgcataatacatttgccacatagtttttctacttgttcattgtttgttccttctcgtcactattattttttttccttctcaaaggatctgaagagctgtgtgttatactgttatttcattaagaagaaaatagaccaagatattacgccagccacccacacccggttatgcaacatcttcctatgaaaagaattttaagcagaaaagttcctgaacacttctttgtaaaaaatgatttaagaagcactgtatctggacatagttgttaaggcgttggctaggcggtaaggcgagctgggatcgtaaggcgtcctcctcgccttagtctagagcctaaggcgggtggaagcggcaccatggcggcagggggatcctctagagtc

SEQ ID NO: 268 - DNA, 707 bp, Zea mays
tgatagacgtgaggcggaagcagcctctcttgccgcgtggggtgcagatgctgccggttggcgcgctggcgccgagggagatacgaccgtacccggcgtttgccagcgacatggtcaagctcggaatcacggccgggcaggtggccgggtgcgccatcgacgccgccgtcgtcggcatgcagatgccctcgcctcgcgccgcgggcgggatgaagcgcaggttgggcagatccgcctggatccaacacatctgctagcttcaattcgttgcgtcatcttatcttccatgtgtgtgtgtaggggcctagggggttgctagctatagctcatgatgtagtattgtagttttagggatggttctgcaatctctctctctctctctctctcttctgttgcttttgcttctccctccttttgtgctctgcactgcacctccatggaaaaagcaagaaatgagtgaggattcccaaggattcctcgggcgatatgctagaaattgacaaggtcataagtgttgcctacagctcgaaattttaggcacgagagtcatcacatgaacacatggtgtgatcagtggggatatttctatagatcggcaaacgatgcctacgcataggattatgtgtgcatctagacctagctagcaggtttcctccccggaaagaccggctttgcagtctccaaagcaggggtaccgagctcgaatt

SEQ ID NO: 269 - DNA, 640 bp, Zea mays
tgccctgcagccttgtggtgctcgacgtcaggaacaactcactcaccggcagcgtacccgccggtaacgcctctatccattagtatcataatctgggtcgttcgatttttgaaagcaattaacaatgctgattgctttgcctcttgcttggtcccaagaactggccgccaagctgcaggccggcttccagtacgggaacaacagcgacctgtgcggcgccgggctccccgcgctccgcccgtgcaccccggcggacctcatcgaccccgacaggccccagcccttcagcgctggcatcgcgccgcaggtcacgccttccgacggccgcggcaacgggcgcgtgccatctaccagggcgctcgccgcagtggtcgtcgtcgccgtggccctccttgtagccacgggggtcggtctgttcgcgctctcgtggcgccggtggcgccggcagagggtcgcggggggctcgccgtcgacgatctccggcggccggtgcagcactgaggtcgtgccttccgcggcgaaggcgtcgtcggctcgcaagagcgcgtcgtcggcgctggcgagcctcgagtactccaacgcctgggacccgctggccgacgcgcggggcgggctgggtttcgtctcgcaggacgtgcag

SEQ ID NO: 270 - DNA, 650 bp, Zea mays
tgacgctaattagacacctgaaaaaaaacaactcgtgtgatggttatgttttcttgcaaaggacttacctcaggttccaaccacaaaagaaagggaaagcctacatttttcgtggtgacagttccatatcatggatttcatattgttgcaaacttttgcttctgctacgggccagctaccagccaaccaacaacagtgaagaaaaaacctccctagagtccttgactccttgtcatcctcaaatttaatatcgcttctcttaagtggattcctattcctatcatccggataatagctactctacatatgatttttcccctttttgattgtacaggctgacatacggactggactacaaagggaacatatgtggcagcaggcatgccgatcctgatttgtatcagttagatgttcgctattgggtgaaccccaaccaggtctaccaaagtggcctcaaaaccagtcacatcgagctacctgatgctaaaaccatctgcctgatggaatgcccacttcctgccgaagatggcttgaattttgtttgcgattatccagaaggtgacatacgcctctctgtcgacgactggattgacagggactacgattacttcgagtacctcacaccagacatgaggaatagttctcttcag

SEQ ID NO: 271 - DNA, 564 bp, Zea mays
tgtcgttcttttttttattccatctgattttgtgttatgtcacagtttatgatggtaagggaacccttgaggaaggggaaaccgctgaagcgcgtttcattaagatccaagcagcgtatgagctgttgattgatggtgaaaggagaagagcatatgatagagagcatcatgtgaatccgatgaaggtctgaattttcttggccacttaggttatcatttcattatgtgcaggatgcagttcctccactccatctttgtatttgtttgttaattactgttgtctgttgccacctattttactcgaggattacacattttagtcacagtattagttttttaatcctgatttagcttcatggttctcaagccaagaaaaggaagcatcattccatccttgtcagctactaacttacaaagcagtaatgtgtcttactttgtttttcttgcttcaaaactggactaggactgatggaatatatcagcaactaacaactgctaattacacgtgggtccaacattcatatgccttgaaatagttgagcacttgagaccttattatctgca

SEQ ID NO: 272 - DNA, 640 bp, Zea mays
cgagctcggcacccctgaaacttcactagtaaatactggtgggccgacacattcctcacaatcaaacttcagtctcgatgaccttcttggccttggcgttactgaagctcctgctccaacaccaccagcactgacccttaactcgaagcctgtgctagatcctggtacgttccagaggaaatggggccagctagcattggcgctatcccaggtacgccacatagccttttcacatcttggtcgattttcttacagtttttgcaaagtagcccactgcatgagatcttttgttacggttgtctaatgtatttgtttctgatggagtatgaaactagaagcccgttccaattcatggcctctgagcagtgattttgcctcattcagggtcatgatggcctaatgaatctaaaccctgagtgccatggttgtctagggcgtcgatccacctttaaatgtctcccaatgtgtctgatatcaactgccctatgttctgatctatgttctttctattatgatcttaactgttttatactgtgtttcgttgacaggaatgctctctgagtccacaaggagcagcttcattgatgaatccccaatcactcatccgtcatatgcaaagcaattacatccaatgtattgc

SEQ ID NO: 273 - DNA, 596 bp, Zea mays
tgcagcgggagcgggtggtgctgctgaaagctcggcggggcggcagcagcgggcgcagcggcgaggcctggcttgtagctgtaatcatcagtggtcaccatcatgacctcctgccgcggcgcagaggaggctggggacaccaactccatctgagacattgtgttctgagctgagctcgagtcagtgccggtgctccctactgactgcgaattcccctgttcagcaattacacagcaacagtgagcggcgggtaaaaggatttattatgccatgtctgctgctgctgctgcggtaaatccaagtgaccgtcgctctccctctatctcgtcttcatcctctttagctcgcctcgtcgtggctggctgcctgcagcctgcagcctgcagagtgcagaccacatgcagagagcgaatcaccaagaaaaacagccacatcttttcttgggttcagcgacgacgatgacgagccagcggaggagacgacgagagacgggcgcgcggcgaggcgatgaatgaatgaatgaatgaatgaatgcgtgcatgcatgaatcagtgatcatgggacatcgggaggtggcggggcctttacactgtgca

SEQ ID NO: 274 - DNA, 655 bp, Zea mays
tggaatccctgggtttccctaccattgctcaggctttggggaatctcaaagattccaaaaggtcttgcaaggtcaagaagtgtttcatcctttccgaggaggatgtttggctgatggccatataagaactgctggcatgtatcaacctgacggtaggcatgtatctggtgcagcttataaatggtctgcaccacaagggtatgatttcccacagccagcaaaaccggtttttctgttgcaagaatcatccccatcatctgtgatgatgtttccacaaactagatctaagataactcacttggaatatgagtactcaagacatgaggatggtagacttgataggactgttcctactcaagacatgggaagaagcaatcaaacattatctctttggcctcatcttgtttcaggcgaagcaatagaagaatgtactggaactgtgaatatgcactcccccgtcagtggtgcagagcatgaatcaaacaatgagagtacagttgaaaatggctgcaaaatctttggtatctcattggctgaaaagatccgatcatgcgatgaagcagactcttgtagtgcaaaatgtaattctcggctccagcctttgaagtcacaaatgccaaaatcgctaggcaggggtaccgaggtcgaattcgta

SEQ ID NO: 275 - DNA, 671 bp, Zea mays
ctggtacacatacattagctgagtaggcctgcaagccggcaacggcataactcgttagctgccagatgcttattgcaaatgatagaggtttgtttaagatattcatttggtagcttttatgttatgctgtattttcctgtaaaaattattttttaaaatgaaatttgttagttgcttaacaatatatttattactatcctacagtgttttattccaagtattataattccttagcctgctgcttctgttttcaatttgtagctcaaaactatcaaataatgttgcttgcagggaaaatgaacagttgtctaagtatggggatactaaatcagctcgaagtattatgctggttgagctaaaaaaacttattgaagcaaacccccttttccgggaaaaacttgtcttccctactcttaaggcatcacgcctccgaactctaatcaatcaaaggtttgaaagtaatctaatgttgttactttaacggatattctgtttccattccaatatttttagtgtgactatgattttccccccaaatgtgcagcttgaattggcagcatcagctttgtaagaaccctcgtccaaatccagatatcaaaactttattcactgaccatacatgttctccacccaatggagctcgtgcatcgccggtatctgtaccactggca

SEQ ID NO: 276 - DNA, 589 bp, Zea mays
tgctcaaacccatagtcaaaatagaattttgtaatagctcaccttattagtttctgatgtcccactcccatctgttactatctgtaatgtgtttatgtttgttggcacctatcatttctgcactttctgttggaatgattattattagtttgtgcttttgctttcatatggacaataacgaattgccatttatttgagcaccccaatggcaacttgtccttgttcatttcaagtttcaaatctttttttgtgcactatatcttgataagtaatcaatgatctgtcactgaaggccacatgatcttataatgacatggatatgattagtcttattaggtgccactctgtttgcaatgttattcagaacgtagatgcactgcttgctgtcctaatttactgattgacatactttatctggttttagattgcttctgagggtctgaagcacagagtctttgaggtttgcctagctgatcttcagggcgacgaggatcaagcttacaggaaaatcaggctccgtgctgaagatgtgcagggcaggaatgtgctcacaaacttttgggtaatgatcggcattcttttgctaaca

SEQ ID NO: 277 - DNA, 571 bp, Zea mays
ctgctagctgctccattcatctatcgacgtgcatccttgtcaaacagaccagagacctgtgagagcaggccttattgtgtgatgagttgcgcgcctaccatgcatatactctatacccttttctttgcacataacacaagtaaggtcgcatgcagtcgcaggcgaagcaaagatggatgatttgatgcgcccactcgatctgaatatctatctgatcagcggcatgcatggtcactgaggaggatgtcatgcatgtgtatatgcatggaaaacatagtacccctgtgtgtgaaagggaccgggtctcgatcgcctgtcctaggctcctagctagctctcctgcttgtgcttgaacttgtcaaccaagtgtcatcctagctagctagttcggtcttcttctcacctgccccgatgcttagctacctattataagttgcttcttccagtgctttgctttggttgcaacgctagctctctcatgcattttgtcctctcaggtctctcttcccctgctgcttggtgccacttgggagactcctgtgttgcaagcatatatatatacatcacaaca

SEQ ID NO: 278 - DNA, 541 bp, Zea mays
tgcaccacgtactggggaggcgttgtgtaaccagctctctgaagtacctcccacaagatacgggggaaaccctctcgtgcaagtccgtccgtgtgggactgtgcattcccttcgtccgaggatccgtgagaagtcatctgtgtacggttaagcgtaagtgaaaaagaaaaagaagtataaaagaaaaaggaatcaaaacttggcctctctcggaatataaccatattacatggtgtagattatcttgtgctatcatgcctcgtatcattttaaaattcttaattagttaccaagtagtttgattacatgatgcatgcatgctcgtcctaaacgacctcacatcaacttagagggaataggaaggaactcccatcccttatagtagcctgtagggcttactcaaatagccacctagctacccctctatcatcctaaggcttcacgtcctaggtctatccttatcgtccttacgacctgtccaacatttgtttctatcaagttttacttttaaaaaggattcctctgtggtggtacgagctcc

SEQ ID NO: 279 - DNA, 667 bp, Zea mays
tgaaagtgtgcgagagactatttctgttataatgcggacaattgctgaggaagatgcaatagcagcagacttcatgcgtgatgctgccttgaaggatggtgctcttctgaggcatttactaaatgctttcttcttgcctgctggagaacagcgtgatgttagtcggcaacttgttgctctttgggctgattcctatcaacctgcacttgatttgctatcaagaatacttcctcctggacttgttgcttacctccatacacgttcagatgaagaatcacagagccagtatgatgaagcaccgttgagcagaaggcagagacgaatacttcagcagaggagggtccgtggtagtaaaagtatgtcagtacaagaacaaggggtaccccccaatggtgttgaggatggggaacccttcaggcacaccagtgcgggcacttatggagtagcagatgttcatcagaggcatgttggcccatactcttccacccactctcctttgccaggtataagcattgatccttcttgtgcagttacagtgccacatggttttgtacctgaggccctttctgaaaataatcatcaaattggggaaccacagaagccccggtgcatttaccaaattccttgtgattttaaaatctttatcacttatgtgatgcattaggtg

SEQ ID NO: 280 - DNA, 575 bp, Zea mays
tgcgcaatagaaacagcgaagttcttcgatctcagtattaggccgccagcatatctgtgacttttactcagcaaaggtggcctcagcgaagatcgcaaactggacagccaatgttcctgttaagcaaactgttaccttaccacattagcaggcaaaatggtagtattgaaggcatcgctgctcgtctgaagaaattacctctcggatattttggtccgttgaaaaatctttacacctcgctccttttggtacaacagcaaccgaaaacgagtcactgatgttcgacaggtacatcaactttgacaacacaaaaggggtctcgatatgatcgttttcctgagacacgtatctatgttcggtgctgagctcggcaaacagggaatccttcttcctgacaggagcctcaaacacaaaccgtgaactgatacaagattctgcttctgagatgtctcttgggagcgagccagcgacattgacaacgcccttgacccgagtgctttcttctgcgaatggaccaactttggtagctttgaacaacgagatcactctttcaactttctcttgcctctccctca

SEQ ID NO: 281 - DNA, 571 bp, Zea mays
tgcatacaacaaggccgggccgatgcttcagggcaacatcgaggatccagcaatgacaatgacctgcagtgattttgcagttagccacatattggtaatctcgtattgaatcacaaaataattgagatacagacatttcagtagtagacaacggcaccttatcagtatcactaaaggcccaattattaccagatatcttgatggccatggcgatgtaactcatttctcttctctttttcccttttgcaattcttttgccagatgaacataataatgataacaaaaaagtacaatatattaaagtctctcataaacgaccaagttttgccagaccggcactaaagcctgttcgctgcggctttaatccatcggcttgtgtttttttatagcagcagttttggctttcaccatcttcctaattgtctgcaagggtacgcttgggtatactgatgtacagaactgcatattcagaagactgctacaagaatttgcccgacatagatctcagaatattcacatcatataatccgcaccaccatttcctcttatgaaggcatcaccttcttctttc

SEQ ID NO: 282 - DNA, 635 bp, Zea mays
gggggattcgagctcggtacccctgaagaaaacacattatgtctataaggtccttacctgaaataggtgccaggctcccattctgatacttgtgcagaagcacatcatcacctcttctttgatttaggtgttttgaaaccttaaacatactgtcactttcatgactctttgatggatcgataacctcttgaacatcaactgctgatgcagtagctcctttgctcagagcatatctgtaaatatattaaggggacaaaatctacagtttgtattggaccaatgcacattctggtacactgtgtcagtttgaatttctcagcttttgaaatagactgctaatgaaagaacccattttcaacaaaaaacaattttagagatttataaaacctattgatgatggggtagaaaggaaaatagttgttttgccatacatctgagggcacgaggctataaagatatgtagataaagcatctatgacacattgcaccattggagcgtgtacttgcatagtgatatatacattaactagccagtaagtagagttgtaattgtaatcatggtaggatactcccttatcccaagcacactattatgattttccattgtgtacatatagcaggggtaccgagctcga

SEQ ID NO: 283 - DNA, 701 bp, Zea mays
tggtgtgtgtaatgagggctcgccggggtcgatcagatcgatcggtacgggggggcgtgtagtaatcgccgccttaaaggccgcacccaactcaggcgagcgagccacaccgccggccgcggcctgcctgcccgctgctgcgcaccaatggcgactactaactccccgtattaattgcccggccggagtagagtgccggcgccgcagcagcggtctacgtacgtagtactcgtcatgtattatcctgttcctgtgtgtgtgtatcgatcgactggaacgacgacgtgggtcagtgagtgagacacagcaattctggtgatgaggtacgcagcgcgcgcgtatatacagtactctcgatcgcgttcaactcgttcatcacatcggcgtcggcaggtcgtcattccatcgatcaacagcgaccttgaccgccgtactttcgtgttttcggctacgcttgccttcggagttcggattccgtttccccgatccatcgactactggcccggatacgcagcagagagatgctaacagtatcatcatcattggcaacatttatgcttgtacagttgtcgccaacaattttatggaggcacaaaacaaacctatgctagttgctaggcgtgtcgatcgtcgccctggccacgactccgactctcccggcccggccatggcaactgacggtttcaggggtaccgagctcg

SEQ ID NO: 284 - DNA, 642 bp, Zea mays
cgagctcggtacccctgccctgccccggcccgcgccaccgaatggatcgcgcacatgcatgcatgcatgcaattggaagccgttagcgtcggtcgcggtacgtcgccggctggccgccgatcgcgcactgatcatgccgatcccaacaagttgcccatcccccacccatcgcaagctagtactcgatcgatcgacagtgtacgttacagccacccagccagctatactgcatgcatgccttaattttaattagctttcatgcatgcgtatgcgtgtagactgtagagagtatatcttcgtcgccgtccctaactcccgctcccggcacacacgatgtatacgtacgtgtacgggtagatcgatgtgtgtacgtacgtagccgaggccgagcgagagccatacgtaggaactatgaaaacgtcctgatgaacgcgtgtgagcggaatgagaatttggggacagcgagcgagagaggaccacgcatgcatgtaactgtatgcatggatagctcgcctgtccagatagcattacttgatcgagaccctgtggagatattttttccccttctctctctctctctctctagcatgcatatatgcacggattcaagtccacatgaaactctggtctctcagctcagca

SEQ ID NO: 285 - DNA, 607 bp, Zea mays
tgccgccactctcctccatacccaatcagctagatcacagctcttgaagctcttactgaagagaaccttcgcctccacctccaatcgcgacgatcacagcattcacgggagcaaccgagcagcggccggaggaatccagctccatcctatgcggcggcggccattccaatgctccctgatccaactcctctccggtcaatcggaattggggcaaggacggacggccaagccggcggggatatctactacaggttggactggactggacgccggatttgggatccctctgtaggattagggatttgggattgggtctggactttggaggaggaccgccgcgtgcaagagagaatcaacaacagtcgcagtccaatccaatcccctcgtcgatttcttccttcctcgcctctctccgcctgtattttcttctattctttccttgcgggcaagatatacttccagatttaattagctgtgaatcccattattaaataattaacgagacgataatacgagcctgcgcctatatacctagaaactgtcatattttatatttttatttattcattattcctactgctgactgcgccgttctgtctcactctca

SEQ ID NO: 286 - DNA, 637 bp, Zea mays
attcgagctcggtacccctggtagaacgctatcggcatcgcctgctgctgatgcagttcgaacgtctggtcatgcgcgctgagttggatctgcatctgctgggctagactgttggacgagcaagagtcgccgagccctgcagtcgcgagtttcaggcgctggacctcggctgtcagtgcctcattcaatgctgttcgacaagacaacagaaacacgggattaacatagagggtgagggttcaactaacacgggattaacatttatatatgttctctcgaagcacatgtgggtactcctacatgctagtaattctttagaaagagtgatgagattaaataaaacacgagcaaatcttggttcccagatgatgcttagcacatcttcctaggcacttgtagctgtacctgtacgacatgctaacgactactccatagaaaaagcagccaaccaccaaagcaaccaagaaccaacccggccgcccggctgtctccaaatgccaacacgattcagagtttcagagccgtgggcacacgaactgggccggacaagccagcatgcatgtcaacgtcaacgaactgggaattaagcagcaagtagtgtgcagtacaggtgagatcggagacgcaccgtcacgca

SEQ ID NO: 287 - DNA, 655 bp, Zea mays
tggtcgtgtattcctagtttattttcgagtatgccgtattgactaaaccccatgtgggggtacctggaagggggtttcttacttccctcccttttgtgtctttttattcttcttagtgaaatcatgtgcagctctcctgcgtagttcaagaaaaataattgaagaccttgcagattttactgccatgggataaatttgatggtaaccgtgtctgtgtcagtaactgactaaagagaacaaaaaatccatatggccttggtatgcgctaaaaggtggttgacagcctgcatgtatctaagatacctagctaaatgctgcaaattgtaaagctccctacaagcatagactaaataaattaaaataccaacagaaaatggaaaagctctatcttctagaatatcacaagctcattttaatttggaaaaaaatccctcccttcgagaaaagaaagggcatacttatggtatgcgtatatggatcattctaataatctaatttggaatatgctgaaatttaaaaatctaacatatcatgaaaacagcttccagattcgggatgctaacctctctttcttcctccccatcattctccaggtcatcttcctctccagcttcaattggggcagacaaagcaggggtaccaatggggttttgta

SEQ ID NO: 288 - DNA, 628 bp, Zea mays
tgcagcagttgataagtaaaatggttaccatcattcatcctcacatctcttccatttgcatttatcacagaccatgcgatttgcagcagttgtaggcatttttggctggcttactgtatattttgccaaggtatgctcctccatcagctattttcttccttcatcttctgactgccattttctagctgtaatactttccttcatctaatgacatgaaggatgctatgatgctctatgctggaagagttttgctggggtattgtactggagttctttcctatgtggtgaacatctatagttcttaatatatgtacctaaatctttattcttatgtttctaaaccttttgtttaagcaatggaaacatgtcccactctcaaacattcttaaaaaagtttcatttatgaacaccacactctatgcactaacaactcctggggttataataacacaggtgcctgtgtatatatctgaaatagcaccaaagggtatccgaggaggccttgcaacctcaaaccaggtcagagaaattggatctgaagtgcttcttattatttttatgtagtgaatcttagtaattaatatgagctcttttgaatatgcagttattcatctgttcagggtgttca

SEQ ID NO: 289 - DNA, 651 bp, Zea mays
actaattagagctcggtacccctgtaagtactatcctcttcatgctactcgtttgttcttccctagatggagtattggacgcagcatataccgaagccgccatcgtctgattctacgccgagcgccccttcagccgagcgtgccgcccgtcccctccccgccattaactgccatagacggcctctccccttcatctccccacttgaatctagccatttcttctccccttgctggtgtgcgcgtacggtgcttaagcgccatcaatggtgattcaattcctccatcaaattcaatggacgcatcaatttggcgtacgtaattgcctctttccctggctataaaacgccacactcgctcttgtccgttactcctccctgctcgtgctccattcaatccattaatgacgattgtttcttctccattactcccatcacggcgtctgttactcctccctgctcgtgctccattcaaacagacgtttctaccactgtagtgacgccaatgatgactgcgttactgctcgtcgacaagagcctcctcatctccctgcgctctctgcttggcctataaatccgacgcggtgtcccttgctgcctttcaagttctggttgcctctccctgaccgctgctgctcatcttggttcgttccgc

SEQ ID NO: 290 - DNA, 620 bp, Zea mays
tgcgcgaattgcaggttgcggtctcccttggggatccccagctcctgggcacgcgccgccgcgagttggcctagtaggatcagcaaggaacacacgaccaccgtatcccatcagtaaccagttgtgcaggaagacaagacgaggggtttgcggcgcgggcagccagctacctgactccacgttgtgggtggcgagcatgacggaggcggacccgcggcgcacgcggtcgaggaggaaggcggcgcagccgttgtagcagtcgtgggtctcctggatgctgccgtgcacgggcgacggcacgccgagcgcggccgcgagccgggcctcgcgggtcaggtacgcgccgcgcacgaccttgagccccaggcgcacgcgctcccgctccgcgccgcgcaccatggcctccagccggtcccgcgcgtcgcggaggtacgcctggatggtgccgtgcacgatgggtcgcccgccgtccgccgcgccggcgtcgttgaacgccagcgcgcccaccagcgtgaagtagtcgatggccggctgcaccgtcgcgtactccgcgtccaccagcagcgggatgccgtgctccgcgcaccgcgcgcacaccgccagcagccgcgagtgcgcca

SEQ ID NO: 291 - DNA, 660 bp, Zea mays
taattcgagctcggtacccctgcaggttggcgctcaggtcgcacgccgcgaaggcgtccttgccgaccttcaccaccgtgtggttctccttggggtacacgaacactgcaatgtatacgatatatacgacgatgcatgggttagctctgtaattagctctgcactgttgttccaatccaacaacgaaacaattaagacgatggtgcgtgcgtgcgtacgcagggtgtcgccgaccacgaacgtcttgccgttggcccagccggtctcgttgaacttggccctccagccgcctgcgtccccgaccgtccacggcgtggcggaggccagcgacgcgaggcacgcgacggcggccaggagcagcagcacttgcttggacgccattgcctcttccctggtttgcttgcaagatagctactgacccctcgctggtcgctgctgctggcctgctgctgtggctgtggctgtggcttggcaggaaggagtgacactcgcgtctatttatacaacacaggccacagttgcacgcagctatagccttgactaggtaacacgggaccaggtcgacgcgcgcgcaggcattgcaagccattgtacgtacctgaggcctgacaaatggagtgtttctagctccgcatatccaggggtaccgagctcgaattc

SEQ ID NO: 292 - DNA, 557 bp, Zea mays
ctgttccatgcacctgcgatctcaatgcacgaagatgcagttgaatccgatctatcgaaggcatttggaggacttaataggcttgacatgttcttcccatttgacccgtatctacttaaagagtctgacaggtttgactatcaataagagtacccattttagccagttatagtctcattatgttctagtgtgtgctcttggaggatagttatttgcatgttattcaataagggggtctgcaagtttcacctgacctttgaccttgtacacattggtgaaccacaatgtggtgggatttggatttctactcaggaacgacatcagttgaaggatttaaatggtcactttttagttgaaggacccaacatagaattcacggtagattgaggacctatatgttcccttcttttgttcaagaactcaaattagaatccataaaaaaaaataatgacccacagttcattttactcttctaaatttaattcttattgttgaatcgtctcttttatccttattgatgagttcaaccactattggcagaatagggctttaattca

SEQ ID NO: 293 - DNA, 656 bp, Zea mays
atacgagctcgggacccctgaatatataccgtaaaagtcaggtttacctctgcccaggaaaaatttttcccccttttgcaaccgctggtaggatacctgttctctcggttgggctgtacatgggccttcctatgtgaggtccacctatgcgtgcgaagatagcaagcgtactctctagtttaggattgtcggcccaactagctacagatatattggtcactagttattgctcagtcattgctcaccgaaggatatcgaaatactataggatatatatttacataattacttccaacttttgagaatatcgctacataacctttcattattttgttttccctttcataaaagctcgaaaagtgggaataattttaacgaagcatttgttctagtaacgaaatagaatctttttgaattcgatgtaacaggctgaagaacgctacatctttattcagtagctatataatcacaagaagcaaaggcagcacacaggctctcgatcacaagataacaatacacgctccctccagagagaaattgctaaagcgcaagaccacacgggacatctgtgacggcgctgcgtcatgggttaaacactggtcgcaatcgccactactaggcatcgggcttcatctcccgcttgatggccgccacca

SEQ ID NO: 294 - DNA, 649 bp, Zea mays
gttgcatgcctgtatgtcgactctaggaaatccccctgcgtgccccagttcacgccgatcgcgcgcgcgcgccgcgccgcgcacagcgccaccaccgcgagcaggagcgccgccacgggcaggggcagggagcggccggcgcgcgacatggacgagtgagtctaggcggagccggagccggagggagaaattattgtggacttgtacggtttgggctcgtgccgtccatcaactgtccgatcggcaagttatgtacgtgctcgccaagctttctgtgaatcgtcagtgaagaatcgtggggtcaagcagaaactgtctgggcaataagcaggccaagccgatagaggagtgagggcaagcaggcgaaagaacggagcaagcttcgcaggcaagaactcctggaagtggccggacccccgagaaaggagctgcttttggaggaggaggaggagaaaggaaacagaccgatacaggggaaggagggagggattaataggtcgccgggtagggctgcgtttcgagcaagaaccccaaaccttgcaacgacagcgccgaacagcgtgtttgatgctttcgctagggctagggagtgtgtgtgggtgtggtagaggaagatcgcgggagcaagcaacggctgacatatgagcag

SEQ ID NO: 295 - DNA, 669 bp, Zea mays
gaatccgagttcggtacccctgcgctggccctctgtcctcggcacgtaacgtccaacgagccgcaccgccccaccctccgcctcacgcacaaaggcggccgggtcgcggttttgcagactcagtgcgaaggcaggacttcgcaccatcttcccaccatgggaaggcatctggcgagggcacacttcgcccaacgcccagccatgcgccaagggccataccccgtacgccacaaattcttcaaccaagtcgcgcccactgcttaggccggcggcgcaccgaagggccccttcgtccacatccccctccgccacttcaaagggcgggtacgctgagtaaaaatgagagcacatctcggacacggggagtccctcatggccttcgacggtaccctcagcaacgtaaaaccaatattcattccagttgccccacttgttgcgggcgcaaggaaccaactcgaccacctgcatcgtggtcttgccggtcttcggcgtgaatgtgcaggacccgaactgagcgacttcgtctccaatcatcttcttctgccagtgcaaacaataatacttcgcaaacacttcgaccgatggctgtccgccgtacgaagtcgtcgcccagacatacttcgacagagccaccatggcattcggtgtcaggggggtcctctagagtcg

SEQ ID NO: 296 - DNA, 604 bp, Zea mays
tgctgctccctgtcgtcctcggcgatggtgtccaggctcctcggccccttccttcgtcgcatgaccgacaccacctgcggcggcgccacctccgtcgtgaacctcgccgccacctgcgcctgcgccttcgccatgcatcaaggagttgataaacacacacacacacacagtaagagacggtatctctactcgctctagttatgtgtatgtacgtggccgtggtccgacggtgacccgcacggcgccagcatctccctgtcgtcctcggcgatggtgctcaggctcctcggcgccttcctccgccgcatgaccgacaccacctgcggcggcggcgcctccatcatgaacctcgccgccacctgcgcctgcgccttcgccatgatcgaggaaatgacgaacacacacacacacagctcgctctagttttgtgcatgtacgtacgtctttgttgaatcgcgagcgtgtgcggctagagttagcgatggaagcttgcatttatactgagccagcacccagcacctgcggacgcgcacggtgcgacgccgtggaccatacggtggcgagatgtggacagcgccgtcgcctctcggacgcagatcgcaca

SEQ ID NO: 297 - DNA, 632 bp, Zea mays
tgctccaggagtgcggtctatctatccaggagattgggagcctgtgcgtggctaacccgaggctgctcaccagcaagccggacagaatcagggccgtcctcgtgcgtgccggtgagatgggcgtgccccgcaagacgcttttgttcaggcacgctgtgaccgcggtggcgggcctctgtccggagacctttgcatctaagctcaagatgatggccaatattctcgggtgctcagaggctgaggttgccagaatggtgcaaaagaacccgttggtgctgaggcgctccatggagacgattcagcgcgcctgtgagttcctgatcaatgtggtcggtgtcggtaccaacttcattctggacaagcccacaatcctgatgtacagtctggaacgccggctgatgccccggcattacgtgatgaaggtgctccaggacaaaggattgatgcgaaaagatcatagcttctacactttggccgcgattagtgctagcgtgttctgctccaggtatgtacatcctcataagaatgttcttcctaatcttgccgctgcatacgcatctggttgcaatgggaaaatagccatctgaggcgcgcgattccagcaaactggctatatgggcagcagggggatc

SEQ ID NO: 298 - DNA, 705 bp, Zea mays
tggtattagcttcatcgagcggtttgggattaaggaaaagagcaagcagccagaggcagttgcccactggaccagaggactgcgtgcgcggcgaagagcaaggaagcgaaggcccaccaaattagcccttagtgtcagaaagaaacacaggggtaccaatgtttaccaaattattagggttttctagccacgtctttcttaccgtagcagaaaaataaaatgttatttgactatgatatgcattgctcgctcgcaaataaagtaaagaaagatcccgccctaacagtatcacatcactgtatgagcgtaatctatgttataagctaaataatgaatgcactgaacaccaaattttggtcaggatgccacggagtgtgtccaaagaaattcgaagggcatcaggatcgtaaccacgtagttttttttatcaaaattgtgcctcttgtgtcacagttactatattctgtggtgcatcttaaacaccaaatgataatgcctgctctcatgggatacaaatcgatgaaacaaatggtccaataaatccatttggtgcaagtcaagtatctcactccatttgttctctattaaaaaaataggcatcacattgcaaatcctataacaatttacagcgagaaaatcgttttgatgcaattgtaccagtcagaatagtctgtaaatcctttccaggggtaccgagctcaaaga

SEQ ID NO: 299 - DNA, 596 bp, Zea mays
tgccagtcgatcatatggttaaagcctctttaacactttaaccaatgctttagcctcccatgcgataacacacgcacccagcagtgtaccactcttcatgtctgaattatgtagttatatttcgcgacaaataatggaccagtaaaaaaaaattgcagaagttttgggcagagagaagtggatctgctggtcatgtcattttcccctttcttgatgtttgcgcaggtgcgggatctagctaggtttctgtgtatatatctactagctagtatgcgatccatcattcgtgatgttgcgctagctgaaagagaggagagggggtgacatcgactgcttttaactgtgtgtaaagatgccactacttttttcccatgtcatgtattacttgtgtattacatgtgctgatgctatctagagcatattcacatgcatatatcagctagcagctagctctgcatgtgttctacatatacctggacggacgggacgtactgatcgaccgccggccggcatgcatgcgacgccgcgcacagctagctagcttccgctcaaccggtggcagggctagcaaacagcgctgcaggggtaccgagctc

SEQ ID NO: 300 - DNA, 609 bp, Zea mays
actctagaggatccccctgggaagcaatttcgaccagggaagctcattaacaggaaatgatgccacagccagtgaaattgaatgtcacagactccaaatggctgcaataaatgattatggatttggtaaacctgagattccttctagttcctcaatgccatttttcttggctgttgatcctcaacaactgaaattgagaaatgagacaaatgtttcttcaacatcttccaacattccttcagattctgcatcaccaaacttgaaaaatggcacggatcctcttttgatgccatttaattcctacatggcagattggagcagcgataagataacttacaccactctgaacactccaaaaataagcacagaacttccaggtcagtatgcatccctttcttctattattagctaaatcaatttagctgacaacaaaaacttaaccatgcagtcaagttacaccatgacaaaagtagtagctttgaagcaccaaacctgaaggagcatgaatcagtctttgcaacacatgaaatgacggtagaagcaacaagaaaagaagacgaacacacatcaaaatctagttttacttcctacaatggagtaccagataca

SEQ ID NO: 301 - DNA, 672 bp, Zea mays
cagcaggcacaactggaacaatgaaagaagaaaccataaatagctgatgaagtcaaatgcaatatcacaaaacaaaagcagcaaagaaaacaattaaaggagtccaagtttatggtgcataaaggctcaaaatcgttttgtcagaacaagcagaaacaactctaacctactgcaaaatgcacccccacgctcagagttctcatgccaatgtggttttgcatatgaaaacaaacacaactacggtcaatcctgcaattgctgtatggcaattaaaaaagcttccatcaacataaagacatcaaatgtgtgagtacacacactctatccagctttaacccagcttaacacctcgggaatagtacaataataatctagtaacacctacatacacaatatctaagatatcaatgaatgcataacaaaatggacagactacataagacattgtaaatccatacagaatagcaataccaaatcgtagaacaaggaaataaacaatcatgatgtttattgtacagtgataactctggccacatcacttacaaggacgccatttgcagaaaagattaaaaaataatcagtgtacagggtagcagaaacaccacacatgaacagcaatcagataaaaagtcgtagcaaataggagacagcaaaatgcagcctatctaggca

SEQ ID NO: 302 - DNA, 1282 bp, Zea mays
  unsure (1)..(1282): unsure at all n locations
tcgactctaaaggatccccctgtgtgctaacaaatattgagaatgatctctacccctttgctcttgtgaattccttcgcgggattgcagaagtggcggcttccactatcggaatccgaggctttgccgagtgtcggcctctttgccgaattctttgccgagtatcgcactcggtaaagttaggccctcggcaaagaacctctttaccgagtgctggacactcggcacagggcgccactcggcaaagacacatttgccgagtgttaaacactcggcaaaggaggcgctcggcacagggtcgtcagtggccgttccaaagctgacggccgtcagcctttgccgagtgccgggggttggcactcggcaaagagtcttctttgccgagtgccatatatatggcactcggcaaagtatacttttattttttagattttggtctcccaaactttttgtggtatgttcctacactatgtatacctacattaatcattttgggacaattataacagagttttctatagctagtagatttagtttgtttatttgaatttcttcggaaaattcagatttgaactgcaggtcactcgaaacttgggaaaccatgcatgcaaaaatgatatccatgctacttagcacaagttacgaccgatttcaggagcgggccggaaacttcgagcaccatgctcactcaacatgaccgtgaacttgccatccaggtgtttaaaaattgtataaaacaaaaacaaagtcagaaaatcatgaaacctgtccacgtgtcatgatattataatgagaggnnnataataaacttctaataatattgttaagattgatataattttcgtatatttcattaatagatgagtcaaaactatataatacttaaacatgaaaatatgattttatagttaaaatattgaaagatattttatatttgaattttaattatataatatcttaatataagttctaattaaaagttttctattcacgttataaatataactatgaatttattatatttctagtagtattgtttgatatattctaataattatttaattatttcaaaatttaaataagaatataattatataacatattataattaattttagttttatttactatattaattatataaatgatttaacatatcatcagtatctaatatagtttttagtgtacttatcttataatannnttataanattaaaactcattaagaattaactagtgtnttggatatatatatataataattattcataagcttcttaatt

SEQ ID NO: 303 - DNA, 643 bp, Zea mays
tgtgcttgttgaaagtggcaagttcctcctatgtgcgaaacggacctcccgcccaacctgtacagaatatacaatatttatgaattctgaaaatttatctaggtcaagcaaaatgtacattggaaagctgaggtactaactcatgcattggccattcttttaggaattacataattctctagtatttgtgtatcactaacaaaggcctggtgcagtggtgagaactatctcactgagtcaccaggtcgtgagttcgaagcaacctcttcgcatttgcggggagaaggcttgccttggtttattccttccccagactccactcatgtgggagcttccggcactgggtctgtccctttttatgtatcactaatatatctatggcattgaacatctataggtcgaatctcctcggcacaaagtttgcaatatatgatacccagcccccatgcaatgcagcagaacccgggaaaacaagccgtcggttctactcccggaaggtgtcgccaaaggtctcctccagcacctacaacatagcgcaggtttcatatgagctgaatgtgttgggtactcggggccctaggcggatgaactgtgttatgcactccatccctacctcgtgccttgaggctggtggcactgttcc

SEQ ID NO: 304 - DNA, 703 bp, Zea mays
gaattccgctcggtacccctgcaggaagccatttccaggtcggccgagctgccaccgtcggcgaacatgtcgtcgtcgtcgtcgccgtcgccgccgtcggccttggccaagaagaggtcggtcgcggggctgacggactgcagcatgtcgctggatttggacgacgcggggctcgcgggcctgctgttcctgcgcccgtcgtcgtccctttccctttccctttccgcagcggcagcatgttgcctttcgctttccttgcggcggaagtggtccgagcttgtggcggctgcggcgtcgcttatgaggcgcgcctcccgtagcacggcggagtgggaggctgactcgtcgcccttgttgcggaggaaggcctccatctccgcctgcaggcggttgaggtgcgtgtacttgttctcgagcgcgagcttggcgtcggacagcttcatctgcacgcgctcctcccgccagacctcggccatctgcagcatgcggcgctcctcctccatctcctcccgcatgcgcaggcactccccgcggagcagctccacctcggcctggtcctcctccacctcccgcgtgagctcggagcaggcgtcctccatcagctcccgcgccttgcgctccatctcgtagctctgcgcctgctgcttggccgccgcccgcgcctccgccaggtcgcgcagaagcctggcgttggcctgctcca

SEQ ID NO: 305 - DNA, 729 bp, Zea mays
tgcgtttccggtgctaaaattccccaatcgaagaggaggcgcgtgcggggttagcgtaccgtagacgcggtcggcgatctcgaggagccgatccggcggcttccggtagaagagcctccggaacagcgccatccccttgcgcttccgtccgccgtcgccgtcgccgccgtctccggcggcctgcccccgggtccacttgctccgcgacgcccgggaccagccgacagcacgtttgcccgcggccagccagccagaccgcggcggcggcgccagcgatgatcgggccccgtgctgcccggtatcgctgccgccccagcgcccacccgccagcgccggctgacgacacgatcgccggcgatcgggagcgccacgcagccgcccgccccagctccggcgcgcgagtggcgggagggcaatgctgcgcgcggcggaattcggccagctagggtttgctctcccccctctcgttttttttcgctcgtgctgctgaaattatttttggggtgttcgaggtggcggaggaggaagcaccagggaggaggagcctgacgccagcaccaggaggcggcagagcagagcacgcacgattgctcgaaacaaaattcataacgagcaaatgcctccacggatggatttttctacggatgacatatggggccggcaccaacgggcaacggttggctgcggcagcgacgtgaccgttgttgcatcgggacacggtgcgcgcca

SEQ ID NO: 306 - DNA, 749 bp, Zea mays
  unsure (1)..(749): unsure at all n locations
ctgtggctcgccgggtgcggcctcatcggtgaaatcccgccttcgatcgggagcctcagcagcctcgtcaacctcgacctctccacgaacaacctcaccggcgagatcccgtcaagcatccggagaatggacaacgtcatgcagatcgagctctactcgaatcggctcaccggaagcgtgccggaggggctgggggcgctcaagaagctgcggttcttcgacgcgtccatgaaccgcctctccggcgagataccagcggacgtgttcctcgctccgaggctggagagcctgcacctataccagaacgaactgtccggccgcatgccagcgacgttggggcaggcgccagcgttggcagacctcaggctgttcacgaaccgtctcgtcggggagctgccgccggagttcgggaagaactgcccgctcgagtttctggacttgtcggacaaccggatctctggccttattcctgcggctctgtgcaacgccgggaagctggagcagcttctgatactcaacaacgagctggtcggtcccatcccggcagagctcgggcaatgccgaacactaacgcgggtgcgactgccgaacaaccggctgtccggacccgtgccgcagggcctgtggtccctgccgcacctgtacctcttggagctcgccgggaacatgctatccggcaccgtggacccgaccattgccatggcgaagaacttgtcgcagggggatcctntagcgtcgacctgcatggc

SEQ ID NO: 307 - DNA, 656 bp, Zea mays
tgctaccactaccaagtgaaccaatagaatgaagatgtcctgaaatctgcaaaaattcttcctccataaaaagtcttcgatgtagaatgtcctccttgtattgtggaggtgactgtggacttgaatatgtatggggtggacttgattctattaacttgctcattgtattggatggtgtcccatttgccagcatatttctagagccattttccaactcagaaaaggggtcagtttgtgaagtggctactaactctagaggaggaggtcgttgaaaagaattcaagtgcatttttagatgatcttggtcaaaattaagttcatttgaggattgtttgatgactccatttgaaccagaaaatgcattatctgtgaaagatgaatctgattccaaaaggtttgagctactaccaccttctgaaacttgtaccaaatccgacatgttatttgaagtctccttgtgtgctttctgccttttcttttgtttgatatacttcccattgccattagttaagccaacagataggttgtcgccttctgttttctctgtattgtcatccatccactccttaaattcacaaagccaattacttgacttttctttcttcagcatttcggcggtgtttatcaacgaagcaattattaggtcatgatcaaca

SEQ ID NO: 308 - DNA, 769 bp, Zea mays
cgagattcgagctcggtacctctgctggtcatggctctccggacctcggacaagctcgtaagccggtgctatgacctctgcgcctccttttcctttcacacaagtcgtacgtagccatatgtagattaccatgaaatagttctgagcggcgtggctccgatccgtccaggttgtcagcgacgacggcaggaaggtgcggcgggcgcagccattcaccgagcgacacaaagaagagctgcaggtgaactagtgtgctgattccgagcagaggacgacaaggtatttttagttcctcaaacaaaaatgggctcactgatcactgtttgtgtgtaccggctcgtgcagtgccggatggtcatcgccgagaacttgccgcaggattccacgagaaacagcctcgagaagatcttcggcgtcatcggcaggtcacacacgagaaacagcccatatatgtagtttaatttgtttgttctacgcatgttagccttgccatgtactagctagcgtctcttaaccgtgtgtgcaacgagtttttttacagcgtgaaaaacatcagaatctgccatccgcaagaacccggctctgcaagatcatcacccaggtcgtcagacacaaacacaccagccagtaacaaggtacttgtacttggtctttttttattttcatctcccagttcagttcagttcagtattcttgttatagtactgtatctctcatcgtcgtctgatattaataatgacagttgttctcttctgtccttcctgacaca

SEQ ID NO: 309 - DNA, 747 bp, Zea mays
  unsure (1)..(747): unsure at all n locations
tcgagctcggtacccctggatcaatgccgtcgccatggcctctcccacaccgatcgtcctggtgatcatgtcggccggcggcgtggacgtctcgtttgcgcacaacaacaccaagatcggcgccatcgtttgggccgggtaccccggcgaggaaggcggcacggccatcgccgacgtcctcttcggaaaatacaatccaggtacgttcatcaaatcttggatatgagatgtccttttcactgcgtcggctcggcatacgccttatgatatctctcaatctcaaccanncacaccctggatctccactccacaaacaggaggacggctgccgctgacatggttcaagaacgagtacgtcaaccagatccccatgacgtccatggcgctgcgtcccgacgcagcgcttggctaccccggccggacgtacaagttctacggcggcccggccgtgctctacccgttcggccacggcctcagctacaccaacttcagctacgcgtccggcaccaccggcgccactgtcaccatccacatcggcgcctgggagcactgcaagatgctcacctacaagatgggtgcgccgtcgccgtcgccagcctgcccggccctcaacgtcgctagccacatgtgcagcgaggtggtgagcttcagcctcagggtggcgaacaccggcggtgtcggcggcgaccacgtggtgccagtgtacaccgcgccgcctcccgaggtgggcgacgcgccgctgaagca

SEQ ID NO: 310 - DNA, 737 bp, Zea mays
cgaattccagctcggtacccctgatgtttctaaacaaaaacaatactctggatatataccgacgacgccaggagttccatggagcgaggaggagcacaggcagttccttgccggcctggacaagctgggcaagggcgactggcgaggcatcgccaggagctacgtgccgacgaggaccccgacgcaggtcgccagccacgcgcagaagttcttcctccggcagagcagcatggccgggaagaagaagcgccgctccagcctcttcgacatggtatgcgcatgcaggcaccaacatctctctctctctttttttttctgtacgtaattgcttgagttttgataaccgggtccagcggcaggtgccgatctgcgagaacagtgcgagcatctccgatccgctggacgtggcacgccatggcgtcgcctcggcagactccgagagggcggccgtggacctgatgaattcgacgacggagggtgacgacggcaggagcagggacgtcgtgtcgtcggcgtcaggtgcagggaccactctgcggttcccggcagcggcagctcagacggagccgctgcatccttcgtcgtcgcatggccatgggcgcggccaccactgctctccgttggacctggagctgggcatgtccctgcccgccccatccgtcggaacgtgatggagatggagatgaggccgtggccgtgcgtgcctgctgtctccctcaggggtaccgagctcgaat

SEQ ID NO: 311 - DNA, 755 bp, Zea mays
tgcatacctcattaatcgcacccccacgaaacttcttgattactctacacctcttgagcacttgttcaaacagtcccctgactataattttcttaaagtttttggctgtgcatgctggccaaacctgcggccctataatactcgaaaattggctttccgctctacaagatgtgtctttctaggctacaacaatatgcacaaaggatacaagtgtctagaggtctctactggtcgtgtctacatctctagggatgttgtgtttgatgagcacatttttccctttgctgaacttcatgcaaatgctggagcacgtcttagagcacaaattaatctcctgccttctaccttatttccttcatccaaccttgacaataggggcatttttaatacagttgatcacactttgcctgatgttactgaggctaatgcaattgatgatgttgttcctagtgtgctctctgatgtcagaatgcatgagataggtactgagcagcttcaagtgcatgaacaagagcaggttcagcccaagagtgcaacaaaacaatatatgaaaccacctatcactaccacgtaccagagaagagagaagaacatatcaattccaccttcagctgtattaccagaaattaccacaacacctttttcttctatttttccttcacaagaacctactgcagctccttcaccatcgtttcaaagtacttcagaatcagaagaacatgtgtctctcatggaaggaactaaaagtgcttcag

SEQ ID NO: 312 - DNA, 774 bp, Zea mays
  unsure (1)..(774): unsure at all n locations
atacgattcggactcggtacccctgnctgcagagatgattgaactagaggagcacggtagttcacatcataaagaaggtggtttgaatcttgtgccaacattagaatctgaaaaattttctgaggtaggctcatcaaaatgctatttattgatccccacgcagtcacccacctgggaattttcagtattttattcttttttcctgatttaaaattttgcaggatgaatcaaaactctatcaaaggctcctgaatgttaggatgaagattgctcaagatattggcactgctccgtgagtaaaaatctaaactaccataacaagtttatggatatatgttcttaagctagtttgtgctagaatttggagaagttagtgaactgaatttcgttaatcctgcttattacaggtatgctgtatgtggcgatcagacaataagaaactttgcaaagatgagaccttctactggagctagacttgctaatatcgatggtgtcaaccaggtactactttgaaaaggttacttatcaaactatcttttgttaatccgagtagtatgcatctcggcagttcatccattttttttaaaaaaaacaatactgtgtggccgttgttttctgtactgtacttatatattgatacatctgaccttttgtttgcagcattttatttcacgtttcagtaacattttcatccaaaatattgtggaattgtcgaaggagttaaacctcccgttggataattcaccatttccaccaccaccaccaacaattcca

SEQ ID NO: 313 - DNA, 739 bp, Zea mays
accagagctaagaacaaggcttgccaggtaaggaagacttcaacacttatccgaaccatttatcttgtttacatgatgcacctatagtttatgctgtaatctgaaaagaagtgcattcttgacatgtccatcatttcttaattgagaagtcaaatgcatagttcatgttttatttcataactcaagtaacatgtgaaggttaaatcgttcttacaatcttactgtaaattttaggatcttcttggaattggacgtccaggatgagaagtggaggtcactggaccccaaaggtggagtccatgaggtgtttacctttagatcagctactcatcgccagctcccaaagtggaatccacaaattttggttatagtcaaggttgtctgcgtggctgttagctcagtgcaaaaatatactggtacgtaggtttcttaacatttgaagcaaatgagaagggcgtagtaatgtgttctgaactctgaaggtttagcatttagggtattttagctaatgctaattcggtgaaagagtgtaacacccttcttgcagatatgaagttagggtgcaatgttctgctcctctttgttagtgaaaagcctatcagatcgggggggaggggggatgtgtgctcggatcacctgtggcactgaactttttttgttgtggtgtggacattggctgcccctctaaaatggaagtttgtttgtgcatcgagatgcgtcaggggtaccgagctcgaat

SEQ ID NO: 314 - DNA, 813 bp, Zea mays
tgctttttgggttggccttttgtttaattgatccaactttttgtgacagaaactactagctagtagtactaattgattagacccaaacgacatgtccatttcccggcctctttctttcccatcccctggagctatgcgcttgtttccatcgcaagatacaaaggtcatcagtgggttagacttcaccctccccctcctcagctctctccccctagcaggctagagagtgctttaggccagaccagtgagtagtagtagtaataataatgcaggagaagcaccagatgtaagcgtggcgggaacgggaagagccgaagagggacggtctaccgtcacgggggcagggtgatcagtcagcggcgccggcggggcgccctaccggtgggcggtggcagccggacacgcctggtcaaacggccgcgccgcggtcagacgttcccacccgacacgtggcggtgacccctttgaccgggcctacctgcgcgctggcccgctggcagccggggccacctttttcgctgacgccacctccggcccccgtcgtccggtctcgagccgacggctgctagtggcggtcgtgggatgcgtgccggcgcccggcggtgcctggaactgggaggccccgtccccggaccccggaccccgtgccgtgcctggaactggggcgggccggccgcggtcgcatcgcagggtccggccggtcctccggtcaaggcgtctggccggcggggcccgccgcgtttccattccggagacggtgcgttgcgtcgcgctgggcgctcagggggatacctatagagtcgagctgcagac

SEQ ID NO: 315 - DNA, 754 bp, Zea mays
tgctgctctcacctctctctcttgctgctctctcttctgaactgcttaggtggtccgccatggccgccaggctgcccgggcggacggacaacgagatcaagaacgtctcacacacacacctcaagaagcgtgtggatcccgccaagcaggagcagcagcagcacggcacgacgccgacggctggcgtcggcaagaagcacaggcccgcggcggcagcgaagcgcgggggcggcggagccaggaaggcgacggccgacgccgacggcgtcgtcgtaccggccccgaccaccgctgcgccggcgtcgcccgaacggtcggcggcctcgtcgtcggtgaccgagtcatccatgacggagcaggagcacggcaacacggggagctcgcccgcgttccccaaggaggagagctccaccacctccttctcggacgccgaggagttccagttcgacgatagcttctggtccgagacgctgtcgatgccgctggacagcctcgacgacgtcgtccccatggagccctccgacgacgcgttcggcgacgtcgatgtggctgccgcctcctcctcgtccgtcggcgccgacggcgacctggactactggctcagagtgttcatggagtccggcgacgcgcacccagaactgctgcagatttagaccgctcgcgcgagaattttcggctcctaattgattcatggttcttttttttttctctctctctgcacgtcttgcatcggaggggacaaggactacagcag

SEQ ID NO: 316 - DNA, 713 bp, Zea mays
tgagtcaatttgaataggggttgacatggtagtaattggaagattatgtgcttctacccatgatgcagtaatgaaagaatgtgttgctccagtatcaaataacacttctgcaatatgggaatcgactgggaacatacctactatcatgtcgggggtctcctgaactgcttcagcctccaagtggttcagtcttccatgattatagcgctgctgagagcggttgcctgctccaggctgagacacattctgctttgctggggcattggggcctgactgctgctgggctgccttcttcggacattgcatcacccaatggccttgctctccacagtggaaacatgccctgtttccaacctgagctggtgctgcctgactgttctgctgatttgctggggcaggaagacgaggtgtctgctgattctgcttctgaaactgacctcctcctgactgattgctctgacgattctggtactgatgctgaggatactgcctttggaactgctgatactgctgacgctgctgatgctgctgaggtggacgctggttctgcctgaactgctgaggttgattgcctgagaaacggggacggctgctgcttccaggctggggtccactgatcttgcgcttacgatcttccatctccttacgcttcctttctgtcatgattgctctatcaatcaggtgctggaatgtcgggaaggtgtgattcatca

SEQ ID NO: 317 - DNA, 732 bp, Zea mays
ctgtatacgaaatcggactcggtacccctgccacagttggaccacctgtgcattcttttctttcatggagctctagcatttttacctctgggtggcatagacctgtgtcacagatttggacgttagcaaggccccagcttggtctttaatgattaaattgtagacacattgaactgataaaggtctaataagaaaggaaagtatgaagatcagcttctacagttctctatctagtctcatccctcatattatgcttactatttttagccttcatatgtactcccctccattaaatgcatagcaaaagcttcctatctagaaatccaaaacgtcttataatttagaaggggaagagtacatttgattaaagattctaatgtacaatatggaaatatgtgtgttagccaaatcattacaagggggcaagaaaatgtacagatgccaatctatccatctaagaaataagaaagcaaatgacctgagcattttgggatgtcccaaacagcaattgaagactccgtgcagtcaggttcacaaagtgcatgtgtgttctcatggttgacgttcatagcaagcatccacgatccaattgtaacgtcctcgttgctgaacatacggaaactggagaaaacatatgcaagaatatagttaacagcaaataaaattattcaatcagaggttccacagtgatgtaataatgctactatgtgagaaactgaatctcacaacatc

SEQ ID NO: 318 - DNA, 748 bp, Zea mays
gactctagaggatccccctgccgggcgccgtggttggacacgatcaagccggccgcccccgcctccacggccttcctcgctgctcgacgccgccgcagagtcgtcacagttcagtgagacaagacggtgaccatacaggtaaccagttctccggttcagcaccatgcatgccagtgaagtgacccaaccgctggtagagtacatattgtgctagttattcattaccgtcttccgcggtgacgatgcccttgagcagaatcggcaggctggtgatggacttgagccactccacgtcctgcacgcacaaattcagcaaaacaacacaccccatcaggccatcatcaaccactcgcctgattccaagagaggtgaaaccggatttttcattctattatctaaaaaaatgctggcaacgaacggcaggtacagtgacccaaggccgctgtatccaaggattttttttgagaaactactgtagccaatactgcgacgcatgcaattcaaggccagtaacgtgtccttgggacaggatcgcaggagagacgatgccggtaggccaccgtcgctataccagcatgctgttatattaagtgccatacggccgttcaaagaacagtctttcagtatccagcatacagccctgatgcccgatgttgatgcgtccttgcatatgcttgcccagtactgtggatgctggaccacgtgctatggaattcaacattcaagaaaatttatgggacggctacca

SEQ ID NO: 319 - DNA, 772 bp, Zea mays
gtcggtacccctgccttgacttctacctcctgcttctctttgtcagaatcacccgcaggagtaccagcattttttggtttccgaccaggcttagcttttccttcagtggacttgccttcgtcttttgaatccttgcctttgataatagcctccttaggtttgctcacactcttatcatcttttgtcccagttgaaacattagccttgtccttggagttcttctcaagttcttttttaaggttggggccagttttaggtgtttctttggtaaccttgccggcagttttcccctttgtgctcggagtagctgaggtactgggtgtcccattgctggatcccacaccttttggacgtcctcttttctttggaggatccacagcatcactgcaaccatgcagaaaacagcagtctcagaaaagctacaggcacgagtcaatcgtcacttttttgcatcaattacttaccttttaggtgtttctgtattttcttccttcaatgcatccgcttttctttttctgcctcgtggcctgttgaaacaaacaataacacaaacttcacaaaaccacttatcaagagaaatgagattattcgcatgcttggatttcagataaatagtcaattatcaattgccagcaggggcttatgcaatttgctggtatccacaaactatttaagctaacatttcccgtgcttctttcagaaaaacaaacaatttccagactaaaaaaatggaacttgactaacactatgcgtctaattggcaactcaacag

SEQ ID NO: 320 - DNA, 691 bp, Zea mays
agcccgtacccctgaatcataagctcaagcctcaagttagtgctaggaatatgggccgggcagcttttcggaccagcacgagcacggtccaaaatcagaaaaccaaagtacggtgccacacgaaataatatgggccggtctagcacagctcgaaggcgggcctgagctggcttaaaattccggcccgtcaggcccccggcacggcccagacagctgggccaggcttgggctaacacggcctaatgaagcccaagttatctaatttctttaatttagtaagctaccaactttatatcattgtgacatttggagtttatgtggttaaatgatgctaggattgtttaatatctttaatttattaagctatagactttatgtggttgtaatattttgattttatatggtcaaatatatgggtcgggcttgggccgacacggtccaacgaaggcacgacgtggtttagtgcccggctagaccattgttcttacatttcaagctggcacggcatgatccaaaagttttttagacttttctgatacaaacccgtttggcacgaagcatgatgggtttagaccggactgggctgtcttggcctggctcaattcctagcaatactccaagtacttctgagagataacgtcccattttttgttatgttccataagagttcacaggccactagcagcccaca

SEQ ID NO: 321 - DNA, 774 bp, Zea mays
tgtcgaggccgctggtgggctcgtcgaggaagaggaggcgcgggcgcatgaggagctcgagcgcgatgctgacgcggcgcttctcgccgccgctgaccccgcggaggtgccagttgccgatgacggtgtcggcgcagtcctgcagccccatctcgacgatggtgccctccaccagcgcgcgcttgtcctcccgcggcatcttgtccggcagccgcagcagcgccgagtagccgatcgtctcgcgcaccgtcagcgtcccgatcaggttgtcgtcctgcgtcacgtacgcctgcaaccacgcctctggatggatcagtagtcttctccggtactagccctactactacgttctgttacaacaaacgcacatctcgctgcttcaagaaaggagtgtcgtagttttgatataccatagtttataatcgtacatgatacaaatattatggtattactttaccacagtaaaatcatattattgtttcaaaaatgataaggatatttttaaaactatagtatcattaaatacaattatcatcaaatataagagtttcaataatatagtcatcaaataacacagtattgtttcagaactacacaaataccgcacttcctcccaacagggagctgctacgcgtttgcgcctgcaggatcacgttccgttccgttccgttccgtataactgctggtgagacgtgagagtgagacaggccacagccggatggttcgtatcaccataaattcgcagcaggatcagagagcaaatccaggggggat

SEQ ID NO: 322 - DNA, 736 bp, Zea mays
tgccgcgcgccgtggttcgacacgatgatccccgccgcgccgttcgccaccgcaagcctcgctgcgatgatatagatgcaaatgcatcagcaagcacgtccacacttcacacccaccgcatgcgtgttcccgatcgacgcgactgactgatgaaacataataagcagaggccgggcgagcttactgtcttcagcggtgagcactcccttgacgaggatcggcagcgtggtgatggtctgcaaccacttgacgtctttccagctcagggtgcggtcgacttggccggcgacataggaagccagccctgaatcagcagcctgcccatgctcggcgcgcacatagctccgtatgagagagagagagagagagagagagagagtgcacaaagctccatatgtactgcactgaaacttgagcccactacatcacctggtccattttgccgaggtccagaccttcgaagttcttgagcgtcaggtgtggtggcaggacaaatctgcagcaacagcagccacgtacgaatacgatcagcttgcttccatggagctgttatgacaaagcaaatcaagcaaatgcagttattgtgtgaagccagcccaggcccagcggcccagcccatgtcacctgttcttgatgtcagcttccctgcggccaaggcgcggcgtgtaaacggtgagcgcgatggccttgaacccagctctttcagctcgcctcaccagggtaccgagctcgtttt

SEQ ID NO: 323 - DNA, 682 bp, Zea mays
gtgatgtaccctaccttctgatcctccggctagctagctacttcaaatccccgccgctgcgctgcgcatgtgttcacgctctaaatacgatggcatatgcatgcatgcagaacggagtccgggcgctgatgctcgacacgtacgacttcaagggagacgtgtggctgtgccattcgagcggagggaaatgcaacgacttcaccgcgttcgtgagtacgctggctcgctctgtctgaactgaacagggcgtgcggccgtacgtctcaaagctgagcatttgtttttggggggtcattgtaggaacctgcactggacactttcaaggagatcgaggcgttccttgcagcaaacccgtccgaaatcgtcacgcttatcctagaggactacgtccacgcgccgaacgggctgacgaacgtgttcaacgcgtctggcctgctcaagtactggttcccggtgtcgaggatgccgccgagcggccaggactggcctctcgtcagcgacatggtcgcgaccaaccagcgcctcctggtgttcacctccgtcagctccaaacagagcgcggaaggcatcgcttaccagtggaacttcatggtcgagaacaactgtgaggcatcgcgattggttcctgctttctatctatcttttttttttctcttttggattgcaggggtaccgagctcga

SEQ ID NO: 324 - DNA, 714 bp, Zea mays
agctcggtacccctggaggaagcggtggcactattcgacaggatgctgaaagaggggttcaggcctgacgatgtagccctggccgcggtgctttcatgctgtgcgcagctaggggcgctggacaagggccgggaggtgcatgggctcgttaagctgagcaggccccggccgaacgtgttcttgtgcacggggcttgtcgatctctatgccaagtgtgggtgtgttgaggctgctagggaggtgtttgaagcatgccaggataggaacgtgtacacatggaacgctctcattgtcgggctggcaatgcatggccacggaacggtggcgctggagtacttccaccgtatggtggctgatggaattcgtccagatggggtcactttattgggggtgctaatcgcttgcagccacgctggccttgtggacttggcaaggcgcatcttccgcgacatggagagtgtgcacaatgtgccacgggagctgaaacactatgggtgcatggcggacttgcttggtcgggctggactcattgaggaagccatgaacatggtcaggaagatgcccatggaaggggacaattatgtatggggaggtattcttgctggatgtagaatgcatgggaacgtggatgctgctgagcttgcagctcggcatttgttgcaactgaacccagatgacagtggggtgtattctgccatggctgggatctatgca

SEQ ID NO: 325 - DNA, 713 bp, Zea mays
ctgccgcaccatttccaacagcctccgctgaatgtcccgagccaccagatgctatcccaccccaactccctctcgaacatggtgcagcaagactctcttgggcgtctccaggggctggacattgggaaaggctccatggctgtgaagtcggaggctgaggtcgtggtgaagtcagagggcagctctatatctgcgggtgaaagcaacaccaccttctagctatacaatacgtctgccttccaagaagcctttgtttggtttagagttcttcttttgttcatagtctgacatccttgaactgcttcctccttccctgtagtttttttttattccattcgttatatctagttaccattgatcggttgtgtcgatcgttgttgttgtcgtggtggctgattctatagggacattggtgtgctggtttcgagtttgttatgtgtgtggtatggttggttgtttcgagctagtgactgaaagggcaccgagtgattttttggcagaatttcttttctccacctgttttagttttgttatagaacaaccatgatttctccttctggaaatgtgtacattgtgttgctatgctaatttctagtaataattttgatgatcccaactgtaccctgctgtgcatgtgcgtgaagtgtgttgtttcaggctatcttttctccctatttcaactgtaccctgctgtgcatgtaccaacagtagca

SEQ ID NO: 326 - DNA, 705 bp, Zea mays
tgcatttcatgtcattttccattattatatcagtgaccgttagccttccattataattacctactctttccaattgcaaatggaactcgttttaggatttgttggtcaagctttaaaattttaaccatcactatataaatatcatcactatataaacgctttgtagattgagagcatttgaaataactaatttcaacattgaaacgatgttcacaacatataattattattttggaataacataacttcatatagatcattatccattagtcaaagtgccatattggaaaccaagtcaatgtccctgaatgacttgcatctacaataataagggactatgggtaacttaagtagaccacaatatatatggaaagtttggttggagtatgaatttcttcattatgttattttcgaataattccttttttgtgttggtggtttttaagttttataagctaatgcatgaatctaaacattaggtttgtcaagacttgagaatgggactattgagttattagatttctatagaagcttgattatgatgatgcatatcttgcaaacatggcatgttatgttacgagttatttgggcattaggcggttatatattagcctaaaatctcatttgcagtttgttaatatgtcaggagatgaagagtcaaggagtaaccgcagataagcttcaggggtaccgaggctcgaatcc

SEQ ID NO: 327 - DNA, 728 bp, Zea mays
tgtggagacggggcgaagaaagacaacaatgacagtgatattgtctttgctgccccgctccgcagcctccgtggccaacctcttcgagcacattccaggctctttaaccgtgtccttgattattgacagcacgtcctggttgcttaccacatcccataggccatcactagccatcacctacatgcaggaaactgaatgaagttatgtgaatcgcataaactttatttcagtgaattgatcctataattgtttagccactcaacgtgataaaatcaattttcaaaagagtggtatcaagctggacatcatcagaaagtaagctagttccccatatacttcaacgctgaagtatgtaaggaatcaatctgaccttaccactttcattattgataacatctattatggaaaaataacctacccattatctaaatacagcattgtgcacatcagaaaagaaaggacatctttattttacaagggaatatcaaatctaaagaggtaattagtctctcgaatctcgatatactatactgtcaagcacaaaaaatgagtgggtggcaaaatactttccactctggaataagaaaaaggtcctgtttcatttcattacaaggtaaaaaaataacaaaactgctcattgtatcagattgattaaatgattaatataagaaactgcagagaacaacatatataagaagaaaataggacttaccaggaactcatcatca

SEQ ID NO: 328 - DNA, 755 bp, Zea mays
tgtcacagaatcccaaacctcctggacgacatcctggaatccttccaatttggaccaaaaagcttcaaaacagaaacgtcttttacccatcttattatctctaatgccaagcagcagggggcaatggtcggagccttcagaggcagcactttgaagaaggacatttggaaatatgtcttcccactccactgaacagaggaccctgtcaagcttgacaagaacaggactgtcttgctgatttgaccacgtgtatttacgcccaaaaagtggaacctcattgagactcaagtcctcaaccaactttctaaatctccccatcatagctctgttaatatttgaattatttttatctgaagccctgtagatgagattgaagtcaccagcaatcaaccagggtccagtgcaagcagccctgacgtctctcagttcttgaagaaacaacatcttatcactgttactttgaggaccataaacacaagttaaccaccagcagcgattatgcgcattgcagaattggattgaaatgctgtatctgtcaatcctagacaacccagtcactcccagatgtcgcttccaagcaaccagcacaccaccactagcaccacaagatggtagaaaggagaactggcagaaatccgaacccaaggctgcaagaatggttcttgtagaaatgacagtcattttagtttcctggagacagaccacatcagctttagaggacagaactagattccggactgagttttgacgatcag

SEQ ID NO: 329 - DNA, 762 bp, Zea mays
tgccagtttctatgattatcactcattaattaatcagagatgctgtttgccacaaaatgaagcaatatggtagccctattttcacttcatatcagaaattcaactcctagtttatatttacagactacagaagcattagatcaatcgaacaactataggactgatagtatcttaaaaatcaaatgcatgatctacaacacagcagtagatgttgattaaaataatgcataacaattcggtacaatactaaataccaacattaacaacactagaacaaaaacatacttaggacatggaagattccatcaacagcacgtatatgtgagaggaatgcattgcccagaccatccccagcatgagcacctctaataagcccagctatgtcagttacttcaagatatgcaggcacctgcagagaatttcaacaaccacaatgcacatgaaacacgatttgaacagtcattgtacatctgatgatctgaaacataacctcagaaagagaaatgtgatttttactttctgggtgggagcagcagaacattttttttcaaaacttagtcaaattcaaataatttcaatagaaactgtaggggcttaaaggggtcctgcccccccccccctcctctctgtcactgaatatgggtaaagaaaagaaacaaacctcactctttggcttgtaaagtttgcaaagccaatcaaaccgttcatctggaacattcacccgtgcttcatttggttcgatggtacagaaaggaaaatttc

SEQ ID NO: 330 - DNA, 793 bp, Zea mays
gactgctgcctgcggtcgctctaagacccctgctgctgtgaaaagcagctttctgaaaactggtgaaaagcagcttctgcttgttggctgcttttagtgtattctgagaagcagctgaactgataagctgctgcagaagctagctgtttggcagaacttctgcttaaatttgtgaagaagctgaaaataagctgtgccaaacagggccgtagccaacaatttatttgcaaagcattagagaaggtttggcaaagaaatgaatctaaacaggtggggataaggtgtaaacagacatatgtgtgccaggaaatcaaacaccagcaaacaagggactcttgtacctaacatttggcgttgtagtgtttgtcaaccaaccaaacagatctgtttataccaagttaacagaagatcgtactaaagttctacaccagaaaacaagcattggtgaacagtgacaaacaaaaataagcaaatgcataatacaacttcagacacaataacagaacgagtaaatcaataggacagacccagtgccggaggctcccacataagtgggatctgggaaagggatagatccaggcaagccttccctctgcaaaagcagagaggctgcttcaaacccgtgacctggtgactcaatgagacagctctcaccacagaatgagtaactgaatcactcaaaaaaatgtaggaagaatcaattgcctgcccactataacatttcaaagtgaacagtaaagggtgtgaaatgggcatgagaacataaatgaagcagaataaaaaataaacacag

SEQ ID NO: 331 - DNA, 752 bp, Zea mays
attcgagctcggtaccctgtccccggagtagtgctcgttgcgctgcccactgcacggctgacaccccgtgaagtgcgtcacgaacgggcggcgccacccgtgcaccccggtctccgccagcccggccccgcccagggcggcgttccttgccaccgcgtactccgcgtgctccctctccgcgtgccgcctccgcagcgcggcagctcccggccgccgctccatcgcctcgtacctctccgtcatgttggcgagccgccccacgatctccatccagtagccctcgaagtagtagccgctctccaggaacaccttgtcccgccaccggctgccctcctgcagcagcatgtacacgagcgcggactggtcgtccgactcgtcgaacaccttgtccttgaacgtggacttgagcacggcgccccagtgctggtagtccggggagtcgggccccatggcggcccacgcgtccatgaagtcgagcgaccactggcagttccggatgaggaacacgccggcgttgaggctggtccaggagctggcctcgaacacgaggctcggccagccgtggacgacgaggttgtgggcgcggtaccggcgcagcgggaggcggaagtccatgtcggtgagcacggcgtcggagtcgacccaccacacccactccgcctccgggtgcgccaccatggcggcgcggatcaccggtatcttggcccagtaccggtccatcgacggccgcagcagcgccatgttgtacagca

SEQ ID NO: 332 - DNA, 757 bp, Zea mays
tggaggaacacaagaaagccatgaaagacatagttgatggccactttcgggcgttagtttctcaacttcttcaggctgaaaaggtaccattagttgatgggagtggcaaagaaagttggctagatatagttacttctctgtcttgggaagctgcatctcttttgaagccagataccaccagcaaaggcggtcagatggaccctggtggctatgttaaggtgaaatgcttagcttgtggtcacccaagtgaaaggtaaacaaatctattttccaatttccatgcatcactatttaccttcatatgcctttatgattttacatcaatatgcttgagcatccataaccttaagttaattgaaactgaagctttgtaattcatactagaaagacatagttgatgacacttgatgtgaactttctttgttttattgatctattacgttttgagtttcatactgtatttatctgtgcatttctttggttaccactagttctttttttttggttttatacatcttcctttatttgcagtttcgttgtaaaaggagttgtttgtaagaagaatgttgctcaccggcgtatgtcatcaaaaaaggaaaagcctccaatcttgattcttggtggtgcactcgaatatcagcgtgtatcaaatttgctttcaagttttgatactttactgcagcaggtattacctgtaaattccagtttattcacgcttatgttgtaaacaaaaaggacaccaacaaggctatagaca

SEQ ID NO: 333 - DNA, 776 bp, Zea mays
attcgagctcggtacccctgcagtacagcttcaggacgtccgtgagcagcctcagcgaggtggaggaggtggaggaggaggcgtgcccgccaccggtggcggtggaggacagggtcttcgtggccgtccccgaggacaccaagaacggcaagagcaccctgctgtgggcgctggagaacccagccaaggactgcgccggggttgtcgtcgcccacgtccactgccccgcgcagatgatccccatgagtaaggttccattccgtcaacgatcccgtcatctggatgcttctgctgccgccgtctttgcatccttggagtttcttgtgcaaaaggaaacgctttgggcgttgacatgactgtgtactctgtttcattttttgttgttgtgctattgccggcatggggaaaaactgtggcaaatactgaaagcgctccttacaccttaataggtttccttcctatagaacctagttcatgatgcactgccttgagggttcagagttgacaggacttactctgttctttccagtgggggcaaaagttcatcacagcacggtgaatccacaacgggtcaacgaatacaggaagaaggtgcgagcggaggtggaggagaaactagatgaatacgtccttgtgtgcagaagacaaaaggtaacaacctccccccatgccgtcatcagacagactagtggcctaataaacaacaaccaatgatacagtaagcacgtacgctaccttaattgactgttggctcatcgtttccctttcacaggtca

SEQ ID NO: 334 - DNA, 736 bp, Zea mays
tgtcgactcactcaccttctttcttagcctgcttttccttgcagcctccctattctgggccagccttctcagcgtctgtacgtgttcattacagcgtgcgtggtgcacataaccagtacgtaatcaaaattagtgcaacaaaacatcgatgactaaccagtatagtgtgttctttccaagtatagtatacgtagaactaacaattaaataattcatcataactgacacttgagagtatcacaatccatttacttttgggtcgcgttcagtggtcgatgtgcctctcctatgatccttctgcatcaaccacaaaaaaaaatggagaaaaaacagtaacgcagccatggcaattataacagcctcaaattaatacaacaaacattagcagcttgtagtaccaaattggtaggattattattcaagtggagcactagctagtagttaaccactcaccttgtccagtggcttgacacctttgatcatcccgggtgctgcagccggctcagcagaggcagcaaagggttggtgctcctgctgcctcctgctctccgccaacaactcctccatggccgcatgctggtgatggtgatggtccggtgacctaggctgcttggatcccaccggcgccggggacagaactaaactaatctccccctaccaatcgcgtcagaaattaaaacaggtcaggtaaacaaccaatatatgcaaataagtgcaatcaataaccatgacagca

SEQ ID NO: 335 - DNA, 771 bp, Zea mays
ctcttgcagatgcttgcttgctaaaatcagccatttctcctccaatctattctgcaataatgtaatgcatatgttcagatgacagcacctcacctcaatccttcttcattcagcaaattaagatggtagatttggattaatcaggctgaacagctagaggacggtctctgccattactcaccagtgaaggaaagctagagggcggtctctgtagtggccggcggacagcgggagcggctggactctggagcgcggctgagcggcggcctggaggaagctgcacgggggaggagcggcggcctagagcggcctggagcataacggtggcctggagcagagcggcggcctggggcagagcggtggcctggagtgtcgcggcctggagcggagcggcggcctagacttcctggagtgtctggagagtggctctggtgagcgaaaaccctaaacctgggcgggaaattgagctgggccgttaaacgctcgaaacgtggcgtttcacgctatacagcgtttaaacgccaaaacgtgacgttacaaagaatcgtaaaacgtttcaccattttggtttcttccagcgttttatagtttaaacgacgtttaaacgtcgttttaataagcatgcatattaagtcctttgtgttaggttcttgctccatcttgtgtgtattctttatatattttcatcaatcatcatcatatagtttcaactttgaaggcatcacagtttttttttccgttaatatatgcaggcgccaagcccttcctcca

SEQ ID NO: 336 - DNA, 738 bp, Zea mays
tgatagtctcgtcgtagtcgagtatgtcggcaatggttccttgagggaacatttggatggtatgcggtgttgctatggaatatcatcctgttgactgtgctagttcctcttcctcgtctacattctttcagtagtagccagtagaccactgtttcagtataaactgttctgttctatacttctatcataaaatctgcatcgataatcatagaatctgcattgaactggtgtttgtcactctaggaggataggatactgatgcattgattttgcggtgtggaaaaaaaaccctgcagaatcatgtggaaatggtttagagctcgcgcaacggctcaacatcgcgatcgacgttgctcaggccatcacctacctgcacgagtacaaaggtacgaagctgactcagttcatgttctacagatcaaatcaaactgtgatgtggttgtggttgttgcaactcatggtgaaagtgaaacagagtaaattggtctgttagaacaagaagtggggcgaatctgattgcctgaaactcacaaggtaccatggtgggttgcagagcgtccgatcatccatggcggcatccggtcgtcgggcgtgctactgaccgacgcgctgacggcgaaggtggccggctttgggctggccgggactgcggcctcggggtcgggctcaggctccgacgcaacgccggcgaggagcgccgccgggtacgtggacccggagtacctgagcacgtaccag

SEQ ID NO: 337 - DNA, 795 bp, Zea mays
tagagctcggtacccctggaacttgaagtcgcccaggccgtggcggcccctgtggctgtgggctgtggctgcagtgaaacccctgcggaccgtgagcccttccttccctcatcaatgcggagggggccaagcacaggcaggcggtggctgatgccgatctctcaacccccaccccgtccttccatcctgtttgttgtgtgccttgcgtcttgctaatcattgcaatcattggcgccatctctgcttcgtcaagccctttttttgggttcttgctttatgtttttttttttttgcccattttgtcatgtccttgatatccttgactgtgtttccaactactgtctctaggtaagttaggcttgtgctaggtaagttacgccggtgtgggcagtccgagtaaaaccctactactgtctctgtcaatatggcacagtggtgcgcagtgcgagcctagctctgcctcgtgttgtcagaccgctgccgatcgagagagcagcagcaccatgctccagtcagtggcgttcactggctactatgtggcggcgagtccaaaaacacaaaggcccgctcccactcttttacactgcactcgttcgttgaactgctaattaaccgttcatcactcctgccgttcctgatgtgatgtctcaaagttaaggcgctcactcactgaggcatccgaagaaacccaagtaataaatgagcgataatgtgcagccgcagagccttcttgcgttgcgttgcgttgcgtcgcatctactcctgctgctgctgctgtaggctgcacagcctgca

SEQ ID NO: 338 - DNA, 809 bp, Zea mays
aattcgagctcggtacccctgctttatgctggtagcaagtagatcacgtgatcttgttactgttgcaccccagagatgtggttgcctcttaagtggaactgcaattctgctagcaatgtggtcatttttaagttgagtttttcaattatttctattggccatgaaatcacggtcatatagatgtaactatgtaataaaaaacgactctaatagaacctctttttgtggatctaagcttccatatagttagcctaattatttcgtgaaaaaaatacagtgcctgcatcttcaaatatgcgtatcaggacagaagtaaccttgcaacattctgatgtgaactagatgatcttgagcacctgttatggccaacagtatgtttattaaacacacttcatgaaaggattaactcagtgctcattattacacttccttttttctttctatatgatatgctaacattatagacttctattgttcatgcggccttggaagaatgatttgaaatgttttaccatgttgttcatgcaccattgtagatagaggagataccaaacttaacatctggctgcactgagtttgttgagtctgcacaacaaattctggaggagaggaagcttaaccaaacattactagccaaccacactacattgcttgacttgcttgaaatcccaccattgatggacacgtatggaacttttatcttaccattcccttgtctctttactttatgtttgagtcggctgttaatgacaatgtcatttgtttttcataatgcatagtttcaggaggatctctagatcggctgcggc

SEQ ID NO: 339 - DNA, 761 bp, Zea mays
gttccagctcggtacccctgaagggttcttgaagggttttctggtcatattatgccaaacactgaccagccctttaggttaaactgggcatcgtttagcatgggagataggcgctcggatgttgcttcggatcattccatattcgtaggcgaccttgcttccgatgtcaatgacgccacactgctggaggttttctccagcaggtactcctctgtcaaaggtgccaaagtcgttatcgatgctaacactggtagatccaagggttatggcttcgtgagatttggagatgacagtgagaagacgcatgccatgactgagatgaatggtgtgtattgctcctctaggcccatgaggattggcccggcaactccaagaaaatcatcaggttcagttcaaagtatccatttattatatctactagctttcacaaatccttgtctttgttctatacaactttatgctgctaggtttctttgatttttatataatccgttgtaaaattaaaactaaacagagcataagtgatttaattatttattgattgtttcagtggtcatttggagagcattctgatcctctgtcacattttatatgatgaaaattgcatctaactgttgaatccaattgaatgggtgtttcttgattttctcgcttcattttaaatgttggtgttccattaggggctgttcggttgctcaggaacggtggcctggaactattcctgcctggattgtttacctattttatataagatttcatca

SEQ ID NO: 340 - DNA, 817 bp, Zea mays
  unsure (1)..(817): unsure at all n locations
tgcacattcgtatgcctgcagctcgactctttaggatccccctgaacgtaccggccggccggccggcgccagccaactgatgttgcaaataaagaagcaagcatgcaactttgcggtttgcacacaacgtacggccgaacactggcgtctcgacctacttccagttgtaacggccgtcagatcgatggatggatcacatgcgccatgcacagcagcaacgaacgaaaatctcgaaccaaaacgcgcaccactctccaaggtccaagcacagtggagtccagagaggacatgtgacggcagtaataacatacatggaggccattgatggcacaacaacaactgctgctactgtcacgcacgtacagtacaggcacagtgaatggcaggcaacccacgccgcccgccacgcgcatgcatgcatgcatgttcacccagcagcacagcagacgattattactactgaggccaattgcatttacatctgcatttgcatttgcactgcattcatttctacacggccctacacgctgcaacctgtgacttgtcatatcgtgtccaccactacgcccctgcgacgtcattcgattgcggattcgcaattgcatgcccttgttgcattgcatatgctgatatgcatggtagctaggggtattgccgtccttgcaacataacatcaatgaactacgtgcagctagctagatcgatcggctcctactgaattttcgagagagcgagacagcaaaaaaaaacatataactgcagtcaaatttgggacgagcttggtggcaagcaggggtaccgagtccggaatncgtat

SEQ ID NO: 341 - DNA, 753 bp, Zea mays
tgtcaaccctgtgcaaggtgcaggtcatgatccaaagattgccaacggtaatagttctgctcacccaggcttaaattccggtgtccagtcgtcaggttccccacctaggcgaacgctggcaaacccaaagcaccctgatctggccttgcagctaggaggtagccattcacatagtttgccttagtactgtgatctgtgacagaggcatgagttcaacactgcttcgtccggtaccttgccaagcggagcacgagaccgatcgaagaggtaagaagtgtttggtttgtcgtcagagagaggcggtggcggcagcgggacatcgtgtagggtccctcgatttaattgatcatttgaccccctgtgagttgtttgtaaaagggtagggtagcttctgtacaggttctaatcttactggagatgataatgcttcggatgaaggcagcgcccgctgtccagcttgtaacattattgatagtagaaagaagaggagggaagcatacaggcgaaaaggcagtgaataatttgtgcctttttgttttgccccccgaccctgagtggacgcactccgtttccaaatgtacgagtggctaacctcggtcagcttttcttgagcattcgttcgttcatgttgctgtcgtttgttatgtttcttctgcttgttaggctcacttcttgcgatctggcatctgtaggccatgtgatcgcgcaatggcgcaatgtctgcatggacacatcgctgtgatcttgttgcag

SEQ ID NO: 342 - DNA, 690 bp, Zea mays
tgtgtttggtagcagcgagcttgagcttgatgtttatagtcatggtgttatagctgacatgacacagcctgagcctgccggacctctaatatctttgttcatggcctttgggctggaaaactggcacattggagtgctgtgcttgatagggaactgtctatgtatggctacttatcttgctttacaggtattagtaattttcaggttgctgagatacttaggttgatgtctaacatttgggatgcttgattgtttggtttgaggatgagtccgttcctcaaatttaggggaattactatttactacatttttcatactagtactaattattatattataaagaatgaggtagtgatggatcaacttattctatttccaaaaccatttcacaaaccaaacaaaaaattagagagtggggtgatgatggaccacttcattgaacaaaccaaacacagtgtaagtttataatttccaatcaaacgtcgacccagtgtaagttctacatgcctctttgggttctactagttgtttaagaggaagaattatatggatcgagtttaccgagagcgctatggttgatatacgttcagctttaatagcttgctggttgccttccctcctggagtcctgggtgttcagccttaatagcttgttggttgccttccctcctggagtccttgcacccctgca

SEQ ID NO: 343 - DNA, 808 bp, Zea mays
tgcacacagtccgaatacgaatgaaaaaatccgaattgcacggaaaacagcatcatctcctactcgaacatcataaccaatggtttattgttcctttcccatgcttcctggtcgatttctaagaaactgggctcaacagctctttgggatccttgaccagaaaatgttttttttttgttttgtggacaccatgctggccaaacaactcccacaacacctatatatatcttacaaagaataatggcagccctattctaaatcacaagctataatcagaatttctagattttgaatagctttttgtggactttcagcaccaaccgacacgtaagcgagactcttgtggcggacctgcggaacgtgccatgctcttccatgctcatgccccctaggatagagtccgaatgtagatgcttcagttcttggcactgagacacattctccacctgtacaatgccaaatttttttgcactctgaataagttcagatgctcatcgggtacatataaaatgattcatcaatcattatttcaccttgtccagattatgtagctcactatcttgtatgccatgcaagtagtctggaaagagagagagagaaaatataagggacaatgaaaacacttgaataaaaatggttaattggctatcccattagaaaacaactgcaagatctatctaacctgtataagcctgatccttaaatatcaacaggctgcacggcatcagcataagtgatgaagatgaaggatcagattcatttgtggctccacgttcttgtgatccagagccgttgttctctgtctcag

SEQ ID NO: 344 - DNA, 761 bp, Zea mays
tgctatccccaaagagtttaaaaaagggttcaattccttggccatcttggtcacttgcgagttgtggaagcacagaaaacgcttgcgtgttcaatggtgctcatccttggactcaaacgatttaggctcaagtgaccgctgattcccatatgtggtgcctggctggggcttctaaccccatgaagctcctcctatgggaggctcctacccattaggctggtgtggcctagagtggtcttagggtggttgtgttcagttgttgtgtagtgtgtttcaagtgtgttgggggtgttataacccccattgtaacaaattattttcttccttaatgaaatgacacacagttctcctgcgttgttctaaaaaatagattttagatatgtgctacacgaatatgttgtgtatgtatgacagtggcgatagacacaataacatccgaaattatgatatcagatctcaatcttatttatgttgtctctacaagataacagacaaggaaaagaacctagacagatagacaagttcatcgacacaataaatagatattaatcgatggtgcattagtttttgtatcacacacctttagtctggaaatctttatccgttttaacgaatgcagcaaccagcgctcttgggagtgcagcaagccagtcttccctgttgagatcagcagggaccgcgttcaagatgttgttcaagagattctctttggtgtaaattgcggccccgttcccattgtgcccatcaaacaggggtaccga

SEQ ID NO: 345 - DNA, 742 bp, Zea mays
tgcgcgtcccgctgctgtccttcgccgccaccgacccggcgctcgcctcctcgcagtacccctacttcgtccgcgccacgcacgacgaccgcttccagatggccgctgtcgccgacgtcgtcgcgcaccacggctggcgggaggtcacggcggtctacgtcgacaacgactacggccgcggcggcgtcgtcgcgctcggagacgcgctcgaggccctgcgcgccagggtctcctacagggccgcgttcccgccgggcgccgaccgcgccgcgctcgccgacctcctcgtgcgggccaacatgatggagtcgcgcgtcttcgtcgtccacgccagccctgactcgggactcgacgtcttcgccgccgcgaggtcgctcgacatgatggccaccggctacgtctggatcgccaccgactggctcgccgccgccatcgatgctgctggtgctggtgctggtgctgctgctggtaatatacagggtgtcctcatgctgcgccagtacaccccggactcggacgccaaggcgtcgctcgtctccaggttcgcggccaaacagtacatcaacgcgtacggcctcttcgcctacgattccgtctggatggcggcgcgcgccatcgaccagttcctcgacgacaacgccagcggcggtaacgtctccttctccgccgaccgcaacatccgcgacgccaacggcagcgcgctgggcctcagcgcgctcagggtgttcgaccagggcgagca

SEQ ID NO: 346 - DNA, 710 bp, Zea mays
attcgagctcggtacccctgaatggatgggtaactgtgcgcacatggggagtggagttgtggtcgggctggccggttgtggttggactgaaccgaaatagacttttagatcaaggcttccttgttttattggaagcccagggcttctaatacataaactatatatatatatatatatatatatatatatatatataatagaaattatgggcgattggttggtctggtcttatcgagtcggcttggactcttctcttcctccccatctcctccctggcgccgccgtctcgcccccttcttgcctgcagctttttgagcctctgatccctggtgcacgccatatccaccccttctctttgtctcggcatctgcttgagaagtacggaccttatttttgaaattttatagcattgtttcgtgatcagtcagttatatttaacatatggtagaaatctaagcgactttccataatatctttctaaaaccacatgttcgtctcttcgatgctaattttctaagatcggatcttttaatggtacagatctaattttcccaaacccgcttcctcgacttcctgtctcgactctcccaagtcacaaccctcgacctcccccctactccaactactggaagcgccgacccatcaggttctgatcgattcttctgccccgatccgcagaggcaagcggagatgaactgcgagacctgtca

SEQ ID NO: 347 - DNA, 740 bp, Zea mays
ctcggtacccctgcgtcctgactacgggagtggcggcggaggcggcgctccctcgaccatcgcggccatcgtcacctcactcggcggaggccctgcagcggtggggatcgtgcggatctccggccccgatgccgtcgccgtcgccgaccgcgttttccgcccagccgggaccaggagggcgtcgacgccgtggcaaccgcgcagccactttgttgagtacggactggcgctcgacgcggacggcagcgttattgacgaggtacgcagtgcggctgtacttcaccttcattgcttctctatatgaatcctgcgaactgaccttgcggttctgaaggttttggtggtgccaatgctctccccgaggtcctacacgcgagaggatgttgtggagcttcagtgccatggcaacgatctctgcttgcgccgcgtgctcagggcttgcttggaagctggagccagacttgctgatcctggtaaattgcttgttctctacctggtagaattcacattgttgtcgtgcctggccttttagtcagttagagagagtaagagagattcttaactgctggaaccaaatgactagcgaaggacgtgtgttgtactgttgttcacccttaatcaatcctcaccagttttgcatcttcttcataggtgagttcacccttcgtgcattcctgaatgggaggttggacttggcccaagcggagaatgtgtctaggcttatttcagcaaagtcagca

SEQ ID NO: 348 - DNA, 778 bp, Zea mays
agctcggcacccctggcaggctgggagacacacaccaccactacactaactaaacactacacaccagtaccatttggtcccggtttacaaaaaaaaaaagaagcaccgtcctaggttagcacttgcgctaatcatgcacttcaacgcatctcctttctcagaaagcaaacctatctgtttctaaaaattgaccagcagcacgtagtgactgagaaagatacttccgaattaaggcatgtgggagctgcgataggttatttctaacacatctccttggttgtttagtgtttttcttggttgataggaatctgcgttaagtgtgttcagccatgtaataacagaaactgaaacaaataaggtaacagctttcgtacgacaaagtcattgaaatatatagtgttgttctacaagctctggtgatggtgatgtatggcgatggccaccttaagttcatgagaatgcatatgctacagcctacagggcttaattactggctttaattagggcaatttggtttggtgtatagcttatgttctgacagatgagcaatgcatgcattgtcagatgaggaggaataattacattagtttgcagtaataaacctgtaactatttccgtaagggcttgtttgggtgctctagtattcaacccaatacacatggattgagagaaattatggtgtaaattaaacatagcctaaatgtatcatgtatgtggttgttttacccattaaccgcaatcagcaacggcgtatcttcttcagcatcactatgccgca

SEQ ID NO: 349 - DNA, 735 bp, Zea mays
ctagttcgagctcggtacccctgagacctgagagtcagagagtgagccgtgaggtgaggtgctgggccgaccggctgagtagtctgactgtacccgccgctaccatttaccacgctgtaccgtagcagagcaggcctcacgcggcgctgtcccgaccccgtcgaggcaaaaagccctggccgttccctcctcgccccgtgccgccgccgccaccaccgcctccgtgcgcgcccaggcttcctcctggtgagaaatcgtcctgtcctccgttgttcctcgcgcattcttcgctttaatcccgaccgacgggttctgttcacttcccctccgtcccgcattccttgccgcgcgtctcggcgtttgcttgccccccgccgccgctggcctggatctcgcgggcttctttcgcaatgccgcagcagcactggtttgttgttgggggtcgagttctgctataagttctgatccgcgttcttgcgaggagctaaaacgacaaggaaaggaacgcacccatcgctgcatgcgtctatgcggtagcaggaagtcaggaactgaaccattgctggttgggagatatgggcccaaagatctcgcgatcttcactgattgtgtttattcgaggttctgagaggggttcttcgctgtcctttgagtagttttttctttctttctttggtttgttgtgccatgtcatatatttccacgagaggttaacggtggtgattggtacttgca

SEQ ID NO: 350 - DNA, 767 bp, Zea mays
tgcagccggcagtggcactgctgctcggctcatcatcgccgccgtagctgctgctgctgtagtctgctaaagaggccacggcgtcgctgatctccgcgccgaggtggtccctctcgatcgcgagcctctcggcgctgtcggcggggaggcgctcgtgcagcgagtctaacaccgcggcgaagtaccggaggctggccgcgaacggcgcgagcaagcttgggcgtcgtcctctcgacgtggcattgccgccgccgccgccgcctttctctaccaagaacaccagggaagggtccagggagcggatgcgagccagcgcgctgcacgctcctccttctcctgtgctgctcgtcaccgaggagctccgtgctgctgccgccgggaacaccaggttgacgaccacggtcgcgccgtcgtcgaccgtgatgcgttcactgtcgtctgcgccatccacgatgccctcgaactcgaaccgtaggttggggcacccgctcgcgaaccgcgctagccgcgcctcggtctgcctcagctcgtcggcgctcgtgccgaagccggtgattcgcagggagaccggctcggcgcagtcgccgtcgcgtgagctgctgctcgtgctcgcggcgtccgacagggactgcatcagggagggccactggaagccgtacgacacgtcgaagtcgacgacgtggaggcggcggccgccgccgctgctctcgaacgcctcgaggatcgctggttcgcggtgaagtgcgccagggggatcctctagagtc

SEQ ID NO: 351 - DNA, 711 bp, Zea mays
tgctactgttctgtccttgacttggaaccccacgggcaggtaaaacaaccaggcaataaaattacaatgacgaaggtgacaagagtaaaattaccatccatcatccaaatcgatacgccatcctttcaaggagatccttgctatccgagggagaaaccataacgttaatggtccccttccctctccagcaaacaacggcaattgtggagggatccttacaaatggaatctacacgcctattccctgaaataccagagaaagttagattatgaactaactcatggtttcttttatctttactcttcaggtagggcataaacattaccttcgagtaacactacaacacagcaaccgggcgtcaaggacgcagcttgctccccgaatctggtgtcggtaaaatgagcaaagcttatgcttcggtactgtacgaggcggtggaactcaagtgcggatgcatatagtatcctctcgctgatggatggaagcaccagcgataatccatcataagacaacctatatgcacatggacagggatcctttgatctatgcctttcctgaaacagaacagagtacctcagagtctgagtaaaatatgcaatgctgaatcttcctacgagatcttgaatcggtaagggacaccgcgtgtttagagcgcttacaaacattttaacaccaagtgaagctatcttcagggggatcctctaaagtcga

SEQ ID NO: 352 - DNA, 752 bp, Zea mays
tacgaattcgagcctcggtacccctgttgtaaacacttgtttctggtttattaatacaaagagtcaaagatggatgcttctcatgcgtgtacttcaaagaagttgtagttaatcataatttgaaatcaatttctgaaattctagtgtccatagcctgcttcaggattttattctctgattgtactacgaacccaactggggtgctgtcccttttggcctctgtttatatcaatactggtgatcctgttgactgacagacagttttaaactttatctggtcttgctcagtctactgcgggagaggggacaagaaaacgaaaaggggcaaaaggttcaaccattcatatggcaatgtgagtgctccagcacaatttacatcgcattttgggtttatttttcctgttccgttttatttagctgtctgatcatgtctaggcgaggccgcgcaacaagaagaagggaactgggcctgcgcggctctttgctcctccagctcctccaaggaaggatcagttcgatgatggggagatcatttcaatcgagattgacgaggacatcctggaataggttgtccgagttctgccttgctttatatttgccctgagcttaattggcctagtttgtaccaaatcaaatactacatattttaagtaattatttcctcgcctataattatcgatgggtaggctgccacactttcatttggctagtaatgttcctactactgactgggttctttattttcctttcca

SEQ ID NO: 353 - DNA, 759 bp, Zea mays
ctgatgattgtgaaaacttaacacaagaacaatatcttttagcccctaaagtttcacataataggactataggagggacagagcctactgattaaaataaattaaactaaagaaggtggtatatgttcatttggaaaccaaatggttctctttcttttttgtatgtgcaaactattcttgatgctggcatgaaataaattttgtaaaggtgctgtattttccaaaaaaaactcctcagacaacaaccaccctatcttgaaaatttctaggttaagtttttcaccgaggataatttttcattcattcttctatctatatataaaaatgtgattgtggccatctgaagattcccagtgtacgattgattttttgaatgtatggccgtcagtgatccggtacctgtggatgggcaagagctcctttgatattagtagcaatctcaacaggaaggtcatatgtagcacacccccctgaataaatcacgacatcctgtaatggaggcactcggtcaatatttcgagcagccagagttgagcttgcaaaatccaaaacacagatgtccgtgcatatcccgagcaccaagacctgcattgagcccatgccccccaagtcatacacaatagggtaaagtctatctctgaaatattctgtatcaagacaactcacagtttttatctgatattttccaatccaatcagcaaaaacactagatccgtccttctctatgcagggggatcctatatagttgagctgccggcc

SEQ ID NO: 354 - DNA, 743 bp, Zea mays
tgaccggcccgtggtttatattgcctctctggctcgcgtattttccggtacacccattttctcgtgcaaagattctttataaccattttgacggtggtgagcccgaagccagcgaaaaccatcaatcccattcctctcctccgctagtagccgccaaatcgacgagaaggagccgaggccaggcctccaccaagtatcagattccacgccctacgaatcatcgcaatggtgagtattcgcccgcggcggccccgtcgagctatgtgtggcttactgctcgcatagcctcttccgccgtgggcttggattgacggcccggttgtttgctgaggtgaggtcctgctgtgtgtgtgttttgtgcagacgaagaagcagcggagggaggcgggggcgatgcgacggcgagaccgacaccaccatcaccggcggcagccgcgggacgagcgctgcgtttcctgcaccacgtttaacatcctggcgccgatctacaagcgcatggacaacgaggtgggttggatcttgctctgctttcccttttgacggggaatctatttagttagttttggtttggtagaaaattctggctcgtagtatattgacggtcggtgtttggcattgggagcagaattgcagggagagccagtacagggcctactggttcagccgcaacgagaagattattgaccgccttctcgctgatcactcctccatcatctgccttcaggggtaccgagctcgaatta

SEQ ID NO: 355 - DNA, 701 bp, Zea mays
ctaattcgagctcgggacccctgcacgcactgcacctcccgggccagccgccggccagcatggaggcggtggtagagtgcgccaagtgcgagtgctgcggcctggtggaggactgcacccgggactacatcctgggcgtgcgcgcggccttcggcgggcggtggctatgcggcctctgctccgaggcggtgcgggacgaggcggccaggggcacgacggcgagaggccccgccgccgccggggctggaggaggcgctccgggaccacatggccttctgcggaaagtgcaggcggagccccgcgttccgggtcgccgacggcatgcgccagatgctgcgcaggtgctccaagtgactgctggcgccggccgcgtcgtcgtcggcgttgcacggcgaaaaatcggcagtactgcgacccgcgtcgtctagcgagcctttgggcatggacaagcaagacaagagaaggcgagcacgccggccattggccattgctgtgtcgtctcccgcgcagtgagctgctggcaacattatgtttgtgcaaggaaatggctcggcacggcagtcggcagtattattagggtgtttagtttggtgatctctgagaacccagagactcgtaggtgctgtgtaaaggtgaagctagaactagaacgccgctacatcagtcagtgccattaggcttggtacattcttcaggctaca

SEQ ID NO: 356 - DNA, 772 bp, Zea mays
agctcggtacccctgcaagaagaaggcattggaggttggtggcagaatgagactcggctttcgccgccccctgaactttggcggagctactcattaattagtgactttggacttgtgcatcaatggcagggtaagaacaagggcgcttacgccaagaaggctagcggcaatgattgccccaaggtgaagccggtggaattcatggacatggtggtggcggacgctgttgtcgacgacgtcagcaggtgccgagacagcgttccagcgtctgcatgcagcagtaggcttgtcgctcacgcagccgccgagctggcacgccatgccactggcgagaacggcgacaaggccgcagctaagagggactcgtcctccgccgctggctcctcctcctccggttacagcagcgacggaacaggcgacgatgccaagagcgccgagccggacgacggcgagccctgcagcctcggccgcttgtcgccgacggcggcatcgccaaagctgatgcgctcctgctccaacatcgagacgacgaggtctgtcctaacagggtccgacctgccggcgaagtcacgctcctacgacgacctgaagacgctgccccaccacggaagctcgagcgcccgcagcggcggcgcggtgcgcgcgagcccgacgccggcgtcctccaggacctcgtgctccgctgaccgcgtcatgctgaagaagcggtcgtcgaggcaggtgctcccgtcgcggagccggaagctgtggtggcaggggtaccgagtccgaa

SEQ ID NO: 357 - DNA, 761 bp, Zea mays
aatacgagctcggtacccctgctgaggatctcatagttgcgatattgactgcattggactgtcttccgatcagcaatgagcaatcagtctcctgtggggttatgcctactgttggtcacctgctggctcacagaattgccgtgatcaaccaaaaggcaagagcactctgtcacaagtggggcggtgtaccaaaacatggtacaaatggagagcattttcatacagaggagtcaagccacactgatcagcttaagtctccagatgccggccacaagacagaaactaagagaaagtgtgtagtggacgaaggagagcctgatgaagaatcaaaacctgaggtgacaactcactcagatgcacctttgtccgacccttctctgactaatgataatgcagatgcaacagagcaaccagcagggctaacttcaccaaatccatcaaacggaaatgcaacattaggggatgtgaacaacttggtcaggtctcctacatctgcaggtcatgtgggtttagaagatgggcagtccacccccaatgaaatttcttccaatgatgctgaactgcccattaatggcatactccggtcaaactctactaatgcaaaaagtggtactggacaagatgctccagtggaatcaactccagtggccatgtctgtagaccataataaacctggaaagttgtttcctggtagtaaaatgggtctggaggatagtattatttcagttagctcaagtatcaaggagtctcagccatttgca

SEQ ID NO: 358 - DNA, 723 bp, Zea mays
aattcgagctcggtacccctggtggttccgccaaccattaccataggtcgccggcgagcccttccggtgccgccccagcctactcgatctgggctgcggccgggaactcgttcctataatcgggaacacccatatcaaaaaaattgaccatgtattctactcacagctctatggtgcaaccgaaccccaggtggagctgccatgttgttagaaagagcactgtccggtttgatgaggcttgaatgtttgctggttgatgtaaagtctggagattgctccttgtctggcaactgctccaactcaccattaacctgcctggccttcacagcagctaatgtagcactgattgcctccgcctctgctgctgatgcttcaaccaagtaatccacgcctttgcttaatctcctgggatggattctaaactcatcagaactaaatagctatcacgaaaatattatttactttctcataaaacagcacaggaatacgtatacgttcataaaaagtaatgcatatacctctgtccttgcatcacagcattctcaggactgatatcagtatagatgtctccattaacaggaggtgcaactggagtcccaagaactacagttccatcaggacctgattccatagttgtttgtcttgttcgttcgtcattgtacgcatacttccccggtgctcgtcccacttgcaagtttgtggcagggggatcctctagagttt

SEQ ID NO: 359 - DNA, 750 bp, Zea mays
ctgaagaaactaaaaggatcaacctggggttcgttgatgaacgcaagactgccatcatcagctctagcctggatgacaaataggaaggcgcgctcgtctattttctgcaagataaccgagacgtattcgcatggcaacctgcggatatgccgggagtcccaagagaactggccgagcacaaactgaaggtctatccccaggcgagactgatccgacaaaaattacgtcgtttcacgctcgacaagagagaagccatccatgcagagctggctcgcttggtcgtggctggattcattagagaagtgtcacatcccgagtggttagcaaatcctgttcttgtactcaaaaagaataaagtggattggcgcatgtgcgtcgactatacggatctcaacaaacactgtccgaaggatcccttcggacttcctagaatagaccaggtggtagactcgatcgctgggtgttctatgttgtctttcttagattgctatttcgggtatcatcagatcagcttggtaaaagaagacaaggaaaaaacagcattcatcactccgttcggggctttctgctatacctccatgtcgtttggccttaaaaacgctggagtgacttaccagagagccattcatacatgcttagccgaccactggggcaagcgtgtggaagcttatgtggatgacgtggtgatcaagatagaaaactcagaaaatttcattgaagatttgcatgctgaacagtagagtgcaggca

SEQ ID NO: 360 - DNA, 701 bp, Zea mays
tgctggtgacaagcttacaaccacctatgacctggttgagcagatgcagtacctttatgtaagagtggtaaaagcaaaggaacttccgaacaaggacatcactgggagttgtgatccttatgttgaggtgaaactaggaaattataagggccaaactgggcatttcgagaagaagaacaacccggagtggaatcaggtctttgcctttgcaaaggagcgcatccagtcatcagttgtggagattctggtcaaggacaaggatcttgtcaaggatgacttcattggacgtgttatatttgatttgaatgaggtcccaaagagagtgccacctgatagcccattggctccacaatggtatcggttggaagaccgcaatgggcacaaggtgaagggggagttgatgctggctgtttggatgggtactcaagctgatgaagcgttccctgaagcatggcattctgatgcagcctccgtccctggtgatggccttgcaagcattaggtcgaaagtgtatctaactccaaagctttggtatctccgtgtaaatgtcattgaagcccaggatcttataccaaatgacaagactaggttccctgaagtttatgtcaaagcaatgctaggcaaccaagtccaaagaaccagggcattggcaagccggactttgaatccattgtggaatgaggacttgatgtttgttgcag

SEQ ID NO: 361 - DNA, 735 bp, Zea mays
tgacaaacacttcttgtattaccgtgctcggttgattgaagagactggctgcgcgatgtattttatcttgacgtgtgtgaggctgaccacgttatcctatccaggaagtggctgtgcaagggcaagacaaggtgtacaaagatgtgatagagcctctcgagagtgtgagcgtcaactctattccaactagcaaggaggatatccgtgatcttggtcctccggataaggtttactattctcttttccataaataaacttggatagtccataggtatctagtggaaaaaggtccaattttgatgttttaactcctgtttgtcaggttgccgaggctctgattaaaaaagttttggcaccatcaacacaaaagacaaagttaattgaggcgaaagaggtgtgccttccgtccaattttccgtgcttggcctaactattcctgttaatattcttggacaccagtgcgtgtcaaatctttgaggatcaggcaatgatgatttgtgacatagcatggttctttaaataagttcattcacgcatgccgattggtttacgtggacagaattataaaagacggaatgagcttagttggtgctgattgacgaatctctctgagtccattttatttaggttgagcagtaagctgaacagctactctctgaaaatagcaaatgtactaatgaatggtttccacctacaacatgtattgagatttgttgcctggtttccaagtttcag

SEQ ID NO: 362 - DNA, 677 bp, Zea mays
ttcaacggcaaggagctgtgcaagaacatcaatcctgatgaggccgttgcctatggtgctgctgtccaggctgctatcctcagtggtgagggcaacgagaaggtgcaggacctgcttctgcttgacgtcactcctctctctctgggtctggagactgccggaggagtgatgaccgtccttatcccgaggaacaccaccatccccaccaagaaggagcaggtgttctccacctactcggacaaccagcctggtgtgttgatccaggtgtacgagggcgagaggacccggacccgcgacaacaacctgcttgggaagttcgagctctccggcatcccaccggctccccgtggtgtcccccagatcacggtctgcttcgacatcgacgccaacggcatcctgaacgtgtctgccgaggacaagacgacggggcagaagaacaagattaccatcaccaacgacaagggccgtctgtccaaggaggagatcgagaagatggtgcaggacgcggagaagtacaagtccgaggacgaggagcacaagaagaaggtggagtccaagaactcgctggagaactacgcctacaacatgcgcaacacgatcaaggacgagaagatcgcgtccaagctggctgccgacgacaagaagaagatcgaggacgccatcgacgcggccatcag

SEQ ID NO: 363 - DNA, 706 bp, Zea mays
tgctgcaggacttcttcaacggcaaagaattgtgcaagagcatcaaccccgacgaggctgtggcgtacggcgcggctgtccaggctgccatcctcagtggcgagggcaacgaaaaggtgcaagatctactcctactcgacgtcacgccactgtctctcggcctggagactgcaggtggcgtcatgacggtgctcatcccgaggaacaccaccatcccgaccaagaaggagcaggtcttctccacgtactccgacaatcagccgggcgtcctgatccaggtgtacgagggtgagcgcgcgaggaccaaggacaacaacctcctcggcaagttcgagctctccggcatccctcctgctccccgcggcgtgccccagatcacggttaccttcgacatcgatgccaacggcatcctcaacgtctctgccgaggacaagaccaccggccagaagaacaagatcacgatcaccaacgacaagggccggcttagcaaggaggagatcgagaagatggtgcaggaggctgagaagtacaaggcagaggacgaggaggtcaagaagaaggtggatgccaagaacgcgctcgagaactatgcctacaacatgaggaacaccatcaaggacgacaagatcgcctccaagctccccgctgaggacaagaagaagatcgaagatgccgttgacagcgccatcaggggtaccgagcttga

SEQ ID NO: 364 - DNA, 697 bp, Zea mays
gcctgcagtcggctctataggatccccctgcaacaagatggaggaggtggaatctgctgcttctctctctctctcatccctgccggcgccaactgtctgcgaagaaaccattggcagtgcgctcggatccgcccagaaagtctcaccaataacagctcttgcttaccaagggaacattgctcttgctggcgtgtcgtcgtagttctagactagatagactctccggtccgccccatataataaatgcatgtcttgtttataaaaaaatgatttacttcaattgtaagtttaactaaaactatatatatatatatatatatataatgataataatatatatttctaaataaatctattacaaaaaaatacattgcatgtttaggataatggtatttattatatatcataaacaataacatgtttttacatggatttggttgaattggacaaagtttaactccaggtgagaagcaggatatatgcatgcgcctttattttaagaaagaaagaaaaaaaacaggtgctgtgtcatcctgagtcatcaccttgaccgcgtgcttaaattcctccggtcagtgcactgaccgcggctccaccgcgcgcgcacacgggaccataaatatcatttttaacacaaccttggcgtacgtgacgggtcacgtacgttatttactgcggcaggccgccgtagaaacca

SEQ ID NO: 365 - DNA, 715 bp, Zea mays
tgctttcttgagtattttatacttgagtcaatttagttcacagcttggaggcttgagttgttgagctttagcctgactggttggcccatcaaccaaactaccaaaaaagagtgaaaattgaatagacttggccaaccctatatgcccaaagaaagtaagatacaacggccaaaatacaactacacatagaaatagtgattggcttattgtcagtaaaaaaacatttgttgggtggggtacattctccagtttcaaagtaatagctcttccagcaaaaatacattttggtttagatttagaaacaaaattaaatagtctatcaataacttctaaaaatattcagcttcagagaatgaaaattatgtgtagatccattcatggtcttagtgatgatgtgatataactttgcacagtaaataataccaatttaacagtaaaactctgaaagtttttttaaacaaattagtaatcttcatcttgttaggcctggtgcagtggtgagagctgtctcattgagtctctagatcatgggttttttcttgaacacgcaagagagttacgtatcatttcattatgaaaggaaaaaaatacacagggaaaggaatccctaaacaccaagacaaactaacaatgtgacgaaccgaccagccgtcctgagaacaggtgacaacgcaacaacactagcactagcctctgttcgagacccttacaaaca

SEQ ID NO: 366 - DNA, 667 bp, Zea mays
tgatagttctgcaagcctgtgtctgagggtactagtatctttcttcggttgttcaccttcattcttaccaacatatacaaggacacagataaagcgaaaaatgccaggagcgaaggtaataaaacttttatcaacaagttctttgatcgtgaatgattactgatattgtagcactgtgctatacctaggcgaggaaggccacacagcgcattgttccccatcaatgatttgagtgtgatatttgagaacactcctccttctggtatctgtccatccaatctgttaaaagaaaggttcaagttggcaaggtaagtgagattggtcaaggattttgggatggcaccggagagtgcattggaggataggtccaattcctggatattaagtatattgctgaatgaacctggtattgatccttggaataaatttctggacagattgagatatatcatcatgtggagttcaccaaaggagactgggatgtcacctgacagcttgtttcctgataaatccatcatggtaattgctgtcaattttccaacatcagcaggcaggaacccacttaaagagttctgtgacaagtcaagctcaataagtttctgaagatcccacagacttgttggtatggttgaagacaatgagttttgggataacgtcataatttgca

SEQ ID NO: 367 - DNA, 771 bp, Zea mays
atacgatatcggctcggtacccctgctgaccgagtggggggcgctttctctcgagtccctcaagaaagagctcgcagaggccaacgcgcaccgggacgccgctctgcgcgaagctgccgaggtgaggtcgtcgctgggggagctggccaccaagctggtgagcgtggaagcgtactgctcggagctcaagaaggcactgcggcaggccaccaactcgccgtccgtctcgcggagatcgacgagatcagtcgaagcaagacgagagctcccgacgacggtgagccacgaggtaatggtggaaggcttcttgcagatcgcgtcggaggcacggctctcggtgaagcagctctgcaaggcgctgatccagcaggggaacgaagaatcctgtgacggcctgtccgacaggctgaacctgctcctgcgcccgtaccagctcgcgctcagcggcagcactggcaagcactgctcgaaggccacgctgtaccatctcgaggcgatcatgaaccaggccatgttccaggacttcgagaaccccgcgttccagcggaacggctcgccaaggtgcctcgacccagcggaggaccgccagcagagcttcgccgccttcgtggcgctgcgcaaccttagctggaacgaggttctgcggaagggtaccaagtactacagcgaggacttcagccgtttctgcgaccggaagatgagcggcgtcgtggcgacgcttggctggtcccggccgtggcccgagcaggggtaccgaggctcgaattcgta

SEQ ID NO: 368 - DNA, 761 bp, Zea mays
tattcgagcctcggtacccctgttaggcgctttgtgcgcctatccaaggtaccctgtgcaaaggatctctatttctccggtccaactgtacagtttcaggaacaactacaagaggcacttgacaaattgagctccatgattgttgatatgaatgagttggtcatgttcttgatgagctaccctcgcctgtatcgccagccatacaacaagcatatccttctgggtaactgcatgtttggtcgccagatggaagcacaacttgtcattaatttccttttgcacacaaaacctcatagttctgaagaattgtacgtcctgccagttgttggtccacatagagtcggtaaaagtacactaatcgctcatgtttgcaaggacgaaagagtccgtgattatttctcggaaatcttgtggctgcatgactctgattttacggatgatgagctaactttgagacagggatgtgcaatgaaacgacagctttttttgtcaaactttaagaaaggcaagagatttctagttgtgattgaactatatggcaatctctgtgaagatgcctggaataagttttaccgtgcttccagacagagctttcttagtggtagtaaaatcatagtcacaagctgttcagacaagattgtaaagtttggaacggcaccagctctaactctgaagcacctgtcccctgaggcttactggtatttcttcaagacacttacatttggaagcacggatcccgagatgcaccctaggcttgctca

SEQ ID NO: 369 - DNA, 705 bp, Zea mays
atctcctcaaagcatttcaacgctctatctggcagtgacactctagcccaacctttaatcaacgtggtaaacgtcttgacatttggtttcaatccaacatctgccatttcttgaatcacattttccgctctctacaataaatagttcaaacaagaaattagtgaataatgtgcaacaaaggccaggattacttctccattcacattttcccgatgacaataagctaagatgaagccatgtaggcacattgtgtgaatgaagggcattgcagacattgtgttcagccaccttcaaaaactccaataatgtccaactgtaacaccacaaactactaatcaaatattttgatgcaaaatgcacacacctgcatgtctcctgctttgcagcatgcatttatgtaggaagtaaatgtatggatgttaggagggattccatcctctttcatttgtttcaacaaatctgctgcctcccagacatctcctctccgagcccaactacatgaaagaatgtaatgacacagtattttagtctttagattatacaatactcttaacagggatttgacaaactatttttgattataacatggctcaagtaaatcataaattgacatgatatgaaagcaagtgtctgaattactgaggtaaataataataattttggtccttttctatagtatttcacaaatggacatcatatatggca

SEQ ID NO: 370 - DNA, 760 bp, Zea mays
ctgacgaaggacgggtccgtcctcaccgacacgatggaggcgccgcggtggtgcacctgccgcgggaagctggcgccgtagccgaccatgtagctggtgccccgcgggttgtcgcccaggatgtagttcacctgggacctgacgaaggcgaggatctcgaagggccgcgcggcgcccgcggggcaccgcaaggcgccgccgccggagccgggcagcaccgtggcgtagtccgcgtacaccgtcagcaggaacgaggcgctggtcacgaactggaggttgttccagcgctggtggtacatcatgccgcccggggtccgcggcacgttcacggcgcccttgcccacgcacgagcacacgaagaactcggcgttctgccggtaccgctgcagcgtcgcggcgtgcgcgccggcacggccctgcaggaggaacttggctgccaggacctgcacgccggggtacttgacgtcccagccgaactggttgatggaccagcccgtgccgccgagagcgtcgccattccgggccatgtactcgaggtagcacccttcatctgtcgcctcgtacagccatgccgccgcccacagaagctcgtcctacgggaaccaggtagtcaggtaccacgacattgaagttgaagggcagtgtgctttcagatgagcatgtccacttaccccgtatccgctgaaggatccgtagtagttgcgagcgacggtgatgctggcgtcgtacttgccgcggtacttgtcggcgaactggaaca

SEQ ID NO: 371 - DNA, 787 bp, Zea mays
attcgagctcggtacccctggcaacatcttcttttgatagaactattaaattatggaatgctgccgatgtaagttagtttgcttatccattataggggccgtagatattatgctattatccatcctatagtaatgttaccattatcctactgcatacttcactagtgcacctgcatgctattaagatatggagtgttttttagtattcatggctgcaaatctagttatacttatccatattgtcaccatgtttcaaaatgtagcaaggcccaaccatgacatgattgattttgcatgtaaagggcattttttttcttttttctgttttgatctgcaaattttgttatattatgaaaatcctacttaaatgcagcaatatattgggtgaactgtgccatctgtgttactaaccttgaaccttaagcctcagattttttgtatgcacttgcattacagcatttcttatgctcacacgttttgcagcctggattctctctgcatacattcactgggcacaacggccaggtcacatcattagattttcatccaaagaaaacagaccttctatgctcttgtgatggcagtggtgaaatccggtactggaatgtgacccagtttgcatgcttgcgtgccataaaggttgcttatattccttctactctttgaagtttcatgactgagcgtgcaaaaagggtctgaatttagtaacttgtccaattttgcctttctacagggtggtagtgcccaagtccggtttcagcctcatgttggacagtttttagccgca

SEQ ID NO: 372 - DNA, 729 bp, Zea mays
aaccccggaccccctgatggtgactccccacataaaatccaaggcagaagccaccaaagccctcgggtaacctttcttgcttagagattgctctgaataagtccacctcaatcttttttagtgattccactgtctgtagaaagcttctttcttgtacaaggaatcgttcctggaatattccctcctatgttattcccctgttagtttgccaaccaatcacagctcttaaaagggtgattactgattgtccatgcttttctcatgctgagtaaactaagcagtaacagaaaacagattgtgcagtgtcagtagctattatatatggtgacacctctgtattttattatagcttgtatgtttaccttatcttcattgattgttaactatgtaacaaagacagtttcgttgtttgaaccttgcaggtttcggggtttcagtattctcccagcccacagaggtttagtgagtgccacatatcatcttccactgatatagcattcagtttttgtattttcagtaatgcagtagtaatgtacttatggcagtatgcactttgcggctgaaattttagacggttcaacttcagagatagctaacaatgggtctgagtcaacaatggatgcgaagcgtagggccagtcctgtaccagcacatcataactccaggcagatgaacaacaatcatcattctacaactactactactaccaccaccacgtcatctgctcca

SEQ ID NO: 373 - DNA, 734 bp, Zea mays
tgcaaaacggatttgtattgccaactgccgggaatgcatcttctacataggagtaaatcaccaacctcttgtgttgggggacaaccataaattacaagtaagtttctgttgttcctttgcctttgctcttttaaatggtgattgtagggggtgttggtttaaatagttgatttcccatcttaaatgaatggcttaaatgcaacgtctaaagtcaataattatacatagtgtttgctactcagtaatatcaaataagtgcgaaggacaatattgaactcagtgatgtgacttacactacattagtgcttaataattaatatcttctcatggtatggtaaatttctatatctgtatcaacaggttgctccattcaatacgtgctacccacaactgcatgaacatatgatacaagtggctgtcgatcccagtgtcaacaaatgggaccaaccttttgtgttgggagttgttgatccacatgattcattatcccatcctgctggagtttcagatgttaaagctgaatcagcaacatgtctggatcctgatctattcaccaattttttggtatgttaaaaaacgctttaggcttagttctgtaaaacaatacaagcacagatccaaccagtcttctaccttaaagtttcttttatctctgttctcgatgcggtatgaaaacattgtttcctgcgttgctcatcttccattctgcaatgcaatatgccaggggtaccgag

SEQ ID NO: 374 - DNA, 768 bp, Zea mays
tcttcgagctcggtacccctgagtagataactaaaaattatgtcaggttttatgctaataactaaacaagtaagtggccatgtcaaattctgtactgaacagaagaagatgctacatttcaaaaagattgccatctgtcatgacaaacttcacaattacaaaattaatgtgcctcagattgctgaacatattgtaatttgttacagaccttaaaaagcagtgcacggtgacgagccaaaccaactgttagctgcccaagaggtacaactgcacttcttatatcagctttcaacgcactgctcatatttcggtacttcaacagcatgctttctggatcaatgactggtccacccatgtagttggaaactaaattagctagagtctgaaccaaagagcggtcaacaaattctgattttttcgagcgaaattctacagccatgataacagccttctgctcaagagctacgagctcagaatccagtgctctgtcgaccaatacagcatcagttttgcctccatgtgaaaatggcagtgcttgcagatccatcagagaaggtatggttgacattgcaagctcatccccagtggcacaaatgtcatagaaaccatccaatattttgtcgtcatagctaagggcattgaaactctgtgaagcacgaacaaatctaccatatgaggaagtgagaaaatggtaagagtcacaaatatatagggagtttaacttctgaacaatctctgatgaaggagaacatcttatggtggctatca

SEQ ID NO: 375 - DNA, 755 bp, Zea mays
tataggatccccctggctctgcaactccagttcggtgcggtgcaggagcaggacaaccttggtttaatttcagtcgttattagggttcgtccattcgtcacgcgtttgcgtccccgatcgatcgatcgatcgatcgacgatacaatacgcgtgcacgcgattgatctgcaactgctagctagtagcctgcaccttttcggcggacgcaacatcgacgggcatgcaatgcagcgggcctcctctccagtagtacgtagcagtagcagtaggctgtgcgcagtgccagtgccagtgcctgtgtatcccccaggtcaaccaggcaacagcaacgtactagctaggcgcgcgggaggctagctaggactaggaccaagactgaccaacgtacgccgatcgcgttcgatcaatgacgacgaccgcatgcatggagtcatcgtgccgccgatgcgtgcgccggccggcaaaggctcggatggccgtctgcatcggcgtttaatttggagacgcgtcctagctttctcacaggcttccggttctcaaggcacacgtacgctgcacaattaatgttgcgttccaacagacagcagacagcaagtttagatcttcagctttggaataaagcaacggaacactgctctaattcgtgtgtagtgaaatttagtactactaagcaatgtatgggccaccagtggtttcaacggcgttagagagtggacttgacctgtactgtgagcactgagcagagcacgcacgca

SEQ ID NO: 376 - DNA, 622 bp, Zea mays
tgtaacagcgataagaaaaacaagtcatcatcaccctcgtctcactactagttctactactgttcccgagagtagtaacgattagcactccactagcagtatgattattcgaatcggccttgcttgacagcgattaatatctttgccgcctgagttgcaccataaactaatctccccccgccgcccgctttggcatgatccagttgtttcgttccgtcggttcgtctgtatggggcggcatcgccccccgccttggcttggcttaccaacgcagttagctgtcggctggtgcgcgaatccgccgcgttaggtcggctggcccgcttcctcgtcacttcgttcgtgcgccgggcggccggcagccagttagctgaggactgcatgggtgcaatcatggaccagcctcccactgccagctcatcgtggccagtcgctaacgcctaacgaaccgggatagcggtcgcccagggtcagggtgggtgagcagtgcccctgcctggctgccagggatgctcgcgttgcatttgcatggggcgatttgggtaatttgggtgggtgttgtaggccccccaccccatccgtaaaggtaaaggggatgtgaagggaaaagtctactgttcta

SEQ ID NO: 377 - DNA, 830 bp, Zea mays
tgccagtcgccttggcatcggggcaagtgcctgcgccgttgagctgctgctaacaaagctacacagacggtactttgtcatgctcatatgcagcgctcgcatacagcgccgttgaaacatgatgacgcgcgcccgctaagactcccgtagtcccgttgcctttgccttcacttcccttttccctttccgatgtggtgggtggcctaacaacacccacccaattacccaaatcgccccatgcaaatgcaacgcgagcatcaccggcagcaggcaggggcactgctcacccaccctgaccctcggcgaccgctatcccggttcgttaggcgttagcgactggccacgatgagctggcagtgggaggctggtccatgattgcacccatgcagtcctcagctaactggctgccggccgcccggcgcacgaacgaagtgacgaggaagcgggccagccgacctaacgcggcggattcgcgcaccagccgacagctaactgcgttggtaagccaagccaaggcggggggcgatgccgccccatacagacgaaccgacggaacgaaacaactggatcatgccaaaccggccggcggtgggaagatttatttatggggcaacttcagcgggaaataatttaatcgttgtcaaccagggcccattccaataatcatacctgtaggggaatgcttatcgttactactcttgggaacaatggtagaacttgttgcgagaacaaggtgaggaatactggttttcttatcggtggttcaggaggaacctcttaaaagcacttgatgcttcctaattttggactgggcccgagtttaaaacgtt

SEQ ID NO: 378 - DNA, 724 bp, Zea mays
tgcttggctgtggattacgttgttctagacgttcctagacgttccccaaacctgaagtgccaccacactaaggatatgtgctgtttggttcggcacatgtggttcggcctaatatataatctgtaacaaggatcgggtacgggttgtgcaatgctgataccacattaccgcccacctcccagctttgtctgattatgcccgcggactcccttctcctgttctcttctcacaactttgtcctctccactcaacttgcggatctcacattctcgcccctatgttccgtgtgttgccagcctgtttgttcccagccaacctgttacctttgttgctagccaaacacaattaaggaaatgcaagatgttaaaaattcgaaccaaacgaattgtattttgccttacactgtgacagattgcactgcaacctgattacattagcagtacgactcccaggaccgaaccaaacagcattagttaaaatgtcacatgcatgttctgaagcttattttcttcttggtactcaggatttatgtggaagaagagaatgacaccacagcacgatgcaccacaggcaattcagtttaaagtcagtgataaaggtagcggcaatgttggttctgagttaccaagtcatccaggtgtcgttacaggatccatccttactgccactaagaagctcgggaccgcagttccatttgataatgccaaggtgctcattgtgtcag

SEQ ID NO: 379 - DNA, 724 bp, Zea mays
ctgctagctacagtgtgcaacagtgcggtgtgcgtgcgtgcgtccgcgcgcgcgcgccgtttcagtttcctcccatggcgtccgccgacgactgtccgaggacgcgtggtcctcgacgacgacgaggaggagggccagcccggccgggccccaccgggcggcggcggctgcacctttcgcggccggaaaggaaagcggtgctgtggtgttgtagtagtagctagtagtgttactacccgacacactccccggattctccgccacgtggcgaggcatgcgccgtccgctggagcctagacggtcgggatggccccacggctatacaccgtacctgtacccttggggggttttaaactcgcccggctacgcccaccacaacttctcgaccggctgaatgaacctgagcgcccgttccgttttcactttactcttctcccgctcctctccttcctccctttcttccactgctggcctgcaaaaaaaaaagagcttcccggccggtggtacggtgaacattcttcgcaacagtttttgggagtgcgtacgtgcaacacttcctgtctgatgcgtgtggtagggggggagtactgctctatacgctgtagcatgcaatgtagaaggtttttgtactgttcaattcatgcatctagcctgcaaataaaaaggtgttttgtgaatatgcattactgcaagaaaaaaaaagaaagaaattggattgtttgca

SEQ ID NO: 380 - DNA, 708 bp, Zea mays
taattcgagctcggtacccctggtgctctcttctgcctgtaaattagctcgccggggttgcgatgccttaacgcgtgtcctgctgtcttactgtagctgtagccagtaggtagtatagtttcgttacactgatgcagtgtaggctgtggtgaatgacgtctgaaactacgcgtgttctgttaaaaaaaattactgcaggtctgtgcataaattgggttggattggcaaatcgggtgactgactgtttgcagcttactgagaggtttcttactcctatatggaaagagtttgccaatttccccaagacgaagacaagtgggatacgcgccggcgcgcgtatgcgatctacctcgtctgggctgtgttgactgtgggaaacgcgtgcaaaagtggcagcggcagcacgcgctgtggggctcatgggctgcggccgagggcgcccatcgggcccatacatgtgtaggctcgccgaacggaagaacaagcataggcccaccctcggatatgcgcccagttttacactaaaattatttccgtttttatattttttttcggaatcaaaaatgaaaatgataacttcgaagaccataacgacatcaagcgaaagctcagtaaaaaataccccaattacggtcgaaatctgacatacggtcggtaaaaatcgtggcggggcttggctggcttattgtagctaaaaacacggtacca

SEQ ID NO: 381 - DNA, 687 bp, Zea mays
ctgcaggaagacacatagagtaaaaatacatttttatcacctttcgtacgacgcaggagaactaccttcagcacagcctgaagtttcttgtatccattaattgcatctctagcaattgggtgcttaatcattgtgcaaaacgagttatacgtgcaatacggatcatatttcaaaaaacggaaatagctaaacagatcatcaattgcattttgtataggtgttcctgataagcaccatctccgctttgctcttagcccacaacaggctctggccactacagttcggaagttttttattgtctgagcttcatcaagcacaaccctaaaccatcgcactcttgcaattggaccactgtcaaggtcaaagtttgagtccttaagtttcttcttctttttcttagccttgttttgcatattcgccgatggctttcttttattgctagcagagggttcttcactgttcttttgatctgcgtcatcatcagccatctgtttaggtacttcattggccacaattgtatatgtagtgacaactacatcgtattttgccagctcacgtggatctttggtccttgcaccaccatggtagactaaaacagataatttagcactttcgctaaccttgtcagttaattcgttagaccactgcttaagaacactagcagggcacactactagagtacctgca

SEQ ID NO: 382 - DNA, 683 bp, Zea mays
tggtatgctctctgaacttttgctctgtaactgtgaccctcaataaaaaaaattcagttaaaggaataggtcccgttgaccgagctcttcgattctctctgaatgcagatagctacactggtagctgtatacgcggactgggggttcacttcgatcgaaggcattggatggggctgggctggtgtggtgtggctctacaacctcgtcttctacttcccgctcgacctcctcaagttcctcatccgatacgctctgagtggcaaagcgtgggatcttgtcattgagcaaagggtgatcaatataaactgctcgttttgtcatgcacagcaaagcacagcacagcacctgtttgagtgaattccatgcacgcgcggtcggtgtgtcgctaatcgccggggttttgcagattgcgtttacaaggaagaaggacttcgggaaggaggagagggcgctcaagtgggcacacgcgcagaggacgctccacgggctgcagccaccggatgccaagctgttccctgacagggtgaacgagctgaatcagatggccgaagaggccaaacggagggccgagattgcaaggtaagatgttgaagtccgtggagatggtatcgcttgaggggaaagaaagggcaccgatgtcagcgtttcccatgatctctccatatgctttgggatatctataa

SEQ ID NO: 383 - DNA, 793 bp, Zea mays
  unsure (1)..(793): unsure at all n locations
aaagtaagcaaaactaagctgaaatctgcaagaagcagtattgagattaccaaaccaacaagatcctgcagttaagttcaacagaaccaagatcagcattcagcacaaaatgaactgattcataatcactctgtggacagtaacagtggcagagaaagacctgatgcccaactggtttcgaattgtgcaagatatgagaaaatgggtaaaacaaatctctcctgtcttttagtgtccttaagctattactattgagaactccaccagtgatccttttgcgcattagagcatccttaatcctggactgacttagttgagtatcagcgagcatgttctgtgtgctgcatagtataataataagccatcataaataataatgatgataaacgaaatcaataacataaaacacataataactcacgtgttctgtgtgctgcgtagtataataataagccatcataaataataatgatgataaacgaaatcaataacataaaacacataataactcacggtgtgtgttgctctatttttactctagggcttccatcaggttcggtaagtgcagcttctccttcaacagcataaacaagaagaccaagttggcagtaccctaatgctgtagcttggaaccaggcaagatcaacacggataccattctcagctaaagagggatttgcatgagattcaagccagttgatgaccggaagaaacgttactttcagatttccaccacggaccaaacgcagggggatnctntagagtcgaacctgcaggnncagcaagtcatagg

SEQ ID NO: 384 - DNA, 679 bp, Zea mays
attcgcgctcggtacccctggagaaaagtaagcaaaactaagctgaaatctgcaagaagcagtattgagattaccaaaccaacaagatcctgcagttaagaacaacagaaccaagatcagcacaaaatgaagagttgattaataattattctgtggacaggaacaatggcagagaaagacctggtgcccaactggtttcgaattgtgcaagataagagaaaatgggtaaaacaaatctctcctgtcgtttagcgtcctcaagctattactatcgagaactccaccagtgatccttctgcgcattagagcatccttaatcctggactgactgagttgagtctcaacaaacatgttttgtgttctgtggtgtaataataagccatcataaataataatgatgaaaaacgagatcaattacaaacataaaaacgcataataactcacggtgtatgttgctctgtttttattctagggctcccatcaggttcagtaagtgcagcttctccttcaacagcataaacaagaagaccaaattggcagtaccctagtgctgtagcttgaaaccaggcaagatcaacgcggataccattctcagctaaagaaggattcgcgtgagtttcaagccagttgatgactggaagaaacgttactttcagatttccacagcgaaccaaacgca

SEQ ID NO: 385 - DNA, 741 bp, Zea mays
tgggaccatagacccataacgaactcgtgatggctctgtgccatctgtgttcactgggcccgttcattttggcatcggtcactaaccagccaaaagcaaaactattctctactcacaattcaccagacgggcatcagccacagcagctatcagaagaaacgtattcgacagtcgtttggcatcagccgctccagcatgacagcagttcaaaacaaaaacatccattcactgtttatcagttcatcatatagggacttctctagcgtcggcttttgttgctatgacaaagctacctacgggcttgtttgtgacaaagctacctttgcagcctgccaacgcccggggcggctcgctttgaccgtgacctcacctcacgcaccgggccggcactcggtcgcttcgctccctgggacgggctgtccggttcacggtctgcctctggcgttgccgcctgcatgcaaactgtatctatcccgtccgtctcttccccccttctatactagtactttttcttcaatggcgggaggtgaatcatgagatgagacgacgggatgagggagggacggaggcgctcgggctcgggcgtctgggcgagaaaatagtgacgccacgagaggtgggccaagggatgaagggggatcggcaatctcctatttaattttgaatagttagggattgtatctgcctcaattcccaacacatgttaatcacgaacctgcaggggtaccgagctcgaattcg

SEQ ID NO: 386 - DNA, 736 bp, Zea mays
aaaaccccctgcaggaactcttgtctgattttagtgatgtgtttgaagaccctaaagctttaccacctgttagagtgtttgatcatgttgttcccttgttgcctggagctattccggttaattctaggccttatcgatattccccatttcataaaaaatgaaattgagagataggtggcaaaactgctggaagctggtttaattgaacccagtgtgagtccatttgcatcacctatccttttggtgaagaaaaaagatggtacgtggaggttttgtgttgactataggaagttgaatgatttaaccatcaagaataggttcctaatgccattgattgatgaaattttggatgagttgagtggcagtggcactaagtttttctctagtttggacttaaaggttgggtaccatcaggtgaggatgaaggaaggagaggagtataagatagcctttaaaacccataatggccactaccagtttaaggtaatgccatttgggttaaccagtgcccctccaacttttcaatgtgctatgaactctattttggctccatttttgaggaagtttgcattggttttcatagatgatatcctcatatacagtccttctttagaattgcattggagtcatttgaggcagatgttgactgttttgagggaacatcagttttatatcgagagatctaagtgccattttgtgcaaactcagttggtgtatttgggggcacataattgca

SEQ ID NO: 387 - DNA, 824 bp, Zea mays
tgagcaaactctgttataatgtgagctggagcaccatttctctcttgcctcctcaaattctcattatgtcgtattatcatagctaactgatgagtcagatcatcctgtagaaacagcgcaaaggccaagaagaatcacagtgaaaagctgtgaaataaataccttctttaccacatggactgaagtagtagcccttaaacatatttattaatagaatatcatcagtgagtaatgagggtgcacttcgccatccatgcagcaacaattagacacataataactactccctccgtgccaaaataagtaactttctgaggttttaattatgtcccaaaaaaaatagcattctacaataatatgggacattgactcctaatacaaacgctaatcacaggtgcatgcaaatgatagctagcaaagtcaggagatgtcctacgggaaagggaaggagatggggataattgttttttttttgccaccgttcttatctgtctgaaaatttctagaaagatatttattttgggacataggaagtatattggtattaggcttacctcacttctggaagaggtgtccatcatgacagatggtctaacagggggtggaggaacaggaagaacttgaagtatcatccaatcaggacgggcatatttgggattcaggcccaacagaagacagtcctcatcacttatacgcttaagaacattaaggacctggtcaaacaagccatgtaagaaaccaattacaagaaataacataacttgctgaattgattagagattatagaaataccttttcaggggtaccgagtccgatatccgata

SEQ ID NO: 388 - DNA, 701 bp, Zea mays
tgcggtcttggggcagcagcgatggccatggcctcaggctcttccgcttcaggcgctgcactcgcttccggtggcctcgcccttgcctgtgctgctcccactcgtgcgcacctcgcagcacccggttgtcgcaggcctgtacatccgcatgcatgcttttcttatgtctgcttttccttcctatgcagacagtacagctctcagaaagaaggaaagaaagaactagactcacctcgcacacatattgcgtccacagctctcttgaagaggggtcacttgcgcttgtgcttggcaaaacagtggaattgtccgacaaaaaccttcttacgacatccacacatggtttgacaactttcttttgccatgagtcgtcagtggcacctatcaaaatatgagagggagattatgagttgctacagagaaggcatacgcatctgacagggtaccaatggacttacagaagaatgcttcggttgcgtcaacacgatgcaagttccacccaaaatctttactcagccgatgcaatctccgtctcttttatttaatggagaaaaaaaaagaaacgctaagaagtctacattgagccaagtatccgtgtgttcagtcgcacagtattctaaaacaacacaacaacataaaaaaatacacaggatactaagtgcttacttgacgtcgaactagtctacgagtgtttgcctcaa

SEQ ID NO: 389 - DNA, 767 bp, Zea mays
gaattcgacctcggtacccctgcaaatcagagttcttattgtcagataaaagaggaagcagtctgttcgcaacaacatttactcactcttgattatacctcataaattcaaggcatcgatttcttatcttatgcgaaaccggttgtcggcttaaatcacgtcactaaaagaaaagaaatatatatctcaacatctgatactgacgaagccattcttctttctatattttaagcagagtattatgactactacagaactttgaccagtaccaaacaatcggctgcaaatgcatggctacaacggaatctcaacacctcgctgcaaatgccatcaccctcttctctctttttcgctgtaccataacaattgactagtacacaatttaaccaataaatcctcgcagacaaagaagcgggaaaaaaaaaagaaactaagaacatcgtattattcgttcgctgtgaactgaatagctccatctccagaagacaaaagtgcagagctataaacgctggagggagcaaagccatggctcctaaaagaggagctgatggtcacaagaaagttctcagtcttccgcggtgccatggccacgaggcgaggcctctgtgtcaccagcattgtcggccgccaacctttcctcaagaaccctctcgccacgctccctggaaataacgattgagatggaattagtcagctcgtaaaaaagcgataccaagagttgtttctgagactccagatatttctcgataacacagttttggtctcca

SEQ ID NO: 390 - DNA, 774 bp, Zea mays
tgcacctcgactcttgaggatccccctgctccaagagaggagtgagggcaacaaggcctgcaggattatgaacaggagcctggtgtgcatctggcatacgacgaacttgtacaggatcatcagcaacacgttgtacactcgcagccatatcagcaggagcatccaacagatcatcaacttcctgaagcagctccaatagaccggcactgagtcccaaggcggcctcacggaaggccccggtgtggcggagagctgcctgcgtaaacttcctctcgacgtcctcgagcacgccaagcctctggcaatcgatcaggccactgcctatgttctgtagcgcgtgggatatattgagcaccatcttcttcatctcgcaggcacttgcaacgcgatcgaaattagcaaagcagtaatagaaaggatgctgcattgcagcttcgatcgcatgtagcatgtcatcggcatcaccgaggtggagctgtgatatacagaactcagttagcagtccctggttcggcaatgtcagcagcagccggaggtgatccaggcccctgatgcgtttgtacaccgtctccgtctccgtctcctgcgactgctccacgtccagtgaaacaaacgatgcgagcggcacgctggggtagtcgactgaactcgtgaggagctcgtccatggcgtccagatgcgctctcatacgctcggccaggtttgtgtatacctctgcctctgcggcatgcgaggtagccggaggggtgtcgggcccactgtggcggccagtgg

SEQ ID NO: 391 - DNA, 760 bp, Zea mays
tgctttacttcaagaggcctctttagacgaacatacagtgctgtcgaagtctgctttggtggctccacatttaaccgcaatagcgatgccctggatcatgtaaaagctcaatcataagatgacaacgaacaaaggaagagaaaaattacccagatagttgtacatatgctttacctggataatttcaggtgcgtctggtccacacatggatgcaccaagtactttgtcagtttcagcatcaactaccagtttcatgatagtcttctcctggcgcctgaaaacatagaccgaattacaaacttctataggagatatagaaactactacaaagcagagcgcatgactgaagaaaacagggaacagtcagatctttggatgtggtacaagacatatatgtcagagctcacagggtgtaagcctgcaaatggagcagacaagaaaatctaacaggcatgctctactatgcttacttggatatgctgttcttcattgggttgaatgatgagatgaaaacaagaatatcaccattagcttcctccaaggcctgttcttcgctgaggcccactacagatagtggtggaatgctattgaaaataacagagaaccaagttattacaggatgatcgatgattaaggaggaaagcatatattctaaaaagaacacctctttgaaaattcgcgtcaactataacataacgcctcatagaacaagtacatcaactagatctgaaacaagtacaactcagagagcccaaaacag

SEQ ID NO: 392 - DNA, 736 bp, Zea mays
tactctagaggatccccctggacagcccacctgcagcatgtcaaatcagttctgcagaccctccgtgatcatcagttagcactgaaacgctccaaatgcttgtttggtgtaaccactgtcgcgtatctaggccacatcatctcagtaaccggggtgactatggatcctgacagtgtcggcagtggagagctggccgcagccaaagacttcgcgagctccactcgggtttttggggctggagggctactatcggaaatttatcgctggatatggcacaattgcagcacctctcacagccttattgaagagggaggcgtttaagtggacaccggaagcagcagaagcctttacattgctcaaacatgcactaattacagcgccattccttcagatgccagatttcacccgccactttatagtggattgtgatgcgtcgggagttggctttggggctgttctacatcaagaaggggccattgctttctttagcagaccggtagcacctcatcatcaaaaactgcccgcatatgaacgagagctaattggattggtcaaagctgtccggtattggcggccatacctatggggacggtcttttacaatacgcactgatcattacagcttgaagttcattcttgatcaacggttgtccactattccgcagcacacgtgggtaagcaaactgtttgggtatgacatgcaagtggaatatagacctggaaaacttaatggggca

SEQ ID NO: 393 - DNA, 720 bp, Zea mays
  unsure (1)..(720): unsure at all n locations
tgcagcagcgagggggacgaacgacgactagtttacacattgctgtccggtacatgtatgtgtaacgttacgtactcaggggatcgtgtggttgtgtgcgcggcacaaactcctctgctcggtggcagagaggaatgcatgcatgtagagcgccatgaagcatgtaacggcgaacaccagcagccatgcaggcccatcggtctctgcatgcttctgtaccgccccgaccgaccggagaagattctttgcaggaaggacggcaatggctggctgcacagcnggacggaaggcggtggcaggttcaggtatccggttcatgtatccgccgccttcgtcctcgccgggcgtcgcgaacgcatcgttgcagccagcggaaaccgacgcgacgctccttgcatgaggcaacaacgtattccatcatccaccattctcgcttgctatatttgcaggaagcgcgcagcaccattctcgacagaaaatgtaaagaaacgaaagcatcaatcaaattgagcaagcgacgattcatatatgtcaccggagtgactaggcagcaaggcaagagcaacgtattctatttaattcatctgggacgtagaccacgtaaactgaccaagagacgatggaggcataaatactgtccgaatttggcacatttaagcccactcatggatgacccaatttatataagaaaggcaggggtaccgagtccgaattcgtata

SEQ ID NO: 394 - DNA, 739 bp, Zea mays
gactctagaggatccccctgctcgcatgctccccccatgtcccagcaacagaaacctgcatcaactaccccttctctcatctcccatgtttctcaatgtggagcgcaggagcggtgatctgggcagaatcagtagtcggtcctgcttgaccctgaccaacgattttggacgatgtccctgggttgcagagcaaattatcgtccccgacttggcgacttctgtgttcatacctggttaagaggaactgcaactgaaaacaacaagtggatcgaatggtattttagttggcttgttccaattatgagtgaattttaaatacctgattgacatctaaaggggcctgaactacaaaatatttcccaagacaaaattctcacatcaggatgtgaatggttcattctattgtagttcataacctaaaatatgaatcgagttgagagcaaggtattttactcatataattctcactaacattgcagccatgacaaatcaacaactcattgatgcgggaaggaaccaaatggaccaaacagatcaagctattgaacgttcaaaaatggttgcttcccttactatacacccttgtcctgtttgccatggcaaaatttacaagacattcttgtaggtcgtagcacaaactgttgagactggagctcaaactgctgcgacattaacacagcaagtatgcctctatcttatactggagtattaatttttctgcttctaagcatgttttcca

SEQ ID NO: 395 - DNA, 700 bp, Zea mays
tggaggagagcaaccaggttatatggcagcatgcgtgggagcaaagcgagcggcattctgaagtgcagccgcagcagctcaatggcaataacttcttccatcccctcgatggtgctggtgaacccacccttcagatagggtatggtcctcatatattttccgtgaatctctcttcctaccctaaatattgtgtgatactatttcgatgcctagctagcaggcttgggaagatgcatgaacatccaaatagtttttatcatatagaaatgatcttcaaactaaatggtgttttcttttaactagattaattttaccctatgctcgtttgatcgtcctaccaacgtacacgatcatcaaaatgacaccttgtcctattattttcctgatggaagaaaaggcaaaatcacatgcatggcatgtcacaaactagagaattcactgtgattgtaaattgttaaatctttaactacaaaacaagtccaatgtagtactgaactactgatgacaagttcttatcacagagtagctctttgtaatgaaatttaaaagctgattcgttcctccatttgtgcaatttgtttgcaggtatccttcagaggcactgactagctcatgcatgaccaccttcctgcccccgtggttgccatgagatcgaactactgcgcaattccgaattaataagcatggccgcatgcagggg

SEQ ID NO: 396 - DNA, 670 bp, Zea mays
tggtacacatacattagctgagtaggcctgcaagccggcaacggcataactcgttagctgccagatgcttattgcaaatgatagaggtttgtttaagatattaatttggtagcttttatgttatgctgtattttcctgtaaaaattattttttaaaatgaaatttgttagttgcttaacaatatatttattactatcctacagtgttttattccaagtattataattccttagcctgctgcttttgttttcaatttgtagctcaaaactatcaaataatgttgcttgcagggaaaatgaacagttgtctaagtatggggatactaaatcagctcgaagtattatgctggttgagctaaaaaaacttattgaagcaaacccccttttccgggaaaaacttgtcttccctactcttaaggcatcacgcctccgaactctaatcaatcaaaggtttgaaagtaatctaatgttgttactttcacggatattctgtttccattccaatatttttggtgtaactatgattttccccccaaatgtgcagcttgaattggcagcatcagctttgtaagaatccccgtccaaatccagatatcaaaactttattcactgaccatacatgttctccacccaatggagctcgtgcatcgccggtatctgtaccactggca

SEQ ID NO: 397 - DNA, 779 bp, Zea mays
gcagctcacttttaaaggatccccctgcaatatgcaacaattctgtcaatagaataaggctgcatacaattctgtcgtcgaacactttctatgatctcctctctgagtctgggttgctttgtgtggattgtgaaaagcaagtcattttgcttttgcttgagcttgcacttgagattgttctcccgctcactagcaacctgcaggtagagagcatttcttctgaaacctcagaggatgaatcgagcttcttgtctgcaacatcgtttggactttcaaggcttgacaaggagcgtgtgtacaatgctagtgcagttgttgtgctgatccgttcgttgctggtatttacacctaaagttcaacttgagttgctgagattcattgagaagctagcaattgctggtcccttcaaccaggagaatctaacttctgttggtatgggcaaaagatattcttgttatcctttttcttttgactcattttgacaaggacacttacgtttttgctactcttttatgacataggatgtgttggccttctacttgaaacaatcaacccatttttggagggttcttctcctattcttaatcatgccttgaaaattgttgaactgctaggtgcttacaggtttgtcatatctcataaaattccatgcgcttcattgcaacaattttgttttgttgtttcacagtacatggttactcttctctttgtccaggctgtcttcatctgagctaaggcttcttgtgagatatattcttcaggggtaccgagctcgaatt

SEQ ID NO: 398 - DNA, 720 bp, Zea mays
actctagtagatccccctggacaactgaaaacagatgcatgcatgcatgcttattatgacttcttcactgtataagatattactaccacagttaaacctctacttcatcaccatatgctctctagaggtgtcaatggggaattccccactgggtttggacaccccatccccatccccatgaagctatactcattcccgtccccatacccatcttgggtataagattcatctcatacccattcccattcgggtatcgggtccccgatgggtccccatccccaacaaaaaagcattatcatattatattttatgacattaacagccacatgacacctaggttgggtggatggtcatgggtgcttaaaacggttggaagaggttgggttagtaattagttgttgcgcttattgcctattaggctccactgggtgaatattacccatgggtaatagggtcgaatgtttgatacccatacctgcttacccaattggtgaaaattttgtcccatatttatacccttggggacaatttttgtcccataccctaatcctaataggggaaatcctcacgggttagcctgtactgggtccccattgacatctctaatgctctcaaacaataggggtggtgtttcatacagctagcagccgctgtggctgcagctcttggttgccatttcctatctgcacagcattgtagcaaacaataacaacacttgca

SEQ ID NO: 399 - DNA, 712 bp, Zea mays
gacgccgcagccggtgtcgagcgcggtgcggacggtgccgtcgcgcatgcccgggaccaggccctgcatcaggtccacgtacgcgccgacgccgttggggaacatggtgccgccgccggggaaccggaagcggtcgccctccttgacgagccagtgctggttggacttctggctgttgatccagtcgtaggggacgttccggtaccagcactggtccttgctcttgggccaccggatgggcggcttgtaccccttgggcggcggcaccaggcactgctgccggtcgggcggcggcgggcagtgccgctccatgaagctgaggcggtagttgccgtacctccgccagcgcttggggtcggtgcagggggtgtagtcctggtagtcggcggggcactcggggaacgcaacggcggccgtggacgccagtgccggccgagcctggccgtcgtcggagggacggcgggtcgtcgtggcggcgccgagggcgaggagagccgtcggcgccggctggatggagtccagcaggctccgtcccgtgctgtagatgccgcccaggtagaaggagaaggcgcagagcacgacgacgacgagcgccaccggcaccgccctggaccctgcgccggcgccgcccgccctctcgggcttatcttccttgctgtacttcatggcgccgcccacgccacgctattctccccgtcgtcgagcgctgcag

SEQ ID NO: 400 - DNA, 711 bp, Zea mays
taatacgagctcggtacccctggtgatcatgttcctggcggtaatccgcgcgcgcggcgtggcggcgccgctcaacccggcctacacgcaggaggagttcgagttctacctctccgactcggaggcgcgcctcctcgtcaccgacgcggagggcaacgcggcggcgcaggcggccgctgccaagctcgggctcgcccacgccgccgccagcctccacgacgcggccggccctgtccacctcgccggcctcccggtccatgctccggaaaacgggtcccacggcggcggcgcggcgggctctctctcccccaacgacccgtcggacgtggccctgttcctgcacacctccggcacgacgagccggcccaagggcgtgccgctgaagcagcgcaacctggcggcgtcggtgcggaacatccggtccgtgtaccgcctcgccgagacggacgccacggtggtggtgctgccgctgttccacgtgcacgggctcctctgcgccctgctgagctcgctggcttcgggcgcgtccgtggcgctgccggcggcggggcggttctcggcgtccacgttctgggccgacatgcgggcgtcgggcgccacctggtacacggcggtgccgacgatccaccagatcatcctggaccggcacgcgtcgcggccggaggcgtacccggcgctccggttcatccgcagggggatcctaaagaatcg

SEQ ID NO: 401 - DNA, 738 bp, Zea mays
ctgctgctgggggccgacccagatccaagctctgcatctcgcttgccagcagcgccctccgttctttcaggaagttgagccggtttgtcagcttgactaatgccgatgacgctgctggtggtatgcttccaccgaaatcctgatcagcaacagcatatcatcatcagttgtcatcaaaggaaaggatcatcatttcatctcaagcacaaacctctagtctgctggatccatgaagccctcttatcaatgggctatttgaatattgtttctgagcaagattccacttcgaattagaggatgatgacgaccacccatcttggccctccctggcaatcgattgccttctttgaggagccctctggctgctgcccccgaccgcctcgtgacctggcttgtctgtcgaagaaggcgaatcctgtgccgtttgcttccttgattgctcgatatcaccctgaaatgttttctgttcttttttaacctgaaaatgagttccctcccgctcatattgaaagcagaacggaaggaatttgacattcttaccatgccagatgcagagtcactcccaatggtcggtgacgctgccactgatgagctttcaggtctggagaaagggcccccccagtttagtacaagtctacaaccgaaatgatgccaaacagtgagaacataatagaccgaagtcttacccgccaagcctgtctgtgtttaggagccttttgttgcatgattcacagcaca

SEQ ID NO: 402 - DNA, 753 bp, Zea mays
tgtgacctgcaccattgcagtcctctttgtttgttcaaattagattttaaactccacacctcatggaatttgagtatttcagggctttcatgattgaaaatgtaccccaaattagcttataccccgaatcgtatggccctcttctgactggtgaagaagaagtaattggaggtgctggaactcgcaacgcgtttccttgccccatttctcttatttgtcggtaactactaatttctattgtgctgacaaggaggcatatcaagcattgacaataattcctctgttgcgaaatttttttggatggaggctatgcttgaaaacatgttggcatgttgcctttatacagtgacaacattgacttcgctgttaagttttcttagctttcaaaatgcatagaaagaatctctcattttcttttgatcagaagaatctctcattttccatatctctatctcaggtgcatcacatcatcttagccttggatgtcatagatgattagtgtgaatggttgcccatctgctagtttctgggttccctaagacaacatatgctcaacatctcgcaggaagaaagagagatggcacacctctatgagcgcaggaagttcccgtaccctggcgatgatgaggcggtcgaggagtttgtaaagagcggaggtgctcttggaaccacaattggacccaggggattcgctgacgccaatatggattctgaaaacatgcagaagcaggggtaccgagtccgaattcgtat

SEQ ID NO: 403 - DNA, 733 bp, Zea mays
tggcggctactagggcatgtcatgaccagacgtggtcagctcagtgagttgtgatcctgcaataactcaattggtgctctctagagttattggagaatatcaacttagattggattctctctttgttgttctactgtctttgcttagttaagcacttcagccatatgccattcgtaatgaaatagctttggatgttgcagaaaattttgattgacatagagagtcctattttgacctttgtaccactgctttaatttgaatgtggtacaaggagaaacataccaaagttcgaggtaagacactggatcatttgaactttctagcgttgtttagtttcatatttctgccatcatgcatacttaaattgtgaaatgtgtatatgtagttcttaacatatgttaagtagcatgtggttttagttttttaccctcttctaaattgggatatagtctttccgtacctttatgattgaggttatagcagttttttgtgctcaaattaacaaaaaagtatagaataaccacatgcttctattaaacctgcctttttctactttgcaacttaaattaattctcctaaaatgcatacatttgcattgttcaaaactataaatttgtcgattgttccactatttaagatacatttttagatactgtgattgatctcattaaaccatgttggtttctacaaccaacttaacagtcaaggaaaatttacattggtaccggacgca

SEQ ID NO: 404 - DNA, 736 bp, Zea mays
ttctacaatgacattggtgcatctgtagatatcccacttgatacaaaaaaggtagttcgactgcttgaattgcttggttaactatcatttactactaattttagcctttttcattgattttgtactatctttcaatcattatgcaaagcttcaaacttacatatgtatgtccaccagatgtttggttccatgtttctctactgtaagctaacaaataagtttgctacctttatttcgactgaacctatggttgattctttcaatatcagtatcagatctctttgtgataggaagacacaaaagaggaggggttagagactagttttccttttcccttaggccttagcatttttttctctatgtttctttctttctttcaatatcagtatcagatccttttttgatgagtccgtctacacaatgcaggacggcctcaagaaaaaggagagagaacttatggctaaagaggctgagctaaataggagggaacaggtatatactagccatttactgttattgtttaatcaagcatgcatgcaagtaactttacacagttttcaactttagcatttattctcatcatcattctgtttaattaactttgtgctcctttctctaggaaataaaaagaagggaagaagctcttgcgaaaggtaaccttaactttattttatttttttgcatgtaccatttttctaatgaaatggcccataaatttaaattttatatatatgca

SEQ ID NO: 405 - DNA, 760 bp, Zea mays
tgctgcaccctctcgttgaagctgatggactgcagcagcttgcgcaggcgggacggcgtggaggtctccttgccgccaccgccgtcgccgtcgccgtcgtcgtcgtctgcggcgtcgctcttgtccttgatgaggaccgccttgaggccgaaggaggacggcatgctctgctggctccgacgtccgtcgcctttcagcgcaaggatgtcgggtaaaggcacgccgcggcatatgtctccgatgcgagagagcgcgtcggcgaagctggacgcgctcgcgtattgctgcttctccgcctgctcttcgtagtcttcgtcgctgtctgcaggagggggaggggtagcagagcacagtcacagtgtggccattcctggttcatactaggcattagatgtttcttgctctagcactattcttgttacctccatcgacgctcttgaattcgtcgtcagaatcatcttcgaggatgctgacagaatcgaaccaggcgtcttcgttgctgcaacctacaacggtatgaggaactctggttgatctgtcgccttctcgctcatcagcttaaattaaactctctctctctctctctcgctcttacctttagagtccctctggctgtggtgccattccatctgcgtgaggtggaacgtcttggagtgctccgacttgccccggttggccgtctccacgtgcacgatctcgctcatggagaagccggtcatgcggcctctgctggcatcgcccaggggtaccgagtccgaat

SEQ ID NO: 406 - DNA, 722 bp, Zea mays
gcgacgacgggcgcggcgttgggcaggtaggggtaggagtccggcggcggcatcttgcactcgtcgccgttgaagtagatcttgcgcgggaacgcccagcccatgctgaaggtgaaggtccttgcgtccttgcgcatgagcacctccgactgcacgttgccgaacgggccggcctccatgagaaagtcgttgtagaacttgagcccgtagaacatgccagtgtcatctgcattaattgcataatatatatttgagagaccgatgattatgtacatgtcatgtcatgtcatcagatgacgatgattatactcactgatgctcccgtatggttgcagcggcttgtactggaagctgaagacctcggtgacgttgtccaggttggggtgctgcgccaccagcgtccactgcgtgtagttcatcctgtagttgtagttggtgatggcgatcttggcgcgccagtagtccttgtagttgagcttgacgtgccagtgcacccggatggggcacatgtgcggcgtgcactgcagcagcgcctggccgtccttgcgcggcgtgttcaccccggccgacagcgcgcgcttggagtccccctcgatgcagccgcccggacccgcgtggccgccatggccgccgcagccgcacgcgcaccgggcgcacggcacgatggtgctgttgtagaaggaggagaaggagacgcagcaggacgggtaccgggacgccag

SEQ ID NO: 407 - DNA, 715 bp, Zea mays
tgcagtcgacgacactagcccgccggtgctggtggtctcttgctgagctccctcggcctcctcggtactacgactactactgggcgcgtcaaccaccaccgtcttccttacacggaacatggccaagtggatgtcacctgcagtagacacagagacaggtcgatcgatcgatgcaagagctaacagctagtgatgttggacggttcgagatgcatgcatgcagcagagcagaccgaagatgagtaggctgccggggtcgacggacgcggggaagcccgggttgagccggcgctcgttgatgtaggtgccgttggtgctgtccaggtccgtcaccagcaggctgccgcccttcttctccagccgggcgtgagcgcctgaaactgcatgactaccttgtcggcgaccgtgtggaggatagcataatagcaacagcagctagctgacctgtggcgacggggagcacgatgtccgccttgtcggcgacccggcccacggtcaccgccgtgtcctcctgtgggagagtcgtacgtgagtgccagtgccagagccagacagggggggtgtcatgtgtggagagaatggatggatactgcacttaccgagactatctcgatcgccccagggcgcgcgactttgtagccgatgtggcgccagtcaccgtctcctgcaacaacaacaacaacaaaaatggtatccagacgttgttcaggcagca

SEQ ID NO: 408 - DNA, 777 bp, Zea mays
gtaggccgactctagaggatccccctgctggagcagtgcatttacgtgtggtcacccggcttttgcctcggaaagttggcaggcaacgaaccaagggcgtgagtcaaagcccccaaccgttcgggtgtagccgcccgcccgcccgcctagcctaggcaagcgacagacaggcagacaccactcccgcgtcccgtcctggactggactgccggaatggaatcgagtgaccagtgactgacggagggagagcaaacggcggcgaggtgaaactgaaacgaaacggaacggaacgcgttgccgctgataaaaaaggcgtcggggcaaagcgaggagcaaaagaggggggagaaaaaaaaagagggaaggagagacgtcgttttctcctgcgcgcctcgccgctgccacctcctctgttccccgcggatccttcttgacactccgtcgttgggggagccaagcgccaaaaaaaaaaaaaaaaacccatctctgctgccgtgagctctttcctgcctcacactcttcttttcctactagtatttgtatttcctgccgggcggccgggtgatcgattccagcggctcaatcccagtcaatcatagagcagagcagcccgtgaccccgtgggcgtgtgctgcgactgcgaggagggaggagggaggaggaggaggaaaaagagtgccgccgtttcctgggggcagccagattccattccttgcgcaggagtactacggctactccttgtactatttcctagtagcaggctccgtggaacagggt

SEQ ID NO: 409 - DNA, 771 bp, Zea mays
  unsure (1)..(771): unsure at all n locations
attcgagctcggtacccctgatgatgcagcttggattccgaaatctcgtcagactgtcaaagttcaatagctatcagcgtggctgagtggcaaaatcagaccgaatgagatgtaattctcagcagcaaaacaaccatcctgttggcaatcaactgaattaataacgtcggatgccaagaattgaattcatattacagatggtcttattttatgatatacatgcacataacatttgttgcagaaacaacttggggtatcgtagtattctttgcactgctaatctgctactcctagacatcaatataccaaaacacaagtagcacaggtacagtttaatgctggcggtttctattgtacctttacctgttagaaacagaaacgatgccccaaacccagtcagtaatagctatttggaatctacatatgtatgttatatatatatnnttcagatttaccttacttcgtcagcccaatttctaaccagattagatctgtgtatgagtccctgaacaaacgtggcagcctatatggttgtggaaaaagactagtgttgggccaaccagtgtacatgtgcagcagactgaacaggagccttttctccacctttctagcgtcctagtgtagtaacaaccatttctactgtccaagtcttaccgaatccacggttatgctctgctcttgatcttcctatgtgacttgaggtcgactacaattacggttatgttgtccttgctccccttatggagagccagcttcgataaatactcagca

SEQ ID NO: 410 - DNA, 794 bp, Zea mays
tgaccgtttggcgagaagaggactggaacatcctgactgttgtgtgctctgtaatcaagaagaggaaacaattcaacacatggtggctggctgcgtcttctcaaggcaagtctggttccaggtccttcccgcctgcaatcttcaacacttgtgcccctcccctggggaggacaacttccaagtctggtggcaacgggcagagcaaaacgtaccaaagcagcggcgaaagggtttcaactcggtggtctgcttggttgcttggtggttgtggaagcatcggaattactgtgtgttcgatgaaggggctgcagatatctctaaagtggtgcgagagattagcgaagatgccactaactggcgccttgctggagcccctagggctgagggctgagttgtttcccggtcttatggataagttttgtctatgtaaggcgttggccgccgtaaaatgccaccccacttttgtaccgccccattttggggttcaccttcttattttaatgaaatgcagctctcctgcgttttcgagagaaaaaaaaaagtgtgcaagtcaatgctgaagacttaataacaagtttgattataaactgacagtaaagtaacatggctctaccttttcatgatctctcaccattcatattttcaatatacagatcaaaagcttactaagtcatgtagtatgaatctacaagataccatctttgccatagaataattgattcagtccactctagagctcaaatccctggttgcatgcaactacattaacttgatcaggggtaccgagctcgaat

SEQ ID NO: 411 - DNA, 741 bp, Zea mays
tgcccagaacatgcttccagggggtatttctgcattcccctgcacttatttggggctgcctctttccttacacaagctgaccaaacagcagttccaaccaattgttgagaagattgctgatcagctccccaattggaaggcagatctcatgactcgagctgggaggagagtgcaggtacagcatgttctcacaagcatgttggtctatcttgctatggcagttgacattccaaaatggggtctagatgcaattgataaaattcgcaggggctttctttggaggggccggaaggaggcaagaggaggtcattgtcttgtagcctggggtcgtgtttgcagaccactgcagcttggaggtcttggcatatctagttttcaagaattatgttgggcccttcgaatgcgttggctatggctgcagaagactgatcctactcgaccttggtctgatctccacataaaagtacctggaaaagctagagctttcttcatggaggtggtcattactgaggtgggagatggcaaaaatacaaagttttggaaggataagtggttatatggtaagcgaattaaagatcttactccaagtttatataatattatacccaagaggattatcaatagcaggacagtctatgaggcaattacagacagaaaatggatctctgatattaaaggtcctctgacagtgggagtcttaacagagtatcttcagttgtgggacatgacttcagattggca

SEQ ID NO: 412 - DNA, 724 bp, Zea mays
ttcgagctcggtacccctgaaagtggactcagatacctgaaacaaaacgaatatatacaaacatacgaactcaagtgagaaagagtaatgcttcttctgcaagattctttcttgcttgagtaccccggagcagatactgaaattaataatacagtaactaatctgttcatcttcctacctggcaacattacgccaaaggccactgaagccaactataatctgtaaggctgaagccacaatcaacgcaccttgtgtcccacgcatgatgcggagaaatttcttcggaatataacaagcacatcatcaggtccaggtgtacacaactaagtgagatcagaaaaatgggagatggtggtacttccgacatacaatatgtggattaggttcattagcataacgtccagcaaggatgatcgaaatggtaggcagaacaaaggtgtatgacccgccgatcactgcaggcaacatggtaccaaagaaactctgcaggagggtgttgatacctgcaacgaacagcaatgtctggataaccactgctttgtcctcctaccacaaggaacagtaggaattagattgatagcttagaaccatgtaaccaacaaaatatgaatagtgaaatttcaaatctcacattgtttcctcccatttgtggaacaagtgcagttggtatgatcacagtggtaccaagcatgaccagataatgttggaacccaagaagaacggc

SEQ ID NO: 413 - DNA, 692 bp, Zea mays
tgctggagttggctgcaatgtgaatctatccctagcgtcccgctgccacatgcgagcctgcaattgtacatagtggaaatcagcactactgatgggatggaaactgcatgtaacagataataagcatgcattacaaattcaaactaatatataaacagaaacagaaaaaatataaactttaaaggatcaacgtccagagccctccgaaataaactctgtatgattatggatatccaaacaaaaaaatagcaatccaaacaacctgaacataacggacaacactgcttgtgtagtccactgttcgtcgctggacaggcttccgcatccttttagcaccaaaactgtcaccataagctgcagagaatcaaaattacaatgtgatttgtgtagttatgatatgcaaaggtggaccaagaagtctacagttaaatctcaaggaactcccggtatgtttaacttttaagtggcagttgatctcacactcttgagtttatacggactggcagtaataaggcaatacctgcgacctaatataggtatctacctactcttcccctgaccctagaatagagggaacaacgactaccagtgaatgaaatgtttagctgttaccgtcgtaaggaggctgatgctgctgctgtgacgggggggccgggtgtgcggcgtagtcgggcgggagattggtggaggac

SEQ ID NO: 414 - DNA, 722 bp, Zea mays
taattcgagctcggtacccctgcccccatccggcagcacggtgctgctgcagcagcagaagtagcctttgctcgcgactactttgttgcaccacttcttttcttcacctttttatataaactagggatggcaataagcacattttacccacgtgcccatgggtaaaaaccctataggatgcgggtttaagtctgagtttgtacccgtagataggtatgagtttgattcttaacccgatgagttttttctcgtgggtatgaaaatgttataaccgtgcccgcaaacccgcgtgtgtgtctgtatagactgtagaacatatgcatctcaattcagagcacatgcatctcaatcagacacggacggggcacatcagacggttgagattgatgagagacagaacggcagactacccttacagttttaatatagtagtatagattattattaattaataatatcttgacataaagtaaactagcatatacgattatcccgtaagtcttgtggcgcaacgtatatatatcgcgtgtttatatatgtatatataatataaaaagactagaggctactgtatctcagcctgtcagacgcacggtggcaaaaatcagcactccaaagatggatgagatatgcagggtgttattggtagggtgccttatcccttattcagccttttcataatacacttttaggtcctgtttatttgagttgcatcttttgca

SEQ ID NO: 415 - DNA, 710 bp, Zea mays
tgcaagcctgcaattgccacgaagcaccacagcaccagggccaaaaacgtctttagaccaccacccgatatacaatttaggtgctgtttggttcacgaaatgtaacgtaaagggtaatagtaatggtttacactcgattatggccgataataagtttaaatagtctgatatcaatttttagtatgatatctaattacggttgaactaaaacaaatatgatttaacgttatcgtttatccattacgttacaaatttttgaaccaaacggtaccttaggtcatgactcctccgaccacgccgttcggaaaaggtaccgacacgcggcccccgcagccatgtgaccgctcctccccacggctccccatgcgccgccccagacacagaacacgggaggcccacgcgatgtaccgtcctcgatgcccgccacgtgtagccccgccggatcgaacggaccagcgtgcgctgcgggagagggcaggaggcaagcgttcggccggccggtccaaactccatctagtccaccccactccactcggtcattctcctccacagtagcacagctagctcttgcccaccaccgccacgggcccacgacgtcccaacccggtcaccactaacgtttcgaccgttacgggagggcccctgttcccccgacgttgccgcgcgcgccctgacgtcgtcaacgctgctccgctcggtcggtgaacgca

SEQ ID NO: 416 - DNA, 765 bp, Zea mays
  unsure (1)..(765): unsure at all n locations
aggatccccctgcaagatgactaacaagcaacatgaactggactatgaaaaagtaccttagcatgaacgagcgaataattatcgtggcatttgttgctatggtatacagtatacttcctctattctatctaaaaatgtcgattagtgtatgaatagagaagtagatatatcaatgatattgaaaaccagcaaaaggggagagagagaaaaaactcatgaataaagcagcagtaagacaagcagtttataaacaaatggttttagttcaaccaaatttataaaaataataatgctgtttataatacgaatatcattagattattcataaaatatgttttaataatctatctatttgaagtcataaatgtaataaatattttcctttaaacttagttaaacttgagacgcaggtagaatcaaatggaaaatagtgtcttctgcgggcaagagacaagacaactcggtgaaatgaaacgtattggtagatgagctggccgtagaacggaatcgatacaaatccaagtccttctcaaatgaagagtctccgtaatttttgtatggcataaaaagtggctatggatacaatccgaaacaaaaggctgaagagcagcaagatggctgtgttcagagtttggcagacagcatgaggctggctccagcaaggacccctaaagggtcctctaccctaaatatagaggaccaaatttggtcctctatgtntnccagcagggggatnctntnagagtcgaacctgcgaggtcagca

SEQ ID NO: 417 - DNA, 754 bp, Zea mays
tgcatgcagttgcagccgtgtttgccgtttagcaacttcaactcgtcgtcgtacaactacggacagacgtgtacgcgcttgttgcgttcgtccacgacaagggcatgaagggcgcgctcgacgatttgaaagtgatgctcacgaggaacgagcccatcaccggcctcgccaaggtggtggcggtcctcgtgatcttcgcgctcggcgtcgtcgccggcctgtgggtgtctgccggggtccgccggtcccagcaggaaagcgtcgacccgaggagcaccgggttccatggcggcggcggcggcggcatctgctgccggcccgagcccaaccccgacttcgaagagttcgtggccccgacgcgcctcatgcacgacatgacggacagggagctgttctggcgcgccacgctggtgccggcggccgccgccaggtacccgttcgagcgcgtgcccaaggtggccttcatgttcctggccggccgcggcgtcctgccgctggcgccgctgtgggagcgcttcttccgaggggctgggcacgaggagcgcttctccgtctacgtccacgcgccgcccggggtggcgatcaacgtgtccgaggactcgccgttctacggcaggcagatccccagccaggttagtgattgtcgtctcgtcgcacatatgctgcatgcatgatgagtactacttgctctgtcaacgtgtccgaggtcgactctcgcttcgtctgatctgatcaggggtaccgagctcgaata

SEQ ID NO: 418 - DNA, 731 bp, Zea mays
tgcaaggtatacgtccgcccgcgcccaattcgccacccgatctccgccgattcccctcgaatttcccggatgatttggctgggctcgtgggattcccgcccctgccgccgctccgctgcccgctgccgcccggcggttatttccacgccgatgtttagatggattggctgagagctcggatcctactttttttgcgcgtgctggcaccagtgcattctttccaaatgcggaatcgcgtggccggcggttcggcctcttagatcgctgcccgctgtcgtcaagccccgagttttggagctgcgtgctgttgttggggtaggtgttctatgctgtcttagccgcggaatcaactcctcatggattgtactaattgataggctagtgttggattcttctgttgcatgacgcagtactcacttaagctgctcctagtttgcgcatggctaactgagaccgtgttacccatagtttacccaaaacactgtattttcccactatatgcagagtggagtttgaatatgggtatgaagatggttaagctgctggagatattttttctgaaatgtttctttttgttctgtggattaaccatggcaagtgtggcggtgtacttcacgcacgcaacatgtaacagtcgctcttgaagatctcacatgttgattctttccctgttcgtcacaggataaacttgcgtattttagaataaaggagctcaaagatatcttaaatca

SEQ ID NO: 419 - DNA, 718 bp, Zea mays
gcggtcgactttagaggatccccctgggcaggtttgatccgtgcgcgcgtgtctccgcccccaattttttttacctccttggcggcggtgttgcacatggcccgtggtgggctgcgggaaggggaacgtcgctgactcgacgccgctgctctgcacggcttatgcgcggcgcgtgcccggaatctgctcgtttgtttgctcgtttggtttgtgaatgcacgtggaaagcgtaattcctcccccgtggccgtgattttgccctcccgtggatcggcatgtgtttttattacgacctctctctatcgtcgcatctactgtactagtttttaccgtgcgcgcgcgcatgtgtgatgtgcgtctgcatcgtacggccatgttgttgaattgtcaattagtcaggttggtttcttctttggcgttatttttgcgactttttcccatggcaccacaacgagtggtccggaattagcttggtttattttcaaagctggccttttttccccattctatgaacgggcatcacgaatgctgcatagtgctgcggctgtaggcacatctctgtctgctgcatatcttttgtcgtacactgacactagcttgacgcacaatgtgaattttacttaccaattaaaagaatgaggtttgaagcagtttaatttattttctgcagttgggtttcaatttctcactaaagcagatgtgcttcttggaataagtt

SEQ ID NO: 420 - DNA, 773 bp, Zea mays
tgctgctagaataataagcgagagcgcgcgcgcatcaagaaacccaaccggaattcctcaaacatttctctcgattgtatcctgctgtcactcacgcactttctgctgccttttaggagtccagagataaaaggttgcatcattagcaagggaagcagaagctcgcgcccctacagtagaaagacaccccacctactgcctatataatccccaaattttcctctctcttggagaagatttccaccccacacagcaccaatgcatctcttttcaactagctcctctctctctctctctcttatgtaacgcatatatatatatatgcttatataactcatctgcatctgttatatatattttttactgatttttcattagcttttttacacttgcatgcagggatgctcgctcttgtgatttgctttggcatgaaagaaaagggaagaaggatgctttgttggtgctaggacaataatgccgggaggtattggcgtgcctcaatccgaaggcgtggctgactagcgcggcagccatgttcttggattgagccgcgtcaatatctccccttgcatgtctcgcatctactctagctagtgccttgcctctctgatcgatgcccctagctcatggagaagttgatgattcgcatatacaatcgcaagcaagctagagctgtctgttacctgccgaagagtaagatatatatcttctccacacaatgcaagaacatgcacaatcgcaagcagcaagaatgtatgttgttgccgtgggtc

SEQ ID NO: 421 - DNA, 698 bp, Zea mays
tgtggccgagaacggcgcaacaaacaagtggctgcaatagcatagcattgcattgcattgcatagagcggcgcaagaaacaggctacaggcgctgcatgcgtgcccggtgtctgctaccagcagattcagtctcttggtcttgccaacaagttactgccattgatttgcatgtggacaagaacaataatgtgtagctcacagattctcatctccaggatcatcagagcaagttaaaagatactacagtagaaagaaagagagacagacagacagacagacagggaagcaaacttgctccctgcactggagttgtttggcggattggcactaagccactaacagtaacaggggctggacttctcacctttacgctaaaagccggactgggagggcaaaaagcgaccgggtcccttttgagaatccaaggagatcaaaccagcagccaggctccagcatctctctcttcctcttctccctcgatgtgtgcagtggaacaacggacactgaacgtgtggagatggagactgtctgtcgaaatgcggtgaaggatggagtgactttactgtgctacgacactaccactgaagcctgaacagcaaaggctagcatcatatcctcaacgaggcaggaaggagagagcacagagtcctgctccggcagaaagacagagtcgctagcagagtgattgatagtcgca

SEQ ID NO: 422 - DNA, 773 bp, Zea mays
tgccggcgcgattagctgccttactccgtggatcgcgtgatcgaacaggagtgcatgctgtcccaaagcctgaactggattgtgtgtggggggttttggattgaattcagcctgctgcgatctctttgctgttgtaacttttgggatttatcgagccgtttgcactggttcgtgcactctgcatcgattagggcttgatggtttaacgcttcttgttttggcaactaattgatgcagcgccggcggtaatgcgaccaggaaagggatgacttcaattgacattcagctactagcctactatgctctgtttatgttctgaagtacacaaatgtgctgtatggactatggagtggtgaggacaaatttgcaacggttatttaggttggtcagtatgtggtagttggtcacttgatcacactagactggtggtgcagttgatctcatcgctattagcaatttagcatactcccactctaccctgcaaattcactcgattgatcacacaagtaacaagtttagcaactggttaaaatattctgattgaggtgatccaataccaatgagataataatcttgaatcatttctgtgctgttaggtatcgctgggatgttgtattcctgttcttgcatgcttacactttacaataccagacaattatttattttctagagcagcaactccaagaggctctctatattctccctaattgatataacgaaactgctccacaaccttaatctacagggggattctttaagagtcgacctgcagg

SEQ ID NO: 423 - DNA, 786 bp, Zea mays
tggtggtgcccgagcgccggcgagctgctcttggcgtagtaggaggacgggtgggcgccggcgccggcgccgccgtacgccaggtacccgctgctccacgccgccgggaccgccttggactcgaacccgtagggcgaggagtgcatgagggtgtgcggcgcggtcgcgggggaggtgaggtcgagagtgatggtggggcaggacgcggcggtggagaccatggtggttgggccgaacagcccggcggcggcggctgccagcgggtggtggtggccgtggacgagcgaggccgaggcggcggaggtggtggagcccgaggtgagcatggccgccgccgcggaggtcgtggacgccatggccgtcgccgccggcgggagcgggtggttgtgcgcgccctcgtacgtggtgatcaggatcgacgtgtcctccgcgcaccgctgcacctgcttcctcaccgggcactgcggcgccaccgtgcagcggtagtaggcgcgcgggcacgggttccccttggagatcttctgcccgtacttccgccattgacagccatcgggcatctgattgatgaccaccgaaacaaaaaaaaaaaaaaaagatttttaggtcaggaataacctaacactgtgtgccactgtggacaattttctcaagtttcataagcctaggtattattgtcacgtaccgtgggtgtatcgcatttgaccctgaccgaaaccctagccttcttggcctgctgctgcacctcgtcgtcaggagtgccgagcaagaattaggatctcaaacccc

SEQ ID NO: 424 - DNA, 700 bp, Zea mays
tgcagagttaactaattagattgtttggtgattaagaataaactgtacagtagtatatgatatgctaaacaattgttcatttggcacaagcacatctgcgcaccacaatttcatatatttcaagtctcccccccccccccccaaaaaaaaaccttatgaacatgtgtttagggtgagtaattgttttgagaaatcaccatatgctaagtatttggtgcctaaaaataagtcatcttctggatatacctgcttgttcagatgaaatggatcctattcgagttagggctgctttctgcaaacgagaaaatggttcatattaaaataattcaacagactagtttttttatgctccagaagtattagttgaacttaccttcctcccatctttcaaattatccttttgtaccctctctctatactctgcagtttgaacaaataagcacaatgttattttcccatggcatgataacaatggcatcattataagagaaaagatcaagtgttctcacatccatgttgtggctataagtatctatgccaggccaagtaaagctttgcttaactcaaggatatatgtattgacagaattatacctttgccttttgatttgcagtcggttgttccatttgcagcattttttctggtgctctcacaaacactcatcgcttgcgctgcaggaggtagctcatcacacatttca

SEQ ID NO: 425 - DNA, 684 bp, Zea mays
tgcatgcacacgaatttatgatgaaaataatgtgcaatgaaaggaaatgaattacacgcatagaaacaaaaaaattgtatttaatgttttatttccttcataaatataagatccctccaacagccatgcagctaaacacattaaatctaatttatgatatatactgatacaaattatactacatggtgtaggtatttatgcaattcggtacactgcgtaaaaaatctggcatgttgttcactggtggacgcatcgccgggttggagcgtaaaaaccttaagttttgagcataaaatctctcaattataagcgtaaatatcgagccaatgtgagtggttgatagctctattatgttgttattacgatcctatttttatggcagatccgaaaaacatggcagccccatgcatgcggtttctaattttatacagatccaaaaattatggtaaaattcatgcatgagtcaaacacgttctgttgtatgcgcgtaaatttaggaaagatatgtgtgacggtcttttattttaaatgctttatttactccataaatttaggatcgctacaacagccatgcagttagacgcgtaattattattttatgatatatagtgatactaaatatgctatactgtgtagataattatgcaattgggtatactgcgtaaaaatcttaccagggggatc

SEQ ID NO: 426 - DNA, 1032 bp, Zea mays
tggtaacagatttttacgcagtatacccaattgcataattatctacacagtgtaacatatttagtatcactatatatcataaaataataattacgagtctagctgcattgctgttgcagcgatcctaaatttatggaggaaataaagcatttaaaatagaaaccgtcacacatatctttcctaaatttacgcgcatgcaagagaacgtgtttgactcatgcatgcattttgccataatttttggatctgtataaccgcatgcatgcggctgccatgtttttcggatctgccataaaaataggatcgtaataacaacctactagagctatcaacctctcacattggctcggtatatacgcttataattgagggattttatgctcaaaacttaaggttattacgctccaacccagagatgcgtccaccagtgaacaacatgccagattttttacgcagtgtaacgaattgcataaatatatacaccatgtagtataatttgtatcagtatatatcataaactagatttaatgtgtttagctgcatggctgttggagggatcttatatttatgaaggaaataaaatattaaatacgattttttgtttctatgcgtgtaatttatttcctttcattgcacattattttcatcataaattcgtgtgcatgcagctggtaacagatttttacgcagtataccgaattgcataattatctacacagggtagcatatttagtagcagtatatatcataaaatggtccttacgagtctagttgcatggctgttacagcgatcctaaatttatggaggaaataaaacatttaaaaatagaaactgccacatatatctttcctaaatttatgcgcatgcaaggggacgtgtttgactcatgcatgaattccttttttgcgcgcacaaacgtgggcgtgggtggtgcaaccgacagcctggtacagtcggtgcgctgggttgaaccaggttgtagggatgatcgacctgggcttcttttaactaagagggtaccgagctcgaat

SEQ ID NO: 427 - DNA, 718 bp, Zea mays
tggactgatggttaatgaccctgttttgagaacgagaaaggtgtcttatagttcatttttattcttactatatcttttaatgccattgttttgctatcctttaacacataatggctatacccatgcagcctctatcagttgaattgggacctggaattcttggaaatatttttgatggtatccaggtgcgctgaatgtgacagggttcattttgcggtcatctacttttgttcttgtttttcttttaatttgcccttacctctcctctattgtgtttgcagcgccctctaaaaaccattgccattaagtcaggagatgtgtatattcctcgtggtgtttcagttcctgcccttgacaaagatgcattatgggaatttcagccaaagaaactaggtagtgacttaatgtagtaccacattgtccaaatggtcttgcatactgtttttgttatctctaagttgtatgtgatttcttgttatatttccaggtgttggagatgtcatcacaggtggagatctatacgctgtaagttcttaacattcattctgaagactagccgtctatgatatggactatggagatggatgccgttgacctgtgtttacatcctaatgattgctgactgtgtgtgttgcagactgtctttgagaacacattgatgcagcaccatgttgctcttccaccgggttctatggggaaaataagttacattgcacca

SEQ ID NO: 428 - DNA, 729 bp, Zea mays
tggggacaccacccggccaccctcacctctcaatatacataccaccatccaccaccttcatcaacccctgggcctggcactcatagctcgtttgtagcaagctagagagagagagagagagagtgggaagtcgtctcacgccatcagggagaggggagcgaggatcacatctctcgtagcgcgcgcgaagctatataataatggaggtggccatggccatggccgtgaaggtgctgctgagcctgtgctgcgtgggggcgtgcggcctcgccgtgtacctctaccacatcctctggctcgtgccgcagaaggtcctcgccaagttcgaggaccagaagatcggcgggccgcggccgtcgttcccgtacggcaacctcgccgacatgagggaggcggccgccgctgcgaaggctgcgcgcgcgtcggcacgccgtagcggcagcggcggcggcggcatcgtgcacgactaccgcccggcggtgctgccctactacgagaaatggaggaaagagtacggtgcgtacgtgtcttcgcccttctacgctttcatacacactgcatttgttggtgtgtgtctgggcacgcatgtgctacggctttctccatgcctagctggtttgaagtgtgctatgatgcttgctttactctctcgttctgctcgcttgccgctgttcgttgataatcttaaaatgtttcaccgctctagctcccaggggtaccgagcttgtt

SEQ ID NO: 429 - DNA, 719 bp, Zea mays
  unsure (1)..(719): unsure at all n locations
ctgagcaggtctctttgactgaaagaggtcttgttgatgtatctgccagttgcccaatgctggagtcagtcctctacttttgcagacggatgaccaacgaggcccttattaccatcgcgaagaaccggcccaacttcacttgcttccgcctatgcatcattgagcctcacacaccagattacattacacaccagcctcttgatgcaggttttagtgccattgtggaatcatgcaagggcctcaggcggctttctgtttcaggccttctcacggacagtgtatttaaatccatcggggcacatgctgaccgtcttgagatgctctcgattgccttcgccgggaacagtgatttgggcctccattacatcctatcgggctgcaagagcttgaagaagctagagattagggactgcccatttggtgacaagcccttgctggcaaacgctgccaagctggagacaatgcgatccctttggatgtcgacgtgctcaatgaccttgggcgcatgccggcagcttgcgcgcaagatgccccgtcttagtgtggaggtcatgaatgatcctcgacggggattccccttggactctctaacagatgagagccctgttgagacgttgtatgtctaccggacaatttcaggtccaaggtccgacacaccagcttgtgtccagattctctaaggggcagggggtnctttagagtcgactgcaggcagcaag

SEQ ID NO: 430 - DNA, 710 bp, Zea mays
tgtactgttgacagacctacagtccagtatgtttgaatcataaataataattatagagaaaagaagtcgatttcaagatgtgagacaagtgtaactcatttttgttcataagcaaaaacctgtccggcagtgataaatctccatcttgtttagattcctttgttccttccaatacaacataaccattttcttcactgctactagctgactttgtctcctatatagtgccatagaaaattccgtgtgtacagtttagaaataaatggtaactcctaagtggcagctccaggtcaatagaatgaagttaccaatgtggtaatgatccataaaaacaaaatctgctaacctgacgttcaaggagcaatcttgcatcactaacatgttgttcccagccatctactataattcgataggcttcatcacgtgacaagaaagatccaaaaaaatgctgaaagtaacaggatgagtgcacgtgatttaataatgtatagggcagagggcagaccaagtgccataagctcccacatgagtggggtttggggaagggatagcatccccacaaatgtggagagcctgcttcaaacccgcgaccaggacatttaataatggatacatagaagaaatttagacaatgataactcactcacccttctactaccagcaacaatttcaatggcattatgaaaaatggcagggtaccgagctcgaat

SEQ ID NO: 431 - DNA, 744 bp, Zea mays
attcgagcctcggtacccctgatggcaggttacacctgtttgaagtgccacatattcgtgtctagctggtttcaagctagtggacaagacacatgaagtatctgaactattacaggtagcagcttgctagtaggctgcctgaaatatgttcatatcaacacatttcatgcaatcagttgagatgatacatggtgacgttgaccaattctgcataaatgaatccacttggagcaaccgaggcataatagtttatcctccatttctttcaccttggaattgggactgattccgagctgatggtagactgctggttttattgtgtacttagagtagctgtttagaagtgatctatgtgttagagtggacgcaataaccagttcaacccaaaaacttaagctgatgggagaaggtagtcaatccactattccacttatacacttcaacaccctcactcacgtgcagccagagagaaaggcgtaaatatggaaataaataggtggagacacaaataaagtctctgccaggattcaaactcgagacctctggcggctttgtaactatgttagagtagacgcactaaccagttgaaccaaaagcttaaactgatgggagaaactagtcaatccacttatacactttaacactttggaatgtcctcaagatttattgtttggttttgttagattagcttggtagagaactacatctgctaaagtatagtttgagatctgccactaataaaac

SEQ ID NO: 432 - DNA, 673 bp, Zea mays
ctgcattaacgcccttgtggagggcaagaagcacataccgtatcgcaattccaggctaacccaactcctcaaggactcgcttggaggagcctgcaacaccgtcatgatcgccaacattagcccctctaacctttccttcggcgagacacagaacacgcttcactgggctgatcatgccaaggagataaaaacaaaggtttgatactgttaatctgtgagtaaaacattgcacattctactaagtaaaaaaaagctcatgacatagtggaaccatcttgttgttttgtagacgcaacaaaccactgtgaatgaggaggttctggaccaaccagactctgaaactatgcttgtactggagcttcagaaggaaaaccgtgtgctgagggagcagttggcgaagcaacaacagaaattactgactgccgaggctcagctactcacttcaaaaacctcgccacaacgatctcctgctcccccgtctcacgtctcaactctaggatcaactcaaaggaagaccagacgatctatcttggctgctggtggggggaactacttcagcacactggactcaaagaggcatgcagccgacaacgcacaggtcagggagctgcagaggaaagtgagcacgttggagtccgagatcgagaagatgaaaaaggagcacctactacag

SEQ ID NO: 433 - DNA, 743 bp, Zea mays
tggttggcgagtaatcctctaccttggcccgggtcatgtttgtttgttctggtcggggtttgtgagtttgtttttttttgtaatctgttttggggttctctaccccttttcatctttttaatacaaagatacacagctctcctgtgtgttcaaggaaaaaagtctatattgcagatatatctcaaattaggtaaacataaattttggatagtggaatttacttaacttatagatgactatgttaaaatagaatgtgcttatatatcagtctacaggtctacagtcatatcagatcatgggtccatgcggttgttctataatagaggaagaccacaatcgactctgattaaatatatgatagaattaggcttgatctgtcctagagatagcagagttagaataggagtcggttaaggcagttgtaactgacttggactccctgtcatgttataattctgatggcaatattttgccctatatatactcagccccctggcccccctcgccctaataggttaggatgaacagtttaaacctggcatcatgttttcttacattataatcagaggcaactccactcaaatctagaaccctagccgacgacaataataaatctccatggcatctacctcaagttctgctatgccaacgccccttctagggcaatccgtggcggtaaagcttaccaagaacaacttcacattctggaaggcacaagttccacctaaccttaggggcgcgca

SEQ ID NO: 434 - DNA, 745 bp, Zea mays
attcgagctcggtacccctggggaacagaggaacggcgcctcacggactccacctcctgctcaggtggggaggaagagccctgctgctccctgtgctgacgctggcgctcctgctcctcacgcaggcggtggtgcagtctctccaggtgactcgactgaccggacacagtgcggcgcaggggacgctccgcaaggcgagacggcaggaaaggaatcaccgacttacgagcagtgtgtctaagtcgagccatctacaaaagacaccgtaagcataagagtaagaacagaactaatatgacaagtgagtaaaccatagatagaacaaagtaaaattttaacaaggtataatatagtatatatatatatgtagtaaaacatagggttggtcgaggtgaccgacttttgaagtaacatcagaggtcaaggtgagagggaaggtcaatagtccttagtacgaccagtgctactctaggtcagcggtcctacagtcagcacgggctttgataccacttatgtcacacccggtttcagaaggcaaaccgaatgcgaactatgtacgtgccaggatcagaattcacgtacacagcgattacataaatgaacatcatcgcacagtgctcgaataataacataaaagggtattaacttattacatcacagagtcatagacatccacatagtcatcaacttaacagttaaatcaaagtgctagcgaaacgcagtaaagataaggccttcacaggca

SEQ ID NO: 435 - DNA, 720 bp, Zea mays
tgaggggagaggattggagggaggtgctatgcggcttgacagtggaaatgctagcgaagggccaggtcccgtgcttttggtttctgatgtcgtctccaagaagccaatgagtcaggttgaatcgagagatgaattggtgaacacaagtgaggctaggaatttggcatcacaagcagagagtatggacctcgacggcagggagtcatctatggaagcagagatcagcgcagagaacatggctaggttggctgggatgtctgcaggggagattgcagaggcccaagcagatattgtaaataagctgaaccctgcattgctggagatgctgaggcggcggggaagggagaagtctggaggcacgaaggatgtgggtaaggacaagggtctgaaaaactcagggctgcagaagaataaaagggctacaccaggggattggttgactgctggtgaacatactgggcactcctggaaggtgtggagcgaaagagtggagctgatcaggtcttgtaggttcacattagatggagacatattggggttccaatcttctcacgagcaacaagatggtataccacatggttttgctcatatgagctacatttgcttctgttggtgtggtatcctttagatgacaacctatatctcccactttcaggcaagaagatgccttcagaaagtgttgctgagcgtgatttccttagaacagaaggtgatcctgca

SEQ ID NO: 436 - DNA, 771 bp, Zea mays
ctcggtacccctgtggaatatagcagcctcagcaacaaataaaaaagttaaaataactgccaaagaagttgagaattcggaagtttgagctaaccagagcagaagaagccatgatcttcctcgcacaaaccaccaagatcattaccatcagggatctgcttgtcaaatcggactccaatttttgaggatccattatcttcaaaagcaagcatcactctgcctcgataaccataacttggtcccctggagatcaagcaagcaatttatataaacaaatatatgtattggactaatataatatggtgctagaaaaaatgtgatatggggaaagaatatctgatttcacaggatagtcgatacaaaagcaagctcataactgggttgcctatgagaagtctcataaactggttattcctcttactataaaacatgatacctaaattctgatgataacaatgttgatacctaaggaacaagcattggataaatctgaagacaagaataatatttgcaattaaagtacctttgtgacaatgaggatagctgagctggaccaacgtaacgcaccctatcacctacagaagatgtggaagcgaaatcgtgtttagaaaaacataactcaatagattgagtaataaagaaaagctaacaaaaccttctctgaaagtatagctcttggatgtagctgttgaggattcttgtttcggtagagatgcagactgcagagtggatgttcccacaatatcagcattcacactggaagttggagca

SEQ ID NO: 437 - DNA, 724 bp, Zea mays
attcctctctgcttgaggagagcccgagccatccccacaaccgtctggttgcgccgctcgacgacgccgttctgctgcgggctgtacggcgcggagtagtggcgttgaacgccctcatccgcacagtacgacgcgaactcagccgccgtgaattcgccgccgttgtcggtgcgcagcacgcgcagcttgcggccgcactccgcctccgcagcgacctgcacacgcctgatggcgttcgcagcctctcccttgctgccaaggatcatcacccacatgtagcgggagagatcgtcgacgagcagcaagaagtagcgtcgtcctcctggtgtggctggtgtcaccgggccacacaagtccccatgcacgagctcgagcctctccttagctcggaagctcgactgctgggggaaggggagccgtctctgctttgtcaacacgcagacatcgcagaattgctccacatggtcaaggcacggcaggcctcataccatctccttggcgctgagccgcttcagggcttcgaagttaaggtgcccgaagcgctcgtgccactgccatgccccgtcgtctcgacgagcagcaaggcagcaaggttgtgccaccttcacattgaggatgtaaagccgatttgcactcctgcgtaccttggcaagaaggcgacgagagggatcccagatcctcatgactccgtgctcgacctccacgcgcgaaccgttctcatcca

SEQ ID NO: 438 - DNA, 718 bp, Zea mays
tgtcctgacgagacgacttaagaaagcaaaaaaaatctgcacattttacttgcgtttgctcgaacctcgaatcggtctcgtgttcttgatcaagtacgtgctcgccttagtcgtctgagccaacaccactgtactttgagaaggtttttaaactccctccatagctgtttgcctcagatgttgttcctccctccctcgagaaacgagagcaagtggccgcgggcgatcgccggcctgcacgcgcacggtcacgccccaagagtctacgcgctttgcttgatcgcaacagtacgtgtagtgctgccagtgccactgccaggagatggcagctcagaagcttccgagtgcagccagcagccactgcatgctattgcttcgtggacactgtagacaaatttaattacccgtggctgcatcggcgaatacaaatttaattcaccgctgctgctctcgaggaagtcgatcgagatcccaaatcaattgtttttttttcacatccccggagcaacatccatggctagctcttcctagattgcagagaagccggcctgcgcatcggggcggctgctcggcgagctttaatcaaccgatgcagtgtccatccacagtactagtagaaatttggttccggtaactacctgaactgaacaagaaaccacaatggctctttgtatgtgccagacagacgtccggccatgcaggggtaccgagctcgaat

SEQ ID NO: 439 - DNA, 781 bp, Zea mays
  unsure (1)..(781): unsure at all n locations
gctcgcacccctgttggcgaggcacagtgcacgagacatggtttcaggctcgggcaaaagtgaacaattaacttgttatacagtccattctgtttattcagtgccttttcgttcccatgtttaattcgttgttcactgaggtgctagggccacaacagggggatggtgttggcgtagacttgctatcctacatggtgcattttatcccacatgtggacgagcttgatgtatatccacagagcttcagccaccattccctgaatctgaaatcaggtactacatcgcgtgctcggcccagacggcctttcggaagcagaccgaagctcaaatcaggtactacactgtgtcatgacatgatatcggcttacggagaaccgcaagtttagttggcgcccaaaaaagaaaacgaccgttccgtacacgtgcgaataaatagtgcaactactcagccaaaatcttgtccaatgaaaacgagcagtttccaacaacacccacccacccacccacctgcagtgcactgtgcaccccacacagcccgtccccaagtctcccagcagcatcggagcgagcgatcggacaacattttcgcgtggagcaagccgggccacgccttcctcttccttccacggatccaattccccatgcaacccaccgtgtccgtgtgggggtgagggtcaatgattgcggtggcatggtatgtaccctgcgtcggcggcgtcaatgccgcgccgcacccgtccaccactgacctcgcgccaggggtaccgagtcgatatngtat

SEQ ID NO: 440 - DNA, 754 bp, Zea mays
attcgatctcggtacccctgaccccgccgggagcgatgcccgcgggcttctccccaccgtacagtggattcccctctgggccagccccgccgccgccgaaccccgtcctcccgtggttcccgtggtactaccagcgcaccaacccgatcacggggtcgacgacgtcggcgtcctcacctgccatggacgcccggtggacagtcacagtcgcggtgcttttccatctgtccttgctcgttcttcttcgtgttctgtagagagtacctggctacccagccgataggcgagttaattaaggtgcttcgttttgctattttacttaaagtgctagaaacgtgttatatatagaatatattacttaagtttgtgaagtagtgttattttatttttggtgtaatttattttgtctgtgagtgacccctcacatgcataacgctctttttttactgtattctgagcaaagttttacatggttatcatgatcagattttagaggactagtacatttttttcctaccctccgagtcttatattatatgattgtctaataatgtttatttagtatgataagtgttaattaccattttatataaacttggttaaatttaaaattagttggaacaatttttatgtttgtacaaaaagtttatttgctgcttgatttcgttccttgattactaagcaagaaatttcgtggacagaagaaactgttcttgttgtttctaattacttttcagggggatcctaaagagtg

SEQ ID NO: 441 - DNA, 729 bp, Zea mays
tggctacttttttttttggccgccgaagcctaggctaggtgaatgaaggctgcaaccaaacagcctcttgatgataacgaaaaatgaaaagggcagttcaactttatttctcaattctttaccagtttcctttttattttaaagtacaatagtctctgcaatttatctgcgaacaacaagaagaacaatttccgagcttctgtacataacatagccgtgactacttcccaccaaaacacaatggtctccgacacaaacaattaatacctccaagaattttgtaaatttctgttacacacacgattgcttatccaaaatccatcaagtccacaccttaaatacaaagaagaattacatgcattgcatatgcaaaatcatatacaaaaattaggaaatagggagcacaacctcacccttaaaaactgttggcattaattaaacaataataaaatggaaataatgatgcgcaaggatgcaaggagagattgcgtacgactggaatcggagctcgtcttccgggacgctgtcgatgaggttgatctgatcgtacaacgagaaggtcctcctgctcatatccgcgtcccaaacaaatcagataagcaccagaggagaagaaaagcaacaagtcacatttcctcggtccagcaggagccagcgtatacctgagagacggaaggcgcctgagtcgtgcgctgccggagacgggatcactccgcagcgacttcacca

SEQ ID NO: 442 - DNA, 702 bp, Zea mays
tgcaacttttctatttggaactcctgagtggttaacatacacaattacacatgagttaatagaaaaagtggtagagctttcggatttaaaagcacactaggccaaagcatggcatcactcagtccatgctctcccgtggtacaagtgtcaccgttgtccatccaacagcaatgtgtgtggacgaaatctaacaggagcgaacagagtagttcgtttactgtattattaataactgaacttgcatgaaacggctgcactagaaacaaccttgtaaaaactagtcgtacgagatgcaggacaggcgggtgtctcgttcagcagcgccaccggaaaacaggcaaggaactggcaacgaatagtcgaacacaatgtcgcagttggtaatccagagtccagacgacggccggcgactcgaagccccgcatcccaacttgagcaccacagcagcattgcccaatccccgccctaatccgctggtcctactccaactacccgcggcgcattgcgcgatcctaacacgccgggcgagatccgaacctgcgcgacctggatcccaattcccacgagatccagacttggagaccctctagaagagaacgcgcgcaagggggaagggcggaggacacgggtacctcggcggcggcggcctcgatctcggcggccttctcgacggcctcctggcggatgaagttcgtcatctgc

SEQ ID NO: 443 - DNA, 742 bp, Zea mays
tggacacgcatgactgatttcagataaaaaaataataatgaatggatgtgattcagaattccagagcgcaatcaagaaactgtcgtgattcagattttcagtttcagatgcccagtacggcagtactgggcaaggaagccttggtccatccattctcagaaaaaaaaaaaacatctgccatggttcgcataagcttcaccgtcccgagcgaaacacgcctgacagttagctgaaaattggcagactactgctacaagagagctgaccaaagtatgtcagatccacaaaatcaaaactagagaaggaagaacaaacaatgccatgctttggtttggtaacggaacagaacaactagaatagcccaccatcccgttcaccggtaatcggagtgtcagcactcagcacaatgcagctacatgcacatgttattacattactgccaccggctggactacacagcgtcacactcacacctctttagaaaacaaaaggaacctgctttctatcaattccttctgcattaggttaaatagaagtctcggaacactaaacccaggatacatacaaaagaagaaagaaggaaagaaagcctattacctcaagccctaggaacagattcaatgaggcagcagggtgtcgctagcctaccgtatgtacagaatataccggttcagaatccatgacagcagcaactaccatgtaccgaagctgcagctcacatgctcttctgtgatcttctgca

SEQ ID NO: 444 - DNA, 659 bp, Zea mays
tgcctggcgcctgatgttgatcatggggtggctactctccaactctttgtacaatgcaatgcaatccttgtgcctcctattggcttcatatgccattgcaagccaaatttggatctagaagaagatacacgttatataacacaaacatgtctacatgattttagccatagactacatcacaaagatgcctacagaattcaactcactcaaaagactttatttggcatgaaaactacagaaatctcaactgcagagatactacctcgccaccgagtagagaggagggacgtatgatagtgagagcagcctccaagaattcaattgatcgtccatacattcctttcccgtacgccttttgacccaactcaaacatttgcttcgccgtctccctcctctccgcttgctccttcgctacctgcaaagctcgcgcaacaaaatgattttgtctcactctaccctcaccctcctgcaaacagcgctaaaactagaaccaggtgcatgtgcgtcacaaatggtagagaacatgtggaacttgaaggaggaggagtgtgtagtattggtatttgtgtttggtgaggaagaattggcgtgtgaagtgaatgactagtgagtgtgtgaaggaaagcgagctctgggtactaaaagttaaaggtaggaaa

SEQ ID NO: 445 - DNA, 744 bp, Zea mays
tgcaaagccaggccgccgccgaggcccccgaggagtcggaggaggagaagcgcgagcgtgtccgccgcgagctccagaaggtcctactcctacccttaacctttagtaaccagagctcgccttccttcacacactcactagtcattcacttcacacgccaattcttcctcaccaaacacaaataccaatactacacactcctcctccttcaagttccacatgttctctaccatttgtgacgcacatgcacctggttctagttttagcgctgtttgcaggagggtgagggtagagtgagacaaaatcattttgttgcgcgagctttgcaggtagcgaaggagcaagcggagaggagggagacggcgaagcaaatgtttgagttgggtcaaaaggcgtacgggaaaggaatgtatggacgatcaattgaattcttggaggctgctctcactatcatacgtccctcctctctactcggtggcgaggtagtatctctgcagttgagatttctgtagttttcatgccaaataaagtcttttgagtgagttgaattctgtaggcatctttgtgatgtagtctatggctaaaatcatgtagacatgtttgtgttatataacgtgtatcttcttctagatccaaatttggcttgcaatggcatatgaagccaataggaggcacaaggattgcattgcattgtacaaagagttggagagtagccaccccatgatcaacatcaggcgccaggca

SEQ ID NO: 446 - DNA, 750 bp, Zea mays
ctgattgggtattgcagccataagcaacatcttcttttggtctacgactacatgccaaatggaagccttgactgctatttgcatactcaagatcatggcagcaccaatctatgctgggctcaaagattccacatcatcaaaggtataggtatagcatctggtctcttctacctccacgaggactgggagcaggttgtcatccaccgggacatcaagaccagcaatgtccttctcgatagcgagatgaatgcgaggctaggtgattttggccttgcaagatcccatgatcatggtgctgatgctcacaccacgcatgtggcaggtacgtacggttacattgctcccgagttggccaggcttggcaaggcaaccaaagcaactgacatctttgccttcggcgtgttgatgatggaggtcacctgtgcaatacggccaatatgggtgaacaccaccgatggggagcctctggccctagcagactgggtgcttgctgcatggcaaggtggttccatcaccgatgccgtcgacccaagactggatagttatgtggatgaggagatagagttagtcctgaaacttggcttgctctgttcgcatccctcgccaaacgcgaggccttgcatgcgccttgtcatgcagtacctgcaaagcgacacaccactcccatcagactttcaaccgaatagtttactgagcattggtgtgattcaagatgaaatgcatgatcagcgagccatgtcatgtccatca

SEQ ID NO: 447 - DNA, 713 bp, Zea mays
ctgccggcatccgcacttcctaacaaagaagttcagtatgtccttatcagatatacatatattaataatcatgtaactaaaaacaaaatgtggccaactcagtgaaggggcactgaaaagactatgaacttttgcagagcagaccaatctaaacctccaacttactatggacgagattcttctcttagagataataaattgcaaagataataataataataacaacaaactaaatagatttacaaatagtacttcatagatgcatacgccaggtagattgtgcacataaacacttttaggaaagagtggcttccaaaggcaataaccatggcaacaattctaggatgagctgtttcacaagtggtggagaagttctaaattctgatgcccacagccacagcccatgggcaagcaccaacagcaacattagaccatttactccctctgtcccaaaatactattcgtttttagcccttggttttatgtttatattcaaatcgatggtaataaatctagacacatataaaaacaacatacatcaaatatagtatgaatccattatcaccccaaaatgaattttaatttgggacagagggagtattatttatagtactccttccacgccattttggcttgcactatatgtatctagaagaaccaaaacaacttataatttaggtcttgtttatttccttacaagattatataatcca

SEQ ID NO: 448 - DNA, 763 bp, Zea mays
tgagaagtggcaacagacaactttggctgtgcttgcgcgtgctttggcaacctcagaaaaaccaaaccctagaacaaacaactcttcaccaaggattgaacacaaacaaaaataatgcaatgaaacaaaattatgttttcttacattttgcctttatacatccaagacaagtttaacatcctttgaaataattgtgtaaaatgacaagcagctaagataataatagagtaaattattagaaatagtaatctgctaaagaaatatttcttatctaaccagtgaacagatgaatgacaaatatttctcagagcaaaaaaaaaatcttaaaaataaagttaacattgcttcatttacagcaagccataaataaaatatctatgtcatggataaaaacatgctctcacaaggacaagttaaaatcaaaccatgtatcacaaggaaacaaaaccatacctttactagcatccatgcatcgccccaagttgtccctaggatccatgtcatcctgtgatagaaaagattcaacattatcatccaatgagccatcttctagcaagcggtcaacatcatcctgaaaagaaaaaaggtttctgttatgataccatcatgattagatttgactaaagtactaaacaaaaaagagatgtatctcataatacacaaatatatgtgcataccaatgggtttgctggagatgtcaagctcccagttccatcagagccaaacattaccatgggtttagctgaaccgccattctgctgca

SEQ ID NO: 449 - DNA, 715 bp, Zea mays
aatcgatgaagcagtggatcattgttctgtcttcatgggaaataaagtatgttcctgcaacaatggcggcaaaccaagtgctggcatggttactgggcgttctcacaggaaaggaagctaccacagggaaactgaaaatggacaacatgtccgctgtggcactcagcaagacgtttggtaccatttcatccgtgaatgcttgaagaagtgagcatatctgcttcatccgtgagtgcttggagaatgggagcatttctgctgattttgttagcaccaaagactagctcgcagatattctaacaaaggcattagggagagtttggttttatgagctcattgcaaggattggaatggtcaggatcaatgagaaacacaagcattagggggagattgttagagtaatccttgtgtttaccactatctggctaagtattgatagtagtttctcctaaagctagctgcaggctgcagcggaaggtcctgggttcgactcctgcgggaggtcttcttaatattataccccggggctgtcttaccccccgcaggttgagttttttaaagctagctgcaactctgttccttatatacttggtcagtaaggtagtatatatgctgtcaggcaagtggccaactcgagtctgtacactgtaccactaagacaggtgctgttacagctagtagtagtagcagccaattttatttttgctagtgtaca

SEQ ID NO: 450 - DNA, 724 bp, Zea mays
aattcgagctcggtacccctgcgaacggggccatttttaggcgggagcgcgggcggcggtgctagcagattggttggtttgagtggttgggccggctcttcgaaacgccccgcggcggcgatgggatgcttccattccacggccaagcggcagcatcctggctacgaggaccccgtggacctcgcctcccagacctcctgtgagttcgccgatcccatctcttgccctacgcgtacgagctactcgcgtgagttcgagttttttttttcttatttagttttcaatgattgccgtggttggaatggaattggagaatggagatgccagatgtttcgtctagatatcggtgtcgtttactaggatatcttagatatctgtaggagcactggatgcatgctgcatgatccttgcgttttcggtaatttctaaattgccctctctatatcttgctgagtacgtgcttttcttttgcttatgtagtcagtgttagtgaggttgaggctctattcgagctgttcaagagcataagtggttcagtgattgacgatggcctgatcaacaaggtatattctattagtcatctctgtattccttgctatattgtcagttttgtgtatgaacatcaaatatgctcactagccatgttgtagttagccctcattgctgattgtacgactggaaagtgaagcttgctatcctacgttttgtatttttactttcctca

SEQ ID NO: 451 - DNA, 725 bp, Zea mays
gttacagctcggtacccctgaagaatttttacctcgcgtaatgtgagagatattaatattatcaaatttttccatgagccctcgtgttgctttgtaataaggcaccaacccaggcttacgtacttcataaatattactaacttgtcgaacaacaagctgtgagtcaccatatgctagcaaatgccgaatgtccatagaaagtgcaagcaagagaccacatatgagggcttcatactctgcttcattattcgagcattcctccttcatcagagagaaggaatgataaattgtttcaccttgtggtgtcttgaatactatccctgcgccagcccttctccttcgagaaccatcaggactagtctctacacgagacgctccatcaaaataaagctcccatggtgactctatgtctatggtaaaaacatcctcgtcgggcaagtctatcaccaacggcgaatcatctggcacaggatgagcagcaagaaaatcagccaaggcttgacctttaattgctttttgtggcacataagtaatgtcaaattccatcatgattactgtccatttaccaaggcgtcccatgagggccggttgatttagcacataccttacagggtctgctcttgccacgagctgtattggatgtgacaacatatagtgtcgcaacttctttaaggaaaagactagagccaagcacaacttctctattggagagtaattgttctcag

SEQ ID NO: 452 - DNA, 671 bp, Zea mays
tgccgccgcgacgggcttcgtgcgcgaggccttggggatggtgaagcgcagcccgctcccggcaccgccgttggagatgagcccgtgcaggctcctgctccgcacagcctccacctcggaggaaggcgaggacaccggggaaggcgaggacgccggcggggcggggcccttggtcttgatcttgacgatggcgttcggactcgggtccggcacgccgccaccagcgaggtcgtggagcagcgggaagaacggccatttgggccccttagaccgccccgcagagcgtgaccgctcagcgcggtatcgcttccgaagcttctcgaccttgtggcggcactgcacgccggacttgggcgtggcggtggggaaccgcccgcagcgcgcggtgacggcgttggccacgtcgtcccagtccgcggccctcaggttgcccttctgcagcgcctcccacctgtcgcggtacgcctcgatgagcgcgagagtctcctcgtgtgtccagcacggcggcggcagcctccggccggagcccacgcccccgagtcctatgccgccccccgaggaggccgctgccgcggccgcagcagccgccgcggcgacgggtgcagccagggggggcaggtcgggagatgagacggcatcgtccctggacgcgtcggaacacgaggaagaca

SEQ ID NO: 453 - DNA, 775 bp, Zea mays
  unsure (1)..(775): unsure at all n locations
gagctccgcgctatcatggacaaaaagaacaacattcgtaacatgtctgtcattgctcatgtggaccatggtatgttcagaacactgctctgtagcatatatatacatgcattgcttaacgttttcaagcctttttatgtgtagacttaatttgctccaatatttgagctctgtactgtacctgactgctaatacttctattcatgctgcattgtctactatagtcaatatatcccatgtatgaaataggcttattttttttgtcttgtagttaatgtattggttttatctaggtgttgtgttattggttcattctactttaaattgtaatgtactagtgtgttattaacttctgtgttttcaatatttaagctttgtatttacagccattgttttttttcttgctgcaaattttattttaggcctacttaactacgtaagtctagatatttgacccatgtaggaaatgggcttatccttttgtcatcttgtacctaatatactggttctctaggcattgttgtgtatgaagtatctgttaactgtatactctagattgtaatctattaatgtttttgttatcttttgatttggttgtctgtcccttaatactttaatgctctatgacacacatgttgaagttgctggtgatgttctctaggcttatccttttgtcatcttgtacctgatgctattattacttctttgcaggcaagtctacgcttacagattcccttgtggcagggggatcctctatagtcggcntgcatgcaaa

SEQ ID NO: 454 - DNA, 755 bp, Zea mays
tgcagcgccagggcgtcgtcctcggggcactcgccgctgacgttgtacgtcatgtactgcgccagctcctcctggaagttgcggcaggcgaaccccagccccgggaacagctcgtcggtgccgaagttggcgtggaagccgagcggcagccggtggggctcgatggcgagcttgagctcgccctggggctcctcgggccagccgccgaagtccttggcctccggcgtgtccccgtgcacggcgccgaggcccgcgagcacggactcgaggaggtacgacgacgtgttgcactgcgcccgcagcgccgcgagctcggcgcgggcgccggcgagcgcggcgcgcgtggcgttgaggtcccgcagcagcgcggccgagtcccacaggtggatccgcggcgcggacgccggaatgtgcacggacagcgacgcgccagagaagaggtacacggagacgacgctggtggcgatgacgagaagcaggaccttgagcttggcgcgccgaggcgccggccgtgctcggtgcccgtggccattggcggcaccacccatcccctcgtcggtagtgtggtgctgctgcgatgagtggccccggtgcttgggcgcgtacatggcggccgcgcgcaccgccgatcggcgacagctagctagcagcgccgatcgatcagtttactagctctacgccgatcaattcgacatttcggtatgcactgcgggatggttttcccagatgtgaagtgcaggggtaccgagctcgaa

SEQ ID NO: 455 - DNA, 687 bp, Zea mays
tggatgtgcaaataatgaaaacaaacgacggcgcaaaccagcaacttgccgcagtagctcaacaaatgtagcatgttgggtcgtttcaccatggggttcacaaagcatagcttcaaggacttccacaacagacagagataacaatggtgacaccgatattggcctcaaccggttaacaagaatcggaacatacattggttgcgagaatagtacagactttgcatgcatgtaggtggcatgggattctccccttgtatccattaagatagatgaatcacaaggaccaccaccaattagcatagccacaagtccagcagcttcagcagctactccttccgaaccattcctaagcaaacccattattctcccaacagcgacaggaaacgccatcatatgtgatgccatacttcttgatgtaagtagcctgtgtaagcatgcaacaaaacccattattgttgctgctgcttttggagatggaggcggaagaggaggagcatcagcaggaaggctatgtggtatggtcggaagaaggctgattaaggccattaagaccacttcaggtacttcaatattgacaggcactccagtgtatggtacacatgcattaaactcccttattctacgccacaatctgatttttgctccaggaacagtgtcagatgacgctacagcctctttagcaggggt

SEQ ID NO: 456 - DNA, 702 bp, Zea mays
tggaagttccgaggagtccaagacgatgatagatcatgggtactacatagatagatggacattgtcatggacacacagctctaggaaggactagagtatgggttacgttgcattgcatcagaattctgaagcgttgcccggaggagattggtttactttgcgctctgacgcgtgagccggtactagcaatcagggtcagagccgagggtgacggatcgtactcgctccttggtgtgaagaactgaagatacaatctattctacgtttcgagtatatttcacacatttggtggaataaattcatttctcatattattactaatccttatcttatgtgaaataaaatggtgatatatgaattcattctatttcacaaatccaacaaaaaagtaagcagttagaagatgatagactgtctcaatcctaaaaccaaacacattattaacttttcatgttgtctttgtgagaatcgctttgataaaaaacgtataaaaccaacgtaaacacaaaaccagtcaaactgtccacacacaattactatggtgctcagatttgcctcgcaaccaaattttcatagaatgatagaagctttatggcgtccggaggtagcctagagctagtttgctgctgacgtggaggcaataaaggccagaaaaaacagctctctagcgatgcactaacaagggtaccgagctcgaactcg

SEQ ID NO: 457 - DNA, 735 bp, Zea mays
tgctgtacacaggggggggtgctacaaatgaattaatatgtatattaaataaacaaaacaaaataaaacaaaaaaacaaatccggagcggtggttagatgatctgcaacagaacggggtcagggcgtctaccctacaagctcatcgaactctgctaaaccctacgagtgtacttccagcgcggtggcacggcgaagccgcagtccgaacaccttagaggaagctcaaagcgacatcgtctcgggcttctcggcagcggacacaaggctccagctcgattcgtcccgcatcacctctgtacagtgtgcattggcatggggaaaaaaaattctgcggttattgaaacagcttctgataaacctggtagcctggcctcttccctgtgtgttgggcgctgacatgcatgggattgggagcgttccatgaatcttgggttcatgataacagcatctgaactaagagatcatctgcggcttctcagatgcacaagggcatctgctcttcactcggtcccttcaggcggggtctcccaactaccaggatgtgtctggcgattacctaatttcacaactgcgcttcccaattacggtctgaggagaatgcctgttcatcccgatcaaagaaatgcagcacccccatgtcacaacctgttaactccaccaagtaccacaggcctctacatcagagagagcctggaacccaaaaaactgaggcacctggcgagcaaggtgcatca

SEQ ID NO: 458 - DNA, 651 bp, Zea mays
tgagaattgacatttccaaccgcactatgaccccaggactgcaacctccgcgccaatcttttaagcttcaatgacaccctctccagagggcaagaagactgaaccggttgatcccaggaagcagcaacctcctccaaaaaacccgggagtttaggccaaaaattctcaaaatgaaacctacgcctccccctaagatccgcattgagtttaagaattagaggacagtggtcagaaatttcagaggcactgctgtaaagaaaacaatcagggaaagcctcctcccaacaggtagagcaaaaaacatggtccagcttaactagggtgggaaccgcccgctgatttgaccaagtaaatcttctaccattcaagggaatctccttcaaatccaaggagccaataaggcctctgaaattgcccaaagaagacctgttaatattagaattattcttatcttctgacttgtaaatctgattaaaatcaccagctactatccacagacccacacatgtatttctaatatctcttaattcttggagaaaagcagatttcaaactgtcttgatgaggaccatataccccagtgaaccaccaaagaggaccatccgcactttgcaactgaactgaaacagaattgtttttgataactgaggca

SEQ ID NO: 459 - DNA, 723 bp, Zea mays
tggtgatcggcgagatcgggcccagcgcggccacgccgctccaggccgtcaagctgctcgccgtgtacctctccggcgacggcgggaacagggtcggttcttgcgatcgatttcccgtgctctattcaatccgtatgaatcaccacttgtctgaacacgcatcgatcggtcactccctgcctgacttttatacgtgcgtcctgcgatcctgatgcaaggaatcggtggtctcgaggcttcgtgagctcctgtcagacgcggcggtcgggagcaatccgattctccgggtgatggccggcaccgtcttcatgcacgaacgcgattacgccgaggctctcaagcacaccaactccggtggcagcatggagctgtaagcatatatatctactcattcttcctcccttcagcttgcctcgtcatccggttcctgtcgttgctgaaaccattcgtgtcctactgtcatgttccgtatggacggactgggttgcctctgcggcctgcccgcatatgaagcagacatagtagtttgatatacaagtgcacatctactatctttcggtctttcccccgatatgatgctctaaaatgcccaaaactctgacgactagtccttcaatttggcgttgcaggcttgcgctgaatgttcagatataccttcaaatgaacaggacggaccacgcagagaagcagctcagggtgatgcagcaggggtaccgagtccga

SEQ ID NO: 460 - DNA, 788 bp, Zea mays
  unsure (1)..(788): unsure at all n locations
tcgagctcggtacccctgtcccccgaagacatcagcccggcccgaggcctcggcaactcaattccggcgtcggtcccgccagtggacgacccggccaggctctggccgaccaagtcttctttttgagccaactctgcctctgtccgtgctgacaccgctacccctggcttcggctcatcgaagagcggctgaggggttcctttaactaagcaagagaagcctcggacagcaaggccgaccgagccgagggattcctacgcctccgggatacggatacctcactcgtcacctttgcacggggcgactcacgcttggtgaagcggttcagataaccaacaggcgagtcttagtgcttgaggatgaggaaaaaacacagctccgcgccaaggatacatacatgttcaggccccgacagccacaatgaacaaaagaccgacattcaaggtgccattacaaacggaaccccggttccacctccgcaggaacgaacaaccccacacgattggggggcctgcggagcaacagaagaccgacgaatggcttgccgtcgcccgctccagcagcggcgacgacgacgacttctgcttcggggggccaaacagcagcagcgatgacctcggagtggatgctgctgccatgaggccctcgcccatgccctcactcgagaggcaaggacgggcagaaggccatagagttggaggtcagtccgtgtgcggcaccggctatctcgtcggcggaagaacttcttccagggggtnctttagagtcgactgcaggcagcaagctgg

SEQ ID NO: 461 - DNA, 721 bp, Zea mays
ctgtcctccgaggacatcagcccgacccgaggcctcggcaggtcaattccggcgtcggtcccgctaacggacgacccggccaggctccggctgaccaggttttcttttcgagccaactctgcctctgttcgcgctgacaccgctacccctggcctcggctcatcgaagagcggccgaggggttcctttaactgagcgagagaagcctcggacaacaaggctgaccgagccgagggactcctacgcctccgggatacggatacctcactcgtcacctttacacggggcgactcacgcttggtgaagcggttcagacaaccaacaggcgagtcttagtgctcgaaaatgaggaaaaaaatacatacatgttcaggccccgacagctacaatgaacaaaaacactggcattcaaagtgccattacaaacggaactccggttccacctccgcaggtacgaacaaccccactcgatgggggggggcctgcggagcaacagaagaccgacgaacggcgcgccgtcgcccgctcctgcagcggcgacgacgacgacttctgctccgggggaccgaacagcagcagcgatgacctcagggcggatgctgctgccaggaggcccccgcccatgcccaaactcgtgaggcaaggacgggcagaaggccgtagagttggaggtcggtccatgggcggccctggctatctcgtcggcggaagaacctcttcca

SEQ ID NO: 462 - DNA, 808 bp, Zea mays
gacttgcctagcccctgcaggtacgactgtgaaaggatccccctgcaactctccgaggctgagtgatgccaatgactttaccatcctgacaaagcccaccatcatacaaaaattgtggaagctctgcatgaccaaaataaagaaaatattgattcttcaaagaaccaaagtagaaaaaaagatatatgtttctgcaattacaaatgaatatgtaaacaaacggattcataacatgctgtttctgaaacaatctgtacaaaacctaagaataactttcctaagaaaccaatcccacattctcacttggaacgatattacaatgaggttacagtgggaagagtccatttcacttctacagtagccctttcgttaatattgtaacgcgatcgcgattgaatacgaatgtttccaaacccacagacacaagcagtccacagcacccacttccactaatttacgcccaaaaggccaaaacatttacatcctaatcagggtctaatcacataataacaaccaaaagtttcggaaagcagcatgcttctatcaattacttcatctaaaacaacaactgtgaaaaggggggcacagaaacagaacttacgagtagttttgccactcccagtctcaccaacaattatcagtgtgtcgttattcctcacctcctcaactagccttttctccactgaaccaacaacaaacaacaaaattctgctccctgagctaagatcccaaaaggtatcaaagacatataaaagctctgcaggcaaacctgacgcaatggggagcgacttgcgctgttgtcgaatca

SEQ ID NO: 463 - DNA, 724 bp, Zea mays
attcgagctcggtacccctgaatgggcctgctggccctcaccacccatggcgttggagctcaacaaggtgccaacacctccggacctggattggccttcgttggccatggtcccacaacctcccgcgccaccgcagccaccaccacaccccgaaccacagcctccggacttggcattgccggccttggggtcttcagccatcatgggtccacaattgctaccacagccgcctccacagccagcagtctcagtgtgcccattctcaccacttgcaacgactgtgcgagaagcgccagagctcgcatgctcaaccttgcagttcgccatttctttatcatcaccaccgaacacggcgctgcaagtgccacattgtgctagattggatgccacgctccctgctccgacggtctgtgtctctagcaccatgctagtgtcggatccaaacactgtacctttctgaaccatggcaccgccgccaagtttcatactgccatcgccgtccataaacaggactgatatggagatccatggaagtaggagccaatcctcgttcacctataagaatgatgatcacagttatgttagtgcaaaaaaaaagaagaaaattcaggtttcgaaatggtacgactgatagaagtgtaccatgataagctgagcttcagtgtctagcaaggcaacggctttgccatatggatgttcagcacagaactttacagcagtaaca

SEQ ID NO: 464 - DNA, 714 bp, Zea mays
tgcaagaccaattccaagtgtgaatgagtgagatcatagaggagtagtacctgagagtctgatacttaattcccaaggttcatttacctgtagttactcgctttttctggcctccagatatgcctctcaacatattgtttccaacgattgtgtcagcacagacatccaaccccaagatctggaatttatcggatgtaaattaagcattagcaatgtattacatttttaatcttctgaaaccattaggaacatgggaggtaaatttcttggcacttcagttgggtgcacctttagaatgtgatttgtgaccacatcagccttttggtctcctgtagcagcagcctacatgatgaaaaggttgatgcatcaaacatgtaattgtaaagtcagcaggttaaaaagaacaactagagccgactgaaaggtgatgcatggtttcctcaaaccttcatgtaggtatcagtttctttatcaggtatgattcctgcgtccttttctctccttgacaattcaactagcaagtctgaacaatttgtttttatcgaatgttaataattcaatattaaatatgctactgagaggagttttggattgtctgtttctttccttgtcttaccatagcgatgaccacttccttgacatcttgcagagaaattgactgtctcacgaacagtcagttctcccatgtgtagatcatgttggctgacataagca

SEQ ID NO: 465 - DNA, 772 bp, Zea mays
agcccggtacccctggtatgtgtccacttcggtagatgcctctcctgttgattgatattgatgatcctagtcctcacttgttctttagctggcaattcaacactttcagatctaggaccattgactttaagaacaaagtgccaatgatagagcttattagcgtatagagtcttctcaatttcatttggtgtctacttcctcagttccaaattgtgaatcgttttggcttttactatgtattaactggtctttgatagttgttctgtttgacttatgactctccgagcaaatagcaacgttcttgcgctcttacgaaagagctacgaaagagctcttatttgcttccacatgtcctgacaccacaacatttcactgatggggcgctactttgttctgtgcatgaagcaactgctggggttctacgatttcaagagcaagcagcccgaagcaacgtgcagggccgcaatcttcgccctgcacgtgaaggaagagctagcatcctggccagaacagagcacccggcagaggagctggctcaccgttcccgaggcggcggagcggagccgctacccgtggatgcaggaggccctcgtgacaggcttctccgcctggctcgagaactggagaaacggtggtggcggctgcggcggcggcggctgcgtggaccgaactgagagatgacaccactttaaagcatcagggttctctgatgctcggtagcttttgtttactttgtcgctttacagccatcttcaggatgacagtctcctca

SEQ ID NO: 466 - DNA, 779 bp, Zea mays
tgctggaataaacggtgtaaactggaaggtctatgagattgcagttttatcacagaatccttactcgtgctgagggttgaccaagtcaagtgctggttctagatgatcccctgtgaacaaaggcaacagaaaaattggtaaaagcaataacaatgaccgaaatgtagaagatgtactaggccattttcggtgcatttccacacagatgtttgttctcccttttctcctttataggaaaaacaacatatgcttgttcctttcgccttttctcctttatgaaaaacaacagatgccttgtttcactttttaccaatacaactatattggttattaaaaaaactgaaatattattgacttggccttcaaggcgcaacacacaggaaaactacaaaagatattgatgcattttcatagataaaataagtaacaactatgaaatattttcacatgaatcatgccttgcactagcaagattctagatttgtatctatgccagtgcagggcatgattcgtgacttttcctgcatcaaatctacaccattgtaaaaaatgtgcatattttttttggtccacctgtgctagatgcatcgcaatgacctagtggcccggtaaagcatatgaccatttatgaaagaaaccacgtcaaaaaagaatgaaagttcgaatgcagcaccttgcagggagagcgggacaaggcagctatgcatctcgtgccacctccaacccttgatgcggccatcgtccccgcagggggatcctatagagtcgacgtgcaggca

SEQ ID NO: 467 - DNA, 688 bp, Zea mays
ctgggtttctactctttatacagcaatgtgagttgtgttgttggctgcctccttcgtacctgatcagttgagaattttggatgtaacttgtctatgcatcttgctgaagtagcagtggtagtggtctgaaagaagggggggggggggtctagtattcataggagtattttctcaaccaaactagaggagtgctgtcattattttttctacgcaagtacatgaatgccatatgagttcaaatgaacctggttctagttatcacgagaattcttaaccaaaggcaatgccaattgaaacatttacacaaacatagtggcatataaaagttctttcagcagtggtagtcttgtttttccccccttgtgcgttggtggtgtaacctggtcacttgaaatggcaggtaccttcttttcagagagcacgacatactggggaagctggaggagtagctctggtctctggaccgttaaaatggagttgtttgaaagtaggtatgcaagagttttgccacggcttatctttctttttttgtgtgcgggggaacaaatgagaaacccaacccttgtgagaattcaataacactgcctcattcttgacatcatcatttgggatgtcaccatgcttcatctgattataatgtcttgaagtaattacggtcgtaagatggttgtgctggcctggacctaca

SEQ ID NO: 468 - DNA, 817 bp, Zea mays
  unsure (1)..(817): unsure at all n locations
tgcatatacattaataaaaacatgtccgttcatgtcaagaaaaatatctacctaatattaaagaataaaaagtgtttctttcaaccacttttttattcccaaaataaccccaccaccacctaccggtccctctcatgctgatcgtcatagcccaaaacagacttcgtccgtagacttgtcttgctcttgtaagttgcacatattgtcatgtccgactctaattaaataaacaatttgctttcctgcttgaagatgaacgtgctacatctagactcaacaaacatcatagacgtttctttctttattggtgcttattgactcggtcacgtaaacttctcctgtgtatactaaaccttcctttctctcctcttgtttgtggtttccatgtatcttcctgatgtcatcatctgtcatactgaacagaaaaaaggcacaatggtttgcattggctacaatcatgtgtgcatgatataatatatatagaaggaatgtgaagggagagaagattgaattggtcagcatgcagatcgctcagaacagcggggcaagatggcagcggcgatcgacgtgatcggccatggcgatgctctgccgcagccacaggttgagagagggatggacggatttgcgacagtgagtgaccatcgtccctaacccggtaactcctgttcatcctagcttgcaactaatcaatctaatgtgtctatttgtttcaaaaaaactattaatttgtcccaattaaccagaatgcatgtatggtgcaggcatgttgacgtttctcagggggattctntaagagtcaacctgcaggtcagca

SEQ ID NO: 469 - DNA, 716 bp, Zea mays
tggacatggacacgtggtcgatccacacgttgctggacgacagcacggagacgccgtcgccgtcgctccgcgtgcgcagcccgtagtgccgcttcgagtcgcggatcatgccgcccgagtgcgccttggagtcgtggatgtgcaggttgtgcaggatcacgttctgcacgttctgcagcgtgatctgcgcgaacatgatgtgcacctgcgcgccccgcccgtcgatcgtcttgttgtggttcacgatcagctcctgccgcagctcgatcaccatgtcgcgcgcgaacacgatccacagcggccggtcctggatcaccgcgtgccgcagcgtgcccttccgcgggatgatcatctcgtcgtcgctcgggtctctcaccacgtacagcttgccggccgcgccgccgacggttctgtggccgaacccgcgcgcgcactgcgccagccgcttccggtccgtcgcccagtcggcgcggcagcgccagcaccggtcgatggggttggtcgccatgcacgggccatcgtacctcgccagcgcccgccgcgtcgtggccctcagcacgtccgcgttgaagcggttcgtggcggccacggggtcgctgacgtaggcggcgaggttgcgcgaccgagccacctcggcgcgctccgcccagtactcctcgtcggaggtgacgttattggatgcctgcgccgcggctgcaggggtaccgagctcgaat

SEQ ID NO: 470 - DNA, 732 bp, Zea mays
cgaattcgagctcggtacccctgcattcactaaccgcagatgtcctctgccactataatatagagtagggagagaaattttccttccccggaaggtaccggctgtacatattaggtattggttgtttgtgcaggcatttgttggcattttgttgtgcatcgtcttcggtctgtattgtttgggtcgaagctgtaaaatgtaaatggcattttcaaagatggaagttttgtttgacaaatacatcggtcgtcatcagcttgtcttcctgagtttctctcctgctactggttctctcccaaccagccaatcactatactgaaggctgcctgttggtgtggctttatctgatgaaacggcttttgcctgatgtcacggagcttgtttaatgtgtggcctggagcatattgcgacggcacctaactgccgcaatatgttaatcgccccccaaaaggtccaaagcgatgcacttgattgctgctgtttaaactaatgccagtggttacaaacgcctaatcctttggttcttgctcaacggagcctgccagtcgctttgtgtttgtccggttcagtgcttacaccagtggctcgcaccctgcctgattgtttattctgttggcagttgcttgagccatctgaattctgatcacgagactaccgagagagaagtttaatgctacgaggctttctttgatcgctgctccatttgaaagctgatgccaaaggcatgaaaca

SEQ ID NO: 471 - DNA, 701 bp, Zea mays
cgactataaaggatccccctgcaggcaaaagatcactgaaacacaagcaaaattgacacaaatagtacaaacataatacacggagggataatattgttcctgcctttagttctatgctaataacctgaagttaatattacaattctgcaccaaaaacctcctcccactatttcccaaaactcaaaagggatccagttgttccctttctttggcataaccaaggaaataaaccattaaaccgacaccttattccggggatactaatgacctctaatatatgaactcatcaggtatattcacatctgacctgatgctaaccagaaggaaccgagcggaacagacataaataagtaagacttgcacctgtttctcttatggtggatactggatcttaaaggagcatatcagacttggcaggcagtctcctgtagaagttgaaaggcactgagggcatcctgctgcggaaccggggatgtcgcagcaggtaaagcatggctatgaccatcaaaacctggaacggcgtcacgtacagcacaacggcgaccaccagggataagaaaatgaagatggcggtggcccgagggtccctccagctcagcaaagcatgggctctctcgccttgtgtcgccaggtccccaaccacagcctgcacacgacctccaacgctcctcagcctgtcatagcgcattcttacaatttca

SEQ ID NO: 472 - DNA, 771 bp, Zea mays
  unsure (1)..(771): unsure at all n locations
attcgagctcggtacccctgggtctgccatgtttggctcaccactcaccagtgatcgcacgactgtttacatgaatgcgatggtcctgatgcaatgcaaggggtggaatgataaaatgagatgggatattacgatctcttaatggtgtgtttggttagagagtcaactagaattgagcggctatattctactttttgagaatatagctgttatattccgtgtttggcaaacagaataaagtcgctttattttttgtttggttaaagagtaaaaacgagcggagtcgctccgttctctgttcggttggagagccatatgagtgtcaaggaggtaggagagggaggagagcgctcgtgtccaagagagttcctagtcaaaattgaatagcagaggatttaatctcattcaatcctctccgatccccttgaaaccggacatgtacttaatggaaacccaacatccaaaaaatagaaatggatctgctctattcttctccactcctaaactaaacataccctaaataaggttatttgattcagggtcagtggttggaacaggactatctcaatgttgttttcagttgtctctcaaaattggagtgaaaaatgaggattagaggacgtccccatcctgcctgtcctaagctgtccagtaaacaaacgcatcccaaatgaacataatagtagagcgagcgccatgcccatagttttttcattaattatttgagccccaagtatcttcaaaccaaatacctacaaacatatanagcag

SEQ ID NO: 473 - DNA, 739 bp, Zea mays
catggacgcgaagcagcatttgctgccgcagttctgggagataatgccctaatggagaaagcatggcaggacacaggaatgttagctgaggctgttttacatgctcaggtaggttatttgtttaattgaattctctcatgctcaaccctactttatgagctgcataccattatggttttgtccaataacacatttccgtgtcttcaaattttcatccatacttccatcgtcgttattgcattgtccaccattttttattgggccgaacttgtccacactttgtatgattttgatatgctcactagcctaataaactctataggcccatggtcgtccatcattaaggaacttggttataacatggaacaagatgctacagaaggaactggatcacacaccgactgtaaaaaccgatgccgccgccgcattcttggcttctcttgaggatccaaagctcacaagcttgggggaaactgagaaaaagcctcccattgaaatacttcctcctgggatgcctcccctatctgcacctccgatcgtgattaaaaaggctggagcaaaacctggtctccctaatgcagcaaaggcgtcaaatgggcctataggtgctcctatggctcaaggtgctcccatggctcatggtactcctggggcacaaggggtccccatgaatcaagttcctccatcacagggcagtcatgacgaggcaaggccatcagatgctacagtggctgatgca

SEQ ID NO: 474 - DNA, 704 bp, Zea mays
ctgcatcagccactgtagcatctgatggccttgcctcgtcatgactgccctgtgatggaggaacttgattcatggggaccccttgtgccccaggagtaccatgagccatgggagcaccttgagccataggagcacctataggcccatttgacgcctttgctgcattagggagaccaggttttgctccagcctttttaatcacgatcggaggtgcagataggggaggcatcccaggaggaagtatttcaatgggaggctttttctcagtttcccccaagcttgtgagctttggatcctcaagagaagccaagaatgcggcggcggcatcggtttttacagtcggtgtgtgatccagttccttctgtagcatcttgttccatgttataaccaagttccttaatgatggacgaccatgggcctatagagtttattaggctagtgagcatatcaaaatcatacaaagtgtggacaagttcggcccaataaaaaatggtggacaatgcaataacggcgatggaagtatggatgaaaatttgaagacacggaaatgtgttattggacaaaaccataatggtatgcagctcataaagtaggattgagcatgagagaattcaattaaacaaataacctacctgagcatgtaaaacagcctcagctaacattcctgtgtgctgccatgctttctccattaaggcattatctcc

SEQ ID NO: 475 - DNA, 676 bp, Zea mays
ctcgggacccctgcatcagccactgtagcatctgatggccttgcctcgtcatgactgccctgtgatggaggaacttgattcatggggaccccttgtggcccaggagtaccatgagccatgggagcaccttgagccataggagcacctataggcccatttgacgcctttgctgcattagggagaccaggttttgctccagcctttttaatcacgatcggaggtgcagataggggaggcatcccaggaggaagtatttcgatgggaggctttttctcagtttcccccaagcttgtgagctttggatcctcaagagaagccaagaatgcggcggcggcatcggtttttacagtcggtgtgtgatccagttccttctgtagcatcttgttccatgttataaccaagttccttaatgatggacgaccatgggcctatagagtttattaggctagtgagcatatcaaaatcatacaaagggtggacaagttcggcccaataaaaaatgggggacaatgcaataacgacgatggaagtatggatgaaaatttgaagacacggaaatgtgttattggacaaaaccataatggtatgcagctcataaagtaagattgagcatgagaaaattcaattaaacaaatgacctacctgagcatgtaaaacagccctcagtaacatttct

SEQ ID NO: 476 - DNA, 747 bp, Zea mays
  unsure (1)..(747): unsure at all n locations
tgtatccgaagttttcatgtcgtcatcagtatgtcactgtagataccacagcaactttggactgaatatgcatggacttccaaagatgaaaattttgcatgtgcagtacatttttacttacgttcttaatttcttgcaagatagaatgattattcttattttaatctctgcatggagcagtgaggttcctaatattgttggttcttgctgtgtagaggctatgtgataatgatccaggggtaatgggtgcaactctatgccccctctatgacctgatttcggaggaaccaaattcgtacaaggatttggttgttagtttcgttaacatcctcaaacaagttgctgagaggaggcttccgacttcctacgattatcaccaaatgcctgcaccatttattcaggtacttgagttaaattaaacattatttatttgttaggtgctgctaggttgctattgcgagttatgcttcttttatgggtttaagctttcagttgtcaccatgctatccggctatctgccttagattttgtttctgtcatcggcagataaaactattgaagatacttgctgtgcttggcagtggtgataaacaagcaagtggacatatgtacactgtattgggcgacatattcaagaagggtgacactgcgagcaacattggcaatgctatactgtatgaatgcatatgctgcatttcatccattttcnccaaaccctaagatgctagtggctgcaggggtaccgag

SEQ ID NO: 477 - DNA, 753 bp, Zea mays
  unsure (1)..(753): unsure at all n locations
tgacggcgctgattgtcaagttcctccatcgtaaagcggtggctcctctccaagatggtcagcgaattactggaatctcggtacagtctgtccaagttgtcgcgagaagcagcaaggctacgtttttcttcctacaagcaaaaatcaagctcattcagaattcaagagcatgataaggcgaagcacaggttcgtaagctaccttctcagagttaagctgaacatgaagagaagagctcagagcgttagcgtcatccaaagccgcagagacctgactcaactcgatctgactttgagaatacttctcctcgaagtcagcacatcgtcgggccatttcagcttgatcttgagaatgtttttcttcaagaactatgatctgccgagtcatccctatcaagaagtattcaaacaaaacaagatcagaaggttaaacaacccacggacaagagcaaagaagaagaagaaaggactctaaccagcattgatggcctccaactcagacacacgaccccgaagcaacaccggattccaacgcccgagagatgatgccacttctggggtggaagcgccctgtgttttcagttgactggccaatccattcaccaaagcctgacgagaagaacaggtgagcataatgacagcaattcatgcaacataaagatcaaactagagcacagcaccgcactggaggtggaaaagaacgaagggatccccaagccaggagaaancaggggtaccgagtccgaatcgtata

SEQ ID NO: 478 - DNA, 758 bp, Zea mays
tgccgcttcagaatttttctcagtttggacagcagtgtcggtttggacttccgtgccctgcatttgtattgacgattccatactctgtttgggattgggtgtagccacacatgaccagcaaactagtgcagggcgtttcttcaccacagcatgagtatccgctgaaggcttactcccagcctgccaaaaaccatgaggaatcgactcagaagtactagtagacataatatcgtttcatctgtttttattagaactagtgcttggaatagaatttttgtagcgaaatacctcgggactctgggattgcagcatgtctacatccacaaccttagatcttggatcagagacaaagggcacatgggatcttatgaaactcacagaacggttcacaaaacctaagaacctagtctgctgaatttgtctgccaaggtcatgtgcccaagacgatgacataacctgccaacacattcagtacagcagtaaatatttgttttcttttaagggcagaaaattgtttgaagagtagttatccttccttctaaacaactagttaactacagtattcaatatgattctgtgttccactttgcttagatactcaaatatcagcaaattaacgaactggctgaaaggtacctacctctatacgaagcttggcagcagaaactatgccaagagatggcactaggtcgtttctgttaactatggtggtaacaaagtctttacccgactcagccaagtcccatgtcatgcaagca

SEQ ID NO: 479 - DNA, 724 bp, Zea mays
gttgccttcggccgaagctcgatatagaggatccccctgcaatgtgcttacgattttagataagatcctcgggctgttggtgtttggtgtttttctactagtaaattaagctagatagacaatgaaaggttacattgctcgtttagataatcaagtctcactgggttgtagtagtggcccatgttagagtaagcctttccaaactacaactcagttgcggccaccttttttgtagcgcttgtgagctctaagtttggatatataatttgatattgggagctaacctgttaggctccatcttatttttgtcttgcatttgcagcttttgttttcaaattttggtttgttgaatgcgatgcgtgttccaggtttgttgtttttaattttttgtttgttgaatgctttgcatgttgcaggtttgatcaatgtgctatttcccctttatcgatgaaagccgtcaaagatgctggatatgaaaggatgactgaggtgcaggaggcaactctgcccataattcttcaaggtcggtgaaaatgcaaaagctattgcttaacattataaaattaaatcttgggaggtcttgaaggtgacatttcaatattttgttgccatgtaggcaaggatgttcttgcaaaggcaaagacaggaactgggaaaacagttgcctttttggtattacttcttgttcttcagtcacatggttaatctgatgttattaggagca

SEQ ID NO: 480 - DNA, 797 bp, Zea mays
tcggctcggtacccctgtaaaaaatcacaaagcagccaaaaagtcccggaggcggaggcacatgctatcacgacctggctaatttggtcagaaatagaaaatgaagagaaacaaaaattctaaaaagatcatcgtttaagacatgaattcttctttcctgttaagggtcaagatacatatttcgaccatgccgcggtcttaagtttagccactaaatttaaaaccactctcttgatacttcaaacagaagatataaaatgttgtctaaaatttaaacctcagaaactttagaggacacaagcgaagtgatctaaaattctaattctcaattctagccaattaaaaattcagaccctctcacatcccccaataaggctggcgatgcattagcatatactcatggagtatttggtttggagaatcaaccaatttcttaatagagtagcgagacaactttattccacatgctaatactaattattaacttagtgaaataagatggtgatgtatcaacttatttcattcatgaaccaaacaaacatactgaagagtgagaggatggactccgtttttcaagccaaacatcctattagcaaacaacaggtgcacataatgcctcaatttacatactcttaaacactgcacggacatacatcatttcatccacttatgtcgatcaagaggcacgaatttgatcacttgtgctgcacaattttatcaggtccatcagggtagagtaaagcacttccagggaaaggtaccccaaaaaccttcgcttctctgactctggactgcca

SEQ ID NO: 481 - DNA, 785 bp, Zea mays
tgggacctactagctaagctagcgatatgatcctgctcgatcggacccatgcacgtagatcactgtgctgtggttttggcccattgcgcaagcaagcactgacggccgatcgagaaataacgggtcctctgctgccggcctgcatgcagacgcgttgctctcccggcgtccacacacgtccccacgcagagagagagagagagagagaggggcgcatccatcagtgcgttcattcgttgcatctaaaccctaatcatcgaattaagcagcgcgtcgacagcggcctgatgatggatcgacccgccactgattgcactgccggtgccagatgccccgtttaatttgtgcctaatgatatatggcgcccctgccccagacataatgcatgcatataacacgtctagccactaggtagtagatagtagcctgtcagtcagcagctagctagctagctttggctgcccctacgggcggttgcaggccaggcctgcatcccgtcccgtcccgttctctgtacctgccactgccagcgccgttcgctgttgccagccaaagcgagctagctagcagcacacacaccaccaaataatgcacgcattcatgcagcgagaccaatccatccttccatgcattgatccatccatccatccatgaccggctttttccaggccacggttaattttcgaaccaacccgtgtgtctagcgtatgggacgggttgggttccgcatgaaggagaaggccgtacgacgacgttgcaggcttgcaggggtaccgagctcgaat

SEQ ID NO: 482 - DNA, 749 bp, Zea mays
tgccggatgaaacacacacagttgccttaagaaacacagctaccggatgttatcatcatctagagtgcagggttcagttccaaaagtaagttgactctttagcaatctctctcacgggcatagtaggtctaggttgacacaaccagtcaacgccctcacaaaaggatgcccaccctgtgcatcaaaatactattttagaagaaaccctcctccattcgctattagtaccatatcagtgttccgctatgttctagtaccacatcagtgttccatgtcgacggcatcagatctgcagatggacacaaacaaatgaaggtgtggttagtaattcagtatgacacacaacagttgtgtgtgtgtgtgtgtgtgtctgtgtaagattgccagcatcagtagcctgcccacttcttcctctccatgttcctccacttgaccctcaaatcacatggcaggcgcgtcttgtgaaacacacgacggccatattgcagtatctgggtccatggtattttaccattattatgtggagagaattttgccatcccatcctggatcatcacagtaaaaaagtataatactcatggccaggcgagacataattacacactacaaacctggcctgggaaaagccagcgctagagacagtgtttcaacaatgaaaatttacatccaaagaatgattaccctcaaaatagctacttctttttctgtccaacagagttgtttgcgtcttccagggggatcctctagag

SEQ ID NO: 483 - DNA, 812 bp, Zea mays
atttcgagctcgcgacccctgaagaagctacggctataggaattatcaatctgcaattacagcctgggttagtttggtaatgcacaaaacagagatatgtatgttgccttgtctcacactttgcaataaatacatttgttgatcattctgcaatcacaaactttgcgcctctgttccaaagtattacagtaccaaaaacagttgccggcctgctggatgctgcttcaggcagctattaccattgacctataaaactataggtgttacaggagcagcaccaagaaatagtcaagcacatttgcagtttcagtcacataataacaaagccttttacccccaaactaagttcagacagaaagatgatatacatagcactaagaagaaacataacgaacttcacaatctacacgactaatccactggattagacaattgttatcaaatgatcttccagcaaattgacataatataacatcgaaaggtagctcaacaacactaaatacatgtccagttttaaactagatcagaactaaaaaccaaagaaaatatttacatctgaagtggttcacagtaccagcgcttcaaattatgtgcatccttggtgtccaatcctccaaacacgccagggctacaaccaagcaccagcaggtgattgcattctataacagtaggaatattagaactagatctacacatcccaagatcaagaatattaggaaacaatcaagagagcttgattgatcattaaaagagacagcacttcctcttggctgaagatatccatctcatatgctcatatttcttgttaatca

SEQ ID NO: 484 - DNA, 1180 bp, Zea mays
cccttgctggcggcagcttcggagatcccaggagttcccagggcgcatgtatgtgccctgtaagttgccggcgaaggcttggaccaggtcgtcccagttggagatctgccctggaggcaggtgctccagccaggctcgggcggcgtcggagaggaacagggggaggttgcggatgatgaggttgtcatcgtccgttccacccagctggcaggccagccggtagtccgcaagccacagttccggccttgtctcccccgagtacttggtgatggtagtcggggttcggaaccgggtcgggaacggtgcccgtcgtatggcccggctgaaagcttgcggaccaggtggttcgggcgaggggctccgatcctccccgctgtcgtagcgtcccccacgcctggggtggtagcctcggcgcaccttatcgtcgaggtgggctcgacggtcgtggcggtggtgctcgttgccgaggcatcccggggccgcatgcgttgtgtcccgcgtgcgcccagtgtggaccgaggcttcccgcatgaatcgggaagtcgcggcgcgatgctccggggggtacccttgccttcgggaggcagagctttcggcccgccggaccgcggcatcctccaggagattcttgagctctccctggatacatcgcccctcggtggtggatggttccggcattgctcggagtagtattgttgctgcagccaggttctggccgaccccactggaagccgggggcagccttgccatggcatcgttggcgatgcggtgctggacgtcctgggccagatgacgcgcttctccagccggtgctcggcctacccactcctgcccgatactttgccgaagctgcacaagttgtcctgcttcctcgtcgagcctggcctgcatctcgcggatttgctcgagctgtgcgtcctgaccccccgcagggactgggaccacagctagctcccgaaggatgtcaacgcgaggcgcagacctagggggatcgccgtcctccgacataccaaggtggttgccttcgtcgagaccccctagatcgacgtggaaacattcgcgacttgggccacaatcctcgtcgtcaaagctgtggccatcatcggagcactcgggagaggcaataaatcacatgccggtcatgaagtccccgcatgggcactgggagttattcgagccc

SEQ ID NO: 485 - DNA, 730 bp, Zea mays
tgcacttgttgtaaaccgacaccattaattcaagtattactcgaagtaaactttgcttgataaaagaaggaacgattgcttgataaaagaaggaacagacaggggtaggatacctaaacatctcctgatgttggagcttgctttgataggctgttcaagttcaacggcgttgtgcttggtttaaggtctttggtgccagtcgcagtggtgtttgatgtcaagcatgccaggctgccagttcgtcacaatatgaacagaacagtggtgctttccattttactgtttgtagatttaggttaaatctggtagcacatgtttgcagaataaatccgatgtagtttccttcagcctattcagatacgagaggagatgacatatacgtccggttccaatttgcgcttgacgtgcgaggagctttgaagccaaaatagtttcctaacttgttgaaacaaccgctgtaagagtcaactccgaccaatgatttcaagtcgcctggtcgaaccctgagactgaccaggtgacgaccaaggtgattagtcgaccatttaggattttaggattagagcagtagcagccattagttcggcactagcaccgacagaggtaagccatagacggtgtaagccatagagacagacaaaatcacataacagaactacagagaagggggaaccttgagatgatgagctcaactcgtcactagtgttgtagacgctcgtgatatagagca

SEQ ID NO: 486 - DNA, 921 bp, Zea mays
tggtagcgtcgttttcctttcggtgtataacagttgacaacaacagcagtgggagatatttggttttggctgaaaacacacaacttaatttgcagcagcagaataaaataattagtttctatctgagctgacgaatctaaatgaacttatttagaaatacatatgttttctaatatatctttaaatctagtttagtttaaaaataagtttgaccgataggcatgctataaaaacccttgttttttaacaacgcgtgcacttggataaaaaaactactactgtctatactctatactcgctggtgtagtggtgtcgacgaatttcgctgcttgttgcagaaagaaacatgacaaacgagaaatgtcgcaaacggagcggacggcatctcggtagtgcttgtacgttcggtcctgttgcacggcaactgtctaatccgccacttcgttgaggctattgcaatgtcactttgcaacggccactgcaccctcgtcgtctagtgattccgaaccaatctgcaatttcatggactccaccaccaccaaaatccaggttccggaacgagcaatggacagtggaccgaacacacaaacacacagacagacacagccacctagcatgcatctcgatccgtttcgtgcgtggccccgtgccgatgatccaaggaggatgccccgccacgagcgattctgacatgcataatccgcctgtcccggcttcaggtgactcctgactcgggagtccttatcggccgtacgattcatccatatccatcggagtgctcgccgctgcgcgccaagctatccaccagcacaacagcattgggcattggctggctccgaacggcggaagcggaacggcaggacgaggacgagaaagtgccgggcaggggtacggtgctgcaggggtaccgagctcgaatta

SEQ ID NO: 487 - DNA, 777 bp, Zea mays
attcgagctcggtacccctggctcccacggcccgccagctcggaccacgccctcgcggggccccgcgtggcagccgctgcacggtggccgccgtacctcgcgccgtcgcgctcgcaggggcgggacgcgggagcggtgtttcgattcggtggcgttctcgtaataaggtacgtgaaacggagggctttctaggcgtcggggtagatgctgcagcctgcaatgcagtgcaggggctccaaaaaggacgagaccatggttgctggctcgctcgctcgctcgaggctcgagtgcgtttctaacgctgcccacaccacaccacacacctgaccagcctagtcgagaagaaagaaacctccggtctctgggtcaggttctcgccgagcacgcgatttcacccgtcctttcggttcaggtaaccttctcccgtgtcttggtctggattctgattcccacctgctgctgttattggcttctgttcccccgagtttgtttgatctgataggttgccgtgtgctcgctgcgaccggtttgcgatctctgaccatgctttgctttcgttttcttttcttttcgtctcgtcagatcttgtttcggattcgacaggcgagggtgggagttatagaggagagccggacatttcggcgcggtatgtctcttggttctctcagtttttatctggtgtttcttgtttccgcgattacgtgggctgcgctagtcaagaacttctgtaggaatcttggatggatcggtttgtggcctgcaggttctgaggtggca

SEQ ID NO: 488 - DNA, 809 bp, Zea mays
tgacatcgcctgagactttgcaggtatgttatgatatataagccttcagttattctcatactagatctaaatgtttttctttttttccagcaattactcttatttcagcagtctttattaggacagcttggtcaacatcaacctaaccagtgagtgtttgtggttcaacagtacctggatttcattaatgttattattatttacttacatttgtttgtaacttgaaactgtacggtgtgattattatgtttcttggagttcctttaattgtttgatttgattcaggggtagagacaattcaggcagtgccacaggtaaactcctggttaccttttccctatttcttcttcacttggatcagtatattgctatatcaggttgttgagttgctcttttgtgctgctgtgtttttaaagtaactattgctttgctttgcatacagtacttgattgactgtattcctcgaggtttcagttgtgcgatgagtttggcactatgggaaaaaaacagtcaatgattgccattgtctttttactatagtgtcaaattcccaagagtgcatagcataagaacatttaatttctagaaactaatataccaacagtcagcaattcaaattctgtcaggtaatgcatgtatatttggaaatggaattagtttgggtatgactatggaattgcatggaagttccttaggccttgctatagttgagaaacactgggaccatttaaaagaatttgtagagtgctactttacaaacaaagtagcagcaaagagaatgttctagctggctgcggacagccacagca

SEQ ID NO: 489 - DNA, 715 bp, Zea mays
tgccagcttttgggggattctttatatacccctcacactctctctcttcattcacttctgccctctccatgaattcttggctgaccaaccttcaaacaagagcattcaattcacctctcacacccgaaatcgcatctccttcaattgattgaaggacccttggtgtgagctgaagtcgatctaacttgttgttgatttcatcttgattctccctttctcttcatcttttgagctcatcaaaaacttaaatctttgtgcggatttgttactcttggaaccttgcgttccttgacggatagaggttgcttgtgagtctccaaatttgtggacgaccccaataagtttgtatcacccgctcgttgagctaatttgagaagagattgccttgaccttggtggtcggcttgtggaggattagggttggaaaagacccagccctttgtgggctcctcaacgaggagtaggacacctttgtggtggttaccgaaccttgggttaaatcgtgtgttcttggtgtgctcttggaaagtgctttaaattgttgattagttcatattcgattatattgtgtgcaaatcgtgtgaaaacaattcacaccgatttgtcacctattcgagtggattttctctagggcaagtcttaagcaaaaatctctcattactttgacacacttatttaactgtttatttaatctaagttgagcaggttcaaactag

SEQ ID NO: 490 - DNA, 748 bp, Zea mays
tggggaacatatagaactacattatatctgtactgtttgttttgatgttttttcactaaaaaatgtttttgctaactttctacataagcatgtgattattaaactgcttgcctcgttgagaaattacaatgagtaaatacagatatactagttactcatggttcctttatatgatagcagcagtagggcactagtaacactgggaccacttgtgtgtatgcaagagcgaaaagcaacgaagagtagagatctctgaaacaagtacatcactcacagaggaaaaaatggtagaacctaccgatgttaataccaagcatagaaggtagcgcgtgccactgggccccatcttcttgagtaggatagaagcgaggaaatgcagagatttgaggccactcctcctctggtccgctgcagccaatccaccgccggcaccgttctggctgaaaccatccccattggcggccaatgcaccggctccgccgctgcgactcgcctccgggcgcctcctccgccggcggctctggctcgagcgggcgtacgccagagctccaccggcaagcaccgcgccggagacaacggcgagcgtcctcctggttggtggcgcacaagtgaggaaacaggcgcggcaggaggacaggagacagaattaaagtagggaagttggcgagtgatccgagccatccgaccgaccgaccgacctcctggaagcgagaagcccccggccgcggtccgtcaggggtaccgagct

SEQ ID NO: 491 - DNA, 689 bp, Zea mays
  unsure (1)..(689): unsure at all n locations
tgcacgcaccacaccacgcacgcgtacgcgcgcagacgatcaataataatccatcgcacaaataaaccaggaagaagaggatatatcatgcatatatatggagactaaaatataatcaatgctacgtacacaaatcgggacggtgcggatgaatcggctatcgttatcggatcaattgactcggtgcaagtatgccaagtatgcctaaagaacatttctttattaaagaaagaacgccgcgccaccacacactaaagcggcccttgcgtctactggcaagccacaaaaccgatgcgataaagaaaatcgacgtacgtgccgcgaacccgcatcgtcacaaaacatcgccaaaaaagataaacagatcagggtgcaagtgcaagtgtgcaactaggggggtgcatcgatcggtgattattgcatgcatgcgcaagcggtgcaactagctgcaccatgataccgacatatgcaagagatagaactagcttctagatgtcatttttgttctttgaatctaactcgtcgggttttcatggactattgtatgcaagcaagaggggggtatggtttaaatcagatgagtgattaacaacgtacgtaccctcatggaggcgttgcggaacttcatggggcggtaggcgtgcgctgcctgcgcgtcggcggcgaggcggtactcgtgcatgtnccag

SEQ ID NO: 492 - DNA, 757 bp, Zea mays
tgagctgcgggttctggaattgaatcgtgttcactgatgccgcaggataaggttcttctcaactgctcagggggcggcgtgtgcgggacctgcatcgtcgaggtaaatccaatgcaatgcagctagggacattaataaatgatccagccgcgcttgacactttgccgcttcgctaattctactgcaggtggttgaaggcaaggaaatgctgtccccgaaaactgatgtggaaaaggagttgctcaaaagggtatgtagtccctctgaactgtttgtcagaagctgccattttttcgtacaaaaaaaaagaataaacttgcaaaaatgccagtatctttttctaagtgaaagaagatgttgtcaccggagcatgctcttggattgatgcgctgaccttttcgcgccaatttttcagaaacccaaaacgtggagattggcgtgccaggcaacggtgggcaacgcagattcgactggacaagtatgcacaatcgtctttcacgtagcgtattcctaaaacatggtagaaaatcaaactgtccgtacgtcctgaaagttgctctgaaaaaacactctgagatttggtatttgcgcagatgatcattcaacagttgccgaagtggaagatacacgagtgggacaagtaggggttactgctttactggtcttcaagagtgctctcgtggccatactatagattacatgcagtggaaatgggaaaaaaagaataagaagcagggggatcctaacagtcaggctc

SEQ ID NO: 493 - DNA, 709 bp, Zea mays
tgcattcagaacaactgagctccatgtatcgaaaaccaactaggattctcaggcatgtttgaagaacatagggacaccaatgctacgctgtggtaccaaacttttaccaacgggacttgagagtggatgaacacaaagttcagttaggatctttatccagaaccgcaacagtacgagtaccatagatgatagatgtacagttcagttcttctgcacgagtcagtgggatctgtatctcaccttgccggacccaagggtgaagacaaacggcatgggatcgccggtctcgtccttgtgatcatacgtcgaatcgaagcgccatccttgcttcgctgctaatctcccataatagtgaaccgcaacctgtgtagtgttcatacacgggcgtgagaaaccacgagagccttccgcacaggtttcctagaaataatacaggccgcaaaaatggcatctgtgtaccccgtgcgacacgcagcttctaaaccgtgagaagaagaaattgtagcgagcttatgtggatcatcgagtgataagctagatcaatttgcgggtgtgatgtgaacttggttagctatagatcggcgcagctagtgtagatcggcgcgtcattacctggtcgccaacggtcgggatctctcccgaaccttcccggaggtccagggccttcacgccgccggagcccggaatctcggcgaacctgggggccgca

SEQ ID NO: 494 - DNA, 767 bp, Zea mays
tgccggagctgcgcgtccgccgccgccgccgctggcgtcgtcgccgtcgcggcgtactccgcctccagcgccgcccgcaggtggcgcatcaccttgccgtgctcctcctgccacctcgcgtgctccatgtcgaaccatgccgcctctgctcgaccatgcatatgcatggacgcaatattcatcaacttaacttaacttggagcaaacgtgtgtaagcgcggaatgcatgcaggagatataacaaagaggagagctagctagcatgcatgcatgtacaagtacgccattgcatgcatgcgagcagttcagctagggttaatttgaatgcatgcatgtgcctgggcttagcagtccgccattggaaccagatagacctccaccaccaaatactgctccctgtggttgatttgtttggcgacgtgcatgcacatagaacaagcttagttagtaattagtgtgtctatggaacaatataataataatacgagtatctttaaataagactacatccacgaaaaggatatagctctcactttctaggagcgaaataatttaagtcgatttgaccaagaactctaacaccaatatttattatacaaaataaataagtaacattaaatttaattatgaaatatatttttatactgtgaacctatagtttaaaacataaatgtacgttgatactataaactttatctaaatttaagctatcttgacttgcacaaattttatagttgttgtatcgttttatggatggagagagagca

SEQ ID NO: 495 - DNA, 694 bp, Zea mays
tgctcactgcctgtatttttctgtccatatggaaaccaatagtccatgattgtacacctcaacagaggtcagagaaacataaaagagaaatagatcaactcgcttaccaactggtttctaatgtcctttaacctcctgaaaaaatcatctttcaggctttgtgcctgggtatcaaatattttacggtcttcccatatgtcaatctgtaacgttgagaaaaagaatatatgagatgaaacccaaaaaaaaaaactgttggaaagcgagatataagcccataggttatcatcccaagtgattaacttactatggatctaagacttatatgagtatgcattactttctaacttttccttaaggattcatcagggcaagtgcaagacagaataatgcagaaagcaggataggtgctaacgtgcaagctaatctatactaggtcacactcacacatatctactgatgctatcttgcacaattgcacctcaacagttcactagggcaaatcaaacagtgctttgagaaagcttaacatcagtctttccaaaaggcagcacagaggggaagtatggacagaactaaggaacaaaagaagaaacttatatctaagagggatcacaaaatggtgagaaaagattgtttcgttcctttcttttaagtggtgcagcagagcacagcaggggtaccgagtccgaat

SEQ ID NO: 496 - DNA, 743 bp, Zea mays
ctgagaacgctctgcatagatggacactaccttttttgttgtttgcaaaacataaaaagatagagctggtatatatgtttctcattgtaacgcaccaaattttctgatggaaacagaatactatccctctgttctttttcatttgtgtgttttagttagaaaaaaaaactagtaggctataaatattggcaacgactgttatgcaagcagtcattatatgcaagcgtgcaagcaaatcatctgatctattcgattacgatctaaccatagatacaaccatggtcgtatctgtatgcataatattggagaacggacaagtaactgtatgcatgcaccaggttgccgactcagagaaaacgcacatcttgtcctggggagggagctcgtcgaaaatgcccgcggcttcgtccagccggccgacctcctcgggggactgcagtgaccagaaccaccggtgggtttctggcagtagtggcggcagcgggcggccgtccacagtgcagaggcaccaccactcggcaggcgccgagaacagcaggtcgtccacgcgctcccccgtggcccggaacgcggccgagagaggaggctccggctcgcgggacagcacgacgttccggagcctcgagcgcctctccatcaccaccagcaggaggaagtgagctgccgaggaccacgccgacgatttctgtgagtgaaaggcggttactaggccgacatcttttgcgggatcgttgctctctgca

SEQ ID NO: 497 - DNA, 659 bp, Zea mays
tggaactgcaacgtcatcttgtgccgcgccgggaagggtacgttcgtgctaccctactacaggatcgtcgacgtggcgttccttggagaagacacgctgtatggaatcaccaccggcgaagaactccttgccttccacctcggcgaggatgacgacggcagacctaatgttgccaggattgagctggtcatcaaaaacacgttggccaattattattatgatgaatttggatggttgtggccagcagaagtagctaacgacactagtagcaacaacgacgaggatatggatatggatgacgatgattatatggaggaggatgatccggcagtcgtcgatgatggtgacgacgaccaagctgatagcttcaacggcgatgagatggtctcggacagcgaggtgtttgatgggtacggcgacggcgaggaccttcaagtcaaggacgagttatatctgggacgatacctggtgcggtcgctgagcggagagctgctgctcgtgaggcaccaatggcaatcatgcccacgttcccctttctacactcgcaaggtcgagttcttcaagggcagattttaacgccggcaaatgggctgccgccggtggatatagccaggggggggcgatcctttctgagtccctcgcacaacaagtgcgttcgc

SEQ ID NO: 498 - DNA, 719 bp, Zea mays
gttcgagctcggtacccctgcatgcagtgcagcgtgtggtgtgcccccgccggcattattccttccctcctcttgtcctagctagctccccccactctgatgagatcgatgatgcgccatggtccacctccctcttcgttcatgactccatgtccatgaggcctgccgccacggccacttcgtcttctataaatagcagctcttcccacacctcctccactcatcagctcagcatacacaacatcatcatcatcatcttctcgctagtcgagcgagcccttgtagttaattaagctagtcgatcgatccaagagaagaagaagcagcagacaggaatggcgtcgctctcgatgacgacgagcgcagcggcccgcgcgcagtggacgcctaggcagaacaagctgttcgagcaggcgctggcggtgtacgacaaggacacgcccgaccgctggcacaacatcgcctgcgccgtcggcggcgggaagtccgcggacgacgtcaggcgctactacgagctgctggaggaggacgtcggccacatcgagtccggcaaggtgcccttccccgcctaccgctaccccgccggctacggggccgccgacaggtacgcatccaaccggccgcccggaccgccggagcaatggctaatcttttatctctttctttcattcaacactcactgatgcaaatttgcatatgtgtatgtgcaggctgaaaca

SEQ ID NO: 499 - DNA, 773 bp, Zea mays
ctgatacaaaggcagtgagcttcacggacggcagagccgcaccgcctgcgccacggcggtgtgcgagctcctgcaagaaagaagcccattggcctccaacaccaagatcaaaatcgatgacatggatgcaggacgatgtgctgcgggcaatttcgtcgataagtgcctgtgtcgcggtgaagttggtgaactggagcacgggcgagtggtcagagaaagtcttgtacgccgcgagcttgagggcaacgtcgaggggcgatgtgaggtggcagccgccgtggtggccttcggcgagcgcgaggaggagggcctccttgaggtaggaggcggagcggaggaacggcttcccgagcaagggaagctggtgattgagccgcgccaatatctctcgcgcgccaatggaattgccagcttcggcggcctttgccgccgccgccagctcgtccagcaactgctgctgcgccgcctccgcagccgttgtcttcatcgccccgtgggacagtggtggcgaaggctggagctggaacggagaagggccatttaatggtggaaaggcatgaccttgccccgccgccgccggcagaagccggtttcgggcgagatagaggtcatcccctatggattgaggacgtttgggcggtggttggatgagtggcgagcgctgattggggtcggggaaggaggggatgggcatgaagaaggttgtgccgggggtcggctggtgctggtactggtggaggaggccgggcagggggatcctaagagtcgagcgc

SEQ ID NO: 500 - DNA, 793 bp, Zea mays
atcaagctcggtacccctgacaggttagccaagagaggcctgaaccacccaaacagatgtcctttttgtgaccaggaagctgaaacaataaatcatctgctggtgtcatgtgttttgcacgtctcttctggtacaagctgctgagaaagtatggaatacattccctagctcctcagccagggattattcactttctggattggtgggaagatgcttcggatgcagtaaatgggctcatcagggagtggatttatcctaattatcttgggtgcctggatgctctggaatcaccgtaatagatgtgttttttaccacttgacacccagcctaactctgctccttaggcttgctaatgatgaagggagaaagtgggaaattgctggggccaaggggatatctcaccttgttgccccgctgccagattcttgatggctgctgtgagagcgaccttctaggggtgattttttccttatggattatttcttgtatgcttgttactggcccccgtaatggggttcttttgtatctgggcatttctaaggccctttcaaccttttcttcttaatatacaaagatgtgcagttctcttgcgctttcgagaaaaaaaatagctaaaattattaggggtccaattatcaaagacacatttgttgtgatgcttccaaataatccaggcccccaaggcaatgcgagaattgagcccctttctaataggtccagtgactgaacctgaggcttcttcccacgagctcatgaaggaagacaagccaggctgaggggcaagcacttgtag

SEQ ID NO: 501 - DNA, 717 bp, Zea mays
tgcttgcgccggaagcggccgcggcgacatggtcccgaggagacggcgggacgaaggggtagggggtgaacaccggcggcggcgccggttttatccggtcgtcgccgttttcggtgctgttcggtcggttgcgtctcgcggcgggttctttgctcccggctgtggaagacgccgacgacgaggcctccttctgccggatcttcttgcgcagccgcgcgttccagaagttcttgatctcgttgtccgacctccccggcagcctcgccgcgatttgggaccagctaatacagataatgaccatcaaattagttcacaatcgacgacgacggccgggtcggtcgggttactatgagatggccatgcgtaattaagctgaggcaatgacgggaggcacatctgctgttcagcagagcggaggtcagttacctatttccaagtgctttgtggagagctatgatgaggtcttcttcctgctgggagaagcggccccgcttgaggtccgggcgcaggtagttcatccaccgcagccggcagctcttgccgcacctctgcaagcctgcaaacacagctacaaccagttcactcactccgtccgatcccatccattactactatgagcaaagaggtctcagtggtgaaggcattgcaaatttgcaacagcgtcaagaatgcatgcatatgttcatcacctgcgagttcgggaatggagctccagca

SEQ ID NO: 502 - DNA, 749 bp, Zea mays
ctgaggactggttgcgcaaggaccgggcgacttggattgaagcgcttgtcactgcaagaagcgagtattcttttaatggggatttatcaggtgaccaaaacgtcgcatcattttctacagaaaagctcagaaatcgcttgcacgtcgaaggtgttggtgaggcagttattaaagactgtgaacagattattcagtcagaattttcgcagtaccaaacacagatgaagcagcgttgcgaagagtatttgagttttattggcagtcttccacgggaagttgaggtaatgttttcttggaaataggtaaaataactttatagagttactgttcatattacaatatcttattgcttatagcatggcattaaactaatgatggttttcctttagaatcgtatacccaagtgttatctttttctctcggattgggtcctgcatgtgcctatctattatggataaattgctgtatattcagcaggttacaatcatactatatgtttttttgccaactataatttgatcaacacttgtatttataagacagatcatagcaattctagtctactagccaaatgcactgtcacaagttaactgaaaaggttatttggactgtgattgtaagtcgaataataaatgggtgggagtgggatgatgtccactgatcagacaacttttctgttcatgcaggtagttaattcagtagattcaactgtcctgagaagtcacaggggtaccgagtccgaatcgtat

SEQ ID NO: 503 - DNA, 680 bp, Zea mays
tgcaggattctgccatgccgaagtcacctcgttgccaccatttgaagggaaagcctcccatgaaccattgtttccaccagcagcgggcggtccctggaagagtgctagagcaagcctattaccttgctcatctgcactaacagtatcttctctgagatccaccaagtcaccctgtggctgtgggggtggctccggcttcacctcttcctccaccttcacaggttcaggctccttataatcttctggtgctggaagcgctttgatgctgttcatatccggctcaggttcttccttaacaggctcaggttcaggctcccgtggtgggctcttaggcctctttgcccggtccctcatgaactcttctagcgtctccagcaacttatcagtgacacgctgcacctctgggtactcagatgaccttgcaactccagtatctttacaccatgaatagaatgcagagagctcatcaatctgctttgcagcactagcatatgcctcaaaagccttcacgcattccgcatactccatgtcaaagaacctgtccagcagcaccgccagcacctcgcagatatcagagtagagctggaagctctctctcacaatctgatacagcgcaaccagcaccatcctgctttgctttgcaccaccagtggggcggcaagcaaggaacctgtcaagca

SEQ ID NO: 504 - DNA, 723 bp, Zea mays
tgtcgccactgagctcgcttccttccttccttcctgccgtgacgtctctccgcgttgcgttgagcgtgcccgcggccgtttcgtgcgccggggtttgcttgcccgacgaaagcacggcactggtcttatcgccttgttgtttaatatggagtatataaatagtcgaaaggttgtccacaggacggcagcaccgtggcgcactgcattatatttatatgtatttgcagtaacgacatcattcgacagccattatgcagggctgtacacgtaacggtattgctcggcgattggacatgggcagggtctcgtggaacatgaaggggcatatatttcttaaggaagaaaagtaacggggaaaccataataattaccacgttcatagctagtgctatggtcattgcttggatatggtacggctaaagaacattttagatgtcagtattgctcggtattgctcggtgatgcatgaattggcccggccgtccgctgagggacggtagacggcggctgtgataccacgtcgtcaagcactgaccgcgcggggctcgcctgacttggcggatggccggtcgtgtgtgcccagtaggtttaccaaaccgtttttccactgaaaaccgctagtcactggaacgaaaaaaccgcccaaaaaccgctaatccaatgtccatagagccgtcgtaaagaaccacatgaaagctttgactttccggtgcccaaaatgca

SEQ ID NO: 505 - DNA, 701 bp, Zea mays
tggtgcgccgtcatcgtcgtttcctgcaaccgtcgccgctcccggagaagagggatggaaatgaaacgatcgtcgagcatctccgacgacgatccccgggcgccgtggtccgtcgtggtggtcatgacgctgacgcctcccgccttgggatgcggcagcagcgccccggacacgtccccccagtagtcggggttggccacgtaccactccatggtcttcctgaggccatcctcccagcgcgtcctctcgcgccagccgagccccttgagcttctcgtcgtcgaggaagtacctctggtcgttgaagggcctgttgtcgacgaactggatggcctcctccgggagcaggccgaagaggccgctgatgtccctggccacgtccatcaccgtgcgctccttcttggtgccgatgttgtagacgtggcccacctcgccgcggtggaggacgacctcgaacgcctcggccacgtcgtcgcagtagaggtagctgcggacgttggagccgtcgccgtggatgggcaggcgctggcccctcatggccagcagcatgaacttggggatgagcttctccgggaactggttgggcccgtacacgttgttcccgcgcgtggtgatgacggggaggccgtagctccggccgtacgccatcaccagcatttcggccccggccttggtggccgcggaccgggtggttggccacca

SEQ ID NO: 506 - DNA, 675 bp, Zea mays
ggtctataaaacccctggtgactccatttagctgtacagagcattaacttgtgtaaaatctagactaagataaatatccaaaaatagccagacacactggttgcataatatatcttttagtggcatcatggtttttaaagcggtatggcgagacaaagtgttggactgccgcctgaacgcctaggcgaggtaggcgagcaaggcgcctaagcgttggaccaccgcctgaacgcctaggcgacgcctttaaaacagtgggttgcacatcagaaacatttatcagtacaaaagttgcttgtacaaatgcacactaaaacctactgatgattgagataaacttattgtataaattgactcaaaagtaaccacgtgtgtgaaatgcttcaagcacatccttgaagacaaaagaactaacataccatcttctcatcgaagcttaatatagaagctacattgccacatctgtagcaataattgggtgcagaccacacctggagaacaaaagatacgttaatatgggcatcataacaattcaatatggtcacactgaaatacaaatgtatactactatagtagaatactacacaatatctgggtgtcaatttatatgtgaacgagaactcacagttacaaggcccttctcctggaacatgtactttaagccttcctgtacca

SEQ ID NO: 507 - DNA, 706 bp, Zea mays
tgcaccaggttgtgttataggactttggtccggttccacagcagcacgttcggctgtagcctcaccctcgatctctgacatatcaacgtcactcttgtcttcaggttcctctgccaactctccctcctccatgtcatcatcaacatcagttgcagtagtacgctgagcatcttccttcgaatcttctgttttccggtcatcatcaaatgattcaattattgcctctgactttgccaccacatgctcttcttctaaaggaattgcatttgcgtcaatattagcatcagcatcctggcctttgatgtccgttgatgcatctccagagtcatctttatcacccccatcctcttcccttgttgcctcaacctctaccattggctcaggtgcctgatcagtatcgatctcttctgtaggctgttgtccatctaggtcatcagtggctggaagcacattaacctgtgccgctacatccccaagaggtggttgaccacttttgagttcactagtcccttgtgaagattcttcctccttgggcttcttagatggaggattgacatcattagcctcaccctgcgaggcactgtctaccgtctgtgaagatgtgataagccgtttacgactcaaaggctgtaacacaggtaaaattccagaagtttcttgctctgctggtggcccccctttgtcctgaactgtggaggcatcaaca

SEQ ID NO: 508 - DNA, 744 bp, Zea mays
tgctctgctcccccaacgtcgatttggttcatcgagtcggagcccggagatggaacggaagcaaccttacgaacctccgagcgtgacgttgagctcgccagcgcggacggccctggcaatggacgcgccgagcgtggcggcgtacttgccgccgtaggactcggcgaccaggaacagcgggctgctcgccagggtgggcacctccttcgccagcgccctgatcaccgtcgtcatgtcggcggcctgctgccagtcgctggtcacgaacaggctgtcgtcctccacgtagctgtaccctgtgccgaccgggttgtcctgcacgcgcgcgcccggccatggaagaagtcggtcagcgaggacatcacgacagcgaaaggtgtagaagaagagcggggggcagaagagaggatcggagaagagagccgccatcagctatcgctctctggtctgactctgaccacaaagatgagatcggccttgtagagccacgtcgagttgcgcggcttcaggtccacgtccagcggccccatctccaggaagttgccgagcccgaccccggacgcgccctgcgagagggacaaaacaaccatggttgatcactcgctctcgctcatcaggtagctagaccgtgctcccgtaatgaagcacagaggccggatcatgccctcctgtgccgaagccgagaaattgtggtggtgtgaggagggaaagagagaacgaggcagcaggggtgccgagctcgaa

SEQ ID NO: 509 - DNA, 676 bp, Zea mays
tgcaagatgaacttcaagcgttgagaccatctgcaatatgccttcaagtgttgggcagagattctgggccttgagtgcatacttccgagcacccctgatgtctcgggcatggaacttggtctcagcaacatttttggcttttagggccacatccatattgtactcctcactcatctgcgcctctggactcgattggccaacaaactaacttgagaggaagcagcaaagcccaagatcaagaactggacaagattaagtgtgcatccagattagaaatcttcattgccttagcctgcagttaagtacatccagattagaaatcttcactgcctgggcctgcagttaagtacatccagattagaaatctcaacaaacatcaaaacggaagaactcatgacgtaacagtatatattacaaaaacgcatgtaaataagcacttaagaggtcccagaaaagtaaactaccacatttcaaccaattcatttcagatccaaaggaaattagaagtgagggctacagttaaaccatacttatcgatagctctatttcatggagaactgacatttcagctcggaaagagcatgtacttccatcaaaccactatgcaacactgagattcacttcgctaaattcgggctcccgagcatccttactccgattccatccttgatctaca

SEQ ID NO: 510 - DNA, 681 bp, Zea mays
tgttgcggcacgttgctgaactcgctcccctggactggatgagcagcaactgtagcggctggacctggatccggctcccatcgagccatgaatgtccagacctgggcctttgtgtgctccaacctcacacggcggccgctgaaacctgcgtgactgcctgcacaggacagcgtgcagatgctccggtccggagtcagtgcaggagcacgcgggacttggagcgttgccgggcgatccgcgacttgcaagaccctacacctcccgtactaatactagcatggtgtggcactggcaggtaagaacagccatgaatgggaggcacacacaagtgaggggcttgtgtggtgtggtgctggaactccacgcaggctgcctcagctatctgtctctctttctgtgactgcctatgctgtgcgtgttaaattactacctcacctcctctgccgttggagagtggagagagagtggtgctgagctagcgtgtggggttacgcttacgacggcctgccttgaaggctgccgcaggctaggcttcctgtgtggaagggggggagttttgaccgcccacgtttgactgccccgcgtgggcccgccgcttatgatttgcctctgccccgcgtgggcccgccgctcgcaaactcacgcgctaccgggggcagccggcagccccagaggcccgca

SEQ ID NO: 511 - DNA, 775 bp, Zea mays
tgagaactaactggtatctgttgtttcctaattgaacatataggtcttctgaaaatattttctttaaaatgtctgtgctttcagtattataagactttttcaactctgcgaacagcgcagtctacagtgcaaaacagtgttcaaggtgaccatatgagtaacctgttggatacggtctaaaaggtcgggttgtagtcataaaaaactgataacactaaagtttcttcagacacatgaagtgtctcacgtattgagtaaatattgtttgtcaacagcaatgcatttttcaggttggtctagttaggtgctgatcaatttgcatagtacctatttctattctttaggaaagtggatggaaaggctggggagagatctcatatggggggcatcaatgtttaaagcgtgcccaggcagcagaataccttgtaagtccacgtgcttttcattttaacttaggcagcatcaagaatcaaggaatctctttttaaacaaggcgataagaggataatttctccatttggatattttgatggctttaggtaaggtcgtggataggtgaaaggtacccaggcattaatgaaaaaattgtctcatatgtcatgggctatgatagtttgaaagctattggaggtgatgaggatagttacttggccaagcaagtattggatgtaaggcttcggatggatggtctcttcgagcttgaagagcatgctgttcagtttgtcgaagaatttattgctctatatacaaatggtccaggggtgccgagctcgtt

SEQ ID NO: 512 - DNA, 664 bp, Zea mays
agtcttcgaattcacggatcgttgagctcaatgagaaggttaaaacgctcgaggatgtagtcgaggaacagaggccagtgacggtggaattggagtctcagctccggtcgaggcgcgctgaaatcagtagcctgaaggaggatataagcctgttgcagaagaagctggagagccagaagaacctgtcatcagcttacatatctgcacttggtgcttctgaaacagagaagaaggagctggctagtcggtttgagctcggagagaaagaagccgaggaattacgtgggaagatgagcttgcttgaggaacagatccgtaaagagagggcacggtcatccgagtttgcggtaaaatgtcagaagatggaggaacaaatctcctgtagatctcttcttggtcaccaaccagtgaaatcatctgcggcgatcaaagatcttcagctcagaaaggtagcctccattaattccatagaacaaaattggcacttcactgccattcatattgtcttattatttgcgaccgatcctggtggtgattggttggtactagtcccagaaagcggtggtgttgctcatgaaatcctacactttttctttacaggagacagagctggccaaggctgcagagaaactggccgactgccagaagacgatagcttcactga

SEQ ID NO: 513 - DNA, 737 bp, Zea mays
tctagaggatccccctgcggggtttttttttgtgaatcaacttgtttcttttgatattttgtgattgtttattcaatcttaagttgcgttggcagcaggtgtagaatgaataactatgcctgtatatctcattgtttgaatcacatattagttcttcagtcttagcaagcgtgttttgtcatgcaaactcgttggcgccacctaatgttgtttatggcaagaaggggctatttttaggctaaagaactatcatgcgggcaacgagtaactagaagctaggttgcgcgtggttttgctgttgttataattaggttagtttggtttgctcccaaactgcattaggttttattttttttttcctgagcatagttgtttagatttggacataatggattccagcctgtttccttcaggtcatggttgtattggtacatataattactgtagctatttttgctcataaaacagtgtaatgttgtccttttgcaactttttagttggaagtagtagatttctttgtcttatctgtctggggcttaacatactttatttaacatcttgcaagcttgaatttagtggtcctccgtcctcaagttggggctttatatacttcatttagcttcttgcaagcttgaatttactgctatttttgtagtttctgcaaagaatagggttttcttcttactctaattatactatctattcatatagagatggaatcaccgcccctcacagga

SEQ ID NO: 514 - DNA, 801 bp, Zea mays
tgctgcttgtagagagccacggttgccatgaccatggccatgggcatagccatgaccgctgcaaagagcccagcagcccgcgcttcaccagcaagcacgagtgccatgaccatgagcatagccactgcaaagagcccaagactccgtgtgctgacagtgaggctgcttgccatggccatggccatggccatggacacgaacatcggcactgcgaaggggacagccactcacacgctacaggtgagcatggctgccatgaacatgatgcgcacagccactgcgaggagcacggccattcagacaccgctgttgagcatgcttgcgagcatgagtgccatggtgagcaccaaaccgtgcacgctgcggaaacacaccactgccatgagcacgaccatgagcacggacagcatgagcttggggagatcgaggaaccagagaaggactgccacgaccacagccaccactgctgccatgagcctcacggcaaggacaaggtcgcggccgccgagccagttgaagaggtcacgatctcaatcgctgccctgcccaaagacgaaggccaccaccacagcgaggaacaacacaatggggagcactgcaggaaggcgaaagacggcggcggcggcgctgctcccaccgactgcgctgcgagcaagaactgctgcggcgtcaaaggtggagacgcctgctcgagcctgcaggccgcgcgtgccagggagaccggcccgtgctgccggagctacgtgaagtgccccaggacggcggcggcgagcaggagcagggggatcctatagagtcgtg

SEQ ID NO: 515 - DNA, 758 bp, Zea mays
tgaccctcgactattgcgaagtctctgctcctgtgcttcagtcgtttggcctcgttgcgatcggtaggatggtagtggccctgtaggtatagtgttattggggcccgtcagtcttcggccatgatgaggttgacaattcggtggctcttgagcgtcttgagttatttgcaaaccttcggggttgcggacgactggcgtgccgatgacgtggtagaacacgtcggaaggcagggcatcgcccttggctgctgctttggccaacgcgtcggcctctttgttcttgttgcgggtgacatgctgtagtgtgaaacccttgaactgtttctcaaggctgcggacggtggtgagatattacatgagcacaggctcctttgtagagtactcctttttgatctggccgacgacgaccttggagtctgtcctaattatgcacatggtgacaccgagggctcgtaacttgcgaagtcccaggatgacggcttcgtactctgctatgttgttagggcacctgtcggactctaaaacaaagctaaggcgcattgcatatctgtacttgacgctagtgggtgatgtgataattgttgcggtgcttgcccctacatggcaccatgcgccatcacagtggatggtccagactctttccgaagactcctcttgtggttgcacaggtcctgtccagtcaacaatgaagtcggccaggacctgtgatttgatcgtcgttctgggttcgaaggtgatgtggtacccggataactcag

SEQ ID NO: 516 - DNA, 727 bp, Zea mays
tgctccttttccctttcattttaaaacgagtcaatcaggaacggtcagcaacacatcgatcaggtccttctcaagaacgacgagaagaagaaaaaaacgtccctacttggtcagcgcacggcacgccgcatgcatcgaagcatcaggacggcgaccagttcaacgagtcgaaaacacatggaacggctagctcgaattccacgtctgcatgaaccacggtcaaccagagtactgccagcggaccaaagatgaagacctgagcgcgctgctctgccagctcgatcgccgtcgccgttctcctgtcctgctgctttcctgcagagaatttccgcctccctcttgtcatctgttggatacttggatctctcagtctcactgggattcacggacagtacatttgcgtgccgtcgttttagctcccgacgaaagacgaggatgagctgacgccgcgtggttaatcagttcctctgccgactgcatcgcagtattgtgagctcaaactcagaatcccaggcggtaccctgcctactagaactagcctatgattgcgctacgtgcctactaggaatacaagaacggaagaaccggtgtcttttgcttttgcatttccactctttaagctcaatccagcgtcctaaaaagccggccgctcgttctacctgccgctgttaagttgtcttggtcactagcagctctcagatagtgtactgaactgaatggggctgca

SEQ ID NO: 517 - DNA, 729 bp, Zea mays
tggtgcaaatgcaagtgaggccatggtgctgccatcgtcgtcgtcgtcggagaacgtggtgccggccgataaggagctggattggagggttaggatgacggagcagctatccatcataccatgctgggagtcatgggtggtgtacctgaggcaggacgtggcgctcccaggcgtcgccctcgccttcctctactttagcgtcctgaggtaaagtaaagctaagctagttgcaattgcaacaacgaacgctgcttaaatcctgtacgtctgatcaacgcaaagagcaatcgaatgctgtatgggatggttttgcagcttcggcacgctgatgacggcgaccctggactgggaaggcatacctgcgtacgtcatcagtttggcaaggggcttcagcgccatcgttggcatcggcgcaacgctgctgtaccctgtggtgcactcatgggtgtccacactacggacaggactatggtccatttggatgcaagtaagcactaagcagtagtgtagcgcatcatcagctttcagtgaatttagttgctgctgagtgagagtcttcttactcgcttgaactgtatggcgcggcggcgtctgcggccagtggtgctgcctgctggtgtgcgtggcttccatctgggcggcgagcgacgtggcgtcggcgtggatgctgatggccggcgtggccgcgtcgcgcctagggctctggatgttcgacctcgccgtgatgca

SEQ ID NO: 518 - DNA, 738 bp, Zea mays
aagctcagtgcccctgcccacacaacgaagtcacatgccactgtgctccactactactggtagaactagagcttagaagtgccggttttccacgaggcgagcgcgcggtcatggggtcactggcgacggcggaggggcagcggccgcacgccgtgtgcatgccgtacccggcgcagggccacgtgacgcccatgctcaagctcgccaagctcctccacgcgcggggcttccagatcaccttcgtcaacaccgagttcaaccaccgccgcctgctccactcgcgcgggcccgacgcgctcgaccgcgtgcccgggttccgcttcgacgccattcccgacggcctcccgccgtccgacgccgacgccacgcaggacatccccgcgctctgctactccaccatgaccacctgcctcccgcacctcctcgcgctcctcgccagggtcgacgccgacgccgggtccccgccggtcacctgcctcgtcgtggacgccgtcatgtcgttcggcttcgacgccgccaggcagatcggcgtgcccgtcgccgcgctctggaccgccagcgcctgcgggttcatgggctaccggaactacagaaacctcatcgactggggcctcgtgccattcaagagcgccgcggacctccaggacaacgtcggcggcggccacctcgccaccgtggtcaccggcgcgcgcggcatgtgcgacggcgtgcagggggatgctaccagagtcgacctgc

SEQ ID NO: 519 - DNA, 755 bp, Zea mays
atccccctgccgcgacctacacccgggacccgtcagcctgctgcattggtccgggtccggcaagccatgggcgcgtctgggcgcggggcggccgtgcccgctcgatgcgctctgggcacccttcgacctgtacggccccgccggcgccggcggcgaggagtcccggtaaccataacacccgaaaaaaaagagagaaagattcttttccttctttggcccaccccgtacaaattctgagcttctttctaaatttcactccataaattactctacattaccatttaaagagtgatttacattaaaaaaatcgttctctgtattcattttactctagagcagttttcctaaatctatattctatcgattgaaaaggatacagagagtcgctctgttttcttggtctccattacctgttcaaaacctatatgtttttcatcttttttttttctctccgagcatgttggattaaatgttttgtcttagattgttcatgtttgttcttatagtgatccctttatgctcgttctgttacttattaaaccatttgtatcctactctacagagctgcaggattgcagactcatcaccataaatagaaggaacagagaaatagactttgcagtctgcagcatttgaccctccctctcaccctgtgggctctgccgttcggtgtctgcccatacccactcttgccatcaaacccgcaatccaccacccatccatctcaatgacgagtcagccagtccaatgcagca

SEQ ID NO: 520 - DNA, 744 bp, Zea mays
tgattcgaattcgagctcggtcccctggaaactatgagatattggaggagtcctcggcaatggagatcactgctggtatacctgctgattttgctgatgtcccgtatttagctgctgactggggtaccatggctccggcctctgagcatatccagggtcccttggcccctgttgatgtactcgagaccgtggagcagctggcgcccaatgctgatgaagatgtgcatgctgattctattattccagccgtcaaccggccactacttattttagaagaaagaggtcttcgtgctgctgtggttccaggcactgtgcctgcccagggcacccctcaccctgttgacaagcctttgtctgttgagccgcaggacgttaccaattttagcggaggtggcacccctgcccaccttcaagaacactctgacagcagattcaaagtaaagcatccctgtttcaaagtctactcgcgaagaaaagaattccaggcagcggtggcccagatgacagatgttgagaggactgaaaagttacaagaattcatgtagattgttaccaagccagctacaaggctgttggctgcccctccgattaccaagcgaaagaagaggaagaccctgcccaatgacttcaatccaagaagaagcagaagggtggcttatctgccaccggagctgggcaatgaattctgcaggtacaatttgcaggcaaggggtgctttagagtcgactgcaggcagcaagtaag

SEQ ID NO: 521 - DNA, 754 bp, Zea mays
gacggctttcgagatcctgtcccatttctgcacctgcttcccctccagcgccgatatggtcaccgcttgcggcttcttgaacccctcgtctaccttgcgggacacggtgaagaaccgcagcccctcgcataccatgatcactagcttcgccaggttgctcttctcctcggctttggggtcagccgctgcctgcagcagcagcagctcctcctcctcctccgccgcctctgctagtgtcgtcgtcgtcttcttcgccaggtagttgacggccgtggtcatttcggcacggcccatggtgacggtctccaggcccttactgccgatgaggtcctggtaccggccgccaaagccgagccacttggcgttgtcgtcgaggaggtgggtgtcgccgtccttgccgaactcccaccacaccccgccgggggtcttgaagccgaccaggtagaggttgtccatacgtatggcgagcgtgatggacctggtcttcgttttgagctcggtgtagaaccagagctcggggacattcttctccagcggcagcacgggctggacgatgcctgtatggttggtgcagtatttgatcacttctttccggacggaggtgatgaaggcgctgtaagggtaggccgtgtcttccacggggaagatttcggtgaacttcggcactatatttttcttctttgtttgagtaataataagatcactcaactctgggtttggcttcgccattctctcttctctttttgtatcaaca

SEQ ID NO: 522 - DNA, 754 bp, Zea mays
tgtttctccagtctttgtcttctgaacttgcatgcattcttatgtcagactggactaattaaactgagtttaccttgtgtaacacaaaggttgaccttacaagaacatttgtttggtaaaccaggtatctttacaatgcacctactatagtctataagtactgcataataacagttgaagcaaccatttgaatgcctaatgaaatgatgtgtattattttaaatcatggtgttatctccttttaaacaggcgacggctaggcgttagcccgagctgcactgcctagcacctaggcgttgtgtctaggcttgtttcagcgttaaggtgttgggcttaatctatgcatgaaaatgggacagattttagatggagaaagatgaactgtggtcatattatttatcgatgcatggtaacattagttctgatgtgctatcttcagaaagtgcaaatgcctagcatcagctaggcgctaggcagagcctggctgcctgcctagcaccgaacacttttttaacattttgtattatgctaaatgaccccctacccctgcagttggcttgtggctactacgacaatcacttccacaataggttatggtgtgaagcactaccgaatcaaaccaaggagtcggtgactgttgctgcaggctattcatggattaatttgctgctgctgatgacatacatcaagtgacttactgacttgtatcaagcatgctgttgtttcttaagcttcgtcaacttcccaatttgca

SEQ ID NO: 523 - DNA, 726 bp, Zea mays
tgctcttcgacttgtcatccccacattatatatcctgatcgtttcccatgatttgctctggtagccgctcctttccagttccgaattaaagaatccacgatgtcgaatttgaaatcagaaattgccattttgtgcgaatagaaacaggtgtgtagcacgcatgctttgtaataattgtacaaactcaaaacactactcaaaaaaaaaaatgaacattgcaacacaaggatggattatataggtaaggactagaagtaacactacaacagcaggggagacgaatgtctccttccacagacaagagaattgccacatgagaagcaaaaaaaacatggaacgacgcaaatgcaagacacggagagatttaaccgaagtgcagctaagatagcagcgacaaccgactggttctgccccgatcgaccaaggaattgaagcagcagcagcaacggacgaatgtctctagagcaggcgctggaccagagagcgctgcctctgcagcctcatctcctggtagaaccgctcgatgaagcgctcggcgcggtcgtccacttccacgtcgccttcctccccgtagtccacaaccgccacctccacctcctcgtcgtcgtcgtcgttgctgctgctgcaggcgtaggcaccgtcgtcgcggccgcgcgcccactcgagagccggggcgagcaccaccagggggatgctttagaagtcgaaccgcatggcatgcaagtc

SEQ ID NO: 524 - DNA, 709 bp, Zea mays
tgcacagatgggtccatactccatacacgacgccgtatgcatgcatctcaaggcaggctcgctcgactaccagtttgccaattacaggagcatcctgtaaagttcagtcactgcaacaagtgcagtgccgcaggagcagtagccaggaggtgagtgaaacctggaacaccatggacggatgcggtgaagctgcagcaggcttccaggccaacaagcaacaaatgcctggtcaaaaccggtggaaggctggagcgcatgcgcatggggggagggaaagaaagaaacccaagcgggcggtggttcgggtgggtgccatcgctgggtccccacccccgtctccatgtgacggtgacaaccatgcggcggtggttcggggtgttggatgcaccgtgcacgcacgcccacaaaacgttgcggcgtgagcctgcctggcttggccgccctttcataccaaactactcctactctttcttccctcgctcccatctcgcaagatccgcagccccacatgggggtaccgggtatcttgtcgccgtcccctcccttcccttcactgcaccgtatggtatggatggatgctttggttaactctactggcctcaatcattggtctccaatgcaaggccaataataatgaatcgaagttgtttccttttggccttgtggcggcctccaaaagcacacggatcggttttggctgctaatgcag

SEQ ID NO: 525 - DNA, 662 bp, Zea mays
tggtgaaaaaaaaacgttttgctagttctgcggtcgggatgttattgagcatctctctctctctctctccacagatggtaattgaacagtgtaattttgaaggatgtgtccccatggtgtaccatgaatagaagaacgtcggacactgttgtactaacaatggatggggccaacagttataaatactaatccctgtttttggaacttcctgactaatggtttcttaccttacttgttttggaaatctcaatcacaatgttttttccctagtcagccattccttttctaaatattttgcatacaagctcatcaccgataaaagttcttatctgtttgttcatcttaactgggaatatacttgctgctgataatgctaccttttgtccacaggtgatgccctgtacagcctgcgtcaaagcttgaaagatgctaacaatgtcttgcaaagttgggatcccactcttgttaatccatgtacatggttccatgttacgtgtaacaacgataacagtgttatcagagtgtaagttgatgaaaaaagatctcatatattcgtatcaaaagtgttaatgatgttctcctactggttctaagtgtaccccctttcacagtgaccttggaaatgcacaattatctggcgttctagtgccacaacttggcca

SEQ ID NO: 526 - DNA, 698 bp, Zea mays
agcccggtacccctgctcaaagccttcaatatcatacgatgtagaaattgcctggtaatgtttactttcttttaaacagttactttttcaaagtttctgatcatacttcatttcttcaattgtctcacatggctaagacttgtggccttatctttgtccagtctgcagttagagccattggtaatgcatcatgcatagtggtgacatgaaaatgaaactggacctggggtttcaaattttgttgtgatttagggtttcttcaggatttcaacattttgttttgcataagtgcagtgtctcgaatacctaataaaaagaagaaaaaattgaagctggctcattatttacatagagatggtgaaagctcactggtcaacttttggcgaattgatttttgagaatcagcagagaaactcttgcttggttcttatcccatctgattcatggatctggggtagtcctggggatatcagctataaaactgatcaaataatttctgcatagttttgactaatacaagaggtgacaggctcatttcttgccgtagatccgtattgcaagacgaagtgacatggtggtgacgtccagtgacagccctatgtctttgcacagcaggcctcatggttttgtgaaagagattattacagtatacaatgccactggccttgcactgcgtggcgacccttccaaaactcaca

SEQ ID NO: 527 - DNA, 805 bp, Zea mays
agatccccctgaacacaaccattgaacttacaacttccaacagggtatgtgcatgtttttgcatgaaacagcaacagcaaccactttatctgacggaggtaatgaatatttctcttgacctgcccaaaccctccagttgtgggctttggcactgcaggatcaacagaagcgagagtgccattagaaagacaccaatctgatgaaaatggttgctgtactccatcttgtgacattattctttgacaaaaatcttcttgtacttgtttttcgagtgatgaattagtagctacaggagccttttccattgtttgtggctgccattgagaaagcagcatttgctctgtctgtgatcctttcagcacataacttacagcatttgaaccgttatcaagctgcggattagagggcaacaattgctgagaaccatgtgaggcagaaggaagaaaattttgagagctagatagatgaccaagcatctgccctcctttaacattgtcaagagcatttctttgctggtattgaccctggaagtttggaaggtcagcaggatcactagcttgtgaagaaactagttcagtgtgtggcagagtcccctgttctggcagttgcattgaatggttggaagccatttgagactgtttaagggaattgttccttaacatagcctgctgatgctgtgaatttggctgctgctgatttatatgatactgattttgaataaactgggaattaggttgcacctgatgctgcgacattgggtgctggtgtagtagttgatcatgagtcaggggtaccgagctcgaat

SEQ ID NO: 528 - DNA, 807 bp, Zea mays
gcacgactctagaggatccccctgttgccagtaataatgagattttgccaagtgcgatagttggagcaaacaatgtattcttcctgtagcccaactgggcaggaacctatatacagaatacatgagtgatgacacacaagttaaaaactgaagatggatgagttctgcaacattcaaacccttgctatcaggagtagcgtgactcctgtcaagatgtccacttggtccactgatgagcttttttccatgcattctgatactcagggagtgtttgaatacactagagctaatagttagtgactaaattagctagagacatctaaacaccctacctaatagttcagctattagctatttttagtaaattagttaacagttagctacctatttgttagctagctaattctactagcaatattttagccaactaattattagctatagtgcattcaaacaccccctcaatcataggtttcagtattccgcacggaattcacaagttttggtatttttaaagaccacacttgttttcagatagaaatatgttgaatagaacaagtgttaactaaaacacacaaattagcaatcaccatggcatgagcaagcatcatacagcaggacctgtgaatgaagatgccccatatatacgaatttcatcttaagacaattgtacactattttgatactaaatatctgtcacattacatatgatctctgcactcttttactttcagaataacaggacaacttcataatagttcatggttcggtggttccacaaacaaatgaccaggggtaccgagtccg

SEQ ID NO: 529 - DNA, 773 bp, Zea mays
cccttcttgggcggcctcacgatcctccttgtggcaacaattaccacatcctgtggcatgtaatatgcgtgataagtattcttgcgaacttgactaacgttgcaaatcaaacaagataatctaaaagtttctaacatatgctatggtacaagaataaccacaataaccaacagtctcataaaaagtgcatattatgtcaaaacatatatctatatgacagacaccaagccaagcactaacgaaagaaagagaaacataggtgcgagaaaaataaaaggtgaagtatgcaggtctaatatgaaagaaaactacagagcggtaaagcggggtcagaagcttctgcttgtttcgccaacaaataactcaaacattggaatggttgaatgaaccaaaaggatgcaatacaaatatcaacgacattattgataatcgacagtgacaacagctagtttgttcatgtcaaccaattttatgcaagggtaatagaattacaataggatggcaacttcggtgctacatatcctaatcctgaaaatcaacatcattattattaaaatgtcgcttaaacgtcgtttaagcattgtttaaacaaaaaaatgtggatagagtttagaacgtccggtcgttttagcaaaaacatgaagaacgtctgtttatcacgtttaaacgtcgttttctcgttttcatacgttctatgcgtgttcaggacgttctgcgtgttcacatactctccttttgtgctgttgctagcgcaggggtaccgaggctcgaat

SEQ ID NO: 530 - DNA, 752 bp, Zea mays
tgcatatatgctgcattgatacagatttgcgcttgagagccacggccaccacaacaccagcactaacaaatccccaaaaaaaaagtctagccacagcccacagcacttcttctccacaacgaccccacagagggccagagcaagacatccgcaccgcatcgcatatacccatagctgtgatcgctgccattaattctccccttcataggcctccaacaacgcgtcgatggaggaacaacacatggctgggccgccgtaccgctaccggcttcggcatcgccggctgatggacatagcacccgcaagcgcgagcaacgacgattcaggtacgtgtacatcccagagttagctagttcttgcttgcggccgccgatcgatggacatcgacgcggcagtgtcgttcagttaagtgactccggccggccgggatcgggtcggggtgactgagttcctgaggagggtgttctcgctgtgctgctgtgctccagggcatcacggctccaacgggatggccatcatggtgtcgatcctggtggtggtcatcgtctgcaccctcttctactgcgtctactgctggagatggaggaagcgcaacggtgagctatagctttagctttcactttccgttcgttcgtgtcgaaacatctatggtgcggttgttgcgttcgcactcgcgtgatgcgcctctatagctgctgtgccggtcgccgtcatgctagagttcgcctagtcatcatggcgtggtccttgca

SEQ ID NO: 531 - DNA, 757 bp, Zea mays
tgccgactccgccgatcggcctggtccaccccgtctgtttttttaaagaaagcggcaaaagacttgcctcttcattgtattagtttaaaaaaaaataaaataatccacaggatcgaaaacacaccggaaaaaaagaaatacaaaaaagccaccatccattgatctatcaaaaaaagccaccgtccactcgtctgtttcgttgagcttttttctaaagagtttttatttgataatctgcctgtgagaagaatctgggtgtaaagaaaatctgagtgtcttatagattacgtacgaagaaagataaaacagttcatagagtttacgatatgaaaatgatgattttctactatcgcaacgattcgaccgattttatgttcatgttttattttagatagtttttactaaagttttttttatagaagtagttgaaaagctagatgtttaaccgtatgtaggtcagaagcttaaaaaactgaaataaatagggcagtcattttgcttctccgagccaacagataccccccaagactttttaccacctctgggtctctaagcgagataatgaaaagagtgataccggatagttacagagaggcggacgaaaaaaaaaataaacggaccggaagagattttgtcagtttattattagatatagaaaactatcgactgtcatgtgggtcctgtatattgatactcagtgtggaaactgacacttcttgtgtcgaatcagttgtgcaatcaacagcagggggatcct

SEQ ID NO: 532 - DNA, 785 bp, Zea mays
tgtctagtaaaataaaaatttgctaaaaagaggtcggatctgaaagtaggttttccatcctctctctcactcacacggctgacagcctagagaaagaaccccgtattcgccgttggaccgtacgtgcacacgcttcggcctcatgcctgaagcgtacgagaaagaaacggagccggctccgttctcagccacagcaaagaaccacgcatggtctctgtaggcacaaagaaaacgtgagcggatccggccggggcacgccgaggcccgatccgagctctgcggtcggtcgcggcagcatgagcggccgcggttaggaaggaagagccgagccgagccgagaacgtgtgcggcatgcgtccgcgtccgtccacaaatcactctcgccccctctcggcgtccctggaccgcgcgctgccaaaagaagaggggccatgcgcctgcctggtcgttgccggagagcgagtgcacaaaaacgtgcttgctaatgcgactgcccccgccttttttcatgcttccggttctccgcatttagccatggtccatggagccccgtccgtcgtcgatcgatcgaccgacggactgactcctcgcgatcgcatcgtccggcggtcgctgactcgtcgatcgacccatggactggactcctcgatcggcgattgcattctccggcggcggcgccggccgccgccgactcgccggaccaggtagctgggcgcgcggccgctggcggagggccgtactcggattttctctgtagttcgaggctggctgcggcgagccaacca

SEQ ID NO: 533 - DNA, 716 bp, Zea mays
tgcttgttgttgttggcggcgtaggcgcagaggtcggcagcaatggtgtccagtgacggcaggtaggtggctgccgttggctcccgggttgtcgtcatcgccggggacgcgtaggccgacgagcccggtggcggtagcctgcagggtttgtacgggctgctgggtgccggcggcgtcctcgggctgatcggcacggcgggccgcgggctaataggcggcgtggacttgagtggcagcatgtgcgggcgtgggctgagcggagggcgcgggctgcagcacgccggtggccgtgggctgagcacctgctcggtgtaggccttgcgctgcttcttggcctccagcgactgcagcacctgctgcagctccttgatgtagtccaccacccctccaatgatggatgcctggtctccctacgcactcgtaacgcattataatcacgactcaatatatatacggtcggtactcgtgtacaagaagtagctgtaagagtagttactcgcttgacgtagaaacagggcatgagcgagcgaagcacggcgatgtgctcgttcatttgcttcctccggttgcgctccactgtgatgtgcgaggtcttatttaccgcaccatcttcactcgcggccgaggacaccggcgagcacttttgcctctttggagctgccggcaccgcgtcgacgtcccggcacccttgccgccggcgttttgcggcaccgtca

SEQ ID NO: 534 - DNA, 656 bp, Zea mays
ggttcccctgccgatgcacgcaaacggctgccttttatgtgaggaccaacaacaacactgttctcgccactgctttgaaccaggactaatccttctggatggctaagggcatcctcctcctgagcatctgtgccaaccaattttgactaaggctccgtttcaatctcacgggataaactttagcttcctgctaaactttagctatatgaattgaagtgctaaagtttagcttcaattaccaccattagctctcatgtttagattacaaatgactaaaagtagctaaaaaaagctgctaaagtttatctcgcgagattggaacagggcctaagcatcagcgcaagggtcttcaaaaagaacttaacagggaaatgcatgtgatggacaagttaaagaaagaaaaaagaggtgttggctgttccagatcaatagtaactatcagacatatttgtgcatcacaccagacatagctttaagacaactttaggctgcctagctaaaacatgatttggaaaattaagaaagtttaggactacgcagcatgctaaggatttccaggcaactttggatgttgggatgcattgtccgagttcctctcttgaacaaaaatgaattaaaaatggtcattagcttggcaattacagcctacagctcca

SEQ ID NO: 535 - DNA, 767 bp, Zea mays
ctctataggagccccctgctggttcaagcgcgttctcagcgcctaccccatagaacacggccaatgagatcctctctttctcagcgttcgtcacaaccctgtgcaccgggctcttgaagatcccattgctcattatctgcgtcacagtcgtgcactcagattcagagccaagatgaagaaacctggacatgcatattttactgcatttttaaactattcatttcagaagatctgcagatgcttaattacctccatgacatctcccaagttgatcagcaaagtgtaaggcataggcgggacattgtaccagacgccgtcccgctgaacctgcaacccgcggacgtccttgtcgacgagaaggatcgtcagaacgccggcgtcggagtgcggctggactccattgacgaggtctggcctcggacagggagggtagtagttgaacctggcaaacgcagcagccctgtcgctgatcagcctgacgaagtggtcctcgtccagctccaggatcttggccgttgctcggaagatgccgtctcttactctcttggtttccagtgcgtactcatgcagaacgtccctggacaatagaaattaaactactattattaatgcttccatgctcttcatgaattgatgaatcatgatactaacaactaatctctttcttctattccactgcaatttgcaagctgcaacagaacatacaatacaacaaggagatcttgaaaggaaacggcagtatatatatagtgaagcacgcacgggca

SEQ ID NO: 536 - DNA, 728 bp, Zea mays
accacctttttagtgtaatcagggcattcttgaatacttttcagattggatttgaggctaatatatatatgtatgtacttttttttgaagccttgagcctcctatctcggggaagtcgtctctactgaatgctcgaagcagcacaccacatagcgctggacataaagttgttgcaagtcatgtgcttctaaaagctagcaatacttctgattcattgcaaggtgttccttccaaagataataaatcgtcaacaatttctcaactgacaggagcaaggtataatattcccctccagatattattttccttctaaacttacatagtggcagctaaaataatctatctgaatttagaatcacaaaattaggaatcagaagtccgaaatctgacatggccctagagaaagaatcagtacaagtgagtgggacaaagtgttccccggtaacaacatccagaatccttgactccattcctgaaggaaaacctgcattgcctagcccatccataatgcagaaagttcctgaggtatgctatcttcctgtcgagtattatatttcctaagaaaatgattttcgttctactctgaatacatgtttcctacatggattatccacatcgtcttaagtgaggtttgttcttcgttttaccgagaagctactttgtaaacaaaaacaaaaagacctcgttgagttaattacttgcagatacacctaattgtgacctgggca

SEQ ID NO: 537 - DNA, 739 bp, Zea mays
tatacgaattcggctcggtacccctgtatttctgcggtgctccctaatgtattatgtattcataagtttaacatatcatgcactttacagtactgtggcctgtaggtgctgaatgccatggaagtcatttttttttcttatctaatgctagctgatcatcgtctctcttggtgactggatactgctactgctttttcttttattccgcttaggtctaccttgtatgttttagtagttttaagtactcatcagttgctacttctcttcatactttagccatcattattttttttcccttttccccccttcatgcacgttattgttacttctgtaactcctttaactttgaattttatctttttgctgacgttgaatatattattgttccttcatatagttttgtgttctttcctaatgtgataggtaatgcttggtgttgatcgacttgacatgattaagggaattccacaaaagattctggcctttgaaaagtttcttgaggaaaatccagattggaacgacaaagttgttctactgcagattgctgtgccaacaagaactgacgtccctgagtgtacgaacgctttctgtgttctcccttcatttgctaatacttaatgcaagtctgcaagcatgtgtgcagcatagaagggccagaaatatgatttgcttacttgcatgaattcttaatttacagattgatattttttatatgaaataaaatttccttttcaagtca

SEQ ID NO: 538 - DNA, 677 bp, Zea mays
tcggactcgtacccctgttttgctggtgacagtgtatatatatatcatcaagagaaacatcttctgagtgctagaattactccacaagagccagggaaccaaattaaagaaataagcggcacatgcttgcatggtgcccttctatagacgagaatccaatgactgccacaataccgagtgttcatcagaagaggccaacttccaacctggagaaatcagaattatgaggtatactcgctcttatcataaaaaaaaaaaaactcgaccgtggaagaaaaaaccgttctcccgatattgatattatattaagaagagacagaaatatggctccccatcactagcgtgccgtcatcgttcactctacaacggtccagctagagggtggtgcgcaggacgtaaccttgagagcgggtggagcacagcaaagatttttttaaccaaacccgagattcgcttccaagggggatcgaagcgggacctaaaggcgctaaacgagagccttaaccattagccctttcacctcactcttatcatatccatgtacagatatatagtaggtgtttacctaaaggcgtcgttttagtctgccacaggtgatgctgaaattgctcaacaagctagcgatccaaaaccagtaacagtctaacagaaagcctaccgaagcaactctaatgtca

SEQ ID NO: 539 - DNA, 666 bp, Zea mays
tgctgctgaccgtacgtcttccttgggtagcttcgtacgaactgatagcttccaatgcctgctatgctcaaggagtccacgtacctgtagacctctctgatggtgtccgtgtgatggaagctctgctgccttctctcaccgttgggaaatcttatcaggatctgcaaaagcatgcacagttcatataataactgatatatatagcttagaccagagaatcggtagtatgcatgcataatctaccagagtacgacacgtgcggttaaggtgcccgcgttaccctaccttggtatttggttcagttctgtgcgaaggtgcagtttccttgtgaggggatgctctgatctgagtcgtcgtcttgataggttctcttgatgcctggcctgcacgtcttgggcgaagctcgttacctgctctcggcttggcaatggcaatggcagctccctgttgatggctctttctggatctttctttttcctgcagccaaaagagttgagtaaggttcgtcagagcaggggattcaattcaagagggactagacatgtgctgccatgacaagaaaagactacctggtccttccggagggactccatgtaagcagcgtcctgttcttgtcgtagccgctgcgccgatctcctcctctcttcttcctctgccgatctggca

SEQ ID NO: 540 - DNA, 677 bp, Zea mays
tggaggacgacggctgtggcgccgagaatggcaacggctgctgtcctctcacgtcttccggctgctgctgccgccgccgccgccgagcggaggcgccgtgtcgcagagttttgctgccggcgtcccggttcggcctgttcttcaggaagacccggcacacgacccactcccctggctcagcaacgcagccctgcagtcattggcaacggcacgcatataggaatcactatacgcatgtgcaaaacgaataaaaccttgccctccaaattcgtggggggcaaatgtaagctacggcggcaaaacatcgcgatcgaggttgcaaagcggatcgagtactccagtcgaatagtcgatgccaaactgccaccgttgccccccaagacggggaatttctgctttctgaatcggtctattcgtcaagatgttaactgacagtggcatgtacagtttacatcagagaatgaagtcgacgactcggtaaaattttcaattaaaaggttgaaattatggtgggagctcttacatgtctcgcattcttcttcctctggtcggccacgccgcggggcacggcgagccggtactcatgcatgacccagcctgtccgcgacgacggcggcggcggctcacggcggtggaaggcgagcgccgtcttgacgcccacgagcaggggtaccgag

SEQ ID NO: 541 - DNA, 708 bp, Zea mays
  unsure (1)..(708): unsure at all n locations
tgctcgcaatttggttgaaggaaccaaatgaagtcaggcatgtggggccgattattccgtgcccgcccaagagttcatgactcaatgagccttgcattgatgcagtgcagcagccggagttatatatgtgtgacatgtgagttgtgaggctagaaagaaatgacggggcgtggaggtggactggtggagtanncccgcccgcggcaagccaggcatacccgtaccgtacgtggccaggaatgaccgcacgcacgacggcggcagcggcatggccgcatgcatgcgttcccgtcaggcagacctggcagtggcagacagtcattttgcccaaagcgagcaagcgtccaggcgctgggcggccgtagatgctggggagggcagggcaatggcatcacgcatgcatgtgtgcatgctctctccctcccgtcccgcggggtgagtgagtcagtcacatggcaacggtcacgggcggaagcgtcgtacttgtccgcacctcggccggcggacccaactgccgcaaccggactaccccgccggggccccagccccacgcagtccagtccccatcgaatcatccaatgacccatccgcctgcaatctctccatctcatctcgagcctccgccaccgtccgtcccggctgcgtccggtcatgcgcccagcgccgtgttctggctccattcgtcacggctcgcaggggtaccgggct

SEQ ID NO: 542 - DNA, 695 bp, Zea mays
gtaaagcccactctagaggatccccctgcatcctggagagcagttggccagtagaagccatgccggaaggccttaccaaccaatgtgcgggatgatgaatgacttccgcactctcctccatggatctccgcgaatagctcacgtccctcctcctgggtgatgcaccgcatgagaatgccgttggcgccatggcgatatagatccccttctaccaccgtgtatcatttagccaaccgcactatgcgctctgcggacacatggtcttcaggaaggatattttctttcaggtagtcccgaacctcagagatccatgcatcgggaccactctgagctactggctgtggcgctcagaggttggcaggaccctctgtagcacacacaatccttggtgggttctgcagatggatcgccaccgggaccgctagcttcgaggtgctagtctcacccccttcgcccggttcggcaggctgggcggtagacctcagcagtcgtctttcgaagacgccctcgggcatgggtgcccaagttgatgccctcgtggagagttcatctgctgctgagttgttagcccgaggaacatgttgcagttctagggcaatgaaatccttttccagcttccttacatggaggaggtaagctgcgagcctgggctcgttgtagctacattctccacggacctgcttgataaccagatc

SEQ ID NO: 543 - DNA, 665 bp, Zea mays
tgcatcctaaagagctgttggccagtaaaagccatgccggaaggccttaccaaccagtgtgcgggatgctgaatgacttccgcactctcctccatggatctccgtgagtaactcacgaccctcctcctgggtgatgcaccgcatgagaatgtcgttggcgccacggcggtagagatccccttccaccaccgcgtagcgtttagccaaccgcactatgcgctctgcggacacatgatcttcaggaaggatattttccttcaggtagtcccggatctcggagatccatgcatcgggaccactctgagatactggttgtggcgctaagaggttggcaggaccccctgtagcacacacagtcttcagtgggttctatagatggtacgccaccgggaccgctagcttcgaggtgctagtctcgcccccttcgcccagttcggcaggctgggcggtgggtctcagcagccgtctttcgaagacgccctcgggcacgggtgcccaagttgatgccctcttggagagttcatctgccgccgagttgtcagcccgaggaacatgttgcagttccagggccgtgaagtctttttccagcttccttacgtggaggaggtaagctgcgagcctgggctcgttgcagctacattccccgcggacctgtttgataatca

SEQ ID NO: 544 - DNA, 798 bp, Zea mays
ccactctagaggatccccctggtcctaccatgcatgtcgttggcgaatgatatgattgaaacgggaacggcgccgaggaatcttgtaagcccgcgccgaacgaaacttgcacaacactccgtcgttccttgctctatcagacgtcgtcgcaagaaagggagggaatacacaaagagcggtaactggtgcctggtggagcacgaaaggcacggagacggtgcgcgtccatccgtaacaggaaaaactaaactctagtggccaacaaggactgtgaattaattcatcagtgtcaatgcatctagctagaacaccggtcctggtcactgccattctgctggttggttcgatcaataggcttaatttgcatctggcggcttcagagtcagtcaaaaaaagtaactattatatgctcgccgtatataccttaacgtgcagtggtattattactagatgatatttgctgattctgttacagttaccggcttataaaggcgagataaagtggccagcagcttatgaagcagcgaccggtaggagggagggaagcaaagcagtttggcgtgtttgctgcccccatgggatcccctaggaacactggccgttccgttgcggctgccgcccccactgttctttccttaacgaggtggtgcaagtgcaaccgcgggagcgagaaagccagccaagccaagcccatggggcatgggcccctgcctcctttcccctgccctgaccctgatccaaacgccttttgacattgacctccaccgggtccggttgcagacttacaggggtacgaga

SEQ ID NO: 545 - DNA, 689 bp, Zea mays
attccagctcggtacccctgctcgacgcctcgccggacattaaggtatgctttcagtgtcctcttggcaagctctttcatatttgatggtgaaggtgactggacttgttggttgctgaatgtgtcgagctcggcaagtagagatacacagtgttctgaacgttgtggcttgggctcatcaacaaactcaccgcggtcaatcaccttcttgcctatcatccggacaggagcagtccgtcgcctcgaggggtattgtggtaagtcaacaccagcctgaatgcatagctcaacaattgctggtatcctatcataatcaaacctggtatcatgcttcactctccgaccaaatgggtcaaaaagatggtaagactcaattgggatgagaacatcattgatggaacctctagcccaagagtgatgactgttccgacgctggcttccggaaccgtagcagtcttggatctggtggccaactggaccaacatggacttgaggacactttctgaaaaaaatcaccagccagtgacagaagttcagggtacttggcaaatacttgcagacaatgctgattccatgcatgcacgagtgtaacactattattttccttttctttttatgattataagggtgatgcatacgcacatgcacagacaccaccacgatactactgcaatactgcttgtaataaca

SEQ ID NO: 546 - DNA, 680 bp, Zea mays
catactcctctcagttctctgtattccctcctcaaaataaaccatcctaatccaacaaacactacctctgccagaaatattgctgacaagaatccatagaagtacagatactttgatccactatgatctctcttaagcttatccagaaaatctgctatgaagtatctatttgttgtaccacagtcaggactatacttgggaccaaaaggttgtgattgcggaattgaggcatccaacacttgtaatccattaggaatcttgatgtacatggtaccagtactaacaaagttctgcagggttacaccgccaacaagaacagacttcggatagcaatcaccaatcccttcccagtatgcaaaacccttgcagttgcaatcatgcaggcactccttcttgcaaaagtcaagagaaacggagtgatgggcagtcatatcataccccaagaaatcagtgtggggtagcttagcaaaatccaccttctccacatcacaactgatgttggtctttggtctgcagcctttgctccgctcacttgggtcgatgacttcaaaaccaggggcacacgcacaagcaggcacaggcgtatacacacaaattccgttttcgccacacagaccgtgtacattgcaaagctgaggaaacgccatccatgtgaccgaccatgttctgtctgccacatt

SEQ ID NO: 547 - DNA, 741 bp, Zea mays
gccggtagctgggcctgggccctgggcgaagctcacaagtcagaatctgccgacgtcatccgccatggtgatcgtgatccatcaaagcttcaaaatcctcgaaccggtctacactctacaccaccaacccccacccgtgccccgcccccttctcacctacctgccacaatgccacatctcccccgtacgtcgcccaactcgctttcgcacgaccgcgtcactgttctctctacctcgtggggcactgggcagcaggcgccaatctggccgagctgatcgagagcccgaggcgacgtgtactggcgcaccgcgcaccaacccaaccggcaaccgcgacagggccggcgggccggcagcaagccccgactccctcgggctctccggccgtcgcggccgacgcttcgcctcgctgcgattcggcggccaaacccacccgaattcgcgtcgatccgagctcgtttcggccaaaagaaaagccgtccgctcctttctctctccccgagttagttattatagctttgctgccgtcgcttaatccagccttccccgtctctcctcttctgccgaacgagacagaccgggttatgtagcctgccttgctttcggcgagagaggaagaggcggaggagatcagggcaatgggcggggcggaggcgctgggccagccggacggccatgcgaacggggccgtggtggaggagaagctggacttgctgcggcggcaggggtaccgagtccgat

SEQ ID NO: 548 - DNA, 714 bp, Zea mays
actctataggatccccctgttatctaatctagatcagaagctgaacgctgctgcggaagttgcatgctggagatgtcctcacggggcaaatggcccagcgagcattctgctccggcatcagcactgctacccgatactgcaagctcagcatcgctctccagcaatggctgggtggacttcctgttcctcctaaagacgaggtataggatcgcaactatgtaaatcagcatgcccaaaaacccgaaaataccggaaaatacttgagaaatggtggtcagcccgctctggacgagcaatttcacaaagcttgttatcagaaagtaggtgttgatgacaacaataaacgagccgatcatccatgtcagcacagcagtctgcatttgacaatcaagttagatgagttgctatgcaaattcaaggtaattactgtcgattctgtgacaaaatgactcacgaatattgaatttgtatgctgccccatctttgttttgctgctggtgaatttaaggagtggaactaaagcaaaagggagttcaaatgacagtatcatctgcatgtagccgagcaaggcattagttaacatatacggagctaaaaaccttaattgacatgagtaatgagattaaacattatagaactattaagtttttgaggtatagaagagtacaacagtaaagttcactgattaccgatgcaatgataatcaactggcca

SEQ ID NO: 549 - DNA, 781 bp, Zea mays
tgacccatgggcgaggaggcaatcacgctcccatttccccaaacttgactccaccgaaccttttcctgtcagcgacaggctgcctcgtgagggggtggaccggcccagtattacggtatttcaccttatcttcggacatatgaatcagcctctggtaaaaggtagggcccatgaaaaccaaggattccattctttcaccagttcgaccatttagaacgttctcggctccccatcgtgaataaccagccctgcaatgcaacaagatacatagaaagttgtgtgtttccgccattttgagcaaaatattacaaaaagagacacaaatgtgaaactactgtaaactaagagatactaggaacaatgcagtacatgtttattcagatgaccaatatacaaaatgaggttagccacactattctctctctgtgtaatttatttctctacctttcttttttcttcttctgcatgtgtaataagcagtaaagtattaacagagttaagacttcagagcattcgatgcattaatgacgtacaaggttcttataagatgtactaatttaaggcaagcaactattcatcctttgagagggtctcatatatttgtttcgtgtgcaaggagtggtttactgaatcaaggcaagcaactagtcatcctttagaagaagaaacacttacttgtgcaactgttctgcaataacatcaactgatgctgtggtgaatggtgttgcgtatctcattgtacctttgcaggctattcccttcccaagagcagcttcaagca

SEQ ID NO: 550 - DNA, 833 bp, Zea mays
atacgattcggactcggtacccctgttgatgtcatgcaagttttgggctcatctgtttgctgcattcattcaaaggtcagatacttgcatgcatttgactttgaatttagtattcatttttatgttggttcctttggtaatatgaggtctttatgtggtaggctatgtactaattctgtataatagctatgcaaaagaatgtttcagatgctcatcacatataggtgaaagcaataaaaaaatgttcttccctgattaagagagtgataaatccacattctcaaagttttatggaactcaatagattatgactcatctactagcattatctttatattcaatcaaactacctctgatgacagtttgagaaggtgtgcaccttgaggtatgatttaggcctggaactttatgagcggcccattctaatctagtcccagatcttattggatgggtgtaaaaatggcttccattaaaatcattttctaatccattgtacctctgagccattaacagaagcccctagtctccaaataaaaggataccttaactatttaactcccacctgttaatgcttaaaaacttgttttacatggtctgaataggacctttacaaaacatatgaccccaggtagaaaatgatatcattttaatgtttcctttgttaaggtttgttttgattaacattagaatatcttaccagatcacggacagcacatccttggtttcagaactctctgtcatagcaggacaagagaagatcatgcttgatgaatgccgagaactcttagctacagggggatgctttaagagtcgacctgcaggcagcaagttgg

SEQ ID NO: 551 - DNA, 718 bp, Zea mays
tgctgtcgccgcagccgtacatgacgatgtaaaatgtgcgtctgcgtcatcatcatccatccattgcagagatcatcatctggatacacgcacgcaggcagaatgcctgtttctgtcgtccattccaggtttactacagattgtagagcgattacgtagggctacgctgaatttgctcctaacattctggttggcaatatgtaattgtaagcatcaaatttggaccgagtttggtattgggcattgcaatctgtacaaaatcaccgaaacgagacgacaaactgtagcatggatttgcaggctagtggtttgtttgttttgttccccccggcagctcacacaggcgatatgtaattgcatcataatttcataatactgaggtaccgcatactgttgcaggtctcactttttctctttgttttgttttttctagagaagaactgctgcgagtctcctgtgtttctcgtcggtcggtcgcatcgcacgggtcggtcaccactcaccacactgatggaattcttctctgttatggaacacgggcaggatctttcagcgaagcatctccgtcagcttctaaaatgcggttcaatgcgaggggcccatcccatggatgaagccatgcatgatgcatccgtcgtgagacaaaggcgtgaaacatctttgcgagaagccgccatccctgcaatggcagccaggcggcagggggatcctctagagt

SEQ ID NO: 552 - DNA, 695 bp, Zea mays
ctgaatctgaatatctgggctcgcaccattgaaaaccgttttcccaaattttccattcaaaggatggtgacttggtgagagaattcagcccttgtccttttgcacttgcgtcatatcgtggaaccaccaacatgacaaatggttagtattggactgtggacaaatggaaccggaacctagcttcaagaagaggtgccacacctgctgagcaaaagactcaaggcatgtgccatacagattccctgtccctcaaacctaactacgcaagtttaattgaaggattcacacatcttttttttcttgaaaacacagtagagctgcatattggtaatattaaggtgaaagaaaagggataacatcccttacacccatccatacacaacaacactatagtccatgtgaaatgtccatgaccttgaccggatcataggcgtgttttggcgtggtacatttgagaggattttttttaaccctaacctgaaatttgctcccatggttagtcgaacccaggacctaagaagtgccactagagtcacctgaccagctcagctagaggcccattcacataacataatagctaaacttgacctccttacctagcttaccacaaatttatttcctgccgttgctggcatgctatttattactggccatatgattcacatcccctcatccaaaactgagattcatgtgca

SEQ ID NO: 553 - DNA, 761 bp, Zea mays
ctgcttctagtttcaacatattactttcatgtttaggccgagcaagaagagtgaaagaagcttatagaatcttgtacttgatgagagaaggaaaagcagggtgctcccctgattgggttagctactatcttgtggttagagtcctctatttaacaaggagaattcttagagggaagaggcttgtagatgctatgcttgaaagtggagttcttccgactgctacgtttttccatggtcttataggcatcctttgtggaacagaggaagttgaccatgctcttgatatgttcaaacttatggagaggtgtgagttagtggatgctcgtatatatgacctgcttatagaaaagctttgtaggattggtagatttgaaattggaagagagctgtgggatgaagctacaaatagtggtcttgtattaggatgctcacaagatctgctcgatcccttgaagacagaggtattcagaccaatctgtccagcacaaagattaagccctcagaactataaacgcttggcctggaaaaagaaggttactgctgttggagtcaaaaaggacattgctatctcagcctcaaggaagaagtcgggagtgtaggtaatattgaatttgttagcttgagcaaatcttgttattggtcttcgaattttgtgatgatgacctgtgctagttcaaatgttaaaagcatcctaggactagcagctatggtaaaaggcatggaacctgtagtctagagcaatttttggtagttttgaaaca

SEQ ID NO: 554 - DNA, 746 bp, Zea mays
tgatcagccactggtataataaatgtttctggtgcctttttttcttttaattaatgtacatagtagataactgaagcactaatcttaattgtgtggcttgcattgcaggctgaacacgcacgcggtgatcgagccgttcgtaatcgcgacaaaccggcagctcagcgtggtgcatcccgtgcacaagctgctgagcccgcactaccgtgacacgctgaacatcaacgccctggcacgccagacactcatcaacgccggcggcgtcttcgagcgcaccgtgttccctgcaaagtacgcgctggggatgtcggcagacgtgtacaagacctggaatttcaacgagcaggctctcccagcagatctcgtcaagaggtacgtagactagacatacatagatcgactacacgtactgaggtgcctatagaaaactgttcggttcttgacgtggttacgttgtgtgcgtgcgttcagaggtgtggctgtgccggaccagtcaagcccatatggtgtccgactgctgatcaaagactacccctatgccgttgacgggctcgtcatctggtgggcgatcgagcggtgggtcaaggagtacctggacatctactaccctaacgacggcgagctccagcgtgacgtggagctgcaggcgtggtggaaggaggtgcgtgaggaggcgcacggcgacctcaaggaccgagactggtggcccaggatggacaccgtccagcaggggtaccgagctcgta

SEQ ID NO: 555 - DNA, 753 bp, Zea mays
tggtgtcgtgttggaagaaaagaactggcccccgtttttccccatcattcataacgatatcggcaacgagatacctgtccatctgcaaagaacgctgtacgtcgcgttcgcgtcgctcttaggtaattttttttcctttacccttcatcatctgaaatgccataatggtaccttcattatattgcaaaaggtattgatgtgtaccttgatatacgtctggtagggttggtcttgtgcctgttttggaacataatctgcgttaccgctgcctgggcaaaagggtcaggtacgcgataataaccagcctatgtggttgacggccatgttcatctgttgatgaagaggcgagggcaatttagttcataatctaaaagaaagaacgtgtgctgttttgttccttggtgcaggtccaaagatatggttcctcgcaatcatatacttcatcctcggatgccccggtgcatactacctttggtaccggccactataccgcgcaatgaggtaaatgcgatgatacccacaagtcgtttcctccctacaaataacatttcactctcatataagtttctgtctgcaacacatgtgtgcaggaacgagagcgctctcaagttcggatggtttttcctcttctacttggtgagctcccagtgacattgctgtattagaatgtcttgcagataacccggacacaggttcatgctcatgctgattgctgaccccacacaggttcatatcgccttctgcgcgtacgca

SEQ ID NO: 556 - DNA, 680 bp, Zea mays
tctggccggcggggagcagcgggtaccggcccatgaaaagctccagaacggtcacgcccaggccccacacgtcggcggagcgggggtcggcgtggccatggcgctccgtgtcgaaccgctcggggctcatgtacgcggcggtgccctcgtaggcgaccgcgtcgcagcggtcgccggcgcgcgggaggaccctggcgatgccgaggtcggcgatcttgacgtccccggcggcgccgacgaggatgttcgccggcttgacgtcgcggtggacgatgcggcggccgtggaggtgcgccaggccggccagcgcctgcgcggcgacctcggcgagcgcggcctcagggaacgccccgcgccgggccgcgacggcgtccagcgagccgccgccgtccacgagctccagcaggagcgcgacgtcgccgggcgccgccgcgggggcgaggagcacggagtggcaccgcacgacgtgcggcgagctgtcggcgcgccgcatggcgtccacctcggccggggggtcgccgcggtgcagcaccttgagcgcgtacagcgggcgacgtccggcggtgcgcgaccttgtccaccgtggccccgtttcccggccccagaaccgtgagcctgtcgaacttcgagagcctgaacttcgcggttgcccccgggggcggacccccaaggccgtggcc

SEQ ID NO: 557 - DNA, 711 bp, Zea mays
tcgactcggtacccctgcataaaaggccctaaaaggaacaaactctgattgtgccttttatctgcggctgatgaacatgtttttggaagatgttatttgtgaacaattgcgaatatccaaaacatctgaagggatacttaatcatggactgttgccggcacttgagccacagacttctggcgaattgcagggatatcccaatttgtggcagaaaaaaatgctgaacagatcgttaggtccttcaactatatccctgaaaattctctctcttttaaaattttcttgtacctatcacgccactgcattgttttttttatataggtccgtagttcacagtagttcaggctcaataactggttcctaccaattcctgtgggggacactaatccgttcctgtggaattgcagtgataacaacggagtcgaggaacatcctgctgaggcacttctaccagaaatccgagaaggtgagctgctactgctagcaaaaaaaaaaaagacttcactatcaagtataccgaagctacatgaaaccagatgactgaaacgaatctaagcttgaaatcctgaactgaactgtagctgaggcccaagagacctgccccggacaacctcgatacggagaacaacaacagcagcaacaacaagcaggccaggggaccggtcggcgacgtcggtgggcagtcgtcgagcgcgagaagctgaagccaca

SEQ ID NO: 558 - DNA, 794 bp, Zea mays
attcgagctcggtacccctgctgctgctgcatgattagctgcactggttgtttcagcagcagcaagatcttcagcaactaggaggtcatctagcagcacacctgtgaagcaattgctttaaatttggtatcaatagacatagataatcaacctatggatctgagacaaagaaatgtcagaaatgcagtcccaaaacccacatctagaaaattcttaggagttgaacagtaatgagcacagtcaaaattctgaatatgtttgtgctaatcacttggtactctgaattactaatctatgctccaagatgaaaagaaatattaagaatgtgtatccagtaaaaatgtctcaatgagtaacgttaaaaggaagcaaatgtgtttgataactgagtcaactgactggaacatggcaaattcttaaacgtcatgcataagaacgtcaattatgtgatcagaataaataaaatcacagaataaactgtgtgtgtgtgtaaagagtggaaccaatgccaaatacatgggctgattcgaacatttaacaattactattactgccacggatccaactcagtagaacaatagatgcaactgacacatggttattcaacaacccaaatatgaaattaaattgcatataattcagttcaaaattaaccttctttctcttagatctaagtatcaaaataaataagaaaaaatcatcagtaagtaaatgtctggcactgttaatgccagacgcctgatctataacagtaatcaataacttcagggggatctactagagtcgagctgcag

SEQ ID NO: 559 - DNA, 744 bp, Zea mays
tgctgctgctgcatgattagctgcactggttgtttcagcagcagcaagatcttcagcaactaggaggtcatctaacagcacacctgtggagcaattgcattaactttggcatcactatagacaaagataatcaacatatggatctgagacaaaaagagaagtcagaaatgcagtcccgcaaaaccacatctagagaactcttaggagttgcacagtgatgattgatgagcatagccagatttctgattatgtttgtgctaatcactaggtaccttaaattcctaatctcttctccaagacgacaaggattataaagaacacgtacaatcatgtccagtaaagatgtctcaataagtaacattaaaaggaagcacatgtgttcgataactcacagaaaccgaacatggcaatttcttaagcttcatgcacaagaacatcacttcatgattaaaaaaatcaagtcacagagaaaaacaaactatacaaatatatgtgctgatttgaacaattactattactgtcaaggatccatctcagcagaacaatcaatgtaatttgagacatcgtcactcaatccaaaaatgtattgcatacaattaagttcaaagttaacattctgttctcttgaatcttagtatcgaaatccataaataaccaaaaaaaacagtaagtaaatgtctggcactgtcccaacttgcttgggactaaaaggctttgttgttgtaacagtaatcaatagctgca

SEQ ID NO: 560 - DNA, 746 bp, Zea mays
tgagacagttcgcatgtaatttcgatcaggattcaagactataactgagatcatgattgccagaacttacccatcgagctgtatcaaacaacgggcaggtcatacgaacttccttgagcttgttagtcagcgcttgaagcttcaccggattcagcgcgagatctactgctctatcttcatatttcttcatgctggcacaaaaaacgaagtaagcatgccttcgcaccgttggattatatatataatatctaaatcggtgattttatccatatttacctgctaacaatcatctcctccccaagcccagtagctacgcagagggaaccagctactctggttgccattttctctagtggaagggtgatcattggcagaccagcccacagtatgtcagtgcctgttgtgtgtgcattgcagaggggactgatccagaaaaaatcatgaggacagggtgtaaattaattttacattttcagcttatgtttggaaaaaagaatagcagatgaagaacttcatacgtgtccaggaaaaggtctgccagggcactgcgtcgtatatgctcatttttcatggcaacgtctgtgaatacaatttgatctgatcttactcctctggcagcagcatctgtatagaaaaggttaggggccaattgcagatgtcaaatatcatttgaagcttttgtttacgataaagattcaaaagtgacctcttaagcgtacttacatgctctcactctagtttcacca

SEQ ID NO: 561 - DNA, 651 bp, Zea mays
tgttgtgttttcctaatgctaactgctgctattgactttacacctatttttgcagctactttcatacctattacttcaatttttttgttatttcagcaacaaatcagcaagaatatggagttttggagaagaaatgggcaaggttattaaaacgtcgtttaaacgataaattgtgattacagggtagaacgtccgatcgttttaaacaaaccgcgtagaacatccgttaaacgtgttttaacgtcaatttggcatcgtttaaacgttttaggaccttttaccttgttgggcctcacaaaggcccaaaaaactaggtcaagacaacctcctcccttctctccttcagtgccgcccgctccggccatctactgccacgtgtctccctcctctcctccaccccctcctccctcctccagcgctgccaggtccgccaccgccacgacactccccaatagcgccgaccgcagaccgcctcctccagcgcccaagcgcccgcttccttcctccaacgccgaccgccgccttcagcaaccgagcgcccgcttccttcctccagcacccgagcgccccatcccctctccctcctccagcaccggccgcctctaatgccggcacgccgcccgccagctctagcagccaacgtcgctagca

SEQ ID NO: 562 - DNA, 562 bp, Zea mays
tgcttgcttcaaaggatgaaggtttcgttctctacctattcattatttgcttcttcttccttgccaatggttcaactcactagaataattccaatctgttttttgctagcagaaaagaagatactcgtgacattaacacaagctctagattcccaagccaaggagttaaaatccttgaccgagtcaatcaatcgtaccagggaacccataaacattaccagagacgataggttttctcagcaccgcccactggaagaccatgtccctcctgttacgaggaatggtcagtgtataaaattcatggggtcttgtttcatgttttggtgcttagccctattatcaaaagcggcccacctcgtgctgcgtaaaggatataattttttcacccaacatctacgtgaatctcacaacattgccatttgtttggttgtgatttcaggggcaattaacagttcatggagatcttctcaggtgtgcacttataatatccacccatattcctgttccacaagcacgctcacgcattgaattatcatcctatttctaaccccgtaccctctgg

SEQ ID NO: 563 - DNA, 719 bp, Zea mays
tgctgctggtggtcatatacagaaggtgatattgagctattaaaacacatccgtctaatgaaatggctccgtgtttgtgcaaaaatatatcatggcccaagataaatagatggcctcagtttacgtcttcaaccttggataaagacaaaggacatatgattgtcatgtagtagtagtacaatgtacaaacgagggcaggttacaccacatgtaaattttcttgtggacagctcttacatacactgtcaaaaacgaaaacaaaaacaaaaaaaaggaggatacagcttttacaccttcacatcaacctacctagcctctctctctctctcacctaaactcctactttcgctgtcattattctgtaggggtacgaggaaaaaagaatcatttctctgtaaacgaatggcaaaatggggccaagtgttggtgtgatgttttacatggcagacgggggggttttgggcatgagcatcagccaaatccatggaacccggcagattggtacgagttggacagctttggcagcttgagaactgcgagcacacctgctgccagggagaagaccgaagccaagacgaacgccggggtattccctcctccatacagagcgtcccatggacctgctccaagcgacactactatctgtaaattttcatgtggcagcattagtctatggatatcttccacagcccgttcaaaacaaaacggtactagtagca

SEQ ID NO: 564 - DNA, 699 bp, Zea mays
tgattgattatgaccttgtaataatccttttccagaaacaaataaattacttacatatagaccacttagcgcttcaagttccaagtcagcgcatagctttaaagatatgaaatcacaatcagggcaattgagctttcgttttcgggtgggtctttttactacaggttgcttccagttgctatttaggaccatacaatgattggataagctgaaattttatcaggtttaatcacagtcccatcgcacatttaaacctagtaatggtgcattgacacagtatgctaacatcattgtcgttcctgctggcgacgggaatatacattactcatatagccctagttcccatctttttcacttgcttgtccgattcaagttttttttttccatgctagggttgaagaaaaatctagctttgatgcttacacaatctttgactactggacctgttactgtcagaattgaagatatatgacctatctattagcttggaatgcttacacagtcttttcttcgatgcagcgaatctggagactcggacgacgaagagtacgctggcgcctgcgcctgcgtaatccaatgaggccagggatctccagtgtaaattctgtgaagagaaaaaaaaatcaaaacaaacaaacaaacagaacggggttgtctcagtcagccattagtcctggtcagtagagagggtagggagca

SEQ ID NO: 565 - DNA, 800 bp, Zea mays
tgcactatagcacaagtaaaggttgcaactttacgagcaaggctttgcatatgcaccagcaccatgcccatgccgatgcctgtgggctgtggcgccaacccggccgcaagtcaaacgcagtgccgccctaccgctccactctgccgcccggctagctagctggtgcagcccaagtggcggcggtctgatccatccgattgctgctgtgttcgtccagtactccttgcgcgcggcgtagctgattgattcgagccctctgcttgccggccattgcagacgcagcgaaaccggccgcggaaagctgccggatctttgctggatcgagattcatgtgacgagacctccgcgtggaaaaatcgatggtgctgtgcccatcaagtcaagaattcggggcctcttgctttccgagagaaaaaagagaacttttccgagaaagaattcagggtctcttcttgcgtctgagcttgcccacgttccctaccactgtagcatccggtgaagcccgatagcggccgcgtcctgttcctgctaaagcgagcacatctgattgacgtcgttcctgcgtgctttctcgcagcaatttttttttttttagcctttgcgcgtataggctggaaggctggggaggcggaggcttcattgtcaaacttgcatgaggagcccgatccctgataatctgagatccatgagggaaagttataccctctgatcgatcctgctgtagcacagaagtgtgcgctgtctggaattcatcggccggtaagtgcaaagtcaggggtccggagctaaagtaggctaat

SEQ ID NO: 566 - DNA, 722 bp, Zea mays
cccctgagtttttctcagagtgttcgtgatgttgtgttgggcagcggtgaaatcgtatgcttctcacactcgagttgcttcatcctgacatattcaatccatcctaactattgactcgtttgtttatgttgcaacttttcagatggttgatgatgttaaatatacagtttcacatgtcgtggagcctatggagcggagttttacaaagataaataagacaattcatcaaatctcagaaaacgtcaagcagcttgagaagcaaaagaggaaggcaaaggacgacagtcatcttattcccctagaaccatggtcagaggaattttcagaagctcatgaccatgttgcgggcggtagtgccagtgacagcggattagctaagacaaggtacaacaggatcttaaataggccccggaggtcattcgagtccagattgcgcagatggttctagcagccagccggtgctagtgggttaattgattttgatcaaaagaggcggttaaccttttcgctccggttgtttgacaaaatgatagcaattctgacaaactagttctccctccgttcttttcttctttatttgctggtgacaaatattcgagaacggagtttggagtttggcacggggtggaggcagtagccagcagctcttcattattttgtgggtgacaaatattcatgaacggagtttggagtttggcacggggtggaggcagtagccagca

SEQ ID NO: 567 - DNA, 681 bp, Zea mays
atccccctgcatttggtgaaggcgtcgacggcgcgggccttcgtgccgcgggacctccgcctggtggaggccttcggctacacgctcggcggcatgttcctggcgcgctaccacgacagccctgccggcgaattcgacgaggtatactgcctgcgcgcgccgcgcctgccgccgccattggctgctgctgcgggttctatctaatgttcctgcaagattcggttcgacgacccggccgacccaccgaccgacacctttttttttttgcgcctgcagctcgtggtgatcgccggcattgtgtggaacccgccgacctcctgcgcgtgagttcgccttcgctccgcttcatgcctgcattgcattcgcatcttctgtggcctagtttaatcccttgtaggcttctacgccgctttctcctgcctgattggcctcgatcagggaccccccaacagaaaagaacaggggcaacttgcagtatgcgaaggggaaaggaaaaaaaaacgaaaaccctcgtgcttgcgccagccggccataaacaagcgccttatcccccatatgattgtacttggcagcacggactgtgccttgcttctttcaattattcgtaggctggggaggggtgtccgggtgcgctgcacttgctccgcgtggccaacttgctgccctgcgcagctcagctca

SEQ ID NO: 568 - DNA, 702 bp, Zea mays
tgtcagatgcatggattcagacttcagtagtgctgcttctttgacgtcttttgccttcttaacagaacaggtgcccagaaacagaattaaaaaaaatcgaagaaagtattgttttggcagttggactgttggtagctttacttgccagttaattgtacttgtgtagccgtttatttctgcctgtaaagcagtttttttgttcgttcactgtatccattgttccttttaaacattgaggagcacctttctgaggggttcgggttctgttaatagctttgtccttttgctgagaatacatgcaaaggatcagatactgagttcagttattgcttttgtactaatctgctagcccttatagttagttactcagaggattgaactgttgaaggcttcagaaaagtatgatttgttttgttctataagtcctttattacaatcgtttgactttgtactcatcagaaggccttccttcctctcacctctttgttgttatgctatttttccacgatacagtgaacatgaaattggagctcatttagttatatgcaaccttttgttctgcctgtttcttgtgctctctgcgtggaattaagtactcgtctcgtgcatgcatttacgaattgaggatttatttttatttggcccgaagcttttggctgagcgtatctgagttttttttctctctccctctccctggttaca

SEQ ID NO: 569 - DNA, 763 bp, Zea mays
tgtaagttatctacttatttgttccctattttcatttatttatttaaagttgagatttatccaaagtattgttagtgtaatgttttttcttctgccacattaggtttttgtcaatgcacggcttcatgtctcaggaggggctcttgggggtggtcgcatggtagaagactcctcaagcgttgcaggttccatattttaaactttctttgatgatcacatttttgtagtattctttttttacgtaaaacaattctgtggtattcaatagcaaattatacacttcttacaagtcaacatatagatttcactatctcagtttctttggaggttactagcagaaaagtaatttagaaatgattaatatattttactgaggttctcaacgttgtgtttttcggttgctggtaaattgctcatttgctgctatagttgattagtaaatatagcagtatttatgtcattactggttacttgtaatgcaaacctttttcattgaagtacatgttctgtaaaatactagaacatggtcagtactttcagcattggtcactaacttttatgttttatgcgagtaataatatttctatttccatgtttatctacttagtttccatgccatgccgccttttcagtattggacactgctgctggagtttggtgtgataccaaatcagtagttacaactccaaggacaggaaggtatagtgcagatgcagcaggtggtgatgcttctgtagagcttacacggcggtgcaggcacgca

SEQ ID NO: 570 - DNA, 765 bp, Zea mays
  unsure (1)..(765): unsure at all n locations
tgccatggcgagccatcagcgcggaggaggtcgggatcaggcgaaccccaacgtctttcaggggaaccggcgcaacggcaacaaaagcggtggccgcggcagcggacgaggtgggggccgaggtggctacgcctacggctaccagggaggcagcgactacggccgcgggcgcgggcacggcggcccgcaaacgccaggacctgatgatgtgcgccaagcagaagcaggtccgtctctcgcggagcgcaacgcggcggccgccgcagccgcgctgagggagaagttcaagacgatggacattgtccgcgacgagcccatgtttccagcgcgcccgggcttgggcgccgtggggacgcggtgcggcgttagggccaaccacttcttcgtcggcctcgtcgacaagggcctgcaccaatacgacgtaagaccgctcgccactccgcgttcttggtgttcatctgatgaccaccgttgcccaccattactatgtgcttatgcaggtgaccatctcaccagatacaacgccaaagggcatgtacagggaaatcatgtcgaagctggtttccgagaaccggcagaccgagcttggtggccgcctccccgcatacgacggccggaagctactgttctccgctggcgagctgccgttcgagaccaggaatcgtggtcacctgtcggcaggaggaaagatgccaaggtggtgacaagcaaccacggggatcagctgcagcagggggtnctttagagncgactgcaggcagcaat

SEQ ID NO: 571 - DNA, 682 bp, Zea mays
ctggagtattggactcaccctggcaagcatcgttatgactggagaggggtggcgcctcgaggcaattacttagccaatttgctgaaggtgcgcactccgaacacagccatgtcagtgcgggtgaaaggaagctcgttttatagaacctttttttgttgttgttgttctgcgatgcaggatctggatgtggctatgaagaaatcaactgcaaggtggaagattgtggttgggcatcacaccatgaggagtgtgagtgagcacagggacaccgaggagcttctggaattactacttccagtcctcaaggttacatttcagaagctatctcaaactcaatcggtttcaactttcagaaaggtccataataataacactgtttctgtgggaaaaaaattcacaccgttcaggacaatggcgtcgacttctacatcaatggacacgatcactgtctggagcacattagcagcagagacaggtacaagcaccatacgatacagagatgaattcaagtaactttcagtccgtttccaagatactgaaccttgtgaaattgcttcttctgtctcagtccactccagtatttcacgagcggaggcggttccaaggcatggagaggagtcttccatccaaacaaggacaagctccgattcttctacgacgggcaagggttcatgtccctcca

SEQ ID NO: 572 - DNA, 691 bp, Zea mays
tgcacggagtaggccacccggtcgaagtacggcagaggccgcgagatctgtatcagcggcgtgtagtttagctgcggcgccagggcggcgccgtcgccgccgaggacgaggaggccgggcccgtcccctggggcaatgcagtaggcgaagcggagggtggcagtctgcgtcacgaaggacaggctgccccggttcatgccgaggaggcccgtcgccgcctccgagtccgaggagttggtggcagtggcggacgagtaggaggtgacgcagccgaagagcgcgcgcacgggcggcgccccgccgaggaggaacgtgtcggcagccaggatgccgtcggcggacgaggcgtcggcgtaggagagggagacgcggcaggagttggacggcggcccggcgcagaacggcgggacggggaggtcgcgcccgcgccactggcactccggcgacgagcagtgggcggcggcgtacgtggacgaagccgagccgttgaacgctgccggagcctgtggcggcggcgcggacggcacgcggctcccgttgcagcgcagccaggagagctcgctgccggtgtcgagcaccatcgtgacgttctgtggcggcgcgcccacggccaccggcacggtcaggctgacgtcgtggcggaaccgtagcctgttcggcggcggtgaatgtgtagtaggcggcagcacca

SEQ ID NO: 573 - DNA, 754 bp, Zea mays
acgaattcgagcctcggtacccctgcgggggcatcaggcgcgccttcggccacctttgggggcaggtcttcgccggccgcagcggatgcgggggcatccggtgcgtcttccgcggtctccggggttggctccagggcgaccccaggcacggcctccgcaggggtcggctccgggtcaggcagcgcgctgttcagcgccccgaagtcgtccacccgctcgccacgcgccgcctaagacaaaacacacaaaattcagcaaacacacgcacaacccacatccaacaaacgccaaacaaacgaaaatattacctgagccctcgccgtctcggcccgctccctgaccacctcgcgaccgtgcggaccccacatccggtcgtagagggccccaacggattccttcactatggggtcttcaaccttatagatatctcgctcaaaatcttcatcagcctggtcgaagacctcgaagtgccggcacccttcgcgggagagcgcgttcatcgccccctcgcaggtgaccagggaggcgtacgacataaacccccccacgacagtggggagttcctgcagctcctcctgcacccattccagacagcgaagcccgggctctcgctccggcacctcgaagtcaccggtccgcgcacccagctcacgatatgtatccataagctgtgtgcgcgtccgttcggcctccgcgcgcatcgcggcctcggccctctccatgcggctctccagggcggcgagccgctcttgca

SEQ ID NO: 574 - DNA, 748 bp, Zea mays
ctcgttacccctgtgcgcgcgcgcgcgcgggaggagtggcgccgcacgcaaggtgtttggcggattgcctcttccagatcatcgccgtgccgcctagacagtcgcatgacattgttgaatgaagcccggcgcggctcaatggcaaccgttgcttccacttctggtaggctcttcatcttcgcgagaaacgacgaggaaactggttcgccgtagggtgatcttttctcccgcgtccggcctcagccagttgatattgtcccaacctggcattttgctcccattcgatgacttttcaagccgcaagcccaccgaacaacgtgcgcgcggacgttttcttcgcaaggcccgaatccttccaatccaatccccatccgggcaaccgtctgccgtgttgccccattcctgcaatgcaccgcgtggcgtctagcctccgcatatgcttcctttataagcttcaaacaacaactcccttttgcagattcctcgttcgcctgctgcacgctcaccactgtacgtccccgatggctgaagccatcagcgcgaccagctcgtgcctggaacccctgtgcggttgtctggaaagcacaggcgtgttcgaggcagtgggccgggaggtggccgcgttccttcgcatcaagtcgaattggggcgacctcgaaaaggcccgggacagcctgcgcgccgtcgagacgacagtcagggcgcgggtcacggcggaggaggacaagctgaacgtctgtgatcctca

SEQ ID NO: 575 - DNA, 645 bp, Zea mays
tatcggactcggtacccctgctaccggccgtgaagcccgtggtcaaggtgttgcaccaatgatgcatgcgtctagcgtcgctggccatggcggccgcgctgctgatctagaccccgtcaaggccaagatcgtctcccaccctagctaccaccgcctgctcgccgccttcttggactgccacaaggcacgcgcgccgatcgacgacccttcaactttagcgcgcgcgcgcgcgcacgtgttcgttcctgttgctgctatccttcctagattacatgtgttcatatatccctgtcgcatatgtgctcaccttactcaggtcggctgcccgccggaagcggccgaggagatcgcggcggtggcgcgggagcgcgaggcgtggcagcgtgcagccgcgggcgacgttgcgcacacaaggccggacccggagctcgaccagttcatggtggagtaccgtacgaaacacatgcatgcttgcacatgacacaccctgcagcctctcatccctgggatgatcacgcatatatatggcctcatatctattggtgttatttcggtaaaacacatgtttggcctttgtcatgggggaaaagtttttgttgtgaccatgagtcctactgcgaactgctttgtgacctggaaagaagg

SEQ ID NO: 576 - DNA, 726 bp, Zea mays
gagatgaaagctcccatggttggcccggtgttggtaatggagttgagctgcgcctccactgtcgtcaggaactcctccgcctcccggagcggccgggtcagctcctccttccacgtcacaagcagctcgcagtaggactcctggtcacaacaaaaactttcacacatgacaaaggccaaacatgtgtttaaccgaataacaccaatagatatgaggccatatatatgcgtgatcatcccagggatgagaggctgcagggtgtgtcatgtgcaagcatgcatgtgtttcgtacggtactccaccatgaactggtcgagctccgggtccggccttgtgtgcgcgacgtcgcccgcggctgcacgctgccacgcctcgcgctcccgcgccaccgccgcgatctcctcggccgcttccggcgggcagccgacctgagtaaggtgagcacatatgcgacagggatatatgaacacatgtaatctaggaaggatagcagcaacaggaacgaacacgtgcgcgcgcgcgcgcgctaaagttgaagggtcgtcgatcggcgcgcgtgccttgtggcagtccaagaaggcggcgagcaggcggtggtagctagggtgggagacgatcttggccttgacggggtctagatcagcagcgcggccgccatggccagcgacgctagacgcatgcatcattggtgcaacaccttgacctcgggcttcacggccggtagca

SEQ ID NO: 577 - DNA, 657 bp, Zea mays
  unsure (1)..(657): unsure at all n locations
tgagcaaaagcttccaccggtcggcaagaacaccaatggctgacgagtcatggagggtgccaacgccagtgcaagaactggctgccactgccaccttggaggagccgccaagccggtacgtgctgcaggagaaggaccggcgcggaagcccgctggtcgctgatgacatgccagagcccctccctgtcatcaacctcagccggctgtcggaagacgctaccgaagctgccaagctcgagtccgcactgcaaagctggggtctcgtcctggtgagtgagtgagtgagtgagtgagtgagtggccgctccattatagtctgcaacacctatcttaattatagctagctactacctatgtttatcctgcaggtcaccaaccatgggatagaaacgtcgctgatggacggtgtgatggatgcgtcaagggagttctttcgccaaccgctcgaggagaaacagaaatacagcaacctgatagacggcaaacgtttccaggtcgaagggtatgggaacgaccgtgtagcaacggagcgtcagatcctgaactggaacgatcggctgcatctcaaggtggcgccagaagatgagagagactacactcactggcccaaacaccctgaatctttcaggtagcctactcatctttcaggggtnccga

SEQ ID NO: 578 - DNA, 722 bp, Zea mays
tgcttcaagtactacacacatttcacatgtctgtgccaccttttatatgttgaccaactatctgtgtatctgagagtacctttaaacaatgcaaatacagtgtgcacttgtttgttcttccgaaatttttttatttttcagtggggctgcaagagccgctttcccaatgattgattaccttgtgtagctagtagagcaaagcgagatcgccacactgctttgcaggctttatcaagtgctcctcaacatgtcgtcggtaggggcggcgtactggcatgtatctgttggagccattataccgtggtccagatgctcgccaggagctgtactacaactttttcttttctgtgctcgagagaggtcctctgaacgtgaaacttttatctaatctgaaagccaatttgttaactggcattctgagacctgagagtggtccagccgtgtacttttatttccggaggcaggcgcgagtactatttttaaataatgggtgagaaaacatgtgcgccttcctccagtcctgcgggcagcagcgtttcacagccccacttttgaatttgaaatatttatggctgggcgttagcgttaccctgttcagcatcagtggtgtggtagtccgggctcctcctgagagaataatagttctgttctgttttgttttgaatttgaaatttgtttgatcaggtttcacttgctcgcggagtttgacgaggccaagcgca

SEQ ID NO: 579 - DNA, 756 bp, Zea mays
tgcattgcagaagaaaagaagaaagtacgggaaatatggcctatatgactaggggcaaatgcatcaacatgtgtgaacgatcacaaaaaatatgtaatcaaaagacagagaggtaggcctaaagggacaggtcgtgtgaaaagttgtgcaacttcagatgatgaccaaaacgaatcattaacagaagacgatgtggtgtaatgactcgaactatatagttattattggacgtttaaaatttattactgatcataatgcacttattactgaacactttatattaattactggacattttataagtattactaaatattttatactcccctccgtccacaattagtatcattacatagatactattatcgaggagtcaactatttttaactttgatcatatttatataagaaattattaatatttatagtacataattagtatcattagatagatctttgaatctatttttatagtacaattattcgaagatgcaaatgttactaatatattttataaatctagccaaatttaagaaattttgaccgacacgaatgcatagtgaccaacatttgtggacagaggcaaactgtagttgttactgggtagctttgtaattattaccgaggatcgtctgaaattgctggaactgttgttggtgagtgtggtggggttggaagcgtagctgggatggcctgttagcctggtgccttgtgtgcttgagatggttgttgatgctcctcttgtgctacatgctca

SEQ ID NO: 580 - DNA, 680 bp, Zea mays
cgagacacttacaaatccttcaaaacaaataatcaaccttgcacacaagaatatcaagaagagaggaacaagaccgctcaatccggagaacgcaaaattaacacacttagaatttacttgcaagaactccaaaaggctagcttgctagcttggctgcacggctttcaaggagtggccagcagcagcagtggtcatcagcttctggtcctcatcatcgaactggacccacaccgtgctgatcgtggtctccatcttgtgcgcgaacggcgaagcaccactgtcgatcgcctctgcttcaggtttggcttcgacctcttcaggatagccatcttgttccgggatcgggatcatcgtcaccggctccatcatctccagcgcaaaggcctgcgctggcgtgacgaccctgacgagcgggtactcgaggctcgtgctgctcgcgttactcctcttgcacttgaggtagaactccttgagctccggcgtctgggcgcacgccttcttcagtatctcgtgagcggtgaccctcgaaggcttgctcagcccggcgaggctcctggacagcagcagcatgacgtcgacgccttccgcgaaggcaacgtagaccttgaagctctcacggagcacaatgccgaaggccgaccgcacggcggcgctggcgctcgtgttgttgtccggcagca

SEQ ID NO: 581 - DNA, 948 bp, Zea mays
  unsure (1)..(948): unsure at all n locations
tgcaacaacaaacattgtatatggtgattgctatttttacttgtaatgtcataacactgtccctatcaccacatcaaatattttgtatgtcattgtcagcgcctaaagaggcccacggaggggctgcagcagcagcaaccataggccctccaagggagattggacaaggatagttagagataagattagaagattagttgagattatttatgagattagttgagattatctaggaaggttatcagttagtttgttgagagttttaaagtgacaggggcggtcagccggcctatttatataatcaatggatgagaaataaagtaggcaataattagaagggagaaaccctcctcttgctcggccgtgggcagaggcccccggccgacgttcctggcttcctgcccatcaatacccatctccaatccctcactgatctagcgaccataacaatatgcattatgttgaagtttataaatggattacctaccttctcctaataacttaagttttttggttgaactggtaagtgcgttcactctaacatggtatcaaagtcagaagtctcgagttcaaattctaggagaggctttatttgtgcctccacccatttatttctacatttgcgtatttttctctggctgcacgtgagtgagggtgttgaagtttataaatggattatctaccttctcctaatagcttaagcttttaagttgaactggttagagcatcccactctatacattacatttaggtcagcttactagatcagctcaaaggatgggaaaatctgcaagtctaaaatatgtactgtacataagtgtagcatgttatcatttgtcagagacctcattccccatgggaaaaaaatagctgnctcttgtagaaattagaagccggctcggtctccccaaaaaattttgggaagggacccttccctaggttataccc

SEQ ID NO: 582 - DNA, 704 bp, Zea mays
tgcctccagtatcaggtcatgcagggtcccggtcaccacctgccgcttggatttgagcaccctagtaaactccaaagcggcgccctgtacaagaaaattctccaaatattatgaactcggaagaaactcagcgtggctgtgggggtacatacatctacggagagatgtgagatcatgccactaatatgagaaaatacaagttcaaccattaaccgaaacgttgattctagcaaatctagtaggtcactcccccaaagagttgagacctaagtttaaggacccctgcaagttgatgcaactggaaagcccgttagcgaatccatggacccaactcttttcccctctcgggagtgaaacttcattgacctaattaggtggcgtcacctcgtaagtcaatgcaattcactctctctcatggtagtacataccaagagtccacacgctgacggaattggtatcggcaggctggagagacgaggagggaggcgcacacctggttcttgttgtagtgggcgacggcgaagcgagcggcgtccacggcctcggcccgctcgcggagcgcggcgagcacacccctcacgagaccgctctcgtccccgccgaggtgaaacccggagaccgcggcggcggaggccgcgaggagcaccgcggcgaagagaagggcgcggcgaggcatcatcgtcagcgcggcgaacctactacca

SEQ ID NO: 583 - DNA, 781 bp, Zea mays
tgcaacaacaaacattgtatatggtgattgctatttttacttgtaatgtcataacactgtccctatcaccacatcaaatattttgtatgtcattgtcagcgcctaaagaggcccacggaggggctgcggcagcagcaaccatgggccctccaagggggattggacaaggatacttagagataagattagaagattagttgagattatttatgagattagttgagattatctaggaaggttatcagttagtttgttgagagttttaaggtgacaggggcggtcagccggcctatttatataatcaatgtatgagaaataaattaggcaagaattaaaagggagaaacccttatgttgctcggccgtgggcagaggcccccggccgacattcctggcttcctgcccatcgatacccctctccaatccctcaccgatctagcgaccataacagtcatattcttataattaggtgtgttctctgtaatgctcttctttatcttatgtaattttttttgtttttccccacgcggatggtagttacgtcttccttttctcacatggataactctgctggcaggaaagtctctctgctttcagatcccagctctattaacaacaaagattgtggtggttatatcaccctcggagttcttcatgatgtttggataattttcttgtagggtgctgctttagagtttactagggtgctcaaatccaagcagcaggtggtgaccgagaccctacatgacctgatactggaggcaggggtaccgagctcgaat

SEQ ID NO: 584 - DNA, 718 bp, Zea mays
ctgctcgttgcttgcagctcgactctttaggatccccctgtttggaaaatgaagttgacgaagattttttgcctaagtccgcacacttacaaacaccacatgtgggggattcctgagcccccacacccagacctagtagtgtacacaagacgaagatttcacacgaaaaaggcaattgggcgagaagaatggagggattgttcctgataccgctcttgcggcagtggaagtttcaggagggcacaacttgaaggtcactgttgtttgtacagagatggttgacatacatcatcaggctgaaactattaacattgctcaggaagatcttgaaacatcccagagatcagatgcaacctccttaactactgcccaaactgagtttttctccaagctcgctaagaaggtcgctggcatcctctctgatcccgcagaactctccacgaagaggtgtaaacatgctcttgctgccaccccttgtcgcagccgttgcattgcaggagttggggtggaatttgacaaacaagaactctgtctacggtccacgaagatggccatgaaggctctgaaagtaattggtgaagcaggagtgactcagcaagcaaaagaagattatgcgaaagtgtttagtgaaaaccttcctttggctcatgttgaagcactggctaccttgtttggttggacaatgccagaggaactgaaattagggctgagtagtgca

SEQ ID NO: 585 - DNA, 715 bp, Zea mays
  unsure (1)..(715): unsure at all n locations
tgctcggcaatatcacggcaaggcttcagatcgtcctcgctccgtgctcctgtcagcttacccagcagctcgttcagttccgtggctctccccatcttctgcgctgtgctgaacttcatcggggtcggggttagacgatcgtccagacttgggccagacggttcgtcaccctcactggcgctttggctcccgcccaggtccttcagcttctggtccaagatagtggcaaccctctccctgaagctattggcagcttcgttatccgacttcaacctcgcctttgccgccgaaaccaacaggtccatcctttcttccnnnnnnnnnnnnnnnnnnnnagcctcaggatcaacatcagcatcttcttccatgggacagaatgcttcctccagtaacccgacgttctgcgtatacctctcgtacgcttcgttttcagcgtcggtatctccttgcatatgttcctttagcttcataaacctccacttgtttatacccgcaacatcctagaacgaaaggaaaagtcacaagcaaaacaaaaaaaaaaagcggttcagaacaaacagagcgcacggaaacagacaatgaacctttttggtaactgatttctttgtttggagaaacttcagaaagtgctggggaagcttttgcaaggcagccagccttgacgctgaactgtgaaaaaacaacaatcaagcattagaacggtgcagggggatct

SEQ ID NO: 586 - DNA, 704 bp, Zea mays
tgatacatgaacaaagatattacttaccaaagcgaagaaattgatcacaataaaatccccactgatgcttgggtcgtttccaaaaacttcttccacaaaagacaagcattctttcctgtgctccgcctgaatggcttttttccgcattgaaaaggactcacgctcatggtttgattgaatagaatcacctaagaaagatcgttgcatgaataatcggttttttccaggaaataactggacacatgagatttgaatagcctcctggcagtggctcttacttgagatattctctaactgttcggcggcgaggacaggcgggcttgacacaggcatgtatctaacactgctggctgctagatgtgctgacaaactctgcgccaagttcattacattatggtacatgaattaaaccgggtatgaaccccttttttaacacaaaaagattatgaaccctttagcaggccttcttacccggtgcgctgaatgagtgatgaacaccacagcatactcctgttggtcacacgcaaaagctgcagcaagcgcctatagaataaatacggatggaatcatgcgcctatagaataaatacggatggaatcaaattgaaagcacagccctacaaactaaaaaatcgagtacatgagcttaattccgacgtatcctgacggaggtagagcaaaagggagcaaaatcgtctctagtca

SEQ ID NO: 587 - DNA, 754 bp, Zea mays
tgcacgttattcaagcaccaaaaatgtttggatagacccagctacatattgaacccatgcatatatgattttagcctgtcaacacataaaagcaaaagaagtgaaaaagggataaggacatgttggatcaatgataggaacttatggctgaagatcaacaggagtaataacattacaacacattctctatgctttgtaaagtatttgaaaattagtcaaaccttgaagtgcaatgatttaatcctaattaccacaatcaaaacatctttgtcatcctgtaatcagtaacttaactaagacgaccatgactaaaagccaaacagaggagattgctaaaatgacatcaatacatagcaaacagtaaaaactgcacaaatatatcaaccttaagactagggatattaacacccagtgattaatctaaagggagttgccaaacttaacacaactcagctaagtaccatgccgaaccaatctgcttgccgcaaaaataaaataagtggccaaacctaaatcttcctgcctcgcgatttctgcaggcacaaactagtaagcaatctctgaaattaaacccaggcataggtatatccgcagaggcaggtcaggatacaagtagaagctatagagctacatccgcgcgcctccacaagtccaaacgagtaacggcaaggcggcactcacagcgcgacgaggtcggggtggcagacgaggcagcgccacccgagcgaggagtacagctcaaagaacggccgca

SEQ ID NO: 588 - DNA, 760 bp, Zea mays
gccgttccttgcagctcgcctctataggatccccctggtgtgtggaacaggtcagtagatgtcaaggagaactcctggaccagctttccattaccaattacaatgtctactagaggaacaagggcaaagccaaggagctgatcctccaggtagttcctcaccctgcttaacatccatatctcgcacttgagagaagcatccacagtttgcacatcaaggcgtaggctttcctcaaatactgggttgcgcccagcactgttgatcaccttggttgagcacgaaacatcagggctgctcgtgaggctcagctttgcatacacatcctgcttgtgatagatacaaacattgtggatgtcgcgtgcctggtgtacaaacacatccaagtagccgacgcatttgtcttttgtgttagtgtcagcaacacagttggtggccctccgagtgataatttcagtgttcagcaactgtggctcggccacaaggccagtttggtaagtagccgccatcactggtgtgctaagtattttgctacataccaaaaaaaaaagaaataggttcaatgccagatcataaagaaagttgcttggacaaataacacagcctgtagccttgtaagaaaaaaataataatgatggaaagttcagcctaggtcaaactgatagtcatagatctgtttcagtacttagctaaaacgatcggatctacatcttcgggctcacaattttcagagcacaatcatgtaagactgaaaagtagggca

SEQ ID NO: 589 - DNA, 694 bp, Zea mays
ggggaatagtaagtcaaattaccaagttcctctggcataagtatgcctattttagctaatttaacacatggtggctatatttagcccaagcactaatgaaacatttgacaggtgtgtcatgtgaaaaaaacgaaaataacaccaagagtaacagatggtcagacacaacaattttgtctcggcaacataacattctaaaagcatacctcctttattactccacacttggaaaatacctccacaacctgcagaagaattccagtattagaagttgagagcaagcattttttaaaaaaaataaccaactaattaagaatgtgtcaaatggtgattcaaaaggatggcttccataggttaattgcgttattttttaaaaaaaattgcgtttttaccaactaattaagaatgtgttaattgtgtttttacgaaatataaagtttgacgattctgattggaccatgtattcttgcagcataaacagaaacaaaaagataaaaaaataataaaggcagagaatggctcatacctgttgggagcatcaagccgctccactgccgtcgtcgtagccatcgcggtgggcgccctcttcaccatggatagcgccaccccggcagccgtgaactcgtgagagagatgtttaccctctcgtgactcgtgagcatccagcgacgagcaagcccaacaagaaaatgca

SEQ ID NO: 590 - DNA, 678 bp, Zea mays
tgaacaatccttggtacggtacggtcccaatgctaccgagtttttgtacagtggacggcgctggtttaccctgtactgtactgtacgtactactactccatagcatagcatagcataggcatagctaggtgcaggcggcggcgatggagcgacaggtcagtggccggccggggttaatggacaggaccgacagttggtataacaagctgacgtgggcatccaagcctccgccgcagtgccgaactgccgacagcaatttgacaagaaggcgagggatcgccgatcgcgacgcgacgcgaccatcgcattcaattcaatcgccatgcatgcatgttccaaacaactgggcctttttcacaagccaagaccggcccaaagttcgaaggaagcgcgggccgtttgtgggtttgggttttcgggcttggtcgggttcgccgggctgggctactgcgacaaggctgatacttatagccaggcgggtgacacccaccacaacacaagccgcagcaactggtagacttcacttgggtggcaactggcaaaacgcgcgcggccgacgcataagaagaagaagaaaccagatatgctgccgcttgttcagaaagcacttgggtacctttctcttttaatcccaggatgcccgattaggggtcacgtcggggccgacccatcggctcg

SEQ ID NO: 591 - DNA, 764 bp, Zea mays
tgatcacacagagagaggtacgattgaacatatcttccgtatattacctatattttatttcgaagattgaaaggagttattagtaaatactaagagtgcttctgtttactcttttctgccaccaatttcagactgtgagtagggagattaggaagatactgactgagagggctagattcttcaacattgctcttgatgacgtctccatcacaagcctgagctttgggaaggagtttactcatgccattgaagcgaagcaggttgctgcacaggaagctgagcgtgctaagttcattgtcgagaaagctgaacaagataagagaagtgcaattatcagggctcaggtaaggaaccagttcatgattttggttgcatcatcataatatgtattgctgagttagctctagtgcccttgtgattttttttttcaattcgtcttgtcaagctgctgagccggcagtgcaagcagaaaatcaattttattcttatgctatgttgatgcccttgtgttgagctaaacctttccctgaaacatttatctgcttctttccctgaaacactatctgcttctggtctgtgctgtgaacagggagaggctaagagtgcggagctgattggtcaagccatagcgaacaaccctgccttccttgccctgaggcagattgaagctgcaagggagatctcccacaccatttcggcctcagccaacaaggtgttcctggactccaacgacctgctgctcaacttccagcaggggtaacgag

SEQ ID NO: 592 - DNA, 793 bp, Zea mays
tgcagtttcatgccaacagcgaattggaggcctgaagactgccaccgcgatttccactcccaggctatggacgcacagccgcagttcctgccagcagtgaattggacacctgaagactgccaccgcgagttccactctcaggctatggacgtgcagccgcaatttctagccaggtgggagtcgaacgcctgtagctaagactgccgccgcaacatgcatcaacgccctgtagccctgtacgcctgtagctggtcgtggtggcgaggtacagcatgtgagcgggagaaaaacgcgagatcagggaattggcacaatggtggtcggtgggaggataggatggcgcagagatggcgagtgggaggccctcggcaaatatgcctaacgagggggagtagatgacgagccagatagagaagagaggtagatgatgagtctgttggatgcgattttgattggatttctctcttttttttaccgaaaccaatcagtttagcgatgctgttggagttgctctaaggctctgatcgtcaacaatgttttctctatgtttcgtttatcaacaaagctattaaggaatcactagcggtatcagcttgttaggaaaccactagcactattgtccactgttttactgccaaatattcatctatcactacgcgtacttaaacatatgtattttaacaaaaacaagttcgctagcatccattactgcctccagacagacccgaatccaaaaaaaaactgcgacaataagaacagattaccgtatctcgttgaagccgcgcgccgtgca

SEQ ID NO: 593 - DNA, 682 bp, Zea mays
tgttgaatttgctactctatacccccgctcaaaacgaatttgctactctatttctaatcttcacggccacaggtaaaaaccctatatttgagggcatgttaaccactgcacaacactttacgactctgaagaatgattaatttgcagactcaaagaaaagcacttggggttgcaagtgacccttttcacacatcacgagcacatcaccccaactacctacaacctgcacaaataacatggaaccaaaattgggccacattagtacgaacagtaaaaaggatgctcaaagtagtatggttattgggttaccttgactgtctggtcatcatacatgatccatcgtccatccttgaaggcaaaacaatgataatgctggccatagtagcaaacctgcaggagtaaaaaagcaataatgttatatatctaatgctccttgcatcgacagacagatgccaagcaccagctttagataaaagactatgtaaagacatgatgtttacttcaaaatgcaacacacctttactgtaaatccattatatggagaaaatatgtcatttggtaggtatagtaatgaagctaaatgggaaaaaaaattgacaacaaatggaaagattgacaataatgttacaccttttttaccacaatcagcaataacaatacagtcacattaacgttatatgca

SEQ ID NO: 594 - DNA, 784 bp, Zea mays
ccctgcatcccgggacccctgctcgttgggcacggacacgatgacgcggatgccggtgttggacagcgccgccagcatcgccgggtccgcgtcgtagaggcgcacgtggcggatgttctgcgaccggagcagcgtggtgatctgcgtcggcgctggcaccgacgacatggccgtgccaatgttcacgccaatgtacgcgcctgtacgcgatgacaacaacaacaaataaatacagagaactaaagtgtcaaagtgtaagaaatctttccttcttgatggaagttacgaacgagtgatagaaatctaacaacggtaacaagagcatcacagttttcctgataaaaaaagccaaaacttaacaatcagatgtatatatgatcttctggttaatgcgagacaggaagttgcgttgtaaggcagcaatcctcaatataaaaacgcattctttcgagcaaagctgtgtggaagaaaaaataaaataaatcgttcgtacagtctagagtaatgtaacgaaatgcatgataccaccatgcgttttcgtagcgaaaacaaacaaacaaaaaagggaaatcgagctagctgtaaaagcacaagacaggccaacttggtacggggaaagacgttggaaacaggagccccccaccatgctgctgtcccgggcccggccatccacaggaaatcctgggcaatgtgcagtggccagtgaccacagtgcccacgttgattcctgctgctgttgctgcagtagttgcacgcccaacgggcaaagcgagcagggggtttc

SEQ ID NO: 595 - DNA, 804 bp, Zea mays
tggagaaacccaagtatgtgctgtctccctgcctgtagccgttgctcttggcttctcgttttttttgattccccgtttcctcggttcccccgtctcacacggaaagattggcactttggttcgttcggcggaacccagggaatgcagcgaggagatcaaagaggcggctgcggggctgatgttcgcgtccgcgcggtgcggcgagctgccggagcttctggacgcgcgcgccatccttgcagacaagttcggccgagacttcgccagggcggccaaggagggcgcccacggcgtcgtcgaccccacggtagctttataactcccttaagtttacaggttgtctcccccaactgcactgcatgatgggagttggaactgaaactggctgtacatgcgctgttcgtttgtcgcagttggtgcggaagttgtccggcgagagggcgagcgtggagcagacgaggaggttggcgaaggagatcgccgccgagaacgacatcttgctggagttccctgagagcccagtagggattcacaaagatggtcgcacgacctcgcaggtcaacagtcagagagcaggagaggaaactaagaatgcaccggccagaacatttgtcgaggagagtgcagtcaagacggatcgccgtgaggtttgtgccgtgatcacactacaggatcatcagaaatccagtatcctctgtggtatttgattaagaatcgatgtgtaacatgtgcagggggagcggaattctgttaacggcaaggtgaacccgagccttgctcaagggtccagagcttttgaatgtc

SEQ ID NO: 596 - DNA, 721 bp, Zea mays
tggggatggggaggtaatatacgggcggctgccggaagcggaagctgcagacgaggacgacgaccaccacaacatgatgaagacgtgcaactgtaactgtaagcaggcggtgcacgacgtgcatgagttcacgtccatggagatcgaggtctaatataaattaaaatttattggatgcattgagtactggatgttccttcttaattgaggtgaatgcatgcagtgtgttttcagtcttttgtttcactcggtgagatttattatttttttttaccaaattaaacatcttcaatctaaggtttataagccactagtccattaacctgtactctcgcatagcggctgcccccggcggagatcgatctctccccagagccgtgtcgttgccgaagctagtggtggctaggattgaaacgcggctgatactatgaaagagaagaatagtggtataatgaaatttttttggataatggaaaataatccggctttcccctctcgcgaggttagggctaaagttttacaaaactagcagcacatacgactgctcacacaggagggacaaacctccaagccgaatcggaaggatactcctccagacggcacaaacatacgcacacaaaagcgggttccttacaacgcaatcctgtttgtaaacctccaaccatgaaaagcgaaaatttgcatagccaccgtctctaaacgtcggcaggccctccttatt

SEQ ID NO: 597 - DNA, 711 bp, Zea mays
gaaccacttccaccagatgtagtgaggaataatctcttcccatctgataaaacagcaacagcatggagccactttgattccatagaagatacaggtgagatgcaaacaattgatggtcttggtgatcgtgcagctcttggcgcattagacctccgaccaccataaggtccatcccgtggatcaacaatgttcttttcttcagtaatttttgtcaaagggccatcaccattagctcctagatcaaataattgcaacttcatgccctcggtacgcgcatagatagtgttcctctcctcatccatgaccatatcaacaattggatcaacagttgagaatttgaatgcatttggcagtacccacctgaaaatcatgatggttgaataagcaggtggccacattatctacagataagcaaataatcacagttctggccttacaacagtagttacctagaaagaagactgccaatgccagtagtaagacaaactttacggcaacgtttacgccaacctgaaccagttgtatactgcaattcatatatatggccatcgcgaccagctacaaaaatttggcccttgtctgtacatgtgatgcatgtcattgtgacaccatcagtggcaatcatgtactcaggtaatggttgtaatgaaagctcagcatatgggtctgttccatcagcactagcagaacagcaaactccaacaagtatca

SEQ ID NO: 598 - DNA, 766 bp, Zea mays
tggacagccagtacaaactcaaggagaagtggatgaggaagaatctgagtcaggtggaggggctactagtgatgctgcttttcaattggatgaggttctgctgctttaggtcaatagcatggttattaaaacgacgttaaaacgacgtttaaacgtcgtttaaactataaaacgctatttgggtgataaaacgctgtaacgtttcaggatctagtgtaaaacgtcgttttaggacgtataaacgtcacgtttcgacgtttaaacgctaaatgcagtaaaacgtcacgtttctggcgttttaggtctagtgtcccaactgtgaaacttggcccggtccagttcagtcctatcaggcgtttggcccaggttgcagcctcctcgcgctcaagccttcctgtgcggctgcggacactccaggcgtcgccaggccacccgtgcacgtccagtcggtccgcccgtccagccgccgccaggccgcccgttcgccagcagtctgccaatcccgtccgccggcagtccgccactcccgtcctgtgctgtccagtgtccacccgtccgcctcgtctggcctgacgctgcgcgccttgcgcctgcgctgttcgagcggatcagcgccaccggccgccgacgtggtctgctgcagtgctgccgcttctctatgtccagccgacatctgctgcagtgctgctgcttctctgtgtccagccgtcgtggtctgcagccgacgtctgctgtttctctgcatccagggggatcctatgagtcg

SEQ ID NO: 599 - DNA, 778 bp, Zea mays
ctgcttgtcttatttgccctttcctcttcagcaattaagcatcagcagaaaaagaaaaccacacacaataatatatgctctgtgactgttagcaccaagtaaatattgcagagataaagaacaaaagctgttgcaataatcacatgaatcattccatggatgcaaaaggacagttttcacctctagactagtagatctgaaacagaatacacaagtcctgtgggcacatgcaaagctttttatataaaacctttgtctcatctcctcctcctgcaagtcttcctcccaatcatgcagaaagaaacaaacacccttctgcaacggtctgcgtccaatcatgctcacattatttcatgtgccttgcagtttaactgaaaaaaatgaaacctacccaaaccttttggcaaattaagaaaaataataactaccgctagttgttaaaaggcacgcatatggaatcaggaagaattaaacttgcatgcatgaagcagattattgttagtgatctcattatgcttacaaaccacctatatatcttcagttctgaataaaatcctgatcatttagtattcttgatcatatatatgtactagttgacatgcattttgtacgtagtccatgtggaccgacactgaagggcaagggtatataagttagcctacacttatggcagggttttcagaacgtagcagtgagtttgggatcacttaaaaccagaaggattgtaatcccggtctgtcgtgtcaggtatcgggttccagtccccaggtaccgagct

SEQ ID NO: 600 - DNA, 967 bp, Zea mays
tacccctcacaacaacagcctcaccggcgccatccccgcgtggctcggcgcgctccccaacctcacctacctgtacctgcaccagaacgcgctgtccggcgagatcccgccgtcgctcggcagcctcacggggctgcaggccctcaggctcgacgagaactgcctgcgaggcagcctgcccgctggcctcgcggaacttccatccctccagacgttcaccgcgtaccagaacctgctggaaggggagatcccgccaggcttcttcaacatgtcgtcgctccagtttcttgtcctcaccaacaacgcgttccgtggcgtcctcccgccctacgccggcgcgcgcatggccaatctcagatccctgtacctcggcggcaacagcctgacgggccccatccccgcggcgcttggcaaggcctccagtctgacgtctatcgtcctagcaaacaacagcttcactgggcaggtgcctcccgagatcggcatgctctgcccacagtggctgtacatgtcgggcaaccagctgacggcgagcgacgagcaaggctgggagttcctggaccatcttaccaactgcggcagcctacaggtcctcgcccttgacgacaacaagctcggtggccagttgccaggctccattgcccgcctcccgagggagattcaagcactgaacctagggaaaaaccgcatctccgggtctattccaccggccatcggcgacctcatcgggctcacaacgttgggcctcgaatccaacctcctcaacggcaccatcccagcagggattgggaacatgaagaacctcacgaagttggcgttgcaggggaacgggttgacggggccaatcccatcctccatcggcgacctcacccagctcctggagcttgatctgagcagtaacgcgctgagtgggttcatccccgacactctagccaacctgaaccacctaacctcgctcaccttctcg

SEQ ID NO: 601 - DNA, 620 bp, Zea mays
aaaacccatggacatttggttgccttgcactccttgctttgcctggctaggcatgaaaccaaacataacgttttgtgtcttatttgctccctcgcgttcctgtgtgatgataaagagatgataaggagacgaggcgccgtccgtctctgtcctcgtagcgactgaaaccaaacatgaaaaaaaatcaggatgtggccattcgtttatggtgtgtttggtttaaggaatagagtgatccatcttcttctcgctcctcacatttttatttggtttgaggaatagaatgagttgattcatcaccaccacattccttataagctaataattagtatatatatgaggaatgagttgattccaccaaaattgatggaatgaacttatgatgtattaccgcatgaagcattggatgactccacgaaccaaacacaccattagtagtcaatttgcctcatcaaacctagcttccttgtggaggtagtacaatttcgaagaagtaaatgcatttacagtttgtttgtgttggtcgcttgtaaccaaacttacatgtgctataaagacaatagcaacaaattggtctttattgttttcaaacttacagtcataacccttgttgtgaaagg

SEQ ID NO: 602 - DNA, 693 bp, Zea mays
cattggacatttggttgccttgcactccttgctttgcctggctaggcatgaaaccaaacataacgttttgtgtcttatttgctccctcgcgttcctgtgtgatgataaagagatgataaggagacgaggcgccgtccgtctctgtcctcgtagcgactgaaaccaaacatgaaaaaaaatcaggatgtggccattcgtttagtagtcaatttgcctcatcaaacctagcttccttgtggaggtagtacaatttcgaagaagtaaatgcatttacagtttgtttgcgttggtcgcttgtaaccaaacttacatgtgctataaagacaatagcaacaaattggtctttattgttttcaaacttacagtcataacccttgttgctggaaggatcggactcgtatctagaattggttgtagtttgtagcatgtctggaaccagaagtacaatatattgtttgttgaatgcattaggagttacatatagtttcaaccagctctgccccgctccctccgtcgttgttgtcatcgttgttgttgaaccccacccaagccacctccttccaactcgcgttcgctgcggtatagagagaagcaaaaaggtactggaaggggtgaacttacccagcaagaaggcatgggaagaggtgaacttacccagcaataaggtgtactatcactggtggagcggccgat

SEQ ID NO: 603 - DNA, 293 bp, Zea mays
atagaaggcatgggaagaggtgaacttacccagcaataaggtgtactatcactggtggaggcgcgatgacaacggaggcgtggtagcgtcatcgaccacgcgagaggagaggaggagatgggataattgctcgacgtctggaggtcgagcatctttccatgcaaaagatgggttgaggtcgagtcgatacccccgcaatggtgtctttcaaacagggtggagtcgtgcccatgaaaaatgcacacgtggggttgccgacacggggaaatgagcgaattcaacctatttgatgt

SEQ ID NO: 604 - DNA, 345 bp, Zea mays
gcacaaacatataaactccaacatgatgcacaagttgttcatgtctcatttgttaattagttacttttaggtgtggttattcacatatgataataattggagacaaggtacttaagagagttatccctttctctatggtttacaactttgggtattacattccacgctagcttgagttcactatcgtaggtaagcttgactttggctagaaatccatctagaggaagaagacgagggtgacgaacaagatctgcttatcactaaggatgtgtttggttgcaatgacagaacgggacgagatgagactatccctcaaataaggttgtttggtttccttactaaagt

SEQ ID NO: 605 - DNA, 373 bp, Zea mays
tgcgctctatttataaacgggtagacgtacggcggggcatgatgcggtaatcgtgctttttaatttgtttgtgatcctgctgcgctgacgtggttcctggcaggcgatgtgcgtcgtctgacggcctgatacggagtctcatgcgtactacatcgtctgcgtctccgaaccagtgtccatcctactgcatgggcgggcctgacctgacgcacgttgaccaaggcgtcgtccacgctggcccagcagcgggccccacggccactactttcctttggacaatttattttttaaaaaaattcccatccggccaaatctatggcaccacgacgcatgggaacgagcgcgcggcaacggtctcgtttctgtgagcttt

SEQ ID NO: 606 - DNA, 435 bp, Zea mays
  unsure (1)..(435): unsure at all n locations
tgattttncatacagtcatccatcgtcgaatcagcgattcccatgcaatcccctggaccgggcacccatcatctaattctgggcgccagatgaagatccaacggccagggttgtttcttcttccctgataccggaccacggtggcgcaggcactaggcggcggtgccattgccatcgcacaccccccagcaacaaagagcccaaaccttaccgtaaaacacagctacgcgaggtggagaccatgcatagacgggttgtggggtcttacctgtgaatctagtgtcacatggcccatgtccacgacgatccgctgaccgccacgaagctccacatcagcgtgagattaccggccttccattcgcacggttagtccacgagaacattgcctggtcccaagtcagccctcgcgttctctagtggtacccgcgggacaca

SEQ ID NO: 607 - DNA, 728 bp, Zea mays
tatggtaaaagaagggagctggctaaaattgtggatcgtctatgccatgaaaattgtgtttaggaacacaaatatcggcctggcaacatttgcgcacacacttgcactgtcagttatggctagtatcaacaatctatgccaccatcttgaagcattcaacacttctaagtatatccagtttgctctcgcgggccaggcgggacccaaggcaacaaatttggccagcttcatgtgtgaatctaaagctttttactgtaaagggacaagctacaatgaataccttagtgattgggtgcaaggttgggtatgctcctgtggcgtcctcagttgatgccaattcaggaagtcttaaaagtttcacaggcttccataaaaagaaaagccatgggcattcatcttaccaactacgagtggtccatgctgtagatactcatgacagtcgcactgttcagctgttcatctacaggtagcaagtagtctagatgtgtttatagctgcttttattcagccaattggcctcttacataagcattggcctcatatacgcaattgtacttttaacacccatcagtcgtggtatacttataggtcactataaatgacttgtactttaaacacctgccgtcaatctcagtcatggtatactatacctccgttcacaaatataatatatgacaccggtgattttttttcgaaaattttgaccactcatcttattcaaaaatatc

SEQ ID NO: 608 - DNA, 635 bp, Zea mays
ataaaataaatgacacatcaaactgctattctaagacagagataaaccataaaaatatgtcaatgaatgatcatataccgatagtgtttctgcaatgacaccaacaagcgcattattatcaggatcccacaatgtgatggtactctcagctgcaactgcaagaacagatccatcggctgagaaggctgctgatgtcataggtttcttcctgcaaaattttaaacgctcaaatatcatatgactcactaatcaaagacaaaaaaatgctggaagcctaaatgtgtggttatatagaagtatttagaataaatatgggtatgactattttagtattttaaaccatcaaatattaataggcattgcccaaaggtaaacatgttacatgtgtatgaatattttagtattttaaaccatcaaatattaataggtattgttcaaaggtaaacagattcacaactcacttgtatgagccaactgattggcatctccaaccagaacaatttctttcatcatttgattgtgaagacaaactctggacccaaacctacataaaagaaagacaaaacttatgaattgaggaaacagtgcattctctcaaacacaacagccatgcacaccttaaagttaccaccaaa

SEQ ID NO: 609 - DNA, 826 bp, Zea mays
ttctaaaatgctatatattagctatcttggaattactgccttaccactcagttccttgtatctctccttgaaaactctagcataacgttgaacttcctcttctgtcttaccctccatttcagatgatatacttttaatatcattgcgaccatatttctcacatgcacgaataaatgtgttgaagtctctccttgtccatgacgcaaaaccctgaaatttgtaccatggtagacaaataaagttagagaaatgacagcacaaaagagcaagcagaaaggtacaaaagcaagaaagtttattttggtgtgctgcgctatggttctaacctcctctaataattgttccttctcttcctgctcctctgctgtcaaaggctccaactgatctgagcatcacatgaaaataataaagttagcaagatctacttggatgtaatacaacctaggaaaagcaagagataccttcgtcttcaccatcaatggtatctttcttctggttcgcttgctgcatcaaaattttctaatgttaaccaccaaggttacgagtgacagatgtcaaacagtatattgcaaaataatgagaaagtgatgtctaatgttctgccaaaacaggcaacaggcacaagaaaagcaaaaatggagcaaattagttacttaatatccagtagaaataccagaacagtaatttggacgataattaccataaggtaccgcacttccttttcatataattcatttagccctttgtttattgaaaaactgggaaatcatgtctaaacacaaaaaaattaaaagccaaggtcagggtattaaatcagtggaaatag

SEQ ID NO: 610 - DNA, 831 bp, Zea mays
atgcctgcaggtgttggattctgtgttgcggcttcggagtgtcattgctacccttctcctgacaacatggtttctttcgagatgaatgacctcaagagtatgcacctgacattacattttttgtttgatttggtgctaatagggacatcaatatgtagtgccaggaactccatttttggtgtgattttttgtatctcgtttattacttatgaccttcacatatctgcaaattgccaccacatacaatgcatatggaaagaccggtatacatgagtttttttattccatacgatctcacatacccaatattttagtagtattatagtcggtcatgtctttatcatgtattattattctgttcaattctgcaatgcatttgtgggttgaaggatcaaacatgatgaagatacgaccttggaacacatgtgatgaattgatgtttcgttgcattgcagtatgtgggctggacaaaaagatcgttgagttagctcagtggctcgtttgaaaagggccccgattaaacttatttttattttaaattgaaatgactggatttgaatgacttttgactttggctcagattgttaagctcgatttggagttgatctcaaacaattcaggagtctgataaataagagcaggccaatttcgaaggaatccctaaaaaagtgttgttggctcgtcatccaccccttattggccggtcacagtgttacacataagttggaccaataatttaaatcaccagaattggagccataccaacttaagcttttttagcataaagcataataatctttaggggttagtggtgggttatgttttggcttg

SEQ ID NO: 611 - DNA, 753 bp, Zea mays
ataagggtatcaaacaaggaataagtctctcgtcttgagtaaaaaaagaaagaatgttttgtgttctgaactccttaccgatgtgacaaacggttgttgaaaaatccatccaatgataggaatcctttggaggaaaacagcaagggttggccaaaatccactgtaattaaatccatgtaagcatccatatagaagctaatcttttgacattaatgatggagtaagagcaaaaaaaagttttgtgaatagttattggtaatgcattgaatgcttcaggttgatgtttcaaccttgaatagcagatgtgtactgttgcattgtgtgtacaaccatttgaattgctgctatttgtgggtgagtggcaagggatttgccactttgcaagatggatgaatgttagaagcatttcctgttgcagattgctaaagagagaacaattaaagagaatcatacaacctgaagagtacaacaaagccatatgcttctaagagcatgccaagaaagggccacccaataagaaccagaaaaaagccagcagcaaatgagatagtaccctgtttattacatcagataattagatatcatggattttaaagtaggtaacatatctaataaaaacgattatggtgctaacaatgctaccatcaaatcttgtccatcggatccaccatctaaagctgagtgcaatcccacctggggacagcacgcattattctgtgaagacgcaagggttctttagaaaatagtctgaga

SEQ ID NO: 612 - DNA, 668 bp, Zea mays
aaaagcaccaatctccacctaaataatacactagctttttctttgaaatactaacatatcaagatcatgcgtactggcggaaccaaacaccatatatgccacgccctaaaacataaaccgaatctgcaatttctagaatatctgcatgtatggcacaagaagagcagtacaccttttttgtacaaaaacacacaaaaaaaaaacagctacaaacgatttttcggcaaacaattctcatctttccggctgttacattttgattctattacaccaaaccaggttgactagtacaaggacagaatgcaaatatcagttgacactttttgggattcaggcccacaaaatttgtcaagaaaatgatgtccaagaatcgtgtcagagaaaatacagtgaatcttacgtatccgaagctttgttccttcctatctatggtaaacacaacatgctactaagtgcagcgatacatccctatggagttcgcagcgtagaatgtatcacatgaatacatgatggcgaagtagccagcactttctatcctcaggttctatctgtctcgaactctcttcgaatggtttctagcaacatctcattccatgtgtctactggtcctggcatgcaccaatgcaaacaaatcctgaagtggaaggttttccatctggcccctctct

SEQ ID NO: 613 - DNA, 647 bp, Zea mays
agcacagcacatgcgccaggattgagtaaccattaccaacgcaatcactaaccaagcagcaagtcaaccaaccggtagcgaaccatacccgacgaggcggcggccgccgcatcctgggctctcttcttattcttcttcgcctttgccttgccgctcttgcgcttccgcttcttctccggggacggtgcggagggggtggcggcggatgggagagccgggcctttacgaaaccgggcgaagtcggcggcgaagcgcttgcggtcgaagtgggtcccggcgaatagcgccgacgagagcttcgtgttctccatggctcgccgtcgccgccgcggagaccccgcctttgctctaaaaccctaggcaaccctgcttctctctgtaattgttgcgggaccccacccagacacgcagtgagagagctagtagagttggcatggtggcttgtccccacgtcgcagcgactgagctcgctctcccctatttcctgtggggccaatacagcctcgtgtcactggagtagcggtggcgagtgcagaccccactagtcagcgtacctgacagtgtggatccactctcctcgatgacgcggaatccgtttcagcttctggtaggtatcctggtatccagttcctttctttgcccctcct

SEQ ID NO: 614 - DNA, 777 bp, Zea mays
aacgagcaccgaccacataaacacgtccagttccatcatcctagtgattgtttaaaggttagagaagcatcccagttgtaaactgcaaataaaattattaaaaatgatatcattttttgcatgaaggggtccatatagcaaatctggaagccaaattcattttcatcatgaactgtaacttgataaacatttaaataaacattgacatatctgatgcttagaattatcatccatttgggacaagatcatgtacaatatcaacactacctaagctaggggctaatttaaggtttaagcctggccagcaagagctagcatggctggggctttggagcttgtaagctgagtttatccacacaagtgaaatcatagcttgccaagagaagaccataaacttagttgtaaagccaaatttgcataaattattgatagttggagcccaggctaaattgaaagtcttatatttgaaaaagcaaagaaaatcacagtgtaatagctacagcagttatttaccagataccatggaacctctttgctaacagaaagcatcactgccgaatcttgaatccaggatccggcatcattgtgcttcaggaagtgttgctctgcctacaaaaagaaagttcaagccgaaataaaaataagatacaaattgcagcacactacccatcgtaattaacaaaaaaaagagaatgaaatcagtagttacccgttcttcaacaattacaccctttatgccgctttgttgccatataagtggggtgtctgaaccaactt

SEQ ID NO: 615 - DNA, 770 bp, Zea mays
tgcatgccagcagccgatcagtatcacttagcaagactaaagtcgctatgtgaatcttacctgtgcaagggcatatcagtggcctcagttgcgagtacgttagcattggctgataggcaccatgccatggagcttaaagctgtttgcctaaaatttgctgctgaaaatctttcaggtactaaaatttgtcataccagacattgcttatgattatttcatgcaagtggcctcattatttgctacgtaaactcttgtcagttgaaaaatattcaaagtgggctgtcatcaaaaggaaaaaaaacacaatgaaaaatagtaaaagaactttataacctgtaaatttctagtgtctgagactctgagtgtatggccgtgcactgtgcgttctttcttttggtcactattcttgcacagaaaattctcttgaacttgtgggataaactttttggtacttctcatggaaatatgcattagactattacagatgcttccatgtttgttttaagtacagtttgcttgagccatctacattgttacagcttccgaagcattcatataatcagctctatatgtcacctgattgccatattagtgcaatagtttttaacaatgtagactgtgttgacatttttgactgaatgaaacagattttaagctatcaacaattcagtagttagcgtgtagatgccattatgtgttagcatcttctgatagcaatacatgcgtcatgagtattatacttattctgcacgtagtacattagcagccta

SEQ ID NO: 616 - DNA, 727 bp, Zea mays
atgccgttcacactgccgtgccgagacaagagcccagcacagcagcgagctcatgggcagggcgacgtggatgcgccatgaacatgacatgcctacggcgagccgagccttcccaaaagccacccagattttttttcacggccaaggccaatgcgttgcgttacacggctactactacttcgcgaccagcgcacccattgggggcgtttttttttttcatttttcttttctcgttccgggacggttcgatgaataatgcaccaaaaaaagggaagaaaagacgagcgtcgtcatgcaagcatccacagccgaggcgctgttcagtcctgcccacgctcaacaaccctatctatccccccattctaaaacaaacaaacaaacaaatgcttgcggtgagccgttacgtgaggaggagctgagggcggcctgcctccatcaccaagctagcaccattattttaccgcttggaatttctttttgtgctgtctgagttataatatactgttaacatatattaatatgctaggcattcagtctaatagggtaattcaaataggctattagggtaatccgaaattaccaaccccgaatagatccataattttggttcgatctgttcgatccaccgaaaagaccaaatagtagatagattagtatattttgttaaaatatatacgatgcataatttaagtagaagtaatattattataacaagtggctatagaaa

SEQ ID NO: 617 - DNA, 763 bp, Zea mays
agcacggacgtctccatcctccagccagcgatcaagctgcttctgatggaaatgcatgtttgggctgttctaaataattaaattatcctataataaaatagaacatatattagagtatgtgatcaagcttgctccacagccatgattcgtcatgatgatccatgcaaataaacccataggccatagctagctgtgttcaacagaaacgagctcaatcgtctccaggtgcctaactggaattcgtgtttccttgtggccgctgtccctaacacgccatgagtgtgccaataaactaacgcagccgccgcgtcatttgttctgtaagtatatattatactatatctcggctgtcaattgatgacctggccaaatcttgatctatcaccagttattacaaacaaactcatcgagcggcggaaacaaaaacaaaaaccatcacgaaaagctctcaaattgtacagagctcagcgtttttttagcctaattccgaggaaacggcagccgcgcaagacggtgtgttccgttccataatgattgacaaatctgtgtgctgaaatgtttgacggccctgcgtgcttctcggtagcgaggtgatctagacgcgtgatgaacggctcagatggagcgggcctgggagcctgggacgggggtagttgcgcacttgcgcttaattagctggggggagtcaacgctcctcaaacggacacctagattcccgtaactgacgagtacaataatttttcctaatacgatttggctgggg

SEQ ID NO: 618 - DNA, 862 bp, Zea mays
acaaggagaaattaaaggcctgtttggttcactacctaagttgccacaatttgcctaacttttctgcctgaggttagttattcaattcgaacgactaaccttaggcaaagtgtggcacatttagccacaaaccaaacaggccctaagtgtttgctcagccaaacatcatgtatcagcttgaaacccaaaatatgtttggcaaaacatagcacatttatcaagaaatcatagaaggcaaaatgcaatatgctaatggaaaaggctcacaggtgactacgatatctctcaacaggatatacaatgcttgagatggagttcgccatactcagaaatttgtttgacatgtgtcattttataattttattttagaagctaggattcagacttcaactggagtagatcaagtcaatacataaacagtattctttcatactaaaagatatcaccttgtaagattcctcaagcctgtccttgtatttttcaaccaacagctctttactcaatgccagatctctttccactactgcctctgtctcaaactattaagagacaagagaacacattactctatctattcaaaacaattcctgtaatcaagtgataatataactataaccaactaaacatcatgaaaaaattgcagtgcaatacctgaataacaatgtgaggatacaatgtttgtcctttacggattggtggatcaagagtgataacaacaaatgtatgaggattgtttgactgcaaaggtcaaccatgcaatgagtttagttacatgtcacaatgtaatactatgtacaataataaagcacaagcctcaaccatatgataccaaggaacagaaaccttttggcaaaaaggaaag

SEQ ID NO: 619 - DNA, 759 bp, Zea mays
aatgtcgctatgagcagtaaggacttgatttccaacagtaagcttggaaacactgtttttcttctttctgtaccttgcaaaggaatggaacaacttagaatttgcatctccttccttgagccaagaaattcttgatctaaggcgggcaatggtacgtttggttgaggccaaagccagagcaagcttcttcaatttacttaacagccacctttccaacacagacagaatacgaccatcctgcgcaatctcaagctgatggatcaagtctctagcaaggtgcagttgagtctcaatgtgccccactttcttgctgctccatccttgaagggctttggctgtccctttgagttttaaatcaaaagtggagaaggggcagtggccaacaggaaccgaattccaggcgttgtgcaccacttcgtggaacccttcaattttcgtccagaatgattcaaagtggaagcgccttttaacacctttgcaatctttgagacccaatactaaaggacagtgatcagaatcttcagaagccgcactttgtaacactgcaccaggaaacagctcctcccaatcaatagagcacaggactctatcaagtttgacaagagtaggctgtttctgctgattagaccaagtaaacttgcgcccatggagtggaatttctttaagagcgagatcatcaaccaaattttttgaatcgacccatcatagcccgattaatatgcgagttgtttttatcctcggcatgcaaaatgagattga

SEQ ID NO: 620 - DNA, 760 bp, Zea mays
atgcatgacctcaatccacatgcatgtacatatatgtgcgcgtggtggagacgacgacgacacatcttcaacatgtagataccagcctgtcagtgttcgctcctaaagctttgccgatggcaggcctgcaacatactacgtacttagtcaacaaaaaaagttggcatgacagaaattcatgtaattaatgtaatgaggagctgagccagcagtatatgtatcaagaaattgattttcatttatttgccagctggtaaagtagatgggagagccagggccaccaaccaatttgtttggcattaacgatgcttgggcaggcaggcggtggcgtcaaattctcctgcaagaagggctccacctgattggggttcccccacacagggtaccccttgatcttaccctgcaccaagagttgccaattctcgatccacatcagtaactactagtaataataaccatatatgcgtgcctaatcatgcttacatacaagaacgttgagagcagacagggttgccattccctcgcgtgtccactgaagaaaaacagacaagatttcatctcgtcagtcggccggccgcccgctactatatataaattctattctatagtagtagatatagagtaacctcaaaaatctgttacaaggaacgaagcaaaacccaaaaaacaaacaaaacaaaatggatacggtaccttggaggctgatgcgatgtgcggtaccacgacagcgttcttcatgtcagcgagtccaggtttcatg

SEQ ID NO: 621 - DNA, 754 bp, Zea mays
tacgtgaatgtttaggaacctctatcaagtttagggatccataaatattacttttaaagtccagagacctccttgactcgagccaacttttgtaaacagatagtgcagttcgcgtcgatcatcatgacgatggatggacatggactggttcaggttcacaacacccacacatcttgatcgtgtcgtgtgggcctgcggcagatggggtcacctgacgacaaagcagagatgatggccggccggggttggctcttgggcttggctgtcgtggtcgcgccttcgtccccgatcgctcatcgcctgtctacctgcctgcttcattctgtttctccacatttatactggttttggttgatgctgatttgttgcgagacaaaaacacgctgatttgagctgataagctcaaggaaacagaaattttgagaacatgtgaaatttaagacaggatatcatgattcaaactcattcaagataccctgctgaaaatcatgacacctgctccaaacaggatatcatgatttaagacggtgttcattttccttacaaaggacggactgatcagagctgctgtacacaagtgcacaatgtacagcagatcatagtacattcagatttaatctgccattcacttttctctttgctcacggtgctagcaaatcaaagcagcgcacatcaccttaaaactcattcaggcagctttgtctttcttttccggccaagaatggaagccttttgcagtctcatcccacctgct

SEQ ID NO: 622 - DNA, 755 bp, Zea mays
agattccagctgagtggtcatcatcggagggctctgacagagggctgattgtggcgtggaacaatccaagcagtgctttacacgcaggagttctgccttcttttctgtatggaagaggagcacagaattggtggctggctcacgaggttctgtcctctgagatgaggcttttctttgatgcaagcagtctggttcttggactgtatcctgagagcattagctccatgcagcatgacatggcctcgagtaagaatggcaggttaccttctgtatcctgggagtacggcgtcaatcaccatcttgctgcggtttatggctcgtattgctgtcgatcaccagcgagacgctttcctacgctgcatagagtggtaaagcaatctgaagattatatgctcagcaaagttgacacactcgtatcatcagatttcttcatcagtaaacaaggaaatgcccatggagtagatagcctacggaagaaacaaaacgtttctctatctggatatctacacggttgttcttccgagacctcagcgcctgaccttccatattctttgagcatgctactcgatcttgtcgctgatgagaatggttccgttgtccttggcgtggctggaaaaagctacagggacatgctcatgagttgggcatgccgcctgcgtcgtcttagagttaccaatttcttagtatgtgccttagaccatgagacatatgagttctcaatcttacaggtagtcattttctgttatttgggcttc

SEQ ID NO: 623 - DNA, 833 bp, Zea mays
gtgaacggcgcgcgactccacctcgtacgtaccgcacgggcgctcctcgaagccgaacaaaaaacactaaacacccgcaacatcccacttcccaccccctgcgcctctgcttgcctgccgtgccgtgcgacccccacccccaccccactcagtctctcccattcccattgcatttctcattccaaaaattaaattcaaataaaattccatccagcctccctcccgttttcccattcccagctgcgcacgccggcctcccaaaaatcacgagcgcttgcgcggcaccaggaggaggacacggggagggaggggagaacagaacagaacagcagcggaagaggccccgcaccacgtcgcgtgattttctttaatccgctagcaacacagcgccccgcccctcgtgagcccctctcgcctgcagtccacaccagccttcgtcccgtcctgccccccaccccatcctcgcctccggatctcgctccgccggccgcggccggacgaggcgcctgcgacccggtccgaccctccctccctccctccccctctcccgccgaccgcgcgtctgtcgggactcgggccggcttacttataccgctcgcattgccgggtgcctgctccatttgtccaccccactgcgccggcgcgcggactccggtgccccgggcgggccactcgcagcttcgagcctagctcggagcttctgagggacgaccacgaggaggagaggtacaggctactacagttctgggagaatggcggccggcggggttggggccccgcgcaggaccagggcggagaaacgggtgccttttggcaagcgtcagccaaccgtc

SEQ ID NO: 624 - DNA, 764 bp, Zea mays
agatacaaagaagcgccaaattagcagaacaaaacgatagattcatagatgtgatttgatgtaaagctttaacatagaagtttagaagaaaaataagttgaaacaagtgcaacggtgtaacttcacagatggaatgagatttcacagcatcaccttttgaaagcacaacatatcttccaaagtgaacttctcacgagcttgtggtccaacagattttttagaaaaaaacccacgttttccagctgaatgaatctgcttttgcattgctttgagaaagccctcgacctgccattttccagcactgatatcagagtgggaatcaaagcatttcttaccatatgaaactcaatagcagtactttatggaaccataatgccataatggacattttgatgagcctgtgggatgcttaggatatctgctggtattgcctaattgaatttccttgtctataatgccagtgacaaggataaatgttggtgttaaccaattgagtggtgagagtatatagggtttaaagttggaacctacattttttcctatttttgatcatgtataagagaatgtaaagcttaaacttgaatgttatgctaatcattcttacttaggattcacctctcagttcctaaagaatagaatgaaaactattgtgcagaggttatgtacgactactaattgacattgtgcttgttacagtctaattgaatggtgacacaatgatggatagtttttccctaactcggttctgtctccaccaaactgac

SEQ ID NO: 625 - DNA, 836 bp, Zea mays
aaagtgaaggttctgaatgaaacggttggagaataaataagaaagagtatattagttttcaagccagaaaaacgtttgaagattaatataaatgagttctaaaaaagggatgtttaagaaaaatatataattaatgcacaagtaaaaacagattttacctgataccaggtcactttactcctgaggatagacaaaaagcaggcacatggtagaatataggcctagagggaaatacaaattaggtacaaagaaatgcaagcgaagaatccaagaaataggtaaggtgaactcaccacaaacatggtgagaaaagacccgaccagtgacatgacaagtcctgaaaaggctcaacaaccattgaagcagagagtcagataaaaaagaaaaaaggaaagtcttttgaatctaaagggaacggacaaacttaccaaaaaatggaacggacagagcaataataagggaagataccaccagagcggatctaagcatcattatgttcgggtatgtctgcttatttggaggtagcagttcctccaaactcagggctagaggagtcatggtcagcgcatatgtaggtattagttaaggacatagcatgcgatccataaaacattattaaacaacacagaacgattgaaactacatttatttcatgaaaactggattaacttgttaaatgtttgattagcaaagttttgggggagggagaaacctattagggacctccactttaaaaataacccaatgcccattgtgggtagggggcctaattcttaatatttttggtgccctaaaggcgcgaaaatatatttttttttaaacctttttgaccccct

SEQ ID NO: 626 - DNA, 735 bp, Zea mays
acaccggggagaaatgctcctatgcttcctaagctatgtcagcaagatcatcaaagattactgaagaagatgaaaaaagaaaaaagaaagggtacaactgtagatcgaccaactgttgcctctgctaaaaggctgggagacctaaaatgaacgaggcagcaatccccatgccagtccctgctgctactccgaccttcactccccgttcacaaagcttttaccctcgtagtacttcttctcgctggcttccttcttctcattccgcttctgcaaaacaaaaaaaacgcccacatggacacagcgaaagtgaatacagacagcaccggatcgatgcaataggaacaatcctcctgatggttagcaacaatcatcaggtcacagcaattacctggtaagcttcatggttagcaacgatcctcctgatgattgtacttgttgtgatatccagggggctctccagtcggcggtagatgcccatagccattggaacagcatatgggtgtaaatcgtcctacagaacgcaataggaacagttagttatcgatgttgcaacgatctgtgcgtccaagtaaagaaatggtccttgtaaatacaacttagttacctctgtgaagtccatgttctcagcaattgttccatgaacgactaaagagatattgaacgtggtaatctgcacacggacagaaagaagctggagaattcaggacgcgaacatactagccataaagaaaattg

SEQ ID NO: 627 - DNA, 718 bp, Zea mays
gacctgcagccaggccgcttgtcccgccgggttttgcaaatgcattcgctgacaagaagcttcagtcacagtcgtctaacatcacacatgagccgaaggtgtgtatctagatgccgtttcaatagataatagaatgacagcaattacacacaaaatctcctaccttacaatccttgataccttttcagaaattgttgtgttcattgaagatagaaccttcagttcttcagttcttctctccaatagaatcatttccttacgaaaagagggataaccccaccaatgctgtagtgatacttaatttgtttctactttgtagtgtcataatgctactactgaagctaacatgttgactattgcatggcttgggggtcagctagaggatgaccagtcagcaacagggttcacatctgaaagtaaagagaagggagtttctggtaacgatgctactatgggtccaaagcacacgctttcacctggtagtgttacctcttcagctgaattggcttctagcgttctgaaagggagcgaggattgggatgctgatgtaatggataagtattctattggaaaagaaggcaaatctaaaaatattgatccagttaggaaggatgattcattagcaatcttagaacagttctttggcaatgttttatcgaaaagcggcagcaacctaccaacttatgttgaggtacaacaagaaatccttttttttttg

SEQ ID NO: 628 - DNA, 765 bp, Zea mays
gtgaagcagctcggacggagacggaggggcgggcgagcagcaagctgcgtgcgttcctcccagacgctcgtttggtgcggtcgcgcggaagcccttgactagcggcggcccgccagagtgctccgtggtgaccaggacggcctggcaaggagatcggcggcataaaggcgtcagcccagcgaggaggagtctaggcccccaggcgtaggaaagtagcccaagagaacgagacgtgtaacgtgttgaggctggattagagctgttgtgagttactccctcgtttccaaattaaatttcgttttagataattaatagattcatacaatatttgatgtatgagttggagagcacatatgtatataaatcttgattgaagtgatgactatgcaagattagtgtggtaatcttgttcgttttgttttatcaattagttgcatgtatggttttgttctttagattgatttattatattttcaattgtaacggttgttttgggtcatctggatcatagctaagacatcaacttagtggcctacaaagtttgaagtattgcttaaatacgaaattagagtctcgttaatttccaacccaacgtgttgtggaacaacattattattttggttataaccttcagattgggacccggaagtcattcctgttcctgatggcctgttggggtagtcgtgtaaatttatctagtctattttgttaaaatttaaagatcgatcatagtcacgaagtttgaccagtatcgttttcgctaac

SEQ ID NO: 629 - DNA, 729 bp, Zea mays
acctcgatcttaatgcagccatcacttttttttcttggcactgtccttaggtgagccagcaggctaattaatagttctgctagctataacatcgatctgtctggccaagcagcaagctaggtttatatagtaatatttgtatttttaagtatgttcaatagatttataaaatgtcgatacacgtaagagtcttgcagagcagggatgaaaacaccaggattgaaataatgttgcttaattaattaattattaccaggatggagagagtgaagctgaggagctcttcaggcatagccaaggtcgccggcgtagcgctctgcctggcgggggtcttcaccatcgccttgtacaccggcccgtccgtgagccctatcaaccaccaccgtgccttcgcctctcaagacccagcaccgaaacctgttgtagttcccaggggggtatggatcaaatggacgttgctcatggtggtcgccaacatgtgctggtctttgtggataatttgtcaggttcgcgtcgcatgcattctgtgttgttctcgcatgcttgtctgcatccacatacaccacacgataatggccctgttctccttgtctgttgaccgtccgtgtgcaggcagcggtgcagaaggattatccagacaagatggtcgtcaccgtgactcagtgcctgctcagcacggcgcagtcgttcgtcgtcgcagtggtcgcagagcgggacttctccaaatgg

SEQ ID NO: 630 - DNA, 776 bp, Zea mays
cagcttgtttgctctgcagtcagatgtggagtccgttctgctcgtgatgaaagagcagttcctctcctacagcaagggtcagcttgtcacggacggcgatggtggcaactgcatcgataacccgttcggcgtggtatccgactgggagcgccatgtcctcgctcgcggagctcccatgtacagggcgatgttaaagaaaatgtgattccatttcctccgtctctgaggtctgaacattgcattgttttgtcaccatggctgcttcggacatggacaacgttcatggattcactcggttagataaaactctcttcttttcggagaaaacatcatatggacacatgacaaaaaaattgtgtggttaaatcttaaaatcgaatcaatccaatgggagaaacgcatatcttcccaattgtggctatgtcatctgccgccggagaggccgatgtcagacatggtggcaacgcttatcgccgccctggactgccgaactgaccacgagtcgaagagccgccggtgcctctccatgccagcgaacattctgaaggacgacgtgtacgtcgctgggaactccggcaagtgcgcgctgccgtcgaggtactgcgcgacctgacgcatggtcggccgtgccgcgggcgacgggtgcaggcatgccaaccctagtcgcagcaccaggtctgcctccgtagcgtcgtactcggagccgagcctggcgtccactgcactggtgatggatccattccgccagtgcgcccgaacccattccacgagcatga

SEQ ID NO: 631 - DNA, 721 bp, Zea mays
tttacctgttaggtctgtcttttaataataataccctttttcctttcgtttggcagctggtattgtcattgaagataagaattggccaccctttatgcccattattcatcatgacatttcgaacgagataccaattcacctgcaaaggatgcagtacctggcgttttcttcactattgggtaagtgtcgatcacttgttgccctcttatcgtgggaaataacttgaagaaagaagtaaattaattggtgacctcatttttttacatccatatgtcgaaataatggatatcctccaaataaatggcatcacagcattatcttgtcatatttgaaatttatcttgtcatatttgaaattgttagtcgcatgggaaatgacattttaatactgagaaatttaatctggattttgacttgttttttctctttgttctgactggctgcatatacctattgaggtagagaatttcaaacaaatccaagcctcggccttatttccaaaatgcagttcttgatagtgaatcctgttggtcaacatgtaaacaatattgctcttcttttggcatggcttaaatttctgatcatcatcagtcgatgtccaatgaaattctcacaagttgtagtttggaatcaggatagtgggttgccccagatgataagcaaactagcagccatttgagatgtgagaccagatctggaaaccattgtgcattgggtttagc

SEQ ID NO: 632 - DNA, 580 bp, Zea mays
gcacgccgaggttgccttcgcgcgcgtcttcgagttgtgcgcgctgctggaggggtggctcgtgctgcagaccgaggtggccttcgcgctgcatcagcgcgatctcccgctcgaggtcttgggccttctgctcctcgtcgcgtatcatttgccgcactttggctagtgcggacacacgctggcgcttggcctccagtatctctttctgcctctggagattgcggttcttgaggcgcagggcgcgcagctgtagctgttcttctgttgagacgccgaggacttcaccgtcctcggtgaggtccgcgccttccagtggggcgaagcctgggggcggctgcgattgtccttcgggcccgcaggtgcggaaggtgtcgtcttcgcaggtgtggggaacattgtcttcagtgggctcttggtgggtggattgggtgagggcgagggccttgccctttcttgcggcaagcagtgctgccttcgcagcctcgtcagccttcgggttagctctcttgggtgccatcgcgggtggtgttggggcccttcggcttacgaaggtcctcaaaaacaggatttaacagtattt

SEQ ID NO: 633 - DNA, 736 bp, Zea mays
gtgcttgcagtcgctgtgatttcaggctgtcctttcgcaactgcaagaaagcaaagttaatatatcatatggcagctgtctcctggacataagatatgtaagttatggcagaaggataggactacggctactacattgaaaccacaaattttcaggagatgacagatgataatttattgtgaacggtgagttgtactgaccttctggactgattgatcatgcaaactggtaatgccggtgtccctccatttatccaattcaatgacattcaggcccgacaaccacacacatgaatcatcatcgacgttatggtctgctatataaggtttcagctgccctaatctcactccacagaactggactgctccaatcactttaccacccatatcgaggttccatagaggtgacaagtccttctggacaatcaaatcatcatccagaacaactactctattcaagccaggaagaaggtcaggcaagaggaaatgtgaaaggccgaagatagatatgtacttagttttcatctgcctctggaaaggttcagaatgattacgaatcgtgacacgatattcctctgtaggccataattggtgcatctcaagggaatctacatccttagagagcttctggttgtcctcaatgttagttacgcctacagtcgactccaagtatgaatttttatcgaaaccaattacctcatcgcattaaaaggtttgtggcatcaagtgaatacatg

SEQ ID NO: 634 - DNA, 805 bp, Zea mays
acccggggcccctctagagttgacctgcagctctttatcttatataagcatttcattttgaaatgatccatttcccaatgccgaggcacatgcaaactgttttaagttttatgccttacacggttgttttcagacattatgtgctgtacctatttcaggcaatttcaagacgagccaccttatacaagatgataagggattatgaccaagctgctaatgatgtaaggaagctaatctctcttcttgaaaagaaagtcaatgtgtctggagtatcaccaaaagcttttaacaagcacaatgatctcaagcaagcacatgtgaggctttcatccatagaggatgaagcaaaaaatgacacccccctgaatttgtatttaatcttgtaagttgtccaaattggttttacctttttgttccttcagtatgattttcttgccccagtttgtgcctggttgacctgaatatttgtattccttgaaagcaattattgcttatctctgcatttaattttcacctttcattgtagattttactgacccagacaacaaaaatagcattgtttattatatggatacaagtacaaaatatgctgtacttagtagccctttaaggaactacgctctttcatatgtgtgttgcaataacaatgggtttcacattaaatacaaagaaactggcagaaaaatattttttttggaactgtgtagagtgcttttaaacatgatattctgatataacaacatagaatatcttgcgtttgcagcaattacgactcttacttttcagtataagagtggtacctttt

SEQ ID NO: 635 - DNA, 778 bp, Zea mays
aggagagagcgagcgaatgaaatggcccccaaaccacggtacagagcaaagatagggtacgaactgctctactggttgagtggcgctctcgatctttcgggaaaaaaggtttgagtggcttcttttctattagactttgatcggcatgtgcttgcattggatggtggccaacggtcatgggcaatgggggattttatacacaaacacaacacaagacgtttgccattcgagtcgtcgtatgtatctcgtacgtgcaactactgggtgttgtgcactgcgaaccaactcaaccttcggctaggttgggtacgctaggttgatctcatttggatttgttgatctcatttggatttggtcaaacggctggggtcagatctctagcatcccaatcaaagtcacactaaccatcttagcccatgtttgtaagcaactcagtttttaagaaaccaaattttatcttttagatagaagagttcagcttcttggtttttaagaaattgataatcttatttctataaactgactcatgaactagtatgtttgaactcatctcaattataaactagattcttaaaaactgggtgcttccaaacaggaccttagttacaattctctttataccgcgtttgacatacgaaccgtcgttcgttggtaccttctcgtcctcccacaaatttaacgagacccgatctactctacacggctagcgagagaaaacccgacgacggcatccaatctgtgacgccgattgccacactcctaccttctcgtgacgacc

SEQ ID NO: 636 - DNA, 763 bp, Zea mays
atccttcaggcaaatctcaagatgaagctcaccagctccagcaatgatatgctcaccagattcttccattgtacagagaaccataggatcggactttgctagacgcttcaaaccttcgactagcttgggaaggtcagaggcaaccttgcactgaacagcaacacgcacaacaggagagacggagaatttcattgctctgattgggcaagcgtcagtctccttctcattagtgagtgtagcattcttcgtgatgaactgatccagaccaaccatagcaacagtgttaccacacggaacatcctcaaccgactcttgcttctttcccatccagataacagtacgctggacactcttgacatacagatccttcttctgcccggggacatagttgggacccatgatccgaaccttcataccagtagcaaccttccctgagaagacacgaccgaaggcaaagaacctgcccttgtcagatgcaggaatcatctttgaaacatacaacataagaggaccctccggatcacagtttctgatagcagttgcatacacatcatcaaggggtccctcatacaagttctccacacgatacttttgagcctttgctggggaaggaaggtggaatatcatcatctcaagcagagcagtgctagctggaagccacgtttgcataacacgcttcatcaaagctttgccaatcaaactcttctcatcagccttcatggtaacattgagcttttgcagcatgggccacaatttctccttt

SEQ ID NO: 637 - DNA, 741 bp, Zea mays
agcttatctatataatcaagatccttcatacttggctttgctagggttccagtggggaagcagttttcagaaacccactgctgcccaccacaatcgaagcccagtatttcatcactccagcccatgcgatacccttctgacttcttccaatactcagcttccgctttattgattttcaccacatgatctttatccagaggatcaagggcaagcagcttgtccctcagctcagtaaatgaaagtgtatctatttctgggtctttactttctgtttcagttctgaaaagcatctataaggtggcgtaagtgaaaaaaaaacaagcaaacacattgctgaatacagctagaaaatttcgcagaaaactaaacaattttcattttaacttcagttgagtagatcaaatagaaacattatttgaatattccagttgactgcataaaccaattttccgattttctgtgcatatcaatctaaagtacaggaactgaatgctcaaagttaagcccaacctacacttcttgcatcaccttttttcagtcaaaagggcaagggaagccggaagcaccccttcatagttcaattatagaaatccaccaaaagtttaacacagaattaaaactcttcctctgagattaattaagctaagcaatctcctaacgaaagaacaaaacaagaagctgcaactgcacatattgccatcaacatgcccatatgaataattattgtatcactcaggtgaa

SEQ ID NO: 638 - DNA, 823 bp, Zea mays
cccccccctttgaaatgatctgccatttgcccggggaccctctagagtctacctgcagggacacctcgctccaacgcaaattgaacctgagcttcgtgtgaatctctgggtgcaaatgacatggttaatacatttctgtccattagataagctccgaagcttgcaacctgtatgtggtcagaactgttactcccagctatggatggatcaaagtaattaaggctagtttacaagaaaatgaagataagtcttactaaaaagatcaatatctaaatgccttggaactataaactatgaagtatataagacacatcttaaagggagtaaaatataacaagatctggtgagagagcataccccacatccagtatcaagtgcagttctgatagtgccatcagcgagtgggatgatggatgcaagttcatcaaggtaagcattcgctccattgggaaacattgttcctcctcctggaaatttgaacacatctccctgatattggatccagttctgaacagctttctcaactgtcagactcttatacggagcatttgcatatggaacatagtcacggctcttgggccaagagaaaggggtgacatatccttttggtgctgggatgagacaatgcagtttctcattctctacaggacaatgcctttctctgtatgtcatgttttgcctaggaaaggccattgctcggttctggtcttgacaaggagtatagtcactgtatcggatgtggcatggctcaatcattttattggacatgatcaatggattagcgccacttatggtatgatgggtctcaaagtgcaaatttggc

SEQ ID NO: 639 - DNA, 766 bp, Zea mays
attgaaaaatagggcaaattgtataattttgtgagagcctgggaagcacaaatttagccctttcgatatatgcaagctttacctttgtagtaagctttcgaacaccaagccctccagtcttgcctccaaccttctttgcgccaatgggcttcttcacagaagtggcaaaggtggaatgagtagcggcctttggtgaacgaggagcagctttgggggacttgggctcatgcttcccattcagattctctgccggtggtgctgccacatctgggagtttgaattcagggaagtcatcggatggcggcttggaagcctcagatgcgacaggtgaggatggcagggcattatcggtcgtggcgctcttagcgacctccttggtaagcatctgcctgtacagttcagcggctcttgatgtgtattttgcctcaaccttcccgccatcggtccatccatgctgcttgaagaaagcatgtgcccggttgttgcctccgaatgccatcatcttcagctggtctggagtccatgagtcgaggttcgttgacctgcgaaagacacataaggttttactagttagttgtccgtaaattgttacgattcctatatatcatatatgtagaccttgcttaaatgagatatttatttaaacatgattataattttttattttcaaattattagtatagatataatatctctcttttatataacaaacacagacatggtaaatgtcaagcgctttggctcgagcagccacgggttgaaacct

SEQ ID NO: 640 - DNA, 790 bp, Zea mays
  unsure (1)..(790): unsure at all n locations
accctgcacaaatcaagcacctttaatacaaattacaaaacagaaggttcttttagctactggttggcttcaagaactggcaaagctacatttgggcttcaccctgtgctggaaaaaaaaagatatgtggccaattggtttgtgatttcagtccgtcacaatatatacacacacacacacactgataactagattataaatttgatatcatcagcctcctaatttactttcatattccattcaacttggttgtgagattcacaaaatcacaagcatgggtggataggccaagcaagattgactaaattaaataagttgaaacacaaaacacaaaggcggttttgtaagtacttagggagcacaatattcatcctttcggatataagtaaattttcatatttgaattataccttgcgtagtcagatccatgcaaatggcttgcggccaaagtagctgcatcattccaacacccagcatcttgaagctgaaacagaaccaaaaggttaatgtggttggacccatattcagttcgattcacattacgatcaaattaaattttacaaaaacaaatactgcaataacaaaaaaattgatcctttgaaaagttacaactttgaagggcatattaattggaaaaagtaagcattctgtaaatggngattgattgttattgcctctaaatcccagctatcactgtaaaggtgaaaacaatggctcattatttaacaaatatttcgtcgaccaaactaagagtaaccaattttggtcatatttaatctttcagagctaa

SEQ ID NO: 641 - DNA, 719 bp, Zea mays
aaattctttagcaattttgtcttccataagataagatgttttataatctatagtgtttgacactgagtattttttccatgtttcatatgtttttaattcttactcttacactgcaactgtcaattttaaaactagcgtcattagaaatatcaatactcttctgcttttctatattagtttattcactgttttttcttttaagcatttctgttttgatctctttgcggcagatgtctgaagatgaaaatggcctactagacattcaactggaagatctggtaggaatgatacagaatacccagaagagtaggagattccttcctctgaatattcttattttttgtacgatatgtgcatataatgaactttaatttcaaattttatttggttagatatattgcttctgaatcaagctcgtcttcaagcattggaacgtgctgacaaaattcttaaagagaaagaaactttgcaacagaagataaacattttagagatgaaactgtcagaaacaggtacacaatctgtgctttctagtgaagtaaagtctgatgaagagagtctgcagtttgatgtcgtaaaggaagagaatatgctactgaaggatgacatgaattttctaaaagcaaagcttattgagataactgagacagaggagagtctattcaagttggagaaagagtgtgctcctctaaatgcttcccttagggagctcgagtgtc

SEQ ID NO: 642 - DNA, 499 bp, Zea mays
  unsure (1)..(499): unsure at all n locations
attctccacactcgcgcagagaagaacgtccggcgcggcaagtctcggttgggtggtggcgcatccgctgtgtacgaggacccgcaccggctctccctcaggcgcctccgaatcagggacatgctggacgaggacactgattccactgagcgcgcttcgtatcatcacggcagatccgccggacacgaggagggcaaggaaggccaaccgaggctcgccattgtcgccgtcggcggacgcggtcgctgggacgaaccactggtgtcgggggagatatacgatcccgtggacgacaagtgggttgagattgccgggtttcccaccgacgtcgggctggcctgctccggcgtcgtctgtggccggacgttctacgtgtactgcgagtccgacacgctcgtcgcctaccatctggacaagggctcctgggccgtcatccaaacgctccgttcgcctccgnggttccgcgactacgccccgacgctggtgtgctgcgcgtcgc

SEQ ID NO: 643 - DNA, 713 bp, Zea mays
gcgtctggcgcagtgcagtgccagctcatggatatggttcaccctggagtggtgcccatgcataaggttgattccgattcgttccaacttcgacttgattgatctgtagctgggtgcaggcccgtggtgctaacaggttgtctagtggattctaaccactgtcttctgtgcgggtttcccccaggtcaatttcgatgcgaagacagaatatgacatgatccagaactacaaggttcttcaggacgtgttcaacaagctgcggataggcaaggtactcgctgtcggcctattgcatttcgatccatcgatatctgtttgatgttatgtttgtcattgatgaaaaagtgtgtcaacctattccttgtttggtagcttggttccaatttggaatggctgtcacttgtaaccgtgtatgggatttgctacatggtgtcccattgtacatttgtactggttgccaaaattatgttcattctggtgcacagcgagatgaggttcaaaggaaactgagatttaggtcttataaatgtaaattggagtccagagagttgttgtttgattgtgtgcttgatgcattgcaatccatggagattgtatatggccttcttgagtctgtcattgctgaaaactgaaaataatgtttagaatggcttcactgcttcagtggccgcttctggtgcttttttttaagatcagtcttcagtgagataggg

SEQ ID NO: 644 - DNA, 698 bp, Zea mays
ccggttatcctgtagaaccgacctgcagcaaggctgaaaacatgtttatcccttatgtttggctgtaactcaatccctgaaagagattcccaaaggtttagataatcaaccaagactcttactgtaagagcccccttaatatctgaaatccatttcctgtttacaagtgcttctttcaccgtccttttgttagcaattcttcttggaattgacttgtgcaagctaggggcaatatcagcgattcgagtgccatgcagccatctatcattccagaacaaggtgtttgaaccatccccaaccatagaaacaagagccatagagaaaaaagccctagctttgtttgggacctgtatgggaagacttgcccaaggccgtcctaaatctgttttctgcaaccacaaccatctcatgcggagagcccaacaaagctctgggagactagagattcccaagcctcccagtcccagttgaaggggtcgacacacctttgccccaggccaccaaacaatgtcctccccttgcttcctttcttcccctccatagaaaaccctttcttatcttatcaatggcatctaaggcccattggggaatgtcaattgccattgctaaataaaccatcatgactgtgagaacatgttgcacctgaattctctttcttgctctggtcatcaagtcagctttccaattgggtagttgat

SEQ ID NO: 645 - DNA, 778 bp, Zea mays
agttttactgatgggtacgatttctgaatgacaggtgtcaggagctgttacgatgagggcaagcgtacagccgaaacgttgaccatggattaccaccgtggtgccaaccttgaggtaagtcgcaatccaaaaatgatcggtttggtcggttggaatttcatttcgtctgcgatgaagtagattcatcttggtgatttcttgttgtttccaggttaggatcgcacgtatcttcaacacatatggccctcgcatgtgcattgacgatggccgtgttgtcagtaacttcgttgctcaggtaaataatatgtacactgctgtttatcttagttacagaacccaaaagatatgacaactaaaaacttactacgtgcggttatggttgcaggcactgaggaaggagcccttgacggtttatggtgatggaaagcaaaccaggagtttccaatatgtttctgatctggtaagtctacctctactcaacatatattgaaaaaaataagagacactcgatacaacatcactgccagagtggcctagccagcaagtggggatgcttgaactattcattacaagggaatctattattctttgcattcattgtactgatttgggtcttcttccacgtcgagggtctgatgaagttgatggaaggcgagcatgtaggaccatttaacctgggcaaccccggcgagttcaccatgctggagcttgccaaggttgtccaggacaccatcgaccccaacgcacggatagaagttcgtcagaacacccaggacga

SEQ ID NO: 646 - DNA, 500 bp, Zea mays
atgcccgccacaaggccatctcaaaaattcaaaccgcatcaagcttcccaagaccccaaacgaacgccggcgcttcacacatcgcccgacccgaaccaaacccttcaaaccccagcgaaaagcgaaggcaatcggaggaacgaatccgcgcgaccaacacgttggcagcagcattaggatccggatccgaagaccgccagaccggagccggaggcgatgaagagaaaggaaaactccgagcactcggcgccgcctctcaacaggccgcgcgggaagcgcaaggccctggccgagctccccaagtccaacggactgaacatgaaccacgactcggcgccgcggccgtcgaagccgagaacgcggtcggcggcgcgagctgaggccgaggcggaggcggcgatgaaacggcggaaggccggagacgccgcgcgctggccgatggacacgaggcagcctgacgctgaagcggcggttgcgccatacgtcggggacatcgaccg

SEQ ID NO: 647 - DNA, 509 bp, Zea mays
atcaaagactctataacccgtgctttgttcaagtgacaagttctgcggaattataaacactgaagtcagaaaaagagaactatacacactgatgtcagaaaaaccctacagcttagatacaccctctgtcccaaaataatgtgacattctagctacgaatctggataattattattattcatctagactcatagctactactagaatgatatttttcggggacggagggtgtagttggcaataaaggtcatgttgtctttacccaaggacgagtctttgggtggattatgaatctggctacaaacaagcaggcagcagcaactactgagggtagatagcttatgcagtcataatccagcaagctcaattccgcaaggtagctgcacacaaactcaagttttcctctgcttgcactctgaattttgaataaaaaaaacagatttatcgggaaaaaaaaacattaagagaagtaaatgcacatgctccaaagtaccgcttacattgcctca

SEQ ID NO: 648 - DNA, 805 bp, Zea mays
  unsure (1)..(805): unsure at all n locations
gcaggccatcttcaaggacccattcaggaggggcaacaacatccttgtaagtttgcacttctatcatccaagtggcatgaaccatacggttccgtgttatttactgctacagtgcctactgttcattggtccaactcagatcagttcatctttgcgaagaagaaaaaagaagtgtgtcttgttgcaccaagtagactaaaagttgtacataccctacaaataaattagattttttttcccatctgcctgaactatcttgacgcagcaccagtggttcctgacgcaaattgttttaccctgaacctttgttcaggtatatgcaatattgcgaattttataacgcgggtgacattgttgttatgagcgtatatagatattttgtttttttgtagctaggtgtgatcacacagtgtaccaaaccatggtttaggaatccaattgtctaatagtagtagtaggggccgcatttaggtgttgattgaactggtttgacccgcaggtcatgtgcgattgctacaccccagctggcgagccaattcccaccaacaagaggtacagcgccgccaagatcttcagcagccctgaggtcgctgccgaggagccctggtacgcgaatcttttttcccttcaccttcaccgatatctgtgatgaaagctgaaacgatctatctctgacgatgcttgtttcttgcaaataaatgacaggtatggtatcgagcaggagtacaccctccttcagaaggacaccaactggcccctcgggtggcctattggcggcttccctggccctcangtacattcacta

SEQ ID NO: 649 - DNA, 757 bp, Zea mays
agccggattctgcccagccggacagatttttaagcagtacaataaatatgcagagagcagtaaaccagtgcaaatactaggaccgaagtaattaatatgggagaaggcaacagagggtagccaccacagcaagcatgtgcctctgctgtcgtcgacacactgatgggtaacgccgtacaaaactacattttttttctttctttctttttgtgtttgtaagtgcaattgtgcaactaatccaccaacctgccacatgatggacgcattggatcttgacggcaaagtagtcaatgactcactagatgtttgaatgcactagttaataattagctactaaaattagttgcatttatttaaacagtctaactaataatttaactattagctacttttagtaaattagttaatagttagctagatctttattagctagccaattccactagtaattttttagccaactaactattagttctggtgcattcaaacactccctcaatacatgcaaaatacaatgcaatcgcgctttgaaacgcatagtgtaatctagaaaatacattgtcagttcttggtaacgacttagtgctctatgcacgactccaatccacccatcttttatcataccacacttttgacacaggaggaaacttttttggtgcatctgctcctgtttgtttggctttaattcgtatcggtttctattaattttacagtgttttgttctatggattgcaactgcagcagtttaaacgactga

SEQ ID NO: 650 - DNA, 758 bp, Zea mays
gagacacccgtagatatgccaaccctggcatcctgaagagataatttgcagaacaaaaaatcaaaatcttttcaagtctggtgcatctgggaatttgccaaggctatatatgagatggcataacataccactgtcaccgtggaagcagcagccgtgatatcttcgatttctgtgataggagacatcatcggaatcatcagtctagtcaggtcctcctcctccatgcctaccgagataatcccagagccattcctgatcatgaatgcgactgacttctggtccactagagtggccgccatcacaaggtcaccttcgttgtcgccgttctcatcatctacagcaataacaaactggagaaggatgaatagttaacttggtagctaaactcaactgtgctacggaaacagtgctaatacaggtatcacattcaaggtcctgtcctgagttttgaagcgaaggacttttgctcgatgttagtgtcaacattgtttcacttgagtcttatcattttaaggaaaagtaaataggtttgagcaatagaaaggtgcacgcacattgattggtacaacgtttaaggataagagcaggattcgctactgtatgtctggactactcatagcaaagtaccacatttgtgtatttataccccccccccccccccaacacacacaaaataaaaaactgggcaagggcatccatctagtttaaggtaagctgctgaattaagggatcattcttgataggagctgctgctatca

SEQ ID NO: 651 - DNA, 705 bp, Zea mays
aggggacaaggcacaagagtcaaatgtaccaaccgacattattattatagttaaaaaggcagggccactgtttatcctggcagaatcttgaacgacaattcaatgtgatggatcgaagacagttgtaagcttagagtgactacaaaatacactctctcccgtccaaagaagaagaatatttttttgtagatttaatcagatgtaaaacagtttggatcaacacagttacatcttcagttgttagctatgatgactgtttaagttgtcattcctaatcttcagttgtatccttcaaaactatgtttttctaaggcagttgtttatgcatcgacctgcggtatagaccagtgctgggaaaatggccgaacgaagatggtcatatcatctctaaagggctgggaagaaagtggaggtaccgaggtacagcaggatcatttgtgtcggcatcagcactatcatcttcatcatctccacctctgaaaagatttctagcagtttgcttggcgggggatttgcgagtcctgcacgtaagttgttttcaggacatatatttagtatctcacacaatatgggattaagagaaaacaatccttcatgacattcattatataccttagcaacttcaagcacaatacgaccaaaaatccgaatgccttccttgacaataatggtcgaaaccctccatgttgccttccaatccaaaag

SEQ ID NO: 652 - DNA, 839 bp, Zea mays
taccaaaagctggttcagttttcgtacttcaagcagaccgctggaagttcacactgatcggcgacaagctctcgcccagggagaagttgaaggaggatcagcgtcaacaacgtgcgcaatcgctaatcagatagtttccaatgtgccagctgttctctcacaaaatttttgctccacggaatacttgcttttgtttaggtcctgccactgtagcatggtagttttatcgctctagaggcgttgacatttcttagcgacttactggcagctcgagttgtggaggggtgtgtgatcatgagccatgtactccggtgactgattattgattagtataggcgtagcaaggccatttacgtttgtttcatctagtcacacaaacctgtggcaaatatttattacgcattgtttctgccgccaatgattgctcgataatacatcctgggtgtattatcggtgtcggctcctgttgtcacaggtcacgactgaaccgagaataccggagtgatgtagcgtagctgtatgcatcaaattatttcttgccataaaataatcggttaggtaaaatcttaaattggtcaagttaattttacaccggagaactcaaacttattcatcttttcatcaaatgtctcaatgtacatgccaacccaaaattaatccttgtctctggcctttgtagttagttcagaaatcagaattgagtacccctcgagatcggcaataaactcaggattagccgttgtagtctcctcttgcctttgtagtttagttttaaaaaaaatcagaagtgagcacgcagcaccctgtgagatcgcagttcgtgtgattggttgctgcac

SEQ ID NO: 653 - DNA, 822 bp, Zea mays
ggtcggctgatgcagaaacaaataattaggttacatatgcatgactacaaatatactactcatcaaaatgataacatgaacagataccaaacttattgtacgcacaaagaaaaaaaatagttgaactttgcttacctggatacaaggtattccaatttctttgaaacaaaagaagctgcttcttcaggcgtaccaataaaatctaaatcagaaacttcaacggctaatgctagtgccgctgctatggctattgctggagcaccacggacaaccatgtctcttattgcattcctgggtaatatttaggggtcagtataaaacaagcattatccagtggtatttataactagttacatttcaatggttgcagtaggcctatcaccatgggagcatataacacaatttctggaaattatgtgattgttttttcttctctagtgtgatcaaggtcaatccagaataccgaaatttctactgatcacagattcaatatgaatatatgatagccttgtacacctctattgatgaaattaccaaaaaaaatgccactgttttacttgaacacaaaagtaagccactgtgataaccacaaagcagcaaaatctgctttagatttaagcaacacgaagaaaattaacagttatcacaagccccaccaaatcaattagaaatgtatacaaatcaattgaacaaaaagaagtaacagttttgaaacaaaccaaataaaaagggatcccttgtcctactttgaatcttttaagagatttcaattaaacttgcttaaaaattaaaaaggccttgcataaacaataaaaactattt

SEQ ID NO: 654 - DNA, 813 bp, Zea mays
cggtacccgggtatcctgtagagacgacctgcagaccccgcgcgacccccagaatgatatcgaagcgtttctgccaccctagcagcctccgcttgccttcatctgcacagcagatacgcaagtgcaaagttgaggagattgaaaaactaacttgctgcgtgtggatataggtttttttcgcagatgagacgagacgagaacgagacgagactgaccgaatatgaacgtgtcgaggctctggttgtgcatgtactcgtacaggagcatcctctcgtcctcgtctatgcagcagccgagcagcctgacgaggttccggtgctggagcttggcgatcagcttcacctcgttcttgaactccaccgccccctgcatcgacctccgggacagcctcttcacggctacttcctgcccatcctccagctttccctgccaacgacggtacgttcttgagatatcagccggagctagaatcctagcgcgtcaacaaccacattccttcccgtgcccttcgtaccatgtagacaggaccgaacccgccttcgccgatcttgttgctcgcggagaagctgcccgtggcggccaggaccgccgccagatcgaacaacggcaggtcaacgtctttctcggccgctcctccagtcctcgtccagcgcctgctgcttcctttgccctgaacgggagcgcgtcgtctccgcccgccgctcggcggcgccggggaaggatccgtctcgccgtggcgcttcctcctcttctttctcctccagacgcagcagcagccggccgacagcagaagaaagagcacgccggcaactg

SEQ ID NO: 655 - DNA, 775 bp, Zea mays
acccccaccgcctacacctgctgccccgccaaaggcgtcgcctatacgcccccctgcggccgcgtcgccacccccatccaatctgccagcgcccaacccgccggcggacccaacgccgccgacagtagcacagccacctccgccacggcgccggccaccaagatcgcctcagacagaacctccacccctggcaccaccaccttctggaattcctgtcgaaccttccccaaccagtccctcaccgacgtccgcagatccttcgatccccactccctctagcccctcgtctccagggacgacaccgtccacaccaggctctggtggcactccatcggtgccagccccagcaacgccaggtgactcagttagcccggtaacaaccgggggccaaggttccaacaagtcgtcgagtccagcctcgcagagcagcagctcctcagtagacagtggtggactgtcttctggtgcaaaggcaggcattggggtagtcgttgccattcttgtgcttagtttggttggagcagcattttggtacaagaagaaacggaggagagtgcatggataccatgctggttttgtaatgccttcaccggcctcgactcctacacaagtgttaggtaattctcatttgataaagtgcatttgcagcaattacacgtctggaaagtcaagattagtctttatatgtacctgagtcatgaaatgaactaaaactcatttcttgtttagggtattcggccaaaacaaacttcagtgccgggagtcctgaatcgaa

SEQ ID NO: 656 - DNA, 789 bp, Zea mays
gaagatttgatcagctatcgccttcgatgcagttgaatatttgatcagctattgacttcgctgctggcctgttttctcctttggagaccaaagaagccatggcgggccgggaggagagatatgtgaggtcagtctggtcagccttttttttttttgaatctgttgtgagaatttcacttcagtgacacacgttcagcatgcgtcaagaatatattagtgacttggtgtcttatttttgaaagaaaaacatcaattgagtggaaatgcatggtgccagatagggcatgtttggatatcagggctaaaaattactccacctgtttaaaatggattaaccatgggctaattataggctaatgagggcggacgctaaccaccaattagccatcagtaaatcttattagcctaaaattagcccatgttaagcctttctaattggtattcgaaactaggggctaattgttagcccctggatccaaacaggccctcattctatggtgtacaaaaagtctacaaatcctaagagcccctttggcagggctctccgaagagcatctgttgtggctctggttctgccaagagctttaccgaataccagtgaacaaaacagctccagccaggggagctagcaaaaagccctggaaaaaaaagaactacacggcacgggagctgggaaaattattgggcttcccaaccaagcctcttgatttggttttatatctgcctttcaacaaattgcaattaaaatttttggaaaagaaaaagccaaattttttcttttcccaaaaa

SEQ ID NO: 657 - DNA, 743 bp, Zea mays
aggcttgacaaaaagaaccacatcatctgcgtaaatcgagagcctagatttcacgtttctgatggccaggtcctgcaacaatcctctttcctcagcatgcttgaataagctactaagcacatccatcacgattatgaaaagcataggagataaggggtcgccttggcgcagccccctctgatgacgaatataatccccaggagctccgttcaaaagcacttgtgtggaagaagtggataacaagttggacacgagaccacaccacctaggcccgaagccaagatgggataaaacttctaggagaaaggcccaggacactgaatcgaaagcttttgtaatatccagctttagaaacagaccagcgatcttcttcctgtgaaaggccttgatagaatgctgaaccaacatgtagttatcatgaatggaacgacccttgacaaaggcactttgatttgtagccaccaaattttgaaggtgcggtgctaagcgattagccaagactttggataccaacttggcgaagctgtgaataagactaattggcctgtagtccccggctgtcttggcatcaactttcttagggataagtgttaggtacgcagaattcatcatccacaatttgcgtgtgttaccttggtgcagggtgataactgccgccatcagatcagccttaattatgtgccaacaagttttataaaatgttcccggataaccgcttggccccggggctttgtccgagggaa

SEQ ID NO: 658 - DNA, 807 bp, Zea mays
acgaaccggaggtgccgcgggtctggctgccgttcgatgacgcgccaggcctggcaatggcccgggcctttggggacttctgcctcaaggattatggtgtcatttcggttccagagttcttccactggtcgctcacagagaaggatcagtttgtcatccttgcatcagatggggtaattttctctaccaagtgctccactttattgttctctgttcatggatatttgcacttgcaaagatatgaagttgagggtatctattcccccagcaaatcttgcccttatctttcatcataacatgattagttgcaatgtaatgtcaatctgcggcactttcgcagtcgtgatctaagtagccgcacatggtgggccttcagggtccaggatgtcccgtgtatttcatagaagctaaaagagaatccgtgatcatacctacaagtgatccagtgttttgacttcaaaatgttttagcttttaggggttggttgataaactgtcatcatggctggtgcaaggataataatttctggcataggtccctttcctgcctagtgcacagataatgattagccagcttaacacccttccctgttgcacccgtcaccacctgttggtatctgctggccttcagctggtaaaatctcctccatgcttaacttgagagggaccccttgagttagtgatttatgaattgtcatgagatcaggtgcaccttcctacttgaacaatttggagattaagcctgggctagggactattcgttgcattagataattaaaattatcaagcgctcctcaactagggaaaa

SEQ ID NO: 659 - DNA, 832 bp, Zea mays
tcgctacccgctgatcgtctaaactcgacctgcaggtacgaagataaatatgttataggctctagagaacgtgaatttgctatccttaaggacctaatcatcaacaaagagggagatatgtctcaccgggctgtcatctctatttttggggagcgtggcattggaaagactacacttgcaaaacaactgtacaatgacccagatatcataaaacactttgaggtccatgcatgggtatgtcttccaccacatgtcaggttcagggactatgttgagattatgcacatgcaggtcaacccacagattccaggagcttctgagaaaaatggtaatacaacatttgcacttggtaacaaagaaaccactgatatggaattcaaccttcggcagaaccttgagaacaggaggtatctagttgttcttgatggtttagtcagcattagtgactggaactcattatttgctgtgctgccacataccaatgccaatggcagccggatcttacttaccacacatctcaatgtgaaggaaatcaatcacatcgacccacagatagctcctgtcaagcttccttatcttgacgaaaaacatggagaggagttattttgtcaaagagtttttgggacaatagaacctccacaaatttataagagcaagggttactataaaaaagttcacaatatatcaacaggtctacccctggcaattactgtgcttgcagggatattacgatcaaaggttatccccatggagtgggatgtcatattccaacaactcgagtccaatggcccagccaaaaccggttagaagcatatgggcctttggcttttgg

SEQ ID NO: 660 - DNA, 801 bp, Zea mays
tacacctggtggccgcataattaataattatccataacaacataacataacatgattaggttcagattatatgtatgcatattctgtgcacggtaggtttagcacaggaacaacgcaaaagaggcaggtggttgcacttgcgtgctcaaacaaaagccttcccaacttccaccaactgcatgcgcagcttgttttcatcagtgaactgatgagtgagtgtgagtcggttggaattgtaaaatcgcgtgcaggctgctccagctccagcttccagaccagtggggggatggaattataaaatcgcttgcgcatcttggaagtaacctgtggtgcatgattgctccacttgttccggcccatgctgcgtggcgccagaactgattgggtttggggccttggggcccaaaaaaaagatttttttttgtttggtttgaaacaaggctgttttcaatctgttctcatcagcgatgtcttgagacgctggactgacagcgccgcgaccgtcctgccgattctcgcggagctcctcaagaacgacctcagggtgtgggtgtacaggtacacgccagcacagcacagcacagtcgtctctattttcagctccactgatgaggcaaattgacaacgtggaagcatatgtcgctgtgatgttggcaggggagacaccgacgggagagtgccggtgacttccagcaggtactccgtcaaccagcttcagcttcccgtgggtgcaaaatggagggcattggttcaacagcacttcaggggctcaacaacactttttcttcctgctggggggcg

SEQ ID NO: 661 - DNA, 744 bp, Zea mays
cttgcagacatgtgtggttcaaatgttgaccacatgtcttatgatcgtttacgcagttgttatgactaagtaaaatttaaatactcacagcaccagtggtctagtggtagaatagtaccctgccacggtacagacccgggttcgattcccggctggtgcattactttttttattctttctttttaggaagaatgcttcatgaggaatgtcaacttgttattccgcgtaaaatcaccagcatagcacttggccagaacatttcttcctcaatgctgacaggctgaaaatgatggaagaaaactatgcgacacatgcagtcaggtaacctgataatgaacaatgtattttagttatttatactgtgcggaagaacaatgctgctcacactagaacacagcttcgtgcaggttgaaacctaaactaaacagaccaaatctgacacctgtgttagcttgatataattatagaaggtcatccttggttgggtggttggcttatttgtaaccccctgtgtatatttgtacgcaggttcatatggaatacaaacatcgtcaatctccaatcaagctaatatggtatcaatcacagttacgatcccctactctttcgcaaccaccaccagctgccgattcgatcgttgcctcgtcgctgacgccgtcgtcaggtgcatcacggatcccatcgcctgtgcctccatctactactgatccgatcatgggtgcaacacatttagtctgaacacca

SEQ ID NO: 662 - DNA, 695 bp, Zea mays
cgtcgtctccctggtattcctgcaagcaacaaggtcagtatacatacatgaaaaacctgaagccagttccatacaaagcgaggtcaatttctctaattccaatgttacaccggacgaatactcaacaagcaaaccaaaaaaaatgtcagaaaacgtaatgcataaccattagtaagtatgcacatcatcatcgtttgtggtcctacgaatctaccattcctctcgatgtctagcttcaggtgccataaaaaggctagcggacaaccaagcatccagccagaggaaacaacaaaatggttaggactatagaactccaactcgcagtccaatgaccatgagtaggtaaggctcactcgcccagccttcactctcgcctgagacgacaccaaaggcaggcgaatccccagaaccgaaccgaaactgcatgaggcaggccgggcaccaaacagtggccctagcaaaacatgcacctggcttcgctatgctcggaggtggccactgatgcagcatgatttacacaaatacacacactgttcagatcatagcagtgcacgcttccaccctccagttactgtttaggctgccatacatgaagggcccaaaggggattagagactcagctttactactgttccgtattatggtccctcctttaggcggtgctagcatcaaggccatggctagagccgcaaacg

SEQ ID NO: 663 - DNA, 799 bp, Zea mays
tctgcagataatgcaatctccaaaataataagaaaagagaatgaaggtagcaataattattatccgctcagaaaattttccattataacttatgtcgatgtaatgcgaaaagcaaattcatagagtaccttcacaatgggtgtatccatcaccaacaaattttacacctctcacaatagggcactcacaaacacgcccgcggaaggtatcctgcattctcatgtaaatacaattagaacgtcttacctgacaagaattgagggataagacaagcatcagcagcatgcaaggcggtaaaaaagtgtaccttgcatgcagtaacattattagctttgtccagccagcaacccccattgttctccaaacactcatttgtttgaatctctatatgagataaaaagaaggaaataaaagagtaagcatgacatcagataagatctactaagacatatctacagtaaaatgaaagcttacataccttcgctcaaacaaatagcaggttcagttgtctcctcaaatcctgaacagatcgctttcaggacagcaactttgtccagcttacctgaagagaaaaactaaatgtggcacaaacaacattggacaataaaaagataggcactacaagatagtaggctgacctctatattgcttgttgttgatgacaagggttggtagtattgtgacatctccccttttaccatgaccaatctatataataaaagcagagaactaagtataccacagattgatgaaaatatgtaaagcaagtagcatttgtaaacaacaatgttactccctc

SEQ ID NO: 664 - DNA, 813 bp, Zea mays
  unsure (1)..(813): unsure at all n locations
tcggtacccgtggtatgctctaaactcgacctgcagccaacttgacatttcaggaaggtaattaatctggtaaacaaaagataaaaaggacagagcaattgacattgatagaagatatcagagaaagaccatggtgcaggtctaagaactaaccaaacatagagcaagggaaataaaaaagcaaagaaactctttttttttattcacaaaataacctcgagtgacctgcgaaatccaaacccaatggtcaaagcgtatttcttgaaagcctgttccatgattaaagcaagcagtcttatgtttaaagcaaacagggggctatgccagcagataagatggcacagcagagtgagaaaaggagccagcaaagtgagacctttccccaattccaacctctgatcaagcaactgtatcatacagtgtgagaaaaaaaataataaaaaccccattacttcatcaaaagcagcacttcaacaccgtggtaatcttcccaatgcagcccccaaatccccaggcgacgactagggcagtacacgaatccggttcttgaaagctgaaaccagcattgccctctacattcctacaggcggggcggaattagcaaaaggggtaacgggtgcgaaaatgtttnccttcctctccctcatcctctcctctaacacagtagaatgtggcttttcataccagaaccaaggcggcgcccgaaaatcggcgtggggaaccctctccagaaggcgagcaaagaaacccaaagggatcccccggaagtcaaatcaaaaatggcgggcggcaaccgggagaaacccccaaaaa

SEQ ID NO: 665 - DNA, 780 bp, Zea mays
cctccacatttctcatccgggcttggaccggcaaaggcagtgttaaaccgcaaacaaacaacaaatcaggaaatacaaacaattacacaaagaaatcgtgttcccagacataatttgaaaaaaaaaacaaatcgtataaccggttctgcgtcgaacatattagttgaatggtcagagcacttgtgtattcctaattcgaataacctaatgatctcgaggactgaacagcaacaggaaccagctttaataaaaaatcataccatcaacaaagatccatagaaatttgagcaagtgcaaagctaaaaaagcagctagtgtacaatgtacactcgtgcaatcttatgtacagtttccaacatcatagcttgcatgaccaaacatatcctagctaggttaaggtactattgtcatccccaatgttacctggaccactttgcaaggacctaaccaaatgcaagataatcaatcctagtgttaaattagcctaactactcaatcaccattataacaagaatgaacatgctaatttggagatagtgcagaattacagaaaaagaagcaatcatatcctagcttgcatgaccaaacaccaagctgtacagatgacacaaatggaacccaccattcaagttcactcaaggtcaaggttcaagaaacccagttgaaacagatttaagcaagcactaagcttccactgactttggcatattaatatcaatgcaacaaccttattgatctataaattaggatgagtcaactcgaacccaaacttgtgataaa

SEQ ID NO: 666 - DNA, 769 bp, Zea mays
gacctgcagtaaagtatcaaaacttgaaagcaaatttgatacacgctgatattcgagtgcaccaccaagaatcaagattggaggcttttccttttttgatgacatacgccggtgagcaacattcttcttacaaacaactccttttacaacgaaactgcaaataaaggaagatgtataaaaccaaaaaaaaagaactagtggtaaccaaagaaatgcacagataaatacagtatgaaactcaaaacgtaatagatcaataaaacaaagaaagttcacatcaagtgtcatcaactatgtctttctagtatgaattacaaagcttcagtttcaattaacttaaggttatggatgctcaagcatattgatgtaaaatcataaaggcatatgaaggtaaatagtgatgcattgaaattggaaaatagatttgtttacctttcacttgggtgaccacaagctaagcatttcaccttaacatagccaccagggtccatctgaccgcctttgctggtggtatctggcttcaaaagagatgccgcttcccaagacagagaagtaactatatctagccaactttctttgccactcccatcaactaatggtaccttttcagcctgaagaagttgagaaactaacgcccgaaagtggccatcaactatgtctttcatggctttcttgtgttcctcagctgacttatctctacttcgacagtgcccactgccaaagctgtttgagcgtagatatccccacttttctgtagcatccaccccct

SEQ ID NO: 667 - DNA, 718 bp, Zea mays
ataaggcttggcagctccagaaccagcaaccatatcaaacgatgacattacaagttgcatccgatgataatagtgtttgtacttccgatccacctgaaagcaaatttcaagttgatcttaaaaattcagacataccagatactgcattagtgaaactatcaaaacacgcctagcccattcatctgatctgtcccagttagaaacaattttgtcttgctgagaaaaaaatgtatttacggacccatcttacattttaatggggtaatgtaaccttctgcatttgatggtgatcttgtcctgaataacagttttgtggatacatctgttcctattccaaatatgctcattgcttgtttggaggacctttagctaaaaacatgcaatctacagatttaagccttgttaaatgacaatgattgtgggcacctaggcattattaagaaggctagacccacctaaactaacaatgtttgacgagtcctccaagaattttcaagaaatcaacttgtgaaactcatggagctgaaccaatataaatgacctttgcatcaggaaccaactattggactcattatttaggtcacaactcaaactgaactgatggggttgggattcctcgagtatttctctaggaacagaaggcagaaaattgttgacttctgatataccagtatgagaaaaagtaatatgcagccatccctagataaagtattagttt

SEQ ID NO: 668 - DNA, 633 bp, Zea mays
acctgcaggtgtcaaatgaaggaataagtaaactaaaaatataagttgtacattaacaattaaaggtcacttgtcatagaggtcattcaattataaacataactgacgcataaaatcaaggcaaccagtaaatatcaatcatttcaaaacccatgaacttcttgatctggttataacataatgtttcattgtaccacattaaggtgttaattaatggaaacaaatctaaattactctctgcaatgtcccaataacccctaaactatcatatggatcaatttactccaaccatttcagttcaatagttggtccaataacctcgtaacaaaatttgtatttctctctccagatacaaattgagtctgaatttaaaatgcgagatgatggcaggtatcatatgttatgttaaaaaatacattatgacctactcatcattttcttttatatgattttgtatctctagtatttaatttattattaaatattccaacgaaatatggatgaaaattttatgatatatttttaacatgaacgatgtaacctcacaaaatcacctttgtaagcgtaaattagactgactgaaatagttgggttaataaatcgaaccaaatgttagtacaataggttattaga

SEQ ID NO: 669 - DNA, 462 bp, Zea mays
cggtacgtgaacgccaccagggatccttggaccgtcctcaacgacttgatccttcggttccttagaacgaggacggtagccagaacgatggcggtgactgcggcgacgaaggaggagcccgcgacgacgagcccgatgatcagtttcttggtgttcccattgctagagaactcggaggcagcgaggcggatcgagatgctgccgcctccggtgccactgccagcgctcgtcgtgtcctgaaggttgatgaggtccccataccacagcgagcagccgccgctgtaggagtaagcggtgcaagagcagttgcggaggcacgcgagctcgcagtcgtgagcgctcgcggccgccgcgctccgcgcgtcgctcggcagcctcacgtcgggcatcgtgtagaacctatcgtcgtccctgcggcgcttctgcccgtctcgagcggcggcgccggcgccgcaaggctgg

SEQ ID NO: 670 - DNA, 694 bp, Zea mays
acactgtggatgtcggggatgaacctgactggtcgcatccccgacaagctgtcgtcgctcactgagctgacgacgttggccttgagcgtaaacaagcttcacggtgaaatcccggcgtgggtttggagcctccagaagcttcagatcctgtacctctacgataacagcttcaccggtgcaattgggccggacatcaccgccgtgagcctgcaagagatcgacctctcctcgaactggctcaacggaaccataccggagagcatgggcgatttgagggacctgacgttgctcttcctgtacttcaacaacctcaccggaccgattccgtcgagcgtggggcttctcccgaacctcaccgatatccggctgttcaacaaccggctctctggacctctcccgccggagctcgggaaacactcgccgctggccaacctcgaagtgagcaacaacctcctcagaggcgagctcccggacaccctctgcctcaacaggaagctctacgacctcgtcgtcttcaacaacagcttctccggcgttttcccggcgaacctcgcggactgcgacacggtgaacaacatcatggcgtacaataacctctttaccggcgagttccccgagaaggtatgggtcggggttcccagtcctgacgactgtcatgatccaaaacaacagctttactggcactatgcccagt

SEQ ID NO: 671 - DNA, 803 bp, Zea mays
gggaaaggcttggcggttaaagataaagaaagcagatggcgatgccgcgagagcgagcgagcgaaattgatgggtggacggaaaaggatgagcgccgggcggagcccccgaccacacgatgagcctgtttggttcagcttttttctgactagcttttctgaaaatctggctgtgggaagaatctggctttgaagagaatctgagtatcattacgattacgtgtataggaagataaagttgttcatagggatcaggatctagaaagtgacggattcctactattacaacgactcaaccgattatgtgtttatgttgattttagatggtttttgcctcaacgaattttatagaagttggctgaaaagctgagcgtttggcagtccgcagcagcttttggtggccagaagctgccagaagccgaaacaaacaggggccttgtcttttgaaataggggcatgggcacaatcacacgttatatttttttcttaagttttagacatcatatttaattatctattttgtttaaatgttctatacaatattatctattttttacatattgttttattattgttatcaatattatgttggtaccaatttagctagagcatggtatactctacagtactgtgatcgtggctgaggaggcgcggtgtaagtagggatgttttttttaccataaacccaaaactgaatcaaaccaaaattgcggctttttagttcaatccggttttggtttacaactgtgaggttcggtattgtattgggtttttaccgtatatcgaactgaaatactagacttt

SEQ ID NO: 672 - DNA, 751 bp, Zea mays
tgtcagacaggctcttcctttccatagtttcagtcgacagcggaaggacaattgcaaagtccagcaaagtagcttctcggagtgggatatgccagtggcctgacacaatcttggaacccatatggttctccaaggacgaagtctccaaagaattcgaagattgccagtacaagattattgtttccttggtctgtactggaatgcatacctcacctgttcttcttggatgtccgcttcctgcttcaatcttgataccattgttgggtcagtcactaacaactgccctcgtgtaatgttctgttccagggatcgacaaaatctggcattcttggggagatttttctaaatctgtctaattttctgaatatagtcgatccaaccgcaatctctttgccactgaagagatgcaacgccggaacagttttacaggtgtgtttcggttatttattacacgtcttcgttttcatgggccatttgggcatagcttacatgatttggtagcgaatgaaaaaaaatgctggtattgcattcccatcataggtgccaactgttacataagtgcctatttcatgcttgtgcttttgagagcatacctgatggtgtccttactactgcttatgttgatggccatatttttcccctcacgtgcagcttaaagtccaatgtcttggcacaaagtctaagctgaggtaactagactgaaccctcaatatttcattcttgccaagtttctgtcagtcttctcttcact

SEQ ID NO: 673 - DNA, 735 bp, Zea mays
agccacctggtaccttctgaccctgaaagtgcatgaacttctgccaaagaacagcaaagacttacaggaaaaagaaagtgttcaaattatctacttactggtttcatctttttgcctttatggcctgggggtactgctttcctagcagttgaagatgatggctgtgttggtgtagccagctgttgtgaatgcatcgcaggaggcggtgcaggtaaagcaggaacagattgagatgtcttttgcctcttacggccagaggtggtaggactgggaacagagtcatgaatcagttgtgggttattagacaagcttgcctgaagccctcctgttgatctccattcccttaaacaaaaaggcatcataggtttcaaatgctgaaaaccaagataatgtgcatactgttactacaaaaaatactattcatgttaccttatgctacatataatattatcgttgttgactctatttaacagttccctgtgtgctttgtcagatactcttagctccttcctaagttcagtcatgagaccttccttctcctgagaagattagggtttgagaaatgacatctaaatcatcagacaccaaataaacagtggacagtttaatggtctcaacccatgtaatggcatcagactgggctttgaatgcacgaaagactgagcgatatgcttcttgctcaagttgttgaacttgtgctaccatatcagttggtgccctagcatatgaaccagc

SEQ ID NO: 674 - DNA, 713 bp, Zea mays
actgcagttggtatttgcacgtatggtcacaatgctaagacaaatatatattattttttgaactagctattagacttggtatttgcacgtattatttttgaactagctactgcacttggtgatcaaagaaactagtgaacagagaagaacaccattgcaaatacatagcagcaatatgcacaacacgaccacattcagttatagaggactaagaaaatacagagcaacaagcacattaagttaccttggtgactagagaagccatgatatccttggtgatcagagaaactagtgaacagagaggaacaccattgcaaaagacgcacaactcaaatattgtagcctggaagaacagaaacaatactgatcagagagtctcctttggttataatatacaggccttggacagatgcaaaccggttcacataagagcaatcaggttcacacaatataaatgtgggataagtataggtacacaatacaaatctgagataaacacacattcacataatataaatctgagataaacaccatcagaacaacaataggaatcagataggcacaaatttagataaccataggttcagataaccataagttcaggtaaccataggttcacaataaaaatctaagggacagggactaagtagttagggtttacaacatttttaagggtaaaaatcctgggggccaaattttggtggcccctaaaa

SEQ ID NO: 675 - DNA, 814 bp, Zea mays
atacaatagttttcttgtctgtcatttcaggcccatgcatgaaatcaccttttcaaccattgacaagccaaaacttctcagtgaggtaaacctgtgtacagttggatttctcatatgtatggtttatgtcttgaaaaatcttgtacatatatttgtccttctgtacacattatacattctcactgatatctcgctacctctacttgagttaatatgtttgatatttagtatagttagtattcttatctacttgtttagtgatatgaaattttctgatactgacagctgacatctctgcttggtgagcttggtctaaacattcaagaagcacatgcattttcaacaaatgatggctactcacttgatgtctttgttgttgtcggttggcatgatgaggtattcactaagtcattcttttctggttatcatttcccatgccttatgagtctaggctgtcttttcaatatatatagcctctgtatatgttattcaaagataaactcagagagcaagagttctcagaatactgcttgtgaagttaatatgtaagatatccgcatgatagtttataatatggtttaacatttttagttaatgtggtataagacaggtaaaaagtctttatagatcctgaagtttacttatttgatggaattgggttgctaattttgggtatgtgcacgagacctgtgactagcatcatggctcatgtaacatatatcgagcatgtaatcaacaaaataatgttggtaacagctaccaatgaactgttgatttctttaagcaaaaatcatcactgggatctacacatttt

SEQ ID NO: 676 - DNA, 761 bp, Zea mays
aactgaagttactggactacttttctattgccaagtaagctgatatattatgcagctctagtcaactataagtacagctagtacacctgctactactatagcctctacttggcaatattgtcatactgctgccatgctgttacggtagatagaaaagacagcaaggctggcctattgccaacttactgctgcaaaacaagagaagaatgaagcagattatcttacagcgcggagaactggagatcacagcatggcattcctatcgtggaggttgctatcaccgtccatcatagaactgatcatgcaatggttgatggatgatgattagaagcatcagccgaaaacaacgaatattgaagatcaccatcctatttgcaatgcagcattgggctgccaaggacgctcctgaatgaagcttttgttgcatcaaactatattagaactcaatgtaaacttgagttgtctggtacagtttggcaacaaatgtagaaggcgctggatggttgattggaaagaaagactgtagaagcagtggcacctgatggagggataggaggtgcaggtggttgtgcagcactgtgaatagtgtgtgtccagtgttgtgatggcgctgatagactagagttgaattgtcatcgagagcaggtgtcttggtagtggtaggttcagaaggttgctatgtgatgttagaatttaaaaatgactcgaggaggtgacattcatcattttagttactgaccaatgatgagaacatcaaaaaa

SEQ ID NO: 677 - DNA, 835 bp, Zea mays
tcggctcccggttgaccgctagagccgacctgcagacgatctgctgtccagcatcttccaagatcagcaagccataaaaagaatttacatttgggaggggaccaggttttccaaataagatcccaatacttagccatggtcgacccgatgaagaggccattatacgctgctttcgctgaataaattccatcattagcgaacctgaaaatatgcttatcctccctgtctggataaagctggacattttgaagttcatcccagagatcaagtagatcggcaaagacacctactgtcaaggcccctttaatatcagttaaccattttctgtctgtcaaggcctcaagcacagttctgttgttcctaatcctttttggcaccgctgcaagcagccgaggagcaatgtcttcaatattctttccgtggacccaacgatcttgccaaaataaggttgaagacccattcccaatgttagtgagcagggcagtgtagaaaaaggcctttattttgttggatatctgcaagggcaatgaggcccaaggcctatccggatctgttttgcgcagccacaaccatctcattcttaaggcccatcctagttctttaagactagaaatcccaagtccaccaatttccagaggtctacagactcttccccaagctactaaacaatgtcctcctctgacctctttccttccacgccagagaaaaccttttctgatcttgtcaatagctttgagcgaggctgtgggtatgtcaactgccatgactagatatataagcatgccagtcatcacatactgaacctgcactcttctgcctgcccttgtcatgagat

SEQ ID NO: 678 - DNA, 754 bp, Zea mays
aatttcttgcattacaaagatgtttgatgacgaagacactcaggatagcataattgaagagctcaacatataccaagaccaacaaggagcatttgggcatgacattgcagtcagacagaggagaaacaagaccttcaatccaggtgaatcatgcaccacaccaaatctgttttttaactcttgagtcttgacatgacaattaattaaattttcatgttaatggcttaatgcagcaaagtggtggatgaaccatggcacaaccacaccacatctgaggatattagcaacacggattctcaatttaacttgtagctcctcaggttgtgagagggcttggtcagtctttgagcaggtaataaaatatcttggattttggtcaattcatttttggatttacattcacttgaattcatagatttgtgatcaatctataattttctatacctacatagatccacacaaagaagcgaaacaaattactgcatgatagaatgagggatcttgtctttgtgaaatttaattctaaactaagggagaagagagacaacaagatcaaagatccaatagagaaggaattgaacgatattcttgaggatgatggcaatgagtttattaccggtgttgttccagatgaaaatgtcgatcaagatgaagaccaagagggtgcacatgacgaaccatcaccagaaccaacaatctcaaaaacacaactaccagccaaaagaaagaggcatgggcgtcctaagaaaaagaa

SEQ ID NO: 679 - DNA, 796 bp, Zea mays
agtttaagataataataattttaattggcacaaacacattgtataagcaatatattctctggcatctcaactaacaattctgaacatgaaaacttaacaaacagaatgaatcaatcaccatctgcgctgaattatgcaaaatgtatttcttttacccaacatattgatattgaaataaacgaagaagcattgcacaagtaggggaaatttaaacaagcatacacactggcaatttttttggcactggtacatatgccataaactgatagaaatgtctattctacagaaggccacatccaatcatctcttttcagttttcacatagaatcatccatataaaacatatgtttgacaagattaaaattatttatgtcaatttttcgactcccaaaatgatgtcacatagaagctggagaatgcaaaattgatgattcacgaatatctcacacctttgtaaaatattcaggattgtctgatatgaatgatttgtcactgccatcaaaaggcaacataagaatacactgaaatctataaagaacaaaagtttaagtaaaccaagatcattgtttccaagcaagacatcctcacatcatacaggatcacttttacacagagtaaccttaaaatgggctaggctctgttcagtgtgtacttgtgtacgattgaaaaacttgaatataaagttaccaagcagtctcagtgcatttcgtacaaacaggcttgaggttattagctgcacatcaacagtacattttaaaacaaccacttaaccatacttcaatgtacactttggata

SEQ ID NO: 680 - DNA, 816 bp, Zea mays
ctgcatctctaccgaaacaagaatcctcaacagctacatccaagagctatactttcagagaaggttttgttagcttttctttattactcaatctattgagttatgtttttctaaacacgatttcgcttccacatcttctgtaggtgatagggtgcgttacgtgggtccagctcagctatcctcattgtcacaaaggtactttaattgcaaatattattcttgtctccagatttatccaatgcttgttccttaggtatcaacattgttatcatcagaatttaggtatcatgttttatagtaagaggaataaccagtttatgagacttctcataggcaacccagttatgagcttgcttttgtatcgactatcctgtgaaatcagatattctttccccatatcacattttttctagcaccatattatattagtccaatacatatatttgtttatataaattgcttgcttgatctccaggggaccaagttatggttatcgaggcagagtgatgcttgcttttgaagataatggatcctcaaaaattggagtccgatttgacaagcagatccctgatggtaatgatcttggtggtttgtgcgaggaagatcatggcttcttctgctctggttagctcaaacttccgaattctcaacttctttggcagttattttaacctttttatttgttggtgggggctgcttatattttcccagcttgaattcccttcgccccggactttttctggctggggaaagaaggttgaaagggcttgcctattgaccccagtttaatttgaggggaccggccggcttttttac

SEQ ID NO: 681 - DNA, 767 bp, Zea mays
tctacagtgcgacctgcagcttaccgtgcgaatgctaccaatgtttgatttggctttaagggtttcaacatcacgatccaactgctgcttccaatctgtaagtagagcttcatcctgtaaatttaattatttagatcaaaaaacatatttaataacaactaaatgagtatggcaagagatgtaatcacctgcggaagctggatcgaaattttgtttgggaaaagcttattcagatgtttcattgcctttggactttctttgcttctttcatgcaaccacctgctaccaaagctatcctgcatttttaaaatcatattaaattaaaataatgcaaatcaggaacataacatcaatatcatggttcacgagattaccaaatttaatcatgtatgtacatataaaaatttcaagaagaataaaaaagtaagataaagaaaagttaccgggaaaaggtcaaaaagtgtctggctgctactggcaaactttgtgaaaagaaaacctccaggatgcgcctgcaaaaaaatcgcttcaccatcttagcaaacttttgctagaacttgaagagaggtacaacatcaacaaagccttttagtcccaagccaggtggggtagcctaaagttaaaaacccaacaaaagccacaaatcaagggttcatgccatgtgggttaggctgtttttccatttagctcctaattcaaagcctaaaatctttcgggttattattcccggccttttttaatggggccaggtttgggtacaaactttt

SEQ ID NO: 682 - DNA, 736 bp, Zea mays
ccagacagaggtgtcatgcgggagaaatttcccttcctcactcgtgctccattacaggcagcgagtgaagatcgcctacttcaaaacaaagctgtggctgtgtgttaatatatatagatggtgacaacccgagctagcgtggtctgtacctcagatactactaggctgaagccaaagttgccagtgagacatagccaactagtcaatgattggtaaaatagtaaactagctgaattgttagtatatgtaatcaaattgatgcaccaaattggtgtccagggaacaatttgtccattaacattgattaatcatgattgactgaaaaatatcaacactcgcagtcgcagataaaattacaaataagacttagaactgccgcgaaagggccactagcgtaatggttaaggcttccgagtagcacctccaggttctgggttcgatccccctcaggggcaaatttctggcttgtttaaaaaatcccctcgttgtgccccgcctgctcccaggttacgtcctgcgtgccaccctccggttgagccgttgcagagtgagcggtgacggcccgctagtgatggggggcagggttcgggggttttctcggccggggccatgtttcagtctttccctccccggccgagttttttttaagacttagaactgccctttggtatttgcatcaaccccaatagatatatgaagggacaaacagtaaaaatcttatagtaattggattagc

SEQ ID NO: 683 - DNA, 720 bp, Zea mays
aggctcaacaatgaccactgagggcactgaagtcgcttgatgtgctgaattgttcgtgatgttggtggcgtattttgtttaaataagtaagcatggctgtgattttatcatatgatcgatctttggggttttatttaacacattgtaaaatgtgtatctattaataactcaatgtataagatgtgttcattcttcggttgccatagatctgcttatttgacctgtgatgttttgactcccaaaaccaaaatcacaactcaataaactcatggaatatgtccacctgtttcttgaagagttcatctaccattccagttggcatttatcagtgttgcagcggcgctgtgctttgtaacataacaattgttcaggcattatatccaaatctagaggcctaccaaaatgagataacaagccaactaatctgctgggaaataggtaacaagtctctaacaagatcttaagcttattctgagatgatgtcgagaccgatgccttttgttacgtcgtgccgtgcctcttgttgccatgctggtaagttgctgcctcttgatgagggcaagctgcttatcaaggcgggatgaagtgttatggacgcaggcatgggtgctgctagcttggcatccagggttccaggataacccatctacctgcattagtttgtttagtttcttaactgctaagttggcagatcaggttagttagacaagattgctagtt

SEQ ID NO: 684 - DNA, 747 bp, Zea mays
acctctccccccagctcctttgatgcatggtgggcaagcacaaattctggtgttgatgaccagactaaaaaaggtctcagtaacatcatcattctgggaacttggtccagttggaatcaccacaatcgttgtgtttgatgggattcaaccgagcctaaatagagttctagtcatagttgttaaggcggtaaggcgactgacctccttttaccttttaagcggtaaagcataagacaatgtgacacattaaatatatttaaaaatataaaaatattgctatttgagaaagtatttagcacaaaaataataataataaagaagagaaaaagatgataaaaataagaaaaagactagcccagccagcccaactatccccttaaaattaggttaagcccacttcctctctctcaccgctctctctctctctctactcgcttctccctctatcctgtgccggcaccgccgcgccactacagccgctggagccaccgccgcgctgccagccgcgagcaacctctctcccactcgccttaggtgcacgagtaaggcgagcaggacgccttacgtcgctggggcgccttaccgcctaggcgacgccttaacaactatggttctagttcggtaaaagatgagtttcacctgtggagtttggtcggagctcaaggaatatccaatctccttgctcgagagtcagccaatgtgtgaattcctctctagtggtcttgggtcaagtttgacaagtgagag

SEQ ID NO: 685 - DNA, 776 bp, Zea mays
tcttcctagtaaatgacgaggatgcaagtttgaatccaggttgaaattggtttccatcaatcctggaatgtcagccacaaagttaaccatttatttagctagatatgaagccaagacacagagagaggcagatagtagggggacgggagcaaagtatagcagaattcaacacctcagctcaggaatggactgaaatgttccaggaacatagccactgaagtgattattttcaatattgctgtgtaaaaaaaatttgatcgtcataatcaagagttaagatgcataaaatataggaaaatatgtttaagcaacaaatctagtcagatttcttacagggatgacaatggaaggcctgctaacaaaatcacagatcctgtgaactcgttatgctgtagataactgaaaatgcaaaaacaagaaaacctatattcaaacaggtgttgggtccatgtgcgtgaaatagctggctccaaaggcaggtcggtcttacagatagcgaagactagtcaatgagctaaacgatcttggtaggtcactattgaaagcattgaatgacagatccctgaaaaagggtggaggataaacttcgcatgagtcaataaagatcaaataaattcaggacatttttatttgcaaggatggtccggataggagaatgtcatgaagggtggaaagaaactgctcaagtatcgaaatgtgcactttttgtctttttcaatacacaaaaatgaactgggtccatggaacggacaggtggaggcttgtttgaaggaaac

SEQ ID NO: 686 - DNA, 757 bp, Zea mays
tgctcaacgccagccacaaccagttccagggacaggtccccaacgccatcgtcttcggctgtgtgagcgtcgtggctatggatctctccggcaatgcactcgacgggggcttgcccgacctgtcgccactccgctcgctagcccgtctcaatctgtcgggcaacaggctccgcggctccatcatcggggcgttccaggagcagttgagggcgatagacctcagcaacaacggcttctctgggctgaatttcagcagtgggtatgccggctcggcgttggtgtacctcgacttgtcaggaaacgagcttacaggagaattcaccattgccggccggttccagaacctgaggcatgtgaatcttgcacacaaccagctgtccaatgctaatttgctggtgtccatgggtgggatatctgggctagagtatattaacctttcaagcactgggctgcatgggcaaattcctgctgatttctcttcccgattggttggattgaaggttctcgatttgtcacggaacaatatcagtggggtagtcccagacatgagttctcttggcctacacttgctggacctgtcggtgaacaatctcacaggtgagatacctgtggcattggtgaagaagctgacatctatggatcggttcaacttctcatacaacaacctgactgtttgcgcatctgagctctctgcggaggcgtttgccactgcatttgctcagtccaggaatgactgcccaattgctgggaatccaga

SEQ ID NO: 687 - DNA, 912 bp, Zea mays
ccctgcatgatataactctctacaccacaaacattcccaatcaacaccacatacaccaacccctcccaagaaaacactcctcggcccttaacctacgcaaccccccctctagccgcgcccccgttgatgccgctcgcacaaggccaaacatatttttttttggccttgccttgaatcatctatgaaacactatgcaattatcctttgcataactcctttattttctttaatcgcttcatgtaaataacgttatccccatactatgaagtggacatcatgttaatctacaatattatgttgatggatcgttatttataaactatatttctatataattttttaatccaacatgatttttaagacatccttgaactctatattggttttggagataaaaccttcgaacataaagcatgtagttgagaacttgcaataaatgagacttatatctttaaaaaacggcataaacctcttggtgtgtggcatactatcatgttaactttgttgctgatattgatagttgtgacatatattttcagttagaacatagcaaatatgcaaatttgaatgagcaacttgcggaagcaagccttcgactcaggtacatctgatttcttgtttatagatgatccatggaaaaaatattgtctacaatgcatattttatggtacttcatgtctttttataggcagatgagaggtgaagagcttgagggattgaatgttgaagaactccagcaattggagaagaacctggaatctggtctgcatagggtgcttcaaacaaaggtatatctgttaaacatgatgctatgtcagtttccgtgaagtcaggcttggcattagcaaatatttgattggacatatgatcgcaggatcaacaattcttggaacagatcaatgacctcgaacg

SEQ ID NO: 688 - DNA, 820 bp, Zea mays
attgccgcttgcaggtctggcttaaacaatacatccccaggtcaaagggttaggttttctatccagactccagagtctcccagccactgccaatctgcaacggttcgtccccctcgcctttaattatgcccatcactgagaacactagattaacttactaaagcaacccacaccaagtacccaaaaaaaagtcataagcaaacacaacacaaggcacagccgcacagcacacagaaaggaaagcaagcagtgcatatatctgatctaccactaccaaacaatgattgatttcacaggtgtggagtgcgatgatgccaaccgctcgccacttcggcgtatccatgggctcgtggcttcggccggcgctctataaggtataagtttccggtgtatgcagccacgcggtaggggcgggggatctggattctggggcgacaggatggggatgtacggcagcagatagagaggagtgcgctgcccattcgcgcttttgcagagggggacaaaagaatcctctcggcttgcaccgctgctgctgagaaggatgtgccaactatgccggtgtcatcttgcactaatagaggtcttcgagaatcaagagaactttttttgcacgggatttcgaggcgaaagtgtgctctcaatctcgcagaccaagacagtttgagcgaataatcttttcatcaccagtggtggatcagcttcgacgcttcttattattcatcgagatcacggataacacactaatcatgcaattcctggactactgtaaaatacagggtgtggataattttttcctagactctagctctactgagct

SEQ ID NO: 689 - DNA, 803 bp, Zea mays
gcagtagtaccatgtcccgaatgaatgaacatgaggtcaacgatggtaaatctgctgttttagtctttatacatatgcagcaataaacgagtaattcatccatgtatcactgaacatatagttcttgcgatcaatgttgacttgcacgcgtataatgccaacaattttgtaagatactatcaaatttcttaggagggttagagagagaagaaagttgtcacaaagtcaacgtatgacatagcttgcaaatggcttatatagttacacgttaccagtatattgaagaataatctgtggattttctaagtgggtcgaatagctagcagataccagtggatatcaagacgtttattgcaatatctcgaaccaatatttccgagactaaagtttctgctgtgcatgtacacagtattttaaaataaggcattatcatattcagaaacatcttttttttttctgttggcgtgttatgtgatggtattgtgttaatatgtggcacaaaagattgttctcaattattgaccagtgcattaatgtcaaaccctgtttatatttctcaaatttgatttagaaagtaaatgcacaatctttgtgtgatatggctagatatcatttcatgcatgctgcacacagtttttccattaatcacatagtcctatataatcccctttaagccttgactctctttgacataagaaaatcccaaagcttcctctctttaccaagagtgggaggatctgatcctgaattgtttttgaggttgagcgacctgaatcgaaggtaagggaagtgtcagttttttt

SEQ ID NO: 690 - DNA, 741 bp, Zea mays
aacttctcgcgggacatgggcggtgaggaaatcggggacagttcttctgttgttcttgctcctaggatcggtggtcgcgccaggacgtctcttgtggcatggccaggtccggtgctctgtcctgctttgagcaagcaggccattccactgctctctcggtgacggggtgcctgggccttgccactgggagaagctctggattgtatggttgcaatgtgttgtctgtcctgctaagttctctgttaggactggcagtgggattcctgacgcattagttttccctttccctggtccagtatgagagcgggaggtattattcgtatcatgatgattgataacaagcctgacgtcattgatggtgtgcctctgcctcctatcatccagctcgttcttctttattctgtcgaaatgcttctgagcatggcttgccaactgggctggtgtcctggacgggacaaaatacttggaaatccatttccactcgcctcgcccgaaatgctgtacaccacgtagaaactgcctgcatgcgtttgcacgtagattgataagctgcattctaccaggtaatggagtgagtgacaactactgtgttagtcagacaatgtgaagtgaccgctacagattataattccatagactataaacacaaggggttccatctgagtctcgtgtggaattctgattcacaatatccacagtacgtatttctagttgaaaatgcttgttcgaatgttcgattga

SEQ ID NO: 691 - DNA, 518 bp, Zea mays
agcttgcatgcctgcaggggaggagtgctcgcctcgtgggcgcaggaccctagcaacgccgtcgcatcgttccaggtcagcgttgggcaggctgggtccaccaacaggaccgtcaaggtgcccaggaacttcaccctgctggcgcctggtcccgggtacacatgcggagccgctaagcttgtcaagcctaccaagttcatgtctcaggatggcaggagatcaactcaagcgcacagtaagtaagatcattaacctcaagcctaccaaattcatgcattgacgatcgacttgtttattaatttcttcgcgcagtgacctggaacgtgacgtgcacgtactcccagttccttgcccagagatctccaacctgctgtgtctcgctctcgtcgttctacaacgacaccattgttagctgcccagcatgctcctgcggctgccagaacaacaacagcagtagcaccgccgcgccaggaagctgcgtagagtaagtttaatttgcatccacagatcgaactcag

SEQ ID NO: 692 - DNA, 762 bp, Zea mays
ttgcatcggtcgaccagtagtcttccactgtaatcgcctctcattattctttctgccacgctcctcttcgtccttactccctccgtcttgtctatctgtagccacttcgtcttcctacgtttttgccaggttagaaaaaggcatgttttcttttttcccgatactttgtccttctagcagatctagttccttctgcttcacatttattggatctgttagtcgcttcttacgattcgcatcttagatttttggattcgttgggcgccttaaaccgcaaccatatttctcctctaaggtctgtgtcttgtcttcggcgtgaaaagtgaatcaccccacctccaaaaaattactttgccccccccccccccatgttacagttaacgttcttcgctccttactctctgcgtgttatttcatatttacacagtacatggatgaatattctttcgaaaaaagatgttaagtaacttagtgactctccttaacactgtaggatttgaggctgtcatagtatgctctctgaccgtgctggcgggaggaaggaggtgtgtatatagttttcttgcattattttcctgtgactattctcatccctcctatatgttctttcagatgatttaagttctctgcgtttataaccagaaagaggaggataatccaatcatggtaactaaatagtaggtagtaatgtttcacggtaaatcacagtgctcgaatgcgatatgatctttgactcggagtattgaagactaaattagtttg

SEQ ID NO: 693 - DNA, 788 bp, Zea mays
aactaacagggttacctgtaatggaagccatagggaggcctctgatagatcttgttgttgctgattctgttgaagtggttaagcagattttggactcagctttacaaggtttgtcactatgctttcagtcgatctttttgtggttcccagcttaatctgaacgtgtccatttttttctatgccagcttagtgtctccttgtgtttcaggaattgaagagcaaaatctggaaatcaagcttaaaacattccatgaacaggagtgttgtggtccagtaatcttgatgattaactcctgctgtagtcgggatctttcagagaaagtcattggagtttgctttgtagcacaagatttgaccaggcagaagatgattatggataagtatactaggatacaaggagactatgttgccataataaagaaccccagtgagctcatccctcccatatttatgatcaatgatcttggttcctgcttagagtggaataaagctatgcagaagattactggtatgaagagggaagacgcgataaataagttgttaattggggaggtcttcacgctccatgattatggctgtagggtgaaagatcatgctactctaacgaaacttaacatactgatgaatgcagtgatttctggtcaggatccagaaaaactcctgttggcttcttcggcaccagtgggaagtatttgaattcttgctgacattgaccaagaaaacaaaggccgggggttaaaataacttgccctctttggtttcctgcctgtggctagccccatagctac

SEQ ID NO: 694 - DNA, 761 bp, Zea mays
ataaaggtatataagccaaacgcttttgcaaactgggagcctgggatcaccaaatggaccgtgttcttctgagctcccacttgccatctcacgctcttgcaaacacgaggtatttgattcctcccaactctctagtctgtggaagaaggcctttgaagagttcgtgtattttctctgtaacctgccagttgttccaatcttttcaggttgcagcagggtcctggtggcctcaacagtataggatttgcagtcataaaaaagggatgcttgaagttaagatgttacgcgatcggcgatgaactcggtggtccagggcgctttagtaagcattttatcgacaacagtaatggacctgttttccagggactcgatgcgtctgctggttcttttagaactgtcggtgctgaaatcactcaggacactggagatttctttgtcagtgacgcagagggtgatccagacaaacctaccgatgggttctcctcgatcgaccaggctataggtgctttgcgtgaagggaaggtaggcgaatggctacattaagcgtatttcacaccttaacacttttcatcgctataattttgtctttactatgttttgtatctcatagtttggtttgaacctgggcatggatccagtattttttattattttcatagtttcagcatgtactacacttctcatccctgcactttgttccattcatgggcattgaacgtgcatgatcaggctagattggattggcctacttggagatgata

SEQ ID NO: 695 - DNA, 851 bp, Zea mays
aggaggagaacacgcgtgacgctgctgccgacaccagagaagtcgccggtaacagctccactctctgaatctcccccttattcagaagtgattgcgttagttacttagctgtagtcaactaacacggtcactggccacatgtccatccttcattttctattcaggcaatgtacccttggagtcatcgtcaccggctgttgagtacaggcctgcacagaatgcagctcaggtttgttgtttgggcactcttgtctttgaaccttttggttcattgggattgtcgtcttactcttacatgaaaaagactccatttgtctcaacttactcttacacgaaaaggactccatttgtctcaactggaaatgtgacgatgatttgtatccacattaggttgcaagggaggacaatgtggacccagataatatgtcatatgaggtatgctgatattgtttcctgtgatggagtgggaagaatgatatgaaactctcatctcatgtaggatatgctagtaggcagtagcaaagagtaaaattattttcggaatttttgtagtagaacaaatagcttggaatggaatgaatgatctgaaattctcatctcatgtaggatatgctaagcttcaaattacttttggggtttttgtatagagctagattttttctttccctggagggctaactgaaatcttggtgcattatttcctattcaacagactaagtgccatccagcttaagatttgagtgttccattcttttggggaagggcttacaccttttttaaggaacaacctaaaatgaatttgggaaaggggattgcttaaaatttctgccaggccaagtctaatttttttt

SEQ ID NO: 696 - DNA, 721 bp, Zea mays
aattcaaatcacaggtctcaagccacctacccttcttgtatgaagacgatgagccttttctcttggtctaaagacattgtatggatttgtatcattcactggtggaggcggctgcaaaacaacagtcaattagttaatgcaggcaagcaaccaaaaacatactataacatcctaacttgataaaccaaaacaaagcacacggatttgtcacaaattgtaacatttgattatgggttggccctaaggatgaatttcatcaaagcactccatgagattcattaatgccttcgaggaaaaggtgtgctacaatatacaattaatttgggatgtcaaaaagaataaccaagttgcaaacatcattaataagggcctctacctaaactacaggagtcagcactttgcaagccaaacagaagctgccttttaaaactctcattcaatcaaagatttaatccaacatctgcactgctatcatgctgttacaacatgtgatttcaatttcattaagaaaattagaagtttgtcacagatgtatcatgcatgcatatgcttgtcacttcagtagataaaaaaaagattaaaagagggaccactcatcgtaaggtttcacaaatatcatgttgtaagcgagaaggagcagacaaaacagttgccacccccggggatctccgtctcgggccacagtccacatgggtgggcagaagttagcccttggtggatg

SEQ ID NO: 697 - DNA, 756 bp, Zea mays
actcctagccgttgtctttaatttgttggccaaagtgatgagtgggcaaggccctgctggaacagacgcccaagattgagctaccacgtcatgaaatccctccatcctaggccaaaatgcttgaaagtgaaacctcccttttcctctgctgaaatcatgaaacccaagcaacaaagggcaatggtcggagtcatccgtggctgagctctggagaagagaatctgagaattgctcctcccaatctgttgtgcagaaaaccctatccaatttgaccagggtaggattagagtgtccgttcgaccatgtatatttccggccaatcaacgggatttcattaagagcaagtcatttgcccatttcctgaacctgcccatcatggcatggtctaagttattgttattcttctcttcctcccttaagatcagattgaaatccccgagcacaagccacgacccagtacagagagctctaatttctctaaggtcccgtttgtttcgttggaattgaattttattttaataattataatttagataaaactaattaagttcatatatttatatatgtaacatatttgtatattatcttaaattatatgagagaaatagttatatactacatttcatgttataacgaagcaagtagaagagtgtgttataagttgtaaatcggaaaaatagcatataaatctatagaatcaatttctatctctcaccccatgaatttgagataggcttatatgataactttgaaaag

SEQ ID NO: 698 - DNA, 740 bp, Zea mays
ctttccagaacctgtctcagcaataccaataacatcacgctgctgtagacctagcggaatggcagccatctggattggtgacggtttttcatatccagccttgtcaatagcacgaagcaactcggtgccaagcttgctttcactccactttcgcatcggtcggggtatgcgagaacccttataggagatattgaaatcctcacggaaaattcgccaatcccgctcagtcatctcctcgagtgccttttcggaccagtgcctgtccacacgcatatcgaaagcatcataaatttcagcagcagcagccttcttcttatctaccgcatcatcctccggacggtcctccacaccggccttgcgccgcagctctgcacgggtctccttctcgtgcacagctgccgccttcttctgctcacgtcggtcaatgccggcaaggaagccccggccaaagagcagccgggcctcgtgcggcgactggtagagtgcattcatgtcccggctggtgtcctcggtgttttcccagtcgaaggagaagcggaacttctcagagggcttgataacccgcttcttgggctttttggacccgaggtactgctccttgatcgcgtcgagctccttctcacgctcccgctccgcaatcttctccagccggtccctctcccggtccccgcgatccctgtcgcggtccccgtccctatcacggtcgcgccggtcgcggtccctgtcgcggcgggaggagt

SEQ ID NO: 699 - DNA, 779 bp, Zea mays
catgcctgcaggcagacaagctaggttttactgcttcattgagcacaaagatccgctgacctcttgctcttggtaaaaatccaaccttttttgtattgttttcttctgggaaaacctccttgtggtgcataaactgcgtagtacactctacaatttctggagaggaagctgagaactactatccatatctggcacgacccttgtcaagaaccatggctgttcacttgccatgaagctgcttgaactggaggcacctaaatgctgtggattgttcctatgcagatgattggatcagtggtttcaggcttcggggggttcgatcagatgttgtatgaataatagcaggattgcttgagagactatagtttgggtactgtttgcttctctatttactggtacggtttcctactgatctgcggctgcgcaggaaggcattctcttttttgccgtaccatggatgcaccggatgttcaacagagcatgggatataaggagtccaggggtggtatgcctaagtttttccatgcccttggaccagcactcctgatttcaatgggttacattgatctcgggaagtgggtggcagccgttgaagctggttcttgttttggattcgacctggtgttgctggctctccttttcaacttcactgccattgtatgtcagtaccttgctgcttgcattggcactgtcacagggaagaatcttgcagaggtatcggtttacccgatgtttttccttggtttgctggccttctattgagatttagttcagtaaat

SEQ ID NO: 700 - DNA, 784 bp, Zea mays
atgactttttctgaccctgcaaatacaatgtttcttgattaaaaatcgcgcagaaactgatgacaattaagtgaaaacaaacgactgcaaagtacgcaaactgtcactacttgcattttttgcacatgtcaatattttccaatgaacatgatgtgaaaagttagaaatggtacaactttgatgttttgtgatatgctacaaacccaaacataagacacaaaatttcatgaactaaacaaaaaattccaaaagctgagcacaatgtgtacagataaacaaagtgtggatcctgtggtggaaacttgtatgaagttatccaaacaattgaaacgcgattaattacatcttgttttatttcgatgtggtgtacccacaaatcatcaaaataataaaggaaataaatataattttcaaattgtatccaatattcaactggcatgaacagaagttcaaatataatgatctcgctcactcttaggactttacaaactccatacaacaagccaaaattgaaataaatgtaaatgtatgggttgaagtatttctggcaaggcgttgcccactaaattttaagtctaagggcactaatcatacaatttacctggacaactgatgaatgaatgtagaaggtgtgtgccattttgtttggcaccaaagaagcgcccactcagaggaggaaagccacttcttaacccacctggaatcttgtgggggaaaatattttacattttcattcggtggaaggaagggaaattttggtgggccttgggcttaacccaaatta

SEQ ID NO: 701 - DNA, 755 bp, Zea mays
gcagtttcaaatgcctacattttttttgtaattaccaacttaggttaaaaataactaaagataggtattgagggtgagggtgagtgagcgaggaagaggggcagctcaccagcggaaaatcgtagcaatacgttgttctgttgttcctagcagagcagcgctttagatcaatcacactcaaaggttgataaggattattcagtgcaacaccatgcattggaccagctgacgaagtagctgaatggtatagtaacttctgcgattctgtatcttccacttctcggtagatctaaatccattagaaatactatgtgcttcagaacataatgacatggatggcagttcggatttcggaatataagaactgcatgttgcttaaatcttcatgtgtgttatatacaaaatacaaaaacagtaaggacaacttacatcaatggtgcaggtgtgactagtgacatttgtagttacgactctccaggtaccacttgcaggtccatcacagtccaacttgagtttcacctcccactggcatacagaaagatgatgcatccttgcaccaacaagttcatgtatcttcaaagccattgattttaaaagtgaacaagcagtagcttcatcttggccaacgtcaacaattgtactcctgagtaacacgaaatgcttattaagagaccaatataatagtcaacgcataaacatattctgaaaaagggattatgtgcaccactttacccctgaaatgggacgagatcaag

SEQ ID NO: 702 - DNA, 774 bp, Zea mays
aaggttgtagacatcgtgctgtctcaccaggtaaatttctgtatggttgatgatttttacgcaaatgattagtgaaacaatctttgatattggtagtgattttattcacagggtgtgaggaacaaagctaagcttgtaacagcacttatggaaaagctggtttatccaaatcctggtgcgtacagggatctgttggttcgcttttcgtccctcaatcataaaagatattataaggtgcggtgattagaaataacctagatattccccttataaattattttgatattttacctaatgaattccatgcatcttaataaacacagttggcccttaaagcaagtgaacttcttgaacaaaccaaactaagtgaactctgttccagcattgcaagaagcctttcagatctggggatgcataagggagaaatgactattaaggatagcatggaagatttagtctctgccccattgcctgttgaagatgctcttatttctttgtttgattacagtgatccaactgttcagcagaaagtgattgtgacatacatatcacgattgtaccaggtatcatatcaactaacttgatgtctttcataatcctactgagcagtctgacatgttagatgtcctaatgacatggaatgctcatcttttcattatacacatgaaatgttgagaaatgaaatgataatcgactgaaattaactgagtgtgaaaaattgtgatctcccaacttgttaacgaacatcgtcctggctaacttgccaatattttt

SEQ ID NO: 703 - DNA, 760 bp, Zea mays
ttacgctgataactcgtctgatcgattcaacttttgcttgcagaggtaaggcttttccatgattcatgctttgtcatttaagaaattggaacctaatttgtctcagttctattgataagaaatgttattttttaatataagtttacacaagcattgattgactgattaggagcttggatccctgcttgtgagatgctgttgcatgttatatatgtcttgggggtagaggtgtaggacaatgtttaattactagttgagccataatattttctttgtggattctttaacatagaaatatctgtttttgaaccctttggatattcttttgcatcaggttcatctctaccctcagcgactattagctaaaattctaagtacataactgttatttgtaccagcatatatgctttctggtttctgggttctgtcatgtgctcctaggccagcatgtatcaggagacttgttgagccacaagattttttttctgtggatgcttggacatagcaagtcctggtatttgcagcttttggatatgttgttttgaaagtgcttgtccactttggtattggtatcagggcctttttaagtacattacctcaaactttaggattctaccattatttggagctgcactaactcctagggcccaatctcaagtttcttttagaatttggggggcctagcccctgccttagattaacaaagatcatatcagttacaacatgcagagaatatcagaaacaaaaatcccacagacaa

SEQ ID NO: 704 - DNA, 736 bp, Zea mays
ataatagttacagatagtagtgaaacatagaaacaacactgcaaactcactatattaccgttcgtgttggtcggcgtgcagggacttcggaaggcgacgcttttactggcgtaccagagcttcggcgtcgtgtatggcgatctctgcatttcgcccgtctacgtgtacaagaacaccttttccgggaagctgcggctgcacgaggaggacgaggagatcctcggggtgctgtccctcgtcttctggagcctgacgctcataccgctgctcaaatacatcatccttgttcttggagcagatgacgatggagaaggtatagtacgcacacatactcatgtctgtgtccagttcttctagctcattgttgttccttcaaactgtcttgagttcactggcaatgtgttgtgttgtgttgtgttgtgtaatgcaggtggcacatttgcgttgtactcgttgatgtgcaggcgctcaaggatgggcctcctgatgaacagtataaacaacgggtgtttatcggtgtacagccaggaggaggaacctcgcgaggaggagctgaagagtagtctggcgataaagtctttcatcgagaggcattactcgctccggggtctgctgctggtttttcgtccgatgggtactagcctgggtattggggaatggagtcttaccccaactatggtaagtaacaacccttgggtcctgggttcattgagatgggttaattttttggccggaa

SEQ ID NO: 705 - DNA, 864 bp, Zea mays
cattaattccatttctcaggttgcactcgaactatcatttatggaagcagttcaagggtgcagcaaaacggtcaccttccaaacgtctgtaacatgtgaaatctgtggtatgtagatgcagtttttatctcatgtctccatttttaggtatttagccttctgttttttattgtgatgagatatttttcagatggagccggcgtgcctcctggaaccaaacctgaaacatgtctagcttgcaggggttcaggatttgttagttcttcatcacattgcttttgtctatccagtttaactagtattcttatttgtgttagtttttaaaaatattgttgacagatgttcatgcaaactgggcccttcaggatgcaatcaacttgcacaaaatgtggtggttctgggaagactgtgaaggtagggtttccctcttaatgacatatatcagctgcaacaaaaaaaaagattatgaatcattatagtacacccttggcacaggtatttcactgaagttgatgatcttgaagtatgaattacttttcctcaccatattttattctactagtcatgaatgatttatttcctgattgcatgtaaagtcagctctatcatgttaactaattgagttaccctgtaatggacttcctctatagagcagcttatgaattctgattaatcaccacaacattggttatgcttctatgttattcctttaggatttctaccggttcctcgggcgggcctcgcctggtcgccccgttatgtgtagccagtggctgcctgcttctccctcctcaaggcgcagcgtagcacagcggctgcgttgctggcggccaaagatgatggcgcgtcgcgatgtacaacttc

SEQ ID NO: 706 - DNA, 809 bp, Zea mays
gcatgcctgcagcatcttggtcattttgagtggctcttgatgatcattttcgttgtgactgtcactgtcactgccatctccttgctgcaagtcctgaactactgcaactttttggcactttctactcctaacataggtctcggagtaggtcctaccctgatcgaattgttacctcttatcgacaggctgctgctgctcagatgctgttaagcctaaaatggcttttggcctccccagacaacatttaaagggactggccgactgctcatctttggtctacccaggctgtatctgaagggactggccgactgagcgtcctttggcctccccagacaacatttaagcctaaaatggcttttggactgccaggcttatcggctgatcgctcaacacgttgattaatcgctataaattgcgattaggcggatgataaggacgatcagctaccctgatcgaatcgttacctcttatcgagcactaacaatcgatcagaccgactaatcacgactaatcatgattagtcggacgatatgtaataagtgcaccagtataataaaaaagggtaattaagtttcttccctccccacggggagccattgacaattttatcattatcatttgtgggcttcgccattatgccatcggacccacaaatcataggcacgagatggtataataatagacaaccaaaattgagagtgacaaaatagcaaatttctcccccacacgggtagacacttaattcacactggtgtttaagttgttctgttgaccatgtgccttatatgcttaaaatgttcacttgatca

SEQ ID NO: 707 - DNA, 638 bp, Zea mays
tttggtgctcggcattactgcgtccagttccagttccagtctatggaaaaattagggaaagtgccttgatttgaattgacaaaatcgcaccacgtcttccgatcgatgaacagctaagattcaaaacgtgctgtgagcagtgagcgacgtgtgtgtttcagtcggtatcaatgcgatcacgacagatgctactgtttcgcctgtcaactgctggctttcacacgcatctcaggcgcaggatcctctgcctgtcgacaacaaaggatatgcttggaatatattttttttttaaaaaaagttcagaagccaagccagcatatatatatgtacacactgctttccaatctatagcttgccccgttcgttcgttcatacgaggatggatgatggtctcatgcgtccacttttatttattattaataaacagcttagataaagagaagtcggcattcagcaggtggtgccgatgaaccagcttggtgcttgcctcctgcactggttggtcctggtcctggatgcatgctatcctgttcctgtccaggtgcgttcaaccttgcccgggtccgggtgcggtgcgccggcgggggttggtatggcagtcccgctcccgcagcctgctcccgctctagctcgtcgtc

SEQ ID NO: 708 - DNA, 798 bp, Zea mays
gctgcttaacaattccgtaactttaaaattaagacagcagtggtgtcaaacaaaaacttcagggacaattacataaaattccccacaagttttgtatacaactcatgattgaattctaacatctaattacctctaaacggtccacaaaataaaccctgcaatctgtttttttctgttttgggcagcgacatacgcggattcaaacagcgataacttttaaaatataattccgatttgagcgcataagtacttgttggaaagataagaaaaagcccttcatgattctcatactgattaacactaattacttccgaaaaatccccagaaactgctaatactgctgctgttcatccccctgaaaaatctgtttttttggacagccacatacccggattcaaacgatgataacttttaatttataactctaaattgagcgcataaatactcgttggaaaggtaaaacaaagttctacatgatccccaaattgatccccattaaatcttcacgaaaaaaccctaaaaactgctggaactaccgctgttcatccaccacgtaaaattctggacagcccccctctatctaatcgcaaacgcaacatctaatcaattgaatcgcagcgcaaatgaacaagggatgaacacaaaaatcaccttgggttctccccctttccttcctcccttcttccctccaccaaaacgattggagaatcgcaccacgtgacgatgatccgagcggcaaggattggcacctaaggaggaggggattggggggggcggcttaggttttagctaattaac

SEQ ID NO: 709 - DNA, 737 bp, Zea mays
gcatgcatgcgcagaagagcagccgctacaaccaatccagacgatgtcgtcgggatctagtcatctttttcttctcagtaatgcatggcgattatacgccactgttcacacctgcacacatgatcggatcgtccgaggctttctgggttcctacgtcagttggtagtatttggctagctagctagctagctagcttgtgtttgaggaaacgtaggacgtcgtcctagctaataacatctcactttctgtttcgctccctcctttctccccatatgattgatctttacctactgctgcacacacacgccttttgcttccatgcctgttctcagcagccaccgtctctgggctaggctcttgctgtttgtttaaggaatagacatggcatgtcaagtgagctgacagccttgttggccggactggactttgtgaggcagatgccctcctaacccaaacctccccactgctactgcaactgcaactagctaggcctgagcaggtcgatgtggacagagcgagcgcgcgcgcgacagcaaaccgacgagaaagaggcgatgggtggggcttggcttgcttgtgatagggggagggatctgcctttgcggtcctacttgtggtctggcattgcattgcattgcatgcctcctgatgccaacccttcgtgttttgggttgtggtaattcctgtcaacacctgcatgattgcgctgcggcgtacgtgtggaccatacggtgctg

SEQ ID NO: 710 - DNA, 520 bp, Zea mays
catgcctgcagacacaaaggatcatcatcaaaggataatgcaacatttgaagtggtagcaggcacctttgatttcaaatgtagcaaatcatattttgagggaagaaaagcagaggggtcttgagacattttggtgtgttttctcttcctatcaccaccaactgtttctcttctatctgtaagcgtaccacaaggcaatgctctatcatttctaattttaggagccagctcgggaacaactgaatcctgttttttcctgatatctgtcgatgagacaaataggttatccttgccctgtgagcccatgaatttttcatcagatatggatgttggacatgaagatctgtgctgacattttgacttcagcagtctgtgagagctaccaagaggggggcataattcagaactagtacctgagattgatcgtgagcagctttctctgggcaactgatatgaagtgtattcacttgggatagaagagccaaatggaactgtcccagcctgcaaccgaaaatatgggg

SEQ ID NO: 711 - DNA, 767 bp, Zea mays
gcagtccccgctccccttccgcgtcgccgcgatggaggtcttccgggagcacggggacgacggagtgccctaggattccatcacgccgccaagcatcagtcccgcagccagggatttcttctccgaccccgaccttcatgtgagtcgcggccttcctcctcgaagcggatccggcggattggaggggcccaaccatagcaggtgctcctctcgcaaccaactcaggtgtgaccgtgtgagtgtgactgtgtgagtgtgagtggaagtggtccaaccgtcgaaggcctctggtctccggcaacgcaccagtggtggcactccatgcccagctgatgcggctgctggtctggggaaagtggacgtaccttttcggttttcgccatgtagcttctgtgagtagtgccatattctgaataatatgcagagctaattatgcacctctccatattattgcactgcaacaaagctgaacgagaagggaaaaaaacgtagcttgattaggaactagcttctttttattgccgggtaggatctggtaacttgcaataccttgtagtctaacattaggccattagctatattggattgtcttagtgatgctgctgggtgcgggtctgttaaggtaggtcaccatggaaaactgaaaccaaacaccagtaatggttccttttttacgtgggccatttgcccctcgaatcggcaagaatattcccggtggactgggaaaaaaaaattctcggttttaagcagcactgggctaggtgcgt

SEQ ID NO: 712 - DNA, 693 bp, Zea mays
actttgttctttggtagcaaaattcatgcatctgaatgccaagcttgtttgcccctatatggttgtcattcagcatggactggttaatccaggatcagcaaattacatattattgacctcagttgcctattttcatgatccttttctcataagttctaacctacattttttgtccatttttaaggtgggtctggcacttgtggtgaatggaaaggtaacagttggagtgatgggatgtccaaattggaccaacgatgacatagtcaacaagaaagatgatagcgctgctgcatgtaatggtcgtggtattcttatggtctcccatattggctgtggcacatggtctaggcgtctgtctgctgatattggtcagttgaatacagctcaggatatttggaaaagatgttttgtggacacttgttcgatcgcacacatggcacactattgcattccagatagccaaacatgggatatgataccgttatctgctacctacgattcaacaacagatgcaactgatcctagaaatgagaatgaaatccttctcctatccgtttttttgtggcaagtttggttgcactcctccaatctccattaaatggggttggatacccttgccacatttaaattcaacgcccggcttaatccaggtggataatattcgaatgccttgcccttatataggctaaggcc

SEQ ID NO: 713 - DNA, 760 bp, Zea mays
accatacccagcctgtcggtaaagaagctctcggggctccacctctggaagtgggagctcctcgtgttcgtgctcatctgcggccgcctcgtctctggctgggtgatccgcatcgccgtcttcttcgtcgagcgcaacttccttctgcggaagaaggtgctctacttcgtgtacggcgtgcggcgggccgtgcggaacgtgctctggctgggtgtggcgctcgtgtcctggcacctcctgttcgacaaggccgccaagcgggagacgcacacgttggtgctgccctacgtcaccaaggtgctgtgctgcctcctcgtggccaccgtgatctgcctcatcaagacgctgctgctcaaggtgctcgcctcgtccttccacgtctccacctacttcgacaggatccaggaagcgctcttcaaccagtacgtcatcgagaccctctccggcccgccgctagtggacgagagccggatgatggctgaggtgcagaggctccagagcgcgggagcatccatccccagtgagctcgaagcgacagcgatgccgggcaagtcccggccactgcccaagagtgggcgcctcacgacggtcgcgtccaagcgaggaggaggagcaggaggagcagcagcagccagcaagcagctgcataggcagaaaaccgagcgccatttggatgacggcatctcgattgaccagcttcacaagctcagccagaaaaacatcttcccgtggagcatgaagaggctgatgaagatcgtcc

SEQ ID NO: 714 - DNA, 762 bp, Zea mays
agcttatgagttcagctgattctcagaatgaaccaaaagcagaccacaagtagaagctgcttttcaccagcttctcagataagctgcttttccaacaagcagcatttgtgccaaacagagctataaaaactagaatattgaaattgaatgaatgataattgatgaggctcactttttgttactgagagtctgttcattttgataatttctgtattcggttagggattcagatggaggcatgatctgaacaaagtgagtgttcatacaacatgattttggtggtttctagggccatagcataatatttgggtttaacacaatctcacaatcaacacttggatttgttcatatcattcctatagtttaccataactttttctgacaattatgacaattccattttttgtggtgggcaaaatgcctgccatatctgaggcaaacttttgcactgaaatgattcagtggtagatagcccagtgatgaaaaactctagcatgccaaaagtatcgtagctattaagttgcatgccccgaccaattcaacccaaaagcttaatctgatgggaagagctgggcaattcacttatattatattccaacacccccctcacgtcgagcctcccttgggcctcagacgtgtaataggagtaaacaacaattattttattttaattgcgcagctggttgtattttcttgcttaaagtttaacaaactatagtgatgaacgaagcatgtctgattttatttataacttgtgagatg

SEQ ID NO: 715 - DNA, 720 bp, Zea mays
  unsure (1)..(720): unsure at all n locations
aacatgtacgccacggcaacaaccaatcattaagctgtcgccgtcgcgtgacaccgcaaccgatgaacagtaatccgccagctcgtcgacggaagaaaatgtcagtgtcagatgaccggcggcgctgaattttcgtaaggaaaagaaacgaatcgtccgtgacagaatctgacatcgcatcagcagctaaaagcaacagacattggaggcgtagcaaaagaattacaccacttttatacaatgcagaggaatagaggatgcagcatgacacgtctattattggaggaggattacacaggaaggaagcggacggacggcatggaatggaagtggtgggaagcgtcgaagccgaagcaagcaacaatgtttttttttgggctgttgttgtgttctagctaaaatgctatgcaggactagcggtagagtagtagtacaagcaaacagaacggggaagggaaaatagttgcgcaaccgctgggccctgcgatgcaacggccagcgccgtacgcggagcaaaccgacacgacacggccacgggatgcctcagggcttccagacgatggtggtctcggcgatcatggaggtgaccacgtagggatccatgttggacgccggcccggcggtcctcgaagtagcccttgccgttctgctccgtctngcgacccacgcgcaccgacgcgccacggttggcgactccctgcaacggcacaagccacaaac

SEQ ID NO: 716 - DNA, 545 bp, Zea mays
tgcatgcctgcagcttcgatcctctcggtcaccgccgtcgccggttccaagcgtccggccgcttccgacgctgagatcccgctcctcgacctcgactcctcctcgctccaccagcagcaggtcagtagcagcgtgatcaatcctacgtacgtaccgtaccgacgacggcacgcacggcagttctgcgatgatcgatcactgacgtatatactacgcgtctgcggctgtgggctggcatggcagggtgacaaggctgggcgcaagggccaggaccaggaccaccaccagcagcagcagctggagtgcccgcgctgccgctccaccaacaccaagttctgctactacaacaactacagcacggcgcagccgcgccacttctgccgcgcgtgccgccgctactggacgcacggcggcacgctgcgcgacgtcccggttggcggggcctcgcgccgcgccggtgggggcggcaagcggcgcagggtctcctccgccgagacctcgtcgtcgtcgccgccggtgcctgcgtcgctcgcggacgcgtgcct

SEQ ID NO: 717 - DNA, 692 bp, Zea mays
accttaatttaattgtcgacaagatgaagtttcaataaaaagaactgtatcgtttatttatttttttgctctactgtgctaatattgtgcatcactgcactggttcaacagtatgctgcttcagtatttttgttccgtaatgctatatgtattttgtgacagttgtttcttagcaaaactgctattagtagaagtaattattgtactaaagtttgattaacttagtagtgctctctccatttcataatgtgtaaggcatattagatttcctttaagaaataaatgaccttcgaatagtaaaaatacatgtagattcatatttcacatgtttttttagtaattgagaatgatttcaagataaattaatggtgaaagtataccttgaaagacttctccaaatcctaatatgcattgtaaaatgaaaatggacacaatagtttaccacaggacaaactgtccacctggaatttaaaggtacaaatattgttagtttctaaagggttgtttttatggtaaattcgtgcctaccctctgcggactgcttgcctgttgtatcaatatatagatctagtactgcttattttgcatatactgacatttgactttacatataggtggaacatgtatggatctcatgtgggttagacaggggatctcttgaagacgttagaaaacatttcaattacaaccac

SEQ ID NO: 718 - DNA, 774 bp, Zea mays
acaattataggtaactggtgttatcttgcaacattgagctagctgaggtaaataactgtaaaggcattgataaacttactggaaagatccagacttgaggtgatcccacaccatagactgattagcatttgctgttactttatcccaaaagaagggctttagctttgttttagcttcatgagaatttgcgtcatcatccatcttattgcctgatttcttcataagcggtggtggacgtgtattcgatgaaccagacattgctggtggtggtgggccggtagattttggtggcggtggaggtgcagcttttggctgtggtgcatcttttggtggaggtgcagcttttagagcagatggtgatgagggttctgagtgaagaactgaactaggctttgaaggtggtgcgggtgcttcaggagttgatgagtgaggagccttcagaggtgcaggtgcttgaggagttgatgagggaggagccttcagagatgcaggtgcttgaggagttgatgagggaggagccttcggatgtgcaggggctggaggtggcatagatggtggggttgttggtcttgatcctgggacatacccaatagaagcagccattggtttaaccaaacagttgtagactgctggggtaaacttagttttagagatttcagatgagcttatttggcctttgccaattttgggcagccctttgacttcaaggggcaagtgctccccagcttggttgaattattaaattgcagttctccttttggaaaaaatcttaaa

SEQ ID NO: 719 - DNA, 761 bp, Zea mays
cgacctgcagataaaaagtttgcaagttggaagcattggggagttcctatcagctgctctacagcctccagaaccacgagctgtatgtgtttaaatcatactttggcatttccatattccctttttctcattgcctttgtgtctttgttggatatagtgtcatattaaccgatttttttctagcatgtgcacatcatatacattttttaagtaggtagcaaaagatccttcttttgattttgaattatttccacttacacttgataaatatgtaggtcgagaatgcagtggaattcttgaagatgattggagcattagatggaaatgagaaccttactgatcttggtatgcagtgtatgttggttccctgcatgctccggagaaacatttagaactgaatcttagatttccttattcaattttgcaggacgatacctttccatgcttccagttgatccaaaattgggaaagatgctcataatgggtgcagtttttcgatgcatagatcctatacttactgtagttgctgggcttagtgttcgggatcctttcctgttaccacaggaaaagaaggatgtaagccttttaatttctgctattagtgtatatatgtatattagtgtctgagtattgggtgcgaatcaaaatttcctttgaaaaaaagttatatttatgaaacagtaagggatactttagtacctgaaaaaatgcatgtggtgctttttaatttacaagaagcttattttgcatgaaagtaagaa

SEQ ID NO: 720 - DNA, 725 bp, Zea mays
acaccaaagaagaccctcacttcgtatcctatataggagttgcacatttggttgggagccttcaaacacacacaagttcctaaatttccaaatttcctaggctaccagaatacaaagagccttcgacccctttcgaatgttcttgggacccatcttgacagaccgcgcccaccatgagaagaaacccaactctgtcccattgggcgtaatggcctccagatgcaaggattgcaaaatcaaggctcagatttgtctagagaagataaccaattagaatgtgctgaagggtctcaccggcctggtcacacaaggggcaggaatctgggtgaggaaggcctcgtttggcaagccgatccacagtccatcatcggttatttttggcaagccaaagaaagaacttgcagcggagaggagcccaactcctccaaattaatctccaaggtctgaacttgacagacccctcaaagaaagcagagtaggctgatttgctagtgtagcaaccggattgagtaaacttccacacatgctgatctggcccccctccaagggtcacaccctccaagacatcccaaatctgaaagtattcaaccaaaagttgtactgtgagagcacccccaatgtctgagacccacgcttggttatgaagagcctgagcaacagttctttcgtttactgttgttgttatgaaagactttgttgttgttgttattgctgcaactttgtct

SEQ ID NO: 721 - DNA, 781 bp, Zea mays
attgctcacttttacggttaaaccctaccagctctagcaatgtgaactgaaatgtatctacctctaaaaaatgataaatttccacgaacagaacaatcaaattttggcattactggaattttcaataggtacctaactacctacacgaatgacatatattgcatttatttataactatttgttgaggcaactctacttaacatgtcaaatcagggattcatgcatcacatatattgcatattgaacattacatgtgcaaatagttcaaataacagcacaaaaaacgtgaaaaggtatatatgtattgggatttaagacacctttgtatattctgccatatcaaataacttagaacagtttaatgatttcctaaaagcccagtgaagtagcatgagcattacagtaactcacaatttcccaaaaaaagagacagaagtggagtatgatgaaaagaaactgaggataagaccgttcaagaaggcagtcacaggatgacaacatctgtgaatgtctattctctggtaacttttaaggcagttagcatattccagattggcattgtcacattctaggctgttttctgctaatgcatgcaaggtacacctcacaagcatttttggcacttccaacccaacaagttagtaattaattagtatcttggccttctgtatttactatttttttgaaaaacatttgtctgtttcttaacttttggtgctggcaggagaaggtcccaaaaatcttgcatgggtgcccctgcttataactcttacttcgcttt

SEQ ID NO: 722 - DNA, 744 bp, Zea mays
gcagcgaatcgcactccatcaacaggaaggtcaacctttgcacctccagttggcgttagtgtgaggcctctacaagctgtggaaattcccaatgggacacctagggatagaaggtgaattgtcaagctttttgagatatttctcttgctaatgcattgtcacattgttagcatgtctcttcaaaacatatgtcgctctcattctattaatgattttctgccccatttcgtagtggggttcaggggttttctcgatatatgtgagattgtcttcttcatacgatgcttggggctgccttaccccaccggttgagttttttgtatataagtagcaacaagattgtttggattaacagttgatatttcacggtgctgtagggctgtttatcccgatcctactttcgcccagtccacacggtcacgggactcacatgacagttcaacactgacagaagaggtctctgtcgctgagcataccgctcacaccttctacattctatatttttcagatgcttttgtactgaacaattagtgaacttacacggggctttcttcagtaatagtagtacctttttccaatgaataaatctgcaaatgctgtttttcttttgcagcttgaaatgctaaaagatgagaatgtaaatcttctgggagaaggtggtcctatggtttcttactttctattctaaccaaattttattgaatcaggaaactatgaagttgtcttcgtctctattcctaaact

SEQ ID NO: 723 - DNA, 754 bp, Zea mays
tggctacatgtatgtatttggctctggcttacttggtgcatttcttttccgtttctttgttgaggacaaaacttttccctgtaagttgctagcttaattttgatttgtctcagtcatataattttagttgtaacttacaagttttgtcttttccactcagatggttggacattagtcatggagattgtcccaggattttccctctatcggggcctatatgaacttggtcagtatgctttctcgggaagcagtataggaactactggtatgacctggagaagtctgaaagatcccctcaatggaatgcgtgatgttatgatcgtaatgagtgtagaatgggcagtgctgctcatattagcattctatttagatcaaacctctttgctaggcggtggtgtcaggaaaaatccgtttttctgcttcagatgtttacagaagaaatgtgcaacatcattgcatgaacctagctttgtccaacaggattccaaagtcattctcgatatggagaaatctgatgttgctctagaagtaggttatccctcacactgatatttcttatacttctctacatacagtacatatgaatgacatttcattcgttgacattctatttcagagaaaagtagttgagccatttttgatagatcccaatgcaaaccaagctatcatctgtgataacctcaggaaggtttatcatgggagggatggaaaccctgaccagctggcttgtaggggttatctcttggccctcaat

SEQ ID NO: 724 - DNA, 815 bp, Zea mays
gccttgcctgcctgcagttggatttccttctgtagcttccagtcctagtgactccatgcaccgaatacaacagcctgctgttgcttcctcaaagaggaaaacaaattctgtccccaaaactcaaccgcctgtgagtgctgttgggtctccagccagtgtttcaaacatgcatgcgctgctgaatgcaagcagtccatcgattgggaccacacctatgggagaccaagcaatccttgataaatttgtgaaaattgataacatttcccatcggtatagcataatttctacatctgctccctcccttcacgaatttttgttgtcactttcctttctattcttagtttctttggaagtctgtcatgggagactttttaaggaagttttgggttgcacggtgtgaatttgatgtctaggctattttaaagctgagattcagccctattactttggatggtcacacaaaaaaatgtcaggctataatgtgcaaatgaactgtttcaattctttatcaaagttaatcaacattttaacctaaataactagtccctccagttcaaattgtaagttgttttggtttttttagatacctggttttcactgtgtatatagacatagcacacatctaggtgcatagcagaacctatgtacctagaaaagtcaaaacaacttacaatttgaaattgagggaatgcctaacaaaataaaagggtgaagagttaaaacatcttttttaggaccggagtttctaaaaaaaaccctggttggggagggaaagaccaccctcccggtattaatgcttggagttgacactcaag

SEQ ID NO: 725 - DNA, 790 bp, Zea mays
  unsure (1)..(790): unsure at all n locations
ttcgaccgatcgcagcgcccgcgtacatgtacatcccgtgcacgcacatactcacgcgtgagcgggtgtctctacatgggcatgcaacgacgactcagcattcagcaacggggtggatggaatgcaaggactgtggcggttgttggaaactgatctcggcaaattcaagatttattggaatgcaaggactgtggctgttttttaaactgatctcggcgaattcaatattagtcatgagattaacttaaagctaaagttttgatccatccgttagttccttccttattcggatattcccatctcatattgattatctcatattgattggatgcaattggaagagattataagggattttgacttcttggcatttaaattcatcaaatctcctttaattcacatagattgagattaaaacgagcaggtcctaaataagtactgtatttgtcttgatcgacggcaaccgtaaatcatttagcgtatgccctatacacgagaggtgactcaacctcgaaccggttgatctgaaactgaaagagcaccggggcggagggttttaaatgccatgtccagggcaatgcagcgtcatcagcaccaatacctgaagttctaatggctgcatccaacttaaacttatcactggactaagaattcagcacttagcatgatttaaattcatggtcatggtgtagactatgaataacgactttataaaatctgcctatttaagggagactagcagggtatacaaatgtaatgtaatggaccaggcaagangactcctactcta

SEQ ID NO: 726 - DNA, 835 bp, Zea mays
tagtgcgtcgggcggacgggacaagcacaagcaccagccgcgcgcgcgtctcgtcagccccgatggtccctgccgggcgcgccggccgcgagtcccatcgcccgtccgacgtggcggacagcgcgggcccgcgtgctccctcccggctcgggcagtgacgcccgcgtgggccacgcgctgccgggcagggcagccgctcgacgtgcatggcgccgcgagggatgagaggccccctcaccacgccccggcccccggcccccgaccgctatatatatagatatatgcccggccctgcaacggcaacggcaacggcaacggcatcctcccttcgcaaattgcaagcaagccggcaagggacggcaccaacaagagcgcgatcgacctaccaagctagctagcgaattaaccttctcctcccatggctccgacgacggccacggcggcggcggtggggacgaaggcgacggcgctgggggtggcggcgtgcgagcgcgacgtggagaagctggagttcatcgaggacaagaccaggaacttcgacgcggagcacgtccgcgtgctcgcggagatcctggcccgcaacaacggcgccgagtacctgcggcggcacggcatggaggggcgcacggaccgcctggcgttcaaggcgtgcgtgcccgtggtcacgttcgaggaccctccgcccggagatcgagcgcattgtcaacggtgaccggatccaccatcatcttctcccaccccatgaccgagttccttacttggtgcgtagtatagctagctgttggtagctcgatccgccctcgaaataaatagacgaccgggcaaatgctccgat

SEQ ID NO: 727 - DNA, 789 bp, Zea mays
gcagcagtatgccactgtgcctgttatacataactgtattttgctattacctgatcgtgtcttgtgatgacccctctttgaattttgcagaccatcttccgacattgatggtccgatttcaccctctccgatgcaaggggctgaactttggactgcctcaccttttctgacttgtgaatgggtgatatgtggatctgcgctcatgggccgtgagaaggtaattgctattttgatatgatcttcataaaaaaaaggtactttagagcttattcaaatatgtaatgtgccctgaaatatccataaactacgcaggaaatcttggatcagtttgagtgtcacactggcatcacagtaaccaacacctggagttcagatgtgactcatgtgattgctaatacggatgaacgtggggcatgtgcacggacactcaaggtcctcatggctattttagctgggaagtgggttctcaatgtgaattgtaagtccattttccctgtagaccagtaaacaaatagtcagggctattacgtaggtcgtggtctgtctttgtggcttgtgattttggagtcaccacaacttagggaaggataattcaaccaagtgctgtatctagtactagtatactgcttgcatctgccaggttgattttgcttaaatgccttattctaacgcaaatacccatttgatatctagggctgaaagcctggatgggagctagggaaaccagtccccagaagagcccctaccagaataagtggtgaatgttaatgggctctggtggacgggccc

SEQ ID NO: 728 - DNA, 790 bp, Zea mays
cagcgttttcattttctggttgatcctgtcccttcgtttctgcaacgaaacacagaataatataagcggatgtataattagatagaagaaaatatataagaaccaaagctggcccaactgaaaacatactggcgcattggtttccggcctatatagggcccatataaaagccgtatgccaagctgagagttggagcgtccttttcattctcggccgacagcacaaagttcttaaggaatttaattaaaggaaaaacaaaaggctctgaagagagagaaaagagagtacggtgtagtattgcatcttatttcgagtccgcagtcaacaacagctagccattgtcgtctcgatcgctgggatgcttcgaaacctttggcgattcctttctgatgactaggtcaaaaaaagagggccattttcaacagtgtgatggctacgtggaacttatcctacatagcgaaatcgtgattgaggcacggtatcgtacgtaaaagccacaagatggtaacagtgtaaaggaacacgaattctgtgccgagatgttcgaacgttcctagctagctagctagctagatcacgtataggtatagctactagttatcgtcgtcactccatgttgctgtgaaaaaagagagaccttttttttataagaatcatttcgcaaaaagaaaaggaaaagaaaagaaaaaaacatctatatcggaatctgattctatatatagcgctgtactatacgaaaatgatgacgtttcaagattttctcttggaatacctgcttcttagtcttatt

SEQ ID NO: 729 - DNA, 727 bp, Zea mays
aatcagaggcatcatcagcatatacaggagctgactttttaggcaagaactcttcatcaggatagatacttgcaaataactgtaaatgaaaataagaaaacaaatttatcaggatagatctaatggagtaaacgaagcattattatccattctaaggctgtcacaacagagcatactcttgatttatattacgaagaaaattgttataaccatttgatactgacagaagtacagatcaaccagagttgtgtacctaatttctcatgcaggtacatgtctgcatcatacaagaaacagaaaaggtgtcacagtatgtaccttttttgttgatcccagtacgtttctgtagtccaggtattcatcaggcatggggcatgacaataaagaaccagatgttccctgatagtgtaagacaggacatcaaatgctttaaatataaaaacaaacacacatatatataacctgaaaggccaatgtgtttctagtattgaaaccaacatgaatacagtccatattgatatttgataacaaatagaaatgcacctgtgtgatctcctgaacatacaaacagctccagattagtgttggcttcacatgctcagtgctttcattggtggtttcaaaatggccttctgaaccatctgaagcctgaggactgaaaagaaggtctattgctttttttatggaatgctttccggctgagacatcggtacagggagtagacaga

SEQ ID NO: 730 - DNA, 784 bp, Zea mays
ctgcaggagctccacagcaagggtctagccatactgtccctgagtcatgcactattgcacctgaaagcaggtcatctggagcaggaacttgtgctccaatttcttatcccaccagcagcggggaaaaactttcagatataagtagctcctcaccaagaagcatgacaaaggtctggtagtcatttgtacgctcctttcaactgtgccctttgggcttcatctacttctctttgtctctcataccgtcttctatttgccttacgctgccaaattaacttttgaacatgaaagcaggcaactttagtgacaaactatactgtttgtggatttgcagagtccatcagtcacatgcaggaagcctctccaatctgacaatacttctcacagtcaagaagaggactcatattctgtcacttcttcgtatcctttttttcttttcaaatattgatcatattaattttccagtggatcttattgttctgtctgtttagtgtctccttcttctttaatattttatgcatatgaactccataacattttgcatggaacccttttctattcctaaataactgtctgctagtaaaaagatcgcttcatttgtatcccccaattttcattgtatccctcaatttcctgagctgtgtacagaactgtaacttcagcgagagctggaaaaactaagaagacaactgttgctgttgcacctacatttgtctgtgataatcgtgctgagaagagaggagaggtacacatgtatttttgggtgcaatatcatattacctgt

SEQ ID NO: 731 - DNA, 692 bp, Zea mays
gcaggccggagccgcagccgccgccggaggaggaggagcacgcgtcgcccacctgcgccgccgctgccgggtgcgcaaacggcaacaagagcagggcggcccagaagagcggcagccgtggcaggagacgggcaggcgccattgattgattgggatggacggcaacggcgagggccgaggaggacgagcaggaggaagcggcgaagcgctctcgtggtggtttggtgaggactgaggaggacagaggactcggcctacaaccttttttttattgcaacagcacagctacaccattcttatgagatgtaatttaataaagagatataagagagttctatgaaaaataaaagagagtagaataaaactttagatacactatttactaacagttattaacatggcggccgcataaaactatccgttgattgaccttactaatcaagggctaatttgggaaccatatttttattttctttttcccaggagagatttaaaacaaaaggaaggcgaaaaaactcgctgatttaaaacaaaaggaaggagagatttaacatggcggccgcataaaactagccggaggcggaaggacagcacggcacgtcgcatgttttgttttccgtctgcacgggtgccagccaaagccatcttttgtcatcagtgacccaacaacaacgttgttggggaggttgggt

SEQ ID NO: 732 - DNA, 590 bp, Zea mays
tgggatgcataagtatacaggttgcatgcagtgatacatatatacctattgattgatgtgtgtagactgtagggtacgtggacgtgcacctcgattgagctagcttcagttgaacttgatggggtagacgcgctgcatgttagggtagaagagcccccagttctgctccacgccgctctgcttgaggttctcgttgaacatggagaagaggatggtctcgatggcgcccgggtggcgcggcgttccccggccgacgtggttgatcaggttctggttgtagatggccgcattctcgggtgacgccgcgacgccgccagcggacggccacccgctctccgacaccacaagggtgacgccggagcccccgtggttggccatcgccacgtagaaggagtcgacggtggcgtcgaagaggttctggtactcgtaggcgccgtcctggaggacggtgcccggagcggtgaagagcgcgtagctgaggtccatggcagccgggttggtggcgtaggtgaagtaggggtagacgctggtcatgagaggcgcgctggacttcgctaggagcctgaagacggggcccatgaactcctgcg

SEQ ID NO: 733 - DNA, 658 bp, Zea mays
aaaaacagttgacttgctgtctgcagcatgcaccaaattaaatggagcataactttccactcccaaggttgtttagtgcaaataactacttgttggaaagctctcttcgtctactttcatgtgcatcaagaatcaatgacagaaaccaaacgaggcgtccagaaactgccgagagagtttcgttctccattagaactcctttctattcctctatttaagcaactagcagccaccaaagaacttgggtttttgtttgatgtaagtttagcctttgctacttccttgtaaacgcgtgtgtcagctagaccacccggatacttgaaacagaaccccaactctatcagatccgtgagcgtctgcgttttatcttgttcttgcttgttctcgattgcttgcaggttcaaggctgttcttggcacggcaagagcagcaacaataggatctggtgtaactatcgctaaggcgcaacacccttgtggttgttgtagtcggatagcacaacgtcgacctccaccccaaatcgtagttatcaggagacggtgtacctgtcgctcaaggcgccaaaccatctttgttgtggtagtcgggcagccaacgtcgttcttcaacaaattttccacctccatcatctctcatcgaaagatcgggcacccttcta

SEQ ID NO: 734 - DNA, 471 bp, Zea mays
aaccaggtcggtcgtaaggctgtgttcctgcgatgctacgccttctgcatgagtgcatggtgagataggatcggcttctcttgatgtgtttattttcaaggtacatctgcaagttttcagaggatagggcgagtggtgtttgatgaaatgctcaatagagctgctgcattgtaggtgagatttggtttaaatatggagtgcctatggcttaattgatacttctttggcttttatttaggtggatcgacatgttttagtggctcagaagtcttagttacttccatgtgcaagtggagtgtttattaaaatctggtttcctgtgattttacctaaaagactgaacagaacttgattgcgggactaacgagtaataagagttgttccaacttgcagaaatccaatttattatgggttctttatagtgctttgtgctcatgtactttaagctaacagacatggtttgacatttgg

SEQ ID NO: 735 - DNA, 750 bp, Zea mays
atattgactaggttagggcttccctcaggctggttgttctccaggttcttcctcccgctcacgatctccagcacgaccacgccgaagctgtaaatatcggccttctcggtgatcgtcgacgacagccactccggtgcgaggtaccccctcgtccctctgatcttggtcatcacgtggctctgatccctgtcgatgagcttcgccaagccgaagtccgagatcttcgcgtcgaacctgtcgtcgaggaggatgttccccggcttgatgtcgagatgggcaatcttctggcggcattcctcgtggaggtaggccagacccttggcgatgtctaggatgatcttgtaccgagctgcccagctgagcgagccgctctggttcttcctgaagatccatctgtccagagacccgttgctcatgtgctcgtagacaaggagcctgtggaacttgtccgagcagtacccgatgagcctgacgagattgatgtgatggatgctaccgatggtgacgacttcggccatgaactctttcttcccgtgcccaatgtcgcgcaggcatttgacggcgatcttggcgttatcgagctttccctcgtacaccgggcccgaacccgccttgccccagctatctgctgaagttgtcggtcgcttttcgcagctgtctgtacgaaaaccgtgtatgcgttccagacactcctttgaacggatcgggcgcctcttgcaggcctaggctctacactactgtgcttcagac

SEQ ID NO: 736 - DNA, 805 bp, Zea mays
cttgcagtggcaggcatgatagggtgcctgacaagtggacccaccttactcacaaggacagtactattgtgcctcaccaaatatgctagtattaggcgggggctcatcgaacgaaccaaccgttcgttattattattattattattggtgttattaatctattcctccattatccgtggagctccatggattacagcgagactatgcacttgtttagaccgtataattggaccagtacaccaatacacgtaccgtgtgtgactactagatgtatgcatgatcaaacatatcaggccatcagggagtgagcctgtgtctgtccagctccagtaggtgtggaagcttgcggccgattaggtttcagctgaagcttaacgaataacgacggcacgcatcatatgggcaaagccaaggcgtgaacagtggacgtggttcctttccttggcgatccaggatgtctcgcacccaccactgatcggtgaccgatgcagcagcagcagcactgggctgggcttggctgcgcagggcaggttcttgaggtgacgttttccaccagggcttgtacatagtagtacatacatggggaaaagccggaagcttcagcgggcagcggacatgtcaggttgccgctgccgagctctggtcagctcaaatcaggaaaaagggtcctgatgaccggtcgctcgctcgctcaccgcatgccgcagcagtgaaaaattaacctcgaggtttaaccagtacccgtactgcatgctactagtacgacgatagttgcggcgactgctgttcatctggggttttttcc

SEQ ID NO: 737 - DNA, 762 bp, Zea mays
  unsure (1)..(762): unsure at all n locations
ttcatcagttaacttcttgaggtcagcctgcgccttcaagagctcggactccaacgtagatattcgctcagaggaatgattatattgcgtaagcgatgtgtctttatcagcacttaattgcaatactgttgccttgagcatttgcatctcattttcagctttgtttgcccgctcggattctgacagcatctgctgtttcagattctggctctcggataatagtcttgcaacttcttgctgcaaatttgccatctcattgctgataccatctttccctttaacttctgggctttcaaaggttaggcctttccgtactttcccatcaaaaccagcacgaggagcattttcactactcgatgacaaatcattgaacagctttagaccttttctacttgacaatgcacttgtttcctcagggtgtgtaccatttctcttggaggtgaaacgctgtggtgacataccaactccatccttctgaagatcatcagaatcaaatgccgcacgtgtaaaagtagacatatctggagtatgaggctccatctcttggctgaaagaagagggtgactcgtctgacattgacggcatttgatttggaaatgcttcagaaattgttctgtgagcctgacgaagtgccccagtggcctgatcgtatctatctgccagcgcacgggatgctcgatagaattcctncacaaatttcattagctctggacgtttcttggagtacatctctgctctccttgcnaaagaatcagcatcttc

SEQ ID NO: 738 - DNA, 700 bp, Zea mays
tctgtatttctgtgtactgtcgctatgtgcggggaacaggagctggttgtagttcaggtctttccaggatggaccgaggccatgtacatttcaagtcttcaaccgtgtctcaatggctccgccccctcagagctgaaaagaaaccacccagtgttctgtccttgtgcttcccctcgtgctcgtctccgacctgtaacacaagttgacgtcagcataagctcctatcctataggtgtataattaggtgttagcacatacttcctctgctattctctgaagagtttctaatatttcggaaaagtctggtctttgagcggggtcttgctgccaacatttctgaagaagctcagaaagcattgcataagtatgtttcggaattgtaggccgtaatccctgtgaacgaaacttaacacatcagagaaggactcgctgcaatcctctttcctttctctttagagcttgttcggttagggatgaattgagggagatttaatcccttcctattttgaataggaaggattaaatccctttcaatcccctccattccccatgcaaacgaacatggccttacagtgcagaggtgagcaagttctaagtatgtggcaaagaaaccctggttcgagaatctactatcaaggctagtttggcaacactattttcccatggggatttccaatttccaagggaaaatgaacttatt

SEQ ID NO: 739 - DNA, 826 bp, Zea mays
aaagtcaggtttgagatttacttacatgaaactcacttaagttccgtttgggtttctaggaaaccgtcggctgaaacagttactggctcaattgctttgtctaatttatataagttttaattagttggaacaaaacctggatggattctgggcaaacgaacaagcctgctactagttcaggtggaaattatagttatagacttgcaatcagaatctggatcagtacgtaactgctatttcattaactcttaaatacgttaattagtacatatggccaggtgccaagtgctagctttgaatattgcacatccaggcaccctacgctactgctgtgtttagcgaactcccttcttgcatttgcagccttgcaggtaaaaaccagacaactcagtgctgcttgcctccctgctgcaaagcgaccaagccaaagtaggttccagagcgaccgctggccattagagacgtatgcgtgcccttctccaccaccactcccctatcaagcacagctatggtatcgcagccctggatggtgctgagcctgtgcgccacgaccacgctggtccgggcaaccattaccctgtgcagcgccttctgcaccgccttttcggactggctgtccagcgcacttgtagcttcgttccaacagcaaggaagggccgggttctttgaggaatggccccggcccaatggcaaacccgcttgcttttttgcccctccccgacaggttgggaacccccccgggtttttcacaaccccacgtgtttgtacccccggtccctttgggggttggcttgaaaataaaagcccgtgcccgcccttggggcgg

SEQ ID NO: 740 - DNA, 784 bp, Zea mays
aatacctcctctgacacaacattcaaatgatatactcacataatgattaacctggaacaaggactggtagaacatatagcttcgacattttttccaccacggacgaaccgaatttctatacttgaaagcaatgaaattacaatagtttgtaacagcaaaataaaaccgtaccaaacctaagatgaggccatgctaaaatgaacacggaggattcaccaaacatacatgcgtcaacatgagattgctattttaagtacctgacatcttgtcatagctagatagaacagaatagaccagacaacaaagtaaactatagctacagaggacatgttgcagcataagaaaagaatgaaattcttattgccagtattaggttggtttactagaaaatgtatatgtgtatatctggagaatagcgacattccaccaggacacaagctcgaaagttgcaattatgtggacttttgagttttgaccagatacttctgctaatagaaaatatgtcataacaaaagttgattaaatttcaaaatatagtttcataattatgctaacaatcaaacagctactgtgacagcaaaagaatactgccacaaaaaatccccaaacaaaagcaaaaaaactggaacaaccaaacattgaggtagcaaactagtaatcgattatcacatatacagtgcatgatataatcacctagcattacaaataccacagaatgacagtagaaatcattaaataaaaaacaacacgcaatcaattgtgtggaaataagtgaagccaaact

SEQ ID NO: 741 - DNA, 756 bp, Zea mays
gcattttaaggattggtttgttggggttatattggaaaatcaaatgcagttttcagttcctggtcataattatttgcatccattgcattaataaggttatagaaaagggtagagattacaaaactaccagcaatgtttaatatatttcccacactgttattcatccttcagctcttgaagtttacaaaacattttcttttgaaaaatgaagttccaaacagatcactgatttttatcaatgttttttttttgcaggcacacggtgatgacaaagaaaatataccgaatggtaatgcaaatttgcaagtgaaggaagccgacaatgatgaagacgatggaacaagatctgatgggtttgagctgatagatgtgaagcaaaacttcgattcagcaaaagtggaggaagagatggccgctccaagaagtactacagtcgatacatctcctgttacagaagaaagtgaaacacaagaagacaaaacaacagcacatgaagaacaatcagttgcaacaaacacaagacatctagagtcctcaatgttgaaccaacaaacagaacaattggaaaagctgacaatgcgtattgaggagcttgaatctgaaaatgacaaactggtaaaggacttaacagaagcagaaaataagcagagcctgcactacagttgtctacaagaagctcaatgctctcttgcaatgaaagataaggagctggctgaagtaacaaagtcgctgaaagatctgggttctgagcttgga

SEQ ID NO: 742 - DNA, 757 bp, Zea mays
aggtacttggtctttttctgattcttgcttctctttctccctcgaattctttctcttctataatacatactgcgcagctgttcttcttctccatcttttctttcttactaaatctgatatgatactttcaccgtcatccgtccattctcaccgtgcaatctcaactttacacttcttgacagaaaactcctctgctaaaaattcaacgaagcatctcctctcctctcctttccgctgttcttgctatatatcgatcgcgattccattactacgatacataataataacaaaaagaaagaacctttccgcgtgtttggttgctgctcctgagcaggcaggtgcttctcccctcgcgagtatgtgggtgtccacaccacacgcctatcctccttttttttccgcttcttctctgttttcttccctcttaatatatccatcaaatcactgtgttagcgtgttatgttcttgcacccccactgttcacatgccctgctttccccccgatccgtgtaccctgttgtggggcctgcggatttatcgtattcccgcgtcctatctctttttcttgttggaacagagctgccagtcatagcagatagtagatagagaacaagcatagattaagtgacacaccgcttgctccatctggggtcaaacagaggcttttgtgtggtgcaagcaagatcctggacaggagacgtcattgtttactgtttttttcctccattgacagttgcataaaggttggcagcaattt

SEQ ID NO: 743 - DNA, 733 bp, Zea mays
tctgctgtctctccttgaagctagctgccagactcaagggcgcatagcggtttgtggtacatgcagcccattctgaacttgtttcctgcggtgctacgggcagatgggggacttgctgtctacaccggcttactcatcttatcccctatatcttattctattatattctctatttcaagctacaatgaattgttttacacgaccatatatatgatatgctgatggagtgcagaatcttttttttccaaaatttgtttgtacgtgcttcggacttcggtatattttttctctctctctagagcacgcgtaaggtgaccatcttagctggtgcatgtgcctattctcatctgtttgggtcaggagacctgcaaattgttttggatttactgaggctagatcagatccttttatgacaattattaattctggtaaatctggctgtatgaatgcgttcttccatattttgtaacgtactttgggcttatatgtgcaaggccctcgtccttgtatattaataatttccgcagataattttacttatggtaaatgcctagctgtgttgttcaattattaccgtctccacatgcatgacaaaattacattcaaggaatgaataaataatgtacaatttgcagagatagaaggtaggtttatcatttctagcctttcttcgaaaccgcagttgacatcagaatgtactcgattattcctactgtgggggcccctttgccct

SEQ ID NO: 744 - DNA, 729 bp, Zea mays
aaagttaagttgccgccggcaggttacgaagcagcaaaccaagcggggggaaaaaacagagatagaggaaaaattgcagcttcccctcgcaggagaatggcctcacctgcgcagcggagagcctgggcgccgggtggagcctggtggcccacatgaggaagatgagcagggagccgaacgcgagctggaaggcggtgatggtgtacggcagcggcaacggcagcgcgccgagaacctgcaacgggggacgacggttggtgttgatcgtcaggggggagaagagtggaggggatctgaggatcccttgagatgctgcggtgaacggccgccggccagacctgcttgttgtagatgttgaagtagatgttgagcaggtaccacgcgacgatcatggcgcccagctgcgccgtggccgcaatgccaccgccgtctgtcgtcaccgcggcggcactcgcgtcgtccgccggcaccgatgccgccgccgccgcggccttggcgacctccccattctttccgctgccggacagcagcggcagaggcctgagccgcccgcccccgcgggcgcggaggagcggggcggcggtggccgccgcggggcccgaagtggttgtagtagttagcggaggaggaggcgcccacgccgacttggcgcgaggcgaggaccgtcgcgcggtccgcgcgttgccccgagccccaagaaggctccggaagaccagaggtccccccccg

SEQ ID NO: 745 - DNA, 784 bp, Zea mays
  unsure (1)..(784): unsure at all n locations
acccgcgatacctctagagccgacctgcagcttcagaacttctgaaatctcagacagctccttgcattgcgagtctagtttatccaccatatcctccagcatcatcgccctgttctcggcatgccgcaatttggtttctaaggatttgtgatccgtcagaagggatttctgtgcctcgttaagagcaaattgattcttggccaggagtttccaatcgtgcgaagctcttgtcaggataaaacactgaatctctgcctccatcttctccaagagcagttggtctgcatcagactgtaaagacagcagatcatcgttacatgctatggtatcatgtggttgtacttggctgagtgcatctagttcaagtatttttgaatctcgctccttgatgagcatggtggcttcttccagcttccactcgagcatctttatcttctcatttagttcttctacaggtgagctgctccattctatttcactttggtgaattgtggaatcttcatcagtttctttcctgatttccacaaacttttggatctctgcaatatatatacaaggaagcagtcaatggaaaacacttgactgggccaaaagaagattttcttaggacaaaaaacatgttttgtaggaaaagctaaataaagtttaagaagatcatganaattatagaggtgttatgaccgtgaagcagatgttaactagcacaccgaaatttatggtagaaacatagtatttctcagaggaagcaaaataagcatggaaaaaatgctaactgaatacaaca

SEQ ID NO: 746 - DNA, 536 bp, Zea mays
tcggctcccgtttgacctctagactcgacctgcaggcgggcacatcaacccggcggtgaccttcgggctgttcctggcgaggaagttgtccctcaccagggcggtgttttacatcatcatgcagtgcctgggcgccatctgcggcgcgggcgtcgtcaaggggttccagcaggggctgtacatgggcaacggcggcggcgccaacgtcgtcgcgcccggctacaccaagggcgacggcctcggcgccgagatcgtcggcaccttcatcctcgtctacaccgtcttctccgccaccgacgccaagaggaacgccagggactcccatgtgccggtgagtacagtatcagcctagcttgccttcctgcttattcgtctcgtccgtccgtgcaagctcgacttatcgatggtttctttgtggacgaatgaacagatcctcgcccctcttccaatcgggtttgccgtgttcctcgtccacctggccaccatccctatcaccggcaccggcatcaaccccgcgcggagccttggcgccgccg

SEQ ID NO: 747 - DNA, 484 bp, Zea mays
aagctgtagatcaagacaaaacgaccagcaaaaaggtacatgtgtgaaatatatttgagctattgatctacctgttaaactattttgtagtacagatatcccacatcttctgaatgatcattgttcattttttatgtatgtgcctgcggtttcttgagctttattcaattgtttatatgcacttggaagcaaatgaacaagaaaagaattcaacatgcaaacttgaaattcaaactagtgtaaaatgaaacataagggtccgtttggatgtagatactggagatgttagaattgaattagatccaataccaaatctgcctagtattggaaatgagttgcaatataatttggtggtttgtatgtaactggaactgcaattccagccaatacagttatacagatggtctacgctctgaattgtgggaggcagtttctagttatagtccaaaatccaaatataaggcagtttattgaaggaaaacta

SEQ ID NO: 748 - DNA, 739 bp, Zea mays
agctcggacggaggaagctccagtcgacagcaaagactactggggcgcgcactcacttccacggccactgggtctcggactcaccgtgaagccacggcaatctgatggacatggactaggttaacatctcctgagcctgaaacgtgacagctgacatgggtcagagtgaaaagaaaattagtttaggcattaggggacacgacgcagaacggggtggctcgaggccaagcgggcggcggacccgagcggataaggacgagctcggccctcaactgtcgctgctgtggcgcatgacacaaacacaaagcatggtttcctgttggtaatttaccaccactagcgctagcctacaactggtatgttttttgtttttgtttttttttgcattggatcgtagaattataaactttataatatgccataaaagctgaaggttgcagtattagtttaaattattctatttgttaatttaaaacgttgtcgcaggctcgcagctgctgttgctgtctgctttcccctcccccggtctacaaagacctcggctttcctttcctacatgctcttcttccttccaaagccttcgcattttcctctcgtcttccccttccccttactccaaattaccccctgctatctacatatcctgtccacactttccttccctgcgctgggccttggagttttttggttgtgtatcgggggaaatgggaaatcgacgacgaaattgccgatcaatagt

SEQ ID NO: 749 - DNA, 735 bp, Zea mays
aatcgccatttttaccgataagattctttacacagtttcagcatctggcggtaaagttattagccattttcatacctgcaatctgaaatggccttaatgtagctgtgtatttgttgctaccacaacattgactgtgcctagattttattccctgtgtatttaagtgtcttatttggcacacttttgatatttgactactgtagtatctttgctaccatgcatgccagttctggaacttgaaacttcatcatggtaacagtttattttgcaatattttggcatttcaatttttttggagagtcaaagcatctcaagtttgaccaaaactctagagagagttacaaattattttgacatcaaatagatacactatgaaatatgaatatataattattaattaacgaagaatctaatgatacttatttgtgtcataaatgtttttatataaatttggtcaaactttagatgatttgtctctctgaaaaaactggaataactcataatttgggacggagggagtacttgtacttcacagcttacggtttcctgcatgcttgattgcacatacagtcagttgaatctgtaaaaaaatctgtgcgattctattgttatcgaagttatttttatgtgagattttctaccaggtcttagtatcataagtgccacttccttgcagataaaacacacacatctctacgacagcatatgcaatgtgcaatcctatgttgcaatcgt

SEQ ID NO: 750 - DNA, 817 bp, Zea mays
gccgcacgccggacgggggcttgagcccctgcgcggagatgagggccacctccagaagccgctcgccctcagggagccccagcccggcctcctcgtccggcgcctccatcgccggcgagcgacggagctaggatttctcgatcgggtgcgggaggacgagacgacggagggcttgggcgggcgggcgggtggtcggatttggggtctcacggttacggggatttgaacggacggcctgatgcaagccgtggctgctggatcggaaggttatgaacgagtcccgccaggggccaacgttcgaactttgatgaaatgatgaagcggtgatggctgccagcctgccagctgcgtccgccgaattctgagcttcggccgtgctcggcccgacccaatgaggaggaacctaacaaaacggcccgctttggagaaccttccaatgcggttgggccattgctccggtttcccttgattcagcccatataaggatatagccaggctaagaacaattccaacagtaacaaaaaaaaaaacaaaggtcccaaaacatagtaactggaatctatttaaaagtatgaaatctaaaaaattaaggagtaactctaacaagtcccaataattttccaaaaaatgtttaataaaaaaaccaatgattattaaataaccaggatactacactggtatattttgaaattcaatatactgcaccgggcttgtcaatttttctaaacaagccaaggcaaggcttgctgtccagcggaacggagtagtgctcgccctccccatgccgggggctgaacgagtccatgaaagcaaatca

SEQ ID NO: 751 - DNA, 744 bp, Zea mays
agggtctgcccccttataagtcagatgttttcccgtgctttgagcctcctaagccccacacgacgacccgtcccctataggccagtctatctcatgcacaacgagtggccttttttaatcacggtctaaaattcgctcccactgggagacgaacctagaacacgaggagggctactagagccagttaaccaactcagctagaggcccgttcgcctaggggacaaatagcactccatatatttaggcattctgtcattttttccatcttaaagttttatttattaaaccagcaatgttcacatcattctggcaaaaaagacaaaatgtgtaccccgattttattgtgtaactttcttgttttttttcgatgcatccaaatgaatttttgtttctcggccagaatttaatcaaacaattctcgtagttaatatcttgttcatttgataataggcattctttgctgttcttcaaagctgggtgtcaagaaaatttatgactggatggtatgcttcacaagttcacaatgactaattcagacactttgcaatggctacaactacaatatattgatgctaatatcttcttttgtctccctactttttctttgcagtgtagttcttttgccaattgctgtcacattcttcatcacttggtggtttatccaatttgttgatggttttttcagcccactctatgcaaaactggggtttgacatatttggtaattgtttatcttttattgggg

SEQ ID NO: 752 - DNA, 766 bp, Zea mays
ggctagctagctagctcatccatgatttacgtctacctgtagactcatgtgcttatataaaatcatacgacgaaactgtacgtacggcgtagagtggtgtggcgaggtccaatgattcagattgtacgtacgtgtccatcgatccaactgtagttgtgtacgcagtacagtacgtgctagctacggatcagttgcttatatatagcttgtgcgtttttttacactttcttttgtccttttggtttataatttttattaagatatacaaatatttctcttcagattcggatcgaatacaaatattaaaaatggttcgttctttttcattatttcttcttcgtttccatacgattcatcttcccgtcacttcctcctccgtatcctctcattcagtcattcgcccacgcccgcccataaatccctccatgtttttttctttttgattagagaaagaagaaggaaccagacctacgaatttcatactcaaattggatgtgggtctagaactctagatatgaaactccacatgaacccaaggaacatacaatctgggctacatttgttcatgtcgggactttatgggcctcaagttgcgccagcagtctacaagcccagcgggctactgaacaccgtcggtagagtgggctgtgtacatctacaagtcatgacccgttcgaagcaagcctcgtgcttccctgcacgagatatctgggcctgggctgatcggtgcgcgtctgttccatgaacggcgaacatagtctgtgct

SEQ ID NO: 753 - DNA, 587 bp, Zea mays
aaacttgatccggtttacctggtagtccctgtcagactccgcccagcaatcatctgaaagaagatatatggataataagccttcaagataagcactaggctatgaactactgcggcgtcacacacacgaaataaggttggtgagttcacacacagtccgcacctatgttaacatactcgtagcccagcttcgccagaccggtgttgaccagcgcatcagctgaagggaaaagaaaaggccgtcagagcagaactgagcaaaccaaatatgcatgcaatcaataacgatggcgagtctgtgaacgaacgaacactaattgctgactggagaaggtttacgctaaggtaccatctccttggcattattgtgatacaacggcacggtcacggggcatgtcagcatgtgccctgcttcaaccaccaactacatggagctggtgtagggggacaaacagtccaaggggaggggagcaggtgtgcatgatctgcatctgcgcctgtcgcgttaggagctggctagtctcaggcactcaggctcttgactggcccagctcctgttgtcggctcagacgtctctctctctctctc

SEQ ID NO: 754 - DNA, 758 bp, Zea mays
ttatatgggaaaagccaacatacctcttgtgaaattcatcttcaaattctgtgccccagattgattgtccaccagtaccatcccccaaaggatctccagtctgaatcatgaatcctttaatcacacgatgaaatataagattgtcataataaccattccgacaatgggtagtgaagttttcaacagtttttggacactcttctggatatagtctcaagtgaatgtcacccatagaagtatgtagcacctgaaatacgatgatggatttgttaagaaatttgagcccctcacaagttaaatcaccagagattttgaagaaacaactcagctgtctaagttatattcaaggactaacataccaaattatcaggcaatgatgttgtagcagtttttcctaggtctgatgcagacaaaagctcttctggcggtggtttttcattgaaaacatctctacccttagttgcatcttcaggctcttctggttccctacgactgttaaaacaaaagaataaccttgttacataagaaataagatacatgatatgttctttgaagatgaattcaccatgcaaaatcatatagcagccaataaaagattatcaagatatgatttgacagcatacctaaagagatatatccgatgcttcttgaaagcacaacacagcagcgttgggtctgataaaggttccttgctatcattgacattggcagcttactgagggatttttctaaccttcttggtgcctttgtcttcctgg

SEQ ID NO: 755 - DNA, 691 bp, Zea mays
tagctgtcccatgcgaagtttctctgaacgattaccagaagaaaacatgcattttgttgcatcaagtgaatagcagatgccattttcataatgggcaacccatccattatcacccagaagaagttccagtgtactatctcttgtgccatttggcatgattttaccctgccaaaaaagacaggttgttgaatgaatcatattgaaaagggcatccccaacagaaataaatgcctggtagggtaactaaatgcatgtcacaagtgttttcaagtcatctgactaattagtcggactaatcggtaacttgaacccaactagacccaccgaagcgactagctggaccagaatcctgggcgtccgattagtcgacaattaatcacgattagtcgtccgatttggtgtggagcgaccagattagacatgtatttttagataggcttttggagctgttgttgtggacatgtgggctgccatttggtgctgcatctatgggcagcaattgtgaccttgtagggttggctagccaccagccgcacaagccttccgtggccccgtgctgccgcagtgcccccctgccgccgcacaagttcacagtcctgcccccgccggtaggtcgcccgcaagggcacaaaatccaggtgaatgcccaccctgccacagtgccaccccccggccgcaagatccagctcca

SEQ ID NO: 756 - DNA, 855 bp, Zea mays
ccccggggaatgatacatcattgccggttcgccgggacccggtgatgctgtacagtcgacctgcagcgcctcgcgcagtagcactagcagtagcaggacgagcaccagaaatatgacagtactcagttgcgacatgccaaattaacatgacttccagctgagactgagagaggccctgaagtgcccaagaaaacctgtggtcctgccattgcgatgtttctccgacgtcgttggtcgggttgccgctatacattgatatgagcgatctagcaacagctatcttcactgcatcagaaacctccactggatcttgctgtctctgcccgagaatcactgagtgctgcttcatcctgtttctcatcagctgtccagaaaacgtgacccttctaaggaaagcgatgactgttccaaagatggatgggctgatttcgtaccagtatctcttgacatacatggtggctagtgatacctgggcccagtccgatgccagataaaatgccgcatgcaccagctccactacgagggctatacccagaagcagcagagtgatgatgtagtcagctcttgagatgcgtacttgtatgatcggatttggcgtctcaagtagcagtgaattcctgacggcaaacacccctactgttaagattagagtgatctttgctaaagccagagactggaggaacggcaccggtagcagattagtgattacgaaggtgtagtagtactttgtgaagaagaaatcgtagcagaagcccagctctgcctcaacaatcctgaacgctctttcgaaatcccgttcagagggcagcagtttcttgaatacaaagtcatggtctcttggtacagagctggccc

SEQ ID NO: 757 - DNA, 805 bp, Zea mays
gcagaaattgaatgctaaacacagctccatcataccaaaggttatggaaactatattatataaaagttaccagtacacaagtacacaactggatgctagactgctagtagttagatagttagattgtcaagttgtcaattattggtgaacaatcagtttaatctgaaatttaatttaaaattcaagaacttcatacacaaaacaacatatatactctgcatcgatcaactgaaaatcactaaaaacaacagcacaggttagtacaactatatggggacaaatacttcactgagaagatgcacaaataaaggaaaagtgtggttaccaagcttctgcgttttagtacaaatgaactgtggtggagtaatgtaaccagaaaaggctgcaaaattccgagcagtttggcttctaattgccacacattttggccatacgcagcctataagctgtgccaaataggcccaacatgtctccactagtatctacacagccccaaataacagaattgtattttttttgtttcccaggatcaataatatcgctgttaacaatggttctgtaaaacagatcatgaaaacagattctctaatacaaacatttaagcagtattaggctattagcacgagtttaatcacattggcataaaagatggaatcaaagatgttttcttaaggggggtgaatcgaatctgcaactcctgtgtaatatgacctcgaaaaataacaatctgcaacattagtataacaaggtacttacacaatcaactctggccacatctatctacaaatgctagtcatcccaataa

SEQ ID NO: 758 - DNA, 749 bp, Zea mays
tcggctcccggttttcctctagagccgacctgcagcggatgcgaagggatcggccgcagcagcagctgccgtcggttggtcggggaaccggaactcgctgccaaacccgcgggactgctggagtgtctgggcgaaggcctggtacttgcggatgtcggcgtcactcacgctgcgacgggcgtacttcatggactcctcgaagtgagcagccttgatctcagcgatgtcgtctacctcgtcttcctccatagcctcggggttgtctttgctgcgcctctccctctcgatatcctgaaatcaaatgtcccgttagcaaacaggtatactactctacgaaaccaaatgctgcaaaaaaccgattatgggccaagagattactacaccttctcgatgttctccctgatggcatacttgcacgcgcgctggcagatctctgtgatatctgcaccgctgaaaccctgggtgtatttggcgagagcattcaagtcaacatccttggccacaggagacttcctgagacaggctttgaagatctgaagcctggactgctcatcgggcagaggaatatagataagctgatcaagacgcccaggcctcagcaaggctgggtcaatgatgtccggtctgttagttgcaccgataataaaaaccgtcttcttggcattcatgccatccatctcaataagcagctgggttaacaccctatcagcagcaccaccggcgtcaccaacactgcttcctctctgaaa

SEQ ID NO: 759 - DNA, 789 bp, Zea mays
gactcctgactccggatgcatgctcgtgtttggtagtgccggctgttagtgttagctggggcgtttttccctgcttctttggaagttactaaaggagagcgggcattgaattgctgcgagttggagctaagtggccgtggatttaagcgggggcagtgacaagcgtattagccctctacgtgtttctgtccgagcgcgaactagaggcttgctgtctctgaatcaatcgtccagaggcaaattaggaaagtttgcatcacatagaaaaaagagaacatttctaacttcccactgtatggccatcgatgtgtgctgcatttggtctgctgtgtgttctttgtgatcatataatggtttgtttgctgaagcgcttctggttatacttttgtcttgttaactttatttttatggctgttcctgttccagggttggaaatctgtttgaccactcagtgagtggcttcatgttaaatccatttctggtttcaagatgcttcatcaatgacatctggaaactgtaatagtatgtgctgatcttctatgcttcatcacctgatcatcaatgggctctttcctgaggaaacagcccagctacctcttcattttaataattctgcaccttgttgctcatgaggcaagaacactgaattcagatggtatgtgatggttatggctgctatttggggcacattttgtcccctcctataccaaatgctaatacttgggtggtatttctacaaggcgaaagcaacttctttggttttcaaaaagagggcggtttccaaaattt

SEQ ID NO: 760 - DNA, 761 bp, Zea mays
tttgatggtgattgaagtgcatctttgcacaccgagtttatctgcttcccacataaaccaaggttcccaacaaagctacattaccaaaatcaaattcagatggaatctaaggaacgggaaagtagtgttattgccactcaatgaaaaatggagaggtaaattagataagcttatgaatcaatatatctgtatccacaagatcaaacacaaatacataggtgtgataatgaataagatagatatgccataaataaaacagggtaagatcactcacgatgtctcattgaaattgacaagtgaaccagaagatggtattgctcctgtcaggaagttcatggaaacattgctgcacaaggttgcaggtaaatgatttttatctgagccaccaacttttcataacaattagatggatctacccaaataatgaacacttacaatgatgtaagtttggacaacttatcaagagaatgcggaacagatccactcaatgtattactggataagtccctggaagagaaaaaaggatcgagatagaacaatcaatctatatttttttatcatggataacacaaacagtaacactgtgaacttattttctaagttgggcttttaggataccactatagtaaattagtaaacatctctggaaacttgagtcagtctaattgaagagatctatctgataaacaacactgatatattgaaaaaaatgatcaacaatttattgaaaatagaaattttcttctgaaatctgaacttac

SEQ ID NO: 761 - DNA, 779 bp, Zea mays
agcacagagctcggtagaaaatgtggagcgagttacagtccagatcagtcgcagttcaataatctagcctgctcttgctacctcctgccacacagtgatcaagaagtgttggagaaattaaataaagagagcaagacaagtaggcaacactactcccataacttccgttctcttgttaggcctgtttggtagagcgctagagctcctcctgcactcctggatctgtgaggactgagaagtgattctctaagagaagcgattatgttggtgaaattctatgcaaaaggattctgcttgtggagcgaatcaagagaagctacaattttcagctcccagcctcctagttcatttcagatgatcacttcatggaatcagcattgaatcaggtctctgtaaaaaaaaccctgcttggcagagctcctccttgattcagcctagaagctgttctcggaggtctgccaaacaggcccttacattgctgctacactacacataataccaagggcatgtatttcattgatgaaatcaccccaacttgccttacatctgccagtaagcagtcagctagttgaggttcagctcctatacaaagagctaataggacggtggaggatacccttactaatacttcctaggtattggatattcagggtgccatcactgttcgggtcctcatggattttcataccctatgggatattctcaatttggtggagctacaaccagatgtggatgattctcatatttttagattgggttctaacgtgaaattctcaacc

SEQ ID NO: 762 - DNA, 728 bp, Zea mays
tccctcacgtacttcaccgcgtccccaaggatggtcgccttgtccatctgcaagcgagcaaaagctcgatcacgatatgcaaatgttgcaccctttgttttcctcatgatcgagctcaataatatgtatgttcaatgcagatagatactgatccatgcatactgaattactgatacaaactcaacagtaattaccagtatgtgtaattattacaggttaatttgagcatgacatgcacacaaactactagaatttttcattcaaatgctctcttgtaattgcaaggctagcaaagcttagcaggctataggatctttcaaagggtgcggtgcgcggtgcaaccttttaaacactgggttatttagtttttgttgctcaatctatatttttccagcatgatttggtatgttttctaatttattctagaaactagtactaatactgtcatgtcatgtatgattgaaaggctaaccgagaatatatgctgtgcttacactttggtaagcgaaaggacctaatttgcaaagaaatttttgctgaacgatgggctgtaaacttaatgactggtcaatagttaccatgattttgttgacatgattacatgcaatcttggtgggtttatataatcgcacatggtttacccaaggtccaagggtaagaaagacccccttgatggtggctaaatacacgcatgaaattaaggattgaaaaaaaagaaagaaaaagga

SEQ ID NO: 763 - DNA, 590 bp, Zea mays
cggcgcggcggccgggaacgcatgcacgatggtgcagctagctagccggagacgagcggagaggaagggagaagcgagcccagcagagcgtcggcttaaatacaaagggctggctagcagagcagtacgacgacgtgcgcgccgccgtgatgatgatgatgattgatggttgatgatgagctgcgatcaatgcgtggtctgcttgggcttttcgtctgctgccgtttccactcggacgccgctctgccaatattagtggatggatgtgcggatgggcaggcagagaagagaagagaagaggagcacgccggggcaacggaaaaggaggagcccgaacccagtggagtcctttgccggctcgcggtagatagagaaagagaaagagaaagagaaagagaaggcaggggggattcattagtacagtagcccccccataaccataaatacacatgctctaataaataaataaaacagaaactctagctagcgctgatgatcctgccgtttcaggcttttgttttcctctccctgtccaactcagcaaacccctttgactttttacacgatgatgaacgtacttactcatcatc

SEQ ID NO: 764 - DNA, 841 bp, Zea mays
gcagcgcagttcgtgctgtggctacacagcagccatacagaaggcactgattaaagaaaccaagcatcccaatagtggatggttttagccgacagcaatagtttgctggatgagtcaatgtccttcggctgtgtttcaagctgagactgagagtggtggtgagtcgcgggggtgggttattgtaaaaatacttgaccagagaagaggggagcgtatgggataatatgaaaaaaaaacaagaaccgttggatccaaaaggatggctcggatttgatgtgcacaacaccgtaagcccatgctcaccggatatgctccgaatcagaagagaagggaacatcggcagcatggacaccaaaaggacagtacgagttttctgctcatcactcagatcactatatttgatagcatttgatttgttcgggaaacaagcaagcatacgatcattatacacaaaacaacgctgggacagtcactgtgcggcggcgatgaggcgggacgagctgagctccgtggtgctgtagaaggactcgtcggggcagtacccggcgacgccacgctcgtcctcccaccggaggacctcccggacgtagcggaaggcctcgtcaacggtgggcccgtcgcgggcgcgcgtctgccacacgaacagctttcgccccgtgctcgccgcgtacaggtccttgaacttgatggccacgtagtagaacgcctgctgcgccaacgactgtctgttgtggtgcgtccgcagcgggcagaagtcgccgaaccactctcacgacgacagcgggggacccgccgatcttcttctcgaacgcgtcgttcttgttcaacaaaagccggaacg

SEQ ID NO: 765 - DNA, 599 bp, Zea mays
caaaatgcgttcttccattagtaaattattattcagtttagtgcatctgtgcgaattacgcacaaaaacaaaaatcacaggcagtaatgtgttgtttgaattcatacctggttgatgaaaagatctctgaaaacacccgagcaattgacgacgacatcgatcctcgggcgtccaagctcctcaaggctgacaggctccacacggttgacacggccgaaggtgtcggcaactggccgaactccaatcatccacagcacctgggctagtgactcaccataggtcttgatgttatcggtgccccacaggacaagtgcgaccgtctcagggtacttgccgccattgtcagccttctgcctctccaggagacggtccacgacgatcttggcgctcttcaaggcagccgtggttgggatggcctgcggatcgagagcgtggatgttcttccctgtcgggagcaccttcgggttacggatcgggtcgccgccaggtccaggctcgacgtaacttcccttgagggcaagcttcaagcttcccagctcgttgtcttgcacgacgagcctcaggcactcccccaagaacccaaacagaaccctcatctt

SEQ ID NO: 766 - DNA, 573 bp, Zea mays
agtaaacaaaaataagattaatcttcgagagtattttagtgtgaggactgaggattgggaggcaggggtagatgggtttgacctgagcccggtcgggaggcgagccctgtgttttgttaacctgacaacactaacataatcagtaaggagtagaaagcaaactgggctagtgtttgttaaccaagtacaacagctcagcactttgggtagagaccaatatattctcctcgtgagcgcggtcgggtgtgggatgaccggtcacgtgcctccccctcccggcgccggccggtctccgctgtggcgctgtccagctccagcctctggccaccacgttccacgcctccttcgtgtgcgtgcgcccgcatcatcttgagctctggtacgggatcctatggtacttcgcctcccgccctaattattcagcgatgcaccccgcctgtctgtcacgctcctccctcgagtctttctgctttgaacttgtgatgggaaatcaaatagcagaattactagcagtagtcaggtagggtccaatccagtcgagccgacataatcatcggtgccaactatatctat

SEQ ID NO: 767 - DNA, 750 bp, Zea mays
gcgtgactatctgcgaatacacaggaaatcctgattttctagctgactgataggagagaacaaataagcttagttaaatgcatgaagacacatcaatccaccttttgtgagagaagggaagatgcattaatcattataccaaaatgctttcttatttccaacctttacaacaacaggattcagatcgaatgcaacatatggccatccttctgtgtctttgtcaattccaaatgacaatggtgcagataaaaatttagcaagcacctgcacaaacatgaaaaattatggtatgcactcaaatgacgcacgaaaagaaatatcatgcaagacatagacacctgtcccatctctccaaaaccaagaattacaacaggttcagtggcaccataattcaccatctcagcaggcttctgcaaaaagagcatcttagagttcacaagaaaaaatatgctaatgggcaatgtgaatgtattaatgattgcagttacatacttctttttcttcagatctttgatcaatcatccctggtactcttgtttcaattttattgaggaagggagtaaatgccaattgacaggcccaacaacaaattattaagccggtttaatttaaacttcaagtgggtaagggacacccgagagccttggctttgcccaaaaggaaaaaaccaccaccaaaaaatgccgaaacctttggcacttctccttgtaagaaaaaggataggcaaggcccccttaattccctataaca

SEQ ID NO: 768 - DNA, 788 bp, Zea mays
cttcatttgatagtacaaaatgatgagcttccattcttgttcctttgcatgcagaacctgaagtcaaacttcacactttggaggctgggaacattaccaccaggccttatagcatttaaaggccatgttcacccaattgatccatcatggcatctgttaggtttggggtatcaggaaaagacagatatcagtagtgttgaacaagcagcagttatacattataacgggcaaagtaaaccatggctggagattggttttaaacatcttcagccattttggacaaaatatgtgaactactcaaatgaattcttaagaaactgccatataatggagccacagttgtagattgtcgtgacaaaataaataaaaagcatatatcaagtgaaattaaattcgttattttggaagtcaacatcagagagtttatgaagggtaactggggagctcagtaacccccctccatggtcatatgcgttgatggtgaatatccaatgaacagagcatctttcccctcataggaccccttcccttttaatttattccatttgtatcatagctcatgaaattatgatattgtttaggatggttcttttgtattcgatggagcaatatatgagttgaattgatggtagtcccatcattattgtaattgattaagagtatacacagttcatgtgaaaagcatggattttgattatgcaaagcaaaccttgtatacttgttacttatttttagattctctcaagtctgatcgcccccaaagaactacccatctgtatgtgtgtgaa

SEQ ID NO: 769 - DNA, 528 bp, Zea mays
gcccgcagtagaatcactttaatgctgtaccaggcgctatatctactttaaaaaaaacatggcgcccatatagactatagttgccagtgatcaatatgatgtgttacttcttcaacagagagatttctacgtttaaggaatggcattacattagctatattatcatgtcttcatggaaacttgtattattctcttacgttaacaaatcagcacagaagtgcatagcacaatgtaactatatgtttggaaacgccctggaggcattacatctcaaatagtaatatggattcttgaatcctgcatactttttaagaggcagcaacaaaacacaatagagaatacatgtcatggcatattattttctctcccatcttatgaaactatatctcgtttcttctatagagaaagaaaagatacatatgtcacagtatggcttacaaaacaaggtaaccaaagattgtatcttgtttctcttatttggagagaagatagctatgtccccatctcatattctcacttagaatttta

SEQ ID NO: 770 - DNA, 1090 bp, Zea mays
aaacaaatcactcgctactcttgcctacaccctcacaatcatctacgaatactagtgactgctttcctctcctcagcatttttggcaagtgttgtgctggcgtgccgtgtgtggagtggaacgctatataaagcaacgtctaaaaaagaaaaaaaatactatatattagcatactagtatataaatataagagtaactccaatagttttctaaaagactctctaaattaataatttaagtaactaaactaaaagctcctctccaacggttctctaaatgaacttcataaatttagctactcctcatctaaccttattttctctctacatttagcaacaatttaccaacttcctaaacaaaaaaaaattgacagtaatttttgtatttcgctgcctttttcactttatagtaacgatatattaacatagcccatgcgtcgaacaacgacagtcagctagagattaaataattgccaatacaatagccgcacgtacacgtgtcggaaataaataaataaacaattgcaactgtaaattaaaaggtcaacacaactcaccaagttgaatatgccatcgatgatggtccccacttagaaggggtgacatgttaaaattttaacatatttaaaaaagtaatatatttaggacttggtggaccagattacgttttttttttcatataaggatttaaagtacctggctaaatctaaagaattaaggtaggcttaaatttacctaaactattggaaggtggctcaaataaggtaccctattatttttaggggggctttttcatttatttaatttaatcctttttttgcccctatcaaaccctttgtttgggctcttgggtctctcgctttttactggggttcaaaccgaatgggtttggtgttttttttgccccatccaaattttttttaaaacccaacaacctcccaaaattcgccccccccccccgggttcgcggcggtgggggttattccaatgggcgcaaaaaagcgcgtgatatatctaggggggtaatgggcactccgtttgacccacccgggggacccccccccctattttttgtggtgaacagcttcttc

SEQ ID NO: 771 - DNA, 746 bp, Zea mays
tggtcaagctttatcacatgatgctcctcagctttattggtatgtctgttgtaactttgatgtgtggataaggaaaaatctgagtgtttttttaagttcatcaatgctgttctctgaaatgactatcttctttttacaggctgacaattgtttttctggcatttgatgttttctttgtggtcttctgtattgctttggcttgtgtgattggaatcgctgtttgttgctgccttccgtgcattattggtatcttgtatgctgtaactgatcaggtatgatctgtgacgaccatggtcttctaaatacagtttcttcatttttttttctgtcaaatgcaatggttaatgccctgtttggatgatttgaacacttctgtttgctgccctttgctacattcataaacccatacccatgccacaaagatattagcgtgccctgtattgatgcaagtaattttaaccgaagctttgcctgggatcattgatgtcaccaatgctgatttgctgtgagctagtagccatcattgtgtgaacgttttcgctgtagctttatccctttacactactgcaactacttattctacttattgaccactattttttgaattatgcatgcttaagatggctgttgacatgatggaaacaaattttcttctctttgcctcttgacacaaccaatggaactctgtgttttgctgagactatctactcgttctaatttcaggaggagggagcatctgaagatga

SEQ ID NO: 772 - DNA, 750 bp, Zea mays
cgtgcctgcagacctagcaggctagcaaccattctagctccgaattcggagcaggcgagggcgaactgaccgaggcgaggacgatcactgtccatgtccatggaggcggcggttggggcggagttcggacctcagctgcatcccgctctcgggttcaggcacagccagcgccgtgtctttctttgctgttggcgcctgcatccgccccggccggcctcgcttggcctctgcggcggcgggggagcccgtccccgcggcgctatccccgtcgcggatggcgaccagcggcggcggctgcgagagctcgaggcggaggcggaggcggaagctggatcgatcttgggtcctccgaggagcagcccccgcgaggtgggccacctgctatccccggcccggccctcgctcgtcgtccctgccaatcccaggactcactcataggctcctagttgcccgtgcaggtgagggaggagatggcccggtgcttcgacctcgtccgccgcctcggtaggggcgccgtctacctcggctcctccagggtccagcccacgcacccgcactttctccaaaccaccgagctcgccagagaggcaatcagtactactattagcaatctactagcattgacatgttgctagtttcagcagcagattcttgactgaagtgttagagaacgccgtaaacaaaatctattcagacatgagccaatacattgaattcgactgcaagtagctgtagacatgagtcattggc

SEQ ID NO: 773 - DNA, 810 bp, Zea mays
gcatgcctgcagcaaatttttttcccaccacctgcaaagcaatcagagattagaatgtgtgtgtgtgtctgtgggtggtggggaatccatatgcttgctatcgctcgtgaggatcgcttcggattctagacagcagccatgtgatgtgagtctgagtccctgcggctcacgtgtcgataccgagacccggccaagcagagtggcagacacgacgagattcgcatccactcgccggggcccaggcggcggccattacgaccatggtccggctcggcggctccctccctctcgccttgtgagttaaagatggcgatgggtaaaaacctgctgggtattatttgtctaaatccgtatccgcgaagaaaaatatgctcgttaaaaaactcatacccgtgacgggtataaaattttgtccaaactcatacacatgcgggtttcgggtatccaacagatttcccatacccactaacatcaacataaaaaaaatcatcatgtaaatgacaatcattacattaataagctagcataaaaggaacaagtgataactaattttagcctaaaatttgttacgtgaagtttatttcaattagaacatattcaattaataatattatgagacatatttataataaatgttgattttaaggggggttttaaaaacccataggtttgcgggtatgggtagtggaagaataaattatgcccacgtaccccttggggtctatttgacctattaaccaactcatgagtaagaaattgacccaacctatcctataaaacaaaacccaccggtttgggtcccgccatttt

SEQ ID NO: 774 - DNA, 707 bp, Zea mays
  unsure (1)..(707): unsure at all n locations
tgctgctcgtgccgcaggcgctggtggggaacacgctgttccctccggtgctgtccgcgtgcgtgtgggcggcggccgcggccacgcggcgagaggaggtcgtggagatcgccaggaagggcagggaggcgatggggtactaccacctgttccctgcgcgtcggtgctggatgctcgccgggacggtggtttgcttcatcgccgtgcaggttgcgctggtgtgcgcgatggagtggggcggcgcgctgcgcggcctgagcgcgggggagaaggtgtcgaacgcgctgttcctcgccgtgaactctcggcacaccggcgagtccaccctcgacctctccacactggcagcggccatcctcgtactcttcgtcctcatgatgtgagtattatctttctctcacctgatgacgtcgcctctgtctctgtgtgcatcgcagttcacgttatgatttggacttcggagcccacgaggtagcggtgctagtatcagttgcccttgccgataccttcgcgaatgcgtcatatgacgtatatagtgaattcattcgtagcacacttgcactttaaatcgtaagccattctaccatttctaaatcatttctcctcgtttcattntaggtgtataaatttttagatgattttttactaccaactagtataagtaaataattgttgtttttacaatttatgatttatctttggatcga

SEQ ID NO: 775 - DNA, 757 bp, Zea mays
aaaggtgaaataattgaccttaatctccttgtaacaagaaggtttcatcaatcagaaaaacaaaccacaccaaaagcatgtaacaataaattatgttacacaattccttcataaaaaatgattgagtaatccatgatactccctctaattccatatataggtcattttagacttgtgaataaagatttaaggaagaggatcaaacaaccttggtgaccttcatttatactgcattgggaagatggcttattcatttgtgagaggtagcaacatttattaaggaggggaaagaaggcaagtaaagggtaaaaagtgcaaactatttctgcgatggcttgtatttagattttagagaatacttgagaaggctaaaatgacctacatttagaatctgaggtagtatataagaagagaaattgaggtatgcaattcttttaagaaggatcttattaaaacatggtgaatccagtcccatcagtaccctattgatgtttaccttgcgagttccagctggtgcaggcttaaaagcattcatttgctgttctgaccggagagatgaattgattggtgttacacatatcttactactttttggtgggaataaacgagcacgcttatgaattaagtctttccagtgattcaaatctccctcttggcccagttaaaaattgcccaaaatgtttttccaaggcccttttctccaaaatggggatctattcaaaattcaaaacatttttaaaaagtgaaaagttttttt

SEQ ID NO: 776 - DNA, 626 bp, Zea mays
agaagacaggattgagccaacaacaacttctccaaatccaacaacagcatccacatctcactgcccaacagctgattcagcagcaacaaattttgcagcagtttcagcagcagcaactgctacaatctccgcgtgtttcagcatctggttcacagaagtctgcgaaccttacaggctcgcagccgggtacaccattgtcaggtggaaccatgactggtggaagtgcaagtcagggagctgaaggaactagccaacttcttgggaaaagaaaaatacaagatctggttgcacaggtctagctcttttcttttctgtgcaactcaactttgctgtccctggtataattcatgttacttggtcatactaaactaactcaactctccattttgattggaaacaggtttcttatttttatagttgaatataatactttggtctgttcttaaacaatagtcttattacaggtagaccccctaggcaaggttgaccctgaagtggaggatttacttctagaaatcgccgatgacttcattgacttgggaatgttgttgctttgctgcttgtttagagagtataatttcctttcaaaatttaaatttttagcctcttcctttttttaaagtttg

SEQ ID NO: 777 - DNA, 747 bp, Zea mays
gcagcgtccttatgcgcatgaaaacagcagtactcaaaaggagaccaatcagcaaaaagtgccagcagaccacacacacctgctcttcactaatcacccaaaagaaccctttgcctaaaaattacagcaccaggaatctgatcacaacaaccagcaattccaaccagaaacataacaccaattggtattagcattgaacatttaacaacaactcaaactgtgagagatacaacagccccccaggcattttgctaagaataccttgtcatgcaggttgaacccacaccactcatacacagtggcaatgtggaccataccagaacggacacgacctcgggccggaccttagacttgcgctttggcatgggacagacacgaaattttgtttaaaatccagcttgaaattcactcctacgagaagttaaaccgaagacttgaggagttactagagccacctaaccaactcaggtagagacccgttcacagcaaacatttactacactgtaagatgacttatagactgaaaactttacagggaaagtggagaacccatccatgcattaaaaaaaggcagacacagtgccaaggctcccacatgaatgagatctgggaaagggataaaccaaggcaaacctctccccgcaaatgcggagaggttgcttcgaacccacgacctagtgactcgacgagacagctctcacctggtgacccatccatgcattcaactaacaaaatctacatcaaaaa

SEQ ID NO: 778 - DNA, 723 bp, Zea mays
tcagttggtaaacttaagccatcgagaggttcttttcacagtttttacacatgtttcttgatgtctttgcaggagaagaggcaacaaattctgaatgagatgagaacattatgtgaagcatgttgttatcctggtttagttgaattccagggtgcattttacatgcctgattctggacaaataagtatcgctcttgaatacatggatggtggttccttggcagatgttataagggtcaagaagtctataccagaaccagttctttcacatatgctacagaaagtattgcttgtatggatcttccatgtcttttcaatccatatctgtagtttctagacattagtaaaagccatgatatggctttctgtatatttgacttggtacattcttctgtttataattcaaaagggtctgcgatacttgcatgaagtaaggcatctagtgcatagagatataaagccagcaaatttactggtaaatcttaagggcgaggcgaagattacagattttggtgtgagtgctggtttggacaatacaatggctatggtatgctacttttttggcgataggtatcacaaaatggtcttcttagtgtttgcttaattggtatgaataatttctttttcttgaaattccttagtggaaccatgggaacttaattttccggacctggaatttcaaccacataaaccaatttcttttctttttctttaaaatttaaaa

SEQ ID NO: 779 - DNA, 732 bp, Zea mays
gcatcaaggttgatagtttggtttctctgcacttcacttccaattagattcatatagaaatcccagaaaacctcagccttcccatcatgggaggtgaacagctggtctccatcccgaattgcagtaataaagttcttcctcttgcgaaatcttgagcaagcatgaaataacttggtgttggcatcgccgtccttgagccaagacagccgagatctggtcctagccgccgtcctgagcagggaagcaaggaacaagcaatgtttcttcaattgctgtagcagccagcgttcgagatcagagagaggtctaccatcccttgctgattctagctgcaacatcacttctctagctaactcgagctgtaacttgaagttgcccacttttttgtcactccatcgttgtagccccttggttgtagccttgaacttgagggagagagatttaagagggcaagcattaatctgtacagagtgccaagcattagaaactgcatcatgaaagccctcaaatcttgtccagaaggactcaaagtggaatctcctcttgccccgaagattatccttcaatccaagaaggagaggacaatgatcagagccctcggaagcggaacattggagtaagaaatctgggatttctgctcccactcaacggaacagaagactctgtctagtcgtaccaacacatcatgtgcctctgaccaagtgaatttcctttcatgtagatcgatgtctt

SEQ ID NO: 780 - DNA, 784 bp, Zea mays
ctcggtacccgctgatggtctaacctcgacctgcagacaaggcccctgggcctgatggttttactggacgtttatacaaggtatgttggcctattataaaagctgatatgatggctgcaatctccgctatttggggcaggaagtttgataattttgggcgccttaattctgcctatataaccatgattccaaagaaagatggggctgaaatggtgaaggatttcagacctatcagccttgtgcatagctttgcaaagttgatcacaaaaatcctagccaataggttggctaaaagacttaatgagatggtatcacctaatcagagtgtgttcttaaaggtagattcatccaggacaattttaagttggttcaacaaacctcaagactgcttcaccaacagaataaggctactttgctctacaagttggatattactaaggctttagactcggtttcatggcctttcttagttgaagtaatgatgcagcttggttttggacagatttggagggatattatttgtggttcgttggcctctttctctactcaagtgatgctgaatggatttacaggacaacacatcattcaccggagaggcctttgtcaagaggatcccctatctcctttattggtattcttgccaggacatcctaagttgaatgttttccaaggcaaaggaaggtgttacttcagccagttttcccaacggaaaaaaagttcccatcaggtctcccttattttggcttgtctatggtctctcctccaatagattcaccccactcaa

SEQ ID NO: 781 - DNA, 580 bp, Zea mays
agccatagaacataggcccttcgccccagctgcttcccaatgacttctctcctcatctgccaaagcaaggatataagtgaggcaaggagacactccatcgaagacacatttgttccgatggatccaaatagtccaagcacccaggatgataagggagttaagtccttttctagtaacacctgagaccacatctgaaacctcctcccaccaattcaagaaggaggtgaccgccggctggggagctagggagtgaagcccaaatttccggaaaagctggtaccaaaagattctcgagaaggagcaagccaccagaaaatgatcaagggtttcttcagcttggtcacaaagcagacatttctcatggtggtttaggcctcttttagctaatcgatctgctgtccagcatctattatgggcagcaagccaaatgaaaaaccgacactttggtggagcccaagttttccaaacccttgtgaagtgtccaaaggaaactgaacccatgaacagtccattataagcagattttgcagaatacattccatctggggcaatactgaaaatatgtctgtcttcaactcca

SEQ ID NO: 782 - DNA, 786 bp, Zea mays
  unsure (1)..(786): unsure at all n locations
attacggaaaactctccctatctcaaatttgttgatcactaatacagagcatcctgacaaggcaagctagacagtgttctttaaggccatgtggtgaagtggtggatcatgttgcttctgtagctttgagaccatcagaaaagccagatcgttctttcacctatgcttctccatgcagactcccaagcacatggctcttcagatatttttggtcaaactgctgctgaaaattgagctgcttccctgtctagcagtggcctaccatactcttcgttcttctttcaaatgactgctgccaagaacttgagccttcaaatgaaagcagtgatatatcaagagtgagccattagagtagaacccggtgataacagaacaacaatatattcatcaaaggaaaatgcatattgctagttgaaactgatgaatgcacgttttaaatacttcaggagtattgtactaacaaataagcaatttaagtatcaccaactattaggtgagtattattcagtaatgtcaggacaaaacagaatatcaagccaatgatagaagtattttttggagtaactggttagtggccacatattatatccagccgaatattggtcaagcccagactgcattntttaattctgtatcttcacagctaagatattgattaacaatcaacaacgcaccagaatgaagataataggcaaagcagaggaaatttaccataggagcacgagggagtatgcagctagctagcctttcatccaccgaaataggcaatggnggcatcttgctcat

SEQ ID NO: 783 - DNA, 904 bp, Zea mays
ctctcggcacccgttgatcgtctagactcgacctgcagtgctctgtggcctttcagcacgcttggttggcctgatctttccaaggaggattataagcatttttatccttcaactgttctggagacagggtatgttagttttggcaacattttgatttattttttcttctttcagtagattaatacttgtgttgttgccaagtttctgttctttacattgatgcctggcactttccttcacagccacgatattttgttcttctgggttgcacgaatggtcatgatgggaattgagttcacaggatcagtaccattttcttatgtctatctacatggtcttatccgggatgctgaggtgagatggggcacaatgatgcttatggttcgttgttttcaggggccaataatcatggctattttttttcttgtgatgcaaaagcaacatgatcaaatttctaaataagagttctcctgcgcgttcgagaaaaaaaaatctaaataagttatggttcctagttcataaggggataaacagcgcagggaagatagccggtggagtcggcttgggaggggggggggactagactactagagagattcaggactaattcttctttattgattgattcctccttaaggaggtacaaccccatccttatatagataggaagacttggcgccacgtaactaacacaattttatctaattttaatcccaagttccctaatttcaatattaatttaattttaatttcctagagaacctaaacttcaaatccttattttaaatacttttatacccactaaattccttaaccccttggacccccttaatctcttggtggggcctccacattgcacatgggggcctggtcacaccccccttgggcccctttccacgaaatt

SEQ ID NO: 784 - DNA, 758 bp, Zea mays
agaaagttggaaagatcagaaaacggcatgttttccttaaatctgagactgtaccctggtagatatgaggtaatcatctgcccttttacacccaatcatttatatgcttacatcgtctgatagtttctgactgtgctccagattaagtttattgttgatggtgtttggaagaatgatccgctgcgacccactgtgcacaacaatgggcatgaaaacaaccttctgcttgtcacttgatttgaagttttcaccctggtagcatttttgtagatcattgcctagctccttctcggtatggttgatgccaactgattagatcggtccctccgtgtaactaatcagctttctcttcagtttttttctgtcttttctagatagatgtgtacaacataaacagtgtagggtgttattgaaatgcgtcgccctgttgagatagagaagaaagtagtgtgttcttttcttcccgtcgttctccactgtgttggctcttcttcatgattctgtttaacaatgttgtaatgtccatatgctgtgaaggtggtctatcatcgaaattatccaaaagttatttgcaggagttgcattattgacgtgctatgtttatctgccactaaccccacatagaaatatagaatgcagctagcccgctaggaaatggcgcagaggttttgtttgcggtgggcaagagtatttcttcccacccagggaaaaaactttcctaggggtcacattttaatcttttggttgccctctgccgt

SEQ ID NO: 785 - DNA, 765 bp, Zea mays
gctctgatgatggaggtggccaaacagagcactatgtcaaaagcaaggagtccactcatgtgaatggccttctacagatgggtagaagagatctttctaatcagctttgcttcagttcattccaagagcaatcatgttcatctaaccattatgagaacgacactaaccatcacacaaatgggttcgacatgaagcatgatgtaaagattgccaagtacaaagcacggaaaatggcacagttaaagagggctatccatccatctcttgacttcgacaatgcaaatggagtaaataggatgaagccttcactgaacaagctgcaatctttccatattggaaagaaccacagtttccgtgtaccgaccggtgaccgaagcccgggtaaagtaagtacggattaccattctaatttgaacagccaattatcgcatagcaggcaccccgatccaggagcccaaagggcctggcattgtgaggtcaatgcagctgggagctctgattgtatgtttacagcaaggcgctactatgccggagctcagttgccaccaaatctgccgcgaacaaaatctgtacccctacatgctgtcgacgtctgaaatgctcttgccctgtaaagtttatagtgtacatctgttttggttctttctgtacccattatgaaacgtagttgctgagagcaggagactgaatgtgacgaggttgcatgtggattaccgctgagctggttggaaatttccatcttgtgaattcagagaggttaaattg

SEQ ID NO: 786 - DNA, 780 bp, Zea mays
  unsure (1)..(780): unsure at all n locations
agcccaggcagctctggttgtaaatccgccactgcctatcaccttgttttggcaaatttaatgaataatactagtttccccctctgttatttgtaagcaccatttacctttgtttattgctttcaaatattctccagccttttattcctgttactgcctaccacatttgttattcttattcctgttggaattgaattactttcttgatatgaaaaaaatgatgagtggatgctatacactagtcgacccttcaagtttctagcaagtccaaagtaatggaatatgcgacaaagaaaaggaagaagttagaaaattagattatactggttgctaactttagataactttgagctgtatgtatattgaagctagttagaaagctagaaagagtgttgtgctagcgtcggatagcctttagctgtttatgtgtgtgtgaagagataataaagatattagtttgaagaatgccacataccactgatttgccatatccaattcctaacaattccaacgtgcttctggagagaatggcaaattgtttccgacctgtgcttatatgtaggacctagcaaaaacttgtgctagaattgcaataataagaagtcatagtcatctaagcttatagctgntatttttgtttttagaaatcaggaaagagagaaattaatatattaacgatatgaaagtactagagttgtggcaggaccgcaagagactctagaatccaaaggtttttagacgcagtagaactaaaattggaatatattagatgtgatttcc

SEQ ID NO: 787 - DNA, 775 bp, Zea mays
gcagctcccggctcagaaacaagcgcgaacggcagcgggccaatcaccaccaataatcccccggccggacacagctacagcgcgtcgcgtcctaagggctgagggcctccttggccgttgccacgcgggtcaggcggccagtccgcgtcggcactcgccccgcacacgccctctgctgtcagtggcggctcctctcccgggcacggacagctaccgtgttcgcttcccgtttgcctgtacccagggtggtacgccgccgtacgtacctactcctactgctcactggcaagcgatcgttcgtcgtccgtcccccttccgctgtctctgctgcggcatcgtctgaagcggagtcgtgtcgaacgggcagtggaaagaggaggggggcacagggtacttgagtactagtgctactccctatcgtcgttgccataacctttttgacagcgagtgtgtcagagagagcccaaagcaggtttgtgcggcactaatcttgcaatcaccgccagatccggagaagcttttggtttctgttttcaggcggcactaatcttagcttaaatgaggcatgatggttttgttgatctgcttgctagggttaggggaatcatgcacctacgcggatctaatcttcatgcaataacacatgaaagaccagagagaaaccacttgggttttggataaaattttccatgctctggtcagattcatttgccggaaagataattataaaagggtgggtgggagaagcttgttaattgccccacttagtgttatt

SEQ ID NO: 788 - DNA, 696 bp, Zea mays
ttgcttacgaagattgaatttggtatgtgcttctgaagttcttcaattatatattttggaagtgcacatcttgggagggctttagaaggacctgcatatttgttatcaagtaaaaaaaacatataaagcgatctcattgcagctgtccggggagacaactagcaatatgtccgaagaagctcatttatagtcctactgctattagtatcacagaaaatgttctaaatagcatggtaaactaggatataaaagaatggaccaagttaatagccataacaagctccatattaaatagaaaatagattacaaatctggatataggagtgcatcgagcttgtggatgtgaacagctatcagctcagtgtgtcactaagttttggagtacctgcatcatcaggtccaggaatgaataagaaacgactatgttcctttaatctagatcgagctgcaatcatctcgccaagctttccgaactgaaatctgtgtggaggtacatagctaagggttatctcatactggaatagcaagaacaaaaagacatacaattctctggcatctctaatgaaacagaaagccgcacctgagttcttcaaatgaattgaacgctagattgcaaggccgggagcagaaattgcccattaaaacaaagagggaggcacaacttccacactatcatacccgtcaagaacaacagcc

SEQ ID NO: 789 - DNA, 759 bp, Zea mays
  unsure (1)..(759): unsure at all n locations
acagattggggattgtttgcttgtacaatgctgtggatcggaggctggtcatgtttgatgcggctgatggcatgtggacagtgctgccacgattgtccgcgttggatgcatgcgagagcttcaggtggtttgggcatgtcttggagccaggagttgaaatcttgatgggactacgttggtgaggctttgctcttaacttttagtatttcagttgagtcctggcagattcagctttatgctccttgagtcttaatgtgagtgtctctttaaacaagaataagtaggctagctaacgtttagtctctgtatgtgattgatataactttttgtcatttgccgtttataattctctgctgtaaaagctgatttccataacatgtggaattttgtagacatcccgatgaagatttcatgctaacatcattaaattcataaagctagagttactagaagagctgtatgcaaatccctggtgagtaccaatgcattagagctcatgaaggttctttttactcagcttatcatctttttcagaagcgcaagctgcattaatagccacctttcagatttattcacggagtgaaattcttattgtcctttcctttgagagagaagaattttcatggttagaatgtgtaacttatctatcaattggcatatctctcttttatttttttaactacgatgtaccccactttgatctgtagtagctnctctggtgggacatagataaagatcaaatatattgataaaaccctg

SEQ ID NO: 790 - DNA, 840 bp, Zea mays
atgtcgtagcggcacccgaggggtcatcagaggtaatgtctgcttccaaaaaaatctctcaaaggcttgtggggcagagcaggaatcgagggggtgggagtggaatcaattgccaccaccagagcagcaacagccgatgggggcgagaactcaggcgccaccagctcaacatatgaggcgatcggaggagctagggcatcaactggtccgccattagccggagaaacgattgcttccaataaatctcccaaaggcccccaaacttctggtgccttaaaagcgtggggcagggcgggaaacgaggcggtgagagtggaatcaattaccacaaccggagcagcatcagccgagggggcgagaacccaggggccaccagctcaacatctgaggcgatcggaggagccaaggcatcaactggtccgccattagacgtagatacatgggtcctgggcccaagctgcgcatgcaccagtgcccaaacaaagaaagatggacaagtgaaccaatgcctaccccgccagttaagatcccactcaaggtcctcatcggagttgttaaccaacggtgacatacgcgggcccaacattggcggatccaccgcgagaaaccgggcactgagaatggataaactaacccctgaagagatgaggagggattaacaacagcgacccgggggttttttcaccttaagaaccaatagaagccggaattttcatttgggcttggcacacccctgccagtcaaattttgagcccccggccagggtccgaccgggaaacctccattggccccgggaaagaaagaacctttgaaattaaaaccaaatgggccccctttgaa

SEQ ID NO: 791 - DNA, 510 bp, Zea mays
acgatctcgggctctttccttccgtcctgagcctcgtcgtagtcgctgtacgcgtcgtcgttgtcgttgtcgtctgccatcgcgtatccagatgtctcgccggcatccgagttacggcagagcctgctgtcgtccatggtgaacgataccttgcgccccatgctcgacacgcgctccggttcttctactccgaagaaccttcctcctccgttgaaccttccgttgtgtgcttcccgccttcccagcaggcggaagtcgccctcgttttcccttctgatcgcgctctccttggtctccgcttgagtttctgagcagatctcggatgtggagccgttctcgcgggcggtacaggtcccgaaaacggaggttgcactgccttcagctgggccattggcacaagaaaactttacgaacctcttgttcactttaccatctctgttgtcttcttcaatctcactgatatgaatgttcttgatgccgttacgtgaatggtcttcatctggaacaact

SEQ ID NO: 792 - DNA, 520 bp, Zea mays
ggtgcctgcagcagcaacaattgcagcaacagcaacaaaatcagcaacagctaaataagatggctgcacaaatgccaaatctggtatcacatcagccgcaactgtctgatcagcagcttcaactgcaactgttacaaaaactgcaacagcagcagcagtcgttgctatcacaaccagctgttactcttgcacaattacccctaatccaagagcagcaaaagttgattattgatatgcagcagcagttgtcaaattctcaaccactttcccagcaacaaacaatgccccaacaaagtattcaagttccatcacgggcaacaccaccaccaacaacaaccgtgcaacaagagtcacagcaaaagcttccacaaaagcatgttgggttcactgacacatcacataccaccattcctccgactacatcagtcaacaccatttcagttgtaggaagtcctctgatggcaactggtgccacacattctgtagttactgatgaaattccttcctgctcaacatcacc

SEQ ID NO: 793 - DNA, 761 bp, Zea mays
caactgcacgatagcgcaaactggaactgagagctcagcagtcagtaatgcatcttgacgcggtcactgaacttgcagatgtgcacctcttctgttccctgcggcaaggctttccacgctcatcttggtcggccgtcatcagatcagaagccagcggcaacgcggtggcgtcgccaggcacggtcatcaagcgtagcaaggaggagctcatcaccttcttcagagacatacagacatccattgccgagtgctcgcgtaaagcttccaagaggacgaggaagcagccgcctgatctgttccaagaggtccgcaggagggaggaacagtcacacggtatgtccaagtcgtacgatgctcgatggagttgaattcttttctgaaatggacgtattgcagctcactagtcctcctgcaagcatgcatgccatttgtcggttgaagcacaagttgtctgttttccaactctagatcatatgttacatgtttttgttatcatgttgtggtcatgtgtggtgtgaactgatcatcacaatcacaaggcacaggtggaggagatagcggcaccgacgacgtttcagagggaccgaggaaagtgaagagtcttgaagacatgaacgtggctggattgagagagttggccgaggccaaaaggatgaagggttactccaagcttaagaagggcgagctcattgatcgggtgaaaggggctactacgtaataaactaccatgatgccaaacagcttcgcaggtaataaggacc

SEQ ID NO: 794 - DNA, 793 bp, Zea mays
  unsure (1)..(793): unsure at all n locations
tgcgaggagcgacaggttctgaacttctgactgacttgtgagactcgtcggcggcaggtgtgaatagtagtagtattacagatggcagagagctagggacggcaggcgcggccgtgaccaaggtttgctgtgttgaggtccttacctagttttaagaagtttttatcttttccataggagaagtccgcttcttggttaatctagtttttataaattgatatgtttggtctataaaacagttttttaaatactggatacacgtaaacagggggtttcatatatggaacagatatcctttgacagtcttttggtagtgtatttttagcagcgtattcggttcctgtattcaaatggcaggcacctttttacctttcctctggtcattttgcaagctgcccccctgttttcgtgagcttatattaattatatgcagatatcaatatatgtcgtgaagaatcttgcggctccgacttgagagcagcctgatgtcttcggtcttcctacacgccatttttatactggaaactctggatcggaaatctggacgaggaagtgcatctgatctgaccttgcctttctgaattcggagggtaggaagttcctcgtctgacaatcttctcggtttttggataatacgcggcggttcgagtcccaacagaatctgcataaagtacttactcattttgtagaaagtaacacgcattcctggggcgatctttagacattcaaatacgggntccttcctttggcccgtaaaaggcaaagcccaaaattttaccaagccttggactct

SEQ ID NO: 795 - DNA, 695 bp, Zea mays
tgaacgtcctcctggactggagggagtccctgccccaccccgacgagcgcgtggagtacgagctctggacgaacagcaacgacgagtgcggcgccaagtgcgacatgcagatgagcttcgtgaggagcttcaggggcatcgcgcaggccctcgagaagagggggtacacccagttcaccccgcactacatcacgtggtactgccccgaagccttcgtcctcagcaagcagtgcaggtcgcagtgcatcaaccacgggaggtactgcgcgccggacccggagcaggatttcagcaccgggtacgacggcagggatggcgggctccaaaacctggtccagatctgcgtggtcagggtcgccaatgggactcgcaggccgtggatgtggtgggactacatgcacgacttcgctgtgaggcgcccgatgaaggagaagaagcacacgcgtgagtgtgcgaatggtgaaatcaatccacttggcaggcactattgaaaagatacatccacgcgacttgattatatacggggaaaaaaatagaagatatctctgctgaaaatgaaccctggtgcggtatctacaggaccggacatcgagaaaatcaacaagggggccggagatccaaaagccgatacagaaaaaccagtcctaaaggcagagcaggacgctaaggtaggaaaaaacattaactataaactg

SEQ ID NO: 796 - DNA, 725 bp, Zea mays
atcaaggttagacaaacaactcactgatgcaagtgtcatgctctctgatgtacagcgagttgccgccgccgcagctgcactcgtagcttccccacgtgttctcgcaagcgcagtccttgcactggcagaaaagcttctccttgcactcatccacatctgcataagccaatcagcaggacattgcattgcattgcatcaattatgttaaggtgtagtggcaaattagcgtataattatgccaaaagctttaacaccggtaccttcgcagctgttggctccgtcgcccttgaaacctgctgggcacttgcagcctttagcttcttggttctgtacagtttctagagtaagtttgttgctccaaacagcagccgcaggcgaaactgacaactagaaaagaggttatcttactgagcaggcagacacactcttcccgttcctagtctcattccagcagcccccattgttgatctggcacctaccaaggccagaagctgccaaaggcaaacccccattagcatgattggtgaaaatccagattcaagctcttagaccttctgacaaaaaaaaaagatggtacaggtgaaagtaataccttcacagtggttgtacccatcaccgataaacttcacaccattcacaatagggcattcgcagacacgaccacggaaggtatcctacaatataaatctcagaaatatggtactcagtcatgaacaatcatgaat

SEQ ID NO: 797 - DNA, 488 bp, Zea mays
tgagtacagggcaatagtgttgagcctatgtgagatgatgtagttaaaggtctcgctaggtgagttacgggtgttgaggaatgagactgatgtttcactgtgacaacattgcggcgatcaatattacaagcaatactgttcaattttatcacacaaagcatgtggagcttgataggttcttcattaaggagaagctagtagggtcttaaggctagagtacattaagtctcgtagccagctagctgactgcttcacaaaagatctaggtcctaaagagaagtcaagttgtaacaagatggacatgagaaatatttttggcctatcttgagagggagtgttggtataaatacaagagttctaaatgatctttatgtggaagtgaggaaataaagagtgtgtgtgtgctgggggatgcaacacaccaaaaaaacccaaacctcaataaatttgtagccacaaacttcaagttcgtcaacctaaattgctta

SEQ ID NO: 798 - DNA, 698 bp, Zea mays
agaaggctagagcggccacggatgcgatgagtcctgtgcaagtaagtttctctttggagaattccttaaagtttttcctcgtttggattcatcatcattgggttgctttgtttcatcttgtgattgctaagaaagagggcttttggcatacaaagagtactgcaaaacaaaaaaaaggagtaaagggagcctaagttatatttgaatgataataaggtgtatgccactttttgctcgagatctggatttctcatgctagactagatggggaccatattacaactgaacaatgcttgctagatgtgatttgattttcttgtgttctgctgatggttgatttcttccttgtacaggatggattgttgataacaaaacctccaggcatgaggtttccatcaagaagaaatgtgcctatgtctgttgacccagtgggccatctccacaatggcagcagtttcgatgctgtctcggtgtcaggttcagatgcaagttctgggagatatacccccaaaattagtgcgaccatgcacaactcatatcttcaggatagtagcaatgctctctcaccatttgccaacaatggcactgtgaggaacccattgaccagttcgggtgactggtcaggaagctcagctcctgatgctagtacagatgggtcaacgagcaattcttgtgaggcacggttaataggggaggat

SEQ ID NO: 799 - DNA, 735 bp, Zea mays
tgtaaaaccaaaggtatcgtactgctgagatgtctccaaagcattaccacccatatcctgtaaatagcatccacactgacaaatgaactctattttttcaagaatggatatatgctatgaaataacttcaatcagactatgagtgcctcgaaacagcagaaattagaccagccttaaaagttgaatctgatgtccaaaagaaaagctgaatctgatcagatcaacacaccctacgataatgatacatactccctccatctccaaattgtaagtcatttaggacaacgacacggtctccaaaatatagctttgaccaatgttttttttttgttaaaatataaatgaactcttaatacagggtctgtttggttggacagtggctgtgaaaaaaagtcgatgtagcctgtgagatgtgaaaaaagctgttgtgggctatgagctgttaaaaatcctaaaaccgtttggtagaacccactaaaagccgctaaaagttcttctatatacattgtcacagttgcatctgaaagccgctaaaaacaggtatagaggtgctttcagttttgcactgcgataaaggcagcttttagaaaaaagatgcttcctagatctagcccttttgtttggcttttggcttttaaggggcaaaagccaaaccaaacacacccttataattttgtaaaagtacttatcaaggtaaacccggtgcatattaccattaagtttcaaaactagata

SEQ ID NO: 800 - DNA, 484 bp, Zea mays
attctactaatttaagctattagatgcttatttcttttgactaaggggtcctctttataattgttcactttcagtccacatgcaagttttctctgtactagatgtgattgcataaacattacgtccttcaatttttcacctaaatatgtattcttgtcattgagttccactttaagactagcacttttttggcagatcttattttggtattaaggccttgtgtgtcgtagctcgttttattcagcaagtcatctgataaattgttttaatattattcttaacttgcagccccaacatatggtcaccagaaggaaatccagttttgagagaatatgcaataaagaccccaaaagaccattcttccatggaaaatgattctcctcgttcaagatgttgttcatgctcggcagagcactctcctgttagctctcctattgctcttcgatgcaggtcaacaagactaagcaatctattaagcaagaat

SEQ ID NO: 801 - DNA, 672 bp, Zea mays
ataaaagatatggagattctggtcaaaataaaagggaaaaggatactaacggccctgttattggaaaagagatttgatttgctttgtgagcacattcctaccacatggagcttcaactacaaaactccgattctgggtgcatggtttaggaacctcaaagttcagctacacaacatacgaaaatggaagatgacgatttctgttagctctggtagcaaaaaactatccattcataccattatttaatatgactaaatcaagggaagaatgcaaatcataatacaacagcattgtgagagattgcacctttggcatcttctttatccagcacagtaacatcgtgactgaagcaagtttaaccagaagcctccccaaagagaggggatggcacctccagaaagcagagaacagagacatcaaaatgttacagcatcagctaagcagttttccaggtcatgcctagaggaattaatggtggagaatatacttgattagtcatggtttgaaaatacatgtttcgaaaccataactaaaaaatgcagagttagtagtaccttacataactctcaaacagaaataatctgaggctagcaccaaaaattgttatagagccaaatcatcgagcacgtggtgtgcatcatccatgagtgaaacattcttgagtagatggaa

SEQ ID NO: 802 - DNA, 473 bp, Zea mays
ttactgtaacttcacaaaaatagcttactataatctacaacaaagaagtcctgagatctgctacgaactgtggagattgatacagctttggaagctgcacttgcctgataaaaaggttgatttggacccttagatagcttatccacgtttgctgtctccatccatgacttggattcacagcacaccgggtccatgccacatatcacgcctctatatccttcagcaagagtgcatgatggtgcaaaaatcaaacaggataaacaagagcattcaccaagtcaatatcgaaaccaaatactaaactatggatttaatctcaaaagcaaatgaggatgaataaagccacagataagcgtagagaatgggacctttttcattcgcttaatgaaatatttcccttttttctaaaaaatctacagataagcttaatcaacagattgaaaaagaacaaacacattatgcatcataattac

SEQ ID NO: 803 - DNA, 736 bp, Zea mays
gcagtttggtgagtgaggggagaattgttacccgcgtcggggttcgaaattgtgcgtaggtgcggcgtcgtttatgagcattgttatgtgaaattggtgcactaagttgtatgtaaaaagcaggtggtggacttccagatcgttcttagggatttgtccaaacttccgatgaaggcaagtaaaacagtgatggttattccgtcagtcaattaaagtgtcttatacttgattatgtttgtgctatttatgttcgtattcatattcctaattgggtaccatcgtttgaagatattcatttttattgatcacatatgttgaggttgtggtttgatcatgttacccatgttgttcattgatttggaatgggtggaagtatatgtttggcacattttatttgggaaggactcatgttgttgacatgcataatgcattcatcatccattgcatggaagtttcgtcgcgatcttatggtccgaccgtactggtaccatgagcatcatatgttgcccgagaaggggtatgatgcagcttcatatccttagaggtatgaaggcagaagtcatgttggatctgtagccatgtgcattcatgggtgaagtgtggaacctaatttggtgatgtggataaggtggatccttactttggaaatcatcttggcctttgagtattgaatacttgcttacttgctgcaaataatacttaaggaacaagtgggaaccctgggggtgcttatgca

SEQ ID NO: 804 - DNA, 726 bp, Zea mays
aatctgcaacgtcttgcacaggactgccacaaaataaacatgttaggattattaaaacaccatcacaaagaaacgatgagaagaaaaaacataatagagacttgtaggctttgaacctgtatgcattgctagtgtagtattctgtgacaaaaccaataatcagaccagcccacggaccaattgcaacacagaagaacaagcccctgcaaagatatggcagttgtcagaagacattccatcctacaaataaatggcaaagattaacagaaaaaaacataccagttggagacatccttctgagtaccaaagttgaagatggtgaacttagctggaagggccaaccagctgattacagcaataccaacagtcatcagggtggtggagatgatgagctgcttcttaagtgcaggctcaatttctttcacagccttgacttcaaagaaatcagtagcaaaaagggtggtgatcaagcagacaatgatacgaacagagctaaaaaggagtgggtgatcaagcagacaatgattacagcaataccaacagtcatcatgccaaggaaaccggagacagagaggtgatggctccaagcaaggacacagtgctgaagagtgcagtgatcatgccaaaagtcaaaatacttaatgacaatcagagccactatccagttaagtgaaaattttattcgaataaatgtctgaaggtagcatctatacctttacacattat

SEQ ID NO: 805 - DNA, 703 bp, Zea mays
  unsure (1)..(703): unsure at all n locations
gcacgcggcgcgtccccgtcccgccctcagctcccgccacgtcgtcggcctcctcccccgtttgactgcaccacccactcccccaccccagcgcctcctataaatcccgccccgaacccgaatccaccacaccgaaaacccaaccccagctcgctcttctctccctcactccaagtctcaccatccacacaggccagcgcgcaaacgccacaaagctagcctttctgctcccgctcgatcagctggctccgttgatcaccgggccgggccacaacccccagctctctgactgattagtttccgctgcaatggcgtcctccatctctgctccagctccaccggcggctccggccaccgcgccggcttcgggcagacccaagaagccgtcccagttcaaccccagcaccggcaagaccaggaccccggtccccgcgcggccaatgcgcgccgccgctcccaagtggaacccgctccagcggctcgccgcggcggcgctcgacgcgctggaggaggggctcgtcgcgggcgtcctcgagcgcgcgcacccgctgccacggaccgccgacccggccgtccagatcgccggcaactacgcgcccgtcggggagcgcccgcccaccggcgagctgcccgtgtccggccgcgtcccggcgtgcctcgacggcgtgtacgtncgcaacggcgccaacccgctccacgcgcc

SEQ ID NO: 806 - DNA, 919 bp, Zea mays
tgcagctgtggctcttggttgatgggggtagttctgcaacctgacatcgcaaaccaacacatttggcgcctctctgctcatggttcttattgtagcaaatcggcctatgatgctctctttgttggctctatccctattggcccttggcgacgtgtctggaagacctggccccccttaagatgcaaattctttgtatggcaatcaaaaacagggtttggacagctgatagattggcaaaaagaggtatgccccatccagttgtttgccctctatgtgaccaggccgatgaaaccatccagcatattcttgtctcctgcgtgttcgctcggcaaatatggacgtccatactacacaatttaggcctactagccattgtacctcagcctggatgcactcttttctcaaactggtggtgccaaagtatcaaaaaagtggagaagtgtctaagaaaaggtcttaattccttgatcattttggttgcttgggagatttggaagcaccgtaatgcttgtgtttttgagggggttgtgccctgcacccagcgagttcagagtgctgtgattgaggagggcagcgtctggtgtttggctggtgcatcagctctgcaggacctcctgctgcgccagctccctaggggaccttagcagttttcctgctggtagtcgtttttggtcgggttgttaccttgtgtgtgtgtggtgcgttgtgttattgccggaggggtctcggcctaggggcctttgtaattaggggttgacatgtcttgtctctcctatgttctttttttttcttcttaatttaatgacacgcagctctcctgcgtttgttcaaaaaaaaatcatgtgctatttccagcttacgtaaaacttccttttccaaggccacctgcgatctgatgtgaccaacagcttatcgctcc

SEQ ID NO: 807 - DNA, 698 bp, Zea mays
aaaatcgactgcatttgttgttcttgggtacacaatgaaagatgggaaggcatattttcccccacatgacagtatctatacatattgcagttgaaatggaaataattgaaatacaaggtatgtgcaggtgcagtctattatattggagttaagagagcgctagcttgcagtcacactcgatgaagtcctatagggctagatttcaaaagtaagatccagtacaaggttacttcaattgcaattagcgattagccaaaactttcatcttcggtctcactaggcctcactaggcctttcatcttcaaaagaatttataaagatgttatttttcagtctatctctacatccctctctccatcttgttatgcaattatgagttcattagatgtcattgatctaaattaatttctatccattatgaacttatttttaatgaaccatgctccttcttcgttgctcacaacagggtccatgtacttggcacatgatatacatatacgagatggacttaaaaattaacaaaggtcttcttttggtggtagataattttggttttcttatgattctctttatgaagtgggtgtggtacctctaaaacaaatagatgatctgttgacttatggcagtcaggccattacattttttttgcatgaaaatcgacaatctgaagaagtgataatttttgcttttgaatcgct

SEQ ID NO: 808 - DNA, 699 bp, Zea mays
tggccactggcattcgtgggaaagcttattcctattcctaaacgtccattaggagaattctttgcgtgctgctgtaactgtaaggggagcaaacaaggtatccattgcgctgcaaaaccttcattgcttgtcgattcatgtagagtgagtggggagtgatcaaatctgcaaaagcatcttttgcctctttcacagtttttattgcacatccctgacagctctgtttgtgcaggccctgatgacgcaacctctaatggtaaggaagacaacaagcttgagccatgagatatcgcaaggtttggtggctggcaacgatggccttctgctgtttcttgccagggtttgacgtgttggatttgtaattgcccctgattgcgattgtatatatatatacacacacgggttgctcctaggatctgttatacgggcaacatcaatttcataatcatagagattttcctcttagtcttcatttaccgagttcattgcgaatatgattaaacttgtcttgtctgaatctgaatctataacgagagttgggctatggtacccttctggagctgaccatgagtaggatgtcctgagatcttggacatcctgtgatgaaagtctgggaaagatttagggcccgttttaggttggcttcaaagcttgagctgacctcaattgtctattaaggagagtagcatttacgagtct

SEQ ID NO: 809 - DNA, 501 bp, Zea mays
cgactagtcgaagcatctattccattatgaaggccatgcaagtctttactagcattgagcaattgatcaccagatggtgtgccatttattataccacgtgaacttccattgtgcattataccatctggcattgcagatccaggagcagtctctggcaaaaagcatgaattttgcttcactgaaacaagtaaagaaagtggtcatgttaaattcctgaaacttgaaagcggcaataagatctcatggacaaaaacaaaacttcaaacgaatgaatggcagacttgtctagctcatacaatggttaaatcaatttgcaaagtaaacatgtatgcctgagattccatcatattgttacaggacttcactcggcaaatcagaaaattcagttaaataatgatgaacaatccctgataagaatgttggaaacaaatgtcttacataggttggagttagagccattaggaagcgacatagaagggatccctgaagaaaattctttat

SEQ ID NO: 810 - DNA, 697 bp, Zea mays
taatgtaactggggtgaataatcagcaaagcagtgagcgcacatgtgtgtagtagtggtgaactggtggggcgtggagcactaattagactgcttgagtttggatcatacatatccaaatccagtaacaacacgtagtggcctttcttctgtccattcagtcatctttagcaaatcttccatagtatgtatgttctcaaaaatgccttccttaggtacctggtcgcacaagttgactgcttcagatataaacttcaatttgaaataacaagactagtacctatgaatcctcctggataccaacataccgcaagggacaaacgacaatgtccaaactcaagagcatcatgaacaaccactaaatcctcattgccctgacacaaaaaatttaagcacatcggtcagataaaggcttcttcaaagcagaatagagcagacccagtgtcagaggctctggggaagggataaaccgatgcaagcctttccccacgaatgtggagaggctgcttcgaacctgcgacctggtgacttagtgagaaagctagcaccactgcaccaggcctaaaatttcacataaaagaatattgcggattcgattggaagagattaatgttttataatatataggtccagaacccaatgtgcgcacaaaccaggaaggcattagtctaagcacaagataaaccagatataacaaa

SEQ ID NO: 811 - DNA, 695 bp, Zea mays
tccagagttgattcgtggttgggcgaagatggcaacgcgagcgcgagggcggcacggcagcaaccccatgcgtccaagcctttgtgttttgtttatatctattttatccacgtgcccatctttgcacgaaagctgctgctctctgctgggagcctgggagggaagggaggtttaccagctggttgatttggtgacaacgagattacaagaggattagaggattaaagggtagtttatttctttttaatccctcgatcctctcgtaatctctggtcactaaatttcgtccttagacttatccggcgtctcggtctaccacctccgttgggacgtacggacacggagagcctcctcctgctccgaaagatttcccggtcacggcaccgaagcaggctcggtagttgatcaggtgtccactgctttcttttctttctttttttccttctaaaagatggggcggcaagcatctagttttgtccgccagatattttaattctcgaatacagatttcatccggacttgaattattcccgccattcagcgaaagcagaggtctagtcagagttccatcttctctggtgttctgccgttcagtttgaacaacgtagccagtttattcctgtgtgctgtctccttcactctgacagtgacaacaaaatacatactgttagctagtccagttaacaacgttctgc

SEQ ID NO: 812 - DNA, 753 bp, Zea mays
agcacgcacgcctgggatgccccccctccgtcaccggccttgggaccctttccggagctccccctgcggccctcgctgttgcgcagcacgccgccgcctcctacgactacgtggccccttgcagtggaccttatgcggacatgaccccttatggcacgccgctactcctcaccccctcaccgggcagctccgtcgtgtcttcctcgttgcaccgcgcaaccctccctctcgtcggtgtggtgacctcatgcgccgctacgcagccacattccctgctcggcacagccccctcgggatggggccctttcacctcgcacccgcccgcgatggggtcctttcccctcgccagagcgtcgcttgtgttggcccctagtggcccggcctccccacctgcgagccttgttgcacccacggtcacggctctgcatacggtacctcctcccagcaccgagaggtctgcctttgccttggccgtcggtgccacctctctttgatgtggcaggccaagacttcgtctatttggtgcctttcttcatcagagcaatggatgggggcgacagagcttttatagaggttagtgtgcagacctaaaacatcaccaaacaagtttaagatggattttacagccagcaagtcactccgggaaggcctcagaaagatcgctgcatcatcctcaaaaggaaatccgatgtatggcgtgctgaacagccagaggttgcagcagttggttactagtggcacaattcaccaatg

SEQ ID NO: 813 - DNA, 792 bp, Zea mays
accactcttggttgccgttttcttgtactggatgaagtcgaccagcttctgtcttttaattaccgtgaagatatgcatagaattttggagcatgttggaaggagacctggaggcacatctagggatattcttggcccacttgcgagacgatctgagcgtcagactatcctggtttctgcaacaataccattttcagttatacgagcagcaaggagttggggtcatgatccagttctcattagagctaaaagtgtagttccacttgattcaatcactgtgccaagacctgcgttatctcaaagtgacgctaaccccagttcgtcatcgcagtcagtgaaccaagctgctgttggcagcttgccgccatctttggaacactactattgtacggccaaggcgcagcacaaggttgacacattacggaggtgcatccatgctctggaagcacagacagtgattgcatttatgaacaacaccaagccactgaaggatgttgtgtttaagttggaggcccgtggtatcaaagccactgagctacatggagaccttggaaagcttgcaaggtcgacagttttgaaaaagttcaaggatggtgaattcagagttctcgttacgaatgagctgtctgccagaggactggacgtgccagaatgtgaccttgtggttaatctggacctttcaactgactccacacattatgctcacagagcttggagaacttgacgtcttgggcggaaagggatcgtggtcacaatatgcgaagaaagcgatggatttgttgtaagaaaaatg

SEQ ID NO: 814 - DNA, 695 bp, Zea mays
gaggtcccaaaccttgaggatgtcagacaaaacattaacagtgatagctcctctaatgtcatgtacccagttccttgaattgagggcatcatggacattcctcattttagccctagaagagaccagcttgaccaaatgaggggccagctgacttagactctggccatcgatccatttatctgtccaaaacaaggtgtttttaccgttgcccaccaccgaagagaccgctgctgagaagaaggccttaaccgtaggatgatcatttattttaaaggatgcccaaggcctgccagtatcagtttttttttcagccagagccagcgtaatctaagagcccaactcatcaaatacaggtttaagatacccaatcctccaaattcttttggtctagtaaccttgttccaagctaccaagcaatgtcctcctatagcttctttcctccctctccacaggaaatttcttctgattttgtcaattgctttgaaaacccaagaaggaaggtccatggccatcattaagtaaatagtcattgaagacaagacagtctggacaataatcaatcttccagctctagtcaacagatcggctttccagccagggaaagcgatgcgcaattttatcaatgaatggttgtaggtgctggttgccaagcttctttaaggatagaggcactcccaaatatttgcaagggacat

SEQ ID NO: 815 - DNA, 651 bp, Zea mays
atttaatgtttcccaaaccatgtaaggatcaattttaaaagtcctttttaacttatatatttctcggtcatttaactaaggtaaagtgtaatatttatttttattatcaatactagatatagacaatatattctcatagatattaactttatttattatgaatattgtttttgagaaggtccaccataatgatttattagaccctcgtgtatcgctcaactattgcattgccgataaagtctgaatcatgattatgtgccggtgtatgtatgcattggactagtgttaataatgtggcggacggaagtggtcagccacgtaggcaaaatggcaaaagtgtagtatcttttaaactataatggcaaaactgttaagaaaaccgtaaacatgaattttggagagatagttcattatccccgtgactgtccttcccgcggctcacgccgttgaaaccagcctcatccagtcatccttcccgccttctccgtctgaaacccacctgctagacaagcagcctagccctgtgccatgactttatcgtctgtgccagacaagagacaagcagcctagccctgtgctatgccgacgctgtcaccgacgacacggcacgacctttgccttttcgcatctcccgaaggccacgccgttttt

SEQ ID NO: 816 - DNA, 782 bp, Zea mays
tgttcgcgctgctgctccggcccgacaagaagaacaggtacaggctgtactggaacatctaccaccactccgtcggctactccgtcatcgtcctcggtgccgtcaacatcttcaaggggctcgacatcctcaagccggacagcggctacaagaccgcctacattgtcgtcctggccacgctcggcggcgtcgcgctctgcctcgaggccatcacgtggcccatcgccatccggaagcgcaggcgtaacgccgccgacaaggcgtccaacggcaacggcaacggctggcagcagggtgcgtagggggccaggtcgatcgccgggctttgtgcgcgtgcgtgtgttgtgctatagttttgatgcgagagagaggtctgatatcgatgtgctgatgccgttgttcagagagagagagatcgttgctgatgtgtttcttttctgttactactgcctctgtagtctgtactcctacctagaagagtagctcctttgattttttttcttctgttttgttgttgaattttattagggttctatagtgccatttgtacacattttttcccttcttattgatgtacgtacgactgctttgattattgtatggtttcagtcagatgacacggctttccttactgctcaagttaaaaactgacagattgtcgttgagtcttgtggatgcatttctgtcccggcggcaaagatgacaccgaaccgaacactcgctttcgttctgccaactccaatcagcttgcagccgttggaagtttgatttgggttggtcag

SEQ ID NO: 817 - DNA, 771 bp, Zea mays
tggttttacatgggcaaacacagaccccctattcgactttgtgttgaacaactccattttatcagattttgggtaatcttacagagctcaaggatcagctgaaacttggattgaacttaaggtcatatgaggtattaatggttttgtttcttctactgaggttgcagtgacatatttaaagtgctccgttagctccaattcaattctcactaattgccgtatttgcagaaaatatatttgcaattcaggaattgtcatggaccttcggtccatggggatagttgtcttctccggcgaggttatacccctctgccgtaggcttggttctagggtagcagccctaggcgcttgagagggtcattgcaagagagagagattggtttgataatgatcttgcttgatttattctctgctgccatgcggcttataaatagccctatagctaaccaacttctacaaactctcaactaactcctactttcttggacttatctgctgctaaccaactctccacaattctctcatctcaatcttattctctagccttatcccagctcatctcaatcttattctctagccttatcccagtctggctgttgcctctcgctccctatgatgcccatgacatctccccctcccttgaggaccagctcgtcctcgagctgccatagacttacctgacacgacttaaggttaagccttttacatctcggcttacctttattatttaagacgaaaatacaaaataattgggaactaaaatataaattt

SEQ ID NO: 818 - DNA, 1150 bp, Zea mays
gtaagggatgctcccaaacgatgataacgacggtggcatgcttggagaaagtgactgtgatggcgatggagccagagccgaagatgaactaggagataaatcggagattttgtgttgtacgtacgatgacagctgaacaccctttactttaccaaatacagagtgattaagcccaagattcttcccatcaggttttccgatttactgagctatttgtttcaatctatctggtaaaagattgctgcttccatctaataccgatgccacaaatagttgctggagcttcaactgaagaaccaatcccattcctgtcatgggcatcatagggagcgagaggcaacagccaggctgggataaggctagagaataagattgagatgagctgggataaggctagagaataagattgagatgagagaattgtggagagttggttagcagcagataagtccaagaaagtagtagttagttgagagtttgtagaagttggttagctatagggctatttataagccgcatggtagcagggaataaatcaagcaagatcattatcaaaccaatctatctccctgcaaatgccctttcaagcgccctagggctgctaccctagaaccaagcctgcggcagaggggtataacctcgccggagaagacaactatccccatggacctgacacaggctggaaagaggattcaactcattgaacatgaatcatgtacatgaacaaacacatggcatataaatcctggaaagagctcccccatatgcgataaagtagacagacaaaaaaaaccacgcttcatctcttcataatagccatggttaagtctgaaacagcgcagtaagcgccggaaacagaggaacaagtgtcatttacaacctgatcaactgactgaactgatcacaggtcacacgcacagcagatgctgtggagagcattatccagaccaggacctagatctagatcatatttagcaccatgcaacagcatgactgagtgatgagcatctatataatccacattaaatcaaaggacagatttcggtatgccttctgacttctggatcccccgtgtgtcactcatgttccacagaagctgaatgtacccttggaaagaacaggtacatgtatgaattctcactagggcact

SEQ ID NO: 819 - DNA, 731 bp, Zea mays
actcctggatagttctaatgttgctgatgtatttaacatacttattttttgttgggtcaagtgtcatgtactttgcacgtacagcaaacctctctgtgtgcttaccctcattagagatgtagatcatgaaaggtatgatcgaaggatgtttcctcattagacccatctggaataattaaaaggaaatgtagaataatttgggcaagttaacaatgaatgttacaactaacaactccacttctattagcagaagaaatgcaatatagtgggtctgatacgacctaaaagaatcaatagctggaatgataggaaagaaatgcaaatgaatagttttctggaagcacataccacaaaattaaggcttaagtgaacaccctcgacaacaactgattctttcctatcttcccacgcagtaattaaccgatccaaactatcaatcaccatctcgctctgtgctttaaaaccttcaacggccatttgcttcttcccgattgatttcccatcaactttttcggtaagagacccacttttctcataatcaatagttgagctgcttgatacgcctgagcgtttttttgctttcctcctagcttttgcttcagcaactgctactggatcaagacattcacctgcatggtaagttgatgcccagagaagagggttttctttttcttcaacaaagcttcgcatcatgtgacgtattgaatctgtagaaactacagttgtaattc

SEQ ID NO: 820 - DNA, 781 bp, Zea mays
gaattgcctttgtccattgtgttagtaggagttggtgatggcccctgggacatgatgaaggaatttgatgacaacattcctgctcgagcttttgacaatttccaagtaagttgatgttgaacctaatagctcatgtctatgatgattgatgtcagtaagcatgtttgtgctttttgtatgttgagttattttcccctaacattgagaatttattgcttgtctagtttgtaaatttttcagagataatgtccaaaaacatggcacaatcaaggaaagaggctgcatttgctctttcagcattgatggagataccaccacagtataaagcaaccgtggaattagggattttggggtaagttttctttccttgaatcataccctcgttcttgctttgttcacttgttcattctaattgcttactgacttgtctcaatgtgctgcaggcagtcgtcgctctttcaagtcttctgacaaggttcctctgcctcccccttccggaagtcatggcgcttattcctactattcatctaaaggatttagcaaaccgagcacctaccctcagagttcttcatcctcatcaccctatcctcactatgaaactccacatacagccaccccagctgcgccttgagccacttatgacaaccaggtacaatttcatgcgccctgacagaatatttattctgcttgatctaagtctggcgcgtctcttacagggtatctgcacagcatttgtctctgatcatcaacttttatctgtcttctaggactgtcctatctg

SEQ ID NO: 821 - DNA, 810 bp, Zea mays
ctcaagttctgagtttctctcttgtcagtcaatggcttgggtaaaaattgtgaacagagaatatgaaagcctgacaaactagcaatgagtccattttctgaagataaacagcaaggaaaattctgaatcccatgtgtagaaacatgtaggaaacacctttcttgtttatgagtgataggcaaaattttggtcattgcatcctagggttaacttacagtcttcttttgcaggtcaaggacactcccacgaagtgttctgatcatagggacccaagcggtgatgataattacttacctgctctttgcattgggccggctcgccacactttacgtctctgtcgccttactcgggatatgttttggtatctcgctctccgtgataatctcaacctcctcagagctcttcggactaaagcactttggaaagatattcaacttcatcgcattggcgaatccggtaggcgcgttcctgtttaacaccctcgcgggatatgtctacgatctcgaagtggaaaagcagcacgccacaacatcagggtcggacgttgcatgtcatggccctaattgcttcagactaacattctgtgtcctctccggcgtggcatgcttgggcacactgctgagcacggttctcacggtgagggtccggccagtgtatcagatgctctatgcaggcgggtccttcagccagcccaggaaccccgcacattgacccatggcgataaagctgttttctgcatctattctcttacaataaatccagtatgacgtcggtctgaatagccctacaaaatgtttattgtaattcatg

SEQ ID NO: 822 - DNA, 714 bp, Zea mays
  unsure (1)..(714): unsure at all n locations
agtttgcaaggaagcattttggcagctttcgtgctgccctcattttctcctgaaaagcataaacggcacataaccttgacagcagcatttccttgatcctctcgatcccactcgtcttcatcttctcctgcttcctgaaaaaagggcagggaccttgttgcattagaaaattgataataatattgaagtatagcatttgatattagattttttgtatcaactaaagatgcaactaaaaaactaaatatatccaattagctagtaaaattgtgcaccactgaaactttccaagatgatgagaagcttgtatccaaggattaagcattagtacactatctggcgagtcaaaaaaaaaaatgacaccaatagtctattgtagaaaattgataagatgctgtttagatgaaattagagttccctttgacacctaactaaacagcaagagctagaaaataacaaactagttattaactcatgtatctaacaggggaagctaggctacccacatttctgcatggtaatcatacaagcatacagcaccgatcaaaattagtgtataggcaaaggcgcaaagctccatgagccacaggtctgtttccaaagcctangtacattatacagggttgtttgtatcataaacctacatggacataagttatataaccccccagctctcctaatgaactgctttagccatttctcaccagtgaaggc

SEQ ID NO: 823 - DNA, 794 bp, Zea mays
gcctgcagttacatcaccacaggctgccatcttccattgttgtcgtgtatcgtagtgtccaaaaatcacgtgcagggactaaagttgttggggcatacatctgcaataacatacaaatattaccatccacgtaatgagtcatgcagctcaccagaaatgctgaagaaacatcaacaatgaagcaaaataaaaattgcacacctgcatgtaaataagttcaattgttcccccatttccagctggaaaccttgtaaacacttcaagacttcggcaatcacggaaccaagagggacgatctttcaagatctctatgccctgcatatcacagccatatcaggatcagataatttcttgaaagtaaatgctaaaatttgtatcaactattgattgatacaggaaaaaaaatgaaaagtatcctagggcctttgtaagctcatataaatgatccaagattttgttcgggactgctcagatgtaaggagatatggcataaataaataattagatatataacagtgtctaatcatatccagaagttacacagatcacttgcaaatgtacatcactacagcctcggtcggtaggggaaagaccgccccacagtattataataagaagaagctcaatcagagccctgaccgagaaaggtcaggaaagctagtccctcgtgcaacacgagggtccgctcccctataggccagatctttactcgtgctttgagccctcccagcccctacacgagtaattgccccccataggtcagtccatctcatgtgcacacgaccaggggaacc

SEQ ID NO: 824 - DNA, 739 bp, Zea mays
gtgaatcttaaaagcactgaagttatcgaacatccatatgtccaggtaatagcagttcaactgctccagtttgactaatattccctgttttatttggagtgctaagtctctcttttgctcctattcagatatttaatgaaggacatcaaaatgttcttgtagagatgttggaaatcataacagtaatttgtgaagagctcaaactacccatagctcagacttgggtgccatgcaaataccaaaatttattgatacattgtggtggtgaaaataagagttgcttcgatattcatgaaagttgtgcccaagaactatgcatgtcaacaagtgctgttatgtttcatattatcgatgctcatatgtggggcttccgagatgcctgtgtagagcaccacctgaagaagggacaaggggtttctggaaaggcttttatcctacgtaggccttgctttacgaaagatgttactagattctctaaaatggagtacccccttgttcactatgctcgtatgtttggattagctggctgtttttcgatatgcttgcaaagtgcttataatagaaatgaggactatgtattggagttcttcttgccacctgattgtagagaagatggtgagcaaaaagttcttttggactccatcttagctctgctgagacagtatcttaatagattgcaggtagccactgacgaaggctcaaatgaagtttaccttcaagtcgatgctattactataaa

SEQ ID NO: 825 - DNA, 746 bp, Zea mays
aatctccaatcaaacacctatccatgcagactcagaagcatcagttccgatctagcacatggccatggcgacactttaaaaagtcagctttagcattactagagttataacttcctcatgtgcatgatttctacattaattcaatgttggatgcagtgagtttctaaaaaaaaaagaaccatagtagagatatttctaacatggacaatgtcccgacatcataaaatattttgatataggtggcacacatagaaaagaaggcaggtccaatgggtctatagaagggataaaccaaaacaagccttccccttgtatatgcggagaggttgcttcgaatccacgacctggtgactcagtggcatttgtataaaacacaaccaataacgaaagcatgtttaagaaactaaaaaggcactggacaatttttttgaaagcttaaaaatgtataattatcacagtaatcacctcttggttgatatcaatgccaatttcatcaagtacttgattcacaagctcctcagtttcttcttcttcctcatctccttccaaagcatcatctatggcatctcccatcacttcactcaccatctccatcctctcgttctgtcgctcaaactcttgcattatcctctgcaatcctggtagatttagctgcctgttcatttgggacattgcctttgtgacacccttcatggcatcacccatagcttgagttgattttagtgtctgcaacagttgcgcatatc

SEQ ID NO: 826 - DNA, 753 bp, Zea mays
gaaaattgtacattgcggtcggtagagcatacaataatgcaaggagccaggagatcctgacatgctacattcaacaagaaccactatatcagctccggtcctacatttatcatcacggcgacctttggcacctgaaaaatacctggcagcattggacggatcacatctgcatgtctattgtaagagaagatgcggtggctaccttctcccttaggttgaacttccttgctatataaggcctgacatcttcaacgccgaccaagctttctaagaacgggagcaatttcagcagctccatgtcattgggatcatcaaaccagctttctataggaatgccattgtccaactggaacccaaaggcctgcaacgaggaaagcggctttacatttaaatcctgccaaaacccaacaagtgaacaactaaaagctaattcaagatgaataatgcagatgtactgataacagctgcgcatgatccaaaagatcaatgatgatggatgatagatttcagaactacaaaggctcctgctactgctaaaaagtaaagacactcacactcagcatctccagcacatattaagtcaaaagatgatttgtcatgaaatgcacctagggactagccctctatacagaaacagtaaaaaagattctacttatttgttcaataagatactacttattagtttatattagctatcccaataattctgagaagctatgtaatgcccaggaagtaccatgaaccacgacatgc

SEQ ID NO: 827 - DNA, 740 bp, Zea mays
aatgtctgctgcctctacaatgcataagtttaaagcacgaatccatctatctaagactactaattagggaacaagcaagcactgatctaattttgttgtcttagtacaattttcttgcagctatgggctggtatgtgttataacaagataaactccagtgctccacatgttggctaaatctagcagaacagaaggcgatattatttttgcaggctgatgtatttgtacgatgaatatatcactatcatggtatttcagaactcagattcatcatggatgtagatcttggttatttatgtaaactagattgtttgctgtatggtagtaatctagcacttagtagtaccgaaacttccctagaaccatgctttggtccacaatgttggatttatttctctttctcttgtctaggttctattactactgccagtttgatataagttttaaagtatcattcatttcttatattgatgttaatttcatgtttgtcttgctacaatgtagagacacttgtacattcaactcttgaacactgtgaggatgctgatttcacatttccagttcattttaacttcagagagcacacaatatatgttcgatgccgcccctatctcaaggaattcttggatagggttgccagcgtgtttgagacaattattttcactgctagtcaaagcatttatgcggagcaacttctcaatgttcttgatcccaaaagaaagttgttccgtcatcgtgtc

SEQ ID NO: 828 - DNA, 729 bp, Zea mays
cagggaccagccggcgagtgtggaggacgtcatgcccatcgccacggggctcgagcgggaggagctggaggccgagctcaaggtgagatggtccggtctttgttcgagagggaggagctggaatgcacgtccggtgtgggcctgtaaatggcttctgattcctcgatctggcctgggttttgcaggggaagaagcggtttgacatggatcccctggtcggccccttcggtaccaaggttagttggccgtagtagatttaaccgttcttcctgatgttcctggatcggattacacatggaggctttctatgtttattataaaataattagggttcttcatttattggtattgcaatgaaacgtctggggatgtatagttctggtaatgatttgataacatctgggttattgggtaaactactcgcaagtggtcagatttgcattgttctgcaaactatttgcattattgttagggaaaatgcactatgttgggacgtcatggtgcctgatggccctcatccatcagtatccatgctttgttgtcttacactcttactactctgctaggataacgaacatcaaccctgtttatgatacattgttctgataatttggcatcatgtttctggttattttttaaaaacctttttcatcttgtctactgtgccatgttttctgttgaatgttgttactactgttttatgccactattcaaatcattcactttctt

SEQ ID NO: 829 - DNA, 733 bp, Zea mays
tggtgggtgtggggagagatgtaacccgcggcggggtttgagtttgtgcgtaggtgcggcgtcgcttatgagcctgattatgtgaaattggtgcactaagttgtgtgtcaaaaacaggtggtggacttctggatcgtacttagggatttgcccgaatttccggtaaaggcaagtaaatacagtggtggttgctaccgttgggtttgcatcctattccctgtcattgagtatgcataagttttaattatgttaatcattgaattctatgatgaagtttatttgtttggaagtattaattctcaattgtctaatattgtggatgatcataatttgttaatgatatatgtggttgattcccaccttggatgaagttgaagtatctttttgaatcacgttatatgaagtgttgtaggcatgacatgcacatcgcatcatccatcttgcattttgaagttatgtcgtgatcttatggtccgaccgtaccggtacatttttagcatcgtacgttgcccgaggatgggtacgatgcggcttcatatcctcagaggtatgaaggcagaagtcatccttgcatttgcagacatttgcactcatgaggtatatatatatgaagtgtgacattactatgttactattgtggtttctacctgcgaggtgtggtgactaggtgtgttgtacgttggatacgtgctgcacctttcgaataagaaggttgtggaaatcaagtggtggt

SEQ ID NO: 830 - DNA, 819 bp, Zea mays
acctgcagttgggtttctgggatgagatgtgtggcaactgggagctacataattccatttgctgttaacatgctctgtagtataagggtttttgatcttgttaaaatttgaaataactacgggtttgttgaaaagaagtaaacaactttgctttagggaattatgatttgtggtttgtggttaaagcctgggaatgagggcaattatttgagctaaactgttggagaatatgttggttcagttaagctgagagctaactgtggtggttgtcatttccttttctcttcttctctatgcctgtttcctttatgtattctcatctttttggttgaagtagtgtaattattgttcatttgtgcttgaaaacaggagagtttggtagcgggtcaatggttaggtttggcgatggtgggggaggatgtgctggaatatcttttttatgtttcattcctgtagaggtcgtctatactctatattcatttattattcataagtcagaattttgcatcccaaaaaatttcaacaaatatataactgtttggtttggtgaactctatattctgtggtggagactacagaatgactattatagtagatgggtaagaaaagaaaaagaagatgaaatgattactttggtatttcactattgtcacatctcaatattcattacataaccatcattttcgaccttaattatatagtgattcttataaaaaaggataagcatgcccatttatttgaccatatgaattattcagtgctggcttttctttctttttctaggtaatcaatatgggacaaggtaatatttggatattt

SEQ ID NO: 831 - DNA, 871 bp, Zea mays
  unsure (1)..(871): unsure at all n locations
cttgcatgcctgcaggggttatgaaattcatacttagtcaatctattaaaaaaacagacaccgcacaagaccgatccttttactggtaggaaaaaaaaaagatttagaaacctaccctcaggagaaatatgacacactcatcaaattgcttctcaatccggtcgatttccatctcgcatcgtgtcctcacagctgaagccgtcccaccggtactgagagtttgttctacattgtggaagtccagtgccaatccaagaatagtcttaactcgactggcaatgagggcccactgaaaaaagcaaccaatgtccatccttatccaagtctaaatatcaggatggtttattgactcataacaacatggcaaagatgcttaccagcttatcagaggccacaaagcattgtcgttgaatagaagagagatatgcctcgtgaacttccatgacttcatccagtgtggtagcagccgtcatgccatcacaaagctcagtccatgcactatgataaacctactcaaaaaaatggcatgagtacgagacagagagtgatttaagggaagaaagtgagcaaacatatttcaactcactcggtccatgacatactgatgaaatgcatcgacaaaatggaggagcttctgtgccactattaggtgttgtttgaaattgtgcgcggtcctgcctctggcctgccaacagaagaggattgattcatggaaatttaagtgtcatggtgataaactaaaccacatttaattngtcaactccccacatatatcaatttatacaattcccagctttgtaaaaaggaagttcataacaaaggatgctatcagatggtgactaaaaacaccaagtcgtatgtatcattacct

SEQ ID NO: 832 - DNA, 767 bp, Zea mays
aagcagaacatatagagcactgtactagtagcagactagcagcagcatgtacatgcgcagatcagatggatgatgaatggtcaatatcgtcgtgttagtgatctgattattattgtatgtgaacctaatggagtgattttgatggtccatgttttctacagatttgtggcggctaagtaaagaaactaggttttaggctttgattttccttgtgagatgcatgtgtgctgtgcttgctgctgggtgagtgattggttcttacggcggcgggggaaggggaacaaaatatctgcgctcgggccgcattttaaaggcgaaaacaacgagcgggggaaggggatcatactactacgcaagtacgcaagcatggtggtttggcttgcttggtcaccgcttgacccggtccctttaggctgtagagtaacccgcttcgcttgtcgccttcgtgctcggttgttttctttgcgctaacgagcttcactcactgccatttcgacttcaaagaaagcaatccttaaggccccgttcggttgcaccggaataagccagaattcattccagctcactaaaatctatataaattagagaaataatccagctagaaattaatccagggctctaatcccaaacaacaacccaacagggcctaaggacaacctcaacctgtggccagcgagcaagtcctaccacaacacaaaacatgcgtctctatgctcaatcttctgcgcgccaatgcgaaggaggggggagctcaacgcatattgtgc

SEQ ID NO: 833 - DNA, 759 bp, Zea mays
atctccgggtgaaggcactggaggaaccatgtctgacgatgaagataaccaggtggatagtgaagccaacatgttcgatggaaatgatggatcagacggtatgggctttggccccctgatactaacagagggtgaacggtccttagttgagcgtgtacggaaggagctgaagaacgagcttaagcaggtaactctctttgaaaatgcttaattcatcatcgtttatagtgcattgttgactaacaaaacgtttcctacctctagggttacaaggaaaagcttgtcgatatcagggaagagatcatgcgcaaacgcagggctgggaagcttcctggagataccgcatctgtactgaaagcttggtggcaagctcattccaagtggccgtacccaactgtacgtgacaccgcgtcaacttaattccctcgttagcttctgctatcaggttcggctcattgatgagcaactctttgcttactcgtccaggaagacgacaaggccagactggtgcaggaaacggggttgcagctaaagcaaatcaacaactggttcattaaccaacgcaagcggaacttgcacaggaacccaacatcctcggctgaaaagacccagaagaaaaggtatcacaatgaaaactgctttggtgttgccctaaagcggtaagccccaaaacagggctttgcccttgcggctttgccaacaattttttttttttttacctacttggtttttcaaaacaccgtggggaaattgggaaaa

SEQ ID NO: 834 - DNA, 797 bp, Zea mays
catgcctgcagctgcacgggctcgacgccgtcctcgtcaccctggaacaggtgcaccggaaacggcggcttctcgaggtccgtcggctcgaagtccgtccacctcccgaacatgaccgtcatgtcgcggtagaaggactcctgtaccccctgctgcgtcgccagcctcgccctctgcaagaaagaaagatcgaagtccgtttcattgtggtgggagacagagagaagctaactaaggcagggcaaccgagcgaggggagagacgaaccgagtggaacatgccgttggagagcgccatgacgcggttcttctcgtccagcgcgttggggaagggcgcggagccgtcgacgacggtggaggtgggcagccacggctggctcatccaccagtgcagcagccacggcgcgtagtaggcgacccggagcgaccactggtcgccgaccggctgcctcccgtagagctgccgggccagcccccgcggcagcccgcgccagcggtagttgatgaccggcgccatcattgccagccccgccagcctgtgcgggatgtacctgacggcggcccaaccggcgtgggaaccgagggaggagcagacgaggtggaacctgtcacccagacccagcgcttctgccaggtcctggatgttcagaggccggctcttcggtgaccgccgcggctccgggtcgatcctcgcggacccgggcggatcaacgccaccctgtacccgccaggttttttcaacaatttccgcttgggttccattcgagccctggggtttacctccaaatcggtccttcc

SEQ ID NO: 835 - DNA, 485 bp, Zea mays
ttctcggtgaaggcgcgcacggcggccttgggcagcgccttgctgaggctgacgccgaggcggccgtcagcgtcctcgcggtgcacgacggcggcggccagggaagtaacaaagcgagggtacgacgggcacacgaaaaatgctaatgaccatcaatgcagcgcgatgccattttttcaaaacgggcgagattataatgccacagattcaattgcgacgatcgcggtgccaataatctgaagcccgccgaagggagtgccatggttgcaaaattctcgaatcacaggtacaacccaaacacatcagcggacacatctcacttgacatgcaatcattcgcaactttacaccgataatgaatcacgtcaggattagttttcgacatagaacctatcttacgcaacctcggacgctgccgtcacaacgaccacgaccgtaatacgaactgagagacccagatcgggggaaatgaaggggcacgaacct

SEQ ID NO: 836 - DNA, 729 bp, Zea mays
ggtttgtattcttgttattcagcagtgtaggactatgttagctggacctacaaaagccaagactgataaaccactgaatgtcttcttgatatacgattgaatgaatgcaaatagatgcacacgtgcttaattgctaaaaaagaaacgtacaaattaagaagtgcaaacaacaacatctgctgcccttcattacagtttagtgcagtattgtgttatactgttatatcaaacttctgttgtacacattgtgttcacttttatgcgtttcatttcgagaaacatcagcaattatcatatcttaacattctgaacgatttcctgaaaacttctgacagttatagcaaaagaaagaaaaaacaccttcctatcagaactggagatgccatctcatcaagataaaaagaggaatacatcttcaaatttctcaaaggtacctactgcaactgatttcttgatgactcctttacgtggacaatatggtgttgatgtctcactgccatgacatttgccaaactagttaaaggaacataccacccactttccacatcgacatatattgattgatgcctgggaaattttttatttcgagttggcatgaatctcaaggtatagctgtagcacagtaccttgtatgcacttgaatctcatccttgtaatattattatggagaccaaactaaattgtgcactccctttggtaaactattttgcggattttttccctacatta

SEQ ID NO: 837 - DNA, 713 bp, Zea mays
agtggtcctgatgatccatcttcctttcgagctagctttgcttcggttgtttggttcttgctacttctgtaaacatagtgcttaatcctcttccagcccttatcctcttcgatcttagccataatacacatttgccaatcaatatgttggccaataatggggagcaacgtacacaaacaagtagctagcagaacatggagaatattttcctctttctcacatttgtgcgcgcatgaatttgacaaacaattggcagtccgtacgtgtgagtagtattattttgtgtgctgagattagttcatggaataatcatccacgtgtcgccgtggtcatcattatcgtcattcaacaaattggagtggacgggcatacgatataattttctaactataccaagataattatcagcggcagcaagtatgcatgcatgagaatattgatacagccaataatgccggattcgagcagaaataatattaattaggttacccagagagcttaattttggacgattgttttttaaagtttttttttaaaaatatataaatgattttttaggttgagtgtcatgctccaaattaaaagctagcacatgattattaattgtttctggccatatatacgcacatgcttgtgcggttgtgccccagaaataggatgcgttaccaacaaaccaacaagggacgaaactgcccgaaactgggagctgtttc

SEQ ID NO: 838 - DNA, 719 bp, Zea mays
  unsure (1)..(719): unsure at all n locations
agatgctatgatttctccagcttcggcgactgttttggctgctgatgacagtgaggatggtagaaatatggagcaaattgtcatgaagatctcttcagggacagatcacgttggtcaggacccagtcattatcggggatgtggcagatgctatggtgtcgccagccacggcaataacttttacacatcctgatcctaatttgggtttggttgagcctactgcggctgtggcagacattctgatgtctccagctgtggtggttcccagtcttctttcttcccattctggcgagcaggaggcttcccagtctatgcagagagaagagttccttaaatatgttactcgacaaccttgtaaattgcttcctgctcctccagtcatcttgaagaagaaggataacataatgccctccagatcggtaccacgacgcagccgcaaagttgctggagtaggggttgaatttaatgcctctgatcttgacagacgtgctaccaagaaaatcatgaaggcagttggcataattgctgataatgtaggaattgaccagagggctcaagaggagtatgctgatcttttcaagacatctttgtctgatattcatgtaaaagcccttgcaaccttgtttggctggcagcttcctgaccacttgtnaggtctgggattggttctgctttgttttttccatttggtttgtctcatcgcccttgtgtcaatgaatc

SEQ ID NO: 839 - DNA, 810 bp, Zea mays
acggtctgctgtccaacatcttccaagatcagcaagccatagaaagaatttacatttgggaggagaccaagtttttcaaactagtgtttttgaaccttagaagcgaatctagaaaatttgggctcctagtaaaatgcaacattcttatggcttgctgttcggaacagggttgggagtgcattaatataacatagttaggtgggccaaggcccattacaatagaggcattacaatagagcatgtggttacactaacaggtggaaacgagcagggtaatgctggaacagtgatggcacagaaatgttttttgacgttgacttaatacgttaagtggactaaatggaggtagatcaagcaaaatttcaagttacacaatcaggggcaatgatgcgtggtcgaaaaatgaggccaaataggtagttggagttcaaaacagggacaaccatacaattacccatcatattttgacagccccgaattcgttttacattttaccttgaaggtcggtttcccaacaaggcctgagagtgaggacttggcgctaaggtaaagagacacatgaatctgctcagtctggaagctgcaagggaaatagaatattggtgaaaataatatagaaatagtagagcggattctattttctaacatagatgaatataatcagatatataattattaaaagtgtaaggactacaatatgtagtaaaaattctaggagtattgaaatagctagcatgtgctattttagacagcttagggtgggatggctgcacatgctttgtgccttgtgcgtctggccctggtttgggt

SEQ ID NO: 840 - DNA, 926 bp, Zea mays
atgcaggtgccttccttacctctaaaatgtacacccaccaatagactgtaatccataatcttctcctgctcgaggaactcacagtccttgtccacttgcctgctttaagatatttaacgtctacattagcacaagggtgaaactaacaaggttatggaccactccttaggtcataatggcatgagatattcacacctttgaaactcttggtaccattgtttctgtaaccgaaagataaagttaagatcaaggtctttcagagttgtatactcatcaatttctgctggtggcttgtcagttatacggccaagagatgatcctttcagatcaaatcgcctatggatagtatgatcagagcagaacaaatttcccattatcacaaaacgaacctgagtagtaagtacggacacataaaatcagccaaataaaatgatgcttcaatactaacatgttctgtttgacaattgacaagtatgaggcatcagtatataaaactggaattgcgagttatcagtgctaggcgtacggtctcccaagccgtctgttatgttccttttttttactctttcgtttctgtaacctacaatattaatgcatctcgtttcacgctattagtaattgatccaccgatattcgttaaactcctataatcgatcacaaggtagatatcttctcacatgtcatatacatcgagctaaccgcgcatattacctggtcttactgagtaataatgttcttatagtcgttaaaacactcctttataccctccttttatccactctatttactcttatctcacacttctctattattacatcggtgtcatgatcttcaaattcgtctcatgtctcctatgtctgttactccatagaattcttgcctcaacgattttactatcatatatattctttaatcattttcaccat

SEQ ID NO: 841 - DNA, 799 bp, Zea mays
tgagatctgtgcatgaatcttagtttctggtgctctgaagtcatgggtttggctggtagcctgatacagtatacacctatttattaagtgtttacacagttttttgtccatatgatgcacagggtgagtaagctctttttttttaataaggaatgtgtaagctctttacatgctcatctattgatgacttgaatataacaatgaatcacaatgattgtttgtgtttatatttgtgaaggttcatgttgttaatatctgatacggaaacatggctgagtttcgtgttattttatctaacttttggttatctgaaagtttatgtagaggacagccctctcattcatcaggctgaatatatcatagttcagtgatagcaataattcttgaaaactaaactgacttaactgtgttgtacttctgtagagcaaatcctgtgcaggcaggatctcaggctgatttctcccagtggttatgttatgtccataacgtggttaatcgaaggtgagtccatacagccaactttgtgcagttgtttattgttgcctttgaaatcctctaaggcattgcaagtgttgaatatgtttatatagaatcataggaaaagtaaggtctcagggccaaaaagaggaaaactgaggcacacccttttactcctacaataaggggtatgtcagtatatgttcataagtgtggatgtttccattctaataccatgatttgcagaattttgagcttctggaatcccctgaccagcttggtcttaagtattttctatctgaccggtctgggttttttcttg

SEQ ID NO: 842 - DNA, 873 bp, Zea mays
ttgcatgcctgcaggtcttttcgatcaaagttgcagggatagaggggggtttacagtggccactccatgtgtttgggaaggttgccctacgcgacgcagttgatcacaatcgcaatatggtcttcgatcgcactagagacaactgccaaatccttacaaaagaggtttgtgttatttcttacttttcgttcacgtacttgttcgcgtcttgctgtgctgcctaaagtagcaattataattttccaccaactactatgctttccccacgcgtcattgctatgacggcatgctttcattacaaagcattcttagttcttcgcataggccctatctatgtaagtataatttcatcagtgaacaacttttattaagttgcagagaaaacatgtcattacatgttgttttgttttattaaaactcctcttttagaaatgaccatggttcccctgtgtggaactgccatatctatacatgcatcggtggctcggtgcctttaggctgtctctagcagcttacccatcgtatctcttatcccatctcctatttcaaactccactcttagactgtctccagcagatcgcacatatggtaagcgatgtgacgtgagaaattggataggtataagattcagtcatgcctgtaggtatgatcttaagagactacatgcatgttcacaaggaaattagcttcttgaagtcactctgacttattaccaattcaaaattggacgctctttattttactcacatgaaataacctggtgttggaacccatttcaaatttttaagttggcccactttcccaatataatttaagggtgagttttgatggaatgcccccacaatggaacccgcttatgtgaaaaagtgtttt

SEQ ID NO: 843 - DNA, 798 bp, Zea mays
agcctgggtacgcacggcggcgatgaaggcaagatcgccgaagggggcgaggccgtcgaaaacgcggtcacataggcggcgctcactgggaatcagtatgcgaaacaccatgttgaacgccgggatccagcgggcgatgtcgaactcaagctcctcccagggtgaggcatgaacctcctcggcggtgcgggaacggacgccgaggcgcgcaacgctctcgtcgacgaagccgcggcgcgccgcggcgtaggcctcagcgcactcgcggccaaagccggcgtccaccatcctcctggcgatctggtgcacgttggcgatggaccccggagagagagcatcgatcacgacgtcgtagtccgtcaccggcttggcgatcgggataggctcgtcgccgtagccgtagccgtccccacctccgaagtcctcctcctcgtcgtcgctcccgtccgacccgaacccgcccggcaccacgggggcggcggcgtcggggcgctctatgagctccctgaactcatcctccagacgcgccatgcaccggctgagcagctcgtcggagcggtcgagcaaggcgcggttggtccccgcggcgtccagctcctgcacggtgccgatgaggtcgtctaccgcctacaggaacgcgtccgcgttcggcggagtccgcccaaatcagccgatccatggccacgaactgcgagatctggcggtccagcgtgcgcacggcccgctccatcgacgtgaccagcggcctcggtccagcggccgacaccgccgccgcgggaggcggtggcagcggcggtg

SEQ ID NO: 844 - DNA, 788 bp, Zea mays
  unsure (1)..(788): unsure at all n locations
gtcataaaaatattgtgcattgcgtgaagtggaatcagaatgggaactgggtactgactgcctcgaaggatcagattattaaggtctgttccttgttcttttgtactttggtctgtttttcttgtcttcaaagaactgatggcagtgtacacgctataactaaaattctagtgctgtctatggagatgggccaatccatccttgtgagcaaatgatggcagtaaattattaacttttggtacgtttgctaatgctatcactaattcgttttgcagctgtatgatattagatccatgaaagagctgcaatccttccgtgggcacaccaaggacgtcactggttagatagctgttccaatatcaagatttttataatttatataccccttcacatattttaagcttcaaaaattgacacaagttttggatgtactagttcatttgttcattgtaaccatacattctatgattgttagaacagtggctaaaaaatttctagaaaggtatggtgcccacacttgtttgccaaggttgtactgaatatgtattcggttacttcatttttacagcattggcgtggcacccatttcatgaagaatattttgttagtgggagctttgatggagctatatttcattggttagtcgggtaaggtatccatagcataattgaaattactgatctttgtcacccttggaatttgctactttgtgctaagttattcaattcttttcaccctacaagatcgacgtacaactnnttatgtcttttgttgtctgaaaataatgg

SEQ ID NO: 845 - DNA, 750 bp, Zea mays
tgaggcaatcagtgctactttagctgctgtaaaggctaggcaagttaacggtgagatggagcattcacctgacagggaacaatctccagatgctgcaccaagtgccaagcaaaattcaagccttataaaaccagatcctgctcttatgaacaattcaacaccaccacctggggttcggttgcaccatagagcagtgagttgaaaaaatagttcattttgctgcttgttgtttaaatttagttattctattcttatttagacattcagtctgtttaacttagaagtcatcacatttacatgaaaaatgctcttatttgttttgatgccagttacatattttggccttgtaggttgtggtagcagcagaaactggaggtgccttaggtggcatggttagacagctctcgattgaccagtttgagaatgaaggtagaagggtcatttatggcacccctgagaatgcaactgcggcaaggaaattgctggatcgacaaatgtctattaatagcgtgcccaaaaaggtaatctacatttttctactattgtaagattactgacaaaagcaacacatgctagaaaactgaaagagttattatcataatggcttctgctaaaaaaacaagcacttcatatgatgacattttctctaagatgtagatttctatattgatttgttataattataatctgtggcccaataattcaggtaattgcttctctgctgaaacctcgtggttggagccccctgtg

SEQ ID NO: 846 - DNA, 856 bp, Zea mays
tgcagcgaccgtgacaaaaagaacacacggccaatataacgctttagcaaggccatttcttccaactattattctgaaagaatgaagtaataacagaaaatggatcaatcaattaatagaacaaaccataaaaacagcttgtttgctcagaacagagttactgtgtgtcgataaatagaactagcaaatgcagttttgtcagcgtaattcagtaattgagtcatgagtaatcttatccataaaatacataacctgctatgtcaatagaaacagaaaccactgttatggtaaaacctgtagccgcattgtaagtacgagtaataatgatctctaaattttatactaactagtctaacacccgtacattgcgatatatttgaagatattgattgagtgactaagcgacacttgagagtcttaatggaccctccacataaaaatatccataataaatgaatttaatgccaaagtgaacatattgttcatataccatatgttgaaccggtaaaacaaatattacatttgatcttagctaaaagactaaaaaatgagttgaaaaggagcacctatactctaattaaattatagccaatgttttagcttatgacgagaagatggggtagaaccaaaatcatcattgagattccaaggtaacacatgcaaattcatttatggtgatgacttaacaatcttctctaagtttagcaagatatagaaaagcccaagcacgccaacaaaatacaagtttatcctttaatgcttaacatgtttactaaaatacatacttgttcttgtctttagagtatcatatcaaacaataaaaatgtaactacctctgcatggatcagaaacatac

SEQ ID NO: 847 - DNA, 524 bp, Zea mays
atcaacaaaatcacatgttactttgtagagcgctctgccccgcagtatcctgcacagccaaaagtaatgagttactacaggtgtaaagcaggtaatccagtaagtgggataacaactcaagaacctttcttgaggattgccatgaggaaactcccggcaggactgcaattcttcattccagtctctttgcatgccaattaactcagtgccatatgacaacacaacagaatcttcagccctggctgcatcccttctatgctctgttacatataagaatgtgtagtgccttcagttctcataacagattgcccatggtacgtttatactttataccaagattgggagatcaactatagcattatcaaatatcatcaagaaacaaaattagaagtgtaaggtgttccaagccaatgtaaagaacaagctgagaagtaaacagtactgctgcaatgcctttgtagtttatgaagccaatagtataagtttaaacaagatgaacgcattggcatattctgtttagcatc

SEQ ID NO: 848 - DNA, 467 bp, Zea mays
agacatgagtgtaagtcatacataacaaatattgcggactaaaaatgctggtgttactccctccatcccggaatgatatattcatgtaaaagtcaaactttacgaattttggccaacaattattcaaattatataaaattttaaggcataaaaaaggctttgatggattcatatttgaattgcctctgatctgatatcggaactctttagcgaacgaaaacatacagtaagaggaattaatggtcaaaatctaatttgtttgacttttcctgatatgattaattgattatcattccaagacagagggagaatattactccctccgtcccaaattaaaattcgttttagatatttattagattcatacgatgattaatgtatatgtttggtatatatgtctagattcatcatctatttgaatatagacataaaattcaagtgctaaagcgaacactaatatgggacgg

SEQ ID NO: 849 - DNA, 744 bp, Zea mays
tgcatgcctgcagccttcccgttgtgttccatttgcttcatcattaaatatttatttattgctcatattatctagttaattttattttataactgtataggaatatgtatatggaatggacccacaccacatctagatgcttcgaacttgtctggatattatgactccggctgaatatatggtacatacatgatttccggtttgtgtgaagaattatgttatgaaaatctttacatgcaggggcggagggctccatgtggcgaggtatggcccaagccataccttggcccagcccaattagcatctaggtaagtcgaagacctacgtctgtgtcaagcatctgtgcatctgtttcttcaccgccgctcgcaaggcagtccgcacgccgctcatcttctctacgtagctgcgctcaccggctcgcatgctcgcctcgccatcgctcgcctcgagtccgcctctgcgcacacgccatcgttcgactctacacgctcgccgtcgctcggctcgcgcgcacacgcctcgaatccgcctctgcgcgcttgtttggggcgccgaggtgcctacgccggcggtggcacgacttcctaaacgggaagggaacatgccaaacacgccccaaattcaacataccttaaattctatccggccttccggccactatttacatgtgcttggatagcatgattgtaaccttctattgatatgtggtccactcaaaatataggtctctatttacataag

SEQ ID NO: 850 - DNA, 846 bp, Zea mays
cggtccccgcctttccgggtaaacccgacctgcagatggcagattttagtgtgagacttgcatctgtttcacttgatttcttgtgtattttaaaatactaaaaacagaagaagagaacgcgacaaagatgggcatcgtaggcatcgttctcggtctcgttcaaggggtagagatcgaagatctaggtcacgttcaagaaggtatgaaagtgaagtccctaagtaatatattgtttacattttggtgagattgatacctaaataaatatccctgctcccccttcccctcctttatagttattatcacgttgaagttggtcattgtaactagagtacctgtgtgtatttgttgttttgatgtatattgtgtttttatttttcaaccaattctcgtattgacccttatccttttcaaaacttatttgagggatgttttgaatatcctaactgatgaagatttagtagatgtcatctatctctttgttatatgtgatcagttttctcatgtgttgtcatagttgtatgagctctctccctcccccacagctctcctctctctctctcgccctcgccctacctcgcagctatcctttctcttctgactggctgactggggccgtgtgccgcgccctgcgtgccgctgcctcctctgttttttgcccgtgccttacttttgcggcagggcggcaggacgccttaataaccttatgtgttgtttaatttccactttatacctaagattttgactagtaaatagtaacttgatacaaatctttattgaaatcaaccaagcgaagtttagtgggaattcgaacgcccccacaccccggaaagccaatgggtttaa

SEQ ID NO: 851 - DNA, 515 bp, Zea mays
catcaataaatttctagtaggaagcataatcaattagcaatcagtaaggtattggtgtattgctcctaaaaggctgtatagatcaagaaccagctatgcagtaatcatgtcaaagaattaacaacatacgtgcaagaacaaaaataaatatgtaataatcatgaagctagtaacctagtactagctagttgaagatgaacatgacgatatcaaaccggcgcactgattcttccttgtacattaaagctatagtaggcagctcattccactggtagaagtgaggcaagtgacccaagattggccttgttaccatacatggttgccttcttaccatacacatacacaaaacagacaaacaacaaagaaaaaaagcagaaaattttgctcagttaacagaagtaatggtaaaatggaaacttaaacttatttgtaccagaagaaattatcacacaaaagagagtatccccggtggatactaatggggtgcttctacagagaaagcagtcacttgtgtc

SEQ ID NO: 852 - DNA, 785 bp, Zea mays
gggatcctctgagtctacctgcagagtagtaatcgtctggcgcagcattatagacagtcaatgcaaggctggggtagcgaatcacttcctgcattggctgaaaccctgagcgagaggcagaatagtctgcacgcatactcggaggcccggcgcagaccgtaaagcagtacctctgttgaccagcagcgtatgcctctttactgtgaaggcacgcataggccgttgagaatttctagcggataaaatgctattgaaaaacaggtataagcagagcacttttggaagattcgtccactgcatggtttcgttctgctccttgcgttacgttcggagacagtagtccatactcgtattggtcaggaacaaacagctaggggtggtatcatctagatcactgaacttatatgctaacattagtccgaacaagttctcttatcctgttaccccggccgtatctctcctgagcttcctatctcccttctcggtaccggccctctatctctcctgaacttccagcttcctatctcccttctcggtacaggcgatggcaggctgtgcttggaccagtagtaagtagcctggcatcagggaacagcgcaacaggttactgctggctaagcatttcagagaccaacagtcctttggaactgcataaacctatgattgcgcgctaagcatttaatagactgggaacagcgcttgggcagcacaggttactgctggctacagcatgatgcagcagagattcccttgacaaggggaaggaatggtctggaagtgcaaca

SEQ ID NO: 853 - DNA, 505 bp, Zea mays
cgcttgcagtctgtgttgacagttcaattcctcttgataatcttgattgataggctttagacgcgagagtggtcatgttcaagaaggaacggttagttgtttcttggtacttgccttgtcgatgtggatcatatttaagttcgatcagttatgcaacataatactccctctatcttagaaaataagatgcacatatttttagaaaaagtcaacgttttaaaactttgatcaacaatttagcaaaaaaaaaaatatatgtttttagagtaggcatgttatatatttaaatttatatttaaaaatactttagtatgatgtttaatttgcattcgttgatatcatatttttaaaaaaaactaatggtcaaagtttcactttaaatactcttccgaaaaaatatgtcttttttgatagagaaagtagtatttataattggccttataattgaccttgaacaaatacaagactgtacggtctggttttttggaggtgggtggggggaggg

SEQ ID NO: 854 - DNA, 730 bp, Zea mays
  unsure (1)..(730): unsure at all n locations
gcagtgtggacgttcctgggcctacctagaacctagctagctagagctgggtagccagagatcagaggttatcgggaatttctagggttcctcgtttttgcccgtccttaccctggctggctgacgcgtcccggcgaataatgtggcgcgcgcggtctccgtgtagacgtcatgtgtccggcgggccacggaaatttcgtgctgctagcttttgctccctgtcgtgtggtggtctccggtgctgctagcatgcatatcgcggccgggcagatttgtttggtgccaatggtcaacgacgacgagtacagtgtacgtacgtctttttagtgcgcggcgcgatagggcagcagtcagcagagacagagcgaggcgcccgtgccgcggtggtagcccccgcgtcgggtcgggtgggtgccgaaggaagtcgcgcgtggcgtgggcctgtccatcgaacaaaagggaaaggaaaacgggcagtggccgccgggcggtgggttgggcttgggccacattggcctttactcggcaccggtctttttgacatttgtttaatttaccagcgcaacagcactgcaaacgtgcgtaccgtcaatatatgctggtagatctgaanctcatgtatttctgttacgtgcgtaatagaaatggctcctccggccggagtaaaaaaaaaacacacgggaaatcgtctgacggccgaattcacataacggattattagaggtgccga

SEQ ID NO: 855 - DNA, 727 bp, Zea mays
ttgcttctctgggttaggtttttgagccggatttgatgcgcagctacatttaatagcttgatgctcgcaggtgccctgcatcatttgggcattggaatcactcttacgaatccactgccgcccttatttgctacatagacagatatgaaaaacagtagggaaggagttaaaatgtacagtataaattatatgctattactgggagtttctagggccttctaatccatgttagtaattccgaattcatgctagtaattcttcgggaatatctgttgcctaatataacataaccctgaattaatgctagtaattattttctaggtagttaaaactctcattttatgtagggtaacactaggaaatttctcggttctaatagataattttcgaatattatagatacatattgcttggtgtgccaagtgaattcatttgcatgtcaggatgttgttttctcacttcttgactactgtacaaaatataaatatttgttctaacttctggaagatcagaggaagtaggattttcaccatagtattctcatggccttgctacatcacaagagtttccatgttgttttgggttcagatgatagccatggtgtctgctgttgaagagcttagttgggttaacctctaaagaacttggtgagatgctcagggagtcagacaactttgttttgcagtccaagatagaagacggaggtccaaagcaagtacttgtatgc

SEQ ID NO: 856 - DNA, 767 bp, Zea mays
agcaccagacatgtatgacaaggacttgcaaagaatgcaactatcttttgagaatatctaggcattatgttccaccacatggaagagagcagatcagaagaagcagaaacttgtaattttcagagattcgtgggcagaattatgctgaattgctcacatagatacgttaagttgatacagaaatcatcctccacagctgttcctcagttgaagagctggcaatatcaaggaatggacagccctggcattagaagttgcagcaggatgcataggaaagtatgttctagagtctcctttcctttctcttgaaaattgatgttttccttctgtacacgactgaacttttgcatatttgagtttttgttctctctggtggaaattaaataaatatagatagccataggcaaaaatgcatgtgtcggtagctctcaacgtgcaagtagccccaaactttcaactgctgccatgcatgtccatgcaaattaattattgcatgttgtatttttcatttctttcgataagttgccgacagacggcagttgtatatttgtaaaggaagaaatttgaaatattgacctgagagctactttcgtccccttccattttcctgttcctgtcgtaaacgtttctgtgtggagaacccaagctacttgatcgctttctacttgaatacaggaatggaaaaggactggttgatttgatagggtccaaaagaacaatcaccctcaaaaagaagtaaacacattcaagggaaaaaaggaaggaac

SEQ ID NO: 857 - DNA, 780 bp, Zea mays
cgtagtcagggatagacggtcgactgaaatccacccggcgatttttttttaatttcagtcggagggtgggggtgaagcttcgccatcaccatgagtcgtagtcccatccatttgatatttgcacgtcatcctccagctgctggtgtatgcctggtcctagtacaagaggacgaaggtgttgctgagccctgctgagcctgaagcaaagcaaaggcgaaggtgttgctgcaacttcattatttctatggaatggccggatggatatggtactctgtattgcattggcatggggatggatatggagaatgtggctcctttttgtgcgcacttgcaggtgcacagtatggtcaatgttcctacctgctataaacttatggagtttgtttaatgctgtcttaatctattttaaaccttatttttatttttttctcgaaagcgcaagagagctgcgcgaaaatatattaagaaggagataaaggtccaaaaggactcgaaaccttatttttattatgtgtttgatttcgtctgacagtactattttggtctctaaggttggaaatggagcacactctttgttttgaacagataaatggatcttgggacagaatgtgtgtagtctggcgcctaggttatttgccatcgttcctaaaaggattgcaaatagaagaactgtgcttgaggctctttccaacagaaaatggatatctgatataaagggtgctctgtctgtgggagttctagtgaattatttgaatctttgggagcttctttcagaaatag

SEQ ID NO: 858 - DNA, 812 bp, Zea mays
gcagtttgctcgtttcgcaggtccaaaggggaattcaggacctggtggtcgtggtaggcgataagttattggcgttcctttttgccaggtgattcacggattttctcattcaacatattctctcgaaggaccagagttcaaagttttcgtgcggcgataacattaatcgatcgcttctatcactgttttgtaggccagttccgtggtgaatacccatgtggatttgatattgcaccataggaataggattggtagttttggccttgtgcatccagcgttgcgacccttgtttcgctagatgttttttaggcagaatgcactagctggacataataggtccaaacatttgtagcatcgtgcattcgtgcaggcgtaaatcgtaatgtgttatattgctggagttgtttgtaatgtgctgttttgtatctctgaggcagtttggctgtcaaatccgtgggcttgacgaatatcaacaacctggctgctgttaccttttagaacttattcctgaagttgtttggtaatgggtgtatcttgggcgtgtttttgtatgcccgtgcgtgtgtgtgctaaatcgaaagctggttcacgttttgggctggcacgcccgcccattgtatggcttaccgtgaagttcttaaaaagtgtcaagtaagttcccaagtgatgcctagtgttggggtagctttctttgaaacgggaaattgccagggcggtttttgctggtgggctttcccaattggccccagttgaaacccttggatgaaaaaccgtttttcaattggccctcttggttagagaaaatttaaacc

SEQ ID NO: 859 - DNA, 785 bp, Zea mays
gcagttccgcgcgagaagaacgtacgtccacgccgacggggactgggcgggggtctccctacgcccgaacggacccgtcccacccctgaacgcggtgtggcgggtggagcatttggtctggtcggaccagggggacacattcgtcctcctccagaacgccgcctacggccgctacctctccttctcgatccaggaggcgccgcccggccaccgtggccgctgcaccacccagctcgaccgcaacgagccccacgcgctgagcccctcctccccgtggatgtggagggtccagaggttggacccgcccgaccatggctacgtccgcctgcgctacttcggctgcgacctccgcgccaacggtaggcaccgcacctggaacacctgcgtcaccgtcgacgtcaaccgaggccgcagggtctccaccatgatgcagtggacggcccacgtcgtcgcagcgagctcggtaccgccgccccttccagcctcacctcagcctcaggtgcgtggtggctgcgcgccgttctttctccttccttgcattgcattggatgggaactctcctcggcggccagctttacttggaacaccaatcatagatgcgtcggttttcattctctctgtctgaagttgtcctttcctgagtctgaatttttttttcatttcttccgatacaagactactggacctgttaattcttgctgacaggttttaaattctgtagccccaacgaaatgtttttcgtggtttctcgtgttacgtacgttcctgtgcctctgcatctgctt

SEQ ID NO: 860 - DNA, 768 bp, Zea mays
  unsure (1)..(768): unsure at all n locations
gcataaacggctcatgaacggctcatgaaacaaagtctacatggttcagaacccagatctggcccaaaagaacccaaatcagaattggcaggggccaggcgccggaactgtagacttcataaatcaggaacccagatatgggaaaaagttttaaaattacatgatttttgtaacaaagtacagactatatggatcagaaaccctgatctggatcaagaagcagcaaaccgagatctgaactgatcaagaagcagcaaaccgagacctgaactgcgtcgcgtaccccatctaccacaaattatgacgtccactctcccacttggggagatggtaagccaacgcatccaccaagtgcaatgtgggccattgatctaggccacgggccttcttgatagccagtcgaccccgtccaggtaagtatgttgcaaagtaggcaggggcactgcttatgtagcctcctcacgcgtcgcacccatcttcaggcggcgaggtgggactaaccgaaacgtgcctcacccagtcaccctgtcgctcgagcgctggaagtgggcgagcgctcgttattttgcagagcccataaacgaaagcccatgaaatcttccgactcgtgcgcgccaaccttttttgtgctcgctcaccgaccggcgccatcactcgctgaaatttcttttcccaatccagttcattctgccgctctccaatagtccaatccggtcgcggcgaagctcggncagacgggcaccccaatgccgtcacggtcgggctccc

SEQ ID NO: 861 - DNA, 781 bp, Zea mays
tgttgcatttacttctgctgtcaaacttgtagccttgatattcgtacgtctcacgacgttaagccgatacacaagtaaatgtcacttagtattctcttagactatgtccagcggttcatccatatgattatttaaaatactattttatactgtagactttattgttcacagagttaagtttaaatataggtacatagatggataaactgctagagcatatggatgaatcgctggacgcggtcttaagagaatataggtacagtgatggataagcgacaaccacaagctgctagagacagtctaaactctaaagcgtgctttaacttattgtatccccctagtagccctcgttttaatcaataatctccagcttaagtaccagaaattgaaatttgtgtaatggcatgaacggtgtatcagttcgaatcgtcaaggtatctaaagtcatagatagacatcgctccaacgttatcgcagatcaatagatgacgataatcgaccagaatggtctgctcaatataaaccaatgagaaaagcagctgatgtagcaatgataatattttggtttggacaatgtaaacggatggtaaaacagcatggggaactccccaccaaacacccatctgtctgcaatcactgggaaacagatgtttttatttctaaatcaagcaggcaactactcagatacccttcttcagcatcgcccggacccgtgtgggtaggccgtacagcctgatgaacccctcggcgtcagcttggttgtagatctcccgttctaaat

SEQ ID NO: 862 - DNA, 522 bp, Zea mays
accggcatgatggtgccgccgccgcaccaccgcgagcgccagaggcaccaccaccaccatcaccaccacctgccgcagctgcggatgcacgccgccgccgcggaggcggcggcggcggagcaccggcaggaggtgaagcagtcgccgcagcggccggcgtggagcgggcgcgtcaagaacccggatctaaaccgggcgcccagccccgagagctccgacgccgagtgacatgggaagcgagcgagcagcagcagcagccaccgcaaaggctcaacgtcgaagacgacgtccgttgttgcgacggcgcccagcgcagcatgccgctgtcgtcttcgttcgtatccacgtaacgtacgtacgacggcccagctgacccgcttgcctacccgtccgttctgtgcgactggatggtcggtcggcgggcgtcgcggcgagggctttcggtacgtcgtggataagcacgaggggagggcgggcaggcgggaacggaggcggaggcggcggccccaagtggcggtcttt

SEQ ID NO: 863 - DNA, 762 bp, Zea mays
aacaaggacaggaaaaaaacagtcatcagattcttttacctcaacaacaagctgtaccgcccttttcgtgctgatgacatcccaaagcccgtcactgcgtaaatacaggaaagaaaaaacctgaatagtcaggagatggttgcattataacagtagcaataccttgctagcatcagcgaaacgccgagttacctagcaataacggcaaaagctgtgcacgctttggtgatacgaacagcttggctcagatatggttctgagctgaagcgtgagtcttgctccttaagaaacttgtctccaaacatcctcgcaagattcagtcctgttgaaacaacaacaaaacattgattacgcctccaacgtaaatggaagcaaaaacgatggagaccgaatcataccattaagacggacttccccatctttcaggggctgcccagttcttgctatcctagctctttcagttgcgctagctacccggtgatcttcagtcatatcgatcgtctttccattgacactgaaaaagtttaggttgtcatcgggctcagaaacatgtaaccaacaatgttttctttttatggatgttagcaacaatgtttgcgattctacaccatacaggatgttagctggaaaaactaacatatatcagctgtcttccttatatttaataaaaaaaactctgcatgtcttgaggggggaaaaaggcaaacctcttacctcattacgcaagcagaatcaccaagattagcacactgggcaaaacat

SEQ ID NO: 864 - DNA, 761 bp, Zea mays
acgagcgcgtcgaagccggccgggtcgacgccgcaggcgctgagcgcgtccgcggcctcggctatggtcatcccggtcgacaggacgcacccgagccggccgccggccgctgccgccgccgacagcgccaggtcgacagctttcttcatccgctcggcgtccggtgtgccgtcgccgttgtagcagtcgacggcgaggacgaggagaccctgccgccggcccggcgcgtgcccgatcgccctcgcggccgagctcggcggccggtcggcggagcggcgccggcggagcgcgtccatgatggccgcggcggagtccccggccttgaggtcgtgcgaggcgtcgatggagatggagaggccgcggagcgactccgagagggagtcgtcggtgccatgctcggcgagcgcggcgcgcgggctggccgggacgcggagcagctggtgcggcgccgggtggtcgcagttggcggccacgtgggagaggtagaggcggcagtggtgcggccaggagaagcggtggatgttgcggaggccgttgcgccggcactcggcccaccgcgccttgtcggctagcaggctgagcagcgcctccgttatcgccgcctcgtcgtgcgggtccaccagcagcccgttgtgcagcgccttgatgatgtccaccggaccgccgttcttggtggccaccacgggcagaccatacgcagcgggcctgcacggatcgcacacacgacacaaacaagatgtgaatggatttttattttattg

SEQ ID NO: 865 - DNA, 1156 bp, Zea mays
ttgcatgcctgcagttttactagctaattttggcatctcattttgtcgtccatcgggcttggtgacctcactccgtttgttgctgaacagtcctttgctgagtggtgggggaaggcttctaaaaaagtgcaaaggtgcaagaggaagggtttcaatagtgtcatgattcttggggcttggtgcttatggctcaacgtaataaggttgttttttatggagtgagcccttccaatatctcgattaaaaggttgtttctagatgaattgatcagttcgaataatgcgggagcaaagcatttagacagtctggggccttttgtcaccttaaatagggtctagtagggcctgtcagccccccccccctgtttcacctttcttgagtgctggagaggaggcttgggtgtttggtcttggttctttgttcgttttttcttttctgccctctgggtgttgtatttcggtccactttggacctttcctctcttaatataatgatgtgcagctctcctgcgcgttcgagaaaaaaagtttctgcagcttggtcacatagaagacatttttcagggtggttttgacctcttagctaatcgatcagtcgtccagcatctattatgggcaacacgccaaatgaaaaaacgacacttcggtggagcccatgatttccacacccttagcaggacaagtcttaatgtcagacaaaaatacactgtactgagtaagaaaaaataattgtttcggggtgatctcttttaggacagttaacagttaagttaattagcaataagccatccaacatactgtctatttcaaatgcaagtatcataaaattcaactggaaacttatcatgccatcaaccaacaggggcattcttttgcataagaattgcaagaaccatattacaaaattcagatttaaagcatccatgactagtgtgaacagcataggagaaagggggtccccttgcctcaaaccccttaccccttttatgtctaataaagctaccaggaacaccattcaaaaagaatttgagtggagcaagtggaaagaagacaactgattaagtctctccaaactcttccaaaaacccaacccttccaagatatccaaaaggaagggcccgagacagtatcaaaagctctggtgatgtccaatttga

SEQ ID NO: 866 - DNA, 757 bp, Zea mays
agtacctcataggcagatttggctgaatacttgctattagctgacaacctccagatatgcttatcaggctgcccctgcaactgaaagaaggttcccaagctggaataattcctgtagcaactcccatgacactgccccatgaatatcctgcacccaggagtccaggaccagtcgaccaaggcttcagtcaccaatcgcctgttaaccaagcgccttgggatcatactaaagatcaatggggccaaatctttaatcctttgaccatgcagccacctgtctttccaaaaaagagttgaggatccatctccaatttctgaagacacagccatatcaaatagactttgcaactcagggcacactgaacttgaaggcaccccaaggtctactggtatcagtcttcttgagccacaaccaccttactctcaaggcccaactcagatttttaatgtctgaaatcctgagcctctccaaaggtaactcctcctaattttatcaatggctttgtaaacccaagagggcaaatcaagggccatagcatggtaaataacagtggaagtgatcacagactgaacatggacagcccttccagctctggtcatgagatcagctttccacccaggagggaagcctgcaagtttgtcaatgagtggctgcaactgcatcttagttaatctcttaatagacaaaggcagtccgcagtcctaaatacttaataggaaaaatatccatacgacagagcaaaagaccttgtatgatg

SEQ ID NO: 867 - DNA, 797 bp, Zea mays
ctcggtacccggtgatcctttagagtccacctgcagagccttttttacaagctccagtatagcgacaacagtgtagcgacgaaagagttgaccaaatcctttggatgggatacttatgattctttcatgcagcatgacgtgcaagaactcaacagagttctttgtgagaaactggaagataagatgaaggtaaatatgaaaataatgaattatcaatacatctaaaaggacagaccgagtgttgtcagctcccacatgaatggggtctagggaaggaataaccgaggcaagccttaatcccgtattcttaaagagaggctgcgtcagacctttgactcagtgggaagacttctcaccactacgctaggcctgccctttgaattatgaatacagcaatttactttttattaactttctttctccacagggaactgttgtggaaggaacaattgaacaattatttgaaggccaccacatcaattacattgagtgcattaacgtggactacaaatctagcagaaaagaatcattttacggtaggctgtcatttaattgtacttgatgaaaaccatatatttatctatgatatataaataagagtgcctatgtcatggcttgcagatctacaacttgacgtgaaaggttgtcgtgatgtttatgcatcatttgataagtatgtggaagtggagcatctagagggtgataacaaataccatgcggagcaatatggcttacaggtttcccacaaatcctgttctattcatggctttgtagctggatatttaggtgtattagat

SEQ ID NO: 868 - DNA, 492 bp, Zea mays
gccgcttgcagaaattgtttatagacaccttaaggaagtatgaccccagaattgcccaccgtgtgcaagagaaattagaaggaaaaacgctaattgattgcttggtttagaggagcatgtgtttagctctatctgcttggtaggtcatagattgttgctactactttaagatcatgtcagcccctttttatttctgcttcagctcctacagctgttacattgaaccacaatttgtttcttattgacaactcaaaatacatccaatgtaattttgttttcaaacggagctaaatggctaaatgcaatccttttcattttgagactaagttgagcatgtcttgtaacaatattgctaattttgatttacttcagtgggtttcaggggtgagcagaattggatcatttgttttatgctgttcttttcctacatgaactgaaatgcaggaatttcctgtaggtgggaggagtctggagggtttaaagttggcggag

SEQ ID NO: 869 - DNA, 470 bp, Zea mays
ttgcagcagaacaaaacacctccttttccctctctaaccagtaaccagtcgtcccaaatccatcagcagttcaccactgagcagtagcacccgtctcctctcctctgcccagtgcccatgcttcccccgttccattgaaagtagcaatcaacactgtctcctctcatctctccactcgcactattcccaagctacagccctaatcctgtctctcctcatcttttctccctctgccctctttcgcaagatctctccttcgtattctcttttcgcttttaactccacggcagtccctcttctgtcacgagccaagccgagcgcagcaccagcaaaagagagcgacgccgcctgcaccaaagctcggattcccgtctattttacccccgcccccgccgactcaccgtcgcaagatccatccgcaggtgtcggcggcccgcggcccgcgcgaaagatggcgcctttcccaggct

SEQ ID NO: 870 - DNA, 485 bp, Zea mays
atactttttgcaagtaaaagctacatactatacaagtacatttgatgacaatgaacaacgcagtcagaatgaaaatatccgtaatcaaatcttgtataatatgaacaacacagtcatattataccaaagtaggactgcgttgttcatattataacaggactaggtcaggtcatattcatccaactgttgtgtttcatcaccatcctaataactttggtagcaaacgaaagtaccaaaccaaacagaagcttaaaacgcagtgagcagttcacatatgttactactactaagttgcaagaatcatgtttttggtagcaaaacaaactagataggactagctagtagtataaaagaagttgaaaacgcagtgaacggttcatagatattactttgagatatcacagaagaagcttactactaaaagcttcacacaaacatttggcagcaacacatgaagacaaccagtggtggcacagtttgagcca

SEQ ID NO: 871 - DNA, 484 bp, Zea mays
aggtcaccgtctgcggctggcgtgtatggtcgaagaactgaacacaccaacaaaagaagacacgtttttttttctcctatcctatatatctaccactggcaagagcgcacactatacatgacactcgcagctcacgaagaaacgtcccagtacgctgcaaaccctatacatatatgtcgtttacgggtgactttttaacaaaacgtgaaggatccatccatatccaactgcttttcttttcttttgctcgctcttttgtttatgaatatatataaactgtgcagcgctttgtgtaggagtaggagtgtacgccagctttggtctcgtcgcggcctctagctagctagctagctcaggcgacgacgacgtcgccgcctaccgtgccgccgccgtcgcgctcgggaaccctgtacgagtagcccagctggtcgtccgattgtcgcctcacgatgctcgcccgctgcatcaggcgcaccagctgctg

SEQ ID NO: 872 - DNA, 446 bp, Zea mays
cctgatcaaagtggcaggtgccgccttcgcagaaccgcatacaccccacgttcccaccccacccccggcccccggggtcagaagcagaaaatagacacactacccggcggcctccagaattgactagtaggtgatcaaggcacattcagtttattctcgaaacggtaagtgaagaactgaaacggtaagtggagaacgaccattatccaagagttgccagcaagctggggatcaaaagtagtagtacgtaacatctactggcataggagtaacaaacagcatggaacagggtagcacacaagctatacatgcacaacagtagcatccaaaattacacgacacaacccctcccccctccccccggttcaccgtcacttcccaaccaacagcaatcaacaccgacatcaggaataactccctctgacgatcaccaagaataatcagcg

SEQ ID NO: 873 - DNA, 462 bp, Zea mays
gaacagcttgaagagggagtttgggtctgtcctctttgtttgttttatataatctttgataaatcattatgctcccttgactttgttgactaacgtctatttgttttactattaaagaccaaagcttaaagagcacatgcagtactgtgtggaccaccctgaggaggttagcaagcttgccaaggtgaaggcccaagtctccgaagtcaaaggagttatgatggaaaacattgagaaggtactatatttaataatctgaaaaatacacatatctgcattataatgaaaaagacagtgcacctcaaacattattcctgattccttattactattttaatgttcaggttcttgaccgtggtgagaagattgagctgctagttgacaaaactgaaaatctgcgttctcaggtaaaggatgtccacattagcaatttaattttgcatgtgtgtagaccaaataaag

SEQ ID NO: 874 - DNA, 711 bp, Zea mays
gggatggaaatggaagtggccatccgccaccggcgaaacacgaccagcaaaccaccggaccacacccgtctggcccacagaacaagcgaaacggatagaccaaaaaaaggaggaagaatactagtagtagcgggcgacgcggccgcgaggcaggcaggtagaccacgccgcacgccagccagcggccagcgcccgccccgccgcgcttcggcattttcccattttctctctctgccgccgctccctcccgcggcggactcgataccccgcctctcctctcgcgaactagggggcagcgggcaggtgccggcaggcggctcgatcccttcctcctccctcgtcgcggggactgctgctgctgctgccgtgaccgcgagcatggccaccggcgccgttacgccgccgccgctggctggcgcgcggcgattcccccgtggacgaagcttcctccaccggcgcctcgctacctcgcctatgtgagcactttatttgttgtgttttggttaattcgctattacacatccgattttctgttgttggaggaactctcgtggtagtttttatttgctaataataaccgcaatggaggaaggaaatggggataacgaaataaacgaacgcagaaaggaaccatgggatttcagggcgtcgtttaggcattgggttagtttgggtcagttgcatcttcacgctatagactttgtgactgga

SEQ ID NO: 875 - DNA, 759 bp, Zea mays
aaaaaaatgataaagtagctcaaaggaccatgctaacagtaaatgtatataacagtgcagacaataagaaacactaaagaattttcccttaaaaacaaatgccttaccgattgcctgactcattttcatactgatcttctgctctcaaccatgcagcgatctatcaatcatcagtaaggagagatgttacttgtatggcatagtgggaggtagagtaataaatcataagaggtgacgttatgtaagctataaatatctagtatatgttagtaatcaatagttagcaagcagttcatcacaagtacatgtggaagttatgtctgcaaaacagaacaaatgaacaatatgctctaacaacttaacaagtttattacccagtattcctcatcgatcacagcctcacgagcaacatagcagccaaataatcttttgtatttgcaatcactttcatcaattgagggtcgaagacgattgaaccggagatcagattgtccagaaggaagcaaaggggttgggaccactgatgccttattggataaacttgacgaaagcccaggatgagacaatcctctagcaacatggaggctgtcagtgtctgtctcctcatttccaccatctgtggaaatcacagattcatctttcctgggagagaaaaatgactgtgcgtgaaattgaggaacaataagcatacgatccaagcatgaagttatgctcgacgctagctctatgacagcaaagcaagaacataaacactgaata

SEQ ID NO: 876 - DNA, 746 bp, Zea mays
aagtcataccttgctatttgagaattgaactattcgcctagatgtgggaagaaaatgagatactcttgttccagttccagatccagtatcatcaactttctgaccatgtccactactgaactgcctttgtagtgacgagtggttatgtgcatcagatgatctctctctaacacaaagaagcatccgtcctatcatgtagcaatacccgatcagcatgagaaatgacaaattcactgtccccaagtgttgttctaaactagaaatgggtactacaacataagctttatactgcatgcagtctcggaaaaaaaaacaatagtggaatgcccatcccttaaacatttactaatataacacttggttcacaatcatggtttttaaagcggcaaggcggtccaaggcgttggaccaccgcctggacacctaggcggcgcctaggcgaggtaggcgggcaaggcgcctaggcgttagaccaccgtccggacgcctaggcgacgccttaagaacagtgttcacaatgattttcaaatgagcaaatcagctgaggaaatcttctgaacagtacagtgacaaaagaagtttttggtagacctaaagtcaattgcaacatcaaaggacagctatgataattcaataaacaatagctagcaacggagaactagtacctaaataatccccatttcataattcaatatgatcatcagcgaagcaaactttaaatttcaaaaactgaaaggaaaaactaa

SEQ ID NO: 877 - DNA, 478 bp, Zea mays
gtggacaggcgctccagcgacagcggcacggtgccgcggatgaggttgtgggacaggtccaggtacgtgagctccggcgggaacaccagcctgctgaggtcgaagttgaggtagttccacgacaggtccaccttgccgatgggccggccggcggcgaacaggtgggaggggtcgccggtgagcctgttgtgggagaggtcgacggtgttgatctcgtcgcgcgcgtcgtcgcgcgggatggggcccgtgagctggttgtaggacaggaccagcgaccggaactgcccctgcaccagccccgccgggatggggcccgtcagctggttgtgccggaggtccagcgaccggaggctgggcaggtcggcgaacgccgccgggatgccgcccgtcagccggttgctggagaggtccacggagtcgaggccgcgcagccgcgccagcgactccgggatggcgccggacacgttggtgtgggaga

SEQ ID NO: 878 - DNA, 772 bp, Zea mays
cacccctaccaaatcgagcacagctcagaagaggcaggggaggatcactctcctaccaaccaaaagtcacctcgacactggacgtgatacaagagacacaaaacatgggccagaagacaccatgcatcagacagttctgagaacttattcaacagcaaaagtcatcttcggatttgttggcttcctcgttccaccatcctttttggcatcttttcctgtagaacagaccacgaatccaaccaaaagaagcaagcataaatcacatcagtagggtcataaaagaccttgttgttaaagcacacatcattcctaaacttccaaatggcccagagaatggctcctatgcctagaacaatcaaattcctcgtggttttcttataaatgttcatccagtcctcaaaaagagaatccaggttttgaggacatctcttcacatccagggcaacctgaagaactctccacacaaaagtggccactgggcaattgagaaaaaggtgattggtggattccaaaacaccacagaaacaacaatcagtcaacccaggccaattccttttttcaggttttctttggagataatttttaatcttcagaacaagccacaggaaaacttaaatttttgaggcattcttattttccaaagaaacttaggaactttagtatgacgtcaaatagatatacttggctaataattttgaagaatttaatgattattatttggtatcataaatgctattatttgattatataaaaattggtcaaacttatgatg

SEQ ID NO: 879 - DNA, 740 bp, Zea mays
aggagcgctggccaagggccatgtagatgccagccgccaccgccgcaaacgtcatttccatttgtataagcgtagaggagggtgaccccaacacgaacagtggcggtagcagtatgattcagaagaggtgggcgatgccaacaaaagcagcgtcaacacttccgcgggtttgtagtgggctctgctttttccggtttgcttggctggctaaacaataatggtccacaaataattggctggctgaacaatgatggtccatgactccacaaacaattgtctggtgggcaacaacagccacaaatagttattttgcagggcggactggcaggttaaggttacgttaataacccgccctgccagcattcctaactgtgtaccaggcattgacttatgctattgcacaaattctgtatggtcactttttccagtgtctgtgtggtagttcagtgcatagtcacaaagttcccgcatcgatagggttgaggaacgaggtcgaggaacgtggtatgctacttgcgagaggcttttacatggtgggaacgaaaatgaccctgcgtatccaggtcgaggaggtcggggacgatttttccgggtctagggtcgctaccactgtacctgtttcttgtgactatgcttcagtgtgggaagtctcaaggcatcattgattctggcaaaataatacagaaaatggttagtgaatatggtgaggaacgttaacatcctttttgtttgtaaatttc

SEQ ID NO: 880 - DNA, 804 bp, Zea mays
acttgctgtttgcaggcaactcgagctccttgacatatataataattccttcaccgggccactcccagaccaggtggggaacctgtcaacatatctaattgaatttagagcaaatgcaaacaagctatccggtgagcttccgtcgtcattgtcaaacttaagcagccttgttagtatctattttcacgacaacctactcacaggagccataccagaatccatcacacgtttacaaaatctcatcctgtttgatgtcgccagcaaccaaatgtcaggtcgtctcccaacacaaattggcaagctcaagagcctacaacaattctacaccaatggaaacaaattctatggccccatacctgacagcatcggcaaccttacgtcgatagaatacatctacttgtccgataatcagttaaattcaacagtaccatctagcttgttccagcttcccaaacttatctatctggatctttctcataattccctcactggttcactaccggtcgacgttagtgggctaaaacaagtggattttgttgacttatcttccaattatttgtttggaagcatcccagagtcatttggaacacttaagatgctcacttacctagatctatcattcaactcattggagggctcaatcccagtttgtttcaggagctagaaagcttggcatcattgaacctctcctccaactctttctctggtacaattcctcagttccttgccaatttcacctacttgacagacttgaatctgtctttcaatcgactagaaagaaaggtacccgagggaggtgttttc

SEQ ID NO: 881 - DNA, 497 bp, Zea mays
actctccctcacgattcgttgaatcaccaagtattgatcaccattgctagagtcgttccctatcgcctggcggcgacacggtgatgctgcatgactgcaagcacgacgccaacaatgttagcagctctagtaccagttgtaggcttctactcaccggcgtgccttgcctgacacgaagaagatgatccctggatcactctaacgatcacaaaactcaacacgaatactaaaaggacacaatgagtttttggcgctgccaaactacaccgctatttaagtgtagtctattgatctgtttatatacacaattacaaaagctcgtagccacaaatcaggcaccaatcaacaatcaattagctaagaaaagaaactatctaatcagctatcaattagctaagaaaggaaagtaaccaactcagctatcaattagttaggaaaggatactaaccaatcacctaagaagggaactagaaactgagttggattatgcaatgtct

SEQ ID NO: 882 - DNA, 860 bp, Zea mays
tctaagtgcgtcccaaatctctggaagagatacaaagttagtattagtgtggaaaaaaaacaccgcatcaaacaattctttaactattttattgcacttaattttccgttatcatggtaccagaattgggggaggagcttcgtttcgtaaaaaaaatgattgtatctagcgtgttcagtgtgtgccatcggcagaagtgcagaacataaatatttatgtaaacaataccatacacttcagtaaattcatgacagttgcacaacatctacatgttctaaacctttttccgcataatgcgctagttttcaagtatacttatgagaattttgcatggtggtcacaaatccaaaaatgtcagaaagctgtccattccctgagtggcataggagatgccaatttctactctagttacatgttcagctatgaacttatggtacatctatatatgtatttcttttccttttaatacgacagttgctatgtcaaatctaacaccaaatataggggtgaactgccaagacagcaaaaccaacaatattttggcgcgaattcaaagtgttatgccgccacatttatttagcgaagctcagtcaaaacagaatggaccatcatctcaggaggggggaaaaagagtggtccaacatgcagcataatgcatcacagaacatgcagcataaatgcgtcacagattcactaataaatgccgacagtagaaaactgaagctgccatcagtaaatatgcaatgtacctttctgtccaccatagtgaggagcagtgtcccaaaattcatcacgcatctgtcttgagtgtgcccgcggtaatgcttgggtgtgcctcccaagctttggtttcttcaaaa

SEQ ID NO: 883 - DNA, 784 bp, Zea mays
aacataatttcatgtactgttcgtacagagattatctttagagagaatagtaagtactaccttcgttcttgaatatttatcatctgctagtttaattttaaactaaaacgtgataaataaaaaaaacgaagagggtatcttctatcttgtaataccaaccacgtgaagaccttcactccacggttgttttgcctttttagattatattaaaactttgcccatacaaaacagtttcttagggaaatttccagatttatctcactcgcaattaccaactggccatcgttattttttagaacgatatcttgcaatcttctaagctgactctgtaaatcttcacgtagccatctcctaaaaatgaggctctagtttttatatttcatggcttcaactgaacaatcacggtcctcgttttttttaaaaaaaatgagaaaagtgtgtctttaaagtaacctatagccacaccatctagtatgccaaaaaaatggtggatttttcattggccgacaccgtagacctgctgcttaagtaaatatatctggtttggggttaattagaagtatgccactccaaatttaaagagttataaagtagtttattttcatgtcgctcaatgacatcaaaatgaattacctatctaattttataaaaacagggtgacaagtatgtaattaatcttttttttcttagctaggtttagtgatcttagtccatctaatcaaatgatatttccctcttccaaaaaaaacgctttctagcactatccatctttccaatagatgtc

SEQ ID NO: 884 - DNA, 800 bp, Zea mays
gatcctctagaagccgacctgcagcaaaagctactggtgtgggcagttgggcaccgcattcatctatcacgcaccaggttctcaaatggttcgagttgagatttaggggggtgtttggttttagagactaattgttagcccctccaatttattccactctagtcactaaattatcaaatatggaaactaaaatagtgttatagtttctatattttacaatttatagactaaagtgaaataaaatggagggactaaaaatgagtccctagtaaccaaacactaccttaggtggtgttacaaactgtttcacccgatgactgttaaaataaaaaaaaaatcacgcaaggaatagagtatcgtgtgattaaaagctcgagcttattttagaaggtgtgctcttatatgtttacaaatgttttgaactatatatgagtttctgctttctagattcccgagaagccacacatatctccgagggatccaattacaaacaaattcagtaaagatttctaaaaaatatcctagcgctttagtttcatttaagattgaggaataagcacacacattttctttccatagattcataatccccttcaaacaatttaaatctgttacacagatatatggctgtttttatacaagaaacattatatgtaaatgagtttaagaaacctctaactatgcttgaggaccattccctgtgtcttgctctacattacatgcgcttggtcggttgtctattgaaggaaagattttttattgcttgacatgaaagttatttgagccttgaaggtagattg

SEQ ID NO: 885 - DNA, 789 bp, Zea mays
tgcagcagctagctcgtcgcgaggaaaatccgcgtacggccgccgcgtcgcccgatgcgcgctcgcccagctagctagctgcccctgacttcaggcataacccacgtgcatgccatgatgccgtcgtctagctcgatcgcgctggccatatagacctacgtcgtacgtactcgcatgcagtctcatgcgacatgtcaaaggatgcgtgacttttgctggtccagtccgcggtagaggatgggagatcaccgaaggcgacgacgagaacagctagacagagaaggaattgaaaatgtgaagcgaaattcatgaaaaaaatgaattttggttccatatgaccccagtaacgggaaagcttgcgcgccagtccacagccgacacgtatggtagcctatggtggtgtcttcgcctatctaggaggtacggaatgctggccaggtcctcttgtcctctctctctcactcatgctgtgctgtttgacatgtctcgatctctcctctcctctcctctcctcccgttggtgtgactgtagtagatcctttgcccgtgtcagaacaagctgctcctcggaccgggtaatgttaaacatcggaggagcctttgcctaggatccgtaacggggaggaaagagaaaaaaaactaaagatgattatggataccgtgtaataactgctaactacagttagcccatctcagcggactctctgccctatattgtatgtcactttctattataaactacactatacaacctatgatgtaaaataatgttttgcacgttcatatata

SEQ ID NO: 886 - DNA, 800 bp, Zea mays
gggtgacttgctgcttgcagtgcagggcgctcaggccccggacggacgggcatgcagacggcgtcatcaatcgtgcactgcggcgcattcattgcacctgccatgccacgcacggtgcagcgctgccgttgccgtaggcagcgccggtgctcggccgagacgtgatgtggacctgtgctgctgggcggaccggcggaggagacagcgggcaggagaggagacgagggagggggtggggggaccctgcatggatgggcattcggggtgtagcccttcctgtcctgcccacctttccgcgcgcgcttcgatcggccggatcggtgtggccggccgtgccaacaagcgcctccctccctcgtcaccaccacgcgtactgctttgttttggtctgctccgaggtgttttgcatgtgcagcagtgcaggacgagggacgcgattagcaggcgtctttgtgcgatcatcgtcaactggctgggctgggacggcgtgcagcttttttgttcaggtcttgtgagagcatgaatgatgggatgggatggcaaatggcaggccgagtcgtgccagtaataaaaagaaatccaaacgctccatgcgcgacgggcccctccttgcagcaattcagtcacgggcccgccacgtcgttgctctccgtgcctctagagccaccgtacctctggtaaaaatcatgttgacctttctgtatgtactactactactagatcttttctggatcggagaaccggatcccgatttgggtttatggccgtcgtttatcaaatgattcaccagtggcccatca

SEQ ID NO: 887 - DNA, 742 bp, Zea mays
ctcaaatcctgcaatcctgtgtgcccagcacaggttccattttcttatcgctgctagggttagaccttgtttcagcacttcagcagcgaccacttcaaccgcccagctccattgaccaccaccagcatgcaggtagcagcagcaacggactactaactttattccaaattaagtatacttataatacttacatttttaaatagttttttttgctactttctttacttgtacaatgtaatcgttacatgttgagatattttttttaatgaagtaaacatatagtttttagataatattgaccgccttttaaaagtatgacatcttggtgaaaccagcagccaagcacgagtgcggctccggtccgccgaaaaggcgcttccgaaatagtcaaaacagcaacgcgcagaggcgtgcggcgtgcgcgactagactagccttcagccttctccagttctcctctcctcctcgttttttctcctctcctccgacggaactgaagccagccagcctgcccagccaaggtgaccggagacaagtaaaaatctcgccggtcttctcacagaccacaaacattgcgcttgctgcccagctataagtactcgccggactaggcggccaactcatcccatcccatttcatccatctcggagcagaggcaacgcaatccggcaaaaaggcgcttctttcttgccctgttcgggacaggacacagacacagagccaggagaaggaaccgccggag

SEQ ID NO: 888 - DNA, 492 bp, Zea mays
aacgcccaccgcgatcttgtacctcagaggccattcaagggttctcccacccttccctgtaagattagaatttgatctctactgccaccattcaagagctctgaatgatgatatgtatctgtactagctacgactgaatgaaatgagcggtaccatgcagtgccgatgctagggtgccattcgtgcagaactcgaatatcaagtacagcccattctccacgcagcatccaagaaggtaggatgtgtttggatggcatacatgcccctggatccctagctctgccaggaactccttttccttctgctcgctgggggtgccttttgctagcctcttcacggctacaagatggccgtcagctagggtgcccttgtatacttctgcatagcctcctcttccagccatgttgtctacaagtgaaccgcagaaagagattataatcttgcactctgacattgacgtttcatttcttatggcaacaaatctcatctggc

SEQ ID NO: 889 - DNA, 783 bp, Zea mays
acgcacgggctgagggtggtagccatgaagctcctccagaccctcaagattcggataaaaaaaattccaagcgaaatcactggggactaggacgactaggacctctcgcgcgcgcacacacacacgcaggcacgtggcgttgcagagaaggcgacacgcggcaccagctccggcgagggacgcgcccgcccgcccacccacggatcgcgtcggagccgtgacgaggccgccgttttccttgtcagcatcttctctgtgagaaggaagaacacgtagccggtgcaggggatcacgtcccagccagccaagccagtggcatgtgtgatgcatccggacgggagggcctcctcaatcctcatggaggcggcatgcgctcggtgcgcccccacccgtccgtcacaccaaccacgcgcgatcccgtcgccgcggcggcaccgccctggccccggccgttgcgcagccgcatcacgtgaccaatacagcaaaccggcgcttgccatccccccccctccccgacgccacgaacgcaacgcgcaggctcgcgtcgcgacaaagcaaagcgcggtcgcaatcagccctgtcgacaaaacgaaagttccaggcttcgaagaagaaataatatttgtttttgttttaaaaaaatatattgcacaaacaagtaaaccacactgtaaaaagcaaaaaaaaaacagaggtcccgtgtccagacaggaccggccggtcttctggtattgaccaacacatgggagggagtagtcccgtcttccgtgtgcagtctccact

SEQ ID NO: 890 - DNA, 786 bp, Zea mays
cgtataaacagctggttttacttatctaaacggtgtatcatgtttcccttttttctgaagagttgagtatatgtgacagtctacgctgagacctgagagattgggacgcatcacatataataatgagccagcagctagcattttgaatattgtgatccgatccacccgccaccaccagacccgacccgacccgaccctttaacacgaccggtggtctataaatagctgcatgaacctacccgaacgaagagcaagactcaatacacaagcagagctcaaacaattcttgcttcccgctagctagctcgcaagaaataatggctccacttcttcttgcttctcgcacagcctgtcatcctggccttacaagcagccgccatgataatggccggcacggcctttcttcttcaccgggaagtagtagtaagcgaagccgtagccttagcttcataccacgagctgaaaagacgacgacaggcggtgagggtcatgttgtgagcgaaaagctgagcccctggcaaatccccaggagggagtggttcccccctagctttatctttggtgccgccacttcagcataccaagtaggccagagtttatatatattagcacaaatgtgtttaattattatatatgtctttcttccaggaaaatagtgctaactgtttagtagtaattacagtgagaactagctagcatggtaatacaaaatttgatgccagaatgcatgtcaattaatggtttatttggcttgcacgaaatatatacattatatgtcgtatgcat

SEQ ID NO: 891 - DNA, 709 bp, Zea mays
atcatatgcagcgtggacgcctccgatagccttggctttggaccttctttctggtctcgccccctcctcttcctttttgcactctcgtcgtcttcctgttcttgttgcttgcaggcaagagaacatatagtatagtacatgcaatccgcgattcccagcactgatgaaccatgatccaacaaatccaatacaggccttcttcctcggcggcgcaggggacccggcgtcggtcattgccggttttgggccgaagacgcttacccgtgccttcaacgtgagatacatgtactaatctaatatgaacatttcgcatagatcgtgctctaagtgacacaggtaggcggtagcagctagcagtacccataacttgcatgtcttctactaggccacctacgacgagttggcgcgtatcctgttgccacgaaccggcggccccatcgtgtactacaccgcggacgcggagccagagagcggtgccgccgaagaggagcgcgggcaggtcgacgggcacgacggtgtgctggacaggggagcgcgacgcgagggcgctggcgcgtgggtgccgggtggcaggggagacggaggcgacgagtgcggcggcagcgatggcgcgcgtgtggcgacgtcgtggtggacgaagctggttaacagggtcgtcggaggggcggctggcggcggcgtcgccgcggaggcgaacaggaaggccaag

SEQ ID NO: 892 - DNA, 426 bp, Zea mays
tttcgcttgcagctgctgctgtcacaattgctcaagaatcatctgttgctgctgctgctgttgctgtcgttgcaaaagctgggcttgtcgttgctgctgtagctgccgttggtgctgctcttgttggagttggtgttgctgctgttgctcaagttcaaactggactctcaaaagatgctctacatcaggaagctgttgattcataggctgtcggtgttggtgcaaagaatcaaacacctgcccgggaaatgcaccagaaaactctaaattactacgggccatcaattgctcctgtcgctgttgatgttgctgttgctcccgtctgatctgctgaagcaggaggtgcccatcaaaattcaaatgatgctcagcttcaacctgagggattctgccagaaatgttagggccattcatattgtccagccg

SEQ ID NO: 893 - DNA, 686 bp, Zea mays
  unsure (1)..(686): unsure at all n locations
agtttccgctacccaagagggaagcttcttgatatatacaggcagaaaaatatgatgtcgtcgtttgatgatgcccacatgaaactggacgaaattccttctatcacactctctattgctgcaaaacctctagcatttgttgcaccagatactgttgaagaggtaatacctaggctatattttcctactaactttaagctctaatctcatttccccccctctttatctaccttcttgactacttgttcaggctctcctggaagatattagaaagggtaaagtcattagcagtgaaggaatcaatgggactggaaacaaggagagggcaaaagagctcgaaggtatatctacactgggatgttagttgtgccatgattttatagacttaaaaatgtaaatgttactgtttatccatggcttcctatccatatggtaaactctaaattgtatgattgtttcagaacctgcttctggtattgatgatgacaagggcaaagccagttttgcaattgctgggttgggtcaagaagggtcttcaggtttaatctcagtgaatgatgccttctatgttgaagggacacttcctagtggtgtcagtacatctctgccgaagaaaagtctggagggaaatgccttcagcaatcaacataggattactgacactcangaaggtttgaaaactgctg

SEQ ID NO: 894 - DNA, 526 bp, Zea mays
tgcagcgctctccctctcgtcctccatggaatataatggatgattgcttctagtgctagtcaaaactagaggagcgcctcccaggatcctctcgcctgcgggcaccgagctgccgtctctggtaagcgccgctcactcgcttccttccttccccctgtgtgctcctccgggtcgagcagtttccgcctgtactacttcctgttgtgtgttgcttgttgtttgacccccgagcaaccgccgtccgccgctatcattcgttccgttcctgccgtctggtcttttgcactcgcattttatcgcccgcatctattgtagttctcgggttcttgtcagcgcccgctctcaaacttagagagcgtgcttcaggaacgaagcaaaacccatggctgcttgagctgtagttgtagcccactgaaatgaacgagcttccatgggtgccgatttctccgaggaagggcttcttcggaagggccaaaacggctccggaatctttttcgctgaaaaaaatagttccaaacgactcgtg

SEQ ID NO: 895 - DNA, 687 bp, Zea mays
gcccaattctagagggatcaaaccagatatgttgttagcagataaaatgagaacctgcatgtatttcagacgccctatttcaggtcctataaaacctgaaacctctgatgacgataggtcgagagaaatcactctgttccttccattgcagccaacaccgttccatgtacaaggagttgcatcagaaccactccagttggttcttatgaaacttggcagtattagggttttggacagagcaagaagagctaggccatctgaactcataccctgtgatgttgaaactaacacgaagaatagaaaaaaccgatgccagaaaaccagcttcatcttgtccctgaaaattttgtatagaagtcagtagaagatctttttttgcctatgtacaagtagttcaatgcacaattcgatggggattgcatgtatgagcagttgtcatcaaccaaaattgcgcaccttggcaaccttccccttaaaagcaacgaagtagaacaatttgatgaaactagaagttacttattttcccaataagagttggtagaaatccttaaacattaacaatcttgaaggaagccaagcttactcttccggaacacatactaacactaagtagaatgtgctaaaagattttaattggatagatgtttaggttttcagatagactagaatatagtttaaatttgtatg

SEQ ID NO: 896 - DNA, 1071 bp, Zea mays
aggtatgggcacggaatggtcttgggtggaaaggtgaattaagaagaatatgtggtagtgtgaaagcccttccacccaaaagtgggcaaagaggaatgcttgaaagagtaaggagcgaatgatattgttggtggtgcagataacacgctcagccttaccattctgggggaggtgtagggacatgacattcgaagaagagtgccatgggtgaggagggaacgagtggtggagttgtcaaattcacgtccgttatcacattgtaagtgcttaataggcagcccaaactaagtccgttatcacattgtaattatcctgaggtttgtcctttatgtgatcaagattcggagaatatccaacacctcctttgcacttgcatttttgcgcggcaattttggttctgcattctctcttccttggggctggctaatctttctcctgcctctaatgagtccacttttgctgactggtgggagaaggtgtgtaagcaagtgcacaaatccaaaagaagaggctttaacagtatcatcatcttgggggcttggtgtttatggcttcatcgtaataaggcggtttttgatggcgtcagaccttccattcatggaataaaatcagtttttctggatgagtttgagtgttggaggcttgccggtgctagacatcttgaggctttgggtcctggtgctgcaattttcagatcaagggttctattgtgggcttagtgaagagaagttgtgtgggtgtgtggcctgctggcacttgtgctgctgtcctttttttgcgtgctgttgtttccatgtgcagaaggcagctgcattcctgtgcgtagcatgtattaatggtcttgtgtttggtcaggttttggtggtcttgtgtttggccttttgcgccattgtactttggtctattttggactgcttcttctcttaatttaacgatgtgcagctctccctgcgcgttcacgaaaaaaaaacaatcggttcagcaaaagctttagtgggggaagccctacaccaggattaactaggggcttaacaccagattctgaaataccttttacgtacaacattaagg

SEQ ID NO: 897 - DNA, 505 bp, Zea mays
aaaaatggactaatcctatattggaggagccacctaaagtgatgatccagtgcactataccatccttcagtgccatgctccaaacagaatcgatcttcaatgacagtttcagatatctaacatgtagtcaaaggagaacatatccatatgcccacaactcgaaagcaatttgttagtagctgcaacaagacactgatatgacaattcaatcatcaattctaatatgcagttctgattatgtgttgctgccagggagctgattggttgggggtgattgcggatgttgtagataaatatggtgcatggatgagggacaggatttcacacccgttcttactaaggagcagggtgagacacatgtgcagtggtcaagagatgatgagaacccatggtcactaggaacacggaactataccatgttcctcatcccggcagcacatagttcctgttccaggaacttggcaacaatctcgtccccaccttgtcgaatccttccttaaatagc

SEQ ID NO: 898 - DNA, 564 bp, Zea mays
agtaatcactgccacacttccgggttattttcttttggcccggtatagtatactccctccgttcgtattgacactgcaaggggatttgaatgacaaaggctaaaacagcaaaaacattagcggaccaacgaagcttacctagctagctacagaccgtttgaatcgaagctgacattattcttcatcgtatatagaccttctgaataatacctgttaagaactatcgagagaaagagcatgtgaaggttgtacgtaaaacaccatcaaattttgataggaaaacatgacaaacaacaataagataaataatatatttttgactgattggatgttcgacaccccagtcatgtaatccctatttttgtaatagagcgagagggattgtcttattccattgaaaaaaaactaatatagtgctactatcatatcgttttatatagtaataaggggtgcagggagcagacctttttttttttgaaaattacgacatggatacggattgatctcgacaccctctgcaaggagccaaggagcaaagcttggtacgagtagaccttgctactt

SEQ ID NO: 899 - DNA, 513 bp, Zea mays
atatacagtcacactcgtactcccgtggcgacgtggtatacaatcagagatgtccagattaataaatagctaaacagacgattgactggtgagaacgaagctccaaggttgattctgacacaagcccattcacacagcacaagctgttattaactagttataccactacgattgcatagctagtatcagtagtgtgctgtgcagggtctgtacttttccatggatcgtcacagtatcaaccatagttcgtcttcttcatggacccctcaacatcgtctggcgctatacgtcatggaggaagaattgtcctgcgttgacgcttctcctcctgcatgtgtccgtcttagcatgcatgcttcctcaccagcccgtgcttcagtcccgatccgatcctcaattagcgcgagaggcgagactttgaccatatacatgcacctgcgaacaatcaacaatggtgggttgcattgtcggcaggtgtcaggaatccacgggcggacgtgtctgttttccttc

SEQ ID NO: 900 - DNA, 679 bp, Zea mays
agtttgagcatagaatcgcttacgctgtgctaagtatttgaggatggcagttgtactccttggcaaacacgaaggggacgatgccttgtggaagtgcagcctgttgatcaatcacacacacgtacgttccaacatttacagtaatcagtacgaccgtcacttttcccccctcattagaaaggcttgaaaattagtagagcactacgtgtacggtgtcgatgccaacctgaacgatggcgacgtgcaggagcactccccggagcccaatggcgatggaggtggcggcgatcaccgccgggccggtcaaaaacctcacggccatggcgaacgtggccaccctcttaccgcaggagatgagcttcggttgcagagccatgaacagacctgggtcaaacgttgcacccgtcagaatttctcggctcaagtaaagaacgtacgtacgtctctaaacaagcatcaaaatgccaacggcgtacctaagctgaacatggccatgcctagccctgcgtcggataatatagatatcgatccctttataatcgagggcatctggatgttaaacctgagatttcatagagggaaaaattgttaatccaaccatgttaaccagtagtagtagtatagttagcaattcgcatgataaaagaatcaatgcattgcagatgcatgctggtgtatt

SEQ ID NO: 901 - DNA, 675 bp, Zea mays
accacctccaccgtggcgttgtacggcagcgtcctgaccctggtcgacttggccgtcgcgaggctcatgccgcgcggcggcctggtgtagtcgaactccaggggcggcgcgtcggggaagtcccgcgtgtagacgcccgccgtggcgttcctgaagtgcgcctccaggagggacatggcggcggggagcacgaaggaggcgttgttcatgctgccggcgaacacctgctgccggctgccgccgctgcaccgcgtctgctccggcctgcacgccgcgagccccagcccgatggtgacgagcatgcgcgtgtcgacggcgagcggcacggcgggggcacgggcgcccgggcggacgagcgcggccaggctcgtgaagaagcggtgcgccgtcgccgtgtcgttgggcggcggcatgatgggcgcgagcaccggccgccgccgccgcggtccctgcttgttctgctggtggccgacgtcgacgtactccacgacggctgtggcggtgctgttcctgaacgggaggctcgggcgcgcgctgttgtagggggaggccatcatgtagtagcggcgccgcgacggcggcgcggcggccgtggccatgagcgcgtccacggtctgcccccggcgcccaccaccacgacgtcggtctcgtaccggcgccgtgtagccccgcgtc

SEQ ID NO: 902 - DNA, 510 bp, Zea mays
tgacatccacggcagtgtcaaaggttcttgtgaacaacaattcgaagggctcctcaggatacagctctttccaaactttttctgactcaagtgtcgactttgtttgagtggacgactcaacgttgttattgttcagtattctgccatacactttcttgcagtcccttatgtactgaacctgaaagatatgtgctcgaataatcaggtccctcggttctctgaatagcatcatcaacaagggtacatgcatacaagatgcttatagatcatttccaaatatagtcatcatatgtatcagtaaaaaccatgcagttggctgtctgattcagcgttgagatcattcgtaacacacccaagggtacgtgaattacagatgatcatggtgagtagggtgtgtaccgggttaaggcgatggcagtgccatatccactcacaatcaagaggaacaaccaatggaccatctacaaccacacccttagtgtgcttgtcaagaagcggaagccagcatgc

SEQ ID NO: 903 - DNA, 493 bp, Zea mays
ctccagacggacctgaacagtatgcacgcatcgtcatcaatgcagtttctagtttttttttcaggacctagttttcacttcatcaaatttatgtgcagatatgtggcagtgatgaattcaatattttctgctcaacgttccatggtatcacatcaattgcttaatccattttagtcccattgagatttattgatcttttcgtttcaccagccagtcactatgttgttacttattacttcttctgtcccagtatataaggcgtaaccacctctggctcaaagaccaagaaatgtatttaattctctctatacttttgcatcgatgtacgcatgtctagagataatacgccttgtattatgggactagaataaaaagtagttacaccttatacactaagatagagtaagtacttaatatccaaatttgacacatgtagtgggttcagaaagagcaagacattggaatgtgcctatgtagatatgcatccataatt

SEQ ID NO: 904 - DNA, 683 bp, Zea mays
tccaatgcggcgccgggcccccacgccagaaatatacacggcgcggtgcaaatgcctggtgcatgcgcatacacgagaacggcagccaagcggcgcgagctacccatgccatggagagagaacctcctaggcctaacccaaaccatgcatctcgcgcgccatgcacgacctcatgcaccacctactagggtcccagccctgcgccgttgctttcgccttggacgaccacgccgcctcagatacgacgatccaaccccatccgcccggctggtggaggctgcccaaaaatatagaggcaggccaagggagactgggagaggtaggagtagcttaatttaaccgggtggcgggtgtgcgaagatccatccgttggattgcattggtgctagtaattgtgtactactgcctgtacgcagcgtatacatacgtgagccaatttctgtatgggacgacgacgacgacatgcacccacctccacctggccacccacccgcgccagcgccaccccatgactgatatctgtgatccatgctgctgctagagcgtgtttgattgccgggcttttaggacatgcagctccacttgtctgtttgcctggacgtacggcgccgcacgaaatccaaagcatcctggagccaggccacggcggagcaagtacaaagctcgctcgggctccgccggca

SEQ ID NO: 905 - DNA, 772 bp, Zea mays
tgcatatgcagcaaattaaaatcgagagctaagcatgcgccatcctccgcctcctcctgaaatgggcctgcacgatttattaaatatggcgacgctgcctgcctataattaaagcaacaatatatgcgtgcgccattgctttccctggaacttttcaggtgatatagtagcttaggttgacttgcgtcaacgacctgcatccgtttttaatgcaccctaaacagtaacgcgcaaaaaaaataaacaaaaccccccagcaactttttatgtacaagctagaccacctttaattgtgtacatgtacataaaattattctgtattcttggtctaattaacaaccttcggataagcacgcgcgcggaagatttttcgcaaaccacgtcagccgaagacataggacaaaaggatatatagattgatcttgtgttgcatatatgcacgaaggtgatcttgtgcgtagcatatctttctcaaattagtgagcaatgcaaatttgtctctgtagaccgattgtgtgtgcgcgcacgtgtacgtggagcctgttcatccgtgttccgtgtctttgactcactattgtcactgaaatttatagctaatatttttagggcttttgtttgagagagggtaatagatgagctaaaattcctttactatttaaaattgaatagtaaatgaattttagccccttcattcccccggtctccgaaacatgcccttattaagtgttagatgtgtgaccccaaaaggcctagcataaggcgactttggatc

SEQ ID NO: 906 - DNA, 782 bp, Zea mays
aagcaaccacttaacttcctcatttttctgctcacatgcattgcttgatacattaatttggggaaggaattttacagttaaaccagacatgttcattcatgtgttcaaggatactctactaccaaacaatcagaatgacaaccaaagttggcgaagcacacatgtcaatgttcactacagggaggaatatatgtgtagtgcctaccaaaagctgcatggggcagtaagccaggaagcaatgatgagggaaatcataaataaaccaactcaatcaatgtcttttccttctagatggatggatctcagtactcaccaatgaactgaaagccatttaatgtggcagatcaccaggctaatttctttttgaaccagtagcaaagtaggtggtctagtgggtagtggctaacagggctagatccatacatcagaatgcctacttttttggtccttagtatgcattgcattatcatgatttcgaagtccagtgcagttcattcagaatttctttgcatgaaatatctagtcataatcaccagtaatcaccacatgaacaagaaccatctctaaaatggtgaaaccggttggaatcccgcagtatgatcagtcttccctcaatcgcagagatacacttgaaagcagtgtgacagtctctgcatactctcaggttctttatcacccggatggggcctcccaggaggaatttttagaataccataagcaacagcaagcttctcgctatgatactttagcatgtgctctttctctttctcctcaacatatgc

SEQ ID NO: 907 - DNA, 780 bp, Zea mays
ctgtaccataatccccgtgacagtgttggcttattcatgacacaataattttcagaaaaggaaagatgaagaaagcattacttctgcatcagcttcgaaggggcccatgggacctgtgtttagcagtttgatgtatgaggaagacgaagggaatgattcgtaagtggtgtttacctcatggatgtcttctccagaagtttttattctataaattgttgcccgccttggaccgctgcttgtaattggaacaaactttaatgtatatgcagagaacttgctgacatccatgttttagcgagggaaggagcaactgaggatatagtgaagtttctggcagcgggtgtggaagtcaacatgagaggtttgtgtttgcaaactctaaaccatctaatgcttatgttatgtttataagaataacccattcaaacattgttcctatattgtattttcagatactgaaggtagaactccgctgcactgggctgttgaccgtggccatcttagtgctgttgaggttcttgcaaaagcaaatgcggacctgaatgccaaggtaagctggaactactgtatacttattgtgtgctactattcgtggcagatctcatctatttgatgagtaacatggagaaataggtgctagtccaatcatatagctgaatgaagcgcatttgattgtttgcatcttgaactacattaaaatagaaaacatgttgtttatgctcattatgacacttgattgctgtcagtagttcagcatacaatggtaatggcaccatggag

SEQ ID NO: 908 - DNA, 770 bp, Zea mays
tttgctgcctgcagtagtatgaattcatcaagggcaagggtgcagatgtcattccagcatttgtccaaagacaaacctttctttctttaaccatcaatttctagaaattcgtagtttattatcgtatgatttaagttcctagattaaccatgagaaatactttcatagcatataatttgcatgttgttaagctgtatgaacttgtaggaattgttggtcaaagatgtaaatgtttgaataaggacaatgccaaaatgacaattaaattgaaacaagagtatattataagcttaaacctatgtggccatcatggttcttaaagcggtaaggcgacgtcttatctatctaagaaccagcaagactaacatggagaggaagaaaaagaaaaaagaaaaagaaaaaaaggggtagcaggcccagcccaccatctagcccacatatcctccctgttgccctcctcctgccgatggggccgcccctgccctcgaagcagccgtcagcaccctagatttggcgttgccgacctcgattcgggctgccgccgccccgattcgagccaccgttgagctgatttggtcgtcgacgccccgattcaacgtgccccatctcctccctcttgctggttcttcgctgggcgatggggacacctagccactttggggcgcctggacgcctaggcgacacctttaaaaccatggtggccatagaagatccctcttagtgttgtatgcaaggaactaaggaaggtcctcatcaagttgcaaaagctg

SEQ ID NO: 909 - DNA, 763 bp, Zea mays
aacgatggaagttttttccctcaatttacaagtggaaaagcaagagcgttacattaaataagcttgttaaacttcagctttaccataaactcagtatattactaaaagattgttgaatcgactacgcattagtgaatccatgtatattcaaaatttggaatggtatgttaaataagcttccaaagttactttggcgaatcatccctcaacctgcggggaaagaaaaaaactcaaccacaagggggaagacgcccccctgggcattgtaataagttgtaccagaattcgaactgagaagctggtgcctgcccctgcggcattgcattaagaagaaacttctcacatgtaggccgagaaacaccccaaagactagccgtcctaggcatgccaccgagcgcccaggacacatacctacagccatgtgtgtctcactaaaagcggcacagattgttacacatataactcataaacatagccaatgaggggtgtttttttaaccccaagcctgtttaaattcgctcctatgggatagtcattttggctaaaaaaaggtgctaaacaacacagaggtcgggcccaggattgatgcaagcggtgctactaaggctcctattaccattaagctaagcatgtaatgatgtaatataacttagatttaacatttagagttgagagccaaattatcaatctacaaaacaaaacacgggagctcacaatcaattttctcatcaaggggagcattaggatgaaatactgagagagc

SEQ ID NO: 910 - DNA, 743 bp, Zea mays
aggagacaagacaatgttttcgttcaataagcttcaagctggaggaagcgacgctggagctctttgccaaatttggatggaaatttaataatagactttgtcctcttgattattgtttgccctttcaagcaagccggtaacccgattttggaatatgtggacgctatgtgcggaaacgcagaggcgggaaccttgtcccattgtctaaaaaatgatcagtaggaggcaactcatgctggtccctagaaaaatcagtaacagaaccaaaattacatatttattttgctctaaagtatggtaattggtaaattggtaatataacaagctatcagtttagtttcctcattcaaagatgtacaaagagctcaattgaagtgtgatctaagaagttctactgaaagattgtaacagcttttctattcttgaaggccatgttttgtgaattcgaacgtgtgttcacctgaacagagctactgcatcttcagcaatcccaaacaaaaacacacaaaaaaatgtttcatgtggctgtcgatttggtatctaatagattctcatcggcgctgatcagctctggtactttatcaagtagccggttcatctcttcagaaaattcaagtttggctcgatttgtctttcctccaacgaccactgtacttccatcttgcaatgcccatatctagtgcagcaggtaccaaaccataaattcgtataggtgcaaggcaattacaattcggctgtcaata

SEQ ID NO: 911 - DNA, 749 bp, Zea mays
atcatgtcgctgagaactgctctagcgacagcgtagtccgttctcttctgccgattaactcagtggagaatcgcgtgctgataacgtgttataactcggtggtaacgagacacgaaaatgtagagagaaagtgacagttatcctttattattgcagggagtcctgattatatacatgtgaaggggtgtatcccaagggatatgtcccttagggagaatctgtcgtaccctttggattggtcacatatacaatatacaatattttgtaacagctttgacaagacactccaaagatagatgaggacgaaaattatgttttattttttttttatttactgatttgtcgttatacacacaaatgtgaaggtatgtttctatagatgtacatatttagagagcagttgctcattgataaagtggtctataacacttcttgatcaacgacgtcatccatcacttagatcagtatactaagtatcagatattttggactctagatataatcttttcgtatattaagtatatttgtattttagacactaaaaactcgaataatctaatgtattcaaaattagacttttaaatatcaattaaactttatcattgtatatcactagtaatgtaagattaacacagtcgtttatttatgatatgaatattttttacattttaaatggtgtataacagtttttagtacattatttaaagtttaaaattacttgtaattagtaaataaataagtttaaattg

SEQ ID NO: 912 - DNA, 796 bp, Zea mays
ttgcagcgcgtcggatgccgccattctgggctggcttctgggaagagaaccgcctggatcgggggaagggaaagtataggttcgcggggatttcaggtggcagtgggcagtggcacagagggggttcgtaataagtgaggtgcgctgtgcctttgttcgtttgcctcgggatggacgtggacgtggctaggctgggcgaagaagaatgtcccgccactttgcgttaaggccctcggtcaaattttatttgcgcgtgctcaggggaagttgacggaactgaacagggtcggtgtgagtgtgacgtgttgcatgataaatttgctagaacgaataaaaatcgaattccttttttttcaaaatgatggaatttctttgtacaggagaaacatggagtttggaatgttttagaggaaaataaatatatatacatcatgcaacggaaacatcatacgaattagtatctccatttattatttaaagctgaacagtacaaatttacaattacaaacatcaaataagaaaattaaagagagtataaagtagtctgtagatgacgtgcaaacggaggcggtagggaagagcaggttgtttgactttctacgagatcatagttaatagaaatggcttcgagtttgtgaatgaagggaaaattcatgccgtgcaaacagaggcggcagcatgagtcatgctattccacgcgttcaatatgtgagtttttagatgggccgatgtgcaaaatgcgaacgggatccaaaaggtattgggagagaaggaatcttttttttgaatcacttga

SEQ ID NO: 913 - DNA, 717 bp, Zea mays
tgagagttcatatggtgcgaacttggtggcttcttcggggtgaattcgggaatgggattttgaacaggtcattccttaacccaaggagccatgacacgaaatcatttttgaaccatgaatggaacgaagtcactttggaactaagaacgaaatgaaataatgcagcatcaggaaacgcatacagaacgaaagagacgaggctgtgtcgttgcaaataatgttgagatatagatggcattgccattgtgttaccgtactatgtaggtataatgaagcattatcaacatgtattgatgaacagataattaaaactaatttaaaagcaacaacacaaaagcaccagtggtctagtggtagaatagtaccctgccacggtacagacccgggttcgattcccggctggtgcaatttttaattttttttatttcgtttgctttttcccattatttttttaatcattgttgttaattgatgaccaatccacagtttactacaagattgtttactaccagaacagtctcatatatatatacatcgatcgaatgatcgatgaaatgctaacccagaagtgtatccaatccacatcacataaaatagttgaatggttattcatatttgcatattgcagttcagatcagctttgggtatttaaaagcaatatcacaaaagcaccagtggtctagtggtagaatagtaccctgccccggtacagacccg

SEQ ID NO: 914 - DNA, 744 bp, Zea mays
aacagcatgaatgatggaacggacttgttgacacacttttagggcgtttggttttagaaatcactccatctaaattgagtgatgtattatgggttcattttttaaatttagtagtttgattccattattcaatagtactaactaactataaggaattaactataaggaatgatgtggtgatgaattaactcattttattttaaaaatcaaacaaatataatgaggagtgagaagatgataaactagcttatttctcaaaccaaacacttcatttgtattgcctgtttgcaagggtaatggcaccggattcacaagtttgcgctgcatttctctgcgttcggtacaatggtacatgtgtacaatgaacagaaaaatagtattagtcagacttcctcctgcatttacaccggttctaaactagagccagttttcttccatttcctttgaattatccattttccaccagccacaccttttatatagatgctgtctcgaccatatgaacatccttcttgctagataggagagtgccatacaaacccattggccaagaatgccagatctggtctgatgatttgtcattaccaacatgtcagtgtaaagccaagccaggtttcccaatttgattgttgcctttttgatcagtggatggcaaaaaatagcgtcacttcaccatttcccatcagttttcatgtattatgtatcaccgcactattgttttgaagttcaaattcagtgcattcg

SEQ ID NO: 915 - DNA, 775 bp, Zea mays
tgcatgcctgcaggcggtggacctctccaacaactcgcttggcccggcgttcccgcgcctggggcggaaggtggccagcgtcgtgctcagcggcaaccgcttcggcaacggggtccccgccgaggaggtcgcctcgctctacctcctggagcgcctggacgtgtcgaggaaccggttcgtcggcccgctcccgccggcgctgctcgcgctcccgtccatcgagtacctcagcgtcgcagggaaccgcttcacgggcctgctcgccgccaacatgtcctgcggcgagaacctccggttcgtggacgtgtcttcgaacctcctcacggggacgctcccgtcgtgcctgaagacgctcccgtcgtcctccaactccaagcaggtgacggtcctggcggcgtccaactgcctgtccggcggcgccggcagcacgcagcacccggccctgttctgccagaaccaggcgctggccgtgggcatcgtgcccgtgcaggcgcggggcggcggcaaggccaaaggcaaggccggagccgtggccggcgccgtggcggccgcgctggccgccgcgctgctcgccggcgtggccgcgttcctcttcccgcggagggcggccgtgaggcgcgccaaggccaggccgcccccgcggctggtggagcacgcggcgtcgtccatgtcggtccgcggcgggcgcccgtaacccgcgcagcttgtcgccgacgcgcggtacaatttgcagaccgtgaaactgggcgcgctgggcgttcccgcgtaccgggcc

SEQ ID NO: 916 - DNA, 841 bp, Zea mays
gcatgcctgcagctatatgttatgttggatttaatttggtatggacatgtactaagctaatatatttaagacatttaaagtgagcaactcacaaagagttgccatctatggagtgaatgagatatattagtttgacctggttttatatgtcttaaatatctttagttctttcgaaatttgaaatttaagttggatctttactagtgcataaagattataatatcgccatgacactttgcgtttagtgtccatcaagcttactagtcttataatttgtgcccttgtgctttgcaagttgatacattgtattttgcagttgcttaaacagagtagagcagtactaaatctttaattttctcccctttatgtacaaccttgcatacagtatttctgggagcaagatgagtttgatatcatcagtcgccaaacaaggatcagtctccactttcaaggcggaaagaaacagatgatgcgatatgctttcacataccattggcgcctgtaagtagcttgaacattacttgtcaaaacttcacttcagaatcatcgcttattattcccattcacaatttcacatggtgcaatcttacagaggcggctgtaagtgtgtaactctttcagctacttcactaattcattagcattagaactcaaacattagcatagaaactctaggtatagttttaacagtattttggttgcagaattgcaccatggcatgagggttggcttgcaaaaatttaacttgaattttttcttggcttggcatttgcttttagatgttttctggcgatacgtttttttggctttggtttccaacttcccattcccaatgcccata

SEQ ID NO: 917 - DNA, 766 bp, Zea mays
gtatcagcacaagaaaagaaatcagaattatccatagcatatacataaaagtctaaaagagttacatcattaagaaagcattaagagttatgatcttgtgaagctcaacttgaacaacactatacattatcagtggtttgtcctgattaaatagctgttatgatgcctcaataaaacaaagcttagaagaggcacaacctgcacgcaccccattatccccagccttcttcaatccaactttcttgatcacaaagctagaaccaatgaatgcactagatgacatggctaaagtcaagcccctcacattgtctaaagacgccaccatgcctggaatatatttatttctgtcaagtactaaaagaaccaattcctacaatccaagggacaagaataagtaaataaaataaaataggaaaaaaaaccatctagataacaattaaagaaccacaactcattgtcccaatgttccatatgagaaaaaatgaatatttgattataacatacattatttttattcattctgctggaaaccataacaacctaactctaaccagcgtgggttgagtgtatatatattggaaaaggggtacatggtctgggccaaggtccataacccttagactgattacaataagacacaagcatctaacaccactgctatcctccacaaggcccgtgacgaggccttcgtaagggccatcctccacaaggctctgactacctcggagcagctcttccacgacgccgacagatacatcgccgcaaa

SEQ ID NO: 918 - DNA, 517 bp, Zea mays
ttgcatgcctgcaggcaaagtactctccctcaagtatgtgtatatcggctataatcgtcacaggtttgattcaatacagtaaaacgctataagtccgacggctcacttatgtccgacggccgcatagggaaccgtcggacataatttttgatatccgagggctggtaggcgggccgtcggatataagcttatgtccgacagctgacagacaagccgtcggacataagggaatttaaccgacggcccgcgtccgcgtcggttcattctgtctttctctcccgctcctcatatgtgtagccgtcgtcgctcggaaccgccgcccaagcctcttccggcgacctccagccccgtcccgacgcccagccattattatttgcagctgactttattatcaccacctctaatcattcatagtacagctgactttgtagttcaattttgttgccagtgagtaggtgtggtgataaaaaaaaactagtgcatatgctgccaattaataaaaattggttgccaacgt

SEQ ID NO: 919 - DNA, 547 bp, Zea mays
ttgccaatttgctcacaccggtgcatcagcaataatctatatatgtactactcactctatctactactagcagttagctacagaaacaaactacataacataaaaaaatgacagtttggtttgattatacaagtggttgaaaaggtgactttttttttctccagatgttttactttcacagacaggcggagcactatgcatgcagggcacacagtgactgacagtttgctccattcgggagatcgagtttaactgcaaggacaaggggaaaggcatctccggttttatggatggcggccatgtctctcctactctctctcttaccctacacctttagatccccctgcatggctgcacctgcactgtcctctgttaaagcccctgttcttcttaaagttgacagcttgccaaacagctcttgctaccgagagagagagaaaaaaaacctcagctgctaaatgcagatgttctgagtcctcaagaataatgaatgggcaagaagaaggagcggtgtgatgccagctccgcgagattctattccttcccc

SEQ ID NO: 920 - DNA, 766 bp, Zea mays
  unsure (1)..(766): unsure at all n locations
aagcggatgatgacgcccaggcgcccagctcgctcatcctcgacgtcagtatgtacgccgacattgtacgtgcgctcgaccggaccgcgatcccgtaccgtagatatatactcctccactcatgtgccataggtttcaattcgatcgtgatggtgcaggtggtcaccgtggtgctggccagcggcgtgggcgcgggcttcggcgccaccgacgacgtcttggagtacgtcgagcatggctcgcggtgggcggaagaggccacgcaagatctcgtcaagtactaccacaaggggctcatcgccatcgtcttcctcctcatcggcatggtcctgtccgtgtgcgccactgtcgtctccaccaggctccgggtcagggcagcaagcaacgacgacatcgccgacgacgtctgaccagtggatccgggcgcgcgcgagagagattaagcaaactcaacctgtgcgttagttcagaatgcatgaccctcctatgtgtggtaaattggtaatcagctggggacaagaggctccccctcttgccttgcctcagaatcttgttaacaatgttgcacgatatatatatatatatatgtccatttgtgtgattaagttatttctgaaatcctctcgattntttaatcgaagacctgagatgccatgccttcctagctagtttactagtagcaccgaattttaatttgttgcttccatgaggactaaattttcataataaatgttttcctttcatggatcctaggacccccggggtt

SEQ ID NO: 921 - DNA, 735 bp, Zea mays
gcgcgcactcgtttgcttgttcagccgtacgtgcaacattggggtgggtagctgggtcgtacggaccacggtagtgacctcctcttttcgacgtactcctgccgtcatgctgtgtgctatagctagaccgctaggagagtatggacacacaccagtacaccacacagctatcggttggcaaacggtatcaacagatgggacgatggggaaaggcagcggcaatctagtagcagctgcatgcacacgaattcctcgtcttcatgatggcccgccccgcccgcctttcatgtcatcgtcggcactcagctccgcagcagggacgaaacgacggcacgccggcagatctctgtctgatctcggtgaccgcacgcacgtcaaatacgccatgagaccacagcaagacgacacgcccacaagatcatgagacatgagctaggactctactacagatctacgtacgtaccactagcttgatcgatgaattccattatattctagcttatctcgttagaataatccatatatgggagtctaatcaggagacgggagtgttcattggttattacttccaagcaataatatatataccattggtccgatccttggccaaggaaacaagaatggaagcatatcaacagttgttgttcatcactttctcactgccaccagagcgtatcagctgaaccaagccccctcattgcagatgcaggccataatgcagcggataatgcatta

SEQ ID NO: 922 - DNA, 767 bp, Zea mays
acccatctcacaatctcctggcactgccagactccacatcgtttagagtctctcttagggtgatgatcccaccgtgcccaggaatatcgactgtttcgatttcggttggtctcacgctgtatgagttcgcatttctgctgttcccctcctcggctaaccggaccgcgtatgcgtgaggccacaaagctgaaaagtagattgtgcaatattctgtgacatgttgaacataacctgagaactcaatagttagtaaaaaaaaagtgaatagtatgtaccatcgccatcgaaaggatatgggaaaaactgtaggtagcaaaacgaagcaactgtaagacctgcaaaaccaagtggccatgacgagaaatatgatcaattatgtatgttcagaacatctagaaaaatctgcattctcttttgaaaagatctatcaaaattttacagacctataagaccccctgcaaatacatcttgccaatgatgccagtagtcgtccactcgagaaacagccacaagtgcggcagtaaggagaggcaggaacacaatgcatagcttcgcaatatgccctttgcggtcaaaggctgtgagtttcccagctaagtaccatgcaaggaagcctagaccagcaaaagaccctgaagtagtgtaataagcaatgacaacacaaactttagatgatagagccatcacaatgtaaaaaaaaatgaggtaccgagttgaaagttagcttcattaataatttacagagtattgggaatattacaaaagtt

SEQ ID NO: 923 - DNA, 748 bp, Zea mays
acggtcatgaagtctacacggcgtcagctagaaagggagctgttaattgaagatattcagaggattgaggacatgccatcatacaggcttctggcccggtagctagaagaaactgaaaccttaacatggctacatattgcaaggcggcttgagatgctaatggatcgcaacttatgtggacggcgacaatcttgaaatgtagatgacatgtatccttgtgtgttaggtacttgtggtctctggtaacctgatctctgaagattacaaggtagggttttttttcctggtgatagaatgccacgtagggtaactgaagtgtctgatcagctcccatggccaaaaaaaaaaaaatttgtagggtgtgttattacaatctggtcgttgtccatcataccacgaaaggaagtattcctagggttgttgttgtaaacaggaggatttgggaaagatgatctgtgttgtctcccatttgcttgaagataagaggctagttctttttaagtgggcagctactctgctgtgccgctccccaagatctgtttgcgctgttcgtgccaagcctgcctacaccattttattcccgctggtgtgttccttttacgaatcgtgcttgcagttttctgtatttacctgatggttcatggcaaagagaatgctgcgtcatcataatataactacagtactttgtaagccgttcttcaactgttctctattattattgaaagatgcaaaatatgtgcacgcttca

SEQ ID NO: 924 - DNA, 790 bp, Zea mays
agcttgcatgcctgcagcgcgtccctgatggacggcctcttgctcggcaccatggcgcagcacgcggcgcccagccggaggcagctcgccaccgcttcctcctcctcctcccgcccttccacctcgcggcgcagcgtggggtccaccaccccgagcgcctgcgcctgcgccttcccctccgccgcagcgcactggcacagctccaggctcgtcagcgcgcgcccggccaccagctccagcaggagcacgccgaacgagtacacgtcccacttgccgctcgccctggggctcctcacggcctccggcgcccggtagtgcgccgccgtgtcgacggccgggctcgccggttgcgcggccgtgccgcctacgtggctgggcggcggcgacaggtcggggaggctcttggccgaacgtttgctcccgccgaaccgacccgccagcgccgccgacgacggcttcgtcagcccgccgccgtccgcgctgcggaccagccggtccacgccgaggtccgccagcagcggctccatgtccgcgtccagcaggatgttgcttggcttcacgttgccgtgcacccacttcttgtcgtggaggtacgccaggcctctcgccacgccgcgcgcgatgcggagccgcgcgctccacccgaggttgatcggcgacgacccctgcttccctgcatgcggccatttattgtcattttgggcaacggcccgggtgggtgatgatgatggaccgaattcccaatagataacgtacttttaacggagtggttggcgagaatgcccgtgat

SEQ ID NO: 925 - DNA, 1106 bp, Zea mays
tcctcctgcacgccggcattcggcttcgggctcgctgccggcagcacgaaccgcacccgcttcttggggccaaccaccgggggaggagtgggcgacggcgaccgtatctccctgctggcctgggacgggccgacggtcttctccactgtagcctcttcctcgagcatgcggatgctgttggagcggactaccgccatgcgctgctcctcctcgtcgaactcctcgggcatgccgttcaacttggacgaccctgaccggatgaactccgcgacgctgcacaccagctccttctcgaactcaatgtcgtccttgtggaagtcgtggtagccgtacctgacgatgcaccggtacattctgtactgcttcgggccgatcctcccaacgaggaacctctcttcaggacggacatgtggtattggtacgttcttgatgcacatgaatatgagtacctggtcatgaccaacaatggtcaatagcagggtaaaagtacttctgaaaccatgtctgaactttggacaaaatggaatcatcgatcgattgaacaaaaaggactgaggctacctggtggaaggctggtaagttggtgacaaaatgcgagaagattgccgggacgccagtttcgagctcggtgtggatgaggccaatgccgcggacacgaactatgccgaggttcgggctgagaccaaggagcccattgatggaaaccttgctctggacgtcaaactcatacctcttgatggtgcccataatgccagaggcacattattaaaatgaagataaaagcaagggcgattgggacccaggccccctccctggacttgatgagtgccccttaagaatacaatgccttaatggttccaagaacaccatggaagccattggccgaaatatgctttatgccgccccagaattttaccaggggcatcggacccttggcccagctgacggtttcaaccaacctggtaaaaaacctgccggggaaggcgctttctctatttttttttccccaaaatgggttaaagttatcaaaataaatgggtccgggttcccagtttgttttaacaggggcgttgccatttaaaacatttcgggggttttcccccttc

SEQ ID NO: 926 - DNA, 783 bp, Zea mays
aaatggactccaagccctactgcctcaatggtaacacttctaataaaagcaactgcgcctgtcaaacaagaaatgaaactgtcgttgttagtggtatggatgatggtgtcaccatcaaacagttcatagtaccactgcataatcacaattccagcagaaatgctagctgacataatttgtatattttctacactatatatctatctttacctctttgcattcccttgagcaatttccgatccttcttgtagcttttgatgggcaacgagaccaactttctggtccctgaaccaacagcaactagtgatcttattggaggaagcccttttagcaatttgtgcacctagacaacagatacttcagttcagactaaggggggattaattcataaatcaagtggaaatatagtattttctctgtatttgcacaagcaaatcaaaaaattatatatatatttcttttatactttttctgctatcaagtttttacatgttccgtgtccctcatgcaaaagcatacatgtctgagagtacaggtgcacaaggggagataaggacctgatttttagaaatgtcttccaaccattccgctgctaccgtatcacctatgctgttccatccgtaaatgcccattgcagaaacatgcttaagcttcaaatcaattccctgtgcaataaatctcatatcagggttgttatacataatcgtcagaaagtttctttgctactaaaatgtgtttctttcactagaatttaccttccatggaagaatgttgagaagttct

SEQ ID NO: 927 - DNA, 759 bp, Zea mays
  unsure (1)..(759): unsure at all n locations
gcatgcagctcatccgcttacagcttctcggcggcgaggctagcctccccatcgttactaacgccgcggcgtactctgcttcggccgttcaccatcccacgcaggcggagttccagcagcccgcggcgttcttgccgcagccgtcgcatgttgcgtacgtggacttgacgaacgagtacgccgcggacgccactgtcgcctcggccggcggcgaggcggccttccgggcggagccggtgatgatccggttcgggggtgagccttcgccggtgtccgaccccagccggaggccgctgctcacgatctctctgcctccggcctcgcacgcttggggcccggcggccgtgccgctggaggcacctggcgcggcggccctggacgcgaacgacttccgcaagtaccgcggcgtgcggcagcggccgtggggcaagttcgcggcggagatccgcgaccccaagaagcggggctcccgcgtgtggctcggcacctacgacaccgccatcgaggccgcgcgcgcctacgaccgcgccgcgttccgcatgcgcggcgccaaggccatcctcaacttccctaacgaggtaggcacccgcggcgcggacttcctcgcgccgccgccgccgnncgccgaagccgcggcaacgtcccagaacaaacggaagctgatgcacgacgccgaggccacggccacggccggggccgggagccgagccgagccagccaagtccgtcaaggccgaggcgtccggtcgccggcgtcgtc

SEQ ID NO: 928 - DNA, 780 bp, Zea mays
  unsure (1)..(780): unsure at all n locations
accaaattaataaagctttgggacatactccatcctgaaatgataagcatatttgatcagggaaagtcatacaatgtagctttggacccttaatttcttttaaaatatgttgtcatttgctaaagagttaataccattttagaagcactttgaatacaaacttattggtgcaagttgtatataatctaacaaattgttggtcaaagtttgtaaaatttacttcttgttcaaaatacgcttatcattctgggatggagggggcagttccttaaatcattaatgaaaaagtttgttacgattccattttgctttctgttctctgggtatcactatatgaaactctgtgcaggtctggaactgttgcatctggcacaaccaaagcagatttgctttctacacaaaatggtcttgttatgcgacccttaaataggagtgatcaagacaatggtttccatcctactaacaaaagggaacgtcaagctgcattagataaagaaacgcccaacccgagaaccattaacaagtaagatgtgcttttttacctgttctgctctatgctcctctattttatcatttaccacattaaactaagaaagttatcttctgctgcacactgagtcctaattctttcatcataactgtgattagtatttcaccttcaccgccaactcagttcacacacttgaatgaacaaaatcaggccttgacacattgattnttcaggcctaatgaagacgacagtggatgtaacattgcatcattaccgaaggcgaatggatc

SEQ ID NO: 929 - DNA, 771 bp, Zea mays
tttgagccagatgatcttgctgtggtggtgctgaggtgaaagttgtcttcaatccctggtcgtttgtacactttgcaaagagaaatttcctgtatatgatacgaagatgagttaaccaagactaataacaaagttaaattggtgttcctaatagacgttataaaggaaaataactcatgcaattagaagaggcactgaaatttttcttataggcaaatgatttaagtacatatatatatgcaccatgcatggttatatattgaaagagaggaagtttgtatctagaataatagtgcaacttgaaaaaatgttttgttttgaaggaggttgtgtgtttcttcatgccagggacgacgccagggaggtgtagagggggacaatgtgcccgggcccctaatcttcccttaattccataagagccactaaattttctagctaatcaccatgtaaataatgaaaaatatttattagtagcctcccttaatctgatttaatttgtccctgtcaaacctaaatcatggctttgcccctgcttcatgctacactggcacataacagttctccaaaatgttaattaattaaacctttgatctgaaggttggggccgttcttacagttcggactacctataatatataaattggtttggagaacccatgaaggtaccgttagattttccccttttttgagtaagcttatttattccatcccaaagaatatggtgcaaggattctttgaaaaaagttaaggtttgccaaaaaaacttttttt

SEQ ID NO: 930 - DNA, 772 bp, Zea mays
tcttataggattgattctctgtcaatgtcgatatcattaactaacaatgtttaataatgtagtgacatgcaggtgtattacctttcaagttgcaatgaagatggttctgatccagaatatgagaaattggggtggaaaaagcttgaggattatgatccatctcagaaacgttggaattgtcttgctagcctagttgagggtggtggtctttcagaagatctggatgatgatactgatgagatgacaataaatgattactatgcaagcctgccatttgcggcactattctctgcctgcaaggtgtctgattttatttcagattcaaaagattttattgcctcaaaagttgagtgaatgttatactatcactttatctgtgataggctaaaggcttgaaagtttcttgtgtactgtgctactgctcggaaggcgacaacatgccagaatctttccagttagctgaagcaatatgcaaacttctaggtcatggccctgagaaattccatggtacatttctataccgtcttaacacttattctgaaaagtgtatttcgatctattcatctgttgccagactattaaagtactgtgtttaagtgctttacccctttaaattgtcccttcaatttttatatttttggaaatgttgtttctaggcatcctgtcaccataagacatgtttgggtagccttcttaataaatctttttgtgcgcatacaggaaatgggtcaaatggatggatcgttcccttgtcatggcaatcagtttatgg

SEQ ID NO: 931 - DNA, 771 bp, Zea mays
gatggacagcagatcgacatcaaacgactagctagctagtagccacccatgcatgcatgcatcatcaaatttcagaacatgcatgcacgcaccacttgcaatgcaccattgtagttcccagccacgccggttgatagcacctccagcgtcgcggctctcgacacgatactcgagaacacggccgcatactggttctgcgcagaagaaaatcgaattaaaagttcagaagccagcaatcataatcagctgctgatcgatcaaatgtatgtgcatggatcataccacgtccatgaggatttcgacgaggttggcatgggtcatgatgacgacggcgctgtcacgcgacgcctccgagttgagcccgtacggcttgggcccgagcccgccggggaacaagcgcgcgtactcctcctcgttaagcgtctcctcctcagcggacccatcgagccccgcgggcgcgttccacagcggctcgtccagctgcgccatccgaaccagctcctccatggccgccacggccagctccacgatcataggcttgtcggcgtccgactgcacggcggcgcccctcagcagcaggtccccggcaccggcagcaccagcagcagcgacgacaccgccgccgccgaacatgtcagcggcagcgccatacggcggcgccatgtccagcggcggcaacgcgggggcgcgtgccccggccccgggccagcgggctggacagcacggggaagggcaccatgggcctgcccacgtacttggcggggaaggagg

SEQ ID NO: 932 - DNA, 738 bp, Zea mays
agttggggccacccgcagatcaaggagtactggtgttggccttctgatggccgtgcgagggtccacatacatgatcaggcaatatataaaggagccaggattcaatgtagcgaatgagatggcatccatcaaccaggagataagacagattggtagaatgatggtcatatcaggcaatatattggagccgccggaatggattctgcaagcccaagacctggcctgtgatgtgcaggatttcacggatatctacacatggctgcaaagcaaatcgcggaggcgtgcccttgcacatataggctacatagcgcagctgaaggatcggatcagcagccttcgagagtggcaacagagaggaggcagcagcagcagcagcagccagcaggagcgtgctgctgccttgtccttctcgcggcgatcatgcgggccttgcgcccctgaggatgtgctagttggcattgatcagcccagaaaagaactttcggacctcattttcgaaagggaggatgttgtgcatatcgtgcaacagaagcccagggtggtctctgtcgttgggtatagtggcattggcaagacagccctggcaagagcagtctactacgaccggagtgtccgttctgcctttgacgacgttgcttgggttgtggcatttgagtgcagccattggtgcgaccttgtaagtaagatctgccagcaggtcaaggacgaacaagccaggaacggtggctgtcgtctccc

SEQ ID NO: 933 - DNA, 777 bp, Zea mays
tttaccggaatgctccaaggtgaggagctctcacaagcgtacgccagtggagatgtatttgcaatgccttcagaatccgagaccctcgggcaagtagtgctggagtccatggcttctggagtcccagtcgttgctgctcgtgctggagggatacctgatataatacccaaggacaaggagggtaagacaagctttctgtttacacccggagatctcgatgagtgtgtgaggaagatagagcagctcctcagttcaaaagatctcagggaaaccattggaatggctgccagagaagagatggagaagtgtgactggaggacagcctcgaagaaaatccgcaacgagcactacagcaccgcgatatcgtactggcggaagaagatgggcaagactaaccagacctccttgtttcaggattcttctgtcgctgccctctccaactagttgctgttaataactaaagaatttgtacattgtacccaaacagcttgcgagttttgtgtggctagctgcattcaaatgtccacagtctgactgactacggcttgtattcgattcatgtacatttagacagcacttaagattgccgatctgctaactcagaaagtttggcacaaatgctccgataattttgacgtacttgtctcgtgctgatgtgcagtgtagaggcttgttgctgtcagtggcttcggccatgttctaatgtaccagaactaatagtagctgctaaaaataataaaacatttaacagtctagctatattaactattatgattt

SEQ ID NO: 934 - DNA, 801 bp, Zea mays
tgcctgcagggtgcagcagtcactgcgtgtggccctgagcacccccgtctgtccactcaccagccatgcagtcgaccgcagaggatccgaatccatccgagactggaagcgagcatggttcggtcaaagccttgaaggtgaggcgtcaaataatggcggtgtgcggtgtccgagagtgacgcgtccgggcacgtccactcctcgcttgaagacgtgtccagccgacatgtatggtcaggcggaagattctattctatctctatacgatgcacaggtgttggtatgggtgcggtgtagaactttcctagacccatacagagaaagagcagagacgtcagagagccatacatgtgcggtgcaagttgcgggcctgtgtgtctggtggaggtcgatctcctccaccatgaccaattcctcgcctcacctggtcacggctcagcgcacgcgttgagtacgcgagaggggtatcgcttgccgtcaaccgccgccggactagcggatggcgttgtgtgggtgaggcagcggttccttgggcacttcgtcacccgtttatctgcgcgcctctagctttggacatatggtggatagatgggaagattgatgcctcctcgtccatcattccatccttcgccttttggccgctactatgccgcccgtcaaatcaaacgagccggcaggaagggacaggcgcagaaaccgagacgatttacgaatcagatgccatctttaaaacaataaataaactagaggaaaattttctctaggaagcatactccatttcttgtaggtgtcgctaccgca

SEQ ID NO: 935 - DNA, 670 bp, Zea mays
atgcgatggtggttataggggcaatccatatgtacccaatggctgctcacgggataaaggtaatcctttactaaatttcatccgtatattattgggcgatcttctacgccttccatttcaaattataagttgtttagagaccataacacctaatatagggatgtttgaattcactagagctaatagttagttagctaaaaatatactagttaattaactagtaaccaatttactaaaaataactaatagatgaactatttgatagggtgtttggatgtctttagctaattttagccactaactattatctctactgcattcaaacaccccttagattctactagatcattagcagcaaagaagggatctcgcgtaacagtctagagatgaagtcagtttgattttcgattggatcttcagttctccactcgacgccggcccagcggagctaagggcagaaacagctcaaatcccggagaactccttccaccaggcgtcgagtagagtgtgcgcggtggctggaggagattttgacgcccagagacgggagaagcgactagagaagagtgttaagtttcttctagcgcaaccccccgggggtaggggtgaaaaacggtcgggaaaaccaatcgggttaaacaacaaaaaacccaatttaatggtttggcca

SEQ ID NO: 936 - DNA, 747 bp, Zea mays
gaggaagaagacaaggaggaggaaaaggcgtcggctgcgactgcgagcgactcaggacgcggctgccgacgaacgacgccgcggctttataccgcttcctcctcctcctcctccgtctccccttgagcactactacggttggggttgacgaagtgtttaatgtactggcttcgccgccaattaatcatcgagcttttcttcgtctcttctcccttttttgtagtatttcgcagcaaccatttgctggcccgagctcgtcccaacccgccagaacccacctacccggatacccggagattaaacagcgggcgcccaccagcagcagcttacgcacaggatgacacgcgggccacacgctgctacctccggcggctctgtgctggactctgtttttttttccgttaggcgacctctaaagttaggcgcgttcctacgtgcgacgacgaggacgccgagaccgcggcgacctggtggtctgtctggctctggcactaccgattcctctctctctcgagcgcgcgcgcgtgcgctttggcccgtgctttaggtgggcgcccgggctcgatgaccaatgggccccgcccggcccgtatttcacggccgtgtttatcggcggcacgccacctcgtcgttcgtcaagccacgtacgtgcgaacgcgcgcgttcgtcttcgcgcccctgccttgttcgtcttccatttccttgcctttttttcttcttattattcgatgaagaaagacttcatac

SEQ ID NO: 937 - DNA, 413 bp, Zea mays
tgcatgcctgcagctcggggttaggttctacgtggtagggtgctccgtgggcggctacccagcatggagctgcctcaaatacattcccaacaggtcgtaccactaccaccaccgtctcagtagaaaaaacaaaccgcagcaggtgtggtatcgatcagctcgtgtatatatatatatgttctgaatgggtgggctctcggtctcgtcgcaggctggccggagtggccctggccgcgccggcggtgaactactggtggccgctgcctgctaacgtgtcgagggccgcgtacgggaggctccacgcccgggaccgtaggaccttctggatcgcgcaccacgcgccggcgctgctccacgcctggctcgcgcagaagtggttccgggtgtcgccgatcgtcagggccgagcgcgac

SEQ ID NO: 938 - DNA, 699 bp, Zea mays
atatgacagctcccgagtatattaagaagaggaccttctttcacgcagctcaagaaaacccccgaactctgccccacccatacacaacaacattgtagcccatgtgagaacaaccgggaccgggccttagacctatgcttcggccatagttgttaaggcggtaaggcgaagtaaggcggatgaccccctttttatctttaagcgataaggcgtaaagcaaggcgacaccttaaatgtagttaaaaatagaaaaatattaatatttaagaaagcatttaggataaaaacattaataaagaagagaaaaagaaaaggtagtctcgccctacaaatcagccccctagtccattaaatctagagtaagcccactacctctccctctctcctaaacctctccatctgtctccttagtccacagccacaagactcagccgcacaactccatcctcccagccgtcgctccctctctccccactagtatttctctctccacgttggctccctctcttctgtatcggcaccacagctgtgctggagccgccgcacgccgctgtcacgccatggaggagccaccacgccgctgctagagcagccgcggcaccgctggtagagccaccggcggcctctcccactcaccttaggtgtcggaataaggcgagcaggacggcttacgccgccggggcgccttaccgcctaggc

SEQ ID NO: 939 - DNA, 617 bp, Zea mays
tttgggtttatgaccccgggccccgcgccacttagaccagtacgagtagcgagtaggcgtgccagccgagccgatcggacgcggcaggacagtcaaagctctgtacgtaccgtactagtacggacgagccgcgaggtgctgctgccgccgtgtccctccgtcccgccctcccaggcaggctccgagcaacacgcagagcgccaggccagtggcacaagtgcggcagggaggtgggggcccgccacccgggcgcgaggccgggatcaggggacccgcatggtcacgtcacgggacggcgtcccgaggcagccaggcaggggacggacggacgagtagggatggattcggatcgaatacggattcgaatgtcactatttaccatattttaatccgaatacggatacggatacgaatattgtcgaatactaatacaaaacggatagttcgaattcggatttacattcggatacttacttgatttagaacatagcatcataacaagtattaatttgttttatcgatggatttatagttgataaaaatcacattacaagcaaattatgaacaatagtacatatacattatttagttgaaacttagttgaatatgatattttt

SEQ ID NO: 940 - DNA, 493 bp, Zea mays
acagacctgaactttttccattgcagatacaagtgtggtttgtacatgactgggatattcttgacgtgctggggcaattcctagcttccccctctgttccgtgtcgttagctgttgtcgcagaatagttatctgccacaactcaaaaggtttaggctttagctaagcaaaaaaatgtctgacaaattaattataatctacaataacatacttcctgagactggtccttttatctgatgatttctctttggtctccatgacttggaaaatagcccacccagacttcccagaagcttctcactctgaagagaacaaaagttttgacatattgttgcaatgaattgaccaagaccaaacattatagcatgataataaatttttaaaaatagtaacatcccaactcatatttatatatgtagagcgcactcaaaaatttaaaatgaatctatgaatcatcaaggcaagagtgacaacaaaacaaaaaaaaacatgtc

SEQ ID NO: 941 - DNA, 590 bp, Zea mays
attcacggatacaggaagcaacatcaaggtccgaaacacaaaatatgtcatttccttcaaaataacaggaccagcatcaaaaacaaaaaataaggactgttgtgtataacactgaaccatggagaaaaaaatctacactccaataccaagtagtggaaccaaatgattgtacaaccaactataatggatatatatcccacaccaatattaacaccgtggtcacacctgaactcctgaaccaatgattaaccttttcacgactgggtgcaccgcaggacaaaccaaaagcatgtacagcaaaacagcgaacagggtgaaaaatcgcaatatctcccctgtggcttgtgctagcaacccacagccaacccttcttttggggcagaggtgacgcactcttttgtagtagtagaggtcacacgaagaatggcttgggcacttaatgcggagagcttggactggcagaaagcctcccatgattcagcatctggcgaggcagaggcctcgacctcgtgttcgtcagaagttgaggcctgagacttctcatagaatgcttgcagttccagtgccaggttgcgagcagcctcccttga

SEQ ID NO: 942 - DNA, 795 bp, Zea mays
acaaaaccggaagcttgttttccacatttcactagtcgattggcacttccacctccatcttaaggccaggatggtcgatgatctgaaacaacagccacaagaacacattctcagacgtgctaccgacatataagacggccacaaggcttgtagatggatatggaaccgcaatagacatcgaagaatatgcaaatagcctatgatatgatacagcggtggattttggctttactaacgcctttgcttcccctcttaatagaaaaaaacgtgctttttgcgtggattgtttctacctaggctatcaatacagcaacacgcaattctcttgcatgtgttcagagggagggaaaacagatatatggacacggaaaaggatttctgcacctggataaaatcttcaagcgagaatgcgtaatccctcgtgtaccctgcttcttccagaacttcagttaccacttgctgcaagacgtcaatatgatatgtctcacgctgatattgcacaattccgtataaaaaccacacggccaatttagatatataataagcacctctctttgttcctcggacatgaatgaccctgttaggtcccgtaaaacctctagcagatccttgaaggtaatttttcccttgccatcgatgtcataaaccttgaatataactgcttcaccaaacagacaaagaaaaacgttgagggaagtgagtaatcatgagaacttcatcatgcaacacctacgtgcttttgatataagtaggaagaaaacaaccaaatgcaaacgctatggcagtcaggattac

SEQ ID NO: 943 - DNA, 811 bp, Zea mays
gcctgcaccatagattttcaggagactggaataaaatagaatatatacgaggcaaggctggatggaggattgatgtgtgttgtattgtaacgagccagcagccccatgtgtgtgtgcattcctacaactagatcgatgttgaacgtcaacaacgccccccaactgttctcgtgtagcaggtaggtagggtaggtacatggactggacgaccaatgcaagagggatcgcaacgaacggtggtctcgtcgtcttgacgtcttccgttgtcggtcacatcgtcgtcgtgagcgcgtggacggacgtacggtacgacggtgttttaatttctccttcgttccacactactccgatgcgtgtcgtcgtcgtctccttgccaccgcctgcatgctgcctatctatctatctgccctctgcgctgttgactgacgcgaagtgatggcagcaagggcactgggtgggaaaacctgtgctagcttgccggcaatggcgcgccgggtgctgccgctgcggtgcaagcgctgcaatgcattcacaactaggcacatgatgtgtttcacagagtctctctgtgagtagtgactaactagggaacccatacagcttgtcccatttcggaggggaaagtcaggcggcagcacatgggatgggcgtggaaaaatcggccgcgggcggccaatgggagcagctagatagcgggcgggccagtgctttgctgccgccggaagatggaaaaggatatttcgccgcttgcgagccggacaagcggaagaccagggcccttccgggggttcccgggggaatgtgcattggc

SEQ ID NO: 944 - DNA, 795 bp, Zea mays
catgcctgcagaaattcacagtgtagaagcacacctgtgtcttggcacttgatccaagactccccccatacatatattccgtggttccttacaagcacagcagttgcctttgggtatgctgcaatctgataaataattctgtatcaaaggcctacatacatctaaaatattcatggaaactctgttatcaagattcaagaatagtattgtaactatagataaaccaaatagtattgtaaaaacaaccaattgggctgataaatttatgatgactaaaccactacagtaactataatcagaggctctgaacaacatcaatcaatataccagcaatttccccatttatcatcaaataatttaaaattaatgtgctagagacatgataatccttgaatcagcttgttataacttataaggctatccctagaggcatgttgtgcagggaatttgtgttcaaatccttatgctcctcaaacccattgcttttttgtactggtctattttggaccaaacttcttcttaatttaatgatgtgcatatctcttgcgcgtccgagaagaaaaaaagatgattgaaagataggagtttgatagcataccgcctcacttagggagtcagtgagctcatactcataaggggtattctcaataataggaatgaccaattcatcatggtagccatgaccctttgattcctttgatcattttccatgtgggtcacctgcaataagatcagcatcagtatctagtcaaataaggattttcttaccacaattatctagcatacaaatataca

SEQ ID NO: 945 - DNA, 727 bp, Zea mays
gcactgcagtacatgcagctgattgacagctgcctactgctgctagctagctgtcagcaacagctaattgtctagaagtctaaagactcatctatactattctagtacattaagcacaagagcacatacattaattctaacctagagccacaatgctattgaaacatttcctctgagatttatcaattctcctagttgatctcctccaccactctgcgaagttcagctcttccctgctaggagacaattgatccaggcccaaaggggccaggggcccaggaggttatgccaaaactgacgagcaaacacgcaagttgttacaataagttgaattgtctcgtccccctggttacaaaaaaaaaacaccgctctggaagagagagtcctctttgtgccagtcgttcagttgtccaacacttgctcttaatagccaaccccaacataacattttgcattttggaggagcccaagtttttcatactctcttccagggctcaaaactgatcaaaccacaaatgaatgccttgtaacaagacttgaaagagaatctccctgatgcttcaagtttccaggagtgttcatctgtctcttgggttaaggttatatttgccagagcatcccaacgctgtaaatactgctgtaaaccttccaacgataaggctccctgggatgtggaaacccagcacctattctcagggccagggcgaccgtcctgttaaacaagaac

SEQ ID NO: 946 - DNA, 490 bp, Zea mays
acggacggactccggctgggctaggatttggaaggtgcgagcgagtagggagttgtggccagtggtggacacggaggccgacggagcgtgccggcccgcaaggtagccggaggcggtgaggaggcctcgcggactgcgcattggggacagtcggggtcgggagaacgagctttggtgccacttggtaggactctgatgtgtgccaactgcgaaaggacgtctttgagccctggccggtggatgcataatacacatatcttttttatactctatacttcatcgtagtaaaaatcgtaatattgtacgagaattttactagtacaatctggtcaactagtcgctatagtccaatttagtttactattacgagacgtttggatcccttcattttaaaggaattgaaatttactcaataaagtaacttatttagtttagaatttggcattccaccactttccaaagttcagatataaatctatctcaaatttat

SEQ ID NO: 947 - DNA, 614 bp, Zea mays
agaaaaaggtttgtatatttattttccagtatcaggaagagcaactcaatacaatggtgtgaaacgtttttgagagctttgagtaatgttgtgtgtcttttagatatgttgtttgaggaagaataaattgggggcacacactacttggctccatgtataatatctggatttgaaaatttgtgctgaatatatccggttcagttaaataccagcagacgacccaaacttataggaaaataccactcatatctccattaaggcgatgctttatctcagtgccaattgttgctagtctactcctttgttccacccccttctctgttcaccaccgaagttgtgacccaattttgtggttatgcccatgtagctcctgttggtctgagtggctgagggtgagaggaatgctatgaaggattgcctactaagttgacaagcttttggaggttgtcaaagtacatatttttgttcatgtgttttgggtgaaaatatacataatagagaactgtttatggaaatcaacagggttccttgttctggtttttgcctcattctggtgggtttactgaagtcctgaatcctgaaccaatagttgccctccgaaatcctaatctagg

SEQ ID NO: 948 - DNA, 367 bp, Zea mays
tgactttttgagtatgtagtgtgcggaaatttgttgttggctggaagaccttttgtagaaacatgagtagagaattttacttgaattgaagctataggatcaacgttgggaatctgggatatagcccaggtcaaaacccgcgctcccgcctgtgatcttttttttcgtgcaatgcaaagtcgagttgacatgagctgaacacggcggtaaaaatacgaaaatgttcggggcaaaccttctcggtgaaattgtaaaaaccctttcgagaaccataactcggagttctgaaagtctttactatgtagtacattcgtagtgcatttatagatgtacgttgtcataaaatttgagattcatagtcattcta

SEQ ID NO: 949 - DNA, 511 bp, Zea mays
attttactgcacttttaggtggtgcagcagctataggaccccacaaaggatcgtcttctgactttggcgctttcagtgggtttggtttagatgagtttgcaactgcatttgagaaaatcaaaaggaaaaccggcaaaattaaatgatcatcttatcaatctagtttggtacgatcacaaacaaggacgtaaaagatggaaatgcgactatatgtgaagttgacacgtgggtaaatttcacagttgattatgtttgcaatagtacaattgtaatgaaagatgaccatgcgactgcatgaaacaaaacaatacactcgacgaaagcagcttacccggttgctttggttgcaccactggacgtttctgagcagcatgtatgttggatagaagagatggggatggcttgtcctcaaatgggtctacatcatcccatccatctttatcgctactattctcctcatggatattaccatcctcaagctcaccccacccatctactgacgaccttgctg

SEQ ID NO: 950 - DNA, 727 bp, Zea mays
agaccaaatctgaagagaatctgcatagcatagttccttctactaaatactaatgctcctatttagttaactgtcattaactaaagaaaaaatggcatgcaaggtttaaacgtaaatcgtctgcattcatcatctctgtcaatcagtcaacagaaagtgtacaacatgcgactggtctggaaattgttgtctgttctaaatgttgcttctgttgctaatatgccttgagagcatctccacatggaaaactcaacagctcaacaattatttgtcctcctgcacaggagtaaaaagaagcaagaaaactcttgcaaatattttgtcctcagctcgtggcatatgaaactctttggttcttcaactgtggtgttatttaatattctctctcgttatggggaacaccgtagaactctgccaggtactccaaagcttcatgattcccatcacaaaccttccaaagtgatgcaacttcgcccggagcaaaccggccccactcctggcagtcattcagaaattccaaaagcttggagtaataagaatcgtagttgagaagcagacccggaccgggagcccctgccccatcctctttagttgaatagcgccaaatctcaaaaagttgtccagccgtccaacccttctggcgcgcaccccagcggtctttcattcagctgttcccactccccatcaccagcacgcctctccaaagacaacccctcttgcccaccct

SEQ ID NO: 951 - DNA, 539 bp, Zea mays
gcagcttgatgcctgcagaaggaacttgaaggtgaggtgaagtttcttagagaatcgaatgcggacttaaccatacaactaaacaggactcaagagtcaaatatagagcttctttctattcttcaggaactggaggaaaccattgaagaacagagagttgaaatatctaagatttcgaaggtcaagcagactgctgatcctgagaatgggcttttagtaaaagaagacaaagaatgggctaagaaactgtcaatgaaagacgatgaaatcacagttctgagggagaaattggatcgggctctcaacattggaaatgcaggtggtgctggttccaatgccatttatcttgaattggagaaagaaaatgaaattttaagggctaaaatacaagagcttgagaaggactgctctgaactaacagatgaaaatttggagcttatatataagctgaaagaaaatgggctcacaaaaggtcaggttccacgtatttcaaacaacaatgagctgcaatttgaaaagcttacatcccggattcgtca

SEQ ID NO: 952 - DNA, 769 bp, Zea mays
agcctgcacattgatgaccaaacatcagttctcataaacaaaaaacgctaactgaaactgagtggtacactggcatggcataaaaaatttatcatacatttatcatcaattctcgagcttctcgcagctcatcactgatcttgctttccctactgattatatcttggttgtagttttccgcatcgttcagttcttcgatcttctctttgagctcctcctttagtttagccattttctctctcgatatcgggtcttcatcacctggcttgagctccatcaggtgcagtttcccgctcaagtgctttatttccagttcaagtttctgcctcatctccaactgagtgttcaacctcaaaaaatcgtctagaatagtttttgtttctctctacagtttccacagtaaaaccaaacaagacaaatgtcattcaaaagaaaaccgcatgcaagcacatcaagggaacagggctaaccgtttgtttatccacaagcttttgaacattttcaccagctttctcttgctccaatgcagccaacctaagatgactggtcctcattgcattctgtacagcagaagtcaaaagtatgttatacaagctgtacaatctctgcatatgagtggcataattctccattcagctttatttctgcaaattattttgaccggaccaggaacaaattaaaatgcatcggttgaatcccattcctatttttaataacccccaaaccaatcgggggggttcatttcctcctaaaagattcccataggctc

SEQ ID NO: 953 - DNA, 1051 bp, Zea mays
  unsure (1)..(1051): unsure at all n locations
tgcgatcgtgatgaaaacttcagttggccttgtctacctgcttgcctgtctgctatcacctttcatgccctccttttctgatgaagtatggtcctagttgtcactgtatcttgtatgatttaattggactaatgtttttcacttgaatctcatgatgcgatccttttgcaaaggtattacgtcaattaaatttatctccagaagaaaatttgtcattaagtgaagaaaagggagaaattgcaaaggcaaaatctccttgggattttgtaccagcagggcacagaatagggaagcctgcacctctgttcaaggaattggtgcgttttttcttttttataaatattttcaccacttgaccataattttacatatcttcacttgatatatgaatacagaaagatgaagacgtagctctccatagagaaaaatatgcagggagtcaagctgagagaagctcaaaagcagcagctgatgctgaagccaacaaagttgctaatcagctcaagggcacaaaattatccggtattgatctggacattcttatttattctccttatgctggttagggtgacaaacagaaaaatcttcgttgttatgctattctttggtttatcatgtattcatatttccttaaactactatgactggagtgcatgtttccatgacagattgcaacttttttctgtttgaggtgatttgagccctatttggattatattctgctaaactattttcaaattttaacgatctagctgagttagttaagtggtctgagtagcactcctctggtcattgattcgactccccgtgggagcggatgaggntaatanaagtactcgctgttctctagtcgcatggtgaaccactatgtggccgcctctgtagggctgtctgtgatgagtctaacatggtaagccgacattgggcggattcatttgagcccactttgggttttttggcagctccgtgatctatgaaagtgggggcggcttccccagcaatttttggtagttttttcgtccttaaaggggacaaaaggaccaaaacattg

SEQ ID NO: 954 - DNA, 758 bp, Zea mays
ttcttttagtgaaactgcaccaccctgcaaagaccgaagtatgagataagttaagtaataagcaacacagggtgctgccaaaacaaaaactgtcaaaggagaaaggtggaaacagatggttgttcacaagcacatgggagccaaacaatgttgggctgacaaacaagcagttatataatcagttgatcaatccagggaaaatacattcagtaaatatagaaccccactagcattctatctcgacatgcaagctgtccacctcggcagtccactatcacatgtaattacagctcattagcacatgcaattatgatatccacgccatcacgacacatcacccactaacatgcatttagttgtccacatccgtgccacaccatccacaacattatctataatagtttatcattttatataagtaattatatgtattctaatttacttataatagtttatcctttcaaagaagtaaccatatttattctaatttcattccaaattaacagcaattcctacaacaacgtgtgggtatgctcctagttatatctactgtagaacacaatactattggtgcattttatatttcagagatgtctcacagttttggaacacaaaagtcccccagataccagatattctatatccctacttaaatcatgggccagaaaccaaaataaatttaaggttgctttgaataaatttcagaaaggccccttcaattccaattgtccattttttattgccaaaagttttcaaaa

SEQ ID NO: 955 - DNA, 804 bp, Zea mays
agtatctccccgctgtgtgcttgaaccttcctgctttcccttcactccttttccagtcggattccacccaccgagtctcccaaccatctgggcattggaacacaggatctcagtaacatagtaaaaggcctctaattagaacagcgatggatctataagtgtgagtgtggtcccaactaatttagtaattcatggcttgcagaaatagcaagctcacgtctcagctcagcatgagcggttgaggcacccaccaggttcaggaggcaaccttggcagcctcactatatcagtcgaggtcacctaacaatttgttgtcaacgtgcccttcacgtagtacaaccacggaagcagggcggaagcatagtttgccaaggacagcaacggctgggggcactgtgacaatactcggaaatctaagggggcggcgaagaaaagtagcgcgcagttaccttcgaagcgctcctcgaagacgacctcgccggaagcgaggagcagcagcgacgagagggcgaggaggcggtggaacacgccgccgccgccgccgccgcggcggccagtgcccatcgccggagcggaaggaggaagagcggggcgccggggaaggaagcaaggaggggggagcttcgctgccggagcgtgcaagttgttggactgagggaatatttgtagcgcgcgcggggaataacatgcacatagaagtagggcatattcacaacatgcccctcgggcaagtcagctctttcagggcatgaaaccaggtcatgggatttttaacggtggcaggtttttttgagtgaattcttg

SEQ ID NO: 956 - DNA, 726 bp, Zea mays
agtaatgcagcaaatatgctaaattgctaatgcaatctagcaatagctactctcccgtcgctcaaaaatcatcatcaaactctcctgggatattgggtgcctccccttcttcaccatcattgccaccattaaattcatcttcacaatctgtgatttctgcatcatcatgtggaacatcttcttcatcttcatcttcctcttcagcctctgacatattttgtgcagcaacagaatttcttcttgaatacacattatgggctcttcttggtaagtttcggccacggagtgcttgtgatgctccaatggcattatccacaaggtcccatgtaaggtcacactcacacccacgcccaccttcagggactacatgcaaagaatcagtccactcattatcccagttgaagtcctcatgaaccaatggatcaaagtttttccccttcttctggcgtagtttttggaacctagctttcatctttcggttgtaggaaatgaagacaatagaattcaacctcttatgcaacaatcgatttcttttctttgtatggatctacaaaataagaaaagagaaaacacttggtcatttaatcctgaaatattggatacaaaagtagccaagtaggtggatgaggacttgaggaggcacacataataacttacaaattcaaaggtactccatatgcccctgccaaatgttgctttaacctctttatccctccactaacaacc

SEQ ID NO: 957 - DNA, 734 bp, Zea mays
agcggcggagtggcggtggcgcgagctgttccacgagcacctcaaccccaccgacgaggccgcgtggatggacctcatgccgccgcctggcgccgcggctgcggcgcaacaccagcagcaccaccgccaggaggagctcgactgggtgatgctctaccggtcgctcaagggccagcagcagcagcagccggtggggggcggcaccgccgcagccgggagtacgccgttcctggaggaggtgtccctgcacgacgtgcgcctggaccccgacggcgacgtggcgtacgggcgcgcgcagcagacgaacctcgagtacctgctgctgctggacgtggaccgcctcgtctggagcttccgctcccaggcggggctgccggcgcccggaaccccctacggcggctgggagaagcctgacagcgagctcaggggccacttcgtcggtacgtgctctgtatccctctcctgtccgccgaaccatgcacatgcagagatgctccggcgtcacgctcgctctctcgtccggacccggacacggccattacttcattacttggtggtgctccggacgccagccgagcagattgatcatccatgggcatggattttcccccaaagtggatgctgtcggccttgtccaaatagcacggcagtgcgacatgggagtggaaaggctggtgattattgtaagttgtagggtaatttcactgtctcatctcgtgcctggtgtttgcaag

SEQ ID NO: 958 - DNA, 654 bp, Zea mays
atgtgttgtaaataactcagctcaaacatgcaattcattatccgttgatcccaaaactttcttttatcatgtacaagggaatcatgcaacttcatgtgtcaattaagtaacggactggaatagggttactgctaaaagtgaagaaagaaagaaagaaaaataatgttactaagcttataattccttacaaaccttggtttgtagtagacagtgaacatactcccagtgttcactgcatgccatgctgttgcaagaacaccaagatgcatactgtggcttgatatgactgaagatgggatagtggtttggtgcctcagtgcacgccgaactccaacacgtaactccccattctcacctctatctcgtaatataaggaattgggtattggtaagttagtcaagtgtcaaaggggagagttaagagcaagcaacattaactgcacagcatagcatagtatgaaacctgagaaatatgaatgcatcccccgcaacaagacgcttggcactaacaaaaacactccaaccactctgaaggaggtgtctccgtggctgacctgatgtaaatcaaacgtgaagttataaattttaacatatgtcagatggtcaactatgcaagttacaatttagatcatcaacaatggagcaggaattccaa

SEQ ID NO: 959 - DNA, 607 bp, Zea mays
ttgttaaccttcacatgtttactagggaaattaattgtcctcagtgtctcttgggtttcatctgtaagtcgcctccttggtacacttaaaacgaaagcagcctgatcacaagtagcaggagctgcggttatccagtaacccctgtcccaccttttatgaattccctcgctgggatacaagaaatccagttcaaccacctggaaagtaaatgccaatagttcaataagaaacgaggttttaaagtcgggcgactagtcgagaagtcggtgcagaggtgatagtcgatctgaacgactcgactttctctactagtcgctcgactagtcacagcagttgggtcaggcgacttattcgggcccatgtataaaaatgtgagcccacccagccatctcaaccctggtaggtaggatgctaatggacaagttttctaccttatttatctatggatatggaatgattcatgacttggcgaggaccaaaaccaatgatggacatcttgtgaggcttgccaccacgctgttagcacatacttgattcatcggcaattggcgacataacagggtgaaaactttgtagtatgatgtgtgagacaatgagacattagacg

SEQ ID NO: 960 - DNA, 766 bp, Zea mays
  unsure (1)..(766): unsure at all n locations
gtagcgcctgctgctgacgccgccggtctcgaaacagtgcgggccagtgttggacacggcccgttaggcacggtgggttttcggggccggcccggcacgatctagacatggacgtgccgtgtttgggcacacagctgagcacgtgggccggcacggcccgacccgatctattaacgggtcgtgcctggcccggcactatttggaccgggccgaatcgggttcgggtcgggcccgtgccgggtggcccgtttggacatctataatatatgggcacggcgcatgtgtttcactgtggctagcttagtggtggccgagcttttgacgacggtctgaaaggagaagcaagggaaagggactcgtcggtggcgcgcgtgatctgcatggacccgaaggatcgtggatggatggatctatacattctcgtttgtcgtccttcacggcccgcctgtgacgctgccatgccaaccggcgcgcgcaccccgcgctcgtgcgtacgtgcgcggcggcgcgcggcggcgtggggacgccgccagagcgatcaagggaccccgaggcgtcaccaccactagtacaaaaaggctcaaagcctgcggagacgatatatttttacaggcggtttcggttatccaccgactgtgttatttctagtgacgggnnnntaannaaaacccccccctaaaaaaaacactacccccccctaaacctntccaaaattttttaaaaaccccccacttttatttttacccattaccccccccaaaaattt

SEQ ID NO: 961 - DNA, 654 bp, Zea mays
cagcaccagctccgcgcgacggtgcgcctggccgccgaaggcaagtgcgcgctcgagctcacccgcttcgacctcctcgccgcctccccctccgcgcgcttctgggcctccgacggccccaccatgtccgacctcgccgccggtcgcgcgttctcgccgctcccgctcaacaaaaccttccagaacgcctccctcgagctccccttcgctcgaccgctcccgcgcctcctcgcgctctacgaccccgacaccttctcggacttcgggcacgtcttcctccccaacggcacagatcccggcctcgataccgctgccgagccggcgcccaccatgttcgacaactgcatccctctctcggagacggagacctaccgcctccgctggacgctcaatgcctccgccggcaccgtcgagatcggccttgaggctgccgtgggctccgagtactacatggcattcgggtgggcggaccccaaggccaactcacccgcaatgatccacgccgatgtggttgtcgccggcttcacagaggaaggtactccatttgccgaggactactacataagtgactacactgagtgcaagcttgggaaggaggactctccagtgtctggggtttgcccagataaggtctatgagggcgggagcaacgat

SEQ ID NO: 962 - DNA, 731 bp, Zea mays
atagacatgtatttggaaccacccatctccttttaagctcttcaaataccgggcagccattattccaccaggaagcaagattccccaggcaacaaacatcataaacccatgaacagccaggacaggacgcaaatcctgttctgcctcagctgaacctctcaacaacaaaacacgtataggccgactgcttgtgactgaatgcatgttactgtctgtcagatcatctcccgaccagcttgcacccatggcccagacaaccttaagtggtgtagttggatcgatgatgttcttgcattctacttttccggtacaagaagggttaagagggcgagtaaattcaaatgtaataatgccattttctgacttacaccgaacaaaagtgatgttctcggatgttgggtgaatgcctgttgcactctttccatcaatccaataagtttttactcgcccaaccccatcattgcccacccaagcaacataggtgaagctattcaccatcccactcccaaacccaatagcaagatatccacttttcttctcacctcgagctgctatagatatagatttataattcacggagagagtccaaaacaacgtaacctgttgatcatccaaaacaacactggtattgtacatgtcgcttaagccttcatcaaccacttgaacctttcatcccatcttctgttcatacagtgactgaatatagactaggtcagggcgtggtccgatca

SEQ ID NO: 963 - DNA, 668 bp, Zea mays
ttgaattgccgtttgcagcaagaacattggctaccagagtcccagtgggcagccatttcaaggatctctgtttgccaattccctggccattgagccttgccaggtaccagcgtaaccaaacacctggaggtgctaccgagcagcccatccataggacagcaccatcagcaagactatgcatctttactacagtcagcacaatgctcaaaatccaaaagaaagacatcaaaattatcatcactgacaaaagcactgactgcttagccctggtattcaccctccagtgctcccagtcatacttgtgacctatcaaactcttctccctgatgtatttcaggatcaaactccgtaggcgctcgcccgtctcagcaccaaccgtaatggactcgttgacaatgaacatccctgaaaatcagtgttgttagccatcagaaggattattttgttcatatttttttgtttgataatatctaatttaagagatattgcacttaatcataaaaatgatgatcagatacctagtactacgcccgctatagcatatacccaatggcctttggaagacaaaccaaccattttctggttccacccactgaaggttgtaaggcttcccatgtatccagttgtgattccgacaataagatggtcagatatgtatcgtatatcag

SEQ ID NO: 964 - DNA, 728 bp, Zea mays
ctcctcgatcttcagagctgtgatgtgatttgtccagatacctacaaaaacgtaccaaatcctatctttttgtcctacccattgtttggttcccgtgcttccagaatttatatggactgtggattttaatggaaaaaaagaaaggaaaaatatgaatcataaactactgactcatgtcataacattgactttttgtgtagggttgttatctgtctttgtagcagaagaaacagtcctaaaaaagaatggagagttcctcagctaggagcaacgtttctcaggggaaccaccttggttatgcgagaagcacatccatggattccactggtcctcagttagctggtaggtctagctcaatgttgagtaggagaagtagcagacagggctcaagggggtccatcagcctctcaagggagatgggggactccatactgagctcaatgaggcattctcttcagtcggcggatcaattgctaggagacatcgatagctcagttctggctcaactcatcgaaagtggtcgagttctatcacccgaaggcgatgttgatgaggatacagtaagaatctctgaacatcataaggttgggccctgtttcagatgatgcaataaagcaaaccagtgacaattttgcatcaacacctatattttcagcggagacaaaaaaacactaatttctaaacgttcctaagcagaattcattctactaaaggtaaaagatagttag

SEQ ID NO: 965 - DNA, 674 bp, Zea mays
ggattttcgcttgcagctccccgagcctagctgggttgttgtcccaatggcgttcggttagtgtagtatcagcatgagcattgactggtttgaggcttgactgtctgttggggttgtcggttagcgccgactggagaccttgcggcgctttaggtctgtgagaggttcagttcagagtcatgccgattgttcttccacagataacagttgttcacaagttcatcacttttaaacttggccagttctcttgtgataaaacatgtttatcggtttcgccttgttgacaggtgtccggtaaacctgcatgccattagtttgagtgcacgcataccgtatgtggccagtgcatctatgaattgcattttgaatattatggcactccccaaagccagttgccgctgcgataggatttgcaaaaagcttctacgtctttcagttgctcttattcatttagccatgctatggacatggtgtatgatctacttagccactggaattcctggtgaacatttggaacaagaacccttttagacattgcatgctgttttactgttgggatttgggagtacgcattacatacctcctgttgcaaagtgtatgcaactgatgttaggtacttccgtactagcatattctgcttcaaaacttttgtgaccatccagattgagcatggg

SEQ ID NO: 966 - DNA, 647 bp, Zea mays
aatatcctctttaataatgggccagcaagccttataaaacctgccagtaaacccatccggccccggtgctttatcagatggcagactttgaattgtgttgcacacttcatgttcagaaatgaggtcatccagctctagcagattgaggtctggaatagcagtattctccagagcttcaagattaattaatagagcacaatctgtccctgctcttcccaataagatcataataaaactgatccacagccagggccttatcatcatgggcagtaatatactgtaaatatgtatgtatgtatgtaaggtctttggtctatagaagtgtctagatatgttatagaaaaaccaaaatgacttataatttggaactgagggagtaaaagttttcattctgtttgacctgctgtgttcatgagttgctggattctgttccttttcagactggaaatacagtcgcggtaaagcgaatccggataggaaaggacaagaaggaaggtgtcaacttcactgcgttgagggaaattaaactacttaaggagctgaaagatcctaatattatagagctgattgattgtttcccttacaaggaaaatttgcaccttgtgtttgagtttatggagaccgatctggaagctctcataaaagat

SEQ ID NO: 967 - DNA, 756 bp, Zea mays
attcactaaggctccatttggatccttggaattgaaatccattctaataatcataatttaggcacagatcaattaagctaatatggttgtatacggaatatatctgtatactattgttggccatatgagggagatacttatatgttgcatttgtgttataggcgagcgagccaaagaacatgctataaattgcatgatgattagcatgctaatctataaaatcaatttccatctcccaccctatgaatttaagatagacttatatccaaactacggaaagttgtggaatgtcaaattccaagccaaatagccttggtcattaagtaggttccaattcccccaaaatgaaaggatctgaatggcccctaagatcttcctcatgtaaatggtattgttttgcacaagattaagcatttttcactagttatattaagaaagtcagcagttgcaaagatactttggtggcttaatatattgcatcatttatgtcagcaaacaattgctagaaaaagggttataataaagctccaaaatagataacactaaaaaagtaaaaaagaactaaaataaatttactaactgacacagttcccattatcactgctcttgcaaggcaattaaatgagttaataaatttcagcatgcactcggcatggttttccttggtaaaagaaaaaaaatccatttatctaaatattcagatgactagaatacactggccttagaaatataatgattaaaataagggtgaatttt

SEQ ID NO: 968 - DNA, 461 bp, Zea mays
actagacaaggagaataaaactcatcatttgcacttcacaccagccaagggctcagcgttaattgccgggaatacattgggagctctgcaatcgcaagctagtttgctgtcaacaacgtgcatcctttgttgagaggccatatcgattagtttgaagacgttgcaagaggccagccatcatggctaagagggatggctacatggacagctcttgtggctactctaatggaacccctaaaaggctggtgcaggatagtagcagtcatgtgcaggcgcatgctaagaagtaagtacagatcatgttatgtacactaaacagagttaagtatgtgcacattatatatactaaacagagttaagtatgtgaaccgcaaatggaattacgataaatatagaaggaaaaatagttagctatgtgtgtttttcagttatttcttttgctccacatgatgttccttgtt

SEQ ID NO: 969 - DNA, 756 bp, Zea mays
aacagtgtgtggtggttgcgttgccgcggtggttttgtgcgcccgacatgcctgatcgatttcaccccggccggccagccgggcccggcggtgctttttcgcagagatttttaaggtcgtgcgtcacagctgccgatggcggccgctcgcctttctctgctcctcttccgcgctcgctgccgcgcgcgcgcggccgggcctcgcgacctctccctcctccgtctccctctcttgcccggtcaggggtccacatagctttggttgcgcgcgctctctctctctctcatggttggtggcacttccctaccctagcgaaactaatcccactaggcggtgtcaggggagctatatataaccacctccattgtagcttgtttccttgtacccggcttccctcgtcaccggctccggctccggcaccggctcaatacaatcccatcaccgatcattcattccctttgcctacgactgctacctccccctccttccatcttcgatagacgaccaaataatggcggtattcgacgtctgaatcctcgtactgatcttatactgcatacagacagacagacccttcttcttccttagttccctatagctagctctagctaggagaccgatcatgagcatctcggtgaacgggcagtcggtggtgccgccagggtttcgtttccacccgacggaggaggagctgctgacctactacctgaagaaaaggtggcgtccgaacgcatggacctggacgttatccgcgac

SEQ ID NO: 970 - DNA, 730 bp, Zea mays
atgatgttctctttgaagatagcgaattgcgttcatctcttcatgagtactctgtctttttgaacagcccaatcatttgcctctgccccacccattcattttcaggaattatgctaactcattaagcgatattggccttgtaccaaatgatttatgcactgcatccgagtgtttttttttttgcctctccatatcctgcttagtctttgcttcagagaaaagggacaagcaccagcatcgcttgagcctttcttggccgaaatttgcttctccgggatcctggtgattcttacatcgtcatgctatagaacaggatatgaagtagtgagttatgacgataatatttgccaatccatcacttgtggttccccaggatcaaatttcgatggtttggggtggggacagtacgctctgttaagttttgagcaatcccctatcctggaggcttggccccaggaaaaggaatacaaccagctagccttttggttttcggatggctggatcttagtccctaagctgcttcggttattcccctggtgatttgaatgccacactttcttagctgttgtcctctttcttgttctggggatctgattctacggtctctgaattctcacattttcgttttgtaggggtgtgtgtgcaagtcagcaattacctaactttgtttaggcatttgacgtttgcactcgccaaattgagaacaagaaaaaaaagagatattagagtt

SEQ ID NO: 971 - DNA, 725 bp, Zea mays
gtgccgtatgcagcctcaccggcgggatcccggactccctcgcccgcctcacgggcctccagaacctcacgctctcctacaacaacctctccggccccgtccccgccgcgctcaacggctccgccatccagaggctgtggctcaacaaccagcaaggggacgccaagctctccggcaccctcgacgtcgtcgccaccatgaccggcctccaggagctctggctccacggcaacgacttctccggcccggtccccgacgccatcgccagctgcaaggaactctacaccgtcaggctcaacaacaaccagctcctcggcctcctgccgcccggcctcgccgcgctccccgcgctccgggagctcaagctcgacaacaacaacctactgggccccgtcccggcgctcaaggcccccactttcaccttctccgggaacgagttctgcgccgccaaacccggggaagcctgcgccccggaggtcatggcgctgctgcacttcctcgccgaggtgcagtacccgaacaggctggtcgggacctggtccgggaacgacccctgcgcgggctggctcggcgtcacctgcgtccagggcaaggtcactatgctcaacctgccggggtacggtctcaacggcaccgtcagccagagcctcgccaacgtcaccacgctcttcgaagtgaacactcgccgggaacaaacctcaccggaccgaagtgccgggacaagc

SEQ ID NO: 972 - DNA, 745 bp, Zea mays
gctgtctgcagacacatggcacgatacaactggttgcagcagaattgagtcaaggatgacaaataattcggtcatacatagttttaaacaaaatactaacaaaaagaaaaaggactcccatagccagcagagccttcgtcttcatactaatgaaccaccacaacagcacgaggcctaggcagctacaaaatttcccaaaacatggcataaagaaaaatcgcatattgcccgagaccacgactttaacatagaaaccccaccgaccttatcactcctcccccacaatatttcggcaaaaccaagccttaccagatcacccccaccaccgttcttttagttctgtttttcttcaaaatgatcacagaaggtcagcgacgttggcaggcagctcctcaatcaacacgttgtagaacttctggatgtcgaacagcatccgctcgtcgtcgcgggtcacaaagttgatggcaacacccttcctaccgaaacgaccactacgaccaatgcgatgcaggtaattctctggctgggtggggagatcatagttgatgaccagggacacctgctgaacatcaataccacgagcaagcaggtcggtggtgatgagcacacgggaggagccagaccggaactccctcatgatgatgtctctagtgttctggtccatgtcaccatgagtggcagaaacagtgtggtccctgctcctcatcttgtcagtgagccagtccaccttgcggcgggtgttgac

SEQ ID NO: 973 - DNA, 758 bp, Zea mays
tgcctgcctgcagcaaccctcgagacttcttcagcattaagacgagctaatgcccatgggcttatttgcacagcccctgagcccttcttcctctttccctcgtcttcttttctcttcatagcagaattatgcgaagaagcagcctccgatggaataacatcgaactaggaggttcagtaatttcatgtcagtagtgagttaatgagcacatgtgaaatggaaaatggtcacccatttcttttctatttatttaaccatacgtacagctcatgatcaggcctacgtgtgcaattgctattaattgttagctatcagttagaacagtcagtacgagttataagtgaccaaaacttccattcacttgctatactacgcatgtgccatatagatataggtacatattcagcctgggagttacattatctgtttaataattcatgaagcctaaggattgagattcgtacctgatcctcaagaaacagccttggtggagtgcaccatgaaccacgacgaagtggaccaaaggaactagtactgctgagtccagtgtacgagcttacacgagacatctgtggactctgctgcccactcaaatcatcttgttcttgctctctcagcgcaatgatgtagtcataggtactgattccctgcataaggttgtcattatgatgcttcagtttcacataactacaaaaggctatgatatcacactcaaactattcatggtgtctgcatgtagtgcttactcagcggcaaca

SEQ ID NO: 974 - DNA, 458 bp, Zea mays
tcgagatcgcgggccgctccgcgccggtgttcatcccgcataacccccgccggaacgcgtctcggatcgctgcacccaacgcgccgtccaccgacgtcgaccgcatcatcaacgtcttcttccggcacgagctccggcacccggagggcgcggtgtcggtgcacccgttcaccaccatctccccgtactcctccatgcacgacgaggtgtgccgcctcgccgtcgagaagcgcacgtcgctgatcctcctccactaccacaagcaccacttgctcgccggcggcgtgcacgcgtcagttgggctgcgcgtcgtcaaccgtaaggtgctggaggtcgcaccgtgctcggtcgcggtgttcgtcgaccgcaacgccgggaacgtggggctgtgcaatttcattcccgggccgctgcaagactgctcgggctcctccacggctagcagtggcctctcgtcg

SEQ ID NO: 975 - DNA, 705 bp, Zea mays
  unsure (1)..(705): unsure at all n locations
gcagctgcgacgacaatagctgattaggcatcaatattgaatctcaaaggacatgccatgttttctcttgccttgtagtgtttcaactagaaaagttcaacattcatcaaacgaagacacaatgttttcaagtcatccgattaatcgcgattagtcatccaagtcggttcgggaaaatagcgattaatcgccaagtcgtccgactaatcgtgattaatcgcccaagtcggttagccagaacgaccaccaagtcgtccgacttgaaaacattgcgaagacgtacgactacttccactacatcgacacactcttcttcttttatgttgcatatctagtggtaatgatccatgatcatttgctcgcatgttgtcctggttgaaccttgaacgtgatagctatgctagtgtgttgcgtacacgtttctctacactatgaaaatttaggaatgcttgggtgtctaagggtctttctccaaatattcaaagccttatataaaagagtgctcttgaatgcagttcttggtgcatggcagggacctctaacctctaggacctacccctgagtccaaggccacataaccttagtttatagttgggttggttgtgtcctattttcaatggtgcgtgcctttgtagttagcgtggtttgtgtggcgtgggtttgggtggggcttgttttngcnttcttcttgggttccttttcctt

SEQ ID NO: 976 - DNA, 838 bp, Zea mays
agcagttcggggtcaccgtcaaccacgtccacgcgatcgccattctcatcgccaccttcaactacgataagtccccttccgctatcgaccaggttcgtcaccatgcattcgcccccctcttctccgccattgctcttgtagattgctatgccacggtatcaattggcagttggtttagcaatagcggaccccgagatcctacacattgttctgtgggttgtctcttttctttaaaggagcaaacagaaaaaaaaggggagaaatagagagatagagatgcgttgtggtttgttgacgcttaccgtcgtttagcacgccatgattgctgtggttggctgggacaggtgctgttcatagtcttgtggaaagaaaaaaaatgtccattcctgcggcggttaggcggggattttttaggcttattggagacgtagctgaactgaactgttgggttggtggcacattgtttgttcatagagtgattagtgtgttcgctgcaaaaccatctggggggttactttgacatccattggggtgtgctcttttgccaaccttttgattccttgtttattctgagaaaggtccctgtcgcagagattaaattatgttagaagctgctttctgcctctcttttcttttgcttagattattgatcctcaaagccgtcctttcctggatttaacacttcgtttttttttcccccccctttttttttttgggccaacttaaccctataagcttaagggcggtcccacggggtcatggggccccccatgttaatttttgaaaaaacccggacctcgcttttttcgccataaccacatgacaccaaaatcttaat

SEQ ID NO: 977 - DNA, 738 bp, Zea mays
aggaccatttgtttcggctgctcgacgattttgtgcttcagtttttggaccattcaatagtaaaaaaactcacgaagtcaagaatccaaagctccctaggatgagcttttaggcttttggattatgagagttgtttggaagtccaaaagttagtggtctaaaagtgatctgaaacaaacaggccataagcacaaccatagaaagctgaaaacaaaaaagtggaaagcaacagacatgcagagctacagagactgaaaggtgttatgtaggcaagcagaacggcaactaacacttattaacagaactacgcgaccccattgtggtaaagaataaaatgaacacgagacaatgcagaaggataatcagttttatcttagagcctagatttataagcacaatggactactgtagtagttgcaacacttcatgccattcagcacaaacttcgagacctcaggctgaccatggcaaaggcactctgccgtaataacatttggcaactctgctgttgcattcgagcagttcagttcggctttaagcactcagacatcgcagtgtgcagtcccccagtcccagtcctaggcgtcttgttacaaccaaaaaaaaaaaactaacccaagtgccaaccgacctactgtacattctagaatcacgacgcctcttctttcaagcatgtccagaaaacattttgcgtctgtctgctggaagcgcaccttatcaaagtgcagctcattggtt

SEQ ID NO: 978 - DNA, 547 bp, Zea mays
cggtacccggtgatcctgtagagccgacctgcaggcttcgtaggcctttcgcgccagacctggcgctggatgttgttgtagacttgtaggccatcatagagctgcacgaagaggcatttttaacatctcttttgcactgctgctactccttccactctaaattgtaaaatatttttttatctttttattaacatatcatgtttactagtatatgtttatatatcgtgtttataattaaaacattgtatctagcgtcttataatttacaatgaagggtataaatatatgtgattatattgatatttatacatatatttatgttgttgtttcgacgaaatcataaaataactcacttgttaggacttatttagcaacaatgtttcttaaaaccatagttttacaatattatactttacaattgtcatgataatactgtagtattggcatttccaaaaatactatggttttgagaaatattgtttagatataacattgtaaactatggtattaagcaaaagctagccatgctttaaaactttaggttggg

SEQ ID NO: 979 - DNA, 760 bp, Zea mays
agtactgggccgccgcgaacgcctcgcacgcgctcctgcacgccaccacgcccggcgccccggcccccgcccccgcccccgcggcgacgcgcagctccgcggggcacgccgcgttgaggtcggcggcgcacgccgcggggcggcacccgctcccgttggcggcgcccgcccgcggcgcgacgagcatcggcacgttgaagccgtccacgaggctgacgtcgtagaagtcgtcgtcgtcgtcgccggcgccggctagcgtgagctcggccagcgtggccggcggcgtggccccgcggccggcgcactcgacggcgcccgagccgcagtcggcggtggcgcacgcgaaggtggcgcccgaggcggcaggcgacgtggcgcagagcgtgcgcgcccagacgcggcccgaccacgccgccgctacggtcaccgcggccgaccgccccggggccagcgcgaagcccgtggtcgacggcgccggcgcgccggcgttggagaggaggcccggccacaccgtgtagccgcagctgttggtgatagtcaatgtcgcggcgtctgctcctggtgatcgcaatgctcttgggtttcagtaacccatcgcggtttggttacctcaggctttgtcaagcaacaagggcctcaaacgcgtgaacattaacccaagaaaaaattttggccattgtttcccggaagaaaccaacttccatgtaatgtaacgccaggaacaagttcaatggaaatgttttttttaagcatgctggtg

SEQ ID NO: 980 - DNA, 793 bp, Zea mays
  unsure (1)..(793): unsure at all n locations
tttgcagagagtaattaagatacttttgacggcaaacatgctgtagctttaagggagaaagaaaggggaaaaaatctaaagcaacctatgtggaaatcctcatgaaagtcaaacacatctcatgcaggttcactgatctcagcatgtttttgacccatcacgaaactctcatcccccacaaacttcgacagcgacgaccggcaagttaaatggagttctggtcatttgagctactgagaaatcatcaccccagattctgtgagtagtacactggcgggtggttcatgtaaccagttcgggactggacgaagaacggattcggcatgtaaggattggttactcccgtttggctttcttgacttgatggactgacaccagccaatgcgccaaagtttgcgtacacaggcatggatccagcagccctctcccttggcaagattgggatttgcggtggaaggcagtaaaatggacgtggtggcgtattgtttggtatcgagagtgcgggaggtggagcaggggggaaaagcatgctagcttgtggctcagttctactacgctcaggagagtccttgatcacaatcacttctttcatcatgtaggttggatgatgcatggcaggcataatatttctgtaggacttctgctgggaatgatgttcaggttgcatcatggaaacgctgtgcaacggaggagcaacaaggccgctagcttgaacancttgtagaggaatctggtgactggctgccggtggtggcatgctgataaatccagaattaccgagatgttgtagctt

SEQ ID NO: 981 - DNA, 836 bp, Zea mays
aacatagtaatcctgattctcaaagcacgcaaactcaagaaacaccgggtgctgttgcttctggtccaagctcaacttcagctgttgcaaaccgtgtgacttctgtggctgagggcaagcaagaggcaacggactgctccttgcaggtggctccatccaagccaaatgatccatctcccgctgatctggtgaagaaactgtcaggttcgatagagcagattgaaaagatggtgaggcgccatatgaaggaaactcatccaaaggctgctcagccttccaaggtagttgtccaaaggcgcatactgatgtccatgcgatgagctcagcaacgatttctcttgtctgctgcgttcttggccgctagtcaaggtatgtctagggatggggattcctggttctctgcttgaggacactgtggtaggagtaaaagagggatttctagcttctctgcttgagagcatggctatctgttggtacaacttgccatggtatgcttactgcatacgacttcagttggcttcaccagaaacgaaccactgttgttcacgtctttctgtttgtgaagtataagacttcactgcgtagtagtaaggcgtactagatatttgtggcgtttagttcaccgaaaagatagagcagttacgagttgtagtaacagcttgaattcttgacacttcaattgatacagttagcccttgcttattgtttcaagattttggttgtggttggtgctcatcaaaattctagattctgagttgatatccgaaaaatggcatgaataccctttcattttcgggttttttttttttctggcctcgtttttactgggatgccag

SEQ ID NO: 982 - DNA, 741 bp, Zea mays
tatacttggatcaaatttccttcaaattgcagcacagcgcagcaaaaacaaaaagaagagcctgtcagacaacccatgggctggctgacacaggaaagaaaacaactgttgcgacagaacagtttgatcaaatttccttcaaaatgaaacaaagcaaaaagaacttggtccattaattgcaaatggaatattttgatcaaatttctttgatggtaaaaagcaaaatgaaaaccaaagcaggaaaaaaggagcctgtcagacaacatatgggccaggctcccccgtttctgaactggtacgactagagcgatccgtggtccatgaaaattctgagcacccagttaagtggaggttgctgacaatctagaaaaaggagctttgtcgtcgaagaacataaaacggttaccagatggcaggtgatgattgaagagagagctgctccagcgctaaccatcaatacatgttagctgaagaattgtactctaggtgccaaagaactgtgtgttggagacttggagtaatgcagttgcgatgtgctgttgtaagactcccttgtgggcaattagccttcttattatcctcttatgtcatgcccggcagtattggataccacgactgactaaaagcccacctttctaactctgtctatatctctactcctttaaaagtacgagtttcgtgcattgtctattgtgcgtcacatgcaaagtgaataaggtgatctatttttttcccctacat

SEQ ID NO: 983 - DNA, 836 bp, Zea mays
ggtgcctgcagcaatgcttgccatcctgtttaactttgcatacagttcctgcaataaacagcagatgacattcatccaaagactataatattatctatgatatgcttgccccatgcaaagaaaaacagctcattttgacaaaagaatcttcactatgaaacctgctaccttaataaattacatccagtatgaagcatataagcaacagaggcagcctatttatcaaagtggtaagttcatatgaccctcttttaccttttttttgtctgtgcgactattccactcaaattttgatagtgcaaccttggggcttgggctattaaaattgtgctaatatgatttttataatatattccagggatcaactagaagaattgtcaaaattaaggtgagtaatataggcttctccttcagaattctacatgaaacacaatccattctagtgaaataaatccataatgtcctcttttaggtatatgctcaagataaaatgactggttataatacataaaggatttgatccaagcaatagaatgaaaagatgtacaatggtctcaaagttggtatcttatagacagatgttagtttggaaagggaattaccagtgtacaatagcatatgataataatctgaaaattatctaaaatctcaggtatttacacgaggaagaccagattaagcccttacagtaagtacctggaaaattggaaatggaacccactctggttcttcaccagtattggcccatgctgatatacattttttgcccctgagatgagtatcacctttcatctgtaaaatataagttcaaagagcatggctgcctgcaaaaaacc

SEQ ID NO: 984 - DNA, 803 bp, Zea mays
atgaattaggtgtggaaggtgaatacatttgcagagcaagacattaatttgatacttggaaaagagtagacttactggatcagggaaccttgcccttcaatgtagtaatcagcaggagatgagagagcaaggtccgaaaaacaggaaaagtctgcatccgccgtgtacaaaaggttatccaacccaaccgccctttgcagttgtctacatcaaatataagaatggatatcaatgagcatgcatggctgaatgcaatttgcatttgcacaaaaaatattttttgcagaaacaaaagtaatcatcatttaagcttacgttatgggtggtgtgcattcaaatttgtcaggtctaaaccaaataagtaacgaagttataaaaaatagtgaatacttcagctaccttgatttctccaaatcttgaagttcagtgacccatccgttgtagcggagctggacagtgacaacagggacaccatctaacttgtagatattgtcaaacatttcccattccctccattctgatggaagtaatcttttgataccctgaacatcacaggctgtggaacaccaagttaagtgtgtatggttgggcatgctagcaaaataagaaagacagaacaaaggaaaaaaaacctgcgacgtatgcatcagctttgattatctctctacttgtagcctaagaatgtccaaatgaatgaaatttaataataggggctacataatcgtgcaaagctgtgcagtgatacactggatagaaaggatgccttggtgaagaaaaggcccttaacataggtctcttcatca

SEQ ID NO: 985 - DNA, 815 bp, Zea mays
  unsure (1)..(815): unsure at all n locations
ataaaaaaaaaaatctcagtccaaaatgtggttctcttaaatggtcgctgattaagacagtactgtacagatgcaaccagaatgtttcattgattcacatcctgcctcccaagatttcctatctagcatgtcatgagcatctaaccaaaaatctatgcagatagaatttactataaccaatgcaatgttaggagagctcctaacaatgttcaccaggcaggcacaatagcagcccagtaattgaaaccttggttttgcaacaaatgcaattagaatataagttacttgtgacaatgtacaagcttgcatatgcagataatatctggtggggcaggagcatcaaaaccttacactcgtcgattggagctccggcatcacattgttgttatcctcctaaaatacaataacactagtaaagggattccagataaaaaaatatattcctcaaatcataagctaaaagaataacttgtcacctcaagtaataaatcttttctggttatcaatcctacaacacgagaaggcctaggaacaacaaatatatgtctcaatccaagttgacggaagagattgtacacctgaaatattgatataaagattaccacacaactgactcagcaaaatagataccagatacaaaagttaaagacatgatttaccttcgccaacgacatgtcctctggcactatgtatggtgaaggatttaaaatggggcaagatccaatagcaccccagttcatcctctgtcaaatgaatatcatcagtngactttgccttactggatgctggtttaacaaagtcactaaaattgtgcc

SEQ ID NO: 986 - DNA, 751 bp, Zea mays
ccataagtttcaatgcacagagaagcaactaatggatttagaaaacaaatgggtaaagtcaagcccaatatagcaatcctttaatactatcataaacatacatgaagctaaacaactcaacccgccatttcgttaatttaccatcccagattttttaataactaaatacatctgtgagaatgatacttagttttatggtacaaatttgtggttttcttcttcgcctttattgtgttgttgtcatgattcaagaaaatgttgtgatgatatttttaagacaaaaaaaaagaaataaaaacagtgcttacagtgaaatacatgcatttgcatgtgatgagtaggagctgctcatattccaagttagtcccatcaggtgacaaaagaacctatttgcacacaccataaatgttcaatagaaagtatcaagctggctgtagcatttaactaaaaacagtgtgcagaaacataataccttgtcagagaagtgatggaatgtcacttgcaatggtacaagaatctctgctgcaatttgctccaactgttgtggaacaggctctttcacaacttttggattcaagaaatactggtagatgacacaaattaaatatgggacatattaaaatactatggctgaaatctggattctggaacatcagtggatagaactaaacaaattagtgtggaccgtacaagtctgatagcagcataataaacctacaagtgaattgaaatgctaagttatgaagatagc

SEQ ID NO: 987 - DNA, 757 bp, Zea mays
aatgagcatcatcttgatcacgctggttatgaggttgtcatatcagttgacatcttcatcacaaattttttagagctagatcatatactcatatgacaagcagcaagcattcaggagaacacagttaattcactcttgtaccaacacaaacagtccgcatgacttgagataccaaacatagcaaataataagcagacagtttgccttgtcttccctatgatgctcctggttatttcttgccacgcagcttcgttcccagggccctctcgagcttgccaatgatctgctggttgggaattgccttgcctgactcatactcctggatcacctgtggcttctcattgatcatctgcaatgaacaccatatcctcatctcataaagaggccaaccaaggatcaagctacttcccagctatcaatggaactactacaatacaacagcatagacttttagtcccaagcaagtcgggatagactcaaacgacaaatcaaggttcagacactatgaatggaactgctgaagttctgaaatctaatgaatccacagaaatacctgagcaagctgtgcctgggtcaacttcttatcgagccttgcttgcatgagatttttcttcaagtcacttggaactcgctcatctagcataagtgaggagagcccaagttattactatcatgaaaaggatatcatgcagaaagcttagggcaatcttctgcatgactcaactcatgttcaggttcaatagttcgacaattttga

SEQ ID NO: 988 - DNA, 599 bp, Zea mays
  unsure (1)..(599): unsure at all n locations
agggggcgcccatgcaaaaaggttggcacgcaccaaaacaaatcgcgtcaacctgtgcgtgcgtacgtgtgggagcctcagcctagtctacatttgcctgcccaaccccgaccgcagtccatctctttcgtccttcttccccacacgaccacaccacacgcactgggaggcggcggcgttctcattgactgttcccagcacaagttgccgatcaacaaacaatgcatgcaggacctgttggttggttggtgttgacccgcgcgcggagaagacaagagaaggttaacagctggcaggcaagcttgttaggcggccctacagccgtaggtgctgcaactacaatctatagagcgcagctaccttgtaagctaaggcattatagtcataaagctgtctgcaacagttactgcgcttcaaaagacccctatatactgcaacggtgttctctacccatcctctatgccagatggatcaaaccagcctaagcaaaggcatcgataatcaagacgaaaagatgtctgcccgatggatttcttcaaatcacgcaggacaagagagagggagcgcagatgagaattcaaggatacgcanaaatggga

SEQ ID NO: 989 - DNA, 534 bp, Zea mays
tttgcatgcctgcagcactgtaattaccctgttatatagtccgtgttgtaagagtgcgaccgttaagtgggggcagcaatgtactttgagctatctactcctgaacgaccttataaatatataagtcatccgatagcgggacggatacgtataacaagaagctaccgtctcgctgtcgtttatcttgtcgtgcacatgagttctcattcatcatctctgagtatttgggtccatctgacaacgctcaacatcaatttactttgaactccacgttgacatatgaaattaagttgtgtggattatctctttagttgctccaccaaaatagtggagtaccccaacttcacgttttttttgagagcaaagttgctgaagtttagatagtttggaaagcaaatcaaacattgaatatattccctgttacgttgtctcggtgactccatgtcaagttctcacacacgtcctgtcattcgtatcaattaggccatcctgttacgacagagaggcccaaagatgcggtggctcgctgacgtc

SEQ ID NO: 990 - DNA, 794 bp, Zea mays
ttgcaaaggattcagtgtccttgatgttgactgttcttcctttgctccaaatgcaatgcgctatcaagagatcagctgcccaaaacgcctctagttcattaaagcaaacaatatcatagttagtggcaaacacagtgtcaatgttggggcatctctcgacacggcaccacctgagacaagaccaataaatctttgactttcttgtccctacttctattgacatcatgctctcggggataacggtgctgatggaagaattgtcatgcacaaacaacgagtataccctattcatcaaaaggattacagcccttctcccacgtacggtgaccacattcgagttgcttattccctcaccaaatctctacatggcggtcgagtgaaagaaactgccacacactagtgctatcatgacctacactgcacttctgtagagggcacattttcacgttgctatagttttgttcaacacatttgctagtagagtacaggccaatattcagatcatatctaggatcagtgctccagcaaaacttattgccacttgctagccccaatgacttagcgaaccttatgtctgagaatagcattaaatgccccggcaacccttcttcttggtttttttatttgaaaaaaaagaaggtttggttagtggtttttcggaacacaaaactggcctttctggtggccctcccccccgcaggtggtcaattgggccctaaacaacccatttaaattttggggggccattctccaatgcccctttggggccaattaaaggaacaaggccccgggga

SEQ ID NO: 991 - DNA, 748 bp, Zea mays
  unsure (1)..(748): unsure at all n locations
tgcatcgggtggtcccagtcgaacttgttcatggccaggtcccgctggatctggtcctccgtcacctgggggtcgtagatgctgatctgggccttatcacccagcaggcccttgcagacatcgatggccggggtctccctggtgtcgccggtgtccttcttgaaagcgaagccgaggacggcgatcttcttgccggcaacggtgttgaacatggacgacacgacgcggttcacgaaccggctcttctggtagtcgttgatcttgatcacctgcttccagtagttggccacctcgggcaggccattgcactcgcagatgtacaccaggttcaggatgtccttctggaagcaagacccaccgaacccaacactggcgttcaggaacttggggccaatcctcgtgtccttgcccacggcgtaagccacctcagtcacattcgcgccggtggcctcgcagagggcggagatggcgttcacagaggagatcctctgtgccaggaacgcgttggcagcgagcttggagagctcagcagaccacaggttggtggtgaggatcctgtcctcgggaacccagtgagcgtacacatccttgagagcctggacngccttcctgccctcaggggtcntccggccaccgataagcactctgtcaggcttgaacaggtcctcaatggcagtgccctccgcaaggaactctgggttggaaaggatctggtagtngatgcccttgctgttgtgggtcaagatct

SEQ ID NO: 992 - DNA, 623 bp, Zea mays
gcttgcatgcctgcagtactcggttggaaagcacttctcgcttcgagctgtaacggggctagactgccacagatttctgttgctgcgtcgctgtagttgctttcggtgccgcttgcagatagagttgcaagtgggtcaagagagagttcagcagggaaacctctcctgtctagccgtctcttgtagctaggcaaatggtctggtttgctgctgttctctggggcgccatgttttccaactggtttcaggattttggatttcttccttgcctccgcggctgcctttgagacttcctctgcattaagccgcgccaatgtccatggactgattttcactgctccagcttttctccttgctccttcctcttccttagttttcttactgcctgaattccgtgaaatgccaatctctggaggaatggcatcgaactgcgaaagagaggaccaagcaataagtatcaactgcaaaaggtggaagaaagataatgcatgctgaatcctagtggaactacagtgttgatttatcgtctgattgtcaccaaaatattatgctatttgtttgaaaaaaatagcatacttcactaatgatgaatcaagacaacttctagcacataccaatgccag

SEQ ID NO: 993 - DNA, 754 bp, Zea mays
gttggccgcccgccggcccatagaacaaaggacgaattactggcccaaaacaggtgttttttggatatggcccagtccagtaggcctgctataatcctcgactcctctgcgcatcacacagcagggatctaggcagccagcgacacaacacgcatgccaccgccttcccgctcgacttcctgctcacccagccatctgcccatcctgcccgcgaggagatccaatgccagcagcattctcaagcaggctgcggctgtgatgacacacatcacctgcaaggcacacaccacaaatttgtggacgcctcatgcatgcagcgcctcaacgaacttcaccacccacaggcgataaatcaacatcaagctggagatgagttagcggtgatttcttccctgtttcctctcctctcctctcctatagcctcttcctgccatgttcctcatgtcaaattaatctcgactggaactggaattgaaaggggaaagggattggatcagtgatttactcatctcctacaagcttgaagcctctccccaagttaaaaaaaaatgatgtacttatttgaatcctccatcaattggacaagttctacttctgcactatgcacatacatgttctcatttggattttgcaagtttgacctttgagatttggatgggagatgctggtcagggcttgggcttcttggagtgttggacctacatgggaaaatatgggaaaaaggaagaagccagaaacaaaccacaaattggaa

SEQ ID NO: 994 - DNA, 797 bp, Zea mays
  unsure (1)..(797): unsure at all n locations
gtgtcctgtcctcgttgcaccaccctcttgccggcggcggcggcggcggtgatcactacagcaccggcgcgtcaaggttagggttcccaggactgagctcgctggaccccatggactaccaccagttcggcgcgggcgcgggcgccggcgccagcagcgctgccatcgggctagagcagtggcgtctgccgcatatacagcagttccccttcctaagcggccgccccgaccccgtgcaaccaacaatgtctagcatttacccgttcgacttggaagggcacggcggggacgctcccggcttccccggcgggcacatgctaggtgcctccaaggtgcccggctcagccggactaatcacgcagctggcatcggttaagatggaggacaacccagcgtctgcggcgatggcgagcagctcgccgagggagttccttagcctccctgggaacctccaattctggggcggcggcggcaacaacaacggcggtgcaagtggcaacaatggaggaggcgctggcaacggcngtggtggtggcggcggtggcgctgtcgctccgggcagcagctgggtggacctgtcaggattcaactcgtcttcgtctgggaacgtcctgtgacatgccctctggtctgcatgctagctgcattaaaaaggtagccctattatttatgcaaagccttgaatcttcattttagtcatggcttctgagaaagttcaacagaaaaaaggagttgggggtggcaagaatatagggggctatatattatctgatagctaatcggctgcggggacaatc

SEQ ID NO: 995 - DNA, 741 bp, Zea mays
taggacccacggtgatgctgatcttggagaacaagccttgctgcacctaattgagcttgagcctaacaacagtgggaactacatactcctgtcgaatatttttgcagaacaggaaaggtggggtgatgtgagcaaacttcgaaaggctatgagagaaaggggactgagaaatgtgccaggggcgagttccattgaagttgatggcatggttcatgagttcacttccagggattggtctcatcctttcatacatacaatatgtgaagtgttatgtgagatcgacactaacatgaaatctgttggttttgcttctgttttccctgaagtactacatgttattgaagaaggctaagatcactaagcaagcgcattattcacatcattgacagatctgcgcatgagatatctgattatttatatgacatcgatgcttaaaataaaaataatactagtgtaaactgaattcattgagtatatgcattactctatgaattactttcttttgtggaagaaggattggataatttttttttagttttttacactcagcacatgtatatatatttgtgtcttgggatgtgatgaggctctccaaaggattttgacttgagagtaggtggttcttggtacaataaagttaaactcaaaaactctgatctactatagacttctgcacaatagatttgatttctttcaatgccaagttgtttggcaaagttcctgctcctggaaatttgtgga

SEQ ID NO: 996 - DNA, 768 bp, Zea mays
gcctgcagcggaattccgtgaaccctgtacggcaatggcaattggcaatgacagggttactggggtgggtgaatggtttcgggatagacaattgtttgtgggagctgcgctggcgaaatgtaggctgtctattgttgcaattgcaggatggatgggtagcctctggtcggctctgctagtgtgtagtgttgctgtctgtggtctattcagggattcccatgcccatacccatgcagattgctaggtgccgttctgtcggtacatggttggtggcgtgtctgcgtctttgctgtcactgggtttaaggtttaaggtgtagtatcagtgggtaccctcatgaattaggggttaagcccaatgttcctttgtgggtacatcatgaatgcacttggccttgttccctgttagcttttgcttatgtgtcattctagcaagtgggttactgtaacatttgcaccctttgatggttgatggctctgcatcttttcgcttcctctcgttatttaatacctgagtgtaactgatgacctacttttgtgtaccatatactttacatccttttgtggtacatatcaattgtgaaaaataatgttttgcattctcagtatgttgtacacaaaaaaggaggctttacctgcaacttttgagaaaaaaacccaacctttctgaaaaggagtgatggtttagtatgaagaaaatctgatttactttcttcagagagaatatttcaaaccaacatttatcttattgtctgagctactgaaattt

SEQ ID NO: 997 - DNA, 833 bp, Zea mays
aaaattttctttctccaaaacaaacatataatacacaatattacagtgcttactgtgaaatatcgacttccgaaactgcgtcacttgggatgtcgataatgccagcaagacctacatgcagacaaacatttgaaactgagtagtgagcacatccacattgatacctagaatgaggcttcaaatattacaatgttaaaacaaataaacaatatgagccaagaaagaactccatatattattttgaagcaaaaatttagcttgtaacgtaagatattgacagtaccttgacgaactgactggctgtgctttttggcatctgataccttatttccaccatcacgaagtgaacgagtatggcttttccttcggtttgagggcctcggcaatgcagatgatggaaatgtagtcccagctggacttctctggcgattaaggagtagtggcaaggccttcgaggcagttgcagctaatccaagctgcgacattgccgttccgtggcccagacagcacaattaaaggccttctcaaaagcacagtgccataaaaagagagcaaaattcctgaaaaatctggccaccatcagaagctctggcattatactcttagggaagttttgaatttccaaaaaaaccaaaaaagccaccgttatgggtttattaggcccccctcgcctagaaaaaaatattttgtaagatggtttacagatttttcaatatgcaatttttgaaaaagaaaacctctaacattggtgtgaaaccctttattaaaagttttatttagtcccaccctttttcatttaaaggaatttacccggaataaacttattttttatt

SEQ ID NO: 998 - DNA, 888 bp, Zea mays
aatgtgagaacgaccatgactgggtctggaccttaaacctgtgctttggcgtgtgacagacgcgagaatttttttaaccccggtctgaaatttgctcccactggaatgaggagtactactcagaccacctaaccaactaagtgagagaccttttcgccagtgatagtggcatagcacgacagcatgacctttattgggaggctgacttgtttctataagatacataccagaaatggtgtaagctttgctgactttcacccttaaaagcagtttttgcaaaagctgcatagaacctgcccaggtaacatggtcaatacaagacaaatgatattaaaactttaaaagacatgcaaaactatttgttgacactaacattcccagtgtcatgacagtcaaaacaccagagacctccagtgagtcttgtgcctgatacaaacgaacattagcaaaagcaaagtctctcaaaaaatagagggatgtaaggacttacagtgaagaaagctatataactgacagcaagagtaagtgcaatctctatgattgtatcgttaaaaataaagcccagccacagtattgacatgattccaaatgcaaggcccagagcaacactggtcaaagaaggtactgattagcgttatacacacatccatatagttcattttgaatgtaacaaagaaattccacatacgctccaagtgaaacttcagacaagaactttattattgagccagcatcaaaggttcttccaagcaccattcgatagaatagctgataggcaacaatagcggtcctgtagaatttgaggtcatttagcatgattttttaaaggaccggcaagagttctgccccgcaatatattaatagagaacaaaagtgagttaaatgaca

SEQ ID NO: 999 - DNA, 764 bp, Zea mays
gtcgtggtcaccttcgtcatggagcgccgcacctccgtctggaccatcgggttcgacatgaacctgctcgccgccgcctacgccgtaagggatccaatccggccatggccaatgactccgccactcgatgcatgacgacacatagcttgacgcgtgccgtatgttccgttcgtccagggcatcgtgacgtcgagcatcgcgtactacgtgcagggcctggtgatccagaaggccgggccggtgttcgcctcggcgttcagcccgctcatgatgatcatcgtcgccgccatgggctcgctcatcctctccgagaagatctacctcgggggcgtcctcggcgccgcgctcatcgtggcaggcctctactccgtcctctggggcaagcacagggagacgcaggagaaggaggaggccgccgacgccaagatggcgctgccgacggcggcagcatcctccatgcaagacgctgccgctggtgtcgctgtagatggtgcggggtgcaacgtcgggaatggcgtgacgaggtcatcctccaatgccgccgccggcgctgctagtgcagtttgattggcctcatcaggcttccaataatttgccttcggtgaatggcgcgcgggcgtcatgtcatccgtgatcgaatgctgaactgttcggctagctacgacgagcacactggtcttattagggaaatggtgcccaactagctggttgggaattggaatggagaatttcgggaagaaatttaccggtcgatcgcttcctcc

SEQ ID NO: 1000 - DNA, 774 bp, Zea mays
gcaaaacgaacaggtatagcggtgcaaccctcaatacccgccccgcaaaactgtctttgtggctcatgcggattcgacgtaattgttttgcgggctgttccaccaagcccataatagattcaatgtgtccgcaaagagatcatgagctacattaggccctctgctgacagcgatgggtggcctggttgaagtcaggtgccggtgcagggacctggtgatgaggcaagtgacgccatggcctcctgaagtgtccgtgagcatggcaaggatgcagttgatgttggcagtagctctacctgtctattggagaggaagtggtggagggcatggaagatggaagcgcaggccggcatggacatctggcagcggctggtcatcagagattggaacttgcttgtgaagcgcatgtggtacttttacaaatagctgacgatggtggaccgtatattcctttgctgctgcttcgttgagtccagttgactggatggattgttgattgaattcacaaggaatgaatctgatctgcgatgctttttggagtagtatttagccaccgctcaccgggcatgttgcattgcattgagctattaactattcactgattagttgtcaattaggtatatgagatgagattcagaacttgagccctgacagatgtggatcattatgggtgtgctggcaacggtcatttgcactctgctctactgaatctactactgttggaatgagcaatgcctaatgtgatacggattctggtgaccacatgcagggtgt

SEQ ID NO: 1001 - DNA, 763 bp, Zea mays
acaagggaagagatgggctaaggcaggacgctctggtgtgggagaaggcggcggaggcctggaggcaccaggcaatggcagaggaagaggtgggccttggttggaggacaaggccttgatggggagaagcagacagaggcaggagaaaaaatgagtgcagggtggaaaaaggcggtagatgcggctggggatgctccaccatctcttcatagcatactaactatatatactaaactacttcccacaaaaaaattcttgggctggcccaattagtaatccagatgacctgattagatgtaattagtcatcaatcatcatctcttattgagcagtgcagctgcaatatcataattagtttccgtatttgaccaataagctcagtccttctttaattttaagaaacttatttgccttatgttctgtatactatttatccctttactacatatgtactataaatggatggttacaattctaactgttccagcgtgtcaaagtataccgtttggctgatggtgggaagtgggacgatccaagaacagggtatgtttctattgattacattggaggatgaaaaatttcttggtaatatgtggggcacctattaattcttatttatgggtcttaccaaattctgacacttttttcccggatttggtttggagagggggccaaaaccattttggtttgggcctctttaaagggctttaaattctaaccttttcaacaatttttggtttgaaacaaatattttccaaaaggg

SEQ ID NO: 1002 - DNA, 775 bp, Zea mays
tgcacacacccatcgagagttcccatgcccatctgttctctcttcatgggttagacggacccggctagtactcctgtttgacctgcatccagtgcagtgcaatgcagcccagccacaccattaagataggggttgaccggtgtcattaatcacaaacataaagtcggggctagtgtttgacccatcggcgatcgagcgtccggtcagagaccccggaatggacatggtcaaggtcagccaaacggatcggggcgatccccccgaacggaattccaagcgcagcaggccgcccggccgagatgcgtcagctcactcgttcgcctgtgtacggacgacggaaaagagcgagagtttcgttcgggtcagagagacgcatcaagcagcctagctcaacgtctataccggttttttctgtgaatcttctcgttggctggaggttctggcggttaacacaaccgctggtgttggcatttgaattgaatgttgatgattagtgtggtcaaggtcaattgctggtctttgatcttggaacctactcgtgcttagcagttgtatttatttattcagttttaaatactgcaatcagcttccttttatgtgttgacagtgacttccctgcattcagtaaagctgctggtccgatgcagcgtgccgccgatgcatggattggccgctggcttattattaacaaaataaaataatgcatgcccgcggcctaattagtttctttccaaaagaatagactgggaatggcttgggaagccgatttcaattg

SEQ ID NO: 1003 - DNA, 658 bp, Zea mays
gcttaataaacacttttatagggtacactttggcttgcgtactaactcaactaaataaattgagctcatgcattggacagcattattccgcgagatcgaagaaacactcactgaaagtgcccaagtacaggtccttgtttccggccaccctgccgatcctcgcctgccaccggccgtgctgatgatgcctgtcaggtcagacataaacaatcccacacactgttacaaagattttgaccatgcaggggatatgcatgcagtacactgctgctaccgctgttcaaaccgcaaatcatgttcagacaggccggccgctctcttgcatttttttttctttttcttctttcgcgtgctctttagctcgttaagtcattgccatgaatcatgcatgaaagaatctaaccttgtgactcctctgtagatggaggcgcctcgtgagaagccgctgctcttcctgacaaaaaaaaaggggtaggaacgagagcacacggagggtcaacatgtgagagcgagccaaggaaagccgctcaggacaggcagaggcaggcacatgcgactgtgcgtgcgtgcatgcacgcgaacggcgacgtgtgtacgtgtggaaaaggatgcggccggcgcgcggtgagtcctgtgccgcggcatgtgatgtgagtgt

SEQ ID NO: 1004 - DNA, 536 bp, Zea mays
agtttgctgcctgcagaagaagtcctcggcctgctgcctgaacggctccagcctcgtgtcgccgttcaccagagctctctgcgtgcgtgcgtgcatgcagagggttgacatgagtacgaacgcagcggccgggcaatatggttcctagctgtgctagcttgagtgtgatttaatatgcgcgtgccatgtatgatacccgtgacagcagcacgcgcgctccggcgagcttgttgtcccagctgaacatgtcgacgccgtcgttgtcccccaaggagtagaggtaggcgaggtacgaggagctgttggtggcccagagcagccacgccgacccccacaggagctcgtcctgcaagggagaaagaacgaaccaacggcgcttgaatcagttgatcaatcgatcaatcaatgaccactctgatcccggaggtcattgatctggggaccttgtagccggagtacgactggtagtacgcgccgacgtcgccgccaacgaagtcgctgtacttcccctggtgctgcacggcgagctccatcac

SEQ ID NO: 1005 - DNA, 729 bp, Zea mays
ttggccttcttttttggctttaatctctcacaaggcaacttttttgacgaatgtgtaggacacagcataacaaagttctcctggagcaaatcacatttgttcagtgatatggtcaacaaatactttaccacaaaagggcacgcactttttgtttaatacacaatggacagtgcagatttaaggaacaatacttacttgatcccatttgcagcctttgatgttgtaggcacatgggacatgaaaacttttgcggcagctcttcacaaggcagccaagtgctgcgccttttaagccacaaacactgcatttgatcttagaagcacgggccaactcaggccccaagttgtttgcggtgtcaccagtaaagaatgcttgaggagccctgtattggtattataacttagtgcagtaagttttattttggaaatagtacactaaatgatcactacacaggtacagaatgcaaaaaaaatcaaactttgcacctaaaaagaaccagaaaacacaaacttcctgtctcagaatatggagtatgtgtacaaatcagtgcaatgaagtatgcgctcagaaatattatcatgaaagttgccaggaacataccattcaatgcatttctcatggacatgctgaacacttgatttccaagcttgatcagcttctactagctccccattcaaataatgtgacaaagggccagtacactgtaaataacattttacattagattct

SEQ ID NO: 1006 - DNA, 577 bp, Zea mays
gtatgagctgggtcacctatccactacctcgtggtgccttctaacctccacagggcaaaaacaaaaatccaactgctacagaatccagttgctttctgcctcgtacggtcgtaccggtacgtaggtagaaatccttcccaagatcacgtaaacggacaagttaaacaacggctctgcacacaaagacagtaggcgcatttcccagtcccatgcgcgcggagtccacatgggagcatggggcgagaggaacggtcgatcaaaaaacaaggacgtttgaacgcgagccgcctggccggcaccgaatccccagcgcgcatattggcagacagtaatcatgcgcttattggggccggggccgcggccacgatcttgatcgccgttcttttacccgtggcgaatcattcacgctggcaggtaaagcacagtactagtacgtagtagttttaacatactccactgtactagttgttatgatgataacagaaccgattaaaactttttgaattttagctagatttataaatgtattagcaatctgtatgtctttatatagaatttattggaaaaaaatagacta

SEQ ID NO: 1007 - DNA, 893 bp, Zea mays
tgaggaatccacatcaccgcggttcacgtcacgctgtacgactttgacaccgaagtttccagtgggtgcgttatgcgtgctcaggcgcgcgcctgtctgattcgcctaaccctgagattcgtggtgaataatttggctggttggaccttattgtgtgctcgtgttgcgtgttttatgtagagacggaaggacgtggaggggtcgctcttcgtcgtcaagaggttcgactcgtctctttctcagatgcctaatgagatgatcttgcataaaaaatgtgtcgtttacagtttgtcaacgtcgttcgttttagcaatttctatctactaaatcattagcatattgattagttgtttggcataggaaactaaatgcaaaatctgattattgtagtggcaaaagtatgttcaattgtgctgtgaattgcttctctctatttcctagatgcagagcagggctttaaaacattgtagtggcaaggcccccgcgtcgtcctcctctgggcgatatgggcggctcctgttcgatcccgcccaacttcacccaccggcgccggtcttcacccccgccgtcgctggagcagctcgccggagttcggcgagcagcgaggagggcggcggcgggactgcttttttacttaatttccttcccttctttcaaccctttcccactcctaccatattcctggaaggggggccggggaccctgatcccgcgcttgagaaagggcggaatcggccgggctaggcttggcccggatccagggaggggtgggtcgcccggtccggccggttccctccctggcttggccatggatcggggtgggccttggcgggcatgctttacggccctttgttggggtgtgtggcaggtatcaaaaaaacaagtgtggttggc

SEQ ID NO: 1008 - DNA, 717 bp, Zea mays
tgctgcctgcagctgtgtccgactccgacgacgatgccacctgcctgaagaggaagcgctccgttgcgtccacgtgcggcaccggcaggtgcttgacggagacgaagagcaggacggcgtggatggacgggatcttgtccaccaggtgcgggaacacgggcgggatgccctgcaccaggtccgtgtagaagaggccgacgccggggacggtgcggcagcgcggcagcaggtcccgcaccacgctctcgtgcgacaccgtgcgctccagctcgtacttgtaccgcttcacgtgcacgtagtgccacagcaccatgacggccaccagcaccgcggacatggcgacggggatgtacccgccgtgcgcgaaccggtagagcacggaggagaggtagacggactcggcggcggcaaagacggcgaagaagagcgcgacgcaggcggcgttgacgcgccacaccaggagcatgaccagggtgagcagcagcgtggtgatgagcatgacgaggacgacgcagatgccgtgcgcctcggcgatgacggccgtggtcttggacgcgagcgtgacgacgcaggcgacgagggcgagcagcaagttcacctccgggatgtagagctggccccggtactggcgcgacgtgtggagcaccttgaccctcgggaagcagcccaacgcctgcgagtgggagatggtggcaaaggcgcaagagatcatggcct

SEQ ID NO: 1009 - DNA, 808 bp, Zea mays
  unsure (1)..(808): unsure at all n locations
gcctgccggatatacaccacaaggtaaagttcatgttatctatgtttcaatttcttgttttagttgtgtggttcactcaccataattctggtgtttcctttcttctgcattggagctcataagttactgaattaaactgctgctgtgtatccacctctcaaattttgaactcaatgatgaatatgaaaccaattgtggtgccagagttacatcttatgcgatatactagtagtcacatgatgcaagaggaatttgcacaaatgaacataacctttgtgttgccatatttcttttaaatttgtctttttttcccttttgacgattcttatatctaccacattttgttttaaggtcagtgagtatatttcaaatgatgcaagaggaatctgcacaaacgaacataacctttgtgttgattgttttggagtgccttttttttttcatttctcattcattcacgtaaatcttacctttttgctgattttattttctgcttgatgcccttacgtagattcacatatttttccccagggagggtgcaagagtagtctggggctatgttgatcgtattcttggtcagccatcactgataagggagtcatcacgggggaaatatccctggtctggttccctatcacgtgctacaagtaccctgactagcaaattgaagagtggaagcaacctanggaaggacgggaatgggttttgtgatgttattctaaatcctctctccaaaagagagtgaagcagcttgttaatgccacagccaatacgaaacttcatcaagctccttttaggaaccatgctt

SEQ ID NO: 1010 - DNA, 788 bp, Zea mays
gcctgcagtgcccaagtaagtgtcaatatcaaagcatctgtcccgtactctttgatggtatctaggggatcaatgacattccctaatgtcttcgacatttttcgaccctgggaagcaccttgtaatttagcaactcagaagaatgttcaagctaggaccataccaaagatttcacaagggcctacccaattgagctaacatgttcatcaggataaatgagattgagacttgctggatttcacaagggcctaccctattgatctaacatgttcatcagaataaatgagattatgagacttgctgccgagcattctacagactatagtagagaaaacataaggcccacacaaaagtgcatcccttgtaaaaaaaactcgacatgcgggggttaagacaacccccggacattatattaagaataagatcttctcacacaggttgagaaaacccctgaacccatgccctacccatacacagcggcaccgtagcccatgtgagaacgactgcgaacgaggccaggccttagacctatgctttggcgtggacagacaaggggatttttttaaccacaatctgaatttcgctcgcacggggagtcgaacccaggacctgaggagtgctactcagaccacctaaccaactcagctagatttgtaccccattgatgtatcctaagaggtgggcagcatgtgaccaacaagcaatgggtgcagtagatcctagcctagcaataggataatgatgtcatttaggggcctttaatttgtggaaccacccattctacatgg

SEQ ID NO: 1011 - DNA, 819 bp, Zea mays
  unsure (1)..(819): unsure at all n locations
cgcttgcacaggcggcgaggcgagctcttcggctgcttgcttttgttgccttcctcccgctccaatttaatgccaccacaccagccaggagttggggccgcgcatcaatggcgtcacctctcgcatccagatctcacacctcgtcgtagctactaccttcgtctcactcctcctcgtccccttgctgtcgttcgttcgttccttctacctccatctccacttctccaccttggggttcttggcgcaccatccgagaaatgctgttctcctttttcggttttccattctacaagtgccagccttgccttgtctcggagtgttgacatctctacgtgctctggcccgccattaattccctcctccctcacactgctgctgctgctgctgaccgagggcgcctagccagtcacgcacgaaatcccagcgttccaattcaaacacacccttccttcttggctactcctctcgacgacgcgaccggagcggagggagtcatggtggcggagccgctggtgcacaaggtgctctccatggcgacgtcgtcgtcctcctcctccaagaaggcgcggccggcggcggcgagcgccaacaagggcggcgcggctgcggcgggcgacggcaggctgggcatcctgtccctggaggtggccaacgccatgtcgcgcgcggcgaacctgtaccgntgctcttcgacgccgaggcggcgcgcctgctcgggccgctctgcctcggctcccgcgccgtgcgcgcgctggtcccgggcgacgacgcgcgcctactggcgctcgcgctggccgagaagctcgacgcgctgaaccg

SEQ ID NO: 1012 - DNA, 913 bp, Zea mays
atacctcagagtcaggtaaaaccgatttcctttatttctgaccacaatgtgacaacggggttagcagtttatgacttcacatgagccatacttatgattatgcactgcgtgcatgaatcaaaaatcaatttgcttttccaattatattcaagctatgaaatggatggacactggcagaaatagaagactgtccagtgtgctctcttcttgaccatgacaaaaatattgtggaatataataggttggactttgtgcttgacataaccatgaaacaaactatgacatcaaaacttctgcattcttggttgctttcttaaaccaactgtagtatttaactgaactgaacataaaagtataatagtaatacaacccagcacattgtagtttgatagataagaacatcaggaaaatgctgtttctaagatataaataatggaggtgtgggcattagaaaacaatcttgaatacattttgagatgactactttagcagttccaatgaactatgacaacagaacagaagtagtttgcaacttgctgtacatctgaataagaactctaaatgaaagtatgaaattgtttttatgcacaatttcacggaagctattttacaaataacaaattttgtaaattccgggaaaggtcaaaatttcaccctgccaacaagtcttttttggaaggtgccaaaaactggaacatgccaaagccttaaatttcaagaaaggtcttcccttgaagggaatggccttctaagaaagttttgaaaccagatttacccggatcctttacatggccattaacttactgggccatttcaagggtttgggccaagggggaatttcaaaacctcaccaaagggagacctttggaatttcctccgaaagaaaccttaaaagcctttgggccaacctttt

SEQ ID NO: 1013 - DNA, 887 bp, Zea mays
  unsure (1)..(887): unsure at all n locations
agttcatatgttctgtccaaaattgatatatttaaaatgcagctggtttccgtcagaatcttacctaaatgccacaatctaaagttttatgacatgaattctgggcattctaaacattataaaatatgaatgtgttcgagtgatcagaaggtcgcaataatggtgcaatagggcaaataaaatgcatgtggaattggccaaaaaaagatcaccttgcgttcaaattaaatgtaaatagtcaattagattgtatcaggcaataaaatgcaaagtggtaatcaaaggatgcaaaccaatatgcattatatttcatgtagacaacatagaaatttcctgaatgaaaacatgatgagatctactcacaggacggagggggagacccagagggctcagtatgcagttagactttggtccactgaagtattgaggatgatgatatttgcaggctgccccatatttacaggttccagtcttcatgtaatgttcacattcaggctgccccggtcgctctggaaaggcatattcttgtatgttgctgcttgaagtcccagatgaagaatataattgcgcataatgactgccataagtcatggcagaggtaggcccctggtgcgacaaaccataagatgcccctactggaacagcttgctgtcctccagctggtgtaacttggttcataggtggctgagaaccatatagagtaaaaaaatcattaggtgatcagcggtctcttataatcatgactacaattgcattttcaagacatgtaaggaattactagcatcccaattatttgcgggncttataaaaatcttcaattttaaggccaattgcttccggtttgggtcggaattcgtgaaacttggggataggccaaaaaggttacc

SEQ ID NO: 1014 - DNA, 821 bp, Zea mays
acgcctgccgtacgtcgttctcatccctcggccatagtttctccatgtatatactggcttccaatattttgtcctggctaacattggccctgtagaatatcatttgaggcgtgtgtttatgttagttattgggtccacttgttttacctttttttttataaaaaaggacttgaatctactgcaaattatccaatacctctagcagaccttctgggctaatagcttggttacccttctgttaggagatgcttttgtctggcataactgtgatttatatattgtaattgctatatcagttttccaatttcatatgttttgatgaatttgttcttcacttcagtttgcaggaagcacaaaaaaggatgaaaataaaaaaaccaccaaacattctagtaattcatctcaagcggttcaagtatattgagcagcttcagcgctacaaaaaactatcatacagagtggttttcccactggagcttaaacttcttaatacagttgataattcggacttggaatactcccttttcgctgtggtagttcatgttggaagtgggccaaaccatggccactatatcagtttggttaagagccacaatcattggttattctttgatgacgagaacgttgagatgactgatgagtccatggtacaggcattctttggctcaccgcaggagttcagtggtaatactgataatggctacatactcttctatgaaagccttgctgaaagaagttgatgtccttctcataccatgtgattagttatacactttccttttccttccatttttgctggggatatatagaaaattaatgaa

SEQ ID NO: 1015 - DNA, 752 bp, Zea mays
tcgacctgcagcagggttcacttttaccctgataaatcaatcacattgctaatgaaaaacatgtataacggtccaggccttgctttggagcaagatgaagggcttgaggtttgttagaggaaattctctaatgcataactttgtatccttaaactactgtttatttacgtttaaggatgctcaattttggtttcatgggcagtgccattttaagttgtgatagtttaatactaaagcaagctcatgtcaaaataacaagcattccactttaagcttgtaagccttaataagaagacatgagtataaataactgactacttggaaccatttgaatttttttaatctactgctcaagataactcttaccccaagttttccttggctactatcagactcgcgacagattgcatgttctttcgtgttatcttcagaacttcgacttgaggcatacagtgatcagaccagttgatttcacttgattgaggacgtcttgaactttgatctgctaatgtatcctaaattatcatggtcttgctgatgttgctgagctttttgatgttttctattgctattagaaatgtgcccaatatttgaaatcggtacatgtattgggtatcatttatcaagtagattcttgacaattctgataatattcgggaaaattttaaatgttgaaccgttgaggagtattttcttttattggacgtctttggtgaccattaaggtgacaggtgaatctattttgatcctct

SEQ ID NO: 1016 - DNA, 796 bp, Zea mays
  unsure (1)..(796): unsure at all n locations
ctggtccctggatcctctccagtcgacctgcagtacctttaccaacatgatgcttttgtttttctataagcatgtgtggcacactagttatcagctccgcaggaactacatcagcattgtgaaattcatcggtagtggactgcctagttgaagtcatatcgttgttttcaaaattagcagccttgcttctggaaacattcgactcagtgctagacaagcttcttctcaagaagccccttcccttcatcttgaggacaccaccacccttttggtccattgatggctggagaatcttccatgtctcttcccaatagttgggtgtagacaagagagaacttcctctcgatgaggatgaaggaagatttgcttcaagggcaaaagattgcagtaacttggctttctcaattaagctctttaagtcaatatcttctggaaaatttaacaacctcactaggcaagaagtcgcatgttcactccctaataaggaggatctgagatggagcatcattgatactgccatcgacaaaatcagtgcaccacgaggagaacataacactttaaattgataatctgccctacttctgatgtcagtacaataagaaaggttaggagaagagaagatcttatcccaaataaaccacaaagctgtcaagttgaaaatttcacgacccaaattaggacaaccggagccaatccgtaaatgcggaaattacctggagggnttcggaactcccttaaccttccaacaagggtggaccttattgaaggagaagggaaatctaaaccacttaggcca

SEQ ID NO: 1017 - DNA, 475 bp, Zea mays
ggaggctaatgacgccatggcagtcgcctcgacaacgaagcccaagtcacagccaaacgaaatactagttgacatggcagtgtgtgctgccaccaagctccagtgccttagggtatgttccttaccatggctaccatgtgtagatagatagcatttacaaatcgatggaatgcatggagctccttagactagtgaaaaaaagaaagccagagctgaaaggactgtaaaaaatgttcctgtaattgacatttcaagctccgctgtttattgttgtacttgtaatattcatttgtgccttttgggatctctcagcatttgtcacggtacttcaaacaatctgctacgacaatggagcaacagttccaaaaggagactaggttctacagctccttaataaggtagttactgctgttgaagttctaaatgtgaaagctgttaaaaaaactgaagttcttgacccaattgctgatgcatt

SEQ ID NO: 1018 - DNA, 591 bp, Zea mays
atttttctcctttcatctaacctctctgacagttgctgaatcatgctctctgtgctgtattctttcagagtctagacctttcaaggatcgatcggatcatccggcgctcccttggatcgcaaggtgagaggtggaagaatattcgttgctccaatgtagaacgctttgtcacgtgaatatgtaactgagttatgtggtgttcatcccaatcacaggcatcccgttgcctgccgtcgagcccgtgccggaatctagtgtatccaaggtggaggacaggtctcctgaggacaaggaaagatggtggaagaaggggctcaaagccatctctgaggggaagctggctgttgtccttttggctggtggtcaggtactctgaatttttgagaagtttcttctgcaatatatacatggtatttctcctaatatatacatggtatattaggaactatcagtgaattgaaaaataatatgtacaaggtatttctcctaatgttgtgcgcagggtactcgtctgggaagctcagatcctaagggatgtttcagtaagttgctttaacctgaatcccttgcattgtatggttagtacttaat

SEQ ID NO: 1019 - DNA, 757 bp, Zea mays
tccactgacaataaccttggcaccagagtcagcgacagctttgataagctcctccaccttagcttcctcggtcttagcataattttctagctgcaaaagcacatgtattataaattccaacagatatttgcagatacagtttgcaatgtgctagagaagtaaagaaacaccatgttcccgatttttagttcagcatacacataagaaaccaattcacaaattataaaaaaaaggaacgtactgttgatgcacgtctacagaatgtaaaacacacaaagccaactgaacaatttgcaaaactcaaacctatcatgagcgtagtaaaagtaggaacacctttaacagaggccaaaaaagattctcagagtaagaacatacctgctcagcggaatggatcaacacggttccctttgtttcagttgccgaggtgtcgacaccaccagcaaatacgacaatctgaatattgattggttttagaattcaggaagaaacactgccagacatcatacagaaaaaagatgggtactgggtcgtaattggttagattcctctgcacattgaatttctataccatattataacatataactgcccatctaattaaaaatcatagtccatgtccattcattgcctttagcagcaatgaaggaattggtttgccagagcttcatgagtgataatgctacatcagcatacatgattcacttaacagtaacaaaatatacaaacaaagaacatgtgacttaatcaccatgag

SEQ ID NO: 1020 - DNA, 774 bp, Zea mays
atcattctgtcgcttcggatactaaagatgtggatcttattccagagagtcaggatcagaaggacaaacacctcccttcaaatgcagcactttgtgagagtgaggcacctgtagcagatgaggacgcagagcttgatgaaactcagtctagagctgctctccccacaccgcaacatgctgaagctgatcatacggaagcagctgtggatgagaataaacatacaggagcagggaaggttactgctactgcaacggacgacgatgcagtagaaaagagtcatggagacccaagaacctcagagacctgcaatcctgctggacctacagacaaagcggagaaacctggaaggtactctgaacaaggcgctggtgatgtgactgaagatcgtccagaaaaagaagcccaagctgttgggaccagcgacactggtttcgtgtttgaacctggttctgtgcttgtggagtttttgcgggaggaggctgcttgcatggccgcacattccttacatgggcgtcgcttcgggaacagaactgtgcatgctggatatgctccgtatgatctctacttgcagaaataccccaggtgattctgcgtttgcgactgcatgaactgcgatacgagctttgcctatgtgccagtatttcacagaaacttcagacttgtagttttggcttttgagcctttggatggttcttccggtccagatagtggtaccattagttgaacgaaatatttggaaatgttgttccacagtagatatcggatggacaata

SEQ ID NO: 1021 - DNA, 761 bp, Zea mays
tgcatagctagacagcaagggtctggccatactgtccttgagccatgcgctgttgcacctgaaagaagatcatctggagcagggaatattgctcgaattcctcatcccaccagcagcggggaaaaactttcggataaaagtagctcctcaccaagaagcatggcaaagaaggtctggtagtcatctgtaccctcctttgaactgtaccctttaggcctcatgtacttctctttgtttctcagacagtcttctatttgccttacgctgccaaattaacttttggacatgaaactaggcaattttaatgacaaattttgtactgtgtggatttgcagagtccatcattcacacccaggaagcctctccaatctgacaacacttctcacagtcaagatgatgactcatattctgtcacttcttcgtatccttttttcttttcaaacatggatcacattgaattctcatgtgaatcttattgttctgtctgtttagtgtctcctttttatttagttttttatgcatatgaactccataaaattttggatggccacttttttatacctttataactgacttagtaaaaaagtttgcttcatttgtattccccaatttcctgagctgcgtacagaactgtaacttcagcaagagctgggaaaactaagaagacaactgttgctgttgcaccaacattcgtctgtgctaatcgtgctgagaagagaggagaggtacacatgtaatttcgtggtgcaaaatcatgattg

SEQ ID NO: 1022 - DNA, 831 bp, Zea mays
  unsure (1)..(831): unsure at all n locations
gcagacgacttcttctcctgtcaatagcctgcaactagcagttagtacatcagcaaatttccagggaaacactatacacatctaacatctaagaatataccttctgccaataattaaaagtaacagacaaagtaagcacattataggtcaataacaacaaataaaaacgaacggagggagtatcagctatcagtagtttcaacgcttccaatatcaacaaatataactcgtgtagtctgtaaccgtgtatataagtaacaacataaaaatgtttctgtaatataagttatgaagacgattaaaatcattaaaaacaccaaatgacattcttgcaaatatcctaaatagattggtcatataaagcttaaaactaaagatgaagtcgaaaccctatactatgaatctttataggaatctcatttttagtaggctacgtttaaatgaatggacatttcagaacaactaagaagacatgccgttgcaaataagatcctcaacaactgacttaagtttacggatcatggcaaattgtcaatgaatttctaaacacaatcctgtatataacttcttaacatgacagcctaaagtgtgtgactttttagttgcagtgcgtagtttctacaaacaagtacagtaattcagtcacgacacanaggaacatctattatgatcggttaaatattcaaagagaataaagagaataaggggaaatggggtaacattaagtacaatggagaagaataaatttagatttaacatgccttattgactactgacctttctgcaaatttaaacacatttaaatggtcaggcccctaaaactgaatagtg

SEQ ID NO: 1023 - DNA, 761 bp, Zea mays
catgcttgcagctcagccacaccaatccactccactcctcgctgtcactgaaggtcagttcagcttcagcacttcagctcaccatcacccgctgccttctccgaactctttcttccttctacgttactcttgtccttcggatcttgtcgccgtgtgggctgcggtgagcgcgctctccgtcttcctttgtttggtggttgtgaaaaggatggggggaaatctagtacctgacggagagcttaggttgataagggggtttcagatggtgatgtttttggctcaattgcttcattgcacttacgcatgcatgccaaagtctcccttgtcatactgctgctgcttggcactttgaaccttacgttcttcttttgggcgagcttgcgttgtacggttgttcttttcctgctacgaagctgagtgctcttttctggatatgctgcccactgtccagcgtgtagatttttccccccatttcggttttcctgtctctcttcccttttcccctattctccaactccttgcctgtagtagtgtagtgtggttctttgccaggaactttaccgcagtcaatttggaggaagaagtgcagtggagatagtgccatgttggccccaactgtcaatcaacttgactgccgtgttcgcactatacctacttcatttagcttttttaatatttgggttaggttgttgggaaagtggaactttggcgtaaaggtggcaaatcccttttacttggcggttaccaagcttggccaaatt

SEQ ID NO: 1024 - DNA, 789 bp, Zea mays
aaaattcttgttgtcgaggtattttgtcatcacttgtcgctttacagctaagttctcagtttgcaacatgtcaccaattgtgtggcattaacaagcaagtcaacatacttagaaacacattctattccactgctgaatgttttatcttctgtagcctttcccctttaacctagtgaatgtgctgtgtcaattcagagtacctttctagacgactcaatttcagttgagcatgcaagagaatatgggcacacacatttatttgaggtatctgatttaagtttttatttgaggtatcccaaacttgtttattcaactttcaaaatgtcaaattgtatgtacctacccttggaaacacagataacaagtcaggccgacaagcttcaaaacaaagctattctactgatccacttttctgctcgttatactacagaggtgggctgatacctaaccattttttcagttcgatccattgaaatgctatggctgcctgcaatttttggttttcgattatttaattccattttgactacttctatgtggccaaactatcctaattccattcatacttaagatgcttcacttccatgttgctattcaagtttgtttttcccaaaaacaactttaccaacatgcacatctcgtttctactctgaagttgtaaacatcatgaagaaaaaatcagttgtttttgctccttttgcagtagtcttggaaatttggcctgtttgttttgcattgtttgtgagtaagctagttattctcttgaccttctctgacgactttcttttt

SEQ ID NO: 1025 - DNA, 767 bp, Zea mays
attgtcgcttgcacctgcacctaatagagacaaaaatactatagaagcagtatcaagcgaacaggctgtacattttttgtggcttcggcttctagaccaaaactgcttcacttcatcactttttttgcttgattttgacttcacaagttgttctcgcatgtgattgtttgggagacttcttcgaaaagccacagaagctacatgtgaaaccttttactagaagccttgctaatttgctaaagaaacccttactatatatatcgatgggtttataagcttatttgtatgtcataatcggtggtctttgctaaagtttttcatttgaaattaaaacaattgtttgtttctcctctcactttttatttattaaattaatgctaatatagtgtactactactccatctaccctagaaccaaagcaactcgaattttgtcccaaattaagatattaggtatttggatatattaaaacattcattaaatactcaaccttatttgggtaagggacaattaatatcctgcgtgacttgggccaatcaaagtatgtgttgtcttaggccattcttaatgcgagtttcataagggtttcattcttattaaatgacatgacacataagcaaaagtagacgacatgacatgtaaccatgatgaaaaagagaatatggaggagaagtttcaaggtggaatgaaaaactctggtttaacccccgggttttcctaagaaaaaaaataatagggacccatggggcaccccttgggggaaaaac

SEQ ID NO: 1026 - DNA, 652 bp, Zea mays
  unsure (1)..(652): unsure at all n locations
gcctgcaggtgccaagtactccagcagcaacgatgcccgcgacggcgccatgggcagcgtgcaggacgagccgcggcagcagcgccacgatgactatcaccccgagatcgtccccgagaagatcatacacgaggacgcgttgccggtcgttgctgcggagaaggagactgccgccgccgccgcaacctcgaaggaggaggaggaggtggagtcgcccaagaaaggagcggctctgtcgccggtgccggaggctatcgtcatcgccacagccgcaacctcgaaggaggaggaggaggaggaggtggtggagtcgcccaagaaagaagcggctctgtcgccggcgccggagcctatcgtcatcgccgccgccttaacctcgaaggacgaggaggaggtggaatcgcccaagaaagaagcggctctgtcgtcggcgccggcgccggaggccatcgttgccgtagcagcagtggaagacgtggtggcggacaagttcgtgacggttgtgaaggaggcgatcaagaagcaagaggcggaggaggacnagaaggaggaggcaatgcggaggttccagggcagccgtgtgaggacggcgttggaagctctagcggagaccgaacaaccccgtcgccgagaggggggcgcggagcaacca

SEQ ID NO: 1027 - DNA, 660 bp, Zea mays
aatacgcgcataaagacacccgctattacagaggtgatgatccgtggccttacacaagtggcctgggaacgggtggacgtatgctttcataagagttggctaagatacaacgcccataataacatccaggtaagactaacagcctagccatctgcggacagttattttagtacagtcgcactttgcattcatacttttaaccatctggtgattcatgctacaacgagaccaccaatcaggagttcagttcaactgctaagtaatataacaacttaaatgctgtaaaaaaatgacaatctttctgttgggcagctgagaaagaattgtatacattgttattgctactactacctgatcagtagctgtgaaattttcccttgacgtatatgacacttccttgttagttagtaacagatggaacttccctgtatcgctacataatttaccttattgcagaaaggaatatagggttgtagtttcagggaagtctaagcacttcttttggttttactatggttgcaggttaggatccatccaattaattcagatggagaagacgtcatataccatatgatagacaattttgtagtgtagccaagtagtccgtccggtgaatgccaactactaccgaaaagattactgctatttccagtggattcg

SEQ ID NO: 1028 - DNA, 728 bp, Zea mays
cagacgcatacaagctgcattccgaattttgttccctttaagaaaaaaaggcgatggctcttcagaacaggaacagctgctgcatacttacttattcccttactgtaaggatctatctgaacaatggttctctgagtgtaaatactgaagccttggtgactgaacggatggacagtgaatcccgagaaaaaactgaaattttcttcggtgatctatagtaccagctcgaaggacttcggcgtcgtccagaaacaaaagtgaatagacggacgcttatgaaaatcaacagcaaataaaacttctaggggatcagtaaaccgtgatacttttgagtcgtccacacaattttatgaaactgtcgcgttgtggcgcttctgtccgatgttgcgaaactattgggcaacatagagaccttataacagccacagctaaaaatttgaactcaaacgaaggtggagatatgcttagagatgtttagtggctgtccatgaagtatctgcgctcgcaaacacatatgcacagcacaaccaaacctggaagaggatctagaagacctgggctactttgacatgcaaattctttatgtggctgacgcttaaaaacagagtttggacaacagaccattgggccaaaagagggttggcccatccaattgtttgttctctttatgagcaagcggatgaaattattaacaccattcgatcaaacatgcttcactttttatttca

SEQ ID NO: 1029 - DNA, 546 bp, Zea mays
  unsure (1)..(546): unsure at all n locations
agcttgcatgcctgcagcattgtattatctgtctaaaaaagaatgcaattctaggtgcattcttggttatagtgtctaaggtttgactaaatatatagttaaaaatattaatgtttgtgacaccaaacaagtatactgtgaaaatatatcttatgacaaatccaatgatacttatttgatatattgcgaaagggcctctagctggattgattaggtggtctgagttttaggctggggcctctacctgtgggagcgaattttaggttggggctaaaaaataccccttgtccatcccacaccaaagcacaagtctaaggtccggccctggtcgtggtcgttctcacacaggctacgatgccgctgtgcatgggtggggcagaggtttgggggttttctcgacttgtgtgagaggtcttctcttaacacaatatccagaggctgtcttaccctccgcaggttgagttttttatttgatatcttaaattttgatactttttttacatataattagttaaactcaagatactntaatttggtactgcgcta

SEQ ID NO: 1030 - DNA, 811 bp, Zea mays
ttatgttttgaaacaaaattttattgcgcacatacaaaatattccccccttgattatattttcgctgaacatcattttgccctattgcagttacgagctcgtcagtttggtttaatctgccatttgccatagctctgattgttttgttccgctacatatcgcttgattatggccttcgtagaaagagcgtaactagaacagatcatgccagtcattcactcgtcaaaacaaaaggtactgaggtaaagaaagtcattcatcagactgaaacggatggaaaaatagattggaggagcaaggttaactcgcctccagttgaagcagcattcgaacagttcacaaggcaccttatctcagaatgggtaacagatctgtggtactcgcgcgtaacacctgacaaggaaggtccagaggaactcatcgatgtagtcaatactgtccttggggagatttcagttcgggcaagaaatgttaaccttatcaatctgctgatcaggtagaaaatcttgtttttgtgcaataaataaaaacatagatgacacaatgttttcagaacattagacttctaatactaaagcattccctgtgttttccagggatttggtcgatcttatatgcaataatttggaactttatcatttctgtcaagccaaagattggaagagagaagtttgtgggccttccttcagagcgtcgtgatgctgaactgaaaatgatccttttagctgaaaacagttgcatcctgcttattttcagctggcgctgaataccaggtaagacttagtggatggtgaaattttcgaaatcttga

SEQ ID NO: 1031 - DNA, 845 bp, Zea mays
cagcttgcatgcctgcagcactcaccacgagcaccgcttgctaggctgccagccacgtctcgagcatgtggggaggagacgttgttgtgctagcgagttgaactaaggtgtgtttgtttctcgatattacaggtgattgggaacaagtgggacctctacctcgacctcctccaggccgactactcggaagggtaaaatctcctgtcttttcatctcagggctcttatactgtggttttatcactgcatctcgagtggtgtttctgttgcatcgtgctgtggtgttttaagaggtttaaaacaagaagtttgttttggtcctgaggtaaagatatgtgatgctctgcacaagtctgagttatgccaaaaagggatacggtttctatgcttcttctccctatataaataaacatatccatttataagttctgtcaaagcagcccctttcctaaaatttgttatgaatcctggcatatgagatcaattatgcgttctcttcagtgtggtagctcttgttaattgcaaaactttagtaatcttttttatatttctaaaattcggactctaagctgttaagaatatcaatgcaatatgctgtatatcttgttacagacaaagataaccaatagtgtattgatccatagttattcaataagagattgtgcatgtgcatactgaattactgatttagcagtagtggcattgttaattgtttgtgtccctgactatatgtctgataacgattaacaatttactgaccagagatcactgatctataggtagttttattgtaccgcattaaagatttgagcctctaactttattgtatggatcaaatggcaatgg

SEQ ID NO: 1032 - DNA, 799 bp, Zea mays
cttgcaaaactttttttgctattcaatccgcaactgcaattttctctgaatctgcaatataggaatatatatatatagtgttaggataaagcaaacttcattggcattaatattaatgttgggcaaaatcacttagggcccgttcgtttgtgtccaggaatggacacaggattcgttccagcttatcaaaacttatataaattagagaaacaatccgactaggaatcgttacaggcctccaatccgtgaaaaccaaacagggccttgtggaatcaacactaactgaatttagaattagtacctcaagctgttcatgaagccgtttctggacttccatctgaaggcgcagcgcttcagtaagatccatgctcctatacaagaatgcccaatatcatggaagagtattaaccaagaagtaacagacaaagatgatcgtaaaatgcactttaacatataggaaaaccttcaaattagattttatgtttcaaaagaaacaacaaaagtgaatgcaatggctcaatgcacatcatgacaattccataactagaagagggcgttgacacttgacagatgcatcgaacactgagggcatgatctatgctcggagtatctattgttaaatcccacaccatgattgtataagcatttctgttgtaaaaaaggcccttcaagaatagatttgaaatagcttgtaggtaattcataaccctcaaaatttttactgcatgggaaataatgcaaatcgatggatgcaaatgtgtcagcttacaacagtctgaaaatagatcaattctaggac

SEQ ID NO: 1033 - DNA, 742 bp, Zea mays
tttgctgtttagctttctaagtagtattcttgcccaaaggaggccttttcattttcttatttgaactcgtttgtgttgcagaagtaccgcacagcccgctataaaccagacctgtcagaaggtttatttgcttggcctcttcccaacctattttctctgcgttgtggattacattttgcatgtgaaatgttggggtcatgaagctttcatcatatttatttatttgtgtcatgataaccatgtcgtgaggaattctgtgttgcagacagcatgcatgcatgtagctggatcaaaataagtgtgagttgttagtgttaatattacacttctttaaatcattatgcaggtacatcggaaaaaaggacagccactgaagagctggtcctggacctgaaaacgtgagtgagatacttgccatatgtaatccttcatttcacttgatggtgtgctatttgtctcttttgatggtaactgttaccatgttactgtgtgattccacatgcattgaagcgaagctctggagtttattcacatttgggttatggttttgattgacactcataatttagcttgaaagaaaatgcttgttgagattttctttttgtgttactgtgattcttaagattgccaaataagaggcctaaatgcttgatcaggctatgaaacacatctctgttgacctgttgtgcttgtggttcacttactcttactgttggacaagcttgtgtgtgattgagtcgct

SEQ ID NO: 1034 - DNA, 794 bp, Zea mays
gacctgcttccaagcctaaggatccggcgaggtggtgatgctatggattcacgaccttatttctgcctgggagatctttgggaatcattcagggaatggagtgcttatggggccggtgttccacttgtgctaaatggcagtgactctgtgattcagtattatgtgccatatctttctgctatccaactatttgcagatccatcgagacctgcttcaaggaacaggtacatcctattttgtttcacaaaactcatggtgtctataaagtttccattgcacttaaaccttaagagggccaacctttgtaccaaaatgggtttcaattgtttcttgtttgtctttgttatgcttcacagcttcagttcgtttgacctttgatattttcatgtatcaagagagaactaagttaaaacactgatggaattgtgctccatgttttttttatttttttacacttatgccaatatatctaaaaggaaataagtatgcttgaatgctattgagctagagcttaaggcagattaagcatttccaacttttctttttagttatattggcctatgccctttcaaggcaaattatgtcatatgttactgagatttactaacttggttttgtcaagaaattctatatgtgacaacattatgcagatttgttctctgttaactacttaacttgcaagaacactgagatgagagttgatatcttttgtatcacctgttattcactaggcattgctaggtacagcgactttaattggtggacatatatgttaagaaattaaatgaagtaat

SEQ ID NO: 1035 - DNA, 801 bp, Zea mays
ctatagagtcgacctgcagctgagtcaaattccatatcagactccaaagcatctagctctgcaacgtcaaatgaaacaaataataagaacagtaaagcgagaatcatctccaaaaattagacgataaatcactagctagatggcaaggaagaaaatttaggccatttatagagtataaatatatgtgaacaattggagttttagaccattagcaaataaccatattaccaagtgatgtgccaaaaactatggaagacttaaatccagaaatagatgtcatattgcaaagatgaaattgtgacttccataccgcccatcagttcttcctcgtcaacgtcatcagggatgttgtagcttctaccaagagtttcttgtatctcattgctcacgtccatcagatctgtcatttcatcttgcatattctatgaatagcaggaatgtgtaagtacaactcaagatactgaaaaaaaggatgtaagtcacatgtcacaataatctgggtgtactttttttctctctaacacataggagagttgtgtatcattatattaagaatgaaaaacggggcaagaacccttataaaacacacccatccgtgtgattttacaagcttcaacaattgtacgtttattatatagatactaaatcgcctaaaaagcttcaaagaaaaggttgactttaaattaagggtgataggcaatctaataatttttggttctgcctttgagccaaaagaagagtaccataaaaatctcaaaatgtgtgtcattatattaagaaatgaaaacggggcaggaaccc

SEQ ID NO: 1036 - DNA, 857 bp, Zea mays
  unsure (1)..(857): unsure at all n locations
catgccacgcagaaggtgctttccttttggtgcctgtctatgtttcacatgtttttttatctttgtaagtcgaactcgaactcactatttcatgcctgatgttttgctcaggttgcactggagaacggatacaccaagatcatgctgggaacgtgtgcttccggaatagcatgccatgtgctatctgcaaccgtgaaggtatatatctgacccggtgatgtttgattcttcttgagaataatatgagcgagcgttgagagcataacagaattactaatttttccaggggcaaggctacgctttaccagctgatgtccagtatgttgatacgcgatgggaagtacccgtggttcttccacttcatgattgcctggcccaagagcttaacttgctctgtgaaattgataggtaaggtaaaagctcacctattagcctagttgtctgttgtccttgcagtgggtttttattataatggtttctctgttcagtttgaagacacagcaacttctcgataggccttgcagtggcatcaatggcttagtttcatcctttgtttcacggctaagggtagggcctcttgttcttggcatgccactttcttggtgacttaaaattttagctattctgtatgtgagctcaagctgtgttcttgtttgatgactacaacactacgtgtatgaatatcttgtggagctggagcaacacaagacatagttttgaatattttctcatttctatttacaggaagagaactcttctcgagagcataccatnttaagaactgctcaaaagcttaagccattctcgtttaacaagttctcagcaaacggctaccatgatttcctgccatcgcggct

SEQ ID NO: 1037 - DNA, 674 bp, Zea mays
gacactaccgttttatttcctgcaactgcttgggtattgtacatctgtatgtgatgtgtcatgtgcacatgctttgccattttgcattggcaataataggttgtgcatcccttcagcgctacaaggagcaaggatgtccgcttcagattaaatccgactgtttagactgctgcaactgtaatcatagagataaatacactatagaaacagtagtaggagccgatacgaattaaaaacaacgaacaggctgaaagatgcagcgcttgtctgcacaacatccccaaagtatcttcgagtcgaatacaacagggtaactgagtgtaaccacagttcgtacagaatttgtagagaaaatgaattgtccaaaccaccggataaattcatcttgttacaatgtttgctggcagaatagctcgcacagcacaggagatgagaccagttcatatgaaatcacattttaagtgggaaacgttcagctctccaacccgtgctgtctctgtaaaatcagtggaaacttgctggctagtgatggtttgcctcaccactatacagatcccagatgagttgaaagataccagtagcagtgtcatgctagtgatactggttttggtcagaaaccaaaaaaaggaagaaaccactgttatcccaataagtttgggccataatgccctgtg

SEQ ID NO: 1038 - DNA, 480 bp, Zea mays
tgcatacacttctcagaactaaatgatataattaataacacgactgttcgactaattacctgtcggaagaatggccaaggccaaagcactgctctcctctatcgccaacacagtaggggttgaatcacctaacccctatgagaaaaatatggcatttagattataataaatataaaaagaataatgtcactcactttatgaccatttttatacttaccagtaaatcaccagtatctgcaatctcaggcttgggaggcaaagctatttgggaagaaggaactggagcaatttcttcaacaacttgcagtttctccgctacaattggaacggtatcacgaacttcttcttctggtttgtatgtcagaagaagccgctcaggaagctcctggtgaaataagaaggatagtccgtatttaagaatccattccacaataagtaaatcggctggtataaacttgacttgacggtaatcatttatct

SEQ ID NO: 1039 - DNA, 750 bp, Zea mays
  unsure (1)..(750): unsure at all n locations
gtttccgtagaactgatgaatctttactgcaagaaagtactaagggtaagaaacggttctttttgttcatctgcaatggccactatgtgctacactatctggacacttattatatagatttgctatgccagtagatcgtgggcgtatagtgactacatgcatgaaagtaacagttcctggcagggctagcatgtctgctgatttatttagtattctttagaattaccttcttgtaagctgcgacttattgtggagaagtgtagtgtcattctaaggtcatatataacctattttagtaatgagaaatcgttggtgcattgttagaatggtgcggtagcctgtaagccctgttctaggcggaggtccaacgcccaggcgccttgcccgcctacctcacctaggcgtcgcctaggcgccgcctaggcgtccaggcggtggtccaacgccttggctcgccttaccgctttaaaaaccatgcatgtaagagatacatttagttgtgtccagttctagtacgtgttgggcattaccaagaaaattggtgtggtcaaaaacactgttttatagattccagtagtttcctaaatgttntaaagtcgtccgattaatcgcgattaatcatccaagtcggttttggaaaaatagcgaattaatcgcccaagtcgtnccgactaaatcgtggattaaatcgctcaaagtcggtccaagccaggaacgaatcaaccangggtccgtctggactttaaaaaa

SEQ ID NO: 1040 - DNA, 502 bp, Zea mays
aattgttatatcgacttattggctgtcgagtaattctctcttaattcttgcaacaaataagttggattagtgaaagaaactggtttttataaacatatttactttgtttgtttgtatttttctattttaactaagccaacatggcaccgcttttccttttgtattcaggcagaaggagctgcaaaaaacaattatctggtgcaatatgctctagcccaggtaagctctatttttttctgtcattttttttgcttgaactgatcatttgtgaatctatctggctatgtcttgcactttatggcctattcaatgtataatagagcagttcaattccttctatgtaatagcttattcttagatctggggaatcttacgcaatttgaatcaatcctgctattgtacaggttcttaaagaaagcttcaaaatttattgtgcaataaatgatggaattatcaaccttattgacaaggtacgttaatcttcaaagtaggcattcgtctt

SEQ ID NO: 1041 - DNA, 702 bp, Zea mays
atgcatcaataaaatcgtccatcaagtttgggccaaacagatccacctcatttgacttagcagttgttttgcctacaaaagacaaacagcaatgagattatgggaatcacaaatacatgtggagaaacaagtagttgtgttttacgtcgtacaaatttaatatagttcctaaactaacaaggtcctgggtggaaggacaagcccagggactcatgtgatctcccttgaactctgtttttgctctacttagtgaataggaaaactggcatcttttgtgtgcgttattataaaaagaaaacacaaacagacaactgcaatatacctgtcttagttaattttggaagaattgccacacgaatctaaattttgatccttttgcaagggtacaaaaatggcaatatatgcatacttattactaaatcatacttgatgaggacctgtttcaggtgttaattcagttatgaaaaagaaatacgattcacatagttaatcatggtactgttcttaggatatcattcacttctctcccttttttctgaaaataaaacatcatgcatcatgttcatgattagaactggatagcagccaaacatacaggttcactttttgcataatactgcgactaagcacaaaataggtaaaagattttaccatttgatccacgaggatcgaagtcatcaaagtcgtcctcagtgttattta

SEQ ID NO: 1042 - DNA, 706 bp, Zea mays
ataaaaacttcatacattagaatgaagtggccagatgaattcatagatcctataattaaagaaggtttttggatgggactcagaatatcattcaaaatcaatttctaactgatcagtaagacaacgaccaaactagttcagatttgaatttgatgaatcagattcgaaattaaattgaatatgccagatgaaagcggcagaaaatcaagatatggatttgcttcttcctctgcattcgtctccttcctttctcactccctcctcactcttcttcttttattccaataaaatatggaggggtgacggtccgagccccgtccagcccaccatggatccgcccagctaaaaaggcacaacatgactggagtaacagaagaaatatcgcagctcaacatggaacggcactcttggacatctataatagcggggcaaaattgctcctgaaaacaggagaaagatatagctgatttacatacttcagcatttcagtgtaagctaagttacttatcccgtttgacaatgacaacaggcatatattctgctgggagggtctggtctatagaaggtaaaacggttcatgcttatttactatgttaggtggatgctaaattctgtccccagccccaactatgttcagttctcaatgtttgcagctgacaagatccagttcagagtctgattgccttcgctttcatgatggccatgc

SEQ ID NO: 1043 - DNA, 333 bp, Zea mays
tgcagttcagcaagtcaccatttgaggactctcttatagtcttatttcaagttgactattagccatacagagaaagaggcatacctgttggaccagtgtatactgcaagctgcctgtacaacaaccattgggatcaaagctcaattgcatatcccaatcgctcagctaaaggcattggaaaaacaagtagaaagtctagcagcttactcagttgcatatcccaatcgctcagctaaaggcataattcctagcatgctgaaaagaaaaaccaatccctgcaattttaatgtcacgtgaaccatgtcagcattaagttaacaggggggggggggg

SEQ ID NO: 1044 - DNA, 728 bp, Zea mays
tgctttggagtggacctgcacatcaaggtccccgcgtacttacttggtaagggttttgcatgttctcgctccattcatgcacggctaatcgcttattcggtacggttatgattgacgaacgtaggagtaggttcttttttgcggctggcatacaaaattgttgtcaaaggaacttgtttgtttgctagtataaggaaacctttttttttttgaaaagtttctcttttttagaaaatgatatattttttaattgtttgtttgtgggttgttgcgagaactgacaaattgaccgagctaaacgacaatgcatggcagccgggtcgtgactcgtcttctagatgcgattccagccatgttagtcgtagagaaatgccataggatagttagtagcggcgtaaaatgcaaatgcatgtccattgggtggtgcgggctcaccgtagaagacggttgtaaacttggactcgtgaatgcgtgtccattgggtggtgcgggttcaccgtagaaaacggttgcaaacttggactcgtgaacggcgattctgaagggtgaaaagcctggcgaccgattcactctaagaaaaaccatttcttgcttatgttctgaattaacggtcaggatcatctggttggggcacatatgttctttttttttgtttcagatgcgtcacgccatctctacggatttattgcctgtctttggtcgacgacgcgttaagactaatcgtgcca

SEQ ID NO: 1045 - DNA, 756 bp, Zea mays
agcttgcatgcctgcagtccatcaatcatgttgtttattttaataaaatctatgcaacttttcacccaaattgtggatttgtgattttttgaataaacatgaacttgcgatatatgttgcacatatgaagttgttcttgttctatctattacaatatctaatacttcactgtctctcatgaatttggatgggtaaataagagcacaccagttatccactagcaaatcaggtagcaagcagcatgtttcgccaccattttttcttttccttcaaaaaaattccctggtagctggcgaactttttgtgttatgtgatgacactttcttatattttcttgaaacccttggtacatccaattctgctcaaggtttagtttcatcaagaatttcaaattttgaccttagtatttgcggggaacgataaatcctgaggggtttgaacaatcgacacatttcccccttgccagtatgctgaaaagttatcatgttttcttgccaaacatgatcatgttgttttaagtctatgattaaatttgattgcatccattatttacacttttctttctttgacaggcaatactgaattatgagaaggctgtccagcttaattggaatagcccacaggttagcattaaatcattattttatcttgagttcttgagtgcagattatattataaaacgaaaatataaaaggctccgatctgagttaatggacgatcaatgtgcacatataacttgatttaatgacccatcat

SEQ ID NO: 1046 - DNA, 692 bp, Zea mays
aagttagttgagctcctgctcttagcacttgggaagatgcttcagggtttcctctagtctcattggatgctgcctgttgctgggatgacaggttggtgcaccaagccaagaggcatgttcatgttgctagcgttctccgccgctgcactgccgtcacagtttggctccaataagcgcacaagcgatagaaagatctccattctggttacgtcccggttcgcctgcatggaacagcgtcatctcattcctttggatttccattctggttactgtttattacttcagattttgaacttctagttactgttttttacttcagattttgatctgaaagaatcctgattattaaatttagctgcattacctcaacagtgaaccgtgcccagattttacttttgcgcatttccatcacacccctcaagatagtcagtcctagtcctttgatgaaatcagctatctccaagaagattcctctatcctcgcaaagcatctgtagaggcaaccaagtcatcacaatcacatgcgttctaggtgaaacatagtgccataaacaataagtagtacgatagtcattaccttcacaagcatttgacgaggtccgtcaagatcctcaacaatgattggacatgtcatagactgagagccgacatcaaaagcccaggtagccccaccttcgaagtagtctttccaaa

SEQ ID NO: 1047 - DNA, 759 bp, Zea mays
  unsure (1)..(759): unsure at all n locations
tggccatttgccactattgcgttttcagctggtgtacaacctacaagttggtgcagccggcggtcccacacataaagttccagtagaagatcctgatagagccaatttacattaaggatatcatccacagagcttgattccctatttcgatcaacagtctttgctagagaatcctggaatgatgataaaggcaagccatgaaataatgattgccagaaatgcagagtaaatcaaatcagtgcgactgatggaaggttcatctctgaaagagtttaccatgaactcagccttctctttaatcaacatctcttcaagttgggaaaggtctttaacaggaaactgatccttgagcttctgtagtgcgcttgtgacttccgagaaaagtgtaactcctgtggcaagaaccttaaacatgtgcagcagaggcatattaggctccagcattatggatgttcacaaaagaagcatgagatgggaccaacaattgagaacgaacgatacatacatttcgtacctcttgcccgtaccactcgtgcatatcgggattgtgaaactcaagagtaggctgtggtttgcaggcatttgtaaatttcgactgaaggattactgggaaacatttgcaaactttggggaggccccaacccctgaaaaggttggaacaccatttccccaaaaattaaaattggaaaccaggaaaaaagggtttagtttaccacattaaccattttggggaaagagccaanataaccaaattttttt

SEQ ID NO: 1048 - DNA, 734 bp, Zea mays
atatagtttagtgtttgttttgtttttctttggcaattacgctttaataagcacaatatgggtttggggaggggaggcgcgcgcatgcgtgtgcggatgacagtttttcatcaggaagcgttacatcaaattcaagagacagcctctatcgtcatgaacctttcgaacgtactagctttcgtgcatggcaatttggaactactggttttcccggcccagctgaaaccctcggaatcatggatggaatcgtcacagtagcacaacgcgatgccccagctgaagaacaatgcagaagtagatccggtggcagaaacactggaacagaatcacatatataataatatgccatacttccgcatctatcatcacatatatatgctccctaatttgcagtatatattctcagcgcatcagaaaccttgacacgtggacacttaacaatgaagcataaaaaaacacaaatatctggggaccaatctgtgctgctgggcccaacaaccttctcttttagcaagcaattaggactagtgtttggggatttgtttcatttgtttcctccgatgagcttcacttggtctgtggaggttcgtttagaatactttggttttcaaaaggtactagatattacaaatcttgtactagtttctaaaaccatggttcgtttattatcaaaaaaatgttttctagttttagaaactccgctcgtgacctgtcgacgatgcatggggcgcgcg

SEQ ID NO: 1049 - DNA, 505 bp, Zea mays
acctggcgagcccccggagcttgggttggaggaagctcttggccttcttactcgtgagcgcgtaccccaccacgacctccctcgcgggcgccggcaccaccgcctcctccgcgacagccggcgccaccgcctcagggtccacctgcccctccgtccccacgcacacgcccgacaccatcgcagcgtgccgaggcccaatagcggcgagacaaacccgggccggcctgccggagcgagagcggagaggggagggcgatcgagatcaaggccaggcgggcggcggcgagagatcgggaatgccgggaagggaagggagcgcggccggagccctaagcctcgggagcggagcggtgcggccgtgcggggacaggtggtgtgtgcgggcagggcaaggtgaggcggataggagaggagagtggaagagaggtgggggcgcctgcgtatttgtaggcggaggatgggagcaactttgcctctgggtcccttggaaaaaagtttctgccag

SEQ ID NO: 1050 - DNA, 778 bp, Zea mays
gcagaactaattctcacaaaaaatggaagtggtctagtggagcacaactagatgcgactcaaacacatttgctctaggtcacacgagcgcggagcgaactgaaagaaacagcaggtagaacctacagagaagtattctggggaatgggcatatataccttggcggcgcgggtgaggcgatcaccgctctcgccgacggagatgttgagcacgagcttctggaccttcatctcccgcatcgggttcgactgcttcttctccgacgcctgaaatcgcgggcaccaccatcacacatcgtcagaatcgcacacgcgcgaggaacgaatgattcggtgggcagaaaaaaaaacacagagctgaatggcgctaagtgcaaagcattatccgtgcggggacctcaccatgggatgatctggtagacaacggcgaaggaggtgagagagtacagcagcgcggggcgagggctgaggcggcggcggaagaaaaagcttgtaaggtaagaaaaccctaaatcgtactatgcttgcttgtgtacaattacgtacgtaaccctgatccgcttgaaaacgtcgcgttaaaaaaagttcaaaaatttccgttgccgggactcgaacccgggtctttcgggtgagagccgaatatcctgaccagctagactacaacggatttgttattcacacaaatgtagtattaagtatttcagttattttaggttggaaatggctaattcactggattactgcaaaaaaatgtttatgtgcgtcaaaaaccaaaaaaag

SEQ ID NO: 1051 - DNA, 508 bp, Zea mays
tacccctcctggtatccccggcaggggcccggttcacgtccaccccccgcaggaacggcatctcgtggccgtggcgcgcggccgccggctgctgctgctgatccattgtcgtccctgcatgcatgcgcgcagtatctctgtcaggattagaggaacggcgtcatgcatgcggtgtctgctctttgaatcaattactcaccgacgaagagaccggggccgttccacttccaccactgcggcgcggggagggaggtgatgggcgcgacgctgatagctcgctgctgctgctgccgcggcggtggcgggggctcgacctcgaccggagccgcggtggcgacgccgaggccgaggccgaggctgaggctcagcccgagcccgagatggttgttcccgtactgctgctcctcgtctctcgcattaagcgccataatatccattgatggttgccactttgagctcggtttcccttgcagttgaaagagagagagagagagagagagatagcggt

SEQ ID NO: 1052 - DNA, 765 bp, Zea mays
atgcctgcaggatttcttacaccaaaattttagggacggctaaaggattttaacactcagtttagcccaaatggacgttgactataagggaagcatgcaaagtgtgctgatatcgatgtgcactaaagagaaatggttggcaactgaaatacgccactgtagctatgacagaatcagatatttacctctgtttgaagctcgcacattatctcgtacatgtctaacagaacaaagagtttctctggtgatcgtttactcatagcaatagcctctccaaaactgagtagtgtagccaaactgttctttgttattgcagcaaagcacttatccctcaacgattgactgcactcaaaaacttggtcgcaaagttggcgctccccagcaaaaagaagtttaacctgtctcaagcagaggcaaatgtcaccagagcaatgctataccataacagaagacctgagggagggagggaaattacttacagcaattcgcatgaaatgaatccaattccctattttagactccaaaatttcccacggcattttctgcacttcatctttgctaagtttttcaacgcccaagttcttcagacttgattctaaagctgaagaacgagcttcactgcacataaaagagaatatgcttcactaagtcactccatcaggtacaactgtactgcatctcttagagtcttagcagacacaacaggggcacacagaaacgagaaaagtttttgcatgccgataacaatagaaagtgcaaaactat

SEQ ID NO: 1053 - DNA, 781 bp, Zea mays
ctccagagtctagagacctccaccgtccactccaaagacgagcagcgggcaaacccaagcacccgcccaatccggttcgccttccttctcaccccgcccggactctgcggagagatctggcagcggtggctatgccattgggcgacgacgcggcggcggacttcgcgctgccggacgagctcctggcggcgctgccgcgggacccctacgagcagctggatctggcgcgccgcatcaccgcgctggcggtggcggggcgggtgtccgggctggagcgggaggcggggcgcctgcgcgcggaggccgcggggaaggaccgcgagagcgccgagctccgggagcgggtggcgctgctcgacgccgcgcttcaggagaccaacgccaggctccgcgccgcgctcgaggacaatgtgggtcgtgcccggccggagttcaatctgtctgcatttgcgtccgtttgggtttctgaaactggcgcttgcgttttggtgcagattaagctcagcaaggagcgggactcgctggcgcagacgtccaagaagctggcacgcgacctgcacaaggtttctttctcggcctacccttctcttgtacatatcacatttgtaggtgtgtagtgttgtgttactgtgtagtgtagctaggattcgaattccacatatgttaggaaagtttttagccaggagatttaggtcttgttgggttatttaaattcccggtggatttgtgtgtattggaatggattgggatgaattttgacttactatggattaaaacgact

SEQ ID NO: 1054 - DNA, 767 bp, Zea mays
acttgtcatatcaatgtggaaaatacaggtattgggcattactttgtacgtccatttaaactaataggcatataattgcccatatctcaaactgaatgataccattataagtataagaaactaatttcattacctatgaacaatgttcttttcatggaggtaaatcaacccattaaggatctgtcttgtatatgcagagacatgagtatctcgcaggcgatacctctgatacagtaatgcaagggatccttgggtcagtaattcaaggaagatgtaaagttttgaatcttcctgcaatagcaacacagttggagggccatcaatctaatagcctaagcatgcatgatgcatagagggggtatgaagaaaacaatgaatttctgtgcatacgacatgcatattataccaacagcatgataaactgaagctacttactttgtctgttccatagtactgcactatattctcatgctcaaactggctcagaagtgcaatttcctggaaagattaaagagatcagatatgttcttttgaggaaagtgagcatagtttgctagcgaagacatcttaaggctaacagcacacaggccgagggatcaaatctcagaaaatcacagtggaagccaaaaacattggcgttatcttataggcagtctcatgcattgccatcatgccatgtaatcttgagacaaattgacagcccatacaatggcatctcttctaagttatatatagtaattccaaaatcccctaatttgtgcatggag

SEQ ID NO: 1055 - DNA, 730 bp, Zea mays
atgagctatcaaggtgttgttaggtttaccttacaacatatgttgattagctattagaggattgaaacgaaacatagcggttttgacattgtgaattagtaattgaggcaacaacaaatcacaacactgaatataaattagcaagaattaagtgaaatgaaaatgacttataggatacatattgtttgcattatctgcaactggtggcttgcttggagcatttgtaacattgggcagcattgacatgtcgttcagcatattagtgcttgcgtttctcttcttctgggcatgattttctctgttagcttcaatgcttttgggagtactacctgtttaagaatgctttgcttacatttaactaacttggtggtattgcaacaaagccaacgctaggcttcagatatgaaagcagtttttcagtcaccaattaagggcttgttcggttacgtctggatcaaaggggtttggaggggactaaatcccttcctagtcaaaattgaatagaaggggatttaatcctctcaatccccttcgatccagactgaaccgaatatggccttaggagggaattagaggggattaaattccttcctagtcaaatttaaacagaatgtttaatcccctttaatccctgggcaaaccgaacaagggccttagtggattacactaagggcatataacccgtcccattcattgtggtctgatactaacaatgcccattgccaaaaat

SEQ ID NO: 1056 - DNA, 824 bp, Zea mays
ttcacagcgatggcgtacaagttctccaacctggccatctgcaaggccgtcggcggcggcgggaggaagaaggtgcacatcgtggactacggcgaccactactacgggttccagtggccgtcgttgctgggctactggggtagcctggaggctgggccgcccgaggtgaggatcaccgccatcgacttccccgagcccgggttccgcccggatgctcggctccaggcgaccgggcggcggctcacatgcttcgctcgccggcatggcgtccccttgaggttccacggcatcgaggccaggtgggacgcggtttcggtggacgagctgagcatcgagcgcgacgaggtgctcgtcgtgaacggcctgttcagtctcggtaggatgcaggagcaggagcaggacgacgtggatagggatagccggccgagccctagggacactgtcctcggtaacgtccggaagatgcggcccgacgtgttcgtcctgtgcgtggagaacagctcgtacggcgcgcccttgttcgtgacgcggttccgggaggcgctcttctactactcggcgctgttcgacatgatggacgcggtggcggcgcgggacgacgacgaccgcgtgctgggggagcagcacctgtttgggcagcgcgccttgaacgccattgcgtgcgaaggctcggacagggtggagcggccggagacgtaccggcagtggcaggtgcggaacgaacgggccagggctgaagcagcttcccgtgggatcctgatgcggttcgggcccttataagggaaggggagggacaagtcccccagggacttgtttcatcgatt

SEQ ID NO: 1057 - DNA, 770 bp, Zea mays
atctagaaaggtgtctaagaagcaaaaaaggatggcagcgtctggtgaagagaggcgtccacacgcctcaggaagccacagtatcaggtacgacaagtgggcccaagtacatgaaacgaaagaaggattacatggatctgtacatttatgtaacacactaactatatctggtgtacatgtcgtgttatcagctgtgttatgtggatcctggaattgctagttcagaagaggtggagcgactgaagactattgatggcacactagtcaggttttaggttcctggtaagtacggaaactaaacctgacttcctttatctaattattgggtttcattccaccgtcttgttgataccttcatcagttactttgacctaacaagacatgcttgactcgtcgagatagatgctaagtgaagcttgctgtttttcaacaatatttgaaaatctgcgtggtggtattctggagggataggtcaaactgccttgaatagatcttgacatgcccacttgggcacttgtgctaaactgaaatgtacagccgcgttttgcgtttgtttacccaggttgtagtctggcgggatctttgatgggtgggttgggggccagtccgggcaaatttttggcccaaccagcttatggtgattagcacctggggtggggttacctgggaagagcctgaaagggtttttaaaaaggcccaaaaggatttgaaaagagagaaggcccaagaagggggccaggtacccagggggatttccccccccaaccaat

SEQ ID NO: 1058 - DNA, 801 bp, Zea mays
gttgatgctccttgcgactgaactggctattcgtattttggacttatttggacaggctatagggctgaaagctaatgtgcagaaaagcactgtgacccccatccaatgcactcaactggaagtctaagaagtgatggactgttttccttgtaaaattgaaaagtttcctatcaaatacttgggcttaccactctctattaaaaagctgtcaaagaatcaacttcagcccctcatagatcggctagctgacctcttgcctggctggcaggccgatctaatgacgagggctgggcgagccactacagtccagtttgtgctcacggcaacagttatctatcacgcaatggcgcttgacttgcctaaatgggctctcagagccattgataagattaggcgaggttttctttggagaggtcgtaaagaaaccaatggaggtcactgcttggttgcttggcgtaaagtcactaggccaaaggagctaggtggcctcggcatctctgatattcattgtctgaattgggctttgagggttaggtggctttggtttgctaagactgacccaagcaagccttgggctgatctgccctttaatcaaatgtgatggttcaagccctgtttaatcacgccatggattcagtcttgggtgatgatcaaactattttgttttggaaatacagatggcttctggggcaacgcatagctgacttagtgccctatatttttgcttgtgtccctaccatattgatgaatagaagaacagtggcggaagctatgggaagaatgagctgggtcagagaattg

SEQ ID NO: 1059 - DNA, 793 bp, Zea mays
aagatatgagcatcatcctgccagacataataaaacatcaaagtaggagaaaacaaaattagcattaaatataaccggacataaaaacaaacaactcacagaaaagaagacttgcctgctggaatcttctaacccgtgtcaaaccagtaagtgcaccactaagctcatttctatgaagcactccgaaatcagccatgcgaagaggcaactctgtagcaaaaagtaagccaaccatttgaatgtccctagtttgattttgataattgagtgacaacttaggtgtactaatatgtgtttatgttgagatacacaggtgattcgtccataagtacactagtgtgagtaacttgagccatggtggtgatgtagctagtttttttcatgtggctagatagatatgatcaagagacatagcttggctaacaagaaccgggttactattgtgaagggaaagttggaggctcgggtgcgatgtgtggtgaagcttgagcaacggcttagtgccgatggaccggctgcaaccgtaaagagcaagcggagttgcgaccaatgaaccaataagaccacgtgatgacatggagtgactgagtgaatcatatcatttacaaatgtgtttattacaagtgccttgatggaggttgatgcttcatcagtggaggagaagaaatgccgaaggcaaaggtataacctgtgggccatttcatttcaccagtcaaaagttgtgtagaaaagtgcatgaccaggtttagggataatggccgtgctattaaaaaggacaaatggggttgcatat

SEQ ID NO: 1060 - DNA, 763 bp, Zea mays
agtgcacgcagccaccagcgccgcggcgcgcggcgcgaggtttaattagtcatcggctgggagtgggacgacgacgacggcggcgcaaggccggccggcggcaagcagctaatatataatgaggtatatatattaccgagtgtactggacttgtaggcggccggcgtttcggagcatgtcggcctggccgggcttggccatggcaccgaacgccgtcccgctcaggtcaaagtggacgggctccacctggcacgtagcgtcggggcacaggtcggtgataaccactgtcaccgggctgccggagcacgactcgtgtccggtgcacttcacctacaagatgtgtgcaatccaacaattagtaatctttagctagctagtacttacagtggacttgcactgcatgcatacatgaacagatccatgaacgtatatataacaatactgacgtacctggtagcaggtgccgcagcccttgccgtcctggaagatggattggctgccggcggtgatcattgacgagaacggaggttggtcgacggcaccctggtacccacacgcaccacctacgtatatgcatggtgaacgcacatatatattatatcgaagtctatcatatcattcgcaatgagaataaatgcacacttgcatcatggccgcgcatgcgacgcatgcatgggaattgcacacgtacgtaccgtgggatccagcgcccttggcggagccagaccaggtggcgccggcgttcgaccaagccgcctgcatg

SEQ ID NO: 1061 - DNA, 784 bp, Zea mays
tctactggaagatcctttacaatctgaatatcagatttcagatatttgataaaataatcctcctgatatatatcgccaaactgactaagatatggaactcaatttatcatttatggagaatataataatcagtcattgaaatatgctatattgctatctgaaacattaaacgtaagacagacttgtatttttttagaaaaagtgtaccttttgtccagccacacattactgtacaagaattttgggaggacaagagttgcattgagcaaccgagagattgtaactgcattacaaatctgttaaacagaagggaaaaaagattgaaatcaatggcataaatgcaaaaaaaaatcacacaccaaaaaaatgaattacttccccaagcagatttgctaacattgccagcaatgttaaagatgtaagtagattactgaactactcaccgcaaccctttgttggtttatgccaccattcgcactgatcatgatgtagccattggttccctcttcaattacaaagaataaatgttaaagaaacaagacactgaatcaaaaatatgctggaaatatgaaaaataaaccaacaccactatcgaggtaaatgcacaacgatagcatcgagtaacataaatcatcaattacctgaggctttccaaatccctttggtcagaacaccgtcgccacaaagtagcatttatcggctcttcccacaaaatcttagttcaagcctggtctttgcctatgtaattagcattacacattctgtcattaccaatgacatattt

SEQ ID NO: 1062 - DNA, 749 bp, Zea mays
  unsure (1)..(749): unsure at all n locations
tcgcccggacagacctgcaattcaaacatattcacatggtggaggtaaaagcaaaactgaacaggacagagaaaaagataatactaacttattattatcctgtagacattttacaaatgtagtttgaagttgtggaaggaagggcttaagtgcaattccacctttcatgatgatgattgtcagggttgataggatagctgacttaacttgccatggaaaccgatcaccaaggatgcgaataagaggtctacatacacatgaatacacacaaaaaaatctagattagagctagaatgttcacatggcatagatcaaaaaaaccattcaacctaccatgtgaacaaattcgggtcaggcaatttgacagaatgtttagagtgctattttattctcagggaagcttcagtttctcaaaacgattagctctattgacgaagcacctggaccttttggcttcgagttgctcagatggtacagaagtcaacacagcaaaagttacaacttagcatcgataatgtcataataacgttcaatttgtagtgtatagattgaaggacgggcctggtgcagcggtaaagcctaccgtctgtaagccgaaggtgccgggttcgagccccagcctctgcatattatgcgggtaaggcttggcgcttaaagataccctgccccagaccccgcacagtgcgggaagcctacgacactggatacgcccttttttgagtgtatagattatgtnctgattatcccat

SEQ ID NO: 1063 - DNA, 794 bp, Zea mays
aggatcctttagagtcgtcctgcagttcacaaagatccagtaacacgagaatggacacttgagggaggtgcactagttcttgctgataggggcatttgcctcattgacgagtttgacaagatgaatgatcaagataggtatggtataccatttctatttggatgtcctgtgatatttaaatttctgtattactaaaagtgtaattttcttttggttgtttcagggtaagtattcatgaagctatggagcaacaaagtatcagtatatcaaaagcaggaatcgtcacatctcttcaagctagatgcagtgttattgctgcggcaaacccagtagggggaaggtaacttcagttccatgcatgccatgtagtaccagtgcatggtgttaagaaagatactgaatgcaatcgtccttgatctcacaggtatgattcatcaaagacattcactcagaatgtcgaattgacggatcccattatttcacgttttgacgtcctctgtgtggttaaggataggagctgttatacatgtctgatatattcgatccatgatcagttttcaatcactactgatctttaatttttaaaaatgcaggatattgtcgatccatttacagatgaaatgctcgcaaggtttgttgtagatagtcacgccagtttccagtcgaagggggctaaccttgaagacagggtttcaactgatgtggaatgagattcaaatgcctgcttggaaggcaagctggccccagatgtatgtattcttgattccctaattcaaaccgaaagggactttttt

SEQ ID NO: 1064 - DNA, 497 bp, Zea mays
ctctagctctgtagctcttggtcaaggcgaattgagaagggtgctccatttccaacaacttgtaaacgatttaagagtgcaatattctcttgtatgagggacccaacttcaagatgacaagaacgaatttcacatctcaacttttgctccacccctgtcagtctaatcagttccattcgcaatttcctcattttatcactgtcacactcaacaaatttcttgtctaattgagctttgcatccctgtcttagacttgtgattgctctttcctgttcattacatgttgtttgtagtctggcaatcactttgtgcaatgctttgttctctccctccttgtccttcaagtattccctggtgtggtccctttcctctacaacctcagcaaaacgagcatccttatctactgaggaattatggagcttctcatgctcgtttctaagtttctctagatcatcatttaatttgttgttttgcaattccaaactagcaactttggt

SEQ ID NO: 1065 - DNA, 793 bp, Zea mays
ttggcgcttgcaggccctcctccgccgccgctgcggcgccttcttcgtcgaggagcaggagcaggagggccacgcggtctctgtccccgttcaggggcggcagtggcctggacgccgccgccgctgacgacgtcgacgacgagtcccctcctccgtctccccgagcctcctccatgatacgtggctgcggcagcggcagcggcagcaggaagtggcggctcaaggacctgttcctcttccgcagcgcgtccgagggccgcgccaccggcaaggacccgctcctcaagtacaccgcgctgtcgtcggcgtcgttctggcacccccacggccagccccagaggctaagcagcgcgtccatgtccatgcgcaagggaagagggtcggctgcgtcggccggcgacacgccgtacgccacgatcaaccgggcggccgccgccgaggacgtgcggcgccggacgaccaccgccaccaccacgccgctgccgttccaccgcaacagcctgttcggctacctgcgctccaacccggcgatccacagcatcagcaggaagctggggggcagcggccactccggctcgtcctcgtcctccagccgcggaggcaggcaggcagcaggccgacatgacgatccgtacgcacgcacggcacgacgcacaggaccgcaccaggaatctcgacggcgatgatgcagaaatggccgccggagggagggaaagcgcgttgtacatgtacttgtcccctttcctctttctcttcgctagtacgtacatttttgcagcgtacgtattctttc

SEQ ID NO: 1066 - DNA, 733 bp, Zea mays
atctgactgtgctttagcatctaaggacaacatctaggacatacctttagcatctgtagttcagcccatcgggctataaattgtaaccccaactcttagaagtgtacgacattgagtagtgtttgagaaaataaacaaaaaattgtcctaactcatagtgtcatcctctctatgagagcaagagtcccgttgtttacaattggtatcggagccaaactattctgcagtctaaacatctcttgctcatctccttcccgcgcctctccccatactcagtcggcagcaagaaacttgttagactttagaatgagatatgataaacgtgcagcttttctcctctctttagatcttctctcttagccccctggcttttggtctgtggtcccttcccgctgtgtctaccttagccttctggttggtttggttgttgtaaatactctcttttgtacaggtttctgttttttatttcattaaattctacaggggggctttcccctgctgtattttccgttaaaaaaaatgaattggcataatttgggaactgaagaacttaatattgcaaattacccaaaataccttctaccattacctttctgttatttttaatcaaagccaggttattaaatttccactttttccgattttggaaaacacaactttggtggaattttttaagattctcccttatgtcacttttaatgggtacaggccttttttcgggggattaatagcc

SEQ ID NO: 1067 - DNA, 717 bp, Zea mays
actcagctgtccctttgagatacatttctattattttctctagactagaacctgcttgtgtatgaaaaaaaaaactcggtacttctgtgttggttgacataaatttcttctgaaactctgttctcaaatgctctgaacctgataaaaatcccttgtttgtgctaccttgtgatttgttagccttgaaaatatctgtcaatactctgttgtcttcatctgtgctggtacctccaaatcttgttcccagcagcaaaaacaaattatatataaaaaagcacgtttaggcactctagacgctaggccaccagtggcctagtgcctatcggatttttgaacatgacaatactccacagatatgaaatcaactgaaatgactataaaaatttacttttccctgtgcacgcatccccaacaaggaaatgatgtcttctaaaattaaattgtttttttcagcttacatgtgatgaaacttccaaagaggcaataacaatgacgaccttatactggcagtagtgttacttcacagcgttccacagataaactagagctatatctcatgcttcgaaacctataattcaccctaccaaacgtggtactatgtcatgaccttagtccttagagatcaaatccctccatcaaattcacggataggacacccaacctacatttatgatcaaatctatagatacttagatagctcacccaacctatatttta

SEQ ID NO: 1068 - DNA, 785 bp, Zea mays
atttttactgttccgttggaacgtaagattttttatgaattacacagaaatcggtttatttttataggaaaagtaaaaaaaaacatgagaaatccaacgcattacaaagtgggccttattgtttttagacgtactcaaacgagccacaaataaaaagacccgtaatcaatagcacgcctttctcgaagccaacgagcgaaaaaaggtcagcgcgtgaggctgcccgcagtggtaggggtgggcattttaaaaccgaaaaccgaatccgaacccgaaccgaacccgaacagaccgaattattggtctattcgggttttcgggttcgggttcgattcctatatgtgctatatttcgggttatgggttcgggttcggttcctaacctataaaacccgaatagacttaataacctgaaatataaaaaagctcttaatatgtgatggtattattatatgatttatgaacttattagctagaaataatgatatcatctaaacgatagtatacatatctttgtatactaatttttatagtcacttgttgtagtaatagtactttcaattaattattcattgtctatattttaacaaaatatactagtctctctataattcgggtctattcggtggaccgaatagaccgaaccgaaattgtgagtctattaggggtccggtttctaaaatatttttggaaaatttcgggttcttattttttcagaaaccccgaaatttttaacaaaaccccgaaattgtcaccgaaacccgaatttacctcctaaatagaaac

SEQ ID NO: 1069 - DNA, 734 bp, Zea mays
ctgcattcttctaaggccatcagtgaggaattttcgttccttggtggcagatgggttcctccagctctaaagtggacaatgaggagcccgtgaggcgctccaaggacaggaggcggctcatgaagcagctggtgcgccgccgcccagagcttgcagctgcgcacattgcatacctgcacgccctccgcaacacaggagccactctccggcaatttgtggagctggagtctgctttgtcacagcagcctccggtaggccttgcggcgccgccctcgcctactccacagtcgctgccgcagccgcagccgcagccgcagcccccgccacctcctgaaccctcactgccaccctcgccacaccccccgccgcctctgccttttagtccagtaaccaccataagaaagatggagaagagggatggtgaattcccaccaccaccaccacctctggttttgagtccaataagattaagaaaaagggatgatgagatccatgtgggtgattttaccgatgatgacgatgacactgacagctggttaactcctttaccaccacccctgccacccggtatagattgggaggacttggatccttacaacgtttggccctttggttttccaacttcatttgctgacaggaaccgagaagaagtgggcctccaggttgccctggacaatggtcctggggacacacagaattgattggaaaggaggataaagtgtgcttggcattgt

SEQ ID NO: 1070 - DNA, 752 bp, Zea mays
gacgtatacgcaattgaacgagagacaattacagtcggctcctacttgtatgcttgattgagaccgacctggtgtagttttgtgtgccagactgtcaggagagaagtagtgtcgtcgaattccccacattttcctttgaacttaagtttttttttggttcaaacaaatcgagcaaatactgttgcacgtgcgatgtgatatgagtgcaatgcaatggtttgctgcatccttaatagcaagaaaaactacaggttagctggttaggtggtgttagaactaaatggtgttagaactaaatactgttgcaatcgatcacctcaacaaagataccaaatgtacaccacccgtggcctagctcaactatatatcttcaaggaaatggactacagcggggagaggtatcgctgtggacccattcaatttggctgcacacgtaccaacgcacccagattaaaagtgcgaatttaagtgcaatatttgagacatatccgtagaatgccatatccacagaaaataataatcagcaacaacaacaagaagaagaatagacttaccatgcaagttttccccaccatatcactcttgagaattttttgcgatatccaaaaatttcttgagagaataaaccagctcaatttttgtcgagagaaaaagagttggcaaccggggccaaaaatgtgatcgcgttaaactgcgggcgccctttttgcttgatcgatcgaacgatcgaaggggcttgattaggtaatagt

SEQ ID NO: 1071 - DNA, 749 bp, Zea mays
acggaggaggccgcggcggcggcgcggaagcgggtggtggtggtggtggaccagagctccggcgctaagcacgccatgatgtgggcgctcacccacgtcgccaacaggggcgacttcctcaccctgctccacgtcctgccgccgcacagcgggagcggcggcggcggccgcggtgctggggaggaggacgcctccgcgctcgccaactccctcggcgcgctttgcaaggcctgcaagcctgaggtgcgtgtgcgtgtactcgctccttcactcatgcgcagcttgtttcttctccaacgtgttccagaacaccacagcacgcctctatccacagtaacgcatttttttttgtttccgaacctgaactgaagagacagatgttcgacatacaaacggagatattgctttgcggttcgttttaagacctttttttaagcatgccgtgaggtgttggatacagacaatgtgcatatattacggcctttaatctgcgctaacagtaacgaggcacggtttggtttgcgggacattttgtcccgtttccagtgcttcctttgtaaaaaaaaataaaaaattaaactgattcctataaaatctctatacaaaattctataaaatccctgcgttcaaagggacatgaacgaatgaacctttaagctaagctcacaggtccagggggggctgaatcctgacggagattaaaaaaaacgctccctttacccgagtcgttaggtccaacccaaaaaagc

SEQ ID NO: 1072 - DNA, 451 bp, Zea mays
cagaccagaacgcagctgctgtgctgtatggtgtagacaatgagacaagtgcaacgataaagaccgagtcttgctattcgagcaatgctgattttgctttctgtgggaatactttcctggaatcgtgccagtcaataggcgatgcatctggtggtggatccttcagtagctcagagctgaacgggcaaccactaaacgattcaattctggatatggaatcatcgtcatttagcttcttgaaccaaatgccccaaagcttcatctttccggacttggcagacgatttcaaccaaagtgcaggtaccttccagtgatatttgttgaattctttattccttattttgagtgtcttcttttttgtctcccctctactgtataagttatttgtcttgtcttggattcttttttacagagataacaccatttctcaccccagaaacaaatttctccg

SEQ ID NO: 1073 - DNA, 809 bp, Zea mays
ttcaaagaactaaaaaaatctcaccatgtgctatcctacatctggctaaggttttcctgtaacctaaaccgatttaactttgtagaagaacatcacatcaagtgacctctatctccatgatgcgatcgtctctttgaagaaaaaaacatataggctggaattggctaccttggccagccagttatccaagtccctctgcaaaagagaacaaagacaacaaaactgtcacggagttgtatcttctggaaaatcgaacagtcacacgtgattaacttctcatgcattcaaagcagattatcactccatttctgaacaataacagtcgcttatggaaatttgaatcgtctctgtttgctagaggtgagacaggagatttcagcaggggtaagcttgcataatgagtagtttcatcagaaagatcagcattcctacactactacataccaaacgatatgagcaaccaattcgatgcccattctagaaattaagaatgtctagccaaatcgagtgatcatgtgttagctgatattctcatagtgaagtggaaatttctagccgcgctgcctcacaattccaacatgaaccaaccattatcgaacgtgaatcccgcaataatcatttcgtgacctggtccctgctagcgcaagcacgcgtttacccagagcaaaaaccataccttaccaactagaagtcgccggtggcggttgtgggcggtcgcgcggccccttcgaaaaccacggaagccgtggacggggaacttaaccaaggagccgcatgccccttgatcttgaaaccccccatgccctccg

SEQ ID NO: 1074 - DNA, 492 bp, Zea mays
cgcgcctataaggctatatccagcaccatccttatttttatattcaaacttcactctacagtataaaaactgcaaaacaatattttagatgatcatataggtaaactaatggagacgtctaatgcataggccaatacaagtgtgacatacatgtacaatcgtgaaactttacaccatagggttcaataataaagagaaaataagggcatctcggtgcaacgcagcgggcagtaggcgtacaggaatgtggcagggcactggaacaaggccaatgaccgacctacggatcgcacaacttgcatgaagctgttagttgttgtagacacagaacggtcagcatgggtgtgttgcaataaggaatgggcgtcagaaagtataacggtgctagcaaaagcaagttttaggtaatcttacctactatccatgtctgattatacgctcattggtccatcaactccagccagccagtccacgagggagctttagagaaag

SEQ ID NO: 1075 - DNA, 497 bp, Zea mays
gccccatcctcataaagtttagatttttcatccagattaacctccaagtaagatatcagtttgactaaacggcgtccaaatggggtcaaactcttcagatactcctgatcctcatcggtgccattatgtaaaatattatgatctacagctccagcaccactgtcatccaaaagtatgtcaagtgtgtcacagtaaacgaccaacaatctgagatagttcatcacatagcgtgtcattgggtggatctcaccagccatcatgggtcgccgcgatgactcctgctgtaggaccttcccaaactcaagaagggtacccttgaccgcgtcaccaagcctttcaagaaccccctccagatcatggatgacatcacccccataactcccaaagaacagctcctttagttcagggatcacctcagcaagcgcctcatacatgtcaaggatccgggaaagcttctcgggcgagcgagtgcacacagagacagcatccccaaagtt

SEQ ID NO: 1076 - DNA, 800 bp, Zea mays
agtgcagcccaatgactgttcaaagtgtttattaatgtacattgcaaccttattgatagaaaatctactctgtgcaatggaaatttagaaattctgacatcactggtacgaggaaagactcaaccaatgttcgaacatggttgggactgaatatcttcaatgacactttggactgttgttcctgtttttgcaacatgtgactcaaggaataactcatgatgtggtggattaggtcatatacatggtaatattggtgaaaataatcggtacgaataagatgaaatcaatggcctgtttaggttagctgtaatgattttagcaatggccatcaaacatgtcacatgtttttgctccatcagaggacatagcagtgtatcagaaattcgaaatacagagttgctaatctagtaatcttactccacatgcaggatggaaacctcccatatagtccttatgtttatttgttctaggtgctcaatatgtatcatgttattcaattggttgttcaatattgacactacatttgggttctgctttagggtcaatatattctactctccattatttttacttcccgtctttgacatctatcccagaaaactttgtagagaattaacaacatatggttctctcattgtatcctttagcttcaacttgttaaaaaacttgtagctattaccttctcattatattgctttattagcatggaaattattttgtgtacgaaatatatactaagtatttctcttactgaaatgtttacgctgaatgtggccggatattttctctggttttgacag

SEQ ID NO: 1077 - DNA, 782 bp, Zea mays
tttccatagtcctgataggtttcctttagcctcctttttcacccctataaatgtgctgctgccaactctcataaaacatagtacaattcctccaaacctccttcacttacagcgagcaagacgccttagcgttggaccgctgcctagacacctaggcggcgccattaaaacagtgggttaaagtagtcaagagtaatgctaaagtccacaaccatggtggatggaaagaagtgaaagtaagatgatggaatcaatcagaatagtattcatattcattcaggatataatcatgccagttgctcgagaaattcagcatacaatatgcaaaaaaatgtggaagaaggttaagtccattcaactcagactactggtattgacaagtaacagtccaaagcaaaagaaaataagaggtataccaattaggaataagataatcaacaaaagtgtgcgactaacaatgcttgacatagaaaaaaaaaacaggtgagatttatgtatcagtacaactaaataacatgcagttcaagcttaagtcccacctggccatgtccaaagaaattgtcaaccagacaatttgtagcaagtataaactgcaaacacaactacacattaacagccaggttaaaaattagcatgctcagtcagtagttctaaacctaatattcagtaaacaggcggaaattagaaaatatgggtacccagttccaagaccaaccaattggcaggttacaaagaaagtgaaaccctaaaacctggaatcttttaaattcctaggtaaaaaa

SEQ ID NO: 1078 - DNA, 675 bp, Zea mays
tgtctccctgcagcactagagatgttgttgccctgttgtcctctagatgctaaaagaggacagtcaaaaggctcttgctgtcctctagatgctaaaggagatgttgttgtccctgttgtcctctagatgttaaaggagaagatgttgctgctgtcctcgcagtcaaaaaggagccgcactccgcctccacaagcgttctggacacgcctgatggtgttcgcagcctctcccttgctaccaaggaccatcacccacatgtagcgggagaggtcgtcgacaagcagcaagtagtgtcgtcctcctggtgtgcctggtgtcaccaggccacacaagtccccatgcacgagctcgagcctctccttggctcggaagctcgactgccggggaaaggggagtcgtctctgctttgtcaacacacaagacatcgcagaactgctccacatggtcaaggcaaggcaggcctcgtaccatcttggcactgagccgcttcagggcctcgaagttaaggtgcccaaagcgcttgtgccactgccatgcctcgtcgtctcgagcagcaaggtggtgccaccttcatgttgaggatgtaaagcccatttggactcctacgtatggcaagaagacaacgattggggtcctagatcctcatgactccatgctcgaccttcacgcctgaac

SEQ ID NO: 1079 - DNA, 731 bp, Zea mays
tggacatgcacttatgatgctttttttttcatttcagatccatgcagctggcttttcaaatcccactccaattcaagctcagacatggcctgttgcactgcaaaaccgggacatagtagctattgccaagacagggtctggaaagacactagggtacctaattcctgcttttatacatctaaggagatgccacaataatccgatgttgggtccaacagtattggttttggcccctactcgtgagcttgcttcacaaatacaagaggaagtagttaagtttggtcaatcatcaagagtttcctgcacagtaagttctaacctgatatattttattatggccttatctttccttgcatagaataataaatcattgatctgaaccaattgtaatcctgagactatgtccacattttttaagttttgtaagacaatgcatagcttgtggtggtgcacttccatttttaggtgcgtgtccgtagggataaacaagtcaagattgcaagaacaaagtggtgaaaactgaaagagtggacattagaagtcttcaaggaaagggtcatcaaagaggacacttggaaggaagaagatgacacaaacgtgtgggagaagatgaaaacctgctttcggaaggtgggtctctgtgaagcaactaaagggagtggaggcaaagctaaggatacttggtagtgggacgagaaagtataaagggctattaaaggagaaaaaagaat

SEQ ID NO: 1080 - DNA, 799 bp, Zea mays
acacatgaataatcaaacactgctgcatgctattatttgtaaacatagtttatacgcaacagatcagggaaaatggtacctttctccaggtatcgggcactcagggactggagctccttttccaatatttattgtaatatcacttggtagaatgcggcgcttaagtttccccatctaaaacaatgtagcaaaaatcctaaaaggagggcattcacttgaaactaaaaatcatgtttattttacatgatattaaatttgcacctttggatgttctccacgtcccctgaacaagccaggcggttctactctgaaatttccgacctggaacaaataaagaattaaatcaagttgaaatgtaggcaaaaacgatattgaaatagtagagcacggaaatagaagcttatatgctagtacaacaatgaggccatgtgaacagttatttgttactgatgaaacgtttatcctacatcatcacaacagtcttcgcacctggtgcaagaatcttaacatggccaaacaataattcctggtttgtaaaagcaagttcgatctagtacaacagcagaaaaggaaccaagagaactatctataaatcaaggcacacattatcaaactcacatattatcaatctgtcagcatataaaatttaccttttctttaacaccatctacaacagcccacatgtacttctcctcttgtttcaatttgtcttcccgcaatgttttttttcctgtaaataacagcatttaatcacaatgagaggacttctgcaatataactctgacatgagctttgtttc

SEQ ID NO: 1081 - DNA, 742 bp, Zea mays
  unsure (1)..(742): unsure at all n locations
acaggaccatctgctgctgtgaacaagagaggacctgacctgcatggggaggaaaagataaaaggctggattacggaatcagattgagatccaaaacagacgagtgcacaaaaaactaggttggtaggagaaaaatcaaagtataatattatattaagaaaaaactcaattaaagccccacctaaaaaaggacatagaaatagaagctagcctccatatataggtgtacaataggtcgtgccaagctaaccgtgggctcacttccaggcccggcacgcctaacctatcgggttggcacgtttggcccatagcccgtcacaattaccattagacgggccatgctgtcctgtttagcacgacgacctagctgcccgctaggcctatcgagctgttcacagcccgcttcacagatcacagtgcaagactacaactctgtaaatgcaaatgtgcaatatacaaagttacaaaccgagacactaacacaaatggcagataagtaaatgagtagcgagtactgaatataaattcacttagctgttgacctattgttcacggttcaccacttcaacctatacacagcactaagtctacagcagagagcagattagcagacacagacacagagacaatcacatagattaactgttttcattacagtaacactgaataacagaataagtacaggccncacaccaaatggtttgatctaccaataggcttaacacagttggttttattacag

SEQ ID NO: 1082 - DNA, 754 bp, Zea mays
acatggagcagctgttcttggtgtgcctgtgaaagctacaataaaggaggtaagtgttcatgcagtcttgaatcttgatgatgtgttgctatgatttttcaaatagaattacccaatcaatcgtaggcttactttttgctaagctaccatgatccatgtaatagcattctggatggattgtaacattccttaccacttatatccccttcaggccaatactaattcttttgtagtgaaaactcttgaccggaaaactctctgggaaatgcaaactccacaggtaataatacttttacttctttctatattttttgttttctcccctgctcccacagacccccccccccccccattttgcttttgagggaccacaacactataatagtgtcttttctgattgtaggctatgaagcccaatttactcagagatggttttgagctcgttaaacggttagttttggtcttacctctgggcaaatcaaattgatggtattgttatacactgcttatactgcttagttctctatttgatttaattatgctatcgcagggatggccttgaagtcactgatgatgtatccattgtagaatatctaaaacaccctgtgtatatcacggaaggctcttatacaaacattaaggtattctagaataatatttgttatttgaactattatgttccgaactgcttagtttggagagagcccgggaaagggaatttaatgcaggtgactacccctggtgacctgttact

SEQ ID NO: 1083 - DNA, 709 bp, Zea mays
ctgcctgcagcagcaagagaggcaccacttgggccagcagttgcaagttcttgatggtggcttctttgttttaggagcatcataaccatatagtgcctgccgtctgaaaacacatccagtacccacatagatgggcccttgaataccatccaaacctttcatgttgatctgtatcatgcaagtgttagaaaacatatgtgacatggacaataaaacgaagagcttaaggtgtttgttggaacagggaagctgaatcttacatcaaaaaagacgacgttcctgttagcatatcgatcatgacggtcaataccatcgaacctctgagggaactgtacatagcacactttcttccccaccaaaggatccatcatgaaacacatagcctcttttatggccttgctattgttgatgtagtgatcgcagtccaagttcaataggtatggagcatttgataagacagcagagacacggacctaccaattatgaacacaaaagaacaacaaagcatcaatcacacactgttattaggttacaagaagaatgataaaagacatcaagtgcagagattttaccagtgcattcatggcaccagccttcttgtgatggttataacctggcctcttttctctcgagacataaacaaggcgaggcaactcatttcccttccacatcgggaccaccactttggccaaggaatacctgttgacac

SEQ ID NO: 1084 - DNA, 618 bp, Zea mays
tttgtttgtagctttgttattacttgctacgttgctagatgtcccacaactatatgagttggagagaatctagaattcgaactcaactgtttagtcaattctgaatttgcagactagataatacatcaccgatatggaatcttttgtatggtgtatttgttgcttcatttcatcttaatgtttttcatcatggttgttgcatgtatatgcatagaaaaaaatggtgtagataattttgcattgcattttaaggtcatatctttatcttctaagtcatctgcaatgtagtatttggtaacaaaaactttgctctttctttccatacagtattaccactatgcggttctaaaatgttctgtaaatttcttgtgcagaatggatgaagctcggcagccattgtccagaaaagttccaatatcatcaagccgaataaatccctacaggatgattatcgttatccggttggtggtggtgggttttttttttcattaccgagtgatgcattcagcgaaagatgcctttgcggtatgggttcatattctgtaatccggggaaaatttgggtttgcccaggtccccggggattctttgattccagtttccccacaaggtgggcctt

SEQ ID NO: 1085 - DNA, 786 bp, Zea mays
aaagactcaaagtatcttcacatatctctaaggcagtgtgtgtttctgccttgctttagcttgaatgcaatttatcttgttcaaatttcttatcatctgccttctatatatctctttgcatggatattcaatcatttctttcttttgaaaacagtgggcctcctggagatctctttgtttgcctcgatatagaggagccatcagatatcaagagggatggtataaacttgtattcaactgtgtcaataagctatcttgaagctattttgggcaccattaagaaggtaagatatttcattatcagttgtgatctttaattagtttcagtcggcgatcactatcttgttcagtaaacagctagcttttcctcatacagcagaaaaatatctggtactcatccacttcacttgataactggagaacagaaacatgcaaaacttggtgtccttataagaaaaatagcctggttactttattccaatgttgatgcaatcagcaaccttcaatttgatgtgtatgcaaagcccttttcgctgtgctttaacacaatatttgttgaagcaatgtgtttgtggtttaacgcaatgttgattgctctttcagtgatataaagtctgcccaaattgattttcttaaacttatacaagtttagtgccttttcaactaacatatatggttgagagaggactaattatcgctagatttatttaaaaatgaaaatatggccttaaatggttcttctgatataaattatttgggccctgtaacccgtccttcaattcttta

SEQ ID NO: 1086 - DNA, 721 bp, Zea mays
gctagtaactggagctcatccagaaataaatcaaatgtgtctccattgaatgtggcgttagaaaaggagatgtccaaggaattggaatcaaagaagaagtcaccaagtgtggttgccagattgatgggacttgaagaagatctacctggtcaagagccagcattaccttccactaaaagaaatttgaagaaaagacacctaaatggcaacttggtcaaaacaaacaatctccatcgacatcaagagcagtaccattccagtatgacaacatgcgacaaacacataggacccaaagaaacagttgaatttaaggatgtttatgaagtcagtgaagaaccattgagaacataccattttcaggaccaaacttttcctagggaaatgtcttccaggagcaagagagacataaggatggaaattgttcgtcagaagttcatggaagcaaagcgtcttgctacagatgagaaactcctgcattcaaaggagtttcaagaagctcttgaggttctaagttctaacagagatttgttccttaagtttcttgaggaaccaaactctactttctcaaagcagctagctggacttcacagaagcccatcaccacctcatacaaagcgtattactgtgttgaaacccaactaaatttgttgagagcgattgcagaggggaaatcataacacacaggaattaaaggaagggaaatgaaacacgttgtatgccg

SEQ ID NO: 1087 - DNA, 611 bp, Zea mays
aggctccggagaaggtgacgtgggtgagggccttctacgacgacttgggcgccttcaccagggaccaggagctgctggtgtcgattccggattcggtggactacgtggaagggttcatggtcctgaacgagcggtccctccacagctcctccatcgccttccccgcgagcgtggacttcagcccggatttcggcaccaggagcagccctaggatctactactgcgtcgagttcgcggtgcaccaccaccacggttaccagaagcagtctcaggcggccgtggaggccatctcgaggcggatgagccacatggcgtcccagctgtacagcgtggaggtgtcctacttggacttcctgaaccgggtcaggatggaggaggtgagcctgcggagcgccgggatgtgggaggaggtgcaccacccgtggctcaacatgttcgtgcccaagcccggggtcgctggctttagggatctgctcatggacaacgtctcgccggatagctttcagggcctcattctcatctacccactcctcagagacaagtaagtaccactcttctaataataataattatgatgacacaaaagctatgtagtagtacatccatgaaat

SEQ ID NO: 1088 - DNA, 766 bp, Zea mays
agcgtattctgactctctctctcgagagagagacttttggtttagtggtttttcctgaggcaagtcagaggtctctgttgggcctgtagattatatatacactagtccagtgcggtgaacgtggaactttgggtgacgacttcatcttttgttaaagctcaatcagttcagagttgacactgggatgcgatctagcacatacacatatttaaaccccttttgcatccatgtaaacttgtctaaatttattcggagggtatgaacacataacaagacgcttgtaactgaataacttgtgctatcgattacaagtttacgacgttgtttgcacttgttaaaaaaatcttttaagcctagtttggcaacctcattttttttctaggaatttccattttcttaagagtaattagttcaaatttttttttgagaaaattgtgttcctaaactagcccttaggtgaaaaaagaagaaaaacgaagactaattccaaagcagatcagctagctactactatgttttataatttccctgtcgccactctcaaggttgatgctactgactgattgagctcatctacagttttagctgattcatacaatgctgatgatgacgcagatgtgatgctatccgagggaccactagtacaaacacacgatagaacaacccatatttcgccttttataccgaccggcgttgggttcccaacgaagccggcttttgctgggacattaggggaaaaaaaacaaaacccaaacatggcttaatt

SEQ ID NO: 1089 - DNA, 523 bp, Zea mays
gctcgcctgcagtgtgcacaaatagcctatatatgcaaaaagcctgtccatccatggcctgattaattgcttgcaatctagctactagctagtttattgtagaagagtttttttttaattaaataaaaaaacagtgtcgagcaagtcgatgcaaagtgcagttgagctttcttctcgtttgaaataatcggcacaaaaataatcagaatgaattcatcaattctcgtatatagtagctagactcaaacaagtttaatttgtaagcgaagagagattagggaaggggcaatacaaagaattgatgagctagggccgggagtgttgacatcccaggttgatgatggaccaataacgacctattagacggaatccaatccattacaatatatggagagctaaccggacagagacttgtatggttagcctggtgactatcaccaggcccacgaaaagtagcaagcaacaaatagctaatgggatgtctaatgcctatctctttcaggaaaaaacacacatgcatgca

SEQ ID NO: 1090 - DNA, 493 bp, Zea mays
gcagaagctggggctggttttcttgcataatagaactgttcaataacacgaacacagatataacggctactattgagacatatgctcgtttgcacttagtctcgtataaatttagtagtccatcatgtatcacgaaagatctcaaataatcaacatcataaccaagatcatacataattaaacgtcaacatacatccaacacaatttattttataagttcagattcacatgtacagctagtatattacatttattttataagttcaggttcataagtagctagtatattacatgttccaaatccgatagataaacaacatatttaaaaagtcttacaacaagataagtccaaatatagctagtttgataaccatctcagttcaccaaaagcataagagggatttaactgagtccaccagcctctactcaatcattattcactacgggactgaagaagtgatgcactagccatggtagatagtatcacctgcaa

SEQ ID NO: 1091 - DNA, 768 bp, Zea mays
tgctcgacgtcagcgccaacctgctgaacggcactctgccgtcggacttcggcggtgccgcgcttcgctacgtcaacctctcgtccaaccgcatcgccggcgccataccgccggagatggcgtcgcatctgccggccaatgtcaccatcgacgtgtcctacaacaacctcactggcgccatcccggcgttgccgccgttctcagcgcagaagcccacggcgttagtgggcaacgccgagctgtgcggaaggccgctggacagcctatgcggcttcacgtcctcctctgccgtggaacccccgaacggtaccgcaaagtcgccgccggccatcgcggcgatacccagggacccgacggaggcgatccctggcgatggtaccggcagtgtcactggagcgtcggcatccggagggcagcgcggcaggatgcggcttgccactatcgtcgccatcgccgccggcgatgtggctggtatcgccatcctattcgtggtgggccctgtacgtgtaccaagtgaggaggaggaggcaatgtcaggagggggctaatccaaagtttgggccttgtgttctaataagtcctctaagccgtacagagatttttgttatctcatatagtgctggtagtccatttccttgtgctggatttttctcataagtaaggcctaattcttacttgcaacgattgttgtttgtctattctattatattcgacctgcaactattttattatttgttttaccttaagttgaggctgcctcatattcat

SEQ ID NO: 1092 - DNA, 477 bp, Zea mays
cacttgcagaccggaaaggcaagcattgtcatcatgcaccgtcgagggcgaatgtgtttgttaacgattctgtaggatttgtccgtaattgtacaatatacaggtcaagcgaactagtcaaatggttggtgcccgtcctaggaaactaaaaatggttcccaatgcaccgaggtgtgtcagtgtgttcgctaaattgtatcgtcgctagtaatggaggttggagggctcaactcagacggtatcttcaacagcttattcatacatatattcaaattacactccgtgcaatttataatacaaaacaataaaaaaacaatgttttcagtgaccatataagtgcaatatacaatagttcatccatatgatcaccaaaacaccgttttgcaccattaattgtactgtttgtagaatatagtttaaatatgggtacgactatgtgtaagttgctagagaggttcaacgagagaatgcataatg

SEQ ID NO: 1093 - DNA, 605 bp, Zea mays
ttcttatccggatctcgaagtggcaataccttcaaatttccagcaaaacactggtgtgaaggcaatcaatcagaatccggaagaatcttcaggggtaagaaaccacaattgcgatatgacaatgatttatgtatgatgtgtgctttagcttctcatcactgttccaatgtttttcaactggtatttccctagttttatgcttccttttgattagcttcctgtggataattggttcatctccttgaattggttttagttggtgctcattccgttgaattgtactaagtagtaagtacaactccatttatctttctgaggaaacattcttactgctattcatagttagtatcattagtccttccattgtgaaccttttttgtgtgcacatgcatgtgttgtcatttatatagtttcgtatttgcacatgtctgacattgcagtgaaatagcacgaatgcattagttaatttgtttttttggactcttaagtatttaggcagtatcattaattactaaagtaagaaaatactcgcacattctttttcttactggtgtaatgttttctggaaatactttttatcattctcacactgttagttttaattt

SEQ ID NO: 1094 - DNA, 608 bp, Zea mays
cactttttttttggcttccctatatgcctattgctttggccttaagatgcgcattctacgtgaccgtatcacagtactcacgtttacaacagattcgaggatgtcatccatggtgagggtattatagtcacttctctacttgtttttagtgcatcgtgatgcatggaccaagtcacttttttctcgtagatttctctcttgctaaacactacacaacatgccaaggcatttcatcttacaacatgattttatgtttgctttctctcatgctacaattttagtgatggatttttactgtattgctatcggtattgttatgtctttttgtgttctgctgttccccggtgcccgcggtggctgcttgtatcaaaatgctctggttgagtcttttcaaataaaaatagattgattttgagtgtcttttgactctagctcggctcatcaagctctatttgaagttgggtctcaaataacttaagagaccatgataaatagtagtatatcatttttaataaaaaaaaacatgacaaaagtaagaccttgttcggttattcctataaattggatgagattaaaaaagttagtagatatgttgacttgctatggat

SEQ ID NO: 1095 - DNA, 763 bp, Zea mays
agtacctaaggtgacaggctgctactctagattcttcatgccttttgtttaagctcccttgtgcctcacaagtggacacgaaggcaacgcaactgtgacatgcatgttagtattacaggcagctagctacagtctttttcccttagtatataattaattaaactatgcagattgcgccgcgtcagcttggttaggtcaggtttcgccaggcctctctacccataccgctgctctgaattatttgaccgacggccggccggccggctggtcctgggcccaaagaccagcttgtttgcctcgtactacaaagcctttccgacgtcaggactaaggaggactcaggaagagaagggcaggcagacagatctaatctaagcgtccatctttcgttcgatacgtacgtgctgctgctgctgcggggaatctcgcccctgccctgtctgcaacctgcctgtaaccacgaccgtcagcttggccagccacagccagtatccttatttactatagattagggcaaaactgagcccacttggacactgaaacttttgcccagccttttccttcccgagggaacaaaaaggtggagaaccgcccactgccactcatgatggatggtagccagaaccagaccagggatcggacatggaaatccccagatgtcggcatcggcatcggcatcgcgccggttcttttatttgttgcttggggggttttaccctggtgttttggttcgcttggttggacaaggctggcaatgccactc

SEQ ID NO: 1096 - DNA, 509 bp, Zea mays
tgcagaccacacagcgcagtgaacggaggatcatccgggggcgagaataagcaagcatctggggccccgcgtagctgctgaaattcgcatttagggaggaaaaaaagggaaataggagcaggaaatggaaagaatcagaacagaggaagtggagaaagtgggcagcttgctttagaagggggatgcacgagcacaacgaaatcacttagtccacctggaaaaacagcacctttctttgtttgtttctttgacctcgcaaccttctctttccttccaaaagacaagtttggttttcgcagccgtaaatactaagtcaagtttggtttaaaaagctccaacacaaacacatatgaattgaataatatgttaaggaaatctagggtacatgcgtggcggatgggggtgctcagtaattgatgttgacccaacccatttaatacgcacagtaacgtccttcattcaatccacccagccgaccacttgccaacctgtgtggcggttgtttgagc

SEQ ID NO: 1097 - DNA, 774 bp, Zea mays
tgcatgcctgcagctatcatatttcatcccctatttcaaacttcactatgtaaacagtgcaatctacagtggaaaaaatcctttattttacacgatttgccgcggatagccttaaggatttgatcagatattttccttacaacaccaacttaggcaaacatatctttatttttaccctcttatctagctggagagatgctacatgttgcacaggcattcatcgacaagaactaccatccaactgttatttgccgaggtaagattcctttattctcagtactgcactttactagggtaatacctgttttttatatcttaacttctgaaacttgtatttttcttatcttcagcatataccaaagcgcttgatgatgctattgctgtacttgacaaaattgcaatggctgttgatgtgaatgatcgtaagtttacagtgaacatatattttgtactggatcctggcactttgtcaatgtcacaggaattagctcttccctcttgcatacaccatgtgttacacaattagactgatgtcaccaaatatactgttaatgcaggtggggcaatgctaggccttgtgaagagctccattggtacgaaattcactggccagtttggtgaccttattgctgtaagcatctttctttcatgtggaacttcaacaatttccctccaaatatagttcactttggttttgtcccaagtcaaacttcttttactttgaccaagtttaaaaaaagaaaacaaacagcccaacatctacaacatcaaact

SEQ ID NO: 1098 - DNA, 725 bp, Zea mays
  unsure (1)..(725): unsure at all n locations
gggataagaacctgtgagcgagtgaaaacgaacatttttgctgggattcggcccgccgatagtggatgcggagaatgggaggaagaggaaccaaacattcaagtcaaaggaggctggctaataaaagccgggttcttcgctggcgaggatagatttgtcaccccccggtaaagtaaaagaaacaaaacatgtagaatccggccggacctggggaagttggtgttgttgatctttttctcgccgtacttcctccattggtggccatcgttgtgcggcgcgaaggtgtccaccttcctcatccgtttctccttcctgccaagattccccgcaagaaagaaaaaaaaaaagaagacgaaatcaggcgccgccttccaaaccgaaccgcgcaggtgcagagatcacaggcgaacccggccgcagctagttacctcgaattgatctgcgagtgatgcgaactcggcgccggagacattgtttggctgcggtggaggaaggggtcaagaaatgcaggtgcgggaccggagaagaggggtggcgaagaagacgcgggcaggcggccggccgtgggaggacggagcatacagcatgttgcaggcccagagcgctttttaatttcggaaggcgttaccttggacttaggacacccacccacacccaagggccaagggccaaagcnagaaggcacggctttccaccgaaaaataagaagaataggggggcccggg

SEQ ID NO: 1099 - DNA, 713 bp, Zea mays
ttgaacattctcttgcagcaacagccatctcacgagcactaacatccttggatggctcccacagacttgcatccttatggaagagagtaccaatcttctctccttggagaactctaacaatgctctgagatgcaaatccacttcaagaataaaaaggaagttaaaccaattcgctatccatcatacagagacaaacatagattacagcatatgaagtttacttggttctctcaaggtgacaactgatgaaatgaacactgttagacaagcattactccatccattttgcaatgtttgtccatagcataccaagcgcagagactactgaagtattgttccaagaaaaattcaaattaacatgatacaactactcttctttcaacacatctaattaggggagagtggaaacttagcaataactacactcctgatatcctcaatagacaaacaatgtgcaacacattttcctaaggccatgaacaaacattgaaaacagatggcgtatttggatttgaacagcagaccttattatatgtaaataaaatccaacatagaaaaataagtgaacatcacaagcgaggattcagcataacagtctaaggaaatataatgatgtgcagctcttctgcgcgttcgagagagaaaaaagtctaaggaaatatttcacttttgaaaaccaattctttacatcatttaagatgtaagaaacactc

SEQ ID NO: 1100 - DNA, 798 bp, Zea mays
tgcagaactacccccactgacttcccgcgcgcgcgctcccgctcccgctgccgggcccggtttcagccccatcaggcaatcccctctccctgactcccccctccgccccccaggccccagccgaagcagacccaatgtcctgcggtagaggcagcaccggcgaagtcgaaggaggcaaatcggtcgccgcgatgacgccgtggcacgacagcttggcgccgccgcctcgcgtcctcatttcccaccgtgagcacccacccgcaccctcgaccttccgtttgtgccctatactgctctagttcgaactagggattttggccgcgggatgagtgttagggtagagcacaggccatcaactgattctactgttccggatttgtgtcatttgggtttctgttgcactttgcggtttcggattttgaactcataccttgaatttttttcttcccgcggacgtgctcaggcggtcaggcctcagcatgtatttgttactttgagttccaatcgaacgccagctggttctaactgttcaaattgcgcaggtgccattgggttttgaagattgatttttttttgtggggagacgttgctgatgacagtttattgaagatttttttgtatgaattgagctcgggcgtttttagtcagacccacaattcatattcctttgcgcgttgcaggccccttctgatgccagcggtcaagggattgttctgtcacttcaacatccaagatcaggtgaagtgatggacctatgtttgcatacctaaggtttccagtatgagcttctgatccaaa

SEQ ID NO: 1101 - DNA, 526 bp, Zea mays
ggtgcactgcagaagtgactcggctagggttacctttgtggtggtggtggtgctccagtgcactgccatgccactgctactggcctgctgctcttgtccgaacattccaaggacggtcgtaccgtacagatttttgggtgttcttttttgttcgattcagaaggggaacccagttcaaccagccacatgcctaccggctgccgtaccatgctcggcaagacgctgcacgtgatggaaccagtaatcaatctccccatggaccaccgctgccaggcgtctttcagaaaccaaacgcaacgaacaggcaggcgcacggggattgcagagaaaaatcagggttcagctccacagagcgtgtgcagtgcagaccgaagccacgcttctgcgatctgagcctcaggagattgcttgcattgcagctctcacgcgacgcaaccatctcttactctgataggaaagtagagtgcgtgtgttgcagaagtagcacacaagcaggccgaagagagatagtactagcaagaaacaa

SEQ ID NO: 1102 - DNA, 736 bp, Zea mays
aactcacaagtcaatgatggttatcaggaacaatattgtcgtggggggcattacttatcgcccttatgcaaggtaatgctgccactttagttacaatttgttatgttgacattgtatatttgttgtgcttaatggccaattcaatatattctatatgtgctctttctgtgtgaggatccaatatttttttgcaactgaaagcaaatgtctcccaactgacaccactcacttatgagaaaatgttggccaatcaagatattgcgtcgtaactttgtacttattcaggaaatctattattttgatgataattaaaagctggcaagttagaatgtaggttgcaaacatttgcatgcttttgtttatcctgcaatatctctctattatgctattttttcttttggaaatcatagccagagatttggagaaatagcgttttgtgctatcacagctgatgagcaagttaaaggctatggaacaagattaatgaatcatttgaaacaacatgcacgggatgctgatgggctcacacatttcttaacctatgctgataacaatgctgttggctattttgtaaagcaggtatggctgcctgaccttttaccttatataatctatttctttcaatttcttgtttgcttgtatcagtaactgaaagacttcggaaactacatgtgtgatatacttagtacaccttaacctcacacaagagatataagtaataactcaaaatacttga

SEQ ID NO: 1103 - DNA, 484 bp, Zea mays
aagcgcccgactgagggaggagagtagcgctacagcggggccgccacgccgagagccggggaagcaacttcgggcttgggcggggttggaagagcactgcacaccaggggtgggaggaggagcggcgctggccgcctggccgagccgccgggaaagttagacagctagtggaagcagcggcgactcctgtgttttgtgggagactgtgggccttatgtacctagagatgcagccacacgttattgggcttgagccagatatgtatgtttttcaggcctgtggggaacccgcgggcgagatttattacccgctccgaacccacagttgtacgggtcctccaacctgtcgatgtcacaacggaatgacactagtcttgaccgttctctcacccctgcacaagcatatttatggtttatttggttgaaatgtggctataaaaaaattgttgtgggctatgagctatggaaaaaactgctgtgggctg

SEQ ID NO: 1104 - DNA, 808 bp, Zea mays
ttggctccgcaaccatcgaatattaattttatggagtggtggcatcaagcaaatgaagctattcaggggtccttcagagatgacctaaacttcctcattacactgggtgcttggattttatggaatcaccgaaacagatgcatctttgatggcctttcccctattattgctaatttcctaatccaaactggggatgagcgccgtctttgggagactgctggggccaaggggctgagctcccttgttgcatccctctcaattgtggactagagctttatagatgagtcaatctatgttagtttcgtttagaccgccgtaaggcgtcagttgtaccccggtctattttagaccttatttctttctacttttaatataatgatacgcagctttcctgcatgttcgggaaaaaattctgtgtgttagaattagtgttatcgtacaatttgaatgaaacactttatttacaggcaagaaaaggcttgccaacagaggaggatggctgttccagtgataacgacaagtaagtagccttatatgcaatgcaactgggcatgtgctatgtatcggaagagttataaacatctcgtaaaaacagcaaattctttctttgtacgttgtttggctagttcttagtgttaggctattgtattctgtctaggtattatgggccttgagcctaacccatgtaactctaatatatgtatcactcagcccactcaatgagttagggtttcaacttctccaacatggtatccagccaacctctctctcttcctttcttctctagccgctgcctcctcctggtgcc

SEQ ID NO: 1105 - DNA, 503 bp, Zea mays
agtttctatcagtgcgataatcgaacagactttttagtttcagaaattatgttgagagtgcatgggtttgaggataccttcaacttattacttgcaagttatttttactattacgctgggtggccaacacttacaccggtttacttctcatctattcatttcgattatcaacatgtgtcatgttataatgcggtgctgcttgtctgcaaactgacgtcctaggctttcagttccagcatatatatctgcgtgtatttgatagctgatgcaaagctttcagtttgttttaatgtgattctgtgtttgagtgaatgacagaatgggatccatgggggtgttcccgatgactacgaatgtgaggtgatcgaagacgacaccccaattcctaagcatgttcctcagcacctgcctgttgctcttcctgaggagttcttcaaggcactagatgctgtcaaatctgatcctgctcttcaaggcgatgctcctcctcaagtgaaggcgta

SEQ ID NO: 1106 - DNA, 475 bp, Zea mays
ttcacatgtcatcctcattgcaggtaatgctgccactgaaaattctaccattctgattctttttcttttgctacaatacaatacacttttacattgtcattttccaacaataacactataatatttttcaaacaagaaatttggtcatgggacatagttgtttgtcctaatgcagctagctcatttgttttcctttgattcagctacaacatcagtagccacattcgttgttctggtagtcactgcactctatctttcactgaagaaaagatataatgaagcaatacatctcaaagtagaaatgtttctcaaaacatatggcacatcaaaacccacaaggtacactttctccgaagttaagaagatagcaaggcggttcaaggaaaaagtaggccaaggtggattcggaactgtttacaaagggcagctaccaaatggtgttccagtggcggtcaaaatgctagagaactctaca

SEQ ID NO: 1107 - DNA, 746 bp, Zea mays
agccagagagctgacatgtgacagtggcgccggctggcccatcttgtggtccggcccttggtcgcatcagcagggagtagcagtgtcttgcgtgcctctcttgcattgcatgagctcaccccacgaccttgacaggcataaatataatcgcgcagcaacaacagatgaacaatgttcaaagcgtgggtccgccgttcaagcaggaaaaatgagcactactatgtacatgtactagtacatgtgtatgtgtatatatggaccttttgctctggtcgtctctcttgtctcgactgagtttacgtatgcaggtaaccccttccccagctcgccctaaagagtgcgagtgagtgagtgaggcttgattagtactactactactagtttaacctcagtgcgcctaactatctagtctagtgtagagccgcatgatttgactaatcaccattcgtttggtgcctagcgacgcggccaaggaagaagctgtccgttggtttccacaccgggaatcattcctaaagctctctctctctctgtgatcatgcttcaacgtacgtactaattataaacagatatgccggacacacgacgcgaccaaaatggagctgatttctgtgcctgggatcattttttttggtagtactactgtctactaattatcaggatcgagggggtgtggaacagatcgcagccactgctctctctatttttttttctagcgcctgctgggtgcttggccaatgcaacgc

SEQ ID NO: 1108 - DNA, 703 bp, Zea mays
attctctcacgagtctaatcataggccaggggtaaaagcgcaaatgtttctgcgctctcttttctcccctcaccctttctctttctccctcgaccgccccggatctatctcgccgcgccggcgcgcagctgagccgccgaagcgaggaggcaatcgaggcggacgaagcgccgcaccaaattcgacgggggatcgagcaccagaggcgtagcgcaaaatgttcaagttcctcaaggaggtggtcgcgggatccggatcgggactcaaggacttcccctacaccatcggcgagccctacgcatcggcttggggctcatggaaacaccaccgcggtacctccaaggtacgcttccgcatcattccacactttcacacccgatcgatcagtcccccttagatgtatcgttgttttgttttgtcgactgccgactggtacggttcggtagaactggttccgttggtcgaattcggggaggaacgaactgtgcacgctatgcttcgcgtgtgcttggctgtgtggttcatgtgctacgtggctgcatacgctcttaattttgggggtctgctgcgcttagcgttttgagcactcgagcttttttcgggtaggtgtgactatgttggactattgcaagctttagtaaccctttagaagcacaatcgctggattcggtgcagagttgattcgagtatagtctatagtctg

SEQ ID NO: 1109 - DNA, 732 bp, Zea mays
tgtcgatgctttggaaaaaaggaggctatcagactactaataaccagagcagcttaccaataaacttggagttttataacctgaggcacagtgataagtttgttagacagaatgaccatttctctttcttttgttgtctgtagaaatgctcaaacgcattatagaaacaaagtatgtattcttggttttctaggtatgtcttggtgtatgactagtagttgtcttgcttcctgatctgttactttttttttttttggctatagcctgtaataatagttggaagacttgaacaattccaaagttgttccagttcatttgcctgttggttatttcctgaccaaatgaaccttttccttgcaggaagatagccatgtcttctttactgataaagacaaaatcaatgaattggagtcagtggatagccaggaaaggatagcttctctacgtaccacatttgacattgactatgatatttctcattctaccaagaatccacttatcacgaaacaggaacttttccacaatattgttgccaacaacttggagatagaagagattggtaatgcagtgtacactccaaattacacttgatgtttcctgagctatgctaatcatatgtttttatgactaataggggagatagaagagcctctgcatattttagaggatctggctcccgatttgatatcaaagaaggtgataaatggaggagaaatactttataggtaacta

SEQ ID NO: 1110 - DNA, 801 bp, Zea mays
gcagattctcttatggtccagtatatctgttattacttaatatcttagttaccatattttttttgaggggaatagttaccatatctgtcagctatgacacagtctgcggtaaaagcatatgtgttcactgtagattttgggagggaaattggcttacctgtactctcatacattgttgccttgctggcaacatggttaaccaatgacataacatgcaaactgtatctttttactatttaccttaaccatgccagctttttatttggttctaggcatctttttattcttccttgctgtaatctactggattgtagcatgaacaccttcatgggttttagcttatgtttgttgttttcaaccagtggtggcctgtgatatgtctactgtcaaatctgggacatactatgttgcaggcttctctagtccgtatttggctccaatctgtactagaacatatactcatttatctggtctactggtttaccaaatcatattacagaatagttgtgtgtattttgtgttccagcactttgttcactgaaatttgaaatcccagtttcttactcacattaattaacttgccttttcccctcaagaaagtgggcggaaaaagtaagacaagggtaatgctggactacagcttgcttcttttccttttatgcatggggatgcttgataatgtcatgctgagaaacttaattagttctattgatcttttttataactctcacattcttccactgcaactgtattttcagttattttagtcctgccttaataatgttctccttttttcaacac

SEQ ID NO: 1111 - DNA, 654 bp, Zea mays
aaaacccatacaatcaatcactttttggttaataagagttggtaccttgtggatttgcctggttatgggtatgtttactcttttctatcacactcaaggttttctcgttcatccaaaaattagtaagtcaaattgttcactagtgcttcacatgctatgttccagaatgggagcatcttgtgtttcccccctcttttacatatggtgattacttgattaggaatttaaccctgctgatgcactaccttttccccactcgtctagttccatagccagaatgacattctttgtacgacggaagtattatacatttgtggtactcttgaattttggcatataagatattcttctagaaccattgtacacagcagctgtgcatgcaaatagcattcctatattctgtgctgttttaacatagcaatagaatagtggatggaaaccattcaggttcaaacttctgatatgaaaacaaagtgacataaatattttgtcctgaagttagcctgttaatgtgttagttctggaagcccaattactatgccttttttcatgccatattggatagggcacaagttccacttgcaccagttgtagttctcctttggataggcggtctgattttatttgctggcatctagacccttgaaattgtaa

SEQ ID NO: 1112 - DNA, 844 bp, Zea mays
gcagtggcttcttaacaatacgttttccccctagattcagtaagttcattgaacttttgggcagccatgatcagtgaagagtaaagacttccccaggtatgcaaaccctagcccctaggcgacagtatataacatgactagatgtttagaatctagatgtagaaatatttaggtgcaaattagttaaattgattgatgggtacattgttgatgcattatgtacttccttggattgtgaagaaggattgagatatgaaaagacagtaaagtttccgcggttccacagacgtcgtgtgtcacccttccacttcccgctttatgcagcaaaaataaggtaaaattgctttatgcagcaaaaataaggtaaaattgtgcacaactaaggattcaaaacttggtggttggctccacattcacatatatctaaccaacagaacaacacatatttttgtgttttattaaaacaaagtctactcatgtgatatataaaaatcatagcaatgtacgggcatctaactagtattgtgttatttattagtactcccttggttctaaactataaactttcctagatacgtagctttttttatgcacttacatattacactgtctataatctgtctagatacattgcaaaagtaatgtatctagaaaaaacaagcgtcctataatttcgaacgcattatctgtgtagtgaattgccggcaaaaaactttgtttgttcaatcgattttcctaaaatgtcctttttacccgaaattacaatgtggggaaaaaaatttgaagcattaccccccatggaaaaaaaaatcaatagggcccccgcccaactggcttccggggg

SEQ ID NO: 1113 - DNA, 811 bp, Zea mays
  unsure (1)..(811): unsure at all n locations
ctgcaggtaactgactccacacttcacagcgcagcgcaggcgcagcacacacccatgacccatccttccttctcatggctttggctttgctctgctctgctttgcttttggctgctagtaggtctttgcgctgttcttgaggccgaagaaggagcacaagtaccgggtgtactggaacgcgtaccaccactcggtggggtacacggtcatcgtgctgggcgtcgtcaacgtcttcaagggcatggccatcctggacgtggagcggaggtggaggacgggctacgtcgccgccgtctccgtgctggccgccgtcgccgtggcgctggaggccgtcacgtggggcgtcgtgctgcggcgccggaagcaggaggaaaagacctccaacgccggccgcttgccgctgtctatgtaatatatatatatatacctcatcgtcgtcgtcgtcgggggcgtctcactatatatctatctgatctgatctgatcttcagagtagtaggccttacgatgggttgggttagctagctagtgtgtgtatcttcattgtatggtaggtgtctctgtgtgtgtgtgtatactgcacgttcgtatactggagatgagtgagtgtgataccggccggcggcattggtctttggctgttgcctttttggttctgttccgtcgtgaatgctgatctgatcatgcacttgcgttctgggatcatgctattttgggtgctgctccatctcgcaaagaggaaaaaaaaaaggctgtgaggtgggctcngtcaataactgtaactgggtgggttggtgaaactggatgggaac

SEQ ID NO: 1114 - DNA, 765 bp, Zea mays
actactcccaccactggaggacctgggccgcgtgcttcatccagcacgcctggcgccgcctgaggaggaggaagatggccaaggacctgaatctgagggagtcgttctcgtccacgggaccgtacgaaggcgatggcgacgacgcctcctcccctgaacagagtatcacacttaggagaggagccggcagcatcatcagggagctgcctaagttcaggaagccatcggagccggatttctcggcggagcatgatgactgactgactggcggaggactgagtggctgatacattgtttgttaaggcaaaagattggtgcttctgatcggttgttcatactgtacatacatatgtagtggtgcttgtcattgtattgtagggatcccaccgtagattagaaagattgcttgtgtccgctggccgagcagattttgcttcccgggtcagggctctaccattcttttttcttcttttcttccaagtgtgaaaattgcagcaggatgtactgttgtctgtttctcttacaccggtctggttgttgattctgtgaaattttgttgtgtgactaccgagactctgatcattttacagttgtgcctgctctcctctgtgtggcacaaatgcggttggacttgcaacagacgtttctttgttacgttgttgggtttttttaacgaagagctccggaagttcattccagagcttcttttggcgaacacggcatcacccttgaacttctgactgtacctgtgacaatgcttaacca

SEQ ID NO: 1115 - DNA, 808 bp, Zea mays
tctaaactcgacctgcagcgatcgatcaaccaatcgctggagttcgttcatcttttccctatgaggattgtatgcggcatgcgacggatcgggatcgggtccaagaaaccggcacggagagatgtggcggcggcggtcgatcaggagctagcacctcctctcctcgcgctgcgacgggctgcgccagaagccggcgccctggaagctggcccagaccttcgcctccgcctcggcgagctcgtcgcgcccggcctccgcccgcgcgggccagtggcagaagtcgagggcgtcgccgttgcggtcccgggccgccgccgcggtcggggaggcggacgcggcagcgcccgaggcgccgaggagctccgcctcctccttcttcttcttggccgcgcgcctgcggcgcgcgcgggcgcgcagcgcgcggcggcacagcgcggcgggcacgcgcacggccgccagcaccaccagctccaccaccgcgcaggggaagcagcagcacaccgcggcgcactccgccgccgtcccgcccgccacctccccgcaccgcggttgctcgcgcgcccgacgccgttcgcgctcccgccgagcctccacgggcggggaccgccgcagccgccgctccgactcctgcgccgccgtcgccgtcgcctgagacggagacgctgacgccgacgcagacgccgaccctgatgcccactgcctcgtgggacgagggtcacgggaccgccggaaagccggacccgcccggtgggctgggcgcccgctgtgcttgctttcttgcttgggtggccttcctggggcgccccgg

SEQ ID NO: 1116 - DNA, 790 bp, Zea mays
  unsure (1)..(790): unsure at all n locations
gctccaccgcaccatcactcactcatcagtactgctacgagtgctactcaccttgcctttgctggaaataggaagctcgcctctaatccgagagcggagcgcctcctcttgctgcctaatccctttcctctctcggcgtcttggggggggcctaagcacgcggcgagggctctctttcttcctcacctcacctcacctcaccctcgcccgctacacaagtagtatctgctggaggacggtgctgaggttagcttccgatcgagcataagtcgtggtagagaacgcaagcaagcaagcaagctgctttttggggggtgatgaggagatgagaggtgggaggctaccgctatataaagagggcggaggaggaagagagagagctagggggcggatcgagtgggttcaggggaggaattcgagggcgcctgcaaacgccgccatggaggcggccccgaccttaatttctatttattgctctcgctccgatcccacagagctcacctctctagcttatctccactccacccaaccagatgagatgagagaaagaggatggacgcangaaaaaaagaaaggagaccaagaagaaaaaaaaggaagaaatgggaaaagtgagcatggcagtggtaagtagtaataggggtagccgggggggatttttcctttttttttataaattcccttttcctttttttggcaaaaaaaagattggttttcccccttttggccccttttggccccctgggcctttcccctttttttttaacaaagatttgggtaaccccccttt

SEQ ID NO: 1117 - DNA, 774 bp, Zea mays
  unsure (1)..(774): unsure at all n locations
tgaccttatgcagaatgatgtaccacacttgctgagagaagacgcatgagattagcagatggtaaatcgtttcctcagcttgatcacaaagcaggcagcattcagggtggggcagacctcttttagcaacacggtctgctgcccagcaccaattgtgtgccactaaccacatgaggaactttcatttgtatggtgctcagctcttccaaattctctcccaaggcccaaactgtacagacccaataaaaaatccctcatgtgcagatttagcagagtacagtcctgaactagagaattgccagatatgagtattatctactgtaagttgcaaagtcaaatccaagagactgtcctacaacttcaaataatctatcaacatagataagggtggatatcgagccagctcggctcagtccagctcgagttggctcgttaagataaggagcaaggtcggttcgactctgccagctcgagctggagggctggctcagctcggatcgtctgccagctcgagctggctcatttagctcacgagctaaaagctaactcacccaagaacatggaggggatacggngattcgagtgcagcaaatgagtagaagatggaaaataagtaatcacccaaaaataaccacctttgcaagatcaaatcgcaatttttgggagtctataatccaaaaggataggcccggtgcagtgatgagaaacctttccactgagccaaaaggtcctaagttcgacgcaacctccctgcaaaatgcaagggtaaggctt

SEQ ID NO: 1118 - DNA, 690 bp, Zea mays
aagacatgtattcaaatcaaggatgtaattaaattaaacaggggaaaagacggaacattgtaagccaagccacataagggcttgttcggttagctctcaatccatgtggattgagcgggattggatgggtttgaatcccaaacagctcaaacttcttcacaattttttccaatcccatccaatccatgtgtattgggaataaccgaacaagccctaacaggatctgccaccaatatagaatcgaactacttctacatgatgcacaaattagacaatataaattgataattgcaggtcactaaatatagcagtttaaccaacactgtcagtcagttttgatcacgcataataccaaaatggcaaaatgctatcaaacaacaacaacaacaaagccttttcagtcacaaatcgagctgaaacccaacatgaacctctagttacgaattacgattaaccaaaatgctaccagagaaatgcataatcttctgtgtggtgaacggtggtaaatctgaacaaaagtccataataaaagaagtggcaatatatactcacccaagagaatcttccctccctgaaccttgtgtttgctcctgctagatgagagtccagtgggttgagcttcagcagcccttgagcagcaatacgggtccccattctaccactaaacccagtcttctccttttcatcttt

SEQ ID NO: 1119 - DNA, 525 bp, Zea mays
tgcagttctgcactccgccttccgctttccccacatccggcttgactgctttcgtgccggtggccggccggcgccgggctgcactgcactcgcccgcccgtcagaacagcatccagtccaggcggttggtcggcggcgcgccggaggacgccgtggagctcacggttgtcgtcgacgaggccgaggacgtggacggcagcgacgacagcaggtccagcatctcccaccgcgcctgcctcgcttgctgctgctgctgctgcggcggcggcggtgctggcttggcgacggacttgcggacggtggcggcgttcctggccgccaccgcgtccagcgtctccacgtacttctggacgcgcttcacctgcgacgagcggcggaatcgattcaaattcagtcggccgcggcgttggaattcaacggggaagaaggcgagatatcggatcgacggatccttgctcctcacctgcatccgcctctgcgccttgacgtcgccgtcggcgaccacggggtcgagcctgagcagct

SEQ ID NO: 1120 - DNA, 651 bp, Zea mays
agctcttatatcgatgacaagttggatctcccctttactactcttgccaagaatgctgccttacctcaagaacaagaatccacggatccgagcaaaagcatcagtgtgtttcagcaagagtgtaccacgccttgtaagtgaagtttcttgcctgaacttttgtatagttgcagcttaccaagtgaccaatcaggtactcccttagtccacatgagtttgtcgttttgggtttgtcctaagtcaaactatttaaactttgaccaacaatatatataagattaaattatttcaaactaaaataattacatattatgatagttcaagtcatggcgaatctaataattttagttttatgttgtaaaatcttataaaatatctagtataacaggtcaaaattgatagtgattgactagtacaaacccaaacgacaaactcatgtggacggaaggagtaggtgttaatgttttagtttccttgcatactacccttctccttccaatataattcagatctttttagtttattttttgaatactttgatgtatattcttaacattgaatctccttcaccataaggtggagctgggtgggagccaaataattagctagttgacatgttaaggggttgaaggtttaaaatattgggatggc

SEQ ID NO: 1121 - DNA, 702 bp, Zea mays
gagcattcgagctctgttgcggcagtgtccatctgcttgaatgtatcttggacctgtgaccacagttttccagcccgtatctaataaaaagcaaacagaaggttagtgaaacataagcactctgataacatgctattgaattgtcaacaattttgtttcaatgaataagggagcaaattcggtcaggaaaacagcaagagctaacaatactagtttgcagcagccagtggcagacctaggattttacaggagggcatgccatgcattttgataaacttgtttagcgattcggtttcaaggctctcttgggaatgatcttgatcaggttgaaagcatgctctgcaattggttatccaaaaagccagtgagaaagtttcattaccaactgtggtttgtacagcaacaccaacaacgtttgggcaatataagggccttgcactggtaaacctgcccaaacatgttcctcatcaatcttccgtgcccacagccatctgatacggagtgaccagccgaaagtttcaaggttatgaatgcctagctccccaaactgaatagggaattgaaccttttcgcacgagactagacagttaccccaaagaaacctgtcttttcttatcaataacttgtaacactcattttgataaatccatggcaaccacaagataaaacaggatagcatggagcaccgcccttagtttgggg

SEQ ID NO: 1122 - DNA, 766 bp, Zea mays
gctctggactataaggaggcgttcaccatgctggagaaatgcgatggtaactacagccaagcaccttcggcagtggactgggagaaagtcgaggttgcttgcaggtatctgaagctgttgtatgactctgcaaacaacattatggcagtggaaaatccaactgccaacatatttttccatgatgcctggacaattcagagagagatttcaaatgccacagatcatcaagatcctaattctgtttccagcagcatcgcaaaaggcgtgcatgagacgtttggcaagtactggaaagattgcaatgttgtgctagccattgctgttgtgatggatccccgtttcaagatgaagattgttgagttcagttactccaaaatctacggtccgacgaagggcgctaagtatgtcaagttggtggatggtgttgtacatgagctttacaaagagtatgttacacagacacttccgttgatgccaaaccatgttggggataagaacattccaagagatcctacttccattggcaatctacaatcaggcttcgaggtctccattgtcaagtcggagctagatcagtacttggaagaagccctggttccacgcatcttggagtttgacattctgaactggtggaagcttaatgccgtcaggtacccaacctctcgaggatggcccgagatgttcttgctataccggtgtccaccgttggtcgcggcagctctgtgttcgcagctgggactgaagcccagatgcttgacgactacca

SEQ ID NO: 1123 - DNA, 771 bp, Zea mays
ttgagctcccactgccccttgggcggcgacggcgaggcgcgcagctgctgctgctgctgagcgaggagcttcttcttgaggtgcgtgttccagtagttcttgacgtcgttgtcggtgcggtcggggaggtaggaggcgatggcggcccagcggttgccgaggagcgcctggaggtggacgatgagcctgtcctcctggtcggagaagccgccgcggcggatgcccgggcggaggtagttggtccaccggaggcggcagctcttgctgcaccgcagcagccctgcatgcatgcagcagagtgagaaatactagcactagtggctgcggcctgcgagcgcacaaacggccagcgtgtagccacctgtgttggcggggactgcgcgccagttgccggggccgtgctcctggacgtaagagacgaggaccaggtcctcctcgggcgtccacggccccttcttcacgctctccttgtcgcagcacggcggccgccccatggatgggtcggaatcgccgccgcgcggtctgtcgtcgacgatgccgccggccaacagcttcgcccggtggatggtgtatgaaaagaaatcaagacaaggttcaggttccagaggcgtgtgtgtgtgtatatatacctgtgcacactggacttactcttaacgcagaatagacgtaccgcagaaaggcaacataatctagtaccccgttacatactttgagacactggtggtcttcaatcacccaaaaagaagaatttaaggctttcaggctaataat

SEQ ID NO: 1124 - DNA, 717 bp, Zea mays
gttcctgtcttgatcatcgagctgaggaagacagaggcgaactggctaaagagatacctctacacgtttttcatctttaccttcatcttctggggcaccccaaccttcgtggccgtggtgaccttcggagcctgcatgctcatggggatccccttggagacggggaagatgctgtcagcactggccacgttccgcgtgctggaggaacccatatacgaacttccgggcactatcgcgatggtgatcaagaccaaggtgtctcttgacaggatagcatcgttcctgtgcctcgacgagctacccagtgacgccgtgcagaggcttccacgtggaagctctgccgacttcgcagtcagcgtcggcaacgggtgcttctcatgggaagcctcgcctgatgctccaacactgaaggacctcaacttccaagctaggccaggcatgcgcgtcgcggtctgtgggacagttggctccggcaagtccagcctgctatcctgcattctcggcgagattccgaagttgtcgggagaggtccggacctgtgggacgacagcgtacgtcagccagtcggcgtggatacagagcggcaaaattcaggagaacatactgttcggtatggagatggacagagacaagtacgacagggtgctcgagtcgtgcgcggctcaagaaagacttggagaacctgccgtttggcgaccagacagtcatcggcgagcg

SEQ ID NO: 1125 - DNA, 725 bp, Zea mays
cagttaagacagaattagagtaagcctttccttactcatttctatcctgttgtcttagatgtaaaaaaatgcctttagtattacggaaaagagcagtgaacagatccatcttatttggcatgcttgggcagaaaagttaattcttaattataatgctggcccaagtgttcacatgtatgttataacaagagatgccattaaacatgttctatatgaatatattggatatattgtggtggaatctattattcattaagtgatatgtagcttttattgaaaattgttacttgagatgtcaaattcagaatcttgagtaaccttgtaagtttacctgcttatataccttgttacctttaaaaaactgtggaagaattatggtcaagtaagtatgaaacaatcacgttactgtaaagaaattatttcacatcactcttgaacaagaatcccaagtttaagtgtcacaatatgatacttgcatatggacataaatgtccaggtgacattagctttgatttctgggttatacttttttgctgacctaatttctggtagcagttccagaacagaatctctaccataatctgaaaagtgtaagctatacagagaattaagaagttgtcttgaccctcactggacccagagactactccgtaaccaaaagaaaatggtattatgcctctgataataatattcttaaggattaaccatggtactttccttttttt

SEQ ID NO: 1126 - DNA, 598 bp, Zea mays
tctgttgccggatggaatgtcatcggcttcatattcccgttcctcgtggcggagtccaaggggtagaggagatctccggcgagatcgaggacagcagcacctgccagcgcaaccagcggagtgtgccgacagatttgaatgaataaacaagggtcctacttgtacttccgtaaagctgtgtatcaggaccactattattatatttatggaacaagaaacgagcacatttctgggtacaaaatgatgcaccttatgcttacagtgcacagtagacaatggtttcctcctgctacgaaacgatttacactaccaaggaacccaagaccaaaggggtaaaatacagaatcaaggtgaagggactacaacttgctagcctcacccccaaatcaagcaataaaaaaacacagatgattagcgattaatgatgatagcaggtattgctgattgcccaagtaaatcgaatgtcattcaataaattataaatcccaaatctaggtttaaacaaaacaaggatgaaactccggggtctacagccattggcttcaggtaagtgccatgtaccacctatagtataaattcccacatgtgtgttgataat

SEQ ID NO: 1127 - DNA, 727 bp, Zea mays
ggagtgtggcctccgtttatccgcggcgtctaatccagcatcaccgtcagggattatcccccctacatttttttttgtgattatcctcttcctctgtccccgcggaaggccaacacggcccgcccaagcccagcactcctgacgcgacgcgacgcagatacgagatatcttccccctcgtgcgcgggacccacctccatcacatgacccgcgggcccggcgccccacgccgaaatcctcaaaaaaaataatattttaatcagatttcgcttggttcccagccccccacgtgttccgcccccgccacgtcaccgtcccccacctactactacatgtagcgcatcaccaccatgctatgcgctgcgctgcctccctccactactacgccagccactctgccttccctcccccaccaccacaagaaccgcttcaccattgccgcgtccagctgagcctcctcttagccgcgtccagccaggagaaggcgggcgcgcacacctgctgcttggtgaccacgttcgatggagctgcacaagtactggggcgtggggggccggcagtgcggcagctgcgagggggccccggcggcggtgcactgccgcacgtgcagtaggtggatccttcctctgcacgacgtgcgacgcccagctccgagcacgcgcgccctgggccacgagcgcgtgtggatgtgccaggtctgcgagctggcccccgccgccgtcacgtgc

SEQ ID NO: 1128 - DNA, 618 bp, Zea mays
tgtaaagtctacctgcaacggggagcggctactcaggaaatagagggaaggaagggcagcggccgggaaccagcaggggcactgcgaccgcttgcgcttgggggctgggcgcctaccgcctagctggctggaggctgggagcagaggagcgctgaacaccacaggggccgccaaaactgagcagggagagggcgagcaccagggaagcggcatcggcgaggctggggacgagcaggggcggtggccatcaccagcgctgaaggacagacgacggcgaggtcgagcagggaggacgcgactccatggccgggatccacggcccgagcgacgcatcaagggaggagcagggaagggaaccggagctgacagtaatttcatatattccttgtagcgttatttttataataaaataatatatgcttggttacttaagaagtggcgtgttaaatggacagccgatagctcgaaacttgtagactagcagaatatgcgctggagatgcttccttgtttcgtatagacgactggatattctttattatactcactgctggcatttcgtagtgttcttatagtcctagctttaacttttcatcactggttcagaattaccatgaag

SEQ ID NO: 1129 - DNA, 615 bp, Zea mays
agagtcgacctgcagaggttcgcctacgactacgagggcaatgttcgcccgctacaacgtcgcgcgcccgcctctgcgcgtggggacctgtcttcagcttgaacgtcttcgccaccgcgcggggacatcgctcagaaaatacgtgcctttgccagcccgtcgtgcaagcaattcacgccagctgacaggcgcgccagcatcatagagcaatgaactaatgatggccaaatttacaacatagcatttatttcgatggcgccaaaaaatgcggattggatttttacacaattgctagcaaagaacaaatcaacatatctcggacgactcacgaaacaaacaaaaaaacacgggcacacgcacaaataaggaatcctctgatcctaaagttgggtatgtacaactaaagttgcagattagagtagtaaccaagctgagttgcgtgtgatgaccctacacgcaatcgtctgatcctccacaccaccactttttttgtgtgtgtttctcatctttctgctcgtttattattttttattatttattgcgatatgagattcggatcattcctggtggatatgaatactgggacaaccctgagcgatgaatcaacggccctgc

SEQ ID NO: 1130 - DNA, 777 bp, Zea mays
tgaagatattccttagatctattctggaaacaatattacttgagtaacaataacacacaaactggcagtccttcagttagctagctatgaatactatcaaccagtacctggacatatgatagctgaacaaacattggatcagtcacagcctcatccgactcacggaagagacgtttcttgaatacgagtttgcaatgaagaatttctcctttgttgcgatccttagctgatttgaattcagatagcaagtcaccaatatatttgttatcatctaatccaatgtattcctctgcatataaaagataaagaaatgcaccgtgttacttgaaatttttctacaaaatccacctatgtttcctcctgctccatgatatccaaaccacatgcattaattaaattaagaaatagaaaagaaaaaacaatatggattggtaattaccattgccaatctctgaagactttgatccattaacaaccttccgacattcaaataggctgaagctagaatacactgaaagtttgataatgccagcaagttcctatcattaaatcgattattttgtttcattagtacattataatttcaaatgatattgtaaatttgcaaagttcacaagaaattgcagtcaggtccagtgtttgtttttctgccctccaagggctttggtattttcggtctatattttggacccttttccttttcttaaatattaaatgaaggtggcaagcttctttacttgcggtggaatcccgaggaaaaaaaaaaaacccaaaaaa

SEQ ID NO: 1131 - DNA, 483 bp, Zea mays
agggccgaacattagctatgttctgtacctgtgtatggctcagattgctacaatgtttacaagaatggtcgctggaaaggagaagcatacgcattcccagaagccagaatgtcctgtgatcctgttctatatctgctccgattctgagtggcagaaatgcagatcctacgctggtattagatgaagcaaatttataggaagtagtattctcaacaaatcctctggggcctgtctgaagtggtggctggctaggactgggaggcaactttgccttgctttgcttcaggggctggctgctctgatgattctcctctctgattgggatggtgcgcctgtacgcaaccgttcagggcccacgatactagatgtagctgctaaaatgtgcgtttttgccaacgatcataactaagggggggctgggcctgattctacgatcctagtcgatagattctacaacgcagggatcttacgttaccaccagca

SEQ ID NO: 1132 - DNA, 723 bp, Zea mays
agtaaagagaaagcgtgatgtaaaaacatcaaatgagtcatctaaacctgacatagatggtatgtcttgacgtcttagcactgtgttgtcattgtggctcacgatgaacagtgttttgcttcattgggcctagtgttggtatgttattattgtgatagctactggaagatttgagcttcattatgaaggctggcgtgcttttttttctcgaacatgcaggagagctggcattctttatttcaaagattcttatactgatttgacaatttcaatccttttgtattgcccttacttggtcacaagttcttcatttttaagttgacactacatatgatgattttttctttatacccttctttaaatattattggcgtttttaccagtcatatttcatcacaaatgtactgtcactatggcatcttgcgtaagtttgcctatagcagttttattctatttatttgccgattttgtatgtacatcggcattcgacttcatataactttgtccatgaaaaaacaaaccacttttgaacctagattgagagattatgtcacatgcatttggcgtattttttcattctgatcccaggaaaactatcaaagtttggatgaatcttggggacataccttttccttgtcgatattacactctttcagagaatgaccttggaaaaacaaggcttacttctttacatttacccagggttatgcttattaatcccct

SEQ ID NO: 1133 - DNA, 880 bp, Zea mays
cgaggagatgccaccctgcacagccttgagcaccctgtcgtagaaattggcgcccgaccacttctgatgctccagcgtctccacgccgttgatcctctcctccctctggatcctctccacgtaggccagcatgccgcggcgtgcgaagtcccgcgcgaacgtgtcggtgacgagcgcgtcggcgtggaacccggcgagcgtgatgaactgccagacgtagccgaggcgcgcgacgctcgggatgaaggcggccatctcggcgtccgtcatcccagacgcgtcccagttgaaggacggcgagaggttgtaggcgagcatcgcctcggggcacgccgccttgacgccctcggcgaaggcggtgcactcgcccacgttggggctggacgtctccatccacagcacgtcggcgtgcggcgcgaaggcgcggccccggaccacggccgccgccacggaccctctgaagcggtagaacccttccctggtccgcggcaggtcccagtcccagaacacggacgtgacgccgaggctggcggcgatgtcgcgcgcctggtcgttggacacgcacctgtcgtagccgacggtggcgcggtcccactcctggagcctgcgctgcttctccttggccgcgaagcccaggcccgggaatggcgtcccctgacgccactcgggagaacgtctttgagcctgcgcccgcgggcccagccacctcgttcccctcgatgggccctgggagcctccccttgcccgctttttggccccgccgaacaatgcccggtccgaaaaagcaccggcccgccaaggcttctgggcccccttgaaggcccccggtttggttgggcggcccgacctattgaaacttggtgggttcgccgccgccgtc

SEQ ID NO: 1134 - DNA, 804 bp, Zea mays
aaccactacacacaaattaatttagtacatcgataagcataataataggaaatatgagccatatattatttaaaaaggtaaaatttactaaagaagcatgacgtggaaaatgaacaagttacaaggtctatgtgatctttccaataattcacaattaatcaggtctagtccatgtaaacatatagcccaccttttcgtatgaaatggctcagtcttttctaattaatagaacagaaatgtttttatgacttgcataagcaataggtcgaatcctagcaaacaataagtactattccaccatttcattcctgacacagagattaaaaagatataggagtacaattacctcatcgaaaacaggcacacttccacctacaagacctgtgttgccaccttgtggaaccacagccaatcgtttggtgttgcaatatgaaagaatcttagatacctgtaaagagagcattgaataaagaatgtgcacactcttttcttgtgtgtggataggagtagcaagactaaaaaaataaattattaaaaaatcttcatgaaaaagtgtgggctactgaaagaatcagcatgcatgtcatttgcatggattttgcaacacccttgtatttgcagaagtacaatataaagactgaacaacaccagtaaattattctttaaaataatggtacctacattgtgaagccgtacatgactttcaggaaatggaattgcagctacatgatgttcaggaaaataaggctccactagattgctaatgaaaaacctcaatagtagtttttggtaaagtactagctg

SEQ ID NO: 1135 - DNA, 776 bp, Zea mays
aggaaatgcaagcactattatggctaatctctgtttgtttggctttaatttgtaccagcttagagcatcttcaagagaggcctcaaactgaaattcttttttgaaatataggagttgatactacaaaatagcttccaaaaaagttgatattttataaagtttcaacaaattaatatagcacatcaagcatgaggtggcaaatataacacctcggcctgatgggtcctattcctttccgatgcaataatttttttggttacattgcaagaaaatgtccgcctactccccgacgcctccctcccgacggagcgccttccttccggttcccactcaccactctgtgcagcatggaggcttcgtttatgactctttctccgtcagcagaaaagaaggatttctttggaacatgttttataagaggacaagacaagtgaaggcttattctagatgctgatgctactgaagttggctcgtcgcatgagagcaaatgccaatatgctgatgagcacgtatatttgacatttaatcctttattttgtcagacaacaagctttggcaaataatgaggaacaaatgccaagatgctgaagtttacttgtcatttaattctttattttgtcagacatcaagcttggcaaataatcaagaagagccgactgctgcccagcggaaaatgagagaacgttgccgccaaaacgacagaaagctaggataactaataacggatatagagtactgtgggagacacgaattgtagtctaatatttaaccagtga

SEQ ID NO: 1136 - DNA, 1016 bp, Zea mays
gcacgcagatcgtgtttgccttcgcgctgcatgagcgcaatctcttgctcgagttcccgagccctctgctcctcgtcttgtatcatctggcgcatcttggcttgtgcggagacacgttggcgcttggcctcgaggatttctttctgcttttggaggttgcagttcttgatgtgcagggctcgtagctgtagctgttcttctgctgagacgccgatgacttcgcctttctctgttgcatcctcgccctctagtggagcgaagcctagggatggtgcttgtgattgtcctccggagctacaggtgcggagggagccttcgggagtgggttggtcgttgcgctgtctcttgctgagtgcgtcgtcttcgcaggcttcttggtgggtggtgtctgcaagggtcttgccctttttctcggctagcagcgctgccttcgctgcttcgtcaacggatggggctgccttcgagctagctctcttgggtgccatcgtgggtggtttgttcgtagcacgaacggtgggcgccaaatgttggaacttgctctcctgggcaagatgatccaacgggggagtgaaaggaatgcaaacaaggtttaactcgagatggtgattgctctgttcctctagcctctcaggggcactgtacgggggtatttataggtgccctggcgcccaacgtcctgatgtaaggacgtttatgccctcaggcacctggattatccctagagtattcctataatggagggttacagactgtcattacaaaaaagccattacaaatcggacccgtaacacacttctccgtgcgaggcctgtcatgatgggccgccataccacgtgggcctctaagttgggtgaggacgtgggatggcgggacttcgtcgtgggccttcgtcttgcggtgagaaagacgaagggggaccctgcgccgggcatctaactttccgttggtgccgtcaaaggggaccaagggccctggagcgaaaaggtaagccgtatttgcccttcgtccccaaccat

SEQ ID NO: 1137 - DNA, 519 bp, Zea mays
ttgcatgcctgcaggcaatccttggcccagtggtctgtcttgccgtagttgaggcaggcattgtctcgggttgcccttaggtccttggtgcagcatcgccatccgtgcctgcacatgcgcggggagctttcttgcactgtgatgtcaacgactgtttgatgagcctaagccccccccccccctcttttcgctgcttctgtcgggtgagctacagttccttggtgaagaggagcttgccaccgatggtgataggatcagccgacgacggttcttcgcggtcatcgacagccttgagcctcatcgtcacctccttgatcattaacgtgaagtctaggagcgtctccatcgccaaagggatctatgtgtacttggggacgatgcaggtgatcttcttgaaaccaatggtttcaagtcttctagtcgaattcactggacgaccatgcgattagttgcgattagggcgacgacctggacgattagttggtcatggtcacctctaatcgcccatctagtcgtcct

SEQ ID NO: 1138 - DNA, 490 bp, Zea mays
atggcagcccttcaactaccaggagatgagatgacacaaccagcagcacagatcacacctagcctcctttcattgacacaacaaaacaaacaagtacccatcccaacatacagtgctgcactgtctaatcagctaaatcatatatgactcgctgattatctctcttgtttccaagtaacacaggagtaagaacctaccatacaggtacagtacagccaatgcgtaaattaaatagacgtagagaatccagatccatacaggtacaccttaatagtatcataaagataaaaaagatgtatgtacagagctgagccgcctgcaaattaaatcaatgcaacaaaaacacacacacacacacactacattacatccataggaattatatatgcatccatctgtatcgtccagtctaggctaaacaaaaaaaaaaaggaagaggagaagggtactttgtcgagtgcactgcacacccgtagtagctgagacttga

SEQ ID NO: 1139 - DNA, 494 bp, Zea mays
gacctgcagagccagctggcggagggcgggaatggtggcggtgctattatcgcgtgccaccaccgggagtcgaagccgttgttcaatgccaagtccaggaagctgggcaggacgctgagctctctgtggaagaacaggggcttctcgctgtaccagtgctaggatgcatgctagagtagtactaagtgttttgagttgatcagtgggttgtgtacatcgtcttctgccttgttttccgcttggtccttttcctcttctctggggtattgttctgtttcggggtaagaaagaggagagtgaaaaccttggtgttcttcctccacctactcggtcggtggggtgatgtagggcattttccagtttggctttggccgtgttaagagctgtgtacagtcgtttcttctttacaggtctccggttctctgtcagtgccagtgcccccgttttcagatcagacgcttcttctccttgtcaattcaaaaccaacacgactt

SEQ ID NO: 1140 - DNA, 573 bp, Zea mays
cgatttcatgagatcatgctgcttttttccggaactggtggcaccatatctttccgcctcacctattcatttccattcttatcaattcttgcaacagttgttagaaagaaacgttagttggtaagtggcctgcttgcgttagtgaaagaatatactgctagaacgcagcagcgactccgctctggtaaccgaaatgttttcttctccaaaaatgtgaggagaattggtagtagctagctagttcctagctgtgagagtctgtgacgaagaagtgcaatcaatttaggaactgtaaatttgatcctagtactagtaattaacctttaatttaggtgctactcgacctcctcatgataagaacaataatgtagcgttttgattttgacctggtcgaatttattagtaaggaggatcatcgatcatgcgtggcgtctgtctcgtcgtcgtcgtccacgtctgggttgtcttaagtggaccttaacaaaaagcccaccgagccgccgcgccccgggccattgccacgcggggccccggcccggccgcaaccattgccaaatatgttggttttaaagg

SEQ ID NO: 1141 - DNA, 846 bp, Zea mays
ccgtcccggggaccctctaatagctgtagcagtcgacctgcaggttgttccacagcggtttaatatataggaattaattgtcaagattacctaaaacatactatacaccatcaagagaactacaagagttaatgcttaagtcaatccatagccattaagtgtatcatggtgggaagtatttctcagcttgtcaactttagccgagttgaaaggacaatataagagaaacacttctctgcaaagcaaagctacaccctagttagttctgcatttgcaacaggacaagataaacagaaaatgtgaaattttgatgcacaaaatcagcattaataaaaaatggtataaggacattaatatttttgatacatagtagtactgtaaagtagaagttctgagggctggtgagctacaggttcttctacagcctaagcttctgggctaagttatgctactcctgggttaccaaattcatgcagagaacacaatccttaaaagaaaactaacttcttaccaagagtcatgaccttcgccagtttttggttgagacaaatcagcacttgtgtcccatattttcaacgtttggtcatcactaaataacaagtgtatgacattagtaactactctagggtaaaccccagcagaagagaaacattaatgaaagaacagtcaaacaaacctgcatgtgaccatcctgtcaccctttaagggttaaaggattaatgcccaatactgtttgatgaatgacccacttggattaaagaaaaatgcaaacctatcaaaacaatgcaatagtgccaagttgataaaaacactgaaaactagaaacaaaaaaaattgggtttcttg

SEQ ID NO: 1142 - DNA, 775 bp, Zea mays
gggaccctctagagtcgtcctgcagcactcaccacgcgcagagtcacaggtctgcccccccacccccaccctctctggctctctgcccccagtgcagcgcagccgggcgtggccccaccatcctccctgatctctgcactgcactgagtgtggtcgtcgtggatggatggatggatgcatgcatgggcttcggccttcgtcggtcggccgcgctggggccctttacccctttcatcggctggtgctgacccggcccacgccattgcatctacatttttacacaccgttgcaaaagccccccgtttccgttgagtactgtagtttacacaaacagcgttttcgcctactttcctcccccggctgcacatttcattacgaaaaacaaataagtttagcttgccacaaagaaaaaaaaaggcgggcgtaggaaggatcgtccgtgcgttttcgctcctttcgggcggacgcacgccagacgagcatatcatctacacgagccggttaatatgaatttggatagagttaatcgtaaccatacgtctatctgtgtccttgatcggagctatctcaaccgctggatgcatcccagacacacgacgccatataaatagattaaggagctagctggtttagataatatgatatagcaacctatatactggagccatattcttattttgcacactatttcttacaatatatttcctaaataacattgatctatttcctaataaatatgatataggggcttaactgttagagctgcaaacatttt

SEQ ID NO: 1143 - DNA, 752 bp, Zea mays
agcaggtgctgctcgttctgtggcgaacacatcactggaagccgccggaaccttgacgacgaagaagaaccgagctgatccaaatggccgcagtactgatgatcatcgtgcaaagtgccgttgatgccatggaccttgatgttctcctgctagtagcaaaccgatcgaaaaactaactgatcacacaaaggattatctagtagtacgtacttaactattggtgcacaaaagattatcatcatacttgcattggtgcagtaagtatcgaaatccggttatttatcaagtgctttttgtcggacactcggcaaacaaatctttaccgagcaccgcacgtggcaaagttctactcacagtaatgaccacgtttatctagagtaggacactcggcatagacagacactcatcaaatacctcttttgccgagtgtcaaacctcggctaacggcgacgctcgacaaaaggaccgtctctatagctgacagtcgttatctttgtcgagcgcccgggtgttatcactcggtaaagaaattgtttctggtagtgagtatgtagttagctaaaataacgtcagtaattaaaactccaaacgatgacgatgctgtaaactcgtcttcttcacacacagaacgcacttacgaaacgtatagcaagcaaatgctcgtacgtacggcctgattatttttctacgtcgtcctagatagcagtacgtgttgcaaacgcggacatggaagtgactcgtgcatgcgtcgt

SEQ ID NO: 1144 - DNA, 655 bp, Zea mays
tttccagaaaatatgtggtttgggaaggtaatcttgtcgatccattctgtagaatcaatatgtgttagcaaaaaaggagtacttggatgtgcgatgaacaacattcatcatgaagtgtgatttgatctgccagataatgtcttcttacttgacactaatgtactcaaatacaactattgtgggaactgtggcctgttgccagatggcaagtactgcacgtttatgatcagcttgccagggtttgggcagtagaattggtgttggtgttaactgattgtagtacagagtacacagatatttgcggtcagtgggtaagcacgtacctgtgttatgtgaggtctcgtgtgtgtgtgtgtgtacacatagctatgttcatttcttaacatactctcaaaaaactgttgtactctagcaactttcttccagtctgaacactgaacttggattctcaggccaaaaatctatgctaactctacataaaccttgatgccttctttaaaacttccaatttttcttggttagtgctaatcatgcctattgcatgactggccacaattcctagcgatttattcaatggtgttgtaacgtcttactgtttgaagtatctaaatcttgtttttttacatatttacaattcattcaagtatccttgttg

SEQ ID NO: 1145 - DNA, 692 bp, Zea mays
  unsure (1)..(692): unsure at all n locations
gacctcgcagaggaggggcccgacggagctctgtttgttgcggggatcagaagatgattttgctcggcatgcatgggcggttctgacgccacatagcgccgagatgtgtgttactgctcacacgcttcgcggcacgcacgtcctgtctgaacgtgagcggcagggcccggggtggcctgctgctggtggtcacagattcagcgtatatatgcactgaatgtaacgacgtccagtgacgttagtgcccttcatgaacgaacatacccgaccctcccaccagagatctttttgagacgtgagcggtggtcgcattaaaggctgttcttgtacagcactagtacaaagcttcataaccgttttctgggggggtctggattaaacaatctccgtaacagatgtcctcaatttgtccaataacttagacaagcaatcccaataaaacagtggcgtgcgtgcgtgtcctttgatccaggccttgctaagcttaaccgggacaagcgaatccagggcaggtgctatgctacctagctagctaggcgacgcccatctcggttcttggaaaccagcacgcacatgtaccccgcgtttactcacccaacgtgcagggccgcgccacactgggctgtccaattatgtgcaggccngcgaacgtagtggacgaaagcccggggccgcagcgcctgatgctatac

SEQ ID NO: 1146 - DNA, 521 bp, Zea mays
cggtatgaagaacttggcaccagctggtggtgtcacggatggagcagctggtttgttatatgatggcaccgctccagaagcacctgatttattgaatgtgtcaacatatctaaaatgaaaaacagaaagccatcaggtttccagataataccttggatagcaatatagaaaatataattaaaagtagtaaacgacactgctactgttgaattacctggatcggacacccatccgcccacgagaagaaaactggttttggctaggtggaattggtggcatacccagaccttgctctgacgcccagaggatttccattctgtgactccactgggagcatggcctacgctcatgtggccattcaacttatggtctggcataccattctggaaagatgattttgttggagggggagaaatagtacccttcattaaatagtattcttggtgttaattttaactcaccctttttcttaattctattctcaagtaagatgtagactcccttactcatccttactcacc

SEQ ID NO: 1147 - DNA, 491 bp, Zea mays
catgcccgacaagaccgtctgcgagaagcactatgtccaggccaagaagcgctccgcctcctccgcgctccgcgcctcgctccgccgttcctcagcctcctccctcgcgcccgtcttcccattctcctcctccccctcctccgccgctcgcctccgcgccgccgacgaggacccgcccatggcggtcgcgaggcccctctacggcagggtcgccggggaggcggtgtacgtggctgaaccggtgccggcgcccgcgcggagggaggtcgcctacgaagggctgcctcggggcaatgcggctggtggcaggaccgcggcggtgagttcgcctgccctcgtagctgcggcgcgctgccttcgttctatggccacgtgctcaattgggttcctgtgctactgagctcgtggtgattgcgtgcctatgattgcaggggctggtcggcagaggcccactatggtttcctggtggcggctctgaagggataaggagt

SEQ ID NO: 1148 - DNA, 520 bp, Zea mays
accttaatttaattgtcgacaagatgaagtttcaataaaaagaactgtatcgttttatttatttttttgctctactgtgctaatattgtgcatcactgcactggttcaacagtatgctgcttcagtatttttgttctgtaatgctatatgtattttgtgacagttgtttcttagcaaaactgctattagtagaagtaattattgtactaaagtttgattaacttagtagtgctctctccatttcataatgtgtaaggcatattagatttcctttaagaaataaatgaccttcgaatagtaaaaatacatgtagattcatatttcacatgtttttttagtaattgagaatgatttcaagataaattaatggtgaaagtataccttgaaagacttctccaaatcctaatatgcattgtaaaatgaaaatggacacaatagtttaccacaggacaaactgtccacctggaatttaaaggtacaaatattgttagtttctaaagggttgtttttatggtaattc

SEQ ID NO: 1149 - DNA, 523 bp, Zea mays
gacgccgacgccccgaccgaggtcaaaaaaggaggtgacccagcccccgcatctgcatgcggatcctcctcctgggtacggaaatccagggaaacccatattcttcgggcctcgccctcgtttcacgcccgtcctactactactgtttgcgagtgcgcgccgtcgatgcgttgcttgctctctcagtctctctactctactactccgactccgatgccggcccgtcgtcactgtttcacgtggttggtttgttgggtcaaagtcaatccgccccggccggtttgtcaaacgctcctgacacgggtacacgtacgcgcctcggctgtgcctgttttcttttttttttataaaaaaacgtttggggagcgtgcagaggtactctaaattcctgttacaaacaaacaaacaaacaaagggacaacaaaaaaaaaaatacacggcgctcgagtgcgggctcgtcgtgcttcacgcatggtaggacgccgcatagtggctggtttgtccgtgtatctgattggctaca

SEQ ID NO: 1150 - DNA, 707 bp, Zea mays
gtagaaagtttggtgcacacgctcaatcatctagtgccattagtgacacactcaaaaagcaagcaaaaatgtttatgaaaaaaatacttcgataatactaacttttctctgactcgtgtggctaaacatttaagagttgcatgcttacgatgagataataatgtgtgttcttggtgtagctattttacgcacaccagacacatgacttattctcacaatcactataggttttatccgagcagtcgagcaccgagctatttggtgtacgttagatgtccctcttcgtaaaacaagttattcagctctaacattaatgtgttcgatgctgacactggaaatcacatcggatatggaactcagataacatgaaaatcaagtatttcagctttaacaagcattgggcatgtctgggacatggaactcagataacatgaaaatcaagtatttcagctttaataagcattaggcatgtctagtgacatgtctaatgtaagcaccgaatgtctaacacataataactagttttgagccattgcaaatatgtccggtgcagactacgaatgtgcaccaaatatatctaatgcccttccccctatagtcctcgcataagggagtaagagttagatttctttggaatctataatctatactactctattaatttagtaacgtcagcgtccacactccgtagcccgctcgcgtgcctc

SEQ ID NO: 1151 - DNA, 491 bp, Zea mays
ctgaatctgtcttgcaaattgcaaacgcaaggtcagagctgaggcctgagggcatgaccgcagaatccagttgcgagcagacacctcgcggcgagcaaccgtcgcccaccagattgcttgccgaagtcgacgcccaccagatcgcttgtttgctcaagtcgacgcccatcgaattcatgtaactcactcaagtcatagttcacgcacccttcaaaatcctttttttttctttgcgtttaggtgggagacgaagtctcgagcttgcaggtcgtgggctcatggccggtcgatgtcggcccgcctttattttaggtgccagccttgcagtcgatatgaaagcatcgcttacttttatggccatctgactactgaaatctgaccacagctcatgttcactgttcatggtacacggaaatcaaattgcaacgatacttgcaagctgcgcttttcaactcgttcttgcagcgtcgtccctagttaatggaaaactc

SEQ ID NO: 1152 - DNA, 758 bp, Zea mays
ataagcttccaagagttcaagaacaagttactagaacctggtttagttgatcgcattgttgtttcaaataaatcagtagcgaaggtctacatcaggagttcacctcatccaaagagccaaggccaagatagtgatatccatattactaccactgatgctccaggcaagcctgctcccagcagatgcaagtattacttcaatattggtagtgttgatttgtttgaagagaagttagaggaagcccaggaagctttgggaatagatccacatgattttgtcccagtaacttatgttgctgaagtaaattggttccaagaagttatgaggtttgccccaacagcattgattgttggtctattatatttcacgggaaaaaggatgcagagtggtttcaatattggaggtggtgctggcaaaggaagaggaggtattttcaacattggaaaagctacagtgatgaagatggacaagaactccaaaaataaggtttgttattacttttcttatgttactcaatgtttgacttggttctatatttgatggatgataaaaataatctggcccaacacccaaatgattttgtgcacaggctaattcttgacctctgatgactccaattgcttaattttgttgtagcttcatttgcccttttcttaagaaacaaagcatactacatgaaattcgaagatttgccttttcatcaatgtctacttttctgctgggccaggtgttttttaaagaagtagccggttgtgacg

SEQ ID NO: 1153 - DNA, 251 bp, Zea mays
tgcccgcagttgtacaaattcgagattgcgatatgacaaggacaataggcccgatgataggtagggacaggtagaacgtacatgtaagatctaccactaccttgagctataaaagggagcccggacttgagtttggggggtgggtggtcagattagggggctgccaggtgagtactttgcattatttacatggtgattagctaaaaaaatatagtggctcctatggaattaggggagcattttgggggggg

SEQ ID NO: 1154 - DNA, 779 bp, Zea mays
  unsure (1)..(779): unsure at all n locations
agccaggtgcagcgaatgatgatatcgacgacgatggcgctggcacccctccatcaaacaatgtgaaaaaacagaagacaacattgtcaggagaagctgccaacgatgagggaaatcatccgactcagaatccggcttctggtggcctggaaggtgattctgatctcaatgctgttccgtcttcaaaattttttgaagaaccatgtggagatgcctacattgatgcaagaccagatgacggtggcccaaattcagtagatgcgaaaccgggcagcacagctgacgacaacacggcactccctgggaacaccggcatggacgctaccaccccaccatgaataaagaacgtatcatggttcaatcagctagagatttgctgaagggtcagcgtaggtaacttgtgcagaaaccgtatctcatctgcgttgttcttatcgctacagttggctagtattaggagagtttgattcatttttagtgttgcttctcttcccctcgaagctgacagtaatgtaaactagaaatgctaagatgggggtttttcagcatacctcgttcttgtttatagtgaagttgccatgttatactttcagcgggattatattatcaccatcttatagttcttttttttacatgcgattatcttagggtggcctgtgggtatattgtttgtaaacaggcaactttctttcagatgttgattaccgattggtcttatgtgtgatgtggggtcgtgcctggatggnacgaaatggcgctgccgaatatgaatgattcct

SEQ ID NO: 1155 - DNA, 863 bp, Zea mays
taggtgacaaaaacaattctaatatcaataggaggtggcttgataatttcagaaatcttatcaatgaattggagctcaaagttgtcaccttgaagggaaggaaatttacctggtcaagccagagggaaaatcctactcttgttaaatcagatcatgttttttgttcagctagttgggaggatctgtttcctgaccatgttctgtccagttctgcttcagaatcctctgaccactgcccgctaattctcaagttgcatgaggatttcaagggaaagtgcagattccattatgaaagcttttgggagaaattgcccggtttcttagaggaagtggcagcctcctggattcaacctactcctccagtatgtcctttgaagagattctccctaaagctaagacgtttggccagaaagttagtcatggggacagaggaaggttggcagtgtcagaacccaattggggctggcaagagaggttttacataggctggaaatggctcaagacagcaagctgttgtcaggaaaatgagtcttggctgctgctaaaaactgacaccggcacctcctttggttcttcgctttcctttggaaagaaacccattgccttcagattaaaaaatcccctatggtcccattttttttggatatggattgggtcgattgccccacccacccacgcttttccttttctcctattagcaacagcttcgtcctatatcggattgctatgagtaatcaatccttcattattctaaattcccttcatcgaactataggtctttcaatttcttgacttcacgttttattcgcattcttttatgaagtactccaggcgttctactctcctgtaccctttttccaacc

SEQ ID NO: 1156 - DNA, 817 bp, Zea mays
  unsure (1)..(817): unsure at all n locations
ataaatagtcccaaaaaaagtaataacacggttttggctatactaaggttttcggaacagtgttttacaaagttcaactaaacatcttttggtctagaatactacagtatgctcaaatactatagtattgtattgaaaacgtaaataaaccttgctaccaaacagaccctgagcttccaaacggagccttaatcacttgttcttcgagtgtcgtacgtataaaccaagtttgtgcaagatcgaccaaactcttttcacccagttttggaatacggaaagacaagagacaatgtgtgtgttttgaagagaagatatatatagtgaatgcatctactagaatcatgttgcctgttctgtacgttccatgccgatgtattgagcagattgcaaaaggatcggatgttatctcgccacagagatgcatggagcagcatggcacagaaaggcgcgtcaagggagacgacgcctcactttcatcagtgagagcggatggacggaggtgcccatgtggtggccacaccgtgtgaagatgaagctagcggcgtaccatgcatgctgtcgggatgcttttgttgggaacctgagcacaaactgcacgcggtttgttaggctgagctgggtttggaggaatggatgctctgtgttgttaccatgcatgcatggacgcttttgtagtgaaggtgttcggngttgcgccttttggatggatccttcttctgtgttagttattaattccaaagggatgcaccccaccatgcattgctggcgacatcgcgtagtgtatgaaccgccgcgatcgcccggtcgtcgctactac

SEQ ID NO: 1157 - DNA, 764 bp, Zea mays
aacgtgcgcgccgaggaggagcgcgggatgcggccgctgtcggagctggccgagggcctgggcatgcgctacgtgttcgccgagagctgggcgccccagtacggcaacgccgtgctctcccgctggcccatcaagcgctggaaggcgcaccgcgtcgccgaccagtcggacttccggtcagtccacctctcccctcccctcccttcccctcccccatcatcactgcctaccaacccgcccctagctgctcctgctgcgtgccgtgtgcgcctcgaaggggttcattcagcgctaatggaatgaattccatttacgccacgcaacaaacttaaccaacttatcaccgggatagtaatgaccgcagcatccgttgaatctcccgtacgaaagaacaggatatagagcagcaacatgggattcagttgtcctgtgacggcctgaatcgaccgcagcccccgtgacacatcacatgccagagccggcgcgaggagcatgcaatcccagaccccaccctgacagtgtctccaactcgtcgtcgtcggcgctgcctggctctgattgccgccactcagagatactctgctcagacatgacagctgggaccgattcatcagcgtcagcattttactggttcttctggggccctggcgggccctctctctctctctctctctctacaactctattaaataaataaataaatggtttcttctttctacaatggggccgagatggagagagagaaagagctcacgaccaaatga

SEQ ID NO: 1158 - DNA, 857 bp, Zea mays
gtataacagcagttttggattgtactttgtaaaatccatattttaatttactttattcaaaactaggtcccaaatgttatgatatgcttagatgtagatgtatatacatgatgagtggatattgacaaacatgtctgcttcagcacaacattattattagattcaagaaacataggatattaagcacgcctattaaatttccagcccctctaaattcaagagattttagatgataggataacaggattccaaatatttctagccaaatctaatattagaatccctgtttcaacggcgtcacctaggcgtccaggcagacccagtactcgcctggatgcttagtccgttagtcgcctttgaaaccatgatcaaaatgtattttaaggttctttgttgaattattgatatatagtatatttaatgtgtttacaattttgggacactggatcccaattcccaacaaccccttgttcctgtcctctattgtttacatttttctattcctactgggtgctgactgcggaggcctgagttaagcccctccttcaatcttgaatgaaagggctgcttttgttttaaacctgtgtgtcttatattcttactactcgtaattgtttgaactactgatccagtccttttttttgctggcactgttaatataatcaagtcaatgcttatatcctatttatgttcccatcagcagaaactcacaatttaattttcttaagaagctcattattttattcatgcttttgttttgaattcatcatgtttgttgctgtcttgctgagaatgttatttaccttctagcccactgtcttggtagataatgcaatcaaacatttcaattatctttt

SEQ ID NO: 1159 - DNA, 774 bp, Zea mays
caaactgggtctcactgtctctggctgtctatctttagtctgccggcattctcgaggaatagtgaaacaactgctcggttctagagtaacagagaaaggcttattgcgattttatcttatattttgtgctttataactcttgatccggtctgtgccatccattggtcaaaccaggcctgccagttagctagagaaacaggcagccaatatattgattgaggaaggtctgattttgtcagctttgaagttctattccataactactccagttttgctatagcccccacctatcaatagtgttcttgaatgacctgacctctttatgaacacatgagcttcttggcttgacaattacttgtcttattatgcgcttcaggatgggagccgcagaatatgcaagttctgaatgtactgggcaagctttcgcccagtaatcctccatgatctccgactcagcagcaccattcagtgaacgcacaggccatatgagcggtctgctggccatagccttctgtctccaccatattattcacaacccgtgcaattgtgatctcaaaagtctaaccggatcggaggaaagagaagtgtgttggaccagcgaacactgccggaaatgtttatgcaactgcttcaaaataaagattgtgttggcgtggatacagacagtaccattatattattgcggatactgcgtctcgtttaatttttcacggggacattaggtaccaaataagaatgagatcggtgggaatctgaccattttaagcagtcgaa

SEQ ID NO: 1160 - DNA, 765 bp, Zea mays
aagcgaggaggtgcgagcggaggaggatcgccgggatcgccatactaggttgtccagggcgtcggcccctagggtagctggccctcgactacggagattgtagtctcggtccgtgttctccggcgaggttaatcacctctgccgcaggcttgttagaaactaggaagaggggattaaacatgtaacaaattacttgattattccttgctgccatgcggcttacatatagccctgttgctaacaaactcttcctaaaaactctcatctaatcttggacttatctaactaactctccttaattctctcatctaaatcttattctctggacttatccaaaccgactcctaatcagcccctggctgttggcgcccccttgtggtctgtgcgctcgtccgccctgcgcacgtcacgggcgtgcctgagtctgctgtaggtccggccccacatgacaaatatatattactaaaccaaaactctgatggctgagattgctatgaatatcttgcccatccacaggtaccgaatctccgatggccatacattcaaaaaaaatcaactatacatgggaatcttcagacagacacaatcacatttttatattggtccgtcctcgccccagcgctcgggcaaggccgtgatgttgtctggtcccgcctatgatgggtcgttggggacgtctgttctgtcctcgccccaacatgcgaggctgaccaacgatgcccagtgcaggaagacgggggatggttatttggtgtattgaaggag

SEQ ID NO: 1161 - DNA, 796 bp, Zea mays
  unsure (1)..(796): unsure at all n locations
gcaggaacgtgatgctgagaagatgaaaaatgggtgctctattatgaccgatgcttggtcagataggaagaggagaagcataatgaatatatgcactaattgtgctgatggaacctccttcatcagctcaaaagagatgtcagatgtgtcacacacaagcgaagtcatttttgaattagtggacaaagcaattgaagacattggtgaagaaaatgtggtgcaagtagtcactgacaatgcctctaacaacatgggagcaaagaagctattgcttgagaagagaccacaaatattttggacctcttgtgcagctcacacaatcaacttgatgctccaaggaattggcaaattgcctcggttcaggaaagtgattgaccaagcaaagtcatttaccatatttgtgtatggccacacaagaacattggagtgcttgagatacttcacagaggggaaagagctagtgaggccaggagtgactaggtttgcttcatactttctcactttgaacagtatgcaagagaagaaggaccagttaaggaagatggtagttcatagcaggtgggactcattaaaggatgtgaaatcaaagaaaggaaaagaggccacagctactatattgagtccagccttttggaaggatgtgaagctaatgttggctgtttttgagccattggntcaagtccctccgtttggttgatggggatgtgaaagccatccatgggtttcctttatggagagctactaaaggcaaaaagagagatcaaagaggccttttgcaatgttgagtctcgattca

SEQ ID NO: 1162 - DNA, 800 bp, Zea mays
ttggcctgcagttgccaacttgacctaagagggggcaggcaatcctgctcgaccttgccctgagcgcccttgagtagaaggcgagggaagagcagacatcgaaaagggatggtgtgggtggcagtgagagttggtgcacgacagagataggtgccacagccagcggagaagggcaagtagagagggctcggccaatgcatgaatgcagagtgaataaggagagtaggtattttgctccgtgagttcagtccaaacacagtgaatcaatttgcacaattcacaggtggagcttgagcagccagcagtgtttggtagtgctcctcagtttctagttggaatgttggcttaggagcactatgaggctatctccagcagcttactcatcctcatcttctatttgaaactacataatgtaaacagtgcagtctacaatgttttgcacgggcgtatgcacaacctgctgactatagcctgaaatggcccctaatgtgcttacatgcatatactagtatatttccttacagcaactccaatgcaggggggggggggcagcatggtttgaatttatacactggggaaataactgccgaaaacttaaaaactgagcccatggtttaagttttgaatagagggccaaaaaacaaaatgggaccaagctggccagaaagcccaggaacacagggaaaacagcacccttagaaagttaaagcctaagagcacttttttttcatattttttttggacatgggcccactaaaccgatttggagttttagagctgattgctttttcattaacttt

SEQ ID NO: 1163 - DNA, 753 bp, Zea mays
gcgattcatgctcgggtttatgtctctggttatgcagctgatatttcaatttggaacacgttggtaaacctgtatgcaagatgtggaagaagtgaagaagctttctctttgtttcgggaaattgaacacaaggatgagatcacatggaatggattgatatcaggttttggacaaagtcgtctttatgaacaagctctcatggtattcatgaagatgggtcaagcaggtgccaagtacaatgtgttcacatttatttccgctattagcgctttagctaaccttgcagatataaaacaaggagaacaagtacatggtagagctgttaagacagggcacacctctgaaactgaagttgccaatgctttgatttcactatatggaaagtgtggcagtattgaagatgccaagatgatcttttctgaaatgtcactgaggaatgaggtttcatggaatactatcataacaagttgttcacagcatggacgtggactagaagctttggatttatttgatcagatgaagcaagaaggtctgaaaccaaatgatgtcaccttcataggtgttttagctgcttgcagtcatgtgggtttggttgaggaaggccttagttacttcaaatccatgtctaatgtgtatggacttaatccaatacctgaccattatgcctgtgttgtggatattcttggacgtgcaggccaacttgaccgtgcaaggagattttgtgatgaaatgcccatcactgctaatgcaata

SEQ ID NO: 1164 - DNA, 752 bp, Zea mays
caatgagaccaccctcggataactacctatttgatagtgacaactgagaacacaaacagcatgaacattcatcaaataacttatgaataggataaagcgtgatcaatgggcaacaatttcagctagaagtcctatctctgtagcaatgcctcccaaaactgcacatccagtaccagaacatgaaaagcctacgagggaagtaaatttttaaagaccattgacagcaaaagtttcgaacaacattgacagcaaaccaagggaatcctgaacagtttataacttattgctcatgcagaaccagaatctaactcaggctcctccgaccatacaatccagttgctgtacaagtagagaatcaccatcccaaatgtgtaaggaacaagaaatttaagagtaccaataaaatagaggtagagccaaatgatgttctccagatgcaataaacttcagtccagtcaaagcttcaatccacctccaaaatgtttaaatctacctccaaaacaccacctgatcctgctaataacatttttctaattaaggacgatcaagcttcaaattaatctggtggcaatcttcacccaccattgatagacatcagaacagccatataacatatcaaaaacaacgaacatagtcaaacctccaaccttcagctgacctctccataaccagcaaggtacttttgcatctaggacgaactccgagtctcctaaaagtgcagatttactaaacaatggaagcctatgaggaaa

SEQ ID NO: 1165 - DNA, 806 bp, Zea mays
agatgcatggccctagctggaaaaaggccatccatccctctcagggcaaccaaccaaccaaccactaaccagcaccgccaacctctctgtctctctctcactctcactctctacataggattacacttaagcaatgttgctaacaacactgctaactaagggtggtagtaataaacgacataattaacaggcaggacacacacacatatatatatatatagcggcaaggcgacgtgacggcggtggagtccgtccgacatctgtgcatgcaggtccgttacgcgagcggcgccctatggggcgcgcccttccgcctgttgccgagcgagaggacgatctgagggaagaaccctcctccgcccccgccgctcttcttcttcctcgtcgggacgtcgacgtcgcgccgcgcgtggttcctggccgagccgccgttgctggatcctccgctggcgctggcgctgcccccgtgctcgacggggtcttcgaggatggagctgggcgtggcctgcccgtactgcccggggtcgtcgtcgaagcggaggttctcgaagcgcgggaagccgcagcccaggtccggcggcccgcccggcacgtacaggaggatgttggacaggtccccgccctgcatcatcacatggtccacctgcatgcgtgcgtgcgtgcagcccacagctgggtttagcgtacagtaaccacggaaacggggccgtatctaatctaagcgtgcatgggcgtgcgtgtgcatgcaaacgtactactgccagtgaagcgacgtacggcttgataataaactactaacgtacgtg

SEQ ID NO: 1166 - DNA, 764 bp, Zea mays
aagacataactacatataatttctattgttatcttttgggggtaccatgtgcactaacacatactgcattcgtggatctgtttattatattgtgcaggttaagaaaaagttggtgaatctgggtcatgcacagaggtacgtcgtgatttgctaatatgttattttaagaaaagggcagacccggtatcgaaggctcccatgtgagtggggtttggggagagaaaccgaggcaagtcttcctccacaaatgtggagaggctgcttcgaatcagcgactggtgcctcagtgagacagctctcaccaccgcaccaggcgtgctcttcgtttactaatctgctatttaataaagcacaatgaacagactaccatctttatgttcaaatcgaaaatagtgaggaatcacttcatttgctgattttaagttcctggcctaatctaaatgttagttttttaaggctttgaattccatacgaatattgggaataatctgaaaaatgtcattttttattcttatatggaagttaggaaatatgcaaatatgacaaactggggtgaactgcaagtcctgtgctactatgatctaaatggttacatttttaccagtttatatttctcaagattttttttcttcgtttgatgagttggtcagtgtccatgatcctcaagctaagctgttcttatattctcatctccagtttggctgatgtctatgttcacctgtagattagtttacttaattgggaggtatgattatatgccttat

SEQ ID NO: 1167 - DNA, 812 bp, Zea mays
cctgcagtcctcttccgttgcagacggtgaggaatccttcctgcgcttgttacaggtggctgtgatctccatgccatccccagaactgtgattggatggttgtgtcgagaggttaaggccagaaccgttcagcaacttcttgtggtgtccatgtgaactgctctttgcaggagccgcggttgctggcctctcgagctcaaagtctgtgctcggcagattcctccaggactcaaaatcactcgcctcagttgggaccgagaaattggcatccctcccagtgagctccatccacctctttaaatcagcctcaggtacacccgccaaatttggcgccctcacgatttcgatcccatgaagacactgcgggttagagaggccacggtagtgcttgcgctgcatccggtgtgagcgcacaaaccctttgtctgcgctgaatgggaactgtggctccccaaggcgtgagtgcccattcatgaagctcctcagctgcatcttccccagggcattctccggacgctccttaaacacccacatgtagatgttctccatgtcgtgctgcaccaggaaagcgtccagtgtggcgctattgccgttcccgccggtggtggtggctgccttcgctttgccagccttgtccccagacatgactggcttgaagtagtgggtgaagaagaaccacgctccccagatgctaacatttcctcttgacacacttgcgcgccgcactggaaaccggagccccttggtgttgggacacggccgaccatgggtggtccgctgcttgctgcccgggccccaaacttggcccaacg

SEQ ID NO: 1168 - DNA, 825 bp, Zea mays
ttgcatgcctgcagcgcgccgtggagcgcgcgtccgcgctgctccgcccgcacggcgccgccgtggtggagtacaccagccaggcctacaccaagagcatcccgggccactacgtcatctactgggagctcctggccaagggccccgcgggcggcgccgcggtgggcgaggggacgctggagaggtgctgcctggagatggaggaggcgctgaacacggtgtacaggcagagccgcgtggcggacgggtccatcgggccgctggagatccgggtggtccggccgggcaccttcgaggagctcatggactacgccatctcccgcggcgcgtccatcaaccagtacaaggtgccccggtgcgtgacgttcccgcccatcatcgagctcctggactcccgcgtcgtgtccagccacttcagccccgcgctgccgcactggacccccggccagcgctccgactccgactagacacgcgggccggcgtgcggcgaggcgtgtccggcgcgcttaattagactgggaattcgttccttgcgtatcgcagacgtagaatatgcccgtgaaattaaaatatttgttaattttggaattttgggtactgtcagttagcggctttgagggtaacctgtgatgtgacgagagttggagtcactactgaaggctgagctggtcagctgaagcaacagtcgacgcctgaaggtgttttcccgcagtaatggcactgttgtccctatcactttagtagtacggaggacgcggctaacttaaacgttcttccaaatccaaatccaaatctgtacgagctatgcccctgtgcatgcagaaa

SEQ ID NO: 1169 - DNA, 784 bp, Zea mays
  unsure (1)..(784): unsure at all n locations
agtaaagaaagttcagaagtcagaacatactatgaggcattatgttattatttagacagagcatctcttaactaaaacagctatatataagtaacggaaagcatttcattaaggatatgtatggtacaaatacgaattgactggctatggtatcctggtaaggatacttcccacctcccaccactcatcccacaatacagtaataagattattggccctatgtagtatgaaacattttaggtgtaaactgtgcaaaccaatccaagaatggaggtgggaggacctttttaaaaatatcatattccaaatcaacccttacacctcgcactggatatttttaaaaagatcctcacatctccattcttgtgttggtttacaaggtttgcatcaatagattttttttgtacctgatatattctacatatagtaacccagtattgtaatacagaaaatctatttcctataagagaaatcacgaaaagtaaatgtctgtttttgtgaagtctcacatttaacaaaatctggggaagccgcccacccatataaatcattgccatagcccaaccaagaaagcttccaatttcacttccactgctctggctaagcgatgaatttccatgatcatnctatggcataaaaacaaatttattaaggtgttgttaatcaccattgaagttacagtaaaaatttataccaagataattttaatttcatgtaaaatgaatctgtaaaattattgttcctgtgtcaagcaaccttaagcgccacagggccctgaaaaaaa

SEQ ID NO: 1170 - DNA, 810 bp, Zea mays
gcatgcctgcaggtgcctgcttcagtagagatgctattctctcttggcttgtgattcgatggttttgagattaatcggttctatgttgcgtggcagcttgttgctctctacgtggatttcaagctcgacgagagctacacgcccagcaagatctccatccgggccggggatggcttccacaacctcaaggtatgcttgttctccatgagatattgttttgaaggatgttcaagaacttgtcgggtgtagtagatttaagcaagagttaacatgttgattcgtccgagttgagtacgacagagaatacgagtttcaaagcatgtgaaataatcattctgaggctaagcttgaactgattttataaactgtaactagattgttttttccggtatttcgtgccttctagaagttagatacagttaatatgacctggcatttcctgagagaattgcttctgcattgcaagtactgctgcactgaactatttgtttgaaaatcgaaatgttgagcttactaagtggcaattttgccatcatttgaatatttccataacatatctcatgattccaggagattaaaactgtggagcttgcaaagccagttggatgggttcatatatcattatccggggctgatccacggtatgcattgtaacttgaagatgaatggtagctcccaaaattatgagtatactctccctttatacatgtgggaggacaaaacaaatgtttgtggacaaagcaaatgtgcagacttatgctaacagcccttgtttcttggtttggattgagtctatgggttgaattccaa

SEQ ID NO: 1171 - DNA, 774 bp, Zea mays
aaccgtgcaggtaccattccataacaacatcatcatcctcctccctctggttgtttacgtttacatacggtgccttgcatgcctggtttgtgcaggtggtactggggagttttcaccaaggagggtcgaaatccaagtccaagaaaggcgggaagcagcagcaggcgccggcgccggcggccgccttcagttccgactcgctcaccggcggccaggaggcgtcgcccagctctgggcacaaccaaaatctaacgccgccgccgccgccgccctccgtgacgggagggtggcccacctccgggatgtttgacaccagcattgatatcaactcatctagaggatagctcatttcatttgtcgataattccagccctcgagaaattttctgttctcgcacaagaatgatcgaaaccatacttcgaaatagattattcggtttctcccttttcccttttgagcaagaaaaacggaatttctatagaatttataggcatcggtcagcatatccgattccgacatccccccttcgctctctctggcagtattgggtgtgttaggtttggttgtggagaaattttctatagaatttattggttgtccaattcttctggggaacaactagagacggtcttgttacaacctctgaatccgatctggagatggtcttgtcgcagccctgatcctaaacttaacaaccttatccgacacaccttttgttctcctcttgcatcaaagggaccacgttacatatactccagggcagcaacatgtact

SEQ ID NO: 1172 - DNA, 298 bp, Zea mays
  unsure (1)..(298): unsure at all n locations
agtccaaacactacaatattttgtctctaaagattgtagctgatgcagttcgaagttgaagcgaacaaacaaaacaggacctgaccggttggtcacaggtgacaagtgcatttttttactgcccaaagggtactcccagaagatcaggcaactatagcaattagcttcagtaaacacctacaactgagctacatgaatttagacaggtttcacatcgttctggcaaccgaagttcgacgtgccacactgtcgtggttcaccgttcacccgttgtgctaccaaagtngggggtgcggga

SEQ ID NO: 1173 - DNA, 723 bp, Zea mays
gagatatgtagatcatggttaattaaacatgggtaccttaactgtacaagaagcaagactggaagccttgcatgatttgatccatacataagtaagttcctggttagaacaacgaaatagataaaacatatttagatatttgtgctatgccacctcagtgttggctgtagtttcctagcttagttttagagagaaaaaaagaataatcataactccatgtacctgtgcttctccagttattactagtactagatattatttctaatgtgccagtttaatatttatgttgccaccaggttgcgggtttaatatattccgcatatttgaaaggagggatgtagaccaacaagttcaatctcagcattcttctgcgtctgttgaaaattgtggaagttggcttctttcttgtttccggacaatagatagtccaaagccattacataatgcaggtattgtaatgtataatgtacttcagggtgttttcctagtagcatcactgttgtacaacacccaacttgatttgcactataagggctagtttgacaactccattttctcaagggattcccatttttccaagagaaaagcaactaatttcccttaagaaaatggaaatcccttggaaaaatgaggttgccaaactagccctaagtgttcttttttttgtaatcaacgcccagcttgacattggagtaactttttgttgagcactgtaatctgaac

SEQ ID NO: 1174 - DNA, 673 bp, Zea mays
tcatttactatgtatacaaaataatctcaaatactgtggcacaatactgttagagccaaatgtaggttaattaattctgagcatatgaacaccacatgtaaaatgggccttgaaatactgtgaacgagatactcctatgacaagcaaatacaccataccaggcaaaacttttattgggattgtaagtactggtttaacaaacgatgggctgaaaaatgtgctgttatcagagggcgccattatatcttccagaatatctgtaacaagaaaataaaaatcttaccaatgcaagcatgcatattctgttgatatagtttatacaaattaacagatctaccttgtttgtggccaaggtgcattgaatcattcgcagtatcaccagaaggctgcgagagaggaatttgctcttggcgtgctccatttcgctgcacagttaccacatgtcctgcttctgtttgcgtgaattctgcataagaggtttatacttcttgttacccattttcatcacaggtgtcttaaactaattgtggtgctgcaagtaatgtgggtacgttaatgagtctgacttccttacaattgtgtctaactatataataataccttcttttgggcctaaatgactggtatcagttttaagatcaacaacaggccgtgaaagaagaatttgctcttg

SEQ ID NO: 1175 - DNA, 746 bp, Zea mays
catgcccgcagccacacagtttcttcctcagccattttcgtgagtatattatcaataacttcaagtgtgtcttccaggttcggatcttctgtggccccggtttcggccccggtagcttcggctacgccggtttcagcttcgggggcttccactctggtggcttcggctgcggcgcctttggcttcggcggtctcgacaaaagcaacttttgacactgtcgccgatggcggcgtctgatgaatcacatctgctatctgaataattcttcgtttttcggcagtgcaggaccttcttctgccgaagctgctttgtccttctgaaaaaacttcgtcagttccggcgccagcggacttagcttgacaggcaagggttcagtcattaccttcataatctcttctacatcggtagcagaaggcgttgcaggagtatcttcttctcgaaccaacgtttttggttctggagatgcagtttttctctttcttgcagcagccaccttcggctcagggctcaaattttcaggactcagtttttcagaaatctcctttttctttttggccactttggtgctctcttcgtcaacagcgctggcaattctttttctcttcgggccgccagcatctccgcccaatcgcccatagtcgggatattcgaagcctatagcatcaagtactctgtttagccttcgtttcggccgggtgccgaaggctgctgtcatcaattggtcctcttttttagagtaatttcca

SEQ ID NO: 1176 - DNA, 727 bp, Zea mays
atcgaaatgaaacggtcaaggtatatgcacgagagctcgagatcatacgtgcatcagcgagcatcttggaagggtacccagtcgaagaactctcctcctccgaaaccgtgggcgccctcgcctcccaacgtttcatggccgccttcctcacggcgaagaagacgatgaggccgacagccgagatgacgacaaggatcgccaccacaacgccggccacgaagcctgcctggcctgcgacgctcttcctctccttgccgggcactatcccgacggccaaggcctggttctggcagaacggcgacgggtgctgcgagccgtcgctgtcgtccaggcagttggtggacacgagcaccaccgtgtccggcttcctgtccggcgacctcaggcaggtcggcacgctccccatgaggaggttcagcgacaggtcgacgaaccggaggttgtcgccgcacggcgccttgtcggacagggtcccggtgaacctgttcccggcgatgttcaggtaccggatggacggcagggagagcagcgcgggcgcgaacggcccgacgaagcgggtccacgacacgtcgagccgctccagcaggtagaaggagctcagctccgcggggaggccgccgccgaaccggttcctgccgaggaccacggtgaccaccttcctcccgagcttggggaacgccgggccgagcgagttgccgccgacgtcgagcacctggagggtggcctg

SEQ ID NO: 1177 - DNA, 700 bp, Zea mays
accagcatacaaaaaggtagacagcccaatactgacaagaaacagaaaacagatgtgagtgctgcatttccaacaataataatcgttgaatgtgcattagtgtgggatcatcccagttaaaatgattaccaagtaaaaagaattgaaggaaactggttgcgattcttcagggaggaatagatatttggaaaaaccccatgccctgagtagcagtaaccatataatccaattgcaataggaattcctggggcgttcagtgcagtcccttcattctcaaagccgaaatcattgacaaccccaaccaagaacaggcagatgaccacaaggattgatgcaatgacacccccagctggagacagacaaacaatgctagcatcaatatagtgtgcaatgcaatacatgaatcaggtacaaagagttaaaagaaaaagagaagccggcaaaattgagacctgaaatgtagctcagccagctcaggtcacggagccaggtggttggcatgactatgatggtagtcaagattgcaaaaaatacatgtgagttcagtgtcatgctcccaatggtcaggtgagcattggggaataattttgacaaattgtcaccctccaatatcaaatactcgatgcaacatgcctgtccaatagattaggactaagttatattgttacacttcagaaagcgagaaacggctagggtgttg

SEQ ID NO: 1178 - DNA, 791 bp, Zea mays
attcatggtggccctgtgcaaagttatgaaatataaccacattcatgatgttgttatatctgctgatgccaaaggactgttggaatattggtctccatctaccctcatgtttccagaaaatgagtatgttgtgctgagaaatgatgcatacctgagaatatgtttccatctttcactactgaaaaattcataactggaacaacataccagttgtatatgttcatcacagaaatctgtttaggtgttattatatttagttacatgcaactgttggaagagcataattaatatctaagttttagtcgtgcccttggtcaatttcttgcttgataataacttatctagttgtttctgtgttagagctttatcctattactctgtcagcatattcctgtgatttcctttgtgtcttctacaaatatttctcttgaataattcatcaactcaatcgacattgctgcttgttttgtgcagggtgaggtttcgcctgaaatcagatacaaatctatttgaaattgcgaaatgcaagactactgtgtctgctattgaggtactttcttcatcctagaatgattttcatatcttgtatatttagtaatagaataagtaggcatactattgaatgggaacatgtttgaatgctttgcagaaccataagggtataatcattgacattgtactgctatgcaatatgcttctccttttctttttattggcacagcagttagatggcggtatctgaattgtcgatttgggtacttcattctgactgatgtatatgaataccctga

SEQ ID NO: 1179 - DNA, 776 bp, Zea mays
gtacgtggcagcactactggttcacctgcacgtctcctctcctcacccataagatgatgtcgtcctttgttttatcaatgcagaaacatctaaatctagtgccagcagcggccttccctgttcctctctgtatttgtctatctcctacagcagcagctagcctcttgttggcagcatgagatagagagaggtcatgcagcacaggcgacatgcggtgcgtgtgtaaacagtttggaaaaaaaagagtggtagcggtaaattcgcatctttattacaccctcctttatgagcactgactttaatcaggtctcccttaatgcgctgcaccctgacccacgtacgtcgctcacaaagaggaaatgttctctgaaaagtttcccttggttcgctatgctggtaccctcctcgatcagtcctcacctttgaagttgagcacctttactctcctctgactatatttttgttcctgtttacattatttaggtttcctgctgggagtctttcaagctaggtcttgagtcttgacaaaatgagattatcctgtttatattatctaatacgtatatcgttaatatatgtaacaggatgatccacgcatcttatcatttctctcttgagtctttcctagctatcatgcatgcatgggagcagctttgtcatgcatgtatatatggaacgcagaatcgtccgccactgcttggttagatcaagccagatgtcagcaaataatggaggcaaaatcctgatcaaatcaaggtgggatcttggacagctac

SEQ ID NO: 1180 - DNA, 762 bp, Zea mays
gtgcgagctcatgcccatgtcgtcgtccatggatcggacaccaccgcgccccgtcgtcgtatcaccacagccaccgccgcgcgccgcacctctcctctccacgaggaatgccgccatcatcgactgggacgagaggaggcaagctaggagcaaaggcgctctatgctagattgctatagtgcgagagagatggaggagacgacagaagagaagaaggccccggccctctccctaaagctaattagcttcagactggagcgcacacatgcacgcacatagcgcgccaccttcaaatattcttgctgtggtggtgggcgtgggtcacagactcacagtccagtccggccctctgctctgctgctgtgctctctctctctctctctctctctcatcattatgcatgcatatatgcatggatatctgtgcctgcgtggcttcctgctcctgcacgcactagctccacttggtttttaggaagggctgctcagtggtcacgaggaattccatggcatgtgtatgtgtacatagacacctgctgctgcatgctgttcatggcttgtagtacagtgactgcatgattgtacgtacaataagcgcaccggtgttaattggtcgatacatactccacttcctcgccatgcatgcatgaacataatcgaacgtttaattacacgatatccgtacatgcatatgcatggatcatgtcttaactacatacactagtacaaattgatgcagcggccggccggccagctgaaccct

SEQ ID NO: 1181 - DNA, 761 bp, Zea mays
ttccttctgctggaaatggtcggtgctgagcctgctatcagaaacctccagcgagcttccgatcttctgtttctgccggcggtaccaggagaacgcaaataaaccgcaaaatgcagcaccgatcaccgccgcgacaacagcgacgataagaactccttgggacgcgtttgcggactttgagcagctagcgcctgagcagccgtctggatttgctgattgaggcacctgccttgtcttgacagtaccgtctggtccaaaaggctcgggcttgctgggcttcaggccatcctctgaagaaaggcaaagctctagcaaactgaagccagcgccacaaagccctttgttattcatatactggaagccaccattcagtctcctcaatcctagcatccaacacagaattgtagtggttaaaataccatgaagactaacaaaaaaaagtacaagtttcagaaaggctatgagattattaccaacagggacactcccagaaagggtgttgttgcgaacatcaaagacctcaagcaatggaacctcagcaatcttggatgggattgaaccaaacaggctgttgaagctcaaatcaagccgtctcagctgtgttagctcaccaagggttgccggaatggctccatcaagctgattagactgcatcgcgagcacggttagcttattcaggttgcccagctggggaggtatgctgcctgtcaactgattgtaaccaagctgcaacactgcaaaagggtaagtgagagaactat

SEQ ID NO: 1182 - DNA, 704 bp, Zea mays
cttatcatttcgcttgcgggtgtgaggcaatgaagttaactgcaactttgatggtgtccatcttgtcatcagcttcattgtcaggtatctcgaatctgaattcatcttccaagtccatgacaagctccaccgcgtccaaactgtctaggccaagatcattcttgaaatgggcatctggcgtcaactgcaactttgatggactccatactacactgtactatgtgctatttcatatgcatgcaaatgaatatttctctttttttttgcataatatatgctacattatatgggaaaaggctaaaaatacagtataacagaagttcatctcatgatgaaactattatattaatattaagtgctgactttcacgtcttcacccttgctatagcaccttgaaatattgatatgctaggcaacttgaaagcctgactgcctggattaatttaaatgcatgatttctcatgttctgcacaagtgtctgcgaacgccggcgccgtcgtgttccacccgtccctgttcgatggagaacaagcttctgagttgtcgtagaccgccgggtacagagaagggtaaatctatcagcttttaaactctgttaaatttgttttttatttctgttaaataatcaaatggtatttaagtgtgggtgtttcagttgataatggcacttggacgaaacccttatatttgatggtaatttggcc

SEQ ID NO: 1183 - DNA, 784 bp, Zea mays
attatacagttcctcggaactgcaagaacacgtgagtcgccaatccgttcttattcacttcctgttcttcaatgtaatccggaacgccatctcctcttacactatggtatgtcgtttccatgaggtatataattgcattaaggatatcttgctgcccttttccattgtagataaagagtgtcatcgttaataaagagcgtctcaatcttcagaagatcatacaattcttgattttgggctgctgactatgacgttgctgaactcaataaaacaaacgatgtctcaagaaagacaggcgatctgaaatcaagctgtgggccatacaaattcaactttaagccctgagagaggtcagagttaatttctgtcttgtatgaagtgtagcattgcttaggctgcttactatgacgacgttgctattgaattattttaatttatgtcttttaccagaaaacaaccgtaacaaataacggtatttcaaacaaagtaacaagaaggatttttagtttccataaaatattgccagatacagttacgagttattctgatggttttcagttcttgagaaaaaaattaggtcagacataaaacttttgctggaagattgaaattaaaaagcttagtgcgtacaagaaggcaagagaagacactagtaaagtactgtcactgcgagagccgccaggtcgaactaattacaaaggtggacttttacattagtttacttcaggacactgcaaatctacgttactactgccttcaacaaaacgtgtgacatgacttaatt

SEQ ID NO: 1184 - DNA, 585 bp, Zea mays
atgcggtatttgtaacttgagtgattatgatcctgatatcagccaattcactgagaagaccatagtgtactgtgatcagtgtgaacgggaatgtatgcttatttcaacaattatctataaaatgttccagattttttattgtgattgctgatttcgttcactttcttttggtagatcatgtcggttgcactagaaatagtgaccatcagcttatctgccgaccagaaggttgttggttttgcagcaggggatgctcaaatgtatgatattacttaataaaaaatgctaccttttacctgaaatgactttcgaatataatttgaactcattctcattatgatgtctttcagacacaccaaatgattgattctggtgtcccattctatcgtgcaggtatttcaacatttgcaagaagtcattgggaaacaagttccaactccaatcgaaggcttatcttgcactatcttgaaattttgtagagcgaacggcagtgaccatggcggttatgatgatgagataatggcagagcattatggcaagttgtgcattgcagttgatattcttcatgaatgctttgttactata

SEQ ID NO: 1185 - DNA, 798 bp, Zea mays
atcttgcatgcctgcagaaacgttggcaaaatgtaaaaaaatccgctacagctggttttctataggtcacatgtaaggttactaacgtcaaccttaaaacaatttgctgctccactgaatgtgcaactgtgcatggcgatactaataactatacagcaatcaaatcataaagaaagagaaaaacttggacgaacctcaagtgctttgcagactttatcgacctcgcaggcatagtttatcttctttgatgtcattataagttcaacaacagcgatacacgagtgagcggaaggatcaaaaacaggcagagcgactgtaccatggacgttgtagctgatcgcatggttaagtcgttggtactcaccactgctatagtactgcacattcggtgtccactcgggcaccttttgcttatagacacgcccaggtaggcccaggtctccaacattttccgcatcaactgaaaacatgtaggtcatggatacagccctgtactgaagtaggccaatgctctggtggtcaagcacgaaaggctgtcctgaagtagtgagcacatagcggtctccattcttgactggtgcccagacttggaccagcagatgttgatcggtggactccttgaagtagcgaagagcgtgtgtcagcttctccttgaacaagctggagttgactgtgccatcttcgtccagggacagatgaaactgccatctgtgactgatctgttcagctggcttgcttgaagtgtgagaattccctgggtgaaagaagcaagattgtaaggcgaggaacgggatgctg

SEQ ID NO: 1186 - DNA, 794 bp, Zea mays
  unsure (1)..(794): unsure at all n locations
agaaggcgagctgaacttgatgccggtgatgtggtgagctgacattagtataaatgttttttatttcagttagctcgatgctcttgtctgagttctgaacattcttaaagctagaatctgaaagactactggtctgggttgcagaaaatcatggaactcatatcggttttagaccaaaggaaggatgaatccattgagcgcacatttaaaggggttgcaaggcacttccgtgaagtgttttctgagctggtgcaaggtggtcatggatatttggttatgatgaagaaaaaggtttcctcacccttggctcctgcttttactcactggccttattagccttgttatcctgtttttacacttgatgactgtgatttcatttttgcctgtcacctataggccaatgttctgattgttctgttttattgcggctgttcctttgatgcaattattaaaaagagagatccgaccttggaggatctatgtgcttttttcatcaagagaaatagggacccaaattcaagctgagagaggacttgaacatgggtggttgagtgcatgagcacaagtcccacccaactagttgcgaggctcacttcctggtccttggatgcaatgacaatcacacgtttactctgtttctaacgatgttttagtgctattaatgaattgcttggatttcccttaatttttctccttcacctgcacatatgctggtttaagagtgagtttgatctgactttctaatatccatgctctcctttctgntaggatggggatgcagttgatgatgatgg

SEQ ID NO: 1187 - DNA, 765 bp, Zea mays
attgagctttgttataccaagtagctgcttcacatgtctagttttattccaatggagtatctttccaatgggccaagggagatcagagaagtagatatcatttgcaatgcttccagcactaaccacccagagttcatacagcaaagcattagcaagccaggacgaaaccatggcctttgtatctagcacagtggtggatgaaatatttgggtgatttgagttcaagtcagcaattttctcatccttgagatactcaattacgcctcctttctcgttgttgaaagccacgcaatccccaaattcaacatatggtatgtgatctgtgcaacaacaaaaaaaaccggtgtgagagcaaagcaaccttctcccttctcgctctagctcaacccacatataggtcccagcacatcaatgcagcgaccttgccacatatatctagcagttttgtacttttgatcatctacccggacaagcggagacgccagcagcaaagagcatagcggatctaagtagatacaggataatatgataagactacgcatgagcgcggggagctcaccggcatcggggaaggaggtgtcgacgtggatgtcgaagggaacctgcgccatgcggaggtagaggagcacggggaggcaggttgggcaggcccgaagtagccccgaagcagggcttgcgcgccaccagcaccttccgcgccggcggcctcccactccacgggccgccgccgatgccatcgccgaggtgagctgggtggggggtttg

SEQ ID NO: 1188 - DNA, 797 bp, Zea mays
atctcagcctcggtctctgcctctcggatggggctgctctggactgggctcggaggacaggccaggtttgggttgcaatataatgacatgttgggctagctgggcctatgcgtcgtatccatatgcccaaagtctgcgctatttctcctccaactgccggatcagacgtctttacccgcccgaccccgaagcctcaaaattaattgcccaaattgcttccccaccttgggttcaagtgtgctatgaatttcagagggatttgaggtttatggttgattagatgatcaacttgcatatgccatacatattatccatttatccaattcatctttgacaacgaatgtgaaggtcatgcgggtttatgtcgatggatcgtgagcgacagatggtgaacgttgagccttgactgagggactggagaagctggatgactagccatggcgactaacacctagggacactgatagacgcaaggacgtggaggcgcggatggtcgtggattggcgggacacgtgtctaggacatggaggatgtgtatggggtacgctactcatggaggtttcagtggttgagcctcaaaactactccgctttatagttcgctagtttcgtcgggtttgggcctcaaaatccggtggtgcggttccgacaagaatcaggagccgcacgtggagtcatcacgaagagtgtgtcgaggcaaagcaacttcgtgaagagcgcgtgactgtcagatgcatattttaggagttggtccattttaccccaacttaggggataagctttatgtaactagggata

SEQ ID NO: 1189 - DNA, 597 bp, Zea mays
catcttgctgcctgcagggctgggagaagaaagtcgatcggttcaagctcggggagggtgccatgccggctagcttcaaggttatgcatgacgccaagaagggggtcgagaccctacatgctgattttggggagagcgccattgggagggttgcgcctgtggattcggggttctggtggatcatactcctccgggcctacacaaaaaccaccggtgatttgacgctggcagagacgccggagtgccagaaagggatgaggctcatactcagcctgtgcttatccgaggggttcgataccttcccgacattgttatgtgctgatggttgctgtatgatagatcgcagaatggtaagctctgaccattcagtatgcttatgtctaagtttagcattgctatttcaaatttcattacagaataagtatctggagcatcactggtcaattttgtggacttaggatctcccatttgtctcctaagtaatgatagtttacattcgcgctctagtgatatttctgaaacataagatttgatatgcatgcgtcctgtgtcccgtgctcctaacatatgatacaaataaccgttcccccccccccc

SEQ ID NO: 1190 - DNA, 780 bp, Zea mays
agcgaggccagcttcgacacggccgacttcacgcagacgccgcacaccgcggcgggcaggtcggaccggcactggtacacgccctccaggcccgacggcgacggcgaggtgtagttggcgtaggcggtgaagccggcgctgttcgccagggacgacagcgccgtgtccacgtccgcggcgtactgcgacccggggtcgtaccgcccctgcgagcacccggcgtacacgaacgccgtgtagtcgtccccgccgcgcgcgggcatcgtgcacgcgcacagcaccatcatcagcgccaccacggggaccattgctgctgcaacaggcttcgacatgcttgcttccttctcttcttactaattcctgcacctacagctttcgaaagggtgcccaaaggaaagaagaccaacaagaagcaatgaagcagcgaagtgtctctcagtgatgggcttaagggtttatataggtgtataggagtacttacataggtctgttatttttttttctaagtattgtgtggtgccagctcagaagtatcaatacatgttccgaaccggctacaatactgaatttgtgatggataatcgagattaaagacgttattttttagtcatttgcatagtccggtaggctcttagctcgaactgatactaaaacgttccatttagtatagtaccgacttgcaaagcgtccgtatgttgctagttgctacagttttcatttatacttatcattatagtataaaacataaagattttccctggttctatttggtttggtggg

SEQ ID NO: 1191 - DNA, 761 bp, Zea mays
agccaggtgcagcgaatgatgatatcgacgacgatggcgctggcacccctccatcaaacaatgtgaaaaaacagaagacaacattgtcaggagaagctgccaacgatgagggaaatcatccgactcagaatccggcttctggtggcctggaaggtgattctgatctcaatgctgttccgtcttcaaaattttttgaagaaccatgtggagatgcctacattgatgcaagaccagatgacggtggcccaaattcagtagatgcgaaaccgggcagcacagctgacgacaacacggcactccctgggaacaccggcatggacgctaccaccccaccatgaataaagaacgtatcatggttcaatcagctagagatttgctgaagggtcagcgtaggtaacttgtgcagaaaccgtatctcatctgcgttgttcttatcgctacagttggctagtattaggagagtttgattcatttttagtgttgcttctcttcccctcgaagctgacagtaatgtaaactagaaatgctaagatgggggtttttcagcatacctcgttctgttttatagtgaagttgccatgttatactttcagcgggattatattatcaccatcttataattttttttgacatgcgattatcgtaaggcggcctgtggttatattgtttggaaacaggcaactttcttccagatgttgattaccgattgttcttatgtgtgatgtgggttcgtgccctggatgggaccaataatgagtgat

SEQ ID NO: 1192 - DNA, 772 bp, Zea mays
atgatcacttgtgcttggatcgaaaacactacctaagaagctgtacactcccgcaaaatccggcataactgtatcaaacattggaaagacagaattgaaatgtcaacaatgtcaatatgaataagataagctagcaattcattcaagacaaatatccaatattggaaatagtaaaatatttgaaaataaaacagtacaaagaaatgcattgcactttttggtgttacaccatttctctgtatgttaagcataaaaaagagattattggaggttcggttcattctaaagaagggaccagcagttttaagattgaagcttgcaatttcacaagaaaagatgcaccatgaggattgaggatggttaaaaaataattcttagaaacagtagaggtggacataatctgagattattttgcactataagatgattatcagaaatatcatgaggtactgacggcggagtgacggaatttgatttattggaacatttgtttcaccaggttgccaagttcttggagggccttcagtactgcttgagcaaaaattgtttggacctagtgttccagcacctaaatcttctgggtgaaatataagaattatcagatgaatattccaacaaaacctttgacagaagaagcacgaatacaaacctttcaccatcgatgaagcaacagcttgtgggatggaactatgaggccatgaaaaaacagacacattcatgccagagttcctatgtatggaaaatgaatctgtcttgagaccataggttgggt

SEQ ID NO: 1193 - DNA, 729 bp, Zea mays
tgctgaaaaccgaactgatgtttgacatggatggatacaagtcaaaaatattaagctcaagatagtaggtagtttgcctagccattttgaactagaagcggtgatctggttgttggtaataggacgccaggccggtcatagaagtaaatggaaagaagaaaactacgaattaaataaaggtgatggtaccaacaccaagttagagacgtctacagctgctcttttccagtttatcagagtactggctggacagatgtaaatctagcaaacctccatgttgatcattgtccggcttcaagtcattgcctgtagattaaaacatttggtgtcattgtcgaagttctgttcaaatgctatatggtacaagtgtacaactacacccttgatttgtttaacattgcatcaaacttagcttactgcttaccttgatcagacaggttcacaggtcaaggcccaaatgttataagatagcaggactgatcaattagctgccaccatcgatggaataggagagattacgcgtgagaccaagaacctagttattcttaggcttccatgtagaaattgcatagagtatccttcctttccagccttgtaggagccatccgttgtcttcatctatgacgaagtccttgtgataaatgtcttttacttttgtccatgggttttcatcacaatttcttggtttaacggagactggacaaattcagccctgaggttcttacctgc

SEQ ID NO: 1194 - DNA, 790 bp, Zea mays
agagggggacctcgaactccttggtgtcgaacggcagcgcaccggctgtgaagagcgagtcaccgtcatcgtacacggagaagcggccatcgaaatccgtgtgctggttctcggacaacagcttcgtcatgatctctctgtacgcggccttgggcgtcggctcgggcgaaatggttacctacaagtgcatcgaaacacgggaaccaacggaaatgacgctcggttagatcagatcaaaaccaacaacgggaagtactggacgagagagtacgagcacttacgttgtactgatgcagggcctcgtcgacgaggcgaccgaggaagaggttggccctgacgacgtacggcgtccccgcggcgccgtaccctgggcgcggcgggaacacgggctcggagcggcggacgtggatgccgagcgcctcgaactcctcccacagcggcgcggtgatctcctccccgagggttggctgcccattttggcggatatcggcgggcaggctctggccaacgcgcgaggggtcgtcgccgcggtgctcgttgtggttccccgcctcagagccgctcgggtttgcctcgtcccgtccgttgccgttgaagtccatcgcctcatcgacaggcggatgccttcccatgggcgcaactgccctggcgctcacgtagaagtttgttacgtatttggaggaagaagaaaaatgcaatggagaggaagagatgagttagttctagtgttgaacacggggtgcagcccaccgcgccttatattgagggagtgcagcaaaccccaacgtga

SEQ ID NO: 1195 - DNA, 743 bp, Zea mays
acttgtgctccatatttaacacaatagcgtaaatagtgctaattttagcttctaaaacaattaacacaaatagatccaaacatgccgtaatcacgtccaacgttaagcaaacagaaactatgctgaagtgtgcacaagtgacactgaatggtaccaatccagagtgaaccggctagagctacatggcaccaaagtgcttgaacggggagaaaataacgcgaaaccttggccggtggagcagcagaataaccaagcgaagaatgtttactgaacctcgattagggccgcaagaaaatgcggcgaattaatcagcttaaccaaaacctgggaattccagagtcacgttcggctgaaacgctgttgttaggcagcctctgtattctgccagagaactcattaacctaggcaagatataacaaacatacatcaataatggtttcacgtcaacagattagacaattaattccaatgagtaatcactaccgctgctccaaattaaatgcatttctagacaagtacgtctaggtgcattgccaaaaatgaatttatttcggatggatggagtaagactcctgtgcatgaaatcatgaatacatctgacgtcatccaaagaaaaggatgaaatagatcaagtccctctggttttgatcaaaggcaaggatgatatatagatcaagttactcttgttttgctcaaaggcaatcatttgcgaaaagcaggatccgacagaacaatgtgtttta

SEQ ID NO: 1196 - DNA, 756 bp, Zea mays
acaagccggcgagtgtggaggacgtcatgcccatcgccacggggctcgagcgggaggagctggaggccgagctcaaggtgagatggtccggtctttgttcgagagggaggagctggaatgcacgtccggtgtgggtctggaaatggcttctgattcctcgatctggcctgggttttgcaggggaagaagcggtttgatatggatcccctggtcggccccttcggtaccaaggttagttggccgtagtaggtttaaccgttcttcctgatgttcctggatcggattacacatggaggctttctatgtttattacaaaataattagggttcttcatttattggtattgcaatgaaacgtctggggatgtatagttccggtaatgatttgataacatctgggttattgggtaaactattcgcaagtggtcagatttgcattgttctgcaaactatttgcattattgttagggaaaatgctatgttgggacgtcatggtgcctcatggccctcatccatcagtatccatgctttgttgtcttactactgtgctaggataatgaacattaaccctgtttatcatacattgttctgataatttggcatcatgtttttggttgtttttttaaaatctttttcatcttgtctaccgtgccatgttttctgttgaatgttgctactactgttttatgccactattcaaatcattcacatttctctagctaattttatgactagagctgtgaggaattgagcctgc

SEQ ID NO: 1197 - DNA, 810 bp, Zea mays
tttgcatgcctgcagcatattaatgaagatgctcttctatggagcccggctagggcagtagacattagaaggatttggccttaatcctgggtgtgcttagtctgctgctggttgtttttgtggttctcatggatgaatgtgtatgcctgtgtctggccgtgaggaggctgactgctgtactggccctctagggcccttatctttattcttaatataatgatgcacagttctcctgcgctttcgagaacaaaatctagagttgaaaaaaacctaacctaggagtaactaggtggcattttattaaggactagtagtataatgttcgtatgttgtgacggcacacaatcatagtcgatacctataaaaaataaatttaatatcaaagtgaaccgatggtccacatataagatattaaactgataagaacaaatattacactttagcttagcgaaaaggtcgagaaaggtatgagttgaaaaggagcatagcccctcttttatagctcgtctcggttgctcgtccttcttcagctagcgaggtggtactatgtgtaaacattgtattgtatgtggcttgtcgtattgggcttgtttggtttctcacgccccatctgtggctaactggctatctccgacagcctccctatcccactccctatctcactccctatttcaaactccactatataagcaatgcatctacaatgcaaaacaatgttttgcacgcctgtgtacactctattgctggagatggcctaacagcctattgggcccgttgttggacgagaagcatgggagaggaacagacctt

SEQ ID NO: 1198 - DNA, 708 bp, Zea mays
tttctccactgtgcttgctgtccttgtgtccgagctacatggggatggggctttgtcagttgtcgaattctttgtgcttcctcgttgccatggtgtacaagagattactgaaccaataaatgttctaagtgcatattatatgaacacccaatttgaaagtacccgaggaagatttcttatgcatggatttgtttggtccaacgtcatatgctagtttgggtggcaacatctatattctcatgattgtagattattattcaaggtatacttaggttttcttacttcaaaacaagactaaagttgcatcaattttcaagaagtttgtgaaaacacacacaacgagttcaaagtgaagatagaagactacaagtgacaataacaaggaatttgacaacataaatattaaacaacattgtgataaattgggatcaagcatgaagtatccataatatacattctaaaacaaaatggtgttgttgaaaagaaaaatagaacatttttcatcttgctagaacaataattgatgagcataatgcaacgaagaggttttaggccaaagcgatcaacaacacgtgttatgcatcaaacttcctatttcctcattgtttgctcgagaagaccctctataagttgctcaatggtaagaaagatgatatcttattcttctaaggggtttgggtgcaaatgttacaactacaaaaagcgtca

SEQ ID NO: 1199 - DNA, 784 bp, Zea mays
attaatgagtggctattaattttgtatgagcaaaatggccagtaagcagcaagaagaacaggcacatgttttttcttccttttggctcattgaatctgcattctgaaacctgatttaaaaaaagtatgacaagtagtaactaatatggcagatcttgttaatgagtggctatcaattttgtatgagcaaagtgtccagtaagtagcaggaacatcgggcacatttttttcttctttttggctcattcggtctgccaactgatttctagacttactataatgagatggctaaagtccatttcctaatgggatgtgctgacccaatgccatcaattccagaaacaaaaaaaggtgagccaatctttacctaactagagctcactaaatcagttaatcaactgctgttaggcactttaactatctgaatataatctcttgatgatgagtataggtactcagcaacattaattacttggtttaatcattttagatattaagacaacataaccaaggcatactcgactgccacagatgagttagctgttacccaagctaatggaaacgtcataagaggaaaaccaataggaaagaccacctcaaatcagggaggtttcaaacattagaaaatgtaaacttcatatgaataagggataaaaggaccatagcaccctccacagggaaaaaataaccaagctatcccattctatctactgactcacttccatttacaaaatttagtcctaatatttatttgatcttgtcacagtaatacaagattagaccat

SEQ ID NO: 1200 - DNA, 765 bp, Zea mays
aagagacgtttcatccgcaagcgtaaaagcaagatgctagtgacacttactgaatgcagtaatgcatccaaaatccttttaaactctgacaagatatccatctactagtgtacacaatacacgacagtatgtgcatgtacaatgtctggtccccatttggccaagatcattcatactggtagtattcatcaagcatcccaagaagctaaaatcacttgagattcttggaagatgcgagtgcggaagaagaataaacaaacagcaaggtttgggtatgtgctccgcaatcatggagccggcacttacattttacaagtccttgaaaaggcaaagctctacagttttagctcgcatcctttcagcattagcatgcgtgtcggcagtgctcctcctccctcgacgccaattattcagaaaactatgcgtcgggtaaaccgaccatcctttccactgttccagggcacgctcgggatcggtgaaaccatcataccccaggacttcaccaatggatcccatgatgtaaaatgccagtggagcagtcacccgctggacaaattgttctttaatgttctctgatgaacactctgcgactgaactcttggaatcttctcgagtacagctttgggtctacggcagaaatgcaaccagggttgacctgaaaggacttgtatgcatgctcgagcttcttgttatgtcgtagtcttgtagaatgtcaattattccaaagaagagatagacatcctggaatccgccacttgatgtggt

SEQ ID NO: 1201 - DNA, 771 bp, Zea mays
tcctaattaggatgctgaggagttactatgaacatgtttgtcggtacaagtccactttgttgacaaggttctatggcacacattgcatcaagcaagctggatgtcccaaggtaagcaatattcacatgaagatacatactcctaactcgtataactctcttatttcatgttgtggacttgttatttgtttgtaaaatttctccacaatgacatgatcccaacccgacgaccaggtccggttcattataatgggcaatttttgctgctcggagtataagatccatagacgttttgatttgaaaggctcatcacatggtcgtactattgataaggcggaagagaagatcgatgaagcaactactctaaaggacctggaccttgattatgcattccacctacagagattttggtatgacgagctgatgaggtgagtttcgcattagatcgacttacgataattggctgcaatattgtcacaattacacggaccaatcctaattttggctcatgttatcgcacaggcaaattcagatggactgcacattcttagagacacaaggaattatggactacagcttgttgctaggagttcactttcgtgatgatttctcaatgtctaaaataggtgtatctcagtttattggtttgccaagtaagtagcataaaatttggttaatttcaaacattctgaattgtggcaagcatatattttggcacattagctgacactcacctgtttttattaatcaaatactgactagttttggtgaa

SEQ ID NO: 1202 - DNA, 877 bp, Zea mays
aaaaatacgatgggacaacgaacccatcggagttcctgcaagtatatgtcaccgccatcacggcagcaggtggaaacaccgccgtaatggcgacatattttcatgtcgccttgtctggacctgcccggacttggctcatgaatcttgccccagggtcaatctacacctgggaagagctctgcgcgcggttcgttgcgaactttgccagcgcttaccaacagcatggtgtggaggcccacctccatgctgtaaggcaggaacccggggagaccctccggacgtttatctcccgcttcaccaaggtgcgaggtactataccgcgtatttccgatgcctccatcatcacggccttccgacagggggtacgtgataagaaaatgttggagaaactggccacacatgatgtggagactgtccccacgctcttcgccctggcggacaagtgtgccagagctgctgaaggccgggcatggcactcggccccacaaactgggaccacccagatgggtggttcgggtgccatcccccgggacgacagaaagaaaaagaagaagagtcgcggctacgagaagccgcagtctaccgtgctggtcgtcgcagccgcgaccggaggccgggacgaccgcaacaaacgcccacggccacaaaggggtaacggcggctcgtgccctgtacatcccaacggtcgccatagcgccgcggagtgtcgcgagatcattgatctcgcgaaacgcgtcagcgaacgcgccagcgagcgacgtgagcagtcttccagagacggctccccacctcgccgtcgtcctggcaaagaaaaggtcgacgacggcgaggtggctgaggctgaacaggacctcgggtatcagtcacccgaaaggga

SEQ ID NO: 1203 - DNA, 787 bp, Zea mays
gcgcaccctgcatgctgtcacggctgtgaatggcctgcgcagcgctggcagcctgtgccgccggagaactgtcccagacactgaccggtacatgtggagaatcacgtccaaggcactgaccggtcgcgctgccgcgcgtgccctcctgagtccttgcttcgctcacctcacacacgtcgtacgccccacccgcatgctgcacggcacgtcccgtctgctcctgccaggctcccatgatgacaccgagcgagcggtacggaatacagcctactacagtgtctgacgcctgacggacgggttagcgtaagcagccagattcgcgtcccggagctctcgcctttgttgacgaggtgaggggggactgggcacggctgctgctcggtcgtgctgcccgttacagtagttggaggaacgcagcagggccgttgggtcggagcaccggtgcccgtcgttcgtgtggtcgatccaatggcccaaatctcttccgcggcccaacaaacccacacacgcaggcgcctgcgaggcttgctcgtgcgacccacagcagcctgctgccgggcgccgcccactacaaataaaaccccttccccatggacgtcgcccaagagactcactgctactcgcgctcttgccaccgtctactctccaacccttctgccatccctcggcaccagctcgctgacgctaccgtcacccctaccgccaggccgcatagccgggctccgatcaccttctctcgcgctacagtctcaagggtagctagccaagctaccaagctcgtcaggag

SEQ ID NO: 1204 - DNA, 784 bp, Zea mays
agcaacttgccgagcccaccagtttgcactctccagccataatctgctggggaaaaggaacagttatcgccaaaactttctgcaagcaataatgagtagatttagcatgactttagcctgaatacgacaaatgattcagtgtccatgcagaaacgtcactgggccataggggcaaaggggcagaagaagcagagggtgcagacgggagaacgccgcataagtttatcaggtatgtctcgataaaattcgaaaacattgctattcctctcaaaagtgaagccgacgataaacaataaactcagatttactccacgtaccagctgccctcagatttgaatggattgcctcgccaactggctttcctgtcattgtgtcaatgcacagtactggtgttgccatttagaattggaacgccaaccaactatctatatgcacgcagagcaagcatatgcacgtcagctggtgagcagatatggcagtcggagcgaaagcaactcgacgaacacatgccctggtccctaccctaagcctgcctggcccagaccttttaaaccgaccaggaaaagctttgcttttctcgttgtgggggcaacatctcctatgtgaaaggtcatacttggaccccagatactgagatagatcatgtgccagtttgtggcttcaaatttatgtatacgccattacggcctttgccaaagtggctagcacttcagttcctgctgtggcacgtgccagtttgtcttaacctgatactgaaactcacttcctttcagtttcaaatgtg

SEQ ID NO: 1205 - DNA, 845 bp, Zea mays
gtggccggcagagtagatggtcagctgcggccactgcccggacttcaagaactgctcgttcgagttgatgttcacgctgcattggagcgtggagcattcagaggtcagggacagagagagagagagagagagagagagagaggacaagtggaggaggaaaacaaaagaagttccagggatcggatcccatcctcactcactaggtggtgtaccacaggtagtccgacttgtcccacgtcatgctgagctgctccaccagcccgtccttggtgaaggcgcggccgtccagcgagttggtggcctcgctgtacgactgccacgagaagccgcccgcggggctcatccgcgccggcgccgacggctcgctcaccgtcgccgtgttgaacacggcggccttgcagtcgggcagcacgctgatggaccaggccgggaggtcgtagcgccgcccgttgaacaccacccgcgccgcggcgctggtgtggtagttggacaggaacgccgcgcaggcgccgccgctcgacttgaacacgtacgcctgaaaaacgacacagctccaccccatgagcaactcctctgagatcgtcggtccgcgcgttttctgacgggaatttgacgaccttctcgtagttcccgagggactggatagtcgggtcgcctgagaccagcgccggctcggcttgcttgatggccttgggcaggtccctcaggggcccccatttcggctggcttaacagaactgaacaccccccatgggttcaaagtttccgggttccgatgggaccattttttacaccccccattggattcattaacaggtctggacctttttttctttctcttttttt

SEQ ID NO: 1206 - DNA, 729 bp, Zea mays
ggaacgaacaagtgatgcgcacagtgcggtgcggcccctttctgcttctgccccctgaattcgggactagccgcacccgcgagctggtgataggctagctcgtttgtccgaagtgagcgacgcggggtggaagcgtggtagtaggctgctcgtctcgtgttcgtattgcacacagcggtggctcccgccagtccgctggtgatctgcccgcgctgctgccttgcttgccgctggtcgcagtgacgacgacgtctagtacgcgcgagaggccgccaagccgggtcagggcagggcaggttccccggccggccccggtgtgggagtgggacgcacgaaatgcacggtgccccaaactccgtagcgagcgccgctggcgcccctggaacggcgctcgaagcggcccctgccagcgacgtcagcctcggggccgacgggtatgaacttctcgtttttcttgtctcgagacctgtcgggcccccctttttccagtttcttctattcgggcacgcgaatcgatgcccgccctgcccctgacgatttgcctgcaacgattgcacgcacgaggacgaaggacgggcgatgtctccgtgcacgctctggcctgcgacgtgtgcatgcatggagctgatgataattggtgcccaagttcccttttttcttattaatttttttttgcgggtaaattggtgcacaagtaccgcactggttatacattgtttcgtgcctatg

SEQ ID NO: 1207 - DNA, 799 bp, Zea mays
gcaccaccaagcaacatgccaaacatctgatgacttgatgaggcttgaggcgcccttgagaaacaccccccatgtactactgtcaagttgtcaattgccaagtgccaggccagcaccgcagcacgcacgtttctgaaaaccggactactagccatggatccaaagccctggagtgctactctgtagtggactcgatctcgatgtctcagtcgaggcccaaacaagacaagtaatggcacatgtcaaaactaggaaaacagctaaacaaacgagtatttgtgtgggtgttcgctctggtggtggcaaccgatgcaactagacgtgactacgcttcccgtagtagtccgcagtccacaagctgctgctgctgctagtcaactagaggaggccctggcccgggagagttttgtgcgcgagcagcgcagggatggtcgacgtcgcgccagccggccgggttggtggcgacgccaggacctggcgagcgcgatgcgatggcgacgtccgcactcgccgccagtcggcactccccactggcggacccctggtgtgaaggcgccgcttgaccgcgctgcatctgaggggggaggggggctgctttcggtcgctggatttgccttcgtctttgggactttggccctcgatcaacttttggtcttttttattgggcgccttttaatctcacaaaagctgtacgaactgctgctagatagttcttcgtgctttgccaaatccggagggaaaacacgcactactgactactggtatcactagtagtatgaaaaacacaagcctagcgaga

SEQ ID NO: 1208 - DNA, 767 bp, Zea mays
acacaaaacaggaggctttagtttatatactgaatataatatgaacccatgaagtcatgatgtcattccaatttctgcatggagattacaaaaggtagttaatcactccaaaaacaaaatctccaggagggtccaaagagtaaaacaatatatcagattccccctcggttttgttgcctattataaataagcatgaatacatatatacacaaatttaattctaggataacactgggttaaaatctatgctaaataataaaacggttgaagctactagtctgtggcatacaaaccttcaagaagtcaccaccctgaatcatgaaatctttgatcactctatggaattggcagcccttataaccttgtggcaaagcattttttctgcaatcaacataaaaactgaccattagaaatcatataacagattgctgactgcaaagtgcaaagtaatttcataattgctggagcaacttatccttgaatcctcatcaagtcactaatcaaataacaaccagcagcggctaataaaagcagaacgaacccaactttctcctagaccaattcacactcttgtgtcacggtcattcacatgacccattgcccagctaaagcttcgaaaatgcaatacattgtacccatagggaaaatacccttccaagtctcaaagaccactatgttgccatgccacacttatgtacactatcctaaagacccaaattcatatctttgtgtagtccaaacatcagtttaagtaaaagtaaacatga

SEQ ID NO: 1209 - DNA, 744 bp, Zea mays
ataaaccctcaagcccctgctgccgtgaaaacaaatccaatgagttaaacgcaacaaccatcacacatccaaacgacacatcgaagcaatgcacgcagttcagaggtctcgatgagtctgctgagcacccggctcctagctagcctagctcactgaagcgatccaaatttacaggggcatgcggcgcacctttgggcagcttggacggcgagcctcccgacgacgctccgcactttgttggactgcggtgtctccgacccatcagcggacacgggaagcccgatgatgagctcgtccgcctcctgcaatctcgagtagcaaagcgcccgtgttcaggacaccagaaccaccatcgcatcacgttttgcaaaatgccagcgcagagcagaagaggagaagccaagcgaaacctcacctgctgccgagccacgtcgagcagcgcaagctctagcttctgcccgcggagcctcagaacctggtgccattccaactctacctcaatttagtgaggtttactttgggcggtggagctgagtgcgagaggtgcgtacagtgaggggtcgagggaaggtgatccccctcccgatggcgaggccggtgcgggcgtcaccgaggtcgacgccgaggctgaacccgccgccgtgccagagcgggtcgcgtccccgccgccgcgcgtttggctggagcggggcggggagctcggcggcggctttcgtccggcctggtacgggagatgccctgatc

SEQ ID NO: 1210 - DNA, 757 bp, Zea mays
gacataaaaaaatttggtcgggaagagaaagaccatcctctcggtattatattaaaaagagaccgaaatatgatcccgaccgagaaaactttcaaaacctaacccccatcactagcgggccacacatgacgtaacccggagcgggcgcgagagacaacgaggggattctttttaatcaagccagaaattcgcccccgagggaggatcaaacacagaacctgaaggtactacttagaagtcttaaccattacgctagagaccctttcgtccactacaacaatctaatgtatctaaattactcataagtcataatagacaaatgtaatagtttaaagtggtattatattaaaatttatacaatatataataagattatactaagcatgttttaaattttaggagggactctgtagactagggagcaacaggcgaagctcgagcaccagccgatccaccgctagttgcatgtcgtttaaattgaaaaggtgacggtagagaaagagaacactgctgctcatgcaaaggcgacatatttatccttctttggcagcctgtaagactaggagccgagcatagaaggtaatgtctatgcttccacagccgtcaacatcacataaggaggaaggtaatgaaatatgcacttatgatatgaatgggggtggacacactataggtgatatacatcatcttcaatgagaccactgttacaaatctcgctcgagatttatcgaatttcgttatttttatcatcttcagt

SEQ ID NO: 1211 - DNA, 884 bp, Zea mays
atccccgccgagcccagcaccaggaacgcgaaggcgacgaagagcaccgcgaactggtacgacgttgccttctcgcaggtctcccccacgctgcactccggcgggtgaaggctgtccgcgccggccgtaagcgtcagcaggaacatgccctggtggtggatgcatggaatggaaccaacgagtgagcagcatgccaacatggcaacattgtagttagtttactatgcgtgtttgagtcggagggactagggagcgcaggtctggttgaacatttccgtacgcatcgaatcaggtgtacgtaacgtaagacagaatcacgagtctttggtcatgggctcatggcccatttgtgctccctagcacgtgtaaagcccaggccaacgatctctccttcctgccgtacgcgctccaaatttcccaacggcccaaccctgtagcagatgctaggaaagacaaagacctcgttctccgccgtggccactgcaatgacccaaccgtcgccggctacaggacagagtgttaccggcgaagagaggcctgccatggtttgctgtgtcacggtccacgaatgggtggctcctattgtcgcctctcagtctgtgaatgtagctgtcaatctgtcattgtgcggctacaggttgttggcggtcacttcgtagacagagatgtctggaatcctgactacggataaggtaaccgaaccatttgggcgcacatggaggccacaatccacatgagaacaagcaccagcagctttgttttatacccattgcataggggaccctcggtggaattggaaattcgaatactactacttctcaaaaagcgaaagagagatcttccttcgagtctgggctggacctcgacactactattattttata

SEQ ID NO: 1212 - DNA, 773 bp, Zea mays
gcagtcgccatcagtataacggttacaggccaaattgcaacatccaggatcagtgtaagccagcaatgccgtggcgtcaaattcaaatcgaattccttaacctctcccaagaacggccaaagcctatttctgtgacactggcaacgagtgtagcaacagtcacactggcaagcaagcaagcagcaccagcgtttactcaaagtcgcaaaccaacgaaatgccatggcgaagctattgtggaagctggcgtacgtcgagcaccagcgctacgcccagcgtcggctcgtcgtgtgtcaagtctggacattgtgtaatttggaggatcgcagaaaaataaataactcgtggagtttggacaaatccagccggtccttatcagttagttcaggctatacaaagacgacaatgcacacgtcgccaccaatcttgttttacttggctttgtccactgcacttctgctgcggtatatatatatatataagccgctctgctagcagaagcaaaacatgcatcgggaacccttacaggtagataccacaaccctgtgcagagttcttgcagtctcatcaaggtgacaggaacgacataggacatggaggccaccctgagcccgaagccccatttcgtggtcatcccatggccagccaccagccacatgatccccatcgtggacatcggctgcctcctcgccgcgcacggggcccgggtcacgatcatcaccacgccctccagctcgcaactcgtccagagccgcgtggaccgcgccgggcaa

SEQ ID NO: 1213 - DNA, 707 bp, Zea mays
tagcaaaagaagggcataaatatttcggatgactagctatagtaggccacaatgcgtattatgcaacatcaatgatacaaaatttgctattttgttttgtaatttttcataagggccattgagtatatgaattccctaggcccaaagtccagatcttgaattttcaacggtacactggatgaacatgccgtttcagttgtaaacagaaagacatctcatataatgtggtaaaccgtaacacataatcgaagttgcagagaaccgttgtttcatcccaataacatgtgctacactcttctacggaagcccacagacaaattctgaacacattgattgagccatcttatattaattcagcaaggtaatagtgaacacactgcaaataaagaaatcattctgtaaacaaagatcacgaaatctcgtgtgcatgacaatgctctgtacaccaagccaagctacaatggtctgtattttcaaagtgaagcagaagaagctgaacccccaagcccaccttatatgtggcgaactcatgcaacgccaaagatgcaaattggcagtttgttgtacaagtgttcggagggccaccgaacccagcccctatataaggcctgtttgtttaccctccattttatcctgtatttggcaatttagtgactaaaatagaattccatgtaggtactaaattagtccctagaaaccaaacaccc

SEQ ID NO: 1214 - DNA, 824 bp, Zea mays
tgaaacatatagaaagaccgattcagagtttttggatgctgaaaggaatactcatagagatgatgggtcaacggcatcgacagcagtgatggttgctgatcatctttacgtggcaaatgttggagactcgagggctgttatatcaaaggctggcaaaggtgcttttatttggaaattatctgctacttagatgaaaattatttggtttattgagtatttgtgattgccgttggtttccagtttgtcagcatgtagagtcttctatatcagaaatttaagagatgattcattgcatatttagtaccattagtgactacggactatgttgatgctgatcgatacttcattgtgaatttgtgatttataaattttttctaaactggtagttgtgtaaaaagttgacaaatttgtgagatacatcatacgtgttgctcagtacaacaccttcagtacaacattacaaatgaaattgtttgcttgaattagtttgtgagaataatttttgtgaagaatactgtatttataataaaatattattgctctgaccatctttcttccctgggaaaattgtaagtgtttggtttctaagtgaatcacttgtggggcatgtatgaaattgtttcacacagcataatatggataaactcaaaatggtgcgagtaattcttaatgttatcataggcactattatttctcttcctgtatcattaggatatctgtattgctgtggcaggtcttgtctgtaatccaaatgtagctgtctgttgaaacggtttgtaaaaacattattgttgcctttatttttgcaattattgcgctttttt

SEQ ID NO: 1215 - DNA, 689 bp, Zea mays
tgcggcacggcgcgcggctccgctttcccggcgccgagggaatccccgcgctcggccgcatgggccatggccgcgtggctgccggctaccgcgcgcggcgcgggcccctgcccagccacgagttgtcttgtctactaccacgggtgctggcggtgggtgatggtagtagggtggcgacgggacgtcggagtggagtgttgcgtgtgcgtcctgctgccccccctgcccgtccgtcctctggtgtgggtcagccgaccgtggtgctgtgctgtggtgtggtgtggcgtggggatctttgtgctttgacggggtcgggcagcagagcactcacacgtcccatccggtctcgtcgtgggctcgcggctcgccgctccggtccggccagggatggatgggatgccgccgagtcctgcgattccgctgtgctgcccgttgtttcattggccgatcaaatcagtcgggggcccctcgacgcgaccacacggcttgcaaagaattcgagggacgaccagggcccacgggcggtgttcgagctgcccatcttgcaccgagttgcagaccgtgctcgcaaattgcatgcagtgcaccgcgctcacaagaaacgtagtagtaaacatattctctggtccctggaggatcagaaaaatgttacttgatcgctgtgcacgaaacgtcttccttgctgcaac

SEQ ID NO: 1216 - DNA, 795 bp, Zea mays
aagcgaaatgtgatggagttcagcattcagccagatgcaaccagcatatataataaacacgaaaatgtgttaggaaattactagactgttatgtgaatcgggttttattggttgctggctccgctcccgcccagattacgccagcctgggccggtatagatacatgcccgtctcacatccccacgtatgcaagtaaacagatgaaaaaacacctaggttgcacgaccgtatataggctggactcacgccatgcaggtaaccattcataagccaaaatatagtcaatgtacgcgctggacctgaacgctgctgaccaggtaaccaatcaggcgaataatgtattgtgcagtataagttacggcttttatgttaagccttcgaaatttgaagtttataaagcacaccattggcatgcgactggacaatatgaacataagttaccaagttcaccagttgaaccctcttgcgaatacaaggttgacttgtcccttttggttcgagttgattatgagtgattgtccatgggtagcactctagggtagtggtgggttgaccaatgtgtgaaattatgtatgtgtaaccatgtcggtcggcttgaggtatgcagatgtcgagcacagggacggtggtcgacggctgaggtgaaggtcatgtgggctcgtgttgatcggctgggagcggtgaaggacctgtgttggatcttggctaacgagacggagcaacggggtgaccactcatggtgctgacacctgggacacccaatcccgcgaggatatggtggagcgcgccgtattg

SEQ ID NO: 1217 - DNA, 760 bp, Zea mays
  unsure (1)..(760): unsure at all n locations
acggcccgagtaggattagcggtttctgaccgacagacagagctaggaggcaacgttgcatgtgcatgtgctgctttgggcccactcactctcgcaagtcgcaacgttgcatgtgcatgagacgggagctgggtgtcatgcgtagaggtcgagctcggtcacgtactcacgttaccgtaagctcgatttgcacacgcatatcaataacttggcgctataggctacgtcgagccatatcacactctataacatcgaaaaaagagtttaaaaacgaaaatattttttcagatgtctaaatatgttttaaaaaaaactaaaatgcaaaaaaatcggtacaatagacgcattatgacattgtaggcacgtgtcatccagggaatcattcgtgccgtcatttagttattacgtggcaagtggcaacgcgtgttcggtgtccccaagtccccggcatgcatacggttgcctccacccggcacggttcgatgcgcatctgatggctacaaacaaaccgcgcccaaactcaaacccggcacgtgacagtgtgagtgtgtgacagtggcgcgcgcatgcgaaccggtgcccgcggcaaccgtggcgccccgtcgcgcgcgcgcgtaaaaaccccgtcaaccgacgggcgccccttggcgtagtcgtacaaaacacaaatacccctgtcgctcagccccaccgtgcatggcccagcgtttcactactgcacaaatccgacatcttngaaacccgtaatccacgcacacct

SEQ ID NO: 1218 - DNA, 789 bp, Zea mays
aaaacagttcaattttgtagaaaaactgtagaaaacagttcaattttgtagcaatttctaaataaatgttgggttctgaataatgaaactgaaccagaatgaagaaatgcagaagccgtgaactgtttagccacaaaactggacggcgcggagcccatcaagcccctgcggcgccaccatgcgcccgacacggctcctcgccgccgcctcctcaacgttccgacggcgccgcctttacactgccgccgcagtctccaccgtggcaccttcttctgcggccccgccgccgcagagcgccgtccggcccctctccacccaattcgctagaccatcccccgcccgtggccacggcgttgccgatgacctcgcttcctccctccgcgcactcctcgcctcctcgcccacggtccagcacgccttccatctgctccgttccgctgcgctggatacgcgcctcccgccgaacgagctcgtcgacgccgtcctctccaccgtggacgctggctcgccggccgcggttactctcctcagccacgtcctcacctgcctctcccgtgctgccagcgactgcgcggccgccgcggccgcatactctcgcatggtcacgaggggcgttgtcccggacgccaagtctcgcaccgacctgctcgtcaccacggcgctgggcgcgtcggctgccggatgcgctaacgctgttcgacgagatgcggggcaaggggtgctacgcggatgcgaagatgtacgacgtcgtgatacgggcctgcgtcaggggagggatgcactgtgatg

SEQ ID NO: 1219 - DNA, 755 bp, Zea mays
ccaatgcaagacgggccttgatgctagctagctagctccaatttgctggccttcagtcagcttaaacaggatatgagaatgtgggcaataatgatgtcccagtacgtgctatacatcagcaatttatttgcaacgtggcacaaagtagcccagtctagcagtatctaactccaattcacaaactggaattatatatatctacctgaaagtgaacgaacttaattatactagtctaatacgaggaacaaacaactggccagccgtatgtttatcaacgagtacggagtacaaataagtcagtaaaattgatggccgcccatcatcgttatatacatccctcggaagttttggcaactaactgcgctctcctcagtgttccattctaaaagaataaaatgcagtagcggtcctcaaacttgatatattgtgtcaattggatcatcgaactaaaaaaactagtaaaacgggtcctccaacttagtcggcccatgtaaaatcgtcgaaaaccggatttacttgaactagaagcatggcgtaacacattcgagcacacgtttgagtacccataccagactagtcatgtttctatcatgttttggtactctttgtctttcattaatggggtcgaaaatgaaggtctagctaggcatagtgtgatgaccgaaattactacatcaaattttctatcatgttttgctactctggctttcattaatgtggggtccgaagtcaactaccgctgcttgtgtaaagat

SEQ ID NO: 1220 - DNA, 777 bp, Zea mays
ctgtacttagtagtgctagttgactatgatcagtgctttcttaacccattaaggtgccgtttggttcatgaaatgtaacgtaaatgataaaggtcatgattcacactcaagtatcaacgataataagactatctccatcagacttcctatcccacttcttatcctactctctttttcaaacttctctatgcaaacagtgcatctacagtgaaaaacagtgttataatacaagcccgcattcacggctttgctggagttgacctaagtttgaataggccggtatcactttctagtgtggagggatacttgtatctgattacggttggacttaaacaaatatgtatttaacgttattagttaccaccacgttacaaatatgcgaaccaaacagcacctaagtgcgaatcaaaatactgttctaacctaccaattgaactgcgtatggacatatattagtctgtactcagtactaactagtaactagtactaattgaccatgtgatgtgcttgcttagtcaaaagctatgtacaatcattcagcttctgatttgcaaagaacttgttttataattgcaggtagacaaggctctacagagtatggaagaggaagctgaacgcgtattccaggatgaacgagtgttacttcatgaagatggagctgcttcagcaagagatactatgttagttcaatagactttgggggtgtttggtttctagggactaaaatggagggactaaaaattagtccctaaaagccaaacgcccccttatcttgaa

SEQ ID NO: 1221 - DNA, 767 bp, Zea mays
attccccagagtatgtgctaaatgccatgtccaaccaagctaatatccaaatatcaacaatattttttatgtgcactgggtactagttcataccgttttagacatatgacacagtactccaacaactgcgttgccaccacaggcaacagtaaataacataatgaatgagatatctctaaggcatagatcattaagctacctatatttatgtatcccaacaaatggggaaaacattgtgagttcatgtccaactaagctgtatcaccatacaaactccccagattcagtgctgaatatcatgcccagttccaacaagctatatgcaaataccaacaacaaaatcactttgtagttgtgatgtaccaggtactagcttcatgtagtttcatacatataactttatacactggtagctaattatagacaaccttaagtgtctaacaaccgtgtcaaacatttaagacacagatgatagatctgtatatctaacataacgtggagaaagtaatactgtaatagcatatacaattcacaccattcgacctgaacgaatagaccaatataactagaaataagattttcttagctttagataaaagcaaatataaatgcttaatagattacacaactatgaggcatagaggacagcttgtttcagtgaccattatggaataagattgattggcatgcaaggtcagttgaaatttatatatgaaataattaacaaacaagagatttaatcgtactgacgtgtccatcaatgcacg

SEQ ID NO: 1222 - DNA, 738 bp, Zea mays
tgtcattcatcaaatgatggagcttgcggctgtgaacaaatcgaatcctgttcgtcccaatctggttaagccaaaggaaagtttatgtgaagctaaactgagcttatctaatagcccagactctgtgttgaatcaatcaagcttgttaataagcagctctagtcctgatattggcgagaccagtgaccaagtgcaggtggattcttgtcaatacttgataagcagccatacgggtgattgtagggtctcatgtcctgacaacagttcgttggatacttctggtaaagctcatgatgaagagagattggatcaggccttaataaccaagcatgacagtgggatgatgccttctactagtaaccagacatcattagatgctactgtaggcactgagagcagtgctgaatatatgaagcaggatgtaagccattgcgatgacttcaatatcagagtcaatgaccaaagcttgaaccaggcgttaagaaatcagcatggtgatgctgtcccattacctgacatggtatcactagatgctaaggtggacaaggaaagtagttggtgtctggaaccattgattgcaaactccgactgctgcattgacagcgttaatgtggatagcttgtgcactgatcagagattggctgatgttgcttcaggccccacagctgatgtgccatccgtgctgctggccaaggagaattatgatcctttgagtgcaaagctcgaaaatattgatgt

SEQ ID NO: 1223 - DNA, 799 bp, Zea mays
agcggtattcatggggttgaaccggctcggctgctctctctctctctctctgagtcagaggatgatggaggcagtgcctgccagtgagattgggaaagaagcagggaatatgtggttttttctatgcgagaaagaaaaaaaatgtaaagaaatgtgcatggatgttcccattttcattgattttttttcgctactatggctatatccggcggtcagactagcgtagcgtgaaaaaactgtagatgataatgagaagtttaaaacaagaaataagatagaggatgcgatatgaggtatgctagagatagcctcacgttctaatgcgagagtgtaaacgagagatgtatgtagcgaagagtgcatgtggatacgaatattgttggatacttaggaacagggtacataaaagaaggcctaaaggcctctcaaatacaacccatgaatcaagcgacccacctgccaagtacctcggcgtgagggtccaaaaggcctcctggggacggctcgccaagccgaccagctcaccccccaaccaatatccgccgagcaacccagcaaggcgaggctactgaccaaaccgctcaccgagcaacccagcgaggcgaggctactgaccaaaccactcgccgaggaatccagcgaggcgagaccgccgagcaatccagcaagacgacaactgactcttaggaaatccaacctggtgctatcgagccacgtcgacgcgatgagacattaccaagccatgcccagaccacatatccccgctgaccagtaggaccggacaaccccagtcgctggg

SEQ ID NO: 1224 - DNA, 807 bp, Zea mays
cgcctcggcgcgtgcgcgacggtcaccgcagccgcgtcgtcgtcgtcctcctgcttgggcgctgtcgctgtcgctgtcgtcgtcccgcctgctgctggcgcggcgcccgtgagcttctgcacgagcgcgcggaacgtcgcggggtcggcctgcacgaacgtggtgttggcgtccacggcggccgcctccctcgcggccttgggcgagcgggacgccgccatgacaaagctttaggagcacaagctagctgagcaaggaaaggaagcgtgaccgatcgatccaaggcgggatcgagcggctggtggttgctttttaagggacaaaaaggctgcattaaaagccaaagggatcggccggcccgcgacggatggatgggtaccggacctggacctggacctggacctggacggatcgtcgcagtcgtcgctttattaccgtgtccgtgccacctgtgggctgtggctgctaggacgcgagagctagcgagaccacgacggacccgcgactgcgcggcgtcgtacgcgtgcttgatgtgctgcatcacgcgtcttttccggcccctagcctagctatcccccgtgctcctcttccgtcgctgcgacgacgacactggcccagctgggcgcgcgtacgtaggtagaagtaggcacgtacgtacccccgtacgaatacggtcgagggaccgccggccggccatggctatggactatggtggtgtcatggtacgtcagcatgcagcacatatgtatgccgagagcagaaagatagtaggtgcgactgacctagcaatgagagggatagcgcgcc

SEQ ID NO: 1225 - DNA, 730 bp, Zea mays
attaacaatcaccaaatcccattcttgtttaaacctgatttcccgaaagtgtgaaatggttaatgatgtaatagggtgagaccaatgaatagcttttgaaaaaggtaaaacatacctctctttgcgaatattcatttcacaccaaatagatgacgcaatggtagctataaactccaaagacattttatgtgggaatgatggatctgcaagtgtcctgcaagcaacagaatgtattgcatatttgtttgaaagcttgcattatttacttactcaaatttgcaggaggaaaccatagtttttatgaccaaaatagtagcacaaaacacatgttttatttcagcaagatcgcacaaaatctcgttcttactttcagccacaccaccccccccccaaaaaaaactacagcaggtggatcctccgcatatgcaacatgtagactgtggtgagtggtgttacattgtattagctctatctgtatgtatgagcctagagcccagcccatgagaactattacttggctgtgttggctacataaccctaggcttatgcctatacattgtttgcctgattgcgtcaatctaattaatagatatacgattttatcctctccaacatggtatcacagagccaaccctaaccctacctggtcaccggtcatcgcgagtttcttactctccgccgccagatcccctctctatcaggtcattgctcctctagccaccggtcgcca

SEQ ID NO: 1226 - DNA, 1098 bp, Zea mays
atattcagagaacggaactcatggcggtaatgggcttaccatgggggagcatagtgatttgagtcgcttatttcctctgatgtggaaacacagttattggttgcagggcagagagcaagggacggaggactcttctgaacgccaaggtagcttggtttgctgccactggagccaagagtaaagggaaacacacacacttgtcagagaagacgagaggagagcaaaaacaacagatattcatcaactgtatttgcattacattcctgattcctctatgtagctactggtgttgcttggaccaatcaagcttattaaaacgataaaacgttggaacgctcatgggggaaattttgacttttaaacgtttaaactttgtttaaacgtagttttaaacaacataggaaaaataccaatatatcataatttcagacaataatatgaagttaaataccaaaacagagagtttagtggcttaccaaaacttcacccatgagctagattgaaccccaaaagtaactaatagaccgggcccaaaaatagctaatggtctaaaatgcataaaacactgcgttatagtttagaacgccaaaaccaataaaagtgatttcaacctctaattagagttttgaggtttaaacatagttttaataacactggatttatcatagtttattcctgtgaattttcttgttttgacgctgctgcaactgtgcaggcacttctttcgagtgggaaagaagcgattgaacttcttgacatactattaaggtggattgtcttacgcttttgtgaatctaacacaacatgtttgttgaaggtgaatgcatagcactcttgttaagaatcatgttggcattatttccttttattgcagcacaataacctaatttgattcctgtactgtgtactactttcacttctaggttcttgactttctacctgagctttttgatattttaaaagaccagtcttacatgttgacagaagctgaagctgcaatttttcttccttgcctcatagagaaggtatgattagtccaaaagtgcatattggatgtgttatcatatttcatattacaatcatgaccaaattcctgtt

SEQ ID NO: 1227 - DNA, 762 bp, Zea mays
ccgaacatcatcactgacgtctgatacagcaaaatgcagcagctggtggatggctttgttgtttgcagttcccctataggctagagccaatgcatacataccaccataacgtaatatgggatcttgatctctagtcatttgttcaatcaaggtgtctgcttcctcttccctgccatatactgtcaatgcaattcccagtgacaaacccctgaaagagaaagagaactgtcagagtgtagttcttcagatcaagtgcataagcactgtagaacaatcaaacagcaccaaccttataatcttttcatgctgtgtatcatgtgcataagcaagcatctcactagccttctcactggcggtcccaaccatgagcaagcccatgccaataccagctgcctcaccagcaacagcactgtctgtgtaaaggacattctttatgtcctcatatatttcctcatctgcggttcccaaagctgcaagcccaagccccaaacatgcaccatgctggatgacctgtatgacattgggggttggagttagcataatatgcatgaaatgaataacaaaataaaagacagaaaataaacaataatcacctctgcactggagttgcgaagactttcacggaggaattgtttgattccttcaccatgattggcatgaatcaaacctagtgcgtagagggcaccaccttctgaatatggactcccaccaccaactgcaccactttgaggtaggtagggggccatcaaagcccgcccttgt

SEQ ID NO: 1228 - DNA, 1184 bp, Zea mays
tagtgtgtcaactgtgctagtagaggcctaccgtaccgagcatggaccagcaccagccgcgaaaatcacgtgcgcgtgcgctctcaaatggtgatccctgctctggccccccttctttgaatgggatgggatgggtatcctagtaacttgcatgtgcaccgccgtaggcaactcggcatatgcgccctggtccgaaacgcaagtgaacggcatgaatcgcttcaagttttaagcttcgtgagcatgtactagagttttcgaaaaacaaatggaagcacgtgtgtcctgcccagtgccggcccggctcgcatcgaccaaggaagctcgcatcttccggtcgcagaaacgacgggctctaaccgaagaacgaagacttgcaggctaaggtcataccactccgtacaatgctgtaaaagtctgggcgcagccgcgcagggaaagatttgaaccacagacagagccactgggctgtttttcttcggcgacacgccgacaccgacgcgacaccgacggagagagcccggacgagagcgcgcgtacgccgcggtgcgtgcggaccggccggacagagatgcgtgcgtgcgtgccgaacccgacgcgctagctgtcgccactcgccagacgccacgggtggcagtggcacgatggacgtgccgaggcgtgcagggacggcaacgccgacgggcgctgcggggtcgcacgcaccacccacaggccgcaacgaacaggaaccgggaccgcgtcctggccgcgctggtgccgtcctttctcctcctacttttcctaggctcgtgctccgagcccggccaaactcgtgcgctatatcctggttccgtctcggatcttgcagtgccagggctagcataggagtagtagcggggtcgcagggggcaaaataaaggctcggccttggacgccgcaggccccgggaatcctccatttttgttccagcacgtttttttcactttccgaaagcctcttgttttttttctttccgcgaagacctcgtcagtcgtcacccatccgattcatctgccgaaaactcatcgcttcactcgtagatcacttaaaacactattttgtactgtagattgactattcatatagtgcattttaaaaggttatacggatgttttgcattttaaatgattatgtggatgtgtaaagtgctgaaaaaagccttg

SEQ ID NO: 1229 - DNA, 775 bp, Zea mays
cttgcatgcctgcagcccccgtcccgcgcgcgcggccacgatcgcccgcggcgagcgggggtcgctgtcgccggccgactgctagtgctagctgggctggtccatctatcaatcatttatcattggagcagcttgcctatctatggatcgccaggcgcgcaggcgcagccacgctgcatgcgtatgcgtgcgtgcagaccgcatgccacggtgtacgtacacactgtagtatagaataggagtacataacagtatatatgtatagcatagcagaaaaccaaagctaataatatattcagcacaccacaggtcgagttcgtttgcttgcttagcttgttccatttgtgtcatccatcaagtagccaaacttgtcctgtgacgaccccccacccaaaaaaaaaaagagaaagaactgctggcctgctggaagtgaccatttctgtgtaggtatgatatggtggaatggaacagctcgagcccactagctcgctcgctcgcggcggaaatgcatgcctcatgtgcgagagccgcgcccgcggaagaaaattatgtgcatacccgatataaacgttatcttttacagtccctcacatccaccattcggaggcccacaaacacaaatcaaaatttacaaaaaaaatactttaataatttatttttcttttatttatatggaccagcagctgttatatgtgagggactgtaaaagggattctttacattcagtatataaagaatttttttccgcgcccgcgcggtgcgtacttaggtatag

SEQ ID NO: 1230 - DNA, 806 bp, Zea mays
ttgcttgcttttttccatggcagttggaatcaactcggatatagaccaggtgacgtcatgcatgcaccaccggtacaaggcagcagcggatgatggttggattatttaagaagcatagctcatcattggatcgaccagagacggaattttaaacaaaacgtcggaactgatggtgccggggaatatgtatatccgatccggttattaacgcgcataagcaagctatccaatccaagaagcattgattgatggaatgatatgttcatataatatttgtatatatagctagcataatgaattttagtgcggctagctgctgaatcctgctgatcgcgttcgtatgtagcagtagctgcacaagttataagcgggcaatcgatcggaagctaataaggtgtccaataatgccaatcactccggacagcgatacctctgccggatcatctgctatagctatagtatatatggagaagatcggaagcgattgcaagaagccagtagtacgtagtttgctcgatcagctcactcacggctgctgtcagcgttctgctgctggtccatgcatcagcagccatccatcgaccagcagcgatgatgattcgaccgatagctctgcaaagatcaacagggccagaccatggccccggccccggcccgatcgacgtcgtctccgatccgatccttgctgataacgacgacatctctcgtccaagaagccaagacgtacgtacagggagataagtttaaaaacacatggcccacagggaaaattaaaatacattttgactgagcttgagagaggaatt

SEQ ID NO: 1231 - DNA, 783 bp, Zea mays
gacagcaaaaacctgttgcatctcatcagcacgctgtcacagctcaacactcactcaggaactactactactactacctctagcagcacaatctcacaacaagcctgatggtattcactatccagccaagatctcagtagttaaacgtccatgtcgccggcatcctcgaggactggatggtcggcgcgctccggacgttgacgtcgagcggcagcatccggtactcgatctcgaggtctctcaagaccttgatcatctcctggagcagcagctccctccgctcgaacctcatccccatgtcgtggaagttgatcgtctggcggcaccagatggagaccttcagcttgttcgtgtcgtccacgtcgcgcaggacgaccatggagccagggtaccagtgctccttcttgttgtcaaggtaactgcaaatttgcaagtaaataaataaataatggtatgattatttctgcaaatccacacaaggttaaagggtaatctgtacttactgcaatagcctctccttcatgagggacagtttctccaccggtgttgcgacatggacggagaagtccaccgaatctcccatgtcagggctcctgtagtaattcatgatcggtagctgggctaactggctgttcgggtagtacaccttcaggttgtcgtatcggaggaagatcgtcgtcatgatgttcatctcctccacggaccacctgcatgacgatgcagatcgggaagtgttacagagccagatctcagttgacgattcctgagtgttgataagacagc

SEQ ID NO: 1232 - DNA, 775 bp, Zea mays
gacagcaaaacctgttgccgcctctcgtcagaacgctgtcacggctcagctcactcaggaactactacctctagcagcaaaaatctcatctcatctcaataactaaacgtccatgtcgacggcatccttgaggactggatggcaggcgcgttccggacgttgatgtcgagcggcagcatccggtactcgatctcgaggtctctcaggaccttgatcatctcctggagcagcagttctctccgctcgaacctcatccccatgtcgtggaagttgatcgtctggcgacaccagatggaggccttcagcttgttcgtgtcgtccacgtcgcgcaggaccaccatggagccagggtaccagtgctccttcttgttgtcaaggtaactggatttttaaaataaataaataaataattactagtacattaggtatgtatttttgggaaattcatatagggttaaaaggcatcaatcagtacttactgcatcagtctctccttcatgagggacagtttctccaccggcgttgcgacatgaacagtgaagtccaccgaatctcccatgtcaggactcctgtagtaattcatgatcggtagctgggctagcttactgtttggatagtacaccttgaggttgtcatatcggaggaagatcgtcgtcatgatgttcatctcctccacgaccacctgacgatgatgcgaattactcttcatcaattggtgcaaagcaattcttcagtgtagtagataacgagaattagcgacccacctgcattccat

SEQ ID NO: 1233 - DNA, 814 bp, Zea mays
ctagcttgcatgcctgcagctagagcggatgtatcagatccgtcgtcaacttcctggtacgcatcaggtttcggctgcgcgcattcttgatcaatatcccacgaagcgtcctcttcacaggccggcacctctaaatcaatcacaaatgctcgtttaggatggttgttccgtgaaggttccacgtggcattcgtgtgacactactgattcctcagaattgtcatcatttggtacatcatcattgagatcgatgaagttcctgatgggggcgccacttttcttggtggctccttcagcggcttgtccatctttaggcacatgcttctggcacgaaagaggtaaacatgtagcaccctcttgggctttattacagacaggcagagttccggtaacaatgttatccgaaggcctatccttcttaattgcacagccaacagatgtagaagcagaatctgacaaattccgaatagtcacagctggttcattctggtctttagtatttttcagctctattgcagttcccaatgaatgtccaaaaatcttccctggcttctccacagctgttgggtcagcagacataagtttttttttgagccaagagatcccaagtactgaccccccatctttatcatgctgaaaactggaagcacatctcccatcttgttctacaagaccatcttcctgacaatctgacagtgtctcattcaaattgaagttcttcatacccttgccatgggactgatgatctgaatcttccaacttctgggaattcttttgcttccagttacttgaaactgctacctgatgtcgtgagt

SEQ ID NO: 1234 - DNA, 733 bp, Zea mays
tgcaccgtgaaaccatacataccttggtgagcgggtgatacagtctgtggcactgctgtgccgtgcagagatatatatggaggggggacaaggatccacgagcgaaagggcgtgtgctacagcagcggttgcgttgcgggtactactccagttaagcgccattggccattccgtccccccacgcattggttgcattgccagacagttgtgctgggctgggcttggcatccgaggcaggcgcctttcagctactcctctcttcgagtatatacctaggccggaggagcagaagaacatgcatgattgatcgatcggtggttggttaatccggctggctttcaggctagcaagctgcatgggggcaccacgaaccacgtgatccgaccggcggccgcttcctccccctcctttccggtgcaagcgcatcatcgtggcatgtccacctccctcccctccctggctccctgcacaaaccacccgtgtccggttcggcctacggcttccctgttgcttcccgccgaccgaatcccccccgtcgcgtttcgtttcgtttcgttccagcaagcgcatgcagcacagcacgcacccgcatacctgcaaccgacgcaacgacctgcacgttatgcgtggtccccccgagcccaccggcacggcgtacgtacgtacgcgccgtaatattattggggatcggacgtgacacaacacaacgcctgcaaccaccgttgtatatcca

SEQ ID NO: 1235 - DNA, 787 bp, Zea mays
cttgcatgcctgcagcatgcctgatagcatacaaggaaatttcattgatcgtgatggtgaggaagttgatgatgctgcacaggattcagatgtcccgaataagaagtcccgtgggttcgatctgtttgatgcctatcgtccttcctctggagctggtcccagtagaaatttgtcctttggccctcatgaggatgctggtatgttcagtcactcaagagcaattgacctggcagctgttgagcgtccgactgctagggattcactgagagcatcttctgttattgcaatgcatactattcatacttccgaggaagattctatggagagtgttgagtattacccaggtgatggtaatgatatcgatatgccttcttctagtacacaaaggaacattgaaatgaatgatgccttggatcttaactatagcaaccaagcacagcaaagtgctaatgcacatgctggtgctggaagcgatgcaagagaaattggaggaagcagtacaaatgaaggggaggaggtcattaatgctgaaacagttcccccttttggaagggatcaacttagtttaggaattagtggtggtagtgttggcatgggggctagtcatgaggctgaaattcatggaaatgctggttctctgcacagaactgagagtgttgtaggtgatgctgaacctattgccgagcttactgagacaatgggtcagactggtgaatcagcttcaggacctggattaatggatgaatttgtacctgatgtagaccgagatgaacctcatggagacagc

SEQ ID NO: 1236 - DNA, 760 bp, Zea mays
catgatttctcttccttattatcaccagagaccaaggaaataaggtcagcattgttctgctctttaatattactgactggagatacagacttgcacgctgtttcattttgttttcctgaaccttgaaggagacatagcttggctgcaacggactggcgctgagttgcatcagaaacatctccattagtagctatggtataatcacacaccttggtgaaatgatggtgatgagatggatccttatttctgcgtctaccagaacctacagggacatttctcatagtccccccggcagtccagtacctcttgcagtttcggcagaaatgcctgggctggttcacgttgtaattgttgaagtagcagaactttgtttccatactattgcagcgagggcaaggcagaatcttatctggcttcttgagtaccttctcttggccagatccaccagattcagtcttagcttcctcagacttggaatcgtatcttttcccaggctgactgatgatagcttgtaaactattcttagcttcctcagagttggaatcagcttccattttcccatgctgactgctgattgcctgtaaaccattcttcatattgctcttggaagggaagggatttgttttgacaatcaaagacatgtttggaaggcatggcatgccatctttgcttctaacatcatttgctaatttggtgctaacctgaaagagataatttatgatgtgtcatcagaggataaacatccgattgtagaattaga

SEQ ID NO: 1237 - DNA, 782 bp, Zea mays
cagaaaagggggcaaaaaggcccccgaattctcctcgcccgggcacaacctcgctccagagtccaggccagaccagcaggccgcctttccgctcgagcacccacgcaatcatcaccgccgtcttcctctcgctcttctcttccccttccattcctcggcaccacgtcctcgggaacgccgcatgccctccgcacaaggcgccgcctgttcccggtgaccgcggggccgagatcggcgcgccatggccgcgcccggaggcctggaccaggactgtgcacaggacgccgccattaagctcttcggccgcagcatcccggttctccactcctccgtcttcgccgccaccgccgcggccgaatccgaggtgagcagcaacagtctcagttctcggattcattccctgacgagggacggggatctttcatggtcgacgggttctcgcgggggggcaggatggtcattgccggccgtttctgaggaaaagggagaggacgggaaagcggaatcggatacgctttttcttccccctgcttttgcgctgtcaaatgcgtgttggtggatcatggttcctgctgggattctggtcgctgttgctgcgaaaagattcttccttttggagccctgtttgatttcatacctcattaaaaaaagctgtggcctgtgggtttatgtgtttgctccttcagtgtttgtacgggaattttcttccaatacgtgtttcttcaccaagtcactctccgtatttacggcgggtatttacgggtgaagatttatgttgggtt

SEQ ID NO: 1238 - DNA, 847 bp, Zea mays
cttgcatgcctgcagagattcctcagtacatcagagagtatgagaggggcaaggatttagagatgtggatgatcatgtacagtccagacgagaaacagcacagtaactctacaaaaaccgtcttttccttctaggaggacgaagagagcaatgagtgcttggtgcaaaaagacgaattccgttaaaaagacgggaccccctcccacgggcatccatactatcttgacaaaaatgaaaactgctgcttggtgcaagatccgtgtggtgtcgaagaatcgcagttcggcatcttctctgcggggaccgcgacagaaacgaggtcatcagaagagagaaataagttacacctaattgcggcagggcagggcagtggtggctggcatatattaagtggtggacaatcaagaacatgctctgcatgcttagcttaattatatcatacgtatataataacgcccttgggactcgttttctttgtcgcccggaaacagcatctgtttggtccaagattcttggcacgccattgcgatcgaaccctgtcgtgctcaaacatactctctccgtcggctggtgctctcgtttcatttcatcacaagttaattaattttaattttaactaaatatgtataaaaggttagtaatttcaatgatgtatactaataaatattattagatcgattatttaatctattttttctaataaaattatttgcagatataaaatgtttcctaattttttctataaatgtaataaaacttgttaagggtttggtatgtacaaaaattatagataaccgttttttttcaagatcaggggagaggtattataaatatgatggggtcttac

SEQ ID NO: 1239 - DNA, 834 bp, Zea mays
acccgccgatcctatatagtcgacctgcaggtgctccttgatgatgccgtcgaggatcccgaacaccgtgtcccggcactcctcagcgcgccgcacggcgccgctcagcaggccgacgaggcgggaggacggccacaggtcggccgggttgaaccccgccgacagcccgatggagcggtcgagctcccgcaggaacacgtcgcggtccctgcaccggtcgcccatcacggcgcgcaccgtggcgtcggccacgagcgcggacagccgcgcgcgcatctccacggggcgcggcggcgactccgccgcggcggcggcgcacgcgcgcagcgtggccgcgacctcctcctcgcggatggcgcggaaggagagcacccggcgcgcgctcaggagctccgtgatggccaccttccgcagctggcgccagtgctccccgtagggcgcgaagatgatgtcccggccgttgttcgtcagcacgcgcaccgtggcgctcagcggccgcgacgcgaacgcggtgtcgtgcgtcttcatcacctcgcgcgccgcctcgcgggaggagaccaccagcgtcggcacctcgccgacgcggagcagcatcacggccccgtggcgccgcgccaggtcgcgcatcgcgcggtgagggagctggcccgcgagatggtgcatgctgccgatgattggcagctgccacggccccggcggaagccgcaggccgtggccgtccaccgggccgcaccggcgcttcgcgagcacgacaacgagcagcgacaccagcgcagtccgaggtagacgtagtagtggtcatccatcggcgtgcgcgcacgggacgatgcttct

SEQ ID NO: 1240 - DNA, 749 bp, Zea mays
gttcaccagatccaggtaactaattgatcagcgctatatataatggctacttataagtttgaaatgtgtttctatcattacatttttctcgtgttggggtgggatagggggagcatgataatttggggaaaatgtatgttccaaagaggataagcatacctatgttcaatattggaccttcggtctgataattccttatccttatgatgaggtttatctgttccaaagaagacaatagctttctaatcaagatccatgagtacaaaaggattgtatctcattttctaatttcaggacaaccatgattttatagaaacttgaataaattatgctacctgctttagaggtttcatgagggcaaacatcaccaagctctctacgttttttaaggatttgtgcgcgcatcctgttatcaaaatcctcttcattctcgtcttcaggaaaatcatcagataatggagcattctcttgctcccttgattcaactttctttgagatcaaagcatccctgacagtttgaacagtaacctttttcatctcctcttgctccttggactgcaaaatgtgagtaagcacaatgctattcaaatttggcagagcataacaagttacagcaggtaacactataattgaaaaaactgaccagataaaaagatgcagatcgcaccctaaaccaactaaggggatgcctgcccacaagaaattcacccagcaaacaggacttaagcaccaaagaaagtgtgatatag

SEQ ID NO: 1241 - DNA, 808 bp, Zea mays
tgagtgtgacggtgaaatcacgtttgaaaacgtccgttgataaaagctggtcaaggcccactgagagtgacggagtgggtgggtacatgagtcgacgcgacgggggtgaccgggtgaaggctgctttttcctgcattttatggattcccccaccccccaaggttttggagtctgggctctgtgcgcaatgtgatgttgtgatttgatttttgtcacttttgttcccccattccgctactcactttttattttattttctttagcgcttgctagatgccgctgtaccattccatctgtcctctcctctcgcttctagtagagtatttctttttttttccatgccaaagatgggttcgtctcgttgtggaagctggaaagacgttctttggttgatttaacctgagctttaccgctgtcgtcaaggaatgtttgctggtccttggcattctcacaccaaaaggaaagaaaagaaaaagaaaagaaaagaatgtttgcagccacacaacacatgggctggcttgggggtgcggcttagccatcacacgaagtcacgaacaaggttgatgcgtcactaggactcgagtatccttgtttagcctcacgcatgtttttttgcctttgctgcgctttaaagcaaacgcggcgcacaaccacacacatgctttatgccttgcttccgatgaaagatgtgctgggttaggagtgtgctttttgtgtgttctgtagccttcgcctaagaccctaagccattctaaccctaagcctcaagtgccctgggcttgcaaccctaggccctaaacagagtgga

SEQ ID NO: 1242 - DNA, 793 bp, Zea mays
ttccaagtgagcgacacatgaatccggccgacgaattggacacacgaacatgcattacgacgagaacgcttcctgaatctcttgcaccagctcttcagcgctgagctcgcactttattccaatctgttgcattggatggatagactggccggtaagtgaagagtacatagaaaagtgatggcggtagcatgcaaaaagagttcatatgcgcactttattcattaagatagcttgacttgcgcagattttagaaattgtgattcttgaggaccgaggtagtttgaaatatagtagaactttgtaagcaaaagataaagaagaataaaccgtcaaaagtaaaagaatatattattgatatagtttcgaatatagtatagcatagaaaaacgaaaaaatttcagcaaaaagttaagatgaagggaacagcaaaaaaaaacagaaaaatagatttatttaaagaaatatcatatgccacaaagcaaagagttaatgtacagtgcacaataggaaccctgcaccagtgctccactatatacgagcatagtgtcacctcgagagcaaatgtaatctagtggtttgccagcatgccaatctcaaggtacagcctatcctagtagctaatagctagctaccctaccacaatcatgatcactgcaacttcaacatgcactttatgggaagctcacatggaacaaatgcatttaattaacaattattttgctcttatgtggcaatatatcatatatgtgcgtcctgtccatactactacatgaaacgttagaattgagcaagt

SEQ ID NO: 1243 - DNA, 789 bp, Zea mays
catcttgcatgcctgcagtgaactcctacactatcaaggtgctcctttcctcttcataaaatcatatatatacatatatatgaaattggttaatctgatattccaacgagttgcgtattacatatacaccatttcaaaacgaaacaaataatgagattcctttctacgcatttagtccaagaaaaagtctagtatcgcctaatgtttcatgtagtactatctcggtctaaattataagtcgttcagaacaagtattaagtcaaacttacaaaacttttacaacaaataactgttttgttatttatttttaaaacctgatagtcataagcacgatttgtcttaaaaattactttacaacagtataaatgtattaagtgtttatttatattttaacaaaaaaatattggtcaaatttgtattttagagacagtggctgtataatttggatctggcggaattatggacaatggagtagacgcacatagattaacacatcagggcaaactatattaaaaattgtttattaaatgcatgtgttccatgtgagcttcccatgaagtgcgtgttgaagttgcagtgatcgtaactgtggtagggtagctagctataagctacgatatacataggctgtacccggagattggcattctggcacaccaccagttgatacatttgctctcgaagtgacactatgctcgtattagggcactggtgcagggttcctattgtgcactgtgcattaactcttgtttgctgtgtggccatatgtctttaataaagtttagtttt

SEQ ID NO: 1244 - DNA, 753 bp, Zea mays
acacatgtgctgtctagatactaaagtgcagtcaaaagactgctattgctgctgtccaacagcagtcaaaggactgctgctgctgtcctattcaccacaaaacagagatgttgtcctccacacgaagaccacatgccttattccatcaaaaggtctcttcgtatactttctagtggatcaagaatcaatgagagatcacaaccgaaacgtccaggaaccgacgagagaactttgtgactccaccataattcctttttctatgcctctatttaagcaactagcatccacaaaaaaacttgggttttgtttgatgtatgtttagcctttgctacttgtaaacgcgtgtgtcggctagaccacccgaatatttgaatcaggacccaacttcattagatccgtgagagtctgtttgttatcttgttcttgcttgttctcgattgtttgcaggttcaaggctgtgcttggtacgacaagagtaacaacaacacgagctgatgtaactactgctaatgcgcaacacccttgtggttgttgtagtcggataacacaacgtcgacctccgccctagatcgtagttatctggagacggtgtacctgtcgctcaaggcgccacaccatcttggttgtggtagtcgggcaaccaacggcgacctccaacaaattttcaacctccatcatctcatcgaaagatcgggctccctcctacctgtcgggtttatcaaaaacctgtccctccgctactattttagactt

SEQ ID NO: 1245 - DNA, 759 bp, Zea mays
aggctatgctatgttgtcttgtgtttaatttgaacatataattaagttcttatttgactcatgggccaatgcaaggatgtatcatcattttgtcatgaaccatttttgcctgtatctgcaaatctgaatgcacttccaacaaatcaactggtgtatttgcttgcccttaaatagaccttgaattgtttttactagattgtcagttggaaccagtggtgggcacaagacttattgaactgcatattcttttgcagaaggaataccatctgttgggatgtcaccatttgcttgtgggtggtctacccaacaaagaaaagtgagcaaacttgataactattgctttgttgcatatcattctgtatcttcttagaattacagttgttgtacatccatacctaatcctgttaatatgcatttgcagcttgcatcagcaaatgcttctcaaatatttcagtcactccatgcaggttttgtcccagtaagttgttgtagcaaaggttttgaaccgctattccttcaaaatttcatatttatcaaaaatagggcctggtgcagtggtagtctctccacttgctgtttggagatccttgaaaaattaagcaagggtaaggatgtagaaaagttctcttccccataccctttcttctgtgggagcttttggcactgggtacgcacacctgaagttgttggcatgagtggtatagttactcaccccatatttgacagcatatggtgctactggaacatgtatcatattgt

SEQ ID NO: 1246 - DNA, 673 bp, Zea mays
agttcatggatgctcgaaattcctgttcttgacttctcagacattctttgatgttgctgtttcttgtcatcagctttcctctttctgttgtgcatcggtttctcatcatcactttcttcaccatcatcttccttgtcgtcagactcccgagatgaccagtcaccaccaggtcgcttcagtttcgttttgacagaaactccagattcagactcaaggagttgttgctgcatatttctagcacgctctgtgaagacaccatgcagctcttcaaagaagggacactgcctaccaatttctggatctgaagtttctttcccctgatgaaacgaaaggatgcataaattatgagctcgtgcctataaagaaaggacagaccaagtgctggaagctcccacgtgagtgggctctaataataaactaaagaatgaaggtactaactaatcattgaaatcacaaagcaaacaaggtggacagaccacaggacaaagatggaccgactatgtgtccaaacaataaacaatcaatcagtctctgtaagtaggaactgggttttcataagcataaaagaaaaaacttctaatacaaagcttgaaattggacccaccacccaaccaacccaacagcagagtcaatctgaacctaacatggaacttccaatttttcatcccctcct

SEQ ID NO: 1247 - DNA, 822 bp, Zea mays
tgccggagggcctggtggcggcggtgtttccgacggtggcacgggtgcagagaagggagtgacagctgtagacagagagggggggggggggagataaagggattaaccctaaatttgtctgccttcatttataattctccgtcatatatataaggggtttacaagatgttaatgggcttggtctcaatagaggccacagctcctattttaatctaatctataacagctgggcctctgccactccctatttgattagcccgttagtcactcagccatcgtcttctattagatgtcttaccgaccatgacaaatgtaatattttacatgtggatcctttctttgccaaattttcattttttgtgattttctccaaattaacctgattttgattaattatatgtttatgatgaagaatgaacctgatcaaacagaagacacaatttatgtctgtatgattatgaaccatggacaaatctaatggcatagatatctcctggctcttttttttttggccccttgagaaattgcccaaatgttgctgatgaatggtttgagctcccaatcttttttaaaaaaatctaaagtcaaagattatttcctgaaaacctttggttatgtatttctttctatagttgcatattgacttaaatttataccaattgacacacaggttctagttaaggattctgtcggcgtgactggaaaggagatgatgaataatgatattcttctaacctgaaaagaatacataccatgcccccaaatgcattaattcaaatgggatgaagggggaaactagtaaccaatgttccttcgagtaga

SEQ ID NO: 1248 - DNA, 717 bp, Zea mays
atattgttttcataattgatgagaaaccccatgatgtattcacaagagatggtaatgatctggttatgactcagaagattactttggctgaagccttgacagaatgtactgttaatataacaacattagatggtcggaatctgacagtgcagataaataatatcatctaccctggctatgaggaggttgttccccgagagggaatgccgattcagaaggattcttcaaagaagggaaatcttaggatcaaatttagcattaaattcccctcgaggctgacctcggagcagaaagcagaaatcaagaggctactaggttcatgaggagcatgcacaaccttttttttttctggtgacgcaatgctgtatccagtgtacattcagatgttaaatgtgaataccagcaaagtctcggtttccttaaactgtgccagttcctttggcatatggatgttttgagatgcaaagttgaattgtttcatttatcggggaataattctaaattctactagatacttctgtgtgattttgctgggaggatgtccattatgcacctaacaaaagctttattttattttcggggttaactttttagtaaatagtaatgtacgctggctgttcgtaaacctgtttcgtggtgttatctcagtcctcaaactcattgcatgtgtacggcattttcaatggacatctgacttgtccgtaggttttcatttcg

SEQ ID NO: 1249 - DNA, 726 bp, Zea mays
tcatatattgatatcatcgaaaggcagcttgaagtcaatgatttatccatgtcttcacgtgtgctgttgatgcatcaagttacagtctgggagttaattagggtcttgttctcagagagagcaactggtagccagttggagcctgttggtgatgatgatcaggaaggcatggttttagacaaaaaagaaggctctgtcgacatagaccctgaagcactccctttgtttaggagagcagattttagcaattggttacaggacagtgtttgccatcgggtccaaggagaggtgggttccttaaatgatgccaggtacttggaaaatatcctcgtccttttgactggtcgacaattggacacggccactgaaattgctgcctcaaggggtgatgttcggttggcaatcttgctaagtcaggcaggtgggtcaatgtcaaatcgatctgaccttgcgcaaacactggatcagtggaaaatgaatggtctagattttgattatattgaggaagactggttaaaggtatatatgttacttgctggtaacgtacaggccgcttttctagatttaccaattgactggaagaggtaccttggtttgattatgtggtatcaattatcacctgatacaccactcgatattatcattcgttcttatgatcaactccttggtgagggcaaagttccctatcctgttcctgtatatatagatgaaggacctcttgatgaa

SEQ ID NO: 1250 - DNA, 715 bp, Zea mays
tccagagtttctaaccgccttttctacttgtcaatacctcctaatatatttttggatgttgtaaaatgtgcaagcaaatcagcatcttcggtgaatggttggacacgagtaattgttgagaagcccttcggccgagactcagaatcctctgctgcattaacaagcggtctgaagcagtaccttgtagaggaccaaattttcaggtgaagcatatgaaggatttgtaacatatttttttggtatagacttggcatttttttaccatcccaattctctgcgaatatcaaagcaacatgccaaaggaaaagaaaacaaggaatttgaagactgttaattacttgtgaaaagctgatagattttatgttctttattcaggattgaccattatttgggaaaagaactggtggagaatttgtctgtcctgcgcttctcaaatctcgtttttgagcctctctggtcaagacaatatataagaaatgtgcaacttatattctcagaagactttggtactgaaggacgtggagggtatggtttttatggttacttaattttactgtgatagttacatatgattgtatcttattttatcgtttcaatttgcagatactttgatggctacggtgttattcgagacataatgcagaatcatctcattcagatactagctttatttgctatggaaactcctattagtttgaagcagaggatataagac

SEQ ID NO: 1251 - DNA, 801 bp, Zea mays
cttgcatgcctgcagatgatggggtgctgcacccccttgcggtcacacacgcggcccacggcggccaccacggcgcccgcgtactcctccaggctgtacgccaccgacatgtcggtctgcgccgagtgggtcccgtcgtagtcaatgccgaggccgccgccgacgtcgatgacgcgcatgtccgcgccgaggcgggcgagctcgcagtagatctgcgcggcctcgccgacgccgtcggagagcagggcggtggtcgggatctgggagccgatgtggaagtgcagcagctggaggcagtcgagcataccaatggccttgagcttggtgaccacggacagtatctgcgcggcgctgaggccgaacttgcccttctccccggacgtggagccgaagtggccggcgtgcttggtgcgcagcttggcgcgcatgccgacgacggggcgcacgccgaggcggcggctggcctcgacgacaatgtcgagctcctcctcctgctcgagcacgatgacggtgttgaggcccatggagcgcgccatgagcgcgagcgagacgtagccgtcgtccttgtacccgttgcagatgagcagggcgtccaggccgccgcgcgcggcgaggcagctcatggcgagcagcagctcgggcttggagccggcctcgaggccgaacccaaagggcgcgccgaactccacaatgtcctcgacgacgtacctgtcctggttgcacttgaccgggtacacgccctggtaccttgagcccgtagcccggtggagcggacggcgtaaccgaaagcggcgttgaacg

SEQ ID NO: 1252 - DNA, 706 bp, Zea mays
gtactcgtgtccccctcctgctgattctcgacttgcactagacaaatgcatccatatttatattagtaggcaatcaaactaggaatattcactagaattaatataagagattaatcttttccgctttatggtacaataatatctaaattagtacagagtattcagtaaggtacggtagtaggccaagcatctgtacgtcaatacgtgtagtacttgactcttcgtgatgtacaacattatcactatcgaatacggctactttatcgagtgctttatacactcgccaaagtctagaaaatattcgacaaactctttgccgagcgtgactttcagtaaagaggtcttgatgaattatacatcgacaacggcttctttgtcgagtactttttatcggtcacacgccaaaggctttaccgagcgacgtctggtactctgcaaagaaaagtcgcgatcacgacgccaagtgacggtgatgaaccctttaccgagtgtcctccctgacactctgcaaaggctccctctttgccgagtgtctgttggactagcactcgacaaagaagactctagtgggcccctttgccagttcctttgccaagtgctccgagaggcactcacaaaggctctatctttgtcgaggccctgctggactagcgctcggcaaagaaggctccagtagacccctttgccggccccaagtgctctggaa

SEQ ID NO: 1253 - DNA, 953 bp, Zea mays
ttcgggccccctcccaaaaggtcagcgaagggccaggccctttaccaccatcaccacttgtaagaaacaagaaatgctcagcatagaagcactttgtttgttgcaaacactaggaagtgtggaagatgacatagcagaagcactctgatcataccatttacaagggacagactgttgagcctattgattatatgaatgccaaacttcaaagttgcagtcatagtaaagacctgcaacaaacaagattacatgttgggtcgtatcatcttgtcttctgattttatagcgctgcatagtggagtctatttacttgctatattttttgtcacaccatagctggctttgggagcagaaaagaattcagtgaattacccaacgagcatattttatttgtctttgagaacatctttaatcttttattttcatctggacagaattcttagttcatttggctgacatattagagaatctataactactgaatggtctgtttttcgataaaatctattgcaaacaatcgctactatcagctgaaattatattataagcatgcatatgtatttatgatcgataattatcctgtcttatactaaaatatttctttacctacagtcaccacatgcggtttggctagcgttgctctccaaattctccgagagaggagaaacaagtttgacattgtaatcagtgatgtcaacatgcctgacatggatggtttcaagcttctcgaactcattgggcttgagatggatctacccgttataagtaagtattcaataccaacacatgtctttctgcaagttacttgttttcaatttctattatcaaggtaccaaattgctccaatctgtttccacagtgatgtccatagacggagagacaagtagagtgatgaaaggtgtacatcatggtgcgtgtgactatctcctcaagcctgttcggatgaaggaact

SEQ ID NO: 1254 - DNA, 761 bp, Zea mays
atgttcctgtgcggcgggcggctcatgttcgggcccgacgcctcgtccctcctgctcacgacgttcctcatcgtcgccccgaccatcgtcttctgctaccagataaaatccacgttctacggctctggtgggcagcagcagcagcagatgcaccaggcagcagcaatcgtagtcaccgtcacaacgatcatggtcagtgcgtctatctcttaggtccgccatcttctttgccgactccactgtcctctctcccagcaatcatcatgaactccacgacggctccagcctagatacatgaaactgatgaatcaaaaacatccgattcccaatgcagccagaaactgaaccgtggcttcaaacgcaggaccttgtcttcctatccatgacatccaccagagacccaggaatcgtgccaaggaactcgagagcgccccctgaagccgacgagttcctcggctgcaacacgccgtctatggactggagcggcgggagaaccccgcggatgaggctccgccggaccaaggacgtcatcatcaacggcttcacggtgaaggtgaagttctgcgagacctgcctgaggtaccgtccgccacgatcctcgcactgctccatctgcaacaactgcgtccacaagtttgaccaccactgcccatgggtcggccagtgcattggacttgtaagtaaccgacccagctactatgcagtacgcaatttgaatgttgaattatcagattctagctccagacctccactgaaaaagg

SEQ ID NO: 1255 - DNA, 746 bp, Zea mays
agcttgcatgcctgcagcagctatgcatggcacccgagcagggagccatggcagtccagggccctaaagacccgagcaacttttttgcattcaaggctgcattgcctctgcgcctgcgtcttctctctctatctctctctcatgtcattgacatctgctactactactaggagagaatcacagactagacactagtatcagggaggaggggcggggtagcttttatcggggatggctgatggggctgccaatgtcagggtggggaatgtggaggcatgcctgcacagtcctggcgtgtcgcccgtcgcccctctttggggaggccaggccaggccgaggccggcccacaggccacactgtcccacacgcacgacgcgacaccaacccatgccgttttgctcagcgcccggccgcagttggggttagggttagcgcccccccccccgtctaccttaggcaatgcacatttcggtgcaacctccattgattccctcccagcccagctctgtctgacctccttcttcgagcatgctgcatgcatggggatggtatgcgttgccacgcccatcgccatgcatgcccccatgcagcaagtgcaactgcgcaagcggcaacaagcctttgcgttgcatgggcattgccctgttctttaaagctactagcttcgaaccatgcgatcgagcagggtaaaatcattaaaaaatatatagattgagaaggagaaagtaaatgcatgcaacacccgt

SEQ ID NO: 1256 - DNA, 776 bp, Zea mays
agcagccagcagccagcagtgccgcagcgaatcccagatgggcgggcgcatgagtaaactgcatacaaaaccaggaacaagtccgatctcgcgcccgcggggccactccccgccgccggatgccggatcctacggcccccctcgttcgcggccgcagccacccaccacggaacaagggagggatcaaagagcgtgacctcgaggtagccgcccgctagcatccaacccaacaaccgccactgaaacggtaacgccacatggacccgggcgccagcggctgggagtgatcccaggccagagcgaagcgggccaggccacgaacggacgagccttccctgaaccagcccagcccgctgacgactgggcccgttccgtcggggtcaaacgcacacctaccccacggaccaggggggaggggcgggagaggtgagtgactagtggtgagagaggttcttgcacgccagccagccagccagccacgaccacgagccacgagaaagagagaggcaccacgccaccaacaaaaggcaagcgagggactggaaaacaaaagggagacgctcctggcgggtgagcgggcccaccggaggcagcggacgctataaaagaggcctcggcgccccaccgtaaccctcgcctcggtcacgacgcgcagtcgcccattccgcatctcgcccctcccgtcctgtcccgtccgtccgttctccgattggccgccgcccgccttggccctcgtcaacaaaagcccaccgcaagcgagcgagcgagccaccctt

SEQ ID NO: 1257 - DNA, 715 bp, Zea mays
atatcttgttgtggcacctgagcatgttttactgtcatctctaacatctgaggaacaacgaacacatgtacgatccttttccttaatatcttaaaaaaaatgaagtatactatggactaatcagaaatggcaggtagaggaatacagagaactttcagcaagaaagagtgaactagaaagaactgaacttcagaaggaaaaaactggggttttcagtggttcttatgctaagaacccagcaaccggggaaatcattccaatatgggtggcagattatgttctaggaaggtttgtcaacatatgttccttaatccttacttccttgtgtattctgatgttgtgttgtactgttgtgcattatcattgttttgttcattttatttctgaaagaccaaatgctagaaactctagagtagtttgccagagaacatatgttccttatttcagaaggaaaaaatgaagtcttactatagtttgcttaattcagttctccatatacatacattataaatttggattaattgttctttttttaccttcaactaaattttgcttcctaggtagggatctacctggcagaatattgttgctactcataaaattgacaaacaagctattggaattacctttatattcaataaacatctgagattttttttttaaaatatgcttgctactatcgtttccaaactgtttgtgcattctaatctgtctg

SEQ ID NO: 1258 - DNA, 814 bp, Zea mays
ttcattttaaataattgatcactagggtcaatacaacaatttaagctgcgatagagttttatgcacactgaaacagttggatttgttgcctgtgctctaggtcacaagttcaataaagtagagggtaacaaagcagcattattgaacctttcaaaagaagacaaggtttgaacaatttatagcattttctctgccttatttctaattgttttcaaggttagtatgagatgcatattttttttctcaggctggaggctacatatttgagtttgacaatgttggtaaccgtgaccaatgtcgagactttgtaggtaatgttcgttttgtagttggtcgatgccaacagaacagttaaatattttctttggaagatatctaatgataggcatgaaatgaaagtaagtgaagtacttagctgtttctctcataaacttatctcctatgcaagtcacttgcaatataagaatttgactaggtacctcattccagccagacctagcatttggcttgctacataagataagatagatcactataacgtaacggtgactattttataaggaatataataaaattctggattgagggttgtttgctgtgccaagttcgatatggcaccgactcacatgaaagctaccatattgtgttccgtgcatctattaccgagtaagatgcatccataacttaatacatcctcctcgcagctagggttttaggcaaacattaagggatagtgcctcctagaccaactgtggctcctgaaaacttagttgcttctgctgctctggaacaactcagtggccgcagaagtgga

SEQ ID NO: 1259 - DNA, 732 bp, Zea mays
agcacaagattttgaaacgtttttaaggcataagaactcgaaagataaatttacgttgcaaccgtaattcatgaggctatggccagcagatcgtgcatatgaccgtgtaaaacattgttttacactgtagaatgcactatttatagagtggggtttgaaatatgagatgaggatgagtaagctgatggagatatcttgagcggtatatattgagtattgtatttatagatttcgtacctacttattttgtctacatgtgtcttgaagatttgaattatacttgttactttgttatattaaacattgatatatcatttagttcagcctaaaaaaaattaaccttcttttagcagcccctcctttgatccattcctggatccaccactgcctgtggcagcagaacattaacagttctatatttgaagaaaacagtatattgatctgtgttatgctataattcactttaaaatccaaagctatgccagtagatagacatgaatgtatatttggttatagcaatatcaaaatgaaccatattcactgaaagcgtatgaacaccatccacactgtagtctaataccagtgggacaaaaatatggttttgcaagcttattagttacagataatagtgatgcatacaaatataataatatttttttgctataaaaagactcatacagtgggtacagatcttttaatagttgttaaatataaatattataataagatttt

SEQ ID NO: 1260 - DNA, 779 bp, Zea mays
  unsure (1)..(779): unsure at all n locations
ccgatcactacagggtgcagactgaggagtacatgctaatgccatcatgcaatataatctcaatttaacaatagatctatacaacaacgataagattacacaatagaaacaaagtctcacagatctaagaaataacaaattcgcaataacatgttcatactgccacacattagaaactgaacctcacactatctcactgtcacacacaaacgacaccttccatggtacaaatacaaactacaaagatccgaggcttcgacgtggctagatgattatgaaatctaaggcttgatggacagagtgctgctaaaactcctcgctcgctcgctcgagtcggaaaatacaccagtaacagttgaaatctaaaatacgataggtaaacatatcaatataaaaaatcttaatataacaaattcacaatataacaaaatttacaagttcacaattcacaatataataagtccataaaaatcacaaattcacaaagatcataaatatgacaagttcacaaggatcacaaattcataatataacaagtttacaatataccacgtttacaagttgacaagttcacataagtccacaattcatgaattgacatgctcacaaagttcacaagtccataatttctacatttcataaaccatattaggaataacaacacttttagcgtggaaacctggaatgtaaagatacattagtgcattagtaaaagggtaatgtctaattaaatngtaaacaaatataaaagtagtgtatataaacatttcttgctatag

SEQ ID NO: 1261 - DNA, 733 bp, Zea mays
atcatatgcagcgtggacgcctccgatagccttggctttggacctccttatcaggtctcgcccccgcctcttcttttttgcactcgtcgtcgtcttcctgttcttgttgcttgcaggcaagagaacatatagtatagtacatgcaatccgcgattcccagcactgatgaaccatgatccaacaaatccaatacaggccttcttcctcggcggcgcaggggacccggcgtcggtcattgccggttttgggccgaagacgcttacccgtgccttcaacgtgagatacatatactaatctaatatgaacatttcgcatagatcgtcgtgctctaagtgacacaggtaggcggtagcagctagcagtacccataacttgcatgtcttctactaggccacctacgacgagttggcgcgtatcctgttgccacgaaccggcggccccatcgtgtactacaccgcggacgcggagccagagagcggtgccgccgaagaggagcgcgggcaggtcgacgggcacgacggtgtgctggacaggggagcgcgacgcgagggcgctggcgcgtgggtgccgggtggcaggggagacggaggcgacgagtgcggcggcagcgatggcgcgcgtgtggcgacgtcgtggtggacgaagctggttaacagggtcgtcggaggggcggctggcggcggcgtccccgcggaggcgaacaggaaggccaagaagaagggcggcgcgtcgg

SEQ ID NO: 1262 - DNA, 801 bp, Zea mays
aacttcccgacgtcgcaggcgctcgggggccaccagaacgcgcacaaacgcgagcggcagcacgccaagcgcgtgcagatgcagtccgcgatggccgccgccgcagccgcggcggcggcggctggcggcgcgcaccaccaccacctactcggctacccgcagcaccgcttcggcgtcgcaggccccacggtggcgacattgtacccctcgtggccaacaatgaggcctccagctccagcaggcgccggtgccggtgccgtcgccatcggcggcccgcagttctacagcgggatcggctcgatcgcccagccgatcaacgggagccccctcctcacggctgccgggctctggaggggcccgccgccgcctgctgccgggcatgggaacgcgagcttgccgtcgtcaccaggcggagagcgccgccggccggtcgcgctctcgtcctcgtcccccgtgttccgcggagacgatccgagggcttccacttctcttttggcggcggcgtcgtcgccctcctcttcctcctctttgctgctatctccacaaggtcagtttgtctgtgagcagcctgctgccaccactgcggccgagggcgtgagcctagatttgcatctataattgtttccttttggtcgtctatgctgcttttagcggacgacggtggtgtgagcctagattttcacttgaattcagattgtgcatgccttgtttcctgacacgggtgcacatgaatttcatctatcaaagtttcggaactttttgtctgtgtgcatacacatatgcagaaagaatcagacaatg

SEQ ID NO: 1263 - DNA, 737 bp, Zea mays
aacaggcatccactgttcagggttttttttgtttgttttttctctagccatttgccaacacagtttgtatgtttcaactaaaaacggattaagaacaccgaatctgctttagcacttcgtcgtggtaaccaataatacgagttctccatggacgagcgtgccccccagcatatatagctctcaccttttcttttttcttccatgccaatcaaatacaagccccacttggcatgcaaatctccatcagtacagccccttgcccacacacacaaactctaccagtctaggagtaacggaagattttcttacctctacgccacgctctcgcccttatcttcgttcatctcttttctttgggagattgagagagggaaaaaaaaagacgacaaaagcatcggcctctcgtaaagacagagacagagagacatcatcgcgaaagggacgggacacgaactgccggccgaaaaatggcccgggccggggccggggccggccagtgggcggatgtgacccggggggggcagttggagaaaggcctgtgcgcgccacacgtaacgggcccatccgtggcgcgtatgccctccgcctcgcccccggcctggcggcgtcctccacccagcgaaagcaaagcaaagcgagagaagaaaaaaaaagaaaggaaaaccgcgaacgaaaaaagtgccccggttcccggtcccaacgttccctaattcgcccttttggttttgtcttgaact

SEQ ID NO: 1264 - DNA, 781 bp, Zea mays
aatactgtcaatcctgttgtttatccttgtgtatgcttgttagtcaaaccatatttcagtaactaattccttgattgtgagttactgctgatctcataatggaatgggttttcatgtagttcagatgtgtttttttactcaactatttctctattagtttctaggttacttacgtggatgctatttatctgtctggactttggatagtgcaatgttggctcaaaaaagaaaaaaagatagacctggtgctgaaggctccggggtctgggaaagggataaacagaggcaagccttcttcccacaattgcggagaggctgctttcaacacacgacttagtgggacagctctcaccactgcacgagacgtgtccctctaaaactactaactcacaaaattataaaatttgtgattttgtagccattgtgatcttgtatttgtatcaacaaatggttgatgctgcatgtttgcagggaatatgagaattcattacaacatatcatttatttttactactgagttatagtatggattgaattgtatcttttgtgagttacttctctttgtacttgttgagcttgtgcattgtagatttgaactgaagtcatgtggcatttgatttacttccaagttttattgttgttttcatgtggcgtataggtgagggatgaagaaggaagaagaagatttcatggtgcatttactggtggattctctgctgggcttttacaacactgttggctcaaaaagaagggtatgttcctgttgaaaattttaataaat

SEQ ID NO: 1265 - DNA, 797 bp, Zea mays
  unsure (1)..(797): unsure at all n locations
atcttgcatgcctgcagtagccgatgctacccaggctgaccaggctgatgttgttgccccaaataagtttaaggggaagaagtccaaggctactgcaaaggctggtgcacaaaagtaccagtgggagatcatgaagagctttggtctagatgatgaagaaattgccagatttcaagatccttatcattggttgactcacttccctccgctggcaaaggaggttctcaagaaatttggcttgggttgtgactggaggagatcattcataactactgacatgaatccatactatgatgcttttgttaagtggcagatgaggaagctgaagaaattgggcaaagttgttaaagacatgaggtacacaatctactctccgttggatggccaaccttgtgctgatcatgatagggcaacaggtgaaggtgtgcagccacaagaatacgtcttgattaaaatggaggtgatatcaccttttcctcccaagctgaagtcattggaagggaggaaggtatacttggcagctgctacactaagaccggagacaatgtatggacagacaaattgctgggtccttcctgatggaatgtatggtgcttttgagattaatgacactgatgtcttcatccttacagcaaggtctgcttttaatcttgcataccaacacctatccagggtccctgaaaaaccaacctgcttatgtgagctatctggcagtgatttgattggtttgccactgaaatctcctcttgccttcaatgaaacaatatatgctcttncaatgctcactgtcttgactg

SEQ ID NO: 1266 - DNA, 775 bp, Zea mays
agctaagtggtgtcaatggcattctattttatgctgcgagcatcttcaaagctgctggtacattcttcaaaacatgatcaatctctgatgctagattctaatgcaattgagatatgctttctggcttgcgtattcttgaacttgtccaggaaatgaaagataccttgttttggttcgattcatgctttgcatggagacactgtgacaatgattcatttactatgtaaaaaaggggaagagttctagaacctaggcttcatcaaagtctgatatcttcctgaattctcttcctcaacaggtattacaaacagtaatctagcaacatttggtttaggggctgttcaggtacatttgttttaaagttgttacatcccttgtttctcagacaaatttttggcagatgtgggcttggcactgcatacttaatgggatcttgtcgtttcaggtgattgctactggagtgacaacctggttgactgacaaagctggtcgaaggcttcttctcattgttagtttccaactttccatcacaattgtttattggacatgcttttccagttttgttaattgagctgtcttttcagatttccaccacaggaatggtcattactcttgttattgtttctgtgtcattttttgtgaaggtaatgtcacttaaaagtttaatagtagtgtgctattgtttgcagcacactcctattgaaataatcatattgcttagagtctatcgacattgccattcctttctgaaatactcttgcttcacttcttgagc

SEQ ID NO: 1267 - DNA, 814 bp, Zea mays
ttatctgaacctccttcacttgacttcatcattggataagagaacaaaaggacaacagctcttttgtgtcaggaattattgctcaagattcaagggcaaacccagcgctggaggtcccacatgagtggggtctgcgcaagagataaaccgagacaagctttcccccgcaaatgcaaagaggatgctttgaaccgcgacttggtgactcagtgagatagctctcaccactgcaccaggcctacccttcttgctcaaaattggaataaaagaaaaattgaagcacataggaagtggtgaagtgaaagaaagaaagaactattcatggagagttagttttccaaagattgcaaggaaatgtggtactaatgtactattgatggatatgaacagcaagctttcatcaacatttattacctgggaggtaggtccggactgccctggtgtagaggtataccaaagcacaaaaaatgcaagaagagatatgctgaaaaacctgtgtatcatcatcaaagcctgaaaaagatatatacatgataacattaacgtgtatcattgtaaaagaaataattgccatgtaatttctaatacgtaaatagttttacaggattatctgaattctaaaagcggaagttcactaaaaaagaaaaaaaccagctaaagcaaacaatcaatactaaagaggtggaaaatcttttaggagaaaatggccacaatcattcaactaactttgctattttttatacttaaacagcaagtgcagcaagtaagtcagtgttccagtgtcactttttacaggaacacacaaaagcacaca

SEQ ID NO: 1268 - DNA, 805 bp, Zea mays
tcctttcatccagtaacggtatcctgactggtttgggacaactttctggtgtaattgaagagggctattttacacgaatgtctttgctgttgttttctaaggcatgtctttattctaatcctgaagatatcgctttgatacctgaatgtgtttggcagaagttggaaaacatgcaaacatcaactggtaaaatctgtgataattgaatattcagatttctgaggcagcatatataaatttcattgtattccctatacgatgtcctgcttgttcaagctattttttttcttgttatgtactaggaggttttggatatatggagaaagatctctgcctagctctgtgccaactaaaaagtgaatcagatgctacaactgtactgccccttcccaccccctctccggtacttatgtactgtaacatgtttaccaagtaccgacttcaaatctcttccattaggttgcaaaagttctttctggatgtaatagtcaaccagtcagccctgatttcaagagcatccgtgaatcaatcctccaggtcagtgttttgaatgatcattattatttttggtcttctccatctgtattgtcgcttctatttctactttattgcacggttatctgtttcagttcattacttgatttatgttctcattgttgatcgtgcctgcatataagactcattttatattttgcggacagtttcaatctttgtaataactgcacttagactaagtgtgcccccaaaattggtaatggtttggaacctttttgttcttctttctttaaaggaaaattctttctag

SEQ ID NO: 1269 - DNA, 834 bp, Zea mays
tttgcatgcctgcaggtgttggattctgtgttgcggcttcggagtgtcattgctacccttctcctgacaacatggtttctttcgagatgaatgacctcaagagtatgcacctggcattacattttttgtttgaattggtgctaatagggacatcaatatgtagtgccaggaactccatttttggtgtgattttttgtatctcgtttattacttatgaccttcacatatctgcaaattgccaccacatacaatgcatatggaaagaccggtatacatgagtttttttattccatacgatctcacatacccaatattttagtagtattattgtcggtcatgtctttatcatgtattattattctgttcaattctgcaatgcatttgtgggttgaaggatcaaacatgatgaagatacgaccttggaacacatgtgatgaattgatgtttcgttgcattgcagtatgtgggctggacaaaaagatcgttgagttagctcagtggctcgtttgaaaagggccccgattaaacttatttttcttttaaaatgaaaatgactggatttgaatgacttttgactttggctcagattgttaagctcgatttggagttgatctcaaacaattcaggagtctgataaataagagcaggccaatttcgaaggaatccctaaaaaagtgttgttggctcgtcatccaccccttattggccggtcacagtgttacacataagttggaccaataattaaatcaccagaattggagccataccaactaagcttttttagcataaagcatataatctttaggggttagtggtgggttatgttttggcttg

SEQ ID NO: 1270 - DNA, 801 bp, Zea mays
ataagggtatcaaacaaggaataagtctctcgtcttgagtaaaaaaagaaagaatgttttgtgttctgaactccttaccgatgtgacaaacggttgttgaaaaatccatccaatgataggaatcctttggaggaaaacagcaagggttggccaaaatccactgtaattaaatccatgtaagcatccatatagaagctaatcttttgacattaatgatggagtaagagcaaaaaaaagttttgtgaatagttattggtaatgcattgaatgcttcaggttgatgtttcaaccttgaatagcagatgtgtactgttgcattgtgtgtacaaccatttgaattgctgctatttgtgggtgagtggcaagggatttgccactttgcaagatggatgaatgttagaagcatttcctgttgcagattgctaaagagagaacaattaaagagaatcatacaacctgaagagtacaacaaagccatatgcttctaagagcatgccaagaaagggccacccaataagaaccagaaaaaagccagcaccaaatgagatagtaccctgtttattacatcagataattagatatcatggattttaacgtaggcaacatatctaatgtaaaaacgattatggtgctaacaatgctaccatcaaatcttgttcatcagatccaccatctaaggctgagtgcaatcccacctgaggacagcacgcattattctgtgaagacgcaggggttctttagaaaatagtctgagagaaggtggtactgcactgagccctaaatggtgaaccccatggacaa

SEQ ID NO: 1271 - DNA, 734 bp, Zea mays
aaaagcaccaatctccacctaaataatacactagctttttctttgaaatactaacgtatcaagatcatgcgtactggcggaaccaaacaccatatataccacgccccaaaacataaaccgaatctgcaatttccagaatatctgcatgtatggcacaagaagagcagtacaccttttttgtacaaaaacacacaaaaaaaaaacagctacaaacgatttttcggcaaacaattctcatctttccggctgttacattttgattctattacaccaaaccaggttgactagtacaaggacagaatgcaaatatcagttgacactttttgggattcaggcccacaaaatttgtcaagaaaatgatgtccaagaatcgtgtcagagaaaatacagtgaatcttacgtatccgaagctttgttccttcctatctatggtaaacacaacatgctactaagtgcagcgatacatccctatggagttcgcagcgtagaatgtatcacatgaatacatgatggcgaagtagccagcactttctatcctcaggttctatctgtctcgaactctcttcgaatggtttctagcaacatctcattccatgtgtctactggtcctggcatgcaccagtgcaaacaatcctgaggtggaggttttccatctggccctctctgtgtcttcttgtttgggtcaggacttctgtacgggccaggatgaccgtcagccctgaaggcaaagggtt

SEQ ID NO: 1272 - DNA, 717 bp, Zea mays
tccgcggacgtagttgtagccgggtcactgatgtgtgggatcgacttgggcctaactgtagaggaatgacattcgttaaactggtgcgaatgacctgctcagactttatgttgggtggaattgtgtcattgcgtcaggtactttgctagtgagatctcaaatgtactcgtatatatgttttgctgagaaatctatacccatcctggtgacgctgatgtcttcgatcttccgcaggttacagcagggtttataaaaccggtcggttttgccggtaaaccgattgaattattgaaaccgtcggaccacggttttcgttaaccactgtttttttctttaaagtttggcctaagttttaaaaattataaaaaacaaaaatcgtcggtaaaccgttattttagaccagtaaactgttattttggaccggtaaaccgctattttggaccagtaaaccgccatttttgtcgggaaaccgaatttagtgtcaatattggtttctagtttaggtatttagtagccagtttagcatatagacttgtttactgttatatgtgaagatgttatatgctatatgtaaagatgatttactgttggatgttatttttttacccaatttaagtgctagtttagtatccagacattgttagtgtttaaatgtttatacatgacgcatacgtggagatgtttttatgtcaatcatgtaatgtcggatatagtcta

SEQ ID NO: 1273 - DNA, 771 bp, Zea mays
tgcatgcctgcagctctactaacacaactgtgacttcagattggacatgagagagaaactgctatttgtctgatgcaaaagttcattgatcggtcagaccttcagataaagtcagtcgtggcattggatcatcttaaaaattatatttatgttgaagctgaaaaggaggcccatgtcaaagaggtaagcatgtctacgtgtgattgacattttacctctgatttcattccttcttgctaaatttggtctatgcaggcttgcaaaggtctaagaaacatttatgcttcagcaaaaataacattagtgccgataaaagaaatggcagatgtcctctccgttgagagcaaatctgttgatctttcaagggattcttgggttcgaatgaaattgggcatatataaaggcgaccttgctaaggtattaccacaacacttctcttataaatatagtatacaattcttaaaatgttcatttgatcgcgttttgcaggttgttgatgttgataatgtacgtcaaagagtagacgtgaagctgatccctagaatagatctacaagctttggctagtaaacttgtaagttttagcctttgtttctcacaagagcagtgctacaagtacaactatttgggtacaacttgagtattaaagacccaaaggttaaaatgacttggataaaaagctcatagatgcattgatcagttaaatacatggttgtacacttgtacttgaagttgtactcaaagccttacgcttcttacaatcttgcacttt

SEQ ID NO: 1274 - DNA, 777 bp, Zea mays
tattggctcctagcacccctcatattgtttttcaaaactggtgggctaatctggaaagcaaggtacctgttgtgccacgcaaggggatcgattctctagttgtcttggtggctttgaaagcaagggagtggatgtgtgtttgagggggcctcccctagtaccaatcagattattcaaaacatcaaagacgacgctcatcgatggtgccttgcaggtgctgggggctgcatgccctttggccttagtgttggttgcttgatctttcttttctttttttagatggaccattttctatattttcgtttttagccaccatgtggtggttttccttgttgttgtctattttaaaccttttctatattcttcttaatatattgatgcacagttcttttgtgcgtttaagaaaaaaagctctccgcccgatgcctccaactgcatgagtctcgctggtgcctttcagtacctgaagttgacccatcccgacttagcttacgtggtttggtaggtctatctcttcatgcatgatccctgcgagcttcacctcgtgttgatcaagtggattctccactacgtgaaggacattctctccttcgatctccacatcggtactagctccaacgactcttgacaacatacttgaatgttgtctaagcaagatgcccagacttcaggcggtctacctccggatattgcggctaccttggcgagaacttggtctcctggtcgtcaagcgacacaccactatctcctgttcacatttggcttcaatagcttctc

SEQ ID NO: 1275 - DNA, 716 bp, Zea mays
tgcaatggggctatgttgtgctgtgcacctgttgcctgtgctacaattattggggctaaggtgtctctacagtttttttatttttttcagagcagtcactctatgtacagactaatgtatattttgatttatcttttttttaaaaaaaaatgactcaaattcgtataagagtaactccaaaagcacttaaaacaacccgaaaaacagatttagagttgatttggtgaccctggatcccgagataatggagagggaaattagttcattttcccctcaattctcttcaatccttccgggatccccttgtcaccaaatcagcccgacggatccatcattgttggaaaaatacggtaacccgctttcaacctatccccccccccccacccccacatatttgagcgacgtagtgtctccccaatcgtttgcggaatggggcagatggatctagtttttttaaaaaaaatataggctcggtttacggtcttttagcctttgttttgaataaaactgttgaagtatgcaccatatttgcctccaaaaaaatgtaacctgtccctaataattatttttttgacgggggtgtttttgcatccttttggatttgctataaaagtctttaattaattgatattgggtctatctcaggcttctcagctctcctactgttacttttgtcttctaatatttgggatggatgttcgagttccactcgtatg

SEQ ID NO: 1276 - DNA, 778 bp, Zea mays
ttgcatgcctgcagacagcatctttctaatctccaacccagccaagacagcaagtgcgccctttgtgttgtgtatacacgaaacacaagcttaagaggaatcatcagctcctaggtgcatcaagccttctttgtaagcttcaaattcatcgctcgaccagcgacacacaaggtatagacggaatgtcgccatctgtatcccaagcagccgctgcaagaagagagagaccgaaggagactcaaatacaacggagtagaaaatgataaaataagcaggtgtcggttttcacctaaactgggcacaagggagcctaaactttagattgatcataagttacatagtgaattatggcatattcttctaaatcaaacatatgacaaccattgcgcaatgatactgtaccagagtctgtgctgcttctggcgaaaggggctttccttcctcacaaactacatggtctgcaactaactctacgacacctgcaccaacaaatggtagactgactttttaatgacttcttgccagaattttaagcatatatgtaatgcagacgagacagcaaacctttgttcaagcgaactggaagtccttgcttgcgaagaaagggctccatctcatgtgtgaactgttccagagggccttccttaagctcaacctgaagaattgtaaatgttttttttaaggttgtaaatttggtgaaacacattatacaagaaaccaaaaatggcactaaggagctactgcaaataagtttcattgtcaacttcctagtcagtct

SEQ ID NO: 1277 - DNA, 769 bp, Zea mays
agcacagcacatgcgccaggattgagtaaccattaccaacgcaatcactaaccaagcagcaagtcaaccaaccggtagcgaaccatacccgacgaggcggcggccgccgcatcctgggctctcttcttattcttcttcgcctttgccttgccgctcttgcgcttccgcttcttctccggggacggtgcggagggggtggcggcggatgggagagccgggcctttacgaaaccgggcgaagtcggcggcgaagcgcttgcggtcgaagtgggtcccggcgaatagcgccgacgagagcttcgtgttctccatggctcgccgtcgccgccgcggagaccccgcctttgctctaaaaccctaggcaaccctgcttctctctgtaattgttgcgggaccccacccagacacgcagtgagagagctagtagagttggcatggcggcttgtccccacgtcgcagcgacagagctcgctctcccctatttcctgtggggccaatacagcctcgtgtcactggagtagcggtggcgagtgcagaccccactagtcagcgtacctgacagtgtggatccactctcctcgatgacgcggaatccgtttcagcttctggtaggtatcctggtatccagttcctttctttgcccctcctccgctttcttcggttcttcctctcccccactccccgcgctacctgagaggctgagactaggaaggggaaggaaaataataatttggcgcgcaaatatccgcctccattcgtacgccgctatt

SEQ ID NO: 1278 - DNA, 799 bp, Zea mays
gcaatcttgcatgcctgcagaacgagcaccgaccacataaacacgtccagttccatcatcctagtgattgtttaaaggttagagaagcatcccagttgtaaactgcaaataaaattattaaaaatgatatcattttttgcatgaaggggtccatatagcaaatctggaagccaaattcattttcatcatgaactgtaacttgataaacatttaaataaacattgacatatctgatgcttagaattatcatccatttgggacaagatcatgtacaatatcaacactacctaagctaggggctaatttaaggtttaagcctggccagcaagagctagcatggctggggctttggagcttgtaagctgagtttatccacacaagtgaaatcatagcttgccaagagaagaccataaacttagttgtaaagccaaatttgcataaattattgatagtaggagcccaggctaaattgaaagtcttatatttgaaaaagcaaagaaaatcacagtgtaatagctacagcagttatttaccagataccatggaacctctttgctaacagaaagcatcactgccgaatcttgaatccaggatccggcatcattgtgcttcaggaagtgttgctctgcctacaaaaagaaagttcaagccgaaataaaaaataagatacaaattgcagcacactacccatcgtaattaacaaaaaaaagagaatgaaatcagtagttacccgtttcttcaacaattacaccctttatgccgctttgctggcatataagtggggtgtctgaaccaactt

SEQ ID NO: 1279 - DNA, 853 bp, Zea mays
accaaccacatacttgaaacatccgagttgccagactcctaggaccatctgcatggtcaaatattgataagcacacatccagcaggcgggcaaggatttcatgatttttcaagctgagaacttctctatcattccatgaaaagttcctgatgagcggtgtacgattcaatgtgtcaagtagcctagttggagtgattggaagctccgagagtatagctccaacaatacttaggccaagaggtaatcttccaagcttttcctcaatgattttgagtgcatcagtttccaccagtggatggtccttgacacctcccttcattaaagtcattgcctcagcaccagataaataagaaagcttcattggttccaagttcatcactcgtggaagacgtgttgttatgatgaagtgagtctccccaccaaagtgtggcagaaggtccattatgactctcttatcccaccaatccttctcactctccaaattatcaattatgactaagaacggtatgtcacgcatcaattcttgacgaattttggcaatggcttcctcttcttgctcttcaaagcatcgatcgcttcccttttcatgcaagtgactatctacacttaagtcaacttccagaaaagtccgcagagccaaatagttctgtcgaatatatcggctttcccctctgacccacagaaccatcttgtatctctgaaagaatctatatgcatactccaaaaccaagtctgtcttgccaattccaggctcccctgatatgcaagcaatacccttaccataaagtatcttcctagatctttttttcctttcacaccttacgccattcttcactctcagtggacgcccatg

SEQ ID NO: 1280 - DNA, 761 bp, Zea mays
tgtggacacccgcaccggtgagcgggttgctatcaagaagatcaatgatgtgtttgagcacgtctcggatgccacacgcatactgcgggagatcaagctcctccggttgcttcgtcacccagacatagtcgagattaagcacatcatgctccctccttctcggagggagttccaagacatctatgttgtttttgagctcatggagtcggatctccatcaagtgatcagggcgaatgatgacctcacccctgaacatcaccagtttttcctgtaccaacttcttcgagctctcaagtacatacatgccggtaagtatattagctagtaccaaccacatggtacctatcccatgtaccaaggcagtttatatatttgtcagactgttgtggttcatctgctcatggttatctagtttgttgttatgatatattatgataatgtgctccttgcggtctatattggtgcagctaatgtattccatcgtgatctaaagcccaagaatatactggctaactcggactgcaaactgaaaatatgtgactttggacttgcccgtgcatcattcaatgatgccccttcagctatattttggacagtaagacgcttgccattttatggaagcattcatgttccactttcccgtttttaatgtgcttctgcttttctgtttgaaggactatgtggcaacaaggtggtaccgggcacctgaactatgtggttcctttttctccaaagtaatgtctccttctcttgaatgacat

SEQ ID NO: 1281 - DNA, 827 bp, Zea mays
ggtcatgttgagcgagaggccgaagtcctggccgccctggaagagctggcagaggcaggccacctccccgcgcaccacgtccctgagccccgagcagcaggacgggtcgggcgccgccgccgtgctcccctcctgcacgtagcccaggcaccccgccagccccagcagcgcgtccgtgcagtccgccgacggccccggcgccggcgccggcgttggcgttggcgtggaggcttccacgcgcgtggtggctagtagcgctgcgactgcgagcgccaggaccagcaggcgcgagcgcgacggacggttcgccatggccgtcgatcgtccgagccgctgcgcgctgtcgcggtggtgccggtggtgggttcagacgttcagcggcagctatcggcgcgaccagagtaccagaccactggtgtgtctggtgctcagcgcgtacgtgctgtgctacttgtagatgatgcactagcagctagtagcaggcggccggggtcgcggaatgtggcgcggcaatgatgaagggatccacgggacgggacgggagctatggcgtgcgtgtatttggagtcggcgctagtcggctagtgtagtgggggcgttcggttggtgtgtgtgtgtcccgctgacagataacaacaataggtgggggacgctgcgcactgcgctggtagtggcacaccacaccacttggcgctcggcttggcttgcacactggcgttcttggaccgcaaggaactagctagtgggggctggcgaatcgatagcaagcaagcaagcaagtccacccaaccggcaaggccaattggcccacatttaaccagaaatta

SEQ ID NO: 1282 - DNA, 988 bp, Zea mays
  unsure (1)..(988): unsure at all n locations
aaggaatggttttctgagaatgagtcttttaacattttttcttcgcaatgccagttaaatcgttatatgtctcaagaaataaacattgcagagccatggcatttatgcagatttaaccttatgcagtttaaggtttttggctatgcagactaaacaattcctacagccagcaatcagactaatgcatatttaatcttaagcagtccaggagagttaacacagaacttagcttcggtccgcatgctacaacattatacagagtagatgattgtaggctgtagcatagagaagagaactatacgattttactagagagcacagcagccgtttttggctgcatgggaagccaatcccaattggcaattggcacgatcactacccactggattgagtcaacgccctgatcgattcagcaagcacgcatctactcctgagagattacagctacaagcgtacgattagccgcctgaacgcagcacagcgcattagagtggcaggaggaggagcaccgaagggggacggggaacgcaccacggcagctggcggcgccgaggcaggggagctggcgccggagccggacgaggccgccatgcggataggcggngagcgtgcgagcgggattgcgtcgcggcggatgagcaggcgggtgcgcggtgaggacaggncgcgcgcgtggtggaggagcgggtgggatctgaagaggggggagagcttgttggtagggtggttaggtaaggtntttttttatggttaggagagggaagtggtnttggatgatgtgaatgtttggaagaaaatgattttggggaggggttatatggttattatgagaataagggggaggtgaatagaatgaggatagagtgtntatgtttttggtgatggttgagatgaataattgtggttgtaggtggaaataaaaaaagatgtttaaagaggaagaaaaatggttgttattgttgaaaagggacgttgtaaaaataaaaat

SEQ ID NO: 1283 - DNA, 754 bp, Zea mays
tgatgtatgctgcatttgattctggtaactatttcgtgattccaggccccccatcagaagcatttcaggttgacagctttattgctaaaagttaccatgaagatgtgaagatcagcttgggcttgaatcctaaagattttttaattgctattgttggtacttcattttcatacggtgataatttgatggaagaggcacttgtcttgcaagcatttagtcctctgttacagagatatcgctctgagaatagcacataatctgaactgaaagtaaagatcttcactgggaacataactgagaagcataggatggcccttgaggtttatttatgtcttcatgccctgtctgatcaagtgaactgttatttacagtctgagtgctttaaattgtatctaaccatgtattagttttctgatttctgatagtctgttgctctaagtgttggcttcccaagaggtgcagtggagcatgttgctgctgaagataaggacaacctccttggtacagctgaccttgatatatattattcttgtctcgaggagcaattattccccagtgtgctagtccaagccatgagtcttgagaagctggttatagccccagaccttgcaattattagaaaacatgtatgtttgtgatgacacctcatattatattgggattgatctttaaattcaaattctgattactgtgtatagtatgttaaataaactaacatggttgccatatggcctagatcaatgatggagtaaac

SEQ ID NO: 1284 - DNA, 774 bp, Zea mays
ttatcctttatagctttagagtcgacctgcagcgtttttagcatttcagtcattttctgaatcctagttgtatttctgcaattggggctgtggtcaaactgtcagggaattggatgacaattgaagttttgatgttgtaggatggagatggagagccaaacgatagaagggttgggaaactctgtgattatgtctcgagaaatccaacaagcataccaaaggtaacacactcggcatcctcttctttctctatagaatgaaaacactcaacctctatacatcccaaatagatgacagcagaggactctaggttcacaccaaaggagcagagttttgagtttatcagcaatgatgttgagttgatgatttttcgagggctccgaggttccatttactcaacctctatttttttgccttaaagaaagtaaaagctaaaataaagtagcgtttgtaaatcataaagaacatactagctttacaaggtgtgaacatttacttgcccagctatgcctcaacatgactgttgcaggataaccaagcttgtactcatatgtcatttctattagaagtaaagctaatataacacacacacacaaaaagacagggtcttgaagctgccagacatatgagcaatccctaaataaagtgtaaatgggacaagcacataaagatacttgcatagaaacaatgccgaaatcatctcggataagcttgccagcagtttagcatgcttttgagtgtaaaatgcatgcgacattccttgtactactatac

SEQ ID NO: 1285 - DNA, 789 bp, Zea mays
attcaattgggaagaagattcaatacaattgtcatggcttcttaccaaatcaacgtcaggtatccctcttgaagctttacattttccaattgcttcgctgccatcaaaattgtccaccatgtaattgttcgactgtccagactgatgagtgcttcagcttcaccatgacctcagttctttatatgtttgaattaatattgattacaattaagaatgaaatagatctgcacctagaattttctacaggttgaatgtgacattatttgagaggttgattacattgattatggtaaagcatcaatcaatatatacatttgagggagtatattgtgatgcttaccttgctttgttttagttgatatgcaaggaatactgtattgagttctctactgtcactgggtgaacacatagaagtcttgttgaggatattactgaaggataaatcaagcttgctgggggaatatacatatgtagctttttttgtgcctcacttatctggataagttttgatgaatgctcttttacatagttgcctctctagacatgctagcagagattgagcactaacccagttctgaactgcatgatgttggccaatgatggcctggctactactcatttacgcttgctttctcccactgtgcttgtataattagagtttatataccagagtgcttcccagtttgggaattgtggaatgccagagttctgtgcagattattggttatttcagttaatattacattttctagttgccatttcatttattttaaaatatatttcaaaact

SEQ ID NO: 1286 - DNA, 758 bp, Zea mays
ttcaagccatccaccaaatcccagataaataggtgttctctcaggagaggaacagtgagcacccctttgatattaccagcagaacttccattatctaaagcctgaggcactgtgcaccatttgatggttcttttgtggatctttttatgagacttggggctaattcagatattgctctgccatctagggtggattgatcattaccaacaattaattccatggccaaattgaataaagcttggacattgcacatcatttgaatgggcaaacctgcccatggtcatgaagcatccattttctccaaccaaagccaccttatgtgaagagaccagccgtagacctcaaggttatgaataccaagagtccaagatctgtatatttgggttggctgattcacttattcccaaaagaaaaacaattgccaccatttgcagtccatagaaaaccctccatctcttgtcgatggttctaattaccaatttggggagatcgattgcaatcaagagataggtggggacaacagtaagcagcacccaacacggttcatgagagatgctttccgctttggagggttatccgccacttcacgatcgaagtatgcaactcagcttttagatgggtttctgatgttcattggaagaccaagttaagtgcatgggggcttgcaccttctcacatgctagtctgctatcctctttcttgcactggagacgtgtttttgaaagcaaggtgatcaccccacacctattacatatact

SEQ ID NO: 1287 - DNA, 719 bp, Zea mays
aaacaatcgctaatcatcattgtggatatgtactagtatgttctcatgtgacatctttttgcattttacttgaaaaactctactgagaatgcataatttcattttcctcttgtaatccaggtagcaaccatttctgcaaacggtgaaaaggaaattggagatctaatatcaaaagctatggaaaaagttggaaaggatggagtcattactattgttgtgagtgttgagtgttcctttttgctgttagggtctttctgtatagtcaatttactgtactacaacttacccttcggaaattggcaggatggcaaaacattggacaatgagcttgaagcagtacagggaatgaagctgtccagaggatacatatctccttactttgtgactgatcaaaagactcagaaatgtgtaagtctgcatattttagctgaaccaattaattcagcacaaatgatgtcctaggtttttttttggggaaatcttgggtacccttgccatctttgttttttgcacacatgtttttttgtgggcatggtaaagttggcaaggaaataaacatgctctcagttcctttttctttttttagaatcaagttctctgcttttatcgaaagcatgtagcggttatcgtgccctcagtttctatttttgcttcagttttatgattgtgatactgacatgtatgctggtagaaatgtatgtgcactagtagggacatcg

SEQ ID NO: 1288 - DNA, 779 bp, Zea mays
agttcctttatagttgttgtctggtctgggtttgcagcagctgcattctcttttatttggttgatatggctctctttctccacaagagctgcttccaattctttctgggtgttggtaagatatgtggtggtagtttctgaatccatgagcttgtttttcaattctgccctctcaatacttagggcagatgttttggcttccagttcgtccactttcctcctcatttctttattaatttctttttctttctgccaaaaacaagacagtaatatttggctgatgagatgttcttgaataacaggttggatagataattcatagaacgcactaacagaaaaggcagatagaatgctctaaagtgctacagctattgcagtttacatcaacaactggaccgtacgtactggcagaataatctcagtacctacttgcagaataacaggatgttcaattgaatataacgacttaattagttggctacttgcattttgaaactaaactgtgatgtatgtctacaaataatgtcaacattgaagtcctcacgtgggtgatttgtatggactaacgtatgaaggcatcgtatgttttgacagtatattcatagtttgggtatggaaagattccgcatatgtattactgtggttttgttgtattaatctttcttccaagggccctgtttacaatgtgagaatcgttctcctgctctcccgaaattgtcatgtttccattgaaacacatgcaaaatttatgcttacatacacatcctaaattggcaatat

SEQ ID NO: 1289 - DNA, 857 bp, Zea mays
cttgcatgcctgcagtggtgaagtcggagctgctttggttttgagggtgcaacaaagctcgacaacgatggcaaattgttctttttctcaagaggtcgtggcttgttgcaagtgagtggcagcttagtatgggctttgactgaggttttttgtgggaagtcggagttgcttatcactatcttgggattaagctcggcaacgatgacgcacggtgggctacattggttgtgtgacacttttgtgtatttgtgggttgcttagggttagctgtctgggctgttatgtttagtttaggtatttttggtcggtttccctttaataaactgtgccattgtgaggtttttaggcttggtttccctcataacctgggtcaattctatctctcattctctcctttaattgaaaggcaaagatcctgctattgcgttaaaaaagaaatatgagagtctctaaccaaggatagaaataaaacatgacggagaaatgcttattagctatcaagtagggtcactgaattatgagctggagtgtaagacgtggacgagtggctgtggcatgtatttaagtcaaattgaaggggttcataaaggtgttctctagctggcttctatctataagaaagaaaaggcagatttctagtgccgaacttctgtatctattcccaggactcatatcatggtgttgtatttcaatttcatcacaatttgacagtttatgctgttcatgctaccttgcttcttggtgacaatgtgtcgtcagacctagatcctctctggtcccttccatttgccccactcaatatccctcttgggcagcttacacctcagcagaattaccgcaaacccaaccagcactac

SEQ ID NO: 1290 - DNA, 758 bp, Zea mays
taacaaattagaacatatgggagtcatgctaccattcttctaagaacagcatagctatttggtctacataaaaaaagagcagacccagtgccggagcctcccacatgagtgaggtatgggtaaggaataaaccgaaacaagccttccccttgcaaatgcggagaggctgtttcgaactcataacctcgtgattcagtgagacaagcagacagcttctcacgcaggtcaagaaacccaccaaatctctgccccactgatgtgggacagacgaaggattttttaaccctagtctgaaattcgcctgaaattcgctctcacggggagttgaactcaggactaaagtgctattctagtcatctaaccaacgcagctagaggccgtttcactcaaaagcatgatctgaaattaataatctgctttaaggacagggtactaacttcaaaataatgcttctcttgaaaagtgcttttggaacctgcccagacagcttgttattttgaacatacctgcaaaatttttcattcataataagagaggtcttttttccataaagatcctcacatagatgtaatcatatgaaaaagcctaaatcactgacatcaatttgccttttggtttcttgagcagaaaaaaataagaaatgaatacaaataaaaaaagtcagaaaaaaaaataaattgaaggaatattatactgtggcctccaaaatgtggagattaagacaaggtgtacacgtggatgtttaaacttaccaactt

SEQ ID NO: 1291 - DNA, 721 bp, Zea mays
actacaaagatcacataccgtagcactgctgaaatgagtgcaatttagaacattaaacacttttatttatgttcccaaggtgatctcagaatatccagccctaaagaactgaaacaggactgcaaaaaatccataactgaacatccgtccattcatggtctcatactctcattctaacacatataacccctcaaaacttttggctcatattagcccgcaaattaccaaagttaggacacttcaatccctaataacatttgttttcttttctccttgttaaagttgcattttaagttttagtgacggtagataacatcacccagtatgctatgaaatagcttcatcttgtttactatcttccaatgttttcatatcttgggggttaaagcagtttcaagtgctccaaagcctccaacctatactaatagtcatgaaaactttcataacatagcataacactacctgtgtagaacaaaaaaaaaggcagggggaaacattagatgggaatgaggttacactgtttcaattattcaagggttataactgaactgaaaaaaagttttgaggggttatccagacaactaaaaaccttctagtaggaagtaaaattgacatttttttcctaaaaagaacatggagtgccactaaagaaaccttaggcatgcatatactcagatatgattaaagaaatctgaggaacagcaacctaccttgcataaag

SEQ ID NO: 1292 - DNA, 733 bp, Zea mays
ctccatctgtcgaaaagataaaagggtgcaattgtgcatttgagccaagtcaaaaaaaacaatcaagtgtaactaaatttattcgaaaaagtgtcaatattttatgtctctaaatagatttatataagaatacacttcacaactagcaacgtggcacatacaaaatagcgcgctaaactagtttttatagcaattggctcttaatttttatatgaaaatattttttgtttgattataatcgtcatctttatttttcccccctctcccaactacatccacttgcacaaagtctggactgctaccattgactagttttcttaatttcacaaatataattccatcaactatctttctttttatttcactaatgctcctttatcgtgcaatttcttcatatacaccaaatatcagtagtattctcagttatcccatagtatggacaaaatcattgccgattcccttatgttttttttatttatttcagactttcagttgtcttataaatttaagatttttaaatcattacttgctaattgtccttaattgtcatcaaagaatccgacaatgcatactcttttattttcagttgaccctataatttttttaccatatatcagagcgaacatataggctcctttttaaccgtattatataaatataattctacttccgttttcgaatatttgtcgccccactagctcatttttaactaaacggcgacaaataaaaacga

SEQ ID NO: 1293 - DNA, 767 bp, Zea mays
ttggaggcatcgcaatggagataggactttgcagttgaacttgttggcggatgattggacttcctatcccacattatttgacgaatgttcgtgctgtttaagtgttctctgttctcactatcaattggttagttaccagaggttggtcttgctgattgcagatctctaggtgggatacttgcatgggcacagaaggatccagatctattcaaacctacaacaacctttaactcattgtgtttgttcagtgtcttctacctggaagtagataatgattgtggtcattgttgcaggccttctcatattttagcatgggcttgtcacacggaatatgtgtggggagtactaaactttgtgtttgttcagtgtctactacctggaagtagataatgattggggtcattgttgcaggccttctcatatttttgcatgggcttgtcacacggaatatgtgtggggagtactaaacttatctaatttacaaaacgcctatgagttgttttgtgcttcaacaatctaaattacaagggtgcttctaattcatttctgtcaacagtcctatccagtttctttcttcaaccagtagctctttgtgctgcaacaatctaaattacaaggatgcttctaatccttcatttctgccaacagtcctatccagttactttcttcaaccagtctttcaagtttgtgcaggtgtggcacacagaagctgagatagaatctccaaccatcggtgctgtcttcaaagccatgcccgttccattggc

SEQ ID NO: 1294 - DNA, 804 bp, Zea mays
cggtctacctgctgcaagaagcaaataaaatgcatctttcctgggccataataacaagcaaacgcagcacgacgcatgcccctgctagaggcaacagctggcctgctcaataattcacccagagtcagaacaatcaatcgacgagacacgcttgacgatacgcatcagctaagaaaccaaccaattatcatcggcgcggctaaccaaccaattatgcagttatgctgcaactaacaacaaccagattgcgagaccgggaggaggcagcaatgctcaggattgcaatttttaaaaaaaaaacattttatttatgccagaattttgttgatttacaacggaaacctgttgattcacaagtgtcagaaaaatgaaggggtccgccgcgtttgtcatctcctcacggaagcaggtgttgtcctagtagcagaacattgttttcttctttctctgcaacaggaagcaaggccatcagagactgatacagggattataacacggataggaaaacatcatgatgtagcactgggaacctgagccctggcaatctccttgctgtcgatgttcgcgagcagttcctcttgcctgataagagcctcgtgcaaagcctagggaaatttcacagataagatgatgcatagtaaacagctggctgatgaaactgctgaagctaatcaaaccacaaacaagcaaaaacttttatatatacatgacgagcttttgcgtagtatgctggtatgcaaaagcaagaagcaaaaccacgtgctactattgcgcgcttaaataaaaaaatgttacctttctttg

SEQ ID NO: 1295 - DNA, 879 bp, Zea mays
  unsure (1)..(879): unsure at all n locations
aaaattgacaatgataactacccagaggtatgagcctcaattcatttttacactttgttgctgtttttttcttgcttggaatatattgggttaatttgtcgtatctccagactctataccaaatgtttatcgtcaatgctggtccgggcttccggttactgtggaacaccgtgaagtccttccttgatcccaaaacgaccgccaagatacatgtgagtttccagcgaggtgcagattacagaaacagaactacttttttttgcttgatggcattgcttaatgtctcagatattcttatgtttttaggttcttgggaacaaataccaaagtaagctgcttgaaacaattgacgctaggtaagtgatgttcaatctactattttcagggaatttgttttcttaattggtcacttatgattattgtttcatttgtaaaaaaaaattgctcagtgaattgccagaattccttggtggcacttgtacctgtcctgaatacggaggttgccttaaggctgaaaagggaccgtggaaggacccaaacatacttaaggcatgtgtcattagagcacatcattgatcctcctagtatctgttctttgctaactacgcagtataaccttctcattctcatgtatttattatttgtcaccccttgtactgataccagatagtccaaagtggtggggttcattgtgctcgtcaaattgtaactatttccaatggtgaggaaaaatttattacttacgccaaaaccgaagcgccacgccagtaagttttcgaattgaatcttcattngattttcgttttccataggttttaatgtatcagaaagttcaagtaatttgtttgcttttgttaaaaatcatgcctttaatgtggg

SEQ ID NO: 1296 - DNA, 705 bp, Zea mays
tgcaggagaggcccttaagatctgatggctgtcatgtcttgcacatccccagaccccagtgatgtgacgtcggtccgcgctgcgtccaagtgactctgtgactgactgctggggacatggcgttcgctgtgcggacaccgctgtcgtgtgtcgtgtctgagggctcggctcggctgtgcccgcgaccggcggacgcggcccccgaggcccacgagacacctgacctcaacgcaactccggttgagtgtcacggaaccggacgatggcggtcgcgtcgtggccccactgtttcctcgccgggcgaagagcctctgccctctgtacttgtacaaactctgtcattcaactctgcaatcgaaagcatgatgatgggacgagacggtggtgctcagcagcaaagccacgatttagggaatgcgataggattcatgataatcacacgcaaaatatatcatagagatttaaacaggctagattttagatgctagactgcattatccagtccaaagtcttgtattcacggttgagtaagataaaagaagattatgcagccaacagatattgaaaagacaaaaataaccttgaaaagggatacgcagcagagaaggttagaacaataaataaatatatgttgaatatgccacttcaaatatctataattcaaacaagttagatagagatcatgcctaatctagataatacaat

SEQ ID NO: 1297 - DNA, 809 bp, Zea mays
gatgagtggtcgcatcgcacatcgagtgatcgacctgttggtgattagaccattctcaatggatagtttcgccaccttatttgtaaggttgtcgtgttaatatttgtctagcaatagtgttgttacgcaccacctccaatgctgagagacagacgcaagcaggtagtcatacacgtgcaaactgttctacacatcatggacgctctggaacaccgtcagatagtccggatcattccagcggacagtccagcaacatccaggaaccacgacaaccacgtaccttcaaaccataacaatcagaaatatgtacgtggaaaactaacactgtaaagacagctggtcgactggttagatctggacagacctttgactaattattgtctaaatatgtaaaaaagaatgtcggcccatgtgaccagccaacaaagcgacctcgctcacccactcaggagcgacagcagttaagaccgattggaccatctcaccaatcagaaaagacggaaggtcatactgtgcagttaagacataacatgcctacatggacacctccacccccatatctacctgtgtcatatcaatatacatacataccgccgctatatgctccgaatcaaatgtggagcatgccaccatatccatttggataccacagtatcccgcttgggggacaccccaaacatctgtattcaacaggttggcacctccagtacaagaacaattgagcgccactcaatttggtcaccaggcacaggtctagcaagattgctggaccacttggccgcaaagaccgaccaattcggcaggggggc

SEQ ID NO: 1298 - DNA, 801 bp, Zea mays
ggtggcttttgttggtgctgccggccttctcgtacggtcgtacctaagtagtcgcggacaagagaagacggccctcagttgtttggatgtgtccagcagatcatacatataatcatgtaaaacaatattctgcggtgtagacagcattttatatagtgaagtttaaaatagaattttgtgctaagagagttggtcgagatagcttaagaatgcctgaagaacatttctagagtactcatatcatatatctttaaaggaatgttctaccgataacttgtgacttgtagaagcgacgttagattaggtggaaaccatgagagcctatttggaagacaggtttctttttcgtctccatgtatattttctatgaaattaaactgatttttagaaaacttctatacaaattctgttgtgtcatatacagatcataaaaagctagtaagagtagcgcacaagtagtcagtgaggaggttggaaagcaaatgtcgctacaatcgagatcctagataggattgcatttctccccctcacgacctctattggatatatcgtggtatcggaatgttattagattttacaaaataaaatgattttgaattgatttaattgggttttttttgtaaattaagtggatttttttgacattgtttccagtgtacgcttaactgtaattgtaaacaatattccatcacaggccaaaagcccattttaaaagttatgcagtaccatatacgatcagttttgggattctacagatttcatatagaagcttcatctatgatttgggatacaattaaaatt

SEQ ID NO: 1299 - DNA, 812 bp, Zea mays
aggaagtatgccgcacaaactgaagatggccgaagttcattgaggagctcagatctggtccaagatcacctccgcaccagaaaccttaaagtcggacggtgcttcctcaacattgaaagacttgatcttaccatcgtcaacaaaggcggaccacctaaaaatgttgtcaaggtttagaccagaagacagaaaccaagcataagatggattgtcattactcatacgcactccttgcttagtcgagaaatttaaaagatactctaagaacggttgttatcatgtaaggctgggatgtcttctacagtattatattatattatcaacctagtgaaacgaaagcaacatttcaccatatggtggtcattcacaatttcctatgcagccatagcacccggttctgctgtggtggaaataaattacataaagtgtacagagagacatttgactaaacaaggacaaatttgtcagagctcagaagacaacggagctttgctaatcaggcagtgtgataagtaactcagtattaaactacataacacaattcttcaactgtaatataaaggcagcagtttgataatctctgcaagttgagtccattaacctgtgagaacggcggccaagcaaagcagcagaaaggtctatctccaaatccaagcttttgtggaaactcccatcaaagtcaccatagaactcaatctatattttccaaaataattgcacatagaaaaaaatatgaatatgcacatgatctcgagagaattaatatagataataagtggaactgcacatactcaattcatagttttttcatt

SEQ ID NO: 1300 - DNA, 573 bp, Zea mays
aaggcgcggtcctgggacgagggcgtcgccaccaagttctctaccacgcctctcaaggacatcttctacgttcgtagcgccgctcctcctccaccgctcgtgtcgtcttctgctagatagtccatacaggccaattcagtcgtgttgacccgggattctttgcttgctgtccttgtgcttgcaggggaagaaggtggtcatcttcggcttgcccgtaagttcccctccccactacttccattctgctctccatgtacatgtctggtcatttaggatcgctagatgaggcctttatttacattggtgcggaattgttttactaggtttgctagtcctgaatctacatttgggaattagggatgcctcagcggaacgttgatcatgggtgtttttttttttttttttgctgttagaacgatctgggaaatatacgtaggaattgggaatgggaagttatgttgtttcagtgaccatggtgaaatccgaatgatgtatcttatatatattagatgacgtttctacaaactagaggtgttcatctctgatgcctaggagaaaacattacatttcatt

SEQ ID NO: 1301 - DNA, 785 bp, Zea mays
agcaaagcagttgcaagaactgtcttaccaaagagaagagagcttaaaacgctgggagcatagtattggttctaaagaggattgccttcacaggttggtacttaatctctgatttaagtgttaggaaacatgatgtcttaggggatgtgcttttattgtctttcttcaatttttttctatgcatattgacagtcattttgtgcacaaaccgtggtgctcttttgtgaatttataagcactgtccgtttagttggacctgttatctcatatcactaattcacttataaagaacagtctataggtaaatccttagcctggaagctacttgcgtttccaggaatagtattgcaccattagcaactgcttagataaattaagtaaatgcttaaaatggaggtggaagcgaccacaaggacacactatttagctgctgatgttgcaactaaagactctgattcagacaagactgtgctactggaaatttagaaaaaaaatggatgaagcttacacaacttattgcatagttgtcttttgtatgaacatgttataaattatcaccattttaaatttaaaatcgtggaccaaatgaaagaatgacaggtgtggattcatatcatttgggtcatattcttgttattgttgtgtactatatgtttcttcaagagtatcatcctgagaatgcatataatctagctcggaatcatgaagactcatgtcaagtggatgccctgacatggcaaatagcaacaaaacctgataatccttcttaatgtacttgataaatg

SEQ ID NO: 1302 - DNA, 776 bp, Zea mays
tctagacttagcaacaatacacccaagaatatccattaccaatataaaaagcttaggtgacagaggatcaccttgtctcagcccccttttaagttgaataatatcccctggaacaccattcaggagaacttgtgtagaggaggtggccaataacccactcaagatatctttccagatctgcccaaatccaagtttctgaaggacttcaagcaaaaaaggccaagagacggagtagaaggccttggtgatgtctaacttcagcagtgccctcgtctttttttgttgatgaagtaatctggcagtctattgtaccatcatgaagttgtcctgaatgaaacgacctttaataaaagcgcacttccttagggagactaaatcatgtaacttttgggacaatctgttagccatcagctcaagatatctctccagatctgcccaaatccaagtttctgaaggacttcaagcaagaaaggccaagagacggagtagaaggccttggtgatgtctaacttcagcagtgccctcgtctttttttgttgatgaagtaatctggcagtctattgtaccatcatgaagttgtcctgaatgaaacgacctttaataaaagcacacttccttagggagactaaatcatgtaacttttgggacaatctgttagccatcagctcaagatatctctccagatctgcccaaatccaagtttctgaaggacttcaagcaagaaaggccaagagacggagtagaaggccttggtgatgtctaacttcagcagtgcc

SEQ ID NO: 1303 - DNA, 732 bp, Zea mays
actgttggtgtgcatgatgagactggactatgaggagtgcttgttagtgtggaagatggaccaattaacttgttattatgtttataaggtgctcgcatagtttagatattttagtactgttggggaccagttgaaatactgaaaaaacgacaacaggacaatatggttaaattgttagacccttctctcctgcctgcgaaggttgtagagggaagaaagtgttgcaagggtttttagttattctttgactttgagaacaattgtatgacaagcctgttatttgaatatggtcatttcaccttgttcaaacaaagaattgataaacaaagattgatcaacagttcaaagcacatgggcaagaaaaaaacttaggatacacataaacattgaaggaattatgatcctcagagcataagctttgactttattataccttcggaggctctctagaggaggaaatgcaacaagcgtgatttcaacgaatggccgacccctgtagcagtcgcacgtttcacttatttaggactagtttggaaaccctatttttccaaggcgtttccattttcctaacgcctcgtttggattattggaatcgaattccattctaataataataatttaggcatatatcaattaagctaattcggttttatgcaaaatatatttgtatactattattagcaaaatgtcggagatatttatgtgctacatttttactatagagcagtgaaa

SEQ ID NO: 1304 - DNA, 779 bp, Zea mays
attattaccggatcggttggtagcctgtcttggtgtcgaatgaagatgggccggccgggcaggaggttttgtgttgcatgctacactaccgaaatcgggtactttgcggagtgagtgaatcactcgataaaacatttacctagtgtcgcactcggcaaataggactcggcaaatagggctcggtgaacagtacatcgtcaaaggcttctttgtcgagcattttttctcgagcaatcaacacagactttgccgagtgtcagatggtactcggcaaagaaaagcggtcgtcacgacgccggtgacggatataggtgacactcggcaaagaagttacctcgttgccgagtgtctgccggccagcagtcggcaagaatccgtcaatgggtccctttgttaggttctttgccgagcgctctgtatgacactcggcaaagtgtgcctctttgccgagtgccaggaccaccacactcggcaaagaagctataccggtgtccagatattggttttttgccgagtgttatggctctgacactcggcaaacccctttttgccgagcgtaatactcggcaaagtaaccagtacacatattttttatttggtttttctattcaatccaaataacaaaagatacatcacagatattatcacatatatacatcatatatatcatttgagacataaatattcaatacaaacattaatagtcacggattccggtagtgctaataagtgacactactaatacttaaagagagtacgtactgtagtgaggttgaacc

SEQ ID NO: 1305 - DNA, 771 bp, Zea mays
atgaagatggtcaaattcttcttttgtgcaaaggagcagacaggtaggatttgtaccattttttaattttttttggtgatgctctttgaatttatttttggctaagcctgtacatcaggccatctgcactcagattttgatattttttattagcttaaaaatgttaataagcaaattttacacctgattacttggtgctgccaacatgcttggcttgtttgctctatctttttcaatgccactactttttttggcttcaacttgactatccttgaccgttctttgttcccaaccaagcagcatcatatttgatagattggcaaaaaatggaaggatgtatgaagttgatacaactaagcacctgaatgaatatggtgaggcaggcttgcgaacattggcactatcgtacagggtgcttgatgaatcagaatattcttcttggaatgctgagtttcttaaagcaaagacctctattgggcctgatagagagttgcaacttgaacgtgtctctgagttgattgaaagagagctgatccttgttggtgcaactgctgtagaggacaaattacaaaaaggggtaaaacagtgtctgacttttcgtattgttaagatatgtttcttggttcctagtattatgctagtaactatttcgagttgttctgactcctaagttatgttttgtgctctatcaaggtcctcagtgcatagatcgtttggcgcaagcaggtctcaaaatctgggttctgacaggtgacaagatggaaactgcaa

SEQ ID NO: 1306 - DNA, 770 bp, Zea mays
ttgcatgcctgcaggcagctcgaggcaggcgattagacgaaggacgtcgcgacagagctagcgctgccgcgcgtgtacgtgcgcggcatgcgttgcatcgctggaggccacccgcagtataaaaccaggcacatgcttgcagagttgcaggttaattacatggctgtagctagcatctgcctgccgcccagcgggagccgctggagctggatgcctggaccagaacatttgtaagggcccgttcggttgtactggaatgagccaggattcattacagctcatcaaaatctatataaactagagattgcaatatcagcctcatcaagtaaattgagacggaaaagggcttctgctctagcagccaagagctgaaagtgcaaattaggtaagcgtatatcattgaacgtttgaactaagagtcagctagcaaatatctagttaggagaaggataaaatctaaccagagcacaagagtcagctccagccgcaatagcagcatcactttcccttagcacactcttccagtccccagcctttcgcgtatccagacatctcccaaagtgcttctccactgtttgcaatttgtgcaactctaggaggtcaggctgtgggattgcaagtgacaggtgcttcagagcatcctcaatgtgtcctagcctgcggttcagtatttcagataaaataaactggtacgagcgaataattcaagaatcaccttgacggggaggacggtggccagacggcagcgaccgcgacggtgtcatcgacga

SEQ ID NO: 1307 - DNA, 811 bp, Zea mays
cataatccgtgtaaagtcgaagttctttaagacggatatcacgaaccacaccaacttcagtgttgacatcaatctgaaaaataaaaccaagaaaattgagatcttaaggcccctgaactgcacccgcataatatccaatgttacctgtctatgtataacctatcagagtaaatgaaaatttcagtagatacttttttgaaccataaatacagcaggggaagtccccactataagactttattaagaaaattccagaagatacttggtgtcatgaaaagatgtttgattgcatatcgagattttagtaagaaaattacactagatacttgtgtcatgaaaagaagtttgattgcatatcaaacaccattgttaaaaaaaatacctcaatcagtcatacacataattcaagcttgtatatgtgactggataataagtagtggcaggatttcttaaaagaacttctgtacaaaatcagtttttttgtgagtcgtctaattcatttttctgtctgcaattagaaagtatagcatggaacaaacctgtcttcttaaacgcctaagagtcttaaccaacaggtcagggtttctatgaattccaacccaacaaccattgacaaaaattttagcagcttgtggaatgacagctggtgatatctcctgaaaaaaatgagtacacagtaaaacaaaatattgtaataacttatatcaaaacaaaaccacaaggttcgagatggtatagtaaccaaatgaaaatgcatgtacacacttgacaggaaacaaaaaccaacctcaaaattgtctgtgccccactc

SEQ ID NO: 1308 - DNA, 1387 bp, Zea mays
tgcatgcctgcagaccagcagtcagctgtcagcccgtcaccagccgaggcgccgagtagcccgagctgaaggctgaagcagtgagattaattaaaaataatattggtacacctgaatttacggacacgtggacaccgtcgaacttaatcttgaaaacctaaatccaatcccacgcgcggctctctctctcacctatctcattcccgcccacgcgcttctctctctcaccagcagaccgcgtgggcgccacgccaccgctctccggatcatcggccgtgcacctcctcctcctcctcgcccgctcaccggtcgtccctgctgcggtgccatccacttcctctccatgccgtcatagctcgcacaacccccatctcgccctcttccttcttgccacaccgtcgctaccaccgccgcgcgctgagagggaccgacgccatggacctcctcaagaagatgatggcgcgaagagtgctctcggacctgtagaagttctccggcctgatggagcacctgcggctctgcggctctggggttagtgacttataagtgttcaaaaatagttttcaatgcatatgcgtgcttcttacttgtacaagtcagggggtgtagtaccacagtgaggcaaactgactttataaaaagttaaatctgtgatatgttccttatactggagggatcatttggtcaatatatccgtgctactctaccttatattcgtgcggacattcccattatcattgtatttcgagcattaggatttgttgctgacaaggatatactggagcatatatgttatgacttttctgatacacaaatgatggaattgctacgcccatccctggaggaagcttttgtcattcaaaatcaacaggtacttattcagctgctcgactggaggaacacattttttttacttcaaccaatgtttgctttgagcatgctgttttattcagttgttgtggcacattttgagctgagctcaggcttatgtttcttcttttaaaagctttagtttgaatgctcataggttgctctagactacattggaaaacgtggcgcaacagttggtgtcactcgagaaaagagaattaagtatgtcaagcaaagagttgacattacatcactatgtttgtgttgtttcacactttcactcatgcttacattttttctatttcagatatgcaaaagaaatacttcaaaaggaaatgttgcctcatgttggtgttggggaattctgtgaaactaagaaggcatactattttgggtatgtgctccttgtcaagcctcgtggacttgtggctggcatcctcaaatattaagtttctgttgaaagtagcgaggttcatttgttttgcaagtatattattcacccgcctactgatgtgtg

SEQ ID NO: 1309 - DNA, 808 bp, Zea mays
atcttgcatgcctgcagtccccctccgcggccgcgcctcgccgcggtttacagcctgtcgttagggattgctaccgttggtcaagtcgcgctgaggagacgagagcaggaggggcggtggactgtgggatgatggaggcgggcggcgcgggcgcgggagcgggaggaagggacgagagggtaccgcagtggggcgcgcaggagacgcgggagctaatcatggcgcgcggggagatggagcgggagaccgtcgcggcgcgccgcagcgccaagacgatgtgggaggccgtcgcctcgcgcctccgggagcgaggctaccgacgaaccgccgagcagtgcaagtgcaagtggaagaacctcgtcaaccgctacaaggtaacacaatcattcatccctcgtccggcttatccagataactttctaccctagtctcgtaaggctagattgactggtctgatctggaccaccaggtaacgatgctctaatgcaccaccgttcatgtgtttatggcaaaatgatatgcattgctggcttgtgactttatccttaggctcagcgtccccaaattggtcttctatcttctacaggtctattttgggttgttagcagtgcgtctacaactctcccccacgttcacttttactgcattatttccacaaccatttccataagtaaaggacattgagaaaccttcgtgttgaatggaatgatgttcaatgcaatgttattcacatattccttctaatttgaatgagtgtacacgcccctgccttttgttacaagaaaaagaagggattgttcagtcgtga

SEQ ID NO: 1310 - DNA, 716 bp, Zea mays
ggatcggcacggggatcgcgctgtcccttgtcactctagtcgtcgccgtgctggtggagatgaagcggctgcgagcggcaagggacgccggcggcggcggcctggtggatggctctggcaccggcacggcggcggtccccatgagcctgtggtggatcgtgccgcagtacgtgctgctcggcgccgcggacgtgttcacgatggtcggcatgcaggagttcttctacgaccaggtccccggggccctcaagagcctcgggctggcgctctacctcagcgtcctcggcgtcggcagcttcatcagcagcttcctcatcacggtgattgatgccgttacgacgaggaacggaggcaccagctggttcgccgacgacctcaaccggggtcacctagactacttctacctgctccttgcagcgctcaccgcgctggagcttctcgctttcgcttacttctcgacgtcttacgtttacaagacaaaggcaggcaatctctaatctccgtggacagaggcatgcatgtcagcatatgtatgtttattttagatagaaggattgcatggcagcgttcttcagtgtccttgcaaactaagggcttgtttggtttgtggctaactatgccccactttacctaatgttagtcgttcgaattcaataactaaccttaagcagaaaagttaggcaaagtgtgacaattggggtaacgaaccaaacatt

SEQ ID NO: 1311 - DNA, 804 bp, Zea mays
tcctcatggagtgctgaagctccagccccacaccagaggctgctggaattggacacaacctccataatagcatggatacacgaccttgcagcatcgaacacacaagcattcctgtgtttccgtaactcccaagcatcagcggaattctacaaaatattcaagattgtgctaagctgtggggtttggctggagcaaaagctcttaaaaggctctggccttaatctaggatttagttcccctgtactttgaggtttggtttttggtgttttagctcagttttttttagtttctgctgccattcattttggcggcttgtacttggtctattttagagctttctgttcttaatatagtgatacacaattctcctgcgtattcgagaagaaaaataactcccaagcgaccaagatgatcaacaaattgagacaatgagacctttcttaaactcctttgaaactctctttgacagtccggctccaccaaccggagaaactattagtgtcaggtaggggggcagcagcctgacagaccaaccctatgcaaaactgatgcccagacctgtctagagaacatacaggaaactaggatgtgctgaattgtttcttcagcttgatcacataacgggcatgctcaggatggggcagtccattttcattaattgaaaacataaacattttcctttctttttgaaactaataaattaaaatgggttgcttttaggtgatggattttgagtggtacagcaatgcctcaaaattggttggaagatttaaataaagtggcaaattattctatggggtttta

SEQ ID NO: 1312 - DNA, 736 bp, Zea mays
cgacaacgccttcaacccgtcgaaggtgcatgcacacgcgattcttcatcttccccttcccctcttcctctcgcgccgccccgccccgcatgtgtttgatcatgccgcggcggcgtgttcttgggtttcatccgcgcgtgccaagtgccaacacgtacgtcttttgcattgtgtcctcacgacgtacgttacgctttagattgttggcgcttttgctgttcattcggcgaggtctttctgttctctgctattggcaaaaaaaaaaaaaaaaaaaaaatccgatgctgactgatgctggcatgtactgtacgttccaggtgagcgacctgctgagcagcctccgcgccaagtggccgacgctggcgtgcccgtccaacgacgggctgcgcttctggggccacgagtgggagaagcacggcacctgcgcagccgacgtcttcgacgagcacggctacttccaggccgcgctgcgcctccgcgaccagctgggagtcctcggcgcgctcacctccgccggcgtcaagcccgacggcggctactacacgctgagccagatcaagggcgccatccgccagggcaccggcttcgagccctacgtggagtgcaaccgcgacgaggccggcaacagccagctctaccagctctacttctgcgtcgacgccgccggcgacagcttcgtcgactgccccgtcctccccagcggcaggccctgcggcaaccggatcgagtttccggt

SEQ ID NO: 1313 - DNA, 740 bp, Zea mays
atctcagccactgcaacacgcccgctcaggtacttgacttcactgggccctcagagttagccagctgcttgaaaggcgtggatgttgttgtcatccctgccggggtcccaaggaagccgggcatgactcgtgatgacctttttaacatcaacgcgagcatcgtcaagtcacttgttgaggctgtcgcggacaattgccccgaggcgttcatccatatcatcagcaacccggtgaattccaccgtgccaatcgcagcagaggttttgaagcagaagggcgtctacaatctcaagaagctttttggggttaccaccctggatgttgtcagggctaacacatttgtggcgcagaagaagaaccttaagctcatcgatgttgatgtcccagttgttggtggccatgctgggatcacaattctgccgttgctatcaaagaccaggccgtccgtcaccttcacagatgaggaagctgaggagctgacaaagaggatacagaatgccgggacagaggtggtggaggcaaaggctggtgctgggtctgctaccctgtccatggcctacgctgctgccagattcgtcgagtcgtctctccgcgccctggccggcgaccccgatgtttacgagtgcacatttattcagtccgaggcaaccgatctgccattcttcgcatcaagagtcaagctcggcaagagtggtgtcgaatccatcgtttctgccgacctcgagggagtgaccgagtgc

SEQ ID NO: 1314 - DNA, 802 bp, Zea mays
ttccttccttaatacctatgctgttgtttggttcaccaaatataactaaatagtaacattaatgattcactcgattacaagcggtaacgagtttgaatagaccggtatcaaattctagtgcggtatctgattacaattagacgcaaacaaatatgatttaatattatcaggtacccattatattataaatatgtgaaccaaacaacatctaggatgtgaggacatgcatttcatgcatgcatttctcctgcaatttttagaataagtaaaacaacagtttttcagctagagagctgatagtggaccgcaaacactgataacagtacagaaacgatatcagtggcgatgattcttttctagccacgttcctgaacaaggtaaacatatataaggttatatactcttgttagtaagcattaacacaaggttatccttccagcggacacctacagctagcttcatcaagggcgaaaccctagctgggacaacatcaagccgtgatatctaagttagggcttgttcggttagctcttaatccatgtggattaagtgtgattatgtgagtttaaatcacaagcaagtcaaaattcttaaaaaaattccaatcacatccaatctatatataatgtgaataaccgaacaaagtcttatatggcagtacttcttatactaacaatatataatcaaaccccattttggacggaattagtgtgggagtaacttgggggggcggccttttcagatcaggtttttttttttccctgacccagtttgatctggcatttctcatgtggctaggctt

SEQ ID NO: 1315 - DNA, 768 bp, Zea mays
acgttaaaaggtcaacaggcatagaaaggttaacataaaaaatgaaaaactcagaaaagagatagtgactgggtgcaaataataccatcagcatcggtagctctgtctccagttactgagtcagaatctattggtctggcagttaaaactgggagtaattctcctactgtggttttgattgaagctttcataacagttataagtgtatcccggtaaattctgagaacagcaggaagtttgtcctgaaaattttaaaacaaatcaccatatcctcattgcttccacatacataaatattatatggttgtatttggttctggggtgggccaggcatgaagtgggatatcccacttgggacactggggatggagtcatccccggagaggaatattcctctagacacaaggatactccttcctctccaaaagagaggcatgtgctcgtcatgacgtcatcccagacgctgatcccctctacttaccacttctctcttccaggtgccggtaggggcggggcagccacaaggcaaaggtcaaggttagacctccgccggtggatggccacggacatgcctgtgtgagggcaggcgttgacgggcagcgctagagaggaggaggctgggtgaaggctgacgctgctggtggacaaggcggtggctgttgcatcaggtgggtgctgtggcaacagacacgccgagtgagagtgcaggcccggggctagcatacacattgggaggtggcggtggcggtggccattgtgttgggtatt

SEQ ID NO: 1316 - DNA, 812 bp, Zea mays
ttgcatgcctgcagggtcttgctgccagaagcgatttgcttgttggaagtcatcttctcttggaccattagacccttgtagctcctgatatcagcctgcttctctttctcaagcctctccatctcttccctacgtttctgaaacagaagaaaaacataatccagtgatctgttatgtcaatattctaactatcaaaagttcagcagttcagttattttgtcaggtagtaccaacatcctatttataatttgatatgccctagaaaattaattacaatagaatcaactacataaatatttggttcctacaagatctgttacaaccagtttgctgcccataaatataatttgctatgctctagaaatacaaacaagttagatctttgatttctacataaccagcacatggcaacaaaagaaaacacggctggtatagcattagaaatatctttaccttgtctctaagctgtgcctttctttctgccttttcagcagcactaatagcctctctttcagctggcaggaaacgatgtgatgattattgactcaaataacaggactgaagtgcacatgcgacaagccaacgcgtcaaatttatcattcagttgaaaacgataatccatcaaccatgccttttattcatagaccaaacagataccaacatatacgcaaacattttcacgattcccaaaaatcttgttatcatgataacatccttttgcgcatctagattctgcaaaatcgaaatgatctaaggccctatttggggagcttctggcagctttcgcttctacagaaagctcaaaaagctag

SEQ ID NO: 1317 - DNA, 721 bp, Zea mays
aatgtaaaaggaacataaattgctgtcaaataaatgaggaaaacaagggtggttcaactgtgaccacgtaccctgatctgtccatcagtgccagtggcagctgcaacaataccagttccaccttttggtaatctggcatataacttagccgcataggccttgagtattctttgaaataccttgcaaaaataaaggtccgaacaattatgagcccattcagaggctatactttattggctcgttaaagtgatgcaaacaaactactcaagaagcttataagcagtaagtagataataaaagagaattgcatgaacaacacacatcaaggggccatttgtgcttcttcatgttattatacaatttaagtgaattttcatgatctgagatatttgtgagtgtatcctcatttgatttatatcccttccatttggtatctgataagatcttcatatttgtttccaagcagacattgtaggttgtagcccatacacagcaaatgaggaaatgtacatagaagggaaaagtgcctacctgaaataagttgaacaatgtttggttctttgttaatgcgctgcacctctttaagctttttctaatcaccaagaaaacctgcatatgtgaaattgtaaaccagattaagacagtcttttggtaaattgctgagcacaaaatgatgagtaccatacaaaaccgagcggcacaaactttggagatctacgga

SEQ ID NO: 1318 - DNA, 757 bp, Zea mays
gataagtatcacttagcaagactaaagtcgctatgtgaatcttacctgtgcaagggcatatcagtggcctcagttgcgagtacgttagcattggctgataggcaccatgccatggagcttaaagctgtttgcctaaaatttgctgctgaaaatctttcaggtactaaaatttgtcataccagacattgcttatgattatttcatgcaagtggcctcattatttgctacgtaaactcttgtcagttgaaaaatattcaaagtgggctgtcatcaaaaggaaaaaaaacacaatgaaaaatagtaaaagaactttataacctgtaaatttctagtgtctgagactctgagtgtatggccgtgcactgtgcgttctttcttttggtcactattcttgcacagaaaattctcttgaacttgtgggataaactttttggtacttctcatggaaatatgcattagactattacagatgcttccatgtttgttttaagtacagtttgcttgagccatctacattgttacagcttccgaagcattcatataatcagctctatatgtcacctgattgccatattagtgcaatagtttttaacaatgtagactgtgttgacatttttgactgaatgaaacagattttaagctatcaacaattcagtagttagcgtgtagatgccattatgtgttagcatcttctgatagcaatacatgcgtcatgagtattatacttattctgcacgtagtacattagcagcctaaa

SEQ ID NO: 1319 - DNA, 756 bp, Zea mays
cttgcatgcctgcagacacataagggtatctggaatgggttatggagctttataaacttaatcgcaccagaagctgtacaaacttaattgagcaaataaagcaaccaaaaggtcaaacaatggtatcgtggactcgaggcataattttcttgtatccagggacaagccctggaactaccccatgctgaaacggaaaaggttggcaataacagaatatcagctctgacacaaggaataaaaatatacttgtccaccaacccagaccttattataaaacacatcataactattactctcttttattattctttttttatccaaattataagatgttttgacttttctagatacattgcttttattatgtatctaggcatggagtacatctaagtgcatagcaaaaactatatatcagaaaagccaaaacatcttatttataatttgtaatggaaggaatataatctagcaagacatattagtccatctcacatctgaagtcgataataaataatatgttgcagtacagtctaattcaggtaaggtcgattccaaccattcccccatatttctccacctatctgcattttctattatattttactacatccacctaaaagactccccctgcgtacagggcgtctccaaccattcaccctatccaactctccctatacaatataactcagctatttaacatttttataattttttatgtttataaaatttctatttgtaccaccaaaataaacattatta

SEQ ID NO: 1320 - DNA, 741 bp, Zea mays
aggaatttgcggttgcttcaatgtcatcattatcagctcctcttccagggtttgacattaacacttccaccattgcccgcaggtgttccaaccctgcacatacacccattcaccacataaaacatcaagtaaagcagcaacaaaccaacaaatgtgactgtagcggggtaagcgagggagcaacaaagttcaccttcagaggaggaggaactcgtcttcaagaggcccacggatcggaggtctggagcagctgccggactggattggaggaggggcgaagtggaagagtcagaggcagactagaggaggctcgtcgtaagggaaaggagggacaagaggaggtaggagattaggagaccggtggattgatggacagagaggagccttcagcacctctttcctctcactagtgggagacaaaaatggcggtgcccctcctggctccctctttattttggcctaaccctattgggcctaaaaggcaaatctttagcccaacagattgcctccctaatgagcccaattgtggatgcgaaagctcctaatcagacgattagtcacaattaatcaacgattaatcgtccgaccagaaatctagttgcgctgatcgggtcgaaggccctaatcggacccctaaacccgattagggtgattaatcgaacgatctgaaaacactgattttaaatggaggtagtatgcaatacgcttctgactcattgctaactctactatgcaaacctt

SEQ ID NO: 1321 - DNA, 625 bp, Zea mays
ttgcatgcctgcagcacctctgtcaacaaatggaagaatggtgggatagaatctccagtggggtggttgatcttaatcaaaatggctttgattcccttgttattttaggggcttggactgtctggaaacatcgcaacaggtgtgtttctagaggggtttcccctactgcggcccgagctgtgttgctagctttagaggaattacattttgggggtttagccggagcacaaggtgttaactttcttttggcccttgtgcaggaggaaggttgaccgtcctgtgtattttttgtgatcttgatcagtcttgctgaaaagggcatgtttgttgtttttttatatctaggattttggttgttggtgtggattttgtgtggttcttttgtaagggagctttccctgtgttttgttctcttctaatataatgatacagagttctgcgtctcgagaaaaaaagttcctactaaagtgggtatagttgacacaaatgatgggacaataaggcaatcgttaacatgacagacatgctgcatctacaataagctatttccaatactccgttctccaacaagtaaactatagattaaatgaactttgccaaagaaggccaagacaagggaaaccag

SEQ ID NO: 1322 - DNA, 775 bp, Zea mays
caatcctctctaggcgacctgcagaacatttgggaggatcataaccctgagctaaacatgacgagtaaaaaaccctgatagtgttacctggtcaacattagaagtaatagttgtttgaatatctcctggtgtgtcgcaaaaacccaagctattatcacctcttgagccttcatcatcaccatcgatgttcctgattgtaccgacaggaggagaatgtaagtgtcttctcaatggaaagaaggttcaaaacttcaaataatcaatgaacatccaatttagtgatatattatgaagcaaaataaaagtcaatgatgtttgtacttttctagactgtatatatgttcatcaaactattcgctatcacatgacactcttatttatacctcaatggagtaggttgccgaagagaaccaggcaaagctcgtcttaagttttgcaaccatgtatgcatcaataatgcttttgcatcaggcctttgcatcgcatcctaaagtaatttaaaaaaagtcaggccatgtaagtaaagaaatacaaattgaagtcctcaaataacattaagatagagaaccttttggaaacactgttggagaaaatcagtaacctcaggtgacagtccttctggtattggtggatgcacatcctatacaaaaaaaatagtatactcacatagcacaataaagagtaacttgcaaagatgaacataaatcgaaacagctgtatgcaaccaacctgaacaatacggaacagtgcaggcataggttggagatcataatat

SEQ ID NO: 1323 - DNA, 1095 bp, Zea mays
cctttagggtcgacctgcagcaccatatgggatgtccggtgcacactggcctgtccggtgtgccaaatttgctcaaactgatatggcttcaactctaggatgtagagaatttcataagctttccaaaaagtacaagatcatcgaaatcggagttcggggctaaaagttatggccaaaatatgacaagcagacatgggttgtccggtgtgccatgtccggtgcgccatcttcggaagctccaaaggctacttttaacggctagtacacgtggcatgtccagtgcaccaccggacagtccggtgcacctatccgttgcgtcgcataaagctacagaactgctttccaacggctatatttgagttggggcctatatatacttcacccaaccggccatttggaggtgtgggagcccaagcaacataccaaggcatattgtagacatttccaagtgctcaaacacccaagtgcttaatagaatcactcggtgattagcgtaggtgctttgcgaagtgcttaggttagttagaccgcattagcgcttgctctaggtgaatcctagttagttgagtgagttttgtaaaacgacacaacccctcggctcttgcgtgagtcgttgtaattgtaccgagtggggcgagagtcttgcgagaccgtgacaaccgcgtttgtgtcacggccgccaccgtgtaccggagggaacgaggcccgcggcgttttcggccggaagctcgatagtggagacggcggggagcgtccgagaggagccggaagcggagcaccacttgcgcgtggagaaggcccgcggctctctacggagttactcgaccgaggtgcttggcccttgcgtgggcttccctttgcgtaggggcaccaacgaggattagtcgggaccttgcacggttccggatacctcggtaaaaataccggcatcatccacgagagtttgcttctctactttgctctttaagtttccatatttatattaagcatttaagtttcaatcttgtattcatacatatctagtgtagattgaaacttaacctttgcggtagagatagcaacacttagacaaacctattttgacactctagtttg

SEQ ID NO: 1324 - DNA, 730 bp, Zea mays
gttcctggcctcgttgcaccaccctcttgccggcggcggcggcggcggggatcactacagcaccggcgcgtcaaggttagggttcccaggactgagctcgctggaccccatggactatcaccagtttggcgcgggcgccggcgccggcgccagcagcgctgccatcgggctagagcagtggcgtctgccgcatatacagcagttccccttcctaagcggccgccccgacgccgtgcaaccaacaatgtctagcatttacccgttcgacttggaagggcacggcggggacgctcccagcttccccggcggacacatgctgggtgcctccaaggtgcccggctcagccggactaatcacgcagctggcatcggttaagatggaggacaacccagcgtctgcggcgatggcgagcagctcgccgagggagttccttagcctccctgggaacctccaattctggggcggtggcggcaacagcaacggcggtgcaagtggcaacaatggaggaggcgctggcaacggtggtggtggtggcggcggtggcgctgtcgctccgggcagcagctgggtggacctgtcaggattcaactcgtcttcgtccgggaacgtgctgtgacgtgccctctggtctgcatgctagctgcactcgaaaggtagcccctattatttatgcaaaagccttggaatcttcatttttaagtcatgggcttcttgagaaaagtttaaacaa

SEQ ID NO: 1325 - DNA, 790 bp, Zea mays
ctcggtaccctcttgatgctctagcgtcgacctgcagtaattataaatcaaatgaacaaattgccagaattagagcatccaccagaaaagaaatggttgtagcaaatatttttgagagaacctactccattcaaacgattcagataaggatcttttggagttttgaaaaagtcagcgtcggctctcataggccatcctagccggaaacaatcaactgacctggcaagccatacaatagtgttttgggtttcattaaaatctggggaacaagatcgtaaacagcaatgcaatcagctcatcacttaccaaaagtactcattcagatcatcatagtttctccaatgtgaatgctttgatttcatggtcttgctcctttcagcttcctgttaagttcccaaaaactgtgatcaaattgaaatggaagtaagacaacattcaggtattcaaaatagaacatgttataccttctctataactttgtatattggagtcacgactttcgtcaaaaaggcttcttcgtcaccaccatatgctggtctaacattttcaccagtcattgggctcacatttccagccagcatgccatagagttcaaaagccatctacgccaagcaagatagcctcacatatattaaaattttcaggtcatatattgctatatattgccatgaatttcagggtatgatcttcagtaccgcaagcatatcaaagttaatttggaaaaaaaaaacgcaagtcaatcttacatgatggtagatgtaacaaatacactctggcatgaatctcaagt

SEQ ID NO: 1326 - DNA, 814 bp, Zea mays
gataaaacacttgacagcaaggttttcaaaagatgggttgaaactgacaatccgtggacatctgatgacgagactgataatagtaatttatctttgccttgatctattctattgcacattctttgtttcttgtttattatcattcttgacgattatcaaattgttgtactgttttcagatgagatgacttacgtgaatcttcaactgaatcctgaacgatacactggctataccggtgattcagcaaggaggatatgggatgctatttataaagagaactgtccaaaatgtatgaaaatgtgctctttcacatgcttgttccgctttagttatactagtttgatcaaccatgttaagtgttaccaataatttgcatccgagctgcttatcttatttcatgacaacctccatgttttttaattagggcataatgatggggacatggatgacttcccgattagaatacgactatatcaagggtcaactttgagtcctagtccttacctttttgtgttggtgatggatgcggtcacaagggacacacaaggttatatgccttggtgtatgtttcttgcagacaatgtagtgcttgttgataaaagtcaggtagaagtaattaggaaactataattgttaggagactctagattagttatgacttcagcccatctgttcttctttagtgtcttgtagtgtagttctctagttgcatgcctgttccattagatgtcctacataacatgatatagaatcctatcacacacctcagtcctgcatcaccaagattgttttgacacaagttttttacttcttt

SEQ ID NO: 1327 - DNA, 807 bp, Zea mays
ttgagagggtccgtccgtactagcacaacccaactctctctctctctctccccttaaaaaattcttcaccatcattccattcatttcattcaccacgcactgctgcaatgcagctgccactgcgcgtctgcgcccgctaaccaagcgcacaaaggcttaccttttggcttctccaggaaaatgaccccacactgaagggaagggtccacaagagcgatgctagtgagatgcaacgcttctaccgcgaatactacaggaagtacatccaggcactgcaaactgtcgttaataaggatgaccggtgagccatttctcttgcttttcgtcgtgctgctcgctcgctcgttggtcctcccttcactctatcaatgcctcgcagtgcgcgcctcactaaggcataccaaacggctgctatcttgtttgaggttttgagggctgttaatgattcccagtccgttgaagtcgatcaagcggtatgccatccatctcttgctcctatgctgggggtttctgttttctttcttgacactgctacaccttgtcttgcacctctttttatcgaccataactgcgagccctctttgtgtgttgctgctgcacagattttggatacacacatcaaggtcgaagaaaagaaaaagctgtttctaccttataacattctcccgctcgatcctgaaagtactggcgaagccattatgcgatatccagaggttctcgtctttcatcttctctcattaacagcgccgccaaactacaccttttacaagcaaaccattaatagtgtctggtcctcatacttatgta

SEQ ID NO: 1328 - DNA, 743 bp, Zea mays
aggaatgcaattggaatttacaaaatgataataatataaagacatgaaaccaggtcaatgatgtaagaggaaaaaggtattactgtggtctcttgtccagtaataccaaagtagtcggcaactggttcaccaacttcctcactgtctcgttccacaaagacaaataataactgcatatgtgtgaacacacctcgtcaatgactagcgaaacactcaaacaccaaaaagtattaaaaacaaaaaaagtacaaggaaaaaaaactgatgagttggaaattaacttgaacatagaacatggaacaaaagcaaaggataaaagttcaaacaaaatctgtgggttaacaatgtaagcgaggttaatcgcatggtattagattgaatgagcctctcaggcagtatacagagagtacaaagacactatggcagtaccagattacaaccctaattgccaaacatactgtaacatccccccacaaacataacggggccatcataaatggacagactgaggttaacagcgtgagattagattgattgaacctcccgggcggtatatatagagtatagaaacttagggggcaagttgcatccctagatacatttatgacaataccggattgcaatccctagattacctttcccttaaatggttttgctgcttccttaaagatgggcagaaatttggtggactcgcttgcaacagcaaatagtaaaatctgacttgcaaaacaaacggttatcag

SEQ ID NO: 1329 - DNA, 767 bp, Zea mays
aatttgccatatgggttccgtgcaaacacgtggcttattcctccaatatatgttgatcccgccacaaagtgcccagcactgccagttgaggatgagaattggggtggaaatgggggtggctgtggtcgtgatggaagatatgatcgcagatgctggtcaaaagagttctctgttctgtctagaatgccatgcaaatctgaggaagaacgggtgatcagagaccggaaagcttttcttttacacaatctgtttgtagatacagcaatttttagagctgcatcaacaatacggcgactcattgatcagtctatgaactcaattggttcccgtggtgctacgcatggttcaaacgtatttgaggaacatatcggcgacatgaatataactgtgaagaaagatgaggctgatgctagttcaaaggtggacgacaaggttgatggtgttgccttctgtaaaacaggtgctatggatattgcacaaaagaatcttctgaaaggtttaacttctgatgaaaatgttcttattaaggtgatgccttgcactttctaatgttacccgatcccattttaggggattaaaaataaaaaaatataatatccgtaaatatatatttccatccaggattcttccacactcggagtggtgattgtcaagcattgtggatatacagcaactgtgaaggtttctggacgtgcaaaggacagtaatgatgttaaacaaacacatgtcatctcttgataattttgatggaatgctgaacatttaat

SEQ ID NO: 1330 - DNA, 807 bp, Zea mays
aatttgccttacggattccgtgcaaacacatggcttattcctccaatatatgttgactctgccacaaggtgcccagcactgccagtcgaggatgagaattggggtggaaatgggggtggctgtggacgtgatggaaagtatgattgcagacggtggtcaaaagaattttctgttttggctagaatgccttgcaaaactgaggaagaacgggtggtcagagaccggaaagcttttcttttacacaatctgtttgtagatacagcaatttttagagctgcgtcaacaataaggcgactcattgatcagtctatgaactcagttggttcacatagtggtacacatggttcaaacgtatttgaggaacgtataggggacatgaatataactgtgaagaaggatggtgctgatgctagtttaaaggtggaggacaaggttgatggtgttgccttctgtcaaacgggtgctatggatattgcacaaaggaatcttctgaaaggtttaacctctgatgaaaatgttgttgctaaggtgatgccttgcactttccacttttaccctatctcatttcatgggattaaaatcaaaagccaatatttgtaaacatttatatccatccaggattctttcaacactcggggtggtgattgtcaagcattgtggatatacggcaactgtgaaggtttctggacgtgcaaagggacaataatgatgtttaaaacaaaccaaatgaccattctttgtggtaaatttttgaatggggaaatggcttgaacccaatttgattggtaacattggaatcatttccca

SEQ ID NO: 1331 - DNA, 762 bp, Zea mays
actgcactatattagttgtaaagaaatgtactacctagtgttttctatttccatgtattggatggatttgctttgctgacaggttcttggtaccccaacgcgcgaggaaatccgatgtatgaatccaaactacaccgagtttagatttcctcagatcaaagctcacccatggcacaaggtatgtgaaatttatttatcatgttatatcattgaatggtagaaaacttaaactaaaatacctttgctcttgcagattttccacaagcggatgcctccagaagctatagatctcgcttcacgcttgctccagtattcaccaaatctaagatgcactgctgtgagttttttcttcctatttgactcattctaatcaactaatctacctatcaatgattgcaaagcttagttatggcattaattgtttcttcctaattgattggtcatgttgacccattgctttctattttagctgttaaatgttcccatcatctcaatttgtgtgtataaagctactactgatgattcattccatataaaaaaaagtagtaccgatgattggatatgatggtgccatatccttttcctttctattgtcataaatggtgtccaagactttacatgacatccttcgtagcatgacaatgctccaccttatacccatccaaaatggacttctctgtaagcttttcacctcttggagtctgtgccaagtgtgaaaaaggaaccatggaggtctttgattgccttatttggattaccttc

SEQ ID NO: 1332 - DNA, 727 bp, Zea mays
tctactgttaccatatttgtgcctttctttttcatgagtttgacaacctagattatttagtataatttgtaaaagtcattgaggattttcagtaagacaaaattaaacacaaaatgaaggagaaaagaacattatcagattttgaaaggaaaaaggagcacaatgttctggcagacctttccatcctcaattttatgaactccatcatctgcactgcgaagaccatggactttgtcaccaacacggacaactccggaccttactctcccagtgagtattcgtcctagataaaaatcacgttccatcatggaaacctgtcaaagaaaagtgaattactaccttcaaattatgtgtttggctgggagatttccttcctgggactaggctcctggtgtagcaaggacttatccttctgtcattatttatggattaatcttattcatttaagcagagagcaataacttaaacatatcgtgactgggttgaggttcagtagtggggcatggtagccataaatgaaggtcaaggggtgatgggggtaggtgttctttaggatgctagcttggaacgtgggccatgagccatcctgggtgcatcttgacagtacttccctagtcccttccagctaccctaaatcccgccaccctctttttgtttatatatcatcccaccagacagcaacccaagcagtaaccgagatcactaatggacagtaaatggaatggca

SEQ ID NO: 1333 - DNA, 768 bp, Zea mays
ggagtatgtgcagtgcctgccggaacatgggcccgagcgagtgtgcgggcggattctgtgcttaccaagatcttggacatcgtcccacctaatatcagatcaggagattggctgtgcatggctggcactagttcaactgcttaagatccggtgtgacccgcccgacagacctttgcgtgcgtgcgtgcgtgcgtgcgcctgcggcctgcgcgcatggatttcgctagggccatctttgcgtgcacgctcctccaattgctggtcgtggcactggcacacaacgacagacacacaaagcacctccaacgagcaacctcacacacacacacaccccatggcccatggaccatgcatgcacacacaaaaacaccgccacgcgccatgcgtttcttcttctcatcccggaggcggaggagctcgcgccacccaccgacagacagtcgcacagaagtgcagaagcagcgcgcgagtggcagtggcagacacgcgcagcgcagattgggaaattcggacatgtctgctcccggctactgttcccgttatttctcgctgcgccgcctctgctggtgcgcagcagcgaagccgaagcgagcaccgcctggcctcgcggcttcattgtttgaatcgaacggcgtccgggcgtcctgccacccggcgccttttccagttttctgaccggcgacacgacggcggtccatggtaatagtaaaggagtaaaaagtaaaaaaaaaaaaaccgatggtcctgagcagatgcggcgatgcgaca

SEQ ID NO: 1334 - DNA, 768 bp, Zea mays
atgccgttcacactgccgtgccgagacaagagcccagcacagcagcgagctcatgggcagggcgacgtggatgcgccatgaacatgacatgcctacggcgagccgagccttcccaaaagccacccagattttttttcacggccaaggccaatgcgttgcgttacacggctactactacttcgcgaccagcgcacccattgggggcgtttttttttttcatttttcttttctcgttccgggacggttcgatgaataatgcaccaaaaaaagggaagaaaagacgagcgtcgtcatgcaagcatccacagccgaggcgctgttcagtcctgcccacgctcaacaaccctatctatccccccattctaaaacaaacaaacaaacaaatgcttgcggtgagccgttacgtgaggaggagctgagggcggcctgcctccatcaccaagctagcaccattattttaccgcttggaatttctttttgtgctgtctgagttataatatactgttaacatatattaatatgctaggcattcagtctaatagggtaattcaaataggctattagggtaatccgaaattaccaaccccgaatagatccataattttggttcgatctgttcgatccaccgaaaagaccaaatagtagatagattagtatattttgttaaaatatatacgatgcataatttaagtagaagtaatattattataacaagtggctatagaaaatagaatatacatatatatgctatcgttaggatgacatcat

SEQ ID NO: 1335 - DNA, 778 bp, Zea mays
agaaactggccgactgccagaagacgatagcttcactgagcagccagctgaaatcgttggctgatttcgacgaattcccccctgaaactgagaccagtggcgctgactcagacgacgcctgggacagcgatctgaagcttctccaacccgcaagctatcccacgcagattggctgtttggcagtcacatgattcacgatcctcgttggcaagtggatagcgaaactgtttttgcttggcttccgccgcatgattgctgtgatgagattgccatgatgttccaccacatgtcatatagagttaagttaataggtgagcaaatgttcatatggaagctgtttatagagttgtttggtgaagcctcaaagggactcatattgaatattatctttgatcttccaatctccctgtcccttggaaacatcctcactttcagaagactgcaaatagtgaaatacacatggcatgtcaatcaaagaatgtaagaataaaaaacaggggcaggttcatatgacggcacgttcccacccgacatgctaccacatgttcataaggatcttggatttgcaaattccaattgaaagtttgtacataattcagttctagcatcttgtatccgtcaagagaaaatccgggtcttagtaagctaacttctcgactttgataggacgcctagtagctggatgtatacacttcgtggtcgaatctgaatgttcgaatgattggtgttcaaatgtttttatttgagttaatgcatgttcgacattatatatcagaaa

SEQ ID NO: 1336 - DNA, 822 bp, Zea mays
cactgcacagtacatacaccggtcatgtagccacgcgtgtgcatgcagagtgtgctgtaaaaacaataaaatactaagggtcaagttggccactagttacattgtgccaggtgccttggaccgcggtgtctgtagacgagggttatctggcaagtatggcaatcacttcaggaagggatgactgcaactaggcccgtgtatcacattaaatgtaatacatgacattacggtcacgccttcgccctaacacgctctaaggggagcaggtgtacccgatgccactgcgcaagggtgctcgtgcatttaagaccatatctgataagacaatcataaccgactgactgggaataggaaatccctatggccatgacaaggcagtacgacgatactttcatgtaattaaaagtacaaggaatcatacttaacaccataaagcacctgtccccactctaggctgggcccagaaggtcacttcaacaagtatcattacattggcgcatgccctacgtatgttgtacgattacaaggttgagacaggacgggggcagtcaacccaatgacaggtagggcctgctagtagtgcatacatgtaacctaaccactcccatggactataaaaggatgatgtagagcaacattaaggagatccccattcggtttcactcaggttctattcagactttagtctttaccaaacatcaacccaatttgatcaaattgatcccgtccagataacttacattagaagtcggtttggcttttcacaatacttttaattttttaagggggttcttggagtcttcctgggtgctagaattagga

SEQ ID NO: 1337 - DNA, 720 bp, Zea mays
aagatgtagtcacttgttcgcttctaggtgaagtcaaagcggatggaagcagtgtgacttatcttcaaaacgtgaagcctcgtcgctgatgctccctacccgaaggtcacttgtgacatataaaacaccgaatcaaagatgtaatgactactatgcccttgagtataagaagggttgtaaatggtagcttaggggtattctagactttctattaagaacagcgaaggcagcatccccaataagtacctcataacatgtgttcaataattacttaattgaactcagtttgtgtcccgatgattgtgtgagtggtcttactcaacaatcttcgaaaatgccactcaccccaagtcccctataaatgcttattagtacttttgaaaggtagataacaaaaaaaattgtaataattcgattgtagtatttgcaaggtggcagaagcaattagtgaagcaacataatgcatcattatgagaaatacctcaagccacttgtgcggaaaatatttgagggcaagatgcttgctggagtactttctgagttaacatcttcaactggaatgtgctgacgaggaggtccatcattcatactttcttgcagagcccgtgcaagctgttcatcttcagctaggttatgaccaatatctggttcattattataagacaaatcattaaagttcatggttctgaccagcagtactcatttgttagacaagaactg

SEQ ID NO: 1338 - DNA, 718 bp, Zea mays
aggaagagaatggttgcaagaatcacatgtgcaagcagcgatgagctaccatttgacagctttattaattattatcagtattattattacgatttttctctgttactaaaattgtaaaaccaatatttccccctttttttcagggaaattgcttggatgctattttggcaaatgcagtggaagtattagatccattgttaggcatccagatctacctttgatagcatcttgcggtaaggctacctccagaaaggctttagattctttctattgggatgcctgttgcacttggcattctagatagtttttgttacaaattaaaacatcaagtttcagaattatggataactcaggaaatgtttgtcattgtaggactggatagctacttgcgtatttgggacacaaacacaagacagttgctatctgctgtaagttcacgaactactgagtgctgacagcctgacatgacattcaagatatcttggagttaaatttttttactgcattgcgactaattttaggcctccaaggctccaatttgacaaacaaaatgaagtagcttggtggtcactgacaattgatagtatcagtgtttcaaatttttacttcaatgcaaatgaatatattatgagctctttccatgattaactagttgtcttgtttgttctcgtgcagtcttctgagcacatctacactgtgtcctgatcacatttctgtg

SEQ ID NO: 1339 - DNA, 770 bp, Zea mays
atgtaatgtgtgccatcaggagtctatttcactttcctgactttgctgaagactagtagtattacctgaaacattacaagcatggttggaagtgtagtattttttgtagttttgaaacaatagtatttgatgatactatcgtaaggtgtttgtttgtctaggcaaaacacagtcttaaataccatggtttacctaaaaccgtggtattttttagagtttttaaaatcccattcaggacctcagttttcttctcttctctttaaatatactttttttccaacggaaccaaatagatctcggttttgaacaatactgtggtaagtaataccgtagtatttgtgtcatatacaattgtaaactatggtatttcaaaactacattatttcaaaactgtatttccaaacaggccctacatgatttgtctgataacactggtcaaaggtgtttggttaccatgcattgacacatgcagatatgaaaagcacgaggggctagcctcaccataaagctagctcaagatcccagaaacccatgtcaatcaatattggaaaaaaggtgatatgtgcgggatagcattgccaggttcccactagcaggaagcttgagaaaaaggcagcaaagacattggcatcagaactgttacacgaacacacacaccaaggagatcagaaaactttgtgggtctggtgagctcacttcccaagggaccaagacacagtcacacttacacacgccgtttctacctttttttgccagcccttaaccacgct

SEQ ID NO: 1340 - DNA, 693 bp, Zea mays
aaacagatagtaggctatatgtaaataactaaatatccttctgaacgagtacagacattgaatttcactagataaattccatcccctgactagccacagtacaagaaagaatgaggatcagtagtggatacaactagtaaaaaaactcttccaagagattagtgcttcatcagaaaacacaaacagcatgctgatgttgcaattttacaactaagaaaggaagacactcaacacggtttttgtgctcaatgaaatcgatcagcactcagaaaataaaattgtaaataggagtgttcatgtagtagcatcttaccacttgtacaaggaggcatttcaagtatggtttctgtgctctacgtaaccgtgcaattgtaatcctgaggtagtgctcaacccactgatccacgttgcctttgcaattttgaaaaacaacttcaatgagcttgggagcaggttcaatatcagaatcttccatgttttcgtccatcattatctacaagcatcgacgcttctcagcaaaaggtactagccctaggcccctagtattacccagaacattacaagtcaatggaacaattactcttaagcaaaacttacagattgtagtgcatcccacaggctttgctggtaatctggatctttgcttgcaagaaagatatcagttccccgagaaatgtagttgtccagtggaac

SEQ ID NO: 1341 - DNA, 822 bp, Zea mays
aaagccagacatcagagttattgggccagctccactaatcatcacacaaatacaccaacagtaaatgtgttagaatctgctaaattttataggggtcagctgaccccaataagatcatgtagctccacccctgatggcctgatctacagtggataacttgctgaaattttaatggggtggtgatatacactatttggaacatctggaaagaatgaaatagaaggatcttcaacggcatcttctaacggcggcacaagttgcctctagaataaaagaggacattgagcaacggaaacgggctctaacctgggaagtgtagatctctctgtgtgtgtgggtgggtgggtgggttgaacactgctccctcgtgtccctgggtgcactgtaatttttgacctgtgcttacgctcttttcctatcttaattgaaaggcagagctcctgccatttcgtttaaaaaaacttgctgaaattcattggagtgaaaaaacggacataatgtttagctcagcatgaattagcaaaaataaacagtgtttatttgtgcgttccttgctttctgcatgggaaaattattgtggtggttctcatgtatctgcttgtttctgacagattgctgagagagcttggcacaaatgttacagaagatttggttgtgctgatgccaaatttgctgtcatttttgaagcatgatgatcctgcgactgttaagcaatctatagctagtgggacaaatttatttcctgctgtattggaagagatgacactacaggttgttctttgaaaacagatatttattaatgaataaattccatggtggtgt

SEQ ID NO: 1342 - DNA, 735 bp, Zea mays
aagtgtcaagctcaataagaaaaatgttcctaaagctataaatgaagaaatcaacatgaaaaaggaaaaaggtaaagattcaattaatcatgttgtttgcactgaccttctctccatgtcattcaagtacaaaaagggaaaaggaaaaaggaggtgtttcaagtgcaagaagttaggccacctcatcgcgtcttgtccgtacaaagacaagaatgaagggacaaggagttgttttggatgcaacaaaaaggaccacacgatcacttcatgtccggtcatgaagaatcaaggatgtgcatcctccaaggtgaccctcaccaaggaaaatgacacacagcaagcgtcgtgtcaagttgaacgacgtttctgctacaagtgtggtgagcagggtcatctatccaaggtatgttataaaggtaagattcctaagcaagtgaatttgtgtcaatcttattcgcataggagacccaaatcatacacttgtgctagatctataacgagatcacctagaactagcacaaaggcaatttgggtaccaaaggcacatttagatgatcattatggacccatcccgagatgggtaccaaactgtgctaactagaccatgcaggtgccttgagatggactggagaccatgaaagagattaagacggttatctaaaactatatgcttaagctgttaattgttttggtgtttattgacccaaggttgaattattgtgaaacactaatccc

SEQ ID NO: 1343 - DNA, 819 bp, Zea mays
ctagcttgcatgcctgcagtgcttcttggtcatactctgactgttcctccataagccgctggtattgaattgcctccatctgcattgcagctttctgttcttgcaagcggtttatcattgccatggtttcatcggcagctatagcagcagcgttcctctcattttcaagttcagaatatagggtgttcaatgatttgcgtgtggaagccaaagcagattttagttgatcgacactcaccaattcagtgctttccagatcagtagacaaagtagcaacacttgaatctacagatttagcatcagaaacaactgctttagaatccagcagttcctgtgaatcacatatacctccaatatgagtcggcgtatcaggctctctgtcttcttcggagacgctatgatctagagagaacttgactatgctcgtcaaaggttcgtaagaaatttgatgtatggctgttagagcagcttcagttggatcctcttcaatatcttctgttaaataactaataatcagtttcaaaaattacacaataatattataagtaacaatcagaatgcactaatcttgggaaacaaacaaagcgttcttgtgatctcagcatcttacctttccatgagtttgtgttaacattaaaagtgtctgctgcataatgtagagcatctgctgtttcagaagtgactttctgcttcacctcatcttgctcatcatcagtatgagcatatgaagtcaggcaaccatgttcctcagaatcaattggcacagagtcacactcttgttcaacccagcctgtgttacctcagcttgctccctaaaac

SEQ ID NO: 1344 - DNA, 790 bp, Zea mays
tttgcatgcctgcaggcacggtgttgtcgataaagcatcatctgtattcaaggaaatgagagcaaatggatgccagcctaatgctattacttatcgccacttagcattgggttgcttgaaatcaggtcttgttaaagaagctttgaacacaatagatatgggaaagaaggaagtcgtcactaaaaaggtgaggagttcaacaccatggttggagaccacacatctgttgcttgagaactttgcagaaattggagacttggaaaatgcaaagagactgtacagtgaactgaatgaatccaaatattctcggaattcctttgtgtataacaccctcctgaaagcttatgtgaaggcaaaagtttatgagccggatttgtcgaggacaatgattttgagaggggcaatgcctgacgctgagacatatagccttctcagactgattgaacaattcaagatctaatgctctatgtgtgttgttgctttgaaggaaaaccagtaaaccactgctggattttgtcatgcaaaaaccattagagatactctgtggacagcgtgttgcattctggcaatcaaatttttttttttttgcacagtaatcccaacttctgcactaatcaattggagatatgcagctatcttttctatcataaacagttttagaactgcaagatatacaattcttgtgcattccgaattttggaaatgttcctttttctcatgcagaaggtatatcaactagttcaatttaatattggtataatatttgtcctccaatgctgcatttcatttc

SEQ ID NO: 1345 - DNA, 818 bp, Zea mays
gctgccattgtaaggctattttcaacagcttacttgtctccggcaaaatttgacggtgttctgtgtggtcttgtggattctctgtgtgcttcttttagacgggtctttctataaagtagtattcgagagcttactgacgaagaatcgggtcaatgtcgatttggccgatccttgtattagttttaccgattcatcatgtttgtcgctgtgtttaagatcatacgtcaacactatcatgtgctgaaatgggagaacaaagctttacggttcttcatcattcgtacttgccaatctgcaatcctctcatacgacttgtttcaacttgctggtcagcctagcaaattaaattggacgaacggtctttctgcttttaacatggtgactcaaatgtcgaaacgatctacagcctacgggggagcaacacagagatggagagaaaactcgagatgaattttgtgtccgtccgagatgttacatctacaacacgcagtacacaacagcctgcccatcctttacgctcgttttacagatgatcacacaactgctactccagtcccatgaacaggtctacctcctaaaacgagatctcgctcggcgcatggaacgttcgcccacggcagatggcttccaggttctctccggcgtaggaggagagcggagaaacttcgacgcctacgagtaggagtggaagcaaagcaaaagcgtcaccagagaaacgatatacatgcatatacaagctcactacgagcgcttaattacctgtcatatacaagggcacagagtgcgtcaagaagccgccagcagcgactacccatctg

SEQ ID NO: 1346 - DNA, 754 bp, Zea mays
acggcgacggacgccagagggatcgccgcggtgctgagggagatgatccagaaccagggcatcgtgacctcggttcccgcaggccggcaacgggctggtagcgctcggaggcagcgaaggcagggtagcaacgcgtcgcgctccgcggtggtgaacgcgggcaatgctgcccctgagggcagcgatccgatccagccgccacactccaatggcggcaacggtgagcaggttgttcatgcagctcctcaacaaccaccaccggctgttgtgctgggcgagcctgggccaagtaggcggtcgaggcattcggagtccgcagccataagaaggacaaggaggaggccacagcagtagggagcagagtgttggcactcccttcagtaagaaaaaaagagagctacagatcatgcatcaaaatgttagttatcaccatgattaacatctcatggttaataatatactaggaatgtagtacatgccatcgctcgtttgccaggcaaaacgagtcgaaatgtcagtcccagtcccagcatgttgggaatatattttctgattgagcctctgtttctgttctgatatgccattataacttatctgatgtggctattcccgagtttccaacatagttacattacttcatccttgcaagcgcatcctgttagcaaactattctagcgtagaaacactatactgacttctgcttgggtctctgtttctgctccaattgctagtgtccttgtgactgagcagcaca

SEQ ID NO: 1347 - DNA, 726 bp, Zea mays
tgattcacaagtcggattgagctcaaaatttggggagatcttgcaaaggtatttgctcatgtgtgtgtaaaatttcatatcaatcggagttcgtttggttcagttttgaaatcaagaacatattttcgtactactgaaaacaacaattgttgacgatactgtattggaccgttttggactttttggtgtccgatttgcgatccgtttgttttgctagtctcatgtgagtattaggaacattttgtaatcatgagatcagtcgttcgctaatgtgtttatggtttgtgcacttacttcatctcaattgaagtaaagtgttaattttcagtgtttggagacaaaatccgattggctcccattcaccccccccccctctggcagccttaccggtcctacaaaaccctaaacatccgatggctaggttatcttcaacaacttccaaacaagccgtcggagataaatttatgtctgatgacttccaacggccgtcgaacataaggtagtacatccgacagtctccgacagcttttacctcagccgtcggatgtactatcttatgtccgacggctgtcagacaagccgtcggacataagattatctccgacggtttttacctcagccttcggaattaagagattttaatcccaccgcgccttaacgagccctttcattccaacgctccgacgccgtcgttcacttcccgcgtagcacgcaagagatcaccgg

SEQ ID NO: 1348 - DNA, 673 bp, Zea mays
cactactacgtgtgcgtgttgtaccgttttgtattgagtggtgacttgaaggtggcgctggtgatttgtactaccttctatatatgcatactccttggtacgcaaaataacaaaagtgacgaaagctagcgcagagaaatgcaaatgggcttgggccgtatcggcatactgggccgtgagtttctaataacgcatttgggcttctccgcctggggcctccgcagtccgcacagggacgccgtacatcggccgtgggactcttgcctgactcttggattggattgggcggcacgcggtaactctgtcgtcttgtgttggaagccttttgcccgtcacgactctcggcggccggccgagtcagcacggacggaccaacaaccgaccgaggactacggaacgggtcaaagccaagcctaccacagaagagagtcagagacgcgttgcagcgaatggcacatcgcccaatccgccgtatcttactcgcgatcgcgacctgctaccgtcacatgaatcctacctggactaataaaactgatatacacgtcttgctccgccgcgcccatggacgacgacttgaccgcttcgccgtgcccaccgcccgcttactccactctccacactccctcgcttcctccgctcggttccatcccttcccaccccacaaaagccccca

SEQ ID NO: 1349 - DNA, 568 bp, Zea mays
gctcaacacaggactcaagcggtaccgacttggtaggacaccgaataaaagtttggtggcctttggataagcggtatgttgtctagtaaatgttattgttatctgtacttatgttattgcaattaggttattcctgaaggtggggttgcttttaagtttattttgttcattagattttatgaaggtactgttcaatcatacgattcatccaagaaaaaacatacggtaagctcccgcaaatgatgcattaataatctattctttgtattttgtttcatccatctttactgctgtgaagtacaaccgtaaagaacagtttactttgtgtttggacactttatttgttggtgaatgcagctgagtatttgtgaatgtaatgacttctttgttcggccttggattcttgttaaatgagtagggtaggtactaggtactactgttgttccaaaaaaaactttagtgccacataatattagtttatacttatattttaaataacgattattgcaatgacctgtcgcatctaaagctgttgtaaacttctgggttctttatagtgtctgctgtg

SEQ ID NO: 1350 - DNA, 754 bp, Zea mays
gcgtcaattttgtaactccctgggtccaaagatgatgtggtcacccacctttttgctggtcttggtgctggcttctttgctgtttgtgttggttccccagttgatgtggtaagatgtcctctggccctcaattaactatccctttgtttgtgttcatttcccttttgtggaagtgtagtcaaacattgtttcttgtttgccctactgatactccctatggtatatcaactcccagtattgaactgaggacatgcttcacatgataaaacatgtcagtctctcttttgaacccctgccagttaacatattcaggaatcgtgccaaccgaagtttataatgtgttcgaaattcccaccaaggaaattcagtttagactgtccctttatgccacagcttcagaatttgacatcaaccgtagtcttcaaccatagctgccgtttcccctctttcatgtatttgtgaggtccactcttacaaagttacaatttaactctgcctttcattcgcggattctaatttgtcgctgtggatgctgatcatttctatggaagttatctagtactttcttgtggccatatccctggaatattctgtgttattgaaaaaacgttggactctgaattaatggcttcagtctctgcctgtaggtgatacctttctcaagtgcgactgagactgacaaacagttatcttcttgcaggttaaagtcgaagaatgatgggtgactcaacctacaaaaaccctctcgattgtt

SEQ ID NO: 1351 - DNA, 755 bp, Zea mays
ggtgagcgatgaggatggtgcgctggtggacgcgctcaaccgtcgagctgctgtttctgccgccgcccccagcttcttcgaggggttcgcgctccacgggatccgcgtggagagcatccgcccaggccacatcctctgctccttcacggtccccgcacgcctcacctccggcagcgatcacatagcccccggcgccgtggtggccctggtggacgagatcggctccgccgcctccgtgtccgacggccaccacctcaaggtctccgtcgacatgtccgtcaacttcgttgacctcgacgccgccgcgcccggggacgccctccgcatcaccgccagggcgctcggccacaagggcgcctactccggcacgcacgtcatcgtcgccaacgccgccacggggcaggtggtcgccgaggggaggcactcgctcttcggcaagatgaagatcaggagcaacatctgaattggagcatgtgtgcacacagtgctgtgtttgttgtcgtgtgctctgcttctcgactccttgtcaggaatgtaatggcagcagcttgcttcttcagtaaaaaataaaaaaaaaacagctccattattatgtttattcattctcatgataccacataacaatcaagcacttcacacacagtgatcgttaccgatcagtcagtacaaggaaaaaaaaacgaaacattttattcccttcccagcatgcaacaacagatgcccactgaactaaagcaagtcaagttccaacattc

SEQ ID NO: 1352 - DNA, 761 bp, Zea mays
  unsure (1)..(761): unsure at all n locations
cgtcgtcgtcgtcgtcgcacaagcaaaaataaacgatggcatcacttggtggtcttgagtcttgactcngacgacgtcgtggcaacaactggcaattcaagagtacagaattgcagctgggaggatcggaaatgagaaataatgaccttgttgccgaggtagcccatgatgccgcggccgacgcaggagaagcggacgtggccgacgtggggcaccagcccgcgcctcacccacaccgtcgcgaacagccccaccatctgcttgcacgccaccaggcagtacctctcgcgccggcctggcgcccccgcccccgcacccgcccaggcggcagcggcggcggggctcttggtcacgtcggacgccgcgaagctgctggccctgacctcctcgtcctcctcgtcggacgtcgtcgtcgtgtcgtcgccctcgacggctgcggcgctcgcgcccctgccgccgcagcccatcaggcagggcgccctcagcggcggccgccggcggcggcggcgacggtgctggtggtccggcgacgggcacgtgcacgccttgagccgccgcccgcgggtgatggcggcgcgccggatctccctgttggaggccttgtggaaccgggacgggtccagcgggctggcgctcggcggcgccggcgtctgcacagccgccgccgtgtccagggacgaccggctgaaccagcagctggtcgctggagcttccgatgccccggaggcgtctgacggacggttcagcgcctggttgatgac

SEQ ID NO: 1353 - DNA, 1379 bp, Zea mays
agtgaaaacaatgctctgcgcctgtgtttttgttttgcaatttgtagtctatttttgaggtctcatttgaaatggacatatatgaagcacaagaatgtagtaacgttttccaatgccgcaatttttgttttagggctagttttggaaccacattttttcaagggattttcattctcctaagcaaaattagttcattttcttttgtgaaaataggttggaaaaatggtgttttcaaactagcccttagataaacgtatgtctgatctcggcgtgagtgggcacgcctagggatgaaaacggacggaaaaacccttcttccgttttcgtatccgtattttatcatcgaaaatgggatcgggtccggaatagtcgggaacggaaatgggagcggtataaacggaattgcgaaaacgaaaagaaatagaaatactaatggaaacccataatttaatacaaataagaatgatattgatgtttgactagtgattgattggcatgacaataacataaaataaatagatatagagagacaaccttctattattatttgattgctaatagtgtatatttagctatatccgatgttgtttaagattttagacttgtcattgaaaatagtcgatggttacaattgtcatttatgctataatttggcacctaaagacacgaggctttattttttatactaatgcatattaggctggtcctatatttatcaaatacggaataaatatgggttcaatccggataaaaacgagatctcataaaaacggacggaataaactctctcatgtttccattccgtttccatacttttccctaacataataatatgtcaatgcatccttgatgctattttggttttcatatttctctacgcagatttagacatttaaccaactattctaagaagaaaaaacaatcaagaagttaatataaaaatagagaaaaaacaacaacatttgatagttatacagtagtagtggttgtgacatgccttcctaatgaatatgtcgtcacatagaaatcctcttctatgagtcattcatatatttagacgtggatattgaaaatataatgtatataagaacaatataaaagatttatcttgcttaatcaagaaagtgaagcagtagccattacaaaaaagaaatagattatatcaaatttcaaatgattattattgtatttttgcgagttcgacgtcataacctgtagcgccgagctaggtgccccatacctccacaccataagtctcggcaccgagccgtgttacttcggtgttgtgacctttggcgtcgaggaaaaggtccaaaacaagaataaatcttccaagagatcaaaagtattttttaccaaaaagttaaattgcaaaaaaa

SEQ ID NO: 1354 - DNA, 798 bp, Zea mays
acatggtacagaccatgtcaaaatctctggaagttgtttccaaatcagtggacaccatgaacacatcgctgaccaatgtcataggccgccagcgggacagcgataaccagcttcaagccttgaatctagcagtcacgcgattggaaaagacctctccatcctctggtctgcccgacaacaccagccataacaattgtaatgggcatagaggtggtggcggcggaggtggcagaggaggccgcaatgatggtgatggtggcggtggcagaggtggcggctaggggcatgatcatcaagatcaggaggaacatgctccaccacgctacctcaaactggattacccgaaattcgatggctcagaggatcctcttccatggttgaatcgctgagatcaattctttcatggacagggcacaccggaggagaagaaagtttggctcgcatcttaccacatgaccggcacagctcaattgtggtattatcgcctcaagatgatagcaggtgaaccatctttgcaacacttcgtccagcttgtcttgcatcgttttggtcctaccctgaccaagacaccactaagcgaactgaagctgctgtactgtacttttttcgaaaaacgcaggagaactgcgtctcattatattaaggagaaaagggtctaagaaagagctgctgcaccgtactggaagcatggatgaataccagggtaaattcttaacactcacttgccgcgatatagagctcacgtaatcacagcgaatccaacttttcatcactggtcttggcgagcccctgaaaaca

SEQ ID NO: 1355 - DNA, 793 bp, Zea mays
cttgcatgcctgcagttggattggagaggaacagagatcagaaacaaaaaaaaaaggatggaatcgatcagaatacctgccatctacagcagaattattagcgccttctcactgtgcacgaactcaaagcattagtgcgaagaagaacagaaagatactaaggcgttcaagtatatggatgccatcagtccatggttacagggagcttttctctaggagatttccaactgaagttgatacgcagaaggaatgtgaaataggtgacaaaaaaggctaaatttccagcggacaggagaacacgattcgccatgcgaatcttgtggctctatccacagcagggctaactctgaaactaactaaatgtattgctagtggtctttcacatttgcatggttgctgtcaaattgtctatgtcagatccggtactctaaaacaagtcaataagtggccagatcattttttttattttgattaataacaaaaatggaagtgtcatattgtcaaaaaaaaaaatggaagtgtaccaacatctgagtaaatcacctcattttcattagctagatccagtttcttcatgatgtacctctgtatcgaggaaatctgcaaactgccatctctgaaacaatgacaacgtaaaccgaagaaaggaattaaatgtcagggaacagaacacatgctagtactgagaaaaataactcccaatgcagaaaacaagttggaatggcccaaagaagttcctaaaacatgtacatcatggtacgctggacacgcaactctcatgcgtcgttcgaga

SEQ ID NO: 1356 - DNA, 760 bp, Zea mays
  unsure (1)..(760): unsure at all n locations
tagtggacttctttgtttttacttttgtcctaacctttttgtccttgcttcatcttactccatagaattaagtattacagtgccttttgcacaaggttgacgtccattccgtttttttttctgttctgttgtgctcacatataatcagtggggtgtctccactctgatgctgattgattttgtgctgtaaaaggttcacatcacacaaggcaatcatgatggcacagccatgataatctcatgggtgacaacaagtgagcctggctcgagtactgtgatctacgggacttcagaggataacctcaactatactgcaaatgggaagcatactcagtatactttctacaactacacctcaggatacattcatcattgcacaataaaaaagttggaggtcaccatctcatcggaattttggttagatgtttgtttgttttttcctcatatggaatctcacttggttacctgtctttgtttcagtttgacacaaagtattactatgctgttgggattggacaaactgtgaggaagttttggtttttgacccctccaaaaagcggcccagatgttccatatacactcggtctcataggtgcttcctgatatgataatcatcactgaaatctaggattgattgtaattactgaaacttgacaattctgttcaggtgatctttgtcagagctttgattccaatgttacgctcacccattatgagtnccatgcaaaagcacagggagttcttttttgtgggactttgc

SEQ ID NO: 1357 - DNA, 756 bp, Zea mays
tggtgccgttcctgaggggggccgcgtgggagcagccaccgccggacttggcctcgttcctgtacaagaaccggatcgtgtacttggggatgtgcctcgttccgtcggtcacggagctcatgctcgccgagtttctctacctccagtatgacgacgccgagaagccaatctacatgtacatcaattccactggcaccaccaaggtttggtgctgcttctgattcacctttccttgatttccttatgaccatgataactttttcactcggtttaattttggaccttttccttcttaatacaatgatgcccaactctactgggcgttcgggaaaaaaaaaatccttatggcgattattacttggttgtgtcaaatgagtgcggacgtaggtcggagctcacaaccaaaatggaaacacacctacctaggaaaacaataaacacgataaggctacgagcttaaagtatgcctgggttatttgacagacctatggctccaaaaacctttgtgtagtgggcatcaatttatcttagcctgtggatttttggttctttaatcattagttttgttcacctagactatgtgtaagtttatttgttttctcacccacagagcaccgagttttctattgttttttgtaggaacgtatctgttaacaatcacagattaattcttgctctaatccaatcttcatatcatctttctccctcattcaaaatggcgagaagttaggctatgagacagaagctcttgcagta

SEQ ID NO: 1358 - DNA, 750 bp, Zea mays
aatgaggcatttcaaaagcttaaagcagcaggagcatttgagaaagagggcgagatgaacatatttgttcggatgagcaaatccattgtaaacacattagctaaacactggacaacaacaagagaagctgaatttcttgcctcaacaattgtttcatcccttgttgagaagcagcaaaaacacgagaaattccttcagtttcttgtcttatcaaagtgtcatgaagaactcgcttcaaagcaaagtatggattcactcttgccatcattttgctttattatcttcatcaaacacagtaattttgtttgtaggttcaagtatagaagcaagattcttatttgctaggtgcccggggccccgaggggccccgagggctttatttgccaggtgccccggcatatggacttccggaggctagattggtaactgacccgagacacactgaccctagggattaactccgtttgctatgctatgtgatctagtgagctaagtcaggaatatccttgtatgatccgtaggcaatgtcgtagtctttcgcctcctaaggttaggcccccatggccatgaagttctgaccgctgtgtcccttctactgtggggctcgagaccagtctcttatctaggatccttgagcgcgtattggcggaagactaggacattgccatgttctcttatctaggatccttgagcggttgagccatggttgaaatcagtctcttatctaggatccttgattcacaggacttt

SEQ ID NO: 1359 - DNA, 818 bp, Zea mays
tcacctacgaccgaattgaggtgaacagttttgtttacctgcccttttcttgcgtgattgtacgtgcgcgtaggactgacgctgccacctcttttttgtcagagaaaccacacgatccaaaaaggatgcacctatgcacgtccgaaagctacgcgcgagacgaagagataggaaagcaggaagcaggggcccagctgcacttctgaaacctggtctccattttctccagccactcatttcgtgtggtcatcctctgcatacagagtgcactattaggactttcggttacaccaatccagaaggagattgtaggggtttaaatctccgcctatttatttttaactaggaggagatttaatgccctcaaatcctcctctgaattggtgtaaccgaacgtgcccttagagggtagagtttgaaatgaaagaggtggatgagtaacctattcgagatagtctaaagagggtgtttggagctactttaactctagaaaattggtgtagttgatgggcaagattataagtgcttaaaaaaaagtgtgggtctagactatagactcgtgaacatagtcacataattttcggatcgatatggtcgatgaacgtgatgagctaactactattgtacccgttttcaggggcgaagccagcatttgagattgagagggacaaattagattgagggggctgttaagaggtattttacattatttatatggtgattagctaaaaaaattagtagcttctatggaatttgtagaagattaaagggacaattgccccctgtgcccctccctagaatcgcccctgcccgttttt

SEQ ID NO: 1360 - DNA, 819 bp, Zea mays
agagagcagcacgtacaactcaacaggcaaacaatccccattcacctgcctgctttccttagtcccttccttcctcatcgacgaccagtgacatcgctccttcgacttgcacacggcacgagcagcagcaaagcaatgcaatgcaatgcaatgcagcagggttagtgactggcgtacgcagctaaagacggccgagacccgcatggcctcgccgccagcctcatctcttcccgaatctcaagcacttggtgcgtcttacttcgtcggccatgctcgacgacggcggcgccctggccgccttgctgtcctttgccagcttctccatggcgtttatgaacttgcgcaggtgcctgatgtactccgggtacgtctccaggttgcaatgcccaccgcctttgatccacagcggctcgtacttctccttggctagctcccacagccgcttgccatgcgtgaagtccacgatctcatcggctgtgccctgccatgtatgtatatacgattcattcacgaagtcaagacacaaacagttggaactgctactacttggtagtggtagttcttcagaatcttaaaattaaacttgcaagaagaacaagctatttattacaagtgaggattattcgcaagtcaaaacagactcaagatacaccaacatacaagaaaaatgctataggtcaataacttgctgtgagtaagacagattagtcaaatatctgcggctacagctcatcagaaatttgtttctaaaaagaaggggacaaaatcacagaactgtataagaggcatctatatcaatacagacgctagccaggcact

SEQ ID NO: 1361 - DNA, 764 bp, Zea mays
atctgaaagtcacttggtctccttgcccagttgaccttactgaatggcattgctttccgcggtttgactgtcattacatccttttcggcgtctgatcaaaaatttttagcacgagatgacgtgcttctagttgttgctgatatcttgtcctgagttgagtaaacctgaagctggaaaggagcggatcacattcgtgctcttgctcttgttgacttctaggtctatcttggatacctagaggctggaaggggtcagatccagttcctgtggtcctagtaacaaggtcctcttgggggaaggcgccatgacctacttccccgaggaggtggtagagcacatcttcagcttcttgccatcgcacagcgaccggaacacggtctcccttgtgtgcaaggtgtggtatgaggtcgagaggctgagccgacgagcggtgttcgtagggaactgctacgctgtgcgccctgagcgtgtggtgctgcggttccccaatataaaggccctcacggtgaaggggaagcctcactttgcagacttcaaccttgtgccgcctgattggggtggctacgcagggccatggattgatgcagcagcaaggagctgtgttggtctcgaggagttgcgcatgaagcggatggttgtgtttgatgagaaccttgagctgctagctcggtcattcctgagattcaaagtccttgtccttatcagctgcgaggggtttagcaccgatggtctagctgctattgcgagtcactgcaagtgagttt

SEQ ID NO: 1362 - DNA, 803 bp, Zea mays
aaaagaataaattaatatagtgctagtcactataatgataatactgtttgagaagcaacatgcatgaataaagtagaatagtttaagacaatactttgctttgaggcatacagtgagctatgtttgaagggaggtctttgggtatcaaaactcaaaagaaacattcagttcataagaaaagaacagcttcatgatattttgtctagaagaactccaattatcaataaaaaaggttcaatcaagaaaataagaaggcagaaattcaagaaaacaatattggcaatggcaataaaagagtatgtgcgtcgaaattgaagtgaaccaaaggaaaatagatttgctgtcttcataccacgtagagctcttgcaggaaaatgattcgttttaacatgaaactgggtgctcttaaggcctgatgatctaccaggaaaagctagcaactgagcatttccaacagatacgccctggcatagcaccattttgcatgagttcggccttatgcagttatctgcacatacaagtgatcgaactgagtatttggtctggcactgaaatcatgtagcagtacacgacgcaaacccaacacagattagcttatttattaggccagtttcagtggggattttatgtcaatgttcccaagactccgatatgttagaagcagtgcacataagtttcatcgcccgtggaactcatttcattcgataaaactttttaccttatctctcttcgttaataatatgccacatcaacatatttaatgcccataatcctctcgtgaaaccaccagagactagtcttag

SEQ ID NO: 1363 - DNA, 816 bp, Zea mays
attccaaccgtcctccgagaatacggcatgacttcagtcacagaaggcattgacgctattgcgacgactcgagtggttgtcaccggagacgtggccaacaactccaaacacgccttgactggccactctttcaaccgctccttcaggtaataatagtccatccaaatctggttccctttctccatgctcctgccatccccttctctcgctcaaacaaatgtctatgttttctgactccagcgggagcggggcggcaatggacatcgtcgtgtccagcgtcagagcttacctgagtgccctgaacaagatgtgcagcttcgctggcgctgcgagagccagcagcagcgagagcgaggtgcctgggagcgcaagtgttcaacgcgcagaatgagctcggcggcgttcgcgttcgtgttagttctcgtatgggatgccaggatggactgtgcgttgtaagagcttgtcaagctgttgaggtgacatttcgtttcagtaacaggctgctcgatattatggggtaccccttgtcagtggggtgacgacaatgctgttctttttctgggaggatagtcccttcagcttagaacatgcaggaaattttggccctatgtagtgtacattttgtatctttaaacatacttttcaataatgaaataatattagggtccatctagccacatgggtggccatcggcatgaaaacaatcgaaaataaatatttattcgggttgtcttttttttggcttttttctttgattacgaataaatagatatagaatttacaatgaaaatatatattcttatttttacattaagc

SEQ ID NO: 1364 - DNA, 657 bp, Zea mays
aaaacatggtatcatgtcagttgttctgtttcttgttgggccaaagaaaacatgggaattacaaaaaactaataagaactgacaactcctaaaaaaatcttatgaaccaggtcaaataacatatgtagtaaactgcaaccaagtacagtgcgaaggagttcaataaacatatgcatgttttagtctgattcatggttatgtaaaaataccgaaatagacttcacacattccattaacaagcactgaattggatgaataagcactataagagtacatgagaaacatgagggaaaccctagactagaagattacactaatattatgactattataaccgtaacaaatttgatttgcattttctgaattcacttttgcttcacacatttagttcaacagcaactaaaatcatgttttcggaattcactttcaactattttctaatgagtacagatagaactcgaatttctggatattctatttacagtttgataaatgaactttcaagtgcaataggacaaaagaagacttgcatacctgctcaagagaagaaagttgcatgaatttctcgtaatataattcccaatcaggttcaaggtctacatttatgggggtgaccaagtaaacctaaatgtaaaatcaggatgcccagaaacaaaa

SEQ ID NO: 1365 - DNA, 785 bp, Zea mays
tgcatagtcctgtcagattgaagtgaaatatggtgagggtcatttagtagttcatataactgcaatataacctcacagtatatatgtggaggcctgattactgaaaatatataattgatagcggagatagcagattgagtaagtattcacatgaaaggaaaaaaaaaatgctatttagctgtactagaatatagtaaccagaatttacatacaagagatatgcaaaccaagcagcagaattatacaaatatgtcattttatttcattgtctgtagacattccatatgcatatatgctaatcaaagttgtcaaactatcttcatgaacagttgtttcacaattttatcagtagtagtcaagcacgcaaaccatgcagcagggttatagtgaaatgatgcttaatgtgtagaccactagacattccatatgcaaatataataatcaaactactgaaattgttttcatagtctcagttcacatataaagaaatgaaatcccaaacactatgtttactcattatacaaaaatcaaccttgtacacaagaacgcaagtccaaatcatagaagtttacttagccatcagtcctgatgcagcacagcacagttttgactctatccggaaagagccaactagccaagtttagttaaagtcatgtatttgcatgcattaataatgacaattgtgtgtagcttattgtacaaccgtagacatacaaaaagtcaaagaggcatagggtggtagagcttatgacccacaggatatggaaccagatctaaagaccatc

SEQ ID NO: 1366 - DNA, 738 bp, Zea mays
ccagtcggtctcctaggacctaactcatgttcgctcatgatggacggacgccgacgcgtgcaggtgcaatgcaacccgggtcacgaacgacaccttcctcggtacgaagcacgattttctgtctggcatatacgcggtacgggcaaatgttgtgtgggctagaatcagcagcacgacccattacatagctagcagggctgctgctcgtgctcgggcggcccaatcaacaaacaatagttggctcggtggtggcctagaccgctaggagcccaccaaaataccacaccctttcgtctgttaaacacaaaacaccccctcccccggctccggcggtgcaaataccctgcttcctagttcatagtgtcgcgtcctctcgtttcctcgtagagacgaggatgtgggtctcggactggtcggagtagaccatgtcaagatcgatgaccagacgccgcgtgctctgcctgtgtctgaactctgaaccaggcaacccgtgtcgtgtgcacatctatatactactgggcctcgatgtcctagctcgctctgacccggcacgccctctcctgtccatggctgatgcacggacaagcgcgacttcaaggctggagccgtgtcgcggctcggggcgtacagtaagagcgtggtcgcgcgtaggggtgggcacggctacggagtacggacacggatgatgcatgaatagaagaaagccaaatcaagccgagcgatgcttcctttcctcct

SEQ ID NO: 1367 - DNA, 818 bp, Zea mays
agcttggccgcgttgctggcgccgaacaccttgtggatggccgcgaactgcgccgccccgtcctcggcgcagaagtggggagcgaacacgcactccgccgcgcacttgcgccgcaggaacttgcaggcgccacacggggaccccggcgagccgccaccgctgccggaggaagccatggccgtcaacgcctgcctgatgctgtcgtcgctcgctcgctccctcacgtacgtcgtctctcctctctctgcctacagggcggctacagctactacttgcagaagcaagagaagctcagccagctcctgttaacacctgtcacctactgcaagttgcgagccacacgagggggaggttaggctcgagctcgagttttatagaggaggaacacgacaaggggtgtaaggtccccaggggacaaggccggagagaaacgcgcgcgatgtagaggagtgcaagtgacctgtgaacgcccattcccggacacaccaatacttgtttcagggaagacgaggcgcatcgtcttcttgcgtatcaaccgctccaacatcgctgattcgcacaagttatggccaggccctgttgcatcttgcatgcatttcacgagaggctaggtagaagcagtagggatgggcgtgcatgctcgtaattcatgcggatgaaactagcggagcgggtcgatgaattgaactagctacgtctagctagtagagcacgaccgacacagctactgacatgttggcctgaatgtctcaacttccacgtcgtcgcggctgtcaccgtcaagcactcaagctgccaaaatgtcaatgccccccaaa

SEQ ID NO: 1368 - DNA, 819 bp, Zea mays
  unsure (1)..(819): unsure at all n locations
aagtgggcgctaccggtgatggtgaaccgcatgccgcccgccctgtcgcagctcaccctgcatggccaccaccatatccatatgccaactgcatcaatcatatcccaacagacaagacgcaaatgccaggatcataacttatgaaaagggatgcttgctgtgcactcttgcaggaacacactcataacatttgtccaaaaatcaggtgagtgctgataacgaacaacgcaagtctgatttgaaaacaaaaaggaggaccactgactgagaaagcggatgctttcttttctctgcgttcttatcttacccattagcttagtattctaaagtggctacccgatattctagccaatattctacgatccaattctaatcaacgaacatcattctgggctttcgcaaaaggcagcgccagcgcagtggcagctcaagaatgatagcgcgccatgtgacatggctttgcatatccattcattcagctcaagcgagcagcccagcccaacgcttctgtttttctcctatgtaaaatattgctaacacagttccgataccaacgcgtgcaatatgtagtctcaacctacctccggaactgcaccggcacgatgccggccttggccttggcgacgcggaggaacgcggactacgacagctcgaggtgcttcccgcgggaagttgcacccagccgccggcgttggtgtcaggcgaggccccatgtttggccgggccagaagtttcgtttccnctttaccaaccaaccgttggggcctggctctcgtagggccccaacttggttgtgggtttggtccccacccccatacc

SEQ ID NO: 1369 - DNA, 731 bp, Zea mays
tgtcagactcgaaatcctagttgcattctgcacttgaagagtcaagttggtattgccgaaaccgaggagggcttggctcgtccctgtttgagaggtagaggttctgtaaatccatattagtcaagtgagcttgctatggcatcctacattttgcaaaggctagaagtttgctgattcctaacttctctcagtctgcgtttagtttagtgaatttgattctttgttaattaccatccacttctgttcaacatatttgtttctgtttctgatctattttatcatgtttcttctttacattatgattatggttattgacctttaagaagtttaagtagagaatcatgactcctgtattttgtgcacatgttttccctttaccacctcacgtgacaataatttgttgcttgctgtgttacacaaaattaaaacatcttgatggaaaatataggtatacatacgggatcaacactttgaacctacacagttctttgcactgggaagaccatgtaaagttgtttgcaatcctgacagagaagcgactttacacccaaagaatattgacccagatagacgggaaaactgtaacttgaggtgtacaaaatcacatcattggttgcataggaagacaattgcagatgttgtggagtcacttcttggagtttttattgttgagtgcggattcaaagctgcatttgcattccttcattggattgggataaaaaatgattttg

SEQ ID NO: 1370 - DNA, 1085 bp, Zea mays
  unsure (1)..(1085): unsure at all n locations
tgactggaaactgtctctgaatctctttatcctgtataaaaaaaaggagctttgcacttgctgtttggattaaatggaaatcggccaagctggttcagtaaaaactgactcaataacatttgtaactgtgaaaagattgtcagtcactctcttttcttgaaaaaaagggtccaagtccaactatgaggtcttttccatctacacggctactgacaaatgcatgcgttattttttcaattacatgtctgtactcatgaagcctatttccccattcgcaggtgaagtgctacatgaaacagctactctccgggatcgagcactgtcacaacaacggtgttctgcaccgggacatcaagacgtcgaacttgcttgtcagcagcgacggagttcttaaaatagccgacttcgggctcgccacctcttacgaccctgaggacgcgcggcccatgacgagccaagtgatcacgctctggtaccgtccacctgaactcttgctaggggcgactcactacggcgtcggtgtggatctctggagcgtgggttgcatactggcagaactgctgctcggcgagccgatgttccccggaagaacagaggtacttgttggtgtttgggctttggtctagttcaaatccgtcttggatatgcattgctgggtaccgtttggttttttttgtttattaactatcggttttgttcaggtggagcagctgcacaaggttttcaagctatgtggtactccatcggaggattactgggagaagatgaagcttgctcatcctttattcaagccatatgaacggtgcctagctgaaaagttcaaagacgtgccaccgtctacgctgtcgcttctcgagactctcctgtcgattgacccagatatgagaggcacggcaaccgatgcactgaacagcgaggtcaatattaccttgttggcataaaaaaaaaaacaaagggaaagcaagataaatcatggccagacatcatgcaaagagaaatctgcatctggtcatgattgcacggaattaggtagcgtagatatcagtttttagttggaaacagacaagnggttctttgttcagctg

SEQ ID NO: 1371 - DNA, 725 bp, Zea mays
cctctacagtcgacctgcagcttttccaccactgcatgacattttcttctccaatctgaggagtgaaacttcggaggttgacctgtccaagcagcataaaccagaagttccttgcaaagacaccctacaagaagatgatctatagtttcaggctcttggtcacaaagggggcatctctcaggatgactgatacctcttttttttgtagcctgtcagctgtccagcaccttttcaaggcagccagccaaagaaaaagtggccagttttctgcgctgactggtgtgtctaggtggcccaagagacttggattgtgggttacctctggttcctaggttcaaggatcatgcagacaagttggccgaaccatttctgtctgttgtccatagtatttgtccagagtgccatgctgacccctctctttctgaaccaacttttggtgtctcaactgcgcagtgccttgtttgatacagtaccttgtacaaaaaatgtcactttggtggtttggcatcctgccaagagtccatgcattcattatgccatccatgatttttgaatttctagtggtgctttgcagtttttggatttagattttgttgcatgctcacgcatggcgttgagattttcagaggttttgttaacatgggatggaaccttaatgatcaagtgggttaaggcagcctgcttaatattttgggcgcctttcaaaaaattatgaaaaaaaatgg

SEQ ID NO: 1372 - DNA, 825 bp, Zea mays
atcttgcatgcctgcagaaaaaggaagtctcgatactgacagcttgtacagccctatatatatataggttcatcaatgaaacaatcgttttcagctcatcattaattgatgtgtatcacatgaagcaacagtattgaaaatgtggcagaacaaactttctaattgtgataaaccatacaccactttcacttattcctatatatctttgggtgcttttgtggtccatgcatctgtcgttgggaataatattatttttcctggtttctaatcatagccaaaattagtactcagaaacataaaagaagaaatttatctggattttgtaatcagttctgacttctgagagagaatgattcaaacagatcatatttccaaacggttaagtcaagtaatggaaaatatgaaagaggatgaacagttacgttgcgcagcgttattaggacatcatatcattaacttaataagtctcttaatataacctagcgtaatccaaccgtatgtagtcgtatttttagaagtgacttctcagatcttccaagaccaacagggagagacatgttagttaactgcaacttgatgagcatatatatataatgttatatcgtagcagttagtaaacagaatctgataaagaaatggggaccagatctttacacgatccaattgtccaccacatgtcaccgttaggcgagctgtagctagtttgttgcaatttggtgtggcttgatcgatctctgcatgtcaaagtttctacgtagatctctctccctccgatccgtcgccgctgctgcttcactctacatacacgacacgcatctgtgccat

SEQ ID NO: 1373 - DNA, 812 bp, Zea mays
agctcggcaaatggatggccccggagaaggcaagccacgggaacataatgctccagtagtccagtaatggtttcttcttcggcagccgttgctctctgacgcctctgtgtcggcgaacgcatgcaggtgcgggtcccgctgatcgcttggccggcgaccgcgcaggtggtgccggagccgctcggggtcgtcctcgtcttctcctgctggaacgtccccttgggtaacttaacttgactagttttacagttcatggtaaactgctcccttgcactggagaaaagaatcgcagtcttcaacgacccatgataaacctacaagatagattcaggccccgacacacgtttcagataatgatataataataacgcgtacgtgtcctactactacgtgcgtaggactcccattacttctctccactgtagtggctgctgctgctgctgctgcatctagctgttctgtttggctccagtcctttaatactacctctgagagtgaggtgcaatgcaactggtgatgcaacctgcaagtcaagactgcactagtagttttgatgacacctaccgatgctagaacgaagaccgcattatccttgatgctctaatttcttcccattattccattaatgtatacgttaacacagcacatacctggcgatgccgtagggccgctttgcctttctcctttcatcttgcatctatggcaaatgacccaaccgctttgcctttctcctttcagtcgaataggaaaactatatatatattcttcgtcatgaaaacatccaatgaagctgtataatagttgggagcaaa

SEQ ID NO: 1374 - DNA, 986 bp, Zea mays
atgcctttggaaaagggtgtcaatgaagcttaaaaagattggcccggaggttgcagtcctggggacatagtgcagttggaaatgtcagttctcagttggggctggctcgcaaggttgctgcacaggttggaaatggcgcaggacagcaggccgttatcctcaaagaagagatggttgttgcagaaattgaagcagcactgccttgtcctcgcttctttggaaaggacagttgcacgcttgcgttcccggttgcactacttgagagatggagatgccaacacaaaaaaaattcatctacaggctcgcttccgcaaaaagagaaattttatttcccatttggagaatgaagggaggacagtcaccagccatgaacaaatgcaggaggttctggatgatttttttctccaatcttttgggttctaatatccagagaccgttttctcttaacctagctcgcttgccacagagacgctattgatttgagttccctggaggcacctttctctgaggaggaggttcgcgacactattggtgctctcccatctgataaggctcctggtcctgatgggtttactggaaaattctacaaatgttgttggcatattattaaatcagatttgttggcagccattaattcactcccatcaagggaatactcacaagttggggatgctgaattcagcttatttaactcttctccctaagaaagttgatgccttgtctgcaagagattttagaccaattagcttaattcatagttttgctaaattggtcaccaaaatgcttgctaatagattgggaccctatctgcaggagttggtggcatctaatcagagtgcctttgtgagaggcagatcgattcacgataactttatgttggtgcagcattcaattaaatctctccataagaagagagtctctagtttgctcttgaagttggatatctccaaagcatttgactccgtctcttgggccttcttgattga

SEQ ID NO: 1375 - DNA, 1046 bp, Zea mays
atttctgcctgcagtgattctattaggggttcacttggcacggttaccaacacaggcaaagcacaaagggtagaaggtaccatatgaggaggcacaggtggttgaggctggggaggcagggatgaactgttcattgagagagtatctgcaaaaaatgtgatagtatagaatcagatttttaataattaaagaaaataatagaagacaaatacactaaggaggatagtggtgcgaccctgaaatgtatagggcaccatgcacagcaatacaaagcaatatatctcgtagagggaacctcatatagatcgaataacaagatcaataggttataaggcagaaatcggttcgtgcaagaagttattataccactggattcaaaatcttcagtggtatgatcacaatcaatattctctgagtcagatgagtttccaccatgttgaaccttctcatgatcagctgaagaaacagaatcagaagccacagaatacttttcttcatcagaatcaagcggagacatcagtggcatctgtagaccaactttagcttgaattcttgagagctctttcatgtcattgagcataagcttttgaaatttctcttgcagtgagtttgctgagaattctttgagcaaccaataggcagcatcatcgctgtttgcaatccagtcaactccattgaagagttcttgaacagctgaaaaggcttcaattggtaaaccacctttcacatcaccgttgagtgttgttgttggagcccttgggggagatatgcccccaacttcacaaaacagcacctaaaattcgaaatttgtgtcagtgatccattttagtccagggcaatttcaaagagtatatgcatcgatttacctctgctctaaaattcctcggatatcgctcttttgaaccccagagtatatccacatcatcgctattcagcatcaatacatttgaacgtataaaagcagtattgaacattatccggaacatcatgacttccttctctggatcaagatcgagatgtaccacacttcagaacaatatctccct

SEQ ID NO: 1376 - DNA, 805 bp, Zea mays
actgcattctagttgtgcattagcatattcggtcctgatagactccagcgccagctgttttacaaataggattaatataaggattctaacagtatatgaagatagttgttgtaccacagagatgacaaaaagtcaaaaactatatagcaaatagtaatatatggtgctaatctcagaaagtatgcttaactaacagagacgtcattgaaaaatcaaacataacatagctgacctagtgacaattgttttatagcctcatagcaaccagttgctgtgaatttaaaatgagtacaatcttttcagcatacttcagttcatgaccatgtcaaccaccaaaagacaaacacattttgcataccatgtacgagatattgatccaagaactccctggatgtttgataactgaaaaccacataacagatggtagatataactagtttgtttgttactttgtttgagaggttgactttgaagtaaggcaaagttagattagattgggtccattagccatgttaacctcattctccttataaatatagtacctagtgctagggggcttaagtaaagagatagacaaagttattataatctcctgattgaccaagatcaagcatggtgccactgccaacaagagcggtctagaatttatcctagccctcgtcttacccgatttcccaatcaagtcatatcaatattgacataacaggcaatgcagttacttaatcctaatattgagaatacattttccccaaatttaagtgctagaaaggtagagtaggtctgaccagttgagcttgaatctctt

SEQ ID NO: 1377 - DNA, 828 bp, Zea mays
tgtaaaaccaaaggtatcgtactgctgagatgtctccaaagcattaccacccatatcctgtaaatagtatccacactgacaaatgaactctattttttcaagaatggatatatgctatgaaataacttcaatcagactatgagtgcctcgaaacagcagaaattagaccagccttaaaagttgaatctgatgtcaaaaagaaaagctgaatctgatcagatcaacacaccctacgataatgatacatacttcctccatctccaaattgtaagtcatttaggacaacaacacggtctccaaaatatagctttgaccaatgttttttttttgttaaaatataaatgaactcttaatacagggtctgtttggttggactgtggctgtgaaaaaaagtcgttataggctgtgagatgtgaaaaaagctgttgtgggctgtgaggtgttaaaaatcctaaaaccgtttggtagaacccactaaaagccgctaaaagttcttctatatacattttcacagttgcatctgaaagccgctaaaaacaggtgtagaggtgctttcagttttgcactgcgataaagtcagcttttagaaaaagatgcttcctagatctagccctttggtttggcttttggcttttagggggcaaaagccaaaccaaacacacccttataattttgtaaaagtacttttcaagataaatcggtgcatatcactattaggtttcaaaactagataacaaaaacagttattttgtaggtcagagttttaccaaggttcgactcaaacccttgggcccaaaacaacttaataaattgggaccttggaaggga

SEQ ID NO: 1378 - DNA, 775 bp, Zea mays
  unsure (1)..(775): unsure at all n locations
tttccaaatattcactttcttcgtttcataatcaattacgtgaagttaacaatgtactattttacttgtgcatgaaaaggtaccatactgttcaatttgttgctgccatctgcaatcgtattgctacttgcactgctaaaaagttgacgaccgagactgaagttacttttcatgattttgttgctgtggatgtggaagctttccgatgtatattttctgcctttgtcatgtttatttactgatatgctgtttgttgatgaaaattcagtacggtctgcaaagacagaggtgagcataagaatgcagggtttatgtagtaaaagtgaaaagccgtacttattccacagcaaaaaaaatcaatattttttccaagtttgcaaactgaatttacggatccacaaatatttggcagataatatggtaaccggagtctgccactctatcaaacgtttgagtgtttgactcaactgcatcgttagactttcagagcagaaattcaaaggcccaaaggtggcgtagcgtattccagtcgaacaagaaagcacatttttttttctgttcaaacattgcgatttcagcatctatattattaggttgagaagaanaaggcaggagtgcatttcacaccatccgttttttccttcaaacactgacacatcagattaggcaatggacgaaaatccacgaacagcactagtttgagacattgttcagaaatagcactcattntcaagcaattcaaaggacaacacaggttttatcaaatgaattcaga

SEQ ID NO: 1379 - DNA, 821 bp, Zea mays
cttgaagtcggttcttcccaaagctgcccggttgctttgctcgctttatgcagatgatgctgcaatcttggccaatcctgactctacggaattgcaaaatttgcaacaactcttgacagtcttcactaattgctcaggcctcaagtttaacctagcaaaaacggaaatttttccaatttattgccaatcaactatggtcagctcgctaattcagcactttcctgggaggatttcgtccttccctggaaaatacttgggactcccattacacaccagaaaacatcgatgggtcgaggtgcagtccctaattaataaaattggagctaggcttgccggttggaagggaaagttattatcaaaagctggcagagaaacgctagttaagattgttctatcatctcaacctatctaacacttgacggtgttcccacctaaaaaatgggtcattcaaaggattgatcgtattcgacgatgttttctgtggaagggagatgaccgtgaaagtttgagtggaggccattgtctagtcaattggaaagtcacagcgaggcccaagtcactgggagaccttgggatctttagatttagagcgtttcgcacgagctcttcagctgcgctggatgtggtacagctggaggaatagtgaaagggcatgggtgggtatggacatcccctgtgataaaacggatcaggacttatttcatgcatcaacggtgactacagtaggcaatggcaataaggcactgttttggaaatccaattggatctttgggagggcagctcgtcatattgctcatcatggtcaaaaggggacttgagaa

SEQ ID NO: 1380 - DNA, 763 bp, Zea mays
  unsure (1)..(763): unsure at all n locations
tgatgaggataactggagcgactgagaaaccctggagccgggaggagtgtgtcttgtatctactcacatcgatgttagtgatgttaacaaataacatgtcgaggttgttaggtcttgttagcagcccctaaatgataatattgtcttggtgtattttcaaaaatatgtacattaccatgtgaaaatttgacagatcattgaataatttgtagatttatctcaggaggatagagggatgtttgaggttcgccaaaatattgtttggccctggagccttgttttcttcactgtctattaatgctttacccaaaaataagattttttctgagcaaataggaagaagtgtagctttaagggctagtttgggagctaaaatagtgaagggaattagagggctaaaatcttcttattcaaaattgaataagaagaggattttagccactttaatcccttctgcttttgtggctttcaaattagtcctaagtaatgtttgtttttaccttgtgaaaagtgctacagctactgaaaggcagagacaaccaaactgtctcttccaaaagcacctgttttcgcgttgcttttggcttctccaaatgagtgaaaataggggggggcgtatatttgtttcgagagagatgggtgagttttatagttattttgaccatcccaaatagtggaaattttgacctttcctgatcacataggtactaatctgggggggggggggggggaaatnggcccggcctccagactaattttcgac

SEQ ID NO: 1381 - DNA, 727 bp, Zea mays
aagaggtagaggtaaacaacttctatcacctagttatagtttgcattcacagacctcttctgaacaactaaaccatgtaccatcgtcaagatttcgccagaaaaggggttcacgttttatcgtcagagctgaagctgtgagctattcttttttctttctgctttgcttaatttattgcttcaaaatatcttccattctgatttgattttaaatcttaaatgacaggatttctatagtgtacttggtgtctcaagaaatgctagtaaatctgaaatcaagagcggttggtatcttctgtttggttgatcatgctgttaatgtttggttgtggttgtcatgtaatatgccatgcaaatactcaaatacctgcaattgtcacttttgtcagaacccagatttttttttcgaagttcatcttccatacttccacttcaatgctgctccaaaaatgtagtgcacttctgaaaacaaaaccgctgatttaagatatggtgatatattgatatcacttgtaaactactatctccggtcataattatacaatgttttggacacgacccagtcaaactttcgaaactgactgccaatgactcctaaaatattagtttgaaaacataaagctggcatgcgtagatttatcttcaaaggttctttcatataaagtaaataaaatgcattctttgatctaatctaggcctaattgaaactttaggttattttttttgca

SEQ ID NO: 1382 - DNA, 787 bp, Zea mays
atattttatgcatggcccgtcttgcattgcaccgtagaagtcacggcccgataacggcaacagggtttaggatgtgtttgatttggcttttgacccctaaaaaccaaaattcaaactaaatggctgaatctggaaaacagttttttctaaaagccgactttcttatagtgcaaaactgaaaccacctctaaacctactttttgcagcttttaggtggaactgtgaaaatatatatggaagaatttttagcgacttttagtggtttccactaaacgatttttagttttttagcagttcacagcttacagtaacttttttcacagctcatagccacaacaacttttttcacagtgacagtccaactacaaacctaacatgctgtgcggtgccggtgtgctagccctagccgcatggcggcatgggcaagggagcagaggcggcaggaagccacgaacgcgagcatggatcggtccgcgttccgagttgggcaggtcgcgtcgcgtcgcgtccaatccccaactgtttgtttggtacgccgtgctcgtgcacccgcccgcccgcccgccaaaccccgtgtgcgtgcgtgtgtggctgtgtgccctgcccactgctcaccaccacgctggctatgcatagtagcactgcgcaatctcctgtttatagaaggggaaaaaaatccaaggatattcttgccatcaatctcgagccaccatggcacagtagtgagcactgtgggaacccgtggccgtgcccgtgcgtcatcctgctgcacgtaaggaggaggagg

SEQ ID NO: 1383 - DNA, 800 bp, Zea mays
cttgcatgcctgcagtctgctgtctgcttcctgttctcctcctccccttcgttaatgagtgctcgaggccacaacccggccccggccccggccccggcccagtgccccaacctccccctcctatagtcccattcaacagtctccggccactccaactgcgcagcggcgttcgcccaccaccattttcgctcggccaatcccattccccacaaaaccgagccagccaaaccgatccgcaccgtctcaatcgcatctgcaacgcctccgatccggatggccgcgccgcgcccgtccggcgggatggacccgcgcagcggcttctgcgccgcgacgcggaccttccatagcctgcgcccgtccgccgcgctcccgccggactcgctcccggccaccgcggccgcctacgctttctccatcctctcctccccgctacccgatcgccccgccctcgtcgacgctgccaccagcatttccgtctcctacccctcgttcctcgccgccgtccgctccctcgcggggggcctctggtccgttctcggtctccgccccggggacgtcgtcctcgtagtctccccgtcccgcatcgacgtccccgtcatagacttcgcgctcatgtccatcggcgctgtcgtctcgcctgccaacccggcgtccaccgccgaggagtacacgcacatggtcgcgctctccagaccggtcgtcgcgctcgcggctgcccgaggtgggccgctaagcttccgaggaacctcaggtgcgttgtcatcggctcgaatgagtacaagagcctctccttccgcggc

SEQ ID NO: 1384 - DNA, 796 bp, Zea mays
aactaagtttgttaatggataacaaagcacatcaagctgcatatattattctggcacattcagaggttatggcataccagaatcaggtagcttgtgcctgttttcaggaacaaacacacacacagatgttgaggactcggaacagtttcctacatctgactggaactgaatccctctcctctcctgtgctaaaaacaactgttgctgccagtaaggagtaggaccgacatcgacatgctccgaaacaaactaatagctgacgaattgtcaacctcaccaccgcaacagcccttgcttcatctacacgcacaagctagcatcagagttgacttgggcatgcatgcacggaaacctgcactcaatcaaagacagttaggcctgcaaatcaactacaatgctgaaggacttgggtttttttatttttaccacagccttattactgaatgaagcgcacctcgctatccactgagagaaaactgtcgcagcgcggcacagttgtgttgtgtgtccgtctgactctgaccatcatctcgctgtccttcagaaaacacttgaacgtacttacttgggttgagagggatatatacataataatcatccaaacgagacctaacctgctggccggggatacaaaatccaaacatagtacgcaaaaatctaagtcgttttggattcttgcgttacgcaaaaatctaagccgtttttggatttttgatttgatatatgcatggtgatttgtatgaaacatgcatggaccaataatgcaaccatcatcgtcccgcccccggtttcagta

SEQ ID NO: 1385 - DNA, 800 bp, Zea mays
atgacgtggatgaatccatcatatatacgctcacggctcaccaggaaccgacacttgccgccccgccgtggtagccgcctgcacaccccaaccgacgtgaaggggggaacgagagggtgcagcacgcacgcacgcgctgaccgacgcagtggtccggtgtgcacacgaagcaagcaagcagctcgtcccgtccgcagggcaaaagaaaagtaaaaagaaaaaagaaagcctgaagcggaaccgggcagtaggagaagcggggacctggatcgggttcggggagggaacgggcggacggacggacggctggggttccggctccggcagtcctgctcggagcttgcttggaggcgaaggccggcaacgagagcgaggagacgagacgagaccgaccccggcgtcccgagcaaggcttgcaggtcgaggccaccaaccacggccgggccggggccggccacgcgcgcacctgtcgcaaccacccacctcacccaacgcctgcgcgcgcgtcgaccgggagggccaggggacgccgcaccggcacggcggcaccccgcgtcgtcgatctgctctgctccttctcacggcgccaccggacccggttggacggcaatacaacgccatcagtgtcagtgatcactgatcagtcagtccatcggagttcttttcggcgtccagttgtacagcgcgggcacccgcagtacagtacagcaccccacacccggtccattgcattgcatttcatcgcgaggaggcccgtggctgtgggctgtggctggcttgcttcgctagctagcttccct

SEQ ID NO: 1386 - DNA, 756 bp, Zea mays
  unsure (1)..(756): unsure at all n locations
tactgtcctcgacagctgtaacgttacgttttgtgtgttcccttgtgttattgaacttatattatgatccataaataaagccataagcgtggcagggtcattccctgaccaccttcaggcatcaccatttgttggccgtatttacagtactcagcttgctcagaagcattgttgcaacagtagtagtgctaccaagcaagctagctgactaggattaggcaatgtttggtttgagggactaaaaatattagtctctctattttagtactatttagtttctaaattactaaacagtgagactaaaatatggagtaaattgttttagtctttagttcctcaatggataactaaaatgaactaaaccatataaattcatcttttgtctattctttattttagttgcaataatgatgtgaaaatactaaggtgtattttggtccttttattattcatttaatgtgttttgaatatttttattctttagaacctaacatggtagtgactaaactttagtctcctaactaaactttagtccctgaactaaatgaaccaaacggacccttaaaaatagttttggttggtttcaaatgttcagaatggaagcaaatcatccgcagttatttaactcgcatttggatcaatgtgatttcagttcacctgtgatccaaatgcacccacagtgatccaaatgcagtttttatttttcacgagtcgttaaggttctcttaatacttcttccgattntttatttgtcac

SEQ ID NO: 1387 - DNA, 807 bp, Zea mays
tcgccgtcgcgggcagctgagacaagacgctcaccggaagcagagcacccaaaggagttgcccacaaggctgaggaaccccatggatgcccaagaggaggcccacacggcacagcgccctgtcttgagggcacacaggaaaaccttgtagtagatgcctccaaattttctcaatcttccatgatgctgctgcctgccgcaaaccgcattacaggaagatcacgagacaggcccaactgaggcatgcggaagtggatgatctctcaagctaacggcaagaaagacctgattttagcggcgaaaacaacaacaaaaaagctaggaacgcaacaggttgacttgaaaagtccagcataatgctgccaaatggcaacgactcctcctccaaacaattggaacgaaatagactttttcacataaaccaaaaatcgagggttgaaggatgcagaattgtttggggaaaatcacaagaacgcacctttggacctgccctgccccaaatcgtcggtccgggacgagctagacggcgccgagaccagcaactcgctcctctaaatcagggcgaatccccgcagttaaaaaaaagagagagaccagagagagagtgagattgatgagagacgagacaagcgcgacggccgcctcgagtcctcctccacagcgcccacgattccagcgagggcgctggggcgtcgaaatcctggggccacgccaagggcgattcgcaacgaagccttgcgatttgggcggggacaaggaaggagaaagaaataatgatcttgattgggaccgcgacgttgagatgcag

SEQ ID NO: 1388 - DNA, 762 bp, Zea mays
agcacggacgtctccatcctccagccagcgatcaagctgcttctgatggaaatgcatgtttgggctgttctaaataattaaattatcctataataaaatagaacatatattagagtatgtgatcaagcttgctccacagccatgattcgtcatgatgatccatgcaaataaacccataggccatagctagctgtgttcaacagaaacgagctcaatcgtctccaggtgcctaactggaattcgtgtttccttgtggccgctgcccctaacacgccatgagtgtgccaataaactaacgcagccgccgcgtcatttgttctgtaagtatatattatactatatctcggctgtcaattgatgacctggccaaatcttgatctatcaccagttattacaaacaaactcatcgagcggcggaaacaaaaacaaaaaccatcacgaaaagctctcaaattgtacagagctcagcgtttttttagcctaattccgaggaaacggcagccgcgcaagacggtgtgttccgttccataatgattgacaaatctgtgtgctgaaatgtttgacggccctgcgtgcttctcggtagcgaggtgatctagacgcgtgatgaacggctcagatggagcgggcctgggagcctgggacgggggtagttgcgcacttgcgcttaatttagctgaggagtcaacgctcctcaaacggacacctagattcccgtaactgacgagtacaataatttttcctaatacgatttggctgggg

SEQ ID NO: 1389 - DNA, 759 bp, Zea mays
acctgcgggctgcactccggctcgccgtcgaactcgaaaacgaatcgcgggtccggctccgcgcgcacggtgaggctgagctccgtcgccgcggtgctgcccttcccggatcgcttcccgatggagatccagccgctgtgcagcacggcgggcttggcctcggcgcccttgaggtcgagcgcgatcgtagccttcccaagcaggcgcccggagctgacgccgcaggcactccccttccggccagcgtagaccgacaccttcaggctggcgtcccctgccccgcgcgacgagaagagcgacggcttcccgttgaaccactccaggtcagccttggacagatggaacgcggcggcgagggccccggacgccggcgtctgctcgccgccgtcggagaccacgagcggcgccgggacgctctggaccggcatcttccccagccggatcttgcagtagcacggcgacgtggacgggtggacgcccgcgccagcaccggcggccggcggcgccaccggcattctgagcgcgaggttgccgaccagcacccgcacgaacgggcacgggtccatggcgcgcttcctctgctgctcccgtcacacctccactcccctcccacactgaaaatccgggcgaaactcgacctggtctgctgagattggaggcgatgcgggcaatgcggagcgagcgagggcgatgcgtgacgacggagataaggaggggacgagttggtataagaatcgggtgaggaacgagaacgacgga

SEQ ID NO: 1390 - DNA, 777 bp, Zea mays
tgcatgcctgcagtagtatatgtcgccgaaatccagatgattgaggtctccctgcgcctgcgcctgcgcctgcgcctgcgcctggagtttgctctgtaattttctcctctcattcatttcgttcaagtattattatttacgtttgttttgtattttctttgtggtcccatttacctattttgatacgtgcacccgtcacggttccagcaaacaaaaactgtggcgaaccattccgtgaatgaggccgtcagtcaaagtctacggtagcatgcgattttcaatttatgggtgtattgtcaagaaatgacgaaatacattgctaatatttttattgtaactatattattctatgtagtgatatcagtttattgacctatttggcaaaaagctaaagtcaacatctaaagtgctgcaaaaattaaactacatggaaacatatagctaatagtttagttattagctacttttagcaaatccgctaatagttagctagctattttttagccagctcattctttcttactaatggaattagatggctaagagcatttccaagagtctttctaaatttcactctctaaattattatttagtgagtcgttaatattaaaaccactttctatatctattcaatctccaagagtctttccataccttgttttgcgctctggagagttagagcatctcccagaaactcttcattttttgctctctatttgactatctatttacgtttttataaagaatacactctatatctgcatctcagtccaacag

SEQ ID NO: 1391 - DNA, 790 bp, Zea mays
cttgcatgcctgcagaagtctggtaactggtaggtttctgggttcttctgatgctggataatggcaagtactcacagctctggcttaacagtccaatcgaaaattgggatcttgctactcttttgtgcaatttttgcagcttatcatagaataactcacttgactactcgcagctctgtagtatgtcaaatagtttgcatcatgcctcaagaaagggtaaccaaatgcattccattcgatgcacatgatgaatggtctcctactctcctacgtgttaactaatcgatcgagtgtacataaaaaataaaaaggaagaatcaacatgcagtccgtgtacaatcgacgcagggttgctgaattttgctcatcttgacatatggaatcgggtcttctgaccagttcgtcccttcttatgttaggccggccattttcaactcagctccgactccgaatgaagcttcagaggcgggagcagaagcacaggctgcccaggttgacgaggaaccagattccgatgaagaagacgacgatcttccaccacttgaggcgaacacgaacaggaataggccgtatgaattgtattctgattcagacagtggttctgacgcttgaaaagtaccaaggccatccatcctgtgcgttttgtctccaaggtattcgcgatgtgtgaatggaatgagtggacctggattcttatgtgccatgtcatgtatgttagttagcatgctgtcattctgcaatgcaatctggggtttctgctcctaatcattcagctagatcaaggaagcgg

SEQ ID NO: 1392 - DNA, 705 bp, Zea mays
gagacaaaagtcgggaacccacagcaaaccaaaccgtgtgctcctcttcgtttcggccgactcagccacgaaaagaaaaccccgggcgccacgcggaaaaccacgggacgacccgacgcctacctcccccgcgccccgctttattagcaaaagatcccagcagcagagcacaagctgccttgcccttcggtgatcacgaggacaccaccaagacgacgcaggttcactggttcagcgaccggtttccgcgatgtgccgcgccacggcgatagagggcggcttcctccgcccgtccccgtcccggcgcctcgacatccgcgctttctacctccgcctctcctcctgctccgccacgacgcccgcggagctcacgctggcctaccacccggccatcgggggcgcggcgctgggactcaacggccgcgcgctcccgccagccgcgcccgccaaggtcacgctccgccgggtcgccgccgacgcgtacgcgagcgccgaccgcgtcgccgccgccgagggcgcgcggttcgaggtgctcgccgccgccgccggggaggaggtcgcggcgggaggcgtcttctccgcgcggcgcgagggggggtggcgcgtggagtgccgccgggcgccggcctcgccggaggtgtgcgtcgcggaagtggtggtgctcgcggagggcggcgtgctgattgcgggacagggcccgcgcgg

SEQ ID NO: 1393 - DNA, 742 bp, Zea mays
tacacattcaaccagaacatatcaaaattgagtagaatttctcctaatcataatctatctgctgcatttaacttgggatatgtaagagtgcattggcaagcttacctttagattccgtacttgatgaggacacccagcaggtatgaaaaccgcatctccaagtctttgcacaaaggtccatggctcgattcctacaacagcacatcaaaatttcaagtactgagcgctcaaccactcagacaaaagaatttataaatacaaatagatgggccgacccaccatactcctccttgagctttctcttgtgtttgttggtcagataaaatgtttcatcatgtacagggttaaatatctgcaataaaaataagtgtcataaagagaaaaacgtctatggtttttaccaagctcattcacagaaaaaattaacattaaccttttcaactggacaacagtacatatggcgaaattctttggaatgttttgtgaggtactctttcagctttccaacatcctccctcctaaaaatatcccatagtgcacctccaccatcctcgcaggaaactgatgatatatgagcatgctccatgcttgttttatttccatctattgatgaattccccaagcattcctttttatcttgttctgcatgccttattttcaaatctcttatcccctctttttgttcttcagaaggcacaactttgggcagtatgcattaaaacattaacctaacaatggtcag

SEQ ID NO: 1394 - DNA, 2793 bp, Zea mays
  unsure (1)..(2793): unsure at all n locations
ctcctttggggccatccgatacggggctttattaataggctgcgtaccaggatttaacttgatctcaaaagctgcttcgcgctccagaggaatgcctggaagttctgccggaaacatgtcagcaaagtcacacaccacacggatgtcctgcacccgcaaggtagcctcaccctccaccaccatggagaaaagattctcgacttccttgaccggtgatccggaagcaattgcgccaacaaggataacgtgtactttggggaacttcccaagaataccacattcctacccaacagtgcctgcaataacactatcttccaaaaataggatattactgcgcgatactgagataaccaatccatacccaagataacatcaaatgctcccaaggaaatcacaacaagattggccgaaaagacctcatcagcaagaatgacggaacacccctgacaaactgaacaactactaatggagccattagcagaactaaccaaaattgggtgacccaacctctgcagcgaaagaccagcccgcgacacaaaattctctgaaacaaacgaatagctagcgccagagtcaaaaagagcatgggctgcaaatgaatcaactgaaaccgtacctgtcaccacgtctccttgctccctgccatccgcagcgggtagcacataagctccagaaatacccgcagaagaggaagctcccggagtgaaattaacagaagaaccccactgagccaccggaggaggctggcgcggagctccaaactgagacagcacatgggtagacggcgcaggagtaggcgcagccagatactgaggaaaaccttgcatcggcacgaactgagaagtcccaggcacataaaactgctgcagagggagtgaaactaaaaattgctgctcagcacttgacatcatgttgacagtgccctgagaagaggaggaagtcactggctcccatctgagcttcccattgggattcctcctacacaccacatccttgtggtcttgactgtagatagaacacctgccactccactgacactcagcacggcgatgcgcatcaccacaacggaaacacaccagccccagcccgggcttaggaacagcccgatacctctgagtacttcctcccaaagtacccgattcagaagatttgccacggtaggggtggtggcgctggtgctgagacttgcccctcttgtgggctggacctccagtgttgcccctcctcgcgtcctggccacgaggctgatcaacacccgaagacttctgtgactccatggtatactggtgttgcatctccacacccaatgcctgctccactgtagtacggaaatccaccaacggaaaggctcccagggcatgcctgatagaaggtttcaggccctgacggaactggctcgccttctccatctcattataagccacatgaggaacaaagcggaccatcttgttgaagcccacttcatactctgtgacagacttcttctcctgcttgtaggactgcaaatcaatcttcattttctccagaaaggtgaccgggtagaatctcctctcaaactgcctgatgaaaacatcccaggacaggactcctggtgaagaggagtgagctgcctgcacgcctctccaccaaatctaagcctctcccttcagcagctgtgtgccaaagcgaacacgatccccaattccccaaacacaatctcgaagacattcatcttatcctccacgtaagttagccaatctgccgcctcgatcggagtaccactgccatcaaaagtgtccaacttcatggccatccactgcatcataggaagaccactgaaggcacctcagccccgcgacctgaagcagcacccgcgggaacagcgcccctaggcactcctccaccaccagcaccctaagcagcactcgcaggagcaacaggaatagcctacctcagaatggccaactcctgctgcatggcctgcatcgcggctaacattgccgccagactcatagaatccccactaggggcttgcggactaccccgagccctacgaggtggcataactgctgccgtaggggtgagaataataagtaaataagattggcatagcacttcttcagataatgtcaaactagcactgacaataacataagatatcaatagtaaagcaggaaacccatcctacatgtgcagtgtgtcaatttattattattccacttgctaggacctacagcctataccctttgataccaactgtaacaccccaaagctcccacacaataaatgttaccaaatacccttcccacaaaacttatacaacataagaaaagaaataaagaaagaaagtattgcaaaatccggcagcacctcccttgaaagaagcataacgaggggaacataaagtttatacataatataaaagaaagataattcacatagtataatcgaaatgcaaaggtagtaatgaacattcatgaccaaataaaaagataggtaactcagcccaccccaaaaaatcagctcaactaccatgaaaggctagaacatattaatccctcagactagaccctccctgtttaacatcattattaagcagtggttcctttatttaaaggtgtagtggtcgtgctgctacatcccttctttttaccaaagcanagatcatgtgcctgcatcagacaatgcaagagtgagatgacccatctcagcaagtaaaaaagggcaaaacaaccaatttggaacaaatggtaaaacaaaacccggtgctttaaaaacaaacccaccgttaagttttaacaaaccttttccttt

SEQ ID NO: 1395 - DNA, 790 bp, Zea mays
gccagctcctcaacgccgatttcggcggccgcaagatcatccgccgcgccgaaatcgaggcacgcgagctccagcgcatccgcgaggtcgagcgccagctcctcctccaaaagcagcacaggcattcccgcccgctgtcctccccctccagttcctcctcaagctcctcgcccacctccgcagccgctgacgccgacgccgacgcgtcgcgggcagagagcggctccaaggagtcgctcccgagggaggaggtcatccggcgcctgcgcgtgctgcggcagccggccacgctcttcggcgaggatgacatcgcgcgcctccgccgcctccaggtcctgatcgaggactccggcgcgctcgccgacatcgacgcggcggagatcggggagggccagaccaacgacttcctccgcgacatccaggcgatgcgtgctaaagctgcgactgtcacgaagcccaaggcggccggcgcggaggccgagcgtggggagggcgacagcgtatcgatagatgtgccgttcgaggagctctgcgacgaggacaagatcactgcgttcttcaggagactgttgaacgagtggacccaggaggtggacggtatgcctgaggcggaacggaggacggcaaaagggaaggccgcgatagccacctgcaagcagtgcacgcgatacctcgaccctctgttcaagcagtgcaagaagaaggtatggagcatcaagtgtctcagtagtatcaggttgaatgacctaatgcttattgcgaacgtttggctgatgagttcataggtttg

SEQ ID NO: 1396 - DNA, 755 bp, Zea mays
ctcaaggtgacctagtgtctggcatgttttgctgggctcattctctatttcccacattatgtgcgaagtcaagtgggaatccccttgcaagagatttggttttgcagttgcttgaaaggtattacttagtataaagctctaattagtaacatcatggtgttgctgtgttctatattataaagcaccattctgatttcgttttaacacactttgaaaatatttgtagttctaacacctcgtattgtttgtgtgtagaattttgtctgtcaccaaagctcgttctatattattgaatggtgctgttagaaagggagaacgcttagttccccctgtttcatttgacttgttcatgagagccacatttcctgtttctaatgctcgagtgaaggttcatttttttccttcctaagctcttgttagtaaacattcatgagtcatgctctgatgacctaaaacaattctgtaggctacagaaaggtttgaagcagcctacccaatgatcaaggagttggctcttgccggtcctcctggctcaaaaactgtgaaacaagcatcacaacagcttttacctttgtgtgcaaaagcaatgcaagaaagtgagtcgacatactatcttttaatagcttactgtacagtcctttttgcctttgttttgatacacatctaattagcttactggcgatatcatatccagacaacgcagagctcaccagggaggctggtgatgttttcatttggtgcttaactcaaatgca

SEQ ID NO: 1397 - DNA, 834 bp, Zea mays
cttgcatgcctgcagccaaaatgacatgacaacatttttcatgaagtttatttccaaagcatgaaagaaaagcctgtccctcaatatgtttgtgtcatctggtgccttgacaggataaaacagcacataataagatgataaccctgaattaaagaatcaatataatggaaatacctctccctgtatagttagtgcagttgaatgccagcctccagcagcaatgtcaacctgaaaatgtaagatgttggagtatatgcaacaagtgagaaatcaggaaagcaatgtgcagacaaattatgaatctatgcacatacagtggtgtcctcaaaaaaagaaccaggatgtcattctttgcttaatcaatttcaaacatagtattcctagtgtgcaatgacaataactggaaggccccaaaaggatgaagcttgttagctaaatgaaagctgaaccaatgagagatcgagctcggggaaaaagaactaagtttagaggggggaaaatatcttggtttgtcgtccttaaaataagctcatttggcaatagcttgtgaaagtcactgatgacaaactaattccaaaacgtgtcagaaaaacaaagaaaaagaatcaattaatctgactcaccagtgagagatcagatagtccttcaacgcgtatagggtgtgatcttggttgggtatctccagtccccagctgaccatactcattattaccccatgcccacaaaattccatcctctgtgagtgccaaaatatggaatgcacctacagcaatgaccctcactttctcaaggccttgcacgcgtactggtgtcgatatttgcttgctgaaagaa

SEQ ID NO: 1398 - DNA, 742 bp, Zea mays
ttgtttgtactatcatgatcatgactaggtttgattagggcctgccttcttcacctggctaatgattggtattagatgccagccagggtacctctacgacccgggcctatatatagctgtcgccgtcatgttttgtttgctggacgccggcgctgctcgcgctacagagacacatcaagactttcaggatggatttggtgacaagttgatcacagagagattgtagaggattgagtggaaaataaactaattttaccctcaattccctctcatcccctcgtaaagtcgtaatacctggtcaccaaatcagccctcatgtctgctcctctctccttctgtacctcatatagcgtgagttttggggttgaaaatcggctccaacagcaaattctgaacttgatgtcgccacctcaacttctcatgcatgagttgcatagagaattatgcaactactgcctcgccaatgcatgagttacaagaaaaaccgtctcgccatctcgtccagcacgtcgaatctgttgtcgtgatgattgcattgcatggaagcagacagggaagatcacggcgggtgcaatcaaaaaagaaaggctgcacgcattatcaggttaacatctactgagtaaaagagaggaataatgcagataaatcaaccgctcgcttttcctttttttttcttctgaaaaaaggtgcagttcgatcatgagcagagcggctgcatatgaactgccactttaggctttac

SEQ ID NO: 1399 - DNA, 779 bp, Zea mays
gaattgcttaggagacagacaaggtccctacatctgctgcttccctaatgaaggaaatgagagattagagtggccacggctattccaagggagggcttggatctggaagctggggccagatctggacagggccccaggttgttaccaattgatgtccttatccacttgcctgtctccaatcgaagaagaatacactaccatgcccacaaacttttctgtttttcatcgttctgaagacaggagagcagacagtgcaccttctggatgaattttggcaggtgttccacaaatgcccatgatgaactcacacaagctgctgcaaagggagacaaaggtggatagagaaataagtggtctctgtgatttattttaattcctctttttgtgatttggttgccatgttggaagaatcgctgaaaaatggaaggaaaaacatgaaaaatccacatggacacctggcagtgattaactggtcttaagaacaaaaaaactggtcagtttggatataggacatggtgtaaagatgtctggtagtggagtttgatggctaaaattggaatctgataatagtttgtaggtcaaaaatggatttgttcctattaactatcattccacaagttgtattccatcattcctgtttacttttgaaatgtgtgggtatattataactataatatacacattcatctgcaaagtttctattctaataagttgatttagtttctatgagaactgactattcgaaatagtttgttcaaatttcttcgtgaccacttctg

SEQ ID NO: 1400 - DNA, 737 bp, Zea mays
ccatgtccttcagaacttctgcaaaatagccaaggaatgcgagaagagtattattaaccttgaaaaagcgttggaacgatgctgatttgcatctttcactaaacccctaaccatcaacacattgactagaagtcaacacggcagtctcagcaggccaaattctaacctcattcaataaacccctaaccatcaatacattgactacaagacaatttttttttttaaaaaaaaggctcaacagattgcagagcagtccacaaaatcattctgtaactttttttctcgagtttgatgataagcaagagtagacgaacaatttaccaaggtggccctgcttggcggcgatgtggaacgcgtcgaaactattgctggccttgatgccggccgtctgcacgccacagaccttgaggatctcgcgcacgacctccgcgtggcccttctcggcggcgacgtacagcggcgtctcgccgtcctggttctgcctggcggccatctcggcggccagcgcccggtcgagctccgcgaggatcctctgcgcgtgggccacgctcccggccctcgccgcgaggtggagcggcgtgtcgccgcgtttccccgggctgtccctgctccgccgctcgagggacatgatcccgcggaagctcttctgcttctccatcccccggaagctcctcagcttctccagcgcgcccagccggatgctggactgccgctccatggccgaatccgaggggggg

SEQ ID NO: 1401 - DNA, 785 bp, Zea mays
tctcgtcctcactggaaatcgtcggccgaatcgtccgtcggttcccagtaccggttggtgaaccacatggagtcggcggccaccgcgctcccgtcctggttgcggtgccacgtgtagtacgcgtgtgtccggttcttgatgtccaggatggcgtgcccgaagctcgcctccctgaaggccgagtagctcggctgcggctgcgacatgctacaattttttttttcatgcacaaccaatgtactgtttggttaggaaatgagggaaatatggcaatgtattgtttggtcaggaaatggaggagatatgataggcatcttcgcgaagctcaggaactaaaaatgcagtagtgttatcttacttggtagccaatccttcctggttccctccatcaccgatggtgatgtaaactggggccgattgatcagggattggagtgcacaggccattcacaacattgtatgcgacattcgatatcctgtgctgcaatcagagaacatcaatcagcatcaagacttaggattatgatactgtcataaccagagtactgaaccctaacaaattgagctggaagcttgcactaatatgacgacaaacatatatacacataattctcagaagtttttttagaggttcagtgtgtatactcattaggtttacaacctatgaaaatctcacctgcgcacaaagacgacatcctacttagtataactctcagaagtccatagcagagtggaaaaaaataacccaaccatttgcaacagaagaaattgatagtatggagctgc

SEQ ID NO: 1402 - DNA, 795 bp, Zea mays
  unsure (1)..(795): unsure at all n locations
acttaacacagctgtataaataactgttaagggatattacagcttgatttggagagcagtagcattgaatataagaagcaatttaaatgacataaggaagtcatacatacagtgtagcttaacccagaaattgtttatttcaaatgcaacaaaatgcatttcaaaaaagaattgaacacttaaaatcaaatacatgacatgttaaaacatatttttttgacatagtcaattttgggaaggtgtgcctatgatgcaggctaagaaaacattattatttttttaaatgcaatatgtctctgcatggttagttggttacagatgcatagttgttaaagcggtaaggcgaggtaaggcgactgaccccctttttaccttttaagcgataaggcgtaagacgaggcgacgccttattaacatatataaaaatagacaataaaaatacaatatacaatatataggaatagtctcaaatagatagggacaatagtattagaacatagtattgtagtagtagttacagcacatatgagtgcaagttcaagtgttcaacataaatcaacaccatagacataaagtccaacataagtactagataatagtgatagtagagtagatataattcagaattccactgttaactaaaactgagtgtctgagggcagccgtgtctgagataaaccaagtaaactgagagagaggagagagcgcatagaaagcanagcaaaggggagagagagcagagcttgccagttaggggagggccagagggggttcgccgcggaagggagggcttcg

SEQ ID NO: 1403 - DNA, 795 bp, Zea mays
aagaggtccagcaggcaaaaggcgagcagattcacatacagtagcaagtagaacttgcatcctaagcagatcatcaacctccactttagatgatttattgcagactgaaacaatctcctcatgtagctacaaaatagagtagcatgagtggagagatgtaacgcacacacactaaatatgggtggataatagtggaaacctttctttgcagtcaatggaacacaaagtgggattctttcttatttaaataattaacatgtaaaaaaaaatccacgagtgtgtattcatttgaataagaaaacaccaaaaaccattcattatttttagcatcacaaggaagcagcttaaatagtttgcaacagagaaaataaaggagccaacacatacctgatcttgcaattcaggaaacaagacaagccttgtcaaaatgttaccaatcaagttagcagaagtggaaataccatgcaacatcaaacccatgatgtttccacatgtttcctcttctaaattaagtggtcctttagcagcctcatggaggcaatgacttcgcatcatgttgtctaaaacacttctatgtggatctgtcccctcacttttctgacaagatctctgatcaaaatggtgaagcgaactattttggtatcttgattttctgatgacgctctctgttaatatcttcagcttagcacatagggtctgatacctcctatagctaggcctccaaaatggaggaattgtgtaagaagcccaaaagcaaccatttttagcgacccacataagaagttcctatacgca

SEQ ID NO: 1404 - DNA, 814 bp, Zea mays
gttttttgtcctgactagatactcagctctacagtatttttcccaaaatcgggtttctgacatctatcctcagaaaatataatgaaacgagaagattatgacaaaatacagcagaatgtatggagtacaatgagaaatcagaatcgactcatacaacaacagtaataacactaggaacattttatgactgaattttctacagttcatgctaagacattgataacatatataggtcttaccttttttggaacaaaatctaaatatgctctacggacagcaggcttttctgcaaaaatctgtaaaataggatatatggtgttaacaagttgaaagtacatcagatatagaatcatagaattcagcacttgtttccatgaataatatatgcctcaggcataatggagtattcttgagcaaacagggcccagcgcaggtagggttcaacttcaaagcaagtaagatggtctttgcagctatggactaagcctaacctaactggctagggtggaagcataattttcagtgttcctgctcattaattccctttggtcgcatcaaagtcacatgcacacaatgaaaactataatttcaagatataaaaatagttcaatagaggatcactgcatcatgcatgaaagctactaaagagacagagaaggtacagggcttgctacacattcatatacagattaaaaaaatctttggaagccttttaccaacaacaatgttcagaaacttcataacccacaaaatgacgtactttttattttacagcatagatataaattttgaatatacagtgagacacagaaaa

SEQ ID NO: 1405 - DNA, 849 bp, Zea mays
atccccttagtcgactctgcagcacaaagtagtcgtgaagacatgaaaaaaagaaaagatgtagtcaaaacttagaaattgacctttttatcagaaactgtgctgcaaaaaatccagtaagacattttttctttttataatttttaccaaatttatagaaaaaagaacaacaatatttatgatatcaaataagcataattagacatgaaatattaattttcataatttacctttttggtgtggtagatgaaaatattttttctatacagacttggtcaaacttaggacagaattatttttcataatttacctttttggtgtggtagatgacaatactttttctatacagacttggtcaaacttaggacagacaattctggcatactgccctttggagaggctgtcccaaaagcttaaaaggctcgctaaacatttgcagtcgtgagggcataaggaggtgggtaatgtgagaaaccagttgggccttgctcggtaggtgatgcataggctggaaacagcgcaggacaacagagttttgtcagaagatgaactttggctgctaggaaagctgaagcaacactattctgtttatgcttctatggaaaaaacaattgcacgtttgaggtccacaatcaagtatctaaaagagggtgatgcaaatactaaattcttccatatgcagggtacgatttaagaaagaaaagaaaatttcattttcaaaaactacaaaggaagaaggggaaaaagggggtttcctaaactattgaagggaaaatgttagggaaggggggtcaagaaaggggtttcctattttccaagaacctttttgggggtggcttttttgttttt

SEQ ID NO: 1406 - DNA, 843 bp, Zea mays
tcaaagataagggattcacaatgtcgctaacccattgccagttatgcagcgcctgagcacagttcttgaagtaaaggatctgctactcaccatacgtacaacttcaagggcaaaatcttgtatcatcttcccatttaaccatctgtccgaccaaaaaaatgtattggccccattccctatcatagaaaccacagaagatttaaaaaagtgtctaacttgctgctgcacgggaataatcaatccaacccaaggcctagttgggtcagtcttttctaaccaaagccatttagcctgcaatgcccaactcttcaattgcaaattaggaactctaagaccccctaaacttagtggccttgtcagagtttcccagggtacaatacaactttcaccattcacctcctttcgccatttccatagaaactctcttcgaattttgtcaattgacttaataacccacttggggatttttatggcaataagaagatatatcaggatggccgatagcacaaaccacaccaatgtcctcctggccaggttaagtaaatgagccttccaattagggagtcgatctgcaatcttatctatccacatcataagatcattccgcttcagtttcctgtctgaaattggcaatcccaataaataacaagggaatgcggccaaactgcacctcagcacattgcatcccttctgaaccacttgctccttacattctaataggaatagcctaacttcttatttattattggtaaaccaaacggggaagcctacctcaaaacaaattcaagaaccaattcttacaccagttcaaaatttttttcaattgggttttaaacaaaaaag

SEQ ID NO: 1407 - DNA, 832 bp, Zea mays
atcccaaggaattactatcacagctatgcttggttgcaacagagccaatgaatggatataatttctcagtaatgataatcagttacttcagtgattacagaaactatattgtttctactactactgaagcaaacatcgttgataaaggtacatctaggagagggaggaagagaaaagaagttttaccttctcctgatgtagagacaacagatcatatgcaggactcgtattggtccggattgagcttgcataatcacccaatccatgacctcagaaaagagagtcccactacaaggccaagacgtaggcggagatcctcaagtcatgcatatgtacctttgtcagaacttggggagccagtacctaaaaaacagatacaagtgatggaaagatctatcatccatgttgacgagaagatgattgatgagttgaagcccactgcacttgttttgagctttgccaggtcagcttctattccttcagaattggatcttgttaagatgttcagtcgctttggtccactgaaagaaagggaggcagaagtacacagggaaacaaatactgttaaagttgtcttcaagaaacgtgccgatgctgaaagggcttttagcgctgctggcaagtatggcacttttggaccttcgcttcgaagttaccgtcttgtcagtatgccattttctctagagacacagtcagcaaacaatcctgtgaaacatcctgaaaatcatggcatggagattccaggtaaacattcttacaatttatgtgtccatgcgtagtactttggtttaaattttttcgaaatatggggcgtgttagttaattacgattt

SEQ ID NO: 1408 - DNA, 831 bp, Zea mays
aatcttgcatgcctgcagaaaactgacgcatcaaggccatgagctggtctccctacaagtgtcaaatattgatagagccctttttgctgttgcagtcaaatctgtgattggaaatggagaaacgaccaggttttggccagatcgctggttacaggaagaacacttgcaggaattctgccataattaatcaaagttggtcccaaaatgggccatacgacaacagaaagtaactcaagtgcttaataaccgatcttgggtaaaaagaaataggtgcagtaaccgtacaggttttagtggattatttgaaattatggtacttggttgataatattattttacaccaggaagtgtctcatcaacataagtggcgccttactcactctggttcccactctagtaagtctaggtctcttggccctttcttattgatgtcatgaagcacctcggttttggccaaatttggagggacattatacgtaggctgctttcctcttcttccactcgtgcttctcaatggttttccgggaaagtgcattatccatcggaggggtcttaggcaaggggatccactttctcccatgctttttattctcgccatggacactctgggttttttattctctaaagcagaagaagcaggattattacaacctctgtcaacaacacaaagactgcaccgagtctctatgtatgctgatgatgtggctttattcctgcacccattggcagatgatattttagcagccttggagattttgcatttgtttggtccctcctcgggcgttcagaacaatgaaaggaagttccaatgttatcccattcagtgctctg

SEQ ID NO: 1409 - DNA, 772 bp, Zea mays
gcttgctctgcctccgatccaacccaacccaaggcggcaggcagcagcagcggcggcgggtacgttcttctcggccatgcatggaatggaacgagggccgcccaccgccggcgccgcctagatctctgcatccggtggccgccattggcggttcttggctccgattcggtgctgcctggtgacgagaaaaagccaaggaaaaaaaaagaaggaagggacggcgattcaggactcactcttggcctgtgagcctgtcgtcgacatgaagtacatgaagcttggatccaagccggacgcctttcagacggaggggaacagtatcaggtgaagctgtccttctcctttcccactactctttctgtcacagttttcagactgtaccgtagagatgcacaccgccttttttttaaaaaaaaatctgaatttccaaatcctccagccgttagtttgattcttgttttgggtggtagaatttgatagcttggaagttcctttttctttttttcttttttggtactacaaatatggccaagagtaaagcagattacaagtatttattatatatgtggttttaatccacctgtttctgctttttctatagtaccgtggttttaatccaccggtttctgttttttctacagtattttgtctttatggattaccgttgcagcggtcccgaacggttttaattcaaccacagcaaacaattagatgtatagtgtccacaagcagctgagctgtgagttggctctaaacacatttacacattgac

SEQ ID NO: 1410 - DNA, 801 bp, Zea mays
ataataaatcatatattacaagtgaatcctactcgggctctgcctcgtttgccattcacaatggaaacaaggcagcaattaacttaaacgcttcaaatgcaaggctgaagaagtcgccgctgcatatggaagacaatgctagaaggtgctataccttttatattcgtattagcatagaagtgggtacttgagtatcggttttatcttctatgctcatttaaatttggttaaacaagttactttggaaaccaggggagtagggagcatcagtggtccggaaggctttaccaagtctactatgaaaccactcaaaagaccccgtgacacccaatttcagattgatgcaggttagcaatattagttcccctgatcctgatttgcatcaagtttctagttatgacatctaaaaatgtcttacatagtatattcctatttcactatcttcttatgtcagtgacacaaagaagggttcttatttgctttgcttgtaaacatgcagaactagaaggtaccatgaggagtcctctaagaggtctaaaatctggtgctttggctcagtttgaaagttcatctttgccaaaatctggctacaccaccaaagattcaacctgcactggaggagcacttaatttattcatgttacccccagaaaagttattagtggtccctcctcagtatgtcgaccctgatcaagacttgctgctggagatacctctcaatgcacgacacccagaggcagaacttctgtgtcaaccatctcagctgatgagctctataagccgcagcttcacctctatgggt

SEQ ID NO: 1411 - DNA, 752 bp, Zea mays
  unsure (1)..(752): unsure at all n locations
tcatggatccatcttgtgaaagcatgcatcatcggagacgaggccccctaataataataataataacaacaactgatgacgagtggcacaggtcgagggcatgcgtgttgtcaaagccacaggaggactctgcaaaagggtgcagtgcagggcgcgcgtttactctgctcggaggctcggagcttcgtccaggccaggacgctggaggacgaccggccaggccagcacaggaccacgccatgcacgctctctgctgctgctgctgctgctagagctacagttatgaccgtacgtaccgcaacgcagcacaggcagccgcgtctgaatcgtcggggganggcctgcgtaatcggctttattatccagtgattgcttgcttgcttggagacgatggaagaagatgcatgcagcgcgacgacatgcgcagtgcatgtaatggagtttaatgcaaatctcgtctcgtggtggggctttttaagaagataaataatagacgagttacttctagtactgccaccatgccagggtttaccttaccggtaataaaaaaaaccgtacctcaccgagaaacgtgtttttcggaattctcgtttttttttgtttttctcaaataaatttcggacaaaatttagaaaaaaagttcaatttaatcgtaaaaatgtagattatttgtaggtaatggctaaaagaatcatatggtagcgttttggaccttttttttgtagcctaaaaacataaccggaagttttgac

SEQ ID NO: 1412 - DNA, 808 bp, Zea mays
cttgcatgcctgcaggtgaaattatcatgtctagaggagctcaggaatatctgctagcaacaatgagaagccatatctcactggttgtgccatactaccacagtaccactacacctttccagaagcaaatggggctccaaaatggcatgtacactagccgcaatatcgtccaacataaatactgagagtgcccctggcactgcgctgaggatgtatgaatcttcactggccacacgactgaggctagatgttttaccttttttttagataaaggaaacaaacgttctggcgtctccacaagtgcatacagtcaagctagatgtttactgttccccctttatctgtcactctgataccgcaccactagcacctacaatcctagctaggtcttggacgatttgagacattgctggcctgaattctggtcccggctgcataataaaagtgtgaaccttgaatgcatcttggtatttttagaaaagagcgctaaccagaatgcaatattgaatagaaaaataaaaacaaatacaaatacttcattcgatgatctgaacatgaccggatgtttaaaaagaactacgaaacatatacatgcaatagaataacttagatgtctgaaatcttggacttccagcaggggaggagagaagcagacactcaacacgctggaaaggctggaactcacgtgagcagactatgcttgtgttgataagctgttgtaaacaaagatctatttctacaggacatagttggcagctaactgaaacaaacaaaagctactaatgctgtataattaaagtattaacac

SEQ ID NO: 1413 - DNA, 742 bp, Zea mays
ggaaagaagtcaaacatgacaatactgttacatggttggccttttggaacgatccaattaacccaaaggatttcaagtatgttttcctggcagcaagcagctcactgaaggggcaaagtgacaaagagaagtatgagaagtccagaaaattgaaggtgattgggaaagttcggtttgtatatatggcaattttagtatgcatgtaaatgattttttatgcctgtcattggcagggtcatatacaaagaattcgtgagaattatacaaaagatttcaaaaacaaagatgtgacgaggaggcaaatagctgtggcaacataccttatcgataaactagcccttagggctggcaatgaaaaggtacatccaactgggatatgtttgatggctatgagtgatgctccaatttattatacagtgtttgaatacatttctgatgtctctgttggcaatttggtttcctacttgtggaagcttctttcatgcaagactgaacttgtatgcttgcttttatacaatttattttgcattggcacgagcaacactagaattattaaaaacattgttgcactaagaccattataggaagggttagctgaggcactggtcactacaattttacatgatcagttactttctgaagaaaatgttttctgatagcatatagtcatcatgtaatttcctaaattactttttttttggctttgagcttccttggaatatgccatcatgacttattcctg

SEQ ID NO: 1414 - DNA, 771 bp, Zea mays
ttttgtcccggcattcatatgcagatttgccaaatatatggaatggaactgagaagaactcattgtatataaggccacagtatattgagaatattgccatcagaagaataacatatcgtccgccgaatgccaactccataaagctaccaagcttctgaaataagttatgaaccgaaggttacaggaagagattaagtgtgcttgcgcaaacactgtgaaataaatagcaagatgcaaagttcgaattaaggctcctgaaacagacaagcatcactggaagagattacgtgtgtttgtgtacacactgaaataatggcaagaagcaaagttcaaattaaggctcctgaaacagacaagcatcactggagccaaaggggccataaaaaactcttcagtgggtttcctgcatgcttatgtgttttactggattccatttgcattacaggactgattttctgaacttgtgtgtaatcggttatctgccatatttctaaacaggtcctgtgatataacaggttccttttttgcctctgactctatcagaatgaagtataatacgctcaaaaaagattaggagtagattgtttaagaatattctttaggcgctaaaattcctttgtgatatttaatacagtataacataatacatatacatgatttgtttctaatggttaattggttatggtaaagaaagaaagaaaaggaataaagttcagcatcatttacctgagaggaaaatctcttctcgcgaaatataagaaccaaagctct

SEQ ID NO: 1415 - DNA, 782 bp, Zea mays
tggttcgactccgacgaacacggtaattattcactttttttaccatgtcattacagctagtaacaagttaaaaagaagcacaaaatcaatccagagattaataatctgtcattatcattatttaaatagtaaccgcactatggtgtatgtagtatgtacagtgttaaagctagcgatagttgaatctgtatgttctgctgaagtgaacgtatcagccttgcctagctgagtgtttcagaaaaggaacactcaaaggtgtctgcctccattgaaagagcactagctagctgaggtgtagtaggagtgaataacttcacttcgcatgcttctagccttcaactggtggttagtcttggtcagaaagacgggtctcttttccatttggagtcaggctatagccaacaacttcttggaacacaatatttcagactaggatggtcttcagctacgagcgaagttgatctatggatgctccctcgatgcatgactggtaaaatagattgacgacactggcctgccaaacaaggaaaacaattaaccggcgagcgaggtttttgttaaggtagcaaggaacaaaacaacactattttcttctgattactggcttaaaactgggcaatagttatactaagagctagtttggcaactccattttcccaatgaattacccattttccctcccaagagtaaaatgaactaattttccttggaaaatgaaaatttcttaaaaaaatgggttaccaaactagccctaacattccatttattttctgaacgatgtc

SEQ ID NO: 1416 - DNA, 776 bp, Zea mays
tgcaataatctgtgtcagattgtatagtagtcgtcctctggttctagagatgtgacattattatatatgaaaaatgtgatcgaaaccgaaccaagaaacaaagctggcaaaccgggggagtatcgccgtgtgggctggcagcgaccctgccttacaaacatataaatacatactaattactactaatttttaaatggttaagcatataaaaaacagtgattgattcaacaaatatggttatttctttgtttgtatgtttgataaaaacatgtactcctccgatgtcctgttagttatcgttttaaataaggtttaagtcaaatttataaaattttgactacaaataattattttattatatagttttaaaacataatatttatatacaccgatttgtcttaacaagtaattttatttaaagtatcaatgtattaaaagattatttgtatttaaaaaaatattagtcaaagttatatttaaaagattgtgttatcgttctaaacgataactaatagtacatcgaagggagtagtctattaaattaaatttaaaatagaaccagacactcatatactacatataatctattatatattggttatggacaccttaaaaaaatgtaggcacgcgaaagctcacgacccacgagtgacgaccccatctcctagcccatagaatgaagtgtcccgccgctttgcgaccataggaagcaaaggttccacgccagtcgctcgcctgccgtgacaagtggcggcacacggtaggccggaaccgga

SEQ ID NO: 1417 - DNA, 789 bp, Zea mays
aatggaaggtggaatcccaccacttgttcaattgctagaatcacaggatcttaaggtgcaaagagcagctgctggggccttgcgtactttagcctttaaaaatgatgaaaataaaactcaggtgacatatcaaaatcaatgaaggctatacttatgttagattttgacatctgaacttgcatatgctttttacacatattcatgacatggtaaattcctgtaatgcagattgttcaatgcaatgctttgccaactttgatcttaatgctgcgatctgaagatgctgcaattcactatgaagcagtaaggcctcgtgctattctccagttttgattatgaggcactgaatattctgatgtcaactccacttcactaagagcatttttcacactgttgagatgcatcttttgactgattacgagcaggctaatgttgttacagataaatgatcatatcctttgaaattgtgccattctacagttttgcacaatccttaagcagcattaattattgcaaggctttatgaaatataaaattttaatattccatcttgaaactttatgctggatcataacgctgtatatttacttgggaatttttcatgctggaccatgttccatcctcgagtacatggaaaatttagaatgtatttctgaagttgaatagaaacttaatttcgttggctgttagcagttaccttacaaatattatgttgtcctagtgtcctacaacacatttatatcataggctctgcataatttattcaatatttcctggcatgtaagatgc

SEQ ID NO: 1418 - DNA, 739 bp, Zea mays
tctcctttgctaccaccacgccccactatggcagcggcggccgcggccacgccggcgttattatctccgcgcaggatgcggacgacggtcttcatgtccgggcggcggtcgggctcgccctgcacgcagagcgcggcgcactcgacggcgcgcgcgagctgcgcggcgtcgaaggcgccccggaggcgcgggtcgacgaggtccccgaggcggccgcgcgcgatgagcggctcggcccactcggtgatggtgcgcttggctcccgacggcaggcgctcgatgggcttcctgccggagacgagctcgagcaggaggatgccgaagctgtagacgtcgcatgcgccggagaccttgccccacatggcgtactcgggcgccaggtagcccagcgtgcccttgacgcgggtggtcatgtgcgagaccccctctggcacgagcttggcgaagccgaagtcggcgacgagcggcgcgaagtcggagtcgagcaggacgttgctggccttgatgtcccggtggatgatgtgcggcgccacctcgtggtgcaggtacacgagcccctcggccgagccgacggccacggcgacgcggcgcttccagtcgagccggacctcgccggcgaactggccgtggaggtgcgataggaggctgaggttgggcatgtagtcgtagaccaatcatgcgctggtcgggcccccggcgcagtagccgcgcagggccgagcaggttcttgtggcgcacg

SEQ ID NO: 1419 - DNA, 774 bp, Zea mays
aataaaataaaatgtgaatgttgctcctaactgctgaacttggtaaataaagggagacagcatgctatgctacatgttgtcaatgttacaaacttctaaaaaaatatttagtgctgaaagaaaggtttgtatatattgactgatctaactaggcagaagatggtgtgtatgtgccactttcagcaaattagttccagtatctccatgttatattgttagaaacagaagttcgacatgaatccctaaactacttcagaaacctgagttgggaaaggaccaagatacgggtgtatgatttcaactatttaactgctgcttagctttcatcagaaaacttggatggaactggtcaacaacaattgtgcctgtatgccgtgtatgtcatgaattacctggtacggttgaattgtggaagctcatcagattttactgatcagatagttttgcatcagtttgaactggggtgtagagaaagaaggtagagttgcagcaagtatgtttttatgtttctgcaatgacaaatggaagaacaagtaacaaaaggacatgaaaatacatgctgagcccagtaaacacaggctagcaggttattaatttatcatatgacatgctctccaccctgacaccagcaaattggcaaatgttgattgtttatctatggatcgtgcagagcagcaagggacagctctgaaccagttttctatatattgaaggaccctaaacaccagctctgaaccagttttctgtagaagatacatataaatcaagaacaaa

SEQ ID NO: 1420 - DNA, 816 bp, Zea mays
cagtgttgtcatgagtcttagagctgctaatgaggaaaggatgcaatgggagattgctggtgccaaggggctctgccagctagctgttctgttagctgagagataagtagagtctaatggattcttttttgtatgcttcttactggcctccgtaaggaggtggttttgttttgtactggcctttcttggcccccctttttacctcttcttaatatattatgaggcgcagttctcctgcgctttcgagaaaaaaaaatatatgggaaggacatgttcggtggttttcttaatagaaggtcttcttaatgtctaagggttatattatcacccataagtcgagctttttcaaacatgtgctaggggaaaaataaaattcacagaaacctcttaatgcaaaacactgctacctaagaaaatggacataagatgatgaaagacaataaaaagtgagtacaagagaaataaattaaagtacgacgtacaaagtgtatgatataataacattataatcttcaaattccttaattctgaattgactcctaaactttatgtggtccatgtttttaacattttagaattactgaattattctaaatttatctttcaaatttacaagtttattccaaagtgcacctgttatgtggagcaagcacttcacaaggaaagggaagaaggcccaggcgccagccaaacccattagtggcttaaagtaaggtaaaaagttagttgagacttgagagaaggaatttaagccttaatttgagtagttagttaaccacatggctacgtgagatccatctattcctaatcttcctc

SEQ ID NO: 1421 - DNA, 747 bp, Zea mays
gctttttggagttagcattgccttgagggacggggctgagaaggcatcggagtactttgctgggtgtgttctatgcatatccctttgtatttagcattgacgctgttttacgaaataagtttgactcccttttgcattaggacttccaggatcacatatcaagaacatcacatttgagaagcacacatcactgagcactgcgtgttacctttaacttgtgtttgttttctgagtggatcctctgttgtttcgtgcaagttagtttatttacatcgcatattcatctagtcatacatcttgctatctatctattccatcttcctataatcactttcatttaaatgctattagtttgtatacttaaagatgggtttgattttatgttttttatataacatgattaatcataacagcactttccttgaactctatacataacaatgtaatcctgtcctgttatgtaacaggtatttattggaacagagtttgtcggtggacaatctctttgtttttgttctggtcttcaagtatttcaaagtgccaaaagaataccaggtatgtcttgatggctattgtgaaagttgaaattgaagtcaactttgtgccttttctcataatttctgatgtctgtaacaagaatcgaatactttcttatggtattgctggagcagtggtctttcgggctgtgatgatcatcttaggaacagctagcatccaggttgattgttctcatgctactgttggtta

SEQ ID NO: 1422 - DNA, 744 bp, Zea mays
atattaaccagaagagatatcacatcttcaggaacatatataactttatgaagagacaacagttccttcaaattgtccacccaacaatgcacctatattgtgtgaatcaaaacataacaatgaatgctgaaatagtaacacatttaaatgatcgggaacgaataaaaaatttcatattccagggcaaagctcattccacggtagctttagtaaagacctagcataaaatggacaacacttactttccataaaccgtcttgatttgtgaaaaaccgatcgtcgtcataatattctgagaggagaaacatgggaatgagcccaactagacatggatcaagtaaattagtgaatactaaaccctaaaataataacttctaagatatatgattcaaggatttaggtcaagagttggtcatttagttgtgtaatcagaagtggacaatggagcatgttaatagtaatctaaatagcaaataggttaggaaaactgaaaatcattgaacaaagttggttaccagtgactggaatgaacttttggcatgttttcacaatgaagttatcggatagatcagattcttcttcttcttcagcaaatagctgccattatattaagactaaagtattagtgttgtggcccttattgaatatcttgaagccacttaaagaagctatgcatgactaccttgaagagactttcaacatcacacgtggaaataaattgggaatatgtgagatggtgttttc

SEQ ID NO: 1423 - DNA, 821 bp, Zea mays
atgtcccccaagatttcacaataattagaaccaagaaggaagaaaagaaatgccaatgggttggtacagagggggagggggcataagaaactgaacaggaatacctgcacaacaatctgaagatttcccctcagattaaccagtagaaggtctttcatgcattccaaagcccactctcttgacaatgtgccaaagaactcaacaagtgcctgtccaaggaagttgttaatgggaaaaacataaaaaataaaaaagatatctgaaaataactgaagtcgacaaacctgtggttcaatgacatgggtatttacaatggcacgcttgatatcaggcaactctgagtaatgctgcattacaaaatgtaaggttagttaaacaggaataagaagcagagatatcagctgcaccaatgtgaaggtactgacctggagggctcgcaagtacaacccagccttttcacacagctgagcaatacgagggcgatcataatgactgaacataccattagcaagaatggcatcagcaacattcgggtaagtcactaagtttatctccaaaacctacaattcatagacagaaactgctgagaaaaggataatgtacacatccaagcgcaaccattcgtgttcaaacggcgaagatgaaaaccttggtttgaagaaaagcatgctctggcaagtttggtttcagaacatccaacagaaaagctgttgcctcccgtatcatatttctctgttaacatatgcataaagcaaaaaatccttaggactcataaaaccaaggaatgtaaatagaccacagacagttacctatgattatgg

SEQ ID NO: 1424 - DNA, 813 bp, Zea mays
tccaaacccgagctgatgcctgatggtcatcgtacgtgtccatgcatgagtccgtctcacgtcttcaatggttgtgaagaaagcggcaaccgcttagaagctacagtgagcgcgtactaatcctgggctcccacgtgtcttaattaggctcctatatcaggttttaactggagcaagcactgggatgggacgacgcaaccgacaaaaaaaatatgggtccgcttgcgcttgggctgggactgggacagggacacagtcacatgcacggccttccaagcgcacgcaggcccgaggaactttagaggacaagaccctgaacctgaccccatgaggccatgagccaggatgatgacatggacatggacatggacgagcagtttggtccaggcctccaggggaaatttaaggctgacatgtacaggcaaggcattcgcgttcgtgttcgatcgtatgcatggaaagggaggccggaagcggaagcgaaacggcgtggacggggcagacgctggctgacgtacggctggtctggtctggtctgatctgatcggtcagctgcaagcattcatcgggattcgcctgtgccacacgcgtgcgtgcaatgcaatgcaaatatgcaatggacgcacacgcactgccctgcgtcgccgctcctgcgctttgtcgcgcgtgcacatgccccaggcgctgtcggcaggtcaaaaatggccggccgaccggcagctggataaagaagagagagagagagagagacagggagctgctgggctgaggagaccagaccactcatcaggaagtgctgcgatgatctgctgc

SEQ ID NO: 1425 - DNA, 824 bp, Zea mays
cttgcatgcctgcagcatagactcaaagtcaaaagaatcaaaaacaaggtaaacgattaaattttttgtaacatttaagggatctctttgcaaaagctggtgaaaggcgctcttttacatgacatttcgaaatgatgcataacctaccatttcttcagggataccactttgcatccactgattttcaaggaggatggccttgcagataatactttgttgacttacaagttaaagaatggagaggtgctctggatatttatgtgaactatattggcccccttttccgcaatcacctgaatatgtagcactcttaagaggactcacgcttcactgtttttaggctctaaagcaagggtataaacggggaacatgtatcatctgtaactgttgcaatcaagaggtaaaaactaagcaaacatcattttttttcttacgctgtaattattctgcatgaggaccaattgatgtttttgctgttctgtttcaactccagttttctccttcccactttgaagaacatgctggcatggggagaagacggcaaccgtaagtaccactatttttgggaagaagtagtgcctatgcgaactttagtactcatataatataagagctagaagttccaatttccaaaatggcattcaattaaccttttgtaataaagacctaaaaagagttcttgggtgtttaaattcatctaagtggtgaaaattttatgtttcaggtatcacaacatttatacattagaaggattatcacttcataagctagctctgcaactgcaagatcatttgattccaaatggattcgacaatgctagtgtt

SEQ ID NO: 1426 - DNA, 540 bp, Zea mays
aaagtatggaagtagacggttttcacatattgtacagaggaaagtaagtttgtaaatgcttgatagaattcccatgttcatttcaggttcttaaaccaaccaacttaaaataagcactacacttgtccagaatctagagagagagagagagagagagaggaactagaatccagagaggaaaggcaaataaacgaaaaatacagcctcaaaacccatgatccatcattgcaaaacccagttaatcatccttctattcctaaaatacctgacacgccagaacacagaccatgactaccaccaaacacaagcaactagctaagcctctagctcctatgaactataggaaacaagctcaatgggacatcagaatttcctcaaacagcccaccacagccttaggttccaccccgacaccactgtcaacggcttgagctaacgaaaaatattaacagccatttagacccgccaacttctcagtttgtgttttcggatcctgtggggcgacatcatttcctttctcgccatttttctctcctgcttt

SEQ ID NO: 1427 - DNA, 712 bp, Zea mays
tgcctgcagtcatgatggggtctattttgcgcatctgctccaatgtgattgtgaagatggcatgggaacgactattacatggcataaccagagtataaggttcattgaaaacaagcatcatgatggtagcagaatatcaagaaacattcataaccttaacacgtggaacaccgactatgaatttgacatgtttcatgatatattttcttattgtcattcattataactggtaaatattctgagtccattgtagcacaaaagataaaaagtcaggttaggatgatgtggccaaccttgactggttgttcatgttggtacttccagttgcgcgactgagggaaccttgttcgaggcatgcggccatttccttctgagtggtgacatgcacctcagtggatccagctagcgttatgactccatttgacgcctctcggatctgcacagggggtttccctggcacagacagttttgcgtggccattgccattctctgctttgcccacggtagcagcagtggggtcaagtagatccctcacctcttctttcagaatctgcgaaaagcaaatgcgcaccaattggttccacatgtaagatctcatcagatgaactgatctggcatttcattcgacatgcaagtatctggaacagatcttgcacctcgatgaacgatactcgtaacttgaacttcacttggggtttcaaggtctcaattt

SEQ ID NO: 1428 - DNA, 869 bp, Zea mays
cttgcatgcctgcagtgtaagcttgaatctgtctttacaatcgtgaaccataagctgagtcctgttacagggcaactctcctttggcagagggttgaagagagcagagagctatggcatctcatgtttccctgccaagaaagagaagccctgaaactggacagcttaggcattccatttcctgatcatgtaaacaatgagttctttcctctcttatcttgacctcacagttttctgctcactgtggggctgcggcactgcaatatttatatagtgaacatatccttgataagatgtgtacttcttgatttttttcgaagggttttaaaccatggatatcctcttggcatccaacatctccctttcccttttgccctcatggttttgtctctctgaagttctcaccccactatcggattccctttctcgttcgagatcgagacccttctttggcaattggcactagccacagaactgtagctgctggtgattttcactttactaagacaaaccgattgttcagtaatttgactacacagtaaagttagtgatgctgccacacttactgctggcgatttccattttcttaagagaaaacaattgtctagtacagcatttgtctatttgaccacacagtaaaattagctgatgctgcctcactaatgtttctgttctggttaagaatacatgatctgaagcttagatgcagatttcactcataatagtccacatagtaacaaacaacatgatacaactccgacaatatgtgcaacctatcaatatcagaatcacaccaacactattgaatccagcattacgtagttcaatagagattcttaatacgcctcgcctactgtcctggattatagg

SEQ ID NO: 1429 - DNA, 739 bp, Zea mays
ttgcatgcctgcaggtagaggaatcccgctccatggttttcaccgtagctatgtctccacaaggcatgacaaggacctgatgccggggtactcatcaagccatgatcaaaataacaaatcgagaaacttgtatgtaaataaaacaaaaatgcagatattatagctagcttggtcatgcaacaaaatatatgttgtttagcagcaggtaaaagtagacaggacaggaaagccaccaaatatatatatagcatactatagcgtgatgcacaatcgtagcatcaaaatggtggtaccttacagccagttcggatccctccagactcgactttaccgcagacagccacctggcccagcgtgtgagatgcaatgacatcacatattggaaggcgcagtggacttgaaacgtcacgacgaggaggaggtaacgagtcgatggcttgcagcagacagcctccattgtacctgacatcaggcatcaacaaaatcgatgatcagccaccaagtcaggggggggggggcaagaaagtgatgcgcaaagaggcccaccattagaacggtcttaccaagataaaagtcgagtgtctgaacaagctgtgactaaattttcgttggccattgcgctcaaaggaacccaggtgactgaagagtccttgtacccacacgaccgaagaaagaccccgagttgcctatttaacggactgaaaccgctccttcgaatatccaccccatccatcttata

SEQ ID NO: 1430 - DNA, 748 bp, Zea mays
gtgcctgcaggtgacctatgcccctcaatttgagagccctcaagataccaaggagaaactggaagttaggagaaaagaagtccttggccgaataaaatgtgtgcctacactttactttttggtctctacagctttgtaggggtatttagtattttgatttgacagcaacacataatgacataactactgtgagcattgctaatttatttacactggtaccttcgtttgagaaattttcttccatttccagcatctgctggcagacctgaaggatcatctccagctcagggatcatctagtgggaatcaccaccaaatgaactctaataagaggtttgtattcctgacattggctttgctgatttcagtataacgtgaccagttacattgtggatttctgaaactatgacagctaggctcaagctcttcaatttaactgttctcttgagcaaaatgtagaagtgtcagcctgatttttctcctaaggttcattttacacacattcagggaatatatgaagacaattcatgcttctcctattgaagatcctcgtttcagtcatgtgccctcagacaaggtatgtggcaaaagtgtgttaaatctaattaccttgaaataatttcctggtaaatttaatgttactaaagaatgccaacgagccaactttggtcaactgagatatttgatactagaaacacaagcatctttgcattacatcgcttaagcacagtagctggtaagggccaaaa

SEQ ID NO: 1431 - DNA, 856 bp, Zea mays
gcgcacagcggggctcgagttggcgcaggctgtcccgcacggcggggaattggcgccccgcgccgtcggggccggtggcgacgcagctgcgcaggcctcgaaggcccgggccaagtacatggccgacttgagatcccgcggctcgagaagctcgacgtcgatgcgaatgtggtccgagagcccgcccacgaacaacttggccttctaggggcctgagagaccacgggcatggcacaacacggcattgaagcgatcagcatactcctgcacagaagatgtgaatggtagacgtgcgagctcgaataggcaggtgccatgaactgttgggccgaagcggagggtacacaactcgcagaagcgctctcacgagagcatgccctcgtcctactcgagggcatagtaccacgtctgcgcggctccggtgaggtggtaggaggccagccacgtgcagtccgaggccagggtgcgctggccgccgaagaactgtgcacattggttgagacaattgaaaggatcccgggcgccgtcatacgtggggaagtcaagcttgtagaaccgcggaggtgccaggtcagggtgtggccagcgggtggcacaacgtcgtatggcctgggtgcgtcgccctggacgtcgccgctagtcggcgcgcccaagaatagggtatcgtccactcccccgtagagaaccttgtggctagggacggaggacacggtcagtgttggaggcattgccatcgtgaactccggcgccgtcgtcgacgagaggacatacgacgaaaccgggaacagtgatggtggcatggagatgaagggaagtggcagtcctgctggtgttgatgtactggcccccaatcggg

SEQ ID NO: 1432 - DNA, 811 bp, Zea mays
tctcattttgagacctaaccacttcgtgtgtgcgtgcctgcattcctgcgtgggacgaacaacatttaatagcaaatactttccctcttgattatttctctctttgacatagataattccatatgcttatttgacccttctttatccttggcagccccttcatacaaggactaacatgtttataaaggtattagctgggcattctactttttgttcatgagctcaagcatgtgtttagtaaattatcttatgctaatatagcaaaccatggaaactaaaagatttacctcttttatctgctctgtgtttccttcagtttataaggacattatactatcaactcaagcatggttttcaacatacccaagattccaaaagtggggatatgggcaattctctgtgtttggatgaaacatggttttcaagagacatattcctgtaccgtctttcaaaggtaattctgctgatacagtattgatacacacaaggattaagatcatgtttttgttatttcctaaatttaactatgttacttacacaaatattatgttacaaacgcgaatgtggtgaaatataagtatagttaaccatattttggtatgccaagttagtccccaacaagctaccaaatacaagagctaagttcataacttcctattttaagatcgttcctaacttcctaccatattgtcaataacaacaaagacttttagtcccaaacaagttggggtagactagagttgaaatccaacagaaaccacaagtcaagtttcaggaatatgaatagttgttttcaacccactcctattca

SEQ ID NO: 1433 - DNA, 757 bp, Zea mays
atcaattatgttgtttgataaaaaaaaactgtgcaacattttacccaaattgtgggtttatgattttttaaataaacatgaacttgcaatatatgttgcacatattaagttgttcttgttatatctattatgatatataatacttcactgtctagctcacaagttatccaatagcaaatcaggtatcaagcagcatgtttcggcaccgttttttttttcattaaaaaatctccggtagccggtgaactttttgtgatatatcatgacaatatttcttatcttttcttgaaaaccttgttccaactctgcaaggtttagtttcaccaaaaggatttcattttttaaccttagcatttggggggaaacaataaatcccaaagggtttgaataatccacagatctccattccttgccaataagctgaaatgttaccatgtttccttgccaatcatgctgatgttgtttttagtttatgattaaatttgattgcatctgttatttacacttttcttcctttgacaggcaatactgaattatgagaaggcagtccagcttaattggaatagcccacaggtttgtgttaaatccttgtatttatcttgagtacttgagtgaagaactgaagatgatatgataaaataaaaagaaggcttcaatttgagtcaagtggacgatcaatgtgcacatataactgatattaggaccatcatggttcagtagagttaacagttaaatatgaatttgtagagttatgttg

SEQ ID NO: 1434 - DNA, 766 bp, Zea mays
tgtccaacaagtggtttggagctttggtatttagtgggattctatttgggcgtcttgtatcatgatggttagctgatgaagcgtcatgtgcttgcatggtgggtccagtggaacctaagcaatattatgatgagatgctacaaacttttgtgtctgggctagcaaatgcggcgtggtacaggagtggagtggactttgtaagctgcttgatctttcaccgtcatcaaaccttggctatttaacgagcatatcaatcaatcatggtggtggtctgatgtaggacatgtgttacgatttccctagcagcttgctccttctcatcttttatttcaaatcttactgtgagtgcagctacggtacgtgttttgcacgatctattgactatagccttagggcatatacttgttttttttattacttctgtcaccatgagtggaggcaaaacactgctgtgttgttacataaaaacagacacacgtagatatttaagtgttaaatatgacatacggcttcttgcagaagcactcgttgccgatacaccgacgtgttcttttatttggctgagaacatactgatgctttcgttttggactgaacgcattttggaatcagacagcagcaaccatagcgtggtttggctaccttcagttttgcatctgccccgtcttaaaattaaataaatgacgtcatttacttttaacctctcttgtttattatttggaaaaaaaactgaataagacaaatgatcaaaccttaacttaaaagac

SEQ ID NO: 1435 - DNA, 771 bp, Zea mays
cttgcatgcctgcagatgcgtcaggaatctacactactcatagccaaaagaaaataggctgcaaaagtatatcctaaactacggaaaagcaacggtaaatcaagcgagttcatagaaaaaaatgtctcagcaaacaaaaaggaataggtattgggtatcagccgtaccagtagaggcagtgcagtttgggcataggaatgttgcattgaactggccttccttaaagcgggtgtattttccgcccttgaaatcactcaaacacatctcccattcatcaaagacagcatcaggcttaaatgtgccctcatcatacaaaccacatcgcttgcatttcttttctggaagctctgttaagggctgccaaaattgcaatattcaatatatggtgctaacaaaacaattgagtgaggaactgaagatcaattttaagtattataccaacagtttgacttgcctgccatgattcttcacccttaaaggtatatggcgtgtgcgcctccgttacatctggcagatatgttttgtttgctccattgcaccggaaagccactgttggcttggcaaaccattcatgagtagtaaatatctctacagtatcgagtgtgacaagcctcgatgaaaatgtccctacacaaatcagtgatgcacatataattagtgaaggaaataaacaaaggaaaaggtccaattttagtacccacagggccacaactttttgatctgtgtaagaatggtccatcaactataacacggttatttttggtccccacc

SEQ ID NO: 1436 - DNA, 1193 bp, Zea mays
tgctctttctccgcctccgaggggccattggcggtggtttcttggctctcagcaggctgcttggcgccgtttgctggggctgccgcgccgccttctttggcgccgtcctttccaccacctttggcgctgccatcctttgtgccctctttagcagcaggtgctggtggtggaggctgcaacatatgtggcggcggagcatgcttcagcttcaccaagatatggcgcatccgggacaggtcggtgggcttgccaggcttggggccctggacaactgtgatggatggcttcttgtccttgtctttcttcccccgcttctcgatggtggctatttcatgtgggatgagatctgaaatcgatttccagtactgcttgtctgcgccggcgtggaatttctcctggctggctacaaaaatctgtagcataccacaggagcaattagtgtccaacatagagatagattagctttacaagcacagacgagagccctagatgcttacatatgatagtcgcataccttctccctttctctgttgttgaccatattcgacgcacagttctgtatcctcttctcaaaaaaagctttcttgaattcttctgcttcagcaattatttgggcacgtagctccttctccttctgttcttttttctcaagttccatagcatttttcctaagacattgttgaaaaaggaagcaataacaaattaaaactagagtggcaggaaaaaaaatcaaggaagccaagaaaatgacatcattcgatttgagggacacaaaagacaggacagtaacttggtctgtacccttacaatagttacaggctccttacaaattgaccttactggactttccacaagataagcattaaacaaatcagaatcaacgccactccaaatatagacaaatctactactgctgcaagcctgggacaatgtcctgatgaagaacatcataccaaacacggcttacacaactccaatattcatgaacttctattagttaactaccaaagtaaattccgaagtaaatatagacgtgcactaaaccataaaataaacgaggttgtatcagcagacaattgcgtcatagtctcatagagcatattatgttaagaaccctaatgcacacattttggcaagggttacaaaaaacgagccagtaccaaaaagaatgtattggatttttctctggggaa

SEQ ID NO: 1437 - DNA, 1027 bp, Zea mays
atgaagaacatcatggcagtagcaggcaagacctggcaaaaaaaaatgcttctcggacaacaattatcgctgttgacaaatcataagcgatgttcttagggtgaagtgaagggaaaaaagagtattcctgagtcctcctgaccaagatacttcagaagcaagcacatggcaggaaagacgggatatcacagcacctcggccataccttaataacgagacaaaggacaccaaatcctcaagaaagttgcaccgccgtcggagctgtttgctatggatttagactgtgcagctacaattcatatagacaaaaacattgtagaagccgatatagattaaagccaagcgaacaatgtaaaacataaaaaacaacatgccaagctaagtgcagattaacataacccaaactcttaacagtccccgtcgcaatcagatcaactagcgctaatgttctcagcgccattccaaccatagaggcagacacaaaccagatcatcccctaaatattacaggtcgatctaatgtgcaaaccaggaaaaggtgcgaaatgaggagtcctgctatccagaacatgtttctgctgcaatttagtaaactgcatattgcaatgaatagctagaagaggccagaacacagaaaaaggaaaggggggaaaacaaagatcatttaaaaacaataacaagactagcaagtggcagataataagcagaatccaggaaaggataaataaagatgatagctgtggtataaaaggaacaaacgggcactggaaatttattggtctaaactttgatgtctgactgaactcaactgagctgaaacttctctatacacccagatatatgatatatccctgcacctacaatacaatcctcctctgctgtccctctcaaactcttctttattcacagccaattttaaccaccaatcccaagcctaaaacgctccgaagagacccaggagaccaccccgtcaccttcaatccaatcccctttcaagcaccaacgacccgacaccgacaggacatgat

SEQ ID NO: 1438 - DNA, 762 bp, Zea mays
ggcaggccatcttctccgacccgagcaacctcaccgccgactgggtaggcccgggggtgtgcaactacacgggcgtgtactgcgcgccgctcccctccggcggcacccaccgccgcggcgcgctcgccgtcgccggggtcgacctcaaccacggcgacatcgcgggcttcctcccgccggagctcggcctcctcgccgacctcgccctgctccacctcaactccaaccgcttctgcggcgtcctcccccgcgcgctccgccgcctccgcctcctccacgagctcgacctcagcaacaaccgcttcgtcggcaagttcccggacgtcgtcctggacctccccgcgctccgcttcctggacctccgcttcaacgacttcgagggcgccgtcccgccgcgcctcttcgaccgcccgctcgacgccatcttcctcaaccacaaccgcctccgcttccagctcccggacaacttcggcaactcgccggcgtccgtcgtcgtcctcgcgcacaacgccttcggcggctgcctcccggccagcgtcgccaacatgtccggcacgctcaacgagatcctgctcatcaacaacggcctctcctcctgctttccgccggagatcggcctgctgcgggagctcaccgtgctcgacgtcagcttcaaccagctcgccggcccgctgccgccggagctcgccctgatgaggaagctggagcagctggacgtcgcgcacaacctgctcaccgggcgcgtacccgccgcgatatgcc

SEQ ID NO: 1439 - DNA, 802 bp, Zea mays
tgctgcgtcgtcgtgttgttacgatcgtccttttttttttgaaaatttattgaaggcccgtgcttcttcttctcttcttcttttccttctccactgttttcctcgcatgctacatgacagtctctctctctcgttaactctgttggtgttcttattatttgatccggatgcaagtaatactatacaaacaggaatcgggaatgcacgctcccaatttttgacgcctccatgcatgtagtggcggagttccgtaaaattaacgtccgagatgtactattctatcttttgattttttttttcgtgttttatttaaaaataaacagcggatgataaatatttaataacggagagtaacatttaaaacaatccagttaaactatgacaagtagggaaagtggattagatattcgggaacaattacttacaatagaggagaatcacgagcacatggcagcagacagtcaacactcaggacacaacgttcgccgctcaggtggccgttgttcattggccaaggaggcactctgcactcgcctatgaataacaaaaaaagataatcaagttgagaaagttatatagcttggaagaagatgtaatgacaggggtggatttgggcggtggcatggcgccagcccccgcgcgcgacactgctatagggtcgcagggaggctggaggcggatggtggaggccgatgccagactggcggtggtggatgccccgagtcaagcccgccccgaccgcctcggagggttgctggtttgttcctcattgccgaattccccggaagcccttaaggctttt

SEQ ID NO: 1440 - DNA, 760 bp, Zea mays
aaccatttttggagaaattccaggagcccccgattgaacaaaaccggtcgcgcgctggagtgtctggcccccgctagatccgcatcgaatccaaggactgtcgctgcaaagaaagcatggcatggtgacagctcgtcgacgaggcggtgcagtggagccctacatacaccgccggtggggcagcagaggcaccgtcacgagttcggccgccgggggccctctcccatctcgtcggccccgtcgctttatatgggcggccacggaggaccggcccactcgcacgcgtcgcaccggcaccgagtcagacgcccgtggcaatggcatgccatgccacccatggtttgctgctggagatcgagtaccgagagcagagcaggccagcagggcagtgcccagtgcatgcatttggtcgctcggtggtggtgcggttgcatacttgcatcgcaacaagctgtttttttcctctcctttcgctattgcttcatttttgtccccttttgctcttgtgttttttttctctctcttctttatacaagtgacatttcttttttttttcctccccctgtcgtgtaaagcttgatgttggatcatgcacttacgtggatgggatccttttccaacaggtttgttgagcattcctttgcaacacatgctcggaagaactgtttgtttgtttggagtagttgagaacattcgagtaacctacctacctaatatgtcgtagactgaccgactatattccaatttttttataatatct

SEQ ID NO: 1441 - DNA, 776 bp, Zea mays
cctggcccggtcactctcggtggggagggacagggacagggacagggaccggaaagggaacggcgcaggcgaccgcaagaccgccgtgccggcggtgctgcggacgtcgggcaccctgtggggcgacggctcggacacgttcgccgccgtctgctcgcggcgcggcgagaaaggcatcaaccaggactgctccatcgtctgggaggtcagctctctctctctctgtctccctctctctctgttactcggcctctgctgttcgttctgcttctttcttccattaatttcgttcggctttttgtactggatttcgggtgtcatcataaagtttgtgattgcacgtgatatctccatagagttctttttttaaaaaaaaaaaaaactggaaaattctcgtcgggctcatgcgttctactgcatatatataagaaaccaaacatgaaacagcgtcagatcagtgtttcagctcattttgtgattctgacaactcatggaaaaaagccccccctttttttaaccaaacatataatagtaagcacttcttcgtttcagagggataaaggccaattaggaggcataggtattggagcacgagtctctggtgtttcctcttggctttctcttcctcacaaacaatacaggagagggccggggtcatacgtgtccttggtgatatggtttcttttcagctctcggtatctcaacccaagtcccaaggtagctgtagttaagctcactgcttaagacggaaaagtagccacatcatcatcacataa

SEQ ID NO: 1442 - DNA, 738 bp, Zea mays
ctaatcgtggagtgtcgctctcacgtgacaaactgcacgtttctgaacggtggacggcggcagtgcactctacgaacgccacgggcacaataatcgtagtctgtcttgagatgtgcatttcgttgccccctcctccttggcgtggacttcggcacgttacaggttttcgtgtctacggcggcggcggcgggtggaagaagaggcagatcgccgagcagtcgtcgacggcgatgtcgcgccgcttgcgcctccacgcgcgaacggcgcactccaccagccgcttggccgccttcgcccggtccggcgtccccgccacgatatgtaccgcctcgtcgttggagagcacgtcccatacctatcggataaaagttcccgtttgccatcgtcagtcaccaagcaatacatatgctttcttaaacgaaaagatgggtgcatgtgcctgtgtttgcatagagaattaaaagcagataggcacgaaagctaccccgtcggtagcgaggatgataaattggtcactactgctgatcctcttctgcgtcacctccggcgtagagatgacaccgcagtccttgacgcagtagtcgccgaacgcgcgcgacatagcgagccccggcgactctcggctaggctgccacacgcggtgcaccccgggctcatcggcgaggcagtacacttgaccattgcaccgccggatgcgctccttctcctctgcatgcaccatcacattccaggacacat

SEQ ID NO: 1443 - DNA, 712 bp, Zea mays
atgtgtatccttcattaccatgtggattcacaactagtatgttggtacttatatttagttttgtcaagtattgatgaaatcatgtcaatttatagagaaccattttagcatgtagttgactagatagatagcaactttttaataaaatgcaatgtatacatgatgaaaacaacattacttaactttttgtgagacattgtccattcaagtcggctctaaaaatgtcttctcatttaaacttgagaccgtgattatatctatcaccttcgcaggttcaccactgccttgggtgggctttctccaaatgagattatgaaacgaaccactagtaggcttgagaccattcactcagagggtgttcatgtatgtacatactatataacgtgtcattcattgcttataaatttgatatttctttgaggggagaaaaaactcttttcttgcagagattatcggagatgtgctgccttgcagtttctcagcttctggtgctaggaaagtcagtaatatcttctgccaataaatcaaagaacgaggacggtgaaaatgatgttaagattgattggcccgaagatgccatttcaaaagccaaaataatcagatggaaggcgcaatccatctctgtggatatggaaaaggtgtctactaatttcgctacaggtaatggacctgtcataccaaattgatgactatatgtaggaggtgaatttca

SEQ ID NO: 1444 - DNA, 748 bp, Zea mays
atcagcaggaggaaggaccactggggaggttgttccttctgatctctgggcttggaggaagtatggacagaagcctatcaaaggatcaccgtatccaaggtattacgactgacctttcttcagctggttcatgtatatatgcaattgaatatatagatacactacatatgtgcataaattactatggtgatcatgtaataataataagaacacatggctcttaatttttttttgccatctttacaaaaatcccttaatcatgtgttactgccacatgagtcattggcatgcattatatgtcaatcacctcctaatatataatggcaaaaagtttattttccctaacaataatagatatatatcctatcacatctcctcactcaagatgaaaagacacatatggattcctattttcttctagcactattctaccacttgctggttaatttagaatctagcacatgataaggtagcagctagcagctaatactatataaattactataggcaagtgcaacagctaatcagacttatcatggatttctaaataatatcggttgtgaaattcaagaactcagagctgcatatttattattttgtcctgctttgaaccatatcatggaattttcaatgtccacggttgtacactttaaaaaagatattgagttgattcaattaaggaatctttcttatatcatgtccgcaaccaaaaaacattactagatgttaaaaacagataaattcgtgt

SEQ ID NO: 1445 - DNA, 791 bp, Zea mays
cgtgcgctccgatgctaagcagagcgaggcgtgcaggcaagagcagggagttttaggccgtgcgcaggaggcgtagggagctcgattagtcgaccggctactctgcacccttcagaaacgtgagaggaatgagcgtagaggtggccagttcggttcaggcaacagcagtcacacagtcattttgtcgagcatgaggctgaggccgaggctggcttgaccgtcttcttctccggctccttcgcgggggacaacgggcgggcgtagggcgcgcgctcgacgaggcggtccttgcgcttggccaggaaccacggcagcgacgccttccgggcgatgggcaggtcgtcgccggccgcgaggcgcatgacctcggccgtcttctccgccgggaagtcctcgaacaccaccaccgtgccgccgtagaagatggtgagcggcggcggcgcggcgggggcgggggcaggctcgggcatctcctcggccctcgcggcggccggctcctgctgctcgtccgcgccgacgtccgcgccaggcatcaggctcagggtcgtggcggccggggcgcccggaggtggaggtggaggtggagggagcagttgttagcgtgcgtattgggaggagaactgcgaacgggagagggcagagggagccatgttgcgcgtgcgaaagggggtgggaggacacacggagcgcgggcggatgcgcaagcggctggcgtgggcggctatcgtgtcacggaccggtccagatcgataacgggcagaacggcagaacgagggaggcagactaccttt

SEQ ID NO: 1446 - DNA, 813 bp, Zea mays
tactactctaccagctagcactagcagcaggttcgatgctgagctcaggcttcagacacgggtggatggatggatcgtcgtcgtcagtgaggttgctgtcggcgaattttactgcgactatgcagccagtcaccagtccaatcaaaatttaccacaggcagacgtacacgtgcgtgcaggcatcgtactcgtacggtactactactaccacagccttgcaagtcaaaaagaagaaagtgttggaggggagagcgagcagtagtagagcaggacgattcctgcactcgccaacagcatgcgactacgagctgcttctcccgctagcactctgctaccggcacagcacagtaagtacatggcaacggcatgctaatcttgcttccgtaccagtcagtcagtgcaggcataataggagatcagtgagacttaagcacctgccaggcatcaatcagcacgccacaagatgaggacgtgacgggggggggggggtcgggagtgcggcacgcggagcactgtacatgtgcgactgcacgtcgcgcgcggcgcagcgcagcgcaggcacagagccactgaaccagtagccgtactctacagaagcaaggacatagagaattgacaagaaaaatcacgcaagggaggagagagagaaggggggagcatagcataggcatagcaagagcaaagctgaaaaagaggagcacccactcgtgggggggttaaaaccccgagaacaaacttgggagtagcagcggccagccggaagcgagccgagaaccgagggaagaggggtgaagaagcaacgagacgcagcgg

SEQ ID NO: 1447 - DNA, 831 bp, Zea mays
agacggccggactgctcctgcgaagacgacgctgacatcgagtacgacagcagccgtatctgggttctggacacgcccaacataccaaagcctccaccagagacggagaggctagtgattatgggcggtgactacaccagaatggacacgtattacgtcatgcccaatgggaagcgtgcgaggtgtgctggtgacgtggacaagtttctggaggcaaatccagcgtacaaaagccgcatatctgcttcggatttcgactttgcaccgcccgaggttgttgaggagactgttgtttctcacaattttctgcctctgcaaggttgccaaggccaagaaacaggagaaggcagagaggcacacaaaataggtgaaagcagagaggcatcgatgctctgaactgtgcctgtgccctgtgctatgtaggtgatagtccgctcaagatcacgtcacgtctcgttcctatctagtacggttgtctatctcggctgaagttaatgtagtaggtcttcttgcgtgttaattcctagggaatatatgagatgtttaataattagttgcttaggccttaaaactgtgcttccttaacttttgttcttcagtcatctcgtatatgcacgttgttcccgttagctagcagcctagtcggtgactgtgcatctcgttatcatagctagatgtctgtgcgcataaagcttgagcaaaatctaacatttcatacagtgtagcacaagacaagaaacaaatgtgtaggaccaacaatgtatgtagactagcaacgttgacctgatgctggcatgccagagagttctttcgatgatgttgatggggcac

SEQ ID NO: 1448 - DNA, 715 bp, Zea mays
atcgaaatgaaacggtcaaggtatatgcacaagagctcgagatcatacgtgcatcagcgagcatcttggaagggtacccagtcgaagaactctcctcctccgaaaccgtgggcgccctcgcctcccaacgtttcatggccgccttcctcacggcgaagaaggcgatgaggcccacagccgagatggcgacaaggatcgccaccacaacgccggccacgaagcctgcctggcctgcgacgctcttcctctccttgccgggcactatccccacggccagggcctggttctggcagaacggcgacgggtgctgcgagccgtcgctgtcgtccaggcagttggtggacacgagcaccaccgtgtccggcttcctgcccggcgacctcaggcaggtcggcacgctccccatgaggaggttcagcgacaggtcgacgaaccggaggttgtcgccgcacggcgccttgtcggatagggtcccggtgaacctgttcccggcgatgttcaggtaccggatggacggcagggagagcagcgcgggcgcgaacggcccgacgaagcggttccacgacacgtcgagccgctccagcaggtaaaaggagctcagctccgcggggaggccgccgccgaaccggttcctggccaggaccacggtgaccaccttcctcccgagcttggggaacgccgggccgagcgagttgccgccgacgtcgagcacctg

SEQ ID NO: 1449 - DNA, 818 bp, Zea mays
aggtcacggattcgatttaggtgaagaaggggaaagagagtggggtccacctgcaagaaccttaggtcccaactataaggtatctgacggacataagttagagatgagagggaacagagaactgagataggggtaaaattgagcagagtgaccttactagtgggcgaaccataaaatccctttactacttacttcatgagtatatggggtttcaaaccgattgccgtcctcctgagcaatgttacacagaagcagtatccatactagattgctggctaatgaactgttcaaatcaaacatcatatacataatacatggtggattgttgggaacgtcctctattcaaaatagggaaaaggaaacaatcaagtagatattggtggaatcaattccagtcttcgtttttattgtcaactcctgcctgtttagcttaggatctctggttaagttgtggctgtgaaaaaaagccgacgcagacggtctagcttagagtctctttggttgagttacggcgagttatggatgtgaaaaaaaagatcgtaggttgttaggctatggttgtaaaaaaaacttttgtgtaatgtgagctataaaaaagttgatgtatacttttagttgttaaaaagttaaacaacatttggtagaaaccactaataaaaattcttctatatacattttcacagttccatttgaaagccactaaaaacaagttcaaatatgctttcagaataaactggtttctaatccgacactttggtttagcttttaactttttatggaacaaaaagtcaaacccaaaccaaaacaccattttaccc

SEQ ID NO: 1450 - DNA, 781 bp, Zea mays
agagtcgacctgcaggctttgtatacaatcttgtgtgacggcagtgggatacattttgtagtgtatatatatcagctgtatcgattgtagagttgtagtgagcgagtgatatgcataaaatgtaacacagcaccttgtacaagaaacaagccttgttatctgattgttccttgccaacaaaccaaccatcagtctttgaagcagtgggtgtatccacgttgctgattgtattttgcagttatttgtatagatcgttgatcaactaaccgctccccttattctgtttttactagagaccaggttgtagtagatggctttatcaaaattcttttagtgtgtgagttataaaagcttaaatatgatcttaacataagaagctgtattaaaacatgtgtctagacaaatttttttttttttctagtaagatagatttcttaacaggtttaatcataatgtattttataagaatgtgttgatttagaaattatatattatataaaaaattaaaattttgtgtataaataaaaagacgttggttattatatatacaagagaggtggatagggtgatgcaacgttttagaccacttttaggatgattccaaccatcctctcttcatctacatattatttgtttatttttaaatatatctcctttttttccctccctatttcatatcctcttcgaacattttttttcctatttaacttttatttacgttttaactgaggtatttgatttttatacgttttaactgagttatatgacttttatacgtcta

SEQ ID NO: 1451 - DNA, 766 bp, Zea mays
aatgtgacattcgatttcttcactgcaaacattgttgtacgagcaacataactgacgtgtaaatgaaggggataagagcccagggctccaacttcccatgcccgagtatcaatgtggcaatgtggccctgatggcctgatcgcccagaaacatttcggtgcaaaatcgcagcctttaattttaactaatgaaaattgactccaagcagaataatgcagcaaccacgcaggcacgtagattgatcagaactggtcacgataaaatcagctaaaacaataatgattccgtaagctttatggtcaataaatagcatccatcaatgattacttgagaatttgaaacagatccaatatttcgggattgcatagtagcataacaaatacaattgatctgtattatccacgtccatgcaaccggtctaaattttggttgcaattttacctgccaaatcacaacacggcggctaactaaatgcatgtcagcatgagcctttctacagaaaatctaccttgctaattggaagtcactatcaaagtcagtcaagagacacaagaaatggacgtattgcctttcaatacatgagttttgactgctgaacgagtgtgatgtttccatatactctcccatctaccgtgcttcctcttcctcttcattgttttctgtttgggatgctagcttcacaatatcttcaacaaggatttttccttttgaaggagtgcataaagagaacctttcacaaaaatccaagaaaattggacagaggcaa

SEQ ID NO: 1452 - DNA, 827 bp, Zea mays
aagaaaaaatttcatcagcacttattgagaaggtaaggaattcttccgggcatgacctgtagttgaacagcttctacctaaaatctgtttatctttcccatattttgtttctaccactcttggaactatgctgccaaatagccttgaatattgacagtgaaaactataaacaaatatcttaaaagttggagataagagtgcatactttacttttacttgcaaattgtaactaagttctatattgacaagacttggtaactaaaaggcctctgatttttattttgatgatgcaatcttagaaaccctacctgaactgaacctcttttggcattttaaaagtgctgcaaaggaaacaagcatcctcttgcttttgtatcttcagtatgttgtcggcatatgtatgctattatgtccttttttggttaaatatctattattcatgggtttgctgttcacatgaatcgcatatagctatgacctttgctgcattcaggttgatgctatgctccaagaattagaaaaggagattgatgatgtggatgcacaaattggaaatcgttggcaactgcttgataagtaagtcacttctatgtatggatctttttatgttgtgtgcttctcagcctgatagggaaacttaatgctatttttgttgccgagttctacctgatagggaaacttaatgctatttttttgttaatttaaaatcggcagtagctctattgccctgtcaaaacacagttctgcgtcacgaccaattcagtttttaatgtactcttatattttagtggttggtttatgtccatcttttgtactggactttgttt

SEQ ID NO: 1453 - DNA, 721 bp, Zea mays
accgaccgcatgcggagggtccacttgggcgacaggcggacgaggatctcgtcgagggcgttggagggggcgtcgcagatgaagtccgccgcggcgtcgtcgacgacccgctccggctttggtgcctccattctctctccgcctcggcaacttgtccacgcgctcggatcggagggcggtgggggatgggatggggactgatcctcgccaaccgcacagctggcggttcgatcctaccctgtggaatgcaaacgcggcggcgaaaccggctacgggggaacacggccggcactagacggtgatgcgggaaccaaccaaaccggggctccgatcacggcgaacgacacgaaggagaaggatgcaatcgagccaaggatgagggtgattccgattcgagggctcacccctgttgtcgccgcggctgcttctgccttgtgcagacgttcccgtcctttcggtcggtcggaggcaggaagacgaaatggtttggccgttcgtttgggagggagaccgcagctggtttggttggaaaccgattaatctttttaaagcaggctgtgtcagcctgtgtcacctgcgtgcagtgcagtatgcttgcctgggccttgggcctcgatgctattagcccgcacgctttgtgggcttcatggagcctaataaacatgcacattcagtcctacaattgtgccatgtgcaataattctgttgaaaaaactgtaga

SEQ ID NO: 1454 - DNA, 784 bp, Zea mays
gcatgcctgcagaagatacatatctcgtgacagaacaacttcatcatggcagaggctgtgtccctcaagcctaataacctctaagaactgcaaacaaaagccagtttgatgaaaatgatcagtcaatcaatggtgtaaggaaatcattattcattaaattggaattatctagaaattacctcctcatgctctaaggtatgtgcaagcggcagaataacctggctgcccgtaaacccactagcacgcaaaccaggaactgcatatggactagccctcaaagcagcagcggaataagcatcaacaccaggatcagcccattcggagcgatgctccctcagaaaccgtactagtagggcaggtggcacattctacattgagacgaaattgtaacatctttgttataatcaggctatataatatcaaacatgtgcataactgtagctaaaactggatgaaataagagtataaacctgaagcagcattgatgccttagcacacaggatacctcctccaattgcagtaaacagctgggaggagttgacatgaggaccaataagtttgtttggagaagagttgatagcaatagtaacatcctcagcaccgtcactgctcatcagtgaccaaccatcatctggaaacccattgacagcatcattgaaacccctgtaaattacattgaagaagttagaagtgccatgtatatgggtcatgccgataaaatgaaaacggcacaagtgataaatgagaacacttgaacacagccacaaacctgctaagcctctga

SEQ ID NO: 1455 - DNA, 741 bp, Zea mays
aagcaggtctcccgactcgtctacgagaatgggtacatgcgacagcagctccataatgtgagatccatcttcttttcttattccccataacatgttgtatttttctagataaatcatctcaatgcttatgtgaaccttgttacatggttccacgtctaatactggtgtgttatgatgtttgcagccttctgctgcgactacagacacgagctgcgagtctgtggtcacaagtggtcagcaccaccaacagcaaaacccagcagctccgcgtcctcagcgggacgcgaataacccagctgggtaatttcatttcctaacatttttaggctgcttttgtgcttgtaaatcttatggagttattttttcaatatgacagtctactagctattgctgaggagaccttggcagagttcctgtcgaaagcaacaggaactgctgtcgattgggtgcaaatggttgggatgaaggtaattcacttattgtgacaaaaagaaagaactgtgccatgcattgcctacttaaattctgttttggctaattactttcaagcatgtattcctttacagcctggtccggattccattggaatcatcgctgtttcgcacaattgtagtggcgtagcagcccgagcttgcggcctagtgagccttgagcccacaaagggtgtggttttattcattcttcatcatcacatagctctatgtttccattcagcagacataccctaattgactagtccat

SEQ ID NO: 1456 - DNA, 799 bp, Zea mays
aggagcggaccggcgcgatcgacaacgagatgaccatcgtgctggccagcatatccacggcgtgcaagcagatcgccgcgctggtgcagcgcgcgcccatctccaacctcacgggcgttcagggcgccgtcaacgtgcagggcgaggaccagaagaagctcgatgtcgtctccaacgaggtaattaattgagtggctcgcccacgttttgtgttatacacactgacacagcagatacagccgaaccacacacaaaaacaaagaagaaagaaacagcagcatcacacacagccgctaccaaacgcaagcacacaaaaaacacaagaaccattcaagaacgtacaacacgacgctcgatcgcgcgcgcgcgcaggtgttctccaactgcctcaagtcgagcgggcgcaccggcgtgatcgcctcggaggaggaggacgtgcccgtagcggtggagcagagctactccggcaactacatcgtcgtgttcgaccctctcgacggctcctccaacatcgacgccgccgtctccactggctccatcttcggcatctacaaccccaacgacgagtgcctcgccgacgtcgacgacaatgacaccgtgagtgctaattaatctcatctcccttacattctttctgttctgactggctcattacgtgacacaattctatcttcaacactacactacgtacgtacgcgcgcgcatgcagcttgattcggtggagcagaggtgcattgtgaacgtgtggccagccggggagcaacctgctggccctcggctactgcatgtactcgagctc

SEQ ID NO: 1457 - DNA, 818 bp, Zea mays
caacagagttttggaagtagattggtgtgttgactggactggcattcatatatcgagagaagattgttcggacacgatcatgtggatggatggatggtgttcaagtgccttgcctctcctgtcctgtcttgcccttgccttgggccttggcgtgctcgcattttccattacttccttttttatactctgtttcgattttgagccgggacattatcttcttcacctgttgatttgttctgttgctttgcgcctccgtgctctcgcagatccctttgggctgtttcacctccgcacgacaccaggagtgagccgagtttggtttggccgggttattcagtttattctttattatgcaattctagtttttgagtctattttgtagtcctcgacttcccaatgtgtgggttgcaggattgggtccgatcagtggagaattcatcatgatgacatgttgcgaggagatggaggcaggtcagtcttctgtcagatccggcggttcattgattttgtcgattggacatggattggtggtttcaggctcaaatgtctctgggtgtggtaccatcagaacctctcgtagcctgcacaccagggtggattctgggccttcgatccattcttactttaacggcagaaaagaaagggtccttgctggttacagggagaggtttgcttatggttcattccttggttttggttttgatgttgtcatattggtgggaagatcgccacccgacttactataagcttctttacccttcattggaaatgctgctggctggatctttcagggcaaccgagttttggaagtagaatga

SEQ ID NO: 1458 - DNA, 882 bp, Zea mays
agaggcagggggttgccgctctcgccgccgcacgctgcggctctgctctgctccgcctgatccttcctgcggcccttgttttttcctctcgtttcaggtggccagccttggttttgcaggtgagcgccgctgacctcgcccttcccgtatccaatctggttgcgcttaactgctgcgagggttggcgtccccgagatgtctactgcttcctttttaactgtccatactggtttatttccttttaaatgtccatactagtttatactttataatgatgcttggcttgaagaacaggctacagaggatacctgttccgtgaccagtgcagttcgcatgcggttgctcactgaactatatagtcttgattgattggagaattcggttgaatcgctttggtattagtttgttacaaatttgcagtgtgacggtaattgcaacggcttcagttggtaaagtgctctgatctggtcccaccgtcagtacaaggtactgaggaattaggccgggtggactaaacataacataacttgggttcggtttcgatgtgatctttgtgaacatgaatggtttgcacattcacaagtgtctcgtttccctcagcggattatcccggttcatctgactagaactctgccattatccagggcaggaaatagtgatatgcctaacttctttgaaggaaggtcttaacgaagacctaattgttcttccaactggatgcactttaccatgttacgtgttctaatccgagtaggcctcattggtcagccagctgcatttgattgataatcaacacaataaccgaatatcatattgttctcaatgttggagagggtacatatattagttatgctcccttcctttgaaacagatgatttttaa

SEQ ID NO: 1459 - DNA, 745 bp, Zea mays
tgcatgcctgcagttaacaaactgcttcatataaggcgcaagaagcagtcccccgtgcccgtcgccgccattgtgctgcgagactgccgacatcaagtaatccgatctcccttgttcttgaaacagttgcaacatccacaaattcaaacacgttgttggtttctagccaatggaatggacggatttgctattttttttcttcacatacgcgtgccgcgcccgcgcatgcattctacgtagtacatttataatttagagttcttcgatgtatggatagagtttcttagttgtattttatgtttggaaaaccgatactaaagtttagagttgtacatgtcctaagggaccaagttatcccaaaagagagttcctctagatttggggaagtccatgttcccctactagaacatcgtgtatcctttggaactgtaatgacttaaagaaactaaattgctcaacacttaagatcatatatagtgaagagacactaaaacggtctataagcacaagagataactaagaaactctattatacaatgaagtgtttataaatgtagctcactaataaatacagaagtaaatgtgtttgtataacatcagatccatagaacagacgttgaattcgtacaatagaaagtcagacgtctgttgctacttggtttacgagccagagacgtctcttcatagagagatggctccacaattttattttattttatttttgttgcaaaaaacctctttatac

SEQ ID NO: 1460 - DNA, 798 bp, Zea mays
ggtgaattgatgactagatccataaatttcatcatcaacaagctctcgaagccgccggcactggccatggaggaaagcctacaaaggactcttctccgagcacaggccatcgacgaggaggccatggggcggcacatcacaaatcaagctatgatccagcagctaagcatgctgagagatgccatgcaccgaggctcttacacacttgacgccttcaggtacgagcctcactatggagaggatgacagcgatcaagttgtgagtggatttatgtccctatccaaggcaccctttgcaaaggatcaatatttcttcagtcgaactgcacagtttcgggaacaactacaagaggcacttgacagattgggctccatgattgttgatctgaatgagttggtgatgttcttggcgagctaccctcgcatgcattgccaaccttacaacatgcatatcctactgggtaactgcatgttcggtcgccagatggaagcagaacttgtcattaaatttctgctgcacacacagcttcatagttctgaagaactggaggtgctgccaattgtcggtccacccagagtcggcaagagtaccctaatcgctcatgtttgcaaggacgaaagagtccaagatcatttctcagaaatcgtgtggctgaatgaccttgattttacagatggagagcatcaaaatcaagtgtcaaactcgaacaaagacaagagattgctagttgttatagaactatctggaaatctgtatgaaggtgcttggaacaggttctatcttgctttcaaacggagc

SEQ ID NO: 1461 - DNA, 789 bp, Zea mays
atagctccaatacccttccctgaagcatcagtttctatggagaatggcttgtgaaaattgggcaatgccaaaactggtgccgaggataaggcttgcttgagggcttgaaaggcagtatcatgatgagatgtccacacaaagacaacattcttccttaataattccgttagaggcttggctagaactccaaaattcttgacaaactttcgatagtatcctgccagccccaaaaaccctcggagtgctttaattgtagcaggtactggccatgaaaccacagttgctactttggaaggatcagtagagactcctccacgagctcctccatcagtgcgctcgctggcggcaacggcggatcagcttccatggttggtcaggtgggtcccgactcccgagcagcgaaggcgggcgccggagcaggagaagagaagggagtgggagaatctgcttgtctgcttcgtgctgttgccgttgacgctgaggctcctggtggggccatatgagcagagaaagagacttggtcgtcaaaccctggccgcccaaacaggatccaacggtccacatgacctccagcccggacagacgaaatggaagtggaacgctccctgcctgattcagctagttttcccaacaaccgggcatgctgacaataggttgctcaatattctgctaataattggtgtgagtcttttatatagaccactaaaaatagagaaaaacagtcatagatgttattggctttcatacaccaaccagttcagctcaaaagtttctaaaatgtaccagttc

SEQ ID NO: 1462 - DNA, 757 bp, Zea mays
atggcgagcagaatataagacgggcagtccctcttgctcttggtatactctgcatatctaatcccaaggtaactggataaatttatcttgtacactaataaatctctgatacgtgagatctactggatacattttttatgagtgtagtttaagaacttcaggtttcaagcaaaactttatgccccacatggaaattttctgtcctagttgataaattgctcaaattatgtttttatgcttaagaaatgtctctaatgagaccatcctaatggaattactgtgtgatagtgctaactatttgatgcatttgcatcagcattcaaacacaaatgtgtgcttgcattctagacagctgtttttcccaggaaaaaaatgtgaccatgaaacaaatctaccgaaagtcacgtctatataagttaactttgttttattgtgcctgtaatataagtcttttcctaatactcttggacccagaacccgtcaagttttatccagtgccatattaaaaatatatcatatcatagcaagccagatttactgccgtgcctttgtacaaatagattctatcacacgtataattttttgcatggcgctgttattaatggccaaatgaccaactcttcactgcaagctgtactccatctaattccatcacatgttggcttccatttttttgtcagaactctactattttaaatagtgaagattatatatggtatggacctgtaacatcaaccccctgttgtcaatacatgtg

SEQ ID NO: 1463 - DNA, 670 bp, Zea mays
accgtgaacggcccgcacgcagcgtacacgtcgcactgcgccttgggccccgcgtagagcgtcagccagcccttggacgcgccgagccacacctggtgcttgttctggccggtgacgtcgacgaagttgcgcgtcacggtcgcctcggtggtcacgttgaactggaggtactcctcgctcgcgtcgtcgacgaacgcgaggtggaagttgggcacgtccccggccatctccgggatgttgctgaagtacctgccgttccacgcgccggtggcccagtaggtggtgacgggcggcgagtcgcagagcctgagcacgagctggggagcgacggggtcgacctcgaagcagtagggccccggggacggggtggccgagctcagcctggacacgaggcggctgctcgcgcccgtggccctgttgagcccgagcttggcgctgggcagcagcgtgtcggtcgggtggtcgaagctctgccacagcgtgcggcgtggcgccgccgccgcggtggagctggagttggatgcgtcgaggaggacgaggttcccgctgttgaggagcacgggcgaccggccgcggcgggtggttgttgttgggcgttttgggccgggccctgggcgggaccacgttcaaccaactttggttgggcgtttggtttcaacgaacgggccaa

SEQ ID NO: 1464 - DNA, 732 bp, Zea mays
ttctcgtctcgagaagtaggggaagagatgatcttcacaaaaatatccagatgggtctccctgaactgctcagccaattcttgagaagagtctttcgacaaatggaacattaagtgcaacgcggcgattttgatacccacattcttttctgtcaggaaaggtagaagcagctgcactcctccattttgcctgattttactcctggctcttttagcattcgcgtgcccggaaatgctgttcaaggccctcaggagatgaagttgaatcaccggactcgataaattaagaagcgagagcatctgaggcgctacatccttatgaagtagaatacgctcagattgtgctatagctgcgagtatagccgaggccggctctctgagggccatgagtgctgacgtcacggagaaaaggagctggagcagcggtcctgttatgccagaatttatcaggagttctgcattctgtagagagctagagagattacacaaggcgcctaaggccgagtgcttggcttcaaggtttccatgtttaaacatgtccacgagcggttcaatagctccatcctcgccgagggaagatttcatatgttcagataggaacattttcgagatggccgttgccatgaggaccttgttcatgtctgaacctgcaaacgaaacaggagggcggaagcttattaggtgatggtatggttagatagagtggagaaaattgcattctacattgaattcc

SEQ ID NO: 1465 - DNA, 777 bp, Zea mays
gagattgtatgccaggtttgcatcttcatttctataatgtgtcctatggcaacaactaatatgcaatcaggtcttatatgcaagcgtgaaagtgatgttcctggttcgttagattatgatccaaccattgtatcacatttaacacttaaacccttccaccatcaactcgtgtagatttatagaaaaccccctatcaaaccacgatcatgtctacagttagatcatgatctaacggaccaagacgcttgtttgcacgcttgcacataaggtctgattgcatattagttgttgactgtgtcctataccatatttttattagtactcagtactctcatacttaacctttcttttctacagttcttgtttggaattctcatggtggtttatctgcctagcttggatccatatccgggttataccccgatcaggaatgaagtgttggttgataatactgattatgaacctcttcctggcggtgagcagatttgccctgagagacatgccaacatatttgccagtaagtgaatagaatttgtatacggacagaattaaatttctaccactgttcaaataatgacaggttttgctatcttgtgactttgctaggaatattcttttcatggatgactcctttaatgcaacaaggatttagaaggcccattacagataaggatatctggaaattggatagctgggatgagactgaaactttgtatagccagtatgttttctcattttcccttgttgaaatgctaaaaacttgaccttgcaaatttt

SEQ ID NO: 1466 - DNA, 801 bp, Zea mays
gcttgcatgcctgcagcagcccaacttgttcagctcggttaaataagaataccaaaatatccatgaccaagataaacagaaaaggggacaaaggatcgccttgtctaagaccacgtcggtgaataatagtctgtccaggcagtccgttaagtagcacctgggatgaagaggtccatagcaaaccactaataatgtccctcaatatctgaccaaaacccaaatgttgcagaacttcgaggaggaaaggccatgcaacagactactcgctttctccatcaacataagctttctcgaatcctcctgaagttagatatctcaaaggcatttgtttcatttaaacactctagaatccatgatgctgccaaattttgtggtgctgaagatactttcaagcttcagctctcgatggtttacgagtaccttaagcaaagacaaaacagagtgtctgttactccctcagtgtgcacatctcgctttttgaggagtgaaaccctttcaaatttgaccaaatacatagagaataatatcaatgtttgtatcttcaaataaatttattatgaaagtatgttctaatgtcaatctaattatacttgctacactttggggggtgaaaatgggttctaaattttacactaaaatttaagaatcagatcggattaggatcagtctctatttctattcatttttgaattaaaattaatttagtgccctaacaaattgtgaagaatcatttggatcatgatccattaccgcccctaactacacatcataaatatgtttacttttttatatatacaatat

SEQ ID NO: 1467 - DNA, 802 bp, Zea mays
tgatatgtgaaaattgcaccatactgacgtctagcagtaaacaatacatgcaacaaaaataacagaaatacttccatatttcagaccattatccatgctgcatcaccatgtctaatgaagaacatgaagttaagaaaatacttccaaaaatttatggaacttgcacatccagaaatctgcacaaacttgcatatgctaagaaaatacttccaaaattttgtattccagaaattttagaccattatccatgctgtaaaattgttccaacttcaaatgcttcacagatgaacattagcttatcagaactgatcatctcttcagcactcaattcttttgagcctcatctaatgaaggacaaaaaattcaaatataagcaaagtcatagtcaaaccatacatgtagtaatttgtacatgcacatttagatccatacaacaagcatcagatactatccatacaacaagcatcagatatgatccatacaacaagcatcagatatgatccagctttttgattaaaacaaaagagtgttaagatttattaaaacaaatcattatcattagggccctctttagttaggctttgaactaaagattgtttttgatctactagaagactcacaacaccctcgccctgttttagctgtttttttctttaaaaattgtcactaatggcactaacagctagaaagaacagctagtacaaaaggcttgagaatgtggcctcctaatggcactagcagctaaaaagaatagctagtacaaaaggcttgagaatgttgccgcctaatggccctaacagct

SEQ ID NO: 1468 - DNA, 791 bp, Zea mays
acgtacctgacccttccgaagccggtctgaagggcatttcaatgcatcttcaagaagtgagataactgtcgcagaataagaaggatcaactcctgaatcagccaaaacataggctttcagaaagaaagcttcaaatgatctttgaatggaaatagattcttccgctttttgtagggcctccccatagtgccccgtgtcatataagagccacccctcatatactagtcgttcatgctcagttgctgcatgatgccttgccaattgcaaactgcgcatcgctgcctcgggacagttcaacctggaaaagacccaaatatcaagcaacacatgtcattaaattggtgaccaaaacagccacaacagaatatcagagagatgtactagtagactttacctaaggagcagcaaagattgcctaaagtagaggacaccttttgctgcatctgactcaagcatccgatagatcactgaaagggagccaatatcatcaactgatgaccagcgctcataaagttgtagccaacactcagccgtattccactgctcgacatgtgcaccaagaagagtgcctattttggaagcagctacacgtccttccaacatccgataatcaggtgaaagagtaagaatcgcatggatatcacagatagcagacttatagtcttcaagagccaggtatagacagatccgtagctccaggcactccaatgctaacttgaaacccaagagtcggttaatttcctctaaggcatgtttagcatctttttttctcatcaagatgcagctcgatc

SEQ ID NO: 1469 - DNA, 751 bp, Zea mays
aaagcgaaagagcctaggaagacggataatgtcctgcgatcatgcgtcatgggacatataactagagggaaaagacttgcattaggatgtactcaaatacagtagtaatatgcgtccactctgtcttagcatctatatttctatctcaaaattaataaaaagatgttagaaagccaagctcaatgttgactaataaatacaaataagcatggcatttgcagaaaaatagaattatatagatggactctttgcacatcagcaatatactgaacttggtgcacattccagtgaagatttaagtgactggacattagttatttgggggaattgtatggttgcccatactcaagaatgtagcttcgtttttacctatgttttttaaagtttgcacgtatgtccctccttttttgaaacaaacagacaacgcttaacggtgttaactcagcccataaaaagacgttcatacctttgtactatattccctcttcttttattaattttctgcaaatttgtcctaagttttatatgaaagtttaggatagaattgtgacataaatctgaccataagggctagtttgggaacaccatttttccaagggattcctattgtcccaaaggaaaatgaactaatttcccttgaaaaaatgaaaatccctcgggaaaatgggggttcccaaactagccctaaatatcaatattttgactttgaatttaaaaatagttcgaaaatgatgaagatgtgaatttgaca

SEQ ID NO: 1470 - DNA, 1291 bp, Zea mays
tcttgcatgcctgcagttcctcagactgtcaaacatatacttcagtgcagaaagagttttggtggttaagagctgtggggtagctgattgaagcaagaagcctagaatagataacccagaaagaagatacatctgttgctgatttgacacatttccatccagaacagtagcaactagctcaatgacctcagccaccaatttatcattgacaacagatgtatggcaacatttctcaatatcacttgcagcatcaaaaaattgagtgaagagtgggaaaaatacggagacaccaccaacacagtaaataatatcctgaggcaagtgtcgtgagcataactttgtcccccccataattgttgcttgaaatgtatttttgtcggcattatcgagtgctgatgacacactgaacaaactacgaccttcactagcctagggacaaggggaaaatacaaaatatattttattagtaaatctgaagatattgtcttttttttctcgaacgcgcgggaggactacacgtcattatattaagagaggaaaaggtccaagaggaccaaagtacaatgcctgtagggcaaactgaacacttgaccaaaatctagaccctactcataatagcaggaagaccaaaacttgctagctgcttagccccagccctatcccagcaacttaactcattcagaaataagcttttaacaaaacacagggaagggtttacaccatcaaaaacagctttgtttctagtcagccataggcaccaagaccccaaaataatgagactgttgaagcctttctttctgattttgggcaccttgttaagcaccttcctccaccaatcagcaaatgagatttcaacaacagcaggaatgagatccccaagacacaagggaacaagaatagcatgccaaaattgcctggcaaaacagcaagtacacagaagatgttgcactgtttcctgctcttggtcacaaagaacacaaacaaccgggtgttgcagtcctctcctccttagtctatcagcagtccaacatttattccttatcgccaaccagaggaagaacttgcactttgggggagcccaggatttccacaaacgtttccatggctcaaacgaaattgaacccatgaaaaaagcctttatccctcatcactaggatcagaaattttattcctcaatcagaaattttaagcagtaattacatacactaggatcactaaaagagcaccaaagaatacccatgttccctttatttaatgtaatgtaacgtaaaaaggaaattttttgaacttg

SEQ ID NO: 1471 - DNA, 767 bp, Zea mays
aaacatcatcgaattcaccaaatccttggaagaacttgtggggcatccgagctacctcatgccactgtctttcatggagctcccatattcctatgcctttaatgatatcaggtctgttgtgttttgcgatcccaccaaccagaaccagcttctccttcaagtttaccagacggccacacgtgagagaacaaggtactgagattgacgtttgcatcaacgaagtctcggatggttcaccggcaaggtcatacatgataaggccatgacgggggttgacattgccaagagcaccagtggaatgaatcaagcagtacaggacaccgtcacatatgacactattatcacctcctctccaaccaacgaacacttccctcacagaagttacccatgaaccactcgatgagtcgtacttgtatactgaaaagtcccatcggacaaaatcttcaggaatctgcttagatttcgccaatgcaatggagtacttatgggacagccgatccacattcatggcaatggtactgtagtctggcaatgtctcaccgggcggctctaaaagcctcctggagtgctttgttatagggttacatacagaaatggtgttcctgttgtcattgtccatgaagcaaactaggccacaagaagaagagataaagcagctgctcttgtcaatataaggaagctctaaatcataccacttgcggaggatggggtcaaaagcataaccagcagcagttttattagaggtgaacatgaagtaccatggcccg

SEQ ID NO: 1472 - DNA, 814 bp, Zea mays
ttgcatgcctgcagagcatgcgctattactactttctataatatgccataatagacattaacatgatgttaggattaatatttctcaacacctgattctacttttatagaaatttggtgtgatacttttcagtaaagcaactaaatttagtttttttttggtaggctcttgatactttcaacacagcagttgtatcaccgatatactatacaatgttcacgtcactaacaattttggctagcgtgataatgttcaaggtaacatttgttttctctttttggtaacattcagtgcaatacattatacatctattgcttgcttttctatgtgcaagttgtttgaaatggaatggaatgttcttgtttagactaaaagtataaatggaagcagcttctagtggttgttacctacagcttctagtggcaaaattagattatcctattcaaattttatccttatactcaacatatcaaattttatgctcaacattttttcaagtgtaatcttcatgtacagatagaataaaagaaatattacaagggataaatgggccctgtaaggacaggtagaagttaggagttgaatggttaaacactttggttgtttctcattaatttctcaagtccttcaatattaacatcatatgctgggccctagaccccagtgtctttccacttatctgtagtacgtcagatcatgctgaaacacttctgcttgcttcaatatgaacctgctacagcttttttttaagctagtgtgcaccttatttccattatcacaatgaaaatacagaagtctgataccccagaacaaa

SEQ ID NO: 1473 - DNA, 769 bp, Zea mays
aatgtcgctatgagcagtaaggacttgatttccaacagtgagcttggaaacactgtttttcttctttctgtaccttgcaaaggaatggaacaacttagaatttgcatctccttccttgagccaagaaattcttgatctaaggcgggcaatggtacgtttggttgaggccaaagccagagcaagcttcttcaatttatttagcagccacctttccaacacagacagaatacggccatcctgcgcaatctcaagctgatggatcaaatctctagcaagatgcagttgagtctcaatgtgccccaccttcttgctgctccatccttgaagggctttggctgtccctttgagttttaaatcaaaagtggagaaggggcagtggccaacaggaaccgaattccaggcgctgtgcaccacatcgtggaatccttcaattttcgtccagaatgattcaaagtggaagcgccttttatcacctttgcaatctttgaaacccaataataaaggacagtgatcagaatcttcagaagccgcactttgtaacactgcaccaggaaacagctcctcccaatcaatagagcacaggactctatcaagtttgacaagagtaggctgtttctgctgattagacaaagtaaacttgcgcccatggagtggaatttctttaagagcgagatcatctaccaattttttgaatcgacccatcatagcccgattaatatgcgagttgtttttatcctcggcatgcaaaatgagattgaaatccccagta

SEQ ID NO: 1474 - DNA, 730 bp, Zea mays
ctctctttcccgtttcctacgctgcaaccaaaatattgtgtctccaaacaggtattgggttgaattgatgtaaaatatactatagtagtatcatggcattcggaaaactgtgatattataaaccgtggttttaaaaaaacagtgttctcaaacaggccctgggatgtatcatagagatatgctatgcgcaggctttcttttgtattagttgatagatattactttgaggagagatcctctgtttcacttgtttattttcttaaactgtttcaccttttaagatctatggtcatgggtcatggcgcaccatactcatagagcttatgtggaattattatggccaaaaaatataaaaaagatggaatttgtgacataggattgattaagagtgcaaatactatgtctgtttattaattgcctgaatgtgtatgaaccatgggatttttatggagttctgactcgattccttgtgtttaatgttaggtaccctaatgacagttttgatcgctattggcagccatttccagacgacaagcatgctgtcagtagcacccaaaatgttacatcagccgacttctggaatcttccccctcctgatgtgtttaacacagctttcataccacaacaagatgcaccggttgtgttacaatggccttcaatgcctctccaaaattatagctattatgttgccctttacttttgtgatacattgctgataattaaagacctt

SEQ ID NO: 1475 - DNA, 549 bp, Zea mays
actgtaactgctgatctccaagataagtcagagatttgtgatctgttttaatcacaaaggcacccctctgcaaatattgtctccacctgtccactgctaggatcagagccaaaaactccttctcataaattgaaaggtgtttgttcttctcacccaatgccttgctgatgaaggctatgggcctgccttgttgcatcagaacagcccccaatcctatatctgaagcatcagtttctaccgtaaatggcaagtcaaatcttggtaaagccagaactggagtagaggccatagcttgtttcaagttttcaaaagctatctgagcttcttctgaccatgcaaacccttgctgtttttgcaacagccttgtgagaggtttagccaacaacccatagttcttcacaaatcttctatagtaacctgtaaggccaagaaatcccctaagctcagtgacattcctgggctggggccagttcaacataacctccattttactagggtcaggacgtcccccttctcttgataccacaagccccacttcctatttttagt

SEQ ID NO: 1476 - DNA, 742 bp, Zea mays
gcgctgtagttcaccgccgaccgggagaaggaccccgtcgtcacgtagcaggaggcgcaggagcccgccatgttcatcagcccgatcgccatcatctccttgttcccgtccacctggtagttgttgatggacgcaaaggtcctgcccactgcgatcccttcctgcaaaaaatttttgttcagtttttttacacatctctcgatccttcagctgcatgcagggtactcaaaaccaaatcttttcatttctcttactgttaaggacaggatgcctgtcatgatcccggttttgatcgtcagcgccacataggagccgctgaagctgagcatgttcgccgaaggagggttcactcccctggggaggatgccgatctgtgtttacacacacacaaaagtttttttacagagatgaactgacgaataatgattggtgaggtctcaatggaactgaagatgcttacaacactgatgctgggggatttccagatgaaggagaggatggtggagatgatcaccgacgccaggggagcacctgctgatacccagaaaagctttggattcctggcgctctgaaaacaacaacaacaacaacaaaaaaacgattcataagtttgtctgtcattcattggtttgtctgtcactaattcattgcttttataatcacaacagggcaaacagttggctttgcgtactgtaaaactagagatcccggaatttctttgcagaagaatcgtgtaaaaaac

SEQ ID NO: 1477 - DNA, 770 bp, Zea mays
gcacctggaaagatgtcacgaggtacgtatgcattatgcttagctttgaattcttggattgttatttcttgtttgactttatttcatgtatatatatccacatatacaaattcaaataagctagccatgttttggtctaaattgttcgagctagcatatccatggaccattgcttataatatatatctaaccatgcatatcgaatttgcataaactatatatccgtcattgttttggtctaagaatctaaagcttgaatcttgtcttttaaataaggaaatagtttcaatctagacatatatgtgcttgagcgatgctttgaacaagactaacatgtatgatgatataaatcattttccttccattttataggcaatgcatgcaacgtgatgagaggtggttgtgctttgaagtcaccgatggttaccctgctaccgaatgaattaaagcactaacagccggagatacgcgtgacgcatcaacttcaagtttgtcgagtgctagaaatagttactatacagttctttgtttttgttggatggccaaataatattataaactaaatcgttgtttttgtttttgttggatggccaaataattttgctcaccagttaagccggttaaatattaatcttgtaacatccggttatacatggacatgcatgcagttgccctgaggggccatctcggaggtagtttccttcggggaaaaaaaaaacctaaaatttaaatcttagtggtgtttagtaaacatgaaaatcatttcttca

SEQ ID NO: 1478 - DNA, 745 bp, Zea mays
tgcatacctgcaggctgccatgccatcggtatgtagcatccagcaactcccgcccgagcccgaccccgaccccgacccagagaattctgataacccagcacctcagtgtttccaacctgctcgtcaacatcccagagatcaaaataatagccaggagacgcacgaatcagtagaagtgattattgaaattcgacgatgaatagaaacattgacatgaatgtagaaagctaagcgacggaggcaaatatggaacatttcctgcaaccaagcaccggcgttttcttattagggctactgctaatcaattagtcatgtcgcccgcagcattgtctcggtatcatgacgtttcatctcccaattcctttgtagaggaaaaagaaaagtttatgtacgattcacgtagtaggtcatcatgttatattattgagaatctgaggcctttgagatcattttgatgttgtaaatatacattgtatcaatattgaataacataaagggtcagagctgcacaaatatcttccttgtgatttctaaagccggtgatgcaaaaatcaccgcatctctaaaaaagaggtggatgtcagttattccttccaccataaaattgtaaaggaaccaggatggcctgagacttgaatggaatgaaagtcagggccataccaactgtcgtgacgtgctagctttccagattttgctcactgtgcaataacgcgccacatctttcagcagcctgcctgtcaccgat

SEQ ID NO: 1479 - DNA, 735 bp, Zea mays
gcatattttactgaaaaaggttaagtttccctcacttactagccatcccttgcaagtcatagttgaaacatcgtggaaaacaaatatcttcattaattggaggctcaaggatggacactgggctcggttgctcaacctcttttgagcctttacaaaattttgtaccatcagtatgatccgaaacagatatcgattcatcctcgtgacaatggaaaggcaatactgtcacctaaaacacagcgggatacaattggatgagtataactgagtatgcagcggatacttcaaaatttaacatgattacaataaacaatgaactaataagacctaaaaaaggttatcctttatatttaaggttccaaacatatctttacgactaaaaaaccgaactggacctgtccaccacccctggtgaagccaaatgtgtcgctctgcctcaaaccattttttttcgccaacatgtgggcctcgcccatcctaaagttacagaaactcaaaccgagcctagccccatccgatgacacaccctgcctccatgaaccactaccatctgttagagcttatgtgtactgattagcgtaatgggctgcgatatgtgggtgttgtctataagtaatgtaatgggtctagacccaactacctctattattaatacatctcccaacccctgaggaccgtagacctccccaggctttgctggtgccgatgcatgctgcctgtgtccagacctaggag

SEQ ID NO: 1480 - DNA, 784 bp, Zea mays
accatcatgaaaaaggaaatccggtttaggtatatactgtttacttggaacggttcaccgcgacaaataaccaaatttaaaccacgtcttttagcaatggtggaacaagggcatgatgctagtgggtgggcaaacaactacaaggcttacctgctgaacacgcatttgccgagcttctgcgttctgagcgtcacggtcagcagctgatggatggttcgttaacttgtgaggatgagtaaccgctcctttttggaaacaagcgttgcacacgtcaaaatctggacagatctcacaccgccagctttgaccagtttcgatatcatggcagcaggcattgcacgtagtgacaaatgctggcgcagttggattgtgcaggtggtatagcaccataattgacgaatgctttgcacggcgaagcgtgtcgtactgataatgatttccttggcaaaggctaaggaatgcctgcctggtgtcaaagaactcgctttctaagatgtcatctctatctttggtatctttgggcaccccaacaatatcaacctagaaaagagagaatcaagacatatcttgagagtctatttgctccagctctatactgagaatgaaaagggtatagtaccggatggagcatatgcgtgtctctactattacacgggtgcctctccctgtcttcaagttgctgttctgcgtcataacacctggtggaccaacaaaatattcaatgtcaccagaagaacacaaacaaaaattatatagcttatccatcctgaaaaactctatacac

SEQ ID NO: 1481 - DNA, 759 bp, Zea mays
aatatcaaatttgacagggctcataaaaaacaactatccatgtgtctaaaccttgacttgtgatttctattgttttcaattttatcctattgtaacttgtctgggactaaatgctttgttgtttttgaaaattaacagtaggggtgaacccctactgtgataagatttatagataaaggagttcaaagactgtacatggagaaggctttgttgttgttactactaaaacacatatgaacatacagtgcaagggattgatgacccactaagctcaggcactacagatatgttctactgaggcctactcaaaagctggtcatttggacagcgcatggacatatcgattaatcatgcctttagactgggctccgcgttttatagtgaatggcctcctttcactatcaacatcgaagaaaaggatgcatgaccaacttgccaacggacatggcgatcatttggcacaggattgatagcaggcacatactaatgacaattgatgataatctagtaccagaaagtccaggtccagtcataggttgacagcacgtttttcttgaactagtaaggaaataaaatgcttgctagtaccacctttttctttagcacaaaaatgcttattaccttgttactgaagaacaccctctttcccggcagttccctggtggactgcacccaggagttgcaggcgaagtgcaccggaccacacggcagcccaccctcgacgacgatgcttttcagaaagaactcccgatggtgccg

SEQ ID NO: 1482 - DNA, 782 bp, Zea mays
cgttcagcgatcatctaaacaaagaggtccagattccttcatatatgacatcgggaaaaaactatatatacaacaattgcccggcgatagcttgtatacctccgcgggagaagagaagcccgcgaagagactagctagacggctgaaaccacacacctaaacgtggtttctctcgaaccagttaacaaaaaaaaaaaagccctatgcccctatcaaagagggctttaatttatcatatagctctaaacacatttcgaatccagcatctctctcattgtacagtcccagcatctgtcatacttcggttaacttcaagcgtggtactacattcattgcatgcaattcctgaaacagaaaatcaaacacaatgaaatctaagtgaacatatggtaacttgctttacgaacagtcaagcgtgacgtaactaaaataccctacatgtactgccaggattattagctaagacgaaattcctcatagtattgactttacttttcccctaccaagaaatgagatctatcatttacagagaaggctaaaacaacatacattttcattctgggaactagacagagtagtccctataagagaaattagcaatttcaataaaaattcagtcacaaatgatccgaggcataggacgtatactactgttcctaaattttgtggcagcagttaaaggagtcttagaaaaacaattaaataaatcaggttctatgattgaagcaccagtacatttcactcttttgcagtgcagttaccttggaaagaaactttgcagc

SEQ ID NO: 1483 - DNA, 794 bp, Zea mays
ttgaaccgaataacatgaataagcagctttggttgcagatactcgtgtaaatggctataaaaggctattaaatgcagtattgaagactatttaagtgtgtatatagccaatagttcataccatcaagatcaagtacaagagtcatagtaggacaactccgggtctgctttggaaggagaacaggacgaaatttggggaccaccatagataaatcaggtaaatctttgataaaggagtaggggtcaaaatcatcatactcttcagtctcctcagcttcaccataaccttctgttgaggtagaatcttgactctgttcatcaatgcactccaacttagactgctgcatagcaagatatattgctgatacttctgaggaaaggtttcccagttcactgtactcatccacttcaagcaatgtgctttgcccagctgattgcaactttagtgtgccagagtggtcatttatcccatcatgagtgttgcatgcaaggtttgaaccagattttaggctagcttccttactaccatgaacatgtgttgtttgttcttctaagcctgcatgatcaataatcaagtaatgaagtaacaaaaaatgcaaacgaaaccagcacggtatcataacatgcaaacagaatgaatgatgcaccaaccatcaacaacactaccaaatgattatttaggtataccttgggttcaaaaacagagcagctcagtgacaccatgaaaccagccatgagaaaacacaaacaaatcaataagcagagtgtaccacttatatgttcctaacttctagg

SEQ ID NO: 1484 - DNA, 782 bp, Zea mays
tcttgcatgcctgcagggagcgccggtgctggggacggcggcaaggtcgggctgccggcgcttgacgtgacgctcgcgttcccgcaggccacgcccgcatcgctcttcccgccagccggtgagatctctactctttgccgcctccgctctcgcggtttctgtcgtatgtcgtttagtaatttggttacatgcgttctttctggataggaaataattgttcgatcaaataaattgtgattgcgtaagcgggatcttgttcttttttcattggagaaatgaattggaagcattgtctgcctcgttattttcagagtggcggatgcataattctgttcatcatttttgcagtacagtaatcctctctaatccttttgttgcttgattgggtgacgagcagagctccagcaaaagtgaatttaatttgagcaaattttaggctagagttaatatatttaggtttgaacaacataccttattatagatagataaaagctagggttattaaatccacctatttgggtttgaacagcacacctaattattcagcataacagtctaaggaaatatttcacatatttcactactgaaaatcatggtgtatgggtgaggtttggggttttaaaaatcccactttgggtttgaacaacatacctaattattcagcataacagtctaagaaaatatttcacttctgaaaaccatggtacccgtagatcgacaggttgagtttttttaggagcagaactccaagtgtgtacttgtctccaagatgtgttgagggc

SEQ ID NO: 1485 - DNA, 775 bp, Zea mays
  unsure (1)..(775): unsure at all n locations
cttgcatgcctgcagcatctcaatttctccccgtatgtcttcatagccttcttcctgaatgccagagatacatgcttatattttgaagacaaaaatgcaaggactcagaaatcagaaagcaaccacatttatgagattctcccacaattaagcccatgcaaacaaaaatgctcacaacaaaagcaatatggttgccaaatatgaaatatgtcttgggtagccttccggaatattcacagaactttgtaataagaagctagaaactaaccccttctgttaatgagatgatcttgacagccacaagctcctgcgttctgagatcccttgctttgtacactgcaccatatgaacctttccctgcatttccaattgaatttgcattgcgcaaaatagctcaaaatttcaggcattatacaaaaagacatataaagaactaatgaaataataattccagagcaagagtcgcaccaagctcatggagcagctcgtacttggtggaaggatcctccctggtaacactgtctggcaccgagctgaccgatggcttccgccttgaatgttgttgctgttgttgctgcatcagaggcgatggctgccggagctcctctgactgctccaccgctggagtccagaaagaggacccgaaacccccgccgccgccagaggcagattcatgggaactggagcccccgctggtgtggcgaatgaaggtgccagagaacgacccgcggnggctcgacgggctccctggccgcngatgaatgtgccggaagct

SEQ ID NO: 1486 - DNA, 754 bp, Zea mays
atgttccagcagcttcatttccttgtgcccaagctatagggaaatgcgctgatttttggccagcatttctgttcttgtcacctgaactctcttcgaaggaaccatagtctatgttctgaagtgccgttggaatctggatacccccaacaagtacttctttgctttccatgtctaggtcaatcttttcccttgggtttgtcacatccagcccaatgtatggagtgtagaatccagcttcaagtgcgccctcacctacccatgaacgaaaatcattcatcggaggtggtatcttggtaaagaacacttccgcaaagtttgctgcaatgctcttgcggtagggattgtccttcttgtcataatggtatctaaagttttcatatgttgtctgcaaaatatgtaggtactaactagtatcaatttaaaagattggaggctgtaagtattaatacgattagattatgcattgcaatttatggaaactttgcactactttgcattctggagatcgtaatcaacttaatattttggataacatattgttcataaccttcataaggaggtttatacatgtactgcatgtcgtaaaaatacatgttccccttttattttcgttatgtatgtagctcttgcaatctttgcatttcaatgaaactttaagtggagattttcccataccaaaaggaaatccaatcaaaatatttggtcggtacaaatccctgttgctttttttactagattctgttatctaccagtc

SEQ ID NO: 1487 - DNA, 989 bp, Zea mays
agcttgcatgcctgcaggctgccgccctgatcgttttttcgcgtgtcatcgactcggcgtgtgcggcgcgccggcgtcttcgcgtctacgtctttggtgtttggccgcttgccgcttgggctttcgtggtggggcataggcaagccacagactatccattaaatattgggcccttaatttttttttttgggcccaggcgagcgcctctcgtgcatgggcatagggccggctctgcatagtcgagaacgggaacagacctggtcgggcctgcgttggccggtgccgtcatggatctcgtccatgccgctggcatgtggatgcgggcgagcggggccacctcggtcaccagggcacgagcgcgagcagctaggtcagtggagtcgatgcggagaagacatccatgcggaagggagagagagagggcgtgttcggcgggctacaagccgacactgttgcagctgtttggactgctgcagctgcaatccatagagagaaaaatactgtagaagccgcagccgcagccggattgcagccgcagcaagccgcagcgaacaagcttacctcaaaccaggtcttctttcttacctttaccctatgtgaatcgtgatcccttgtccattacagtagtggcgactggcgagtgatgtaacaagaacaaacttgtgatgtatgttatcccgagcctacaatttcacaggcacatgaaacagcacattctttttcatggagttgaggatattcatatcctaccgttttggttcggtgagatggtcgaaatagagattgccaccttgttaaatttttaactgacatggtcgatcttctgattggatgattacgccagtattttctttctttttcaccctttcggaccaggggtttgctctagaaaaaaaatatagctgtttaatttatttgtatcatctaagttgcaacagctgtttatatatatggcactctttttgttctaaattaaatatatagaggtt

SEQ ID NO: 1488 - DNA, 796 bp, Zea mays
atgcatgacctcaatccacatgcatgtacatatatgtgcgcgtggtggagacgacgacgacacatcttcaacatgtagataccagcctgtcagtgttcgctcctaaagctttgccgatggcaggcctgcaacatactacgtacttagtcaacaaaaaaagttggcatgacagaaattcatgtaattaatgtaatgaggagctgagccagcagtatatgtatcaagaaattgattttcatttatttgccagctggtaaagtagatgggagagccagggccaccaaccaatttgtttggcattaacgatgcttgggcaggcaggcggtggcgtcaaattctcctgcaagaagggctccacctgattggggttcccccacacagggtaccccttgatcttaccctgcaccaagagttgccaattctcgatccacatcagtaactactagtaataataaccatatatgcgtgcctaatcatgcttacatacaagaacgttgagagcagacagggttgccattccctcgcgtgtccactgaagaaaaacagacaagatttcatctcgtcagtcggccggccgcccgctactatatataaattctattctatagtagtagatatagagtaacctcaaaaatctgttacaaggaacgaagcaaaaccaaaaaaacaaacaaaacaaaatggatacggtaccttggaggctgatgcgatgtgcggtaccacgacggcgttcttcatgtcagcgagtccaggtttcatgtaaggctcaatcctgtgatgatgacgatggattgag

SEQ ID NO: 1489 - DNA, 721 bp, Zea mays
aaagcaaccacgagatcatgttcatgaaacaccaatgaccaaacaaatttaacaaaagaattttgaaacatacagatagtaaccgattaccaggcagcctgtctctccatcttgaatgatgcatgaaaacaatcaacccatagactccagtaagcacaagtttgtggagaatccataggccccatttcccaccagttccttgatcagcatcaatgaacaaaggaacgccgaagccaaaaacatatatagtctgaataagggcaaggtcagtttcataggcaagatagtatagtaggctacagaaagggaactagagtattaatcccgttttccccttgcaacatgatttaacacattgaaacgaggaaaggtgtgtcaggctaggttaagtcaaggggtcatgtctttcactgagcagccaaaaattcttttgcagtgacatgagatgagcgggcaagatctattatggatacaaaatcagtgccaactttcaatagccaatccactgttatggaacaatggaaataagagacgtattaatatattatgttcttctaataaaataacattactaaccagatatactagtcaattaacctagatctaagaaagcaaatatgacatggcatctccaaaaaatctagttgaacaccaaaaacatgcaagaacttaagaaccttaatacccaccacttataagagaagctaatcgctgttcacta

SEQ ID NO: 1490 - DNA, 811 bp, Zea mays
agcatataggtaaataagaagatggagtactgcggaattattttttaagaaagaagggaattgaatccgtagcaatccacgtactcgcatctgctaggctcatctacatcattaagctcattgctcagcccacatctaagcctaacctgcacgagtgtaaacaacagaaagagttagaatttagaacctgcaaccagaaagggcatgcagatagacatactacctttaggcttcggtcaggaccattccagcatttgtctccacttgaaaagtgcatcactctgtacgaatcttcaaatttgtcccaccgcctgatgataggaaattcgttttatggcataaggatgtgtggggaaaaaacataccgaacattcaagcaagttattctatcactgaaatccactttctaaatatcctagaaacagacatttgaagttatataagcaccactaaacatgagaaaatacgcttgtgcatacagcaaaacgggtaagggccaccattctttaaagaacagcatttcgtaaatccattatacaaaattcagaaaccagctgatattcgatgttatgtaaaacaatagaaacatatactctaaagatggaatgagccatagctagctgatccgctgaacttattccttgaattacattccctaacaacatccataaattagacatttcaattggcgtactccaatcgcatttgagagaaaaaaaaactcggctggtaggggaaagaccacccccacggtattatattacgaaagaagctcaattgaaaccctggcatttggtcccctccacatgaa

SEQ ID NO: 1491 - DNA, 815 bp, Zea mays
aaatgatgctgcttgggttcatatctctgcttctggctgcgacgtcaagaatcatttcggggatctgcatcgactccaagtactacaacagcagattctccccgtgcaccaaagaagaggtccaagaatcgataaatgcagagcatgccattgctcacgcgcgcaagcatctactggaggtcatcctgcaccattcaccgaggagaaatctgaaaactagttaccataaccatgaaggctgccgtgaggtgtgtaaatgttttaatttgcagatcgaactgtcccaaatagttgaagggtagccaaccatcctactaaaacttacatcagttttgcttcttttggtattcttataaagttcttttgatgtgcagggatatgagtcatttgtttcgcatgaaggtttggagcagctgcaccggtttatatttgtaatggctgtgactcatgtgacttatagctgcctgacgatgttactagcaatactcaaggttttaaccctttatcacatgaatagtatttctatctctttctttatttgcagagttccattttgagtacaaattggtcctctcagtttcaacccaaggcattatccctgatttttatagaaagcaaacccaaaactaaccccttctatcaaaatacactctactttcaattattgatctatatatcaagcagtgtgtcagtctcttgattacaaattgtaggatccatgatgaaacattagcattttgaatgcgctatgccacatgaacaaacagaacacttattttgcattatgttgattctcacttctcagaactgttatg

SEQ ID NO: 1492 - DNA, 789 bp, Zea mays
aatcagattgcattatttgattttgggcttgaccaagtgattggtacgtgtcgactgcatctattgttagctgccaaccagagggcgctgaactacttgagctggagccaatgttgttgcagcaagccgctgcaacattcccgttcacccatgggcagtaagtattgtgatgcttaacaggatcaaattccagcagacccgattcatagtcattttctccattagtagctcctgagaagaaaataacaaagtattatacaagcagaagaaatacaactgagcataatcaggaattaaatgatgttcatcatcatcaataacaaagcattttccccaaagtagggtaggctagagatgaaaggagcccagcatgaaccaccaccaagaaggagaaaaacttccattaaaatgaaggtttaataataaaatgaatagatagatggttaagggtatttgatggagtttcgcccagtctccctcttcttctggagtctgctaatgaggaaagagagaaatggcaagtagcaggagccaagggtttacccattttggctcctcctagccatattgtttagggttgttgagtcctttagggatagttttatgtacgcatgttgttggcctccgtaaggagtgtctgtacccaggctctttcctgccctttgttatcctacctttgattaatataatggggcgcagttctcctgcgcttttcgagaaaaaatatattgttaaggggggtcatggtattggatcatggcggaagggtagcgtaatggttaaggcttt

SEQ ID NO: 1493 - DNA, 540 bp, Zea mays
atcaatcaacgaaagagggttttcaatattgccgacccactgccagttatctagtgcctgtgccacagttctggaagaaaaggccctgcggccaaccatacgaaccactgctggggcaatgtcttggacagcactcccatttaaccatctatccgaccagaagagagtattagccccatttcctatcacagtatacacagacaacacaaataactgtctgacctgccgctgcatcgggagaaacagcccatgccaaggcctagacgggtctgttttttctaatcacaaccattttgcctgtactgcctagcttttaaattgcaagttaggaacaccaagtcctccataacttaagaggcctcgtaattatctcccaagacacaagacagcttccaccattaacatcctttcttcctttccaaagaaccccccgacgaattttgtcaatcgatttaatcacccacttggggatatttatagcaataagaagatagattggtatggctgaaagaacaaacttcaccaatgctgtccgaccag

SEQ ID NO: 1494 - DNA, 739 bp, Zea mays
ggttgacaagaaggcagatgctaagatggagattgctgggctggaggccaaggaggaaaagctggtgaaaggctgcatctttgggactaagaggaagttccctaacacagaagtgctggaggagtcgccgtatgttggtaaatttcttgaggagaggaagggtacatcagtttgtaagaatcctccatatatttcctcggcaacgataaggatgaatgggaatgtagcatgtacagatatcttggattatattctccagaaggtgagaggtttgttcattgtggaatttataagaattatttctattattgcaatgtgaacaaatggaagtaacctgaatactttgtctaacatgatctcaaaatttcattcacgaatcacgagtcaaaacaggaaatgttgatcaatgtgtcgctcacatgtgttagttatgtgctaaatttatggagcccttttttctaaaatatcgtttctatatgccatatttgaatacaacttccatgtagttatgctgaatttactgttgtttcacattttccagaagatacagttagtgatcacatccacaaatagtttggcatgtcatgttacttcaaacctaataagtatggatattggatgaaagaacctgttgtttttaaccttaggatgtatggatactggacaatcagaaagtattgtttctcacagtagtacaggtttaaaagcaactagttctcttatccctttatggatcaac

SEQ ID NO: 1495 - DNA, 769 bp, Zea mays
atgattagagaaagtggaaaaacaaggcggcgtggcggccagggccggaatcacttcacattagtggcctggtagcatatgcggacctcgtgcttctatgctaaggcccaacccgaccacactttggtaattttctgggccgcagcccacgctcctatctgtccctattttctcattttctgccatagtgtcagcgaaggagttatagagctgtttatatgtactggaacattgcaacaagtcacaagtgaacgctacgatgctgctagaagagagatgttcattttttttaaaaaaaaaaactatgtcctagctttttactttcagatgacatatagatagagacgcccaaaaataaaataatcattctgtacaaaaatataattctttctagctctcttttttcttcacattggaacgtgatgacaataaatatagatatacatataaattatatttataaattaattattgaatgtatatttagtggaaaacgaattatattttaggctggagtcagtaaataacaagatttcaaatttggctttggaaacaaaagagctgcattgagcatgttcgaccaaagcgcaacttcagtactaagccgtagccacaacgacaaagctttctcctctcacggagtgctgtaccgatgcgtactccagcgactgacatgtgggtcactttgcgttcgtgtggtcctggcctatgcgacaacttcccacttccctaccagcagacattcctcgcccccgtttttcctgtgccc

SEQ ID NO: 1496 - DNA, 790 bp, Zea mays
cccggcttatccggtaaagccgacctgcagccaggccgcttgtcccgccgggttttgcaaatgcattcgctgacaagaagcttcagtcacagtcgtctaacatcacacatgagccgaaggtgtgtatctagatgccgtttcaatagataatagaatgacagtaattacacacaaaatctcctaccttgcaatccttgataccttttcagaaattgttgtgttcattgaagatagaaccttcagttcttcagttcttctctccaatagaatcatttccttacgaaaagagggataaccccaccaatgctgtagtgatacttaatttgtttctactttgtagtgtcataatgctactactgaggctaacatgttgactattgcatggcttgggggtcagctagaggatgaccagtcagcaacagggttcacatctgaaagtaaagagaagggagtttctggtaacgatgctactatgggtccaaagcacacgcatccacctggtagtgttacctcttcagctgaattggcttctagcgttctgaaagggagcgaggattgggaagctgatgtaatggataagtattctattggaaaagaaggcaaatctaaaaatattgatccagttaggaaggatgattcagtagcaatcttagaacagttctttggcaatgttttatcgaaaagcggcagcaacctaccaacttatgttgaggtacaacaagaaatccttttttttttggccctgcttgttcttagtttcttaactgtgtagaagccttaaatctgtatt

SEQ ID NO: 1497 - DNA, 803 bp, Zea mays
ttaagtagcaccagcaacaacgtacatgtcacacaagtgtttcacacccttatggaatcattcaactattgcaatccggtagcagtgactttcacaaaaagtaacagaaaagggtgcaacttcaatagtaaggatgtttcctccgtatctttcctagaaaagccacccagaggacataaaataaaatggcctttgactagacgctgtcccgttgaaatagagaacagaagcatgatgcttaaactttgaacacacattttgcacttctccagccctttccttaaaaactgcgtgaaattgatggcctcatgataaaactagcatatatctcgtgataacactatgattccggagaggagaggagttgacggtagcgacgacagcacgagtgagagggcgtttggggacggcagggttgcaggggagggggatggatgagagatgatctaaataatattgttcattggaattgagtgagggagatagggttatccagcgatttgaactgttggttctgatgttgtgtaaagtatgtgtgcaatttgtttggtggatttagtgtatgttatgggtgtggggtgatttgattggatgattttgcaaaatttaaactgatggattatatagcggtatagatatagatgaagatatggtattttattagacactgctttgttgtgcctctggggctctgacaacacaaaatggcaattgaacattacttgtagaggaccgtaggaccttcatctttaatgtgtgcgctagccctacatggtaattatggttagagtagctcttgaatt

SEQ ID NO: 1498 - DNA, 750 bp, Zea mays
cctaaggttggttattgctgtttatcctatattatttcagatatcgttcgtggttatggaattttgaatgcgtaaatcttaactgtccttttgttcagcttaaagctgggaacggagaagacatttttacgcgcaatggcagatggaatttcaataataaggtcagcgtgcatagcacattcttgtttgtgtatatggattgtcatgatgtcatatgtaatatttggaaatttgtgtttcagaagctcattagagctagcagtgtcgagaaatgggcagtagtaaacttttctgcacgatgcaatgtccgggatcttgtccgtgatctcatcaagtgtggaggcatgaagggcattgtaagtttgttttctcattttgttgcacgtttctgtatatgttcttattcacttgtttggtactgtatttccacatgttcttatgcaattgtttggtattgcagatggttgatgcaccatttgctgtatttgatgagaatccttcaatgagacggtcacctgctgtaagaagggttgaagacatgtttgaacaagtgaaaactaagcttcctggagcacccaagtttcttttgtgtgttctagcggaaagaaagaattccgatatttatggttggttaatgctacttactcactgttaacttgtggtgcattttattttctgctgtagcattatgccattgacctttacagggccttggaagaaagaaatgccttgctgaatttgggatccgta

SEQ ID NO: 1499 - DNA, 726 bp, Zea mays
  unsure (1)..(726): unsure at all n locations
gcatgcctgcagccatcacttgtgacaagaggccgatcagcacacctgcaacttagtagggagagactactaatgtcgagttggagtcggtgtgagatggcagcgacgctgaggtggcggccttccctttatgtcgacacaggaggagattgggtctcgtttagatttgtagaagtcaagaaggtaccgacgaacgttgattcacgtatcaaccatattatctttttatttatatatggtgtgaaggatgccacaaccaaggtggatgttgcgccttctattagatagtaataattctgacttggcccccttgactaaattgaagagactaagcagcggctgacgctcgatttggtgtggtgccgaagctgccccatcttgcctaagcagcggctgacgttcgatttgaccgccacaacaacgacgataaatttatggcgtgctgtggcatgagcggcggccaaccaaacaagtcctaaaaattagctcatgtaaccaaacagctcttaattaaagaaaaaactgagtttggtggactcatttcatcagctcgcttttgtttgactagaattcaattttaaactgaaacaaacacgccctcttctccgtgttccatgtgaccgctagtgagtagagggcgtgtttgtttcagtttaaaaaaaaagacgcccaaaggttattccccaagcacaaacctttgagtctttgacacaccgncgccgggcc

SEQ ID NO: 1500 - DNA, 748 bp, Zea mays
cgccggcgaccaaacaaagccagctaggcaccggcaagggagcggacggagcaagcgcgcggccgatcgatcgagcttcagcttgagctccagcaagatggtgaacttcatcgaggcgcagaagccgctgctgtcacggttgatgaagatggccgggctccgccccattgagatggagctggagccgggcacgaccatgcacgtgtgggcgcccaagcaccacgtgggcaagaagggcaccaccatcagcccgctcgagcctaccgccgccaagaagaagaagaagaataggaagagccccgagtcgaggcccaacgtggtgctcatccacggcttcgccgccgagggcaacgtgacgtggcagttcaacttcggcgtgctggtgtcgcgctacaacctgtacatcccggacctgatgttcttcggcaagtcgtcgacgtcgagcgcggaccggtccccggacttccaggccgagtgcgtggcgggggcgctggcgcggctgggcgtggcgcggtgcgacgtggtcgggttcagctacgggggcatggtggcgttcaagctggccgaggcgcggccggggctggtgcggtcgctgtgcgtgtccgggtccgtggtggccatgacggacgcggtgaacagggagaccatggagcggctgggggccgggtcgtccgccgagctgctcatgcccgacacgctcagggggctcaaggcgctcctctccgtctccatgtacaggaagatgtgg

SEQ ID NO: 1501 - DNA, 777 bp, Zea mays
agtacgtcacttacgatgttgttgtccaggattcattgtgttcattgctgttgtttgggtcatacaagaatttacatctttccatgttctgaaatatgtgatcttattcataggtgagacagaagatgtcgtacaatcatgttctctttattttaatttctggaatgcaaattgtatgcttgaaatttaatctttatgtttatttatgtgcaacaggtgtgatgaacagcttattttcagtttacggtaaagaaacaaaaaaaaccttttccttattattccatgctagaataatccatgtgttactctcaatgaaatattctcaaattatatagatatttatgatgacttgatatcccgaagagttaacacaagtgatgctgaaaagtttgctgaaatctgcccttgcccctgcaatggttttgcatggggtgttatatggtctgctccaagtttcgatagttatatttttctgtataccttgatgatgtgttaagatattcctgatgtaacgacaccaatgctaacgttttctgttctttgtttcaggggattcatctcgtttatctttctctgcgcttcaatataccttggactggtcatattgtcttgaggtgattcctatgttttcatatcactgcatttttattctccttgtggtgacatggtagttcactgttgcactgcaacacagaacacaatcacacaggtgctactaacttagttgttaggaagacatgtcccagaactaaatatacattgcaacattttgggctt

SEQ ID NO: 1502 - DNA, 759 bp, Zea mays
cgcgagctgagtcttgggcgtcaaaccggagaccgagctactctgtttgtacatttcctgcgcagaacacaaaaaaatccgttataaaacagcagtttgcagacagaatgactgttaagtaaacatatacactggggaagcgtgaatggcagactaggcaaaagaactactgaacaaggactgaaggctacctgcacgacctgtattccaaaactggatcttatatcgtaagactcatcgtttccaactgctttctccaagatatctccttttgccgaacggacttctttcgccgagggaccagcaatacagaagctttgctcaggccttcaaatgtcaatataaagcatcattgacaggaagtggattaaaaaaaatctactatgaagcaagagggcagtacagatagaattgctcagaccttgcttgatcccagtaacgaatcttcaaatctgttcctccagttaatagatcaccacctggcaagggcagcaaagaacgtatcccaggatggcgtacaggtgggtcattcaattcatcgattctgtacttataattgcctgctcgccttatatctttgatgattggcttgttaacaggcctcgatggcgcctttgacatcacagcttcattgtcagtgcttgctgttctaaacatctgcatagtttgttgaatatcccagatgcaaatttagtgtttgacatgggcatatgatttagtcgcccacttatcaaagtgcaaatacttcttagaacatga

SEQ ID NO: 1503 - DNA, 740 bp, Zea mays
cttgcatgcctgcaggttacctgtctggaaatacttttgcaagtacacttaaaaatattccataacaaagtgcccatgtaaataaatcagataaaaaactatttgattagcaagctagtagtgaaatgtgacacttacaggtagctctcctcctgtgttatgtagtatagcacaatcatagttacgaagacacacgctgaaattgagagattaacaataaaaataaacttgagcagttccttagctccccataaaggctccaacaccttcccaaatagaagaagaccaactatgctcacaatcacctggaaacacggaagccttgtaagataagggtgccattgcctaaaatactaaataatgagccttcacgacattgtggtgtgatgcaatatcctaggtaagataggataatgagcaaggaataaagagaattcctagaaaactgatgaccaacagacaacagaataacatgatttcaaattaaagtacacatcaagaaccatatctcaaatattccacaggcataggggacaatataatgggaaacagaaaacagatgaaatatcgcagcactcctcacaatctttttcgtccgtagagttgttccgatgtttggttagcaagaaatgcaaacataatcacagaatggtgaattggtacattggactattggagatgtgctgagcaaacatacccctggaattgtttgctcaatgtaaccagcggtaaccaggttc

SEQ ID NO: 1504 - DNA, 779 bp, Zea mays
gctgcctgcagtttcagtgaagctgttgccgggcgatgatacgatatgatatgatgtaataggataccagtgccatttcccacccattaaccttaccttgcctctcttctaatttaaacctctgctgcaagggagcgagagagagagagagagaggagaggcacacagcgcgcagagagactagagagagagggtttgtcctcctgcctgccttggcttggctagcttggcctcccctccacctccatcggtgtattacatccgagggcactccatctcttgcgtcccttaacccctccaccaatccaatccaatcccttaaccccgcaccgaatccagacttcgaagcttcctcttcctcccggtcccggccccggccccggccccggccccggagccctgttcttggtacttaggacaaggtaaagatttggttttttcttctccccgtcatctggttcctcttcttcttcttcctggcgctgctgtgttactcagttagttttaatactcgccagacgctccgagaccctcgagattgagagctcgctcggtcgctcggtgtcttcgccagctgcccaccctccttcctgctcgcccccccgctcgcgcctcctcttcctcggtgagtctcggtttcttgctgttcagttcagccatttttcttcttcttctgtccgtggtgttccgtcgatgcaacgctaattaaacgcgctttcctcgcaccccttgtgcgcgtttgaatgcgagcgtttagcaaccaccaactctcatcaatt

SEQ ID NO: 1505 - DNA, 800 bp, Zea mays
cttgcatgcctgcagattcgtgtcttgcaagttttctgctcttgagatgctctgctgacgaaaggttggtttgtggggctcaagaaatttcaaattgctgtaataatgactctctctttctgtgtgcccacccccattagattctcctcgatttctgtgacacagatttttgaatactgcactgttctctaggattgggttgccgtttatttcatcatgctttctgataacattatccactttttgttttctcaaacaccaggggccaggccgagaaggagttcaaggtggaggtcgaagcaattggtcgtgttcggcacaaaaatctcgtcaggttgcttggctactgcgtagaaggtgcttacaggtatgttggcatattgctatctcttcttcattcggtccggtgacacctactctcagtttggattctcaataatggaagcctgattcagattcctgtcactgtcgtctatgcttgaacaggatgcttgtgtacgagtatgtggacaatggtaatcttgaccagtggcttcatggtgatgttggagaagtaagcccactaacatgggacgtcaggatgaacattatgcttggaaccgccaaagggtaattattctattcctcaaatttatcctttagtttgggatctgttttattctggctaacgtatatgaaattagctgcctacaagtttgtaggccataaccatttagaatttagaagtcagacgctagttgagctggcatgagtagatatattcatttttttttctttccaactgattggctttgttctgt

SEQ ID NO: 1506 - DNA, 708 bp, Zea mays
  unsure (1)..(708): unsure at all n locations
gcggtgggtgtggccatgccaactcgtgtgcgtgcgtgaagcgcaccgcaccatcaccacacgccatcaggcatcagcgagcggcgcggggcccacgggcggttggtgagcggggcggaccgaatcacgcggcctcctccggtcaggacccggggccagcgagtcagcggcaagctcagcagcaggaggaagggctgggccctgaggtgtttggtgggtacgggtcgctgtccgccacccaacccaacccaaccccaccccacccgttacatgctacagcagtacagcgctactgcccncccctcgcttcgcccgccggatccgaccaaatccaatccgacggcggcgggcctccagcactacactgcgcccgtgtccgctgccgacggggggctataaatgggccggagcgcggcccggcacggcgtgcgctgcggacgggtcggatctgagacgaggcgagacgaccccccctcccctcaaccggaacttgttttaccccatctcatcccactgactccacccacccgcccgctgcctccgccggatctcgtcggactcggatccgcccgaccaccccgcgccgccgccgtgcagcagcagcagcaggtgagcgtcccttctccttcggtaagctaggcgcctccgctggcgctctgcgttccggtgctcgcttcctctcccttcgcccgtagggttttgttctcg

SEQ ID NO: 1507 - DNA, 730 bp, Zea mays
aggcagtacaaatggttagttaaagcataaaatgactaaggcaaagtgagaatcctcataaccaaaagaattgcatgtcgaaaaagaccgatgtactcccctatataagggcaatgagatatttagatatagcaataactaaatgatttggtgatcaacaaaatggacacccaggatgcaatcaaacacactactccttttgggcgagaatggacagacacagacccagtgccaaaggctcagtctaaagaagggataagcagaggcaagccttcccccacaaatgcggaggggctgcttcaaacccgcaacctaataactcagtgagacagctctcaccagtgtagcaggcctgaccttttgggcaagaatgttttgtcgaaaattttcctattgtctcatgggataaaaaaaacaagcactaggctactaacgaagcaaacaaaaagggcacatttgttggcacacaccaaggccacagtttcaggttgagagattcttcacgcagagtcaacaagtcccactggcaaaagtttggcattcctgatccactcgtataagactatgctccgcatttgtgctttagtggataaggcaataggaatctaccaagcctcgacccgaatcagcacaagaataacaaaacgtgtaacaagattctaggaataaagcaaccgctcaaattattcttccaatgcatgttgcagggagggaaaagtagtttctcctc

SEQ ID NO: 1508 - DNA, 724 bp, Zea mays
aagagggaattgccggccagccggcggaccattgagtggaaccccaagaaagaccggttcctcctagtcatctgcatctccgggcaaatgtccaaccacttgatttgcttggagaagcacatgttcatggcagcgcttcttggacgtaccctggtggtgcccagccagaaggcagattaccagtatgatcgggtgcttgatatcaaccacattaatgactgcattgggaggaaggttgtgatcacctatgaggagtttgtggagaagaggaagaaagtggccatcgatcagttcatatgctatgcagcctcgcctccatgtttccttgatgaggaacatattaagaagctgaaaggacttgggatttctctgagcaagattgaggcagcttggccagaggatgcaaagctgaaggagccaaagaagagatctgttggggatattgcaccaaagttttcgacagaggctgaggtccttgccattggcgacatgttttatgctgacatggaggatgagtggctgaatcaacctggtggtccattggctcacaagtgcaaggcattgattcaaccaagtaggctcatagtgctcactgctcaacgtttcgtccagactttctttgggaggaaactatattgccttgcattttcgacggcatggattcctgaaattctggtgagatacacaagatcttttaacctgctgaacattatctatctgtggg

SEQ ID NO: 1509 - DNA, 796 bp, Zea mays
aactatgaccaaagcgtgtatggatttcgagaatatttcaagaagcatggtttcaagtattctgaaacaaactagatctgttgttaaagatctgcctcgagagtagtcatagggacttgagtagcatgtggaggcagttgttgtatggagttgaaatggcgtgaggctctaatggggggtcttgactagttcattcgagaatgcctgtcatgtattcatttgtatacgggctactgctcatgcctagagatttgcttttccgtacctatgaaccattggatttggtaatgttttacctctcaaagcccggagtgagcaatttgcatcatttttctccagcactatcgatttgagatttattgttactagcaaatgtgctcatgcgttgcagtggaatgtatgagttatgggtttaagtcccatatatacaaatatatgaagaaaaataatgatagcataaggccttgttccgatagttagaagtaggagggacgaaaaaatggattacatagcgtttggggttaattcatcaaatgttttgcaccaagcatcagcgagtctttcgtcggagatctgagctcatatgagttgaggacaagctaagccgacgcttacctttgagcctgtggtttttcaccagttatttacccttaccctggtgaaaacttgtgcaacgcttccaacttgccctttcccactatcgtttgaatgaagggaatgtcgttctttgccctactcaaaaaaaaaaaaaaatctcccccctttttggttttaaacgccccccccaacttttttg

SEQ ID NO: 1510 - DNA, 851 bp, Zea mays
acgatgatggagtccttccaggcccggaagatgctggccgacaggaacacgtcgatcttgtacaccaggttccccttctccaccgtctccgacatctccaggtactccgccgcgcaccgggcggccagcacgttgtaggcgttgagcgtcaccaccatgccgtagcagaacttggcacagacctcgaacgccgccgggccgcccgggatgtcggagatgtccacctcgtcgctgccctcctcgcttgtcgaggccaccagcgtttgtaggcgggagctcttggacagaagagggaactgtgtgtgtgtgtgtgttgaattttgaaacagaacatctctgatcagtcacaaatacattttcaatcacagaaaaaacatgtcaataattgtaatgaagcatgtgtcaagaacactttgtgtgcaagttatttctttcaatggattgtaaggaaagaaattacagtctgaaggtccagatctaagttttgctgtgtgccaagacagagaccaatgctatctcgagcagaatccttatcccactttctatctcaatttctatttcaaacattctttagtagacagtgcggtctacaatataaaatgatgttttgctcgttcatatacatgattttctgagcacggtctaagaatgttgaagtggaagattgggctggtggtaccttgtgaaggtagaacttgacatcccctacagtgacaacaatatccactgccagctcagttgcaacagaccctggaaaacagtaaagaaaggatgaatccaaacattagcattagcatcacccctggactagtacccaggaaacgaaaaaaacaagggagggtgagatgaaa

SEQ ID NO: 1511 - DNA, 755 bp, Zea mays
tacgtgaatgtttaggaacctctatcaagtttagggatccataaatattacttttaaagtccagagacctccttgactcgagccaacttttgtaaacagatagtgcagttcgcgtcgatcatcatgacgatggatggacatggactggttcaggttcacaacacccacacatcttgatcgtgtcgtgtgggcctgcggcagatggggtcacctgacgacaaagcagagatgatggccggccggggttggctcttgggcttggctgtcgtggtcgcgccttcgtccccgatcgctcatcgcctgtctacctgcctgcttcgttctgtttctccacatttatactggttttggttgatgctgatttgttgcgagacaaaaacacgctgatttgagctgataagctcaaggaaacagaaattttgagaacatgtgaaatttaagacaggatatcatgattcaaactcattcaagataccctgctgaaaatcatgacacctgctccaaacaggatatcatgatttaagacggtgttcattttccttacaaaggacggactgatcagagctgctgtacacaagtgcacaatgtacagcagatcatagtacatccagatttaatctgccattcacttttctctttgctcacggtgctagcaaatcaaagcagcgcacatcaccttaaaactcattcaggcagctttgtcttcctcttccggccaagaatggaagccttttgcagtctcatcccacctgctc

SEQ ID NO: 1512 - DNA, 803 bp, Zea mays
gagctcccaagtcgtgcagctgtatgtaaacctagctagctagcaacaagcgaagctagctgctgatgcagttgctgctgtctctcggagaggcactactactggagggggggtgatcgagatgagagggagcccatgagtggtcacataagtgagggctttataggggaatggggaaggagctatagcagcagcacactagaagcaataagggatgagtgggagcgagaggggatggatgaggaggaggtggaagaagaagaaggagaaggaggctgcttgacgagatgataaatgcataatgtcatgtgcaagaaagaggtgaggtgttgtatactagcttattagtagtccggcctccttcctactagtactagatatgcatggtagctagtgcagcaggtgtcatgtgtgtgtgaggctacaagaacaaaggttaagggcacaggcaaagggctggagagagagagagaacttgcaagcttgtcatggtgctgctctgctcagatcaggggccatatgcattgcatgcttagaaggtggggcaaagtttgccttaacatctagatctaggtaccacagcgcctatacatgatcctctctctctctctctctctctatgcatgccttgacggttactagctagctaattgacaatccctatatacaatatagagtagctagctcttgtgttgtcccctttctatctctgcatatagcttgtgcttgtccctggaaaaaaaactctctacatatcggatgtaaattcattctatggcatacccctacattttcgacctacg

SEQ ID NO: 1513 - DNA, 805 bp, Zea mays
agaatcagcctggcgaagacacaactgaccaatacgcgtgtctagtactcaaagcgtcatttctatatatgttgcaacttgtttgagtataatgggtgcgccatgggccaaaatttcctcttctcgttccgttccttgagctcgctcgatctcctcacgtcgacggcaatcgccgacggccacggggcgtcacatacgtaaacggctctctaccatgcatataagcatattcttcatcacaattccattttgacatgcgtaaacggccctctactcgctgctgccccaacgctgcgctgtaaagtgtacgcccaaaagcatcacattcttcatcacacttccatttcgcgcagatactaaataaccattgtttgttatttgtttgcacaaacacatctcatggggtcaccaaagaactaaaattcgtcggtttttgctcactgaattcacctctaagaacactcgcagccctttgaatcgcacggcagactttccacacttcatgctgcattgccacctcctgttccttgtcactcagattggcggaccgtgagatggcgtcagcgatcccagggaagaacgacagcttgctttcgtagtcctccggaggcgagtacaactggggaaaaacaagttttagtttaaaggaaaataatatacaagtcgtcaagtccgctgaaatgcgtttctcaccagatgcttaaaccatcctcttccttggagcccttcaggtgcaggaagcttctttcagcaagtaggaggcgatcgttcaacaatcgccttctcatcctggcgtgttcatcat

SEQ ID NO: 1514 - DNA, 738 bp, Zea mays
cacaggcaagactggtggcgactggcgaggccgcgagatcagctgttttgaatcgatggtttgcatgagatgtttggaacattttcacggatttggccaggtcagggcacaccaaacgcgtgaattggtcccgcagcaagccaggatcattagagatgatcttacagggaggaactgtactaaaccagtggttagttaaacaagggggaaagcgagtacggacggagggggtggataaacaaagggctgatggtgatggaggataggtgcttttgaggcaagcccaacagcgttcaaaaaaaaccaaaaacgccatcttgtcttcgtcttcccccacttggaagttggaggaatcctttactcctccccacctaaaacaaaacaccgggataggtcggacaccattattgcgagtgcagcgagcttccccttccctgactcccacgggccacggtcctgctgctcgcctgctcctcccaagaaatgcctgtctggtgcggttcctgagggagaggatcgttccatgatgcaggggaggaggaagaacacacgggagatggctcgggagcatccgcaaccgccgccggtggcagcggcggcggcgtcggcggccagctccaaaggccaagcatggtaagcaaagcaattgctctcgtgtccttttgcctgtgtgtcgatttgttgctgcgtgatctctcatctgcgcgtctgtgctcgtcaagttctgcaccacaggat

SEQ ID NO: 1515 - DNA, 778 bp, Zea mays
  unsure (1)..(778): unsure at all n locations
atgttttgggttggatgtgtctacgggaagaatgatgagagtagatttggcttcttctgtcattctgctctggagtttttgctccaaaaaggatcttctcctgtgagtacatgattgttcagcaaaatttcactttaattattgttgcttaccatttccatcacatttgctcttttttcctgctgctggggcataataacagttaatttatcatgtgatttgttattattgtaataacagagcattttttctttcagtttatagttgccaaattatttctaacaacagctgtctttctctaagatgtggaacattacaacatgtgttgcatattgtaatcttgttgactgctcctttttcccccaaaaaacttctcatgggggtgccatattcttattcttgcaggatatcatacattgtcatgattggtcaagtgctcccgttgcttggctgtacaaggaacagtatgctcttaatgggatcggaaatggtcggattgtatttaccatccacaatcttgagtttggagcgcatcacattggcaaggcaatggcacattgtgacaaagctacaactgtgcgtgcattgttttctttattgttgtgtttgtacagttgtgttgtacaaattcttcaaatttctcagttgtgctcctgtttgtctgatctaaaattttaaactgttttggtcatctcttccaggtatccgatacatactcnaaggaagtggctggacatggagctattgcacctcactactataaattccatggaattcg

SEQ ID NO: 1516 - DNA, 815 bp, Zea mays
ctttatattattcatggttattcattgaactttcagactttttggtttcaatggcgggaggttaaggatggatgagagaatggattttggcatgagcgatcctgatttagttcccttgatcatccaggtttggaatacttatggcaatcctttgtataagtgttaatttttatatgtttctttattgagttgctactactacaaatttcattccaaatactgtgcacgaactatttatttttatactacctgtagtgtgtgtcacagctttctttatggcttcaaagctgggatgctcacatgtataataattaattggtgtattttgtgaattctgaaggaaattttgtcattttgttgctatatgtttatgtttgccaaatgaatgtgtatcataattgtttaaacatgtatcattttggacttcatttgctattacctttttattgctgtgacttcagtccagtactgttgaattctactccattccaaattataagacgttttggcttttataatgcattgattttactatgtacctagacataagtgtataatgcatagcaaacctatgtctcttgaaaagccacaacgtcttatactttgcaatggagggagtatttgccttaccgacccggcagggtcctggcttgatccagggttgggcccattgcgaatgtatacctgccttggatcccatgaaataaccgggaagaataagggcttgagcagtccaagaacaaaataatgtggccccaacgacgggtaatgtggagtcttctcctaatcctccccccaatagtgaagggcccgag

SEQ ID NO: 1517 - DNA, 773 bp, Zea mays
tcaagaactataaaacttaagagccataataaacaatcacttaaaagtttggacatcattcaactattgaaagttacaacaggaaaaaacattcacgaaatttgtcagttctgacacaacaaaagtacacaaaccaatggctaatttcttcaatcctcaatcctcataatttagaatagaacaatattttatcttcgggatctcaaggaagcatgttaagttgttaactaacaaattggttgctagcaattagagttagcagctagctttaacggatagcaagcaactaaaagttgctagctagctattaattctgatcactgtactgggtacccatttcaaaccaattatatcagaaaaggagcatgatatgtcagaaatttagatctggttcctaattgaacaaaattccatgaaaaaaaatcattgcataaatattgctctggcgtagtgatatatatagcataagtagaagtgaccatcaaggaccttatcatatgaataattgaatactgctgaatattgaggtggtattttgaatatagtagatctctgctgctaagaaactagtaaaaaagagttggattgagttctgtaggttcaaaaaaatgtaagacaatttgtaccaccaccctgctatgtaccagtaccacacctgaacatggctcttgggctgatgttcaggatatccatggttattcctcataacctcaatttaaggaaacaaaattcagtatgaaataatctggctttagaaaatatctagtaacgtt

SEQ ID NO: 1518 - DNA, 793 bp, Zea mays
gcatgcctgcagctggagagtctaggtgtttactgtgaccctgatccctcaaaacaagttgatcataccatcactgatccaaatgttgtattcttctggggtctcatctacagaaggaatattcaaatatgtacaaattctctcaaagaagatttcatgaaaagtgtctgcaataacatctatgggaaggaaaaatgtgcccattcagacatcacaatggccgttgttgggcctccccagctgccaaaaaagtgtctgtgatctctcagtttactcagaaaagctgccacaacatatgatggggaccaactaatgaagcagaactacaatgcagtcagttaggctcagctgtcatattgcgtgcaagcttcgattgtgaatattgcaacagtaagaagccgccgcttcgattgtgaatatgacaacagtaagaagccgccgttgaagtcattttcaacatcagatcaggattttttgctgccctttttaaggggcttgttcatgacatggaatgggagattttttttttgtgaagtgtagaacaaatgcaggaggctcctagggttcaagcatccaacaaaatagggccattcaagcgacttattcctgttatgagttttgtgcaggtacatgcatattcatgtacacatcatagcaattggaggtatggtatagctgtttgtaaactgtacgtataatgtttccagcagcaaaaattgtgtagaatgctttctgttagcactgctgctgggcacagatgctgaggtcgatgtggagggagattctgaatgga

SEQ ID NO: 1519 - DNA, 708 bp, Zea mays
atgctgcaggtattttttgggggctttgttaatctcaatcaatcaatagaggacacaggcaaaaagcaagtataagttgtggtactttgctttcaaggagagattctgtcagcttgagtttctcagccatcttctccaattcatctgtaagctgccatcaaaatacaatctcataagaaataaaagggagtcatttgcatccaggtttctttttttactaaaaaagtacatatagccagtaattcagaagcatatttctttcaaagtgaagaaatttagaacccatatgagctggaacacttcatccgtcatttcattttttttaatgtgccattcctcccatgacccaagtgcggaggcacaaaagaagtatatttcaaaatcaagtaaatttaactatgtcttaaaccctaacagtcactttaagttcttgacaaccaaataatactcaaaaacatcactccattaaacaaaattcaattatagattcagtctctcccagaaaagcaaccttgtgcgaccgggcaaaaaaaccgaaacccgaacaacccgaaaaacccgaacgacaattagggtagcgattcccgatacccgaaattgtcaaggtagccaatatattctctgtctctctcgcaaccctagatccacaatttacaaaaatccacttcactggcaccccactgccgcaagcacgtacaccacccaccg

SEQ ID NO: 1520 - DNA, 804 bp, Zea mays
attgactttccatcatgtggcctgtttacccttttgggaccttattatatgatatttggcttgaagcaaaatatggcacaccaaaccttagaaaaattaacattgccaaaagtttgttaccaataaacccatgggctgtccaaacattagcaagaaaatagactatggtttcacttggcaagggaaccttgtcgaatttctgtgggaaaacagatgcttgccaaatctggttaacacagccagattctgctaatgaaacattggctcagaatcttgtagaccctgatgtcatggccccatggtactgtggtctagtgcttgtatctttttagttggtacaactcatatccgtttgtttctaagatatttttaagattctactatgatttctttagcctcaaaccaccatgggtcctcttctgagctcatacaccatttttccaactaacatgacaccaagcaaacacttgggcatatacattctgctgcatggctgcatcatcatatttccacaatattcttagatccccaaatatatttcttggagcttggtttcccttcatttatgactcttcacagtattaccaatataaagtttaaaatccacatgcttgtaggctgtttttgcaatttacatattctgttgccaccttttattaattaattaaccaaggtaatgcctcttttaaattgttcgacatgcttcaactgaaatgacaattatatttaacaccagaataacagaattgggttacttctcttggtttgactccgataatttccaattagatgtaatttcgccct

SEQ ID NO: 1521 - DNA, 1044 bp, Zea mays
tactgagccgtttctgaactctgatgaagctaaggctcttttgcagaggtccatccatggctttctttggtcagagtatatgtaggagcctggaccatcgccgtctagcgctcaccatcagttttccttgacatgccatgtttggccggtactatgtgaagatctggctctaaactctgaagcagggatgtgagtgtactctccccttgttctgtggacctcatgcggcgttggtgacatggaccatgcatgcatcagagcaacatcacggaagaagcatcagatttgcagctccttgttattggtggggcaccgggatttaggtgatctcggaataatgtttggctgatttttgtgcatggaattgatgaataaagaagatttggttgcttacgtatgctggaatatagatctggtcgttgaagctttgaactgctggggttcagtaactgaagtacctaccaatatcttttcggattcattgggagagctacacttcaataattttgggttcgttccggcttgttccatccaaacaagcctagctttaaaaaaatttgaaactagagatcagcttcataaaattcattaagctcttaaagggtgctttacaaacactgtttttataccttgttattaagttgcatgaaaattactcatcgcgtcactggttacacacaacatagcgtttcggatctctcgtgacagccaccaattcatcaaggataatcaaggaaaacttacacaaaaacagtggaatataaaagttggaggccatgggtaagcccaacacctgcttgaaacccactataaaataatttggtgggaagccatttttttggtgaaagccttgaaaaatccaaaactgaaaaattgtggaagggaaacccctccaaaaacatggcccttaggtcggatttcacacagttttacccaaagttgattattaagcccctgtttttggactggagaactgatttggtcccatattagagttgaatttagttgtggatgaaaaagtggggggaatacttattacagggg

SEQ ID NO: 1522 - DNA, 832 bp, Zea mays
agagctgcacgccagtaggtgagagaggacgggaggagcctactagctagctagcaagcgaaaccgcgggctttcagactctctcacgcacgccccagtccggcggcagtcccactcccacaggccacgcgacccacccacacccacccccgtccccgatgggcgatggcggagcggaggaggacggccggccgggaacaggacctgacaccttcagatcacatcagatgcacgcgagacgacagcggaggaggccgggccggccgccgctccggacaatgagacgacgcaaaaggccaagccatcagacgtggtgcctcctcaatcctcatgcatatacgtgcatgcctcgttcctcagggggcggtccacgctccattgattgcatgcatgcattcattcctttgcatccatagcagtgtactcctcagctcccgtctctttagacagtagatctcaattctcatcttgatcctctcccactattattctactgtaggtatataaaacatctcacgacatagattggggaacacaagacagcatctatatatcgctggggctgatgaagggaccgccggaccggtggtgccgaacaacatcacgtacgctcatggcgcggtgcgcgcgggcgcgcagactggggaaggaattgccacgcgcagcgcaaatgtgagggaagagaggcccacggatgaagggtcgtgaagaatttgaggtaaggaaaaagagacctgtttgagctgttggtaacttggtttttaattgcccgttgattaaaaaataagaccacctattatattaaacctttaggtaccttcggtttcgaacc

SEQ ID NO: 1523 - DNA, 843 bp, Zea mays
  unsure (1)..(843): unsure at all n locations
ctcggtccccgggatcctctatagtcgttctgcagaatatcttgcaaatatctgcccaaggacacatcaaaactcccgtagtattttatacgggttaaatgactttgctcacagataacctgcttttccgggcactggctagacatcaaaatcagtatgctgtgagaatcaagtgcatcatcagcttgatcatcatcgacatatttctctttgataatgatacttgtactatgtgccccattgtctcccataacagacgattctgcatctttatcatttgcagaagaacctcttggcattattgcttgagcaatttcttgtttctgggcatcatttatggaatctccattttcaattgaaaccacagactcttctatctctggcctatggaaaccattaataacagtttcttgacttgattcagccctgacttccttactaatatcatttgcctcttgcaatgatgtaacaggtaagtaaatattctggtgacgtaacatgtcagtgaacagttttcttagtggcccttggactagtgatgttaacctctcagcattattgggcctgatacttgtaccttgttcaaggtcatttgcagagctgctggatactgaactgaatgcatccccattttctggatatgtcaaaggtttgttcacatcagcatagctattagaagtggcatggaatagtctaagtgctggagggtcaccatgtgaaggaaagctagggatagcaccactaagagcagcaacatcataagcagntgggtgatgccccttctgtagcagtaacagaaatttcttttggggtacttttatcatttaaaaaaaccctttgatc

SEQ ID NO: 1524 - DNA, 785 bp, Zea mays
agggaaaaaaaattgtactcacgtcgtttgctctccccgttcgtgaagacacaatgcaagcatctctgaaatctgtcaatgacgcggaatgctgacatccattgtattagagcaagaagactgtctgtgtcgtttctatatattcctaccaattgccacgagctgagtttcattttgacaaagcatactctacggctttccttaacaacaaaagtatctcgtctctcagagtcagagcagcccagtgtctacgatgatccaggttccattcctacgttgactgtgcgagcttccaggaggactactgcacgtctgcactgcactgcacgcacctgagggtcctggccgagcgcaaggtctgttgatgtctgcgcttaatatttgtgcagcaaagttaaaacgctcatgtattgttgtttaggggttggtcataaatacggaagaagaccaatcctccacacatctctagctccattgctttcgttaaaacgaaacctccacctgaatctcagaactgattcggatgacgttgatcatcctagacactgctgccacataatcctctatcgttagccttattagctccttggcctaccacattttgtaagcagcagcttacttcacggctaatgcatcacttaaagagactagggatgtttaaatacattagagctaataattagctgctaaaattaactgaatacgtctaaatagtctagctaatagtttaactattagctatttttatcaaattagctactttccgtccaaaaatgttggtcgtt

SEQ ID NO: 1525 - DNA, 767 bp, Zea mays
atacagataataagcatataaatcatctgtccacaggtgacaatgttccctccagtgcttcaggccacaaacatggtgctatcagccgccatccatctacatcttctgttgatgattgctccatcaagtccggtgatgattctgatggggccgagagtaccagtggcagaagcagtaatacagagatctcatttatgaataatgataccatctggataccacctcaagcggcagataaggaggatgaggcccagagttttgctacgagcatcgcttatgacgacgacgatgacgattatagtgatggtataaagtggggccagtcaagtttcccatcccctggtaagcagcatgacgccggcactagcaatcatagggaggaacgagaaaaggcaatgctagaagctatgaatggccagctgaaggtacttgtcagtcggtttctcgcatctgctggcattccatcttccaacgaagagggtagcgatagctggcttgatattgtcacctccctgtcatgggaagcagcactacttatcaaacctgatggtagcatgggaaaggaaatggaccctggctcttacatcaaagtcaaatgcgtagcatctggtactcgccggcaaaggtgaagcaacaattcttcttcaactgtttctcctcaacagataggatttctgtttctgtttcaaactatatcattcacctatggcaatgttggtttggttgcagtgaggtgatcaaggggttagtcttcaagaagaacactg

SEQ ID NO: 1526 - DNA, 837 bp, Zea mays
cccgcggtatcctctatagtcgacctgcagctcttcattttgcatatttgaaaaatagtcgagtagcctctagggcttaccatgcccaaaatggtgaggtcagtctgctgcgcttctactgacatgaccatttaatcactgggacttcacactcaatacttttcttgaatatatagagatgataggaacattgctgcccatcagtaataatcttgtgccttgtttctgcgggttgagcatccactgagattttacaaataaagttgataggccacattttgcacattcccatctgctagtaagatggttttctttccaaacagtaaatacttcaaatcaggtaatgatatatattctggtgcactgtaatgtacaattgtgttcccttaaacacaccgtatgctttttcccccaccttctatagaatttacccatgattccatggtgtacaattatgtgcagttggtgttagttctttagaaaacctcttgttgttagggccaagcgtaattagttcaaatatcgccacaatggttttcaagttgtcggtgcaggatatgactcctgtgctcttgtaatggtctgtactttaagaacagggtcgggaaatagtgaatgtttcagaacttttttttttcattttctaccataggaaacttaatttgttttgtgacaggatactactgtcaatgggaaagagaaccatgatcaagagacagtgcatgaggagaataccaagtcctgtgaacatgaaatatggagttactgcctctggtctactgaacacagggaaagtatgaaggatgccattgtcagaagcttaaagatcaacttttt

SEQ ID NO: 1527 - DNA, 778 bp, Zea mays
gacgccgacgtcgatgtgcccgacggtgggccgcccgtacccatccaccgctgcatccttgccgcacgcagcgacttcttctacgacctcttcgccgctcgcggccgcgcaggggcagcgcgcggtgatgcggccgccggcgccggagtagccgcggagggggctgccagtggaaggccgcggtacaagatggaggatctcgttcccgccggccgcgtggggcgcgaggccttccaggcgtttctggggtacctgtacaccggcaagctccggccggcaccggtcgacgtggtgtcttgtgctgacccagtgtgccatcacgattcgtgcccgccggccatcaggtccgcggtcgagctcatgtacgcggcgtgtaccttcaagatccccgagctcacctcgctcttccaggtgagacgcaatttggttcttgctcgccccattgtcaataggattaaactctaatttctttaggaattgtttcgttctatgccaatactgtacatggcttcgttagactagaaatggatttgtgattttgttttctccaatccgagtgttgactacatcactacaaaaagctattaatagctgaactgctaaaattgctgaatgctgattctgttttctccaatccgagtgttgaccacatcactgcaaaaagttattaatagctgaatcgctacaattgctcaattgttgattttgttttttccaatccgagtggtgacactacaaaaaactaataatagttgaactactaaaaatggtgggctat

SEQ ID NO: 1528 - DNA, 770 bp, Zea mays
aacaatacttagaatgttatggtgcagggaaaataatgtagccaataacataaatcacaatcttcttataaacgtgaacataagacaaagctcacgacaatgacatatcccaaccccaagttctaaggtgctatttgatcatcatccagtggtgtgaaatcattctcgttattttatctagaactaggacactactaggttgtgtgcaatatggacaggcaagtggcaatttaataatgaaggcttgtcatctgtaattagattaatttgggctttgtgactacaattgtttatttcctataacatgtacagctttctccaatttgaaaaaaaaggagaaattgatgtggtatggggtgggtgttttccttttttccctctttatgagaacaaaaggtcaggcacatgtcattagtctacaagctagcctgaatcaatccacctgatctccaagcttttaaattttcaaaatttgaagcggcaacaggcaaccaatcagagccattctatcaagcatggtatggacttcacctctgttttccaggtagagaagcttcatgtgaagatcatctgccaacaaaggcgaggtgacggcatcttccaccgccataggattccgcatcatctccctctctagaatatctatacacagcctatctttatttgattcttgaccctgctccatctttgtattggagtcttttgctcttgttaacctccgacaaataccaattgcgctcctgccatcaactgtcagttgtgacacattt

SEQ ID NO: 1529 - DNA, 800 bp, Zea mays
agattccagctgccaagtggtcatcatcggagggctctgacagagggctgattgtggcgtggaacaatccaagcagtgctttacatgctggagttctgccttcttttctgtatggaagaggagcacagaattggtggctggctcacgaggttctgtcgtctgagatgaggcttttctttgatgcaagcagtctggttcttggactgtatcctgagagcattagctccatgcagcatgacatggcctcgagtaagaatggcaggttaccttctgtatcctgggagtacggcgtcaatcaccatcttgctgcggtttatggctcgtattgctgtcgatcaccagcgagacgctttcctacgctgcatagagtggtaaagcaatctgaagattatatgctcagcaaagttgacacactcgtatcatcagatttcttcatcagtaaacaaggaaatgcccatggagtagatagcctacggaagaaacaaaacgtttctctatctggatatctacacggttgttcttccgagacctcagcgcctgaccttccatattctttgagcatgctactcgatcttgtcgctgatgagaatggttccgttgtccttggcgtggctggaaaaagctacagggacatgctcatgagttgggcatgccgcctgcgtcgtcttagagttaccaatttcttagtatgtgccttagaccatgagacatatgagttctcaatcttacaggtagtcattttctgttatttgggcttcttttatgctttttaaaccacagacagaccacctcaaagcttt

SEQ ID NO: 1530 - DNA, 768 bp, Zea mays
acagaagcaggttgcttatctctgactttcaatatccaaaataatttatcatcagatgtgtaaaaactcggccagggagggaaagaccgccctcccggtattatattaagaaaagaccgaaacatgatgccagccgagaaacatcactagcgggccgtcaccgcccactctgtaatggcccagctagagggtggcgcgcaggacgtaacccgggagcgggcagggcacaatgaggggatttttttaaccaagcccgaaattcgcctccgaggagaatcgaatccgggacttgtaggtgctactcggaaaccttaaccattacactagaggccctttcgctatcatcagatatgtagtactaagaactcacttagatccaaacaaaacaaattccttagaatctaaacaaaaaatggtaaaagaatgagaatctcaacagcaaagttaaggttcaatgcttgctcggccaacttaagaatgatgctatatactgattctaaggaaattactgtagaaatattcttctggaaattgatatctcattctcatgcttcaaattttaactgagcacagaccaatgaaactacagacgaacagaatatgagtcataatgaacctttctctgtctttttaatggatccacttgcacctaatatatcaccaatatcaataaacgcctttagttgctcaaattggtcctccgtaaggctgtctttctcacaataaagctaacacagcccaaaagaaagaaaaactcagaaacacata

SEQ ID NO: 1531 - DNA, 796 bp, Zea mays
ttgcatgcctgcagcttgaccatcttttaccatccaaccggcttgaagcctccatatcaagctcccctatattggttgagagatcatcacttgatgaatcaaatgacgacgaaccaaaatcacagctattacccaaaagtggcattccctgagcagacttcttcgaatgtgcccatttcattgaaccaaatgatttcttcttcttgtgcattgtctggctcccacatattaggctgctaccttttcttcgaagtatagtggatagtgaaggagaataattacttccttcagatccttgatgttttctcctctttgatacatagcaagggacatgcgacctctgacttctcagaactgctgattggttagactcatcaccatcaagagaaatagcagtcctagcatcccaagaaccaacagtgctggtgttccttcttacatgcctgtaataggagctagtagaaacaggtgtgcaagaaaaggaagatccctctcttctacctattttcagtagttttgatggatttgaagagctgacacaaccacatgcagcaaacagcggagatgcaggatgagataagtagcctcttcgaagtatctccagagcctctgagttgcagttctcagtatcctcaagatggctcaccagaattaacctgaagatctgacaacttcggtatagcttggtttctgactgctcctttcttggacaaaacaccctttcttcttctagctattcttttgacaggagtacatgacgttgaactcttgacattgtagatggctgctggaggat

SEQ ID NO: 1532 - DNA, 732 bp, Zea mays
  unsure (1)..(732): unsure at all n locations
atggtgaagacaatcccagctcacgattcacacatctcttgcatgtcactgacaatggatggtctcctgctggcaacagcgagcacgaagggcactttgattagaatattcaacacaatggatggcactcgtctacaagaggtgagcataatttctattgctctctagaattgtatctttggcgatccttttcttttgttacatgacattctcctttgtgaataaaaagcatggtcgtcttctttctgttgcctcttctcttacaatataatcaaatcattcataaatgattaggatgagtgcataatgatctaaaatctaaatgacatgcaggtacgcagagggcttgacaaagcagaaatatacagcattgcattgtcgcccaatgtgcagtggttggcagtgtccagcgacaaagggactgttcatattttctccctgagagtcagagttgctggagtggattcaagcaatgagcaacgcgctcttgaaggtccacggatggatcaccagaactcttccagttctattgatcctcttattcaggcgaacactggatccaatgctagttcatcactgtcttttatgagaggtacacatgttactctggttttctgccattcttgtttgatctgttctgcatctcagtactggaagttgtgtgtgcgccattatacttactatttntgtgaaggttattagatgatgcttatatcattgcaatacctgtgg

SEQ ID NO: 1533 - DNA, 738 bp, Zea mays
ggtgagacatcaagtcaacagactgaccgggtagagggcggaggcgggaggttaagttcgtccctgaccagtgaccatatgactatgatgaacatgtgttgagagaagctacgggattgagaattacacgcatacactgacgagatagataggcatatatttgtgaattctttatcctgttggtacaaactgctggtgccaataggattgtggatgatcagtagttgctcctcccttgtatctgacaaggctgaaaactttgttctgtagctcagtttaggtctcgacttggtacatttattttattttttctgtgaattgtgatcacatttccttaactatgttcctgtggtaacttttgtctcataataatttggtgtgtgtagactaaggtagtgtttagttctagagtatgttatgatagaactgttctattctagtgttgacactgttttgtttgattctaagtggaacagaggcactccaatttatagatattgtatctggcggccgctcgtgagcggcatgctcgtcttttgttccattcacgtactctttggattctttatctttcttgtgtaattttgtgtgtgtgtgtgtgtgattactgattagttctgttctgacgagcttgcgtttgttagttttattattcacagtcgcaatcagtccctatgatgtcacaggtgacagcctcagcaggccattttgactacttgcgagtggtgctgactgctg

SEQ ID NO: 1534 - DNA, 745 bp, Zea mays
atcgtcatttactatgtatacaaaataatctcaaatactgtggcacaatactgttagagccaaatgtaggttaattaattctgagcatatgaacaccacatgtaaaatgggccttgaaatactgtgaacgagatactcctatgacaagcaaatacaccataccaggcaaaacttttattgggattgtaagtactggtttaacaaacgatgggctgaaaaatgtgctgttatcagagggcgccattatatcttccagaatatctgtaacaagaaaataaaaatcttaccaatgcaagcatgcatattctgttgatatagtttatacaaattaacagatctaccttgtttgtggccaaggtgcattgaatcattcgcagtatcaccagaaggctgcgagagaggaatttgctcttggcgtgctccatttcgctgcacagttaccacatgtcctgcttctgtttgcgtgaattctgcataagaggtttatacttcttgttacccattttcatcacaggtgtcttaaactaattgtggtgctgcaaataatgtgggtacttaaactaattgtggtgctgcaaataatgtgggtacgttaatgagtctgacttccttataattgtgtctaactaatcaaacataccttctttgtggcctagatgactggtatcagttttagtatcaacagcaagccgtgagagaagaatttgctcttggcgtgctccgtttcgctgcacagttaccacat

SEQ ID NO: 1535 - DNA, 773 bp, Zea mays
aataccctggccgctcagtcgctggagcccgggccgggcgtcttggacccaattccgtacttctcctggagcctggtgatctcgtcctccttcttcttgatatccgacttcttggacatcttggcgggctggtagtagagcacgatgaggtagcggttggcgacgttgaagccggagaggtggtcgacggcgttcttggcgtcgtagatgtcctcgtagacaacgtaagcggtcccgcgcgtgtccttggcgttgcccagacggatctgccggatcgcgccgtacttgccgaagatgtcgtacatctcctcgctcgagatgttgaacggcaggttccgcacgtagagcacccggttcacctccggcgggaggcgcgcattccccttcctcaggcccgccgccgccatcgctgccgcgccgagataacctagggtttggggatttgaggggtatatgctttgcttgttgcgtatggccacctcttcctctcgcgcttcgggtggagccggcgcacggggtcgattagttgccgactccgggagagttcccaccgacatgtggcccttacttctcaagcggggcccatatgtcggcgtcgagtctcgaagcttcgttttggcgcaataaggtgacctgagtcctgagccgcctcgagccgctctcgggctctcggcttcgaatcccgacaacctccctccccgaagctgcttagccgcggctgggcctagacctgcgtaaagcttcggcgcagcccttcagcatacattggcgtc

SEQ ID NO: 1536 - DNA, 838 bp, Zea mays
agaaacgggtgtaatgcatcgggaatggtgaggattgttccggtgtttccacagtatctcagtgactcggttgatggctttgatgcattcgatgggtttgaagatgatccaggcgttgacaaagatgaaaagccctcttctaatgctcaaaatgggtcgcagctgccggcattttcaggtgtctacacgtctgctcaggttagagagacttttgagagtgatcctggtcgggacagcagctcggacagggatggggcaagcaccatctttgaagaaacggagagtgtctctatgggtgagatcatgaggagtccagcattcagtgaggactgttcatcagagaactctttctgggtagatgttggccatagcccattggggtcagagaagtctggtcagttcaagaaagggaaactgggttcaccattaccatcttcttggtttaatggaagaaagtgtaacaagaggatgtccccaaacttaacttccaggatatctagaagtccactttatgatggtcatgtgatttcctttgatgcagccgtgctatcagtctcgcaagatgcagactgcctcaaggaagaccctgaagaagaaaattttgagaatgggcggagagctcatttcaggcaggttagtgaaattcaagaggagccagaggccgaagaggtggcatgccaacgtgctatgaatggtggcgcggatcacaaagaaagcgcaataagaagggagactgaaggggagttccggctactgggaggtagggatggcaacaacagatttactggggggcgactcttcggtgttgaagagattgatggaggtttaagcatggggc

SEQ ID NO: 1537 - DNA, 777 bp, Zea mays
  unsure (1)..(777): unsure at all n locations
aagacgctcaagtgaacgtacagccatttcagctcctaattcttcagccatagcaataagagcaatccctaggacagctggcccttggtgtgtttcacctttctcaagatgctgtgagcaaatgccaagaagtttctgaacctgcaaacagagttgataacatttattcaaccaaacattttaataaacttctttaaaatctgaatctgctggaaccctttccattcaaagacgatggcaaataccttaagcacatttcctgtcccggcatatgccagtgacataagtgttacatcacagtacttccctatcttctcatcaaatgttttagagacctctgcggtagcctccacactatcctgaaataggatttgattctcaatttctcattaatagctaagcacatctttgataaccactagagtcatatgtaaaatagcaggtgcatagatctactccctcccatcctaaaatataatgtatgtgcattgcagagattctaaggcagatcaagaagaatagaaaatattccaatccaaaccacaagatatttatgcatagtttttactatgcacttcgacatacactaacactatgtctagatacatttatctagagaggtcaaaatgtcttataatttggaacagaggaagtacataagtcatccatgtgattgaaggagattgcttgaaaaaatgtgactaacaatacaataccaaccgaacttgtgcgcctatttaatgcaaaatggtcctnttcccccccccctgctgccag

SEQ ID NO: 1538 - DNA, 675 bp, Zea mays
aaatggtcccggtttctgaactccaggggtgctgtgttacctgtcttgttggacttcgagcttcagggtatccccatccatgcatgggaaaccataactgtggaacaattgcttaatccctttgctagtgttcatcaggttcatcctgacaccctggagctaaaggatgtggctgtttaccgatgttctgcttggtgtttagacccgtccttggtgcctgcttcaagggagctttggatcgtcgaacctccctttgccgttgatgggatgtcttctggcaggagaacgctgatgtatccaatccgcatcacattctcgtctgccccacggagggatggatccgatcctaagcttcatgctattacttcgggcggggatggttctggtcacgtgcagcagggatcccctcctttttcaagacctccccattcgagtgggagaaggggagaacatggtcattcgggacgtctctcagttcatgagcgtttgggcccaagagatgagaacatgcagcagcggagcattagctccggggtggcagtttcagatttgaggagaactttggaatctgatggggggaccttgtctcctaggctggtagagatgactgatgacatggttcttgtttcaccggtgaaggcgaagcagctgaaagtttattttcgtcaaagattc

SEQ ID NO: 1539 - DNA, 626 bp, Zea mays
caatcttgcatgcctgcagcagcagtggtggagaatgggacaacattgtctttggccgatgcccgatggtgtgtccatgggaagagggtaagggttgggcagaagcatttaggtagaggattggcgctctgataccattaaattcaggatatagctcttgaataatagattgattagaagtatacagtacatgaatatataggcaaggattccttgggtttggtttatagaagtatgaccaatcatctatcaagaggctcagggcctgtggccatgggcccaaagggcacagtccgctaagcctaacagctgcctaacatactaaattcacagtgaattgttaaaaatatatcactagaccatttactctcttttgtgaacaagttgtcgattcctctttgattggggttttatattgtaattgctttttgatcaggattttatattgtaatttagatttcatctaaactatcgtgcaggctgctgtcctcaaggaaaatatgaacattgatttgcgtgtcatgggaatagctggttctaggacaatgcttttaagtgatatgtaagtgaaaaagtggtggttttcccctatggcattttacatatgtaactctacttttatctgc

SEQ ID NO: 1540 - DNA, 759 bp, Zea mays
atcgagtgaccggtggaagggtattcttggtgcaagccctggtgatcctgtcagcccactgtggtgctccagggatactagcatgaaagataatgaggatgaaaccttctctcaaaggtctgtgtctgcacgtgaaatttctagctgtgattattttcttgtcgaagatactagcccgtcatggctgtcgaaggtcaaagggctgaacttcccacttcctgatgagcatcagtctagaaccaggcagattgagaatgatgagatgtttgcccgcagacttcaggagcagctcaatcagcaacagctaggatctcagcattccgaagcggttgttacactggactactcaagccttatagcttatagggtgtttggtttgagaaataaactaatccgtcatcttctcactcctcgatttttttgtttgatttatgaaatggaataaattaatccatcaccacctcatttctcatcatagttagttagttcgtactaacatgaggaatgagtttattccatcaaatttgtgtgatagacttataatgcagtaatgcaccacctcatcttgaatgtagtgattcatcaaaccaaacatctccttaatgtttctgtttcattttggtgtctttttcatcttaagtgatcttgccttttgtgtgcatgcttctgattagttgatgctgatgtaacaaatagcttttccattgctgacatcttgtagactgatacgacaatagcctggacattacatgagcaagt

SEQ ID NO: 1541 - DNA, 760 bp, Zea mays
aagagttgaatccagtgaacacattaaactggaacgtaacagaaaagagttccgaatcattcaactgttgggtgtgtacctctttgtgaaacttgtgcaagcaaggcaaatgccggagtgaatcgccagcagaagggcaatccaagcatatattacagggttcatctgaacaattttcacccttgacaaatgcaaggatttgagtcaaattataggtctgctaatatgagaaagggatgcacgatccatctttagtatttcatacctcgatcagtgatagtggcaggctgtttatttggtcatcagaagcacctctgtgatggttgtcatcgtcaagtgctatgaggtcctcataatcatcactataaagtgataaaaagttgaatagccagaacggatgtaaccaataagtatgtataagcaaggaaagaacgcgtcaacaggatcccattcaaaatggggctatgagacaagcaatttcaggcacctactagttactacagagcacacatcgactgtttggagcattcacacttctacctacgaactttgcagaatgtgttacaaggtaaacacagaacccaccaaacaagataagagaacatatgattgcggaaatgtccatctaaacacacattgtgggaaaatatatgctacacaacagtaaatgcctactcatcagaatctggagaaagtgtgtcctcgcagttcttaaatgcttcagaaagtgagttcagtacagcccaccctgtacatgtta

SEQ ID NO: 1542 - DNA, 786 bp, Zea mays
  unsure (1)..(786): unsure at all n locations
agcagagccaggcacagggagtcgaggacggagctgctgctgctgctgctctgacgagcgtgcgtatccgacaacagcaggcagcggtgtgagcgctagcggcgccggcctgtctgtctggatgtcttgtatgtcttcacatgaaacggggattgattattcaaatgtatacggagaggaccatgtcagaaacatattgcgggttttggatttcggtcggagtatcatctttgagctgagcagttcgtgcgtcgctgttctaagcctttgtgcccttttgctgttatagatgagaggtcgggatcattggcagcggtggtgtgggccaatcctctgcccatggctccgcggacgccgcgccatgctggagcactttggttctgtggtagtgctacaccctaaacccttttagaaaaagcaaggcgcaaagcatacctacatacatacgcatggaatcatttcgatttgaaggcggcggttgacagccgttttcgtgcataagaccgtccgtccgcaaacaaagctagttgccacaccaaagaccaaacttggctcgtgtcgtgtctcagtgtctgccaccgagacaaaaatcgtcgtcagaaatttaacgacgcatattcgtctgactgacccgcccgtgcgccttcctcccgcctccccttccaccaccaagagtgacgacagagagacagacagagagaatggcggcgccagatgcccggccctcgtcagccggtccaccgncgggcccgctccctccttctgcctctcctgctcgtgctcctc

SEQ ID NO: 1543 - DNA, 745 bp, Zea mays
ttgagaaagtgagtacatgattattaaatgtgacatgccatattgctttgttttagaaccaaatgcaactcatccatttgaatgtttgtagtccacccagtatgtgaagcaagtctacacagcaactgatgaccttctgttgaagaaacaattctcatatctcattgcacgccatgtacgcccacacctcatttttctttacatgtgtatgtgctgtgcgtgttcatgtgattgggactatgcatttattcatgcactcaatcctgagatatgtcttgtactttggttgctcttttcttcaccataaaattgcccccctccttttgaacaatcatctgtcttctgaagggtttgactatggagattgatgatgagatcgccgctgatgacaatgacaaggaggttttgcaagaaatagtaaataatactaagttgagtgagggatatcttactcttgctcgcgatattgaggtcatggagcctaaatccccagaggatatatacaaggtgatgtatattttcattattttgctgcttaccatatttgtaatagcacaattaaaatttctataataattggggttgtgttttacaatatgcaggtccatttgattgatggtcgtggtgccagcttcagtcttgattctgcagaacagaatttagctgcaacattttgtaaatgcattttgtgaatgctgggtttggcccaggttagctttttgagaacacccttactagcaatggt

SEQ ID NO: 1544 - DNA, 789 bp, Zea mays
aatagtatcaatgaatgaaaaaaaaattatgctcaaaacaggcattatggagtgaaaggggaaaattttgaaagattaatagaagaaagtactatgtgtgagcaaaattatgagtcctaaagtactgaattttgcatagcatgtccaattacaaatggtaatgttgaccaggttctcaatgatggttgcagcactgaataattaacccatacaataaagtcaatcacttgtaccacaacacaaacaagaactaaatgttaagatgctaccttacaagaaaatattgtgcctccagcagacctgaaaaataatgagaacattttgatcgactcaccagaaaaagcagcatatggaaaagatgaactgggtcaaaaatgcttgagaacagttttacaccaacaagttccgtagtttcgaagttagctctgcaagtttggacaaaaaggtcataagttacatgagcatctattgtcaggatgacctttttccttgcttcagtaataaactatattttcctacttacatttttaggaaaatgagtggagcatctaaaagttgtaagaggatgctgaatagcatgtcatcctgaaatatgaatggacattgaacatattaccaagattgttaagacttcataaagccagtggtaagcgttcttttcgattacagaatgaagcatgaatttgttaatattaaataacaggggaaaaaaaagacagcattctttctaactcactttgaacagatacagaaaatagagttgatagattggcttagtagcaattagca

SEQ ID NO: 1545 - DNA, 807 bp, Zea mays
atgcggggtggcgaatagattggggaaggaatgacgctctgttgtaggcggaaagtgaaccggttgagccccaaagaaccttttcacaaccttttaccaattctcttgtttttaaaagggggttaaatattttattcgagccgccgcatgtcaatatgcatgaagttgttcaacatacataatttaacaaaggttctcacaacatcacaacctaacttcaaaaccaaggtagagacaaaacacagttcaatataaagtaattctgctagtaaagttccatctattagtagcaaaaatctgcatcatggtcgtttcaagcagacgacatcccaacttaacttgtcattcgtcttcttcctttagtagtattgccaactatctcatccattatgtttctctgaagactatctgcatcggtgtaggcacttatacattattaaaaataacatcatttatacataaccaaattgccccaacaaaaagagacaggctcccaaaccaaattttgttcttaagtttcccctctatcctttaagccacaaatatatgttgaatgcttctagaaggtaagatattaaagaaaacttgaacacactgctatacacatctagcaatacaacaattgaaaaaaaggtgttgaatagactcatccaaaatacatgcatcacaatttagactttcttttcattgcctttttaaaacgttgtttttaagaagagctatcttattgataaaatgccacataaaaatatttatcttattgaactgtcaatgttgttgcaaaagacccattctcttgagctgctt

SEQ ID NO: 1546 - DNA, 745 bp, Zea mays
aacaataatttttctggctccatcccagaagcattctttagggagacgtctatggtgctgactgaacttgaccttagttgcaaccaacttacaggtcagaaaattttcctactcagcctcatgcttatcttaaacattgcattcagctcgctcttacgcatgtttctttgcccataacattttcctaatgcttaaactagcatattataatgagatacatgtaaaagattgggcaggccagtgccggaggctcccgcatgggtctcgaaaagggataaaccgaggcaagtttttctccgtaaatacggagaggctgcttcgaatccgcgatctagtgatatattgagacatctctcatcattgcacgaggcttgctctcaccacgtgtaaaagattgacgttattaaatcattgacctggcaccatcttctttttcacatttgtggtatacctttctctttttttagtaaacaatacatgcaattttaaagcatacaagaaatgtggattacctattatgcatgaagcaaaattgctcatttccttcttctgaagtcaccgcaaaagtttctacctctaatttaccagctactggtatactaattgcgattatatccgaagatacattttctgttactgattgttcaattttgagtcatccaatgtgcacagctaaagctatgtttctgagctagttgtcatattttatactactattacttagatcaatgacagtgaaaaaata

SEQ ID NO: 1547 - DNA, 771 bp, Zea mays
aaataattcaatacaaaatcaaattcaagccatcattcagatagcctttgttgatacaactgatgacccatatatttgatccttatgttctgtttacagttaagactatgagtgcaacctagagaattggtgtcgctaagacaggttacaaggtgtaaggcaaaaaaaatacagcaaggatcaaaataatacagaatacagtatagattatagaagtcaacagacgtcgacagcgtttggttgctaggttggtccaaatattaccaataaagtcaaggaacacctaagcaaagactgttataataagataatgctacagcaagctattaagtatctaacaaatgattaaagtttaaaatcatacaaacttacatcaacagcatcggtacccttatccatcagatcaatttttgtgagcacaccaaaggtcctttcacctgaatcaacaaccgtgcacttctataaaacatgtacatgacttaagataaacaatgtacaaaaattacacgaatgcagtaaaagtatttctttcataaactaacttgagaacaatggcaggaattatctgtgtaatgtaaattaactttcaacagagatggacaaatcgacatttggtgtatgaaaatcacaagactgtcagtccataccaattttcatcatatcaaacaaactcaaaattatatatcattatgaagcttcctggcatgccaaaagttaaagcatatgtgacaataatcattaaagaaatgtatagtcttatattgtatacgg

SEQ ID NO: 1548 - DNA, 771 bp, Zea mays
cagcttgcatgcctgcagttacattctttgctcgttttaacgggtgttatatgtgtagtgggtcttactatacactgtcctgatagagcatatcaaatgccttcttttgcttagatggtagtagagttctgacccaatttccactaaaagatccagagcaagacttgcattctgtaaccgccattttacaagcagaatcaggatacgtagaagtggttttctacacttatcatgactcataaatatccattgctatactaggatgcgagtgagatctccccagcgcataacttatacccttgcttcttggtttgtaggcatattttatcatcctagctatgcatgtagtacagtttaaccctttcatttattgagatgacttttgatgttctgtctgtttctgtaggttgttcatgatgttgcagcgttttcctgtagaatcaaaaggaagacgaaagaaattgcaggaggtacgctttggattctgctggtctgaattttttgggggtatttctgtacaaattatacgctaattatgtattctgcatacctctatacaggttgggtatgtgactaccatatgcttttcttgtttcttgatcagatgcgtcatggtaagcacttgcattttctttggattggtcatcattacttactccattccaaattataagacgttttgacttttgcagatacataagttttgttaaacccttagatatatactatgtctaggtacataccaagttaactttctcgctcgggatctgg

SEQ ID NO: 1549 - DNA, 802 bp, Zea mays
acgcaatttacggagatgtgctgacccgacccgtctacgtgctgcgactgcatgcattacggcttcttcggccagcgacaaacacgtacgtacgtacgtctcatctctcatgcatggcgcgcgcgtgtgtgccgcgccgccgtgcaccggccggcaggcaggcaatatagttaggacttgggacgcaattgctctatgccttctcccaacgatgcacttgagtctgttcgattggtctgtgacagtgaaaaataactgctatgggctaacaaagctaaaaatcgtttggtagaaaccactaaaaatccgtcaaaagttcttcaatatatgttttcacattttcatccgaaagccgctaaagcatgtctaaatatgctttcagttttgcactacaagaaacttggcttttagaaaaaaaaaagttgtttctaaatccagccctttgatttggcttttgatttttagaggccaaaagtcaaaccaaacacacccttaacatgctcgcaatatgtcagaaacagtggtgatcttgatgtccacttactgtttgttaaagaaacaaatattagaggccccatagattttgggggtcctgtgttgcgcaaacacatctagcaacgtgttgatcgatgggcctgcttttcagggagacgtactggttttagattatgaagattgttgcagaaaggacacgctccacacgaggttcttgcatgccgtatatgtcaatatatagagatggcagcaattgagaactttgcaagacatgagatgacagtctaatgctactttagaatgtgct

SEQ ID NO: 1550 - DNA, 697 bp, Zea mays
gttcctgaaacctacatgtaccacgttttgcttgcagtcctagtttattaacctttattaggaagaaataaactaagtttgggtgccgaaacagaccacgagtccacgaccactccattttcaagcaccaaactgtatcagcttctccaggttcatatatgacgatcctccatgctccagagcagtctttgatttggccttcagttccttagctttcgtcttccttgcctccccatccgcccctccatccatgagcatatccaaggcttgcttcacctgttccattcccacatctgcgtccgccttgccaccgccgtctttggcaccggtcagcacgctctccgtgggcttcgtcacgccgacagacactccgatgccaagcacgtggacgatcaacttctcgttcaggaactgctcggcggagaacggccaggtggccatgggcacgcccgcggcgacgctctccagcgtcgagccccacccgcagtgcgtcagaaagccgccgacggccgggtgctccaggatggcgacctgcggcgcccacccgcgaagcgcaagacactggctctccgggaggccgcttccatcggtgttgcgctgcaaccactcgttgacgtcatcgggcaacgtgtctgcgcccttgatgacccaaaggacaggccaggggcacgacacgagcgccagcccgagctgtata

SEQ ID NO: 1551 - DNA, 778 bp, Zea mays
cttgcatgcctgcagtcaacgccgtgcccatttgctgtgggcggtattgtatctttaagcaaaggctgcatgccacaaggaggaaaatgttctcaggaaacatagtacgtttttgtctcaaagtgacaaataaattaaaacacaatggtcttacttgttttttacagcatgctcacaatacggcaaggaaataatgttcaattaatttggttgccttggtgaagcgaaggggcttaccagaaaactcgggcagcagaaatgcccgccgtagaagttaatatatcttttagcaattgcaatgtcaacgaaatgataatcactccaaacttatatgttggatctactttaaatagtactagacagaagtgttgccgatgctgggctgctggcccacggttgctagtggactagtggtactggtagtgattgggatggcacatgcatcagaaagatttagtggatctcaacagctacttgtacattacaaaccctgggtgattgactaacctcacatttgtacaggactccatatgtgtcttagatacctttcttttaaaaaaaatgaaaagaaaaaatgatatcatgtgttaacttggtgatttcagtaaccagactataaaatgagatattgggatattctacctcagaaatactagagccgtgatctgcaatcttccctgttgagtgagagatggagagcatatgggacctgatgaaagcaacacgctggcttatagtggcgaataaaccatggtgaaagtgatcctgcacatcatca

SEQ ID NO: 1552 - DNA, 792 bp, Zea mays
gtgaacggcgcgcgactccacctcgtacgtaccgcacgggcgctcctcgaagccgaacaaaaaacactaaacacccgcaacatcccacttcccaccccctgcgcctctgcttgcctgccgtgccgtgcgacccccacccccaccccactcagtctctcccattcccattgcatttctcattccaaaaattaaattcaaataaaaattccatccagcctccctcccgttttcccattcccagctgcgcacgccggcctcccaaaaatcacgagcgcttgcgcggcaccaggaggaggacacggggagggaggggagaacagaacagaacagcagcggaagaggccccgcaccacgtcgcgtgattttctttaatccgctagcaacacagcgccccgcccctcgtgagcccctctcgcctccagtccacaccagccttcgtcccgtcctgccccccaccccatcctcgcctccggatctcgctccgccggccgcggccggacgaggcgcctgcgacccggtccgaccctccctccctccctccccctctcccgccgaccgcgcgtctgtcgggactcgggccggcttacttataccgctcgcattgccgggtgcctgctccatttgtccaccccactcgccgcgcgcgcggactccgtgccccgggcgggccactcgcagcttcgagctagctcggagcttctgagcaccgaccacgaggaggagaggtacaggctactacagttctgggagaatggcgcccggcggggttggggccccgcgcaggaccagggc

SEQ ID NO: 1553 - DNA, 851 bp, Zea mays
aaagtgaaggttctgaatgaaacggttggagaataaataagaaagagtatattagttttcaagccagaaaaacgtttgaagattaatataaatgagttctaaaaaagggatgtttaagaaaaatatataattaatgcacaagtaaaaacagattttacctgataccaggtcactttactcctgaggatagacaaaaagcaggcacatggtagaatataggcctagagggaaatacaaattaggtacaaagaaatgcaagcgaagaatccaagaaataggtaaggtgaactcaccacaaacatggtgagaaaagacccgaccagtgacatgacaagtcctgaaaaggctcaacaaccattgaagcagagagtcagataaaaaagaaaaaaggaaagtcttttgaatctaaagggaacggacaaacttaccaaaaaatggaacggacagagcaataataagggaagataccaccagagcggatctaagcatcattatgttcgggtatgtctgcttatttggaggtagcagttcctccaaactcagggctagaggagtcatggtcagcgcatatgtaggtattagttaaggacatagcatgcgatccataaaacattattaaacaacacagaacgattgaaactacatttattcatgaaaactggattaactgttagatgttgatagcaaagtttggggaggagaactataggactcactaaaataacaatgcaagtatatctatatttgtcctaagtcaaatattttttaactttgaccatgaatatccaaaatttatatagaacgagaaaaataacattgacattgctaaattctttattaaaaccaaataa

SEQ ID NO: 1554 - DNA, 764 bp, Zea mays
agatacaaagaagcgccaaattagcagaacaaaacgatagattcatagatgtgatttgatgtaaagctttaacatagaagtttagaagaaaaataagttgaaacaagtgcaacggtgtaacttcacagatggaatgagatttcacagcatcaccttttgaaagcacaacatatcttccaaagtgaacttctcacgagcttgtggtccaacagattttttagaaaaaaacccacgttttccagctgaatgaatctgcttttgcattgctttgagaaagccctcgacctgccattttccagcactgatatcagagtgggaatcaaagcattccttaccatatgaaactcaatagcagtactttatggaaccataatgccataatggacattttgatgagcctgtgggatgcttaggatatctgctggtattgcctaattgaatttccttgtctacaatgccagtgacaaggataaatgttggtgttaaccaattgagtggtgagagtatatagggtttaaagttggaacctacattttttcctatttttgatcatgtataagagaatgtaaagcttaaacttgaatgttatgctaatcattcttactttggattcacctctcagttcctaaagaatagaatgaaaactattgtgcagaggttatgtacgactactaattgacattgtgcttgttacagtctaattgaatggtgacacaatgatggatagtttttccctaactcgtttctgtctccaccaaactgac

SEQ ID NO: 1555 - DNA, 767 bp, Zea mays
aaggcatcgcaatcaccgcgccatcgcccagggacagcgacctgggtcttctcaagcgagcaggcctcacccaggctgcggctgctgccccctacccctcccccttccttgacgaggagaagatgctcaggttctccaaggcggctcacacattgcactcaggtttggatgcctcctcagtcctcatcaacacatcttccctcatgcatcttcattcttccttcccagttcccatccatactggagatatcacgccgcatgtgcatgttcttggatggatatgttctctgcaaaacatgttagacaggggtagtaagacggtctctagcggtagtgtaaaatagggacgcgaaatttaaaataggggatgagacagagtatccagtatcctctctcctaatcaccattctcatctcctatgccaaacttcaatctacaaatattgtttaacagtgtcacgcacagttctacgtttaaacgattcaccgcggccagtctctgtacactgagaatggcctaataatattcaaaaagaaaagcaaaagtcaaaaggagaacagcggtgcagcgttcattgaacttgatgagcgctcatgagtgctaccttatatggaggggcctagcctagcagcaatagggatttgcaaagcactagagctctccctgggtcctggggtctggggccctgggcccctccctcaccgtcaaggctgcctgtaaacatttcatctgcttttttttttaccttcacacttttgtctctggag

SEQ ID NO: 1556 - DNA, 964 bp, Zea mays
  unsure (1)..(964): unsure at all n locations
aaatgtctctttgcaatctataatagtctaagtttttagactctttccaacttccttatgataaacatgcactaacagttttcaacttcaaaaaacactgttagcatatggttgacaacaaaaactgttaggaaaggtcacacaagttgaacttcttgagtacactaaataatttgctactcttaaagctgccgttatgctgataacttaatgcatgatgcaggcaccaggccaactttgtcaaccagcatggtgagctctgcgtcagcatcagtgttttcaacagtggctacttgcacaacatctgtaaagacattttcactagcccaacttcagaaggccacagatggttttgattcaagaagagttttgggtcaagggggctttgggcgtgtctaccatgggacaatagaggatggaaacgaaattgctgttaaattgcttacaagggaggacaggagtggtgaccgtgagtttattgcagaagtggaaatgctcagtcgattgcaccaccggaatcttgtcaaattgattggtatttgcattgagcggagtaaaagatgtcttgtgtatgagctcatacgaaacggaagtgtggaatcccatcttcatggtatgccagccaaatagaaaaaatatggttaatgagccttgaatggaaagcgctgactacaataatccccataaaataatcagatgaggcttatttaatttgttaaacatgaactgtctgaatcagctggcattctaaaaatagaactgagttgtttgatggcgtagttctaatgaatcacatatttgtacaatattaactactgcgtncaaaacctaaaaaattttctgatgatggtgtctcagggaaacacagcactcagaaactaaaaagtaccggaagtccngattttttctttgngatgtttgggtctaagtgtaggaatttttttttacttaacatgattggttt

SEQ ID NO: 1557 - DNA, 790 bp, Zea mays
actggtgactgggcatgggatcccgctgacaatgccgcgcgagggtcgtgcggcccttctattcggccagaactgtagtccatagtgacaaacggtaaggaattccggtagtctagacacccagaggccccaaagccccagcttccactctcaaagaccaggtctccttcgtagtcaccgtcttggtcagatgaattccttggactgtaggaatcgtcgcaagcctcatctggatcattgtagatcagcttcagtgcctggacaacttcacccatgaacggcctctgcgatggatctgtgtgcacacacatggaagcgatggatgccaccttcgctacattgtcgaagttaaaatttccatccagagacggatcaattaacttctccaggccctccttatggcttagcagaggacgggcccaggttacaaggttctcaggatccttggactcagagatgtttacaggcttccttcctgatataagttccagcaagacaaccccataactgtagacatcgctcttaacaagaagatggcccgtcattgcatattctggagcaacataactgtgcagtcaaagagaaaaaaaaataaaatcgagtcaaataaaaagcaagacactgctgtgtacaaagtgtaggaaaacaattattgtgatagcacgaactatttagcaaggaaaataaaaaggaacgacccatcaagcattaccattgtttgacacaaaaaaatagtatcaacacactctaggaataatcattcttcgaattcaggaacactaggatttaa

SEQ ID NO: 1558 - DNA, 789 bp, Zea mays
tacatgattaaacaagcctatctcaaaaaaaaaatcatcttctacattatacagatgtgtctgaaaatcaagactgagaaatgttgcaaaacataattaacacatgaatttgaagattgcatttacccttatgtccagacctcccagtctactcctgataatttttcctccatcacaaacaaagtaaaatagacaactcaaagctgaggcccacacgatctcttgtcgctcctctatctatggaagcaagtaaatgaaacaatcacacatcagattaccaccatatgaaaatatagttgcatgacattgattatcaaagcatcgctcatgtttgaggactaaaaacatgcttagaatcaattaacttaattaatttaaattaataaaaacccatggatgaattggagcataaaaacacatcctcatgaaaaataaatagattcaatatcatacatataaatgtcactaaaagcaaaagctagctttccgagagcaacaacaaagaaaatagttaatttccttacacatttccttgagaataagagaatacaaatatcatgctcagaatcaatttcttaaaaaatacctgtactaggagaaggagaacctcaaaaagcattttaagaagccatgattcaaattgatcaatagcaggactgatcttctgttctacttcaggttctgcttccctcggttcatttatacttgatccgtattcattgctcagataagaacggttcacagattcacttttatctataagcggcgcatctccaataaccatagggt

SEQ ID NO: 1559 - DNA, 842 bp, Zea mays
aggatttgtactagctacgaaaaaaaaacagaaactgtgaacagaacagatacactgaagaccgcagtatgtttgttgtgtgttgtgtaagcaaagcaaagcaaagcaaagcaaagcaagcagcagattgacagtgacttacacttgcacctaaccacctaggcacctcccgcaagcgatttgttatgtcctactaactagctaacggatcctccatgccatcggtggattcaggtcccagaccctggcgtatccgagcttgggggcaacatgggttattattaaaggaggatccgtaatgaggtcacccgtgacctcaatcgaaaggtatttttggtgaaccaatccagttgcgcctgattatatatataagccaaccatgggggaccatggtatggtctagaaccgtatgcgtactttatcagtaaactgcccatgatctagcagtggtccaatgtttgtcctagactcctagggggaaaaaagatctgcactttgtgctgtgctgtttcttcttcttgttgttgttgtacgtagcgccgagatttcccagcaccgcttgcgatttagaaacccacagtttgttctttttcgtttaggggatggctgtacactgctgctgcttcttactaatgatagaaaggagaggtgaagttcgcagttgctgagatagacagatgatagaaggcaacgctagctaccgcgagggggaggaagatgagcaatcgggaaagcacggcatcaagcaagttgttgccttgtagttgtaggagtgtccttattgcgactttgtcaccctggtgacctgagcgctcccacgcggccatgtttgatgaattacg

SEQ ID NO: 1560 - DNA, 777 bp, Zea mays
ccgaccacgatcgcagccatgagccgacggacgtacgaccgcctactaaatctcttggaggtgcttttcgagcacaaagcaattaataaactaccgtacgtccggccggttaacgagaagcagggaacgcccatgcatcgtgatatatagagactgatgatcataagccactcgatctgtagccatagccgcggaggtacgcaaggtatcttgcagaactgaatgaaggaagaagatgcttacttatgccgccggtttgccatcaattgcttatacgatcaccttcacgtacgttagggagcgtatcagtaagctacgcacaacgatttgtaggtccaatccaaagtaatcgaatgaaccctaattaaagctgcgtgatagtcgccatcctatatatcctaggagcactcatcgatcggacgaccacactttcaaaaaaatacataggaggagtactcctaccgttagtcggaggaagccggccggccggcagcagcactatactatacagtacacacacacagccagcttccgagacaaacacccaattcctcaagagcaacagtgcaacacacacacacacctccattcatctctgatcaacctatccatccatcctagcctcctccgatccatggatccgccgggctccaacccagatggagtagtaaacatgacgagggcaatgcaggccctgtccccttggctgaaccacccaaggaggacgatcgcccaggtggaaggtctgatgctaacgggccgctgcgctgctgctga

SEQ ID NO: 1561 - DNA, 801 bp, Zea mays
accataacggggatatctcaaactaatggaggtatggaccttttctgcgacagctgctcttacctgaggtacaagcttatgctttcagcaaattgctgtgttgctttgattcccatatgcgatatctcatgtgttgctacctttaccacccaggcgattttttttgtcttagttatttactaagacaccttgcggtgaccattaaagagtaaccaatcgccctcaataggtccgtttttatctgccagaactgatgaggtcgctcactaggagtaagtcgcttccctgggaacggttgtcggctagcaccgctcttgtatgtatattaagagtaacttaatgattggtcttttggctgcgatttgattacatgtatttgtatcgggaggcataaatattgtgtaatttgtgttaaagactggtgtaattgaactatgggaagagctgctttggttgtaaccatattttgatgcccgtatattaggcaaaaatagaaggctgtgggcgtgcacaacatatttactgttcaccgaaatacttgtattgatgtatttccgcatcaattatagtcatcgtcagcttgtaactacggcaatgaataaataaaaattcactgagtatataattgagcaaataaaaattatatagttcataaaaacaaatattacatagtttgtaaaccataaataaaaattagcataattcattggtcctagccggccattttgtgggagccaagaggttggatttactaaaaaaatattttagcacatgtttataagctggtttgagtgtgaagtt

SEQ ID NO: 1562 - DNA, 1218 bp, Zea mays
ttgttcaacataacaacatctagtaaacatactgaatgcagtagatctagtgcctaacaatgaacaatggggccacaaaacatggtggagaaacttgcaggtgctatacttcagcatggaatcagacataatttctattttctacaacaaaaagataccgagtcaaacggtcaagcggtgcaaacacaaacgagtcagttcagaggattaagtattcatgagttactagatcgttaaacctagtgattccaagagctttgcatgaatcagccatgctgagtgattatcggttacttacatttaaggttagagatcattatttgacaagatacatatttaagccattgtgtgcaatatagaatttaacacaaatctggaacacgctactgacctaatttcattgagtgcatgagctggacaatgcatgcacaatatcttatcagctgtgggattacgccataccatgcgctcattcatgcatgcatgcttcaccacccaattggataacatatgcagataaaacaaaacaggaagttgccatacatgagaaggaagaacaattgactttgctttttggtactctctgacagcaagatcatattctccttttctaatgttcccacggattgcacttggtaggttaaatagtgttcggaatctttgaagcattccctgaacagatctgatcttttcagcttgggcctgtaccagaagttcagaattcagtgcactcaaggaatgttgaagcaatagcagtagttctagagaagctcagtttctatacctgcctctcaaatagaggctcaaatgcacgattcgccacaccactaattttttgtgtcactgaatacaagtgagcagtacctgcaccttcaggatcttcctctatctgtctcaattttgactcaatgtctgcataaaactgtgtattacaaggagatgcaatcattgtccatgtccagaaactcaggatcatgaacatttatctgcaacatggcatatctaataattgcgtaaataccatctattgtagttttgcacgagacaaaacaatcaaagttctccttgactaactgttttttctgctgtgttctccctttgagatcagttttcaaagtgagagcaccagcctctaaatcagcagcgcttgtgtctttgtggactcacaagagtgaaactttgggatcaaaaattggagatgaatagattactgatctc

SEQ ID NO: 1563 - DNA, 803 bp, Zea mays
aatgaggtcaccaaccaattgattaggtatcgtaatctaagtgtggtcttgctaagtccaagcatattcacatgatcaagatgtttgcagataatttcaggttctttcctgccatccagagcctcatcatagtcactgtatgcatcgtcgtcgtcgtcatcgtcatctgccattccatacccagatgtttccccagcatctgcattacgacaaagcttgctatcatccaaagtgaatgatacattgtgccccatacttggcactcgttccgattcttctactccaaagaatcttccaccattgaatctgccattatatgcttccctccttcccagtagacggaagtcaccttcattttctcttctgattgcactatctttggtttccccttgactttctgagaaaatctcggatgtggagccattctcacgggcggtacagctcccaaaaacagaagttgcattgccttcaccttcagcagtgtcgtcggcacaagaaaactttacaaacctcttatttactttagcatctttattatcttcttcaatctcgctgataggagtattcttgatgttaatatgtgaattatcttcatccagatcccctttctccggccctggctcttgtgataccgacctcacggctgcatcaaatgacataacatggttatcatgaatagggctccttgacagtttggatggcacctttggtgacgccttcttagcactcttcctgccagaaaaccaggatgctggcaatggagagcccaattttcccttgcttgattgctctgatggtctgac

SEQ ID NO: 1564 - DNA, 781 bp, Zea mays
caatcttgcatgcctgcagagtgcattacctgtcaggccagccacaaaggcagagaggatgagggactgtctaagaaatctcaagcaacagaataaggtacaatgtgtagtttgtcccttggggtctgtttttcattaggtatatgtataaatatgactacatctacatgtatgtaaaatctaggcatgatatattttttaaggttgaagtaatagattgcaccggcgagatgcaagctgtgtagttgtaggtcctttgtgcctttcggcaggtaggcaaccagatcgtaaacctctgatagatgaagtaattagtcttccagacatggtgcttataagaaatataacaaaagttataggtgtcatgctgcacatgacatagtactgccaatttagacagtaaggatggagtgcacagtttctcaaatacagaagaggacttcatctgtaaaatgttaagtgaattaggcttcacagacttggaattgtttaactgtagttccgccctctttgttttgatgcttaatatgagtttcaaagcttagcatcgtgaaaactgtaggggccaatttcatgatgttcaacaattggcgttgcgatttacataaccacgttctcatttttttttgtgacaggatgatgatgccaaaatgaagagggcattcccaaacacttgcttacttacatttggaaaacgttgcttaaaaattcctgaccaaggaagaaattttataaaaggatcaaggctgtaccaaattgcaaccatttttcaggttaccaa

SEQ ID NO: 1565 - DNA, 790 bp, Zea mays
tgtcacggcgatggcgagggcgagggcaagggcaaagcatcagcttcgcgacgaggagaggccgtggggggaatgctgcgacttggccgtatgcgtcaagacgtacccgctaacttgctcgtgcttcgatcgggttgagcgctgctccgacgcctgtaaggagtgcgtggaaacggaggactcgcgccacgtctgcgtcgacaggtaccgtggcgaccccgggcccaggtgccacgacgaggacgggaggagcggcggtaagagctacatatatattacgtgcgttcgtgtgcatgcatgcatgttaattaatactgtacgagtactatatgcgtacctgcctggtacatgactgcgtactcctatgcttgcatgtgagactgctaagaaaaatgctttttttttccttctcaggacccgctgacgacgacgctggtgggcaagcgacgccgacggcagtgatggcagatgacaagaaagcaggcggcggcgacgacgacaagaagaagaggccgtggaaatgctgcgacgtgcccatctgcaccaggtcctggcctccggtgtgccgctgcgcggacacggtggagcggtgcgccagcacctgccagcactgcgagcaggtggaggagggcggcccccgccgctaccgctgcctcgacacgcaccgcggcgacccggggccaaggtgcggcgacggcgaggacgatggtggggagtggtcgccggcgcggaggctcgcgaggggccaccgtttctagctagctatgctatgccatgctagccatagcca

SEQ ID NO: 1566 - DNA, 751 bp, Zea mays
attttatacaatgaggtgtttgtttgtgttacagaatactttgttttcaaaaccgtagtattgtgaataccatggtatatttggaatatttgaaactctactctaacccaaaagttttcatcacttgactagctccttgtacatttacactataatactctagttttagatgttgtttccaaacacgttacaatactatgaatgttgtaaaaataccatagttttgtcaagacatttgaataccatagtattcagtaacttaaaaaactttactttcaagaatgcccttacatgtctaagaaaacatgacaccaggtttaagctgttcaccctgaccgagggagctgagtatatataggacataatactgccactaggattacaacatgacatggagttcaactcgggtacacgtacttcaacgtactttaaccgactccaattctaactttgctatctctaggacaaattaaacctgattctatcctatctttaatcggagttggttaaggtcttcctctattaaggccccgtttggttcctttagtcacctgacactaaagtatcctgtttggttccagtgactaaacctgactaaagagcattaattagtgtgaataatgactgcattacccctattaattagtggctgcctgctgcacggagaaagagaagagggcaagtgaggtaaaaatcccattttagtcccttttggtcaccccctttgtgactaaagaactaaagtttagtc

SEQ ID NO: 1567 - DNA, 768 bp, Zea mays
tcccgtatagtcgacctgcaggctcattacaacatagcaagtatgtttgggaatcagaccatggcatgcatgtatgtttgggaattagaacattgtgtacatcatttggaatcatcagcaggaaaaaaagaagaaaaagtaaatgtactgcatgattagagtgataaaaagcaaggaattctccctcccgtgaaaaatagttgtcacatttgtctttgcacggttttgatattttctttcaccaccaatttcttctagaacatattctaaaaattcttgaaatcacgagattttgcaagtattttcaaacaaaaatctagacatatattaacatgtttctaaaccagataaatttgatattgatgtttgtaattttcaagttttcaccagatattatcctaaaacaacatgtatctatgaccaggagtcttttatttattcagagatagtcctaacttgtattttattttctcataaaaataacaaaaacggatgttgctttatttgcaagtagtaaactgaagagcaagtttgactgttaatttgattgaaaatattaatataaaatcacaaatgtcaagccttgcttgatatgaaaagatcaagcaataacgccatctcgtgaaaatttaaatatatagaaaaataaccaagcaattaaagctgcaagtaatacttaatctcctacattaaccgcataatttataactgctctacctggggttgtgccagcatagattccatacccaacatcatctgtgatgaaag

SEQ ID NO: 1568 - DNA, 790 bp, Zea mays
acaccggggagaaatgctcctatgcttcctaagctatgtcagcaagatcatcaaagattactgaagaagatgaaaaaagaaaaaagaaagggtacaactgtagatcgaccaactgttgcctctgctaaaaggctgggagacctaaattgaacgaggcagcaatccccatgccagtccctgctgctactccgaccttcactccccgttcacaaagcttttaccctcgtagtacttcttctcgctggcttccttcttctcattccgcttctgcaaaacaaaaaaaacgcccacatggacacagcgaaagtgaatacagacagcaccggatcgatgcaataggaacaatcctcctgatgattagcaacaatcatcaggtcacagcaattacctggtaagcttcatggttcgcaacaatcctcctgatgattgtacttgttgtgatatccagggggctctccagtcggcggtagatgcccatagccattggaacagcatatgggtgtaaatcgtcctacagaatgcaataggaacagttagttatcgatgttgcaacgatctgtgcgtccaagtaaagaaatggtccttgtaaatacaacttagttacctctgtgaagtccatgttctcagcaattgttccatgaacgactaaagagatattgaacgtggtaatctgcacacggacagaaagaagctggagaattcaggacgcggacatactagccataaagaaaattgcatcacagtcatttttttctgacctctgtcaatacagaagatgggctcaattgtt

SEQ ID NO: 1569 - DNA, 687 bp, Zea mays
aaaacagagccatcgcttctcttcaagaagcaatcttgggagctgcaagtgagacgcgcgttcgaaagaaacacaccgcttcctttgattttcctcgagacttctctttgcttccataaggtctttagcagctcgaatcctctccctctgtacaaacaagaaggagcattcgggaagatcaccacaggatacacttaagatgttagcgcgagaaagcacattttgaaaaaagagaatgcaatacctgatcctcttgtaattgactccgtatccgccctcttgccctcccttcctcgtctcgtttttgcttatatagtgctaatatcctgggaagtacagtacaggtgcgttactgggggtgaatccgtgataagcaacctaatccaaggcaaggtacacacctctttctatcttcttcctcctgcccatctgcatttggttctcgttccagctgggatgtctcctagtttaggagaaatttgtagcccatgccactcagtatgcatggtatgaagttttaagggaaatatttgatacatcaaataagaagaaactaagtacattctgtctcccagtttcagtgtgttctttaggtttctgctcctgcacagtatccctgcaagacaagtatcatccattacattctatactgcaacagcgtaccatatcaagcaacagaaatgccga

SEQ ID NO: 1570 - DNA, 852 bp, Zea mays
gtcaaagaacaacaagatgttgattgagtgatgtgtctactgcctgcaaactcgactaaaacagagaacacgagaactgtacccagttttccatgttttgtgtataggtcgccacattttggcaaggaaatgtatcaggggcggtcaattgactcaggttcaggtgcattgtgcatatgtcaagacactcccaattacaccctttatttttctcataaaaaaaacaatgttgttatctaccaacatcagcaagctgtgttgtaaaacatatctttaatcgttattatctttctctttcgatctatcaagattcatgtggtagatttaagtgtaaaaatatatagacataagataaggaaaaaaatattttttactctcagtattgatggttacgataagagctctctctctctatgactgtataaagatgtgctaaaatatgagaattttgtaagattgctagtacaaacggactcgaatacctcctttctctttccttctactagtacaatggtcatacgttgtaacagcacacaatcatacacaatcatatttggtagatttaagtgtacaaaaatatatagacataagataaggaatttttttactctcagtattgatggttacgataagatctctatatatataaagatgtgctaaaatctgagaattttgtaagaattgtcgtacaataaacggactcaaatacctcctatcgctttccttctactagtacaatggtcatacgcgacatgcaatcatatttgataccaataaaaaataaatttaatatttgttagcacgcttttgggggctaatcaccaaaacgaaccctaagcccgacgcacgacg

SEQ ID NO: 1571 - DNA, 739 bp, Zea mays
tacaatactccacgaggaaataatggtagagctgaacagctggtagctggatgcgtcaaactgtggaaaacttgaaatgctgcaaaaatcagaagcaatatatggatttcgacagcttctttgcaccagcccataacccaaagatcaaaccatttatgcttactgccctcatcccaggtctacatgttagctagtctacatgttagctagatagctatagtgctgttttggtagcagtgtttttgtcatggatggtttcatttatgcttgttattggccgccgtagggcggcttatctgtatcttggggtcctttttagaccttttcccccttcttaatatattttcgcgcagctctcttgcgctttcgagaaaaaatatatggatttcgagaaggaaaaaaaacgagtcccaagagcagcgaaaccagaaggacagttgctctggaatcagcttctgacttttgctgccctctggatatggtgattgcgagcatggtcagtgcaggtactcgtgggaatggatgctgtggtcatcaacggcaccaggcccagcatctcacgtcagaacgcaagcaccgcaaccctttccagcacatctggtcgcatgacaagccaatcatccagctactttatgatatattaacacgggcataaagtactaggaatcaggggagatactttcatcactcacagaaagcatgtgatacgaaagtgaagagagcccaagtcaccatgcat

SEQ ID NO: 1572 - DNA, 716 bp, Zea mays
tgctgggatttgtgcgttgtctactgttaggcagtctcggaaagcaaactggggcagctgataatctgaaacacggccagctaaagcagtagcttcagcctcaagtgaactatgtccggtaggtgtaggtggatgtgcaacatcacctagcaattgttcgatgacaggtatgaaaggcgagcctctctccccagttggcaatgaatgcctattggccaattccatagcaggctctgggtccttttcgcttgaatttggaaggttttctgccagtagaacactgttgtcccaccaatcttgcacaaagctgttagtgctaagatcaagcatcatagtttccagcagactgttgtttccactacagtccttcatgttgttttctagagtttcagcagtagcttcttcaggtgatctgttaggtaattcaggaaatgtactgttaccctggcttgtaaagtcggcagtatccttgaattgacttgagtcaccttgaacaatgaaggattcttcttgtgagaggagcctcacagattctccagggtcaggtatcagggattgttcgtgcatgagggcatggtatggtgataggcgattttcttggaatttagaagcacaagggttgctgccgaatgatacagatttacatagaaacttgtcactctcagtatgcagggcaatctttaacttttcccctgatactgctgtaaacgatgacg

SEQ ID NO: 1573 - DNA, 768 bp, Zea mays
atttgttacaaggagctaagctgttgctgagggctgttcgttaacgccagggccgaggacccccagatgttgaactgtgatgtgaagtcgaggagaagactcccgtggatcggaagatcctgagtggattctctatcaaaaatgctgtttattttgtgtgtggatgggtgtaataatctgctgatcatcgccatttgatgacttctttgttaagtagcgtggctggtgtgtgctgtcactatgtgagcaacattctggcgttcgtcgtttaagtactttggtagtagttgggttcggactgatgctggctttgctggtttgtgttggtcctgaataatgtcttagccccagcgctgtcttcctttctgtttccctctgttctctcagtgtgcctgctgaactcttctgtattttctgttatataaatagtagaaatggatctagctctatccgttcgaaacaaatgtaaaatttctgtcctcgtttttttgttaatgtttaataacattttttttctttcgttgcaggatatgttcgcaaagtccatatcgatccttctacgcaattgacgtgtcgtcataaatcacgcgctgatattttgtttagctcatacttcatgtaagtccctaaagaaaattctggtgaaacctcaactgaattttactaatctcgagcgtgcccaaaaaaaaagtatgataccggcccgaattgagaacctggattggagctagcgtgaaagtgactttctttctttttttttttcattca

SEQ ID NO: 1574 - DNA, 788 bp, Zea mays
catgcctgcagctgtactggacagacattcggtctgcaccaagaattttgtgtgctataatgctagcacatagatcacattcaaaattgtagtggtgataagagaattgaagtaactaacagaaaaaatattataacatgctagtctccttttcaatggcttgctcaaaccattggcatactcccaacagagagatactgtaagaagtaaatcctaataaattggacagatattgtgaattagggagcacattagtaagatcatatatgctattggacttgcagagatatgttatatcattccgctatatgcataataataaacttgaaatgcatactgatacaaagtaaggaccaaaatacatcatataacattaactaatgtcacaagtttacatctactgtcaacttcttgtgttcttcaagcatgcggcacatattgacatatgtacttgtcagaatagatgtgcagcaattcaaagcatgaaaacacgactaaattgaagatcatgaacactctatgctggttctgataatttgtttcaacatgaaaaaaatcatgtcaaattgaaaaggagaataacaagctataagcacaaagtgatgaaattaactcacatttcacgcaatgtattgattgtacccaatgtctcaggtaccgatccagatagctgattttcttgcaggtgcctacaagataaaccctcctctaagtaatgtacattgtacagacacacatacaactttgtcgatgaccttgaaaatacgtagctaagggtcttacagtcg

SEQ ID NO: 1575 - DNA, 737 bp, Zea mays
aagagtggattgtgggtgggttaaaagttaaaacattggattatcactacccctacccctaatccatggctgactggctgagataccatgttactaatctcaaagattttaaaagacaatgtctccattagtggatatgacattatatagagagcctcatgggccatatgtgcatatagaataggccttgatatgtacttaataacatagatatattggaagctataactctttctgtggcctggtatgtttggtttctaaatatatctggttgcccataagattttccattgggaaataaggatggccaattgcagatataagtggatgagtttaaggcttgaattggttgaataaatgcatgatacctaggggtgaaaatggaaattttttatcggcaatatgatgctttatgaaacctacagtagtgttgcctacagatttaggctttatgaaataggaggatactgatacttattcgtccaatggtgctacaatattaattctcctttgccaccactagcaccgttagagctgaaacactgcaatcatccaatgctggctggctggggaagtgtgcgcgcaggcggggggcgacaaattttcacggtgctggctggtgcggcaatcgcgtgtgcgcaggcgggaggcagcaaattttcgctgcgcggtcgagtcagtaggacgacgctcggaggaagattattcccacgtaaaaggagtagagatgtatctag

SEQ ID NO: 1576 - DNA, 757 bp, Zea mays
ctttgcatgacctgcagcagcttctagtggccagaagctgaaacaaaaacaaaaaccacttctgcatgtatcaatgtttttgcaatggcaatgttgctagaccttgtaaccactaaccagtaacctatacaattcctttaagagaaatatgcatatggatgcagctttcagccaaaaggctgaagccatttgtgtgatggagaacatatcaccttgaaacgtcatgcccaaatagttcaggtaccagccaagcatgatacaccgctaaaaactgtaagcatttgcatgaacaagataaaactaactgaccaaaatgtatactccatttccaaacatcaggtgttttaattttgtcaagtgaaatttctctaacttatgagaaatttatggaaaatgtagtaccacccacccccaaaaaggaaaatttacaaatgtaggtctttctagccctcccaactattctcaaaatgcaagtcagcctaaaacttctatgcatcttttaccccttctcttccctactcaataaatgccaatactctcacagatgaatgagccctctttccaaatgcagaataatgaagagtaacaaggccatttgacccacattcttaatccttgtgcacaagtcttaaacaacatttggaataggaggggtctagcatctagccatctactataccaaataaatgcagtatcatggtggacttgatgaaaccaacttgatgttgtacatgttggtgcgttttttctataaaac

SEQ ID NO: 1577 - DNA, 711 bp, Zea mays
agcgaccaccccccgacgaccgccttgccgatcgccgccccgatcgcgccgacgttcacggcgatcaccgctattgtggggatcagcagtggcgtccactgcaccacgtacatctcagcgtacttctcgttcacggcgctcgtagcctgcttcgccgtcagcttgaacgaaacgccgttcccgcgaaggactagcttcagcacgatgtgcagcgtcgctaacgggtacacggctgtcgccccgatgatgtagaactgctcgttgcggatccagtccagcagcgtgaggcctgcccacttgatctccaccatgccgatcagctctgtcattgctatgatgacgacgaggtacagcacgtatgtcgggaacggcttctggatgtagaactcgccacggaagatccatatgacggggaagaggaggtagaacacaaggaagaccgatgagattgggtaggctgtcatgttggtgtaggcgatccgttgcatcaagttcagtcgacggccagcaaggagcgggcagtgtgagaagaacatttcaagggagccgcccgaccagcgcaggatctggcagaggcgctccgtgaggttgattggtgcagtgccacggaaggcatccggctccatgcggcagtacatagatcgccaccctgtccggtgtactcggaagccggtcaccacgtcctccgtagcaatgttgtacacccagcct

SEQ ID NO: 1578 - DNA, 820 bp, Zea mays
ttgcatgcctgcagctctattttgcaagtcgttactgacaacttgtaacaaattgttgtatttacgggcatttttaccatcaaatacaatacaaaaccgcatctttttttttgccattgttgtatttaccatcaaatatgatattaaactgttgtatttacaagcattgttactagtcatagtattccactatgtactcatgccaatttcagtgctaggacttctagcaacttttcctgactacatgttctaattctgtttccggtttatctgcaacaggttgttgaccttgctgagattgattgcaatcatcctattcttcatatggcgtatccggcatccgcatgccgacggaatgtggctctggtggatatccattgtcggagatttctggtttggtgtcacttggttgctaaaccaagttgcgaagctcaaccctaccaagcgtgtcccagacctttccctcttgagacaacagttcgatctccctgatggcaactctaatctccctaggcttgatgtttttatcaacaccgtcgatcccataaacgagcctatgatatacaccatgaactctatcctgtccattcttgccgtagactacccaatcgataggactgctacctacctctcggatgatggagggtccataatccattacgagggcttgcttgagacagcaaatttcgcgacactctgggttccattttgccgaaaacatagcattgagccgagagcccctgagagctattttgctgtgaagtcgcgcccatacactggaaatgtaccagatgagtttgctgatgatcatagacgcatg

SEQ ID NO: 1579 - DNA, 737 bp, Zea mays
atcttgcatgcctgcagtacactcgactcgaggttggttaggtttacagctcacttactcaagaagggaaccaccttgtactgccaaaaagtcattcagcaaagattagattgcccgggatgcttaaaacacccttcaagaatggcgatgccgcagatttcctcttcactgtgcggcacatgcataccgccattcataccatcatagtataatgcactactagtctcaaggaacctcctcacagaggtaggtgacaggtctacagcacaactgattccagaatgtcagagcaaatattcaagtccgaatcatcaatcatgtatgtatcccagtctgatcttctgttggggcgaagagcatctcttttctttttcctctctctggtcaggtgggcagttggggagaagaatttgcccagacaataaacaaacccttcagatcatcaaattatatgggagggtgtttcgtcagaccaagagccctattccagggcggcaagcaaatggaccaacatgtggctatcacaattaccccccacataaaataaaataaaataaaaatcaaacagaattctgaatccatatgccgcctacagagatgggagcacgcctcaaactaatctcgcacccacatgtatgtataaactactaatcagcctcagcattccaacctgctttcatgtcttgaggggtacagcttttggccaaagtcagcgccgttacctacctggagcttat

SEQ ID NO: 1580 - DNA, 716 bp, Zea mays
gcttgcatgcctgcaggaacgatcgccataaaagtgactgcatatgtgctgtttgtcaagttacaaggcgtaagaaagaaagggatgaaatagtggctgttatagataatgaaactgctgcaatggatagtaacccttctgagcagcatgacatggaggttagcttgaacatctacatcattttatttcttttgttatgctttttggtcaaggggtcttcccaaatgcgctttaattttatttctccatgtttctgttgccattttggtgttctggaagactcatatgacacttctttcaattgaacaaccatgcctctgttatctgcaactctttgtcgttaacatcaaagtagtatactcatattacaatgtctccgtttgaataatggcactcttgtttctgcaattttctgtttctggaaaactcgaccaacctaggaggaactaggtgtctttttaattaagaagaaataggcacccaaattctccaattttctatttctatctttctgaaatctgaacatcaaagtaatgcttagttgcttacatatcaagatgatgttgggtatatattacatctgcttgaatcattccaagtatcaattttggcttttctcactgtatacttagtcatggcacaatcaatgttttttttactctatactacatgttgggatgttcttattctccgagcgtaaaggactagaggtggtt

SEQ ID NO: 1581 - DNA, 865 bp, Zea mays
  unsure (1)..(865): unsure at all n locations
atggcatgcaaattttctgtgaggaaatagaagtgggtgtttaggcatgaaaggcttagcaaaaccatgccctcaaaaaaaatgtggactaaaaggcaaatgaaggactcatttcccaatcacaggctcacagcacttcacatggttaaatgttgtgtatcataattttgcaaacaaaatggaagtggttcatgagtaaccaggtattttacaacaagaatcaagttgccaagcacaaatcctgtaatatgatgcttatggctttaaagcctgtgcgactgattgcgatgatctgacccgaaggtagggtctcagtttggtagaatcccaatatttggtaggactgtaggggcaggaacaaaattttcatatacaagttacttttcattaaaaaaatcacaacagaaactattactgacaggtatattttgttccaaatttggcagacccatgtcccgcctggacacctagtcgccttttaaacactaatcacaacagaaactattagtgataggtatatttttggtaagtcgacatccaaacagctcttattgtgaatggatgaagtaataaattgttaaaaattactcattagttcaaccatatataacaataaggccctgtttggtttgagagactaaatattagtccatccattctagtctcatttagtccctaaattgccaaatggtgggggactaaaacaaggactaaactgtattaattccaccttttgcccctcatttatttcagttgcactaataacangagaatgttaagaagcattttggtcttcttatgagccatttaatgtgttttgaatacttttaatccctggaacccaatagagtaaggactaaacttt

SEQ ID NO: 1582 - DNA, 575 bp, Zea mays
atttaatacctgggtaggagtcaaaacaggtactcttacagaaagtgcccatcgcagttcccgtatatcccgtaaccttttccagtcagacataccagaagcccaacattttattgtccaatcaattgacttctttgaccacagccttcttattgcatccttttcaagtggcccaacttgtgtgccatctttatcaatgtacatccactcttttgaaggttccataaatgcagttgccgcgatgaggttagattgcaaaggaatagctgtccgttcggatgtttcatgtgcaacagtaagcaaatcaacagccaaaacacagcctccaaccaaaacacatgcttcaacatttgaaaggtcattcatcaaggcctataaaaacaaggaaaaagagcgagaaaatttatcagcatttgagggtatgtcatcagcagatccataatagtaaattggttcttgaaaatattgtccaagattaatgtccatgtccaaagccaatgcctagatactcatcagttgtactgtcagtgcccattgcccaaaaaatgaccacataatgaagcttggtgatattt

SEQ ID NO: 1583 - DNA, 768 bp, Zea mays
tacaccttctggctgacgctctggtacggccgcgtccggttccgcgccacgccgtagccgttgccggtcgctgacaggccttcctccactgcgccgtacccgaacgccgaccagccctggaggcccgcgctgaagttggcgttccggaggatgccgccgccgtactgaggctccagcggctccggcaagcactgcgcccacgcgtttcgcgtgcacgagagttcaggtcaacacaagtttcaccatccatacaacaacagcgcgcagtaaacattactactctgtgggtgggtgggggacgagggcggtgaacggcagtttagtcaccatgtaagtctgtaactgtcaaaagagtgccgggccggcctgtcacggtcccagtaaaagccatcgaaaagttttgcgtacggtaactaactgtggacaaaataaaaaggctgctaagtagagtacgcacatgccagattttgttcggtgcactgtcactcatttgcagccccatggctgttgcctgttggtctattccaacctctccttttggattatttgactacaggtcaaccagagtactatacgcatacccatatctgagtcagccggctgcataggtccaagtgatcgcgtatctaactgacggcctaacaaaagaaaaccacgttctactcggcagaagaaacaattggggtggctgaggctgactactgtgaaaccaaacctgcggcgtgcagaataactgaaagcgaggcactttgctcgggagccccctga

SEQ ID NO: 1584 - DNA, 628 bp, Zea mays
atgactatgcagtaagccttggggctgctgcaactgtatgtggtataattattggatcgatggcagtcgcccaagtattctcctcagtctacttcagtgcctggtcaaataagtcctacttcaaacctcttgtgttcagtagcattatgctgtttcttggaaacctactgtatgcattggcatatgatctgaattcactaatagttctcctgactggacgactgctatgtgggtatgcaattttctcaattcactctatctcacttgattaacgttccacttttgtatgctagcattgatctgggtgaaaattactagtatgacaaatgcaggtcgaggagccttaagctgagggcaatattctagaatatttatattgctgaatagaaaacaaaatggaaattgtatatcttacaaggagataaaggattttaaatctcaagactggcattaaaatatatgcttttctatttcttttatagaacttaactagttatcccttcctccctttgggctagtaatttatctatattgtttaaggttcttgattttctgacggtgcatctgtgatcgagctgccagcatgtaatgtgcaggttaggctctgcaagagcagtgaaccgtcgct

SEQ ID NO: 1585 - DNA, 788 bp, Zea mays
gccagcacaaaacaaacgtacttttgacacgggcatgtgcatgtctgtggacatcataaccacaaaactggtagcaagcttctacatccatgtagattatatatattgcttaagaaagaacaagacgtaccgctatgattgggtgggcaggctgaacacggacagctggtgatgtcaggacaacaccgctgatgagcgtttctacgtctggatcaagtgcagcctgtcaagaatcagaacaattacaatgcacagcagagaagaaatgagtaacaacactcttggaggaagtaagcaccacaacgcaacagtgcagttcatatggcgccactgacgttaccttcagaatgatacccccacccgtcgaatggccgaagcagaagcatggaagaccagggttctctgctgatactttcttgaggtacattttctacattgatcacaagattttggatataatctacacagatggtctcagctcagatagctgcgaagatattcaactgttctcaccaagtcattgacagcgtggtcaagagattgcacatatccatgtagaccatcacttccaccatgacctgtaacacagcgcaacctacaggttagatcaggctaacaaatttgtcactggttctcattgcgtgcttgcagttgtgacaaatttcctagtattagtgaactcaatagtttgctgcattattagtattgctattaggttcctttaattgttacaatctagaatctcgtcctatgctcttacagtttgggcaacttcaacctagcatgca

SEQ ID NO: 1586 - DNA, 836 bp, Zea mays
agttcgggaacaagtgggcgaggatctctacctacttgccgggcaggacggacaacgacgtcaagaacttctggagcacccgccagaagcggctcgccaggctgctgggagcgcctatccgccgccgccagtccagcaggagcaggagcgccaaggcgcctgttgcctcctctctgaagtcgcgacccgccaccgtggtaaagccatcgcaggttgcaacacacattgcccgctccgctttcttggctacttgttttacaagtcttctccttcgttgttcgctaaccatttccagagaagggataacttgcagcttgaatttggtgtcccctgggatgacaaaaaaaatttaacatggatccctgatgcgtcgtcaggttccctgcctggatcaagttccattggagggcagctccaccggtgtccacccatgcagcgcaggcgcagcaacaccattcatggacgcgcacagtatcagtgctgcactagccccgtatgattgggcaggctccgggcttgccagttccgacggagcactgccgctggcctccgacatacacgcctgctcgtcatcaaacgctgccgcactgccaccactgctgccgttcgaccagcctccgtgcactgagcttggcttcccagggctaccggctggctggaacatggctcctgggttcgacaacgtcggcactatggatcatctcgcctaccaggagctgctcccggtgacgcaacccgctccaatgatgctcccgttcttcggcacggagtacctgcacggtggcgccaaggccgagcttcctgacgcggggcccgactacttcttcgacgacctg

SEQ ID NO: 1587 - DNA, 806 bp, Zea mays
ttttcttccccccaccacacccatcgcgtgcggcgtgtgagtccacggtgtgatgtcacggagcggtggcggctttcccgattcactgtgcgggagaaatccccgtgcagccttcttccacctcctcctactctccgctattcgtcttcgctgatttctgccgctccaattccatcgcttccctgctttagaaccttctctgctagcttctccccgtcacagcttttggtgcctcgtcatcggcgaccaaaccgccggcgaccggataaactaagccagctccttcgctccgaaagtcgtctctcgtagagagcacttgctcacctgctccccgcccccctctgctggcgctggacttgctcggagtggagatccatccggacctcacctggttcgatttcttcatttcggtaagtaatcctagcttgctgggttgattcttttgactcttaagagttttttttgtttgctgaacggaaggattccgagtgtttagtttgttggggatttgctgtctgagagcgttgtaatctatccatgcagggttcgattcggtttttctatcccagagcgaaagatcaatatcacctgacacaacataacgatttcgtggaagccgaggtgcgcgggcatttattttttctgaaatacggactgattcggaattgaatccctatactatactttgggtcgtccgccccctgtgtcactgtgttgccgtgctgtcctagtttcgtacttgctttggaaagcttggcgctgctattaaagcagtatcatttgggaggtgtttcatcacttggctt

SEQ ID NO: 1588 - DNA, 808 bp, Zea mays
cggcgatcttctagtgttcgacctgcagacttctctcaatatgatctcttgatccttaaagaccaactcgatatatttattgttgatgtgaggggtaattctgattttgcaaattgtgaagacattggtaatctggctattaagatggtgcaaaccgagagacacctagtttttgcattggtttatcgtctcattgaattagccttaattttgcttgttgcaactgccacggttgaaagagtcttctcagctatgaaaatcatcaagacagaactgagaaataagatgggaaatgattggttgaatcatagaatggtatgctatatagtaagagacatctttgcaagtattcaaagtgatgatattttataccattttcaagaattgaagagtcgaatgaaaaagctagctccacaaagttcaagtggtatatttttgtactcacttatacatttttgcattcattagttatattgtcatgttgtatctcttattttatacaaatattgaacttgtaatgtgtaggttcaaattcacgtgctattattgatgaagttattagatgcggggaaggaccaaatcgtctctaattaggtacttttatatttttaatcaagtttattgtatttttagatgctgaattgaagtaaaaactatcttagtctatgtttgtggtatatttagttttaatggtataattagccacacaatatattaggggtgtttaaagtaatctttaaattttatataatggtgacgtgaattttatataacctccgcagctgtgtacatgctttaacgcaaaatt

SEQ ID NO: 1589 - DNA, 675 bp, Zea mays
cttgcatgcctgcagtaagatcatgacatctgtgcaagaagccatgaagctgtcagcctccagcatgtcgtcgtcgacaagcatgtggcgtgagatcctgctccggttggcgctgagtattcgacatgtacgtgacattgggcatcctaggacgacaaggcgtgcgacatggtggccatggtcctgtatgtgtcgtaggtgttcagacacgtcaagatgacctcaaagcgtgccgctcggtgccaccatccgtcctcgaagctgccaagatggtggcaaatgtgagtgacccattgtttctccccgaccgccttggcctctcggccaaagctgctcaccagcgctgagggcatggccacgtcactcttggtcctcggcctctcaatgcgcgccccatggcctcatggtgagcgcccgtggtgtcgttcgtggcgaggttgacaataggctcgagaagttgtggtagagttgtgctggtcttggcgcatgtatgcgtcatgtcaccatgataagagttgccactttgccagtgtcgatgcatgagtgtgatgccgacgtcgatgtgtgtggtgcatcccttgtcgtttcagaagaagatgacgagaacagatgcaatgcatgtgccctgtagcggagttgctacggggcaagtaaacatgggggtgccgcggcacc

SEQ ID NO: 1590 - DNA, 662 bp, Zea mays
aagatagggcatattgccctcaattgctggtaccgctacgatgagagctacacctctgacaccaagactacaggtctatagcggccacccatggtggctatggtgtcgacaccaactgatacaccaacacaacggcaacagatcacattacattacttggacaagctaatggttcagaacaagtacaagggaacagatcaaatcctcacaaacagtggagcaggcattaatgtcaacattagtcatgttgttgttgatactcctattgaaaccttgtatctcaacaatgtcttacatgttcctagtgccacagacacagagaatctagtctcagttcattgttcttccaaagacaaccatgtgggttgtggcctatctttgcttgtgcatgcttcaatgccactaaaattctagggtgaagcatttgctgttgttgcataccttataaattgcacaccgaccaagttgcttgattattcatctcctcttgtgaaattatttcaacaacctcttagctattcttttctcaaggtttctaggtgtgcctgctagcctaacttgtgtccttacaacacccgcaaggttgtcatttaggtcacattgttgtgttttcctatgatacaacaccatgcataaaggatataagtgtctcgaagtattca

SEQ ID NO: 1591 - DNA, 721 bp, Zea mays
tccctaggttttgcatagaacgacgtgaagtgtggttgggatcacgggttcgatcaattggcagtcttacgttgacgctatcagtggtagctgacatcaatctggccggcctttgtgagttttaaactggattctgttgtccttggggaaggttaggcccagtggcgggcccaggatttagaaggcgggtattcaaaaaaaattatgataaatttttttctagacataaagcttgtttattagcatatatgtagttaattatatataatctataattaagtacacacaatatagtcataaccgatccaataactagtctactaaactcaaattacatacaactatttaaaaaaattcaaatcgaaatgcaccaggggctattgctcggttattgactagatacttatcatatttggctctttccaatcgctaatgcttcacattgttgctaatgtcccaccaagacctaacagctcttccttggtacgacaataaggtttgaaggttttttgccgtgagatactaaaatgggttatatcactccattggatctcattggacacaatcatacaacaatttattgggctaggtgggtatgggaagtagcaaggagattagaaatattttggtctaagttaatagaaattcctccacttatttgattcatttcttatttcctatgtatacatactatatatatatgtatatgatgattttgtca

SEQ ID NO: 1592 - DNA, 712 bp, Zea mays
tgaaggacgacgacttcgttttaaggcggcaacaaaggtcaaacatgacgctgagccgaatagaaaaaaaaaactatttataaccagagaagtatcgaggtgtaaatcggccatcatcatcgacaaaacaacgacgatcttacctttcttcagttcccactcgaaaggcccaatcggaactggcctgctggctgctgatgcggcccatggcccaggtgatcgtccccactgacagtcgcggccccaccgccgaaaacttgggttcccacttcccgcccatgtccatctcaccgtctccttgaaacgcacccgagccaggtcgagccgtcgagtcgagtcgtcgacgacagcacgcggcgggcggaaggggacgcagacacgcagttgcaggctcgcagcagcaagtatataatacgaaccccctcgtcaggcccagtaaattttttgatgcactattagtagtagtgccgctgcccgctggtgctgggagctcatcatcattcgtcggtagcaggaaggaggcggcgtggaaggggaggcagatgcgggaggcccaccgcagggtcgtcgcaccagatggacacgccggataggccccgcgccgacgacgtcgccgggttcgaggtccgccatctcggttgcgtccgggggcccgcccccgtcgatgcttgttcctcaccgatttccgctggtctgatgtgggttttctagg

SEQ ID NO: 1593 - DNA, 732 bp, Zea mays
tctgttataggtcttgagacagccatactgatcaagatcgctgtcgtttttccttggtatggcaagcttctgcggcaggcaacccagagcccccgtcccatgtatccagaagtttcggctaccgttgctatatagagtctgggatttgacccccaaaaaaaacaaaaagagtacagagattagtggtgcgccactgttctttgacatgaactcataagctaagcaggtataataaattactaataaaatcatctcttttatacatgtagcatgtttgttcattcaccaccagaaaagcatgtgcaatgaggatcgctgattgtgatatgtattcaaaaagaaagtactccctccattcttttttatttgtcgcggtttagtttaaaaataaactagccggcgacaaatattcgagaacggagatatgaattgtcaaacagtataaatgagaaaaaaataaaaaaacagaagctttacctggacagcgtccttaatctcagcaagaattggtgggaatttggcaataacttgatcatagggcaagtttgacagaagagcgtttacatcgttctgccctatgtctatcatatatagagcgttttggaatccttgtgcatcaattggtccacttagacctgcatttaacaagtgtggaaggtagtaattttgcagtcagctgttcaggtagatctctcactcaatgtacatgtaaatggttctcatctctggttc

SEQ ID NO: 1594 - DNA, 809 bp, Zea mays
agttataaaggcacacctgggtataggtctttgtagatgtagtacaacttgagtttggatagtgtttgctagccgtactgtccatggtctcatcatcagactctgaaaaaagaatggccaccagtgtgactgattgcacaagaacgaacttcctcaaggcaggaggcagcagaaaggaggatgttggaataaccagggctagaatgcattcatttcacaacaccataagacctaacaaacaagtggcaatccatacagatcagctgaaatactcaacactgattcttagtaacatgtagcaggcagatctataagcttgtacagttctaatgagcttatgatctgtcatgacaaaggaaatctagaagtttatgaagttgcagtgctccagcaagcagccggtaggttgttgaccatttacaaagacacaaactcggtattccatcccctgaaatgaagtgtagaacatcccagttggtaatctatgctgttccagtaggatataatgagatgatcatttctaccaagtatccgacatttatttcctatcctttagggtcaattcagttataagtttgagggttgggcttatctgagaggcgcctcagttagcctggcatgccactcaatgttcagttagctaccacaatcagcaggtgtcaaatgatcacactagaacgccgtgcatcaaatagaactaggatacatttctacatgattttacacaactatatgagatatggttttggcactacacatgaagaagaagatgtttgtttggatggtcaagtagtgcctaaaaagaacat

SEQ ID NO: 1595 - DNA, 783 bp, Zea mays
accctatgactcatggctagccatagtatcttatgctgagtgaactcatggctgatatgccttatgagcatgtgtggaatcatcactcacacaatgtgaattccgtgggttttagtcatccactgcctttcttgccttttcagaatacatactccacacaatctttttttttaaaaaaaaaagaggcaaaattaaaactaccatatagttgagctggaacctggaagccttattttcttccgatgtaaaaacctgttatctgagtggagatggtaaccgcagttggatagtttgcttttctctatttacgactttccggatgcaattacatgtgtgtactaatcactaaggtgccgtttggttcatgaaatgtaatgtaaatggtaacggtaatgattcacactcggttgtcagtgctgacaagttcgaataggacggtatcaatttctagtgtggtgtcggattacgattggacttaaccaaacatggtttaacgttatcggttaccgttcacgttataaatatgtgaaccaaacaacacctaaatgtgctgttcttgatcatcttgagtggcagaatttatacaaggccttgacatgaataatacaggaattcaggaacacagacttgtttggcttcataacatccacagaaatacttatttccagtgggaacatactaaaataaagttaatctcttgttaacggaaacttgataattggttagtgactagtggctgcctaaaagccaaattatgcattccatcagcactcagcagctttc

SEQ ID NO: 1596 - DNA, 766 bp, Zea mays
ttcaacagaaaacagttgctgccagaaccaatcaggcgatcatcaaagcagcaaatggacagacacaggccatgcaatttaaaacaaggtgataccatttaacgaatgagttatgcagtgaagtgatgatgcatggcttagttttggtggtccagcaacaatgaagtcaattaaagcaatcatggaccattggatcgtgagtagtgagtacaacacaacagtagggcattcaacatcagtcatgaatcctgagtagtacaacaacagtagggtgttttacaccaatcatgagccattagaagcagaggatggggcttaggagatgatatcaccaacatacataattcacaatgggcgaggaaatcacctttggaatgatgagcaaaggatatggatgtggaaagtacaaggagaaacacaatgtccacctaccgaaacctgaaattccatataattgcattggtttccatttccttcatttctctcacttgcggggaattctaaatggtggtgcaaatctcaacacctacactaaccaactccaacagaatgtatcaccagtaattaccagcgagatatgaaggttggtagatgtagttagctgtagaagcaactggtgaatcacagcaaaaaaacaaaaaaaatggcacctttgatttatgtttatgtttgttctagactaccatctcatccagctggagctgttcaagccagccaccgatgacccccgctgtgtcgtgctcgccgccgatgtcctcatgactcg

SEQ ID NO: 1597 - DNA, 773 bp, Zea mays
cacaacaggagggaactggacgcaaggactggacctaaagtcactaaacaactgtacagaaagtccctttcgggaggggtgactttcatatatatataaccaagatataacttggcgtacaagtaagatacaaacatatctatagactatacatatctctagtagtgtcttgttcaccatattataaagttatgtaacactgatatatatctgaatgtgttagtgaagacaaaagtctagcacttaccaagcaggtgatctgcaagtgagccaagtgccatgtactcataaaccagaagcctttgatctccatctgcacaatagcccaccaaattgactaggtttggatggtgcaataggctgagcatcaggacctcaactaggaactctctgttgccttgatacccattcaggtctagttgcttgacagcaacaagctgttcacgcaaaccggaaacaagtcagccactaatgactgtagatgaattagcaagcttgtgtatacgtagaacgtttgaatgtttttttctgtgtggtgtgtacctgtccgttttcaagcctgcccttgtataccctgccgaatcccccttctccgagaaggcagtcagagcggaagtttttcgtggccgtggctagctcacggaacgtgaatgcttttgcggttttggcaacagaacaacttcctttaggaggttcgatgcttgctgctgtttcagatgatggcctgtgcttgtgcttcgaagcaactggtggtgggctgatggaccctgcaa

SEQ ID NO: 1598 - DNA, 799 bp, Zea mays
ccttttggatttttcgacagacttatgtaatgtccatttttttgcagtatgtctcctgaatcaaatctcatgacaccagaattcaaataaatttgtctcccactagatttaacactaaaggatcatggcacacaaattccacactagaatgccatcacatactcaattcaccaccacaaatgtccatcacaattcaacatcacaaatattcagcacaggttcaccatgaatcccatatttagcgcttacaattatagttcatcacaaagaaaaggaatagaataaaaatcatagaagcataaaaggctccaaacatcttcttcaactcgaccatgttgtcattcatcttcttcagttcagcagcaaatttgtcccaattcgtagtcacatctgctcgttcatcccacatattagacgccatcatctccccagagccacccaccaaccctgccccttcaagcatcttgacataatcgtccatccacatgaaaaaattgcatattttaacaaccaaaacaatccaaataggggttcacaattcagcagtaagcacaaaaatgaaatcaaccgtaatggataaaacaaggatggaccttattatctcgatatgacttgctttcacacttcacgaactctcgaccaaagttgtcgttctcccaccttttcgatcttagtctcacgagcgactctgacctttcgcatttggggcagcggatcagcgacaccggaccataactgggccatccttgtcctccattagaggagccgcttgcccgcgacatgcgtgaatccatgctag

SEQ ID NO: 1599 - DNA, 743 bp, Zea mays
agttgttttgtttcctgaagcttccctacatcttcgagtattccagcctagattagtggaagctattgacaaggctattaatcatgttgatgctccatgcatgataggtgtggtgagtgccatttctcattgttgtgatgcattgttacattgtcgttttaattggctatgacccaatgtcaggtttatgtttatcgacacacaaatgatggacattatactattgcttctgtcgggacaatggcagaggtgtggtttctaagctatttaattactagttatgtcatgtgcacctttggtcttcctccttgttgaattgtttctactactgattgagtatctgcttatatgttacagtgatagattatttctatactagtgtacatgatcttactatctaggaaccaaaaggaacaaatatccttgaagtgttctgtagtaagttagtaacacaaaagcctagacaagggatgaccgaacatagggctagggtgcatgtgcactacagtaaaataaaatttaggccacatttggcttttttggcgaaagggcctctagccgagttggttaggtggtctgagtagcactccttaggtcctgagtttgaatcctagtgaaagcgaatttcaggctgagattaaaaaggtcactcgctggttcccctggtcatgtgcacacgagatggactggcctatgggggccggttccttgtgtaggggctgggagagctcaaaacacgagta

SEQ ID NO: 1600 - DNA, 807 bp, Zea mays
tttgcatgcctgcaggtgcaccttcaggtgctagtgctaccagtggtaatagaaggaagggagactgggagataatcggagaagggagagcaggtgctaccttcagatgacgagctcatcttcaattcttgactagatgacagacgccggagcactggagtactggacgccggtggcagacgctggacggctggagtacttggagcagagacgtcggcagaaaccagagaggacagaggagaggagtagggtttactggcggctgggagggtttctggtggctgatttactgctggaggggcgggctactgtagatgggccaaaaactagagtgaagcccagtaccaaaattgtgacgacaaaaacgaccaggaagctttcgaacagacgactaatcgcccaggtcgacgactagttggacgactaggacgacttgaaatcctaatcgcgtcgtccacctaatcgccctcttccaggcgaccagcccgactaatcgcgattagtcagacgacttgtaaacactgctttaatccgaagcgaacagtcgcatgtgattctcactgctatgttttatcttagcatatcctatatacaaaaaaggacagaactggtgctggcggctcccacatgattgggatctaggggaggaataacctagagaagccttacctttgcatttttgcagagagggccgcatcaaactcaggacctttggtttagtgggaaggcttctcaccaccgtgctaagcctgtccttcatatcctatatacaagagtttaagatttctagcaatgaatgcccccaac

SEQ ID NO: 1601 - DNA, 762 bp, Zea mays
gttgggatcggttctggtctggtacagccaggtcaaaaggtctgggtggtttggggaaggaaggaaaaggagtagtaggtgtgaactttgcattgtcccgttgcaactttgccttgaccaagcataatttgaatatgtggagtaggagaccggatcgcatggcgtcgaagagaaattagcttgtgccattttgcaaggggtcgtggggatgatgaaacttctgggcatcccgattcgaacttcgattgctttttttttaacctagtcagactgacaacagggaaacggaaagtaacattcgggggttttgttcaagcagttaactgattgtggagctatatgcttcacaggttcgtggagcttctgtttgtgtacatataaaaaacttaatgactatcgtatctatatccaccaaaactacatgttgtaagaacctaggagtaaatgatagattatgcatatttaactgtacactcctataaggaggagaaatctatatttaataacgatgccaaataattaatatccatatgcttttgcgatcagctattgggcatccattttgtgcagaaatgttttggggtttctcttgttttggtcatattcatctagtgcgagcatgttattttcaccctctagaatttgcttggataaacatcttcacaaataaattaagaaagctttacattgatgtgcaactagatccaaattatcaattttcataaacaaattgctctgctctgggcagtctttgacaatgtt

SEQ ID NO: 1602 - DNA, 766 bp, Zea mays
gtgaagcagctcggacggagacggaggggcgggcgagcagcaagctgcgtgcgttcctcccagacgctcgtttggtgcggtcgcgcggaagcccttgactagcggcggcccgccagagtgctccgtggtgaccaggacggcctggcaagggagctcggcggcataaaggcgtcagcccagcgaggaggagtctaggcccccaggcgtaggaaagtagcccaagagaacgagacgtgtaacgtgttgaggctggattagagctgttgtgagttactccctcatttccaaattaaatttcgttttagataattactagattcatacaatatttgatgtatgagttggagagcacatatgtatataaatcttgattgaagtgatgactatgcaagattagtgtggtaatcttgttcgttttgttttatcaattagttgcatgtatggttttgttctttagattgatttattatattttcaattgtagcggttagttttgggtcatctggatcatagctaagacatcaacttagtggcctacaaagtttgaagtattgcttaaatacgaaattagagtctcgttaatttccaacccaacgtgttgtggaacaacattattattttgttaataacttcagattgggacccggaagtcattcctgttcctgttggcctgttgggttagtcgtgtaaatttatctagtctattttgttaaaatttaaagatcgatcatagtcacgaagtttgaccagtatcgttttcgctaac

SEQ ID NO: 1603 - DNA, 728 bp, Zea mays
acctcgatcttaatgcagccatcacttttttttcttggcactgtccttaggtgagccagcaggctaattaatagttctgctagctataacatcgatctgtctggccaagcagcaagctaggtttatatagtaatatttgtatttttaagtatgttcaatagatttataaaatgtcgatacacgtaagagtcttgcagagcagggatgaaaacaccaggattgaaataatgttgcttaattaattaattattaccaggatggagagagtgaagctgaggagctcttcaggcatagccaaggtcgccggcgtagcgctctgcctggcgggggtcttcaccatcgccttgtacaccggcccgtccgtgagccctatcaaccaccaccgtgccttcgcctctcaagacccagcaccgaaacctgttgtagttcccaggggggtatggatcaaatggacgttgctcatggtggtcgccaacatgtgctggtctttgtggataatttgtcaggttcgcgtcgcatgcattctgtgttgttctcgcatgcttgtctgcatccacatacaccacacgataatggccctgttctccttgtctgttgaccgtccgtgtgcaggcagcggtgcagaaggattatccagacaagatggtcgtcaccgtgactcagtgcctgctcagcacggcgcagtcgttcgtcgtcgcagtggtcgcagagcgggacttctccaaatg

SEQ ID NO: 1604 - DNA, 752 bp, Zea mays
tcctccctctgcatctcgatctccttctccttgccgacgacgctctccgggatgtcgtccaccgagacgtagtcgacctgcggacacgctaccacctgcatcgcgaggtcgttcaccagctccctgaacttgtcgttgcgggccacgaagtcggtctcggagttgacctcgatcatgcacccgatgcggctgtcgtggatgtaggagccgatcagtccttcggcggctagccgagaggatttcttgtctgcggatgagaggcccttcttcctcaggaactcctgagccttctgaaggtcgccgtcagactcggccagagctttcttgcagtccatcatgccagcgccggtttcgtctcggagttgcttcaccaacgaggctgaaactgcaacagccggcttcctggaaacatgtgtgccaaatgtgagtggtgttgtcactaagaggagtataacagtatagttcggttattagaaatgcttaaacacgtaaacacagcatgaggagggagattacttctcggcggattctgttgtttcagcaggcttgtcatccttgggaggagcagatggtggcggcttcgctgctgtctgggctgcaacttcagcagcaaaatcctggcttttcttctccagcccttcacctaggttgtaccgggcaaatctcctgaccttcatattctctccagttgtagctatagtttgcttcagccactcacttattgtgaccctgtcgctcttgatgaatggctt

SEQ ID NO: 1605 - DNA, 840 bp, Zea mays
ggagagacgctgttgccgttaaaacaacgctgcttcgtatcagcgcgtcgccggtcgaaaggacgaggaagcacgcactcttagctatgcccggttctgatcaatggaagaacctaacctaatcgacttttcttaagtgtcgtgcgtgctgcctccactgctatttcagcttagtacaccacgcgtagagaaacgtgtaaaaaaagaagaagatgcggcacaaaaagaaaagaaaaaagagggatcttggagctgacctttgaaataagcgcatggagcttcttcagagagttagctgcgtagggggggacatcagagaccagaattacatcgtagccgccatctgcctggcggtcggtctcgttattagccctctcccacgcgcggcggctaccggagagcttcctagatcttctggggcagtagtcctggccgacgactacactgcttccgtcatgactactgctgccgccatccatgaaatcgtcttcggagaagctgaggtttgctggcgccgcgggtggcggcacagccgagagaactgtcgggagttcatcccactctccggcatagaaatgcacgtttggatccaagagctgccgggatggcgtcacggggctctcttctgatggtctgttctgcctgtcccgagcctgctcgaggtttgcaagaacattgggtattgttctgcaccgtatggtttctgcgttcatgtcctgaaagtgaaccgtggatgcaccctgcaagcatcatttaagcgaagtcagatcattgttctccatgcaaggttttctctctctctctttcagctcccaccataagagagatcagcgaaccagc

SEQ ID NO: 1606 - DNA, 804 bp, Zea mays
gggaaaatcgacctgatagcgcagaaatatacacacatgtatcaatcagccaatctataagtggaaggacgtagggaagaataaggaggaagaaaaaggtcaccaatacaaatgtacaagacagaaagaaagtataaaagtggttgaggtgatttggaaacagtacgggatctctgttgcaatggcttatatcttttctaggagcgagattttggaaaccgttggaaaaacccaacaaatatggccccaactttttttagccacttggaaatcccaatgatttaccagatgtttttaggaactgttggaaatgctcatagagcatctccaagaagggctctaaacatggtcttattttaaaatataggactcagaaccataaaacaccctccaacaatggccctatttcataaaatttcatcaaatgattatagggctcggtctctcttaatcttggagccagatcctcgttttctcttaatcttgaactatttatttcctaataacattatttttttcttcaaaatagccttatttaaggcctaattgttggagtaaaaatttcttttgaggccctaaacactttaaatgcagtcctggttcaatttttaggactctattttagatctccttgaacagaagtcctaaacagggttgtattttgaaatataggaacaatcttagtgaaacacagagacataccacaccaaacaccagtgcatcacatgtgcaactctgacaccaccgattactaatgagaacattttatcaatcactacatgattttagtggcgatgtgttaga

SEQ ID NO: 1607 - DNA, 771 bp, Zea mays
tctctcccatccgccttaggtgcaggagtaaggcgagcaggatgccttacctcgtcgaagcgccttactgcctaagcgatgcttaagcatcgcctaggcgacgccttgaaaactatggtgctgctatgtatgggaacgacaagggttgggggttttctcaacctatgtgagaaggccttcttagtacaataccgggtgttagactacccgtctagggtttggggtgttccccatgtaattaccgtctcaccctcattgtaatgggccaggcccaattactgaagtctattaataccacacccaaccctatttagggttataggttcttcctacatggtatcaaagagctaggtttagggttttttttctccagccgccggctccagccgctggcccctctcacctcccaccgccggccgccggaatccctccctggcgcgccgccaggtgcgcccgcccctgcatcccgtcacgcctagagccgcgccaggcgctgccgccaggtgctcccaggagccgccgccgggtgctcccgctctcgcccctgcgcgcccgtcgcacccagcgccgcgaccctggcgctccgtccaagccgcgccaggtgccgccgccaggaccgagcgcgcgcccctccctgacccgtctctggccgtcgtcaccgggcctgatccaactccggcccgcgacgccccccggcggcccgcagtgctgtgccccaaacccgccgggccctaccccggacccgacaccccctgtccgcggccccccctc

SEQ ID NO: 1608 - DNA, 752 bp, Zea mays
atgggctaggactgaaagccgtgaccggggaggactactgtcgtgttgtgatacaatacccaagtgacacagtttctaagtgggtaagtgatttctcgccgtgttattacaggcaaagcttttacttgatacaggtaggacttttcccattttagccttactaagaaacagatcgcaaagtacatttggttctgtgcttacctagcatcttatgcttttgaaaccctgctgcatgatcagtcagcaaattatagtatttactctgtcgacctcctctcgtaactaggcttgcatgcctcatgcctatgatcatttttgtagctcttatggaccttttttttttgcagagagatccaatcacccataaggctgaaagtctgtcgtttgagttcaatctgtgtgaagctgtggcctcatgggagcacgtgagcatactttgtgttcataagcctatgtgattaatgaacccaataaatctaacaccatataacgctgctttcaaaagtcatatgatgcagcattggcaatgttgacaaagtcatactcttgtcacttttgaaccgtcccatctgaattttttttccgaaccacgcaggagaactgcatgtcatttcatttaagaagaaaaaaaataagtacatcgggtaggcagaaacaccccacctgaaacaccgcacacacccaacacgggagtacccaaagaggagtcacgacccggaccaacagccctacctggctaggacccatgacct

SEQ ID NO: 1609 - DNA, 806 bp, Zea mays
gacaattccaagtttgagctttcgatgcaattaccatcagttttgcttacacagcaccgagattcaagcagatacaaacactcaagaaacaactgcaactatccttacgagcagacgaaatagcttgagaaaggaaaggaaggccccaaaacttacttcaacaacttctcggaagcaactctagcaccctcgatggtagccttggtaggcagccacctcactgtcctgccaggatctcctcgcatcggtgaatggattttcaccagctgcacatgattttcttttcacatcaatacaccacattgccatgggtaacaaacaaaatagcatagcatcatgggtgcaaacagttctgttagctaacattagagcaagaaaggaactcacaccaagacattccatcatctgataatatgctctaccatgtagtggagtgtgtccctttcttacctctgagaagtaccttgtcctgaaagataacttcagctgtaagcacagaactgtagactagaattttttattgtcactgcgtggagatcgacatgcactaaccattccttgtaacctgggtctacggtgaagccatacatatcaacactgtcacagatggagagggcaaattcaagagctttaagcccggttcctttagctgaggaaccaaatgatgtgcctagcatgaggtatactggattggttattggaagttcctacatagcaagagttccagcagccagataagaaaatacagaacatgtactcagggtgcctgatttctaacatcgaagctaaaataccccgatcaattg

SEQ ID NO: 1610 - DNA, 763 bp, Zea mays
atttgcacaatttacattggcacggttgagggagagatgtagcaactctggtttaccgaacgactaaactgtccagcaaacgctctatgattttactctcttcgtccatctatgtacaagccttaattaaggccttaattaagataataagtgttagatctaaaacccttgcaacttgcaataatcgtctaccgaaggacaggtttttgtttcgtcggcgacagttgaacgtctccgttcaaaacggatcccacgaacctttcagcttcttccagtgtcacctcgccgtcgtacaccgcgaacttcccccggcggggcttgtaggcgatgagcagcttgtcagatgacctgtatccagacttgtcaaacgatgacaggaatccagattgtttgtccttatccagcaaagcataggagacagcatttctggaattatagttctgcccccttatcaaagtcttcatagatatctggatgcaatcaacagaaaagcgatgatatgtgttaacaaatggctataccgaagattaaggaaagaaccacaaggtaatagatatactatgcattcagacgaacaagaaaacatgtgtttctgctctataatttggctttcgaaaacaggagatatacctcagacaggactgcttcaagctgccccttggcttttgtttgacccgaaaacaccaatgatgcatactgaagtcttctctccacatgtttcctcaaagttggaagctgtgaggagaggaatcctcttgatttc

SEQ ID NO: 1611 - DNA, 767 bp, Zea mays
ggtagtactccgggtcgatgtaccccaccgtgccggccgtggcggacgccggcgacgcggcggcgcccgtgccgccgctggccagggacagcccgaagtcggacaccttggccgtccagtcgccgtcgagcaggatgttggagggcttcacgtcgcggtgtatgatggctggcacggcgtagcaatgcaggtactccacgccgcgcgccgcgtccagcgccacccggagccgcgtctcccacgacgcgaacagcggcgagtacccgccgacgtcgttgcgccgcccgctgccgtggaggtggtcgtggagcgcgccgtggggcatgaactcgaacaccaggatgcgctcgccgcgctcctcgcagaaacccagcagctgcaccaggttgcggtggttcacccgcgacagcagccgcagctccgcacggaacgcgcgctccgcgtcgaagcggcggcgccgccgcccaccgctgccgctgcgctctgcgcgcttgatcgccacctcgcgcccgtcggggagcctggcgcggtacaccgacccgaagctgccgctcccgatcttcttctcctccgagaagccgtcggtgacgcgcgacaggtcacgaagcgtgaactcctcgcatccgagcggcggggaccggcggcgccggcatggccgtggctcacatcgcggcacagccggcgggacgacgacttcccgagacgcagcgtcagcgtcttcttgttgtcccgctttctgtaccacacgacgtacagcgccaccggag

SEQ ID NO: 1612 - DNA, 744 bp, Zea mays
aacttttgcaaggaccttttctggtttacatgctagaggaatcgagcctggtgttctttatccagctgtctctgttgagcagtttcacgaaccccatgcttataagtaacttcatgcttgcatatctccttacatttaggtctaacttattcagtttatagactaaacagatctttttaccattatcatattaatatttagctaaagtagacaacaatcttttgtacaggttgaatttcctatcaatcaaccggtttgagaggaaaaagaatcttgatcttgccatttcagcatttgctttgctccgttctgctgcttggactctacctggtgatgctctacaagaagcaacattaacagtggcaggtgtttatattttatttttccttctagttgcatgttcaatgttacaacaccaccggttttaaaccatatgaaatattgactgctgatttcctaccatgcctattatttaggtggctatgataagcgtctcaaggaaaatgttgaataccttgaggaactcaaaagactcgcattgacggaaggggtttctggacaggttaaatttgttacatcttgctcaacatctgaaagaaacgagcttctctccaactgcctctgcgttttatacactccaaaggtaagtgcctagggcttacatccagctaagcagtttgtttacctttaatttaacaagcctgcgtctcttacttattcaggatgaacatttcggtattgtac

SEQ ID NO: 1613 - DNA, 804 bp, Zea mays
cttgcatgcctgcagatgaatctcatgagtggaaatatatctcatcttcttgaccttctatggtcatggttatcacctgctgaagagaaccataataatactgcaaggtagagtctttgtgatttatgtgataatctcaaatacttgaatccgtttatcatatcacttttcaataacttttgtgttcatctaggccccttgatgaccctgagatgatacggttcggggcacatattgttcttgtgctgaggcaccttttcagtgatgggatggatgatgagttagatgaaaaactggttactgtcggtgatctcatcatcaacatgtaagtactatttatgaagaactaatcttgcattggcaatgagcaccaactattcaatttttgcttcttggggcttaaattttttttcttgaaactcttggagcttaatcaaccagcattaatggtccttagtatccatttgggtgattttaaatttcaattgtatggtactatagcataataatttccataatacagttacataagtagcatgcagcgaaagggtctctagcgtaatggttaaggctttcgagtaacacctctaggtcctgggttcgatctcccttgagggcaaatttcgggcttggttaaaaaaatcccctcgctatgtcccacccgctctcggggatcggaatcctgcgccccaccctccagttgggccgttgcagagtgggcagttgattgacccgttagtgatggggggggggcagggtttctgggttttctcggctgggccatgtttcgtctctttttatata

SEQ ID NO: 1614 - DNA, 756 bp, Zea mays
tccgttcccgcgctgcccccgccgctgccctcgaggagcctggcgaagcagaggagcgcgcgggactctgtaatgctcttgcagacttcgacgtggccgcgcgcaagcatccacagagcctttgccgccatggccttcatctgcgccttggtggccgggtcctcggcctcgcgcgatccgcggccactagaaccgtttgagctcaggctcagctggggtcttgcacccggcggcgtgactccattcgttgtcgtgttggtcgccgccatcgcggattgcaccaccgattgcatctggttcggtcttgcccgctgttggccagtagaagtttccaacgggttcggcggcacattggttgaggaaccaggctcgtcttggcgcacgcttcgcgatttggcaagcacaacggagtgaagattgtcgagcgacgtcgtggtcgccgctgccgcagtaacggcgttccgggagccgttcacgccgatggaatacctgctatgctccttgatggttccggaagagaggtgggtgacgagatgccggacggcgttgctctgcgcgaacaggtcctggcacttgtggctgtggcgcgccagcgacgcgatggcgtccgcgaccgcggcctgcacgcgcatcggcggctccttgagcgcagcggcgaagacggagcacaccccggagtggaggagcttgtccaggctgtcctcgtcgcggcagaggaggccgagccgccctgggccgcgggcctcctgccccgcg

SEQ ID NO: 1615 - DNA, 783 bp, Zea mays
tcatgtgaaccatcctcgcgtgacatccacttatacaattgaatcttctggttgatagcagccaacaatttcccattgaatgcattcagcgaataaactgctcctttggtttctttctccacgatcaattgcaagcttccatcttcaactgcaaatacaagaatccggccctacaagatgtgccaacacataagcattttgtgcacgagaaatagacaaggttcacagagaaataaactacaagcagtaaattggacaagtattaaaagggagttaaccagtattttagcgtattaaaagggaactgactagtattagtgaaacatcatgctttcagataaactaccttcgtcggttcattttcttcaggtataacatatgcagttcccacacagtaataaacattactatcatccgcaaacgaacagctaatgatggagcagccacattcatattgatctagaggatatacacacagggactcaaacgtctgatgatctagcagacgtattaaatgagtctcactttcctccacactctggttgtacttgaaactgcaaaatgctagtgtccttgattgctcctggtgacaaatgcgacgtgcttgttcattaagggggattgtgcggatatgaagcttctgtatatcatcgatagttccaattgaaagttcaccctctttagcaattgcaagactgtgacattagaaaaaagatggggtgaacctggagcaaacttacgacaggtggtttaattttaaaaccataactccacaaaggactg

SEQ ID NO: 1616 - DNA, 757 bp, Zea mays
agcttgcatgcctgcagtgttgcttcctccatccatctcctctcctgctgctaagggctcgtttggtttggctaactaaaatctagttaattttagtccctaaagaagcaaacatgatgactaaagtggaacgactaaactttacttcttggtgactacaagggactagagtaggatttttgtcttatttgtcctctccactttctttttggaacaaacatttactaattaataggggtaatacaaccattattcgcatcaattaattctttttagtccgatttagtcaccggaaccaaacgagatactttagtctagtgactaaatgaaccaaacagagcataagcatgttcgtttggatttaattcgtatcggtttctacagagtttttgtcgattgcagccgcaatattccaaacagctggttttaatttgaaacgaacaaccctcatgctctctccaaccattccccatatatatcttcttttatctatactttttaatatattttactgttttttcttaaaaggttccatcccatacgctctctccatataatacaactcatttatttaatatgtatttatcattttttttgaaatgttttaaaaaaaactagacaatatttatatgccctagtaaacattattatcaagttacgtgaattaaacagaattaatattagtgtgattgaaaacaaggagagcataatactctccttagggcttattcggtttgatttcaatccatatggattg

SEQ ID NO: 1617 - DNA, 775 bp, Zea mays
gcccgggggaaccctttaaagtcgacctgcagactgtaatatttacaaagtgaagtttgaaataaaagatgagatgagatagcctaatgaggatcaagaaaaaaaagtgctacatatgcatatctcttttttttcacaaccatgcctaagggtccactagcttttggagctttttttaaaaactgctattggttttttattcctaaactcaagctactaaaaacctataaaacataactttttagctttccatataaactcatcttttctgaacctttcatatttctgaagctaaacctaaaagctagttgtttcctgtttgtttggtcctctgccttttcataccgagaaactatctagaagttcaaaaaaatagagcctaaacattttttcattaagagaaagctacaatctaacatcttaataagctaaggcttacaaagaccaacccaatccttactacactagtcccataaggatcaccacggagttcaaatattggcaaaacaattataaaatggtttgctacattatcacatttatgtaaactttaagcgtactaatcttctggactattcttgcacgattgtacctaggggtggtaatggatcgtgatctaaatgtttcttaacaattccttagcactctaagttaattttagtttaaaaatgaatagaaatataacttgatcctaatacgatccgatccataaattttatagtgtaaaatttagagctcgttgtcatgcctaattgtacccatacactgaacatta

SEQ ID NO: 1618 - DNA, 761 bp, Zea mays
gaccaccaccaccagcagcagcagcaggagcggatcgtcctcgcggcgacgccgtcgtcgtgctcgctggccagatcgtgctccctggaccgccgcgtcgagttcggcgtcaagaacaggagctcgtggctgcccctccgcggccgcgaggccacggcgccggcgccggccgacccgtgggagatagagccgtcgtcggaggactacacgtgcgtcatctcccgcgggcctaacccgaggacggtgcacatcttcggcgaccgcgtcgtggagggcggcgccggcgccggcgccgacgccgcggcggagagggaggacagctcgccgcggcagatcaatctgccggcgcgcggcgaccggggcttcttcagcctgtgaatgatcccatccacatccatccacgagcgggcgcgtagactgatgcctagtaggtaaagaaaccgagtttgctgagtgctagtattaagttcagccttcatgttgcggtattgtattggttgctccgtttccatctgatcagatgatcatagttgtttccctgatcagatgatgtgtactagacgttttgttcaggttgagctgaagctgtgatataaaatttcattacgttgttattactactagacaaaaaaaaaagctgcaaatttttcacaggctgaaaactagctcccagtggctgaactgaactgctctctgataaatttcgtctccaaagtccaaactcggtttctgcaaccagcacaatgagaatgtcagatcga

SEQ ID NO: 1619 - DNA, 778 bp, Zea mays
gctgccgccgccctggtcgtgctgaccactgacattatgctgatcggaggagttgctcccggcgaagaagtcctggtccgtcacctcggcggccaagctctgggtcccgccaaagaaggcgtgatccgaggccgtctgggtcccggccgtggtcccgaggaagccgtcgtcgtcgccggcgcctcccgagagatgagcaaatgggtcaggaccgtcgtccgcgccacctccgaaggaagcccactgcacctgcttgaccgcagtgtggacgccggcgccgcccttgcctgaaccctcgggaggcgcctgcggctctgggatgggtgggtcgtcggggaagctggtggcggggtcgtcgtcgtcgacgagcttgtcgaagaagtcggcgtcggtctggtcgtcgggggcgaaggaggaggaggaggccatgcggaattagatcggagaggtctatctctctctccctctcgtgtggcagaagcggtggatctagggttggttgggtgcctgggttggttcctccgcctctcagttgaaatgaaaaatgggtgccgagggaacagggcggaggcggggcttaccggccggccggacagggcggcggatcggaatcgcaagaggaggtggaggcgggaaggcgccgctgcggtcacgagcccgacagccgacgtcgcatcgcgccacccggggtctctggtccctccacctctttctttacttgtcccgtctttttttaatttttcaaataaattaaccaggcaacaataatttcaagaag

SEQ ID NO: 1620 - DNA, 769 bp, Zea mays
tgatcgagaaggtgtccaccgtcgtggaggtgctgaggtccacgccgcacaacgggttccccgtgctggactggccgcggccaggcgtatcggagctccacgggctggtgctccggtcccacctgatggccgtgctcaagaagcggtggttcctgacggagaaaaggaggacggaggaatgggaggcccgtgagaggttctcgtcgacggagctcgcggagaagtccgggagtatcgacgaggtggcggtgcagctgacgccggaggagctggacatgtacattgacctccacccgttcaccaacaccacgccgtacaccgtcgtggagaccatgtcggtggccaaggccgtggtgctcttccgcacctgcgcgctccggcacatgcttatcatcccaaagttccaagggcctgaggtccgtgcaacatcttgtcaccttttcttcaagtccaagtactgttcttttggaaaatttcaaatgtatgtactcttcctaacaaattggtgatcaatttgtcttcagatagctccaatcgtggggatcctaacgaggcaggacctgagggcacacaacatccttggtgcattccctcatttggcaaacaaaaggaaagtacactaagctctgtcgcgccatttttggtaaatttaatgttctctgcatccaaagaaaaaagtcccaggttgtttggttttccccatggttccaatttttcttctgtaagggagaattgggggaattaaaatttcttgtcctcaaggagaaat

SEQ ID NO: 1621 - DNA, 654 bp, Zea mays
atggacagtgcaaacattgatcagaaaaagaaaatgaaattttgctatacaaacagacacaaataggcagattattgagagtggtattgctgcaataataaaataaaaaatcaaaaatgagaaatgattaggagaagaccagaatcatagaactttaagggaaccttcgttagctttctgattaacatatacagtaatatctggaaggattaaattctagacaggatgactcacctccagcacactatcaatttcattttgaatcctccaattcaaacattctacaatctatagaaacaaacatattagtaattaaatttgtggtcacttcacccactgttgagaaacttgtatgaaacgttaccattttatgagcctttgctacattccactctctagccttaaggaaacgcaccagtgtttctttgggatagccctggtgcatattctgaaataaacgaagatatgctcacattgtttcccaaaatccctcaacaagttatagtttaagttgatgaacaaataatcatgtattacatatttacatctaacgacactgaagtgaaggtagcaatcaaacattttcagaaatttaatcattctatatagtcaagcgtatggacatacgtggacaggtgagtagtacagattatg

SEQ ID NO: 1622 - DNA, 727 bp, Zea mays
atccattcttttggtttttaatgtcaagttgtcaaccaaacttgcatcccagagtttgaaggcacatgtacatctcaactcggttctcattaccagcttaagagatgttctaaaacttttttttttctcgaacacgtaggagaactgcgtgtcattatattaagaagaatgttctgaaacagttgaagccttatgttttacacgtgtgctaaatcagtcccattcattgctttggcgtgaatggaaaccttcagaaaccaacaagggttgtggctgtgattttaatggggatggataccactggaaacctgttcccaagaataaacttgtctactaactagatttacatgtaattactgtaaaggctagctttttctttcctttttattgaacacagaccaaacaaataggagaattgtttggtcctttccatgaaaatttgcacagatctcaaagaaacaaaattttaattaataattgtattaattatatttctcttgtgtctcatctaggctggcatgcctgcgtccagcccatgcccgtagctagctgaagttcctgatccactttcatgaacttagcggctgctagacgaaaaaattgatcaagttagctaaataggctctgtaattgatcgaattaacctattagtttatctaggcaagcaaacaattcaaccatgtttgatttatgagaacgataaaagtgacagctgcaaaggatacca

SEQ ID NO: 1623 - DNA, 752 bp, Zea mays
ctgcaccccatcggccgaatccaaaaaagaatgtgaaacaaaagatcgaaagcagaagaagggtttcatgcgcgtgcacatttttcgtacttcttcttcttcgtcgtctttctaactcccttgatgggggtctcttcgttttcattcctttttcccgtaccaaacggaatggcgaataaaagcaggcagtggttggagaggagactcttgaacagatcacggccgtgtggtattttagtgtggcgaaattgcagcgtgagaagattgtgcaatggacgcaggagcagataactaatagtgcctttatcctcttgaattctgctagtacttgtctctgcacctgctagaccttgctacctaggaactgcatgctgtcatcagaagttgattgtacatacatacatacatacatacaaagagaattgaaaatataagattatatatagtaagaaagagtcatgtctcttagttttgttatagttaagtatgtttgaatgaactagagctaataattagctggctaaataattggtagtaaaattagctagctaaataatgggtagtaaaattagctagctaactattattccctctgtacccttggttctcttgattttgttatatctaacttttataagttaattgttagctctagtgcattcaaacaggatcttagagctacaacatctagtcttgatagtattattctctgttactaaaatgcttgggactatgctccctaatctcagtag

SEQ ID NO: 1624 - DNA, 784 bp, Zea mays
aggagagcgtggccatcgacccgttcgtcgtccttggtcggttattgcttgcaacttgttgcgaaattggagtagctgagctgaacgcggacgagcgagatagttctgggcggacgggcggtgcgagtgggagctgtggctgctggcggtgtctccccgtgttattaggccgccggcgtatataaggatccagtggatgggtatctggactgggtgcggggttggacgtgtgtggtggggaggtggcaacgacagggaggctctggagtctggactggatgatgccatgcaacatgctgccactgcccactggtagtggtaggtaaggtgggatgtttgatttttttccccactttttgcggcgggaacgggacaaagctatggctttcaccctcacaggtaaaatatcatctccagcctcaaggctcaagtgatcattgttcaaaactcacaactcgaaagaaaaaaacatatccttgctttatctcccgcctctcactgaatcttctcacttgtttttctacttggtgcatctttggtagtatcgtggtttagatatactctctcaatccagtgtcctattagttgtcgttttggataagatttgagtcttataaaattttaattacaaataactattttatgatgtagttttgaaacataatgtttatatgcaccgatttatcttaacaaataattttataaaagtattttttttaaaaaaacattggccaaatttataattttgcaggccgggtagctgttctaaacgacaactaatagg

SEQ ID NO: 1625 - DNA, 760 bp, Zea mays
aactcaaacagcgggctgagataccgtgcacactgcttgaatgttgcaaccatggacttcccctttgctgtccgcttctctagctcagtcatctcatccaattcctggttccactcattaagcagcttcttaaagaacaccaaaatcttgtcttcattgcaaagctcctcaaacttggtcctcatcctcttggagtccttgtctgcgtcagcatcatcgccgctccccttggcatccccatcatctgcactgtctccagcggcacccccgtcgccaccatcacccccacctacacgcttgctcttgcccttggcgtaggtgtccctcccggccttctgccgcttacgcatctcgatcatgtcgcggaggaagtcgttggtctgtccctcggtcatgtcgatgtcgtcaatgtcgtcgatgacgccggacttgagcacgagcttgaagcgcgcgaggcgggcgtcgtcgtcctccccgaacagcgtgacgggctcgcgcagcacgcggaggcgccgcaccacctcgtgccgtgggaggtcgagctcgtcgatgcgacgctcctcggagagcagcgcctcctcctgcgcggtcttcttcggcgcgagggcgggcgggacggagggcgccgaggaggaggcggcggcggaggagctagggttagggttcgccgccgccgtctgagcctgcggcgtcgaagctgctggggtcggaaccggtagcagctgcggcggaaatcgcggagggcgccgacgtgcccgcg

SEQ ID NO: 1626 - DNA, 762 bp, Zea mays
tgcctgcagacgcggtggtggacgtagcggccgcagggcgaggacgacatgggcggcggcggcgactggtcgacgacatcctcgtcgccgtagcgggggcggacgaggacctgcttgacgcccatgggtcgcggcgcctgcggcccctgcccctgctatttttttttggcgggccggagctcctctcctctcctgtggtgtggtgtggactctggtctggttccggcggcgtcgggcggggtgtgcccggacaaaaaagcggacgcggaggaggtggaggtgggcggtgtcgagttgggtggcgaccgagccacgcgaacgcgctgatcagatcacgcgcgcacgggacgcaaacaagtgcatccgcacggtgacggccgtcacggtggcaactggcaagccaagtccccttttgctgatgccctgcctgcgcacccaacacacacacacacactcgcgggcataccccctttcttttacatgcaaaaataaataaataaaagaacgtagggaacatgggctgcgtttcattgattgggtcgccgcaaccgcgtgaccctcgtcatcccgtgtcgcgggaaattaggggtggatccattccagcgtgtccatcatgtcacactttcagacaacatgcgtcgcgtcctctctcttaggtagtactcctttcgtcacaaaaatataattcgctttatagactcaataaacatttattaattaaactataaaaatagtttaaatgtatatctacattcattatta

SEQ ID NO: 1627 - DNA, 785 bp, Zea mays
aacagagtgatcgactaaaacgtcggccactcgactgtaaaaagttatcttatctactgaagacaattgtctggtggggtcatctctgtacaactttatatatccggggcagcaaaacaaacaggaaagatgacaagtcgcccgatcagtctcctctgaactagttccacagctccatcgaaaaacctgagcaacatgctctctatttcaagccagcaacttcagccctggcttggtattgagcggcagctcatcgctcaatttctaacatgcctagttataaatttttacaggtctctcaaatgaatgccggttctgcaaaatgaacacacaataggtattacagagcacaaaaaaaaggaccaccagaaatgcaaagcaatgtaatagccgtacctgattagccgtgtgtgccttcctaggagccgtgtccggatgttccagtccaagatactgctcccaagctccatacatgtttctcttaataaggttaaatgccgaagaaaaaagatgaagttaaaatgctaccaacataaagctatagacaataaatgcttcagcgaacagatataaagtacctggaattttagggctacagtatctgaatcttcaaaatagtcaggacgaccgagtgaaatgtatgcaaacttccactgtccaaatagcaaagtttggttactagagaatgttaccaagcaaatgttaaccagcactggaaaccaaccaacgttacccgaaccagatggttcacactaagggcataatacttcagttatttgtgaacc

SEQ ID NO: 1628 - DNA, 756 bp, Zea mays
tctggccagggcttcaggtttggttacatatatttctgataattgatgtggctttgtcgcacatattctagatgattgcttatgctgcttagatttaaggttttagctggagatgttgatcctgctattcgcacacatgctgccttcttcagcgtctggaaaaagtatggttttacccctgaaggttttaatcttgctacatccactgtacaggtaatgaaactgttaaactataatagtcaagagtattagcataatctcctatctaaggtttgccatttgcctctcattatccctaacaaaaacaatttttaccaaaccttatggaaggatgcactctaacccttgaacttcaaactctcatattaggcctttctacaggaaaaagattgtagataaattgtatgaatcgattgaagggtttattttttttcctgttgccctgtgatagctgggtgcacaaaagttgaaggacagaagagacttactgatttatacctgcactaatatttgctgttttcaacaattcatagaatggacaaaggagctacccgctacgaccagagttgattgaaagcacatattggttgttcaaggctaccagagattacaggtgggtttttctttaaaaggtgaagatataatttattttgttgtatacaaactttatggttttggttgcaatctttcttactgttagaaagaaagggagaattgctgacagtggcaatattacttattttttcgatttggtta

SEQ ID NO: 1629 - DNA, 783 bp, Zea mays
cagcaaaagcatctctccacatcgctactactagtgctttcagatcctacagttaggggagaaaacaggacagatacagatagatagtaggttatcctatattctactctaatatattttaatcgaatacggatagttagaaacaggacagatacgtatacagtaatcagatatttatccggctggatacgtgacagatacggatattatttgatcggatatcggatatttattggatactacatgaattgcttatcatagtttagttcgcatataaaacagagcattgcataaaacatagattaacataacaatgtaacaataaaacaacacaattttcatatttttatttatatttgaatccgaatacagatagatcggatacgaataaaaatatggatattatcgaatgcaaataaaaatagtcgcatatcgcatacgaatatagtcaaacacagatagtgtcgataaagaattttctttgtcgggtactgtgtatgacaccaattgtttttgaggactatatgtgaacataagttgtgttttcgtaaaatttcataaatttatgaggctatttgtgcattattaattgctttttgcaaacaatcatcaaaatacaattaaattcataaaatattttagtttcggataaaaattgcaaataagttaccaaaaccaataaatgctctatacaaagataatatcaagtccccacatgaaaatgataaagtaaaatattgattatgttaaaacttggatactttcacgtataaatcacgcaat

SEQ ID NO: 1630 - DNA, 756 bp, Zea mays
cagatgtggagtccgttctgctcgtgatgaaggagcagttcctctcctacagcaagggtcagcttgtcacggacggcgatggtggcaactgcatcgataacccgttcggcgtggtatccgactgggagcgccatgtcctcgctcgcggagctcccatgtacagggcgatgttaaagaaaatgtgattccatttcctccgtctctgaggtctgaacattgcattgttttgtcaccatggctgcttcggacatggacaacgttcatggattcactcggttagataaaactctcttcttttcggagaaaacatcatatggacacatgacaaaaaaattgtgtggttaaatcttaaaatcgaatcaatccaatgggagaaacgcatatcttcccaattgtggctatgtcatctgccgccggagaggccgatgtcagacatggtggcaacgcttatcgccgccctggactgccgaactgaccacgagtcgaagagccgccggtgcctctccatgccagcgaacattctgaaggacgacgtgtacgtcgctgggaactccggcaagtgcgcgctgccgtcgaggtactgcgcgacctgacgcatggtcggccgtgccgcgggcgacgggtgcaggcatgccaaccctagtcgcagcaccaggtctgcctccgtagcgtcgtactcggagccgagcctggcgtccactgcactggtgatggatccattccgccagtgcgcccgaacccattccacgagcatga

SEQ ID NO: 1631 - DNA, 697 bp, Zea mays
aaaacaatatatttattccttcagacaaatcaactatatggctcagaggtggatcagatcagcagactgaacaaaataatgatgcaaattttggagcatttgtttaaggatttttaagcatttatagcgaagctagctggtaatatgctggcaggatagagtactgtaacagagcagtaaatgaaatgtgaaacatactctgtctgttcaggcacttctctttttcgcaactctaacttggagaattagatggacatctctcttgaatatggaccttagctcttcattagcttcaataccgattctcctgacagatttgccccatatcagatatgtcaatatatcagaaatagtcctaatgatgtagatgtaaatcggcaaaatacacattctgccattccaaatagtagcaactttccccgtaagagaatgcctcaccctatcttagaaccatttttaccaacaagaatctgacgctggctttgctttggtgcaatgaagtgctgctccaccctaagagaaccatcttttagctccttccagcccatcagacgatgctcaattacataggggatttcctgtaacaggtcagatctgagcaaataaattccatttgaaatcaaatttcattgtagaattcctgtaggtcatttcgttgacaaacatattctatttgatttgaagagaacccagctgg

SEQ ID NO: 1632 - DNA, 790 bp, Zea mays
agagacgagccaaaacaaaacaagcattcatcactcgtcagcaccggcattgtttcacaagctagcgagccagaagataacaagaacgcgctgctccctcgccttgaggtagatgtcgacagctcggtaaaggccatcatcgtacacgcgggcgccgtccggcaacgcccaggcgaggtcgcagaatttgtccggcttcaggttggcatctgtcgcgatctcccccaagtaggcatccaccaatctccccacggacagcatggctcgtcggctagcctctctgcctggcgtctccgcctcgctgccctcctcttcgttgccctcgtcagcgacgtcacggccttcgaggaaataccgcacgatgcgctcgacgccgtccacgtcgtagagcgtctccacgaggtacgagtagctcgggatgagcaggtcatcgacggccgcgtcgggcagccgcgcggcgatgcgccgctcaagcatgtcccgtgacgcctccgacgcgtggaggatgctcgccgtgcgcaggagaccgaagaggacgcgcgccgtggtggcgcccacggccgtgccggtgtgggcggtgctcttgatggtttcctctgggaggttggcaatgacggtctcgagaagcgccttctgctcctccacatcggacgaaggcggcgcagcggcagtgcccccgccgccggcgacatgcctgccggtgcgcgacagcccggggatggaccgcttagcgtacgcaatgagagcccccttaatgaccttaagggccgacgcgcgcgcttctttatgg

SEQ ID NO: 1633 - DNA, 802 bp, Zea mays
agctattcttggcaagtttctgcctcgaagagcctgagttgctcctaaagcctcatccacagcatgccatatgttgttgtcaccatcatcttcattttcttcaacccattcattttcccacatgaactcttcaagcacgagtgggttgcttctttttcctttggatcccagctctcttagtgtttgaaacctattttccatcttcctattgtaactgacatagaccaatttattaagcctctggtgttctagtcggttcctcttttttgtatggatctaaaaatgcacaattgcaagacatcagattcaacaaaaaaagggctgacctatacaaccactcaaacaagtgaacaagaacaacaatacttactgctgcaaaatctgaccaatttctctcacaacctgaagctgcacaacataggcttataaccctttttgctaagctttgtagttcatatgccagtcctccatatgcaccccaccataggactgttatagttatacaaaaaatagatcagttgtagtgccaaacagaaacaggcaaacaaactaactaatgctgcaatagtaaaacagacttactaggactttttttctctctttctcttattgctccagcctttgaaaagcattccccttctgatctttcatagtcatctgcttgtttacttatttttgtttgctcatcctcatcactgatcattttccacaaaacatcattgaacatagctcgaagtcttgcagcttgccttctgtctttatcccttaaggtaaaagatttacttggattcaaataaaggct

SEQ ID NO: 1634 - DNA, 797 bp, Zea mays
tggaggagcatctcaaagcccacgtaataagcctgacctcttctgactgactatgtttgtttcacggacggaccctgcttcgtcctacactctcaatgatgctgtgtctgtgtgcaggggcggccctacatcagcggggagagagtaacagccgccgacctcagcctggcgccgaagctcttccacctggtggtggcgctggagcatttcaagggctggaaggtgccagaaagcatgtccagcgtccacgcctacacccaggtagtagcatttccagagtgcttgctcatcaagatacatcccgtatgagtatgacctgccctgccccacgatcgtcttttgtgccgcaggctatgttcagccgcgaatctttcatcaagactaagcccaccaaggagcacttgatcgcgggatgggcggcgaaggtgcccaagccgcccaacctcgtcgtgccttgctggctcatctgatcagtcgcagtcggtggtgcgttgctggttcattatgattgggttgggatacaacaataatgcagcgtgccatgttccgatcacttcccagttgtggtggccatgtttctatatcacctaacgctgccggttaggttcgggaccgtgggcatctgcatcgatcttttttttttcttttctttttaagattacacaccataacatggccttgtgcatctgcactcgtgatgggcatatttgtgacgtggaaatatcttccatcttaagcgcgcgctaatgagaatgttgggcgccaaataagcgcgcattacatggtgtggtcgtttg

SEQ ID NO: 1635 - DNA, 829 bp, Zea mays
cccagggatcctatagagatcacctgcagtctgggtagccacggactcaccacgggcaacgcagccccgaaccaccactagtccactgtccaccaccctccagtcctccgtccggatggatggattgactggtcactggcgaccgtgtaggccaactctgttgcttgccagtgccagtgccagtggcactgccactgccactggcagcgagcggcgccatcccgaaccataggtttgccctcagcctcgggctggctactgcgacgtgtttgtccagttttgccctctagattctgcccaatgtgttcaaaaaccccgtcgtcggtttagcgtttcgagataaccttaaatattcgcgaggttgcatgggtttcggcacggagtacaaaccagatactagggcctctttgttgaagatcatatattatataatctagattagaatctatattatataatctagattataatttgtgaaggttataatctatatatagtcgtttggttgcacagattatataaatgcagataatacacaagtacaaactagatagtagataatatgttgccgttctttaaacactaaggtcccgtttggttccattagttttagagctaaagtttagtccgtctcaccctatttgattgtagtgacttaatagattttaaatacattagattcaacacataaagaccgacataccattttttttcttatttcctatgtatgatgccagttttctaggtaagggtaattgagtaaatgttgtcttttcaatccttttagcacccctatgagggactacaagttaaagtcaattagtatcta

SEQ ID NO: 1636 - DNA, 707 bp, Zea mays
tcggccacggcttccgctccggcatgctgccgtgcaacgacaccgacatctactggttcttcacctggactccttccgagaacggtactagtctagtctagtcgtcacccgtcagcctcatccaagatcctaggagcagctacctacatgcacgcatgtcgttgtccgtctcgtttcagacaagggcgtcgacgagagcgcggccaagatgaagcagttcgtgctgggcaagctccggggctccaataaggtgcccgcggaggcgctggcggcgatcgacaggagcgagatgagcgacgtgctcgccgcgccgctgcggttccggtcgccgctgtcgctggccaccgcgagcatcgccaggggcagcgcgtgcgtggccggcgacgcgctgcacccgatgacgccggacctcggccagggcgcctgctcggcgctggaggacggcgtcgtcctggcccgctgcctcggcgacgccctgctgccgccgccagctggcagtggcagtggcaggggcaaggaggaccgggtccaggcggccttgcgcgagtacgcctggatcaggcggtggaggagcgtcgagctcgtcgccacctcctacaccgttggcttcgtccagcagagtgacagcgcggtcgtcagcttcctgcgggacaggctcctgtcgggagtgctcgctcgaaggcttctgaaatggcggactacgactg

SEQ ID NO: 1637 - DNA, 772 bp, Zea mays
cgaaacgggcaggggtgggtttttcgacgtgagctgtaccgtactactacccggtagcacctcaatcacctcccgtcacacgcccctgttccactccgtacccctccctgtctttaaagcgctcacgcctttaacgcggtgccaaaattaaacgtaaacgccacccaaagccacgaaaaactcgcaaacggacacggctggacgcaaaactctcgtgaccgtgtgacacacccaacgttagctctcgagtctcgacaacccgcggtgacactgccttctctgcggcaccaactggcatcgtattttgttcatacggccatccgtagttttccctctggcaaaaataatgtcaagggatacagagccagccacacagtgttgcacgaccagaaacgggagtcgtcccccccccccctcctaaaaattagttcaaccaccatttgaaaccgcaaccagaagatactgaaaattcgccaaaccatttgacgaatggcggagtgggcagagtggcattggcatgacgcaacatgtactactcctacacaggaaaagaatcctaaaacacatataatggacgccaatcgtatatccgtactctcctccaacttctgcacagtactctcccacccgccgtccggccttacgtgtcgcggtggggaaaaaaaatacgcgcaataaactagcgcagtgaacaccggggagactggactggagagaggcatttgggagggcgatacgggagctacggcgcgtctcggtggccccacgcatt

SEQ ID NO: 1638 - DNA, 769 bp, Zea mays
ggaagatggtaaacattagcagctatttcatttccggcacacagggtacgcttagaacagaacgaaggcgagccaagagttggttaccgtgatcaagaacaaagccgcctgggtaacgaggctgcgcgccgaggtcgtcgaggttgaggttgagagcctggacgacgcgagcagggaccagaaccgtcgaacaccctgcacgaagcgggagggagagcaccaagtgatgagttgcatgttcaagcaaagaacagcagcgaggtatccagtggaagtgagcacgaagcggacagggaagatgatactccaccaccgacgcacctgtctttttcttcggctctgccggggcgccagccggcctgggaagaaacacgccagtgccgttacgctcgcgcttggggccggacggggtgaggaacacggcacgcatgccagaggccggagccgccggcgcgtggtggtggtggtggtggtgctgcggcttctgaagcgggaggcacgccgccgggttcagaccaagcagcgcgtcgccgcggacgcagccgacgggcttggcgcatgcgccctggcgcgcgctccacgccgcggcagcggcaagctgctgccgctccctctgtagcttgagcagttgctgttgcttcagtagatggaactacaaaccaacggaggggaagcggacagagaaggaagcgtcagggcaacaggaacagaacgaagggaacgaaacaactggagaatcttagcgagaggacaggacacgcacctgagc

SEQ ID NO: 1639 - DNA, 770 bp, Zea mays
attcagtagcatattatcgtcaggaaactctcgatacaatcgaggaaccaaaaatctccagctagcagtgttcagaaaaaactgatcaggaatcttgtccaccatccgttgcagcaaaccagcctgaacgatcaaaagtgtagtatcaatcataatataacaactactgctcaaaaaagaaaaaaagggtaaagttcgaagtccacagctccacattgacagttaagaaaatattgtcctcattacaaaagaaataccaggttcatttatgaattatatcaaatgaattacaacacaccttgaagtagagagctgaaacggagttgaagacatcttcatccaatgaaatccaaagcatttttgaggagctcccaagaggtaatgcaaattgggtatctccaagatgcatgtctctcggagcagtttcatcagatggaataaacaagccatctatatcaaactcaacagaggagctcttgaatattggatcattaacaacagtcacattcattgcagcaacactatcaagatcaattttctttgggaggtttcccaggaaagaatcaagcttcagtgcaccttccattactttgttcttaattgcattttccaccgatgatatgatatgattactgaaaccatctataaacctacaaacagtaagcagaaagaaaatctcacacatgtcctcatcagattcaagtaagatgcgcactaaaattcatttaaaaataaatcagtttgtttcactttcagaacaaatgaagtac

SEQ ID NO: 1640 - DNA, 748 bp, Zea mays
ctgttattgacaaggaacgtagaggagattacctaggaaaaactgttcaggtgaggaatcattcccagaacagagatttccatgcttttctttttctgtaaagtcatggaaaaggtgccaattgttacagtgagcttacgaattcgcgttaattctctttatcaggtcgtgccacacatcacagatgaaatacaagattggattcaacgtgtggcaatgaatccagttgatgacaccgaagagccagctgatgtttgtgtcatagaacttggtgggactataggtaaaaaaatattctgtatcattgcagcaaattgcaaaatagtatatatcggtttgctcaattgttcccatacctgtaagtactccggtgcaggagacaatatttttgctgcataacgacagtggcattcttgatgcaggggacattgaatcaatgcctttcatagaagcactaggccaattttcataccgtgtaggtaaggaaactgtaaatttcgataacctgtttccgtgttttacttatgtttctactcaaggatgttgatccaatgtctatttgctattagcataaattgcctactgatgcaatcttgtgaaaattaccagggcctggaaacttttgcttggtgcatgttagtcttgtaccagttctaaatgtagttggtgagcaggtaaacttctcccgatttgggggcactgttattacttttatgttccaaagttattatttcagaaaataatgata

SEQ ID NO: 1641 - DNA, 987 bp, Zea mays
atatggcgtgcaccagactgaatacattactagggtgtttggttgcctctgctaaagtttagtccgggtcacatcaagcgtttgacttttaaacaggagtatgaaatatagacccaaccaactggactagattcgtctcgtcttttaatcttcggctgacaaattagttttataatccgactacatttaatacccggaacggaagttcaaacattcgatatgacaggggctacattttagtttggggtaaccaaacaccccttgcatagctggagaatgaagagtgcctgctacatacagtagtatgctgctgctgctgctgcaacattacattagtttctgctatccgttttcagacggctgctttagtatttatgagagcatgctgcattgctgatcttaattgaggatccagggaacacagggatctcggcagctccatcaaacaccctgggtgggcctatttattttatttatttatttacacatgagcgccactgacaccgagaccactctactgctctgctcctacccccttcatgtcaatcgaagcctcctcatggaccaccagcaaatcaatccgcccgagccggtatagcagttcattcaccagcagcatttggcccttggagaaacaagccccaggaggatcagactactttgcacaactagtgcaaactgaactttgtgtttggcctagaccaaccaaccatatcaaaacaggttcctttcaagtgccttttgtttacctggaaaactgtacgaaccgctgtctgacaaacaataatatttggtctgtacctgtgttgagacttgagagtgcttataggaatgcttatgccacgcaacgcaatgcattactgattctctggccgatgtgttttcctctttttcatctgtaaagtctgaatagtccataggaccaaggaacaacaactaaaaaaacaaggcctgtttcattggattgagcttctgaaacattttgaa

SEQ ID NO: 1642 - DNA, 639 bp, Zea mays
gcttgcatgcctgcagatcgtaacagcacaagtcacgaaaaaaacgttggatgagaacgagaccgtctagtcagccatgacgatcgaggtaacaacaggttaacgaacgaacaagacgtacagtgcccaccgttacggaagcgggaggtgacggggaggtcggtggcggccatggggatggacatggagagctgcgtctcgccgtcgagccccatccacgacccggccttgtcccccttctggtgcggccactcgtcgaagaagggccggagcggcttctgcgcggcggcggcgtcgtcatggtcatggccatggccatggccatggcccgacgacggccgctccagccgcaggtcggctccaagaacgaagcagtgctggcggcgcctctcctcctgctcgtcgtcgtccttgcccatctccacgccgtacggcgacgccgcgccgtgcccgtacccggcgacggggaacagcggcgtggggcccggcttcgtctccaccccgagctgcctgaactgccactgccccgccgcggcctgccggtcgacccgctcgcccgcgccgtccgagaagaaggcgtgctcgccgacctccttggcggccgcgtgcccgtacgcgtagtccctctggtcggcggag

SEQ ID NO: 1643 - DNA, 823 bp, Zea mays
tgcatgcctgcagcctttccacttccacggaagtacatgtatacttgctgaaacaagttcagaacaataatatctcaaaacagctctcttctagaataattgaaacttaaagagagattatgatgcatgacagagaaacaccatgttgctaatgaatatccctacacatcagaattctagggacagcaaaaggtaaaaacatgatacccacctgaatgacaacgatgctgagcagtgattcaaggcagaacattccaaatccaatgaagtaaaatatctggcaaacaaaaatgtggaaagatagtgtaaatgagtgagcagttaccaggaaagatgtaaattcacttattcaagaataacccaatatattcgatcaatcaaccggaaaaaaatatagcatcaggtactgccaggcctagactggtgcaacatgcaagaggtccatcacagataaaagttggatcatgtttagctagggatcccttagtaaccagtttcccaaatcgatggggttgaggaacaggaacctagtacggtacttaaaacaagatttcaacactatgaggacaagattgtttccgtgttcccggaacggaacgaacgtttctagatcgaggaacgtgaataagttccacgttccctctttcaaagaggaatccctcatatattaatcataatttactgggatgtatagcttcatatgatgatccaaattaagttgaatcaaacccctagtacgttaagcagtttagacttacccccacaatagcactcctgcctatgatatcaatagccggcaaaatcccactgtacagacaaaaat

SEQ ID NO: 1644 - DNA, 722 bp, Zea mays
tttacctgttaggtctgtcttttaataataataccctttttcctttcgtttggcagctggtattgtcattgaagataagaattggccaccctttatgcccattattcatcatgacatttcgaacgagataccaattcacctgcaaaggatgcagtacctggcgttttcttcactattgggtaagtgtcgatcacttgttgccctcttatcgtgggaaataacttgaagaaagaagtaaattaattggtgacctcatttttttacatccatatgtcgaaataatggatatcctccaaataaatggcatcacagcattatcttgtcatatttgaaatttatcttgtcatatttgaaattgttagtcgcatgggaaatgacattttaatactgagaaatttaatctggattttgacttgtttttttctctttgttctgactggctgcatatacctattgaggtagagaatttcaaacaaatccaagcctcggccttatttccaaaatgcagttcttgatagtgaatcctgttggtcaacatgtaaacaatattgctcttcttttggcatggcttaaatttctgatcatcatcagtcgatgtccaatgaaattctcacaagttgtagtttggaatcaggatagtggtagccccagatgataagcccgactagcagccatttgagatgtgagaccagatctggaaaccattgtgcattgggtttagc

SEQ ID NO: 1645 - DNA, 672 bp, Zea mays
  unsure (1)..(672): unsure at all n locations
cttgcatgcctgcagcagcggcgcctccttgtcccggtgctgcccgcgcaccgctgcccccgtgtgcgcgtgcttccccgtcaccgccagccgcttcgagtcgcccctgcccatacacacgcacgtcgttagaactaggaccgacggcgggcgaggtcaggaggctgctggtgcagggccggagatggcggtggccgagatcatcaacgtactggacgcaggtcttgtgctcacagccgcaggcgcacttggcgcagggcacgatggtgtcgttgtagaaggaggagaaggagacgcagcaggaggggtacttggacgccaggtgctgcgagtaggtgcacgtcacgttccacgtcactgcatgcaagcatatcgtcacaggctggagttgaagatagatagagaaaaccatataggactatagtagaacgcgaactcgaacgcactgagggcttgtgtcttgcgtcggcggtcgggcgtgaggaagacggtggaggggacgaccttgccggggccgcaggtgtatcctggccccggccccagcagcgtgaagttcttgggcaccttgacggtgcggttggtggtgccggcctggccgacgctgacctggaacgcggcgacggcggtggcccggtcctggccgtaggcgctgacgacgccgncgaggcagca

SEQ ID NO: 1646 - DNA, 776 bp, Zea mays
acgcagcgcgtgtcatcatggcatagtcgtgtgtgacgatcgtgaatcaccatcttctgctggcatgcgcgagtgctcggcaggtcctgtgggacaacgacagcagcaagagcaagagcgagagcgagagcgatgagcaggcggcaggggatggagtcccaagcctcatatacgtctcgagggagaagagccgcacgcagccccaccacttcaaggccggggccatgaacgtcctggtatatgttcgtctctgtccactccactctcccagtccagctccagtagcaagacgcgagggtgtcatgctgtactgtacatgcatgcgctgtgcagacgagggtgtccgcggtgctgagcaacgcgccgatcatgctgaacgtggactgcgacatgttcgccaacaacccgcaggcggccctccacgccatgtgcctcctcctgggcttcgacgacgaggtccacagcggcttcgtccaggcgccgcagcggttctacggcggcctcgcggacgaccctttcgggaaccagatgcaggttatattcgaggtacacgtcgaatcgcgctaccacatcgaggaggacgagtagtagtgctcgctactgttactgcatgcatgctgctctcgtttcagaaagttggacacggaattgccggactccaaggcatattttactgcgggacgggttgctttcaccgcaggaaagtcatgtacggcgtgccaccgggctccggcaccggcgccaccaaaggtgaggtctctatctatcccaatccc

SEQ ID NO: 1647 - DNA, 783 bp, Zea mays
cgcaggctgcacgtgcatggcccaccagcggcacactggatctcaaaattattccctcgctccacatgcatccacctcacgtctgcgcgcgcgtcttttcctgcgttcaaacttcaactgggcaatgattcgcgcaagattatatggcgcagctttaagggtatgttctttcagtctttttatttcttttggttataagtgctagtttgggaattttatttttgtaaatgatttttatttttcaaataaaaaataaaccaattttcttagaaaaatgagattcccaaattagcatagtatagctataaaagccttaaaggttttggaatgcagcattggtaaaacacgggaataagaacaatatagtaacaacaacgcttgcaatcataaaggaattatatcaacctgttcgtttggttttaatctgtaccgacttctacagctactacaatgtttttgtttctagcaactgcgcagtctaaacaacaagctttaatccgaagcgaaaatctccaacatatactagatataacataggaagaatacaagaattagagagagacacgaagaaaagtttataagaagttagacctcttgttaatttttttctaaaatatcactacagtgaagcattccataaagaatttatagggtccgtagaaactcatcatttctttgattcaaaggactacaagaaaattttctataggatcttaatcctttaaaattgcttcacttttcatttattccaaaggtgggccctaaatggatgtaaagtgttca

SEQ ID NO: 1648 - DNA, 841 bp, Zea mays
agcagcaccctggtttccaacaacttaacagccacgtgtcgcctcctagaccgtccgatcggtgtcgttccagaacaatccgcctccgaatcaacggcgggctctgacaggtgacagccgctcgcgccgtgagccgcttacccgctataaaggcctccctccgcccaaatctgacctcttttctctctccccgtctgcctcgccctccacaccaggccacgccacacacaggatagcgagcgggagcgacggcggcggcggaggagctagggttttgatccggcctcgccggctaggctgcgccgccccgacgccgaagccatggacagggagcttctagagacgtttgacgcggccaagaaggcggccgacgaggcggcaggggacggcaactcgccggaggctggccgctgcctcgacgcgctgcggcggctgcgcgacattcgcgtcaacaccgacatcctcgtctcgacgcaggtcagcggtcgcctgccccggttagattggctgattgttttggtggcggaggaatccacgttcccggccgatgcgtgcggtggcggcaatatcactgtaggcgatgtctcattggttttgggtctgctgtagatatgcctcgtcgaatcgacggcctgtttcccctcactctctcctctaagacgacgccgggtagacgcgcgcaagaaacagggccttcgtttggaactagatctattgagttcctgtctctattttgggtggatactggataggtatatgattcattctcctttttctgctaaatttgatgcttttggtagggggctttccagttttaggaaaatttgtagcccaggggttg

SEQ ID NO: 1649 - DNA, 798 bp, Zea mays
gtgcttgcagtcgctgtgatttcaggctgtcctttcgcaactgcaagaaagcaaagttaatatatcatatggcagctgtctcctggacataagatatgtaagttatggcagaaggataggactacggctactacattgaaaccacaaattttcaggagatgacagatgataatttattgtgaacggtgagttgtactgaccttctggactgattgatcatgcaaactggtaatgccggtgtccctccatttatccaattcaatgacattcaggcccgacaaccacacacatgaatcatcatcgacgttatggtctgctatataaggtttcagctgccctaatctcactccacagaactggactgctccaatcactttaccacccatatcgaggttccatagaggtgacaagtccttctggacaatcaaatcatcatccagaacaactactctattcaagctaggaagaaggtcaggcaagaggaaatgtgaaaggccgaagatagatatgtacttagttttcatctgcctctggaaaggttcagaatgattacgaatcgtgacacgatattcctctgtaggccataattgttgcatctcaagggaatctacatccttagagagcttctggttgtcctcaatgttagttacgcgtacagtcgactccaagtatgaatttttatcgaaccaatacttcatcgcataaaagttttgtgcatcagtgaatacatggaaaacaatgtggtccgaaatctgaaatgtgttattgggcataagttagtgatcaagatgaatttca

SEQ ID NO: 1650 - DNA, 722 bp, Zea mays
agagagaagagggaaaccagtggctgagaaagcccgtgcagcactgcggccacatgggcttgcgggccagcctttcccggaccgatggcgatctgaaacagaaacgcccagcgctattgattcggtcccccgtgccctgaggctgaagctgaaagcaacatcacgtcatcgcacctgacgatgtccccaccaaccttggcacgtcccagtgcggcaccgtcaatgttttctcgtagcggagtactagctagccgccctagccgtgttcccgggccgggatgggaagcagaaccccgcacgtcgccgtcgccgtcgccgtcgccgtacgtctcgcgatcgcttgaagacggctagctagacgccacgcaagatctccgccaaactcacgttgcattggctcgacctgttcgtacgtatgcgcatgcagcggcgtcgatcggcaaatcaaaggcaagcagccgagcaccctcgatctcttatggtcctcctgggcacgctctcctggccagacagacacgacgtgccggttagctaggccagtcatacgcgtacaggccgcgcgcgcccttatcctccattaattcgtcctgccccctatataactcgatgctagacagaagatcgaggcagcactagcagtaataagaaacacgtcgaagtcgtcgtagttttacgtgctccgcccgtcccgtgcgccatgttacgcaacaacgccttgctga

SEQ ID NO: 1651 - DNA, 771 bp, Zea mays
cttgcatgcctgcaggtattcatttcccatcctacccctggctttgctttgagccatacgttcatttctcacaggctctcattgtgtctgttcgtttccatcgccacacagccgccgcccccgatggagctccctgcgccgaagatcgctctctcgcccgacggccccgccaacgtctccacaccggaggtcgccggaccccctcgtttgaacaccggtggtcgtggccggagctcccaagtccaccagacatcgtcgcgtgatggagcttcccgttaacagggtgagctatccaaaaatgtaagatcgctaaccctattctcatcaattttagttgaactagtaactgtaacccttaactcactgtcggttttggtttattttaatccggttgttaggaacttgtacacagtagacattacagttgaaggtttcttatcaattgactcagatggtaagaaaaagtacacaaaaggttttaataggaattggatcatagatagcaagagtatcacgatggatttcctggttgcaaccttaaggtctgagataagttggggcagaggtcaaaagattgttttctgggtttatgacaagaggtctggtgaggatgttcaactagattcagaatctcagattattgatgtcattgaaatgtacaaaccagagaaacgatttatgcttcttgcttttgtgtgtagagatggagaaatgcacaattatgcatgttgttccccagatactgataatgtgcctccatggatacttaca

SEQ ID NO: 1652 - DNA, 761 bp, Zea mays
aagcagagcacaaaagaaatccatccgtctcattgcttccgcttgttcaccaaacaaaaccgaagccacactccaccgctctcctccccaatcagctatgctcgcccaccgcttcctcctcctcatcgccgtcgccgcggctgcggcgagcggcatcgcctccgctaagccgacggcgtacgaagccctcgccgactacgacttccccccggggatccttcccaagggcgtggtcgcctacacggtcgacaacgccacgggcgccttcacggccacgctcgatgcctccgcgtccggcgcgggatcctccatctgcgagttctccatcgagggctcctactcgctacgctaccagaccaagatcaccggcaagatctcccccgaccacctcaccgacctccagggtgtctccgtcaaggtcctcttcttctggctcaacatcgtcgaggtcacccgccatggcgataacctcgagttctccgtcggcatcgccgccgcggacttcgggattgacaacttcctcgagtgcccaacctgtggctgcgggttcgactgcaacgacctgctcatgctccagaaggcgggggcagccaccgccaggctgcgcctgcgaggtgccttctagaattccactcatgcaaatccaggatgggatagtaagttcaggactcgattttatgtttcaccaactgtttcagacagttttaggagagtcagagatttaattaagatctttcaatatgtaaaactatatttctcta

SEQ ID NO: 1653 - DNA, 760 bp, Zea mays
aatccagacaacaagcttcgacaaggagagaagccgcaaagccaaagtaagcctcggatcgagcacaaccagaccaaaaccgaaatgcgaaggtgaggaccgagccgaggagcgtgcgcgacggagggaacgcaaaggttaatgacaattactactactaaaattactactactaaaacgatgcttgagacgatgggaacaggggaaggaggagtccccggaggcgatggcagcggcggctcgaagggtagcgaatgcggcgagcaccgcaggcatcgtatcctcgccgggcgcccgcaacgctttatgcctcgagatccaactcggctgatcccggcgactggaaaatagcggcgaaggggaggcgacggcgatagaatccggctaccacgctccgcgcatggaccggatcacggccacggcttcgcttggctcaatttgggtcagaggagacgatgacagaggcgaggaacgggggaaccgaatcagggcgaggccgcggagaggacaacgcaagcgaggtgtggattggctgttggtgcggcgagaggccgctttgggatgtgtctttataatagtccctccgtcccaaaatagattttagcttttttatttatatttaaatggataacgatggacctaaaactacaacaaattttaatttgggactgagttattggcttctttctagaaaagttattggcgtctgaatgacaggtggaaccactccgcgtggctctcggcgacaagatagacgttt

SEQ ID NO: 1654 - DNA, 770 bp, Zea mays
atagtcatacaagtggaactatcaatgagccacgtgcaaagaggaagaaactgaaatgagccatacggtttgcctccggactcaaggtaccaatagctcttattttttctagattgattgaatatacttgacacattttgctttcacaataagagtaattgtgcctgaaagtgacttgtatttttactttttttttgtatgtatgcttgcctacatatttagttgattatttacatcaccacattgtcagaatatatatattcccctactccgtccctttaaaattgtaagtcgttttagctttttaggtacataacttctgttgtacacctagaatcctagatattattatgggcatgtttggttttgacccctgacaaaaggtgccttgcccaggcagctcccaggccgtcgatttccagcacctgccctggccctggcggccggatctgcctggtcgagtgccctaggccagtgtcccaactagacatatgccctatgtctataactgattatctacgccacaaaatattgccctcattgtctatagtatatgctgatgtggactccctccattcctattgcaagttattttgggtttttcaggtatagcttttgctatgcataatgcatcaatatatatgccaacacagcaacacctgctttgcaccaagcgctaatacatctgtctcacagattggacagcgcagcgaaccggcttcatccttggtctctctgtccatgcgcgcacatgaagtcacgaaaggtgc

SEQ ID NO: 1655 - DNA, 787 bp, Zea mays
cagcacctcgtcagttttcaacttgaaacagaaatttgcacataaaaaggaggctcattgctatcgcgtctcgtgacgatcgaatcggaaacaggccacacgacgtaggacacgcagacaaagctgggtcacgcaaagtcaaagagagataatgcaaccaccttcctaaaataaatcgattttgcctactagaaaggaggaataaaatgcaggagcgattagatactagagaaggtttttttgttttcggtttcaccttgcaaatccaatccatggcgtctctcctccaggagtactccaatccgccgcgctccagcctctccgcatagccgtcttgaggcttgtggtccgtctccttctccaacaacgcccgcacggcctcatctgtgtccacggggaacacggcgccgacgacggagtccaagccgtcatggccgctccccacctccaccagctcgttgccgcagccgaggccgagtacgttgttcctgtcctccccgcagagcagtgtggaggaagcaccaaggcagaggattcccatctcagtcagtcaaaatcgtagcaaacagcggcctcctactgctgaagtacagaagtagaactagcagtactgcttggcactcgaagagaaatcgaggcgacgatctctttgggtatgttttataatatagcgtgtgttggaaaatggcagaagggtaaagtgagagtgagtaggggatctccccagtcccctctgcgtgtttgggtgtccacgggtaaaatagagaattggtacggtagatgctgg

SEQ ID NO: 1656 - DNA, 770 bp, Zea mays
tggcctgatggacagatgggtggatccttcacactactgtctcattgagtggaacggagcgagacgaaatgatggcgcccctctcacatgcgctagctgcaactgtcatttgtgtcaagatccacagttaataccactattgttgcctgctgcccagtgctgtgctgctgctgctgctgctggggccttggggagccagtgcagatggatggatggatggatgatgatgactgtggtgtggactactgtgtgactgtggtgtggccggcggtggcgtttgtcgctgccctggatttgattggtgcagcagggcaaacaacagcagtccatagtgccatactgccatgtaggactagcgggcatcttcactgctatagtgtcacgttgatcggctcagcccaccagtcaccagagctacctagcagtcaccttcggtcacgtctcgtctctctctctctctcactgtgctgaggctcccacacagacgacacatacagtagagccaacgggaaaaagggaaccccgcggtaacaacgtactagcagcgcagcgtggagtcgtggagaactctgtacgtactctctctctctactagcgttggacgatgttgcatgcaaaaggtaggcagccttttacgtccagctcaaggaaccaaccttggcccctcggggtcggggctcggctggctgggagttgggacctccccctcttggcctcttgcatgcatgcattataatcacgcaagagtttatctatcccgtgcagctaac

SEQ ID NO: 1657 - DNA, 788 bp, Zea mays
aagcttgcatgcctgcagttgcagtttgtttaaactcatattatctgttttaggtagtaaagtgaattttcactaaatgacaatgcagtggcctgagttcagggtaaatctcccaggggttggtgatgtcaacatcaatgcggcattctttaggaagtttgactatagtaattcaatggttagtacaatttgaacctcaaagttgcttcaaacttacatgtggtgctgaacagctagtttcctgttttctctctcaactaagctgacatgaaatgaataaccaaacagaatattggtcacatgcaatgaaattagcgcttctatcaaaatgtcatttggtgttatagcaaatgtatgcttagcttgataaacaatggcaacatggcagtttattaatcacgtgtttaaaggcactgaatttgttatcatgttcattaattgatgaactgcttgaccactgagcagcaaggtccttatcatgccaaatgaaataaatattctgttatttagtgcatcatttggccatgatacaacaacaacatcaaagccttttagtgcgccatttggccgtgtataatacaaaatattcatttagaggaagacatttcatgttgattcataaaaaacatgttacatattttctatccattttggtccaccacttaccttgtcaacacacatttaacccatcctctttcgctagtttattgattagtcagtctcgactgatttaaatcattcacaggtcaggttgattggatcggttccttggttatcatgtgggctcc

SEQ ID NO: 1658 - DNA, 750 bp, Zea mays
aatgtttgatgccttaggcacttaattaaaggtcctgaacactttgtcagtctttcaatcatggctgtacgttatgctattctgtaagtggtaaaaaacacacggttgcatggtgtatgtataatggaccgatgattgcaatatggcagcccactggtggtctaacgatcatgtaattttattcaaataaaatcataggttttcaggtaattagaggaaaagagagcataccaacgacctacatgatccgctttccacctggaccaatatttcttcaagaagtctctctcaacattcttttgaggacttggaatgcaactaccagctgcataaccctaatatgaatatgaaacagagataatagttggaaaataagatactccttccgttctgcctatttttttccgttcactttcattcaaatgataatgaatctagacatacatggaaactacattcatatgttacttaaaaaatatgtgattagtctaaaacgaattatattttgggacggagggagtagatgatatacaggtaaatatgattagtaaaaattaataccgtgtatctagcaagcattgattggagtgaaaaattaatgtctgaacgtaaaatgttcatgaatcatgatgccagtacatatccatcttaaaatacaacctactagttttaaaaaagttgtatacatgtcaagggtcaaagaacgcacagacagcatggggccttctgttcattataggttcgtacgtg

SEQ ID NO: 1659 - DNA, 799 bp, Zea mays
ttgcatgcctgcagcacagcacggctgctggatgcagcggaagagcaaaaataaaggagccgcctgggccggtgcaggcgtggagaaagaagagagcttcctcctccgataccgggagcgggcgctttgctgcttgtcgtgttctgtggtgtcagcgtcacgcaatgacacaaataaagccgcatgctgttgatgaggctgagattacttgtgcgtgcgtgcgtgcatggcagcatcagaaagaaaacgcaccgcaccggccaggaattttaccaagagaaggcagatgcgctcgagctagccaaacattaatttttacacttccgctaactacacccttcagactctaagctctaacagcaatcagtagcgatttcgactcttcagacaccaatgtcacgtcataatataatttaaaacaacacatctttacacacctgaccggagaggatagcgactatgcatggtccaccatcgcatgcaggtcgcagcacacctactgcgtgccggtgagacacggtgatcgatgatggtccagctaaacacgtatggtcccgtgtgttgctggagagtggagaccatctaagcatgtatgtatctttttttttcccttcgtggctttgtcctcttcaagcctgcaagtaactaatcaagtctagtagaaagaaccgtccatgattgcaagatgaaatcgcaaatctagcatagcttgtggcttgtgcccggtgggaccacgcaccatggttagccaccacaagcctgtcgtagcctccgataccgaatcacatgcccgagacgg

SEQ ID NO: 1660 - DNA, 742 bp, Zea mays
gctctgattggcagtcatcgtcatggctgagcggaagagaatccattctcctgagatgtgatacttttgttgagtttggctttttgaaaaggggaatcaaactgattcctcaaaagctaccttgtactcaactgagtttcaagtatttggaaaacttgccgttctattatcgtttcctatttgaactcagtttggagttgcactgggaggatttgtgtgctttgggcttggagaacatgataccagtggctgttacctattgcttaaagtatctggacggatcaaacaaaatggatattatctggaagagttctaatgccatgcgggtttggtttgctcactgaatcattaagcatgcatgactgtcttccagagtagtgcaccagtaactaagcagcatattcaggtgaactggacttctgactggcactgtgacattttggtcgctttgtgtttggtctgtaaggacagtctcactcaagtgtgtgctttaggtgatggtaccttttgtgaaaccatggggaacctttgcagtaaaaccatgatagcattgaagaatggcgttttaacccaaccagaagggaggtcactgctcagatctgatggtcacatgggcaggatatcctcatttggctacggccaaattttgtgagtcgtttgaaacttcagaggtgtcaaatacagcaaccacttggagattaaagccgatgtttgagtttggtgaattgctttggccagctca

SEQ ID NO: 1661 - DNA, 784 bp, Zea mays
gcgtatatgttctgctactgctatactctcttcataaatgttggctttactgctttaagaactccattttcccttgtgctttattcttgcacacactgctattcaatttattgatgattgcttttaacgtgtattcttggtaaaattctcaccccagacatctgatgaggcaatcccagtcccagttgtccagatagatcaagactcagaccgtgatgcaaccattgtgcagctaagttttggagatcgtttgggggcattacttgacacggtatatattttacattcaccactgatgctttgtctttacattgtggctgctcaaaactgtgttgttttacattttcgtcatatctgccaattattttgcctggtattcactgtttgcagatgaaagctctcaaggaccttggccttgatgtctcaaaaggaagtgtggcaactgactcagctgtcacacaaacaaagttccacatcatgcgattgtgggtgcttgccccttactgttttattttcatgtgtagcatctagttatgtgtgtctatgtggaaaactaaagagagtattcgctattcttgaacatatgcatttaaattcacttttaatgcttaggtacatagtctcggacctctcagcacatttacgttgccttttattcagctttcatgtgatcaggtttctccaactatgctctgtccctgcacacgcagggttttttgaaatacttgttgcactatttttctgctaggatattggtttcttaagatattgatagaaaatacaa

SEQ ID NO: 1662 - DNA, 1046 bp, Zea mays
tgcatgcctgcagcgcggaagcaacgtgtaaaaggtgaaggaaaggttaaggggctgtttggttgtgtgtcacactttgtctaaggttagtagttcgaattgaaaaactaaccttagacaaaaaaattagataaagtgtgttaagttaggtatcaaactaaacagattataagacaggtaataccaaatggtacgcggtaaaaagggccagaaaaagacataaaagcacaatagtgacaacgcacaacaggacgggctggtatgttcattaatcattatacattatacacatatcgatttagtgacggagggggttatagataggcctggacaaaaagaaccggaaccgaggaaccgaaccgaaataaccgagaattgaaaccgaactaaccgaaccgaaagaaccgttatgaaattcggttctggttttttgagaaccgaaataaatgagatattttcggttctgcactccaaagaaccgaaagaaccgaaagaaccgaaaaacccaaaagtattagattcaatttgttacatgtgtttgtaacttcggatgttgtgttatcgacttatgttgaacctctaatcatccatgtattatctatgaaattatagttattgtgcacttgtcgttgtttgtggggagatgttgctgaaatttctcacaaaagttgtcgttaatcataattttagagtggctgttacagttcagttagaaccgaggaaccgaaccgaagaaccgagaaccgaactagtcggttctgatttctttatcttgctatttcggttctagtttttgaagaaccgaatttctacgagaaccgaggaaccgaaccgaaccgaaccgaagaaccgaatgcccaggcctacatagagggacgcacttgccggtggagctggaccatgacaaagcggccaaaccaggagaggaaactgccggccgggccagccgccagccagcatgggactggaaagtatagatggccaaatgggccgtgtctaatgggccggcccgaagcacgacccgtttaatagtgccgggcccggcc

SEQ ID NO: 1663 - DNA, 775 bp, Zea mays
gacctgcagtaaatatgatttcaattgttgttatacgacttttcaattgtccatgaatattggagaggatgccatccaaattatctgatctcagtttttttcttgaatactcatgagatgtgtatcattgcattaaggagataaataaatcacaacacacccaccattgtgtgtgtgtctctctccctcacacacaccacattctctcaggatgtattcattgtagtattatctatttctgaactagagaggccagttacatcacagcatctaaaaaatggatatcaaatagcagttctgtttgtgtaattctctgggtcatcatgttactggagattgaatctagacaatattttccttttatagggagcctaagaattctcatatgcctagaagctctcgtctaagggacaagaagaagaatgaaggtgaaagaatgatcaaagaaacatttgttggaagtgtgatagaaaacaacagttttctgagcacccttcttgacaagagttcttgtataattatcccggagattgaatttccccttccatctgttcctacaacgagggcacctgaagtctctgataagcaaggcttgattgctggtccctgtagtattagccagcaaaaagctgaggaaactcttgtttatggtgatgaaattgatgaaatcaaagaggttgagaacatgagtgaatcaaccactttctctgcatgtaaccaaagaaagttctacgaaacaaaatttggaatagttagtagtactgcattttgcttt

SEQ ID NO: 1664 - DNA, 849 bp, Zea mays
aatccttgctgtacttgaacaaagtcagtgcatctgttttcattgcagctttagccgtgcccaaactagtattcggagaggcttttacacctgatgcagttagatcatcaaaatcaagatacgcatgccactgctcatggaaggttagtgactctccctgatctgctagatggataatatttgtttccatactaacaggagtcatagcagtactcttatcctccactggttgcatcagagatgctattgctctggagttattttcctcttcatacaattgcaaattcgtattttcatcctgaactgatgttctggaggactgaatatttgtggctccatttgccgcattattgttttcacaattgtttgatatattgttaggtgcatctgcttcttcatcagattctgatgattcataagcagaagccagaagcccaagagcggaagtgcatccatgggtgctgctgctgtatagctgtctacacctatcagaaacttgggctgcactcacattttgtattgtattatcatcagtttgatgagcatatcctgttggaaaaaaaacgatatatttacacgatggcctccaaactatgcactagaagaataatttcattacaataaaaaaaatagtattacaatcaatgacactttgataccgttcaattcacgaaagcgtgaaaaacgccaaccgaaaaccaaactataaaatttgctggttgagaccttgtagccttaaccccaacaaaaagttggttcgccaatctggaatttaaaacctaaccccaaccccgccaataatcgattcacacgaaacacatcgacataacatcatttcacttacacacc

SEQ ID NO: 1665 - DNA, 775 bp, Zea mays
tctttatcttatataagcatttcattttgaaatgatccatttcccaatgccgaggcacatgcaaactgttttaacttttatgccttacacggttgttttcagacattatgtgctgtacctatttcaggcaatttcaagacgagccaccttatacaagatgataagggattatgaccaagctgctaatgatgtaaggaagctaatctctcttcttgaaaagaaagtcaatgtgtctggagtatcaccaaaagcttttaacaagcacaatgatctcaagcaagcacatgtgaggctttcatccatagaggatgaagcaaaaaatgacacccccctgaatttgtatttaatcttgtaagttgtccaaattggttttacctttttgttccttcagtatgattttcttgccccagtttgtgcctggttgacctgaatatttgtattccttgaaagcaattattgcttatctctgcatttaattttcacctttcattgtagattttactgacccagacaacaaaaatagcattgtttattatatggatacaagtacaaaatatgctgtacttagtagccctttaaggaactacgctcttccatatgtgtgttgcaataacaatgggtttcacaataaatacaaagaaactggcagaaaaatataattttttggaactgtgtagagtgcttttaaacatgatattctgatataacaacatagaatatcttgcgtttgcagcaattacgactcttacttttcagtataagagtggtacctttt

SEQ ID NO: 1666 - DNA, 825 bp, Zea mays
catcttgcatgcctgcaggtcttggaggtagtgccgtcgacgaggcatctccacccctccggcgagctccccttccaaaaagtggtgaggtaagcctgctcccattccttacctttagtctcgtataggtgtgaatatctcgtgtaattcttctgaagacaaaactcacagttgacgattagaagtttagaactatgcaaaactacgacgatcatgtatgtacttccactcgctgaatcagacatgaccagttgttttgcttttcttaaggaaaggtaaaataaaaaaaagtaagactatattcatgattctcagactctgaaccatgtcggtgttgtctctagtatacttgctttgttatgtgtagcacagggttatgctgagctgtgtagcgcatggataagagatcgttttggttctattttcattttcatatattacttcacgcgtacctttaaattcctaatttcaatttatccttgattaaaatgtttacgaattgttctccacaaatcattacaagactaaagaaaagcgcagggatgctacaggaaacaatttgccctacgtaaagaacaataggaaacaccttaaggtaaaccgggactctcccagattaaccaggattgatcaaacattcagtagggcatttaatcttatgaatgaaataaggtaactaagaaagaaccatggtaaattcatcaagattgagcaaagttccttccaaaacacctttattcatcaagaaataagtaaaggatcaagtgttccagataaatgcccagagtgtctcctattgctctctcagtaagacagattgttcat

SEQ ID NO: 1667 - DNA, 802 bp, Zea mays
tttgcatgcctgcaggttcggattggctgccgttattgcttatagctaagtccagtattgcctggttatgaaattctccgtgctttgatgatgttggtgatttggtcatttgatgtttactaggagaatgctttccacgaaaaaagtgctatgctgtgcgtgtagttagttatgactagtgaaaagcagggggtatttcttcttgaaggtaggggcaagtcgaagtgtcattgtcgaactaacgagagattaacttatggtgaaaacgagctatgagaaacctatactagaacatgaaacttttggattgtattttcaggtttgaatgataatcagttatgtttgtatgctttgttagttttcagatcatgaacttgttcgtgaacatgagttgtacctatctacctgactacctgagtagtgttctgatttttcaacttggtaatggaatagctgaagaccacatcgtgattgaatcctatgggtaggatgggtaggttaggagctggtcactggtcagggaatctcaatgttgagccagtagcaagctttggtgggtttcaaaaaggaaatggcaagttcctggttgtcatgtgaatgatgaacatgtagcaagatttatgggttaaggaaaaataaaatccatggtagctgggtgttgatgtcaaacagtacttcacattggtctggttattaggcttagatttcaggtgcacatcttggtattggtactaatataagtggattcatgcatatttagatttgatatagtcctgctgtacagaaacagaactaacaacaa

SEQ ID NO: 1668 - DNA, 719 bp, Zea mays
gacgtcgaaccacacctcattgacacggccaatgatgcggaatggactgctgtactgtgcaaccgagtaagcgctcttgctggagtagtctgtggagttagcccatggtgaccggctcaggctcatggcgagcttctcggcttcctcgaccacgttcttgtcccgtgcacgacccgagaagctcctcgctgcgacgcagtggcctggccaccgatctggatgcaggttcagctctgggagaggaaccggaggggaagcctggaacttcgccggcaggtacagccggacggagtaggccgaggagcgcagaggccctgcacctggaaccacactcgtgagcacaggggtggtcatcctgatcctcgaagagttgaggtttgcgcccatcaggtactggaacaatctgccagccagcaacaacaataacgttagacgaccggaacaagatccttcctggtcctggagggctgggcgagcgacgtacggacctgtggaagccgagcttggtggcgacgtggaaggaagggatgtccggggtgggggcggacatccagacggtgtcgccgtacagccgcacctcgaagtccgactccgcgtgcaccgtcgtgtactgcggcgtctccgcggcgcccgcgggcggccggcaggagcagcgcgacgaggacgaggggcagcgacagcgacagcggcatcgggatggggataggattctgctgctt

SEQ ID NO: 1669 - DNA, 773 bp, Zea mays
tatagaaggaccatggaaataacaatgcggaaaggagcagaccataggctgtgaagctgctggcacacttgctgcaaaggtacaaatctaaattagaagggtgcaaaaccaaaagccataaatggctagcatgcatggcatccacacatggcactttctccttccttcagtccttccatcttttgtaacattgacccagtctaacacaaaagtatacctgaagggactccgcatcagttgaaatcaaattggtaatcctcccagaagcaaactttctacgactatcattagttagtcgcaaagatttgcggaaaacagctgcaatctgcacaagaacaaaaggtcaaatttcaatgtaaactttgatgaccatacctaaaagaaaaattcaaaacatttaacatagaaatcatatagcgggtctgcattctagatgataaagacaaattcgcattgaactaatatcactaccaacaaaactaggtatattctatgatgttaagggggaatttgcaaaaacaatctcattatgtcattaagttccctaccaatatctacctggactaaaaggctttgtagggaatccacatgttatgacaaatctggagttttgatccccaatccaatctaagtaaaagcaagaatggtctcaagaatgtggaacgcgagatttcaattttcaaggatgcatgtttactgtacaacctcttacagaaggacaataaaagttcttcatataaaagaaacacatacccatgtggacctcaacctga

SEQ ID NO: 1670 - DNA, 814 bp, Zea mays
tctgctcaagataacagacccttgtcagtgctagaaaattggctgttgaagcagcttgatggtcatgttgtggccctttcaaccttgcaacgttctatggctcggagccgctctaggattacctggttggctgagggggatgctaacactgccttcttccacctccacgctaaaaaccgcaaaggcaagaattttattggtaatctgttatccgacgatggtttgataaagtcaaggcatgaggacaaggaggaaactataagtgattttttccacaatctgctgggttgttcgtctgatcgagctcatactattgatttggatcatctccaaattccttctcatgatctctcttcgctggacagccctttcacggaagatgaagtctggaaaacagtcctttctctaccttcaaacaaggctcctgacccggatggttttactgggaaattttataagtcgtgctggcatattattaaaggagatattatggcagctgctatggctgtttggaacagaaatcggggaaatctagaacttctcaattcagcatacatcattcttctacccaaaaaagatgatgcatgtcatgtcaaagattttcggcctataagcttggtccactcctttgctaagctcattacaaagcttttggcaaataggctggcccaacacctggataatatggtttctcagaatcaaagtgcttttattaaaggcagatccattctggacaatttcatgcttgtgcaacagacagcaaaagttgttttaaccagaaaagtgtgcaaggatccctcttaagttggatatc

SEQ ID NO: 1671 - DNA, 741 bp, Zea mays
ctagcttgcatgcctgcagatacgacaattaaccacgcaatgcaaattacggccgccggctcagcaatgacacgcacgtaccgcatctgtgcacacccgtccttatctaccctttgtctttaatcagcatgcaagctcagctcagcagctgtcgtccgtgtgcctgggccgctgggccccccagcccggccggcctcctctctctctcacagtcgcagtactagctcgtcgtcgtcgtcgtcgtccctagatctgcgctcctgctgctgtccactgcttgacagggcaggtggtggtggtccacgaacacaagtagataggcccaggttttgctgtgtgcgcgtttccgggttttatttgcatctctctctttatcttgtagtgtctgcaaacagatagtttgacgcatatatgtcgtatgttctactactacactttaagcaaagagctagttaatttgtgggcactggtgattggccgagaggccagagcactcagaggaagattaacccttacttttctttgttaatagctaggaaatcaatcagtaccttcagctacaacgaactcgctttgagcctttgatctgtgcctgtttaggaattgtgagacgaacaagatcgatgcaaagtggcagactactagcagcagtgcatgtacatgcacgtacatggcacagtcatggctgcatttactgagggaacagtacagaatgcagagtcagccggatgcgatcctatt

SEQ ID NO: 1672 - DNA, 862 bp, Zea mays
  unsure (1)..(862): unsure at all n locations
atcgagtatgggcaaaggtggtggtggatcttgattaccatcggatgcaatgagattgtcaaactgattcgcttcttcaccgacaacatggtcaccatcagtaacaggctcagtgttctgcaacaggtgccccacttcaccttcagctggcaccccaggaacctcgtttgactgtagaggcgtcaggaattcatctgtatcttcttttttatcgaggttgtcatagtcttcttcgtcccaatccgttggtaaggaagcttccctggtagcaccatcctctttgtgggagtgataatcagggtaagattccgtggcagcagtctctgtaggcaagttttgcaattttcctgcatagagcaaagtgagcaggatagggaggctttggttcttggaaatggaatgaaaatgtacgatgtttttgctagggttaggggaaaaaaagcaaagaaagagaagagatgaataccagctgcgtgggtgctactgcttctgatagagacggcagcaaaggtaatgccggcgaggaagaaaaaggcagcaagtccaggtccaagaagccctgaggaggagctaccatatcaaaggtttagctagctagaacatgggaaagtaaagaggagaagaagatggcggatggagtgagtctcacctcctgctcggccgaaccctagagtagatttgtcggcgccgtcatccgcgctgtcggagtcggaggaccagccagcgaaggagttggcggggacgggccgggagacgctctgacggggcgcaggcgcggngtcgagaggaagaagagacccgagccaggagtggagcaagggacggccggcgaagatggtggagctggagacagcatgccatt

SEQ ID NO: 1673 - DNA, 866 bp, Zea mays
tcttgcatgcctgcagcaacagcttgacccttttcctctgccgaaagcatctcaggagaaacagcggcattcatcatctcaattttaagccaactgcggtaagtcgcgtcaagggagtaatattcatgctgtttggccatacaaaagcaatacttgattaagaatacttattagattcattacataaaaataacaatattatttgtataaagaaaatatgttcattggtattaacaacagagactatacccaatcttcaaactccggcaagttatcagatacctccggatcttcccgtgaaattaaattttctttttgctttaacggttcagctaaaatggcaagcaacttgtgtggccctgctggtagctcagggactctcctcattgatatcagagaaaactccctgaacagtgtattgctgattgataaagaaataatatataagtttcatgataatatattttttggaaaagaaaataaaactgtcccacaaataaatttgcaataataattatagtgatggcatgaaaaaaatatgaatctatgtttctcttgcacaagaactaattacctatgtgtcaatgcccgtatcagaagcttcccactgatcatttgaaagtctggaatcgaggatggtggtgtgaagcaaagccactgaataaccatagccttttgaagtgattgcaggtgatgttgatgcgcaacatcagagaaatccccatcatacttagtgggttttgtttgccgagatcttgaaagcaccctgcattaaatttcaaaactttttaaaatatatcgacaagacaaaatatacaaaaagtctgaaactcggtggaatttattgcaacatattcacaggaaca

SEQ ID NO: 1674 - DNA, 717 bp, Zea mays
aggagcaggaggaggaggagacgacgacgaggaggcggcggcggcctgacctccgcagcagagggctctgcctcgtgcccctctcctgcacgtcctacgtcaccaacgagaacggggcctgggttccttcccaattttaattttaggggagactactagctatagagatcagaggagcagagacaacactgtaccacgaactaatccacggttaatatcacctcacatctctgctctgctcatgttgttgtctgtgtctctttgccttggcccttggccgtaaataccagtcagtttctataaaattctcttcgtctacagacgcagccagccagccagccagcccacacagagccatatgacgcgacttacgaacgtccagtccacacgactgctttcccaacgagcaacgaacagcagcagcaaacgcaagcttccacacaaattcgagcccttgaaccgtgagattaccagatacgcataaacatggggggaaaacctgaccatgtcaacatttcaagtgaatttacaagtacatgcgagtcagctgccctgtgtttatacaactataaggactccggcggagccacagatgcctacaggataaaccttaaagaacctgtatagctctggatcctgcggcggacgcgtttgctttacaccaacagacagacgacgacgccgcctcacgatggcgaccctttgctgcccgtggta

SEQ ID NO: 1675 - DNA, 771 bp, Zea mays
attctgtggtggttacaggtaacctagtcaataatcactgatcactaaagctgtgatatttattttagaaaagcagcacctccgagaaacaaaggcacaaagagtattttagaagcagaagaacttcctcttaaggaaatacacgttctcgggcatgttattagggtaccctaacggaagttgactctacagtttataatcctttactaatttgcagaattcagtacataatgtgctcagaagtgcacttaaccacaacacggcaaggttaaacttcaaatataatcatgcgtgcgtgtaacttaatgattgttagacgcaaaatctatgttagatagtacaaaataaaaaaaaaacaaaaggagatatagtcgagctccagaatacagatcggggccgatgcttacgctggtcaaacccagaaatcacgaccaaatctgaatagagccacagcgcagacgtgaatgaatcttacaaaacgaaaacagatcgagcaaagagagatctactacctactacgcgtaaagaaatccataagcgatgaagaacaggacgggtacctgcgaccgagagcgagcgaggaagaggaagcgcacgtcaaatcgaagttgcctctgcctcgttatttttagcaaagggaggacaagatggggaatagatcgagggaaggaggcagtcgcccgccccaggattggattggattggagtggagtcggcccgggctagaagtagaaccctaataaatcccagcggcggcgcagacgagatgta

SEQ ID NO: 1676 - DNA, 791 bp, Zea mays
gagacttgcttcgccacttcgacgcggctcgttagatctgccaccgcagctggcgcttctttcgacgtgatgatgctcctcgccgactcgatcagttctttcgaactgccaaacttcttctgtagctccttgtaggacggcgaatctgctgctgccagagcttgtattattgcacaaccaccagtcaagttcatggactgaactgaatcagaatacacactgggcaaatcatcacactggatagcggctcattcgaagttttttcccgataaacacccagtcctgctcatccgcgaaccacactcgtttgacaccaaacgagacgagcggtcgtaatcgatcgcgatcgtaatcgatcacgatctaaatgtttttttacaattaatttagttaaaaaaatagagcatggttttaatctaaaccgattttttaaattttatagtgtaaaatttatagccgttgtcaactatacaagcgaccaccgattgaacgtgcgtcgcgactttctattttttttaaaaaaaaaccgtaacttttttcgtagttacaaagctaacaaaaacaacggcccatcctacacctcgtgtctttccatttttcaacaaaaatcacctttttcttttttaaaaaaaaatgcataacttaaacatataaacttactgcgtgacaaaagttatgcgcataacttactatacttaacaaatctataagcaaaacgtatatgcataacaatttttcaacctaacttcacatcattatctttttcgcgtaattaaactatacaaatagca

SEQ ID NO: 1677 - DNA, 778 bp, Zea mays
aggagagagcgagcgaatgaaatggcccccaaaccacggtacagagcaaagatagggtacgaactgctctactggttgagtggcgctctcgatctttcgggaaaaaaggtttgagtggcttcttttctattagactttgatcggcatgtgcttgcattggatggtggccaacggtcatgggcaatgggggattttatacacaaacacaacacaagacgtttgccattcgagtcgtcgtatgtatctcgtacgtgcaactactgggtgttgtgcactgcgaaccaactcaaccttcggctaggttgggtacgctaggttgatctcatttggatttgttgatctcatttggatttggtcaaacggctggggtcagatctctagcatcccaatcaaagtcacactaaccatcttagcccatgtttgtaagcaactcagtttttaagaaaccaaattttatcttttagatagaagagttcagctttttggtttttaagaaattgataatcttatttctataaactgactcatgaactagtatgtttgaactcatctcaattataaactagattcttaaaaactgggtgcttccaaacaggaccttagttacaattctctttataccgcgtttgacatacgaaccgtcgttcgttggtaccttctcgtcctcccacaaatttaacgagacccgatctactctacacggctagcgagagaaaacccgacgacggcatccaatctgtgacgccgattgccacactcctaccttctcgtgacgacc

SEQ ID NO: 1678 - DNA, 776 bp, Zea mays
acggcggagaagcgggcgcctcgaggaggaagcggccgcgcgtggtcggcgacgacagtctggtggtgtgcgccagccaggggagcaccgcgcctcgccgccgcggcgagagcgcgctgctcacgcagctggacgcctgcggcaccgaggccgacgacgtgtgcggcttcagaacgaccacaaccaacaactccacgtccatggagcgtgacgacaagggctccccggatactgagaacaccagcatcggcggaggggccagtgattcgcgctgtttcagccgtcgctcacaggcaagcagctaagctaagctagttatatacctataagtaattcaccagctcatcatatttatacacacacctctatagtttctactttctagctggctagctagcttcacgcacttcacatctgaaatgctccatgctaagctacacgctacatatgcatatgcatgcagggatatttcattacaaagtatgcttatttttctacgtgtccgtgcgtgcatgttctggcaaaaataactaaagagagacggcttatgcgacgacgaggagaacgtggtgatcaacggggacgacggggcgatgaggtcgtcgatttccaccaagaggagccgggctgctgcgacccataacgaatctgagcgtgtaagctactagctagatctatccccattcctgcactcgtcatacgcgtacatgtagataggtgaaaataaacgcatgggctagcattatggtacgcgcgcacacacgcctttgtagttt

SEQ ID NO: 1679 - DNA, 795 bp, Zea mays
agcagcagtactgtactgctattaaacaagcccagagctctgctgctactgtcctctcctcctcctcctcactccaccactgcccactcccatcccacgcgagcacaaccaccacctactccctagaccctacactactccccccgcaagcacgcccagcgccatggccatggcggcagcgcgcacgggggcctgctactactccgcctccgcttcctctcctctcctgcactactagcgggcccgctggcgacgatggcggcggtggcgagcagggagaggctctccccgggcgccgcgccgcaggtggacgcgggcaagtacgtgcggtacacgccggagcaggtggaggcactggagcgcgtctacagcgagtgccccaagcccagctcgctgcgccggcagcacctcatcagggactgccccatcctccgcaacatcgagcccaagcagatcaaggtctggttccagaaccgcaggtcagtcactcggtccgtccgtgtccgtccccccaccccttctcgcacgctcgatctgtgactgtgagctccatctcctggctttggctctcctctttcttcttggggttgggggtcaaggcattgcgtgaccttttttttacctcctctggtgctgtcgttgctgttctatttcctgcatttggtttttccatgttgggatgtgggaaaagtggatcattttcgcagtttcatagggttgattgacttataggatcttgggagttctgcgctggggcaatgatgctatttttgttggggaaaactgtgtattctt

SEQ ID NO: 1680 - DNA, 773 bp, Zea mays
tgctggatagatatgcgcaacccaggaacttgtcaacgtcgatttcattgcatacgaaagtgttttcgagcgaggcaggcatgtggctgcgccatgagcccaggaacatcatgttcgctgagcattcttttcccggacacgcatctctggtggcatccaaattcttcacccttgctccttagcatgcaacatcaacatggtaaaagaaatcgaaaatcgcagcgacatttggaacaggccacattagtcagtagcagagggccacacaaatagaacggtcgactgactggttcctccacaagttcaatcccagtgccctaggcgctacagcatctcaactacaatacataacttacaaccggtcacgttgcccccgttacatacagtgccagccttctcatcatcgcacagcagtagcacactggaagatactctgaaaacactttgaaagatactcagaaaaaagactttaaaagactgtcacaaagacgaactggggcaaaattttatctactcttgttagcacttgactcaagttaacgctgcaaccacatgggagaagcacgtacccttcagttcacacaaactactcaaactgagacatgatgtggggcgtccgtgttcaccaaggcctacccaaatggatgaactcgacatgtccaccagttaccacagcaagcccacccaatactgacagaccgcggctcacagagattacaggatgctataagttccgccagacttttatgtacatttagaattcatggtcacac

SEQ ID NO: 1681 - DNA, 737 bp, Zea mays
atcttgcatgcctgcagacgtccatacaccattcatttggtgtttatatccgaggttgcacatatagtcagcagccggcccctctccttcctccctttctccttccctgcacctgtgcctgtgcggctgcgcctgtgcccatgctgcttgtgaatacccgttgtcgccaccccatgcaccaccgcttagggaagggagcagggaaggaggggccacagtgttgcttggtggcagagggagcacctgcgcacaagcaatgcaaagcgctgcttgggaaagggagcagggaaggagaggcgaaggttggagaggagccgtcgagtgtggtatggaatgctaaggtggtgacacggccacacgggaggtcagaatagagaggaagatggggtaaggatgggctaattgcaatttgcatgccatgttggctgttgattgtacatgactacatgtcatgttggatctaaacaaaacaacaaacaaaggttatggacatctgatgaaccacttaaaaagtccaaaactgcattttcaaagtttttggacctaggtgataaatgcaaaagttaatggacctatgatgcatttaactcttctacaaactaattagagtaaatttcagaaaactacatataggtagaataaattttgcaaaactacactattcttggaaccaattttgccatacacatttttctcatgcataacaaaacccacttcttagaattaattcaaagcag

SEQ ID NO: 1682 - DNA, 747 bp, Zea mays
aggaattcatgatacaaacattatccttggaacattatttcacacaatgaaaactgaatggatgctttgatatactccacacacctttactgtgacacagagaagattttccacagtacattttgcagcaaaagattgaacctcaattggttgaatgatttcaacttttctccgccatcttttccctggtagatacacgccttctaaaccacaacgtacagaataccgttcaggttctaaaggaactcctctaaacgaaagttgcccatcatttataatatctggggtttttgcaggtttttcaggcataaattcttgactttcagatattggtggtggtcttatattatttggtgtctgaacagaagaggctgaaggcatggagtaacttctgaagttgaatatttgagaaccagaagcagaataagattgcttgtgtgatacacttggattgagagtagggggtgccaaagaacgaggtggtaatgtgcgatctaaagggagcaaccaactaagcagctcctgacatggatcatcgttactgtcacattgtccatccacaagattcccaggcatacaattgtttgatatacttttctcaaactgaaagacttcaagcacaggatctttcaatttgttaacgctaacattcacttgcaaaacaacctgcatacttccaccaggagacatcattgcttaatcagcatgcatttaaatcagcgaggattacaacaaaatacatgggtg

SEQ ID NO: 1683 - DNA, 786 bp, Zea mays
agcaggctgccagccatcccgacgaccgccgcgaccaccgcgtacctatattttttttcccgatggcgcacgcatgcagcatatatacagatacagttatacacacaagcaagaaccgtttcagcaaggtctggagtttactaatagtcgttaagctgtatccacgcggcgccggcgccggcggagacgacgacgacgtacgtacgtgtagctctggagatcgttgttgtagccggcggccttgaagtcgtagtaggttctgttcgagaacctcgactgcacggtcaaggccaggacggcgatcagcagcagccgcgcgaccagaccgccggcgatccacgccgtcctcgacagagccatctgctccgcctctctatctctcccggccgctctctagcttggccggttattacggacgccgcggcacacggacataattggtgtgccgcgcgtagaatttgtagttttgagcgaggggtcatcatgaatggacagagacaacgttgggggccttgctgcgctggggcatagttcctatcgatcagaccgccaatccgctccatctgtcacccggatgttagttgcttgcttgccgcgatcgaccggaggtgcttccaaattccaaccccaagacagcggacacggcacggcaaggaaggtgcaaaggaaaattcggaccatttccagtaaatcgattcgctatagtttcatcttcaacaaaatttcaatatatcataatataatttcagataaaatacgaagttcttgggaggttagtagagaggg

SEQ ID NO: 1684 - DNA, 752 bp, Zea mays
ttgcatgcctgcagcaacaacagtttgcacaggtgacatgagttcgttgtggtaattaaggatgtctatcgaccgggcacgatgtagtttcagtgtgctgttttctgggtacgtacggcatcaagaaggctgttgtaggaagcattgtcgaatgcaaggaggccaatgagctcatggagagcatgcaccaagctggctgccggattatcgtcgttgcgtagatggatgccgctggtcagttccctcagcatgccgtcggcacggctacaacgaccgtctcggaggcaggaggagacggcctcggcgagcaccgccgtgcgagcccatcccagacgctctgtcgctctgtctggctcaaagatgctggctgcggctaagaagtaggatcgcagcgcgctgttcgacgtcacgccgtatgcttggaggtttctcctgctggcccatctgcatcgtacgtcgacaagctttagtttgggggatagatagcagcatgaaatatacatgtatatatagggaagttagttactttctgaggccatgccactcgagcttgcattgtctctggaaacttctgaagtcggcttgagctgtccggaggaggagctcgttgttgacgagagacatcctacatacaagaaagcaatgtttttttttgttccttttctctcaattttctgagatagatagatggatgcactggactacctgtacaggacctttcccaatccacacgtcatcggcaccaccgtact

SEQ ID NO: 1685 - DNA, 790 bp, Zea mays
agatgctgcaaaagcttgagcttgctaggaagcacatcataagctcaatgttcgcagtggaccaaagacttgtttgttcaacatgtgctggattgtattatagcattttacaacgccatagcatttcctgacaaagcagtgagtacaagttgccagttccatgattagcagcattggcaataagggccaggtgacactagcattttatgcaccagtggcccttaacaaagttgcaggcctttgtcaacagtgctttcagtcaatctgtgatgaatacccgtaaacattaaggatggattaaaaaggcatacttgatgttttgaaggctttgaacaatagtaagtggagtctcctttcaatctggttagattacaagtcatcttgtttattttttttgtttctatgttccctacagtcataatcttctactccctctattatgaattgtaagccgttttggtttattaggcgcatatcttttgatatgtatctaggatatacaatttcatctaggtatagagtagaacttatgaatctatatatcaaaaaatgtatatgctatctaacacgtttaatcaagatagtatatgagtagaagatcatggatcgttatagcatctctaacaatccgtcctaaaatagtgtcctaaaaattgaaatactacttcatttgaaaagtttagggcacataaaacaacaatgtgccctttaaatggggcaattaaccgaagatctgttttaccatttctcgcccgcgcactttttggtgccttttttcttaccagcgatc

SEQ ID NO: 1686 - DNA, 726 bp, Zea mays
tgcagcgcatactcgaggttccacagcacgtcgcccatggagatgcggtcactgccgaactcggcgaggcacttctcggcggtctcggcgaacttggcgagcgactccgggttgacggtgccggcgagcgtggggtccatgatcttctcgatgaggcccttgcgcttccactgcatgccccactccgccaggctgacctgctcgcggggcagctgcgggtcgattgggggccgcgcgcacagcgcctccagcagcaccacgccgaaggagtacacgtccgacttgtccgtcagctgctggcaccggaagtactccgggtccaggtacccgaagctgcccttcacggcggtgctcacgtgcagctggttcatcccgggcccgtccttggacagcccgaagtccgacaccttggccacgaagttgtcgtccagcaggatgttggtggtcttcacgtcgcggtggatgatcccctgcgccgtgcccgtgtgcaagtagtgcagcccccgcgccgcgccgatgcagatctccagccgctgcttccacggcagcggcgccttcccctcgctgccgtagatgtggtcccggaacacgccgttgtgcatgtactcgtacaccaggatcatctcctggttctcgtcgcagtagccgatcagcgacaccaggtgccggtgccgcagcttcgacagcatctggatctccgtgttgaactcgttgatgccctgctcc

SEQ ID NO: 1687 - DNA, 1298 bp, Zea mays
aaacgaccctgtaagcccacacccagcaaactgcatcatcaaggacctaacaggttaggttcacagccgtatgacctaatataccctcaaatccgcgattctcacagatctgataccccagatcaaacatcatcacatcgcaacaaagagattggtggcacagcaatggggttaccagagcgagaagctgagaagacgagctagggcatcaccttggatgggatgcatccgacgttgaggcaggtcccgccgagagtgcccctcttctcgatgcaggtggtcttgagccccagctgcgcggccttgatcgccgccacgtaccctccgggcccgccgcccaccaccaccacgtcgctctcctcgcccgccgccgcgtacgccctccaggcggacacggccgcccccgccgccgtctgcggccgccgcaacacggccgctgcagctccaatggggtcggagtggtgcacgtcaaagctgaagccgacgggttcttgcctgtgcagcgtgaccatcaaagcctgatgatgaccttgaatgcgtgggatgcggtggtcttactgtcctgataagatggagtcccactagccttcatatttcagagttgggatgaggctgccttcggttggtctcatgtgcagcactttctttgcttgaaattttaattttggcgtgtcgcatcgacaaataatggataggacatttatgcttcggttcattgagttgctgaagctcatgttgtattctcacttctgtattgaactctgttcgtttggttgttcagttgatttgatcttttgttttttgctggcactcacatgataacgacagccgtgctgtcaacagtcaactgatgctcggcagaaaggtttatgtcgttgcacattatcaggtcgccttttcttatttggggctgaaagtatagctcgggctcaaatttcattaatcagatggaggattaatattctggagcactcattttatgagaacctttgcgcacagatgagctggtcaagtatattactacttgtgacctttgattttgcaggtcctgattgattgtctcatggtgcagaatgtgcgcccacgtttacttgcacatgatcaagtcgcccacgtttggtgtgcgcccacgttttatcccgtacagtatgataagtatcaagcataagcaatgccgtcagaccatatggtactgtatacctgtgcccatataatggcgatgatgattgggatttgcaagcaacttcctcttcttcaataaaatctatatgctttgtaggagtaatctataattaaag

SEQ ID NO: 1688 - DNA, 799 bp, Zea mays
tttcagggaacaatgcttaagtcaatgtctggctgacaaaaaaattagtaaacaatcatgcacagtagttaatcattctagtacatctcagtttacaaatagcgagtgaacttagcaaaaaagagctcaaacattctcctaggcggtctaatgttgctgtcgtgtagatttcactcattgttgtcaaatttgtaaatctattataacctatgcaatgcttgagaattgaattagcactgcacaaactgagttatttacacatctgtgatgatttgatgaattcaattatagtccacgagtatttatgcactactagtaaaatttagagtgtgtgtccacaaagctagatggttcagtatcactgaacttacactgccaagaatttaactgatgcattgtgcagtatattgtgcttcaaacacacagagaaagccatgttgatgtaaaggatataggagaacattgatttggtaggtgcaaactgcaaagtagagtagtttttgcttctgttgccactttcattctttccatctaaaggacttgtaaaggttttagttgctgcttatgcaacattaaactaaccaagatggcatgtgctataaacatgtaccacgaaacccctgtgatgcttgactagtgtgctagtaaacactgccatctacaaattttggcatcaaaatgtgcataatattttacagtggggtcagtataagcatttgggatgtacaaaatggagtacacatggaactttgggttcaaatgttgctaggacagtacaatcggcaactagaatagacaa

SEQ ID NO: 1689 - DNA, 747 bp, Zea mays
ggcgacgtccgggtccatgagcaggatggtgagcgcgttggggtcggtgtgcgccgggaggccgtaggtgagctccggctccgggcacggcgggtagaagttgaccgccatgtgctgctcctgctcccccagcgcttccttcatgtagctcgcctctaggcccaggctctccgagatcgcggcgtacagcctgaacccgagctcccggacctccttgcagtaggtgcccatggtctccctggtacggtcgtgcgggcgtgacagtgtcagacatgtcgtagtcgtctgataccaataccattacacgtacgtctacgaaagaaagggcactacactgcaatgcaatgcaacatcaatgtcccgagccacgcacgggacagagacacgtctgctggatgattcctagtcaacttgtaaactttgagagtggtggctacttttccttttgacactccgtggcgctgtccacactgcacaggctattcggcatgtgcttcttttcagcttgtggctgcggcgcagttagacgtgttaatttaatttacctctgctagtgctagagctagctcacgattggacttttcgcgtggcaatgtgtccctttgccgtatccttgaaattaaaaaccaaagagccggagctgtccccttccccttctctctcgacctcgagtgatacgctgcgtgtgttaaagcaacatcggtgacagaaatcgcccatgcatgtctcggtgtcccactcccggtc

SEQ ID NO: 1690 - DNA, 745 bp, Zea mays
gcagcgccgaggatcggtgaggtgagattttttatttactccggtggcggtggttcccttctggcttctgctagcgttcttactagcagctcggtagttgtgaaaaaagacacagcttttctgccttttttcctcctcctcctcttcttcttcttctttgagccgtccaaggtcccgtttttttccctttttcttttctgctgtaattacttcatgtgtcaaatttgggttcgattgacggcacgaagctgataattgcatctagccttcgcagcctttcggtttccgcgtttggtcggcttcttgggatttattattattattattattatcaagtgcgttgaaccgtcgggtgctgacttgtcttctcccctccagttccttcctgtctcgcgagttgacacccgaacggcttcacaggaatatatttgagccttctgtcctgtttcttttgatcttctgtatgtttgcttcattatggaaaggggtcgtgtgtttcgatgttgcattttgtgtgtggtacgtacaacgcattgggccgtcttggttcctagatcttttaccttactcacttcagtgtctcaatcatttaatgggcaggtaatttctcgtgaacgcattccgctattgactgctcgcccatatcattcgagcagattgagctattcaatatccattttagctcgacccagtgaaaaactgaagatacacactgggcttgcttgtgttccgtctctctcaaaca

SEQ ID NO: 1691 - DNA, 768 bp, Zea mays
agtaatgtatgcctaaaacaaacaaatatgtcaaaatgaaccttattgttacctttattgattgatggtttgtcgtcatgtattgttttcacacttgtgtcaaagaaatttgagcttgtaccttcatctgtgtgcttttctttggagtgttttttactgaaactgaaattagttgtgtttgctctcaatattggttggttccatgagttctcaagggtacgcggaaggcctctggaaactgatccatttgctctacccatatggaagccagtatttgattcattcaggtcggtaacctgccggggtccaagattatttgtagtctgcaaacccgaggatgaactattatcactgaacttgcccaagccttctgcactaactaatgtaagctcagcatcattccggggttttgtatctgatgccaaaccaaggaaatctatgggcttgttatctgatgtgccatcgtcatctatataatgatcagctggaagttgaaggtcaaaagtgccttgtctgcttcttggaccaacatcacttgatataaatccatttggtgaggactgcacactgccttctctaaggaacttcatggaggactggtttgtatcattatgctctccaatagctttcctgtatgttgtggacattggaggaactggcatctgccacatcatcttttcaccgttttgtggcacttgtgatggtgaattgtatgtgatgcaactgccaaagttgggtatgaatatacctctttgctttgatgttgtt

SEQ ID NO: 1692 - DNA, 769 bp, Zea mays
cgtttgtcacaaagctctctgttcacttgttcaatggagacacaagccaggcagctttccgcatattgtctgactacaggaaaggcaaatttggatgggtggcgctggagagacctccaacatgaacaagcgggatatcatagatccttagataaaagacatgtgcttgttcatgtagtatcacacaatttagtgtcgttcattggaccactctcgacagttttcactggacctgcacatatacgaggaattaattcagaatagctgtccatctgatgatctaaagacaaaacttaagaaatgctcctgctgttattagacagtccagagcaaacgagctgatttgtatgatctattgaatgagctcaactatgtttctatgtaacggaattaggtttgagaaatgaaagattgtatgtctcctaatttagttgctcatgtacttctttgttcttttaggaaaagttgctcctgtacttctggatgatccattagattcgggaactggtgtaacattttaggtccagacaatagacatccctctacagtttcagtttccctgcttttaagttttctgcaaaaaaaaaatatatatattttctcccttctaaactataagtcgttttggcttttcttagtacatgatttttaccagtataatttttagtatatatctagacataaactaatatctaggtgcataacaaagctaacaaaattgtatatcactatgtatttagaaaaactaaaatgatctataatttggaac

SEQ ID NO: 1693 - DNA, 771 bp, Zea mays
gcgttccgagaccaagagctctggctagcctgagactactgagaggagaagagaagtgcgtgcgtgggtcacctggagaccggtgacactccgttcgagctcggagatgtactgtagcttcctgactcgtgacctctgcgctgactgcctgtttgccaatatcctgaaacccaagggaacagagaaatcgaaactattgcttggccattctgatttcaaatatgttaatctaagagatgaacagcaaaaaatgacaaattaaaggcactccgatcctgagttctgacttctgagactgcgcagccacaactcacaaatttcatcttcaatttttctttttctttttctttataaaaaaactactgtttggccgccatggtagatccgtagacgaatggagaagacgagcactactagttaaaaaatgtactagcaagcagagttgcaactaacctcttgacccttttggggtcagcggcgacgccgtccgcggcggcgcgcgacgaggcggccgacccgtcgtcgtccgcgtcggcgtccgccacgtccatgagctgcgccgcgtccccggcggagacggctggcgcgtcgacgtcggagaacatggacatgagctggtcgtcgtcgaggcggtcgaagccgtcgccgccgatgacgtcttccatgggcagggccttcaaggaacgccggcggagtcgctcgccgagcgggggtgcgcgccccgcctggaccgcggcgaacccccaggaactcccccggccgccgaccaat

SEQ ID NO: 1694 - DNA, 763 bp, Zea mays
atccttcaggcaaatctcaagatgaagctcaccagctccagcaatgatatgctcaccagattcttccattgtacagagaaccataggatcggactttgctagacgcttcaaaccttcgactagcttgggaaggtcagaggcaaccttgcactgaacagcaacacgcacaacaggagagacggagaatttcattgctctgattgggcaagcgtcagtctccttctcattagtgagtgtagcattcttcgtgatgaactgatccagaccaaccatagcaacagtgttaccacacggaacatcctcaaccgactcttgcttctttcccatccagataacagtacgctggacactcttgacatacagatccttcttctgcccggggacatagttgggacccatgatccgaaccttcataccagtagcaaccttccctgagaagacacgaccgaaggcaaagaacctgcccttgtcagatgcaggaatcatctttgaaacatacaacataagaggaccctctggatcacagtttctgatagcagttgcatacacatcatcaaggggtccctcgtacaagttctccacacgatacttttgagcctttgctggggaaggaaggtggaatatcatcatctcaagcagagcagtgctagctggaagccacgtttgcataacacgcttcatcaaagctttgccaatcaactccttctcatcagccttcatggtaacattgagcttttgcagcatgggccacaatttctccttt

SEQ ID NO: 1695 - DNA, 711 bp, Zea mays
agtttttttatagtacccttttgccttattatcgatgcacatgttgacgtgcatccaggtctacttttatccaacataaacctaggagagaatttaagggatgagattcataaacaagaaacattgaaggcaagacctgttgcagcggtgagagctgtctcactaagtcaccaggtcgcgggttcggagtagtgtttccgcatttgttaggaaggcttgctttggtttatcccttcctagaccccactaatgtgggagcctccggcgctgggtcttcccttatgcaattacaatctaaaggtacctgtgcattttgagtagtaattgcaattcatatatgtctttcaattcttgcctttgttgggaatctatagaatgctgacccacttttttttttccttctgagggccagtatttggttgctaacttggtatgcacttatgctgatactcacaagaatctttattgaattaaccaataacttctcattatgtctcaagaaattgtgctcaactgattgctatgttcaaaacttcaaaccgggaaataaatcgtaattgaaaaaactggcaggcggggggacttttttaccatcaacaaccattagtccagacatttttcttgaatgttctaagtacaaatggattttaacgattggatgccaaagctatttattttctcatactggtggttaattgcacatgtgttgca

SEQ ID NO: 1696 - DNA, 823 bp, Zea mays
attctctagagtcgacctgcagatcaaatgcaggaaacaaatatatgctcgacgtaatgggggccccatgacggaccagatgttttgaacaggtgcaaagataaataaacaccataataaattaaagattgttagcctccactcgaatttgcaataaagaagctgaatgcttaccaactgatatatcaatgtttactgtaccatgggcatctccagcatctttgagatacttgctagcggtcaatctaaagaaagagaataagcacttagatcctaatagaactaaagaaaccctagtctatttacggtgaccaagacgacaaaacatggattgactatgcaatataactttgtctaacctgtcaaaggggagtggttgcccatttttcattagtggaataactcccagagaaatatcaagtcgatttgcgtcaaattgaatgcctgaataaccaactgagcaagcaattcgtccccaatttgggtctcttccaaatatagcggcctgtcacaaaaaatataatcattctggccttctgggggatggatgaaaagaagactgctttggctgatactattgaattgcagaaattgctagataaactatcaacatactttaaccaaagaagaagatgctactgaacgagcaattttagcagcttctgcctcgttgttggcgccacttacagtaacctgcacagaagaaagcacattaaacattatgtcatattcatgaaaatataggaaggagctttatagtacagactaaagttttaactttttagataagccaaattgtttattaaaaactataagcccagtt

SEQ ID NO: 1697 - DNA, 746 bp, Zea mays
acgagatcctcgtccgcctcgacctccgggacgccgtgcgcacctctgcgctctcccgcacctggcgggacctctggaagtcgctctcggtgctctccctctccttccccgtcggcacgcagccctcagtcgtcgacagtatcctcctcccctacataggccctcgcgtctccctattcgacttctgcgtcaacgaggcgtctgtcggccgcatcgacgactggctcgtcgcgctctcccgctgccgcgttgagtccatccacatatctaacagactcggatcatgcgactacttcaacctccactcctcaatcttctcattaggtgatctcgtgtccctgcggctggaaggctgcaacatcccacccctccctgtaggattcgccggctttcctgcgctccaggagctagacctcgcctttgttaacttcccatcgaacgaggacaaacagttggaggctatcattcgtcggtcgcccttgcttcataccctgtttatgtgtaatgtgtgcatccctgatggctacccagactcagtgattgaggcgcccaatctccgtgtgctgtcattcgtttcagagtatgactatggatgccgatttggagagctgccgtgtctcgagtatgccgacattgatgcgttattctgtcccgcagcatgaacatgattatggatttttccttgctcggtttgctcacgttcaaaggctcaccatcttctgtccagcacgctatttttactttga

SEQ ID NO: 1698 - DNA, 777 bp, Zea mays
aatttattgagcccactccttgcagttaccaccgcccgtctcctctcttctggtttctggttgtggttgctaccgtcgcggtcgccatttccttcctttgtggagcctccgtccacctcctagtaaataataaataaataggtaaataaatgcccatcacgggcgttggtccgtgcatggatgatggatcatgtgtttcaacctgtatgtaggcctgtagggcctgacgcacatggagaatctatgtgagcactgagctgtgtcatgttcatattcatgtatagtaaattagtaatacatgctatatatctctacctttcatgtgtcgaacgtttcaaccagaccagcaatatccctttaggagactgaagatggtatgttgaaaacgggtccatgagttggttgcagcattaggtgtctggcatcttggtcgagatcttttttgttgtaagcatagggtgccaaatgcttttctagatccatggatgtgtaggtctgtgttgtaagaattcttgccccttttccttgttagtacagagatgtgctgcgggttcaagaaaaaaaaagacttggactagtgaaaaccttgggtatgaagttgagttgggtactttactgcccatataatctggtctacaaacatgtccatgaaatattttcggttgggcatggaaaataaatagcctctttttgtgtggggaaattcgcgaccgtatgtgcgacaaaatttgaactctggagactgaactattgtcgctccaacttgtaacgaacagt

SEQ ID NO: 1699 - DNA, 755 bp, Zea mays
aatagaaagtcgatgaaactagcacggaatcagaatatttgttcttttctgactccatcttctcattctgggctaggctgaaattttgaaggactgattggagggattcagcatcatggcgctctgtagaggaaatgctcttgtggctaggctggttgccaccccaggctttcaatattgtgtctgggtttgactcattttccagtgtggggcctaacttatctggtttattttgctgcttcagctgagagagcagggacaaggtgggttggctgttcgtagaagtaagcagcaaagagctatcttccgtcggtttgtttgctttctctctgctcaacattgtcctgaaaatgagtacaaggttgtggaatgggaattattatgactgctaagtggcaactaaaataaaaaaataatattaactagaacctcagcatactaacattattccaggatgcatgctcttaataggatgcacaagtattaaattgggattttattattcagatatcatgctaaaatagggtgccttatataaggagatgactctggtgtaagaatacagtatttacctgtttaaactatctgcccaatagctgacaatgcctggcttggagtcattaacttttgccttcttcaagctaccttgtggcccagcacatggcaatgagccagcagcagcaggcacctccttggtggtcttcttaggttgattttccacaggctttcttgaacgttgacggtttctgttgatg

SEQ ID NO: 1700 - DNA, 698 bp, Zea mays
ttctcaggcaggccaagcaggatcatcttgccctggggcttgaggagagcaaggtaagcgtacatggacatgcttgcagaggccgtgttcataatgccatccattgtgcccttcgcagcctgtaaaaatagggataaaaaatatacatgcgtgtggcacttgaataaaagaagatgacactatggtataaactataaattggcgtgttctcaagtttgggtccataaaggtttggacgttttgtaatgaagcagcatggggagcaaatagacttaccaccattgatagagatctgaagctgcaccctatctacaaacagatagattggtcccgcgatgataaatagttcatgtactcataaatcataatgcaatgcaaagtggtccttatcaactagtacatgagtatttttatcatcctgtctatcccttaattagactacttgttttaaagaaattaattggtctactttgaagtcccatgaagccaagccagcccaacatttcttaccttcatctggttagcatcactgctgacaacaaaggcgtccgcaccaagcgtctccatagcttcctccctcttccccggggacgtgctgatcacggtcaccctcatcccgaacgccttcgcgaactttacggcgacatgcccaagcccccccgagtccaaccacgccgatgtgcttgcctgcctcgttc

SEQ ID NO: 1701 - DNA, 752 bp, Zea mays
catgagaataagagaacccaaaaccacggcactgatatttgcatcgggtaaaatggtatgtcatcaatgtcttctcttatactgtcaattttcaaggatttgcttacttttggtggcagaatttcccttctattaaatttattgacatcaaattattgttgcacatgtggcctacgtgagatttgatctgtttttgctgtgtcccaatctacctctcaatcatcaagtattgaagaataacgttcttaccctctgtagcctacactaggcaaatctatgttttccttaccagttgatatatcacagtgggtgtttacttgggattttgtttttatcaatatcttcagtaatctagactttcttggttgtcatattaaatattggtttaatgcattgatgcatcaatacttctcttccaaatgaaaaagttagaactgcatttctttcatataaaactacaatcttgtatcaacccatcataagtgttgtagtgctgaaacaagtggcccgtaattttctaggtatgtactggagcgaagagtgaacagcaatccaagcttgcagcaaggaaggtgtgatatggcttgatatcattttatttaagttggatctagtttacggagaggcttctgcattataacacttgtctgtatttccagtatgccccgcattattcagaaacttggttttccagctaagtttaaggtaactttttcatacttgtgtacattgacctgttctttgaacaatat

SEQ ID NO: 1702 - DNA, 753 bp, Zea mays
gctaatagaaatgggcttcataaacaaaaataaaatcgctgaagaagaaaaggcatctttttcatcatatcatagcaacgataaatgaaaaagaaaaagatccacccatgtgacacatcataggtttttaccttgtttgaatcaacctggaatcatgattagttgtaccagaatggtatgctagcctccatgaaaagtggcgaaaacagagtacatacaaagtgaactaccacataaaagagagatacagctgaaaaactaggatgcaacagaggaataaccaatcagctccaaatataccttgatccatggcgtttgcctccctgctaaggattcgtcactgaaagcaactcatttctaccagtaaccatgtaactgaatagtgaaatgtgatgaaccgtatcaaaaaacagaatattcgtatgaattttgtcataacttccaccatttcacagcacgtcctagctgttattttccatttgaccttgaatatccattagcttggacaaagggaaaaggtagtttaatggtggctgaacctggccagtacctttgtttgaattttttctgcggaaggaattcagtacatgtacagtgccaaaataattcggtactgtagagcgcataaagcacactatgttacaacttacaaagcagccacatgtgaggcacaactgccttagattgctggatgcaaaagcggctagtatagatacacaaaatctaaaatacagatctattatgtagggatca

SEQ ID NO: 1703 - DNA, 729 bp, Zea mays
aaccattcctcgttgtttatgatccctaaattactatttccgttgcgggtgtcgctgttatactgatgaaattagcaacagaaactcatgagtttgttctgtattagtgtgtttttgtttcacgtgaattcactagattagtctactgttgccaattggattagaacgtaaaccaagtccaatttgcagagtgcttgatggctgccgcaaggggcattaaccagcttctgaagagaattctccacaaccagtccgctgtaagtgttttggtgaactctttgtttatttgcatgttgctctaaaatgcgtccatattcaatcttatgtgttttttatttccacatatccatcttgggtacaccatcacgatatggaatctatctgactggaacctattgttcatccttaaaaacaagtcgtagggaacatgcttagcctgttagaatcgacattctcaacatggagtgatgatatatcactgccgtatgtgtttcttgtgtggctcatgcttgccagttttgtcctctcctactgtatcgatttgaaccaaataacataaattatagtagtgcctcctttcacatatatatgacgccattgattttttttcaaaactttaccactcgtcttattcgaaaatgtaaaatttcaagtcacggtcaaacaaccttaagtgataaaacaaatcacaacaaaataaatggtaactcacgattttctttgaataag

SEQ ID NO: 1704 - DNA, 768 bp, Zea mays
aaagaaatctcgacggcccaggacttgacctcgtccgtgcgcgagaagtggggcttttacatggaagagaccgagaagaattacactgaggataccaaagcagtcgacagcggaaggtcttgcctggccgaagtgcttgtagaatggtcagttcacttcagcgtcatgccatgtgatggtggttattccttctggttcgaagacgcggatgttcttaacttttttttttttacattcacccggaaatttgttgcagcaaggcgaaggccaccgtgggtgcacagcaatggaagaacgcggaggattctctgttcagcctcggcaaaggaaacgtggagtcagtggattctatagtcaggtaatatcaggataggaatcgacatgggatcttgggcagtaaaaaatttctctgttgaaatgaatggtcggctacgagtgtgtgctgatgatgcgcctgtgtgtatgacaaacaggaccgggacagaggccaacgaattgctgcgttccaaactgtcgtctgcggcatcggcaactcttgaagatatcgacgttgcaaacgaggctctcctttcttcaattgacagtgagaccacgctctgaactgaaactttggccttacctaagtgcagtgcagtgcagtgcatagcatagcatagcatagcatggagccatggacagcttcctcttctttttctttatcccccctttacaaccccattcctgccatttccagctcgctgaagcttgaccgcgacgcgtgcgcgaaca

SEQ ID NO: 1705 - DNA, 794 bp, Zea mays
aactttgcgtccattcgggagcagcaggtcggagggttcactcaggtctgttgaaaaaaaaaatcgaacatcaaccttcttacttcctggttttatggagctgtttctccttgtctcatttttttggatcaattttctctttgtgtcactggatataggaacataaacaaatcgagagtataatgaactgccttgatactttagcacggacatgtttgatattggattgacaacttcagtgaattgttcgagcttgtctataatcacttgtcgacgtaaaaaaatattatcacataacctcttcaggggatagaaattagtatttctgaagctggtattcattttaccagtagtttcataggattctttcctaccatttcctatattaagaaagttcttctcatctaatgcccgagagctctaattgtagccggtcctagtattcctttacaattttaaaattgtaacttgcgtactaagttcaggcctaatttgtttatggttaacttattttcatgattggacgcaggttggtgcccatggcactggtgcaacattacctcctgttgatgagcaagtcattagcatgaaactggttacccctgccaaagggacaatagagctgtcgagggagaaggatcctgagttgttttatcttgctcgctgtgggacttggtggcctaagtgttgttgcacaagttacccttcagtgcgtagaaagacaccagcttgtggaacacacatttgtttccaatgcagatgaagtcaagaaaacccacagtaatgtttgtggt

SEQ ID NO: 1706 - DNA, 811 bp, Zea mays
aactgcttaagcatccacaccttcagccatacgtgtttgaactccaattgaaatccactcctcgcaatttgttctctgctaagcttcctaccagatacgtcacaaataaggctgcggtttctgatgccgaagacaattgtccaccaaaatacagcaagagccattcatttaaattggacaggcatggtcgtcctggttctacaactgggaaagaatgtccagaactaagtgaacaaatggagggattgtcagtccaagtcaccaagaatgttaatgctgaactgatacatgagaagtatccaaaagttacaacatctcctgcacctactccgagaagagcttcatcgacaccaagaagacgactagaagcttcaaagacatttcatgctagaacagcacataaggaggtatgaagtacctgaccatttgaaaactcaccaagttgttggtagccttattttcagtcattgttcagattttacaacataactgattaactgttgatattgtcagtccctagccagtagacaccactaaggcactaacctgttcttcagaaaatgcaaagcaactaggtttttcagaaactgacatttccttgcctcttgccaagaaaaagacaagatgaaagattgcttctagcttctttgtggcatcttaaaacattttaaattggcaacttgttatctttgaagtgattctacaaaatttatgttgttttggcaccagcaatctcaaaagtcaaggtcttcagcaaaccaagcgagtcaagcacggagagaatcactccccatgcgtatgatcaaaactc

SEQ ID NO: 1707 - DNA, 840 bp, Zea mays
attcccgaggatcctctaaagccgacctgcagcagcttatctatataatcaagatccttcatacttggctttgctagggttccagtggggaagcagttttcagaaacccactgctgcccaccacaatcgaagcccagtatttcatcactccagcccatgcgatacccttctgacttcttccaatactcagcttccgctttattgattttcaccacatgatctttatccagaggatcaagggcaagcagcttgtccctcagctcagtaaatgaaagtgtatctatttctgggtctttactttctgtttcagttctgaaaagcatctataaggtggcgtaagtgaaaaaaaaacaagcaaacacattgctgaatacagctagaaaatttcgcagaaaactaaacaattttcattttaacttcagttgagtagatcaaatagaaacattatttgaatattccagttgactgcataaaccaattttccgattttctgtgcatatcaatctaaagtacaggaactgaatgctcaaagttaagcccaacctacacttcttgcatcacctttttttcagtcaaaagggcaagggaagccggaagcaccccttcatagttcaattatagaaatccaccaaaagtttaacacagaattaaaaatcttcctctgagactaattaagctaagcaatctcctaacgaatgaacaaaacaagaagctgcaactgcacatattgccatcaacatgcccatatgaataattattgtatcactcatgtgataaatacaacttctccaactggaatcacctcttatttctgcatgagattcaatggagggaagaacc

SEQ ID NO: 1708 - DNA, 746 bp, Zea mays
aatttgatggctcaattatattatctaggaatctcaaaaggaaatactatgtggtctacgggcggaccataccatcattgattggaggactggccagcctccgatccattaattaattaatgtaatccagatctggagaggacggccgggggcagtacagagcagagcatatgggtactccagagcgacagccaaggacgtacacgctatctagctggagtatttaatttgtttgtgatttcccccttcctctatcatatcaatggttgctcggcgtcggcgtcgttttatgcttgtgctggtgattattaagaataacgagaaagagttagaaatggctatttgacgaggttggaggagaggctgtgataaaaagttgataaaatttcgtgaaagctgtgacatatatatgatgtttataaaccgaagaatcctcaaaaaagttccatgattttatgtggaggccgacaaggtagtaaccactgtacgtacgacgatatcatgctcgataagtttcatgattttctaaatttatttatttttatatgattcaaaaacaactggactacaagtccgtggtcatgttttgtgaacagaatgttcaaaattccagtatgttcttgatacgacctcaatagtatacttaacaacatgaataaaatatagcaaatattttaaaaaaacgtgccaaaatcgaacatgtaatttccggttactatagaaacaccacagaaaaggttttgggg

SEQ ID NO: 1709 - DNA, 796 bp, Zea mays
tctatagtcgacctgcagcataaatctaaacaagaaaaatgaaataagaaacacatgatgagaggttaaaatggaaaaaaaatatttacaaaagataatgtcataaaatggaaactcacatcaatagattaaatttatcatggttattttccaagtgcacaaaaatatagtcctttagaaccgcttcagcaacctaaacaatgtagaacagccaaagtcaagcacggcccaaatttcagctgtacgtcaatgtaaacacaaagggaacattagacactacagttatatagtcatcattttcaaatccttccatcacagatcggaagtattgccctgcatttgaaagatcaaaatcaatgtcagggcataacaggttgtcaaggcatcttaagcacagaaaaaaaaaacgcagaacgtaccaatatgcaccaaacactgtgtgcgagtcagaatggacagatttctgacttcgtcaagaactatttgtgccctttcaccaattagttgagtactgacaactccctttcctcttccatgtttatcactgtagcagcaagtcaagcttgtaaagatttcccggtcacttgcatcaataagggcctgtcattggtaattcatcatcatgtaaatgcaacgctaaagctacattaacaataattcaatacttttgaactaaactataatattgcaaaggtagaagcataatgatttgcataatatgtgacaagtcaaacacaagtccacaaattgcatgatacctactttaatggaaagactgagtctaacagtggatgag

SEQ ID NO: 1710 - DNA, 768 bp, Zea mays
tgttgcttcttgatcagttacagttggttttgccaattcagtttttcccacgtcaccagtacgtacatattggaatgaatcagagtcttgtggagcctcagcagttggctgtgcttgagttgatgcaggtcgcggtgtctgctgatcatgtaaagatcttgtgacaacctcatcaccaatagcatgatctgttgctgtctttttatcaacagccacatcattagttgacaaactggcatcataaacatcttcgtggattgtggcaggatcttgtgaagcttttgcagcctctaatctttgaccctcatatgtgctgagaagctcaccagcttcatgactatcaggagttcttctcaaggtaccttttgaagcaggatgagcagatgtaattggtgcttgcatttgttttggtttccccaccctttcatcaatgttggactgctcagtaaatttatcactgatagtggcaacatcagttctggcagcttctgggagtgatggtgcagcacgtctaacatcagatgcttctacaacaattggtacaggtggttcgaccctttgctcaccagattgtttggccatctgattgacactctgtgaacttggagctgcttcttgattcatgggtcttgacttttgatcattgttaagagatatggctgcctcatcatcagcagaatccataattacaccatgtaatgaagcagccatgcgttgccattgatcaatggggaatgatttgctaggcaaaatcccccttcagggaac

SEQ ID NO: 1711 - DNA, 771 bp, Zea mays
tagcatcagagctggtggttctttgtaaatgtgattctggaaaggacactgcacctttgattggcaagcttactgaaatatggtggtctttaaggaaaaggagggtatcactcttcggacatgcggcacatgcttattttcagtatctttcccattcatcaactgagcttcaatcttcatatcaccatgatgctttgaaagggaaaacaagaagctacactatgcgtgcgatgctgtatctacttcacataatgttgaactatggggtggaactgaaggaaacacttgaaagtgggctttcaacagttcctttattgccatggcaggtacgtcatgatagtgttctatattctataattttgggtgtatgttaatatttacagcatacttatatgctttggaaatatgcaggagattatacctcaactttttgcacgcttgagttcccacccagagaagatagtgagggaacttttggagagtatattgctgaagctaggaaagttatctccttgctctattgtatatcctacattggttgatatcagtgcttgcgaaggagaaccctctgaggagcttcagcgcatatcggactttatggtattttatcttacatatcagactatggttatctgctttagactctaagcggttattccaattaatgttgtttggaatctttctgttttttcataggttaagctatacccccatttaattaaaagatgttaaagctttgcaattgaggagctagggatgattacctgtctc

SEQ ID NO: 1712 - DNA, 755 bp, Zea mays
aaccggactacagcctcataaaatctaaacccacactccaaaaaaataggaatatatcagctggcagatgtgaaaaataaataaagttatcaagattgatagattttaggttgaaaaacaatactccctccggtttagtattagacgtcattttggacagcatttcgcgtaccaatgagtaattaattagaggctaatttcagctgtatccatattaagtaggatccggtgtccttcctatcgcactgtatttgctatcacaactggttacggatgcagcgagctgcgttcaaaacctagtggtcacatgcgcacattttcacatgtttatggtgcatggtgcccttttttgctgcatgtgcgcgtttaagttgcatggggcccctatttttctgcttggcgtccgtttacttgctgcatggcacttgtctggactctggagtaaaacacggtcactgcgaatcaatgccagcacgcagccgacgaagcgtttctgcatgtgaaagaaaggcaggggcaaagctgggtaacactgcctcggtatttcagaacggcatcttttgttacactacgctgattcatacaaaacgacttctaatgtttcaccagagggagtacagtactttcactcctaccaaagtcagatattttctactgaaaaaatatattctcttgagtgaaaagaggtataaattctaaaaggagtcttcataatgacaagatacagtataagtcaatctaataatgtctacctg

SEQ ID NO: 1713 - DNA, 762 bp, Zea mays
tggcagagttcatcctgaggacctagctttgaaagttgagtctgcgttctattctgctggtgctcttataatgtcagattcatccgctacagccatgtcatctctgctggctgtgcagaaaggttcagctgcacagctatcccttcccagtacctttggaacagcttctagagcctcccgagctctacgggaaacagtatctgctttgcctgttgagggtcgaatgctttgtgcctctgatgttttaccacttcctgacgctgcttacatgttgcagtctttgtatgctgatgtggaatgcttcacaggtttcagaaaaccttctgagaaggcatgtataaaactttgggcaaaaggagatcttcctacccagcatatcttgcctcggaggagggttgttgtattcaatactatgggtttgatggaggtaatttttaacaggcctgttgatattctaaggaaattgtttgatgggaacaccttgagatcacaaatcgaagaattctttaatcgctttggtgctggagaggctgctgcaatgtgcttaatgatagctgcgaagctactttatgctgaagatagtctgataagcaattctgtttctgagaaagccgctgaggcatttgaggaccctgggcttgttgggatgcctcaaattgctggtaccactgctttatctaatacacgaactcaggctggaggctttagtatgggccaagttgttcaaaaagcagaacctttgttttctggtgcatatgaagg

SEQ ID NO: 1714 - DNA, 771 bp, Zea mays
gttctactggtgttcaattggtttctaacatatgaaaagatgtgccagccaaaattctgttttgatctgttagatgatgtatacatgcccatgtgatattggagttacatatggctaatataaaaaggacacctgaaccttaggcaagatgaaaggcagctttcttcttgtttccattgattgttcctgttttgactcatttatgctgaaattgctgatgctatttacttcttttctgaccataaggatgggggttgcaacttctttgagtggtgcgatgctccatctcccgcccctgccaatgcacgaaataacatggttgtacactcagagacatcagcaacagatatgctttgcccatgcagtgctggaacttgcttaattctcaccacaaagacagggaaaaatgttgggaggcagttcttttgctgcccattaaatcaggtaaactcaggattcaccaatgttacctgaattcatgacattttgccgtaccagatagcggcctatactggtttgtttttctggaagaacttggcccctttttatctgacacaacttgtttaattataacattgaacatctgcaaccctactccttcctgaatttgagtaatcaacatttgtgggattttgaacttgtttaattataacattgaacatctgcaaccatcctccttcctgaatttgagttatcaactaattgtgagatttttattgcaggatgccacctatatcaattgtattagatagaaattgccgtaatgatttg

SEQ ID NO: 1715 - DNA, 738 bp, Zea mays
ttgcatgcctgcagaaacaagtaaaacaaagtacttaatctgaacatatatcatagagtaaacacctcaatagttgaagtcttttctgtaactttatcaggatcgccaattgattgagctcgtgatgcctccttctcatgtagtttcttccacaaatctagagcttcagaatctatcctgaagtgaaatacacatattagagtaacaagaattaataatagcccaaaaaaggcaaaagtactaaattaatctttcagtcttgtcatatgttgcaggttaaaagtatagatcacaaatgatggctgataatattttacatttaggctagaaaattgaatgggacaacaccctgatttgctaaatatccttactggcactttgaggtgaacaattaaatgttatctcatatcacaaatcacatatgaaatatagatgatgtttactgttaaacagatagatggacccaggacgtggtccacatccattgtgccgctggccatggcccatgggcctatgaagcacatgtagactgtttcgtattaggcacggatctcccatgtgctaattgcctaatttaattctataagctaaacactatgacgtactttccctatataatctagtatcctctactcgcatcatcaatctatttttcccgtgtgcaaaccttgcttacattgtatcaggctggtccatccttgctcacacacgcatgaaaaattagacttcatgagcaat

SEQ ID NO: 1716 - DNA, 721 bp, Zea mays
ttttgttttatgatgctgatattggagggcctcctatgaacttccgagatatattcctttatagccacgcacttgagggtattacgttgtccatggtgagttaattcaatgatgctatccttgctgtcaagaactcaagataccatctgcacctgtatttgtttttacccaacaagaaagcacttgctgtagtaggtctctgttgtttcttgtaccgcactaccgctgctacaagttaagcatggcttatcttttccttacccagattcttgaagctcctaaagaagaagaggtttcccttcttctagaaattttcgggtgagcttattgtccaaaagatgtgtcagttgtcgctatgtttttcaacaatccaagcaattttcactttagttttcagttcaagtggaatgtctaagtacactaagtaattactcgagcttgattattaacatataattaagtgcacttggtctggatggagcagggaaaatagtcatctaaactatattgttgagtgtcctggaagcaataacatttgcacttcactttaggatatactagcgactctagaaaattactgctttgatgtgaatttcacattgaatgttaagaatttattttatggttttctatttcaagtacaacactgtctgcttggctgcttgctattttcatatcaacaacaaagccttttaatcccaagcaagctggggtacactag

SEQ ID NO: 1717 - DNA, 742 bp, Zea mays
aactaactcactgccttttagtttttttttgttgattgtaattgaaacaactggacaaaaaagcatgcacatgcagagttgtgggagcgattctaccgttattcctacaaactcggacgccacgaactatattcgccacggtctccatggcacacaactggtcaccatgcactccgtggactcaggcatgcacctgaccaactcaaaacgtgacagtaaagtaaattaacagagctgagcaacaagtttatcttctgacaactaggtctgacatacatggaccctgatttttggacaggttaacggaaaccacgaaactatgaatgtggaaggtgatttccggtactgtgatccgggaggctttgatgagtgcatgcgcttccttgactacttggatgaatgtgatggcaactgggataacgcatttctcaactgggtaaatgtctgtgaaagacggaagaaagagtatgtagctttgcctaatggtgactggggtccttggaatttcgtcaaggtaaacaagaatcttgtgctggacacttgatagacaatctatatattcttgtgcttctgaaatgctggccgtccgatattgttacagaagcagaaaggctttgctgcaagatcatctcttctcaagcgaggtggtccgctagctcgtgaattggctcggcatcctgttgtcctcaagatcaatgactggattttttgtcatggtggccctcttcctcaccatggtgag

SEQ ID NO: 1718 - DNA, 856 bp, Zea mays
agcttgcatgcctgcagtagcttgcattcttctatacattgtaagttcgcttcccatttggattactggaatgcacatctccttgtatccagaatgtttttgacgattcattttacccataatccaggagtacaagcacattgccaggttgaagctccttcatcttacaagcgcaacaccaaaaccaaaccattttacagttcttgttcgtggaataccaaaggcagataaagaatcatgcagtgatgttgttgataatttcttcacaaagtatcactcatctagttatctcttccatcaagtagtttacaaagtcgggaaagttcagaagataatggtacttaacactcaaatgcatttcactttttctaatgacaagcatttactagtataaacctgtttcttctgttgattagattttcgcacatatggataatcatttttttttgtattttgacatgaatccgtggaaatgtctgcatttgtttttttggtggtggtggagtggaagttatgcatatttctatttcactttatttatgttttttgtgttactttaatcttcatctctgacagactggcgcaaagaaggcatataagaagttcaaacatttcacagatgaaactgtcgatcaaggttgcaggacagttacctaccgctgttgtctgtgtggagcttcttcaaattctttcaagttgttgaacactgagtgtgagcagaacaaggggaaagcggacaataaatccatcttggacttagacgatgaggttaagcttgcatgcatttgttcttttgcttaacctatcagttatttagaataattagtaattatcgtgtgggattgaatgcaggatg

SEQ ID NO: 1719 - DNA, 819 bp, Zea mays
ggatcatggccgagctggtgaagaacccggacgcgcaggagaagctctacagcgagatcagggcaacgtgcggcgacgaccaagcggaggtcggcgaggaggacacgcacaggatgccgtacctcaaggccgtcgtgctcgagggactgcgccggcacccccctgcgcatttcgtgctgtcgcacaaggcggcggaggacacggaggtgggcgggtacctgatccccaagggcgcgacggtgaacttcacggtggcggagatgggctgggacgagcgggagtgggacaggcccatggagttcgtgccggagcggttcctgtcaggcggcgacggtgagggcgtcgacgtgactggcagcagggagatcaagatgatgccctttggcgccgggcggcggatttgcgccgggctcggcatcgccatgcttcacttggagtacttcgtcgccaacttggtcagggaattcgaatggaaagaggtgcccggcgacgaggtggatttgtctgagacgcgcgagttcaccaccgtcatgaagaaaccgctccgcgcgcagctggtgcgcagaacaacttgtgtatgaatgccgattaatggcccatcaccgcgtctgtagaagtccaaaaaaaccatccttctggctcttggctcttctctcatcaaggatcaccaaaccgcttgataaattcggctaaggccttgtttggttattcccaatacacatggattggatggggatgggaaaaaaatttttaagaagttttgaattggttggggatttcaaacccatccaattcccacttaaatccacattggtttga

SEQ ID NO: 1720 - DNA, 742 bp, Zea mays
atccgcagtactcgtaattatgaggtttaaattctggtatcattccaagctaagcaatccatcaaaatatgttcagcttgtcctcacaccaacctaattgacccaaaatcaaccaaacataatgccgcaaactcagaaaatgctgtaattgataaaataaaaataaggaaaatcttgaggttttgcctcctattatgtcagaatgcataagtatatcatccagaatcttgacaaacaaatttgtggcgctcataaccataagccatacagcatagctgcataacacatacacacaacgtagcaataaataggagtaaaatgaaccatcttccgtcgtcagatactgtagcacgtttaagtgttaagattctggaacagctcaggcagatgggcattcgtgagcttggtccgttttgtgatctcacgctgcttcttcttgggcttagccttgggttttacgccattgatctgggcagctgctcgtcgtttggcagtatttgtcatgggcttgaaaccgtttttctgtagctccttctctatgtcgaccatgtcacgtggcagctctatttcacggaagagttgcttcaggtcatcatcaaccttgatctttgcttttggatcatttgggtatacaatgtcctcctgggagtccatgtttgataacagccaaacctcaccagcagccttcagagcctggagcacagaaaatactcaagattatgcaactacgtttaaatatatg

SEQ ID NO: 1721 - DNA, 773 bp, Zea mays
  unsure (1)..(773): unsure at all n locations
gcagaagcttctctaaccttaaaactatcaaaaagaaagacaaaaaaaacaaaagagactccaaacactgtgctgtccatgcatgtttcggattctgtccaaatcttactttcaccaaagctgagcacatttattcctactaccgctggcaagtaagtgaaacgccgattaaaactagatggtgacaccgcgatgaagatcagaaattgtttagcttttgaagaagccggtgggcggtggcacgtagcaagtgaaaacaaatggagattttggaagcacgaacgaaaaggttcacgctaatctgccagttcacacagtaatcatgagcatatttgttctcttccccccgcaaagcaacaaatcgaactccctactcccgagtgcatccaaaaataaagggaagatgcgagagaaaatgcttcacacacggcatgcactactcacctccgccaccatgccactccagggcagcgccgccgccgctggccgggaccagcgccggcggatcgaccttgatgacgtcatgcagctcgcgcagcatcttctcgaggctcgccgcgttctgatgatccggcagcgctgcgccaccacctccatgtgcggtggcggcggccgaggccggcggcgtcggttgggcgtattggtttgaagggagctccaccactctggggcaaggggacggcgagagcggcgggagcctgctctggtcggcgccggcgctgcgcgcgccgtagccgagggacaggtnctgcgtcgtcggggacacgggcgaa

SEQ ID NO: 1722 - DNA, 863 bp, Zea mays
cactcttgcatgcctgcaggttccgttcagtttgtgacgtgttcatcccacttatcttaaaacaacagaacgttaaccttaaagcatggcctaacgtggttggttgttcggttgctttaagattagggcgatggactcgtgtcacgaattgaacggagactgcgtgtcgcttctatgcagctggttgttggtatggtatcccccaataagcccctaatcattccccgcacggatcacaccacatatgtttgggcacttcctgttcctggggtcctcgcccacgtaggctaacaacgcaagcattgtaccgaaaaccccaggcatcagatgctccaatctttgctgcccatacataggccgcctctagagagcaaaaaagagaagtgcaaacaaagatcctcaaaaggacaggcagccaaatgccccaccacagcgtagcccctcctcactgactcacctgcaaaaaccacttgcaaaccacacaaaccgaaaccgccagctcccctgcctccatttttagcaacttttcccttcaatctcccgtcgcagtcacccttcttgcacccccgcgcagcttccgacacctccgaccttctctggcggcgccccgccgttggacgctcatggagaagagcccgggcgccgcgccgacatcatcgcccgaggaggaggtggcggcggatggccgcgggcacgttgaggacgcgacggggcagaaggagcaggcgacgcccgtggtgctcaagaaggggccgtggacggcagcggaggatgccatgctcatggaccacgtccggcaccacggcgaggggaactggaacgcagtgcagagggtgacccgcctgctgcgctgcggcaagagc

SEQ ID NO: 1723 - DNA, 842 bp, Zea mays
tatccgcgtgagaaggctgcctctcacaaattctcggtcggtgccatcccggcggtgaactgcttttgggcttcttcgaaggttcgtatcttttggctcaggagaaagtggttctgaaggcctcgggcttctcatccccaattcgatccgttcccgagacggtgattgggtcatagatggggacggggtcaagcatcctgggcgcggatggagagtggggggagacgtccctcggcgacatgccggagagctgcgtggcggcggtactcctctacctcgacccgccggagatctgccaggtggcccgtctcaacagcgccttccgcggcgccgcctcggcggactgcgtctgggccgccaagctccccgccaactaccgttaccttgcggccctagcggcggccgccgatgacgagggctgtggcgatggagatgccagcggcaagcgcttgaccaagaaggagatttacgctcgtctgtgccgatccactttctttgatgccggcagaaaggtaaactcatgtggtcattcctccatggaggtattatgcttgtttgttagggccgatctgctgtggtctgtggatgcggttctgttattagcctcgtgtttgcttgaaattgtctattttgtttaatagccatccatgctgtctattttaggaattctggattctgaagaacaaggggagcccttttgcatgagtatatcatcaaaaggccatggaccttttaccggggttagaatgatcgggagggtacttggaggccccccttgtccacaataggaaattcaaaggtacctttttttggagggctggttattttggttttagccttcc

SEQ ID NO: 1724 - DNA, 753 bp, Zea mays
ctcagttccgactatatcaatagacaacacatctggctgccaactttacttaagcaaggaatctttagaggcatctataacaacagctaaatcaagtgaaatcaatgctcttgttccagatgcaaacagtgacggtgactgggtgagcactcaactgacttgtccattcggggtgtgtttagtttcaagaatgaggtgttctatcatctatccattccccacttttttttgtttgatttgtggaaatgaagcaagctgaacaatcatcacttctcttttcacaacccaataactagtatatgcacgagaaataggttgatgcatgctaccaaatttatggaatggaatcatgtgcaccactgcctcataagttatgggacgattccgcaaactaaacacaccattagttaccgaggatcctcttattttactttcaaagttacacctacatggattacaatggacggaacaaaaaggttgattttaattaagtgaactgaaactttggttccacatttgcttttccatggccctcaacttcatatttcaccatccagcacttacacaaaccattctgggagaacatggcgaaattgaactgaaagaagaccatagtttctttctgtataaaaaaaatatatatacgctagtcttgaccattctctcattttgctaaaacttttgcaggccgagcattccttgccccagcagtacattcacgcgttcaaagacggacaatttacgacatcttcc

SEQ ID NO: 1725 - DNA, 800 bp, Zea mays
gccaagcaaatcacggatgacgatgaactgtgtcttctcctgccactgtcagggcctcagccctatgaacgtcagatacttgtatgcggctatcttcctccagctggcgaacctgtctgcgtggttcgcacgagagaataccgtatcgtattacctgaagcagcgactcagcggcgcctgtcagggtgaccggggttgtctcgcggctgaaagcgtgctcgtggcgagccatgcattctttgtatcctagagtttaaacaacattattttttatctaactattttctgtattatgattgctctgaccttaacaaatcgtccagctcttttttatggccatgttcttctccactgtacgcaccggcaaggtgaatgagttgagaaatttatggcactgcgggtggtggccagtgaagattgccctcttcatggtctattttctcgtctctgtcttggctccatcctggtggatccaaatctatggtcagttccctaccgtgacctatatcatatatacttactacagtgctctctgctagcttgtatcattgatatacatggtgtttgtctgaattgtattgtcagaaaaaattacgcagcttggggcagggtaactatctactgcctcaaataatccatctaattaattagtaatgatgttgatatgtgttgtatttgggtcttttgaacaggatatttcttgtagttcagctcataagttttatgagatttatcacaaggctgaactacaaattgtgcccaaaccaattaccaagggaaggtatatatatattttttaa

SEQ ID NO: 1726 - DNA, 610 bp, Zea mays
tgctcggccttcacgcgctgacatacttcacaggcggccacatacttagaaacgtcaaccttcatccgcttccaccagaagttttgcttcaaatctcggtacattttggtttctccagggtgaacggtgtaaggcgttttatgagcttctctcaagatatccatcttcacctctgatttctgaggcacacagaggcggcccctgaaacgaaccaaatcattctcatcaatggtgaactcccggggtttaccatcaccaaccctctttcgagcttcctgcaatagacgatcctgctgctgagccgcatgcactctctccatgagagaggattgaataagcatccgagtctcctcgctagcggtgccgacataacacaaagcgatccccaaacggtccagatcagcgatcaacggcaaggccacctttggaaccctggacctgctaagggcatcagccactacattagccttccccgtgtgataatgaatggacaaatcataatctttaatcaattccagccatcaacgctgcctcaaattcagctccttttgagtaaaaatatacttgagacttttatgattggtgaaaatgtcacaagcctcgccataaa

SEQ ID NO: 1727 - DNA, 793 bp, Zea mays
aaggtgacgattctaatgctacatcatgcatttcagttgttgaaatttctgcacttctctgagcactctggacttgacccacatgtttaccttggtcagtacctttttccctacttttccagctactgatcttccaatgaacaagcaaaagcacaataatcccagtaacaaatacaacaacacagataatcaatgcatatagaatcccacgcttcaagccgtgtcttgcctcatctgatttgtcagaaccatttaatgattcagagcgaggaagaacgagcaattcgttccctggatggaaagatgaatctgggaatttcagtaaattacttggaacagagccagacaggtagttgtaggaaacattaaattcgaccagatcatcagggaggccatcaggtatgctaccattgaaattgttgcttgataagtcaatgtataacagattcttaagtttggtgattgttcttgggatttcgccagtaaagttgttctggtgaaggttcagcaatgtcaacgcgctcaaatcaccaatgcccataggcagtgagccgtgcaaaaaattgcttgaaagatcaacataggagaggtttgaagtttgcacaggaagaatggacaagtctatagaagtcgagttcttggtatcggaatttcgaagggggagagtccctgtaaaactgttgcctgaaagattaagaaaagtcagcttaaccgctgtaaacagatttccaggcaaaggtccatgcagctgattaatactgaagtcaatgaaaatcagctctggataggttcc

SEQ ID NO: 1728 - DNA, 737 bp, Zea mays
agttatatagggtttgatttgacacaacaaagcagcagagaatctcacagtagcattgaagatccaggaaacttgaggaacgtaagccaccgatccacgaatgaccactgaggtacctgatccagatactggtggtatttctccaagcattgcagatatgagagaagttttaccctcaccagtgcttcctactattgcaactaaacttccaacaggtacatccagattgacatttgataaagttggtctctgagcctgccaacattcaaaattttggtttttaaaatccgatgaacttcacagtaatagctgtacactcatattggcaaaaaggactttgatataagactacaaggggcaaaaagagtagcaccttgagtcttatgatcaactaggaagacatcaaccgggtcaaaaaaaactaggaagacatcaacagataccatctgtttttagctatcttacaaaaccagtgggctatttggtaataagtttctatcttacacctgcccatggagcatgatagcctatagatactttgattcactgtccatttcagactaccatgaagagagttgtgataatgacatgtttttcaatatccgacagctagagaatcagcggacaagaaatcaactaccataatcctaagagcagcaattacaagattgaagaataaataaatgatagtggcaaataaataaaaatatataaaacatgaatttacctctgattcc

SEQ ID NO: 1729 - DNA, 798 bp, Zea mays
tacgtatctcgattcgctccggccggcgagaaaagacgcggcgttctccccacacacacacacccggccccacccgatattcttcttgacgtgcatgcatgcgtcggactgcgtgcgtgcagtgcggactcgcccccctcactctttcacctcgccggcgaggagcgagcggtggtcgagagcgtagcccagcccggccagagggggaaaaaagcatgcaagggtacaagagtttgtttcctcatgtcacgtcctgtcattcagcgcgacgccgacgggcggtggacaaacatgtgttggccggtacgaggccctgcactctgcctgcctgctgcctgcacccgtcctttcggcctgtcagtccatccgtcccattcattcatctttcccgaactccgaaagtgctggccaggccaggcacaattgagtgaccagaccagactcacggctcccccacccttggccactcacccaagatttcagcgtgcccagactccgattccggagtgcatgcatgttgatgtctcatgtccgatgacagtctctctctctcttcctagttcctcccatccctcctctccctttccatcttcactcatgagccatcatgccacaccgcaatgttggaccttttccacgtttccgaatcctcatcatcagtaccctagtttcccttgtacagactcatcagagagcttttggtcgtaccgctgcttctatattggcacattgctttcgtgccaccccaaacatgtgccgatttaaacttccgttccacgttcaccccaacccagcacg

SEQ ID NO: 1730 - DNA, 717 bp, Zea mays
tatcggtctggctcctgacatgaaggtgaagtcgtcttccgctgtttctgtacgtgcactcgactaattcggccgattcagggttgcatcgctcacgcatggactaaaacgccagggaatgaatctaatattgtaagaacgatgggattgaatagcgcacgtctcgcacacatgtcagtcgttcatgtgacagagcttgcttgtacacatccattgacgtgcaagttattatcgtcatgaagaggcgctggtcccatgttaagttccggcacgtgatccgcgcacggccagccctgctgcacctgacctggcctgttgagtaattaagtcatcatcgctcacgtagagtgctcaagtaaaatactcctccctctgcccttcggagccacaaattctaagcgacgcgaatcgcagccacacaccaccagcagcaccaagagccagatcagatcagcctgatgaactcactgccaccactcaaggcgcgcgggccgtaccaatgagcatcgtctgcccgagtagagtatacaagtattataagccggcgagagcataacgtcgcgtataaattaatattcatcgtacgatgccttgcgcgacccagcttgctacccacgcgccgtgccgcggacgccgacacctgtgccgtgtccgaggacacgagccgcgcctgaccgcctgcgttttgtgacctgtcgccgatgagcccatagttag

SEQ ID NO: 1731 - DNA, 755 bp, Zea mays
cacctcgctccaacgcaaattgaacctgagcttcgtgtgaatctctgggtgcaaatgacatggttaatacatttctgtccattagataagctccgaagcttgcaacctgtatgtggtcagaactgttactcccagctatggatggatcaaagtaattaaggctagtttacaagaaaatgaagataagtcttactaaaaagatcaatatctaaatgccttggaactataaactatgaagtatataagacacatcttaaagggagtaaaatataacaagatctggtgagagagcataccccacatccagtatcaagtgcagttctgatagtgccatcagcgagtgggatgatggatgcaagttcatcaaggtaagcattcgctccattgggaaacattgttcctcctcctggaaatttgaacacatctccctgatattggatccagttctgaacagctttctcaactgtcagactcttatacggagcatttgcatatggaacatagtcacggctcttgggccaagagaaaggggtgacatatccttttggtgctgggatgagacaatgcagtttctcattctctacaggacaatgcctttctctgtatgtcatgttttgtctaggaaaggccattgctcggttctggtcttgacaaggagtatagtcactgtatcggatgtggcatggctcaatcattttattggacatgatcaatggattagcgccacttatggtatgatgggtctcaaagtgcaa

SEQ ID NO: 1732 - DNA, 763 bp, Zea mays
cttgcatgcctgcaggcataaacaaatggcgttggagtgcatccagctcacagaatctcaaggaactagctcaactaattatttatttaacgcagattaatcccaaagactacaatttattgaacagcaaaaaaggctaaaaatcctgtggaaaatatgccccacagattagcagaggcttttacagaaaagtgatgtgggcaaagggtgagcaagcagcattacctcaacaatgtaaaagtcaaagtctgcactcgatactatctttccgtcactgtcaaccgcatgcattttgtgcttgtatgtcatcaagattgacctgtccaggtatttgagctgatttatcatatacacaaaaccaacaaaggaatcagcagcacaagcgtaaattacattgcacagaccttagcgttgcttcatccacttccatatattgggcaagtttgctaatggttattgttgaatatagcttcagataactccggatcccagaaagcaactgctgctgctttacttcataaagaaacagcttcaactgtagacggtatgcatcctgttgcagcaaccacaaaaccttttagaaccttgtggtaagttagagcctatagatgaagtgaagaacattaatgtacagtaagtgtatgaccctatacaaaacaaaaaatactgatgaggcaaacggacagcaacattaaatgaagcaaaattacctggttatagtttgttagcggctggtccagcactggaggtgatggtgtaatga

SEQ ID NO: 1733 - DNA, 802 bp, Zea mays
atgctttagagtccacctgcagctcaacccctacagctggtcaaaggtaaatagtggcagttacatttcttcatgccaatccatatcgctagctaggtgtcactgtctatctaccggctagttgttgttggcatgtagtaggcaaacagtgcaatacatttgatattttttaaaacgagtggttaccgtggtctgttgcacctgttatgttatatatatatgggtgaagacgggtcaagtatactcgtcggataccggatacagatagtataaatacctattttttggatatagatgctgctattttcatgtttggaacatatacgtgtactatccgaatagtgcagctttggattcgggtcgaatatggatgctagtatttttatactcgggatggatacgagtactacccgaatagtgcagctttgtattcggatcggatacgaagcgaggactacctggtaaatactctgatatttggatcggatacgggtacccgtttctttttatctgtaaacattgttataaattcataatttttgcatataaacttaggtgaagataaagtttatatcaaaatcatagagctcaaagagatctacaactttgtagtacatcgtatttttgtctgaatacatctacatgtccacattattcaaatagagtctaaattattaaaatagtatctaaatttatactaaattattgtaatttgcttatttttttaaaaaatacaaggtattggcgtctctaataacttgcttagtctattatatgtgtgcatgctaaatataatggtaac

SEQ ID NO: 1734 - DNA, 658 bp, Zea mays
gttccattacagtctcatctatttactcattcaaccattccgttacagtttcagtcatttcgttatagtttctcttacagtttcagtgattctgttaccgttacaatttcattcattttattactgtctcagtcattcactcattcagcctgtcagccattacattaccgttttagtcattctgttagtttcagttattccgttacagtttcagtcatttcgttacattttcagtcattctgttaccgttacagttttactcgtccgatcggagcatgggggtggggcgtggtgcgcggtgggtgcttgcagcgtgtgggctgatcgggttgcggcagttagcgtgtcggttggcatgcggggatgcgtatggcgcgcgagctaattagacgaagtcggtagcgcgttttgggggggggtcgatttgattggtttaggtgatggaatctctgatccatcacccatagcgctgccatttgctatttgtcacctcaggtgataaacccaacaatccatcacccgcacttaatggcgtagttgaaccaattaatggtggctaactcgatcggataacggatatgtttagttgggttcgggtgatggactattggtttatctccctaggtgacaaataacgatatatatatcgtcaccttag

SEQ ID NO: 1735 - DNA, 764 bp, Zea mays
aggaaagagaaaacagcatcagcatccatgcattgcggtgcccccgtcgcgcatcgccggaaaagcatggccggccagctagatatttacagccttgctttctgaatccctgcgtgatcatgcatagaacgcgtcaacgacgacgcgcagaagaagaagccatagctgtgtgtggctctgcgctgcacctgtgcacaccaatacaccatgcaccacatatcatgcccatggcagtccctgtacgtacgacgtcgatctgtagtgcacctgctgtgcaccccaataccccattattattcgcgatcgatcgctagctgtacatgtgcctgcaagcttgcagccatatgcggccatgcctgcatgccacacgtacgtacagaagcaacagctagcatgaccaaccggctgtcagaaggagctcatgcgcgatcgcacacattgcgaagtggagatcctcgtagccctaataaagcgccgtcgagtactacaagcaaggacgacgcgaagatgtgtgcgtgcgtgccgcatactagctctagctaccagctgctgtatcttgtacgtaaagcccggccctccttttacttgccctgatgaagaccgagacagcgacgatcagctgccgctacgtacgtgtccagtttcagaggatgagaggtactgcatggtagggtcctggcgggccgggcggccggcgccccatcagacagcgccagattcagtgctgcaacttggctacccttttttctcggacgaacacgtac

SEQ ID NO: 1736 - DNA, 767 bp, Zea mays
gccatctagcgatcagatgcaggtgcgaggactatctattttactactattgcaaacttttattattaacattgtgcactcttcaggtttaactaagattgtacactctagcgatcagatcataccactttttttttatcatgtgtatttctcataacagcctggttttactaacattgttcaagttctgaaactatacataccaggtcaatagtttcttcaaatacgaccaattgtccccgactaaatacccttcatgtaaaaggtcctttagctgagttggttagatagtctaagtagcattcttcagattctaagttgatttaagagttttcttaacccatatgtgatgattttccttttaatataatgtctggtggttgtcttacccctgtatgtcgagtttttttaaatacccataataacaaacctataggtttattattattttcttattattcatcattgttttgtcgagaaaacaattgatcatcaaactgtgcatttctacttaatatttcatttctgaagcaatgattttcataaaaataggttcagtataaaactaagtactagtgaaatactatctctcaacttatttaattttgttgtacaagatctattgttacgccttttgtcccaatccttaacggcgaaaggatctctagtgtaatggttaagacttacgagtagcacctccaggtcctggatttgatcccctcggggacgaatttcgggtttggttaaaaaatcccctcgttgtgcct

SEQ ID NO: 1737 - DNA, 588 bp, Zea mays
cttgcatgcctgcagtgcttcagtcacttctgcacaaagtgaccctaggttagttcctgattgataatgaaatacagatcaaactttttctggcactgaatagtacttcaattttgctgatacttaaaagtgccaataacacaacctgtcatttgttggaacatgaatgaccacatttggttaatctgtttattagtcggagctatttggctggaccatgctgtttttgtttgccactctattttgtaatctttttaagcataaaatgaagtacattagattctaatattgatgtctttttctttccaggatttcaaaatcagttttgggaggaccagttacacagaaattagaaagcaagttaaatggagataatcaacgagtgccttccaagaattctggacaagttgcatctttcacaagtaatcctgtatttaaggttgatggccctgggcatgcgtcaaactctgttctctcagctgtacaatcttataatacatcaactggctcagtttcatttcaaagtgctggctcttctaccatctccactaacttaacttcaaacattacacagagctgttcaactgg

SEQ ID NO: 1738 - DNA, 774 bp, Zea mays
aaaccattcttttcttctgatacgcccactttttttatagaagaggtgtacagggttcaaagatatggcaagtaatttttatttaaatagctctataaatagtaattcagaatgtaacatgaaagactaaaaaaaacttatccgtagcctatgaagtattttgttttttctacatatacagttttatcatatatttagacatagtacataatatacctaaaaatctagatacatacttgtcaaacataatatacctaaaaatcaaaataacttatgagacattttagtttttctagataggtttttatctatttagacatagtatatatatttaacttcataacaaaggcatattaaaaaaacttaggaattatacagatgactgaaatcattcggaaccgccatgttactttgaaggttacatcgcttttcaaaacacagacacagcgaactcaactgaaaaaaaaaactatatacgaaacaaaaaagggaaaagaggccgtttcgatcttttacactatagaggaattaaaattttacttgataaaaaatccatactttcaagatttcagatatttcttccttaaatttatcagataatagattaaaatttatatgcatcaccatgttatgtttctacttttttataacttataacattataacatgttgttcattatttgactcgctccccacagtaaaaaaatatagtacataaatctcacctgcataatcaataataataattggcgtgcctaaattattattattagg

SEQ ID NO: 1739 - DNA, 730 bp, Zea mays
aaactgaaataactcttttgtgttcttgatattatcttgttctcgtcaggttatctctatgatttcatgacattatttttattctctttgggtgtttcagtctgttaacctcatgtttaactacttactatgacaatggcccacatgtcaccgacagtggaattttgtgagaccacacttgtcacggtgttatgaaccaaatttttttattcccttctctttggcacttagtttagggtctgtttggttgagctgtagctgtgaaaaaagctgttgaggcctgtgggctgtgagctatgaaaaaaatgttgtaggttgtgagctgttaaaagctaaaaaccatttagtgaaaccactaaaagctgctaaaaggtcttccatatatattttcacagttccatccgaaagccgctaaaagcaggtccagagatggtttcagttttgcactacgagaaagtcggcttttagaaaaagctgcttcctggatccatctctttggtttgacttttggctttaggaggcaaaagccaaagccaaaagccaaaccaaacacacccttagtccattagaagttgataacaacttcgatactagagctctataccatctgtcgccatatatttggtatagttataaacctaatatggtgaccctgataatctactcttttggtgggttatataaattggcttcggacatgaccagtatctggggctgttcccagctgcgt

SEQ ID NO: 1740 - DNA, 770 bp, Zea mays
ttttgatgcgttattaccagctgtgagtcaaggaagacttgtgcaagggtcgggtcatgtgttgtgttgcagactcaacaaccacgccaccaccggaatcaaatgctaggaaagatgtgtcctgctactggctgtttagaagggaccatatggacagtgcagaaatgaacaaccgtatgaacacattacggagggattaccccaaaggataaggcttaccttatcgagcgaagactgcacctgttggatcgagcttccagtgtggccatgagcactcataaggacaccaccctttctcttgtccttcttcaggaaaaggcggaaagttaggatagattcctctaacagtttgatgaggtcgtgcgccgaaatcgctggctccatctgatcgtcggtgttgtctttcctatctgcgactgaatcgagagaaaggaaatgataagcagaataatagtattaacaaacgttaccgagcgtgaatcattccggtatgcaatacaaacaaccgatcaaatacgtaacactaaaaacagacgttaggacgccacagatttggaaacctagtaaaagaaaaggaagcttacgcacgcaaaagagtaactaagagattcgtgacagaatgaaacaaagatatagctgtgtttactgtgctactgcactcagtaattgtttctttactgtagaataaagtacaatctattgcatgattcggtatgggattataagtaccccacattaaacatgttgcagcagtaactggaaagaactca

SEQ ID NO: 1741 - DNA, 724 bp, Zea mays
tcattgaaaatgagccatttgagcatggtacccgtgttgagatatatgcacggtctcggagcttgttgtcaaagttgcttcaggtccccacttttcaaggtaagattatttggattaaattgctgcattttttaacataaatgtagcctattaccatcaaaatgtgttcctgtgggctgtagaatgttacactgaacttagtgttggttatggttttatagacttatgttgtcatgctattaattcaaattcaaacaaaccctaaaccatgcactcgagatcaaaacggcagcaggtgtggttcaggcgtttagcaaatgcctaatggttttcaattaattttacttagaattgtttctcttagtcttggacctttccattatgagatatcttggattgtaactcttgaatgcttattgttcgctaggtatgtcagatgttccctgtttgcatggcacaaattaatcctgtctgtttacatgaaaaaatggttccagaagttcaatctatttgataatggtgtgaacttgattttgaatcatgtacagtcttttagaaatggtttaaaatcatgatgctgaggacaaatagctgttctgatattgcctatacacgaggggcattttcttttgttcacgttaacgctccgtttgatgccagcattcaaggccatggaattgaaatgtgtccaataccaaaactaggtggggaattgagcttaaat

SEQ ID NO: 1742 - DNA, 817 bp, Zea mays
agcttgcatgcctgcagtgccgaatacagaagataatgtttagctctcaaaggaacagcaccagaacaaggatttaatcacagcaaacaagacttacctgtctacaagcaactgtatgcaatcttccactttaccaagcatgaaaaggcagaggaaagcaacattgttttttccatgttcttttgccaaagaagcaagcttttcaattccttcagcatctccaagagatgaatacaatagcaacaagccacttaaatccttcgcttgaagaaggcattcctccgccatctctagctgcaaggtagagttatggcatacccacaccaataagttatcattcacaagctagtacagataggatatgttcgatttaggtcatgtctcaattgacatcattcccattcacatggagagttctagccagaaaaacatgttcagttgaagttttgagaagataaaaggccctaaaccaaaactgtttgatcacaaaagaataaatgtcacactgtagaaaaggtattccatcctcaaaaacttatttcctagcaatgtagttatttaaatgccaaatacaaacttccgtaaggttcacaaaccaaccttgcctgtggacatggcgagttcacccaactgcttccatttagattcactctgtgcttctatgacgatagcctgaacagtaaataggaatgagaggtcttataatatactacatccgttctcgaatatttgtcgcccgctagctcatttttgaactaaaccgcgacaaataaaaaagaacggaaggagtatgttactttgtaatttgtagcaatgg

SEQ ID NO: 1743 - DNA, 779 bp, Zea mays
cttgcatgcctgcaggctgtcctgttgaacatcccggtacccgtatcggacaactacccggtatagcctgtattgtttcaggccaatgcgtccgaccaaaaatcgctcctcaggttggacatgtggtacagaaacggatttgatgcataggaagaccagaacctgacgaaaagaacatccatgcactggtcagataaacatcctttagcagtatgttccgaatgatgtaagcataaaagaacattaacataataacatttacatcaagtgacagtaaaaaaccccacaaaaggttgtacgacaagatacctgatgaaatgcagggaggttggtgacaaagtgggagaaaatggcaggaatcccagacacaagctctgtatgtatcaggccaatgcctctgacccgaacaatacccaacgaagagcctaaattcagaagccaacttattgagaccttgttttccacatcgaattcgtacttctttgctgttccatagtgccaaacgcacatcacagtcaagaaaatgaaggaaacaattataggcacccaagctccttcatggaacttcatcagggaagctgagaagtagacagcttcgattgcaccgaagaaaagaaggaaggcaagagcaaatacaacattcttgttccaacaaaggacaatgacgagtgacataaagcaagttgtgacaatcataactgttataaccgccaacccctgaaaccaaaaaaaaaaatagtggagttaacctccaacccatgtgaagttgaagttacata

SEQ ID NO: 1744 - DNA, 810 bp, Zea mays
cttgcatgcctgcagtgaactcaaacatcaccgtacgtaacaccaatgcgaaatatcaattttctcattgtagggaaactgattgatattaacatgacgtgttaacggctttacaataggcacattatccagtagagtttagttgtttcttacttttacaacggctccaagcgaagcttagaaacgaaccaaacgattcattcgcgaggcaagatagcacacattcttccacgccgtaagcatttcactggtacaggacacgaggagagaaaaggtcagtctcttgagaagttcagccaactttctgagcgtaaataagtttgcagttgctaacctcggggtagcagtcctgatgtactatagtttggttgtgtggattaacatgaaccacgcaagatattctcccctgcaagaagccaagaacaatcattaaatccttgttcgattattcctatcccatgtggattggatgagattagaaaaaatataaaagattttgatttgtttgggatttaaacccaccgttaagccatgtggattggatgatattgagtcggtttaaatctatagtaagttaaaatacatctcaatccatttcaatatactatactccaatccacgtgaaattataataaccgaacaaggcctcaatcttatccaatccacctagattgagagcaaaacgaacatagcctgaatcttgattcagaaggacaacacgtggatcatacggagtatacagtgcaagaaaaagaaccaataacgttcacttctggacaatattttaagcctaatattcatccaaatctt

SEQ ID NO: 1745 - DNA, 810 bp, Zea mays
tgacctttcaggagctgctggtggcgcattgatgaactctagaaaattaaaaggattcgttaaacaacatgctatcagaaagaacaaaacagtggtttctaagtagggaaacaaaaatctacctgctccatatgatcatgaacctgtgaaagaacaagatggttacaacagtgcactgattatttgcaatctaggagaaaggcaaaaagaaaaacagagaaagaaacctgatgaccagtagctgtctgatcagtatatcttctatccaaatcactgagaccatctctcctaccaagattggctgagtgttcaccatacatacgcctctctagtggataatcagtgctatattggtctagcttctgtgcataaccacgcacagccatatagtcatcatttggccttgccaggccagaccccacaggtgcagatgagaagttggacgactcagggagagaagttggacgagttgggaaactaggaagacttgaagaagctggacctttgccaccaagtccgccaacctgttgaaaagaatgacaatgttcagttacgatacttggcaacaaaattgtgggaaccacatgcaactgtaatggtacaagttaaaggtcacaagaagtgaaccctaaccataagaagtgactgaaacaacggaaacatatgactggcaggaattgacatgaaagaaaaggtcacttgagtaactaaaacagaggccaaacacagcacaaataaaaaagtatcatagttagcacaaattccttaataagtaaaaataacagacatatcagggacagacatgaatag

SEQ ID NO: 1746 - DNA, 660 bp, Zea mays
atctgcaccttctgctccagctcgccaatgtatcgcatcttgcgctccttggaccgcgccgccgactgcctgttggccagcaccctagcaagcgacgaaccgcaccgcagctcgatcagtccgaagctaaacattttgccagttcgacgggtccaaagaagtagcaagaacaatgggagggagccacgcccacgcgcgggggtcccaaagatttaagatgagtggcattgggtagcggactcttacctcttgacgcgcttggggtcggcgagcgccatttcggccagcttctcgtcggccatgatcttcttcatctcgaccggcgaaaactcggcgctgccgaactcgaggctgaacctgttgggtcccggaatgacgccgctagcggcgcccgtcgcgccggcggagaagttgagcttgccgatgaggctgtccatggagaggctcctggcgtggcgcggcacgggcgcagcggcggccctcttgagcccctcccgcctgtcggcagcggcggcgcagaggcggatcccggcgcggctgtcggcggcgcactcctccgactcgttctcgctgctgtcggcgccgttggtcctcatgctgctgccgcggctgtccccgtcgtcgaggcggtcgtcggaggagttgagcccgtccagccct

SEQ ID NO: 1747 - DNA, 663 bp, Zea mays
gtggtctgtgctatctaccgttacacggtgagctacagagttgtggccacaacattgtagtgtccgcagaggatggtgccgacatggcaagataaaatcctggtccagcaagatccgttcttccaaatgggatcaggtgattggctccagttcctcttcccctcagcaccaccagtccccctctgctcctcctttcagtctcagcccaatgacaaagttctaagcagagtagtgcacgggcagcacggcaacggcatagcacctccctccaccgatcatccagttccgcttgcgtaacgacttcccttcgcaagcaagcttcccgttcagcccagccgcaggccgccgtgctcgcgcgaccatggcgttgctctccgccacttcgcccgccaaggcgcacctctcggcgctcctctcctgccacgacgagccgcagcagcaccaacacgcgctcccggtcccgcacccgcgctgcttcggcggcggcaaggccaggcggcgcgcgcggggcaggtgcgcggcgtcaatgcggccgcccgacgcgtccgtcgctcccgcgcccccgggcgaagcgcggcggaagaagaagccccgggtgctggtggccggcggcggcatcggcgggctggtgtttccgctggccgcgcggcgcaggggtaccac

SEQ ID NO: 1748 - DNA, 828 bp, Zea mays
tttgttgatgtacctcacacgggccctgaaacaagcatggagttaacagataattgtttcaaataataaaatgtgattcattgacaacacatacgattcattaaacttctgccccgacgatgaattaggactgctcccactgtttgtctggcaatcaccaccatccaccacagaagaagcaatatcctccaaggccacactcgggacaaagtctgcaactaaaagtctaatacaccgaacaaatccatcatgtgcagcaaaatgcagtgctgttcgaccactcaagtaatctgccctagtaacctgaatcagccaaaacaaacaaacaacagttagcacttaccttgtcctaactaaaaaatgtagcagaaaaaggtactatcttacgcgccgtcttacattgcatctaaatagaagaagcatctgcaccacctcccagtgcccatgccgacaagcatgcatcagcgcagtcttgatccatcatcaaaacaattgcaaccaatcaacagactatttgatacagataaaaactgtagaatgaacaaaaatataattcctatcccccatgcagaagtgccagaaagagggcaagcccagtgtcagaggctccaacataagtggggtctgtagaagagataaacctagataggccttccccacaaatgcggagaggctgcttaaaactcaagacctggtcagtttgacactttcacgactgtaccaagccctgcccttcgcagaagtgctaaaatgagctatgaaaaaaatcttggttcagctctggggcataggcacaaaatggcataacagattcaggtttttcttatg

SEQ ID NO: 1749 - DNA, 738 bp, Zea mays
tcttcttgctgctgctggttctcaggccctctacgatggctacccgaaccagtcatcagcccagcagcttatgtactacaactagagttcaagaggacggcgttggccatcgtcgccctgttttttattttgtggttcatgtactatttgtgtgagagttcttgatctcttgtcgccgcggaattgtgttactatcttattactgtaccattgaccatttttcttgtgagatccatttgagtagtcactttaacagagtaagagatgtattctatgtgacttcgcgattgattaatgtaatgctcccctgtgcatcggctttggtcgctgggctggttcatgatctggtgctatggtgcggttcgacattgagagttttactcgtttgtagtttggtgttctggttcgtgagtctcatgtgtggttgcatatgttcacctaagctcagaaattcatcgttgtgtccatacaacaagctggaatttgttttgcaatctgagatgccatgagagccctttctggtccttctggaatgtaggtctgtcagtttgccatgggaactgttcactgcccgtcaggcgtaaatcatcactggatgtatcacactgaaattcagagttccagatatgcctgtgaccgaaggttcagtagtcgcaatcccattctgcgattggaattttctgggccgcaggcagatatgcctaagaacatttactgtttaactgggattatatattg

SEQ ID NO: 1750 - DNA, 842 bp, Zea mays
tgcatgtatgaatataatgactagagagcgtgagtgagtgacatagatgcaacacgtagttcgtagtagtagtagattctagctagctagtcagggagagagacaggacatgagagatgcacgcatgcaatgcaagttcgtgcaggggaaaggtcgacatggccacgattctaacgtacgtacagaccgctctgttgaacgtgaaccttccagccacaaaccatatggtttgttgggtctctctctcttttttattgcaggcatgcctcttccgatctctcctgagactttgagctacgagaccatccacccacggccacggcccacccacccacggccacggcccacccacaaacggcccacgtcgatttcgacccgactcgttgcaaccacgacaaatgtaatgtccttgatatttagctacagattttgtttgtttgtttgtctgtctaagctatctttcgtgagctcttctcttagttgcactaattgatcgcctgtccaagaatccaagatcgtcgctcgaaactactatctaaaaaacaggagatattttgacttaagactagccgggcgaattattaagtagtcggagtcccaatctaaaaatgatctcaaaggagttttcaaaagaattgaacttggctcgtttcacaacttacttaaccttcgcggatccctcttaattgtacggcgattcttatgattcaagaattataaacttagtaccgccgacgattcatagcacttggagcacgccatttgatgtggattttaaatccgctgggctttaatacttttatgcttggaggaactgggcttcttctgtctgtagaaatact

SEQ ID NO: 1751 - DNA, 753 bp, Zea mays
tagggttaaatttggtgtgagttccattgttaaactgagaccaaacaggggttagttatgattttggtgtattttacctaattctcagtatctgggaggtaagagtgacttgtttggggcatatggctgctcgttagctcttcatatttctctgcacgccaattctactgtaactggatgttgctattgccatttcattttataggagatggtgccacattggaatcagttccagaccttgtgaaggcaatgtacctaaacgttgaaagcttcccttgtgtgaggctgttgaatctttctggtgaaattggctgttctagtgagtctgcactctacatgtatctagtcttccatcttctgccattactaaagctaacctccccatgccattaagaataactggttattaaaatgacttttatgctgttagatcctggaagtgagaaggtcattgcaccaattgtaagacttagaaaaggcagtgatcaattggttcaaccatctactattctcctttccttagatcagatgtcagatttctttctgaggtacatggaagcacaactgcaattattcacatatttttgagtttatatgtgcgtgtgaaatgtgaggtgttgaagtttgcccttttgccttggtactaaccgaagggaagttaagttttttttccttgaaaagtcatataacctttggggtgttaaaagatgttaacaataatatttggtgctattatcccaggtatccaatgat

SEQ ID NO: 1752 - DNA, 774 bp, Zea mays
  unsure (1)..(774): unsure at all n locations
aaagcaaatatcatgacacaatacccaaaaaagtgacgaaaaaaaggatttatatatgtttgaaaaataaaaaaatgattaactgtagtctgaggctgtctctgcctgtattaatttttctggcactcacctggtcaatctttaagctattaattccattcacagaagcagcgccttcatctaattcctgtaagaatttccgactaccaagataaccccaggcctcaccattaaaaacagcgaacacaagctgtataagaattaagggaaaatgtcaggaagatgcttcttcagaaaccaatcacacgtaaattcagtgagagtgatatgaagaaccatattaaatgtaccactccatgtgtaagctagggtataagataatgagaacattaacaaagataccagtagcttgaaccttacaacaagtataaaagaggtaaagataaaatggtggatatgatctgctgcatacctgctctaagtaagatagaaaagaatatccagcacaatattatggaagcgactaacaaacaaaatttcagtagtcatatcatacctgtttcttaagcttgcttagaccatgaatgtgagaaagagcatcaacagcagtgagcaaagcaatcaatccctgtgaaactcaaaattatccctggcaaataaataatatgaataggacaatcacatacagttagcaaactagcaacttacagatatgggagaatctgaaccaagactacggtcccgaanaaatgatgcagagtcttgagatgcaat

SEQ ID NO: 1753 - DNA, 1240 bp, Zea mays
gccaccaccaagagtaagtcaacaaaaatgacttctaacatcttggcattttgttttccatatttgtgcatatgctgtgcatgactgctgatgtggaatttgtgcattttgtaattagcttaaataccatgatagtggccgagagaaggatgttttgcccagagttggccaatggaacatgatgaataaggtatgcaagcgtcctgagaaatgtagatagaagtcactcttcctgtgatttctttgattgtttttaattttcttatatgctaacttaggtgagaaccatccagattaaataagtgctatattttacccaaaaaaagcagaaatttaacccagcaattgggagaatagttgccccggtaaacaagttcttttgtccaagttatatagtcatggctattactgagcttattgttttgcggtacttattttcctcttatattttgttaggcatgactttttgctatctccttgcctcaaaattctaggatctacctagcttgacatggaaatattagagggattggttttgcattatagcccgtttgaatgtcgatattggagcatataattcaactttcctaaattctgttgtttgggttacacgtggaattgagatttggaatcagagacccatttctctggaattggactataactagaaaccccctctcccaatacaaagcctcacccctcggtattgcgtggaattagactgcataattccaaactccaattcagtgatattcaaacaatagaattggaattacatctcatttcaataccatgtctgatttggtattcaactcaattcaattccatcctctccaatatcgtcatccaaatggagcaacgtcatttgtatctaggtctccaaactatgaaattgtagatgtaggtccctaaactatttaagtatcacaattctgattcaaagcagccatatcatagaaaattagctaatgtggagatgtgctctaccatggaattgacatgttgctctgtagctcatatttacatggtcaatccctaaacctaaaatatatgtgattctcacaaaagttcccaaactatgaaattgcaaatctaagtccccaaactctaatctattgaagtactcagatcctggtccaaagcatctacgtatctccgccgctgcaagggcgacacacttgagacctactcatgtcggtggctactgagcattatcaagaatgagttatgcagggttctc

SEQ ID NO: 1754 - DNA, 872 bp, Zea mays
ccgacggccacggctccgccccccggatctgcggagccagccgaagccccgccggccgtcgtaagcgctccttttctctagcttcatttcttgcttgctttgctgtgccattcttcgcctgggatccagttcagctcactgcttgaccaccgaatactgatcctgtcgttcttgcagacccccggcaaggagttcacgcgcacctgcaagggcctcgtcgtcgtgctcatcggaggatacgtgctgctccagctcctcccttcgtcactcaactacctcgccatcatcccatccaagtacgtgcctacccaccacgctcaaaagaaacagcttttatcggcagagtgccggtggttccccaggacattcctttgacttgtgtctgcgccttgcaggacaatcccctatgtatggaccgttttcactgctggttacatcgagcaagtcctcccaggggtgagcttaattttctcctgatttgttgtctccttagtattttattcaaggtttgggtccaatatcatgacttgaaagttgaagcactttgtgagatcttactgccgaatttggtggcccggtgcaaaatgcatagttaggccctacgtttaagaaatgacagtggctaactcgtttacctttttcctatacaatgcatatatcttgaaaatattataccaggcagtaataatgttaaaagaacagaaggaatcaggatagcaccttcaaaatgaaatcttcaagtttgaaatatctcaaaggttgtcttcatactgagataatttttttcagaactaaaaattggaaccttagacatattaaaattcaggccccggcaacaaaacaactttctttgtttctgcccttcgattaat

SEQ ID NO: 1755 - DNA, 737 bp, Zea mays
ccatgcatggtcgtgtcgtgtacgtccacccgattcatcacctctggcaaactatacgcgtggccatgcatcatcgtcgtcatacacagatggccaacaaaactaagcgggtatttgaatgcactaaaactaatagttagttgattaaaaattattagtggaattagttagctaacaaataactacttaattattaactaatttactaaaaatagataatagttgaactattagctagcatgttcggatatcttaacaaattttagtcactaactcttatctctagtgcattcaaacacccctaagcttccacactttctttgcgaactctaatgtttgtactaacgaataaaatcatacctgtgaggctaacaattttttttatatataaaatctttaaacgcctgcacgtacctcctatatacataaaaaataaattcgtgtgtgggtgggtgggtgtggaggctataagaggacacagtagtattgcacactaaggtatctccagcagcctccctacaccacctctatctcatttttctatttcaatcttcactctgctgagcacacggcctctcggtttgcaaataaattaattactacagacattcaagtcaaagtatgttaagtttgaccatttttataagaaaatgtaacagtatgtatgtcatcaaataagtgcatttatgatgtatctaattacactactctgctgtcataaatacactcatagtctt

SEQ ID NO: 1756 - DNA, 757 bp, Zea mays
acatctgtgattgatggacaaataaacaatagaggaagatgatagaacattcacactcacacatccaaccatgtaaaacatgaatccgaaaaatgaaagctgcatttattttaattgaactaattatggaatccagtttttgcagctaacaaggatacgatgatgatgatgacaacgacacaatccacggatataaacatgatgtcagtaacataatcagtcatacatcaggtaatatttatgaaaagaaattgtatgctccgcatgttttatcgcatgttttatgttacttataggaagataaggcaaaatgcagatgatctggacaattgtcacagcaatgcagaggggctgaagccaggcagatatttgaatccgctgagcacccagcacaatcacagatacacttcagaggagaccccgtcgccttttgtaatcactcacactcagggttaaagcatgcctccttccatcgttgtcaggcactttgtaccccattgtagcttctatcttctgcctccttgccatgtaaccatcaaacaggcccttggctccaccaaattcttgcagagcagacaatgatataggaagctcaaatgtatgcagcatatttgattctgttcccagatccactggtgcattggtatcaatgagcttcccggcatcagctgctgccacttgagctgctgttgtggctgctgtaccagtttgagcccttgctctttgtatcttcattgctaggcgctacattactact

SEQ ID NO: 1757 - DNA, 811 bp, Zea mays
atttttagagttttggaagtttttggctcggtagcgtcttctcctccctggcgtaaagttttaatagaaccggacagccaaacaacatacagttttagaaaacaccacgatttaactcgagtagtgaaaccatgatatttatgtgatctgcaattgcaaattccaaaaactgtagtattgaaaaccttcctaccaaatgaatatacggggaagggtatctttagtcggccacgtaaatggcaacctaagttgaatgtcccgctcaaaacattttaaatattaagtttatgtaccaactcgtttctgtcacttagacaaattcttggatgttgttctaagggctaagtttatgtaccaactcgttttgtcaatctgaggataaaacaaaatatttcttttccaaaaaaaaaacacttcatttcgcagtcttcctagcttttgattgttcacttgccacctctctgttgggtcattgttaatcgaacaatttacaagtaaaaaaaaattcgagcgaagaatcaagtaacgctcttacttacatctttggcagcttgcatcgtcattagacacaaaagtttcgggaatggtagctgcatttgagccttgaatgcttctatcttgtatgatttggcattctctaatgaaatattgttcgaatcacgattccctaaagtatccgcaaatctaaatgggagacagaaacaagacaagcaacagatgttgcactgctggaactggaatcccgcaaaagctaaagacccgcatgctcctatactatacccatagcagacatggccacctgcccgacggg

SEQ ID NO: 1758 - DNA, 799 bp, Zea mays
tcttgcatgcctgcagttctgaaaaatacatgtgttctacgccaaatgagcaaagttttgcaactttgaatgtgctttgaagcagtagtctaaactattcttcaatattgtacccaagagcatagtgtgatcaagattttctcgtgtaagaatacagttacaaacaccgcagagctatttgcagtatataatgcatttaaaagtctccatgaaacacaagcagttatagatataaccatctttataaaaatataaacaccactgtttagaagcagaaaagtttgaccacgcacataacctatattaatggacaaaacatatgagccaaagagctaatctatgcatagggaaaaaaaaaaggtaacatcataaattaaaataataaaaatatagcacgttgaaacaagaaccatatcatgaaaggctgcaaaaagttaacatctgtctcgaaggaccttccagtgccagcatggagaatatctcatctataatgttatggaatcaatcgatacaatgatcagtgaagtaccttgccatccttgacattagtgttgatcttactgtcatgttcactgtcatcagagtagtccaagtcttcttcaatgtcatcttcaccagaatcataagaaccgtcatcatcatcattaatgtcattatctgtggaatattccttatcaacatcatcatcctcagactcggtataagcatctgaagaacaggaacccttcttccaagtcctgtatgataatcagttgaattatatctcatgaacaactacgtgaagtacttcaagtggatc

SEQ ID NO: 1759 - DNA, 803 bp, Zea mays
cggttcttgtaacgcttgtcttgaagaaccttctttatggcaacagtctcacccgtttccaaacacttggcctatgaacaggtcaaatggcattgcaaattaggagatgcatctgattacaaaaaagaccttggcacacaagctatgaaagacctaaaacatgaaaactgctagtccgggatagcaataccacagatagctgcataataaaacatatctaagtcaggagttgttgcaactaacctggaagacaatcccaaaagaaccttgacctacaatgcgctcagccatgtagctcactgtctgcaaatgcaaccaacagatacattattatacaaaaagaaattgaaaaaaaaatcagaacaaatccacaatcttatatgatagcatcatgaatatattggcaatatgtagctcattaaattatgttcttggctttcagctatttgattcaagaacgcactaaaaacatgcacagctgttgataatcaaatgcagtaaagcactcgcctgttttggttgaccattcttgccaccagtagtggtgacaattatgtgcccagtttcggtccctttcccattaattatggttgcttcaacttcctggatttgccattcatgtcaaatgctacatcacggtccaatttttcacataatcttgaagaaattacagaaagcctgaaacaagatgccaatgaatcttaaccttatcatctctaatctttagctcgttcatgtgatcttgcaacttttcggcaccaatgctggtgctgctgctgttcttgtacccagaggggcaacac

SEQ ID NO: 1760 - DNA, 772 bp, Zea mays
aaattcttccacccccctgccccatgaaccgatagtgcttgtgcttgtctctccatagcttgcatgtcatctcgtaccgctgccatcggtagtcgaacaccgtggccgacatgccgcccgaggtcgtcctgacctggaccttctcgccgtccgtgaagatctcggagatggcgctccgcccggagaactgcaaccggttctggtcgtctctgacgtcgcttgcatgcagctgcttcgtgtccacgaggcgcgggccgcggggtcggcgcgccgatctcggacaagcgggcgagcagcaggttggcatactggaccgatttttttgttgtttttttaatttttgtttacaaaaaattacaattggactaacttatttgccgttttatgacttatttgtcgttttaaacccaaacctgagcgccataagttatgtcaccgagctcacacgcctcgacgtcacagtttttagcgtcgagcttatcgacgtggcagcgcacatggcaacctagctccgcgtcacggatcttgacaccgagcttaccgacgtggcagggcacgtggcaatctagctcggcgccacagatcttgacgtcgagcttaccgacatggcagcgcacgtggcaacctagctccgcgtcacagatattgacgccgagctagatcctgacgtcgagcttaccgacgtggtagcgcacgtggcaacctagctccgcgtcacagatcttgacgcccagctagatcttgacactgagcttaccgacgtgacaacgcc

SEQ ID NO: 1761 - DNA, 796 bp, Zea mays
atcatcacgtcacgcgatataggggagaagatcagcgagggctcgctaggtcggttcaccttcgatatgatgctggcctgggagaccccgactccgtcggaccaacagatcaccatggtatggttggtgacttgacatggtatgcggtatgccacaacatgaaaaatgctttgagccctggactgaagcacacgctgaattctacaggagagcgtagcgaaggagagggaagataggaaggagacccttggagaaggtgaagctgtgatgggtgatgagacgtcactgttctattcagacatcatgcctcttcttgtaagcatgccaatgcaaagaaattactggttaccagtgtgtcaatttgctctaagcagccaccaatctcgcaaaaataaaaataataataatattggttaacaggtgaatgaagagccaactgttggggaagaagcgtacgtgtggtttggatctgtgttccctttggcttgtgacgtggtcaatgctcgattcacattcgaagctctcactgccaccacagctaacaggctgcactaccctgcctatgacaggttcctgaaagagatggataagtatgctgcctgctccatgattgcaccaaaaatccttcatctgtcggcactatcgttagatgtattgatgagcattacaaactcaaaatatgtattgatgagcattacaaactcaaaattcttttctaggtccttcaagttcttccaagacttgccaactccgactggagttgaattcgctgaggatgagttcatttttgcacatt

SEQ ID NO: 1762 - DNA, 734 bp, Zea mays
actggatctggtgacaggatactctcaaggtctgatgacgatggtacttgtattggaacctgaaaattatttttgtaataggttgagtattcaatactgcataacatctcaaaacacatcgaaacaaagatgcagtactgtaggaaattacatgatgatgcattgatgcttagaaagatcatcccattcacttctactgatacactattgtttctaagtagaacactcacagcttgataatcgagagcactagcagctgcatcatgaaaactcagaccattattatccaactatttgacttgcatgattagttatcagagcatagttttataatttgcaatcacaaatactggtttaacaaatctcagtgcttgttagagtattgcgagttttagaagtaaaatactgtaattggctttgtcctacctcatcctaacgcctttgttatttccaaatgtaagctttgtaaaccagcacatttcaaaattaaatgtggttttctgagtttaacttttctttactagcaaagaaaattctaaaaaacaactgaagcttttcatgatagagcttattaaatactcccttcgttccaaattgtaatttgttttggctttttctatatgcatagattttgctatgcatatagtgtatatctagatacataccaaaattttatgtatctaaaacaaccaaaatgacttacaatttgggatggagggagtaaaaagaaaatc

SEQ ID NO: 1763 - DNA, 798 bp, Zea mays
actttgacttcttgatttcaattttcaaagatatttcagacatcctggctacacaaagttgtaaatagcttttctgcaagagtggcaatccagcattggtaaaagctgagaagattttacctatcaactatggtcacgattcaggggtaggaagttctggtactttcaggagggcatcaattagtttttcacatcttttgcttaccaccaattcatttactacttttttttttgcttttttttataatcgattgcctaagatccaatgtacatagagaagactgagtatgtttttgttcagcacaatgcaaatgcaaactggtgtgaaattatacctgagcaacgaactgcaattccagttggaatatgaaccatgcgaacagccgtttccaccttgttcacgttctggcctcctttaccgccagctcttgtgaagcttatctccaggtcctcttcaggtatgtccacagccatggattcctctggtagaagaggcataacctcaacaccagcaaagcttgtctgcataaagtagcacatataggagaaaactgaaaattagaaaggtacaatatctttaacctagacaaaatgttgataaatttacagaattagaacagtgcaatgcaaatattacctgccgaagccctttagcattaaatggtgattgacggacaatcctgtgtgtccctttctcgccagagagatagccataagcatatctcccctctagttcaacagttgctgattttataccggcctcttcaccaggtgatttctcaactactcgtgtcttat

SEQ ID NO: 1764 - DNA, 691 bp, Zea mays
tgacaccgaatgcacaaagcgttttcagagtccttgctgagtatcagttggcaaatgagaaggaggaaggtgagcttgttgtgcatatctttgctggaagagttggaatgttgcatactgatactaaacttactttgtttctcaggtatgccagtcagcagtttgtatacaaaatgccgtgagcgctttctggtaagcagccaagtgacattgaatgcacacctgacggagtttaaagatcacgatctggttaagaccaggaagcactctgatgggcaagattgcctccgcattcctcttgtttctgacgcgctggagaagttgctgcaagaattggcttgacattttgcattagcgcatttatttttcatggatgatggatgggttcactgaagtatttgtagttttctctgcccacgtggaactgaaggatcttgtccttattgaaggaaaatgtattaccatggaaagaactcagatgagcatgccattgcatggattatttataactcggattccggaactgaaagcatgttgcatgaaccgctctgctttgttggcttaaactcatgagcaagaaccgtgatgggtatggagcgtgcttgaaggtctcctgcatatgcatcttaaacgctcagcagaatagatcgattgtcttggttatgcctcttaaatttgaattgacgacttt

SEQ ID NO: 1765 - DNA, 754 bp, Zea mays
ttgcatgcctgcaggcgatggccggcagccccgccgcggcgcggcagtgggtggcggcgaacgtgcggccctacatcccgggcacgcgcatcacctgcgtcaccgtgggcaacgaggtcttctccggcaacgacacggccacgatggccagcctcctccccgccatgaaggccgtccacgcggcgctcgcggacctgggcctcggccagccaggccaccgtctcgtcggcgcactccgtgaacgtgctcgccgccagcttcccgccgtcgtcgggcgcgttccgggaggacctggcggagtacatgaagcccatcctggacttccacgcccagacggggtcgccgttcctcatcaacgcctaccccttcttcgcgtacaaggcgagcccggggccggggccggggggcgtgtcgctgccgtacgtgctgttcgagcccaacccgggggtgcgcgaccccagcaccggcctcagctacgacaacatgctgtacgcccagatcgacgccgtgtacgccgccatgaaggccatggggcacacggacgtgggcgtccggatctcggagaccgggtggccgtccaggggcgacgaggacgagaccggggccacggtgcagaacgccgccgcgtacaacggcaacctcatgcagagggtcgccatgagccaggggacgccgctcaagcccaacgtgcccgtcgacgtctacgtgttcgcgctcttcaacgagaacatgaagccagggcccacgtcggagc

SEQ ID NO: 1766 - DNA, 727 bp, Zea mays
tcgcggcttgtcacagtctgccacggcgatgctatctattggtaaatcatcacaattacatacagtggcctctttttgtttttaccttctcgtagactgttaaactgtaccagtaaagttaacatgtggagagaaaaaaaatatatatattcaggcataagcgtcggtgtggtcatagtggccatagccgtcacctgctcgtatttgatccgcgagaggaagaagctggccgacatcaagcagagatacttccgtcagcacgggggcctgctgcttctggagcagataggcagcagcgcgggcgcggggcaagcgttcacaatcttcacggaggcggagctcatggaggcgacgggccgattcggcgacgagaacgttctcgggcgtggcggccatgggaccgtgtaccgaggcgcgctcaaggacggcactgtggtggcgatcaagcggtgcgtatcgacgacgacggacgagcggcgcaggccggaaggagttcggcagggagatgctcatcctgtcccaggtcaaccacaagaacatcgtcaagctcctggggtgctgcctcgaggtggaggtgcccatgctggtctacgagttcgttcccaacggcacgctgttccatttcatccacggtgggccgctgcgacgccccgctctccactcggctgaagatcgcccaccagtccgcgctggcggttggactacctgcactcgtgcgcgtcgccgc

SEQ ID NO: 1767 - DNA, 749 bp, Zea mays
aagaatggcctcagattaatatgtgccgttaagtttgatgatataccgattcagagaaaatcttagttgtacgatctagtatcaaataagtgaacatgaaaacaagatggctaacgagtggagaagtatatcagtaccaatctacaaaaaataagggagatattcaaagctgtactagttaccaggcagtaaagttgacgagccatacatgaagctatggaagaattattgagcattgtctaagagaaataacaaggatctctatgaactaatttgttttcatactcaaaagatcaaccatgtaagccattttcttaaaaagacaagtgatggaacagtatagggagcaaaaggacccacataaggttttcattgatttggaaaaggcttataacaaaataccaatgaatattatgtggtgggctttaaacaaacataaagttccaaaaaagtatgttagactcatttaaaacatgtacaccaatgttgtgactagtgttcgaacaagtgatggggacacggatgacttcctgataagaatagaactacaataagagtcaactttaagcccttacctttttgctttggtaatgcatgatatcatacgggacatacaggaggatatcccttggtgtatgcatttttgcagacagtgtagtattgattggtgaaagtcgagcaggagtaaataagaaattgaagttatggcaggagactctagattctaaagggtttagacacagtaaaac

SEQ ID NO: 1768 - DNA, 802 bp, Zea mays
aggagaggagactgctcgctgctggtgggttgctctgctctagcgcattccaccctccattttatttatgctgtttttgctctgcaaatgcaggctggtgcaacgcaactacgcaggactcttcctcctcccgaaaaccaagtcaagtcaaaaaaaaaagtgtctgctagtgatttgcgagtctgcgcacgtgcctccgcctctaatgaatgatacgtcacacatgacggtgtcatttgcaacttttaaattgtatgcagaaagagaagaatgcacaggagctctggtagcagtttcagagtcaaaatttaaattgcaaaaaatctggctctagtaccaggactcggtgcgactccttcgattgcattgcatctagtctagtatatcacaccaaaaaaagacaggcttccttcgattcaagagtaaacaaaccaaggggaattcattcatttagatccatccgatgcttcgccttggcttccagctcctgtacattgtctttgccatgctttgcttccttatcaactccctctgtacatcacaatagcgagcggacccccaccccccaaaagacagacgaaataacccatatctcttctatcccatcaattatgacactggcacagccttgtacatgtatgacgttccatggaatatagtcaagtgcgccccattaagataagctttcagctgccaacaaaaaaaaagaagcaccaacatcgattagatttacattcacacacacaccatttaatgtgaatgggggcaagcctaaccctcttcgggagagattctagagaag

SEQ ID NO: 1769 - DNA, 790 bp, Zea mays
atcctcaacgtgcgggtcgtgggcagcggcgaccgcgtggtggtgctgtcccacgggttcggcacggaccagtcggcgtggagccgcgtgctcccctacctcacccgcgaccaccgcgtggtgctctacgacctcgtctgcgccggcagcgtcaacccggagcacttcgacttccgccgctacgacacgctcgactcgtacgtcgacgacctcctcgccatcctcgacgcgctccgcatcgcgcgctgcgccttcgtcggccactccgtctccgccatgatcggcatcctcgcctccatccgccgccccgagctcttcgccaagctcgtactcatcggcgcgtcgcccaggtatgcggccgtatgcgtatgaatatgatgcccaccgaatcaatccatccatcccgattcgatcaacccaacccaacctctggaagcaatttgagtttttttttaaaattccgggcacaggttcctgaacgaccacgactaccacggcgggttcgagctgccggagatccagcaggtgttcgacgcgatggcggccaactactcggcgtgggcgaccgggtacgcccctctggcggtgggcgcggacgtgccggcggcggtgcaggagttcagccgcaccctgttcaacatgcggccggacatctccctccacgtgtgccgcaccgtgttcacaccgacctccgcggcgtgctgggcatggtgcgctccccctgcgtggtggggcagaccacccgcgacgtttccgttccggcctccgtcgccgcctacctaaaggccca

SEQ ID NO: 1770 - DNA, 784 bp, Zea mays
attgaaaaaagagggcaagggttagttcaaattgaaaattgtataattttgtgagagcctgggaagcacaaatttagccctttcgatatatgcaagctttacctttgtagtaagctttcgaacaccaagccctccagtcttgcctccaaccttctttgcgccaatgggcttcttcacagaagtggcaaaggtggaatgagtagcggcctttggtgaacgaggagcagctttgggggacttgggctcatgcttcccattcagatcctctgccggtggtgctggcacatctgggagtttgaattcagggaagtcatcggatggcggcttggaagcctcagatgcgacaggtgaggatggcagggcattatcggtcgtggcgctcttagcgacctccttggtaagcatctgcctgtaaagttcagcggctcttgatgtgtattttgcctcaaccttcccgccatcggtccatccatgctgcttgaagaaagcatgtgcccggttgttgcctccgaatgccatcatcttcagctggtctggagtccatgagtcgaggttcgttgacctgcgaaagacacataaggttttactagttagtttgcccgtaaattgctacgatttctatatatcatatatgtagaccttgcttaaatgagatatttatttaaacatgattataattttttattttcaaattattagtatagatataatatctctcttttatataacaaacacacacatggtaaatgtcaagcgctctgtctcgagcagccacggttcgaaa

SEQ ID NO: 1771 - DNA, 715 bp, Zea mays
agcacgagcgggtgtccggcgtccagcactccaagcttttgtcttgtgcccgttggccaaccctagaagcccacatttgcagcccagctccaacagcccgtcaacaaagacacatctaatctggtcatcccagttcaaatcggacaactagtcgtgactaaccgtcaactaatcggacgactagttttctagtcggactaatcacatcggtgggtctggtcggatgtagtctaccgattaggccgactaatcacgattagtcggatgacttgaaaacactgcgagttagtattttttttccttcctttgaaggtctttttcatttctgtgttttttctggccttgctcagcatggtcttcttgtaagatggttccttctctcttttatataaagacgtgcagcgctgctgcgcatttgagaaaaataaataaatagaattgaagtaacactcccaccttcaacaaaatatccatcagattaagcaatggaagaacataaatagaacataaggtgtctatcctttttcctttgtgactacacttagcaatatgtaggtgtgaacttgaaaagttgaaatattctggtacaccatgataaaagcattacacaactttttttacgcgaaaaatattttatctccataaagtgatcaatctaagcaaagagcatgggtaaactaacaaagtaacaagcacagttcaaaagggtagttta

SEQ ID NO: 1772 - DNA, 777 bp, Zea mays
tcaaaaggggtaaaaacgaatgacacttgtaaaggaagcacacatctctagcagatgggactttcctaacctcttcagctgtactagcgactgtatcaaagcctatgtatgcaaagaagacagttgctgatccagcaagcattccatttactccatgtgggaaatacctagaaagttcagatacatatgagcacaccactaattaaaccccccaatagaaaggaagcatccaggcctttatgcattacccgtcagaaaccttgtagcccacccatcctatttggaagccaatataactcccagctacaataacaaatatcattacacaggcattgagaactgttacgaccccttgtgcaaatgaactctgcaacaattcaaatataatagccataagtggttctgtatttttggagaagaggaataagaactcaacttatgaaatcgatcaaagtggcaacctctttaattcccacgcatagtaaaacagtgacaacaaaaacaagagcggctgcacagggatcaacaatgatatcaaaccatggaagctgatggcgtgctaaaatccatggcacactatcctgtcctccaaaaaacaaggcctggaaaaataaagaaagttcatcaaaccaggccctatgattcaaagcattgactgaatacaattaaaacaagctagatgctagacaaatcacacttactaaatttggagatataccacggggcaacagcagacccaccaatagtatattccagcactagagcccagccaatcaa

SEQ ID NO: 1773 - DNA, 791 bp, Zea mays
tgctgatagcatggcaatggcatgcagtactgaaactggtagtactcgcacccacatcagtcttgcatatgcatgcgtcgcctgtcttcttcttcctctggcctggcctggcctgctctgctgtgtgtcctgcggttgctgttgctgcacctgcacccccccgacccgatccgatccatcgccattattctattctattgctctctcgtgcatgctgcatcaccattgccatatttagtaaccaccatatcccatcatgggcagaccccacctcgtgccctagttactagttaccccctcctccatccgccggctccccttccgcaataaatacccggccggatatgatgatgatatcagaggagggacagggaattttttttttcacaattaataatatacaagaaaacgcatcatatattcatatagagtactgtcgtcgcttgcgtgactatactgctcctttgcttttgtctttagtcacattatttctaacttggtcagagttaaacaagtctaacttaattaattacggataaacccgccaatgataggacgacgatcctccgtgagattgagacaaagagaatgacaaagtcatggatcaacatatgtgtacgttgttgacatggtttttagtcgcatcgaagctacgcgctatgccttttttattattataaaggaatcatttttattaataaccaagggcaatacttcaaagagatgcaaagtcttggttcaatttccggcttctattaaacacatattacacaaccatgttacaaaagaat

SEQ ID NO: 1774 - DNA, 796 bp, Zea mays
atcttgcatgcctgcagagttctagagaaacataacacgtatgtatgggagagggagacgcctcaaaagttactaaaactaagttgtacagagcatctaacatgagatctttaagcttttgaaattgtgagaataacactggattttgctggtggtacttatggcacttagatatattctttactcctgtcgttacatgagtactgcttttgtctttgaaataatttccaaaatatataacaaaattagttttagccaatctctgttgcaagatttatcataatgcaatattaacttgattcactgtaagtttcttagctacattaaatttgtatcatctgtcaaacacatcaagtgctggaggtattcatttttcctttagacaaaacttgtcaaacacgttggttttgcttggacaaaatattgaggacatatatactttattttttttttcagtatcaacgaaggatttcctggaaaggcctctagcaggttctcaagtacagttatgcttgctggaaacaaatacgctcaacagttggtctcgtattgatcctggtacattccgggtccgtggagcaaactattttaggtaaatgtcattcttgcagtatcaggtcatacccatcatttatttatttgaaactcctggatgctttatgggagtgatcttagttttgaatgcacttttccagggataagaagaaagagcttgctccaaattatgctgcatattatccatttggagtcgatgtgtacttatcaccacagaaactcaatcatatatctcgatttg

SEQ ID NO: 1775 - DNA, 770 bp, Zea mays
ccagtctgaacgtttaggtgttcctgtaattgtttgccgtgtgtttacatcttgtaaggatgacttcaattcttctatttcatgcctataggaatcccgttcagcttgtgcagcagatagctcgcctgctagctcagcatgttgctttgatttttcagaacactccttttttagcatctctagatcagccttcaacttacgagagtggcgttcccacatttttgcctcatcacggagctcctcaattgtttcttcagcagcttcaagaagatctttagatgagtcagatgcccccatagataattgagaaaggccatttgaaaatatttttggagtattcccttgcagcaaatttgggcctgaagcccgagaactaaaagatgaattattggatctaagcccatcatcgccacgaccagcacttacataactagcataggaactagcagaatcctgccttcccacataaagtcctccactagagttgtctctaggagagaagtttgttctatccgcagtactatctccagaattagaactccgatgggaccctggtgcagagaaacttgtttcctgcaaaaaagaaaaagctgggatagataatcagcatagcacataatactctgatagagcatgacatgtaacccaaaaaaatatgtcacttgctgctggtgaaattgcagtccatatagaaaactatacccccaatgcgaggagccttgcaagaatccccatgcaaaaaatctttactgcctaaaaaggttttcttt

SEQ ID NO: 1776 - DNA, 809 bp, Zea mays
tcgcgctggagaaggggatcagatccctggcggagttctgctccaaggcaggctggcagggccgtccgccccgctcccacaggatgtcaagaacaagatccccgataaccttagcagcaccagcatcgcagacgcctgcctgcctgtagattttgcttctccagactccaggggcattgtattgcatgcacatcttaatggtgatgaactgatgatttgacctgcaaaggctttccttcacaggaagaacaaacaaacacattccagcaaagcgaatccttttcacaggaacgaacacagggatgaggcggatgatttctagctttgcgcatacattagctgatcttacagacatgtgaattatcttacaggaatgagattagattccaggaatgcgctagcgaagacataaaaaaacctattaacaaaacaacaactgatgtaacatttacgacgattcaatggctgcattcgccctcggagtctcaagttaacgacgagaaacaaaagaagggacgttatcctccacattcttctacatgccgacttttcagctgcacattaagttagctggctggatggagtaaacgctttttcagaactgcacgggttcattcttttcccaggccgacgcgtcaatcatcaatttctgagtaaaactaaaaggggtgccccatcaactaatataatatgccaaaaaaaaacccggcaagcctctttctcaccaacggatggatgtcatgctaactgctggatcaaaaactcgaggtgcaaaaacaaatggagggctaatccatgtaaagcttggg

SEQ ID NO: 1777 - DNA, 790 bp, Zea mays
accctgcacaaatcaagcacctttaatacaaattacaaaacagaaggttcttttagctactggttggcttcaagaactggcaaagctacatttgggcttcaccctgtgctggaaaaaaaaagatatgtggccaattggtttgtgatttcagtccgtcacaatatatacacacacacacacactgataactagattataaatttgatatcatcagcctcctaatttactttcatattccattcaacttggttgtgagattcacaaaatcacaagcatgggtggataggccaagcaagattgactaaattaaataagttgaaacacaaaacacaaaggcggttttgtaagtacttagggagcacaatattcatcctttcggatataagtaaattttcatatttgaattataccttgcgtagtcagatccatgcaaatggcttgcggccaaagtagctgcatcattccaacacccagcatcttgaagctgaaacagaaccaaaaggttaatgtggttggacccatattcagttcgattcacattacgatcaaattaaattttacaaaaacaaatactgcaataacaaaaaaattgatcctttgaaaagttacaactttgaagggcatattaattggaaaaagtaagcattctgtaaatggggattgattgttattgcctctaaatcccagctatcactgtaaaggtgaaaacaatggctcattatttaacaaatatttcgtcgaccaaactaagagtaaccaattttggtcatatttaatctttcagagctaa

SEQ ID NO: 1778 - DNA, 833 bp, Zea mays
gtggaggagcttgttcacgatgccggtgcttagctcctcgatggctctcctcatcttcttggtgagaacgtcatccccgatcttctgtaggcacttctcgagctctgaggctcggatcctgtcggcatatgacctcagcttcttgatggttggaacggtctccagcgagtcccgccatgcctcaaaccgtttcagctcttcggcgatgattgtttgtgcctccatcgccttcctgagacggtcttccttgttggcttccaccacctctttcaggtcgtcgacattgtatactcgcgtggagtcaatttcagagacacacgcgctgacattccttgggacagatatgtcgacaaagagccgggcaccacccatggcatcggaaattgtgggaagtgcatctgcgtgctcttttgtgaacaatggggtttcagatgcagtgctcgtgaataggacatcagcttcagcagcagcttcatacatctctgaaagaggcctgtacacaatctcgatacctttcatctcctcgcggatggcatccaccctttccactgaacggttgaccacgaccaccttcttgcatcctttggcaataagatgtttgatcactagttttcccattttaccagcaccaatcaaaagcatcctagctgaaagggcttcagactttggaagcttcatcagggccaattcaactgccgctgaactgacagaaacagcaccagatgatatgttggtctcggagcgcacacgctttccagcagtaattgcatccttgaacattctgtcgatgttctttcccaggcctccactattttgcccacttctcacaactt

SEQ ID NO: 1779 - DNA, 741 bp, Zea mays
aggaatcgattctgcaaattcttgtgatgccacagtgttcttatgaaactctactgtttcagcgcctccattgtggatgtgttgcttcaaagaactcttatgatctacttgacagtggaggaattcaatgtgtcacttgcatgaaaaattcagcagctcagtctgtaagtcccttttttgtcacattattcacctttacatttcaaatattctgattatatttttctacaggcttctggacaagtggttccaaagctttttccatgtccaaacaatctgctgttttttggtaaaagcgacgagttattgtcaagtagaaaatttgaacaaccaccctctcttatgttggattccagaaatgatgatattgctattgtaaataagagtagtcacctgttcatgataagcggcatagaggctggacagagcagtaacatcttgagacaaaaagagatagagaatggtccaaggcagattaaatgggaacaaccaacccttaatattggggacatgggaagacctttactaactaggtctcaaagtgcattagagtcacctcagtgtactcgaagagatgacaataaggatccaactacagatagcacaacaagtgaatcgtttccagaggcatgtctgagcatgaacctaggtattgcaaacaatggaaacaggatggaggctacttcaacagcggaaagacctatgctatcgccaacgacagccattgctgagggaagagaa

SEQ ID NO: 1780 - DNA, 758 bp, Zea mays
attctttctgagttttgcacctgaaacacaggtaattgcagtcagcaccagtgaacaatttgattcatttggaaaataggtagcaaacagtaagcagtgtaaatagagaaacaatgttagtcactgccacacgacaatatcctattagtgaataattgcagtgagacagatttcttttgcaggaagaataaatttcattcccaaatatgaccagggacatcgtgaattactagtcgggacaagatcccatctacaattcatattaatccaacctagatgtggctctacaaggtatggacctagctgaccaaaaataattgatcaaaaccaatgctatatacaaggaatttgttttcctcaatctaaacaagaatttaagaatttcaacagtaagcaatacaagaccatatatttgattagggcttcttcaaatagtatgagaaaccaagaaacaaattgcaaattttgtgaaaagaacagaaaacgaaatgcaaatcttaagtcataaacagagacaaattatatttcctattttggttttggggtacctttttttcttctctcagatacacaggagagttgtatatcattgcattaagagaacttaaagtacaacacccctaaaaacacacgacacatacatgcacacagatgcatgggtggtcgtcctttgtcttataaactggcatgaatgtaatctcaatttctattttgggggtgtgttcgtgttttgttgtacttgtttctcttctcctttt

SEQ ID NO: 1781 - DNA, 800 bp, Zea mays
acccggggaccctctagagtctacctgcagctgtataaaattttcaggcaagaaagttcacttactaagcaaggtacactcttgctgaaacacactgatgcttttgctcgaatccgtggattcctgttcttgaggtagggctgcattcttggtaacagaagtaaaggggagatccaacttgtcatcgatgtaagagctgcctcagcagcttcacagacaaaacgcttatcttgtgaagcctttagaaacagctgcactagctgtgaatgcagcagttgacagaaaggtattttcaaagaccttttagctaatacaagaaattttaaatgaatagcgatactcaccagtggatcaatagactcaaccagtaggtcaccataggccttaaagatgtcagcacaagtcatcagtgctgttttgcatacagcacttcttgggttcttcacagatttcacgataagaggaactagaggctccctgcattcaaacagtttgtgctaaacaattagcaaaggagatatgatattctctgtcattggcatggataagtggttccaaaagatatgtgaagaattttccaacggggaaacacatttcttgtgcatataatatgatggaaacaacttacagcagctcctgcaatctttccttgtgatacatcgccaactgacgaacattgttgagagcttcacatgtcataacccagtcctttgaatccaaccttttaactaaggtctgttgaaaaagtagaaacaataaaacttagctttgactagaactaaaacaaagagaaaccaatc

SEQ ID NO: 1782 - DNA, 705 bp, Zea mays
agctagctgaggagaagctagctagctagctagctgctatggtagccactgcttttgggccgcgcgcgagggtcaaaagcgcgcgcgcgatgcggatgccccggccccgcgcgcatccagcatactagttctgcatataccgagtgtgcatagctagtgtcatcaggtccacacaagaagaattggagatagagaaaatgactggagattctatgggggacatgtgcagatgtgctactagcagactcagacagcagcagcagcagcaacaaaaactattaggaacagcacaacgacatagccagcagctagccacacacagtagtaaaccttaactcatatcagccaatagcatgcagcagcaagttggtgacggtaccatgcatcatatatactcctggtgagcttgacgtaccggccaccggccactatataaactggccatcgatcatcagctagctagccagcagcaggtagtaccttggccaaacgacttagctatcaagctcgaccgaagctaagctaccaagctagtagccttcttggtcacgtaccggccgttgttgattgcagcggtcaagcacacacaagctaggcagctagctagctagagctagggtcgtcggatagatcgacatggccggcagggacagggagccgctggtggttggtagggtggtcggcgacgtgctggaccccttcgtc

SEQ ID NO: 1783 - DNA, 840 bp, Zea mays
tcttgcatgcctgcagttggtatgaaaaataaaaggcttactatttgcttagtgttttgtcttttcatgggtggaccaactcagcttgtaacctgacatttcttcaccttgccatctcatagatatgtgggcaatgggtgccataatggctgagttgttgacactccatcctctctttcctggaaccaggtaatatggttgactgtgcatgctgctaaagcttggcactcacaaatctgttgctcaatttgtttgctgctttcttgttgttcaacttaatatttgacttatctctcaaatttaatgtccaaccttgaacactttggttccaaaatttagtttcttttggttctttgtctctccagaaaatacttttgcagacccaacatttcgattaaataattaagaatatctattttcttgttttgtctcatcatggctattctcttaccccttgttttcttaatttactatttagtgaagctgatgagattcacaagatatgcaatgtcatcggtagtccagatgagcaatcttggcctcaaggattgtcacttgcagaagcaatgaagtatcagttcccacaggtcaatattcaccagttccttttctctttggtaccgcctcaagtttttttttaaaaaaacatgtattaacctagaattatgcagctactatatttggatctaataaaatagattaaataccagaaaactacaacatgccccagttctgtgggtgttatatcaagttagttgaagttatgtgaaaattatttttaaaagaagaacttttaaaaacaaattttcctgacatttaaaattttgtagggttaacatc

SEQ ID NO: 1784 - DNA, 715 bp, Zea mays
agaagaaggtagggatgggatccacctcgaactagatagggaggaaagagagagaaaactaagaactggagaattcctatttttattttcatgaaatccagtttccaaaaaaaaaaaaaaaactgtagtttgcacacatcgatctgcgttggaaaaccaggcaaggattctctggactaggcagtggcgcagtgaagatatatagcggtgatcacaaaccaagaactacaatactcagacaagaaaccacgaagaaatggaaagagaaaccgagtgcaggcatgtgactatgtgagagaagatatatgctcttgctgcaagcatccaactcataaaactccaatcgatccagacgagcgagcgagatctctggcaggcagcagacctgtacgcagtgtgcatggacgaccggagtcagaaggggggagttgcgtgaattaccgggcatagtcctcttcttcttgggcggcggtggctgcgccgccgcggtcggcgcgccttggccggacgccacgccgggcagtgccgctgccagctgctgctgctgcggtgatatcagcggcttattctggtggtcttgctggtccccgtccctaataccaaagaacgccggcgccggtgaattctacgccatcatatcctccgattatctgcggaccacccgtcatcgactgcaggtctcatcgtcgtcctcgcgtaacagcacatcttcagg

SEQ ID NO: 1785 - DNA, 739 bp, Zea mays
gcgcacatgctgcaaattccatgattgcctcacattgaacacgatagttcatgcaaaatacactatctaagccatggaagaactttgcattccaaaaatcttggacttcgctataagacaatagattcttcaataatctgggggcagaccctgtgtcggaggctcccacatgagtggggtccgcggaagggatcaaccgaggcaagccttcccctacaaatgcggagaggctgctttaaacccgcgacctggtgacttagtgagacagctcccaccactgcacctgacctgcccttcaacttcaataatctggagttaacaaaaacttggcatctcaacatggaacagtaaaagagagcaaggtgtaaatgtggtctggagggagtaaaatactagtgcttcctagtttttaagtaaagaataattgttctgagataaagtgtcaattgggcatgacactataatcatatattatagtcatatattagaaatgggcagccatctatccctgtcgatgcaaaagggcctctagctaagttgcttaggtgatctgtatgagtagcactcctcaaatgttgagttcgactccccgtggttccaaatttcaaactggggttaaaaatccccttgtttgtcccacataaaagcacagtctaaggacaggccccagtcgtggtcgttctcgcatgggctacaatgccattgtgtatgagtggggtagaggttccaaggttttctt

SEQ ID NO: 1786 - DNA, 825 bp, Zea mays
atggcgatgagatcccttctttatctaggaagaagtataacgtggcaccttcacgctcaagtcagtggcactatggtcctcaaaccgcactgtcctcaaggagacccgactatggtgatgagatcccgtcactctctcttcactatggttaccgagataggacccatttgcgttctggtaattggtgccatgatgctgaggcacgtataccgtcaagataccagcaaggtacttctcatggcaatggtcactcaaggaattgtttttccaggattaataccaacgagcaagccaaagttatcacaagcaaacatacctttgcaaaacctaggatgattaacagaaactgtagtgaccaacataggatcaatatgaaaggtaatcgctggagaaattctgaggatttaatggaccaagttcgtgggccgagggcaaataaattgaacaatgcttcagtatcctccactgtgaaagatatcacaagtccattgatccgtagaaatcagtataatagatcagatttttcagttcaatataatcaggccaagttttttatgataaagtcatatagtgaagatgacattcataaaggtatcaaatacaacgtttgggcaagtacaccaaatgggaacaataagctggatgctgcataccatgaagctcaaaatttaatggacagtggggaaaggtgccctgtcttcctattcttctcggtcagtaaggataaggataaaatgctttcttcaaattatttattatctttttgcctgtttgtaggttgtaacagttgtacttgtagcagcaaagactactatgatttgtata

SEQ ID NO: 1787 - DNA, 714 bp, Zea mays
ttttgactagaggacatcatcttcgtgtagtggttagtgtagattgtaggacaacataatcgcatctatagaaagcatatgttgcagccccttggcccttagactataaatatgtagattgtaggacaacatatcccaacccttagatgtgtatgtcattgtgtagtgtttgaagaagtaaacaaaaattgccccaacttgtagtgccatccttttaatgagagtaaaagtcacgttgcttacaaattggatggaattgaaaaaaaaaattgaagaattttgacttgttagggatttaaacccactcaatctaacccactcaatctcgtccaatccacatggattgacatcgaaacgaacagacccagtctcaacatctggcacggtagagtttccactgcgggcgatgttagactgtttgtatgtgtttgagtgttatgggccaagagcccagtccatgtaacccactagggcactagggttgggtatataaaatactacagcccactatcaatgaattagggttttcactctccaacggaaactaatattagttaatgcttttcctgtaaaattaccaaatgattcatcacttttcatgtaacagattctttttagcttctatgttctcccaatccccaatgtgttaatataagaaaataacttcatttgccaaaaaaaagaacagtggggtatctaaaattcagaacgata

SEQ ID NO: 1788 - DNA, 714 bp, Zea mays
agaagatgtggctcggtaatgatgacagttgtcgagacccccttatttgtggaccggattgtttcggaggtttgggcatctgccggaggcaggacggaggtttaagctcgttggtgaatatcggtgctgccttggtgctggctcgcatgtggtgtgttgaggcttggcaatgacgtcgtactgcaatcttcctccttctgtgctggtgtttggatgtaggcgtcgtcgtattttgtttggccatgtgcggctcgtcttgcggagtcggaactgattgtcccttaggtcaagctcggcaacgataactttggatgagttatgtgtggggtttctattgtatgggttgttcatgcattctgtataggttttatgcccgattttctttaaaactgattcaattctattattatttttaattgaaaggcaaaacccttgccgttacgtttcaaaaaatagcatgtgtatcaagtttggcaaccgatgaatcagtgacagtgatcgtatgacatcaatgtgggatttttaaaattttgaaaagtgaaatttgtgtcatgtcaaaactcaatctttcaaaaggtttaccgggtattttacctgaaacttgaagattacactagtttctaaatgcctggctaaaattacaaaagttattagggcatgtttgtttccttacaagattatataatccaccttaccttatatagattatacaat

SEQ ID NO: 1789 - DNA, 800 bp, Zea mays
gctccttaattaaccaacagcctatgctgatgatagtgtgatagatgatgtggtttgcatatcatagtcctacacctgtcggaatgtctcccgcttgatgctaagctctcagcagctagcagatgagtaggtttatttttgcaaggttctcctagcttttgtgtgtatggaaggtgatgcaagcatttgatatatactaaccttttgctgaatattatagttaaggacttaaggtcgacatgatgtgtacatgcatgcatgtttggtatagttttgttaattcgtccttctcattttaaaagagcacttggggtgtcaatgtgtcatgtatgcactcctctggaatttccaactggggctgctccccttcttgttgcttatctctaattttggctggcctgtaccaatttctgatatatatccacataatgttaaaaaggattgcaaaaaatgtagattttgtgaggtattccttgaattttttttagtatatacagatttaattaagtccaacatgaagcatgaagtgttggactttctaagaaggcatcctttgataattgatagtgcgatcttttccctgacagaaaagagagtaaagttcgacagcaatgtggccatttgaaatccaaacacatattaatctgaacagtataatggataaaaaaagatagtttattcaaaattcttactcataattttttaactttactagtttttctagtaattaatatgctagcttttatccatgactatgatagctttagggggatgttcctgtacagtcgggggaagaaata

SEQ ID NO: 1790 - DNA, 810 bp, Zea mays
cctttagagtcgacctgcagccatgttatctattttttggatgtattctctgtcatcacatgcatttttttgagtaaccgcttattagaagcacttaacacgattctacttttacctagttggatagatgaattatgaaatcattgttatctcttttctctggccccatcaatatagaatgagtatcatttctcttgctgtcatatcatagatagctctaatatctatctatttgtatggcttgtaggcctccaaaggagtcctttcatgtgcttcccaagaagtgcgagatttgtacaaccttttggaacatgagtttctacctctggatcttgcatcaaaagtgcagccacttcttttgaggatttcaaagattggagggaagctttcatcagcttcttctgttcctgaggtcaagttatctcagtacatttcagcattggagaagctgacaacattgagagtgctacaacaggtcttaattaagttctgctatatatgtttgtacataacttgtaaattgctatatgttgcaataatgacttctagtgtttctcttccaatttcaggcctcttgtatttttaaatccataaagattgatatgctctcaagaatgattccattctttgacttctctgtcgtggagaagatttctgttgatgctgccaaacaaaattttgttgctataaaagttgaccatttatcgggagttgttcagtttggtactgtggtatgtggtccttactgtgtccatcaattctaatgtgttctagcactgaaattatctgttcacagttttctcttgggtt

SEQ ID NO: 1791 - DNA, 742 bp, Zea mays
ttttctccatttcgtggcgctcctttaactgttcattccgtgccaattccatgatggcctccttagtaagctcctgcaaccaaacattcaggtctataagaatatattgaagaggtttaaaaataaaaaatataataattaaagttctagccaacactagaatgaggactttagccaacactagaataattaaagtacaattgcacctgatatattcccttcaatgagacaaataattccaagtttatttggatcataaataaagaattttttacataaatttggtcgaacttgagattggttgactgctcgaaatgtaagatgtacagttattttttagcggaaggtgtactatatgattcaaaatgaaaatttagtaatattgtacccttgtaccatcaaattttagtccatagccaaaataacattcaattatccacgaaccatatcaaatatttacggtgtgtttggtttgtggaggtatcctatgcttcatgaggtgatgcatcatgagttcatcccataaattttggtggaatcaactcattcctcatgtatatactaattattagcttatgaagaatgatgtgtgatgggtcaactcattttattccacaaagcaaataaaaaaatgtgtgagaaaatctatatagcatagggtgactccacaaaccaaacaatacccgtaaggcgataactgcttacccccttcaacaacgacatgtttttttccctgccttat

SEQ ID NO: 1792 - DNA, 760 bp, Zea mays
actcggatgttcatgtcggcgataaaaccattaaagaaaatgacagggcggtcctacttgaagaaggtgaatctaaaccgccatcgacaaaggcacccaacatgtctgccagagccaaattattacggtagcggactagattattgatgatacagtaacccatcacaattatataatgcagcacacacagtttgatgtccctgtggcttgtgacttatgaggtgtaggtttattacgttggacgagtcctttcttgttggaaaccgcgccacactgagagccatgtaagcttgatcgttggattaatgatggcacatgtctgttctagcagctgtggctatatatacgtggtgactcatggtccctgggttatttgcagagctgaattcggcattattcttgtttacttttacacctgtgatcggaccaacatatttgcagagagcaagaaggtgagactgaagacgttcctgtgaaattgtggccttgctatgcttcagatattcatcatttggttaaatgtggttatagaatgtttcagattcctaattaaagactgtcaagtttcctaatctactgtggcctgttttgttttcgacagaactacaaccgcgacatgtttctgtttctttacattcttcttgtcgtcgcatcaatgattacctcactcaagaagcaccctgaaaattcagtagtttcaggaaagactgttttgtatcttaatcgcaaccaaactgatgaatggagagggtgggatgca

SEQ ID NO: 1793 - DNA, 765 bp, Zea mays
atagatgcatacgattttggaatacgaccacaaatgcacacttgagctgtgtggacactggcagccaggtaggtttcaatgtgtcaatacctgcaatctttgttggtctctcttgtaatcattgcaaaaattgcaaccattgagttgtgtgtacactggcggccaaatagttctcaatgtgtcaatacttgcaatccttgtttgtcattcttctcatcattacagaagttgcaatcattttctgaagagtatatcacattagtccatttgtacctataagaaatagataaaaatttgtagactacatagcattgaggacttgaggccaactaaaatttaagttttgatcaatatatgctagaagccaaaataccactgaaatatacaattagaggaaagccacaacaatgacaacaacaaagccttttagttccaagcaagttggggtaggcagtaggcttgctaacaacaaagccttttagttccaagcaagctggggtaggcttgctaacgccaaatcctttaagtccgaagttccactgtgaagcatccaaatagagctaaaatccacaacatgaagcactgaggaaaagaaagtgaaaatgaaaaaaaaaaacacgttgacaacaaaaacagaaagggaattaaccaaaaagaagaaaactcaagacatatttgctttgacttttgattgtgcttgagatgttcacaaacctcttagaccacagcgaaggcagggaatttttatataaaatcaggggagtg

SEQ ID NO: 1794 - DNA, 744 bp, Zea mays
atctccgagcacagactcgcccagcctgaggtgagcacgtacgtgatgaaaaaggttgcctgccgaaaaacaaccacccgtccgtccgtcaggagtcagtttgcagacgagcatgaatgaacagaacacaccagcgtttgcgtttctatcacagcacgaaacaaaaaaaaaaatatgaagctgccagccatcacctgcttcggcactagttcagctagcatcgtcggcatgtccttgggtctggagaagacgttgagctggttgagcacggatcccgacaggacgttcacaaagaagacgttccagatgttgaagaagaggattttcaagcacccgctcctcttcctcccgctgcgagagatggacccttctatagaggagaagagcatcatcagcgggggaacggtgtacagggacaacagcaaggtgacgctaggaaggtatcccgttatcactctggcgaagaaggacctacaaggcaagaaataagtcaggcacgacctcagtcagccagcagcaaaaccccccagatctcaagagtcaagagcaggagcagctaccggtggtggtcttctcaacttacttatttaggagacctgtcaagctcgggaacatccttttgagctgctccagctgcatcatgctctggacaaacgcgacggggacgatgaacacgaacatgaaaacgatactagctgcgagtgtcgctagctttccggagcccggatctgtcttgtaggggat

SEQ ID NO: 1795 - DNA, 791 bp, Zea mays
tagagatgtaatttcttctggcaagtgtggccggcgacacattgatagaatttctgagaatgcaaacgttaagcttctcaaagagaaacttaagctgaaaaaagaacaactaaagcatgtcaagaatgtgtccaagctagataaagcaaaaactgctttaataagaagagagcttcaaagtttaaagcaagactggacacagctactgggtcggtttaacatgctggatgaccaccttgcacgtggtgttgaagatattcatgtcttaacacaggtctgtatcctgcatggtatttattactgtcttcatctatgtttgtggtggtaatttgggtaaaatcaagaatttcttagcaatagccaataggtaactcttacatcctagtagcaacaatgaactgttatagtgttcttcaaatatgtgcaatttggcatttttttcatggacttcctttcttctcatgctaataaaaaaatgagttgttaatgaaatcataggggacaatcattcggtatctgaaatagcaccttttttagcgttcgttttttgtcctaaaaaatatcctttgttttttaaagcatatgagtgggggaagcgcataagatatgcacttgcaattactacatgtaaatgttatatattcctctctggtcacaaacccatgtcacttcatacttggggtggtcgacaagattaatttttctcatttaattgcatatagcctgccagatcatactaataaaactcgaaaagaccgcccccatggtattatattaagaagctcaatcaa

SEQ ID NO: 1796 - DNA, 777 bp, Zea mays
aggaaagggcttaactcattggtgattctagttgcttggtggctgtggaaacacaaaaattcctgtgtttttgagggggcctccccaaacaccgacaaaattcttcagaatattcaagaagatgccaaactgtggggtttggctggagcgaaacctctgagaagtctatgaccttaatctaggatttcgtcccccccccccctttgttccttctttctgttttctggagtgtgatccccaggttttggtttgtttagttcttttttcttcttccttttactgttttggtttgtacttggtcttctttagacctttttctctcttaatataatgatgcgcagttctcctgcgtattcgagaaactatgggtgcgtttggttgcgggacagccaggacaggaacgtcccctgtcgtcctccctcgtccctccaattttgagggataactggggacaacactgggatagtcctgtcccaacctctgaccctgaaccaaacaaccttatttgaggggtcgtcccgtctcatcccgtcctgtcatttcaaccaaacgcaccctataattttaaagattctttttagcaacatggaactagagccttgagcatgtttttgaattctgtttttctcaagttacatcaccccaaggactggttcgccgagtggtaacccgggataacagtgcaaccacaagactcatatgggctgatcttgactagtaaattaaaactagggttgtagcttgcttaccctaaaagataaggggggagatttttaa

SEQ ID NO: 1797 - DNA, 719 bp, Zea mays
aaattctttagcaattttgtcttccataagataagatgttttataatctatagtgtttgacactgagtattttttccatgtttcatatgtttttaattcttactcttacactgcaactgtcaattttaaaactaacgtcattagaaatatcaatactcttctacttttctatattagtttattcactgttttttcttttaagcatttctgttttgatctctttgcggcagatgtctgaagatgaaaatggcctactagacattcaactggaagatctggtaggaatgatacagaatacccagaagagtaggagattccttcctctgaatattcttattttttgtacgatatgtgcatataatgaactttaatttcaaattttatttggttagatatattgcttctgaatcaagctcgtcttcaagcattggaacgtgctgacaaaattcttaaagagaaagaaactttgcaacagaagataaacattttagagatgaaactgtcagaaacaggtacacaatctgtgctttctagtgaagtaaagtctgatgaagagagtctggagtttgatgtcgtaaaggaagagaatatgctactgaaggatgagatgaattttctaaaagcaaagcttattgagataactgagacagaggagagtctattcaagttggagaaagagtgtgctcttctaaatgcttcccttagggagctcgagtgtc

SEQ ID NO: 1798 - DNA, 751 bp, Zea mays
atgtggaagaagttgacaggagattgcaagaatatgaacaaggttggaaccatttcttttgaataatattattaaacattgttcgcctagatgacaaggcatatggcattcagtgggagggagggagaaaagataggaagggaacttgccgacaaggccaattagcaacttcaagactctccctgctggctttggctgttgggccagagaagcaccatctccagttagctgtggtagcggttgatttagaggggagtagcggctgaagtcaatctggaagggtgatgcatcggtattccatctgaggggtggtgcaagcagtgatggggcatggagagtgacaaggaggagcaacagtgctgcatgagggagggatacatggatctagtgtttggtgctgctttgaaaggggaatgcagaaacataggtggaggtacagggagacatcgagtgaagtatgattatggcattatgggagtggatgggctgggtcagtatagccccctatcctttctttcctcctttatattcatatcggctccgcctgccacttgtatggatttttggaggagagaaatggccgcacagcgggcttggtgctttaagaacttgttatcaggttgttgcttttggcagcttcttgtgttagtatgatctcattttgttgattagcctatatatcatttcaattccttacaggaaggactgagttttcagcagatgaagacgctcatgttgtcggtgactgtgt

SEQ ID NO: 1799 - DNA, 707 bp, Zea mays
cttgcatgcctgcagcaacctccgattgggctcaggaaatgtctcagatatagctgaacgcatagcatttatcctagcatccttagtctccaggcctaagcaagtgaaacagggtacgaacagtaaaccacatagtaaacagcgaaagaaaaggaatgcatgaataatcctgggctcttggatacatacataataatcatctgagttgttaagatgcaacaccactactaaagttttagtctaaaacaattttcataagcttcagatgaacccaacatgatccaccaacaaagagaaatccataggtgcaaattctgctagttatatttgaccagtgaccaatgtaacatgtgttactcagatacccaagtcctacataattgtgtgaagctggacaccctcacctgtgttggattccaaatggtatcttgaccagtgaccaaagtcacaagagcaccgttttggacatgaattttgactgcttgtttctactacagtatgtttacaaaccatggcaaaatatatattagtttttttagacaaacctacatgcaccctaccaaatgttcaaccttaacaagcacaaagtaatttattatcaaagttttcataggctgactgcaaacagcccaaaccatcacttgtatggctgtttacctctttacagcactaaacaagattcctagacaatcatcagcccccacgtc

SEQ ID NO: 1800 - DNA, 864 bp, Zea mays
agtttggtgcacagatgtagcagcattcacatcctgagaaaaagaaaagctttaaaacatgtgattgggaaacgaaggtagtgtctcactatattaactgaaaacccataactacttacctcaaattcaataaagcaaacagtgttcctatcttgacgtaacactttcatttgcttgaatccaggttgcctgcaagaaattgagaaaaagttgcaccaaccagaaccaaaacattcagcagccataaacccagtaggcaaaatggaatccagaggtagaatgttgctgttagaagtgcaaggacttacacactgaagagacttcgcaattcctcttcgactacagtatcaccgagattaccaatgaaaagggtattgcagggaggattatcctttgtgttctgcgatagtaaattttaatttttcataataaattataacctttagaatcttcgatatgaacaacttagaatgagttgtcagttgtcaccatagacccaagacaaacttcaactacattacaaaataatgctgcaaacatttgctgatttgccttctatatagtatttcatgtactgaaattattcaaagggtaataaaatattctagcaattaactgatcatctaatttcatccaaatgtaaagattttgtgacaatcaagctttatgcttccatatacacataaaggaaacttgaccatgagagatacaccaatgagtcatcagttcaataaaggtataaaacaatgttgacagcaaattgaataagttggaaaggaatttcgtagaatgactaaacaataaatattcttgattgacatatctgaaagaacaatttcttaaggcaatttataccaagagtcc

SEQ ID NO: 1801 - DNA, 540 bp, Zea mays
tgcatgcctgcagttggtgtccatagacaccaagttgagcttggtccacgcgagcaccttgtcgtccgcgttaacgtcgtcgacggcgagctcgatggcgagctgcgcggcgcggccaatcgtggagtcgtacgtgaagagggcgcccacggccacctcgcttggcagtgcccccgccgccgccgccgtcggcgcggcggccgcagtggccaagagcgcagccaccaccaccaactgagccacaccgcccatcattaatccccacccaagcgcttgcctttggctagtctagagcacgatgggcgccgccgccgccgccgggagcaccagaaccgccagtcgcatcggttagtacgttgcttgggaagaagaaagcagaggaggaatgaatgagaggcgctggttttgaggtgcgcaaggaatgaggaggggttagctagctagagagaagacgacggctctggccagccccagccaaccggtgaggtgaggatgacgtggtagccttgtcgtgaccgttgtcaggggacggcacagtag

SEQ ID NO: 1802 - DNA, 729 bp, Zea mays
ggtgtccatagacaccaagttgagcttggtccacgcgagcaccttgtcgtccgcgttaacgtcgtcgacggcgagctcgatggcgagctgcgcggcgcggccaatcgtggagtcgtacgtgaagagggcgcccacggccacctcgcttggcagtgcccccgccgtcgccgccgtcggcgcggcggccgcagtggccaagagcgcagccaccaccaccaactgagccacaccgcccatcattaatccccacccaagcgcttgcctttggttagtctagagcacgatgggcgccgccgccgccgccgggagcaccagaaccgccagtcgcatcggttagtacgttgcttgggaagaagaaagcagaggaggaatgaatgagaggcgctggttttgaggtgcgcaaggaatgaggaggggttagctagctagagagaagacgacggctatggccagcgccagccaaccggtgaggtgaggatgacgtggtagccttgtcgtgaccgttgtcaggggacggcacagtagccgtcgccatcggacggccgtgttgaggtgagcctgcgaacgagcactgtgtgtggttgagtggttctgcttttctctgttgttcgatcgcgctgttactgtgctagctgccatctgacctgcacgtgaagatcagaggagccctgagccttcgatggaccgggaccggaccggcacgttaagctcgcattgaagaccgtatcg

SEQ ID NO: 1803 - DNA, 765 bp, Zea mays
acctgaggtgcgacggcggtaacagccgcacccttgacgagaccctcgagaacatgcacgctctcaatcggatgttcggcctcgacaccgagaaggctatcgtcgagcagaagatcaaggccaaggtggagaagatccaaaactgaggacaggaagcagtttttcttccccgtgtatacataccataccctccaatctgattccatttttttttttttgaccctttcacttactgagctcctcccctgctcgctgagacgtggactgtgccgtgaattagcgccatggcagcagctcaatctgttgagagagagcggcaaattgtctctactccagctgcttttctttcttcatttttgtttgagctgctgtggcaagagcccccattcttaagctatatacttcattcggacggaacaggaatgtatcgatgtgtcagctgatgccgttttcatttgtcattatacttgtaaggtttactgatactgtaatacattttacgctatccctgtattcagattgtcgagcattatcttttccagagagttcaactttgtttagcggttggatcggttcgagtcatatgaacttaatttcttctgtccatttaatgttaaatcaacaaatataatgccataattggcattgttcttgcactaatggcctgaacttgcaagatcgatctatcatacgcgtactacggccgtagcagctgggactggtatacgattttgggcttggttctgcgtgtaatttcaccaaatg

SEQ ID NO: 1804 - DNA, 777 bp, Zea mays
cccgacctgcaggcaggaattggtggcagattaaatttgaatataatctgcgtacctcgaaacaagtacatccatcatcaaactgatcaccagccgcttacttgttcttgattctcgccagcttctccttctcccaggcatctgccatggcttcgttttcgctggagaacgccattggtccaccggacgtggtggcagctccgctgtccttactaccggccgccgaatacgagctcgacgccttgtccgctggccgtgccgttggcagcggcggcggcggcgctgttgtctggttcccctgatcttgctcgaatcgcctacttcctctcttctctgacggtttcccgggtgaaactgaagtccttccttacgcgtagtgcaggatcagcgagagcagggagcctttcgtctgaggccgcaccctctgctggtgctggcttcttctgagccggtcttagtggccgtttcactgacacgttagctgaaatttcacccccggccatgcatatgatgccagcagaaagcaaaagaaaagctcgaaatcaaaattccagttattagatatatatatagtatgtaccctgttcatcttggtagtcatcgtctatgggctctttgccagtgaaccatctcgaggaagaggaccttctgccttcgaaatttggcttctccaggctctcacctctcttggttgtgcgtgctgacttgctggactgcttgtttccacgcgcaaacctgtccgcggcagcatacggcgtgctctcttgagacgctgac

SEQ ID NO: 1805 - DNA, 822 bp, Zea mays
attgatgtgttggaggtcgatggggtctattatggtgggtagtccaagattccagaacgaattagtcactcatgctctcactatttggagatctagatccatttttctcgtcctgaatattctcctgtgtgatcttcaggcttctctggatgccaccgctacgaggctcaccagcgccttggtctcccaaccatccgctgcaaagttcgccgtgggacaaaggaaacactgaggcgagagcaccttccttcagcttggattccatttttgaattacttgatgcactgaacttcagtttgctctttcaggcaccatatgcgatgagttggattttattcagttacaaagtgatctgtgtatctagagctaaaacagaagcttccatggtcttttcgtcgtctcgtctgtaattctccatacctgtaaatgttgtccaaacagagtggtgaatagtacttctgtacccagcagcatcagaaaatgttaattttgcctacaacactcttttcgatcactggatggatgagtaccacccgctcagtagatcattccatttctacgtgatttttgtaaaaaaagaaaaatgcagcagcagtcggcacgctgtgtcatttagatcatctagaaaaccagaaaaaacgagtcatgtaacttgtttggttcgtgcaaaaaaatattcaaaaccaagtttgcttatactggatgttgatgtgtcatgctatgttggggcacactaataaaagtttggagatttaagttatatgtcaagtttgagagctcaaatgttaagtttaatgatgcaagtgactcttacatggtact

SEQ ID NO: 1806 - DNA, 769 bp, Zea mays
attgaggactcggaggtctggaagcgaaggccgacgaacgaggggggcgatcgagcgagagcggtggcggagcagcgagcaggtggtactattggatgaggagggtcggactcagaaggggaatttgtagcattcccatcgtctcgctctcgcggtctcgccggacgcgcggaggcggagcggagacgggagaagggcgagagagacacggagccagcacgttgcgctcctgaagaatccaatcttttttgttgttttttttttcgtgtgctgcgggtgacccgtgccaccaccacgactcctccgtgagaccgtgacgctagctggaaacgcccgccgggtcgcgggcgcgcctgtttatccgcaacagttggagcgcgcagccaaatctcttctagtttccaccattgtacggcactacggccactgcgatcgtcaacacttataaaaaaaaaaactttgtcgtacttgaacggccactgcgatctggagctcaacccctctttcgttgacctcgagttcacaggtgccacggcacgcagctgccttctcgccgcataggttgaatacgtgcagtggatgggtcaggggggccggaggaggtggcgtgcagtggatgggtcagggcagccgcagtggatctcgcatgttaagtccagtccattcgatcagtacattccgtccatagaattcgatctgttgtattctcttggactaagcaaggcgattgattggtttggacgcttatatgaggtgattctagagaagg

SEQ ID NO: 1807 - DNA, 789 bp, Zea mays
tagagtcgacctgcaggtgttcgtgaatgttgttcatgtaggtgttggcccaatcagtcagcatgacattgatctggcacaagcatgtggagcatatatagttggtttcaacattcgcagtccacctagtcctatcactcaagcagcagcaagagccaacataaaggtaccatgttcatgaatcactacttctctaatgctagttgtgattatatggttcaagaaactttgttttgtttctttgagttctatgttatcattgagtttcagactttcagcgcatctttggcttaatgttccattttccattttggaaactcttggttttgtgcacagatgctagaatctagaccatccatgctctgtttttcttttgtcatggtaaaccaaatgaacctttatatttagatgttatggaatcctttgggaggatggtattaagaattttctctgactcgggggaatgaggatataactaccattggattgaacacagcaatgcggtctgtagattcaaaactccagtatttaatacagacgtgatgatataatggcttgttccttttttctttttggtatgcaaatcgatagaacttcagttcatgcgtggaaattgctttctggatttgaataatagcccgagcttgaaatctgcttgcttcttgctgtattgcttcagcacctcatatgcatttattctaacattaagtgggagtcttccccaggaaaggtgtttcatttctaatcaggtatcatttcacagagaagcaaatatctgttggagtattg

SEQ ID NO: 1808 - DNA, 769 bp, Zea mays
acatcttctaagatagtagcacttttataaagtatagcccgttagataaggtatttaacgagaaaacactcgtacatcttttttaaaaaaaacaatacttttagagtatagaagagtagataagatatatacggtggagataggattaggcacgtactctacagtctacacacctgtgtatatacggtgtaaaagctcgaatgcacgtactctatatgcaagccaatatatggcaatatccgacggcgacccgggtggctgggtctgacgctttcacgcacgcggccgcctctctgatgccgaaagtccaaagctgacgtgaaaagatccaaatccgtcgcgggaccaccgtgaggtgacctactgttcccgttccaaaagcagcgctgattacctgggcgctgcaatagccgccaccatcgtgaccgtccaataccaggtgcagaatatgaaaccggcggagcggatctccgccgtctggatccacaaacccggcggcgacattcctcgttgccttgcctcactcgaagcaaagcccgtattttccttcccttatatataaactattaaaataaaacatctcatcttttgtgcgatgcgacctttcccgtccctcgcagcaccgatcctgccgtccacctgttaataaatcgcctgagtttagtcgaaacacaatcgttaaaatgcagtaaagtaattcacgacccccgggcgcccccgtctccgctcctttattaatatcgccgcggcctcgcacctccatctgttc

SEQ ID NO: 1809 - DNA, 784 bp, Zea mays
agttgtcttttttttggggtgggggtggggtaggaggaaagaggaaaacggtccatagaaattctacatgtataagtctagtcagtgggaaaaaataaaagttctgctcgacagaaataaccagtttgaccagctgctggaagtaatcttgatccacaatgattacggggcatatgaaggagacacagatcttccaatcatgtgacaccgcgctcgacaactcccagctttccccagcgtgggacgtggggcaggtacaacaaacacgtctggacgagcgcgggatctggatctctactccctacttgtgctcacaagtggagcagcaagcaacagatcagcgtccagcagcagcaagtacacgggcgtctccctaatccagcggcgcctctctgttttccttcaccattcctacaggcgaacaggccacacacatgaaaaaacaagagaaaactgtatctacacctccgtacaggcggaggaggttgctctctcacgtgtgggataccatgccgtgcagccaggacagatccgggaaggcacaaccgcacgacgcatgttccgaatctcagccaagaagcgcccaagagctgctgccatgccatgccatgccgccgtgccatggcagccagccagtaaaaacacatcccccctctcccagcacttccatccatggtgactcaccgtttttttccccccacacctatcaatttcctgttttacacatttcactcgacctgctcgcctatgaggtcaaggcctactatcaagaaggagacgccct

SEQ ID NO: 1810 - DNA, 753 bp, Zea mays
tgggttacatcagcacttagtttagaggaacagaacatgatgctggatacatggaagcaagcaaccaaaaacaccatgtttgatgaatggctaaatgaatggtggaagggaccttcaacttcatctgacccatcagacaaggcttctactctttcagaaggtttgttcagttggtttttctctcctctagaatggtggacggggatttctatgtcattgagatatttttatttggccttgtagaaagtcattttcaggagaatcttgaacaaaatgaccagatgtttaggcctggttggaaggacatttttcgaatgaatcagagtgagctcgaggctgagattcgaaaggtctctcgagattctactcttgatccaaggaggaaggcctatctgatccaaaatctcatgaccaggtttgttatctaaaaataaagtaaataagttgactgttatctccccttaagaatacagaaaataagtctgtattatatgtgtttttaaatttgtaaatttcagccgttggatagctgctcagcagaaatcaccacaaccaagcgtcgaaggacataatggatgtacacgacaacctggatgtgttccttcgtaccgagacacagggaaacaaatatttggctgtgagcattacaaaagaaactgcaagcttgttgctgcatgctgcaataagctattcacttgcagattctgtcacgataaagttagtgaccatacaatggacaggtttcttcaccac

SEQ ID NO: 1811 - DNA, 772 bp, Zea mays
attctccacactcgcgtagagaagaacgtccggcgcggcaagtctcggttgggtggtggcgcatccgctgtgtacgaggacccgcaccggctctccctcaggcgcctccgaatcagggacatgctggacgaggacactgattccactgagcgcgcttcgtatcatcacggcagatccgccggacacgaggagggcaaggaaggccaaccgaggctcgccattgtcgccgtcggcggacgcggtcgctgggacgaaccactggtgtcgggggagatatacgatcccgtggacgacaagtgggttgagattgccgggtttcccaccgacgtcgggctggcctgctccggcgtcgtctgtggccggacgttctacgtgtactgcgagtccgacacgctcgtcgcctaccatctggacaagggctcctgggccgtcatccagacgctccgcccgcctccgcggctccgcgactacgccccgacgctggtgtgctgcgcgtcgcggctgttcatgctctgcgtgtcgtggtgcgaccgccacgagccggtgagccgtagggagaaggtggtgcggaagctgttcgagcttgacctcggctcgctccagtggactgacgcgtcggcgcacccggacgcgccgatggatccccacgcggcgttcgccgtcgggcaggacaggatctacgccgtagagatgttcaggatcttcggtaaagtgctcgatttcgttactggcctgccgggtttcggacgccgaccagaagtggagcccggtt

SEQ ID NO: 1812 - DNA, 779 bp, Zea mays
cttgcatgcctgcaggcagcgtctggcgcagtgcagtgccagctcatggatatggttcaccctggagtggtgcccatgcataaggttcattccgattcgttccaacttcgactcgattgatctgtagctgcgtgcagacccgtggtgctaacaggttgtctagtggattctaaccactgtcttctgtgcgggtttcccccaggtcaatttcgatgcgaagacagaatatgacatgatccagaactacaaggttcttcaggatgtgttcaacaagctgcggattggcaaggtactcgctgtcggcctattgcatttcgatccatcgatatctgtttgatgttatgtttgtcattgatgaaaaagtgtgtcaacctattccttgtttggtagcttggttccaatttggaatggctgtcacttgtaaccgtgtatgggatttgctacatggtgtcccattgtacatttgtactggttgccaaaattatgttcattctggtgcacagcgagatgaggttcaaaggaaactgagatttagctcttataaatgtaaattggagtccagagagttgttgtttgattgtgtgcttgatgcatttcaatccatggagattgtatatggtcttcttgtgtctgtcattgctgaaaactgaaaataatgtttagaatggcttcactgcttcagtggccgcttctggtgcttttttttaagatcagtcttcagtgagataggaatagtggtataagaatttgatgcgtgaccttcccaatgtgctgagtat

SEQ ID NO: 1813 - DNA, 788 bp, Zea mays
tgccgacgcccaaggacttcgtgtgcccgatcacgagccaggtgttcgacgacccggtgacgctcgagaccgggcagacgtacgagcggcgcgccatccaggagtggctggaccggggcaacgccacctgccccatcacccggcagcgcctccacggcgcgcagctgcccaagaccaactacgtcctcaagcgcctcatcggcgcctggcgagaccagcggcggacgccgtccccttcctcttccccttccctttcgccgccgccggccacgcctccccccgctcccgcgaccggcatggcgggcgacagccccgcgccgccgttccccctccccgtcaaggctgccgccgcctcgtcgccgtccccggacgccaacaccagcgccagcgcgccgtcgcccaccagcgtcatcgcgcaggcctcgcttgagagcgccgtggccgagctccgcgccgccgtgtcctgcctctgcacgtccgaggacctggcgcagtcggagcggtcggtgctcaagatcgagcgcctctggcgtgacgcaaccgccggcggagccgacgccgagccggccatcctcgccgcgctcgccaggcccgccgtcctgaacggcttcgtggagatcctcttcaactccgtcagcgcgcaggtgctgcgggtcgccgtcttcctgctcgccgagctcgcgtcccgggatgacgccgtcgtgcagacgctgaccagggtcgactccgatgtcgactgtctcgccgcgctcttttaaaaaggactggcggaggcccgcgggctcatc

SEQ ID NO: 1814 - DNA, 748 bp, Zea mays
agagcagttcctttcttgttgtcttgctctactccccagtccccagaccccagtcccccactcggacctggggggcatcgcaccgaggacgacctcacgctggggcgggccttggtatattccttctcctccctgctcggtttagcacgcccgcttccagcacgcatcctcccctcctcccgtctcaagggatagcagggtgcagcggctcgaagctggaggaagcggacgggttcgccatggggtccgagggatcctcgggtccagttgtcggtgagtagcagtctctgtccgtcatttctcccgagtttgcatatgatgtgtttgtgtgctcgtcggtccgcgaattcgagcggagactggagaggtgggatctgtgtggccaacaaggcatggctgcctggatccccgatcggatgcggccgcccgttgattaagggaagaaggagcttggtgggagtgggctcagtatcacctggggctgcttggggaatccgatccggcattgcctctgattggaattgacaccacatcaagattgctgtgcgcgacttaggtgcagagttaccatttccactgccatgtagtcaacagcctcttgggcgaaagacaggtatatcgggaactagggttgccttcggatggaattgcagatttgtagtgccgagttggaatgtcagggtaagtttagcatctcgctgtagttggtgagcccccgttgatctttccatgtaaatgagaattatgt

SEQ ID NO: 1815 - DNA, 760 bp, Zea mays
gttattgatcctctttttttccccagtatacatctttagatgaagtcctcatttttgaagaaccatgtacacaaaaagaagaaatttccatgatctacacaaaacaaaaataaagccaacagttctgcatgattatcgcttgtttatacataggaatcgacaattaagcatatgaaacttaccgcaacaataaatcgtcccaagagccaaagatgtaatcaatgagcaaggacaaatgaatcctcaccaaatgccaggaactgttactatccaatggaaaacgtgggctggatgtcataatcatttgatgcatttacaacaacgtgataaatatgttcattgcctatctgaactcttcatatgctagtaccctattaagcaattaatgtcaagtgtctgcctaatgggtcttgaaaggcttgtatttcagttcatggaataaaatgtgaaaacaatatgcccagatgttcccaggagcttatctgtactatcaacattataaaaccaagtgaaagatctagactctccatattatgcttatttttcgtttcatttcatagtgtatacaaaatcaaataaagaacatgcttagtaggctagctgcaccgcactcaacaattctgcatcaagcttccacacaggtcagctaaagacaacttcaatgaagttgcacaatataaccaaataagccaaaaatcatataatataacccaatatgccaaaatcaagataggagatgccaaaataactttaagatgtt

SEQ ID NO: 1816 - DNA, 768 bp, Zea mays
tcttgcatgcctgcaggtatggtacaatctaattatacttcctttgttggaacttcagaagcatttaacttattctaccaacttcagtttgcacatgtccatccgttgtgcgacttgctcccaccctggccacttttaatggggaatactagtagtttatgttatatattttgctttcctcttttgttttttttcctgaaaagctcctacaagttacttttttctgtcctatccttctttaaaccttcaaaaggtttcttttgtcggatacacagattgaaaatggaattaattgactgcgggtgtactaagtgccatttgactttatgtttcgtgtttctagcctctaactagaaaagtaaatacttgatcttgagaaggtcccttttagtggtccataaggattaggattaattgcctaaactatatcacaactgcacaagtaagcttttccataccatataaacgcatgtcaaacccattcaagaggctttgtgtattggctgcattccaccaagtaaacaaaacatattccctgcacatttatatactttctaaagaatgtcctgtcactgtaatcattggttactaaattttattttacagacttattagcagacatgatgtattagacctgttccctttttatttcttttacctaatacaccatgagcatgagtaacatttatgccatcatctatttctttggaaagcatgtttctcaatcctcaaaacactgcttttcaccttcatgcttttgttggtgcc

SEQ ID NO: 1817 - DNA, 758 bp, Zea mays
agtgctgacggcggccacgccacgtgaatgattactggattagggcagacatcttatcgtcgattggctgagacctgagattagcctccatatactatagagtacatattttatttgggggccttgggcggctgcacaccctcctccccccccccctcccctctcctcccctcccaagggtgggccctgaccgcattgccttttaacgtagggtgttagtcctgtgcattgtatataatgagcccatggggttcaatgcaatacaatctaattctatgacagtacctctaacagttctgattcttattgtcgcatctggtaatctgtttatgtgaaatattttcatatcaggttgcaaagaaacatcttgctggaaggattgatcgtgtagattgtagtttagatgaatgccaagaaattacagaagccacaaaggaagaggtttgaagcttacccatgtgcttggcttttatcaagatctggtgtaatttagtggagactgacaaagctgtttcataggttacaatcatccatggagatctaagtgccttccagaaggaaatggaaacagttcatctcgtagttcgtagtctggtaggtgcattataccatgcttcttgttttctgttcaatacgaactgattcacttgtagtgctaactacaaactgatttcatgttgtgttgcaagagacaaagcttggacgcctagcttatactcaagtatgtagacatttacatcactgactcattcttctcc

SEQ ID NO: 1818 - DNA, 748 bp, Zea mays
tcaaattttggcccaacaagtatggttgatcaagtcttacttcgtgaacatgtattaaatgaactgcaccagcagcctcaccatttgcaaaggcagcatgatgcagctattgaacagctcattcaagcaaaatttggtcatgggcttcatagggagcaccataatgatatgttggatgttctctcgcgttcaaatcagagacagatgcttcctttagagcagcaacttcttttaggccttcaacacgagcagcaacttaagtctcaacaattggcaaatgctctgcggcaacattcaggccaggaagaagaaaggcacttaagtggggtctggccaatggatgctgctgcccagtttatccgctcaggaaccagtccaaatcagatacacagtcgtttcgatctcctggagaaccttcagagatcgtcatcgtttgatcatcatgaacatctagaccgcagcttatccttacacgaacagttgcatatgggaggtcaaggtattcgctccctagagcggactggttctttgcctggtggtggtcctggaccaaacccagatgtcataaatgccctaacacgtcatcatggacttagtcagttggaaacacatggtgatgtataccctttaggccaaatgcctatgcttccttcaggtgttcatccccagcaacttaagcatcaggatcagcttcctggttctcacataggaaggcttgaaaggcactgggtcgatgccaatggacagt

SEQ ID NO: 1819 - DNA, 768 bp, Zea mays
tatggtgaaatacgaggatacgatgcatactattttgttatgtttctagctgaccgattattttctaatatttgaacttgttagaataccggattagggtttggggtttttcccgtgtaattactgtctcacccctctgtaatgggtctggcccagtttactcaagtctattaatagatcacccaacccctgttagggttagggtttccaatagaacttaccatcgtacatgtaaaagataagtgttaagaatgtggaacctgctagaatgacaaacttcctttgcagtttttggtgaaagatgaggaagcgatgcataagattttttgttagcttgctatttgtttgtgattatttgtaatttatcatgctacatgtaaatgatgaatgttatgctcatgaaattttcaagaatggtatagttctttttcttaacctgctagattgtgatttggtttatgctaactgcaccatgtcattatgagcaagctgggtagtaaactagcagtcttcaaatgtgatttatatttggacaaatccttataatgaacccggctacattgtacttttttagtctcctattattgtggaaactggaactaccacggtctccagtttgaactttggagggacttgagtttcatctttatgcatctggtggggtttctctgatttccatctctgtttttttaaaagaagattttgtacggttaaaaattttcatttcggtaaacactatttgtgtacactactacactttatgttaaa

SEQ ID NO: 1820 - DNA, 772 bp, Zea mays
atcttgcatgcctgcagcctcgcaagcgaagcccgctaggacctccgccatgttcagtggcgcgaaccccagcgtcgtgcccatccgcacgatgccctcgatctcgtcgtcaaacacgttgtcgaacaacccgtccgtggccagaatcacaatgtcgccttccttcgccgctacctcgccgaccaatgcgtcggagaccctggttctgtcttgcctagaactgagctggtaggggcagttgaagtagtgctgctgcgttggcgagcggcacaggatcctgccgccgcggagcaccgcaaatccgctgtcgccgaccaaggcccacttgagggtgctgccgacgagggagacgattgccgccgtggacgcgccaggcgtatgcgccgcggccgtcatctggtgcgcccgctccagcagcgcgcgggggcagaagcgcgtgccaggcacgggggccttcgccacctccgcgtaggcgttgttcatgagcccgcgagagaacgccgacgcgtcgacgccctggctacgatacccgccgacgccgtccgccacgccaataacgcaggcctcggcgtgcccgaagtgatcgtcctcgtcgtgcttctttatgtagcatgaccccaactccatcgccaggtcgcagcccatggctatgggatcgctggcgcagtccatggccatgggattcttgtcgcagtcaatggctttggggtcgctggcgccgtcgtcgtcgagcggcgcgagcagcaccgcggcgaggttagctgcgtcgtcc

SEQ ID NO: 1821 - DNA, 785 bp, Zea mays
tggattttctgctgctgccggtggtgacgatgcagcctgccgccaatgagaaatatgcaggcggtggcggctgctaccccaaacgagcacagcgcggatcacgttcagcttcaccttcagcttccccacgctgaacaccgggcattgcggttgcggccacgtcttgttgtcgtagtcgtcctttttgataccttcttctacctcctcttgagcaaagttgtcggcggcggtggcagactccttggtatcagggctccggatcgccttttcggatcgacaactaggcacgacggatttgcaggtctataatccggcacggcgtcgatgcccttgcactcgtcgtgccaatcggaagagattcagatgctatttaagagcaagtataataagaggtgactaaatgctgaggtggagagagaagatgagagaagaaaatcagcctataaacttatatcggcttcgagtcttggatacaagaaccaacgagctgagagaaaaatgaggtcatatattaatactaaagagctaaccattatacgggtgagataaatgttagcctacaaggatttttacagccaacagttggctttattattaaacttgcttaggcggttgtgaacaaaattacatacgtgaaacaataagcgatccttaccatcaagattcttgctgccatggctcatgtagaacctcctgtgttctggcaggaccacccagtcccacacatcctggcttgcatccatggtgagacctcctcggctcctcctattgcaagcaagctgatg

SEQ ID NO: 1822 - DNA, 789 bp, Zea mays
agttttactgatgggtacgatttctgaatgacaggtgtcaggagctgttacgatgagggcaagcgtacagccgaaacgttgaccatggattaccaccgtggtgccaaccttgaggtaagtcgcaatccaaaaatgatcggtttggtcggttggaatttcatttcgtctgcgatgaagtagattcatcttggtgatttcttgttgtttccaggttaggatcgcacgtatcttcaacacatatggccctcgcatgtgcattgacgatggccgtgttgtcagtaacttcgttgctcaggtaaataatatgtacactgctgtttatcttagttacagaacccaaaagatatgacaactaaaaacttactacgcgcggttatggttgcaggcactgaggaaggagcccttgacggtttatggtgatggaaagcaaaccaggagtttccaatatgtttctgatctggtaagtctacctctactcaacatatattgaaaaaaaaataagagacactcgatacaacatcactgccagagtggcctagccagcaagtggggatgcttgaactattcattacaagggaatctattattctttgcattcattgtactgatttgggtcttctcccaagtcgagggtctgatgaagttgatggaaggcgagcatgtaggaccatttaacctgggcaaccccggcgagttcaccatgctggagcttgccaaggttgtccaggacaccatcgaccccaacgcacggatagagttccgtcagaacacccaggacgacccacacaa

SEQ ID NO: 1823 - DNA, 763 bp, Zea mays
aggttagctattgcaagaataatagagaagaagccatatgtgcttggatttgggctacaggagaaggtgaagcctaacattgaggctcttgtggacattggagtgaggaaggaggccctagcatccattgtgatgcagtaccccgacgttcttggacttgaactgagggacaagcttgttgcacaacagagcttatttgagtcgagcatattggttagtcgtgaagattttgggagagtgctggagaggatgccgcaagccattagtcttggacgagctgcggttctgaagcatgttaatttcctcacagcttgtggatttatgctatctcaagtgagcaaaatggttgtggcatgcccccaactgctcgcactaaatatagatataatgaggatgaattttgaatacttcaagaatgagatggagagggatttggaggagctggttgagtttcccgcattcttcacatatggcatcgagtcgaccgtgaggcctcggcatgagatggtgtcccggaagggcctcacatgctcccttgcatggcttcttaactgttctgatgccaaatttgatgagcgcatgaagtatgatacaattggggttgaagaaatggagcgtgaggattcttctgacatgaatgcatctgtggatgaggtagagagtgaggagtatgaaaacagtgattatggtgactctgatgatgagtttgttcgataatttatttcactagtcattagatttttaactttggagtatgtgcttg

SEQ ID NO: 1824 - DNA, 805 bp, Zea mays
ccccggtatcctatttagtcgacctgcagaccatatatgtttatggcatgccaatatctagtaggaacttagtaatagaaacgaataaattgccttcttagttttaagaataaaagttggtgcataacatgcagccgctggaacaaagttttggctcaaagtcatatggtattgtgaaagcatcactaatatctagggaaatacttcttgaagaagtgaagaagatcagtaatgctgttggtagcactcttgaggatttggatcgcactgacttaacccttggtaaatatgagacagttcaaccatcaaagtcagcttcgcccagttacagttatgggcaaggtacgcccacaaagtgtagtccccagatgactggcatcttacgtgattttcttgaggtatacttcacttttttttctgaaaaacgttttctatctttttgaatatctgtattggttgatgcatctcaaacttgtttcagagttctggggttgtggttggaagcactgatgatatcttgctgtatactctatctgaggaagaattgtttgaactatttcaaattgtcagcagccaactctcatttatatggaatgagttcttgaaattccataggttagttatcttcccatgcatctcgttttagaagatgggtgtatccattgattgggtgtttcttattcttatgggtctttagttataaacatataatgactctttaataataatatttttttttcaaaaaggtgcaagagagttgccacaattcattaataagagggagaagcaaagcaaaccaaaaagc

SEQ ID NO: 1825 - DNA, 764 bp, Zea mays
tgccggtgctgacagggtgaaaaggtggccaggacctgtgccgtgccggccggccggcggcgacgccggcgtggggcgtgctgtatggccgctgctcccttgcctgtttcaaatggcgtcatgcgcttggaattgcgatcgagtcaaacgagtactgcttggcatcgtcgtccataatttactgttctttgcacccgtctgttctttttcgcatcggtctggcatgtttggatgtttcgaatgctgctgcactgcttcacttcccctgtccgggctctggacttttggcacggaggaaaacgagacctagcttgttgctccgtagaagtcccgatctctgaccgtgtcagcaagacaacatgcgattggaaacaggacatgtcgaatgttcaagagatctcaatgttcattgtggaagctcgttgtctgccacggagcacatcagtgcatcacattcgatcaaccagtccagtcgcgtgctctgaccgaaagaacaccgccgaggtccgtggaatccattcgatcacatggggctgttggctccagattaaagatagttgtttaaactgatgtagctgtaatcccatagagataaaacactttacaagcactataattcagtatagagtttttacatggatagatgtagggatgaggctcggcttagctcgaagttggctcgcgagcggactcagctcggttcgcgagacacacactcattaatattattgcttaaaataattaataatatataaatgtgggat

SEQ ID NO: 1826 - DNA, 799 bp, Zea mays
aacccttctacccactcgatagcgtctaccgcaccgtacgctcttgcccttgcttcctcgatgtccttgcccttggcagtgaagccaaggactctccctccaacggcaacaagattgccatctccatctactgctgtcccagcatggaatatcttgacagctggagacactcgctcagccttgtccacgttttttattacggtccccttcttataagagccagggtatccctggcttgccatcacaaccaccatagccatttcaggagaccaggtcagtgaaacattgctcaactctcctttgcaagcggataacagaacttgtgccagatcagattctaatcgcatcatcagaacctatgatgacacaaaaaaatatatcagcagaaaataaggatagtcagagtatcatagcaaaaaaaaaatcacaggtaaaacacaaaatttcagctaactatttcatctgaaatttgtgcggtgtacttttgagatgtactagacaagctcagcaaaggaaattctccacaaagttaaaagttcaatggctaccagatcggtcctaaatacgcagttatatagatctttaaagggtatgcactgctatttttcacttcgctatacataatatgatcatatatccttttgagattgtaataatatatctgattacttagactaactccactatgatattttataacacagaaatgcaccattcccattgcgctataggaattgagtctactcgctcattcaatggaagaaaataaagtgaactattagtggcagacctagacagc

SEQ ID NO: 1827 - DNA, 1243 bp, Zea mays
catctcctctgcagctctgtttccctcctcttctgtttctttccccgtctttcctctgcttgtgctttgttatatagatgctgactggaagtgcttgagttctttgtttttacagctgatagcacaatggtatgttatactcttcactcgaattccaatatgttggtgcagtggttagacggggggttcccaggtcaaaatctggttggtagtatatagtagttatatagtcatatatagtagttatatatatagtatatatagttatatacataatatatatataatttatggctatattgccaaaacgcctagaaaagcgcctagaagcgcctaagaccgagtactcccgactaggcgctaggcaatgggtcaccgcctagattccgcctagcgcctagctgaaccttggttggatgaagatcttctttaggtaactgggtggtaatgtgtgttgtgtggtatctgggacttgtagtattagtaactagtaagtgtttctttgctgttttcagttggatacttggattggatgaacaaatatcttctctcaatttcttaaatcagtaatcagtattgcagaattcatggcatgtttaccctatccttcatatatagttatataattatatactataaagtatatacataggtcctggatgaacaggacgactagtaaacgaccaggtcgaccagaggtcgacctagtcggtgactaatcgagattcgtcgcctcgtcgttcccccagttcgactagctggtcgagcgaccagaaacatagggaatagaacccgatcctaatccgatttgatccttaaattttatagtgtaaaatctagggctcattaccacccctgacaccatccccctagggcagtcagctaagcataccaatcacctattaagtacaaagcaatgatctgcctcccaactatcacctagtgccaagtgtgaacataaaaaatgtgggaattgaaagttgtgtgtttacctgttttttactttttaacacaaaaagtgagctttcaggagagagcacaggatcaaaatcgttttgaatcttaagctgccaagcaagtgaaaaatagcaatgcataagtacacaaacttaatggatgtgtaataacagcagaatgttgaacagtttatgtaaggtgaaaaaaataggtcaacaattatgtttcttgtaccaacatgagcattgaacaagatgtgtttaaatgtattgctgaaacagtggaa

SEQ ID NO: 1828 - DNA, 729 bp, Zea mays
tttggaccattttgtttctttgatttagatactgaagcattactgaatatattcataagacaacgccatctgaaaacataacatggcctttgtttaaattttgattttgaccatttcatatggaatattggtttgatcacaaatacatgatcttcacataactcctctaagaatgtgatcttcatgtggaaactgctatcgccatgacttggcagagattgtcgatcttccttcagccatgcttggtgctggacagctggaagcgacaaacagaccaagttgttcatccgatgtcgaagccagaggagtttcaggaaaatcggcttatgtttatgttttattgttatgtcattggacgagtgtgtatcaggataaatgtagaaaaaaagaattttttttcttaaaatttggtcatgtactcaattatttctttgccgcaggaatatcatggagcatatgtgctcttcctggttgatggactggttctacctttactgcctctgcctgagcccccacctcatgcctggtccatctccaggagttcactgtccaccacggcatctgtgcacatggaaacgaccacctcgtgaccgatgtcttacttttacgatcaacactgcatcctcgtaccctgcctgatcaccattccttcgccaatccaaccatgccaatctcatgtctggctggagagtggagataagtgggagggttgcaccaccaattccttga

SEQ ID NO: 1829 - DNA, 733 bp, Zea mays
tcttgcatgcctgcagatgcccgccacaaggccatctcaaaaattcaaaccgcatcaagcttcccaagaccccaaacgaacgccggcgcttcacacatcgcccgacccgaaccaaacccttcaaaccccagcgaaaagcgaaggcaatcggaggaacgaatccgcgcgaccaacacgttggcagcagcattaggatccggatccgaagaccgccagaccggagccggaggcgatgaagagaaaggaaaactccgagcactcggcgccgcctctcaacaggccgcgcgggaagcgcaaggccctggccgagctgcccaagtccaacggactgaacatgaaccacgactcggcgccgcggccgtcgaagccgagaacgcggtcggcggcgcgagctgaggccgaggcggaggcggcgatgaaacggcggaaggccggagacgccgcgcgctggccgatggacacgaggcagcctgacgttgaagcggcggttgcgccgtacgtcggggacatcgaccggtacctccggtccctggaggtgaggatctcaccctttccacaattccattgtgtctgggaacatgcccgtgagcgtatttagttctcctgtttggctgatctgggctgtgaatgtgtggtcgtagttgtagatgatgtaatgggctcattcggatgcgtgctcatattgtacggttcagtgctgagatttgaccagtttgattttaagtgggattac

SEQ ID NO: 1830 - DNA, 782 bp, Zea mays
cttgcatgcctgcagcaagcagttcaggagctggtgctccgtcagctgtaactgcaatggtctgcacatattacctcttcagctgatcctgtattcttctattacaaaacaactatgatcccaactacatttgttgtactctggaaaatgaacagaatggggataccagaagtttggttgatgtaaaacctagaatagctgatgagtcactggacaagtcaaaggcgtggaagcttatggagataactgagtcaactcagtgcagatcaattaaactggcagacaacatgagaacgagcaaggtaataatatcttaaaccctccacttctctgtttaatctataaaatatggtttcttttcacaacttatttcatgaagttggggcacatcattatttgggcatgattttcatgtatacatgaattcattttttggtatggcagatctttctgtcatttgagcttggaacattaactaattattaccttgaaccaaacaaccctccattactattgaagatgggggacagccctccattttcatctatacatgaagttggggaacattaggggaccaaggtgctgtttggttcaccaaatgttacgtaaatagtaatgataatgattaacgcctgagtaccagcggcaacaaatttgaccgattttttgctatctagtctttttttaaacaaattcaagtttggccccctagatgacttaatgtcgtttttggaccctttgcttggctccataggccatggcacagagttaacatggctcgg

SEQ ID NO: 1831 - DNA, 715 bp, Zea mays
atcaaagactctataacccgtgctttgttcaagtgacaagttctgcggaattataaacactgaagtcagaaaaagaaaactatacacactgatgtcagaaaaaccctacagcttagatacaccctctgtcccaaaataatgtgacattctagctacgaatctggataattattattattcatctagactcatagctactactagaatgatatttttcggggacggagggtgtagttggcaataaaggtcatgttgtctttacccaaggacgagtctttgggtggattatgaatctggctacaaacaagcaggcagcagcaactactgagggtagatagcttatgcagtcataatccagcaagctcaattccgcaaggtagctgcacacaaactcaagttttcctctgcttgcactctgaattttgaataaaaaaaacagatttatcgggaaaaaaaaacattaagagaagtaaatgcacatgctccaaagtaccgcttacattgcctccacgacacgaagctataaattgcctaaaacaaacagttatctagtattagattctgaacttctttaagtccagtgcataattcttatatggtaagatacaaagggaagttatgtcaaatgctatgcttgttctaagcacagaaaaaaatgatggagaagacataccgtagaaatgttgtcactgtgggacccccaatctgaaagcta

SEQ ID NO: 1832 - DNA, 810 bp, Zea mays
  unsure (1)..(810): unsure at all n locations
gcaggccatcttcaaggacccattcaggaggggcaacaacatccttgtaagtttgcacttctatcatccaagtggcatgaaccatacggttccgttccgtgttatttactgctacagtgcctactgttcattggtccaactcagatcagttcatctttgcgaagaagaaaaaagaagtgtgtcttgttgcaccaagtagactaaaagttgtacataccctacaaataaattagattttttttcccatctgcctgaactatcttgacgcagcaccagtggttcctgacgcaaattgttttaccctgaacctttgttcaggtatatgcaatattgcgaattttataacgcgggtgacattgttgttatgagcgtatatagatattttgtttttttgtagctaggtgtgatcacacagtgtaccaaaccatggtttaggaatccaattgtctaatagtagtagtaggggccgcatttaggtgttgattgaactggtttgacccgcaggtcatgtgcgattgctacaccccagctggcgagccaattcccaccaacaagaggtacagcgccgccaagatcttcagcagccctgaggtcgctgccgaggagccctggtacgcgaatctctctcccctccacctccaccgatatctgtgatgaaagctgaaacgatctatctctgacgatgcttgtttcttgcaaataaatgacaggtatggtatcgagcaggagtacaccctccttcagaaggacaccaactggcccctcgggtggcctattggcggcttccctggccctcangtacattcacta

SEQ ID NO: 1833 - DNA, 760 bp, Zea mays
gaaacccgccgatcctctatttgggacctgcagcccagaggttccgtttccttgcagctcatctgctcttagcagcaacaattttattgataaatataaacaactgaaaattattggtaaattttccttgaaatagctgagcgtgtaaatgatatttatggtggaagaaattgggagggtgagacaaatcttttgtcctgttttttgcagttccactagtagtttgctttttcatgacaattcatttatatttttttcttggcaagagaggtgatttgctatttaaggtgtgcaaaatttcatgcacatacacaatttcacatccttttaagttatctatgctaaacttaggttagagtaccttctggtttgattgtttaggttcctgaagcccttattcctacagcaggggctcttgttatgtccctaattgatggtctctccaagatgatcaacaaaataccggtttagatacgcattgaattattgaattttgttctgagctcgttcattattatttttctacttacttgattaatgtgctctatgcatgtactatgctaacttctcttttgttttggtcatagatgtccaagtctgctccttcagtttagtctcgtattaaccttcttgacccaaaagatgtatgggtctaaggtggtgtttgaatacactaaactaatagttagttggctaaaaattgttagtgaaattagctagctaataaatagctaactaactattaactaatttataaaaa

SEQ ID NO: 1834 - DNA, 904 bp, Zea mays
gcccagttcgctgatgatagacaggaggagcagggagcatcaggcacatgcgtgcatggtctcctggtccaatggctacagccgtacaggctaccgaggaaggacgggcctacagtacaattattatagagcaaggcaggtacaatggctcggttcggcgctggatccggcgccatggcgggccggccggcgatggagccattggcgcctttggttggctgggagctgggaccacggcgtccgcaccagccatttgatgcgctataaaccaactgtgccacggtactgcaacgggtgtgggaggaaggatccatggggttgggctgtgtgttgcgggagacgatggtgattggctaccaaccatgtcgcgaacttaacccaaagaagaatgtttcccttctgattgttgcgtctctctgagatcttctttgacgacgggagtgaaccaggttttatagaagctaaaattaaagagtcatcacatatataaccactaatctactgggaaaccatcttacaaagcagaccgcgggacagaaacaagcgaacaaagaaacagaagacaagacgccagagaggcctgaacctgaagcaacaaccagaatcaactaccaataactagcctacagaacatcttcaacatccatgtcttcggcccttctccaaaacccttgaagccgccatttcatcgtcttcaacttatcatccaaaaatctgacatcccactccctctctcaaaaaaagtgccatctctgtaaaacaagtgaagaatttatgaaaattgtcatttgaactctttgaaaaagggaagctcttccctatattggttggtccttccacaaccacataaaaaaaccttggcttaaatggaaaggctatatgataatctttcttcccaaacaaa

SEQ ID NO: 1835 - DNA, 815 bp, Zea mays
aagagtaatgatgacgaagcgtgtctatttcccacaaagaactgcctgtatcacacaaacaaatataacacatgatacagaagaatcagttcacaaaattatcataaatgaatgtgtcattggcataataaatatgtaaacatgcaagcatatcaacttgcaactgcacccataagttattatgaatgtaacttcaggatgtaaattagaatctgtcactatgtaatcatagcggataaatcataagacagaatagtcatttagtttggtcaaaaaatgcatatcagacaacatagaatgaatcaacagtcatttcattttaagttcccaccagttttcagctgttcattgattgccgttttagtttatggcaccttaaggtatgcattaaagaaccttaacacgtcttgacaaccttgatattttataacaaagggcataaacagtgctgaaagctttcaaaaaaggtgtccaaagaagagaatttatagcagttaaccgataaaattctaaatactaaagttcatacagtatagatttgatagtaaacatgctttctataaagttttttctactaaaaataatgaataaaaagacagaaaaatacatcagcgtcagaaagcaatgagcgaaaaaataaagctgcaagttactttttaaagaaggttgattaggtcactataccaaaaaaaaggatgaaagttacagttctacagctttcaatttcagagttctcaatcttcctatgtgagtctcattatcgtgaaaacctttaaccggacatcaagtgaaaaaaacatgcttcgggactgaca

SEQ ID NO: 1836 - DNA, 753 bp, Zea mays
agtaaagattattttagcgctcttttcgagatgctcttaaaaatcgtgtcataatctctttttagggctatttggtaacatcatttttctaaagaatttttattttttaaaaagaaattagttcatttttccttggaaaggaaaaataagaatcacttaaaaatatggtttccaaactagccttaattttttttatgataacactgagccactgtaatatttgcaagataaccaaacaatttgaccaaatcaatcaatataatgagagctatttacatacttcagcgaataatcaacatttggctggcaaatgtgtgctgcaatctctcttttttatgcattcaatgttcaaatacaacgatacatctcatcagacaaggcacaggttgggaaattctcatccatcaaataaccatctcaatcataaaatttaagcgaggcaggcgcaatactggtgatgcaaagacaacagactatctttcactcccctcggggaactaatggtgctgatgtgttagatattccggttttattgtcacaagatatgcaaacgacaaaaaaaagggggaaatagaacgaaaaacgaccggccctttccctatcagaatttgaatgaacagatccagcttcatttttggccatatcctacaaaccctacaggtggaacatgctccaacatatatctcttgcgcctctcaaaatgtcacgacagcaactcatgcacacgcagctggtatccgcgtgcctggatca

SEQ ID NO: 1837 - DNA, 775 bp, Zea mays
tgtctagtaacgaaccactaatgaatgagcttgaaaaactgaaatactgcaacgccgtgctctgtaaaaaccatgaacagaaggtttgccgcatatttacttctatatagatgttttatccttacattagattgcatttttctaaccgtgggacttttcatttcttccttctctgcacaatttcttgcggacagaaatcacaacttcaaacagagtgcaaccaagaaatagagaaggtaaaggagaagtatgagttgttacgtcaagaggaagattctgtgtatcatcgattgaccacagaccttaaccgtatctacacgaaagttcttgtaaatcaatcactagctgaattctttaaagcatctctagttcaaggtattgattaccagtataactttgtgtttgcgtttatgtattagtgttctttgctcttgtgaggttttatacttaatgcagatcttccatagtctgcattggttttcgatttttcttgtcagattgagcactgtttggttaagactaatcattttgatctcacctgacccattgatttgcatacctgggtgttctgtgtggtagaattatggcatgtgtgtgtggagttttccctccccccttcaccgattctagtgcagtaatgatatatgctatgtctggattggctagttgaattgcatttcttttttacattgatctacgcatttagatctgtcattggtgctgagttcatttttttttgttccttggaacatgtgatacatggtttgcttcttgt

SEQ ID NO: 1838 - DNA, 774 bp, Zea mays
tcagtttcttgatgttgttgataaagtccttctaggaaataagtggttaaggaaagcttctggcatacaaccaaagttcccttatgttgttgattcatttgaagaaaggtgcagatgcaattgcttatgtcttgtttcactttttcataatagttgtttgttggattgtgtagggagattaacttactgagttgacttaagaggcttatgaaaattttctttttcttattagttgtgcatgcccacttactgctaaaattagtttttcatacatgaaataactttcttgtcatatgggaaacaatttcctgataatatagtttttggtcgtgttttcagccttgtagtttgtaattatttttttctcatgggcaagtgggttacagatataggtattgttggcgtcgataaaaaaaatataataatatacgctaaactagctgtttgattggtatagcttattttaacctttcatttgctctacattttgaaccatctatcaataacggcactaagttttgattcatatttatttatgcccccctgtcatttgttcactattgtgaatcatctatgtttatattctgtccacgtttttcaggactgctgtttcaattgccaatattgctactaccagcagtttaactgcttcaaatgacgacagcagttgccagaataatcaagaaactcaagcttccgagccaagtggtgacaacagccgctacagaaatcacaataatgaagatcataatcactttccgtttaacaatctgc

SEQ ID NO: 1839 - DNA, 791 bp, Zea mays
atagactgagtttaacgctcatcttttagtttagcttgttgcagcgggaattgtgatcggtgtaatccttcatggaggcatccacctggcatgcgacttcccaaggatcacaaggacagataaggccttctttggacgcacaattgccgctgactttgggtaccaccagccatcctacctggagatagtggtatcaaccgaggggacaactggtatagcaatggtggtactaatgtttgtcgcattcttgcttgctagtagtccttcgagaagaaatccaggaatgctgccacctctcgtcagacagttagctgggttcaatgccttctggtactcgcaccatgtgttcatcgctgtctatgtgctcctcattgtgcattccatgttcctattcctagcaaaggatgtagcagagaagacggtatgatactactcattaaataaatacagtaaggtcagtatgtttatgtccctcttattcccacaaaatgcatgtgtagacgtggatgtatgtcgcaattcctgtggtgatctacattggagaacggatgttcaggatggtcagatctatggtgttcgatgtcaagatcctcaatgtgtgataatctgtaacaaataatgtattcttttcggtgaaaatatgagttgttatgtcagctttcaatcattactttgttttttttttcggtttctgctccttttacaggccacagtttatccagggatggtacttgcactcaaggtgacaaaagcctacaggtttttcgtatcaaagtggaatgtatgtattt

SEQ ID NO: 1840 - DNA, 789 bp, Zea mays
aaccaatgctgctggcactagatattgtctacatcatgaacatgcaagaggaatagtaagcaagcagatgcacaagaatatgatgatatttcaagagtacaaaagcaatgtctaaaagaagggaaatctcaggagtaacaaagaataacctttgtcagtggtggaggatcaattgccctggttccatttggcttcggaggatcaattggtctgactacacttggctttggaggatcaattggtctgactacagttggctttgcaggctcagtagctggctttgaaggttcaccgacccgaagttgaggagcgttgtcacccaatatatccctcactggccgtacaacaggactagaaccatcagcttctttctggaagtctggagacccactatctcgctttctgggctctgaaaacctcctgtcttcaaacccttgaattggagttgtttttccagatctattatcaccaacctcaaagtagcgaggacttctcttatagtcattttggtcatagccaggactacggtccccataggaatatctggaatttctgtcatcactccgtccgctataactctgacgatcagagtaacttccatttggcggacttctcgaaccaccccaatttccatcagatcttctattttcactatactcatccttgtcatcctgcaagatgatgatcaatcagcacatagtgaatttcaaacagagtaatatattcccaaaaataggtttcctgagcagaaagtttaaagcagtaaggagacaaatcacctttgccctt

SEQ ID NO: 1841 - DNA, 752 bp, Zea mays
tatacccgtgatcctcttagtcgacctgcagaactaggtgtttgacgggagagtggtgttgtattgcgtgggtttagactttaaggtcaattgcagtccagtggaatggaatgtagccttgatgcaagcagttggaattcactctgtcattatggtagtcacccattattgttttactgtgattttatatatagttgctaattgttgctactgcttgcaagagaggcaacttttatgattctcagtctcacttccagcacttttctggacctaactaacaggaacctaagctgttaattaggaaagttgtatactggttttctcagaggcgctggctagtgatgcggccaaatattgaagttgttatggttaggtaacaaaatatggatgttccaccttgttgtgggcatcactcctataaatgaataatcatgtagaaatttcagaaaatgtatttaagaaagttcatcgtctcatcaattaagtcaaatagcatatcagttcgtttttatatataatttgtcacatttgtagaggatgtggcacatggatgaagctaaagaacaaactgatatgtgagcaaaagatctcaaaacacctgctattcatgaactgcatttgatttcttaagagcctaccaattacacctagttaggactaccctactgctcttttacttctttttcctttcctgtctggggctaagtcatcttgtgtggtgaggtccacgcctcacgttaggcactgcactt

SEQ ID NO: 1842 - DNA, 672 bp, Zea mays
cgatgtgaggatgtccagtgtcgttctatgaactggatcggttgattcaggcattcagccaggtgccggctttggtaaaaaatggaatgtttgagagggcggcagtgcaaaagacattcattctctcgagccctctgcccccgtcttctgcttctcccgggtcagccaggcaggcagttcctcaaaagggcagcctccgcggcggctgctgcctggtgcctgctgccactgcggcctctgacccactgccgcaaatcccaacaaagcaagggcagaaaggaagcgggcaaaagcagccccgccttccctactactactactacacaaccacaacccgccggtcctcccctctgcccccgctctgtcatctttgactgcccctgtccggtctcctcccctccatcccactccacgccacccccacaccccaccggccaagcaaacacgctgcacatttcagttcagacggtccaagaacagcaccaagaaagactccttgccgctcttcttgcttggctactgactaggagagctccctgccgctggttgatcaacagaggcaggcggacggcatggtcagctctatgccgctgtcctcgctgctgctgctgctctccgcagccagcttcggcggcggcgtaaggctcggcgatggtggctacgaggactgga

SEQ ID NO: 1843 - DNA, 734 bp, Zea mays
ttgcatgcctgcagagatttgttttcagcaatgaagaattcaccataaggatcgtcaataactccctcatacacccacctaacatggccgaaaacaaattcacataatagcatgagcactaggactctaaacaagacatgacaataattaaaggatgtgtgttgagtattgacttcagcttaaacgtgaaagctagcaaagacaaacaaggaaagaagctatggacaatcatgaacctttctagcatcctgaggtatgctgcacttgcatattctgtcatcttctccagtaaagaccgaacaacactatcaccacccatcgcctttgcctgagttgaaggatatgatagatgcattacatgtttaaataagtataatgtgaattcgggaaaactaagctctgagaaaaatgtgaagtaagaaaccaatccaattgaagaaaatcgttttatctataagaaaattaaaaactggactgctatatttatcttatatttacagtaagcagacaggaggagggaggaggcacagaaggaacagtgtgtaatctcagaggcataaactcatttgagggagtacctggctttgaagtagattaagtgtcgctgaaccattagtattgttggaggtagccttctccactagaactgccagtgcattcagtgaactcatcatcctctgccaaagagaaaacataacttttaatgctaaaaccaataatcaaagaaaaggcaa

SEQ ID NO: 1844 - DNA, 790 bp, Zea mays
  unsure (1)..(790): unsure at all n locations
tctaagagcattcttactggtacaacaactatctgtacaaagaaaaaatgaggtgtctatgatcttgttagagctattttgtgcagatattgatgacatattcttctactatcggtaggagaatgtagagtacttcaacatttgtgattttaagttttcgaggagggctatgggccgaggactagaggcagcttatctgccatgcggcaagagtgccgcagcggttgcttaggagacaagttatttgttttgttagcctacagatagtttttggtttgttagcctggacatagttctgttggatttttagctcactttggaagggcagaccaggtggctggtgcaatggtgagagctgtctctctgagtcaccaggttgtggcttcgaagcagactctccgtatttgcggcggtttatcacttccccagacctcactcacgtgggaacctccggcactgggtctgtcttttttttgttagttcagtttggtaatttattcgattgaagccagctctatgtgataggcattagcagatgtaaactggcaggcaagaagaaccctaatagcagtcaaagcctctaaagagtgagtgtagggctgggcaaaaaacctgtaacccgaaatacctgaacccgaacccgaattatctgaaacccgaattttgttcgggaatttcgggtggcaacttgtaaaacccgaacttattttaggtaaattcggtaccctgaatacccgaactttcatgtgtcatatactcatgtcattgntaattatcaatttgcgcatat

SEQ ID NO: 1845 - DNA, 754 bp, Zea mays
atgacgacgatgctggcctgtaaggcggcccgacacctctcccttgctttccctctcgtcaagttatcctggttagggttttggtctcacgccctagcagggctcacgttgattttgtgtctgtcgccgcgctcgcagggagcgcaagccgcggttccctaaggggaagaaggccaagtaccgcgacgtcggtgcggagggaggcccctctggcaacgctgtggacctcgacagcatgctgaatccggagcttgcggcggagcggcgggcgcggcagcgccacgtccagctcaaggagggagacgacgcgaagggaggtgccgctgaggtgaagggcttcgaagtccgctacaacgtatgcgctgcttctctgcttgcctcttttcccctgtttattaacattgacagcaaatgaatgctaggtgagctgtgttttggctctcaacaggacagtgttaactttgttgacgatggtatacggatagagccgtttaacttggagcgagaaagggaagaagggtatttcgatgagaatgggaactttgtggagtatgcaagaggcaatgagattaaggtatgaaggttttccgtttagcatcgttaacattatagtataagaagttatcattggtgacacaagcaggtttgtcttgtaggatgcttggttggacagtgtggaagttgacccaacatatgctgcaaaggtttcagacaaaggcaaagagaaagtagaccagtttgaggacctctcttc

SEQ ID NO: 1846 - DNA, 786 bp, Zea mays
aaaaccaggtcgcaaaataggacacttttttcaccgatccatcgagctgaaagttctgtaacatgtagctttgtgcgggccaaggtttttacatacccacaggcatacatacgcatgcaagaagtttcagtcttccaatcgatggggtaaaagttgaggttcctactatatatacgagctgaaactcagaaaatatacaacgtattgcaccatatatatagtcatttccctagttttctgcgtttcatggaagagcacgccgtagtggtttagcctcgacctcgagtggcatgaaacaagcttgtcttggccgttccaccgccatctgttcgggaccagatctcaagcttcaacccatgtgctcaaaggtcaaagcacttccaagtaagaccgtacagaacgcgacactgttgatacaaaaggaaaaaaagaaaaacagcttccacagctccaacaacaacgccttcaacatcgtaaaagcttcgaaaagctcctacaacttcagaaccctagcatagcaatattgctactccattgtttccgttgaaaatatgcacaacagacctcactttgccaacttctccctcttttcatttgctcccatgaattaggctgtagcccaagatcaagatgaactacaagatctgacattttttttgtgcagacaaatgtcagaagctaagggtcatggatgctgaatgctaatcaggaaactcacctctctatattaacggggaagaagatatattcagcatagaagagatttcatatgaaccgatagtactg

SEQ ID NO: 1847 - DNA, 718 bp, Zea mays
aactgctccaaggacgtggtgtcgtctgtgtgcttgggtatcaggtttatgttagccgacacgctcagattgagcagcgtttccatcgggtacccggcaccgttggcggtaaggttagcgaagtggtttgtcttgagtatcctctcgatcgtctgaatcccgtagacgcagcgcctgaggtcctgtggatgctggaagtagttgaagctcacgctggggttgctatcgatgtcggtgtccgcaagcaccagactgccagtcgacattgggccatcgatcttctcaagaatgaatcctccgtcaaacacttctttgggcaggctatgtttgttacgcacgtactcttggatttgatcaagacttctttgctttggtggaattgtagatatctgtccaatctgcgatgaatggagactttatatatgcatgtagaagatgaagaaaagaagaagacgacgacgacgaccaacctcagcagacatgattccatggtggcaatggatgctatcgtcggactggctgaaaccactgctggcttcaataaacaccccagcgtccgttatcccgacagtttcaatcaaggactgcttcgtggggctcttcataggcacgaagatggagttcatcggattgtccgacatcccttccccgacgtgttcgttggcgtgcaccagaaaaacgttgtgcctgctgagttgacccctcggcccgatcccgt

SEQ ID NO: 1848 - DNA, 768 bp, Zea mays
acctgcaggctcttcaaactggcagctgccatccatccaggcacaaaaaactgggaaagcaattagaatttttatatatatagagagagagagacaaaaacgagacgaaagcagtcagggctggtgggtatattcacgacttcacgtacggcaagattagtggttgtggttggttggctgatgaagttcataaatccgagttgtactagagcagtgccgcctgcgcaatgaatggcatctaaatggtgtgggtgagctctcttgaatgcgtggcacaagtggcagcagcaccccccaattccatttctgctgtgctgcctacaaaaaaaagtcattgggatgcagcagactgatggttgtgcggcggacgaagtcgcagggaaaccaggaggaaggctagtgcagagaatcagagctgtctgggtgaaagggcaaaggcaagcagcagagggaggccattacgtgtctccttcctccaggttcctctctgggctgccatggatttgctcagcagaggggcagtgttcaaggccctggtgttcctctgcttcatcagatcgtctcaaggtatatatattccgacttggacattactggatcatctatccagtttttttcttttcttagtcctcaagtggcacatatatacatcacacaagctgctgaatttgcaggaggagatctgaatctcccctcccttggtgaaggcaagcaggttccccaggttccaaagcgaggcatacgactacatcattgtcggcggcggca

SEQ ID NO: 1849 - DNA, 763 bp, Zea mays
  unsure (1)..(763): unsure at all n locations
agtgcagcttcaatcccttacgaagatcgaaagaaggaaaaaaaaagtactttctgtcagtttcttagcaggaagttagagataaactatggctacactcatctcatcatctgggacatgtcaagggaacaattttgttcaaggatcacaaaaaacaatgttgctgcaagggaaattattcctttcttgcagtattactggcctacacctccccaaacgttgaacacaaagatgttccactcaaaacttcaaaaaaaaaagcgtagtgggaactagaagcaaaacttcttgttgtaagcagtaatcacaaacggccttagaatttccaatacgggatatagagcaatatggagctattttttgttgaaactcactaataacacttcttctgaaacaatcaaaagaagccaaatcgaatgaattctgcattagcatgaagtactcgacggctgaaggctccaagcgcatgaattgtcgctgtgctctggtgcacccttaaagcatctagctctaagatgattgcttccatccaccgaagtcctctgggagaccccgctggcgagtatcctacataaggaataacatcagcctaatgaaaagcaccagagttttttttctcaggaaaatcgagtgccattgtatattaagtagaggaaaagaaattgncaatacacccccccccccccaacatgaaaacaacacgcacaacgacccaggccacagagcatgttttttctgcatcgatgtgcaacagttttttgtg

SEQ ID NO: 1850 - DNA, 798 bp, Zea mays
gacctgcagttctactttccttttattttcttttttgaagaaagcaagcagctgtcctgaagttgccattcttacttctgcccttatactaatttaattcagcaactgtagtgttatttggtgatttggaatttaaagagccctgttgaattggttttgacaggattccattggaagcagtgtatactgaaaggagcattccaccaacactctataatgttgtgaaaggtgaaaaatactgcggggaaatcaaagttggtctcacattcactcctgaggtagtttctagaaatctgcctctatgtttatatttatatatgaatgctgaaatttttaatctaattttaactttaaatccttttgtgatatactgtctacatcctttctcttttggttgccattttggaaactagtagtctccaatatttgaaaattgaccttacttttatatgggtaattaacaagacataagttttatgtaagcattcttaatgaaaaatacaagtactttcctttttttactcaatatatgcccatgctgccatgcatatagaagcgttggttgctacctactattatgaatgaagcaagttatgaacactgaaattataaatttagcagtcaggtacagtaaactgtaaggtttcataatccattagcatttcgatctgacacctgtgcatcatggtgaaaatatctttatctacttttataaaaagcattggtggtgatggtggtagttctacatgaggatatctgtgtagtgatttgcgtacacgcatatgtcatagccttcga

SEQ ID NO: 1851 - DNA, 735 bp, Zea mays
aggactagactagaggagtcatggcattggcgtatcaattgattggcacccatgccgaaatttggagccgatgaacagaaaacacatcagttaaaaagccacagcatgacggggaaccgcagaaaccagatggtagcagagtcatcgtagtagtgtcgtgacagctgacaacttgccgccgcctcacgccacgccctcggcgtggtcgcgagagcacgggatttctccaacggcattttcagcaccaccgctctcggccgccggtgacgtgccacttcgctgcaccgtccgccgccaattcgtggcctctgcttaacccccgtcgataaccttttttttttctgccactgcttcgttcaaccgtcgtctccacccaccgcaaccagcaacgcccccgtccatccaccgtcgggcaacctgtcgggggcttcttgggtgggtgagggcatggggaagagcaaatactgtctccgcggcgttcgatggcgcgccatagaccagcggcgtggagtcgcaaattatagtttgtcgcgagaaacgaagcggaagcaggcgaccagaaagaaaaccagagccgaagctgcaaagcacaccacaccaccgcgctaaactgttgaacgcaacagcggaccaacgtccacgagcatccacatcaggaggacagcgcgcccgcggtaaaggctccgtgcgtgaggggcccatggcagcctgccattccgtccgacctgacccacc

SEQ ID NO: 1852 - DNA, 771 bp, Zea mays
gcttgcatgcctgcaggagatccacgaagttgtggacgccagggaacaccacgctctgatccatcatcagcccgcctcccatcatcgtgacctcaagttttcaactaaccaccacacccgagcaactcactggcagtcacgggcagattggctctcttccttgtacactcctacttgtagtattcacctgcgtggggggtgtgggggacctttttctccaagtattcacctgcgcggaagcaacacgacgaacacgtcagctgctgtgtttactgtcagcaattcagtgcacagacaataagtgcagggcaagggtaaacatgtgcaacacgattgcgtgttagtaaaaaaaggtaattaaagatggtccagtgaacgctactgtggcatcttaatttggtgattacatgagggccttttgccttggcatcatagatctacacagctacaggagacaatcgtgtagcagaaaaaggcaagattgcctactgaagcaacagcggggaggccaaagttagcaacctggcatgtgtctggtgaaacagaacagggccttgatctgatcaaactatacatggccaaatatagcatggcccttattgtttcgacataaaagaaacagattacacagcatgggtgagaaatatgcatcacacatacttgtggaagagggaattaaagcatgaaaacatatgagaatatataaatagttccatcaaaaaactactcatatgccggttcacggaacaagcaggtaaagttgcatctttc

SEQ ID NO: 1853 - DNA, 795 bp, Zea mays
cttgcatgcctgcaggttccagttctcacgtacgtacacggtgaccttcgcgcttttgtgtacgtacgtacccgttatgtcagtctagctagcacgtagcgctacctgccgctgcgtattattgacttgggagacaagtagctagctagctagctaggttattatttctctgcgtttcttggattgcaagaagcctctgcctgcccgatcgatcagccggcggccagccgtcgagatgtctctgctatgtgtgtgtgcgcgtgcgcgcgcgctaatcggtcaggtcagcaggggtcttttcagacgtgcaacacattaaccgtcagatgaatgcacgtcgacgtcagaatcagatagtgagcaggagcgatgtgcacgcagcaactcgatcgccatggcctactgtactgtacgtggacccccccgcggcccggccgcgcgcaagagtatccggccccctgcctgcttggtttcccgttgcgtgcccagacttgaggggcaagcaacgacgacgacgacccacaccattcgccgctggcctgcctgcctgcctctcctcgaccccacaccctcctgttttgctaaacgtcgtacggatccatagctaatacagcgactcctctcgatcatcaggaagggagctcgctcgtggccggtgcatcgatcatcaggtacactagtagtatagtaccgtaggcgattgatccatcttcttgattgggacgatgcaacgcagcaaccaataaagagttggtgacaattctattctcctgcaccagacagacagcgagcgac

SEQ ID NO: 1854 - DNA, 787 bp, Zea mays
catcttgcatgcctgcagcacaacatgcatctattttctaaaggaattatgttgcccgaacctgtcttctagcatatacttgtctgccattataggtacaagtattaaaatggaaccagatatgtctgttaacttcttactgtcctatatggctcatttcctctgttctaaactcttcagttttatatgttattacagatcatgaaaagggcgtcggagactctaatacctgtaactctggagcttggtggcaaagattcatttattgtgtgtgaagatgtagatttacccagtgtaagggagtctatgttgcctatgcatgaacattatattttcttaatcctaacagtgtactgaacctaatttgtcgtcttttcctgtttgaaggttgttcaagttgctactagagctgctctgcaatctagtgggcagaattgcgctggtgctgaaagattttatgttcacgatgacatctattctgcctttgtttcacagatagtgaagacagtcaaatctataagtgttgtaagtacacagccatattttgcagccaactaccttgccccaatttatcactttactactggtttacaggaccacaaccttgtgttggcatttctgcattattatctgttattgctatgtcttataaacaagtgtaaatctgtgaattaactaatgagactgggtgcattttcacatttctaacctctttattttttcatattggggttgtttttcaaggtttacatgaaaaatttgttagttaatggttatctaaaattta

SEQ ID NO: 1855 - DNA, 783 bp, Zea mays
cgccggcgttgttcgccagttcaacatcaacatcaacggcaagcggttcacctcccatgattattacacaccacggcacctcgaaagtggctacgtatacggtaccagaccttacaccaaccagatccggtataacgtctccatcgttaagacagacacgtcaacgctcccgcctatcatcaacgccgacgagattttcatcgtcatctctacgaccaacgttggcacggactcggaggacggtacgtacgtgcatggatgcattatgcatgggtgggagtccattccatactatagatgaacttacatgtatatatgggctgagctggcctggcacggtacaggtctactaaagcatggtccgctaaagcataaccttaattatatgttatgtcgtgttgagccatcgaactatggcacgacccacaaatatttatgtgtgccggaccggcgcaaataacccatgatatcttagtgtcctagtcctgcccatatatatacaacaacaatacatagccatacaacaataatatataaacagaggtgcaaaacatatatgtccaaagaaagtcgggttgttttgtggttgtgggtgtctcattaaaaaccttcttatatacggactctatgtttagtgtgcttccttttcatatacagactctatgtttagttggttttaatgggtcttacctaaatgggacgtgctaggccagtccgttggcttaaattaaggtccagtcatggcccacgagattgggccgtgccagacctagctcatgtcta

SEQ ID NO: 1856 - DNA, 557 bp, Zea mays
ccctaggggattctccatgaacagcagttccacccgcgttcattttgccattcgtgttcattttgttcttatactagtgaaaccttggcaaaggaaattgctgttaacagaacatttcttgtgccgatgaaacaggcttactatctaccggagaccgagtacgtccactgggcgcggtctcatccagtaaggactctgcaaatactcccacctcccgttgattgaacctatgtggaggtacagatgaaacctaaaacactgcttgtttctgaactcaaaacaggaattcagtacaagtcaggtagtcgggttggttaacctggtggccaccatgaaagggtggagacggaagacgagactagaaaccgtggagaagatcgaggcggggccatagactcggtgtcaggtttttttttttttttttttgctgtgttgtttgcttcagctgcacatagagctgtaatttcccccctcactttcttttggttttgatgacccgggaataggagggaatccataggagaggaaaccccctcctattcaattttgaatagcaa

SEQ ID NO: 1857 - DNA, 735 bp, Zea mays
gcagacgaaaggagagcccaattttgagcacaccccattaccctacgaaacacacttgcaagtttgacagagagggtgggagactgacagggtcacggagtgcatcttgtcggacgccgcggcagcggccacgagcgcgtcctccgcgcgcacgcacagcatccaatccacggtcgcctccaattctttacactttactcacctcctctcggctcccgcagccccgcgcccgcgaagtactcctccgggagtaaaactaaccggcgcagctgatcgagcagagccgcgacagggcaaacgacaaggcggccaccgccgccgcagccgcgacgcaaatgtgtggacgccgcaggcactgcccgtgggctgtgggcaggcagggcggccactgcgctgcgagtggacggacggacacggagccgactcggctgcgccgcaaccgcaactatctcatgatctcagcagcagctcgtgatgacgagcgagaagtgtggctatgatgatgatggctgccatgactagctccactccactccacccggaggccggagctaggtagtagtaggcgacggatggatgggccagtcagggtcagacccacaccattgacgccacacctgacacctgccgagacctggcgaaccgtaggacggcgtgcggggcaggggccacagaggatggtagggtgggcgggcgtcaaaaagcgcagcggagtggtggtagctagctgctagt

SEQ ID NO: 1858 - DNA, 766 bp, Zea mays
atttattatttggtcgctgatgtgatgaacaactcgtctgcctcaggcttccacgtccgagtggatccgagctggtcacgcatgaggcaagcactccctctcgcgtacagtacgcagatcatccacctgtccagccccggcgccagccagcacgaccagaccacgctctccctctcgccggtgccgaacactaggcaggcaggcaggcacggtcaaccagtcccgcccaaccaaactctccagggatacggctctctctccctctcggtctgtctggtctgcatgtccacatctggagctccacggccacggagatgcttgcggttgcggaagggagctgggctggaggccgcctcgcgttccacacttccgcgaacgtgctgccgcgacgggcgcacgaaagagggacggagaagtgtgccgctcggtccagcccacgcccgctcccccccgcgctataagtagcggcccggtccgccgagtcgagccgtccacagcagagtagagtagcacacgcactcgcctcttgtgtctttctttgggagctgtggtcgagacacacacagcagcagcagcagcaacaacatacatgcacgctagcctcgcctcctacgccgaggcagctatgccggcgctggacctacgccccgagatagcgcacgcgcaccagcccgtcatgtcgccctctcaccacggctgggacggcaatggcgcccgaaccgtgcccacaccgatgcccaagaagtactactcactagctactctg

SEQ ID NO: 1859 - DNA, 942 bp, Zea mays
aatctgcggacgaagtgacccgccttaagcaattgatatcagcaaaggatgccaccatcaaagaactccgagcttccaagaaatccattgcccaggagttagaggctgctcggctggctgctaaagttgccgaagaaactgctgctactctcaaagcccagcgcgataaagccatggacaaggctattcgggcgggacgaatcttaatgaggagacccggcgtggttgttcctgaagacataaaggctgacgtgaatgctgcccctgattcctcaagtcgcccttcttcgtcggtcgttcctgagaaagacattggaaaatagagaaacattttgcgtgctctgagcgcgcggttagcatgatcaagtatttgttagaagacatcagctcagcattcgaatgacataattactctcttattgtatcagaattcattggttcgtaaatttgtggtaatgaaatgacgcatgatgattatgaaatttgtttgcgggatatggaagtcatcccctgaattgcataggtgcgagtatgttgcactggcttaagccaccgctgactttagccgatagctccgttagtagggcatagtggtcaccccgagttaagtaagcgtgagcatgttgcaccgccttaaatcattgccgacttaagtcgattgctccgtttgtagggcatagtggtcaccccgagttaagtaagcgtgagcatgttgcaccgccttaagtcgttgccgacttaagtcgattgctccgtttgtagggcatagtggtcaccccgagttaagtaagcgtgagcatgttgcaccgccttaagtcgttgccgacttaagtcgattgctccgtttgtagggcatagtggtcaccccgagttaagtaagcgtgaccatgttgcaccgccttaagtcgttgccgacttaagtcgattgctccgtttgtagac

SEQ ID NO: 1860 - DNA, 811 bp, Zea mays
tgcatgcctgcaggggcagcgactgttgtttcgattacagctgacataaaaatcctatcacaaaagaatgaaggatctcgaagaaaccgaaaagcattgttacaccagataatataattgtacgaacgtctagttccaagattagaaggttgcaccacgagagcatgtccctcaggttgatcataataagaaagatgccgccgaacacaaatttgaagtgtttcctttcggctcgagggagagtaacttcgaaagttcaaactatcagttacattatcagcagcacgataatcaaaatatgggatgagttgatcatagttaaacatgtgtgcgaagcgatgcggacaatacaccaggttgtcagaacgttcgccacgcctatgagtaataccaccaaagaggctgctcataagtagctccattgcagaaactgatatggcaaatggttgtttctcattcttcgtacgaccatctcgaataaataccggtcggtgacctcctgggaatcgcagcgaggatcggcccaaaaaatctagcgagcgcagtccccgaccatcaccatcaaaatcccaaaatatatgatgtgcctctgttataggcatgggttgttccaacttcgtcaaatctatgacaaaaggaggaaatttaactggacaatgtaaggtcactgatttccgagcttgcttccaaaaagaggcgaaccagcccatgatgaaatgacccgggagaaaaagggaacactcgttcgcggaccgtgtcccactaattatattatcatgaatattatccaaacaattatatagaaaagccc

SEQ ID NO: 1861 - DNA, 781 bp, Zea mays
tgccgccacgattcctccgcctttaccagcgttaattctgtactgccacgttgcgtgtgcgcaggtggaacagctggaatttcttcgcctgcaacatcaacgagacggtcatccgcgagacaggttcgattccggctccaccgcggtctccgcctcctctcctcgcttcccgctgccaaactgggagcaccgctactctagatttactgatttagtattacccgtttctaagtttttggcccaattcgtaatgttcgcctatttggtgcgttccccgctgctcaaaatacattcagatgggccatatcacgggtcaatgattactgttggatacacatgacaatgggactgctttggttcactgttcaagcgtgcatcttagcaagcagcaactagtgtttgcatgttttgtgtgacagctgccaaaacgccttctctaaagcagagcttgctcagacatgttaaccaccttttattattgaacagctgacgccctggtgtccacgggactggctgcgctgggctacaacttcgtaaatatcggtacaccactgggctcaacacaacggattgtttgtcggagactattttgtttatcttatcttttttgtttgttgctttacttcttcagatgattgctggtcatacgtgaaacgaggaaagcaggtaatgggatgctttggttccatgttttcccaaattctctttcaatttgcatttgcagacatgcgcttgaaattgattaggtagcatttagttacttggaccatttttattccct

SEQ ID NO: 1862 - DNA, 797 bp, Zea mays
acttggggaagagagaagagggaagaggggggagggtgacggccaaaggagggaagggggggcggctgcccacaaggggccttaagagagggggcggctagggttttggggggaaaagtgggcttcccaccgccggatcgcgatcaacggcccaaaaccattcctacgccagagctctcgacccccgcgcacacatcaaacataaattttactgttttacagatgtttacctcctaaaattccaaaccccccatagcacgggacccgcaagagaaaacaaagaaaagaaaaaaaagagtaaacttcaatttctcttctttttgaaaattgggtatcacactctatcccccttaaaaagaattcgaccttgaattctgatgcttctatcggaacgacaaaggaaagattaatgaaccaacaaaactcacacataaagaaaagttcgggtacttctaccgcatcagctcctcaagctcctaggattctaagatacgcagcagacgacactctagagtctggtcttgctacacaggaatcggctctagctcgatttgatggtctggattccgcaaatacttccttcacataaagacatggaatacatggtgtactctgatcatagatttcgacaattgcatatgctaagcccagctgccaactcggctaagatagtagacggtcctatatacctcggacaaagctttcttgacaccaaatcaatcattgacatatgcagtacctcaaggaatgtatatatgaatgcactacatatagtattcctatagcctaaaccaaac

SEQ ID NO: 1863 - DNA, 796 bp, Zea mays
agtacattaaaatgtttcattcaaacatgatctgaaattttgtacacaacacactaaaatatgatgatatacataataagatgtgaaaagaatctaaagtaaggtgacctttactgaacagcagcaaactatagggagaaggattaaagcttgtatgagatgcaagatttatctaaaaatatattggagtgatatatgaccattaacacgagaatgcacctgtattccaaaaatgctgctgacattgtacatgtgtgacaagccacacaccagttccctgataacagtgttaagcccagggcacaggcctccacaagttacaatgcaggctttcacttcatcggtgccaaaataaacctaaaaaaggttcaagtccaaaggtttctgtcagcctagatacgagtgatgagttcccgcaagtaaacaaggtggctaggggtatcttaccctctgacgaggcccagcacgacggaagtgaacaccacgccgactgttcttctgaacaacaacctgtaacaacagcagatatttttttaatataataataacagcagatatgaccccttgaaaattcagtgtgacaatatctcaatgtaaaatgttgattaaactctcttttaccttttgaggaacggtgtcatcttcattgacaaaatactgcctggtatgataagaagaaaattccagcttaacatatatcgcacagcaacacatggatagaaatcaatctaacgaactgaaagcagccaagcaatgtataagcaatacgagccatacttgacagttgaataggctg

SEQ ID NO: 1864 - DNA, 788 bp, Zea mays
cgcctgcagggtggtgcttacacgtattctattttatttctgaaattaaattgttcacgtgtacaaataatatgatacacgtacgctgtgcttttcttcgtcgccattgtactcgtcaggtctatatataacgctgtgcgtgtagctaccaaaattgccgcgtggatgatctacaactttatataaaaaaaacataacaaggcacatcatacatgcagttttatatacaaaattaaatgcagaccggagagatcaagaacgtgatgtaaaacatcaaaactaaatatattatatgtgtttggtttgggtttggcctttaactcccaaaagccaaaccaacggcccgacagcctttttcaaaaattaactcttttgctgtataaaattgaaagtatctttaaacttgtttttagtggtttaagatagaactatacaaaaatagaagatcttttatcgattttcaccaaacggtttttagttttaatttttactgctcacaacattttgttacacatgccacagcctacattagttttttttcacggttacaatcaaaccaaatagatccattgtcaaatgggtgggctgatcgatcgaatgattggtgtaaaacataaatttgaaatatgcatgtactaaattaactaaatgtctggcccaccctcgggcacgcgccggttggttaaattaaatatactagccatgaacgtaaacatatgatatgggacgaccgacaatctaatgctcgtacaaatgaaagcagccactatcatacatttatcaataga

SEQ ID NO: 1865 - DNA, 710 bp, Zea mays
aggttaacgctgtcgtcatgtattaactattaggtgacgtacgcttttaattacatatgatcaggtttcgtgtggcttcatattacagatcgactactacttattgttataaaaacaagctctaagggcaactgtaatggagttgctttgttccttttcagtccaatgttataaaaaacaagctcgttctttcagatctctaagggctagcttgtttgtgaacaactgtaatgaagggaattgagagggccagaattacttatcattcaattttaaatagtaacagattctaggcatgcacttcaattccctccatcacgcttgctcctaaacaagctcatgtgtttacttgctggacagcttgagacagccatggtatctctgggaatagtactgtcccaatccaaacaaccttaattatccgttgcatgcatgcatgtcgttgctggttgcctcggcttccgtcaagaacaatgtgaacttgacgtttaatttggcgcaagatataaacatactatataatactaaagcagaaggggcaagaatgtcgtctatatggtgaattgaatacaaataaagttgctgtacacggctgctggcaccacacgctttcgatccgtacgcgtagccagacgcgtatatgtactaactctggatgtgcatgggaatatgggatcgatctgcactgatcttggtcttatacgcggcta

SEQ ID NO: 1866 - DNA, 783 bp, Zea mays
atacttttgtcacatgaagagagagatggtttacctgtgtcaatcaggcagatatggtttgacttaagatccaaaccttcttttaagactgatgccaaaatgtggatgtgtggaacagaagatttttgggagagatcacttgcagatgtcattgctgaattgtggtctctatgtgacaagcctaccctagatggatatcaagtggaagcagttcagaaggatacagttgagaccactgtcttggataagctggatccattccaagcattatcagaatacatctcatgctatcggaataataggaaaaatgctcttatcaaaaaagagtgggcaaagcaacaccttaaatcttcaggatggacctttctggatgacagacctaagaacaagttttacatctcacctgatggtaagcggtttccatcttttctaggagcatgccaggcgtgtttggctgcaaaagaagcaaatggttaccaagatgatcatacagaaaatttgcatctagacagtatgagtctggtgcacaagaatgcatgctacaaccagacacacatggatcttgccttggtaaagaacaagtccaatgataaatggatcacgagcccatcaagatcttgggagttggttcaactggatgctgaattttccccacagatagtttcccttcttgctagttatcaagatggcactactgtccttcagaggacaattgatagaactctgagtgtgaagctgaagaagcatctattggcactgggttggagtattaagttcaaaaag

SEQ ID NO: 1867 - DNA, 770 bp, Zea mays
aatgggccttgcagggtaacctctctgctcacattcttccttttttgcagtgctagtaggtccacggtccaccaggtttctgtcggacgctcagatcgtaacagatagcattggatatttgtgacagatttctacattttgcggaaggatgttgagttggctcttgagcgtgtcaatgaagtcaggcagtctgccggtttgcaacagctcgaggaggatatcgcttcgcttgagaacaagtccagtgatagttccttatgggatgatccttccaaggcacaggggatacttgtttctctgacagaggtcaaagacaaagtgaagcttctcaacgatttcaagttacaggtctgagcagtgagcactcatggcattgccgatgaactgaatgtactatttcacagtttgtatgataacaacatggcatatttgctgcatatttgcacagcttgtggtagctaattaacaacaacaacaaaaagaatctactacaaatattcttgcaacagtttggaattatacatgctatcgcttctcgaggaagaagagtgacatatgtcaacaatttggcatgagagctactgcactactagttcttagttgtgctgttccttttctacttgtagattgaagaagcagagactattgtgaagcttacagaagaattagattctatagatactggtcttcttggaggaggcctcaaagattataaaggcattaaataaggcattagacaactttgagatgacacagcttctttccggacc

SEQ ID NO: 1868 - DNA, 643 bp, Zea mays
atcttgcatgcctgcagtactcaccaaatctgcgttgcactactgtaagaacaaatttgaaattgtaactgacgaattagtgaatccaaactcttctctaggtctgtaatattatgtgtactataatgtttatctactctacaaccatcattggcagcttaattgtgatcataccacagtatccaaacactccaacgttgtacaattcactctgatttactatgcaacacagttgtacaattcactctaatttttactatgcaacacacgcgcatgtgcgcgcagtcgcagagcacactagtttcatatatactccctccaaccatagatgcaagaccattagatttgacctaaacagttaggcaatcccgagcagatagagaaatcatgtgtagccgtatatctacttgaactatctatctatgtatggatttgagcgccaaatctctcgtttggttgtaaccggtggactgaaaagtgggtggaaataatgtgtgaaatgacaaaattcgatgtggtctctagctggagtatttattagtttctgtcctggccgggattgtgtctgcgcatctcttttttctctctcttagctggcagctggctaggctaaattcttacagatgaaataaaatccgacaga

SEQ ID NO: 1869 - DNA, 822 bp, Zea mays
cagcttgcatgcctgcaggagaaccaacttcaccctcttcattgctttttattggtgtgttcttcccagaccattcttcttcatcactagaatcagatgatgcttcaccatatgcctccttttgagtccagcaagaataagattatgtcatgacttcatggtcagaaaagaaacttctcacatgcaagcatgcatcaaagagcatacagcctcaggcaaaaaattcataacctcatgtaatattaacatagtatagtacatacatttgagttgctaaaaaaggctactgagtttagttgcacaaatcagtatcaagattgaatgcagcagcacataggtataagctaagagcactactggaaatacctaaattcaagacacaggacataacctagattatgcccatatgccttttcaacatattttgaatttacctagattatgctggtttattgacttctagattatgcacatatgtctaagatcacattccatggttaagctcataattgtacttttgaattttgcccaattcctacatgaaactaagggggtgtttgaatgcactagagctaatagttagttggctaaaaaattggtagtgaaattagctagctaacaaataactaagtaactattagctaatttactcaaagtagctgaactattagcttaactatttggatgtcttcagctaattttagtagctaactgttagctctagtgcattcaaacttggtctaaagcaatcgattgtatgaaaaacagacacacaataggcattattgaagactaaaacaccaaaaaagaaggatttaaacc

SEQ ID NO: 1870 - DNA, 1076 bp, Zea mays
aacacacgtaaggtcgttgtgtaaaaaaaaatgtatagctcggcggacctgactcagcgcctccgtcgctcgactcagcgcctccgtcgctcccttcagccgacgggtcgccacgcccgcctcgtctctgaccagcgcgagggcagacacctcgcctccggcgccaagggtctctccccccgccttcggcgctggcgcagccgtcgcgatcgccgcgccaggcacaactagagcaagcgggccctcgtccgaccctgcaacgcgtcaacaaattaaaaaaaagtgtatatatatatatttatatagacttacccccaagataatcctccacatcaatctcggtgccgaagtcggcaacgcgtttgccaggcggcggtagcgatcgggccgccttcgcagcctccgccactccgctgacatacggcaccaccttcgtcagcttggagcctccggcgcccaccgtcgtctccggcgccttgctaggcgcggaggcgcccaccttcgccggcagcggcggccggcctccgccgggggccgcagccttcgccggtccccgctgcctctttggcctggcttcaacaagcctgacagccgcctggcgcttttgcacagccccctggcgatccttgtccatcactgccgacacaacaacagcaatattccgcccataaggaaaaactctccatttgcgaaccatgcgagatgtaaaaacgtccccgctggccgcgcgggggataggaacattcctaggccagcaacccccggtaaccttcagcatccgagccgaagactcccggagctcgggcgaagacatcctttcccccggggccgcgcacgtcctcatcaactctctagcaaacccatcggaaaccccaagtcctcccatggcagtacctagtttcctcttcttagaggatggggcggccgccggtgcagggtcgtctttagtctccaccaccggtttcttccctcggcggtccgcatcgtcttgaccagggtagccctcgtacggcaattgatttaattcgaagaccctgttcaagcgttcatttgacccgcggatatcaaagctgcgc

SEQ ID NO: 1871 - DNA, 794 bp, Zea mays
cttgcatgcctgcaggatggacaataccagcttccttctggaatggcctacaaaagcagaatgcaactgaaatatctttcctaaagcaagtgtaaatagaaagaacttgtgcagaaataactgaagaaacacaggaatgatataatgcacatgctcttcatcatactcaaaaaagagaaggaacatttatcataagttctcactaccaatatgatatggattgagacttgagcaagaatattcatcaaaaactaacaaccatataactaaagcaaatggaagcaaaaactgtcatgttaccaggctacttattggaagcttgcaagttgcaacaatagaggtactagcagattgaaactagagactaagtagatagattcacacataggataatggagtacctctacctccaagccgacacaatcatgatgataagatgatgggcaattgtcacaaagtaataaatccccaccatcatggcacacagagcatatcgaatcactttccagatcagaactactccccttcaagcgcacatgcagtggatctctgggcttgtttccacccatgaattcaactaaacactgtgatagggaccttccatcctttaaaaacatatgagacgaaggtaatggtgtactgctcccagcatgaacctcaaaattctccacagtgaataattcattacaacacatgcattttattccatctctgctgatgggaaccttcctttataccaggtccatcacttcgcttatatgtaaccttatcccttggtaccacaatatttttct

SEQ ID NO: 1872 - DNA, 772 bp, Zea mays
cgcgcgggatctgtctcctcgggagtcggatagctacgaacgcgaacacagcaggtgatggatgggaggcagggcagcagtctgggacagggacaggacactgggagggatgttaataatagcaagatgtttttggtacaagttgagatctcttgccttgtaagattgtacgtatgtgacacctttggttaataacaggcatacggtattcttgatcatcaacaacagtgccaccagctaatcctcctcctccatcagcccgctatgcgttgccagttgccactttgtgaaggaagaaccatcacatggtgctgcgcagtacctgaatccgagcactataaggccctgttcggtttccactgattggagatccggaataattcctagccaaattatttctctcatttatataaattttgatgagctggaacgaatctaggtttattcctatgcaaacgaacgggccctaaactgaaaaacatgttcttttttgagctggcctggatactaaaatttgtccagcttgggcctcctccccatacacggcccggacttgagccccatctcatatcctcacatcgcccttttcactagcagcagggtctgcgtttcctgacctgggatatttgctgtgggtccgcacgagatattttcctgtgggggccggccgatctgtgtcatgcgaaaccaaaaggcattatcttatctccaacgcatgtactacgcgccacagcttgcttcaggcgataaggccatttattatcggcgaaac

SEQ ID NO: 1873 - DNA, 743 bp, Zea mays
ccgagtccaggggagccgcgtccggtccgcgggttgccttctcttgcttacttgctagctcctcgtcgcagtagcagcagcggacgagcagtcgagcgcagcgccgccaatcattccttcctctgccttcctctctctctccccctcccggcgccatctcgacgctcggccccccgcgggcgggatccgtcgccacagatccgctgcctcctccccgaggcctgcctgaccgcccctcatgctcgggtagcgctttccagtttcacccgttccccgtgggccactcgaccggccgacggagcggaagggcggccccggccgtgaccgcggcgcgactcgcgaccctcccagtcccagaagcggcgtgcggcgaccgggaccggctgctgctggtgaattcgcgccggcgaactgaattcaggcggcgaatcccctcctctggtcctgtctcgagccctcggcgtccgcgcctcctccgtctcgccgccgttctcgacgcccgccgatccaacaccgggtctgcccaacagcccaaggtatggaggcaaggtgcaacgtgcaaaccctagcttgctggttgctattgtgctctactggacagcacgggttgggctaggagttatgcatttttttcctgttgtaattgatgattcatttgctaattggtgatttaatttcatattttctttggagacatatttgggtatgaagaggaacacagacattgcaagttttgaatttta

SEQ ID NO: 1874 - DNA, 780 bp, Zea mays
tgtaattaagagcttgcgaaaaaaatggtggaaacagtaaccaggacatttgttgttcagattccacctagagtcaactaaatggagggcaaaggacataagttcaaatttcagagaaacggcatagttgatcaaccatccatgggtagagtagatttgcataatagagtttattaccgcttcactttgttgagttacaccaacaattaactgagttatattgtcttacgatctgagttgacccctaacagttaactaagttgcattctgtctcaactagagttgtaaatgaacacattacctttgggttgcattcagatctcagaactggagcctcaaataggtccattggatcagttccttcccagttctgatatgcaggggggaaatctacactggtaaagataaggagattaagaaaacacaaaaaaaaatgtatgttcagaaactgtaagcatctaaacatctgtaggtagatcctgctaaagtttatagctacttgtagctttcaatattaacacttcaactatgcaccagtccaccatgtctgtacatatcaacattcaacactgatatacagaaatgtgtatgtaaaataattcaaatgtgcatgctttaaatgatgtagctgtgacaaaaactcttaaaacaactaaagaataaaacaaaaccttaagacatgtccaatgactgatgtcactttgaagttcgcataagaaccctgaaatgttccatcaaactcatggacatctgtgctttcttttcttgtagacatctgca

SEQ ID NO: 1875 - DNA, 775 bp, Zea mays
agcttgcatgcctgcagcttgcacttgagatatttgcctcacagtctcaacttcttcagacgacggttctcctgcaacttctacttcatctgttttctgtaccaggtcaacttccatggaatccttaggagcttcggactgatttgaacctagagaaaaggcatgatcaaatggcaataaaataagcatttacttttgtggaagctgtagagtagctttattaaatactctctccgtttatttttataaggtactctacagctttttgctaatgtcctagttagaaccagaagaagaaaatatgttgttgagtccctggttaataatgattgggtcaatgacattcaaggtgggatttcctggcagcattttgcagaatttttcagactctgggatcatattcaggatgtgaccttaactgaacaggaagatagacacatatggaagctggaatcagatggggcatactcctcaaaatcagcttacagggccttctttgagggttctactacctttgaaccacggaagagaatctggaaaacatgggcgccaaacaaatgcaagatgtttatgtggctggctgtcagaaatagatgttggacttctgatcggcttgctagaagaggcctacctcatccagacagatgtgccctctgtgatcaagaggatgagaccatccaacatctgtcaacttcttgtgtggttgccagacaagtctggttctctgttctctactctgaacctctcaaccttggtccccagacaacaagataat

SEQ ID NO: 1876 - DNA, 568 bp, Zea mays
aggcgtagctacatatatatgacccactgacgtgtgggactggccgtgtctggtcccacgtgtcggcggacagacgtaaccgtagaggaacctcgtccggccagcgcacaggtcaggttaatcagatatatatggtggcatgcagtatccggcggcgtttggaaaccaacatattttgagaatctcgaccatcacataacccgaggaatccagccggaccttgataatgatagatagtgtctgagcagcgcggtatcctagataaaaactcggcagtgtttggttggaatcctgattctagaagtcggattcttactattcgtgcataccaaacaaacgccgcctagatatgatcgaatgagtttgaatggattgagtatggtgttgaaaatatgtacatatactaggagagccatactaatttaattataaacctcttttttggattatagccttaaagactcatcaatatatctatagaagaccatctatctctatctctagcttgtggcaataatacatattgttgcagatacataaataataaatgaacgtagtagctgttggt

SEQ ID NO: 1877 - DNA, 897 bp, Zea mays
aggcgtagctacatatatatgacccactgacgtgtgggactggccgtgtctggccccacgtgtcggcggacagacgtaaccgtagaggaacctcgtccggccagcgcacaggtcaggtgaatcagatatatatggtggcatgcagtatccggcggcgtttggaaaccaacatattttgagaatctcgaccatcacataacccgaggaatccagacggaccttgataatgatagatagtgtctgagcagcgcggtatcctagataaaaactcggcagtgtttggttggaatcctgattctagaagtcggattcttactattcgtgcataccaaacaaacgccgcctagatatgatcgaatgagtttgaatggattgagtatggtgttgaaaatatgtacatatactaggagagccatactaatttaattataaacctcttttttggattatagccttaaagactcatcaatatatctatagaagaccatctatctctatctctagcttgtggcaataatacatattgttgcagatacataaataataaatgaacgtagtagctgttggtttgtgattttttttccaagatatggtcgtatgacttgaattacatgcatgcttgcacgtatctagctctactaattaaagctaatttgattccttatatgtattcactctgttcttttttatttgtcacagtttagttcaaaaataaactagcggacgacaaatattcgagaacggattagtttttatgtatttaagcctcttaatggccctctggaggggtgcaacctccagaaaaaaccatcttattgagagtcttactgttggaacaatttttgggtgtgtttaaaagcggtttatggaaattgcaattaaaaattttgtcttttc

SEQ ID NO: 1878 - DNA, 782 bp, Zea mays
cacgtgaaatcgggtacgagcgcgcagccatcgtcacgaacgaccgcgcgtgcaggacgacgacgggcgtcccgttcgttcatttgcgccgcctgccccgtgaatccgcgacacgggaggggccgggaaaaacgacgcgacgcgtgggcgggggcgtaatcatggtgttttcccccgggcggtttggggggcgatgtggcaactggcctggcctggcctgcacactgtggactggtgaagcgccgccctcacccggccgtcggtttcgaccttcacgttcacgctccacatgcgtgcaagatgcgacgcacggcaggacgcaggcaaaagcagcagcccggtgaaacttgttggatcttttatgggcttggcccatttattgaataaactctatggtgtgtaatggtggagaataccaatagtaccatattggaagtccaagggtcttttgccttgacttatatggtgggatttattccacttaacttgagaagtcaagaaatggacaagggcgtgccacacgcgcgcgcgcgccgccgccgccgccgccgggcgtggcgtggcgtggcgtggcgtggcaggcgagcgggcgtggtgtggtgacataactcggctagagctggccgactcttggcgtgactcggcgacctttctccttcagcttccctctgcgagaggttaaatagaggagcacctctgtcactcggtacacgccgagtgagggtatttccatctcgtgactctgcgcgcacagagtagcgagagggcaggtgcctccgaag

SEQ ID NO: 1879 - DNA, 842 bp, Zea mays
caacagtcaaaggcggcctactgcattggcggtagcagctgctcgtcatcagatcttgctgaccttgggttaatcgattttgaaccaggtccagcacaacccatatgtggcctccatacatggttttgactggtctttattttttcttgaatacacaaaagagcacaaagggcaggcttggtgtagtggtgagagttgtctcactgagtcactaggtcacaggttcaaagcagcctctccgcgtttgcagatagaagacttgcctcagtttatcccttccctagaccccacccatgtaagagcctccggcattgagtttgctcttttttcttacactagagagttatgtatcgcattgagaagaaggttttgtcaggttgagaccaaatcatatgaacagggctatcttcaatggatgaaagtggaggcagagtggaggaaatagtaatcaccataagcaggaaaattaaacatacagggtagaaaaatggatgagcaccatatgcaggaaaattacagacccgtctggcagtatattagaagttaaaaaaaattgaagtgctgggctctgcccgcaagtatgtaccgcattatgttttttttaaaaaaaaaaatccaacatgtagcaaaccaaatgtgagatcatggacaagaaaatatctttcttttattgaatataagagcatattttgtcagcccaaaaatcattagagcataccacaaattacaggcagaatggcagaacacgttagtgataggacatactaacctcagctatgtagccagcacgatatacacagaatgaatctaccaattcttttgcagtcttctgaaaaattcac

SEQ ID NO: 1880 - DNA, 777 bp, Zea mays
tatggaggctgtagaggctcagcaacagcaagttacgtatgaacgtctccttgcaatggtatggtttggctcagcatattcttagattaagtgaaagcacctaatccattttcacagtgattaggatctcttatatgtgaccactcaatcctctcaagcctttccgtcaacaacttgcacttaattgctagatttcacattctaaattttttccatccttggtactattttcagcatgtctcttatataattatatatgattcttgtgctacctgttcagactggtgttgggggttgactcatccctagtgttcattctagaaatttgattaacagaccatcccttgttttggaagagtagaactgggatttttggatttaaacacgtaatgcagtgtcgtttaatgcagcttataagctccttatggccaaaataaactgagactaagaacatctccaagagtttccagaacccactcctagtcttgattttttagcaagatcggaaaaaggctctccaacaactcttatctcaactacccaatctattgcacacttgggaaaatcaatccaagcatgtagaaatatacgcacgcgtatcgatcggtcaatctggaggtagaagaacacggggaagaatatggagtaaggatagggttcccaatgcaaatgtacaagaggaaaaaataaaatataaaaatggtggggtgatttggaaatagtctaggattcctgctgcaaaattgccttctgccttttaggagcgagatttggaaa

SEQ ID NO: 1881 - DNA, 667 bp, Zea mays
tttgcatgcctgcaggcagtgcctgggcagcgccgagaagccctccacgccgaggatggccatgttgcggtagatgagcgcgtagggggccttccagtacccgtccggctcgcccacgtcgaacgccctgtagaagagcatgaaggtgagcggcgccaggacgcaccccatcagcgtgcccacggcctgccccaccagcatcgaccgcggcgacgtcagcgtcaggtgccccgtcttgaagtcgtgcatcaggtcggccgacacgagcaccagctgcttcaccagcccgcaccccaccagcccggccaccacgccgctgtccttccccgcccacgccgccagcacgaacagcgcgatcttcccgtagttgtaccccatgttcatgtccgtcagcccggtcccgtacgcgttgcagaaccccagcgccggcgccagcgcgtacgccaccaccacgtagtaccacctcacctcccggaacatgatcgggatggcgatcaccgcgatcaggctcagcgcggcgtaccccgcgtaggacagccacgtcgggatgttgtccctgttgaacacctcgtcgcgctgcatgtcgtccagcgccatcgtgtccgcgtccgccactgcgcagtataaattccaactcccgatatagtaagggcttggttggaagagg

SEQ ID NO: 1882 - DNA, 851 bp, Zea mays
acctgagggaaacacatctgaattccacctcgcatggcatttggcggcttgaaggttgcctgcacgtcaaaaacaacagacatgaaagtgctttagtaaggctacacagtcccactactggccctattaaggaagacgagaaaaaggaggtgtcagcacatgaagccgagggaaaccattatctatatctatattattttattaagaacctaatgcttggtgctattacggttttaccctctatactgacactctaaacccaccccatgcaccccgtctcagcaccgtgccctgttgacccacgttcagtgcccgcacagcgctctctcagctactgccctgtggaccccagcgccaaaaaatagtataagcgaacaatcaaatcccaccacctactctataaattatggactctagcgccataaaatagtgcagagcgagcaatcaaacctcaccccctactctataaatttggagctaaccaccaaaccacatgtaccttattattatttaataaacaataattatatttaaataaatatcttaatacatatctatatgatatataaaaaccgtaacaaagaatgaacaactggctactgaaattttaggaccacaaaatagtcccagctcacaggtaacgtaggcacatagcaaagcttaatttgtcattcgcttctccagccgtcaggatggactacagaaacaatggcaattatgcatgaatacgattcacagtgttgttctttgcagccccggttgaacagacgccttttcacaggtgcccggtttaggaacacatacagaaaatgctagagaacactgaagccaaaaaagagggaaatttgaaa

SEQ ID NO: 1883 - DNA, 805 bp, Zea mays
acgtctgccatgctgaactcggcttcctctagctgcatcttccccgactccaccttgcttgtgtctagaattgagttcaggatatctgcggaaaacaaatcgagagcatatccatcaacataacctactaattttcttctttctgcaaataatatacaacagctagccctgtttggttagataatctgtagctggcacctttcctactatagaatgttttaattgatgaactatattagcaacattagtacgtccttcctattgtagctgagaaaatacagtagatgacaaattaatcctacattttttcttagtattaactggtagaccatatgtaacactagaaacatcatattagtcacagcaatattcctactttactagctagatgacgatgagcaaagcttgatggaaattattaattaactccataataagagtctatggtggtggactaaccgaacaacttgttggtgcagacacccatctggtcgaggttttccatgacggcggggagcgactgcgcctcctgacgggacatgtccacgagcccggcgatggcggacagcgcggaccggatgtcgtggctagcgctggcaaaggcattgctcttattcatgctcttgcgctctgcctgccgcagcgcctccttctgccgggccaggtcgacgttcagcgccatattccgcgccgccgcccgccgaagcgcccgcaccgcgacggcgcacaacaccgcggccaccagcaccagggcgctcgcaaagacaatcacggcggggatgcacaacgccctggagcatgtggg

SEQ ID NO: 1884 - DNA, 828 bp, Zea mays
gcagcttgggtgctgcttaaacccgtaaagcaagctacagtcacttggactcttcatcttcatatgtaggatctctgctagttctgtcgtactgaaatcatcgaaatagaagaatttcgtgacccgcctgcagaagccatcattcgaggcaatgactcgcttcattggctcgcagtacccagcaaatacgacaactatcttgccactgtccattacagacattatctcctccaaggcttctaaaccataatccttgtcatcggatttttgcattggtatcaacctgtaagcttcatccacgaagagaatacctccctctgcatcatgtatctgttgtcgtggtcacggtaacaatgtatgcgtaaggtagaacacagaatagaaataagttcagaacttgtttcgcaatttccctgaaactgaaatttgtgcagctgacggagcctttctgatgaaaagaaaagagaggattaataccttcctcctagtctttggtccagtatgccccacaaattctccaacaagatcagttcgctgaacttcagttactttgtcagtagggagaattccaaccatgtggaggagctttccaagaattcgagcaaccatagttttgcctgcaatagaggatagataatataaacagagcattgatgttttcagtaactatctacccagcacttgtgcattttactgcactgtacatgtaactgcaaaatgtataagaagcaggcagaattagaaagaatgtagccttttaaggacatgtttagccaaacttccaggtaactaatttccgttcatgatcagatcaaaagctcccaacac

SEQ ID NO: 1885 - DNA, 748 bp, Zea mays
tcaaggtagaggacatggatgcatatgcgcctaaagatcttctggtggtcactacaggttcacaagtaagacatacatgctatatatatatatatatatatatataggcctaaatgtttcatgtgctcatcagccaccttaaaactcttgcatcgctgtattaaactttgccagggagagccacgtgcagctctgaatcttgcttcttatgggggaagtcatgctcttaaactatcgaaagaggatgtccttctttattcagctaaggttgtgctatttatccttcactttattttgaccatagctttcgcaatatttcatattagtcacatgggaggtgttatacatgttagctgtctaggtctttttaatattggtcatatgtcttcacattagtgggtgcttttaatgctcgcaactgtattgaacaggacttacttatattatgaagcatatttttttggtatttgaaggcctgtacaaattattatttgctattagtaagataatgcctggaaaatggcaccaaattttctagtgcagaacattggaaagtaatgtatcctttgcatttgatactgaacatgctagtgaagaaacacatctgaaaatagttctgtatgtttttcttaatctttataatcgttccactattccagaatgttaatgctaccttatacgcaaaaaaatgctttggttttgggagttagcattgcaatttattgtcctgcatatacttttctttttc

SEQ ID NO: 1886 - DNA, 738 bp, Zea mays
ctgcagacatgtcaatgaaatccagtctatggtctcagctggaaggacttacagatattctactggaggcatatatgtgccttttaactgcccaatttgaacgtgggcaggaacatggtgtgctagtgcaagaatattgtgaacgaagagatgaacttctcagatccctctacaaccttgctaaacaaatagtggaggccaaataccaggtttggtttaattgaacatcgttattttcctaagaactatcattactgttttaagatgttactttaacttttggaattggtgttatccatttatttgcttattcggttatctcatgtttttttggatctgattagtacttgcctatcattcacttggataatagtaatattaaacttatttaatatgtgcgtagcttatcttagtgataatgtgctattgtactggaataaccttcaaacttctaacttgattcacatatctgtaatagtaaatcaggcaccattttggtattcaggtagccatccttccatattggacacatgttattgcattttgatgatttaagctcaactagttctccgattgtcgattgatttctacagtagtcattcactctattatttttctctctcgaacacgcgggagagctgtgtatcatttcataaatagaagaaaaggacaggacaacagcccacacactctaagcatgctgccataaaaactcacccacaaacaacacccacactt

SEQ ID NO: 1887 - DNA, 762 bp, Zea mays
aagaagaagaaaaaaaaaaagagaggagcttttggtaaggtcacgtgtttccactttccagccagaggttttgttctgtcgtcgtcgaatttcaaagtgtctcgtcagtttcgaccacgctgggctgccgcctgccaccgatcaagagagctgtgagcacatcggaaagcccataactgtgtgtgtaaagaactatatccgttctggaatgccagggtaggtcgaacagtggaattttggaacagcaatagtgtagaatattgccaatgggggtggtaagataagggtttttaatataggattcgaatagtagaacaaacaagaccagaacaaatcgagaatgtgaaggccacaaatttgtggtctgtcattacatgatatacctatgatataatgcaatcgtgccactacgtactttgtagagaaaactcataacagaattatcagaaaccgatggggggaatgctaaattagccaggaccagtcaaaactttcaactgcaaaaaaccttctatatataaattttgcatcaaacattgtttcattaaagttctaattgaggtcaaacattaatcatagaaaaactaaatacgtgtaaggaagtttaatttttcttggttgtaaacagaaaggttccaagcaataatgtatcaataacttcactagaataagcgaactattgccttgtatttaatccttatccgcggccaatgtaattgaatgaataaacttgtcaggtgggcaatacaagtattccagtag

SEQ ID NO: 1888 - DNA, 797 bp, Zea mays
  unsure (1)..(797): unsure at all n locations
agttgattcatttcccgcacttatccttgaccagactgctcgaacctcccttgtggaaagggacctattcttaaaaactcgacccgcggggggtaagacagccctcgggtattatattaacaggacattctcacataggtcgagaaaccgccgaacccctaccccacccatacaggccaccgtagtccatgtgaggacgagtgtaatgggaccgcgccctagacctatgctttggcatgggagagacgagggaatttttaacccctgcctgaaattcgctctcacaaggatacgatacgaactcagggatactcaggacttcagaagtgctacttggaccacaaccaactcagctagaggcccttttgtgggacctattcttaaagaaacatgaagtattccaagttcaggtatgatcaaaatctacgaatgatcaggagatagggccaaaccctacctcaatgagagcagcctcccccttatccagctcctcaggccattcccctatcagttcacattgccaattgagctgttccaaattaccacagcaaattattggagaagtttgcaacttcgtgttagataaatttaggcctctacattaaatataagatcattttttttctcgaaagtgcaggagagctgcacaccattatatgaagagaggaaaggtccaaaatggaccgaaatacaaagcccggacggcaggaaacaaaaactggacctaagcaccaagatcctaactcccatgccttctctncaacaacataagaggagaacccagagcaaaggagaag

SEQ ID NO: 1889 - DNA, 570 bp, Zea mays
attagaaaaataaaaataaatcgacattcttgcatgcctgcagttcaacaaataaagtagacatcaagtagcagctatgaagaatccaatgccatcctcacaagtatgggatttcctccaacactactgctgtgaactattgcacagtactatcaacagaacaaacaagtaaggctgcactcttgctttaatgtggagaatccttaaattgactcagcaactagaagtacataatgcataccttttcagacaacttctgaatctgttctatgtaatgctcttcagaaaaagtgttacatactttcccaactccatggcctgcataattggattagcatgtagatattaataacaaacagaagcataaaaattgtaaactttacaacatccctaagcctctctgcatattatacgggtaagacttagcgcttaaagatacccttccccagaccccgcacagtgcgggaagcctacggcactgggtatgccctttacaacatccctaagcagacaaggggttgagagcagtaattccctctaagggctagtttgggagccacaaaaccggag

SEQ ID NO: 1890 - DNA, 771 bp, Zea mays
gctggagggtttttgttgaagtcctcttcatgttcaccatttctaaattgtcataggctcatagcattgtagctgatcagtcttcaagatcttcctatgagtacatagaaaaatcatcatcgtatctgtgttaagtatgccaccatggtggggaaaatcttcatccaaagaagtgaaaaagtctgccaaagaaaacctcatcgacacatttcagcgtctcataagttcaaatgagcaaaagggaagcagaaaatcacgaagtagtcgtagacatggtaaagacacagctggtgacaaaggttgctggtccactgctcaatcccgctcaacatccccttcaaaagaggtctctcgatgtcagagctttgcagcagatagaccacatgcacagccacttcctcttcccaaatcacgtgctaaggtgacacgtacttcttctgatattaccaactcaaagtccactttggaaaagcatggcaaaggacaactgcttccactccctccaattcagcctaaaaaaagacctgaagctactgaacctgttactgaagtagctactgcttcggtctccagcaactgttctattgacagtgatgatcctggtgattctcagcttcagagtcctgtgggaaatgaggctgaaaatgcgactagaattactgcaacaagtagttcaaggtatgccctcaggttccatgaataattggttcttcttttattggtttctggaattacttgaattcatgcttatgaattttgattactcttctt

SEQ ID NO: 1891 - DNA, 759 bp, Zea mays
aaaaaaatatacatttgacatttgtacgtgagagagctcgaactttgacactgtgattatttaggtatttaattagttacctctaggaaggtctccataaatttcttgtccagtgggctacttttgttggtgttcggcctcgccctcgttgccacaagcatctgcactgcttctggaccggccacttctttagtgtacccatcctaattaataaggagaaataaaggcgttagagtgcacaggtaaaatgaaggcgtacattgtttgttggttatatatattatattacttggcatctgcctcggttgcttccgggcaccaggcagaaggggtctcttatcccggtctcaacatggccgctgtgaactccaccctctcgcagcccaaacttgggagtagttcgtccatcgaaaaaggggttagagccgtcgtcacgcgcaccgtaaggtttgttggacgttaccacggtgacgttcatgtactcaagctcggcaaactcgttgctggtttcgccatcgccatggcgcatgctggagatggccaccccgacggcgaagggatcccacaagtagaagccctgcatgcgccaggaggggaaaggaagatttcaacgtcttgcaatgcaatatgcaagagcaagcatggaagaagaagaggaacaagacttgccgtgttgtcatggctgtcggaccgccttctcttgcgcgccagagccccgttcagcgacaggagacagtactgtgcctcgtacgtcctctg

SEQ ID NO: 1892 - DNA, 836 bp, Zea mays
ccggggatcctttagagtctacctgcagcaaggtttgtgaaactgcaagaaaccctgcaaaccagagggaagtcctactagaggtttttttatttcccagaaaggcgtccaatttcaatccccccccccttctgatacgctgaaacttatactacatgttacacaaactgacgctagtgagagtttctaataacaaccaagcataactgaaaattcttaaaaatacagaaaaaaaaataaaaccaccgcagagagagggagagagaacgaccgtacatattacattgcatgcacataactcatacagtactattattcataaaccacaaaagcatactaaaaatggaagcatcacccaaatacatcccacaaaagcaaggagcaaccatgaaatagactggaaaaaggagtgacagaactagactagacaaaggagtgaaaactagactgaaaactggagtgaacgagggtattgaaataaatcagaggaagaactgacactagggtaacaattgtgctgttttttcattgtggacttgtggtgcagctgtgaatagggaattactttggttatactttaaaacagtaatccaggcttacaaatgtaattgtgctaaattaatcttaccttgcggcataatggagattcaagttactcctatctagtcgcataccgagaccaggaatcttgttgttaatctttaggtaaattgcttcatccggtttgcacacgtatcacaagctcattagtggccctatcaagatctgtgccaaaactccccttgtagagatttcaggaacatgtcggaactgtaccctaatcttagctctgcaat

SEQ ID NO: 1893 - DNA, 832 bp, Zea mays
acctgcagcaagtgctttgctgaattttctcctgttctcttcttcctttagctgcctaaacctgcttgcgagattgtctgtgaaaattatagccaagacagaagaggtttaagcatcaaaatgaagttcaaaggcacctctctccggcaggttgagcattagagcgttttgctcgtcctgcggtaattattccactacctccctcagtcactacaggcttcgctcctcccattttccgtaaccacacctgctgggctgtgctgaggacattgtttgtaaacctaatggaaaacatggagtcaatacaaattacaaaataatcatgaatttgattgtaaaattcagtgaacagggaagggggcaaggggctgtgaactcgtgatcttgtatgaagcaactagcagtataatgtgaaacaaatatctgaacatatttcccattagaacaaaagagactgatgcacataccagtaaatagacaatcctgatggcactgacaaagagaaccagccaatcataaatggaagaaatttcaaaatgagcattgtgttcttctgtgatgggtcatcgctctgtggcagaccataaatcacaagttaagccatcgcaatgtataattggcactataacaaatgaaagaatatacagggaagcatccacctgaggtggcttcatgatctccatagatacatactgagaagcaacaagtagcacaggcaatacaaggtagcatatcgtgtcatgccagcctagcggaggatgaccatcctgcataatttggttgatatgttaaggttgtagcattaatttcaggcatttagcatatctgcatt

SEQ ID NO: 1894 - DNA, 801 bp, Zea mays
agcactgctgggcaggtcgaggtttcttgcaagccaccgccgccggtgccggttccttgcaacgggcaggagggggtggccgacaagccaacccggccgccggggctctgtgcggctggctggatttttgtatataagattgacgactagtgtcgccaaaggacgatcccatacattgccacttgtcggggaggagagtccggagctgagacggcgagctgcctagctccggtcctgctctatatctcagctcctccgttctgtcctgtggccccgagctgagctgagctgccaaggatacgtacgtacgtacgtcttgagggaggctgccggtcgccctcttctctggtcgacctcgtcggggttatgcggaggagcaggtcgtgcttgtcctgcgtgcccatggggacggcggcgctgcccattgagaaccacttcgtcgctccggctgcgctaccgtcggtgcccgcctcaggtagtacatctatcatgttgataaagctcattgcttgaatacctgctgcattcatagctaatagtactcctgttcagcttgtttctgaacttgtccaatcactgacgggtttgcttactttccctgtacggtggctcttttttgtggcagattgccctgcaaaaaattttttttaaaaaaaatagaggtagttttcctgcaatcacgtcaaagaacatgcttcgctaaattaagggccctgtttggtttgtggctaaatgtgccctactttggctaaaggtagtcgttccaaatgaataactaaccttaaggcagaaaaagtaggc

SEQ ID NO: 1895 - DNA, 725 bp, Zea mays
aacttatagctctttgctctacttatatgggaagaggattcatacatcatcttggctcaaggattacaaagtgaggaaagagctctgaaaaggtaaatttcctattcgtaatttcatcaacttgttctgtcaccagaatttcaaagcaaactggaagtcttgtgaatacttcatcaaacttgctcaatcttgtgcttttccattgcttgcactttatggttcttgtgccgatgcactataacctgtaatatttcaggttaggttttgtttctagcatacctattcttccatgtatagtgataaaagccaacatactattagcattaacacacacacacacacacacaggtcctaggtgcttcacagaacacatatgttagttctaatttaaattgtagagcattatagcttttatgttagacatagaatataagatttgcaaattaagctcctagaatatagcttaaattatgtaagatcattggggggagggtagggcatttaatcattggtaactctttgattttttctgcttacgcaactgtttgtctaattaattgttagttgtatgaaacatctgcttgaattgagccaatagtttgacatcgctatctgtttccctcattatctattccctctagttttgcatttgtagcaattggtgagctcttatttttgttcatctgtcttctagagatggctgtcccacaagttgacaagaaaat

SEQ ID NO: 1896 - DNA, 681 bp, Zea mays
accgtccccgcgttcgggtagaacgcgtgaccgtgcagcgacgcgtatgccaccggcctgctcccgccgccgtccccgccgtcgaggtactccagccgtgacgcgtccacccaggtgcccgcgctgtgctgcgagaagtacatccggaggagctcgccggagaagttgctgacgcgcagcgtcacgtgctcccagtcgccgacgtgctcgccgatctcgccgagcgggatcgacgggatgaggccgaccttggcgcgcgccggcccgttgaacgggtagaagatccacaccgcgaggtcggccaccgtcccgccgagcatcggcttcgcctgcacgtacaccttcgcgccggcgaggtctcccctcttgaccttctcccgctggttcccgtccgccggcaggtcgagccagtacccgccgtcgttgccgccgccctgcgggaggttggacccgtcggcgtccaccggagtcggggtctggctgctgcccttctggtacatcagcgcgccgttctcgaagaaccacgccaccgacgacgggaagtagggctcgttcgggtgcaggtacacgtgcggcgcgtaggccgccaggagggagttcagctgggccaggtcgggcatggaggacgtgtagctcgcgctgttgttcttaagacacgccagcgtcgttgacacgcccgcc

SEQ ID NO: 1897 - DNA, 802 bp, Zea mays
atctcatgcagtatcattcaaggacaaagagagatctatagcaggttcggatggtaccagaaccttgatttgataaatattttagaactaatgtattaagaagctgacttagagcatagataaatatgatcacattcacaactgaaaataaatagaaacggatgctcggaaacacctgttaaccagtataaacacataacttgaaaaaacagtattggtgaaaatatacttttgtcatacaagtcactgatgttagcgattaaaaaaaaagacttgaaactactgcttgcttgcacccaacaaagtatgtgcatctaagatgtctatccacagtatctcgcatattcagactctagtgcgtaatccttagatcaagtagtcgtctccataaaccttgaaaaacgcctcataaacatgggaattcctctctctgatcaaggtgcaaacattgtgagcgtcccgccaccgtctacacttgaagtacatatggacaagcaaagtctgtaacacaacgttcatttcagagcctgtcttgatgaggcgggcatgtatctgccttccatagcgcagcagcccttggaaccggcacatgttcagaagacccgccaaagtgtagtggtcaggcccaacacgcgccagctccatctgacggtaaatgttcaccgtggcaacaggctgtccatccccaacgtaacctgagagcaacgtgttccatgacaccaggttccgctcgttcatcctgagaaacagtagctgagagactttaatacacccacacttggcgtacatatcgatgagctcg

SEQ ID NO: 1898 - DNA, 825 bp, Zea mays
gagacacccgtagatatgccaaccctggcatcctgaagagataatttgcagaacaaaaaaatcaaaatcttttcaagtctggtgcatctgggaatttgccaaggctatatatgagatggcataacataccactgtcaccgtggaagcagcagccgtgatatcttcgatttctgtgataggagacatcatcggaatcatcagtctagtcaggtcctcctcctccatgcctaccgagataatcccagagccattcctgatcatgaatgcgactgacttctggtccactagagtggccgccatcacaaggtcaccttcgttgtcgccgttctcatcatctacagcaataacaaactggagaaggatgaatagttaacttggtagctaaactcaactgtgctacggaaacagtgctaatacaggtatcacattcaaggtcctgtcctgagttttgaagcgaaggactttttgctcgatgttagtgtcaacattgtttcacttgagtcttatcattttaaggaaaagtaaataggtttgagcaatagaaaggtgcacgcacattgattggtacaacgtttaaggataagagcaggattcgctactgtatgtctggactactcatagcaaagtaccacattgttgtatttatacccccccccccccccacacacacacaaaaaaaaaaactgggcaagggcatccatctagttaaggttaaaactgctgaattcagtgaatcattcttgattaggagctgctgctatcatcgacaacaataacaaagtctttagttcttaaccagttaggaatttatgctaagattaaaag

SEQ ID NO: 1899 - DNA, 813 bp, Zea mays
atctagggtatgcctcaacgcctaggcgacgcctcaaaaaccatgcgagattcaactaacatttacacttatgtgcacaggaaaatatgcaatggaaaccacatcttaggtgaaaaatggaaaccaaataaaaaacagtattccgatcacttaatgaaaaattgcaatttggcacatctacagtacatccatagatgtacttttttttttgcaaaagtgcgacaaagtacatctatctatacaagcataatggatgtgccaagttacaatttttttgagcaatcgaaatatgttttttgaattggtttctatgtttccacctaagatgtggtttccactacagattttcccctgtccacataaggtaaggaggaccaatatggggaagaagaaaacaatgcaacttgtagaggtatactttatttgggcagtcattggcgttgctttggtcttccgtaacatatgagcatgaaccttcgacatgatccctttgaaggcgattttgctttagtgtttcgttcatagcccgaactgccctgttaaacaatttaaatataaaaataaatgcttcttgctcaataacagtatctaagactacatgcatgtatatgcaattacgtctcaattagaaaatagcagtatggtgatcaatgaggataactgatatccagtatctaggctcagacatgagcaaaacacgggatttttttttcgaaaacacaggagagctgcatttcattaaaaataagaagaacggtgcagagtctcaaattgacccttatgaaaaatgggataccggtaaagccaactatg

SEQ ID NO: 1900 - DNA, 698 bp, Zea mays
cgtgcagcaggcagacgagcgactcccactggttgcgccccagcgagtcgcccacgaacatcaccgtcttccccttcatccgtgtcaggaagaccgtggcgcagcgcctgatgtcacgttgtcccagcggcgccgcggccggcgtcacgccaagcggatggtcacccacgccacgtccccagaccggtgtggcacgccggcgcccacagcgtcgatgaggaggaggtcggagcagcagtagccgtcatgggcagtgccgcagatgtggagcagtcgaatgagaggctagacgggctggagcatcacagcaggctggtgtcgctgttggccggtagccgctcctcccccaccggcaccgagagggacttgtgacccaaggatctgttcccgggggatgtggtgtttgcgctcgtcgatgatctcgggctcaaccactccaaggacccatatgccatggggttatgcaatccaaaggtctccatcgccgatttcattttgtagacaaataagttagctcttctgatgacataccatttatagattgccaacgatctgaaggcatatatgaaggcttgttatctcttctgtgtttaattgatcagtgactttgatttggacctgggtatcagcttgttatttctatctgaattttctcgctttatttgtactacactcgtgttaattatgtgagaatgata

SEQ ID NO: 1901 - DNA, 777 bp, Zea mays
aggggacaaggcacaagagtcaaatgtaccaaccgacattattattatagttaaaaaggcagggccactgtttatcctggcagaatcttgaacgacaattcaatgtgatggatcgaagacagttgtaagcttagagtgactacaaaatacactctctcccgtccaaagaagaagaatatttttttgtagatttaatcagatgtaaaacagtttggatcaacacagttacatcttcagttgttagctatgatgactgtttaagttgtcattcctaatcttcagttgtatccttcaaaactatgtttttctaaggcagttgtttatgcatcgacctgcggtatagaccagtgctgggaaaatggccgaacgaagatggtcatatcatctctaaagggctgggaagaaagtggaggtaccgaggtacagcaggatcatttgtgtcggcatcagcactatcatcttcatcatctccacctctgaaaagatttctagcagtttgcttggcgggggatttgcgagtcctgcacgtaagttgttttcaggacatatatttagtatctcacacaatatgggattaagagaaaacaatccttcatgacattcattatataccttagcaacttcaagcacaatacgaccaagatccggatgctttctgacataatgtcgaacctcatgtgctccatcaaagtatgagttgttcgttaacccaataatctgcccagggtaacatgagtacacataaaaaattagtaaaccagattttttaaagtggct

SEQ ID NO: 1902 - DNA, 553 bp, Zea mays
cgagaacagtgagtgggcggacgtggagttcttccacccgaacccgtccgacgacgactggatcggcgtcttctctcccgcaaatttcaggtaccggccatggccgaactgagtggcacaacccaattacccaacccaatcagttgggggggatcacgatgctaaatttgcataaccatatgatttgatgttcttgtttgggcacttgtcagtgatgcgatctgtgaggctgagaatacgggtaccccagtgctctgcactgcacctatcaaggtcggcatgtagtgcccttgactttgtgtacaatagcacgccgagtttcagagcctctgaatgtccttctctctctctctctctccccccgtatcttcattgcagtaccagtttgcaaacttcgaaaacgatggctataacaagactggaaagggctacctcaagcttcagttgatcaaccagagggaagatttctcattcgcgcttttctcaggtggtctctcaaaggtaattctgaaagaaaaaaaagacagtaccttttagactcgtctgcttttcc

SEQ ID NO: 1903 - DNA, 1325 bp, Zea mays
cctgcagttgagtgaggcatggctacgcgcgcgcccactcagcttgaccaaaacaaaggccggccggccacctgggctgtacttccgcgacccgcaccgaaccggccgtctagatgcttgatgaagcggctgcttttgtcaaaaaagaaggaaaaaaaaaaacttcgcggagcagggtcagagctcagagggtgcgatgcgaaaggcgcgcctccgccttccaccgtcactccgtcaggcatggccgctcctgcttgcttaccaagttctgcccacaccagttgactacttcaccaggaatgaccccgagtcgatttcgtggtttcctcctttccttccgcgacggcttgaccacaacgtacacgtgccggtagttgcgtgcttaattaggtcgtcggctcctcgccctcgccgtcacacaaaaccgtatattacggttagctcaaatataaaatcttgtacagggtacgtactgtacgtagtggcgtactacgagtatgtttgttttgtagctaactatattacactttatctaaagttaatcgttcgaattgaagaactaaccttagctaaaaaatttagccaaaacgtatgaagttaggcagccaaccaaacagacaatacatctctgcatagcaaatcctcacatcacagcttcacacacactgacagagtgtctggtttgagtaaccaaacaattctaaatcagatggtacacgatgagtttgttcctttaaaaccggcagaatagtttttttcaccgtactgttataagttactagcctacgagaaatgacgtgactaagcatcagtttcataaactgcaaataaaataaagaattagaagacgatgtactatatttcttgaaccaaacgtcctaaaataccatgacgaatctcaatgtatattacttacgacgatactgaaggaagggacaaaatcaagatatagctaaatacaattttttgttcactctgtggcattggatatttttggtgccttgtgcgtggtgaaatttgttggtatttgtggttttgttcttgttaaacatttgaggactagaccaaatggatctacctagctagctagacctatactctacggttctttgtgaggaagtctaaagtttttttttcttctcctttctccctgaaccctaaaaggctaactctagcggatcccgcgcgcggccgcgaaaagcaccaggccgcgtcgcggtaaaaagccgtgagttccaacaagcttgcgtgaagaaggagggaaaagaagagaaaatacccctgttttgtgggaaaaaagggaggggaatccttttcttttgcaa

SEQ ID NO: 1904 - DNA, 692 bp, Zea mays
aatctacaaggagtcgaggatattccaaaggtgtagataatctacaatggctccaactgtaagagcccctttgatgtctgcaatccatcgtttgttcaatagggcctgctgcacagtcttctgttaataattctttttggaataatgctgaataatctgggagcaatatctgagacccttttgccatggacccatattttattcttatagcaaggaaagtgtatcaatatttctcttggtctaccattgatgacattaaagttgctaactcttcacaggatgctattgatgttgtgcttcaatatttgagttcagagtttgcattgaaggacctaggacaactccattacttccttggaattgaggtacacaaaacttgcgatagtattcacttgcctcggactaagtatgcttcagatttgcttggtagagttgcaatgatgaattgcaagcctaatgcgactccgctgagtacttcagaaaagttaataattggtaaggtgaactactagaggatgcaacagggtacataagcattgttggtgccttacaatatttgattttgacacgacctaatttgagtttttcaatcaataaggttttgtcaattcttgcatgcacccactactgatcattggaggggcttcttcttctctttcggtgtttggatgtaggcctctcacaattccttt

SEQ ID NO: 1905 - DNA, 765 bp, Zea mays
tctccaggaactagccctaaaggtttttcttacttaatgaaatgacacacaactctcctgtatggttcgagaaaaaatatattatatctataataattctaaaaaaacataaactttatgcttgtatagggattagggagataaaaaaagaatctatacatggtttccattgacttagagaatgcttatgacaaagtaccaaaaaatattatgtggtgggctttagacaaacatgaagttccagcaaaatatattggactcgttaagaacatgtacaacactcttggaaacaagcgatggagacaaggatgactttccgattagaataggacattaggactgcatcaagggtcagctttaggcccttaccttttgccttggtgatggatgagaccacatgagacatacaaggggatatcccttggtgtatgttttttgcagacgataatacgaaatagtgctagttgatgaaagtcagacaaaattaaataaaaaaaactagagttaccgtgggagactcaagtccaatgggttttagacttagtagaactaaaaccaaatatataagatgtgacttcagcattactacacatgagaaaggagatattagtttggaaggtcaagtagtgtctaggaagaatatgtttcggtatttacgatcaatgctacaaagaaacaaagatatcgatgaagctgttagccatggaatcaacacaggtagatgaagtggcgccaaacatatggcgttctatgtgacaagaggga

SEQ ID NO: 1906 - DNA, 765 bp, Zea mays
taagacaacccccgatcgttgtattaagaacttcgcatgtaggttgagaaacccccctgaaccactgcccactcactcatacacagcggcaccgtagcctatgtgagaacaacggtgaccagggtcagaccttaaacctgggctttgttgtggaacaaacgaaggaatttttttaaccacaacctgaaatttgctcccagaggagttgaactcaggacctgaggagtgctattgagaccacctaaccaacttagctagtggccctttcgcactcgtcgtatttctcactcgaagcaactcaaaatctgtaaatatattccattttgtagtttatatgttatgtgaaaatagctggcacttttaaagttagattctaaaaatgtctggatcattctaggcatgtgatatattttctgtattctaaaaaattgaagactgaattgtggtgaactaaaagcctgacaagtgtagagaacttggtttgcaatggttgatgcaataaagtttgagctatctggaacaggtttttatcatgaaaaccatttgacaataatcaagatttttttataaatgaaatatttaaaagaatagttttttctcgaacaacgcaagagagctgtgtgtcactgtgtctgtgtattttctttcatccttttttttctaaactatgaatgtctctgagtgccacagcaagctctggcttttgtagctaacattatccagatggatgagtaattcttccttttcttggagagcttccttttc

SEQ ID NO: 1907 - DNA, 768 bp, Zea mays
ctagcttgcatgcctgcagtgataattcctgaccacttgcaagttacaaatacagaatgtgtcaagttgagctttggcagttttggatctggtgcattttctgggttactcccacaaaataccactgatagcaatgtggaattccctgctcgagaggaatctgcaccagtagatcaaatagatgccaggtgaagcattttactggtgttttttttggcacttcccttaccgctctttgcggggaagttaacattgtggaattgtctgttgcaggaatcaagattactatgaaagtggtgctgtaacttcaccagcagacgaaaatcttgaggccatgcttggagctaacatggagaatgtagatgcgccttctgtttcacaggctaatgagctcaggcaggacgtacttgatccttctgaacttcaatatgacgtcccatcagttccaagtcatgcttattcaaacacggacactttacagcctagcacaattgaggagccacaaggaaacaaccaagcacatactctttcccatttgtcaaacttaatggtattccgtctcttctttctgtacttttttccacacatgcttggtgactgatcttttgctgccctcaatatttgtgcctagtgtaactgtaaaggtgcattaagttccattatatctagagtcaaccttgatatataaggaaaacgtcttgagttgccatgatatgataacagatctagatgcactggccttctatagcatttttcttatatttttct

SEQ ID NO: 1908 - DNA, 1171 bp, Zea mays
tgaaacagccccaagaccttcatacccatcttcaaaggcgaaaaaagactgggataaactggaagctgaagtcaaaaaggaggtttgatgaagatcctcacttatatatgtatcgatcttattgctagaacttgggtttatcgaatatgaatggggtttcatgatttgtgtctgcatcaggagaaggaagaaaaacttgatggtgatgctgcattgaacaaattcttccgtgacatctacaaggatgctgatgaagatatgcggagggccatgatgaagtcattcgtacgtgatgtttggcccagctaatactggatttggagccaactgtattttatgtctatactcacgtatccttgcccgtttctccaggtggaatcaaatggcactgttctctcaaccaattggaaagatgttggagcaaagaaggtagaagggagcccccctgatggtatggagctcaagaagtgggaatactaaagtttggactgcccatcttttgtaaatccaggtcttggaaactatgacctaattccgtccacccatagtgccatgagcttgcttggttaagtctctgcttttgtaagctttctgtatgacagtctagcgtgtgtctgagtgctacttgccgtagcttttgatggacataggtatgctattatgtggtatcgaccgggaaccatctgtggtatcaaagacagcaaactataatgtatggaatgcctattctttttggtctaagatgtttttcttgtcagcgtagtgtgatcttcacaactgaataatagaaactatgcagggacctatgttacagtggtccaccgttggcacagttgcatttgcgtctctttggtggatgaattgaatttatgggaaaattgatttctacctggcatttatgcatcggcgttttacttggtttcaggtttcaggtatgttgcctggttcatgcgctcaatacagccaggtggcacctgaattataggagtacatgtacaaaactcaatgcgcaccgacttcttcggagatttacccaagcccgtatattacaacgggaaatttcattcaagccccgtttaggttttttgggtgaccccttttttggcccaaaaaaaccccgccaccaaaaaaaaagaacgcccttaattccaattaggaaatctttcttttc

SEQ ID NO: 1909 - DNA, 705 bp, Zea mays
tgtgcatcatcttcctacacacctagactctctctctctcgcgcgcgcgcgagcaccacgtacacataaacacacccccatccctttcgccccctttgcctcacatgcatcactacgcccccactaccatatagccgaatacgctcgcttccctggccccgtcttgatctccctctcctccctcgtccctcgtccttgataagtgagcaagcggcaagaaccagcggcgcgcccatgtcgtcgagagacttatacttccacgacgagctggcgtcgctgttcgcgcagcggccggcgccggccggagaggcgatgatgacgcaccagcaccagcagcagcaacaggcgccggcgtcgtggttcgcggactacctgcacgcgggcgccccaggcatggggatggactacgacctgctgtgccgcgcgctggacctgccgctgccgggggacgacgtcgtcaagagggaggaggagctgctgctggtggacacgggcggggacggaggaggcttcgccgcgcccacgcccacgcccagcgggggcggcacggcgccggtcacgcccaacaccacgtcgtccatgtcctcctcgtccagcgaggcggcgggcggcgccgccggaggaggaggaggaagggaggaggactcgccgcaggggaggtgcaagaaggaggaaggggatggggaggagagcatggcgctcgac

SEQ ID NO: 1910 - DNA, 779 bp, Zea mays
ctgcgctccaccttccccgaagatgtaagatttctcaccgcattttgggcacttaaaacaactcatattctctaccaatcccagaatctgtgaaaccaaaatactcagctgtgatgtcaaaactagatatattactggagcatgggaaaggcatcatgaagaattttgcatcagtaaaatgaaatgcgcatattctcaaggtggataagtgatacccttatttcagggttgacatgcaaccgattacaaaacagtaactgaagaagtctagaaaaacaaaacaaatttaagagaataacttgaagaattataacttggaatagaaatttaaaatgtgatgcagataaaaagctatggagagaaaaaggatagaataagttaaacagactgtacaggaacttgaactttgcggaacatgttggctcctcttctagcatcaataagagcaatatcttgaggagttgaaacaattaaagcacctgcaaaaacaaatgtataaactaaaatttaaaaactgtatccagccaacatttgcagcttcataggcagatgtataaataccagataaccgaagcctttgggacatcgatagttgagcatcaccagtgcctgggggcatatcaacaacaagaatatcaaggtccccccaagcaactccccttgtcatcttctcaagagcactcattacctgataccaagagaaaagtagtattaccaacatagaacttgacaaatgaacaccaattgtaagtatgaagcaacagtattgtatctatgtt

SEQ ID NO: 1911 - DNA, 779 bp, Zea mays
tgccttagggattcaacggctgcttgcaatctgaatgctgctcagctgtttgcaaaatcatgaccaggcccttcattcaacattttgggtcttgggcgttgtacagataaccgtggtgtttcgtaggagctgcttgtgagtggtgtatgggtagtccgtaattcttttcattagcattgatttttgtcccagttttatcgcctgtgaaatgaaagcattgtttctgcgtgaaatcacggtcgtgttgaacatgcacttgatgcaacaattttgaatggaagcactaagaaaacctgcaaattgtctttcattttcagtcattttatgcatcagcgttactgaatactcctgtccgcaaaagagtgtcgctatagggtttgtgctggtcaaattttcttaagtttgattgggtttgtaaaaagtattgacaatattatatttttaaatagaattattataaaaatgtattccttttatgtatgtttggtcaaaaagaaaacatttgacttctcagtagatgagaatgacacgctttaccaaagagaggatatcactgctaattgctcgggcaccttgcgctcggtctgcacatcaaccatgatcttgacaaagccattcctgctggtgcatgcagattttggaaatttttgggaaacatttgtttgagaatgggacttttaacgccttaggccgggccataaaatgaaaaatacttttttaaccccaaaaaccttaatggtttaagagtatggttgggtcctgggctaactacgtctagg

SEQ ID NO: 1912 - DNA, 1269 bp, Zea mays
attaccacacgatcggtcgtcacatgaaatctgaaagccagaatgtactggtacacagttgaagatttatttagacaagcgaatctgagaccttagataaaggggtttcatcgacgtttggatgcatccccacagatgtcgcgtttgcaagaatcatccctttctccggatggtagctttccaactctgacagggtcaaagcagtcccgccaatgatgtgggcgagttcttgagctcgtgctggaaagtttggcctcttaatgttatcaatcacattttttgtctttactaaaggatattaggagaccaagaaaagtatcacagcaaaataaatgctagaaaacatgactagaacgtaatcgaaattccaaaggccaataagcatctagcctgcaaactgggaatagtcgctaactttgaagtttggaccaaaaataggttaaagtctgcgggcctaactcatagatcgtggcctcattttagaaatcaaatactccctccgtttctttttatttcccgcgtttaagttcaaaaatgaactagtagatgaaaaatattcgggaacggaggtagtagaaaagttgtcatcgaggagttcatataatgtgaatgcttagctttgagatagaagacaatgcccaaagaccgggcattgtaaaatactaaaatttggttaaaacatcatgatgtatcagtattcagtgcaataaattgcttataagattgcgtcctaaacactgtaaatgtggatgcctatcatgtaagctaagcagatatatggtcaaatttcttgagtagaagcatcctgatcaagaaaataccaaatgtacggtttgcaatcacaactcttgctcccttctcttttgcaccatatgctagtgcttttcctgcaccaccagccccaataacgacaaaaagtcttccagccagtggtgaagtgatcgaatctgttggttgtgacgctgcaaatggggctaaaagacagttatatgaaccgtatatagatcagcaaaacacaatattgcaaagtgtggcacgtgacaacctcttattccatcctcaatagcagaaatagcaccagaataatccgtattgtagcctacaagttttccatcaggtcttctaatgattgtattaatagctccgatgtcctggagaaggcatatttcttacaaatgttactcttggcgtgcgttttcgtagaatacataggagagcgctgtatcggcaagcaaaagaaatgggaatgaaaataccctggcgaatggg

SEQ ID NO: 1913 - DNA, 751 bp, Zea mays
ctgacttctcagccaaggtgccggcggcattcaatgcattgcatactgtgtagtgtacgggtgatcccgccactgttcctgacgaatgacgcggcctcgctactcgccagtcgccgcggactttggtgccgactgccgagtacgcgactgctttcacggccgcgccgagactcgagaaggcccccctccctgcccttttgagctcgcatggaggcacgctcgcccgcgcaatcgacctatcctttcaacagtcgttttctagtagctagctaatccacctcttgcgttcttgtaatcttgaatgcacgcgcgaatctgcgcaaagattttttttttttgccagttttatatcgatagatggggttggttgttttgtttggtcgcccgtggtggactcttgtaatccagccggccttctggaagaacaaaagggttaacagcccctccttttgtcgcgtccagcatcaacgagaccagccatggatcggcagagctctcattagggaggttgacagccaaacattaaagcactgtaggcatactgtgcgagcctgcgcgtctcgtaccatctcgcaggagtggtaagtaagtagtatatcaaatcgccgtcagcgctggtgcatctcacgcggcggccaatgggcgttgggccgtgaaacgcacatggagaggttcaagcatcgaacacctctggaaacgccgtgtagcctatcctcttcgaatgtcgaccccgttggcgctccactttttt

SEQ ID NO: 1914 - DNA, 775 bp, Zea mays
gcttacttgacaaatagcgtatgaacactgcacttccaataattgacatatttacgagagctgaagaccatccattatccattcaacattccagtcttttatgtttcagttttgatggtacttgatacgatcaaattgacgggtcttgtggtcgcaggcaatgatgggcctcatatatctcagcttcctggctatgaacccaaaggaggcatccggctctaggctggatgaagcaatgggcaacccatcggaggaccctgttgaagaggcccgtaggataatggagaaatacaagtaattaacctgtgcaaaggtgctgtactctcagaggtatgatttgtctgtagagcttccttgcgtgacgtgaggggtgatggatgggtggatctgattttagcatactacactacactcagtgttttgatatatgtaaatatagttgcacggttggtgaccaaatgaattccgcaaatcaacaagaggttaccaattttccggtcacaaaaaaacaagaggttagcaacaatttcattcttaatattgtactacctccatttttttatttgacgtgagatcgtacaaatttacactaacaaatgtcaaataaaaaaaatcggaggcagtatgcagttatagttattcaagctatatatttgccacaaaaacttactaggccttatatataaactctgttagttctaaattatgagtcgttgtaccttctttttagagtgaaaacatctcaagtgtttgatcaaattatagaggattatta

SEQ ID NO: 1915 - DNA, 737 bp, Zea mays
accctggagcttctgcggttcctggaggaggacgggtgggtggaggaccagatgctgtcgctgctcaccccagtggacgaggcatggcagcccgccgatctcctgcccaccttcgctgtcgccgcagaggagcagcgggcccaggtggcggagctccaggcccgcgcggcgggcgtgcccgacgagctcctcgtgtgcctcgtgggcaacatgatcacggaggaagggctgcccacgtacatgaccatggggaaccggatcggcccggcggaaggcgtcaccgacgccaccggccgcgacggccacggctgggctcgctggctgcgcggctggaccgccgaggagaaccgacacggcgacctgctcaaccgctacctctacctgtgcggccgcgtggacatgcgccaggtggagaggacggtgcaccacctcctccgccgcggcatgagcatgacggagccctcctgcccctaccacgcgtccatctacggcgccttccaggagcgcgccaccttcgtctcccacgcccacaccgccaggcgcgccgcgctccacggagacgcctgtctcgccaagctctgcggggtcatcgccggcgacgagaagcgccacgaggtcgcctacaccagggtgcgtcgccaggtgcttcgaggccgaccccgacggagtggtgcgggcgctcgcggacgtcatgcgagccaaggtcaccatgcccggcgagcgcatgaccgacggcc

SEQ ID NO: 1916 - DNA, 857 bp, Zea mays
aaaatacgttcaacccatcaatagagagtacaccatcttgcgtcgatatcttttcaactatagtttaaggccaacaagaagagttagattggctaatttgtttatgttttattgtcatttcatgattcatgacatggcgggctccgggctatgctttagacatttaatcagtatattccctgttttggacttgttatgtgtccttatccttatatgaaatcagcaccagggcaccatagaggttatcatgaaatcgctagtgtcataaagtagctacattttgctgtattcatcagcttggggtccttatatcattgttcttggcaactcaagttatgtatccctacaagacacatgctttattcttgctatgtgttttagactccacatgctttttttttgtcttccgacagttgattatagctaaatggacaaactagaaatatggcaggaaacagtacagtttggattgctagctagtgtccaataaaatgttttaatatgcttagcaatgcaaaattactccctcgatcgcattggaatgtatgaaccaattaccagtgcactaaaatctataatgtcatcacacatcagtatcatgtaatttgaatcttgtaggcctgtagtgtttattaagatgtataaatgttgcttagaggtttggttgttgaaaaagttctcgatcatgttcgttatgtgtgctatgggtaggcttagccgtaggcattgcaaaaaataagatgtgtaaaaatgtgatgatttaaactttttaacccatcactatttgttttgtgaacagatgggtgtatttcagcctcgcatgggctatttaatcccttcattgataaaatggatgg

SEQ ID NO: 1917 - DNA, 701 bp, Zea mays
cttgcatgcctgcagttgacatcgatgggctgccaaatctctgcatgggtgcttgtgtgttctccattggcctaccaaccttgtcatttcccttatgcatagcattagcaggatttggaggcaatggagaggaggtcccaacttctttcttcgcaacatctttgtttgtgttttcagttctctttggaaccaatatgctaatgttactgattcgctgtccaatcccctcttttctgggtgcagcttcagtattggataaaggccttgcagctttgaatttttcctccattgaaggtgctggtggaaagccacccacagttctttgagcaaaagtggtgaggctttcagaatgtcgtattgatgtcccattcttttgtcgattggcactgatgctctgttgtaccaatccctcatttttccttggagcattactagactgaatatgcactttattaagcgcaaacctttcagtctccatcgcgggtgaagcactgaagcctttgcgatttcgatcatttgaaacaccataattttcactaggtcgactcgccgcccctttctcatcctgtacgtctctgaccaagtcctccctgaatttaagatccttaacttcttcggatctcctgctgctctctccaaccttctgaccatagtgagcctcgtcatttctttcaattccttcacctgaatccctgctttta

SEQ ID NO: 1918 - DNA, 726 bp, Zea mays
attccctataaggtaacctcctttctcaggaatccagtcaacaagccaggaagggatttgctcagggtaaatgttgaatttgttagtggcatcatgtgagtattcttctgtcttgtatctgtatatctcatttattttcttcatgtcaacccagtaatattctctgatgtgaaaggacaatgcactgagcctgttattaatggcacggatgaggtttttcgatccatcattcacgacaagcatttctcgtgagcatcgtaaagcagagtagaataaagcctgggtaacagaaagaacttgtaagtacaaatcttcagctgatatatcgaatagatctaggtttataaaataagtattttctttttgttataaactaaattagtcccacacaagagaaaaaaaaagaattggtctctaaggaagcatctctttcttattgctcaataacattccagattattattctaggatctaatgaattgaagccataagcaattaaactcaacttacttggatttcaagaggatgcccatgtattcccatcctcctgtctatcatgcatgatccatctgtaactagtaatgttgggaacatgtcaaacccatcagccaaacacaaactcagtatcaattgaattcctgtctgcacatcaactctttctagcaaagcactgtccccagtaatcttgctgtaagctctcaacaaataatccaccacagtcctgca

SEQ ID NO: 1919 - DNA, 764 bp, Zea mays
aagaacttgcctccaaagaactctcagagtggcggttggctaaagctgaggagtttgcacagatggttgtccttccgaatatggaggttgaccctaggcgtttggttagaaaaactcataaaggagagttccaagttgaagttgaagagccagatggtttctcagtggaggttgaacttgggagtaatgttactaatattccatcaaaagctgttgaagatcaggccaagtctaatggaacagatggtaaagaagatgttcaagaaaaggacaaagcatctgatagcacttcacaagatgagggtggcagaacaggcaacaatgatatgccaggtgatgtagaatgtatcgataatgagaaagctgatctcatgcaggaacttattttggatgacatgaaggacactgtaaatctcccaccgatcccttctttagatgaattcatgcagggcttagattctgagccaccttttgttgatctctcagttgggactcctcaagaagatgtcaatgactctgacgaacttgacaccaccatggagccttcggatcttccagagacagaagataatgcatctgcaccagaaaaaactgaatctgaatctgataagtcatctgcacaggttaacagcgagcgtaggttagagtcaccaggacatatagctgttcaaaattcggatcttactgaaccacgtgatggagagctgaataaatcctccccatcccctgacaaagatgaagcaaagaaacaactgtagataatg

SEQ ID NO: 1920 - DNA, 826 bp, Zea mays
ttataggtgtacatctgtaaataaatatttcaagttcttcacagaaactatactactgctaatcggtattgttgattaactcagctgcacatggaacaagttcttaactctgcaagtgactgcaaacagaaaacaaaggcctagaaagaaaaacacctggtagaaggatataatgtgcaccggtgataccatgttaatgaacgcatatccaacattgcatttgttctgcataagcacaataatacaacataagtaaattaaacaggtgtggcctataaaatacaggcctcaaaaacaaaagagtagcacaaattggagttaaatctagtaccttgaaatcaattggaaggtagaaaaagtcataagttcctttgtgaagctcatcaattgcagccaggagcatcttagatgtatatctgttagattcagggaaaagaaaaccgaatgaacacaactgacaactggctagcaaaaggtccaaatgaaaacataatgcgaaaatgcatacttgtttgggatgttcttaatcatcaatgttgtccgagtatcatcacctctgcgaatcttctccaagtcaagcagatactgcctcttgctatcagcttgcaacacactgctgtcaactctgcggttacgggcatggtcaatggagctgtcaagtccgaatgtaccagggcccatgggatggaggattaagttgtaaaattgcttgtccccaatcatcgggtgaacaaataattggggtcctggaagccctagtaaagaattaccgtttttttctggttaagaaacttttccaaattctaagagtgaagggaacacccca

SEQ ID NO: 1921 - DNA, 758 bp, Zea mays
gagtaaatgtttttgagctgcataatggaaccaaacgattcaaatacctccaagagaagtatcttttgacaaaggtgtgcacataaatgagcatcaaactattataaataacagcacgtgcacatcagacaacagtgttcacttctatgtgatgcatttgataattagaactaacaattatgcagcagtgcagcacatgctgggagctattttgatttctcatgcaagttttgatatgatatgtaggtagcataagattgtatatttaatgatggatggtataaataagaagagttgacaacctcacgaaatttgtatgtgaaaacatagtaaattactaattgaccacatcatcataacaatggtaaattaaaatgtaatatggttcagtaaacgatctaaacatgtggatggttagacattgtaagtgtaaagatcactgacatgttaagtgattagataaaaaactaaaaagtggttatattttttttaaaaaaaatcagattacttagacgcatgtgaatggtatacctcaacagaggaggaatatgtcctgaagacattggacccagctagatccttattgaagccagataactccgcattgtcttctataactactttagttgaactgtatccaaaacttaaattattttttgacgatgaagcatcattggtggtaacttcaacaacattggttgttccatctggtggcaaattctcactagaagctatgcaatcctctataattttcttgc

SEQ ID NO: 1922 - DNA, 795 bp, Zea mays
aacgaggagcgcgcggcggcagcggaagaagaggccgatggtggcatcgatgtcacggcctaggtagatgcctctgtgctctctctgcttgtaagttaacggatgttacttgaatgggatacgcgcatcatttctccctcgatgcatgcagtgcaagaacaatcgcatggcctcccacccatacatagttcaggaggtccttttatggacacgtggtgatgcacaaaccatgcacgcctcatgacaacaatatgtgaaaaatatgtaacgtaatgtgagcctaccactacaatctccaccactatacacacactagttcatccatctagtagccaaaaaaaaacatcaagaacaagaagagcagcaacacagatcccccggagaagtgaaagggatactagctagctagctagtatctatggcacaagttctgccttcgttctcgactccacgggcttcccgcagtctcctgcccacgctgtgatgaatcacgttgagctgctgggctgctctgctcctgccaacgctggtgctgctgcatccgccagctcctgctgccagctgagtccaccaccatgtcgccgcccccgccctccagtatgcgcagaaccttccagagagacaaggcgtgcgtgagcaccatatatatacatgataggcggatgaatgaatgactttattattattattattattattattacatgggacatgcgccgcctgagatgagggtcacgccgtatgcacaggtttgcccgggtgcaccatgcagtagaactcgttctcgcagaagcc

SEQ ID NO: 1923 - DNA, 854 bp, Zea mays
  unsure (1)..(854): unsure at all n locations
ccccggtatactctacatgcgacctgcagccgcagttcttatttccatctccatccgtgtggggtcttggacagcttcagagcctagcactttcataagattgctcattttgaccttgggcttaggtggctccaagaggccttgcctaatcatttcttgcctatctttttccttagcaagacgcctttgtgttctcaacttcttctgctccttcttagtcaacttcagtggctggggcggcggtggtgcaggctcagcaggtggatcatatggttctggatgttcaacatatatggtgatcttgtccaaattaagtttctccacagagacatcctcatatgtggcagaaagtaaaatttttgcatccctgaaaacaacaataaaaattactttatgttcaatcacaacatagaaccttaaaaacatcattcaaaaaggaaacaaaaacaaccatggctcaatttcagggatctcttccttctgcttttgttttggagctctcacaccaagagcaacctcaataaggtttggattcatgtctacttctgtctttgccttagcaagctgggcttgctttactttgagctctttagcttgcgcttcaccaaattgactctaggtaaaaaaaaagacattcaaataaggtaaaagaaatattgataaacttaaccaaaacaagtcttggaggttcatccttgcacaccttaattttctgcaattcagcctgcctagtgagtttaccctcttcaacgaactgaaatcctggccttttaagacgaaggagcttcttttggtttatgcccatccgttcatcanaatgaacacttgattntgcaagagagtccaagtccggc

SEQ ID NO: 1924 - DNA, 857 bp, Zea mays
actttgtttgaggtgctgtgcggtctgtacagggtctagtttcatctacccttcttttggtttgccgttggtaaaccaggtgaggtgagacaacacgtttctgtgcagacacacgatgctagtttggctgttgtacctgcacaccaccctcctgaacctggatagagctctgtacaacatcttctagcctgtcaccaatagcagcttcataaatttcattagtagcattgtcaaatgaattattggacaacaaaggatcaactgtattacaagtcccactgtcatcgttagatgaatgtaaaagggtggaaggcaacaatttgatttcagcccttagtcttgcactcttgcatgacattagggtgaagctcaacaaacagaaaaacttcttcgtcaaaaacatgtcaagaaatatgaatgcagttgcaccacattatagcctttatgcatggtgttgtatcctaggaaacacaactaactaacctaaatgactgcatgcaagtgttgtaaggacgcaagttaggcttccaagcacacccaaaaaccttgaggatagttaggagattgttgaaaaaaatttagatgaataatcaagcaacttggtgggtgtgcgatttagaaggtatgcaacagcagcaagaaatgcttcatttcaaaattttactggcattgaaacatgcacaagcaaagctaggccaacctctactatgtggcgatgctttctttcagtaaggcccgcttgctaaagaacatggggacaaccggccaaaacaccaagggggagaaacccaacttgaaaaaaacaaattcggacccgaaacccccccccccaaaagggtggacaaaaaacaacctgg

SEQ ID NO: 1925 - DNA, 776 bp, Zea mays
tcttgcatgcctgcagtaactagtgccatgacccatgcattaacctatgcaggaaaaggttgtccttttacttcatggatttcttggtacaagtgaagactgggttcccacgatgaaagctcttgcccccagtgcacgggtaattgcaattgatcttcctggtcatggcgagtcaaagatactgcaacgtcacaaaaattcagaacaacctgctgtaacagttcaactagttgcagatttgttgttgaagttgatataccacataactgatggtgaggtggtggtggttggctattcaatgggtgcaaggattgcactccacatggcactaaatcaagatcacaaggtaactgtgtttttacattttgtgtaaactttcttttctgaatgttctataaagcttgttgtgccaaacagattcgtggagctgttacaatatcaggaagtcctggactgagagatgaagcaagcagaagacgccgtattgctattgataaatcaagagcccagttcctgatgtgttgtggacttgaatgttttcttcagacatggtactctggaaaactgtggaccaggtaattatttgatgaaggaactagcttgtttgattattgcctgtacaaaatggtaaatttgtatgcatcgttagcactcatttgacaattttctttaattctctgtatggaactcttttctgttgatgggtgaccaaaccttcagtctacgagagcatcctgaggttaattctctagtgaggacacgcagtaaacacaaaa

SEQ ID NO: 1926 - DNA, 768 bp, Zea mays
ttgcagatgatatgggaggtggacttctggcgctcggcgctttatctcagcgtcttcgcgcttctggtggagcaggaggctggcatggcatggggatgtcgtgtttgcctcgtcaaagcccaagacaactgtcgtggtttccatataggttgtgccaaaggatactcacgctcggcgatgctctccctgttcgccggagctcgtgcggtcgccccggaccacgcgcattgtggtaaaatccagggcactcccaccaaacttattgtccgccccgtgaagagccgaacatctttgtaggtatgttgtggctcccgtgaacttttagttatttgacgagtggaagggaaaagggtagggcatgagaggagggaagatgggggttttggggttcttctctactcaaaagaatatctgcacatgtttggtgttgtaataaattgtgataactaaacctagtggcagctacgtggggtattccaaaaacaattgtccccaaaatagtaagaacaagagcaccagttgaactagacatcttagattatctccagcagcttactcatccacatcactcatttcaaactccactctgtaaatagtgcagtttacatgcaaaaccgtgttttgcacgatttgctggccatagccttagtacatgtgttatgaccaacgtcacctatagacgtctgaaccacgctaatggttaggtcacatgggcagttaggggcgaagtgccttagatactttgcataggattatcatttattcttg

SEQ ID NO: 1927 - DNA, 751 bp, Zea mays
ggtcggctgatgcagaaacaaataattaggttacatatgcatgactacaaatatactactcatcaaaatgataacatgaacagataccaaacttattgtacgcacaaagaaaaaaaatagttgaactttgcttacctggatacaaggtattccaatttctttgaaacaaaagaagctgcttcttcaggcgtaccaataaaatctaaatcagaaacttcaacggctaatgctagtgccgctgctatggctattgctggagcaccacggacaaccatgtctcttattgcattcctgggtaatatttaggggtcagtataaaacaagcattatccagtggtatttataactagttacatttcaatggttgcagtaggcctatcaccatgggagcatataacacaatttctggaaattatgtgattgttttttcttctctagtgtgatcaaggtcaatccagaataccgaaatttctactgatcacagattcaatatgaatatatgatagccttgtacacctctattgatgaaattaccaaaaaaaaaatgccactgttttacttgaacacaaaagtaagccactgtgataaccacaaagcagcaaaatctgctttagatttaagcaacacgaagaaaattaacagttatcacaagccccacccaaatcaattagaaatgtatacaaatcaattgaacaaaaagaagtaacagttttgaaacaaaccaaataaaaagggatcccttgtcctactt

SEQ ID NO: 1928 - DNA, 768 bp, Zea mays
agcttgcatgcctgcagggcagctgcaaatgctcatatcataccatgtgtaaccaaaagccacaattagaagacatcatttggagcataaataatcactccgtgggtactgaaagaaagctggaaagagcaaatggtctggtccgtctccgtccagccagagcagcagcagcagcagccgcccatgttcggcgcagacattcggactgggcaaccggcaacccatgttccagaattcatgcactccacgcggtacctttttcacagtaacatgggagcaactttagcaggcagcagcacatgaaattcagtggggactcacaaaggcagtccctgggaagttgccattcaaaagctccactagtgcccagaaatcattcacagaagtagcaaaaccaatcaaaaagaattgcatgtctcagagatggatatacaaagagaaccaataatgttactcgcacaagtacagttacaatacgatcctaggaacttcaataatttccatcctctctttttttgtggttgctgttctcaccactgttgtcattgttgttttccccactagcaagtatgacagcaaacttggcatgaaaagaagatggagcaacgcatgcattgtagtgatccacaagatacagatccaacaacattgcctgctcaaaggccggcaatctcaaacatagtagcttataagaaaagcactcaaggaaaggaatacatagaatggggacgaagggggcccttgagcttagaagcacttccggtgaac

SEQ ID NO: 1929 - DNA, 731 bp, Zea mays
cctgcagccctttgttaggcaagggaggaacaacagttgtgggaaatggcaggagctaagggtctctcctttcttgccgcaaccatcaggggcacctagctgcctggtttatcgctgatgggctggttttgtttatcaggaactgtttgttcttgtttttgttttttctctcttcttttttctttggttttttatcccctctggggaggtcttttgtactatggtctactttggaccctcttttccttctacttaatataatgatgcgcagttctcctgcgctttcgaaaaaaaaaggactaattcttatgttttgttaaggaactaaaaccacaattgagaattacataaataaattccagagaaaaatggtaatccaaaaaagttcaaattttgaatgatggtatcccaaatccataaaaataatttgttgaatgcatcacagccatttcaggtgaagcatatctttgagcatcataaaactcccgccttgatcatttgaaaactcttcagtaatggtaaaaatataatccattaaatgaaatgattctcggtttcaagtaaacaaaataatgtcagtaattatgatcatacatggccaaactttggaaccattagggtctgttttcagttcaaagttcagaatgcatcctgtgaagtgaactaaatctttttcctttaattttgcaaagttcctaaatttggagggaaagcagacaagtttgacatta

SEQ ID NO: 1930 - DNA, 823 bp, Zea mays
cttgcatgcctgcagttgcacatcacaattttacaactatgcaagcctataagaaatgaccgacacaaagaaatttgactcgagaaattacctttgcagctatacttgctccactaacaacagggtaaaggctatcagcttttttggcaaccacaaatttgacccctggaaacttttctgtcagcttggttctgtacttttcaggatctcccactgtatctacatatacctttttaaggaggaacatagttactaaacaaatgtggtgaataaccttataaggacagccaaacaagaaatccttttgaactcaagaatatatgctcttacttctgccagtagaactcccatgtcgagaacttttctaacaagacccatggcagagttatgtgatatttcattcagattaactttcgacctgaaacaatggaactgtcaattgatataacaagaccaagttcaaatttcaataagtaaaaaggacagacatacctttttaacattttagcagatagatcctttgggcatatgacatccacttcccacccaatagagctattggcctttaaactttcaaatagctcctctctttgttcttccttcaacgtctttgaatctgttcgagaagacaagatcaataggctatgctatttgtctatgtgttagtagcaaaattactcttgaactcttctgtagcccgaaacaatgtccaaccgactccgctgccggaacatcacaagatagtaagcataattataccaggacagagacagatttaagatttatcactccaacgattaaattcatgcaaatgtaaatatgc

SEQ ID NO: 1931 - DNA, 810 bp, Zea mays
cggtacccgggtatcctgtagagacgacctgcagaccccgcgcgacccccagaatgatatcgaagcgtttctgccaccctagcagcctccgcttgccttcatctgcacagcagatacgcaagtgcaaagttgaggagattgaaaaactaacttgctgcgtgtggatataggtttttttcgcagatgagacgagacgagaacgagacgagactgaccgaatatgaacgtgtcgaggctctggttgtgcatgtactcgtacaggagcatcctctcgtcctcgtctatgcagcagccgagcagcctgacgaggttccggtgctggagcttggcgatcagcttcacctcgttcttgaactccaccgccccctgcatcgacctccgggacagcctcttcacggctacttcctgcccatcctccagctttccctgccaacgacggtacgttcttgagatatcagccggagctagaatcctagcgcgtcaacaaccacattccttcccgtgcccttcgtaccatgtagacaggaccgaacccgccttcgccgatcttgttgctcgcggagaagctgcccgtggcggccaggaccgccgccagatcgaacaacggcaggtcaacgtctttctcggcgctcctccagtcctcgtccagcgcctgctgcttccttgccctgaacgggagcgcgtcgtctccgccgccgctcggcggcgccggggaaggatccgtctcgccgtggcgcttcctcctcttctttctcctccagacgcagcagcagccggccgacagcagaagaaagagcacgccggcaactg

SEQ ID NO: 1932 - DNA, 672 bp, Zea mays
accaacacaggctcctatcccattcaagtgcctcacccccgcggagatggccaaaagaaggaagcaaggcctatgctataattgtgatgatccgtatgtgcgtggccacaagtgtcctcggttgttctatcttgaggccacatattttgcagacgatgaaaccaagagcacggctgaggaggagcaagatgaccaggacccggttgcctccctgcatgcaatcatcgggatcaggactgaagacacaatgcaactgcgggtggccttaaatggacaggaactactggcccttctggatacaggttccactcataacttcattgactgcacagcagcccagcgcagcaggattacattggaaccaacactagggcgccatgttaaggtggctaatgcgacccgttgttctgccaggggatcaatcggcaggcatcaatcaacatcaacaatgaaagcttcaccattgaagcctatgcaatacccttggacacatttgaaatcatcctcagacagcattcctccgaacaaacccttaaggcttgttcggttctatcccaatccatatggattgagggggatttcaatccctagtaagtcaaaatctcccccaatccgtatcaatcccctccaattcatatggattgaaaataaccgaacaagcccttaggggga

SEQ ID NO: 1933 - DNA, 720 bp, Zea mays
caaactgggtctcactgtctctggctgtctatctttagtctgccggcattctcgaggaatagtgaagcaactgctcggttctagagtaacagagaaaggcttattgcgattttatcttatattttgtgctttataactcttgatacggtctgtgccatccattgatcaaaccaggcctgccagttagctagagaaacagacaaccaatatattgattgaggaaggtctgattttgtcagctttgaagttctattccataactactccagttttgctatagcccccacctatcaatagtgttcttgaatgacctgacctctttatgaacacatgagcttcttggcttgacaattacttgtcttattatgcgcttcaggatgggagccgcagaatatgcaagttctgaatgtactgggcaagctttcgcccagtaatcctccatgatctccgactcagcagcaccattcagtgaacgcacaggccatatgagcggtctgctggccatagccttctgtctccaccatattattcacaacccgtgcaattgtgatctcaaaagtctaaccggatcggaggaaagagaagtgtgttggaccagcgaacactgccggaaatgtttatgcgactgcttcaaaataaagattgtgttggcgtggatacagacagtaccattatattattgcggatactgcgtctcgtttaatttttcacggggacatt

SEQ ID NO: 1934 - DNA, 759 bp, Zea mays
accacagtttcttagtggagagttctccctgacctttttctttctgatggctacaggagaacaccgacactgctggtgttggcatcgtcgacaaagctactaaggagacgagctcaactgatgaacaattctaacacaggaaactgaactacactgttcgtgtctcagctgtagaaattctaggaacagcgatacatgagttcctgtaagagagcgagtccatgctttgctatggctcattcgggttggttatggaactctattgggacctgtgagtcgtgaggatccaaatctcctctagaattgtgtaccaactgaaagttacgatatggtatgatgggcatttgctcacctgaatgcatttcagctggtttgtcgtttgcaatatccaagcgtccaaggccatgattttattagacctacttgaaatggcggtaggtgatgtactgatgtggattttgtacgaggaatagtggaataaggtattctggtgggtttgttgttggtcacaagatgccagtccggcctctcctagcaggagacgggttcaaggtttgtctgattgcctctcctagtatctatcctgcataccatactagtagtaattttcttcttggagaaatacagggatttcatatgttcaattttcgctatccatttaagagatgaccagccactggagctatcctggctgcttaaacgtcgctaggagagtggaacaggcacttcagttgaagctgatagttcagtttggggtac

SEQ ID NO: 1935 - DNA, 763 bp, Zea mays
agctgccacccccgcgccacatggacgcacggtggacggtgctctgcctctcccgcgaacgccgtgaccgggtactagctagcttagcggagacggacggccgcgcgcccgcggatttgcggaagctgtgtcgccggccgtgctgctatctatcccatcgtctaacaggcgacccatccagtcagtggtcagtaggagagagaagaactaactccagcgtccgatcgggacgccactcgctcgctcacaagcaagacactagctactctcaactacaacaacgctagtaaagcctaaacacacacacacacacacacacaagcaaagcgagcaacgtacgttcgtcagcgcgtccttgtgagttgtgaaacagaaagcgcgcgctatagctatagctaacattattctattataatttagctaacattattctattatgattatttactttagaaaggatgaattctaaagttcaattatttatcaaaggtatttattttgattttgattattattattattattattttctctaaagatttttcttaaatcacaagttaagattttggttgttacagagcaaatggcgcctcagtctcccgcgcgcaagctacaacggttcagggtccggtgctgcggcggctgagccgtctaccgtgggagacaccttggaacgggaggagggcggcggcacagaggcaggcgcttcggctgatgagtcatccaaccgggaagcagccgccccctgttgaccccaaaaatt

SEQ ID NO: 1936 - DNA, 823 bp, Zea mays
tcttgcatgcctgcagactcggagtgctgatgaaccgatgacgacgttcgtcacatgcgtgaactgcaacaatcactggaagttctgctgagtggtcagccttggtaaagtgtttacttagttgtgctgagcacactatcctgctgtgatgtgtgtgctctgttagttgtgactggaagttcgacagggcaggctgaacaactcaccttttttccccttttttaccccccgtaaactaggagcagttatcctcttcctctgtcaggcagcctcctgattcattcagattgtactagtcgaacgcgtgaatgttgttgacttgatcgcatcgtcaccagctgtgaattttcttgggtggagttagaatagaatggtgccaagtcagacgatgctgatggattagtggtgctgtgtgctccatttctgtttccattgtctggatgaagatcgagatctatatcagatgatgcgctgtcccatttcggactatctgctctaggattgtttgcctgcaaaaaaaaagggttgactcactggtttgcgcaccacggtggatcaagaactcgggagaggggtcaagctaggccaacatgccctaaaactttgcagtgccttctagtctaggccagcacgaggcttcgtcaggcaaaggacgtcgccacgtcggaaacgttgcatgctaacgtgttcactgtcgtctgcctaacctgccttgtaggtaacgaagacccaaacctgctagggtcgctcttgatgtaatctgatggaccgcactaaggttttgtccacagaatatatagggcggataattttttttccccac

SEQ ID NO: 1937 - DNA, 906 bp, Zea mays
ttgcatgcctgcagcacctgctggacgccgttcaatccttcaccggcctcaactggtatggtatggtatgccttcgggccttcgcgaggtttctgtttcggtttcgtttcctgtgtgatgtaaattcttgtattcctgctccggtcatcaacaggtgggcgactattgcgctgacgacgttgatgatccggctggcgactgtcccgctgctgatcaaccagatgaagtccatgatgaagttaaatgtaatgcgtctactttaccaccttcttttgctgcctaatcctttgtctttaagcgtgtttgttactggtccaggcattactgcatgagactatgggggtgcccaaacgcataggagttgtcaaatttgaacctaagctttttaaaattttcaaactcgaaaattgtgacactgctaaagcataaagatgctatggtcaggatttccccgccattctaactggacataggtctcccatcatctggctctgcttgggagtcgctactcactgcttcccctactaatacactgagtttggttaagcgaaagattacaatctttatgtgcaacttctagtgatctggatgctaaaaatttatggcctgcttggcagagttcttagagcagttcccaggctggttccactccagggaaatctgccaacctgtactttacagaaaatgactctcagatgattatgtcaattgattatgatgattatgtcaattgattatctgaatgaactctgcaacatagaaccatgttctccatagagtttattctctagagaaccactttcagccacagaatcagcgcacccccccagtgattaacagtacccggagctgatacaggcccttacacaccttgcaggtgtatgatgatgctattttggtatttga

SEQ ID NO: 1938 - DNA, 792 bp, Zea mays
acccttttgagctctaaactcgacctgcaggatggtgctatgtcaggcaaataaaaattctaggacaaccaagtttttaatgaggtgcactgtgcacatgctcaccatccagagtggtgtctgatatctcctaacacacacttgctaaataaataatgcattcaaatctgcatgggattggaaaacacacctgtgaaaaaataaggactctggaatcacgctcctttagcttgggcagcaatttatcaagtagaaccatttttcctatgtaaatatcaaaaaaactgtcaataagcattcatataaattatgtagtaaaatatgttactattatgaaaacaaaataacatggtgttacctgcattctcaattagatgttcaccagttgtgtagggtggcccaggttcagctccttggaataaatatggatggttgcagcacttgcgcaactgcatggcaatgttaagcaatcgcttgcgttcaccaccagcattaataacctccaaatccttctgaagcagagcacgatagtactgcttttgcatctgagacattccaactttaagaattgtttctttctttggaggtaggcccttttctacatcagacttgagcctcctaagaaggaatgggcgaagaacctttgcaaaagttgcgagaaacaattataaagagttcattttaaggtactaaaattggtgatcacgaaaactatatcccaaccttatgaagctgctgcaccacctcctgttgatcattttccccagatattttgaaaaccattcatcaaac

SEQ ID NO: 1939 - DNA, 783 bp, Zea mays
aaatgttactcacgttatgcctggagtccggctgccacgtgctgcgcgcgcgcacacacacacgcaccttttgtgtctggcacgtgctgtatatagctgggagcctgggacggggcgctggagttccccatccacgtttctctctactcgacacatgccgcggcgaattccgccctttgcctagccccgcttgcccaattggttccacagtccacacacggattgcaatctcgagcgagattcaccggcggtaacaaaaaccatgataaaatttcgaaattttcgtttaattttattgaatttcaaaaaaaaacataaaaatgggaataaaaccaataaaaaaactagatggtcctaacagctaaaaaatatttaaagttcaaaaattaaacgttcaaaaataggatacctgggcttcacactgctgtgtagttacctgagctcattcactcttcgctccactcttttttctcgtgtctagacggcggcagtgtagaaaccgctcccaaagcggacgagattcactcggggtgcatcatttctcgaccgtccaacagctgatctcggtacttatatggttaaatagttgtagaatcaattattcactgtactccatatgtgtttgttagggagcttagtgttagttacataacgagtagatcaagctaggttatctagttgttcgcttcggattaaagtcaattgttcagactgctggaaccgtagtatatatagacaaaacaccatagaaatagtagaagccgtttcggattaaagcgaggc

SEQ ID NO: 1940 - DNA, 934 bp, Zea mays
  unsure (1)..(934): unsure at all n locations
aagtcccatccttgagtgtttagtaatcctttaccaactgactacaaacgtctgcaactcaccctcctggatacttctggtacactgtctaaattaagagttcaacatcctcgattctactcagcattttccgtgatggcaacttcacctataaaacttagaaaaagaacaactttattatgaccaacagaacaggtcgcaggaaggtcatgttcaatgtctgaaccgacacactttagctcaagcaacaaaaagaaaacaatgtggggaggaggtaacaccaaactctactgataaataaaataactccagctaaaatcagggtcaacagtcagagacaaacattacctcaaaaaaaataacatgtggcagacaataccagactctactgacagataaacaagttatagctgaaattatggtcaatggttgtcagactcaaaccggatttttttcaaaaactaggacacctataatggaatgaatctaattaaacttgttttcaaccaatcatctatattcactctctagatattgagctagcatacctactccactttagaagtataagaaaatcaaatatctgagtgcttatcttatttgctagcaccactaccaaagaattttcgcatcccacctctaagattttctattgtagcattcagttatgcaaaaggcatagaagatacgaaatcacatcagattgcatcatagatcagcatcttgatgatcaaactgttgctttctttaataccgaatcatggcctgcatggaatgaagtgcttttgggcccttccagttgcctttattcattaatggaacatgtcatcatagtattattaccagacaatngattgatgactaattgactaccgctaaggggatgacgctggtttaggttattaaacttacccagcccaatataaaggtagct

SEQ ID NO: 1941 - DNA, 746 bp, Zea mays
ggttcaaggtgtcgtcgatagatgtatagggattcccgtagtggtgcatgcagggctaattcctctcatagaagcaagcacccatatcaaaaggccaaagcatttcaggcaataccatcttcgatcgtaacacagtcacaaggattaacaccacacatgcatacatcaaaactggaacggatacatttggcttggattattaattcgcaccaccactcccccattttattttgaagctccacgtatatgtccgtgtagtgatgcttcagtcggtcagagcaggaggaggaggaggaggaggaggagaatggcgatggctgtgatgaggaggaggagaatggcgatggctgtgatgaggaggaggggggacgcagtggttgcatccgcaggagaccacctccggaatggagcagacggactcgccgcagaccctctggcagcagcacgtcgtgaggcacacccgcgggctggtgtgcttgaggcagcagtcgcattccaagcacatgagctccgtcatctgcgtatccggatccgtcgcgttcgccgcgccaaccgccgtccgcagcaggcgctccgggatggccatgggctcccgcagcacgacgaactccgccgccgtctcgggcgccggaccaccggggctgggtcccaacgcgcctgttgtccatcagttacgttgaccgtcaccaccaccagtagtgttatgacgactgtgtgtgcaatcgatacgtgtatgcaatcgatac

SEQ ID NO: 1942 - DNA, 610 bp, Zea mays
tggtctatttgccttgtattctttgatttgtagaaatgcaaaagtgagtctcattccaaaccaagtacagtctgagaagaggatgtcaagttttcgactcaagcttccaacaccagagcttgagagatccataaaagtaaaagagaaacttgaatcgtcactactgttgaagaaggtgcttctaggcttagtcttgtttgggacttctatgtttatatccaatggagttatcacaccagcaatgtcaggtttgctttttttcattctctccacacttcaacttaaatcactaaagttctgttagtggattaaccatgaagaatactatagacatcgaatgaatgtttttattttccatgtcattcaaacttatttcagtgctggagtgttttttccagccaaagtaattatttatccttgaatgtagtgttatctgctgtcagtggcttgaaagttgggctaccaaatacctcacaaggtgatttctttggggttaaaatttctcgtatcttatagcatggagtttatttttaataaattatggcttactttgtgttttcattaaacgttctttgcagatgctgttgtgatgatttcaattgcacttcct

SEQ ID NO: 1943 - DNA, 759 bp, Zea mays
aaccagcaggatgatggatcttggggtgtcagccaatctgactcatcggtcagcaaggatgttctcctatccacgttggcatgtgttcttgcgttgaagagatggaatgttggcagagagaacatttggagaggtataaattgaggttcatcgagagagatttgaaggtgtttttatttcagtgaaaattgatgctgacattcacttttttttctttttcttttttttttgttttggacaggactgcatttcatcgggaggaatttctctgttgctatggacgagcagttcacttctcctataggtttcaacttcacctttcctggtttgcttagcctcggcattgatatgggtttagaatttcctgtaagacaaattgatgtctgtggcattcttcaccgccgggagatggaattgaaaaggtttgtcactgacttatcctggcatgaaaaatcatctagtatttcccttgtgtttgcatgccagggagaacttttatcttatgagcagatttacccgtcgtttagtttatttttcttgtttttgaagaacaaaggaatttgcattaatttgtcagataaccatagtttgctggaaaggagtgcttgtgatggttgttcacattgacttttgagtaaaccagaatttgacatgaacttgtgaataatgtactgaaagtcctgatagttgttttaatttaggctggctgtggatagttcttttggaagaaaagcatatatggcttttatcccagaagga

SEQ ID NO: 1944 - DNA, 786 bp, Zea mays
aagccattgctccaagatggttcactgttgtataaatagcagaaaatactattttcacctgttccgaatagaactcaactgcatggtgcccatgccatctatgaaaaccatcagccagaaacaggagattaattaggcatgcataagtgatcagtgttacttcataaaagagtagacatacttctcaactagtgctatcaggttttctaattcttcttttgatccaccaacatcgaagaagtcatcaaccacagttgtgaggacaccatttttggcccatgaaatgcgagcgtcagacaattcagaagaaaatacggtagcagcagcagacagatagcaatatgtcagtttctgccgagcaaattgtagctggtccagcttgttctccttcacccaactgttgcaacaaatttaatcaatttacccaagggagaaaatttaaaataaaagtgaacatatggcatttagattacctatcaagatgccgaagttcatcccggtaaacacgttgagagaaactgaaatcttcgactgccaaagctaggaattcttgattgatacgaaaagatctgatacagcaaagtctacaacattggtacgcagcatctaaactacttaaaactgatgagatgtacttctgtgaaaataaaatcttacgaggattttgttgttagcatcagagaaccccaagcatcaaaatgttcgatgtttctcttgggttctagacgctccagtgtggaatacaagggaaaaattaacagcatactcgatctggaaatcacaaaa

SEQ ID NO: 1945 - DNA, 770 bp, Zea mays
atatgtgcatacttcagagaggtaatcgttactcaccttcaataaaaggcttcagtttttcttcaagccaatcaatattcttctccaagtaatccatgcaatacacaagccctgacacaggttttaacaccacagagaaagaaagtcatattattagaacaaaagcaagtaggttactgaatatcaatggaggaccaggagcaacctccattagggccaagcgaatgctcagacatgacatcactgagttttatgaggtcctcgatgtttatggcacactcatatctatttattacaatcaaggaaaaagttcaattgtgacaagagaacatcaaggagagagtacgtttttttttttgatagggagagagtgggtacagaggaaaaaatgtggtgctcaaagagtcaaggatacggcaatgcgtcatttgcagggtccaaattgacaaccgcaaccttcctgccacaaggaaaacacataaacgaagccatccgtgtgagcaaattatcaacttcagctttagtccaaccaaaacaaagccaagggtgaagtttaaactctcggcacaacttctgctacaagcaatatggtatcagttaacattctcgatcaaccttagcagaggagggcactattattgactactaatcgaatcacgcagcgggtcaagtcaaggtcaagcgtattccacttacctagagtcctagatcagcttgtgaggggcaaccgaagcaactactaatcgaatcacggcatcacgcagcgggtt

SEQ ID NO: 1946 - DNA, 755 bp, Zea mays
tgcatgcctgcagcctcaagcaggagagaatgatagcgtacaacaccagcctggccaagtgctcctctacggcctcgtgttccagtgaccagagcctgaaccctgcaaactgcggctgcgcatacccctacgccggaaagatggtattcagagcgccgctcttcacggacctgacgaacagcgccacctttcagcagctggaggcgagcttcacgacgcagttgtctctccgcgatggctccgtgttcctctccgacatccacttcaatagcgacaactacctccagattcaggtggcgcttttcccgtcgtctggggtgtccttcagcgtggcggatctgatacggataggcttcgatctgagcaaccagacttacaaaccaccgtcgaattttggaccctattacttcattgcagatccatacgctcttttggcaggtactttagttccaccctcaaaaaactcaatctgtattcaagcagtatgatgttttttttttggagaactagtatatggcgtggtatggaaattcactgtgactttctgtgtcaggtgcttcttctcgtggcagtaaaaaatcacatatcagcactggcgctatcgctggaattgcggtagccggtggaattcttgtgattgccctcattggcatggtattatttgcgttgcgacagaaaagaagggtcaaggaagtgacaggacgaaccgaccctttcggtaagggacttgaaaacttcgtgctcctttcaatcct

SEQ ID NO: 1947 - DNA, 936 bp, Zea mays
gctgcctgtcacggcgcccgccgacgccgatttcgatcatgacggatgcaccgcggaattatcttcttcaactgatcgagaattacaggaccatatcagacagtgggaagggtcctatgggcagggtgtactccgtaggatgccggatggtggcaagaagatgcagtcacgtgtcctccggatgaagaaggagctcgagcggcggagggccagacagaggatggtgaggaaaatgtggacttcgcgtaatagcttcgggtttgctttagtgtttctccctttctgttttgggcttggttgatatcaggcccacggacagttgagttggtgattggtctgaatcatgggtaggatgccacaaagattccccaaatgttgggttttagtgtaagattatggatggatgctgtttttttcgttgctttcagcgagcaattgaaattacatctgcaattagaatcattccaggaggaacgaggtgtcttttccatttagaagaaatagccatccaaattggagttagagaggtgtacattttactcagcaaatgggctaagttcagttcttcagtttataaaacgagatgtttgtttgttgtaataaaatttggttttttgttattgagagactgaaagatccggatgataatatcatggattagcaataaaagattaagtggagatataagcatctttcttcccacgacgttgtttgtttggacttgaaaggagagcttttgtttttttgtcaggatggctaacatgagtaaataaaaaagactaccctgaggttatatattgctatttcctgggcttgcatcaagtacatttggattggtaacttatttcatttcctcctatgccgcaacccttatgtttccctttaaattatgtaaggatgtcacgcccttgagacagacagggcaggctaagcgtc

SEQ ID NO: 1948 - DNA, 741 bp, Zea mays
attccacacgttcacgacctgtaccttgacacctttcccattctatctacgagtaaacagggcttcttatggatgctggagcaacccaaggatagcagcatcaatggcgctagcccagggatcagagacaggaagctcctcgtcgaggttttccctgtaaaaatgtctgctacgcttcaaggacattccctcaccttgtctggacccgatgatgcctcgcagctaaccattgacctgctcggttgcacagttgctgctgtttctgcatccaatctgccctcacgtaaatggttagtgcaaatcgtagctggcctcttcaacattcatctctctctacttattgttgttgttttcttgccatcagctacaaagcgtgacttactcggtgtatgcattattatgcttttagcagctatctggatccttgacttactacataatacaatacccagatttgatacactcctactatataagaaatcagagtcaaataactgtagcaggctcctaaagttgattatacagtttggctaaaactaccgtcagtacctgtttttttttcagggccaagaggtatccgataaaactggaaagcaaggaatctggtatttgcagggggagcaaggtatgctatgtttatgcagacacctcttgggagaaggaatcatggtgtaaagcactccgtcttgcttctactacggacaaggacaaactcaaatcccatgaaatgctgacccaaga

SEQ ID NO: 1949 - DNA, 778 bp, Zea mays
ttctgttttaaaggacagcacctcttagagaactgcgtccctttgcatgtcaaggtgtaggacagcatctgtgtagaacagcaccttaggagcatatgctcggcagcccgttgggatataaatatgtatcctcaacccttagatgagtatgactatgacatttgagtagtgtgtgagaaataaacgaaaaaattgcccccaactcgtgtcatcctctcgatgagagtaagggtctcgttgctgacaacgcagtcgatgaagaaggttgatgtcgaggtcgacaaatatgtatcctcaacccttagatgagtatgactatgacatttgagtagtgtgtgagaaataaacgaaaaaattgcccccaactcgtgtcatcctctcgatgagagtaagggtctcgttgctgacaacgcagtcgatgaagaaggttgatgtcgaggtcgacattgtcgaaccatcatggccgaggcgtgcgccaagttggcccaccctaacaacacgtctggaatgaaggcagacaccactgttgccattaccggacgtactaggtagagggcctcaaccatgcatcagcatctgaagggactagcaaagaagacctacacgacgattgcgatgcacagaacaacggtaaggtagatgtccatgcagccagcagttgttggagtggacaaagtagacaacgacaagatggcgacactagcgacgaggttgtgatggacgaattcgaagtagatggtgacaaatcgaggctcctattgtggtagcggggagagag

SEQ ID NO: 1950 - DNA, 748 bp, Zea mays
aacaaaaacctatacttcttttgcgtccgtctcaccacatccgttgtccgagcattagtgatgtcgccctacacttgcataacacctatcagggccattggttgctagtcaatcgcgatgatgagaggaaggtcaccttccctagtagcataacacaaccgaaccaagaagagcgagacgaggccattaggtacccacaacaaaactatgcaaggacagactgctgcgcactggcactggcacttacttgcaattaggatattgttttggtggtacatataggttcggtctcaaaacctacaagtgagaatagggaatcaagcaatcagtcaaaaaacttttatggatgggttactgggcctatgggatttgtgctaccaccttctggagctatgcaacacatgtaactgcatggtcatagttttttatgtgaactaacttctgattcactttagaccaataaatctcattgtgagcttctgattttattctagtataattcaaggaaatgacagcatacaatttgatttattattatgacctgcgaatctaactttttccaactattacattaattagtaatatgatattaatattaattgggcattgcatttttcatgttcattcgtgggttttaatattacaatccactaaaatagacaaaataggcttgtgaatcatattagtggtcaatctttctttcccaacacaagtgcaaggaacttatgtgaaaggatgtgacagacct

SEQ ID NO: 1951 - DNA, 768 bp, Zea mays
cttgcatgcctgcagtacccccaccgcctacacctgctgccccgccaaaggcgtcgcctatacgcccccctgcggccgcgtcgccacccccatccaatctgccagcgcccaacccgccggcggacccaacgccgccgacagtagcacagccacctccgccacggcgccggccaccaagatcgcctcagacagaacctccacccctggcaccaccaccttctggaattcctgtcgaaccttccccaaccagtccctcaccgacgtccgcagatccttcgatccccactccctctagcccctcgtctccagggacgacaccgtccacaccaggctctgatggcactccatcggtgccagccccagcaacgccaggtgactcagttagcccggtaacaaccgggggccaaggttccaacaagtcgtcgagtccagcctcgcagagcagcagctcctcagtagacagtggtggactgtcttctggtgcaaaggcaggcattggggtagtcgttgccattcttgtgcttagtttggttggagcagcattttggtacaagaagaaacggaggagagtgcatggataccatgctggttttgtaatgccttcaccggcctcgactcctacacaagtgttaggtaattctcatttgataaagtgcatttgcagcaattacacgtctggaaagtcaagattagtctttatatgtacctgagtcatgaaatgaactaaaactcatttcttgtttagggtattcggccaaaacaaacttt

SEQ ID NO: 1952 - DNA, 787 bp, Zea mays
agcttcgatcatacggaacatctcgacttcgttgtagttcttgttaagccgggcgtccaccagctccccggcgttgccggtctcaagcgcctgcgtgagcaatggcctagcctgcaaataactgtgctgtcacaaaaattgctggtccacatggtttaccagtattataatttctccagaaatatcacacttcgagggctggatacagtcccatactgaattgaatgtaaccagtgaatgagttataagtctacttaagattttgaattatgcagataacttaagatatggttactttccatttgctactgaagggtaagaaaactggtaaccttttcgtgaatcaagttactgaatactggtatagcttacccactcaacaaggctctcgtcacccaatggctttgatgcgtcgacaggctttctaccagtaataagctccaagaggacgacaccgaatgagaatacatcagatctctcagtcaacttgccgcttgacgcgtactctggagcaaggtacctaaataagaagcgtgtgtcagattacaagcaggttttaactgttctcttgaacttgccgctgttttactaacccgaaagttcccatcactcgtgtggttacatgagtgcaagcatccatagctaaccttgcaagaccaaaatcagcaacctagcaaatgggcaccgatgcagtgagtgatataactccattataagatgttactgaaatcatgtagaaagcattctgaccagtgcttcaaagttattatccagcaagatattggag

SEQ ID NO: 1953 - DNA, 760 bp, Zea mays
cggcacaaaagcaagcaattcacttctttgaggcaaacgggctcatgccagtttccctgcaacaactagtggtaaactgtactcaagaaaaaggaaaaatattttgaatttgcacatctatatcactcgccgaacatctctcatccgcataaacaacaaatcagcatcaaaaccacatcccattgcaatcttaacgacctcacaattcccaaacagtaaaacaacgcaattcgcaacagggaaaaaaaagagcgccaaaagcattctgctccattactccagtgagcgagcaccagcacctcgccggcaagctggcaaccagagaccggcagtcttattgtgggcaaagaaccaacaatcgcatgacaaaatccgagcacaagagagaaaattccccgaaaaacgtacccgatttgcaagctggtgagcgggaagaaatgcctattctcgccggcccgcaccatctcgccgcagcagcttcgctgagaaacgacaagttcttgcatcaaacggcagatcagacgctggggtccccccaaatccgggtgcgaatatggtgtaatcggagaggcttcctcctcaagtaccttcctcgaggtcagctctgtgctcccatggcgtcgtgcttatccgcaagccagggtggtcaggtaccacagcccggagttaatgcccgcgcgcgggcggtaaagacaccgcccgcccgccttccttttcccccacgcggcaccagatcgtcaatggcttcccagttccaaca

SEQ ID NO: 1954 - DNA, 798 bp, Zea mays
ctagcttgcatgcctgcagcgtggcgaagggtgttgcggcggcgcggtggtggtggctggtgagggagagtgagaagcggctggagagagagggagaagcaggatgagaaagggaggtggccggtgcggatggagagagagagagggagaagctgggagtgaaagggaggtggctggtgcggctagagagaaagggagccgctggtgcgcttgagagagagggagagggctaggggagagggattaagcgtgtgtttggttggagagtcaactagaatggaatgactccattccagtttttgagaataaagtcattctattccgcgtttggcaaacagaactaccactcaattttttgttttgttaaagagtagaatagagcggaatcgctctgttctctgtttggttggagagtcatatgattgtagagggtaggagagggaggagagtgctcatatccgagagagcgctcacatctggtcgtttttgtagagcgagagcattccaactatctatggtaaatttctatatggagactataggagccattccactcattttttgttagaaaccaaacatccaaaaaaaaaagaatggagccactccattcttctccactcctcaaccaaacacacctaagtgggctttaacataattctaatgggccagctgggctgacttaggctggctgggctggttttctttatcttttctttattaatgtttttgataatgttttttggcctaaaccgctttctcaaattacaatatttttttctatttcttaaatatatttaa

SEQ ID NO: 1955 - DNA, 782 bp, Zea mays
ggtgaagagatgtaaactttgctgttgctgattacttcctcccaacaacaagcaactctgttgacagttgaccacagcaaagaagcagacagatcattttcttctactgctagtatttaatttaatctattagactgcaaggtagcatagcaaccaacaaaccagtcactgatacatatatggtgaccgcagctctgttcttatagatcatacagcacacctgcactacctgcatgactgcatgatgtgaagtaggcagccttctgctagccctcgactaatcagactacattctcctctccccggttcacaaaccttgcccgatggttgtgacctgtgactgacgaaccaccacaaaagcagccaaatagaacagtatctttgcaccgacagagacatcagtaaacttcaggtgcctccctcaggggtacgttcatgctgctttccattgtttgccacccaagcccagagctgtcgctctgcatcattgtgacgaactcgccatagttggtctggccgtcctgaaaatttacagaatgacaagttcacagaccagattgtcagcagggaatttttttccctacatgcttattcatgtcttaaattagatatgaaaatagtccttcctacgaaaaaaatcaatcatatatgacaaaagaactggagatctctgtttcgttacattaggaaagcacaaattttatagaaaatggaaacgcgggatattttggtgtttgtattggaactgcaagctgtaaaaccaccctactgtgcatgcgctc

SEQ ID NO: 1956 - DNA, 617 bp, Zea mays
tgggtggtctagctaggtgcgtgcgtgtgaccaggctcggtggtccatgcagatgcagccacaaagttggactctcgcgcgcgcggtcgacaaaaagctagcagctatagctcgcccgcgcgtcacctcgccctagctagctgcccttgccctcccagggaggctacctggcctttagaaatgtggagacggaaagcatatctggcaaagggttcaaagctaatcccccgccataattactcttattagctgctcgtgagaccggccggccacttgatcaaatcaaggtagtcgctactactcgctagctgtgtgtgtgtgtgtgagtgcgatccttgtccaagctaacctttgattttttttgtctgcgtcgtctgctgctgacgcgatatcgataccggccgcccggtgcgcgtgcatctgtccctttcccggttgacttgcgcacgcgcgttgccctccgcgaagaatgttgaaatttttttacgacacgtcagaggccaaattcgcgctgcacgctcacatgttagcaagcagctgctcgcgatgatgtacattctacagtacactactgttccttagatacatacatttttttttggggggggggggggggg

SEQ ID NO: 1957 - DNA, 870 bp, Zea mays
  unsure (1)..(870): unsure at all n locations
cacttaaaattgcctttccggtcnnnnnnnnnnnnnnnnnnnnnnnnnnnnnnnnnnttcagcaaaccccaggtctaagctgtagtctcactatcctatatactaaagtgacatggctgcaagcgaatgccatccagttctgccattagcaaaataagttatgcgtaaaaactttgcttcatatgtacatttttctatgttttgttgattgttatcactattcaaagggttgaagtgtacacacctagtaaatggttagccctacatgaatattgtcctgcgatttacttattgtggcttccttcttatagagccatgtatgaaacttgttaccttgcaaattgaacctgttgcaaagtgtcttaagtttagaggtgtgatgtaatgttattaccaatctgcacaaaatgttaccccaattcagaaattggctctatcatccttttgtttatcatcgtgcttaactgtgttgctttttgcccataagaagacaagttattgttgctattgttcttctgtaccacaccaatagcataatccaatgttttgaagatgttgtgccttttgaagtacaacaaatcatgtaaatgtttgggctttggagtctttcatgatttgtttgtttcttgcaggctgcatgtgatgaaacttctgaggaagcagaacaagcatttctccaacttctgttaagttcgactaatggggacaacattgaggttatgtagttgtccaactacatatgatgattattttggaaacattacatgaattcaggctgcatgagtgttgacatattgcacaacatagtgatgaaacatggctatatactttcctttccctaaatttaaagaagaattacatctgaaaatt

SEQ ID NO: 1958 - DNA, 825 bp, Zea mays
ataactgaaagtgtttaaatactgaattttgcatcagcagctcatctttaaagaacttaaacacaaaaactaaaagtgaagttacatggtctttacacctcgctaaagaaatgtgtctgtgctctctcattactggtaaaatggttgttggttcatcgaccatggtattcatgtatccatcgtagccccaatttctctttgaaatatacctagctaattggcagaccttgaagctttctattgtagcattttagtatgttgttttatttctctttgatatagacatggttttgtttctaataggtccattgctgatgcttatatttttacaggtcaaactagtatggtattataacaatgcattggggaggccaaacaagaagaaatttattgcgcgatcaaaagcgtaagttttgttccgtaaccaaatattgtccttgaaacaagaaaggtctttttatgcttcttcagttaacattttttagaaacctcaaatctggaaactttcgaaattccattcttactgcttgttacacatgttgcagataccatggatctacattgatttcagcgagcctaactgggtgagtactgtcatactagaaaagctggtttgccgccaacatatacatctttaaagcatgtccatcgacactcataaatagatctccaatacttttctgattgcaactctatcgcagtcttcctgccctacaccagaagtttgatctaccagcaccttttgttctgcacactgactggcctcactactggcgatatcatcttccctgttataccgatttaaacctttgctagatgaattcc

SEQ ID NO: 1959 - DNA, 789 bp, Zea mays
caccctctcctccgtggccttgagggcttccccgtagatgcgcaccaactgaaaaaagacaaggccattgatgttttgttaccgggttgctaccgaggcgaggcgaggcgaggcttgacgacagtggcgagttggagggcactgtgaaccgctctgatggcaaacctcgtcgacttcgccgggcgtcatgatcagcgtcggcgacatcatgatggcgtcgccagcgaccctcaccagcatgccgcgcttctggcactcttcgccgaagatggcaccaacccctgaaaagaggtatcatcccacatcatacacacagaccattcggcggggcaggggaacacgccatggcctcatggccatgccattttgtgtattggctgtagctgctacattgactcaccccattcggcagggaacagatcagtcggtgacttgttgtttgtgaattcggtccccataatcatccccaagccacgtatctggagtacaggagcatcgaagttatgtattcgaaccaacagccccttgggttgattcagagattcatacgcgtacctcccctataatcggactgtctgccagcgccctaatcccgtcctggaactttggggcgatttgcttgacatggccgggaatgtccctttcgctgacgccatttatttatttatttatttatttttgcaagccattcgtcaggaacaaacagataaataacactcgaatacgtgttctggaaagcgcggcgcggcatacataccgataaagtttcagagcttcatggccacagca

SEQ ID NO: 1960 - DNA, 816 bp, Zea mays
attcagataatcataaatgcaaccttccacacctaccgcaggcagaagaaaatctgaagagaactaacagcgagatgaatgaaaaataaaaagaatagacggtctgaaggcggaaagaaatatcaacgcagttgactaaaggatgaacgggatagagcaagaagtagacagagaacatacttgctcccaagcccgaagaggctcatcttaatttctccttccttcaccgatcaccacccaatcaagaaaccggaggtgttggcgctggtctctccctgtcgcgcaagacagagagagaaatataggcaggaaggggtggccgcggggtttcttctgttctcttctccgtccggggctcccctcctctcctttttggttttgaattggcagatattctcgctcgtctcgtcgctgctattttagatggagttttggcgagagacgttcatctcaacctccactcctcctttcgcgaggctggcagctgccccctttttctctgcatgcgaacccccacggccccaccccaccccctctcgttagtcgttactatattgaggatcggagaccatgatttggatagtcatttccttttcaagagactgacaagcaaatcaaacatccactcccattagcatgtgttcgttttatatttaaagaagacgaccataaagtgtagctgagtgcagtgctatttaagggactgtttagttcagcttttttggccggtttttttcagagaatctaaatctggtcatgggaaaattggctgtaagaaatacccgaatatcatagtgattacgtacgaaagaagat

SEQ ID NO: 1961 - DNA, 808 bp, Zea mays
cttgcatgcctgcagtaaacatattagcattagtgaatgcattaactcaatttggatattatggtttctgttttcttgaagatgttgctgttgtaatgcattatgatttaattggacactataactagaaattttatttccactctcctttgcatttatttatctatttttgttgattgtttgatcaaaaggatttatctcctccttggcaagccccttttaattaggtttcattaactgaccccctttcaattagttcaggacttagagggagagtgagccgtcctgtacaacttttttagggtgcgtttggttgcgggacaaacatgacatggacgtcccctgtcgtcctctctcgcccctccaattttgagggacaactgaggacaacattgagatagtcttgttccaaccctggaccctaaaccaaacaatcttatttaagggatcatctcatcccgtcccgtcctgtcattgtaaccaaacacacccagtgtgtcctgagtggccttctcagaattttttttggttacggggtgcgcatatcgaatctaccaaactagtttacatgaattacgaattaattagcttaccgaatgaatcataatagccttttggcgcaagaactttacaatgacacattctagagtaattttacctgcaatctagttgccagatcccttagggttcgttcgtttgtccaggaatggactcggaatcgttccagctaatcaaaacttatataacttagagaaaaaatccagctaggaattgttccaggcctccgttccgtgaaaaccgaacggga

SEQ ID NO: 1962 - DNA, 775 bp, Zea mays
gtggccatggtcggtggggcgactccttacgtggttgactagaatcctctgctcttggcctacagaactcccttggtcctccgcgtcgtggaattggacgtcggtggtgtggccttgtctgggcggtggaattggacgtccgatggcggacacgctcatggctttgaaggtgaatcgactgtacggtttagggtttgttcgttttggtgataatctgtattggatgggattgagccggtttaaatttataacaagtcaaaattcatcctaatcctactcaatacattccaatacacctgtaatatccatactgaagaagggatgggattggtgggaggacctcttcacaaaaattatgccacttttttttgtcttcacctatctaatagaaaaacaaaaaagtactttctcttaaagtcatgtataaagtgtcgttcactcgtttggtacggctcacgagaaaaatagtgaaaccacatgaaaaaatgatgggaagaagccctccaaagttgagatggattcaaatcgaatacttacatgacttagaacatagcgtcataatgattattaatttgttttatcgatggattatagttgttaaaaacaaactaattataagcatagcacatagataccttatgagcatattcattaataaaaatatattctttaacaataaaaatatatgtcatgcttataaatatatgtcaagctttgaccacatttacatattattttatagttcctataacaggcatctaattcattaattggg

SEQ ID NO: 1963 - DNA, 761 bp, Zea mays
attacagcttacgaacccattgtatcgttcgtccctgtagctaggaagctgaatgagggagacatatggtgattttgcctcctcattcgtcatccagacccagcagcggtagagcctaccgtcggtaaccataaggtctcgggttcgagccctagcctctgcatattatgcgggtaagacttgatgcttaaagatatccttccccagaccccgcacagtgcgggaagcctacggcactgggtacgcccattcgtcatccagacccagcagtctactggttctggacttctggtacttgtaggagcgtcctgtgtatgtgacccttctcataataagccaccagtcatgctagatctttcaaaaaagtaagttttttccctcaatgcagtaatctaaaggtgattccttttttattcgttgaacagcttagggaatgttttaccagtattgttcatggtaaactcagagtttctatcaactgcccgggaaagtgaacttgtttccactccatctttagtgtcaaaaccaatttcttctacaggggcaacggaactacttcgaaggtatttcctggaaccttatttcattttcatttagatagtcagcattatgatctcatctgatatgtgaaagctatagaacttgttctttgtgattgtttagttgggttctgatattctggatttgtacattttccagtgaattatgggtgggttctgctgctggccctcaatgctgaagagaatttgatgaatatgtct

SEQ ID NO: 1964 - DNA, 731 bp, Zea mays
gaagatttgatcagctatcgccttcgatgcagttgaatatttgatcagctattgacttcgctgctggcctgttttctcctttggagaccaaagaagccatggcgggccgggaggagagatatgtgaggtcagtctggtcagccttttttttttttgaatctgttgtgagaatttcacttcagtgacacacgttcagcatgcgtcaagaatatattagtgacttggtgtcttatttttgaaagaaaaacatcaattgagtggaaatgcatggtgccagatagggcatgtttggatatcagggctaaaaattactccacctgtttaaaatagattaaccatgggctaattataggctaatgagggcggacgctaaccaccaattagccatcagtaaatcttattagcctaaaattagcccatgttaagcctttctaattggtattcgaaactaggggctaattgttagcccctggatccaaacaggccctcattctatggtgtacaaaaagtctacaaatcctaagagcccctttggcagggctctccgaagagcatctgttgtggctctggttctgccaagagctttaccgaataccagtgaacaaaacagctccagccagggagctagcagaagccctggaaaaaaaagaactacacgcatggagctggaaattatggcttccaacagctctgtttgtttatctgcttcacaatgcataaattttgaaaga

SEQ ID NO: 1965 - DNA, 855 bp, Zea mays
caactggaaaccatgccaagctaattaattcaggaaagtccaggtcaaacaataaagacctcgtggacagacagcacagctcccattagctgcatcacaacctattatttcttctcttccctctcaatctcacacaaaaaacatgatcctcatgttaattccaatgctcagcactctttaatgtgtgtaaccttgcaattatgaaatgcattaattcaaagacaataatgtcaattacctattctatatttccattttgtagcacagttgcaccgatggcttatgcatgcatgcgttatgtgcctttggtgcattgaagttcattgaggatgtgtttggttgcgggacatccggggacaggcaagacagggacgtcctctggcgtcctctctcgtccctccaattttgagggacaacactgggatagttttgtcccaacccctcaccctgaaccaaacaacattatttaaggaacgtcatatcccatcctgttctatcattacaaccaaacgcaccctaaagtaacctaaaattgctaacatttaccatagcccttcattcttgtataagcattacctagaaccgaagtgtgtgcgtattaatatattatgtttatacaaaacactgcataacaactgtaagccatttgatactccttcagtcaagaaaagtacttggtgttttggatgacagtttacaatatttactggtgacaatattttctgagggtgtatacataaaatacaacaaaaattcatgacatttgttaagtatttttaaagcatatataccaaatactattttttgttatttcaaaactaaatattataaaagttattggccgtcaaagttttc

SEQ ID NO: 1966 - DNA, 826 bp, Zea mays
gcaatcctcgatactctagattcgacctgcagacgctgtacctcatgaacccgagctacgccggcggctacgctgacgacggcggcgcgtccacgccgggggcggccaacatgatgctcctcaactcggccgtgaccaccatgacgccggcgtccttcgcgcaccaccaccagcagcagtcgccgccggccgcgcagcagcacttcgtcggcatcccgctccaggtccaggcgccgccgcagtcgggctacaacctgtggaccccggccatggctggcggcgccgcggacatgtcgccgcaggggcaggcgcagactcccggcgccgcgggtgctgctggggtcagcgccgtgctcagcctgtcgtcccgcgaggcgccgccggtcaccgtggccgcggtggccgcctgcaccgacgagggcaagtacctgggcgtgtcggccacgccgcaggggcagatggtcatgagctccaagtacctcaaggccgcgcaggagctgctcgacgaggtggtcagcgtcagcaagggcgtcgaggacgctaagacggccgctgccgccgcgaccaagagcctggccgcggtgaagaagaaggaggactcggagggcgcgtcaggtggcggcaccgacgacggtgccggcgcaaagagcggcggtggtgccgcgccagagatgtccacggcggagcggcaggagatgcagatgaagaagagcaagcttctcaacatgcttgacgaggtcagtactcagcagtataataccatagtagtattgcttcaattcatactactaagattaatttcacgagcaagttaattattttccat

SEQ ID NO: 1967 - DNA, 555 bp, Zea mays
acagttgaacatgataaatttatagcaaacatatgtgaatttggtcgcgtttgagaaaaaagtgaatttggtatccaggctaatgcttcttagtttcttaattttgttatctattttttttcaggttgaggatgctgttaatcgtgtcacagataatacaaatgcagcacatgaattggatattttgtcattacgcacgcagcttggttctttaactacagttaggagcttacgcttttgtctccattgagtattattaatgatacccattcgtgatatttgatctgaagagttcatttgatctttcagattctgctttgtgttgatgttgctgcaacatctgctaagtcagttgatatgtgccgatttcttctcgatgaggtaagcattatcagttgtgcattctgcatctccacactcttgcagatattgttggaaacaatcgctgctatatcatatttttgtgtgtatggtttctactctgtaccgatacaggcattatctagtgcacaattagattgggttgctgctaattttactcttgctttggtgctt

SEQ ID NO: 1968 - DNA, 695 bp, Zea mays
agcgtgagcgtgccggtgcgctggatcgagcgcggaacggagcccggtcgtcggctgaactactcggagctgatcggggaagggttcctgctggagtggccgccgaggtcgacggcggaatgcgacgagtgcaaggagcgcggcggggagtgcagattccccgatatttcgttccagtgcatctgccgcgacgggagaccctgccgacgctctcgcggtaagcaaactctatcagctaattgaatcctttaccctgcaatgctagctcccaccgcactgagctgtttttgatcgagcgagagccgagagcaacacgtttctcccgttattgtgatttcgaatttaaacaagatgctcaaagaatttccatttcacttaaaactaacgaaaatgaaacagctagttgtcttaagtctgaagttgtatttttcatttgaggcgccaaagaaaaaaaacccaatgaaagctggctgtatttttttactattatttttttgctggagaacaagggcagctagaattcagatgcatcctcaatcatcaatgcaacttcttctcctacgactaatctatagccggcaccatttgaaaattgaaatggtcagttcctatacttggaactctgaaccgcctctagaaatctagtggccgagtgtttttttttttgggggtcagaagcaggaggggggccctta

SEQ ID NO: 1969 - DNA, 760 bp, Zea mays
atcttggtcattttgagttggctctcgatgatcattttcgttgtgactgtcactgccactgccatctccttgctgcaagtcctgagccactgtaactttttggcgcttcctactcctaacataggtctcggagtaggtcctcccaccatgtgtagctgctgccctaggcaagtttctgccctgggtagcttgagttgcacctaaaacttcatctactgcactccaaagctcctcaccttcttcagactcctgaacccactcattttcccacaaaagctcttcaagcgctagtgggttgcttttctttccctttgaaccttgctctcttatctttgtaaatctgttgttcatcttcctgttgtagctcacatagaccaacttgcataacctttgatgctctagccggttcctcttcttggtgtggatctacacatgcaaattcaagaagtcatcaaacacttactgcatatttcagttactgcatatgaacattgaacaaacaacaaagtagagacacttactgctgaaaattcactccagtttctctcacaaccagaggccgagcaacagaggcttataactctttttgcaagggtttgtagttcgaaagcaaaccctccatatgcaccccaccatagcactgaagtagacaaacattgtaagtttagtcgcaaacacataaactgcatatttcagttaatacaaagagaatttagaaataaacttacaggggatatttttccccctatctcttatttcg

SEQ ID NO: 1970 - DNA, 626 bp, Zea mays
cagcttgcatgcctgcagccagctccaaagcttgactatcagcaccaacatcggtcttactgggtggctgccagcctcaatagtgaatctctcgacgaccatgcaaggcctcatgttggctgacacagggatcgtaggaagcatccccttagaaattggcaatcttttcaacctccagttcttcagcgtgtcaaatacttccgtgtctggtgcggtcccagatagcattggcaagctggtaaacttggttgaattaggcctgtacaataccaatctttcagggcttataccttcatctattggaaatctttcagagttagctgcgcttgctgcattcaatagcaatctggagggaccaattcccaaaagcatagggaggctgaagaacctctatgcccttgatatgtcaagtaaccgcctaaacggttcaattcccatcgagattttccagctaccactcctttctagatacttaggcttatcacataattcattatcaggtaccctacccgctgaggttggtagcttgacaaaccttaacatcctggcgctatctagaaaccaactgtctggtgagatacctggtagcattggggactgcaccgtgttgcaggaacttgggctgg

SEQ ID NO: 1971 - DNA, 789 bp, Zea mays
cgccggcgccgacaccgcggcgagggccgtgttcgcggaggggtccctgttcagcccgttcctgttcggcaacttcttcgacccggccgacccgttcccgctgtgggagttcgagtccgacgtgctgctcgccgcgctccgccgcggcaacgccaggaccaccgtcgactgggccgagaccgagtgcgagtactacctcagagccgacgtgccaggtacggtcgctgctactagttccgagcttctcacatggttctgcacactgtccatggatcaatggatccttgcgaaagcctgaaattggtcttagagcactgcacaaaaacagacatccatattcaatcgaatatctattcaatacttctatgaaaagttcagattctaaatgtatgagatgatttccatttagcagttgtaggatagatttaggactttgtgataatatgcgtcgtcggttccgtatagctgctacttgtggtcttgcttctgccaccggctaaggcgttactgagccgtcgtgccagtaaaattgcattgcaatgtcctgtccattcgcgcttcagtattcagatggttaatgctttcaattctccagagagatcttttgcatctaaccagtagtagctccctagagcaagagaggatgaaaagcaacaataaggcatgtgtgcatcctcttttcccccgctagtagctagcttctctgtgctttagagctagcgtctctccatagcctagcttaaagctaagctcgtgcttttttttaatcattaaattgtgaaaaatata

SEQ ID NO: 1972 - DNA, 740 bp, Zea mays
atcagctcatgtatgcattcgatgtagttccctgaggtaaatgaccacaccctgacagaatcttcactgacagacgccagatagttgcccgcggcatcccaacatactgactgaataatctgtacgtggccctacataaaaaacacaagcccaaattacagagtacatcgagaatagtgcagagtaaatgcaaaaaacatacagtgaagttataacttagaatagccgctaagttgcatacctacacttatcgcaatttaggaatgacatggacatcaaggaactgattataattcaggaaagaaacaaaatttcagcctggatggtgatgagctgatcaaatgctcattataccacaagagttctcatcataccacaataaagtataaacatacactcgtctgtatgttgtatctcaataatctagtactccctccattccaaattataaaataattttgcttttctagttatattacttttactatatatctagacatagtgcgtatctaagggggtgttttattgcactagagcagtagagctaatagttagttggctaaaaaatagctagtggaattagctagataacaaatatctagctaactaatagctaatttgctaaaatagctcatagttaaactattagctagactgtttggatatcttcagttaattttagcagccaactattagctctagtgcattcaaacatggtctaagtacatagcacaagctat

SEQ ID NO: 1973 - DNA, 779 bp, Zea mays
cccggggaccctttagagttgacctgcagctgacaagaggtttgccaacagatatgttagcatttgatttctgtgatatggtttagcagatgttgtggcccatctttcatgttcctaaataattgaaggtttcatattctggtcacatctttgcaggcaagagctgaggatattttcacaagaagtcataagatttgggaatcgttgcaaagatcctcagtggcacaacctagatcgttatttctccaagtagggtcccactgtttacatggcttaatgattgattgctagtgtaatgatctcactagtccttgtgtttgtttccaggctagagtcagaaattacaccccaaccacaattaaaagaaacggcgaaagcagatatgcagcaactgatggcccttgttcggcacactggtgtgagtatcacacatgttgacaaaaatctctagtgttcttacagaaaataaattgtgtcagactacattttgctcacctttgcatgtcatgcaatcagtatgattcatgtagccattcctgatgttgttgctgttccactttgtcccataggatctctaccatgaattacacgcactagatagatttgagcaagattaccgccgaaagttggaggaagagaaaagatcagttacatctgaaaggggtatgtcgatggtcatccatgtatcacccttgtcgcttcagatgctatttttttctgccagtccagttccctgatcctcatcacacttaataaccgactcccatgaatgaacaggc

SEQ ID NO: 1974 - DNA, 735 bp, Zea mays
catttcccggtgagcaatgtactgaacatgttacttcctccgtttctttttatttgtcgctgaatagtgcaaaattacactatccagcgataaataaaaagaaacggaggaagtattagttaatctattagattccgattcgatccacttcttcctaaactttaaagcactttaagtttgttttgagctctaaaactttaatacgatatttgctaaagtacactgtgtatgttttcaaatttgatgggccaccttgtgtagattttcaggtttgagacctacattatttgaactgaatcagttcgaagttcgaactacctactaaaagctgatttgttctacacttgggcaccatcctggtgtagaatcccaattcccaaccaaccaaccgaccaaccaaccacagaccttaaaatagcagggttgtggcgttggcgccataccacctcagcagagcgaatctttttcctgctcatacgtgagggcgcggttacctccatctttccctttatggctcgggtgatgccatatggacattccaaaattctttatgttcaccggatctggcccgatttggtccacaggctcttcagtttttttattccttaattctcgacaaaaaaaagtttaagacagagagaagagtatctttgacaatattttcctgagaagggttgggtgaacatgtcaggaggattcattcatggcctaactcgcaggtttggggtgaagaaa

SEQ ID NO: 1975 - DNA, 839 bp, Zea mays
  unsure (1)..(839): unsure at all n locations
ataaaattaaaaattctattcaatcttaaatctatatatccgttcactcaatcagatatccatttgttttgcccgaaaatatatgggcagaaaaagacgtggtagtatgtaaccacacagtaataccctatctagttccagttcctcacataacagattcgaaaagtaatgcgcaacagagcatgtgccaccaagtagggattcatcaactgaccaacaaaaggaaactctcatcaactggcctttttttcctagagacctagacattgtgtataacagtacaagaggtaattccagatttcgtaaattatctggagtattatcatttaatatcaagttatttactactgagaactaagtcttatttgttaagctacaattatagaattgggataacatctccatcaacatcaaaagaacatgaagaattaaaccagctttcacaaacctggtcatcagaatggtgtgcaataagcaagattcctatctgttgctttatacaaatgtccaatagtttttggtacctgaatttattaacacatgaagatttatcaagctgaataaattgacacaataaattgccagtgcataggttgggtaacagggtaagtaacgcaattatttcacaaaggcttcgacattcatttaaattttatcatgttatgcaaaattgaacattgtggtctttttataatacctacctcttgggtccaacagttcttggcattggttgaaatcgtctatgcatttatagattgcaaggctantaagaaatgttctaactccctactccaaaataattcaattttaggttggccctaaatcaaactttcccaaac

SEQ ID NO: 1976 - DNA, 1073 bp, Zea mays
aagctccttttcaagtgccttttgggcgtatatagtagatgggccttatacactttataacatcaatataaatataattgtctcaaattacaaatgctaacacattccttttcttaaagatatgcattacaaatccatgttactacctttcatttatctgaccatatcaacctatcaccaccagattccaaatattaccaacataggtttgacagcacggaaaattaaaaaggcagctatcgttgggggtggtctaatgggatccggaattgcaacaatactgatattgaacaactttaatgttgtcttgaaagaagtaaatgaacagttcttatctgctggcattaacagaattaaaggtacacttttatttgttgcactttttttttggaattgccttcatagttcctcagaagtttgttctcttgtgttcagtgaatttgcaaagtcttgtcagaaagggtcaacttactgaagaagattatgaaaagaagctttctctgctatgtggtgctcttgactatgaacagttcagagatacagatgtagtaattgaggtagacccagtttctattatattcaccactctctgattaatatgagacagcggtgcttattcagctttgtcacctatatagagacatctagcttagctatatcatgtgcataggtataactagttatgtcttataacaccagaatcaatcaagtatctaagaaacaaagaaaaaatcttatctgatggttaagaaagaaagtattgtaatggctatttgacaaaagcccacaaactttttacctttgagtgtgtgttgaactatggatttacgtaattcggaagtaacgcattattttcatggccgaatgtaggcggaatcctggcagacattttactaaattcttataacctgtgttgagttcttgcggcataaaggacatattggccttgttgcctacttggtccaaaggctgtgatataatagaacctttccttgttgtatactaaacggagtttttcttggtccaggtcaaaggcaggatcttgtggtgtttaacagcggagtttagtatgg

SEQ ID NO: 1977 - DNA, 803 bp, Zea mays
cccccgcttttaccgaaaagccaacctgcaggaaaaatattcgatctccctgacgataaaaagaagcattctcacaatagcaactccacatgtttagtttcagtaattaattcatatggttgcttacttattattcacagtgcagaatgtgtaggatgggttcaggcttgtggtaaacttcaaaaaactagccctgcatcacaacttgcctaaatagcttagagtaactcttatggaaggtttacatagcaaccgttaaactatagacataactaacgtgtacagtcatcagtatacacacgagtacatgactaattgcttgtgttgctgtttacatacctcaaaacacagactaactgaaattattggttaagcttaatagaaggtaacggcctaatgaccagtaattaaatacatatctagcctaattttactgatagatcaagctggatgaatggatgatggcatgaaaggaaagtacgtacctgaagccaaggagatggaattccatagtaagtgtactcttgtggaatatcttgatttcttgctaacctctccaatattctcacacatttaggaagacaattccaatatgcttcaacattgttggatactagtgaaacaaaaagactcgtgacagatgtcagcacacctaaatcacgctcatctagaagttgtgccattcggtcagccctgatatacagaattcgattagcctattgattaagtagagtataatactataatagaatgttttctataattttactaccagccatcaatattcacaacatcaggattct

SEQ ID NO: 1978 - DNA, 771 bp, Zea mays
gcctcgatgtccttcaccacctcgcccatggccggccgcgccgccgccgactcgtccacacacagcatcgccagctgcacgaaccgcctgaacccggcggtgcgcgcgttgtcccggatcgccgggtccaggaggccccgcagcccgtagtggtcgcggtcgttggggtcgatggccagcttgacctcgcgcacgatgtacttgccgctctcgatcggctgccgcccgctcaccagctccagcatcaccaccccgaagctgtacacgtcgctcttctccgacagctgctgcgtcatgtagtactccgggtccaagtaaccctgcataaattcaccacatgcttagttaagtttatatttgatgataattttgattgttcaggttcctgctagtagtatggtgctgtgttttcgttgtgaactgtgatgactcaccagcgttcctttcacttgcgtggagacgtggcccttctgggtgtccgcgacgagcttggagaggccgaagtcggcgaccttggctttgaggtggtcgtcgaggaggatattggtggacttgacgtcccggtggatgataggcggatcggcgagctcgtgaaggtacgcaagtcccctcgctgacccgagcgcgatcctgagcctcttcttccagtccaggtacgttcctctcactgcatgggcggccgttcatgcatgcgtacacagattgttgagtgaacaactgatgctacgattacaactgaactgggagatggaaattctgtgaaatgttgtt

SEQ ID NO: 1979 - DNA, 791 bp, Zea mays
cttgcatgcctgcaggcagctgggattttgtgatgatcaggaacatatttccttcgaagacgcccaaaagtatgttcacctttttgatgcagcactttccagagagcatgttgctgccatggcagccttatttggctgggaattgcctggggaaggccgggcccaaaactgattggagggggtgtaggtcgtgtttcttttgtgtaccctgttataatgcagcctgtttttcttatctggaatgtaaggggcctgaatgacaggtctaggagagacattgttaagtccttggtccttagcatcaaaccagcggttgtctgtttgcaggaaactaagctaggctctatctcagcttttgacatcctgtctattcttggtgctgggtttagtgattttgtttactccccagcgcaaggaaccagaggtggtgttttggtggcttgtagagatggagtctattatgttattgagagtttggtgcatgatttcacagtttcagtcaagttgcaagaggaaggtggtgctcagtggtggttcactggtgtttatgggccacaccacgaccctctcaagctttcctttctccaggagcttagggaggtcagggagacatgcgttggcccttgggtaatagctggagattttaatcagatctacagctcagaagacaagaacaataccaatataaacagggcaatgctgggcagattcaggagacttatccatgacttggagctaaaagaaatcccgtggtaggcaagaaaatcacttggtcaaatgaaagaaatgtc

SEQ ID NO: 1980 - DNA, 783 bp, Zea mays
tcttgcatgcctgcaggacgaaccggaggtgccgcgggtctggctgccgttcgatgacgcgccaggcctggcaatggcccgggcgtttggggacttctgcctcaaggattatggtgtcatttcggttccagagttcttccactggtcgctcacagagaaggatcagtttgtcatccttgcatcagatggggtaattttctctaccaagtgctccactttattgttctctgttcatggatatttgcacttgcaaagatatgaagttgagggtatctcttcccccagcaaatcttgcccttatctttcatcataacatgattagttgcaatgtaatgtcaatctgcggcactttcgcagtcgtgatctaagtagccgcacatggtgggccttcagggtccaggatgtcccgtgtatttcatagaagctaaaagagaatccgtgatcatacctacaagtgatccagtgttttgacttcaaaatgttttagcttttaggggttggttgataaactgtcatcatggctggtgcaaggataataatttctggcataggtccctttcctgcctagtgcacagataatgattagccagcttaacacccttccctgttgcaccgtcaccacctgttgttatctgctgtccttcagctgttaaatctcctccatgctcaactcgagaggaccacttgagttagtgatttatgaattgtcatgagatcaggtgcaccttcctacttgaacaatttggagattaagccctgtggctagggactattcgttgcatt

SEQ ID NO: 1981 - DNA, 1071 bp, Zea mays
atttttcctgaattattgaccaactccaatatttatttataacagaccagggccgtagtgtacttggtctgttgctttcctttcaccatgataatcaccctccatgtcactgcaatgtggttcagaggccactgcgacacgtagatcatgagccggttcatccaacattttaattctcattctgacaacatgacctggaaagtctcggtctgctgtcatcatggggttagtcaggagtttgatcttgctgaaaagcttctcgtcctcaagctttatgttatcaacaatctccggcagcgtattgtagatcgccacttcttgaaggtgttccaagctattcaggttcttgaaggtcttcaagctgtcgcaatcatacatggctaggatggaaagcattggcatggcccctccacgtatctctacctcctgtaacatagacacgttcttgagcttcagccttgctaggcttgggaatccgtccaagaacagtttcatctcaccctcactgtacgaaacagctgacagctccatctcaacaaggcacggcagcgtaccaagcttgtgcacaaactgctgagacacctcagatccatgcaaatagagcatggtaaggtttggtaggacatagcggtcgtcgctcggtagatcattaatcccttgtaacttaccatgcaggatgagggtctggagccggcgcatgcttgagctggtgaacatgctggacgggagaaattcacctgacagattcaggtacaaaaggaattccattttcctcagggctgctgaaagcgcggcggtatgggctgctgaaatgtcagacagggacaaggatcggagataaatcatactgttcaaggggcagctcttttcatcccatggaccacaaggcaccacaccgttgagtgtcatcaaattattcaagggaactactgagcaatcgggcaaaatcattttctcggcgagcacatgccgtagtgccttcgatgtcccagaactcatcgacggctttcgcccccgtttgttttccttacattcaacgtctggagactgtcaagctggtagatggatgag

SEQ ID NO: 1982 - DNA, 846 bp, Zea mays
taccaatttcaacctcggaccccggggttcctttaaagtcaacctgcaggtacgaagataaatatgttataggctctagagaacgtgaatttgctatccttaaggacctaatcatcaacaaagagggagatatgtctcaccgggctgtcatctctatttttggggagcgtggcattggaaagactacacttgcaaaacaactgtacaatgacccagatatcataaaacactttgaggtccatgcatgggtatgtcttccaccacatgtcaggttcagggactatgttgagattatgcacatgcaggtcaacccacagattccaggagcttctgagaaaaatgataatacaacatttgcacttggtaacaaagaaaccactgatatggaattcaaccttcggcagaaccttgagaacaggaggtatctagttgttcttgatggtttagtcagcattagtgactggaactcattatttgctgtgctgccacataccaatgccaatggcagccggatcttacttaccacacatctcaatgtgaaggaaatcaatcacatcgacccacagatagctcctgtcaagcttccttatcttgacgaaaaacatggagaggagttattttgtcaaagagtttttgggacaatagaacctccacaaatttataggagcaagggttactataaaaaagttcacaatatatcaacaggtctacccctggcaattactgtgcttgcaggaatattacgatcaaagtttatccccatggagtgggatgtcatattcgaacaactcgagtccaatggcccagccaaaaccggttagaagcatatgggcctttggcttttgg

SEQ ID NO: 1983 - DNA, 771 bp, Zea mays
actatcctccctcctcatgagaccgatcataattgcaatcgtactttcgtggaaaataatcatatacggcttgaaggaggattatgtatgcaaggaaaataatcatatacggcttgaaaaataatcatttttttgcttttttgatatacagattttgctatatatttagatataacatatataccatgatatatatatatatatattatatatatcacaactaatataaaaaagttaaagcaacttataatttagaacgagaaggaagtagaaaaacatatatgttgcaactgaaggcttaaaatattatgtgatcgtcttctagtgctagatatctttagtgaattttattggtgtgataaagaattaatcacatgggaaattgacaacagaacgaatcaacttcattaaataggtggctgtgacatttagtccaatttagatttgtttcataatggcccatgtgtatattgatttgatattgtaggggatttggcaccaccttagctatcgaggacggattagaccaatatacaatgcttctaaagtccatactattatttctggattaatatttttacttgaatagtgtgtttcgctcaatgtgaataatgtattcaaatcgtttggactctaggcttagtaaatggtatcagagttgacctgcatagtcttggtcactattgggtcaagggtcgacatatggccacacgcgagccagaggtaacaatcctagtcatcatttacatttttgttggtgtggtgcaacac

SEQ ID NO: 1984 - DNA, 875 bp, Zea mays
ttggatggatgtggatgaaagctaaacacaattttctccattcaccccccttgagatctccgaaatagcgaaaccgagtcgctccgtcgaggcctttaaatgccggcacagatgttggccgaagcaggacgccacgaggcgaacaactaactgcttccttccccgccggccgccgccgcctacaactaacacttcacgtgcccccatccttttccgcctcaagtcaagtgttcacggtccatcctctcgagagtctaggcccttctcccgaagccgcagacgcagaaaacggctctacatatggaggcgaagaagaagccgtcggcccccgccgccgtcggagccgcgccgccgccgccgggtaacgggtacttcagcaccgtcttctccgcgccgactgcggtacgggccgtctcttcacgccatcgttctgatattttgctctcagattcctggggtcttagtaatttttttgcatgattagtgagctggtgcgatttgatgaaagagtccgttactatgttgcgatttgtggagggacttcaacggtttcccaatttaattctgatgaggggtgattttgataatagaggacctataggattatgcaaaatctatttggatatgacgttgacattttgactttgttttgcattcaagggaagcgcaagtgacgcaaagcatgcggacttgtacacgatgctgaacaagcagagctccagagggcagaatggcagaggtagttctgggtactcttgtcaatttgacgtttctcttcgatttaggtcgcgttcataagcacaacgatacttaaaacccttgtgtcaccatcttaacttagaattaatctggagcactgatttaactatggaagt

SEQ ID NO: 1985 - DNA, 736 bp, Zea mays
ctttagagttgacctgcagactctttggcaactgcttttatcaaaactacttcaggctgacctaccagttcatcattagtaagttcagcactgcacggctgcacatctaaaaccacaagaacacacttagcgaaaacaggaacacaaaagggcgcagcctacatccatgtctgtccaggtgtgatgatgcatctaaatactgcctccaccgaccggattacagctattactttcgatccatgcctaacggctcgcatcaacagttccaacactattatgacaaaccaagctcagctccacccctttttattcctgaaaaacaaaaggagaacaggatgtgaataaaatgatgtgaggccatggagaaagcattgcaagtaacagcagaaacaggggtagcgcaatagggtgtgaacaaaatgatgaggccactgagaaagcattgcaagtgacagggagtggcgggatgctaggattcaaggaagtgtaggctgtcatgataagctatgcaaaacatgatcaagtcctatgtgtcaccgttatccttaatgcctatgccttatatacctgctaccgtttttttctttaacaagtgacacttgccagcatcttaatcataaggtaacacttgcaagagattgtaatactactacttgccatgaaattgagatttagaacaactaatccaccaagatccgcagttcacttcaagttacacaaaaaaaaagtatgtgga

SEQ ID NO: 1986 - DNA, 775 bp, Zea mays
gctgtcaatgctgatgattttaccctgggagggcaacgaagcagttgcagctgctgcttctttggcagccagcgctttcctgttgacaatgccatagacctccgtcatgatagtctggaaggcttgctccacgtttatagcctccatagctgatgtctcgaggaagaacaacccctccttctcagccaacgctttgccttcatcctcagagatagctctcaggtggattaggtcagatttgttaccgaccatcatgatcacaatactggagtcagcatggtcgcggagttcacgaagccacctgtgaacattgtcgaagctctgcctctttgtgatgtcgtacacaagcagtgctcccacggctccacggtagtaagcacttgtaattgcacggtacctttcctgcccagctgtgtcccagatctgagcctttattgttttgccgtccatctgtgaaagaagataacgtaaactttagacgatgtacaagtaactggagcaataagccatgttcagtgctcacaaatgctcaggattttgcatgctcggtattaagatgagaaatttaggagaagtcatcggttataaatccacatcaacagtagctgtcctggctaaaatagaaactgttcagtactttacaggatggcaatgacagtgttatcgaaggaatcacattgtgaagaaacacgagagaggaaacgggccatccattaaactgctggaaaaatattacgacgacagtttggtctcacctaacactactgacagacag

SEQ ID NO: 1987 - DNA, 858 bp, Zea mays
acgcacgggctgagggtggtagccatgaagctcctccagaccctcaagattcggataaaaaaaattccaagcgaaatcactggggactaggacgactaggacctctcgcgcgcgcacacacacacgcaggcacgtggcgttgcagagaaggcgacacgcggcaccagctccggcgagggacgcgcccgcccgcccacccacggatcgcgtcggagccgtgacgaggccgccgttttccttgtcagcatcttctctgtgagaaggaagaacacgtagccggtgcaggggatcacgtcccagccagccaagccagtggcatgtgtgatgcatccggacgggagggcctcctcaatcctcatggaggcggcatgcgctcggtgcgcccccacccgtccgtcacaccaaccacgcgcgatcccgtcgccgcggcggcaccgccctggccccggccgttgcgcagccgcatcacgtgaccaatacagcaaaccggcgcttgccatccccccccctccccgacgccacgaacgcaacgcgcaggctcgcgtcgcgacaaagcaaagcgcggtcgcaatcagccctgtcgacaaaacgaaagttccaggcttcgaagaagaaataatatttgtttttgttttaaaaaaatatattgcacaaacaagtaaaccacactgtaaaaagcaaaaaaaaaaaaacagaggtcccgtgtccagacaggaccggccggtctttttggaattgacccaccacatgggaagggagtagtcccgtctcccgtgtgcagtctccactgcccaaaattcggaaattcctctggcagtcaaagtcaccttaccaacgggtaggggtgtacaacacaca

SEQ ID NO: 1988 - DNA, 820 bp, Zea mays
ttgcatgcctgcaggcttggcaccgtaaagaagaaaaaaaaaggagtttggtgaaatcactgccccaggaaaaccttccaggcgcaaaaatcctccatgttgaccgaccagccgtttatttgggcttattcaccactcgtggtcaagactcaataggaaggagggcatatgtgtcttcagaataattcctggaccaccggtagaccgataaaggccctgtactgaccgtgctctcaccatggtggtagctcatgagcaccaatctgtcatttgttctatcaactctgggcaatgattgattggttggttttacttccatgtgtcaagtaaaacccttggattctacgtggcattgaaggcgagagagctaataccagtctaccatcttccttggtcctcgtttcgcagatttttggccagccgctgtcgtcacgagcacgacggcgcctgtacttgcgacgacgatgacgacgacggatcagcgtccagtggacagagccgtcgcagcccttccgtcctcgaacccttatccagatatgcgcacgcggaggtgcgcagcgaagccgccggtcaattccagctgcttttcaccgatgctgccagccagcagcgtcggagcggggggagaggtaacggacggacggcacacagctcttgacctggaagctccccgccctcgtgttgatggtagcgcaatatctcatggtgagacgagatctggagcgtcgtttttatcccactgtgcgcggaaaaaggccttgcgcgtgcctggcgcgagctgattggctggtcccaggtaaaagttactgcaaatgggggg

SEQ ID NO: 1989 - DNA, 799 bp, Zea mays
accccggatccttatgagtcgacctgcagctcttgtctaacttcttcatagcatgcattgtgctccgctgacaactgcgtggccagaacctctctagttgccttaacaagccttccaagaactgcacgcgagtcgcccaggtttgcaacatagagagtcccagcacagattacaccaacaaggcaacaggagccaactgatgcaatctgaggcttgaaagaccattccttgatgactagagaaagaaagccctcctcagtttcttggaaagctttccggatcacgtctgctgacatggaattgtgctcagttgcaaaccctggaaaagaaagtatagttttaatacactgagtcactgacagattaagaaaactaagaataagtaatgtaaaaaaaacaaagagcaaagatgacttgagttcattcccatggaaggcaatgcatcggatatttgagaaatttgatgatgatggatgtaataggatagctatcttttgttggctaccccagctttggttctgtaaaacctttaattgctttcgataaaagcagagatctttaaaaaaagaattaagtaatgtaacacacaagacagtatcagaaccaagctacataattaaataaaattgtgtttcttttttctgggaaaaccttactacaattccaactgccatccaatatccgatcatcagatctgccaaaccaactatcatttgtattctgaaggcaataagtacaaatgcactttttgagatacggtcggcatcattatcatgctaaacaattatagaaaatgtga

SEQ ID NO: 1990 - DNA, 784 bp, Zea mays
tagccaatataatggatatgatgctacttgtggataggtacaaacaagttcaactgggatattttcagtagggggactggacctcaagaccttttgttgtccatcccaatatagttcagtttgtgcacatggatggagaacagcagggagaggagatcttttctgcacccaaatctgatccaaggttgtgttaaatgaattactctcaccactatccccaaaacagtccaacccctagatattttcagtggagaatgagacctttagaaccttagttgttcatcccatccctatttcctactttatccacaagtgcaaccacagggagagaagattcttcttcagcttcccaactcaaaccaacactgattacttgaaccatctgaatcagcactcactgaactttgcatacctctatgtttaacacctcacatctcacaacttcatatggtaacagactagccttccttaaccaaaattattctctaattatagctctatcactttggtgtagagactttggtccaaaacctcaccaagcaaactcaaaagagcttcagaatctagagagaaaaaaaacactgaaccatagttacaacaattaaatctggtctgcatggacatgtctgacagagatagtttggacactaattactcccaattttgtgcagcacctaacccatctctctttaataattttgttcatcttactacggtcttcaaatttactataggcactatagtctaaaactactcaaattggtcacaaaacacctccaaactg

SEQ ID NO: 1991 - DNA, 761 bp, Zea mays
atatttgtagttataatcatttatcagatgacatcattaatttaaaatggtcttagcaaaatttttcagcgctgaagttagccatgtttaacatcaatattggaaaagggccaccaaggcaccagtatatgatttccactagaatgagaagtattaacgccactcttggtagaaatgaattttcccaggatttccattagttcattaccatgactttttcctggatgccccccctctaaattcttgcaggaaatcttagtgccaaccaggaaggccttttggccatccaatattccaatttgacatagatgtctcatttttcattagcactgactactgattgacatagtaagtattatggcaattggagccattaggataaggaaataataagttagattgatttggttacttaggataagggaagagataaattagatcgattttggttagttaggataagggtcgcttgcttaggggtcaagtaagtctctctatataaggagaggagacctatcaatctagtcaggcaagaattaagaaggaaaacccatagttattaaggcgtcctcaaggcgacgcttaagcgtcgcctaggcggtaaagcgcttggccgagacaaggcgttcgcctcgccttaccccagcgcctaaggcgagcggaatgccagtgggagagagggctctgcccgttggcacccgcgttagggagggaaaggtggtcgtgagggggcgcctgagtgcccgcgcccgttgctggca

SEQ ID NO: 1992 - DNA, 780 bp, Zea mays
atttggaggagtgtgcattggcgcgctaactgtcctagctgatttcatgggcgcaattggctcaggaactggcattctgctcgctgtcactatcatataccagtactttgagacattcgagaaggaaagggcaaccgagcttggtttctttggtttctaatcttcgtcgctggggtaaaagactgaatcttcttgcaagtgacagtaaatgcttggccggctgtttatgtttgtaattggagagcttatagtcagtttaggttgcgggctaatttacactgggaaatttgtagcaggttctgcatgcgtttttggggccagtatgggcattaagttgtgctcaattatagccacggtcatcatctcttgggattttccgttctcatgtattgactatagaattttggatcaattttgccatcttgaactgaacacgtattcattactatccacgtgattggttgcccaaccaaatatgcgaggctccagacgcaccgcatgccattgaccaaacgaagcatgtgattgattggctggatggtagcagactaaaaaaagtgtgcaccgtagcctcgctgctctgctgcgttcccacgcgaggcgggcgttagatatccgggcaaccaattaaatggtatatgtaccaaagacatccttttgttccttgcaaacttaggtcccatttagtttaggatgactaaaatttagttacttttagtctttaaaaaaaacaaacgttgtgattaaaatgaagtgactaaactttagttctttaatcat

SEQ ID NO: 1993 - DNA, 748 bp, Zea mays
gtaatcaggttggagtagaaattgtcagctcagcaaacaaaattatgtcttaggaactgatgatagggtattagtgattatgagaagcaaaaactggaagagtgcataaccatcaatatcgtaccttaccacaaattgggcatgtatcacttctctccatccattcataaatacaaccaagatgaaaatggtgacagcacttggttattatttttggattgtctggcgtgtattctgcataaggaatttataataatgaatcagtgaagaagtgttaaggcaccaagataaaactgccatgtgttcatgcagatctatacggacacaaaccttccaggcaagtagggcagacatcctcatcttctgaagcgacaacagcatagctgctactataagcttttgcagacaaactcttagttgattcagaacgatggaccttatattcaccctcattttcagtgctgttgcgtttcttctgagcagctaaatgttcaataccagagctgctggcatttcgtctaagggccagtgactcttcttgtgcaagatttatggatttctcacgcctggagactaatccctctctttgaacacgggcatatctaggatcggtatcatatggaggtggtctagaaacaagattgagtgaattgtcatttatgttgacacttggattagtggatcccagtggagcaaccccttgagctgggttgtttggcctagactcaagcctctggaatgttgcagt

SEQ ID NO: 1994 - DNA, 740 bp, Zea mays
  unsure (1)..(740): unsure at all n locations
tttgcatgcctgcagcattcaatgcgaaaaaagatgggtggaaggtgagatattttggtatttgtttctatcagaaagtaacatattttatagagccaaacttcctttttgcggtatcttctgcttgggatcactctctcttatttgagatattactttgttgtagccttatactttttgtaatgtggcaatatttcaggacgtagaggcaacaatacattgtgcagaatggctttcaatggttggaggaactagcaccggtgaccaaagaattaggtaaacaatgagatgcttaccaagttttctagttaattatgtagtttctgcaccctgcgctttttctttaatcttctaggcatgtagtttttgtggtttatcggttatcatgtttttttttgttcccccaagagtgcacatgtatttttcccttagatcaaattcaagctgatagcttttttcttgattttcatattcctattctgttaagaagtatgtaatgacaataccaggttggtgatatcttgtgctattttgttctttttaaggcgtgaagaagcattaccaattttcaagaggagattactgggtagtctgcttaatttttctgcccaggagcttcaagttcaggtgttacttcttttgcgaatgttattcaatattcatacatgcaattgaaattntttatattttacatgtggtgcgccaccaaggaatttgtgttgtggtgttatattctgcta

SEQ ID NO: 1995 - DNA, 747 bp, Zea mays
agcagcaatcccttcagtttgctgtaaagacaaatagtaaaagaaatcattgatgtggtgaacagagaattattaatttcataattttaattaacttatgagacaccatttgttatgtcatagtactgaactgtgagacatcaagaaaagtgtaggtcactgcattaagagtatataacaaccatgatctctagtaatattgttgacgatggaaatgccacagcaatatattactgtaaaggcccatgtggaacatattacttgtgcctatatattctacctagccctaagggctaattgtactctttctaatccaaggttagtgacatggtaagcaggttagggttagagcctaatctttttttcagccgccatcgcggccaaccccctcaggccgccgtcgcggccttctcttcctcctcaggccactgtcccggccttcccggccaccccttccgccgtcgcggcccctccccacctcatctaccggcatgccgtgtccgcaaggcagcttcgtcaggcctcggcccaatgcgcgcacgtccgctcaccgtcggcctaatccgcgccgccggcacccgtccgcacaccgctggcgcttgatccgcgcccatccgccggcgcccgtatcaaatgcgcacaatcacacactgaaaagagttaccaaatgcagctgttactatgttcaatagggtgtccatgttaactgaaaaaattcaggctagtattatgatatcaatttagttt

SEQ ID NO: 1996 - DNA, 777 bp, Zea mays
aatttaattttatatcagtgtgttaattgaagaatggactttttagtttcaaaagttctattgagtgcactgttttcaagtcgtccaattaatcgcaatcagtcgtgattaatttcaagttggtttggaccaataacgattagtcctattgagtgcatgggtttgaggatatcttcaacttatcgcttgcaaattattgttactgtaacacgggtaatacttacactggttcacttctcatctattccttttgattatgaacaacacatctgatgctatattgcaatgctgcttatctgcaaactgatgttctaggttttcaattccagcgtaatatgtttgcatgtactatttgtttgctgatgcaaattttgtgcttcagttcgttttaatgtgattctttgtttgaatgaatggcagaatgggatccgtgggggtgtccctgatgactacgaatgtgaggtgattgaagacgacaccccaattcctaagcatgttcctcagcaccggcccgttgctcttcctgaggagttcttcaagacactagatgccgtcaaatcagatcccgcccttcaaggcgatgctcctcctcaagtgaaggcgtaaagatgagtcttcccggttatgtcttatgtcatttcacactttgctgcgctgggtagggactagtttcttgtgtcatttgccatttgccagcaatgtgcttgtttcgagcagaataaaattttgggcgagtaccatcgaagagtgactttgaacgaagtgattcgacacagt

SEQ ID NO: 1997 - DNA, 805 bp, Zea mays
agctcaagggcctgctcggcatctcccacttcacctcccacatgggattcctcgacgtcatgcgctccgtcgtcaaccgccacgacgaggtacgtgcgtgcccgtgctgctctgtgctctgtcgtcgcccgccggtgccggcaatgacagagcagcaatcctgtctgcgtctgcaatagaatttcccgtgacgctgacgccgacgatcgatgcatgcagtggaagtggcagacgatcgtcatgggctccgccttcctcgccatcctcctcctcacgcgccaaatcgtaagctcaacctcttcaccatgcaccggattccatttccatctgattattatcaccatccccatcaaagaacaaaggccatttttttataaaaaaaattctgttgagattaaacaactacgaattactattagtcgtatcataagcaggagagaagttaaataaagctgaagaaaaacaatggccgcacatacaaaatgtgacgcggaccgtttgtgaaaccggggagaatctcacctctgtcactttttctcgttctcccatcagaaaagaattgccaaagcgcagatgcagcttgacagacccggttactcactcactcaccagtcggcaaaattctttacgacttctctgaccacggttggttggctagcttagcttctaggaaagaaagatggggctgcaaaaccaaaaaaaaagtagaaggagatggcgattcaaaccctggggcgtgttcatcatggagggccccaaagtgtgcctgccactaacgaggaatttttgactccaccctctaaac

SEQ ID NO: 1998 - DNA, 806 bp, Zea mays
tacacctggtgctggtggccgcataattaataattatccataacaacataacataacatgattaggttcagattatatgtatgcatattctgtgcacggtaggtttagcacaggaacaacgcaaaagaggtaggtggttgcacttgcgtgctcaaacaaaagccttcccaacttccaccaactgcatgcgcagcttgttttcatcagtgaactgatgagtgagtgtgagtcggttggaattgtaaaatcgcgtgcaggctgctccagctccagcttccagaccagtggggggatggaattataaaatcgcttgcgcatcttggaagtaacctgtggtgcatgattgctccacttgttccggcccatgctgcgtggcgccagaactgattgggtttggggccttggggcccaaaaaaaaagatttttttttgtttggtttgaaacaaggctgtttacaatctgttctcatcagcgatgtcttgagacgctggactgacagcgccgcgaccgtcctgccgattctcgcggagctcctcaagaacgacctcagggtgtgggtgtacaggtacacgccagcacagcacagcacagtcgtctctattttcagctccactgatgaggcaaattgacaatgtggaagcatatgtcgctgtgatgttggcagtggagacaccgacgggagagtgccggtgactttcagcaggtactccgtcaaccagcttcagctccccgtggctgcaaaatggagggcatggttcagcagcacttaggtgctcaacaacactttttcttcctgctggggggcg

SEQ ID NO: 1999 - DNA, 772 bp, Zea mays
taaatggattcacatgtacgcacgactagttctgctggtacacagagaagcacacgaaatgcagtagcgattaacagtagaaatttaaagctttcctgggtcctggcaaccaaaacatctgtaaccgcgtgtgatcgtgcgttgggcactgacctgctgctgctggcttttccggcggcggcaacaggcttcgccggcgcgccctgcacggccccgggcgacggcggcccgcggctgggcctcggcgcggtcatgctcctggtgagaagccccggcacgtagaagttgagcagcacgccgtcgccgcctccgccgcagctgcccctgctgccgccgctccgccgcgccgccctctgcctcgccgccggctgcttggatgccgcagcgcccgcggcctcatgcgacgacggcagcgccacggccgcccaagggcgatccccgcacggcgccttggcggcgccgaggtccgcgtccgcgatcgcctgcctggcgccggcctcgacgaggtcggagaaggagagctcgcggtcggagccgccgccgccgccgccgtcttcgtcggggaagcccgcgaggaggcccagcagctcatcctcctccggcgcggacagacgacttgctccgcccacgagcgcgagtgccttccttcatggatcggggctccgctctatcttttctccgcctcgcgcggcgaccggcagggacagggagcgagcaacgcgtatggtgttcgtggccgcgcgtgcttgctcgtgaggttttgggagcggtg

SEQ ID NO: 2000 - DNA, 763 bp, Zea mays
agtagccaaaattaacacaattattcaaatgattgacgtccacagaaaattatctacaaggactggacaggtgtgagctagtaatggattgaatatttcgtttagtatacataatgttgtgggctaactttactgaatttacctctcttctcttttttctcaactattttaaactagattaaacagaattttacatgatttcatagatcattgtcccgactcccgagtcatagatatggtggtccgagatatagatccactggtagtgttgctggttgacgagtgtcagacaagaaggcaccttaatgacgtcgatagactaggctagctttcattcacaataaccaatctgatgggaaacacacgtccgcatatgcatcaatgcatggcacattatagggctaaaaaataagctttagactcacgagcctcgagcaaacctatttgttaagctcgttgaagcagcgagccaaactaaatccgctcgctatatcaaattaattaatttgcaaaataatagttattgaataattctatagataaacgacttgattttctaaattttttatgatgaatatatgacaattcacaacttagattactcatagtattgataaataattatatattttctatttatatattttaaatctgtcttataatctatactatacttaaagcaccagttttcaacggtcgtcatgcgtcattttttttacaaaataacccctcatatctatttcaaattaatccattgcacgtc

SEQ ID NO: 2001 - DNA, 767 bp, Zea mays
agttctacatcaggcggttggacgagcggccaattagctcggcgaccgagaggcggcgcgtgatccaatgcttggaagcggccatcgagaggcgcgcatccgaggtgcgtgatcgctgagtatctcccttcctttccctacatgccacgctacgccacgccaccgcagcaaaaacacacaacgccggatgctcgctccaccttcctccctccctcccagtcccagcccaggcgcaacgtctctttcacgccctgcccaactttccacttcaccgccatgtgttcggacgaaatcccagccgcaccaccacctctctatctaggagtattctctaacgccagagcgatcctctgtggctgtgcgcagggagtgaggctggagctgcgcatcaccgaccgccgcgggctgctcgcctacgtcacgcgtgtgttcagggagaacagcctctcggtcacgcacgccgagatcaccaccaggggcgacatggccatgaacgtgttccacgtcaccgacgtggccggccgacccgcggaccccaagaccatcgacgaggtgatccagaggatcggcacggagagcctccgggtggacgaggagcggtggccgcgcctgtgctcgacggagggcgacgctggccgcggcggcggcggtgcggggatcttctcgctcgggagccttgtcaagaagaacctggtcagtcttggcctcataagatcctgctcgtgaggacgcgatcaatggggggcatgtgctccatgggatccttg

SEQ ID NO: 2002 - DNA, 867 bp, Zea mays
accccccgaaagcaatggcgatccgcggccacgtgtccggcgtcccttaccagggttggtccgattcgcggcagttgggcggtaggtcagaggtggttggcagacgggatcttctcgtttcttggttcttgccgccacggcttggatcagttctcgttccgcatgcatgacctgaaaagcgcatgtttggttgattagtggctttctcaagaaaaataaaaaaaagtgtatttggttgaaccgtaataacttcttaacagacgaaaacgattgtaaactataggatacaattaaacaatagattcagtagttttaaattagataaattaaattgcctgcaaatacttcaaaccactgcaacatgatactatatacaacatgtaattaacaacatatagttgatcatatatacaaatgagataataaagaaacacattatataatcttcttccatctaatctagctaaagaaccataattggtactccaaagctaacatgtgcctattagcaatccttaagttaaataatttgaccactggaagagaataaagcgagaatatttataatgcagcataccaagtttgacggattccacaagttttagcgcttaaaattgttttgcactagaaaaaaatatattatatccaacacttatgaattggtgcaaaaatattgaaatatgcaattcaaatatctgccattgcaaaaaaatttttttgtaaatgccccatcaaataaaaattgtctatatagtttaagtagatatattatttaactaattttaaaaatcgtatgaaaaaatcatgtaaaaatttaaaaatttcaaaagcaaccgcaccaaaaagacaacccaagtagcctggcca

SEQ ID NO: 2003 - DNA, 795 bp, Zea mays
aaggataatttttttctttcgagcatagtattttgatgaattttggcacgaaggataaattttttaccatcagaaaagttgcatactgttgcaccttcatttttcttttgaaggatatattttgatgaattttggcagaaggtgttgataagaaatcaatttgaagtttaattagcttcatgttttgcagggaacaagcggtatttagttgggttttggaaggaattttcgcattgaatttagcttattagtttgttttcttcagcttggcatcaactttaaacatctctgtggtagtgtggagtcttttatagtgccatctatttctggtctcatatataaccaaccatcccagttaaccctaagctactagtttaatcacttcactgtacaagtaaactacgccacaataaaaaatgttttttttcatgattcatttttttttgaaaagaaaagctgaggaaaacccccgcagcaaaaaaatattaaataaaaagatgcaagccagaaaacaaggttactggacgaaccagagaggcaaacgggagagagagagtgggagagaagggagaggaagaggagaatcagctatctagagtttagccatgatagaatctagatttctttgttgatctcttcagatgtacagtttttatcttttatatgcatactttattgttatcatctaaggaatgtcgtgtctcttttcttttgaggggattgctattctgatgctgctcatttgttgacagatttgctaaaagtaagagacagtacatagaagcacaagttgaa

SEQ ID NO: 2004 - DNA, 746 bp, Zea mays
cgacctgcagctccgacgtgcgccttaagttctagaacaaggcgagtagcacgcctttacctccccggctcgccttactacctaagcgtctcctaggcgacgcttgaatactatgtatatactttgtttcaatagttaacctggtagtttggatttttttttaaattctagctaacaatttgtttaatacatatgctgaactcttgttaaggtgcctttaaactggaaggattagagacggcaaaagctagtggtgcatgccagcttgttgtgaaggatctgaaagaataatttgttggtgaatatacatacccctgcttgagtgctggtgcaatttatgaaagaaagtatttgctggggaataaaatggctaggcctgttattgctaaggtaaagttgctctggtaattacatttttttacatataatcaccaaaaatgcatcctattttcttaaaagtagatactacttattttcttgagatctaatagacattatggcttacagtattgtttagtagtgtgcacatgcgcatgttggaacacattattagtattataattacaacatcatcaaaatcactgatgttactgatgtgacttttggaagccattcagctcttctgtataatttaatggctgtttcaagtagaacatgaattgctttcctgatatgccatagactaaacaatttttattacctctttatttcctaaataatggctccacaaaaaaatttcagcttcc

SEQ ID NO: 2005 - DNA, 795 bp, Zea mays
acacagctaaggatctagatggtccttagcatgcaactagtattgatgggatgaagatgcaacagtgttaatgagaatatcgggtggcactcacaatgttacagctgtaaaagagtacaaaatcacttggttgtgaaaaggaaacatgtacatgtgaaagaatgataccatcaagaagcagcctcaggaggggttgcaatcgtccattttcagccatctgtctaacatttttttcacagctctctaaattttccaatgtcttctcagctctgtcaacaatgagcaagttttctactttactgcttgacaaaccaacaagtataagaatagctccagaaacactgccaattctttctgaaagagccttattttctgaaagttcaaacaacagtgacaccgcttgctccttttcctgagtctgcccatgatttaagaactttacaattgtgcgaatattgtctccagcggcaatctcaaccttcaggtaatgtttcaagataacataaagtcaagatctgaagcatcaaaagatattacaaagttaaaatctgctaacaaatcaagcagcaaaagaaaagaaccttattttcattgtcatcttttgcaatggagcaaagagtccctagtgccgcttggcgtactttcgtactgctattcttcaacaagtcagcaatcatgattatcaacccatctcttctcacaacctgcctgttagatcgacttctctgacatatctcatcaacatactggagtgcttgtaggatatcactttctgtgctgtcagaagtcaatgac

SEQ ID NO: 2006 - DNA, 743 bp, Zea mays
aagaacaccatagaaaacctgccaaaggatctgaatattagagaacaagtcgtgaaaaggatacgtttgtcagaagtaaatgtgatatcataaagagttcaactattacttacttgcattttccttcggttttcagctgcaagccttattgaattgcaagcacgtattcgactaataatctcaattatttcggcttctgaacgaccatctaacaaagaagatagatctttcaggtcatttggtgcatcaataacaaaaggaatactgccatcctttacttgaggtttcacattagattctcctttcaaattgtgtgcatctttattcaccactttgtcattgatctcttgccccttctctttgaaatcctccatttcatcgtctcctacatcaacttcatcatcatcactttgctcccaatctctagcagacatattaccaaagttattgtcactggagtcctcttcagaatcttcatcatcagccccatcatcaccagcattttcatcatcgctttctccatcatcggatgctgctgcatcatcaccaatctttctaccttccctttcgtaaatttcatcaacccagccctttttctttactgttgactcatccaaagagaaggaatcaccaagatcatcaccagatataggttttgagtttcctagcttcatgtgggtatcattttcgttgtcatcgtcctcatcagacgtatcagcagttccaagcattcttttttggcg

SEQ ID NO: 2007 - DNA, 730 bp, Zea mays
ctgcatccctgcagcccgttgatgctcagcactacctgatttttcacctataatacttgttctgtcttcaatcttttagattacatatttcttggaatttggaaattcttagtgctgtcatataacttcaacacaatttgctctattgatgcaggcccaaagagccaaggagagggaagaggatgaacatcttgtcgacaagttagacagtgattttgcatcattggcccagacacgggcgttattgtccttaactgagtcagctaaggtcaaggtgaacaaaactgattcaagcactggcttgactgggaaggagttttctaacaaggtgagcctgtttttggtcatcagttaccaaaatactgtccatttctttttagagctttctatcaaaacattctgatagcatctgaagctgtcttctgtatattagcggtgggttgtgggatgtgacttcgtcactattacacgtgaggaaggagttgttagtctggaaaggtcaagtagtgaccaggaaggataccttttggtatttaggattaggatattgatgaagatgttagccatagaatcaaagcagggtggatgaagtagcgacaagcatctggcattctatgtgcctggagggtaccacagaagctaaaacgtaaggtttataggacgacaattggacctcatatgttgtatggtgtatattattgtcctacaaaaagatgacatattcaataga

SEQ ID NO: 2008 - DNA, 818 bp, Zea mays
tctgttatctgcccgatcaaaccatatgatgacacatattctggtgacgttgcttgggaacctacaaaaaatttttttgaaaagctgaatggattactccagcttgatagtcaaaagaacatcccaagtacatgtggatataggaattgtaggtggagccagcttactcgagtgactgctaaggatatccctcacagcatgaagataagaatcgctgtcgtcaactgatccctcttcaaacatttcagatgctgcttgatcaattaaattgtaccggccctatatatccatgtagtagacactctattttgtaagaacacaagtggaaatgataagaggctaaataatatgctgtcttaacggatgaactcagcaacaataccaggcggccatcaaaagctgagaagtagccctgcaattccaattctacagctttcagaaatgagtaggcactcgatatttttatctgttcttcgagctggcaggctatctttagaaataggtgagcagcaagttgattgacaagatggttgatgaactgcaagatataaagtgtgtctacgtgagaccacttatcaggtaaaaagatgggttgctacaagcaattgtcaaactcataaggcaccttcttctgatgacttatgtagcagtcctggcgcagaagctttaaattgtgatctcctagaaggtcatgaatccatagtcaaaaacatgccatactattcactcgggaatgcaaaaagaaaagatttatatatttataatgtcatgaagatcacacctttcaaaaaatttgcacctgaaagctgagcaagtct

SEQ ID NO: 2009 - DNA, 763 bp, Zea mays
cgtcgtctccctggtattcctgcaagcaacaaggtcagtatacatacatgaaaaacctgaagccaattccatacaaagcgaggtcaatttctctaactccaatgttacaccggacgaatactcaacaagcaaaccaaaaaaaatgtcagaaaacgtaatgcaaaaccattagtaagtatgcacatcatcatcgtttgtggtcctacgaatctaccattcctctcgatgtctagcttcaggtgccataaaaaggctagcggacaaccaagcatccagccagaggaaacaacaaaatggttaggactatagaactccaactcgcagtcccatgaccatgagtaggtaaggctcactcgccaagccttcactctcgcctgagacgacaccaaaggcaggcgaatccccagaaccgaaccgaaactgcatgaggcaggccgggcaccaaacagtggccctagcaaaacatgcacctggcttcgctatgctcgtaggtggccactgatgcagcatgatttacacaaacacacacactgttcagatcatagcagtgcacgcttccaccctccagttactgtttaggctgccatacatgaagggcccaaagggattagagactcagctttacaactgttccgtattatggtccctcctttaggcggtgctagcatcaaggccatggctagagccgcaaacagcacgccacggcttggccccgatggtgaaccaaaaacgacaaaagaaatggcacagcaaccgctttcgt

SEQ ID NO: 2010 - DNA, 821 bp, Zea mays
atgtgtggtttaaatgttaaccacatgtcttatgatcgtttacgcagttgttatgactaagtaaaatttaaatacgcacagcaccagtggtctagtggtagaatagtaccctgccacggtacagacccgggttcgattcccggctggtgcattactttttttattctttctttttaggaagaatgcttcatgaggaatgtcaacttgttattccgggtaaaatcaccagcatagcacttggccagaacatttcttcctcaatgctgacaggctgaaaatgatggaagaaaactatgcgacacatgcagtcaggtaacctgataatgaacaatgtattttagttatttatactgtgcggaagaacaatgctgctcacactagaacacagcttcgtgcaggttgaaacctaaactaaacagacaaaatctgacacctgtgttagcttgatataattatagaaggtcatccttggttggtgtggttggcttatttgtaaccccctgtgcatgtttgattatttgtacgcaggttcatatggaatacaaacatcgtcaatctccaatcaagctaatatggtatcaatcacagttacgatcccctactctttcgcaaccaccaccagctgccgattcgatcgttgcctccgtcgctgacgccgtcgtcaggtgcatcacggatcccatcgcctgtgcctccatctactactgatccgatcatgggtgcaacacatgtagtctgaacaccacctgttcctcttcaatttgggctcattgtagcggggttatgtagctcttaccatatagtgcttggaaagtgacatt

SEQ ID NO: 2011 - DNA, 774 bp, Zea mays
aaaattttcagtatgaagaagtctgcatcgatgcctgttgatcgggatgatgaagacacagggactgcattcaagcactgcgctagcttgccgctagtccggtcctcgcctcagcttgatagggacaaggtcaacaagcccaggagggcgggcctggaggttcctgcaagccccccgatgaactcagagagttgcaagacaccaaaggcaaggagcctggtcaagagcccaagttcgatgatgctcctgagctacttgaacaaggcaccatcaaaccaaggctacagtccgcaaaagggttatggatctcggcccagaccaagatcaaagtccccccttcctagtattgcgccttccgaagtgttcagggaagcgaagtctaccagcaagaggtttgcaagccctcctccacagcgaagaggatctgaaaagagtatctatggcaaatcgtttgctagacaggtgtcggatattggtcagagtccggattggtgttcaactccagtggtatccggtaagcacaagtctctaaagaacagtgcttggtcaaggaaatccagcggtggaaggaggattagcgcagtaaaccctgcggatgatcgtagggcgcagatggttagaatgaatcaggcggtgcagacgacggtcgattggacgctcgatccatccaagctgcttgttgggcacaggtttgctagtggagcgtgtaaccggctgtacaaggggttctatgatgagaagccagttgcaattaaatttattcgccaacctggt

SEQ ID NO: 2012 - DNA, 697 bp, Zea mays
gccttgagaagcagcaggtgcagcgggaggagggctgcggcggcgagtacctggagctaaggagccggaggctcgagaagttgccgccgcaggtggcgtccgtgaggaggtgcggcgggaggaaggtggcggccgcggcccccgccgctatggaggaggcggaggcgtcgtacggggagaacatgctcgagtcggaggccatggggaggtgagttcttggattgaaatttctgttgcgttcttgggttgcttgcacgggttttgggtttagtggattccgattgtgtggtaccaagattttttttttgggacagaaagttggaattttagcgctatgcgtttctatttgaatgctttcgttttttcctttttcgcgcagtgtgttcgacttcaaattgggagtcatgcgaatccccccagcacgcttgtacagctcctatgctttcttgcggatttttctacgccaggaacccctttgctaattcttgccgtgctctccttccgcttaattttttcggcggtgtatcttccattctcttttgaaatcaaaagtcaccccatattttaatgccaaaaccattgtcgctgccttgtgtccgagaaattagtctctaattcttgcaataatcggttgacgccgtccaaactccaatatcaccccataaaagccccaatcccacctctggcttggctttga

SEQ ID NO: 2013 - DNA, 889 bp, Zea mays
acggcgcgaccaacacgacggcggcgggagagatggagtacgtgaggctcgaatccgacggccacctgaagctgtaccggtacacaggaacggaagggtgggctatggcgcaggaccttctgcagctccacagaattgatggtgacagggaatatgcagagttcatgcatcttccgagaaaaagatttacagattttggtaattcatctgctcctttctacttttggagctgcatgattcatgactgatgagatagtattatataaaactatattgtcacttatggttgaggactgttctatagttgaatttcgtgttgctaatggaaacatcctttctatattattattttaattatgctatcatactagcttctggtttgctgttttttccttaaacatgaactaacacacacacacacttgctttatgggaaatggtcttcaatgctaaaccagaattgtctgaattttaaattgtataaactcagtttatcaaatgatacttggtacataatgatagttgtattcttgcagctgctgtgagaaaggagatagctgatgaaactgaccgagaaacaggccgttcaaagcaaatatcaactgtccctatccatttaagcatattttctccccatggtaagatgcaaactcttgaagggtacattgttaccgtcgcattatcacatctcaactgtcctcttcctagagagtgttgtttgttgcaaaggatttaagggtccctttagcttgtcgactctgctgtaggttgggcagccgtaacgcatttgaaccgtgttgtgtgggttatctgatatagttccgtgtcccttttttttgtgtgggtttgacaattttacattctcgcagttgtgaatcttactcttaatg

SEQ ID NO: 2014 - DNA, 1016 bp, Zea mays
tgcatgcctgcagaagatatcgatcgtgacgcattccaggtgagactagctggtaataaaggctagtaagtagagaaatatcgatttgattacctccaaggagccatcttccttgtacggtgacaaatccacaagcatatctgactcgtccttgttttctttttcctcggtggtgattggatactcttgaacgggtacgagaatgatacgcaatgatacgggatcatataccagaacttttcccacctggaaatagcagggtgagacaacttagttttgccaaaattcaaccctgcgtcccatgcttttctattacaagttttcccaagccccaagcatgcaaaagttgctcagtctgtttgcattaatatcacttccgtttcaaacaaccctgagaaaaaaaaaaggtacttagacaatgcaaatgaaattatgtcatacacggtacgaagagagctccggacacaacatggaagacagctcaaccaatcggtaggcaatcagatctccctcctgcaaggtccaaaagacaggtaaatgcttgaatgaggggggaaaaaagggaactgtgatggtgccccattattcagtttcttaaggatataacctgtcccaaaaaatgtcaaaaaaaaacaacggatagcctcgtgctttaatctagattctaccgacacttctttgaatgcaaacatgagaacagatagccatcttggagcctctatattgaatggtgtagaaaaacttaacccttgagtgggctcagcaatacatatatatcagattatgctcccaggcccattacatctagacaggaaagatatagtaacactcccacaggcgaaactttaaccacgacaaacatgagactggaccgaaactctgagaacgagggaaacccttaggcttgtcagttatttttaatcatatggattggagaagttttgactactaaagattgaaaccccttaatcatacggagtggatagaaccgaacatgcctaagagagattataact

SEQ ID NO: 2015 - DNA, 882 bp, Zea mays
gcggcttgccgtctttaggccgcggcacgtgacttcctggcgcggcgtcaagcgcggcaagcggcggtgcggctgcggtctgccattccctggcacaacgacttgaattgatatagcacattgaacaacacgcggcacatggggaggcaaggccttcagcagggttggtcaatcctccactccagtttaccgtcctaatccatagccatgtggacagcaagaacgcgtctggttgggtgacactgtctccactagaactcgtggcagctcaggttgtaggactggtgagctgccacgtcttggcctttgcagtctggacaaggttgttcccataggatccagggggacaaaccttagcatatattaggttctttattttatttgcaaataaattaaagccaagatgtaaaaggcttctagttagggttgcactttcacgtgctgatcaagttagacagcaaggttgttgccatgcaccacattacagctcgaggatgagttgtcttagaagggtgggggaatgtcatagggcggcagcccagagcatatggaagcccatagggatgggctcagggttaggattagtgaataaaggttagattagataagattgagttagttacttaggattagattagataagattgagttagttacttgggattatataagataagatttagttacttggattagactagataagattgagttagttactttggggccaagtcttcctatctatataaggatgggttgtacctccttaaggagaaatgaatcaatgaaggaagaagaattagtcccatatctttccaatagtctagtccccccccaagccgacttccgcccggttattttttcgggggcttgttattcccc

SEQ ID NO: 2016 - DNA, 1104 bp, Zea mays
aagtaaaaggatctgtcaaagtcttgcaggccacaaaacaaaaccaagtaccctcctttaattaacacggtctcaggtatcctccgaactgcgcattgcatcttcatctcagcattgcctaggtcatcagcttcagttccttaaaaaaacagtgagcaggaaaaaatgttagtcagtctgcataaatgattatggaagaagctaaaataaagtacaatttttaggtttcacatgaaagtaaaggagaaagaaatttgataaaaaaaactggctcctttttaatttttagacttgtccacgattgttatggatccaagtttataagaggataaacagtcggctggggaaactagagtattagagaggtccatgactaattcttcttcgttgattgcttccccctcaaggaagtacaacccatcattatatagataggaagacttagcctctaaataattaacttaatcttatctaatctaatcctaggtaactatcttatttaatctaatctttatctactaatcttaatgctgagcctatccctatggacctccatgctctgggctgccgccccatgacattcccccatccttcgaagacatctcatcctcgagttgtaatggggtgcatggcaacacccttgctgtctaagttgatctgcacgtgaaagtgcaaccctaattagaagccttttacatctcggctttaatgtatttgcaaataaaataaataacctaacatatgccaaggttagtcctcctagatcccatgggaacaaccccgtccaggttgcaaaggccaagacgtggcagctcgccagtcctacggcctgagctgccacgagttccagtggagacagcaccacccaaccagatgtgttcttgctgtccacatcatggttattaaaatgtcgcttaaacgtcgttttagtgtcgtttaaacgctaaaacgtaaactatggatcaggacggtgaactagagtgaaggatcgtccaaccctaccaaaggtattgtcgccccatgtgacgcgtgttgctcaacacgcgatatcgatgcaagtcgttgtgccatggaacgacggaccgtagcctgcaggcatgcaaa

SEQ ID NO: 2017 - DNA, 775 bp, Zea mays
cccgcgtcgctgccgcaacttgccgcactggacccccgcaccaggaagccacgtgcagtcgtgttgtcgccgctgatcggcggtcagactccacctttgccgcaagtagatcacggaactggaggatagcagatcgggcctgctccagatttgccctggcacgagcgagctcctcacgccaagtacgtacatcgtccgcagcagaagtcacaggaaaggatccttgactcatgatacaagatgttatgaatcctagttcataacgggataaacagcgccaggaagatagccggacggagttggcttgggggtgggtgggactagagtattagagagatctgggactaattcttcattgattgatcccccttgaggaggtacaacccatccttacatagataggaagacttggcccccaagtaactaactcaatcttatataatctaatcccaagtaactaactcaatcttatctaatctaatctttatcaactaatcctaaccctgagtctatccctatgggtctccatgccctgggctgccgccccatgacaataaggatgttgtatggatggattaacccctataagccacttggtgatttgagatggtctaaatccataggaaacaagttatttttcttgtattttccttcttcctgttcttgctttttatctgtttcatctgttactgatcttgtattatggtttggcaacaagttgtttgcatgtagctccaaatttgttagatttgcttttgagtttgcaagcattaaa

SEQ ID NO: 2018 - DNA, 1295 bp, Zea mays
gccacagccgcaacctgctgcactggacgctgcgccaggaagccacgtgcagccgcttacagtcatgttgccgccgctgatcggcagtcagactccacctttgccgcgagtagatcacggagctagaggatagcagatcgggcctgctccaaatatacacgtggtaggcgggcttgaaagcggtcctggtagtcgaccaccgagcccgttcggcggcatgcagcaagctcgtcgagcgggtttgaacgcacgggggtccgaagcgcaggttcaggagttcggagaagcggcgccatgatggagtgccctcatcttgctgtatttggatgaaccacagctaggcgacatcgtcgaggttgtaggaggccattcacacgcgttcctcgtcgatgatgcgttgttgatggaagtaggactcacatcgattaaggaacaccaatgaatcagttttgccatcatactttgggaagtccaacttctggaaccgtgggggtcaatcctggtgatgatcgccagacgccggtgtgttgtcccttcccggcttcccgcccagggcagaggactcgattcgatggtcctactggagttcggtgaccgacaacttgagggattctacagttgctacaagggattgcatgatggtgactaggtcggatgtgttgggttccgccatagcagccatagcagaggttgatgaggttgcgtcgaatggtggtgaagagatggatttaggtgacagaagtggtggagaggatgacctggaatctgataccagatgttatggatcctagttcataaggggataaacagcgccaagaagatagatgggtggagtcagcttgggagagactagagtattagagaggtctggaactaattcttctttattgattgattcccccttaggagatacaactcacctttatatagatagaaagacttggcccccaagtaactaactcaattttatctaatctaattccaagtaactaactcaatcttatctaatctaataccatataactaacttaattttatctaatctaatctttatccactaatcctaatcatgagcctatccctacaggcctccatgctcagggctgccgccccatggcaaacgatttacaggattttggttaatggccaaatctcggcatcagtatttgcatagcgctgaaccaggatcctgaaacccaatatcaggcttgaagggtgtgaaactgtgtatggtgtggtttttagtaacctgaccaatctttgtgacagcataaagcagatacaaagtgatgcag

SEQ ID NO: 2019 - DNA, 804 bp, Zea mays
gcttgcatgcctgcagttctaaggtattgtatatttgttgtagagatcctggacttctgtgattttatctcaccttctactgaagagcaatcttcacgagcagctgctgtgcaagatgtctctgatgttgtcaaacatatatggccacagtgcaaggcatcacactctttccccctctagtttgtgtcaaatagctgtgaacttttttggtgattcccactcttgtgttgtgtggcaggtggaagtttttggatctttcaggacaggtctctatctaccaacaagtgatatagatgtaagcattcttgtttcctctttctatttttctagcttggtgcttcattttatctgttccattgtgttgtattaattgctggatcatagtgtttactttgttagacagtattagtttctatcatactatgagggagaaggaagagctgagatttatttcgtgtcttctaattttgtttaacggcacattagttgatgtccttatagcggtaactattcactcagatttaaaacaatataaagtgcttttagtataagtaacaatataattgagataatggaataaatagtaggggagtatatagtaacagaaaagggtaaaggtggactaccaccctatgtttctgctattacaattgcataaagaacagcaaaactgccatatagggaggctgaaaagtggtatatgtttcagttcacgcgagcagtattgtcatgcgaagtcagaaggcatgctatttttggatggacctatcttgaccttgtacttttttcttcaaccaaactgga

SEQ ID NO: 2020 - DNA, 799 bp, Zea mays
cttgcatgcctgcaggtattcttggttggggtccagttgaaattagacggtatggtaatgagaggccaaaacgtgctgttcatcctagtcatttccctactgggcatggacctttgctgtagctgaaggaagtagatgatgcgaacaaccttgtccattttggcataaccgttcccagtgaatttcagcttccatatagttataaatggtggatctccgtaggaattgaaattctttttccaaaacaaaaaggaataaagagcaacctcacctggatcacagttttgaattatatgccttaaaaggtaatgccaggactctagaggcgacttatggaattgttaacagctacactgaatatccttctgacaccatcacagcaacacaaatacatggtggcttgtgaactgccaagaggatcaatcgaggaagttttgcctgttcagttttgtgatctctcaacaatgatctatagttaaatctcaatacataaattatgctttacattgtaatatattgaaatatggttccgttatgctccctccctctcgatgtgttttgtgccgtttttctaccgtgttgatgtaaaagatgaaagaaatgcatgttctcattttgaggcaacaaaaagttgcagccgggagcataatagtgaaatgcgatggaattatcggatacttatcgattccatagtgttttccctgagacaatgtactgaatgaggtacggttataaaaaaatggtgataattaggtggggtggttatatacattcacaaacaataggttgacaccccggt

SEQ ID NO: 2021 - DNA, 709 bp, Zea mays
ttgcatgcctgcagctgaaactgaaaatattatatccctaccttatcagattcaaaaaagttatctagattcagccccttgttcattgaaatcaattcaaatgcattcatcgatgcgggctgcccttccgtttcctctaccacatgatgttcctgaaagaaaaaagaatgtacaacaccatcaacttaatggtcttattttaaccacagaggccttatacttttaagtgacataagctggtttgatcagttaattcacctcttcgtctccaaaggcggcgtcgacatcatctagactagcttggcatttttcatcaaaaacaggcggcttgtagccttttcgaaaccatggatcttttagtacttgaggaatcgtaatccgctgttaaagtaacagtagaaaaccaagtaagacggaattccacaagcaacatacgcactgacaagcagtggcggtttgagagtggaaatggtcatcttaaaaatcttccagtactgactccaagctatcacttaagttgtgtgcttgcatttaagtagtgacttacagtggaaggattaggatccagaattctgttgatcagcctctttgctccagcagaaaaccaagatggacaagtgaactgagctcctgagatctgcatcagagataaaggaaaatgtatcctaaattgttagttttttttttttttttgggggggggggggggg

SEQ ID NO: 2022 - DNA, 749 bp, Zea mays
atgtacagggctaagagagctgcttcgctcagagcgaagcgccggcgccttggcaagtacgagctcggacgcaccatcggggaagggacatttgccaaggtccggatcgccaagaacatggacactggggatcatgtcgccatcaagatcctcgacaaggccaaggttcacaagaacaaactagctgagcaggtagactgtcaacactcacgatcgaccttatttacaccagcacactgcttccgtagatctcactgtttgccatgtatccgaactgcatggcagattaggagggaaatctgtacgatgaagctaatacagcatcccaatgttgttcgcctgtacgaggtaaaagcttcaactttccctcctaattaaatcaaacaatctaatgttccacgataccgaattctgaaaatacaatctgatggttttttcccccaaataaacttcacaattcagtttcctgcgtcggaatgcaagttcaggtcaaccattttatttggattgtttttttatattccttttcttttcttataacaggtgatgggaagtaaagcaaggatttacattgtgctggaattcgttatgggtggagagctccacgatatcattgtaagccattgcttctttaatttctctgtcattttttatctgattctggttttctagcctaaactttgcatgtacaaacatgaaaaaaagagagctttgtaatgcacaaccaggccacaagtgggagactgaag

SEQ ID NO: 2023 - DNA, 777 bp, Zea mays
ttgcatgcctgcagttttattggcaacaacactgacagtttcattcaccttctggtcatagcccccatccctcatctgtattccagagaagcaccatcatcagacagaaaaaaacagtgatgtaaaacacgtgggttacaaaaaagttcaacataaatatgctatgatgtagtctaataccaactatgattattgatcaaggagcaatgacatgtgataaagttagttcaatgaagttcatgttacaaaactaagaatggatattttgtgttgatagaagaatattgcatacagataaaatgcagcattcctaaaatgtaatataaaagcattcctgagcatggccttgtctcaaagtgcagtgttgttgcaataagattcaaacaagaagtgtttgagaagaaaagataaaaaaaagttatatgagctcggtgaaccccaaagaggggttcaaactccatagccaacacactagacccaggaatcaattgttgtgcaggagaataggtaagcatcagtcacctttgattggatttcttttgtgccaacttggacagcactggcagcagactgggcagcagatgctgcaactaatgaaaggcgtccaaatccctgaaaagggtgttatggtaagcaactatatcaaaccaatatacaattgcaaaacaaggtataatgctggagtcaccacacctaactaaatattcacatgaccaaagtaagctgaaggcaataatgcatcaattgctattaaactacaacgtactgggctactgg

SEQ ID NO: 2024 - DNA, 763 bp, Zea mays
attttgcaatgcttgtcctgttttctttgcctcagtaagttgtatctttgtatattttgctttgccagatacaggctgtaaaatgtaggcatgctttttcgaagcagatctggaaccatcctgctcctgaaactcaaaaacctgaaaatgtagtttacaaaccaataaatatttgttaggttgctggatgcaagcaacagaagaataaaagatcccaacaaaacctcattacagcactgcgtctattcacactctaccacatgttttttcaaacagaaattgacaaaggtaattgtctccatgccaatttattctctcaaacccagggtatttatttgcgcacaaacaaaattgggaggcacctgactccactctgatggaagtaaatcctcccagggtttatccacaatccaaggactgctatcagagtcaaaatacaccgccagactctcaagttcaacagactgcaaaatgccaagttaaagaagtcacgcaaattgatcaaaagtaaaaaaggtcaaactaaaacaaataagcacaccaaatgtgaaaaatgcttgatgtgtgaagcgaaaagaattcattactaggtcctgaaaactttaaatcaaattaattgatcgccaaaattagaaaataaaaaatgagctattgttattttttactttcaaatctaatattcgactaagtagacaatgagcaatcaccatttcttggagatggaagatagatttatcaaggaaatgccagaagaataggcatt

SEQ ID NO: 2025 - DNA, 799 bp, Zea mays
aataagtttttggagtacctccttttcagtttgaaatcctaaaaaactctagagctgcttcatcttggagttttagagcagagttgctttggggtagagcggagccatgccaagcaccccttaaaaggcaacttttgtaggacgacgattagatctgcttatgttctatggtgcagaattttgacctaaaaaagacatgttcattagataagtgttgtggaaatgcatatgttgtggtgaatttgtggctataaaaaagggtcgggtctggaatgataatatacatgataggctaggggtagcactaattgaagcttgtgcaacaccgattgagatccaattgagatggtttagacatatgcaacggatatctccagaagcactagggcgtagtgagaactgactaaagttgaatgagaagagacaatacaatgagacttaaaaggctgaaatatacccaatgatttagccttgaataagggtgtatggaaaacaactatccacgtgcctgaacctacttgtggcttctgttaggtttcaactctagcataccagttgaaaaaaattaagacaaaaggaagagaagaaaatttagtagtcttggcccggggcatgagagaatactagatctgcccctgattgacactgtttgtatcttctgttacttaatgatgttctatcttctgaaacattgtttcaggtgatgtagagctcacaaacatgcaactgaagccagaagctctcaattcattgaaattacctgttagagtcaaagctggctttcttgttttgggaagct

SEQ ID NO: 2026 - DNA, 760 bp, Zea mays
cagttggtttctcatcaaccaccgccggtcttacaccggccaccgcaaccggcgcgcatcagtacaggtacggtgaccaggacgctgcacgtacgtggcgtgaatgacgtagtagtattcatggtcgacacgcgtctccgtagtttgtacgagaaggcgcggccttgaatggagtccattccgtgtcccgtaggcgcacgcaacgggcacctcgccgtgccgggtcccggctgccacgccgacgccatgacccaaccagccaaccaaccgcagccgggcgggaggcaaactggcaagctcctcggcccgcatcaaccaaactgtgccgcttgctcccgccctctgatctgaacggaaatgctccgatcacgccgggccggcagatccccaacccggaaagccacgcacttcccttttccgcaccatcattccgtcgaccgcccccgctgacctgttccccaacacgcaaactagacgagtgcaaggcggctagcgagggccgaccggccgagggtgctggctgccggccgctcgctccgctcgcttggacgcttggcgtggtgtggcagtggtactgggtaccggacgcccgcggccgcaccataacgcacgccacctactcgctactcctttactcggcggtcggcgccgtagctgccagttaactactccgcctactagtagcggcagcggccaccgcggcagagctggtgggtggtaatgccgctgcggctgcgtgcggtggcactgggacagcgcg

SEQ ID NO: 2027 - DNA, 837 bp, Zea mays
  unsure (1)..(837): unsure at all n locations
tcgaagcagtacgaccaggagccaagaggagaaaggagaacgatagacagagagcgccgcgccggggggcggcggcttgcgagtcgcagacggccggattactttgggcttttttgttttgccttagtgggctttctgcttggacaggaactagggcactagattgggccaggaaataaaaggaggggtataggtggttttctgggtcacgcccaagggccacatgctcctatcaattttgtttatcatctgttactctctcctcggggactcgatgcggaggtgagcaggtgccaggtggccctacgtacatacgtgcatattagatgtcgttaacatgatagataactgataatgttagctaaccgtaataaaatattacactaggagctaataccaacctattcagacttgttaccacgatactcgagtgtgaataattatcgttgacatttatgttacatttcgtgaaccaaacaacaacttttaaagcatctccaaaagactagctaaatgactcatcaagccaaattttggttaatcaacaacaaaataactctctaacaaactagctatgtgactcgacaagcaatctaactcttcaaattagctccctcactagctaaatttgactagccatccgactagccaaaatagatagatagtctgttagagtaaaatgttatatataaagtgtagtttttatgaaaagataaatagagagtcaaaagagagctaaaaataaagagtcttttaaagatggtcttagtgggtggatactatatntttgtgggagcctacactcatttatatgttagaagaaaaaatcgtccccat

SEQ ID NO: 2028 - DNA, 731 bp, Zea mays
aaaatatcacaacaaaccatcatctgcctgcataaatcagaatcacgcctttccgattttatataggcaaacccaatagcaacaacatctgaacagattggacactgcctggcaaataaataaatatcacagcagactttcattttccgcagatctgcacattgccgcacatcacatctcagtattgatgccatgttcaactacggtgcaaaacgtggcacagttttctcggtaagcataacagaagtccaattcaaagatcacatactggaattagttcattatttagtgcaaactccaaagtagttacacaaacatgacgaatcaaccaggagcacactgcctaaagattacggtaccagcatacaaataacccatggactgaaccattgtcttcatatcatagactaataaaacaaactgcaactgctggataacacggaattgaaggatcaagctggcaaatgtaaatactagtgcatagctgaaatacacagatatctctgttctgcctcaaggaaacattcttcagtaacgatcatcataagcacgagctgcccctcccctgctgggacgatcgtatggagcaggcctatctcggtaactcccaccaaagcgagcaggcccgccaccaccgccgccacgtgaaccacctatgccatagccaccagtgccccttggttcatcacggtagtaacctccattggacctccctccatctctctcatagc

SEQ ID NO: 2029 - DNA, 793 bp, Zea mays
tgcatgcctgcagtcagttcaatttctgcatgttaggaagttagcaaagttgcaggaaaagaaattcactaatcatttgagctcactggttagcattttttgcgatgatgggttcagtaaagatcaattggaggcatatacactgttagattcagttttgctaggtgtgatctgttttgtggacagaaccagatacctgtttttgccttgttagcacttaagataactgcttccagctttagaacacaaaagaatcatcaccggcatggttaatgaactccagtcaagtaaacatggttgccagcactggactgaacttgtggcaaaatttggttgtgtcattctggatcagtttgataagaaaggcagagaaaccatttgtcctttcagtagcgaggcagcaatggtgatgctgaagaatgttgtatgctcatctttgcctacacttgcttcaaagagcattattcccagtgtccatcactccattgtgcatttccatgggaaatgcttagttctttgcgccaaaggaaagccaggattaaaaaatgcatttagacttccggattatatttttctggtactgaaggatatggcagggtaactaaaatctacctggtcatggtatagttcacctctagttttgtgcccatacaattgcccaaaagtaactggtctcagttcagttctctggattggatactggttcttgcagcacgtggccctcacctggaactgttcagactcatcattgtcgtctgtgatcacgtgcttgattcttcagttttgacttctg

SEQ ID NO: 2030 - DNA, 779 bp, Zea mays
atgtcctcacaaagcttgccaaagtcaaatggcttgaaattgattgaaccatccacccaacgcaagaggtttccgacagatccctctagatagttttcgtggctgccactgctcttgtcatcatcaccatcatcatgggcttcctcatcgtcgcctgggaggttcaagtcgaatgggatgcttgatgttctatgcagtcgctttgaagtgcttgccgattcttctgtcttttcttgcccatcagagatgtggagcttccgcttactggaataacttgaggcttcactgcttcccaaggaatgccttgacgaaactacaacgttgcctccaccgatgttggttgtgcccggctcaactatgatcttcagttgatgcccacgagctgccacagccttttcttctgaaaaagcattgccctcttccaccccaagagaagcatcctggcatccttggatcattcttgtagacaacaccacaatcgagtcattaagatcagtcactcgtcccccatgcaagtccttgtacctaccagtctccattgcatgaatcaggctctcctgaacaaggcaatcggctttgtcaatattgtcaaggaagataaccgatcgccgcttctttctcagctcttcaaagatacagtcggtggcacgctttcctctgaaactagggttaccccaatcattgaggcttaagtccagatatatcaagttccctgagctaccatgcctttagctcagccaagtgccacaccaactcttcgcttggcaatgctgtcaagg

SEQ ID NO: 2031 - DNA, 807 bp, Zea mays
ttgcatgcctgcagcgcaggggttgtcggatcaggtgcccactgctgctgctcctcctcttacctctcttgcaaattgttataacggccggttaacgtctcccttccaccccgcgtgacggagcaggttactctgcaagttgctgatgctctggagcaaccgtttcctgacgggcagttcgatctggtgtggtccatggagagtggcgagcacatgccggacaagagaaaggtaacctgttctattcgtcctttttttttttaaagacaaggcagcgtagctttcgagaaaaaagaatcaagatctggaatcagatgatgtaagggcactacagacagtcggtaacggcaagggtcgcatgcatccgtttgaatcagtagcgtgtgagtttgttacaactagagagagagagagagagagagagagtaaaacattcagcatctcctttgtgtggatacaagctgtactgaatccagcaggctgcttctgaaaaacaaatgcaacgattgcactccaatgctgcaattacaatgcaatgaccgggggttgtgccctgaaactctaaaacaagttcaatccaattcctagatgattttttgttgttgaagatttcgatttctttctcagcaatgatttctactgaattagtgtggctttcctgaatccttacctggctttggtatctagtttggtagtgagctaacacgcgtggcgggctcctggagggacaataatcatcgtgacatggcgccataggaacctggatccatccgaaacctcgctaaagcccgatgaactggaccttct

SEQ ID NO: 2032 - DNA, 823 bp, Zea mays
caccaaaagaagcgagtttgggaagcttcctgcctgctttccagggtttagtgggcccctaccttaagataaaatcaaagagaggtctcacctccttttttctctctctcagacatacaggagagccacatatctttatattgaagagagaagaactggtcccttaaagcaaccgctctgactccacttgacctatgttttttcccttcttgatcttggtcactcaaacaaatgcgctgatcatatttggacggagtagtagttagcaccttccacagcactggagcactattttactttttgtatccatactcactgtttagcgtttcttttgtgaaacatattcactagttactaatttcaggaagatggcaatgctgagctcaacgatgactatgaggcatctgcgtgtgattctgttgcaggtaaaacgtatcagtactttaaatatgttatacattgttatgcacttcattcatatctgttctaacttctacacagtttgttcagatttgccccaggagaatgcatacgaggaggatgaaggcgagacatgtacttttctttctcctaaagcatatgttggtggttccatatcgaatatggttcacaagaagaaacatgtaatgccacaaaggattagccttgctaggccatatgaaattggtacctatgtgccttatcaaccatgcatggaaagcaagtcaaggaaccaaccattgttatcaaatggcaaaaaagaacctaccttcttttcctttgtcaaatccctcccaaaagccgccacaaccgccccaagcttggcaaaaggcaaacaaaggtt

SEQ ID NO: 2033 - DNA, 782 bp, Zea mays
tttgcatgcctgcagactctaattatcaggaacaggtcgaaacggtttgttcttgggccgaatgcttcacggatggaaattgggctgtaagtggactcttctggtatcgtgcgcgatctaatagtgtttctgggcctttaccagccttcgtgtggttaccttaaaatccaagtctttcctgggaatcttgttttctttaggaagactagcaaatatgcttgtgggcttatagcgcgcgagaggaagaaaaaaaaactatcgaacattcatacaacataacaactatatttgttatttttggttcgctagtttgttctgtgagtgtgttgtgtagctcgctgctgctatcctactacgttcttgagtggaatcaaacttagatacatagtaactaaaacaaagtttagatacatagaaacttgcttatcatggaatttcggctcttgaatatcgagaaaaggtaaagttaggagccaagagatccctgatgttgcagaaccaaaccaaaacagagctaattacagtcgaggccagacagtcgcaaggcgacagacgtggtaggccgtgggcgtgatctggacactcatcggtgatgaacaatagcgcacgggaggggagttacgttcatggcatgtagacagggctgaaagtttaaagcctcgtttggtttatgaaagtggacttagtggagtggcatggggtgtcttttttttttggaattatttctggtgggttgggcgttgcatgacgatgcgtcgctcgaatcgatgcgggcatgcgct

SEQ ID NO: 2034 - DNA, 813 bp, Zea mays
cagcttgcatgcctgcagtgtaaggtctgcttgttactgtttttccttctttcatcttttttgtagagttaatggactatttgatcggaaacggacaacaaatggatgttttatgtttggcacgtgttcttaacatggtggacaagtatcctccactttctcttctgaagggatatgtcgaaaaggcaaaacaaactgctatggaaatatctcaaaagaatatgacacgccaattggtatgtgctagaaattgattttagtggcagaatatatttttaaaatttatttacacacgactgtgtggttgtttcacccagtttcataagaaaatttgaggaaatttcatgtctggtgcttgagctatttggagtgatatatttcctttatgaagtttcattttgaaacatgtaatattcttatggggacaaatatgtatatatatatatatatatatatatatttttataattcatctcaatctgcttcatctatgctctgcatcttcctgtgtgcagagggtagttataataaaggagcttgatgatctaagaagggctcattttttggttaagaaggaaatcacgaacaccaacctctgcaccagtatcagggaagaaatcaacattttgttaggtgagcttgaaaaaaagaagcggggtttagcaaatcccttgacagcctcaacttcaaattcacagcagcgacaaacaaagattaacaagaagcgcaaggtaatgcagaagcaggagcatcacaaaggacaagaagaccgggatgcaagggcaactgaatgggctggcaaaaaaccccgaa

SEQ ID NO: 2035 - DNA, 812 bp, Zea mays
tcggtacccgtggtatgctctaaactcgacctgcagccaacttgacatttcaggaaggtaattaatctggtaaacaaaagataaaaaggacagagcaattgacattgatagaagatatcagagaaagacatggtgcaggtctaagaactaaccaaacatagatcaagggaaataaaaaagcaaagaaactctttttttttattcacaaaataacctcgagtgacctgcgaaatccaaacccaatggtcaaagcgtatttcttgaaagcctgttccatgattaaagcaagcagtcttatgtttaaagcaaacagggggctatgccagcagataagatggcacagcagagtgagaaaaggagccagcaaagtgagacctttccccaattccaacctctgatcaagcaactgtatcatacagtgtgagaaaaaaaataataaaaaccccattactacatcaaaagcagcacttcaacaccgtggtaatcttcccaatgcagcccccaaatccccaggcgacgactagggcagtacacgaatccggttcttgaaagctgaaaccagcattgccctctacattcctacaggcgggacggaattagcaaaaggggtttaggctaacgggggcgaaaatgtttccctccctgtccctgatcctctcctctaacacagtagaatgtctcatcctctcctctaacacagtagaatgtggctttcataccagaccaaagcggccccgaaatcggcgtgggaacctctccagagcgagcaagaaccaatggatccccgagtcaatcaaatgcggcgcaccgga

SEQ ID NO: 2036 - DNA, 713 bp, Zea mays
  unsure (1)..(713): unsure at all n locations
acagacctccaagtgatacaccacacacaggagcagaaagccaaaagggtaaagtcacagcaatgcttcagacccaagcatacccccatgcagtagatcacaatcatctatagatactcaaagggaaagaacccacaacgccacaccaacacaacggcctcccagtaatgtcatatcagccaaagggaaaatatgaaaaatgaacaaaatgctaccaagacaagtgtacacaagtcagcatgaaggagacgccaacgatcgaaactacggcacaacaccaatgtatcgcctgcctggcctgaccaagtgtgagaccagtcccaagaaggggaaccctatatgtactgctgctgctcctcacnctcccctttcagtcgccgtaatcagtgctgccactacacgagctgctgccatcccggctgtgctgcgacaggcccctcatgtggcccggaaggctggccacaccgtcgatgctcttctctcggaagaacctctccctctcggcgtgctttgcgggcggcggcgggatcagcggagcaggatcaagtctcggttcctcgcggtccggcgagcggatgttcagcgcacccagtctcttgtcggggtgaggcgattggatggtcagcggccgccgcagcttgtcctcgggcatggatcggaacgacggcaccaggtcatctgtgtagtcctgcgacagtgccttccccttccgt

SEQ ID NO: 2037 - DNA, 806 bp, Zea mays
agcttgcatgcctgcagcacattccttctcttgaacatattattttgttgttagcttacaatagaaagtagctgtttttggttcttgcagtgtttattatgatatatagctgaagctatcatttcatcttgcctccatagtctgctggtgtgcaattttcaaatcggccaaatgttcttgtcacacgagcagaagtgccagtcccagaaacgagaacagaaccaaataatgaaagtttatcgacccgtttgactgaagctcaacaggaagtgcatactcagcctgttcctgatgcaaggtactttcttggcattgaaatgcttatcttgaactgtgtggtacatttcaatcatctcgagttttttttttttttgaaattttggtgcctctattccttttggtttgtatgtcctgttattgttgcaaggttaactagcctattaacatcctaacatgtcaaaaagtttgtactgctcattcttttcttttttctggtcaatagatttttggtgaacatgccttgatgctacattgctaatttgctatgagtcactatgatgatatattgcatgtggcaatgccatgtggttgaataaccattagcacgcagtttgttttagcttttgatttacttttgcaattgcagtgtcacttggtaatgttatgtgttggtttctttttttctattccatgatatttatacatcatcatacatctcttctgggtggaacctatgacatgatgacctcaggatgccatagttagcatctgtgatgcactgatacctttcattattgatttaatac

SEQ ID NO: 2038 - DNA, 878 bp, Zea mays
aaaagagctatatttctgcaagttgccgcacccgcggcacatggacttcagaagaaacgtgactggaaacccggaattgacacgaccacgagtaggaaagatttttctgtgaggcggagagagccgagatggctcatgcaacggcatgcaatgcaatccgcgccttggcgtccgcgaacaccaccaccattcctttccggactccatatcagatccgcaggaccgcagcaggctccgatccgttagttgaggggtggcaatcatcatctcgccggtcgccgaaaggggttgaagtggacagctcaaagggtaaagggcccttgaatggcggacgccgggatgggtagggcaacgggcgacctcctcgcatcactgatgccccgggttctcagttctcaccgctgattaaggtcaccaggcggcggtgccgtgctgtgcgtgagctgttgctctctctgtacagcctgacaaagtcgcgcgctggcaactagcgagcgatgactagtgtgtgctttgggcacgccatggcgtgatggcgtcgacgtgccgcgcttagcttaactagctcttgctcgcacaagaaagatcggcgctttagtgggtgtttggtttgtagggactaatgtttattttatacatttttattttattttagtttccaaatttaccaattttataaaacctaaaacctttaattttaaattttcctatatttcacccatttttttcggcaccttaaaaataacatttacatattggaaagggattcttcaaaacaatttatatctccccctaataagaccccacacaacctattccgttctttaacatccatatgaaagcgctatctgaagtctggagctttacatacctttttt

SEQ ID NO: 2039 - DNA, 819 bp, Zea mays
gcttgcatgcctgcagttcttcgtaagaggtttgatatccacattgccgggcaaaatgctccagcaccacttgagagctttgaagaattgatttcaaggttaggattttctaccataataggtcagcttcagattatggttataatggaaccatttcaggtggttaagctgacttcatttttttgcaataggtatggttgtgattcttatttggttggaaacttgtcaaaacttggttttcaagaacctacaccaattcaaaggcaggccatgcccattcttctttcggtgagtgagtttgaactctgtttggatttaatactgttgcctgagaaactctcgtaatcttttaagcccttaaggtgttttatcattccttactttcagggtagggaatgctttgcgtgtgcacctactggttctggcaagacattggctttcttgtttccacttcttatgaaaattaaggtatgtctttatagtattgcactatagtgtccagagtggtcaatatgactcgatgggttttgttctgatagccaggatcaaaaggtggtgttaaagccgtgattctttgcccaacaagggaattggctgcacaaactgtgagagaatgcaagaagttggttaaggggaggaagtactatattaaattgatgaccaaagagctgtccaaatcagggaatttcaaagatatgcactgtgatatccttgtttccacccctcttcgtttggaccatgctgtgaagaaaagagacctttgatttaagtaggtatgtgagcataactttagaatattttcttgttttattttcaact

SEQ ID NO: 2040 - DNA, 752 bp, Zea mays
aattcagttggtggagcatatttttctggtagaattaaatgcctaaagcagacagggagaattgtctgagaaccaagccacttgtcagacacaacacgtatgaaatactgaggaggcagcggctcatatatcggcactgtgaagttcaatgtatgatcttcgtcaacatactgtttcttaagcatgaaatattcatggtgaagaatgtactcgccatcattatcctcaacaataacccaaaagggctccacatatccatgtaccttatcatcccactggaaatcaggtgtaattgtcagctcaaaacccaaaactgtacgagtaatgggctggacatgggctgaaagattcagctttggtaactggtggatgcacttgtgcagcggcctccccatcttgggatagcggatcagctcaccaatttcttgtgaggacagatcatagtacctctcccaagccaactccttcttctcaagtttcatcaagatctccttaggaattccagtaaactgcctcaagggagtttggacactccacatttgtttatcaaccatcttgcaaagattcagtgctttctccgctagttgagcccatcccctcttcaaaacaatctcgaatagtgcccgtaagagacgtccagcactctgcattacaggagggggagaaacattaactatacaatacaatataagcaagaaactcaggttcagaaagagcctcaaaaaatgcaacgaattataaattgtagccag

SEQ ID NO: 2041 - DNA, 803 bp, Zea mays
tgcatgcctgcagttggctcctcagccctgtgtctcgattctcaggttggtggaagaaaactgttgttgctgttcccaaggggcttcgtagaggcctcaattctctaattacgttggtggcttgggagatttggaaacaccgcaacaggtgtgtctttgacaattcaagaccatgtgttgaggaagtgctaaaagctgttaatgtggagggtgggctttggtgcttggcgggagctgccaagctccaggaacttgtttttgggtcggttcctactggagcttagttagctctgtaggttgtataggttgtggtcgcctttcttcattgatgtggcgcgacggttgtatttaaggggaggcgtgtgtgtgtgggtgggtgtttgtgtttcaggtcacttttgacccttgtacctctttcttccttaaatgaaatgacgcgcagttctcgtgcgctgttcgagaaaaaaatctactgctaaatttgtgtaacttgttttccatgttattagccatcataataaaataacaaagagatcaaaacgtacatcacatgacaaacagaggattgaaggaccactctgtccaaatatttctgcatgcctcctagctagaccactcactttattttcatgcagtttcaagtttcatggaagaccaaattacaaatttaaggattggtcaccaacatcagcaaatgctccgtgacttcgatccatgctcaagttagatataacctaaagcctttgattctggggactcgggctttccttattaaagttatgcaacatatgggtttttgccaa

SEQ ID NO: 2042 - DNA, 555 bp, Zea mays
cctccacatttctcatccgggcttgggaccggcaaaggcagtgttaaaccgcaaacaaacaacaaatcaggaaatacaaacaattacacaaagaaaatcgtgttcccaaacataatttgaagaaaaaagaacaaatcatatagccggttctgcgtcgaacatattagttgaatggtcagagcacttgtgtattcctaattcgaataacctaatgatctcgaggactgaacagcaacaggaaccagctttaataaaaaatcataccatcaacaaagatccatagaaatttgagcaagtgcaaagctaaaaaagcagctagtgtacaatgtacactcgtgcaatcttatgtacagttctccaacatcatagcttgcatgaccaaacatatcctagctaggttaaggtactattgtcatccccaatgttacctggaccactttgcaaggacctaaccaaatgcaagataatcaatcctagtgttaaattagcctaactactcaatcaccattataacaagaatgaacatgctaatttggagatagtgcagaattacag

SEQ ID NO: 2043 - DNA, 863 bp, Zea mays
  unsure (1)..(863): unsure at all n locations
gagaaccgtagaaggtagaagcgcatcgtcgcctgggcagtcgtgggtgctagagcatcccagcagcagcccaaatcttcaaatttgataaatagcaaatgttaatgactaaacctaattagtattattaatgggctagatatttgggggcccaaaaaagtggaggccctgtgcacggccctgccgtgtaacctcgacattatatgatgccggctgttaggatcaaacacggtaatagtcgagtgtgaacgtgaagaaaaagctaaaattcaaaaaaaaaatggccattggcacgtcgaacatacaatgtccggttcactggagctagattagagacgatgatccaggaacagcagaaaaagtatagaagcttatccacttatgacgtgtcggccaaacaaggtgtgaaataatactctaccctgaaactcgaaacaaggatctacaaacgggtggggtgaagtggcggagcccatatatggatgcctgttgggcacgtgcccagactttggcccaagtactcatagacccagcacacaaggacgtacaaatgcttgtgtgaagaaagcgactccgggatggaaaggaaaggtaggggaggccgcgacgtgtagtcgtagatcgacagtaacggaagcgtgtggaacagtgaatttgaaatatctcgacgagtggcagaaaattatttaacatgtcctaggagaatgttgattttggtgcagtatagatgagtagacggcgatggtgccacggatctacattattgcacttggcactcctgtgcctgtgctagtaaactgtgctcttggnctctcctacgcngctncagcttgcgaaggtgatgatggtgaattgatgagcct

SEQ ID NO: 2044 - DNA, 769 bp, Zea mays
aaaccaactatcttggaatgccacaagtaatttgaaaaggtgtgttagttactaacttgtgccttttccagtgcttcagaagtaaggtaacgactagaataggtgctattaattaaagagaagataaggaaaagaactaccaccgaatgaagtaaccatcaataataaatacatacccctctgcctgagcaccgatcttttgggtgataaaactcacaagctgatccaaattggcatgtcctagttttcatgtagaatgggcattctgctggatgccacccacttgaaagtatgtcttttgaatgattgaatatacaagctgattgaaatttacatttcccaaattgcatgtagtaccggcaatctggttggccaggccgctcagggaatttttgttgctggtacatctggtcttgtaatgtcgctctagctgctgggtggtgctcttttgcagcgaccgacctttttggacttgctggaccctgcatgtttggagttatatccttcgggtgatgaaacttacagtttgccccaaatttacaggacccagttttcacatagaaggggcagtcaggttcactaggtctgtcaggataaaccatcagttctcctgacagtgctggctctttttttggatggtgtcgacttgatttttctttttgatggtatcgactttggaatttgtcttctggatggtaggtacttgaaaatttgtcttttgggtggtaatattggcatgatgatgcaaacttacaattaccaaatctaa

SEQ ID NO: 2045 - DNA, 746 bp, Zea mays
tacctctctggaattcatttatcctttcagctctgctggcaggagaagccaaagcatggccagtcgctatgatgagataatcatatggaagagagtggccgtcagcagtaaggaccgcgtgttcagtgatattgaccgcagaagatgtcacgatggtcgcatcgctgaggtaatctttgtggtagatcaacgatctctcagcaaaggacggttcgaccatggagcgcagctcagcccaggggatctccaggtagtctttcctgtcatcatcagaagagaatatatagcatgtatgaagggactttcctattatgatttagtgtgaaccaggtgatgcattcaacatcaggctattaagctaagctgtcataagcacagaaacggatcaggcaattagattcagagcttgaagtacgtctgtagaaagaaaactcaaggtcatccccccatttctacccccctccccgatgcaatactagatccggtcatatctctagggccgcaatgattcggggccgccgtagcggtggagagccaaggcgaccgaatcacacacctgggccgtggaagcacgcacagccactcaatgacacgcgcacccggcacccagtcagagaaagcaagcagccggtcggctcgggatttccgcaaacgggtagcaggcgcatggacggagcgggcgatgaagccttacgggtccaggaggacgacgtcggcgtggccctgcatagtcttggcgaggaggg

SEQ ID NO: 2046 - DNA, 746 bp, Zea mays
  unsure (1)..(746): unsure at all n locations
tagctagccttgcattgcttattgccagcaatgtacgtaatcaccggcagcaaaagaagcagtaaataagtacggctcgatgcttttttgactagttgccacgtgattgtgatgtgatgttatcctaacttttttcagttcatatgactattcttaagtaaaatatagcatagttagtcgcgaaccaaacgtggagacctataatctgctagctagtaggctctgatccatcccgtgctttttggccactatatatagagagagactaacgctagctagctagcttgcttgctctctaacacgcacagacacagtcacacagcgttgcgcgccaaggagagagcttattgcaaattactctgtggaccgaaccggtcggtcggaataataagcagcagatagagagagagatggggaagctgacgctgggacaccgcggcgaggcgtcagagccggacttcttcaggggcgtcctcggcgagctcgtcctcaccttcctcttcgtcttcatcggcgtcggagccgccatgaccgacggtacgtacgtatgagtcagctaccgttattgcacgcacgcatgcatcgtccagctggtatatatcctttctattccatgcatggatccaaatccactggcagctggagtagctccatccatgcacatgtctccttaatcattttctccaaattcaaaaaaaatgtgagttcacgaacacnaagatggcgcggcgggccggcccgcgttt

SEQ ID NO: 2047 - DNA, 816 bp, Zea mays
cttgcatgcctgcaggaaaaacttgttcagtatatatagcataaacaaacagaatgctaacagaattgacaatgaaacaaagactacatcctccaaggtttgctggattataccttcgaattgtaccccattctggtatagtcaaccttgaaagatgactcaattttgcatgatctaagtagtgcacaaactcattacttgaaaaccatggataatcaactgcgctgtagaaccactcatatgtgcaccatctacgaagtggttcggatgacaaacagtgcagcaatttttttgcctgaacatagtcaacagttaggatagactacccgtaaattatttcaacttgcaatattgaattattgataataggtggtatagactacctgtaaattatctgaaccttcattgcatgacatatgctttgttttgcaatgcatttgagatttccgtctggtccttccagacattctcacttcaggcttggtttctgtttgtgcactgggaacttcagcaggaatatcttcagatgcttccggtatccccactcttccagagtcagtacacaaggaagaatcatcagtgataacaaccctcagtgtttccggcagggctaaactattaccacaaacgttttgtgctacagcaggcacctgtgacacaaaaagaatgagtgggagtgtgtgtgtgtgtgagagagagagagagagagaatcataagactatctgaagagattagcatttagcacaggagaacatatcaatgttgatcgatatttaagatgatttcaaatgataaacatttgtaaacagtggaca

SEQ ID NO: 2048 - DNA, 903 bp, Zea mays
ttggtcctaaagactaaggccttgctcgtttatgttggtgggtcggaacgattctgagccagtttgtttctctaatttatgtaaactttgattagctggaacgatttcggctgcaatctaacataaacgaacaaggcctaatgctgtccacatggcctgaatcgaaacccgagatgcgaaggagatctggagatgcacatgacctcgagatccagcgccgaacatggtctagtagacgcacaatgcttttcttccgttggtggttcctgacatccttacgctgttaccctggtgaactgaacaatgacaaaaaagaaagaaagaaagaaataaacaattcaagaactttgtcgtgaaacgacgtcggttcccaacacgacatctcattcacatatatgtacagttagtgataggattagcagttagacgtgttctttagcaatcccataagtttttagtggtcagttgtctcttcactcataaacaaatattcgccgaagaacaacaaagacgccaaggcctttgtaccatcaattggtaagcatggcgagaattgatttaccttctcgcacacagcacattttatgatccgttcttcgctcttcgtcgctttggtggagttcatcgacacaccattcgccaccatggtcattatggacagcgccacatagtctttttaacgcattgggtttacgcgatcgaccctacatcatctaaagatactaagtatcgccaggtggattattataagtggtgatgattaaatcaacgccaacctactttttggcgactctgttgaggacatcgcatgaggatctattatatcggccatcaatggtcagatcaaaagatagctctgtcgtatcttccagcaccatcattaagccgacttgggaaaccctg

SEQ ID NO: 2049 - DNA, 784 bp, Zea mays
cttgcatgcctgcagttgtgccccagatgacagcagaagcctgttcaaatccttcctccactgtgtcgagggccaacactgaagctgacaacccggaggattgggaattcatctcagatgagtccctcaactatattagccggatgctcatggaggaggatattgatgagaaagttagcatgtaccaggcggagtcagcggcactgcgtgctgctgcaaagccattctacgacattcttgggcacaagtttccaccgtctcctgaccggcaggtgatgccttggcccatggacagccccagtgagagtagcggtagcatttgcacacaatctgtggcaagtgctgtcactagcagcagtgttggtggcacagtggatagcaaccggtgctacgatgttggacacagtgagcagctggaagcttttcgaggcttgtgtggtcagtcttctcatgcacttgttggtgcatcaagtgatgcttccaatgcagtgggtgagctagaagacattttgatcacgaatggtgggatccctgagtatttgtttgagagccttccaacttgggatttcaggagaggtattgaggaagcccagaagagtcttcctgttagcgataaactagtaattgatttagaaactggtggtattgcaagaccccaagaagcaaggaaagatgttcctttgaatgccaaaaaggacgatgtattgaaggccaagaaaaatagacagagtgaagaccttgacctgatggaaggccggaacattaaacagtctgcattttgttc

SEQ ID NO: 2050 - DNA, 809 bp, Zea mays
cggtcccgttttcctctagactcgacctgcagcctggtggagatccacatgtgttgtgtttcgtcgattttgacaaccctgctcaggctacaattgctctggaagcattacaaggtgaaacttcttatatatgtggatatggactgtgtagttgtgttgatttcctgattctttgctttgttgactttcaattttgcatgtatatgtttgttaaattctatcatgcatgttgcatgtctatagtttgtcgtgaagcttgttttggaattggtaaattcttgttcattccgcatctaacttaatgcgtgtggtaatagtttttgaattagttcatatattagttatagcaggaagctgggtaaacccacctattattcaaagcactcaggcaagtggcaacaccactcagcatttcctaacaagctaatattttcgtgcatttaataggactggtgagtcatgaatttttgcgctttgcttcctattcaagtgcacattatgccctttctaatacattacatctaggaattgttaccaagttgagaaactcatgaccagagtatggaacctaggcgttcttaggttctacactttgagcttgctttgtgtcagcatccctgccaatttaagaagatttgcattagcattctgatatactggatctaagatttacatttccatcttgatctgcatgggggagtaggcctttggttgaaggcaaaaaacacaactcttcctattcttattacggtccgatctcttgttcacgcgacgacctgagcaatataaaccatcacgattcgttttgc

SEQ ID NO: 2051 - DNA, 908 bp, Zea mays
ataccaacgatagtgaaccagaagtcactcaaatcgatgttatggaagtgggcaatgagggtacattggagaaagaagagaaaagctactgatggccttaagactgatgggtctgggattgttaataccatggttgaagttcaactgatggagaaaaactctaacaatgccactctggatggtgttatacatgccaattcagagattgccgttgaaagctattttttagttctggatgcaaaaagtgagtcgagcagcagtaaccagactaccgagattggttcagtgattaatttggaggagagagactattatggctgttatccaggacacaaatgcgtctgaattgccaaatacagaggttactggcaaactgtaggaatcaaagaaagcgagtgtttcagattcattagaaagcatagaagatcgacgcaaacaaaaatctgatacaatttctgtgaaagaacaagaccaacttgaggaggtaagccacagacttttttctctcgaacatgtaggagagctgcacctcatttcattaaagaagatgttgcagaaaattggaaactcagtgatcaaattgttctgattgatatttgaatacgctgtcttgttcatttcccattgttttgttgatcttttataggctcagggattgttaaaaagtgctgtcaagactggccagtcaaaagaagctaggttagctcgggtaaggataagcataagctcaattgcctcacaactcacactcgatctatgttggttagctctgtttttttgttcgtttgttttcaacttaccaacatgttcttttgcccatttgttttcaacttacgaataggtttgtgctggactttcatcccgcctccaagagtataagtctgaaaatgcacagctggaggaacttc

SEQ ID NO: 2052 - DNA, 763 bp, Zea mays
agatggtgatgacataccaaggtcgacacgccaaataatgcctaatgggttttatgggcaaagacgtggtccatataggggcggttcctctcattcgtctcctgatcaaccatcctcacctcagcctcgtcggtaatacttgttattgtattctttgtttatcgccgttttagtatgagtagtctgaaaaaatcacatcacaaatatgtaataaaaccttatgttatctgtaaaaaaacaaatcatcatgctttcatctatattagcagaataaatgcattatagcagttatcaatagtaagttacttgacctatagctaattgacagactgatggattgctgaaaattcaaatatgttaaattctcatgcgttgatgaatctggcacatgaacatgcagccttgtgcatttgcgggagaatggcttgtctctgtttattccttctgtatagccctctcatgtgagcctccggcactgggtctgcctgcacaagcagggattgaagagataggctgcttcatataagcatgtttcatgttgataaacaatggtatattcaagccacataacagaagttccaaatcattttattttcattcctcagtgggtctttcagagtctgatgagaatagtcatggttactttgtcaaattggtgataatggccagtaacctcattttcataaattatcaacgtgtgctcatttttggttgcctgtggcctacatgaagtccaaagtatgcacaaaaccaagcgtgttgg

SEQ ID NO: 2053 - DNA, 786 bp, Zea mays
gccggtcgtccggactggatggcatgtcagaagagaactggagcagaatagcgagctgagcacatcattcagattcggtttcagcatacctggggccacctcgccactgtagcattcgcagcgaatggccattttactcgtcataccctgattaccaggggaaatacgcaaaacaatctacactagcatggttttccaaggccactaggagtacgagaatgttcatcgatatcatgcgacctcagaatttgcaatgtagatataccatttgtagaagggagtaaattaccatctataataattctaaagatccccaaattcctcttgttctttaagggctagtttgaaagttaaaaaatctgagggaattagagaggcaaataaggaatgattttagtccctccaatcctctccgattttatggctcttaataagaatcgaaagtgtactgcaattacctatgaaattgtcgcccactacaggattgaatggcggattatgtccctctctgtaggactgaatggtggactcagttctaggaataacaatcatgaatgaaaccccgaaaataattcatgcatcacaatgccgggcagagaaacatgcggacatcccaacacacagcgcacattcagtcctacagaaaacaatcatgaatggaaccgaggaagattggcatggataactttttaatcgtgcgtattcaggagtcatccctcccttcagcacaagaatttgggtgccgttgatttacactccatgaccgatgactcgagtcccggtggt

SEQ ID NO: 2054 - DNA, 764 bp, Zea mays
tccacctgcacaatcaactcctcaaagatctcgacggcgccgtctatcaacaacttgacaaggtcccttgtctggctctgaatctccgcgcacgctttgccaccgaacaacctgttgaagtccagtctcagcttattcagagaatcaaacacctccagcagacgctggagcttgatggggtccttcttggcatcagcaaccgcgcggccaaacctcaagaagtcaagaaccccggcttgtgccgccacctctgcaaagcacgcggacgcgacatccttatgctgcccaaacaccttggcacagagctgccgctccgagtcgaagagacggcgcaccacaaactccaaatgccgcctccacaaatcaagagcaggtcccaatgcctgcgcgtcctgagaagggtcgcgcaggtagtcgaggccgagagcacgaagacttgcactgaccacacccccgcgcgcatcgatataagaggccacgcagctgtcttgcctgccgttggccacgaggcgatcgaggatgagggtgagcttgtggacggcgacggcaggcacgcgggaaggcgtggccgatccagcggcggcgccggtctgcggcataccgagcggcgcggagtggtcggctgagaggcggcggaactcggcctcgagcatactgagggcggctgcccaggagcccgccgtcgaggtcgccgggcgggggtgtcctgagctcgtcgagcgtgaccccgaggacggcgaggaagcgcttgtcggcgaggtccc

SEQ ID NO: 2055 - DNA, 741 bp, Zea mays
cagcttgcatgcctgcagaatagaagcaaatatttgtaaaagctgcttatagttctatatgatatgaaagtttgggaactatcaactgcaaattggccactctttctcaggcattagaccctaagggatactcaaggaatgtcacattttcatcccacacagcatgctagtgacaatgattttcagatgtggcaacagcagatgatgttcaagcacttgcaggagtttcagaggcagcaacaactacagcagtctgatcatggagccaggatgcagctctcttttggacagtttcatgctcctgcaaaacctttgcctggtgatcaattgtcgacaatgtcaaatgaaatggtcaacaatgagaccatgaattctggatggccacataattttacaggtggtgacctgagtttgacgagcaactcccagatgttgaacaatggtagcacaaattgggatcagattgttggttctcctgttgtgggcaatttcatgaatggttcaatgtttgtgaatgctcataatcagtcgatgagaccaatgggattagctacccaccaagtggatcaaactttttatccaatgcatgctaccagcagtagagggcctggaaaccagtattcccaatttttagggattcctgctgatcctcagagtgaagcggcaagggttggtccagttcagtcagaaaagacatccagaccattcaactcttcaatgaacgaacttggtcttcatatg

SEQ ID NO: 2056 - DNA, 759 bp, Zea mays
aaagtatcaaaacttgaaagcaaatttgatacacgctgatattcgagtgcaccaccaagaatcaagattggaggcttttccttttttgatgacatacgccggtgagcaacattcttcttacaaacaactccttttacaacgaaactgcaaataaaggaagatgtataaaaccaaaaaaaaagaactagtggaaaccaaagaaatgcacagataaatacagtatgaaactcaaaacgtaatagatcaataaaacaaagaaagttcacatcaagtgtcatcaactatgtctttctagtatgaattacaaagcttcagtttcaattaacttaaggttatggatgctcaagcatattgatgtaaaatcataaaggcatatgaaggtaaatagtgatgcatggaaattggaaaatagatttgtttacctttcacttgggtgaccacaagctaagcatttcaccttaacatagccaccagggtccatctgaccgcctttgctggtggtatctggcttcaaaagagatgcagcttcccaagacagagaagtaactatatctagccaactttctttgccactcccatcaactaatggtaccttttcagcctgaagaagttgagaaactaacgcccgaaagtggccatcaactatgtctttcatggctttcttgtgttcctcagctgacttatctctacttcgacagtgcccactgccaaagctgtttgagcgtagatatccccactctcctgtagcatccaccccct

SEQ ID NO: 2057 - DNA, 1227 bp, Zea mays
aaagaatgtcgtagtataggagcaccagatccatgatcgaatcaccccaaccaccagagccaacttttagctgtaaaaccctgagacagcgcaggtgtcactgggaaaggcagcgcgtaaaaaactacaagtactcagataaacaagcgtattagtaccccttctggcgagaggggggaggatcggagtggactagatcatgagcttcgagtatgctttaggtgcacacacacaaagaagatggaatcgaaatggggacctgctgtggtagccttggccatataaaactggcggcatgataaccgtcctagaatctgagcacacacttttccggtgccggattttatattgccgtcgccaaaaaaaaaaaaacgctgatgcaaagatgagatgcttagcggttcgacgcaatgatctaataagtgtactttattgtaaatcaaaccgagtaaaaaggcgaggagaacatgaggtgttgggctgccacttgtgcaatggaaaaaaaaagaagcagaaaagaatgctccggaaactttacataggccatagcaccaggcagggggtcccgtactcccaaataaaatcaatgattgaaaaaggtagtttttggaccaagccgaataggttcaccttctgaaccccggcaattcactggtggcttaacagcattcctactgaaacttcttaaaccctgtttattcttgtttaatgtggttagggcttgaatttaaccaattttgccaattattcaccttttggaaaaatttgctagatatgttagaaacatataatttattttaatgacagcttccttatttgggaggttaagataaggtgtgtgtgtatttttggaaggcttctttcatggggatatttttttgtgtgggggagacgtataaactatttgtaatatgtggccgggtttgtaaatatttgggcatctgttctatttcttaatattgcctctttgtcgaaatggtaatttatgggtagtgttttatatgtttggggcaacacattgggtttctgtatgagttattcttgtttgaaagtgtttcacaagctcacatatgaatgtttatcctatatgcaaaatactacttttatctttaggcccttgtagacataaaatttgctctttgatatattgtgtggtattagtataattttcttatgtatcggtacgcttgttattctatgattgtattttttacttttccttaattc

SEQ ID NO: 2058 - DNA, 796 bp, Zea mays
tggctgcatgagcctgacgaaagcgatagattaaacgcttcacatttcagagatatcattacctgttcctgtggagacttgcaaacttcatcagggattcagttccttgagttgaccatatgcggggtatctttcatgctacatcaggtatgtacaattcagtgatccaccgatcagggaaaactaaatttcacaagattacttttaaggtttggatactttgttgctggacttcgtgtttttgttttgggtgttttatcaagcaaaacctatggaagtatggatgcatacttgatttttgaaatccaatccatctgagaaaccggctcagtagtatgttattgtctatgattctgaactgtgtttcttgatatcgctgtcgagaaaataatccctctgagaacttgagaagctgacatgccttttaaaacgctattctcctttaccaagcagtccattggatagtagtatacactgtcaacaatctaggcacatctgagaagtaacatgattgttaaaacagcccttttgtggttgttcataggactgaaaacatcatgcagacctggaattataacttcgcagtcacaccattctctttcttggcctcagatccggaaaatggttggaaccgccgtggcggtgaagcgtggactactaccaagagacatcatagagctgtccctcgcgaagttctccagaatcgttctaccaatagccccttcagaggtcctggtcctcaaggacaacagtttctgcacgaaaagcaagggagggaggatcgttcgccccggga

SEQ ID NO: 2059 - DNA, 766 bp, Zea mays
ataaggcttggcagctccagaaccagcaaccatatcaaacgatgacattacaagttgcatccgatgataatagtgtttgtacttccgatccacctgaaagcaaatttcaagttgatcttaaaaattcagacataccagatactgcattagtgaaactatcaaaacacgcctagcccattcatctgatctgtcccagttagaaacaattttgtcttgctgagaaaaaaatgtatttatgcacccatcttacattttaatggggtaatgtaaccttctgcatttgatggtgatcttgtcctgaataacagttttgtggatacatctgttcctattccaaatatgctcattgcttgtttggaggacctttagctaaaaacatgcaatctacagatttaagccttgttaaatgacaatgattgtgggcacctaggcattattaagaaggctagacccacctaaactaacaatgtttgacgagtcctccaagaattttcaagaaatcaacttgtgaaactcatggagctgaaccaatataaatgacctttgcatcaggaaccaactattggactcattatttaggtcacaactcaaactgaactgatggggttgggattcctcgagtatttctctaggaacagaaggcagaaaattgttgacttctgatataccagtatgagaaaaagtaatatgcagccatccctagataaagtattagtttaataaaattcatatttggaatatcaaaagattattggtgaaactaata

SEQ ID NO: 2060 - DNA, 740 bp, Zea mays
ttgcatgcctgcagggaagcaagtacgagagctagtgttacaacgaacccgtcgttgctatagctagctagctgcgggctgctgcgtacatgcatgattgggctgggatcgagagaggggaggtgggagagggagctatagctcgcgtcgctcgctctcagtgaccaccgcgcgcgcgcccgcacgcagctggatgatggagcttggccacatccacatgcatgcagcagcagctggtcacactggtagatgcgtatggtgtgtggctgcctcatcgcccggctgttgccaaataccggtgggcctcgcctgcttttgttgcttccccaccccatttctcataattgtgccagcgacacatgacatgcaacgccatgcccatgccttaactactgctgtgctgctgcacacacacaccccatcgagttttgcttctcgtgtttcgttcgatcgatcgatccatgcatcagcatacattgctttcggtcgtactacaagctacgtacctagctatagccagtaagtactgtgagtagttggatttttttcttcttcttcttcctcctctttcaccatgcatgcattccacgtttcgattattactttgatttactagcaagggaatactagggatagaacgattaattaattttctggtggatatgcaacaagagtaataacaatttcttgggtacgcgcgcatatgcgtgatcgtacgagcaggtggaccggcggtacaa

SEQ ID NO: 2061 - DNA, 762 bp, Zea mays
tcttgcatgcctgcagagacggcacgagaggaaattaacaagccatgcacacaacatgagaatcattattcccggccatacgactcccgccgcacatactgtacggcacgtagaaaaggacccgtgttaaggctgcccctgtacgtacgtgtgtgctggcagcacactatcttctgcctggctgctagctgagctgcggccgactgcacacacagcctgcaagcgcatactatgcgtgcatgcagcagcagaagccgcaggaacagcaccagcactgccactgcgtgcgacgtgcttagcactatttgccaatcatatacccattataaaatgtgaccgatgatcatatgtactatgcggacgagcactgatatccatgcacgcacatgcaagctagcacaagcagcatggcaactaatagctaggccagccagccacgccacaccactctctgcaatctgcatgcatgcatgcagcgccaggagccaagggaaaaacggattccgagaccgatatattccccccctctggtgctttgatctctcgcagcaggcggcaatggctggcagcatgataacgggatctggaccagacgctggcttgcacggtggaaggcaaaaggaggccggatggctcgtcgtccggtggctacccgcgcgcccatgcccggttgcagcatgcagctcgctcgcgggcgcggcaaaaaggcccgcctcgcccgctcatgcgcgcagcataacgcgcgcggacggaaaagcagct

SEQ ID NO: 2062 - DNA, 750 bp, Zea mays
tcagctttatggtttaacatcttgaatatagatgttatggccggtattaactacaggcgtagagccaagtctgggagtcctaatcatggggctaacccggcttagctgatcccaattggggatatgtacgctagatgggctggtagcttggcccgttgtagccttggataaagactaaagaccttatcagattagtctgtaatagaagggtatttattttctcgaatatgaaggagagctgtatatcattatatttaagaagaagaaaaaagttgggccgaagcccttacaagccatgacactgaggtttaaacccctcaaaacagaaaaacaacccttgaacagaaattagccgtgaggaagattagctgctaggaaaataaaccccttagccatctcccacaaccttcgctcttctccaacctgctccagaacagcagcaacactcggattgccgcccttgaagacaaactgattacggtgcttccataaggtccaagcaccaaacaaaacaagggagttaatccccatcttcatttgtccagctgccatttcacttattgtcctccaccattccaggaaactatcattttctggttgaggggacagagtatgcagtccaaattgtctcaaaaaaatgaaccaacactcccttaagaaaacacaagagaccagtagatggtctattggttcactttcttgttcacaaagaggtagctatcagggtgatccaatcctctttttgcaaga

SEQ ID NO: 2063 - DNA, 643 bp, Zea mays
atcttgcatgcctgcaggtgtcaaatgaaggaataagtaaactaaaaatataagttgtacattaacaattaaaggtcacttgtcatagaggtcattcaattataaacataactgacgcataaaatcaaggcaaccagtaaatatcaatcatttcaaaacccatgaacttcttgatctggttataacataatgtttcattgtaccacattaaggtgttaattaatggaaacaaatctaaattactctctgcaatgtcccaataacccctaaactatcatatggatcaatttactccaaccatttcagttcaatagttggtccaataacctcgtaacaaaatttgtatttctctctccagatacaaattgagtctgaatttaaaatgcgagatgatggcaggtatcatatgttatgttaaaaaatacattatgacctactcatcattttcttttatatgattttgtatctctagtatttaatttattattaaatattccaacgaaatatggatgaaaattttatgatatatttttaacatgaacgatgtaacctcacaaaatcacctttgtaagcgtaaattagactgactgaaatagttgggttaataaatcgaaccaaatgttagtacaataggttattagag

SEQ ID NO: 2064 - DNA, 822 bp, Zea mays
acctgcagtttcgacaacgcaagaaatcactttcgacagccaatcagcatacaaaatggattgtgccactcacggaaagcaactggaatcctacggttgcacacgggcacaaacagaatcaaccaaggaatttttttaatctcttatttttgcatgaagaattcgagcaaccacatttttttttaaaaaaaaaggaaacaataaattacctgtgtccacaaggcgtagtggtcggctcaaagcagatgtccaggcaaatctgccaaaaaagaaaagaagctcccaaatcaatccccagtagcatctagtataaaatcacagataaaacctcagatcatataaagaaaaagaaaagaagcaccattaccgcgcaagagagctcctcccggagccgatccatgcacggcatgtttgccgcggccactgccttctcgccagaaccggacgactccttgtcgcccacaaggacaggcttctcttcctccttggcggccttcacttccgatttgccatctaggagatttccaaatgaacgccagatagagaaccattatactcactcatagcaagaattttcccaagaaaatcgattcgatccgaggaagaaacctgccgcagtgtccgacttttcgtcgtcgagcgcgaaaaccaccggcgggatcttggccggagacagcctgcgcggccttctcttcctacgagaaggcggcattcagatgtcagggacgatgaacccgagcgtgaaaagggaaaaggatggagaattaggtctcagaatcaggagggtagaccgccgtacctggggctggatcccggcgctgc

SEQ ID NO: 2065 - DNA, 779 bp, Zea mays
cgccaccgccccacgctaacctccgcctcctcccccgccgccccaaggccgcctccgcctccgcctccacctccattgtcaccgccgcgccctccacctcctgctcctcttccgcggagcccctcaagccccgcccacgcctcccgcgccagagccccgcgcccaggcccaggcccaaccccgctcgcctccccgccctctgcgctgccatcgagcggcacgagtcggctggccgccacgccgaggccctcgacctgttccgcctcgcccgcgcggcggctcccttcacgcccctcccggcccgcacctaccacgccctgctccgcgccgccgccgcgctgcgggagcccggcgcggccgcagcggtggcctggcacgtcgagagctccggcttcgagctcgacctgtacacgcacaaccacgtcctgaggatgtacctcgagtgcgggatgctcgccgaggcgcgccaggcgttcgacgggatgcccgaccggaacggcgtcacgtgggggatcatgatgggcggcctcgtcgaccggggccgcccccgcgccgcactggcgctgttcccggagatgtgggcggaggccggtggggacgctccgccgaggtccctcgtggtggctgaacgtgccgctgcggcctcggggtccggcgcgagccgggccgggaggctggacctgggtggggttggccaaaggccggcggggccccggagggatgaacattccccctgaacccgggacaccccctggacacgtggccgcccgcctggcttt

SEQ ID NO: 2066 - DNA, 794 bp, Zea mays
tcggtacccgctgatcctgtagagccgacctgcagcacatgcacctttttttctatgtgctaaacaaagcatatttgatcagaaataaactaggtcacattttggatgaaacatactgtttcacatctggtaatccataaagtgaataacagcactactgttggttaatctcataatcctttctcagttttagtgtcagaaaataaaaccattagatagttcgacatacccaattaccagtagtcaccacaagagcagaccccgagtttaaagtggtggaacctgctaccatccctaacaatgatttccctcttggtaactcttgacacaaacttaattaaattgtggcagtcactgcacaaacgatggctttgactgatcctcaagggagtctgtggggctgtgctgataagaccaaaagcaattgccagtctctcactgtggtaagctcttgatatcttttgctcgtcaggatgaatatcagggagcaattcattctcctcagcaacaaagccagcttctcgtacctccttcattaatgtatccagcctcctgtatatttcagcactttgtggatgcaaagtatctttaaagaaaaacctgtgatccgttttcttgactgtgatccagctacaggcattaccaatatataaacctttcctcttcaatgtttcaactaccttgcaggcactgtcctgtctaccagagctaacatacaagttgaggagcacaacatagctgtttattttctcaggttccattgccaatagctgctcggcagcaaattttgcaag

SEQ ID NO: 2067 - DNA, 752 bp, Zea mays
tcgccctcagcgaggtcctgcgtgtcgacgtagctgaagtccatccccggcgggatgacgaccatccgcggcatgtagcgtccgaggcagctgaggcccctgcggcggcgcacccggagcttgcgctccaccatgaggtcgaagccgtcgtagaggccccactgctcctcgatctcctgcttggtgctggtgaccaccatatcggcggcgtcgaggccggtctcctcggcctcgatccggcgcgcgatccggtaggtgccctggatctcggcgcgcggcatgcggcccagcttgagcagctgctccagcttgttccgccccagggagtggcccgtcatgaccatgggcacgttgagcgcgctggccaggtgcgccgccgcctccgccgcgtccgcgtagtggccgtggaccacgtacggccacaccggggcggccgcgcccgcgcccgcgccggcgtcgggctgctgctgctgctggtcccccagcgcgcgcgcgacgttggtgacgtgcgccagcgcgcggtccacgaactcggggatgtgcggccacagggactccttggggaggtacttgtcgcggggcccgcacgggaggcgcacgatgtaggccccgccgccgctgccgtcgccgtcgtcggcctgatgggtgatcatctcgacgggctccccgtaagtccaatcgacgtccgggcaggagatctggcgcgtgagtaggtccacgcggtgcacgccggcggtcgccgtcagcgcccg

SEQ ID NO: 2068 - DNA, 697 bp, Zea mays
gcttttttgacaccccagggctcatgttagggcaccatggatttccttatagggatgtcacagttcgtgtggagagtgcctggagctcaattaacctctatgatttactaatagtcatgtttgatgtcaataggcatcttaatctgtaagtcttcaatcttcatcacattttgtttaatttatatttcatgttagaaatcatgataaatgcacttttaaactatgtgttcatttatgcaggccagattcacgagttataaagttaattaaacgtttgggtacggaggtgaacccaaaccagaggcgtatattgtgcatgaataaggttgacttggtggaagacaagaaggacctacttaaagttgcaaaagaatttgaagatcttcctggatatgaaaggtttcataattcattagtcttctgtaggtttaccttgtcgttctataataccacttgccttactgaaattctggtaatgctaggtacttcatggtatctgggctaaaaggcaagggagtgaaagaccttgtacagtatttgatggagcaggtattttcttctatacatgttgttcatctgccttatctttctgaatcctgtagagtagaacttcatgagttatatactaagttcgtgtgcttagataatacccctttgttgttgttataaggtgaagtttgattggttacgatgtcca

SEQ ID NO: 2069 - DNA, 750 bp, Zea mays
catattaactcgtaagtacaacatgtttttcttgatacagttgagacttgatgttacaacattggggtttaaaaaaagttgtaattacttttttttgcattttagcctgtcttgtttagaaaagtaaaactgtgctttgggttcatcacacaaccatcacatgatctagtgcactctttattgtaaccttttgtctcttctgttcttcccaaaacagacaccatatcaaaacatatcccactttccacaggagtcgagagagcgtctgctggttgacccatggcactgacccatatagttctgaatatttgattttgatggttcaatatggtttaaggttctgaaaggcctggaggttgaggatgcatcttgttagattcaaccactttataaccctcagctgatatcctttgtcttctaggtatgttttctgctgggtgagttccaatgcattctttttgttttcaatttccccagcattgactgacgatactcctctagacatctaccaggcctctggtgtaaatgttgaactgtaggacatgagtaaaagagagccaatagaccagcgggttttgcaagtaaatagcttctttaactcgtacttactctattacttattttctcatcagtagccccatttccaaatgtaattgctttctggatccttgaactggatgcatctctccttgaactttatttatctctcatttcagatgcgtttcctttacatacatgaaagcagatgct

SEQ ID NO: 2070 - DNA, 805 bp, Zea mays
tacttgcgcccagatttgtaagcatcaacgattcttcgatgcaactaatgcccgttcttcttcactctgaacttttgatccccttttgaagctgaatgagaagctgtcagttaagaagccttctggtcaaattaagttgaaagttctaaaggatatatcaaaagagcatcagattgtttgggataccactaagagtgagcaggagcttttgaaagttgacctcctgaagagttgattatatgcacggctgaacctctattgtgctgagatcaaagcttgtcaattctagtattaaagattagcgtcgctggttttacattaaaattagaaatatatactcaatatttacattttcatcttattataaaattagtggaagcactggtagagtagatttttggaagcacggttagtattacatattcccttgaaattattagtctatacttgatttgagattttaagtgaactttagaagtttataatggtacacaggcttcgattccaggctggctccaccactggaaatggcggcactggtgccggagtgggctaccaaggagccctgcctcatggggatcgatgaggctggccgtggccctgtccttggtaaacgcttgcctctcttgtgatcggttaatatccatgttgcttcaaacttttttgagttttgttactgtattttatgtataaatgttcagttggccaaagtgaaataggatgagcactcatcctatttgtgcaaatgtgcttgaaattctagttggtttcgacgcatttcccaagcaaatgtcatgagggatga

SEQ ID NO: 2071 - DNA, 776 bp, Zea mays
atttgctcgtagggttgttcctagacaccattctggaactaagaggaattcctgatgaaatgcggatgtggtctgtgacagcttggctattcgatccctccacattcaccattggtacaagaggaaactacgaaccaatagtctgttcagtcatgctctggattctcatatgtttaatgaagggtgtaagctctgaatctcttatgctgtttgttcagttattgctacctctgtgaagttgccatggtggaatgagataggaccattaaaactgttccagcttgtgctctcatggactaatggatgcttttataactctgtttgttttaaattattttcatgtcaacataggatatgcatatgattgatctaaacagagtatgtaacttattcatatcagtgacttacttatgcattgtctcagatatcttttgtttgtttttgatagccaatattttatactacattgttagatcaaccttaccacatatgtagctgaactgcaagcccccagtttgtacatagtgatttctttttgccttgaaatgtataaagtactagttatgccacttgtgcagacatggtttatcagggtttgacagctgaattttagaatatttatcttcttatatgcactgtgtgtagttgtttctccttgaagacattactaatttatgaagtcaaatctaaacattcgttgaaccatatgatttgctaattacactttgcttttttttggaaccaccatacccccccaaaaaaaaagagcttttgtc

SEQ ID NO: 2072 - DNA, 553 bp, Zea mays
tggtgcagggccggggcggcctggtgctcggctccctcatcccctgcgcgctcttctacttcttccagctctacatcaagcgcaaccgccccgcgccggcgccggcgccggcgccggcgccgggctccccgccgcccgcggccgcctccccgatcctccgctcccactcgcggggcctcctcacgccgcgcgccgcgctgccgtcgctctccgcgcgcggggccgtcgtgcgggccggggacgaggactcgctctactacgccggtctccgtcggtgcgccgccgacccttaccaccccgcgtccaaccccgacggtgtcgtcaacctcggcctcgccgagaaccacgtacggatcgtctcatggatactctattttgttatccgcttccctgatttttctgtactgatggatggcccgcctgactccgcgcgcgcgcgcgcagctgtcgctggatttggtggggcggtggatggaggagcacgcgggggcggcgatgctggacggcctcgcggcagccggggacgaggtcagggacctcaccatcagggggc

SEQ ID NO: 2073 - DNA, 824 bp, Zea mays
ttgtttgggtctacaaacattgggttgacagatctcgatgtactcttccactgtaaacaacacattttgagacattttaagctttaccatcatagagcaaggaggatcaagtatatatagatgttctgagagcaagagttcctacctggtgtgaaaatgcatatgcaagcgctctttctcttcttatcgccgcctcttgcctgcttatcaggcttgcctcgatttgctccttggattgggtgctgtcatcccagttctcacccatctgatatatcattattcacagacagaatatgtttagttctctcaataatatcttataactatctcaaggctttaagcagattagagctttgagaaggtttgcatactctgaaattctccagttcctgtttaagtaggagctggcgttggagagcctggttctcctcggacatctttgctctcctggaagatatctgtgactgcacccgtgatagagtttgcatgcagcgcagagtgcttgcagattgacgctttactgaattaccctcaaccaatgacttcaatcgaacaaggcctcgcagtgctcgtagtgccctccttgcctacattatcacaatgaccgaacactctcagcataacattgttttgtaaaagtaagattcttgtttttttctttccttttttttgtggcaaagtgtaaaagtaagattccgctttactatgaaacaagtaaaattcccatgaagtcctactttccaaaagaacagaaactacgtccactaatagccgatctcatatggatagttcaatagcagggcagacaggcttaattacaaggg

SEQ ID NO: 2074 - DNA, 752 bp, Zea mays
aaacacataaggccatgcattaaactgttaaggaataagcatacctattgggtaaataaattgcacagccagtttcaacacatcatgtgaagcaattcgtaagacattcaacccattaagcaatacgcatatacaatataacagccatctgagaatgaacacaaataataccaagaatttaattagtaaaatgacacggattggcatatactacttccgttctcgaatatttgtggtccgctagttcatttttgaactaaaatgcaacaaataaaaaagaacagagagagtacatctttaggaagacagatgaaaggaatcgatgaacagaagatttcgcccaagtgacatgcagtggatctaaattaaaccaaaagctacatgttctagagcagaccatttcaatgcatgaacaaaactgaactttgtattacctgagtacagatgcatgactgaacagtgcatggctacttcaacaatgcttatggaaacaggattggactggcattgctgcatcctaatttagttcactatatgcaaacaataccctcgcactccatgttatttgtagcttagaaacacatgcagatctaaatactacccctatcccagaatgtattacatttcattaactttgcatcttgatcaaatctcagttattgagttatttctcacaaattactacagataccccaaaagctccaaagcagttcacagtaatttggaccaacaacaatcacatcaaacttaag

SEQ ID NO: 2075 - DNA, 775 bp, Zea mays
cggtacgtgaacgccaccagggatccttggaccgtcctcaacgacttgatccttcggttccttagaacgaggacggtagccagaacgatggcggtgactgcggcgacgaaggaggagcccgcgacgacgagcccgatgatcagtttcttggtgttcccgttgctagagaactcggaggcagcgaggcggatcgagatgctgccgcctccggtgccactgccagcgctcgtcgtgtcctgaaggttgatgaggtccccataccacagcgagcagccgccgctgtaggagtaagcggtgcaagagcagttgcggaggcacgcgagctcgcagtcgtgagcgctcgcggccgccgcgctccgcgcgtcgctcggcagcctcacgtcgggcatcgtgtagaacctatcgtcgtccctgcggcgcttctgcccgtctcgagcggcggcgccggcgccgcaaggctggagtgcggtgttcctggcgcatcccgcggtgtggtcgtcctgcatccactcggccaggtcgcgctcccggaacccccgggggcaggtgcaggacggcagcgcgttctcggtgcacaggccgaagggcccgcacaccgcgtacacgtcgcactgccgcttgggctccgaccagaagagcacccactgggcggcggcccgccacccacgtgaggaactggatctgccccgtcacgtccacctggaaccgcgtcaccaccgactcgttcgcgacgtcgtaagtgaagtagctcttgttggcgccgtcgacgtagccg

SEQ ID NO: 2076 - DNA, 767 bp, Zea mays
tgggccaatggcacgttgcagatgagtatgatggccaggtgagggaacttaattgtaaatcaatatgccatagtccaatgtgtcctccttattcagcaatgacagagtggcagcatatagttctttcagctgacaaaatggatctggtatgtttctactgtataacagaatattccattatggcagataatagttcttggcaattttcttgatgtcataagtaatattgatctctgaccataatttttaggtatttgagacagtacagcaagtacatgatgttccatttggttccttctttgaggtacttatggaaaatattgatcgcagtttcctgccctctttcattttttagaacttagcatttctcagtgctacaactgttatcttccaatagtacagtgattccgctatgttactcttcaggtgcactgtaggtggtgtgtgaaaactatcagttctaactcgtgcagtctcaacataagtgctggtcggtgatttcttctgatccctttgtctagatcatgtgctctcctatttctttttctgtgatagcttttctctactgaaggtgcaatgaaatttaatgtttttatgaatataatcgccatgctgtattttcaggtgcgcatttcaagaaatggtgcatcatgcaatctaagataaagagtggtgctgtggatgaggtatgtgtttatatttactgagcttttgtgtgtatgatattttgtagtgaatttaatccaatgtcttcaaaatttttaaaa

SEQ ID NO: 2077 - DNA, 566 bp, Zea mays
tggaacgtctggagagggtactccgcttggttctgtgtgtcatctgggtgaatcaacctcatgtcccttatcacgatcgtgtgcttgcagttcccctgaaaacgtgcagcagggtatcagaaaacatggttgaatgatctgataactctgttttgctgttggcacggtaaggctgcgccatgaataatgcagtgcagctgaagctagtaatgagcaaacatcaataatcatccgcattgcagttcagataatgaatgttagattccatcaaaagcatagcataagaaagcaacgtatgctcccattttacacctttttatctttttattgaaggaaagaaccaagcctgtctggttagcacaatgtgacataaagcaaccctgcccaatgtttttgtatctcatattacgaccgacaaacattcaacttcaacataagatatgacacccaaatgaattctaatataaaagatatgaaaaaacgaaggaaatcaaatccacgcacaaacttttcaccaaggaaaatggaactatctgaaacagtaaggcgaaagagaagacaggaac

SEQ ID NO: 2078 - DNA, 984 bp, Zea mays
tcagtaacggtggctgatggcagtgccatgcagtgggaggaatccaagcctaagcaccggataactcatacagaaggatagaggaagagaaccgggtggcttgacacctggtgcgctgaggaagagcggtatggatggagttgagatccattgctgccgcaccgcagtcataggtgtgtctcgatggtgtctcaagcggtttggactatctagcaccgtgagttttctcaggacctcaaggtattgcctctgcctacctttgacctcattttgggtatggatcggcttggaaacacaagtgggtattaattcagtatcaaggagcaccggtattgttacaaggcaccagtcaggaggagccagctactatcctgcttcacatttcagcttacagacacgtcagaacaaacattacaacctgaggtgtccaagctgttagatgattttgctctggtattttctaagccgacttttctgccacctgtaagagcttgtgatcatgtgattccattggtgccgggtgctaggccagtgaatatacgcccttataggtaccctcctctcaaagatggaattgagaattaggttgctgaaattaggtatcattcggcctagtttgtcagctttctcatccccggttctgttggttcgcaaaaagtatggctcgttccaattctgtggtgattatcgttacttgaatgccctcactattaagagcaaattccctattcctgtcttcgaacaactcatggacgagttagctggagctagttggttctctacattggacttactctcaggatatcaccaagttcgtttgagagcagacgaggaatttaaaactgcacttcaaactcaccacgacccagttgagtttttggtaatggcatttggtctttctggggcgccagctacattccaaggggcaatgaacacaactctagcaccattggtgaggaaatgtggcattgtgtttttcgatga

SEQ ID NO: 2079 - DNA, 1384 bp, Zea mays
tgtaactagacatacataccgtacctgcaccgcgcccagatctggggcgtgcagatttggacaaaaaaaaacgagggtaatcgagcaagcagagcagcattgtctgtcatgtgcggcagggcctctgccatgtgccgctgctggcctgctgtacgtcgcgatcgtcagggcccctatgccttcatgtgagctactactactactggcggctagcgcatccccatgacgcatcatcactgactgctggatcatgcatgagatataggtgtacatttgtgctgtaactaataggccggtccaaagcacataatttctggcacaatccatatctggcatggcccaacttaattgtgggcttaggccggcacgacccacattatgggttgtgcctaagcctcaagtcaagcccacgggccgacctgacacgactcatttaactaaggcacatcgaggcccactaaatatagactcagtatttaactaaggttcgtcaaagctcacatgactagcacaacttagagaatctagagctttaataggccttcgagaaccaatacctagatggggatagtgaatagtgatgatgattattgtatatgaattttgtatgactgtatagtactcaattaaacactgaacagagaactgaatattatttctgagctagttgtaatattttttctttatgaccaaaggtttttaatgtgcattcacaaaacatcttagttttattttgatcatatatatattatatactttttgtttatgtattgttgttgtatatatataggccgatctggcacattaaggcattttgggttatttgggccggcctggcacacataactaattgtgggccgtgccgtgggccgatgactgggcacacatgctggcacggcacgacccataattagatatgtgcttttgtgcgccgtgcctttgtgggccgtgcttttgtgggcctgtgccgtgccgggccaggccggcccacatgtacaggtatacttcagggcgacccccggtgtcgttgcaaaatcaaacaagggatacaatatcacatgtgcaacgtacggtagtgatatagaatagcacgatgacaaggagcctccggcgagcgaggatgccatgcctagcgacacttcctggccctccgccccccgtacgtagcgacacctttctgtttctgccccgcgccgaggttgcctttcttgtcgtgtgccggacgaggagggctaccaagagtccgttcccagacggccagacccagcacgtacgacttccaactaccagccacgtcgtcagactcagctgtttgcttcagcaatcagtcgtcgtcagccacggacacacgacacgagcagaggaagctgaactcttgcttgtt

SEQ ID NO: 2080 - DNA, 781 bp, Zea mays
acactgtggatgtcggggatgaacctgactggtcgcatccccgacaagctgtcgtcgctcactgagctgacgacgttggccttgagcgtaaacaagcttcacggtgaaatcccggcgtgggtttggagcctccagaagcttcagatcctgtacctctacgataacagcttcaccggtgcaattgggccggacatcaccgccgtgagcctgcaagagatcgacctctcctcgaactggctcaacggaaccataccggagagcatgggcgatttgagggacctgacgttgctcttcctgtacttcaacaacctcaccggaccgattccgtcgagcgtggggcttctcccgaacctcaccgatatccggctgttcaacaaccggctctctggacccctcccgccggagctcgggaaacactcgccgctggccaacctcgaagtgagcaacaacctcctcagaggcgagctcccggacaccctctgcctcaacaggaagctctacgacctcgtcgtcttcaacaacagcttctccggcgttttcccggcgaacctcgcggactgcgacacggtgaacaacatcatggcgtacaataacctcttcaccggcgagttccccgagaaggtatggtcggggttcccagtcctgacgactgtcatgatccagaacaacagcttcactggcactatgcccagtgcgatatccctccaacatcacacggatcgagatggggaacaaccgattctccggcgacgtgccgacctccgcaccggggctgaagacg

SEQ ID NO: 2081 - DNA, 762 bp, Zea mays
acttgcttcatcgacggccgggacggcgcgtcgtccccggtgcacatgaccccgagcttgaacacggccacggcgtcgtcgacatacacggccctgtcctggatggtctcgtccacgacgtcgtggagagggtcccccgccttgtacctccgccacgcccactccaccaggcagcagtcagcggcgtccttgctgctgtcgttggctaccctcccggtcgccagctccagcagcaccacgccgaagctgtacacgtctaccttctggttcaccttggcaccgcgtccgtactctgcatccaattccaaccatagcagatcagcagagtgtcgattcatttaagcctcctgagaagaccagaagggttggccagctggtgactgtcgtacggccgattaagaacgcacctggagccatgtatccgaaggtgccaccgacggcggacacggactcgggctcgccggacttgagcaggatccgggcgagcccgaagtcggcgatcttggcacggaaccccgggtcgagcaggatgttgctggacttgacgtcccggtgcatgatgggctgcgcgcactcgtcgtgcatgtagctgagccccctcgccgcgtcgatggcgatgcccagccgcgtcggccagtccagcgccgccgtggccgcgttgtccttggggtgcagccaccggtcgaggctgccgttctccatgtactcgtaccacagcagcttggtgtcctcgctcgagatgtaccagaggaagctcacgat

SEQ ID NO: 2082 - DNA, 752 bp, Zea mays
cttgagctcctgaataggttgttatccccagcctcctaggtgctggtggccctggtcgtcggtttttgttgttcttttgtgtaaaacctagctgtctgtacttgggttgggtcattttgaccttactcgttgtctttttttaaatgaaatgacatgcagctctccccggtcgttcgagaaaaaaaagatggcatgaacatgtccaattcatagaacattgaacaactaagttatttttgtgtttaagttttctttacattaacctttttttcctccaaacaccccgattctattttgttacactcaggatgttggggggctaactatgtgtcaatgcagatcaatcaataattttatcgaactcttttgggtacctcgccgtcaactacttcatagatcaagggtgcgatgttgcaacattgtagccatgatcgtcaagtagaaatggacacaagtctatgccttacacggtcatgaaacagactcgatcatccgaaagggtatcaaacgctacactcgttgaagggtacttagtacaccatctaacatgtggatgtaatgtcccttaggggagggcgattgagttcctggtgaaacactttgaagggcatatcatgtcaggaggagctgaggacttagtcttaaagtcccataggtgaggacgattgagttcttggtgagatactccaaagggcacaatgtgtcaggaaggaactgagggatttcaatcgtttgaaacaaaatatctcgtc

SEQ ID NO: 2083 - DNA, 737 bp, Zea mays
cttcaaaatctcggaattaccatccttgctggaactatcacatctactgatcaggcaggcctcgagccctcgatttcatcttgaaataaagcttgtccttttaagttcattatcaatgagagttttgttagagatttatgacattaattagtataccacataagattttttatgacataccgatatatttattatgaaatatgtaaaaataaattcatcaccataaaactatgtcaaacactgctaaggtattgaaaagcgcgtgaaatcattattgataacaatttattttatatctatctatttctatttgttatttaggtgcaacatttaagtcaagtgttaccctattaaattatgttataaaactcttggttaaaagaacatattttattctttattttatcttacttttattgacatgacaatgttgaaaatggtgtgacgaagctagcacgcgaaatatcctaaccccagttggaagcgagctggtcgttgtcgacactcgacagtaacccaaggcttattattgtatttgcatttttggttttggatgctggtatggcaggcatcttcaggaggatgctacgaatatccgccctcagtcacccgtgtaccaaggtttattttcaagctatcacatcatgtcagtttgaatttgacagtcattgcaacggttctctctctggaaatttctaaatttcattattttaagcctaatgcggagaacctgtaga

SEQ ID NO: 2084 - DNA, 841 bp, Zea mays
agcttgcatgcctgcaggtaggtcaatttacaatcgctttcagaatttctcttcacctcaccggtggtgaccaaggggattcaaataagagctgaactttttttttctttcttttactcacagctccatgcggtcgcggagcttgagcaggaagcgctcgttgtcctcctcggcggtgcgcacgaggcgctcgatgaggttcttgcgctcctgcatgccgagcccctggatgtccacctcctcgacgccggcgccggccgcgttccccgtgaggatgcccttgcgcatgcggtcgtaggtgggcagcttctcgatggccgcccagcgcagcgcctcctcgtcgtcctcctcccgcacggaccggccgaacgcgtcgctccgcccggacgcccgccacgacgacgccgtccgccgcatgctcccgccggcgatgctccccatctgcactaagtccatcctcgcgcgccctcagggcctcggttcggttttttttttttctttcccgccggcgatgcaaaccccctccgtttttttgtctttcctgacgaacacttctccctgcttgagcttgagtgcttgactctgtgttctttgtctttttgctgtaggcctgtagctctaggcgtgtagcttgctgctctccgtgaagaaaaggaagggagagggagagagagagatgttcgtagtgtctgatgaatgaggaggaggtggcgaccaggtataaatacctgcgcgtgctaatgctcgtcggggaaggtgattagtgccttgggggaggtggcgggccgccttcgtcacttgaattcggggaaaactcggccgttggactactaagtttatc

SEQ ID NO: 2085 - DNA, 894 bp, Zea mays
tgattttctcatcagtactgttatttcatgacgaggacctgtactcgttactttttttgttgagaacaaccacaccctgtcgtttaggtttgcttatgttgttggcaaggtgagaacggtgcgctgatcctctgttttgattctagtctcttgttgacgctgccatggccgagcttgacatggccgaagatgctactaccagagatggctcgatgtatgagaacggcgtggtttgaacacccaaagggggctgccagctgtcatgtagtcatgtctgcttgtgaggtttactaatttgttagatttgtagtttggatttgccatgtataatagaactgtactgtaactagaaacgggaaaatgttgtgtaaggatcagggaatgaatggctgcacacaatgcacatttgctatggcttgtttttttttttcaaagttgaatttattagccggcctgactattgctgatacggtatgatctgccctaataccagggctgttcagttaggcaggtttgacttaagaaacgttcgtgttctgtttgccaatgacatatatcatgctggcttgttgatgcctgagcttgacgcggtcaatgataccccgaaggtagttgccgagcctgaagaggcaaatacagtcaaaagagtacaaaactttttgtctggacaaattggcgctattgtgactgtaatttagaagcgcccgccgtttcaccgcccgtatgccccgggccgccgaaccgtcacgcggggctcgccagacccgatgacccgattcatcttggttcaatggtttttcataattgttagaattctaaatatttttagtttaaaaaagtaataaaatagagtcaatcctaatctggatctgattcttacattttggactggaa

SEQ ID NO: 2086 - DNA, 803 bp, Zea mays
catgtttataaaaattgacttttatctcattgacttatgcaaatctctatgatcatgaaggatctgttccccacattttccttccctaggaacatgtagtgtgaaaacagtaacactgagtccctgatttccttttgctcagatagcttataaatttacttggctgatctggtctagattaaaacctaccatgtttgtctttcttggttttacagacaaattcttgatttctgagagttggcaattttctacaatcttaccatgttgttgcgtctaaatcaaagaactggcaatcctatatctagtgacaagatatgatggtccttgtctgctcatccaggaaccttcaccagaccaattaggctatgtaatttctgatatttgagttagtatgcagtgttgaagagcaaactattgcacagttgttatttaatcttatttttcaaagcgtgtatattctgttctttcagaaaaaagagatcatattagttcaattttggtctttgcagatgtcttgaaggagctgttacatgccttcccctcactagcaatgacaacaaattctgtaaatgccacagctttggacactgctgcaactcagggccacattgacattgttaatcttctgctagaaacagatgcaagccttgctaggattgcaaaaaataatggaaagacagttttgcattcagcagcaagaatgggttcatgtggagggtggtaacctgctctattaaaataaggatcccagggcttgggtttcagaaccaaatagaaagggaccaaacaggctctaccacatg

SEQ ID NO: 2087 - DNA, 577 bp, Zea mays
cttgcatgcctgcagcacaactaggaacttactcttcttcacttgaaggatcaactaactctgaacgttggccctttcttgcctgcataagccatatgtggaaatcagtaaggttaacatactatagtcgatcattataaaaaaaaatactttacgaactgaagaaaatcagtgtgttatagaagcgtgtctggtaatgccttcccaaaaaaaactttttttggtgcaagacattatagaatcataggtctagctacgtgaacatatgaagagaaaaagagcagaaaagcagacttattgcttacattgctccgtccccataagttagtacgcttcacatgctgctgaattccattgggtttgctagagtgtctgtccttggaatattcagctgcacgaccaggtaatggaactccagcatccaaagacaaaagaatttctcccactgataatggagtttcatgactggacgccagatttgatggtttctttccattttctattaaacgacttaggggagtatcatttaaatttacatttggttcaagtgtgttatcctcaacagagagctcagcgt

SEQ ID NO: 2088 - DNA, 791 bp, Zea mays
atccgtatcttctcaattacttctcttgtttgtgtatttgttgtgcttcctgttaattatcatgggaaagagatgaatcacaatcatattccggaagagtcactgaatgtttttactatagccaatatcgtcgaagaatctcgaaagtaagatctgcatcttcattccatttacctgataacccacttttggcctgtaccctgttgttataattttttaaagatggtaacattgtaagattatttaattatatgaaagattatgtcactgcatcaaatacaaagggtaaaagacttgacaagtgaccattggcaaatctttggaagaagagaaaaaaaaaatcaatcatggtccttggtcttgggtgaagaatgaataatatttggcccagttattttgtttttccttctctaggccaaacaatattaactattcagcagtatgttgtattatgaggttccttactttcctttctcatgtaaaactttccttactttccttttattaaagctactaggaatcattatatgttgtatggctgaagtaaaacctaacacatctcccaaattggacgagtaactgaattgcaagttggaattatcatacatatcattctttaatactttcgtcatagcaagctaatgacatccctgtcgtttattgttgtgatataatatacgtttcatgcaattacgcccctccaactatttttgaagagacttgtggttctttgtcggctttttctttgtgcaggctttgggtgcactgctctgctttatatgtcataacaa

SEQ ID NO: 2089 - DNA, 687 bp, Zea mays
accaatgtgtcctgtaaagtatctctgattggcattcaaagtaagtgtcatgacatgtccattctaaaaattttcaatatgtgtgcatgatggtgctgagggaagtaagaattggttgaccgtccttctaggtttggattaagtaaaaaaaatgactatgtttataaaaaatattatcaacatttgtttctccaaataggtttacttattaattttttggaaaaatagcaggagctctgcctttcattaaagcggaaaagagggtacatagaaacagataacattcatctcatcaggagtacacctcctgctgggagagattagaagaaatggaccagcaggagccaagatagaactggagactaaacaccatactaatcaccagacccagctgctaatggatagcaacactcttgaagagtgaaaggctctctttaattttccttcggttacgctctttccagatattacacatggtgtagatcacagttccattgaattctcttctgtggtctctcgtgatgtgagaagtcgtcaattcccaccactcactaatgctatcgaagtttgttgggtttgcttgatgcagcaatgtcagtccttcctaattgagaatctgattccagacttcttgggccaaagggcactgcaaacaaaggtggggtccactttctagaggtccatggt

SEQ ID NO: 2090 - DNA, 774 bp, Zea mays
agtgggctctacgcgttcctctgcccttttttccttgtctgccaccgtccacgcgctcgggtcggcgcactgccggagtgcctttcttcttttttccacattccacatggctccctccgctgctaccccacccacacacacacacacacacacacacacacggcacaccatttttttttatttttactgttcttgtaaaatttctatgtttaaacctttgtttggttgttttattatttcattttattatctctatctcagcactactagcaataacgccaagatggttagatgtcacagatcacggcatcgagcttgacatcataggtagtcacgacatctagcttgacgtcgagctacctgcgctatgttctgttgtctcctctattctcttcttctctttactgacggtagctcaaataaaaaaaaaactaaaccactcaatagatataaatttaaagatttttctttcaaaataatttttttttgttaaaaaaaaatcgatttggctggagaagcagcgcctcggctacgtccgcggcgagatcacgccctcctgctccggtttgactcatctgaccacgcgctctttcgcaccgcggctccaatggctgacttgaccgcgcggtcagcgttccaccgggatcacgccctccttttgcctgccctcccgagtctccgtcgcacgacttttgcctgtaaattaatgctgtataatttaatagtacaatataggagtagcccatttcttcgtcataaaacgggaagccaaaa

SEQ ID NO: 2091 - DNA, 728 bp, Zea mays
tgaggacctccaccgcctggctcatcaggggccgcgccttggggtcccggctgaggcaggcgcgcgctagctgcgccgccttctgcgcgcccttcacagagaagttgccctccagccgagggtcaaccagcttgtagaaccgctgcctctcccctaggaggggccgtgcccattccaccaggttgtgctccccgttgggccgattcttgtccattgacctgcgccccgacatcatctcaagaagcacgaccccgaagctgtagacatcgctctttgatgtcagatgacctgacaaagtgggacagaaagaccaaaaaaaaatgcacgtcaagcaaagaccagaccagaccagacgtgtaaacagtagagtaaaagggtgtttaaatcttaagagaacagggtcgtcaaattattccttcaatattatgaatgtgaagccaatgcaaatctaggtaaagacttcagcccccacaaacaaaaattctattgatgtcatctgaggatatgtgactgctggggtcaactcactgagaatatctacattctacatgaactatcatgcccccaataccccaatacaaacataccactaatggaaacttgacatattatccaaacaagtatggcatgcggcactaaagcattattacaacgtccctcaacgagcataacttccaaccttaatagggtgtttggtttgaggaataagctagtccatcatcttctcc

SEQ ID NO: 2092 - DNA, 767 bp, Zea mays
tacatgattattagttttcctgtttggttcagttttgcaactgctttacttctctacagagaaggctcacacgattctttatcagaaacattatccaaagagccaactgctgaatcaataagtgacgtcagtcttgttcagagggcagccttttacctttcttgggtgctatgcccttctaatgatgatcaatgcgagatgctatcaaacaatatattggaaatatcacattcttgggctaggaacaacaaaaagtgcctgagctaccaaattactatgaaccataggaggaaactgcaaatacccacagctgcgaagtcagagaaatttcatgtgtcaataaacactgtaagctcccttgttaaagaatttgatgatagctgtgtgcctgtgtaaaatgttgtagcacaactgcctttcctcaagtgcaagatggaaaactagcggatctccatccttcaaactttaacctaatattgcatcagtggattcctttaggagtattgcttatatcacctagttgtgctaacgagcagaactgtgacatccttctgtgctacacaagcactggggaagattctggtatcaaatgaagcacaaataagaacaaaagattattccagtaatgatggtttcttaggcagctgcattgatagctgagagatgggctttgattggagcatatctcatctttatctggcttgacgtagttgaggatatgtcctcattgatatttggttgcgaagatagatgtcatcgttctgtca

SEQ ID NO: 2093 - DNA, 733 bp, Zea mays
cgtcttcctgtggccagcgctctctgctctctattattcactgctctctattgttcttatgaccaatgaagtcaaacatggtaggctcattacacattgcatgcagtaggatttaacttcgacagtcactaacggtcttgttttgtggggcccactggacgccgtcagggccgttaaccagttttaactctgaggatcactaacggatgtcgaacgtaagctcgtccgacggcggccgtcgaaaataagtttatttccgaccttttataaacgacagactcatgccgtcataaaaaaacctaaaccatcagaaataacttatattcgatggcataagtcttattttcaacagcaaaagctatcggaaaaatacctttttattgttgtgagagaaaggaaagaaatcgacatggatagcaaacaatttgccagccctctagctaacaattagccaactaatttggaattcaaggtactaaaatcagccgataaactatttgccagataggttgaaagcatgccctaaatgaacagcgtgacagtcacgcgaaaatttaggatacaattgacgacgacgtgcagctcaataggagatcggatgcgatcagctccgttgagcatagcattcgccatcaatttataaacatcgtacaccagtaactgtcttttcttttgttaacaataagtctatagtgaataactaattttctttggttaccattaacagttacac

SEQ ID NO: 2094 - DNA, 744 bp, Zea mays
ttgtgccaagagaggagaggagaggagacgtgcagagagccagagactgttggcgggtaggttataataggagaggagaggagacgtgcagtgactgtagatgggctaaaaaaggcccaataactaaaccctagccgggacgaccaggacacataagtcggacgactagtcgccctagtcgacgattagtcagatgaccaggacgactaggttgtctggtcgagtcgtccagcaaatcgtgtactaattaccgaccagcccgactaatcgtgattaatcgcgattagtcggacgacttgaaatcattgtgaatctatacaatttaagcaagtagttgcaaatctttcagcaacatctcatagaggctcttctatgtaagcaaggtcacacattggctagcttcaggaaattcagtcgatcaaggtgagttatggacttgtactatttaaatcaaggaacaattaacaaaatctaaaatgaaatgaagggaaatgataagatgggccatgggtaggcgtatgactaacaagtaggtaaagactaatactagaatcggcatcactgacaagaagagcaagcatgccccccatttaactgttaaaaaaccattaggagtaatttgagctttaatcctttacaatctggaaaaaatatcttttgactagttgagggcatgggcgggcaaaaatagctaaccttgactcaattctgaatacaattactgtagctaaacataaggatcta

SEQ ID NO: 2095 - DNA, 829 bp, Zea mays
tacgatccatctcggtccccgcgaaaccctctttagtcgacctgcagtgtcagacaggctcttcctttccatagtttcagtcgacagcggaaggacaattgcaaagtccagcaaagtagcttctcggagtgggatatgccagtggcctgacacaatcttggaacccatatggttctccaaggacgaagtctccaaagaattcgaagattgccagtacaagattattgtttccttggtctgtactggaatgcatacctcacctgttcttcttggatgtccgcttcctgcttcaatcttgataccattgttgggtcagtcactaacaactgccctcgtgtaatgttctgttccagggatcgacaaaatctggcattcttggggagatttttctaaatctgtctaattttctgaatatagtcgatccaaccgcaatctctttgccactgaagagatgcaacgccggaacagttttacaggtgtgtttcggttatttattacacgtcttcgttttcatgggccatttgggcatagcttacatgatttggtagcgaatgaaaaaaaatgctggtattgcattcccatcataggtgccaactgttacataagtgcctatttcatgcttgtgcttttgagagcatacctgatggtgtccttactactgcttatgttgatggccatatttttcccctcacgtgcagcttaaggtccaatgtcttggcacaaagtctaagctgaggtaactagactgaaccctcaatatttcattcttgccaagtttctgtcagtcttctcttcactcaaatcctgaattttgacaatgctccatttt

SEQ ID NO: 2096 - DNA, 782 bp, Zea mays
atatgccttactggagggaaagaagtgaacaaagaaatcatgagtaatgtacaagacttggccaaggcattttcagaatacaaagatgaagtcctggtatgcttttggtttttcctttaggagaatctgttgtctttagaaaaaaacatgacattaacttatgttgtttattaattgttgaaactagaagtatctaataattggatatttctgctgcttagttacctaactgtaccattctgggatacaaccattggatggagcttttcttcttagacctgaatatattttcacttttttggtccatttatgttgtccacgtttttttattcttgaatgcaggggtgccaaactgtgctttattttatcccaaaatagctgcttaagtgtgtgtgtgtgtgtgtgtgtgtgtgtgttctcaaaaatcatataagtgtttgtatactcttaacagctaacactcgcactcgttttttcttgaagttgaaatcgaagttagtgttaagatgcactactcaagttttagtaccatattgattttggtcaagattagagactaatagacactggttttaaaattattgtattattattttttaatacttcagatttagttatttgatagtttttatctagacttggggtcctcatttacttttattattgatctggggcctgcacatcaatacatcaaccgagtccctaatgtctgacaatatgattttcaactggctttttttaatccttggagttgagccttatgccccttaagtttcccggtt

SEQ ID NO: 2097 - DNA, 772 bp, Zea mays
tgcgcacggtccccgaggcgccgccgctcgcgcgcgtggttttgaacggccgcgtgctcaccttaattgcgctttccttgcaggcggctggggatcgcgacggcgctggtggagcgcgcggaggagtggtgccgtgagcgcggcgcggcgcacgcgacgatggcgacgacgacgtccaacgcggcgtcgctggcgctgttcacgggccggttcgggtacgcgccgttccggcggccggagttcctgggccggccggtgcacgcgcattgcctgcccataccgagcgcgcaccgcgtgttccagctgccgccgccgctggcggccgcggcgtacgcgcgcctgtccccgccgcaggctacggagttcctccccgcggacatgccggcgctgctcgcccacaagctcacgctgggcacgttcgcggccatcgagagcgggccggacccgtccgccccgccgtccttcgccgtgctcagcgtctgggactccacccgctccatgcgcctccgcgtgcgccggcgcgcccgcgctgctccgcgcgtcgctcgccgcgctccgggcgctcgaccgcggcgcgccgtggatgcgcgtcccctccatcccggacatcttccgccccttcggcgcctacctcctctacggcctccgcatgtccggccccgcgggcccccggcctgcttcgctccctctgccaccacgcccacaacgtggccccggaagaaccccggcctgcgccgtcgttgccggcgaccttgggcccgaagacccaacc

SEQ ID NO: 2098 - DNA, 634 bp, Zea mays
atctcgaggcgccgccgcatcatggtttgaacggctgtgtgctgacgctaattgcgctttcttgcaggcggctggggatcgcgacggcgctggtggagcgcgcggaggagtggtggcgtgagcgcggtgcggcgcacgcgacgatggcgacgaccacgtccaacgcggcgtcactggcgctgttcacgggccggttcgggtacacgccgttccggcggccggagttcctgggaaggccggtgcacgcgcaccgcctgcccatcccgagcgcgcaccgcgtgttccagctgccgccgccgctggcggccgcggcctacgcgcgcctgtccccgccgcaggccacggagttcctccccgccgacatgccggcgctgctggcccacaagctcacgctgggcacgttcgtggccgtcgagagcggcccgccggagccggaccagtccgcgcccccgtccttcgccgtgctcagcgtctgggactccacccgctccatgcgcctccgcgtgcgcggcgcgcgcgcgctgctccgcgcgtcgctcgccgcgctcagggcgctcgaccgtggcgcgccgtggatgcgcgtcccctccgtcccggacatttttccgcccctttggcgcctaccttcttttcg

SEQ ID NO: 2099 - DNA, 808 bp, Zea mays
agccacctggtaccttctgaccctgaaagtgcatgaacttctgccaaagaacagcaaagacttacaggaaaaagaaagtgttcaaattatctacttactggtttcatctttttgcctttatggcctgggggtactgctttcctagcagttgaagatgatggctgtgttggtgtagccagctgttgtgaatgcatcgcaggaggcggtgcaggtaaagcaggaacagattgagatgtcttttgcctcttacggccagaggtggtaggactgggaacagagtcatgaatcagttgtgggttattagacaagcttgcctgaagccctcctgttgatctccattcccttaaacaaaaaggcatcataggtttcaaatgctgaaaaccaagataatgtgcatactgttactacaaaaaatactattcatgttaccttatgctacatataatattatcgttgttgactctatttaacagttccctgtgtgctttgtcagatactcttagctccttcctaagttcagtcatgagaccttccttctcctgagaagattagggtttgagaaatgacatctaaatcatcagacaccaaataaacagtggacagtttaatggtctcaacccatgtaatggcatcagactgggctttgaatgcacgaaggactgagcgatatgcttcttgctcaagttgttgaacttgtgctaccatatcagttggtgccctagcatatgaaccagcaggaacaacaggctcgcccattaccactgacacgtacgctgcctctgatactcttatgtggaaattgtggaaa

SEQ ID NO: 2100 - DNA, 830 bp, Zea mays
cgcaccccggattctatagatcgacctgcaggcagaaaagtatgaggctgtgggcatttctgttgtcagtctattgggtttccttcgtcacctatttcgtcctatggaaatcctacaagcacgtgtcgaatttgagagctactgcaagatcagcaccagatgttaaaccagaggagtttgcggtgttggtgagagatatccctagaccgtctccagatgaaactataaaggactctgtagactcatattttcgagcccttcacccaaatactttctacagatcaatggttgtgacagatcacacaaaggtacttctactcttgatttatagagagagggatcgcttctcccttgtccttttgttatgtttttcctgtctgcttgtaagatatgtctaaaaatagccccaaaagaaacagaaacagaaacagaaactttattctattctgatcacattgcattgcaggctgataagatataccgagagatcgaaggtcacaagcggaaaattgctcgcgccgaagtcgtatatgcaaactcgaaaactgaaagtaatactgagggcacaaggcctactcataggactggattccttggtcttattggtacaaaggttgacaccattgaatactgtagtgagcagattaaggaattactgcccaaactggaggctgaacagaagactacccttcatgagaaacagcagcgggctgccattgtcgtcttcaatagtaggtctgccgcagctttcgcatctcagactctccatgctcaagtgtatgataaatggacagttatggaagcttctgaaccacgccagattatatggc

SEQ ID NO: 2101 - DNA, 713 bp, Zea mays
gtatcatttggcttggggatttgaattatcggattgccctatcgtactgctcggcaaaagctcttgtcgaaatgcataactggaagcaacttttagagaaagatcaggtagtttgctatactgctctattgcactacatcttttctactcagtgtggctgtgcgaggaccatgtttgaaattacctgttttaaacagcttcggatagaacgaagatgcgggcgtgttttccatggatggaaagaaggcaggatttattttcctccgacatataagtactcattcaactcggatcgttattctggtgtgcggcccaaagaaaagcggagaacacccgcttggtaatctcttcctgccctgttgttatccacaagaactgcaccctccatcgagttactccgaaggaattccctgacgcgccgtttgtttttatcttattgaaggtgcgatcgcattctgtggtacggtaatggcctctcgcagctgtcctacgttcgcggagagtctcgcttctctgaccacagaccagtctacagtattttcatggctgaggttgagagtgcccgccacagaagaaggaacatgggctattccagctctagaatcgaggtggaagagcttttgccgtatccatacagctccggagaaatgaagttctactgggttggctgacatatagggcatatggctggagcttgttctctacttcaactt

SEQ ID NO: 2102 - DNA, 786 bp, Zea mays
tggctacatgtatgtatttggctctggcttacttggtgcatttcttttccgtttctttgttgaggacaaaacttttccctgtaagttgctagcttaattttgatttgtctcagtcatataattttagttgtaacttacaagttttgtcttttccactcagatggttggacattagtcatggagattgtcccaggattttccctctatcggggcctatatgaacttggtcagtatgctttctcgggaagcagtataggaactactggtatgacctggagaagtctgaaagatcccctcaatggaatgcgtgatgttatgatcgtaatgagtgtagaatgggcagtgctgctcatattagcattctatttagatcaaacctctttgctaggcggtggtgtcaggaaaaatccttttttctgcttcagatgtttacagaagaaatgtgcaacatcattgcatgaacctagctttgtccaacaggattccaaagtcattctcgatatggagaaatctgatgttgctctagaagtaggttatccctcacactgatatttcttatacttctctacatacagtacatatgaatgacatttcattcgttgacattctatttcagagaaaagtagttgagcaatttttgatagatcccaatgcaaaccaagctatcatctgtgataacctcaggaaggtttatcatggaagggatggaaaccctgacaagctggctgttagaggtttatctcttgtcctttaaaagggccagtgcctttgaaaggctggtccaaa

SEQ ID NO: 2103 - DNA, 781 bp, Zea mays
tctcataatcagatatgaaaatgggtaatttcattgtacttctaacacaggaatcacccgaaggtgctaagatgctagaattccggagatcccttccagcagacaaagaaaaagaaaggcttctagcagccattgcacgcaatcaggtatgcaatattgtaaaatatacatggacatctatcaggcatataaaccattgtaaggcatgactagtaagtagtaaccctttttttggttatttctctgacattcttgtaacatggtaaatggtaggtcattgtaatttctggtgagacagggtgtggtaaaacaacacagctgcctcagtttgtattggaatcagaaattgagtctggtcgaggggctttttgtaacataatttgtacacagccacgaagaatatctgcaatggcagttgcagaaagggtatccacagagagaggagaaaatcttggtgaatcggtaagtcagaaatttccttttgtcaatttctgctactgtagtttatctttaatatgtgtaaggaacaaggacaaaagtccttactagattctctctattgtattcgcatacgatactagcttttttaataggttggctataaagtccgattggagggaattaaggggaaagatacacatttgcttttctgcaccagtggcatcttactaagacgcttactgagtgaccgaaacttgaatggtgcgactcatgtatttgttgaccagatacacgaaaggggcctggatgaagggtagataccatatttagaatgcttcct

SEQ ID NO: 2104 - DNA, 776 bp, Zea mays
gactgtctaaagtgaggggtgttaacttgggaggatggttggtcattgaagggtggattaggccatcactttttgacgggattccaaatggggatatgctcgtaggtggattgatcttagttattcactgtgtgttcttggtaaactgatgcctgcatggttttaatcctctatggggttgtgtttgcaggatgggacacaggtgcagatccgctcagtggtattaaacaagtatgttagtgcagccaatggtggtggctcaaatgtgacagtggaccgtgatgtggcctcaacgtgggagacattctgggtgagagtacatggaatgtattagtttgatttcaaagaaatattagtctgctgctttctgttttacaaggggctaattctctgcgttattatggcaaatgatagtatctcaaacgtattggtctgatttcaaagaagtatgaaatgtattggccttactgtttgttttagttaaactttacattagggtaaacctacaagaactgcttaagtacaggctaaattctagttatacctctcttgctatgaccttaagtatgttgtaatagactaccccttaattgcactccaagttatgccactgggtaaaatttctcagattttgctatattggttttctgacttagtttgaccagatatcatgaattgttgttctttagttcttattaatcgttatcattaaatcagtggccatggccactggtgtttcacattaggatatatatcacattacaagaaactaatga

SEQ ID NO: 2105 - DNA, 842 bp, Zea mays
agcttgcatgcctgcagcggtgaggctacgagaaaatcaacgagaccgcattaaatatcccccgaaactccgatagcattcagcggcggcagcgcgagaaattgccggtgcagagacccccgccccgaccttgctctgcgcgtcctctgccacccacggctcgtcggagcggtggcttcttgaggcggagggtgggtttcggaatgcgagggcttccgattcgaatcgcgggaggaagcccgtcttttttacattttaccctttttaggttttatttttacaaatacgcatttttcagttccatttcaaaaaattggactcttatctcgacgtcatcactattggcatcgagctacaacgtgtcgacgtcaattagtttggcgtggacatttaagagctcacgcctatgtggatctgatgtggcagcacctcggtgccgtggatatcagcgccgacctagacgtcatggatctcggcgccgaccataaattcatagtacctactcgcgagaccacaaattcagctggactagtcctgcaaggatgagtgtaaataactcggctcaaacgtgcaattcgttatccataatccaaaatcatccttttataataaacaagggaatcatgcaccaattaaataacggattgcaatagccctgcaactaaaaatgaacacagaaacagaaatagtttaaccaagctcataattccttgcatgtcatgctgttgcaagaacaccaagatgcatactgtagccttgatatgactgaagatgggatagtggtttggggtctgacattaactgctgatcatagcataatatgacacctgaaaaatatgacg

SEQ ID NO: 2106 - DNA, 739 bp, Zea mays
gactatgtcaaacactcagctggcaacatcctcatttccgtatctagtaccctaattaagtttgtacgcttctcatatgcttcccttttcctcttttggtgcattcagtttcattttctgtctactaactgttgactccacggctgttgctctattcctaggaatccatttggattcagttcattgagcttgcctggggggctatacatgcagcattaaaatgtgttcataacacttcacgttctacaaccgactccaacattgatgacatcactagttcaggcacaagaatcacaagcttcatgacagcacttagtgatcatcgtcttaataccagtgggcaaacaatgtccagtctctttcgagtattgcatgctatcctgaagttccttaaacagagtgacagtgacttgaaagacgacttcatttgtctatccattcatcaaattcataagatgccttggaatttgttccatcaattacatgctggaggacttgccagctgtgccaaggatagcagatttagcaccagtaatgattccgcacagtctggaattctgactggcagtcttctccagctgttgggctctttacttgaccaaagttacctgagagacacagacggacaagatatgtttgtgaaacttgtggatgtagttcctaaaatagcattgttgtccttaggaggacagcatgatggatccaaaagtctttatcagtacttaaagcacaaaaatcc

SEQ ID NO: 2107 - DNA, 729 bp, Zea mays
  unsure (1)..(729): unsure at all n locations
aggtaagctgcgagagaaactctctttactgtcagcaatgttggaggcaacggttgctgacataacaatagcacacatggcatggcactagacttccatcccgtgtcaccatgccagcccaagagcttggatctctagtcagactcgttcccagaatccacatcgactgtagcttcaccgcgatagacagcggattctttttcataacgcttcttgtcgacctgggcctgctggatgtaaggctgtttctcttcgcctgctcatggcaagggacgtgaaaaccgtaagcacaaagcttttattttagctgtaaacatgacaaaacattgcaaaatttgcctggcagcactggttctattactcatatagctgagaacgatccggaatcttacctgacatcttttgccacatctccccaagcttctttgcgatctcagtcgtaggcaaatctgggttgctgctcttcatgttctgcaccatggaaataaacttttaaacttctattcaatatcagatagttactaccatctagtgtgggaaggtaatttctaccctcagtgtcacaaatatcttatgaccaaagatatttcaagctcaattgtgtcatccttgataaaagttatgtgcaacctaataagatggaaactattcgccaaaggaacttactcctcgctcagccattgagagatacatgaacggggtcatgggctcgttcngagcattcggatc

SEQ ID NO: 2108 - DNA, 802 bp, Zea mays
caattgccgttgcattcaaaattatgtgagcctgccagttcaaaaatgtcattgtgagatctcttctttttgggtaatgatactagagatgttaggtttgtagtcccagcaatgtacaacacgggtccacttttaggtgaccgagcaaatcagttgttccgtgcagagacaggaaaactcgtcttccattttgtccatctgttgaacgtggccccctgttttttggcattgtggaagacctggtgatagagcggcttttgacattgctgaagaccgggtggtagatggattaagaaatgatgcttgcgtagtttatgctgttggctggcatattttatttcaaacctgtgtgcagtgggatgtgtaacttttaaactacatttataatgatgatggaccacaacttcttaaaaatttagggcagatgcttcttgagacatcttcaaagtccaaactatcataccttaaactttaattcagtcacaatttcttattaaagaaagggtatcatcaaagttatttggaaaccctttttgtgtaggtctaatgtaagagctcagaaaacaatgactactcaaatggactaaagaaataaattttggaagaaaatgtaagattggttgttaaatgttgtaggttgtttctgtgatgcagaaagtttaaaaaaacatagacaattgcttttttttatgtgccactaaggaagctggcctttttttatacctttcggttttgtcactggtctattaagggacttgctttttttttttttgcttaccactattacttagacccttacacg

SEQ ID NO: 2109 - DNA, 963 bp, Zea mays
tggtgcctgcagttggtatttgcacgtatggtcacaatgctaagacaaatatatattattttttgaactagctattagacttggtatttgcacgtattatttttgaactagctactgcacttggtgatcaaagaaactagtgaacagagaagaacaccattgcaaatacatagcagcaatatgcacaacacgaccacattcagttatagaggactaagaaaatacagagcaacaagcacattaagttaccttggtgactagagaagccatgatatccttggtgatcagagaaactagtgaacagagaggaacaccattgcaaaagacgcacaactcaaatattgtagcctggaagaacagaaacaatactgatcagagagtctcctttggttataatatacaggccttggacagatgcaaaccggttcacataagagcaatcaggttcacacaatataaatgtgggataagtataggtacacaatacaaatctgagataaacacacattcacataatataaatctgagataaacaccatcagaacaacaataggaatcagataggcacaaatttagataaccatagggttcagaataaccataaagttcagggtaacccataggttcacaattaaaaaattctacggggaccaggaacctgagtgagttaagggcttaaccaaacatttttttaaggggttataaatctctgggagcgcaaatttttgtgggccccttaaaataacccattatttggagaaggccaagtgcaatcaattgccctcacaaacttttttaatttattgcaatcgcgggccaatttcctcaaaaaagatgcgtctattgaacatcggaagggaagcggttgggaaaattaaaaggttttcccatatcaattctctttggggtatagcccatttttcaaaatataagattttttggacaaatatcatttcccccttt

SEQ ID NO: 2110 - DNA, 787 bp, Zea mays
  unsure (1)..(787): unsure at all n locations
cggcttgcgacggtcgacctccactgccccgacaagccgccgctggatcccaccttcccccgctgtggcccctttgcccgcagccgccccgtccgcggttgccccatctggcccgtatgcaaccaccagcgccgcccaggcaggctccccgtcagcgtcaccagacgacgcgctgctctcccgcggcgcgcggatgggtttccgcgtcggcaccccgcccgacccgtcgtcttgtccaggcggtgcacggctctacaacgcaccaacagcggcaatgttcccctccaccaccggcccgtcgttctttgatttgcttcaaaggtaagcagagtctgattcttgaattgcattagctttgttgaagatggtaggagaggaaatatctctcgtccattagcagtaaacatacaagaaatttcgtctttggataatcatgaacaaccagatctgcataatcaaatgtatgtttaacacaactgaacaagcttctttggataatcagatgtatgttaaactgagtggttgtaccaaatctgagtgtttgttaaacttttgcagcttcgagggcatcatgagctgtatgatgattcagccacacaaccagcccaaaaatgctcattttattggacatctgggacatacactaaataaccctattaacattcaggtgaagatgcttatgaagaagatgagatggagatggagttaggaccgtggcacgactaatctagaaacaaaaagatgggagagtggtangcttgtaatcaaagttttgatatcttgtgca

SEQ ID NO: 2111 - DNA, 801 bp, Zea mays
aggaacacctccagacaccggagcatccagaatcttagggctttcagcgtaacctaacgtagagaaaatgaacttgtatgcaactcaaattttgatgttagttttctagtattaattgatgccagtaatagaaacaatcaattttgtcagcgttcatttaaagtcggttaaattttttgagtggcaactgccaatagtagattatgagcatgtttgtttgggattataatctagccagattatataatccagtgtaaataatctagctagcaaacaaacaaccagattatataatctagagcccaaattatgataatctcataatctcctcaagaggaacttacttgagattatttttggtaaaagacccactatccatggttatgttatcaaaattacggaagctgacattcttctttccttctccaaatcgcatgtagtcgattccttctcccctactgcgcacagcgcttcttctccccacgtctcactatcacatcttcttcctccccaactctagccgccaccgggtgttcttcatggagtgccccaccctcctcatcgatttttgtgcctttggattcgatctcctcaatgcctacatacagactcccaccttcgctctccacgcggccgccaggagtccctctcctgggttgatcctcttcacgtggggaacattgtggcgtcggcgagcgcggcatctacaatggctctgcggaatgcttcggcaacggtggagcgggtgcagccttgggaatggcggcgtcgcctttgggcgtgcttttacgccgcagcctg

SEQ ID NO: 2112 - DNA, 734 bp, Zea mays
ataggcgtcgtcggcgttgagcttaggtgagtagtcttctgagaagtcgacgtgcttagagaaccttgaggtatagtaatttatccccaatatgtcataggaacccgctagcatcgcttgctcattatccgtgaagaaaggtagccgtttcctcgctaatgatctcatggagaaggggtagtcaccacggaccacaggctccaagaaccatcctaggttttgatcgagggacctttcctgggcctgttcatcgagaaatgtatttccatatggcacgcgacccattacgtcaaacgcaagcccaatgcggccgtctgtaccctacagttggttctcagtcaataatataggagtacatattgtagtacgtactgctaacgattaatttagaagagtgtgttgtcaccttgtaattcttgttgtagaggtcaacagtcatagcgtgggctcgaaggatgttgtggccagcaatgtatggttcggtgagtgagttagcaataggctgagcacatttttctcctggtgagcaccgtccaggggcaaaaactcccgttccgtacgaaaaggttgtaaatgtctgtggctcgttaaaggtcaaccaattcttcaccttgtcaccgaagttctcaaagcacaccttagcgaagtctgtgtaatcctttctaaaaaaattgcaaacctgaatcacatcaaaagttgccctattggttggctgattaaaaaagttatgttag

SEQ ID NO: 2113 - DNA, 889 bp, Zea mays
gtcgacctgcagtcacagcctcctccgccgccgccacttgctccgcagccaatgcagaccgtgtcaggcacgccgccaccaaagcgcgggcggccgccgcgggctgccaaaacgccggcgacgacgcctgctccgcagccaccgcagaccgtttcgggcacgtcgccaacaaagcgcggccggccgccgcgggctgccaaacaatcgcctgaggttgaacggaaccaggagggggaagctcaacaggcgccagtcttctggacagcttgtccctcctgctgccatttacaccagtacgaccactcctacgagtcgcaaacgctgctttgccctagctgccgccggccgtttgttgccactgcaatgtccacgcagccgcccatcgtgccaggcacagacatgtattactgctcctgggggttcttcccaatgggtttccctggtggtcctgcattcgctgaaccactcaattccccgcagcagcaggcacctgctgctctaggattttatccaatggggccatacttgccattaccgagcctaagtggcattgtggaaggggaaggcaataaggcagttgatgctggcactggcattcctgtcatcccaacagtggcagcaccagcaccagcatcatcgccagcgccaacagcggcaacaccagtggagttcttacatgtgaagggtggggcaaagaagcgagggcggcccaaaggcagcaagaacaaaaaagctgtggttgagatgaattagggctatggaatgacacatgtgaaagttggggcaaagaagcgaggatgcccttactgcgtgaaggcagcaaggacaagaaagtggtcattgagatcgattaggggtatggcatgatgattgctgcatcattctacat

SEQ ID NO: 2114 - DNA, 791 bp, Zea mays
gatcctgtttagccgacctgcagcaacatcacctccagcagaaaatgctcttcctttgccctgaaaacaggtgatgattaaatacaatgaaaaataataagatctatagaaggcatcaaggcaatgccacaatagtgattaccgtatcaaaaagagctaaaaggaggaaattagaaataaactaaaccaaagggggggggagttgaaatcagctctgaagtaagttttgggagaagcagccatgattggcacatgaaacgttagattctgaaaaaaaaaatcaaaaaacgaagcttttagccctcatcaccaaattatgttaatcttactgataatgaatcagaaaaacataaccatacataagacatcaagagggtcttcatttaaatgcctaacagttcaatcttaatgcttcaataacttatatttacacaaaaaatctagcgtacaaacattccacattaggatcaagtctaaacaattcttcaaagccaagttcatgtaggacaacgattaaacaggaaccacatctaaatcacaggtaacccctactgatcaaacatacatgcatgctgaattactgatgttgctagaaactcatgcctgtcagtctgtgtgcccagtcaaaaattctttagccttccttttaaaccaagatggtacagtagtagcggcatgattcccaaatgatagagcaagcaagagatgtgcaggcataacatggtgccctgtgtcatggaccgcaaagagtcttcttgcctatggtgcatacgcctgaactctgacaagcc

SEQ ID NO: 2115 - DNA, 862 bp, Zea mays
acccgcggatcctctatagtctacctgcagcaggcagaagcgtcgtcactcgtcgtcacacaggttcagcaggacagcaaccccgaccatcaccggtcatggcgcgcgcgatcggagcagagagaggcaagggaaggggaaaccagtggcttaccatcctgcgtgacgagcgggtagtcggaggcggagaggttgataaaccagtcccagtcggcgccgcggcccctgccctcgccccacaggagcgcggcggcggcgtgcagcgtggtggtcaccatggtggggcccctgtaggtgacgaggttggccttctcgaccaccctcacgttccgcgccgccgcgagcaccgggtgcgcggcgacgaaggcggccagccccgcccggtcggcgtcgggcgcctccgcgtctaggtggagcacgtagcggttcctggggtggtagagcgccagcaggcagcggcgcatcatgccggcgtccccagccgagccggagatgaggtacgcgaagcgcgggagcgaggcggacgctggcggggacggcgccgccgggcgggacagggcgggctcgacgaagagcggcgggcgcgcccgggaggagccggacgcggggccgaggaagaggcgcggggagggcgaggtggaggcgagccggaacgacggggaggtggccagaagcaccagcagcagcgcgaagaggcccccggcggcgaccgatagcagcccaacggaggtcccacggggtgcgcgtgcgcccacgggcaccgtggggcggactccatgctagctctaagctctagctgggttttggactttggaagcttgggcctgagccttgccgtttgccggaaaacggtggattgcag

SEQ ID NO: 2116 - DNA, 767 bp, Zea mays
agaattagctccggatatctacaaagtggaacagcaatacaagtaacgtgttttcagaccacttttcacatttttgcactttaaacctcaaataacaactgtggctcatttcatagaagcaatgcttctccatgattttatcatgttgcctatcctattaaccgcacttgattggaccttctgttgaccaagatcgtcaaaacacaattattttttacgaagaccatcttcgaatccgttgcctttatttatccgattctcgccaatcctattttacacatctcgagcgatcctttccagggaccgtgtcaattttgtgatgctgaatgttgacaacacgaagtgggagcaagagcttgacgagttcggggtggaaggcattcctcacttcgcctttctggataaggaaggaaacgaggaaggcaatgttgtcgggagacttccaaagcagtatttccttgacaacgtggttgcgcttgcttctggtgatcccgagataccgcacgcacgagtggtcggtcagttctcgagcgctgaatctaggaaagttcatcaagtcgctgatcccagaagtcatggctagcagtagttgttttctatgtggacagctgtaatcatagttctaatgccaagaccgtttgacaagtaagcctttctttcccttaatctctttatcaggtcattaataagtatgtgtgtcatgcaaccttttttggaataaaatagctcagttagttttttttaaaaaaaaaatgcccaggccgtgt

SEQ ID NO: 2117 - DNA, 762 bp, Zea mays
tatcaatgagatgtaaagtcccgcaaggatggccgatactaatttagactagctccatcaataaactgtatatagttctaaactctaaaatatagcggttgtagcttactttttccctccaacaaaagactaaaaggtcctctaaaatttgaagagaggcctacatcccgctaggaatggagggcgtagggtcatcctctatacactatactcatttgttgtgcatgtcctctatacactatgctcatttgttgtgcatcttattgacgtggccacaattgatatagaggataaaatttagatgacattgctggaaatgaaaaaaatatagagaacaaaatcttttagagagtgatgtaaaagacataaaatattcctttagaagatgaaatttagagaacgttgctggagagtcttagcatgcatgagagatgacacaaattctctcctcttcagaatcaagagtcccagaatattcctctcccttggcacttgtttagtctatttagtagagtgtgaaaaatagggacacagaactgtagatgacactgtttacaaataaaagtttgaaatagaagatgaaataggggatttgctggagatagtctaatagtgtactcttctacttaaataaattcatgacaagataagatctatttctttaaagagtcattttgactcgaaaaatgacccaactaagggccttattcggttttctaatttcatgtagattagaatgtattagaatggattgaaacgaac

SEQ ID NO: 2118 - DNA, 834 bp, Zea mays
tttgcatgcctgcagtagacagtgtcagtgtttcaaacgaatattctaggtgaaaaatgaccatggaactctctgtacagtttccatttttatttatttatttatttatttatttattattattattattattattattattttgctgtaggggcttcccctacagttttctccataaaaaagaccatggaagtgttatcatgtaggttccacgtaaggtttcctactacaaccagaagcacaaggaacagtactaccccctaaataaacctggaccagaaaacaagaattaagaccaatgcagtagtatttaccattttgggatgttaattattgttccaataatatatatagtctaaaacacacagtagaacaccagataagatgcttgtatgcggtaaaaaggtggaagggtcagcaaatcgttagagcatgaaatcagtacaagaaataatcgaagttcaatcatactagtaggttaatatatattgcttatgaaacacacaggatcacataaatggtaatcaaatggaaggttttcaaatcatatgattacagccttgatttgtggtaatatctgaacttcgaaagttcaagtgtgctaacaagtggcacatgacattttttatgcttcagaatcaagctcattcccaaagcagagccaaactagacaatcatagtgtgagtgaaaaccaccaccagttacaagcatcaatagagaactgcattgtagagcaaatacctcattaaatcctgacttaaaagcttccatctgtcttgcaattccacttttaaccgttgcgtcaacaacatgacgaacatattcttccaaat

SEQ ID NO: 2119 - DNA, 758 bp, Zea mays
gacctgcagcctgcatacgtaaatatgcaaaaatgtttttatttgagcaaacaaatgtacataagcatgaatggtacatcagttaaaaaaagaagaggaactgagaaagtacgcttggtcggtgttctgggcttttccgtagcatgctcttgatgagtcccctactgcatgaagcaaaatgtttcaaaaacatgctccattcaggtaggacgatggacgagatgtaagtaaaggggagtattaatattaactcaatgacaaacttacaaggaaccagaatatctcgtgggcaacggcgatactatcgactttgtgatcttgctaatgagggcttgcatgtcctgccaaaaaaaaacagagttgcgtgattatcaggacagagatagtagtccaactatatatatttgtaattacgaatatctaaaaacgactaaacgccagcatacacacaatgcagtgggtgtctagcaagagcaatatgtccatgagaatcctgatttactaacgtaaacagcataaacatccgaaacaagacaaccgcctaacctcgccagcatatggagtgttaagtataaaagtaggggtgatgtttttagctgaaccatcaaattgcaccaacataaaaactagttgaataaaatttccaaggagatagtaatccaaggacttacaaaggctttaaatgctggtctgagagctgccatttcataaatacaacatcctgtaaaaaaagaaaatttcaggtattagatcgcagg

SEQ ID NO: 2120 - DNA, 787 bp, Zea mays
agcttgcatgcctgcaggatgcgcgcgcgcgccttgtccgtgaggcgcgtggcaaggatgctgcgctgctagcctttgcgaagaagctgcacgaggctcaccaagtacttgaccgcctcgtcgacgactacgctgactactgtcgcgatcccaaacgcccgcgtggcgccgctgctgctgacgatcccgagccggcgtcagagggcgacttcggcacgtccctccactccagccttaagcttgatgacatcctgacctacgcgcaccgcataagttacacagcctttgctccgccggagcatggtgctgggttgcctctccgtgttagcctgccacctgtaccacaggagaatcagatgagagcgtcgcagctgtatctgtttgctgatttggatttaggggtacccaagaagccattggatgcgaaggacgggatcgcggcagaagtggaggttgcaccgctgtatgaggcaccacaggaggggccgtcgaggctaccaaacaccttggcacccatgttcccgaaggagctaaagccgccgccgggatggaagcctggtgatccgatcacgctaccacttgatgagatactacctggtatcaagggtgaagagcgggaggcacaggcccctgtgccgcaggcacctgtttcagtgcgaccagtggcaccaatgggcccagagacaatacaggtcaagcctgtgcagcttgattttgggagcagtagtagtgatgagtacagtagtgacgttgggagctcacaagaagatgatgaggattagtgctc

SEQ ID NO: 2121 - DNA, 855 bp, Zea mays
accggaatttgcagcaaatttatctttctgtacccctgttacagctgaggtcacagcagaaccaaactggccacccattgaactgcctgataactctccagatttcgaggacactggagactgaatcacaggcccagtaggggcacgagagctaggtgctaactttcttctctgaattatgtcttcttttttgaagtccttctcagctgcgaaccgagtattttgccactgtcccatgtttggaacattatttcttgccactgattgttgtggtaaatgttgagattgggattgctgctgatccagcatggaagtttcaggtgccatagactgcaaggcgtcttttgacttatcagaaccatccatctgctcctgcttagcatcgtatctcaaattttgctgatgactaaaatataaggaagatcctggatcttgcatgttgttcatcatcgaagaaggatatctctgaccactcagtgaagatgcatactgcatccccttgacatctaattgtggatgcagttgatggttcttccattgcatctcctgcccaccaaggggttgaggccttatctgctgctgctgtacatcatcaataccaccagttcgctttattctcttaggatcttgaagcgaggcatcctgcatttccctcttcacagatagaaggctgttggcagccacagagtcactgtaaccaatcaagctctgatgagatgaaatgcatgaactggttccaagaaaaatggcagggggtcctgccatatgatcattaccagcagcagaataacataaggtttgctgtaaaccaaattgaggcaaaaacgttctggcaggcatcttgtggaagaaata

SEQ ID NO: 2122 - DNA, 764 bp, Zea mays
tatcgaagctgggaggctacctggcgatatttttgatgagataccaagcaagtactataatggatcagttgtttgtgaggtaagttgttttatcacacataagaaaggctatgcatgcaatgctattgaactgcaacatgctgaaacctttctgaaatttattctcttataaattgtggttggtttctctgatacatggttcaaaaagcatgctggtacaatttctgtactgaggatttatgctatatgggagaaatccttctttaaaagaaaaactagaagtttggtgagctttactgccgacatgttctataatatgccaacctaccagtactgtaccaacctttttctaacacttatttcagaaacaaccgttatgcattatcatgaagcatcatgttgtgtcatgtgctcatggtcatgtgctactgtaccttattgataagagaccattgagtctttagcagtacttcattgtcttacatcgacataagtaatgagttctctttctagatacatgactaccgaaagcatgtgtccaaccaagcgcctgcatcatctgctgagctaggatcaccaattgtgaataaagtacgactgcgaatgacctttgaaaatgttgtaaaggacattacccttctatctgatgattcctggagttacagagattttatggtaagtatgctgtggtaacatctattctatgagttagaatctcaacatggctcattttggcatctgtacctcgtagtctttatactcta

SEQ ID NO: 2123 - DNA, 770 bp, Zea mays
atcttgcatgcctgcagcattgccctctactgaacggcaaggaaggtgttgctcgttggggcagctgaagtcgtcggtgccgcagccgtcgtcgctgctgctgctgcgggtggtggtggtgcaggcatattgctgctgctccctatcatattaggattctggaaatccatcttgtatttcgttttggcttcgtggtcgccttcttcagtgtaggctgtgtggtttcttgccatgtcgtcgtcgctgtccgtctcgtctgttccgaactcatgctgctgttgcttgagttgcacattcgttcgtttcaagttgtcctccgccgtctgcacagcgtcaattctaaattttggttagcttgtgtgattagttggtttttccaaatatgtaaagttttaccgtgaatgtatgaccttaccttgtttttggcgccgtcacctggcggccgggtggtcgttggtgctgtatcgcggttgccgctgacgggagaagtatgcacgtttccctgttcatcactcttccggttgtcaatgtcaacatcgttgctgctctttccctcgagctcgcgctggctcgggctgtcctgcatggcggcggcagaggccatgttcggtccagctgcggttattctgcctctgccgccacggcgtttcttgcggtacatggcgtcaagctggtggaagtaagggcaggtcttggagtccctttgggcgccctcttgttgcttttccttcaccttcttgtagtacttattgatgttctcccacttctca

SEQ ID NO: 2124 - DNA, 768 bp, Zea mays
aggtctgacgggggcgaggtagtagttgttggcgatgtcgtccgacccggcgcagacaaggaacaggctttcggccacgatgcctgcggcggcggcctcgtctccgacgacccctgcgagcctctccttgtactccgcgaacatgttgagctcctcctgcatcggcagaactgcctgaagaatggcatttcaacgggggtcgttcgtttgttgtttaccacgagagtggaggtgagcgggtcgtagccggtgcccccagacgcgaagctgacgcccgtgcagaggtcgtcgtcgctgaggtcggtgccgagatacgccggaaccagatctttcaagccgagccgtgaagctgcacaggcatccatacagcgactgttcgttaattaggctcgtgctcgagtcagcatcgcagctagcggcgcgggacacgaacctacgaagtccgtcggaatcctgccgttggagaagcgtccggtggggacgccgccgttgaggtccttgccgtatggcctgaagttggacttggtgagcgtgaggacggcgttgttgttgcccgtgtccacgatggagtcgccgaacaccaggatggccggcacccgcggcctgccgccgccaaccgccctggcctgctgcaatggcgacgcggcgagcacgagcagcagcagcagcagcgacattgcggtaccgccgagctccatgagctgtatccctaaccactggaggtacggttccattctcgccactgtggcaggctgattgggataagta

SEQ ID NO: 2125 - DNA, 864 bp, Zea mays
aacttcttgagagccatcctcctgcgtctggatcctcacacaaaatgcacctgcacaacaagagacgccaccggttgtaactaccaacaagaaaggctcatcttctcttttgttgacgagcccacaaaggtccagatcgcaggcgcaaacaagagatgcacaaacaaatagaagcacctgataatctaatttcctggataaggtcataaggaagaacaggtgatcaagaaccgaaccaagaaattaaaaataaaaacgaaaagaaaagaaaaaggattagtgggatgaaatcgttcgtcttggttggagttggagttggagaatcccaacgcggcaagtatctccctttactttcaagtaagtagcgtgctgttttccaagaacgggtggcggtgaggccccccagttggcagcggccgatcttggagcccaatcagtgcggtgcgtgcgtgacgccaggtcggtcggtctctctctatatatatatcggtccagtgctccagtgaccagtggaggcgagacaccgcagggccaagtttttcaattcaagatgagacaaaaagaaagaaaaagaagtaggaataatccagagagcgagaccccggaggccggagggataagctcgagccgtcagcgtcgagcagcaggagcaggagcaggagcactgtagcagcagcgcatcactatcaagaaccccctcccatcccccaccgagaaaacgaaagacgtacgtccatggccaatcaaagaaacgaagcaaccttttatcacgccatgaggatgaggatatggaagccacaaccacaaccaccatccccggcgggcggagggaaaaggaaagaatccggaaatcggcgatcaagg

SEQ ID NO: 2126 - DNA, 782 bp, Zea mays
taccctcttgcttgatgcttttaacaaggacagagcttcattaactcagcctgctccacctcaagtggcagcagttccaccaccagctccacctgatgctcgtactcaagaaattatcaacgaaaagcttaagaaagctgaagagcttggtatggaaagcaatgtgttgaattgctttattttgcgaagtaccatggattagtggtttgtttcttataggtgtatgtgtatttttttaactggtgttaagtttggggctttgggcgaccttttctctttagcatatctgtctcatggagtcaaccactcagttaggtaatataaaatcaaatagcctaatgatatgcaccggtgaggtttttggcagaagtgagaagctgagaagataaccttcatgataattttaaaatgacatgaggctatagttggtatacgtctcacatttgatttctagacctccataacatagaagttttgtgtaattgtacaggcgtgcttttttgaaaattggccacctagtcagacttgtaagtatataatgttactgtattttaatggttgtcgttttggtaggtgaacaaggcatggttgatgaagctcaaaaagctttggaagaggcagaagctctgaaaaaggtagtcaattagccataatttcgtattttgatgttcattttaccagtttaggtagtttttttacttttttttaccttgctgtgagctgtctcagacaagggttttatgaccttggcagtattctttttatcttgtttaatgaaccct

SEQ ID NO: 2127 - DNA, 761 bp, Zea mays
aactgaagttactggactacttttctattgccaagtaagctgatatattatgcagctctagtcaactataagtacagctagtacacctgctactactatagcctctacttggcaatattgtcatactgctgccatgctgttacggtagatagaaaagacagcaaggctggcctattgccaacttactgctgcaaaacaagagaagaatgaagcagattatcttacagcacagagaactggagatcacagcatggcattcctatcgtggaggttgctatcaccgtccatcatagaactgatcatgcaatggttgatggatgatgattagaagcatcagccgaaaacaacaaatattgaagatcaccatcctatttgcaatgcagcattgggctgccaaggacgctcctgaatgaagcttttgttgcatcaaactatattagaactcaatgtaaacttgagttgtctggtacagtttggcaacaaatgtagaaggcgctggatggttgattggaaagaaagactgtagaagcagtggcacctgatggagggataggaggtgcaggtggttgtgcagcactgtgaatagtgtgtgtccagtgttgtgatggcgctgatagactagagttgaattgtcatcgagagcaggtgtcttggtagtggtaggttcagaaggttgctatgtgatgttagaatttaaaaatgactcgaggaggtgacattcatcattttagttactgaccaatgatgagaacatcaaaaaa

SEQ ID NO: 2128 - DNA, 779 bp, Zea mays
ctagcttgcatgcctgcagacccatcggcacacgcagacgcctgattgcgatgctctttcttgtcgggatatttttgtacgcgaccaataacttcggtacagtcgtgtaaggggtccagtagcgttttttaaatcctttttattacagtttcccccttccgatcagatccctagtgtctggagatgtttgttaccggcgacgacgattgctagtacgaaggatcgtcgtagagctggagcatatgccgacccagatcccattttctgagtcccgatggattggttgcgaactcgtgcgtgcggcagccaagcaaagcttccccgcgctagctgctcccgatccgtgcatctttacgcgtggatgctcttttatggtgggttggttgttatttgttagccagtaaggagatgtttcgttccgaactgtcacatcaagtatttaaaataattatgaatattaaataatggcttgattaggcttgtcttttagtttttatttgtatagttagttttataattagactgcatttaatatctgtaattattattcgaatatacgtttgatgtgataaactaaaatttagttggctggaaccaaacatttcttgatgtcgatccggcttttgaatgttccgtcaataatgaagacatgtcaaagactattttttccccttatcggtaaacaagaaatattttattcttttttctcattttcttctcgttatcattataagggcataaatttattatatagaaaggtagagtgactcaagcatatg

SEQ ID NO: 2129 - DNA, 781 bp, Zea mays
tttaaagccaacctgcaggtaggctcagttccaaccaagttacacacctccttttgaccacgccacgcacgcccagtgggaaatgcagaatccttgggtgactcgaaatcatttagaaacccccattaccaccagaagctgttgcttgttaatccacagcgtttctgaacagcctttgttagtggggatcccactagaagcgtcaatagcagaggaattaatgcaaagtgccaccacccacgctgctttgttatagtgttgcattagtttaaaccagctacagatccaacatcactttctgtctcaagattttcagcaactacagtagtacataataactttttttttccaacaaaggttgatgataaaatctttctggtaatgattagagttcacatttggctataaaagttcagagttcagcacttgtacagaaccatgattactgcctccagcagctcccctattttatcacataatatttcaaactttatcctgcaaacatccactactttacatgatccaccgaagacaacagtggcggatacagaaacggatcaaaggaggggctactagcctactaagataagactaatttttctttagacaaaactaaatgatctaattgatgtttaatataatatagtaacaaggtacaataaatttaaatgtttaaaaaacatgtagaacaaaaaaaaatgttgatacgaaatctataaatatagtacttaatacagcctgatatgatgcagctcaactcagacaacacttcatggcattg

SEQ ID NO: 2130 - DNA, 737 bp, Zea mays
ttaattgcgcgaaagcgtactgtttgctacatgcgcgagggcatttaatcccagcacatgcatggtacaccacaccttcaccctcaataccgatgatgttcacaaatcacagcagcggcagcacaatgacagttcctagcacatccacagtggaatttcatttccattgcccacgcatgtgggtgttaataagaaagggagagagggagagagagaaaaaaaaagaaggttctgaaatgaaagctaaagcgcttgaatacacaagctcccaggctcgagattgtttcagagagcaaacaaggccgatcacagcagcttggggaggtttacagcgtccagagatcagacttaccataaacagattcaatgaaccccccgggcattcgtctcatcgccttttcttcgtggtcgcatttgaagtcggggcaaaattctgctcggtaaccatctttataagattcacaagggaccgcaacctgtcccacacgctatagccatacagagtctccacaagcaactgctggaactcaaatccatgctctgagacgggatactgcaaaaacaatacgaaaatttgataagcagtcgaataccatagcagagccacaagaaccaagtaaaccatgcaaatcaagagtacttgtatcatggggactggggaagaagtagacctggataggcttcgggatcactgttctaatatatgggcacaatctatcttctacaacagactttaa

SEQ ID NO: 2131 - DNA, 824 bp, Zea mays
gcctgcagcaggcagccgcccgacgccgaacgtgtcggccgggtcggcttgcggcacgttaggttggtctgtactctggactatggagcaagccaaaaggcgaccaacgagcacgcaccggcatcccacacgcccgccacagttcctgaaacgcatgcagtccatgcccccctgccggcgcgccgcacgtctgcaccgaccacatacagcgcacctgcatgcgccggccgaagatcctcgtgaatcgtgatcccgtccccaagcccagcaacatggccatctccctcaccctgtgtcctgtcacacacacgcaagccgccgtatggccacgaccgtctgacgggttcatggaatacgaggttccgcggaccgcatcaccgcacgcaggcagtacaagtcgggtcaaaatgtgctgctgaatgcgcatgccctgctgcctcggctcggctcggctccgcgtcgttggttcaacgaaccaaaccgagcagccgcccagcttgtatattacccgcgctccccgttcttcggcagcccttcccttctttattcctggactagtagtagctaatctatctgctggtctcccttcagctgccgacgatcggagggatcatcagctggctgtccgaaatcccgaacgagcttgtgcgggcggtagctctgagaggctcatcttgatcccgtgtccaaaaaaaagaacagcatcatccatggaccggaggccgccggcgaggaggagaccaggcgatccccaccgcaggggcgcagcaatgcacggcgccgtcgagcagcagaagcagcacccggggcggcggccgcaagga

SEQ ID NO: 2132 - DNA, 754 bp, Zea mays; identical to SEQ ID NO: 678

SEQ ID NO: 2133 - DNA, 795 bp, Zea mays
agtttaagataataataattttaattggcacgaaaacattgtataagcaatatattctctggcatctcaactaacaattctgaacatgaaaacttaacaaacagaatgaatcaatcaccatctgcgctgaattatgcaaaatgtatttcttttacccaacatattgatattgaaataaacgaagaagcattgcacaagtaggggaaatttaaacaagcatacacactggcaatttttttggcactggtacatatgccataaactgatagaaatgtctattctacagaaggccacatccaatcatctcttttcagttttcacatagaatcatccatataaaacatatgtttgacaagattaaaattatttatgtcaatttttcgactcccaaaatgatgtcacatagaagctggagaatgcaaaattgatgattcacgaatatctcacacctttgtaaaatattcaggattgtctgatatgaatgatttgtcactgccatcaaaaggcaacataagaatacactgaaatctataaagaacaaaagtttaagtaaaccaagatcattgtttccaagcaagacatcctcacatcatacaggatcacttttacacagagtaaccttaaaatggctaggctctgttcagtgtgtacttgtgtacgattgaaaaacttgaatataaagttaccaagcagtctcagtgcatttcgtacaaacaggcttgaggttattagctgcacatcaacagtacattttaaaacaaccacttaaccatacttcaatgtacactttggata

SEQ ID NO: 2134 - DNA, 803 bp, Zea mays
ttctttggcgggcgcgtggtgcaggcaaccttctttgacgaggaaaggtttgcgaggaacgaactcgctccgatgccaggggaagtaccagggttcttcgactaaagccaaacgttttggtgtggtatcagtataatatcaggtgagaggtgggttgtggccttgtagttctttctgttaatcgaggatgaagtagagcatacagtcagacaatttgcatgctttctagtgctaggtgtagtgtactggaaatattgtggatataagatatgttttttttttttgtgccgtgtctcctgctactgaactaccttctacgtatatacatgaaaaattttgtcctgattttcgatcttgtaatcacctaactgcgatatgacatctcagacgaaatccttattgttgacagaatagcattgctggaactgtatcagttgtcccaatgcgttgctgtaactgtaatctgattatgctctgaaatgataatcgctgggttcatatttttcttgcttgcaaccatcgggttctgccgcagttgaatgaagatgacgtttgatgccgtggtctcgctcagtttctcgtgcggttcttccgcccatggaaaatttgcaattctataatttcaaggatctggacatacgatccctaccaaacgttttcagaggatgtggctctctatcacgagagaaacgtccgaatttacaaactggtaccgttggcgggggagaatttagagcttttttaaacttgactccaattaacctaaaaattccctttttccaaaaaaaacctaggtcgttttc

SEQ ID NO: 2135 - DNA, 839 bp, Zea mays
cagcttgcatgcctgcagtctgcatctctaccgaaacaagaatcctcaacagctacatccaagagctatactttcagagaaggttttgttagcttttctttattactcaatctattgagttatgtttttctaaacacgatttcgcttccacatcttctgtaggtgatagggtgcgttacgtgggtccagctcagctatcctcattgtcacaaaggtactttaattgcaaatattattcttgtctccagatttatccaatgcttgttccttaggtatcaacattgttatcatcagaatttaggtatcatgttttatagtaagaggaataaccagtttatgagacttctcataggcaacccagttatgagcttgcttttgtatcgactatcctgtgaaatcagatattctttccccatatcacattttttctagcaccatattatattagtccaatacatatatttgtttatataaattgcttgcttgatctccaggggaccaagttatggttatcgaggcagagtgatgcttgcttttgaagataatggatcctcaaaaattggagtccgatttgacaagcagatccctgatggtaatgatcttggtggtttgtgcgaggaagatcatggcttcttctgctctggttagctcaaacttccgaattctcaacttctttggcagttattttaacttttttatttgttgctgaggctgctatatttccacagctgaatcacttcgcccagacttttttgctggtgaaaaaattgagaagctagctattaccgagtaatagaggtactgctgctttttaagacaaagaaatctgttgaatatga

SEQ ID NO: 2136 - DNA, 810 bp, Zea mays
gctcggggcccgctgtatcactctacagtgcgacctgcagcttaccgtgcgaatgctaccaatgtttgatttggctttaagggtttcaacatcacgatccaactgctgcttccaatctgtaagtagagcttcatcctgtaaatttaattatttagatcaaaaaacatatttaataacaactaaatgagtatggcaagagatgtaatcacctgcggaagctggatcgaaattttgtttgggaaaagcttattcagatgtttcattgcctttggactttctttgcttctttcatgcaaccacctgctaccaaagctatcctgcatttttaaaatcatattaaattaaaataatgcaaatcaggaacataacatcaatatcatggttcacgagattaccaaatttaatcatgtatgtacatataaaaatttcaagaagaataaaaaagtaagataaagaaaagttaccgggaaaaggtcaaaaagtgtctggctgctactggcaaactttgtgaaaagaaaacctccaggatgcgcctgcaaaaaaatcgcttcaccatcttagcaaacttttgctagaacttgaagagaggtacaacatcaacaaagccttttagtcccaagccagttggggtagcctaaagttaaaacccaacaaaagccacaaatcaaggttcatgcatgtgggtagctgttttccattagctcctattcaaggctaaatcttcgggtatattccgtctttttaatggcaagtttggtacaacttttttctgaaagcttttctgagaatctggattcctgcataatctag

SEQ ID NO: 2137 - DNA, 779 bp, Zea mays
ttgctcgcctgcagctcaagcccacacacaacatgacatgacgcacaccttcctccgcgcgcgcgccttttcatttttctttctctcttaattaagtagcaattatatcttagttaggggtatgtgtttgtttcccttttagattatataaatcgattatggtagaagaatatgaggataaaatattactacgcagcctgcctgcatgtgtgtagatgtaatcatccgtccgatcgcgaacacgaaagcccgctacggttttcgtcaaccctgcacgcgacggtagctagcagccgtcggatccgagatagaggagcattcaactcattgatgaagcgcatcgcatggagatggaggtttagttttttaaactttgtgctggtggccgaaaacgaaggaaggcctacactgatgagctagctagtagtagtagaacggacggtgcatggaccaacgtgcagtgtggtgctctcacacgtttttatattggattggttgttgggagaggagaggagagatggttggaaggcacgagttgacggcggaggcctctcagacggcgtcatggccaggccacggccaccggcagcagcagcaagctgtctgtctggcccggttagttagcatgttgccccgttgtcgggccttgccagcccccaccgcacgagctgccacacccgccggacccggatcctctgcacccgcaccaactcgcgcccctcccttgctctgctctgctctgctcttctctgcccactaatggctgctaactaatggct

SEQ ID NO: 2138 - DNA, 737 bp, Zea mays
ccagacagaggtgtcatgcgggagaaatttcccttcctcactcgtgctccattacaggcagcgagtgaagatcgcctacttcaaaacaaagctgtggctgtgtgttaatatatatagatggtgacaacccgagctagcgtggtctgtacctcagatactactaggctgaagccaaagttgccagtgagacatagccaactagtcaatgattggtaaaatagtaaactagctgaattgttagtatatgtaatcaaattgatgcaccaaattggtgtccagggaacaatttgtccattaacattgattaatcatgattgactgaaaaatatcaacactcgcagtcgcagataaaattacaaataagacttagaactgccgcgaaagggccactagcgtaatggttaaggcttccgagtagcacctccaggttctgggttcgatccccctcaggggcaaatttctggcttgtttaaaaaatcccctcgttgtgccccgcctgctcccaggttacgtcctgcgtgccaccctccggttgagccgttgcagagtgagcggtgacggcccgctagtgatggggggcagggttcgggggttttctcggcccggggccatgtttcagtctttccctccccggccgagttttttttaagacttagaactgccctttggtatttgcatcaaccccaatagatatatgaagggacaaacagtaaaaatcttatagtaattggattagc

SEQ ID NO: 2139 - DNA, 1474 bp, Zea mays
gaacagttcccatcaccaccaagaggttataattaaatcaacttttgtgcgcagcatctttatctcctcatccataagagttggcaagaacacagaaagtgctatgtcaatagaacaattgaaggaacaatttaatagatctaaaacatgagaatgcaaaagtagaaggcgaagattgtcgatgaacaagatactacagcggaaaagtatgttttatgctaaatgaactatgtaatctcattaaagtaggagtactacttgctctaatgacccactaagggactgtggggattcttatgggtaggccgccaaaatgataatggaggtaattgccttgtcccttgggaaaaggttcagaggccgttacagtatggtggtcatgggatactcaaccttgaatcaatgggatgggccttgcgcatctgttggctgtggctacaaaaaagggattcttctcgaccttgggaagggctgccttttcaggtaccccgtaattcccatgctctctttgatgttgccctggagaccaaggttggtgatggtgaggccactaaattctggacagatcgttggctgcacggttgcactgtaggtgagctggcccctaatcttattcaggtaattcctaaacgagcaaggagacaacgcactgtttctcaagctttgggcagcaggtcttggactgctgatatccagggtgccctcactgtgcctcactgtacaggtgcttgtcgaatacttgaagctctgggaagtagttgatgattttaccttgcagccggctgtttcagatcagcacatatggaagctaacaaatccagggctgtacacttttaaatctgcttacaacgccttctttgtgggttcagttaagtttgcaccttggaaaaggatttggaaaacttgggtctctctttgatgcaagttcttcatttggttagcaatcaagaacaggtgttggacagaagataacctgtcaaaacatgggctgctgcaccaccgtctttgcctcctttgtgatcaagatgtggagaatatacaacacaaatggaaaaataaacagaataactgtgtggcactgtttttaatcgagattcggtctagactactttggctggcctgccaattcttttctctcccccgcaagcgcattaggccgaaacttgggctgggctgggccatgaaagcctcctttgcctgggctgaaatggctccaatctccctacgctctcggatcggaatcggacggtcatccctcactggtattcgtcctggctaggtataaaacatgttatttttggtcgagggaaaccctaaaacattttctttttgccctgcgtggcgttctccactctcctctccctctcccgagcacctctccttcctccactttctccccaactccggtgagcgagagtgtggtcacgacacaatcatggcgctgcccgtggggccaatcgttggttgccgaact

SEQ ID NO: 2140 - DNA, 789 bp, Zea mays
aggctcaacaatgaccactgagggcactgaagtcgcttgatgtgctgaattgttcgtgatgttggtggcgtattttgtttaaataagtaagcatggctgtgattttatcatatgatcgatctttggggttttatttaacacattgtaaaatgtgtatctattaataactcaatgtataagatgtgttcattcttcggttgccatagatctgcttatttgacctgtgatgttttgactcccaaaaccaaaatcacaactcaataaactcatggaatatgtccacctgtttcttgaagagttcatctaccattccagttggcatttatcagtgttgcagcggcgctgtgctttgtaacataacaattgttcaggcattatatccaaatctagaggcctaccaaaatgagataacaagccaactaatctgctgggaaataggtaacaagtctctaacaagatcttaagcttattctgagatgatgtcgagaccgatgccttttgttacgtcgtgccgtgcctcttgttgccatgctggtaagttgctgcctcttgatgagggcaagctgcttatcaaggcgggatgaagtgttatggacgcaggcatgggtgctgctagcttggcatccagggttccaggataacccatctacctgcattagtttgtttagtttcttaactgctaagttggcagatcaagttagttagacaagattgctagtttcctgcttggtttgtagttcatcatgtacgaaggccaggcttatgtatgccaagtgtattaatgtgtta

SEQ ID NO: 2141 - DNA, 743 bp, Zea mays
aaaaaaagagaagaaaatgacactattaggaaaacaaattgcatggtttgacctaaactatacataaacctaatatggttgtgtacaacaaaggttgatggagcattacagagctttcctacagtcctacacagacaccacgatatgatgattttataaaacagaacacaaaggttgatggagcattacagagctttcctacagtcctacacagacaccacgatatgatgattttataaaacagaagagtacatacaagcagagcacttaagccaatgtaaagttacaaagaaattccatacaagtgttaggatccaaatcccacctacccagacaggacctcactcatattgcattaaattagttgggtaagtaagatacataatcttgtacagatgctcatgggcaagcctttcatttggcatgaatcttcattccaaataatagcaatatcttgtgtggtatttgacatgaatgcaataacagaaagctaacaaagtagaatgagcaagttttcatataaggacaatgtctacaaaactgcaaatgatgttcattacagttacatagcttggtagccacacatccaattctgacaggaaactgatgcaataaacatagtgacaacaatcaaatgaatacagaaacagccatgaaacagtagttgtaaatttagtaaatttcggtcccatgcatttaactagcttggaagctataggcttagcattaccagacggtctgtg

SEQ ID NO: 2142 - DNA, 554 bp, Zea mays
aggccggaccggagcagagtcgggcgtccatcgccgtcactcactgtatgtacgtgtgtgcagtgcagcgccgcgcgctaccccgtcggcgtgccacagtgccagtgccagtgccatgcgtgtgggggactgggggcctccgcaaactttgcgctgcactgccacgcgcgagagcctccgacgtgtggtgtggtgtggtcgagaaggaaagcaaaggggtgacgaataaaaagcgtggagcctttgacatccatcaacgatttcacgacgaggaacagaacactcatcactcactcggtgggcacggcgcacacacccccgcccgcgcgctccttttcacaaagctagggctactagcacagcactgcactgcactggatcgatcgtactgtactcgagtttaggtcaaagctgggcgccttttttctgtgttgttcttttttttttttgcccataccataccaccgatggatacgagtagtgctgcgtccgccgccgggccggcgcgtaggacaccccgtacgcaatgcacaccgtacaacccccaagcgcct

SEQ ID NO: 2143 - DNA, 799 bp, Zea mays
acctctccccccagctcctttgatgcatggtgggcaagcacaaattctggtgttgatgaccagactaaaaaaggtctcagtaacatcatcattctgggaacttggtccagttggaatcaccacaatcgttgtgtttgatgggattcaaccgagcctaaatagagttctagtcatagttgttaaggcggtaaggcgactgacctccttttaccttttaagcggtaaagcataagacaatgtgacacattaaatatatttaaaaatataaaaatattgctatttgagaaagtatttagcacaaaaataataataataaagaagagaaaaagatgataaaaataagaaaaagactagcccagccagcccaactatccccttaaaattaggttaagcccacttcctctctctcaccgctctctctctctctctactcgcttctccctctatcctgtgccggcaccgccgcgccactacagccgctggagccaccgccgcgctgccagccgcgagcaacctctctcccactcgccttaggtgcacgagtaaggcgagcaggacgccttacgtcgctggggcgccttaccgcctaggcgacgccttaacaactatggttctagttcggtaaaagatgagtttcacctgtggagtttggtcggagctcaaggaatatccaatctccttgctcgagagtcagccaatgtgtgaattcctctctagtggtcttgggtcaagtttgaccaagtgagagagagataccacatttgatgtaaaagggtgtgtatgtgtgtggctgtatggg

SEQ ID NO: 2144 - DNA, 740 bp, Zea mays
ctaggcttttcgcgaggaagttgaagcagagcagtggaaagaacggtggcagttcgtcagtaacggctgaagtggacacccttaccaagaagggcgagaatggttagtgtcaacgcaacatcctgataaaatggttataattttgcaaaaagttcctagaatttgttatatggcaaaagcaaaaaattcccctatagagtacatacctttctctgtcagcattgaacttcagccagaattaatgttagcacttctctttatcagaaattgattattatgtaaattcggggacagtttgggagtttttgcagtgggatggctgtgtaacataccaactttgctgctgttgtccgctttccactattctcgatttctcggccaattcttagaaatgaagtcttaatggttattgtgagagtcaagatctttccgcagtaaatggacatagtgctcgtgttctgagatcatgttttatttacttgtcatagaaggggttgatagcacttgtgaaaggagtacgatggaagcttcttatccagctctaatttaagatttgtttcagactacagatattgctgtaattcatggaacatgttacagtgaaaaggaacacctttacattaatgaaatgatctgtatgttccaaacacatggctttatattctacagagacgaaatggaacttcataatatgatgaacatactgaactgtacgattactttttgcgccttctttattc

SEQ ID NO: 2145 - DNA, 745 bp, Zea mays
tcttcctagtaaatgacgaggatgcaagtttgaatccaggttgaaattggtttccatcaatcctggaatgtcagccacaaagttaaccatttatttagctagatatgaagccaagacacagagagaggcagatagtagggggacgggagcaaagtatagcagaattcaacacctcagctcaggaatggactgaaatgttccaggaacatagccactgaagtgattattttcaatattgctgtgtaaaaaaaatttgatcgtcataatcaagagttaagatgcataaaatataggaaaatatgtttaagcaacaaatctagtcagatttcttacagggatgacaatggaaggcctgctaacaaaatcacagatcctgtgaactcgttatgctgtagataactgaaaatgcaaaaacaagaaaacctatattcaaacaggtgttggatccatgtgcgtgaaatagctggctccaaaggcaggtcggtcttacagatagcgaagactagtcaatgagctaaacgatcttggtaggtcactattgaaagcattgaatgacagatccctgaaaaagggtggaggataaacttcgcatgagtcaataaagatcaaataaattcaggacatttttatttgcaaggatggtccggataggagaatatcatgaagggtggaaagaaactgctcaagtatcgaaatgtgcactttttgtctttttcaataaacaaaaatgaactggttccatgga

SEQ ID NO: 2146 - DNA, 745 bp, Zea mays
ttttgtcttcatatacttacttttttttcaattcgcatcatattcaatgtatatatataaaagacaaaaaattgaggtggggccatgaccccctttgcccaccccgtgactccgcctctgggattgatagtggtcgttgcgtttaacctttgtcctgtggtacagaataatactatgcttctttcctttgctcaatgccatcatggaatgaaaatctattgtctccctttgttttcagcgatgaacatctgttgcctctctgtgttttcggtgctctgaagttggaactttgtaatcaataggttttaagatattttgtattgtgcttattttgttacattgttttttgctacttctcagcgttaggacttttggggttatatcacacattggagtcgccgtggcaactttctggttggacattccagggcggtgacccatgtggtgagggtggtgggagtaaacactggcgaggcgtcttttgcaagggaccatccattgttgcaatgtaattcttaaatacttcattaacttattggttcgtttttgcttacaaattaatacaaagctgatcaactggctttgtaatttgcaatgctactgacttgcagaaatattagtgggctcggagttggtggatggcttggcccagacctgctcaagtttcagtcattgaaaaagctgtgagcttctaattgccaagtttctgtactattctagctggttttgacctcaccattcctga

SEQ ID NO: 2147 - DNA, 860 bp, Zea mays
cagttttgcatgcctgcagccaaagcatgctttggacatgacgatttgttaagctagctgcctagctagatagctagtggcaaagtccactctggtctgtcggtcctagtcggccggccggaaaggaaaggaaaaagaaaagaaaagcgtgagacgattgtttcgtcgctgctgcttcgttaatttctgggtcattatattgccagtacggaatgacttagcaaatctccattagttgttaaggcattcacaattttttttgtttttgttaatttgggaatctcatttttctaaaagatttttattttaacaaaaaaattagttttattttttttggaaaaattgaaatcccttgaaaaatacggtgttcccaaactaacccttaaatttgattttatcccgcgcgctagactaggtcggggctgccaaaaatcagcggctactatataaatacagtcagttcgggtttgcggcggcagatcttgtaatcatccgttcagtgtgtctggatcatgtaggaacaacaaacattaatctatattttactttcgtactgctgcgtatatataggaaaatcagccagggctttttattatccatgcatgaagtgaaaacgccgccgtcaccgtcctggcgggcaaaacctcgcgcggagcgcctctctctctctctcacttcgtccgtccgtctcgcccccaaagtagccagacctagcagaatcctgaaagcgatcgctccagcgcgcgcgtgccgccgccgcctgttcctcatcctcctccgcggaacagacgaggaccggaccagccacgccacgccacgagcgtatactgtacgtacatcgtttggcgagcatgtggcac

SEQ ID NO: 2148 - DNA, 730 bp, Zea mays
ttgctatcatcccccgtgcgaaacacagacgcattgacagggactttcagtatctctcgagcagtggcatggttagtaaggggcaggtgtaatgtaacagagcagtattgcaataatcttcagcaactggaagaatcagcgagcgataagcgggaaaaagggaagaaagaaggatgaaaaagatatatgcagagcaaggcatggcatagtgagctcgacgatggtaaaacaaccacgagctcactcacagtcacagcctgcctgcctgccgacgctgtcactacacaaatctcaccaccatccgacacgctgcaaggtgcaaccgatcacactcctccagatcttcagtccccctcctcttccaccttcggctcgatgtccttgagaaggccgacgatctgctgcatggcgggcctcttggacggcagctccgcggtgcacaggtaggcgatcctgagcgcctcctccatctgccgctccggtcccgtgtcgcggatcttggggtcgatgatgctcggcgcgaggctcgccttcaccatcgccctggcccagctcaccaggctcgcctccttctgcgccccagggtactcatcgcccagcggtttcttgcctgtgaccagctcgaacagcacgacgccgaagctgtagacgtcggacttggcggtcgccgcggcgttctccgagccggagaactccggcggcgcgtagcccggggaatggtgtagcagat

SEQ ID NO: 2149 - DNA, 794 bp, Zea mays
tgggccgggagcggaggggatggaggggctggagtggaagaagatcagtgccaagaggttcgggatcaaggagtccatgatcccccccgaggcctggaacgtactacaccgcctccgcagcagaggtgcgtcctccaccccaatgtccctgctagtgtttgctttgttgtcctgccaaatcctgaaatgccactgctgaggttggatttcagtccggtgtcctgcgactgaactagtggatcgagtacttagttacaggtcaaatgtcagaacaaatgcagacaggatttaatactcaactcagcctcatataaagcaaatataatagttgcattttacttaattagaattgaaactatcttttatctatactgcaacagaatccatctattttttatttgaataaatttgagtagtttggataaaatcatatttcagaatgaaagatgtaaggcatactttgttttgtgaagatataaatgtgactagaggagaaacggttaattggatatgaaaaatgcaaaaccatatttgtatcctgttcggtactagtagtcgattaatatagctaatcagatatgaatgtgatttcaattccattgtacttttctccatctgttaattaggtgcttgagtatcctttgttgttgctaggggtggtaatggatcacgatccaaatgtttcttcacgattcgttcgagcccttaattaattttagctcaaaaataaatagaaatacagcctgatccaaatacgatctgatccttaaattttatagcgtaaaatttaaatc

SEQ ID NO: 2150 - DNA, 773 bp, Zea mays
tgctcaacgccagccacaaccagttccagggacaggtccccaacgccatcgtcttcggctgtgtgagcgtcgtggctatggatctctccggcaatgcactcgacgggggcttgcccgacctgtcgccactccgctctctagcccgtctcaatctgtcgggcaacaggctccgcggctccatcatcggggcgttccaggagcagttgagggtgatagacctcagcaacaacggcttctctgggctgaatttcagcagtgggtatgccggctcggcgttggtgtacctcgacttgtcaggaaacgagcttacaggagaattcaccattgccggccggttccagaacctgaggcatgtgaatcttgcacacaaccagctgtccaatgctaatttgctggtgtccatgggtgggatatctgggctagagtatattaacctttcaagcactgggctgcatgggcaaattcctgctgatttctcttcccgattggttggattgaaggttctcgatttgtcacggaacaatatcagtggggtagtcccagacatgagttctcttggcctacacttgctggacctgtcggtgaacaatctcacaggtgagatacctgtggcattggtgaagaagctgacatctatggatcggttcaacttctcatacaacaacctgactgtttgcgcatctgagctctctgcggaggcgtttgccactgcatttgctcagtccaggaatgactgcccaattgctgggaatccagacagtatcgtgaaaagt

SEQ ID NO: 2151 - DNA, 770 bp, Zea mays
ggtcagatcggcgttgctttgttattgggagtgcaacaaaattcagcaaagaagatggtgtgatgtgttcactttgtttgcctgttaggttttattggcagtaggcagtgacatgttatccggagcggatctagacaaaataatcattggtgtcatctccattaagttatagtatcatcaactcatttaaacactcacaagcatatattttaatgaagattactaaaatctattggtgtcacatgacaccacgaaaataccctggatctgtccctgcatgttatggtgctttggcagttcgtcgtgtgaggtcgaacgagaagctgattgtaatcgaacttgtgacaaactcggcaacgatgatatatgattactacaagaagtttctaccttttaaggttgcattgaaaacaactaaaagacctcgatcatccgaaagagggaaaaacaccaaatcgtgttgaagtgccgtggctgcttattggtgcaaattcatgcagcccatgcacacacatcacaaatgtgagatgatgtgacccgccagccacccgctgccttgtcagctccaggtgcgtcgtcgtaaggagacggcgtgccgcgtgccgctagcttaggccctgttcggtttcaccggaatagaccaggatttattccagctaatcaaaatctatataaattagagaagtaatcccgctaggaatcaatccggggctcaaatccataacaaccgaacagagccttagtaaaatctgatgacccatgccgggtgg

SEQ ID NO: 2152 - DNA, 729 bp, Zea mays
atgcctgcagcctcatctactcgtcgccgttcctccattcccacctcctcctctccccgcacctccccttcttcgccttcgcggtcccttccgcggggtacctcctcctgctcgaccccaccaggcaggcgccttcctggtcccgcctcccgctgccgctgcccgctcccggcgctggccaagggttctccccggcggccgcgtcggcgggcctgctcgcgttcctgtcggacgcgtccggccacaagacgctgctcctcgccaaccccatcacgcgcctcctcgcgccgctgccgctctgccccacagcgcgcctctctcccactgtcggcctcgccgcgggacccacctctttcatcgccgtcattgccggcgatgaccttgtgtcccccttcgcggtcaagaacatctccgcggacacattcgtcgccgatgccgcctccatcccgccctccggtttctgggccccaagttccatcctgccccgcctctcctccctcgacccccgcgccggcatggctttcgcgtccggaaggtgaagtcacaagtctcaactctcaagtgcacgtgtgtgcagaatgtgtaacactatgcatacacatgagcacacggcttgagatcaaactgattacatgtaagttctactggtttatttactgttgcaggttctactgcatgagctcgtcgccgttcgcggtgcttgtgttcgacgtggcggccaacgtctga

SEQ ID NO: 2153 - DNA, 767 bp, Zea mays
cttgcatgcctgcagcttaggcatctaggtctggttgctagatttggtattctacttttggcgattggaatggccggtgattggatcttgtgcagatctaacgtccagtgctgatctggtgaagtaaactagtaaagtggcacacctacctacccgataggaaatggagtggccctgtttgcgcaaaacatacagaatttaccccgtcctccttgccagcctcaatgccttgatattgccacctgaagtaaagaggactcacttgctctagagctcatatagatatgttaacatccctgtgctttgcatatgagatgttagatgatattaagcgtatatacgctctcgttccttatatatgtccagtgaacgttttcattttgttttttgcttattttcttccatcacactgatcatgttgattatatgcttcttaggctcttgtcaatatgatcagcaaccctgtcaactccactgtcccgattgcggcggaggttttcaagaaggctggtacttatgatgagaagaagctgtttggtgtgactactcttgatgttgttcgtgctaaaactttttatgctggaaaagcgggtgtgccagttactggtaataatatcatgtcttagttgacagtagacattgagattatgggtcagcattaacttctcatctcccttgacatgacttattgctgtgcccttttgcaggggtgaatgttcctgttgttggaggccatgcgggtattactattctgccactcttctcgc

SEQ ID NO: 2154 - DNA, 834 bp, Zea mays
ctgaattttttacatctaaaagtaaattttttttacaagtgattaatgaacaattgccctgatcgatatgctatgagcctatgatttaaggttctaagaacggcaagctgctctctgcgctgcgcgacgccaagatcggccacgcgtacgagccgttcccgtgggagaagaagatgagggagctgctgccggtgccggaggcgagcagcttcctctcgctgctgctgctgcccaaggcgacggacgggtccaacacgcggtacaacgcgctggaggacaccctggcgcgcgcggacgcgtggctgctgtcgtcgcaggcctcgggcgtgcccgtggtgttcatgaacgtgcagacggaggcgctgctgaccaagatctccggcgagacggcggtgtcgaccgtgaacatggcgtcgctgtcggacctggccggcatggcgaacgcgagcctgtacggcttcgaggactaccacggcgtggacatcggcgtggtgcgggccgtgcggctgtggtacacggcggcggcgggcgaggcggcgctggagctgcggctgtgcccgggagacacgcggctggggttcgccatcagccgcaccgaggaagggttcatctacgtctcgtcggtggcggaggagggcacgccgggcgtggcgtcggcgcggtcgggcctgctggagctgcaccgcgcggcgcgcggggcgtccaagctgctggtcgtgtcccgcgtcggcggggaaaaagggtgctgccctggatggtgtccacccgcgggacgtcagtgcttcgacacgtgtcctgagcagaactgtcgttgaccgcacgcgctcgcccata

SEQ ID NO: 2155 - DNA, 734 bp, Zea mays
gacctgcagtgctggcaattgctccagcaagtcctgagaattcaattccgtagttctactgtggccctgaaaacaaagaagtttaattacatgttgaagtatcaccggcaagtaatatagctacaaatactgaataacactgcatagctttggtaaagtggtaataaaatgaaataaaaatactggatgagcatgtcagagtccagaccttttcaggtccttgaccttgctttgataaacgtgcagcttcaatgtcatacttcaaaaccctgaagcattctaatttttcttccaaaaataaaccgtatgtgcgaacccatgaagcataatcccaagctagttataattccgaaatataaagagaataaattagaaggaaatatggaacaatattaatgatccaaataaaacataaggttaaatttaaattgaagaaatacagaccaactgggctggaatcatccttgaagtttgacagctgcaaaatccgcactctctgtgtaaatgttagaaactcttcgcggaatgcagggtcaccttcgcgaagaagcctatggatcactacaagtgtctttagagcaacctacataacagaagaactcattgtacattagaactattgcaagcatcgggttgggccaaaaaattcaacacttttttggccagaacaagcgtagtggtgggttaatttttgtgtgtgtgtgtgggggggggggggtgaaaataacacctct

SEQ ID NO: 2156 - DNA, 830 bp, Zea mays
cttgcatgcctgcagcagctggtgtctcgtctcctcctcctccaccaccaccaccacccggcggcgaattcgaacagcggcggcgtgcccgcgtagccaattcgtggtgtgggcgcggttcgtggtgccgagacggcgtacctgaagccgccgtcgttcgtggcgctgctggagagcgcgaggaggactacttcggtctggaccaccattgccagtctgcttttctgccacctcccaccagctcagcccattatggttccgactccgtcctcacagtcgtcggccaccgggtacacagccgaacagttgaccggtccgccggcccggcccggcccggctagaggccttttctctgtccctctcgtcctctcttatccgacatgggcaccaaacgggcgggcacacgacacgcccgcccacaccacagagagagcagcgcgacctcacctcccccttccacctttcccgcaccttgaagccgccgtcgttcgtggcgctgctggagagcgcgaggactacttcgggctggaccaccattgccagtctgcttttctgccacctcccaccagcccagcccattatggtttcgactccgtcctcacagtcgtcggccaccgggtacacagccgaacagttgaacggtccgcccgccccggcccggcccggctagaggcccttttctttgtcccctcttcgtcctctctttattccgaccatggggcacccaaaacggggcgggggaacaacgaaaaacgcctcgggcccaacacccaacaaaaagaggaggcaagcggcggaacctttacccttttccccctttttccaccttt

SEQ ID NO: 2157 - DNA, 780 bp, Zea mays
  unsure (1)..(780): unsure at all n locations
gtatcattttgtcgcgctggtggatcagcagcaacagtaccattctgggcactagttggaaaatcagtgttttcgctgcgctgctgttgcttctgctgccgccattgctgctgctcttgcggatgctgttgcgcatgcctctgtagcaagagttgctgcgtctggatctggtgctgcgattgttgctgctgctcccgtgctttaattgactgtatgggcataaatttatatgccatcatatgaaggagcacaagagtaagcaaaaagaagtcgtagttacttccttcgatcacagatacctataactttgacctaaatcataaattctcccaaatcaaacatatctaacatttaccacaaatatctttgaaaacatattatttcaaatgaagagttatgaattgcaaaagtagtttctataatgagtctagtcaagtagtaatgtcaagattgtcttgttaatatatatagtttagatatttatagtcaaaattagaaagttcgatgtaagacaaacctagatggatttatatgtatgataggaagaactactgcataatcttcacagtagatctctagaaatgacaagtaaccacagataatcatcgcactagatcatagccagtagaaaataaactagcgcgagctagtagccacatgaagtgaactaaaccatcgaactcttgggtatttgataactattttccaaacagctggaagttggcacaagtaccatctatccatgcaaatgttggggatnggtaaaggtgcataatattt

SEQ ID NO: 2158 - DNA, 799 bp, Zea mays
ctttagagtcgacctgcagggtataaaaacttcatacattagaatgaagtggccagatgaattcatagatcctataattaaagaaggtttttggatgggactcagaatatcattcaaaatcaatttctaactgatcagtaagacaacgaccaaactagttcagatttgaatttgatgaatcagattcgaaattaaattgaatatgccagatgaaagcggcagaaaatcaagatatggatttgcttcttcctctgcattcgtctccttcctttctcactccctcctcactcttcttcttttattccaataaaaaatggaggggtgacggtccgagccccgtccagcccaccatggatccgcccagctaaaaaggcacaacatgactggagtaacagaagaaatatcgcagctcaacatggaacggcactcttggacatctataatagcggggcaaaattgctcctgaaaacaggagaaagatatagctgatttacatacttcagcatttcagtgtaagctaagttacttatcccgtttgacaatgacaacaggcatatattctgctgggagggtctggtctatagaaggtaaaacggttcatgcttatttactatgttaggtggatgctaaattctgtccccagccccaactatgttcagttctcaatgtttgcagctgacaagatccagttcagagtctgattgcccttcgctttcatgatggccatgccgtctaccgcacttggtggcactgtacgctccgccatagtcgatctcttgggcggcttcctcctcgcgta

SEQ ID NO: 2159 - DNA, 785 bp, Zea mays
tctttagcaattatccaaggccgaagggggtatcctataatcagagccacgcgatctgaatccgacggtcggcattagatcacaaaccggtaagtgacagtcgccactggatcgagatccgacggccccaaattttatgaggcccggaccattcctaacccacggattcagatcctatggctgacgcgcacgggtactacgaatgcatcaatccgagccgttcatttgtagatcgagggctctcgtgtcgtcttcttccttttcctaataactcgacgcgatgatgcatgcaccggacagcggctccattacccccgagcacgaactcgcacttgactacagcacacatcacgctggcgaagcacaccaccgatgcccccccgatcaaaccgaggatgcccaagtgcagggaggagcagagaaatgaagaatacgaaagagagtgcctcaccgacgagagaggcgaagacaaggaccggtggacgacgcaggtatggcccaatggcggagctcctggaccgtcgagcaccagccaaccatccgcggcctcctgcacacgccgacttcactgggtaggaccagaacagcatgatgccctcacggttgatccccggactccgagcgccgatgcaagcgagcgtctatggcggcggacatttttttctcacgttctctcttcgtgatgaggctttcggtgatggcatgatctcggtctctcggatatcaggtcctcggctaaactcaacgatcccgcggttgagaaggggctcgaatattatataccg

SEQ ID NO: 2160 - DNA, 757 bp, Zea mays
aacacggcgaaggcattccaagccgaaagcaacgtgccttcggctcctgtttgtgagtgctgtgatcagattacaaaatcatctcgtagtgctgccgttttagtttcgaacctaacatctttcggcataaatggccaaactttgattccttgaagcattagtttgatgcgaagcactgaattattggtccatatttatgctttgactaattgcaacaagaaatcctagtccaaaccaaatttagggtaggcgtttccgcgtttgtattttgagtgacagcaaagtagagtttttgtggtaggtttgtgtgtgtgtgtgtgttgggggtccttctgcattattaaaaaatgtaacataattccctgcaattgatagtattgcctcttttttacattgcaacagcgattgatgcgccaggggggtttctcttcgaatggtggtcggttttctgggacgtcttcattgcaagaacgaacgaaaagcattctgattctgccacttcttaccttgaggttcttttcttgagacagtaacttgtggttattatagaacttgcatcttgattattacttgcctcatcggggcttgcttgtgttagtgttagaactgtattagggtttagtctcgtccctctgtcacaggcgacacttggcagttaactgatactccctccgtcccaaattaaagtgtgttatgggtttttaatcgattcatacaatacttgatgtatatgatatatatatgtgcagattcatca

SEQ ID NO: 2161 - DNA, 699 bp, Zea mays
aaacaaggaggcaatcttaacgttcacatcatagcccttgaatcatttatctaaaaaaaaaaacagagcccttgaatctagggggatggattgagattgagagctcgaaaccactggcagccttcgtattaactgcccgactgctatgtggctcatgacgacaccacgatttgttttctgtaacaaattgttttgttggataacacctctacacagttcccacaatagttttctgtgtgaatgggcactgctgacgtacgcaaaatcggctatatatatatggttctgatttctgaagtctgaacacagctcagttaaccggcagctaacgactaaatgaattctgctgtctctgaatatatatagttttctctgtgatttctgttgtcattcatggttgcccatggcaacaaacttgacttgaggcccaatcatactcactggatcaacaagagtacaaatgtatagtagttacagaacgttgggaacagggtggatttttttttttaaaaaaaagaaaaaaaccatctctgtatcttagcagcatgttgtagatacgatcttctgtctgtgcgcaagtacaatccgcaaccggagaagtggagtgacaattccatctccaccctcccatcccatgcgtgtctcaaagcgcgtcgctgaatcttgcgctgttgacgtcgtcgtccctgcggagtacct

SEQ ID NO: 2162 - DNA, 827 bp, Zea mays
agggcagcatgcttcatggattcctaatggcgctcttctcgctctggggatgggatcatgtcttccccaagtacaataacatggtccgggtcatacttaactccatgtcgtgggttacagtactgactatagttgtgtctcttgctatcacctcagctggccaaagatcatgtgagctggccatcataattttcgtagtagctacatgcctcatagcatgctttactgcaatgcttgttttagagtatgctaaggctccgctggaggccaaagcccacgcaccaagggccaaggttctgagagatgggaattggagagatgtacatgcagcaaatctggtcccaggggatatcatatttctcaaagttggggacattgtcccagccaatgctcgcatactccgatttcagaaaatcgacacaatgacttgctgggccaaaaggtctgttgattgtgcgcatggcttcctcctatactatgcttggactgtttcctgtggccaaggaactgccgttgtcattgcaactggacgtggcattcccagaagtacattgcggctctacccacaacgttatgctcgacctgggcagcttaaagaaggagccatgcttactggctgcttctgtgcttccctggtacttgttggcacttttgctgagatagtcttaagattttggtccaaaaacaaaattacagaggcatgccactcgacgcccattttatgccattgattggtggaatcccgatggcatgcctactttttttaacctggcattggcattgggatctgtaaggctttgttttctggggattgctaaccgggaaca

SEQ ID NO: 2163 - DNA, 808 bp, Zea mays
aatcgatgcttcaaagatcttaaggttctaagaagagatacctgcaaaataatatatgtatatatataatatatgtatatatatatatgaaatgctgtcagctgcataaatagctggcaacaccacaattcctctacatgattggtccgcatactcaaaactggaaaacacaaacacatgtacttctgtcttctacatgattggtccagcaactttagccaaatctccatgccatgagcagcatgcaacagaaccataattttcatacaggggcttgcttttatattttaggttcctgaacatcagtgtctctataaaccagattgttgtgaaagatgactttagggtagcaagaaggccctaaaatctagaagtggaccttttttctgaacacaaaggagagttgtgtatcagtgtatcaatattaagaaatagaagggtctagacaacgggcatgaccagtacagcagaaatcaccacaaagaaaaatatagaagtgtacctacagtagctaacatcaaaggagctgtttgagaacgctcccagctctaaatttgtattgtaaattactcctaggcagaaaaccgagtaaagcacaactagattctagtgtagatgtgacatggattgcttctccatttacactgcgagactgaggggtgaaagcggtacgaggaaatctcatacccttttgcgtattatgacaccatttacgactgtttctgtttttatcaaaaaatgaaagtggacattttttatttttagcacaaccggcttttgagcatggggattggggaatttgatagaa

SEQ ID NO: 2164 - DNA, 763 bp, Zea mays
tttgttgttgttgtcttaactatggcggtggcgattcttcttccacgagggaagtaaaggacagggggatttacagacgccagtcaaccatccatggggatacattgccctggcaaatcatttggtgttgttcccgttgcacttttgaacgaaaacgttgccatgtgcattgccattcgagcgagaaccgttactgttgcaattgctgctcccaacatccttgcgcttaagactggacttctttgccccccatatacgaactgtgtgatcgtcgctcgctgaggcgagcatgtggggattcgcaggattccaactgacgcagttgactgtgcccgagtgaccagcaagagtctcaatgagatcgccagtggctctatgccatatgtagacctggaaacatgacaagtgttgcatattattcagttgaaagaaacggacaatttcaacatatttataacatactgaaaaaaaccagcagcatggtttggtcaaagactgataggaagtgacaagtatgctgcatgccgaatgtatgaaactatagaagataggtggttgaaactagcatgtgcgtgtcaagtatgctgcatgcagacataagcacttgtgcaatgaggatggttcaaatgacaaacatgtttctaaactataaggtgttttggcttttctaggtacataccttttgctatgcacctagatatacgctatgtctagtaatgacataattttgaacacagggtagctgcatactctattagatttg

SEQ ID NO: 2165 - DNA, 689 bp, Zea mays
actacaagaggtcatcttaaaaatattggagtatgctgtcactgtagtaaactgtattccagagcaggagttgttgtcactttgttgcttattgcaacaaccaatttctaccagtcttaagcatacagtgctttcgttctttgtaaagctactctcctttgatcagcagtacaagaaagttcttagagaagttggtgtcctgggggtactgttagatgacttgaagcaaaacaagcttttctttggagacgagcagaaaaataaggccttcgactctacagagagaatgtctaatgcaactaattttcagaggacggtggacaacaaagatgcaattctttcaccaaagctaatggcttccagttctgcaaaatttcccatgttcgaagatgaagggacaattactgttgcttgggattgtctgttttatttgctgaagagagctgagtctaaccagcaatcgtttcgatcatctaatggtgtcaacataattcttcctttcttggtatccgaaaaccatagatctggtgtattgagactattgtcatgcctaataatcgaagattctcttcaggtttgtgtttttagcttactacaatgttatctgatcggctaatcgaacctaattgtatgaggaccgatcagacgattaattgtgattaatcgtcaatcaggtccgattaatcgaa

SEQ ID NO: 2166 - DNA, 392 bp, Zea mays
attcactttttggccagttctgtttgcatgcactgtggtttggcaactgcaatatatgcggtctgtatcatgtgctgacttctcttttgatttgtgatttttggagacctttattgataaaagacccattttgccagcaatagctgcactatggattgattttgtgcgggaaattcgttggtgctgggaggaatcagaaagattgccaaggatgaaaagcacttcaagcattgatctctcttcttgtcttatccaccaaaagttacaaatggtacaccacaacttttttttgactctagagccgcatttccccgtacaagattataacaggcagagagaaagtgttatttatttaggagcaaagtgcgctggtgatccctaaacttgttcag

SEQ ID NO: 2167 - DNA, 607 bp, Zea mays
tccaggattcttttttccaccctcacgcaacttgccaggtccgtgatttcatcaaagggtgaaacatgtggcagtgcaacaagtcagagcatcttcatcctgctgggctgttgcagccgctagaaattcccaggtcagtttgggcagatattgccatggactttgtcgaaggtttcccaaagggaagggcaaatcggtgatacttaccgtggtggatcatttctccaagtacagccacttcatcgctctcagtcatccttacacagcaatttcagttgtctgggcttttctttgacaacattgtacaccagcatgacattttgtgttcgattgtcagcgatcgggaccctgtcccctgtctttaccaatgcatttcggtctgagttcttctccctcgcaggtactcagctgtgcatgagcacggcgtttcacacccagacagtcagtcagtctgaagtcaccaatcgcagtttatgtgtgtacctttgctgcctagcaggtgatcatcccaaaagttggcttcagttgcttccatgggcagaatattgttacagcacttcctatcagtcagcactaaagaccacaccatttcaggttgtctacggca

SEQ ID NO: 2168 - DNA, 771 bp, Zea mays
  unsure (1)..(771): unsure at all n locations
ttttctacatattctctaagtgtatgatacagtcaaggatcacaaaataatgaatcatgcactacaagtaatagcctatagttctataagaaaaataaaggtgtacttgattatcatgaacatccgcaattcctgagctatggcaagaaaatggcaattgcctaggttaaataatgatccaatttttgggaacgagcaaataatgatataaaatcaagaaatagcaattcagcggcatagtagtcgatgaaaaacaatataagtgataataaaggcatcaccacaccatagtatagtcaataggatattcctttctgcgcccagtttcacttgcacggtcacgaagatgcccaagcctctgcttttcattttcaaaccactgtcacgattataaataccagtaagtcaagtttgagatcttttgaagaaaaacatatcattgtatacatatcgagttgtccttacatcattcactcttacatattgcaatatcttggctttctctaggatatcaccctgcattaataacacaaaacaaacaccaatcaaacctacacatatctgatgggccaaaacaaaactaggtctcaagtgtttagtcccatgtagcagtaccacttttagtctgctaattaaatcacacttcatgctctgccttaaacgtttgcactcctcctacacaagcaaatgtaaatatcatcctcaaaaaaagcaaatgtaaatatcaaaaagagggtaaaatgaaaacancatatagttcaacgttcaact

SEQ ID NO: 2169 - DNA, 810 bp, Zea mays
tcttgcatgcctgcagtacctgtacttggacaacaatgagcttgaaggtcaagttccttcctccttcagtgacctttcgagcctgttggagtgcaacctgtcttacaacaatctcgtggggccgcttcccagcacccctctgttcgagcacttggacagcagtaacttccttgggaacaatggcctttgtggtatcaaagggaaagcatgtccaggttcatcagcatcgtcatattcaagcaaggaagcagccgcgcagaggaagcgctttctcagggagaagatcatcagcattgcctccattgtcattgctttggtttcattggtgctgatcgcagtcgtctgctgggccttaagggccaagataccagagcttgtatcaagtgaagagcgcaaaaccgggttctctggtccccactactgcatgaaggaaggggtgacctaccaggagctcatgaaagcaaccgaggacttttcagagagtgctgtgattgggagaggtgcttgcggcacggtttacaaggctgtgatgcctgatggccggaaaatcgcagtcaagaagctgaaggcccaaggagaaggttccagcattgacagaagcttccgagctgagataactacacttggaaatgtcaggcaccgcaacatcgtcaagctctttggcttctgctcccaccaggactcgaaccttatcctgtatgagtacatggcaaatggaagcctgggagaattgcttcatggcagcaaggatgcctatctactggactgggacacgcggtaccggatcgctctgggtgctgccgaaggcct

SEQ ID NO: 2170 - DNA, 814 bp, Zea mays
tctggcttaaacaatacatccccaggtcaaagggttaggtttttctatccagactccagagtctcccagccactgccaatctgcaacggttcgtccccctcgcctttaattatgcccatcactgagaacactagattaacttactaaagcaacccacaccaagtacccaaaaaaaagtcataagcaaacacaacacaaggcacagagtcacagccgcacagcacacagaaaggaaagcaagcagtgcatatatctgatctaccactaccaaacaatgattgatttcacaggtgtggagtgcgatgatgccaaccgctcgccacttcggcgtatccatgggctcgtggcttcggccggcgctctataaggtataagtttccggtgtatgcagccacgcggtaggggcgggggatctggattctggggcgacaggatggggatgtacggcagcagatagagaggagtgcgctgcccattcgcgcttttgcagagggggacaaaagaatcctctcggcttgcaccgctgctgctgagaaggatgtgccaactatgccggtgtcatcttgcactaatagaggtcttcgagaatcaagagaactttttttgcacgggatttcgaggcgaaagtgtgctctcaatctcgcagaccaagacagtttgagcgaataatcttttcatcaccagtggtggatcagcttcgacgcttcttattattcatcgagatcacggataacacactaatcatgcaattcctggactactgtaaaatacagggtgtggataattttttcctagactctagctctactgagct

SEQ ID NO: 2171 - DNA, 774 bp, Zea mays
gttgttggggctgagaacaacctactgctgctgcactcaaccacggccgtattagaaagcttgggaccagtaagataatcaatcgacaagctatatatgctggaagccaagaagacaagtattagtagtagtagcagtagatgaccatgcttgtgaaaccactactgctgctgcactcaacattagatcttctgaataggtaggatccttcagggtttcattctcaaaaatctgaatagctaaacaagtctgtgctgactagtacataaatataagaaaatatgctggatatttttcggttctcatcagttatgctggttgcaaaattttcctcgcacaactggaagatacttctacaccaacttcatggactcattctcattatatctgtgaattcaaaagctttcgtggggggaactcccctcaaaacgtaaagcggtaagggttggtttgatgacaaggggattcaagtgaattgaatagcaagagattttcttggtttgaatagcaagaggattcctctcctatggatcccttcaattctctggtcaccaaatcagccctcaatcgcctctaattcccttatcatcaaaccagccctaaaggtctgagaggcacaatagaaaacagcatggcttcagtcaagcagtaccatataaaaacaatattttggtagtggagaacaaaatgtctgaactgtacgatcttattcgagattcaaaccaatgaagaaagaagaaaattacagatcttttttaatataagggttcaagt

SEQ ID NO: 2172 - DNA, 758 bp, Zea mays
tccgccggacgccggagatgcggctgcagcttctctccagcacggctgacgccgaacccctgcttctctcctctcatgtttgcttctctcccactgcttgcttctctcctgcacggttgtatgtctactggtccttccctattttttatctataaatgtatatattattatataagttggcaaaacgcctagcatcgcctaggcaagcctaggctggattagtccctactccctaggctaagggtcatcgcctagattcttccgcctagcgcctagcaaaactttggcagtgtgtcatacctagtctcggcagaccaagaacagcagtaactatgccaacaccgcaccgttcactcagtcctagagatgagacttttatcacatattgctttatttggtattttgttagcttaagcttaattttcgattaattcagtattatattatgttagttcttattttcttagtgtacccctgcctatcctctctctctctctctctctctctatatatatatatatatatatatatatatatatatatcctgtcataacagtgacatgattaggggtgggcacatttttaccagaaaccgaaaaccgaaccgaaatttcggtagttcggtttcgtttccggtttttgtatcttaaaaagttcggtttttcgggattcggaaatccgatttttcaacggtattccccaaaaccggaaaatacccaaaaaaaaaaaccaaaatttggccctaaaccttttttttt

SEQ ID NO: 2173 - DNA, 751 bp, Zea mays
agggttttagttatccaggcatacccccagcgcctcaggatgccgcaacgcctaaaaaaccaaggaatcgcagcagcttgggctgaaaatttatatttgtgcttaggatgatgcatctcggataattggtgctactgacagtgactcaagaaaccgaactggtcctactcaaaaggccatttcattgccttcttcgcctcatgaatataggggtcaagatacccaaaaaggtgatgattttataagtaaagagaagatggcattggcatggaacaaagttttccagagctccccatttcttaataagcccttgctgccgtttgaggaatggaacatagatttctctgagataacaattggcacgcgggttggaataggcaagtaaccttgatcttcctcagctatattcactaaactctacagtgtccttattatagcttatatgctcaatatcgaagtatcatattcttgtattgccaaatatttttttaaatatgctgcaaaacctgtttagtgcttctattatggtgtgctctctttttgctatgttgttcactataatttcattgttgttatctcatatttcattattctgcttagaaatggcacaattcttttctggttgtcttttgctatttttggtcctgattatagcctaacaagctatagcttgtttactgaaatgtttcatcaggattcttcggagaagtttccgtggatatggaatggaaccgatgttgccatcaaagta

SEQ ID NO: 2174 - DNA, 760 bp, Zea mays
ggtggtggccgaggaggaggatgacgccacgagcaagatggtcgagcagcagcagcagcagcccccacctccgctcccagctaaccggagccaggggcacgcgcatgttgtgtgccagggcatgaagccggagccgcgcgaggaagcagttgacgtcgctgtggaccagccgcagctgctcagtcagggggttctgcctaatggtgctgctaccgcgtctgcgatgttccatgatcaggttttcattactccttgtttcctgtatgcaagtttgaacattttttttttcttattttggtggaatgactgacaggcagagttacgacctttatgaagaagatttatggtccgcagactaggatttatcgcctgactgtgatcatgtcttagtcctagagtcttcaaatgatccagctagatttatctagcctggacatatatgttcatgtgatctgcctcatttttagtttggaattttggattggtgtgatctacaagtaacctaaccctcattagaacctttcttggtagtttctgcatcttttgggacaaatttactgggtagagcctctgctctctgttttagagtatatatttagtagtctagatattatgtctagtagtctttggtctcataaggacttgcaatttggggagaagagagtaattctttggtcctagatattgcaacattttagatgctatatgtactgatttatatgtaattatggcatgcatgtaattgacatgtcagtgactt

SEQ ID NO: 2175 - DNA, 695 bp, Zea mays
aaactggatatgatatctcacctcaacctctctaggtttggagaatttttcatgagcaacaagtgggacaccgcttttctcctgtgagataaaagtagacaatcatgagaatattagtagcacagcaaaaagagaacaacgatacgaatttcatttagggagtgcagctacaacatgagatgagcaactcaattgacgtatcaacatatccaaaggagaaaaatatgtctctggtaaattatccagtgtgtgaaaaagatgcagtgagcttacactgtgagctttcaaatcatatgcagatctatcagcaatacccacacactctatccacccataagagcactctatctcagcatcccaacaatcagcagcataatgagccatctcattaggtaaatgctgcctgaagcgcaaccgacccttatcaattcccaagcatgtcaggaaaagatagacccttccaatgaagtaaccaagtgtctcgttattaacagttccctgtaaatagcaacagtgtaaaagttcaagattatatccagggtaagaacaacacatataaacaaaagaacaaaaggaatgagattaaatttgaaagacaaatattggcacaacttgttaacctttgcaactgcttccccgagcttcaatagtttggccgactcccctgagagttgtagctctcttggaaacatcag

SEQ ID NO: 2176 - DNA, 806 bp, Zea mays
aatatcaggctttcttctaattaaataaaaagaatatcagactttctttatatatcgggtactcttcacttcttcagaacaacatacttgattataggtgcctcgccatgctgaaatttctttacaagattctgtgatcattgcgggcatgagcatcagtgatgatttgggaggcaagaggtgatttgatttatataactatatataagacattcttcgtattctctctctctctctctcatatttacggggagggaatttacatttgctttgccaaatccctcctcctatcttttttttaaatcgtatacaaataatttcctgtgaagagagtgccttcacttcacttctactttcctccgtagaaaagaatgaacaaaagaatagggccaaataaaaattgtacaagcccccccctgtatatatatggctatctatttacacccgcctcgtccctggccagcctgttgagcatggcgaacatgccgaccatgggcgccgtgttgtacgtgcacgcctcggtctgcatgtagttctccctgtggtccctgaagcggtcccggcggtcgggcccgccgacgatggcgccgacgacgacgttggggttggcgcccttgcggacgaaccagtcgtcgaagccctgcgcgcagccgatgaactccttgctgtgcttgtacggcacgatggaggcggcgcggtggtgcaccctggcggggaaccgggcgccgtagcccaccaggtagctcatcccgcgcgggttgctgcccagcacgtagtccacctgcgccctggccagcgcgaacacc

SEQ ID NO: 2177 - DNA, 815 bp, Zea mays
atttgcagcaagccgcagtccgctccgcccgctaacccgggtgtcttctcctaatctcgcttagcggccggccgtccatgcagatggagctagcagctccgcatgtgtcagcagctggactgtcaaggttggttgggcagaaggaaaagcctctccatagatcagaataccagatgggcctagcccagttctacagtacaccctgcgatttttttttgttacacgtaccgcgtgagaaagaaagcgcaaataacctgggggagaactgacacgttcttctggctcctattcctagctatatatggctcgggaaaatagtggtaaaggggtgagggggcactgtggtggtattcgtctgtatagaacagtagaagtacgccctggcagcagcgtccgctcaggctcagctactgagcgcaacaacgacgctagctgtgtgtgtgtctctctctctcacacacacacatacacgtacacagacggtctgatggacgtggtgatgttactgtgctggcgggcggcggccggcaaaacagagtcggcgtacagtaaaagaagcacattacagttactattactgctacgctacgctaatgctgccatcccctgaggcctgagcgccgcgcggcggcagcagcagcagcagtagctacacgcctactacactacacaccacagcgtgcagcgggcagcagacaacgctggtcgacgatctgccccgccggcggcgcaagtggtataagacgttatagtaattggccgggggtgggaagccctggtaggccgaattaaaaaaaagccccaagtttcttcaa

SEQ ID NO: 2178 - DNA, 800 bp, Zea mays
aagttatagcagatcttatagcagaagatattctgcgagaacttgtacagtctgtgctctttttttgtttgttggttacagttacggatatgatgaatggtgtgcctattttgttactttcatatcagtaacatcatttgaagctaatctggatgcttagagagatttttttatgtaatgatagtaccacacaacagcaaaactggctattttagttttctcaggatggggaattatctgtttgtttatttgcgtactatccatgcgcttctgattcacaacatccttttaggtctcctttgaaagaagaattaggcagcacatctttacgaatcgaggatgtcagtttctatgaaggacctggacccagctttccgtggctctggacaaaaggagtatccttttcaggctttcgtttattttgttacacaattacattatgactgttttttagcgtttgtcaccttcatgctggtcgaatctctaacctctctcctagttattggttagtgattttgggcgatgacatgaggtatcatacaagaaaattaaacaatcgtttttggattagcacgggataaccatttttatatcccacacgggagcggtagaggaaaaacaatcatgtacctgtttgacggttttatcaattactaatttgtaatacataatgaactctcgtgggatatgccctctcagtgtgttctatatatataccacagtagaaaattggtacctcattcctgggaaagggtgtctgcctttttgggataacttaatagttaatagccatattaata

SEQ ID NO: 2179 - DNA, 688 bp, Zea mays
atcttcgctgggttctccaccatggatcgtccaacgcgccttgtgcacctcgccattgcgggcttctccctccggattgcatgtttggctgtggtcgctgtcttcgtgctggcggcgtaccttgccttcgctccaatcgatccgcacatcgccgctgcggcatgtgtgctcccgcttctcgcggtttcgccgcaactcctcacacccttcatcatcctggtactccatgaacaggcacttcttagaaggcttttccaaaagcacgcatcgcccaaacttcgcattgcattgcaagtcgcaaggggattcttccagaaccacatatctccaatagtcggatgtatcaaagccaagctcccacaaagcctctcagccatcataacagatctagttcccagacttaacagttgctgcgtcagatcctcaatttttgtatgcttagcccctattttggcagctatcttaacagtggctacggtgattggcgtcattgccatcatctgcggcattattgctgctatagttttcgctataatccacttcgttactgattaagtgttttcgatcataatagatgtgcttattgtaataaatcgtatttttaacttgctctcaaaataatagaaacatcatttgttttgaattacttaaagatggatgtatattgtatagtccgttctgaatcaga

SEQ ID NO: 2180 - DNA, 738 bp, Zea mays
tctgacaggtgctggagaagaaagacgtatgtggggtttggctggagcaaaagagatctccttccttgctgcttccctcctagatgtctagtgtggctggtagttagtgttgtttagatggattctttcttgtattttcgcttttggccaccgtaaggtggtgactttgtaatgttttctctattttggactttgtattttttttttcttaatataatgatgtgcaattctcctacgcgttcgaaaaaaaaagacaaatttgatgaatactagttaggtgccatacgcaatgatttcaagtcgtccaactaatcgtgattagtcggtcaagtcggtttcgttgatgcgattaggaagtccgacccgatatgctcgactaatcgtctggtcgtccgactagtcatcgactaaacacgattagtcgtccaattagggtctgaacgactagttttttaaggccagatttggatgtgggctggacgcctggtaataaggcccattaggccattactgttagggttcgaatgcataattttagcttttttaccatttaaatgtgggggaaggtaaggggtgatgcacaacaatggtggaacgggtgacgcatactttctatatatcacatagataaactttgttttatattatgcttgagtacagaaaataaaacacaaaaatatgtgtgcactgatggttttctatatatcacatatgtagactttgttttatattatgcct

SEQ ID NO: 2181 - DNA, 770 bp, Zea mays
cttgcatgcctgcagaattgagcggcactgaagattccattgcaaaaatcaatcatgctaccagtgcagatgttaaggatcgactggacaaccaagaatccagaactggtgtacgcagggttgtttctgatggacaatttccagttgctactgacattccagacacattggatgcaaaatggagaggtcagaatgaacctgctcctgattcaaacttggcaaaaccaccactttcagtcgaagacacaacagttgatgttaaaaatcaagccaaggctgtgcatacttttactttcactgttcgttctggagatgcagcagaggaattacttagatggattaagatgccatacatgacatcaaacagttccttaaacacaacttctagttcaccactgagattcacttccttggcagagtacattcctaaatacgtcgagttgttttgtgatctatcacagaaaggtggagcaagacttttcttacctactggagctaatgacattgttattcctgtatttgatgatgagccaacaagtgttatttcgtacgcacttgtttcacccatgtactgcttccagttgtctgatgacagcagcaaaaatagagacaaggagtcttcacttccattgcctgtatatgattcaggaaattttaatccatttcatttgtttgaggaatttggatcccactacgatgttacttcatcagtgtctggagttagaggatcctttgctcctgatcaggtgcaacttgagtgtttcttttga

SEQ ID NO: 2182 - DNA, 703 bp, Zea mays
aaactgaatcatgctcatcgtttacttaaactcctgacagaaaacaagtcatggttgctggaacttcctaacgagataattacaggaatcgagcctagcaggactactggacttcgaaatcatactcaagtatgagtttacgagtaccctgatcgaggtacaagattcacaaagatgcagcactatgcgatgaatcatttaagcttcaaattgtactagtaatcctctagctaacaagactgaaaccctaatggtttaatgtttcccaaagaacaaagtcaaactggttcgtataaactcttcaccttcacagacgataaccaagtcctacctctgcacaacaattcaagccacgagaaaatatttgctcgtaccagaatacgctaaagaggctaacaatataacgcacataatctaggaaagcgccaacagcgctctgacgcccaccggaaaagagaaactagaaaaaaatcgcctcataacaaaacaatattgcccagaaacaatatgttccgtcgtcttctaaagctcggatttagaagacgacggaacatgcgggaggagtcgtcgtcgagtagaagaggccaggagacagaagaggggtgtggagttggaactggggggcttacgtacggggacgaagcgggcgcagcggatgcgaaccaaaccgaagcctgctgggtggcggtgcagaagaattagg

SEQ ID NO: 2183 - DNA, 771 bp, Zea mays
atgcctgcagccgaagcttgggacagtgctggctgaggccagagatgggctctacgctggttgggaccagtggtatggctgggggactagtgcagcggctagccatgatcatgaagaagtacggccaggcgggacctctacgcgagctagaagaagacactgagggagaaaacgaaagaaaggaaattgtaatataacgtggatccccataaattatagagattattgacgttatgctagagcatcttctacaatagtctgaaaaaaaaaacagtattggtgttggagataaagtactggtgagctgctagagatgctcttagctcatacatgttgctacgatcatatgcactttgtgataatatggtggttcttcacacttatgtcatcaatgttgtatggatgtctacaacaaaagtgtcaccaatgtcaacgtttgccaggaaaggaaccccatggttgagtacttgagcaaattctagaatctagaccatggatagttggtgctacagtagtagtatcacttaaatggctggtgtatttccaattcatagtgaaaaggcatctagatgagttggttaggtcgtcgcctgagtagaattccttgggtcttgaatttaaatctctggggcagcaaattcttaggctagggttaaaaataatccccttgtctgtccaacactaaagcacaagtctaaagcctggccctaatcatggtcgttcttagatgggctatgtttctgttgtaaaccggtggggcagatgtttgga

SEQ ID NO: 2184 - DNA, 697 bp, Zea mays
ctgcttagcactgagcctcatatggtccatgcttttagaagctaaatatttcacgtattgtctgatgcactgccctacatgctcaattgaccctttcttcatgttatgtatctattgcaggttgattttgatgacatactcagctgggagtacctgttcaagctatattggctagatctgaaagggaagctttcattaacattggaagaactcactactgccaagaatagatggaatgttcctagcacttctgctaggaaagaaaaagaggagtcgtctgatgacctgtatgatgctaataatgatgatgatgctggttctgactgctcctcaggaaaacgaaggcgaactaattcacggaaaaagggtcaaaaacgccgaaaggtaaatagagattgtagcattcttgaaaaaaaggtcgagcttccacttagaaatactgagagcattcctgtggaagtgccaaatgaacgggtgccatatccggtacacacaaaagtaccaaatggacgagtacccatgccagtagacacaaaagtaccaaatgaaccagtgtccttggcagcaaacacaaaatgggcatcaccagagctattggagtttataggacacatgagaaatggcgatcaatctttcatttctcaatttgatgttcagactcttctgcttgattatatcaagaagaataaccttcgtg

SEQ ID NO: 2185 - DNA, 757 bp, Zea mays
aagttccagttcgcaggccggacggaggagcaatctttttcttcagaaaaaaaatctcaggagtgtgtgtgtatgtgtgtgagagagagagagagcgtcgacggacggggcgaacttgcaggagaggagaggagaggagagcagactagcagaacagagcaggcagagagagcccagagaaggctagaagcactgccctactatttgtcttttcggttcagaaaatgctgttctggctgggcggtgcccggtatgtatatgcttttgatgagaagctagctagctccactccactccactgcacgcagacgcagtcccggccaattgcttttcccgaggaaaccatcgagatgagctaagcctaagctagcccagccgccttttccccgtcctgaaaatcatggagtaattggtggagaaaagaaaagaaaaaagagcacccccgcaaaacccctggcggagctacgtagccttttgccttcacaagtatgcaaagggagacgagatcgagaggaggcgaggccacctttctcccctacctacaaagcttctactgttccagcagcagcctcactaagcatgacgaacgcgcgcatttctgcatttctactttttctttcagattaaagtcgtctattttttactgttgcagctgtaatctataaagacaaaaatactataaaaatagtataagcagatatagattaaagtcaaataaacaggagcaagcggcttgtttttgtgaaggaacagtgag

SEQ ID NO: 2186 - DNA, 599 bp, Zea mays
tcacgttgtgtgcttaagcaggagtttgccattagcaacaactctaaaatatgatgcgcggctagattgatagaaaaacaaagtgatgatatgtaaaactttgctaacttaccaggcacgtgtctcggagtggaagctacagcaaatgtaattttcgcgagcagttggaatttaggtttggatttagctctgttcagtgttcacctttcttaaatgttgtttcggcgcccacagacatctcccttgcaggttgcgcagccagctctttttcaatgttgggtgtagatcacaatctatccactactagtatagtagctctttttcaatgttgagtacttcagaaacagcattggtaatggggagttcagagcaaagaagccttcaggcttttgagaaacagcattgggctgggagaccgacttcatcgtcttgtccgttgcagaaatttgtaccgtaactatgatgacgaatacatggatgaatgcacgaaggcatgacgtcggcgagcagaaactggagtgctgtaatccatgcccgtgttaactacgatcagatgttcagcctacctacagacgctcgaaagtgttgggtgaggcgct

SEQ ID NO: 2187 - DNA, 663 bp, Zea mays
aatccatcctaagttttccatgctcgacgacagttcggtttcggaaataaaaattttatagctgacggcctaaagggactgttcggttgtgtatgaatcgaatataattgaagggataaaatctatttccagtcaaaattgaatagaaaaagatttagaagtttggttcacgaaatgtaacttaaatgacaacggtaattaactgagagtaaaatcactcagaccaaaatctatttagatgtttgcattgtcggagagtaaactccggcccggtggtaaaaagcactcgtctaattctatgaataggggggcagcaaagggtttaactgatgcgaaggatggacacaaaaacacacaagagtttagagtagtttggaataccaaagcgtaatacactactccactgtggttgtattgctgagggtgtgcttgaggttgtctccaagtaagtctgagtgagctcgtcctctctcgtgtgtagcgcgggtgtcctaccttctatagaccaagggggcacgcacaagagagctaggccccaacatgtggggctaggcgatctggtattaaatatacactacatggagcaacaaacgcaatggcgcatagagatctcttcatccattatgcggataacctgttcggacgtgtctttgtgtcccaaat

SEQ ID NO: 2188 - DNA, 712 bp, Zea mays
agagttgtgtttatttatattttaaaaaaatggtgtcagatgttagtgtggatttggtgatttaataacattattagtggtcctataatgccagatattcaacagtactaccattctcatagaaaatggtgttgacaccaggattcttgcaagccatagtatatatgtaggactcaactctagatttgttcattgtaatcatacaccataaaaggagataaaatgggtacctctccaaaagcatcgttgtatctcttcagtcgttaaacctgtcggcaaaaacatgtaatacatagttagagaatggtaacacacacacacacacacacacacaaagaaataacaataataatagccaaaaaataattggccgacatagatcgctgcataaaccacaaggcagtgccatcctgctctgaatactttcgcttgactagaatatcttacaacttactgcttactatgtcagagattgtactcagatgatggtttaatcatgaacatgaaccttggttattgctgtgttctgtccattttaaagcattatgttcaatgttacaaaatatcatagccagcactaagaaacaaactttgggaaaaagtaagatatttatgcaaagtccaaactcttgattatcatctggaggagcaaaagtttatgctgaggctttgggaacttgctggagcccgtaagcttcaagaactagaccta

SEQ ID NO: 2189 - DNA, 756 bp, Zea mays
  unsure (1)..(756): unsure at all n locations
ccacggcgcgcctcgatgttggtgtagtaattgttgtcgaaggtgtccggcgtggtcgggtcgaggtcgttgagcgccgacgcgttgccggccctcgggcaccgcagggagaggaacgcccggtaccccctgtccagcgtcgggtccggccggttcgtcccgctgaagttgtacagccgcgcagtcacgaactggcactgcacgcgcccgaacgtgtgcgcccctgcaatgcatccgccgtcgttgtgacgccatgtgtcgtgctgtgcaggtgcaagaatcacgaggcatgcatcgccggttttctctccccccctttttcttttacctgagagcgcgacgaggtcggtgtcgtcgaggccgacggcgccgaacttctgctggagcgtagtgaggttgtcgaaggggctcgggaggttgttggcggcggtgatgttggccgtggtgccgtcgcgccggccgagaggcacgcgccaccttggcccgccggactgcgcgcatggtgaaacgggagggaccacgcgtcatgtggccgtgttggattaaagcgtggcacggagaggacactgacgggcgcctatgaccctcgaacgtcctgctgatggcagccgacgtgacgtgacgtgtgtgaatatccacgtcatactgtactaggatatctatctgtttctgcatgcttttaattttaaatttttaaaaaaaggcgtgcaggtttgtcatcttctcgtagatctctcanatggccatactagctac

SEQ ID NO: 2190 - DNA, 806 bp, Zea mays
  unsure (1)..(806): unsure at all n locations
cctatttagtcgacctgcagttgcagccatggttattaaggtggtaaggcgatataaggcgttaggaccaccgtatggacgtctaagacgagcaagacgacaccttatcagtctcaaaaccagcaatatggaggaagaaaaagaaaaaaaagaagggaaaaggggaagggttaggaggcccagcccactagctagcccatataatcattaccctggttgcctaggttgactctctactccacagttcagccgccggttgccttctcctccatggtttagccgctaccgccccgattgagccgtcgttgcccctagttcgccaccgcctccgtcgattcgaccgctgccgccctgatttgacaccgccccttctctttcccctctgctctcttgctgattcttacctagacggtgggagtgccttggaccttttgggcgcctggatgattcttacctaaacggtggaccttttgggcgcctggatgtctaggcgacgcctttgaaacagtgattgcagctgaagcgggcacctcgcggtgctccgagaggctagtcatctgtccttccagaaactgaaggaagcaaaagccataacgtaaaccagaacatttcgaatataaactgtggatgcaaacaacaatacacggtttaaaatcgctggctgggatattattatctgctcagatggaagaatgtgtaagtatacactgttacattcaatanagagagagagagagagagagagatagagagtagtgagcccttttcctctataacacccgaacccctgaagagagggcaccgaa

SEQ ID NO: 2191 - DNA, 755 bp, Zea mays
agccatgtcgtcgtcgtcgtccacggcagcgaacatctccgagcgtccgatctctccggacaccacccgcgtggcctgggtggggacgggcgtcatgggccagtcaatggccggccacctcctcgccgccggctacgctctcaccgtcttcaaccggacggcatccaagacccagggccttgtctcccgcggcgccagcctcgcggacagcccgcgcgcggccgccgcggctgccgatgtcatcttcctcatggtcggtttcccctccgacgtccgctccaccgccctcgatccatccacaggcgccctctctggcctcaccccaggcggtatcctagtcgacatgaccacctccgaccccaccctcgccgccgagatagccgcggccgcggccgccgccggctgctcggccgtcgacgcccccgtctccggcggtgaccgaggggcccgcaacgccaccctatccatcttcgctggcggcgacgccgccgtcgttgctcgcctggcgccgctcttcaagctcatgggaaacgcgctgtacatgggcgggcccggcgcggggcagcgcgcgaagctgggcaaccagatcgccatcgcatccaccatggtagggctcgtggagggcatggtgtacgcgcacaaggccgggcttggacgtggccaagtggctggaggccatctccaccggcgcagcggggtccaagtcgctggagctgtatgggaagcggatcctggagagggatatggcggcttgc

SEQ ID NO: 2192 - DNA, 753 bp, Zea mays
atcttgcatgcctgcagctcatgccaaatcgacacaatccagtcctgaggtagtaagtgcagtccggttcacctggtcgctcaggatatgacccaggttgcattgtggcaccgctgttcatggccatctgttgccacatcccctctgcttgattataaagttataacaatcaacatgtgcagtgcgaaattttccctttaggtctctcctctttgagagatgaaactatccacatttcacaccaagggtattcgtgcaacaaataacaaaatcatcaacacttggcagtggttttaaaaaaatcctaacgaagcatccgttgaatctagatggtagaaaggtgtaaaccttctaaactaataaccgcctcacgatgtaacccaatccagtggcacatcaaaaaaaaacgcccaatttcacgccgacgcgaagatcagcacaccatgatacggattagcagcccatggttcatattcataaacagagtactccaggcgcagctagtgattccacgaaagaaaaaaaacgtaaaaacagagcacctgagctttaacctacacggggaattgagcaccgaaaccccaatttccccaaccgcgacacgcgccggagcgcgaacggagagagcagcggaagctccaaccttcataaagcgcgtcggggtcgagggaggacttgtcggcggcggccgtggcggaagggcggggtatgctcgggtgcggctgtggcggaaacagtcaccgccgctggcct

SEQ ID NO: 2193 - DNA, 747 bp, Zea mays
atcctctaatagctacctgcagagcatgcctatattatataagtacgaaaatggatcaaccaacatacaattttgtgacgagaattcaaagtaaaaaagagatgtgaacctgttcttgcggtggataattctcaattcaaatacctcatattctcggtgaaaatcagagagagcaagataaatatttgtctccgcatcttcctcagcttcaagagcagtagaatgttgaacatctgcatttaatgatcctacatttcgaaactcatatgcttcatcaggatcaccaatttcagggaatggctgtatcctatgacctttcagatattctttatcaatgctgattttcggatttttgtcacggatgccattgaggtcaccgttgtccgtgaaatcatgtacaccgtgatctatggaacacataaagagaattagaccagcacataagcaaaagatagcctctaacaagaaccaggacaaatggacaactgatactaaattactcacaaatataaagatggaccaacattattttagtaagactgatcaaatagtacgttggacccggctatattgcaaatacgttaaaaacaagatcatcatacttgaaatgtgtgtttttttttttgagaaattcgggggggagaggtaccccaccttttcattgccattagtaagggcctatacatggtcaagttacatgtccgataagattgttacagaggaggagaagaggagaataccatcacc

SEQ ID NO: 2194 - DNA, 771 bp, Zea mays
tgtgatcattttcatcggaagcgtttcatctacagacctatccaccagcggtgcacacacagcgtctcagcacatgagagagagtacgaccacttgaaacgcttaagatcacacagacaaggacccaacaaaaatgctcacatagcagagaatcactgcgctaacattgcgatggctaggtaaacaacaaatgcaaggagcaggaacgattcagaactcggatacagaggtttacatggataaatagatgaaacaagcccagaattgttctgcatattacagtcacgctagctacctacgcaaccaaactatcgtacatgaccatacactagagactacatccactaccaagtcaagcacaactaggtgtgtatggctgtgaaatggttaacaatctttgtaaccagtacccaggtcaccggctcgttctcgcggtgcccccaattgtacagagccaaaaacctccaaacacgggagaattggccggaaaatagtccttccaggttcaatccaaaccaccactggcacatccggtccacagaatcacttctcttctcctccatcgggatcactctttgacttctccaccttgccgttgtcttctgcttcatcttccgagccttcttcaccttcatcatcagacatgctatttattacatcttctatgatgcgtttcacttctgcttttctgtccatgaggtccatttcgaaatgggtccctgggtttaaacgaaccaagcatgtcagtacactcatctgctactgctagaa

SEQ ID NO: 2195 - DNA, 782 bp, Zea mays
agcctcgtcgtcaccgacataacctgaaaaaatcattcaattgactcatgtagtagcgcccccaaacaagacaaacattgttccaagattcaagggaaatatctaaaatgccaaaatttctgggaacctattttgcctaaaaaaaggtgcaagttcatttatgaagtgtgaacaaataagttctcatggatatctgattgtggcagaatccttaagaaaaggactgctactagcaaaccttcaaatataaaacaaataagttgatttgttccagaccaactaacagtggccagctaatattttaaagagctgatacattgcgcatggtactctactactatggttttcagatataaaacaccatgaggtacacatggcaagctggtaagatacgatcgcaattcgcaatgaacatcagcggcagagtggcattactattcgttaggaacagaataaacagccatgcattgtccgtgatagagatctgtagttataataactattaattaatcccaaggtgctgcactgaccacctttatttggttggtacaaatgtttaagcagcacgaccaaaagcctcattagaaacatgctggcaaaccatgctgcttgagaattaagaaagatcgcctgatcaatgcacagcttccacagaacaactccatcactcacagacaatccaaccgtatgacagaaagtcttacgagaagcatcatgggaagaaccttcgcatgcgaggttcagtaaacaatggtatcatctgaataaacaatggcctcaaa

SEQ ID NO: 2196 - DNA, 1260 bp, Zea mays
tccagcgtgcggcggccttctacagccgcgaccattcttttgacttttactgaaaacatgctgctatagttatattctcaatagatctacaatagcactattttaatgcttctctgcctttatgctaaaatggtatttgcaatgtagtgtcttgctgtcctgcatctaatcttatgacttgcatttgaattttgaacctatgatgctctatagctatatatattaatatatataaatatatatggttctgttataggtggactattattagacgactaggagtcgattaggctcgattaatcgaggaaaccaacgacttatcgcgaatagtcaccttatcggtgctcaggcgactagagtccacttgtcgactttaaaaccttgctctataacatggggacatcacatcgcaaggtttataaatgcatacgttacatataaatttgtggtcagttgtgtatcatgaacaagcttttctctaccaactgtttgtagagggccaaagtatggaagaataatgtttttccctcgaattgactatattcatcaatgcagcaaaaatttaccagtcaaacctccaaagagtttttttttaacatgctggccacattgttcattaagaagaaatagtattgaatgagtattaagtgttcaatgagcaacttcagtgtgataggtgatgacatattgaggacatatcctgtgcaatcactcattttggttgcaagcgtgcactcaaactatccagagcatccaatttagatccaacggtttcatatggaaggggttaaaagtaaaatagatactatgttttaggtggaaggggttaaatataaaataacagtcatcattagatctagatcggatgcaccagatcgtttgattgcatacttgcaccagataagtgattgcataggatattttcccttcatagtaaacctatttggagacaaaaatgtggatacttttatataaacttagtcgaacttaagaaaatttgactttcacccaatccagaagtgcactcttttttgggacagagggcgtaaatacatgccattttcctttatttatcctctattgctgaaatctaactacctgcacataccaggtcaagtatctctggcttctttttgatttagctgctggccctgacaatattgttgaaaatggaccatataagtaagtatgacaccagcatccagtaagttcaggtgttcattcagacatagagttcacagttacagtgtatcattggtt

SEQ ID NO: 2197 - DNA, 852 bp, Zea mays
tgcatgcctgcagtgcccaactcatcaattgcaaattaggaacaccaagaccccctaaacttagtggccttgtcacactttcccagggaacaatacaacttccaccattcaccttctttcgccctttccaaagaaaccctcatcgaatcttgtcaattgatttaataacccatttgggaattttaatggcaataaggagataaatcgggatggcagataagacaaaccacaccaatgttatcctcccggccaggttcaataaacgagccttccagttagggagtttgtctgcaattttatctatccacagcttaagatcatttcgcttcagcttcctgtctgagattggcagacccaagtaagaataaggaaatgaggccaaactgcacctcagcacattgcagccctcttgaaccacatgctcctcacatctgataggaatagcataactcttattcatattggtaaccaatccggaggccgacccaaaacaattcagaatcaatctaacacatttcaaatcttcctcaatgggtttaacaaacaggaccacatcatcagcatagataatgtactccctcagtcccaaaaatattaatcgttttagctcttgaattgtatgtccatggtcaaatggattaattattgtatgtatcaactaaaaggtaaaacatattttattttggaacggtggaagtagtattttaatttttaggacactattttgagttaccttgttgaagatgctcttagacgacattaggactatatttttgtatatttttaccagcaacagcagcagatattcatgcactgcatgtaatcagtgtagcacgtgcacgtatatatagc

SEQ ID NO: 2198 - DNA, 778 bp, Zea mays
aaaaataaagatcaaagattgtttctacaaaaaaaaaaactaattgtatgtaagtgtaaagatttaccaaccttgaaagtcatcatgttgaacagagagatttttcctccagaagcggacatgacatatgaatcattcttcgacaaagcaaagcagtgaacagcttcttcaggattgttgtcagtcgtgtcattagtcatcaaaatgccacttggtggttgccatagtgtgggagacacactcgcgcttgcctataagattgatgaatagcaaactgaacaatttagtaacaatctaccatacacaattttcaccaatgatatgcagagaagatgagcgatctgaacactatttatgcacatctatatgtacataagaatcggatctcacctttccagaattccgatcactgcgtggccatttccagagtagatgaacagcacttgaagttaaagccaagatagcaagaccagaatttgtgtaaatcaatctcgagatctgcaattataaatttcttcaaacaaccttatgataaaatcagcatagtcaatgccaaggataattgagaaataaagatcacaagtcatatatgagatggcatccattccattgaattgaacaagcatcacatatattgaactgaaaaatctaaggtgaacatgcagacaagagcttaggtgccgtttggttcacatatttgtaacatgatggataaccgataaaatcaaatcatgtttggttaagtccaaccgtaatcaaataccacactagaaactaa

SEQ ID NO: 2199 - DNA, 686 bp, Zea mays
agaagtaaattttagatctttagtttctaaagtgaccaaaatttaggcgggggtttggaaaccagtaggttttgagaatctgtatcgtgcacgttatccaataaaattcaacacaaagttgataactgagattctatcttgcagcagattatcaaagaaactaaaagaaaaatgtttagaactacagcagataaagtttatctgatgataataatttatgggtaaccaaatatgaccgtagtcactttgttttatctcatgagatctaaacatgtccatagttagtcgtttagaaggtgggaaccaaacacacctttacacatctatactggtggctctattttttcacctccagaatcaaagcaaaaccgaggcggcgaggctcgagtttgcagccttgcagggaatccgaagctagcagctggtacgttatcgtggttcgtgcacttttcgcggatggtcgtgatacgaggtacagcaggtgtgttccgtgcccaatctgctgggtcaccacatccgctgccaaggttatcaccttgacatgatgcgcagaagcagagaaaaggctagcaagcatcatgccaccacgacaatgaccatgtcatcctgtcttgtcccggcagaaaagagttcagactttggccttctggccatgcatgtgtcgtcttgcaggaacgatatcatta

SEQ ID NO: 2200 - DNA, 825 bp, Zea mays
ctagcttgcatgcctgcagtgaatcttgcaaagtagtggcacgtgttttagtttttagtgcggaaggaaaaaaggtaaaataaaaaagaagaggaagcaaaggtggggttggattggtgaactgggcagggcatggcaggacaggagggagggcacggggcaccagccaagccaaccatagcaacttctctaccctaggcgtctctgtcagcccactccgatttgggccgccaccactagtgatggcccatcaccgccgccgcctcctccactctccctccatccatttaccaccccaccccgccgccgccctcctcttctctccccctgagcctgactggaaccttcccgagagaggatacaaaggcacccggatcgaggaaaccaatccattccattccattccacacaaggctaggcacaagcgaaccaaacccatggcgtccgacggcagcggcgtggtgacggtgtacggcagcaacggcgcggagctgctggagccgtccaagcagcccaagtcggcgactttctccgtcaaggtggggctggcgcagatgctccggggcggggtcatcatggacgtggtgaccccggagcaggcgcgcctcgcggaggaggccggcgcgtgcgccgtgatggcgctggagcgggtccccgccgacatccgcgcgcagggcggcgtggcgcgcatgtcggacccgggcctcatccgcgacatcaagcgcgccgtcaccatcccggtcatggccaaggcccgcatcgggcacttcgtggaggcccagatcctggaggccggggcgtcgactacgtggacgagagcgaggt

SEQ ID NO: 2201 - DNA, 805 bp, Zea mays
aacacagctccagatgcggtctcaacacattctccattattttatcatttcttcttcctgcgttttgaggcacctgaatactttgctgttttatgtacatgcatgcctgattgccttcccaccttctgaacccgaaagaaaatggctgaggagtgaggagaagaaggttcctattggggggaatccctgggaagagattcagtggccaaggggtggattcagtattcagagcaagtcatgtagatagacaaatataaacacaacactctcttgactggctggtactggcacttgccatggtgagtaccgcccagcagtaatcggtttagcggtacacatgtccaagttaattaaatggatggttagatagcaaggatccaaaatgtggcaagctttcataacatggtctagaaaaagggcaagttgcaccacattgcatagctaaaaaaaataaattgaaattacaggccaccaggattgatgtgagaggatccacaccatacatcttggccttactggtgaggatctaagtcaaacacatcaacaccccgggaggcgaccaaactactgtaggcgttccataataactccctaaccatcagaagactagctagacacttcggcgacggcacactggatagagtagaactcgcttgcttcacctttcatcgtccggtcagttaccaagcaaagaaggatctcaaaagtgaaaccaacaaacagtccgggatccagtgtaagtagtagaggaggttaacccagttcagtcttcgggctgtcctgggggcatctgatcagcttcagt

SEQ ID NO: 2202 - DNA, 790 bp, Zea mays
tgcatgcctgcagcattggctgtgaacctaccaaccatgtggtcttctcttgtcttttctgtcagcgttagtgcctgtacaaaataatattatgttacgagtccagggtgcagagcatcatccagcatttcagctacgtgttgctttccttctaaaatttagacaagtgggttgttgaagagggttttttaatgcactagatctaatagttattgactaaaattaattgagacatctaaacattctagctaatagttcagttattagctattttttataaattattagttaatagtaggtagctatttatcagctagctaattctattaacaatttttaaccaactaactattagttctatgcatttaaacaccctctaagttaaactggagaacaaaagccgttgttttgtcgtggtcaacgaatgcttcatccgaccttgtggtcatgaaagctttaaatcctcaactggccttctcaagtaagagacagacatcgcatctgcatatatggttgagatctgagatgcatgcacgtggtgaggtacatgtgctgcatctgttctgttcaaggtctgaaatatagttgtggcacaaatctgaaaacactgaggccccgtttgtttcgctggaattgaatttcactttaataattataatttagacaaaactaattaagtttatatatttatatatgtaatatatttatatattattctaaatcatatgagagatattatatactacatttatgttatagcaaagttagtagaatattgtgatataagtgt

SEQ ID NO: 2203 - DNA, 817 bp, Zea mays
tttgcatgcctgcagatgcggatcgatcagacgtcggtcggtaaagccgacacacaacacaaagcgtcccgggccctgtcaacaaaagctacgcccgggaaaagcccagacacacgcttctctttttacaaagccaagtgctgtgccgatggacggtgctcgaatttacaggccacccgacagcgtcatcacctcacccccagatgactggcgcctagcatgcgtttgcgccccagtgtgcttaggagcacgagctgttcgtttaaacacagcaaaatcgcaagctctgaacaaaaggcgccccttgctgtttcacctttcaggaatgcttatcatacctgaaggtagaacacagcacaggacgaaccctttgtgctccagcaaagcacaattccgccgtgttaaaagtcgcggctcacaccctaagacggccacagtggctcaaaaaacacactatcacctacgcgccgatgcaaatcacaaagaccatacagtattccgtttccatctttgctctcaaacaacgggcaaactaaactagattttcaagcaggaaaagataataagttaactgaaaaccaaagaattgcacagctcgtcagccgatcgccttctcgtccgagaacctgggaagctggacgagcgagttcacccgcgtcaccccgtcgaggcctgaccaactctggtcgtgggctgcgctggcaacgaccacatccaccgcccccgacagcgccttctcgtgggcgcttccggcgaccgtcctgacccgtgaagttgcgggtcagcgctggctcctgctcctgggctttgtttgggt

SEQ ID NO: 2204 - DNA, 798 bp, Zea mays
agtaccatgtcccgaatgaatgaacatgaggtcaacgatggtaaatctgctgttttagtctttatacatatgcagcaataaacgagtaattcatccatgtatcactgaacatatagttcttgcgatcaatgttgacttgcacgcgtataatgccaacaattttgtaagatactatcaaatttcttaggagggttagagagagaagaaagttgtcacaaagtcaacgtatgacatagcttgcaaatggcttatatagttacacgttaccagtatattgaagaataatctgtggattttctaagtgggtcgaatagctagcagataccagtggatatcaagacgtttattgcaatatctcgaaccaatatttccgagactaaagtttctgctgtgcatgtacacagtattttaaaataaggcattatcatattcagaaacatcttttttttttctgttggcgtgttatgtgatggtattgtgttaatatgtggcacaaaagattgttctcaattattgaccagtgcattaatgtcaaaccctgtttatatttctcaaatttgatttagaaagtaaatgcacaatctttgtgtgatatggctagatatcatttcatgcatgctgcacacagtttttccattaatcacatagtcctatataatcccctttaagccttgactctctttgacataagaaaatcccaaagcttcctctctttaccaagagtgggaggatctgatcctgaattgtttttgaggttgagcgacctgaatcgaaggtaagggaagtgtcagttttttt

SEQ ID NO: 2205 - DNA, 758 bp, Zea mays
aacttctcgcgggacatgggcggtgaggaaatcggggacagttcttctgttgttcttgctcctaggatcggtggtcgcgccaggacgtctcttgtggcatggccaggtccggtgctctgtcctgctttgagcaagcaggccattccactgctctcttggtgacggggtgactgggccttgccactgggagaagctctggattgtatggttgcaatgtgttgtctgtcctgctaagttctctgttaggactggcagtgggattcctgatgcattagttttccctttccctggtccagtatgagagcgggaggtattattcgtatcatgatgattgataacaagcctgacatcattgatggtgtgcctctgcctcctatcatccagctcgttcttctttattctgtcgaaatgcttctgagcatggcttgccaactgggctggtgtcctggacgggacaaaatacttggaaatccatttccactcgcctcgcccgaaatgctgtacaccacgtagaaactgcctgcatgcgtttgcacgtagattgataagctgcattctaccaggtaatggagtgagtgacaactactgtgttagtcagacaatgtgaagtgaccgctacagattataattccatagactataaacacaaggggttccatctgagtctcgtgtggaattctgattcacaatatccacagtacgtatttctagttgaaaatgcttgttcgaatgttcgattgacatttgacaacatacag

SEQ ID NO: 2206 - DNA, 720 bp, Zea mays
gagagacctgccggcctagaactgggtctagatcaggattcaattcaatatgttattcagttcatatatatgtatttaacctgtgtaggggtcttcatcacatgggcctgggttcacactaagtactggtgatttcccaacacttggctctgaagcaaatagtcaacgaggtaactatgtgcaacacaaagtgctctctatatatatatttttgttttcaagctttctgcccctgccatattgtttctttgattttatagttttttatgtttagcatgtcaaattatgagctgccttgaatactacatatgtgctagatataaatgctagcattggtaaattatttgggcaaatatgttttttccgtattttttttttgaattacaatggcctgtgtcatgtacttagtttgtgtatagggagagttctctttacatgtctttttttattccaggccatagttcgaaagggcgcccaatttctagttcgggtaaagaggtgtcgcaaggtgaacaagtgaagagcctaacaactggtataatatatttcatcattacaacataggttgatagcagcaactatttgttcgatacgtattgcctgacctagtaacgggaaatatcttgtgtgctaaggaactggtgaattaatttccaacccaataatcaacctgatgatatcatgaagacggagcagcatgcacacactggaggcgctcct

SEQ ID NO: 2207 - DNA, 777 bp, Zea mays
agtggtaagcacgagccaggagcatgtcctgtgccacgcagtgtgtgtgtgtgatcgtgggagagtgctccgagtttccagggtcgtgagtatggctatcgtgggaagtttggagctgagtaattgtaacgcgttgagtagttcagtgaataaatagaaaaacacaaaaaggaggcaagttcgcccgttttggcctgtccaaagaaaatcctccgtgttcactgttcttcttcaatcctcgactgattgatcgctctctctcggtaatcgacgtcgagctgaagtcaacatgatatatgtagtattttaatttttaaggcaatttttatcaccttgttggagatgctctaaaggaagtaaacacccccttaatgttcacctaaaagtgatctagccttaatgtccacctaagtatcgtttcaagcaaaaaggaaaacatatgttgtttatttggggtatctggtgacgtgaggctttacataacatggcaaaggtggtgtttccacgttgtagaccagatgttttctagattggtctcctaatgcagcaaaacccatcacacacctttcgttgtgctgggaataggtgcatgatgcatatcacattgcatggaaaaagtgttgtatcatttgtttattttatctatagtccccacttcacgtaagccttgctggaaaagccattggctgttaggttgcttggtcatttcatttctctagtgggtgggggaaataaaaaaagaagaatggaagttgctaatgtcgagttaccattagt

SEQ ID NO: 2208 - DNA, 786 bp, Zea mays
aagtgaggaacgcgggaacataagcttattagttattcgcaagtgaaacggaggtggtattgggaagctaaattgttcttgagacacagcctacggtcgtctacggatactaaaatttgctatgccgaagtttttgctgataaaaactggagtatcagtctactacagatttgtcaagccaaatgtagaggttggtaaattatggtaccaaatttgaggctttctttagaatgggggatttttagaggaaaaaacaaacagggttcagcaatccaggaccaggactataacagtgcagatgttcttttagagtttctttggaatggagaatttttacagaatagaacaggattcagcaatccaggattatgacagtgtagatgttttttgtttgttaaagaggatctcaggaaacctaaaggaatactgttggaatggagggtagcatttctctttccgtttctcatgaacatttgatagctttttttctcatgaatatttgctagttttttcccgttgcaacgcaggcatgtttgctagtcattagtaataaaacatcaatgcatcttatttacacgttctcaaatcaaaatttacatgttggtgactaggaatccttaacacaccagttagccttttcacagaagttaattaggagatccaacagagaacagtgtgtcttacgaacttgaattctactgctgtatgttatctggaactcatagtgcatcacgaaaaacaataatggtcgccgaatgccttattccaattaaatgtttaggaaat

SEQ ID NO: 2209 - DNA, 764 bp, Zea mays
aggtattattacagaaaaaaagagtgccacttatctctggaattcataaaaatattctgttagctgaggttatgtttcctttgttaagaaacttttatttcactttgtcaaaaataaatagaaaccgtcaagttgtattgtattgtactttgttttcacttctaactggatgtgagaattagataatttggtcaagacattatttttctagtagatgcatatcttagagtttgatgttcacaagtaaaaaaatatgttgcaggttttgcgtgcacatcacgatgaagtgtggtttattcaattctcaaataatggaaagtatttagcctcagcgtcaaatgataaatctgcaattatatgggaggtaaacttgtgggcctgtgcttctaatgtcttcttttctcatggtctgcatacaaacggggtggcctgttccttagttcctattttacatctcatatcaagaactgaacttgtgcaatcttactaattgtttccatcacctgtttgttatgtttttacaaaaaagtggactgtcaaatccttgcttgttttcaaaacgaaggcagaagtttgccatttcatattattttttccccgctgaaagcctactactaattacatcgtgttagcttctggaactaaattcaatttagatgtgtgccaagtttgctccctagtttgaatcctggcacttctctatgttcttgtgatcatggaagtgtatgcccccaccatcttacagttacacagcagtgaagatg

SEQ ID NO: 2210 - DNA, 806 bp, Zea mays
gcacgacgcacatgtgccccgtgcgcgtgcactggcacgtcaagctcaactacaaggagtactggcgcgccaagatcgccatcaccaacttcaactaccacatgaactacacgcagtggacgctcgtcgcgcagcaccccaacctcgacaacatcaccgaggtcttcagcttcggctacaagcccgtcgtctcctatggatccatcagtaactctctttctctttctcttctctctctccgtgatcgatcgtatcacgcgactctatcttcaacgcgacgacgcctgatgatgtcggttctcttcgtgtcgtgcgtgcagatgacacggccatgttctacgggctcaagtacttcaacgaccacctgatgcaggcggggccgtacgggaacgtgcagtcggaggtgctgatgcgcaaggacgccagcaccttcaccttcaggcagggctgggccttcccgcgcaaggtctacttcaacggcgacgagtgccagatgccgccgccggacgcctacccctacttgcccaactccgcgccgccgacagccgccgcatcgctgggcggcgcagcggcagcggccgtcgtggtgctcttgggcatgatcgtggcatgagaaaacacgggacatcgatcgacctagtgctagaaccggcacaggggaatggaaaaaaaggcgttgctttcttctgtaaatagagagaccctcgttagcggtttcagggaatgggttggaaactctgggatgttgtttctttttccgccgtaacatgggataaatccatggagtcccgccaggggaaaaattc

SEQ ID NO: 2211 - DNA, 764 bp, Zea mays
aggagtgctcgcctcgtgggcgcaggaccctagcgacgccgtcgcctcgttccaggtcagcgttgggcaggctgggtccaccaacaggaccgtcaaggtgcccaggaacttcaccctgctggcgcctggtcccgggtacacatgcggagccgctaagcttgtcaagcctaccaagttcatgtctcaggatggcaggagatcaactcaagcgcacagtaagtaagatgattaacctcaagcctaccaaattcatgcattgacgatcgacttgtttattaatttcttcgcgcagtgacctggaacgtgacgtgcacgtactcccagttccttgcccagagatctccaacctgctgtgtctcgctctcgtcgttctacaacgacaccattgttagctgcccagcatgctcctgcggctgccagaacaacaacaacagtagcaccgccgcgccaggaagctgcgtagagtaagtttaatttgcatcgacagatcgaactcagcttcgatcgacacaaacacacacacgcacgcacgcacgcacaccattttcatcatgttcagttatgtgaatactgctggactcgatgcatgttgtccgcctgcttgtcctagcttggacaggggtagtagaaggtcgccctatctggcttccgtcgtcaacgatcctagcaagaacagcttggcgccgctagtccagtgcacctcacacatgtgcccggtaagggtgcactggcacgtcaaggtcagctacaaggagtactggagg

SEQ ID NO: 2212 - DNA, 816 bp, Zea mays
ttgcatgcctgcagcacgagcgggggtataattattattagtgcttcagatgacgtcgctcctttcgtcgtcgcgttgtgggccccggcgcccgcctcactcactcacggcaccgttgggcgggcctgggcctgggctactaccgcgccggcctagagcaaccgcaacgtggagcaacggaaaggcccctaccgaccacgcgcaggtattctcacatgggtccctggcgtatctgcaatttacgtaccagtagtttctgaaccaggacggcttccacttcttctttctttttttgtcctcggattccaaagttggaggcagtttacacaacattctgatcacacttttgttctttctgaaagtgatcttgctgaatggatacttggataggcgtgagcagttggagctcgatcgccgtccatggttcttaacaaacacccttgtcccttggtacacggtttcacgtagattggatagagctgcattcgaaagcagccaatgcaaaagtggtggtgaatgacacactgaacgctttattctatggagatgatattgtattctgatgagctagagagtgagaagatatgtcatccacactttattcttacaatggtgtgttatccgtgtgttaattacaaacttaattcccatcgcttacatatatataaaatatgaaacatgtatgtgctttttttatattaaatttggtccaaacgtgtactcatatattactgctaaagtttctataaagcttcttgaggattcaaatcaagaaaaatgtccaaaatttaattctttatttttttaataatggcg

SEQ ID NO: 2213 - DNA, 777 bp, Zea mays
aacttgcagtcattgaacatgtcatggaactcaatgtatggaagtattccagccagcattttggagatgaagtcactggaggttcttgattttactgccaaccggctaaatgggtgcattccagcttcaaaaggaggggagtcattgaaggagttgaggctggggaagaacttcctgactggcaacatcccagctcagattggcaattgctccgccctcgcatcactgtaagtttaagcacttctttctgatccaatccagtgggtggataaatgtttggagctttacatgctaaacctccgcattctctggtatatgctcacttggttactatctcttgcagggatctttctcataacagtttaacaggagtgattccggaaacactatctaaccttaccaatctcgagattgtggatctttctcagaacaagcttactggtgttctaccaaagcagctttctaatctcccccacctcttgcaattcaatgtttcacataaccagctctctggggatctccctcccggtagcttctttgacaccattcccctatcttgtgtgtcggataatcctggcctttgtggcgcgaagctcaattcatcttgtcctggtgtgctaccaaaaccgatcgtgctgaacccaaacacttcttctgatccaatatcaccaaccgagcttgtgcctgatggtggtcgccatcataagaaaaccatactcagcatttcggcacttgttgcaattggtgctgctgttctaatagctggtggtgtcatta

SEQ ID NO: 2214 - DNA, 1043 bp, Zea mays
aaaacccataatcaagaagctcgtctgtttcctgtaagcagttaaaactgaaccagcatacaagacccggaaaaaatgggactgatgaacaatacagctaagcatgtacagagaggacatacaaccctaacagatgctaaaaatgaaagaattaaaataaaaatgcacttacaatgagaatctttggggaaacatcaagcccttgtttctttaaacgaagaaccatctcattttctagtgcacgaacttggtccagtatatagacgatctggacagcaacaaagtaaactcatgacttgtgataagtgcagggtcaggaaaatagctgatttgttaacatctcagcccatgtcataattacctgtcctcctgtgtctggcaagcctaatacattagcttgaccaaagtatccatgaggggataccacaacaacgttaaaaatcatggggatcctccccaagaatttctctagggtagatgggtctggcgcctgaatgatgtctagaaggagatggatcatttccaaaacatgtcctgctgtatcaccccaacctttctccaggccccactcttgaaatctgaatgttaccaaaagaaagaaaaaacatatatatatgtgttgaagctaactatttttctagtcggttgtgaaaaaacagattaatggcatgccaaaatgcctacaaaagagcaacttaatgccttctcgaaagatttgattctgtaattgtcaacacgacatttcttataaaatgtattcttcatccaaaagcctttttaatcagctctgagaaaattaaattgcaaactgcaagctaaaatagtgcacatcagggcaatgcagggtttattcacaaactcaagccccaaagtaggcgcaacaaaaaaaaatgccaaactattaccttacaatagtacatgaaggagcaataagcccattgtggtagataaagacttacttataagcaaattgtgagtatggtgtgtcagcagggagctttgacaagtgctctcagcttttgtcaagacagactgaagcctct

SEQ ID NO: 2215 - DNA, 760 bp, Zea mays
tgattgccgaaatgtagagacgcctagtttttcttcacacagcctttttgtagcagcgggtcgcgtgtgtttgcattgtaaggccttgagtttttctaagaagcaattgtgagcgtgtttcttttcgagttgggctgcctattaattaataaccgggcagagcctttgctctgtttgggtcgttgttagcgaaacaggtgatttctggggtgtgtttttcagcttctttattaaaataaagaaaagatactcggttcgtattaatctttttatcgcaggttggcgacttcccggagagagacccatttgaagacgaggacgatgacgagatttgagtgcgtgtgcgtttggaaaagcaaggggaatgtccttgttgaattgcattcgaaacgtgtgtaaaatgaattcggagatttgagtgtgcgcgcttgcttgcatcttcttgggcaatcatattgatcacatttcaaggcatgctgttacatctctactatttaagcgtgagctaataaattttccctccaacgcagagtatccaaaaaatggggtggattcgaatcctgctcacttgtataaagcgcatgacttctaccactataacttatttctgtctgtgttatataaattagagatattttgtgtgtatgaatatatatactaataatcttaaaaaatattatatcatttaagcagggttacttatatatctgtagaaacagttacatatatgggggttcttctactagtgctctgaccttga

SEQ ID NO: 2216 - DNA, 686 bp, Zea mays
gacttcaaggtatatctttgaactgcaagaattagcaaagttgaactcaaatgagacaagctcaagtcaaacaagcaaaaactattcacttgtctattacagggtgaatgttacatgataaatatcacaagtcaggtcctataagaaaacatgttaagtttaagtctgcaaatgagatgggattacataggattatgtaagcatgcccacatgaaaccagcagttacctttaacccataggaggtgaacattgaactgggaggtgcagtaggcatcacatccatttgaccaaaagttgaattttttgacaaaggggatgaaggtgaatatgaaacagtatttggctttgtccactgatcagagtcttgtgttatttttgataaagcggctttaagccgagctgagtacatcgcaagtattagtaaggacaaataagaaaggtgatcatctatataagcagtaatagctaagaaatgtgcatatgagaactcattgtggagaactaaatccttacatgattgatgatcaggcaaaggcttgctgctttgactcttgtcttggttcccaaatgtctcatatatgtagtggtaaaagatgccaaatagttgggagataccctgaaaattttggcagcataatcagaaaatattacacattccacaaacttgccctccccccaaaaaaat

SEQ ID NO: 2217 - DNA, 726 bp, Zea mays
ttgcatcggtcgaccagtagtcttccactgtaatcgcctctcattattctttctgccacgctcctcttcgtccttactccctccgtcttgtctatctgtagccacttcgtcttcctacgtttttgccaggttagaaaaaggcatgttttcttttttcccgatactttgtccttctagcagatctagttccttctgcttcacatttattggatctgttagtcgcttcttacgattcgcatcttagatttttggattcgttgggcgccttaaaccgcaaccatatttctcctctaaggtctgtgtcttgtcttcggcgtgaaaagtgaatcaccccacctccaaaaaattactttgccccccccccccccatgttacagttaacgttcttcgctccttactctctgcgtgttatttcatatttacacagtacatggatgaatattctttcgaaaaaagatgttaagtaacttagtgactctccttaacactgtaggatttgaggctgtcatagtatgctctctgaccgtgctggcgggaggaaggaggtgtgtatatagttttcttgcattattttcctgtgactattctcatccctcctatatgttctttcagatgatttaagttctctgcgtttataaccagaaagaggaggataatccaatcatggtaactaaatagtaggtagtaatgtttcacggtaaatcacagtgctcgaatgcgatatga

SEQ ID NO: 2218 - DNA, 802 bp, Zea mays
cagcttgcatgcctgcagagatgtgagactagccaatacggatgattctaggaacaaataccagagaaagattggatctgagagttgacctgtttgagaggagacccatggagacgggagcctggaagggggcgtggtcgatgaggcgattttgggccggcgagcagaagcaccgtagagggacagaggagaggacaggaacggaagcgaagagggggtggcttgcgcgtttgagttaaggacaaaatggggaaagccggtggccgtaggatgcacgagacgctggtttcacgcgggcgtcacgcccgtaactgtagctgccttgcctgtcaatggatggttttggttcgcttgggaattgacaacgcacaaaaacaggtgagagaaggaaagtcaaacttctaaatggagttagaatgattagaccctgtttgtttactggttataggaaggggatatacttcctcggattgacttcgctttgctgcctaaattgccacactttatctaactttttgtttaagattgatttttcaatttaaaaaattaatcttaagtaaaatgtgacacagttagccacgaatcaaatagtaattgacgtagaaagtgcagcaaatatatgcaagaatccgatgcaatacggcgaggaagacgttggacaaaaggttcaaattaccaccgcacagtagcgagagacaacggcgtctacgtcagcccttctatatttgacgttcttattgaccatgattgtgtcttgaacatatattgaatataacgccaatccgtatggtcaaaagtgatt

SEQ ID NO: 2219 - DNA, 816 bp, Zea mays
atgaacaggtaccgagtcgaagcccagccggtttccgaacccgaggaagtgaacgacgccgttttgctcaaggattgggaggatcgatttgacgaactcagatggatcggcctctttcgagatctccatgtcagtgatctgaggcaggcaaagggaaccctgaatccgtgaaacatgaggtgttgaacaaacagaggcagcagggggcagcaccaacctggctgccgattgcttcgaggtccagcgaccgaagtcgggctggcagttgtttcacgattcggacatcgttcttcatgtacttcatgaaatagtcttcctggtagatgtcgccaaactgactggttgggttgaaaggcaaggcatgtcaagcacagcaaacaaaagctaccacgtcatgctggggactgtttattgctagcaaaaaaaaagtttcaacattctttctttctttttgtcatttaggactgtgagaaaactttgaacgttctctttgagacaacatggctatataggaaagaaaaaaaaaagaatagacgaaaaaggtccagtgcgttttcagtaccttgtgtccttccacacgctgctgtagaggaaccgtgggactactagcgtggcattgagcagagcggcgacgacaacagcattgcacacctgcacggtgaacgagggctcatttagccaccgaattccaatacgcaagcacgcggtagtattggtgatgtgagcgtttcagcactaaaccccttacagcgacacgctgctggttcaggccaccgtttgcgctgaccagcacgaaaccgttgttggtctcatcat

SEQ ID NO: 2220 - DNA, 816 bp, Zea mays
  unsure (1)..(816): unsure at all n locations
aactaacagggttacctgtaatggaagccatagggaggcctctgatagatcttgttgttgctgattctgttgaagtggttaagcagattttggactcagctttacaaggtttgtcactatgctttcagtcgatctttttgtggttcccagcttaatctgaacgtgtccatttttttctatgccagcttagtgtctccttgtgtttcaggaattgaagagcaaaatctggaaatcaagcttaaaacattccatgaacaggagtgttgtggtccagtaatcttgatgattaactcctgctgtagtcgggatctttcagagaaagtcattggagtttgctttgtagcacaagatttgaccaggcagaagatgattatggataagtatactaggatacaaggagactatgttgccataataaagaaccccagtgagctcatccctcccatatttatgatcaatgatcttggttcctgcttagagtggaataaagctatgcagaagattactggtatgaagagggaagacgcgataaataagttgttaattggggaggtcttcacgctccatgattatggctgtagggtgaaagatcatgctactctaacgaaacttagcatactgatgaatgcagtgatttctggtcaggatccagagaagctcctgtttggtttcttcggcacaggtgggaagtatattgaatccttgctgacagtgaacaagagaacaaatgctgagggtaaaatcactggcgctctttgctttctgcatgtggctagcccagagnctcagcatgctcttgaggtccagaaatgtctg

SEQ ID NO: 2221 - DNA, 820 bp, Zea mays
ttgcatgcctgcagttccaggagcatcagtgtcagaatttacttggcgaaggcttggaccgcttgctgctgagctgggcgaccgggaactctatcaggatgatgaacgaagaggtgtcggcttctcgtaggtactgcaacgtgccgctcatcgttttcaccagcttctggcttatgtacaggccgagaccctccctggacaccccctgggttgtgctggaacatctcctgtatcagggcctctggaacgcctggagctggatggacaatcctgcacattgagtcaatcagttacacagctcccattaccaccaccaccatcactcgcattcgccacattgcagtgtatatagaatggcagggatagcgccaattttacacagggatcatttccattgtttcaaactgcaaagtgtaactacatgcctgaagtgacatgtatcactgcatcttggctggtgcagtgaccaggatagatttgactcctcgtgggagcgaattttaagctgagtaagcacaagtcccggtcgttctcacatgggctacaatatcactgtgtatgggtgtgacaggggttcagggttttcttgacctgcgtgagaagatcgagttttttttaggagttaagatgttcataagtaaatttgctagcattaggtcttatctgttccttgtcaacatacaatccttttcgtggattataactaacaaaattaggagcactgcgaaagttatttacaagagataaatgttggagttgtgctgagttaatagaaactagatgtacaatttagtagttcacttatttgtcaaatcatcct

SEQ ID NO: 2222 - DNA, 741 bp, Zea mays
aactaggtgtttaagcactacagaaagcaaggttactatgcacaaaatgtattaaattaccccagaaaaaacaaacatcattcgataccttctagaatttccaccagtattaacatgagctttcgtgccatcagcatcctcgtaggacaaagtaggtgaccttgacctttttgaaatgttatgatctgatgattgattctgcattgaacccgtgaatctactaataaagaagaaaacacattacaatagcataaacacacatgcaggcacacaagcaaaaaagcacaaggcatttgtgcacgctgaatacgacagttttggacattgaatttatatttaactgtataatgacatgaaaataacaatattttaattttcattcaacaaataattacagtgtgaaacttggttttatcatccacgatgtgcttaagttagtattataattcatcgatattcattcaaaaaaggaaacatcaacagaaaccctacaaacagtgagtgcatttactgaaacccaatgttgccccatgtgatatcaactagagcattcctagtgcaactccaacatccaactggcaagacaatagacataaacaatattccatctggaatgctttatgagctaagacttctattccataaggacttggttattgcgttcaatattccatatggagtggattattgagttcaatcacacccacaagaaaaaaagaaaaatggaaaagtacatgcaga

SEQ ID NO: 2223 - DNA, 824 bp, Zea mays
ggcatcctcgatattgtaagttggccagcagtgacctggatcaagcgcggccatcaatgagcacaggcagagagaggggacatcgaggcagctctcgcgctcacgggagctgggccccacgtgtcataagaagcggacaggacacacacccattccctcctcccctttattacttttccaaaccatcatctctagttattaaataagcaactgctctgtcggaagttaaccggatccgactaacccggtcgagagcatttccgacgcgacgactatgataataaagagagagataacatagagaagcaagactgcgatggatgtggctaccttcttggggcacttcttctcgcgcacctcgtaccggcccctggtcacatccgtcagccacatcccggggcagatcgcctgcgtgagcgcacacacacgtctaatgaacagagagagagagagagagagagagagatggagacatattgagagagagatagagacgcacactgacggtcttctcgacgatcttgggccgccgcttggggcgctgcggcagcttggtgcccttcatggccatgaagtcctcctccttctccttccgagacagcgtggtgtagatccgcggcatctccaccttcgacgccggcttcgacgtagccgccgccgccgcgcctgcatgctgctgctgctgcctcgggtccgggaccgggacgcccatgcccatcacggagcccggggacaccgcacgctgcttttcggacctcgccgccgagaactttcccgccgaaggggccttcggttgatctgaacataatcggcggtccccggaa

SEQ ID NO: 2224 - DNA, 737 bp, Zea mays
aggaggagaacacgcgtgacgctgctgccgacaccagagaagtcgccggtaacagctccactctctgaatctcccccttattcagaagtgattgcgttagttacttagctgtagtcaactaacacggtcactggtcacatgtccatccttcattttctattcaggcaatgtacccttggagtcatcgtcaccggctgttgagtacaggtctgcacagaatgcagctcaggtttgttgtttgggcactcttgtctttgaaccttttggttcattgggattgtcgtcttactcttacatgaaaaagactccatttgtctcaacttactcttacacgaaaaggactccatttgtctcaactggaaatgtgacgatgatttgtatccacattaggttgcaagggaggacaatgtggacccagataatatgtcatatgaggtatgctgatattgtttcctgtgatggagtgggaagaatgatatgaaactctcatctcatgtaggatatgctagtaggcagtagcaaagagtaaaattattttcggaatttttgtagtagaacaaatagcttggaatggaatgaatgatctgaaattctcatctcatgtaggatatgctaagcttcaaattacttttggggtttttgtatagagctagattttttctttccctgagggctaactgaaaatctggcgcattatttcctatcaacagactaagtgcatccagctaagaatgaga

SEQ ID NO: 2225 - DNA, 805 bp, Zea mays
ataaaggtatataagccaaacgcttttgcaaactgggagcctgggatcaccaaatggaccgtgttcttctgagctcccacttgccatctcacgctcttgcaaacacgaggtatttgatttctcccaactcttttgtctgtggaagaaggcctttgaagagttcgtgtattttctctgtaacctgccagttgttccaatcttttcaggttgcagcagggtcctggtggcctcaacagtataggatttgcagtcataaaaaagggatgcttgaagttaagatgttacgcgatcggcgatgaactcggtggtccagggcgctttagtaagcattttatcgagaacagtaatggacctgttttccagggactcgatgcgtctgctggttcttttagaactgtcggtgctgaaatcactcaggacactggagatttctttgtcagtgacgcagagggtgatccagacaaacctaccgatgggttctcctcgatcgaccaggctataggtgctttgcgtgaagggaaggtaggcgaatggctacattaagcgtatttcacaccttaacacttttcatcgctataattttgtctttactatgttttgtatctcatagtttgttttgaacctgggcatggatccagtattttttattattttcatagtttcagcatgtactacacttctcatccctgcactttgttccattcatgggcattgaacgtgcatgatcaggctagattggattggcctacttggagatgatattcgtgtactgtgcaatacatgcttggagaagattatgataaaa

SEQ ID NO: 2226 - DNA, 585 bp, Zea mays
attacgattatggcctggaacaaagaagggtttaacccttcttgatgcatctttcaagtcattagctttggtgtaagggttatcaacatttgtatcatctccctggggcaactggttaatacattggtaaaaaggtgtaccttgtaatttggcaactagccaactacgtttctcctctgaagcttatttataatgtattgtgatttttcaccaaaataccgttttctaaattgctgagtacatgtacatcacatgatgttgcaatattagtatcatgtaagccctcagcctttccacatattttgcactgtaccaaatactatccacttgctgctgaactctgatgtattttagcagcaattcacaacaatcgcacacttagaagttcaatgtattttcttatattatatggtacctcttacatggaaaattgtgtgaactatgctgctgctgctggaatatggaacattgtatgtggttgatgttagccttggacacccgatatgatactctttttctagagcgtgctatgtgatgagtgaccagtgtgtagcgggatcctaagatgtgaatgcgttggaagag

SEQ ID NO: 2227 - DNA, 769 bp, Zea mays
cgtaggggcatgagaggcggcatcggagaccatggactcctcctcttcctcctcctcctctcatcgcggttgcttccatcgccaccgtatttgctgccgccttcgtcttcggtagcgcagtatgagtatgagctagcatctgcctgtctcttcctctcctcctcggataacatgaaatccacgaagtattccgtccaagaactctctcctgactgagcctgcccttcgctactgctgctgaggacgctcctgaaagatgggctactcactaaatcctccatggttgttgagctcgatctcgatcgcagggtgaagcaagaaagcgaaactgctggagggtgactttggtgttcaggcgatgtttatgaacgaacgaatgccttttgcaaaggggtaaacacagcctggctatatatatacagaagaggggggccggggagagagagagagagagagagagagagagagaagagagagagagagagagagagaagagagagaggcgctaggtgcatgacatcgagaggagtggaaattaaagcgacaggtagttgaggtgttgaaatcaaccgttagatgcgccgtttctgttacatggaaaatgaagatgttttttttttcgtttggaacctggaaccacgatctaaccaattatatatacatggcgatgcaagaatatatatagcttgtgcatcaatttcagaccgcatcgatccccctagctagctagtctagcatttgacatatattggtcactctttccgtcgct

SEQ ID NO: 2228 - DNA, 762 bp, Zea mays
tgcatgcctgcagaacgccaacaagccctgttaaaagaagtacctaccaaggtgacacataaatcacaagtcctaatatgacacaaaccagcacctggcagcttgttgtcgacaaagaatactactaagtttacagtatacctgcattatggaagaaaaaaaaaacagtttagcagcaaggcagtaccccacagaatgacagaacagataagtgagagagaagttaaaataccacgcaacaacaacatcgaccgagtagtgcttgcgagaagcaattataaggagactctgaattatagccatgaaccaagcaaggaacttaataaacctgaacacaatacacatagttcagcttcatttcagggatacccacaagagacagtcggaacttgatagggttcaaacaaaaagataagtgcaaaacacaattaccttttcgaaccatatttttggtaagttcgaacgaaaaccagagtgaaaatcatgtgagatgaaaatatcaaatcaccacaaccaaaaagtaccccacgaggaactggaaagggagattcaaattgctggtttatcagagagaatgcgatacagaatctgccgaccaacaaaatagacttacagttaatcaggagcacttcaagtacactattgggtggtggaagagttgccagttttgagccctacagagataatgctatgtgacttcatatatgacagactggcatgtgttcgcaagctgcaatccagaacagagcataaaaatcaaac

SEQ ID NO: 2229 - DNA, 752 bp, Zea mays
aattcaaatcacaggtctcaagccacctacccttcttgtatgaagacgatgagccttttctcttggtctaaagacattgtatggatttgtatcattcactggtggaggcggctgcaaaacaacagtcaattagttaatgcaggcaagcaaccaaaaacatactataacatcctaacttgataaaccaaaacaaagcacacggatttgtcacaaattgtaacatttgattatgggttggccctaaggatgaatttcatcaaagcactccatgagattcattaatgccttcgaggaaaaggtgtgctacaatatacaactaatttgggatgtcaaaaagaataaccaagttgcaaacatcattaataagggcctctacctaaactacaggagtcagcactttgcaagccaaacagaagctgccttttaaaactctcattcaatcaaagatttaatccaacatctgcactgctatcatgctgttacaacatgtgatttcaatttcattaagaaaattagaagtttgtcacagatgtatcatgcatgcatatgcttgtcacttcagtagataaaaaaaagattaaaagagggaccactcatcgtagggtttcacaaatatcatgttgtaagcgagaaggagcaggcaaaacagttgccacccccggggatctccgtctcgggccacagtcgacatggggtgggcaagaagtcaggccttggtgggatgccgcaaaaagttcgtgttcgcccctcgc

SEQ ID NO: 2230 - DNA, 757 bp, Zea mays
actcctagccgttgtctttaatttgttggccaaagtgatgagtgggcaaggccctgctggaacagacgcccaagattgagctacgacgtcatgaaatccctccatcctaggccaaaatgcttgaaagtgaaacctcccttttcctctgctgaaatcatgaaacccaagcaacaaagggcaatggtcggagtcatccgtggctgagctctggagaagagaatctgagaattgctcctcccaatctgttgtgcagaaaaccctatccaatttgaccagggtaggattagagtgtccgttcgaccatgtatatttccggccaatcaacgggatttcattaagagcaagtcatttgcccatttcctgaacctgcccatcatggcatggtctaagttattgttattcttctcttcctcccttaagatcagattgaaatccccgagcacaagccacgacccagtacagagagctctaatttctctaaggtcccgtttgtttcgttggaattgaattttattttaataattataatttagataaaactaattaagttcatatatttatatatgtaacatatttgtatattatcttaaattatatgagagaaatagttatatactacattcatgttataacgaagcaagtagaagagtgtgttataagttgtaaatcggaaaaatagcatataaaatctatagaatcaatttctatctctcaccccatgaatttgagataggcttatatgataactttgaaaagt

SEQ ID NO: 2231 - DNA, 792 bp, Zea mays
gatgcctgcagcggcgattttgattccgtgtgctcgatcaccgcaacgcggttctctgtcaatgacctcaacctgaccgtcaccacgaagtggcgcccctggtacactcctgacagcgaggtaagaaggttattcagaacagggagaaaaaaaaaagatagatagatagaaacagtttcgattcagatagatagaaatagtttcgatccagatgtaatttgggatggcaacggacgtacgcaggtaggaggctatgttcagcagtacaaagaaggctttactttcgcgtcagtaagggcagctggccacttggtccctactatccagccgaagaggtcactcgttctgctctacgctttcctgaagaacatgctccctcctgctgacatctcgaactgaacaactgatgagcattcgcatttgcacttctggctccgtctgggatgattgatcaggatcaggtccctccccttttttttacttgattacacaatgtctcgttgcgtagacacaagtttaaagacgagttcgtacaatcagctcatggtcttgtgccttaaacaaggacgtacgctgagaagctctgtaatgatgggtgcccagttggtgttcatcccaaaaatgaataaagggaatttcacagccttccttttgctgcatgataatcctagaattacagtcgtagcgttttggcctaaagtttgtggcgagcgagatgaatagtaaaaatgcaacttttaacagctaactattaactctagtatattcaaacaccgtctggcgtgtgtggtc

SEQ ID NO: 2232 - DNA, 762 bp, Zea mays
agcggcgacgccatggaggacgatcggctgggcatcgttgatctagtgatcgagctccagcgcaccggatcggaccgccggccggaagttctttctggcagtggcggcggctgcggcggcgaaacgtacactagctagctccaacgttcgtgcagacgtgtgcagtagggagtcaatggtgcgtgcgtgcttggcctaatcaatctggtataaagcatgcactgcgcttgcttcaatggtgcgtgctggcctggcgggcgaatatatatatatagatggcggtggtgtgctgtccatgggggaacagacttggtattcattcattcattcagagattgaggctgaagggtatataatcatgtaatgtatataaatatatagtaagtaagatcaggtcagacagcagatggtagcgcttaacaagtcaacaaggtagtgacgtgacgatccaaggcagaatcggcggagaagaaggtgaatgaggaagctaagggccaagtcagatcatgcatgtactcctttcatgaaaaaaataattataggcggcgatagttattctgggacagagagagtattcaaatcggtttctttcagctttcttgcgtgcaagtgcatactactggagtgaaagttgcatactactggagtaaaatgctagatgtctaaattgtcaatatattatcccaggtaagggagtgttgggataagggacccaatacaacggcttggtttcatcccttgtttatttgtaaccaatctttt

SEQ ID NO: 2233 - DNA, 804 bp, Zea mays
tgtgccgatgttctaatggactttttttatgtatgtatcttttcaaatgcaccgctccgatcggtcgttggtccatacataaatcagcaaaacctaccaacgcagattataaataatatatgctcggtattgattgcatgatccagtctaatactactatcctcgagacagctacggaggaaatgatccatccatcggatccattcaatttcaaaggcggcgactctgtcgtcctcccttcgtcttcaatcacaaattaagcagcaaagaccatactactccagttcttggagtgcttcttcacttggctaatgatatttatatttatatttatatatgcatgacttcttcactagctagtaatgactgtaaaaagaagaagattccagtcaaccaagttgacattgataggtgtgcatcaagccatcaaccaataacgagtacgtaagtacttgctagcattattaatggatgatgccgcgctcaagctagtctatgcggagaagtggtcacagcttctttattttgatttggttgtggcctctttagcttgtgaacgatcacgatcactggctaattgctattattatattaattagaatcctaggtgcacgtacgccaaattccatgggaaaccaatatccaagctaaccattatttggtatttcctcacttcttttttgttgttgttgttcacgcaacatgtagttttgccattatttagctataccaaaaaataatgcgaactgtttcatatatgtgagttgtgcttttttttatggactaaccctgtttgtgtacgtg

SEQ ID NO: 2234 - DNA, 775 bp, Zea mays
agctcatttagtagcttcagtgatttatttagacctgagaataatagtggaacaatgccttgtgaattgctattaacactgtaccagataaagtttgctttcagaatcattcaccaccttttggacgatggcgatagtttatttctagttctctaaaagtcatgttcatgttggttttaggtacctctggatcaaatggctcatctgctcgaccagacggaggagatttgacaaacacaacagtgagtaaagatgcacatccaacgcaactcatgttttcttgtccatcaaaattttccacttttcatcgaagtttctttgaatatgatgcgtaggtatttgtgggcgggctcgacccagatgtcagtgaagaggaccttaggcaggccttctcccagtacggagaaatttcttccgtaaagattccagttgggaaacagtgcggcttcgtgcagtttgctcagaggtatcatcagcctccgtgctctccacatttcagctccccagctgtctgtttggtatagcggacgctgctacaaccgtcatgacaggacatctgatacaaaaaaaaaactgttcttctcccctttcgccaggaagaacgctgaagacgcgttgcaagggtttgaacggcagcactattggcaaacaggccgtgcgtctctcatgggggtcgcaacccagcaaacaagcaggtccggcccttgctctgagttacacagtacgagcaaacatacttgaaagctctggtggcagaaactttgacactgttttg

SEQ ID NO: 2235 - DNA, 712 bp, Zea mays
tttttgttttgttgccactgtgtctgagcctcgggtggcctggtgtacctgcgaggctgctgttaagcagggtcttgtcagtcagggcagggacctttgttgccgcaattagtacggtacgtaaactgcccatctcggtgggtaagctaatcgaccaaggactagtgctgtggtaacggatcctgattcaaatgtttatttataatttgttagggctctaaataatttttagtttgaaaataaatagaattagagattgatccttaaattttatagtgtaaaatttaaagctcgtcgtcatccctagacccccaaaagtttgtagttcagctgagagcaaaccgcgcttcagtcctagtgtcgctgcaaggcgaacaagaagaaaccgaacagtcaaactcttggtaaatcgtcgtacttgacggaaacatgagcttcacattgccgacgtatatatagccgaatacaataccaccgatcacgagaagtcgcgcggcgacagcggccgcgcaccggactcgggcaaacaaagaaggcacaggtgtttgggcgtccccatccgcagacctgaacgctggcgttgcgacggccatcgctccctgaccttttcctttttccctcctgctaccactacaactgaacttcttcttaaggggcacggggacaccagcccccttatgtattcgcgtaatggtcacccaaccccaaccac

SEQ ID NO: 2236 - DNA, 768 bp, Zea mays
aatgtcctttttagttgcaccaacttttcttatttatttcttccctttcatgttctcttcctctaaaagaatgctatctgataattttgcctagatgaaattttgacatcaatatgacatgtgcaggtgatggagcaattttttagtttggtaaatacattcttgcaaaatcaccgagatacttctaaaaggagattgaaaatccgtacatataaggtagttatgaatgctataaatttgatagtcttctctatatccagctcttcaaatatttttgtcataaatttcatcatgcgttagtgtgcctttaaatttatcagtgttgctattcccaaatgtataagcacattaggaattgccttgtgaaagatgttagagtggacgcactaaccagttcaacccaaaagcttaagctgatgggacaaggtagtttatccacttatacacttcaacacccccactcacgtgcagccagagagaactcaatggaacaagagttgcggtagtgaacctacgaacaaaaagaagattttgaatgatgtggggagcaacaaaaacgtctttgaggtagaacggtcctgaaagaaccgagtcacctactaaggtggccgggaaggtggaactgttccccacaataatagaggatggacgggggatgaggaggatgagagtgaggtagcgtgccagcagcaggagtggtgtggtcggaggcgacgtcgtggaaggaggggaatggcatggaccgcctgatgagggcctttagtgcca

SEQ ID NO: 2237 - DNA, 771 bp, Zea mays
gctgccaagttgctgttgaccgactttgttcttcacttcttctggagtctggacttctgtaacgttgtcgcccgacctgaccccacgcgaccactctgcccggaaggcgttcgtccatttgcccgagtccgagagcggctggctgctactttgccaggagccttcctgggagatgccatccagtcgcgagcaaagaactcgcggccactctacaagctttccgttcgacggctctcttcacagctcaagatctctgctttcgtttcgccccgttcccagaacaagtcaactccccccttcttggttcacggcacctcgtcgtcgtccatggattggttgagcagcatgctgggggaccgcccgctgaagagcgtcttcacggcgctcggtctcccggataagattggcggcgcggtaatcgacgctctctgctaccggggcgtccgtctgtggaacgtcgaggaggaggccgacaagctgcggcgcaccaaggaacgcatccgcgccgtgctcgaggacgccgagcaacgccgcttcatcgaccacgactctgtcaggctctggctccgggagcttagggccgtcgccttcgacgtcgacgccctgctcgaccgcttgggaaccatcacggccgtgtccaggctagcggccgccgagcaatcacggaagcggaagcggctatggcccagcgtcgagctcggcccgcggcagcggtgggagctggatgagaagatcgcgaagatcaacgaacgcctcgacgagatcaacacg

SEQ ID NO: 2238 - DNA, 739 bp, Zea mays
aatggcagattcgacaatttctgttcatggcagttttccgtggtcttagtggcctcaaaaaaataaaaagtttgtctatgagttgtagacaatttgtagatctttccgtggacgtgaagaacacctcaatcagacatcagatcagaaagttattgcagtttgattatagcagtttttcagtctcataattctgtgtagaatctgttctcttacgttttaggaaattttatcaacagaattaaactttaaattggtaagagaagttgtagataatttcataagctttccagattgttaaagagtgcattcatatgaattatgaaactccagttatgtttgttttactgttgctgtttttgtttgcctgacaaaaatgagcgggtctattcactggtgagtttcatctagtaaatggccgaattggctcttccaactatggagacttttgtagagggatacaagttcttactaccagcataatttcataatttttggttgagtcgtttaggatatatgctgctgtgtgaaacagattcagttagttatattgtcagatgttttagaacttatagatggcaaaaatttaattatccattaaataccgaagttgtagagtactttgtgtagatactcctagagtatttgtttgatatcatcactgttataattttaaagatacaaaattaacaaacaacgctgctgcagggtggaagattttccaccgggtcttggtttcagt

SEQ ID NO: 2239 - DNA, 787 bp, Zea mays
ttaacccgcgctcctgtatagtcgacctgcagatttatggtgatggatatataggcatgtagcagatggattgccatttgccaagcattcggatcatccgatgagtagtgtgggccggcttgctgacgaacatcaataagacaggatctctactcatgacacctgcacttgtttttgatgttttccccatagttccctttgatgctgaactttggcgtatgctagtgtgcagtctagctgtctaggtcttgcgcgttggtagatttctgtagctactgagatagcctgatgtgtattacagttgagaacacatatcataaatccctaagtctttcactttattttgtagcaaaccagggtttgtgtctacgctggctcactagcatgtagcacgagatgttcagtatttacgcaggtggcagatcaagatatatgccacggcattcacaattgttatggaccaggtgcgtactgcatactgtatttggcacaatattgcgttttgcagttggacagttctttactggttggtaggtgtttacagttgcactggactttcatttgcttctattctatgcatttggaaccaaacgcatgagtaaaactttgtaggaaccatttataacgggtgaaactattcatgctatctattaaagataactattcactgctatgtgcctatgttttgaacgggcatgttcctttgttgactgaaccttttgagagcaagatgttgacctgtgtagttgatcgaaaagaactcggtgcggttgcgtcagggcaaaaa

SEQ ID NO: 2240 - DNA, 791 bp, Zea mays
acacacggtacgtacgtacgtacgtggtctgcaaaagcacaccacacagagagattattattagctaataagtgaagagacaccacctgtccagtttccttcttcttgcaggctaatttaaggatcggaacaactattatgtgtgtgcgtgtgcgtgtgtgcaagacacacatgtgctatatgtatgctctaagcacacgggcttaactgggccatggcacgcgaacacgtcgtagtagtacgtccattccataatgcatgcatgtgccgccagaactttgctctctctctctctctctctctctctttctctctctctctgaactgcatgcaggataatctctcgatctcagctgtaaagcaagcggaggttttcatcagtcaggactcaggaaataaagaatacgcatgtgcatctcctctgaatatgacctcggtagctagctagctagctctaaatataatggaggagagcgatacatctagctatctgtctatatctaggagcacatgtgacttggatcacgcggaaaaggactactagctagctcgtcgtctcacgtcggtaaagcgctatagaacattctctcatgatatgtgaacccggccgcctgctgaaacagaaatgataataaccgattccatccatgggcatgcatgctttccttttcgggtgttcaaggagacacccccaaactcttccatatagggttaaatttggaaacctcatttttagggggaatttttattttaccaaaggaaaaaataacctaattttttctttgaaaaaa

SEQ ID NO: 2241 - DNA, 725 bp, Zea mays
cgcgggagcccacgccccgcggctccagcttcaaccagtccgacttctacgccatgttcaacgggagcaagatggccagcccgctggcgcagcccggcgccgcacgcgcgccggggctcgacgagcaggtggccaacaagttcgcgtctgggaagggtggcgacgccgcggcgtaccccgcgcccaacccaggcatgatgccaccgccacggtacgtcggtccactgaccccaagttttttcgttttttttttgttcgctagtgtagtgcttgctcgcttccttgaaatttgtcttatatatgctaataatgatgataaacttggctctcttagtctctttacatttggcaacgatatttactccaggaagaaggagctgggcggctccaactccaactccaacaaggagctgcacatgttcgtgtggagctccagcgcgtcgcccgtgtcggaggccaacctacgcaacgccgtcaaccacgccgcctccaccgacttcgccgccgcgccaccaccgtcgatgccggtcgacggcgccaccccaaaaggtgatagaccataccaacattttcttcctctgtcaccacaacattctcgttagcgctgaaactgatatacgagttgtctgtccctgcgtgtcatgcatgcatcaggcgtgagtgggactgtcacgccggccaagaagccggaccccgcggccaacggcggggacctggagatcgag

SEQ ID NO: 2242 - DNA, 764 bp, Zea mays
catcttgcatgcctgcagagtttgagcatagaatcgcttacgctgtgctaagtatttgaggatggcagttgtactccttggcaaacacgaaggggacgatgccttgtggaagtgcagcctgttgatcaatcacacacacgtacgttccaacatttacagtaatcagtacgaccgtcactttttccccctcattagaaaggcttgaaaattagtagagcactacgtgtacggtgtcgatgccaacctgaacgatggcgacgtgcaggagcactccccggagcccaatggcgatggaggtggcggcgatcacggccgggccggtcaaaaacctcacggccatggcgaacgtcgccaccctcttaccgcaggagatgagcttcggttgcagagccatgaacagacctgggtcagacgttgcacccgtcagaatttctcggctcaagtaaagaacgtacgtacgtctctaaacaagcatcaaaatgccaacggcgtacctaagctgaacatggccatgcctagccctgcgtcggataatatagatatcgacccctttataatcgagggcatctggatgttaaacctgagatttcatagagggaaaaaattgttaatccatccatgttaaccagtagtagtagtatagtaagcaattcgcatgataaaaaaatcaatgcattgcagatgcatgctgggggtttatttatataggaatgtgcccccccctttctccttagaaatggccctgctgttttttcaagcttccc

SEQ ID NO: 2243 - DNA, 797 bp, Zea mays
tcggtccccgtggttcctctagagccgacctgcagcatggcaggaacgagattaatgcagagctgaaaaaggaggctgagtttttcggggacattgttattgtgccattcatggatagctatgatttggttgttctcaagacaattgccatatgcgagtatggggtatgtctaagtgttttctttcttgctactatgaagtccctgtaaaacactttgtcactattataatgaacttgtcctctcaggtccatgttgtatatgctagatacataatgaagtgtgatgatgatacttttgttagacttgattcagtaattgctgaagtgaagaaaatccagaacggtgaaagtctctatatagggaacatgaattatcgtcataagccattgcgtgatggtaaatgggctgttacttatgaggtaaacttatatttgattccacaatgatctcatatgccctttttcctttcattgattgaaaatgaaggtgctctgcgcactatgttgttgtagcgaactgttcaatacagtatatttggtctgtatgggtattaaacattagggctagtttgggaactccattttcaaagggatttctattttcctaagggaaaataaactaatttcccttgggaaaatgaaaatcccttaggaaaatggggtttctaaactagcccttagcaatagcaatcatacttgttcccctagtagtgtataaattggttcatgaaaccttaaaaccaggtaaaaaatcaattcatggtaccttgatgtcaaatttacggaatctttctcc

SEQ ID NO: 2244 - DNA, 824 bp, Zea mays
  unsure (1)..(824): unsure at all n locations
cttgcatgcctgcagttactttgaggaaccagttgcagcgtcagacgacctggtgttcagatgaagctcccgaccaccatgtaactgtagtccagcttatgagccctttaactcaagactcacataatcatctatttgttttctggtaatctaaatttccacggctcttgttcaaaaaagaatatctaaataaaaccctgttttttatatcaaagccttgactttgtgtttagtcctggacaaaaaaactcccaaaacctggcagccagattaagacccctctagattatataagttggattataatagaagagtaatatgttaaaatatcattttggtatcacaaataagctgctagcttatttgttgtaccaaagtgatattttatcttcctactcttctactataatctaacttatataatttagaagtaaaacaaacagacctaagagcaaaatcctcacaaaaaaggctcaatatgcaaacgacgtcaagagcattgacgcacaaaacctgcttcaccactagtactctgttacagaaagtatcacgccgcgaccaaaaccgtctcgaaaaccgggataaacatggataccgccctacaaggctaaactaaacccaaaaccctcgtcatggtagaagcgatcgatcgggcatgaaaaccgggaccccaattcggccgtgaacaccaccccgcacgcgctccccttgcatcctcgagaggtgtcgacgtcctcggacctcggtcctcccacttctggccgcgacccgcactccgacccgncgcgaacagacgacctaacggtaccgtgaaccgaggccca

SEQ ID NO: 2245 - DNA, 795 bp, Zea mays
tttgcatgcctgcaggcagtgaacaaaacaaactaggatcctgctgctcacagctcacaaaatagtccaaattggatgattaagttgtctctagatctttagtgaggcattctaacttcatccctatccaagtacacaggtgagagcagtaggggtgatcttcttcagaaatctgtcccgacactgaaatagattgcaacagcactactgctccactctacccctccctgtttagtcactgttatctcacaagttcacatggcaagaggccttactttcttaactaaaacattccccaactatagctctatcatctttgtacaacacccgaaggctgcaactacacataacacaagttatgggcaccaaactggagcccaaaagcactgaaaaatacagtttcagcttaactgaaacagcccaaaacagtctgtcagagggagtttagatgcattctactccacaatttgcatggcactaggtccatcttactttaggaaacttgtacctctttatttgttctctaatttcactatatgattctcagtccaattctgaatggtcacattagtgccccaaactgggtatcaagcactgaaattttggtttcagcaaactgaactgagttcagtcacaaccactctgacagagaagattgggatatactttactcctaggtttatgtagaaccaagtccaaccctctgtatgaaacttgttctctctgctatgggcctccaacgtttctatggaaactttagtccaaaacgacttggattgatcacaaaagagctcc

SEQ ID NO: 2246 - DNA, 720 bp, Zea mays
ctgatgatctgtgattgaccttgtctcgctgtttgaattttgatcaaattatttatatctttaatgcaagtttatactttaggttcatagtgtctggaccagttctacttctgaggggccaattcagattttgtcaatttattaggttttatgttcttgtcatgatctagttgtagtatgtctcatcatctttctccttttggtctccctcctatgattcaggggaaacaagcagaagaggaaatcaagttacttttaaaattcttattattgacaaatctttctcatcactgctggatttgatttttgtcaactgtatgtcttataagttatatggacctatattctagttttcctgagaatgtgaatttttgtgtgtgtagaacttactaggcaagtaggcctaacattgagggtgctgtgttttaactactaccagccataaatgggtagacataggttcctgcattattttgttgatgaataatattcggtcccacgtgatctagcattggtagtgctgttcttgagcatgggcatacgatggcccacttgaccactttagagcccatgccattaaagttttagcttattttgttccatcaaatattctgtattgctagcagattactatcgtgaaataacaatctactactttgtgggtctttactgtaatgatggaaatacattgtttgacattttagcctttaggtgtgttta

SEQ ID NO: 2247 - DNA, 729 bp, Zea mays
gtcgaacgagtctgtcttcagctcaggaaccacaacggacagaatcggcatggatggcctatacttggctacaagcctagcagtagttcctcccctggtcaggaccaagataagtgctgccctggcagagtttgctgtgcgaacagctgatgatgcaaggctctccaatggactcattggaattggagctgaagccatgattgatttgaaaatagcagcatggtctacgcaagactctgcttgcaggcagatcttagccatagtctgcaccgccaactctggataggccccagcagcagtctcaccactgagcataacacagtctgtgccatcaagaactgcgtttgcaacatccgttgcttctgcccgagtagggcgaggagacttgatcatagattccaacatctgggttgcagtcacaacaggcttgccttgaatattgcacttgaaaatcatcaccttctgtgcaaagaaaatcttctctataggaatttccatccctaaatcacctcttgccaccataaaagcatcagagtttgccaggatatcatcaaagttagctactccctcttgattctcaacctgcatgttcaaaactattataaccttgaatttgaaaatctactagtttgaaacccaaaagaaaatgctagaaccatacctttgacatcagcattatggacttggcatgctcaccaagtaccttcctaacctccacaagatccgaac

SEQ ID NO: 2248 - DNA, 1333 bp, Zea mays
agaccagcagagccccacgctcttgcgctggtttgggccaaaatagttccatctagctgcacaacagttgttccagtgtgattatatctttttgttgcattgtttgctggcaggccacaacagtaccaggaattattattattttttcgtgtatgtgtgtgtcaaacaaatattcatccatttttatgcggttggtatcatggtgtttaatagaacgcacactaaaaacagattgctaccgaagtagagatggcaaaccaccggatattactaccctatactcatacccacgacacaaaaataaccttatcgggtcacccacataaactggcgggtatggatttacccccatacccatgtgggtatgggttatccatcgggtcatccgtactcacaaaagctaaacatctatcaaaatattatataatacaaatgtcaagtatatccatctaaatacaattacaaaatttctagcatcatttaactatccattcaacacaccaaagataattagataaagtagtaacactaggatagtactacatagcacattacatgttccattacatggacattaaattgtcgttaagccttcaatgacattatggcctaaaaggttattaaatggtaaaaaggatggatgactaaagtcaaaattcatgcttgtgctaagtttatattgggtattttatacccacaggttaacgagtataggtgaaggcagaacgttctaatacccgtttacccattgggtgaagatttttgcctaataacagacccacgggtagaatatttagcccacatacatactctaatggagtaaatacccattgggtattgagtcacgggtacccattgccatctctaaaccagtgcctaaacaacaaattaacactaggagaaggaaaatggggacgaagctcatctcgaagggaccggtgatccgtacctacccgcctgcccacaacgtgatggctgatgtgcgcctaaccgctagcgccgcaagattctctctgcctaccatttttttttgtttgccatccattttaatttttttgtcaccctttttcaaatgaatgcgcagagtggctatacaattgtcaggccatccgatttttatttgccgttcatttaagtttttgtttaccgtcctttcgtttcaaatgaatggctacacgattgtcaggtaatctgatttttacgtattgttatcctctctctctttccccccaaatgatttttacgtatttttacgtattgtcaggtaatcctatttccccatgcgataccgttcaccccattattgacgcacttcaacaactcagtgtgacac

SEQ ID NO: 2249 - DNA, 681 bp, Zea mays
atgtttgacaaccaaatatggctagcgtgtgttggttctgtgccaggtgtttaccgccgaccggccctgtgtatatttggttggagagatttgagatctaattgatgttgcttccataaaccataagatctcatccctttatatatgtacactaggtctctcaatcaatcaatccacacaatctcattctctttcagtttagtttgtagctttaaaatgatttgccttaaattctggttgttccttttgacacatcataaattctgttttttgtcagagtacatgtcatcccttcttcaagtagaagtcatcccagtagatggtgcacctagttcaacatcatttaagcaagaagagtgggctcagaacagtattattttgtttgaaaatcttctgaacttcacaggagaagttgctaattgcaaagatttttctcagaagcttgcttcaggtgccatgatatttgtcaatgattctttctcactgtctcataagattcttgcatcaactgttgggatcacgtgcttctgctatgcgtctcttgctggtttccattttgaagaggagcttatgaaattgataaagatcacggactccacgaggcgcccatatattgccattgtaatcattaacctattttttcccgatgtatatgtagctgacagtcttttattcaagata

SEQ ID NO: 2250 - DNA, 837 bp, Zea mays
tttgatgcctgcagggctaagctagtagatagaaaaagggctggatcgaggaatctacgcgtagatcttgtggcatccttttagcgtatctcagggctgggctccacacgtgcactagcgatctcccaacaatccagagtgtcgtcacggctggccaccggggcaatgtacggctacgcgtgcatatatggagagcgtggctggcatgcatgcatgcatgcatgcatcgcgttgcttacgacgcaaggtgaaggtggtgctgcgcgcaacggccgcgtcgcacacccaataaggaccgatgcgccgcagcagccagcagctttggatcggaacaatgtgccgcgcaaaaaaggggtgtcgcgacaagcaggaaggaacaagctaggctgtggggcgcagcgcaggcctgtagcggcttttgcattgcttactccggtgcgtgccaatgcggcggggcacggggcacggggcagtggcgaagctagagcaaaactgaggagggtgcatttagtcttgtgggtgtataaattttttttctagggatacatatatggtgaaattttaactaaatctataggattgatattttgtggggggtgcatttgcatccacagtgttgaacctagcttcgtccctggcaccgggtagggggggcacccatcaggtcggctctggaaccgcccgtcaacgacaccaagctagtgaagtagggatagtgaggataatcgaaatggtggaaatgtaactgggccaagagactgtacatattattgtacaaaacactggtttccaactaggtatttttaaaaaatatcattgggaagataaaaagcccta

SEQ ID NO: 2251 - DNA, 566 bp, Zea mays
gcagtttcaaatgcctacattttttttgtaattaccaacttaggttaaaaataactaaagataggtattgagggtgagggtgagtgagcgaggaagaggggcagctcaccagcggaaaatcgtagcaatatgttgttctgttgttcctagcagagcagcgctttagatcaatcacactcaaaggttgataaggattattcagtgcaacaccatgcattggaccagctgacgaagtagctgaatggtatagtaacttctgcgattctgtatcttccacttctcggtagatctaaatccattagaaatactatgtgcttcagaacataatgacatggatggcagttcggatttcggaatataagaactgcatgttgcttaaatcttcatgtgtgttatatacaaaatacaaaaacagtaaggacaacttacatcaatggtgcaggtgtgactagtgacatttgtagttacgactctccaggtaccacttgcaggtccatcacagtccaacttgagtttcacctcccactggcatacagaaagatgatgcatccttgcaccaacaagtt

SEQ ID NO: 2252 - DNA, 752 bp, Zea mays
gcagtttcaaatgcctacattttttttgtaattaccaacttaggttaaaaataactaaagataggtattgagggtgagggtgagtgagcgaggaagaggggcagctcaccagcggaaaatcgtagcaatatgttgttctgttgttcctagcagagcagcgctttagatcaatcacactcaaaggttgataaggattattcagtgcaacaccatgcattggaccagctgacgaagtagctgaatggtatagtaacttctgcgattctgtatcttccacttctcggtagatctaaatccattagaaatactatgtgcttcagaacataatgacatggatggcagttcggatttcggaatataagaactgcatgttgcttaaatcttcatgtgtgttatatacaaaatacaaaaacagtaaggacaacttacatcaatggtgcaggtgtgactagtgacatttgtagttacgactctccaggtaccacttgcaggtccatcacagtccaacttgagtttcacctcccactggcatacagaaagatgatgcatccttgcaccaacaagttcatgtatcttcaaagccattgatcttaaaagtgaacaagcagtagcttcatcttggccaacgtcaacaattgtactcctgagtaacacgaaatgcttattaagagaccaatataatagtcaacgcataaacatattctgaaaaggattatgtgcacacttaccctgaaaatgggacgagatcaaga

SEQ ID NO: 2253 - DNA, 795 bp, Zea mays
tgcatgcctgcagcctcatgcacacggttcaaccgttgacgtatagtttccccatcatagcacgttggcaagtacgttatcgggacttcaatcaccaatactcatttagtaaataaagcattgtaacatgtccatcaggttaaagagttcagtaagatcatgactaactcatttttttgggtcgttgtgataaatcaatacgaataaaaaaagttccaactacccaaagtttcggatattagctactcacaccaaagtatatatttataaccgattaagttagaaagcttatacttaaaacaccaatgtacttcaaattggcttaatgttctcgttcaaaaaaatgacttcaaagtttaaacataaacttgcccatgtgtagcaagttgcaacagcattgcagtcgaacaagtacagatgcgtgttcagctagctaacgtcagttcaacaatgctcttggggcttgtttggttcaaagcctgccaggcagcaatctacaccccaggaacagaaaatctaaagccttggattgcatggagagccatgcaaagctgtctgaactaaaaccaaacaggccctgaagattgaggcaggcaggtgaaactgagtgtgttcgatggcaggggtagatgaataaagcaaaatgtgcaattcagtgaaatgttggcacttggcagggaggagcgaagtttggtatatctagtgtcggatgcaaaaaaggccatttctagtgttactttaatttaggatgtcagtcacacatcactgagaagaaagtaacccacatcttccatg

SEQ ID NO: 2254 - DNA, 740 bp, Zea mays; identical to SEQ ID NO: 698

SEQ ID NO: 2255 - DNA, 771 bp, Zea mays
aaatgccgctgctagtacagtagaatagtgaggacattagtgaaatcattattttttatagcccccaatgcaaagaggagttatccggggcccaattgtttgggtgtatgtaggtcgatctagcttgtgttgacataatgcaagaaataactgttcgggtttctgtatatcgatttgggccaaactcggcctcaacatgcatgattccttcaccagcctggttctacagaaaacgggattgaagaagttcatttctcgtgggctttctttcgcgatgcagcttgggtgctttgggcctattgttaccggataggatcaaaagaaagttcgtgcaatcaatcaacagctcaacgtagtttgctctcagaccaatattagaggggcttcgactctatcttctcccgcgggaaaaaaaatcagaatcatactaaacgcttaaaatagcttctaccgaaaagcacataaaaagaccgagctattttatactaggtaggaaaagctacaaatcctaactttaccgactctggctatgcttccttttaattttgcaaaaagccataaagaataagagttttttttgccatacaatttgtgaattggtttgactccaacaacaacagaaaaactgcatttttttaaaaaaaaggctagagttaaaacggtttttagcaatctagagctctatcaaacatgctctatggagtgtttgtgatggctccgggttgtatgagctgtagtttataatatcaatttaaatagtttttaaaataa

SEQ ID NO: 2256 - DNA, 780 bp, Zea mays
catgcctgcaggcagacaagctaggttttactgcttcattgagcacaaagatccgctgacctcttgctcttggtaaaaatccaaccttttttgtattgttttcttcctgggaaaacctccttgtggtgcataaactgcgtagtacactctacaatttctggagaggaagctgagaactactatccatatctggcacgacccttgtcaagaaccatggctgttcacatgccatgaagctgcttgaactggaggcacctaaatgctgtggattgttcctatgcagatgattggatcagtggtttcaggcttcggggggttcgatcagatgttgtatgaataatagcaggattgcttgagagactatagtttgggtactgtttgcttctctatttactggtacggtttcctactgatctgcggctgcgcaggaaggcattctcttttttgccgtaccatggatgcaccggatgttcaacagagcatgggatataaggagtccaggggtggtatgcctaagtttttccatgcccttggaccagcactcctgatttcaatgggttacattgatctcgggaagtgggtggcagccgttgaagctggttcttgttttggattcgacctggtgttgctggctctccttttcaacttcactgccattgtatgtcagtaccttgctgcttgcattggcactgtcacagggaagaatcttgcagaggtatcggtttacccgatgtttttccttggtttgctggccttctattgagatttagttcagtaaat

SEQ ID NO: 2257 - DNA, 671 bp, Zea mays
atgactttttctgaccctgcaaatacaatgtttcttgattaaaaatcgcgcagaaactgatgacaattaagtgaaaacaaacgactgcaaagtacgcaaactgtcactacttgcattttttgcacatgtcaatattttccaatgaacatgatgtgaaaagttagaaatggtacaactttgatgttttgtgatatgctacaaacccaaacataagacacaaaatttcatgaactaaacaaaaaattccaaaagctgagcacaatgtgtacagataaacaaagtgtggatcctgtggtggaaacttgtatgaagttatccaaacaattgaaacgcgattaattacatcttgttttatttcgatgcggtgtacccacaaataatcaaaataataaaggaaataaatataatttacaaattgtatccaatattcaactggcatgagcagaagttcaaatataatgatctcgctcactcttaggactttacaaactccatacaacaagccaaaattgaaataaatgtaaatgtatggtttgaagtatttctggcaaggcgttgcccactaaattttaagtctaagggcactaatcaaacaatttacctggacaactgatgaatgaatgtagaagttgtgtgccattatgtttgcaccaagaagcgccatcagagag

SEQ ID NO: 2258 - DNA, 762 bp, Zea mays
attaggccaacaattccaaaagacacacatcccaagctcatcgagcttcttcagaaatgttggcatcgagatccagctgagaggcccgacttctccgagatactggagatccttcagaaactctccaaagaggccagtcctgcatttccagttctcgctgctagtttaccacatgtctaaacaaaacgatcatgattctatttattctacaacatctcaagtcttcaatgtttttgctgcttaatgttactctccagaactgagcattgtgatgtattgactttggaacaggtgagaactgacactgagggtcgccacaaaacgaagtcaggtttcctttcagcgctgaagagaagccactgaagggcactgggcacccagccacctatgatagtttactccaatgtaatgttggtgattgatgcacgctgtaatcacaatcacagcatgattctgaagttctgatgcaagttgaatagtgcgctgtagttgtacagtcacgattttctcgtgtaattgcagttgtctctctctttttggctcaatttgcccttttgttttgttgctttgccctcatgtaatcgtagatgatatttgttggatgttctaacaactggcatagattgaagtgtgctgaaataaattcctgctggtgagaaacagccctcttcgtgtcagttaactctgagatttatcatagatgagatgaattttctgatgcgggtgactacttgtacagaagtgtctgcttgaaatgactat

SEQ ID NO: 2259 - DNA, 762 bp, Zea mays
ataatagttacagatagtagtgaaacatagaaacaacactgcaaactcactatattaccgttcgtgttggtcggcgtgcagggacttcggaaggcgacgcttttactggcgtaccagagcttcggcgtcgtgtatggcgatctctgcatttcgcccgtctacgtgtacaagaacaccttttccgggaagctgcggctgcacgaggaggacgaggagatcctcggggtgctgtccctcgtcttctggagcctgacgctcataccgcttctcaaatacatcatccttgttcttggagcagatgacgatggagaaggtatagtacgcacacatactcatgtctgtgtccagttcttctagctcattgttgttccttcaaactgtcttgagttcactggcaatgtgttgtgttgtgttgtgttgtgtaatgcaggtggcacatttgcgttgtactcgttgatgtgcaggcgctcaaggatgggcctcctgatgaacagtataaacaacgggtgtttatcggtgtacagccaggaggaggaacctcgcgaggaggagctgaagagtagtctggcgataaagtctttcatcgagaggcattactcgctccgtgtcctgctgctgctcttcgtcctgatgggtactagcatggttattggggatggagtcttcaccccaactatgtcaggtaaacaaccttgggttctcgtgttcattgagatgggtttaatttttctgcctgggaactatcagtttaaaattgtaccc

SEQ ID NO: 2260 - DNA, 807 bp, Zea mays
  unsure (1)..(807): unsure at all n locations
ttacgctgataactcgtctgatcgattcaacttttgcttgcagaggtaaggcttttccatgattcatgctttgtcatttaagaaattggaacctaatttgtctcagttctattgataagaaatgttattttttaatataagtttacacaagcattgattgactgattaggagcttggatccctgcttgtgagatgctgttgcatgttatatatgtcttgggggtagaggtgtaggacaatgtttaattactagttgagccataatattttctttgtggattctttaacatagaaatatctgtttttgaaccctttggatattcttttgcatcaggttcatctctaccctcagcgactattagctaaaattctaagtacataactgttatttgtaccagcatatatgctttctggtttctgggttctgtcatgtgctcctaggccagcatgtatcaggagacttgttgagccacaagattttttttctgtggatgcttggacatagcaagtcctggtatttgcagcttttggatatgttgttttgaaagtgcttgtccactttggtattggtatcagggcctttttaagtacattacctcaaactttaggattctaccattatttggagctgcactaactcctagggcccaatctcaagtttcttttacaatttggggggcctagcccctgccttagattaacaaagatcatatcagttacaacatgcagagaatatcagaaacaaaaatttccacaaaccaaggaacatcaggcccncacagaaaccgaaaaggcaaaaacacccct

SEQ ID NO: 2261 - DNA, 742 bp, Zea mays
cacgaagaccagcacccggtggaacgccgggaagttggtgacgaagtgcgcgaacacgggggggacgccgccaccagcggcggcgctggcggcgtagacgaagcccacccccgggacgcgcaccaggcccatgccggcgctcaggcccaggaaccggtccaggcgcaccttgctctgcgcctcgtgctcccgcttcctcttcgtgccgtagtgccacgtcgacatggccagcagcgtgcccagcgacagcagcagcggcagccacccgccgtgcggcaccttggcgaggcacgccgacaggtacgtcagctccacggacccgaaccccaccgtgaagagcgccgccagcgccacgctccggctccacacgaccgtgatgaccaggaacatcaggcatgtggtcgcgaacatcaccaggatcacggcgagccctggtgggatgggacaaggattgtgcagcagttctgcgtcccaggagaagctaggattggaaattggtacgtaccgtaggcgtttccgatcatttcggtgtcgcggaagccgacggtgacggccaggcacaggaacatgagggcccagttcacctccggtatgtagatctggccgtggacgtggctggatgtgtgcacgatctttatccgcgggaagcaccccaaagccctggactggcttatgatcgagaacgtagctgagatgatggcctggctcccaacgactgtggctagtgttgcgatgatcagga

SEQ ID NO: 2262 - DNA, 720 bp, Zea mays
aacccccgatccttttaagttgacctgcaggtacagttcttggctaaatttagtttgaagttacttatcctttctttttgctgtatttctatctgtggtgttaatttcttccaatcaaaactgaaggtgctgtggtgggctgtagtgaacagtacccacgggtactgtagcaccacgggtagtcgggtactgagagaagggatttccttctaatctcttgcttaccttcaattgatacaatccctccccttatatagagagggttacttgacctctaagcactagatttaatctaatctaatcttatcccaaactagccttatctttggttaaccaacctgaagggcgcgctagcgggccctcttgggccctgacagaagggaagatagatgccgatagtttggtggttatgtatgtagtttgccttgccatccttcttttagtcaggtgttaggtaagtatcagccaagtatgagttgctcattttgggccaactgtgttaggttaccttgcataggccccccctgacgtagtaataattgcgttgcagtatatactctgctctgatgtttggtttttgttttaatcaagaattaatagtagacttgcttttatattatcttatttattagcatacatactcattcttttattatatttatatattctaggcccagcattctgatggtgttgcagatgatcgtcccaacgattccatat

SEQ ID NO: 2263 - DNA, 789 bp, Zea mays
tggttatcgtacttgcagtagttactctccttgtcctccagtttcttccgcagcaccgccgggaagaacttgcccaggaagtcgtccatcgacgtcacaccacctataatatatacacacacacacacaatgattttaattgtgtcctagatgttagtgatggtttcgtggtatttaattgcaatgttcatagccaatgaaaacgtgctatgaaagcgttggttcaaccgtgtgggttgactgaacttgtgactacatattattccttcgtgtagtactgtaggatatatatattacaaaaaaatgcaatgctaacttcctcgtgaaaagaaagcaggtagtaatatacaagtgctttcattgtttttttgtttcactgaggtggatgctttgcatgcatcatactactagtaccacagtttaatttgaccttttgtaacacacaactaactagctatagtttcgtaatcatgaagataatatatacatttttctcatgtgttcctgtgcgtcctcgtgcatacaactaattggaggcatgtgctattgtgcacatatatatgaatcatcaattgcataaaatactctcatcgagtttgaacacctggtatactaaaacggcttcgagtcccaacggatacctttgtattgcaaccaacctactagttgttaagaatctagattctatctgcagtttaattgtagaaactggtttatgaaaaaactggctaatggtgcttaaaaccaccacattttctataaactggttttagctagagaaggcttgtt

SEQ ID NO: 2264 - DNA, 742 bp, Zea mays
aaaaaaattgaaagcatgctcagtagtctatattgtagtaacaatggataaccatccatccatgcctgaggtgatcaatctaagaacaacaaactgttttctagaaattatgataaaaaaattgtaaacaaaatgcatagcaggacaaaatgaagaccgtgcagaatgtacatcatgtaccttatttccaagataacccattagtcctctacccacgcaagaaactttcaggtttctcacatcatttcttatttcgctgcgcacccaaatggtgagaaatataccgaccatttgcttgctggcaaccaaacaatacctggtagacatacaacatttatggagtcattttcaggaacatagaaagttagaaaaaaaaagcaccataggcactatgattcaaaaaacaaaaattgtataccagaacacacatgtgcaaacttttatggaacatgtcgacaagaaaatacctagatgtatttggctgataatcattttcttccataggcgcggaggcaccacagccatatgggaagggtgaaaaatatgcttcattgcttgtatcctcctcgatacaatgatcatctggtgatcccatgaatgggaagttcctatcaaaatcacttggcctgcctcccaagctaactgggtcacagacactgaacctacgatccaacctttggtgtgacagcatatgattcccttcaactcttaaactccggctaaggttgaacgaccgacgatt

SEQ ID NO: 2265 - DNA, 805 bp, Zea mays
agaagccaatcgaggcggggcactcgttcctccccgttacaaggagaggaggaagatttaggggcggaggaggtcacagactcacaggaaggaaagatggactcttgatccccgtcgcggtcgcggctggtttgttgtgggcaagccgaaccattttgctgctataatactcgagcagtcgattcgcggctcccggggccagaatcttgctctgagaggcggaatttgtgcgggatttgagctttctttcctccaacgaggtgccctgaggaagggagggagcgccagttctcccactgctgtagtgcgtggtttctgggaggtatgagacaatgagggaagagggcaacaagaagagcaaggtatttgcttgcttgctttccgttcagtatgggatatgcctcgttgctccgtttgctgtgttttttggttgatcgagccttgtggttttttttgctttgttcacattcatgcgtagctctcctggtcgaaatccctcgtgaggaagtggttcaacatcaagactaaggcacatgatttccgtgcggattgcgccgccgcccaaggtaacgctacaccgagtaatgcttgctgaacggaattttcgtcatcgtgcgcttgacgtctctcgcattaccagattgtccggtctagttcttaggtttcatactttcattcagagacggatacattaccagcgaacatgtcttaatccgacttggctggcttttagtcttcgttcctggggattggtgcccttaaaatggtcccaaatcagaccacctttttccccccaagtgaatac

SEQ ID NO: 2266 - DNA, 786 bp, Zea mays
ttgagcccctcgccctgcacgacccggaacaggtcccggtacgcgcgccactcgtacagcgccggcccggcgccctccacggcgccccaccacacgtccaccatcacgccatcgacgccggccccccgcagccgccgcagctgctcccgcagcttccccgcgtcctccaggtcgttctcggtggtcaccacttcaagctgccacgtcgtgttcatcatggacattggacagtgatgcaacttgatcgattttttgcaggcgtgtctctggtggaacgtttagctttagcttactgggagcatgacgaagaccgggacgtagttgccgagccggagcaccgtctcctcgtcgctggacagtggcgggggctgccgacaagaataatgcgatccgtgaacgttcgaaggcattaaacactgcggtataattaacgctcgaacgcacacgtacctgtggcacgggagacctttctgcgggctcggtggccacaggaccaagcgcggcggaggcaaccgtcctcgtcctcctcctggtatcgacggcgacaagccgtccggcggccggtggcggaagaagcgccggcgtcgatgccacgctgaccccgcatgtaccccattgttgcggcttcacctgagacgacggcgaggccgttagcatggtgtactgagaaattgtgtctcgtccttgaaatgttcaactgccaaattcagcgtagttcgaaatggatgccttgtgactttggcgagcttggaactgatactctatgactctctctctctctctcta

SEQ ID NO: 2267 - DNA, 729 bp, Zea mays
cttgcatgcctgcagttccattgattccatttctcaggttgcactcgaactatcatttgtggaagcagttcaagggtgcagcaaaacggtcaccttccaaacgtctgtaacatgtgaaatctgtggtatgtagatgcagtttttctcatgactccttttttaggtatttagtccttctaattttccccctggtgatgatttctttttcaggtggagccggtgtgcctcctggaaccacacctgaaacatgtctatcttgcaggggttcaggatttgttagttcttcctccggcacattgcttttgtctatccagtttaactagtgatcttattaatgttagtttttaactattgttgacagatattcatgcaaaccgggcccttcaggatgcaatcaacctgcacaaaatgtggtggttctgggaaaactgtgaaggtaggatttttccttagtgatactagaagataccacacacgttgctgccagtattgcaaagaatttggaatggaattaagtggagacgatgtggatagtttgcaattaagaggttggaaattagtgggatgacatgactattagtaggagatagtatggatagttagtgagggatggtgtggataccttgcatgttgacttagggtgcgtttggttgcgggacagccaggacagagacgtcctctggcgtattttcttgtcccctcaaaatttgagggataactggggacaac

SEQ ID NO: 2268 - DNA, 734 bp, Zea mays
aacaataacaaagagatgatgtaagtactccattacagatgaccgaaatgaggcaatatctgaattgaaatatttaagtctatatgtggtagctaaaaatagcaggaaagctcacctctgaaccatttaggttcatcccaccttgaagttctgtttgtattgattggtagcatgacatatcagcaccaaggtaatctgaaattgcaaggctataaccatctgggataccatgtagagcatcgttgtttgccggagggttcatcgagccctccatgctagaatataccatctcacctctgattgacagcagattgtattagtacacaaaaatgaatcagatttaacatatgtggccagatgccacaggggataaagaagcatgtccagtaaatattgtacccacagttaactaatgcatagattaacaagggcagatatggctgctccatattaccagtgcaccatgcagaaataactggcatggaccaataataattagattagattgaaagacactgatccatcctcaacactgctatgacagtttctaaaatcaaaatgcatgctagccagaaatctgtaacaaatctggtcaatgttcttaaggatataatttgattgccactacagcccaaagcccggaattaattcatgttccatacttccaattccagtagtagctatgaacaggtttcatgttttccttgaatgaaaataaatgtgaaaatgaatac

SEQ ID NO: 2269 - DNA, 838 bp, Zea mays
  unsure (1)..(838): unsure at all n locations
aagattgcttgaagccctgataaacaattcaagggtccgtgaaacaaaagttgccaagtatgctattgctccactggcacagtacctgttagatcctcaatctaagaaccagtcagcaaagtttctggttactcttgcactaggtgacattttccagcatgaagctcttgcaagggcaagtgactctgtgtctgcctgccgtgctcttgtaagcctacttgaggaccagcctacggatgacatgacaacagttgctatttgtgcactgcaaagcttagtgatgcacagcaggacaaataggcgtgctgttgctgaagctgggggcattttggttgtgcaagaattgcttctttcaccaaatgtggatatttcaggacaggctgcccttctaatgaagtacctattttcaaatcatacgctgcaagaatacgtgtcgaatgagcttattcgatctcttactggtgagtcggcaatcttaatggtgaagtgtgtccatgatattcttatttaaaatgtgtatttgctcatgtccatgggtgaagtttcatgcccttctattttgaaaatgaaatgttttttttttccatttgccattttgtctttgttactatagacaagaatatctaataaaagcagatgcattaagttatgaaatgattgaattgcaaatgcttatgggtgttatcctgcttgctgatggatcgatttgattattttctaatgtcaaatacaatttgtatcagctgccttagagagagagctgctctctacttcaactataaatgaagntattctgaagaccatatatgtgatattcagcaactttaaaaaaggtcgg

SEQ ID NO: 2270 - DNA, 792 bp, Zea mays
attagtcggtgcactcatgctggttcttttgtttccaattcaggtacataaatacatttctctttgtcaacatgcatcctgcaatttcttacattgcattgcatgtctaaatgtgtctacactgtctttttagtgacaattccaaatgttactactgaattggcttctacatttgctagagaaaagatgttcactatgtacaaatccttgttaggacttcggggttgatataggagccttattgtaatcatgcagttgtgaaattttgattcatatgttgataatgtagtcccttttgtttgcacttattcgtgctgtcagcaatcagcatgtatgtttccttatgcaatctttgtgactttgtttgagttgttcagaccctatttagaaatatcaattataatttatctgttaatatgttgggatttctaggatgaaccacagtttatggtctctgtatgccaaaaataaatagccagaagtttagttgttaattactctctctgttccaaattcttaggtgttttggcttttccaggtacattgcttttactatgtatctagacataatgtacatctaaatgcatagcaaaagctatgcatctaaaaaggctaaaacatcttataatctggaagagagtagttatttcacattacatatagattaagtggtcctggaaggctcgatctaaaattctaaaagctttatgacggacctgttcatttttatctggctatattttccaatcaagggtgataacacaaaatgtgggggcgttggtacatcttcca

SEQ ID NO: 2271 - DNA, 759 bp, Zea mays
ttgttgctataaagcagcttaacagggatgggcttcaaggaaacagagaatttctagtagaagttctcatgctcagcttactacatcatcaaaacctggttaatttgattggttattgtgctgatggagaccagagacttcttgtttatgaatatatgccttctggatcacttgaagatcatttgcacggtacaaatgctgttcttgtgtgctctatcaaaactgtttgcatatgactactacctgttagcattccaaccactgctctctgtgtaactagctgcatgcctatcctagtgtgtctgcctgtctgtcacatgcttgcttgtctatggttgtcagattgttatatctttgttagtcttccactctttattgtatgcatccatattcattattcttcctttttatactggcagatgtttagtctgtagcccttcacacgttgccaataacattactattttgcttctgaaacctattctagacccattggtgatgcagggtgccatactatgtacccctttattagccatcttcatattacattttccttgcattttgccctatgttagtttatcgacccacgtggggtaaggtagcccccggtgtaggaagaacccataaccctaaacagggttgggtgtggtattaatagacttcagcaggaggtagacggtgcatcccgattcccgaggaactggtccttcgagagcgagcccacgcctttgcgcgcagttgtcccttcttggttccgca

SEQ ID NO: 2272 - DNA, 793 bp, Zea mays
agaaaattaatcgagtttgtcgtcgacgtctgggatctctggcggccggtgccttgctttcggcacccatgcggcaagccctcgtctgaagaaaacacaagtgtatcactcgttacaaaggcaaacgtcgaagtgcatggacaagcactactagtgcgtatcctcctctcttagaccgtctcctgtggaatatgtagggatacagaactatagatggtattgtttaatacttccaccgtcttataaaataaggtgtacatatttttagaaaagataatattttaaaactttgaccaacaattcagcaaaaaacatattttttagtatgtatgttatatacttgaatttatattaaaaaaatactttaatatgatgctcaatttgtatttattgatgtcatatttaaaacaaaagaattaatagtcaaagttccactgtaaagactttttcaaaaaatatatatgcattattttatgggatagagaaagagtattgtttgcagagagaagtttgaagcaatgaataagagatgaaataggggatccgttggagataaccttacatatagaacttggtaaaatttaggtgtctgaattttaattttctacaagttagttattacatatattttacattaaaattttagttttagttcgttatggtttcagtaggcacaatctaagttttttattgtttcaagaataaaaatatttattagaaaaaaaataaatcggacaaaatctgttttgtgttgcacaaaagataactgattatttcagttggttctatagta

SEQ ID NO: 2273 - DNA, 934 bp, Zea mays
atcttgcatgcctgcaggtttggtgctcggcattactgcgtccagttccagttccagtctatggaaaaattagggaaagtgccttgatttgaattgacaaaatcgcaccacgtcttccgatcgatgaacagctaagattcaaaacgtgctgtgagcagtgagcgacgtgtgtgtttcagtcggtatcaatgcgatcacgacagatgctactgtttcgcctgtcaactgctggctttcacacgcatctcaggcgcaggatcctctgcctgtcgacaacaaaggatatgcttggaatatattttttttttaaaaaaagttcagaagccaagccagcatatatatatgtacacactgctttccaatctatagcttgccccgttcgttcgttcatacgaggatggatgatggtctcatgcgtccacttttatttattattaataaacagcttagataaagagaagtcggcattcagcaggtggtgccgatgaaccagcttggtgcttgcctcctgcactggttggtcctggtcctggatgcatgctatcctgttcctgtccaggtgcgttcaaccttgcccgggtccgggtgcggtgcgccggcgggggttggtatggcagtcccgctcccgcagcctgctcccgctctagctcgtcgtcgtcaacatccgatgcgtttttccttaaattcctcctgccatggactactactatatatgctatatgctaagaactacgtgtgtctccatatctaggtgaacaaaaagacactggaaaaacggggtcagaaagcgatttcttcactatgtttgtcctgttccttttaagtaaaaaaggaagaacattgtgttttgccctgtaagttaagtttttttacttaacttatgaatccaattattataagtttaaaaagtggcccccgcaatgccaactgaagc

SEQ ID NO: 2274 - DNA, 779 bp, Zea mays
tgcatgcctgcaggtcaaagcattgttaaaatcaaggtttaatgcatagaatcaacaaataataatcgtcaaaagcagtgaggaccttgtctgggtgatgtctcaatgctgctttccggtatgccttcttaatatcttctgaagagcaggatggctccactcccctgatacagaaaaggataattagtaattaagtttatctccacataatacccggaaaatagaatctgcctcacatcaggataattcatcagaaactaagagtggaataaataacttttttcactgtattatggcctgactaactcacaacacaacaattctctcaaacatttctgagatactaaaggaagttctaagcaactagtgcaattagggattaccactgcatcccaaaaaatgcaattaccaatgtttccccatcgctaagcaactttttattagtagaaaactattatgcttacaccattcactgattgctttagagttgccaaaatggggattaaagcaattgacaagagaccaagagggtttctgtggaaagatcaggagcaggctaacagtggtagttatctggtctcttggaagaaagtccaatgtccattgcagtattgtggcctgggcattcataaccttgagtctttgagataggctctacgaattagatggttgtgggcagaaaaaactgatcgtttgcaacccttgggtaggattacctattcaagtgccgcaaattgccagaggcctttttgacgtggctgttgattgtattttgagcc

SEQ ID NO: 2275 - DNA, 730 bp, Zea mays
atatcaatatatgatttacgcatgtcttctcctctgagagttaaggatcacatgtaagtctctatttcctcttgtgaagggttttcacttgttaatctttatgaaaagttagttccagccaatcaaccatttctacataaatcttctgaaggaattctctcattggatgggtttttcttactctacttccttctgcaaacagggccttaccttttcttggttctccatcctaatatcatgccatttcacacacattctgtctgttttgttaaaaaaacagatacaactgctgcaataagtttttgaatctgtatgtttttttaatgtgtcttggaagaataagctgtaaacagcgggtccaaatctctattacttttgaaatgcaatcaatagttgaatgcttattgagttacatattgtaccttactacctttcactgggcatgtaattgctgttatctgtttcaggtatggtagcccaatattaaatatcaaatggcaccagacacttaattgtactgaacctaaactgatcactgctgataagcacatagtgagaatctgggatcctaatacagtgagtttcttcctttccattttgttcaaatgttttcttcattagtattcatggtgtaattttacatatatattgggtttgatgtggatttaaagcaaactctaatttaagacattactgatattttatgatccattgggtgttggtttgctct

SEQ ID NO: 2276 - DNA, 847 bp, Zea mays
ttcttgcatgcctgcagtggcgcatgcatgcgcagaagagcagccgctacaaccaatccagacgatgtcgtcgggatctagtcatctttttcttctcagtaatgcatggcgattattacgccactgttcacacctgcacacatgatcggatcgtccgaggctttctgggttcctacgtcagttggtagtatttggctagctagctagctagctagcttgtgtttgaggaaacgtaggacgtcgtcctagctaataacatctcactttctgtttcgctccctcctttctccccatatgattgatctttacctactgctgcacacacacgccttttgcttccatgcctgttctcagcagccaccgtctctgggctaggctcttgctgtttgtttaaggaatagacatggcatgtcaagtgagctgacagccttgttggccggactggactttgtgaggcagatgccctcctaacccaaacctccccagtctccactgcaactgcaactagctaggcctgagcaggtcgatgtggacagagcgagcgcgcgcgcgacagcaaaccgacgagaaagaggcgatgggtggggcttggcttgcttgtgatagggggaggattctgcctttgcgggttcctacttgtggtctggcattgcattgcattgcatgcctcctgatgccaacccttcgtgttttgggttgtgttaattcctgtcaacacctgcatgattgcgctgcggcgtacgtgtggaccatacggtgctgcttctttggcttgtaagaggtgaaggggacctgttgcttgggcaggcctagctaaccctgtccccatttcgagatcaagcgtaaa

SEQ ID NO: 2277 - DNA, 806 bp, Zea mays
tcgctacccgtttgatgtctagcgtcgacctgcagtatccggtccgccgccatccatttcctccccagcggcggcagcgctggtgcatcggcagtgggccggcattcgccggacatccgggaccgcaggccctgggcgaagtagcgagccagatggtcgacagctgcacggtggcagctgccgttgtaaggcacgccgacgccggggatgatggcgtcgatcctcgacaagatggccgaagcgctgatcgtgtccctggactcgactgccctggcccccgcgacgagaaggtcgcctaaactgctctcctccatgacctcctcctggactcccagtcccaacagcaggccgccatttccttgccctcccagcaacctctgatcaaaaccgtccgatgatggatcgccgctggagagctcatcttggagcagcaagacattggcttcttgaagcagcatgttcatgagctcatcgtggtcttgctgctgatgatgatcaggggaagaaccggcgtcgccatcacacatgacgccattctcaagggggatcactgcttgaggagaccacaggaggtagctgcccatctcctcatgctgtgtggggaaggggatgagaggggagcaagggtacgacatggtccccatcccgttgccgtcctctggccggaggaacttccggatggaactaacctgaggcttccttcagcttatgtacacagcgaggaaggaaagaaaagggttaggaccatttctcaagagggtggcaattttatatgtggaccttcatggattgtgtaagctaaattc

SEQ ID NO: 2278 - DNA, 727 bp, Zea mays
tcgacagttgcggcaagcttcttcccttctccactgacaaaacaaattatatgccctaagctgccaataatgttttgctataaaagaataaaaacttcactttccaactgtttatgtttgtgttatcgtactttggtatccctagtattagcttcatcgacaatcccctgtatgccatcggattttatactcacctcttatgtgttattgaatggcatataggggatgcttttttgtgtgtatgacatttgagtccaatggcacacaaaaaattagtataattttcgataggggatggtcgacgaagctaatacttggtgatgaacaatgcatgggagtactgacacagggctaatcacaaggcacccccttgttgacgccttggatgacacctcaccttgtcctctaacgccatccgtttttctgccactcggcaagtgagagcaagaaactgttcttttatcgttccagtttacagtgagaactgacgatttgtggtttttacatctgggcctcttcattcgatcttactctgcttacaataatctcagcatgtaaattacattgcagtagggttttcagtctttctggagccaactgcatgcaagtgaaaattgccagagagctagagaaaagttgcagtgcaaattgatgcgagaaacgagaggtgggcagggggctttgaaccaagaacatcttaatggcccacatatgttctgcgtgggtt

SEQ ID NO: 2279 - DNA, 710 bp, Zea mays
aaaagctataagatggaagaagtctctcgtcagcattttgtccattgcttccttggccattgttggagtaatttttacttccaggtgataagtgtgaaactggtgtaggtgctgaaacatcaagcctgtttccatcaagtctgaccacaattgcatgtgaacatgacccacagcgcagcttgtactcatcttttcccagcatgagagaattcttgggaagatgcagtacttcatagcaattgtagcatatggtaaaaggggcaccattggcaattggttcacaagtctgtgcaggttttttactcagggtgtccctcagatgattgtgtcgcatcagaccattaatacctcttggattgtagttctgtgcaccaaacaccaccgggccttctacagggttgttcataagatatggtgccctgcgatggttgaaacccagtggagccccatgaacaggtaataattcacgatggtaacaatgtaagcaagagcaagcaggctgatggtagaagccgtcatggtgataagagatcagagggtcaggatcatactgtccatggaaatagttatcaaagtttctccatggataaggggcggctgggtaaataggagctcccatatgtgcaacagattgtccgtatccatggagatcttgctgtacagatactgaaggataagcaggaggaacaacaggtgcctgtccattcaaa

SEQ ID NO: 2280 - DNA, 820 bp, Zea mays
attgctccattgcgcgtttcgaaagttgaaacacaagtgcgcattgactgtttgttaaagagtatggaatcggctaatttctcggcattttcccccctcgagtgacatttgtacagctatccataaaattgttgtaaatcactactctctctacagcctttttttgcatactatatatatagtcaaagttcgaagttcccacgtcgtggtttttgcccccttttttttcgtgtcataacatgtgttttgtgactgacttgggagtcaggtcgatcaaatgttccttttcctcgcaatgcctgtcgacgggtccaaccgtccaagtcagtgctcgatggtttcggcattgctgacgattcagtctcatgacctgcggttggttggtgagcaagtacgaagcttgctgctgctgctactactgccatcttgagtgtgcggtcgctttagtctttgatcagcacgcccgaattcagagctcctaccttgccaagaggagaaacgcgcagcacgtggactttgaacgctgcatcatgcggactttgaacggcgcgtccccggtgcatgtgtttgtattcttgcgtcgtcgtccttgctcgtacacaaccttgccctccaagtctcgtcgtagtgccatgtttgccaccttttaaaaaatgctgcaactccgtcgtcaaactaggccttcgcacaagatgacgtttgcttgcgtaatatcgtgcgccgtgcaatatgatactagtaccctgatgcggtaatctcctgcattgcaaaaacactaatgctgacttggaagaaaattagcatattaccaaaaaaaaga

SEQ ID NO: 2281 - DNA, 852 bp, Zea mays
ttgcatgcctgcagtgtgcatgaaaaagtacctgaagaaccatggttgatgttatgaatccaaatgcatattcaccaacacggggatgactaatgattgctacttctttgaatgctgttgtattttgatctgtccagagaaagaaaaaaagtcctaagaacatttctgcctgacaaaaggaactacaagaaagttggaaacaaatacaaactgctgatatctatgtaaacacaacatacaacatagaaatatggtgctgttgaatcatgcaacactcatggtagtaagaaaatttaagggactttgatgtctttgcccttactgtagaggttaatggtgtttatactcatgtttcgaaaacgaatgagcagtttgcccctgttttggatggctcttaacttttactggattaaacatattaaagaaaaagaatataaaccctcatgccaaaacgtcttacaacttggaatgaagtactactcaaatgagtagcattgcacttgaaatatatccaaattctatcaagtgtttgtccaaaaattgttaaagtttggtcaaacttgcacacatgcaaattatgtcaaagttttatcctattcgaatatacaaaaattctctgaatcagaattttcaagtcggacgactagctggtcgttctggctgactgacttgggtgattaatcacgatcagtcggacaacttgagagattaattgtgattggtccaaaccgacttggacgattaattggacgacttggaaacctgaacgccattgtcaaaattcttttgaaacaagtcaaaatggtgtccaaatgattcatgtttaaaaaaagggtaaaataataaaattct

SEQ ID NO: 2282 - DNA, 775 bp, Zea mays
tctaagaacaatcagtcattatgttggccatcttttgaacaaagggcgttcctctttcccgataagatgatgtcttatcttggcgatcgataaggttacagatagtacaacatttaagatcgtgtcaaaaacctggcagatttcatcagcaggagaaagaaatcaccacacgagtgcttaaacgatgctcataaatatcaggagaataaagtaacagaattacgttttttctacttatattaagtatcacaacacccggtctccaccttctaagggtgttatagtagctagttataaataatacatttagaaatggtaaaattcctggtccaaactggcttcaacaaaaactggaagacgcgacgcgagtgttgcttcccagaagcccaaccgttcgagtcatttcttcagcaactgtttcaacacatcttctgcgtgccgctccatcttaggtagagcccagtcatgctgcatgatatccaggctgtctttctctgctcccaaactctggatattgccaatcgaaaaagtaaagttctcaaatcttgtcaagacacaagttcaaaaaattacttgtcacaaatatagacatgtaaaataaacaaacaaatccagtaaccgtacacaccaagaaatctgctctagataactatggcagcaagacaccatcaaaactaagtgaaaaataaaaaaacagcggcgaaaacttctgagttcataacatagatatctcaagattccaaaagctgggcattggagcaattaagttcttgca

SEQ ID NO: 2283 - DNA, 899 bp, Zea mays
  unsure (1)..(899): unsure at all n locations
catgcctgcagacacaaaggatcatcatcaaaggataatgcaacatttgaagtggtagcaggcacctttgatttcaaatgtagcaaatcattttttgagggaagaaaagcagaggggtcttgagacattttggtgtgttttctcttcctatcaccaccaagtgtttctcttctatctgtaagcgtaccacaaggcaatgctctatcatttctaattttaggagccagctcgggaacaactgaatcctgttttttcctgatatctgtcgatgagacaaataggttatccttgccctgtgagcccatgaatttttcatcagatatggatgttggacatgaagatctgtgctgacattttgacttcagcagtctgtgagagctaccaagaggggggcataattcagaactagtacctgagattgatcgtgagcagctttctctgggcaactgatatgaagtgtattcacttgggatagaagagccaaatggaactgtcccagcctgcaaccgaaaatatggggcaggaactgaatcattaggaagcagcttctgttcaaagccatgtatctctggatgctgattcaactgtaaatatgagacaatgccagtaattgcatcagtttatatagatagaacataacaagtacaaatgaacttaacaaaacatatgcaatatatcaggaaacaagatcaaagaatacgctgctcatatctactaagaacatataatttatgagttataactgctcattcatagtcaatgtacagtgatctagagggaaaaccaatattgtggcatttcaatgcataacaacgttacctgtaatatattagtttgcccagcatttcattcnncaganacataaggacaaaaaacctcttgtttgtatgtgaagtaca

SEQ ID NO: 2284 - DNA, 792 bp, Zea mays
agggtcgccaagctctgcgatgccattgtcgtcgccgtggggtacaggcttgcgccagagagccgataccctgccgcgttcgatgacggggtcaaggtgctcaagtggatcgccaagcaggccaatctcgccatgatgaccaaggtcgggggtggtgttgacaccttcggtgcatccactgttgagccgtggattgctgcacatggtgatccagctaggtaaatgttactgatcctcctgtttatgtagctgcatagatgtgtgattgtgcgctaaactttactaattgatagggtaaatgttactgatcctccaatctatagctgcataaatgtgtgctaaactttactaattgatgaggcaatggtagggatcatgaaactgcaatgccaaaatgacaataagttctggaatccaagaatttgtgtaagaatcttttattgcattgcttgaagttgcacgtaaaatggttagtgggcaaaaacggttgttcacctgttcaacaaacatgcttttgttcccttcagatgatttaaacgtctaacacttgatagttaagcttggtcaacatgtcatatgtggttatgctatcaataagaggcttctccaaactatgcaaacatcagttaaccttaaccatgactcttttgtttcaacttaacgctggcacttgtatgatgtgaattgaagctttcacatgtattgaataaatgactggaactttcgcagaattaaatattgtattccatcatggaaatggaatctcctgaattagtattataactcttgttt

SEQ ID NO: 2285 - DNA, 768 bp, Zea mays
tgccgaaatggcagtaccggccgctcgctgtagccttgttatggggtcatcatcggccgcagcgttttccttgcttttaggttctgtgatcacatatgaccaagttatttgtacatcacagaaaatcttttaaggctgtctccagcaacatcccataaattccattctctaaagggatattttctgtcctttacagcactctctaaaagattctgtcctctatatcttcttcatctccagcaacgtcccctaaattcggtcctctatatctacagtgttaacagaatccataaactacaatatttgttctatatctcatcgtatatattttggcaatcatattaacataatttattgcaatcgtatttttgcaacaaattacaaatcattgtagaatacatagtaaaatatttatgtacaactaaaatatgtcgaatatatgaaatggtcgttctcacatgtgtccacagaagatcttttagttccatttttcagttcttttttactagtcagcggagacgtttctggcattgtttgttttttattggcgctatgatggtagcagacagctcccagtacaagagctgacagaatagcggacggacaggagatgctagatttggcggacgctggggctccgctaaattttagcgaacgctatacaggtgcttgttggagacgttggggacgaagctacactctaaatatagcgtaccgaacgctttaacgtttgttgttgagagagcctttagctgcatttacattacg

SEQ ID NO: 2286 - DNA, 827 bp, Zea mays
ttgcatgcctgcagccaactacaggtcagctcaaaggtaaatgaacggaaattgatattttggcataccaaaatatgataccgtagtcacagattgtaatgtgcaagtaacaccacccaatgctaattaaccatactgacacaagcattacacagtaatcctagaggctagagaggagctagagtttaaaaaacaactctagttctttctgacagcaacagaacataagaaaacaggtcgacatcacgcgtgcttcaatgcaagttgtacagtaacatgagccgcgcagttattatccaaccagaagcactcttgtccaacatctccttcctcatgtatagcgccgaaatcacatttcatatattctattttagttctactgagttcaaaacctttggattctagaatctcccgctacaacactagtttcctatttacttgtgcctgacattcatcaactagcactacatcatccgcaaaaagcatacaccaaaagatatccccttatttatcctttgtaatcttatccatcaccaaggtaaaaagataagagctcaatgttgatccttgatgtagtcctattctaatcggaaagtcatctatgtcccatcacttgttcaaacactaatcacaatattgttgtacatctgtttaatgagtccaacatacttcgttggaactttatgtttggtgaaaattttacctcataatattccttagtattttttcataagacttattcaaattatgaagaccatgtatagatcctttttttgttccctatactgctccatcacttgtcttattaaccaaaagtctttcatgct

SEQ ID NO: 2287 - DNA, 799 bp, Zea mays
acctgctgcgcgccaagctccctcgcgccgtgctcggacaggtgtgcctgccttctgcctagcagaacacgaaagttcccctccagctgctcgctagtcgtggctcgtgactacatgacgactaattaagccgcgttgaaacttgactaatcgtttgaacagggttatgggatgacagaggcaggcccggtgctctcgatgtgcatggcgtttgccaaggagccgttaccggtgaagtccggtgcctgcggcacggtggtgaggaatgccgagctaaagatcatcgacccggagaccgggctgtccctccaccgcaaccagcccggggagatttgcatcaggggcaagcagttgatgaaagggtacctcaacaacccggaggcaacggcgaagaccatcgactcggaggggtggctgcacaccggagacattgggtacgtcgacgacggcgacgaaatcttcatcgtcgatcggctcaaggagctcatcaagtacaaggggttccaagtcgctccggcggagctcgaggccatgctcatcgcccaccccagcatcgtcgacgccgccgtcgtccagtaagtggccacccacaccgtcctccccgcgcattctcgatcgagttgcacaagctctaaacgacgttcgcttgatactgctttggccggtgcagaatgaaggatgactcctgcggcgagatccccgtggcgttcgtcgtggcgttccgcgggctccggaatcacccgagaccaaaacaagccgtccgtggcgaaacaggtgagatactatgattagtaatcgg

SEQ ID NO: 2288 - DNA, 782 bp, Zea mays
tgcatgcctgcagttccaagaaaacaattctgatgacattacagctgcaaaggcaactgatgttgtttcttcattgggtctcactgatgaagtgagcaatcatcagaaaacatctgaaaatataactaatttagatgtggataagtcttctactgcaaatggatttatggcttctttcagtgagtcctgccatgaccgtatagataaagatgagcaatggaatttatttgtccatgggaatgaacctgcaaagattttggaagagttgtctcctattgatgagtctagcacagatactcaatctgatttgtgtagaagcacagaaatgaatttcacttcacttgagggggttgtacggatggaggctgagggccaattggattcaatagtctgctgtgatgtaagaccaaagcatatgttactagatatggaaattggacatacagccactggtacattcacctttgacaagactatcgacttagctcatcctgccaattttgttgcacaagatggaaggctagaaagtatagtatatgatgttttgaataatcatgcacaaaggacaacctctaaaagtaaatcttctgttggacttccagatactgctgtgcttcagagctcacttattgagttcactgacaattgtctggaagataaaagggcttcagatgataaattttcacatcccaataatgtgggacttgccattgaaggatacgttaaattctacaatagactatgacatttgttgatctatttaatatgaaggatcagaagaa

SEQ ID NO: 2289 - DNA, 772 bp, Zea mays
tttcgagtgtcaccctccgcatcagatgttcatcatcacattcaggagatgtcatcgcctcatcggacgtgtttttgtcggacgccacagcttacggcactaacagagaacatcacactgtttggttgtatgaaaactatgacagctatcgcgtttgctagtgatttcttttccaatatttgggcgccgattctttacaccgcaaccacggtacggcgctgcaccagcgtccagcggcgtggctgggccgtgacagcctcatcaactaccaagtcccaacactgaccagccagttattcagaaacaagtacactactggagactggactgtgtcatccgtcttttgcattgcatgtaacaagagaaaattagaatgtttggaaggagacaatgtacaaccaagaccaatcgttgatcgagctgatatattgcatttcatccttcctcgcctcacaatccggcttccgcgaactcgattatgtacactccaaatctccaatcttccatacttcctactacgactccgaccctccacagcacacctccgcacagcattcgtagcagccgaggcacgctagagccgcacagacctgtgccatcagaatggcacactggtcgttcatcctgttgcacgccctgatgcagcacatgcagcaaaggcagtcagcgacgcggctgcaacagccgggtcccttttggagcatcacaattttctctgctgagttcacgtcccaaaatcctgtgacgagattttcccttgtagcgtccttgt

SEQ ID NO: 2290 - DNA, 775 bp, Zea mays
aacactgcatccaatatgttcccctaaaattagcctgcataaaagatgtatatatgacattgtcaaaaattaaattatttcgacatcgccagatattagcccagcaaagggcagtcaccccaacaagaataatactcttttcttttgtagcaactcctgaaagccagtttcctagcatgtgaataatcgacataggtgctgttaaacccgtagctatattaactaccctccaatatgtcacttctctacttgagttttgatttacgacaaaactgcaacatgataatacaaccttcttgatctatcaaagtttgggtagccaactaatgcgtcaaagaagtattctcgagaaaaaagagtttctaccaaatcacatgttcttctggacagtgggcacacctatcttaaaactcacctttgaaatgtttcacttggtgggccggtttgatttttgttgactagaataggtaatcattaagaagtttagttttttttaaaacttttttgtgaaacaatctgtattactattgtgaaaattttcctgggagctgtacattttagctttggtcaaaatatgtgtgtttgtccaaaaaatattactccatccgtcccaaattagtattcgatttagctcttgattttgatgtctatattcaaatagatgatgatgaatctagacacatacaaaatacatgcattaattattgtatgaatctattaaaaaaagctaaaacgaaatttattttgggacagaagaagtattcatcaaggatct

SEQ ID NO: 2291 - DNA, 721 bp, Zea mays
tgcggcgactgcgagcgtcgccagccacgcggcgctcctggtcccgagcgccgccgcggcggcctcttcctgtgcgccggtgtccgcatggctgctggagcccttggaggtagcgttgtgcgggagcgggtggacagtgatggcgaccttcatgccttgcaggcagaagccgttgccgcagacaaagtagtagcggcgggcggcggggagtgggatgaagtccttgccggaggtccagttgccggcgaccccagccatggtgcaattgtcgtaccccgtctcgttcacctccaacacgttatgcgttcccttctgataccggaacgctgcacagcaacattgcggtgttagcagcaatcagggctccaacgggagcctcacctcgctatgaaatgaaatggatctaatacggcagccagaagggcctagaatttcttgtttggatgaggagggccttacagatgaggtcgccgacgtagaaggtctggttgccggaccagagggagtagttgatgttggggttccacccatggttggccccaacgatgtggtccgtgccggcggagggaccaagcgcgaagccggcaagcaccgcggcgacaaggagccacgacattgcggctgcggtgcgagcaccacgttggggagacggccgtggttatgtgagcagaagagcgaagaggaggcagagagcaagtgaactgcggcggaagtgctgtca

SEQ ID NO: 2292 - DNA, 820 bp, Zea mays
atcctgggggagtgatgaacggaggatagcacaggagcagaggagagggagggatagaaaagccgggaggggagccctatcctccgatcgtgtttggttggaccttggcagcaggggaaaagacgatcggggccgaaagcgagttgctgcaccgggatctttttctacaagcatcatatatatacgagcattcctctgctcgtcagatatttattttcgtcctctttcaacactcgcccacacattcagattcctcctcgtctctctccgcagaaaagaaaagtgcaaagggaatcggagaagagagagaacaaattaaaagagatgaatttacttgtgattaaccaggcgcactgacggggagttccatcatcattccgagcatcattagagcacaggacagaataatcacccccaaggcgataacagcaacatcttcaagcaagcatcacaccccccttccgcggttgttgctgttgttactgtcaactcccctccgccgctttccacaagagctgctggatccaccactgccactgactacgataagcacctcctattcttgttcacacataaaaaggagtatgacgacaaccttgctgtggcggaggcgaaaccacggtcgcaaaatgctggtacgcggaccggggtctggcgaaagacaaagggaaaaatatgaagtagacttggaaatattactgtgacaactcaaaatatcatctactatgttaaaggcgctaggtcgccctttactgctattgtaaattagagataagggatacttgctttaaaagcaaaaatagctcaagtcatggacgac

SEQ ID NO: 2293 - DNA, 751 bp, Zea mays
ttctgtgctttattggctttaaacctaccttttcttggaccttttaccatttctttggcccatttcttttatctcccatttccgccagtaatttgcttttcttttcgtttctacttatttccaccttccatttcttcgagaaattttcatgtaccgtaaaactgtgtgcttgtcgcgtgaaagatctcgtacttagcggtttatggggttttcgcaggttcgcaatccctaatcctgatctcacttaagcgctcgtgagctctctccagtggctaaagattgcagatttgagttatagtccaagaaacgggtggtggtccgccatggaggtgaggtccgagcaagggctgatggcggggagggatctattcggtatgccaaagagcccgccggcgccggtttccgggccgccggcgtccgccgccatgcagagcgtgcgcatggcgtacacctcggacggcaccgctgtgttcgctccgatgagctcctcggccgcgacgccgtcttaccagccgcagggtgcagcccacggcgctagcatgtctgcggcgacaatcgttggaggcaatggcgcggcagctgcgccgagcatgggggagccggtgcccaagaagaagcgcgggcgaccaaggaagtatgggcccgacgggtccatggcgctggcattggtgcctgtgtcggcggctacggggtcgccgacgacagggcagggttcttctgggccgttctcaccggctgggtcaaatctgac

SEQ ID NO: 2294 - DNA, 742 bp, Zea mays
tggattccgtgttccgctcctggctcccctgatagagacttcacggggccatggatcctcgccggatcgagagtcgcgccggcttgcaccacctccgccacgcatgtccttcttccgattcttggttgagataactaaggacttgtcagtttcaacgttaatccatgtgaatttggtggtgttgagtcggttcaaaattcatagcaggttaaaatatacatcacagcgtatttttcaatatacttcaatctatatgaaactgtaataaccgaacaaggagtaagtggtggcaccaatgccttagcttttttctaagatactggattgtgaaagttattgattcatgttaaaaaaaaatatactttcaggcactttcaggcttcgtcgacgactggacgaggccggccgtgttgctgcgtgtttgcggggagaaagcaaactgggcactggggtgattggttgggtgcggtaggcgggtgccgggtggggtctgcgtggcgtgtttgcgagtcacaggtttggttggttgccacggacggcgggtctgtctgtctgtcctctccgccgcaggccggagatgggtccgtccaacgggcaagaatacagggccaaagacaactttttggctgatgccgggcatgtttcgtcacgctcgcacacacagaccgccacctgctggctgccttgcctgacgagcgcttgggtcccaaggaaagaatcagtcaaaaatcctacccccccc

SEQ ID NO: 2295 - DNA, 768 bp, Zea mays
tccttaggacatgaagatgaatgagaatattgccatgccaagcacacgtaaaatatgaagtacacaccaaataaccatggtaaactaaacatgtttttatataatgacccgaattgacatgctcttaggcgttttgatgcaccagtcaagtagttctgtgcgttagttttactctggggcaagttctagttgatccctaatatcatgtttttactctgggcaagtttaagttttatttgacccctaatatcactgttatgcatgaaacattatgactaaacaaatcatgaaatagataaagaatgccctttgcctttttcatctctaagttgttctttcatttaattttcaggaaagggaatactaagtttctaggcatgaacaagacagtattcttacctatcctctccccgatatgccttcttgcaaggccatgtagcactctaggccagtttggcctcgaaaagtgcgtatgaacctacaaattatagatttgtgtttaacattccacattgtccaaagctagtgcgtaggggtggtaatggatcgtgatccaaatgtttcttcacaaaaagttaggtctcttaataaattttagttcaaaaatgaatagggatatagcccaatcctaatatgattcgatcctgaaattctatagcgtaaaatttagagctcattaccatccctactagtgtgtagcgacatgtggttgagaaccaaagatattaggcgcacaacacttgtgtcatgcgtagttgcgttggaaat

SEQ ID NO: 2296 - DNA, 756 bp, Zea mays
tgtctgctaatcctagtggttgtggaaaacaccacacatgcatggcccggagccccggaggtactggcagccacaccgggcacacccagctgccagctttgctgctgctgctgctgcttcctggcacatgcagttctatcatagctgctggcccgcgtgccttcctgcttgctgactcagttgagcaccagctctgctgtctgcgtgcaggacagcgcggtggggcctggcctgcttttgccccagatggatgtgaggaggggttagacttgcatggtatgtgaatcggtcgatggtgggctcagcattcagtgatgagaggagattgaaaattaacctaataaataggttagtactcatcctttatgaattcatccactgtctgtgcttgctttgtatgtagcaccgaataaaaattatcagagttaatttgaggtgtaagcaagtctaccggagaatattcatgcgagtcttttctcttcccaatgttcatgtctgactccaacttgtaggccacatcgtccataatgaactccaactgcttttggtgcctgagacgacagaaacacttaggttttatgcgtgtgttggatggacaactaaaacacgaatctctttagtaattgaagagagatctctagttttgtacgtgttaccaaattcttggacattgaggtttactaaaatgagaattgtgagagtaatggtaatcttaaaccacttattgctgttttgtactatatatgcaggcaaaca

SEQ ID NO: 2297 - DNA, 787 bp, Zea mays
aaaaaggtctcgcactctccgagctccaacacccacaaacatttcctcaaactcgcttccactgcaagagaagaaaggaacaccagcttcaccagcaatagccctagctagcatggttttcccagtgccaggaggaccaacaagcaagactcctttcggaagttttccaccaagacgtgtgaagcgctgaaaacaagagcacagtttgtgagcatcatacgaaagacaaaatgaaaaataaggtaccttcaggtgttgtcaagacgagatgagcttcataaaagcaatagaaaggatagatcaatgatgaactaattaatggcaacttttaaaatctattcagtaatcagtactccctctggtatcaaaatacaagtcgctggagctacaaactcaaagtagtctaaaacatgtcattcaatgttttagcagcagttttggtcaaaattgtccttgcatatgcagtcccgagacaccggtaactactctactcaacgtttcctctcctcaactccacgtgaatatgcagtcccaaggcacgcaagcaatgtttcctctcctcaactcctttctccagctaccggtgctagatcgctgccctatcttaccaccatggagcacgagcgaggcgaggagcacaaccagcacggcgagcaggacgtcgtgactgaaaaatgtgtgagcgcgaatgactgaaaaagagcatgcatgccaaaataggagacacacagctgaaagcgacaggccatgcaaatgagagcaacccagcccacgatggaaaagggta

SEQ ID NO: 2298 - DNA, 580 bp, Zea mays
agaggaggtcgagagctcggtcgcgtccgtggagtccagcttcgtgccgctggaggcgtccccaccgccggcgccgactaggttggacccgaatctaggccacctgattgccaccgctggtttctcggtgggcgccggcggcgccgattcggacaacagcgacgaccgcaccagcaagttgtccacggccgccagcgcgccgcgccacgacttctcgtccgtcggcttcggccgggagcgcgatagggcgcggtcccgcgcccccggcgctgctcacggcaagggcatccgtgctgcacgtgtgcgcggcgccactatgcgtgttgcctcttcccctgctgaagcggggaattctcgctccagcgtcgagtccaacctccggagctctaacgctgctcatgcgcggcgatctagtgctggcgtcacaagcaacggtgttcacaagattctgttccctgatggtcatcaaagtgacgatgaacctccaagtggggacatgcggtatggtacaggacgtttctacaaggagaatgggagtatagaagggagattggggaactgtgactccgactccaaccat

SEQ ID NO: 2299 - DNA, 723 bp, Zea mays
agatcccttaccacacatagatcatcatgattgggtctcaagaagatgaccacatcatctgcatacaaagatatctgtggccaatgctgctgtccagctaagggctgcaacagattgctcctagcagccatttggattagagagctaaggacatccataaccaagatgaaaagtaggggggagagaggatccccttgccggaggccacaaaggtgagtaatggaacacccaggaataccattcactaaaacttgaatacttgccgtggataaaatttggcatatgaggttgcagcatcgccgaccaaaccccaagtactgcaatatttccagtaggaaaggccaagagattgtgtcaaaagccttagagatatccagttttaagagaatgtgtggctctttgcttcgatgcagggcccgggcaagttactgcacaagtatgaagctatcatggatgcatctccctctcataaaagcgctctgataattggagattaagcttggcattagaggtgctaaatgattagcaagaatcttggttaccaattttgcaaagctatggatgagacttattggccggaaatcctttactgagactgcatcaacctttttgggcagcaaagaaacaaatgcagagttaagcagcctaaatttaaagacatgtccaccatatattgcattcaatgttgcaaggacatcacacatcactgctgataatttccca

SEQ ID NO: 2300 - DNA, 786 bp, Zea mays
aaaaatgctaggcacgatgaagtattcaggaagctcacagaatcatcatgccaagaagaaaaagaggaaaacaagttgtgagaattgcatacagcagtttcttcggctgtggcatccacataaaaaaatgtaggcctcgataatcacaatctttttcactctgttagactatctccagcagcttacccatccccatacccatgttcaaactacgctctgcgaaagtgcagaacagtaccaaaacagtgttttaggtaaactatgggtaaactgctggacacagtcttagccacatgcacgcacacacgtgcacacatatataccttgtttgtttcaattattttttgctgattttggccaccggaagctgttacagactgccaaacgtccaatttttcagtatgtttctatgagaaccgttttggtgaaaatcgtccaaaaccaatgtaaaaacataattggtcgagtcatcgcgatagaaggaatccatcactcctcgatcctaaaccctatggatcccttcatcttcctctgcacgtagtccccacgatactcaaattctcccaacatccagatctccccatagctagattttcagaaaagcttatcagaaaaaagctgaaccaatcagactcatagttttatgattttcagcattacctctcgacttgattagtgtactcgttgttaatgtaaaaaggggactagctttgaggacttctacgaatacatttcaccttcggtgtttgattattcattgcctttgagtgtatgcatattcttttt

SEQ ID NO: 2301 - DNA, 717 bp, Zea mays
aagtcataccgaaagccaccaaatgcattatagttgatcctttctgttgaatcaaaatccttagtgcatactaaattgcacgttgccatttcaggttgctccatattgtgcttcaaagtgggcgattgagggcttgacacgctccttggctaaagagctgcctcctggaattgcagccattgctcttagccctggtgtcgtgaatactgacatgcttacttcatgctttggaagttcagcagcgttatatcaaacaactgaaacatggtaaactttcctgccttatttttgtttcacctatttaccttatgttgttttaccttgtgcacatatagattataatctcaacattccgttattcactgtttgttggctgagctgaaaataaaatctgaaccaacggaagagggttacttgagacaaaggtaatcaggttgcagacacacagggatgggacactacaattacatatctagtgttaacacctagcatggttgattgacacataaatgaccttactggatcaccctcccaagatagttctgaccaggatgatatcgttgctatacatattcctttccagtccacctttattgtttattgttatagaggagtcctgtagccataccagtgatttcaatggtgctttgtttccactccaaatatgtcagcacttagtccaactaaatatactgttagtcatcgttgaccctgttt

SEQ ID NO: 2302 - DNA, 696 bp, Zea mays
aaattccgacggatttgacgtaccgtcgtacttttccagcaggtgtggtcggaacttgggcggccaggacgccgcgcggatatgatctgcgagagcggcgcagcccacgccggccaaggggacacccgccaggaaccgggcgcccactggggttcgcggtgctaccgcagcgaagtcttgatcgaggttgcgaccctcgatgttttggcggcgctcacgcgccctctccagagagactcgagcgtcatcacgaccctcgaagttttgtcggcgctcccgcgccctctccagagagacccgggcatcctcccccgcacgcctgcggttgagctctgcccggaggtcgttggtctgtgcacccctcactgagggtgagcgcacagacgccgacgcctcatgttggcaccgggatgaccgtggcctcaatctggtcgaggtagaatgtgccatgctgagcagtcggtcaacgtcgtctcgccactgcttcatggcccccggtgaggccgtggagcttggagggtgacgcagcaactccctggctgcagacaatgcccccggagccgccctcgacggagtccgggacgtctgcgcagttgtatgctgccgtgcagcgtgcacagcagcagtgcctgccactaggcggttgggaacttgtggcgtggaagaagcagcttcctcctccaccaggaaatccac

SEQ ID NO: 2303 - DNA, 567 bp, Zea mays
aactccgacagatttgacgttccgtcgtacttttccggcaggtgtggctggaacttgggtgggcatgacgccgcgcggagatgatccgcgagagcggtgcagcccacgccggccaaggggacacccgcttgggaccgggtgcccattggggtctgcggtgccaccgcagcgaagtcttgatcgaggttgcggcccttgatgttttggcggcgctcgcgcgccctctctaaagaggcctgggcgtcctctcccgcacgcctgcggttgagttctgcacgaaggtcgttggtctgtgcgtccctcactgagggtgagcacacagacgccgacgcctcatgttggcgccgggatgaccgtggcctcgacctggtcgaggtagaatgtgccatgccgagcagtcggtcgatgtcgtcccgccactgcttcatggcccctagtgaggctgtggagtttggaaggtgtcgcagcaactccctggctgctcacaacgctcccggagccgcccttgatggagtcagggatgtctgcccagctgtatgctgccgtgcagcgtgaacagcagtagtg

SEQ ID NO: 2304 - DNA, 790 bp, Zea mays
tatgtgaaggagtacgagtttgttgccatctttgacgcagacttccaacctcatcccgactttctgaagcgcactgtgccacatttcaaggtaaattgcgggggaatttagtttcagatgtttgtcttgcgttttcgtactccttaagtctgattcatcgaatgaaccattgcaggacaatgatgagcttgggctagtgcaagcaagatggtcctttgtcaataaggatgagaacctgctgactcggttgcaatatattaacctttgcttccactttgaggtggaacagcaggtgaatggagtgttcttaaacttctttgggttcaatggcactgctggggtgtggaggatcaaggcattggaggactcaggtggatggttggaacggacaaccgtggaggatatggacattgctgttagggcacatctccatggctggaagtttatattcctgaatgacgttgaggtactagtctgatatctgatatgaaaaatcttctaattggtgtttgcttgtgtcagttgagctgattttgttgtattgtggacagtgccagtgcgaattgcccgagtcttatgaggcttacaggaagcagcagcatcggtggcattcgggtccaatgcagctattcaggctttgtttaccggacatcatcaaatgcaaggtatgacaatgctctttatgcttgtacatgatcgcttatccactacatagtaactcaatttatgctgttaataagcaaatttattgatgtccttttttgagaggaacttgcccgtgtgtataatt

SEQ ID NO: 2305 - DNA, 722 bp, Zea mays
tgaaccatctcctacacctaacgatcggtcgcggtcgttatcgccttctcgtaaagcacgagctaaatctccatctcctcgaatcgctaacacaaatactgcaagaggtacactgttctttctctgaccgagcagatgtttgagatgtgaagcttgcatagaaaggacattcattatcgccttcccctttttgctacacagaaacaagggcaggctccccgataccaagttccagcccgatggcacggtccgcctctacggttgcaagaagaccgccttcgaactcgaggcatttgagactagcttcgatgcagttgcacagcgactgggagcagcaggagagaagctcaagcaaaggcaggaggggtttcctcaggtcgctgctcacgaggcgccggtggaggaacgacgagtcgtccttgtacagttacttggatgagtactgattgctggaatgttggaactgaaaaaagtctggtgttaactgaatcttctatagatggatgcgatgctctctgctttgccaaaaggttttggtttcccgtttccattcttcacttgcccatggtgaaagcgacgggtagatgatgccccgatccgatcctacccaccctgccctggtcctggccctggaatggcagaaggcgacgacctcttcttcgctggatccgtacgtcggccgtggggcgtcgccatcaggacagccaccactacagcaggac

SEQ ID NO: 2306 - DNA, 794 bp, Zea mays
ttgcgcggccggtagccgagacgtatgcctccatcggccgacgttacggtacgcttccaacccgaagaatccaccacctcgtactttcctcgatgtctggtgctctgcatttcgtcaaacgtttggcgtgtggtctcgtgatgttcctgactttgttcgctgtccaggtgtgacgaagactaagaagagaatcatggaggggttcaagcgggcattctccgcgccatggccgaagacactcaggtaccaggtaagggtcatgagacgcacaggaattgcatttcaaagcttgaaattgcgtcgtggttgctctcgaggtgacgacttgttgggttttggactaattgcagggagatgggcggccattctggagaattgtcgtggcagaagcgaccgactgcactgatggtgattatttcgaagaagtgtatcaggtagtatacctcatgttctcgctaaggttgttcgattgaatacttcttggtgaatcagggttggttgaagaatttgagtatgcattgaagtgtttcagtgtttggtatctgattatcttttattaccttactatagttactacaatgacgaaattgaacaagaacaaatgttctgactatactgttagtcaacagaagcccaggcgatgaagttcaccgctctcaaatatatttagtttttctaagttgaaggatgcattccgcttccggtttatcggtatgtcgaatgttcgtaaccataccatgtggctcatggatggatcaatggttctttccatattatgcccatggagatgcttg

SEQ ID NO: 2307 - DNA, 787 bp, Zea mays
gatcctctcctgtcgacctgtcagtccccgctccccttccgcgtcgccgcgatggaggtcttccgggagcacggggacgacggagtgccctaggattccatcacgccgccaagcatcagtcccgcagccagggatttcttctccgaccccgaccttcatgtgagtcgcggccttcctcctcgaagcggatccggcggattggaggggcccaaccatagcaggtgctcctctcgcaaccaactcaggtgtgaccgtgtgagtgtgactgtgtgagtgtgagtggaagtggtccaaccgtcgaaggcctctggtctccggcaacgcaccagtggtggcactccatgcccagctgatgcggctgctggtctggggaaagtggacgtaccttttcggttttcgccatgtagcttctgtgagtagtgccatattctgaataatatgcagagctaattatgcacccctccatattattgcactgcaacaaagctgaacgagaagggaaaaaaacgtagcttgattaggaactagcttctttttattgccgtttaggatctggtaacttgcaataccttgtagtctaacattaggccattagctatattggattgtcttagtgatgctgctgtgtgcgggtctgttaaggtaggtcaccatggaaaactgaaaccaaacaccagtaatggttccttttttacgtggtctatttgccactcgaatctccaagaatattcccgctggactgggaaaaaaaaaatctcggttttaagcagcactgcgctaggtgcgt

SEQ ID NO: 2308 - DNA, 789 bp, Zea mays
cttgcatgcctgcagcagaaggcggcggtggaggtggctcaagagcaacagttgggactggacgagagatggaaaagcgactgtcccgttcttgtagcatgggtccaagttactaaactgccagggttatgctagatctatgttgtagcgctacccgttgcatgttactgtcagatatgctcgttttttgcgtatcgtctgcttttggtataaagaaatgtgaatattcgaaataggtgctgaatccatatagacttgtccagaaactcagttccataccgttctcgttgcatgtgatgcatatgttgctggagaggactgtttgttgcttacagtttgtgagataatatatatgccatataaggtgactgttttgtccttgtctacgagtatatgagcacttgagcagtaactgttgtttatttaattttagacattaagtttaggtattcacaatctcattttttgtgttggatttattatctgttccctttatctgttggttgtactttatttgatctgctcagtgtaggttctattagtaattactgtgcattgtttatttgttggacttctctcgacttttaccatgggattgatcttttgctcatagcattaaaatggagttgatcttagttgaaatttcatattatgttggttcactgatgcttcccagtcttgatattcttattattctgctaaaggcgggaagggatgaaatcatattggtaagtggtattatattatgtcttgatccattggctagtgactttgggtatcaacatggtc

SEQ ID NO: 2309 - DNA, 752 bp, Zea mays
tgcatgcctgcagacacaccttttagtacttgaaataacatgttattgacatgaatgaagaaggcccctttacccaacaaaagactgtttggggaatttaccaagtttctgagaagatctgctgcatcatctgataactgtaaaaaatgtgcaaattattagcaacacatggtatttgtcacgatgcaatcataagttgttaaaatacaagtgaaaaaagaaaataaaaactgcaaatcatctccagtgagagttcatttacaaaattagcacatcaatgggaaaaagtctgggaaatacttgtccatggtttgaagactataataggtgtttcgtttttaaaggtaaagaagggacacaaaaaaacaaaattctgttcggaacttcagcttggtgcctccccttctacttcaacaatagtttgttcattaaattccgcccgttttggggacaccaaaactcggcaactccactgcacccattgagaaacctattttccactttgcatggtggccgctattttgattgagcaattgaagccattgtcttcccctactgccaaatgctgttagtttaagcattttaaaacagatgggaaaatattagaatttttcgattgatggtttggatataaagataaaagtgaatagagcttgaagtaaattttcattagtacaaatgacagagttctttgtagtataattaactacctattacagtcactttcgtttacacagttctctatctattgc

SEQ ID NO: 2310 - DNA, 737 bp, Zea mays
gggtaggggaaattaaaacatcacagtatattttaagaccaagtacatgctacaaatgtacccagggttgcatacctgcaattttgtaagactaggctcacagcacggggcacatttcgtagcaactagttcttctatttccacataatttactttttcagagcagccatctttcagaaagtcctgaattttggagagacattttctaacacccaaggcccacttcatagcctttgttagtcttactgttatgttccggacctaaggcatagacagtattacagttaatataagtcatataatacttgaagacatgtaaacaggtcacagcatgctttgtcaaagaaacatacagaatccatggcatgatcaccccaaagaaattgttcagcttcttccaaagcagtggcataagacctttccacaaatggcatctggagaatatgttcagagtttgaaacccaatcttctgcaagctgtctatataatatatagtgatctttgacctagaaaaaaaaaacaaataaagcatgccttagaggaaagtaagaaggaaaacacaacaacaagaacccaaatgagcataagattgatcctttacgaggcataatttcaagcccaaaacatcagatgaccatgctttaatggtaaaaagaagcatggataattggaagataaaattataaaaatgagcaaagcattccgtgcatactttggtcaatagagaactaaatgca

SEQ ID NO: 2311 - DNA, 787 bp, Zea mays
atatcattctttataaccggccagcagaccttgtaaaagtgaccagtaaaaccatctggaccgggcactttatctggaggtaactgcttgattgttttccacacctcttcctcggtaaaagggagctcaagatcatgaagcagagctgggatagttcagcttctttgttctgggtcatgtctttgtgtgtgtgtttatttaagtttactctgacatgtaacactcatccctcatggctcggccggagtgatgtggtgagaatttgtaagggggtgtttcttctctcttaatacaaagatacacagatcttctgcgtattcaagaaaaaaacccagccaaattgttggagaggatccccagctcatcaaggtgccacacactccatcacataacagattacagatcacccttgcaccaataaacaaaccgactcaagactaaccagacctaaactgtcttgggcatcatggctacaacaaacgaaataccccacgcccctgccaagacccacaacttcagctcatccttagcagtgactaagaccgaagccaaatttggtgaatctccataaacaacacaccagccaatgtccataagccgtcttgaggtattctgtagtgaataggttttgcactggtattttaatttgctgcacattgttcttattgtagtaaccattacatgcgtaatactagcttcttaaccctacattcatgttcgtttgttggacaaaatggtgtggatgctgagtcacttacccatttgaagggagaaataaaaggctttt

SEQ ID NO: 2312 - DNA, 753 bp, Zea mays
atatatatcaaatgctcacagaaaagtggcgggatactataacaactttccggcagagtttattatgtatcatcatggtactgtatttatgatctatctcgaattcagcgggtggacggtggtggcgtggttgggcaacagttgtcgccgcagcaggcgtggccgcatgtcaccttcggatgctgcaccagccagcagcattggcatgctgaaatgaaatgaaatgcatccatgatcagtatcggactaccaggatcaggaaaagctgtgagatgatgccaacaggctaacagcatatgagcatgactgatggcctaactgcctgcaaggccgtcagggacactcctctactgatgacaacaatttaacagcatctttggtcggtggaatactaagaaatgaatgaatgaatcaatcaatcaatctagtgaagagaatattccgcacagacttacggagtgaggccgtcgccgttgtgatgaagagtgcaagcaacatgatccatgccacaagggcgagggcagtgttctttctgcggctcatgctcagagttcttcttgtctcagctgagatggtaatgtgccatctgctacgtatatatatatatataaagggatcgacgacccgaccgcctatgcaattgtgataagatgcagccgctttgctggacttgactgatccgacactctagatctctctgtgttgactcgtcagatggtagtttttttgatgatctctttcctactcgacgtt

SEQ ID NO: 2313 - DNA, 774 bp, Zea mays
atgcaaaaaaaaaatccttgcagaagcaaacagctgccgtgcaaccgacttagtttccaaaaaagggcatcaaaggtcccaagcggaaccacaagagaagaggcatgttcgttatagaaagcgggtagaaaaagaatgcaagcaaacatgtacacaaggagaatctatccatgttttgttgcatgtccaacaggcaaaagcacgcatatttgacaaacaaacaaacaaaaaaaaactatttaattattgaaaccagcttctcgacctatgtcaagtttgtcaactaaaatagcacacatgtcatgttatacaaaattagcatcgaactgataagagcgtatatataccttcccgtcctcagcaacaaccactggatcagcaccttgagtaatcacagcagtcctcttttgcttgcctgaagccaaaggaagctgagagatcttcaaagcaatctcctcgacattctcagtctacaatttgtcacaggtaattaatcagcaatacaatcatcagaggcaaatattatacgaggatagaagacttaatacgtaatcacctcccatcctcgaactttggcgaagatttttgcctcggtttcattgccgaagatgaagtcagcatacctatatcggtaataagtaccaacaatatattcaaaaaaatgatttagaatccataaagtgcatgcgaacgaggctctagctaagttgttaggtggcactcctacatcagactaggatttaaaaaagaatcctctaatatattcctcaccaa

SEQ ID NO: 2314 - DNA, 761 bp, Zea mays
aaactttagatgccctaattcctgtgggagcgtccggacatatgtattacatagaccgataaacctgagattatgtaaatttccaagctgcttgagatcataaccttccatagacccacaactctctaaatccagaacacgtaacaatttgaagatgaaaaccggaggtatcatgtatataggacattcaattgcagtaaacgacctcaaccatgggaggaggtccatattgtctccaaggttgtgctcttcttttctgttatggatggctaaccgacgaagtttgcctgatatagatatttgcccttcttcgtccaatacagaaacaaagttttcttcggatgacaacaggcgaataagaccaagaaccatactatgaatacgaaagccttgcactgtgttatcaaattttgattggaccacttgtataatgcttctacttacgagctcgttgaagaattcttccccgagctcaaataactgttttccttgctcctcttggataaaaccttcagctatccatttccatatcaaagaacttttattaataacataatcatctggatatctactcaaatatacaaagcaagtcctcaaattcaatggcaaatcagagtagctaagtgataatatcctcatagtcgtttcttctaaatgactgttacgacctttatgtccaaaagcattattggctagctcagaccacatttgtgttggttttcccatgaacaaactagccattgtgatgagagctaacggtt

SEQ ID NO: 2315 - DNA, 721 bp, Zea mays
acaggtcaatcagcatggttagtgttgatcctcgccttgcagctttgtacaaagaagcgacacaactcattggcatcgaccaatcaatgtctgaaataatatccatgctgctctcggatgagtcgggccaccaacacattaagaagatttctattgtcggagctggaggactaggcaagaccacccttgctaaagaaacatatgaaaggcttagaagtgaatacgagtttgcaacttttgtttcagttggccaaaatcctgacttggtgagagttttcaagaacatcctcgttaagcttgacatataccagcaagtggacactatcaacagaacagatacgcgagcgctcatcgatgaaatcagacagcgccttagctatgtgaggtgcaggtacgtgctacaaaccatgcatcaactaaacaaaatatagtaataagtgtgtttagtctagtttagtttccttccgtatttagcaatttagaaactaaaattgaataaaatgtaaggcctacgtagaaaccaaacactacataaactttttttttaaaataaaataaaacagaggcctctagctttatttcgtatagaaacaaaagtaacaaacatctgaattaactaaaattattatcttcgcacctcctgactggaacagaactacagccatccttgcggatgtcacagttgttcttcttgcagaaccatggtctccagtcgatttgt

SEQ ID NO: 2316 - DNA, 813 bp, Zea mays
agcagctagactggtttaaacaacgcatctgcttttggttctccgcaggagacggtgctgctcaggatccgcctccactgcgacggctgcggcgaccgcatcaggcgacgcatctacaagttcaaaggtgagcagcacagattctggcagtctcggtctcggtgcgccgcgcggctctctagaaactgacgctgttgggctttgacggtcggtcggtgcatcaggcgtgaaggacgtggtgctggagggcaatgccaaggacgaggtgaaggtgacgggcaccatggacgtcccggacatgctctcgtacctcaaggagaagctcaaccgcgacgtggaggccgtggcgcccgccaagaaagacggcgatggcaaggacgaagacaagaaggacggcggcggcggcggcggcgaagacaagaacaagggcgcggccaaggcgggcggcgacgacaagcagaaagacaagggcaaaggcgccgacgacgtgccggtggccccgtccacggcggccgccgcggcgttgatggccgcgccggcgggggtgagcacgtaccgcgtggcgccgccgtacccgtacgggtacgtggcggcgtaccagcagcagcccccgccccccgccggctactacccgtacccgtcctactacggcaatggcgacggcgtgggcctggccaaccccgcccaccactaccagcagttgcagctggccgtacccgccgtaccccgtacccgctttcgacgtggcgccggcgcagctcttcagcgacgagaccccaacgcctgctccggatgtgacgtgacgggaaccgc

SEQ ID NO: 2317 - DNA, 756 bp, Zea mays
  unsure (1)..(756): unsure at all n locations
gtcttggagccagggaaacgggctgcgagcaagaggacaggcggtgaggtggcaaagccaaggattaaaaggacccaaacccaagcatgtggttaaggacccacgcagtcccaaagggcaccaacagtctcgtttgtttgcttcgtgccttttgatagattccctttttttcgttttttaacaacaggtacgtaagttttcttttattttttgaaaaaaagggggatgtcgtaaataantaaagagataaaaggaagaaagctgggacgccaaagataaacaagaggagacgttcagagcaaagacgaagagacgagcacaaagcccttggcttttcgtttgggcgggagtttacatggaccgagtcctgttggaatgaccggccagccatcatactgtagcatcgcgtaaaaaaaaccctacctacctctcctccagccgtccaatctgatctggttatataattcggtcggcgcattcttttttttctgtctcgtgcaaaccaatttttaatcggcgcgttttgcttgaaaactacgcgatccgatccgatccgatccgaacaaaaccagcgcctacgctgctatttgttttctctctctcgagattatccagcgtgctctttgttttgtcttctggaacggtacagctccgaactttcaacgaaagagacaagagctcgcgcatttcaatcctttttatttcccctttctggtggaaaacagtatacaatggaagaaccagtaggcaaatttc

SEQ ID NO: 2318 - DNA, 822 bp, Zea mays
actttgttctttggtagcaaaattcatgcatctgaatgccaagcttgtttgcccctatatggttgtcattcagcatggactggttaatccaggatcagcaaattacatattattgacctcagttgcctattttcatgatccttttctcataagttctaacctacattttttgtccatttttaaggtgggtctggcacttgtggtgaatggaaaggtaacagttggagtgatgggatgtccaaattggaccaacgatgacatagtcaacaagaaagatgatagcgctgctgcatgtaatggtcgtggtattcttatggtctcccatattggctgtggcacatggtctaggcgtctgtctgctgagattggccagttcactacggcgcaggatatttggaaaagatgttttgtggacacttgttcgatcgcacacatggcacactattgcattccagatagccaaacatgggatatgataccgttatctgctacctacgattcaacaacagatgcatctgatcctagaaatgagaatgaaatccttctcctatccgttttttgtggcaggtttgttgcactctccaatctccattaatggtttgatacttgcacattaattcacgccgctaatcagttgatatatgatgctaagctatagctagcaagccaaggcattttgcgcaatgattgatttttctcctcatatggcgttcacggttagcaaaaagcatttaaagcaacgattgatatattctccccatccactagttagctctggatactagtttgtttgctgaaagacttttcagcattatctggacc

SEQ ID NO: 2319 - DNA, 783 bp, Zea mays
accccagccaaatcagctcccacgagcgccgcttgtggctgggccgacaaagagatacacctccaaacgaagacccaagcatgatgatcctgggcgaagacacggatagggcaaacatagggcctatggcctagcatgcaccacttgaagcactaggggtgcaaacgacactgagcagcccgatggccatcagagaaactattgaaacaccacccacagaggcgcccgcttggaccaaagtcgagccaacgaagcagctagagcctgggcaagcattgcgccagcacaactccttagactgccctgccagacggaagggacaagtgaaaggcgacaaggatgagatggaacccgggcgccctaggagaggttagccgtagcgatgacggctgacggggatggtggccgccggacccacggtggattccggcgcggggttgggagcgaagggggcacatatggcggccgccggatccatggtggattctggcacgatagtgggagcggcaagggcactcatcctttgtttcaaggttcttcttgacaagaacttaattgcagcaaacaactgttatagtggttttgtaatcattcaatttctagtgttgttgattggttaaagttgacctttccaaccaagcagtttatacagaaaaatactgacaaattcaatcaaagaaactgataaatagatcaattcagacgtatggtcatattgagctctaagagacatgataacaggtttaattcatttccatgaaagaagctgaaattagacacaaa

SEQ ID NO: 2320 - DNA, 810 bp, Zea mays
tcctgagtacgttcacgaggaagaagctcaacaaatagcacctgaagtacatgatgtggtcgaaaactatacttattctgagccacaacagcaagtagtgtcggacaactggggagaggagcctcttcctgaagaaccgccttctttctcaaatgaaatggcagtcgctcctgaggagccagtgcaagctccacctgtgccacttcctcacgtggatgagcctgtttgtgaaccagtaaagaagacttatgcttccatcgtatgtcacttcctacttgctgtatcattttatttatttgacatcttgcctgatgcatctttaaaactacacttgactgattcatgcagctaaaaaccgcaaaggctcctgcattcccagtagcccagcaagtacctgtgagtaagccttctcaccctacaacagagtcaaaccaaacccagcattcagttatggcttcatcaatgggaaccgagaaaccgaggtctgatgtttttggtgagggtgcttcccatgatgacgaaggttgtcctatcctctgtgttaaacttaaacatcaaaatttctctggtgatttggctcttatgcattgtttactgacccaaccttttctgttcatataactagagagcaaatctgtgtatgtcggcaacgtgccatcatctgtaagtgaggctgatcttgaaaatgagttcaagaaatttggccggcttattcctgacggtgttgctatcagaagccgaaagggttgctggtaattgcttttgattctccacttccgataacacaacttaaaactattagttgatttg

SEQ ID NO: 2321 - DNA, 775 bp, Zea mays
ttatgagcactttagaagtcaacccttggattgaagaaattgacctccacggaacacctttgcatgttgctggtaaaacggaccaaatttatgagaagctctgtcaaaatgagagtcttgttctgccaaacgattttcttgatttgccactaagtgctcctacttgctgccgggtttttctatgtggtcaggaatcagcaggtatcatcagcaattcagcattatccattattaccctcattatctgctgtaagcagaaatgtagtagttagatcagtaatcagtacacaatgttcatcttgttttctctcttaacttggagagttgctaagtaaacaacgtgaaacctcattttactctagaatcttaaatcacattcgcttgcaatactagccactaaaataatacctctgacatgcaaagacgggaaaaaaaacctttattttcatttttttcttgttgcaactgataacccaatttgtggtggccatgcaggtaaaagcacgttacataactccataaatcagagcatgaacccattgaagtcgcctcacataaatataacaagtactttgatgaaaccggttttgcaaatggagtacaccaatgagaataaaagtagtgttttctttgatggcaacacaaaaatgacaatgtacaatcttgatggacaagaggggggttttccctcacatgattttatgtttgtggtgcacggtggtccatgctttttcatgattgtatctagtttggttctgaagcctgctaataggta

SEQ ID NO: 2322 - DNA, 715 bp, Zea mays
tgacaaaagaatttgcttcattctcttcagaggcagctgctgtgtttggaggaacctatgcggtatgagatattttacacagtctggcctgataatgctttcctcgaacatcaaacttgaagacaggtttagtatggttgggattattaacttgtggaatatcctcaccatgtcagtaacacttttgctggagcatgcaagcacatcgatggatgactctaatgtacttcccagcaccactctgacatggataccattgaccactgtataaataagatttttctccaagatgtagagtgcaccctgttgttgtcccatgcacatgatcttgttctgcaaacgaacctggccaaaaaaaaaagcattgttccataaagtcaaaaaacatgtccagaaagtaactctggtattctcagtacataccaaatagcatgcatattacttttggcagctatgctagttagagccttagaggaacagaatgttttacctgaagccttgaaaagaaatcgcctgttaaaaacatatgtatatctgtgcatttaagacaccttccaacatatctgcactctggcatggccaagtgccactgctgagcaccttctttgctttcctcaagaattgatggcactagaagtaatgtgtctgggtttccaggttcctgttcataacacaattcaagcttcaacagcaaatttatgacatcattgccctg

SEQ ID NO: 2323 - DNA, 743 bp, Zea mays
gccttccaatgcagttgccttcttggaagggaagccacatggcccacatccctcgtacgtatttgacacccaccccggctgggaagtgggggcgaggcagagtcgccgccggcggtgaagaggaatgtgggggcaggggagagtggctggcggcaccagcagagacttcacgaagaaagcacgcgacaaacgaagaaatggtgtggatgggccgacgggacactagctaggcctggcggaagaagttttgggggggactgcaatgtaacatatgtaaagctgaaaccttttccatgcagaggcaaaacatcaaataccaccgccagaaatgcacgagcaacaatagcagcaaggttaatagaacagccgatcttaatgtaaagagatagcgtcagactagcaaaagttttaagtgtcacataggtcgatgacgcgcgcacacacattcatcgacaaaacaagccccaaaacccaaacgcggcctagtagctgataggcggattgtttaggatctctctctctctgctttgacgacacggatcaaaaccttatgtttgctgctcgactgaatcagttccttggagtgtggctcccaagtatgcccctctcttggtgaggagcacgaccgtaaccgtttgacctcccacggttactattgtactcatcgcctccacctctcgaatatcccccgcctccaccactgaaacgggcacgttctcccctccctgccaatgccaatgtaa

SEQ ID NO: 2324 - DNA, 786 bp, Zea mays
aatcttgcatgcctgcagcgtcaccatacccagcctgtcggtaaagaagctctcggggctccacctctggaagtgggagctcctcgtgttcgtgctcatctgcggccgcctcgtctctggctgggtgatccgcatcgccgtcttcttcgtcgagcgcaacttccttctgcggaagaaggtgctctacttcgtgtacggcgtgcgccgcgccgtgcgcaacgtgctctggctgggtgtggcgctcgtgtcctggcacctcctgttcgacaaggccgccaagcgggagacgcacacgttggtgctgccctacgtcaccaaggtgctgtgctgcctcctcgtggccaccgtgatctgcctcgtgaagacgctgctgctaaaggtgctcgcctcgtccttccacgtctcctcctacttcgacaggatccaggaagcgctcttcaaccagtacgtcatcgagaccctctccggcccgccgctagtggacgagagccggatgatggctgaggtgcagaggctccagagcgcgggagcatccatccccagtgagctcgaagcgacagcgatgccgggcaagtcccggccactgcccaagagtgggcgcctcacgacggtcgcgtccaagcgaggaggaggagcaggaggagcagcagcagccagcaagcagctgcataggcagaaaaccgagcgccatttggatgacggcatctcgattgaccagcttcacaagctcagcccagaagaacatcttcgcgtggagcatgaagaggctgatgaagatcgtccggt

SEQ ID NO: 2325 - DNA, 760 bp, Zea mays
atggaggatctgtacagcatccacccggggatctcgcgccacggggcggcggcgactagcgaggcgtccggggtcgccggtggaccgggctcacccccgcccccgcccccgccggcggcggatctgacggagctggtcaaggcgcagatcgccgggcacccacgctacccgtccctcctctccgcctacatcgactgccgcaaggtacggtacctcgccgtcgcatcgtgcggtcggctagcagtagctagcacctagcagctagctcgccgacaataatcgcggaaagattacgccttgacgacgcgggtcggtttcttgatttggcgtggcaggtgggcgcgccgtcggaggtggccacgctgctggaggagatcggccgggagaggtgcgccgccgcctccgccggcggggaggtcgtcggcatggaccccgagctcgacgagttcatggtacgcacgctaaaccagttgttctgattcttgtgtcgttattacatgtgaccgtggcgacgacgacggtggctgcggcgcgcaggagacgtactgccggttgctggagcggtacaaggaggagctgtcgcggccgttcgacgaggcggcgtccttcctcagcagcgtcaggacgcagctcagctccctctgcggcggcgccgcatcgctctccggtagtaaagtaagtaagtaaggccggggggtgtttgatcctccgggcgtctggctgggttttggatgttgattggaaggattaaaacatgagc

SEQ ID NO: 2326 - DNA, 1069 bp, Zea mays
aagtctttagccgctttaagtgtattgtaccttggtctagaaacattggaggctggtttggtgactaggaaattggagaagatccatgggggagaaaacctcttcctattcacccacatggatcctctccaattctctggtcaccaaatcagtcatacagtgaacgaacttaatgatcaccatgcacaaagaagcctaactatccttaatcactggttaccacaaaaaatcatagcacagagatcatatatgaaactagaaaatcacacgatactttttttagtctatggcaagcagatcgtgcatataaccgtgtacaagactgtctcgtattgtagactgcagtgtttactagaaagtcacacgctaaacctgtacttttttcagcttacccatcccgatcactatatttaaacgtcactttacaaacaatacaaaatagtgttttgcatggccatatgggtaaggtgctaaaggcggtcttaggaaagacaagatccactagagaagtagagatagtctcaattaggttgtttgcagcagttcgtgtaaaatagggatttgcactttagattaaaccgctacagtgcaaagtttggaataggggatgcgataggatagttggagagagagaagaaaagccagaatccatcaggctattcgcttcggattaaagtcaattgttcagactgctgcaggtgcaattcatagagacaaaacattataaacgtagaagccggtatgaattaaagccaagccaacatggggcatgtttgatttagtttttttctaaccagcttttctaagaatctgactgtggagagaatctggctttgggaagaatctgagtgtcgtagaaattacgtgtggaggaagatgaagtgatcaaaagggttcaaggtctagaaaacgatggattactactatcgtgacgatttagtcgattctatgttcatgttgattttggacggtttttatcaagcaattcttatagctaggacatttggcaatccgcatcagcttttggtagctaggagctgaaaaaacaaatcccaacaagcaggatcat

SEQ ID NO: 2327 - DNA, 762 bp, Zea mays; identical to SEQ ID NO: 714

SEQ ID NO: 2328 - DNA, 813 bp, Zea mays
gagaacatggtgttcttgtccaccccgccgtggccgtcacccgacaaagctaccaatgcggcgactagaccagcgttgcccgccagcgttgcttcagtgtagttgtagttcctgcgggcatctttgaacccgtcatggcggtcggggccagcaaccatggcacctgctatggtattagggtttggcttcttggcgtccctccacttccaccctcctttgcagccatagtgaacaccgttcttagggatcgaggcgccccggtggtgaacatgcttggggtaacgctttccgaacccaaccacgtagctcatcttcaaaggattctttcctaagatgtaatcgatctgatggaagtagctagttaattagtatatatcagaagttaaacactgctggaacgacactgttgtattaaaatgctggcagcctacctgagtccttgcaaaactgcgaagaacctcaacagagtagaaatgggggccacaataccacccaggagtatccgcagcctcaagatagtcactgaacacagaagcaaggaatgcagcgttgaccacatactggaggggccgtggtttcccgtgatttagctggatcagaccacctgtaatggaaggaagttcagtgaactgtacagttaaagcagaagtgacagtatagtacactgactggatggatgcataaatcacctcttgttctgttgaaggatttaaagactggaaggtaggaacacatgataatgctagtttgattgtggaacgtcctcaagatctcttcgtatggatatccaagactaaagaaaagcctcaaccc

SEQ ID NO: 2329 - DNA, 825 bp, Zea mays
ccttctgacatgtactcgtagacaagcgccatgtacaccccatctttgcagtagccgaccatggagacaaggttcttgtgatggatccgtgtcaagatctgtgcctggacttggagaggtggccggccggcccgccagagaggtcatgcatgcatggcgactagtcaattaatttccatgcgtgcgtgtgattgtgaaagagacggctataccgtccgtacctccgtgaggaactccttggcaccctgattggacgactgagacctcatcttcaccgccacctgagtgccatcctccaagaagccctcgtagacgtatccaaagccgccccggccaatgacacgcttgaagctgtcggtgatcatctctaggtcctcatatgtgaaccggcggttctcaagccgcagcgagctaagtctgtgttcgtcggccgccattgaagcaaggctcgtcggagtcttgtcccggggcttcacagagacgtccgctagccctgaatgcaccggcggaccagtggttctcgctcgttcaggatggccgatggctggctagctaactagctagagagcgcggtcagtcgatgctttactactcacctcgcgtctttcgccgccgcagaagacaacacagcagtactgccaacgccaccacgatcagagccataggaacagcgacgtagtagatgactagcttgctctttccttgcggcgccgtctgacatgaatccccggcgttggtgcaaaggtctggattatcggcatagctacacgtacagagatgagagacagatcgatactgtcgtcgtccggctggaacctaaaggcg

SEQ ID NO: 2330 - DNA, 1050 bp, Zea mays
ccggggcccctcttgagttgacgctgcagcctgctagtctgactgtcagcctgccccaggcggttgaaccggtcctaggtgtctgttttaccggtcctccacagccataatcagtccaacggctagttttgaagccccatctatatatactcactcctacctctctccccacagaagagcacgacccaaattccatttcaaacttgaagaacacctgtcactctctctcacacatctcttgacccatttcaaatctttagagagaaatctctgagtgagtttgagagctgcgttttttgtgcttcatctctaaatctctcttgctcttcttcttcattcgagctttggtactacatcgagttctttgtggattcattactcttggagcttctagctcctagacgactaggtgtctcttgtgagtctccaaatcttgtggaagaccacaagaaagtttgtattacccgctcgtttgagcaaagattattgtgtgggcttgacctttgtggtcggcaaagggaggattagggttgaaagagatccggctctttgtgggcgcctcaacgaggaagtagggcaccttttgtggtgtgaccgaacctcgggataaatcttgtgtctcttgtgttcttgctcattgtgtttgtttatgttcttcgttctctcaccattgcgtggaagatttgtttatatatttttggtgtgtggattttgagaagtgtccttctcagatctactactttgaactctgtggatcaactagaacatctcatttccaaagttaactgggtgaatttcgagatcaattcagctgtacccagttggcttctagtttttgttgaaaaagatttaacttgcctattcaccccccctctaggcaactttcaatatagtgcatgacaatcttgatagcaagctatcattatgggttctaattgaactatttttggcgtgcactgtagcttgaacaggtgtaatcagtttaatatatgggtacctctcattaaaaaatatatatgtaacttcttcatgggcacatgtcccacataa

SEQ ID NO: 2331 - DNA, 809 bp, Zea mays
gatcctctttagtcgacctgcagcctcttttggtggtatggctatgcaaactgagatgagggtacaatagggcatatgaaacttaattcctaagtaacaatgatgctaggataagattaaaaacttgttaggagtttagtttgttgcaagttgatctctttagtcctttccatgttattttatatggagatggaatgggaatattgtcatgactcgtgaatgtagcaccccctgagctttttgttttattgcactttctagttatctaggtcaacttttagtgaagatttttcatagaggtggatgtgggaatgtagaaagcatcagttctgagcattctagaataatatttatggcatcgtctttcttattagaaatctagatattgtaacagtcgttgacatataattgttaaataatgatacaaaccatttccacttgacgcgtccatccccctgatttatcattattattcagtattgtgttaaccatccacattttctgtattgtcacatttattgaggaagtagtaaagacaataggaaaaggcaaaatgacgagagatgagtgaatcaatcaaaatggctgttcatatttaaagtctgtgtttcactaaagctcgctcctattttgcaggcctatttctgatgcagttaatcagaatgatctaatgggtattccaaaggtacctagtggagtttctggtactgctttagctgcttctattcttcgtgatggttggagtgtatgtactacatctttcctactctttttttctttggtttcacctctctttatgttgcttggaa

SEQ ID NO: 2332 - DNA, 1193 bp, Zea mays
tcgtccctttctttttatgtttcaggatgcacacgcacgcgcacaggtcgagcaccttgtccttggcacggagcagatgcgcttttcccgtgagcagctccacgcacccgtcggttcgttgcaggtacgaagaagcacggattgaaatactccctccgtctcataaagatgtccttagacttttttttttacaaaagtttgtttgaacgactcgtcttattcaaaatatttagaggtgtgacaacaagccaccttccatagtgtttattagtagataaaaaaataataatagatgataaatatgtataaaaaataatattttatagaggtaatgtagtatagagtgcaaatatagggagagagattggtgacgtgaagggaatcaagggatagtaagatacagggataaccagataaaccgttgaagagagtctgagcgggtctcgccaaactgcgccccctcctttaattccttatccgcacagtcacacggtttaatcgaatggcttcgccgtcgtgtttcctcttccgcccccgtccgccgctgtgcagccgccgccgccgcagcagcagcaggtccctctacctcctctccaagcagagcctgcaccgacttccctcaccaagaacatgccgccgtccagtggcagagcagctcgtcctgcggtcgctgccgcccggtaacggcaggcggatgggggcgacgggcttcgcctgctactgttcctacgacaccgagaacggactgcccacgccttcaccggacaaggtgcctgagctataaaaaatgctgttgtgggcacaggcgcacatcaccaaaagctgtggattttttttcagagtttttcctgttgtcagtcgggaataattgccttccatgatattattttgttagggaaaaagctcgaatgagtggccaatccttcgccggtgggatgttccatgggagtggccaacgatttctctcaccatggtggcatgtgcagtaaggtaatgtactacaccattgctatttttttaggaacaacacctttgctgattggtaccatgcattgacacttccaattattctgagtttatgacgttgtctaagaagaaaatccattttccattccaaaaaggaaataaaataaacccccatttgtgcaaatatgtaatgtgggagttaatttgtggggttctattattcttgc

SEQ ID NO: 2333 - DNA, 722 bp, Zea mays
agtcataagcacagcatatggagtaggaaacctgtatcagaacagattattcgtagcttaaagttagatcgggccatctaaaataccttacttttgaagttttttttttaaagataacaaggcacataatccatgcatatttaccacatagtcagggataccataagaaatcctcgaaacacagtttcctccagaatgggtgccaaaatcccagtgatgcccagcaaacaggcagtgctgcaataaaggaaaagctgttaaacaatcaagtagttatcttgtctgaccttatatacaggcatgcaataacatgtaaatagtttaaggaaaaaaataaaacagataaatcatatgcccatacctgatgtttgatgagccaatcagcggcaacaaaaggaccagcgagtctgtctgaaagacaaggttcaagaactggatcactataggtaatttttagctagtacacgaaacgctgaacttcacatttatgtgaatatcatgtatgctggaagcataccatataccatgaaactaagacagccccatatctctatagaagagttaacttgcaatattcgtatttcctatatgtactttttagttttctttcagaatagtaaagatgtatgacatccgtacagcttaagacaattgaagacttttgagaaggaaagaacaacagaagactacctcataccataaaaaaacttacctctctatgt

SEQ ID NO: 2334 - DNA, 643 bp, Zea mays
tcttgcatgcctgcagaaggagagaagtttgaggacatccttggagtccggggtgatgaatttgcgaagagggcaggtgtccttgccgtcaacaacagacagcaaggtagtttcctaaagaagtgattagcgagtttattctcagttcctttgttctccatgatttgaaatgttgactctgttaattaaagactaaggctgatcttgaggaggttgcaactgctgaatctgatattataaacttgaagcaagaggtttctgatcttcgtgggcaggtcagtggccagcagctgtgctgtgaatcatgcaacaaaaggctcctaaacacagacaggcttggcgggtaagacttcggtctattatgttctcactgtttggcatcatttcggttgtagacttgtactaaactggggggggggcctttctccagacctgaaagctcatcagtggcagcgtcaccgaccattgggagtgactctgcatctggcatggtaagaatgtcaaattccttccgttctgctttcaatatgagcgggagggaactcattttcaagttaaaaaagaacagaaaacatttcagggtgatatcgagcaatcacggaagctaacgggcccagaatcgtcttcttagacagacaatcca

SEQ ID NO: 2335 - DNA, 728 bp, Zea mays
gcagagtgctgagtgcatgcaacgactgatgagtattttgcttttcttctgtttccttcagtttcactgttgcagacacacagcctgccgctgcttcaacgggaatttagctaaatttagtgtttgatttaatttagatagctctaaaaatcaatttattcaggggaggtgctaatctatctcgtgttgtacgtacaaaggccatgtcgttattgctattatttagaaatttaatttgaacgtatgtgtatatatataagggcattttaaatgttcaagttgcgttcagcaagtagttgttcctcttagcaaggatgacgccatgccatgcacgtcagatttgcattgcgcaaagctgatgacaccatgtacagtaccattacaattaagtaggcctacgtccgggagggtcaatgaaacccaaccgaaagcaccaaccaaaacatgattgtattaatgggcccgatcgtattgggttgaactaatacatatatactaaaggcccacacgtatatatacattctgtttgaggataaacaaagaaagagaaggattgaataaataagggtagtaaggtgcatgcacatcgccacagttttcatttataagtgagtgtagagtataaaatacaaactaagtgggtatgaatgccgatttggagccaacaaccatgttttgaattctaattttgacacaatcttagctatagctatactttatagtaatag

SEQ ID NO: 2336 - DNA, 834 bp, Zea mays
tcttgcatgcctgcagttgctagcctgggtttgcatcttgctatatttcaaccacatgccccccccccctctctctcttttctgcttaggtaggaacaaaccttggcatacctttttttgtgggaatatgtattttatctcaaggtagtactgaataatctgattaggccctaccttacatatgatcgttgccacaaaacaagttagtttaaaaaatctgataggccctaccttatatatgctacatgaatcattgtacaaaaatatgttagagaagtttctgtttacttacgaaatacaacattgcagatgcaccatgccaaattcagtttttgccatcagtcgatgatcttgtggagcctgctcactatggaaattttacacagttctctttgagctatatattgaaggaagaagtattgcttcataatgacttcttcgaaccattgtttggtggataccagagtcttcgagatagagaagagacataccatgctaaagaccaaaccctccactgtggttttgttagatggccagatgattaccctagtacaggatttgatctggatgaaaatgatagaaggtatatggatacctgtcatgttgctgtatcatcatgtatttttggaagctctgattacttgaggagaccaactaaaagcagggtgattttctaatctcttttgtatggatgagctccactgtccctgtgctgtattaaatagcttgtttccagtagccaaaatggcttaagtattaaggtttacacttctagttgatttttatgttctgtcatgagggatattcattggccttacttcttataagaattta

SEQ ID NO: 2337 - DNA, 844 bp, Zea mays
agtttgcatgcctgcagctgttgatccactgttatcaaagcagtaaaaatataaaatcttttgcggaagtgccagtaccatgcaatattataaatcaggcacttgccaacgagagaaatttgagcgctccattacctgccagcatggtgaatagcggctgcacacctaggaaaaagccaactgtacggtattgatctgaaaattttaacattctcaccaccaattccacatgacaggacaacgcaaacatataacatcaatctagtactcaccctaaaaaacagaaaaggcggccattaaaaaggagagcgctgtcaccaccaagagaaggtgaatccacccctcttgattcatttactgatgaagcaatagattggattgcagaatccaatggcttgtatccagatgagaaaaggatgaacatataatccgttgactctatggcagccttaagcaccattaaaaatgctttaggatttctaagaaagcccattctgtaccagattggtcataaaaggaaatttgtaaggaaaaagtctaggaaatttctaagacaatttggaaaggcaatagggaaaaaaactcctaaaaacatataacatagatatccaaaacaaaagtagaagcaaaatgtttcccaaagtgcaaaaccttgtcgaaaaactttttattaacagtcatatttaaaggaaaataatgcaatgggagctgatcaactttggttctaatctacatacctgatatacactccttaaaaagattagttggtgacggtggttagttctaaagttctactacgccttaacccagagaacttttgtgcattgatttgtttatgcatatg

SEQ ID NO: 2338 - DNA, 719 bp, Zea mays
gaccttctttgattttggttctaacgcggcgttgacatttttctgtacgtcctcactaaaaccgacatatattatccttagcgacaagaattcgaaaaagccagaaagggatgggcgatgagttagaagagtcaggtcaactaaaaagacaaaagaagaaggtgagatgtcccagtctcaataatgaattgggtgaaacgacaccgtgttaatttaagacaaataacaaattgaagaattcaaccacaaccagcgtatgtgctcggttggtgcaaattcttgtttgtttccagagtggggtgacgagagctgaaaatacaggcgccgctctcctcctgcctctccagcaatagcgccacagagcatccagcaatacgtacgtgcatgtcaacgtcgaacacgttaaccgttcatccctaggactgcttctgcttgaggacgtttccacgaacaggctgtgggcacgactgcgttcgttacatgccatggcaccacactcgcacacacagctccggcagtaaccgagaccgtctcgagcacgcacgcaccaggcaccatacaagaaattaaacagaaagcactcacctttgcttgacaggtgcagtcggccttgatgcaacgcgtgccgggccagggactgtcgctgtccaccatccctggcgaagaggtagagcaactggagccaaaactgtcggcgatgcaactgctgccggcgggat

SEQ ID NO: 2339 - DNA, 747 bp, Zea mays
cattttgcatgcctgcaggcagcagcatagtgtaccaaacagtccagcgaaccataattgcaactaataaaacataaaatcaagaatggattctgagcgagttacgaccatctgcaaagagattacttatcaaattatgatcgaactagttaggttgccgtggcatatttgaaataaagatgatgcaagaaatgtcaaagtctagacatcagtgcatcagtcacagattatgatgtaatattgcaagcagaacaccttcaaaaccatgcatgacgcatcccctaactcaaactaaagaagaccagcaacaacttttcaatgactcaagttgcagttcattcatacataaaacttctttcttttaattagcaagtgtacagtatattgatagtagcttatactagaacagacaaatttagccattcatcggcacgcaccagaaccaaatcttacagatagattcctcgttcctctctacgggaggcggccacggttgagcagcccaagcgtgtgtcgcgcagcctcgacgaggtcacggatgttgtggagcgacctctcctcggcgccgaagatgaagatggcccggcactcggccttcttggccagccgcgccgcgtgcccaagcggcagctccagcgagttgagggcccgcagaatctgcctgtactaggacagcaccaccggcctattccgggccagatcctccgccgtcggccaaatcagtccgctggctttcgccattctttc

SEQ ID NO: 2340 - DNA, 836 bp, Zea mays
actgatgtcttcataggcgttccttccatgctgttacatttgttctaatcccctttcttggaaaaaggatagaattacatgtttaccttgatctgtggcagtggcattgagggaacttactcaagagtaaattaaatccatccaattttgattgttgattgttagtttttatataattgattatagttgcattgcattccataggaggcaaggataggatggtgaagtagtttattgataaagatgtgccaaagaatagttctgaaactaaagagagctgggttgagcaaaaaggactacatattgagcttaatatggattaccttttggttaacaaatcttctttatttgttatttttctacccacgcggttgtttaaaatgtttcttgagaattttgaattgatattgtttttttgtgatccttgttacatcagttacatttgttttactgttagcaaggtttgtagcctccaactatttagccctccacttgatccatttctgtgtccgtcaccggtggagatccacctggagttgaacaaaggaattgtcaatttgttagatggtaaagaacccctagctttggttagatggtttgattgatgacatttaatttgcgctagtccttcctttgctgtgaatgagtcatcaaataaaatgtaatgttgcagcagtttaatttcttttaaaacaaacaaaggaatgtttagtagtcaactgaaacccaatgcctcaatttactggatgtactttacccattcctgatgatacgagactgtttttgagtatggtggcctttgataacttatacatgactgaaattttcttcgtcta

SEQ ID NO: 2341 - DNA, 782 bp, Zea mays
tacttctctgatataggaggctatactaacagaattactctggctatttatttcagagtacgcagatggcacttaggaagactttgcagcctgagaaggcatttcatcctctggaagaggactcttgttctgtgacatcctcatatcctttttctgtgtgctattgttgagcatctcgtcatcctcttttttatgctgtttcataggctcatagctatgcacctaatattgtaactttggtatataaccttctgatgtttcacacctacttacataagaacagaatgatagattttaatattcatgtttcttagatgaccttaaaatcacatactggttttacttaattaagaaccaaattttttgttatttcacagtaaataatgatgaacactcctactcatacacttattttctgtgaacatgaaagcattgtctaaacagtccttttctgtatccactgaacttacaatattttgttatgctcaatattttttcaagatgatgccctttttcatagttatgtttaaattcagaaacacatgaattttacaagcattctgagttgcatgtggcccttttcctgagctatgtaaagaactacaacatcaacaagagctggcagaactaagatgactgttcccgtcgctccttcatttgtgtgtgctaaccgtgctgacaagaggaaggaggtgtatatagttttcttgcattatttctagatggttgcttaattcattctgattattcacaactagcaagcagccaagcacttttgttcc

SEQ ID NO: 2342 - DNA, 903 bp, Zea mays
tattaatatgttcatgcaaagctaacttagagtggtattgtttctcaaattttaacttaccataccgaccatgattgagctgttcaggatagtcctcgtcttaaatcttgtacagtcatgtgagtttgctgggttttgcacatgaacttatgtttcacacaaaggattatcatattgaaagtgcaggcaattatagttgtttctatgcttgctattctgctccaactttttaaaaggaaataagcagaccatgtttttgcaatacttacaggccagaacatccggaagttggttaaggatgggtttatcatcaggaagcctcagaaggttcactctaggtcccgtgcaagaagggcacatgaggccaagcagaagggaaggcactctggatacggtatgctgctgcaacccatatgttacagttttcaacatcggtggacttgtgctaattcaatttcaatgtctttataggcaagcgcaggggtaccagggaggctaggctccccaccaagattctgtggatgaggaggatgcgtgttctgaggcgcctgctccgcaagtaccgtgaggccaagaagatcgacaagcacatgtatcatgacatgtacatgaaggtcaagggtaatatgtttaagaacaagagggtgcttatggagagtatccacaagtccaaggctgagaaggccagagagaagacactttctgatcagtttgaggccaagcgtgcaaagagcaagggcaagccgtgagaggaagattgctaggagggaggaaaggctggcccaagtatgataatgttgtattgatccttaactgcatttgtttctgaacatgggtggggctggtgcttcataatgttctggaatatcctattatggtttctaccgcctagtgaaatttgtg

SEQ ID NO: 2343 - DNA, 818 bp, Zea mays
cttgcatgcctgcagaaaacttgaacccctttggttcagcttctgctttttcaaagcagaaacaggttcaaaaagctgaaccaaacgcacccttaaatgtcaccataaaatgcttagctaagcttataagaattcgaccactactatacattaatatatttactatttagatatgttatgtgagaattatattagcagattcatcatcaagtgttcttcattactgtttaattagcttttgttagtatgtatacttagaaacaagagtagtcaaaggcgtctacatgaggctgtgtccatttcctaattggaaagtaaattggaatgcacatagtggcagtttcataaaattacaataaaacaggtggggggtatgaatgcggtctaaacccaagatacaatcccctatacaatcccctattaggctattacgtaaaaaagtactattctgtaagcaaaatatagttgctaaaacaaccaatggaactttctatcgcaaaggtccttgaggtagtataaaactataaaattctacagaaatataatatgagcagattttgatacaatcccctattaggctattacgtaaaaaatactattctgtaagcaaaatatagttgctaaaacaaccaatggaactttctatcccaaaggtccttgaggtagtacaaaattctacagaaatataatatgagcagattttctttctagggaaggttataaccagaccatattttgacctataaagttggctcaaaagtatatccccaagtgcatctgacttaaacaaaaataacagattatgatttcagcaaaag

SEQ ID NO: 2344 - DNA, 767 bp, Zea mays
tgcctgcagtccttgcagtcttgcgcacgccgttgaatattgcatgatgagtcatggcaggtcgctctcatggcgaccctttcttgcggttctcgatttcttccagcctcagtgtgtaataaataaaattagatttcctggctatcacaagagtaggtttcctggcttgacttggcgcgagaccaatggagcatttcatttgttagtgtccctgtgagtgacgtggaaactgtgcatcgccatgtctgctagtagtaagcgttttctgccgatagtggtggttgcggcaatggttgccgccgccagtggcgccgtggagttcgcctacaacggcttcggcggcgcgggcttgtcgctcgacggtacggccaccgtcacgccggccggtctgctccagctcaccaacgacaccaacatgtccaagggccacgcgttccacccggatccagtcaagttccaccggccgatgctgtcgtccttctccacgacgttcgtgttcgccatcgtgtcggagttcctcgacctgagcaccagcgggttcgcgttcctggtggcgccgaccacggacctgtccacggcgatgccgcagcagtacctgggcatgttcaacggcaccgacaacggcgacgcccgcaaccacgtgtttcgccgtaaagttggacaccgtgcggaacccggaattcgccgacatcaacaacaaccacgttggcgtcgacgtcaacagcctaaactccaccgtggccgtccccggggggtacttttaccac

SEQ ID NO: 2345 - DNA, 765 bp, Zea mays
ggattagggctcttcatctgttcgccgcacttcgtcagtcgcccatgtgagtaatccgagctgatccatcctcatccatactctgttcctcgcggtctccttttgttgatctgtatcaaagcatcgcacgtggatcgatcgagttcccgttgaagatgctcggatcggtcgtacctctagaaaattcgtggatttacttcttgataaatccgtgcatgcttgtttactccctgagaaattcgtggttgcattgtagtggatttgatagacgagcgtcgggcgttacttattggtgccgtgctctgaattacttgttgctcggtctaggggtgcctgcctcaccctgcggcattgtcaggatcgatagcatgacgcatgggttaccactcaccaaacaaacagttgcttcgtcttttttacgggtgattcctgttgtctgtgtttgtgccattgttttttggtgtgaagtgtgaatgctttcatcagtattgatcagtgttctaaaaactgtgtagacgctaggaaggaagaaggttaggcaccctgtagcatctagtcaagattagccaatggacagttatttaacgttgggcggaagagtggtgtgtaggcagggtaggaagtagtttttagaacagatgtctttattttagttctctttcattgcctctgattgttatattctaaaagtgacattcctaataaacttcaaattattgctagatgctttctcagctctatcttcattcagcacagcatttatgt

SEQ ID NO: 2346 - DNA, 801 bp, Zea mays
acacgcgcgttgtggacggccaattggttctggagatcgggggcgtcgtcgtcaactacgataacccggttgctgtggaatctccgggggagaaggatacgcagcggggggaagaggcggtttttgcttcgccgggggaagggatcagtgttgcagcggggagcgatcaggtcgcctccggtgctccagcgacggctgtttcggagcagaacgcgtccgattggcgtgcggatccatcaccacggcgtgaggtgaacgatggcggagatgaggggctgtcggatgcaagcgcgctgaagggcgcgtattgggaggcgagctcaagcgatggccgtcgtgcaccccctactaattcggtgagaaattctgatactcacaactgcgtgtcactgtcagtttggcactagctcatgctgtccttcgggataaggaataacagtatacagtacctattagctctcagtccctaaagtattttcatttctgtacatccgtgcttggcagcttgggccaggagctgtatcagataagaataaaaattaaaaatatgccagtagcccagtacgtttcttttacataaggtgtgcatttctcaactttctttcagaacgtggatcgaaatgtcccattgaagttacttgaagaaatatatattttaatttctgtattcttctaaaacagatgatgtttgacataattgctgcatttgatttgctcttccttcctgttcatcttatataggggggaaaggtagaaaagggactaagtattatatgggctacacatatcacaggagggccg

SEQ ID NO: 2347 - DNA, 731 bp, Zea mays
atttccttcatggccctttcggctcactgcacgtgagatacagacctttgcaggtagatccagggagacagcgtgcacatctgcgcgcaatgtgcctcccagcttcacaaaatcagcacgctgctcacgttccaagttgcagcggtcgacaagaacactcttgccctccttcaaagcatctgatgcagccttcaagcactgtatttttgtcccagctttgccgttccctattgtatcctggataacagtaagcaccaaaacagagttctgtcaagctgtgccaaactgttgtggcagttaatgaacagccgttgtgaaactttaaaacaccatgaataaaattgtctagacaaagtgcaatccaagttgattggtaatgaagacattatttgggattctctgcttccttgtgtgcgatgcccttattctaaaatactaaattgttattacagtattgatcaaataaacagtgaacagtgaagtaaacaatgaagtctacatatgagagcatagatggactcgcaaagacgaaatttcgaccaaatttcaactattcaaaaagtgtgtttcccaattaagtagcaattgtcttgaaacaccacatatgtggatgcaagggataactagcaaaggtcagcacatttgtaggcattgaaagcttgagaccaagagcgacggagaacccacctggcagacgcgaacccaggggcggccgggcggggagccgccaa

SEQ ID NO: 2348 - DNA, 781 bp, Zea mays
tgcacgccatggaattctctgaggcgtcacgccggcgtgtccccagcacggatccggttatttcgctgtgcttaattggggggtggactggtggagggggagggctccgctgctgcatacatgatacatgcatgcatgctacatgattattcagaatgaaaagaaataaatggaccaggagaagaaatatattactactaacagattattaatacaacaactatataatatatatacgcagctcctactagttacatataaatgtaacatacagacgacgtatgatagtctctctctatatatgcggtatatattagtattatataaagactatactagctatggccgtcatgagctgtagcacccccaaaaccaggacagcgtcctggcatggccgccgggcaaagacgccgccgccgcggccgccgatcgggcgtcgtcccaacctgctcctgctgcacccagcagtgccctcatgtgcctcttcttcttcttcttcttcttggtatgcaccaccttcccgcgcaccgtcacctccttcttcccgaagtccaccatgtagtccagcaggcctgctaatggaataatggacacaagcagccgagccaagcatgcacatacatgagctgatggatgagcaggcaggcagcagtacatacagtacgcacgtacaacggtcaatacgtgggccaagacccaaatacgggtggcgtgagaaggaagaacagcggtgcattgtttagcaattagcactgctagtgctagtaaaggcaaacgacga

SEQ ID NO: 2349 - DNA, 900 bp, Zea mays
gtgaaaaagtaattatctctggatcaccaaaaaataattagagcttgttcggttcgctttcaatctatattgatagagtgagattggatgagtttaaatgacaataaaatcaaactttttcttaatttttttcaatctcatcgaatccatgtataatgggaatacccaaacaagaccttaattagtagtgtgcagtgtgcactgctagcattcaatattctaaagaaattttgctacgactctatatatgtatgccaataattgtgcaactaccaactaggtagggtagctatcctagtagtgatacacataattgtcagttataatataaaatttaaaatagggaattagctcatataaattttaacaccataagttctaagtaattatgctggatatatcaatatagtgtatgcagatatcaaccacagccacataagcaaacgaactttatacgtctacatgaaaaagacaactatagatcgttagaacgtattttgtactattatagagcatgagctggtgtttacgctgcggtgcacaaggtacacgcttcttcattagtgtacgcttgctatatatactccgagactaaaacaactcttgcatgccaacggccacacgtatagaacgtacgtaatacaataataacatcttagaagtaatcatgatgtgagtcatcacatatataaacaaaatatatacacgtgcaaacaaatgttaacaaaaaaaagtttagcgtggatctaacagaaattaggtggcatttcgattggtgtattaacaaggctagctatacgaaaaacatggcccacgcacgcacctggatgcatatgtttgccacccacaaacttttaaaaaaccaaaacagcactgtgaaaacccatgcttgcgacccat

SEQ ID NO: 2350 - DNA, 698 bp, Zea mays
ttccgctcaacatccttactaagcggagcaaaaggcagcaccacatctttgcccaccggagcaacagctgctactcttcgtggatccactctagtgtagacagtatgggagaacttggtcctaataagccatgagttctgctcctccatgacggcaaatgaaggaagctaagaagcactgacgcgagtgatcagattccaactctggaagcccggatccatagaaaccacatgtcgaagtggaactttgaagaagtaaacaaaaaaaagagagtctgttagcccgaaacaccaacagaaaccatcaaaccaggaatcgcgtcagccgcgctttcttggcccatctgcgctcgaattcttgcagcgagttgtgaatcaggctgataatccacagaggccaagagctcttgcccgataaagaggaatggatcctggaacttgaagagcttggtagtggatccagtagtcacgtacagggcttcccaagaatcctaaaatagagcaacaatggaggcgaaattgtaaacataacaggctgcgcaacggctaactattatattggcaattattgcactagaaaaagggctagttcaacttcaaccatagcaagtagtgaccgaaacacgattgaaataatagacaccaccagcaattcaaaattaagggcctttgactctttccaatgtcatcggggtgggg

SEQ ID NO: 2351 - DNA, 763 bp, Zea mays
agtttgcatgcctgcagcggtggcatggccacctcaacgtcgaacacaacctccacttccttgggtgcgtcgggttgcagcacatcgacccgatcgtagacatccaagtcaaagtcaccctccagacatgctaatcgcacttgtgtcaagtcgggcgctgatgccagccaactgcgcactgatgttgacgatctgcacgatgagtagatcgagtctggcggagaaggatgtcgcaggatcggggacgccgctggccatgtaggcgatgcaccagactggctctagtaccaatctattacgaacatggatatttgacaagatatttccggtactcgccctcccgtaggaggcccttgagtaaacccagatctattgttcttgcctgtcttataataacaccctgcccctccttatatagaggggtaaccctaacttagggcttgtttggatccatggtgctaaagtttagcactacacttttagctaaactttagtatttagagatccaaataggagtgctaaaagtgaagtgctaaactttagtacccacaacagtttagctcctcaagatgtgctaaactttagcaccctactaaaatttagtacatgagatccacacaagtccttaatagctaagcaactctaacaaactctatctggccagtactgttcacacgatacagtacccgcgcgtacaactcttatcaaaccctatctggccagtactgtccacgtgcgtgaacaatactagtggctaacctgc

SEQ ID NO: 2352 - DNA, 771 bp, Zea mays
ataaagttgacaagttgtcgcataactttattaaccaacattaggttaactccaataaggatatgcaaaagatgggaatcctaatacagcgtttgggttacgcagtcaggcagtcagccgaaagatgagaccaaatccataaaaaaaatcgcgagaggattgatggatgcaaagatgatattatagaatttcgaggagatgaacttgttgtttcctaagggtaaatccatttatccgtctcttccctagcttccagcattcgatcatatatgaaaagataatgtattcctgagcctgcatgacagaggagtgtgaaaattatcttctaaagacattactgatgaatgccagcattgtggattccttatttttttttgctaaggaatagaggcaggggaaagccgtcatgggggcgtgattgttccaaacatcctgccaaaagaggataatgcttccatcacccacacgaggcatggcatatcctctgaagtaggtgagtaattgtgtaacatctctccaccagaagggccctttcttatgagagcagtgggggatctgaccgaagaatagtaggagtcccgcaccatatggacccaaggaatgtccagtctattgtaaaacttatgaacaaatttcatcagaagggccacattctgaatttcttggattaagcacttcaaggaccacctttgttttttagacaagtgaccttattccaagcgatgaaagaagtgcccttaccagcgaggtttaaaaaggtgcagtttagct

SEQ ID NO: 2353 - DNA, 905 bp, Zea mays
gcctgatagcggggtcaatcgtcaggttatatgacactttgaatttgaactaatttaaccttgtgcagataattgaactactctctgtccgtcctcctattgatgcaaagttgaaactgatgaaagaaatagctgaggaacatattcctgtagtgcactttgaatagaagccctgtttcaattccgtcccaaaaatctgattcttgttgctctttggacaggctggtcagttgcatcttgtgaaaccatatatggttgcagttcagagtaacaatgtatctgccgtgaatgaagccttgaatgagctttatgtcgaagaggaggactacgagagactccgtgaatcagttgacatgcatgacaactttgaccagattggtcttgcccagaaggtaaaataaaaataaaatagccagacagtcgtgcaattcctgtcgctaccgcttttaatttaatagcatgtgttaatttattgagcagcttgagaagcatgaattgctggagatgaggaggatcgccgcctacatttacaagaaggctggcaggtggaagcagtcgattgctctatcgaagaaagacaacatgtacaaggactgcatggagacatgctcacaatctggcgaccgtgaactgtcagaggacttgctcgtgtatttcattgagcaggtttggttcgaacccattgtattggctgatgatatgggagtagctaattcaatactatatacagcaaaaagcttatgcttgggcattgcattctgattagtaaacacatccaatcatatgtaatgtacggtaagaaagaatgttttgcttcttgcctcttcatttgctacgacctgatccggccagatgtggctcttgagcttgcatggatgaacaacatggcggaactttgccttccc

SEQ ID NO: 2354 - DNA, 730 bp, Zea mays
tcgccggacggtggcgccgccgtcgtcttccagaagacaacctgcgaggtgctccgatcatcgcagaagggatgctaagctgttcgccgctagccgtcgctgtgatttttttttgtttagttgctcttgctttgtttatttttttccctttcttcgtgaaagtttggagtgatcatcatgcgtaagcgtaatgcgatgtttggggttgtgcttggcttgtttgagacccggaaatcaaattaaatttcaaacgaatttcaccatatgcatacaagtactgtattctatggccatatatatgaaaattattttttacttattctgtgaccatttaatattattatgtaaacacacactctgcaaaaagaagcacacaaaggcgccagcaagagaatgcttggtacacatctcttcattgcagcgaagtggaattcaatcccttgcttcaaactggagagtgccgcttttatctctttcttgccctctcctcttcgctccgctgtccaacgtacacgaaggacaagggagtcagggcatgagtacagcgttggtaatggtttacaatccaaatgcttgttcacaattttgttagtccaaaattatttctaattcaaaaataaataaaataaggctcgattcttaaattttaaagctagtttaggagctacaaaaccgaataggattggagggactaaaatatctttcttattcataattaaataagaaataa

SEQ ID NO: 2355 - DNA, 774 bp, Zea mays
tcgtcgaacacgtcgaagcactcggcgaggcgcgcctccgactgcctggcgcccatcttgcgcgccgccacggccaggaacgccgcgaggtcgatgtcgccggcgcccgccgcgatgcccgcgtcctccaggaagcgccgcgcctccgcctcgtccacgttctggcccagggagcgcagcgccgtcacgagctcgcccgtggcgatgcgacctgcaagcccaccggccgggagcaacaaagaagcacgcacgcacatatgagttgagtgaggctcggagctaggtgcgcgcgcggtggataggagttcgatgggaattgggatggcgacttgccgtcctcgtcggcgtcgaacaggtcgaagatttccttgcactcgtccacctgctccggcgtcagcttctccgccatgttgctcacccgagccaacctcagccgcttcctcttgctatggatgctctcgatgaacgaagtgcagagctttcttttattctgattcgatttcgccaggtcaaaagggtaaacagcaaattccgatctggcaggccactggctaccttttccttgtccttggtcatcagaaaacaacgagacaatgacctataacatgggtgcagcgcacttaatcaatttagtgtcgtcggccagttttgttaaaagagacgtctcgtccacctcttgagcgatccaatctgggtgcaaagacaggccatgcccgccatgatcctcacctaaccatcgcaattagcaatgatcaaaccagatccaacagctgg

SEQ ID NO: 2356 - DNA, 798 bp, Zea mays
gggcgctgcgcggcatggaatgatttgccaaattgaaatcacgacaacatgcctacgatgcaaactgggcattcgtggctgacgagccccttactgaccgggatcggagttaataatgatgcaatcgagaacgggtcctcagcattgctgtgatcttccagtttctcatccttgcacgtgcacgctaattttattcatggacggatcatgggtaggggaaaaaggcaattaggtatggccgtatggtggccccattgcagcagattctcagcattgctgtgatctttgagtttaccatccttgcacgtgcatgctaattattcatgaacgaatatgacaggggaatggtgcctgccaggcaattattcatgaacgaatatgctaattctcagcataagcaggaaaaaacgccaagtaggtatggtgcctgccaggctgttgaaccaagttggcgttcgcatatgacaggggagaacaagcagcgttaagcttttgatgcagctcctgtgtcctactgcaaatagaccaagggcatgtttgtttatgataataatatgtccagattgtataatttaacttatcttaaattaagtgttagtttaaaattagctagactatataacatgtgtagattataatcccaaacaaacacccctactactactatcgtcgtttcccacttgtgttatgtaggaaaacacgggcactatgtactagcatatgaatatctattgtttttaaccaagataacataccagttgaaatttatacattggaaccattagaggtgcaacacaa

SEQ ID NO: 2357 - DNA, 767 bp, Zea mays
aggatgctgggaattgaataccagtcaaagcgtgggtacattgaattggattactttggccgcactgtcgggatcaaaatcatgccagtgggagttcatatgggtcaattggagttgggtctgcgcttgcctgatagggaatggaggctttctgagcttcaacgccagtttcaggggaaaactgtcttgcttggggtggatgatatggatatctttaaggggatcaatttgaagcttctcgcctttgagaacatgttgaggacacatcccaagtggcaggggagagcagtgttagtgcagattgctaacccagcccgtggaaggggtaaagatctggaagccatccaggctgagattgaggagagctgccagcggatcaatggagactttggccagtcagggtatagccctgttgttttcatcggccgtgatgtgtcaagtgttgagaagatcgcctattatacgatagcggaatgtgtggtggtcactgctgtgagggatgggatgaacttgacaccgtatgaatacgttgtctgtaggcagggtgcaccaggatctcagtcggtatcagaggtgagtgggccaaagaagagcatgctggttgtgtcagagtttattggctgctcaccgtcactgagcggtgctattagggttaacccatggaatatagaggcaacccggggaggcgatgaatgaggccatttcaatgccagaacaggaaaaacagttgaggcatgagaaacattaccgttatgtcaggagccatg

SEQ ID NO: 2358 - DNA, 781 bp, Zea mays
aagctacagcaccgcggggaggagggggccgggatcgtcgccgtgggcggggacggcaagctcaagtccgtgacagggctggggctcgtggccgacgtgttcgcggacccgtcccggctcgcctcgctcccgggccccgccgccatcgggcacgtgcgctactccacggccggcgccgccgcgtcgctgcgcaacgtgcagccgttcctggccgggtaccggttcgggcaggtcgccgtggcgcataacggaaacctcgtcaactaccaagctctgcggaacaaactcgaggccaggggatccatcttcaacacgtcctcggatacggaggtcattctccacctgattgcgacgtcgctatcgcggcccctcctcgcccgggtctgcgacgcctgcgagcgccttgcgggggcctactcgctcctgttcctcacggccgacaagctcttcgccgtgcgcgacccacacgggttccgcccgctggtgatgggccgccgccggaacggcgccgtcgtcttcgcgtcggagacgtgcgcgctggacctcatcgacgccacctacgagcgcgaggtggagcctggggaggtggtcgtggtcgaccgccgcgacatgtcggtggcccttggcctgcctcgtaccgcaccgcccccgccgtgcctgcgtgttcgagcacatctacttctcgctgcccaactcggtggtgttctcgcacgccgttcaagagcgccgtacccgcttcgggcaagcgctggccgaagaagtccctgccccgggccgccga

SEQ ID NO: 2359 - DNA, 863 bp, Zea mays
gaatgatgaaagaaactagtagcaactgggagaaataagcctatagtggatgcaataggtgttattctcagtcttatctaaacttcatcaaatagttccaaaatgtaagataatcataaacaggattacaaaaaaatcatgctgacatggtgcaaaaaaaagttgaacaggcacaacttcagaacattgtccctctctcccaataatgagttaaaaggtataagtgttgatgctaggataattcattagaagctttaaactaaaattttgatattaccatacattcttgtagcaaatgaatacacttctagagtacaaaatagtgtgataattgatatgattggaatccagatactctacctccatggcagcaacattacacaacaatagggtgacatgaagctggtgttgcttttgaacaactggaaggctggcagctgcaacaaacaaagtaaataataaacaacacttgagggacaacagcaatacactattgaaactaaaaaggggatgctaaaataccacaccagggtcgagtcttagacctatgctttggcgtagcagcgacatcgtagcccatttgagaatgaccaagacattaccggggtcgaggcttagaacaatggtttgtcatgggacaaatcaggagattttttaacccagcctaaatttttttacacggggagtcaaactaaaaacctaaggagtgctacttagaccagctaatcaactagctagagatcctttcacgctgtaaagattactaggtaagacaaaactgaaagtgccttctaccctagtaaataaaaaggtagatacaggatactccaaaggaacactttttatgatatcattgcatatac

SEQ ID NO: 2360 - DNA, 819 bp, Zea mays
aggtgtgattatacatggccactctattgctttaagtagcttacataaaagagattaggacttaggagggtaactagagatacgcaaccaaacagtacgaagtgcttaactgactggacccaattagaggaaaagatagtttggttgagtagattacaaatatgtatatggttgcacaatcaaccatggatgtttatgagataatccaaattttctttggcacgtatcggcaacaattatggagcattatagttgagcttgcagatatatatgcatttcaacatttctgtcaacatctgtgcaagttttttttttgtagtgtggctcatggtttataactcatttcagtcaacatctgtgcatttcagcattttagtcaacgttgaaccaaacagcttctaattaactcattgggttgtctaaataatttgaggatggtccgtactattgattaatatatttgattttatgtacagttattacatttccatgttttctagcacttataaacgtgctcctttattgactaatttaagtttcttcttcaattggtaccaaattccatctccagtactcctagtctcttgttgttcttttaagactgataacttgattcaggatgtatgctttgcaagttctgcaatttaataatgtacttactgattgatgtatcacctgacaaccgaactccttttataacttggatatataatgtgtcagctgatcttttggtagtgacactacttcaatcgacatttttctatgttccgcccttgtactcatgtctatttttccttcatttcattagaaaaaatttta

SEQ ID NO: 2361 - DNA, 769 bp, Zea mays
tcacttcgttccgattttgttagtcgacctgcagccctgccgatccagtctctgttccccttcttgtatttcatggtgagtaataagattctctctctctctcttgtttttttctgtcgaaaaatgggaatcgctacaagtagcatccgtattttccattttttcccgatacgattctctctctctctctccgtgtatgtgtagaactagtatagttaagatgctactattacagtttacagtcgatcctgccagtatttgagtagctggatctgaatactaaattgggccagggtagttttttaggcagtaaattccagaatcgacatggacctgagagctggagccctacgtggcatgctcagtacgacttagaatgtaagcatgcagtgtcacaattaaacagtttaactggacaatgattacaaaagagggctaacctcctgtgcagagtacccccaccccccaataagaaaacagctgctggccatctctccagcagcttactcattacatctcatattttaaacttcactatatgaacagtgtgtgtaaaatagtattttgtatgtccatatgctcaatatgctggctataaccaaagagaactcggaccaatttagtgtgggtgtactgtgtgcatacacacctgccacggcaccctttaggctttgtttgggtacagagggattgaagtgaattgaagtgtattgaaagggattgaaaaaaattagttcatattacacttcaatacaccacataccacctc

SEQ ID NO: 2362 - DNA, 775 bp, Zea mays
aacatgtacgccacggcaacaaccaatcattaagctgtcgccgtcgcgtgacaccgcaaccgatgaacagtaatccgccagctcgtcgacggaagaaaatgtcagtgtcagatgaccggcggcgctgaattttcgtaaggaaaagaaacgaatcgtccgtgacagaatctgacatcgcatcagcagctaaaagcaacagacattggaggcgtagcaaaagaattacaccacttttatacaatgcagaggaatagaggatgcagcatggcacgtctattattggaggaggattacacaggaaggaagcggacggacggcatggaatggaagtggtgggaagcgtcgaagccgaagcaagcaacaatacttttttttgggctgttgttgtgttctagctaaaatgctatgcaggactagcggtagagtagtagtacaagcaaacagaacggggaagggaaaatagttgcgcaaccgctgggccctgcgatgcaacggccagcgccgtacgcggagcaaaccgacacgacacggccacggggtgcctcagggcttccagacgatggtggtctcggcgatcatggaggtgaccacgtagggatccatgttggacgccggccggcggtcctcgaagtagcccttgccgttctgctccgtctcgcgacccacgcgcaccgacgcgccacggttggcgactccctgcaacggcacaagcaacaacagttggcaggcacaccgggtttcggcgatcctccacggtacagcagttgcacaattt

SEQ ID NO: 2363 - DNA, 782 bp, Zea mays
ggagcagatgatccgatcagaagaatttccagctcctacagtacgtcctgctctgggagaaattcttggtccaaggcctcgtgatggattcgcttgctctccgcttctctcgctcctgtgctaagcagccaagagctatcgcgagtgacacctcaaccgatcaagagtgataggtccgtcgaccgtgatttttcccggggggaaagacgacagatcttccgttcataatctgacctaaaacaggctaataatagtttattcatccaatcgggcgacgatgacaataatgctgccgcccactggcactgacgaacgattccctccatatcgcaacaccaagcaaggaaagccacagacatggtagggcgtaggaaagcgaccccctcatacaatgcaagcatacgtactgaaaggtaccacaagtgtggtacggccattattggatgacataacattaacgccacacgtcttgtttttttttcttcttctttctgtgttctgttttggcacaccacgacgacctgacccccggatgatctagctagatgataataatgataataataagcaaacggaacagaaggaacaatggctttgcaatcgcttcggggaccctgcaacgcaacgcaacgcgacggaacggccgccttagccctcagggcttccagatgatggtggtctcggcgatcatggaggtgaccacgtaagggtccatgttggacgccgggcggcggtccctgaaagtagcccttgccgttctgcttcgtcttcccgcccacgcg

SEQ ID NO: 2364 - DNA, 796 bp, Zea mays
ggaacatcgaaatggtctgctctgcgtcgcgtggtccgcaagagcaaacagtggacagccttttcgccggccaccagcgccccgttgccttgccactggctgcgcactgagcagtaacccgcagcgatttgcggcgcgcgcacgacacccgtcgatcggccaggccagctccggcgtttcagcggcggcgagccctctttcgacgatctggacagactctgtcctgcctggagtaggtgtgacatcgccgtttgcgctgccgtctgccgttattatgcttatagccgcctacaagcaggtggcaacaacgtggcacatgccgcctttttggttctggcctcgcctggctggctggcgcgtcgcagagactcgccaagctaggtggtgggccgatttgagtctttctgactgagtaagcaaaatcttgtctgcattgacttcaaaacgttctgtctctcaaaagaaaaaagacagtggcggcttgcgcgtctgcataggcctattaatattttcatggattatgattgcttcttgaatatagagccaataatttcttattcgaactaaagtcaactgtcgatataactattctacctcttaaatgtatgaccgttgggttcatatatagagaatatccatgattgaaaactatgtccgggcattagtcaacatcgacacctaacaacgcatagtatggtgtagatttaaacatatcggtgaacctagaattctatgtcgtcatcgtgtcactcctttatgcccgagttctatttcggtttcattagaatgggtcttt

SEQ ID NO: 2365 - DNA, 788 bp, Zea mays
cttgcatgcctgcagagctcagcacctcatccccgagtcctcgtcgccactcgccatgcatgccccgaagacgcgctcgaagatctttcctggtacacgccgcagttcttggcagcttttaataggagcaaagccaccttggctctcggcttagactagacgtggcatctgctcgcaccgggtggcttcggatgccggaggtgaggtcggcggcggcgcgcaagctatgctatgctctcggggcgagtctcggttcttggtcgcatgggaggtcagtctctccttcctgtcgagaggggagcttggccgggggagggagggagggagggaggtcagcattggcgggtcggggacagggaaactggaaaagaaaaaagagcgagcgagcggctagggccaccagggggattaacgggtgaaggctcctgatttggtggtggccattgatccgacggccaagaacagcccgagccttcgacgcaacagatttcgattgcacacaagagatttcctgaataaattatttaatgcccaaattgccaactaggcgtctgtttccacaaaattccaaaaaaaaccaaattaatgctacgcatggtaaatgctaacagaaaatagaagatggtgctagcctgtgcatgacgcagagacatagccatgggtgccccgatatcagtatatcaattggctagattctcccaagtcgtaagcattggaagacttttctcctgtatctcgatatgcatccggggggactggtggctaaagttatgatggatctggttgca

SEQ ID NO: 2366 - DNA, 755 bp, Zea mays
tgctagccaagtgagcgtgccactacaggacagcaaacaacgacgacagcaagcaagtaagcaatgagcaagttttatgtctataattaaggatcctgatccccgatgttaggagaaattagaaaaatctacttaggcgaacaagggtcttaacttggctaccttgtaatgtttatgttgtattcgtggtgcagaaaagtattgttctggatattatcttgaaacttttgctcaaccaaccttttgagaagattccctatgcagcttctgaatatcatatggttctttccttagcatcgaaagataaatttttcctaatgtagcattggattcattcttggtttattatataggactgtcgtcgaatgcaacctgtgacaccatcaactataaggagaaaagaccatccagtttacccttgttttatgtgtagcatcaacctgttaatattgaaatttcgttcctcaccccacgtggattgaatatatatgggtgcctaacgtttaaatgatatatcccaaaaataaggactttaacccacaagttaattaacgaggaccaatctgagttggctaacgaggacaataattcagtccttctcttccatattctttttttattgtgatgagagcttggcaacactctactgtaactggtttcttaaactagaggataactttggttgcagatgatccgttcagcatgtgctccctattcgaagtcccctggtacacttttttttctaaaatcccaga

SEQ ID NO: 2367 - DNA, 783 bp, Zea mays
cttgcatgcctgcaggtgatggaaatgacccagttccttctgaagatctgaaccattctgagagacatcaccaaaaggcataaagttaaaatgctgcctatagcataagacctaaatgaactgaataaatcacaaagttagataataaccaggtcttgggccaaacaggaagctgtttggactcagggtatcagcgataaaagctccttgtgttgggtcaatcggcattattgtatcaccctgtgatattggagtaggagagcttaaatattgcatgtcaggtggtactgactgctggtagtaaggagccgagaagaactgctgaggggagtagagctgaccacctccactaacagcatttggtacaggtgttgcaataggagaataatatgggtcataaccatagccaccatggaacatcaatgaggggtcctcattgtatacaaccttcaagaaaaagacaagtttagaggagtgacctatggcatatttatgacagaggaaaactttttctacttactggtggacccacttccaatccttcaacactcatgtagggaggatatgtatcccatgcttgtgtagggttttcagaaccggagcctgcccatagagagggaaactatgctaaggatgcaacaagaactttcatcaatcaagatgaaagctgcgaaatctacaatatattaaagaaaacaaaataagtgggttctgtgtccaccccacaaaaactgattttacattgatatatattatatttctacacataaatcataggtaact

SEQ ID NO: 2368 - DNA, 810 bp, Zea mays
tactccttgattcattctattgcctcgccgccggtaagggattttgatctgcacactctgctgctatgaattgatcggagagccgtcaaattcaaattattattatcccgacccgaccggtttgtcgccgattcgattccattgcccttgcccccgtcccccgtgcgtgtcaattatgcgatccgagatgtattgagcttagaaccagggggtctcaaattgagttgatcaggcttcttgctccgcatggtggacgctgctgtttctggcagcgaagatctggcggaatcgcccgagcttcagcttaacgcattgcgagtccttctcggtaggttctcttggttcgtgtgcacaagtttatgcgcatcgacatcacatttaatcggttggtacggtgttgttgtcattgtcacatagaaattatcacatgtatgtacttcctgtagcaacgcaaagtccattcggtcgggcggtacatagttttcaatgcctgaacggaacgggcttcgcgtgcaattagtcataccttgactgtacgtcatgctgatggtttgtgcagatcgtgctagcgtagagggctgtggtagaatactaggatgtctgtcaatgtcatgtgagctttacattccctaagatgtggtattgttttcactgaatagactgatgcatgttaaacctgtaagatgcgcctttaccttgtcgatcagagtaagagacccaatttcatgcccacaggtcttgataaaatctccaacccctgtttaatttgcactttccccgcgaggggctttttataaattgatccaccat

SEQ ID NO: 2369 - DNA, 807 bp, Zea mays
atgatactgaatgcgacctcggacccggtgatcttagatcgactgcagtcacccgccccacgtcgtggtggagggcctcgtcccggggacgcagagctaccgcagcgtggcgcagtaccgcgaggccgtccgcgtgccgggcttcctcgtcgtcggcgtcgagtccgccgtctacttcgccaactccatgtacctggtggagcgggtcatgcgctacctccgcgacgaggaggagcgcgcgctcaagtccaaccacccctccatccgatgcgtcgtcctcgacatgggcggtgagctgcctgcctgcttcttgcgccatgggccatgccatcgatcaagtagaaaccttttagctgatcgatcttgttggtttctctcccgcagccgtcgcggcgatcgacacgagcggtctagacgcgctgtccgagctcaagaaagtcctggacaaaagaaacatcgaggtacagctgccgccgctggccgtggtgttgctgcaactcctgttcattcgtaacatgcatgcatgagctttggtgaattttaatttgcagctggtgcttgccaacccggtggggtcggtggcggagaggatgttcaactcggcggtgggcgagagcttcgggtcgggccgcctcttcttcagcgtagcggaggccgtcgcggagggggcgtgcaaagcggcgcagccctgacgacgacgacaggctgatccctgaggtgccgcacgggagcatgcataggaataggatgggtcagagacagactaccggtgctgctagtggtagtacggccagacgacgtacgaat

SEQ ID NO: 2370 - DNA, 759 bp, Zea mays
tggttcttggtttcttttcaaccgtagagtactccggtacttccgaaatgatggatttgaatggcaaaagaagagaaatgggaagaccattaatgaagcccatgagcgccttaaggtctgttcatttacccttttggtggactgctgtgctgtgttcatgtcttggttaaagatctctccagaagttaatagatatgaatgctgctcagaatatgcttgggagtaatcaccttgataagacaataagccattgagagatgtttggtttgcagtcgaactgaattgggtggattgtataagaaatagacaatttcataatgagatgtgtacttaatgccccttcacaatgatacaaatttcctccctttcagttctgatgttggaaatttcaggttgataatgtggatgcactgaattgctactatgctcgtggagacaaaaatccaacatttcagaggcggatatattggatgcttgatccgtaagaattatctactctcaactctcgttcttttcgtagatcaggcgatgctttcctgaacgaactgatggtgttataccagtaataatgcactgctggaatgatgatattgtacctgacattgttacgaacttattgacttattctacttttggtttgatctgttttgtttttattgaatctcattggtcagtatgtaatcaatttgcatcttgataaaggcaattcgtctttgcagggcttatgaacacattgtccttgtccactatagggatgtt

SEQ ID NO: 2371 - DNA, 755 bp, Zea mays
acttcccattcccatcaagcaagcacattctcacttttccagcatcaaggcatggagtatggcaacggatgacaccttgctggataatttccacacataccttaacatcaccaaacagcacttgccatgaactgtgagggggattgcaaaggaagtctcctacaatgataacctgcattacattttcataagtccccaaccattgtagttctcggcacaggtttgtccaaactgataagttcttttttgtttcattgggttctctggactcaggcttcaagctttcagatcaaaatacttaagtattactcctcaattctgatttctaaaagtaacttgattttagattttgccactcgtatatatatgcaggtcattataggattctaggaacccgtcccccattttttcttcttatgcccatgctaaacaatctactaatcacagttaaaggtcatttgaatcatttcaacacttcattaatttatatgcacaagcctaaaacaacttacatttggcatcagagtatgtaagtaccacatgaagatatgttttgttcaatattatgccaatagaaaagaagaaagaagaatgcatgttgcagtaatttaatcaagcctagtaactcgtactcatatcatacctttgtactttcataagataacgctgattctggagaaacctcatgtatcctgaaccattgattttcagtcaatgtcatacacgctggatgcagaattgcctcaagttgatca

SEQ ID NO: 2372 - DNA, 768 bp, Zea mays
tcttgcatgcctgcagactgtgccagtggcggccagacaataaatagggcccacaccccgtccgcgtccgcgctctccaaagtttcgtccaccatttcgctcccgcaagcaccgatttgtttactgctctctccgacgcgcggcggcggagctccctacgacgactgaaccatgtgcggcggcgcgatccttgccaaccttcgcgagccggcgccgcgccggctcacagagcgggacatctggcagcagaaaaagaagctcaagaggggcggcggcggcgggaggcgctcgttcgcggcggaggacgatgaggacttcgaggccgactttgaggtcttcgaggccgactccagtgattcagatttggagctcagggaggggactgacgacgacgtcgtcgagatcaagcccttcactgccaagaggactttctccagcggtactggctcaagctcgaggcggcttattttctatgctcgtctgtgcttttttcgcgtttgattgatgtagacgattagaatctaagtgttggctgaggaattttaggtgggttagggagtaggtgggcgtctgaggtgctacttggtggttggattggggacggggaaagaaaaggatactgtttagatattggattctggcttgttatgggattctgcaacttattggatgattttatgggggtcccattacggatgaagtctggggctaccgttttcatccctggtataaattctgaaatggtgggcggcataatctgttttgggt

SEQ ID NO: 2373 - DNA, 1382 bp, Zea mays
tgcgtgcgagccgcacgtgccactgtggacttcgcgtaggatctggatgccttcggttttggtgacgcacttaagcattggctgactgacccctttcttgtatagttggccttcaatcagtgcgaagtctcggcttcgatgtctgaggcgcttggcctcactgatgtcggttggatgatagtacccctgtaggaacagggttattggtgcccgccagtcttcggtcatgataaggttgactatgcggtggccctcgctgtcattggttatttggagcccctctgggctgcggacggctggcgtgccgatgacatggtagaatacgtcggagggcatggcctcgcctctggcgactgccttggccaatgcgtcggcctcctcattcttggctcggtccacatgctgcaaggtgaatcccttgaattgtctctcgagactgcggatggccgcgaggtactgcataagcgcggggtcctttgctgcatagtctttctcgacttggccggcgactaccttggagtctgttttgatgatgcaggtggtgactccgagggcccttagcttgcgaaggccgaggatgactgcttcgtattctgctatattgttggtgcatctgtcggattccaaagcaaagctgaggcgtgctgcatatctgtgcttgaccccgactggtgatgtgatgactgcagcggcgcctgcccccgcatggcaccatgcgtcgtcgcaatggattgtccacaccttctctgcggacgggtccggctgtgttattggcccagtccagtcgacgatgaagtctgccaggacttgtgacttgatggctgtcctgggctcgaatgtgatatggtagccggagagttcggctgcccatttggcaatccggactgatgcctccgggtttctaaacaattcgccgagtcccctatctgaagtgacccggaccttgaatgcttcaaaataatggcgcaatttgcgcgaagccataacgactgcataggcaattttttccaactccgtcatattgcatttggaagtcatgagtacttcggagacgtaataaactggacattgcttgagtcgtgccctctctggcctgctcttggaccagtgctgcgctgactgcgtgtggcgaagctgcgatgtagagcaacaggggtagcgaggggttggggctggtaaggattgccaactctgacaggtactgctttagtgatgcgaaggccgtcgcttgctctggtccccatgcgaagtcttttgcgccgtggagtgttttgaggaaaggtaggcttcactctgcggatttggaaatgaatctattgagggtggtcaatcttcctgtcagacgttggacgtctctggcttactgccgaggcgtcatgttt

SEQ ID NO: 2374 - DNA, 762 bp, Zea mays
tcagatagaatacaatgaataagggcacaaccatggttgccagacttggtaaagataatgccgcagtaatacgtctgcaaagcataagagtaaattatgataaagtgcatgtagccaaaaaaaactgaactgagaaaaaaaaagagtgaaattgcactaatttgttttcagtggtggtgtaaaagcaaataatgcatttagccaattgtgtcacaccaagctaaaataggcattagggtcacaaattcacaaatctaaagtcagatatgggacacaaatgtatggggtctatgaatgactccacacatattgagctactcgagttggatgctcagaacaacataaaagtacccgagaaagggcatacgaatgacaaaacacacattggagagttacaaccaaaagagatgggggagggggtagatagcttcaattgtattagagacaagagagattaccttccgatcacagaaatggtagctctatgtacattgacggcacaactagcctgcaaattataaggaattacgccgaaaaacagaagaatacagaaagcaaaataagaaacgaaaggatagtaatagctacctataaatataattaaataacacagttgaggaatcttttggtggaaaacatattgaaaatgaaaggatgatgctatctgaaaacaagactcccattccccctgcggtcttattctctcaacaagcgattgataaaatgacctgaatgccttgatatcatttccctgttgaaaca

SEQ ID NO: 2375 - DNA, 827 bp, Zea mays
cttgcatgcctgcagcccccttgggccctgacaggtcttgacactacacccctcctggacaagcagctcgtcctcgagctgcaacataacgggtgcccaaagaccgactctacttgacccaaaaccaaacactgtagcttagcgggccctcttgggccctgacagttatgagctaatgaaatactaaaatctgtcttacattatgtttacttgcatcataatatctatgttcactaaaacaatcttgatttgctcttgctaattttctctctatcagatccatgcactgttcattgcaagatctattttgtttcagggcttcatctatcccaattctccgttgctaatgagatcctgctctttgcctctatttttcgtttttaggttggcaacctggaattcaagagacagcttatgcatgggatgaagaatgggataattttggagatgaaggtatgctagcttcaattttgattctaccaccatgaccattattcaatccgtgtttatgctgacaatttacatattaaactatatatgctgctccgcttgcatttatccaggattctctataataaaggaactaacagttgaagtggagcctcccgttgtagcaaagagtcagcctactgaggatgttaaagcatcttcaaatggggcatcaacagaaaaagaagacaacaagggtgataaatctgctgctgctgtggagcaggttgtcaaacctgaaacagcaccttcgaatatcaaaccagagtcagcaaaaagtcctccagttagtcctgtcaagacaaagacgatggtcccgatgaacatgataaaaagca

SEQ ID NO: 2376 - DNA, 782 bp, Zea mays
acaacagcagttggagacagcagcaggacagtagttgcagtttttttactgcactttagtatctagaggacagcacctgtgtgctatagtgtgtagtgtagtgtgtagtgcagtgtagtgcagcccctagggctataaatatgtgtccacaacccttctaagagtattgcattgtgtagtgtttgagaaaataaacagaaaattgccccagctcatagtatcatcctctcgatgagagtaagagtcacgttgcttacaacagcaaccatgcatgctcctgctcatcccgaagaacctagttgtcacatcacctctcgacacctgtcgtcgctgaagcaaatatagtgtcaggcatacgacagattcatttcgtcaggcatcttgcaaaaattttggtcccacctacaggcctctaggtctatggcagacctaggagactctattagagtccagagaaggccacacccttagacgctaccaagacgccttctaaggatctcgatagaagaaattacataggctagcctattgttttgcacgtgttcctaaggccccgtgcctcggagaacctaccttggctctggctaatgtagaggcccatcataatgggggactagatctcggggccctctagaactgtaagattgtccccataatcgtcgtatgtaagaatggctaaatcccgaggcccctaaggcctcagggccctccagtctttgatgcgcttccagacttagatttcactcggttgctcgagcctttatagagcaccactagatctc

SEQ ID NO: 2377 - DNA, 827 bp, Zea mays
tggagaaagcagcaggacagtagcagttggagacaacagttgcagttttgactgcactttaccactttagtatctagaggacatcatctttgtgctgcagtgtgtagtgtagtatgtagtgcagtttagtgcagcccctaaggctataaatatgtgttccaacccttctaagggtatgacattgtgtagtatttgaggaaataaacagaaaattgtctcaactcatagtgtcatcctcttgatgagagttagagtccctctacttacaaactccccttgggcaatcttcaaatttcaggctagggttaaacaaatccccgtcccgtgggtgcgaatttcaggtcggggttaaaattccctgaatttcaggccggtgtatgcgtggggcgggggttcaagggttttctagattttatcaagttgttgttgttgttgttgttattattattattattattattattattattattattattattataccaattgtattataacatgaacaagtacaaaaagcatacaattaagattattacatctaataattgtattgcaaataatgtttatatctcctaacaatcaagtgcgcacgagagtctgtctaggcgtcaggtcatactcttcaaacaaataattgatttttcattgaatatgatcaaacttaataattatagataactcacctctttcatattttgatctgtgtcattttttgaatccataattgcgacattgctcttcacatatccatccttcttgccctctaggtctatgtctaccagtgctaatcctatttcgtgtccaatcacaatcctacaataaat

SEQ ID NO: 2378 - DNA, 796 bp, Zea mays
tttgactgctttaagaacaacaggttagtatgaaggacaacagcatctcgtttagcatctagaggacagcaggagcttttgactgtcctcctttagcatctagaggacagcaagtacaacaacatctctaatactgcaaagtagtgtgtagtgcagcccctagggctataaatatgtgtccctaaccctaacccttagatgggtatggcattgtgtagtgtttgagaaaataaacagaaaatcgacccaactcatagtgtcatcctatcgatgagagtaagagtcccgttgcttatattgtcaagattggtcaatggccatgctgttattcatacccctatcaaatccttacatcttaataatgtccttcatgttcctcaagcccaaaagaatttagtctctgttcatcgtttttcttctgacaataatgcctcatttgagtatttccttgaccactttttaattaaagatctggtcacagggaaggtactacttcaaggtagatgtgaagatgggctctatcctttgcctatgtccagtccatggtgagtagggatgaaaatgggtatccgaatggttaggacaaatttaatattttaaaatagatatgtatgaaatttgatgctaattttttcctatgttatcaagcacatcattataaataagaataaaaaaaatcatattttttaaatatttgctccttacaacaaaaaaggtgaaaaagtatccgtatccggattttatgtctatcatttgagaagatacatgataaatttgaggtttacctttatgaatc

SEQ ID NO: 2379 - DNA, 755 bp, Zea mays
agtgatcactgaggatggaggggggcggggagctgaattttcagtgccagcagcagccttccaccgaatgttaaccggatagaccagtgatctgacaccagaaccatccccagtacccagttgcagaggttcaacaacccaaagatctctagcaggaggtatgctgacagggtccagacaccaaacagaacaacggaagctgctgagatctcttagttgcaatgtatcttcatgcacactctctatccatgcaaaagggctgagcaaactctccacggtgggtacttcctaggcatgtacagggatgccaaccagttcaacttctaacaactgagcaagggtgcttccagaggaattcatcaggcgtgaccatcttttgcaagaaagtgagaaggaattagcacgcacaactgaccatcttccacacaattgttgcaccaatccatctgaaggcagcaccagcaggaaagaagtagatagctgcctaataaccagggatccttcatcaacctccagacgtgatgccaggggtgccgcaatatcattgacagacacaacttccatattaccaaaaacagtgatgacaaccgccgtagcgagatcttcctccgcccgcgacatactctggttccaaccaatgatacaagggaaagaaggtggggaagagtcctccagcacaggtgaagcagactcgtgggtcggggaagataccgggcgccactgggcatcctcatgaataatgggtaccaatgatc

SEQ ID NO: 2380 - DNA, 762 bp, Zea mays
catgcctgcagatatttcattgcaacagtattacttttatcatatacttcctctgtcccaaaataatattcgttttagtgtgttagtagattcatacaatatttgatgtatgtgttttatatgtgtcaaggttcattgtcattaatttgaatatggacaaaaaaaagagacctaaaacgaatagtatatcgtgacggagggagtataaagcatgaatcctagaagttgaagacacgattgattcaggaacaggtcaataggatatgttaaattggaaatgttgctggcaatctctgttgaaattcaattaatgtgtttctgactattttcatttttcagattgaacaagaaaagtagtgtggatccaggaaaacagcagagcattgatgatttcctgtaacttctatatcatgggagtccagagtccagagtaatgttaatgagataacttggattcctccaaatatgctgggctcaagagtaaacggccagttgatgcttttgaaatggtaacacctctacatgtaccacatgtccttttgttacatgtcttgttttactgtttatgatcgactcattgctgtgatgctgtctgcattgtaactttcagaagcatcaggacaaatggattgctactttgatagtgaccatgtttgtctagctcttagttgaatctaattttttcgtgttgcttcaccacaccacctgtgaatcctcataaaaactacacttcttaacaaatattttagcaaaactgcaccc

SEQ ID NO: 2381 - DNA, 762 bp, Zea mays
gatgcctgcaggtctgccgccatttgctcccctcttccatttctctctagccgttctgcacgcgcgcgttagtggatggtctcatcccgatcccatcccgccagatctcggccttggcgactggaaagatgtcaccgacattgcggttggtagccacctgataaagctgctcgtgatattgggagatacctgttcacacgtagcgaatggctctttctatcgattttctgttttttttttttccttcagctgtcctgataattgttttcatggtttgagttcattttcaacaatcaaattacacgcgtgtcagatttccaacgttaagctattgaaccggtaacgggcatctattgttttgtaggctgtttcctatatttttgatatccttattattataaaccagaaaaatacgaaactactatagtttttaaaaaatgttatatagtattggtttttttagttcctattgctttgttatttgttgtcatgcacgcttttaatttaatataaataatatctaaaaaactttaaatagcacaccaacgaagaaaacataactagttctatatttttctgatttgaaataaattaaccataaacatttagatatcaaactaaattccattattttagaaactagaaaactacttacaaaattgccattaggccaaaattttctcaacagttgtaggggtgcttgttattcagtttcataatgaggtaaaaactggactggcatcccaaaataaaaatttgaaa

SEQ ID NO: 2382 - DNA, 729 bp, Zea mays
tgcaagaagtccaggtgcctcaagctgtaagtttacccctttcgcccctggcctgcactgcactgccttctccattgctccgttcgagcccccccgcgcagtgtacgtgccaccgtgggatgaggtgtggctagctagagaagaaaacgagctcttcactcccacatgtcgtcgtcagtgtgcgcctaggatgtctgtaccgtttttggttcggtgctgattcggtttgctgtcgctgacgaatccagtgctgtttctaggcagatgttttaggtttaatctgattagtcttgcatgtttcaaatgtacggtacttttttctttttttctttgtttcgtcaatctcacaccgcctagtagcaaaatgccgcggttttattgagctcccagtaacccccgctcgtaactggatgtacattaatgagaagaggccggttccattgttggttccaagttgaccagtgcttctaggtttactatatcctactgcaaggctgcacttgcacggcggaagaacaggctgctgcatttcccggtgtgtccgtgatctgcctatttggatgtaatgctgtgtaccgctcgtcctgtggagggagctaagtttgctgatgagggttccacataaatgcaattatggcaataaaggtgaacactgaaccgatgttttcaagttataaagtcaggttgagttgcctgggcacttgatcactagccaaatagtcagctaca

SEQ ID NO: 2383 - DNA, 729 bp, Zea mays
aataagaacgaggaatatcttagtttcaggaacgggttgaagttgcagcttcaaatcgtagcttatcccattagcgagcaaataccaagcaagccatcatccgttaaacaaatataatggaaaaaaaacatacatgttactttttatcggaatgaaaatattcagggagacaacataacgtatcagggtaacttcaaggaatccaaaaaataccatacaaaacaaactattcatcaggaggctaccaacaattttatcacatcccctttttttgtttccgacaacactatgtagttattcctaagaatgctaggacataaaattgttcagaacagtgtcaagcaatgaaaatcaaaggtcatgcaaataacctatctagttgtcagttaaggaagaaacttgtgcaatacttaggtaccaaacagagccaaaccagaaatctgatacagaactcccactttgaaattattcagtagaacccattttccaactcctcaattgcattaccttttctcccaaatgggtttctacaatcatcgcacttacagttgatagagcatcctgcccctcccttcaaataaaaaagacatgtttacttaaccacaaactgacataatgaaaacgaaaattaacaagacaaggctgaatatggaacctggtagcagtcacagtacttcttaaggcagcctgacttcttgcaggtgcattttcttctaataagatccatag

SEQ ID NO: 2384 - DNA, 786 bp, Zea mays
gatccgtgagccagtagcagtccctgaggtcaagtgtctgcaaattgaataggccgcagaccgttcctggaagagtctttatcagagtattccgaaggttgaggtatctgaggtgtatgcaggacccaacggaatctggcaggaggtctagctcagtgtaactcaggtctagtgcacgcagacaagttaactttgagaaaagtgttgttggtacctggttcaaaggtagtttcattgcggggcataatttcaagagcctcgaattttcatagcgatagatcttgtcgaatgcaagaggctcatctttcgggcacagtatagttgtataacgaatccactcgggatggtcgactaccggtgaatcctcaggtctgagagtcagagattcgtgtttagaaacaagctgtgctagctcaagcatcaaacttggcactctaaacttttgatcagggaagctgcgggatgtttcaaagaatgatctccataggagctcatcaaagcatcgtcctgcttccatctcaaccctttcccttccgttactcttaacaagaccatcagctatccagagtctgacgagctcatccttctcaaactcaacaccaggaggaagtattgaacagaaagcaaagcactgtttgagatgatatgacaagtgctggtaacttatctgcaaacttggtaatatgctgtttgtgttttcgccatctccgagaatctgcatttcacctagtatgttttcccactgttctttgtctccatgagtgtcggacagtagtaacccaagag

SEQ ID NO: 2385 - DNA, 799 bp, Zea mays
tgcatgcctgcagttcggcgctcaaataagaagcagcatcagcaagaaggctatcattggagcccttgaaaactgaaacaagtgcttcaactcgcatcaaagctgacactgatattgacaggatcattccctgggccaagtattgtctgcatgagaaggctaggccatataataaacgaatcagacgtagggagctctcatgcttcagcaagtccatggcagtgcttaatttaggaagatttgtcaacaagcccactgtagcctctcgaggtgctgccttggataacaacactacacagtctgacgctaaattacttatctgtggatctgaattgccaactagctcaagaaaagtacccatgttgccaccaaagtcacatatatctgtgacacaagtttgttgatcaacagcaatactcatgctgaaggcactgtcaacaagaagtgctgggttttcggagagggcgacacacttctgttgctgccagtgccacgaataatgaaagctctgcaaaactccagggttggttcaagaaaatcatccatgtcttttgcagcgacaaactcaagtaggttccctatccttctaacaacttgaagctgagaaagaatatgggtgttcatctcaggtgcagatgccagggcaaagcaaagcttgacattgcttacatttgcatttgacagatctcctagcaaaaaatcaaagcattgggatactgttgctttgtgtagaatatcagagacttttatataaccatgttccattagcattactagcagtttttgaacaaatatgggt

SEQ ID NO: 2386 - DNA, 1228 bp, Zea mays
actgctcacgtacattcgaaatttcgaagtgcattgatgtagaagaaatgtgtttgtattctagacgtgctcttgactcatgtgtaagtgtaaagtttttggtgttatgcagaactcttgtttgttacagaggcttaaaactaattatgctgtacaagctaggttgtcatcttagccaagaactaattctgtagtattttctttgcagtgttcatgattaatatacctataggttggtataatatgcaaaggtgtcaattaatattttgctcttgcaatgctaacctgatttctttgaatgcaatgattcttggttttgtgaggtcatttattatcagctgtttaacggcatattgatggagtgatctatacctccgcacatgctagtttcctatgaaacaactgtataagtatttaccaactgtagttttagtacatgtgcatttgaagctctttccattaatttctgatgtgccaatccttgatttaaactgtacaggttcctagtgctgtaattgcactggtgtcatctatcttgcgaaagggcgaagatgatctagatcagctatatgccttacggacaattgataatatatgtagccaaggaactgaatggacatcccgttttgcatctcaggatgtgattggacatctgtgctacatctataaagcaactggaaagcaggagagtacaaggctcattgcaggatcttgtttggcccgcctctcccgcttcagtccatcatgcattcatttaattctggaaaagatatcattcagggatattgcatccacacttatcaagggaaatggacgtgaacagcagattaatctcaatattctcaattcggcattagttaacagtcacactgtgacaagcattaaccggtatattctttcttttcagaataccaacattgggcccttgggctcatttttttgtatgaacagggaaacttatgttttgggtgggaagagcttttggtttgtgctttgctttgaaggaataaccaaagagggttcctcaattttttgcaaggccaaataataacaattgtgttaaatttgaaaaaaaaagagggttcttttataatgtccaaaacattttgcatgggggtttttttggccgggttctttgaaagctccccgaatcaaagaatatttgggaaaaccccggcccttctttttattgggggattttcaaaaacacattattttccctattttt

SEQ ID NO: 2387 - DNA, 1111 bp, Zea mays
agctgctgctgctgtggcggcggcgtgtcccgctgcctctgctccctgaacagcttcaggagcttctgggccttctccctgcccctccctgtcccggccgccgagatggagacgagggatgggaccaccccttcctggagcaccggcgcgatgcacttgtcgtcggcgccgcacatcaccaggaggcatgacaccgcctgctcctgctccgtcgactcgcccgtgtccagcagcatcgccagcgtgctgaccaagccaggggtggacatgatctccttccggccagcttgggtggccgcgaggctgatgagcaccgccagagccttctctgtccacccaagcccctcctccgaccctggagactccgtgacgaggcagtggagagcgtccacgatgcccgcggctagaagcgccggcacgctggcctggtggctcgagaggttgtacagcgtgtacagggcgtcgtgcttgctggagctgccgtttgtgtcgctggcgtcttggatatacagacagtcgactaggaatggcaccgcctggcttgaaccgatggcggcctttgcgtcaggaaggcaggaaaggttaaggtagagtgctgtggcaggaccagataggcgtggattcgatatcatctgctcaagtagaccggctactccggcagataacaggagtcccttgtttctgaaataaaatagggttttgataagcgaaaatgctaggcaaaaataattcattaagtttaagttataattaccatttcaaactagcagcaatcaacgagcaccatgcagctaggaaacaatacctgttattgttgactgcgagattgaaaagagccattgcaccgacttcctgtgccttctcatttccatcatccacagcattcctcaagaactcaaccagtgcctcggcaaagccatttgagcctagctggatccttgcttcctcgtcgtctttcagaagataccttatctgctccaccagcctgcactgcttgtccatgttacttctttcatgaagcaagagcagcaggctcccatagccttcgttcagatcgaaatcgttacaagaaccgtcatccagcgttccagatacgcttgttgctggctcc

SEQ ID NO: 2388 - DNA, 757 bp, Zea mays
ctctatttgaaggctcaaatttggctaggttctgtttatataatagggaacattgctgcctcattcactctggcaaattttgttggagttattcataatgcccttattctgttttcttcttttccctgagaccaacatgaaagaaaggaaattagtgcaagcttaattcactcagctgagaccaacgcctggattggcagatccatattttgtaaatttcttgagtcaatgtctgggagtgggagcaacctgtatgcatcgtcatcattaacttcaagtatcatgcttccacgcattgctgatactgatactgagtgcacaattgtttgatcacaaggagagagctgaacaggctgccaacctgagttattatataaagattcttttagggttatttactctgataaaaagttagtaagattctctgtttaaatctttatgtgattattaaactgacccaagcgaatccatgttaaatatttctacataacccacattttagttttgatatacatcctagtgaatccaaacattacatttagattttagtagttgacaatgaatttctttggtcatgtgatgctctgcttgaggacacctaatctcacatttttctcgtctttgtttactgtccatcaaaatcctgttggttggtggtgataatcgcaaacatttttttagaaagaaacaaaattcttagactctatgactcctgtaagaccaacaataattacattatgtttgacttatgcagttt

SEQ ID NO: 2389 - DNA, 757 bp, Zea mays
aggtaaaactttggttcgtgagtacagtattcaaaactcaaaaaaaaatactacggtttaattttgaggatactgtggtgttaaaaactgtagtttacaaaatccaaacagacacctcatagcttacaatagctcgattttctccaacaccgtcgtatcagagttatttaaagacacctcatagcttacaataatagctcggttttctccaacaccgtcgtatcagagttattaaaagacgaccccttttcaaacgctctccgcactccacgcgatctcggcctcagctgttgttgacgcgtagatgcagacacgtgttttcattcactccatcggaatccaaatgtgagttcaatgccccggacccaaaaactccatccaatcgagctctgagcgcacagcgcagtccgaggttcccatcactcccacactgtccatccctcttctcctccaccaccgccgcctcgcctcaccccctcccacgcctgcagcccttcctgacgacgggggaggcagggcccgacgccgctgccagctcccgcagcttcgccacttcgcttttctccgcctccacagatcgccgacgccctcttggccctctccaccgcgtagcaatggccgccgtggatgcaccaccgagcgagaagggtacgcccgtgctgaagcggagtgcctagatcctagaggacgcgcgcgcattctgtaccggcctcgccggcgacctctggggcggcgacgtggaccccagcgccctcgg

SEQ ID NO: 2390 - DNA, 793 bp, Zea mays
gaaaggagagagattgcaataaccttactgaatgactttggtacaaatacagcttcgtgccacaagtccgacaatgaagtgagaatcaaacagaaatgtctaaagcttgtatggattggaacatggatggttaaaatatgaaatttgttgatcatgtggccatttagttgtggaatatagccatggtttgttgcctagtctacccttgccagattgttactggagaaatgatcctttctatgagagaaccaactttgaccatctcaagaaaaataaaaatacttgtctttcactctttgcccaaattaaattacgacttctttgctcaatagcaaacctgggtgagaaaccaaataagccctcagacattcagcctatagaaattcatatatgaagtacgaaacagtcttttatgctttttttttcttttaccattttggatcgataagaagggatgagatgaatgcgaacctgcaatgcacccatgccagcattcccaagagtccacatagatggagctgtagccaatgcattagctagggctttcctacaaagagtagaaatttatagtgttcatcaatggaatatagtagtaccaatgcattgttgaattttacaaaacaagaacacgggaattaaggtatcgctttcctgaaatgtagaagcattaagatataaaataaaccaatgtaataggaactagggccattgaaaataagaaattggcacccaatttcgttttttggctacatggtcattgtacatacagtatttaaacattagcttttatgtt

SEQ ID NO: 2391 - DNA, 827 bp, Zea mays
atgttcttgacacttccaagaaatctagaggtgcctatgaagaagctaaaggccctggctctgttaaggaggagaagacatcctctatttacaagaagaagcctctggtggcacaagacagtcaggagcaagctcaaactatcccagctggtgagaaaacagatagttctatacaaaagcatcaacaagcttcggatgccccaaatacttttgttgagaaattaaatgcttcagaaccagcaagagtaaaaactcacagtgacttcagtgctgaacagccatatagaaaagacaccactgatgaccagaaagtgataccacctctttcgactagagaactaacttcccaagtccaacctccctctaaaccatcgtatgatgagaagccaacaccaatgagtcagcaaaaatctgataagcaaagagtggaacctccaatacaaatagaagcagaaatatctggtgttcaacatgcttcaccatcatttccaagagcttccatggatgatcgtgccactatcggtgataagtttgccatgcagtcaattattgatgaaagagttggagaaccaacacaaatgcaaacatcaagtccagatgctcatcctgcttcattacctaataagagagaaactcctgaaagtcatgaaattggtgatttagggcttgccagtacacctggtggccaaatatcagaagcaaaaaaagtgggagatgacccagacacagtctatggagatgtttattatgtcaatttggcaactcaagatgtgggcaaggatgccttcaaagaaccaacggtcactgactctttaccatctagtgcc

SEQ ID NO: 2392 - DNA, 753 bp, Zea mays
cttgcatgcctgcagctgttttctttcgcgcttgtttcgggttgcaatctcacctcagccatgtggacatgtttgatcactcgtctgtgccgtgaggggcgactagaggaggcttgtaatatgcttgcaaagatggcggattctggttcttctccttcagtggtcacctacactccacttgtcaggggattgttgcgagctggtaggcatgaaaaggccagcgagcttttggggtcaatgatgtccgctagttgcagaccagacattgttttgtataatgttctgatggacagcatggtaaaggagagaagatacaatgaggcactaaatatttacatgcatattcttggcagtcagataaagccagatgcatacactttatctactttagctcaggtattgcagttttcacagaatatgggccttcttcacagcttgattttaagctccgatatctctcttgatcttgtggcctgcaattctgtgttgagtagtctgtgcaaatcaggttttccatctgaagccatccaattctacattgatagaattgacacgtgcaccagcccagacagctacactcatgttgggttactggatagtttgtgccacttaggaagggtaaaccatgcaattgatgtctaccacaatatcattgccagtgctcctgaattgaatgcctatgttcatgcagcaatcctccgtggtcttgttagacagggccagagccttgcggcctttaaggatttaagagag

SEQ ID NO: 2393 - DNA, 822 bp, Zea mays
gcttgcatgcctgcagagggacatgagtactctgaatccttggatccaatgggtgcagtacttttggcgttcgcctcaaatgcaagaaaaatggatgggataataacagaaccaatcagtacaccatatatgtgcccagccactacagctctcggggaggtcgaagtcatatagccagtcttaaggtcttgcatggcttgtgaagacacattcagagctgcaacagacaccccacaggctgcaaggctagcgatgaccgcaccaggcacggcaacccatgctgctatgacgaactgtatgaacctgccataagattgtgcaactgaccagtctgtgagtcctgttccgtacgtgttgcagaaggtgaaaacgggaagaatggtgaacagaagggccatgtggtagagtttaatgtgttggaagatccaagggatgacgactgagcatactattgcacatccgatatatccagcaaccggcacatggagcgggattctctgaccatgaaacacatcaagccttctacgatcatcatagctaaggctggggcttgtcaacatgtatttgatcttccctgaatcattttgttgcctcttcttgtataggtcaattgagctcaccgtaaggagtttaatgaagttaaacatcccttcagtgataatcattgtcacggcaatgaaaatctgccccacataggataaaagagttattaaaatcttattaccttcctatgattcattatgttcttcatatatcaaaaagctcaggcttaatgggtctcaaagaatcaatctgtaaattacttgggagctcaaaaacata

SEQ ID NO: 2394 - DNA, 788 bp, Zea mays
aagcttgcatgcctgcagcttcgatcctctcggtcaccgccgtcgccggttccaagcgtccggccgcttccgacgctgagctcccgctcctcgacctcgactcctcctcgctccaccagcagcaggtcagtagcagcgtgatcaatcctacgtacgtaccgtaccgacgacggcacgcacggcagttctgcgatgatcgatcactgacgtatatactacgcgtctgcggctgtgggctggcatggcagggtgacaaggctgggcgcaagggccaggaccaggaccaccaccagcagcagcagctggagtgcccgcgctgccgctccaccaacaccaagttctgctactacaacaactacagcacggcgcagccgcgccacttctgccgcgcgtgccgccgctactggacgcacggcggcacgctgcgcgacgtcccggttggcggggcctcgcgccgcgccggtgggggcggcaagcggcgcagggtctcctccgccgagacctcgtcgtcgtcgccgccggtgcctgcgtcgctcgcggacgcgtgcctgtccgacctcccgtccgtcttcccgttcctcagcgacggcagcttcttcccgcagctcgacctcggcgccgtcgtgcttgcaccgccggccttctcctccttgtggcggtcggtggccccggacttctacgacgggctcgcgccgtggggcgacatcgcccggccttcgacctcagctgggacaccacccggggagcgcccagccggggcggccgtcttgaggggggctccgggtttt

SEQ ID NO: 2395 - DNA, 803 bp, Zea mays
tttggacatcaatgcattaccacctgatgacgatggagatattgcaaaggataaagaatcatctcctggatcagagtggcaaagtgaactaggtcagagttcagatcacaacaatggggtcaacacaactgatgagatgtacaatggagctcattacatttcacacaatcaaaaaagcactggcaggaaagttggcattaaacctcaagaagagaaatctgaaaaggctgattgcagtggcacatgtgcttatctaaaaggaagttctgaagataatccggaaatgcctattgtggagagctcagaggagcagagcaccggtggtgctctatgggatatcttccgcagacaggattctgataaattgcaagattatcttaggaagcattgctctgaattccggcatatttactgcaatccagtcaaaaaggtccttttcttgttgcagacttgcagtcatttctttaggaaaaaaggaatcattcttatatatatatatatatattttatgatgatcactagtcatattaaatgagcaggtatttcacccaattcatgatcagtccttttacttaactgaggagcataagagaaagctcaaggaagaatatggttaggaaaatgttgtgtgataagtgtaacgaaagatgacatgttctttgtcttatcttttgacttcctgctttaggtattgaaccctggacgtttgaacagaagcttggtgaagctgttttcattcctgctggatgtccctcaccaagtgaggaaaatttgaaggtgtgggcaagctttaccttcaaagc

SEQ ID NO: 2396 - DNA, 736 bp, Zea mays
acgaaaatagtggtaggcctatataaagagtaacttactttctggacaaacaatatatattttattttgagataaaatttgaagcatagaaatttaggcattaatgttataggagtcaatttaaacctatgtactttttttctcgaatactcaggagagatgcatatcattgcataggagaaaaggccaaaatggccagaacaacacacgccacacacacacactctttttaatagttacattcacatttcacacccggatgaaactaggacatgactaacagaccaacaggagtcctgacaggctgctatcagctagtaggacttgctgagtcgctggtaccagggcacaaatcccttttgcgcctggcaacatccagaggttagcctactcctttgcaagaagtatggcccgatcttctactccggctccaacgccattgaatatcacatcatttcttgtcttccatagtgtccaggcacccaaaacaaccagagtattaactattaagccctcacctagcatctaggctcctctgattgctaacctgcgagtactcctaacttgctgccaccacatgaaaaatccacattgttggctccaggttatggcaagtagagtgtcgaacatattagattagtttggtttattagaaaagatataaattagattgattttgttaggataaggatcggttgcttaggggtcaagtaaacctctctatataaggagaaga

SEQ ID NO: 2397 - DNA, 730 bp, Zea mays
atataacagttgtgcgcaaaaaaccaacaccacatatggatgaggagaatgttatattgaattcacaattttgagtaatgatggtgcattggaaatattcacggtccttatcctaaaagagcaggttattgaattcgaatttcccattctatgattttacaagatatttggtaactagtaccagtactaagaatcaagtacataggcttagcaataagaggagcctagacactaggtgttttggtctactagacttcaccctaggtgttatgttgttatggtggtggctagtgttcagtgagtgcaagtaggtcgcccgagggctttgcccatggtcgaacaagagggaaggggttccttcttaaatcttaagtcttggttggttagattgatacatctcctctctttatatagaaaggtttacttgaaccctaagcaagcgatctttatctcttacttgacccctaagtaagtgattcttatcctaaccaaattaatctaacttatctctattctaacaaactaaactaatctaatatgtctggcaatgcacttgccataacactactccaccttccacgactgctcgtcctcggactgtgctggtggccatggttgcagatgtcgatgttctcctacagacgtgatgcttaaaagggcaccatctgatcgagttgcatgtgtacaaccaccgggatcccatggtgtagtctggtgtgtgacgagacct

SEQ ID NO: 2398 - DNA, 777 bp, Zea mays
  unsure (1)..(777): unsure at all n locations
cttgcatgcctgcagtgtcttgctccaaactaagattgcatagaacttaaacagcatttccagttgattttgcttcttgtttgttgcattatatcagtacttgtttttgaatgatttcgtactctttaacctatctctttactccctcagctgtaaatttatgttataacattatggtcaattcttatcttccaccttcccaatcagtttgccggtgaaaattcttcttttcagggcccagcttgttgatatccttaataatctcaaagaaaaaccagatgttgcaactttgttattggtaattctccttgtgatttatcttacaatgctgtgccattgatttatattttgtagcttattcgatatatcgtacagcctactttctgttatgtcttctaggtcttcaggtattcttttagtattctcattttgcttcaaggcccatttctatcagatcttccattctctgaaagtagcaaatgttcaagagaacaaacagaatttacgtacttcatgatgttgttgcattacaattgttgaagtgatagagatatctctgaaatgtttggttaagtggtctgagtagcactcctcacttcctcaggttctgggttcgactccccgtgggagcggatttcaggctgtgtgttaaaaaaatcctctccctcgtctgtcccacgccaaagcacagttctaatgcccggaccccatcacggtcgttctcacatgggctacggtgccgatgtgtatgggtggggcanggngttcgagggtttt

SEQ ID NO: 2399 - DNA, 773 bp, Zea mays
atgttcgcacaacatagcaaacacacatagtaaaatcctatcaggaagttataataaaacacaacaaatgaccaaaagcatacaagtaaaaaaaactcaacctgtggggggtaagacaacccccaggcattgtattaagaagaagaccttctcacacaggtcgagaaaacccccgaacgtctgccccacccatacatagcggcaccgtagcccatgtgaaaacgaccgcggccggggccaggccttagacctgtgctttggcgtgggatagacgagaggatttttttaaccacagactgaaattcgctctcacgggaagtcaaacccacgacctgaggagtgctactttcaccacctaaccaactcggctagagaccctttcgctaaagcatacaagttagaatgcacaagattatgaagagtgtgaaatagacagacaaacctgcatatcatcaacaacaattctatttacaccatgctccatggggcacatatcccctctcaagcaaaatccacgttcctcaaagtctctgcaacgttgacgaggcatgccaagatcaatcaaaggagatactgagcgctgaatagggccttgcattccaagtgggtggattggatccaaaatcccatgaggcattccaggcataaatccatatggaccacatggcaatgcagtgcccataaataagctaggatgtgcaggtggtccttgtgaagccatctgggatgcaaaatccatcatatcaagtgagttaaatcttggatcatggtgg

SEQ ID NO: 2400 - DNA, 766 bp, Zea mays
acactgggtttcataagcttgagctctccgtttggcttccttccatgatattacttctccacaatattcgataacaaattgaccagcctaaaatcatttttagttccaagttacttagtcacttcaataaattagatgatataagaaaaaaaaaacaccaacataattcattcaccataatattctcatcagccacaaggccccatccacgccctccagttcttacaagtcttgtcctggcatattgacatttttggaaccgctatcaaaagagattaagtgtcagcataattgctattaaactgtaacgtaaagaataagcaacatgcaagacttagggtctctttggttgggctgtggcagtgaaaaaagctgttgtgggttgtgatctgtgaaaaaagctgatgtggacagtgaagtgctaaaaagctaaaaccgtttagtgaaaaccactaaaaagctaaaaaatattccacatatatttttacagttccatccaaaagccgctaaaagcaggtctagaggtgctttcagttttacactgcgagaaagtcggcttttaaaaaaagctgctttctagatccagctttttggtttagcttttggcttttagggggcaaaaaccaaaagctaaacctaacacaccttagattctgatttctttttaggccttgttcggttagctctcaatccatgtggattgagtgggattgggtgggttaaattccaagcaggtaaagtcttttaaatattttcaattccatcc

SEQ ID NO: 2401 - DNA, 736 bp, Zea mays
aaaagaggggaacacatgttcagaagggagtggtaacacacacaatgtcaacaaagaagggagaggagagattgcatattggttaactgggctgcataccgtatccaaggaacacaagaacaagcagcaccacggctatgcaaatcaatacaactgacctgtaaggaaataggagttcaattcagaagatgtaattgcagtaaaatatcgctagccacaagaaagaatgccataattatccattttggcatgttaatatgcttcttgaatgtgcagcagtgtcatattataggaaaactaacctaatgataaaagtgatatatactccatctgtttttatccgtattagctttgtcctaaatgatatatattttaccatccatttaaaaaaatataagtagattcatgacacaagctttatatttttagatttactatgacagatactttcataatacataattcgcatgttgtgaaactataatggtttttaaaatagttggtaaatgatagtagtgtttgaatttaatggaattcattgtcagctttccgtgaaagccgtgtggtcaaggacttccaaacatgtcataagctaaacctgttctgaaaaataactaacccgcaatgtgagtatatagcacatgcatagctatcgaatgctgattctatcagtcaagaaaattagaaggaatctggtgaaggggaagttctgaaacatacatgatatggagaactt

SEQ ID NO: 2402 - DNA, 765 bp, Zea mays
  unsure (1)..(765): unsure at all n locations
tgaagttgtatccttgacacaatacaaaaatatctgctgttcaatgttcacttttgtctctttctttagtgcaggaaatccacatgatgtgttaatgttcttaatttttccagagtctgatatgacagtatgacaccaaactcgtggtatgtgtttacctgagatttaaaactaatcatggtatactaatgtctctactttattgcatccagtagggcatacaagtagaacacatcgagtttttctgtgaggttttcaagataaatttttttgaaaaaggattttaattgataaaaacaactaattgaactttctggtatgaatatttttgtatcatgtcgtataagttagagtatttggcatgcctcgagttgagatcctattttatgtgtcttttttttaattctgtccctttggatttatgtccttgacatgatattttagagaaaaagaatggggttaggtagccttgaaccaacatttgaaacattggtcgagtcatttgtcttcttggacaagaacaaagatggatatgtcagcaagagcgagatgatacaagcaataaatgagactattggaggagagcgctcttctgggcgcataggcatgaaaagattcggtgagttatctcctctgtcaccatcatccacacaccctaagggtgtgttcgtttgttccggaaccatcatctggaaccaatccaaccatgaatgcttacctaattnttataaactttgatcacctagaactattcctaacctcaat

SEQ ID NO: 2403 - DNA, 749 bp, Zea mays
agcttacttcgtcagctataatcctttgaagcacttgagcattacaatgatgtaaggttgcaaaaagcaattacagaaaggatgtgtgggggtgtgcatgagagagagagagaaattttaccatttccactcatagtatgagtttgatctccagaactagaaatgaagattccctacaattaatatccaagcaataaaattaaaagaaccatttgagacttgtcagcaaaaaaagtgtccccagtatcaaccaaataaacacacctgctgtcgagctttctggagttcttgctccaggcttgcaagttttagcttactgctctctagctgttgcacatatgcctttgaaaacaataaatattagaaagggcttttagcaaataaataaacctgaaagtgaacaaagaaaaactattggacacacttcaatctacataatccgaacttccgaagttctaaatcatacacatttgcaggctatccaagtaactgcatcaccatacagtactatctccctgatgcacgaaatcaaacttatacatactacacaatcacaaaccatgggatgacaggaattgacactgacttgggctcacatctctctacataacacattaccacccagcatctgtgttgtgtgcatttgtagaaaaaaccaatatggacttctctttttttccttgaacggacaggagagctctgtatcattatattaaaggcagagttcttatttttcacaaagttactta

SEQ ID NO: 2404 - DNA, 698 bp, Zea mays
agcaaaccatcaagcatgccaaaatacaccttcagaaacaaaaacgtcacattagctattttactggactggagaaaagcgcaaacggctgtaggacttatgtatcatcgagaactgtgagcagaataacatgtccaaaactaagatgaactataatttggaatgtacggagtattgatcttcaagcctacaaggctacaagggtccttggtcacccctcaaattaatttggagaagagagagcacaataatagtatgcctatggactgccaacggcagagcaaaccaaattggcgaacgcaaaataactccttatgcttaagcagcgtagtttaccgtcatatctcccaaggatttgcagcagattggacaagtgtagtgggtacaagtatatgcctgaaatagtaaggtcgaatgtattagaattagaacagcacttaccccatccataaatagcaaatgagaatgcaactagactatcatacctgaaaacaggccgaatgcatgaagtggccacaaggaaggcctttaactggtgcgctcgatgtaaacaaaaagtcgcagcagattggacagttcatctctagcatcttttcgcggcatttgtgttctaccatctttatgcccaaggcaaacaattgcactttcatgcaaatgaaaaaaaaatcaagtgccccaaatcccgcctccccaaaagg

SEQ ID NO: 2405 - DNA, 810 bp, Zea mays
  unsure (1)..(810): unsure at all n locations
ataacggttgcgacgtggatgagttgaactccaaacgactctgagggggtggacagagctcaaaaatggttttatgaagcttcaacatgaaacctctgatgccgaggtgctggtctcggcagcatcaaggaacctgtcgtcctcttcatcagcatttgtttcagcaaaccagtcccctttcttcacgccacggtcactgtctgcccgtgtcccagagcacactgaccctgagaacaattgctcctccaatggtattgtgctgaaaatcagtgatatactctctggtgattccttcacaccacaggaggagttaccatcagctagcgttggggtcttgccgtcagatgtgtctcctcctattagcctgtgcacttcaagcaactttggcactccagcaattgtctacaacaatcccagctttgtttctactttcaatggcccatgccaaggcagttcatcagcaaccagcaatggtggtcgttcggctccaaaggaaaagcacaagaggctagggggaatatatcggaaatcatcatcgtgccaaccgacaacgtcgtctgcctctgtcagcaggcttcgcagttacgatgtgtacgttggatttcacggccgcaaggcttcactgctgaggttcacaaactggctccgtgcagaactagagatccatggaatcagctgcttttgttttttgacaggtctagatgccgaaattctcgcagccatgatgctgtcgagaggataatgaatgcttncacatatggagttgttatccctcacaaagaagtcattcggcacccttattccattgag

SEQ ID NO: 2406 - DNA, 692 bp, Zea mays; identical to SEQ ID NO: 717

SEQ ID NO: 2407 - DNA, 810 bp, Zea mays
tgcatgcctgcagcagctgcctgcacaagtgggggtggggcactgtaaaaagagaggacttctgatgactctgactgactgactgactgactgaataagccatggaattggattgcgtccctgtacatgcaagcccccccctatttccacgaggactggacggggcaggacttcatgggagtgtcagcaccttggacggggcagacggcggctgtcttaacactcatctcatctgaagcaggtacagtacagcatgctcatcggccaggctcaggcgatcgtctggcatggcgaacttgaccggaccatggccggtgagtcgctcgctggcatgctgttgccccaccgccactccctccctccctcccaccccaaccagcggtcacgagtactaggcaaaatactttttctcctcctcctcctaaaaaaacgaaagggacgtgctgcgtgcagacggccggattactgccgctgccgcttcgtgcagtaggtttagtaggtacaggcacagtggcgcaggcaagggagacgacgacatgggcgtgcagcggcggcacctgaaggaaccagagaggatttccggggcccccgcgcggcagagacggagaaagaatgggcgtgccgcagatggccaaacaaaagctgactcctcactgactccgctgcctgctggtcgtccggtggtccgtctcttgtaatcttggatatataccaattgtaaaagtaatcatataaaccatatctatctatctcacgatttaaatctattaaatgcgattaatcgatattaaccacacaatgtaacacatg

SEQ ID NO: 2408 - DNA, 785 bp, Zea mays
cagcttgcatgcctgcagttggacctgggccgagaaatcacatgcctcaaatcacttctgtatacaataaagaacgtataccggagtgataaagggtgtgtttggtataattttttgggaagagccttttgaaaatctagattcgtgtataatctagttattacgagaaagataaaagggtcagtaatatttaggcaagcaactgattcctcctgtcaggtcgttttcatagaaacggactaccaaacatttagcggtgaaaaacaaagatgaaaagccaattctggttatcagaataatataacgatcaataagaggtgttttatttcacacaactaaaagttagtctctctcacatcaaatatttgaatattaataattaaataataattatgagtattaaatctctactacctatagctcattctcattcccagctgcctgtctttctcattcaccctccctgcaaagcccattcacatttccattcctggctatcacgtgtctttctcattttccctctcacaaagtctattctcattaccacgtgcatcccacgcctagctaaaattaaattaaaaaaacaggctccaaggggattcgaacccttgacttctcaaataaatgtgtttgtagctaccaccacaccacatgtgtgtttatgtctacatctattatagtaaaaacatataatacatctctcccgaagcccacatgctacccttgcacaatgtgtagtagtagataagtatcactgagattattaaattatatttttggattga

SEQ ID NO: 2409 - DNA, 763 bp, Zea mays
agacaagtaatcagcttagctacatccttaacgtcacagagcaaccactctttatctgtgttctgagtaaaattacctggctgcggacgaatgacgtgagggaaagcagccattttctgcacttgacttcactgatacccaaacttctcgtgcattcgacatcaacgtggcgcagagggtaacagctcgggaggcgtatgacaaggtcgattcctgtctcctcctttttgtatgtagcaacgatctcgaaagccgacctgttgacgctaaccgagaaattctcatcgccgtatacggactccttaacctgtaacaaggtaaaattagtgcaacgagcaactgcaaggctcctatgtgatctcatgagacgtacagaatgaaaccgctcagtcactaacatatgaggtcaacgaagtatagaaaaacaaaactacaatacaaaagagatacttgttcccaattgggttcttttatttgcttgtgtaacagttttaagggtcaaataataaaccttagacagatcagagctgtgcaaaacaaatttggacatgcagtgcagggccaatatcctgccaaaagaaagaccgtcttacctgagaaaactcatctagaagaagaggagggctgcaccattgtttggtgaaggactcgattgagtatgacaatgaacggtctctcaaggtagtaaaccatgtgcgcacaaaagaaagcagcagcctaatcatcatcccgtacagtgagccctgcaagtgaggccatctgg

SEQ ID NO: 2410 - DNA, 818 bp, Zea mays
tttctgctggcgcctccctgccttacggacccactcttttatctctactacttatcccgtacacttcattctcaccattaactgttctgcctttttatttccccatttccgcacaatccattcttatgttcggtcaccattcctgtttcctttctcattctttctctccccacaaagctcattctcattcccacgtacatctcacgcctagctaaaattaaattaaaaaaacaggccccaagaggattcgagaacccacgacccctcaagcaaatgtgctcatagctactactacaccacatgtgtatttatgtctataactattatagtaaaaacatatactacatctcttccgaagcccacctgctacccttgcacaatgtgtagtagtatataaatatcaccgagattattaaattatatttttggattgagggagtagtatttaaagaagagtcttgcatgcaatttcttttgtttgaataatgttttcaacttaaattcttttttttcatgtgtgacatttattatccgtaatatttttccatggatctgacttataagtcattttcataaaccaatgccaaagatgaatccatgtttcttacttggaaaccccgaacaaacaacactagcacgaggtactcgcgttggcgtcgctcatcgatgccgagaataagcttggcgactgccagttcgacctccgaaagtagtcctacgtggcccatgcgccgttgtgtacggcaagctccggcgcagccgccgcttgggacgcagtccagagcggctgcaccgcgctgtccatcgtcaaacagggg

SEQ ID NO: 2411 - DNA, 757 bp, Zea mays
acgatggccacgacgacgacaagatcgaggcggagggcacgcttattactaactcgtcaaggccatcgtgtgcgggcacagccacgatagccgccagctgccacgacgtcgtcctccacggcggcggcggcggcggcaccgtgctcccgaccataaacatctcgctgacgacgacgacgacgacgcacacgcaggcgcagcagcagcagcgaccgttcctggcggcgccgccgcctctcccgggcgacgcgttcgagatactactggcctcgtcgaggctgtgcaagaccctgctgcttagccaagctgctgcttcttcttcttcttcttcggtgctgctccacgacgacggcacgatcagcacggtgccttcgctgagatcggagtcggagcatgtggcctatggctatggcggcggccctcctcctcctgctcctgccgctgctcatcgtccccgaggacgacgaccatccgttgacaactacaagcagcaggtcagtgcggcacatcccgaacttattgcctctcgtgtcagctcctccaaccgcgcgctgctggttttcttttggttttcttcttcttcttcttctttggctacgcgtatcctacttcaggcatttactagtatattttttgtaactctcttggcaggcgcgcgcgagttagttgaagtaaaaaacagttactagtacgcgtagttgtactggtaaattttatatggacttttgtttggacaaaatatgcttagtgaaaatat

SEQ ID NO: 2412 - DNA, 756 bp, Zea mays
aatgtgatgatgtaaaaggagaagggttataccttttaaatcagttgacctgtcatctgacctgtaatgctgcaaatgatgctatgggtgataagatcgatgagcagtgtcctgtgatggaaggaaatttgtccaacaccaataaatttgttgattcaaatcctgttgtttcggaaaatgccatggagtcaaatgagtgttacatcacaatggtatggatcattttctattgatgctgaaatttcaccttttaccataggaatacaatgatgggttacctatgtaacagctaagaacaatctgtaaatgattaggcatctgttgtttatattcaagttatacatcacaaggttctgcttgcacttaaagtaaatattgacctagaaagtttgatctctaggaactttttttgtaatttcgcacttaactttgtctttaaaaaaaactgctgtataacgtcctcttcatttttccagctattttgtttatttttcttacactcttactaagttaaatttgcaggccatctctaggcatccatttctgagacgttggatattatcaaggtacaagaaattatgtgattcctgtaaacctgccgtggtttctgaggtgtcatcttgtttgaaagttttgggctctttgtcagaaccttccgatgataaaagtcacacgggcaatgagtcatcagtgctgggaaaaacttgacaacaatgtcagagaaaatatgccaccagatgaactaatttctttatt

SEQ ID NO: 2413 - DNA, 788 bp, Zea mays
  unsure (1)..(788): unsure at all n locations
ataatggtggcccttcaaaaccattgatgatgtttggctctgatggcactggaagcttgacttctccagcaaacccgctggtatttacatgccggtccaaacgttctctttcatagcgtcatttaacacattgctttgccagcaagataacaaaaactctcaccttcagggtgatgttgaacgtctgttggaagatggttccttggatgaaaatgtagaatcttttttatcgcaagatgacatggatcctcgagaaacaatgggacgctgcatggattctagtaaaggtttgttactatttcccactgatgccttgctcttcttgagtcagtcggataatagctattattatttttctcatgccttttggtttggaatatgaatattcaattttttttcttgaacacagaatatccatgatgttaaaacttgccactttgtcttttacagtgagctagcaatatactctagagcttatgtatttgttttaaaatcatgttcatcattcatcttatttttataagtcaataagtttgctaatagttttttttctgcatgactgcaactattttgaggggatggatgcaatgccaacctgttaatctctctttgtagcagggttgggttttactgaggttgcaaaagcccgtgcgagtacaaacaaagttgtttggtgccatttctcattggatgggaaacttcttgccaccggagggcatgataaaaaagtgtggatgccaagatgaaacgaatttgcctttacgcgatanagaaaattcatgctacat

SEQ ID NO: 2414 - DNA, 762 bp, Zea mays
ctgcaccgcacacggctctagtgtgtggcgttccaaaatgcccctcgacgagagccagctgctggacagggccctttttccatcccgtgctggacttccaggcccggctcggcccataatgctatgagaggttgtcactgcgttgacacgtaagctttccccctccccttccgctgacgcgacgcccacctcggcggctcggcccgcgctggtttccgtccgttcattgcggtgcggagagccggagacagaccaccgggccgtgcgggcgctcgcggctccgctcccagatcccgccgcgcgggcaagcttcgaggagtgaccatgcaggagcccacggagaccaggccagctggtgcggaggatctcgcgaacggcgcgcgagacggggagggacctccgccgcaggttgaggaggaggaagtggaggacgagccgccgcgatcggcgacggcaaagcaggaggaggcgacggcggcgctggggtcggaggggtcccgcccgttcactatgcgggagctcctcggcgagctcaaagaggatggcgagacggctgctggcggcagcagcgcgagatctgcgttcggcgatgggaacagggtcggatctgatgatgcccaggggctcgttctacaggtttgggcttcggtcgggtcattttagatctcactaccgggggctggatcacctgtgggtttgttaggcttagcccacattgccgttctttagcaaccacttttttgtcaggaatgtgttggccta

SEQ ID NO: 2415 - DNA, 758 bp, Zea mays
tgcatgcctgcagggaacaggcaccacaaggaaaccaaaacaagattcaatatttgactaaacctgttttacttgcattactcacataataataatttggtgttcaacataaacaaagtataagagacatctcactaacctgtttccagagttcttcagcttcttttgtccgacctcgcattttagcccgatcagcaatcgcaatagcccagttataatatgcctaaaataaaagaggatgtgtcaaagcaacatcaaaatatctgagacaattagaatgatcaacagtgagcactatacattagaaccatgaagccacattctgcaaggtaagttcaatacttttcatagactatttgaaaagtgtgattgtgatgttttttatttctttttttctgaaagtgacaaaagcgcttaaaaaccttctttaaatttgaattattttgatcggacataacataagaagtgagaactcacatcataaagagttggacaaagccgggtagcttcagcatactttttgcaagcctcctcaagcaatgcatctttagaggagctagaattgggatccacattgtctgcactctcctgaaataacatttcaaaagaataagatacagactcgcttaaatccaaatagcaattttgcagtgtatatgtaacgtgcatgctataaacaacagcattcaatcatggttgatcatagctacgtgttcactatatattaacacgtataaaagtccatcatagtaggaaaa

SEQ ID NO: 2416 - DNA, 720 bp, Zea mays
ccaaagaaaactcgattgagcttcaccttcccggcatcaagctcggtgagcatgaagatgtgaccgatgaagctgtgttgactacattgaaaagggcaatcagccgtttctctactctccaggcacatgatggacactggcctggggattatggtggtcctatgttccttatgccaggcttggtgcctctttcaactcttcttctatagtgatatgtttaacttgcttacttcacttggatatgcattcctacgactaaatctgtgctctgtgattaatcttgtgatatgtttaagacaaaattgtgctatcttgctttcttacatcttatgcctcatattctatatgagcacaatgttttttttttcttgcattcactgtgagtaccaatttagatgcctcatgaaataggaactagcaaattgtagcaggaatctgatttttagattacatggaagacttatgtttcatgtttcctggtttacaaaacagctactaattgtgtgtaccctttgtccagatcataacattgtatgtgactggagcactaaacactgtcttgtcattggaacaccagaaggagatccgccggtatctttataatcaccaggcaagaatcaagttctaaatttgtcaaccctacaatggctgaaggtgatctgattttatcactgcaactgtagaatgaagatggcggctggggcttgcacattgagggtc

SEQ ID NO: 2417 - DNA, 1054 bp, Zea mays
agtacgttgtacagggctaaaatgattttgtactacccgcgccatcatgatcgcccgagaggcagctttcactatttagatggttagctggcttttaagaccgtttgcagcggttcatctaaaatttatctaaaaatattgttttatactgttctatatattaagattgtactgtttataaaatagagtttgaacataagtatatatatagataaactgttagagataaactaaatggtaccgaattcgactgcttctacagtatttttgtctatgtagagtgtaaacagtcgccaaacggcctctgatttcatgatccaacgcgttgtttttcctgatgctggtttttggcagagtattccgttgatcttcttggctatggcgttcacatacatggaactgtacatccattagcgctcctagtaaactgatgagagagggaccagcggaagatcgaggcggccatgtcgttttccagacactaggcgtcgccctcgcccacccagggacccccaaaaactgcgggacaggatcattgcacccgcgaaatgaaaatttacaataaaaaaccgatagtagaaaacgaaagcgaactgacgggccgccgggccggggagcagaaagggaggccattaatactcgacacctccccgtcttcttcctcctcccccctccgccattgctccacgagtccacaagacatctcccgcgcgccagagctctagagagaaactggacaggagcgcgggcttcggactcccatctccgcgggggcacaaaagatgcaggtcctcatgactcccagcctccgcgcagcgcaatcgggtgagatttctgctgcgccacatctcccctccggttctgttttccctggttcctgattcggctgccttccgttatttatatataaataaatgtgcttcggccttcggtcctgttactcctatagatctgtcgcgcctgctggtccagagctgatcggttgctatctctgcgtctgattcgagaagcgagaagccgtctactctgttctacttcgagcaccaagagatgc

SEQ ID NO: 2418 - DNA, 816 bp, Zea mays
caaatataagcttttgacttgttagctacaaagtctaaagggatgacactaaaatatatactcaacttaccagcgagatgtttcatagggattccagcaaatgcaagagcagcacaagaagcattaattgcacatggcataagctaagcactgtcaaggaaacaaggactagcttcgattgaaaaaagaagctactcatattttgagttaaaaggtcttggagtacgcatgatgttttggcaacaaactacatttcaaggaagagccaaagatatccgacaaagattcaactctctctaattccaagcctagttgatgtgaccgattcgctcatgccttcatgcattattccctataagttaccacctaattgatcctagcaaatttatccaaaaaaccattagctaacagtcagtagactaaaatttgaagctttaatattgaatgcaggacaacaaacgcaataaacataaaagcagtcaaactatattactgctacatcatgtggaaagatacagaaccatcatcacccacaacctgcaatagcaagattaacaatggataagtgacatttagtggtatgagcacggacaacggtagccaacataagagaatgtacaatgggtgtgcttagagatgatgattagccaaaaaaaccttttggaagtggggatcctatcctagtaattattgtacctcccatcagtactataagttgttcattagttcacataagcacatcaagtctgcacccctggagatgcactgagaaagctagttattaaggttaaaataagggaactgagaagtgcattt

SEQ ID NO: 2419 - DNA, 723 bp, Zea mays
tagctagttgtcagagattacatcaggggataccaataccatcctcctcctatcttctgatcgatgatgcatggtctcagcgcaagctacatttactagcattttgctttggctacccttcattgccacacgatgacgcaatcatctggaggactgcaacggatccaggttgttatgcttcgtcatcaggtcgtagttcatggatgccagctgagagatgttctgcacatcacagccacacacacaaaaaatatatatagagagagagagaactcgtatgcaatgcaacaaggaacggattcttctgacaatattatgagaaatatacttcaccttgaacgagaagttgctgaaagagtatttcaccgataagggcgctccgaattcttccatgctgccacactcatcgccctgctcccagttaaatttcagactcgtgagatgagatgcggtgagaatcatatctatcggggatggatgatgcaggtcacgccacccacatcttcctcgtagtcactgcgcggactgctgccgcagctcatgctgctggcctcgctccggtcgtcgtagtcgctgccggccgcgccgccatgctcgccggcgccgctccaggcgtggcggcaggcgaagtagctcgtgtcgtactcgtcgtctgtggaagggatgaacgcgacctacaagacaagggaagaaactgtcactgtttagcctacagaaaaagaa

SEQ ID NO: 2420 - DNA, 811 bp, Zea mays
attacattgggttcctgcactgtatccttcattttttacttcactaggatgtgcaccctttgcagctaaatcgacaatttctccagaagtaatgtttgaggtactagggaccattttagaatatgacagcgaatgattatgctccttctcaaatttcgaaaccatccactttccagagttcatctttttcactacaatcatagctttgcaaccaactctagttatcattcttgggcgctttgtttttccttcatctgtcaacactttcttggtccgaacttcacggaagccttccttagaacacacaatctggcgagaaataattgaattatcacgccttgaacgacaatatctactaatacgtgcacgaaaaccatttagccttgcatagtttacatagaacaattttgcagcttcttccgattcaaattccatgccctcaaatggctcctcaacagggtccacctcaatagaatgtggcttctccattggatcacagtcctggtctactagtctggaatcaagttttcttggtggaactggtccatgattatggttctttatgaatttggttaccacccacttgccaggactaaactttttaattaatatcattgccttgcaaccaactctagtacctgcccgttcttgttgtttttgatcaggatggaggccatcacaagcacgggtttcatgaaatcccttttttgaacacacaattcgacgagaaataactgaattattcacgtcggggagcgagtatacctgctgatccgaatccgaaaacctgcacttcttgcatatgtgcctg

SEQ ID NO: 2421 - DNA, 772 bp, Zea mays
aaaaaaaaagacaaccttcacgactttctggtgacaatagtgactaataatggatgcagatgatgagagggagatgtttcttttgtaaaccaaaaatgtatgcataaaacaaaaaaaagaatagttcacagcaccttggtgcaacagcaagcaatttcaatggttatttctaaaaatttaaacgatgttgacaaattccaccgctaaaatgcattgcaagattcattttgtcactagtataaatgcatgaattcaatattattatggttatggaatgtctggacattagaacatttcaaacccatagtttcaatacacgagtaatgaaatgacataggttgtgaaaaagaacactgtttttacaatataataatacatagaaaaaacaataacatattttgtggttttggcttagtgtttttttcctttgtgatcaaatatacatcatactatataatcaaacaccagaagaaaaataataaagctagacatatatatagatactactagctttgatacatagcaatagtttatatatggaaaatcgaaaagggcttaagtaccctgtggacaatcaaaaatgaatgtacacaatacaagtatatacattaggaatgtgtactgctagtgcatgaaaataaaaaaaaaactcaacctgcggaagtgagacagccttggacattgtactaagaatacctcatacaagtcgagaaaacccccccgaacccctgcctcgctgaacaaccacggaccagggcccaagcactaagac

SEQ ID NO: 2422 - DNA, 801 bp, Zea mays
aagccagaaaccaagaaaacccaaagttcattagttatttattgtctagtgtactacattatctgagtatatacaaacacaaaactcaccatggtttgagcacaaaactaacaacacccagaaaaaattaagtgattactaatactaataacaaaacaccaattaattttttttcatgtatttttggaagaaataaaaagggagagtaaattttgcaaaactacagatacttcagcaaactaatcacaaaactacagatactttggcaaacttatcacaaaacaacagatttaaactggagcataaagtttgtgccaatgcaaaccttgctcaaaacaatcaggctttggaggcaaaggataattatcttctaccagcttaagaagaagctctctaggaccagaaacgaaatcttccaattcaatgccctgccacatacttttaatttaagaaacaaaattttgtaatgttaacgccatacatcagttcaccttcctagccacagaaatacactagatgggaagaaaagaattagtagtcttagatgacaagcgcacatatttagcaacagcttcctctgttcgagcttctccagtgctctgaagaccaatcaccacacatttttcttctgctaaggcttcttttgccaatctcacgacagcaggtacctttgcagacatacacatatgcctaaagaaacgctgtgaaaaaagaataaacataatgtactgttattaaactgttagccacataggccatagagttaggagtttatgaagcacataatctgctgtgtcatta

SEQ ID NO: 2423 - DNA, 809 bp, Zea mays
ttttgtttgaaaaccatgcatctctgctggctctttgcaggaggggtaggcatctcaaacatagtccacaggatggagcggcatcagtacatgggcttcgaaagcctttgcaaggtctagttagggttagggacccaacgcaaaatgcaagcaaaccaaagacgacgtacactgtacaagtggtgaacatgcacatgattgaattgaaggagagatcgatggggtcgaaattaaagatatgccaacgaatcgaattcagcgcaccgcagctgaacatacacatgcatatgattgaaatatttttttccacatgtggttaattgagtaaaaattgatttgttctggcggttcagttacgccaccaaccgcgagtgtagagaaatcgatttgcgctggcctttgtaagcggtaaacgaattcaaacaaaaaggttgtcgactacaaagtttcgtaaacttttctaagttctgcaacttttattttggcatatgttttcatccgaggtcgtttgtaaaatttgcgttttagaatttgtttatattcagatgaattttgatagcccaaatgatttgaaatgaaaaggatggataacccacaagctaagcatggctggctttgacctttgaacttgcaatggagtattctgcaatgtgaggacatgagaaataaatccgtggttttatgctcactctaggcacatcacaatatatcacatgataaacatgagtgacaggaagggcaatcggatgctcactttctgtgtgcattctagtcgaaaatgctcccaaatttgtctgtgctgcaatata

SEQ ID NO: 2424 - DNA, 771 bp, Zea mays
cttgctgtctgcagcgaatcgcactccatcaacaggaaggtcaacctttgcacctccagttggcgttagtgtgaggcctctacaagctgtggaaattcccaatgggacacctagggatagaaggtgaattgtcaagctttttgagatatttctcttgctaatgcattgtcacattgttagcatgtctcttcaaaacatatgtcgctctcattctattaatgattttctgccccatttcgtagtggggttcaggggttttctcgatatatgtgagattgtcttcttcatacgatgcttggggctgccttaccccaccggttgagttttttgtatataagtagcaacaagattgtttggattaacagttgatatttcacggtgctgtagggctgtttatcccgatcctactttcgcccagtccacacggtcacgggactcacatgacagttcaacactgacagaagaggtctctgtcgctgagcataccgctcacaccttctacattctatatttttcagatgcttttgtactgaacagttagtgaacttacacggggctttcttcagtaatagtagtacctttttccaatgaataaatctgcaaatgctgtttttcttttgcagcttgaaatgctaaaagatgagaatgtaaatcttctgggagaaggtggtcctatgtttcttacttctattctaaccaaattttattgaatcaggaaactatgaagttgtcttcgtctcatactaaacttatgtaatatactcaaaatca

SEQ ID NO: 2425 - DNA, 799 bp, Zea mays
aattgcaagaatttacttagaaaaaaaaaaacatcagttggtaaaatgtgttacgaatgggcaatccggtcactgcttttggacaggagtttagaaactaaggaaacataaacagtgttactgcaaactcaacagtgactggaattttaggaagactggtgttataggtccccacatgctaacaaaaccagcactcacttgaattcgttgcaaaataaaaggttgtcttattctgaattaccgtattggacagccaaaccccaataacgggctaaccaacacctcttcatgacaacctcttcctgtacaatagttgtgtgcttcaaatcagcacttccacaagcaactagacatttatgcttgattgaatctcgggataaaaggaaaaatgatagaggaaattaaaccatttcttctttgcttaagatcatcctgcgtgtcattgtatgtaactcttgtgtttcggattcagcttctttgagtttcttcacagcagccgatgcttcttctcttgcagactagaacagaaaccaacaatattgacaacttatagttgaactcataatgttccttactgtagggcatagactagcaccttacctgtagctgttgctgaagagtggtgagttcctcgcttttaccattcttggatataagagcttttcttatctcttgctgtttttaaatcaggaaacatatgtatcaacattatgtcctcttgtaacacctagcagatgaagaaattgcctagagtagcaattatacgaccaaaacttagattatacaaagtatcgagatt

SEQ ID NO: 2426 - DNA, 754 bp, Zea mays
aacagtataggtggtgtttggttgagcgattgtaatggtaatcggcaatgtaaataaataacagtgttacgatcggaatgaaaagttgtttggataaacctggttaacgttttccattcccttaatgctgtttggatagttctggtaatgaagcctagcagctgctagacgcacagcgcacatagcagcaaacatgtgctagcaccgatcgaagattagtagggcactagtaattcaggtatagtaggtttctgctaggttcacaggttcatatggcatacatgaatacgtatggcaaataaatgaactttttctattaagtgacggagcagatgcacatcgaggcacacaaccgcacaagaaggctatgtaggagcccgcagcaaagacggccatgccatcccctacagagagctgccacgccgtccccagctaagaccagcaacttggccggcagccagcctcaagcgggtgaatctgccagggcttgacgaagacgaagaggtcgacggtccagatgaggccgccgaggcagaagaagacgccgaagacgaggaggaggtggcaatggcatacatgaatatctcagctctcactttagaaactggactgtgttgtactggaatgtcaggggggctcaagctcaatgctcaacgagtgctctcctcccccgctgccgtcgtgcgcgcgcagcaacggggcaacccgtgcccgacaagcgcgatggtggacgtggacctcgagctgggcgacg

SEQ ID NO: 2427 - DNA, 777 bp, Zea mays
cagcctcagcagttttaagtttctctatagttcacacttcacactacaaatccggctgtgcccaaacaactctattcaacagagaagcatcgaaactagcatggagcaaaatctgaattccttaaatctccaacctaaaacacttagccgaccaaaaagcccctgcttcccaaacgattcgccaagttcgttaaagattttgggggaaaacgaggcctaaacaacgggaagtaagggaaatcaatagaaaaaacatggttttggtgagaacctgtgcctagccgcgctctggggaagattggctgagggagctgcgttttgggggagtgcaagaggagcacggtatccagggaagatgtgcgggagagagatatatattggatacagctcaagaggggaggaacgctcctccttaattgttcaaggcaacgctcctgccttcttccaaaaaaaagaggggaggatcctgacaaaattccagcaaagataggtgtgagagtttattgctgccttccttttctgcttgccttttttatctcctcaaaagagttgtgtttgtgttctatcccccgtaaaacacaatttggaaagtgtttctcaaaaattctgatgcatgcattgactctcttttttttgtcactatcctggatttctgtgtattcttatttccattgtattgataactaaaaaaatgaagccatagtttgcccaggtatatgtttgtgttgcaactctgtaggaagaagtaaaaaattgatgatattgataatactttat

SEQ ID NO: 2428 - DNA, 789 bp, Zea mays
ttgcatgcctgcagattgctcacttttacggttaaaccctaccagctctagcaatgtgaactgaaatgtatctacctctaaaaaatgataaatttccacgaacagaacaatcaaattttggcattactggaattttcaataggtacctaactacctacacgattgacatatattgcatttatttataactatttgttgaggcaactctacttaacatgtcaaatcagggattcatgcatcacatatattgcatattgaacattacatgtgcaaatagttcaaataacagcacaaaaaacgtgaaaaggtatatatgtattgggatttaagacacctttgtatattctgccatatcaaataacttagaacagtttaatgatttcctaaaagcccagtgaagtagcatgagcattacagtaactcacaatttcccaaaaaaagagacagaagtggagtatgatgaaaagaaactgaggataagaccgttcaagaaggcagtcacaggatgacaacatctgtgaatgtctattctctggtaacttttaaggcagttagcatattccagattggcattgtcacattctaggctgttttctgctaatgcatgcaatgtacacctcacaagcatttttggcacttccaacccaacaagttagtaattaattagtatcttggccttctgtatttactatttttttgaaaaaacatttgtctgtttcttaacttttggtgctggcaggagaggtacccaaaaatattgcatgggtgcccctgctcataactcttact

SEQ ID NO: 2429 - DNA, 759 bp, Zea mays
aaccaccgtgaacataaaccatattcacaattagagttgtactgattggtattagtcctttatgctcccaatattttacttttacttttgaggtattctcttgtggtcccatgtaaaatccggatggattttctcatgcgcatgaattctgtcctgctgatggtatattaccttataaatgctgttattgaatagtgtcatctggcggttatgcaggaaagaggtgagcttttggcacctgaggattctttggatatatctcgtaaagtgaaagaagtgtattgttatacttgttcagacattgtcaaggtattgcctttttattatccattggtcttcaactcatcacaactaggaaaattgtttaatgggaagtgaagtctccctaatgaagttaaacacagctagtaaaattgtttaatgggagttaaaagtccccctaatgaagttaaacatgcctgtatgtaaatactacttttgacctggttggagaatctgtttaatgttgttttatgtttgcttgtgttgcttaacaatgactgtatataccttttggtcttcagcttctcagttctcaccatgtagattaatttatacatttttttatttcacaaatatatgtggcaagtttgatataagtatcacttccagcaagaggccatacagtaggcatctatgttaaacaaataaaagattagattcttatgcatctccattacaatttcaggagttcaagaagcatgacaagaagcctgataa

SEQ ID NO: 2430 - DNA, 756 bp, Zea mays
ctgcattcttctaaggccatcagtgaggaattttcgttccttggtggcagatgggttcctccagctctaaagtggacaatgaggagcccgtgaggcgctccaaggacaggaggcggctcatgaagcagctggtgcgccgccgcccagagcttgcagctgcgcacattgcatacctgcacgccctccgcaacacaggagccactctccggcaatttgtggagctggagtctgctttgtcacagcagcctccggtaggccttgcggcgccgccctcgcctactccacagtcgctgccgcagccgcagccgcagccgcagcccccgccacctcctgaaccctcactgccaccctcgccacaccccccgccgcctctgccttttagtccagtaaccaccataagaaagatggagaagagggatggtgaattcccaccaccaccaccacctctggttttgagtccaataagattaagaaaaagggatgatgagatccatgtgggtgattttaccgatgatgacgatgacactgacagctgctcaactcctctaccaccacccctgccacccggtatagattgggaggacttggatccttacaacgttcgccccttgagtttcccatctccatttgctgacaggaacgatgaagaggtggcctcgcaggttgccatggacaatggtcctgaggtacacacagaatttgatggagaggaggatgaaagtgtgcttggcattgtggatagggtccatgtgaata

SEQ ID NO: 2431 - DNA, 793 bp, Zea mays
ttcttgcatgcctgcagtctcaaaaatgtatttctttatgtacaaccacgtaaaccaagcatatggagcctattttccacacaagaatgactctcactaatgaaaaatacctacaaaaccacaagattctctatgcagtccgcccatctaataactggggtcccgtgcttgctacgaaggcagtcctaaaggtgttatctacgcaaactcgttgaacacttgtgctcctctggcgaccttgatgaagacgtcctctaaggtcgtgtcgaccagtccccaggcatgtattgagagccggcgcttcgccttctcgaccatgtcaaaaacatgggctattttcacctcttgcttcggcagctcgaatttctgagttccagatagatggtagatcttgtttgcgctgggcgagaactgacgcactagatgttcaacctccatctcttggtctgggggtgttgtcactgtgaatatgtatgtccccccatatctagcctttagctgcattccgttcaaggaacaaagaaattaagaactggaacacatactgtagtgacttttgcgattcaagaaggtgatgtacctctttagggtttccaaggcattggaaatcgccatcaacaaagatgccaagccggtcacacaatacctctgcctcttccattgagtgtgctggcagcatcacatttaattacttgctcattcactaatcacttttcttacattcagatgcaataaataaacagagtaccaatctagaatttagatacatgagtggataggaaaggatcctttc

SEQ ID NO: 2432 - DNA, 809 bp, Zea mays
tcgacctgcagttggatttccttctgtagcttccagtcctagtgactccatgcaccgaatacaacagcctgctgttgcttcctcaaagaggaaaacaaattctgtccccaaaactcaaccgcctgtgagtgctgttgggtctccagccagtgtttcaaacatgcatgcgctgctgaatgcaagcagtccatcgattgggaccacacctatgggagaccaagcaatccttgataaatttgtgaaaattgataacatttcccatcggtatagcataatttctacatctgctccctcccttcacgaatttttgttgtcactttcctttctattcttagtttctttggaagtctgtcatgggagactttttaaggaagttttgggttgcacggtgtgaatttgatgtctaggctattttaaagctgagattcagccctattactttggatggtcacacaaaaaaatgtcaggctataatgtgcaaatgaactgtttcaattctttatcaaagttaatcaacattttaacctaaataactagtccctccagttcaaattgtaagttgttttggtttttttagatacctggttttcactgtgtatatagacatagcacacatctaggtgcatagcagaacctatgtacctagaaaagtcaaaacaacttacaatttgaaattgagggaatgcctaacaaaataaaagggtgaagagttaaaacatcttttttaggaccggagtttctaaaaaaaaccctggttggggagggaaagaccaccctcccggtattaatgcttggagttgacactcaag

SEQ ID NO: 2433 - DNA, 925 bp, Zea mays
atactacatgatgagatagttgttaagctcaaatctgttggaaagtctgacaatgcttggatggttgttcaaacacagaaccatgatgctgaggattctcttctgaaatggggggagcatcttggtattaaatctagattgcagatagcctgtaagtcaccatagaattttctgataagttatgagtgctttgagcatatgtgcaaattaacaatgtcgagttgagtttttgtgttcatcctattaattgatcattgaatgctgtctttgaattcactaaagttgagttgagtttttgcaatactaggatgcttttctcttctactgtttttttatccaacttaatttcactaaaattgatcattgaatgctgtctttgtattcactaaagttgagttgagtttttggaatactaggatgcttttctcttctactatttttttttatccaacttaatttcactaaaattgatcattgaatgctttcttcatgtaacttctttgtatcagcatacatatcatttatctgattctagaaggtttagattttcagggagctggaagaggaatgatagcttctgaaagtatatgtgtgggggatattgctcttgaaattccagagtccctcattatatctgatgaacttctttgtcaatctgaagtggtatgttctccttcgttaatctaattccctgtgcttctgaagcaccgaaatattttcagtactgactgactcaaaatgtgggtttctgatttgtctatacataaatgtttctatattgtttgcagtttcttgcattaaaagattttaataacatcacttctgagactatgttattgttgtggagcatgagagagcggtataatctaggttcaaagtttaaaccatattttgatacgctcccggcaaattttaatacaggtac

SEQ ID NO: 2434 - DNA, 1025 bp, Zea mays
  unsure (1)..(1025): unsure at all n locations
atcggatgaactagagcgggtaagtggtgatgacggtgtatggcatcaccgcaaaaaatgggtttgagcatgaagcagcaccggttgggatcatcttgctcaggcaacaacgcttcaagcatgggactgaatatggacaggattgtctccagcaccaccttgtcgctttccttcatctgaaagcacaacgagaaagatgtgatttttagatgacgaatatgtcgatcgaacgatgtggcctgtaccgtgattcatgggaccatcacagcacccttacatcagcctccgcagcgggttcgtctacctcacagcctagagcagcacgaagatgggtcagcaagggctggggcaggccatacgtggggaatcctccggatgtcgacagccatgtcccacgaaccatatgagttgtttggcttgtagtcgccgaaggctgagctgtgatgccctcgtcatccgcggatgtgtcaagatctgcatgcatgtaatcgtgcatctgttaaataaagggtgcacaaaatctgttgatgtcaaacggggaacctgctgttcatggaaactgtgcctagtccctgatcaattgaaatggctatgctggttggacagaaatcgagatagccagactgaactactgtaacaggtaaaagttacgttaggtatttcaaatctaggccaaccgacatttcattggcaagaacagagcaaaagtaacctctctacttgctgatctacatgcagccaggaatacaactgccgtaacagattacctaaaggtataacatcataagggttgtctcctcttggtaggaatccatagaacgtaagaagatgcgaccctggatgtttcccataactgagaaagcattgctcccctgcatcacagggtcgagacaagggaaacttcaacgattntgtagcttcatctactcgaccatagttcaagatatgaggggatcccttgagaaataaataggaaacagaaaacatgagagacaaacctgaagactaataaaagaaaacttcca

SEQ ID NO: 2435 - DNA, 736 bp, Zea mays
tacgctacctatcgcactcccttcttgaacctttggcaagccatcgcctctacttgtgatgttgccagtctgctctgtgcctctgtgatgctgaccgtactgtagcagtcctagtcccacaactccttcgcatgtcctggacccagtgcatgacagcaccacttgcattgccatgtggccccggtacggcatgagtttctgccttatggaccaggcttccttctctaatcagcgattttggatttttggactttcgtccttaggcctactaggcagggtgtggacctggccccacacgccagcattggcttgttatccctatctctgtagagagattccaaatcccaacttccaagtactacaattatttgtgttgacaattttgtcaaagcagcatgggggacagcttgtctaaagaaatcttcattgtgtgtccctggggcatttttttttcacgtaacttgtctgatgttgaactttgccccagtgggttatgcctgcttctctttcatgcatagattcatactctgttacatgtcttgtcttcgtggcatttgtggccttgtgggtagtgatctatgatggcagtttgatttgtggagaaaagcacaagattctgttgatgcaaatcttactgccatgcttaaattaatgatcttcttaaagtgaggattaataaaagagatcttgtgcactttgtattctggtgaacccttgacccggcaaacttttctct

SEQ ID NO: 2436 - DNA, 757 bp, Zea mays
cttgggatatgtggacatactctggtatctggtactgaattgacactattctctgtagaaggatacgagtgcataaaagtttagaaaaatgatttcaaggtgcaagagcccaggattcagtgtctgttgaacgagtgaactgttaccccaatcgtttttctgaaattcttgggatcatcggggtcctcaaaagggtacgcaccgaccagcatcacgtaaagagtcactccacaagaccaaacgtctgccatctgcaacacacattacaaaatcgggtcatgggttcaactccttatgggagcgaaacgaaatcctctccgtgccatgccaaagcacagatctaaaacccgactcggattctcatatggacaatggtgccactctgtgaggatgaggcaggggctgaggggatttctcaatctgcaatcagatcttctcttagcaaaatataaagaaaaccaacaggagtttcaaggaagtaggtgcccttacagtagcctataaataaaaatttgagctcaaatataaaggaagcatgctacagtccaacaggcaagcacagaagcacttgtattttatgttacaacataaaaaaaacctatgttatctgtaacatactattgacctcagccatttgtgcttaaacagaacattttaaagacaattttcctaagcatgtgctaacatgagttaaaagcaaatccactgctgatgaaacttatatcataatctttagttgttcacatataagagaaac

SEQ ID NO: 2437 - DNA, 798 bp, Zea mays
aggctcttggggttcatcccgtcctttatgaggttgctcttgccgtcgtcctcggggctccggagcctggcccggctcgtctcgcggccgaacacgaacctcccttcgcacaggtcgccggcggcgagctcttgtacggcgaataggatgtacttgccttccttgtggatgtcgaagtttgggtcttcaagctggactcgaacaaataaattgtcggatcacgcaaaaagtatcacagtcagactgttgactgaaacaaagcacatatcactgctcaaagactgtcaattttattgcataccagaagggtttctactgatgtttgttattatcgttcactagaaaatgtttgttattatcgttcactagaaaatggaaatgcatatcgacaatctagagaactcctttgaaaagtgaaccgatttgactgcatgactcaccttctgctgtataagtttatcgagttcttctttaagttgcaggtagcattcagacaggctggggtccatgaagaaatcaatgtagccatcgagcatcttcaagtgcccggcctgaaacataacagctagaagccataaagcacagcaacgtaaacacagaaatccatgagaaaaactatctgttagtaaaacgcgatgtaccatgcctccttttgctacagcaccgccaaacaaaatcaatatggagtctgatactccggttgaatcacggatgaagacagcattcaccttcaccttctcaccaaagacccaccatggatatgggatggtctgatattttgcattcactgaaatctga

SEQ ID NO: 2438 - DNA, 691 bp, Zea mays
gcgccagacgtcgtccgcgtccgggtcggcctccacgagtccctcctcctcctccgctcctgcgcccgtgttcctggcacggaggcggtgagcgcggcgtcgcgcgcgctggcgccggcgccgaggcggcgggggcggcgtggacggctgccgcgcgggcgacgaagcgtcgactgacgaggcgttcgccgtgtctagggcctcgtcgcggtcagagcccgagctccacatcgtcgctgcggcgacagctgccttgccttggctctccgcgtctctctccggaacgcggtggctccgcgactctctctctttgctctgcttggttggacgctgggtgggagagagaaggggtatataaatacgaggcgtttcgcgagagggggagagagaggagagggaccggtgggtgggtgccgggtggaggcgtggagcccacctgtatgaacagtctgtgggggtgggtggtctgaacggaacgggttgtgccatgggggatgcatgtgcccgtgacgtggcggcggcggtcgagtcctgtgtccagtcaccccgtcacagctgtaaaatcttgagcccctctacttcttggtttctcttgtacggcccggccgagcaagggaacaccacgcgtttgcaaatggaactagggtttgacttttgacccttgacgattcgccgtaggttttatgactat

SEQ ID NO: 2439 - DNA, 767 bp, Zea mays
agttttggtgaagataatggcatggatttctggagtgatgatgaggacaacgagaagatgtcaagatcgtggagttcgacttctgatgaatcattgttcaactgtgatgtggtatggcccaacaggaagcgtccagggcacttgtcctttgagttctttgaagtaggttcaccttatggaagggtcccgttcattgacaaggtgaatttctacgcgctttgctgtgaccttatctccactgtggtatggacctcttttcttacgtgatcattgccctttctaggtctatgaactatcccagggctttcctggattgacattactgaagagtgctgacctatcgcctgttagctggatgtcagttgcctggtatgatcaaatttatatgtatctactgcttatgttattctgaaagaacaaaaatagtcgatggattagttatattacctagtagttttgtaaacaagattatttttgtttaggcattgtctttgcgatagctctatagattgaatgaagcagttgcataccgcactaaacattgtgccttatagcagtttgatgacggatttgagtgcttcgatgatcctttgtttctaaatagtagccgttgtttctaggttcagaaatcgatttattggttgattttcttttaggtattagcattatcattcatgtctgctactttaactaggtaccctatataccacattccttaccagcgtagcgtgaaggatttatctgcatgcttcttgacttaccatact

SEQ ID NO: 2440 - DNA, 717 bp, Zea mays
aaactcaagtataaatctaccctgcgattgttagacttactttaccagcggactgtactgtgaacgttttgctaccgtcgttggtggtgtaagtaacattagtagcttcacactgcgtccatgtggttcttcggaagctgttccagagcagcggttcacatggggtgagtgatgaagaagttgaagtcatggtgctggactccaagctgcttcaaccaggagtccgctgcactgaagaggaagtccatctttctgtgatctcctgtcatggggttggtccagagggaaccatgtaccttgtgtgctgcgaggccgaatggaggcagtgacacggtgttactctttttatccatgtggccattctgcttgccgtcggcaactggatggcaacaatcattggtcatggtctcgagcccgtaatctgtgagaaacataacacaggttactgtggtttgaaaacagtaataaggtcatcactggtgcaactgcaaataactgccagaaagtcaatgtcttgacatgcaaagcgtagtcaagctcaaagaactggcttgatttggactctaatatcattatttgttttaataggaaggacagctggtgaaccctaagtccttttgcacatatcgcaatccaagcatgctttcttcaaagacatctatagaacaactattccttcatgttataacaatggtatttgtagtcttcacgaaacac

SEQ ID NO: 2441 - DNA, 755 bp, Zea mays
ttcgaccgatcgcagcgcccgcgtacatgtacatcccgtgcacgcacatactcacgcgtgagcgggtgtctctacatgggcatgcaacgacgactcagcattcagcaacggggtggatggaatgcaaggactgtggcggttgttggaaactgatctcggcaaattcaagatttattggaatgcaaggactgtggctgttttttaaactgatctcggcgaattcaatattagtcatgagattaacttaaagctaaagttttgatccatccgttagttccttccttattcggatattcccatctcatattgattatctcatattgattggatgcaattggaagagattataagggattttgacttcttggcatttaaattcatcaaatctcctttaattcacatagattgagattaaaacgagcaggtcctaaataagtactgtatttgtcttgatcgacggcaaccgtaaatcatttagcgtatgccctatacacgagaggtgactcaacctcgaaccggttgatctgaaactgaaagagcaccggggcggagggttttaaatgccatgtccagggcaatgcagcgtcatcagcaccaatacctgaagttctaatggctgcatccaacttaaacttatcactgaactaagaattcagcacttagcatgatttaaattcatggtcatggtttagactatgaataagggcctttttaaatatctgcctatttctaagtttaattttagcaggggtaag

SEQ ID NO: 2442 - DNA, 713 bp, Zea mays
aacgggtacggcaacgttgtgcagacgctcgaggaggcgcggaagatcgtcgccacgcgggcggcggcgggcacccaggcccaggccgacgacatgaacacgaagctgtcggccgccgtcacgagcgccagcgactgcgacaacgccttcgccgacttcccggcgattaggtcccccttcttgcccatgcagcggaacgtctaccgcctcgtcgacaacgttctcaacatcttcgtcgtcgtcaaccagccggagcacgcgcacaagcacgggcactagccgcgtgcgcgctggccggcctgccagttgtaagagccgggatggtgttgtatcgatctcctttctgcacttgaatatatatgtgaacaaggcttgagaaaaatctgtattgctagttgtagtgtaacttgatcaggttactgctaacacggaatttcaggtttagcttcttgttcttggtttcaaaaaaaaaatgtgtctcgccaaaagtacgacttcactttttggcagccggatgttagctgttgaaaattaactcatttttaattgctggtaacatacacctaagggactgtttgggaacaaagtttttctgctgttattatatattttgaggtggttgataactcatctaaaatctatgtatactactacgtactcaatactcatctgaaactatagtattgttaatactgcacttgttttgtagtttt

SEQ ID NO: 2443 - DNA, 730 bp, Zea mays
attggcattttctttcagtactatctgtgtacttctgcaaaaactaagcatttctggccccacagtaacaataagactatgcaagattgcctttaaattttggttgagtagtatgataatatgtgcagctgtaaaactaccataaaaacttgaaaattataaattttatttgaaaattaagatgtgcctgaactttcacctgatcaggacactaacaaaatgaggctatgtgctacttctacggatatgcatctaaatatgaattagatcaaggtgaaatggtcctaccattcgacgatcaatcattgaacagccatctgtgcaaagcagagttggaaaagtatcaaatccttcagataagcagagattcagtatcagcctcatgcacttctggcattcaggtgattctgacaaactaacatctccggtgtactttgtatatgcccgaaggagaatgatccaccaaaatccagagtcaaccggtgccaccctgccgattgcactctcaccaaaatcagcaactaaggtttcagtgtttctgtttttattacggtccaccttgaaacttgcaggcatcgcacctgctccaagcttgaatcggtctaccattttctcagagctctgaaggtgaagagttttcaagagaaagttcttcactatgtcagtctcattattcattaggaaagccaatgcactcggaacaaaatccctcacaaaaacctgccataat

SEQ ID NO: 2444 - DNA, 783 bp, Zea mays
tgcatgcctgcagtaggcatcaaggcatcgagccgagcgagtgagcgattgccgcgccaacccagccgtcctgcgcctggcgtacctgtcccggccacccggtcgccacccgctagcagtaggcatcaagccgaggcgccgagtgaccctgggaccctgcgtccctggcacctggctccctgcccctgcgtggctacatcactccacttcgaggtaggagccggccaccgaggcccaagcagatcctaggctgctactgccatccgcccaaccaccggcgtccagttccagcactctggcgtctaggtatagatcctaggaagattgcttgcttctgtaacagtaatcaaatttattatgtcttgttttttgttataccttgtcattgtcaaccatgtgttttatttgtgtgaagtgtaattatacacgcgggtatccgatacccgcctgatacccgatgggtacgggcacgagtacaaaatcctacccgcgggtataatggcgggccgatatgagtaatgcccgcgagtattgtcgcgggcagatatttaccatacccgatccaaacccgacccattgccatccctagtcagtacctttcaaaagggaaagaaaaggagagtttgagacaatgttgtctgctttagggctactttggcaaccccaaatccccttcgggattgaagaggattgaggtggaaatgaactaatttcctctccaattcctttcaatcccgaagaggaattgagttcccaaactagcctaagtacgaaaaaaatcgc

SEQ ID NO: 2445 - DNA, 777 bp, Zea mays
acctccgatccgctattaaactagaaaatagccttttttttacgccggtgagaagaaggcgacggcggagcagccatagccgcccgggctcttttggccgtttcggagcaacggacgaagaactccgagtagagtaataaactttaccacacctcgccattctctggaccccgttttctatgccggaggggcgggcgaaccgagaaccgaacaagcaagcaggccgattctataggaggtaaaatccacacgagcggggcatctccgggcgccgacgaaggacctgttgctctcgtcacgccgagggcccagattgcctgattggaaaccatagttggggttggggtgtgcggtgtgcctgcctgtcgcgacgccttgtcgtatccctgtcttcttgccgtcgatcctgattagcgactgggctggcgagagagcggaaacgacctggaaatcagaagcgagctccggtcgaatcgacccggcgccacgtgtgcgctgctcgtgggtcagttgtcacttgccggtcaagatcagtcaaagataccttgcagcgatgagctgcgtgctactgctggcgatgcgcatggaaggtgacaaggaattctcgagaacgcctgtcgactgctggatcaccagcaccaactgtaataatcggttgcgtacggtaattaagagcatcgcgggaaacatactcctgtgtcatgagtgacctcatctatctatcgatcgatcccggactcatggtctcgacgccagatttgattgaaggatgaccag

SEQ ID NO: 2446 - DNA, 774 bp, Zea mays
cttgcatgcctgcagctagtgcgtcgggcggacgggacaagcacaagcaccagccgcgcgcgcgtctcgtcagccccgatggtccctgccgggcgcgccggccgcgagtcccatcgcccgtccgacgtggcggacagcgcgggcccgcgtgctccctcccggctcgggcagtgacgcccgcgtgggccacgcgctgccgggcagggcagccgctcgacgtgcatggcgccgcgagggatgagaggccccctcaccacgccccggtccccggcccccgaccgctatatatatagatatatgcccggccctgcaacggcaacggcaacggcaacggcatcctcccttcgcaaattgcaagcaagccggcaagggacggcaccaacaagagcgcgatcgacctaccaagctagctagcgaattaaccttctcctcccatggctccgacgacggccacggcggcggcggtggggacgaaggcgacggcgctgggggtggcggcgtgcgagcgcgacgtggagaagctggagttcatcgaggacaagaccaggaacttcgacgcggagcaggtgcgcgtgctcgcggagatcctggcccgcaacaacggcgccgagtacctgcggcggcacggcatggaggggcgcacggaccgcctggcgttcaaggcgtgcgtgcccgtggtcacgtacgaggaccctccgcccggagatcgagcgcatcggcaacgggggaccgctccaacattattttctcccaccccattaccgagtttcttac

SEQ ID NO: 2447 - DNA, 768 bp, Zea mays
aagcggatggcgcggagcaggcccgcacgcgaagacggcgccgacgcggagcacctcggcgcgggccaccaggccgcacagcatctgcgagtacatggactggaaggagtcggtgcagaggatggcggcggtggggctggtgtacacgttgtaggggtcgtaggggcggtgcttgaagtggtcgctcttgtagtagctggtcagcacggggcgcgccgggagccccccgggcgtcttcgtctccgacttgatgaacaggaagtagaggcccttgcccttgtccagcccaggcacgtacctgatgaacatgcatatatatgaatgatcggccatttgtgctacatccatttgaactaaaatactgtttttttggatgaggtttgattatttgtttcaataaattggatcaaagcgatagctaatactcctgctagtagttacgttgtagagctaggcaggcaggccgcagtgtgaaataacggatcgtcacccacccttttcggctagctaggccatgcatgcatgttgtataatagggcaagtacaattaacaaactttatcccagtgtagaatacatacatacgtgtgctttatgcaagttgctttgttgcataactatagtgttggtccaaatcttgcactgaacatatatatatatttcaccgtgggaaggcagtgcattttttgtcgcctagctagcttggttcccgaaactacagcacacctcaacctctcggttacgtatgcgatggactttgagcttgctg

SEQ ID NO: 2448 - DNA, 732 bp, Zea mays
tgcacccgcgtgccgcgcttccttccgagtcccgacacccgaggcccgagcgcctgccggctgccgccaacttctgtttctgacgagtgtctgtgacctcggctcgggttcgaccttcgacggggaacggagtgaggtcagctgccgacgcaatgagcgcctccgcagccccggcccccgcagcggtatggctccacttcccgcgcttctcttctcgttccgccgcgcggacccgtcccttgatctgcctgcccgtgcttctaccgccttctcatcgaatcgactctgcactccgcctcgctgacggttccacgggcctcacaacggaggatcgccggttcccgaagcaccacctgttcggcagggccgccggatcgcttataccagctagcgcgtctatgcatgtctaactgatccatctcgctgatgcagggagggcgattcttcacgggcttcacaagactgtgcaagggcctcgccgtcgtcctcttactcgcccacattttggtccacctcttcccttcagccgccacatatctcacgctgataccagccaggtacccactgtgattcctgatccatgattcctgaaccgacagggttagccgagctacctgctcttccctatttggctgaacagcgaccagtcatgtaatctataattctgtaccgccattcacttactgtctgtgtaattggaaacttattttacgagtaaaatgtagtcctcta

SEQ ID NO: 2449 - DNA, 730 bp, Zea mays
atccagctctctagatgatcgatcttttgccgctctagtctcggcctttcctcgatctccacatacaccctagctggctagctgccagctcaacgtacgcccggcatgctagctagctgctggcctgctgctgctgctgctgctaccgtacgtacgtgcatcagtgcatgtggcacgattgttgttcttctgattgttgtcgcatggtttgcttgatcgatcgggcggggtttgtgactcggcagcgcgtccgtggagaagtaccccgacaaccagatgctgggtcgccggagagtcgtcgacggcaaggtaagaacaataatttgacttgtttgtttcctcttccttcttccacccaacaacccacttgctgctgggagaattaatttacccggtccattgcttcttcgccgccctctctagctagtcgtcgtctagaaggtaaaacaagtagcattaataatataaataacaatatcactactactactactactaatcttgtgcttacgtataatattggttttgtaaataaaactgcatgcatgcaggcgggcgagtacacctggtggacttacaagcaagtctacgacgtggtgatgaagctcgctgcatccatggacaagtccgggatcaaacaggtacgtactgcacgcaatagtcacaggcattgcttctcatcttcgatgatgatctgcaccagctggcgcgtaataaacacacacacaca

SEQ ID NO: 2450 - DNA, 722 bp, Zea mays
aatttggcatggacctgttacctaccatgacacaggtcagtcttgtcttattaatgttctctttgatgttgttaatggtaatgctgatgaggtattacgggacattgttgctatcatgttggtgtgatacttaaggacttcaataccttgaacaggtgtatggctctagtgtaagtggaccaatacggcacaggtgcttatctgtcattgggaaattaatgtactatagctcagctgagatgatccagtctctccttagcacaacaaacatttccaggtgcttaacacaatatatttcatcgagttatctcatgttattagaaactatcttatcacatgaattccaaatatttgtttcaagctattaacttctatatcaaccattgcagctttttggctggcattttagcttggaaagatccacaagtgttgatccctgctcttcagatagcagaagttttaatggaaaaacttccagagatttttttgaagatgtttgtgagggaaggcgttgttcatgctgttgagtcacttatatgcccagaattatctggtcaggtgactcctcatgtggattccattacatcttcacataataggcgcaaccgccgtagaaataatgctgtgaacactggaaataacttgcctgatggaccaaaaggttccaattctatgattgccaattcacccccaagcatggctgaagttccaaataatagtct

SEQ ID NO: 2451 - DNA, 810 bp, Zea mays
actgcccccccctccttttatagttatacaatatgtacatcatgtctatgaagaacatccctttgaaatcctttgcttacatactaaaacaaagtactgatcaaactagatacacttaaggcaaaataaatcagctgcattactgttgtatcattactatgataacatttgtcagctgagtaaacaaaaggcattgttaaaaaaacatttgcaatcaatgtgtcctagagccagaaattaaagctaaacttcccaacggagctcacttaggagggctcaattgatatattatgcaaataaaaaaaactcagccagggaaggaatgaccgccatcccggtattatatcaagatacactaaaacaatggtctcggccgagaaaatccccaaactctgccccccccctccccatcactaacgagccgacgtcaaccgtcccctctacagcggtccaaccggagggtggcgcacaggaagccggaaaattcgcccctgaggggaatcgaacccgagacttggaggtgctatactgctattcggaagcctttaaccactaggctagaggccatttcgcatatattatgcaaataacaaataagattgaatgcacgagtatctaacctctgaagtgatgtgaccatgtgatggcttcagttcaacatctttctctgaagtagcttttctgcgcgcagcatttcctagtatgtgggcctttaggttcatccaaactcaatttaagaacagcttttccttttccctttgaggggtttatgcttccctcctgataatccttcttaattgcaccactggg

SEQ ID NO: 2452 - DNA, 744 bp, Zea mays
aatcagaggcatcatcagcatatacaggagctgactttttaggcaagaactcttcatcaggatagatacttgcaaataactgtaaatgaaaataagaaaacaaatttatcaggatagatctaatggagtaaacgaagcattattatccattctaaggctgtcacaacagagcatactcttgatttatattacgaagaaaattgttataaccatttgatactgacagaagtacagatcaaccagagttgtgtacctaatttctcatgcaggtacatgtctgcatcatacaagaaacagaaaaggtgtcacagtatgtaccttttttgttgatcccagtacgtttctgtagtccaggtattcatcaggcatggggcatgacaataaagaaccagatgttccctgatagtgtaagacaggacatcaaatgctttaaatataaaaacaaacacacatatatataacctgaaaggccaatgtgtttctagtattgaaaccaacatgaatacagtccatattgatatttgataacaaatagaaatgcacctgtgtgatctcctgaacatacaaacagctccagattagtgttggcttcacatcctcagtgctttcattggtggtttcaaaatggccttctgaaccatctgaagcctgaggactgaaaagagtgtctattgctttttttatggattgctttccggctgagacatcggtacagggagtagacagatatgatataaacctgct

SEQ ID NO: 2453 - DNA, 701 bp, Zea mays
gcgtactcggaatttcagagacagagagtttagcagtgtaagttcgtttgtgcagttgggccgtcgtgatgggtagtgctataagtttgcttgggccccttgcggcctatcaatgaggcccagatgcagacaatctttttccaaggcagtggttggagcctggcagcagtgcagcacagcgggcgggtggttggcggcggatggcgatcagtcgaattccaaggctcgctcgcagtcacaccgaaccaagaagaaaaaaaaaggtggtagaaaaaaatatctcccttttagagttttgacattaacaaacgaaaagaaacaacaaaaccctaggggcctattgggctatatgaccccgacaggagatcggaatccgctttgctgtcctttgtgccagcagcagctcgtctttcatggaaaaagacagagagaaaaagataaagaaggtagtagtactcctcctgtctttctgctgccaaactcgtagcagtatttaaagtacttcccgtcttattaattacaattaaggccctgtttgggaacaaagtttttgaaaaccacagtttttgaaatactacagtatactttagtcatgacaatatcacagtttacaataccgcagttttgaaaactgaggtccagagctaagtttagaatgccttaaaacaactatagtatttgcaatatttcagttttgaaaa

SEQ ID NO: 2454 - DNA, 738 bp, Zea mays
tcttcttcggaccgcccggatgccttccgtgccctgatgatggtggcgaacatctctctcagccgtcggcgcgcccggtcgcgccgccggtgcgcggggatcgggaggtaaggaaagatgacgctcacgggctgcatcccgttgcacaggtcgtggaagagggcggcaacgtcgtcggagagattctgacgcacctccctccccagcaagcatcggcaggtgatcagtaggatcacctgctccagctcatgcttcagatcaaccgtgccgctctcaccccactttgagaagtactcctgcacggaataataattaattaaaatgtttggttagcacgtaaagtggagtggtgtctaattcatgcacatccaataataagaagcatgtgtgcatgtgcatgtgaccctcatccagttggctgtatttatagaatggccaaacctaacacatgacatggtaccgtcactagcactataaagcatgatactattagacacggcactacatgtatggttagtaagggcttgtacaaccccattcaacaggggatctcttgagtggtttctagggggttaattaaaaaaatacaagagagggactctttgcgaatagtccgtctctacacaattctttctagggggttaattaaaaaatacaagagatggactatttgcgaatagtccgtctctacacaattctctatacttattgtcctttaactatatttatgattcatgg

SEQ ID NO: 2455 - DNA, 819 bp, Zea mays
aaacgatgagccttacggacaagcacctgctcatcgccggtgccgtgctgctggtcaccaccatctccatgctcaagctcctcgtgtggtccggctccagagtccgtagccgcaggcgactgccgccgaccatccctgccatgcctatcatcgggggactgatacggttcatgcgcggtcccatctcaatgatccgggaggagtacgcgcgcctcggcagcgtcttcacccttagcaccctcggccacaggatcaccttcctgatcggccccgaggtgtcggagcacctcttcaatggccccgagtctgagatgagccagcaggaggtgtaccgtttcacggtcgcagcgttgggccgaggggttgcgtttgatgtgccctactctgtgaggcaggagcagatccggatctttgccgaggggctccgtggcaacaagctccgcggctatgtaaacctcatggtttgtgaggccgaggtgatatacttcattctcgttcagttttttcccaacacatatgttggtttttcaacgctgatagatgcttaacgtgcatggtaattaatacaactattaactatagatggctaagtggtcagcgctaaatagatagacactagctgaagcatgacgttgtccgtagtgcttcggtacggcacgacacgatccacataccgtgtgattggttccataattatccaacgcttggctggctctaacttggctcacctgtgctgtgtctccacggacagtggcggattcagtgggtggtctatatgggccacgacacaccctaagatacataagagtagttagcata

SEQ ID NO: 2456 - DNA, 858 bp, Zea mays
tcttgcatgcctgcagctgtaagcaggagcaacccctgacatgggttccatttattttgattgatgcggttcacaggcctaaagcgtcgggctttgtggtgttttctgtctttttgatgcgttaattatgtcgttgtggatttttactttttaatgtcttgagaatttttctaaaggtatgaagcagtcgtaataaataatcggtgcagctgtttcttcacttatttgggattttgctatcatttgttgtaactcgatttcttctcgtttatggtttcaatctagaactttacaattaatcgagggtttcctagtcctttttaggtccaacatagggaaacaaattatgtgttgaggcagttcagctactgtgattcacaagctgaatatggagtacaggtaaaataggatgaattcaatttgcagaatttggaatttgaaatgatgaagaaattgtgctctttgctttactggtgctaccattaggctttttttgttgggattcaactaggacttgattagtttaacaccccgtttggatcattggaattgaattccattctaataatagtaatttagtcatatatcaattatgctaattcggttttatgcaaatatatctatataatatttatgtgctaaatttttactatagaggattctctgcttagtagtattttgattgtaagcctttaacttggtccctgattgtacattctgaattccattggatggtcctttgacccattcatgaattttggttggtgccatggatggcccatttttctctggtccccaaaacctccctatttgcccccccattgtggtccccccacttagccccttatttttttggca

SEQ ID NO: 2457 - DNA, 780 bp, Zea mays
ataaccctcgcctctaaaaggcaacccctgtcagcttattgtcactgcccaccgcactgacggcttaatcacccgatttcgctgctttccgtatgattcccatgccttcagtcagtagaagtctcctcccaagttcagcataataaattacttgtcttgtcatttagcatcttggtgttctcatcttctgtcagtggattaggctggagtgttctcatcaccttgaacctcttctctatcataatcatgggctcagtgattttctgcttcatttaccggtttctcatgatccgaagcagcagctagttccttgtcatcagtaatgctcttcatcagcctttttgatcttttaggtcttgattcgggcatctgttcgttttctgtgttactactccccggatgatctcccacatcggcctctccattcttgtctatattgtcattatcatgagtattcgtatgtttcttgtgggagctctttttctgaaaataattttaaagaacactaattagcaaggcttcttaaacaaagatcaagttggatagacaaggtggcaaaagaacatatgaaaactattttgagcataattgccttgcacactacaagttaccgatacaggtcacaactctcaatagtgccaaaatccaaaaagaacagcacttttgcattgcaacataaggcagcccaatatgacatcaagatgcataatagctcacgaaatatcatttctgtgtaactcacgaaatatatatatatatcatagtagcagagaattctca

SEQ ID NO: 2458 - DNA, 797 bp, Zea mays
gcagcagtatgccactgtgcctgttatacataactgtattttgctattacctgatcgtgtcttgtgatgacccctctttgaattttgcagaccatcttccgacattgatggtccgatttcaccctctccgatgcaaggggctgaactttggactgcctcaccttttctgacttgtgaatgggtgatatgtggatctgcgctcatgggccgtgagaaggtaattgctattttgatatgatcttcataaaaaaaaggtactttagagcttattcaaatatgtaatgtgccctgaaatatccataaactacgcaggaaatcttggatcagtttgagtgtcacactggcatcacagtaaccaacacctggagttcagatgtgactcatgtgattgctaatacggatgaacgtggggcatgtgcacggacactcaaggtcctcatggctattttagctgggaagtgggttctcaatgtgaattgtaagtccattttccctgtagaccagtaaacaaatagtcagggctattacgtaggtcgtggtctgtctttgtggcttgtgattttggagtcaccacaacttagggaaggataattcaaccaagtgctgtatctagtactagtatactgcttgcatctgccaggttgattttgcttagatgccttattctaacgcaaatacccatttgatatctagggctgaaagcctgtatggaggctagggaaaccagtccccagaagagcccctaccagaataagtggtgaatgttaatgggctctggtggacgggccctcgcttaa

SEQ ID NO: 2459 - DNA, 786 bp, Zea mays
gttttcatcttctggttgatcctgtcccttcgtttctgcaacgaaacacagaataatataagcggatgtataattagatagaagaaaatatataagaagcaaagctggcccaactgaaaacatactggcgcattggtttccggcctatatagggcccatataaaagccgtatgccaagctgagagttggagcgtccttttcattctcggccgacagcacaaagttcttaaggaatttaattaaaggaaaaacaaaaggctctgaagagagagaaaaaagagtacggtgtagtattgcatcttatttcgagtccgcagtcaacaacagctagccattgtcgtctcgatcgctgggatgcttcgaaacctttggcgattcctttctgatgactaggtcaaaaaaagagggccattttcaacagtgtgatggctacgtggaacttatcctacatagcgaaatcgtgattgaggcacggtatcgtacgtaaaagccacaagatggtaacagtgtaaaggaacacgaattctgtgccgagatgttcgaacgttcctagctagctagctagctagatcacgtataggtatagctactagttatcgtcgtcactccatgttgctgtgaaaaaagagagaccttttttttataagaatcatttcgcaaaaagaaaaggaaaagaaaagaaaaaaacatctatatcggaatctgattctatatatagcgctgtactatacgaaaatgatgacgtttcaagattttctcttggaatacctgcttcttagtcttatt

SEQ ID NO: 2460 - DNA, 698 bp, Zea mays
cacaacacacaaaagcgcagaagcttcaggccgccaagcaaagcacggggcatatggtgaggacaggagatgataccttgcgcctcgctggagcgcgcgaagagatcggcgtgggtcagaggaggcgggcgggccggggttgtggtcgcgggcggcggcggcggcttggccttggccttggagggcttgggcgtggccacggtggcggctcccgggttcatgtcccaggcggcgcagacgcggaggggtgcgcgggcgcgggggtggtgcgtcgccatggtcatcgtcgccgccgcggtggccatttgctgctcgcgccggcgtcgaccgtcgaggatactggactggataacacagccgtcaaagatcttttccccacctttatccgtggcacttgcgggccccacctgccattagcaaaacgtatcctagcgaatacgtttaacaactgcgttggagtatttccaggaaaacgttttctgggcctcgtctcaactgaaactcttcgagccttcgacgtgcctctcctccgctcgtggccaccgatttcactggcttcatttcgaatcacaaatttcatctcctggagtgttgctttgcttgctcctggaatcttcggaaccgaaggccaccaggccaaccgcccaattaccgaaccaaaccctaccggtcgcggctcctccatagtccatagtact

SEQ ID NO: 2461 - DNA, 803 bp, Zea mays
ctcgctacccttttgagctctagactcgacctgcagatgcagtgacagcacaatgtgtgaaggagatgtgattagcttccctttgacccagggtatgtatgctgtcaaatcgacccatcatcttatgtagctatatagcgtggtgggcgaatatataaggccatgtgtttggttcctctctctagtggctaaagtttagtcaatctcaatctctaaactaccaaacagctaaaagaagtcccctaagatttagtcctttagtcacgaatggggtgtctgaagttgactaaacttccacctttttcagtatctgcccctcagcagtgcagcgcaggctagaattggaccaccttattttgtctttataagagctagtttagaaactctatttttccaagagatttctattttcccaaagaaaaatgaactaatttcccttgggaaaataaaaaaccctatagaaaaatggtgtttccaaactagtcctaagtaatatataatgctctctaatcagttttagttcttaaaaccaaacataagtattttagagactaaaatttagaagggtgactaaagaaatcaaatactacctccgtcccagaaagaatatcgtttgactttttttagaccaaatttgaccaatatttcttattcaaattatttctgaaaataagaaaaaattattttatagttaaagtaaatgatatgataaactaaatcagaatgaaaataaatgataattatgagattttttaaataaattgagccagtcaaacttgatctcagaaaagtcaaacgacatt

SEQ ID NO: 2462 - DNA, 783 bp, Zea mays
atgctggctccatgttcctcgtattcctcctttgtgtggcagaactgcatgagaaaagacagatcacttagatttcattcgcacaaaaaaaattcaccaggaataattgtattcatagctcagttataacactgctttaaagtgttacgaaagaacaagcatcgcaattcaccgcgttttattggcattataagttcagatcagatagcagaaatacaggcatgattactgaagattgccagtttctcgaggcccctggaatgacaagcggcacgtacctcaaagaattcagggttagatgcagctactgaccccccgaaccaaactgcataactctggattggatgggcaaccacgttgacttcaataggctgacgacagggaaaaatgtcaaattaaatgacagtacaaagcaaataaagttactcacatgtagactatcgactacaacagtacattaaatggggattgagaatcaatcatctgtacttactctcacttccacacgatgacgggcattagtcgcagcaacacggtcatccactatcttctttatatcagtttggagtctcttgtggaagtctttaaacatggtagatccaccagataatactatattctgcaaaaaagtagaattctgataaaatgtcactgcattcacaaatatcacttcccatcttagatatccatgcagagtttgaagaaagcaccttgtacagagctctccttgtgtcaattggtgcagactgaacacagttatcaatcaactcaggtaaaggaggg

SEQ ID NO: 2463 - DNA, 769 bp, Zea mays
ctcggcacccgcggattttctttagtcgacctgcagagttaatataaatatgcaagttataaaatgcaattaccgtaagtgtatgtaatgtaaaacaaaataacatgctacactgaagcataccaaggccattaagttcttcagaccatcttcgctggcagttttggatttcatgcctaatggaaacagaagataacctcaaatcctgataaggaagaagctttaatttcaatttctgactttatgatgtcttaaaagaaagattgaggaccaaacgataagttaaccaaacgccacctggatgctctgtatttgtagacgtaaaacttgattcaccatgatttccttcttcttccaagtatccattctagattttaatacttcctctagatctgttcttttctttatagaatcttcgagcatgagatctacttcttttattctatgttcaaagaatttgcttgcctgcaaagcactactctccagttcttgaatatgtgtcttataagattcatgtgctaacgaaagctcttgcctgagttttgatattatattggcactattttccttgtccttttgaagcttaagaacctcctcctttgcagattctaacttgttgtggctctcttcaaataatgattttacagcttccaatttgctctttagtttcataattgtaatattactgtcttctttttcctttatcatcctaatggtttcatcattatatgtagttgatttattcgcatatgcattggctgactgatct

SEQ ID NO: 2464 - DNA, 813 bp, Zea mays
tctttctacatagaaaaaattatctacctgatcttatttggctggcattgatccagggcccaatgttagctgtcatagtctgtcttcttgcactgaggggtctgtttggttccaatgttggggaaggcttgcattgtagccttgaagcaaaaagtaggatgcacaacatggagtttcccataagggagaacggctgctgtactcaaaattctcagtctagagaaaagggtgaagggagcataccaaaggtctccagaagtccagctacgtcaggtgagaagaagtttttacagtacatgtcaagctttcagcagtaacacagagggaaacagagagagcagagcatagctattctatttgctttgcaatatgaaatgtcaaacaaatcatatttatcaatgaaaactgtagttacgaaggttatgatgtgaaggaggttagcttatcagttaaaacatcttttcctattgtagagccatcatctccgatatcaatgcctgaactatcttctatttcaaggcacactcgacataattttcatgaagtcttccatctgagacaaggaatttactctgacatgcctatttctaaagttttggagataatgaaatccaccaacttggatgtaagtggaatataatgattctttctgaaatgtgcgtgagataatgtcagcccaaattctgatctttttattctttgcatcatgtggaaccaattttacagaatgcccctactcagtcacttttgagttttgtgaatgccatcctttgatcgatcatttgaaataagaaatggagaattccttatgta

SEQ ID NO: 2465 - DNA, 784 bp, Zea mays
ctcggtaccgtggatcctctgagtcgcctgcagctgcatgcatgcgactgttgttggcgacgcaacacaaagggctcggcctcggcgtgcagtccatcattggcacggccagaaacacatcggtccaatcggaatcgaggcctccctccggcacggcacgcagcatctggcgaacgaatgaccgcccgaactgacctcgttgctgtcggtctcaaccgcaatccttcccccctccctccagtctcgtccctgcgacgcctggatcacaagcgcctcgaccggccaaagcaaaaagacccgttcgttcgtgagctgatgagctctgctctcatggtcttcgtcagtctggttccgatctgacggcgccgcgcgcccgcttccttcacctctctcccgatgccagcgccaacacaacagagtccggtcctgggcatggggaaaagcagcagtggattcccctcccgtctcgagcgctggtggtctggtgatcattgtgcttgttgctgctgccaaagcgagcgcagacgcagacgcagtcgagcgctgcatgcatgcatacgctccctttggttgcctttgcgtcggatcagtcagatccgtgttccagatcccatggcctccttgttcttttttttaccgtactgcaactagcgctactcctagtaccagaattttgcatcggattcgtcactcggtgctgctcggtcccgtcctgcgtgcgcgtaggaggagtctgcatgtgtgttggtcatctttgccatcacaacaaaaaaaagccgagaaa

SEQ ID NO: 2466 - DNA, 770 bp, Zea mays
tgcatgcctgcaggcgctctgcactggaaggtcgtatcggtgtacatcaaccggatgggcctggtaaaacgaatcccttccgcttccgcatgctagctgttgaacttgggttatagaactttagcgtgacggtcgtgacggtgtttcgcaggtgatgttgaagatgaagagccggcatgtggcggggacgatcacgaagaagaagaaaagtaagcggcgcgcatgatatgtgtcctgagcagcgtgcgccagcgccacccgttgcccgtacactgacagtggctgtcgctacgtgcaggcgtggtgatcgacgtgtgcagggacgtgccggcgtgggccgggcggcacctgctggaggacggcgagcaccggcggtacttcggcctgcggaccgcggagcaccgggtgatcgagttcgagtgcggcagccagcgggagcacgagatgtggatcaagggcgtggcgcggctgctgagcatcgccggcgagcggaggcgcctggtggcgtgacctggccctggtcctggactggacattggcggcctgcgtgctcgttgttcggtcgcctcgtgccgtcaccgttcgttcgtcggcgaccgctgggccctggggcctccatccaccgtaccgtccgtcgctgtgctaggctggagcacatgcgagaggtggtggaaggcaacagagcagagcggcatgggcatttggcgggaggagaggggtatgtagctataggaggtagggttggcaggatcctggtgctgctagggcac

SEQ ID NO: 2467 - DNA, 709 bp, Zea mays
agaaacaaacacataaacactgccaaaatagaagctttactgagaaagcaaaaggggaaaaaaggcaaagaaccaaacgagactacagaggattgtcgctaaacttggttatccttatcacctgtaaaaaggattaaatcaaataaaaaaatgttcctatgaaaaatactcattgggagagagagaaacaatgaccaaattaattagtaacactgcactggaaaatggcctatgtgcagcatacgctctacccccaatgaactgaaatttacactctttaaacatcgttaaagcctgacacagtttctgttacacttctgacaagcaggaattaccatgtataccaccactacttgaggttcaaaaactgcaaggttggtaccaatcactgccctgaacccttaatcactattgaggtcttgcaggttcggatctttcaaatctatgatgagtgctcgaaaatctccttccttgatgatggtattgccattttgttcttgactcatttctccatgacctatgcactctcccatctcggcccatgatccttccccgttgtccagaattgttatgtttaacttggggtattccatcatgctgaaacatctgggaagacgaagtggaggggcaaggattccctcgcggatagggaggcaatggtggaaaaggactaaaaggcacgccaggtgcaactttccattttttatgc

SEQ ID NO: 2468 - DNA, 778 bp, Zea mays
aacaatgttacttgttagctctattttcgaaccaagattacttgaataacacacaaactggcggtccttcagtacctggacatatgatagctgaacaaacattggatcagtcacagcctcatccgactcgcggaagagacgtttcttgaatacaagtttgcaatgaagaatttctcctttgttgcgatccttagctgatctgaattcagatagcaagtcaccaatatatttgttatcatctaatccaatgtattcctctgcatataaaagataaagaaaagcacatgttacttgaaaaacatctacaaaatcctaatacatttctttctgctccttgatatccaaaccacatggaggattatttaaattatgaaatagaaaagggaaaaaaagaatatgacttgctagttaccattgccaacctctgaagactttgatccgttaacaaccttccgacattcaaataggctgaaactagaatacactgaaagtttgataatgctagcaagttcctgccattaaatcgatttttttgtttctttagaacattataatttcaaatgatattgtaccttcaaaaagttcagaagaaattgcagcaacagatctaatgccagaagtgttcaaggaaagtacaacaacataacagatagaaatatcatcacataacaaaactcggccgtggaggaaaagaccgccttcccagtactatattaagaagagaccgaaacatggtcttgaccgagaaatccccgaaccctggccccccatcactagg

SEQ ID NO: 2469 - DNA, 931 bp, Zea mays
agacacaatagatgaacactttttttgttttgctcctttcagtttagtctcactgagctaagaccattcattaattatacattacacgatcagcttcagttagctatttaccatcacctttagtaacttagatagcagatgtgatgtttattcatagtttcagaggctgtttttatttttagataattcccctcgggccaaaagtgattacaaaaccagcagctcatacgtgtgcagacacgggagggacaaacctccgaactgatctgaagaagcacacatccagacggcacaaaaagacacacatacaagttcaatcacaataaaattctatttgtaatcctccaaccaaaacgatctactgcgacggcggcgcctggctcccgtcggccttccgttagtactgaaaatgttccttttgttagtactgagctaaaaatgttatctgaaacaggttaataccgctcctttagtttgtgctgagcggatggggagagaccgagctgggagcctgtttcggtccttttgtttgtgagctgggagcctggtgctgggactagcctgggttacggtcctggacctggtgctgggagcgatatgagccacgaacgaagtactgagctagctccagcaatgtatctaaaagctcctctaccctaaatatagaggattaaacagtcatctatgctctctagcagcgtcctctaaacggttctctaaatttaaaagacgctcctggattctctatatagagagttgctataaacgaacatctatccattttaaaactttaaataaccggtttagcaaaactaaaatatgtttaatacattcgagagtttgaccgacccatgtatatatatatatgtataaataaaaattcctctaggatggcatacgcgatagaggacctgaaattgaaaacgttgtc

SEQ ID NO: 2470 - DNA, 744 bp, Zea mays
gtgcgctgcgaccgcgttgactaacccgtgttcctttcctgcaaggtcagatcaggaggacgagctgccagagcaacccgggtcggggtagcgtaaccaaccccctttttttttatctaacgcaacaaagtctggtagtattttatgtgccaaaagaagcgaaaggggggctaatctagggatggaagttcacgtccgaagcaagacggcatacagatctataacatccaaagaatccaaccgtcgccagcgattgtgaagcagaagcaaccgcaaccagtgcgtgtggttacagttataccgagatcctcaaatcaagagcaccacaaaaaaaatacatataaaaaaagaaatactaacatatccctgtagtgtagagtagtgtccgtgtgacatgaataagctgaaggaactccgcttgatgtagtaactgtagtcaggatgccaaaaccttcctctgtttttccgacgccagacgaccacgcaaaactgtagccagtaataacgtcggctgggtgtcgggcgtagtacaccgatcagcaggtggagtgggctttgggatttcgctctgcgtgcgtcctgattgatgctccggccaatcaggatcatcgaccccgtgcggcaaggggagaccgcgccatctcttccatcttactacttgtttgggcagtccgttgcgcggtggccggattcgccgcagttgaaacaagcaccgctgaagcttctgttgctgtaaataagggg

SEQ ID NO: 2471 - DNA, 712 bp, Zea mays
atagccaagagagtttgttttgaaccacaaaaaagggtctatgccacagaggaagagaacacaagcaaacataggaaatggtagtaagagataagtataggcaaaacacaaacacactttttcacagaccgaacaataattttttgcaagttaaacctcaagaacatgaaatcccagcaaattgaaagaattcactgggtgaatgatgtaagcaagtgaatgaatcaagtaacagaagagtataaatgttatagcaggctgccaggttgtcagcattgagaaagacattccaatagatcccatacctccgttccaattcatattggtacaatcaatgtatcgcaccacaaaggagttaacttatccaaagttacgacttttcagttacagctggttaagtttcactttgaaagctaccaaaagcatcatgctagatgtaagtgccaaaaccaacataagacaatccatgacacccaactagtttagctaactgctatgtttcaatatttctaagggaactgagcatgaaaatttacataaaaaatagagagagaacttactgtaactgtacggacaacccctgcactagcaccatcacgggccatagcaagggaaactaccttcaccacaaatttctgcatatatgaacattagaaacatattaggaaaattggggctagtgttggactctattcgttttattacacaacta

SEQ ID NO: 2472 - DNA, 742 bp, Zea mays
acagcgatcaatcggctgtgaggctggctgtcccctcacctctctctctctctctctcacacctggccacaccgtgtagtagtactggagagcgtgggcagcagcaggcaggcagctgaatgcgatataaaatttcataaagatttgacgtgaccgtgcacttggagaatttttattatattgccgccctactactagtctatgctacactactggacggaggagggattagagcagtccaggccaaaacactgtttacagtttttatagcctccgcgtcctctagacactacctcttcaatacaaatattaatattagttaactaaatttaatacttcttttctgtcattgtgttttggatatcgtgttaaaaccaaatcttacgtaagactcagtttcttactgtttctttatttaattatttgccacattaatactatagaaattagatgacgtgcgggttggaactgctcttagcgagtctaggctggagagcgcaccgcgccctgccctggctggctaggaccttctgttctttttttccccctacgactcttcagcaatgagcagcagcatatgacaattctgtttcggacggttggtcagatctatcgtagtttggagctcaacgtttgcagtacgcctactgtcgtgtacacgagtagctagcttaatagcttagcagggagcagctagcaagaagtagtggggggtactgggctggcaccatggtggaaactg

SEQ ID NO: 2473 - DNA, 819 bp, Zea mays
gcttgcacgcctgcagtagcatgtgcatgtaacagaattagaaagtgagaaaaagaaatggaacgtggagatagtttcacagatcacactaaaacatataagatgaaatacaggcaggatgtggcacacggtttttttacaccatttgaaacactgaaattgtaatataagcatgtcaaacatgaaggtgtgattacttttgagaaggggaggagctccagagcacagttgatagaaaatgtggtaagatctctctccttgtgccctttggaccaccctcgactacaggggaagacaaagcatattagaccttgaagaaacaataaaatatggatttgttaggaatgcatgaattcccctaccttctcaagcaggactagcccatgccatgcgattcagtaagaggtacatgcacagccaaggaaataagttaccagtgaattcaaagatatcgtgactagccatccaaactataaatggtagataaggcttacaggtctggattttagcaccacacattttaccagattcagagaagtgtatttcaataagcttgccctatatcaaaatcatcacagcagcataagaatagctccagaaagttagcagaggacagtagggcaacgatacagaaagataaactcacaaatcggctcgagttatggtttcgtgatgtttttgcattccccaatgcttccagaataacattggtctgaagaacctcagactccgtaccactagcacccccaagatcagacaaatattgcattgcaattttagctgtctcggtttttcctgatccacttttaccactgaaat

SEQ ID NO: 2474 - DNA, 770 bp, Zea mays
aaaataaggcacgcctgcatcagcaacatctacccagttctattgttgttgagcccaagaaacccttgactgcacccagtgacctcgtgggccatatcaccaagagttttgctgaggctgtgcggcttggtgaggccaagactgtaagccatttgactgagaaggtttctgggggtgattcgtctattcctgtgaagcatgttgaagttaagcagagtggtttatcttaggaactcttgatcgatgtgaatgaactgtaccaaaaattcacccatacgcttcctgatcaaaatgtcgggaatgcatatgcagatggatgatgatgaaacccaagacatcggcaaaagcatgcatgcacactagggtaggtctttgccaaccttggaagcatagtttcttgaatagtttctctttttttttcttctttcttcctagtattttcttcccttctcttcgcatcatatgatgattccttagtgtctagcctcaaggagagttgctgtttttgtgtaaacctctgtaagtttcctgttccatcacatatgagtaaggcctttttgtttctttttatttaagtaaaagatccatcttttatgtactgtcgtggcagttttattatactatgtctgaacaaggcctattcactatgtaagccaaacataaacactatccaggtgacctggttgtgatgactacagtaataagtaactgaataattttttatgtttgcggggaagggcatagtgtcgtgtggtactgtgatatatggc

SEQ ID NO: 2475 - DNA, 793 bp, Zea mays
atgcacctccgatccattctcaaaaaaccaacaacaaaaaactatacgtattagtaaaaatcatattcgaaatgtttatgcttataggatgaaaacgtaacttaatgaattcttgtttagattaaatgaatccaaacacaaacgcaagcagaatgaaaagaaaagcataacaacctaaaatctgcataggttccaatttctactcatttaaatcacaacttttcgtgtgtcgtgcgacacgcatgaaacatgtggatttgttttttttcataagtgtcgcttaacatccacataagatatgtcttatctcttacatgtgcaaccaaccctcgcgctagatctgtcttcccacatgtcgcctaacaactagataagataagagttacctctcattatcatcattgttgtcgtcctccaacttctcatctcttttcccgtccccacctctctcattcagattcttctgcatcaccaaagaagacatcgaccttctcccatcagcaagcgccttgaaccgctatcgtgactctccgtcgtcgtgcgcctctataggcaacacgacaagccttcgcaactcttcgctaccatgcacctgtgcatgcagctatacaagaacaagcgagggaaaagggaggaggcacaacagtcaccgatgaggcgctctggatcccgagtttaatttatgtttagttgttagcaaataatttgtgagtcattaatgtcgatgataatatatgtattgcacgtttttatataatcggtttgcgctaatattttatcaaatatttacatg

SEQ ID NO: 2476 - DNA, 758 bp, Zea mays
tccaggcggtaggcggatgttgatgtgcttggtgtcgtcgctgcgaggcagcgagaaggtggcgtcggcagtgcggttgagataggtgacggagagcctgtactcgccgtggaaggcgctgaagttgaaggagccgcggtcatcggtggctcccagcacctccttggtctgccactcccccagcagcctgtcgacgacgtctccggccgggaggttggtgaagtcggcgtccgtgaggcacatctggtagcaggtggcgttggcgcccatggccgtccacagcacgatgccgtcgacggccgggtgcgcgaagccttcgcggaggacgtcctctaggtacgcggcctgcgtggcgtggtcgaaggcggcgctgacgtcgacctcggtgagccagacgggcaggcggagcgtgcccagcttgtcgagcacggcgcgcacgtaggggacgttgggcttggcgaagtggccctccagcccgatgccctcgaaggtgaccccggcgtcgtcggcgagctggcgaagcctggacacgtaggagtcggcgctggagctgaggtcgtcgcacgcctccaccacgttgaagtcgttgaggaagagcgtggccagcgggtcggcgcgcctggccgtgctgaagaagtcggccgtggcgttgccgcccagccggtcctcgtagaagtcgaagtgcagcatctcgttgctcacgtcccaatgcacgaagtcgcccttgtaccgcgacagcagggctctggacgcggcct

SEQ ID NO: 2477 - DNA, 783 bp, Zea mays
agcagttaggaaagtagaggaagccttacatgttaggtaaagggcacttctatctttccttggagcaatggagcagctgaggaagcactcattctttaagtgagcgccatgttatagcttagctagttattatttattggttacacgtcctttaatattttttgtgccactctagtgcctacagtttgtacatgagatctgtggtactgaatatgcttaaaacaaaattagctgtagtagccttattcagattgaacttaaccttatacagattgaacttcatgtatggtaaactgcttgcaatgaaggaaaagggcataaagcatatgaatctcatcggcttcactacctttgtagcgagtatgcaccatccttccttatggagagcattgaacacagaactagaccatattagaaggatagggttgggccaatttgtttgacgacaacttctgcccaagtgctcttgttttcttttgaagaaataaacagacagtgaatcttcagggctaaagctaggttattggttgcctgattatgcaattataactttagtggatcagtagtgaggtgctcctgcctaccggggacaaattttctgatgatttgagataaagctgattaaggagtaagaactggctgctacaccagtgaccagtgtttgaagagtaatcatgataattttttttttcaaatttggaataataagataagccgagatgtaaaaagacttggcttctaggtggctaagttggggtcaagtagactccgtctttaagcacc

SEQ ID NO: 2478 - DNA, 876 bp, Zea mays
tggtggtgtacagaaacacagcactatatttagtatattcaacttcaaacagttaaaggaaatgaagaaatccagaaagacaaaaggataaaaaatgatgcaatgtaagaaggataggatgacactaggaaatttccccccgatattcgtgctgactcgagagctttacacctttaccagattgatagcatagtctcgttgttctaagccgttattcgactatgggataaagataagctgtgagataattcatttaaatggagacaacaggttatgacatacatttcaaaagcagaaacatgtgctgtatctaatactcgaatatttgtcgctcgctagttcatttttgaactaaaccgcgacaaataaaaaagaacggaggaggtatctagttagcaggcaagatgtggaggcctccaagaatatgtatgtcaataatgatgaactaacaaccgagtttattgaacaaatggatatgtttatgctgaacccaaactgataataaccaagttttacaattgtgaattgctataggaactaggaagccggcacaatattcaacactaatactaaaaagaaccaatattcgaattttcaataaacaatttcttctcaacttcctgaaaatcttccttggagtattggcgtcaaagcattctagtcaaatttcactaatgaagctagtttagcaccagttctagcagcatcaatcagatatcaccagttaaaagttagcctataacaggtttacatagaacacataatgtgacattaatcaaacccggtacatcttaaaatatgatggataactcagctgttgagctttttacttattaataaaaagcaccatttggcttaaatttaaagcataatttg

SEQ ID NO: 2479 - DNA, 786 bp, Zea mays
gcctgcaggagctagacagcaagggtctagccatactgtccctgagtcatgcactattgcacctgaaagaaggtcatctggagcaggaacttgtgctccaatttcttatcccaccagcagcggggaaaaactttcagatataagtagctcctcaccaagaagcatgacaaaggtctggtagtcatttgtacgctcctttcaactgtgccctttgggcttcatctacttctctttgtctctcataccgtcttctatttgccttacgctgccaaattaacttttgaacatgaaagcaggcaactttagtgacaaactatactgtttgtggatttgcagagtccatcagtcacatgcaggaagcctctccaatctgacaatacttctcacagtcaagaagaggactcatattctgtcacttcttcgtatcctttttttcttttcaaatattgatcatattaattttccagtggatcttattgttctgtctgtttagtgtctcctttttctttaatattttatgcatatgaactccataacattttgcatggaacccttttctattcctaaataactgtctgctagtaaaaagatcgcttcatttgtatcccccaattttcattgtatccctcaatttcctgagctgtgtacagaactgtaacttcagcgagagctggaaaaactaagaagacaactgttgctgttgcacctacatttgtctgtgataatcgtgctgagaagagaggagaggtacacatgtatttttgggtgcaatatcatattacctgt

SEQ ID NO: 2480 - DNA, 783 bp, Zea mays
atatggcacaagcttgggagccatccaccagttggtccgtgtaagtacccacccttgtctactgtttggacgtgtaccctttctgtatggttctgctgacagatgctgtggagataagatcctcaaaaaaaatggtcatgttgcaatgctaaattgcgcattgaaatgaacaacaaagattggataaatacagcaatcatacatgaatggctttctgcacctataaatttgttcgcaatgaaagatgtagaggttatctataagccaattgctagatcataaatcaatggtttttcaccactactgtatatgacacacatgcacacacacacgaacacagcatcttcagtggtggaaacgcttgatatctacttcgacttgttttaagtttggagcaactgaccaaagtaccaacctaagtacatgacttgtcaaaccaatcgccaggtcacactgacgtggtaatgccttaggctatctccaacacatcctcatattcaaactccactccgtgaacaatgcatgcagtgaactgctggtgtcttggttgtgcaacctgtattttcagacagtatgacggcctaagaacactggaaccctgaaacaatcctgaatccttagatgaccaagtttctgctgcaattccgcacgccacacatgcctttttccttcttccccgcaatctgcacccattgtgtttctgaatttatggtggagaggatgatggaatggcggcctctgagtggtcagttcaaggaaaagctttcacagacattagactgt

SEQ ID NO: 2481 - DNA, 760 bp, Zea mays
  unsure (1)..(760): unsure at all n locations
ccgtgcacagccactgctacttcctgcgcacgggcaacgccgtcgactaccgatcagagaaggtgttcatgagcaaggactacctggagatgatgtggggacgcaaccgcttccagcagacggtgctggagctgggatacaacttcctattcacggtcagtagctgacgttaattattcattcattcagtcgtcgtcgtcgtgcatccagcaccagcagcagccttaattagcaacatctatcgactgtgccggccgcgcgcaggacgttgacgtgatgtggttccgcgacccgttccgccacatctccatggcggcggacatcgccatctccagcgacgtgtacatgggcgacccctacagcctgcgcaacttccccaacggcggcttcctcttcgtgcgggcgtcggacaagaccgtcgccttctaccgggcgtggcagcaggggcggtggcgcttcctggggaagcacgagcaggacgtgttcaacctcatcaagcacgaggaggcgcccaggctggacctcgccatccagttcctcgacacagcctacatcagcggcttctgccagctcagcaaggacctcaacaggatctgcacgctccacgccaactgctgcgtcggcctcggcgccaagctccacgacctccgcggggtcctcgacgtctggaggaactacaccgccggcacaccccgaggagcgacgcgcgggaaagttccagtggaagctaccgggcatctgcatccactgatatncattc

SEQ ID NO: 2482 - DNA, 785 bp, Zea mays
gtgttggtttgtgttgtacaaaagatatatattgtaaatatatatactaataatttgaaaataaaaaaatataattgtgtcgggttaggccggcactgtaggccgagaaggtggtctaggcacagcacgggtccactttgaatcgtatcgggccaggtcgtggcactattaaataggtcatgtctcgggccggcccgctagataacccatttggccatctatagtccagtacctcttccctcactgtctctgatctcgcgagcgtggaaaaaagcgagagaaaaaactccatcttgtctaaccctacaccacatacctcgccattcgtactcacctaatctatagatttggatcatgtttgaataactatcatatttaggcaatgtctacctatatgatatatagaaattgtagcgatgcacgtgcaactaactagtgtataattatgtgtcttttgattatgtcttctataagcagtgcatatggtgtatgctacaaagttaactatgcactcagatgattcaaaatagtgatagggttatgtgccctctgccagtgtcttatgagattgtacagtgctatgaaggcaaagccatcacagttttcccctcaacaacattttgagatactgacttgtttttttcttatgatctactagccagttcaagacccacaaaagatgactgaaattattgtcaaagcgctggaaattactggacagagaggtatcattaacaaaggctggggtggccttggaaccttaaggcactctccctaggttgctc

SEQ ID NO: 2483 - DNA, 792 bp, Zea mays
atcactaagctggtgtctggcatcttgtacttcggctacatgcttctcgcctcatatgccttcttcgtgctgactggcacaattggtttctgcgcctgcttctggttcactaggttgatttactcttcagtgaagatcgattaggtgccaagatgacagaacagcacatgtttcaatgatggagtcaagataattgtatgattaatgtggattggggaattaccccccctcctttttttgaaggttttcaggaaaattttactgtttaggatttagtttacagatggtttatgttttgttattgtcaggttatacactttagtgatttggaactgaaaaaatataagggtaaacacattatgatgaggctgtaccttgtgacaaattttttttgtggggctctatataaattaaattcattgtgacaggtatatgcttgtaccggtgaattactgtagggctccaagaccagtatgaaatccaccgtttggatcctggaattgaatagtaaatttagatatagattaattaagctaatatggttttatgcagaatatatttgtatattattgttggtcacatgggataaatatttatgtacttcagttatactatagaggagtgagccgagttgtaagttaccgagtaaaaaaatgtagattagtgatacataaaatcaatctccctagatttatatttaaattttggaaagtggtagaaatgccaaattctaaactaaatgacctatattattaagtaaaatccaattcaatagccattggccaagaatgt

SEQ ID NO: 2484 - DNA, 803 bp, Zea mays
aatagagagcacaaactttctcataggatttcacagccaggtcataatttccatgcttaaagaacagagctgcgatctctccatcaagaacaactccatgtcttttccaccaagatcggtggtaattgtcagctgcacctttagtaagctccatatatcttttctgtaacacaaaaatagttcaaagaaaacacagaagcattattacgaaaattaaagtccataatgtgtatatattgtgatgagcatcgcaattccccccccacccccccaacccctgcgttgcctgcctagacggttagagcgaagcccatcgcacgcaccgttgagcctcctccctacccctccccctcgccaccgccggagcatgccaccaaaggctgggggtcacgatgagagcacgcaagcgcagctatgccggcctgccgggacattgccatcattggctctagcgccagcggaatggattctgccatccttgagtgtgggtccgatggcccttggtatggatctgtcgtatgctgtcgctgcggcggctcaggcgccaccaggacggtgcccatggctgcttccttgtctggggtccaaaattcagtctcaggaccggatgcacggcgcactggtgtccatgcccaggcgatggcagcggcatcgatcccgggcgccgaggccgaggacctagcgggaaaatccggcgacacaagggcagggggtggtgccctctgtggcggggcgcacatgtgaggacaatggctatgggtgtggtggtgtacgtgtgcagccagatcaaatctgattccatg

SEQ ID NO: 2485 - DNA, 833 bp, Zea mays
ctaggcgacactctcagacacagagtgagctctccactccgagtgagtgagcgagcgagcgcgcgctccgacatcacatataacaccggcagggcaagcgagcatggacagcaaaggaggaacacggaatccgttcttcctaccgttcgtctatcatccatccgttgctgtcctgattgcctttaccgcttcaccattgatctgagttctgaagaaggtcgtttccctggccgactccttcgccgctgcttcggcgactgcactctcactgcaaggtgacattccccttcgcctcacggttttcttgtgaaaaagtaccgttggtgatcttggcgcccaagttgtagcgagtgttccgtggtgcggttcttgcaacggctagcgcgcagcagcagggtccgcatcgctttctcgttagagatttagagccgggtgctcagcgctcaggtccttggagatttattttgacgagccaactttgctcaacttccaagcggggggcagaggctttgctcagcttctctttttctttgtctccttacctttaaacctctcaagtactctagttcctcccattttctactgctgctgaccaagggggaggagacgagctcgttatcgttagtctggcttgctgatggtagttagttacccacgtttggctattccttatgctcactgatcttcttggtcacagaaggaggaaaccaatccaagatcaggcaaagacaggcctaactccaccgataagcctcttgtgctccattgcatagcagtgtccgtccacaccgtgtctctcctcttatcgagaaatggtcttcaacgacgacaat

SEQ ID NO: 2486 - DNA, 798 bp, Zea mays
ggtgactgcagagaaactctggcctcactaatctttccatcacttgcaagccacctaggtgactctggcaagtagtaaaccaacaaagcaaagtacacgatggaaggagcaaagattgcaccaatcatgattctccagctaggtgaagacattaatgttaaccagaatatcaggcaatatgaaaagatagttcctatgaagaacataaactgtggcatagttccaagtaagcccctcatatttggaggagatgtttcggatatataaacagggacacaggtgaaaaccaacccacttcctgatccaacaattaacctagctagaagtacaatgtagatgttaggagaccacagcatcaagacgccacccgaaaataataccagagacgagtaaaccagtatgacacgtcttccgagccaatctaatagtgcgccagagaatattgttatcacaatagccccaaatgttgaggctgctaaagttataccttcaatagaaggtccattcaacaattcaaattctttttccatatgatgattagcttctgtcagatgataaaaaatcatggttagcatggttgtaagatagttgagatctctaatggaggtaattaatgtataatgacaatcaatagagcacaaaattaaaaaatacctgataatgctgcaaaatcccatccaagcaatgcatacccaatagaaacaacagctgctgaaaacactgttgacttcatctcatcaagtactatagcccttttgcaacaattataaaacctagaaaatatgaaacctgtgagaa

SEQ ID NO: 2487 - DNA, 782 bp, Zea mays
atccatccggatcttgcattgagttgaccatcatcactgccccaggcgtggcgtgccgcacgctccctatgcaaagtgtacgaaatattttatacgcgcatcaaccattccacccatccaaggaggaataaacaagccacttgtctgctaatacaggtgatgaagtgggggaggaactgctgtgtattacaaaagtattattgcctttgtagttcgtgcagataactacttgaaaaactggacaaactgtgctgaaaaggctagtggaattcttaagaatatacagggacaacagtgagctttcgcattcgacctttcagtcacgtacaggttccatttcagcacagcacagcactggaaaggaggtcgaactttttttacctttcagaataacaaacaaatcctagtactagtaccagaaaatgtctacgcttgtttatttggcaggcagctaccagtctgtctatgaggggggtgcgttatggtatctgtactatatagtatacagtctggcaaaagtggcaaagaaagaagacaggcgagaaatcagaatttatgttgtgtgttagggaccaatgccgttcatgaagggagccccccccccccccccccaagccacagccatttatgatggccattcatttccaactacctttaccagcaaacactttcatcatgcattttggaatctttggttccagcaggcaggctcatcataaatgggttttagtaattttgtatccagggtcttttatctccagggttttatagtacaggtttga

SEQ ID NO: 2488 - DNA, 896 bp, Zea mays
gatcaccggagcagctaatggcttgttcgctgcggctttaatccgactgcggctgcggcttctacagtattttctctctagggattgcagctgcaacagtattttgcagctgcaacagtggtttttgtagtgcagccgaacgcgctctaagatcaccggaaggagagtgtagtcgctgggcatgaacatgtgctggccaaacataacgagttccgaggtccgaccctgatggcgttgtgcaaggcccacaaaaatgctgggtctgctttagttgctgcttgtatgctgtgagcctgtgactaaggaagttgaacgatggtgttgagacggcaaagcaggtagcagcagtgccacattggctcattgtgcctagatagtgtgtctgccaacatgttcaagcatcctggcttatgttcaataacagagccaaagcccaggatcttacattgactctatccatcttttgtgatgtcatgttccagaaattctgattttgcaaatttttatggtggctgaactgctcccccctccccaccccaccccaatacttcaaacatctctcactggtgggttaatgtaagctcaatgtaaatccaaagcaagcacctagaactagaagcccattgcagtttgggcttctggcattagctttatttgtattcacatgtctagtaatacagttgattcttgttagcgtctatcagcacacccttcagagcaataatactatggttcattgcccttgtatgccacccaatattagaaagacgtataactttctgtttcattttgtgcatttgtcagatttgcaactgatcctacatcacgaggactgctttgtaaatgtcagctcgggtgcatgtcggatctacattgttaaagaaagttcgtgttga

SEQ ID NO: 2489 - DNA, 798 bp, Zea mays
gcaggccggagccgcagccgccgccggaggaggaggagcacgcgtcgcccacctgcgccgccgctgccgggtgcgcaaacggcaacaagagcagggcggcccagaagagcggcagccgtggcaggagacgggcaggcgccattgattgattgggatggacggcaacggcgagggccgaggaggacgagcaggaggaagcggcgaagcgctctcgtggtggtttggtgaggactgaggaggacagaggactcggcctacaaccttttttttattgcaacagcacagctacaccattcttatgagatgtaatttaataaagagatataagagagttctatgaaaaataaaagagagtagaataaaactttagatacactatttactaacagttattaacatggcggccgcataaaactatccgttgattgaccttactaatcaagggctaatttgggaaccatatttttattttctttttcccaggagagatttaaaacaaaaggaaggcgaaaaaactcgctgatttaaaacaaaaggaaggagagatttaacatggcggccgcataaaactagccggaggcggaaggacagcacggcacgtcgcatgttttgttctccgtctgcacgggtgccagccaaagccatcttttgtcatcagtgaccaacaacaacgtgttgggaggttggttggctacaaagcgttgctagtgttggtaggatttgttaccatttggccaaatttcaaaattaacaaacctccgcgtcttttttcctggctggccttgggcatttaattta

SEQ ID NO: 2490 - DNA, 783 bp, Zea mays
agacctagaattttatcatggggttttgccgcacaaaagtttccatttgcaatttagtaaaaaaaattgtttgccaattcggtgaaaaccgtttgcaaaactcacgtgagatgataaattgtttcttaaaaaaaattacatggcattatttttctaatactgatgcagtgatgctgggtgcaccgcgaaccagactctaatctagtgacgaatgatctggagaatctccctgaaacctgatatacacaaataatctcccttgtttctgtggtttgatgactgatgacttcacttgtctcttattctgataaatgtgattgttttatccttgtcctgtggcagtgcacgagcatctcctgcgtaccagcgatgattttgtatggcaagtcgatgcgatgtcccatgggcgttttacgattgatgttgagtttctagacctgaggatagccacgaacaatgcaagtatccattccagcttcgtcctttttttttaatccaattcagacaaacgtgattcatgcgacattctgtagtcctcacttttagtgctaatcgtttttgacagcagttaatgacttgggagattcctcactcttgctgctagctaatgatatgctaatgctgcccagtgtgctgctaactgttgttataggctacggaatcgtcatcggtgtggccaaacgaaggcatggtgcagaagatcgcgagcaagagcgccctgggctgcctgtcgcacatgctggcggactccatccacgcggacgtgaccattaacacgacggg

SEQ ID NO: 2491 - DNA, 791 bp, Zea mays
tcgacctgcagtgtccaaggcaccagctatactaaaattttctgccgagattcttcttcgcaagattgggttcctcgtcatcgaggctgcactggagccacggtacattgtgcaaaggcctgtactgctcacatacagcctggagaagaggctagtgccacggcattgtgtcatgaaggtcctgtgggaaaagggattgctcaatagcaattcaaactttttcacagtaattaaattaggtgaggaaactttcagatcgaagttcatcgactgtcacaaggactctgttcctggccttgcatattcctatgctacaactcgtgctggtattgtgccctctagagtttattatgtttagcatctctatttatgttgtaggcacttggcaggcagactggtgggactgcaacttatgcttatcagcagctatccactgtgcaggctttctcaattatctttctacgttggaaccgctaagtgactctgactgcccatagtctaagtttaagttaagcttgttatttgtgaaggagcttgattttatttgcgaccttaatgcgctgtgtgtgttaataatttctttttctgcctagcacacggctggctgaagattaccctttgtttttctcctgtgaatatgtcttttgttgtggacctgctggagggcagaacttattaggctaatattgttaaattccaattaccttttcatttcatctaaccagtttatttattggtatgttttattccaactgatgttttgcctagctcacactagctaaaatgatttt

SEQ ID NO: 2492 - DNA, 789 bp, Zea mays
atcttgcatgcctgcagtatattcccttccatgtaactgatcgctcttagcaaattcatgttgagaggggattcagtggactcaggagcaatgttgctctcaaagatatgctgggcaaccttttgattagaatggtcatcaccaaataatgtgccatttgctgaagccaaatcttctgaatgatgttctaggatgacacttctcgtatttgttttattttcagtacctactacaggtttgatggcagtatctgaagctgggaaactaaaagactcggggacacaagagctcttaaacagatcagtttgtttggagtttttttgcagcactttctgaactagcagactgaaaatcagcatcccaacttgcaaatgctggagtagcttcaatctgatttgttctttgagaactaattaagcttttagatgcagcaagcacctccaatctagattcatggtttttgctatcagttcttttcttttcctgctccgcattatgagtttgcggaagagaagaagtcatctcttttctttcaacaaaaaatgaatctaggttagcagcagataaatttattagtgtatccacagaagattattgctcctttgttatggaacttgaagatgtttccttattttcaggaaggcaagtgatttttaagtccaatagatcagatatgatcataccactgtttggcgggggtgcatccttgcttttattcaaaagctgtgtgtcagtatcgaattctacaaactcctgaatgaaaaagagaagataagtagaaaaaaaatc

SEQ ID NO: 2493 - DNA, 754 bp, Zea mays
tttgcactgaatgagagaggcaattaataaagatatacatacatttttttggcacgagtgtcagaagagaaagaatgcgaaccatgtacagatttccatacatgtgaatagttcacggccgcgacgcgtttaggattctcagaacccaggcgcacagccgaacacgagagcgcaggtacacgagatcactgtcctcgtctccatcgcgttgtggatcggcgacatcattgccactgccaccttggtcaatgagcttgcattcttccttcaccattgatgctcaggtaagctgaattaaagagcgcgctgaaaagggtccgcatttcgatattcttgacgtgtgagttggacacgaaagaatggatcgcttccgcacgagtagagcgaggaagtgctttcccctcacacagaagcaacgaacataagatgaatgaattaacccaaaaaaaaaacgcatatcagaaactagaacaccacatgtggatgggatgtaaagaagtttcttcgaggagccttcttcagattcttcccctatcttctaattttctatccaaaagaatacaacagtaactgtgtcgctgataacgggtcttgtatgccaccgtggtgtctggtgtgtatcaaaaactggatctaagcccattctgggcatttcgagatgtataacataagctcccccaatactctacaccggtgtctcaaaaaaattacatggggagcggtgcctttaccttttgggaatcctaaaatacac

SEQ ID NO: 2494 - DNA, 971 bp, Zea mays
aataatactcagcatggttgcggggacagtgccgataccatttgggagaggtcagtcgacttctctttatgccgatgtggtgatgttgattgtattgaggtctgtgatatcagggagtggttgccaaaatcaaaaatggaccataagctgtggaagcttgttcttttgctaggagaatcttatttggcacttggagaggcatacaagaatgatgggcagcttcagcgcacccttaaagttgttgaattagcttgtttggtatatgggtctatgcctggacatattgatggcgacgagttcatctcatccatgtccaacagttcattgagtcgagaagatcttgccctaaaaactaaacttgtactggacgaggcagactattgcaataacaaaagatgcttcagttatgaagtttcttcccaccaattgccaccaaattatttgttctgggcaaaggcatggatgcttgttggtgacgtctatgcagaatatcacagattgaatagtcatcaagcaaagttggcaccagaacagaagtctcatggcgaagttagaatgtcaaatgaagttgcattggaggtcaaacgccttaagagaaaactgggaaaggataagcagaattgtgacacatgctctttgataaactgtagctgccaaagtgacaaggcaagtagtggcagcagtgcaagcagcaatagttctgaagccctctaaactttacagccgaaagaaaaacaaaaaatcacttggtaagaaaccttaactttaatcacaatatagagaaaccagccaggaccccaatgcacaagaagcttcacaagggtctgaaataaccagcatgatgtgaatgatacttgttttgagacaactcatattaaatgatgatttgggcattcagtcaggccaggaaaattaacaagaaaggtgatggtgtcctgaaaatttaaacaaaggttcctactggagggatg

SEQ ID NO: 2495 - DNA, 840 bp, Zea mays
  unsure (1)..(840): unsure at all n locations
tggcaccagaacttcggttttatgtccagatccatatcgttggagttgtcttcatttgcttcaaccacatgccggccttccaacaagtgagtcagagcggtgtcaagcatctgaaaggatgagaaacagatcattggaaaaattaatgaaaggagcatttgccagccggacatgaccaaggtgcaaataaaaggtaaaatcttagcagaaaaaaactaggctgacttctacctagtacctataggtaaatgatgaacctatatgttgctagatgctagcccattttcactgaccattgaggtctgtatactgcaaaaagaaatgacttttcagagtttgtcctctttggaaatgttactccttggaagaaataaatgtagtcagttaacaaaattactattgcatcaaatataaaacttaaatcgggtattatattcttctaagtatacagcaccccctctgcataataaacacagggttaaccagcacactgaccaacccctttgagtaggtatgcccttttcgaaattccataagaacagtgactggacttcaatgttttcaagtcgttcgagtctcgattaatcgtccaagtcagtttggaccaatcacgattaatcgtccaagtcgtccgactaatcgtgattaatcgccctagtcggtcagccagaacgaccagcaagtcgtccgacttgaaaacattgctagacttaattctagtacactgaaaagctggagatggaataggttggcagcataccgcggtttgatggaaaggaattanaaatatttattgaaaggggccgacctgcgccataagggatgttaaagaaacattag

SEQ ID NO: 2496 - DNA, 870 bp, Zea mays
atgggaaggatattgatgatagtacaccaagcacacggtcaaattcggtgcgtgattttcccccctgtgccatccagtgtgttgctatgcttggagtcctgaatatactatggttatatgtatacgacagatccttgaagacaccccaagcttgaaggaaagcactgaacatagctgctcatcttcagtaattgatgaagaagctcagtcaagaagaagtccgactgttgtggctaggcttatgggcttggattctatgcctgcggcaagctcaaccgaatccaatcccatgccattaaccgtgcaaccccctttccaacccaacagccacgaggattttattggcagaagttatgttggtagtccccttaagatgccgggtagtcctattgatcggtttaaaatggaagcactgcctccaagacttgccaagaggacactatctgtcgcacagtataagttgctgtctcccatgaaaaaccctaaccatatatccagcaggaatgcagctgatataatggaagcagcatcaaggatcatcagacctggagtagaaaatatcagttcttacagagttcacgatgttgggaacacaaatgctgcacgtgcctacaacccaggagagctcataggagtccaacaaaggtcacagaagcttaatgaagcactgaggaaacgtgatggctctgcatcttttatgccgccaagtggaaaaccttcaaatggaaggttgagaggttccgagggcacctcgacgtccaggatctcacaggcaaatggatgtgctccagttgctacaaaggtcaaacccggcaatcgattagatactgctcgagctatgcatgcccaggaaaaaggggggatgacaaa

SEQ ID NO: 2497 - DNA, 783 bp, Zea mays
atcctgtctaccatccatatggcatgagctgctgctttctgatcgtgggatctctgtcgtagccaccgtgatcgatgaggctgtgtcggaatactctgacgaggcgtccgcttctaggaacttgctcgagcgcgtcgagtcacaggttctggctccttcggctgaaccaaacaatcttgttcctgcaaaagagtaaaacaggaaaggatctgagaaaggcagatccatggctacctgttacagcaaattccaagctactctgtttaccctttgcactcctccagctctctgatgagctacaggtttcggttgaaatagaagtctcccatgtgaagagtggacttcggccgagacgctcaggcggctctgcttgatccgtgacatcgtgatcgtacttctttacaggctgagatgactggtatcaaaggtagatgtgtcagcataaacatcagtgtttaacctgttatgtatacattaatgccagcattcagctttggctgcatgtgagtggaatgttaatttgtatgagtgaattgcctaccttctccctatggtttaaactttaaacacatgtgttataaaattgattatgagcaactgcctactgtacagtcaaaacctttccaaactttgttcacacaaaaaataaacaagtctctccaaacttccaatatgatatatctaaacacatgtgttataaaatgtgtagctatatgaagagaaattcccatgcctaaactaacacaaagtaactcccttccaagttttctctgatccatatag

SEQ ID NO: 2498 - DNA, 773 bp, Zea mays
tgacaaaggaatgatgccccctgttttaggttaggaggcctgtgctgggctggaaatctgaaaaagcgacaaaacgtggcttttttacggcccaaagtgttttaacgctaaaaagtggcgctttagcgcttaaaacgggcgctttacgtcaattcgtgaagcgttgcagcgctttaacatctcagtagtgctttagcgctttaataaccatggtcatcaacttctgctacttagttgcctagtttattagaagttttataggatgctttcagtaaactcaaaatgactatgtataagaaagcaaagatgacaagtcctctaaggcgtgaatttggctgcggcaactaaaagtcatccacgtgacaatcttctttttattccccacgcagtccatccacagaaccgaggaccatcacgtcagcccaattcgctcaatgtcagccatgatagcctgcctgcacctttttcatcctcacgttgcttgagcctccatccttcaattaccaaagcttcaagctccactgcttgacaccacccactcatcttctctatgcaattcttcatttttacaacattcggttttatacctggaacaagccattttttaacatggaacggttttttggttggtgattagaaacaatctaatttaataccctagaacaattcatcttttgtgtggaacacgtttttgctggttaaaacaatttgattttttggttgttgattagaataattcaatttaatgtcctagaacaatttatcttttgcag

SEQ ID NO: 2499 - DNA, 733 bp, Zea mays
tgccagccagccagccagccagctttcgtgtcccgtcgtcgcgcgcgctgcctgccgttctggagcaacaggacacgggcatgaatgcgacgacgcgctttcccgccaattattacggcctcgatatgatgtgtaccgtaccccccgcctgtttccgttcccagaaaccttcttccctccctgctgccctgtgctgtgctgtgtgcctgcctgggcgcgcgatggtgatgcaacacaacagctgatgatcgaagaatgctgttttgtaggagctcctgatgagccctgacggtcgatgcccaacgaccttttttgaagacgtcgaaagtcgaacggatgatgcgctgcgagtctttctttattcgtggagaaatctggctgaggaacacgtggcagttcttagcctttcaatagtttagttgctgctttcctactatacatcgcttgttgtcacagagcaagtagtagtcgtgttgaacccatttgacgacgtacttttggtgagtaacatgcatggtgattatttatttaacgatgaagttaactattccacaatctaaatcacctcaggttgaaatttagagtttttttgacacctcatatatgcatgcttcgatttgggtatagaacagtataccggccggccgcctagctatagcgaacttcatgcatgaaacctatagtgataactaaccgtcaagttggctgcttcgtctgaggaactaataatgct

SEQ ID NO: 2500 - DNA, 758 bp, Zea mays
acttgttgaatcaatcagggtttttgtctgtttgccaactagagcagtactcgatcgtatttcagaatgtgtgaaaactcgaaccgcgtatgtatgcgtctcagattgctcgtaagatcattgagcattggattttatagcagttgatattggccttttgattatttgattaagatggccagtgaagaggcagtactgcaaaactgtacgcccagagggtcccataatcagatgaagaaagcatggacctcacaaaaagccaacttgtttagcataataaattgaacaagcttccaggtcttaattatgggacaagctgacacttgcactcatgcatgaaattagtagtgagataaccaacgcccaaatctagtcataatgtctccagtctccacctaatcaaaggagttcgagtccaacactccagccgggtctgtttttttttttttttttgccgtaggactggacatgtcactgtctgtagttctgtaccacaccaatctcacactgtcatgcaccatcatcagtgtcaatgtgtcattcagttactacaagcttgcgtgtcatggaaagtaatggtagaatctctcctcttttttttctcctcttgtcacatggctgcttgcttcctggctcttgccaggctcagctttaggaactccattagtgggtctttaacccccagcaaaggcttgaatcttctcttaacaggtcaattaactttggactcgaagtaataaacttccttaatgatgtga

SEQ ID NO: 2501 - DNA, 795 bp, Zea mays
gaaaataatggggccaaaatttgatgcgctactttgaacgcataggtatctgcctatctgcgtacatcacatacatagaccatcagcctagtgccctagactcaaccttttctgcacaccgtgcggccccgcaaagtttttatttaacctaaaggaccagcactgactctcttaaccatgcctaaactagcagcttagttcctttgtggcgtatggtgagctccatggttctcagatgttgactctcaacttcatccttcacaacagtcccgatattgctgctgtgtaatacttgcacccgcttccacagcgaacaaaagcaatcttcacgagcaaaccgaccacaggcatgaaatgatgaaactttccatgcagcggcatatcattgggtcctgtgaaaaaaaaaattaggaccaaaaggcacaaaataaacataccaaagcatatttttaattcttaaggaatgaatgaaggattctgatactagacatgcctcaaatccgatttccggcctatcgatgctatgcaaacttcacccctgcatcacctttcgaaaccgcttcgaaccacatgtttcattgacttttaatggatccaaacagttaatcaatgaaaagaatagaaaggcaggcatagagttcagatcatatcaaactacaatcttaatttgacagaaagtataggaagaaaaaccttgtctggaatgatgtttcaattcacttcatgcccacctaagtctaagtgtaccttgtcagcaagaacttagctctctagaaactcagcacaattgttggt

SEQ ID NO: 2502 - DNA, 769 bp, Zea mays
  unsure (1)..(769): unsure at all n locations
accttgcagattgtttgtactgcactgctgctgttcaaatgctttgaaatcttaagcatgagtcatgaaatcatgaaatgcattgaagttccaatccatgtggaaaaggcaactatacacgacgcatgaatttgtgatgctaagctgattatgcaagtttaatttctgttttgatgctcgaatctgctttaacctttgtctgatgacaggtttccaaatttgaagaatagaaaactcccgatgtaggcctaagtagtttgggacaggaaaccctgtgcgatgtgctggtcttaagtatttgtactttttacattttcttaatttatttttttctgaacgtaatggcaggagctctgcctctcaattaagaagaaagaaattgatccacttttaagggaaaccggacccaaaacctatacaggacgcaaaaacaaaccaaacaacagcaactccacacacacaatgtccatcctgagtcatcgttagcgagctcaacacaagtgacgagcagctccgactgcccaagacaggcaacacatggccgaaggaaacacgacgacgactacaaacaatggcacaagagaaggaagactgcagcgcgccgtcgttgccaagccacgagataccccactcgagacagctccgattcttcactagcgagacttccaaaaccttgatccaccgggccggcttncgcaaatgcctcaacttcgaagcaaacaagcctacggagaaaggggatcgccccacgtcatcgttgccgagccac

SEQ ID NO: 2503 - DNA, 770 bp, Zea mays
cttgcatgcctgcagctaaaacttcttaccaacttaccatctttctagcaggagctaaacaaagcaaagaaaggtcctcctcttgggagttcattaaaactctatctccaggcatgctcttatacagatgatcacacattatctacaaatgctatcacttgctctcacctctcagtcttagctatttttttccttctctttaaggtaacacatcaaacccaaaggttctgctaacacatattccactataccgacctgataactctccttgtggcccgcatcgttcttcacctgttataaatcaggtattctattgtcaccaaaaagcttgtttattctgtgaatctgtgttaaacgtaattcgtcaaacttgcatgtttttttgccagaattattattttttcatatgtaccatcattcctccactttatttgtttacaatattctacaagttctgacataaacaagtcagtcaaccacatgaataatttgctaattgtttttgttctgttccagagggtatcttatgccgccttagaccaaggaatcacgtatgttcttcctcacactctactgctttgctactttcatgtttcaactaattttttatttacacataattattatttctctactgcttttctactttcgtgtttcaactaattttgtatttacacataattatcatttgacatggaaaacaatgattgttgctttgacttgtgaattaaattttggactctgcttttctatcctgttccattttgaag

SEQ ID NO: 2504 - DNA, 795 bp, Zea mays
aatttattgttattaattattatgtatattatatataatatataatataataatagctcctgtatgatctcctttcatgtaaatcaacaaaatttggctggtggatacacagaatggtacaaggggcctatcctttggatagttggcaacggagcaagcatcaagaaagcttgcacactgctgaaagaattgcctgtacacacaacaaaaagaaccaaagaaagtgtagagctatatcctactcgaatgaacaaaagatcactgtgtaaccccctaccctaagctctactcactgtactcatttgaacttctggatgagttacatcatggaaatcttgcgacttctccatttctcttgcaatctgaatgtcactggggatgaaatactcactgaaggcctttgcggcaaaatgaggaatcatcccaacaacagttaccgcaagcagcagtgcccagaacagcccagttcccatcactttgtagattgccctgtcatacagttaccgaatcagtaattgtgaacatacttttcgtgtaagtgtagaaaacaaatactggaatgcgtgcttaccaaaaaccaggcatgattggtatggaatctatgatcatgacacaaatccatgtcgcagcaatgctaccccatattgccgcatgcgtaatccagttccatctgatgacatccattgccaggtgaatgttgacaagaataacaacggatagtgtccataggtctccaaggctggaaccatcaattatactcttcctgtatgcaaggtaggggatgaaagaaacatg

SEQ ID NO: 2505 - DNA, 706 bp, Zea mays
tgggatgcataagtatacaggttgcatgcagtgatacatatatacctattgattgatgtgtgtagactgtagggtacgtggacgtgcacctcgattgagctagcttcagttgaacttgatggggtagacgcgctgcatgttggggtagaagagcccccagttctgctccacgccgctctgcttgaggttctcgttgaacatggagaagaggatggtctcgatggcgcccgggtggcgcggcgttccccggccgacgtggttgatcaggttctggttgtagatggccgcattctcgggtgacgccgcgacgccgccagcggacggccacccgctctccgacaccacaagggtgacgccggagcccccgtggttggccatcgccacgtagaaggagtcgacggtggcgtcgaagaggttctggtactcgtaggcgccgtcctggagaacggtgcccggagcggtgaagagcgcgtagctgaggtccatggcagccgggttggtggcgtaggtgaagtaggggtagacgctggccatgagaggcgcgccggtgcgcgccaggaacctgaggacggggcccatgaacccctgcgcctcgtccgtgaactcggcggcggacggcggcttgtagccgccgaagatggcctgcgacacggacgtggtgaccttgatgccgttcaggccgctgaaaccagcgcggtgcggactt

SEQ ID NO: 2506 - DNA, 774 bp, Zea mays
aaacacctcggccagctccagcttctcggcagtcaggctggtggagtccatggtcttgctgaggaccttaagcgcgagggcgacggcctcctcgcgggtcaagccgtccttgtagtcctgcttgagcatggactgcgcggcctggctgttggccccaacagcggcggccttccacccgccgtagttcccggatgggtcgctcatgtagagctggaagccgtggtgcttgtcccacccggcgaataggaaggagaccccgaaggggcggaggcctccgaactgggtgtatccctgcttggtgtcgcagagggactggacgagctgctcgacggggatgggttcctggtaggagagcgcgtagcgttgggcgtggaggcgggcggtgttgatgaggatgttggcgtcggacatgatcccggccacggcgcacgccaggtgggagtcgatcttgtacatcttctcggcggagcgcgaggtctggaggagcttggaggtcaccttcttctcgccgacgaggaccacgccgtcggccgctaggatcccgagggctgacccggcgttgccgatcgcctccatcgcgtactccacctggtagagacgcccctccggcgagaagatcgtcgtgcggctgtcatagcggcgagacatcgcggcggcggcggcggcggcggcgagatggggtttgcgtttgctggattgggggtggtgacggccagattggggcttgcgtttgtggaacttgagggggaggcgactcgggggaatcacccgcag

SEQ ID NO: 2507 - DNA, 707 bp, Zea mays
agactaaacctccccctgttacacctcaagttgtggatcttcttgatggtttgtcctcaagcacatctcttcctggtgagctcctgatgcttgattatccaatataaggaaaagttgcaaatacccctaaaagtcactgagtttgatttctcttccatatcaaactcaaggtgactccaaaggagcttttgcattagtaaccttcccataatcaatgaatttacttttactcaatttgcctgttcgccagatgagaatgcagcttacccgacaatcacagcattccagagtgcaaccttgaggatcacattcagtttcaaaaagcaacctggaaaacctcaggagactacaattaatgcttctttcacaaatttagcaactactgcattaacagatttcgtcttccaggcagccgtgccaaaggtagcaatcgcctctgacaccaatctcattcccgacagcagagatcttaaatagtcagccgtactgaccaatttgcttagtttctgctgtaaatcttataatcactcaagtgattgttataggatggaaacccttatatggtgaaattatcgcagataagatatgtttataactggcattaaaaggtctagtttcgtaacatttgatgttttgctaacctctgctgccctgtgtttcaatttaatccagttgcgtttggacccagctagcatcagcactctttc

SEQ ID NO: 2508 - DNA, 800 bp, Zea mays
aagttacatttactacatgtagaaaatcctttaggtaccttgagaaccataaccacaagctttgcatatgaatcaatggagaaatatgaaatgtgaggttgctgtggtgattgctgagatgatccaccaggagcaacgatttgctcggagactagagagtgtgtaacagcaagttcctgaacgattcaaaataagtatctgagtatgacaaagtgtactgcataatctggtacaaaggtagatccatcaccgtgagaatacggaagaagcgttcagagatatcatcccccttcagcagaccatcttgctgcaactgtgtgacaaaacgagtgtatgccgcatcactagcacttacatgattacacatctgacaccattcagaaaacaggactgccacctgtacatcgaacaatttaacagattaattaacagtccagcaaatagattcaaggtatagttgtgagaatggcttgagcaagaacagcaacaaaatacaggtaacaccaccattggaagactacaactatctcctagttgaactaacatgctaatatgtgaccacatcaccgcaatcatgagaggaaattctatgagtagaaaaaggaacatccaagatacaaacaaaatcgttgcttatttatactaaggaattctgatcccatacccaacaaattgaaaaatggaatcaaagaaaacagaaacagaaccaaaaccaaaacatctaactaaaaataaagagaataggtttatgtaaattaaacaaaggttcttgtaaatctgtaggattcatgatgcataaa

SEQ ID NO: 2509 - DNA, 784 bp, Zea mays
gggcggcggcgctgccgcaggcgccgcggtggccctggcccccgccgcggcccgcctggccgtggcccggggaccgcagacgccagcgggaacgcatgttccgggaggagtacgaacgccgtagcagacagctccgcgagctctgccgcgctgtccgcgtcgacaccgtagccgagctccaggagttgctctgcgccatggtactcgccgaatgcgtctacaaggtccgtgcgttggcatctccgaaatttcgttgcccggctcgtcctgtaccttaccgatcacgattgacggatcgctagatagatctgtgcagccattttcggctggagatttgtccgaatggtgcatgcggtaaaagtaagcattaactgttatggttatgttgtacgaaagtttttttttggaaactagaatgtttattagttgctggacatagagtttcctgcctcttctggtgggggaagcataatgaaatctgcatgtttgtgtattttgtaatgatatgtacttatgtagtgtgccatccaccaaatgtaggcacaccatcttgggacacttctgagcaaaaaccatcttggtatagttgcatgtctgatactattaatgtgacatttcatgcttttaccatgaagaaacatcaccttatcttctgatgtcctcgcttgatctaattgatctgggtctcagcttaatataacagtcacaaaccatatagatttttcagatacgttggttttattttttggttcaagaatttctagtgtctatttttcgactagcc

SEQ ID NO: 2510 - DNA, 764 bp, Zea mays
cttcttgcatgcctgcagataacaagtcttccgagggaaatgccttcttgaaatgcagaagaacttcaagcctaaagtaaattatgtgccaccatttagcttcttcctgtgggcacttcaatcccatatgtgcaacaacttctagaagttgctgtcgagtcagagatgaggacatttgtgcctgaataaatttctctagtatgttaccaacacgataaagcaccggttgaccttttgagacaatgccgttaagcacatcattcacacaagcgatattgtatagcttgcctctaataggaaggcatttcctttggatgagcaagtccatcagttttgaggtcccctcgtcatttctaatttcactaccagatgtcaagctgaaatgcttctgatcaagattccaatctcttatagcttcctgtatgacattaaatggtccaatatcagaatctagcacacaggcctccttaaactgtatcatcctttccaaactagtagatgaggaccagaacacaccaaatttgatggttttcctttgaagtttccagtttgaatctacaaaatgcactgccaaacagagatactttactgaggcctcagctccatgaggaacccaaacacttgctgacaaggaaacccgatgggacaaaagtgcaattctttccttaagctcagacttttctttctgaaacaaaagagttgaatactcttctatatcaatgcttgaagccatgttaaatgtggggtttaggatctttgcaaac

SEQ ID NO: 2511 - DNA, 780 bp, Zea mays
aaggctagccatgaggtggttgatggggagaatgcggcggtgagtgctcaggcagttgtggagtttggagctggaagagggtacttgactcaggtgctggtggactgttatgggattagaaatgtcttcttggttgagaggcggtcctacaaacttaaggtcagtaattctaagtgaattattatgtttatgggataagacccactcgatctgtattaagcttttttgttgcttactctatcttgtgaagtgtagcttaactttcacaagcccctcaaatctgcatcatagttaggctcagtaatcaatgcatcgcctcccaattttcttgcaaaatcgagtgtcagcttttttttttttgagacattttgtagttttactatcctcaatgttgcctgtattttctttgatagaatgtgacccatattttgcaagcgatcgttaagatgcaatgacttgtgcactagggcaatgtgtagttgtgacgttgtgtgttgtttctagtgaggtgactacggttttaacttgttattcttttctgcatctaataccgctgcaattattttggataatatgttattttctagagtaagcttgattgtactgtgaattttctctaacacaacaactcgctgttatgctaaatctaatttgtccaagataagttctttcacttcctcattgagcacctgttctctttcctctacaatttttaggctgatcgaagcttgcgtcaaaatgaagatgttacctttggagcgtttgagaattgatagtgag

SEQ ID NO: 2512 - DNA, 792 bp, Zea mays
atttccgtccataacaccattcaccaaaatcatccacacctatctacacttaatactagctgaggtgatggtactgcattactccacatcaaacacgaaaccagacccccccacagcaaaagttggtgtgctcaactccaaccaagtccgcgctccctgcctactttcgcttagcagctgctctacccatcctccctgccagaaacaaaccatcatacatacatggttctccgttcacatccaaaggaagcactgaaaatggcaacatacttggattgttcggatcgcggcagtatctacttccacacatgcatctgaacggtttactgggcccttccatgtcatcaaaatcgatgccataatcctggaatcacagtttcaaacatttatcttgtcaaatcagcaccctacatgtatgccaacagagggcccaaaaaaaatgacacttacccaagttaactcttcaaatgcctccactttcttgttcgtgaaaaatgccagctgtgcaacatcaaatagtaaacaattagcatgtagtgcacttgctcttttcactaacccattaaggtcagcagatcacttacatggtgataatgatgatcgggcgtctcaacttctacagggatctgaactaaatttgcattgtagcatctagtcatagcatatgttcgttaccaaaaacatagcggagtagcagacaaaagactgtgatacacaaactatggcaagatatttacagcaaaaaaaaacgagcaagtaacctacataccgggggttgataaaccgccgaca

SEQ ID NO: 2513 - DNA, 715 bp, Zea mays
tttggtgcaagaggcaacatagttcaccaagctcaaagtcttggcaggagcctgcaaggagccgcagtgtgcaagaatggggtaggttctacagttcaaaatactcatgagacttcgattgtggaggtggacgttgcttcctcagccaatggtgaggtgaagatgtcattgaaatgcagcgtgggttcttcaaatttcagcattagtatggaggaggtttttaaaatggtggaggaaaagtgccttcactcatacaagatgctaccttcagatctttctattggcaagctgctgagtgaggtatgccaatctgttgtgcagttgggcactatgcattctgaggttaatagggacagtggcagcttgcataatgaagtagttgctccatttgtgaagccaatctcttgtgaggctgctgtgggcataagtgatgatgtggctggtgggtcatcagtccttgaatcctcagaaccttgtttgcagaattcacttgttgcttggaatcctgagttggctcattgtaatcaaaagacaacccatgatactactgatatatccaaaggcgaagagcgggtaagaatacctgtagtaaatgaatttggcagcgagacctgtcctccatccttttattacataccaagaaatcttgtcttccaaaacgcttatgttaacatctcgatttctcgaatttgtgatgaagattgttgtgctgatt

SEQ ID NO: 2514 - DNA, 798 bp, Zea mays
atcttgcatgcctgcagcatgacgtggcaaagaattcacacggggttcatggaaaagggtccggacatggcaagggccgtggcaagaaacagccgaagaaggaggtggttgacttggagactctcctcgtccactgtgctcagtctgtggccaccgatgatcgacgtggtgcaactgagctcctgaagcagatcagacagcatgcatcgcccaatggcgacggtgaccagcgtttggcgcactgcttcgccaacggccttgaggcgaggcttgctggcaatggaagtcagatttacaagtctcttataatgacgaggtttccctgcaccgatgtgctgaaagcctaccagctttacttggcagcttgcccattcaagaagatctctcatttctttgccaaccaaaccattatgaatgctgtggagaaggcgaagaaagtccacatcgtggactatggtatatactacggctttcagtggccgtgcctcattcaacggctctctaccaggcctggtggccctccgagactccggatcacggcaatcgacacaccgcaccctgggtttcgcccagcagagcgcatagaggagaccggaaggtatctaaaagattatgctgagaccttcaatgtgcccttcgagttccgagccatttcatctaggttcgaggcggtgcagatagaggatctccacattgccaaggacgagctgctgatcgtcaacagcatgttcaaattcaagacactgatggacgagaagcggggggctgagagtccaaggaacatgggcttgacacagc

SEQ ID NO: 2515 - DNA, 701 bp, Zea mays
tagcagcaccgagcaagtgagacccgtcttcgacgcagcgccagcaatgcaatgcaatgcaatgcacgtacgtacgtgtacgtgccggcgttcaccctgatgacgacgcgggcgaggttgatgagcgggagcgagtcgacggcggcctggatggacgtgaagtccccggcgcccggcctcctgtcgacgacgagcgtgcgcgcgggcaggagcgtgagcgccggccggttgtagttgtaggtgccgtggccgaggcggccgcccacgaagcgcacccaccgcgtgaactgccgctcgatcgcctccgcccgcgtcgcgttcgccgggtacgtcttcgcggcggccgccgccgcgctcttcttgggccgcaggcgcctcgtgtgcgtgtgcccgtgtcccgcggcggcggccacctctcccggcgcgacgagcagcgccacggcgacgacggcggagcagaggaggagccgcgatggcacggccatggttgtcgtcgtcgcgcggtggaggtgccctgtggccgcggtcaccgctggcctgcgagaactagcaagcggccgggggttattataattcccggaggggggaatttaaggagatcacgggcgtgcgcggacgacggacgcggctcacgagtgacgacgagccgcgccgggggcggggcgagaagctggttgcttttgctgcgccgcatcccagca

SEQ ID NO: 2516 - DNA, 754 bp, Zea mays
aagcaatgcttgggagacttcattgatcgcataaactctgataaagctgttattgtatctgtgtctctccagtcaagagcatcactagctgcattcttcggtctttcccagttacatgggcttgcctacttgttcccctgtcagaatcatcaccctttattaaatcacacataatataaatggaaatattcatccttttttcatggcaggaccatataattccaagaccctgatgatggccacaactgcttatattgatgattcctactcggagattattgatcctctaaagactgaggcgttgtatgttgttgaactccctggtgaccatactcagcacccaccaaaaccgaatgtggtggtgtctagcagtgtgtgcgaacttctagaatacccagtctgcttgaatgtcatgtatcctattcatcagctgcacattcatactgatccatttggcatgtttatatctaaaaccctgttcaaatgtagtcgattggatgaaaattatggctttactggtttcagcgttcctttcaatatcatgtactgctttcaccattttattctgacccgtttcaatttctatggacgtttagtacataatgtttataaaccttaacttttttactctttttttcttttttgattagctacgatacaatgcagaataatatgttttgcttttttattcaactattcaaatcttatttttttattcaactattcaaatcatatttttttgattagctgattg

SEQ ID NO: 2517 - DNA, 743 bp, Zea mays
ttgcatgcctgcaggcagttgaatggaaaataccagtaaaggtataatccagaacttgttgttttaaaaggattgaaactggttagtccttgaaacaaaaatgggtgtatctttttttcattcatcttgaatttctttaccaacaggttaggggatttgaaacccaaatggagaagtggatgggagcttgtgattgcattataacaaaggtatatcctcctccattattgattcttatcatgtttcttcttttgaaggtttttgtgggtttcctaattttgtttctcttctgttatggtttcttaggctggaccaggtaccattgctgaagccttgataaggggtcttcctataatccttaatgacttcatacctggacaggtttgtgttcctacgattattctgcactcatgcagttttattgccataatgtgcatgtgaagtgtatgtctttttctgcatttctgatctccttaataaaagggtcttagtgtgtaacgtgtttggatcatatgcgctacttatatatttgtattttgattgaatgcaatatatatgaattaaaggttattctaatgtgttaacatgttctcacatacgtttgtgtgtttttgcatgtatgacaggaagttggcaacgtaccttatgttgtggacaatggtgcaagtgtgttctcgaaaagccccaaagaaactgctagtcttgttgcccgctggtttggtccagattcagaggaattgaaa

SEQ ID NO: 2518 - DNA, 712 bp, Zea mays
actcgtggttggtgtgcgtactgctcgtttttttccttttgtttgtagcatatataagtagcttttttccttcttgtttgtgcatatggttttttttttcttatttagtttaatgtttctgtggatattgttagatacagatcttccgttgtagttaggacttgtggtaggagagtcgactccaatccgtgtacgtacgtacgtatgtatacggatggatgatgtacaagagagtcaagatgtaacaagcctgtgaaaaatagtggtaggaaatggttgatgatgcaatgactgactctacacccccttctctccttactttcagaaattcagatacaagtagtaaatggtggtgcaaactgcaaagtacttaaccgacaacaaaaagacaattctattcctgtacaactaataactaacaaagtttgatgtctcgtcggaaccaggggcaaaaccaagaatgatctggaggagttggaacaagacgtgtggctaacccggcaggcagagtccaacttccgtacgccggagttgctggcgcctagatgcgtcagtttctagagcgtgccggggccacgaagcttgtccgtggagctggagcgtgcgtcggagcctggcagcactgttgctatgctacgagtccatacaatacatgggatggctttcgtttcgcctccgcgtcttgattccagatccgcatctagtggaacca

SEQ ID NO: 2519 - DNA, 827 bp, Zea mays
aacaaaatgagcaattgcaccagtttttcctttcttgatgatttttcaccaaggtacatgttgagttttattaccttgattctaactaatggaagtttgggctctgatctgctggcagttggttggctactcttctcaatcagatttcttacctaaagcaatccagtaatacaatacccaaaaaaccagttaatttttttttactgaaactaacatttaagaaaaaagcttgttaggcaagagaaaataacaaacaaactattcttgaatgtttcttaataacatggataaaaattgagtaatagaatgcaaatacgtgaactcacaattttatccaaatgttcaagcacagagtcctgatcatttgagttaacatctgcttcatctttcaacacaacctacgaatatcaattgtgagatttactaactcatatacgaagcattaagtacgaaaggacatgcctcagcatattcaaaaggtctgacagatctcagaggtattttggttggcctgtactgatttccctgtttatgaaacatgtaaggactcagaaaatacaccaagcccatgaaacatgagagttttatccacatgaaacatgagagtttatcttgaaagaagaacctgatttctaacaaaagaacatgccttgggtttggcttacccatcaataaggacctcgcgactgataaacctggttgggtgatgtggaaacccattccaggggaccctctgggaatagaatatttacctttggaatgcctgacccaggtttttttctcttaaaaaacattttcacaaacaacttaagctagagggccattta

SEQ ID NO: 2520 - DNA, 769 bp, Zea mays
aagagtgaatattattagacaagtaaccaggggctgattagattgattcattagatgtagaaaggtttacaatatataggccaggagggtggtgcaccagggaaggtgtggcagcctggtaatcaggatcctgattagtgattaccatagaggtagctcttgatacctatactaaaatagcagatcctagatgccatataggactgctcctagttgctatacctgacagagtgacagagttgccataccagccctcatgcaggaggggagatggaaagcagcctacaaattatagtaataatctaacacccccagttgaaacatctagccactgcaaatgttgagactggacttgaactcaagaaacactgatgtcagaagccctttcgtgaacgcagtggcgaagctagagcaaatataaagggggtgcacctcccttgtggattcataaggatgagatgtgggtggtgcttatatggtgaaaaattgaacactataattgatttttggaattttagggggtgcacttgcacccactggctacacagtagcttcgcccctgcgtgaacatcaccaatagcaacacgttctcgaaaagtggagatcaatttcaacatgcttcgtacgatatgttgaactggattggtggataaatagacggcgctgatgttgtcacaatagacaagaatactcctgtgaagggggcatcgaagttccaacaagagatggcgtaaccaactagcctagacagctccattaccaagtgcaa

SEQ ID NO: 2521 - DNA, 1113 bp, Zea mays
ctgcttccttagtggagcccggctgataggacagcagggttggcggctcccggccatagacgacacggaatgtttgagttcttgatggctgtctggtatgaagtattgtagcaatactctgcccatggcaaccactgcagctaggacttcggtcgatctcctgcaagacacctcaaatacatggttatgacccgatttaccacttcggattgaccgtcgggctgtgggtggaatgctgagctcatgtttagtttgacaccagccaacttgaacaactcggtccagaaaaggctggtaaagattgtgtcgcggtcgctgacgattgagcagtggagcctatgtaagcagatgatgtcatcaaagaaggccttggccacggacgctgccgtgtaggggtgccgaatagcgatgaagtgtgcatacctcgagaatctgtccaccacagtaaggaccattgtcttgccaccagcacgtggaaatccttccacaaaatccatggaaatgtcgctccaaacctccaaaaggatggttaggggctgcgggagaccgctaggatgtagatgatccatcttgttcttctggcaagtggtacacccacacacataatcggcggatctactgcaatgcgcctgggttgtggaaggaggcgcgccagcgattgaccgtcttctggatgtcgtcttggctgcagtcgtggacgtacgccagtaggtgtggccaaagggccaaagcatctagcacatagacaccaccgccgaaggtgaggaggtcgtccaccttagtccagccttctggagcagagccatcggttatctgtcggtgtaatgtcgcagcctgcgggtcggtgagacgctcggtgcgcaacacctcgaagagctcgaaggagggcgtagagatggtgtggagggaggccaccacctactcgtcatgcgatacagcacatcagtcgtgccattcatcttctctggcttgtactcgacagcaatgtcatatccgaagagcttgctcacccatgtgtgctgaggaatggtagagaggtgttgatccaaaatatactttaaactatagtgatcagtacgaacagtaaaaggtcgtccccaaatgtatggcctc

SEQ ID NO: 2522 - DNA, 716 bp, Zea mays
cgccgccgcagaggggggcaaggtctgccacgaggcctgggtccccgaggcacgggtccgtggcgctcccgcacaggacctcgtactactaccccacccgggaccgggagctcccggcgccggagccgaggggcgccaaggaggagaaccggcaggtcctaccccagcagctgtcggcgacaggttactccaggaggcggcacggggttgcgcgcgggctggaggctccggccggagcgcacgacgcttccaggagcaggcgggacatgtacgtcggggtcgggcgcgacggcagcgacgaggaggacgtcgacgaggtccggaggccgggggtgattgcgccatcggagtatagcgtgagcggtaaggtgatcgcgtcagaaacggacatcgtcatcgacctctgctccgagggcaccgccgagcgggtgctccgccctatcatgacgaggcccgcgatgagggaggtggtccggtacgagccgaaggacaggcacgtcgacgtcgccgacacgtcgccgacacgcgccagctctgcctcggagcagggaagcaagggccacccgaggcggtcgtccgtgtccgtgggggcgccgcctcaggacgcgcgtcagcagcccgcggctggcgtccgccaggtcgaggaagaacagcaaagccgacaagcgccgggggcgtcggcacggaagacgaggccagcaccgccgtcgtctttt

SEQ ID NO: 2523 - DNA, 800 bp, Zea mays
tgcctacataagacaagccaaacgtactatctagaatagaatgagatccaaagagactcttttagctagtgtgtaataggagtcagagtccacaacatgttatacccaagaggcctgctgttattcgtacctatgcagatgcagcaatagccacggtttggcgcctgtaaggaccaacaagatcccggtgatcgcccagcacctcaagttttcaattgccataggcaggcagcgttgtacagtacctgccggtatttataggagctagctagctagctggtggcgcttctatatacagagaacacatgcatacgctactgtccaatgtacaagaagacagtaaaactccacgtccagtgctcgcgtcctgcatacgggtgttatttgtctccaggtccagagccagagcctaccacaggccacaggtatgaagcgcgagacaactgtgggtgttcggttcagattatttccacgcacagctttttagtttgtttccgtcaaaattattttagtacaaatcgttcaaatcaatgtaaacacataatcagtcgagtcatcgcaataaaggaatccgtcgcttcctatatcataaatcttatagaccactttatctttctccacacgtaattctaacgatacctagatttttactacatccaaattctcaaaaaagttcgtgataaaaaaaaactgaaccaaacaccctcaacgatatctttcaagtgcccaagtagggtagggatgtaacaaacattcgcccacagatctattcagagctgcacggacagcttctatggcag

SEQ ID NO: 2524 - DNA, 719 bp, Zea mays
agctgtagtttcactcttttggcacaacggctgctgttttttgttgttccattattgctgttagggtccgtatggattccttcattttagaggattagaatctataggtaggttatttggtttggaatttgatattacatcattttccaaagtttaagtataagcctgtctcagatttgtaggacgattgatgtaaattgattttttatatcaccagactatatttctatttgaaaacttacaacatgtttttcggctcgctaccctatactagaaatataacacgtaaatatttttctcgtatggataacaatggtatacagatatattccgcataaaaagcatattagcttaattagtctgtgcctaggttatatggttgttagagaatggagttgaattcaaaggatgcaaacgaggtcttagagtaataacgttagtgtctttttggcagtactttgacttcttagaaaaacagtgaagttagagaaaaccgtattttgatggctttagctcgttgcaaaaaaaaaaaagaaacggttttggtttctctatttctgcctagattttggccttggaagatgttctcgtatatgcttgtttggtaagtcttttgattaaaccaaaaaaaaagctattaaaacccacgataaaagaggatcttggacatacacgagcttgctagctatgctggcttttctgctatggtgagaaaaaaa

SEQ ID NO: 2525 - DNA, 751 bp, Zea mays
cggcggcgaacgtcagcgggggtgtcgaccgcggctgcgtcatctgggccgtcgatctgctggacatgcggctctacaccacggacgttgaggacgtgtacatacggctcgcgcagtcggagatagacgcgctcaacgccgcaggttctgactcttgacgcgatcttcttcttttttttaattaattctgagcacatgcggctttcaattcggtacttctgcataaagtccagtaatattataggcagtttctatgattttaggcactcacagttgcgcgattctatgcatcactgcaaatctatgtgaattttaaatttttttcccagcctaggaaccttgacatgacacatgtagaaactagaagagatatacaccgtgcgcacagttacttatataaaaagaataaactatttattggtggatgccgacatggcacattaatgtcgacagctaaacgtaaggtaatagatgatgtgtggcgtttacgtggatgtcataaatatatgtggtagtgagttgtaattgtatccgctagtggactgctgaggtggagtttagtattaataaggtcagtagaaattttatttgtactttagataagctgtcacataagcacttttgatgtgcggtaatgttttcgaaaagagacaagggatgagtgtaggagggtaaagttctcttgttaccattaccaattatctatgaatcatagaaatttctgttaaaaatagatgttttatccatattt

SEQ ID NO: 2526 - DNA, 720 bp, Zea mays
ttcttatttatgtttcgtgcatcgactgatgaacgatggattcatgctacctaaccgtgatcatttctttgtttgaaggcctgaccacaaccttcaagatatcagaaataaggtatttccaattaaaaagataaatgttgattctccaaaggctctaacaacattgccagcaaagagaaaacagaggtctatttcttccttggtggttgacactccaagcgtagtaaagcagactggtttgactggaaagagaaccaaagctaaaagaagggcagcagcttctcttgcaacttctcccgttaataatggaactatgaaattaccaagtaaatctgaaaatggggatcagaagactgataaaagctgtccatcacaatctaccaaggcggcaacaagtgcaaacaaaactgaaaatcaagaccaaaagaagaccaagaaaatttcggcaaaacagtcgaccagagcagcaacaccagcaaagaaaaaacaggtaaatgtgaagaaccatctgacgtttgtaacatcacaattttatgtcaaagttctgtatggattctcttgtaaaaatggcttgttctcacaccattatgctgcaaaacagcgaaatacagatgcacaagtttcaagtaagccatcttccgaaaaaagaaagaacagcaagacagcggacaaagatgggctccgtaaatcttcaaaagtacctaggtcaactcccaaaaa

SEQ ID NO: 2527 - DNA, 724 bp, Zea mays
atcgatgtgttgttgggtggctatttatattctgctggctaaacaagtggacaaaaggatcctcctcgttgcaatacaaaatcagaaatacattcctttgggccctagattgaaaatgaaaacaaatgtatgatggagataaagattctatcccatatgcccagattatattgatggactcaaatggtatacgtaggatagcttcattagagcaaattggtcgtgtataatttgaagctctgggtctaaatcgtgttagtaaataatacaaatatagattaaacgtgtgacataattttacgtgagaatacagtccaacgcaaaaactatagccatgtctctttccaatgcgacttataaaatgtatatattatagagtggatggactaaagttcagtatagaaacaaatataactctagctatcataatatatagtaatgcaagctgcgaagttcggagtataaacctctcaactaaatagcttctctataagctttagaaatagctttatatttagattttatagtagaaaaaagcaaaagcagcatgcaaactagctttctagctaatagcacaaccaccaatgatgaaaacataacccatgagagaccccctcttatccaaattagtagcataatcagaatcaacataacaaataagtctatctctagattttctaaattgcaaacctgcattataagtatctcacaaatatctaaaaat

SEQ ID NO: 2528 - DNA, 761 bp, Zea mays
ttgggattttggctcgaagctagcttttgacttccggctgttggctttttggctattgacttctgtaaaaaattaaattagctttttagcacaccaaaagccagaaaagctcatatcaacatgcttttcagttttttagtttatttcctcaaaagacagcctttcaaaaggcaactcaaccgctggattcttagtttcaacttttggcttctgaaactaaaaggccgtcagtcatgtatcaggtgagtaccacctcaacaaccctagttcatgactagtcttaccctacagatgttttcttgaaagctgaaattcctccttgtatgcaatgcacgatggacatagtaaggaagcaatgttaccttgacacttactgtccaatgttccaacttatctgcgggtggactttacagtgcaaaatggtcaatatccattgatggaaatcctgactgtaacatttttatcccttgaaagtacaaaactgatttttcatgctgacccttcagactgtagtaatttgcaattacgcagcaagattatgggtggtatttatctgtcaaaaatactctgtgcgcaaggaaacttaaagcagtcaaactttcttttgcatatagtaaatttgagtaaatatccatagaatccacaccgaaaggatctgtcctgactcctgagcagttcttcgaaaatcatctcagcttcatcaggtccatcatactgtactgaactgttgcaatttgggcctgaatgtaaccaacagcgga

SEQ ID NO: 2529 - DNA, 783 bp, Zea mays
aaccaggtcgggcgtaaggctgtgttcctgcgatgctacgccttctgcatgagtgcatggtgagataggatcggcttctcttgatgtgtttattttcaaggtacatctgcaagttttcagaggttagggcgagtggtgtttgatgaaatgctcaatagagctgctgcattgtaggtgatatttggtttaaatatggagtgcctatggcttaattgatacttctttggcttttatttaggtggatcgacatgttttagtggcccagaagtctgtttagttacttccatgtgcaagtggagtgtttattaaaatctggtttcctgtgattttacctaaaagactgaacagaacttgattgcgggactaacgagtaataagagttgttccaacttgcagaagtccaatttattatgggttctttatagtgctttgtgctcatgtactttaagctaacagaatggtttgacatttgtaaaacctctggtcatgtattccacacggctattgatttgctatttattgataagttcttagctccacgggcatcagaaataatggaagatgtgaactaattattccttccaactagtagggaattttcactgtgatgatagaatttgatggatatgttacattcaagaagttataactatgagggcttaaaactaagtcccttaaatgattggcaatttctattcaatattgatacttgtacatgaaagctatgtcctgccaaaaattcttgctacaccacatgtaagttataattgctaaatgaaaaat

SEQ ID NO: 2530 - DNA, 788 bp, Zea mays
atcctgagtgtctgcatcgaccatgcatgtctggaattccaacacacacaaaaatggttcacgtgctctcgcttaaccacaaggagaggtactactatatatacacccttcacttgaatggttccatccttcacttaagcaagtttatggagtcacttgacaagaatggtcaacactataattgcataatactacaagtttatggcaacaattagatgaccatcattgctctattattcacactttgcttagtattgttcccatgcatgattatgaactaaagcggttggatgttaaaactacatccttacatggagagttgggagaatgacatttatatgaaccgatttcaagatgttgttattcatcgaaaataaaatgtttgcaagttatatagaaatctctcatggttttaagaagtcttattatttatatgtttattgtatattatttaagttgatgatatgctaattgcgacaaaaaaaaaaaaatcagaaatagctacattaaagatgcaatttagtaaataatttgaaatgaagggcttaggtttagataagaacattcttggtatggaagttgttaaagctagaaaatctagcaagttatacctcagtcagtgaggttatattgaaaatgttcctttttaatatgcatattacaaaataagtgagtactccattagaaacatttcagattatctttagcatcatgtccacatcgagatggtgaccttgagtatatgtctagagtttcatattcaatgcacactagtagaaaaaggctca

SEQ ID NO: 2531 - DNA, 785 bp, Zea mays
ccgcacactgatcggcacgccccagtgcggcccgagtgtctacgtcgccgctgcgccttacgttcgcgggcaaggcgagtgggacgacttgctgtctaagcgtgccttaacgcttaagcgtcgcttaagcgacgctttaaaaagcatgtacatgagagacacaagaggaaaaccctagactaggagattacaataataccctttactatgggcgtcaggcgtgtttggaatggctctagagcagaactccaaggatgagctgacaagagcctaccaaacaccctaactccagagttactaactccatggagctttcagagctgtactacaatttttttggagtacctcttttgttgctccgaaaactctaaaaaagcaacctagacgtggagtttggaattatttacccgccactcccactggttatgagaaatcaatttaaactctagagcagagctgctccaccgagagttttggtgtggagctgctctggagtggagcagagccatgccaaacatgccctataccttaacaagaacagtacatgccacccaataataatttagctattgttgtaccttttgtcctttgtttcagctgtatctttcatatcttaatcacgtaactctaactaaatatcctaattactaatttatgatgccttgctaatgcctacccattttctatatcagccccaatacatgggatcttgacacaattaaaagcccaggggtgaaatgaatttggctggagaaccggttccctgggattggaaacccaaaaga

SEQ ID NO: 2532 - DNA, 789 bp, Zea mays
aatttattattttgaaacagagcgcacaaaatcgtggaggaggttcaaaaagaagcttctccatcccacacaaactgcatgtgttctgatcaggcaatccatcaattgatgggaattcttgagatgtcaccttgctctgaaaaaatcaaggtaaattatgttcaaatactaaatgatgcaattgttccaatctgagtgaaataaaatttatattcttaaccatggataaatcatgcgcaggattctcgtttgatcttttagcatcaatgtactatgtcgccaagcaattagacagttatataatagccatgagcccatgagtatgattagacagtgatatcatagccatggcccatgaatgtgattattgttcaactatccaactgtttggtggcataatatgttgattctacagaatcaaataaagtcgcagaaaacatagggagatcgaaagggttatccactcacctgacaagtatgctggtttattagactactcatgtgatctctaagctcctcagcagttaatccataaagtatagaagcccctctctttcgtcttgaacttaaattgaccccttttggtgtatgatccaatgcaacagtcttagcatctttcatctcaatgtcaccttttgcacgggacaattcctcttccttaacaatatccatgttgggtacatcttcactaccctgttcaagcatattattgctctcagcattaatgtctcccaatgaactgcaaggtgaatttgcaggtaattttgtgatttcccaatgtactggttc

SEQ ID NO: 2533 - DNA, 747 bp, Zea mays
tttctctcagataaccaactaactggaagcattccagtgtcattatcaaaactccatagtctaacagccatgtaattccttttttccttttcttttccctcctagacgacaatgtcatagattactgttttctactttcatcaattaactgactcaagagtcaagattctcttttaccaggtcactgaatgataaccatctagatggaaaactaccagatacatttgattccctcacagaacttgtaaatctgtatgttctccctccttccttccctcccaccccttcatgcaaactgcttgatgatatctgacctttgatcacagtgatatttcttccaacaacttcagtggtccattaccaccttcattgggaagcttggcatcactgactacattgtaattctactgaccgtttccttttatttttaccctcttaccttgtacatactctttcatgatcttctattgcactttgcacaggcacatgcaggataatcaactatctgggacccttgatgtcttgcaggatctctccctcaaagatttgtatgtccagaccctcttctctgttgccagttaacttttcatttattatagttcatcataatctacagattaagcagaatatctgcaattatttgggcagttaactgctgatttaacccaaaaaaaagaccgcctccaagtaatactctttgggtctattcctttgaacttaaactacagattataatgataggccgac

SEQ ID NO: 2534 - DNA, 770 bp, Zea mays
aaagatctctgattctgttcgctccaaattaattacatgctcttttctcttttcaggaggcttctcaatggcaactgccaacagttcgtgattagtatacacaagcattatggtaacaaagaatcgattagtcagatttgcaacagcatatatacctggtacagctaaatttatttcacggggtttctttctttcaggaacctcagataaacctgttagtgaaacttgaaaatcatgtatcatgacatgaaaacaacataagaaaacacataaatacattacacaatggtcaatgaaagttaaccttttttggcatcatgtctagactgcaccgaagcttgcttgctttttggctcctcagccctctgatgcctacctaattgagccatggaataatcacgtctagtctgtctttcttgatacttggacatgcaaaatactaccagtagcgcgagaactatgaatagcacaatagcaagaagaacatatccaacagttctgagggttgaaggcttcttcttcttggatgacgtagaattgctatttcgagcagtagatccactagaagagtttgatgctgcattagatggtgaaggagatcctgaaggggatgaagaggacgatggtgtttgtgttggtgagcctgtaagtgaaaaaggtgaggtggagggagctatgctggtattaaaaggattcccatcatttctgtacgcaaaagaagttaatggagtatttgtaactgggccaaatcataaaggggtgaaagacag

SEQ ID NO: 2535 - DNA, 738 bp, Zea mays
tgctattgaggccttgaggaggtgccctgctggattggatccaatattgggagaaacccttccttttggtgttgcatatcatcatgctggtcttacggtatggaagctatcttctatcttcataagatacacaaaatatcaaatatatatatatatatatatttatttatttatttgaaatttgcactgctaaatatgtgctaagtggtgagagtggtctcactaagctaccaggtcgcgggttcaaagcaaccccttcacatttgcgggggaagggttgccttagttttatcccttccctagaacttactcacatggcctccgtcactgggtctgccctttacactgctaaatttgataaagtgatgccatttttacctaaccacagctgggcaaagggtggtaggaactgatctgccattacctgttctgattgatccaatgagcgtcatcgccttctgttctgtggcaggtcgaggagagggagattgtggaatcatgctaccgtaaaggccttgtccgtgttctgactgccacttcaactttagctgctggtgttaacttgcctgctagacgggttatattcaggcagcccaagataggtcgtgattttattgatgggactcgctatagacagatggctggtcgcgctggtcgaactggaatagacacaaaaggagaaagtgtaagctacaatatctttgttccactttattctattaaagaatggttctgacc

SEQ ID NO: 2536 - DNA, 803 bp, Zea mays
gtttaattacttgttaaattatccatggaaactgagtggattttgtcagaattccgctgaattttaccctatgcaccatattctgatgtttacttctattacttgactagtcatttactgccctgccatgtgctctgcaatggatatggtctaagatacaagttttcttgctccatgttcagttaaattcattggttaactgctaatttgtgcatgaaagagaatatttggtgctttaatccatcaccatagattatttcataaccatgttatctgtaggttagtacaagcatcttgctccctcaccagcagcagaccttcatggctaataataccataatagtaaaagcctctctatctgtctatatggttgcagcactccctaggcattgctagtcaacaggttgacttatttttcatggaaagaacatttttgcaccacgacatgacaaaagatgtgtgcacttctataatctgtttggccatgcttaacataacagctagtgacagcattaagatttggatttttcccagggtctcactggaaaattgataccatagtcattccttttttttttgagtgtcctgctgtaatccaatattgttttgctgcatataaagtgcagcaacaattatcttactgatttctgacaattttcccttagcaggatcatactgtcttttggcgtttcttctccggctctttttcgtttgcctgtcggttacaaggtggaacgtcttcagaagcttctccactagattagtgtaaatagtagacttgttcaggtttagtttggttggaa

SEQ ID NO: 2537 - DNA, 760 bp, Zea mays
tgcgcagacgatggagcgaaccatggagtcatcagccacaccacccgccggcaccggctaggaagcagagcagcggcaggggacgacgctatagcgtaccgaggcactgaggccgatgaccatggtgaagaagacgacgccgatgaatgcgaccatgcagatgcagaagtcgaacttgtccacccggtacaggtggcagaactccctgaccttgatgagcccgatcatggcgacgacgatgatggacgagagcgccaccaggggggtgtacttgaagagcggggccaggaacagcagcaccagcaggatgcacaccgacatcaccacgttggacatgggcgtccggcacccggcgtggaagttcaccgccgatttggagaacggccctgtggtgaggtagcaagaagtgaaggacccggcgatgttcatgatgccgaatgcgatcatctccttgttcccgtcgatctgctcgttctttaccagcgccaggctccgtccgacggcgatcccttcctgagagccatcgcagataataaacaaacaaaatcccatgcaagcctggctgagagatgcatcagaggaaacatgttcgtactgccagcgccaggatcccggacaagaaccccgctttcattgccgtattgacgtgcttgtctgtaaacgtcagctgcgaaatagacagtgggttgatccctttcttcagatcgccgacctgcgtcgtcgtgatggcaaaagcaattaggttaaccatagcagtctc

SEQ ID NO: 2538 - DNA, 772 bp, Zea mays
aaggttcgttcagaagctcaatacccaaaagggaaggatggcctccatacctgcaaaacacaagtccaggaaagtcgcctataacattccaaggacagactaggatatctaagaacatcagaagctactagcaaatgcagttttcatgctcagtgagagaagatgcaatcgctgacataaccagctcaggagaattgcaggtaattactccctccgttctttttaatttgtcgcggtttagttcaaaaatgaactagcgggcgacgaatattcgagaacggaggtagtaccattcaaacggtttaagctgaaatgataggtgaacgaataccttatcgccaggaagtcaatgacttccaatgtttgtgagatatattcaggcgagggccaggccacggaaccatccctgctcgcactatgttccattccattttgagaaccaggagcagcatgaagatcgattatacatttcaaaccataagatctaatccaacagaaataaatatagcatcaggaaaggtcagggatattaaatactgcaaagaagagtttggaggcacaacatactgtgcccatgaaaatgctaggtccagggctgccaaagaccctccaacaaatggagaaggtggataaggatcttgtgttatccaccatccgacaggaattctcacagtattaaatttcgtggcgagacaggaaatcaaagtcctttgctgtaatgaaacttcttctgtgctccttaaaaaagcaaaggaagagtcaaggatgtatg

SEQ ID NO: 2539 - DNA, 739 bp, Zea mays
gtagcggattgtttttggacgcatttctgggtaattgttagaacattttcccactgagttgagtagtgtttgtttattacaagatgaattgtcatgcctaggtggaatagcttcttttatgtttgctcacgacgttggttcaagaatatatttgtaagatgaattgatagtcgcaggtggaatagtttctttcacctttgctcacgatgctggttctagaataacatgtatatatgtaattttttgtctcatgttttgagtaattctgtttgttcctgataatgttctgattttttgttgtcgctttgcaattgcaatatgccaactcttttttttcaactgtgcctgtactgagatcaactggtcgaatcttagaaaccgtgtacgtggaacttgtccacgttttgcaaatgttcgttccgtgtcggggacacgggaacaatctcatcccgattaacgttcgttccgtgtcggggaagcgggaacaatctcatcccgattccccgtagtgttaaaatctttcttttaagtactgtaccacgtaccacattccgttcttggaccccatcgagctgggaccctggttattaaggatcaaatatatgatcacaaggatgctagtaatgtattccatgatgctgttatacattatgaacctttttagggaaattgtatctgctataagtaggcatccattctcttttgtaagtgtaaacaaagctgcattagaaaccttttt

SEQ ID NO: 2540 - DNA, 766 bp, Zea mays
tgcaaactccgaaaattgggatggttgggcctaattcaagaacagtctgcaatgatatccctgaatcttgtggttcacctgaagaacaatcatgaaattattttattacactcggaagcttcaacacttgtgacattcaataagacaaacttacctggccctggagaaataagtattcctcttgggttcttcctataataaatgaaaagggctctcgtcaaattaagattagctgagagttgagacaaagtataacaatatatctttttcctttttgtattgaggaataatacaaagcagctataacaaaattgaaaatgttctcagagaactaaatatacctctttacatcttctatggtcagttcatcattgcggtatacttcgaagttcaatccaagctcccccatatacttcatcattaaagacaaaatgtcagcaaagacatgttttgctcatagcatatgcttcttttgttttccttctcctctatactatgtttcaataaatgaataaagtgtaatatgaaattgagtttgaaaaaaaaggataaacagatgacacctatgaggtacaatagaactgcacgttagttggcctaatcgccattaatagaaaggtctactctcagaaagcagtatgtcatcctacatcgtacaaatattgcagcattgcaaagccaaattagctatgtcaagtgaacttgtcagtattagcaaagtcaacattccaaaccaaaccatgtcacatcacataccctagtaagg

SEQ ID NO: 2541 - DNA, 802 bp, Zea mays
gtgactgcctgtacttgtcccttgtagtcggcatcacgttccaggggatcccttgcatatccttccccttcctcacgtccatagccgtgatgtgctcagtcgctttactcgtctacaaacaagcacacacacacaaaaaaaaatgcgttcgtgttagaccataaacagaacgtttctagctgcattctcatagcctagatacggtgatgatgatgatgagactaaaattaaacgaaccaaaacaatggtcaaacaaaaaaaaaggtctgcattgaacctgataggcattcatcagttcaggagcagcatcgcatatacacgtataatttcaaggcatgggcacggaatcagcaggggattgaggttgaaagacgaagaagtgaagagaacggggctaagaaaagcaggagcgtctcacaccaaaatcccacgcccgcgactcggactctgaatgacaaagaacagatgagcgggtggttgcgcttacaggttggtccagctcatcgtcgtcggagccatccattcgaacggcgtggcggtctccttcttccggatgagctccggtgaggtcgccgtcccgctgcgacatgggccggaaagaaccgcccgccgcccgcatggcaaagggcgagttttgaaaccagacccaggttttttggctcggagggtttttccgggaaaattttttgcttggcaaggtttcggttcgtttggcgcccctttgaccgggtttttttggggggttctccaagccgaaaagggaagccaccccccggggaaattggggggggggtttttaagg

SEQ ID NO: 2542 - DNA, 801 bp, Zea mays
caacttacatatatattccgttaaatgatctgcactcagccagcatatcaagtgcagcagcctgaatactaccaggcacccactgatagcgatacccagccatctccgcagaagcgcagcttcacaggatcttcacgaacggtggaacatcctcccttggaccatcgagtgaccgatacatgtataagatgtccacgctttcattcctttcgttctcatcagactggccatttatcaactccaccaccatccgtggcagcacctgagccacctccttgcacccttgcagggtcaggttgcagcctgacatccagacgaaccgcatgttgtagaaatggtgcatcccggcgaagaggccagcgtcaccgaaagggcagtcccttatctcaagcttctctagctttggacagccctggaggatgtattgcagcgccacatcactgtttccagcaaatgctacggagagcgtccgcagggacttgccatgcctgccaatgtactcaaatgcccgatcagtaagttgcccggacgtggatagcctggtaagcttgctgcaattctgaacgatggcaccgaatccttcatccataggctccccagtcgcatggtccggctggtgccgtcccattatacataaccggaataccttcagctccgggcagttccgcgacatgtccacaacagcagcgttggtcatggtctggcaaaaatatagtatcgaacggagagcagggcagccccgtgagatggcggtaaagcccacctctgacaccaactcgtcggcgtcctcatgtgcattca

SEQ ID NO: 2543 - DNA, 755 bp, Zea mays
tggtcagttctttgttgttgctgttaatcagcctccatttgtgctcactcaagaaaagtgtagcaacagcaacaagcgcttgcatattttgaggacctgctgtttattaattgatatgggttccctgctgtttttctttctgcataaatttcaattttttatctgttcatttctgcttttgattccttatttaaactttgcagacaagaaatattggtcatatagagacagccctgcacagcggtctgactctgcatgtgccagtatgagctatatatatatgttgcatttctccatgtttgggctcagcatgtaatagaactgaaggaaggttgttgcaagacttgtatggcatgcttaaatttctggacaaaatatagcttatactgagcctatgacatgcttatttttttaatatatatatatatatagcttaaattttgttgcttttattggcttttgttggtatttaagtttgggatttgatccacatggaataaacaaacaaacatagttgtttgggttttgggatataatccatctggcataaacgaacaaacattggttgattgggttttgggatttaatcccacaagggattgggtgaaaggcttggaatcacccaatccatgtggggggggggggggggaacaaacccctcccaactaaccaaacttgctcaaatagctccgacacaagtatcgggatttctaaactccgtcgatccccctaaacaaaacctttacctaaagcta

SEQ ID NO: 2544 - DNA, 830 bp, Zea mays
acatggatgagaaggtgaaacaccaaaataaaaatcattgacttaatttcattgatcggttatgctgtttagccattcatttcgttttgaattaacaaactggtttactgtatgcattttgttcaggtgacgtatcctggtgccacaaatcagaaggtaattgtcaaccatacctcttttcttggctcttccattctgaaattgattgctaaggatgatgtgctgatgctgagagctcagcttcttattaatcaataaagttactgttgcctgtatacttgtctaaaagtatgcatccaaaatgcacattttattgtcgtgaaatcatctatatttgtttttcttgatttctcattttcaggaaggtcggtcatactcaatcctccgtgatgtgtttattgcccatgtgccggtgagataaatgttttttttacttattgcagccaaaattgaaattaatgtcttagctcatacacttgcaaatctctatgttaggttaaaaatgggaacctacgaccaaagtgtatatacactgccttaatgttaaggcgcatgatggacgcaatcgtaaattctgacacctttgatgataaggcaagttcaaagataacccgtatatcacttcaatgatgggctcaaaatatttttctgtcgattaaagctattttttcctttaccaactctttctgaaaaaattcatgcaaaatcttttgtgttcatatggtagaattaggatagtttataatgcaagtggtatgtgatgggtggctctgggtcactgactagttcgtttgtgttttgggttgacctaatgacccaaagaataggaa

SEQ ID NO: 2545 - DNA, 721 bp, Zea mays
aagtgctcaacatttggtgcttgggacctgaacaccatgtcaccgtgtttccacagttcccacacagttcccagcaaaagagtggtggagagggtttccatgggtactcctagcggagctgtggaggtccacagttcttgcaccgcggcgatcatgtttgggttcactccgattctcatccagaaggctcgagcgaatggacacataaagataatgttgtttgtgtcctcaccggcgagcccacaaatgccacaagtgttcatgtcaaggacattcttctttctcaggtttatattgcagtgactgtgattctaaatcagaagccaagtaaagaatttttcactccggacagaggccttgtagatgagatagttggctagtcgcatcgtcttcatcttcaaagaagcatgagggcacgtctgggttgtcactctggttcacacctaacagcatggactccagttcgattgtcacctgctggctcaagtgtggtttcaattgtgttgcaagtctggaagacataacttcaattgaaactcctctcaggaggtggctgtgtagggatggcagttgcgaggacaacagctcgtcactaatccactgatctttccagaatgaggtgtcttgcccattgcacacctgaacatatgagatctgacggtaggccaggaagagatcccggtaggcatcccaatccaaatggtttctagtgagcactcta

SEQ ID NO: 2546 - DNA, 770 bp, Zea mays
tgagcttgattttaaccttcaatgcaaagatcaacacttatatggcccctttgctctgcaaattggctttctctagtcgaaaaatcaacacatccaaacccaataaaccaaaaggtccacattacccatgatctttcccagctaaagaaacaaataaaaaaaaccttgtaccaaaatatgcaaggcatgcctctaattggtcgactatgattaagcatgccaaaatgctcacgtggattactcaaagcaactaagaaatgagtagcgcatatacttcatctagtctgaaattgtgatgaatttgacacaatgtatggcaatgttccataatccatatgtaatctagaggcactacgttttttattaacttatctgtatggtaaataacatttgaaaatactgagatgttcgaaaagatactgttttcgaaaagaaatggaaaatcgacttacaataactgtcctgaccacaaccttcatctcccccttatgttccatagtcaaatcaacaaatctctccgcaatgcgttcaatatatttcagcctgccattgtccgccaggacagcttcataaaccaacacaaagttaggcactgtcaaaatacatgacaaacatggaacaaactgtagacatttgctaaatcatgccaagtacgaaaattcaacagagaaatcctttaatcaacgggtgtagtagcaccatataattgattctacaaccgcatttataaacacgctattaagatgggctaatcaaccttatagtcacga

SEQ ID NO: 2547 - DNA, 753 bp, Zea mays
cacttgtagtgctttatgtgatccgctttcgcaggggtgatccgcacgcacttgccgtggaaccaccgctcgcagatgtcgcagccgatccagaactcgctcgcgttgtaaaggccgccgcagcttccgcaaaaggtctccgtgtgctcctcctcgtcttcctcgtcatcgtcttcgtcatactccttggcggcaggagctgctgccctgaaactcttggcatggccatcttttcctctctgagcgagaatagaaagaaagacgcaactcgttctgagtaaggatttctacacgaactggaggcagaaccaaacacagactggagcgaaagcaaactgttggaaagattcatgtgggcacctttgatgagtgtctggacttgccgctgctatcaaccccagacctatctctgacgtgtttccggtccgcgaatgcttctaagacggaaggaagatcactcatcatgctgaacaagcgcttcctaagagataacaaaaaaaagaacaaataatcgaatcagaggctgcatcaattcagtgaaaacaaaaacatttccttctctcgcaaccagtattccagccgtgatctttaatagtatcttactactacaaacatggcttcaatgcaaacagaagaattgccagttcaaatgcacgtgaataagcaggggtgggtatgtacagactacagagacaaaagagtccaaatgtctaattagcttttctacacctacggtggaacaaatgatgactt

SEQ ID NO: 2548 - DNA, 735 bp, Zea mays
attgtgcgacccaggtgagtgagatcgatccgcggcgagctcttcgctgcggtgcgtgcgtgcgtgcgtagagtggtggatccgggcggggaatgagcggatcgccgtttccttttcctgcgtgcagataaggagaatttgtgtctctacggccttcccaacgggagctgggaggtgtcgccgccggcggaggaggttcctccggagttgcccgagccggcgctcggcatcaactttgcgcgcgacggcatgcagcgccgcgactggctcacactcgtcgccgtccactctgactcgtggctcatctccgtcgcattcttctacggtgcccgcctcaacggcaacgaccggtaccaattctgttctgcgacacacgctgggttcgattcgacttttcagtcagttgtctggtgttggctgaggtcgtggaatgcttgttctcagattcactcctcgaacgtgtggtttcgttaacttcattgtttgccccccttttttttctctgggtgaattagctgtttgattgttaggtgactgggacactttggggatgctcgtgtttatgatctatatttattttgtttcacttggtgcatgtgtttgcatgtgaacatgtttattgtgctcctctttttggttcgcttgagtgaattgagggtcatgctttagggatgagttcgctttatctgtacttttgcggggctgtctcttttctttttgtttctgtttatgctg

SEQ ID NO: 2549 - DNA, 785 bp, Zea mays
gcggtgaccgtgagccggatgatggcgccgctcaagcacgtgcggggcctggagttcgcggcggacgtcgggtacgtggacttcctgtcccgcgtgaaccgggtggaggaggaggcccggcgcaacggcagctgggacgcgccgcacccgtggctcaacctcttcgtctccgcgcgcgacatcgccgacttcgaccgcgccgtcatcaagggcatgctcgccgacggcatcgacgggcccatgctcgtctaccctatgctcaagagcaagtgagttgccctccgctccgctccgctccttcgccctgcgtgcagtagtacagtacaggagtggctgagtggtggtactgccattcagtgtgcagttgccgtttgcggcccgccaagctagctaggggccgggacgcatgtgagccgccctgccttctctctgctcgtcgtgtcactgacgcctggtcctccgggacagttgctgagccggcccgtacgtacctgtaagacgacggtcccgagcctccaccgccgcttctgttttggatttagccgtgtcacacagatcttacggaggaggaggagtactatgattgacaaattattgcttcgcccgacccgaggctagcgcacagtccatgtcatgtgggcctggctgtgtggtttccgtcctgatgctgatgcctgaagggaactgcctgcgtgtgccgtgcgtgcaggtgggacccccaaccacgttggtggcgcttgccggagggcgaggtcttctacctgggggcgctgcctgcgggtctg

SEQ ID NO: 2550 - DNA, 820 bp, Zea mays
cagagacgcgcgcacacgcgacagcatgcatgcatagatgatgagcattctgctctgctggatggcaaatataataaaacgaatggaatgcgaagaaaacgtgaggtcgatggatatatatatcgtcgagctccgtcgtcggatcctcaccggccttagccggcagcgagcgccagcagccgtgtccgtgctgctcgatgaaggccagcagtttctggtcctcctcggacgtccacggccccttcttcagcccggcctccttctcgcagcacggcgaccgccccatcgcagcgccgcgcgcggcgaccacaggagcgagaaggacggcagggacacgcagctcgcccagaggtagtagacgatagctcctctccagtcagtcgatctagctagtgacaagggaatgaagtgacctggtcggtgtcgctagctagcggcataaatagagcgggggccggggcgtgccgcgtgcgcggtgccctagctactagctggggcctgggcgactgcccgtacgtgcgtgcagccgagaccgagagtaccccagtagtagtactgactgactgaccagtgcggcagtgcggcagtgcgccagcgccggccgggttggcgagaatcttcctggctttccgtgcggccacggccaaaggtggcccagacgtcaggcggcgcaccccgctttttccgtccccccctcgtcatgcgccgctgcacgtgcgccaccgttgggccgacgggcggacgaccgaggccctggtgccagcagacgaaccaaaggtacgtggtggtacgtctcccgcagatagatggcgacagcggc

SEQ ID NO: 2551 - DNA, 788 bp, Zea mays
gcaggaatggaagaggcaataaatacatgcaaagaagaaaaaacagagaatcccaaatagcatactactagaaagaggcagcagaccagcctttatttatttattttttttaaaaaaagagaggtataacttctcagattcaccttccaacacgatgaccaaggcgtgtagtgaagttgttcagtactagctctggcttatgactcgtagggttgccatggttctgtaatgtaaagagcaaaccaaaatgtaaacggactttacaaggtcaggttctgttgttctgcttcattgacttcacatagaaaagataaatttgatgctcaaatgccatttaagagcataacagacacactgatcacagtaaaataacataacaaacagatctcagcatacaatgtgctactgataagcagctactagccagagaaaaaaaaatccacaggtgacatgtcctccggataaggtaactttcatctttacatcaatctgcatgaaacagttactaaccaacctcatccatgtaacaatttgatacaatactgtaaagcatggaaaattaaaacaaggacatgtcatgtcagaaagagataaggaccagcctatatatagcagacatgtcatatgacaccgaacatggccatatgcatgcttggtttttgggcacaaaactcatatgcctaaagcaaactagggacaacctagagacaagtaggatagtgtagttaatagcacattgatttttttttacttcattttccttgcacctttttgtcttaaagttgatg

SEQ ID NO: 2552 - DNA, 722 bp, Zea mays
cagcaggtcacaaagattcacagatcctggcacaccatacttggcgtatacctctgggttggctgcatctccaaggacagcgccggttaagaagtcactgcaaaatggctttgtttcgtccccactgaatcggtcagtcaggcaatcttcaccaagtaagcttaccggcaatccatcgaggagggtgtcaagcccatcacggtcgagaaattgtgtggggtcgggcacttcatcttgggatcaccagggaagaaactcatctggatctggttatgctttgaatggtgaagtgaggaggaggtggcatgggagtagtaaggttgactgtgagcatctgttgagaattttatccaatcgacatttgcagtggcggtgtgtgaacgcacaggctgaagctgcactttctgcacaaaaaatgacagcagaggttagtatattcatttgacaacaattttgaacttctaaattctaacatgtgaaatgtgttcctcctgtataattaacataaattggtatcatctcagaattcagtagtatatgtatacatggctgtatatttggattttataacttgcttgatttattcaaatttagattagtttgtgtaagatgtaattgattatattcaaggccagcatttgcaatctgagcaagctataaacaggagcaatgtgctcgcacttatctcctgattcatctatttttacaaagtaaatctgtga

SEQ ID NO: 2553 - DNA, 810 bp, Zea mays
  unsure (1)..(810): unsure at all n locations
cgccggagccaccgccgcatgtcgcgcctcgtggcgcgggccaccggcgcggcgtggaccagcagcagcaaggcggccgccgccggggacggatcaggaggaaaggacctcaaggtgcctgtccacgcgggcaacggcgagttcctcatggacctgtcggtcggcacgcccgcgctgccgtacgcggccatcgtggacacgggcagcgacctggtgtggacgcagtgcaagccgtgcgtcgactgcttcaaccagaccacgcccgtgttcgacccggccgcgtcctccacctacgccgcgctgccgtgctccagcgccttgtgcgccgacctgcccacctccacctgcgcgtcctcgtcctcctcctcgtccgcgtccagcccgtgcggctacacctacacctacggcgacgcctcgtcgacgcagggcgtgctggccaccgagaccttcacgctggcgaggcagaaggtcccgggcgtcgcgttcggctgcggggacaccaacgagggcgacggcttcacgcagggcgccgggctcgtggggctcggccgcgggccgctctcgctcgtgtcccagctcggcatcgaccgcttctcctactgcctcacctccctcgacgacgccgccgggccgcaggcccgctcctcctgggctccgccgccgccgtctcgggcgagcgccgccaccgtgcccgcgcagaccaccccgttgtgaagaaaccgagccagccgtccttctactacggtgtccctcacgggctcaccgtcngctccaccagggtcgcgctcccgagctcggccttcgcgatcc

SEQ ID NO: 2554 - DNA, 682 bp, Zea mays
tgcatgcctgcagatctaccgccgatccatccgctaccgagctatgccaatctatatatgcagctcatgcatctaacctactgcatgtcacacagccccagccccatgcccgctgtaccgtgccgccgtgttgttgcttttgcttctctgcctgcgcgcaccttctgcttctgcgccagcttttttcttactcccaagatctctatttgtttttttttccgttgttgctgtaggagaggatcagctagctagctgctaggaggccggagggagagaaagatcggaggaggagctgcaaaggctagcttttctttggtgcggctggtgctggtggtgaactactgaactggtgctcggtgctcggtggtgcgtggtgcacactgcacactctccctctcgcgttcgtcttgatggtgggtggtggtggcagctgcctcgcatggctgggttctctctgaggggcggcggaggcgggaggggcggtgaccggggcggcgatcacccgatcggcgccgacagcctgttcctgtacgcgcgaggggcggccgccgcggctgccgacacggcggccagcggcggcggtgggggcggcgggatagggttccagctctggcacccgcaccagcaggcgactggcggcggcggtgccgcacacgtcgcagttctttttctccggcgccgt

SEQ ID NO: 2555 - DNA, 768 bp, Zea mays
atcttgcatgcctgcagcgcggcctggtggtggtggtggtggtggaagtgctgctgcggcggcgcgggcagcgcgggcggcggcggcgggcggaagaagacgggcggcgcgcacgggctcgccgccgccagcgcgcggcggtggaagctgcggtggcacccgcacgccgcgcacttgagcgtgtccggcgaggacgccatgtactcgccgcagccgtcgaacgcctgcccgcccatggccgccgcgtggttgcgcatgcactccttgtacttgccgcccgcggcgtcgccgccgccgccgccgccggccccatcgtagggcaccaggctcaggtgatccatcatgtcctgcgtcgtctcccgacccaaccaagtggtccggtggtggggctggtcccttccctcacgcccgacgtgcgggggggagcctgtgtctgtgtgtttgtcttcctcccctgcctgcgcctcctccacctggctatcattcgcagtcggcagtccgcaggcaggagggcggcagggggatggattttatccgcgcggagctcggtcgctgtctcagccagcccccgcgtgcccggcacgagcacagcgattaaccttaacacacaaagccccctatcaaacgcgctgctaggatgattaataagcggcggtgcggcgccacgtggcgtgcggcagcccggtgaagtcccggcccttgcgctcgccacgtgaagcagggacagcccggacacgggaggcccgtttcgggtcctccgaactaggc

SEQ ID NO: 2556 - DNA, 740 bp, Zea mays
cttcaggtcatgagcctgatgagtcgaccaattcctctaccccgcttcttcccctgatctttctttccctcttcccaccgggttccccttgcttgcttggccgggatagaaccagcgtttaggttgtggctaggcgcggaggttctcttatttaataatataatggggacccattaataatagaaagataatagagagccatctgccaataggcagaatagattccacactcacttcagattctgcgtgggtaaagggaaacatgatctctattctgagagggagcgcggtcgagcatagactcggcaacaaccaatacatccaataccacagtaggcccacgtactacagcttaaatgtactgtatgtgccatcataaaccatttcagtcatagttcctaacctaccaggcacttgtttgtcaccaagataacctaattaacgtgaaaccaactgtatttccgctgtagtacctaccaggcttgtaaccaagctaagtgaaattgaaaaacattttcgctgtactaccgcttgtgtaaccgacgtaatcggtcttaaacacctataatataaggaactcgtgtacaaccatatcatttatatatttcacaggtgtaccaccgtaaccaatttcactcgtgtactaccacaaaagaagaaaagaaaaaaaacaaaattctagctttcttttttttgtgcgtgcttttcgcctgcctttcccgaccacggataggctacgg

SEQ ID NO: 2557 - DNA, 817 bp, Zea mays
ttgcatgcctgcagtcacatgattatttctgctaagaattttttgtctggcagaaaaatattcctgaatttatgatgtcattccaatgtaaatagaaacctttcatatatcaaaataactataaaaaatctcaagaacaaaacagaataagtttggtagacagtctatattccaaatgctgcacaaccagcatgcatgtcaaccttcatttttttcatgtatgaatgatcaaggttgatatgaaagagtgcttacataagtttctcaaggttttacaaatagtccaacacttccatctcatcatataattctctccgctccttcaaaacccttggtctgtcattgactatttctaggacctatatcacaaaagtcatacatcagcgaccaaaatagtgtttttttcttctgaaatctgggccatcacataataagggggaaaacatctgtgtgggcatcaagtatagacaatcatgaaggatggaacattttagatggaaaaagagcaagtcatttacttaaaaaaaggtttcactgccagaaatgatgtcattatttggacatacaggttacataagaaaaaagataatactaatgatgtagaggatcaccaaatacagctcttgaataggttagcacccatgttcaagtgtcaaacaactacaaatactccctccgtcccaaaataggtagttcgttttagctctaaaattttttatgtccatattcatatggatgattatgaacctagatatatatattccacacatatattaattattgtatgaatatagtaaaaaggtaaaaacaattttaa

SEQ ID NO: 2558 - DNA, 810 bp, Zea mays
caggcgacgtccttgggaggagaggggagggggagagaaaagaaaacactagctctacaacatattgaaggagtgaataagttaatagcctatagggcaagaatacatataagcccaaggggcaaaacatcaaaaacacaaaactctaaacatgattgatagctgattttagtaaagggagaaaataacccaaaaaaattacatcaaacccggctaaacattatcctaactccactagattccttcaaaacaaataaagcgacgagttttgactggaatttgttgaagtgtataagtggattgattaccttttagcatcagcttacacttttggtttaaactagttagtgtatccacactaacatggtatcaaagacagaggtctcaaattcgaatcctgtcagagactttatttatggttccaccctttttatttctatgtttacgtctttctctctgacgacacgtgagtggggatgttggaatgtataaatggattgactaatgttggagtgtataaatggattgactaacttcttctatcgacttaagctttttggttaaactggttagtacgtatactctaacatgattcacgttattatgaacagaaacaccgctaactggctaagatgttcctgctcgagccgtcctcatgaacaaaattgcactcagatcactttattcagcaatattggtcgtttctgtacaatgatctgtgacacggaacaccgaagagacatacacacacaagccattttaattgacgaccgcagtttatgcttggtatttgtaacaactaacataaca

SEQ ID NO: 2559 - DNA, 798 bp, Zea mays
ctcggtacccggttatcctgtagagccgacctgcaggtaacacggcttagcttccaagttttctgtggcaacttgacttcaggtgtctataaatttacattcctgtattggatgtcttggctgctgacatttgtactttttatcagtttgtgtttttttagttcatccaattattggccatctatctgatatttggttgctgaaggccctgataattcttcattgacttttcttttcattatctgtcaattgcagcaatggatgaaagcactgagctccttcacttgattcttggtggcaatgatgaaggatacaataccacaactgaattacaagtttgggatgttctggacttctatgtctcagaaaacttctcggctctccaatttgatagtttgatgggttttacaaatgaagttagtacttcctacaatgattgtatgaatttagttgacatggtagagtggcccgtggctcgtctgtctctagatgatacaccaaaactcagtaacagtgatgatgcggttctggcagacaatgtcacaacggaccctgatgaaacatccttataccttcgtacaaaaccaacagattcagaaactgaaagtagctctgacgcaggagatgttgaaactgaatatctagatcaaaagctactttctagatgtctgcctgatttaatggatgttgactcgcccaaccacttactgaaaacaccagtgagaacaaaacatgtgactcttgtgcttgatttggacggtaagcagtactaacttcacatggaatattacttttgaa

SEQ ID NO: 2560 - DNA, 677 bp, Zea mays
atgaggaatcattaactggaggatcatttgatgaaggaaatatggtcaagaacattgaagcctgtgactggttaaccagtgctataaagaacctagaagcgtccaacatagacccaatctatgtaaagttgcgtgctgtaggttccctctcttcgtacaaatagcatttgttttcgtattgaaggtttacatacctgagatttttgttaatattacaaatcagtggaccttaacttagatacacagttagatgcatagtttttcgggatgcatagtttttactatgcacttagatatacactatatctagatacacaacaaaagcaatgtatatagaaaaccaaaatgtcttataatttgaaatggcatgagtatctattagtatgctgctctggtagaacttgaaggatttttttatgacatggaaaggtggatatattgagtagaaaaaagaagaaatttccccataacaacaataaagacttttagttccaagcaagttaggttaggctggagttgaaatccaacataaacgacaaatcaaggtttaggtatatggacaactgttttttatgtattcctattcaaggctaaatctttcggtatattccattctttcaagtctccttttactgtcttttctatatcaatttcgatcttctcctgtctctcttctc

SEQ ID NO: 2561 - DNA, 799 bp, Zea mays
tcttgcatgcctgcagcagctttgatgctcccaattcgatgtatgtttgaagcaaattgtgtcgtaattactcttccttttgcttccgaaatatgtcgcagcaatgaaccagcaacaacagattcgctgattgatcttccaggggaaagaacatttgttgagtcactcatcatcttgtatttttttgggggggagggaaaagaaaaggcaccgtcaggaaaatatcaacaaggagttgctcatgtcagtactcagtatagattagacctaggtgaacatttcattagtctattgatatttgaaaagttattcctaatcttttaatatgttcgtagcagcatgaatgcatcgttgaagctagacaacatctgtgcaaccgaagtcaatgacctttatcatagaaacagaactagtccagatgcacaagatattgggtcgacttacaagagtaacaccttctttggagagctcctccaatgcttgtcggtcaaatttttttccatccactggtgattcatcaatctataagagaaaataaagttatacaaaatagtcaaaggtacacaaaatctagggtacacttattgctgatttaacttactttccagtcaccagtatggaaaattatcccatcaccacagcgaagcactaagccacaacagtcaggaattgaatgagttacacggatgggttcaacttcaaaaggtccagcctgaaatctcttttttaaattcttaaaaccttaagcctggatgagaggaagatcccaaactccttaaacccttttttttttagctgc

SEQ ID NO: 2562 - DNA, 736 bp, Zea mays
aatggtgacgcgacgaggctgtagggcgagcggtttcgtgctgagcgtagaggtagacgatggctgggctgcggcgaacacggtttggaggcgaggtaagtcccacggtggcgaggttgagcgtatgcccggcgaacaccggcgaggagaggcgcggtgatggtgagagcgctgagcacggagtcgagcgatggagaaaaagtgtcggcgtagcgggagacacgactggcactgtcgacgagaagaccggtgagtaggaccttaagcacagtgcaaacagtggcgcgtcggacagtagatccggccagccaacatagaggcaagcagctgagcgacggtggtggagacataggcatcttgatcaccagtataagcatggcacggactagcagaagtaacggctgaggattatttaggagatgtccagcgacttccggggagatatggaagagagaaaatatcacgagatggaggagtgtccagtaatttccagggctgaacaaagaggctacgtggaggggataaggagggatttggtgtacacgagaaggcttccagccgagcactaattggataagaaacagatgacgtggtttggagataaggatggctgggataatgacggagagtgagcagtgggagagaagcttcaggagtttgagcgtgtgagagagatgacgtgctcaggataaggaacgcttatcgcatcagctaagcggcaacgagtagaaattgg

SEQ ID NO: 2563 - DNA, 823 bp, Zea mays
aggtatacgtaggatggtaatgcataatgatccaaattaccttcacaaaaagttaggatccttaattagttttattagttcatcatgtaaaatagaccatttatacttaacagagtactgaggaatatgataggaaaaatgagatagtacacccgctgatgcctaaagaataagaccgacagaatgcttttttagacagtgacgggcgagtcctacatcaatagcaaatcttgttattattctaactaaaatgttctagcgtggaactaaaattattgtatacctaaaatattctatggtctagatagtcgaacagcaggggtgccgctgcgcctgatacagacggacagatcgactgcggttgggagaaggcgttgatagtagggacgaaaacggttggaaacagtatttactcggtaatcagttttttagtcgcttttctttgattgcgaataaataggatataaaatctacaatataaatttattttcttgtttataagatccagcttgtaaagattcataaaagataaaccttttcatcctatatttttcttaaataatagatataaacttcgatatagattcgaaaacaaatttagtaattttttcaactatttatgttgtagggaccaaataatacataaaacattttatgtaatattttattcatatttatactaatttatactaatgtgcttgataacataaaaaagatcaacataaaattttatacatatctattttaaaatattaaatttgtactaacaattcggattaccactttcatccctagttgaaagaaccgtgttgacgagaaactc

SEQ ID NO: 2564 - DNA, 726 bp, Zea mays
gaagctgacaacagctccaaaccaaacaaatttaaggtctttaatctgtacgccctccttcctagtcatcctgaggcaccaaccgacaggaccgcttgcaattgaatagcctcgaaacatccaaacagcacacgatcagtctctggtaggcgccaagtcactaaccaatggacccgctggcacatgatggagtaaattggaatgtccaaataggatgattgtgtcgcaagggctcacatcatggcatgacagctgactgaagtgaggatatggtaagcatctagcttgtcgtatatcacaattctttctgtaaaggtggatgcaagaatttagagatcttttgttggttcgaagcagtttgggcggaaaatattatgtgtgttttcttctaaaagcaggtgttatctacttacaagtagaagtaggttttttcatctcattcaatggtcacaaaagaattttcccttcatggcatgttaaacaaatagatgtcctcaatgacaacccattttttttaaaaaaaaaactactaattttttaataaaaactactaaacagaaaaataatgtaacgctggaactctagaagtgtgatgattattctggattggtgagagcgtcagacacctacaattaaggcacacttttcatatatttactactacctccattcacaaatatatgacgctgttgactttttcaataactttaatcactcgtcttattt

SEQ ID NO: 2565 - DNA, 745 bp, Zea mays
attataatgctcctgtctagtcaacaaacaattgttgtctgtaatgccatccaaaggtttacttacccctttttatcagtaacagatcttcatatagtaatttacatctatgttcacatcatgttgtgtctgttccacattattaatgcaacctaagttcaaattacactgtctccaaactaatccataaaaagctttatcccactctatgtggtattggtctcttgctcaaaaaaaaggaaaaatactaaagggagcacgtctaaacaaaaatataagggtgctcccaagaataagatttatatcattcaaagattaccacatactcaagaagagaaagaatggataaattacctcaacattgtttagcattagttcagtcaggcatcctccagatgcttccaaatattgagacacagcttcatcactgtaataatggatcaaaattataagtctataacaatagaaagaatatgcagcaatctcgttaaacaacagagcatattttgatcaagaaaaaaataagagtaccatcaaatgaattaatgggtgatattttttttgctaaaatgtaacacatgagctccataatacacaaactgttaaaccttgctgatgtcaacttcgaggacatcttcaggagcatggaaatcaacttaagagtcactagattacagtagtgatttgagttcccttttcctgtgtaatctatcagttctaagtaattcatcaactttaaaacagc

SEQ ID NO: 2566 - DNA, 772 bp, Zea mays
cgatacctgttcccacaaattcaaccctgatagcaaaggaaaggaaaagatggttgcagaagatagtttatcatctctgacctcgagtgaggatgagccagatttcgatccagtggattccaaagagactcagctcaactcaggatcagtttctgcttctatggagtcatatcgcagacaaaccgtaaaagaaagggctatcaagctggcccctaaatttgcattcttcaaagcagataaagatgagcatagtgaagatgacgatgaagagttagagcctggtcctgacactgaagactggccaggcccatttgcaactgcggcaaggatatatgaagaaagagaagctaagttgagagctcgagagttgaattctttaaagctggacgaatctgcaaacagggtcatccgttggtcgccttcaaaggataggaaaaatctagtacaagctcaagttgctccatcacttacaagtgtatgcttaaatacccttgcggaacattctgaatggattcaatcgcttgaaggtgtcccagaggagctaaagcacaagctgttaaagattctgtgtgattccaggaagatgaatactcatcttctcaataaactattgtgtgacagtcctacagaactgcatctcagcgagtgttcatggctgagtgaggatgactttgagaaaacttttaggaaatgcagcactgaaagtttgcaggtactatttgtttactcttcagtttctgtgatatggacacattatttattcctttcaaca

SEQ ID NO: 2567 - DNA, 719 bp, Zea mays
cttgcaagtatggggattcatgcagatacttccatccgaagccaaatggtgtcaatccagcattagctgcaccaggtaaggccttcttcagttattcctattcgacatggattggatgggaccggaagaacttatgaagaatttgacttgctatggattcaaacacatctagtcccgtctaatccatatggattgtgatcaaaacgaacagactctaagggtgcaacttacgagctgtttgaacatctactcataagtatccatcgagttgtacttgtatgttgcatttgggctagattctatttgaatgaaacatctcctgaaggtcacatgttcctacatttgatttatcacaaataacgtgtcttttgagcaacagacacaataattgattttagatgatatatgtgccctatttgagcaacggacacagtaatgaattttagatgatttctgtgccctctgcggaaccaagcaggacttttgggtgtcacatacttctgcctcaaggaaataattgtctgtacacaaatctgctggagggtaggaacatttagccttttcccctctcaaacacacaagagaggtgtatatcattatattaaaaagaagtaaggtgtctaagcgattcatacagccccttaaaggctttgtctgggtactctactactctagtatttgcctcaatacacaaacaaagccctaaggggctaacttac

SEQ ID NO: 2568 - DNA, 783 bp, Zea mays
cccgggcccctttaaatttaacctgcagctgaaaaaattgacagagcatcatcatctgaggtcagcaaccctgatactagtacatcagaaacaggttctccattctatcagcttagaacagatgctacaaaacttgttgcacaaacatttcaaagagggcgaagaaatctttggcagctggcaacaagtcgcttatctgttctattatctagttcggctgtttgttcaactagcacataccaatttctgaagaattatgaagatcttgccattttcattttggctggcgaagcattttgtggatttgaagctagtgagttccgccagaagttgaagactgtctgtttgaactacatggtgtcctttcaccggcaaaatgtatatgtatgtcaatagctctgactcggttcttaatgatcagtgctcaaagttcaaacatgtgaattttgaactgctatcatctttttaactgcttaaaatgtgtatgcagttcatgacgtgtttgtagtctttacgaacattcttcatatttcttttcttttcttcattggtagtgctggtttcacagtagcccatttttgtaactgattttgatataagctaccagtgcttttatgtttctacaaaaggagtttgcagctgatatgaacattagtcagtgcagccacattagaaggctttgcattgatatgcaccataattccataagtcactaacattcacaatataatctgtaagagaatacattaataataatggttgattgtacgtccctatcaaaaa

SEQ ID NO: 2569 - DNA, 793 bp, Zea mays
atattgactaggttagggcttccctcaggctggttgttctccaggttcttcctcccgctcacgatctccagcacgaccacgccgaagctgtaaatatcggccttctcggtgatcgtcgacgacagccactccggtgcgaggtaccccctcgtccctctgatcttggtcatcacgtggctctgatccctgtcgatgagcttcgccaagccgaagtccgagatcttcgcgtcgaacctgtcgtcgaggaggatgttccccggcttgatgtcgagatgggcaatcttctgccggcattcctcgtgaaggtaggccagacccttggcgatgtctaggatgatcttgtaccgagctgcccagctgagcgagccgctctggttcttcctgaagatccatctgtccagagacccgttgctcatgtgctcgtagacaaggagcctgtggaacttgtccgagcagtacccgatgagcctgacgagattgatgtgatggatgctaccgatggtgacgacttcggccatgaactcttccttcccgtgcccaatgtcgcgcaggcatttgacggcgatcttggcgtttccgagctttccctcgtacaccggcccgaacccgccttgccccagctttctgctgaagttgtcggtcgcttctcgcagctgtctgtacgaaaaccgtgtaggcgttccagacactcctttgaacggatcgtcgttcttttgcaggcctaggctcttcactactgttcttctgaccatgagaatgaaaatgcagatgactgccaccaggacaggaacgc

SEQ ID NO: 2570 - DNA, 737 bp, Zea mays
ggtgatttttcaagaggagatggtattgcttcattagcccaggcttctttcaactgacttctcgctgtagtgtactttataagttcaatgttgcatgctatttccaggaaaaggtggagagagcatttatggtggaaaatttccaggttactagctacattgaaatttgtgtcagtcacaaaatttgttgttatctacctgttaagcttttactgaacttctcttccattccatcatgtgttctacagatgaaaacttcagattactgcacaatcagcctggtgttctgtccatggcaaattctggcccagacaccaatgggtcacagttttttattacattcaaggctctacctcatcttgatgggtattgcttcttgttcttcagtcacctagctttattggattctcagttctctaaccacaaccaaaaactaatactgtcataaaatttattaatgacattgtggcaagtaatgatcgttgctttaagtataaagttttagaaatacacgtttacaacatgtcacatcacacccctatatatcgtactgcactttctttgatactatagtatagtatttaatgctgttagtctctaggtatctgtgatgtcttgtcttatatttcctgcctattctccatggcccaacaaccttaaatgaatttcaagctataatatttgtagcaaacatgtggtctttgggaaggtggtcagtggaatagctttgcttaaaa

SEQ ID NO: 2571 - DNA, 836 bp, Zea mays
agccggttggatcgatgcccacacaagcagcggcacagatgaaccaagcgccaggcccattcgcaccaccgcctccaccaccaccgttgccgcctcttctgccaccgctcctgcaacagttcggtcaaagcgctggaggaatgatggggatgggaccgttcgggatgatggctggctccatgccgcctcctccgccgatgtccagcatcatgccagcaggttttccagcgccaagcggtccacctccacctccgcttccaccggctcagacccaaccccagcagcagcagcagcagtctcctcctcagccaccagcgccgcagcagtcagcagggttcttccagccatcagcaggcatggggtacttcccagcagtgcaggtgcagcaatctccgtccgcccaacgacaatgactcgatggtggcatgacatccatcggggcgggcttataaaaggcagcacctcgtgctaaattttgtacattagccataattacctggtgtcgagcttatacgtgactggccctgctgcaagagaagcagcaggaccaatggtcacgattagaaaaaaaaaggttgtagaataggcatgggggcttttgtttggtccgagttgttttaactcttcctggttgtgtcgggtgtgcagtagttagactttgcattgatcccctgaggcgcaagaaagtggcgctggaattgttgcttaatagagctgccctctgatatagcagttcgcttttaggggctgggctgaagcagtgttagaacttaactggtcatagtgtcatagatatgatgtgaactggcaatacttgtcccttttgtgacttaaat

SEQ ID NO: 2572 - DNA, 769 bp, Zea mays
cttgcatgcctgcagaacccacacctaaatctttaccattggtggacacagaatcattgcttggaaggtgccttccttcaccagttctagacatgccagcctctgcattatcaccaccagtgttgccatctacatttactggtttcgttaaatttacatcaacctgaatgggattgttcctggagcttccacctggaccattcctatgtttataaaaatgggtgtgcattagccactcaagagtaactagtcactcaaagttgaacagtacaaactttgctctgttaatgtagttaatagacatacctatcttctgaattgtaatttccagatctttcatcagccctgttgccatctttgtttgagggtttacttccatcatgtgattgtgatcgattgatggtagtaactgtttgttcgtctttgtccgcttcttgaaaagttcttccttgttctgaaattgtcattttggtactctctttatctgctagagaagggaaatgattacatacttcaaaattgaagacaaaaaagtgaggtgaaatgatctcagaatactaaaaaaaataaattatacattatggtaaaaactataaataaatatagcatatgaaacttcaaactattagcagatattgtagcatacgccatagaaagttatcaacagttgccttcagatagaaaaaggtaacttgtcattcatgtgaaagtgtttcatttcaccgactggtatcaaaagataatataaaagttggtttagtaaaaaaaa

SEQ ID NO: 2573 - DNA, 693 bp, Zea mays
cagcttcagttcagggccgtacgtgtgtgctgtgcctgtgcgtgaacagtcagttaccttcgaagttcggccggcagccgtaccgggtcgtccgcagggcggcgaggctgacgctgggagcagcgtcgtcgtcaccaccacccgccgcagccaaggggcctgtctgctcggcgcgcggtgactgagaggcgtcccacttgtcgtcctccaacctctgcttctccgacagatgccacaggaggaccacgagcccgcccggtagagcgacgccggcaaccatgcacagcatgaacaggaggcccaggtaccaccacgccaccacgttgtgcggcttcacgtagtacacctgcaccagggcgtacgccaggaggaagccgagcgtggacgccaggaagtacatggccgcccagaagttgtccccggtgccgaccagcccagacatggctgtaccgttcttgacgaacatgccagggactttctggtcgtccccgacgatgccatcctcctacagttccaagtgtggaacagtgagttattacttcttacagttgtgtatgaaaaaaggagaagattctttaagagctgttaactgatgacttgttcttagttcttaccaaaggaggatggggttcttgagtcacgaaggcctggatatccagttgcaacctgtccgagacagatgagctgatggtc

SEQ ID NO: 2574 - DNA, 842 bp, Zea mays
accccggatcctttttagtcgacctgcagtggcaggcatgatagggtgcctgacaagtggacccaccttactcacaaggacagtactattgttgcctcaccaaatatgctagtattaggcgggggctcatcgaacgaaccaaccgttcgttattattattattattattggtgttattaatctattcctccattatccgtggagctccatggattacagcgagactatgcacttgtttagaccgtataattggaccagtacaccaatacacgtaccgtgtgtgacgactagatgtatgcatgcatgatcaacaaatcatatcatcagggagtgagcctgtgtctgtccagctccagtaggtgtggaagcttgcggccgattaggtttcagctgaagcttaacgaataacgacggcacgcatcatatgggcaaagccaaggcgtgaacagtggacgtggttcctttccttggcgatccaggatgtctcgcacccaccactgatcggtgaccgatgcagcagcagcagcactgggctgggctgggctgggctgggctgggctgggcaggttcttgaggtgacgttttccaccagggcttgtacatagtagtacatacatggggaaaagccggaagcttcagcgggcagcggacatgtcaggttgccgctgccgagctctggtcagctcaaatcaggaaaaagggtcctgatgaccggtcgctcgctcgctcaccgcatgccgcagcagtgaaaaaataacatcgagatttaacccagtaccgttactgcatgctactagtacgacgatagttgcggcgactgctgttcatctggggttttttcc

SEQ ID NO: 2575 - DNA, 801 bp, Zea mays
aagttgtgttgtctcactcacacacaccaatgttgaaaattaaacaacggattttttttcttgcagtgaattgatactggatgtcattggcctccgtttaggggcggttgggttgttctgcatgctcttcctcttcctgccagtcgcccgaggctcggttctcttacggcttatcgatattccatttgagcatgctacaagataccacgtctggttggggcatctcacgatggctctctttacattgcatggcttgttctatgtgatctcatggtccatgcaagggcgcctccgtgaagaagtaagtgcaaagtgatttagacccattcagggctaatgatttgtgacagttaaggaaaacactgtctaataaaccacacaatgaaaaaatttggagggtaaacactgaattagacttattctcgatctgtcatcaaagatgacttaatttttggttgacggcatatagtaattatatttcttgctacacttgtcctgcatctcagaacactagtaactagccatattggcttttgtttttgtatagctgagacaatggaaggaaattggagtagcaaacctgcctggtgtgatcagcttggcagccggcctacttatgtgggtgacatcacttcacccagtgaggaagagggtcttcgagctcttcttctacacccaccagctctacgtcgtcttcatcgtgttcttggcgtttcatgtcggtgacttcatcttcagtatttgtgcctgagctgtgttcctcttcatgctcgaccgctttttgaggttctggcaatcaag

SEQ ID NO: 2576 - DNA, 327 bp, Zea mays
cttgcatgcctgcagtgcacgtagcagatctgctcctgctccgccggcggaggctgctgctggtccaggttgaacagcgtctcctccggcgccgacgacatcatggtgccaaaagaagcaagagccgcggatgggcgtgcttcttctgttgtgtgcagatcgaagcaatgcaatccggtctttgttggagttattggatgaggggcgatggagcgtgaagcgcagcagcgttgggcaggaagctaagggcttgggcggcgagtggatgggtgtgcaagtgcaagggagggagtacgtgtggggggtggggactggagggagggaggt

SEQ ID NO: 2577 - DNA, 779 bp, Zea mays
  unsure (1)..(779): unsure at all n locations
tggcttgttctggcaatttcaatctcatcttgaatgaggaagataagaataatcccaatctagaccgtgccatgatggggaggttaagaaaatgggctgatgatatggttcttaaggaggttcctctcgttggtcgcaaattcacttggtcgaatggtccggacaaccctacccttgtgaagttggacagggttttctgctctgcctcttgggaggaccgtttccctgattgtttgttacagagttctgcttccagcgactccgaccactgtccactgttgtttgggcttcatgactttaatagaggaaaggggagatttcactttaaggccttttggaccaagatggagggtttccatgaggtggtgtctcaggcctgggaatctgtcccagctggccgatgtcctctcatcaccttttcaaaaaaattgacaacaacatcgagatgtttgcagagctggaatgagaagaaaattggggatgttagaattcagcttgaaatggcaagatatcttttacaccatttggagttggctcaagatattcgtgttttatcccctgctgaagtttggctcaggaattctctcaagaaacattctctagccttatcttctctttcaaggactatggcactgttgagatcaagaattgcgtggctaaaagatgcgagatgctaatacctccttatttcatgccccaagcaagatttagaaagagaaaaaaaaattatatcagctttcattgatggggagggatgccttctgactgctcatgangat

SEQ ID NO: 2578 - DNA, 835 bp, Zea mays
  unsure (1)..(835): unsure at all n locations
accttgcattctaaagcttcacagaggtcaagaaactcagcaataactcttattggaaagcgcacctctcaaacctgtcatccattgaaaacctgggagagcatcttggaccgttaaggaatcaatcagacgtctagggaccaaccctaacaacgcaggtgcaaagtcttggatacaagtgccattcaaccaacgatctttccaaacaagggtgttagaaccatccccaagctgtgtcacaactgccacttccacaagagattgcacttgcacctccgggcacacacgaatggggatagaagaccatggtctgcaatgatcagtttttgtaaccaaggccattgtgcttgtaaagcccagctaagattccagaggtcactgatcccaagaccacccaaatctttgggcctagtaaccttcgaccaagctagaagacaatgacctacgttggcttccttccttcctctccaaaggaacccctttcgtaacttgtcaatcgccttaatggcccaagctaggagatctaacgccaaagaagcataaatcatttttgctttcatcacaaactgcacatatgtagctcttccagcctttgtcatcaactctgccttccaaacgggcagatgactagccacccgatccactatagtttgaaaatgcgcccttgaaagctttcgcaccgagagtggtagcccaagattcttacatgggaactccgagatggggcaggggagtagattccgcacacaattcaagtcgtcatcaccacaacgaataggatatacactactgttttgtacatttgtctttaagcttngaggtctaccaccctacc

SEQ ID NO: 2579 - DNA, 792 bp, Zea mays
tttcactgtgcagtgtgcaccgctgtgacagacttttaaaagtgtaactcaaatattaaaacttgaactcatgatgtaccacttagataagggagttgccccccagcaaatgcgacaaatgaataggatctattggcttaacaaggacattgcccctgctgagatcgatttcatatataccatgtggaaggaataaaattgaataatttacattgaatcttgaatctctcgatatacataaactttatatgacttcaggccaagttgatacataggattgtaacttgaggcccagcataatccctatatctcgtatgttatccctactttgagtagttggtctttcggaatggagagcaccttctccccctccgtcaagttcttcctcaagaatgcgtagacatagtctaccactatcttctttgcggcagatgattctggtcctgcaatgacattggcttcccccataaggtagaccacccctcgctccatctccttgtcaatcatttgcttttccttttcgacccaacgagccaaatcatggccagacaccttgggatcggtcagctccttggtatctccagctgtagagttcgtcttaaacgcagcctcctcttggatgaacgtctttaggctctccatgaggaaccctttgaacagccccgactcctctagcttgtcacagtacccatacctcgccacacaccggaacatccggtgctcccttgggccgacctgccggaagaggaaccgctccacagggggccacgttgggggatcggcaggtgcttg

SEQ ID NO: 2580 - DNA, 794 bp, Zea mays
gagtgggatcagggagaaggtgccaagcttaactgaaagtatgtgaaaaaagagctcctacagacattgatcagttggtacgctttgttcaacatgtaaattgtttgctgtcacttttcgtgcagcgcaggtagtctggatctcagtgccgattttgttcgcgctcttctcggtccagcgctatggtacagacaaggtcgggtattcctttgctccgatcatcacactatggttttttcttattgctggcattggaatgtataacctcattgtgcacgagatcggtgttctccgagccttcaatccaatgtacatagtggattacttcagaaggaatgggaaggatggatgggtttcactgggtggcgttatcttgtgtgtcacaggtaaactttacatcgaaaagtgcaattgcgatggtagttattagtctacaatctcaatgggctgttgtcatatgcaataggcacagaaggaatgtatgcagacctaagccatttcaatatcaaggccattcaggtaacaaggacattcacacccatgctctttgcttcaccatgttgattctcccaactctacctccaattttagtttagttagaagcatccattttacttttaaactatgccactgtaaagttttcaaatacacccattttacttttaaactggttcaattctgttccttcaaaataaagcatccgattttacaggaatcaatttccaagcttgccaaacagaaatagctcacaacattcgctgtgttttcacctacagatcagctttagcactgtc

SEQ ID NO: 2581 - DNA, 748 bp, Zea mays
gtggcaactctgatgaaaaaaaaggatccgtaactcttccaacagctactggttcgtccatccccaaattttgttgtggttgtgaactagcttgaaagtcaaaaaccttgtcaggtaagtacagcagctgtaggattagtctaggacctaaatgaatcactagtatgatagatccatcaataattgcctccaatcattaggttgcaaagaagtgacaacgcaagacgcaagcattagcaatgctgagatatcactttacaacaaagatagtcgcgtgataaaaaaatatatatatgctaaaagttcagcattgccttggtatccatatatcaataaacaatgaacacacgtttcttggttgtctctatgtgaaacaagccaggtgagggcaaaatcagcccctccttccaagacactataaaataaacctggagccacgagtgttctcattttacaccatggtgccaacatggatgaaatgggcgtgttcacaggccagtaaatgtttcgaataggttagctgctagcgcactacacaaacagctcaggccgacgttttcagtgtttgaccggcaaaatgagcaaacaaacaaaagggcgtactcttatcagttgggacaatgctgatgcttgaagccccccctcctctatgcccactcctataaagcccgttgctgctctgataaatatgtacactccctgcgaaaagagcccatgcctggattcgcaagccggttcaccaaactgc

SEQ ID NO: 2582 - DNA, 648 bp, Zea mays
gagcatcatggccatggcctcgctggcggcgctggccgcggcgaggcgctcctcctcgacctcggcccgcagcgccgacgccgtggactgggccgccgccgccgcctcccgcagcgccgcgcgctcgtcctccgcctcgacccgcgccgcggggcccgcctcgtcccccgcctccgcgcccagcttccgcttcacggaccgccgccacggcgcggccggcgacgacgcatcggggtcctggtcgtggtcgcggtcgtcgtccatgacggcggcgggagggggaggcgaggcgagggttcggggggccgcggcctcgatcaaaccgcagcgaggagcattttgtcgtttggatttgggagcaagttggacgagggagtgggtttgatgcgtcgaccgtctcggggtcggggcctcggggtcgggggacacaactttttgcaatactaccaaatcaaatgacacacattcagaaggcaccaccggaaggagaacttccgccaaattcgcataaagtacatgtcacgacccccgaccccgaatgaacatgtctcatccgcctccgcttcttttcggcctttacccctgctcggggaggggcccttgcctccttcggctcgaagtgggatccaagccagtactgaaaatcat

SEQ ID NO: 2583 - DNA, 901 bp, Zea mays
acagttcagtcatctgtttttgaacccttgaattagattgtctctattgttatcattaatagacaacatgcccatatgaagttaaacttgttttttgtctgtttatttaatattttgagtgattagtatattagaatttaagaatttcttagcgggtacggattaatcgaaataaaattatcccgtgcgagtacgggtatggataagattttatctccgggagcatatatgggtaacccggtgggtagaatttttttgatgggtataagtatgaaatggtattgcccgagctcggagaaaacgacacatgtccgagctcagagagcgaacgcagggacaaggtttgcgcgagcgggggcatagtatagcaatgtgaacgcccactgttggttattatagagtagtagagattactatactccaccactttaagtaatattgtttgtaaaatatatagaccaactagaaatgttagatctaagaaggatcacaatgatttaggtcccgtttggatagatggactaatctttagttcctagtttttagtctcgtttagtctttattttgccaaacagtaggactaaagtagggactaattggatttagtctctagtccctcatatgagtgctaaaagggactaaagagcaccatttaatctaattacccttgctagaaaactggtatcaaacaaaaaagggcattttgggctttatgtgttggatttaatatatttagaatctgtttagtccgtacagccaaaacaggatatggacttaaaatttattagcctgtttgttttgaaggaatgagcctatttcatcattattcttaactcctaaactttttggtttggattgggggaatgggttggagttggatcccttcattaaccctttttcc

SEQ ID NO: 2584 - DNA, 800 bp, Zea mays
caagtaggcgatcaggtcttaatgaaacttcaaccatacactcgatcctcagtggctactggctaacaggcctttctcaaagctttcttacaagtactttggcctgttcaaagtcctgaaacgagtgggcaatggcttatcgcttggagttaccagttgacattaagattcaccctgttttccatgtcttctagatcaagtcttctgttgcaaatcacacccctgtctactccgatcttcaggacaccaccgacagcgaggctgcctccgcgatacctgagcgtgtcctcgatcgccgtccggtgaataagggcaatgcagctgtatcacaggtgctgatcaaatgagcccgtcttccggaggcatccgctacctgggaggattacaatgtgttgtgtgagggcttctcaaacgcccctgcttggggacacgaaggatcttcggagaggggagctgccaagccaactaccacaacagagtgagaaggcacatgagccagcaggtgtcttctaactagagaagcaccgttaccttttatttactgagtctatgacagtagggggccgagaaggtgtactccttaagcttgcgttgtaagactgaaacgctattcgaattctgataacacaatgagtaatagaagaacgtgtcctcttctcattaccgcatttgagcttgctgcatatcctcacgtcaatgccaaacgtcagtggccaccgggttttacaggttataccattataggtcgtcacctataagtacgggaaacaaaactaggtgccggaacagaaattagaatg

SEQ ID NO: 2585 - DNA, 755 bp, Zea mays
atagaatttgatcgagacgggcatgcactgatgcagtctatatatcattaaggtcatttccagcaaattctctatcacgttctctattttatcccctattttaaacttttctttctctttaaacagtatcgaacaatatcattcgtagtttcgtagtttcctattttacacgatatactgaaaataagcttagaaacttgtaaagaactaaccagtctcagacgcagtacggggtgaattattatgggttgctagttctattcgtctgcctgttcgtttgaaacacacgtatcaatcaacaaatctgtccgcacggaacggagctgccgttgtcttggctcgctccagagtcttggaacgcgtccacgtcctcgtcccgtgctatgctaaatatcctttgcctgcatacatatatctcaagagcaccgtctactaatgtgtctaagtgatagttcactgataaaacaaaaaacgggcggcaccggaatggacaaagttcacggtagacgccatgccgtcgacgagacaaaagttttcacgatagatccgcgccagtggcggacccaggatttgaagacggcctaggcgaaattacactgctatactctacgcctgtgcctagaccctttgctgctctgcttgcttgcttgtgggtatgatgtttgcttgcttctgtccattgtcgcagccgaggcagcccagaccaccgcctgtggtgcctgggcggtaagtccgccactgatccgcgccacaca

SEQ ID NO: 2586 - DNA, 1255 bp, Zea mays
cccgggtatcctgtagagacgacctgcagacacacggtgaagcttttttttgagatgccgccgcaggctccatgtggaggtgagctttcaactgtcaatggaaagctggagccgggcacgaacgacacagcaaaggatggctgctgagcgtcagtggaagccatccgggtggtaagagctgcttcaatgcaagacgtacggctgttatcatcgtctgcctgtatatatatctagccatatatatacatacttacatacatacatatatatagctcatcgctaaaattttgtagtgtaggagatcatacatagattcagctcacagatagaaagacaggcgcgcaagccggtcaggagatgtaattttttttttcacccgaggcacacaattcttttgctattgtcctgattgcaacatcttaacctaaacccttgggagatgagatcgctgtaatgtatttagtttttggtgacctagaactagaggtgattatgggtggatatcgagccagctcgactcgttatggctcgactcgttatggctcgatactgtaatgagccagcttgactcggctcattatactaacgagcttaacatttaacttggctcggctcgttaggaagctcgagccagctcgttaggctcacgagccacaacacttaattccaagatctattgtacttgaatttatttattaacccgagaaatcatttttttaaggggtttaacaactacggagcgtcatgaccttttcttaaatgtttttagtctcgattcatccctgcgattgctacaagctttttaatattaacattaaaataccctcaatattatatttatattcacggtattaaccaatactcttttttttacatttaattgtccatcaggttgtagtttttaaagcaaattattcatttattgcagatatccttgttctattgttatgcccaaccattttcttatattcttcttgtccattatggtcatagccaatttcctttttatatttaccttgcattatgtttggacgttctaaatcattatttattgcttctctttcatatggccttttaattttaaggcattttaatgttatttttcctcaatggaaacataaaacatttgggttatttttcttgtggtttgttttaggtttactcttgtgtttatgagttttatttttttttaaacaacctccctttgttctattatggatgtattacggtctcttaagtataattgttgatgacg

SEQ ID NO: 2587 - DNA, 787 bp, Zea mays
cttgcatgcctgcagtggcgcgcctcggaactccgggttgatccggtgctcgatcacccagatgacgaagccggtgaagatgaaggcggcgaggctgacgagccagagcgcgggcgtgagcggcttgaggaagaagaacatgcccgtggccgtctgcgcctgcaccgccacgaccatcgaccatcccgactcggtgtacggcatggtgaagtccgcctcccccatcctgaccaccgtgatcgacacgtcgccgacgaccgcatcggctttctcctcgggaatcagctctaccatctggtcgtaagaagacgaactcgcgttcccgatgccgtagtacggcgcgtactggtagtacaccgggtagggcagtgctttgatggccgcctcgaacacgtcgatgcagtagccggagaccatcgtcctgtcgctcgtcgtgtcgttgtacacctgcacgaactgctggaacccgtgcttcaccggcacggcgatgacaagcgaccgttccaccggcgagaaagcccacccgtccggaactcgcgtgtcagattctcccgcgccggggaaacttactttcttcaaaccttcaccgctgccggcgtcgaactcctgcgagaccccactcttcgtggtccagaaccccaccgtcgtgagcccgtcagcggcgaagttcacgatctcgtacgcccggcgtctgcggttgcccgtccagcagtcctgaactttcctgcccaccccttccaaatgtgcggcccaaccacaactctttgagcaactttttcgcctggtg

SEQ ID NO: 2588 - DNA, 756 bp, Zea mays
ttcaccggtgacctagcggatgaacgctgtcttgatcattgtgctgctcatggaggactggtctcgtgtgatgagcaggagagatgcacggttctctctcaaaggacgcaacgctgatgaacctatcgtggcaaaccgtgcgacagcatatggtcccatcgcgctagcacgtttggtacgatcaaaaggttagttttaaaaatatttttctaagttggttattttaaaacatgattaaaaataagttacgaaattctcttccgaccaataagattataagaagcctaggaactggagtgcctgatacagcccaacaacggcccaggaaatcactattatcacaaactccagcaaattaccacaagatattgtaggcatgagaatcaaggattcacagctcataggtgtgggaaaaaaatatagcaatcattctttcatatgtggtaagattgttttcttttcatcatcatcaagaaaacatacccaatatacctcccgcaaatgcatgctaacaaatctattacatacaagttgctaatgctcagccaacactattgtttgaacttccgaattactgttgcatatccgggaaaaaaacaattctctcttttacaacagccatctggcacagtaaacaacattgctggatggttgctggggtcctaaactcgaatggcagcatggatagggtacaaatgttgtatgatcaatgctttgacaaggtttggatgtgcgggttcaagatttcaacaaggg

SEQ ID NO: 2589 - DNA, 777 bp, Zea mays
ttgcatgcctgcaggctaattctcggaatacggtactgtacttgcaaccacacagaccaacagatggttgatactttcaggagctaggtaacagagtgggcaagacgccagaaatggcaaccccgtctttgccaatctgcctacagtagaacaacagttaagtaccgcaagccatatgaaaacgtacaccataagaggagcccatgacatccaaatcctttttgaatgagcaaatctaattggtccaagaaacaaaaaatttccccaacctattttaaacaagactttcttcaaaccaactactatcttttggagagggctgcttgctgtgaaagataccttctgcaaattcaacagaaaagcagtgggcaatgggctgaacaccagcttctggtgtgatgcttggtgtggtggttcagtggttgtcctctagctcacaagtttaataggctttttgatttgtctctaaacaaaaaagtgtcagtggaaaatgttctgaattctgattttttcttgcttaaaatttagaagaatcataggagaaattgctgatatgtttgaagagttaaaaaattactgttatgttttgtcagaagcaaatgataaagtaatctggggtttgggtaggaagggttttagtgtgagatccctttatttgcatagtaggtgtgattctgtcagagtaccttacaaattcctttggaaggtgaatatcccacaaaatattgaagttttcctatggctgattctaaaagatagattctttctaaggaaaaa

SEQ ID NO: 2590 - DNA, 723 bp, Zea mays
aagatagtgttgtgaagtcgtatacagaagtattgctcgttcccctgacaactccggatttcagcatgccatacaatgtcatcaccttcacatgcactgtcttagctctttactttggttcattattgaatgctttgagacgaaggattggcgaggaagagagggagttgaagaaaagaggtaagcacaaatatttatgttgattggtttctgttttctgatgccttgtgttacagaaaaatgattacttcagtcttcagaattcagatgataatttggttgatgccttgatggtattctttccttttatctcaaatgtaaatccagcactctgtactccaggacaatattaatgtagacatcaggggatggggatggttgatgttatttcttttttgggatccaaaatttaaaaccagtattttactagggccattaagacaaccaatcttgtatgagttagtatagttgttgtttagaaggacaggtctggtgtactggtgagagctgtctcactgtcaccaggtcacaggttgaagtaggttccccacatttgcgaagaaagacttgccttggtttattccatctccagacatcactcatgtgggagccttcggcactgggtctgcctccctttttttgcccttcattatagttgatgtctatggtaccacacagcttgtgctctagtatgtaggggaactaatcatacttgtataacag

SEQ ID NO: 2591 - DNA, 818 bp, Zea mays
agaggggggaggggactggagaggccggggacgagcctcatgggtctgattggtgggtcccactcccgcatgcatcatgtatgcaccggccggccggccggcctacctgtcaccgcctctcgctgcgggggctacaggcctgcactgcctgcctgtcagtggccctcccttgttgccttgtcccgacctattaattgatgcatgacagatcgatccatggatggatgggtagattagatcaatcatcggtgtggccgtgtggagcgacggcttgagacgtgtgtttttcggctgtaatcgggagaaagaaaaagagaatggttgaactttcaattctattgttttcatacttttgtttttaaaattatcacaaagacttcgtttgtttgtaagctgatttctctagtcggttgtgattcatgaggacacagcaacttagagaaatatgttttagttatactgttctttttttatatagcctgtctccatctatgtaatacaagcagcattatcttcgcagttaatcgtggatgatttggtgggaaccaattccactaaattggtgtatgtgattaatcattttttgcgaagcaatacacattcacgttatgtttcatatagtgcatcatttttggaataatacatagcggttgttacaatagtctgtttattagaaaacttccaatagataatagatggtcgtgcctccatataaaaaaaatacaaagccacagatatttacaaatataagtgctccaacaacactaagatataaaactaaaggtcctagaatctcttcttcatccccttcactgaat

SEQ ID NO: 2592 - DNA, 821 bp, Zea mays
atcttgcatgcctgcagatacgaagcacacttgcgactgacaacggagacacagaacaacaacacagagtcaagtcgtgattacgagattaaacttcattttatccagccctccgaatgaacaaaaggatcactgcactacacaaagatgtaaacgattttggttataccacccgcccaaactactcaacatgtaagccatcagctactgcctactgaaatgaagcagcttgaccagcaatcaggtggccgtcgtcaatactctagtacagccccagcatcgtccgcgcgaacgactgcgacctcagctgccgaccgcctttcaccgggaggacgcctgtccggcggccgctggcgctccggatcggcgtgaggtagaaccgcagcaggccgttgtccgcgttgcccggcgagtgccgcgcgctacggttccgctccagcgccgcgcactcctcgcgcctccgcttcccgtgggcgtccaggtagctgcgcctggagctgcccagaccgccgctgttgctgctgaacgagctccgcgcgctggcgttgctgttgcaccgctgcatcctgccgttgtacccgcggacgcgcaggtccggccatggctccgagaacgcgcggtcggcggcgtcggacgcgccgtccctgcgccccgcggcgcggcggtggatcaggccccagaggctccacgccttgcgccaccgcggcggctttttcgcggggccgtggaaggcagcgtccaggctggcggagaagtcctcgacgagtgagttggtgctgaagcggtggtcgaacaggtcttcggcgtggtggaagtggtaa

SEQ ID NO: 2593 - DNA, 792 bp, Zea mays
tctcctggaaagtgaatacgaatcatacatctcataagcccagtgaggccaaaatgacaatggagcctgtgaagcatttttcgttgtgaagtagtgtttctgctgtttggtatctttctttcttgttctctgaaaggatttggaggatatgaaacaaagattatcctcatctcctgtgtttgtattcttatctggctgaccatacccatcaatttctttaacagagtcatggctctgacaagactgttcatgtacagaattttggccttcatttgaggattcatccgcaataccacaccttaccaaaccactggagcgggaacctaaaaggtatattcttttatctgttattgagtgatcgcttgaagtgctagtgggtgatagtgaatccctgtccatatcagaatccacatgatcaagttgtgtagaacaatacacatgcaaactgggcattatcgatgaagcacattgcctgaaactgttaggtgcagctaattgtgcaaaagcatctcttggagttctttgaggtgtatcttcttcaataatttgcacttcaccccatggctgtcaacaagaaaaatgccatgagaaaatgatctctgccttctagttcagagagctacatactttttacttaagacctgtttggatcacagttacattactttagctgattagcataatcacagtggatccaaaaggccttaataaagacttactactcgtcgacatccaaccaatggcgcaaaagacgaaaccgctgctgaccatgggagaatatacatgatgaac

SEQ ID NO: 2594 - DNA, 707 bp, Zea mays
agactatgtgaatggtcaagggaattgctcgccttggtttcctaatcctcgcttccttcttgtttcgaatttggtgtatatatgtggtttattcggcacatttaggaatttagttggggaatggggtgcagtatgtcagggttgtgtccaaggccactatctgaatataccatgcaagatctattactagtttaaattgacttattatgcatgtcgattaacctggctgggctcagtggtgtaccatggaagctctgtggttgtagcagggcagtagaaagctaaacctgaggtttggtactgtagcactcagctagtcagctgtatgccaagatgttacttactcgatactttctgccatgtctcatttgtgttaacctgggtgtgtgccacatagggcttctttccatgctgttcgttaacctgttcacacttcttccatatatatattcataatagctcgatctacaattttcctgtcttgagcttctttgttcctaaaaacgaattgtataccagcaatgtatatctgatgcaatattgtttgtaggatggctgaacaattctataccgtggcatcggatagtgaaaccactggtgaagacaaatcacagccttcattccctgatgttgctgttggcattgacattgggacttccaaatgcagtgttgctatttggaatggccaccaagttgagctcttaaag

SEQ ID NO: 2595 - DNA, 716 bp, Zea mays
ttcttcggaagaacagcaaggtcgagaatcctcccatacatctttgctagagcttgcccacaccaaccatggccatcgtccagcgttggcatcctcacctcgatgaacggtggaatggctgggccttgaggcttcacgacccctgcgaacaccctgaggacattggcagcatcgatgtccatgcatacactgatatcaactgctcccttaggggctgccggaattccagtgatcttgaagtaccctaacagatggttatcttcagcacgttccccttctccttcatacacagcaattagggcttcggtctgcttgtcgtgtgtcgttgtgaacagcatgtccctccttgctggaaccgtcgtgttcctagggatgatcgcagcgaagctatcaccgtcggcacggattcccaggttcatgggagttgcctggatcgtgagaagatccaagctccccgaaggatcatttactcccgaagctatggctccttccagcgcagcacctgaaacagcagcttctagagcatctatgttcttgtaggagacctccttcttgcacaaacccaggacaaggcttctgattctggggatcttcgaacaacctccgaccagtatgacatcattgatgtcctctggtaccaacttcgcatcagccaagcactggttgatgatcttttcgcacttgtcgaaaattgcccggttgacttgttcaaacta

SEQ ID NO: 2596 - DNA, 832 bp, Zea mays
gggtggacgcgagcgtgcgcgtccacaggccgcccacggtggcgcccgcctcgaagaccaccggccggaagcccctcgccaggaggtgcttgcacgcggcgagcccgctcgtgccggcgcccacgatggccacccgcttcgccgcgccctgcggtccattggcgccaccgctcaccgctatcgatctacaggtcttgcgccgcatcttgaaaccgcgcgtatatgcaaatgcaatctcggcgatggccatttttgtatttaaaaaaaaaattatcggcgggagccatgtgccgcgttttttcaatgccggtgtgggttggagtacgtgcgattcaacgttagtcactcaccgactactttctggaggcggcttagccagttagccgtagcgggtcggctattgtgtcatcgcatagatctgtccgttgaaatcgcacggcagccttggacctgaatagagaacagttcacttcccaagcttatcatccgacccacgcactgcgcgcatgtatattccacagcaattgcattagcttcgttaagagatgttatttaggttcgtgaattttaaaaatatacttccagaccattatacttgttaaacgaaaccggtctcacttctaaggctgtgaggcgtcccgacaaatatggaggccctgtacaaaattgtagcaaaaaaatatcaagtactagcacgtatatatatattaaaaaatgaattatcatttattttcttgcgatttgttttatcacttaaggtagtttgtgcttgaattaaaactttacatttttgaataaaaattttgaataagacgagtggtcaaagttttcg

SEQ ID NO: 2597 - DNA, 814 bp, Zea mays
tactcttctcttgtagatatactacaaggttgtgacttcttaactgagcttgttcaaaggatagagttttgccttgattccaccctttctcttgtcctggatcgggcaagcaaaaaactagagataatccgccgagaaaggaggaggaacatcgaaatgttagaatctctactaaaagatacagctgcaaagatttttctagcaggtgggattgataaccctctggtcaccaagcgccgttctaggatgtgtgttggtgtgaaagcttcacacaagcatttgatgcctggtggaatcgttctaagttccagtggctctggcgcaacatactttatggagccacaggatgctgttgagctcaacaacagggaagttaaactctcaggagaggagagagcagaggaactggcagtattgagcttgcttacctcaatgattgcagactcccaactgaagatcagaaatttgatggacaatgttttggaattggaccttgcttgtgctagagggtcgtatgccctatggacaaacagtgtcagaccaaccttcactgatagttataccattagccaatcagaccagtgcaatgactattcaatttatattgagggcattcggcatcctcttctacttgaacagtctcttatggcagaagaatcaactacagaagcatctgaaatgcctgttccattggacatgtgggtcaaaaaagaatgcaaggatagttgtgatctctggacctaacactggaggcaaaactgccactatgaagaccttggggctgtcctcgcttatgtcagaagctggtatattc

SEQ ID NO: 2598 - DNA, 812 bp, Zea mays
acaccatcgcgtcgctctgcaagtccatcctgccctccttccgcgtgggccggcggctcaccgccgaccaggccgccgcgcggcgccacgccgagcagctcaagtggcagcaggagtccttccaccgtatcctccacctcgccgcgctccaccgcgagggcatcgctccggcctccgacgttgccgccttccgcggaaccatgctctcggcgctcgtcgcgccgccgcagcaccccgagcagcccgctgtgctccgggacaagctcctcttcctccaggagctcctctacgccaagtgcgtctccgcggcggagtacaacgcgtccaaggcgcccctcgtgcagcggctcgccgcgttcggcgtcatcgtcgactgccccgacgcggaggtctcggccgaggagtggtcggagatcgacctccgtgacccgcctcctcccgccactgcggcggcctccgacaagccgaagcacaaggccttcgtcacgccatggaagagcagatccaagaaggaccaggacgtgaacagcagcgcatcaaggccgccgctggcccatgtggaccataacaacgccaccaacgcgccagtcttcatgaccgagagctcgccgtcggaaacggtgccctccgggaaggccgagaaagggaagagaaggcatctggcagggatgttccacagcggcgggcagtggccaccgagaacaaggagcctgcgggggaggaaggggtcgtctagaaagagaccgtgagagggaagaagaaaagctcgtgggggtttgatggcatcaaaaaatgacgaaagccgggcctgt

SEQ ID NO: 2599 - DNA, 808 bp, Zea mays
cttggtttctcccgacaatgctattgaaatacgccacgcgtgggaatgccggcaaaatcgactaataaactggttggtccatatgccatgaacatggagagcaactattcctagctttagtgagaacttttttttttcaatcactgctaccttgaaggcttcaaacagatttttaccatatacgtatacgctagtaacaaatgtcatggcttggttaaaggacacctcaacattctgaacatacaagttcttagcatcatcttatgctttgcattaagattaccaatgctgtaaacagatacagtatattgagatgatgatgcatcatacctttgcttttacagaagaggaagttgttgcctcgttatttgtgcctctttgaaccagttttatcctgcttctcttgactcgaacctttatctttccgtattgaaccatacagctctcatcttctccgagagtttcgacaacggtagccatcgtttctcctcccagcccttgaacatacactttgtcttcaacttgtgagacgaacgagatccggttttcatcgtcatcatcgaaagctatttcgcttggctgatgagcggcaaccaccgaagcagtggcagcctctgctttcctcattagcgaattgtattggtcaagttttgaattctttaacttagcttcaaagttcttgattatggtgtccattcgatactttacaaacttcaatttctggtggaccttttggggctctcttggttttaatgcaggtactctggttttgagaacaataactttcaaacaaatttttaagggaaaa

SEQ ID NO: 2600 - DNA, 803 bp, Zea mays
aagagattagcaaggctatacatatccttgtgcttattctggattgttcttgattaccattttgtaaaataatgtttaaaacaaatgatagtgtatgctttgttacaagtagacaatggcagcccaagaaggtttagttccatctaattccacaatgtgaagacctgaatcgcagtttcccatttctggattatgtattgttgtaacttgtaagattgatgtgacgagaagagatttaggtgatgtcatagagatttgactgggcaaacttttgctggtgtggcttagttttgggatagtaatacagaattggcacaccaaaattcatttaaaatttatcattcttcatgttgatttgattttttcttgataacatcatatttattagcttacaaccattgtttcggtcatcgattttgatgggacaatttttttgggagatggagtttgaaagtgatgaagatatgctattcccgttcactaatgttattggcaagtgatatggagtttaggttctcaatttattaacaactgatcagtctgaacaacgaaggtctgaaaagctcaacaaatattcacacttacttaaggaatccaaactataggaaggaattctgattgtctcagtgaaatcattggattcagattagtttttagcttctgtacatgcttatgatattctgtactgagtatttttttttcattttctttgcaggctgaggtggctaaagttgttgaaacacaaacaggcttggagcgtcaacttgaattgatagaaactcatcaacgagaggtttgtgttt

SEQ ID NO: 2601 - DNA, 587 bp, Zea mays
cttgcatgcctgcagttcagttcatcggagtattttaagaaaaaaagaattattgtgtaattgaacatcccgtgcaatcgtcatatagttaattaaacaactaaaaattataaaacatctcaaaaaatgatagatatattttattatttactgtaacaatatataaaatttgaagttctaattcaccctatgctaagagatataaaaagaattttttataaagtgatattttttctctttttatatcacttaacatatgatggattagaacataaaaaattgatatataactagagtaaatagtgaagtatgtttataattttttgagagttttttttataattttcagtagtttgattgcacttagttgcactgtatttttcctagaatttatagctcgcctgtatatgtatagtgtttatttttatatgtgtgatccctaaaaagatggggtgtttattttagtttaaaattgaattctggcagctaaattcatttctgtgagaattattttggtgaaaaacgtctaaatcaacgtaatcaacatcaacgtagaacacatcaagttgtcatgataagagtaatct

SEQ ID NO: 2602 - DNA, 579 bp, Zea mays
atcatgctgtctccatctccgtgtcatccatgatccatctcataggctagagagcccaaggtgttcggagatatatgcccattcgaactttcttaacgcctacctgcaatgcaatgcagtgcttgcaccgagtcgaaagttcgccatcgttttccaagtaaaaaatcttggtataaaaaatagaaagaaattaaataaaaaatataccggtccttgcgtgtcactctctaccacaatcagctcaagtgctaaattaatcggactgctgagtataaaggcataccatatctgtaccaaaaatcctccctttcccatctcaagctattttcctgcttagtgagcttaaaatggctctgacggccagagagaggaggcttccgcagctgcacatctcgctcgacgtcccctcgtgcgccttccgtcaccacaacccgtcggcggcggtctcgacgtccgcgtcgcgagccagcggtgagttccggctctcggacttcgacaggctcgccgtcctggggcgcgggaacgggggcacggtgtacaaggtcgcgcaccgccggacgtcggcgctgtacgcgctca

SEQ ID NO: 2603 - DNA, 782 bp, Zea mays
aaggagaggtcgttgcaaattttttttcgaatacgcaggagagctgtgtatctttatattaagaaggaaaaaggttaggtaaaaagaaaacatcatataactccacacaaaaccacacgccctaatctagatacagttttacaaagagaaaaggtggacccatgaccttgaggacccaaaacagagttcaccgattggaatgctggagagctaggatgttagataatccacgggctccagccctacaccaaaggtgaggctcatccttgacccaattgatgaacatgctaagtgctaggatggtctccgtttaaaacacaatgaatgtgttgcaatttcttatggttgggaagtggggtggcgtatggacgctgtcatataaccttgaaatcagaccaggtaagtatgaaggaaaatgagttgaagtggtcttgtaatatattggtatcaatcaagtctctatttatttcctaaggggacaaatgtggtttactttgatactgcttctatatcaaaaggctatttgggtaggatatcaaaccttggcatgtactccctccgtccacaaaaggatgcaactatgggatttgtgcgagtcaaactagcttaactttgattaggtttatagtgaatagtattgacatttatatttccaagtaggtttgctacaaaaatatattttataattaatttagtgatagttattttgtatcagaaacgttagtacttttttctataaccctggttaaacttcaaatcttttgactcctcaaaaagtgaga

SEQ ID NO: 2604 - DNA, 649 bp, Zea mays
aagggcacacattgaacctaatatatgcacctgcttcaggtcataatcaaatttcttcccttggcgggcaaaaagcatctttccaacacgcccagccccatcctgtagtagcaaaacaatgcagacatcaaacagtagtttttttttttttttgctaactgcacatagtggatctagtgaaaaaaagtcacagttcacaagtgctattttctgtaagaaaggcattaacagtactagagatatagttggatagatcttaatgacattgtgttctttattttggatactatattgcaaattttcttcttctctttgaacatgactatgataaatatcacaaaaagaaattctattgatcagtttttcaacaaagaattggaaaaggtatttccaccttgagaatccagttgatagccacagcaccagatgcagccctgctttgggagactccaacagagttgagcaaggtccttgttgtaaacacacccattgctccaccaaagaaatgctggcaagagaaaaataaaggaaaatttaaatgaatacatctacccagtatatcatggaacccaaatatatcgtaatgaaaatatacctacactgctctacatgtcatgtatggaacatatgaacgtgtgacactatctga

SEQ ID NO: 2605 - DNA, 791 bp, Zea mays
tttagaaggatcaaaggacttcatgaagaagctgtgtgataagtataatatccctacagctaaggtacttacttttcatttatgtaataagttactcatggcatgactgtagtgtaggctaggatatgtttgtcgaaatgcctgcatataggtaataggtgacaacatctgtaggttaagatacaaaccaaacgatataccgttttaggtattcatatagatgttctctttgttttgagacagattcttggccatgttcatgttgtactaatctcatactgatagccacaaagactataaatagttaactatgattttccatggcatttctagttttatggttgaactatattaaagaactatctgtaaaagagggcaaacccagtgccaaagactcccatattagtggagtctggggaaaggataaaccgaggcgagtcttccttccgcagatgcagagaggctacctcgaaaccgtgacctggtgactgtgagacatctctaattactacacaaggtctgcccttaattaaagaactatctacaattctaaaaaatccctagcttttatgtttaaattgaagtcattgtgatgctgtagaaaatagagaatgtaaggtcagtatacaaaaaagtacaaacatagctcattcatttgtaaattgataatttcagatgttaagccactcaaaccattctaatatgagtacttatttctctctagtatcacacatttacggatgctgtggaagctaaaaaatatgtaaaaaatgaaggagcacctattgttg

SEQ ID NO: 2606 - DNA, 661 bp, Zea mays
cttgcatgcctgcagctcacgcggacgcggcctgccaaccattcccccccgggcccgcacccgccacacaactccagcagtcctcctcatcacgccgatacatggggccaccggcttccgaccccacgctgccagtcatcagaagtaaaacatcgtctccagcccacacgagtactcgtagccttgtcgcgcgacgcgatctcctggctgcgagtcggagacgagccgggtataaaaggcatcgtccatctctccgggcggccgcgctgcttcgctggctttcggcaacgccctttattaccacatctgaatctcacccacccacccacccccgcgtcccccacctcatggcgccggcgatggggctgaagcggcctgcggcgggagcaggggcggcagcagcgcagaccgtcacgctgtccgcgcctgccgtgcgggacgcggtgcgcaccgccgtaagggaggccgaggccacggcgaaggctaccgccccggccgccagggtcccggcgacggcggcagtgccggcggagatcgctagggatggggtgctgtgcctggaggaggtcgacgggaggcggtggagctatgtggtcgacgccgctggcgcccgggtcaaagccaagggaagggcgtccgtcggcggcaccttcaaggccgt

SEQ ID NO: 2607 - DNA, 800 bp, Zea mays
actttttggtttctccttgactgaaaagatcttgccagcagatgatgatgacgtcaaggaagtgagctatgagacggagtgccagaacccacggatgctggacctgttcgggtacaactgctcaaccccgagtgctgctcttccagctctgtgtgctgccgccccctttggaatgtgatgctgcttcgaatctttcgataactttgctccatgtactcttagaagttttactttcccagtaccccaggtgtagtcataagctgctttttgacatcattccctctggtctgcctcaagttaagcagtcatttgcacaagtaaacgaaggttcgttggtgaaccactcctcgacatgcctcaccctgtcacccaaactattgtggttagtctcaggatacccagagacaccacattgtaacttatgtcgatgatccttcagaactgttgtgcgatgaagctaacaatttgctctaaaagtactttgcttgctctaaaagtaccggctatgtatatttaaatcagcacctgtatgagtttttttagccctcacaagccctggttgcagtcgactaggccgtgtgattgtattagtatgctatctttttaaactgtcgcttatgagtctttattctagtgcattgtgtgaatactctgttcatcgcatgcaagtcttgtcttctgtttctgttggcttggtaggagatactctgattttataacatgtcagatttttattgctcaattgaactctgaccatcaatatacaaggaatttggtgaatactcgaggcccctgttgag

SEQ ID NO: 2608 - DNA, 830 bp, Zea mays
cttgcatgcctgcagcggtgtcgatagtggtggtacagggttcgggcaacaacttgggtggcgcagtccttcctctcctcgtctgcatcaagtccatcttcggcgagctccccttcctccattggccagtgtggcttgctgctaaagttgctcaatgacgattgagtccgatgcatcattttgtactggaatacatttaagtacttttgtggtgctagaatagaaggaaaaaaagctagacattgaataagatcatggctcgtccatggaagtgtctaaaatttttcatgaaacagcatcagtaaaacatgtttgtcatcagtttacttgttaaaattagtctcatgtccgcggggctaaattagtctcatactcgtttcctaacaggggaatttctcgcggtgaatcggagatcgggttcccattgtcatctctactcaccattgctccaaccactacgacttgaacaacttctccatcagacagactcgggtacataaccgagcccttagccctggcctcggctctgcttaatcaaagatgcaaatacaggaaccggacatctcctcccggcacaagtcaacatcgaagtacaagggatataccaaaggccatatcggctacaggggctggatcacgcctcctctccatacacaacaaaccccggtgctcctgaagaccctccttgaggatataaatagaggcgtccaaggcttcaggcagggggacactttacggtttttcacctccacgacgaatattgacacttgtctcaatcaactctagggaactttggattctttccctctcccgaccaatttgtacctccc

SEQ ID NO: 2609 - DNA, 1013 bp, Zea mays
agcaagagaggcaccacttgggccagcagttgcaagttcttgatggtggcttcttcgttttaggagcatcataaccatacagtgcctgccgtctgaaaacacatccagtacccacataaatgggtccttgaataccgtccaaacctttcatgttgatctgtatcatgcaagtgttacaaaaactatgagataacgacaataaaatgaagagcttaaggtgtgtgttcgaacagggaagttgaatcttacatcaaaaaagacaacgttcctgttagcgtatcgatcatttttgtcaataccatcaaacctctgagggaactgtacatagcacactttcttccccaccaaaggatccatcatgaaacacatagcctcttttatggccttgctattgttgatgtagtgatcacagtccaagttcagtaggtatgcagcatttgataagacagcggagacacggacctatcaattatgaacacaaaacaacaaagcatcaatcatgcactgctattaggttacaagaagaattgtaaaagacataaagtgcacagattttaccagtgcattcatggcaccagccttcttgtgatggttataacctggcctcttttctctcgagacataaaccaggcgaggcaactcatttccttccacatcacgaccgccactttggccaaggaatacctgttgacacaaaatttgagaatttcgatgttaagtagaacaaaccttcagttcagagaaaacaaagagagaagtaggacaaatggcaacgattaactggtaaacacctacctgaatcatcccaggatgatcgcgtacgttgtttccaggccaggggcttccatcttgcattgtccaatcttcctcaagaaacctttttgggcctcttgcaaaccaaaggcattggatcccttacccttgaaatttcctggtatttctcttctggaatggaagaaacaaaggcccttggtaacttaagccctgtttcattccaagaatagggaaaattg

SEQ ID NO: 2610 - DNA, 753 bp, Zea mays
ttgcacgcctgcaggcgcaggcctccgtcccgccgcggtacgacgggttcgcctacggcggcggcgccgcgacggcctggaaggacgccgtcctcgtcgaggcctttctcgacccgctctgccccgacagccgcgacgcctggcagccgctgaagctcgccgtcgagcgatacgcgccgcgggtctcactcatcgtccacccgttcccactaccgtaagcacgggcgcttactatgtctatatatcgagagaaactttttacgtagcgttgaaagttttggtgggttttgatcagtggacaatctcatagtcacattaattggctgaagtagctgacccgttgcactgattaaactgttgaatcagagatttctcactaccaaatttggctaatcaaattagcccttttcaaaaagggcaagctagtggaggatcctctggttcaggctggatgtccctgattcggtgatggtgtcgctgtggtgccacttgactgctttggagtggaaaatcatgacagcaaaccattttgtctctcatacatgctgtttgtttggatatgttcctgtttggttgggcgtgattcgtcctattaatgatatatacatctacatactttatttggtgatgtactgtttcatttcctgcaatcggttgcccctggactgcttaaaactattcccagttccccctgactaaataatataagctggctatttgctaaaacagaaccatcccattgcagaatcaaga

SEQ ID NO: 2611 - DNA, 765 bp, Zea mays
cctttgtcagcaggtcttccgccggcaacccctgcgcaggttccggaatctgcaccagtggcttttccgcagcttaacgcgcagtttggacaagctggccaggcagggcaccaggagcgtcctgaccaggcagcttatcctcaggctggccagcttggccagcagcacactcaacagccagctcagcagcaaccgtttcagcagcagcaaccgtttcagcagcatgtccaggcgcaacaccaagcttcgtttcagcatgtgccatatcagcaacagcaaacacacatgccaaatcagccacatcaataccacagcacgcatcctcaacacatgccgtaccagcatggtctttacatgcaacctcagcagcaacagcaggctccaccatattcatatcaggcagaccagcagccacagatgcgacaaactgcttataatcaagctcagcagccatcagtgcctcaagctgcctacaatcaaagtcagagtcagcagccaccaatgcctcaatcttcctacgatcaaggtcagagtcagcagccaccaatgccgcaaccttcctacaatcaaggtcaagttcagcagccaccgatgccacaaccttcttacaatcaaggtcagcaatccatgataccacagtctgcctacaatcaagctcagcagcctcaaattccacatggtgcttataatcaaagccagcaacccgctgggagataggattccccagggtcaagggcaacatcctcaacaatctttgagctctca

SEQ ID NO: 2612 - DNA, 945 bp, Zea mays
ttgcagggggtcacgttgcgtgtccgcagagggatcacctgaactctaaagacgcgtcctgagcacagccgagcaccggatcactcagatgataacttggagaaggaaaccaagcaccgaaagaataggcatacttgtagcaacagaaagtagactcaattggactcaatgatctataaagggatgtctcttcagtcagctatataaggctgcagaagtacccctacaaaaaagagagagcactccatagattgataggcaacttcatcttccacctcccacaatcacatgtaatctgggaactcagagcaatccaatactcaacactacaggacgtatggtattacgcacttgcgtaaccgaacccgtataaatacctcatgttccaacgtgtccctgcacgtatcatcgagcagcgatcgacatcgccgtcctcccaaaagctctacgtgggttaccacgtagtgcgtcgtcgggactaaacaccgaaactgttcgtacaaggaacaaagtcctgttagaactcaaggaagacggttctaacgatcggattcgaaatcagcatatggataaaattcctttttgaattttttagaaaagagtttaaatccaaatccaatttttaggtgtgaatttaaattcacacaggtaaaaataatgctccagcatgcagcgcataaacaaaatatttattttaagaaaaatattatttgaaatgtttgatccatataaatgtcctctaattcaaataaatatgggagataattttatttaaatttcaaattagaattttggaacagcaaatcatacatgaatacattactagctcacactttgttttaattacttagtacactctatgcgatagaaccagccattcatgaatatgacgcccttgtccctgccacaaccgccgaggtggcccaaggatgggtggtgactgga

SEQ ID NO: 2613 - DNA, 703 bp, Zea mays
tctgtatttctgtgtactgtcgctatgtgcggggaacaggagctggttgtagttcaggtctttccaggatggaccgaggccatgtacatttcaagtcttcaaccgtgtctcaatggctccgccccctcagagctgaaaagaaaccacccagtgttctgtccttgtgcttcccctcgtgctcgtctccgacctgtaacacaagttgacgtcagcataagctcctatcctataggtgtataattaggtgttagcacatacttcctctgctattctctgaagagtttctaatatttcggaaaagtctggtctttgagcggggtcttgctgccaacatttctgaagaagctcagaaagcattgcataagtatgtttcggaattgtaggccgtaatccctgtgaacgaaacttaacacatcagagaaggactcgctgcaatcctctttcctttctctttagagcttgttcggttagggatgaattgagggagatttaatcccttcctattttgaataggaaggattaaatccctctcaatcccctccattccccatgcaaacgaacatggccttacagtgcagaggtgagcaagttctaagtatgtggcaaagaaaccctggttcgagaatctactatcagggctagtttggcaacactatttttcccatggggatttcccaatttcccaagggaaaatgaacttatt

SEQ ID NO: 2614 - DNA, 753 bp, Zea mays
  unsure (1)..(753): unsure at all n locations
acaattgttctcatgcagctgtctcctcccatcccttctgccacaccacctctggaatcacaacccaacaaatcattttgccatcttgacattgcacatgttttctgacatccacggtgtttaattggatggctacgacctatataacgttagggctctgcctcgtgcttaagaacaccttggtgaatgcataatgatgtttccttaagcatttttttggtactgaggacattacttctgtctcttttcttgaactgtttcatgacagacgtctatgtatactctttgagctcttcttttttagtaatctagtttcttactgtctaggcaataagtcaacatacatgggcaatatgtatagtggttaatttttttttgtattatcattttttactgattaatggaatcttggtgtctgcttgtctcattgaacagaaaaggaaaagagttcagaaacaagcagctgaagatggtaaagagaatgatgatggggatgatgctgatcttgctggttctgaggatgcatcaacaggagacgaagctgatgtgggctctgactctgaggcaaatgatcatgctgtgagtgatgctgaacctgatgagcctccagcaaagaaaaagtctacagatgtaaaacaggttaaagaaactggtactgatgcaaaggaaaaaggatgcaccaggaaaaaagggttctatgaaacctgcaaaacgtgcatcanagcccttttaaaaacagtaaaaatgagcctg

SEQ ID NO: 2615 - DNA, 743 bp, Zea mays
ttagcaacaataccagggatactgaatcacaaatttgcattataagataacaatactacagccaaagcaaacaattctatctaactcaagcattgtgctcttaattctattaattagtcattaacaaaaccacaccaaaatggtaatagcacaaacaattagcatacacagaaatatggttaaatagtggctatctcaataactaagacattagtggaaattataataatcaagcaaacataaagaggtcagggcatttcccttatcagttgccaccccaaggataatcgagtgatatcaatagctaaggaacacaataatctaattatgcaatactactataatgtacctatgtacgatgaaagaaagtgaaacggccaaaaggtacaatcgtcggtaaggacagaatacgaaaacaaaattaaactcgaccagatcaactcagtaacagaggtaccaacataatttgatagatacttctgcttcgtttatgttccaatctcaaacagatcgagtaatcaataggtgaatgcttgataggtaggcagagtaggagaagatcccgagagggcacaccccgatgctggtcgctagcgggaccgacgatggcgagctggtgctgctgccggtgaggcttctcagtggcccttccatcccagagctgctagacatggcggcacagcgatacgagaacggccaactgggcgtgctgcgggtgccctgcgacatgggtcacttccgcc

SEQ ID NO: 2616 - DNA, 1154 bp, Zea mays
gttgatgccccagacactatctttggtctgtttatgaataccgagccaccaagagacacaggtcggcaaggccccttttatatcagacacccatctttggttgctcatggcttcaacaaccgttttcttattgactgttttctttgcaataattttgaacaagtgaggagccagttcggcaatgtttttcccatctagacacctatctttccagaacaagattttttttctccagtaccaatgattgagatcactgccatactgaatagagctttagcattacgtggaacctcaacttggaaattgtcccaaggacggggccgtcccgttttttgtgcccacaaccatgttagctccaaagcctagcctaatatttccaggtttagaattcctagtatcccatagttcaaaggacgctgaatcttatcccaagatacaaggcaatttgtgatatcctggccccaggagatggtgatatcctgacccaaggctttaatacaattaatagagtactcatatcaataaggtacatcttttttttcggaagcctatctcgaaaaaaactccaagttaagcgtgcttagcttggagcaatttgggataagtgaccgaccaagaagttttctcgggtgcgcatgaatggggacaaagtgcgcataaaagatatgtgttgatttatggagacaatatataatcctatagagctgacagaagtaccgccagtctggaagtggacaaggtgttacgagacctcgtccacactctgctagaagtgacccatgagtgtaaaaattacacacgcatattcatttaggctataaccatcagattatggatatgatcatgtaacgcacaattttactgcaccagataaagtaaagtttaaaatagaatataaaaataaataagtttggccttatgcgctcgacggataggcttgggagatgtgtttttttttgcatggagaccgtattattgcatggctctttagaaaaatgaattttcacatatttgtataatgccctgtttgatgtagactttggagcaaaattgaaaattgaaatcatatttcttaaattttttatagggaaagggacagagatcatgcgggggaaggggaactaggagtagcagcgatcgtttgcactgaagcc

SEQ ID NO: 2617 - DNA, 805 bp, Zea mays
tgtatcatggacacattttcattggtgtgcttatctcttatgcagtgccattgttatgtctgtgattgtcctgctccctgtgccctatgggacaagcattgtcatgctacggacaaggatagaaagtggaagagacttagggaaatatccaaaaataaaagccagccaaatcctaaacgaagaataccccagcatttcaaacgctcagtcacaacaggaccatcatcctcacagtattccgcaaatatgactggttttactggaagatttcctgcttcgggtactgcgaaccaaattcaacaggtggatatctctgttatggttgcacaggatatggtgaggggtatcagtctgccgagtgcaccatctcctacgccaagaactaaaaatcggagctatggatccaaaggtgcccagattgctcctccaatttatacattctcaaatgataatcatttccagccttctgttcctagctatggtctggtgcggcctcatgcatctaaaactgcacatgtttcatcaggaggtcatgttagcgctaagacttttcagagtaacccatctcagttttgtgttcgtgcaccaatgggatctcatggacacaggtaccgaccaccatcatatcctcagcctcctcctaacacagttgttggcactggtgtgcccctctcacggtgcgcctcgctgaacgctgagggctcagggaacacaacgcccacaagttccgccggcaggtacaatatcgaaggaatcacttgcaaatttggcacgtcggctgggattaccttattacaatactaat

SEQ ID NO: 2618 - DNA, 843 bp, Zea mays
agggaatttcaacaaaatagaaacaagtaaatatattattaagacatcacgaaaatgcaccataaatgtcatctttgagcagaaattaagtaccttcagcatctcaattgcagcaggccgaagtctgggatctttagtaagacactttgcaataaaatcatggaagaggagagacctgaaaatcaaggtaacaagaacttaggccaactgtgcttaaaacttctattgccttacatttttctcgaacatgtaggagagccgtaccatttcattaatagaagagagttcacacacacacacacacacaacactgtcacgacaaagacatacgtgtcggattaaagggaaagaagaacccgacaagtgtcagtgtgataatgtctgagcaaattgttaaaataaaatttagtagccaatagttgtgcaattccctctttcagaaagatctgtatgctctaaataagttaggagtcccgaatatggtatttcatatatgtcgaggagaccgatgttttcagggtctatgaaatcttaaagcaaaggacaaaattagcagcttgtcgaaccaaacactgtatgactgtcatgtttggtccgcggaaaaggatctcgaaaagcaggggcagggcccctctcaaacgcaaatccttcctttgtgtggaagccctgaccctaacaaggggttgggtgatgtattaatagactgagttagttgggtctagcccattacacaggggtgagaaggtaaatacacggggtaaaccccaaaccctaagcgggtactctaacactttgattaaccatcaataattggtgttggacgattgatcacctcaccaagtg

SEQ ID NO: 2619 - DNA, 784 bp, Zea mays
aatgaggctaataggctgtaacctgtaacagaataaactgctctatctttggtgcagtgtacttgtctctttactttcatttctgatgcatttgttttaacttcatcttgctaattatttggtatacatatcaatctattatttcattttcgtttagattgatagactggctaacggtctctcttccccctgcctatctcaggttatcttcatgatatctagtgaaccagcaccgatgctggaggataaagagaaatggtgagtgttttctagtaatttgaatacgggacagactcatcagatctaatatttgcaatatcagatgtttaagtgcctagaaatagggattggcccaggtttcttgtgatctgcaatgaaatcaatataaactagaggcactaatccaaacaagctcttactgggattgaaaactgaacagttatttgtcaatactattttcccagaactccttttatttgtttggattttgggcatactgtagcttgaagatacagtaaatagtaccaaaagtgaaaaaaaaacaaatgagcagaaataaatggtgcccttttattaattgagctcttgtgctatctccatcctcttctgattggcttctacaatcgactgaacattttgcctatgatcagagcagttatgttgcctgcctattttaccttgttggcctgcatagtatgagagagtagctaattctagttacaacttgatggaagttacagccagtcaatattttttcttgaactgcgcatgggagctgcatgcc

SEQ ID NO: 2620 - DNA, 1005 bp, Zea mays
taaaatttgcaccaattgactggtttaaacatgatatgttccgtagaagaatttgataaacaattagccttgcgagactgcctatatagaaaacacttgaaaggaaaaataacgagaataacaactaaactctgtagcgagcaaaagaaaaacacgtagcatgcacatcaaaactttatttttgcgagatacataagatcatttgatataaagaaacatgtagcttttatttttttaagaaagaaagaaaggttaaactctaaatactcccttcgtatagaaaaaatgctattccatattaattttttaattttaactaagtttacagacaaactgtttttattatttatgtctttaaatagatttatatgacaatatattttacaattattttttttaaaaaaaaacaggagtcgtatttgtttagcaaaacaaccaagacacgtagtggcggcactaacgcgttgatacttgcctcggtagggcgtgtcgcgagggcattggcccttcaagtcacgtaacgtgcatacgtgacactggaactaggcaactagcaacagaagtgttctcctactctctatactagcaacactgcaacagaaacgtagggctggaaagtggacagcatctaggcgtacacctgtcctgtccagacagacaacccaaacgggaaaccataccaaacgtccaaacccttcaactgtaggggcagcggcccgggccgtggcgagaccgcgagagcagggctgcaactgcaacatgaagccagccgagggcgaagccagcacggttggggcccaacgaaccatggtggcccagctgtcacgagtccgtgagtacggtaccgcgtgaactatatagcgccggtcagatgacttctccaaataatccaacccggcatgtcgtctctttgcgcggcgtgacgcgcagcagcaccccttgtatgatcgcgagttccgcacgacgcacgcagagcacggaggacgtcttcgcggaccctctctc

SEQ ID NO: 2621 - DNA, 819 bp, Zea mays
agagagcaatatgcttccgtcttcagtagcccttttaccagaaagtaattgccatttgagatctttactggtgtccatgcataaacctcgtgtctcatgtttcttctttatgatttcaagatctgggtccgccaacagttgagctccatcggagattatcttgtccaatgatgatcgtgtctcagagcaactactgcaacagaaccactcctcctcgggcaattcctgtagaaaaatgtattgtgttggcattgagccattcaccaaggtaaaaggcatcatactccatctgaagtgaatatatcatgcacaccaaatctaaagttaagataatgacctattccaatcgcataataaggtcgttctgcactaacctttagttctacttgccattgactctgcaagcatcctacatgatactctttctcacactggccaccacaaaatagaaatatgtcaaccaagtgtaacagtaaacttgcacatatatgttgcactttaatcaagagcaaaaaaaaactaagagaaaaatgaaccgtacgaagaaaaggttatgtcttaatatttggactagaaataacgatgtacaagcaaaaatatcaagccacaacagaaaaaattaatgcatagcatacttggtcacagagtatcacagtgcgctcatcaaacacagcattgttgaaatctttctgtctgcacagaaaacctttaccagttagaacactgtcaaaatgcaactggcatgtcaactgcgaacattaaaaaaacatattacacatttgagtttctaagagacacctgctaagagtgcctactgcc

SEQ ID NO: 2622 - DNA, 791 bp, Zea mays
tgcagcccccaaggctgggggaggaggggtcaaaacggcatgtactctagcataaaagcagtggcgctagcaatcaacaaagttcagattaggggacatggttagattgacacactttctgttttggtcagagccactggttagactagttacatatatatgattattattataccctgatcaagacaaatcctacactcattttttcttttaaaaaataaaacctagttcagttcagacaacagacatggagcgagcatgtgctcatagatgagagtgagtacaagatgtcatctcaaagattctcataattgggcagtggcatgatttgagttagcacctactgcatcacgccttaccttggggtgtgcaaaggggtatatgcattcctgccgtccttataggcccacttaacccaaatctttggatcctgcaacttttcctctctctctctctctctctctctctctctctctctctctctctctctctctctctctctctttctctccttcaattcactgggcctgtgcatggctacgtacgtagtctatatatgcctagtcacacttgtggatggatgatcagagggtgctcttatttttcttcgatgcacaaacattgcccctctgactgcctcgaaagaaaaagctaaattggcaagtcttttttttacagcaaccacaagtggcacttaactttaggtcacacgcatgatggaatcatctgggggtttttattatttatcaccctgctgctgggaattagatttcccacacaccccccttttt

SEQ ID NO: 2623 - DNA, 748 bp, Zea mays
tgcaggcaacgggcgtcgtctgatgtggtggcggatagcgaagagacgagcggcgccggaggatgcacacacgctaacactatacggctgctcgcgcgatctgcctgccggccggccggcgtggcaacggtcgagtatgaggcgtcgtgtagctagccgttcacgtgactctcgctataggctaccttcagtgcagtgcaccagtggtccgactgcgactactatggcccatatatgcacgagaaagcgttctccttcttctccagccccaggaaatactatatatacgcgcgcgcgtccatgcatatatgtcctgtaattttctccggctccattcgatatgtcctttagttgctctaatattcacacaaatccatatttattgagatgaatgctagagcattcaaacaacttaggttttgttcggttaatcccgttacctatagattgaagtttaacttatttaggatttaaatctacccaatcgcacttaatccacatccacatagattgagagttaaccgaacaagctcttatatatattttattcggatgtatttttacttgatataaatttaaaccgacccaacgcacatgtactagaatcgccaaaacgaacataatgatgaatatttgaaaagttttgcacctggtcggcacgcatgcatgcgcggcgcgggggcgacggggtgcaataatccgacgacgacgagacgacgggggcaggggacacgcgatctacggccgc

SEQ ID NO: 2624 - DNA, 786 bp, Zea mays
  unsure (1)..(786): unsure at all n locations
atcaagttcagcacgctccatcatcggtgatgatgcaagagacggcgagaacaccgacgagaagccaaggcctcccgtgccatccttcggaaggctgcttctcctcaacgcaccggagtggaagcacgcactggtggggagctcgtgcgcggtcctctctgggtccatccagcctattttcgcgtacggcatggggtgcacgttctccatctactactccagagaccatgaggagatcaaggacaagacggagaagtatgccttcgtcttcctcgccctcgtcgggatctcgttcctgctcaacattggacagcactacagcttcggtgtcatgggggagtgcctgaccaagaggatcaggaaacagatgcttgcgaaaatcctcaccttcgagatcggatggtttgaccatgacgacaactcgactggcaatatatgctcacagctcgctaaggacgccaacatcgtaagcactatgcaaagcttttatgatcatatacctggagaagaagagagccgtacctgttcatatatttgtgttgcattgcaggtaaggtcactggtgggcgaccgaatggctctgctgatccagacggcttccatggtggtgattgctttcaccgtgggtcttgtcatctcctggcggctagcccttgtcatgatagcgatgcagccgttcatcatcgcttgctcctatgctcgccgtgtcctgctgaagacatgtcacgagtcgatcangcgcagtcgaacagcagctactgcgaccgtctcacctcgacgtaccgc

SEQ ID NO: 2625 - DNA, 777 bp, Zea mays
tgctagggcaccttcaaagcaccctgagaggagtgacaggcccaaggacactcgtcatcagccccaatcacgagagcacgagcgacaactgggctcttctcatgtctcagaatcgagaacgaggaacataacaaggtcaagctccgagagaagggaccgtgtgcattccgactgggcctctgttgaccaccatgaggaccactctactaggaagcggacgcgcgattcctctccgaagtatggtgatagacagagcgaccagaggtcgagtcacggttccaggagtatgatgactcctgaggaggatgcaagcgacgatgaacgtaatttcaagaggagatggggtcgcagatcatcaggaggcgtggacacaaggcactgaacggaagaatgtggactacggcggaccgaccaagtgcagcaatacattgctggccaccagtgctcacctatccattttcttttactcgtaattgtatgtattcccctgcaaacaaaggggaacttccggttccctggcgaaatgtaatggtattaccatgcgatctctccaaatataaatggaagtttgctaagctcacgagttcttttttactttttttaccctaacgccccgttttggaatcgaattccactctaataatatataatagtaatttatgaagctaaatgggtttatatgaatatatttttctactattattaccaatatttttagcaatatgtgaaaaataccctctaaatttaagaaatacttatatttgagcctttaaaaaa

SEQ ID NO: 2626 - DNA, 752 bp, Zea mays
aaagtcaggtttgagatttacttacatgaaactcacttaagttccgtttcggtttccaggaaaccgtcggctgaaacagttcctagcccaattgctttatctaatttatataagttttgattagttggaacaaaacctggatgaattctgggcaaacgaacaagcctgctactagttcaggtggaaattatagttatagacttgcaatcagaatctggatcagtacgtaactgctatttcattaactcttaaatacgttaattagtacatatggccaggtgccaagtgctagctttgaatattgcacatccaggcaccctacgctactgctgtgtttagcgaactcccttcttgcatttgcagccttgcaggtaaaaaccaaacaactcagtgctgcttgcctccctgctgcaaagcgaccaagccaaagtaggttccagagcgaccgctggccattagagacgtatgcgtgcccttctccaccacaactcccctatcaagcacagctatggtatcgcagccctggatggtgctgagcctgtgcgccacgaccacgctggtccggccaaccatcaccctgtccagcgcctcctgcaccgccttctcggactggctgtccagcgcacttgtagcttcgtccagcagcaggatggccgggttcttgaggatggcgcgggcgatggcgacgcgctgcttctgccctcccgacagctggacgccccggtcttcacaccacgtgtcgtacccgtcct

SEQ ID NO: 2627 - DNA, 816 bp, Zea mays
ttcccgcggatcctctttagtggtcctgcaggactgcacccctcaccttccgatcgctggacgatcctgcctgcgtctccctatccaccctttaattgcattgcagctatttcacctccatcgctaccaaatagcaacggttaaccaaacttgattttttttcttcctcttcatcttcccttgacaataccatcggttgccgcgtggtttgttattaaggtataatagttagccgaccttttcaatggaaatcaaacctagatctacctaccaaataccatctatctataaagtggcagtggcagtaccgtgccgtgcgtaccgtggatttattaattttggattggattggattaattggaaagcaaatgcaagcatgcagcagcaccattggctgccaattgagccctcttaaatagaccgatattaagcacgacacgactcataatgcttcagcacgacacgaacatgatttatatagtgccagtgctagcacgacatggtatagcgctcgtgtttgggcagccaccccgataagatgggctgtcacgagcacgtcacgattagatacggcttaaactagctggtgttatatatatcattgtgatgcgtgtatgtgattgtgaattgtgatttgttatgattttaaacataataaattcactttttttgagctcctaaaatgaaatagtgcctatcgtatagtaccagcacaacacggttagtcactactgtcggtagtgtcggcacgattattaatagtacataatagttttgtgtctaataatattaatgtgagtgctatgtcgtacggct

SEQ ID NO: 2628 - DNA, 806 bp, Zea mays
caaagacacatttgtttctatgttttcacaagatccaggctcccagaatgataagggaatcaagtcctttttttggtgagtccattaacaatattccccaccaattcccaccagcccagatatgagccaacatccggttgaggagccaaagaatgcagaccaaatttccttagcaacaaataccagaattccctggataatgaacaggtaacaaggagatgatcaatagtttcatcctcttgatcacatacggggcacttctcaggatgaatcagccctcttttagcaagcctatctgctgtccagactcttttttgagctaccagccaaatgaaggagcgacattttcgcaaggcccaagttttccaaattctcttgtgatgagggaaaaccacagaccccaaaaaggacccttcgtaagcagtctttgctgaataggtgccagtaggagtaatactgaaaacatgtctatcctcaacctcaggcatgggttcttgttacagtaccccaaaaaataatttccagtttccccgacagaaaaaggtagaaactaaaaatggggtatgtgttaatgatttgaccatttcaaccatatattaatgcagatgcgatgcagaaaaggactacgaagtacttcattctttcttttcagaaaaagtattcgtcgtcttactattctgtactaaaaagaatcttgtaatagcattcgtaatggaaacgcaaaaaaacttttgattggtactgttctcctgaaatttgacaacagcacgatgtgttgtggaatttgtacagtaaaaatgacattt

SEQ ID NO: 2629 - DNA, 794 bp, Zea mays
aaattatgcacttctccagtatcattggatgtagactcagcctctttattctacaatgtggaaggagagagaaatcacatttagaatttacataaaaaaagtgtccgcaaattaaatactctctccattacaaattataagatgacttgacttttctagatacattgcttttattatatatttagacaaagtgtatatataagtgcatagtgcataccaaaagttacatgcctagaaaagacaaaattgtcttataatttggaatgggaacaatagcatatggcagacccagtgctagaggctcctacagggggtctagaaaagagagaaaccgaggcaagccttgtcccgaaaatgtggagagactgctttgaactcgagacctggtgactcgatgattcagtgaaacggttctcaccactgcaccaggcctgcccttcactaatagcatgaaatttactaatttgtaaagctcaaataggtgtgtacttgtttcttgggtgattgctgatgtactttccacttctcctccagtattcttattgagtctaagtattcttcatgatacttcattttctcattctgcataaaaaggaaaattgattgataaatgtagcatacatcaaacacgttagagagggtctcttctctccatgattttttaagtttggtatgtgtggtttttaaattattttattattttggggttcatatatttttttataaatatatacccacagcagggggtctctcttgctgtttttcccctaaaaaaacaacgttagagaaaatag

SEQ ID NO: 2630 - DNA, 701 bp, Zea mays
tttgcatgcctgcagatacttcactataacctggacagtgagaattcctttaatattttccacccatcttctgatgtcaagggcctgtgccatggtgcactgtctccttaattccatgaccgtcattctccattatatatttccatgacttgagaaaagaactattttaatatccactactttccaatttccatatcgagatagttgatctaatttattaggacttttaatattaaaataggtatattgaggagctgaatactaattatcccaagtcttcttttatgatctgaatttgttgggcattatgaaaggcagtatcagctgggataaattgtaatgttctgcctttccttgcagaaggctaaactataatattttagatacattgtttttttggggtagtatgtgctgctataattgtacaaaaaagattgaacattgatagtctgaatttatgtgctttttaagtcaatacatgtgctgattttatacaatattgcatgcttttggtggtaatttactgggtgacttttcttattcttctacatggtcaattactggctgatgtttgcaagtatgaagatctaaaccccaagttttagaaatccttgaattttccatttagccaatcttctatttattggactatatgagtagctacactttgctaaagtattttttttcttacactgatttca

SEQ ID NO: 2631 - DNA, 731 bp, Zea mays
tgtttgcaggaaatgatgcggatgaattcaatgcagttctaaagcagcacataaccccggaaatattgattacaacatgccgcttcaattcaggggtatttattatcaattatcatctcttctgcatgaatttctgctccttatctttttctgctaattttcaatttgtgatgatttcatgtttttttttcttcctacaacattgcatgatttaacaatacactttctattgcatatatccagaggggacctgcatttatcgatgagttaatgcaagtgataccgaattctcagtatgtaaaaaggggaacatatgaactcaagaaagtatgacattttactgatttattttttaaatttaatttgttcaacgaggcacctttataaattggttcagatccatttgttttcagattatggaatatgcaaagaatagggatttcacctcatttattgttgtccacacaaatcgaagggagcctggtatggattcatcatattggtgctaaaagttctggaacttcatcttgcttgtgacatctggttggtttttatgtaacagatgctctacttatcatggggttgcctgatggcttactgcacatttcaaactatccaaacttgttcttcggaaggacataaaggtactatatctgttgtttggtgctacatttactgtatttagtattgggggttctgtaatttaattttctgcattttgtggccatcgc

SEQ ID NO: 2632 - DNA, 427 bp, Zea mays
aaaaaaatccatatgatcactcaatcaatggctggaagtaattgtacttatttcatgaatacagaaatacacaggaaaactacaatctgccaaaaaaaaaagatccatattgtgattaattatctggacagctacaaagaatggacaatataaagatgagtgtgcatggaaataagacaataagttcaaacatttacctttctggatactgaacggattgctctcaaagtcactttagaaaatacagcgtttcgcagttctgggaacacagaaaccatcacaagggaaaaaaagattaaacaaaaggcaatcctgtgcatttcaagagggaggtggggggcaaagaaggggacctagaatgcttattagttatttacaagctctgatgagcttcagcgtcttttttgggtgagtgggggggtgggtg

SEQ ID NO: 2633 - DNA, 978 bp, Zea mays
ttctctataggtttctagactattatagtaaatttgattgggataataaggggatcagcttatttggacctgtttccttatcttcactacctgagctagttagtaagtgaatgcactcttaagtgttcatgttgtttatttgcaattgcaattactggtcattgacatgcttttgttgaacagctgacccaccagatatccaagatgatgattttcttcaacgggaggaatttctaaaagaatgcatagaatcttttagtgttctccctagaaactctgagacgaatcctagactattctcacggagatttttaaatattgttgatccactaaagcagagtaataatcttggacgcagtgtcagtaaaggtttgtttcctgcctctggatcatcaattataataataaaaatgaatcgtgtgttcatgaattttctcgtcaattaaacatgtcaataagattgttaacttgatgcactgaccttaaagttttgtatgagcccatttgcataaggacttacagtgccagtcagagaaaaaaaatcctgcttcagttgtttttgtcaagtttgaatatttattccacagactgctcagctaatcttttgaacactctgtgcaaaatttacaaaatgttttatttgatgatttgtgggttgatgatcctgtctcattgaatctttatcatcatactatcttttcacctaatgtgagattgaagtggactgctttcatcctgatctgtactgttaaatactctgtccaaaattctaaatctaccattcttgctaatgctacctaatgttatactgactgccttgcttctacattgctgatgcacagttgcacacccaagagttaccatttcagttgtgcgtagaagaaactgttgccatttagcaatattagtatgtctacactcactcaccactaccagcacccattgtgctgcgcctaagcacaaatcttcaataccttc

SEQ ID NO: 2634 - DNA, 723 bp, Zea mays
tcttgcatgcctgcagacttattagggtgtgtttggttggatgtattcatgtataaagagagtgatggaagagggtggacacagtttatataatgtttggataagagtcacgtgggagcaatgtaaacacggggtgattttttggtggcgacgtaatcccaaaaaattgaggagacggtatcgtctccgtctcatcctactttgacatcaaaccaaacacatccttaaggaacgaaaatttgaaacaacaattcctcatggaagaaaggaaagtttcacagtatgcttaggacccgaacatgcatgttatttcaagacacgctgaaggcagtcaagctcggtgtgcagacagacacaacatcaaattctatagaaatgatgtggagtgggagtttctagctagtcatatagcactagtcctaatcctctgaacagggatgcaacaacacaaatccaaagagggccataataaacactagatgacatgtcatcagatgaaaacctcaagaatctttgaatgtccaagtcccaagaacttagggagactagcaatctagtttcttttgtttcgtcacaagcatcctgctgcaatctatgcatatgagacaacgaagaacaatgcagcacaggcaagtagttggtgacttttgaggagtccccatgagctgcttgctttgcgagatgcaatttactatagctgaattcagtactagctttctgttg

SEQ ID NO: 2635 - DNA, 723 bp, Zea mays
tcacatcctctgtttgtgctaatatctcatgcagtacaataaaaaaatcttcctgaccacagaatcatatgttagtaaaatcatgtctctaatacatatactaccacaccaaatgtgtaacagaaagaaagaatcacctcacggttcacatatgaaggtccaacacagagtgtatcaatatcagctccaggtccatgaacctacaaaggtgaaatacaaattcaaaaacaaattaaaggtgaaaaataaagtataagaaaattttcacacagcaggattacagcaaaagacgttcagctccacgtaatttatatattttctacagacagacttttgatcagaaggatcatgaaaatccaaatatcaaactacaagccagagtttaaccagaactgggtcggtggcctgactatgtagttaccagcttgatagtcctgtgtttctgattcattgtgcttggtgtttgttctttacacacctataaaattccaaaagattgtgtttgtgtggcctaatacttgttagaatcacaaggttacaccagaactttaaatcatctattactggctggtatggtacttaccagccactaaagcaattaccagcaattaatggcatgttaccacttgttatgtctccgacagcagcataactacctccaaaagattcagcttggatccagattctaattgacaatttgacagcagcgttatacaaagtgat

SEQ ID NO: 2636 - DNA, 759 bp, Zea mays
gcagcaggcgaagatagtttctcaagatgctcaagttctcatttgcgcatagtgaccattttgatcagttgttatgtagctgcaaaagatttcagttcccctcagctgttgtccttgcttagtttcctgttttctgtaaacttcagatgcatgcttacacttagaaatccgtacctatctatgataatctatattctcatatccaatattccaatttactcagcaatcatcattccaatctagatgatatgaatgttacttcttatcctggtcttgctagccttattctgtacaacatcatatttttatcaaatttcttgtataataagttgtgcattttatcgttttttctatgaactatgggtatgctggtataatatgggttgtttatgcgtttatgtgagatttaccagctccgccactgcgatacatattaacttcatggtcttgcaaaaattatcaggtgcacatgtgtacacccatgtcctgtactcggtttaccctggattggacggggttctttagtgctgtgctattataaccaatttctggactatctattaaaatgaaactgtcttaccattcttatttcccagcccatttcagtacagcaagggttaggtaagtaatacatacatttcgcattctccatggcttccagtttctggaggcgtgagattagccagatccctcatgcttgatcaaaaccaaatgtatgtcacattctttgggaattaaaaaaactcaccaacctatgag

SEQ ID NO: 2637 - DNA, 788 bp, Zea mays
tttttacctttgggtcagtccctctcaagacttacttacccgatggtgacattgatgtcactgcttttagtaatagtgaagaattaaaggagatttgggcaaatcttgtccgggatgcattggagcgtgaagagaaggatgaaaacgctgaatttcatgtaaaagaagtccagtatattcaggcagaggtatttttctgtgatatctcatttagttgatgtataagcatcagagaagctcaatacaaggttacacctctgctaatgtgtacctatgatggagtttaaatcagcatcatgggctcatgactgtctttatgacttatgattttgtcgaagttattaccagaagttgcctattgcatgctacgccatataaatctgtacaggacagaaagtaacaaaatatctaagttaaacttaagtttagtatgtggctgtcacttctttcatacagttctttgcagaatgttgtgtgggcaaaatcaatatgctaatatactattaaattttaggaggattatgtttttgaaggcacttctagcatcagccttaggtctagtacagaaaaatgcatctgatatccttttttcttgctccccttcccttgtcttttggggaatataccatgtttaaggatttgccacttatatttttttcatacatttgtgttattctcgcatgtttcatgtataatatacaggtcaagattataaagtgtcttgtggaaaacattgttgttgacatctcatttaatcaagtcggtggactatgcacactatgtttttc

SEQ ID NO: 2638 - DNA, 802 bp, Zea mays
aatacctcctctgacacaacattcaaatgatatactcacataatgattaacctggaacaaggactggtagaacatatagcttcgacattttttccaccacggacgaaccgaatttctatacttgaaagcaatgaaattacaatagtttgtaacagcaaaataaaaccgtaccaaacctaagatgaggccatgctaaaatgaacacggaggattcaccaaacatacatgcgtcaacatgagattgctattttaagtacccgacatcttgtcatagctagatagaacagaatagaccagacaacaaagtaaactatagctacagaggacatgttgcagcataagaaaagaatgaaattcttattgccagtattaggttggtttactagaaaatgtatatgtgtatatctggagaatagcgacattccaccaggacacaagctcgaaagttgcaattatgtggacttttgagttttgaccagatacttctgctaatagaaaatatgtcataacaaaagttgattaaatttcaaaatatagtttcataattatgctaacaatcaaacagctactgtgacagcaaaagaatactgccacaaaaaatccccaaacaaaagcaaaaaaactggaacaaccaaacattgaggtagcaaactagtaatcgattatcacatatacagtgcatgatataatcacctagcattacaaataccacagaatgacagtagaaatcattaaataaaaaacaacacgcaatcaattgtgtggaaataagtgaagccaaactaccaaagacatttactct

SEQ ID NO: 2639 - DNA, 814 bp, Zea mays
tgccggacgtgccaccgctgttgccggctgagaagaacccaaggttcaggatgttgctaccgttggcggcgacggcggcgttgctgctgcccggctggtgctgctgctcggggagctgcatcatcaggccgtggaagtgcgccttgccgtggagcagagggccctggctgccttgggagccgtcctcggagaaatcctgggcggcggcaggaggggcgccgccgccgaggaagtaagatggcgaggaggccgacgcctgagaacggaacatggagctggagcccgaagacgatggcatgatgtggtcaaactgcggggcggctgctgctgctgctgaagaggactgggcttgatctgcaaagccatggatctgggagagccccaggctcatgctgccgggaccgacgtagaggccggcgcccaggggcggcatctgcgcgctctcacgagccagcgcgtcgcagaaggcgcggtgggtgatgaagctgtccctcctgtatgcatgcgtatatggaagacttaaaaccttaaggaaattatacgaatatacatataaaagtatatatgcaactttagctcaccaaattaagtctgcaactgtgttctagatttcatagaataactcttaaggttaggtcatgttcgttccaaacgtctagtgctaaatgttagccaactaataaatattataactaaattaactagctaactattagatgggtgatctaaacccaataaactgaagtccttactaccccgatctctttttctaataagctaacaagcgggaaaggccaaagcaactttattacca

SEQ ID NO: 2640 - DNA, 2054 bp, Zea mays
aatgtgaagctatttgttgatctaacctgaaaaaatatatatgtgaaggtggtagtgatacggctgtatgaagagttgtagtgcagttcagatgcagagatagtgtatactccctatatatatatatactaggtcagtgcccgtgcgttgcaacgggaacatataaattagtcaggaaccatcttagaagattttaccgacacctattcacacaaacagtaaattagtcagcattatattcatttacgagaaattgttatacaatcacatgaaaaacaactaattgtgattcctcttttcaagtattgctctagctaaattaggaacttgattccacacaagaggacacattaaagaatttggtattcagaaaggaaaatataggagcacatcgtcgtcaaaatatgaacgccttccagagatggtctcaagcagtacaaagcaaacttatacactgcgttgtactcgtcatcttgtttcttgtcaacgccaaagctgatgtctgaaacctttgcaacatcgtcttcagtcaaggatatgcatgaactgtttagtgttacaggagtgttttgttggtgtgtatattgcagacgtgactgctagttcaggtgctccgtttcattaactgcagtagtgttttgacgacaattagtaaaagctaaaatgagtgttatcctatcaacaactactaataccatgagccttagtatgacgagtacatacacttacatgtattacatgtgttctttagatggataataatatataaccattttactcattttttatatctgaagacatcttagagtagtgagttatcctgtattaacaatactgtcgtagattagaaaacacagtcccttttgactaacctggcccagtcacccagaactggccctgcacctgctgctcgagcttccctaccatcactggtgaacccatacgctatggtccctgtccctgcgatcagcacacatccgtgcagcttgcccatggttccactggccagcgccgccaccgcgtcgttctccacgaacagcttgacatggcttggaaatatgtccctgaaaaagagcgtttgcctgtgcgctcagtcggagacgaacttaactgaagaaaagactacagtttcagctgacagctgtctgaaaatttataatgtttgggtaaactaaattgggtgtatatctatatgctagacagacctgagccagtccagcattctctgctgatcgactggatggttgacgcctgctacggccaagcagacggcgcagacatttgaccgtcgccggcgcgccttgagcagcgcctgtgacatcaccctctccagcgtctcccttgccctgtcctctgaacgatcggaacaataacttcttttactaatcttacgtttcttctaaccagcaagaaaaaaaaaacgatcgtttgactggtttattatccatcacgatcattgcttggtcgtgacttgtgcagagcaagcagctgcgaccgtcgaggagcgagtccaggcgcggctgttacctccgacggagttgtggttggagcagccggcgacggtgcgggagaggacggggagcgggtcgttgaagggcatggcggcggggatgcagacgcagacggtgttgctggcgccgccgtcgacgccgaggatgacgctgcccatgcgcgggctctggcactcctccacgtcccacatgtcccgccccgtgagccgctgcatctcctctctctctctctctctctctctctctctctctctctcttctatctgcccgagcactcgagtcgatggcctacacaacactggaacgggaagagagaaaggcttctcctgctgtcctaccaactgctctgctagtgtgcagccgaggtgagctttcgctccatatatatgtacgtagtaggtcgcctgtggatgtctagacgaggcgaaagggacggggacggaggcaccgcgggagggcggctgtccgcacgcgcgtcctgcgtccaatgccgcgacggcagagttgtttacttggctgtgtgtgtgtgtgtgtgccggaggc

SEQ ID NO: 2641 - DNA, 779 bp, Zea mays
gcagttttaaggattggtttgttggggttatattggaaaatcaaatgcagttttcagttcctggtcataattatttgcatccattgcattaataaggttatagaaaagggtagagattacaaaactaccagcaatgcttaatatatttcccacactgttattcatccttcagctcttgaagtttacaaaacattttcttttgaaaaatgaagttccaaacagatcactgatttttatcaatgttttttttttgcaggcacacggtgatgacaaagaaaatataccgaatggtaatgcaaatttgcaagtgaaggaagccgacaatgatgaagacgatggaacaagatctgatgggtttgagctgatagatgtgaagcaaaacttcgattcagcaaaagtggaggaagagatggccgctccaagaagtactacagtcgatacatctcctgttacagaagaaagtgaaacacaagaagacaaaacaacagcacatgaagaacaatcagttgcaacaaacacaagacatctagagtcctcaatgttgaaccaacaaacagaacaattggaaaagctgacaatgcgtattgaggagcttgaatctgaaaatgacaaactggtaaaggacttaacagaagcagaaaataagcagagcctgcactacagttgtctacaagaagctcaatgctctcttgcaatgaaagataaggagctggctgaagtaacaaagtcgctgaaagatctgggttctgagcttggaacctcaaaaaagaggattcaag

SEQ ID NO: 2642 - DNA, 776 bp, Zea mays
tgttgtatttcttgttgcggcggcggcggcactctctctctctctctctctctctctctctctctctctcactcactcactcactcactcaccgcaggattttataaagcggaaaactggctcgccattgtctcgggtgttgtcgtctcagagctcctcctcctcctcctcacctctgctcctgactctggtcgctgcctgctgctgccatctctcgcctcaaccgtagtccagtaacacctgccgataaacacgcctctgttagacccctcctcttcaggcaacagctgtaattgatggattaagaaaagcattgcatggagagattgtagaaggaatctctaaaacaattgctatgcagcaaagggttcacatcgatcatgtgaagttcaaccattgggggaaaacaaagcgggctcattgtgccgccatctcctgttccacccttttccaagcaacggagatgtacgttccagcgagggtttgtggacgtggcagcaacagggagaagaggacaggcgatgagatgagagacacacattctaacatagaaatattaccatctgcaaagaaggggcgcattcaaaagcaacagcccagcccggaacaaactaggaaaagaagggtttaagaagggaaaaaaattggattgctaagggaaacagatagatagacaaaaagcctgcatcaggcaaaaattttttggtttaaaaagaagagaagggccagtagttgccagccatcttaatgcttaaaaaaatacacccccctcttgg

SEQ ID NO: 2643 - DNA, 749 bp, Zea mays
aacaatgaagataagcctgtaacctctagcagagatacacaagaggcgagctctctttgatatttcactaaatttcttacagttggaagaatattgtttcactgtttatgattggtttctttaattaaaggaaaatatgtatctgctcagttctctggttctatgatattttgatatagaccctaaatattgattccacataaatgggtcacataaatctaaggtactaccgtactagcaagttttgtttctttggatgaagctggcctagcaatagccagtaggttttatccatttgcagtattttgctgttgcacctttgacaacattgtaccttgatctgctgtttatcttgtgatctcatcctgcactctgacattgttccatacttgcatttgcagatacactacactcctggaacaactatgctcgaactcttcaaatataccagagcagacggctgtgtgcttgatagcttcatgttgcacgaggagaaggaagcaagtagtagacaactccaaaagtttaagctgcgcaggggtgctccacattttatacctgcatggcatggcccctcgtccctacagacatgtgctgccaaaatctgacagtgtagtgatggggaaaattaccactgactttgagaccagcaatctggctaacaagctacagaatctcaacctggagaagaaccaggcttcatggcaagacttcaggcacctgactagcatagcttccaccaaaaagag

SEQ ID NO: 2644 - DNA, 824 bp, Zea mays
tgcagctcaaatcaattaaggcttaaacaataaataaataaataaataaataataacaataataataataataataacaacaacaacatcaacaataataataatgataataataataataataataataataataataataataataataataataataataataataataataataataataataataataaagaggacgtaggtgagaaaacgataaaaaaggtcgggaacgatatcgttatacgaacacgattgcccgtcaattaaaaattaatccggttttataattaatatacttattaacgactacaatataataatggtagatactgaaaatttagattttaaatatgttaatttttagaaacgatatcaactttataaaaaacgatacatttacgaggcctgcatctgcattcagccctactcacgaggcatcctgagtgagccctagtcgcagccgcacgtggtcggcgtgggcgaacaagtccatgctaaacgcatgttttttttataatctatttacgtcataggcgtgcgcgtgcctctcgtcaaaatatatagatttcttatacctaaaaacaaaataatcttccagtcttcagtagttatatataggaaaggttataacctgcaccgtcagactagctttgcgctacatcgagttgcggatgtgaggtagcatgggccatggacctgctagcaatggccagtgctcctgtccgccgacttcagcaagccgcccgtctttgggtgcctccctttcccgtgggcccacaagtttgtttgccccttgaaagcaactttggctcttcggttca

SEQ ID NO: 2645 - DNA, 776 bp, Zea mays
aggaacgaacgaggacgctaggtacttggtctttttctgattcttgcttctctttctccctcgaattctttctcttctataatacatactgcgcagctgttcttcttctccatcttttctttcttactaaatctgatatgatactttcaccgtcatccgtccattctcaccgtgcaatctcaactttacacttcttgacagaaaactcctctgctaaaaattcaacgaagcatctcctctcctctcctttccgctgttcttgctatatatcgatcgcgattccattactacgatacataataataacaaaaagaaagaacctttccgcgtgtttggttgctgctcctgagcaggcaggtgcttctcccctcgcgagtatgtgggtgtccacaccacacgcctatcctccttttttttccgcttcttctctgttttcttccctcttaatatatccatcaaatcactgtgttagcgtgttatgttcttgcacccccactgttcacatgccctgctttccccccgatccgtgtaccctgttgtggggcctgcggatttatcgtattcccgcgtcctatctctttttcttgttggaacagagctgccagtcatagcagatagtagatagagaacaagcatagattaagtgacacaccgcttgctccatctggggtcaaacagaggcttttgtgtggtgcaagcaagatcctggacaggagacgtcattggttactgtttttttcctccattgacagttgcataaaggttggcagcaattt

SEQ ID NO: 2646 - DNA, 766 bp, Zea mays
gacttgaggtactcgatcgcctcgtcaagcattgacgccttgtccgtctgctcacgtaatgcaataacaagattcttgttactatactgtttagtttactatatatgtaaagggagagctcttgtccagtgcagtctaaggaaccttgttgcagtgaggtatgagctcttgcagggctctcatcttctcgtttatcctgtctcgtctcctctgcaacattgttgggaccaaacaaaaaacatccatgtcagagaccgtcgtcgactgttcaacgaggcaacagctagcaacaagttgtcgtcgtcagagtcacacgcacccgctccgacaggttgtgcacttcggcggcgcggctcctccgcgccgtcgtcatcttctgcggcggcttgcgcgccaacatcgcggcggaccccgactccgcgtcctgcaccaccgtagcattgccggcggcccaggcccgttattgctagtattaaacaacagtgatagacggatcgacgaggcactgatcgtaaagttcaaagggcgagacctcgctgggactctccgagtcctcggtgtcgagccgcttgcgcttgctgctccggttgctggtgctcgcgggctccgtggtggtggttgtggttgtggtggtggccgccccgaaaccacattagttggaccgcccccgacaagacgcctcgtggcccctgccgccgcccaaggagtttcgcgttcgcgcctgcccacggccacgggaagcgcgggggaacccggaaccgttgcc

SEQ ID NO: 2647 - DNA, 809 bp, Zea mays
agcttgcatgcctgcagtctacctgattgatctccttgtggctccacatgtcctgcaatgggaaaaatccagagggatcatctgacggctgcattgtatgtatatacagagcctggaatttgcaggtatcgtctgagagccattacgacgctggattcctggccgtctgatagcagcttgagcatctcgaacgcgaggccggacgatttcttcagctccctcagcgtcctgagcacgtccttgatgtacgtcgtgatgtcgtgcatcccctctacaaatttgcacattccgaggttcagttcagagacatggaggaggaggagcagcagcagaaggaagaagaaccgaccgcggtcgttcatgaagctcctgagcgccaccatggcgaggacccggtcgctgccgtgcttggcggagcggagcaccacgacgaactggcggagcaggcagaccctggccgccccgaggacgccggtgtcggggagcagggagagcatgtgcacgagccaggcggcgcacacgaggctcgtcgtgaacagctccgcgttcttggtcctcaggcactcggacagggcctcgaacaccagcccgaactcgtggctcaccaccgcgtacgccgccttcctctcccactccgacgcggccttcccttcctcctgcgagatatatggatccagagctcatcatgcctcgatcacgcacgcggcacgcatggccaacgtactctgttcgtgcgtaccatctcgtcctcgccgtcggcgcgagcggcgctcaggtcctgcgactgccggtaccttttcttcaccctg

SEQ ID NO: 2648 - DNA, 720 bp, Zea mays
ctcgccactcgcccgggggagaagccatcccgggtacgtatctccggcgtgccttcgccgtacctggggccaaagcctgcggcgtccctcgccgcaaccagtgcccgtctccgcgacttcgccaagcttctcggagtggacttcgagttcgtcccgttgctgcggccggtgcacgagctggatcggtcggatttcttggttgagcctgacgagaccgtagccgtcaatttcatgctccagttgtaccacctccttggcgactccgatgagcccgtgcgacgtgtcctccggctggttaagtcgctcgatccatcggtggttacccttggggaatacgaggtcagcctgaaccgagctgggttcgtcgatcgttttgccaatgcactgctgtattacaagccagcgttcgagtcgctggacgtggcgatgccacgggactcaccggagagggtgagggtggagcgatgcatgtttggggagcgcattcgaagggccattgggccagaggaaggcgcagagaggactgataggatggcggctagtagggagtggcagacgctgatggagtggtgtggctttgagcctgtcaagctcagcaactacgccatgagccaggccgatcttttgctctggaattacgattccaagtacaagtattcacttgttgagctgccaccggcgttcttgtctctggcttgggagaagcagccgctgctcacc

SEQ ID NO: 2649 - DNA, 732 bp, Zea mays
aagtgcaaaacagcctctgtatcggaacaaacccagctactttcagctacgtagtacatcgcacaactactgcgagtctgcaaagcacgtacagtactggaacacgtctgttgcagattaaagctcccgttgactgtgacctgggcaggtgctcgtgctcgatcgaccgcacgcaccgaacctagcacagccatgcatacgctgccaagcaaaattgcagttgcggagtgtcttttgatcggcgcacatgcatctgcatgcatgccgcctgccatctctgaaaacgacgcggcgacggaaacgttgccagggaacgctcgctcgtcgacccgaatgaatgggaattgtatgattgctcatccttcagatccaagaaaaggcgcgcgctccctgtgctcaaccacctcacgaactccgtggctataagactcgccgggccataacactgaactgatcgagtcacatgctagcgtgcgtgtgcgtgtgcaacggctataccacctgcgcgaaccaccgcgagcgcccgcagctaagctagctctcgctcgcgcgctctgggagaggagagatcaatggcgtcccgtggcagcatgacctgtagtcttcagctcgccgtcctcgtttccgccgccatcgcgctcgggttcggcgtccgggccggcgaggcgcagctgtccagcgagtactatagccagacgtgccccgtcgtgcaccgggtctcacggcgggtgc

SEQ ID NO: 2650 - DNA, 1217 bp, Zea mays
aacggtaaatcttgcttgggtgagataatttatcgatacataacagctgagcagttctcaccagaatgtctcctagattgcttggatctatcatccgagcaccacacacttgaagtggcaaacagaatagaaggtgccatccatgtttggaaactgaaaggccaaaaaaagtcgacacctcaagccaaatcaaagatatcttggggtggaaaagtgaagggtcttgttggagataaggagaagagccacactttgtctgaaagagctgatggtctattgcagagcttaagattgagatatccaggcctgccacaaacttcccttgacatgaacaagatacagtataacaaggtaaagctcatgcaaaaacaaataaccatggacttcttctctggccaaatcaaaatcgatcaagtctttctttcagttacacaaaccacaatcttcactttgtttcttgcgtgtttttaggatgtcgggcagtccatacttgaatgctactcaagggttctggagagcttggcatttaacataattgcaagaattgatgatgtgatctatgttgatgatgctacaaagaaatctgctgctgctgagtctgtttcgatcttcaatcgtggcaccggtgtgccaattcagaagaggatctctctaagcccattctctattcagaatacgccatatgcctctccattcgcaacacccactttctgctcctccaccccagttacatgcagccctggaagagtacagcccccgttaaacaaaaccaatctaggaaggccagaaatcaaggtcgagaagcttttttctggtgatctagagaaggtctggacatatgctggaaacctgagcgctaggaaagacgctggcgatgctcccgagagagactgatgggcgatggaggaaggtagacttgttatggaaacattatcgctatttagcagcgtactcgttcgtgtttatactgcaaggctgggttcatcagcaagtgactgaattcctcctcctcctcctgctgctgctgctgctgctttttgtcgctgaaggtgttggtctgctgcctgttagtttttgtatatgcatgtcaatgaatttgatctggccctctttaatgctcactactattgtactgagagttgctgaccacatctgagcagacccagtttcctccggttcatctgccagtgagctctgcacagcagtcgactgcaggc

SEQ ID NO: 2651 - DNA, 767 bp, Zea mays
aaagttaagttgccgccggcaggttacgaagcagcaaaccaagcggggggaaaaaacagagatagaggaaaaattgcagcttcccctcgcaggagaatggcctcacctgcgcagcggagagcctgggcgccgggtggagcctggtggcccacatgaggaagatgagcagggagccgaacgcgagctggaaggcggtgatggtgtacggcagcggcaacggcagcgcgccgagaacctgcaacgggggacgacggttggtgttgatcgtcaggggggagaagagtggaggggatctgaggatcccttgagatgctgcggtgaacggccgccggccagacctgcttgttgtagatgttgaagtagatgttgagcaggtaccacgcgacgatcatggcgcccagctgcgccgtggccgcaatgccaccgccgtctgtcgtcaccgcggcggcactcgcgtcgtccgccggcaccgatgccgccgccgccgcggccttggcgacctccccattctttccgctgccggacagcagcggcagaggcctgagccgcccgcccccgcgggcgcggaggagcggggcggcggtggcgccgcggggcccgaagtggttgtagtagtagtcggaggaggaggcgcccacgccgacgtggcgcgaggcgaggacggccgcgcggccgcgcgtggcccgagcccaagaaggctccggagacagaggtcccccccgccgccgcgccctgcataatcttgcgcggtcttcccgcggaacggt

SEQ ID NO: 2652 - DNA, 745 bp, Zea mays
agcgtcttgatggtggcgttgaccagcgcgctgagcggggacggcttgaacccggccatcatgaggcgcgccttccacttgccgaacacctcgtgccgctccacccgctcctcgccctcgcaggccaccaggttgacgatctcccgagccaggcagtgctgctcgatgttgatccgctccctgtcgcccctgggcagcgccaggtcgatggactcgaagatggccgcgtagtagtccagcgtctccgcgaaccgctgcgcgaagggggccgtgttggtgttggactcctgctccaccagcgtgagcaccctgggcgacaggcccttgaccagcctcagtacccggtccctgtggttcgccgtgctcacggtctcgtcggggatatggtgcagctctagagtaaagttgacggcgacggcttcgccagggacgacgcccagatgcccctcctccacctcgctgccggagatggcgaccgcgtcgaactgaaagggcaccttgtagaggccagcgatgtgtgacagcctcttgccgaccaactctaagccgccgcctcgggcgtaagctgaaacgggatcatcaatgccggtgaccctcacgaacggtggcccgccaggccgggccgcaagggcttggaggagagagacccactgcgccccctgagcgatgtggaagtcgatgatatggatcctgtcttctcccttgaccggcctccgcgatcgcgccgttggccgacatgtagccg

SEQ ID NO: 2653 - DNA, 797 bp, Zea mays
atataaaacagacattggtttcattttcagaggaactggaaaatgttggcacaaagaaaccagtctgttattatacagtaaaaagagcatcaactgaacttataaatttcgaagtcatgaaccaatctatactccaactagagcttaacaggctaccgcaaaattagcccccccgggttcaccacttactcgcaaccgcatgttaccaatatctgagcaacaaaaccaaaatcaccctaacacccagcttgcaattgtaaaatcccaatctgcattgctgtcttgttcctcattagtctccaacatatcactgtccaactgagccaccaatcaattggatggtgatgtaacccatctcgcctaccgctggaaccgtgggacatcagacatgagtcaaatttagtaactagcggtcaattactcggtttagggattagataggaaacaaccaaacagagaggaagaggaacgactactatcccataaactgaagaagaagaagaagaagaagaagaagtgaactgaggttgctcagactccaatttaggggtggacgtgtaaccaactgtgtataccttgacgatgacctcgggctcgtacggccgggcggcgccccagatgatgaggcagaagacggtgaagaggaggacgaaggtgaggaagccgagtatgatctggcagcggcgggagaggccgctatcgccggcgaggtcctcgtacgggccctcctcctcgatgacgttgcactcgggccaccccttgtcgttgagcaccttgcggtccccggcggggccctt

SEQ ID NO: 2654 - DNA, 805 bp, Zea mays
agcagcttcatgaatttgcttatcgatttgagctaggtatatctggaacaagcttgacctatacgatcagttgcaaacattgaatcgccataatgataaaaatccatcccataataaggaaaaaggtcagctcactgcggtggaattgctgcggcggtaagaactggaggtagaagccatagtacggatggtttcctctctaatgtctgtcttgcatagtcaagaatatccttttcctgtatttcaaagctttagatgaagatacattatttcgtgaggtctgagaaaacgaaacatcgtagataccaagattctaaaatatatgccgtcttgctaacgattgttattgtgagttgtgacaggtccgttatgcaatttatttcctgagaggtctctgaaaggcatgctaatcattactacttaaaactatcatgcaagttcctaacctttctatgctaatatttattttctgaaatcatgttcttttaattcgtttataatatatctaatcaagtaggagccttccactggcccatgaatcctggtaggttttggacagcttactgataaaaaatagacagtagacactatgttggacctttaatctacgaaattttctttggaacttacagttcactgactcaagtattgtttaaattggtcgagcatcacttgtaaatcaaactagaccaaggtagtatgacaagtaattggttttgataatgttatttaccattgtggaatgtagactaaggactgagcattagcagctttcaacaaaaaatggttttgtgtcagtttatca

SEQ ID NO: 2655 - DNA, 763 bp, Zea mays
aatttcttgtgtcagtgagtgcgtccgagatatgtctcctgagttgctccattgtgcttgcattgtgttcagattttcaaggacctgctcgactcgggccagtacgaggattctgcaagagaactcgatgcggcactccttgagctcacttcaagtcccgagttccctaaggtgcttctccatagcttgtatggtgtctgcggttattctggggggttttacatgtagtgagttctgttacatgtgcagggtcttgctgctgtacgttcagatttgctatccatggcaagggtgttggttatgcgacattttctgaaaccaaacacaatgagcgtggaaaacttttgtgctcttcttgaagcggttgctggcatggatattgatggcatttgtgctagtggtgcgcacaacgcatgccaagagtatgctgagtcaatattgaatatgaatacatcatgttttgcgcagaccatgaatgcttgtgatggtggacttcccactagttcttatgatctgcgggctgaatccacgggccattcatggattatagttaaagaatttcagaagacgctggattcggcatcgtgtggacggttggctgatagaggactggaaacgtttttgaacagtgtgaaaaggaacatcttggaaaatggtagtaataagccttgtgtcccagcaattccgaagtaagcattcacctttgatatattgcctttcggttatcaaaatccacatttatgtgtccttttgttttacatga

SEQ ID NO: 2656 - DNA, 766 bp, Zea mays
tggatgaggaagaacaaggtgagaggggcgccgccaccacctaaggaactactagctgaatccataaactaataaagaattcgtgaataagggctttggaagactggacacaacacaagagagttagttgctatatatcgtatttctgaaatttaaggcaaatatcttagttaaaaagctggtatatttaaatagacaatatatatctaaaataaagatagttcaccatttttacggtcgaacaatgataaaattatatattgtctgaatagtaacaaattaaagatttcaggagatggatgcgattgtttcttgttcatctactcgttcataccatgttgccagagtattacacacagttatgagaagggcactgatatctcgtatgggttatggtgaggcactcaaacatacaacaatagcttttgggtgctctagctagtttctttcatagttttcgatgtggttgactatgagacagaggatacaattttgaatggactccggacgcggcattaattatcatacactaccggacacagctgctttactcagaaaacactcaacaaactctttgccgagtgtgactcttgacaagcaagtgtcggtaaattgtacatcgacatcatcttctttgccgagtactttttatcgggcactccacaaagattttgtcaaatgccactttggtactcacaaaagaaaagtcgctgtcatggcgccaagtgacggtgacgaagcctttgccgaatgttctcaaagacac

SEQ ID NO: 2657 - DNA, 747 bp, Zea mays
cttgcatgcctgcagtctgctgtctctccttgaagctagctgccagactcaagggcgcatagcggtttgtggtacatgcagcccattctgaacttgtttcctgcggtgctacgggcagatgggggacttgctgtctacaccggcttactcatcttatcccctatatcttattctattatattctctatttcaagctacaatgaattgttttacacgaccatatatatgatatgctgatggagtgcagaatcttttttttccaaaatttgtttgtacgtgcttcggacttcggtatattttttctctctctctagagcacgcgtaaggtgaccatcttagctggtgcatgtgcctattctcagctgtttgggtcaggagacctgcaaattgttttggatttactgaggctagatcagatccttttatgacaattattaattctggtaaatctggctgtatgaatgcgttcttccatattttgtaacgtactttgggcttatatgtgcaaggccctcgtccttgtatattaataatttccgcagataattttacttatggtaaatgcctagctgtgttgttcaattattaccgtctccacatgcatgacaaaattacattcaaggaatgaataaataatgtacaatttgcagagatagaaggtaggtttatcatttctagcctttcttcgaaaccgcagttgacatcagaatgtactcgattattcctactgtgggggcccctttgccc

SEQ ID NO: 2658 - DNA, 633 bp, Zea mays
attgaacaagtgtcggtgcatactgtcattcaataaaaaacagagtcgttaccttccaaattctcagctagccatttggagttctttgggctaatatggctgtcccaccaccatgaatgggactttctcgtttgcattctgtgcatgcgcttcattgtaaccgaaataagatctccttgtagttgacctggtcatgattgacagtgagcataagaacaagtgttcgatgtcaccactaaagaactgttagaatgatggagacagtaacaggaaacagcaaccagttacatccacaggaaatattttcaaaagctgtgcatggcatgaggttaagtatgatggatcaacttgcaatcatataggtaggaagcagatcttgtggtgcctacctgtagagctgagctgtattgcatgcatatatttgaggaagatgaaaagggttcagcatatgcatatcaaaccccaaaatgcagggaccaaaacattgattggttaacaaatagatgggaacgatcatatctttatcaactatgtctttatcagttagccaatcagcgatggctttccagaaagctcaggaccagaaaattgatcagcatcagcaacccaacatggatttgggggggggggggg

SEQ ID NO: 2659 - DNA, 749 bp, Zea mays
gcatgcctgcagttctttgacattcagcccagaaagatcatctcccgtcaactgcctgtaacaaattaataggcagcagcaattaatgttgtgtattatacaattatacacacacagtctagcttatgtttaccaattgccaatatatgtggcttgacgtgtgtgttttctctataaatgtttggagcatcatcaggatatgttttgatatacactctgtttcttttgtatggaaaaaaggccgtttaattttacaaaatttgtctaacagttaaatcaaattatatgaaggcttagtgtacgaaaattgtatcaatattcatatctcacaaagcttttgaaacaacattgaattttctgggtttgatttaatgtataagaggaattcatggtcaaagtacaatgttaggctatccgcagcacattgtgtaaaataggggatttgcattgtattgtagattacattgtttgctgaatgaagtttgaaataggaggtaagataggggatgagataggatagctgttagatacagccttaaaaacttgttcaaatgcaaatgcacctttaaaaggaagcaggggaagtagtttaactgtgatatccctgttttgttttagttttattgttggccgtagaataatttccacgtgttcaacttatctcgtatgaagcattttgatgtctaatgtctagcctttcacatgataatttgactcttgctaattgtctctgttatctatgaatgtga

SEQ ID NO: 2660 - DNA, 708 bp, Zea mays
gcagagtcggtttgtctctgttctgttctgggttgagagcaattctgcgctcatcagtagtcatatatacttcatctcgtcaggatagacaagcttgcttcatcattcagctagctcatacagttcagtccattgctcctgtcaatgaacaaactaaacacccaggcattgctgggtgtttcagcttttatttcaaccgagacctttttcttttttttccaggatcatcatcagacacttaacaaagttacaaaccaataaccactccgatatatttacccacaaagaatcaatggaggtgaggatgaggaagaggaagaaaaaaaaagcaaacaccttatggtggtaaactagatagtgctctgctagctgctactccatgaccatgaccatatactaaagctgctagcttctagctataaagtatagcagcgaatgaatgggcaagaactggagaagaaaaattattggcggccaaagtgggacgaagacaacgcatggtttcagtcttcacggtcaaaagcccaccaataatggccttctccttgttccagcccgtctcgacgattgagtaaacttcttgctgctgactgtgctgggagtgtgtcatctacaatactaataaatgaactccctggcccccgcctccaccgggctagctagaaatccatgaggccaaatccaaccggccgccggcggactttttaa

SEQ ID NO: 2661 - DNA, 755 bp, Zea mays
acagcatttttcttgggaacatacttctgtttttcgttgcaacgaaatcctctgttatttcagaacatcctgttgggtcatgccaatagaggtcttctggcgccaaaaaccttccaggaataacctcacttgcccgaggacgctgtagtggtgtaaatatagaaggagacgacatgaactcccgtttaatgtcaatctttgcgtctgccacgccttcagacaagaaggtatagaatttgcacatctggctcatactgaagaaaaggaaggttaaccaatatattaattaaaaacaaaaggacagctaagcgattatgtttcagttatgcacaacaaatttgtggctcaaatatatttctcaaacacacagtataagtgtataatctagacagagagacctagtagttaccttgctctaaagggaacctttgacgttatccaagacttcaggaccatcaatgcatcacagtaagatacctctgttttgaatccaatggccttcttaagtgaactgctagatacctgtcccagaaaggaataaggtgaggtaaccggtaaattccagagcaatttggtaaggacagattcaccaacctgcggtacagcatatggagccacactaccaaaaagagagcggacattttcacaatcatagaataaatctgttgcataatgaagatcctcatccattcttgatgctatccatttgaagctttgaatgcacttcataaatgatgattcaactgctctgtttt

SEQ ID NO: 2662 - DNA, 728 bp, Zea mays
tagttggctgaactgtacggctctagcttgaacagtttccttgcagctgcctcggcaagagcaaggtttccatgtaccacgcaaccggttagaagggctccccataggctcgccgctgacttgaatggtgacctgttgatgaagtccgtcgcttcatccaggtacccgcaccttgccaaaagatcaaccatgcacgcgtagttctcaacggtcggtgtcacgccgtatctgctctccatggcatcgaaatagtcccacccttcagtgatcaactccattgatctgcaagcagtgagcagcgctgtgaaggttatactgtctggcttcaatcctgctcctgctcctgcactagcagcactacacatgtcgtcgaacagcgctattgcctcacggccctggccatgtgctgccagcccggtgagcatcgcattccaggacaccaaattcttctcctcctgaatcctttcgaatatccgcgttgcacttgccaggtttcctgacttggagtacatgtcgattagggctgttgcaacaaccatgtcgtggtcatacgctcttcttcgcagtgcgaagcaatgcagctccttccctttcgccagcaaagccagccctgcgcaagcccgcagcaacacagacatggtaaccacgctaggctgggacatggtccttctgcatctccttgaagaagtagaacgaatcttcgtagtctccattatggcagctcccgg

SEQ ID NO: 2663 - DNA, 781 bp, Zea mays
cacatattgagtctagggtcagacactttagaacaaagtatggtgcaattgaggttatgctagcaaatagtgggttttcttgggatgagaacaggaagatggtacaatgtgagaagcaacaatatgaggaccattgtaaggtaaattacttaaacatatgctcaatgatgtgaaattatttggtttaggattgtcaatgatttgttagtctaactgctaagctagtctaactgaattagatattgaacatttgtgctagtctaactgctaagctagtctaagtgtctaactgaatttgtgctagtctaactgaattagatactctatacctatgcatcactgcatgtctacctaaccatcatgctcctgccatcttaaagctttgtatctctctaattctttgagcttcattctccaaaacatttcaaccaacgccagaaactatagtagtatgggactacgggtgtgcacatagcgcaaataaaaaggattcagatcccaaaaatcaaccaaagacctcttagccatttttttctaaaccttctcccctaattctttggcttcaaatcttctgggcctattaactttgaagcacttgaaatcttcagtgcgcttttgtgctagttctaactgtccagcctttttcaagttggctgttgcaaacagggccacacatgcagcagggcgtgttgcaaacatgagcagaggaagatgttggtttgtgagttgatgcttcttctgccccacggtaggagctaaagtgacatgctgtgtaggggga

SEQ ID NO: 2664 - DNA, 930 bp, Zea mays
tgggcgaacaacagtagtattagcagtttctggggatttttcgtgggaaattagtgataataagtatgagaatcatgtagagccttgtcacacctttccaacgagtacttatgcgctcgattcggagttatgcattaggagatatcgctgtttgaacccggctaggttgctgtccaaaaacagattgcaggatgtatcttgtggacggttttgggctaagtagatgtgggaatttaattatattttgaatacaaaacttgtggggaattttatgtagatgcttccggagtttttgattgatatcactgctgttataattttaaagttatgaaattatcaagcagcgccgctgcaatttggtggtgattgggagagttgtcgctcgcgacgggttggaattgtgcgtaggtgcggcgttgtttattagagtttgttatgtgaatttgtacagtaaggtgtgtgtcaaaaacaggtggtggacttccggatcgtacttagtaccattccaaatttccggtgaaggcaagtaaatacagtggtggttgctaccgtttggtttgcatcctatgccttgtcattgagtatgcataagtattaaatgtgttaatcattgaattctatgatgaagtttatttgttcgaaagtattaattctcaattgtctaatattgcggatgatcatgatttgggaatgatatatgtggttgattcccatcttggatgaagttgaagtatctttttaaatcacattatatgaagtgttgtaggcatgtcatgcacatcgcatcatccatcttgcatgttgaagttatgtcgtgatcttatggtccgaccgtaccggtacacttttagcatcgtacgttgcccgagtaggggtacgatgcggcttcatatccttagaggtatgaaggcagaagtcatccttgcattt

SEQ ID NO: 2665 - DNA, 788 bp, Zea mays
agggcgtccggattgccttagtcatcggcataaggtgtccgccttaggctagagcgtcgcctttggcaggggcgaagccaggatttaagtttaggggggacaaatccgaatagagggctgctagagaggtattttgtattgtttacatggtgattagctaaaaaaattagtgtctcatgtagaactagaggagcattagagctcctccctgtctttgcccctggcctttggggcgcaaggcgtccgtaaggcgttggatagtagacgccttggctttgggtagggttggagaggggatacagatggaggggtggactgcggacctttggtggtggcggcggcggcggcagcagctttcctatcggcggcggcgaccctcctctcccttccgctttggcgtgggcacgcggccctcctgctccacccgtcagtccgcccttacatagcggcgcggctccgccctctctcccggtccctggcggcgcgggcgcgcgtcctccggccagctgtgtgtgcatgagcattagggtatagatatggagagtggtgtcctggcaatgctttgagtgggctggatgggccttgaaatggacacatatccatctgatcatctctctttttactttttctttcattttctttttcaatttctatgctatttggtctaagtgatatactaaattttgattttataatcttattaaagggtcgccctccccttacgcttttaccggcttaaaaagtaaaaaaagggtttcaagccgtcttatttggctttactggcctta

SEQ ID NO: 2666 - DNA, 765 bp, Zea mays
cggctcagaagtgatatttcctgtgaaatgaaataataatgttaaaagagaaagtacagcatgaggcatgatggtcacaacttgtctaagcttagtcactagcttaggcaagttgtggtgtcttaggcaagaaaccaaacaggcctagttttcaatattgtgcaaacatgtacaagacaccatacctggcagagctgttttgcactttcttttgatttaggatcatctgagaaaagggtaacctccttcatcgcacacatttcacctctgtcactgaaatagatgataatgaacaattcaaataaggaaacaaataatgaccaagtgcaataaaacatttagctagtcaagacagatgatagtttagagttattgtgaggtctgatattatgttttcacaggaccctatcattgatggtaaaaggaacgaagacaccatacaagagaaaacaactaagatctggagcaatttgttactacttatatcacaatatatgttctattctagcccaaatttcttgcagcacagatagaacataatctggaattctggatttttaatgtaaagcattcacgtcaatgactccttccaaatataccaatctataaatcatggtattacatgtagtttcacaaactagcgaaagattgcaagggattattaagagataataaaggtgaatgcagatagtaacttgctaaaagatcattattttatatgatagtggcagcacttaaaaagtaaaacacatctgcaagaacgag

SEQ ID NO: 2667 - DNA, 805 bp, Zea mays
tgcatgcctgcagatagctccgagaaggccatgacgcctccagttgcctctttgctaccggaaagagcggcaccacttataaataaaaaggttgtgacgagatggaggcctctcaagctggtgtatgaccacgacattaggcttgggcaggttccagagaaatgcagcttccgaacacttcgtgagtttgtagctaagaggttcccatcatccaaggcagtgttgattaaatataaggatgctgatggtgatctagttaccatcacatcaacagaagagctccggttagctgaattattcattgataaagttggccacgaggttgtagaaaatgggagggaggatgacaataagctcccggtgttgaggctgcaccttgttgaagttagcccagaacaggaaccaactttgccattggaagaagagaagttggaggaggatgaggaattgttgatcaatggtgaagatagcactttacatgctttagcagtggtaaccgacgcagaggtggtgaagcaagatgttgagaacagatctgctgatcaaagtgtggagacagggaagaatgattgtggccatgccgagtgcaaggaagctgagattgatgattggttgcttcagtttgcagatttgttccggaaccaggttgggattgatgcagatgcacatttagacctgcatgagttgggcatggagctgtgctccgaggctctcgaggaaactgtgacaagcatggaggctcaggtcctttttgagttggctgcttctaaatttcaggaggttgctgctttggccttattcaatt

SEQ ID NO: 2668 - DNA, 781 bp, Zea mays
ggcacatcaacccggcggtgaccttcgggctgttcctggcgaggaagttgtccctcaccagggcggtgttttacatcatcatgcagtgcctgggcgccatctgcggcgcgggcgtcgtcaaggggttccagcaggggctgtacatgggcaacggcggcggcgccaacgtcgtcgcgcccggctacaccaagggcgacggcctcggcgccgagatcgtcggcaccttcatcctcgtctacaccgtcttctccgccaccgacgccaagaggaacgccagggactcccatgtgccggtgagtacagtatcagcctagcttgccttcctgcttattcgtctcgtccgtccgtgcaagctcgacttatcgatggtttctttgtggacgaatgaacagatcctcgcccctcttccaatcgggtttgccgtgttcctcgtccacctggccaccatccctatcaccggcaccggcatcaaccccgcgcggagccttggcgccgccgtaatttacaaccagcaccatgcctgggctgaccacgtgagtggaaaacaactttcttctaccttcatgttgctaactagtttcactgttaaaagtagtatgaagagtctaaaattaaatagtgaaataaagcctaaatagttgatataaaacaagaaagtaattacaaaatataaaaagtttttctatctacttggatacagatagcaaaaacattagttatatgtaggaaaaaatcatgtatctaaaaagacaaaaaacgtcttatctgaaggtcaaagcac

SEQ ID NO: 2669 - DNA, 1010 bp, Zea mays
  unsure (1)..(1010): unsure at all n locations
atccgccggagaccaatggcaacgctacagatcccgctcgcttcgtgctcagttcaggttgcagcagccctttaatccatccctgcggaccttcaaggcgtcttcaaagcaatgccttagcaagcttcaaggcaccatggtgacgcgttactggccaaggcagacgccttggtctctggtctaaagcgagagggacaccttgccgctgctgcacgccttagcgcctaagcatcgctttaaggatgccttaacaactatgcacagtaagttaacttacaaataggtgatttttccatggtgaaaaccaacattttcggaaaggctctcacagcattattaaatgtggtacactgcgtagattattgaaaaggggggtatatattttatggctccatcccaaaaacactcatcaggacatgatgggatcccatctcacggttgtcactacagaaccaaccttactaaattgtaattaaacagtgatcaccattaataggttaatttgtaaacagtggttgctattgttgcctgttggaatataaatataagtgaattgataacctcttcctatcagcttaagcttttgggttagactggttggtgcatgcaacttaatatgacattaaagccaggtgtctcgaatttgaatcctggttacgcaattaaaataaaataattgttgctcgctcatattccacatctgagacccatgaaaggctcaacgtgagggggagtgttggaatataatataagtgaattgctcacatcttactataagtgaatngctcacatcttactatcagcttaagtttttggttggactggttgtgcgtgcaactaatagcttctcgtgattactacatatcattacaataactgacagcacattaagcacaagtatgtagctaccttcatatatggatataactgcataggctgtacgacttctgagaaatataaaaggtcattttagtatgcagaaagcataacgttaaagtgtcgcactatat

SEQ ID NO: 2670 - DNA, 795 bp, Zea mays
tcactaatcctttctcgaacccgcgatcctctttagtcgacctgcagaagctgtagatcaagacaaaacgaccagcaaaaaggtacatgtgtgaaatatatttgagctattgatctacctgttaaactattttgtagtacagatatcccacatcttctgaatgatcattgttcattttttatgtatgtgcctgcggtttcttgagctttattcaattgtttatatgcacttggaagcaaatgaacaagaaaagaattcaacatgcaaacttgaaattcaaactagtgtaaaatgaaacataagggtccgtttggatgtagatactggagatgttagaattgaattagatccaataccaaatctacctagtattggaaatgagttgcaatataatttggtggtttgtatgtaactggaactgcaattccagccaatacagttatacagatggtctacgctctgaattgtgggaggcagtttctagttatagtccaaaatccaaatataaggcagtttgttgaaggaaaactagtgaaaaccctaaacacgacaacccaggtgctgtttggtctgggtaccgtagtgggaatggtaatgggagcagctagcaacgcccatcgattgcaggttagttattaccgtgttatgattggttggctcgtgaggaaagtgactggctgtgggatcggatggcacccaatgaagagcggtaacaatttctatcgccgtaacaatgcgctggacgatgtagtggccacaaacacacactgatcatacgtgtaacatctgtgataa

SEQ ID NO: 2671 - DNA, 802 bp, Zea mays
tcaagtactactgatactgatcatagcgaaaactcacggtcacacccagctcttagaaatataaaaaaacagctagtgttattaacttattatcgggtcaaaagaaaacaatcgttaacacataaacagatccatggactattgtagctgcaatcgggtcaaaacagaacaaacaaacgggtctgatatcaactgggttacaaaacgcggtgacgcctgacgcgtctaacttgtcagccacgagagcaaaacattaattcacagaataacagagcagaaactaaaataaatatgattggttgaatttaaacccaacgattgcaaaatgtgacttattggttaatctaaatatcaaacacttgcttgtcaaggagacagacccagtggttgtaggactttcgattggaaagtcttttttctcgaataagatatgcaagaagccatacgtgtgagtacatttcatttctctagaaaaacataattgcctatttcctgcacatataaaaaacctagcgcagggaaagagggaatgaatcacacgaaagaatgggaagagaaaagaaaaacacctacttacatctctataatacatctacagcataagcactccaaaaccacatggattggaaccatcatctgtacacaaacttatcagactgcacgatcctaagaagttctcgtaggttaccaaacacgtgcctttcacagctctcagcttcaacatagttcagaagctgcttcgtatcctaatcatccacgtgaaaaaataaaagtaaaacctcaatatttgcaaatttaagac

SEQ ID NO: 2672 - DNA, 806 bp, Zea mays
agcatttgcaaaaggccttcttgatttggaagggcagttgactccgatactggtaggttgcttatgatctagaagagcaaatatttggaagggcagttcacacatctttttttttaaaaaaacacacacacacactcactttatacttcttcaggtatctttagtaagtaaagactcatctatgctagatggactagaagatgcaagcaccgagatggatgaagctaaggtttgcttttataatttgataagcgtgctatttttttaaagttgcgaaagggcctctaggtgcactcaggtcctgggtttgactcgccgtgggagcgaattttgtactgtggttaaaaaaatttcctcgcatgtcccacgtcaaagcatgagtctaaattacaaaattaacagggcctaagattaatttgataatgcagcataaaacgtgaaacccagatctactggcatataatatccatgacgttaaacaaaatagatctgtactaactcaaaaatattaacgcacaaaaataaaaccaacaacagatatttttttctcgaacacacatgagagttgcgtatcatttcgtaaatagaagagaagacaggacaacaacccacacactctaacgcacgccaccacaaaagtcacccacaaacagccccacactacacacacaggcaaaaacccttacacacacccacactcagtgccctgctggagcgagagccgacaacatggaaagccccttggccctagtcatacaccaaaagatgatgtccgtcttggccaaacctaacacgctagacaaata

SEQ ID NO: 2673 - DNA, 565 bp, Zea mays
gacccccaaactcaacaaacactacgccccgaccctattaagggcgacctctaggtctaaaatctcaagatgtttagctccagccttactccaacacaccaactcatctaagaaaacccttcgaactgtgcttaaagaaaggttctctccattaaagactgccttgttacggtgagtccaaaggcaccaggcccctagaatgatgacgttgttcaatctctttctcttgcttttgtgcaccttcttacatacctttctccaccattctggaaaagagatatcatcgccagacggagagagattgccaaaccccaagggagaaagaatgatatgccaaaactgtcttgcaaagatgcatgtgcaaaggagatgttggacggtttcctgcccctggtcacaaagtggacaagactctgggtggtccaagcctctcctctccagtctatcagaagtccaacacttattccgtattgccaaccacaggaaatatttgcgttttggaggggcccaagacttccacaacctcttcatggctcaaaggtaatggatcccatgaggaatgcct

SEQ ID NO: 2674 - DNA, 762 bp, Zea mays
atctgataacgaggctgataaggacgcaatgggtccaaacgcaccagttgaatcatgtgctgacgatgctcaaaaatcatacgctgacgaaaatgcatcatgtgaaagtgggcatgatgaggatgcaggaggtccaaacactccagcagaagcagatgctgatgaaatcattaggtctagcattccatatggtagtccagtccaggagtctgaatctgatagagaagaggaagaattattagcacggacgaagagagctaagacaaaacaagttgtgcaggattctgatgaggatgcagatgagtaggtttttaaacattatcaatagttcaattttcgaagcgtctattgtgggcaacatcatgccaaggtgtatatacataagtttttatgggttatcttgctgattatagacgatgaacacatgagatgtaaaatatatggttttgcaaaaattcttgtgggccatcatgttgattatagaccatgcacagaacatatgtaaaatactttattgtaaattataagttattctaattttctttaagtgaaaacttcttaaatttagtaagattatagaaaaagtataaagatctatgaaatcaaatagatatactaaaaacataattaataaaagaatctaaagatatttatcagtttttattattattgttgctgctggatatataatttgattaaattgactgttaaaaatttacaattacttataattttgaacaagggtaaaactaaacgttactg

SEQ ID NO: 2675 - DNA, 808 bp, Zea mays
tgcatgcctgcagcatttttttactgcacacacaactcgatctccttagcgtatcgtgtgcggttgttgactgcggccagcctaaggctaagctttccgccggcctgcccagtaaaaaaaactctaagtctgcggtagagtttaaattttataggcgattttagttatggagcgcaagtagtatttttagtagtggttttcttaaataaccatatgtagaaatcgatttatacgataatgcggttttcttaaaaaactgacaaaaaaacatttttagctagatttttttgagtttttcaaatgacctcgtacgaaaaaatcaccaacataaaagttgtagatctctaaaaattataaaattttgtgttttaaaacttttttaattgaaattatttcggctctagaaaattgcatctaaatttatcaaatttaaattgtaaattttgcagacgacctcagatgggaaaagtaccaaaataaaagtggtagacttcaaaagttacaaaacttgtagttgacaactttttcgtttgaattcgtttacagcctcaaatagtcaatttatattcggattgttctaatatgttgccaacaaaactacaatataaatatgaagtaagtgataggtggattggtagaggggctacgcgcgaggatgaggttggttgttcgattcccacagagactacacgtgaattttgagtggaaaatgtcgccacttcgacggagacgagcgagcctcctaattaaaatatttttttgctattttaaaacacattttatgtttgctggaaaagttttcactagt

SEQ ID NO: 2676 - DNA, 784 bp, Zea mays
gctccgcctcctcctcccactcgtcgccgtccgcccacgtcgccgcgcgccgcagcctgaggcagttccccatgcgcgctcgcggtcgacgacaagtttacgctgcgctgtgcgtgccttggcgcgcgcggatggacggacggacggacctcttggcaatcaggctctgggttctggaattctggatcagtgctcgttgttggtcgcctatcgtcgccgtgatctccgttccgagagggattctctcggtctggtgacggagaagcttatttatactgtgtacgggggctaagagaggtcgagagggtgattagtgcggcgtgccaatcagcttggacgggagaccgtgtcgcgtcgcgggggcggcttccgctttccgtctggccacgtggacggccgcggcgacccagcgctccagtcctccataggctaggctagtgcgggagtggccgggcgcacgggcacggcgcaggcagccgcgcgcgagttcgcgaccggacggcgtgacgtgggtgggaaactggcgggggagacagaatcttgagagcccttttttttttcctttccacgccaaggacggaaggagcgcggcgacggcgagtgtgaggtgtgaacgcggcttttgcagaggatcttgcgctacccaacaaccatgagaagccaccagggacagggagggacggacggggtccaacgggtctcgctctcggcttcttctcctccgcccgcgcgcgtgcgtgcgtgcgtgactaactaaacgtacgcacatttggaggcttcagcc

SEQ ID NO: 2677 - DNA, 838 bp, Zea mays
agtgaaaatatattaccccaaattataccatagcagaccatgataattaatgagcgatgcaaacggcgcttaaaatggaaattgcataggacatacaagagaaacattaggattttgtactgctactaggaaaatggtgagaaaatggagggtcaatatgcacgtgtgagcaataataagaaaagtaaaattcagacctttggacatgacaaccaatgaactcccattggttgatccagcaattgctgttatgtagtaacttttctcccactgctccattatccagtcctgtttataattagaaacagagttaggctttctggctgaataaattattaggcatgttcaagcttgactcagataactgtaccttgtggagaaaaactggtgagagctcgtaaacttgagaacagaaaccagttccagcgtccatgatgagtgcccaaaggtttgccgaggaagccacacaactaacgtaaagcccgtcatcattacccttttctatatgttgacttagccttgagtcagccacattgtaatggtacctaagaaacacacaacagatgttgacaaagcttagcagcaatagttcatcacatcttaatgatcatgtttacagggctacggattactagagaaatgcagcaagtgtaaccaaactatcatgccttgtagagcatctaattaaatgattgtaaatacctctgcttcatgggtcgcctagcattataaactgaaatccattgagccggtgggctccctaatctaaccttatttttaggttgttcatcatttagatttgcatgcaatctttcacgtttctgtcccacctatagta

SEQ ID NO: 2678 - DNA, 772 bp, Zea mays
ttcaagtaggtaattctccagagtacataactgacaggaagttaggtaaaggtggttttggtcaggtctatgttggtcgaagggtttctggtggagctgcccgcactggtcctgatgcatatgaggtttgtcacttacacattttatgaatctgatgtattttttccttacataaatccattaaatggtaaaatttttgtaggtcgcattgaaattagagcatcgaaacagtaaaggatgcaattatggccctccatatgagtggcaggtttataagtatgttgctcatcctgccgtcttttctttttgtggagactttctttctgactattggtattgtttgctagcactctcaatggttgctatggcataccatcggtccactacaagggtcgtcagggcgactactatatacttgtgagttcacttcttattactctatttctttgcagctcaacagtttttattcacttatatttttaggtaatggatatgcttggtcccagcctttgggacgtgtggaattcaatggggcaggcgtaagtatcttccattcttttttatgatatcttttgtcactcatcagcttttagactaaatggtccaactatcgtaaacaggatgactccaaatatggctgcttgcattgctgtagagagcatatcgattcttgagaagctccattctaaagggtcagccaaaattagctatgttcatctgagcgtccttagatgtatgtatgactgttgatttaccctaaggtcctctgttt

SEQ ID NO: 2679 - DNA, 726 bp, Zea mays
atgcctgcagtgcctcaacgatggcgtgccgtctagctgcccctgccaccgcagtgccgtcctcgtcgtcttccgggcacttcttgcagatgcgcagcaacgctgacacgacgagcgcggtggccgcgtcggacacgcagaacattttcttgaccagcacgggcatgacgagtgcgtcggcacgagcacgcgctctgccgtcgcgagacgccagtgctgcatcgagcgcggcgagagccttctcggccgtgctcctgtcagcgtccacgaggagctcgacgagcacgatcacgatccccgccaccgagaggcgcgtcgcggcgctctcgccgctgcgcgcgaggtggtacgcggcgaccaggcacgcccttgtggccggcgggcagatggcgtctctgatcgtcttcaccaacactcgggcgatggcctcggtgttggcgcacagaccgatcgtacacgcggtacctctgtaaactgaaagcgagatgatctctctgattaccaccacggcttgcagcctcctgtgcaggtcgccgttcgcggcgacggcgaccagccgcgctacggacgcgctcgacgagcccacgaccaggatggcctcttcgtccattggcatcacgagcaccagcgctgccagcacagcgtcgagcacatcaatggcgaccgcagcatctgcggtgtccgcaaacgacgtgaacgccatggagagagcgcgcgcagcgcccg

SEQ ID NO: 2680 - DNA, 710 bp, Zea mays
tgcttgtgcttgtgatgatcgtgagggacttcgtgccgggacggaacgcgttcgaagcgctcctgggagagctgagccggcaggggcggtgggctgacgccatgaccgtgtacgccgccgctgtgaagcgcggcgtggtggtctcgtggaagcacctcgggagagagacgcactcaccggtggagcccattcggctgggcgtcccggtcccgcagtgaccgtttgtctggggctctgggcgcggccgggatcaccatctttctgagcccattcggcttgcattctgtttccgatgctgtagacggaaaattctgccagtttgaaccgcttgcagatggcactgagaaacaagcgtggctgatggttcaggtattcgcgttgtcatgcgtggactttggcgaattttcgtgacactcaccgcaaatgtactgaaattatgtaaatcatttccgcttctacgtaaatcatctctgcttctattatccggccgggagcattggcgtccagcttacgagttacggatgataatcctgatttcatagctgtaaacgcacaaagcacttttatttatatacggcgccagaaaaaaaaacccaacaacacgatcactgacaaggcgcagtaacactgtaacagagtagaaacactttccggtggcgcgcgtgctttctcaggaaagccaagactgaaagatcaagcagctcactcca

SEQ ID NO: 2681 - DNA, 773 bp, Zea mays
tgttagaagaacaaaatcatttggactcaatttgaagcaaactatgtgtcaaggtattttgagcctgaaagcacctgtcctattatcctcaacaagaatctgaagaagcattgatttgtaacttcgctcaggataactttggtaatattgctttcttgtagcaatagcaacaccaaaaccaacaagatcggctaatctgtatgataaattatcaaaacgaaacccactgtcaatcaaacagttatctgttgagacaaaacaaggtgtcgcaatgaatctgaatcggataactggaatgttgctgctgacctacttaatgcaaaaaatggaaagaagaaacaagataagagcaatacaagtataccattaccaaaagcaaccggtacatatgcttcaaagaaaaggcaagcgacacataaatgaattctacaaagcatacatgaggaagaaaacatgccataaatgcattctgttcagcccataaatttacttaaccaaagatctgtatgagttatcaggttgaagacggataactcaacagcaagacaatggaagaaaacaaggactgcatgtgacagatggctgatacaaaatagtagtagtgcaagcactcatccctttgtcgaaagtttcagaatctacttggttcctattgcaccaaaaaaaacaaggtaaaaatcttgattcttctaatgcaggaagctgcttcaaccaaattaattgtaatggaaagatcacatagtttcagacaaatcacagcaaaccaagaaaaa

SEQ ID NO: 2682 - DNA, 565 bp, Zea mays
ttaaattatacatatctcgtgccaaaaattttgagctgggtgtgattatggtgcgatcatggtgagcaggttgtgattataatggaagtatggtgctgttgtttattggatagtaatgcgtggctgcaattatgtacttcgactgagtgttcttccattcaagtttatgttagacagtgatattcagtagttgtacatgatacaagtggctagtcaatctgtaaatccaaactgatcattgggtaagagttttctgaagtggttccttatcttgacgatcatagtttagatttaattactactatgtatcacataatacttttgacttagaataattttgtacttccacaatactttgggcagctgtaaaatgctctttaacgggaagctgcaattgtccttttaaaactgtatttggtattaaaaggttgctgacggttaacaatgtggtcatgcccttgacaagtagattgtttactattttctagctgaacttttacgtttttttcctatattttatggttgaattgtcatgagtcggctgagctggttacctcaattgatt

SEQ ID NO: 2683 - DNA, 758 bp, Zea mays
agcaccataggaaggatgggcatgtaccctagctactgagcagctgggagctcgtagtcgccttatagagaagcagaagcccatgcctaatgaccaattcattaggcaggcacggggttttttgtttgcgttgctgagactacgtgtagtaattcttgttttatagccttattaaggtttctgtcaaaggaacatgtttatgctccctccaatgaaactacgtgtaacatgatttatgtgtacaaaaaataaatgtactagaaaaatacagttaaaaaacatttgaatcccactactcgtacacttacacttacgttaattgtcgaaatgaactgattactgccattttgggctgggcgtgccatacaacaatcatggggcaacatgtaacgtacgtctagtctaatcagcgcttcccaaacttaattaaagctggtaccaaaccaaggtggtagctgctacattcacaacgttgatgcgccaaacaagctggtccaatagctacctaactgcatcacacatatacacagctacaacaataggccagaatatccataacacaacaagaactatcctgtctgcgttagcatctgcctgcactgcacaagaggaaaagaggaggaacagtgtaagcacatgtgctggactggaggatgctagagtagaaagtcacgtacgatcaatcaatacacagcagcagcagcctcagctagcattgtacgtctgatcacgctcgatgaagtccagggctctctcct

SEQ ID NO: 2684 - DNA, 740 bp, Zea mays
agctcggacggaggaagctccagtcgacagcaaagactactggggcgcgcactcacttccacggccactgggtctcggactcaccgtgaagccacggcaatctgatggacatggactaggttaacatctcctgagcctgaaacgtgacagctgacatgggtcagagtgaaaagaaaattagtttaggcattaggggacacgacgcagaacggggtggctcgaggccaagcgggcggcggacccgagcggataaggacgagctcggccctcaactgtcgctgctgtggcgcatgacacaaacacaaagcatggtttcctgttggtaatttaccaccactagcgctagcctacaactggtatgttttttgtttttgtttttttttgcattggatcgtagaattataaactttataatatgccataaaagctgaaggttgcagtattagtttaaattattctatttgttaatttaaaacgttgtcgcaggctcgcagctgctgttgctgtctgctttcccctcccccggtctacaaagacctcggctttcctttcctacatgctcttcttccttccaaagccttcgcatttttcctctcgtcttccccttccccttactccaaattaccccctgctatctacatatcctgtccacactttccttccctgcgctgggccttggagttttttggttgtgtatcgggggaaatgggaaatcgacgacgaaattgccgatcaatagt

SEQ ID NO: 2685 - DNA, 763 bp, Zea mays
aagcatgtggcgcaacaaatcattgcatgagttcattatatttttttattaaaaaacttctgggcttcatgtaaccatttcacagattccagaggtgggaaagcgtctaagaataagaaaaggaataaaagaaggaaagatcaagttaagaatcccacaaaagcggactctgaacctgtaaataaggtgagagttcaactcaaattattttttcctttctgggggtaactttttagagaatgctatgtttcttatatatatatttttctggtgcgttcaggagggagcttcctgtgtggttccgtgcaaagaagatagtaataacctctctaggcatccttgccaaagtccaaatttgcaagatgatgttgagtaccccttcgacaatgctgaccttgatgatggacttgatcctgcaatgagggaagagcttgataggtgagggcattagatgtcttataggttgatgcatgtaggctcttcgctgtgatactggcctgtttttcaattgaaaaaggcctgtttttgtatgcgacacagcaaaatttctaatgcttatatgctggcattttaataagtacagactgatttctggacgtaaaatcgatgaattctgttaaatgcttccactcttcattcaagttaacttctgcttgaaacttgtggttgctgtctgttccgtcgcttgatctccaggctgtgtttttaggatgctattaaaccacatttactgttgagatgcatgaaacagtgccctgttttg

SEQ ID NO: 2686 - DNA, 1139 bp, Zea mays
cttgcgatacctgcagctcctctatcttccgtttgttcgcctccacctgcctccgccgctgctcctcgtacggcgtcgcttccgccatctctcttctctctcccgtctttgtgtatattgttattgctgcggttatgttcttgtgtttttttactccgttttttattaagattatttatgtaagatgtgggagactctaacttataaagatttatcacaaacggaatttgatataaggaaaaaaatatagcacttaggtttaatctttggatcacatattgagtgcaacccttgacccaaaggatgtcattacaatgtggagtagtcattagccgaaccacaggtaaaatcgatgtcccttttgtctatttgctttattgtgactgtcgtctttttgagttctcataatcacttgtattattgctcctaagtttgatacatatttaaatgagcaatcaagtgaaggttctcctctctccatctctactcataccaacttagttttagcttccactaacactcattataaaccaagtttgtgttgtttagagttttttttgcagaatcacctattcaccccctctaggtgctatagatggccatttggcactaacacgatgggccagcctaggcacgacacggaaaagcacggtccagatacgacccggcccggttagtatagtgccagtgcctggcacggcacggctatagtgccgtgtctgggtcactatctcgacccgtagtgctggcacggtcacgacacggttacattttttattttaaaaataatagtttacatatattaagtataagaattcaacatataacataataataaaactgcaactgcactggttagatggatacgtttaagcatcttattatgcacactaggttatgagttcgagcccccacaactacacattttttactaaattataaaatatactcagatgagtcatagtgccatcgggccgtgccggcccgtttggccatctataagtgcagaccatagtagaccacttgggccctagggctagctagctagtctagaagcaaggaatcactacgaagcaaggatccaatcctagagatgacaataggatctcgattcccaattctctgcaggcatgcaagct

SEQ ID NO: 2687 - DNA, 883 bp, Zea mays
atttgaataggatacatatgaaaaaagagaaattaaaggcctgtttggttcactacctcagttgccacaatttgcctaacttttctgcctgaggttagttattcaattcgaacgactaaccttaggcaaagtgtggcacatttagccacaaaccaaacaggccctaagtgtttgctcagccaaacatcgtgtatcagcttgaaatccaaaatatgtttggcaaaacatagcacatttatcaagaaatcatagaaggcaaaatgcaatatgctaatggaaaaggctcacaggtgactacgatatctctcaacaggatatacaatgcttgagatggagttcgccatactcagaaatttgtttgacatgtgtcattttataattttattttagaagctaggattcagacttcaactggagtagatcaagtcaatacataaacagtattctttcatactaagaaatatcaccttgtaagattcctcaagcctgtccttgtatttttcaaccaacagctctttactcaatgccagatctctttccactactgcctctgtctcaaactattaagagacaagagaacacattactctatctattcaaaacaattcctgtaatcaagtgataatataactataaccaactaaacatcatgaaaaaattgcagtgcaatacctgaataacaatgtgaggatacaatgtttgtcctttacggattggtggatcaagagtgataacaacaaatgtatgaggattgtttgactgcaaaggtcaaccatgcaatgagtttagttacatgtcacaatgtaatactatgtacaataataaagcacaagcctcaaccatatgataccaaggaacagaaaccttttggcaaaaaggaaag

SEQ ID NO: 2688 - DNA, 791 bp, Zea mays
taaccacagcaagcgcaagatcctccactcggtagtcgataccccagcaaccatctattactccagaataaagtgttcctgccgctgctgacatgggaatcaatagcaatagcaaacgatgcagaagcattaaaatgtacaggaatgtcaagtcctccaaggtttatccatatcagattttatttgcagcgcccagctcatgtattcaagatttaagcacccctagaccaccaagatcaattggcttttgtactttctcccatgtcaccaagcagcaacccaattaacctgatcacaccccttccaacggaaagcatgccaaattttatcactgctttgatgtaccattttggtaccttgatagctatcaacacataaattggagttgcggacagaacaaaccaaacacatgtagctctgcctgccatgttcataagcgtagctttccatcctggcagtttatctccaatattttcaatccaaggcatcaagtatgacttccttagatttttatctgaaactggtaaccttaagtgcgtacatggaaagtccaccactgtaccaggagagagtcatactctgttaatagcctgctgttcacacctaatatgaataacacagatttttgcaaattggttctaggtcctgatgcttcaccaaatttttcgaaaatacgaatggtgagattcatctcttcctgcacaggcctaataaagatagccacatcatcggcatagagtgatatctgctgccctgggttacgacaagatagaagtgataacagcccaatc

SEQ ID NO: 2689 - DNA, 972 bp, Zea mays
atatggaatgagtcttctctaacttttttcctgtttccctagtcttttacgaaagatatgctcttcttgcattagaccctattcacatatagaaaaagttagcattttatgtttagccttaattaatgagaaatatcttatattagttatattacctatgtgtatatgttgtcttttgaagtcaaaacatatatatatatatatatatatatatatatattactttagttagttggtgcaattttgccttgtgccttaaatttgatggtcttgtctccatgtacttaaggatcccttcttttttgctgtagcatgtatgatcatgtttttcgtccaagcaagttgtctgggaatgctgattttcatctattcaaggctggagtagagccaaaatgggaagacccagagtgtgcaaatggtggcaaatggactgtcccatgcaacagaaaggcaacctttgagaccatgtggcttgaaacggtacatccttgttgtgtatttgtctatttgatttgttcaaaatcgagcgtctgcaaccagatgtttttctgagatgttctattgatggactgcctttgactaattgtttgaacatgcagttgatggctcttattggggagcagtttgatgaaacagaggacatttgtggaattgttgctagtgtccgtgcaagaggagataagctggcattatggactaggactgccagcaatgaagctgtccaggttggttttgaaaaccattctaacgagtttcaatgctgatatcttcttgtcatcatagtaccttggttcatatatattgataaagggggtgaaccggtgaattagttctatttagtccagtgttttgtccgtaccagtagtatctaagttgtgcagatcccaagctgctatactgccatatggaatacatccctatagaactggtttgtcctgctaccttagctgggttcaagtttttgtattatcg

SEQ ID NO: 2690 - DNA, 721 bp, Zea mays
cttgcatgcctgcagttcatcggcgagccggagatggagcccaacaacagcaacttccagttcgagttcgtcgacaacgccagcgacgtgtactacacgttcctggtggacggcggcggcggcagcggcaacggcggtgtcgtgtcgcggttcgtgctgaaccagtcgagcgtgcagcgctacgtgtggccgccgggcgggcaggggtggagcctctactggtcgctgccgcgggaccagtgcgacaactacgcgcactgcggcgccttcggcgcctgcgacaccagcggcggctcggcggcgtgcgcctgcgtgcacgggttcacgccggcgtcgccgcgggactgggagctcagggacagctccgctgggtgcaggcgcctcacgcggctcaactgcaccggggacggcttcctgccgctgcgcggcgtgaagctgccggacacgacgaacgcgacggaggatgcgaccatcactgtcgaccagtgcaggcagaggtgcctcgccaactgctcctgcctggcctacgccgcttccagcatcaagggaggcgatagtggctgcatcatctggagctcgccgctcattgacatcaggcatttcccttccggtggccaggatctgttcgttcgcctggcggcatctgacctgcgtacgaatctcctcagctcatctcttctcattagttcattggcatcatggttttcaagttgattttgga

SEQ ID NO: 2691 - DNA, 537 bp, Zea mays
tgcagagattctgaagctcaactgtgatgcttcacaatcagcgtgattggttcctacacccataagagccgggctcgcgctgacctgcaccccagtcaatgcttccactaagcctgcgcacaggtagccaagctatcaatcatgcgatatatgcgttcattacaacataacactgttcattacaacataacactctgaacatatgcaagccatcagttttcaccgtttcaccatcctaatgtggtcttttattgacccgagtgtactggactaaggtgcatcaaggtggggcagaaccgcagaactacattcactgcctcaactgaagctagggcagataggtcccttggacaaaccaaggcgaacctccattccgtggtgcatgtcaggttgacggaaaccttcagaaccttgaggcactgcaagccggcagaaaaaaagaaaatcagaacaagtcaaaaacgattgtgccaataaggaaaaaaaaagtccaatgctatcacaaagcatatacatagataaaatgttaggcggtaa

SEQ ID NO: 2692 - DNA, 735 bp, Zea mays
aatcgccatttttaccgataagattctttacacagtttcagcatctggcggtaaagttattagccattttcatacctgcaatctgaaatggccttaatgtagctgtgtatttgttgctaccacaacattgactgtgcctagattttattccctgtgtatttaagtgtcttatttggcacacttttgatatttgactactgtagtatctttgctaccatgcatgccagttctggaacttgaaacttcatcatggtaacagtttattttgcaatattttggcatttcaatttttttggagagtcaaagcatctcaagtttgaccaaaactctagagagagttacaaattattttgacatcaaatagatacactatgaaatatgaatatataattattaattaacgaagaatctaatgatacttatttgtgtcataaatgtttttatataaatttggtcaaactttagatgatttgtctctctgaaaaaactggaataactcataatttgggacggagggagtacttgtacttcacagcttacggtttcctgcatgcttgattgcacatacagtcagttgaatctgtaaaaaaatctgtgcgattctattgttatcgaagttatttttatgtgagattttctaccaggtcttagtatcataagtgccactttcttgcagataaaacacacacatctctacgacagcatatgcaatgtgcaatcctatgttgcaatcgt

SEQ ID NO: 2693 - DNA, 767 bp, Zea mays
ttgcatgcctgcagccgccgccgcacgccggacgggggcttgagcccctgcgcggagatgagggccacctccagaagccgctcgccctcagggagccccagcccggcctcctcgtccggcgcctccatcgccggcgagcgacggagctaggatttctcgatcgggtgcgggaggacgagacgacggagggctttggcgggcgggcgggcgggtggtcggatttggggtctcacggttacggggatttgaacggacggcctgatgcaagccgtggctgctggatcggaaggttatgaacgagtcccgccaggggccaacgttcgaactttgatgaaatgatgaagcggtgatggctgccagcctgccagctgcgtccgccgaattctgagcttcggccgtgctcggcccgacccaatgaggaggaacctaacaaaacggcccgctttggagaaccttccaatgcggttgggccattgctccggtttcccttgattcagcccatataaggatatagccaggctaagaacaattccaacagtaacaaaaaaaaaacaaaggtcccaaaacatagtaactggaatctatttaaaagtatgaaatctaaaaaattaaggagtaactctaacaagtcccaataattttccaaaaaatgtttaataaaaataacaatgattatttaaataacaaggatactacactgttatattttgatattcattatactgcaccgcgcttgtcaattttcctaaacaagccaaggcaaggca

SEQ ID NO: 2694 - DNA, 761 bp, Zea mays
actgatacagcactaataattttgacattgacaggatcttccatcgcaagatgcaatccagattgcaaacaacatatcagaccttggtcagatatacaacagggaagatatggattccagcagtccagtaagtgtccacagttgcaattatactccgttgcgtgcatttctttctctcttcttttttttttggtcatctgtacaagtacaaagaaagagtgaactgactgacaagtgttttggaaaaaggccagaggccagctgctcggggaagacggagtgcgcgtgcacagcatggttctccctggtctcgtctccagcacgtcgatcaacttctctggcccaggagaggtactggtaacctcacactgacatgatatgctcgactgaaacaacacgctgaatttgactgctgcatcacactccaacaacacttttcagatgtacaccttacggcatgacgtcgcgaatgttcagtgcctgatgccaggactgatcctggcgatacgcaaggtggtgcggttcaaggtaacctggaactactcatgcatgggttctcttctgtgtcacagggtcgcttcgcttcactctctctggtctggtttgctgctaaccaggattttttttttgcagaacttgatttatgggctagagaagttcttgtagtgaacaacaaacaaccaatgcaaaacatcgtcgacaggcaaggcagatatcatctgacgtcgcaacaaccaaaacgacagagatttgaaaaaata

SEQ ID NO: 2695 - DNA, 704 bp, Zea mays
tcggtacccggtgatccgctagagccgacctgcagtattgcctattggcatcccttgtttcagagatgtttcctgtagattgggccaactacaattacaagaagatgggggtcatgctaatagatttgacccaataatcataacgggaattgttagaacttgaaggccaaatatgccataaatcgaacatgtgtttatatcttctcatgtcccatcatttgagttccaatagaagtcacttctttcagtcgagtaaccgtacggcagatgaggcccataaacgacactaccgttcaaatatgtcatctggtccacttgtgaccctggctgataagcatttggaacatcagtttgaactgtggtgtttggaactgaatagatgttagtattgacatctatcgggttaggctctgtccggctccgggccgtccgtttggtgtcgacaggactgtctgcactgagtctatccatttgctgctgaatttcattcagtggattacaacctaatttggattttgcaattttctttgcatctgaagacttgaattcaagccgatataaggcaaaagcatcacagtcattgatctcatattcatataggtgccattcatagccgttggatggttgtggatccatgtaataggacctcttcagacccccaaagtccttcatcacctgcttcctagattcatgccaaccacggc

SEQ ID NO: 2696 - DNA, 732 bp, Zea mays
acactaaagtttgtgaccctgaaaatatatgcctcatgtctctaaactagttcagagctcagatgcaggggggaaagttcaagattctacataacctaacaaaataatcatttccctgcaacaaatatcctccactatggttgtgtgattgtgtcacctgcatgaattgatataaaaaactatataagaactattattgatttcatcaagctagtcattttttgttccaaggccttcactgcttccaaaattaaaaaaggatacaaattcccattgacttaaagtatagacctgtattatatataaagtacaaaacatagtaacagatattacagaaaaaaaaattaaagaccagtgaagctcttactctgatactttcaatgaatgaatgtggaagctctttcgagtaaccatcagaaagcctaaagtacaaaacaaagctcatcccttccccatctgtttcattctgaaataatgaagccggatataatgggacctgagaaaagtatacaaaatgtcaatccactgactgaatactggtaagagcataaaactgacagaaaaatactgaaatccatgttacagtaactatttcttataacaaatattgctatggtggcacgttgttgaggcttacttcaggcaggcaaacataaataacatgtttccccagagttcaccggttgcttcagtcccaccctttgtactagttaactatgttgaactggtttg

SEQ ID NO: 2697 - DNA, 771 bp, Zea mays
cgattccggcgacggcgtgggcgcccttcttagggtactgcccgcccaacttggagtccatgatgcggtacagacggcccttgtcgctcaagtagggtctcgcccactccaccaggttctgctcggttaatggtttcgacttgtctagcgcccgccgtcccgtcagcagctccagtagcaccacgccgaagctgtagacatctgccttcactgagagccgacctggagcagtttttaacaagacgatgcatgaggaaaaacaatcttgccaaaatgaatagtgtggccgagcagattatcaatatactggctttatgcccaagcttaagatttgatctggtacatgtggagatctctctactctctaatgcgtactcctacgtgcctgcacgaattagagggggtattccctgctgtgttccacttccttcaaaaggattgaataaaaggtatctgagctccccacggagatcacgaatggaatataattgttgaatctacccttttgaactgttcaattgcatgaaaatttagaccctatttagcacaacttattttcagcttcttcgcagatttaaacagaagttaataccaaacaggtatcccttgcagtagcttatcagttcagctgcttctcaaaacgaactaaaaacagtcaataagcagaagctgtttttcaccagcttctcagatatgcccgttttttcaacaagcaggcaattgtgccaaacaactccttaagcatattatacaatcttatttatgtaggct

SEQ ID NO: 2698 - DNA, 719 bp, Zea mays
ttgttgcccaagagaactgcatagaagttcttagtagtgacttggtccccagtgtagtcctggagttagaaactatgttaattaatagacttgcagaacctaacactgctaaaaaagaatgtgcctatggtgaattcatgaagcaagatacctaaaacaacacatggtaaaaggatagattcccatgccacgtcctcctcctaaataacttgcatatttaattgaaaagctaaatatacccaggtacaaaaaaaaagcctagcgaaagggcatctagcctagtgtttaaaggcttccgattagcacctccaagtcccgggttcaatcccccctcggaggcgaattttagacttggttaaaaaaatcccctcgttgtgccacgcccgctcccgggttacgtcctgcgtgccaccctccggctgggccgttgcagagtggacggtgacgacccgctagtgatgaggggtcagggttcagggattttctcggccggaatcatgttttggtctcttcttatccattagtgggttgtgtgcgccttgagtgccggccctagacattgtaccggggggacggtctttccctccccaaccgagtttttttaacaaaagttacctagagcttggttggaatcaaatgctgcttaagtaattcacattagtgtgaaaactctgaagtatggacaatgaaattatccaaaaatctggcctcatcatggg

SEQ ID NO: 2699 - DNA, 800 bp, Zea mays
aatttcctcgacgactacgacaccaggtatagtcttgctctaagttcatttaacatagaaccatattattttaaagggatgctatatgtgaatgtgcagatcttcgaatggttgggtagcatgcctgttgaattggagggctacattcgtccgggttgtattattttaactgtatttattgcaatgccacagcatatgtgggacaaggtatgccatgttttttttatattatacaacagttatcttttcaaaccaaatgaacagatgctgaatagttttgtattattctcctttaccatgtatcgattatgaacggttagctataaatctgtaatagtagcgaaagggcctctagcgtaatggttaaggctcccgagtagcacctccaggtcatgagttcgatccccctcaggggtgaatttctggcttggttaaaaaaatcccctcgctatgttgcgtctgctcctgggttacgtcctgcgtgccatcctccggttgggccgttgcagagtgggcggtgatgccccgctagtgatggggggccagggttcggggattttctcggtcgggaccatgtttcagtctcttcttaatataataccgggaggacggtctttccctccccgtccgagtttaaatctgtaatagtagccgcatttcagatagattacaaatgtactactacatgtgtgctagcatcacctgccactttctgactaaataaccataccatgtttttaaatgaggcaaccttgaaaaaggtgaaagtacctacaatatggaatcaccaaaaagggatt

SEQ ID NO: 2700 - DNA, 781 bp, Zea mays
tgtaggccgtggagaacgactaaatgcagctcagaaagaaaggatgcggctgcttgcctcagctgcttttgatcggggcaaaggtgaggacacttttggaatgagagacgaggattggttagtgtacaacaagatgagcaaagacaatgatgatgacagcaatgatgatgatgaatcggaacttgttcgaatttcatcgaagctccaggtaaagtccatgcttcaagatttctttctggtggtgaaaattgtatcctatcttagtttcatttcagatgtcagcaatttcagctataatcaggtaccatttgatgttccacggtgcaggagattgatcctacatttgtgtccaaatccgaagctgttcaactgactccggagccacccaaagtccggccactaaccgctgaggattacagaattgccattgggatcgagcggttccgttgccctgaagtcctcttccagccaggcatgattggaatcgaccaggccggcatcgatgagatggtcagcatctcactcaggagattaatggaggacgagtctgtgaaggagcgcctctgccagtcgatccttgtcactggcgggagctccctgttccctggcatgatccctcggctggagtctgggatacggcaatatcggccctaccttgctcccctgaagcttgtcggagcagctgaccccattttagacgcgtggaggggtgctgccgcctttgcggcatcaagcaagttcggcaaacaaacgttcagcctagctgattacggagagcatg

SEQ ID NO: 2701 - DNA, 799 bp, Zea mays
aaactgggcagcgccaatgccattttgataagtgtccagcacgccctgaccgggcggagagatccgaggtgctgctggatcacgcggcgccattgggcgtccacgtttgtccctatgcgcggtggcttttgccgttgctcagggagccacagcagcaggcaactgggcaagcagggaggagcagcgcgccgcgcgcagtcaggcaacccacagctccaacttgctggtgaagggtcaaatgtgtggccttaatcatgccactaaactatggcttaaactaatccttcccgataatctattctaatgggtaattgttgttttattggacccataattggtgatgtcaccaaggaaatggatgattacatcagtcggtatatagctaaaaccaccaccagcgctaatatcatctagggtgataaatcaattgtcactagttgagaatacgaaatcaataccggttgataacttgctacaatatcggattctcaacgggtactaaggccccgtttgagggactaaagattttagtcacatttagtccctaaattgtcaaacggtgggactaaaattgacactaaactgttttagtctctagtccctcaaggggtgactaaaatgaactaaaccatataaattctaccttttgcccctcctttatttcagttgcactaatggcaggagaattgtgaggggtattttagtcctcttatgattcatttaatatgttttgaatagttttaagtctttagaaccaaacatgatagagactaaaactttagtccttctaactaaactt

SEQ ID NO: 2702 - DNA, 1254 bp, Zea mays
ggtatgcaggaaaacggcgatccccctaggcctgcgcctcgcgttgacatccttcgggagctagctggggtcccagtccctgcgagatgcaggccaggctcgacgagggagcaggaacacttgagcagttccggcggaacatcgggcaggaatgggcagaccaagctccggccggagaagcgcgtcatctaccccagggcatccagcaccgcattgccgacgacgtcagggcaaggccgccaccggcttccagtggggtcggccagaacctggctgcagcagcaatactactccacgcgatgccggaagccatcgaccaccgaagggcggcgtatccagggagagctcaagaatctcctggaggatgccgcggtccgacgggccgaaagctctgcctcctgaaggcaggggtaccccccggagcatcgcgccgcgacttcccgattcatgcgggaagcctcggtccacaccgggcgcacgcgggacgtaacacctgcagccctgggtcgcctcggcaacaagcaccaccgccgcgaccgtcgagcccacctcgatgagaaggtgcaccgaggctaccaccccaggcgtgggggacgctacgacagtgaggaggatcggagcccctcgcccgaaccaccaggtccgcaagccttcagtcgggccatacgacgggcgccgttcccgacccggttccgggccccgactaccatcaccaagtactcgggggagacgaggctggagttgtggcttgcggactaccggctggcatgccagctgggtggaacggacgacgacaacctcatcatccgcaacctccctctcttcctctctgacgctatccatgcctggctggagcatctgcctcccgcacagatctccaactgggacgacctggtcaaggccttcgctggaaatttccagggcaagtacgtgcgccctgggaactcctgggatctccgaagctgccgccagcatccagggaaatccctgcgagagtacatccgacggtttttaaagcagcgcaccgagctgcccaacatcactgactcggatgtcatcagcgcgtttctcgccggcaccacgtgtcgggacctggtgagcaaactggggcgcaagactcccaccaaggcgagcgaattgatggacatcgccaccaagttcgcctctggtcaggaggcggtcgaagccatcttccggaaggacaagcagcctcaaggacgacagcaagaagacgtccccgaggcgtccgcccag

SEQ ID NO: 2703 - DNA, 891 bp, Zea mays
tcttgcatgcctgcagcgtggtgccctgcgggaggctgcctccggcgaagaccggcacgccgttcccgttcccgttcccgttgccgttgctgccgacggacttggcggcgttggtggcgccgcccaggcccgtgaggaaggggatgttgttgttgtcgatggcgcccgccgcgccggagttgacgttcacgccgctgttgagcggcagcacggcgccgttgggccgcgcgaagggcagctgcccggtgaccgcggcgttgtccacgatgccggccacgatgcgcgccgacgggttcgtgcccccgaggatgtcgtgcatgaagaagaccatcccgtggccgtcagcgccgccgcccgctgcacccgctcccgcggccccggccccggcccccacagggatggtgctggctgcgaccggagctgccgcagcagcagcggggatggcattggcagcgaccggtgcgtcagctgccacggcgcctccgggcgccgccaccacaccggcgcctcctaccacaggtggactggcatcggcagtgaccggtgcgtcagcagcagggtgcgctatggccggtgcggcagcgggcgccgcagcaccagtgccgtcgtcgtcgtcgtcggaagtcaactggcgcgtcggtctcgccgccgtagcgctgggcgcgacaaggaggaggacaaggatgaggagaagggaagagagtccgatggccgctttcttgaacgccattcgagcagggcaggctctctctgtttctacctcgccccgctggtggtgatgcactaatactgcaactgtttgtgctcttgctgagctgcgactgtgagtgtgatggcttgagccacccacaatagatcttcatatatatgggatggcgagcatatggacgt

SEQ ID NO: 2704 - DNA, 805 bp, Zea mays
aacacacgaattaagaggatacatgggcgggtacctcaactttcttatcctagctccggtgatatgcggatgaaccctactccgtactttttttttcatcggtgctctacgttacattacatacatatatggtgttcctattattatcaattatatggttctaatcctagataaaaaaaataaatataaaaaacaagtttattctaaaccagtgcaaaacacgtggattacggagataaatgtcacatctcaacttattcaagctccggagatattcagatgaacaaatacttcctattctttttttcccttggtgctctacgttgcacatggttcggagccccaggccccctacatctaaggagcctggcaatataagaatcaaagcaatcgttgtttatattacatgtattctcgaatatttgtcacccactagtttattttaaaactaaaacaagataaataaaaaaaacaggagtattttgcaagtgaaggtcggtagtgtgactgtgatgttaagccggtttaccgctacaggggctagaacaaggactatgagaagcatggttaaccgaactggatctttagctaaaaccggtcaggaccaatatccgattaatcgtgataaatagatagaaaccggtagaaaccgtccaaattcaaaatcgatccagttttgaattcaaacggctcgaaaccgatatcggtcaccaatttgacaaactattggccgtgcgtgagaaaccgaacctcgtgttttttgcaaaaaaaaaagcatatttaggtcacaaaatttaacataacg

SEQ ID NO: 2705 - DNA, 789 bp, Zea mays
agtttgcatgcctgcagcatgagggtctgcccccttataagtcagatgttttcccgtgctttgagcctcctaagccccacacgacgacccgtcccctataggccagtctatctcatgcacaacgagtggccttttttaatcacggtctaaaattcgctcccactgggagacgaacctagaacacgaggagggctactagagccagttaaccaactcaactagaggcccgttcgcctaggggacaaatagcactccatatatttaggcattctgtcattttttccatcttaaagttttatttattaaaccagcaatgttcacatcattctagcaaaaaagacaaaatgtgtaccccgattttattgtgtaactttcttgttttttttcgatgcatccaaatgaatttttgtttctcggacagaatttaatcaaacaattctcgtagttaatatcttgttcatttgataataggcattctttgctgttcttcaaagctgggtgtcaagaaaatttatgactggatggtatgcttcacaagttcacaatgactaattcagacactttgcaatggctacaactacaatatattgatgctaatatcttcttttgtctccctactttttctttgcagtgtagttcttttgccaattgctgtcacattcttcatcacttggtggtttatccaatttgttgatggttttttcagcccactctatgcaaaactggggtttgacatatttggtaattgtttatcttttattggtggtacttcttttgccatgatacatg

SEQ ID NO: 2706 - DNA, 783 bp, Zea mays
agtaaacaaatagtacctacaagctttcaatgctgcatttcccaaaagttttctcaaagtcatcctcaatcagccatgaacactcactgagatgccattattttcgcgcactggaggctagagagcctccaaatctcgtctcctttccgggtggtctgagtgtggagtgtatgtgttgtgtgcgtccggttcgataaaaaaatcaatacggttgaacatgttatgagtatcttatacgtttatccactccaaaccaaccatttccttggttctataataccaccaagtctgttgcaaacttgcaattgggccaaactaacggtgcctggctgtgtaatctgtgttgatccaaaaacaaacttatcttgttttagagcacccgccgggtgttcgactctctctctctcgtcttacctaactcggggtttagaggaaacgcagctgcgatgttgtcatcgcccattgtttcctcttttcatcgcccatcagttcgtgtttttggatatattttaaacatttgccagtactcttttcttcttttaaaataaaaaggctgtgttcgtcatatcatgaagcaatttgtcatgttattctttctgataattatggttggtggtcgaccaaaggatcaataaggaataaagaatcctactcgttatatgctagccatgggggtgggttctgtacttcctgtgcaggtgtaccctggggttcgcagttggttgtcttttatgggcgcttcgcttcagtgtcttcacgggccgccggcggagatgcggttca

SEQ ID NO: 2707 - DNA, 772 bp, Zea mays
tcttgcatgcctgcagaagctgttttaatatttgcaaaaatgctggacttatggctatcgtttaaagtgcagatcaacgagtttgtgaagcttggtggggaacaacttgttccttactatgcagatatattgggtgctatcttaccatgcatatctgacgaggaggagaaaatccgagtggtactctcctgtcttatgcttttgattcatacaattactgcaaatgtgtactgtgtggtgtgtgcctgttcaggatagcatttactttaattactgacttctttgtttgcaaggttgcacgtgaaacaaatgaggaactacgtgctataaaagctgatccaactgagggatttgatattggagcaatcctttcaatcgcaaaaaggttctctatcaagtcctttggaaatgaaattatgtagatttgttaggcatctagttatgtggtaatatgagttgtttatatctgcctgcactggtaatttgataattatatcaacatgacatttgtgataggtcattgaccttttgtcctttcttttcagagaattaaacagtgagcatgaggccacacgaactgaagcattgcattggttcttcactttgctggatcaatatcgtgctgaggtactaaaagaccgatgtttttcggactgcattttgatagatctctacaactaccctcaacaagtaccttcatgtttttaagcttttacattgccattattttattttgtcaacttagagttggacatgtgagagttgcaattca

SEQ ID NO: 2708 - DNA, 800 bp, Zea mays
ggctagctagctagctcatccatgatttacgtctacctgtagactcatgtgcttatataaaatcatacgacgaaactgtacgtacggcgtagagtggtgtggcggggtccaatgattcagattgtacgtacgtgtccatcgatccaactgtagttgtgtacgcagtacagtacgtgctagctacggatcagttgcttatatatagcttgtgcgtttttttacactttcttttgtccttttggtttataatttttattaagatatacaaatatttctcttcagattcggatcgaatacaaatattaaaaatggttcgttctttttcattatttcttcttcgtttccatacgattcatcttcccgtcacttcctcctccgtatcctctcattcagtcattcgcccacgcccgcccataaatccctccatgtttttttctttttgattagagaaagaagaaggaaccagacctacgaatttcatactcaaattggatgtgggtctagaactctagatatgaaactccacatgaacccaaggaacatacaatctgggctacatttgttcatgtcgggactttatgggcctcaagttgcgccagcagtctacaagcccagcgggctactgaacaccgtcggtagagtgggctgtgtacatctacaagtcatgacccgttcgaagcaggccttgtgcttccctgcacgagatatctgggcctgggctgatcggtgcgcgtctgttccatgaacgcggaacatagtctgtgctgccatgtgctgatgcgcaacgcaagctttgagca

SEQ ID NO: 2709 - DNA, 805 bp, Zea mays
tgaaaacaaaaaacagttccaaaagatcataattatctaagggaatgtttttttgaaggaatgtccaagagaaagttgaccagaaaagtacaaaataatagtaacaattgatgtattcatgcattactgaaaaaatgaacattatttctaagacatctctgctagtccaattcatagaaagctgaaacagtcatgcattctgatgtattcatttattgtttcaccacaaaataacttcttttatctgaacaaaccagtttgtgtcagttcagaattgtggatgcatgacaacacctaccaaggttcaaatcctagtgcccacatttttaagtagcacttcatccctagttgttgctgaaaccagagattacctccattatctaaaaaaactcctcaaataagaaacataagggaacaccaagtgccggaggctcccacatgaatgggatttgggaaaggataaaccaaggcaaaacttccctccacgaatgcgtagaggctgcttcgaacctgtgacctgatgactcggtaagacagctctcaccaaaataaacttaaataaatataaatcagaggcttttattcctgaaaaattaatcagtgtgttctaaaggaactgtggtttataaggtctaaaacatttcagggaagtccaactccttcaagaaaaactttcagctttgagagaagccaacaaaaaaaatatcagccaagttgaaacctgatggttcagagacttaaaatagcaagcagtgcagtaacacgatcattatttttgttctaacaattctgacagcctattttt

SEQ ID NO: 2710 - DNA, 773 bp, Zea mays
acattttcaaacaagtccgaatattttccaagtggctgtagttagtcttggttatgcatttgaacaactggacaaagtacacttcttattctataagcccttggtacttctattgtggcacaagcttcctatcttatggcatgtgttggtctgtgtgacccaagtgtgctcaagttagtcaagccaaaatttggcacctttgaccaatattggctaccatttggttgagtgccaaaagatgtaatggtaccttatctctatggctaccttagttgtcaaatcttgccaatattaaggtcattaaaattggttgtgaccttgattttttatatattaaaactagaccaataaagaaggaagtcggtggctataaattaagaatttggcacctaatgttttgccagtgaggacttgaattgggtggtctgtgctttacatccacaccctcaaccaattgagctaagatgagcatctctagcagctctccaataccattcctcatccgcataaaactgtcatatttggggatgaggcaattccatagctccagcagcttcccaatagctctccttttctggtgttcacaaagaaaacctccatctcctctcaattaaaggggagttgcatctccacattagtgttgggaccacaacaactgtcatcttcctttttccacgtcctctattttgacatgtgggttccattgagaaagattattggtgctggagcatctccccgaatattccaaaaaagcactacccgtgaccaccaat

SEQ ID NO: 2711 - DNA, 775 bp, Zea mays
cagtttgcatgcctgcagcacgccgcggtgggcggcgagctcccgatgatggcgcccgcgcacggggtcagctgcgcggcgtcgcacgccgtggccgcgtcggcgccccgcggcgcggcggcgcacagcagcagcaggaccaccgcccaggcggcgagcgccgacaccagcacctgcgaaggcttcgccattaattggctgctagcagctagccgcttcgagagatcgagctcgagagtgcttgacgacgatcagtagctaagctcgcttactacgtactagtgcgtggatggtggtgtgtggtgtggtgcgaccggccggagagacaccggcggcatttataggcacgtcgtcgaggtgggagctgcaatggcaattgcagggcggcagacagtcccgctgctagtgcaggacaagtgtgcaacgcagattgacttgtccacagccacaagtgcaggagtatgcgccactaggggagggaggacaggacagggatgatgtgcatgccgcatgattgttgttggaaaaaaagaggagagaaattcttggttggtggcttggtgcaggagacatggcgccgatcgaacacggcacgcggcgcgggtgtcaggccatgaccaaaagtaaggttcggtggatcggccaagataaggtttgttatactgagccgaggctgctcattccgctgattagctcaggcaaacagtcgagctggttaaagtaggaactgaacaagagatgttttactactttggcagttattctagttgctttg

SEQ ID NO: 2712 - DNA, 781 bp, Zea mays
caaaagatgaaactagacaaaatacaccttcttgagagacataacatccattggaacatatgaatttcaagaagaagaagaaaaaacagcatcgctctcactgcttggtccataatcatggcttggtgcgggccaactaaaccaaaaaagccatcgctccgagtccaggtatctcggtcactgcgtgcgttcccatccaagagaatggtgaccgaaacagccgcaaaataacggcagacatacaggaaaataaatctttgcattcgggatacaaagaaactactttggagcctctcacatcctaccactgtggtccatacaaataaaaaagattaaattacgaaaatgtgaaattgcaaattttaatctgtctttatggatctaagcgatgtatgtgaggagctgtaaaagaggacgtttgtatctgggatgtaaaaaaataataatccgtaatacgatcctttccgctaaagaatgaataatgacttgtagctaaaatgcattgagtaatgaagaggagtagcaattctgactccagaagaaaaggctaagcatcaacagaaaggaaatatgctgccttccccatcgagataaagcgccaagcctcctaacaaattgcacgaaaatgacagcttacaatcagaacagcaaggatacaggatacagtcatacagggcgggcgctagagtagggtaatgagcgcattgcttctcttttcacataaacggtggcgtacctgatgtgcattgcaacacctgcaacatgcatacgcagctacatc

SEQ ID NO: 2713 - DNA, 762 bp, Zea mays
tttgcacccaccagaagaacaagctatacaacattcacattccagttaaggccaagattttccagaggaatctaggttgtagaatgttggagaagcagggctacaacttacagttacaggaagaattgctatccaaaagtacaggttggatcctgaaacaaaataccatttacgaacgttagagacagtgaggaaacaaaaatatctcatagcaaggaaagtggttggaagtttaccgtctacattaaataacataaaagcaacaacgaagccccacaacagtccactgcaaaggaggagtaagtttttagctgaccatatttctccgatatgaaaaaaatacagtgggtttgctattacactaacctcactccgacaatcttctcaaactcctcttccattgagcgtatcatgtaattgtggaaatcatatgttggcggaagattgtgggtctgcaatcatcagcaagtcaaaaatgagtacatgactacaagggttttagtggatggaccatagtcacaaagtttccggatcgatgaggtcgaggaacgtggatggatcactcgaatttgatttgagttgccagctcggtccttcaaataaacacactgaaggccaagtatagtctactcagaattgaagagcaaagaactagcataccattataaaacccttgcggaggataagatagtctgctcgaacaacagactgaccaaattgcgcaataaaagcaaacctgcatgggagcataatcaaaatcgt

SEQ ID NO: 2714 - DNA, 743 bp, Zea mays
tcaggagcgagggtggcggtgattgggatggcgacgatgcagatctgccactgtatgtgctgtgctcatccgcacttgttgacttatgagtagttctttgattactttcctttgggtgctgaatgctgacggtgcgctacagtttgtatgcttattgctgaagtaagccgatgccagctgcttgcactagatatctaatgagctataagagtgcgatgtacacttttattaaactgctaacctcaagctaggcacacacaaaagtgatatccaatttcgttaggaaataaagggttacagtatttaatcacagtatatctaaaaatatgcagatatagctttgttattacttactacattgctagatgccacacaactacatgagttggagagaatccagaatacaagctcaactgtttatgcaatgctgaatttgtagactaagatgatacatcacctatattatttttttaagtggtgtatctgttgcttcatttcatgttaatgtttttcatcatgttcgttgcatgtatattcatagaaacctacatagtggtgtagataattttgcattgcattttatgatcttatcttttatcttctaagtcatctgcaatatagtttttgataacgaaaactttgccttttcttttcatagagtattactagtatatggttctaaattggtatgtaaatttcttgtacagaatggatgaagctaggcaaccattgtccagaaaagt

SEQ ID NO: 2715 - DNA, 760 bp, Zea mays
tctggtgtcgattcctgcatattttgcagcactgtgatgtaactaactgataagctttaaatccttctgacctgatgcaggttttatcgcgatgtacgcgactctagctagccgtgatgtggtaggctcttaacactctgctaattcattttatgttcaacatgaggaaagaaaaaatatatatagcgagccaaatgtctgaccactccattctacttgcgacctcaggactgttgtttaatcccggagtcacccttctacctcgaagggaagggaggactcctcgagttcgtcgagaggcggctcaaggacaacggccacatggtcatcgtggtggccgagggtgctgggcaggacctcatcgcgagaagtatgaatttcgtggacacccaagacgcttctggaaacaagctgcttctggatgtcggcctttggctgtcccagaagataaaggtcaggcttgtggtccaaaccttctgtctcattgtcaatgtggggacagagacttcatctaccattcagttagctatgttataataaatggatgatccctgttgaacgaaccatgtctcgctgtcctttttcgttagctggggtggtgtgtccctggtctcatcccaatactgaatctgtagcgtttcttggtcgtgcaggatcatttcaagaagaagcccagcttcccgataaccctcaagtacatcgacccgacctacatgatccgcgccgtccggtcgaatgcttctgacaacgtctactgcac

SEQ ID NO: 2716 - DNA, 748 bp, Zea mays
atcatttttcaaccaagtaatggagatcgctttttatttttagtatgtcgcatcgttggctagagctttgatctaccttcatggcaagcatgttatccatcgggacattaaaccagagaatcttttagttggagttcaggtacttgcattgtgttcttttttggtatccctctggcaccgggtctgctctgcctcatctggaagactggaactatatgcttgctttacatcgtcgtctgtttccttggaacagggcgagatcaaaattgccgactttggctggtctgtgcacaccttcaacagaagacggactatgtgcggaactctggattacctgccacctgaaatgggtactttgctagccatttacctccagttatgaactagttcaatgggttttgagaattcccacagcagtacctagctgctttccttggctctgaaacctgttgtggtttatccagtggagaaggcagaacatgattaccatgttgatatatggagccttggtgttctgtgctatgagttcctttacggggtcccacctttcgaagctaaggagcactcagaaacctacagaaggtaactccacaactctgggatcttagtatgtcgtccctaacttgccgatatcttgccctagattatttcctgtggcttttgacttttgagctatgctctgataactgtgaggaaacttttgaagttgcatatagtgctagtgtagcaaagagagagcactatattg

SEQ ID NO: 2717 - DNA, 781 bp, Zea mays
tgcatgcctgcagcactgctgctcgcctgctcggtgctcgctgccctagcggctggcgccttggcacacggacgcagaaagaacggacgcagaaagcagaatggacgcagaaggactgttagggtttttttgagccaaaatctctactacatatataaaattgtttttgggctacgactcgtgccacgacccaggtggcccaggcccaatatccgccctggtgacgggcaagtggatctgtacagatacacagaaggctgatggctctctagatcggtataaggcccattgggttttcttgggcttcactcaacgtcttggggttgactaggatgaggcatttagttcagtggtgaaacctgttgctgtccgtgctattctatcactggctctctcgttcttggttagttcatcagttggacgtcaagaatgccttcctccatgggactctcaccgagaccatctactatagttagcctaccgattttgttgactctgctcaccctaacatggtttgcaagctcaacgagtgcctctatggtctgaagcagccccccatgcttggtacaacaattttgctacatatcttctctccctgaattttattgagaccaagtcagaaacctcccttttcatttaccagcgtggcagtgacattgtatacttcctcctgtactttgatgatactgtgctcactgctgcttcctcaggcctgctataccagatcattaccgctctttagcatgggtttgcattgaaaagatttgggccctcttcatca

SEQ ID NO: 2718 - DNA, 736 bp, Zea mays
agaggcgagctgatcctggtgtacgactacatggcgaacgggagcctcgacaagtacctgtacgaccaacacgtgccggcgctctcgtggcacgagaggtaccggatcatcaaaggcgtcgcggcgagcctcctgtacctgcacgaggactgggagcaggtcgtcatccaccgggacgtgaaggcgagcaacgtgctgctcgaccacgagatgaacggccggctaggcgacttcggcctggcaaggctgtacgaccatggcaccgatccgcagacgacacacgtggtcgggaccatggggtacctcgcgccggagctcgtgcgcacggggaaggcgacgccctctaccgacgtcttctccttcggcgtgttcctcctggaggccgcctgcggacggaggcccatcgaccgcgaccggcaggtcgtgctgggggactgggtgatcgagcaccaccgcgatggctcggtcctggacgtggtggatccacggctcgtggggaagtacgaggcggaggaagcgacgctggtgctgaagctgggcctgatgtgcgcgcacccgttgcctaacgtgaggcccagcatgcgtagggtcgtgcagtacttggactccgaccaggccgttcctgacctgtcaccgaactacacgagctacagcatcatgtcactgatacacaacgatgggtttgattcgtacatcacgtcgttccactcccatcagtcccacccgtatatgacta

SEQ ID NO: 2719 - DNA, 726 bp, Zea mays
ggcgttccaaaaaagatctcctgcggttcgattttgaaaaataatccctttcgtccgtggatctttatgtcaatccaatcccgttctactactgtacagtctgcactccagtcagaatctgttgggtgggggaaaaaatctgttcttggacagtagctgaccagtgtttatttccccttgcccttgttctgctgagtgctgactgctgactgctgactcacgcatttccagctgctccgttcctgggatctatcctattcctatccattccatagtactggttccgctgaaatctccaccatctccaccaagtccccgaaaaaggccggatcttttcgctcaactggcagtcttctccacacaaaaaaaaaaaaccacgagaaagtttgcagctttcctactagtttgcgctggccgctggcttttatagtgcccgcttccagaacgagtggagtcacccgcccccgccctagctcacacgccaagccccagtacaaacaaagcctacggaatttcccccagctccaattcgcgctgttcgttccctttcagccagtcagtcgccgcctccgctgaactggaagtccaaactagctagctcactgggcaccgatttcccccaatttttcgctgcttccaggaggccgcggcgaccatgggcaactgctgcgccgcgccgtcgacggagggaaagcggcaagacccgccccaagaagcagaaggaga

SEQ ID NO: 2720 - DNA, 776 bp, Zea mays
accctcggatccttttagtcgacctgcagctgcagcacgccgacctctgtggcccacgtctcgacgcccgcttcgctgaggcgcgcgccgacgccaccgcgcgggttcgggacgcactcttcttccagcttgccgccgacggctggcgggagcaggtggtcaccttctctgtcaacctcccaaatggcacgaccgtgttcgatcgtgctgttccggtacccgccatggcgccctcagactacgccgaggagctgatgctcgaagccgtggcttccgtctcagcctcaggttcctccaacgacctccaccgttgcgcaggcataatttctgaccgcttcaaatcaaaggcgctgcgtgatctcgaaaacgagaactacttgatggtgaacctatgttgccaaatccatggcttcacccgtttggtgcgggacttcgcaagggaactctcgcttttccgctccgccacagccaaatctgccaagcttgctgcctacttcaatgccaaacagacgccgcggtccttgctgcacaagcatcaaacgcaacagctcggacatgcctcgctctttcgagtcgcacatgtgccgttcaacggcagtggcgccaactgccgcgcggcctttgagatgctcgaggaaattctgaactctgcacaccccctccattgcgctgtgcaagaggacttgtacaagctcttgtgcatcgatgactcagctgcccgggagattgaggagatggtgcacagtgaggctttctgggtagaggttgatgctggc

SEQ ID NO: 2721 - DNA, 728 bp, Zea mays
ataatccttgggcaggcgtacacctctgccgcagaaacttgtctcgcggaggcctgcaaggtctcagccaggacgtcctagcgagcagcgccgccagacgccgccgaggctgaaaccgaggctgttcccgcaagaaggatgtccttgaacaagggagactcctctccagtccacgagctgggcgacgaactgggatccctccacctgagagctttgtttagtccttaattcaatttgatagttttttgttgtacaatatcccattgtacttaagagtctttttgaatatttgttgcactgcattcttccttcttggtgctgtaaaagttgagcgtctacttgatgaactggctgtttctgatttgcaattatcaccgatttgcctgctaagaaaacctgcattgtcgccctgctctagcatttgtctaggactctgagtcctattccctttgttgcctacttttccttacccagatggtaaacttttcagggacttctgtagcaaatgcttcgattgatcctgctcaatctttacatggcagcaatctttcaccaccaacagtactacagtttgggaagacaaggaagctatctgagagatctgaccctaaaaagtagtcctttgtacattcttgataccatgttactggtcatgatattggttccttatgataatacaattgggatgtggttaatttattggttgggtttttggattatttgcagtc

SEQ ID NO: 2722 - DNA, 831 bp, Zea mays
catccatggagtactactacgcctaccagcacagcaacagcaacagcagcggcggcttgagctcaaaggagaagaggccgccgctgaagcgggggcagctcaagcggcagatcgtgaggaccatcagcaacctcgtggtgccgaggcacgccgccgtcgctgggtcgagggagaaggcagatcgcggcagcggattcggcggaggacggagctacaactgatgatggatctctcggagaaggcgtgatcagagatacgattcgcagcgccaggtttgtgtgtacgtactacttgccgatgccgatgcaaaagcagcacgtagcgcatctgttcttcttagagcttagtaatagcttaattatccttgttttcccccctgttgtacaaaacaaaacttgcaggcttttttagatggttgatagagttttgttacataaatgtaatgttagcttcatagcttgtgtgaggtcatgtaaagttccttttgtataatacgtacatcttgcgaagtgaaagcttgttacgtttacattgaagagaacgacatgtttcacaggggaaaaacataaatcagggtggcggccaccctctctgccaagtcacagcatttgttctcttgtgttttgtttccatgctgatctcgatcaatgttgttctgttaacgtattttcccggtaatacacagatagtgtggataaacggtacaagacataccctatccgttttcaccaacgtctatatcagggttcagtggtgttattaacgcccgcacggattttttcaattgaaagcccccctaaactctaaatgatatgatcatttacaagaata

SEQ ID NO: 2723 - DNA, 886 bp, Zea mays
  unsure (1)..(886): unsure at all n locations
gcatgcctgcagctctgcgtgaacatgctgtcatcccttcgagtgatctgaggacccaggggtgggcagcggggtgggaggtgtggcgaccgagacatggcgagaaaaagccctcgtatctttgatggccttcctcttttggttctgctaagtaactagagccaatcgagcatcccttgcgctgttcctttcatatggaaaaacagcagctttgggtcagatccgaatgtaaaatagcctgcattagggtttgggaagggtttggtgtgctcgatttcgcacagcaggaagaggagttgctggcatacctggtggatgcttgtttccagccaaagggccgacgaagacctggcgaaggtcgacgcgggtgcccagtcggcgccgccaaaagtgaggggtgtgagtagtgagggaggagaaaggaaagggaggcgtgattcgggtgaacgcaatcgtcgaggacgcggttgatcaacgcaaatgggccttgcggccttgaagctggcggcggaacgaaatgggccttgcgttgcagtcctgggctcctggctcatgggcaacggccttgcgttgccaacccccggacggtccccggtcactttccgaccgcacgtatgcccacgtcaccgtagcaccgttccaccccaccacaaagctggattccacatctgccctgcggatccaattttccaatcactctcactgccatgccgaccccacagcaagaagccagccacggatttgacgggatgggataccctccaaagtcggaaaccgcggtttcctttccttccggcgggtccgggcccgaattaaacgcgtgggcgtcgngaacctccgtgggcgtccgtcggtcctttttcccttctttttttcccaacacctt

SEQ ID NO: 2724 - DNA, 776 bp, Zea mays
aagagaaggattgcaaaaaaacagaaacatgactttgggagaaaaatagctgagagcaatgccacctaggaggtttggtataaaccgagttcctgaagctattacagatttcagatttcagattcctgtctactacctgattgctaaagtgctgcatcagtgaatggcttgtaaccagaaaatgtatcaaccgagtggctgaacagaactgaactgatcgaacagaactgagcagaaataatgtactgatgaacagaactgagcagaaatgatgtactgaacagaacagaactgaacagaactgagctgaagtgatgtactgaagaactggagaaggattgcgaaaaacagaaacaagactttgggagaaaaatagctgagagcaatgccacctaggaggtttcctaaagcaccagcagaagagccaaacttccaagcaaacattatgatccattgcaaacaattacatattagagacaagaattgtctacaaaatcagagaatgattcagatgcacagttatgcaatagtaccattcactctgtttttaatccatctctacacttatacacaactatatatgaagaaaatatttacctgctgctgctgtagaaccttgggtcaatgttgattttttgttacgactcatctaaaaatacagaacattagaagcttgttctattaattacataaaatgaaataccgggtttgtaggaattaccctggtttcgatgggccaatgcaaacggggcataaaaaagaagcatccccccata

SEQ ID NO: 2725 - DNA, 758 bp, Zea mays
ttgcatgcctgcagggtccaggaactccgggtgctcccggaggaggtcctcgtcgacttgcacgtagcgccttttgacccccgtcatctcgcctgggacatggacatggacatgcatgtagagaacgaacgaacgcctggatcaggtgtgctgacgatatttttcagaaataatggagaagttgctaattaatgaatatatataatcacgtcgtcgtacatgctctcttcatgatgggtttgatgtgcgtgaggtggtcgctgttggtgatacggaagtaccggtcggtgtactcgtcttgctgaacgcagttggctgggttggctgtgccgacgccaagcacacacgcgaggccgtggttgctgtcgcgtgctaacaaggacgattgcatgacgacgatcgacgtacgatgatggtttggttgccaacgacgacgttgacgaagacacacacacacacacagctagaaggtgatcacagtagtacgtacgtactctacgacgagtatatatacataaactaggtcagtacccgtgcgttgcaacgggaacatataataccatgataacttatatacaaaatgtgtcttatattgttataagaaaatatttcataatccatttgtgatcctagccatacataaattttggtattttaatttagttgtttcactactacattgcaaccatcagtatcatgcagacttcgatatatgtcatgatttgcatggtctcattattggagagcgcgtgccacac

SEQ ID NO: 2726 - DNA, 816 bp, Zea mays
  unsure (1)..(816): unsure at all n locations
tcttgcatgcctgcagaaatggctagcactagacttgataatcaaacaaaaatgatagaggaaggcacctactacatactggagatatgcagttgcacaagccatgtcatcgttcagatccgcaaaggcaagctcaggttcaatcatcttgacccacaacaataaaacagcaaaagatgtgaattcagtgtttatgtcggattctaaagatacaggtttgaggatttcaaatacccaaaattcagccagatgccttgaagtgtttgaattttcagccctaaacgttggaccaaatgtgtaaatctggagcgaaaaaatcaatgaggaaataaaaaaaactaactaaagccatcaaacatgacagggttaactgtttcaaatgaatgtggaaaaagaattacatcagatagagctgaagcatatgtttcaccattaagctgtccagacactgtcagaaatgctggtttgcagaagaaatcctagcataagtaacattaaaaatattcatattattcgtacagttttgagcaactaaataacattaaatatagggcattatatggtataactataaccaaattgactcaggtaacatgctaacaaaggcaaaggctacctgtgaccaatcaacccttccatccttggtagcaggaatatctttgagtagagaaccaccttcagcgctgtttgaaagctatattatagaagtggacaaaaatattaaacgtattcaaaccagaatgcaacaagaaaaaccaaggagncagaaggcaaaatggatggctacataaaggaaaaatgggcggaagaccgatg

SEQ ID NO: 2727 - DNA, 849 bp, Zea mays
aaacttgatccggtttacctggtagtccctgtcagactccgcccagcaatcatctgaaagaagatatatggataataagccttcaagataagcactaggctatgaactactgcggcgtcacacacacgaaataaggttggtgagttcacacacagtccgcacctatgttaacatactcgtagcccagcttcgccagaccggtgttgaccagcgcatcagctgaagggaaaagaaaaggccgtcagagcagaactgagcaaaccaaatatgcatgcaatcaataacgatggcgagtctgtgaacgaacgaacactaattgctgactggagaaggtttacgctaaggtaccatctccttggcattattgtgatacaacggcacggtcacggggcatgtcagcatgtgccctgcttcaaccaccaactacatggagctggtgtagggggacaaacagtccaaggggaggggagcaggtgtgcatgatctgcatctgcgcctgtcgtgttaggaactggctagtctcaggcactccggctcttgactggcccagctcctgttgtcggctcagacgtccctttttctctctctcggtgctttcatccaccaaccaaccaccaaccgcccaggttcgttctacggaccaccaccgtatggacacagacacggtggtcagttgatgtgcggtgcggcggatctcgttttgtcctcccctctccttttcccgcctgggtccaatgcatgactgccacttcattttgctgtttgcgagctccgtaggaaacgtccaacgacaagctggtgcaactagtagtagataattttcggacggacggacgacgacatcagtca

SEQ ID NO: 2728 - DNA, 728 bp, Zea mays
aactagagaaggtttgtgattgattcagtttcatgttatcagtattgtctcaactcttcgcccgacgatttcacattcccgtctcagattgatattgtactattcaattacagctgttgttgatttgcagtttttggtcgaggcgggtctgtatgagagccctgacgaatctgctaggcgggaggaggtgctggggaagcttggccaggtagctactcttgttgccacacgtgtgcttaatgctgtactatgtatccgtgtccatggttccagcattatttcttccctaagcatgttctttcggcatttgcagattgtaaaagactgggtgaagcaattgactagtcagagaggatatactgatcaaatggttgaagaggcaaatgctgtactcttcacctttggctcataccgacttggggtaatttccaccacttccttttactagtttcgcctgttttgctctgccacccatcttttatttattcattagtgaaattgtacagtttagatagtctttgtacttgtgacagtacttagtgttgatgctcctttaagggtgttcgtgtcctattaaaatacaacaatcgaatttcttgtgcttgaggactagttgcaagttacaactgatatagaaacagtctaaatattgggaagtgggatctaagtggtgtacaagtggttgcaattatccaaacctgcttttttgagaacacaatttaacgagc

SEQ ID NO: 2729 - DNA, 766 bp, Zea mays
cttgcatgcctgcagtggttatgaaattccacaggccaatttattttaattaatttctgcccagcaaacttgagaacataatctggaaatggtaattgaccacatggcatttgttcgtaaccacataaaaacgtaatgcaagcacctgatctgaggaatcacatatgcaataaagcaaagcaaaaacacaactgacctgaggaaccacatatgcaacaagaaacaaagggatagtcaggacattgaggtatattctatagtactgcaaacaagaaacaagtattttcagaaaaaagacagatttttacataaaagtaatgaaaatagaacacatacaaagtaaacagtttttttaacacgcaggagaactgcgtatcatttcattaagaaaggagaaagtacacaaggaaaggaatctgtatacaccaagacaaactaaaaatgttctaacgcaccgaccagccaccctgagaacaggaggtgacaacgcaacaacactagcctctgttcgagacccttacaaccagctgctggggccccttggccccagccgaacaccagagcactccatcgctagcaatgtcctgtaaagccaccaccaaatctggcatcatcccatcgaagacacatctgttatggtgtttccaaagttcccaagccaccagaatggtgagagagttcatccccttcttcaactcctttggaaccaacttttcaccaaatattttcatccgcatacagagaatcccgtgttgaagaacccttg

SEQ ID NO: 2730 - DNA, 789 bp, Zea mays
tctctccagagctccaaatttttgtgtttagctaacacaaggcagcaagaatcgaataggttgagaacttgacctgtgcaaagtggacagcattctccttgcatgcagttttgttcaattgtttgtatccctatattaatttaagtttcttatattttggtgtcatgctttctgaatctccatgtttagtagtactttggatgcatcggtgttgtagtgctaatcttctagcttttctctggtcagcagattcttagacagaaaaatggaaaatttggtgttgctggagtttgcaatggcggcggcggcgcttcagccctcgttttggagctcatgtaagctcttcactttttttttgttcctcaaacttttttcccctgcaaaaggaaattttcagttctctatgatactgttccatctgatcgtcagtaggacactagaaaacactcgttaacgaagtgtagctatcttcctactctttctaccgtttcagtactttagtgcgctacttgatttccatcctgcgaccgttagaacctttgctcattaaaccagaagctacttaaagagttatttgagctattttcttagcggctctgacatgatgcaggcaaccctcttcgcatatccattcatcattgtgaagttggtgcgagcaaattagcaagacaaaatttgaaaatgtgctgtttctgtcgtgctgctcagcacagggcattatcttgtactccccttatatggaaaaatatagacgtatatttccccatggaaataacagaggccccggaa

SEQ ID NO: 2731 - DNA, 795 bp, Zea mays
cttgcatgcctgcaggcctttgcaacagggaaaatttggagaaaaaacaaatgcggtctagaaccagaaattgcgtaccttctcaatagggacttcatggcgtttgcaccatgccacggttattctaggatcaaggtagttgatctttgacgttccaagcgcaactgtcttcagatcctcttttatcctcttatccatctccatcttctctatcttgccttcaagtgttgcaaccttcttttgaatcctgcaagtaggttttgtcaggttgcctaccctactctttgttctaacacacaaaaacaaaatacaacaaaatgtattattggtggttgagatgtgttacgcttcaggagccaagttcctctttggcttcccctctgaatcatagcctagaggcttccctttctttgctttgttcaagtctgctttcagctcctccatctgggactggagaagaaaaggcaagtgtgtcagacagttcaagaaatcccaaagctatggcagaagtttgagctgataacttgcagcataaaccaaaccttcaactcatcaatcttttcgttcattctagtcatctgggactcatgtgatttcgagacactacgctgatggttacagatgatggcaacctgagtatatgagaaagggcagcccagagtcaggatgaatgatgatacaagtagttgattttcccctatagtaaaagataatacctctttgtttgcccgctgatagacagcgattttttctaaaacagttccatcttctggttcttcatgcaactgtaatatc

SEQ ID NO: 2732 - DNA, 763 bp, Zea mays
tatcacccatcactacctctattagaaataacaagccaacacaaaggcggggggttatcttttgtgttcaaagtttgtgccttctgtattgcatcatgttcatgttcagtattatctacaagtagatgtgtggtcttgtgtgctagaaatgaccagatatacatatgaagaaatgattttgtttctccttttttttcccgaatttggtgaactacatatcatcttataaattgtgccatgcctacacaactctaccactgccttggcccttggagttctccctattactgaatgtggttatgcgatcatgttttccaggagagtgcatcatccgcgtttggaattatggacctcctgtacaggcttgcaagtgtcccatttgtcgccgccttataaatctactggtgcctgctgcattatcagggcaggaggatggtccacaagctcaacgtattctaggagagattcagcactataactgtatatttggtggagcaccacgcagcctaactcaggtcggtacactgtccatgaaagctgatgtcctttgttttagagttttagggtaaggcctttcatatagatcaaaagaaaacaattcagattacagtgcggggttgaaagctgatgatacaaaaactcggccggggagtgaaagaccttcctcttggtattatattaaaagagatcgaaacatggttcagaccgagaaaattcctgaacctgaccatcactagcgggctgtcaccgcccacttctgcat

SEQ ID NO: 2733 - DNA, 762 bp, Zea mays
caatagaaacaagcagaacaatagggttgcaattttcagagatcgtgagtcagagcgcaaggatcctgattatgacagaagctatgacaggtcagtttcttttgtcgtaacacatctctttgatgctaaactcttagcacaccgtagacaggaaagcttttatggctatttttaccatgcttctgctctgtagtttcttatgcattgtatgaagttcttcatttgactatcgtccaaaacttttcaagtcaactgcaaaatatcagtttgattgctaatgatgggatcctagtgaagcatggcaataagaggattctttctttttataggaaacactaaatcttgtgatgtactccctccgttcctaagtctccagcgtattagtcatctgcacagtgaccaaggagcggcaaaggagcgccgatatgcttttactcgcagtcttcttagctgtgcactttcgaataaatctgcatgcatgcatgcatgctcgagaaactaaaaatacggaaggaccagcaaaggagtgtattagccatctgctgatctgcatgcatgctcgtgaaactaaaaagaccgaagtaccacctaatacgatggggattttttaataaatccaatttgcttatacgatggagacttaggaacggagggagtacttattttctatgcagttggttaagctagttcagattaaattattaaatgctgcttttttgtgttcttgttcactgtggtagacatacttgatcactagaaatt

SEQ ID NO: 2734 - DNA, 807 bp, Zea mays
tgcatgcctgcagctccatattcatcccctctcctaccgctaccgattgactgcatgcaggcgggtttgcagaggttgatgagctggtcgtttgcgcacgaacgctcgcgtttctggatcgaatctcttcccttccggcgcgcgctcgatcgatctctaacagccgccacatcagatcaattcgccgagagattttctagacatgaatataagcgacatatatatatggagacagagagattatatgcaaataagaggatattgtgctagcttcattattgaaacaagcaagtcatgcatgccaacaacaaccatatatatatgcatgtatatatatgttcaccctttaattagtactactacgtactgtactagctagctagctagacgataataagagggtatcttccgctactatttgattactgaccgaaattcaagatgcatgccagccaaccaccgtctttgatttccagagagggatttgaaaccttcgtgttcgtggggaactttctaacaaatataataaagacacacaagcactagaaaatttaagcatgacatattctagtgaccatcaatctatgttgaaatagaccacattgtccatttacgctatatgtggctcaatgtctcgcagacgacctccaaaaaaatcaaaaaaaaaaggaaggagtagcttgttgtttgtcctattaaggcctagcttgtttgtttgaggcgcgctgcatttttgaagcttttctgaaaagctgcatcttgtttggttgaggcgcgctgcatttttgaagcttttctgaaaagctg

SEQ ID NO: 2735 - DNA, 802 bp, Zea mays
cttgcatgcctgcagaaggacgctgagtcgctgaaggagcagggtgaaaagctcagagacctgtccgttgcacttgcaccgcagccagagtccgggagcgcagagatcgctggggagatggcgagagaagcagcgagcgaagccaccgcaagccgcgaaagcggggcggaggcggcaggggagtgctggagcgaagcgctcaagtcgttcctggaccacatccccgtctcctccgtcccgggcgcgctccaacccactgcctccccaggtatcacgacacgaggcacagagctgcttcttctcgcttcctgtatgtgtcggtaggtgttgggtcggacgaggacgatccattccattccatatacccgaccactaaccatctcgcgttcgtgtttgttccgcacgcagcggtggaggtcaagctccacggctccgtcctgggcgccctcgacgccatgtacagcagcaacgccgcgggcgcggtgatcatcgacgtggtgcacagcagtctaggcaagtacgtcgatcgcgatattggcttcgtcgagttctcgagcctagtcctgtgggcacttgaggtaacctgacgatctaggagtacatgttttttcaagtcactaaatttttcggtttgccggcggagatcgaaacgttgctctgaatttcgtcttatagacagttcatgtggcctgttttttttttttttttggcgaagaatgaacgatcattacttttgggttgccatccgatcttgaccaaattatttggtgcgttggcccttcataggaaacttggcaaaatg

SEQ ID NO: 2736 - DNA, 742 bp, Zea mays
ttatatgggaaaagccaacatacctcttgtgaaattcatcttcaaattctgtgccccagattgattgtccaccagtgccatcccccaaaggatctccagtctgaatcatgaatcctttaatcacacgatgaaatataagattgtcataataaccattccgacaatgggtagtgaagttttcaacagtttttggacactcttctggatatagtctcaagtgaatgtcacccatagaagtatgtagcacctgaaatacgatgatggatttgttaagaaatttgagcccctcacaagttaaatcaccagagattttgaagaaacaactcagctgtctaagttatattcaaggactaacataccaaattatcaggcaatgatgttgtagcagtttttcctaggtctgatgcagacaaaagctcttctggcggtggtttttcattgaaaacatctctacccttagttgcatcttcaggctcttctggttccctacgactgttaaaacaaaagaataaccttgttacataagaaataagatacatgatatgttctttgaagatgaattcaccatgcaaaatcatatagcagccaataaagaattatcaagatatgatttgacagcatacctaaagagatatatccgatgcttcttgaaagcacaacacagcagcgttgggtctgataatggttccttgctatcattgacattggcagctactgaaggaatttttctaaccttctttgt

SEQ ID NO: 2737 - DNA, 767 bp, Zea mays
tgctccttaaagttgtcagcttctccatcgcttgctttagggtgtcggattccaggttggtggctggtaggcccaccatgcctgactgcctgttcctgagcgcgaggatgtttcggccaggcgcacatgaattttcagcggtgctgcatttcctgtcggtcttgttattcaggctgattaattcttccagagtagttgtcctgtacggatcaggaaatacgaggggaattcttaattatttcggaaaacttgggaaaaggagatggcagtacttacgttcgcttgctgaaaagggtgctgtcatctagaaacaggtagagatcactgcactgtaatgatccaattagtcggctggttttcctgtcaatgactgcaacccccgttttttcctttgagagaatatgcagcccatcagctagagtttgatctgagtacaccaaaacaggcttcctcacatttgcaaacctgtcgacaagtcaaatgcagcattttagacttgcagaagttatgttcgcggtggtatcatgcatgttgagcacatgcaggtacgggctttgacaagcttgcatttatagctgactgcttttcaggatatttccccacaagatacttcttttataagcatatccccttgtcacggctagtttaaaaactcaaatctcctccaagattggaggggattggggcctcaatcccctcgaatccaatcctgaagatgatttgagttttcaattagccctcaaggctataccttcccaagaccccac

SEQ ID NO: 2738 - DNA, 795 bp, Zea mays
gcctcggtcatcatctcgacgagtggcaggacgagcaccagaaatatgacagtactcagttgcgacatgccaaattaacatgacttccagctgagactgagagaggccctggaggagtgcccaagaaaacctgtggtcctgctgccattgcgatgtttctccgacgtcgttggtcgggttgccgctatacattgatatgagcgatctagcaacagctatcttcactgcatcagaaacctccactggatcttgctgtctctgcccgagaatcactgagtgctgcttcatcctgtttctcatcagctgtccagaaaacgtgacccagcttctaaggaaagcgatgactgttccaaagatggatgggctgatttcgtaccagtatctcttgacatacatggtggctagtgatacctgggcccagtccgatgccagataaaatgccgcatgcaccagctccactacgagggctatacccagaagcagcagagtgatgatgtagtcagctcttgagatgcgtacttgtatgatcggatttggcgtctcaagtaccagtgaattcctgacggcaaacacccctactgttaagattagagtgatctttgctaaagccagagactggaggaacggcaccggtagcagattagtgattacgaaggtgtagtagtactttgtgaagaagaaatcgtagcagaagcccagctctgcctcaacaatcctgaacgctctttcgaaatcccgttcagagggcagcagtttcttgaatacaaagtcatggtctcttgttacagagctggc

SEQ ID NO: 2739 - DNA, 682 bp, Zea mays
gctctgatgatggaggtggccaaacagagcactatgtcaaaagcaaggagtccactcatgtgaatggccttctacagatgggtagaagagatctttctaatcagctttgcttcagttcattccaagagcaatcatgttcatctaaccattatgagaacgacactaaccatcacacaaatgggttcgacatgaagcatgatgtaaagattgccaagtacaaagcacggaaaatggcacagttaaagagggctatccatccatctcttgacttcgacaatgcaaatggagtaaataggatgaagccttcactgaacaagctgcaatctttccatattggaaagaaccacagtttccgtgtaccgaccggtgaccgaagcccgggtaaagtaagtacggattaccattctgatttgaacagccaattatcgcatagcaggcaccccgatccaggagcccaaagggcctggcattgtgaggtcaatgcagctgggagctctgattgtatgtttacagcaaggcgctactatgccggagctcagttgccaccaaatctcccgcgaacaaaatctgtacccctacatgctgtagacgtctgaaatgctcttgccctgtaaagtttatagtgtacatctgttttggttctctctgtacccattatgaaacgtagttgctgagagcagga

SEQ ID NO: 2740 - DNA, 786 bp, Zea mays
gaaagggacgctgaagccgaatcagacctgatcgggaggacggatgagaggaggaagaagaatcctctctgctctgctctgctctgctctggtctggtcttctcgtctgcgtccgtgcttcagaaatcaaatacatttgcctgtccgtccaggatccgaagggatccccggcgtgttcattccaggagcaagactgacgcaaagcggcgacaatgacgatgacccgaaacaacgaaagaagaacacaagttacatgcccgttcacggaccgaccattcatggtccgggtctccaactcgcggcaacgatcgatcgatcatcttccttccgagaccgaccgatgtcatatcatgcacacaatcgccatacttacatagatagatagatgccatatacatcaccacaaaatcaaaatcgtcagtagctttattgcgggagctggatcacgtacgggcggcaagcgaagcgacagcgccatggccccccacctcctcgatcgatgccggctcggcgtcacgcctcgccgtcgtcgaagttctgcttgtagctgacggagtcgtacccgaagtcctgcggcgcgggggccttgagcgggcggccgtcgcgccccagcaggcggcgcgccccggcgcggagcctgaagagggcgtgccgccacccgccggcgcaccggcacccgcccaggcctagcggccgcgcctcgtcgtcgtcgtcgtcgtcgtcgtcgccgccgccgagctccagcgcgcgggtcgcgatcggtgccgtgacccacccgagccccca

SEQ ID NO: 2741 - DNA, 789 bp, Zea mays
tcttggccttgcttgccctctaccctgccgctattcctctgtggtacctccctcctcttctgctgacttttggtcatgcgatggggatgcccagatttccagtgtgccttatcgcctaggtgatgccttaacaaccataattttaatagtcgactattgtggatttattcgtgaacatcctgtagagggttttctgatggatgataatgtgacgagttaattaccattaaacgcagaaattccttttagagcatttagattgatcggtaatgaacgcacatgtcaaagcatgtgaatcttgtaaccttcagaactagaatatacttgttactttcaaaaccatatataacttcatcctccttttgggcttgcttgcatatcgatttgcttttttcttttggcttcatccatgaatcttgcctatacccttagaaaataccttcatatcctccatttaaaattaaagtgaagaatatggttccttacacaattttctcttatgttgttggagtaacctgactatttatattatctctgaaacgttttatttatgtgtgctgtttttttaaactaattcactactgatttgtatattaaaaacacatgtgcagatgtgaagcagcacaaccagaatgcagaaggctttccatctcatagaagtaaaaggatgtctttggaagtctctatgcagaaatctcttggttttggcttgaagtctgataatggcaaacctgattatgttgcaaatgatacggttcaatccctgcataagcaagatagtaagatagg

SEQ ID NO: 2742 - DNA, 686 bp, Zea mays
  unsure (1)..(686): unsure at all n locations
agcttgatcctctccagcagctccttcatgtagtcgatcgtgtcgcccaggatcgacgtccggtccatctgcgcaccaccacgcatattttacttctcatcagcccagccgccatatatagatatagagggattgcttctctgttcaaatgtcctttcttggccgaggaggcacaagaaccgaggaaaaaggagagatttttttttttttgccattctcaatctcaccttgctgatcttgggcacgacggagcgtagcatggagaggcggtcgttgaggcgcttgcggcggcggcgctcggccatcaggttcttggacggcatcccctcgaccctcttcttcttggacgccagggccggcggcggcgcagcgccagcgccagcgccgaacgcgccgccgctctccgccaggccgggctccaccttgcaggccccgaggcccgcggcgccgtccaccagtgccgccgacgccgccttgggctcgacgacgtcaaggaaccccatctcgccgccgtagtcaccagcattgggcccgccgaacgcggcggcgccgtagacctcgctgaggcagtcgaagccgggcgccgccgccggctgcggctgcggctgggcgtangaggccgtgaaggtggggaggacgctgacggtgggcgcctggtggtggcggtcctggaaggtgcagtccat

SEQ ID NO: 2743 - DNA, 761 bp, Zea mays
gcactcttgcatgcctgcagacctgcaagatgcagtagaacatagatgcacgtttatctaactgttgcatgacaaacatggtagttatttactgcaattcagcagggatatgcttactagaaatttgctgtacaatcgtaatgacatatgatttactccctctgttattttgtattgtcgcgatttagttcaaaaatgaactaacgggcgacaaatattcgagaacggatgtagtattatgttttcctgaattaccaacattttagatttgtttatttcgtttctctatgtacaagctgaatttcaagttcatattttttgagatgatcgaggacatcataagttcataacttatgttagaaaaatatgctaatagtttatcatcattattttatatttagttctgaatcattaaatttattatcttatctgattcctaacctatcaaaatactttttaaaaaatcataaattctagtttaaattatactattagctactaaccaacaaaatttaaactgaaaactagtttgtacataaagaaataaatatgacaaattttgttaaaaggtaaattgaaccaacttaaagtagtgtaggggtacaatgaactaaaaaaatactttagggtattactgttatttgaacattgtcaataggtgaggggactgatttgaactttttccttaaatttatatagttacaaggcatttgatgaggtcgaaaggtattgaagttgcatggaatcaaatcaacgtagat

SEQ ID NO: 2744 - DNA, 764 bp, Zea mays
tagctgtcccatgcgaagtttctctgaacgattaccagaagaaaacatgcattttgttgcatcaagtgaatagcagatgccattttcataatgggcaacccatccattatcacccagaagaagttccagtgtactatctcttgtgccatttggcatgattttaccctgccaaaaaagacaggttgttgaatgaatcatattgaaaagggcatccccaacagaaataaatgcctggtagggtaactaaatgcatgtcacaggtgttttcaagtcatctgactaattagtcggactaatcggtaacttgaacccaactagacccaccgaagcgactagctggaccagaatcctggtcgtccgattagtcgacaattaatcacgattagtcgtccgatttggtgtggagcgaccagattagacatgtatttttagataggcttttggagctgttgttgtggacatgtgggctgccatttggtgctgcatctatgggcagcaattgtgaccttgtagggttggctagccaccagccgcaaaagccttccgtggccccgtgctgccgcagtgcccccctgccgccgcacaagttcacagtcctgcccccgccggtaggtcgcccgcaagggcacaaaatccaggtgaatgcccaccctgccacagtgcccaccccccggccgcaagatccagctccaacctttcaggcgggtggccgaagctccactgctggcaccccacaaagatccaagcgaccatggcccattctt

SEQ ID NO: 2745 - DNA, 852 bp, Zea mays
  unsure (1)..(852): unsure at all n locations
ctgccgccgctgctccatcacgacgacgccaaccacctcagctcactagctcccgcggacccgcctgagcgcagccaaaaccggggatcccaggcgcagcagctaccatggccgcgccatgcagggacctcacgggccttcgccgggggcttgccgcggcgaggctggcgccgggacgccggggcgcgaacaagctctgcctcgcgccgttccaccaccgcgcaccgccgccgcagcagcagcaggggaggaggaggcagcggcaggggctcaaggtggtggctgccatcagcgaggacctgccgaggctcgcggcgcccgggaccgggaagggcgcgccggagggcaggcggccggagaaggtgctggtgcgggccgcgctcacggtgcgccgcaagcacaaggaggacctcaaggaggcgctggccggccacctcgacgcgctatgggacatggttggccggagcgtcgcgctcgagctcattagcaccaagatccactccagtaagcacgccggcccttgctccctgtcctcgtccaatccactagtctctctctctctctctgagttgacctgcctgctcttgacaagtctcctctgcctctattttttgcttcctttggatagtcgttagagctttaacgtgcaaagcttttgccttttggggcatctccgcctgttcttgactgaccgccccgatcggtaggtggcaccggcaatcaggaagatgctaactagatgcacatgatcaacagatctttctgcggatcttcaataatggagacatgataacaaaggctngtcccggcgttcgcgtgtgcgattctctgcattagtatattcgctctgcg

SEQ ID NO: 2746 - DNA, 1006 bp, Zea mays
aataggatgcaattggaagatcgatcaaataatagctaacggaaacaggtggaagattagaactagctggaagccaggtttgcattatctagaagatatcataaaactattaccctaaagctatgaagtggcagtaccgcaagtgttagatgaagcacatcaagcaggcatagtggcatacagagactcatgatccaagagcacatgcagccatatgccagtttcccaatgagaaagaacttcagcaaacaccctcaattcccttgtgcaattaacaattatcacctaaaaacatgttttgagcatgttgtatcatatgaatattggtgccaagagccacatgagtaaattccccattatggcatattcggttaggggtggattgaaggggattaaattaggaagggatttaatcccctccaatctagatgcatcactatacaactacaataaccccacaaatccccccccccccccccccgggtccaaacgtaagcatatttttcccttgaaaaccccataacagatactggcacggccaagccctatccttgcaacaactcgaaattagcgagggctaccggacacgtaagcacaagcacaaaacgggcatccccgttcggagcccgatcatgaacaaacaattcgacaaatccgagcgttcagtatcttgcacggataccaacgaaacatcaagcccatgaacagggacaccgaccttaaacccggacccaaaccccattttggatccaacaagcgcggaacaagcttcacgagggtacttgaagaataggggcttaagcgtgagaaattggtacccgggttcaaaaagacaacaatttctcccggaaaggggttactgtctctcctaaacgggtggggggggccctccgcaaggtggccctcctctggggaagaagggggggctttcccggaaaaataatggcaaaaagacggggggggttaaatccacagagtggatttatgggggggggaaagtgtaccc

SEQ ID NO: 2747 - DNA, 767 bp, Zea mays
ttgtgcgcagcagaagttggtggttttgggttttgtgttttgcctattttggcattgtactttggtccattttggactgttttcttctcttaatttaatgatgcgcagctctcctgcgcgtttaagaaaaaaaatgccctcttaacataacataagtttattgcagaaaaattctatattcttgtcatggttttaatattacaatgtactatgcattccttacctttagaccattaaatcttacaattgtatattgaatgtagcatgcattgatgaaaaacaaaatagctaaagaagagtatattacaattatacaaaagtggagtatagtaatcagagaagcttaaaattaatattatgtttagacttatttgtagatttagtgaaatgctacatgttccaagataaaaagtaacacaaacttaaaagtgcaccatgccataaaataggaacttacatgttgagggcacctgaagctttcaacggtaaagtttgaagtatcttccgcaacacatttgagatggaacatttgtggacactttttaactgaacattttatttcttctccaacataaataatcttggagcacaaacgacattcgaccttttcacaaatcaagacggtattagatgctaagtagatgaaagggggacaaacttgatcctaacttcctaagtcaacaaacaagactaattactagcactggtaacaattataagtcctttttaggattccctagtaaaattagattgattaaccaaagtag

SEQ ID NO: 2748 - DNA, 802 bp, Zea mays
cttgcatgcctgcagttcaaatttatattttagttccacaattattttgtattttcgtcttaaataataaaggtaagccgagatgtaaaaggcttaaccttaagtcgtgtcaggtaagtctataggtaagtctatggcagctcgaggacgagctggtcctcaagggagggggagatgtcatgggcatcatagggagcgagaggcaacaaccaggctgggataaggctagagaataagattgagatgagctgggataaggctagagaataagattgagatgagagaattgtggagagttagttagcatcagataagtccaagaaagtaggagttagttgagagtttgtaggagaagttggttagccatagggctatttataagccgcatggcagcagggaataaatcaagcaagatcattatcaaaccaatctctctctcttgcaatgaccctctcaagcgcctagggctgctaccctagaaccaagcctacggcagaggggtataacctcgccggagaagacaactatccccatggaccgaaggtccatgacaattcctgaattgcaaatatattttctgcaaatacggcaattagtgagaattgaattggagctaacggagcactttaaatatgtcactgcaacctcagtagaagaaacaaaaccattaatacctcatatgaccttaagttcaatccaagtttcagctgatccttgagctctgtaagattacccaaaatctgataaaatggagttgttcaacacaaagtcgaatagggggtctgtgtttgcccatgatgca

SEQ ID NO: 2749 - DNA, 774 bp, Zea mays
gagtctccctcccaatgtcattcatataccgcaccaacatgttttcacgcgctactaaacaaacaaacagccatcgccaccaggcaggcacaggcaggcatgtgaccgatcctcccagctacatgacatgacatgacatgccatgccatgccaacaacacattcaccagatcccatccgaggcacaatcacatttctcaggtcaaaggcctcagcaacaccaagtaccacatccacaaccagaccgataataataatatatgatcattccagccccacaccaaacaatcaccaccaggctatgaaacgacaagactatatatcagaattagggttcatatgctatcactattcactaatatgctgctgccgccacgccacgccaccagtcccccaccccccaaaaatacgacatactaccctcatcagagccagacatctcctgcttccaaggatgccgctgctgctaaaagggggcgacgatatcgtgccgctctactgttgcctatccaacccatgcacatctacgttgcacagaccagcccagcccaaaaaaaaaactactactctctacgctatgctactcctcgtcatcagataggcacaccacctctctgctggcgccggagccgcatccctgggcagcggatgtgccggggggtcctccagccaggtcagaacatccctgtcccaaggggtacgtgccttggtgtccacgaatcaggccaaccctgagcgtcgcctcccactcgagcaacgaagccgatacctggta

SEQ ID NO: 2750 - DNA, 738 bp, Zea mays
  unsure (1)..(738): unsure at all n locations
tgtctgcttgcaggtcggcgctgagctggtccctcctctccgccgggcggcgggaggccgaggacgcggtggagagcgccggggggtgggtgctgctgtccatggacgacgacggagaccgccggccgctgtcgtcgtccttgcactccgccatgctgctgctgcctggtgcatacactggtagctagctggatacttatcagaaaatggagaggggtggagtgaatctatagcagccaccaactcgtcaaatcggaaggaacggaacggaaggggggaagggaaagggagcaggagagcagctgtgtttatatagctggtgtggcgatgagatagggcttagtggctgacaaaagccaaataaaagaaaggggttgagctaaacatatgcgcgtatcggccggcgtatagtatagtaggggggagagttgtgtgccgaagaatatgaataatgtgccttcttcntatttttgtatgtatataatatatgcgttggagtataaaaactatatgcatcgttttcgttcgtgatagttggacacgacttggttagctgtgatcagattaaggtgagagagtgacaaaattgcatgtagaggattccttttttttccttctcgttttacacgagcccattccatttttttttttttgatatgaacgagcgatgtgctctctacgcttctcgctcagcgagcatatatgtgggacacaatgttggggattatattagctggc

SEQ ID NO: 2751 - DNA, 715 bp, Zea mays
aaggacatcgtcatgcttgtgaacgtacgtgtggcaggctcacgagaaaacaaaatctgtaatggcgaagaatgtgccctaggccaatcatcaaattaatcccgcaccgccaaagccgccctgatccgtgctcggcgcggtgacgttgggtaacccacgccactagctgttgggtcactcaatcgccgtcgccgtcggcgtctgatgaaacaggccgactagacggacggcagtgggggggaagaaaaaataggttggcgcgtcaccgtccacgtccacgtcaacgtcaacgtccacctctactgtctgtctcggcaaattggattccgcggaaaacgaccgccctccccgctcgggtgctcaatcgatggcgtgaaaggcgacttgtctgaccggtcgggggaagcgttagttcccgatccatcgcgatgacgcgctcgtgccgtggagatgaacccatcaagagacacgacgcgcgcccgggacaaagtggcgtcgcagctctgacagcgttcgcgaccgcgctgcggcaccggctgccggaggatccccgatacgtggcggcgcgtgttcctgcgcgtcaaatcctagcgtcctctcccgtatatgggtagcatgctttggctcaactccgctccgctcgtaacatacatagaaaggcttgacataaacactacgcgtgtgtgcgaatagttctgagcggtttctactgttt

SEQ ID NO: 2752 - DNA, 830 bp, Zea mays
atgatgcatcaccatgaacagcagcaagccttccactctggtgcgccgcatggcatgatgggaccaggcggcgtgaacttccctcagtcctccggtccagtgtcgtccttccagggtcagaggaatctgccgctgtccagtggtggaccgcagggcatggttggaggtcagatgcacaaccaggttgcgatgcagcaacagttcctgaagcttgcgatgcagcagcagcagcagcagcagaaggcggcccaggggatgctcctccagcagcaggccaagatgaatatggcgggttcatcatcaagagaccaggacatgcttaacaaccctgccaagatgcaggagcttatggctcttcatcaggcccagatgtataagcggcagtgtgagcagaaagagcaggggcagtcaagtggtagtgagcaaagaagcggtgatatgaggccacctatgcctcctcaaggagtccctggacagcagttgccatcaatgggtatgatcaggcccatgcagccaatacaaggccaggtaggaatgggcagcgctggtgggaacccgataacaccaacacagtttcaagccatccaagcctgggcaaaagagcacaactttgatctgtccaatcctgcaaacataagtgcaatttctcaactcctgcccatctggcagtccaacaggatggcagccatgcagaagcagaacgaggcaaacatggctgcgcagcagcagcaagcattggcccctctcaggtgaacagtgatacccccaaggcatgtcaatgcttccagccagggtgccctactgaagccccggcaaccccttgccccagc

SEQ ID NO: 2753 - DNA, 741 bp, Zea mays
acgaggagcgcgccagagcccagaaggttcggccaataaacgtggcggaacggggacggcgctgtggacctgtcggctgtctgtgtagtctgtggtgtgcaccatgtgctcgagcgacacgtgaggccctctccccctcgcgtggcggctccccggccgccactcaactcaactcacctacaggcaacaggcaacaggcaacagccaataccccttgctggcccctctcccgtcttgccgtcgccgggtcaaaattggatgctttatctggaccagaaatctttagcgctagcatactagtagtactactagtccctcgacttcacacggttgacttccaggtgttgagtcgttttttttttacaaaagtccgtatcctactagtgcggaagaacaggtccggcgtttcgactttgcgtcgcacgagccctgacgagagatttgacattacgaaacacgacggatgcgtttcgacgaaatagaggcttagacgagggtttctccgttataaaaagctatgtatagccaacactctaaaataaacatgccaactacattaacaggttcagagcagtattagtctcgttgaaaccgggttccgtccccagcgctgtcgccgtcagttctccatcgctagccatccccgtcgcgttctcctccatctccgtcgcgttctcctccatacccgtcgcgttttccttcgcgcgggcaaccgggcgccggttggcttccgaccaaaaa

SEQ ID NO: 2754 - DNA, 782 bp, Zea mays
gcttaccctcaccttgctccattgaagttaacctaaagggcacagttacagattttaatacatacaggagagatataaaaccttacggttgaggtaaaacacatccatcgcataaacgcacaaatccaagatcatcactccatcagattgttccaaccccaaacacttctgtagtaaataggcctgtgaggcatacacgattcgtcatcatctttagcaactatagtcgttgcttgtcatgcacatggtacaagaaataggtttgttcactcaaactaacactgattgatttacaacacaacactgactacaaagaacttaaaaacaccagctccgtgaacagcagctgcacagagatgcctctgcttctaaacctgaccaagaatggtgccacgattgcactaggcaaagcaagaaccagcatcgtcatcatgccacctcagctcaacccggcaagcatcccatgggcaacggggcttaaggctgcatgagattcatctccattactaagtgccaagaggaccaagttttaagcaaaaagaaaagtgagagttgcactaacccacatccctgtcgcctgttcacatactggaccatcccaatctttccccttgccaatcacccgctcactgcacaatcccatttttttaccaacactatcagtccttcaacaacagagcccattcaacgagggcaagatgtgctcctccagcatctcaatctgtgagaggaagcaaaagcaccgagaatgaagctgaaagaggggcatgcagggccaccaa

SEQ ID NO: 2755 - DNA, 805 bp, Zea mays; identical to SEQ ID NO: 757

SEQ ID NO: 2756 - DNA, 799 bp, Zea mays
cagcttgcatgcctgcaggggcttgggcatgcccaggagactgttctccaagaatgccgctcccatatttcccagcagctgttcttcctttagacctcttgcctctggatgctttgcccatatttgttatttggacgtcaggtagcttgcccttgccttcatctgatgatatgccagtttcttgtacaactgtccctagaggagcaagattaagtagttccgggtcatcttcaaagccaaatggacgctttgctgggtccatttttctgaatgtaatggatatcctgtgttttagaaagtagtgcgttagattttctttaatacgtagttcaatgaattttgaaaaacaatacgaaagatgagccgtgagcgtcaccttttggtagggactgctgggacacaatgttttgctacatcagcaccattgccattcaggactagcacagatctgtggattttcatatgtagtaagagagccgtacaattaatctgatggcctaacgatttagcaattactagttttgtgaacagtaccactggaaaacaaggacacaattgtacaaatcataaaactaaagatatatgcgactatagtcattaaaatggaaacaagatacaccaaattcaaatgttaaaaataaataagacatgctgcaagcccgcgataaatcatagtacatagacattagcagcaaaaacatattttgtataaaaagtaaatacaaggcaaaggagacaatttaagcaaatcgctgtatgatgcaacatacaattatctacagacttcatatgacccact

SEQ ID NO: 2757 - DNA, 717 bp, Zea mays
acaaacattggagtgatggtgccttggaggtgtgaattagttcatattattttacttcaatctgttggaacaattggaagatctgagcaacagttcctattttactgtagaaaattggtagcactattcataccatatagaagtaggacatcttttttatcaattatcaatgccagcttgccctttatgtatcactgttgaagtcatgctaagctaatgcattactgatttgctaccaggcagacctgcgacgagctgacttggttgttaaacgacgtgccatggaagacgctttcatggcattgaaggtagctttacctacttctgtatctacctttcaacatcaagtgttaaaataaccatccttactccttagatctctactgttttcaatttttattctggatattgtagctcattttttattatacttcggtttgaatttgtataaaaggggggggtgactaataaagaaagtgctcatatttctaagaatttatctagtttgaacaccaaatcaatagttgctatgcctttgccccacctgttcatagatactttcctcttccaaaccttccctatggtgtgtgtggcgggcaaaatgttggtgtcacaatgtgtggaagggaaccaaacatgccttacataatcacaccagaagttattcaacgcaacatgccaacatcgaaggtgtgtgagtgtgtctgatttacctac

SEQ ID NO: 2758 - DNA, 730 bp, Zea mays
actaagatagaaagcaggagtcaattctgaataacactaggagctaagtctgacaatgtatatattttgaaggtaaaagatttattaaatatgagtagcttcgtagctgggagagtgatcattctcataatgaaacatggaactagtattgtatcatgataagcaataagattagaataattgaagaaagatcatacaaatgctccaggagcccattctcgatatgtgataccttccgcgctacattggaaaataagatacaaagttatttgctagtatataggataaaagataaacacttcatgttaaagaatacctgcgattaaatccaaacttctcataactacgggagaaggcttccaagcctccttcatgttcatcaatgtctgaacggattcttctatagaggctgtacctgttcttttattcaaggaagttgaaagcacagtgagatggatagtggtgttcgcatgggttatatataggaatccttataagaagaatacagaagggatggaaatgaaggttgccaaagaattagaacccgctgttgcctctatattgtctggctaacatttctgtaaatatcctctgaaagagaacatatcttgtccgttcaattgtaatgcttggtgaaaccataaggaatactttaggcatcaaagcagtatgaaagatttcaagtgaaaacgaacctgactaagccattcatatgacctttccagcatca

SEQ ID NO: 2759 - DNA, 758 bp, Zea mays
  unsure (1)..(758): unsure at all n locations
ctgcgctggggttttgcttttgatttggagggttcggcagttctgattttgacgcgtaggcactttgtcgctcagacctcaaagtcccatgcgtcttctgatttggggattttttttctaggtttgacaggtcctcggatacgtttactggtcattccagtgagctcatatgatgtttttttttcatttcatttgaccctagaggcttggtctttctttagtgcctctgcctcgaatggtattacgaatcagcgcctttattgttttttaatgccatccaaagctccgcaattttttacttagatatgcggtgattcctctttctaagattcttgcgctgctctatgtgatttggggcgctgattgtgcgggattctgttggtttctgctgtgctcaggtggaggcatcgacgaaccagcttgccgagcagcagggcacgcccctctacaacctgccatggaagattccctgcaagctcatgaacatcgaactgaaggtaacaacatagcttctttgctgttcactgtagaatgttgtgaatgcatattctttttcctcgtttcctttgctaggttgagccggatactgatgaggtgtacgcccagctcaccctgctccctgataaggtgggtaacttctggttttgctttatgcgtgctcagacttggaatgctcagactagtgtttgattctcagaagcaagatgagaatacatctacaacantggaggaaagagaggtggtggtgcctcctgcgc

SEQ ID NO: 2760 - DNA, 773 bp, Zea mays
tgccggccatggcgcgcgccccgagctcgtggacgccgtccctcgccatggtgctcctcgtcgtggccgccgccgccgtggccgtgtcgtcggaggcggccagggtgcccgccgccgtcggcaactggacgggggaggagctgcgcggggccgcggcgaggcggggcggccggcgctcccggcgccgcgcgttcgagaacggcctcggccggacgccgcagatggggtacgtacacactcgccgccagcccgccatcgcttgcagcgcagcgctgctgctaaaccttcctccgccggccgcgcgcggcgccattaccgccgtagctgcaaccctcctcttcgttcccggttgcgttttttctgtttgtttgtttgattgttgccgcgccatcgtcgtggcgtgggccgtggtgcccagctgcccagttgatctctgcacgcggccacaaatggcaccaccaacaaacgagtttgtaatcaaacaaacgaataaataaatagatccagggaagaagaagaaaaagggaacgtagacgctggacggtgctcgggcggaggcaccgaggggaaccgagacgagatgaactcttttgggcgcgtggggagggagggagggaacggacatgtccttggcttgcgtcggaagcgagacggggtcagggccgcccgtcagggtcagtccccgttcgttcgccgcgctcagcgtcggcagacttttgctgcttcgtgtttgttggctttcctgacccaccgtttaaagcgactacttttgt

SEQ ID NO: 2761 - DNA, 818 bp, Zea mays
tcttgcatgcctgcagtctttgttcattatcgacagccatttcctcgtagtcctctccacttctaatgcatcctcagaggctgctctgatctgtccatagaacattgcaccacattaatcaaatataggcatcaatcgagttgctttgcttttgcataagtaaatagaaactggatgttttctgaaagaaattatattaaaagaaaaaacatatagatgttgttcaaatcccgtgttatgtactttggttttcttgtgaaataaatatttaatttagagcatttggaatcccaacttagacccacatctactggtcaggtgatctttaatttccaacagtattacaggtaattcatagcagttgtcctaactggtggtctggtggatatagaagttctaatctcctagaacaaacactttcaacaattaatctaaggacaaaatctgcatctgcactaacaggtatgtttatggtacaaaaaagtgacaagtatgtaaacaagatctgcaaaaagttttctgccaacaattgacttgcatgagaaacagtacagattaaacaaatattttagtcatggaaaacaacactgggcccaaagtcaaagtgtattttttatacagatatattagcatgtactggtcttagcatctagtaatcaattaaacactaacaagagaagcattgcctggtattgttaaacaatgccaactaaaaaggcaacatagaaatgaagacaaccaaactagttcatgtctttaaggttaaaggagtaccatactatcatataaataacaatcttaagaataattaaccttgt

SEQ ID NO: 2762 - DNA, 805 bp, Zea mays
aacaacaagagcagtttttgtggtttgggcgtgaccaccactagcaaggatcaatgggtagaacacgccttcgactttgtaaggtgcaaatgtcgggacatggtaccagctccacttgaactgtttgtgcaccatcttcttgtcccacactacagtactttcagtttagtatatctatcacagtaagtacactagggaaggataagactgcatgtgcaaggaacttacataaaggggcattaacatggtctattgatgcaacaacacggatctgtgggcagcaagaaatttgtgctagacattgttgtgattcagtatcacgcaaagcaggcccgtcaatattatgaataagaagacacacgtgatcatccacatcgtcagatgtctgtttcattaggaatgagatgataccctctgttgattgtgacggaaactgctgtgacaactgggaccttgttcctgcacgtttcctgcgtttagcttttgtttgatcccagaacatttcagctattgttgctatgacctgaaagggcaatagattatgccaaaacttaatgatccttttcaaaagttagatgtagaaagctatgcaatcttaacaacaataacttcaaatggaactctagaagcaccttctgactcaaaaattatcaccaatccaaatcaaatgcatatacttgggtgagacatggaaatctaacaaaaagattaacccagtaagacttcctcgccaatacacataaagaagcccagattttaaatagcaatacaatgcaggaaaaataatagaaaaaagtggccattt

SEQ ID NO: 2763 - DNA, 839 bp, Zea mays
tgcatgcctgcagccaacagagcaaaagaatgtcttgagtgtgatatcacctcttcatgcaccacaccacgaagggacaaataatcatatatatatatatatatatatatatatatatatatacgagcaatttcagatttaaattccagttgtcagctgcccacacatacataaaaacaacgtatgcacacacaatccagagtgtctgagagtcatcacgttaaaatattccaatttagctgtaaaatcacacaggaactgaagatagtatactcctaaaagaaagaagtgttacccaagtcactaggttttcctgcccagagggctgtgacatatcaacgggcctcctcccagttagtagttcaagtagaacaactccatagctatatacatcactttttacaagcaagtgtcctgtcatggcgtactccggcgcaacatacctgcaaacaggccagaagtacaaggtgaaggtaaattcagaaaagaaattgatgggccatggacccatggctaaatgtaaaaggacattcagattacccgaaagttcccataacacgagtagaaagatagtttgtccgaccttccggcgcctgttttgccagaccaaaatcggagactttagcatggaaatcattctcaagcaatatattagatgctttgaaatccctgtggattacgcaaggctgcgaatcctcatggaggtatgctaatcccctggcagcatcaagtgctatcctcatcctggcgtcccagtccaaggggcggctagcaccttgtgtacctgataaaatgcagtgtaaggtcagaattataaaaaactcgccggagagggaaag

SEQ ID NO: 2764 - DNA, 783 bp, Zea mays
aatttgcacttgtagatgctgatggtagtccatcatttctggagaaggccctgaagttcattgaagatcatggtaagttcttttgcttattgcggtcattacagagtcttggtaaattttacactgtggtgagtaaaagcataaatggctataaatcattcaacacagtcttaatacacacaaaaaaaacctttatctgtaggggtaaaggtagagggcatcctgcgtcagtctgctgatgttgaagaagtcaaacgcagaattcaggattatgaaaagggtgatttctttggactgaaccttttgttttcttatctaggatatctacgtttggtgtttggcagtctttacttcaatttaaaaataatttgtcttcttcactatgttttcatacagatattttatgagggccataataatgtgtgggaattgtatttttatttgctttgactgctttaccatcttctgtgtactatttaagacacatttagtttgttttttaagggaaaaacgagttctctccagaagaggatgctcatgttattggtgactgtattaaggtatatatctggcaagtgttggttacaatctcacttaataggaatgctcttcactgatatttgtctggttttcctttaatacagtatgttcttagagagatgccatcatctccagttcctgcatcatgttgcactgccctggttaaagcataccgtaagattaatttgaaactttgtttatgcattcaggagttaccttggattaatcaatcaaactgatatt

SEQ ID NO: 2765 - DNA, 844 bp, Zea mays
acccgcgatcctcttagtcgacctgcagcacatccatctgctcctactcaagttggtaatcagcaatttgcgactcaagcaatggcgtatcaggtccagccacatgtacaagctcaacctccgcagcagcaacatattgttgcacatcaacaacatccacatatgcaagctttacccctacagcaaaatattcaacctaagatgcagctaaactctcaagttcagctacagcctccacatgtccagcagcaagcttacccacaatctcaggtctatcctcaacagacacatcatatgcactcccagaatactacatatgcacagcaacaaacccaaggtgctttgatgcaacctgtacatgtgtcccaccaacaaacacatgtttctcatcatcctgcaccgatgcgtcctccattgtcaggccatcagccagctttgcagcatcctcaggcccagggaattcaacatacagcacaacatgaaaaacatattgggtttcatgctcagtggccaacaatgtattccaacattccttcccaagcaccaccacagggattgtctgtgcactcatctgtttcctcacaatcagttcaatcataccagcaaggaatgtcttcatcacaacagatgcattcccaacctggtcagccatatacacaacagcatgttactggcaatactggacaacatgttcaaacttctgctggcagacctatggcccatcttgcaccaacacagcaatttcagcagcaacatccagcaatgcttaaaactgagtcacttgctgctgggcaccctattgggcagggttctttagatcttgaaaaacatacttcaaaatcag

SEQ ID NO: 2766 - DNA, 883 bp, Zea mays
ttgcacacactacgtacgttgacagcggaccccgcgtccacgatcagccctgatgatgcaaaaaaagtcagcccttgaatcattcgtgaaaacgcagttaataatagtcccgatcgacatgcatcgtcgtcattcgttcgtcagccaccctagctgtgccgtggctccggcctccggcgttcatctgttgatctgcctgcctgctatgctaccagtcgtgcgcagcgtgcccgacaagttctctgaccttttgcacagttcgaacacggaaaagagagccgccagctgcctggataaggagattggaatgcaggcccgcattcattgcgatgagctacagctagcttgcaaagcggttagcagctcccctccggcgccctcgtcacttttgacctggaccatcaattgaagccggttcgttcatcctctcgtggcattgttttgcagcacaccaccacgatatgatgtccagttttcttcatcttcttcatgatgacaagagcgcggcttacgatggccagccgaaacggagaaagatggctgtggctgcatgctgaactgagtctgcgatcgttcgcactccgttgatccgttccggtgctttttttccccatccgtgtagcggaggctgactttgtttcgaccattcaaaccacgcctgctggacatcgcacggacgtgtcctggacatggctgagctgacctgtccatatcggggccacgaaacggagcccggccggtggattctaaacccgcgcgcggcgcgccactaattgcctgacgcgcgagagacacatgtgctccgagatatactacgtactagctcctagttttcagtggattgataagccagaagcgccatgaatgaattgtatcaactgcg

SEQ ID NO: 2767 - DNA, 748 bp, Zea mays
agtccaacgcttgtgccacataaagcgcagccctcatcctcattgcccaactcaatggatttgtctcccctaccacatataaccacaatgaggatagaatggagctatcatattttttaaaacacagagcagctaccatatattagtgtgtgcgtcgggcgccccgcaccacagaccaccatagccagtcatggctgcatggcggccaggcagccaagagcagccagctgaagctagccacggtaggctgccggccggccacggaggccacgagggtgaccgaggtccggtggagcagccctggtgaaaacgctcaaaaaactagtggttccaacagctgtttacccaggtctcagccacacgagccccacctccctacctggcgccacttaatgataaaaaatcctaaatgctaaaagctcctgacaaccatatcagtgatcacagcaattagaatcatccctaataagtaacatttgttggaaccaacatttagtggttagatgcaaatcaagctataaattaatgtcctctagcatggcctaaaacttaatggcatgaatgactactgcacctataaccagaacaaagtgacaacccagtgttggtgactgagtaactatagaaaaccagtgtgttgatttcaaactagcctaaagtacagaaaattgcacccattataaaacaagtaggtagaggatttggccaaaaaaccccttttaccttgggcctccgaaggcaacacttc

SEQ ID NO: 2768 - DNA, 813 bp, Zea mays
cttgcatgcctgcagacagcaggggtgcccaaaagcagggaaggaagagcggaaaagtccaccagtccaccaccaccttcctcggatccacaacccggacgcccgagtggcgagtgcagagtgctccacccgggtcctttcttcctccttccccagtcccagtcccagtatcagtaccagtccaagccccactccccaccccgaacctcgcaagtattttagtcttactccattcgagccctaccactaccagtggcaggcgagcgagaggcggtggaggaggagcggacggaaccgtcgcctgctgcgtctgcctgcgagatctaggcgagcgcggccatgggtgctcgctgctccaagctctccgtctgctggtggcctccccacttcaaatcgccaatgctcggtacgccgcctaccgcacattgccaccgctccctctcctaggattctccgagttttctctctctcctcaccacactcgcccggcgccccgcgcctgattcttctgttgttgggggcggcggcggcggtggcccggcattttggggctggctcttctgttttgattttttttgccgctgcgttttttccggggtttctgttgttcgttttcgcttgcgtgattttgtgcgcccgttttggtgggatgcggccccatcgatctcgctggaactgaggctccgatcccatccggttgatttgttggcacgcgcaagagcgatccgaatcgttgtccgctctggccggcggcccgccacttgctgcgctgatacctacttacgtttgtcccccgctcggttccgtgaaatc

SEQ ID NO: 2769 - DNA, 747 bp, Zea mays
tgcatgcctgcagtccttcctcgcagtggccagtatcatacaatatccatccttcataaacaagcctttcatgatcacttgcagcatgctcacgagcaagctgcaaactcctcattgccgcctcaggacagtttaatctggtaaggcaaaataaaatcatatcaatcctaacatcccaaatagcaatatcatatgacatgcagcaagttagcacttagcacagaagacatgtgcaaacatgctgacaagacaaacatgtaaaaacattccagctttcagacacatgatactagtaggtggaagacatgccaagacgccaagttgccaaaccatgtgcaacagcatgaccatctactatgaccagtattgtgttactctataatactggactaggctaactattcttctaagcaataacgtaaatcaatttatttacctgagaagaagcaaagattgtctaaagtacaaaactcctttggcagtctctgactccagcatttgatatataacagagagggaccctatatcatccacagacgaccagcgatcataaagttgcatccaacagtcagcaggtgtccactgctctacattctctagaactagcattcacagctgcttggcagcaacccggccaccaatcatacgataatctagggcaagagtgatgattgcctgcacgtcacataaagcagccctataatcctcaagggcaggtagccacagaaccttagttctaatcactcc

SEQ ID NO: 2770 - DNA, 853 bp, Zea mays
tcggctcccggttttcctctagagccgacctgcagcggatgcgaagggatcggccgcagcagcagctgccgtcggttggtcggggaaccggaactcgctgccaaacccgcgggactgctggagtgtctgggcgaaggcctggtacttgcggatgtcggcgtcactcacgctgcgacgggcgtacttcatggactcctcgaagtgagcagccttgatctcagcgatgtcgtctacctcgtcttcctccatagcctcggggttgtctttgctgcgcctctccctctcgatatcctgaaatcaaatgtcccggttagcaaacaggtatactactctacgaaaccaaatgctgcaaaaaaccgattatgggccaagagattactacaccttctcgatgttctccctgatggcatacttgcacgcgcgctggcagatctctgtgatatctgcaccgctgaaaccctgggtgtatttggcgagagcattcaagtcaacatccttggccacaggagacttcctgagacaggctttgaagatctgaagcctggactgctcatcgggcagaggaatatagataagctgatcaagacgcccaggcctcagcaaggctgggtcaatgatgtccggtctgttagttgcaccgataataaaaaccgtcttcttggcattcatgccatccatctcagtaagcagctgggtcaacaccctatcagcagcaccaccggcgtcaccaacactgcttcctctctgaaaatcgcaatagctgtcagttacaactcatttgcaggttgtgtcagtgcgtgagcacaatgcataatcgagagaccatacctgagtagccatggagtcgagctca

SEQ ID NO: 2771 - DNA, 858 bp, Zea mays
  unsure (1)..(858): unsure at all n locations
tcttctacaccgccgccttcttcaccggcgtcttccagaccgcgctaggcgtcttcaggttcgcagaccatacgtctgcctttatatttggttaagtagccgatatatagcttcatctgtagctaaaaccacgaaatttttcatgctagcttgtcttttattgtctggtgaaggttagggctgatagtggatttcctgtcgcggtcgacgatcaccgggttcatgggcggcacggcgacgatcatcatcttgcagcagctcaaggggatgctggggatgaagcacttcacgccaaagacagacctcgtctccgtcatgcgctccatcttctattacaggcacgaggtgagtgtcatgtcgtgtcacggtctgagacaatcacacagcacatttctcttctcctccgcaccttccttcctagtttatgagtagaagttggcttttcttttgcttctcagttcgtcgctgttcattttcttgcccagttttccccttgaatagtgcgaatatatattggagaaaaattaacatctataaattaatctaaatatatgcactacagtacacattctatagagtgtttaatgaaaaactatagatatgccaatgcacaaacctactcaaaactttaatagtttaacaaagaagtgatcgaggagagaattgaatatttaccattacaatgaaattgaaaggtgttctcaacgagaagccaacgttctgattctgagcagcaaaaatatccgttattcccgtgattcagaaacttgcatgcaanccgcatgctgagaagcctaactgtcgatcgacggagaagaagaattagagtgtcaattatcaagattcaagagaggaaaa

SEQ ID NO: 2772 - DNA, 855 bp, Zea mays
ctccggaacgaagctcaaggacatacccaatggtaagctcgacctcctgaactatgccccactattttcgtatcactagcatgttctccctcttcgctggcatttcattgtgtgataatccctctacgctagtggcagaccattgtgtggtaatcgactgatagttctgtaaaaaaaccgtcttgtggattgtgtagggttattctcccgataaccctgcttttgatgtgtatcatatgatctttcacaccgtagagttttgtagagtgaagctggttctgcctggtaatccgatgtagagttgtgtagtttgacgatggactccctaaatgtgacatccttgtcctacatgttcaccttataaacagaccttctaatcagtggcatccaatttgagcacggcttttaagactttatacctttcttataggtgtctggctcttgtttggagtttggacttatcatttgtgtgtatttaggaatttaaactggtgcatgtggtgttgatacaatgcaaaagaatgaatcaataacttgagatacatttcacaagcttagtcccataggttgtaacggataatgtgctgctgtccagcctgataggttcctaagggcactaattgtgctgagttgacgtatgagagaaaatgacatccatgtcaggttccaaattagtcaattcttgcactgaacttatctatgcgggactggtacccatgtgcaaaaacaaaaaatgtctctgcatgcccacagccgtttcttcccatcgccaaataaaaaacagtccatacttgcttttgcccatctgtttttctcacaagcagaaaccagtggttctccttcccttattttaat

SEQ ID NO: 2773 - DNA, 717 bp, Zea mays
cttgcatgcctgcagagtattgtattgttgcaccagatacagaaatattctgtgagggtgagcctattaagagggaggatgaggaaagactcgatgaagttggctatgatgatgttggtggagttagaaagcagatggcccaaatcagagaactggttgaacttccccttcgtcacccccagcttttcaagtctattggtgtgaagccaccaaagggcatattgctgtatgggcctcctggctctggcaagacccttattgctagagctgtagctaatgagacaggtgctttcttctttttgatcaatggaccagaaatcatgtcaaagctagcaggagaaagtgaaagcaacctcagaaaggcatttgaagaagctgagaaaaatgcaccttcaatcatttttattgatgagatagattccatagcacccaagagagaaaagacccatggagaagttgaaaggcgtattgtttcacagctcttgactcttatggatggcctcaagtctcgtgcacatgttattgttatgggtgccacaaaccgtccaaacagtatcgatcctgctcttagaaggtttggtcggtttgatcgtgagattgatatcggtgttccagatgaagttgggcgccttgaggttcttcggattcacacgaaaaacatgaagcttgctgaagatgtgagtgaccttcactgatacctgtgttgatttggagatt

SEQ ID NO: 2774 - DNA, 828 bp, Zea mays
aaatgacagtgtgcttaatctttagtgttaggccgtgcgcttatatgtactgtagagtctactgtttatagagtgaattttgaaatggggagtgggataggaaggctgctggaaacagccttaatgcatataagaatacattttggattagatgtttttgctgtggcaaagatttgtttgttctatcaattttgcatttgttttgcagctcttgttatcctatctgtctagcctctactctattgtctctactgagcattatatcatgatattaatgcataactttatacaatcattgaattttgtatatattcgtgtattatactacacatcttgtgagtttataacctcatccagtctattgtttgttatcatcattattgtttgtcatcagcattgttgtttgctatcagcattatatctcacctagtgtgtcagtgctcttggtattacgtctagatagtgtttgcttgggcacatgttgtcttgaactctgctgatgtaattttgttcctacagttggctttttgccatcagcagtgattattatcaattgtgcatctcaactatagtctgcaatgaattttctgttacttgtaaagttgtcatataatgtgtcatggcctactatcatttagacatgtacacacattttatttactcatgaattcagatattaggtgtttattttcgtgccagttgtctttcctccttatatttaactatgaaaaatggaagaaactgctgttaccggatgtattatatgttctggggaatactcatttctactattttttggttggatgatcatctactgtttctcagact

SEQ ID NO: 2775 - DNA, 764 bp, Zea mays
tgctacggtggcggtgagcagcggcggacggcgtcgcgtcagcgtgcacgacgacgacgaggaggaggcgccgttgacggtggaccccgccgagttcctcgacctcgatgcatggccgcctctgacgagcgaactctgccggccatagcagcgcttatttttataccaaagcaaccacgtcacttctttcgatttttgtatttatttattatattattatatggaaatgtagaacattaagttgcaagcgtacgtgtacgtatcttgggttcgtcaacggcctaattaccatagttagcaagacctaactatggttttcacaaaaggtgcggactcgtattaagtattattggactcgagatatgcaataagatagcataatgacggtatttccaaactaaaaaaagcgcttttcgttcattttttttcattcaggatatatagtttggaaactccaatcccctttgggattagagagaattgatggagaaattaatttattttttttttaaatccccttcaattctgaaggaaatttgatttttcaaactaaggttttgtcacggccgagggacttgccatgtcgagaatgggatggcgttgaaacgacgacgcctgtgcactagacgacgcagtaggccatatagcttgttttagcgtagttgagagagcataggtcaactagttgcagttgggcttggggttccagcgtcaagaattattttctcgatttaattaaatgggggtgtcaaatgtccttagat

SEQ ID NO: 2776 - DNA, 805 bp, Zea mays
attccatctgtgctcatcacatgacagtggatcaggcagaggggatggccgcgcctttaagcctgatttttaagcgattgttttatgcccagaataacctcctatagcttttgctaaacgaagatgctcaaaaagcaagtggctctgccttttgctctgttgcagagtatctgattccatctggctggaaggtcctaccggtcttcactgccgttcatctgaacccctcacttcatggagacgcgcagcagtttcagccctgtaggtgggaggtacgctgcgctcccttctcaggagctcagactccttcctcattactactgttctgcacttgccatctaactataacggcaatgatccaatcatccatgttccatgaatagtgaaggttacctttgtgataatatatatatggtgctacttaatcaaaactgaatgaaataataggaatcaaaggcagagaacctatcaaacaagcttatcaggggcttttgctcttagggaatcttctttaaagtgtgcactctaactaattgctacctttagttagtgtgtgtccatctgtgacatagttactctcaactgttctggtatgttcagatggcaagcatgctgcctgatgtagtgcttgttggttgttaatggtcctaaccatgattccgttcgttgaaagccagcccctctgggctttgctccgattttttttttcttcttcaatgatgttcatggtcttattaattttgtgtgactcatctgattgatgtatacccaggcaacaagcccagggacaagcaagaggtttaca

SEQ ID NO: 2777 - DNA, 716 bp, Zea mays
taattgcaggatatatatatgctagctagctatctcaacgtgcatgtgtagtcgatcgtacgttgggcctcgcgtttcttcttcttcttcttcttctgaaacctatcagaagtcatgttcttgcagaatgcttgggggatctgtcgtcggctggtcaatcagggaagaacaagttaagcagggacggagtttcgtctcaaatgcagccccgccggccgtctctctctccgtttgtgcaagcgcaacatgggagatcgagatggaagtttcagcatcacttgagcatgcatggttttgcatcccaagcctttttttttttggttgtgtagcaggtcgtgtggtggctggcaatcagcattattgctctctatccaatggtgggagatagctagagctcgtatccatcgtcatcggcggcgctcttttgccgccctgcctgcctgcccgtccaatcagctttgcctgccattctacacagttcgcgcgggacgacgacgatggcgacgcggaccaaatgagcgcctttcgttctgaaagtcggtggctccgcgaggatagtaaaacccatgcattacgtctgcgtcagtacagcaattgaaaaaaccgcgacaaaatggtggtggtggtagtaccatcggtggtgggccgtgggcggcggtggcaacgacttgagcatatgatttaactagaccaccaagccatttgcttaccttctt

SEQ ID NO: 2778 - DNA, 771 bp, Zea mays
attgagctgaactccattcacaccttcgtgccacattggattcagcaacaatttcttcgacaaaaaacaaatgccataagacagttatttactgttcattagttgtcggtagttcgtcattaagatcaccatgttcacatatacaaacaaggaaaacaaatcccacatatgcaatagcttttcacctcacaaatatgtcagtcagcaaaagacagaatgtagatcttccttacaaagtagctttttaacatcccaaactgccagtgacaccagaattagtgatcattaggcatgtcaaagcatgccaagaattagtctcggtaacacaataaatccattaaatagcatatacattcacatgaaaacacctatgccatgaaggctcgcagcgagcctatatgccagtatatacaaccaaaccaatcttcaatgcaaatcattcctaaagaaaacttagcactgctattcagttatatcaaagcagagttttgcttcatcccaggggccattgatctcaaacttgtattcctgaatccttataagccagtaagggcaaacgattgagacaaaaacaagtagcgccaatagaacagtgaagaacattcgatgcaactggtatgtgacactcagggccacagccattagcgtgaaggagaatagcagatgaagcctaaaatggtatttcttcacacagaaagtaatgaggggtgcaaagaggaagacttgcaaggagaacaacatgattgcgaagacgtgcagccttgatggcag

SEQ ID NO: 2779 - DNA, 825 bp, Zea mays
cttgcatgcctgcagttctgagttcactttgttcgttttccaattaagtaggatatacaacctttttgctattttgcttggagtaggctctgtgtgtgatttacaaaaaaaaaaagattcgctgtgtattcaaaatgggttagctacttaacgtagttcatgatttcgggttgggatgcctcataaatcaatccatctcaatggtggtggcagaggtgcttgtcttagatgggtcatgatcaaactagagtttgggtgtcttggcacatatgagcgtgatgtttggcatgtgcatttattcaagcatgatattatggataggttcaattgaaaattgcgaaagggtctctagttgagttggttaggtggcttgagtagcactcctcacgttctttgtttgacctctcacgggagcgaatttcaggttgggtttagaaaaatcccataccctgttccatggcaaagctcatgtttaaggttcgatcgggttgttctcacatgggctacggtgccactgtgtatggttagtacaggggttatctcaatctgtttgagaaggccttcttaacgcaatggctggaagctgtcttgcccccacctctcctgccacaggttaattttttaggtttgactgaaaattagaaataactttagtttgggttctgatagttctattttgactgaaccccggatttggttgctccatgctttaagtggtgacaggttttttttttgctgagccaattttctgttccctaaatggatgatctcgttcctgacataaaatggtcatattgaaacaatcctttcaaaattttcatttta

SEQ ID NO: 2780 - DNA, 730 bp, Zea mays
tgctcgacatgatcccaccagcccatgaggaagttgtccaccaccagcctgaaccaaggggacatcttaacgccatcttccccagcatcagctttcctgagcagctccttcagctgatcgcggttcacgtacttgacgtcggccacctcttcaggattcgggttgagcttcacgtcacgaaccatgaacaggaggtaatccactgaaacaacagaataggaaaggttgtaaagcctgcaactgcaagacagacccttgaaacatgtagagtacagcaaacacaaatagtatgaaaactgggaatccaggatgtgatggcaaaaaggtaatcaagtatgtacactcgtgttcgccccattttccatctgaaggagccatgtaaagcatcctcccaaggaggatgaactggtcaacaggtaattcgtcagcaactattcccagttcatcaaatagtttgcgttgggctgcatttctcacccctgaacagaataaatgattgtggctggtgatgagtagagtgcaagtaacaatatggatggtgcatacaaatctataaagtatggattggtttctcactctccaaggaacatgtatatacctgcacaattttcctcaatcaactctgactcgcggtagagaggatggctacagcaggtgtttgtccagacaagtggaaatgtcacttttgtgcagacctttgctgtaaggatatgaggtaccatatcttctt

SEQ ID NO: 2781 - DNA, 792 bp, Zea mays
aagctgaaactgatcatgtataagactttgccttgtgtcacaatgggtgcatttgctggtggtccttggatcaggttgctcatgagtggtgaatggtctgacgacttcagaagaggatagatctgagattacctttcatgcatgtcaaggaagttaagtagttgatgccttcaaataaatggagaaacgtcaggtgaaccgcgagcagaattctgtggcgcatttgttagtgcagttagctaggactctgttcatacagctgttcgattaagccaaatacctaactgtattgcccatctagtagaacctaactgtaacttgtcctcttaattaatactagcaattagcaaacatgtctgtacgttgcgatcggagaaaaaaaactatcaaatatttaggagaacaatgacacgagtgatacatagcattatttatgtttcaccatttatggaatttaaagactaattcgttttgtgatgaccatgatatccattataaaaattaatgttgtgaacattatgataatggcgtgtttgttttcaattaaaatcggatctgctggcctccaagtctccaactggaagaagagagaaaatctcaccaaacatcttacggtactgatgattggactagcactcatgtttttttttcttatttttgagtaaaatgcaggaacagtcattaaacgaacttgtgtcatttggattctaaaacttacaaaaccaggaatggctcatgttacttgattaattcgtgcaaaaccgtctaaaatcagttttatcaaaccagatg

SEQ ID NO: 2782 - DNA, 718 bp, Zea mays
ggtcgacgccacggcggagagctccagcttccccgtccactcctccccgggcttcagcgtaatggccctctcgaccgcggccgcgtccacgcacagcatctgcttgtactcgtcgtcgccgaagtctgccatcgtcttggacttcttctcccatgggttccacacaactgattgcagccggccaagataaagtgcaggaacacggttacgaaattgtgtgtcttgttcgacgaggcagcaaaaaagcgtaccatctattcatcttaccaatatcaggaagcccttctttccgcacgatgaatgtgcgtttctttccatggtcaagaacagctattacgcctgggcagccaacatagactcgatcaacctgcacggtagttaccatcttcaggtctcaaaatggaacaattaacgagaggaactccaaaacaggcaaaaagaataagcaaacttcgacgtgctgagcttccatatgcttgtaacctattagacttgaaactaatttcagacaacactttttaagccttcgtctcaacaaaagaattgagaaaccactcgtactttagcagtggggccaatttaagctcgttgcaagttcccagatggcaactaccagttaaatcttaaaaatatttcaagccaggacagaacggtaggttagagctacttgcacatagtcattacagagaactgcaatacagtaaactcagcgaactct

SEQ ID NO: 2783 - DNA, 592 bp, Zea mays
aagaacaaagcgaagccacgctgtagaactgccggcggtccgacccgtggctccggaggcgcgacgcgagcgcgccaatcctgggccggaccacgagcgccacgcgtaccgcggccttgaccacggcgtacgccgcgaccgcgcgcgccagcctcaggtcggccgcggccaaaccggcgacgcgcgcggccaggcccgccagcctgcgcgcgtcggacgcggcgagcgcgagcgtcacgagcagcgcgcccgcgagggaggccagcagcgccagcgaggcggcgacgaggagcccgccggagaaggcgcaggcgtagaggagcgcgacgatgaggaggccgaggtggtgcgccatcgcgtgctcgcgagccaccaaaggcggccgcggggagacggctgtcgtgataaggagaggaatcgtgcccttgcattaggtctgggatcccttcgtttcgttgctgcatgcattgagcgttttggtatgcttcccacggtggcgagtgtcggccggaagttctcagcaagcgaacttgcagtctcccagttcccacacgtcaaaaaatttactccatccgttctaacattgtagatt

SEQ ID NO: 2784 - DNA, 1354 bp, Zea mays
cccccgttcctatatagtcgacctgcagttcgtcacggagttctcgtgggctattgattatgcagggcgagtcgtccgcgtttgctcggtttaaaaaaaatggcgtctagtttggctgtttagttcgcacctcctgttccagcgccgcggcatgtacgttcgaatcgtacataatgttggcgattttggagagatttagcaacacatcacccgttgcgtttgaatcgttctagtggtataatctgttttcttgtttttttctttttttctaaaagaacgagttgtgaagtcataactttaagaatctgcttggattgggttggagctcgtgagcagcatgaattgcaggggataattggtacggaaagctgtaactcttttcgtgcaaaaaattcccggtgccttttcttttttttgttagttttaaaagagaggattcttttgattcaagaaaaaaaggttgcaatactcgagcccgcttattttttcagccatcgggttaaaaaaaactcttcctcatcttttatgaccaaaatacaatcatgtcgttctcttgccactgtgatttcatttttttattataagtgggcgcggattagttaatgaacagagcttagttcccactctacgcgatggatgtactaagcgcaatcaagcctcttaacttgttcgtaatcgtacctgtgccggcaattaacattaacacgccagtagtattactttaatccctcgttagatgtgctctcgcgccgtaacggcgacggtgcttcagacaacagaccccgcaataactgccaattagaaaatccttacagcttcggtattaccgctagggtttcgtccgtcgccgcatcgttattggcggtagacttcgaaagtctgcgtgccattaattgctaaacgccgattagccgaacctgtccatcaatgggcacattgatgggggtggaattaaaaagttgccgcgtacacttgacttggaatcccagttgcaaatgcagggtacggcagtacacacggggtttttttaaccgaacaggaataaccagcgcgtggaactgtcagtgtgaaacagtggggaagggggatttggtttcggtctttatagtggtggtatggtattaatgcgagtgggtggagggaattgaattggagaccacccgcacctaaccggggcatcgcaggtcaaatgccggtgggcccggtagtttagtggcaggcaggcccctcgcagtccaccacggggcaagggcagtgacagtgaaaagggtggtgctggtgctggttgcgcctatgcgtggtatcttttcccgatacggtcaggtcagataaggtaaccatggggtgctgctag

SEQ ID NO: 2785 - DNA, 767 bp, Zea mays
gactcctgactccggatgcatgctcgtgtttggtagtgctggctgttagtgttagctggggcgtttttccctgcttctttggaagttactaaaggagagcgggcattgaattgctgcgagttggagctaagtggccgtggatttaagcgggggcagtgacaagcgtattagccctctacgtgtttctgtccgagcgcgaactagaggcttgctgtctctgaatcaatcttccagaggcaaattaggaaagtttgcatcacatagaaaaaagagaacatttctaacttcccactgtatggccatcgatgtgtgctgcatttggtctgctgtgtgttttttgtgatcatataatggtttgtttgctgaagcgcttctggttatacttttgtcttgttaactttatttttatggctgttcctgttccagggttggaaatctgattgaccactcagtgagtggcttcatgttaaatccatttctggtttcaagatgcttcatcaatgacatctggaaactgtaatagtatgtgctgattttctatgcttcaccacctgatcatcaatgggctctttcctgaggaaacagcccagctacctcttcattttgataattctgcaccttgttgctcatgaggcaagaacactgagttcagatggtatgtgatggttatggctgctatttgtggcacatttttcccctcctataccaaatgctaatactcgttggtattctacaggcgaaagcacttcttgctttcaaaaggcagt

SEQ ID NO: 2786 - DNA, 797 bp, Zea mays
gacatccatcacccaacgtgacacaaccacaccttgttatagttaaaaaaaaacacttcaaagaattaaagttactcgcatgcatgcagtactctatgctcatttaaagcaccagagcttcgtgcggagtgtgtagttatgtttttctttccggtttctcgcctaccagtgggttcgatagattgttacaccacaatgggacacgagaaaccacaccaaactcaacacaacataaagccatatgcaggagaggacgagcgaccgagcgagctataaaaaagaggtcgagctacttttcaactcatacatttctcggcattttggttaagataaagtgtaatatttgttcttaccagtttaatgtctagctccttgtcaactcctacatagagctagctcgtttccccgaccgtctctgccttagtgtagaacttcaccgacgaacgtggcgatgtcgaatctaaagggaaggtacaatccgtgttgtggtttgatctagtggctagggttgttgagaaagatccaacagatttatcagacacacatgtacaaggcaattacatcaattattaactgtaaggatccattaaaagtctaaaaataaatttaaatttgggacgggagagagagagagagagtaattcattgtggagaatgctttttatttttgttccaataaatgagaactagattcctcacaacatcatgggcatggatgggcctacggagaattgaagggagagaaaatcgcacgcaagtgtgtacacggcacgctcagcatataaacggcgcgtggt

SEQ ID NO: 2787 - DNA, 762 bp, Zea mays
tttgatggtgattgaagtgcatctttgcacaccgagtttatctgcttcccacataaaccaaggttcccaacaaagctacattaccaaaatcaaattcagatggaatctaaggaacgggaaagtagtgttattgccactcaatgaaaaatggagaggtaaattagataagcttatgaatcaatatatctgtatccacaagatcaaacacaaatacataggtgtgataatgaataagatagatatgccataaataaaacagggtaagatcactcacgatgtctcattgaaattgacaagtgaaccagaagatggtattgctcctgtcaggaagttcatggaaacattgctgcacaaggttgcaggtaaatgatttttatctgagccaccaacttttcataacaattagatggatctacccaaataatgaacacttacaatgatgtaagtttggacaacttatcaagagaatgcggaacagatccactcaatgtattactggataagtccctggaagagaaaaaaagatcgagatagaacaatcaatctatattttttttatcatggataacacaaacagtaacactgtgaacttattttctaagttgggcttttaggataccactatagtaaattagtaaacatctctggaaacttgagtcagtctaattgaagagatctatctgataaacaacactgatatattgaaaaaaatgatcaacaatttattgaaaatagaaattttcttctgaaatctgaacttac

SEQ ID NO: 2788 - DNA, 859 bp, Zea mays
gaagtgtggagaggcaaatgactgtttcctaaccagacggtctgctgatcaatctaatgacaagaaatttagcaaaaaactgtgtagctctgcggtacaagctactgacagctgccagaacatttctggaatgaaacttcctacctctgttggcgtggctgtagaacaaagtaccagcactgcattcttggaggccacaaaagtgtataaagagtttgagaagcaggttaagaggactgtataccttgacaacttgtcttgcctagctacagatggagtcattacgacggctttgaaccagttcggtagtgtcaaaaacgtcagttttctgaccaactatacagttccatttgacattcccaaatctgcattagtagaaatggaaactgagaaggatgctgattctgtggtcaagatactagatgagttcccattcatgatatctgggatgccaaggcctgtgagggcgaagcatgccacagctgaaatgttcaatgaccgtccatgtaaacctggtataaagttagaattccgttgggtgggccctacagaccctgattatcataatgtcagaaagttcaagtttttgtccaagaggcatgagttggagaacttagcactaatcaaggtaaaattcttgttggcgtctaagagcctgtttgttttagcttatagattatataatctggattataatctaaattatataatccagattataatctagatatattataatctgtatgtagtttgttggtagtttacattatacaaatgtagattattcacaaagacaataatacccttattgtttatttgacgtgaagagaagaaggatgacatatatttggaatttttt

SEQ ID NO: 2789 - DNA, 790 bp, Zea mays
ggatcatttgtgaatgtttgaccagtatgctggctccagtctaggtagtggctggatcactggatgcaatgctgtgctgagtaatatatcctggtcatttcgtacatatattctataaattttacatggggcaccacgggctcagatggtacatatttctatgtacacatatacttagatgtctagtaagaaacaaactaacagttcgaagatatatgtgctattatcataaaaatacaaaattactttcatttatctattcgttggaaattggaatatagttttgggaaggatattttgccatcaaatacagattaatcttaagtttcaacttgatagtttatcagttcatgcccaaaaatctgcatattttgaaggtcttgttggtcccaccagtaaaaaaagcacttggtagaacacagggttgttgccgaagatttttgtgctctgttacaagtcttaatttctaatctgagtatgcttgataccataaaagctaaaggctcgagctgttcttggttgtgtaaaagcagagaatcaaagcatgttaggggctatcaagtgaccacttcctttggggtttggtcatggtcatgcattgaagcacttccctaggagagaatccaaactagcttttggcccctcagtttttttacacgactccatgatttgtgcctgcttctcctttcacttcacccaagagaatggaatggaagagaaggcatatcatcctatggttttgaaacctatatcttcttttggtagcatctactaccacgactgctagtac

SEQ ID NO: 2790 - DNA, 812 bp, Zea mays
gacttgcagaacatgtccaacacggcagcaacgcgtacgcattctctttgctccgtcaccctcctagagaaaaaaaaaaagggaaggcaaatgaaaagtagtaggtttgtttatagcagtacgcctagaaccaacacgcattagtttagtgatgatggatggagcacactggctaatctcgtcgaacctgtctttgaccagattcagtgcagacgggtacattcacacgtatcgaagaggaacagcagcaacttttggaatggtgaatctaactcgagtttttcttcttcttcttatccttattcttattctatcaaatagaagattaaaagcaggattcaaaattctacgacaaaaacaaaaaaaaagaacaaagaaaacaaaagggaggagccattctcgcacgttgtcctcctcttccatgtcggcaacacacacacacacacttatcacgaccgagcaatattctactatgggatgtttagcccaggcgaaacatctctgctttttcttgccaatatcatatacaccgagtacggacggccatggagaatggtttttaaaaaaacgttggatactttgtttttttttataaaaaaaaaggcccataacaaattgtcccaaacttgcccgcctccttccttacaacaacaaaaaaaaaacagtatacaaatccaaccacgcatatgcgatgatgagcgaagacccactttttaaatttgtgccactcatccgcacaacgctttatatgtgatccaacaattcaaacgccgtcctcaccccctgcgattttacacgtgcgcagccgagtg

SEQ ID NO: 2791 - DNA, 245 bp, Zea mays
tctcacctgatgagcagcagtgcacgtacgtcattgccggctctgcttgtgcttgctaccagatattttgtacgcacatcattgccggctctactttgctaccagatatttttatgcagtgccaaagcctgtcctgagtacacgtggtcgcgtatcatttgtttcccccctcctcttccgtgctcttttctgcttcagctcgagatgtgtgtacacactacacagtcgcacatgtacgtagagaa

SEQ ID NO: 2792 - DNA, 802 bp, Zea mays
aagtttttcccatgatttgttactaaggcttacaattcataggagattcataacttatgctttttgcatgccccttgcctgctcgcctttattaaccatatcacttctctaggagttgtagaagcaaatgtgaagtttctgatctagccatatttcacaaaaaagcacattctaatcttttggtattctcattgtcctgtgacttaaattatctgatttttcaggagaagaaaactatccgcccttcattttcagcagagcgtatttttggtggggcattgttggcaatgtgttctagtgatttcatctgcttttatgactgggttgattgtagactaatacgccgaatcgatgtgaatgttaaggtgaatcaagtattattttttcttgggtggaaattttgtatgtaaaatgtatgagtttactattaaccttttctttatcatgcatttatagaacgtttactgggctgatagtggtgacctagttgcaatagcaagtgatacatcattctacatcctcaagtacaatgtaagatattgtatcctcaaatgattattatcttgtttctttttccttttacccaccttgtgatgcatggcgttataaacaaaatgactatgatatgtgctttgcagagagatgttgttgcttcttatctagaaggtggaaagcctgtggatgaaggtgttgaaaatgcttttgagctgcttcacgaggtcaatgagcgagtgagaactggaatttgggttggagactgctttatctataacaactcgttgtggcgcctaattattgtgtg

SEQ ID NO: 2793 - DNA, 750 bp, Zea mays
aaggacgagcttgagttgcagtgcaccaccatgctgctccctgtgcacaaccatagctcctgtgcgctgccaggagtacaagccctggctatcgttctcctacttgtacaacctatgcaatcgcggtaggatcctggatcctatcaatatgtcaccatatcccagtgcataagtacatccatgaacaatgatctgtgcataattctaatatcagcatctaatgacaaaagcattgtactaaatgcttgagcagtctccacagacactcaatttcttctatgctgtactcctttccaagaaaacaaaactataaccaagacatctattatttagtggttaccataattcccatacatgctgtcacaagggctactttacatggaggctctattagtctataatgcaatattaacatctatgtattgaccattaatataatgtatcatcaatctcatataatgatgtcttgctgtttattacggaattgctgagtctcacactctgcttttcaatactggtgcttgttcaattggctttgttttttctaacattttagtatggtatatagctaaaatgtttatgctcctaagtgtgctaactattcaagttatattttaatggatctttttctactagttgattttattagagttgtacttgcagcatgtttgtgttcgttcagtggtgtcttattgttattaacttgctgttaggttcatccagcacttgcagttggatgcaattggtttg

SEQ ID NO: 2794 - DNA, 736 bp, Zea mays
cttgcatgcctgcagcagtctgtttaagtgtgaggagtgctaacattttatccttatgagtagaaacttcaaattcttccataacagcctgtctaaacgaaggccaaggcattgaacccatgacatctttataagattgataccagtgagcagctttccccaccaaatgcaaagaagcagcagtaactttgaaatgatcaggaatatgatataaagtgaaatatgtctcacacttgtcaatccatatcctagaatcttcaccgtcaaattgtgaaaaatccattttaggtaaccacgacttgtgagaagtaggctctatgggaacttgatccggtttgctgctagtcccatgctgccatgtgtgaaaatccttgggatgattagaatctggagaagatacctgtatattagatgaattagggtggaaagaagggtgagtcccatcaatccagcccctcctccacgccagacttcgtagtctggaagccagtctcaccacatttcattaccgccacaagcctcgtctgctcctgatgaagttggaccaatgacttcatcgacagatccaatttagattgcaggaactcagatgtcttctcgtgctctccttgtttgcgttccatcgatgataatttatccttcacctcgtcaattaaacctagtttttgggataaatcagagaacgttgtctctgaaagtgacttaatcacacactcaaaggactccactaagcgct

SEQ ID NO: 2795 - DNA, 763 bp, Zea mays
aacaatagtgctccatatattgtacctttgactctatcaatgaagaaaactcatagaaagcggtatagacgtctgacattgaatttgtctcgtcaattattcgtgccgtgagacctaagagcaaaaatgtgtcaggtaattatatagacaaaacaaagtaacagaataatcagattatgttaagaggggggaggggaattagatacataaactacagcttgtgttttattctagttaggtttgtgattatgaatcagaggcaattgtaagatgaagatctactccccccccccccctataaaaggaaggaaaggataaaacagcccccattcaggtccatatgtttctccacaaatccaaaacagatgcataaacaagtagatgccctgcatgttccaaattgcacttttgtacctcttataaataaagagtgtgaggtaatagagacacattttcgcctagatcatgacatgaattccatccgtgatcaaacaacaatctgttatggtggcggctagggatgagagagtgcaagggtaccggccaatagccttgcccacgaccaagcaagaaggaagggttttctttcttaactcttgcttgactagattgataaatctcctgggctagggttgagaggctacttgacccctaaggaaatatcttatccaaatcaacctaacttatctcttgccttatcctaactaacccaatgcttccttatcctaaataaccaaatcaatctaacttatctctttccttt

SEQ ID NO: 2796 - DNA, 856 bp, Zea mays
ctcggtacccggtgatcctgctagagccgacctgcagtgctttgcttttgtatgtatatactacacctcgggagaacacaatatgtttctttgcttttttgtgaccactgctatgtcattgtgttatggctagtggaagctaggataaggaaagagacaagttagattgatttggttagttaggataagaaagaatttggttagttagtattagagtgaacgtactaaccagatcagcccaaaagtttaagctgataggaggagataggcaattcacctatattaaatttcaacacttcccctcacgtcaagcctcttttttgggtctcagacgtagaataggagccaggatttgaactcatgacctctggctttgataccatattagagtgaacgcaataaccagttcaacccaaaagcttaagctgataggaggaggtaggcaattcacctatattatattccaatagttaggataaggaaagagataatttggactgatttcgttaggatatttccttaggggttaagtaagcttgtctatataagcaatggagatatatcaatccaatcaagcaagaattaagaagaaaaatcttttcctcttgctcggtcgtgggtggtcggccctcttgcgctccctcagcccttagccatcgccatagcaatctgatatcagagatgtcgggtttcgacgttaatgctacgattgacgccaagacttatctccgtcggcatggtaggtcgtgctgccggcaccgtaaggagtgccaccatctgtcatcaacgccatgccgaaagccctcttccaggtcggccaacaagtggcaaaccttcatgtgcagtgggtcgtcgt

SEQ ID NO: 2797 - DNA, 790 bp, Zea mays
aacaaacaagcgcataggcttcttgaatttgagcccagatgaagtgattcggagcttgttctacaacaagaacaacgattcccttattaccgtttcagtttatgcatctgacaatttcagcacattgaagtgcagaacaaccccggttgagtaagaaaacatgcttcagaaatttctcttatatttctctgcaatgtgaattttcaagaagcaccctatggacaagtatcctcttagggtagttaatttttttaatgatgcagcctactaaagttcgtagcatcaactaataaattatttttatataaatgttgttgcaggtatattagaaggaatcagttagatgctgggtttcccctctttgaatcagagtctctgaaatggcctggatttgtggagtttgatgacgtaaatggaaaagtactcacatattcagcgcaggatgggtatgcattctaatggttcattgcattaaatgttgttttttccacaataatattgttgtaatggtcatccttttatctgaagtatatataaggtctttgacttgaagaactactacttcctatattcaataccagatgaaaatgtgcaggagataaagatcaggtttgtgattttttcctcagttacatcttgtcttcctgtaatttagacagagggaaggggagggtgttcaaatttgaatttttattattttcaatttcagtccaggaatcatgctcttgatatacgaacagaacaccaaagttatgtccccatttgaagatattatctattgaagatggga

SEQ ID NO: 2798 - DNA, 850 bp, Zea mays
  unsure (1)..(850): unsure at all n locations
cccgttgatcctttaaacccgacctgcaggtcagatttttggatacaaatagaattatattttggtttaaggcaaacaatgttgttgcataatgatgtgctgcttgaaataacttatggattcactaccatcagtgattgtatgattatctacttatttatgaaaacctatttaccatgccaacgtgcatatccttaccaattgttgcatccgtaccaccatgatgtaactatcataatgagaaatatcctcccagaaagtcatatgcttatataactgccattttgttctagtgattatgtattactactattttgttcctttttgttcatgcacttaatctccaattctctggcagatgtttatgaagaagttcttgaaattgtttcctatatgacatttttctcacctacaatttcactggacatgtggagcttgtggccactgatgatggaagcgcttaatgactgggctatagatttctttgagagtatgtctaactttatgatgtggcactatgtattttgttttgttctctcaggaaaaaagtgtcattattttttagcgcatgctgcatgcttttacgttattgttgtgtgaatctgtcaactatagttgtgccattccttcttatactttgtcatattttgagaaatattccaggctttccatatgcttagcacactgatacagtgatacattcttttggtccatttgtaatggtccagatgggttgctatcctattaatgtangactggtatatagatcagtcttcttttttgatgttatattaaaaaactcctggatgtatattaaatgggttacctggggtaattgcacactttggtc

SEQ ID NO: 2799 - DNA, 764 bp, Zea mays
atctggaaagaagaaatggagctgatacattttggaaatgttaacctacccgaagaagttgacaggtgaagagcaggggaattgcagtgaagtctggcggtggcggcaaggggaggagagaatgtgtcaacacgagagactcgtttgcttgcagaggaggtatcatgacaatggatgtcgccaagtcctccgtgtcgaccatatatatatatgaagaataataagaaaacacaaatacccaagtatttagaagcgttgaatccagatgtggcatgaggtcggagccaacgtgtacttgcatacgttacgtttatatacatgtactgctctgctgtaatggtgtttcgacgaatgtgtcttgtcattaatgttttgttaggctcgttccaggcttctgctgatatatacgttacgttcaggcccgaactaggtttgggttttcgctttcgctactcgtaggaaatgtttaagtaccggacttcatgctatagggatactagctcagatggctcagattttatgtccagccctattatttatagatcagattctagtttttcttttttaaaaaaatagtgtttttgaatatttggacttcaaaacggttagctcgtaggcgtagaccaatagaaatgtgccatgtcgttaaagatggtatgtatcgactgattcgaattgattgtttgattcgcatggcacgggcaaggtttgtgggaatggatggagatgcatggacacgactcgccatctgtttgttgcttgcc

SEQ ID NO: 2800 - DNA, 725 bp, Zea mays
gctcgttgccgtttccttccccgtccccgactccccggcaaggccgcaggggtagccgggtaggtgcagtgcgagactcgtgcagtgcagtgaaggtaggtagttggattgaattggatcattggacggaggcggcgtgtgtccatgccatgtgggtccagactccagaacgacgggctgtggacttgtgtggtagtgggctatacgcgccacccattggccaattgtacatgggcctccggaattaccagcccatttgttaaaaactgaaactgggacagaaaagccggaaaacgtattaataaataataacaaatatataaagtagacagaatagataaataaaaaatataggctgctgggatctctcgccagcatcccaaaccagcacatacggcaagtcctttctttattacctccaggtataaaccttttttatgtggcaattttgtgctaataatctaaatttcactaaacatagttcatatgcttgtttctttctgaacaacaagcaaaaaaaaatcatgtatagtcaaatgatgtttctttgcaatgtggtggtggtatacatttagctagtatgacctatacaagtcagcgtcaaccgtcaatcacgtagctcgtagcttactagttagattgttcattttttttataaaggctgcatccataaccatcttctagaccaaattattactatctgcgtgtttggttgcataaccata

SEQ ID NO: 2801 - DNA, 804 bp, Zea mays
acagcaaacaagtgccctgctctcacctatgattttttttcaagatgcgcacactccacgatcacagagacacatccaaaaattcgtcaagctattgatcgtgttcacttgctcgggatcgtttctcttacgatgcatgtttgatgtgcatatttctctggaaaaatacaaagtacgctttcaatttcagactagatcaacatagttagcatccagtccgttctaataaatataagcaggcagtccacacatgatgttttcagcttataatgactggacggtgtcagtgtcacctaggggagggaggaagatcccgacaacagcaagcgtcattgccgtctactacacgccttgtccgatcgacccggaccgggagtttcccgggcatttccaccgtcgttgtctgtaatttatcgatattgttcggcgcagttaaattgaaaacggctgagatttgtcgaaagcacagaagttgaaaacgtaacataccgtccttgtctgaaatttatcgatattgttcggcgcttgtcttcttcagaaccgagccagcaagactgcaagagctccatctaaaccgatgagaaccgtgctagaatagaatggcattattttaaaaaaaatatgaagggagctagtatttgactatttgcctcttgttcatcacacgatccgtgcgtctagatagttttctcgcttcctttttattataatgcgttggttaaggtcaatctaggcaaggtttcatcgtcgagcagcattatccaaaatgcatcgtcgtctgaactagcactagcaggctggcaa

SEQ ID NO: 2802 - DNA, 781 bp, Zea mays
ccagtggcccgagcaatgcaagctagctcgctgcgtcggagaggacgcgacgagagcgccagccgacgagcattgttgcggatcggaccgcggtcggcgttgcgaacccccggcgctccattcggttcttgcacagccgcgccgatgacgacctgctcctcgtcgttcccccacccagtggcgtgagaacttccttgcaagcagtcagcggctactcgcttattgaaaaaaaaaatcgaagcaacctcacctttggatcgatttctcacgaaactatgacttcgatgggagcatcagtcacatgacaggggcacagggcctggatggacatattcctgattcaaggcatgtaatgtttacggtttacccaccaccgatcgagtcgtccagtactttcaagttcagtaacttcaacttcggttcagtagaaagtccatacgcgagctacatatgagaacattgaatctcaagaaaaatgcccagagcagtggttgcgcaagtcctgaatatttattctctgtagtagtaagataactcaacttctctttgaaactataatttttttgtgactgacctgtttggtttgaggaacgagtcaatatatcatctactcattccttacttttttatttgatttgtggaatgattatcatcttgtttttcataatccatactagtatttaaaataggaggacatatctggtgcacatgtaagtttagtgcacatgatgcacatattaaatcatcactatccattttagatctcacgtctctcgttgat

SEQ ID NO: 2803 - DNA, 848 bp, Zea mays
tctgctaggttacatgataggtttcatgaggcattagcagcagggaggttgtctaaggtaattatcatcttctacagcaattattttaaatgctcaaatcagcaaacatggcttaaatggctctgtttgacaaagccagttattgtgcataatctgcaattgggaaagctgatgaaccacagatttgcttatcagtaagctgttgcagaatcctggtgtccagcacagcttctgcttaatctgtggagaactgaggaataagctgtaccaaacaacgcctttggcattattccagctactcatgttagttttcagaaaaggaatcatgttatttccagtccaaatgtacgaagcttcctcatctggggaaacacctgtccaagcagtacatcccaaatgttatatatgcaagtgaacaaaaagatgctaactcaatatcatagtcacaagaaataaactgaagattaccatgactttggattaaagaaacacctctaaaaactcagcaccaaaaagaacgaccatataaacacttatcaaatgttgtttattccttgtcctgtggcagtttacaaaaaactcgatctgcgaggaataagacagcccccatgtattgtattaagaagaagaccttatcacacaggtcgagaaaaacctgaacccctgccccgtccatacacagcggcatataagcccatgtgagaatgactgcgaccgggccgagccttagacctgttctttggcgtgggatagacgagaggtttttttttaaccacagcctgaaattcgctcccatggggagccaacctgaggagtgctacttagaccacctaaccaattcagctaga

SEQ ID NO: 2804 - DNA, 858 bp, Zea mays
ttgcatgcctgcagcctaccgtaagaaagtcaaactgctatggaaatatatttgccatcagtaagaaacatgtttgtaaaattgacatcagacccacatttcatagacccagctgaaaccataatttatagacacaatgttaattataacaagaagataacattgtgagtgacaaaaatccaattatctcattgaatttgaatgtacatacatgcgtgccccatatttaggaggggaaaaaagagagaagagctcagcaaaattgatatcatatgtacctaccaaagccgctcccagaacgtgtattgtcaccaaattggcacgccgtacatgtcatgtcacatatataatgcaggctaggtagggccatgaacaggtcagattgtgcacacaatccttccttgatcacacatgccactttggtggttgcggtgtgcatgcgttctccagcggaaagctacgcatggaaacggtactcctctcggctgttgaacatgtggatcgtgaataattacgatatagaatatacaatacaagtttgtattctcattttcttaaaaaaaattaagcttcaaagattcataaaatgtaaacctcgaatttttatcgagcatcttctcggacgatagatataaaattgggatacggatacatgttcagatattttttctcaacatttttatcctagggagcaaataatgcgtgaatgaataaatcgatgcaaaattttgttctatttctaatattatgctttttgacaacataaaaaaagattaacacttataaaactaatacgtaccttatttaaaatatcggatttattctaatatttcgatgtctaattccctcacataaaac

SEQ ID NO: 2805 - DNA, 695 bp, Zea mays
agcagcttagctatctaatggagcttatttcctttcaagtttgaactatattttcttgctatctgttttccaatttgaactatatggctgttatgacttatgagttatgacttatcacttatcacttatgtggctgatttggttcagtttgaggcttcaaatgaggtaagacttgctgtttatttcagtttcgttcaatttcaggcttcaaatgaggtaaaacatgctctttcttcatatataaatgctatattatctatatgaaggcattatataggcaaaacagccactatattggcaagtcgacgactagtcgactgacttatcgattaatcaccaagtcggtactttgtcgactcgactcgacttatcgacttgaaaaccttgcccttggtcatggtggcctgcaatgttttaacagaataactaggtagtgtgccttttatgggtgcacctgtgaggagaggatgggatttgatatgtcagtattccggtgatcgattacccaacattgttattaaaatgtcgcttaaacgtcgtttaagcgtcgtttaaacgacaaaacgtgatttagggttgaaacgtctgggtgttttaacaaaatggtgtagaacgtccgttaaatgtgtttaaacgtcgcttaagcgtcctcggcgcgttttaaggtgttttacatgtgtttaggacgttctact

SEQ ID NO: 2806 - DNA, 784 bp, Zea mays
aatcctggtaagtgcctctgggggagcgtgatggatgcccatgttgagtggcctgagctggtctcggtgaccttgtgggttcacagctatcggcagttagtactcctgtagcatttgttgcttcttccaaccccatcagcttggcaatgacactgttagctctgctatggctaggggaatcttgaggcctcaaagtatccagaagaatatcatcagttctcttgtaaccgaggtccttctgacgtgagcctggactcagagactccttcctactgtccaaggacaatctaggaagctcctttggcctcgaggaagacctcttgctttcctgggtttcagttggtcgcaggagccttcggtcatcacaagaaaagcgtgactgctcctgcaaacaccttctagatccattgacatttgcaggaacatttgtggtcctatcgatcccaatgatacaggtcccatccattgatttggacagcagcagtggcctcggtgagtccttgtgctgcccatttctccttgcctcgtgcaccgaagtttttaccgtcaggcctccggagtcccggttgatgcagtccttcactatgtctctgaaaccggcattaggatggccagacttggcgttcatgtcaggttccctcagactcggcgagctcttcagtggcctctgcgcaaagagctcctcgctggtgtaaggaagctcctgttgcactgatttgttgccatcgagggaggagaaggacgtgcacggagaggaggaagaagaatcgcttgacgattcgat

SEQ ID NO: 2807 - DNA, 802 bp, Zea mays
ttcttgcatgcctgcagccaggtgtttcggaccagttcatttgaaggttcactgaattcggctgtatatgtgtaagtctgcatataaagcatttttcttggggaccattaagttcggaccctggaataggatttggaatgcatgggcccctctccggtgcaaaatcttcatttggttggccataaagaatagatgctggacgacggatcgattggctacatgagggcttccacaccccatggtctgccccttttgtgaccatgagcaagagacgatgcaacaccttctagtctcctgtgtcttctcttgtgaagtttgggcattatttcttttttgccctgggtttgcctgctcttgcaccgcagcctgatgttaggagattttcaggctggtggtccggggcagtcagtcaagtgactagggagcttaagaagggtctcaactctatgatcattcttgttgactgggagctttgggagcacaggaacgcttgtgtgtttgaggggatgagatctagtgtttctgtggttagccatgaaatagagaaagagtgcaacctgtggtgcctagctggcaattcggtgcttagcatactgcacgccaggcccaggatagtgggggctgagcacctaagtatgttgcttctttttttggtcgtttccctagtgtgtgcctggcgcggctgtaattgggaagttttcggtgctggccccttggcccctctatgttgtttgtactttttccttaatgaaatgatacggagcacttttgcgtctttaggaaaaaaaaatcctacacaccg

SEQ ID NO: 2808 - DNA, 779 bp, Zea mays
ggcccactgggtgctcccatcagggattgaatgcagggggccaccaccaccaccaccacatgcaccgaaaacgaggcgtccgcagacagctaagtagcttgtagtactactcctccagctacagcttgcatgctccgtccgtgtccgtgctcagctagcgcaaaccgcgatgcatgcgtgtccgagtccgagcttgcgcccatgcatgcatgcacagcaggccgatcgagtctcacagtactctaggagagtaggtgtaggagggtttgctttgcacgcgctctggccgcttggttggaagttggaacctgctgtgtgtgtggaaagtggaaaccccatggattccacggagacacacacgtgcaagtgcaacacagtctcgttttgatctgccgtacgtgagtaggtctcactcgtggataactaactgctttcctgttttcttaatgtatactactactacacggtggtggctgttacctgttattttcagcagatgtagagagtgacgtcgcaaccgagagggacgactgtcatctacacgtagtacggaacttgattaaacaccccgatcccccccccggccgtacgctgcacccttcctttatcgtctactcccatccgtgccgaaagggaaggcgcccaacccaaagaggggcctcggccggccagacagtcagtatggcaagagtgactgcacaatgaggtcatgcatgagcgcgctgtcagtgtcaggatgccagcaacggccagcccgcggcgccggggcattcgttacc

SEQ ID NO: 2809 - DNA, 859 bp, Zea mays
aactatatgtccataacaatttggttggggttggtaaggggtgcatgaacgggagagaaggtacaatgttaggatagcttaacatacattcgaagtttcctgttctgtagttggctgatacctaaatgttttatgctgttgtcataatgaaaacaaaccctattgagctggcatggctccatccttgcttagcgctgtgatgacatcctagtggaaaagtgttggccttgtgacaagcaaggccagttgctatagttgtatccacaatccacttatctcccaagtattctttcactaatctgacctctgctagcaattatattattaaattgataaagtgactaactaaccagacatactgcactccgattttcagtaattataatcacatccttacacgtgacagttaaaatgaccaaccagaatactgcattccaattttcagatatgattgtcacacccttacaccttatagttggttattttgaaatcaatctatttttgcagtgcttttgagataacacctagaaatcctatgcagtttgcccaccaacacaaaaaaaatcctgagcagttatatcgacatttcttcattcacatgaaatgtcacttcttagtagattcttctacaagaggcctcctgatggactactggagtttcttgacaggatctatggtatgcatggagaattttactatattgattgccttcttagatcaatgtaacttattttatgacagctcaactaatcacatcttttggcattggacagtttttgattcatgcttcagcactgaagttttgcctcacggaatgtacccagtgtatttaattggggattcttacagagttgcatga

SEQ ID NO: 2810 - DNA, 782 bp, Zea mays
cagtcttgcatgcctgcagcacctccgccgagatggccttccacaccgacgtcttcccggccaggtggctgaagatcgggctgcaatgcaatgcaaacattaattcacgtgcaatcaaatctccagtgcaattcgcaataaaaaaagatcgatggatcgatcgatcgagacaacaaattacttgggggtggtgatgatggagaaccactccatgccggacgcgtcggcgatcttggagacgacgtggaagcggggcacgatgaagaggaagccgccctcgacgcgcgtctccaggacgcgcaccccgtcgggcccgaccacctggacgcggccgctaccgcggacgatgtaggtgacctggtacgccgagtcgcacgagaagcccggggagcacatggagtgggcgtcgatgcggaccaggtcggcgcccagcccgacctccttaaccagcggcaggttggccgtgttgagcaccacgacgcggcctccgcccgggatgttcacgtccagcggcgcctccaggcagttgagcgccaccccctcgcggtcccgcggtgacggcgccggcagcggggacgaggacgcccggacgatgcccgacgccggctggctcgacaccagcgccgccgcgtccgcctccggcaggtcccacgcgcgcgacacgaactcggtggagaagcccgtgaagatgccggtcgcgcccgtcagctggaagttggtgaactgccccggcctgtggccccttggatgtgtcgccgaggaagagcaccgtgagccgggtc

SEQ ID NO: 2811 - DNA, 777 bp, Zea mays
agtgaggccgtgacgagagagtggagtaagcacatggcctatatgttcgcactacatgttgtattcatgcacatatgccttttttgaccctttacctcgtttcagttttcggcaggccctgttgtgtgacttgatctgtctctatggttcctccgattttgcttttttttttttgtttctgcggtatgtcaccagacggggacgacggagcacgaggctttcgatagcgtgatggtgatgtgctggtcggccgcggatgcatgcgtgcgtgtagaacctatctgatgtggatccctatcggatcacggcgacgaaacttttgggaagcaaaaagacacggaaggtgtcacgcaagattggccatggaacggcgcttcccctcggcccgcggccctgcgtttaaccttttccgtgggcaggtgtgaagggaatcggaggccggaccgcggacgaggagatggatggtgcatccttgtgcgacggagagctcccggtgagtccagtgcatcctttcgttcgtgcgtacgcgtgccatggctcctttgtgtgtactgtcttgtcgttagcgccagaagcccagactagctgacattcatatgagttatccgtattcatatttgtttccgagacactatccacgtgattggttcgtttcactggtccgcctggctcgcatcagtcagccaggctatatatagcctgattgagtgtatgcaaaggtttagtgtttggttacttggctcaattgaatctggctgtattgagacagcgtttgga

SEQ ID NO: 2812 - DNA, 777 bp, Zea mays
atgctatcgcagtgcagatgcaatggctagagaagaaaccgacgactagctcatgtagacgatagccatttgtgttgatgtcaaggtagtcaagtatgaggacgggcagttgttgtcgatatgtcgtgtgaaggatagtcgtgatcgatggaagctgtcgaggtcaccaaaaagtcagagccacccaagtcgcgggcatgctagaagcgtggtggcgatggtggcgcacaggaggaagcgccatagacgaagatggcgacgtagtcgatgaagaaggttgatgccaaagtcgacattgtcgaaccatcacggttgaggcgtgtgctaggtttgccaagcctgagaacacgttggggatgaaggcacacaccggtgttgccattacttgacgtactagatggatggacccaaccatgtgtcagcgtctgaagggactagcggagaaggttgcgatgcactaaagaatgacgaggaagaaggtgtcaatctagtcgacggttgtcggactggacaaagtagacgaggacgagaggacaacactggtgacgaggttgtgctagacgaagtcgaagaagtgatgggtgacgcatctaggattctggagttgcagttgtgagagagtcgcaccacacaaggagagacgcgatggtgctagagtgttgagatagttgtactcgaagaaagtgatgaaaagcgcgaacagttgggtaggccatgtgtgatgagcacacaacgaagtatttgacgacaatgtaggggcaaagactaggatggcaa

SEQ ID NO: 2813 - DNA, 1019 bp, Zea mays
tacacattcgatatgtcactagaaatctacaggcaaaccccaaaattacacctttcacttttacagccacaagacaaggtcaggtcacgtatgcagctatgtacagtcaccaggtgatcggcaaaatcctcgtgtcctaagaggatttcatcttgtccaggttgtgcttagcctgcaaatcatataaagattgcatgagcaagagattcttatctttaatcgcagcttcaactaatctcagcaaacagagatgtggagttcgaagccctgaccgaaatcgcatcgatctcctgtaacaagggctggacggcataggccagcatcctggcatcttctgctagatcctccaagtcttgacagttacccatcagcagcgctacgaagaactctctttccgggatgagcttcagtgctacctgacaactatgctcgacagattaggtcagtgagcaaaaaccaaacctactagtaattagtagcacacttagctcagcaagcatgaccacaaatttaaacaacaaagaagtgtatctgcaaaccagaaagtaatagatgtgactgtactagctgaggaatgcggaataagtatccaggtgatataccttgtaagcagctgacgagatccagccatgccatggcttcagagtatttgcgtaggcttcttccacgatctcttccaggctcgactcagcaatcttcaacaggctctccagtaagtactttgagaaatttatcgacctagacagccagattaatactttggggcaacctttgggcttttcgctgggcctggtcattttctcggggaaattaccggaaagcaccgtttttgaaaaaacctttttgtcgggttggaacccttggggaagggaaattaaggcatttggttgtgttttccccaaccaaaaattggtgccctgacacggttaccctggggaaactttcaaaaaaaaaaaaccctctcttccaagaggggggcccccttttttatgccccccaaaaaaaaaagggcgatcttt

SEQ ID NO: 2814 - DNA, 715 bp, Zea mays
aaagaatctgtatttaaactgattgctacaaggatcattacaaaacaagcaacgggccgggacttatcatgagacttgtttaagcccactgtcagtgcaataaacaaaatccagttatgtagagaagtccaagaataaacgtacggctttaccttcaagaatctgtatatatttttttcttggttcagaaaacaatctatatttttcactggttggagtttgggcgtaggttgccgcgaaagctttcaccaacaatcatgcatatagaaaagggattatattagtataacaagtacacacagcaatgtgtgaatgtgaataaacaagtccatccaggccaactgcatctggcaattaaaatcatctctcccggccgagtaaggacaggaggcaccacccgttttttactctcaataattcccagttggctgttctgacttgacacagagagggatgcgatgaacaacacaagacgccgctgtttattttttaaagaaaaggaaagaaaagaagaaaaggacagaaactagaagttgaccccatcatttgtcccaagaaatgccagcaaatgagcttgcttccgtgtgtataagtagtggattagctgaggctcggggtggttcaagtgataaggaaaggtagtggtaggaggatagatggagaggaaaccgaaaggagatggagaaagggcaagtctgaactgagactggccatg

SEQ ID NO: 2815 - DNA, 763 bp, Zea mays
acacaccgatggtgcggtggaaaggaaacaaggcgtgagcatctgccgtcgaatacctacctggctcatcttggggcgcttcttggccgagtggcgcacggctgccgcggcgctggtggccatgcgcgccatctccatggggtcgtagttgccccgcagcctcgggtccgcgacgccgtcgtagtcgccgtcggccagcgcgcgcgacagcgccggcctcgcccagtccacgaggctgtcgtcgacgtcgaggaacgggcgcgcgtcgccggcgtcgatggggcgccgccccgtcaggagctccagcagcaccacgccgtaggagaagacgtccgacttgtccgtcagcttcccgctcgacgcgtactccggcgccaggtacccgaacgtccccatcacacgggtcgacacgtgcgtgttgctgtccgacgtcagcttggccagcccgaagtcggcgaccttggcttggaagttgttgtcgagaagaatgttggccgacttgatgtcgcggtgaatgatccggggatggccttcatgcatggtgacataacacggcagatgtaagattccgacgtgacatggtcgcgtcacaactcacaaaccaagtttctgatgacagacaattccaagttgttacggatgctcacagtcttcgtgcaggtaggcgaggcccttggctgatccgagcgcaatgcgcagcctcgtcgaccactccatcaccggctgcccttttgctgcgttcaaaccacccgaacacggaaac

SEQ ID NO: 2816 - DNA, 719 bp, Zea mays
taagataaagggtttgatatggacagttcacaatctcaactgactcccaagcagtaagcacggtatcctgaaatccctccaacttaggccaaaaagcctcaaaatgaaagtggcgcctcccagaattgttgtcccgaagacccaaaattaaaggacaatgatcagagtcatgggaagtggtgctttgaagcaacacatttgggaagatcagctcctgttggttggttgtcccgttggttggttgtcccgctgtgagagcttcttctacaataaagggacgccagagatggataaagtctggatggctacgtattatctcacgggagtggcacagatgtggtctgtcatgctgcggtgcgacaagcccacactgcacttgccacgcttcaaagcgttgtgccagcagcgttttgggcctcctctgcacaacaacacgttgggcgaggtggcacgcctgttgttctactccacggtggactaccaggatcgattcctggatctcctgtgccacacggagcccgtgccaccaccacaccagcaagcacaactcttcaccatcggacttccatgacatctccgggtggacgtcgaactgtgcgcgcccgacgacctgcaacaggccatggctctcgcccgggcatacaagcgccgccagcaaggctcgggcagccacacacctacgtcggcatcgcctgcctggccagcggctgctacctaca

SEQ ID NO: 2817 - DNA, 769 bp, Zea mays
tcttgatcggtgctgccctcgacgtcaaggctcttcgctatatatgtgtactgtagttaagtgtgctattatctagagagacaataattgcacgaacagaatggtgttcgctgctgcctccaagtggctccacccagtgttattgggctagtgttcgtctgcttcttgtgccgtttctgtccacggacctctttaaaatcctcgtctccggttgcgtttcatatctgagaagatatggtatggccttggagcatacgcttcgccggttaacttgcacggcggagttttgtgcataaacaattcgcgttcatgctccatttgtcctggtcggagcagagatcgagttgatttgacgtcttcgtcacgtactcgagttgctctagaggagacgctgtggcatagcttccacggcatgggattgattttagagcgcagtgagcgggcagtggaaggcctgccgaaatttgttttatgggctgggaactactggctggactagtggattgaatgtcactagttaggaatcttgatctgaatgtccttctgtgctagtaatagaaacggtgcattcgtgaagcttaacgtttgtgaaagcgtgaatacaatgaagatttgttcacgatcatgagcctgtttgggcttgctcatattagtctcggctcggagaggctctcgagcctgagtcgagcctacatttgtagctcgtttaaacaacgagttcgaactggctcgcgagctggccttgttacacggttacattattacgttc

SEQ ID NO: 2818 - DNA, 765 bp, Zea mays
ggtgaacaagaacttaataatttggttctcaatgatctttattaccttatacgtggagaactcgaaggacgtcagattagctctggcccttttcaggagttgctcagttttcttcttgggtttagaatttttgaacacaatcccttggagcaactacaaaacacatacctgatggcaaatgacaaatttttatttgatgtggagcacatacatgacgagcttggagttgatctctggactgattcagacaagaggtctaaagaagtagctaaaaaaatgctggatattatgagtaaagcaaatttaatgaagtattatgctgatgcaaaactttctgcattgatgtccttcttgaaatttttatctgtctacaaaggagcggtaatttcatttaccaattgagaactgagatactttctttccttgattatattgttgcaccatactgtttctgttacgaaccatagttcattgatcgctttgggggagactagactgtaggacaaggagttcagtggcttgcatagacaatattcttgctgcccattccttttatctatggctcgtgtttctgaaccaattcttctataggatcgccagactggactggactacatggagacctgaaccaattcttcttaattgcttgagtcctgtatgctcattcctctctttatatagagttggctcctaacaaattctacaactttatcttctatcaaccttatatatttctaactgtaaattaaggcctaatctctccaa

SEQ ID NO: 2819 - DNA, 706 bp, Zea mays
tatcctctttagtcgacctgcagcgagtgtgtaacacaacacctattcattgcgcagcccaactattcagagctccaacagtgtatccaacagccgaccatccaaatcatcacaataggttctacaagattagaggtaaggattagggtggcttagtgtccaatggcagtgcatgtcttcacacatgagaaacagagaatacaaaattcaccaagaggaacaggtttccttgtattctaattactatttttttggcagctgaatacctttccttcttgtctatttcaaaacttcaactttgtatgatgattgatgtttttgtacctacattttcaattcatttcttagtgatggttccgatgatcattcaatggggagagactgagcaaacctagaaaaccactaaatgaaacttgactttcctcgtgataggtcctctaggtaaacatgagtaggcttttggttttccattttatttattgcgggagcactagtgtactagtgtcctccaatagtccaatacctaaggctcgtctagttagtggtaatggtgatctgcggcactatagtaagataattatgccgatgtcgtgtaagtaagtatataaaaaagaactcaccgtgggtgtgggtgtgggtaaaaaagcagttagtcatagaagtggaccaacaccaaaatttttggactccataagaccataaatat

SEQ ID NO: 2820 - DNA, 793 bp, Zea mays
gcccattgcccacagctatgcactctggggtctccgttggccgcaaggctcaaccattaacaaatgtcaagagataagtgcatattatcttcatgatgtgaacctcttctactaattgtgataattccctagagctagaggtcaaagaaaaattgaaggcatgaagtgactgggtaatagtaccttaaaatcttgtccatagattatgcaaacatttttctcattgctatgcttcaattccagcattttgtttctcacataagtagcaagagatgcagtatgcctacaggagaactccgatgagaagtatatcataaacggaataacaagagcaaaacctatctctgatagtaccgtgcaatagctgagatagttaggatatcaattatcttaaagccatatcgaagagaagatatgctcaagaatgagattgttccatcctcaagagtttgctcaatgccttttcttttctgaacaaagtcgatgtcagcaattgaagcagctaccgttcctatgtcataagtattccacaaggttactaaaaaataagaaaacaaacaaagaaaccaacattaaaacttaaaagcagtgcattgctaagtgcaaacctccactgaagtatgtcttgttcagtaaactagcagcctctgccattgaataaaaaatagggaagaaatcattagagatcttgctccttgcttgggaagccgatcaccagcatctatgtagtaatttgttgtagctacataatttatcttatcatttagatgtgtagcttatagcctataatatg

SEQ ID NO: 2821 - DNA, 794 bp, Zea mays
agctggtgagctttgcaacaactaacccggtcgatcgctaattgttaagattaatcaaggacaatctagtgtccttaatcatgagtatcgtcgtcgtcatcatcatcatgcagtgcctccggtctggagttgatgagctcaatcaaatcccttttggagccacgtagctccagcatcgagtttgactcataaacgcgcacaagttgtaatcagctgtagtgtctccatatttcgaatcgacacccgccgttacgaaattcatactagttttcatcataaccctgaatttttagaccaagattttatgctaatataagctcatagcaagagtctgcaaaagcaaaagaaaacctagagatggatatagatagatcattaatcatccgagacccagttgtcattagactatcttcaacagtttattatccatattcatacttatattcaaactccattcttcgaacagtgtagtctaccgtacaaacagtattttgggtgaccatataggtcaactgccggacacagtctgtccaaacatgcggcacggttcggtccaactcaagcccgttgaagcacgacccactacttaagcacagcacgattaggcccgaatagctatatgtgtcgagcctgtctgcctaacgtgctgaaatccctgaacaagcactgcctggggaccggccctaccatgtcgacccggtccgacgataagcccgatccgagaacgaatgctatgacatcccgaactcgttggcacataaaaccaagcttcagaattcgatcaccatacaaaa

SEQ ID NO: 2822 - DNA, 559 bp, Zea mays
tgcgtccgccgccgtcagatccggttcgttactgctccatcagcacactgcatgcacacggcattggggacacggctcgctagctgttcctctctcagcgatggtcagtcagtcgccagccactcaacagtgcttcctcagttgggacatcttgagggacgacgatgtggtgtcctgatctcgatgaaccaaatacacctatagctataggtacacaagtatttccgttcatcagctagctgctagcaatcatagcggaagtgccgccgacgccacggtgcacgagcaacaatcccacactccacagctagcgaacagttcaactgctgacgattaggcagatgcaagttttctccaaccgaacagtatttgccgccattatattgggacgattttctatgccattggaagctcaggattccggttaatataaatcgtcccaaggtcggaaaaagcacttctagaggccatgtgctcggtagacaacgagagggtgatgataatgaggatcttggtgaggcggacttgggtcgaggataatactagtgaggaaagaggc

SEQ ID NO: 2823 - DNA, 771 bp, Zea mays
aaattttaaggaaatttcaacagtttgaggagctggcacttgtggaagaacaaatcatatcttatctgactcggctaattgctaaacaactatatactgtattacatgatcaaagtgttactgttctcatgccgtaattacaatatggcttctcggtgtacaatatttccggtgatggtacaacgatgtacacagtccgacaacagctaaattgtctatccctatcgtacaatccagttctcgcagaactgcaacttcattatttcaatccgctaggtgctagtattcaagatcctgtttgacatcttcatggatgcaaaaattgcatgtgttttgacatatcttctacttccttcgcttttttcatttgtcacgttttagtttaaaattgaactagcagacgacaaatattcgagaacggatggagtatatcctttccgtgatgcagtgttgtgtctttaccggatgctgtacagtacagtgtggctgatgatagtggtggtagccagtgtctccattcatgctgcctgaaggacttgctgttgctgccgattcccacttcttgcagattcatacgggagcgtgttcagcaccttcacccggaacatagcctgtaggttttgcacaagttaattatagttcagaagaacaggtttcacagcaactcagggatgaactccatcggatgaacaattggcgaaataagaggaacaaaccaaatgtggaggaaaaacttaaaatgcagtatagctaccttcttatcggaaccaa

SEQ ID NO: 2824 - DNA, 757 bp, Zea mays
atacacaactccacatgctactacttcactcttaaatcgcacacacagagttgtccttaagctgatatacaaaacatatatggagtgtatgttagtacttagtacaaacattaaccgtaaaaagaaaacacaagaagcctatctaataatatggaagatgcgcaagctccagggtcattgaccacattcaaagccccccccccccccccccccaaactttgtgtataggatccaagaatctgaggttagtgaggcattgaaaaggataaaatgggataaggcaatgagccctggtgatattttttttctcgaacgcgcaggaaaaatgtgcatcattgtattaagaagcgaaaaaagggttcaaaatggaccaatacagaaaaaaggcacctcatggtggccaaaaacaaaaataaaaaaaaacaatccaatcactaggacagacatctaacaactaccgcccaggaatggggcaagtcaagagggccaggttcttggcactagcaagcccccaaagatccttctcttcctcaactttccgaagtgttgcgctaagttaggagggtttttgtcaaagacacacccattcctatggttccaaagtgtctgtaacccaaggctaatcaaggaattaaagcctttcttagcaataccatgcagctgatcactacttttttgccaccaatgcatggggcaagccttcaccaaacctgggggagcaagagcctgaaggtttattttgtgcaagtaagtgata

SEQ ID NO: 2825 - DNA, 768 bp, Zea mays
agtcagcttgaactcttcctggatcccactgggggaggcaagaacgattgcagcgctgctagcttgagcggccttggcaacagacgcgacagactcgccgaggcctcggctagcggcggcggtggacggggcgctctgaccaagaccgatcaggcccaccctcttgaagccctgccccgcgaggcggaggaccaccgactgccccgtcttcccggtgaaatcttcctctgccgcagcctccgacaggaggccgccgagctggccgtccagcttcttcaagacggcattctcgaatttggagtccgcgtccttggacagatccttctccgtgacggcgacagcgagaatatcgcccttccactcggagaattcgatgtctttcgcggaaaaggtgacctggaagaacgacaggagagcacaggttgaagctctgtcgcttcaggaggatagaagcgactaacttcccaaggatcaaaccgataaatcttagacgaagatgtgcggttttggagaagggaaaacgctaattctgatctcgatctagcgcttgttttagcgcggcgaacgtcagccacgatcaagtcaacacacgacagtatcagcaggttttgttggagacgggttgtaggcacactgacaaagcaggcgaatccacgaacaattcgaagcagtgctggatggaagcctcatccagaggcaggaacgcacgcgaggttacacagatgacagaccttgagcggctcgacggcgttggggcttggtggagtc

SEQ ID NO: 2826 - DNA, 780 bp, Zea mays
agcacagagctcggtagaaaatgtggagcgagttacagtccagatcagtcgcagttcaataatctagcctgctcttgctacctcctgccacacagtgatcaagaagtgttggagaaattaaataaagagagcaagacaagtaggcaacactactcccataacttccgttctcttgttaggcctgtttggtagagcgctagagctcctcctgcactcctggatctgtgaggactgagaagtgattctctaagagaagcgattatgttggtgaaattctatgcaaaaggattctgcttgtggagcgaatcaagagaagctacaattttcagctcccagcctcctagttcatttcagatgatcacttcatggaatcagcattgaatcaggtctctgtaaaaaaaaccctgcttggcagaactcctccttgattcagcctagaagctgttctcggaggtctgccaaacaggcccttacattgctgctacactacacataataccaagggcatgtatttcattgatgaaatcaccccaacttgccttacatctgccagtaagcagtcagctagttgaggttcagctcctatacaaagagctaataggacggtggaggatacccttactaatacttcctaggtattggatattcagggtgccatcactgttcgggtcctcatggattttcataccctatgggatattctcaatttggtggagctacaaccagatgtggatgattctcatatttttaggattgggttctaacgtgaaattctcaacc

SEQ ID NO: 2827 - DNA, 769 bp, Zea mays
gcatgcctgcaggctcctgaagttgcctggtcttctcaactaacctctcaggcttttagagcccccttgaacttgcacgagtctcaccaaaacccctgaacagaagcaaagtttaggggattaaatgagacaaaagtgcaagtttaggggctaggtgtgacaactgtgccagttgaaggagatgagaaagtaatttgcaattttaggcggctaggtgactaccgcgcaagttcagcgacctacaacacaattcttattggcatttgaagatcctgttgtctatgatctggatgatattgttgcatgctagatatttgaattctacatttgaatgttagctaaccagtttcatgatactgaactagaatttgaagttttcttgtttttgtcctgtgatttttagccataaggttccgattttgttaatcggtattcattttttctctgcatctgatcaagacggtattaatcttgtcaagggagttgtaatttacttcctctgttccaaaatgtacactgttttagctttgtcctaagtcaaacttctctactcttgaccaagttcatagtaaaatgtgccaacgtctacggcatcgtattagtttcattaaatccaacatcaaatatgacttgacaatgcttttattttgtattgtagatgttaatatatttgtctataaactttgccggagttagagaagttaaatagaaatgaggtaactttgatgtagtgaaggtttgcctctagtagacctctttttgaatagtt

SEQ ID NO: 2828 - DNA, 787 bp, Zea mays
  unsure (1)..(787): unsure at all n locations
aatataagacaaatgtcccacatggtaggagtgtatcaggtaaagcagaaagcaaatatgaacaaacgataaaaagtttgacattgtcaaacaataataagttctctctaaaaaacgatgattaataatgtcatagaacacatcaagataacaaaggaaacacaaccattggtcacaggcatataaaaggattttacagtcattcacccacacaataaagctcttttttaataagaaaacgtagcagttttccatgatggaacttttacactacagcacggtagtcctagtctagtatgacacggtgcaaacaggtacacagagaaagtaatccaaggcgacaggtacgaacaggaataaggatacaatctcctttgtattggatcattgggttgacccaaaacttgctaaaataaactagaacggcataccaccttttttgtgagtgtgcctgtggagagagaatctaaaatggcatggcacaatatctaaaacctagctcagaaaacaccattgattaccaacttgcatcgctagatacaaaccaactaaccaagctgatttgaatgtgacatagatcattttaagaacaatgcttatgcatgcatcagatgtctgatgtcagcgagttggaccagtatctggctaattggctctgcacagaggcggacccagtgggtggtccatataggccacggcacaccctaagaacacagaanggacattagcttagtggtctaagtgttggtttttgactaaccagccagagttctaaatctgattgttg

SEQ ID NO: 2829 - DNA, 1138 bp, Zea mays
aaccccttcccaccaatcttcaaaggaggagcacgcagggttaggagcaaggtgctgcaacccaacagatttcataatctgaaaccagacagcctgtgaaaaaacgcaggaaactagcaagtggtttatcgtttcttcctcttgatcacatagtgtacaaaattgagggtgaggcagtcctcctctctttgctaggcggtctgctgtccagcagcggtcgtgggccacgagccacatgaagaacttgcatttactaggagcccatgatttacaaatcctttcccaaggtttaaaagttgttgctccaaaaaagaaaccggtatatgccgatttggccgaatataaacctgagcttgaaagcctccagctatgcttatcctcctgatctggtgttaagacccagtctgtagtgaggtcccaaaccttaaggaagtcagacaaaacatttacagtgatagctcctctaatatcatggacccagctccttgagatgagggcatcgtggacattcctcattttagccctagaagagaccatctggaccaaatgaggggccagctgacatagactttggccatcaatccaattatctgtccaaaacaaagtgtttctgccgttgcccaccaccgaggagattgctaccgagaagaaggccttaactgaaggatgagcatttattttaaaggatgcccaaggtctgccagtatcggtttttttcagccagagccaacataatctaagagcctaactcatcaaatgcaggtttaagatacccaatcctccaaattcttttggcctagtaaccttgttccaagctaccaagcagtgtcctcccaaagcttctttcctccctctccacaggaaattccttccgatcttgtcaattgctttgaaaacccaagaaggaaggtccatggccatcattaagtaaatattcattgaagaaaggacagtctggacaataatcaatcttccagctctagttaacagatcagctttccagcagggaaggagatgtgcaattttatcaatgaatggttgtaggtgctgtctgccaagcttctttaaggatagaggcacccccaaatatttgcagcggaagttggcaacaacgcatggcagcagattatgaatggtt

SEQ ID NO: 2830 - DNA, 1283 bp, Zea mays
tgcatgcctgcagccccttgctcctcgggcattgcaacaccgggtttctctctatgcggatgatgtggtgatctttcttcggccggcagccttggatatcaatgttattcttgattgtcttcagctgtttggagatgcttcgggtttacgaacgaatgttcagaaaagcagcgtgtaccctattagatgtggagatcaggaccttgctttgctgcagaacatgttgccttgtgagttagctgaattcccttgccgctatctgggcttaccacttgccatcaaaaagctttcaaaaatccaagtacaacccatcattgataagattgcaaatcaactctctggatggaaggctgagttattgactaaagctggtcgaaaagtgcacatccaacatgttctcacagggatggtcatctacttagccatgactgtcgatcttccagcttgggccattaaagccattgataaaattcgtcgaggttttctgtggagaggccaaagagatgcaaaaggtggccactgtcatgtggcttggggaactgtttgtaggcctcgtgagttgggtggtctagcatttccagcattaaagaacttgcttggtcgcttagaatgagatggctttggatggctaaaactgagccaaattgcccatgggcctctcttgccatccaagtccctaaaaaagcgaaagatttcttctcaatggctatgcaaactgagcttggtaatggggctacaacctttttctggaccgataggtggttatcgggtcacagaattgcagagttagtccctcgattatttgggatcatccctaagagacgggttagcaagagaacagtggtggatgctatctctaatcagagctggatttctgacattcaaggagctctttcggttggaattatcaatgaatttctcattttgtgggatttaattgactcaattgttttaagacctcaagttgaagacaaacatttcctccgtctagctgcaaacggaaagttctcctcaaaggaagcatataggggtttctttttgggatcttctgagtttgagccttttcatagaatatggaaatcttgggctcctccaaaaaccaagttttttatgtggttggtcgctcacaggaaggtttggacagcagacaggctgcagaaaagaggtatggaccatccagagagatgtccactatgtgaccaggatcaagaaaccttggaccatatgttgatcggatgtgtctttgctcgagaattctggtttaaattgcttcttcaagtgaa

SEQ ID NO: 2831 - DNA, 819 bp, Zea mays
cttgcatgcctgcagcacgagctgcggctccttcggccaagaactgcccccgcgcggcaaacggggcggtggtgagggcacaagattccttccgcgaaggagaggccggatcagaggtgacgcccgccagacacaagctctaagcgccgccatggttacggtcggagcttgcgtttgtagagcggctccatgcttgcttgattcggtggtcgacgggacggaggacgtcagcgttgggtttgggggcatcgacggtgaaccgctcgccgatgggtatgatggtggcaagaggcgcggtccgcgtcggcgtccgacgaggccgaccgtttttcagaaggaggtgggcgcaagaactgctccaccggcgatggcgtcggagccggacagcaaatctgagcatggggtgtcgaggctgcacttcctggaggagagggacgaggagacgctgtcaagaaggttgataaagctcagccaaaacaacaaggtcagaagtgccactgagctgtttgattcaatgcgcgcatctgggctgcaaccgagcgcacatgcctgcaactccctgttggcttgctatgtgcgtagaagtccactggcggatgcaatgaggatgtttgagttcatgaaggcgaaaggaatggcgacagggcacacgtataccatgatactcaaggctgttgcgagcaatcagggttatgtttctgcactggaaatgttcgataagattgaggaggaggagggttcaaagaaaatcattgacgtaattgtttataatacgatgatatctgtttgtggaagagcgaaagaatggatgcttgtgga

SEQ ID NO: 2832 - DNA, 697 bp, Zea mays
tttcaaaaaaatatttattagatcactagggcctccatgaatgaatcgtgaaagctggatttgaaagaaccaaccaggtttgacggaactatcctgtaaactagtataagcatagtatgaagttctgtccaggtcataatgcatcatgttgatactttgtaacgttcttaatgctcggtagtttaacacccataatgctcagtacttcatactcatacaatgttgttccagatttcttaaagcttagtagtttaggcagccactgtccttgatgttcaaataatgggtagggtgagtaatgagcaattccttgaaaatcatctcttttcctctccacatataggtaaacggggcaatacaatcagtgctttcgaggctaaagaatgcaaacagcaaataattgtggtacaaaactaaccatgtgggtggaactgaatataactagtgtaaagaaaagaaaaactaatgggagcaacatgtaactggttcttcaaattcaattgcattaatgcacaagagggcattcatatgaccaagaaaaactgggaaaaaagaacacgtctaacaaggatttgcatgtgtgtattcagccgcagtgtatgtataaaaagattgctaaataattaaagcaagagattcagtggtagccattgaaagaaccccggggtccagaatttaaaagaaaaatggggggaat

SEQ ID NO: 2833 - DNA, 793 bp, Zea mays
atgggggtgcacgctaggtgtttgctggtttgattgtctgaactgactgttatataggtgccctgcccgtcggttttggatcctcctgagaaatatatttcgttgatagttcctgcctacaatgaggagtatcgactccccgaggctcttacagaaacactcaagtaaggcatttgctactcctgttgctcaaatgctatgtttatagttgaactttgaactgcgcattgcaatctatactggtaatcttttttagcagctagtgttaatcgttacattgatcactttcttgttttctctctttaatagctacttgaagcggagatcaactgctgacaagtccttttcatatgaggtatgtggtaatctagcatgttatttgcaatttgcaatcctgtttgcagtttgcagggaacaggcaaactctgagcacaaagccttttgtgttttgaaacctatattaccctatctaatttcggaatttgaccggttgtgtcaaggtattgattgtcgatgatggtagcactgatgggacctctaaagtcgctttcagttttgtaaagaaacacaagattgataatgttagagttcttctacttggaagaaatcatgggaaaggtgaagcagtccgaaaagtgagtgttgaaatccctggatatcccttagggctttggatgcaaataaaaactaattggtgctttccttttttttttttgtggaagcatctaatagggaatgcttcattcacgtggtgaactattactcatgcttgatgctgaaggtgcaactaaag

SEQ ID NO: 2834 - DNA, 741 bp, Zea mays
atggcaaggaagagtgcccagtcaatgtcacagttacaaatctgcaaggaagaattattgatttgacacgaaggataagctatataaatgcgaaataaaccaagcaaataagatccttaataacaataacaacaaaggtttgtacattttaaatttattagatacaaatgaacagaacaaacttccagtaagaatgttgaggtacaaaatattgtggcaaaatactcaccggtgtgagttttagtaataattttgaaatgtaacacaaggaattggtcagcaatgagcacagtaaggtcatggcaggtgcaaagtcctccagctcattaacccataatcaagctagcaatataaccattaaccaggttatggtagtagctacatgcagggacacatcggttacatatttgtccttatcagacagtatgtgcaatgaacatgacaagaatgtcagtgtcatgtttcttgtatcagtgccaatgcaaacaaagggagtggtttgagtaagcccctaaaacctttaccattgtccacacaagacaaatggctcgttgcgggagaggtcatgcaccttcctacctcaagagttgactaagaatgtgtagcgaaaaatgatgtcataatggttcattgaaagaatcagtaatgtgtaatcaggatgatctgcaacagccacaactgctcaggaacccttgaactattactgcatgacaaatgatgcaaagatggtctgaaaaccac

SEQ ID NO: 2835 - DNA, 796 bp, Zea mays
cttgcatgcctgcagggacctcttcccggtggagtccgacgcctgcctggagcctcggctggggatggagtttgagtccggtgaggctgccaagaccttctacattgcctatgctggccgtgttggtttctccgttcgcattgcccggtcacgcaagtctaagtgcagtgagtccataatcatgctaagatttgtgtgctcaagggaagggttcagtaaggagaaacgtgtggtcacagctgggaagaagacgaggaagcgccctgcctccatcagggagggttgcaatgccatgctcgaagtgctccgcagaggtgatagcaagtggattgtcaccaagcttgtcaaggagcacaatcatgaggtcgggttgcccagtcgagtgcagtatattgccatcgagagtgatactgtggttgacccttacattggtatggaattcgagtcccttgagtctgccaagacattctactactcgtatgccagccgtgtgggatttgaagctcgtgtacgccagtcccgcaagtcacaggatgagtcactcaagatgctgaagcttgtgtgctcaaggcatcggtaccattctggacgggagagcaatggagaggataccaagagagtacgtgtgatggacccctcgagggatggttgtgatgcattgtttgagataattcggaagggaaaagacacctggacagtctccaaactcatcctagagcatacccatgagctgaaaccagcaccaggcagtagagttcactgtgttcgctcgcaaagtgaggtacttgtcattgca

SEQ ID NO: 2836 - DNA, 762 bp, Zea mays
cagctacaatctaattggtactattagattgcatgatgctacacacaaggtatgacaggtaaaatcatattgttcccaaattcaatatatttggtcatctacatcatcacactccattaggggatgtttagatgctgacctctttgagcttttatcggaggaatctctgcccttaccaaacttcttgattgaccttttcagtgacattgtatagctttgcagattttgctgccctctgaagttcttcgatgactgaactacctcatcaaaagccttggacagtgaatctttagcgactgcatagatttcagcagattttgaaccttcttttgcaaattttaccacatgacagaagagatcattgaaccttgcagttgaaggatcatcacggtcccccctcagatcaatgtaattatcagaggtgtcaatattttttgcatgctttgtccaacgtttcagaatataagcctttggaaggtcatgtactccttcgataatgaaaatccgaagagcgtgtctgcacaagataccacagctctcaaacaggcagcaactacaattcaccgtaccttgatcaggattgaaatagacagtatgtatctcctcatcaccttcatatctgttaacacgatacttgtgtactgtgtcatcctcaagtctctctgcgtggtacccaaaagaatcaacaaattgcccctgaaataagccaaaaattgtgctagtgaatattgaactcccttgtttttctactggtgaggctgt

SEQ ID NO: 2837 - DNA, 738 bp, Zea mays
gcccgggctcctctgagtcgacctgcagctcatccgcgagcagcttctcggcggcgaggctagcctccccatcgttactaacgccgcggcgtactctgcttcggtcgttcaccatcccacgcaggcggagttccagcagcccgcggcgttcttgccgcagccgtcgcatgttgcgtacgtggacttgacgaacgagtacgccgcggacgccactgtcgcctcggccggcggcgaggcggccttccgggcggagccggtgatgatccggttcgggggtgagccttcgccggtgtcggaccccagccggaggccgctgctcacgatctctctgcctccggcctcgcacgcttggggcccggcggccgtgccgctggaggcacctggcgcggcggccctggacgcgaacgacttccgcaagtaccgcggcgtgcggcagcggccgtggggcaagttcgcggcggagatccgcgaccccaagaagcgggggtcccgcgtgtggctcggcacctacgacaccgccatcgaggccgcgcgcgcctacgaccgcgccgcgttccgcatgcgcggcgccaaggccatcctcaacttccccaacgaggtgggcacccgcggcgcggacttcctcgcgccgacggcgccgccgccgcaagccgcggcaacgtcccagaacaaacggaagctgatgcacgacgccgaggccacggccacggccggtgccggagccggagccgagccagc

SEQ ID NO: 2838 - DNA, 752 bp, Zea mays
tttgtggactgtgtcacctgaatgttaagagagttcttaagatcagcaatctgagtttgcatctccatgatcatctcatcacgtttcttgaggtgctgtcttagcttctgtatgacctctcttttgccataaatgtcagatcctgattctgaaacacagggagagccagaactgttagagtactgaaatggccttcgaggatcttcaagccgatcaggtgaggatatccacataacaccgctgttctctttgcttgattctggtgtgggtatcttgacaagtggaagtgaggattcaactgatttgggtacaggacttgcaggtgtttgcttgacttccactccaccatttgcaagccctgcacatggtaagaggaattagtaataacaagttttgggaagaactttcataccaccaacaaaagaaacaataatgaactagtgtaaaatccaacccaacaactaaatttattaattcagttcaatcaggcatagcgaaagcaacagccagaaaaaaatatatgaaattatcggtgtctctaaatataaactcgtatccaaagttagaaatttggtagaatgccataatcattaactcagactattactttgtggatatgtatgactcttatgaatgcaaatggcggagacctgcaatgccccccccccccccaaaaaaacacacacacacaccccaaagcacacaggcgggagagaatgtacatatcctatagacgtatcaggtacacatac

SEQ ID NO: 2839 - DNA, 835 bp, Zea mays
cccggcgttttctctagagtcgacctgcagaagctacgtcaggcggcggcagcagatgctgctgtagaaacaagcagcctatcactatgctattagtgctgcatgcctttcttctgtaagccatatgtcattattaattcttaatgttgcgccatgcaggtatatcttctttgtaacattacttagtatccctgaatcaagcttccatgtggcttttaagatgtttgaccttgaccacaatgggtatgttatcttccagctactggaccccgttcatattctctagaggcttctttgtgcatctcagcatctggtccctcttttcttattttaaattaattagctctgacccctttcaagatggatgtcatattctcacttactttgtttggaatattttcgactagtcatatcttgtctggacatactggtgttaaatgactatggtcatatgtacgatcttccacacctaatgatatctggggaaaatgccatcccatgtctcttctgatggcacttgataacatttggtatataaagcttccgatgtgtccccactggtaaaatggcgcctccacggattcaaaggaagcaccagatctcaacaaagatcaaaccaccaaatccctccaccctgcacccgaattttttataacagcatttcatagtaatatccattttaaataggaacccaggtatatgtgagttatcgcattggaacacttaaccaatgcaagtctctactctgtacagagcaagtatatcaattaaaaccatgaacgcccatagttctggaagaaaatcagatagagtaaaagaaatatccgacattgct

SEQ ID NO: 2840 - DNA, 831 bp, Zea mays
agatttgaccaggaaaaaaatgcaagttaaaaaaaatctcgtgaatggactaggcataatgaggggggtaccacttaggcttgtggtgctaaaaaatactccctatgtcccaaaataaatttcgttttgacttttaatgggtttatacaatacttgatgtatgtgttatatatatatatgtgtctatattcatcatcatctagttgaatatagacatataaatcaagagctaaaacaaatactattttaggacggagggagtattgttttcactgaatcctttaacaaggattactaatctttattctattatggtaactcagatgctggtcaagaagtagaatacaatgaaaataatcactaatctacaccaatgcaaaatgagatgcacttgtacggtaaaaacattgaactttgaccttgtcaaagttctgtttctccaagacaaacacgctatatagtttcaaaacaaagaaactctatcataatttgtgcgtttaaaatctggaatgaattgtaatttggtagtgtgagcatgtccctactctttctacattccagaatttgcagtcttttccaagtacaaataatctgtttctgattctccacaatttgcttctttatagaaagtatataaaaccaaatacaactctatacaaaataatcagcaaacttacatatagcatagtcatgttcatcaacattttctagaaaataataattatttgtgacacaaatttctttcctctaaacaagatttgttgggagcctcttgaagaaaattaaggaaagtaaattattcacaaaaatgttagtttgatttgattccaa

SEQ ID NO: 2841 - DNA, 805 bp, Zea mays
caactgtggcacagccggtctggaaggagaccgcagcaatagtcgatttgagggcatatagcagtgaagaaaaagcaggagggagaagttttgggtggtggccatgcatctggataatgggagaagcaaggtgcgccaagggagagagcattcacacaagagacagaggacgagcagtggcgctgggaatctgggtccccattaaatgtatccatgtaggttacccaggggagggtacatgggctggctgatgggctgggccagctccttcttactcctcccttctccttttttcttttttccctttttcctcagccacatgttagaatttgtatggcactatggtgtagcctttcctcgccttatcaccgcctaggcatcacatagacatttgctaagtgtttggttcgccgaaatgtaatgtaaatggattacacgaggtaatggataccgatacttatgtttggttgagttctttctagtaatactaggtactaatatccaatccaattataactagtgaccattaccgccggtaagggatcccattaccattcccttaacaatatatgaaccaaacatcaccttggaagaagctggctcgctacaactcagccatagcaccttaagaaccatgattaaaattcctctaaagtaaaacacattactccatagaaaaactagaaaagatgaatttatataaggttttaaaaagaagagagaacaaagaccacaacccaacagctgcattctgaaactttccattacaaattgtattagatgtatagaaaaatgaggagacaaa

SEQ ID NO: 2842 - DNA, 786 bp, Zea mays
gcttgcatgcctgcaggacgtccaccacccgtcgcccaacaccaccggtggctccagtaaccagcaccacatctgatgtttccattttctttggcacttcactagaagcaggtccagtgaaactgctgatgatagattctacaatctacacaaatctccatcaagacttagagaacgtcaaatcacaaactcaaaattgaatgtagcatgacagggaacagaaaacccagaagttggagacgaaaccttgagaaggtttggaggcccgttgaagaaatacagcgtcttgacaaatctgccgatgtcccaaggttgttgcccggcaaaagctattacctctctccgcgacaaccgtgacgacgcacggctatacgtgatccgtggaaactgttttgagcccaggaaaagcaccttctgatttgctgtcgtcgtggagcagctagcagctaaacccccctgatgacaggggacaaaaaaaataaaatcaaaattactgattccgtttcaaatctttagataatctagcgtcgtgcgggtcactggtcaacctgacttcagcaaaatggatgagaataaaatgaaaaaaaaatgcaaggtcccaccgagatttgaactcgggttactagattcagagtctaatgtcctaaccgctagaccatgggacctttgatgtccacaagccctagcgatattagaaaactaataaaccaacggcctaggctaaatccattccgactagcgattttttggcggataactatagcgcgctggcgaaaaaggaaaaaa

SEQ ID NO: 2843 - DNA, 723 bp, Zea mays
cattgatggctctaccaaggcgcctgaagagcatatcgacgtcaagaacggcgataagacagtgaaggaaagcaactcggagtacatccggcgggctgccttggagcagcaggtcctcggcttcctcatcacctccatgaccaaagaagtcatgggtcaggtatcatcctataccacgccccaggaggtgtggaacatgctggaacagacctatgcattgcagtcccggtctcccgggcaagaacagtcaacaccaggattgcattggccatgactcgaaaaggtaacttgtctatttctgagtatgttgcaaaaatgaaggcacttgcagatgagatggcatctgctcggaagcccattgatgaagaagaactagtctcctacatccttgcgggactagatgaagaatacaaccctgtggtctctgcccttgttgcacagaaggattctgtctcatttggggaggcatactcgcaactcctcaattttgagagcaggatggctttgctgtatggaggatcccagccatcggctaatgttgctgcccgtcgaggtcgtggtggttctggtccgcgtggccggggtcgcaatggacggtttaatcctggtcgcagcagcaacagcaatgcgccaggagggcgcagatctgatgggaacacaataacatgtcaggtttgtgacagaactgggcattctgctcgcaagtgctggtcccgatatgat

SEQ ID NO: 2844 - DNA, 807 bp, Zea mays
ggttcgagggcaatccttaccttcctgatggatgcaaaggtcggtgttgcaactgtgtgtgtatcttttttggtaaatgtgtgcaagtacagcaaagaattcctcaaaagaatatatgcatacagtatccttgagatctatatactctgtatgtatgtatgtatgtatgcagacattgatgagtgtgttgctaaaccacctccatgcgctggatgcaagaacaaacctggaggttacgattgtccgacacccttgaacattacggcgctactatcagtgggtaagcacagttttctctctatatgtttgaggcttagtatttcagagcccatttaattctcatgagacacactagggaataaaatgaaaatccacaaaagctgtcccaggacaggacaggagagcatgaacatactaccaaattatttgacacaaccatataagtataaggatccacatgtgcacattgaaagtttagggtacaaatttacaagtttaagaacctagatatgcagttcaggagtttaggaaccagtgttatacaatgctaagtttagagaccgccaatgtattttactcttactcttttaatttatacgattccgatagattttattattaattacaatataggcatttgcatcctgatttataagtttatctctgagtaaaatacatcaacagcctttgaccatgccacgttgtgttacttgggtcacttgaacttagaaaaaccacgaaaacaggtcccttaaaatttgttgacttcgtgccaaaatcctccaccaccggaatttggcttcaacc

SEQ ID NO: 2845 - DNA, 781 bp, Zea mays
ccgcgacctcctcgagcagcgcggcgtcgctgtcggccttgatgcggccgtcgatgatatccccgagcctgcgctccttcatggcgttcaggaagcgcagcgagaggctccgctcgctctcggggccttccaggttgaacgccgtgctgccggtgagcagctccaggaggacgacgccgaagctgtacacgtcgctcttgtccgtcagctggcaggtctgcatgtactcggggtccaggtacccgcaggtcccctgcaccagggtcatgaactggctcttgtccgccggcgccaggatcgaggccccgaagtccgacaccttcgcctcgtagttctggtccaggagtatgttggacgacttgacgtcgccgtggaggatcggtggcgacgcccacgagtggaggtaggacagcgccagcgcggactcgagggcgatgcgtatccgaaccgagaagggggcgctgcgagagccaccgtcaccatggatgaactggaacagcgtgccattggggatgaactcgtagactagcatcgggacctccacttcgaggcagcagcccaggagcttgacgatgttcttgtggttgatctgggagaggatgagcatctccttgccgaactccttctgctgctgctcgctggccatcgacgagacgcaccgtttaaccgcgacgacaccgccgtccttgagcaggctccctgtagacggtgccgaagccaccgcggccgaggatgttcttgtcagcgaagttgtcggtcgccctcatgagctctgcttctg

SEQ ID NO: 2846 - DNA, 843 bp, Zea mays
cttgcatgcctgcagtaggttcttgtgaaggaacagcagaagaaaaagatgtagtggcagtttctggtaatgcagctgaaggtggagttgatatgttcttctctcttctctggtacatggtagtgataggtggtttcatatattgttttgttgcactcttgggctgaacctgcccctgttcatgcacttgaagctgctcagtacctatctcctgcattctgacatcagagaccacactaggaacaacatcatcaattgcattagcctcagtaacatcaggcaaagtgtgatcagctgtattaaaaatgcccctattgtcaaggttggatgaaggaaataaggtagaaggcaggagattaatttgtgctctaagacgtgctccagcatttgcatgaagttcagcaaagggaaaaatgtgctcatcaaacacaacatccctagagatgtagacacgaccagtagagacttctagacacttgtatcctttgtgcatattgctgtagcctagaaagacacatcttgtagagcggaaagccaattttcgagtattatagggccgcaggtttggccagcatgcacagccaaaaactttaagaaaattatagtcatgggactgtttgaacaactgctcaagaggtgtagagtaatcaagaagtttcgtgggggtgcgattaatgaggtatgcagctgtggcaaaagcctcatcccagaacttaagcggcatggatgcttgagcaaggatagacaacccaacttcacaatatgtctatgtttgcgttcaacaagtccattttgctgatgcgcatgtgggcaggacacataatgaatgatgccgagtttagt

SEQ ID NO: 2847 - DNA, 693 bp, Zea mays
ataggctagtcggaaaccggcccaggcccaggaggacgcccaccgcagactctctgctcgagaagatcgccaagctggacctcctgactgagatcagcgcgatccggagcaggtccgacctgaacttcagagggaacgtgagggacgccgtcgcgttggacaggagcgcgccgccggggcccccgcctttgtgctccatctgccagcacaaggcccccgtgttcgggaagccgccgcggtggttcagctacgcggagctggaggtcgcgacgggcggcttctcccgcgccaacttcttggccgaaggcgggttcgggtccgtccacagaggcgtccttccagacggccgggccgtcgccgtgaagcagcacaggctcgctagctcacagggcgacgtggagttctgctccgaggtggaggtcctgagctgcgcgcagcaccgcaatgtcgtcatgctgattggcttctgcgtcgagaataagaggcggttgcttgtgtacgagtacatctgcaatggatcgctggacacacacctttatgggaagataagattgtcttctctgattgatgactagaactagaagcattgctcctcaactgtttccctctctagaccgtaacaaagaaacgctggagtgggctgccagacacaagattgcagtcggagcccgccagaaggcctgcgctaccctc

SEQ ID NO: 2848 - DNA, 782 bp, Zea mays
ttgcatgcctgcaggtacactgcctccagcttcgagcaaggcgatggtgttcccccctcggccggggtacggaaccgtcgggcggaggtgccaggtgcgcgccaaccatgtagaagtcaagctcggggacaaggatatctaccactacgatgtacgtacgcatggcccctatctgtgtcttggtgtgctattcttggcttcagcgccttgcaaatagtaatccaacaaaaccctacatgtttcaagcaaggaaccacaaatatcatcataatttgcatccctaacaagttcaagcggtatatgtttttgtttcgcaggtgacaatcaaaccggaatcgacctcaagggcaagaaatagatggatcatcaaggagctcgttaacttgtacaagcaacacttggacgggcggcggcctgtttatgatggaagaaaaagcttgttcacggcaggtccactgccattccaatccaaagagttcgttctcatgctaacaaaccatgagagaggaagacaagggtgtgtttgaatcccttaccatccaatcaagctctatgcaatccccattatgtttatatatgtgtgtttatttgacaacttgcagcgagaaagagtataaggtggcaatcaaggatgctgcaagaattgatatgtacagccttaaaatgttcttggctggcaggaatcgggatctgccacaaaacactatccaggctctggatatcgctttgagagaattcccaacttctgagtaatacatctacacactcatgcaaaagctagg

SEQ ID NO: 2849 - DNA, 825 bp, Zea mays
atgttcctgacttgattctcattcagcttactggagtagcgttgtccctgaactatgctgcaaacctgcataagtataaatgatataataacatgtgaataaattgatatatctaggaggttgatatatttattcatgcaaatagttgtccaaaaaaaggttagagttatcgaattggcaaataaaaaaacataaaagtgcaacctctataggtaaatagatctgcttgtcaacacggccagcttgaaggcatggccagtgagtgtattgtaagtagtagttatatcgttgtttaaagtaatgcacaactgacacccttgtgccttcttgatcaaacctgtatgcacaataagaaagatataatgtgattgcataaatggaatgcaacaagatatatagtagaatagatacgtcaaatcctttaatggagttgaggttagccccgtaatcctgtagtgaatgcatttatcttgcatatggttggttgcaacccagaccatcttaagtgctttcttcagctgttttgcaaaaaaaagaactcatcatgatgcgtggtgaaataatcatacagataataaaatgagtatggtaagataaatgctatatagtccatacttttatgcgatcctgatcagaaatacgttttgaagtatcacgaaggttcagatattccactacgaagtcaataacaggttgagccttgtaaaatgacgttgccgaaacatctgtgaggaaatataaatttcatcaaaatcagaagtaggttttcaacaacgaacatatcttttaataaataataacacaattaacaacatgccatggagc

SEQ ID NO: 2850 - DNA, 738 bp, Zea mays
ttgcatgcctgcagtaaggtgcacaagcgcatgacctctattgaatatatgatacagcccctgcctgtcaaaacgcgctccatgtgttcgtcccatgtttcgtcgggttgtggctcgtggtctctgtcgatttaaacggccctgtcccaaaggggtcctcgtcgtcgaacgagtagccccggctgttgtagttactgctcttcatcgaatcaaacctcgcaaacgtgccgatcccgtcatggtcgctgctgctgttcatggaatcgtacctcatgaagctgttgcccccaccctgatctgaagtgctgcggaaagaatcaaacctcgcaaaagtgtcattcccaccgttgtcagcattgctgctgaaagaatcgaatctcgataagctgtcgcgctgtccaaaggaattgctctcgtgcatgccaaatgagctgtattgggacatggtgtcgaatgaatcgtctcctgcttcgctataccttggcgtgaagcttgagttgtacattggagtactcgggactgaagaatcgaagaatcccttctgctctttgccatacatgctgctggcggtaggagattctgctctgcttggcccagaatcgaacagtgatctctgcattggtgtgcttggaaaggagtcgaagaatggtttctgcgtcggcgtgctcggaacagagtcaaaaactgatctctgcattggtgtgctcggaacatagtcgaaaactgatctcttgcccg

SEQ ID NO: 2851 - DNA, 759 bp, Zea mays
tccttttgcgttgcgcgccgccctgctcaccatatggcctgccagggatgaacaggcggaggcagagtaacggaacggtgttttgtcatcaaaccgcgtgtgtgcgttatatgtattttgtatgatgatgatgaaagtgggcatcacgcagcttgtaacctactttctgccaaacgtacggaacacagtacagtttggatgccggttaaacacggctcccttgcaatgtttaacggttagaaatttatatatttttatgtttagatttattaatctaagaaaagcacactaaatttatgacgatactgttaggatgtgtcatctacacactagcaggttaacagtaaccgggtaggattaatcttaaccgtctaaccgcgccctgatcgggggctatcctaaccgttggttgcatcccacggtcacacaacgccataaaaatagattaaggggccgacgagtttagctaacgctaatcgctcgaccacaaaaccttaatcaatactttgagaggaaccgatctcctaggcgctcggagtgactagaatcgttgtgactatgtctcagatccctatcatgctatcgggatatgagattcccctgcaggcaatattggaggagcttatccaccgccgatcaacgatgggaaccaatctcctcgacaccccgcaggagatcgataaggaggagggaggcgggtcctcgctgcaagacgccgccacaatgatggctaggaacaacaaccaccatttgtatacc

SEQ ID NO: 2852 - DNA, 735 bp, Zea mays
atcttgcatgcctgcagtgcattgtgtcagtaactcagcgtttaataactgaatatacaagtctccctggattgtcgttttcttactcagtcaagtgcagtgtttaggtctaggatttttgcatggggtatgccagataaagattttcatatctaaactggtaaaaactatttagcaattcaacaaagtaccataacaattgctccataatttggtatacagatactaaatatcataatgataaatcttaaattagtaaatagagtaatcaaccagtacgtcctgactaatttctacaaatcctacatcccggctaatttctatcctacaatcaaaacacatgcataagtaatcaaccaatacatctacaattctactacgcacatgtggttgcatctatatcaaattagatcagagaaaactggggttagagctgtctcactgagaaagttagggcagatctggtgcattgggtcattagattgcgggttcgaagttgtagtctctccgcatttactgggagaaggcttgccttgtttattccttccctagaccccactcatgtgcgagtctctagcactgggtctgcactttttaaagtttgggttcgagattttgagaccctgcaacaaagaagagaatggagaggaggggacttcctagttctcaccagaataccagatgtcttgtcgaacctcctcaatttctcactccgttggatagtgggctcgggga

SEQ ID NO: 2853 - DNA, 738 bp, Zea mays
cagcttgcatgcctgcagcgacttctatgatcccaatcgaatattttcccctctttcttcgcaggtggagttctattttagtgacagcaacctcccccgcgatgggttcctacgcaggactgtcgaggaaagcgaggatggatgtaagaattatctcgtcctcatctccaatgatctttcttgttcatgtcgctctggtgctaatttggtgctgtctcctttttgggtgcggggctgattggttagtggtgagcttggctctcatctgttccttctcgcggatgaggtcacacctaggtctcgaaggggatgcgaaaccagaaacagtgccagaggagaccgtgcttgcagttgccgacatcttgcgccgttccacagcgctccgcgtatcagaggatggtaagctcgttatctctaccttttcgtccatacgatgcagaaatcgtgtagtagtatttagttaaaattgattttgaattaagatggtgtagaagcttaatttcatttagcagaatatggcaatgttccatttccattttcagcaatgtcagaacaatggccctttcctgaattctgatgaatgttcgacttagccttacattataactatcactgaatcacctggtcgcatactaatatggacattttctgcatggttcaaatgaaaaatactcactttagttggaatgttgtatacatcagtaacttggtgcttatatcctgtattaaggttcagta

SEQ ID NO: 2854 - DNA, 747 bp, Zea mays
tgcagaatagacggaccaagatattagaccacaggtaaagcagctacttttctttatttcaagtaaggctattgggttctgcaacacatgatcaccacggaacctctgacataatgcacacatctaacagtaacaaatgaattacatagacggggtgggggtcataaaggtacaagaaagtgtctgcgttaagcagtaaactaaagcctgaagagttggataaaaatctacagcccccaccattacggaaagtgacatcttttacagacatggaaataaaggcagggtggtatggtttaatgaaaatcatgatatttcgatataatataccagctaaaaatgtgaaatatttgaatcccatgatttccaccaacggcaataaattatgggtaccctgagggcatatataacaaaagaccaaatctctacacacctatcatgctgttcaaaaaaagcaaccaagcaccatacagcttaaagacctaccagcagcataaaggtttggttcatcattactaaaggcccattctactgaaatgtatacagcggaaacattagtgagggtaaatatggtttgatgataaaaccttttgcaattgtttgtaaccttcctcaactgaagctgcaacgttctgtatgttgtagtctatccgatcgatgatggttccctgtttgaaataagaattaagaaatcaagagtctggtcccaaccagttacctaaaaccaatatagacaattaatcaggg

SEQ ID NO: 2855 - DNA, 963 bp, Zea mays
taacatctgtcctaaataattcattttagacttttaaaaatttatacaataattgatgtcatataaatacagatataaaaaacaaaaactaaaacgaatagaataatttaggacggagggaccatatagaaaacctctttgaactcggtcggtggttaaaagctaaaatgtgaaactagacgtctcttcaaagatgctcgatcgagctgaaatgctgaatctcaacatcttcagagcatctgcttcggtctaaaagaaaaagaaaaaaccggtataccgtatacaccggaccccaaaccaatcacagccaagtatggaaaattataatctcattccttcttttaagcaacacgagaacataacttaacctacaccaaattccatcggagtactctaataagccaaatattaccggtgctgaatttaaaaaaataatactctctccatcccaaaatatattttattttagactaaatatacattcattaattaaactattaatataatttatatgtagctctgtattcattatcattcaaacgtggagggaaaaaagaccagaaagaactaaattttggattggaggacgtataataacacgggtaccctgaactgaacagtacccaaaaattcacatcgaatctctctgttcgtgattcttcttcagtcttccacgctcaacatctcatctcatctcatctcatctatctattttatagacagggtaccagggaacgcttcctcgacttcgctccacttgctaccgatcgtctctgcctcgagtccgtcaatctcgtagcgcacctcctccatgtgttcgtttatgctgctcacggcaacctgcacgccctgtatggcctccttgagggccgcgtcatactccgcatccgcctcggcgtcctcggtgccggcggcctccgtgatctccttgacgtgcacgcacacgtgctgggccatgctgcg

SEQ ID NO: 2856 - DNA, 1289 bp, Zea mays
ttgtggatgaaataggttgctgctttgtcttttgtgcagcttttaaactaatgttttcatttgttgtgctgaaggcatcgttcacctgttaaagaaataaagagagaatatatttgcaaggtaaattgaaacctgtgtttgtcaatgttattgctgaaatcagttgacatcgttagttcttcactagcctccttgatgcattctgatcttaaggttccttggttctggtccatcttccatcttcatctattcttccttttaccagtctattaggcttgtctctctctcctggtacagaatctttcctttctttttcttgtgctatgggaagtcatgacttcaccaaaatttgaggagcgttcgcgtctaccttgatctttgattgcacaagagtatatgattgactaaccatgaatgattgtcttcctttttccggtctcttcctttttttatttaatgtttcatcaagacatttttctatgtacaattatgggattgtttcattttgcttcctgctgtgaacttaatgctaactatgatgttatttgcaggtttttccatttcgcttcgtggatgatgagagggattatctgtgcttgacaaaacggtatcccagacttgcagttactccagaattttctaaggttgggcattctgttcatctaccttttgttgctgatcgatattcaacttggcttttggcattctctgtcactctaatttgtataatttgctgttgcacagattgtcttgaactgggctaaagaaaacttaaatcttcctctcgatacaccagtgaggtattccttttatttatgaacacattactatgcataaatactgttatacatgtgttccttcttggagttctcatgtttccaattaactgtacaattggcactatgatacaattgctgtgaaccagtttggagcatgatatccatgattcagatgataatgctgatgaaggagcaattatctccactgagaaaacaccaagcttcaatactccagccaccatttggaatgcaaaggtctctatctacagttttatatctgctttttaggaattttgttttttctgtatgcgtttcaagttgtagctctagtggtcagtagataagctgatctggagtaacttgttatactgtcgtacattgtatacgtgaatctgaaggaaacatatggcatatagttttaggtctgtttggatgttgccgaagaccacattatttgaaaatcacagcaatatttatggcattaagaaaactgcaggtcgactttagagg

SEQ ID NO: 2857 - DNA, 1373 bp, Zea mays
ggagggtttaaggccaaacctggacatcctcttagctttgggtttcttcgccagggccttcttgaggagaacatgctgctggtggttcaacggggccatgtctcttgtatctcctctgccggggagaactccagccaaaactacggggaaaagcttctgaagaaaaaaaacaaaaaaactctggcgcaaaaatataacggagacgagcgcaaatcggtcgaatccgtcagtctcctctacagaaacggcacggccttgaggacgaatccgtcagtctcctctacagaaaccgcacggccgtatgtggaggaatccggaatacttgaccccgaacccgtccctgcaaccacaagagcagatttttttttgtcaaaacccatggaaggagcagccacgaactccccagatctggacgaacagggccacaaaacccggtcaaaaacctcccagatcggcgaaaacacggaggaaaaagagagcggggggcacggacctgagcatcgacgaggatttgttccatccgttgagccccttgcgcatagatcggctggagcaggcgagggagcggaggaggaggaggaggaggccggcgacgacgggggcgatgagcgctacgacgaccagatcggagatggggcaagaaggcatatacgagagctggctacttcttctttcttctcctccgacgccggcaccgtccgtcgtcgtcgcctccgtcccggcctccctgaacactcgcttaaaccccgacccaaagcggcgacaggagcaaaaggggcaggccacgcccctcgtccgccgatatttattaatcccccattcttccccatcctgtaccgcccgccccgcccgccgcacaacgcgagacctttcgcgtcacgcacgcgtccgggatccagctccacacactgccgaaacggcccgaagcttgtccggacccacgcgtcattggaagattatctgcctaacggaaaggggggaggagaggacggccgcgatgcgctggcgctggacgtactataggatctgccaaggctgtttgttacgcacacagtgatgactcgtggacccaggggtgccgctggcccccgcagtcagagtatgggacgtgctggttccctggtgaagaactgttatgcacgctcctcaggctttcacgtggggccaatgtatttggtccccacctgtcatcgagacagggacggaacgctagtggtggtggtggtgcgtttttggtggggtttatgcgatgtgaatgggcgacgcgaggacgggacggccatggaaatgataaaccttcggctacacgcgtccaaggaatgttgtgctgtttcgttgacagttgggacccacaaaagtgacgggcctacttc

SEQ ID NO: 2858 - DNA, 1206 bp, Zea mays
tcctctgtgtcgacctgcagtcgccctaggatcatccatcctatcaggtatgacaacattttccccactatttgtgtctcattcagaacgaatccagctaacagatactacatctataatcccagtacgccaaagaacgtacatatatttattgctagtgcctcatttgtgtctcactcatcaaatgggaaaaggtgtcaactgtcaagagccacaaagctacctgtcgttttccctgaactaatctctaaattggagtaccaaatggatggggtggtggcccagtcatcaaattgaaaaagccgtaaaaatgccactaggctacatatcgttttcccccaaatcagtatcttggttagataattagtagacgggaacgccacatatgcagacatgctattagaaaacttctgtgaagtggagaagctagtagtgcagaactttgcccaaaatatctacgtgctcgccgactgatttgcattaccgtgaagaaaacaaatgcgacggaattatcactgcgcagcgccctgattcccggagacgtccagttccacgaacaaacagagctcaacgacgagaccaacccatctctacctggcctgccaaagcaatcatccatacccccggcgcttcctcaagagaagcggctacaagagccgattttcgctatcccgatcccacgacgatttccgaacgggacgactccaagccgcgattcctagtacttattacagcgggcgattcttagtccttgttacagcgggcggcttacctcgcctccctccctccgcgagacgatgcggaggccgtccttgttcacgcgcagatccccgtccgtgaacgtcccgctgtgcgtcctgtccggaacccactcaaaggttgagagccccagtaagtaaccagcgccggacaattaactaaccgacagaaaaggaaaaggaagccagcgaggagggggagcggagagcgtacaggaacttgccgatggtggtctcgtgggacggcagcgtgagcttgatcggcttccgtggcgtcgccatcggaagtgcgtccggcggcggcggcggcgggttcctcttcctcgccggggctcggaggaaggcgaggcgagtggacgggctggtcggtcgtgcagcagcagagctggcggtctccttgggaagtgggtggcaccttcttctcctctccccagcgcagctgcgcagc

SEQ ID NO: 2859 - DNA, 1207 bp, Zea mays
acgcacacacaggctggccttgggcggcgacgcatgcacttgcgttttgcggcgcccgccggacctcgctgtgtggccacggtaaagcaagcatctcgctcaccagggcctatgggccttactagaaggccactccagatgggccagaccgacccctaaaagatgtgctcagtcatgggccttttcttttatcggaaattggggtttcgtcgagtttgtaggccggttcagcaggcagcgtagcgagaccgattttttttggggggggtacatgaagagccaaaaaaaaaattttggtcatgattcatgaacatcttcgacttctccagcttctctctttttggggggaggggacatcacgatttctcctgctccacaaagcgacaaaggatgaaacctacctactaggtgttcttgaatagtgggaacagttcgacggtcagcatccagattgcaccctcttggtccgggttgtccccatctccgtaacgcctcccctttgtacttccccccgcggacggaccctaagcaggaatatatactagtattgatctgagctactagctaccgcactggcgttgtttctttaagcatatggaacatgttagttagactgatcagcgcgggccggtgtctgacggtcctcgacgtcaaatgctagtatgtttattcgatgtcaaaaaaaaaacctgggcggcgaagagagttgtgcgcagctggactgtacgtctgtacgcgataagtatgcgtacgcccctgttgacattttcattcatgtacgcgtgcccgtctatactatacgactttgtccccctctcctccctcgcaaaaagtccatgcagctttattggttctcgcccccgagatacgacgtctaggcactatcatgctgctctgctgccgtttgaacgtctagctaccactcgaccactggtgctctcctttctcggtgctgccgtcgtcgaaagagagaagcatcggtagtagcatcaaccaacggccccccagcttttttttttttttttttgccccggccggtgacgcaaacgtatcgctgcaaagcaggaaagctggggaaggatacagcggcatgagaccaaaaacacgtatctttcggtctgccagcgtgcggccacccgcccacccccacaagagattaggcaggcggattggacgagacgagggagagcacagcagaccgacgctg

SEQ ID NO: 2860 - DNA, 739 bp, Zea mays
tgcgggtggtggtggcgaacttgaccttgttgcccctcgtcgtcgaagcagtactcgatcgatcatccttcggaggccgctcgcgtcgggcccgacgacaaccggcggcgggaggaggccgaggtcgttggcgccgtcatcgtccgcgagctcgccccactggtactttccgctgctactgcttcgccaccgccggatctcccccgcccgcggcgtgcgttagagctttcggtggttgccgcggcggtgacaagagtacattgtatccttcggagagcttgggatatgggctatacagagtggcctatgggctggctcaagtgggctttgcctaggaggatgcaggctgtgactttatcaatggatgtatcaaagcgatattggaaggcttcggcccagtttcaaaatggttggggaactgtcgaactgatgatgagtgctgcttttgttgagttccaaaaagactgatgatgagcgctgctgttggtcatttccgacaacaatactatgacggtccattttctcccgtgattgagagaagataaaatagagcaacatacaccaagatggaaacggctacaggaaactactagaaagacccgacccagttctactgattcacacttgagagagagagagagagagagagagagagatctacatcgggcacgagcagtctacatggatgtcccgggtacgttttgccctgatgatgagtaaacaaatggttgacatccgt

SEQ ID NO: 2861 - DNA, 1141 bp, Zea mays
ggggctcttccacatccttgcctcccgccccgggggcccgcccagggtgaggctcaccggcctcggggcgtccatggaggcgctcgaggccacggggaagcgcctctccgatttcgccgacacgctcggcctgcccttcgagttctgcgccgtcgccgagaaggccggcaatgttgacccggagaagctaggggtcacgaggcgggaggccgtcgccgtccactggctgcaccactcgctctacgacgtcactggctccgactccaacacgctctggctcatccaaaggtaggaaggagtacaccatctctcgatcctgacttccttgctaccatgtcaaatcttgatgcaatcatggccacttttcagctactaacactttagtttagccaatgcgacatccagtacaactaatctaaaaaaataatcttcagaggtttcctagtaaaaaaaacccgcgtttttggagctcaaaaagcttgtcattatgaccaaccaactttctaggcttaaaaaggttgaatcttggcaatgcttttgagacgatgctgtactgaagtactggtagagagagtatcctccatggcctttgttgatcccagaaccacaaaagatagtatttcgctcgcatttggttagtggaggtgttctgatcatcacttggaggatggagctgaaagttcctatcatcatgaccaactttccatggcaaaaggtttctagttccaagtggcaggacgatgattactgagtgactgaatggagtaactgtcatcttctaccactaaccatcatttattaatacataaatcatcatccggagcctaaactcagaaaggctaatcaaaagtgcaatctttctcaaatggctgccatatgccagtggtacatgcctggccattgtactttttcggtgaaccatctcgtctcaagcatgagatgaaggcctgaactgcaatgtccttgatttgatgcaaccattattagaagaaacgctaagcgatgccggagtcgtgtccgtcctggcaagggcaatgccatatcgtcagacagacagggattcggaatcgaatggctagctggtgacaaatcgcacggggattaataaactacattggtcattgattccatcccccacaca

SEQ ID NO: 2862 - DNA, 1264 bp, Zea mays
cttttgctctgtttttgaacctctggtttgaaagcttgacatattcgtctgcgtcgtctcgtttgcagtttgcaccatgtctcgtctttgatttgcggctgttctggtgaaccatatcagcagagctgaggattgtttggtcgatggaaacgctgatttgcggctgctctactgcacgttgatgaagcatataaggataaatgaggcttttcgtcgatggacgtcagacgtggcttcacccgtgactgtgatcctagttgggccaactaatatctcgcggtctcgtcctggtgctaactgataaatcgtaactgttgctagatactctgtctggctcaattggggtttacaaccacaaaatatacataccatcaactgaacactaatgatgtctggatttcagcttagccatctggatttcaaaaatgctatcaataattcacaaacccataccatcaatagcaactattctcgagtcaacagaaccacaatgatctggcaccaattagtagctcagaagcggtacaaaaataggattctggcagggttagatataaatcgaacagaacaatgcggccatcctacaaatcctaaaaaacggccattgtctctacgcaagcgatggaaatgatctctctcaggcagcacgtggcccagtacatctcaccataggcgactgtggtgttattcagccacacaggcagagtaatcaccgcaagccacactaaacacatctatcaagcagcagcaggtttgcgcaactcactttcgccatgggcaaagtggcacctgtctccaaaggtgcaggagcctttgttgaagttctcgcacaacttggtcttgaagttgcttgcaggacccccagcatgagaaccaggccccctgcctgggttgttctttgcttgtggaggcaccttaccactgatgcggacaatcaactctgtgaccattgcgctagcgtgcttgatctggtcaaacgttccctcgagctcgatgtttttatggttgggatcagcctcattgtcccggatggctaacttggccccagtcactcgggatatatgctttgtgttgataccactcttcccaatgatggcgccagcaagggatgcatcgacactgatcttggctgtggccgaagcaccgaatgtggagtgaggaaccatgtctgggataggcattggaggtggcatgaagtgaccgtttggccctggacccattggaggagctcccatcgagagtcctctgcaggcatgcaagatgc

SEQ ID NO: 2863 - DNA, 1358 bp, Zea mays
aattacagtgaacagtgagatctgaacctccgagaattttgttattgtccttcatgtacttctcccagtccagcgacgactcctcaaatcagcttcttcttcatgccgccatttgccacaggtcgccacgccatggccgccacatccgccacagccgcagcagctgcggcgctctcccacgtgctctataaagaaaacgggaaacaaacaaaacaattctacaataggccaaaaaatagacgaagaaatatgagaggaacacgacataccggagcaacgcgagggaccgtcgaactatgcatcagatgccgccactatgcgcaaaaaggaaaccataccggagctagaagaaccgaggagctaaacaaacctagagcgggggctctacaaccagccaaacaaagacggcgacacgatgacctagatctacacgaaagcaagaattctatctacaattgaatgctgaaagtatatcaacattcatcaaagtgagtgtatttgtttatggtcgaaagatggtgccacaaaataaaacatcactgtaggaaaaaaacaggataattgtaccatgaaaagagcaagaatgggcagtaaaacccaccaatccccactgcccgtttgtactcatcgcttcgatccagtgctggaaagccaacttgagggccttgtcatctctagataacccctagcccacctattacaagccagcaacatgagcagtagaggaggctgaaaaagtctaaaaaaaattggtttctaattagcagaagggaccatctgttggcttcacacaaacagaagttccatcagctatgtgaaaaattattgtaaccttactattacagtttcagatatgaaaacaaaaaacatctacaaacaacctcttccacctgagtggactgtaacagagtttttgctgtttcataggactgttcaggccattccaccactaaccatagaagaggtaccaatacaactttcaaaacatgggctagctgattcaagtaatatggttgctgtggccgaacagaagtgattgtcacgattatcagcacctttttcacgggaatgtcggattctctaatagcaagtgacgattaagcaaaatccacctcatcatccaacaatgcaggaactggagggctctcttgaatctgaggctcatcgatcagttcgacctctttctctactaaaactgcctccgactccttcactctggtacccaccgtttcagtctcaatcacaccctcatggaacagaagcatcttgtttttagatactattttcttgtaaacatcgacagagaataattgtatgatcccaatgaaaatgcctaccatggaaaagaacgacaaaat

SEQ ID NO: 2864 - DNA, 1296 bp, Zea mays
ttttgttgacagcggagcgcaatcgactatcatatcaaaaagttgcgctgaacgttgcgggtatgattataatttagttgatttgagctgcttagattttatatttgcagcaccatggtttttgtgattttcagcatggagaacataatattacgtagcaatcagccaatcatagggggtgtttgctatagctctgcttcactagtgaagtagctttgctggaggagctgttctggaatagatctgctggtgcatttgaagctgtttttctagaccatttggtaaaacagcttctcatgatagataaataaggcaaaagggcctctatccgagttggttaggtggtctgggtagcactccttaggtcctgagttcgaatcccagtggaagcgaattttaggctgaggtttaaaaaatgttactcgttggttcccctggtcgtgtgcacacaagatggactgacctatggggggcggatcctcgtgtaggggctgggagggcttaaatcacgagtaaagatctggtctataggggatgaaccctcatgttgcacgagggattaactttcgtgacctttctcggtcagggctccgattgagcttcttcttaatataataccgtgggagcggtcttttccctaccggccgagtttttttgatagataaataagatgaaattaccatactactactactaactctttttctctctctatttttcttcttcttctccatcattctttttatatctcctcatcctttcccagccgctccattccgaggaggtctgtccttgtgtctagccatccttggctacccggcggccatacgcctggcagccctgcgctaggagctccagcgaccccacgccagcacaacttcttcacgttgccacgcctcccctcgctgtcaccgcgcgcgcccctggggcaaattcgactatgctcacatgaggccccacggagacaagtgagagcagggtgaaggtgcctttttcagctccacctcacacctttgacttgtgtgagcagaaaaaaacgggacttcacatgtggagctgcaacctccctaaccgtttggctgttgttcttgtgagactgcttcgggagttgtcccaggagcggtaacaaacggcctcttagtttataaagtacttcctccggcccaaaataaatcaattcctagaatcacccttagccaaactattaagtttgaccaacttcataggaatgggtatgtgcaccaaataagtacattacgaggctgttgctttgaattaaagctagttgttcggact

SEQ ID NO: 2865 - DNA, 1025 bp, Zea mays
tcaaggcgtttggatggcgagacttatgtcagagctcatgggaagccaagctacagcaccggtgataatggtggacaaccggtctgcaatctcactggtgaagaatccagtattacacgaccggagcaagcatattgagaccaagtatcactatattcgacagtgtgcagaaaacgctgaggagaacaaggcaatttctgttgagccgatcagcacaggagaacagctggggggttatcttcaccaaggcactaagtcgtcacagatttgaggaattgcggtccaagattgggatgcaagaaataagaagaggacagcaagacttaggaggagattgatagataactcttgctagtccctgttgtttgagtttcagtctgagtcaagttagtcagttagctagtgttcagttaggcgtcattcagtcaagttagcgttcagttagctcgtgccggaggttgttcgagctgaacgagtcacaccgagaagagtgggcgtcgtgtcgatcgtggggatggacacggctgtgatggtggctttgatgtatctctgttttttgttttcctggtattaatagagtccagaaaacgctgttacaagcaagcagcaccaaaactcatctctcacagtgcgctctccgttctctgttttagtgagttcgaaagccgtgagatcctgtcgatctgtgtcatcaataggcagggcggtgcaggtagattaggcatggggactcacccggtcttccgtcacggtggcactgatccgagggcggcgtaggagggagagtcgggagaaaaacgtcaacgccgacagcggaccaccttcgcttccccccgccccggggcccacacccgcctctgcgatgccaggcttcgccgcgccacccgcccttatcgcctacaccgacgtccctctcctcgcctctttctgcttctggcgacagcaactcctccgggcccagcttgtcgccattactgtctgataaggtactccgcgtgctaaacctttgcctgcaggcatgcaag

SEQ ID NO: 2866 - DNA, 1311 bp, Zea mays
tatttagagatctcgacaaatcgtcttttaattctgaacattccaagcctgctgcattacatgagaagactgaccagctaagtggggttggcgatgctgtgcagaacactgtgaaagatacctccaaaatggcacctcaaccttctgcattcttgccagctcctgttactcagaccaattcatactccttaaggccgactgtttcttcttcagccacatcaggtgcgaaaacttcggatgttttatctagttcaatgcagaaagtttctccaatagtacctgggggtactgtgtctagctcagtccctactcctgctaaggattcatcaactggattgagtcaaaatgcttccaaacctgaaacgctaatatcaaaggtaactagtaccatagtttctgcaagttcgacttctgtcatatcagtcactgaaagcaaaccttcagtgcctccaacaactggcgccagcttgccttctactcatgtctctgctcctcaaacagcaccaacaacatcggaatcagttttcacttccacaggaaaaaatgtaggaccaaacactgacaccatctcaaccgatgaagatgacatggaagaggaggcaccttctgcaagtgccgaactgaacttgggagcccttggtggattcggccttgggtcccagccttcttcaagtcctcaaaagtctaatccttttggtgcctcctttggtacatctggcaataaaagttcaggcacaccatttactttgacaaccagtccaggacagcttttccggccagcgtcgctaagcattccttcagctcagccagcccaaccatctcaatcaactagttctagttctttttctaattcgttctcaagtgggcttactggatttggacagcctgcacaaattggatctggccagcagtcagcttttgggaagcctgcacagattggagctggtcagcatgcaggatttgggcagactgcccaaattcaatctggttttggccagcctgcccaaattcaatctggttttggccagtcagcacaaatcggaactgggcaacagtcaggatttgggaagcctgcacaaattggggctgtccagtcaggatttgggcagcctgcacagtttgctgctcaacagacacttggatcagtgctgggttcttttggacaacctccccagttaggaggcataggttctggaggatttggtggattttcaagtgcttctacatctgctggttttagttctttatcttcaggtaatgctggatttgctggtgctgcatcaggtgggggcttttcagcaccaactgctt

SEQ ID NO: 2867 - DNA, 1029 bp, Zea mays
tgcatgcctgcagatgctcatgagtcccggcaaggccaagaagccattgcctcccatttggtcagaggtacgtacgtacgtacgggtcctctgtttctagtggatggaatggaattcagcatgacctcctctgttttgttttgtttgcaggtcctgaggttcttcgtcaacccgcacaagcccatgatcctggcgctgtcgcggccggaccccaagaagaacgtcaccacgctgctcaaggcctatggcgagagccgccacctccgcgagcttgccaaccttgtaaggataagaatccagcttgtcaatcggtaatgattctcacccaacttctgctgagctaacagaaagaagataccatgttgcagacactgatactggggaaccggcatgatatcgaggagatgtccggcggcgccgccacagttctgacggcagtgctcaagctcatcgaccggtacgacctgtacggctgcgtcgcctaccctaagcaccacaagcagaccgacgtgccgcacatataccgccttgccgccaagacgaaggtgcgccgtccattcattcttttttttttgaaacgagctttttatggctctgcttttaagaaagcagttaacagttcacagacagcaattccactgctgggacaccagcttacagtgtcagagcgaagacaactataaacctgaaactgggagagcacagctccatcccgccctacacgagcacctttgctaagaaaatcgaacaccttctggtcagaaccaccagaaaaaacaaacatgaactgaacactatagaacagaaaccaacacacattgcacacagctccctaggcccaaactcctctctaacactcatcttccagactacaagcaccttcaagacgaagaagcaactccagcagacaacaacaagaacccagatttccaaactagctaaaacccaagctcaggactgtgagagaaccaccccacaaaatcagatgacgccaatttctgacgctgactcatgcttcggttgatattt

SEQ ID NO: 2868 - DNA, 710 bp, Zea mays
ctctagagtcgacctgcagaaaaagttttcacttcgctcatcaagtagaaaacccaaaaaccaagactagttatgaagaactccattaaaaacgtccaagcaagaaacaaaaaaaaaagtgctgggggaaacaagagcctcaaatccacaatgatgtgcacatctttgtacatgcagtatgcttctgaagtagagattagtaagaaaaaatttgactttacttctcttgtaaaagcacaccccacccatgtacccttaaatttgctgcctggtgaggaagacaggaagtaccgtgtcatatcctgatcaaatttgctactcaaatcagagttcaagtttaatcaatagtccaatcagaacctccaggtacccagaatggtgagctgattcatttattaaaagggcagacccagtgacggaagctcccacatgagggcttcaaaggggattggaggagattaaatccctcccttaaggctggtttggtggacagggaaatggaggagatccttgggggagggatccccttgctattcaatttatcaaaattgaagagaaggggatttattacccctcactccccttcgatccagatgcaaccgaacaaggccaaagtgaggtctgaaaaatagataaaccaaaacaagcctttccccgcaaatgtgggagagactgctttgtgcccctggggactaaatgagacaggtttc

SEQ ID NO: 2869 - DNA, 971 bp, Zea mays
actttcatcagacaatctcaaacatcttgatcttatgtctcccacagcaggcccgcctaatacaaagaggccaacactgaccatcataacagatttgacacacgcagatactctacaatatctcaaataacagggaagtgaattttattgtaggaaaatcagaacctaccaagcacacgcacaatctcagcagtgcttccaccatcatcagaaacagggagcacgtgcgcgactcgagtagtgactttcttcaattcttcaacaacaccgttaaatgctgtcccgcctgaatcaaactcaaaaatgcagggcaattccgaagtccccatttaaccatgagttagctttctgtggcagggcagcgacaaaagaaaaacagagataccacttgtctgtttgcatctatcaatatttttgttctcaagcaattcacgacatccatcagctagactatagcactacaacagatcatgtatcagtgcatgaaaattcaccaccatctcacccaggacagcgcacaaacgtgctttggagctccctagttctctagtaaagaagcagtagtaatgtattggcaactctaacaagtaacaagatgaaccaatcatgaagttcaacacaggtgggaatctcatgcatggccagctctcttaaactgctgctccgcattacattgatccaatgctaacccatacgcgcgcgcgagggcgcgttcacataggtcgcccatccttcaacggcgttaggttcccccgttctcctcagaacgaaaccacactcgtgacaggcactcaaccaggggaggttcggttacctgagaaaacgagcagcgacgggggcacgtgaggagctggagcgcctccatcggtgtctgcgcctgcggcagcagagtgccagccttcgtagacggccatggcgcggctgcggcggagatgccacggcgggggcctggacgctgcaggcatgcaaaa

SEQ ID NO: 2870 - DNA, 1055 bp, Zea mays
cttgcatgcctgcaaagcactccattaagtagcagttgtcaaggaggtcatcctcgttggccgcgtggatgcccagagcagcaagcatatcaaacacgtaggagaagtccctttcttccgtattcctaaaagcatgggattcccccgtctcaggaagtgatcgacgtgctgtctcgtcatcactcaatatagaaagctcgctgccatctctagtgtctgtagtctccctcttcagaagcccaagttgcaatctgagctctgcaatgtatacaataaatcaaacttgcgtaagaatgagaaggaagacaggttggtacagaagaattcgatcacttgccttggagatctgcactgatcttctcaaaatccccagagtaaacatcttctccgtccatggaagattcaagaacagacattggactttgctggtcatctttgttggagttcgctggcgattctaatacatcaggtagaatacaaagggtttcactgacatcccctaggtggtgattaatctcctcaggagaatctgatgctatatgaggatcataagtggctgggtaatcatcagcttgatggtattcaatttgctcatgctggattgaaaacagttggtagttattaagcatgacaacgaaagatcaggcaaacccccaaatgacagcaaaagatatatggtaagtgtgcacatgtttaaatcaagagataagtgtttgtcaaaaatggtggtgtgcacgtttcatgattccagcacaacacacggtgagtgcaaattaaaatggtagataaaaaataatgaaagtaccttggaaccttaatacacaaacaaaccagagaaaatatcaaactgtttgcacaaaagaaagtgcacacctaattgaagacttgctaaagggaacaataggaaagaataatatgataagcacattagtaccttaggcatcaaatcatcgagattaggcacaagaaagcagttatctagtgctgttgtggtcatcttaagcacttgctggtcctgttcagcaggagaaagagactttttattactgaaaggg

SEQ ID NO: 2871 - DNA, 1331 bp, Zea mays
ctcgtacccgggtgtatcctttagagtcgccctgcagtaggttatgtatcgttctatactcagctactgtatcaacgtctctctttttttcttccccctcccacgtccagtccagcacgcagaatccacagaatggaaagaaaaaaacatacacatgttactgaagcagactatcaggtgttatttatgcatatatctgtagcgatatcatatcacagctgttcatattatggtaagcgtctccaaaatggtacagcggcaaagacagaacacaggcgatgccaagcacactcaccaccaaccatcaggtaacggccgagatcgagcccggtgttgcgaggcggcaggagtactcactatatacaaaaaagaaaaagaaaaaaaaagaaaagaacaacgcatctcatatgtcaaaacactatgcacaaacacaccactctcctgcaatccaagctcatctcatctgtgccatcgacgatcttattctcagacaacctcttctactggctccatacacctacaagcatttttgttataataatacctgctgactgctgcacctgcacgacaccagagctaaaacggaggtatacatccattttttttttaccttggtggtggcttctcctctacaccttcaaaactggcaagacgtgcccagcctcggcatcgggcgctggccgacgccggcgctgtgcttccgggtgcggagggcgctcgggagcagctcctggaacttctcgaggaacgcgctccactccttgcggctcatgtccgacagcttcacgaaactcgcgctgggcgggagcagctcgttggcgctccggctcccggactgatgctcgctggctttgccactgtagttagttctacctgtcaccttacccttggggacgccacctgtacggtagggtttcgatttcccgatgaagccaagccccttcatggacgacgacagcttggagatgggaggaaccttctggggcaatgcaccactggtcaggacgtcaccgtgctcgccctcctcttccgacaagtctccgtcttcctcgtcacactcgtccagcttggatagtggattcctggaacttgtcttcacgctgccaaacttgcagaaagctggcggttcgaaggcgtcgctgtcgagagggaactgggtgaagtcatcatcgccgtcttcaactccggcttcgtcgggaagaaataactctctttcctcgacccacttcctcgtctccatgcagagaagctcgagctggcttggttcctcttcctttgctgtgaactgcctgctcatcatgtctcctatctcagacaggcagaggccgaac

SEQ ID NO: 2872 - DNA, 1236 bp, Zea mays
aggtgaaggaaaagagccacatcgtcagcatacatagaggcccggtgaagcttttttctcactgatagctgctgtaataaacccgcctcctcagccttaatgaacagagcaccactattttctattcctattaacatggaaaactacttgtgttacagaactagaacagaggaagatctaagtttgaataaagttagggtgttatggacctgatatacctgtgtctgtgtctgtgtcagataactagaactttcctataacgagtcagagaagccaccacagctaaccagaaagcatatttttacataccaggccagatcatttgtgtgctacatccagcttgcttcagaatttattaacgttgtattcctgttcttaactagcttcagcaaaacttgccctaattgactgctcttccatgctgacagaaatattgcggaggacgcggtcaatattacataaactgaaggaacagatcagtgacggtactccagttattggagctggtgctggcacaggcatatctgcaaagttcgaagaagctggtggggttgatcttatagtgttgtacaactctggacggtttcgaatggctggaaggggctcactagctgggctcttgccctttggtgatgcaaatgacattgtacttcaaatggccaacgaagtgttgcctgtaagtagctcagaatccaacatcactctgatgtctgtcaactttattgtgcacaaccattgatgtagatctaacttcaggtggttaaaggagttcctgttcttgctggggtatgtgctacagatccatttcgtcgaatggaatactttctcagacaactagaaaccattggattttgcggtgtgcaaaacttcccaaccgtaggtctgtttgatgggaattttagacagaatttggaggaaactggaatggggtacaggtataagttctacacattttaaacttttggaagtgcaatttctccatgcattattgttgtcatcgtgaagcattgcataatggttacggctgtaagttttttttttttcctgaaagggaaggacactctggctagaagttgcattaacttgattatatttattgtcagcatggaagtggagatgatttcaatggctcatcgcatgggtttccttactactccatatgctttcaatccggatgaagctgctgccatggccaaggcaggagctcatatcgtagttgcacatatgggtctgacg

SEQ ID NO: 2873 - DNA, 1128 bp, Zea mays
cagatagcctacaggataaaaacaaaacacaaagcatggcaaattcagtgtcaaccagagataatgattttatgctgtcccagagcaaatgataagatgcgggtaccttgttaagataaggccacatcaactccaagaacctattcaaccaatcaatctagagatgaggaagaaaatgagaatctaaaagcactaatataattaacatagtttattgctagttcatcaaaggagcatactctatcatagtcaggattcttgacccacaaaggaatttcgggaaggatgccctccaaggattttgaatcatattctacaagcggccggaccttgacatcctgacagaaaagtagggagaaagaaaatcattcccataactccatatattatagaagcaagtgaaaaaaaacagatggcatatgcattcagcatattaaaccacttgactcaaatccttgcaggtattacacaaaccagactgcaaaatataacaaaaaacacccaaactaaatactgtgcaagtgcaaaggagtaaagagtcatatatgtctccaggtctccatatccttcatgaaatggcccttacctgggtgcgtgcaacatatgccatcaccaagcaacacattaagttaggaagtaaacacaaacaccatggtaacccccacccccttgccccaagagtgctcgatcagtataaaaggcatgaaaggcaaattgcagatgcatatgtagaggtctatagcatacatatgttagcaacgctgatcagactgtgtagtaataatgtgatacacaacaaaaaaaaagtaaatgtattcaacaaaggccagctcgtctttgttgtcttaacttcagatcaagttgtctacagatctctcaaaaaataatttggaaacatatcagcaaaacagttgtcaacaatccaactattcattatacagtagtgaagaaaaattatatacagtaagaaagacagaagaccaaaaggaaaagtacccaccttgacatcagttggttgtacgtagatgaagaagaagtaaccaattacaatgccagcagataacccaaatccaaacccaaagaaaccaagcactgtgctgattacacccatcttggatccttccaaaa

SEQ ID NO: 2874 - DNA, 1317 bp, Zea mays
gagggggagcttgaacacgcggcgcccgccgccgatgccaacggcgggagggtcgtacaggagctcctcctggcgccgtgcatcgtcagggtgcggcagccggagcctccacttgcggcacgacgcgacgaagacccgagcgacactcgagaagatgctgccctcgggcggcacgtagacgtacagcttggtgccgacgaggaacacgaggaaggcgatgagcatgagcgcggtggggatggcgaagccgaggccccagctcaccttgacctggacgtagagcacgacggtgagcgccaggaacgtggccaccatggcgacggcgtagtaccagttgtagaagcgcgcgaggcctccctgcttactgtgctgctctttcctctcgtcgaactggtccgcgccgaagggcaggccagtcgggctcgtgccgccggcggacaccacgagcagccccatgccgaggtagagcacggctcgctggagcgccgacggggcggcacacgtgccggcctgctgtgccagtgggctgcacggcggcggtttaagctgatggacagtcgccgacagggtgataactgccattgcctgtgtgtgtgtatggcgccagccagaaacaaacacacatatcagctaccgaaccgatcttcattatatttggtccaaaaacaacatgcaagacagaaacttacagcaactccgaacacggtcccaactagcagggtcttgaaccttccccagaaggcgtcggcgacgaaggctccgatgacgggcgagaagttgtacgtgccggagaagatgttgttgacgttggtagcggcgttctgcttcatgttgtagcggccgatgaggtagctggtgagggagaaggagaaggcattgcccgctatagatgctgccgcgtagaaccctgcattccaatgatcgcgatatgcacagttagctcctcccccgttgtgtcaggtcaggtgtggtagcaactgaagaatattctgaatatatatgcgagccgacagaccgatgatgaaggcgacggctcgccaccctctgggcctccgtgtcgcctccgccgctcctcctccgccaccgcccgcagcctcttgctccgggaccgggaggccgctgcttagccccgccgactgtggccggcgatgcgaggccatggatgctgcttccggccttccaccctcgcacatgtttacccggaacccagtgccacgccagagatgagggaaatcgatcgatcgccgcctggtcgagcacgagcaggcaggtgttgtgtgctgtgcttctgttgcagtggaggagatttgcatggca

SEQ ID NO: 2875 - DNA, 1117 bp, Zea mays
agcatggcggcgtacgggttgtcgtcgaagccgcagtgctcgtcctggtcgtggtcggagagctgcggcaccgccgccatcgccggcacctggcagctggccttcttgtagatccggcacagcacccagtcgtccagctgcacgcaccacaccacgcacgcgtacgcgcgcagacgatcaataataatccatcgcacaaataaaccaggaagaagaggatatatcatgcatatatatggagactaaaatataatcaatgctacgtacacaaatcgggacggtgcggatgaatcggctatcgttatcggatcaattgacttggtgcaagcagtatgccaagtatgcctaaagaacatttctttattaaagaaagaacgccgcgccaccacagtaccacacactaaagcggcccttgcgtctactggcaagccacaaaaccgatgcgataaagaaaaccgacgtacgtgccgcgaacccgcatcgtcacaaaacatcgccaaaaaagataaacagatcagggtgcaagtgcaactaggggggtgcatcgatcggtgattattgcatgcatgcgcaagcggtgcaactagctgcaccatgatgccgacatatgcaagagatagaactagcttctagatgtcatttttgttctttgaatctaactcggtttttcttggattattgtatggcaagagggggtatggtttaaatcagatgagtgattaacaacgtacgtacgtaccctcatggaggcgttgcggaacttcatggggcggtaggcgtgcgctgcctgcgcgtcggcggcgaggcggtactcgtgcatgatccagttggtcttggtgcccttgggcggccggccctcgtagaagacgagcgccttcttgacgccgacgctctcgccggcggtggtgctgctgtggatgggcttgtcggtcccggtggccttccagtagccggaccccgccgcgcggttcggccggatcccgttcgggtacttgcggtcgcgggggctgaagaagtaccactccttgtccccgtacgcagccctggctgcaatgataatacagtacacatcaattaataattagggcaaaatctatcggtgttaaaaaagagagtt

SEQ ID NO: 2876 - DNA, 1213 bp, Zea mays
agcccatcctgttcctgtccccctcgagcaatcgagctctacagctgcacgctcgcttacgcggagacacagacgctgagacacacgcaggtcatgatgctgctcatggactcggggagccgcggtgactgctccccggtctgcttggacctcagcgtcggcctttcgccgccgtcgccggggagcggcccggaaacgacagctgacgctgagagactcgaccgtcccgccactggctgctgggggccacggacatcgtccctggctgacgggaaggaggaggtaactaactgaccgacgaccatttcctcgccgctcggtttccacaatctatcggcgtcgtcgtcgtccctgaaatcctgaaaatctatcggcatcggtggccacaatgctgtgtgatgatgacaggccaagaccctggaggccaggctcacccaggtcagcgaggagaaccggcgtctcaccgagatcatcgcctacatgtacgccagccaggtcgccgcgcggcggagtcccgacggcaggaagaggagcagggacagcctggagccgtcgaattcgggcgacgccaacgctgccgtcgagagcgccgccctcagcgacgagggcacgtgcaggcggatcaagctcaccagggtctgcaccaagatcgacccctccgacaccacgctcaccgtcaaagacggctaccagtggcgcaagtacggccagaaggtgacgcgcgacaacccgtccccgagagcctacttccgctgcgcatacgcaccatcctgccccgtcaagaagaaggtagactcctggcccaccatccgtccatccccggcctgacattgattcgattcacggcggcttctttcactctgtcgctaatggtcgatacaataactctgttcctcggaacaggtgcagaggagcgcggaggacagcgccatgctggtggccacgtacgagggcgagcacaaccacccgagcccgacgcgcgccggcgagctccccagctccacctccatcaactcctccggcccggccatcacgctggacctcaccaggaacggagccggcgccgtgcgggggctcgatgccgccgccgaggtgcccggcctcaagaggctgtgccaggagatcgcgtcaccggatttccgcacggcgctcgtggagcagatggcgcgctcgctcaccaaggatcccaagttcaccgacgcgctggctgccg

SEQ ID NO: 2877 - DNA, 1092 bp, Zea mays
tcggcacccgcttaccgctagacccgacctgcaggagtcctgctggatggagatgttccgtcttgtcgcgctgacaaaccgaatagccccgcacataaatcctgtacccgacgaagtgcctgctgattgtagaaggacactatgaaacggtgcagcgtcttctccatgtccagagtcatggacgaaggacagcaactctggccacaaggatgatccgtcgggaatgaacagtttgcctcgaaacagcagcaacccatctgtctcagaccagccagcaggcgtagtcccagcggccagcttgctgcgcagtgttgcaacctgggaacctgccactgcctcatcgcggagggtgtcaaacaactcgaaagttggtgaagatagggtgtggacagcagccacctctttattctggcgagatagatcatccgcagctccatttaatttgccaggcttgtatttcacctcgaagtcgtagccgaacaacttgctgacccacgtatgttgcgagattatggacagccgctggtcgaggaggaacttcaggctagtggtcggtgttgatggcaaatggcctcccccatacgtacggtcgccaatggcgtactgcctttaccaaaccgatcagctcacgttcataggccggtagcttttggtggtgttgagccatctgcctactaaaataggcaatggcaccatcggcttcttaggaccttttttttctattcttaatataatgatgcgcagttctcctgcgtgttcgagaaaaaaattccttccctcagacaccagccttccagcgtttcaaaaaagccggttcaacaactgggttgtggcttttggctggtagaaacaaacagggcctgactctagtatacccaggaatttggggcctatttggtttcctgcctaaggcaccacaacttgcataacttttctgcctaaggttagttattgaattcgagcgactaaacttaggcaagttgtggtgctttaggcaagaaaccaaacatgcccttaataaccttgcatgttgtggctgcaagcaaaggcaaaggtttctcgacgatatggatttcagaaaactgaaagata

SEQ ID NO: 2878 - DNA, 1109 bp, Zea mays
tgcatgcctgcagattaatgaagctgaaaaagaaaacaaactgtatactgtagtcgtttatcttgaaaaagttcacacctgcaaaataacaggtgaattagataagctgcttcaaacaaagtacaattttgttaagatggtcattgttggataccctacctatgatggatccgaaaatgacaaatacaatcagatacactgtagaaaaaataaggaagtacatataatatataatccaataagggccatccccaagtccatgcattttcatcattgttcggagtttgtgttgcttctcatatacaaggtaggtcagcataacctgaattatagttcaagattttttctgttaatgtaatcatgaatggagtttaaaaaaactgtaatgcattacacattgatattctgtgtatttaatatattactcgcaaaaagaaaatcaactccaataacgtcataccggaaaaagcaagacaaccacccattcgaaaaacagtggaccagccacagcagaaaaatcaaatgtcagacgggtggcttgcttaggcatttcttttgtgaagtcgagcaacatttttacacccgaaccttgtattagttggagataggcgtttgatacctgttcagatgtcaagatcatgtgttatttgagagttctttgattgcattgaaaaatgagcaagtaagagtaaaatgtaactttaagagaaaaggtgaaatcattttagcgacaatgagattagttccataattaaatatgttaaacagcagataaagttataactgaaacaaacacaaaagcaaatgaccctactaatgtgttaacaaatattaaaactataaatgctgttcatgctcatcaattcatccttatttgaaaaggttagaattttacaacagaaaatcaaccttttcagtgggttaataggaaaacaaatatgagaaaatttcagttttatatcagcaaagaaaatgacacgcaccgcattcaatgagtgtggaatgcgcagaagtgcaaatggcattggaatgaaagaggcattctcatacgttgagttatacaaagtaaggacattaaaatgattctcgtttgagtcttgaaaatcata

SEQ ID NO: 2879 - DNA, 739 bp, Zea mays
tgccagtcttcttggtactgaaaagataagtgatgaaaccacatcatgtgctatgcatacataactgtaaaatagttatggacagctaactgtaaatcaattcaccttatgcatagctgttgaacaaagctcattggcagaaatccagcaatgttgtcctgtaagtgctactttaccaataatcctaacaaagttggaacttggaaatgttacatacagtaaccgcagaacttggacaaatataattagtcacaaacgtgtgcattcaacattaactgaaagaaacttggtagtatgcaagcatgcttacccttctccaagagggtacaaatggctaggcattctcatcagtgctgcctcaatggggcaaaatggatagcttttcttgcaccacgaagaaggtattgtctgattcttacgaacagtggggctagcagatagatctcccatttgcctgtcttctatcattttattgacatatccatcaccccaagtcaagatcctacgaaacatatttaccatttataaaagtgtgagatgaagatatacaacaaactttgttgaacaaagagcaatttctcaatactaagtttgtgctcatccatgccaacttctagtatagacttctggctaatgttctcattcagtttcaaccatggcagttctagttaaaacaatgactatgttgtggaaagtacttgagcatacttgaagatcgtatgctggacactagttactc

SEQ ID NO: 2880 - DNA, 1080 bp, Zea mays
ttctgagctcggcacctgctgctagctgctgctatatatagacgcgttttggggtcaccaaaaccaccagctgatcaacagctagcttcattcctctgcctctctctccctccttcgccaactggccatctctgttgtctctcgctagctagctcgctcgctcgctcgccagtcaccacacacacacacacacactgtgtgtctgtgcctgacgccgccccccagtttcaaacgaacgacccagccagaaacgcgcgcgcgccaaagctacgtgagtgacgtggcagcatggtgagcatgatcgccgacgagaagccgcagccgcagctgctgtccaagaaggccgcctgcaacagccacggccaggactcgtcctacttcctggggtgggaggagtatgagaaaaacccatacgaccccgtcgccaaccccggcggcatcatccagatgggcctcgccgagaaccagctgtccttcgacctgctggaggcgtggctggaggccaacccggacgcgctcggcctccgccggggaggcgcctctgtattccgcgagctcgcgctcttccaggactaccacggcatgccggccttcaagaatgtgagtgcctgctagcttactcattcccaggcaggcaggcagccagccacggcatgccgaaccagtctgacctctctcgcgcacatgaatgcgtgattcccgcaggcattggcgaggttcatgtcggagcaacgtgggtaccgggtgaccttcgaccccagcaacatcgtgctcaccgccggagccacctcggccaacgaggccctcatgttctgcctcgccgaccacggagacgcctttctcatccccacgccatactacccagggtatgtgtgtgtgttgccttgtacttactcgtcgccgcaagtacttgcagtagggaacgtgcaagtggcggcggggcggcgtctgggtgtcgccgcgatgcacgttactgctattaaagtagtagtagtagtacactaatagctaggcccaccacagcacacgatgacatgacgaacgatggatgggaacggctgctgactgggcctgcttgct

SEQ ID NO: 2881 - DNA, 743 bp, Zea mays
aaaacattttgagatcatcatgagacttggagagctcgactaactgggaagacaatgtgctcacatttggtggatcacaccagcctagttttctttgcagatacatggaacaggaatctgcactaagaattcgcatttttgatgaaacaagccacatctgtgatttcggccttgtgatgactggaggtgctatgatatcttcggatatgaaccatggaagtcctttgagcaatggtgcaacatgcaccggacaccaagaaatatttttcagctctgaccaaaataaatcttctggcatatcataattgaaatttgagaacaaagatacactagtttggtcgcatggatcacacacatccccgtgattgttaggttccaaagtttcactaatttcagatgcttccagattcccatcctcaagaaaagtttctccgccctccatctttgaagttttggactcaagaatgtttagataggcaagtagcttttgcccataatcaaacgcatcaccttgtcctgaattctgcaccagtgaaactgaccttgccatgtcaagcaaagtactaaacccgaaatttcttttcaatccaaaactacccaacaattcaattacttcagtcatcatgaacttttctgaaggaaagaaagtatcttggtgcagcaacttcagtaactcgggcacacgaggatcatagagcctaatgagaaacccaaattttagaactaaatacacaatggcatgt

SEQ ID NO: 2882 - DNA, 1110 bp, Zea mays
ttcatcagttcagggctacaggccggccgcaggggctcagggccctgcaaaggtgaacaggtgcccgtgtcacctgtgcctgggtgaagagggaacagtgggcgcggagagcagcaggggggcaggggctctctttgctcgcgcgcacggtggtcgggtggtgagccaacgccaacggaacagctcgctgctgggtgctccctgctccgggctctgcgccttcgcagcatctggcggttctggccaccccctcaattctttgtctagctaccaaacaaccatactcctcctcctcctacgcctggtgcgctcgctcttcggttagcgtgtgccagtgagggagggagggctttgaaaagtgttcgcgtgggtgctcgtcctctccactgcacaaaaccttggattttcatccgtgtccgcgtctggggttctttggccttgggaatgtaggtggagcgtggcaagtagaggctacggcaataatggcgtccacgaacccgatatggagctcagcttttgttttaggtctccaatgtctcacgagttcgcgtactactacacactacacagcgagcggcatcggacaccgaagcgtgcatgtgcccgccgtcgttttgtggcgagacgagcgtcaagcgagcgacgaagatgatggcttttattatttaacggttactccttgcttgtcttctttagctttattaaacaagcgacgaaggttacaccttacacgcttacataccactctagctctctgtagcggtggagggtcgatttgtgtgttcgtttgtgtgcgctgggcaccaaagattcgtcgcctgaggtgggagtgggatgggatgctgtgcagagcgagcggaactttggcgcggaaaagagctttttttttcgtgaggatctcgcgtacgattctggagcagcacttgaaggaggcccggccggcgtaggtggataggccggcgcggcggtggcgcgtcatgtgtcgagcgtaaaagccgcctggttagcggtggcggcggcggcggcgggcgggcgggcggcacgcagacgcagcagtctctcacaacacacgcacttgctgacttcgcaaaagctgaaaagacgagcgag

SEQ ID NO: 2883 - DNA, 1274 bp, Zea mays
tgcatgcctgcagcgtggtgagcagcagcatcacgatggcggcgaggaacgtgagcagctgccacgagctgaacacgtacttgcgcatgaaccgcttcgtcttgacgcgccaccgcgagttgtagtagcggttcacctcctcgacggccctgtccacgaacgccaccttggtgagccgcacggagcgcgacatcccgttccacagcttggcgacctcgccgtcgctcttcatccggttcagcaccaccccgcgccgccgcagcagcgccacgtcctcgtcggtgtcgatgatgccgttcatcagctccgtgtaccgcgccagcaccagcgggcccgacgccgccgccgcctcgtaggcgaccaggttccggagcaccacctccgtgttgctgtccagggtcacggcgggcaggtggaaggtcaccgtcctggcgtcgaacgcgatggtggacaggtcgcctgcggtggggcagaactggacgccgatgttggcaagctcggacaccgaggggatcatgatctcctcgatcagaggcggccgggtgaggtaccccgcgccgttcgggtcgtgggcatgcgtgctcccgtcggcggcgccggacatgaagtacgcctcgacgggctgcttcatcgccgagaaccccggcacgacggtgagcatcttccacggcgccttgacggcgaacgcgatcggccgcgtcacgtagcgcatccggccggtgctgagcccggacgccatgctggacacggtgaggagcagctgcttcacgtactcgcagccggcgcctggtttctgctcttcgtcgccgccgccgccgtccaccagctgctcctcgatgtcgtagccgtcttcgcggcgactgccgtgggccgcgtcgccggcctccgccgcgccgccgtcgtcggctggcttcggcacgagcagatagtagagcacctcgagcaggtgcgcgttcttgctgacgtcgatcgcggggaacttgtccagcatcttgagcgggcagagctccttcatgagcccggtgaccatccgcgggagcagctcgccggcctcgccgggcgacgcgcactgcggctcgaggatcctgcggaggaggaagagcgggacctggttctccagcatgagcatgtcgcggaggatgaggctgtgcgccgacttcctcccggcgtagtcgacgaggtgctgcatcctcgacgacaccccccgccgcagggccttgccgtcgccgctgccggtggtggcgacgtcgccctcgttggccgcggcgaccgcg

SEQ ID NO: 2884 - DNA, 1247 bp, Zea mays
aaggcgtacgcgccacggtcgtcgccgcccgcggcgcgcgcctgcacggtggccgtcaaacccagcccgaataagggggcgccgctcaagttccgcaggttcgtgccgctctccggcgagatgcaggcgctctactcggctggcgacttcacgttcgcgcccgaggaccccgccagtaagtgctagcatagcagccacgtcatcgcgtagccggctctgtatctggattctggacgcccataagcgcgcgattaatcggatttatatttacggagtatgttacatgtttgttgtttgatgtgaaataattcaccatgtaatgtaacataaatctggccacgcgtgggaaacagaaatatatcgccattttctttccatgcaaagctaaatttgtctttttgataggacaaatgtgttttttactcgaagaaagtaaaaggaaacgtactagacacatttaccacatcgcctagaaaatttgcatgtaagagatcataaatcgttaccactagacgcacagcgtagtagaatatgatgagttggagtagcaatccaatgtaggcgcatgtcaatgtagatcacgattgactcctcctacacagttgtcatcgtagcagtcgcaaccgcgcctccacatagtccacacatagggggaggaacgtcgtgtgccggtgtgctaacaccacatgcgcatcgaaggtctcgtgactaggtatgagaaaagtgacgtttagggcttgcacatgtggtgggatgacataacccaagccccctttccatgtatttatagagcgtgttaatgggctacagcccattaaacctctaatcctagttgaactctaatacgaattgtgtatgatcgcctctcgagaatatctctgtcaatctcccacttgcactacagacaatcatataggcaagttccaatgttccatcctcttaagtgtgtgacccgttagattcatgtgcagacgacaatgagtggaatctttccaaaccacaagtcagtagcgatacctagaggggcatactaattcctgaatgcacataaatatcatatcagtcgaaccttaatacactcacgtactaatccctttgttgcacgatatcagtcaagctcgaggcaagatacctgtcatccttgttacagcttaaccattcactggatcgaatagtagattattggcatggacatgcactttccaatccaactagctagacgtggcttgtcgccgaaccccaacgcg

SEQ ID NO: 2885 - DNA, 1365 bp, Zea mays
ccagagttgctacttggaagcacaaagtatggcccagccgttgacatgtggtcagtgggctgtatttttgcagaacttctcaatgggaagccaatattgcctggaaagaatgaggtagatttttttcagtctttcgtgtgttagtttacggttttttcagtttttcccattaacaaatctgtgagcacacaaggttactggggcccctttgtgttacaccttggttaaataaactagcagctattatgctacctggagaaggtttatgacagaataccaataaattaccaataaatattacgtggactttggaaaaacataaagttccaacgaagtaccttatactcattaaggacatgtacaacaatgttatgtctagttttcaaacaagtgatggagatatggatgacttcgcgattaaattaggactctattaacgatccgctttgaacccttaccttttttgccttggtgatagataagatcacaagggacatacaagtggatatcccttggtgtatgcttttgctgatgatgtagtgttagttgatgaaagtcgggttaggagtaaataggaaactagatgtgtgacacgagactcaccaagaatctagcgttctatatgacaagagagtaccatagaagttagaagacaagtttaataggatgatgactagacttgctatgtgtatagtgcagaatgttagcctataaaaagatgacatgtttagcagataagtgttgcgggaatatgtatgtgcgttggatttatggccatacaagggattgagtctcgaacaatgatgtatgtgctaggctagggtagcaccaattaaagaaaagcttgttcagcactgattgcgatggtttggacatgttcaacggagacctctagaggcaccagtgcctagtgaaattctaatatgtgatagtaatagaaagagagatagggaaagaccgaagttgacaatggaaagatgcagtagaaggagacttggaaggaatgaaatatatccaaagatctggccttgaataggatgcatggaaaacagcttattctcaagtgtctgaacttgatttgtggcttctgttgtttttcaactctagcccgcccaacttgtttgggaccaaaaaaactttgtttgttgttgtattatgtatgctggtgcatccatacaatggtctgccaaatccttgatcatatgcatacactgataagcgtatatatgatccaggtctctagttgtcttgtggcatggttttccttcatggcctttattgtagttacaaactcacttacaggtgcatctccttgtgatgttttgctattcctgcaggtcggctctacaggtcagccgggtaccg

SEQ ID NO: 2886 - DNA, 1027 bp, Zea mays
aagagggtactcctagagatattcacagtttcacgcagagcagatgggttgcttgtcccaagtgcagtcttgaaatggtcatttgagacagccatagagttcagtatctcagcatctatggtctcatcctcaaggtcaataatatccatcttctcacgaatgcattgaagagcagcttcagtacaaagggcagcaagatcagcaccaacatacccatgggtatccttcgcaatgagctccaagtcaacctgcaataggattgcattgtaattgagaatttgaggtcagtttcaaatataaaacagaataaataacatagaaaacaaatatccacgtcaatacgagtatcagtgaaggtcacttacatcttcagccagcttcatgtttttcgtgtgaatccgaagaacctcaaggcggccaacttcatctggaacaccaatatcaatctcgcgatcaaacctaccaaaccttctaagagcaggatcgatactgtttggacggttggtggcacccataacaatcacatgtgcacgagacttgagcccatccataagagtcaagagctgtgaaacaatacgcctttcaacttctccatgggtcttctctctcttaggtgctatggaatctatctcatcaataaaaatgatggaaggtgcatttttctcagcttcttcaaatgcctttctgagattgctttcactttctcctgctagctttgacatgatttctggtccattgatcaaaaagaagaaagcacctgtctcattagctacagctctagcaataagggtcttgccggagccaggaggcccaaacagcaatatgccctttggtggtttcacaccaatagacttgaaaagctggggatgacgcaatggaagttcaaccagttccctgatttgggccatctgctttctaactccaccaacatcgtcatagccaacctcatcgagtctttcctcgtcctccctcttaataggctcaccctcacaaaatatttctgtatctggtgcaacgatacaatact

SEQ ID NO: 2887 - DNA, 1068 bp, Zea mays
cttgcatgcctgcagtactggttgcagttgattctaaagttcgatgttgctcattttttctgtcgcttggatgcatatttacctcgttaatcactgcaacacataacacaaagtgaatcggaaaagttggctagccaagtgagattttagtcattagtttacatatcatgacggcctgacaggttgaagccttgctatccttgacagattatgattttgtacaactagttatcttgttggattggtgacacaccaaacataaaagtacaaatctttgtaaatcgaaacatgtgtaggaagaattacattttaaatagataaagtagaagaggattcaaacttgggtgattgagtgtacatccaaaccataggttctagaagtttgggggattatacccgatcttaaagctaacaagttgattgaaatatttaaacaatgtcatctactcttttcagttactatgttatgggatgcacgtcatcaacgaaatatttaactttagggctagtttgggaacaccgttttctcaagggattccaattttcccaagggaaaatgaactaatttcctttggaaaaaatgaaaatcccttagtaatagggttcccaaactagcccttaaagtttagtttggtcaggggaaataaattcagaaagagagaactttagagggattaagtaattttattttgttttatcgaccaatggttagcttgaactatacgggcagtaatgattgaaatttaaaggagaatagaaattaaaagtaattaaatggatgatccgaatttcccaagttgatgactaatctctagttgatggtggtactgctatttttgtgccttttgtgatggcactagtgagcatgcatgacattgtttatcattttattagagcgacaaaaatgaatacatatgtttgtacgttgatcagcattcaaaaaatttatattgtttcttttgtgaaaaaaccaaccatctcaggaaaaggctaaaactcctatatgtctggctatatgcaggctgccctgtactatgaagaagcttatgctgcacttgttgctcctcc

SEQ ID NO: 2888 - DNA, 957 bp, Zea mays
tttgaagatgctacctgcataaaagattataccgtttattccactcagctgctgcaacacaagtaggcccattcctagctgcgagaggttgcagcattgtcatgagcagacagtttacgaaatgcgatcactaatttggtcccatataagcagataaagttgcaaacctacaattaggggcgtgcggtatttcttctggttcaactcttgaaagctcattgcaccacttttgtttgccgatgctacagctatctgcataaaattaaaaagttgatcccacctccgattccacaagaatgaagcacatggagccatgcaccaaatgttgaaggaaatagtagtaatgatacacagagtgaagactgttttcaaataagctgtatccatccattctagatgagtggaagcaggtgcgtgcctttatatcattcgcttctacagtgatgtcagcgtccacccccctcagaacttgtagagaagcctcgcactcatccatcatattcatccttgcctatggatacaaggggcaaaaaacgggcattggagactgcaatctggcaatgatcattcagagttcattatccagctttttgtgtgtgtgtgtgtgtgtgtaccagccatcttggagattccggaatgaagaacagtccaggtatcaacagtaggcagggcaaggttcctgcaagtgtggcatttcacacgcttcacgacagaaattatctcgagtagggactgaattccaaaaacattcgtctactgcatttgtactatctgagctctttaggagttgctgatcgtgcgagctaagatatcagatcagagagttgaaacgcatgctaagagcagcagcatcaggtttattaatgcatcagggtttcattacctattaacgcaagaagcctccaaggaaaaaacaagccaagcacatcggcaaacacgacaccaaaggttgcagac

SEQ ID NO: 2889 - DNA, 1140 bp, Zea mays
agaatgcagagttgtacgcaagggtatgccatattttatgcccactttatcttctctgcaaatgtcattgtcactttatctggatcaaactagctatagtaatcactccattgatttcctttggctacctgataatattgtccctatactttgtgctacctttcactaggtttggctggcgatttgaagaaggccatgaaagatgggaaaccaattattatagaggtatgctgccttgtgttgtgtacattcaggataaatatccatattaccttcacatgtctctcactatccgaccacagaaaaacctcccgaccagactttgatgtcacataccttttgtctgacctttgtttcatcagtgtacattgatgagtacagtacacaagacatgtggttatatgatagaaattagagaacatgcacatgagagcgtgattacccagaaacaataccatctagaaaatataattatttatgtttatatcaacatggaggcatagataaaaaacttgaccagtggggtttaagacagagcctggtcgttttgcttaagatagaaggtactcttcgcatgtagattgagaaccccccccccccccccgaacctgtgcccaccaatacggcaacactgctgcccatttgagaatctgggccggtcctttgacctgtttggcatggatgaaggcttagatacatcattatgctatgtagatttaagcataggtctgcatatgtcttgtgctgtaaatgaactctcttgtgcatatgactatttgtatgatatggcaattatgcatcttgcagaaccatgttgatagactcgtttatttagacggaggcatatccattggatgacaaaactctggtgcttgttgtgtttaacacatttatgatgtctggtagggtgtttgtcagtttgtgctcataggccctttgtacttttggtattttgttagcgaccaattgtttcaatttgtttgacgccagatattgcctgcctagcaaattgtaattcgaatttccttttttaatacctggattggggtttgaaggtagctatatgatttacagcatatacaccttttagtacagtgccatatgtatagataattcatacatgatcttagtaagtatctc

SEQ ID NO: 2890 - DNA, 1141 bp, Zea mays
cttgcatgcctgcagccgttcaccacggaccagtgggcgatgcaccagcaggataccatccggaaggtaacgaacgaggccggagaagaggaacgcgttcgacgatgcgactaaagtagtacagtacagtactaatcttcttcatctcttgtttatatatgtatacccgatcgatcgagcagaggaggaagcgcgtggcgaccatccacgtggccgacccgcagggcgcccgcgtggtgggcgcgtccgtgtcggtgcagcagacggccaaggacttcccgatcggttcggcgatcgcgtccaccatccttgggaaccaggcgtaccagcagtggttcgtggaccggttcaacgcggcggtgttcgaggacgagctcaagtggtactcgacggagcccatgtcgggtcagctgcgcttcgacgtgccggaccagatgctggcgttcgtgcggtcgcaccgcgtgatggtgcgcggccacaacatcttctgggagaaccaggacgcgacgccccggtgggtgaagaacctgacggcggacgacctccgcgccgccgtcaacacgcgcatccagagcctcatgacccgctaccgcggcgagttcgcgcactgggacgtgaacaacgagatgctgcactacaacttctacgagcagcggctggggcccaacgcgtccgcggagttcttcagcgtcgcgcaggacgccgacccgctggccacgctcttcatgaacgagtacaacgtcatcgagacctgcgacgaccccttctccaccgtcgacacgtacgtgtccaagctcaaggacctccgcaccgccggcgccatcctggaagggatcggcctggagggacacttctccaagcccaacatcccgctcatgagggccatactcgacaagctcgccaccctggggctgcccatctggttcaccgagatcgacatcagcaacaagttcgacgcgcagacgcaggccgcctacctggagcaggtgctgcgggaggcatactcgcacccggccgtcagcggagtcatgctgtggacggcgctgcaccccagcgggtgctaccagatgtgcctcacggactggaacctcagcaacctgcccacgggggacgtggtcgaccgcctgctcaacgagtggcg

SEQ ID NO: 2891 - DNA, 1031 bp, Zea mays
cttgcaggacagaaatctaacagtcttatatatagatttatcttaaaaagtacttttgcaaaagtataaatattttaagagcttttttttttattttaagaaaaaacattggtcaaagctatattttggagaccgtgtcgctgtcctaaacgacttgcattttgataccggagggattatgtgacaaagccggccaacactctcctatccttaaagttatatctcatatagaattttatacacatatcttgtttcaggtaaaggttgatatgggcgagcctatcctttctggactagacatccccacaaaactgctagctaccaagaacaaagctgttgttcaagctgaattggcagttgagggcttaacatggcatgtcacatgtgttagcatgggaaaccctcactgtgtcacatttggtgcaaatgagttaaaggtaatcagcttgcaaatttgtattctattcatgtcaacttgctacttttcaaagcttcacattttatggatccatctatggggatataaattctttgtagaaacaattaaatcttgagttgttggttcaacattctttgttacattttgtacatcaaattttcggatttgaaacttgctaaatgctaattgttcaaatcagtgacctctgtgaaccattttgttcatgatcacgacaacctgttgttttttcttgtgaaaaatacatggcaggattacatattgcaatactttaggagataaacagagtttttgtaaagatgcttcagtaatcagtatgttttttccattgtctatttgttgagatccatttgtgcagataataacagagcaagtagcaaccataaaacccctgcctgttgttgtggacgctgttgtggcaaggcgtcagttgttaattaagacactagtgaatagacaatagagttctatgctagttgaactatgtgcatgatgaattatacctttatcagtctaaccaagggtgtccatatattgtaaccataaattctagtcttgactatactcctgctgt

SEQ ID NO: 2892 - DNA, 1340 bp, Zea mays
agcagcacacagtgtggtatcgaaagattcgtctcgtgttcatgctaagtacgcttagcttgactcgttttatcgattgaactgctattcaacgctttcctatctgcacgcccgagatccaattcgtgcgcatcatgtgcgaccacgcaggcagagccaaccacacatcttacggaaacaacatctgctatatatactttactccataatactatgtacgtgataaaccacggcacaaataatccggtgcggtatacctgctgaatcaaaatatataaaaataaaaaacaaacttcttttcaaaaggcctcggattatttgccttttttatcgttatttccggcagcagccagcgccataaatacgagcgccgctccctattttgcgtccaagactccaagcccgccctccctcctttgtcgccacctccgcgagcctcttccccgaggcgagaggctgctgtgacgtcccaggcagcgccacccgcgtcgccatcttcaccaggcacccaccaccacgccttggccgccgggccctccatgcttggcttggcattcgctcctcgacacaggacaggaggatatatattgccgtgctcgcccgccttcttcttttaggaatcgtacgtactcctatcctacataagagaggacgcggacgcatcttcttcttccctcccggaacctgagggcaagggcgttgccgcccagccgtgccacccacgatcgggtgcgtagccatggccgtcgaagcgcatcgcctcctcttggcaggaggacacaggcagcagcaacagcagcagcagctcgccagcgcggggtggccttgggccggcgccgacgaagataggtgcgcgacgacggcgagaccgagccaacatcatcaccatcaacaacaacagccgcagcaggagttgaggctccacaacgcctcgtgcgtgggcgtcctggctccacgggtctcgacgatcgctgccggcggacagatgttcctgggcgacgcggcggagagcgacgtcacgttcggaggaggaggagctgcggcgcggcaggaggtgacggcagtggcgccggcgcccaagaggcggaagcgcgccgagcagcagcagacgccgccggtgttccaggtctgcgcggccgacgatgtggcggcgcagtttcagcagcatatcgtcgacgtcaaccgcctcgtgttccaacaagtactatactacctctatcactttcggttgagttgagcgcccggcgcgcggtgtcgttccggccgtctcggcgccaccgttgttggaggagtcggtcgtcgttgacgtggttggtattaacgtggatgatttgaataat

SEQ ID NO: 2893 - DNA, 1046 bp, Zea mays
cagcttgcatgcctgcagtcgtagcaccggacagagcgcgcgttcctgtacagtttgcagtcggcgttggcgctcgccgggtgatagctcagatcgaaataggacgcgttcagagctgggaacccgcacctgaaaaaaccagagcaatcttgtgatgatgcccgtgcctgagagactacgctgaccactaatgaaaagaaaaggttgagatgggcatccaggcgcagtactctgctggcgggcggcagcaacccgactccatgggagtgaggtccgcgagcttgtattctctcgcggtctgcacgcgaagttgggggctggtaattaagatctcaacgaaagcaacggctgcaaaaagggagcagctccagcagagttgaaccaagtgaatcatgtgaaggacaggacaggacaggagtcaccttgtatcttctcgacaggctattgcagtcatctatcttcaccaggcagcttttcaggcgagcccatttctccgtgtcatcgagctgtacttgaaaaaaaaatacacacaaataaaatgaagagagttatggtagcgcggtggaagagatctcgcggtggaatgagcaaatctattgtattgtactacggcagaaaacatagaagtctttcgaacaaagggacgtgacatgacatgcctgtttgacaaaccaggagctgtagtcctggagacggtactctttatacctacatagaacatttgaaatgcttcagtgtatttctgatgcgcaggcaggggcactttaagacaagaaaccagagttaaactctctcctaggatcagagcttcgatgacatttttaaactgtgaggtcatggaaaaaaagctcaaaacctgtatgtagcggtgggtagatcggtttaggctactatcccctatccgtaagtttccgtactgtagagctggaactcgcagggtcatgatctttctatgaaaatactaacatccagtcatccacatacctagccccaggaacagtatggccacttccggagtttgttatgataaacctgcaggcatgcaa

SEQ ID NO: 2894 - DNA, 1168 bp, Zea mays
caaagacgcatttgtttctatgcttccacaaggtccaggctcccagaatgataagggaatcaagtcctttttttgtgagtccattaacaatattccccaccgattcccaccagcctagatatgagctaacatctggttgaggagccaaagaatgcagacaaaaatttccttaacaacagataccagaattccctagagaaacaacaggtaacaaggagataatcgatagtttcatcctcttgatcacaaagggggcacttctcaggatgaatcagccctcttttagcaagcctatctgttgtccagactctattttgtgcaactagccagatgaagaagcgacattttggcaaggcccaagttttccaaattttcttctgatgagggaaaaccacagatcccaaaaagaaaccttcgtaagcagtctttgctgaatagatgccagtaggagcaatactaaaaacatgtttatcctcaacctcaggctacagctgccaagctgaagtcatattccacaactggagataatctgttaagactcccactgtcagcggacccttaatatcagagatccattttctatctgtaattgcctcataaatagttctgctattgacaatcctcttgggtataacattatacaaacttggagcaaggtctttaattctcttaccatttaaccacttatccttccaaaactttgtatttctactgtttctacggtgtttttgtctctgtggattgcagctacagcagtccaaacagtcggcatcaatccaaagcgaacaaatatgttcctttgatttatctgtgctcatcaatgttgtgtactacaacaagtccatgcataactcagaaaggtgttctactcttttatctcatttttttgtgtttgtgtgtgtgtggaacaaggtgttttctacttttcctattcgtggtgcataagagttattataaattcatcatgctgggtaattgataaacaactaaacctcagcaatgtgttctatatgtccttccgatgggccataattggtcaagatgcaaagacactataacctaaattgtgccagagacgaagccagccaagtaagtcgccaggtcatccactttgctaggtaaagtttgccctgcaggttgactttaaaggatcaacggggaccgaggg

SEQ ID NO: 2895 - DNA, 1172 bp, Zea mays
  unsure (1)..(1172): unsure at all n locations
gaagagcgcgacggcggcgatgccgagccacgagtggaggctcgtcaggtccggcgccacggccgcgtcgtggaacttgaacgccgcgtacacgccgaagatggccaggatgagccccaccaggtggatcagcatgtgcgccatcttctgcgtccggtggtctatgtgcgaagggatcgtcgagtatgccaggattgctgcaaacagatttggaattccattgtcagcatgcctcttaaacacgtacgtttacatctatctatcngaaacagcagcagaggacagcaatccagacaaaatcatgcgacctgagctgctaccctgcttgttgtaacaaaattccccgggaaacataatcactttgcagttgctactactgatggggtcgatcgtacgtgctttggcaggaaaacgtagcgatcagaatggtcattatcggggaaaaaatccgactagactggcgctaagacacgcaccaaacacactgattggcactcagcgacgagctcgtccactgctttggctgccaccaaaccccgctactagtacagcacctatcatcagcacgtctaaagtgcagggaactagtacgtgatggccttcttcgtctctctctctcacacacacacgcacaaaagagggaattctggcccatttcgacagggacaactactgcatcttgtcatcttcatggggggctttcggcagtggttctgctcagccgtcgtgtcgaatatataaacatgaatagcatctaaaagtttcatcctggggcagttgttcatgtatgcaatactcaaatggcatgctttgaatcgattccatgaaccatgacagtgctaggttggagttggacgtaccttctccaatcagaagaatgaacccccaggacatcacaaatggatgaacctgcaaatggacgatgtgccacaaagttaaacgcaagctaatatgacagaacaaaggtagaggaaatcgatgtctaacataagacgtacattgaaaatctgctcggggtcctcggactgtatgttgatgccgccgcggtagtgcagcagccagacgagcatgagcacggcggtggtcaggaacagcacgtgcgcgaccatgcccacgcgcgacgccaacatggagtggtagtggctcccgatgatcccgtgcgccatggctgc

SEQ ID NO: 2896 - DNA, 1237 bp, Zea mays
cttgcatgcctgcagcaagcacgcgaagccggcttacatacttgagctcactccgctactaatctccatgatgccctagctagctagtagcagtagtagcaggtctagcggcgagagcatgccagtccctcagctgagcacttacgcgtctccgggaagacggcggcagctccagcgccttcgagagtgtggaacagcagctccgaggcccagtcccagcaatccagcggaggcaacacccaacagtcgtcgtaagagcaggtatctagggccatggcgtgttgttgttgccgccggggccaggtgagatggcttgtttgtcatctacatctactgggagaggcgtcgtgtcctctagccctcttaaaacagggagagaggctcggccctttttcttttggcggagcaccaaaagctgtgtcaaattggccgtggccggggccgggtagatgaaatgtaaaaggagagttgttgctactacgaaatataactccagtccagtggcttgcactgctacctctacgtactagccctgttgatgttttgttcgtatatatccatgtgtgttgcagcacacggggacaacagcagcatgcaacaccagtaggcgcgcggtagctttagcccccatcatcccatgtacttgttactacatgaatcaccagtaattgatggccaaaggactaacagtatgtgcacagcagtgacagcggcagtggcagttgcagagattgctcggatcacagggtggtctccggtaccagaacatcattggtttcaaatgaagattgttataaataaatgcgatacaaataggatcaatcacagagaagacacggatttaacgtggaaaaacccctccaaagtgaagggtaaaaaaccacgggcgctggccggcaacttctcactattttcgggtggttacagatcgcaggagatttacaattgagatggatatatcttgcggcttgcaaagatatttatagaggtgaaaccctaaaacgatccgtgcctcccggcgacgggcctccgcttcgctcaccaacttggacgccttcttcagaatttggatcacaaactcaacaaagatggccatagcgcggctcgggaaagggcgttcttggtcccggcctgctgtgttgttgacaccacctacttgaattaccacagttactagtacaggattctgcccagatgtaaatgctcaccttttgcatgccaagctggaatttcgagt

SEQ ID NO: 2897 - DNA, 695 bp, Zea mays
tgcatgcctgcagcatccggcggcagccggccagagacgcagccgcccacggggcagtagggcgcagccagtcagctcccgcccgtggcccaagcagcctatgtccactggtcactcttgcgcagccgcagcgcgctcttgcagcagtcgtgcctcgtgcgcaggctttcgcccgtcctgccaggcggctgctctcctagcagccgtgcaggcggcacggcacgtgagccctacggctctgcacgtacgtactggcacgccgcgccgcgcgcagtggtgcaggagtgcagggtggtttgctcgcgctgatggctgacggcgactgctgcggggtgggcgggtggtggcgcggcaagggggtctgtggcgttcggcgcttttgggcgcagccgccttggtcgccgggtgggaaaggtagcttttgcgacgacaatgcgacccgcggatgatctgcgttggccagctgtctcgtgagtacattcagcggcatgccagagccagacagggggggtgcgcccgccgtgcacgtcgttgtgtctgtcggttcgggtaggaaccgtcgagtccaatgcatccagtatgtcgggtatcaggcttagccatgctttgctacagctacagagctgcgggtagtagtacgtatattgactgaaaaaaaaacggtggaatgcaccacactttctgctggtagtagt

SEQ ID NO: 2898 - DNA, 1120 bp, Zea mays
ttgcatgcctgcagcttcgcctactacgtcttcccgggctacctgttccagatgctcacctccctgtcgtggctctgctgggcgttcccgcgctccgtggtggcgcagcagctggggtcggggctgagcgggctgggcgtgggcgcggtggggctcgactggtccaccatctcctcctacctcggaagcccgctcgccagcccctggttcgccaccgccaacgtggccgccggcttcgtcctcatcatgtacgtcatcacgcccgccgcgtactactggctcggcctgtacggggcgcgcagcttccccatcttctccgacgggctcttcaccgccgccgggcagacgtacaacatctccagcatcgtggactccaacttccggttcgacaccgaggcatacgagcgcaacggcccgctctacctcagcaccttcttcgccgtcacctacggggtcggcttcgcgtccctcaccgccacggttgtgcacgtcttcctcttccacgggagcgagatctggcagctgagcaggtcagcgttccaagagaagaaggtggacgtgcacacgaggctgatgaggaggtacaggcaggtccccgagtggtggttcatctgcatcctcgtcgccaacgtcgccgtcaccatattcgcctgcgagtactacatcgagcagctccagctgccctggtggggcgtcctgctcgcctgcgccatcgccttcttcttcaccctcccgatagggatcatcacagcgacgacgaaccaggtaacccaccccgacgatctcttttatattagcactacatgcatatatacagctaggtgaggtcatcaattggagtatgcacgcacgcacgcacgcagactccaggcctgaacatcatcaccgaatacatcatggggtacctgtacccgggccgtcccgtcgccaacatgtgcttcaaggtgtacggctacatcagcatgacgcaggcgctggccttcctgcaagacttcaagctgggccactacatgaagatcccgccgaggaccatgttcatggcgcaggtggtggggacgctgatcgcggcgctcgtgtacatcgggacggcgtggtggctcatggacagcgtccccaacat

SEQ ID NO: 2899 - DNA, 1002 bp, Zea mays
aagttgccattttgttagttgagatattttgcatataaaggttatttctgtaaccaattattgtttttgcctttctagttgactggctgcaaacatgagttccatctccaatgcattcttgaatggtatgtttctagctctaatatatccatcctacatgttacaatttttacaattttttatattattcccacctttcacatgaacagtacctagttccatcagcaattcatctgggtgcatgagttatggttatcactaagcacacattttagaacatcgaataccttaggtatttgtgttgtttagttaaccatatctgtcaccttagactgtaacatctgattgtgactggaaaggcttcagtatgggttttgcacatgaaaattttgtccctgaattggtgtttgacttctctatcgtgtgcagctttctggacatgggatggtatattattgaactgtactgtcttggtactgagtactgaaaaaatttagtgataacatcatatgctcaacaagcattttccttgctggcgttatgaacagttgtagtcaaaatgcttggacttttaattatcatatcagttgttgttgtagtgctctccttatttctgtctatcaatgttgctagtcatatccatgccgaatgtttagtagacctgtactactatatttggttattgctcaattttattcatgctaatgcttgttgggatttttataggtgccagagaagttcacagtgcccaatgtgttggcagcctattactatgaaggatcctaccaggcaagttcttggctgtgcaaatagggtccttacctttttgatcctcctaggctattaagtagttactttcttgctaattctagttttactgatgtctcagtcaggagctgcttgaggcagtagagcgtgagaggaatataagaactaatcaaactcggaacacaactatatttcatcatcctgctcttggggattttgagctgcaggcatgca

SEQ ID NO: 2900 - DNA, 1331 bp, Zea mays
tgcagcagcagcttagctatctaatggagcttatttcctttcaagtttgaactatattttcttgctatttattttccaatttgaactatatggctgttatgacttatgagtttatgacttatcacttatgtggctgatttggttcagtttgaggcttcaaatgaggtaagacttgctgtttatttcagttttgttcaatttcaggcttcaaatgaggtaaaacatgctctttattcatatataaatgctatattgtctatatgaaaccattatataggcaaaacagccactatattggcaagtcgacgactagtcgactgaattatcaactagtcatcaagtcggtaccttgtcgacttgaaaaccttgcatatgtgtaatactgcaagttatctaccaattagggttttatttctctaacatgttatctagccagtctccttcccctctgctcccctagccaccgccgctagaaattggcggccgatggcggcggccaagcccccatggtctacactccccctcctctcctcccttctatccctagtcgctggcactcctctctcctccactaatggcgctcctgtgatcaaggcagctaccattaggatcaatctgtcattaatagtttctattggatgaacattaaagcaacttgatgttcatgttagacagagaatctctcctataataggctgattattatatctcttgttcccttattaggtttgattcctctcacctgcatgtgattgaggtttccctagtaggactggttaccttagctgtcatggggcaccggccctaggtgccttggaccccgagggttcctaccctatatgtgtaacctctcttgtgcctatcaatcacatgcacaagaaaagaatccataacatgtacaggattggtgatggcagagttcaaggatatggagaccggattcctcagggacacaacctgagaccaataggtagtacccatgtttgtcgtcttcgatgggtgcatcagttaattgattcttaatctaacttttgggattaaactgcaatgaggattttttttctatccctgtgacgttgctgaaaatttgaagatcaagcttcgtggtgaaaaaagatgacatgtctgctttgtgtggtgttatgaagaaaaaaacggggctcttacggtcaggagtgcagatagagttgcaatgtgcttacagatgatttcgacactcatctatacaagctaattgtgagtcatgtgattatgacatggaggacagatcccatgcatgtggttacagcccatgcacctgctctcagatttgaaatgcacgtgtacttgac

SEQ ID NO: 2901 - DNA, 793 bp, Zea mays
  unsure (1)..(793): unsure at all n locations
tgcagcagcagctgtcctaggcaaatttcggccccggagaccttgagttgcacctagagcttcatccacagcaccccaaatgttattagttatcaccatcagattcttcttcaacccattcatttcgccacataaactattcaagcaacagtggattgcttctctttcccttggaacatagctatcttatatttgtgaacctattatccatcttcctgttgtagcttacataggccaatttatttagtctctggtctccagtctgttccttttttttttgtatggatctgcacatggacatagtgacatacattattactcaatctgaactctgaagtatgaagtatgaacaaaaaaaagagtacttactaatgcaaaatcactccattttctttcacaaccagatgctgagcaacataagcttataattctttttgcaaggctttggagttcatatgccaatcctccataggcaccccaccataagactgtcatataaatttagattgttagatacttagatcagtagaaagcacattaacagacataaccaattagaaggaagatgaactcatgccggcgatgatctggattcctggaaccgtgcgccgatgatctaaggctgcacgcgtctgtgaactggggtcgccgcgcatcgaagatctggggctgcgcgtcatcggtgaagtctggaacgagaagtcgagaacgagcccgctggaaaatagagaagagaggcccagggaaagaatcgtgatgccaggaaattangagatgtggaacccggtgagta

SEQ ID NO: 2902 - DNA, 1052 bp, Zea mays
tcgcctcgtgcaccatcatcgagggcccgcgcggccaccccacgcgcccgatgagtgccgcgagacggcttggcctcgccgcggagggaggaggcgaagacaggttgacagaatcagcgtcggcgttggtattggacgacggtgatgagcggcggagcagcgggtgctccggcgacgtggtggccgactccatttgggtcaccacaccggacactcggtcactctctccctctcttcagctgccagctccactctcgcagtcgcagtcagcagtccgcaccacgagtttcgcttctctaccaataccaattccaggctttgcttgttttgggccgggttcaatcagccgaacggatcgagagtagcaatcgtatgggctggtccggatgcagttcgggctgtagctggaaagcccaaacagtgacaactggagcggcgaaaccaaacacgatacaagatcccatcatcatgcgaataagagtcaccagtataatagttggtgttcacaaactcataggattcatgagaggcaggcttatacgcaaccaaaactgagtaggcagcatccacaaacagaaaaacacgttcccgaaaacatccaccaactagagctagaggcgtgtcataacctacctaccagtaccagttcaacacaaaacgtaacacggtcacaatttcattaatattacatcgacctggacgtccgcataatgatggaggacttgcttcgggtgtgcttggttctcataatttattgcggctttctcgcagcttaatcaccctgtctcatgcgctgctaatgttctacgaattgccagcctaattagttctatttccagctctagatacccattatcagtggggcagctcactgacgcttcagtcaagcttcgccacctttgaaatgtatgctctgccaaagtgtacagcgcaataagatgcagcagtgattccgagcccggcaagaagaataagccaatcgtaagctggatcttgcacggcgtagaccctgaggccaatagtgttccagaagctttcagtccacacgggat

SEQ ID NO: 2903 - DNA, 690 bp, Zea mays
acaggaataggggctgcttctaagcgcagcgccaaggtgaaggcatcacacctggggcttgctatgttcttggagaaggatatagccagcacgttggagcaaccattgcaaattgttccctacaagccaaaaactccaaaggatgaagagatctttgtgtggccatggatgggcattgtggttaatttgcagtgtgagttgaaaggcaaagaatgttccagggaaagtgaagaaaggctaacagcacagttctcgcggttcagacccctccaagccacaacccttagggatggaaagaaccaacagttttgtgctatcataaagtttgctaaggattggagtggatttaaggatgcaatggcttttgaaaatcattttgtactcgagcagtacagtaagcctgattggaaaaaaagaaattgcagaaaggacgacctttatggatggcttgcaaaaacagatgattacaactcacctgagccaattggggagtatctaaggaaaaatggaaatcttagaagtgttggtgacctggaacgagagggtctgaaagaaactggcgagcgtgtaactcattatgctcgccagattgacgcaacaaataaacatatgagtgaactggagctgaagaacactactaatgcaatgaaacttgataggatgctggaggagaatgatcgattggttgaa

SEQ ID NO: 2904 - DNA, 1113 bp, Zea mays
atacatactccctccagttgcaaatgattaaacaagttggttatgaacattgtcatggccccctaaatgtagcctgtgatagttttattctaatataattagaaagtacaacaaaactgtaatattatgtaactactgttggagtcaaatctcactcatcatttgaaatgttcaatctcaatatataaattttgtattgatggtaaaactttagttgctttggatgcaagcaacccaacttttttacagttctaaaataatcagttttttttttttgcaaatttatattgtaaagttggttgcatctctcattgaactacagtcctagtgtcctgtcattcttgcactgtaataggaatataggaccctgataagtgtttggatctcagcaatccacatgcctggcctcttgctatccttgctgtcgttgatacattgtttctttgagtgttttatccccttttctggcttctgttaggttttatgtctagccctgacttcctggggagctgggagtaagtctttgttgttgttgttgtattagcttttgatggattagattgtgccataccagtgcaatgttccaacagatggatatgttggctattaatgggtaactcactacaatggttcttcttttggttaatcagggtgtttatgatgtgaatcattcatttcaagaatgtcatacatttcacattctgctgttttctaatttttaacagctcatatttttgaacaggactgaaccaaggtgtaagcggtttaccactgaagggctggccattaactgtgagctatgaaaaaaaatgtcatcttatgtgcgctcatattttcttttggaacctgaccacatatgaatatccatgataccatctcacagggaattgaccaattaaggccgaatttgggtgctcaaatgcagaagccatttctttcaacacagtcacagttccaacttatgtccccacagcagcagcaacaatacttagcacaggcccaagcacaagggaaccttggaaactcaactaattatggggatattgatccccgcagacttacagcattgaccaggggtgggttgaatggtaaagatggtcagcctgcaggtcg

SEQ ID NO: 2905 - DNA, 1168 bp, Zea mays
agcttcacgatctcgatggagatgtacagggagatggggatgaagtagccgtagagcattatggccgtgaagaagtggagcaccgctgccaccgctggccgtttcgggtcgtagtagatctcagtgtcgtcgggcctaaggtaccatctcctcatggtcctgccgtggtctctggtggctatgccgaagaagacggagctgacgaccgagatgacgatgagcgagaagaggaggaggtacatgacccggtccatcttcttctccacgttgctccgcttggacgggaccttcatggagttctgcatcaccttggtgtcctgccccgtgaacacgacgacgccgtacacgaagtcggtgttgcggagcttggagtccctgagcaggagctgctgcggcgacagggggtgctgccggccgtccatctcgatgttcccgacgaaggtgtagaggtgcgcgttggggtcctcgcaccgcacgacggcgccccggaaggccccgaagctgtcgccgtcgtccggcggcagcgaggcggaggtggcctccagggactgcttcagcttcaggttggtctcgccgtccaggttcatggtctccacgtagcagatggcgtcgtcgtagctagaggagagcaggacgaggtcagccgggaagaattcgtccttgtggaccttgacgatgtcgcccacgcggatgtccttccatttggcatcgcggaagccgccgccgccgccgatgttgttcacctggaagacctgagtcttcctgttgttcacctccgtgtcctggaacggatcattcattctttcatgattcatttcactcaccgagacagaccgagtatgtaatcaatcaaattaattgttttgacagagaagaagaagaagaagaaattgaagtgaagttggatagtagtacggtacctgctggttcctcctccagtcttcgattgcctccttgatcatggtggcgacgaggacgatgacaagcggcgcaatggcgctggaggagctgtaggcggcgagggggctgtaggcgatgccggcggagaggaggaagtagatgttggcgacgcggcggaactgctcgaagagggacttgggcaggaaggtgaagaggttgtacttggtggtggagatggagttgctggaggccatctgctgctgctgct

SEQ ID NO: 2906 - DNA, 1054 bp, Zea mays
gcctgcagtggagatcataaaatcatgaaataactggttcaatagcatttcggactcttcatcgaccgcagactgctgagctatgccagttgatgcaggcctttgcctctctccagcactccaagcctcagagctagctctcctgggaacaacactagcactgaagacctgacttcttttctcctcagcaattgttccattacaactaccctttcgtgacaagctgcgctctggtggttctaccccaccaactaatacagctttttcaggaatcgcccagattcctgccttttgtgttagaacaacccaagcaccttcatctctgtcctcagctgatgggataatggaagcatctaggacttttccagcatcccaaggcagatcaaactgataaagtcgggtggaacctctccaatacatggccactgttgctgttccatcacctgacaggattataacagaaccagagggcttaccaccagtttttagcctcatggagaacaagaatttatcatcctctaccctagccttaggaattatcacctgagagggagcttttttctccaaaaacctttcaactttagctacattatcttcagatgaaaacttctggttaggtttgtacatcattgttagaagagaatattgagtgtagtttgacccactaaccctatctttgcataatgtagcaacaagaatgctaaattccttcccatgctcatctatctgcatgtccaaaagccatatgtttttctgtccagctatatctttcttaatgcccacatctccgtcagtaccaacaatttcgtgagaccctaacttttttacattgatgtcatgcaagagtgagatgctccaacattgcacctcattatttgtcaataaaaagaacttccggtcagaaccctcagatgagacattacttggtaaccaaaccaaggaccttccaccatcacatttctgataaagatcagacccaccatctcctaatgtatctacatgaacttttctttgacgaattccttccggtgaacactggaacagccacaaagca

SEQ ID NO: 2907 - DNA, 1206 bp, Zea mays
tgcatgcctgcaggttgggttgggattgaatcatcatgccaccatgcatgcagacctcagctcgtttcagaaggcagaaaggaaagggttcagttgttgagttaccggcaacgccatgcaaagggagacgaaagccgagagccagacggcgtttaccggcacctcttgctcgttaactttgtgccagacggacgaaaacggcatcgccccatctctcgagaacgcataagtcatcctggcagcagaaaagaagaagaaatgcccgcagtgcagtgcagtgcagctagccatcagtcagtagtgcatggatcgatcgagtggcaggcaggcagatcgatcaagctagcatgcatcacctcgagttgctagtcatggagctcatgccgcagaagtacacggcgacggcgacgacccacaggcaggcagacgatccctccagcgccgttcccgtaccggcccttgaaggcgaggtagaacacctgagctatggcgtaccctcccgcgtcgttgccggtgctcaggagggcggggatgtccttcacggcgaacgtgatgccgagtatgtacccccagcccactaccagcgagacgccgatcgcagtgatgatcccgaccgggccgttcctgcctgcgttcttcgtctcctcggtctgcgtgcggcatggaggcagccaaagcatgcatccattactactatactatagctagctgggaacagcaacagcaactgttacgtacgttacgtaccatgtgcgccgacgcgtcgtaccctgagagcgtgtattggctcatgaggagccccagaacgaagatgtagaggttgctgtggattccagcgctgttgtccgtgttgaaatgggtgaagacgtacttggcactggctctctcggtagccacaaccggcacagcgatcatcaggacaaggacacctgaaagaaaccaagtgatatgcgagagcctgtggagactggagacacatgcatatacctagcatgctccagagcgccgcgaactggccgagcagagacagccaggtgatggagaggctgttgatggcggcgtggctgagcaggatccccgcgtggaaggcgaaaacaacgtgcttcgatgccaggtacccgccgccattgttgccccccgtgctgagaaggacgatcacctggatcagctgtgccagggagaagtcgatgctggcggtgcctgccc

SEQ ID NO: 2908 - DNA, 774 bp, Zea mays
actacttttgctacggatttaagactggaggtcgtagcctaaatacagttccacattatatgctaataatgcaatcctgttggtgagctagcgtcgtcagtactgccggccgcatgtagatgtagttcggtttcagatggcatgagaattcatgacgaaccaacgacaacgaaccaatggccccttgctctagccacaagcaatgccgtgccggaaacggcaggtcaagagacggatatgaccgaacaggcgccgcagagcgcagatccaagaggccgccctcttcttctacgcggggaccggctgtttcgctgtgcaagcaaaagcaacgggatatatgatatctgtgtgcgctgacatcaggtgcaaagcaaacccccatggattaattccatacggttttagttactgagcctgatgctgattggcagtgaagctttgctttttcgatcatctcgctaatgatggcatcggtatcatcgtggcttatactattgtgttggttaccgcttgattttcctcaggtggttgatctgcgccgcgttgctttttgctcgtcgctttcctgttaaacaattcgtcccccacggcccacgcccaccaccaccacacacacacacacttccataaacacattctccaaccaaattgattcttatctgacgcgtgatgggtgcatgcaacattgcgctgatttttttttttaaaaaaataaagaaatcggatcagcagttcatcgcgattcacgagaagtcatggacgcaagcgaaatcg

SEQ ID NO: 2909 - DNA, 774 bp, Zea mays
ccccgtttcctctatagtcgacctgcagctagtaaagcgtctggaagcaaactgtcagcttcagctcctccattcaatccaggatcagtgttatcaatgtcccagccatacagcacggtggcagtatatgatgccagtgctattcttcaggcaataccaagtcaagcaatggagattctcccttctgccattgacactagagtgcctcgtggtcctcggtccaccttgtactatcgtactgggcattccttccaaaggaaacaaggttacacgcacagccagagcactattgtaaggggtagctactcccccacaaccatgaatccacatgctgctgaatttgtgcctggaaaaacttcgcaacaatctgatgtggctgacagagaacccagtcctgctaatcctgtggccaattctgatctggatgttgtatcgcagaccacagatgaagcgagggccgaaacgcctgccacagaaaaggcaggtcaggttgagaaagtcgtttcaggtaaaggaaaggaaaacagggggaaagacatcgtgagaaactcatacaaaacagaacttgcaaggcaaatttactcagtttcattgtgaagtcggtgcacgacagtttaggtccctcccgggctgaaccagagaggaagccaagtggatcagatgaagctagtagtgaacagaccagcgtcttaggcaagaacgcttctggtcgcaaagatccagataaacaagagaaagcgacggaggttactaagggcctgaaggatacagagg

SEQ ID NO: 2910 - DNA, 1220 bp, Zea mays
agcttgcatgcctgcagaaaagaggcatgaaccatccggctaggtgccctctttgtgatcaagaacctgaaagcgttgatcacctgctggtttcctgtgtgttctcaagagttttctggtataggcttttgagaaagtttgggttacacagcttatcccctcagcaagtggagccttccttccttggttggtgggagaattcctcggctcaggtcctcaacatgagaaagaaaggactggactcccttgttgctttaggggcctggatgatttggaatcataggaacaaggtggtgttcgatggaaggaccccctctatctccttccttcttcaagctgctgaggatgaacaggagacgtggcggctggctggtgccaaggggctttcctttttggccagccaaactacctagctcctagggctgtagtgttttttgtccagttttatggatagctttgtgtatgcttgtttctggcctccataaggagtgcttgtacctaggtccttatggccctttattttccctctactttaatatatgggtgcgcagtcctcctgcgctctttcgagaaaaaaaatacttaatgtatgtgttttatttatgtgtctacatttatcttcatccacttgaatatggacataaaaagcaagagctaaaacgaatattattttagaacgaagggggtattaaaatgcaatgagttaacgtcaaattgtaaaacgttttgccaacaaactcttcaaaggtattgaaatcacctgaaaaagtgaggcgtccaacatgcttgctcggcgagccttcttcgtggtaaccatcttcctgaccgccaatgccattgagaagcactcagccgacgacccagcagagacagcaacatcattgccagcattctcggccatctccctcacccaacccaacatcccaaccacgtcccccctcttcctcttaagcatcacatgccgctgctccctcccattgtagcccaggagcccttcttctccctccactccatcggtaccaatgaacagctcttgcctcttcctcatgtcgccgtccaagaagggcccatgtgcttccacgagcctctggatccagcggtctagggcaccaaggtacttggcgtagaccagcttgacgggcgccgcgagggcggagtcaatgccagcagactcggcggcggcagcccaaccaccgggagtgttgggcacgccggcgtag

SEQ ID NO: 2911 - DNA, 1114 bp, Zea mays
acagcgctgcgcagcgcatcagagttctctttacgagccacgatacatgatttcacgattcttttgtgcctgtatattgtgtttatgttgtttgcgtccgcccattccttccctattgcattggtaagtagtagcttcatgttcctagcaccggcgttctgattgtctgtgtatacgcggtactggttgtggtcttgtggatgtgagagattcttcatggttattagtaaaaatagaaacggctgtgggagaagaaacagtgaatgaatccatgtttctttattctttattgcaacggtatttatacaagttaaggagacatgaataggaggaggtcctggtcacgtctatacaactggtgcacgtccgttggccatattctacgtggagatcgtttcaggagcacgtcccttgaagaacgtcggctggaagcagtcagcaactgtttgtctttcataacagttgtgactggtttgtgggattgtgatggaaattctcagtttggcatgcttcgaagcacagtgctgggttttcctgtgctcctcgaagtcgagtacgctgctcaccgaggaaactggtaggctgcatttggaatcccgattgcatcgtcagtgacaacgaacccagccaccagccagcaccaacgtgatcagttatacgagtaacgagtagttacaaaaggcggccgggcaacagtaagctctcttgcgcgcacgtcaggtgtttcagtggtcataaataacacaaccctaaaacccaaacaccctcgatctgccggttcgcatatccgcctacagaggaggcattgaagggacctggtcatcctcgatcagcaacacatcagcgaagaaggggtcgcgtagacaatctccagcggactcgtaagacgccaggcgtttcttgagcgagcgaagctcccgctcgattttgttgccatgagcctagccaaaaaaaaaaaaaaaaatgttcgcatggatatattcgttgggtcacacacaggtaatgtcagtagaggctgaaatgcagagggggatgatgaactcacaggtgatttcagcttctgtagcaccatatctacaaggtagattaaccacaccacgtttgtcttcgggaa

SEQ ID NO: 2912 - DNA, 1126 bp, Zea mays
attacactaaagaaaaactcatcctccagcgtatttctgtctttcttgataaataccaggcacgcttctattccgtgctcttccgtaacaaagggcaccaaccatagtagaagcgatgggtactcgtttccgcgaacaattttatgttgtagttccttgcctgcaaaaaggtgcctggcaaaagagttgaatggcatgtgacagcaaggtgtgccaccaagctctatgaatctcagaagctcactagcgctgtctgcaaaccactcaaatcttctaacagcagatctgctggactcaaagctgttgcggccaaagccagagaaaataaaggatttggtagcatgtgctattcgtcttggaaagtaggaattcctaacctcctgttccatctgctcatcttcgaggatcatcttcttgtatttgtatagcgtgtcatcacactctttagcagctcgcttcagcttcttgcgccaacgcagcaatgacaaatcagtgacgtgccacttgctgcatgtttcaagagctgcctccagcttgatatgcgccatctcaagcctctccaagttatcatttggatttgagtcttctttgccctcgtagctgtgaatcagaccagacagaatttggctaactgtctcctggacaaccatagaactgaccctctcggtcattaggatccaataagtatttgtagcatcccctccctgctcagaaaaaaaaaagcagctgtacatgaggagactaaatatgtggacgaaatcttggacagaatcaaagtgttccacagaagaacattgggccaccagaaaatatttagcttactagctgtaaaggagtaaggacctaccctcaactgaagtgcaaggaagtgatgagtagttctcgcaattgtatataaagacactcttgagggaaacgtgaatgtgatgcccaagattttcagaggaaagaggcgtcgagaagtcaacaacaggggtctggtagtgacaggtgcacagaacaggagttggtttgtgaaagaaaaaaaactgattagtggttgtgttttgacctaatcaatgcctaaatgatcatcttttttacttaacaacatgagaacctgccaggtggcatgggttttgtgcca

SEQ ID NO: 2913 - DNA, 1221 bp, Zea mays
cgcagggcaaatggaggcggaatagtggcgatggaggaagtcatggtgtgcttggtggtaagagggtatcggtgaaacatctaaaggtcgttaggatgaagtacattgatgaaagcagaagtggatttaaactggtaaaggtcctgctcaagaacgcctctgcactggagaccatgacaattgttccttccatggatggccttgagcaggccaagtttaggcgtagggtgttgaagctgaggaagtcctctcaaaatgctagcgtccagttttgcacagctggatgatatgatgtgtatgagtagagtaggtccattagcaaaagctcaatgttgcagcccaggaagtaaggcctgtccatgagggtcttcctttttcgtcgggttacttttagcctgtgtatgtagctgctaattgatgaattccttacagaattaatggaaccattgtcagtattcatttagtttaagccatcaattttcagttctttgatgaagtttctttaaacttaacagaaattctatatttgttggatgtttacattttaagtattttgtaggatgtcaaccagcaaaaatcttctctgacaatcatgaaaataggttgaccatttctctggaagcgaaacaaacgggcccatgtatactttatggcccatttatgcctataaatgggcttgctttatgctatgtatattgtatagacaacctatagtctcgttgtgaactaattggcgcagaagcaggcaatgtaagccacctacaaccatcatactgatctatatctaagaggatgtaaaggatgttgtttggctcaaactctaatttgactagtcctaattgatcatggcatgtacgctttataagaaattttgctccttaacatgagctagtttccgaggaggctagaacagcatcatagggcattctgaagtcaatttagctcatcgttttgggatttacaccatggttgttttttcatccgtaacgcaaaacgaattctcctagaatggtttcagtagtctgccagagtgtttgggtattttgatgtctccctttttttggatgaatagaatttaaagaaatttttcatgactagccatttgagaatcacctatatcctttttttttatttacatctccagcttatcttaagtcctagaaattaaatataaggatcaaaagatggacatgccaatttcaagctttgatacactgagac

SEQ ID NO: 2914 - DNA, 1010 bp, Zea mays
tgatggctccacgtctcgtgcaatctttgtttgcagcttttggagatctatacctatataaactttccaaacttattttcaatggtcaagttgctaagtggacggtatccttaaactcatttatgtacctatacaattttcttcgtgagtatatgacttcaacaaccttggatgtcggccttaacaaactgtttgcagttattttctcagttggttaactggttcatgtttttctgtatcacacggactctatcaaacagcttggagactgttttgaccgtggctggactctattattggtttgctgcaatagagtcttccaaggcaacctcaatcgtttcaaagcagcacgcggcctgtgaacaaagtatcccatcaagaaaagtggctcttctgatagcagccttgtcatgtgccattcggccaacaagtgctgtaacatggctatatgttggccttttggattttattcagatgaaatcaaaatgtcgctttatccttcttgatgtcattccagtggggtaagttattgttaaaattcatataaaccttctatctttcgttgtttaagatttttttatttcactacactggcttatcactattgtttcttgatttcacaaactggacatatgcagggccattgtccttgcagtaacaacactccttgattggtggatgtatggttcctgggtcgtagtgccgcttaattttttgaaattcaacttattgtcttccggaggagactactatggaacacatgtcttccattggtactttacacagggttttccatccatgatttggacattcttaccatttgcattgtgcggtattgtaaagtctcaggaatggaggctttcaggtctaattgcttgggtgttaggggtttacagcattcttggacataaagaattcaggtattcaccttttcctgtaagtgtatagtgcccttgtagtcaagtaacctcttctctctattcacatgatatgatacaaaaagattgaat

SEQ ID NO: 2915 - DNA, 1283 bp, Zea mays
agttacacagggatatcatttccctggcccattactccaaataagttggaggctcagatccttctagcgacgatggatcccttccatcacccgcttattacttagctacgagcctacgacaaagaccatgcttcaatcttatattttctgtgcccttctccccacattgtcttcagccatatccgtaccttctgactggatgatctccatgtccctgatatccctcttcaacacattacctagcttggcaactgcctctgtttgttgttgtaaggcctgtgatgtagacaattacaagtcaggttgacacaacaccaggctatctaacaaggacgagggcaaaactgcaccacttacctcaagaagctctgtaacactccgctcatcaacttttgcagaactgggaatataaacggaaccaccagcaccaccactgctagccagaagacgcgacgtcgaaacaagtgtattgaccctcttagaaagatcagcgttatgtccttttagctgcaaacagaagaccaaaattgatgaaaacccataatcggccaaaaagtaggaataacaaatggggagaaaacctgacccgctttaatatagcaaccaatctttcatacaagtcagcttcctcctttgttaaaggacagcggtagccccgattctccaatgcctccactattctaacaaacttttagcagttcgcagaataacaacgatgagttagatgcatgggcaattaggcacgaaaagtgaactcacgcgatctagagaaaatatcacccttaaaagacgtctctgaatagccagctcttgttgcttcaatcgctggatccaaggatacgtgtcagcttggaaatgcctttgcagctgcaatagaaaatatgttaggcaaaagaagtgagtaacggaagcgcgtatgaaaacatccatatgaagctatacctttttaacattagagtgagtcatgctcaatctatcagtgtccgaaacaaggacttcatcttgaagctgcaaaggaaaagaacaagtaccaaggcttcaataaatttcaaagctaaacccttgtagaaagttgggaaatggctaagataataccatcagaagtactggaaaaggttacaaagttacatgtaaaagctgaaaatatcaaggtatcttttacttctttccgtaccaaaatacaaaaagtggggcattcctcacccagagaatgacagagacaaatatgactactgcaagacttaaatatatgccatcaatatacagaagacatatagttctat

SEQ ID NO: 2916 - DNA, 1332 bp, Zea mays
agttcagcttctgaagtgtctgaccactgccctttactgcttggtcttcgggataacaggtcaggaaagcgaagattccattttgaatctttctggccaaagctagatggattccaggaggctgttcaggaggcatggaactcagtccctgccttggagtgtcctttccaagctctagacagaaaacttaaggtgacagcaaaaagattgcaaagctggagcgatagtagagtgggacacgtgaactcccagcttgcccttgctcgtgaggtgctgcataggttggagattgcacaagatgctcgatccttatcgctaagtgaaaattggctcaaaaataaattgaagaagcactcccttggacttgcctcattaaagcgcaccatcgcccgtctaagatctagagtttcttggctcaaagaaggtgatgctaatacgaaattgtttcatatgcatgcccgtcaccggaaaagaaaaaattttgtggcaagattggttgctgacaaccaggttttcactggacataatgagaaggccattctaatggatcaatttttttccaatctgctgggtgtcagcattgacagagattgctctgtcaatcttgaagctgtgggagttccaacctttgatttggccgctctggacttgcctttcttggagaaagaagtgtgggaaacagttaaattgctgccttcagataaggctccgggtcctgatggtttcacaggaggattttataaagcctgctggtctataattaaaggggatataatggcagcagtttcagcagtttggagcaggagatttgcgcagttcaataggctgaacacagcatacatcacattgatcccaaagaaggagggggccgatcaagtaaaagacttcagaccaattagcctggtgcatagcttcgcaaaactgatcaccaagctgctagctaatcgcctagctggaaggttaaatgagatgatttcacccattcaaagtgcttttataaaaggccgttttattcaggataactacatgttagttcagcaaactgcaaggctcctccatcgacgaagacaggcccatttgcttctgaaattggacatcacaaaagcctttgattctgtctcctggccttttctcatagaggtattacaaaggatgggatttggacagatttggagggatattctatgtgggctgcttgcaacctcttccactcaagtgatggtaaatgggtttccgggcaaacatactgttcatcgtcaaggactacaacagggtgaccccctctcactgatgctcttcattgtagtcatggatgtgcttgggcgaatggtc

SEQ ID NO: 2917 - DNA, 974 bp, Zea mays
cagcttgcatgcctgcagaaaaccgaaccccacgacgaaaccaaccaacactcgcgggaaaatagcgatgagaagatgcaggcccagtactactccgactctcctacagtttagtttcccaagccctcagcctcacagcccggcccacaaacataaatgcaggcccatcgacgcgaccagaccacccgcataataataaatggccaaatgcaggagtggcgcccacgagtcggtgatacaacgtcactggtactggtagtacgccggcgcttccagttccagcacgtgggatccgcccggtacaggctacagagccggacccgtctgccagcgggagagcggccgcgtggtcgatccgcaccgatccgtgcgggccactggacgacggggccactaaaggctttcggccccacgccgcgatttcgaattttaggggtcccgtcaccgtcggtccttcgcaccacgctacccgtccgtccgcggttcctctcctcattccccaacgttcctcgctccagagcgtttcaaacggtaaggaagccaccccgctgtgaggttacttaaggcacggtgacccgacgcgagcaaagctccaagacccgcacgcgaacgccctccctgccgctccgccgtttcgcgtgggagtcgtttcgaaaaagttcgtttcgcgagcggtgaggactgaggagtgtggaggcctaaaaccatggcggcgagcatcgggatcatggacggcgcctacttcgtcggcaggggcgagatcctgcactggatcaatgcgaccctccagctctccctcgccaaggtcgaggaggtccgctctcgcccccttctcgtcacgcttgtttggttcgatttcgctgggcttggtgggctgttaagccagttaaggattagggttttgatccgtacggcggggattgtggtctctagttcgtgtgcggcttgacgcggaatttcgtgttgaagttgct

SEQ ID NO: 2918 - DNA, 538 bp, Zea mays
ttgcatgcctgcagctcgtatatttcaagccttcagggtggagtcattccacagaaagaaagtcgtggaatacggagatgacacctgtggattatctgatgaatgcacactttcacttgtttctcttaaaaatgtcaaaccaggacaacatgatacacatctgcattctgctgctgttcgcatacagaacaagtttcgcggatggaagggaagaaaggaatttatgatcattcgccagagaattgtcaagctacaggtaattctaacaagtaattaatgttttttatggaactttatatttttggcttatacatttccttgactatatagggtttgcaactaacaccacttagttgacctaaatgtgcattcatcttgcatgctttagcttataacggaagacttctgttccactaacttgaatggatggttttgatgaatatttgcttccttcaataatagatgatctcttctttcctttttaagcgcaattcatctatttgaaatagcacaatactgtagctcaaatgctacaaaa

SEQ ID NO: 2919 - DNA, 1234 bp, Zea mays
aaggaccaggaggtcaacttaaaagacgccgtcaacatcccgtccagaacccttgactgccgaggttgctgtgctggcttcttttgccctcatgggctcacttgcatgatacgtaagtaataggaagcctagctactgccctcagcatgtcctgccagcaataatggtcttgtgatatatatatatatctatctattcacttcacagcatgtcctctgggagcctactgccctcagtccactctgaataaaacaactggaatctgtgatccgtaagtgcatgcgtatatatatagttgaaataatgtgtatgagagcggtattgatagatatgcatgcaaacactcttggtgcagctaccactatcaaccacctgccgggaagccgaatcacacgtgtggcggtgctgatagatgggcggacgtcgttagcaccgacgatgttttctgtccacctggctactactgtccaagcacagtgaagaaactcgattgtagtagtgggtaattctatctatcgaatgcctcaatgatttgatattataatttgcatgcagacgaccaacattgcacaagtacgtacatcctcctttccatactaacaaatgtaagttaatttgcaggttctattgtcggaagggttcaattttgaaaaccagtaagttaacatacagttctttcacatacaaactctgatagataatacttatagctagcttttcatatacttagagctttgtgctcgtggaaattaaccaacacaagctatcaaagagcaggggctgaaatccaataatcaaatatctttcttatgattattatactgtaatttggtttggtatgctcttaaccgttttatatattctaagtggtcgccttttcttcaactcaattgcattgcagaatgcttccacaaaggaagctgtaaaccaaactccacaaatcaggacatcaccatattcggtgcgctgcttgtggtacgtactcttcatgcatctcgcatttcaaagagtatgatgtctttcaatgaaccaaattaagtcggatggttcttcatgtactgtagggtgctctgagtttggtgctgttgatcatttacaacttctccggacaactcctgatgaaccgggagaagaagcaagcaaaatctcgggaggctgctgtgagacacgctagagagaccgccgtggcccgtgagagatggaaaacagccaaagacatcgcaaagaagcacgc

SEQ ID NO: 2920 - DNA, 684 bp, Zea mays
tgcagcttgtgatttgatgaggtcgttattactcctgtcaatgcagcgagcagtggtactgggcagagaagcaactccgagttccgtggtgcaggtggcaggtgaacatgacacgcacgcacgatcggacatgaaaaatctgctgaggcaggactcgaggctaaacttttcaatcgaacacccttcaggtactagaagcaattacacattgcattactatcaccaccaattcacacaccatcagcgcacactcatcaccgctgctaaaacgaaagaattcatctgagggcgaacaagcgtcaagagacgcatgaaagaataaacagcacacgacaacgcccctacgacaagcgcaagaagacagaacagaaagatctcttcttctttttcccccttgttcagaaccttccgtcagtgacaataacacaagtgatcggacgcggacggacctcagctctgacggatcgatccggtggtcctcagcggccggtcgtccgcctcgtccacggacgcactccggccggaccgcgccgtcgccgtcgacgtcgacgccgtgccgccgagcccctcgatgcgcgcgacgatctcgggcatggccggccgctggtccggagcgggctcggtgcagtccatggccagccgaaggatctccaccatctcgtcctcggcgcccgggtgcctgag

SEQ ID NO: 2921 - DNA, 1216 bp, Zea mays
atgcaattgatctggctttgctattcattgcaagcggatccagggcgcgcgaagcgcgggcacgagcggtggtgcgttgtgccatgatttgtgcactgaaggcatgtacatcgttatttatgacatgtttggttcgctgactatcttaatatattttaactaacttttctatctaatgttagttcttcaatttatacgactaaccttagactaattgtggcataattagtcacgaaccaaacagacctaatgtagaggctattgagatgtttaaaacttaaaaggagtatatgcaaaaaaaaaaatatagagctatttctccgtaaagagatgtctctggctcgtgacccaagcagcaacagatgtctcgctttgcactgtacgaattcgtcgtcaaatctatcaatctaatattgtacaaatacatttatttctgtatttattaatatactatatttataaacactctattatataatagagtcttttagttatctcttatatttagaatttttagtgtttctccactatacatgcactaacctaccgtctccagcccatgtcgtcttattgatagacagtgggactgttatgggtcaagggccacttgcatctagtggtgtgctcggtgctgtaaacgaacgtaaggctatagctctccggctgtgtgagtgtctgtagtgctgaaaattattttagcctgaaacagtctggtttttggtctggtctgagctgaaaactgtgaaggtcgggatcgaaacttttaatcaatgcaatttctccgaggaagagagctagcagcagtggcagctctgagggtagggcagagggaggtcgcctcgagcccctaattatataggacctcaaatataattatacattcagtaattagactaccagttacaatagtttaatagcgaaatattgaataattagcagccacaaatcgttcacaacccgatcgtatttaaatatgttaaaaaaacttttaaaataatactataatatgtatctttttatttggcatgaatatttttagacgtattttgagtttatatattagtactatttttatataacaataatttgatgagtctctattttaaatttgtcctgagcctctgaaacctccggtccaccgctggctagcagcaccgcaagtgtcgtatctccaaagtattttgtgcaaatgttcctatggttctgcaggcatgca

SEQ ID NO: 2922 - DNA, 1057 bp, Zea mays
agtttccatggctagcacatagttttgggactgatttcacaagttgaccccccaccccaccaaaaaaaaaaacaacttgttgatacgttggtgttcctcggtactcgacatgttaactggatgagtgacaaaagtgttacaaattaatacgcacagcacaaccacctgcacttcgtatagtggagtgtcatttcccatttttttctttcttctttaccggttcattgaatgtggacgtgtggtcacatcatcctagagactccactagacagcgaagcttttcatgctggagactcctccgataataagtacgcttgttttgatcctgaatatgacagccagtcatccgtttgccgctggatgagtttattgccgatttgaagtatggacacattcaaggccttaaccttatgttctgtaacatctaactgaggggccgagaaaaggcgacgtgtatctgctaaaatatctgaatacttactgcgtgagtctctctgatggttaccagcaaggaatttgatcgactcagtcaaattatcttaagttttcactaactttatagaaaagtgtaacgacgtctatgtatattctacgatttatttaatgatactaaattgatgtcataaaccttggtggctagaaatccggtcaaagattttcttttttaaaaaaaattaaggaaactctagggatcaatttattcaggaacagaagcaaaccatgaaaagaatatctaactggttatgtttttattacctggtccccatggtcactgagtggtctgctttcagtagaatgaatacttttgatcttttcacacttcgatccctttcaatgaccgtcccggccccgggcacaagtgaactgcacaggtcattttcatttgtttcttcaatgttaaacactctgtgctttcgtaaaatgtcaacgtaattatttgatgtcatcagatctagtatcccagtgcacttatgtgaggatcccctgttttttcaggtaacggtgctaagagtgtgatggtgtattttaaaatgcatttctggttagtccttgtgct

SEQ ID NO: 2923 - DNA, 1254 bp, Zea mays
gcatgcctgcagcggcaggctgtggaacacggataagcacatgagaaacattagctataccaagggagatcccaccataccgcctcctcgttcatgttgcatcgccttcgttctgtttacttctcagatctgcaacaagcttgcatgtcttcatgaaagcgtctagcagctgcatacaaaagcatccatgctaaagtttgtgatgttctaaacattaattatactaggtcattgcaaaatgcatggatggattgaaaagcatgcatggcatctccaactgacgagatacttacaccaggatgctgatgcaaggtaggagagtaatgatcgagagctaaatatatctttcgaagaaggctcaactgtgcggtgatcttgtcgcctaataccataacctggtcacaaagaaaaaaaattcagagttcctgcatgatcaatttatataatcatatatcacgtgctcttgcagtcaaaacagaaattcaattctagaactaccttggcttcagccttttggagctcagaacgcctcgcttcaatcatttgtttataccaaagccctatctttgttagtaccatggcttgtctgaccatgtggttgcagtgatcgctcagttcctctgacctgaaacggccaatgcacgacatcgacatcggaatcgggtttttgaaaaaaaaggaaataaaaatgcctgtaaagcaaaatgtaatgaagatgaacacaaacaaacctgttttcagttctttccgctgacatctttttctcgatctctacaaaatcttttgatagtttcatgatagatactaagatgcactccagctgcttctcttgctcattcctactgaggctactactgcgatccatatttttgttgttcatttccttgaggacacatgacgtttgctctaagcttgagtctagtttcacaagttcgtcataccttgaatcgttcgcatttgatcttctcggtgacgtgcaaggctcaacctcaatgtcacgcagaacaatttctgtgctatcttgttttatggcttctggaacttcctggtcaccgtggatcaagtgttccttttctaactcagctaacttctcctttaacctgtgattttcttcgttatataggcataatgccttatccttttcagagactgcatatcagattgcattggaggccttggaggtaaaggtggcaaactaggtggtggaggcagcggtggtaagactctcgctgcaggtcgacactagaggtcccg

SEQ ID NO: 2924 - DNA, 974 bp, Zea mays
atgaaacatattagaaatattgacaacgtttgtgttagctgagtggcacaaattgaagttctgatcatgttcacctttggaatcaattgaagcatgctgggagttgcatttgtttgcaatcttggcttcaacttcatggatttcaatctttgctgaagatttaactgcttttgaatctgctagctcaggagatggcgcagtttgatgttgttcctccttcggaaccaaacaagcatcatttttcacttcattccccatggcaactttcttagcatctgcttgccctggatgtgatgggcccatgtcactttctactttaacctttccagtattgacaccctcacagaccaatttctttacagaagtacttggtgaagaagctggggaaaccaattcagatttagatatttctcctgccacactagcaagaagattcatagctgtgtcatctccagcttgcagtgaatgactagcttcagagtacttgatttcaataagagcattcattgggctgaatgaggttcccaccttagtttcactgacacctttttcattcatatatgacgagcacgcagctcgcgatgcatgtgcatccttaacagaatgatcaggtgtcctgctgttgtcatcatctaatatagcacatggtgatttatcaccttcctccgaaccagtagctcctttaatgtcgttgctgtgccaggactctgcattagcatcagatgctaaatgaggccgagaattttcagtcttcactttcaccctgcgctcagtctgatcatgcctatctgcaaccacaggagatgaagctctacccccagtaacagatgggtcatcaaaagatccagcacttgcacttctagcaggactacgaccaggatttggaaagcgaacaatcaatctatgattatttccatgatcagatggcatatcaattcctttttcagaagctgtaccagtttgggatgacttat

SEQ ID NO: 2925 - DNA, 1088 bp, Zea mays
gcaggaaccaatcgtcgtccttcaaattctgctcctgctccccgtttaagctactcacctcttcctttttcacctctgcaccaccagagctctgtgattgggcaacatacttgaagtcatcaccttcgtcagatgttgttggcccatcctgaccatttctgaagcatgagacgtgccacaatgcccatccctataagctcaaaggaaagagaaaagacgctccggattattccaagaccaaaagaagaccatgagtaacggtcgactaagcatatagcatagtcagttgataagcaacattgcagttcatataacaaactggatacactgatcactccaattccgaacgccaacctgtaatcagacatcacatgcaacaaaaatggaagtctgaagcccagatttaaccagcgaaatgcaaaattcaacaaatccaagcaacaaaagagagcaaattatgtactgttgaatgaagatttagcttgcgcaaacagctacaatcgagtgaacagatagacgtaccttcgctggagccccacaccgaggcctgaagccaagcaacggcctcgcggcgacggaggaggggagaggcaggagccgaacccggaaccttggagcgggatggacgaggcacgaggcggaggacatgggtgctgtggggtggaggaggcgccaccacgctgacggctccaggccaggcctcttgatccctctggcgacgcggcttcgcacaatgccgtggagcagtggcagatccaggaacagatcaaaagagggtctattaagacaaggttaaaacaattagacaaaactaaatgatctgattgatgtttaatatgacacaaattgtttagaacagttgtcttagaaacatatttccccttattattaatgacaaatctatccatcctatctctataaccataaaaattaattttatcaactaacccagcaaataattgaccaaaccaaaatactaaataattaattttaatatttcatcgactaagtaactatcctaccaaatatcagcttgtttatcaagtcaacttacctagcaccagacaggcaggctgcaggcatgcaag

SEQ ID NO: 2926 - DNA, 782 bp, Zea mays
tcggtaccctggggagctctaccgtcgacctgcaggtaacagataagaaaattcagtgcagagtaaccatgcaactatttgctaccttgcagaaaagtgtaaatttcgaggtttcaagcgcgtatatagaattccaatctattttcaggttgcaacccatacgtaaggccagtggcaaaattgcaaatgcccagcagaaacttgagtaggttcatatcttggaaaaaaaaacacttgtcaccaatgtaactcgaatgtaccttgagctggcctgcctcagtaacgaggaagttcagtgggatggtcacatcaaatacttgtgaagccatgtcattgtgtatatcattcaattcactgctcattttgattttttggcgactgccatatagagccttcgttatcaccaatccgttgttctctagctgtctattcttcttacggttggagacaggttccagtaatttttgagctttttcagctgcctttctggcttcagttagctatacaggaaaatgatatcttcaattagttgctaattcttttcaaaaagcacttgaacatggaaaagcagttagggaattattgcaaacctacatactgcaagaaaggaaaaatcgatttcgttaaaaaggtgataggcatgctacttgtatatgtacatatgcataccatttagactagtatgtggcaaccaaatctgggtgattgttccaaaacaaaactatacattaatagggtgtttggttaaaagagtgagttagtcctttcacctcccttttttg

SEQ ID NO: 2927 - DNA, 1277 bp, Zea mays
  unsure (1)..(1277): unsure at all n locations
cttgcatgcctgcagttatggtgaccttttaggtggtcatcttgttttgttgtggccggatggccatgattattaatttttcttcttctttctttctttctttcttttcttttttgtgtttgtatttggtctatttttagaccctccttcnttcttaattcaatgatacgcagctctcctgcgtgttcgagaaaaaaaattgtagaatgctagataggctgattttgttgtatattttctagagctagagaaacacaaaaagtgctgatcatcttggtcagatagagtcacttcatgtaggatatcccaaagttgaaaaaattgaaaaaggccaaccattgacaaacatttcatgtaggatatcccaaaaaaagggcgtacccaatgccgtaggcttcccgcactgtgcggggtctagggaagggtatctttaagcgccaagccttatccgcataatatgcagaggctgtgcttgaacctgagaccttccggttacagacggtaggctctaccgctgcaccatgcccacccttctcatgttggatatcccaaagttgaaaaaattgaaaaaggccaaccattgacaaattaccctgggtatcagaaaaccatctctagtcccctaaagcatcaaccacaaatatttttctcttgaatgtaatttaaaccgcctcgaacgtagctggagcaacatcagctatgctacgacccatcagctatctgacggaccagaaaagggtcgtcaaatcattaccaaccatagtaacgattgcaatggaaaaaggatgttgctttcttgtgaactagtatctctaagccattccaagttctcggtgccccagttttttctaaccagagccaacggacttgcagagcccaactcatgagcacaaatttagacaccttatcccaaaccacaagacatgaaccaccattaatttgttgtctacctttccataagaaagctcttcttgatttatcgattgctttgatgaaccattttgggaccttgataactagcagcacatgaataggaattgcagtcaagacaaatttgacccaagtagctcttccagccattttcataaggcctactttgcaggaagtttgttatctatcttctcgacccatgaccaaggagcgaattttgttaactttctgttggagatgggtaaccctaaataagtacatgagaactttgagcgcacacaacggatggtttgctcaaccacctccatatggtctgaaccgcgttaaaaaggaattacacaactttt

SEQ ID NO: 2928 - DNA, 1022 bp, Zea mays
gctgctgcctgctggtcctggcatgaaagctagtacgtcgccattttctgcccgaaaaagattcatcaagatccaacggacggacggacgggcacgcgcacgcacgggctagctacctatagaggctatagctagcaatgcaagcttgctgttgctgacacgcagccgctagaaccgatgtctggagcagagcagagcaaagcaaagcatgttcattttctggaagatgactcgtatactgccaggaggaaaaagccacacaacgagcgttgagtaccggccggagtcccggccggagtacgagcacacacaccactgggcacagctgggaatccgagtcgctttcgtcgtctcggagtcgcgtagacatggacttttcctggattcttggcactcgagctgctgagcgccgcctgctgacggtcacggatcttgagaaacgcaagtcaaacgctcacctaaaaggctagtagcaggtcgtagaatctctcgaaaagtaatactggctagctagggctaaacgcgcgagtggagtagtaagctttactaccagtttagaaaatcagctggatgcatgcatgtgacctgttgctgctgcaaagagagagagagagagagagagagagagagagagagagagagagatttctccgcgactacgacagtgctgcaaagctgaagttcttgtttcccagaggaggcggatcgaggaggaaccaatcgatcgatgaacgcggcgtagacgtagcgcagtagcagaggctgaagcacgatacatgtctatgccaagggttaggtgaagtagtgttaatggcaattcaaggcctgcatatgcatcgtcgtcgttcagtccagactagagtcaggctacagagtactgtatttactgggggggatacagttgagtactacacactgtgtgtcgctgaagcttcatcagcctttgagcagtccgagaaaatggctgacgatcgaggagggctgggcggctagcgcagtcgagagagacgacaggaaagact

SEQ ID NO: 2929 - DNA, 1381 bp, Zea mays
aaggtaactgtcatggatatatccaagaaacatggaatggactacagacttcttcatgcagtcataagtgggcacccttggtacggccaatggggatacaagtttggtgccggcagctttgctctcacctcagacacctaccgaaatgcagtagacatgctttccagcataaacctggcgctgtacttctcgcaccgcagccaaattaggactccattgcagaacacaatcgctctttattgggcgctctctaatcgccaactagtaaccctccgggatcttttccgcttcattatgcacctcctccatcaaggtcaaaagatgtcaaaaccctcagcagacaagcacaaggagcttacatctaatgagctgtgtgcatggactaaagaagatctacatagagcagaaggtgcaatgctcaaggttctccaggtcgtccaaactggacagtgggtatcttggcgggcactgaggggtgctgcgtcgaaggctgttgattcgcaagagctgcttgattattctctccgaggactgggtgggaaacaactggataatggcctttgtgttgctgtccgttgcaatgccggtactagtgcaatcgagtacaggtgagcactgattgctttcccttcataaaattgatgaacttgatccggaaactttcctggctaaattgtttcatgacaatcaggctggaatcttcctccgttcggtctccagcaaatgcagctacatttggaccttctgttgaccaactgttgcatgatctaaggttcctctacgatgctttgctgaacccggagtccatgttgtcttcacaaccagaggtggttggtgcatcagcacacagcgcagcagcaaagataattgattgcaagcagttcatcaaacattatgatgagcatgctctgcggactccttcaaatccattcctgctctgtgtgaggtgctccattgaactgcttgatcacccaaaagattacacgacacctccagaagaacttgtacttctaccagcaagtgctaccctaggtgatctgaaagtacaggcttcaaaggctttccaagaaacgtacctgatgttccaaagcttccagactgaacagctccctgactttccaaacttcagtgatacaacccccgtgaagcatgtgcttggatcaggccagttgcttcgagtaaggggacgttgcactggggattacaggagaattgtacagttcaggatggagaggggtttggagaactggacggtggactgctcatgtggggccaaggatgatgatggggaacggatgctagcttgtgacatatgtggagtctggcagcataccaggtgctcgggaataagtgattttgaggaagtccctgaaaatttcat

SEQ ID NO: 2930 - DNA, 1296 bp, Zea mays
atagaggaacattatgattgacagtagatgccagaaagtcaagactaatggaaaataaaacaaatagtccagatatcccaataagtagaaagaaattgagtgagcagtaaataaaaacaaaaaacaaaattacacaaagcacaaggtacatgacaaaatatgggcacaaaagaagatgtcctatcaagatagaaataagaaccacatgtcacatttgaactaagcagttaaatgtttcgaaatagacagagtttgacaaaacttcaaaactgaataaaacacaataagttttcacatatatggtttatttgcatatgacatgagtacttgtgctttgcctaagacctacaaaattcagtacaaggcattagacagtgaataccagtgaccagccctttagtcccaagcaagttgaggtaggccagaaaaggaaaagatctccaaccctcattgtccagatagtggttgctcagttctagggagggaaaaagatcaaacaaacctgccttgaatgcatagctggtgctactgtcaatcaccaaaaataaaggtcttcttgtaaatgggattagatcaccagggtatatgcaatttgaacctatatatttcagatatggcagaaacaataatcttaatgaaaatgacataattctagtcagcaaaaggaatcttataacaaaaatggaaagacaataccttcagtttcacggcagcctaaccatagacaaggttctttgttttcctttgaactagtatgactaagactggatatgtcaaacttattaaagttgctcaaaacattttcaccagtatcaggacaaaatccagaagttcccatctcccctgcataatattttaatattaactgaaatgtcattgacatacacagaaatgtgacaacattaaagcaaacaaccctggggcactaacctgtagctgaaagatatattaacatgataccatttgaaggaagctcctcgcattttgtggaaaggacctggatttaaacaaacacattttagaaaaaataataataatattttatatggttaaatggacaaataataacagctgcatatagctcttaaaattttgaaactatgggtagagttgaactagtcttgctaaacaaataacaaacacagaccaacttaagttcgatgttaaagcatctgtgttgtcacactttctaagaaaatttgcagccactcatgccatgaacttaagtagcgtccctcatcatcatgcttccttgtcagataattcatatcactaagtccgtacgatatattgcag

SEQ ID NO: 2931 - DNA, 1062 bp, Zea mays
agatagtggtgtaacccatgccgagcatccggaggagggcaagtgctccttagctgatgatggaaatatccagaagtctggggttatggtcaaagaaaaagagacacatggacaaaacgctggggctagtttggatttaactgaaagagttgagaatgttgacactggtgaaaaggcgagcggaggtaaaatcggtgatattggcactagtcaactgagcatgacactgtatgagaaaagtcaggctgctcacagggaggagaggccacgcaggtatgaaggcgtgcatgttgagtctcacaaagctctgatcgaagagttggagaggtctctttcgttcagcagtgaggatgactacttctcggacgaagcagaaagcagtggcctcagtgatgctctgcgtaaccaaatgggtagccgcaggtttatgctagggggcagagtgaatgatgcgccccgaagcgatccacatggtcgattgattgaagaactagagatgtctttcagcgatgcagaagagccattggagcagcatgctatgggttcagagagagttcatggaaatgtgcttgacaaggatccacagatcctgagtgataaaagtgcacatccatgtgaagaaagcctctcatcatttgagagtggacacctcaaatctgaacaaactcctcaccaggaaagcagggcaataggggcaataggcaatggcaatcaaggaaatgagcgtattgaagataacaataatactgccgactctgttcatgggagtgagcatattgtgattgacgatgacaaaattgcagatatattccacgagaaagaacatgataaggattgccagcttgcaaacatagaaagtgcatacccttctgaaggaagcacctctgctgtcgatgattgcagtattgaagttcagcaaagttttcaaccaaatgacctgacagcagtcgatgagtgcagtattgaagttcagcaaagttttcaaccaaatgacctgacagcagatgtcaatcaagaaatggaagatgataagataaccaatgataacatagtacctgcagg

SEQ ID NO: 2932 - DNA, 1059 bp, Zea mays
aaatcttctcagtacgagcaggtttgatgataacggaatattggaggggatggagagcaaatccgttaggcaatgttcgttttaattgcgtaacctatctatacgtggctgtagtctttgcagacatcctaattaccggccagacatactgcttgcttctacaagcaaggtagggtgtcagctataatgtatattttatccatgctgttgtgcatcttggactcaaaatgccttagctctgtctgtaacaagtctgcaacggtactgtcaggttcaagctaatggcgccattgaattgatgtcagctaaatgcatgtgagacaacctccacaaggtcgccgcgccggcgagagctaggatcagcaacgagaaaacacaccgctcgctggtgggagatcctgggccgggacaaaaaatatattgtagatctctagaggggacttgagttacaagccatccttacgaaatggtttatatataaggatagcttaagttagtgcatgtttggtttctttagtctaggaaactaaactttagtctagagattaaaatttagtctctaccatatttggttctagagactaaaaatgtttagaactcattaaatgactaataaaaataccaaaatactctttatcattctcccgtcattacacttcttccactgcaacagaaatgaatgagagtcaaaacgtggaattaatatgatattgttccttttagtcactccttaagagactgtgaactaaaataatttcgtccttattttagtcccactatttaataatttagagactaaaatagatccttactagagatagttgataatctttagtctatcgaaccaaacgaatccttactagagatagttgattctacaaagctagctatttccctgtgatggctagctagacaaatgtccctagaaattattgatttttagtgatagtttggtaggggcagctaacctctaaagttagattctctcattactaaattctcagaaaaattcatcagaaataagctaaaccaaacagacccataataactgatcatccg

SEQ ID NO: 2933 - DNA, 709 bp, Zea mays
actgggatcactagaagccacatggtgatagattgttcaattccaccattccatgtgaatcatacagaaagcagatgactgctggcaaaaagaaagaacattatgatatataactcaaaaggagtgaaaatatattgcactataaaactggaacatcaaaaggtgaactaatattcaataggaaagcaaaaaagtgtataatgaaaatggcacaaaagcacatagttccacaaggaaatgcagcctataattctcagaaaacgcattacattgtacagcagtagctactaaattctgatggagcaataaaaagctttgaacctagaacaataccaagtaattagcaccactgaagtggttgttttccagcagcgaaataattactgataaatgatcgaatacataaaaggggacaaatgatttcagatgcgaataccatgagacaaatttagctggttggttagtgaagagtgagtcaccaatggcccaagccaagtacagttggtgcaatggaaaactgacacaaactcggcatatcttattatcacttctacagattgaatctaaattggatagtatctagcatcgcaatcatatcggacgatcgataatttcacatggacctgtgagaatcgtgggttatttggttggttggtgaatgcctggatggcaaaaattaacctagccagctattcaattgaaatttagc

SEQ ID NO: 2934 - DNA, 1180 bp, Zea mays
acccgtagtcctctcaccagcagccttgataatctcaatgctgaggggggcaagaacatgttgcgggacaagaggaagaagataagcagcaactgcaatctggctattagaggtggcagcagtaagggctaggcaaagctccatttctcgacacccgtggttgacaaaccattccacaacttggaggcacccacgttcagcagcacgcatcaaagggccaagaaagccaatagcattaccttcttcaaccaagcatcccatggtttcgatcttcccatagtgtgcggcaaagccaagggctaggtccacatcaatgtccaagctgtttctttgagcaacctggacaggtacaaataatgaaatgtattcaaatgctttcaactgccatttgtttaagatatagatttgcaccaagagataaaatagtgcaaaactcactacgcacatgataaagtttaacaacctgtcaacctcataatgaaaacatcccaaatgttaatgtttgaagaaggaaaagaacctatcacccagtttataaagtttgcatattcagaaatggcccaaccatgataaactgcgtcacaaaactgtatttgattttataacgatgcacatgcatgatgcatctctatctggatttggcctacaccaagtaatatgaattacagcgatacttcactcctatgttaggtatcgcagtcttgtactataactataactataatgtgtttgatacaaacaccatatcaacaggcagtgcagattagtttaattcaggaagacaaggacacgttccatcgtgggttcatgactccactatgcttatacacgagaaatttggttttgcagctaccagtgaaaagattactgagtgaaatgacaatatcttgagctaatatttaagggaatgggattcaatctcattaaacccacaaagctgacttatactaaaccttgagtgtgacaggttctctggtgtaagcatgagatctagcacctcaactgccagtgccattaccaacctactatttgtccccaagagtatggatcaggttatcaagcatcctacaactaatccacaaggaccatggatctatacacagttctggaagtttcatagttcagaatagataacacattacatgaaactgaaacatgttctgtaccaatatattattat

SEQ ID NO: 2935 - DNA, 1198 bp, Zea mays
ttgcttggagcagaggtaactactattaacatcatatttgcgatgaagccattttgttcaccaaaaccagtatgataagctcctacatttttctaaacagaaaatacaattctcataattatcatttttcagtctggcattgcaggcacatggtatactaattaaagttactaaatgaatattatatttgtacggtggatgcaaatgttaagccttagtgattttcctgggtttaattctcaatacattttttttcttgacaatcaacatgcgactgtgcaaagcatatgaatataacatttttttatttcaaactgtagcttggcttcgattctttgcattttgcaagaatcgattaccaagataaggaaaagtgtaaagctggcaaaggcttagaggttatatggcgcggctcaagaactttcggttcatcttcacaggttcttattcttcttacaccacaattagttctgcctattccattcattagcacaatggatcgaattttcatttttttgaagggaatttgactctgtggtggttaaattgcagatatttacaaatgtatttcctgtcgattatagccctccagatggctttggctttgaagttttagatgaaaatatcttgcctgtctaggtacatgtatgcaaccatttccatgctcctcgaaccttacatgcatcttagattgaaatttgtaggatgacatgctgatgtttgactataatgttgaagaatgagttaatgattttgttgctgtagccatagaacaggtaaactttcaatattgttgccacaggttgtagttcactagagcaattaattatgcttcgttcaaagtaagaaattggatttaattaacttgtgatgatcaggcaaattttacgcgtacaaaccacataatgtggaccatgggagatgattttagttatcagtatgcagaatcttggttccggaatatggacaaacttatctatcatgtgaacaaggtattgctgattttaaactgaagctctcaagttttgatacacagttttcatgttcagctgtcattttaatttacctttctgcaatgatactactacgtacaaagtcctttttctgtaagatgctgcctaagcacattagtcatgtgcaatatgccacggttaattgatgtcgtggaaccaatgaattagaaaataatgcccggatt

SEQ ID NO: 2936 - DNA, 1134 bp, Zea mays
tcgctggcacccgcccatcctcccggcatgggcccgtgcttgccgtgggcgctgggcctcctcctgccgtcgctctgggaggccaaggtcgccttctccgccacggcgctgctcatcgccgcgctcatcctcttcctcctgacaacggaccagcacgccaagtccacggccaccggcggcaacaggccagcctcgtccgcgcgttcatctgcaaccgcagcctaccaccgagtcgcgggccgccgccggacccgcgcgaggggcgaggcggcttctgatgatatcacttgcgctcagggcggcggcggctacgtcgtcaaggtaaccactgccacatgcatgcatgttttcccatccccatatggcatttggcaactctgatggattgcacctgcatgcctctcttctgttttttttacgtcttgagccttcttcgtatgtgtgtgtgatctgcggtgcttccagctggagctgctctcggccaagtacctgatcggcgccaacttggacggcagctccgatcctttcgccgtcatctcctgcgccgaccagaagcgcttcaggtgctttgttacttgcctccctccacagctgattcttcggaatcggagctcgtgaatgattatgatcagcgaagtgaggctgctcacactgtctatgcagttccatggtgcccagccagagaaaccctctgtggggggaggacttcaatttcctggtcgaacaactcccggtagaagtaagcaacaaaaccagcagcctcctcactactcagttcctcactgcatttgaattttgaagtgcgcagacagctgaaaaaaaagtgaaagccactgtatccatctttccagttccatttattactaccagcattccaagcgactaggcagccagccctcttcaaagcatgcctgctagaactttcagttcgattatggacgtgtcagttcccagcaaaatgatggatgcctcaacacgagttaacccagccacgcattcatccacaactgcttagcttgtctgtcagaagcgtgagagaacagcaacagtttgtttattctagacaaatgctccgttacagatggcccagtacctgtgcacgccagccttgttctgatataaaactattgcttt

SEQ ID NO: 2937 - DNA, 1023 bp, Zea mays
gtgaactcattcttttttatttaagttcaactgtagtctgaacatgaaagctcggttggcaatacataattgttgaaggcatcattggtgttatcaccatagacttttcttacctaacagcgtcactaccatattgattcaaacgcacattgccaatgtgaaagagcaagaaacaatcttaatggatgcaatcattaccaaaaaaaacataaagggagcttaattgtcagtgtcattcttactgattccagtccctttcaaataaaagtaacccaccacatcaactctcacgtcagtttcccattcagtgtaagaacaaacatatgcaaagtgccaaatagtcaaaatatcaacagtagcacagtgggaattcaaatttcaaattttcaccactttctgacttcctaatgatctcagaactccattgttctaaaattcaaaggttgcgggggcattagcattaaaaaatgaaaatgaagttagagggaagctttaatgtaactacctatctttattctgaacaaattcgtactaaattctcagtggatggcaaccaaggaactgaaccacattgtccatgtggcaacattagttatacttaggaaacagagacctcatgacactccaacaacactgtcaaccgaattccatcgtcagaaatttggttgctccctcaaattttccagaatggcagttgagatttagctgtctactcggtaatgaagaagctcctaggcaacttagcagctaatcaacaaatggctgggtgatgcaagtgtatcattgcgtactctgacagcagaaaaaaacacgtgatgtcttgcgtgttcagagttccatataccatagcgtctttggtagaactggcacagccgttgagcgcgtcctggccctgtgagccgtggccatcagcggaggagcgcgcccggcgctcccgggcgcgttcctgcacccgcagcagtgcgtgcatgcacttgagcgtgacggccagttgcttgcgcacgcgccggccgcgcgccagcg

SEQ ID NO: 2938 - DNA, 1022 bp, Zea mays
ggtcttggatcatcctcgtcgccgcctgcgtcgtcatgacgcccgtcttcgtcttcgccgagtcgctgctcctgctcatcggccaggacgccgacgtcgcgcgggagtccgccaggttcgccacctacatcgtcccctccatctacgccatgggcatcaacttcgccgccagcaagttcctccaggcgcagagcaaggtcaccgtacccgcctggatcggcttcggggcgctcctcgcctgtgccctcctcaactacctgttcgtcagcgtgctcggctggggcctccccggcgccgccgccgcctacgacatcgcgcactggatcatcgcgctcggccaggtcgtctacatcatcggatggtgcaaggacggatggaaaggatggtccgtagccgccttccacgaaatctggccattcgtcaggctctccctcgagtccgccgtcatgctctgcctcgaggtatggtacatgagcctgatcaccgtgctcaccggcgacctggaggacgcccagattgccgtggactcactaggcatatggtacgtacgcacgacggaggatatgctaacggtagattattagatcagaatgtttcttggattcctttgttagatcagaatgtttcttggacaaacaaagctcatctcctacataaatgtgtatgtcttcagcatgaacataaacggatgggaggccatgatcttcatcggcctcaatgccgctatcaggtgcagtccagatatggcctctatgtgtactatataatatagctcaatattctgtgctgacagaatatatgcttgctgttgccgggtactgatacagcctctgctctgttgtgttcctttgccatctaatttcagtgtccgagtctccaacgagcttggctccggccgtccgagggccgcgtggaacgccgtcatggtcgtcgtcggcgaggcgctggtgatcgggattctgtgcatggcactcatcctcatcttcagagacagcttctccatcattttcaccagcgacacc

SEQ ID NO: 2939 - DNA, 825 bp, Zea mays
tatagccagccagggtcaacgcgtcgcatcgattcgccccgcggaaaactttttttttttttggctcacttcccccgacccataccgcgcgaaggagataataaacaccttatcttgttcggttattttcgtttcacgtggattagaggggattaggatatattatggtagattttaatttactataaatttaaatcgactcaataccactaaatccaaatggattagcatcaaaccgaacaagtactaaagtaacatttaggactaatttgtaaactccatttttctcacatatattatttagtgtgttggcgctgatccaggcgtcaatcactagtactggtagaggtgttatctatggagacgcggacggtctacggcctaacgcggaagttgggattcctgtctgatgagccggacgatgaaaaattatagcctatgatgatttacatacgaacgatccagtttgtacataattaatcttattctataataatgcatagtacaccgaagttttcgacatcttatcgagtaggggagggggttttttttttgtcataataagagtaccccaccctttctaaatatatttaaagccaacatacccgctaatagactatctgggacaccctgagatgggcccccaccccattgccaaagtattttatttttattggggaaacgtatatccatatcgtagactccaaatcctcatttccaccatttccccgttatggcttaatccctatccttcccaactctccactttcctttggttcgcttataccataacaacccatgagattcattgcctctgtggttcac

SEQ ID NO: 2940 - DNA, 988 bp, Zea mays
tcatgagcacctttcatccataatggcaaatatccattgtgattcaattcgtttagtgtgtagtggtttttggactaacacctctgtcaactttcaacgtttgtgcaaatggtaatgattttagcttttgcaatgcagaatttgcaggacggacctttcaattttgttttgcttgatggcacctggagcaattctgctgcactgtacagaaggttgaaggtacagttcaatgcatttcgcatttgacccatgcatgcctttattaggctgtctagagtctagactaccagcaaacacagaactgcgcaaatttcttcagctggctgctgggtctgacatgtcgattacatttacacagtcacacagacatgctggtcccacgtgttgaattcatatacattcaactaaatcaatgaatgtgtacattattaagtatttgacccttgtgttggaatataatataagtgaattgtccacctcttcctatcagcttaagtttttttgttgaattggctagtgcatgcaacttaatatggtatcagagtcagaggtcacgagtttcgaatcctggttagcgcaattaaaataaaataattgttgctctttcctattccacgtctgagacccaagagaggcttgacgtgagagggagtgttggaatataatataagtgaattgtccacctctttctatcagcttaagtttttgggttgaactggttggtgcatgcaacttaataccttgagctatacccctccgtcccaaatcaggaaaaatgcttgtacagattcatagctaaagggtcatctattttgggatgaaggattatagcttaatgaacttcaatttccaaaggtttagttcttgacattggcttagtccaaatagaggtttagtggtaaatgctgtccgatggaactagacgcacaatagtatggtgtttagttggtataattccactagatgattcttgattagttcatacgat

SEQ ID NO: 2941 - DNA, 946 bp, Zea mays
agaaggatgtggcttctgatggggatgaggctgagtcaacagggattgttattagaagccatcaccctgctccaagatcaagctcagagagttcattcactcaacagggaactgctatgcaaaggctgcggctacagtcaggccttaacaaaggccagcgtcctagtactgatgattcatcaagctgcattatagacgaaccaggaagtcagcacaaagcagaaaaagcggaggtgattgttctttttgttacccagaagctaaatttacatctgttttttatgctagtgatgatcggtatctaggatattccgtagatactagttctgttagtgtactgctactattttgcagtgttttcttcttaaatcttcattgatcctggccctgggtgatctattttagtaaatggtaccatctgaccttttttatgttctgtcagattgaagaggatgcgagtacaaacctcactggaagtgctgatgatctacctggtaatatccatgatgatgagcaaaagaacatccctgaatatggtaatatgctttggaacttttgtatattgtgtctcttgtgatgacttctgtttttgctaaactagttaaatatattgttgaactgaaggtgctgaaatgacttctccagaagccaaatctgttctgaggttgcggaagacttctgaggaaagcaacaaggatgtcaagcaggagagttgtctcgagccacacgtgagagcaccaatgcagaagggaggcttccaatcatacatcatctggctggttcttccggtggctctgctcctgcttctctgtgttgggacatatggatgggtatgaaatctatcctggtgcggtgcaaggcatgactttttgcgcacatgggttcttggcgtcaacctggtgtgctgtcttctgtacataacctgtggcatcctttcaacagccgt

SEQ ID NO: 2942 - DNA, 533 bp, Zea mays
ttgcatcggctcgacctctcgaacaaccgcatcgccggcggggtctcgccggaattcaacaggctccagaggctcgctactctgtacctggagaacaacagcctgaatggcacgctgccgtccaaccttgacctcccgaagcttcagcttttcaacgtgtccagaaacaacctcaccggccctgttccaaagtcgctcgcccggatgcccgccagcgcctttgatgggacagggctctgtggtgaccctctagccccgtgcccaacccctccgccgccgccgccgccgcctgttccggccgctgctaatggtagcatcagcgcaaagctctctactggtgcgatcgccggcattgctgcgggtgctgccgtggcgttcttggttctgatcgccgtgatcttgttcctctgctttcggtgtcagaggacaatggccgaaaaatccgcggagacggcagccgacgccgacctggacgggtctcccgtgtcggtcaccgtggcgagcatggacatgaagaacgcgacgaggcggtc

SEQ ID NO: 2943 - DNA, 718 bp, Zea mays
agccgcaccatctcctcctccacgcgctcctcgaccgcgatgctggcgtcgaacacctcggccgtccactcctcctgcaccaccgtgcgcacccacagcggcagctccacgccgccggtgctcccggggaccgagttcaccggcggcttccccgtcagcgcctcgaggagcagcacgccgaagctgtacgtgtccgtctcctgcgacgccctgcgcgggtcggtgacctcgggggcgcggtacccggtgacgcgcttgaggggcacgtgcgcgccgacgagccggaggatgccgtggtcggtcacgtaggcgccgtcgcgcgcgtcggcgacgaggacgttggacgacttgatgttgccgtggcacgagcggggtccggcgccgtggatgaacgcgacgccgcgcgcggccgccagcgcgatgcgcgcccgcgcctcgaagtccagccgctcggggctcccgccgtggaggagggagcagaggctgccgccgcccacgaagtcgtacacgatcagcttctcctcccggctgtagaagtacgcgcggaccggcaccaggttctcgtgccggagcgcgcccagcgcgatcaccttgtcccggaactcccgctccgggatgggcgccgccctgagccgcttcacgggcacggtggtggggccgccctccaacgtggcgcgggtacgttattgccccagcccagccccttccccgatcaacc

SEQ ID NO: 2944 - DNA, 996 bp, Zea mays
cgagctccacctgccgccgcgcctgggcttgctcggcccgcgccatctccaggcccaggcccagctcgtcggcagcggtcacgacggttcccagctcccgcagagcttgcgctctgccggcctccgcctcctgtgctctcttctggtactccgtgacctcttcccgcaccttgtcgagctcatcctggacatgcttgcgtttctgcgccacgcatcatatgcatgctgcatgcatcaagaaactagtgtctggtctgaacttgtgaagaagggttcagattgcacgatacctctctccaatcaacaacccctacagctccgaatttgctgacggcgcccttgacggaatcgacgatgggcgccgcagcgtcgatgccggccttgggatcgatggcctcgttgaagcggccggcgatctctgacgcttcgtagctgctgcccgccggctctcgcgtttcatccagctggtggacctgttgctgctgggcctgacaggattgggagccttggtcagaactggatggaacagccgccgggtccggaggcgcatcaggagcggtggaggaggggtggctggtcgtcactggggcgttagcttcctccatcacgcagccgcagcataggtgtgtgatgcagaggaagtgcctgacgaccaatgtgcatcaaacagagacgtatcaggaattcagcagccacggatgatgctgtcgagtaattaattaattaaaaccgagcatttgttcgaaaatccaaatccccaaatcaatgaactgagaaggaatgcggtgcggtgatatagatggcagcaattcccaccgacaacgacacatacctggatggccctctgtgttcctcgcaggaagtccgtcgataagtgggagagaggaaaggataggagacaaacagagagatggattggagaagaagagaggaggggggagaatgtggtggggagagaaggtcgcgcgccagccgcggagccttcttcccttttga

SEQ ID NO: 2945 - DNA, 1037 bp, Zea mays
tactggagggcgaccgcgtggtctggcgcaccgacaactccgcgacgacgacgtcgccgggaacagcgggaggcgaacaggcagcgaacgtgacgctcaccgtgctcgacaccgggaacctccagctggccgcgggcgacgggggccccgtgatctggcagagcttcgaccaccccgcggacaccttcctccccgggatgagcatcaccctggaccggcgcggcggcggggccgtccgccggacgctgttcacgtcgtggcggagccccgcggaccccggcaccggggacttcacgctggggcaggacccgctcggctccgcgcagctctacatctggcagacgaccggcggccagaacgccacctactggcggtccgggcagtgggccaacaccaacttcgtcggcgtgccctggcgctcgctctacgtgtacggcttcaagctcaacggcgaccccaacaccggctccggggtcatgtcctacgtcttcaacacgtacaacagctccgagtaccggttcatgctccactccaacggcaccgagacgtgctacatgctcctcgccaccggcgactgggagaccgtctggtcgcagccgaccatcccgtgccaggcctacaacatgtgcggcgccaacgcccagtgcgccgccgccgccgacggcggccaggcagtctgcacctgcctgacaggtttcgagccgaggaacgtatcggagtacagcaacgggaactggacgcaggggtgcgtcaggagctccccgctgccctgcggcggcgagccgaacgtgagcggcgctggcgccggcgccggcgtaggcgttggcttcgccgacctcccgggcgtgaagctgcccaacttcgcggcctggggatccactgtgggcgacgcggccgcgtgcgagcagtcgtgcctgggcaactgctcgtgcggcgcgtacagctacagcactggcaccggctgcctcacctggggccaggacctgctggacatctaccgcttcccggatggagaaggatacgatctgcaggcatgc

SEQ ID NO: 2946 - DNA, 1057 bp, Zea mays
cgcagaatttcaggggggttaactcactagtgctactggtatgctggcttttatggaaggataggaaccaccatgtcttcgaggcagtgtcaactaacccagctacgctgtttgagttcatcgtcattgaagggaacacctggattgcggctggattaaacgcattgtcgattctgttactggctgagctaaggagatgctaattagtcgcaaaactagtgcgttgtaacagcttgttggagttcaggctttcagccatcatccgtttctatgttttttgcttttccgactgtgctggctagctgctgggcaactcgcccattggcatgttctttcgctttgtaactctacttcctacttaatgaaataagtgtgtggcatgttcgtgaaaaaagaagtgaaagctctatcctaatgcaattcacaaaattgcaaaatgcatgccatgacaggagtgcatagagaattacagtatagtgggtacttagaaatgaatcatgtgattttgctgatttttaccttcccaatagggtaagaaattggatagcagatgaccatgagaatgcgtacgagccatacaaagttagcacccactgctagaccatatctagtacagattgcttgtggtataacctgatgtcaaagcactacactatcagtcaaaccacacaatgagcaaatggtaaattttggacatcagatgaatacctctccaaaggcaagaacaaatgtcactgacaatattacagcaacaataggatgaaacattctgtcaagaaatataggaagtgcctgaaaaggttgcaatgagataaaaataaaagtcaatggttaaaacagaatggggtgcaaaagatatcagaaaaaaaaacaatatgtgacctatgccctacctatcaacaactttagaatacagaaataagaaagaaataaggtataagagtatcaaccggtgatagtagatttaggataaagaaaataacgttgatcagatatacatgcaccaattacgatgtcattggactaacacaaactgaccatgctgcaggcatgcaag

SEQ ID NO: 2947 - DNA, 1158 bp, Zea mays
tgcatgcctgcagattcacattagcagaacttgatacagtcagaagggacttggaataaaacagcacattattggcgcaaaagggaatcagaataaagtaaagtcataattagcttgacaaagcagaaattattatttgaaaagtcaataatagggtcctttgcttcacaatttgaccttggcaaatgtgaacttctttcagcataagtggcccttttttcccccaagtccctgaattttactaagtggtaccatctttctgccatcccacttttttatactaacacagcatcaatttgggtagcatatcttacatgaactgttatccttcctctatgacgagcagttcagtttaagacctctacctatatccctcaaaaaaatgagtagttccatgtattgtagcatgggttgaccaatagttagattttgctacacatgaaaattgtcagtatacatgactactaaagagatctgtcttctttgatgatctcttcctgttctcccagtcaaagaatcaaagaccctccaagatgaactgtatctccaccacaacttcagattaaacagagagataactcgaggcgattgtgttcgacagttcacaccatgggattaaaacttccagtaaccaaattcttcagttacaaggcatctgatttgaccaccttttcctatgagaaactccaaatacaacaaacccagtcttgaacacttgtcacagataagaagcagtcgctgaaacaagacggagagtcggagacataacacatctcacaaattgtatgattgtaccaggaaactttgagatggaccctgattcatttgactaacaacttcaatcgacgaacagaacagcgctacctataaagctacaaagacaaatctagacaacaaatacaaaatcaatagaagggcgatgattggatccttacatttatgatgttccttcgccatggacagctccagcccggagaccgcagagaacactgcaacagcagagcagcatgtcagaatcggaacggaactacacagcacaccagcacagcccaaacaaatcaggcaaggcgatagcggactcaccggagatggccggcgtgagcacgccgtcgccgatcaccatgcaggtgcccaccagcgccagcacgagcagaaccc

SEQ ID NO: 2948 - DNA, 1168 bp, Zea mays
tcgtggtggcctccttgagcgagcacagctagctatggcgcctacgaacgtcatgacctcgtcgttgttgcacgcgatgccgtcgctgccgatgaggactctagcggtctagcctgaattaatctgatcgtggattgtttgggctattatgttggaccgtctgaggtctgggccgtcagaaccacaaaatcggattgtctggtcatctagctgtcagatttggcgctcaacactgataataaaaataactcagggaagaaatagaataaagaaataggtacttatattttattgcattccccttccacacgttatccgacgtcgtacgcatccttcctcccacacgttattttacccgtttccaacattattgatgcatgttaatttcactcgctaccctgaagttgccagcgccgcgagctcggcaagcaaagcatcgacgtgttgtggcttgacgaacttggacgacacgaccaccccatcgcatccatgcctcctcgccctgcgcggcgggcacaccacacagcccggcaccattgctctcctgtcgtgcctcagcagcacccgctccggtggcccgctgccgaagtcgaccgtgtccaagcctaggttcctccagtccgtcacagtgaacgtctcgtaccagagcgacgacgtcggcggcgccgcctgatgtccctgatgatctgctgccgccccgctgccaggcgtggacagaaggtccggcaccttctccttggcgcgcctgatgagcccaacaaggtgtccgatgccgctgctggccaccaccccggccgacgccgggacgacctgcacgcggatgcagttgccgtagtatccggctggcgccccggcatgcgcgcgcatgttgcacgcaaacttgagcggcgcaggagattcggcgtcaccgggcgacatggtcgcgcgggtgcggcagcgccagagcaccgccatgacggcgtctaacaccgagcagcacccgtcacctttgatccggctgatcaggtccgacgggatgacgatgtcgagggtagccagatgatggggctcgtgatgctccatgctccccttggcagcagggatggctgacgagaccgggaccgactcgtcccagctcctgacagggatgcaagacggcggccaggtcccgcgcgcgagctcgccgaga

SEQ ID NO: 2949 - DNA, 1042 bp, Zea mays
agaccgtcatggcggccaatccgggccactacgtcgcggccgtcatcaccaccgcgcagccggacgcgggagacggagcagcctcttctgctgccgcgcccgtgaagcacctcaagctgctccgccccgacgacacgctcctgctcggccgcgtctaccgcctcgtcagcttcgaaggtactgtgcgtgcgtcgtgccctggactggcgccgaacgggctcatacgttacgttgctggccgtgttaggcccggccgtcatcttgctgcgcgcgcatcaggtccttgcgtgttcttgcacggagctacggataaagatgaattgtgtgtcttgttcggtttgaatggccgtatgttacccggcgcctttctgaactttcttggcgcgcgcggcgcgtcagtatttggacatgaatggctgaatgccacagtttcactttcaccatcgtttccaaacagttctttccctctctgccttcctttttctcatgtcgatgtcgcttttgccgtcgatccaactgatgaacatgaatgaacccgtgcgtgggtgtgtctgcatgagcagaggtgctgtgggagttcgcgtcgaacaagcggcaggtgaagctgagccgcgtgacgggaagggccaaggacgaagacgaggacgtgaagccggcgtcgaagcatcgccgcgccagtggcgacgtcggagagcgcaaggaatccgagaggtcactcgccaaggtacgccgcgggcccctccacggtcttccgtttgcagcctccaaccactgatctctcgccccgatcacgtcccccgtgccgcgtttgacaagccgccgccgccgccccgtgtagttacttttacgccgcgcattcactcccgttgctatcggtccaggtcctgcgccagacggaggagctggagccggaggcagacccgtcgccgggccccagcgccaagtacaggcaagccgacaccgacacgccagccgacctggaggccctcctgccgcacagggcgctgctcggccaccgagccgcccggcaatggaggcccgc

SEQ ID NO: 2950 - DNA, 1005 bp, Zea mays
ttacatttcccgacttctttttggctgatatttttacatccatgtcaaaggtatgtgttagtttatcgtcaagtattcgttgtagatttttttgtttgtttgacacatcccaacttggagaaaaaaaatgactgtacaggatttctcatatcgtgttcagaataatgtacaatacatttctttagtacaaattttacgtttttttactatagacacattcacgcacgatgttccttagttttcaaaattagagaagtgatgattctaagttgaaagtcctccattgccttgaattataacatgtttttatgtttgatgttctgttctgccattccttaatttgcttcaactcttacacaggtgttctcagatctggagcgctcagtttgtcgtatggtgaatcgccaggttgatttcttgcatgtgctctttgctatgcacatacctttctcatcagttcaaaatcttgttggaacttaaatctcgctttcctataatgtttctcattttcatattttacaggttgcaacaatcgcttggtttgaagcagattctatttgtggcagtcattcagtagcgattccgcttgttctcatgttaccctacttgtggcgtttattccaatgtctccggcaatacaaggatacaaaggagaagacatgtctcctcaatggtattaattcatcaagcattaactatgattttttatctgtctctggaataaacttgccatttttttatatcttaaatccagctctcaagtactcgacagcaattcctgtgattttcctttctgctctcaagtaccatgtacatcctgatcagtgggttggcttctaccggcccctctggcttatctctagtgttgtaaattcactgtattccttctactgggatataaagcgagattgggatttgaggtctgtggcttctttacatggtgactttactacttgttcagcgtctcacacatccctattgctgctgctaatgaactttgcttta

SEQ ID NO: 2951 - DNA, 1243 bp, Zea mays
atgtaaatgacatgatttctgaaaagttgatggtccaaataaatcttaacgaaggcattgaagaagatatcccaccgagccaatatgccaggtgtgaagagaaaataactatgactccagctgccatctcaagggaagctggtcttccaggatatggtcctggtcctggagaaaactttcttcaggtcagttcaaggaatactagctgtgagcagagtgtgatactggctcctaccgctatcgcaagagaagttggtccaccaggatatgcgactggagaaaaccagcgcaatggggctccatggaatacaagttatgagcgaagactatttatgaatcctgtgaccagctcaagagcagtcagtcctccaggatatgggcctgaagaaagccgaggcagtggcatttcctggaatacaagcagtgaacaaatattgtttatgagtcctacaaccatctcaagagaacttggtccaccaggatatgggcctagagaagaccagtgcagtggcacttcatggaatgcaagctgcgagttgggagtatttatgagtcctgtgaccacctcaagagaggacagtccgccaggatatgggcctcgagaaaaccaggagaatgacaatatgagatgcgagttgagaatgtttacaagtcctacaaccatctccagagaagttggcccaccaggatatgagcttactggaaaaaacaagggcaacggcgcttcatgtactacgaattaccagcagggagcgtttacgagtcctgaagccttcccaagagaagcctgtcctccaggatttgtgtctggagagaaccagggtaacgacactccatggtatatgagcagcaaacagatggcgtttacgagtcctacgaccaaccctagagtaggtccgccagggtatggacaggaaaaccagggcagtcgtgtttcttggaatacgagttatgagcagggagtgtttatgagttctacaaacatctcaagagaagccggtccgccaggttatgggcctggggaaagtcagggcaatatcacttcatggatttcgacaggcgggcagagaatgtttacaggtccttcaactatcccgaacgaagtcgggcagcaaggatatggcccttcaggaatcccgggaacggatggctcaaggagtatggacttgaaagcctttccaccaggatatggacctgctggagaaaaccagggcggtggtgcttcagggagcgtcataagccc

SEQ ID NO: 2952 - DNA, 1253 bp, Zea mays
tcttgcatgcctgcaggaccttactcaaacagtatggaaaagtattaggcctagatcctaaaaggattccacagaattgggcagccactcaatttgctgaagcattgggcagagcatgggccgagtataacaatgacaggtcagcgcttttctatgcagcatgagttgtattattcagaatttctagaaaatgtaagtgtcaattaacatgttttgttctcttttgtcgctcagtgctgttgttttgatggttgtccaacctgaagaaagaaatatgtacgaccagtactgtcttgtcaatcatctgaaggaatcatatccttttttatgtttgctttcttttcagttttcactcctattgtcagattttcaatatctgggttgtgaaaaacttcatttagttattgactaattcctatcgtgatagtgtttccttatctgtggtttggcggctcgtctccacaacaaactaataagatgttgatttcttgtatgtacactgctgtattattctttcaacatattgcctgcctgatataacttcagagaaccattaaagtgtgcggcaagcatctgctttttttttgggtctggtattaagagcatccaacagcatgaaaaatgtggctttccttaactagccatcacatatggtgtggcaactataaggaaaacattggcacaagtagaggctcaagggcaggttcttacagatggaacacttgtggtgtaagtatcttatatagacatggaaaaaggcttattattactatcagaatttagtatgtaaatttatgaattgcagagatggtcggacagtggctgttgtgtatttcagagccgggtatgcaccaactgattacccttcggaagcggtatgcaatcaaatatctattaattcaaaatctttatatagaatagaagtaaattctgttttttgagtgaaagaaactgttcctgtaattgttttaaaaaaatcatatgtctggtgcaatgccgcttagtctcattttcctgaaacagtcatcttcttttgtgcatgcatttctgtctctgttggaaagcaatccttagccaaatggttttattgctttggttgaggatgtgtagtaattcattttgttatgattatgatatggcaccactgttccaccttgacataacgctatcatattccaggagtggagagcgaggcttctgatggaacaatcatctgcaggtcgactctctaaaggtatccccagggaccgagg

SEQ ID NO: 2953 - DNA, 1218 bp, Zea mays
cgatccagtacggctccaagttcgtaagcaacgggcagcctggcactgcgcaggaggtcgacagatcgaccaccttggctcgcaaagtcttccggctcctcaaggtcagtccagattcagatgtgctgtgttcttctccccgtcgtaccagctcaactgttctcggtgtagaataactgcttgatgtcgcatgtaatgtccagtgggtcaatgatctgcatgctcttatcagcccgccggccaaagggactccgctcaccctcgttctgcttggcaaagtaaatcgacttctcccctccacacagtacactgttcatcaagaaatcccccccgtttaggaatcacagggttcgaaacgaattaacctgcgggttcttcttctacgattgcagtccaaaaacgcgctgctttcgacgttcttgttattggatcagtttgtgtggctcggacgaacggggatcgtcaaggtttgtcccgatggaaaggcttggttgctttgtgcatgcatttttttttcctttcgactgatttgttcttgctttttttccccccgttggtagaacaaggaggcgacggaccgcgttgccaggttatccctgtactgctggatggcttcttctgcctgtgcaggtctagttgaggtatgtatacaacacagtttcagtttcttcacatccatatatgctccagggttttctacacctgacctaagtggtgatggtactgatcgcgtgcctgccactgtgcagcttggagagcttaaaaggctatcgagatcgatgaggaagcttgcaagagagctgagggacacagataaatatgaggtgcatacacatatacacactttcgtttctgccactgactgtttgagatgagggcatggagtgtatatgcagctaaattttccacctgtttgagtgtttatcacatggccattctcagaacgagcagtaccaggacaaaatgaggcagtcagatgaacggctcctggccctggtcaaggcggccatggacgtggtcgtggccgtcgggcttcttcagctggcgcccaagaaggtcactccgagagtgacaggagcctttgggttcgtcacctcgctcatctcctgctatcaggtatgacttctgcctcgagtctgtgctgttgtgcgtgtgttttctcagtaatggaagctgcaatgcaacgctaatgttgtgtgtgcctgtgctgatgtgctc

SEQ ID NO: 2954 - DNA, 1314 bp, Zea mays
agcacttgatgtttggagagtgggtcatgatcataagagcacctgcggaggcaacagaggtaggagcacctgctgcctgcactagtgtgtcttctggagctagaagacttcgatcttttgtctcgttccatgcctccctttccctattgatccatccttgcagagattaaggatgtgaagcagatggagcaggatcaatgggggtagagctgggcattggttggggatcagttggggaaagagggtctctccgcccaggataatgatgcaggggaggacgattgtgcatgctcattgtcatggatggctcggggtgagggaggcgaaggtggccaggagaaaagcacactggatcctgctgtggtgcaaaatgaagcccctggtccatggaaatgacatgggtgccccaacacagtatgggtgttttcttgtcctgttggagcccgagaaacatttctcaggggagaaacaatatctacctatcttctttaactgtttttccacgtcagcaaaacatctatatggcaagataatcaatgttatggaaactaccatcgacacttttgggactgtcctaagaagcctcaaactaggccaatatgacaagttcttgtacagaagatttgcaaagaaagaacaaaaactatgaccaacgatccacatatccaactcattatcaaatgccctcgagaactttggctcttgccatacaccatagatggcctcatctctaatgtttaggtgttaagactagggctgtgatgagaccttgatgaacttctcactaaaatgatgtatctttagccaaatgttggttgctgtagtagttttggtaggaaattgcccaattttccatctaccatggcaatgatgagtggggccttgactggtggtaaccgcatgtcatgcggtgtttttggcaagccctggctttgtcgttacccatactagatttgaaagcaaacccctctgcaacagcatggtttacgtattagttaagtttccttaccttgtggagatcctttgtagcaaaaggaaaaaaatagttgcctcatatgtttgattttttttgataaatgtattacttttatgtaaatgaaaggcaaatataacaccaaatcagtaagccacatttttttctcctacacttttgtagcaatagaagaattacttttgtagtattatgatttctagtgctatccacttgcacatgtttacattattttctatttaacgacatttgaattgtgttttaagggcaattcattttattacgcttgtaattctgtttcacgaatgaacctaacctggttt

SEQ ID NO: 2955 - DNA, 719 bp, Zea mays
aaaaggaagattccaaacttgagccgtgagtatagaacagctattttcaccaaactgccaccgactgttgacaatagcacatcttcttcaggaaaaagggaacctgaaaaataagatgttttaggaaagggatactctcgtggtgtcatttttctttctggttgtgtccaaattcataacattgctatgttgtctttgaatagaccatctcttagcttaaatccatttgggcatcatattgtgttggtgcatttcaatctttatttgttttttctttccagttggtggtcatgcactgagtggacccactcttttttggagttagagttgaaaaacgagttaatgggacaggaagaatcaactttagaagggaatcccactttctagtagtgctcatatgcaaaaataccttccaagacaacacatattgtcaagcaagtggaagtaagatataaatagagcaaggctaccaaggcagcaaggaaaattccccccctgttggtattctggtcccttatgagttcatatgcttacaattacgaataaagaaaaactctagtcaagtttaactctgccaaaaaaaaaactctatgaaaatcatcctccagtggcccatgcaaaaaggattccccgacaccaatagggacaaagtcaactatgccttcttttgtccatttgacttatgtaggttgcagattgggaaagaacctgctcttttc

SEQ ID NO: 2956 - DNA, 1100 bp, Zea mays
agaaaacctatccggcctgccgtacgtgcaattcacctacgactacgaccctactcctgggcacgagttgcttgatgaagcgtagcaaacgtatagtctagggtgtgacacgacggttgtcctgacgatgagagagtgaacagtgtgtcgtaccgtacgctgctggtgggcacagcacagctgattgacgccatggcgaaggctcactgcctgctggccctggccgcactcgcacaagcggaaatcattgtgccggtcggagcagagcaggggggcacgcatccatatccatccattccatgtgtacccctgcgtggctgcgtgtgtcaatctgcaccagcgcgcctgctgccgcgaagcgccaaaccacgccggctaacctgactacgtacctccggccggtcctgccgtgcactgttctgctgctgcacaagcacaacgttgtgcctggcatgtacgcgcatgtgctcatgtgcagtgaaaccgcattattatacatcatctccagcaggcaattcggcgtgagaggacgtgggcgcgttcactgtgcggttggctcgcgtctgccgggtagggctgggagcctgggaccagccagccggccgatgtgacgagtcgccggccgcggatgggagctgggttgtcgtatcgccccggctcccgaccggcgccgcctgcctctgccagcgctctccgtttcccatcggatcggatgagacggcgccatgcgtatcgtatctatcggcactcgctcgctcgctcgcgcttgttgctgctcctgttttctctgtgtgcggctgtgggcgtgacgacggttggtgtggagctggcagtggctggatcgtgtcgtcgcgaccggccaaaatacgagggtccggcgtgtatggtcgttggccggttggccccgggaccgcgcgcgcatggatggcgacttgagcaggccttcagtcagtgaactgagcggaggagccatcagccatgccaatttgcgagtgcgaggggaaaagcgtcggtccgctttgttcatgcctcacggggcctgatcgcgctgtttgtgctgctgggcttggcgcgggccgcggcctgcagggcatgcaaga

SEQ ID NO: 2957 - DNA, 1147 bp, Zea mays
tgcacaggtgtttaatttggagcagtgccatgccatcttagtgcttaattggcgaggggcgacaagccaacggttgagctgatgacgacgtgcacgaattcttggcgtcgtaagcggcagcggcagcatcaccatcgccatgtgcgagtgacgtgcccgggttccccggcatgccatgctagttgattggccatccaattcaatccaacagctcatccccgctcgcccgccacatgctcatgagaagagcacgctggggctgggctctgcgactgcgatccaagagaaaggtccaacatttccgccacaagcaaagccggggaagacgactctagctagtttgcttacgctgcttcagtttctttcaatcgtccacagcggggacaaaaaaaaagatagcctttttcatttcctttcctttgctttgcttttacacgaatcgatcgatcgaaaagctagctgatatagtagtgatatcaatcaatcaaccaaccaaccaaccaaccaaccggacgaaaagtcggcagtcgcagaaagaagctagctagtgcgtgagtgatgaacaccgacgaaggaagcatcgtcctttgattcgatcgacgaattggcaaacacagctagctggtacagagagagagagagcactgctagacgtctacggcgcatgccgctgcctgctggaagcggaagtatccggtgccgccgccggtgttggcgccgtagctgcccctgccgtcgttgacggtgagcagcgcggggcagttgacgcggaggtggtagtgacccgagatccagctggtaccgaccttccagcggacccagccgtcgacgcggacgtcgacgagcacgtagcccgccgtctcgtcctgcgccagcgccacggccagctgcggcgggagctgcacgccgccttccggggcgcgcaggaacggggaccacacggacgcgtcccggggcccctggtactgcacgggcagccgcgtcggcaccgtgatcgccacgcccttgtactccgcgtacgcgtccgcctggtcgtagtacacgcccacgcgctcgttcgggttgcgcgccgccaccgtcgcctgcatcgtcgtgaacaggtacgtggacgccggcggcgtcacgttcaggcacagcaccgacaggt

SEQ ID NO: 2958 - DNA, 1149 bp, Zea mays
cttgcatgcctgcagctgtacgagggcgggatcaagctgcccgacatccccgccctcgaggagttccgcaagcagttcccgctacagatggtcaaggacctcatgcccgccggcggcgactacgtcctcaagctccccatgcccaaaatcatcaaaggttaataaattgaatctcacgctggctggtcaatcattaatttctggcgtcattaaaatgtctcttactcctctgttgggctcccgcgccgcaagcagaggacaagaaagcttggatgagtgacgaggagttcgcaagggagaccctcgccggcgtgaaccccttgatcatcaggcgtctcacggtgagcgtggacgtacagtcttgcttgagcaattggatgccgaccttatacaagcagtaacattattgtcccggccggttacaggagttccctccgaaaagcacccttgatccgagcaagtacggcgaccagacgagcaccatcacggaggcgcacatcgcggggagcctggagggcctcaccgtgcagcaggcgctggacagcaaccggctctacatcctggaccaccacgaccactacatgccgttcctgatcgaggtcaacagcctgaacgacaacttcatctacgccaccaggacgctcctgttcctgcgcggcgacggcacgctcgcgccggtggccatcgagatgagcctccccgagctccgggacggcatcacggccgccaagagcacggtgtacacgccggcgccgccgacggccggcgcggaggcgtgggtgtggcgcctggccaaggcctacgtgaacgtgaacgactactgctggcaccagggcatcagccactggctcaacacgcacgcggtgatggagccgttcgtgatcgccaccaaccggcagctcagcgtgactcaccccgtgcacaggctgctgctgccgcactaccgcgacaccatgaacatcaacgccctcgcgcgccagaagctcatcaacgccggcggcatcttcgagatgaccgtattcccgcgcaagtacgccatcgagatctcctccaaagtctacggcagctggaacttcaccgagcaggccctccccgacgacctcatcaagcggtaataatatattaaactgatcgacgacactggcctcg

SEQ ID NO: 2959 - DNA, 534 bp, Zea mays
tggcggagctcgcgccgggcgcgcttcgtgagaactccatagctgatgcactgtacgcgcagtggctcgtgctacctgagacgaccaagctggtaccccttcaacgcgtcctctcgccttcctagttccttgcttgttgctttagtttgtgcttacatttccctggaaggctcagataagttagaaacatcgtttctacgttttggttggtgccctttatgctgcggcgagtactggttaggttgttattttgtatcacatttaccagcttatgacttcgataaagtatgatgatggagtttggtagaccaaagtgcagggttcatttagtggcttggtttgtctttgttcgtacttgtgtttctctgtctatgatcttgtattcttgttatcagaaactcgccaatgtaaatttcagtgtaactgggcagaagggtaaatttgagtatagtaccatatgaggctatagattactaccagactcaaagcaacttagtcgggaatctggtagtgatatttagtctcattaagtta

SEQ ID NO: 2960 - DNA, 1057 bp, Zea mays
atactatttgaccctactaaattaaagtgaatcatgctaattggtgggacaaagaactcagaaaatggattagcatttcaaacctatgatatttaggttggcttctcatttggataagagcatgttcaccaccatgatatttcattgacacgtaaaactgacgtggaatgaaaggtggtattaatgaagatgttagagtgttagacatagaatcaaagtagggcgaataaagtgatgtcaaccatttgacattcaatgacacaagggtgccacaggagctaaaaaagacaagttttatagtatggcgattagacttgctatattgtatggtgtaggatgttggcctagaaaaagatggcattttcagtagataagtgttgtgaaaatatatatgttgtgttggatctgtcacatctgtggccatacaagaagagatcgagtccgaaacaatgatatctgtgatagattaggggtagcatcaattgaagaaaagtttgtccaacattgggtgagatggtttgaacatgcccaacaaagacctctaaaggcataattgtgtagtgaggtcctaaggcgcaatagcataagagacaaaattaatatgggaagaggcagtcaaaggagacttgaaaggatggaatatactcaaagatttagccttgaataggagtacatgaaaaacaactatccataagcacgaaccttgacttgtggtttctattgggttttaactctagcctacctcaacttgcttgggaaagggtttattgttgttgtataaaactggagtggaatgagcatgattaaggcaccataaaaatatcatgaagataggtggaccaaataaatcatcaaaagtaattatcgattaggagtcacctagaggattatatgcaagccacgttctcatctgggttaaaagctctttgtcatgtttgctgccatgatatttcacagaagtctgatatgggctgcactcagctactttgctttcaaatagcgcaaatgaagaaacttctttgttaaatgaaacaaagaactccccatgcatcgttat

SEQ ID NO: 2961 - DNA, 733 bp, Zea mays
cttcctgtacctctcccgctcactggtaagccgaatctccctccctcttgcgctctaatttccctcacacgctctctcttgattttttttcctgccgttctccatggatctcactcacccagatcacttaccacgagcgattgggcatgattcagacgccaaagggatgttttttggacacctaatctgtaaagcggatatcacacagatctaggacaaatcatctgctgtggtgtcgtgcatgcagcgctttggcgcttaagcaacaccaaagtgatgccttaataacatatgcacatggcaaagcttttgtttacttgaatgccgtcgaatgtgcttcctatctaactatgaaaagaaacatgccactgttctaacacattggtatgatctaaattgagtacacgttgcaacatactagtatggtcactcaagggcaatagatcgaactatttttcagaactaggaacgaaacaaccaatttatatgttaatgggatcaatttcaataccacaaatgggaagagccatgtaattccagaaccactttgccgagctgcaattgttgtaggacctcccagtgatggaatccagaaaaatccttctgtcaatagccccttcatgtcataaaagacactcagcccaaaaaaacactcaatcaagcaagcttaaagcagttggactgaacttacctcatttgctacatttgaaagggcctggtaaagaccaatccc

SEQ ID NO: 2962 - DNA, 1126 bp, Zea mays
tgcatgcctgcaggtctgtgactttggtctctctagattgaaggcaaacacatttctgtcttccaagactgcaacatagattgtaagttgtatcgttccatttagtatattttgctttgttacgaattctatgtggctaagtgttcttctatgtcatggtgttaaaaaaacaattttacttgcaggtcctagcatcggttggtttcaagggacaaaggcttgatatcgcaagcaatgttgatccgaaaagtggcggcagtaattgagtcatgctggttaggtataatactaacatacgtgctattatgcatctttttattactaaactatcaaagttgttttgatggacaattttatttgtgttctcaaggagccctggagacaaccctcttttggaatccatgaaacttctcatcaatacattaccacccaatcaactcctccaagaaaattagttacacttcacaaaaacttctacatcgactagacacaagcttctaattctgagtcagcaactatgttttgcaacatggaaattatgtcacctctagagtattcttggtttgtttagatccgatttcaaattctttgtgacacgagcttgctatcttgcattcttggtgagatcccgaagttgtcaggagagtttaagatttgcgggatgacagcttatgtcagccagtcagcatggatacagagtggtaaaattcaggacaaagagcgttgtttcttgtaacaacctcatacaagacggcgactctattatttgacaagatgcacatgtccatattcagagcttctatgtattttttttattccactagtgggcgcatcttgaatatggtaagtgatcattgtggacattttgtgcaggttctgcttatttttatagactgtgctaatagatggtccaaacgtttcaggcttccactgatcaaagtgaggtggacaccagcatcgcataccagatgggttctgttgcatttgttgtcatacaaatgattggaatcatcgtcgtgatgtctcgggatgcatggtaggtgttcgttgtctccattccagtggttgctatgtgtttctggtattaggtacaatttgctaccgttgtgctttgtcctctcgagag

SEQ ID NO: 2963 - DNA, 1339 bp, Zea mays
tctcggtacccgcttgaccgctagagtcgacctgcagcagcaagtggaccattgttactaccaagcttcagtgacgcgtccttgaacatcttgcggctgagggtgttgtacaccgctctcgagtactgccgcgacgtattcctccagtccactccagctttcatcatcagctcaaactcctcgtagcttatcttcccgtcctgtatgtaggaggtaacacgttttagtttgactagtagtgcaacgcaatgaacttgctcaatacagtactatcgatctcgatctgatgaaataaaggtttgctaaccctgtctatatcgacgtctaggattatgtcctcgatcgccttctggtcacctcttggagagagggcctccttcagctcttcgatctcgatgtacccgctcccgttcttgtcgaagtagctgaacaccttgggcaggtgatcctcgctacggattttcttcaggtgaatggagactgtcacgaactccttgcagtccagggtcccgttcccgtcgatgtcggcctgtagaaatgtaaagacaagtggcaacttcttcacagtagaccttgattcacattgctaattaagcaattatatcatccaggaataaatttcgagaagggcgcaattaatgctacagtttgcaatgatcatgctgaaaatgagatggttgttcaacaaacgtaatgtaaatcacaagatcgagaggttctcacagcttccatgagcatatcgacgtcagtgtcatggacattgtggcctatcaatcgcattcccttcctgagttcttcgattgtaagatgcccatccttgttcgtgtccagcaactgaaacaactccctgattgcttccagctcttcggctggtaggtactctgccaccacctgcaagtatataaccaacgaataaactaggtaatattttggagactggtggtatatatacccgaaaagaacagaaggatcatcaactcacaagcagggccttcttcttgaacttgttcataacagtgaattgcttcagcctggacctcactgcttctccaagtgggatgttgggagctgcactggcattctgtatccagggatgttcttcattgttgaaggcgataaatgatggtcaggttcattccaccaaacaactttgggagcggaaaaattgtaaggcaggataactaacctagaacctgctgggcagtcaaccgacagtaggggcttggatcaagcatcttcctcacaagatcttttgcattttccgacacctttgaccaaggctctctgcggaagtcgatgttggaccggatgatagcctgtgctatgccctcatcagtct

SEQ ID NO: 2964 - DNA, 1035 bp, Zea mays
cttttgcatgcctgcagatcctcctccatgtcgtgcgcggtcaaagcgatgatcggagcatgaatttcgtagcgttgttcttcctcgcggatgagtttcgtcgcttcatagccatccataccgggcatctaaaaacaaacaaggaatactacaggtgtcaggcaatcatcagacggagctttgcacatgcagaggtaaaaaagttttggttgaacaaacctggcaatccatgaagatgacatggtagggcaaggacactatatcctcttctgaagcattggcttgctcaagagcttctctgagcaagttcacagccatagttccattttgagctactgtgacaaatgctccaagctggttcatgattttcctttggattgattgcagcactagattgtcttcagccagcaagattcgcatcccggctagcggcttatcatctccaggcttctgagccaagcatgaagcttcagttgatgcggcagtgtcttccacgcaaggaacaacaacatccggcaaatcttgttgctggctgttcccagcaatctcagggccaagatgagaagactgtgcctgtgcatctaaaacttggaggtctctcagggtcataaggagagtgaactggcgagacccgtgcactggctttcgcagaacgagatcgcagcccatgtccttgagcctcctcagatcattggaaggggtcttgatatcctcgagcagaacaactttgcatggggcttgatgcttgatcctggcaagcttggccatctcctggcaaatttcttccgtttcaccaccggacacgtcgatgacaacaaggataccggaaggaatccccccgaggatggctctcctaggactagagttgttcctcaacaggttcaccatctccttggagctgaaacaccggtcggcgctgccgcattccgcggtagcggtggccgtgctattgctctgcaccttctccaaggtggaaccgatgaactcggcttgcggaaccagccagaccttgacctcgatgctctccatccacgt

SEQ ID NO: 2965 - DNA, 1143 bp, Zea mays
tcgacgtgaagaacgccagtctggtctccgccctgccgccggagctcggcagcctcagcaacctcgatttcctggacctctcaattaaccagctctctgggaacttgccgtcgtcgttcgctgggatgcagaagatgcgggagttcggcatatcatccaacaatctcaccggcgagatcccagggcggctattcacgagctggccggagctcatatctttccaagtgcagaacaactcgcttcagggcagaatcccaccggagctcggcaaggcgacgaagctgctaatcttatacctcttcagcaacaatctcaccggcgagatcccgccagagctcggcgagttggcgaacctgacccaactggatttgtcggcgaacctacttaggggatcgataccaaactcactcggcaacctgaagcagctcacgcggctggagctcttcttcaacgagctcaccggccagttgccgccggagatcggcaacatgacggcgctgcaaatcttggacgtcaacaccaacaatctggaaggcgagctgcctcccaccgtctcgttgctgaggaacctccggtacctgtcagtgttcgacaacaacatgagtggcaccgtaccgccggacctcggcgcagggctggcgttgaccgatgtgagcttcgcgaacaacagcttctccggcgagctgccgcagggcctctgcgacggcttcgcgctgcacaacttcacggcgaaccacaataacttcagcggcaggctgccgccgtgcttgaagaactgctccgagctgtaccgggtgcggctggaggggaaccgcttcaccggcgacatctcggaggcgttcggggtccaccccagcatggactacctggacatctccgggaacaagctgaccggccggctctcggatgactggggacgatgcaccaggaccacgcgcctgaagatggatggcaacagcatatcaggcgccatcccggcggcgttcgggaacatgacgagcttgcaggacctcagcttggccgcgaacaacttggtaggagccgttccacccgagctgggtaatctcagcttcttgttcagcctcaacctgagccacaactccttctccgggccgattccgacaagcttgggccgaaattcca

SEQ ID NO: 2966 - DNA, 1248 bp, Zea mays
cttgtactcttgttgcttagatcttggcatggaccagtctactgctgcatatcttcaatgctttgtatgacacctttggtccactttgatgaattaactgattttgtaatgaagtctatgaactaccatatgaatttgtttggttatctttgctagtgccccactttccattgccaccatcttgactgtattttatttgtaatcatagatgcgcatattcacgcttttttcggatgccatttcttgaacaggcttgatgccaaaccaacccgacacaacagcagcaaaaaggggtaattgctgcatctgccatcgaatgcaagttgactctctactttacaggtaatgatttgcagggacagatcgcgcagtacttcgagcaactttaatcaacaagtcatatcttatcctttttatgattagtaacacatttgtctacaagaacctcagacataataatagtacgaagtgcacaagttgctgcattgaagtgcttctaactgcattctctatgatgcatcaggtgtgggcatgtgtgcacctgttttgactgcgccggtcagctgaaatcgagcggcaggagttgcccaatatgtcagactcctattgatgatgttttccgggcgcagctgaatttttgagcttaggatttaggaaaggccaagagaaaagagccggcactcccagatttagatgtggagtttgcgaactgcgaagccctggtattgaggaggcttcctaccttttgttaaccaccactaaaaaatacgagctagttcttgcagaaatgtaaatatgttttttgcgcaagagcggtatgcttgtatttccctgaaggaaaacagagttctaatcataatactgatcctgtttctgatggttttgattgccctaatggaaacgactttggaattcaatcagcatgctgcatgcagtaatagcaagtacttcaaattaaaagttcagaaaccttaagagcttgttcggttctaccccaatccatatggattgaaggggattgagggggttttaatgcctagtaagtcaaaatcactctcaatccgtattaatccccttcaatccatatggattgaaaataaccggacaagctctaacatggaatcgctggacaacagaccttggtttgaaaaggccaaaatgctgtggttgcctcggtgtatgcaactagcacgtcgggttacccacactgaaattctctccggcccttcacacctgcaggcatgcaag

SEQ ID NO: 2967 - DNA, 1314 bp, Zea mays
atatgattgccatgaacactagtgactttatcatcactagcacataccaagaaatcgctggaaggttggtagacacctataacctcagcacactagcaacaaccaactaacccataatctcctagaggcctgaaacatggacatgcgtgtgatgcagcaaggagaagcctgggcagtacgagcaccactacgcattcacaatgccggggctctgtcgctacgccacgggcatcaatgtcttcgatccaaagttcaacatcgccgcacccggtgcagaccagtccatctacttccccttcacgcagaagcagaagcggctgacagatttgcacccacagattgaggagctgctctacagcaagcaggacaccggtgaacacaggtaagtttcttttttttcctttcctttttcatggcttacgcataggtaggacaagtttgctaaccgctttgatgccatcaaaccagagggtatctggcggacagaaacaagcctatcatcttctcgatggcaaggctggacaaggtgaagaatatcaccgggctagtggagtggtacggccagaacaagaagctgagggacctggtaaaccttgtcgtcgtcgcgggcctgctggaagcgtcgcagtccaaggaccgggaggagattgaagagatcaacaggatgcacagcctgatcgacaagtatcagctgaaaggacagattcgctggatcaaggcacagactgaccgtgtccgcaacggtgagctgtaccgttgcattgcagacaccaggggtgcatttgttcaggtatgcaacggattctatgctgtttgatcatgatcatgagaaaaaaaaattcatgacaatgacgataacaatattccctgctgtggtttcagcctgcactctatgaagcgttcgggctgacggtcattgaggcgatgaactgcgggctgacaacctttgcgacgaaccagggagggccagcggagatcatcgtggacggtgtctccggtttccacataaacccaacgaatggcagggaggcaagcaacaagatcgccgagttcttccagaagtgcaaggaagacccaagctactggaacaaggtgtccactgctgggctccagcgcatctacgagtggtaggtgctataatgcttcacctcttgcacgcgtctgtacgagagaaaaaagaaatctcaaacctgtgttgtttgcgctcggcagctacacatggaagatctatgcaactaaagtcctgaacatgggctcgacgtatggcttctggaagactctgaacaaggaggagagagtggccaagcagcgcta

SEQ ID NO: 2968 - DNA, 700 bp, Zea mays
aaggagcggtactcgagtgtgtcgccgccgtccttcttgatgtcgactacgagcaccgacggcgccacgcagaatatgtcggccgcgacggctaggcggcccttgcggcccccgcgcccggcgccctcgagccgaacgccgcgggcaccgctcttggtcacccgcatccgcccgccgctgcgggcggccacctcctcgagacgggagacgacgccgctcgcgggctcccgcgtcgcgaaccgcatgccgtcctcccggggccccctcgccggaccgccttccacgtcgaacagcggcgagaggtctaaccctgcggagagggagatcaggtggaacgcgttcatcgtctccggtggctcgtccttgtcgccgccgccgctgtcctttgcggaggaggcaggctcggccggcggctcggttgcgccggcggcggctctgacggacctggagacggacggcttgttaaaccacggcgtctcgacgatctgggcgacggtgatgcgggtgtccgggtcggggtcgagcagcttggggatgagcctgcgcgcctccgtggacagccacggcgggcagcggtagtccctgcggctcatcttgatgaacatggcggcgatgctgtcctttgggaacggcagcgagccggcgaggagcacgtagaggacgacgccgcacgaccagacgtcggccttggcgccgtcgt

SEQ ID NO: 2969 - DNA, 987 bp, Zea mays
tgcacgacgacgatgacgacctcgtgctcctcttcatctcgcgcatgctcatggaagaggagacggacacggacggcttcttcgagcagtaccacccggaccaccccgcgctgctccaggcccagcagcccttcgccgacatcctcgctggcgccgccgccgccgacggcagccgagggacctctgtagctggctcccctgcattcgccgccaacgctatctggccctacgatccagtccagctctcccagctgcttctttctaggacctacccggccgacacggcggcataccccagcgccgccgccgactcgatggcgtcctctgccgggtccggtgctggcacggtaaacatggacatgctcaacctggcgttcctcaagggcatggaggaggccagcaagttcttgccggccaccagcaacaaccatgaccaccggcgccaagcgacggaaacatgcgacaagcgggtggacgaatcgtcgccgttgctccaacagagtgcaagcaaaggccgcaagaaccacaggcacgctccttattggggtgaggatgaggaggccgagacaggcaggaggagctgcaaggtgatggcggtcgaaacagaggaaagcgagatggtggaggagttcgtccagagcggatacgactcgctgcacgagcagatgatggccatgaccctcagcacggccggcagcaggaaagggaaggggaaagggaaagggagcgccaacgaggccgtggacctgcgcaccttgctgatccactgcgcgcaggccgtggccgccggcaaccgccccagcgccgcggacctgctgggcaagatcagggcgcgctcctcgccgaggggagacgccacgcagaggctagcgcactgcttcgccggggggctggaggcgcggctcgcgggcactgggacccagcagctcacggcggcgacgaagcgcgcctccgccgtggagatcctcagggcctaccagctctacc

SEQ ID NO: 2970 - DNA, 1123 bp, Zea mays
agcattgcgatttgcgaatgaatggaatagccacgtacgaccggacatctcagctcagcacaagcaatcgttgttacctgtacaagttgtccgtgctgtggctcatgcacgatatgatgccattgtcggggaagttcctggcgacggacgcttccagagcctgctggtacttcctcgccagcatcaccctcccgccatggccggcgcccagcgtctcgaggacgttctgcacgtccaccttcaccccgtcgatcccggcagacgcgaggtacgagtggagctcgtcgtagaaactgaacgccctgtcagggttcacgaggcccagcccgttggccgtcatgctgtccagggcttcgcagcgctcgttcttctgaacccccggcgatggcacgggccgctgcatctttgatccgtagtgctccattccagctgcacccggcctcactccaccccagtatccggtgatggcatgccatacgtacacatacctgagggttttttttttgtatatatacaagatgtcatagagatgaatttccagataatctgtaatgaatgaataagaacagatcaatgttgttgttggcagacttacttgagctgatgcttccccttaatctcattgacgacgtgtgctaggcccttcgctgggtcatcttccctgtgaccctccctgccatttttctgaaacttgtggttctccctgatgtgagtcagcctgtttgcgaagctaacacaaggcacttaacaacagaggaagttcagaatccgagccgactctctggattttggacagaaaaccaaaccatgtccccccgactgcttgcttacttggctgagttgtcagataggcaagcgattcccacagggtccatggcgacggactgccatccgtcgtcgattatgacgaacctaggagaaaccccgcctttttccaagctgggaaaaacacaagaacatacatagattggtattatctataggtttggcaaaagatgaaaactttcgagatgttacgttacgttacgtacctctgcaatccttgcttcactccctgggcggtgacattggtgtagaacgcgtcccacgtgcaccagccaaaccagttcagaatgtctggcat

SEQ ID NO: 2971 - DNA, 668 bp, Zea mays
ttgcatgcctgcaggaactccgatctgagcccggcgccggcgtcggcgtcggtggcgctggcggccatttgtctcaccgggaaggcagaaacgcagcgccgaggctgctgtggcgcggtgtcacggctgctggggatgcggactgggcagtctgggctttgtagttggagcgggacaagtaaccgccgccctacttcctccccgaggcggagcaatgtgatgtgctgtgctggcaggatggactgcgacgtcgcccccagatcacagcatcgactctggcttcttccgcggacatcgtcgtatcgtacatcgtcgtcacggacgtggctttggctgctagtgttgtgtcagctctgttgacgcccaggacatctacgattctaaaaaaacgggcatcttaattatactagtacgttcatattttctacagacgcgcctaatgcacggtcggccatcgccattgccagccattctgcccacatttcttctcctatttattcattttattatattttattatatctctctaaactctctctctacgtacagacatctccaatcttacatttctctatctagctcctactatacaatataactcagttatttaatatttttattaatttgcatggttttaaaaagggttttttaatttggtgcccttaggt

SEQ ID NO: 2972 - DNA, 1353 bp, Zea mays
gcactacttactgaaagtgggcagcttttcaagcctcgacctcagtttctgcaagtcacccaacaagagagagaacctgttacgattattttccttttgtacaaaaagaatttccacaggatccaaaagtataccaccccctcccgaccttcgtcctcccaaccttaaacatgtgcctcggggcaaatgccaatgcgacatccgcttcagcagctaaaaatggcatagctgatgtgctgtgctccttccaaaattcagtgttgtgacttggtgatttgtccctcagccttgctgtcctgtcctaggatgatgcactgtcatcgtcagagttgttctcccttcgttgtccatacacacttagaactggcattgaggtggctgaaatcctgaaagacctggctgacccaataaccgttctgtcctgctgtaacctgccaacctccttgcagacatgatccaacgtcgagaggaagtccctcaccaccatgaatatcctaagagggtgcgcttcctctttcgcggtgtcaccatggaagtactcggtgatgtcttttactctcaccagggccttcttctcctcccctctgactttgtctatctccgtctcggctttcttcagaaaactctgcattgtcgtaaagaacttttggccttgagtgcattgcctctcgagctgcaagaccgacttgatcttttcaatgcctgtttctagcttactaacatagccatgcaacacatcaaagtccatcatggctgctttcttgacatttcccagctcactgctgaggccagagacaagtttcagaccttgcttccgcaactgctcgtctttagagctatgaataatcatggcgctttctttttctgattttgcatcttctgatcgaattatttcttggacgacgaaatgcaacagcgttgttttaccatcagtgctcttgacatcagcaagtttcaggagagtgtcaagcttgaaagcttttgcctcaccccggtttgtgccgacattcatccggttcccggttctcagcaccgcctcgagtagtttcaggaacaacctgctgcctctgagatcttcgcaggctgcctgaaaacaagtgaagaaatgttaggcacctataagtctaaatctgcggtgtggattgatacacaggtcagtgataatgttagtaatcaaaatgatggaagtgaaagaaggattaatgcagcatggattaccattttagcgtacctctaatgtctcaaaagatttcattaagtaatttatttcggcctcaaaattggctcggtatagcatggcatcaactctcttgaaggcaaaaggtatatcaagcacagctttgagaaagcgct

SEQ ID NO: 2973 - DNA, 1013 bp, Zea mays
ctctcggtacccctggtatgctctaacgtcgacctgcaggagaagttaatgccaattccatcagtgccccaagacaccagataatattattgtaaaggttggtacagtcagtattgtgtgtatatatgtggataagagaactaccaacaagtgccccaagacaccagataatcttactgtaaaggttggtacagtcagtattgtgtatatatatgtggataagagaactaccaacaagtttcgaacattcgacaactaatgaatcatcaataaacttgtgctaactaataaatagtagaaaacataaacatatatgatatatgtcgccgaaacagttgaatcattacctgatcatataatgatcttttttgttcatcctttagagtctacatcagtgacaaaaaaatgcatcagaacccctgcatacctataagttaggtataagcacaacacgctaaacagaaatcaagtacctcataagctcgttgaacctcttgaaacttgtgttctgcatccgcatcacctttatttgtgtctggatggagcttctttgcaagcttttagggcaatgatgcagaaagaggtaggcaaggtaatgtcaattgcagaatagaaaagggaactgtctagtgatttttttagtgtattgaggaaacgtcaatagcagcatgtaccatcctgataaagaccatagacacacattggattgaaaatgcgtatcagacgctaaccaagctctttctaaattatcagcactttctaaacacccttactgactatactacttacaaaacgtaacaacaactgaagtaggaaaaaaaactcatttgcgcctagtttgcacccctaagcatgcagcagcaatatctaccgatgacaccgtacggacaggtttgaacccgaggcatcggattggagccataccccataataggcctttttgatctccgcctggctggcgctcttgctgacgccgagcacatcgtagtagtcccttgccgccaccggcctgg

SEQ ID NO: 2974 - DNA, 1158 bp, Zea mays
agcgcaccgccagcgcgggcggttccgcggccgccgcctccgcgacgccgcgcggcgccaccgccgccgccctccttggcctcgcgctcagcctggcggtcggccgctggtgggatgcgttcttgtgaactcccgatgcaggatggctgtggttggagggcgtggcgtggtggagctttgttgataacatgtattttgtacgtagtagttgttgttagcagggaagggagtagcttattttgcatagccggggatttggcaaatactatggcggattgacggcgtggctgtgaatgcgatcgtggtgttgcttgcagatggctggctgctggctctcaaggggcgtgtgcggatgacggcagtaaattgaaaacgtagagcctctttgccaagactttagacttccacgggctttgacttcactactagtagcagaaacacagatgaagcttttaaatttttattttgttaaaataatttgaatttttgccaaaatagttcgaattgtcataaaaacatgaaaagtctaaaaatagagagaaaactacagttatacttcaaaactgggacactagcgcaattgcttccttgtctttttaacaagatttaacacttaacggaggggcatacaacagttttattttaaaaacagagatttacacttttaaaacaggagcaccggtgtaattgtacaatataaatcaaacgaattataaattatgacgtaattgtttaataaaaaatcaaacgaattataaattgtgaccagtacgtgctaggggagaagctaaaagtggtatgagccaggtcaaaaagggctctgatatacgaaactagttaaatgtgcgatgtaaccaatcggaagcaacgagagcttacgtttcaaatgaaatgaagcacgaacatagcgatatgaatctgaactgaaatgtgcagggtttaaacgatcgatgagctgcttgtcggctctactgggtgttcttctgttctggcgttacagttcacgagcttgctagtgttgcgtggtggcaggctggcagctgacgagcgtcggagtccccgcgtcgttttgtgcagtgtactctcgcgcttgcccggcctccccttcggtttgtcccaacttcgccaaactggtaaccgaaaagctgcaagcagcag

SEQ ID NO: 2975 - DNA, 985 bp, Zea mays
tgtctcagatactcttgtactcaacctgtctacgtatgaatggtcagttctcactaatcttgaggcccgtgcaccccctgtaagtgaggtgagctcattgatattctgcgtactctagtcactcgaatttttttagtattttcaactaaggaaaaaacttgcttctggtttgaagtttaaattctaactcaatcaaggtgaccatatatggatttaagtctctcatgatggggaaactcatctggtctaataaattgccttttttagaaagttatatactcacaattattcattgattgtactaatttgttaggtaatcttgctgttagcctgttactgatattcagaggcatgtttatgacagggctcaagtttagtaatgcacacaattaatggagaaaattttctggtgtcatttggaggatatagtggccgttatagtaatcaggcatgcttttctatgatcactctagtgtttttaacgtgcccttctattcagctgagcaattctttttgtttaggcttatgctctcaaggcaagtctcaaaccaagtgtcccatctcaacaaataaatgaatcagatacaaatggcttttctcccttatctgtggcagaaaattctagcaggaaagtcatatttgaaattgaggaacttaaagatgaaaaggtaatgtaatgtttggatgcataaacacagttcctgttcttttttattcttaataactttttccataaacacaacttctagattgtttctctggtatgttcattaaaacatgcatttttccactatcagcctggcaatagggcagataacagcaaaaccttgggacaagtagttatggttgaacaaaacgaaatagaaaacagacttaatcaagagcacttgcagagtctccgcctgaagcaggaactaactggtcttgagaacagaaatgcagaacttactgaggcaagctatatctcacttaccaaattgtgcaa

SEQ ID NO: 2976 - DNA, 1151 bp, Zea mays
ttgcatgcctgcagttatatagcacttacaaattctcgagtgctgtgagcagtgtaaagttcttagaaattgtgccatgcaaagagctgttggagaggtctctgcatgagagtttgcaattgaacataaatcagttatttaacctaccaataataaagcagcacatacgagatcatgatgtaggatctcctcaatgatgtatcagatgctcacagtgatgttatcctcgatgtgttaccacttgcgttgctgcatttcacaccgtcccaagcatatttgattggaaaacatggatcacccatccagtttttcctgagtccatactcagttttgatagccacgatggcgtcaactagcatgcaaagaagaattgtagtcatgactatgtttgacaactgggtgtaatcacccagatacatactgacttagaaaaaccattgcgtgtacaagaacaagtgaggaagacgaaaaaagtagggtcaattcaaagtagagtctttgacaaaccattttaatatcctgggttcagagttcagacccagttcagtgccatagcgtcaagcgacattcaatcgagcacctggggcacaccgcacaggggctgcattgtttataggcgcgcacaagcgcagctgtgtgttggacagttggactgcactcgcagtcgtaatagaaatgctgtacttgtagtgtgcgtacgaagaaggctaacagctaactgaacatccaattccgatcgagggaaagggaaaagagagctgggctagcttacagtcttgagggagtgtcgtcggactctcataagggacacgaatgtagatctccagcgcattgatcatcggaggcagcacggaggcttttgttgcagcaagagtgacgttgtacttgccgtcgtcagccctgtaggatttggtgtgcacatgggttggagtcaggtagcttgtgtcgttgtacgccgtgagcttcggccccgattcgttctcgttgatgaggatatcgaactgtcgaagctgggtgtcctggaagtcggtgaagtgcaggaatatcatgaacgagtacttggtttagtactgccaggtcacggcggtgagcgccgccgccgtatcgttgtccgatgccgcggcgacggctgtctgcaggcatgcaagctg

SEQ ID NO: 2977 - DNA, 1075 bp, Zea mays
aggttaaaacatccacttcccatgtcacaataatccccacatggagcaggaagactagcaacgtaacgctcaattttattatttcatagtacaacaaactgaattttagcaagcaccaccatattattcccctgcaaaattcctttttccttatgacgcgaaatcgacatgatttggccaaccatattaaaatagggtggtggcgaaggggatattctccaaagaggtcccgttttcggagagttggcagcatggtgtttggccagtttggtgaaattggagaaaaacaaaacttggttcgttgcttttacaggtcaacgggttgaacctggaaatggcgttgatgcaggtgacagtgtgtggttaaaaataagctttcgtcgggctcctgtagaaagttgtagtcgtaggttgcttcatctctcagaaacatatgcaggttagaaactcaggagctttccatgttgcagatacagaccccaggaatcaaggatcatctggacgtggatcaattgcagccagagctacgttctcttattttatctgtctagattatataatcgaacaaatttcgaactaactggacaaattataatctcagacaaacaatcccttagtattggtccgcagcataagtttctgctaattggtttctcttaacttttaaccattagcattacaatcttgtcagatggatggctctcttattatgtcgtgcttgcagaattcactatggtgtgtgttccaacgattcattaagtatcatacggggaaaaaaacaagattttagaatggttgtacaattgaaaatgggttcacctcaccaaagctggcaacaaccataacagaagagaccctacactacactacactacaatacaagcaaccgatccgcagcccgggcagctttcagggaaagagaagtcgagaagaccacatgttcctggagttgcagaagggacaaggaacttggaccaaaaggaaaagaaaaacgaaaagaaaggacaaaggaactgttctgaacagcaattcaaacttttgcatgttcagcatccataatttgctttctaccggc

SEQ ID NO: 2978 - DNA, 1070 bp, Zea mays
ttgctccccgacgaggacctcttcatggccggcgtgcctgatgtcgctgcgctggtcgttgttttatcatggctcgtggatggtggcgtgcctggtgtagtgtcattgcctttgtcagcagcgccagcggggtgggagtgggacttggagtcttctgcactcgtggggtggctgctctccgtgttgttaagctgggagaggctactggccctgtgcctgaaccactcgtcctcctcaccttctgacaggctcagctgtagaaaaaacagcaaaccaaaagatgttcttgtttcagagaggaagaaaaaaaaggagcaacgcagtaggtttttcttcctgggataggatgcatgggtatgtgtgtagaagtgtagcaatctgatcgatttgcttcttcaccttgacatttgtaagatccacgttcctgttcttcagatagttcatgaactcacgaaagtttgcctccgtggggcggtagtgcccactatgtggccagacagcctgaaagatgatgaacgaatcagacaggtgacttgggcgctgcacaagtaaaacactacgaggctggaagacaagtgttgatctatatatgcacctttagaattccatcctctacaatcagtctgccagcagcagatgtggctccaccggcgaggaagctggagtgctgaaatgtgcccttgctcttctgcaacaacaatgagattattacatttcatctgttagaggctatcttcatggttcaggttcttctctactgcctgcttaaggtttcaaggtgatgtggtggttgcctggttggacgtaccgtaccgatgtatagagctctcgttgtgctcagcacgaagatccattttgcatccctggggccttcagatgtgtcgacgattttctggctcagtttgtacataaactttccatcctcaaccacgacctcataggactccctttctttctgcacaaattagcaaatcatctacggttcagatatgaagccttttctgctagctctgagatttcgtattcattgctgctgagggttgaagcactaaccgggccaaggtacctga

SEQ ID NO: 2979 - DNA, 1142 bp, Zea mays
gctcaagtcgctcagcctcgccaggaacaggctgacgggccagctgccccaggattacagccgcctcgcctcgctgtcgatgctctcgctgtccaacaacagcctgcacaacatctcgggggcgctcggggtgctcggtgcctgcaagaacctcaccacgcttatcctcaccaagaattttgtcggggaggagctgccggacgacggcattggtgggttcggtggattggaggtgctggcccttggtgattgtgctctcaggggaagggttcccaagtggctcgctcagtgcaagaagctggaggtgcttgatctgtcctggaaccaattggttggcgtcatcccctcgtggattggcaagtttgagtacctgagctacttggatctctccaacaatactttggtcggtgaggttccaaagagtttgacgcagctcaagagccttgtcgctgtcacgcggtcaccgggtatggcgttcactagcatgccattgtatgtgaagcataacagaagcactagcggccgccagtacaaccagctctcaaacttcccgccgtcgctgatcctgaacaacaacggcctgaatgggactatctggcctgagtttggaagcctgagggagctgcatgtcctggacttgagcaacaatttcatatctgggagcattcctgattcgctgtcgagaatggagaatctggaggttcttgacctttcatccaataacctcagcggtgtgattccgtcgtccctcacggagctcaccttcctgtccaagttcagcgtggctcacaatcacttggtggggcagatcccaagcggagggcagttcctgacgttctccaactcgagctttgagggtaatcctgctctatgcagatcaagttcctgcaaccacctgattttgtccagtggaactcctaatgacacggacataaagcccgcgccaagtatgaggaacaagaaaaacaaaatactcggggtggccatctgcatcggcctggcccttgcggtgtttttagctgttattctggtgaacatgtcaaagagggaggtctccgctattgagcatgaagaagataccgagggctcctgtcatgaattgtatggctcttactcaaagccagtgctgttctttcagaatt

SEQ ID NO: 2980 - DNA, 1398 bp, Zea mays
gcatgcctgcagatgcaactggtggaccctgaaaccaaaaaaaagtgtaagcaaatgacagcaacatctcaatttttgagttaattcaacaaactacatggttctgtgaaaaatagcaagtgtattcgaatatgaaagactgcatgcagccattgaaatcacttaatatagaatgacaaagtcatggaatacaatatagcaaaacaatcccttaaaatgttttgctcagcctgaagtcagtactatgtgtgttcaacaaactataataaaaaaggaatcacaacctttgatagcgctataacaccaagtaaattgattgcactttttctggcagtgaacaaatcctcagtccatccagaaatgtcatcctgccaataaatatatcagcaacagaacgaacaccagaaacaaaactagaaatgctgaaccctgtccttacaagttcagaaggaagattcttttgcatatactcatcagtatcctcctcccattcttctatatcctattatagacaaaagttaggacaaaagaagtacatattgggcaggcattatttatggccaaaagatagggagctaaccttctcattcaatgctaatgctagaaaaattgctgaatcaagaagtgaagaaaaatgtggtgaaactagtcgccatcccttcaaataaaggagcagatggacatcaattttttgaacatatccgagaattatcatccgaactatttggcgcagacacttaccggtcctgtttccaaaactcaagaaatcacatcaaatgccaatgaaacaatccgattggggagagagtcgagtttctgcaatcaatcatttgtctatattaggatctaatccgatgagaactaaaaacaattatcccagcatttattaatctagaatgtcagcattgactcagaatgctaatctccatctttgccacaaataattaaattctgagatgtagaacttacacttaaatggatgctttgttttgatattttgattgcacagttgacaatatgtggcatctagctgaaaacatcggagcataagttttgaagaaaatgttagagcatagctgcaaaggtagaatggaaaatatgctagaaagaagagtagtaggggatagtacatacttatttgtatgtttccggtgacgtgtaacaagtgcgcaaaatataatgagacatctctttgcaatcctgagcttcatggtagatccatcttcaataagactattaaagttcaaagaatctagtatacagaacatgtctttgcaaaaggaaggcaaaatttgtttcaccctagatggcatgtatgacctcacctgcaagagcaacaattagatacccatgataaaaagttagcacttaatagcatgcatgccacagaattgataa

SEQ ID NO: 2981 - DNA, 1008 bp, Zea mays
tgatgatgcaaaccagtttctaggtatgcacactattttcttcttctgtgtacctgttgattgtaagttaaccatttccctggtaagttctcctaattaaatgctcctttgaacttcagagcaatgtgagagggagaaagcacgagtcctagtccattgcatgtctgggaaaagtaggtgtgtatggtacatatgtatattttttcatctgggggagctataatctttcttatttctgcactgatttgactaatgttatcgcgacactatatcagatcggcagcttttgtaatagccttcttgatgaagtcgagaggttggagattggcacaatcttttcagtgggtgaaagagcggagaccacaagtgcaactgtctgatggtaacttcatgaattgtgcataccttttctgtcatttttgttctcagatacccttgaagaaaaataggaagattgatgctcaagtaggctcttattgcaaaaaatgttatgcttagctacacgagcgtgtgaattacacaataagattgggctactcaacgtgcacacaagtatgcatatcaaagtgaaatgatgcatcatcatttgttgcaacacaaaatatattgtagtgacttgatctcatgttaattctgtttctgcactgggtgacaagtgtcatgtgggtgtttggggaaaaactgatatgaggaacccagccctgatccaaaatgtcaattatggtgccacagtaataaatagcataaaacttatcatggtaagcgcaaagtaaggtgaaattagttcatgtttagtttattattaatgtatagcaagtagtccttaggacttcttgagtccgctaactactgaaatcatggagagacaagaactaatgagttgaatttctacctgaaatgacctcagtagtttaggtaatacaagttctcacacttaaatttggaccttctagccacacaaataatagtgcatttaccaagtgctaacattagtgatgaacttgcttt

SEQ ID NO: 2982 - DNA, 1231 bp, Zea mays
gatacagaacggattagtcagtcagcagctctcgtatgtctgatgatacactgcacggtggtcgatccgtctgtctgtgtgcccaaatcaacgtaccggacagtgtctccccttcgcggacgccgctgtacgcccatttgcacgccaggcctatgctctcggtcgcgtacctgttgcatcgcatcgcatcgactgcttatatacaagattcatccaaactaaaggagttaacaacgtagcgttccagaacgaacttggttgggcaagacgagaggtcttggcagtctgtccaagccgatacatcgtcggaccaggtaccctgcgagagagcgagcatgcaccgcgtagtgcttgcattgaggacatgtttctttgcctggaggaaccaaggatatatcagaatcagatagccagtccctttcacttgccttggtgaggttgtgctcgagctgcttgcggaaggcgtccatgtccttgccgtagaagtcggcgagagccgtctgtatgatctccctgtcccacacctggggagacacgcagaaaatccatccatcggacagcgtttactccaacagcgcggggggtgatggaatggaatcgtgcgcaacgcaagcaaagcaagatttagttacgtggtggaggttggatttgtgccggaaccaccgcagctctatggagttgccgccttggtcgctggtgaaccccacgtgcattggctgcgatgcaaggaaatcagccatcgcgttcatggcaaccggcggcaattaatgtaggagatcaacttggcaaagagaagagaagcaagtgattaagcacatcagatcacctgatgaacatctcccatgaagtgcgacaggaacagaagggcttcagtcaggttgtctgcgttgcagcaacaagacggcggcggttattacaaaacgcggacaagcaaagccaagcagcattgcctctcgcttacatctcctgtcggcgctgccgtgcctgtagtgcagcagctgggacgtgaagttggcgatggcgccggcgacgcacatgtccttggcgccgtcggggccgtggcagtcccctgctcaccaacgacgacaccattccattgcattgcatgtcacgtcacgtacagtacgtagcaggagatagagtggatacgagcggatccatcccaccaacggcccggcggatccatcccaccaacggacattgatcaacttactcgagtagtcgcagctgc

SEQ ID NO: 2983 - DNA, 1369 bp, Zea mays
tgcatgcctgcagccgcttgttccggccgtacagctccaccagcccagtcaagttcttcacacggtcgagacgagccatggagaagatgattggcttgttcctgtcgttcagaacgaacctgcacgggcgtttgcagatacagatacaaatacagtcagataacaacaaccaataccgcttagcttgagcaatgcacaggcggtttctcacttgtgctccgtgttctcggtttggctgtacaggagctcctcaatctccgggtgaagggaggtcagcctcttgtgcgactcggtgtacgggaagtagatggacaggtccgcgccaggagacacgatgttgaacttggggtcgaacacatcaatgccgtggacaacgcggtacaggccaggcattgtgaacgccatgtgtgactcgtactggccgacggtgtccttgctgaagacccagaacagaagatggcatgcattagatcatgggaatttaacaaccttgaacattaatcttgcttgtatatatatagatcacttactttccggcgatctcttggaaggtactggtgatgatgaagtcggcatggttcattgcaatcaagtcagtggtgaactggcacgagaagtggtagtgatcctcaaacttcttccagtagaggtcggagttagggtacttagttttctcaagcgcatgggcaatggtacactgcaatatgtatcaaggaaaaagaaggccaacatgaggaatgagcaggaggtggtaattaaaaaaaaattacttccagttgaatcgaaaagagtccatacgtgagtaacacccatcttgtgggcgagcaaacacgcaacaaggtttccgtcactgtagtttccgatgatcaggtcaggattggcctgaagctctccagcaatctcatgcgccacgtcctaccaacaattcaaacaaacaaaaaagagtcagcaagaactatgtctttcaccaacagattagtagcaactcctagtatcttttggtacttacatcagtgtaagtctccaggtacggccagacttcaaatcgcgagatccacttgcgaacgattccgttttctgttctgaatggcacgcgaaggatatggcagtgctcggtgccaaggaccttctcaaggcgctggccacaggtggtgccagttgcatcagggagcaacctggtgacctgcgcaaaaaaaaaattcaaataaggttcttaatgtcaccaatttagccgctatattttccttttttatcacattaggcatcacacttacaataaggatcttcggcgtgatgtcaagaccacactgcttgatcctcagcagcatttcgttctccatagcgcgcacttgatccaagatgtagacaa

SEQ ID NO: 2984 - DNA, 1136 bp, Zea mays
gcccggggcctcctgtagagtctacctgcagcccgacgaacttatccccttcggttactgcggccctggtacgctcgcgttcctcgtaggactcgggtgcgtgtgcgtcctctttgccgtcgcggtctttcccagtggaccaggaccagttctgttcctccgctgccggacgaactgtcaagacggatgggccgccgtggtatccgtgccggctcagagcactgaaatccacaccggttttcttcttcttctttgacctggctgctgttcacagagctaagattaatgttaaaatgaaccgtaacgacaagatatcatactcagaacaagcgtcatctggactggagttcgcatcactagattggtacttgctattttagcaaataaaagtgtgcaggcttacaccatggaaacaccaaaaccccccaactcataacggtggctactccagctttacggaagcaaacacgggatctacgtaagcatgatacatgggatctgaggcccagaggctagccaagtgctggccagaggtggtcagcctatggacctcttcagtggcccaaaccagggtctcagctctggcagggtggatgatagcgtccagacgccggtgctcatcatcgctcccaatcctttgctggtcccacttttttaagaggacattggtgaggtaatgcaagggttgctcatacagctgcttcagcgatccggcgagtcccagccacgatgtgaatgggattacagaatcacggtaagcaggaacgggaatgcgcttcatgtattgctgatacatttcggccctcctgatcagagcacctgcacgatcccgttacctcattagaaagatcattcccaaggatatgtgagactgtgacagctcaatccatgcctcagaggtgccaagttatgaaacaaaagggttttttttcctcaatggacatttttaaaataaaagaatttagtcttattcgcaagaattgatttggctatagtagttacaaaaaaagttgcaaccaaaaaaaataaatactaaagccatattttaaaaagcatcttccttggtagcacaaaatattcttgtgcataggtaggccgggcgccattcaatggaccggatacgcgaatagatgcat

SEQ ID NO: 2985 - DNA, 769 bp, Zea mays
tgcatgcctgcagaagtggtgataaagagtatcagtgctcaccttctcaaagacaaaggggaccccccatttcacgaagacatagcccactaatataagaaggaagcagccaagcagaactttcatccaccaaatgaaagatcttgactttggttgctcagataaaattgtcgtgccaacatcagatgttgcatgttgagctcttgtaaccagcctctcatattcatcatcctttctgctctgctcagaatggtcaactgctgtgcatgacgccccggctgatgaccttggcatgtctaccactgcctcttcgcctctgtttatcaaccaaacaaaacatatcaatgtaaggctgtgacatacttgtgctgtatactagaacagcttatgaaactgtgccagaaggctaccatgtagcatatatccaagaagcgaactaatcaactaaggaaccttatatggttcgcatgctatcgtaatgagatctcatttttgcaatatatacaataccacggtattcacgcatgcacaatagaaacccagcccacggaatgaggggaacataggttctaggttgcagtctctttggaagttgaagtgcaggtgctctctggctaaaattagcagtaaaacattacctgccctctttatttcaaggtcacatttgacgaccctagtgaaaacaaagtcgaatttacccacacaaaagggtctgccatgtgttctttgtttggtgtagtattgcaactacatcagtgcaagagcaaga

SEQ ID NO: 2986 - DNA, 618 bp, Zea mays
tcggtacccgtttgatccgctagagccgacctgcaggctccaagcagggctccccagattacggcgtcaggctccatcggcatgctcgcgatcagactgtcagcttcttttaacagaccagcacgccccagcaggtcaaccatgcaaccataatgctcgattcttggcttaagaccgaactcccctctcatcgagttgaagagcagcttgccttcatccaccaagcctccatgagtacaggccaaaatgactccaacaaatgtaatgccatctggttttgcccctgtcatctaaacagagtaaaatcagctccagccctaccaactacggtgcataatctggatttaaggttactggtcactagtttggtgcttcgaagcatatttggtcaaccaagctggatgcaaagcgaatgaagcagggataagaagagaagtgcaagcaagacatcctcaccctcagtttatgaaacaaggccagcgcctccgtccagaggccatgcacggcaaacgccatgatcatggagttccaagaacaaagatccctccgcgtccccatgccccgaatacaccttccaagccccgcggatgctggccgcacttggcgtacttctagacc

SEQ ID NO: 2987 - DNA, 1014 bp, Zea mays
agcacgaacatcagtcagttgaaaatggtcactctcagcatacaatccgtacaaacgtttgaggcatcagagtatcagacatacaagactgtaagtgtcataataaaatcaccttgcctgatccatggatttattgaaactaaattaccatgaaacaaacaaggccctgactaggtaggagttttctaaacaaacctatccatgttaacaaaaacaccaagtactggacaacaccattttccagttctttcagtttaaatcatacctcctagaccaaattcaaaatttcaaattacccaacaactgagacctagcaagagactaacttgcaatggtacaataacaaaatattccatcctaatactttgattacctaccgggtcttcatatagctaagatttgactagatgagatgaatgtgtgctctcgttagttttgtagcctacattaccacatcggtgactaaatttttccaacgttcaaatgtttttttagcaactggtcttaataaacaaagtattgagcttcaacatctcaaagctgattttgctaagtttcaatgaatctgcttctagaaaactgacaaacatatttacttgcagcgccgcctcattcttccaaatacagcaaagtcatactagttcaaaaatagtagattgcagtggtaaggaatttgaatagtaaatcatattaaagagatacctcgtccaatatgtaaagtggtgcaggtttaaaaagaagcagagccaggataagactaagagcaagaagggatcgttgtcctccactaagttcagacagagactgcttccaaactgtcccaaatgccacacgaacttcaagaccatccaaaaaagtaccaccttctggaggatcaagttttgccattgtaccaggtaaaagagtactgaatatagacccgaaatccctatagaaacagaatgtaggagttaggatccaatttcacacttatgagtaagagacatttcagcaatatttaaagggacagttcat

SEQ ID NO: 2988 - DNA, 1118 bp, Zea mays
ggcccggggctctgcatgatgagcgtgatgaagcggcccgagtccgtgtgcgccgtcagcccgatggcgcgctccggttccggacacctggggtacctaccatacgtgtcatcagtagatgggacaagcagagtccagaggtacgtacagggtgagtggcacgaacgagagacttgcagaaaaacgtttgcattggtcagatattcgtttttgacgtacgtacaggattgggtgcatcgtcgccgtccaggtctcgcggatcctccgctccgtctcgccggcggcgaactggacgtcggtgaggccgagcgccatgaagaagaggtcgagcagcctgccaccgagagccctcatctctctgtcgtactcctccatcacgtcgctgggcgcgcgcatgcacatgcatgcagtcaacgtgggcacgctcacgtcgttaaccagtgtagcacgcgtgaggcgtgacgtaccggccgataaacataacacgtacagcacgacgacggtacgaggcatgaaagcacaagcacgtgacatggcgctcgtacgtaccagaagcggaggtagtcgtcgccgccgtcgggccagacgcggcggaactcttcgcggacggtggcggcgcggaacgtgtacccctcggaccacatgagcttggagaagcggagtgccaggggcggccctgccgtagccggtggccgtgggctccccggggcggcgccccgcgcgggccttgtcaggagccgggagcacgaacaggcgcgcgacctgctcctcggcacgcgccgccacttcccggggcacgccgtggccgacgagcaggaacacgccccactcgtctgcggcgcgcgccaacgcccgcgtcgcgtccgggcaggccacccccatgtccaccaccgggaccgcgtcgcggccagcggactccaccgacgggtactcgttcacccccggccacgcgtgtgtctccggcacgcccgccgcagacccgagatcgaagacgaggccggaagcggcagccggcgtcgaggctgatgacgacgacgactgcatcgtcgtctcgtcgtcggctttgaaggactctcggcacgtacaggatagagataatcaaaatggaggtcaacaca

SEQ ID NO: 2989 - DNA, 1184 bp, Zea mays
ttctcgagcctccttgaccatggaccaccggtgcatgcagttcgctcagtgcctcagttcttcgcgtgccgccttcttgaccctggaatccaacgccttacgcctaactccactactcgagggacccaaaaaacaaacagaatttttgtcggtattttgcagtagagaattgcgcacaccaggcagcatccgtcctgtacaaactccgatctgtattgtgttattgcgacgaaaaaaatggtccaaatgacggtctcgaaaagtttcaaaaggtcggcatgcagcacaacaccctactacgttacaactctgggtacacaggacaggagtggtcgcaggcaaggcagcccggcactctggcgcgagagcagataaaattaccggtaccctcggttacttcactggaatcagtgcctaaactggagtacagagtccgagtccgtaacgctgacgtttacggcgagcactcgagccgcatgagcctgcggaatccccaggccacatgcatgtgctgtggcgtatttgccggaccggcttcatcatcagcttacggcggcgacgtctgtcgccggactggagtccaggagctgccggagcctgggaccgccgtgctccgtgtgcctgctgacgctcggcgcgttggcgctgtcgatcatggaaaggaagttctccgccgaggcacggggagaggatggggatgcggctgctttgctgggagacggttctgcggtgtccttcagcttcacctgataagtgacagtgcacctcgcgtcagaggaaaggcagattgacatgacatcgcctgaatgtagtatacagaggcattggaaaaaaaattcattaccattagagctgagttctctagtctgagcttctctgagctctctgttagccggccgatttcagatctaagggacgtgttctctgctgcaagagactccacttgtgtagccaactcctctgtctcagcctacaccaagggagggcataagtataagattgaagatatgttgttaggacaaataatccaagccagactccactcccatgtttcaggatgctgcttcattgtacaactgtatcacacagcacacctgttttctcagccttgatcgtctagcagactccctatttgactgcttcctcttttcgcgcttcaattccctctcatcctgcaggcacgc

SEQ ID NO: 2990 - DNA, 1107 bp, Zea mays
ttgtcgagatcgttgatcggtatgatgacgcatgcatccctgctaatgtcactgagaagcttgcttacatccggaatgatagtataccaaaaacctgcacaagaaatctgacggtaatgaaattatctagatgtattcttctaacctgaaattttgggaatggaaaaactatagtagaaacaacattgactagcgacagtatacatgtcagttactttacaagtatgcatcttgctattaaaaaaaatcaaatgaataattggctgaaatatttgatcacatggtcttcagattacaaaggatatgaaacaaccgatttttgtatattatcagctggataacttttaccagaatcataggaggtatgtaacctttagccaatgctctctctctctcattgttttacacttttgtcagtgagaagtcttcttgctatttaagatgtatttttttcctacttaactgaaacattcatcacatacaggtatgtcaagagccgtaacgacgcacaactaagagataaaagtaaggcgagtgacactaccaattgtgatcccgaggccaaaacagtagatggaaagccaattgtgccttgcggtcttattgcatggagcctgttcaatgatacatataccctcattcacaacaatgtaaccttgagagtggagaagaaggacatctcttggaagagtgacagagaccacaaattcgggagtgatgtcttcccaacgaactttcagaaaggacctcttaaaggtggaaaaacacttgatccaagtattccggtatgttcatggatcttgctttgcattatccaattctatgcataattggtggcacctcatagggaaattatgcttttagcatatggtagctataaagtttaaagaccaaatgactcatcatcatcaacaaaaacaacaataataacaaaggcttttagtccggagtaggctaaagacaaatgactcccaatgaattttctcgtagattgattaagataagctcttggtcatttaggataccttgtgcccccgaagtcactaacttgttttccttctgagcagttgagtaagcaagaggacctcattgttggatcggatgcag

SEQ ID NO: 2991 - DNA, 1003 bp, Zea mays
ttttatttaattcggcagtgtacttgtttgacccctcccacacacacatgacacatcctaatcagccatcgtcatttggtggtggcggtgggctggtggccctcatgacctggattattcactcactcctgctgctacctgcttttgtttagtcttcctagccattttattaatgtataaaatgttagtggatgcatgttcttgctgcctttcttttattttctcttcttgccgttaggaagcttttctctcttcattgattaattaccattggttgattgcctgattgctttgttcacttgttctatggactgtgtggtacccgtcttgggtaccttccaagccaagaaatcaagaaactgaaggaaaaaaaaaaggtataagggaaactacaagagattgttggtcactggtcagtgggtaattgaattaacgctgtaaaattcactatagtttctgtctacaatatatcccaccaaatactccaatcgacaccactcctgtggaaagtaaggtaaaagaagaagaaaaaaagaattacagctgtataatatatacggtcgttttctgtttacggatttaccccccctctcggtctcactctcacatccctcaccacacgtccacacaagcgaagtttacaagccccgacgcggcgagccggcggcgactgtctccctctccttctgtctctctcccaccgccggcagagccagagtacgcatggatctctagtagtgcggcggcggcggggcgaagcagccgctgtcgtcgcagcgcacgggcgggcggtggaggaaggcgaggcactggtctgcggggcgctggtcggggcgggcggcgatgcagttctggcggtcgtcgacgtggcggacgtcgaggcagcggcttggctcggagcagaagtagttgtacgagtaggtgaagttgcggagcgcgggcagcgcgcagacgccctcggggacgtggccccacagctcgttgcgcgccacgggagctgcgc

SEQ ID NO: 2992 - DNA, 1226 bp, Zea mays
aggctctccctcagcgccttcgatcgacgccgggactaggcgtcggcgtgatcgacgcgacatacattagatgtaccacctccaatccgcgcccgtcggttttgttcgtgtcagagatcgtggcaatgcgaatacaagctttcctaaacctgagctcggattacctcgttaattaccagcaaaccgactagaaatcggctggttctctcggactagcaaggagtagagttcttcacgctgttttttgttttctttttgctgatgatagtaatgtttatttttacttacctgatgttgtaattgtgaagccaagtaaaactgtctttttttataaggagcaaaactatttgttctggggttcggccgagcttaaacgaaatccatgacagctttgtttttactctgttctaaccagttgaccgtaaaaaagaaaatatacgatatatccggcccatctagaacgtgggttgcatgatcggcccatccgtgtgggattcccgggcacctcctctacataccaacaaattagccaccaccattatctcaagagcagcactgattaatgttaagcacatcggccagcaaggatttccactcgattcaacagggcacagctgctgcgagatccatcaataatgcaaaaaagagattgatcacaaatcagctagagctagttcaatcggagctagcatcacgtaccgaagaacgcaacgaaaaataccacacattacatggtacaaaacatagaggaatatggataaaccactaaaagatagatatcgtgtttatgtgatggaatacgtctagttttgcgaacaaattagcaaagacattcctcttttctgaaacgcgaaatcgaaatgtctggaatcaaaaatcacctgtgacttttctttaccaccctctgcggcccagcccaactggacctcctttacctccatctgctcgcctcatgggcctattgggaccacatagcagcgagcctacacgccgtgatgttacagatccttaacggggccgtgcgtaggccgtacaaggcctactttgcgagggctgaggaggcccgtactgcttgtgttttcgctgattccgaaagccccaccccacccaactggtggtgctggtccgggccatctccaacagattaacagaacctctcacctcacaaaagaaaattgcatataaaaagctgattccctgccatctgcactctgcaggcatgcaaa

SEQ ID NO: 2993 - DNA, 729 bp, Zea mays
tgcatgcctgcagctgcaattgcttctcagcgaagtgctgctcacccgctggcaaggtatccaaagacatgcctccatgaataagatttcgaactcttggcgcctagaagattcagtttcttctgctctggcagtctggcagcatatttgcaaattgcaatgattaactggggttgacaacatgaggaacatcataaagcacaacacaagggcgctccactgaatatcggattaacttaacatctgctatttcctatgattctgtcatatataacatacaaaggaacattatatccagcgctacagctactgcggaatacatcagtttcttttattacaaaaagggtatcccggaaaacttttgtacagtttgactaaatgctcgctgctcacaactcacttggatagagaaaatctctgctaccaaataccaatcctctaaggcaaaggcaaaggcaaaggtccatctcccaaaatattgcaggtcttcgataacgcaatgaccttaactgacagaggtgcaaatagacggctgagaatataggccatttatggggttcatgaacggctggggacgccttccgcgttttgaaacgacagtgaaatcctctgtattcctcaggcccttagtaacctccggcgctttctcttggttatctgggactttgcgaccagaaacgttcttgcctaaaacgctggtctggtcactactaacttcatctgatccac

SEQ ID NO: 2994 - DNA, 1188 bp, Zea mays
agtgcgtgcatgtcacatcgatccatctctgaatcaaagtcgatctctagcagctagtagtagtagtagttccgtagaatgcaagcatcgggacataactccccacatcgtctcacacatcgatggcacgccgttcttggtgtgcaccgcttttacaggacgagacgacgacgacgacgaccttggggctttggctactacctatacgataagtagacgtgactagcaagcctcgtaaaagatgcatgcatttttttttgatctcgtacgtcagaacaaaagagagcgacgtacggccttcggagcctcggaacatgtagcagcagcaggctactagaggatcgacatgttgaagttgaagcacgatgggctaccgtgttcgctattattcttgtacagagtgacgacgccatgcatatactcatatataaaagattatttccggtgtggcgcgcattggttccatccgtaaaataaaaggcgcatacgcggaagcactctagtgctcatactcgaccactacttcagtcaaaagggcaatcatgtgaacatgatgaatccacttcatcggctccaccacgaattcagagcctcgatagagcccgcggcggtgccggtctattagacttgggcggcgggtaagcccatgcaaccacggcggcacggcgctacggcggtgggagcgtccacaggacggagacggagacggatgcagctggcgaggcgtacatggcatggcggtgcaatgattacggcggccaagctgcggcccgacaggccgactcgcctacccccgagctgggggacctgccggcagttcccctgcactgcactgcacccgccccgcgccaggcgccgctcatctccacgtgccctccaccccggcccctcccccctctcctcctgcctagtgggccatcctcgctacgcccaccggggcgggcgagtgggcgactacagaacaggctactagcccaggggcagggcccagccagcccagtcagtttcaagtttgacatgacgagtcaggtcaatgtcgtggggcccactcgagcgaccgcccgcccgcccgcccgcgggctcccgttatcccatgcaacattgaaccaacccgcacctcgctctatctcgtctctggtgactgatgccacagcatctctcgcagctcgtccatatctggaccgcttt

SEQ ID NO: 2995 - DNA, 1295 bp, Zea mays
agtaatacactaattacaattctttcattagggttatgtgtcagctacagttgagtaggacaaatttattttatcattattccacaaagcaaaagatcaaaagtaccttgtagatattctctggggatgctaatttaagaccattaatttcaataaaacaatatggcctcagtgttccagaatcaaattcagatctcagcctcctcataacagcaagtacactcatagtctgtagtttgataaaaatagatacagaaaatttgttttaatgtttagccacagcagaagagataaaaccataaaagcagccaaaaaagatagtctgataccttgccagtaccaggtacaccatgtatataaaggcaccgtcctaggcactggtcattgcagattgcatcctttacaaatatcgatatctcctccatttctctgaaattatactttagctgagtagcagtttttgtaagacgcgcaacaaacattcaggaatatgaatagacatacttatccctgcaaggtaatgacttagggagagttgccaataacagggttgctttagccttctccagctcagtcttttggtggcaccgaacatgctcaggaatttttcgtattccaattttttgtaggccatatattctacccttccttgaattctatttataaatatgtcatttcagtaaagcaatacaaaacaacagatgaagcgagaagggttatttgttaccgctgtcaattcatgtgattgattccctctggcagagaaagatgatgtaggttcttccacctcgtcatactctgaatcttcatcagtgtcactgttataatcatcactggcattgtaaggctcgtcactgggatcttcctttgtctacaagaaatgaataggaacaaacttggtcaatgggaaaatcacagtggtgttggtgtccaagcttcaaacaagactggtttgcatctcaagagtttatgctcatctacctcgggttcatcaccaatatctgccaaacgcttaaaattatgccaatgaatatcatactcatattcacagtaaaatacatcatctcctccatcgttagcatccctaaagtctttggggcacaatatagaacaatgtctaaggattgtttccatctgcacaggccataagcacaaagaacttgagacaacaaatgaacaagcaaataaaactgtgaaagagccaactatacacatagaagacagttatcacctcaatgtctgcaagatcattggtacgatacagctcccttctcaagttatgcagctgccttcct

SEQ ID NO: 2996 - DNA, 1051 bp, Zea mays
atgtgcttaaatgataagatatgattttcctcccatttacctatcgggtccattctttgctaacatgtgatttcttatcaaatcgatatcctttttttatgttactgctaataacttttaactgcatatcactatgtgatttcccctatttcctctaatgcagatgctctgttcatttaatgttaagatgttggtcctttctgccatcccagagttggttagcacatgggtgtcaggatttggcttcaaacctatcgaagatgctgaaaggaaacaacttcataatgtaaacttgatgttgtttcctggaacatccttactaacaaagagattggatggatttattatggccacaaaaccaggttcactacctgtttgcttaccactagccacatttgtgccttgtggtttatggatttgggcataccatgacatccttccatttgtttgcatgcccataattctactaattttgaaactatgcaggcgcggaaaaggatatacatgaagtttctggagtacctaatcttaagcgtatgcctaatgggaaagcaagtgagcatttcaaactccatgaccttgatttgtccgggacagagtttaaagctgaggtttccgtgaatggtccattcagaacactgaaacatgaatgtggttcagcagcatggtttcagtctactaaggtttggtacatcaacccttgagaccttaagctatttttttcataagaaaaggattgatattcctatataaaggaataatatggccagatggttgcacataaatatccatttccattgtactgatttacttgtatacgttgtgagctttgctgtttgcacttgcatgtagtccatttcagctgtgctggtttactggtaacctatggggtttgtgcagacatacattatttacaattttagtgatctatagcctcaaatcttactagtactactttgtttagccagaagcatgttgttcttgtatctcgtcctccaagtttagctaatgttctatgcatttataaggataatttatcctgtattgtgtt

SEQ ID NO: 2997 - DNA, 969 bp, Zea mays
acccccatcatcatggcactggagagaggggtcagggtcatcgagctcgacatgtggccaaattcaaccattgacgacatcaacatcgtgcacggcaggtaatatgaaagcgtttttatttttcctaatttttggcttaattcttctgatgatgacctctgataaaagaaaaaaaaaagatagcccttgattctatttcatctcttcagcaacgaaatcttttaatccgacttcaggtgagtagattgaatgtataaaaatggttataacgagtatatatcctctccggccgggggagcattgcatatttgcattgccagtattactcatttgagtttgatttcttctatataaaaacttacaggacactgacaaccccagtttctctcatcaaatgcctgagatccatcaagaaacacgcctttgttgcatctccctatcctgtcatcataacgcttgaagaccacctcccctctcaactccaggagaaagttgccaaggtatttctgttgctctcttccttgacttattaacatgcacacttctctaacataacaacatgtgcattccgccaccagatggttgttgaagtatttggcaacatactgtactacccgccagacgacacccatgagctcaaagaattaccatcgcctgaacaactcaaaggacgtgtcctcctctcaacaaagccccccaaggagtacctcgaaaccaagcttggtgactccacgaaggagggtgatgctgacctccatcttggcaaaggaactggtgatgacgctgtgtggggaaaagaagtaccggattttcggaccgagatccagtctgctgaaaaggtattgccttcaactcaagacctacctaggctgctagtacgttaatttgtactttcgacccgacctatgcaatcaacaatcgtggcaggacgacgagaacgacgacgttgatgatgaggaagaacaaaaa

SEQ ID NO: 2998 - DNA, 1154 bp, Zea mays
tgcagtgtcacttccccctacagtcagtgcagtgggtgatgagtccaagagaacggcagcagctatggcagataagcttgcatctttgtcagcacctgtgcaggtgctgacctccattctctcatcttttgccgctgagcaagctgcttccataaacggcggatcaccttctggagaactctctggagtaccaccaggtttccatattgataagaggcctaggctggagaaaacagggcaggccgaggtgggcgctcctcccttttttgggcaagcgtcacaggtgcaacaacaggctggagcagtgcctacttcttttggaggcacacatccaccaactccaggcccattcccaccccctccaccgccattgccacctctattgccaccgctcatgcaacagtttggtcaaaatactggaggaatgatgggaatgcgaggacctttcgggatgatggctggctctatgccacctccgcctccattgtccaacattctgccggcaggttttccgggactaagtggaccacctcctccacctccacttccaccagctcagagccagccccagcagcagcagacctctcaggcgccacagcaatcaccaacatcagctggattctttcaatcatcaggcatggggttctttcctcctgtgcaggtgcagcaatctcagcctgcccaacgacagtgattcaactgtgtctatttgcactcatgggcttaaaggcagcaccttgcattaactttgtgcattaaacaatatctcaccgagtattgagcctaaacgttggctggtcctgcaagcgaggcacggccaatgacgacggattagaaagattgtagaataggcatgcacgttgtagaactatcccttttttgtccgagtagttttaactcttcctggttatgtgaagttgctagacttcgtttgtttttgatccggtctgcattgatcacccgaggcaaaagaaaacgactttggaaaactggggctgaaattgggaccttgccaactgacaggacagttttatggctgaaacagttgtagaacttactggtcttagtctcatagatatgatgtgaactgcatatttggcatgctgtttaaatctgttgattattattattataccacctttttttgggtttaa

SEQ ID NO: 2999 - DNA, 1303 bp, Zea mays
aattatatcaacgtactactgtatatgcatatgttctgaactatggtttgaattgtgatattgcagagacattaaatgcgcaaatattctggtgcatgccaatggatctgtgaaacttgcagattttggactcgctaaggaggtcgattgcatgctgcaaatttgacccttttttggttcaatttacctgctaccactttctctgatacaaaacttttttatgaattccctttcagatcaccaaattcaatgcagttaaatcatgcaaaggaactgtttattggatggcacctgaggtaaccaccaatccaccatgaactctgatttgagattagaacattcttgcattttgtttgccttatgtttaccttcagtgatttgtctagaatattcatcttgaagtaatagacttaaatttttgaaatatgcgaaagagcctctagctgagttggttaagtggtctgagtttcactccttaggttttgagttcgaatcccagtgggaacgaatttcagtgggagcgaatttcaggctgaggttaaaaaaggtcactcgctgcgctggttctcctggttgtgtgcacatgagatggattgacctatggggcgtggatccttgtgtaggggctgggagggctcaaagcgggtaaagatccggtctataaggggtggaccttcatgttgcacaggggacaacttttgtgacctttttcggtcggagctccgattgagcttcttcttaatagtagtgccctatgcccctacctcagtgttgttattacagatctatcaaacatttggtgcagtctaatcagagtttattcttaaaaaaactcggctggggagggaaagaccgtccttccggtattatattaagaagagaccgaaacatggtctcggccaagaaaaatccccgaaccctacccccatcactagcgggccatcaccgcccactgccccactctacaacggcctagccggaaggtggcgcgtaggacgtaacccggaagcgggcggggcacaacgaggggatttttttaaccaagtccgaatttcgacctcgagggggatcgaacctgggacctggaggtgctactcggaagtagctgaattgatatttagcgtcattaagcgatgattcattggtttgacataggtattgtttcatgtgaacttaatgtggtggcgataatcatggttgatggatgacaacatatatgatttggattacactttaaggtcattctagatgaaagcactaaaatctaaattttcaggttgtcaatccaaagaagacgtatgga

SEQ ID NO: 3000 - DNA, 1016 bp, Zea mays
ctgagaggcccagactttatgaatcaatacgacacaaagtagatcaaacacaaatagatttaacgtgaaaaacccctccaagacgaagggaaaaaaatcagaggtgccggccagcaacaatctcactattttcgggtgcttacagatcgcaggtgatttacaatgagataactatctcctacggattacaggtgtatttatagaaaccttaagttcagtagggaacaatccgtacagcgggagacggagcctcctagcgacgggcctccgcttcgctcgccaacttggccaccgtcttaagaatttagatcacaaactcaacacagactgaccactaccaacgaagcaaaactttggaataaagaacttattgttcatatgcagaactcgtgaagtacatgcgagtctgttctgatttggatcataaaatggatgtagttgggggggggggggcacaaacatgagaacattttcagttttatcagagtacgataggaagcaaaatattgcagcaaagcaaaggtgctcgggtacccctgtggaacccaaagcacgtcattctcaaattctttatgcacgtcgttctcaaattctttatgttatagtgttggagaaactttgatctgtacagaaggaccctaaattctaagggaaagggtgttgcttctttcacttctttgtacaagcaaagacataggagacaactctttgcaaaccagaattctcagcgaccggcaggttggaaccgtcatcctctggcacacagctagagtgataagttactgataagcatcgtccaagctcatcagcacgtaactgtcatcttcgaccgaccatgacatctcaacaagcagaatgttttaggtttggggaaggtggctctgcaaccctcaacgtccctccgagctccacgggcactaaagggacaagggagtggagaacatcagtaatcagcggcctgtaacttggttctggttgcacacagagaaccgccactgctgccacctgcaggtcga

SEQ ID NO: 3001 - DNA, 1073 bp, Zea mays
agactggtctgcgccatttaaggcagggatttggaagccaaggacataggagtagatgtcttctgatgtcaatatattaagaagagtctgtagctttttagataatgtgatgaccaccatttctgtcaaccatgatgaagcattgagaaagtgcaaaaacacaagcaactcagcaggtaaaagtgctctatttctatgatccacatctgaatccatagagaaaatgcaatccagtgaggccaaatttatctctctctgattagcttgtcccataagatctggactcttagcttcttcgttttcaaaaaaatgatgtgcaagctggcatttggattctggtgttaagtcagatgatttcataagtgtatctagtaaaacaaataaagtaggctccaacaattcaacaagggtctcatttgctgccttcaactgtggcttcttgctaaatagaatgcttgaggatgtgatcactaatgcacaattgattatgttcttgtatataatcattgcttcagatggatatgttgaacaaatccttacagcatttattaagaaaaacttgattggtaggaacgcccttctggcttcagtagcaccaatggtttctagtaacggtgcacaccatgtttcagcagcaactcttagagattctatggacagagatagaagggttacaattatttctctgacatttacttttccttcaatcatccctttaccgctttggagtaatgagactacacccttccatgatacattcagtaaaatcacctggcttccaccactggatgctgcataggttcccaatctacacatagtctgaatagtggatgatgtaatcctgatgacatcactagcaagaccttgtttgttgtgtttcacagtagcatcttcatcagttatactcattgtgcagttgtctacttttgtggcctcagagtatgcccggcacagcttagttgtttcatctagaaaaacaggtgcagccttagtgatatccagagcagctccatgaattttctgtaatcatatatccatcagagaaattatacagtgagtcagtgacatcattt

SEQ ID NO: 3002 - DNA, 1027 bp, Zea mays
gggctcctgtagagttgacctgcagggagctagagtcgcgcgtcggcaccggtgagtcgtcccgctcccctccccttctgccctcacccactttgctcggctccagtctccctagggttcggagggcccgattcccgtgtctcactagggggatcatggctgtatgtgcgggatctagctggaggtttggatgccgagtagtttttgtgtagattcactggccatgccgcggcgtactcggtgatttcaaggctttactagggagggtgatgatttccttcgcggctccttcggtactagaccgtgaccagtggcgttgggtcttggcagctgctgattcagtagatttggcgttggagagctgaatctggtggtctggggactggttgctttatgtggatctgaaaagttcctgcaaataagaggcgccttagtgtttaggccaactccagcaacgccgtgtgcgtgtataacactgttttgcactctagatgcactgtttggagagaggagtttgaaatagggagtgagtaaggagtctgctggagatagtttagtttggttaatcttggtagctgttgcgagaataattggccccgatatctccctctcactctggttgagctgcttagtatttgttgatcactcggtcgatcaataatttgcagctaaacaatcgaaaacttgttggagcatcagttgacgctggcaattctgtatgcactcattctctacatttatttggatggatttcagtcttgagggggtattaggaattccatggcaacagtagtatgtagcttgaacttggttacagctgtcgcaatccaagagttgtcccacttctcagcatgctaactgcatgatggctatttaagaaaattgtacggtacaaatgctcataacttcgttctctgtatccgattattggtaatgtgtgttattgagagctagggataatatgttgtgtaccaagagtcatctggttatatgtaataaattattataaacttgtattgccctagtt

SEQ ID NO: 3003 - DNA, 1268 bp, Zea mays
aatgctgaaaagataaaataatggcagaagcaagacttgtttatcatgcttttactttcgtgggagttccttgaaatattataggcatctatattggcgagacagaagaacaggcctagcgaagtgatgggaagcctttccactgagccaaaggttctgggttcgatgcaatgcagggtaaggcttgtcttggttattccttccccaccagcactaggtctgtccttttttatctatattggtgagacacttaccaactctccttatattttcagcacgatcttcagctttaaagccaagatccttgttcagaccatgtcttaagttatcaccgtcaagaacatatgcaagcttccctcttgtgtggagctcccggcctaatgtacatgccaaggtacttttaccttagcaagatgaaaaaattgaaaagaaattagattaaaagaataccatttaaaaaaactaaaagattcaatttgaaggacaaatgatattggagatttatcatttaaatgtaactatcctttgaatgaacagaaaatagatcctgatttattctaaaaaaattgcaatgcaggtcatgaagaactgtgaagagggaatgcagtgacagtaaacagagtaggcatatgccatacaaattgaaaaaaaaaatattagagttcttttggaaactttgcgtatttaccttttttagaccaaagaccattgatcccaacttatagaaaacaaagtttagttctgctggagtcaccagcttacaagatattcatcaaggtgcccaaggcacttccctcaactaaataaaaccaaacttcgagaaaccagcatagtaaccgcccagaagagtgtcagtacatgtcagcaaactatatatttaaggcaaggtatgtaatttatcaaagccaaaacgaataggttgcttattgataaatctagaacagagttgaacttattttctgaaaaaaaatatataattttttttttgccaaattcgtgaagaagatggaattgaatggatgcagagacaaaggaaaactagaaagccgttcagtaacaaaactgtgaaagcatcaattttctgtactctaaaatgaataaaacagtaatccttcattgggccaaaatgactttaatagaattcaataattcaagcaaaacagtgcagtatagaaatctgtccatgtacatataaatgacagatgaaattatccaacaagaggcaaacaaagaagatataatatatatacgaagcagaaagagacacc

SEQ ID NO: 3004 - DNA, 1123 bp, Zea mays
agtgtaccagtcctatccaaataatccaaatgccagccaaacatgagtaacagcaaaaaacgcgccagcctatccctaatcaatgcagaaggagcagcaccagctgggccaaggcgaaggcgagaacgcccacgccgagcggccgccggtgacccgccgaggtggtggcgatctgtatggtgaagttgcaggcggcggtggacgggtccgtctgcgtgggcacggcgaggccctggaagccgcacgcctcctccttctggttctgcacctggaagaaggcgttgaaggcgtaggacgcgttgccgttgctgtccatgccgccgcacgtggagccgtagcccagagcggtgcagtcggcgaacgtgcacgcgtagttgatgttgtcggcgagcttgtccatgttgccggcgttggtgttgacgacgcaccacgtccggggcaggtactccacgccgcgcgccggcaccagcatcgcgttctgcccctgcccgctcaggtccatcgggtacttgggctgcccgtcgtaccggaggatgccccagtgccgctcgaagttgcccggcgccacgctcttcacgtcctcgtccaggagcccgaacaggtacacctcaatgtactggttcggccgcgcgggcgtgccggcgttcgccgccagccgcctcagcaggccgttgtagaaccgctgcgcgtacgcgttggtggcgtgcttgtcgccgtcggtgggccagccgacctcgcccaccacgacgggcatgtcgccgtgccccaccgacttgagcgccgccaccagggtgtcgaagttggcgtcgaacacgttggtgtacgacacgccgctgcccgggtccaccagcggcgccgcgccgccgtcgaagaaggcgaagtccacggggaagtcgtcgttcaggaacaggctgatgaacgggtagatgttcaccgtgaagggcgcgctgttgttgctcaggaactgcaccatctgcgtcatcaggtcggcgatgtcggcgcgccaccgccccgctgacggcaccgggttgtccttcggggacatgtacacgtcggcgttcagcgggacggtggccttcacggtgtcgccgagcccggcctcgttcagcgcgttctggatgtt

SEQ ID NO: 3005 - DNA, 1101 bp, Zea mays
gcctgcgctgactcagctgtcgtttataatctatagtcgacctgcagtcatgtcactcatggatgtatgataatatcagtttttagcaggataattctaatcacccacataaagtacaaacacctagcatttcataggcactacgcgtagcctgacctcctgcctaatgtgtagcgcttttgaaacactattttttgcatatagctgtgcgacagttctttcacctaattacatttacctttctacaaagatgtattattgcatttcttgcacccagaggagtctttctgtaggttcttcaagtaaccaattaacattgttcctttttcaacttagggtaaagatgaaactaaatggagtttctgataagaagccatttgggataacaatacttatactgcatatagatattaaaaatataaaatgatagtggaatcattttgaaaaaaatactttcatattataaatcctttcataaatataacataaataaaatgccatagttgcatttgaataataagtggatgccaggaacaacactcttcccttaccaaagggagcacattatattatgaagcttcacgtctaacaaaataaccaaaagataatagtaatatacctgaagaaatagtgcataatgattacacctacttcacatcttcttttaaaatcttgatttcttaggtgccacgaaagagcctctagcactcctctggtcttgagttcgacttcccgttggagtgaattttaggttgggataaaaaatcctctcgtctgtcccatgccaaagcacaggcttaagggcttaaggcccagccctattgtggtcgttctcacattggctacggtgccactgtgcatgggtggggtaggggttcgggggttttctcgacttgggcgagaataacatcttaatacaaattccagggctgtcttacctcctgtagctcgagttttttttggattttctaggtgccagcttagtggctttattagcaaggtccttagcctgggtttaaaaaaatctccttgtctcttccataccaaaacataggtctaagacctgacccaggttgcttacataggctgcaggcatgcaaa

SEQ ID NO: 3006 - DNA, 967 bp, Zea mays
gcgtgcggcatagaagaacacctggctggactactttagcaggtacctcactatcaccaaacatcacagcccaacccaaattcgatggattacatagaaaatctccagtaatgatgacctgaataaatgagatggcgagaaaagcctcggtaaatgggaacatttggtgttatggtgtaaaaaaaagcaaaaacttcacgatttaccttggtgatctcatatgaaaatgcccattctggagagatctcacgaatattaaacttgtttgtctgtcctaaagaaaatgttgtatcttctctggagtagtgttcaaaatgaccatggtcaaacaactccgttatttcagagccctgagaattgctttgaaatgttaatgctgtttttgtttgccaatctgggttcagagagcttccaaatctactgtcataagctgaaatagtatcagttacacagttcgctctatttctcagcacagagttcaaagatggtgagtcaacggtggcttctggtcctaaaagaaactttttagcagcagcaagttgtatgcgtaaatcactgctgtccaggcgttctggtggatggtattctgaatttttctgatactcgacatccgattgctgtgcaaaaatgcaagtcattgatacagttcagtgagagtataagcatgcaaagacatttatgaaaaaattgaacacaagaggtataatctagatatggagagaacaagacatttaagtacattttgttaaatgtactttaaaagattatcttcaaacaccaaatgttaaaaaaaatacatattgaatgaggaacacttcaaggcgtcccacctaagaatctttgaaaagactatcatagattgttttcacaattccacatgcatcagttttttgtgttctacaaggaagaagaatcccaagttacgatttcctcacctggtatatggatgaaattggtaaacctgaac

SEQ ID NO: 3007 - DNA, 1009 bp, Zea mays
tcggtccctggtgagctctacagtcgacctgcagcatgttctgaaagtgactaccacttgctgacctgaagcacgtacgtcgtcggccaagtgaccaagtccaccggcgggggcagtaagtatagtcgggcgggcagatctgttgctttgctcttgttcgttgactgcatggcaaagtgggagtagaacggaattggttggaatcactcgagcggtttattattatacgtatacgtgaaccattcaccttgccttccgttaatcaatagacaaacaaaaacgcaggctctactaattgcagtgctaagcaaacgctgggttcccgactgtgagggtgtatatgtacctttccaggttaccgtacgtaagaataagatccttgcgcgcggccgccacatgccagccacaccacactcctttaattttcaccattcctgacgcgttttcttcgtcgttcatgctgactggagcgagagactttatttggtactgcggatcattcattccatgacagctagtaccttgctcgtgccacttcgttgtccaatcttgccacgtcggagaatgcgatgcaaaagcaggaaaacatgcggctctgacgtgttgaccgacctgacctgacggctcttttgtttcttgcgttccttccgcatcgtgcatcgacgaacgaacgtgtcgatgccgtccgtctgtggtccatcagagacctgacatcgtagctgatgtggtttgaacgatgagctggcctggcgttgaacgtgatacacggtcgacctgtcgctagctctagccctgtactgtaccggaggcggcgctgcaagaatgggttgacctctttgtcgctgcctcagccctcagacagagccaccatctagccctccacatcctgctctgtgaatctgaagccaggggctcgatcaataatcaaatactagtagctaatgaaattatcgatttgctctagaagcttctaatgaaaggatcgctagcgagtttaactgcaggtcga

SEQ ID NO: 3008 - DNA, 1310 bp, Zea mays
cagtcttgcatgcctgcaggattaaatcactatggagcaaattaggctgtctccaacagtgccggtaaaatgtcctctaccctaaatatatcatacatatgtgtcttgtaaggctaactgcaacggtgcccccttggaacccctccccttgcatgccggctgtaggggacactctacggccgcagcggtgccccctacagcgcccccctacgcgtcggaccccttctctcccccccagatatagtgtgtcactattcatccctctaaacactgtgctgtgggtacacgagtaattgttagtagataaaaaattgatagttgatatagaaaatgatattttatagttgtagtggggtatagggggaatatttaggggaaccgctgcgggagatgaaaaaatagggggaaaaatagggggaaaaagtgatataggaaaaaaaaattagggataacggttgcggatagcctaagcgtccagcaacaaaccctaaatcatccgctataatatagcggctctctctctccctctattattggcggacacacgacgctcgctatgcactgttcaatcacgcacaccaactccttccattctctcttgcgcttgctcgtcgtcgtcgtcgaagtcgttggagctctcgacgatgctgagctcgacggcctcgccgccttccccgtccctgtccccacccatggagcagaagatgtcgaaccatcgccaagctacacgtccgagccatgggtagtacaacgcatgcggcgtggtcgagagggagtagacgagggacggcgggaggtcggcggctggggacgacgttggcaaggtggaccacatgatgcttgtcgccaatggctacaccgagctactagtgttcctcaactacctcagcgtggaaaacgcggacgcctggctggtgctcaaggaaatgtttgagcactatagtctatagacatgaacgatgtaatgcatttttttaaaagaagtcggataaccttttccttatagaaacacgagtagtaatgtaggatacaaaatgtaattattttaattagttcctaattcatttttgctagaaatgatttttattgcgaaatctggcacactgtagatatagaggactgaatttaggtaacattgctggagatgacgaaaatatagatgacagaatctttaagagtgtgttgtaaaggataaagaatattcttatagagggtgaatttttatagagggtgaattttagaggacgttgctgaagacagcattagagaacagtactgcagatgggtgggcgggggagagagaacttgat

SEQ ID NO: 3009 - DNA, 1231 bp, Zea mays
tgatgcttcaaccaagtaatcaacacctttgctcaatcttctgcacaaaaaataagtttggaacacacaactcaatgcatacaaattaaaataaaactcagttctggtctaggagataaatgatccgaacctctgtccctggataattgcattctcaggactaatatcagtatacatgtccccattgactggaggagcaactggagtcccaagaacaacagctccatcaggacttgaaactgtaactgtttgtcctgattgttcatcgttgtaggcatatctacccggttctctttgtacatttgaggatgcagcagctgctgctgctgcatgattagctgcactggttgtttcagcagcagcaagatcttcagcaactaggaggtcatctaacagcacacctgtggagcaattgcattaactttggcatcactatagacaaagataatcaacatatggatctgagacaaaaagagaagtcagaaatgcagtcccgcaaaaccacatctagagaactcttaggagttgcacagtgatgattgatgagcatagccagatttctgattatgtttgtgctaatcactaggtaccttaaattcctaatctcttctccaagacgacaaggattataaagaacacgtacaatcatgtccagtaaagatgtctcaataagtaacattaaaaggaagcacatgtgttcgataactcacagaaaccgaacatggcaatttcttaagcttcatgcacaagaacatcacttcatgattaaaaaaatcaagtcacagagaaaaacaaactatacaaatatatgtgctgatttgaacaattactattactgtcaaggatccatctcagcagaacaatcaatgtaatttgagacatcgtcactcaatccaaaaatgtattgcatacaattaagttcaaagttaacattctgttctcttgaatcttagtatcgaaatccataaataaccaaaaaaaacagtaagtaaatgtctggcactgtcccaacttgcttgggactaaaaggctttgttgttgtaacagtaatcaatagcttcagctgaccaaaaaatgatgaatgaaggtatgtgcatcgaacaaaaagcaagtagcattcggaaagactttgtatgtgcagcttgcacaacaatgggtcaatggccactacactgatgtagaaaaatgtaatgcaagggcagcttcagtttattacccttgatttatttat

SEQ ID NO: 3010 - DNA, 1248 bp, Zea mays
aatatggttcacgatcccctccacgcccactccatgtttcacctgcataattatataaagatgccatcatcactgatttcagtggaagtaaaatgtccttgaacatgtaaaccttgttctcctctcaactagcacaaagtcacgaggaaaaaaaaactaaagatgtgcatagtttgatcttgaacctgtgcaaacacaaagggccctccttcgcgcatgcgaagtgcgtctcgctccattacagacagatcagctccaacagcaggtgctaggtctgtcttgtttattacctgagttcagaaactcagacattttatgccggccaataaaatatgaccagtgtgcaaaagtcaaaataagtttgcagagctacaaatgaagttaagtgcacaaggttatagatgatgctggtgaatacagcacgacgcaccaacagatcggcctgggttatcccagggccaccttttcttggtatcttgtccccaccagagacatcgataatgtagattatgtagtctgctaattctctgctgaagttagctgccaagttatctgcatggaaaaggcacaaatggcactctttaatgctggattgttgaaatttttcagaaccagagggatgcttgacatattcaggacacctgaggtttcagctaacatgatgctccaaaaaaaacagtagaatcagaatgcaaaattttcttttacgcaagaacttgaaaggagcatattctaatgtccagtatcaaacatgagacagccatagaagcaacatgatccatgtagaaactattactctgaaataatgtttagatgggtatgtaggtttgcactttgcacagatatatcaatgacaataggaatgacctagattgagtttagatccagtaaaaacattctgtaggttgatacggatatatgcattgctaggaaagtaatccttgattggtgctagtttacttattctgttttaggaaatagcaagtatggtagtggatcagtcttatattgacggatccaatcagcaagatcaggactgatagcagtctggattattcccttgtaatagctagtttgtttccttatgatagtctataaatatatggccttagaggctaagaaaaggcagtcaataggacgccaccaaatctgctgtgtttctctctaaagtgttcgcgtgcgtgtgagtaccagtgaggtttctcatacctggagaaacttacctgggaggtaggagctcgccggcaa

SEQ ID NO: 3011 - DNA, 1333 bp, Zea mays
aagataagcaagatctggtgtgcttgggtaggacaaggctcccatggttttgagagttgtaacacttatgagcaatctggatttgccatagtcaacttctcttatacctatgatttaggtaggaagtggtcttctgaggaacaagacctttctgtctctgctggatctttctttgtaattgatgatgctggacaccgtggaaagcgaatgagaaaatcattctctgatcaagaagcatcttcagaagagtcaaacggtcagaacagctctttacagggcagtaggcaagctattgtgacttgttccccggtaggtacctcaaatgatcttcaagttggtctcttatcaagcaaggcagcaaggagagagttgaggaagcagaagcgaatagcagctgagaaagtgtgtgatctttgcggcagaccaatgctctctggaaaggatgttgccaccttgctgaactgcaatacaggaaaactagcttgcagcagtagaaattcaagtggggtgagcatctttgagcattctttgctactgtattcctgtttcataataattgctcttatagattagagagcatgggcctgtttacctttttgtacattttttacctgaaaacatacaagttatgtttccaccaaattccaaatgttctgtaatgacttctctacacttgatttatgcaggcttaccatctatttcatacttcctgccttttacattggactattctgtgccaacacgagatgctgaacgatgaaatagctaggaaggggaagagcaaccgaggaaggaaggcaaagaatgcacctaagagaagcaaaataacgtccatagtttgcccagaatgtcagggtactggaattcacgtcaacggagatgaacttgagaagccaagcatttctttatcagaggtctggagcacatattcactcttctgctgtcagtccctgatttttcattcaggcaacttcttgcaaattacttctatagcagccgtgcacctgaattggttggatattggcacttgcagatgtttcgcttcaagatgaaagcaattgaagctcacaaagcatggctgaagagacctgaagtgcttgaaaactgttccactgggcttcatttcccctcagaacatgtggagaactctgaggtggaatcagaggcacactgttcgcaatgttctgttaacacaggtataaatccactcacaccagtctccatttccctttgcaggagaaggtgatgccactcaaatcacttcaattctatgccgctgatgggtagagagatcgttgatggcagctactggaggatgctgcaggcatgcaag

SEQ ID NO: 3012 - DNA, 1254 bp, Zea mays
agcaggccagcagcctgtgcatttattttcataagtatttacgtcgagtagcatttcgtatggcccgtggccatgctcagtcaaactttgttcgacaaatggaggcaacaacacggtagcaactctacattagcatgttaaagcggtccattttctttctcttccccagataaatcgcaaaaaacacaacagattcgactttgctccgcctacatttttaaggaaaaaaaaacaacttacactgtcacatactacagtagatggcgatgatcttgcatacggttcacatcatcaattgatgtccggtatagtatgattctatatgcgagaataaattagttttactctacataagagacacatgcagccgaaagaaactgcatattaatgaccgaacatcggtgctgccttcctttttttttctttcagcatcgcctcatacagtgtgcgaatcgatgcctggtccggcgacaagaaggctccgttctggtgggtggtctcctagagcaaatactcgagactagagattaacaaaacaaacttcctatctggaacgaagtatatccatcaaaagggtttgaatcgtggggaccccagagtaaacaactgctggaagaagcctgttatttgtactgctgagagaacagcaggtatccaccgatcctgctgttttctaaatcttcgcgtgaaatgtggacgtaccacggcagttcatcgcacaggcttctttgggctgggactgggagttgccggcagcagagctgtgaatttgaagttccccgagaacatagaatctttgcctgtagtagtgtagttagaacgtacagggcaagaagtatctactgagtttaacttattcaaaaagaaaacgacaaatgctttaagagccgcagaaatctaaccagtcaatgataggcaagttgcctcccttcgtgtgtatcttgccaatgcctgaaaaataacagaacaagtagctttaggctgtgaaagctgaaaaataacagaacatacagcaggggcagttgtctccgtcaggaaaacgagcttgcctggacagcaggggcagcagccacatccatagcctctgaaccttcctcagcataaatatttctagcattcaatacatgtacccatcacacacaatgccagaaacttctatcgtgaaagaaagacagcaatacatctatcacgttctccatccgtttcaaatcagtgtactttagctttggcccaagtcaaaatatagtgcacaga

SEQ ID NO: 3013 - DNA, 1306 bp, Zea mays
ttaaaatgtgtagctaagtattagctgtggtaaatctagaagcgtcaaatgattaaagatgacaaaaaaaactccatgaactaaggcgtaatgcataaataagtagagatccaagtaaaaggtatatctgcaaagaccatgattatgcaatcagtaactcataatgattgggggaaacttgccaaaatcacaaatttttgccggcttccaagctgtattcctgggcaacacctctgacggatattaacaggatgaatgccaggtttcgcttttgttctgtctagtaaagcttcatggtgactctgactccttccatcttcttcgtcttcatcatttgtctgatgacacaggtcaaccctgtaacatcataattttgagaaatataaagctaattagctaaataaaaaaggcattcacaactcaagagaacccccaaaaaatgacaggtatgtaccaccaatccatcacagcaaagtttgaccattgagagaaaacaaggaaaacctaaaagggtctgaggctctgagcaatattacaagcatagagcctctgttttaaaggtgtcacctaggtgtccaagcgaatgtggcacaccttggatatctaattaagcctcgcctaagtgtcacctagatgataaggcgtacccagctcaccttgttgctttcaaaacctagcagcgtgatatctggaggcactaaaatataatagttacagttatattggcatgtgccaatgcacgacagagttatccaattatcagttatccactgatgctagtaaggatctagttcgagtttctttggggggagtctggctacatgccagccatatgaaagaactacatctacaagagagtgctcagtgtattaacacttcaaccacagtcgcaggaaatgcggtatgcagtgtggctccctgtcccggttccagatcagggttaggtacgaagccgatcgcaagctgggtcgatgcttgggacatcgtcccgaaggccgttggatcattgagaagcataagagcttcatcgttgccatcgtcaaactgccgcatctagctttgtggatgtgggagatatcctgtgatcttccaccgtcaaatgcatcctcggaggctcagatggtgcctgtaagtgttggagacactgtgcggcgctgggctggctggccaggcaccagtggcgtgcgtgacgctagagctgagcgctggaggctggcagtggcgcgtgcgactgtgcctctgatgtatgtccataggatgagagttggactgttggagacctagtgcattggtcaaatggaccagg

SEQ ID NO: 3014 - DNA, 702 bp, Zea mays
ttcagaaatggccgccaatactgccgccaactcccctgctctcctcctcttcctcctcctgctgctcattggcggggcgccaccagcgacgaaggctgacatgccgatgccggtgaacgaggaggtgctggggctggtagtgttcaagtcggctctgtcagacccgacaggtgcgctggcgacgtggacggagtcggacgcgacgacgccctgcgggtgggcgcgcgtggagtgcgacccggccacctcccgcgtgctccgcctcgcgctcgacgggctggcgctgtccggccgcatgccacggggcctcgaccgcctggccgcgctccaggacctctccctcgcccgcaacaacatctccggcccgctcccgccgggcctctcccttctcggctccctccgctccctcgacctctcctacaacgccttctccggcccgctccccgacgacatcgcgcgcctcgactccctccgctacctcgacctcacgggcaacgccttctccggcccgctcccgctcgccttcccgcgcgacgctccgcttcctcgtgctgtccggcaaccagttctccggccccgtgccggaagggctggcgtctgggagcccgcttctgctccaccttaacgtgtcccggaaccagctgtacggctcgccggacttcgcgggcgcgctctggccgctccagcgcctgcgcacgctcg

SEQ ID NO: 3015 - DNA, 1127 bp, Zea mays
agctcggtactggggagcctatccagtcgacctgcagccaccaagcaaacccagtggctctgccttctgcattcccccccgccgccactccgtcgggcttgatgagcctctgctccaagctcttcgcgttgctccgcaagtcccgcgccctcgccaccagcaccgccgccgcagccgccgcgacaacctccgcgacggcgtcggccaacgggatggaggaggctgtcgccgcggcgggcccgctgcgcacgcgcgtctgcatcatcggcagcggcccagccgcgcacacggcggccgtctacgccgcgcgcgccgagctcaagcccgtcctcttcgagggctggctcgccaacgacatcgccgcgggtggacagcttaccaccaccaccgacgtcgagaacttcccgggcttccccgacggcatcctcggcgccgacctcatggatcgctgccgcgcgcagtcgctcaagttcgggaccaagatcctcaccgagaccgtcaccaccgtggacttctccgcccgccccttccgtgtcgcctccgacgacaccgttgtgcacgccgactccgtcgtcgtcgccacgggcgccgtcgcgcgcaggctgcacttcgccggctccgacgccttctggaaccggggcatctccgcctgcgccgtctgcgacggggctgcgcctatcttccggaacaaacccatcgccgtcgtcggaggcggggactccgccatggaggaggctaacttcctcaccaagtacggctcgcaagtttacatcatccaccgccgcagcgacttccgggcgtccaagatcatgcaggcgcgcacgctctccaaccccaagatcaaggtcgtctggaactccgaggtcgtcgaggcctacggcggtgcggaaggcggcccgctagccggcgtcaaggtcaaggacgtcgtcaccggtgaggtctctgatctccaggtggccgggctcttctttgccatcggtcacgagccggcgacaaaatttcttggagggcagctcgagctcgactctgatgggtatgtggtgaccaagcccggttccacgcacaccagtgtgaagggggtctttgcagctggggatgtccaggacaagaagtaccgccaggccatt

SEQ ID NO: 3016 - DNA, 684 bp, Zea mays
aagccatggaggagaaagcaaacgcaacggctatcttcttcttcccaacttttctcatcttctaagcttagagtgcagtgtatgaggcaaatcaggaaagccaggatccctctatctccctgctctttacttttaccccgtgatgtgagcaccttggcgagctgctgcacaccgaggttgttgcctgtggacaccatccccgcacggccgcacggcttcatgtatacaggaagtggaggggttttcggggtgtatggtgtagtatggtttggggagcggaaacccgactttgtcctggtgggtggtaagcacatgcacagaccattaacatcaaactgggaggcgcttgtatactcggtcggtcatctcctctgcctcgcatggacgccatggtaaaaagactaagtgaacggaagcgtacacccaacccaatcttcatgtgctaggcaatgtgatccatatatggaactaacttgaacaattcatagtgtacgcctagatacccccccccccacccccgcccgcatgaacgaagcacagacatattgaaccaagtcacaattgagtgagtctgcgaagccgcaaacaggacgtacgctatgctcgcgcatcgcatgcggctctgcgagactgacgattactcactagggctggtgagcctaaacaaccatggctgcgctgcag

SEQ ID NO: 3017 - DNA, 1191 bp, Zea mays
tgcatgcctgcagaggaagtggagggggctgcgaacggagaccggttaattgctctcaggattaattgctctcagggttcaggaatacaggtacatcccattctcttgtagcaccactgttacggattgaatagctggaccacaataaagagtaaagagctcacaagtcgggtaataagaaacatgaaagcttacgccaaaaaaatagggtcacttggataaattagaacagacgattgtatatatcactgctccatcccactgagtttcgtgattcagattagccaaattagctgtttggtttactcactcttccattccatcaggcaaaaaaaaaaagaatgtggcggcgaaatgaatgctgctgacttgtccctagaacagagtatcattgctcatcaatgtaataataataataataggcttatgagctctagtcctcgatacagtcttttgcgggaaaccaaacacaaaagcccaacccaacaacagacggccaacgcacgacgaaagaagcaaaacaggtactcctacagcttatgcgacacaagattcggtgggagttaagggcctgtttgtttaccctaatggattatataatctggattatttttggaggattatacaatctggattatataatttgaattatataatctgagtagtcctgtttgtttactcagattatctggcgtgtttctgttgggcggcgggcttctccgatccgataggcgcaaaaacgattcggtagattataatggcaatggtgggtaatttctaggaaacttgaaagggtagtggggaagtgggaaaaaaataatctgaaataagcacctcctcacttgcttatggattatcataatccaaggggttagattatataatctgggcaaataagctagactgtttgtttgtcttttaggattatttaatccagattatataatctatggggtaaacaaacaggccctaagttaatcgtttgatactcctatgcgttggaattcctatcgagcaccgtccgaatagcttgaaaaatcgaatgattcgcctaccgaaacctagcgcgacgctataggcagaggcaggcacgcgcggtgcgaacgagggagtccgggccaagaggcgtgtgcacagaggaacggatcatgggatgatcgggtgcctgggaagaggtgcttactctgctct

SEQ ID NO: 3018 - DNA, 1026 bp, Zea mays
gggccggcgtgttcgtgcgcggggacgaggagacggcggcgttctacgcgcacctgggcgagctgtgcccgccgcccgagttcgtcaacaactgctacgccgacctgttccgcgacgtcctggagtactgtgggcgcagctggaacaggcaccgcgccgtgctggtgcacgactacttcagcaacccgtggaccagcatgtccgccgccgccgccgtcttcctgcttgtcctcaccgtcgtgcagacggtctacaccgtgctgccatactacagccagaattaaccgggcaaaaaacaaaaaaggcgttttgccgccgtcacacacaccgggtgtcgccctctgttttttcttttttttgcctgcaactacaagaaaccctatgatttttccttgctggctcctcctatacaatccatatgaatgatggcgtctggagcgtgatcgtttgcttgtccatcgaatccgtgcgcgtccacgatcgcatgaatccgtccaagattaagtaatggaacaacataaaaagacaatattagtaggatgttgaatcattttagaatgaaaacaagcatcatccctggttttccatattgcccaaagaacaacaccaaatcctaaaataaccagatttatggaatctttatcaaagctatgtaaccaatctccaaacaacaaatctacatcatttggaattgagtttaaagcaatttgcatcactctctaaatatatttagccaacgggcactcaaaaaaatgagatgagcagttgattccaaaagaccacaaaagcagcagctaacagaccctgacattgctttttcttaagattttctttagtgaggattttgtttttcagaattagccataagaacactattattttttttgtggaatcttaattttctacataagtttgtatggcactttaaccgaattacttcttaactgtgaaaacacggacttgactgtgaaacccttttcacccagaagccagatagttctttcatccttttcagagagcccctaa

SEQ ID NO: 3019 - DNA, 1205 bp, Zea mays
ttggccagcggcgcgttgcagaccacggtggcgatgatgacggccagcgccgcgaccgtggcgaggccgaccgcgtcgtacaggatcgctagagcgatgcagagctggacgctcgtcgtccacgtctggtggaaccagtacgggaactcgccgatccggtaggcgtcgacggtgacgtagttcatgatctcgccggaagagtgcttcagcttcgccgagttggacagcctctgatgcttcttgtagacggcggccgacaggaacgaccgcacctggagccctagcctccgcgtgcggaagtaccactgcctctgcgacagagattcgcagcatttgcagaggaacatcgctacggccaacacgtagccttcgtacttgaaggaccctttcccgagcgagacgttgatgaatgctttcagaagcaccgggcccgaagacagcgtgagaaccttgagcagtgcaaagagacccgagaccaagatcccagttttctggcaagaaaccatggtccaaaacatcgacgggttgccgtgtgcccgcagctgcttcttcctgttgagcttctccaggaacaccaggtactggctgtacgctcggtccgagggacccaagagcggcatgtctttctcctcgagcggcttctcgtagcccgtcttcatcatcgggttcatccaccagaacgacatcacgctgaaaaccccggctttagcgaacggggtcacatggctctcagacccacccctctcatcatcaacagtgtcgtcagtcttcaagggcttatacaaagaagcagcagttccagttccgccatcaccgtcctcttccttgacgcaccaagcgccacagacaagcagcagtgcacctggcaggaacagagcgtccagaaaacccttcatggtcagtgccctatccgcaaccatgtgaacgaccgaggaacaagcgacgaacgcggcgtacgcggccagcagagccgaccacgcgcgcgcagacattggcccgaggagacgtgctcctccgacgccgctgagagcgaagccggcgaggaccaagcagagtccctgggacagtgccgtcacccaccagtgtgggaggtaagcggaagcgtgctgagtgaagttgctccccagcatccacgacgcgaggccgaggtagacgaggcccaagcaggcggtgaacgccgcgccggccagctgcaggcatgcaag

SEQ ID NO: 3020 - DNA, 1113 bp, Zea mays
agaggctggtgcggtgcagcgtcatgctgatggcgatgcatcccttgttgccgagccagcccatgatgcccctgccgacgcagtcgacgcggaggtggccgacgtgctccaccagctccctcttcacccacaccgacaggaacagccccaccatctgcttgctcccgatcaggcagtagcttatgctgccgccgccgccgcagccaggctcgcactgcgccgtcggcgtgccagcgccaccgccgtggcttgctgcttccgtgtcgttgttgcacccgctggtggatgtctcgccgtcgccggcggccgcttcggcctctgcatcggcgcggtacacggacgcgcgtatctccgccgcccggcggcgcatggacgacggctcggtggagcagttgcaggtcttgacgagcgcgctgtcgacgcggtagctgttgctgagcaccttgagcgacggcgtctggaagaagagcgaggagtcgcggcggcggtggtggcgccgggagtctgcgggcggctccggcggcggcgggtcgtcgtcgtcgtcgggctgctcctgggtctcgttcagcgcctggtggatgagccccagccaccttgacgccggctcgttgtcctccacgaccagcacgttcccggcggtaaggggaactatctcctgaaacctatactcgtggcgtcagattacttcagaagtcagaaccatgcagaaaagtacgtacgtgccaaatacacagacatccaaacacaaatttattacgaaatgcgaatgtggccgtaccccaagacgtaaatgtcaggcgattcttcaacctggagaaaatcttgcaggttgagcctgttgctcggagtctttcctccaacattccatgtggcaacaaacatcctgcatccacgtattagtcggagaggtcatggccatgtcatcttctgtacgtaggagctagcattacatgattttaacagcgtcatataaggttcagatcaattgaacatggatcgtgattaattactggtactggcgtgtgtcatccttttgcctattgctgggcaaatccacatggtgcaggctcgcgctcttcaaccgcgcccgtgctgcattgcagctctgcgcat

SEQ ID NO: 3021 - DNA, 1147 bp, Zea mays
aacgcaaatacactttttgcatgttctgtttacactgttaaataaacttgatctcaccagtttatttttgttttgttatgtctaattttaaatttccaataggattctgatgaagagggtatggattctatggatgatgatgatgactccaatgatgggaatttaccaaatgctaaggtccttacaagaaagacgataagtgaatggtgccagttagtatcaaaggaacctaaagcacctgccttgcgtaatctactaaatgctttttgagatgcttgtcgatatggtgttcactctgatgggcacttgatgcagagatttcaaagtgccagggtgttttatcaaataataatgtttgttctttctgagtcggacaacatttttcgtgctcttttggaaattcaagatgacattaacaaaggaaatattatgaacctgagaaattcaaagaaatggctaactgttgatcctctcataaagtcctacttatcaagttctcttgatcttcttagtcaacttacagacaacaagatacttgcctttgttttgactcggttgagggtatcagtggtcgttttctctgcatatccatcaacatcaagtaggcttgtcaaggtactgctatcttgtgatgatgttacttgcttagagtgtaattcagttttgcatgtttatttattatgaatttagttcatgtctaaatctagttgacccaactgtattgctattatgaaatgaattcatgtattaacgaaggcaatatgtttattttagatatactcttaacttagggatcttcgagttaggacgtggagacacatggttctgtttctggcaaaactctattacatgaaattgtgattgtaacaggcttgaatgcatcatcttagtcatcagttcctggtatatatttggaatgaatgctaatttttatgtttggtcctgttgttggctaggtagaccattattattatacaaaaattgtgaatgtaataacctaataggcttcctcgagttctagtcatctgtctggtatataatcttataaacatttagaagggatattcttacaaaagcttcatgtggttattatttatatatgtattaatttgacagttctttaaacaattatactgcaggcatgcaa

SEQ ID NO: 3022 - DNA, 741 bp, Zea mays
agtttttaggcactgtatgtattatttaactgttttcttgtcttgtgtttaactgaaaccctttgaacattttttgtccatgcaacaaataggatcatatgcagactcgtcaacatgatagtgctgtctctatgaatctatgaacacctattgacacaggaacacctttacctcttgcagcatgttaacatttctacaaggagatatccaagcaattttggtgttcagaatggagctcttttgaagttccagaatcctgaacatgccctaaatcatgggagaattgctaccatgccagctccaccttggcaacagcctactggtctgccattgcaaatgcaagcacctcaacattcttcagcacttgatagattaccacagcccgctgacggtgaaatgccagtcaagaggttggacattcgtggcacatacaatggtttgaatgtagatagatccttggcggagaagcataggtcatcacctgctcgtgctccgacagaatggcttccccttcaccatacaccatcacaaactttaccactaattatacctgagacaaaacatgttagaagtgcatcggatagtttagaaattagttcttttgttagccaaggagctagttcatcagtatttgttcccgcatcatcagtatgatgccttggacccggaaaacaggtacccgtaacttagctcaaccaccatatcagcaccaagatttgttgctaccaagccaacaaaatc

SEQ ID NO: 3023 - DNA, 1329 bp, Zea mays
accttcctcctccgcctctccccggccttcgtcgccgccgcgctccgctccccgcagctcaccccgcacccgctcccgtcgctccacttcttccgctccctgcccaacgccaccgacctccgcgcccacccgcagcacctcctcagctgctacgtctccctcctccactccttcacgcgctccagggagaccgacgcggccggccaggcgcggcagctcgtcgcggagctgcgcgcgcacggggacgccgtcctcagccacctcacgccggcgtcgtcggcctcgttgatccgcagcctcgcggcgttcggcctctccgaggagctgctatgggcgtggcaggccatgcgcctcgccggcgtcgagccgtccaggctcacctacaactgcctgctggacggccttgtcaacgctgacctcctcgacactgccatcaacgtgttcgacgcaatgtccacggaacatcgagtgcgtcccgacgtggtttcctacaacattctcatcaaggggtactgccgcgcggggaggacacaggatgcaatggcgcggcttgcggatctgagggaacacgcagagctcgtgccagacaaggtgacatacctcactctcatgcagcgccactacagcgagggcacgttcccacaatgcatagcactgttccaagagatggaagagaggggaatggggaaggaaatacctcaacatgcctatgtcctggtgatcggcgcgctcagcaaggacgggaaaccatttgaggcactggctgtgtttgagaggatgtcgaagcgaggctgtccagccaatgcagccatgtacaccgcgctcattgactccatgggtaaatgcgggagggagaaagaggcaatggcactctttgagaggatgaaggccactggaattgagcttgatgcggtcacgtatggtgtggttgttaattgcttgtgccggtttggcaatttggaggaggcacttgcgtgcttcaggagctgtgtagagaagggcgtcgcagtgaatgccattttctatacaagcctaatcgacggttttggaaaaactgggatggttgaccaagcgaaggagctcttcgaggagatgattgctaaaggatttgtgcctgactcgtattgctacaatgttctgatcgacgcattagtgaaagcaggacggacagacgatgcatgtgctttctacaagagaatggaagacgatggctgtgatcaaacagtgtacacatataccattctcatcgatggtttgttcaaggaacacaagaatgaggaggcactgaagttctgggacagcatgattgacaagggaatcaccccaaca

SEQ ID NO: 3024 - DNA, 1090 bp, Zea mays
tcagtagggtttgaaaagctcacaaatccataacctttagtcttgccagtcctcttatctctaacaacctgaaataaagagtgcaaaggcaaattaagaatgtataaaatcaagaaatgcatgccaaatgctgcacacaatgactgacataagcctcgctacttagagatcagcatatggatttctttgtgagtcaatatcttaactcctctcgcaatcaggtagtttatgcttctttaggcgaaaagatttataagcatcgaaggaagcagagaacaagtccaacaaagtgtagaatgttactacaaatttcttcagggatgcataagcttatacgaaccctgttacttttgttttggtttttgctatcttcatatgataaatcattaacaaactgccgttaatgcaattctcagaactagctagcatgaagtagcacattattatgaaaggatccacaagaaatatcttctaactgctggttatctccaattcgtacaaaattttatacagaaaacagtatcactaattcaccatgtgcatcgctgatgttctgtaaactgctaaaatttgcagaaatcagtgttattttgatttggatttctcatttctacaaaatggaaggatccaaacagcccctaaaagaatttgacaataggtattgcataacaataattggattgttgaacaagttttgctacaaataagccttttggataaaaagggatatttacccttgccatgttgaaggatggaaaccgtgagaatgctttggatagaacatcatcattaacttcgttgcctagatctccacagaacagccggtagtcgtctgcaaattgttaggagttgagacacaagcaaaccaaataagggtgatccattaaacacaaaggaaactgaattaataagttatgttagctactttcaggccagtcagtgagggtaggatcctcccaggattgtccggcagcgcggcgggggatgggcttcttgctggtagagggatcggagggcctggcgttcgcggcggcggcggggtcgaggacgtcgctggtggcgagagcagcctatacgctctgcaggcatc

SEQ ID NO: 3025 - DNA, 1056 bp, Zea mays
tctttaaatgatgttggaagtgtagatgtcttctcttggataagctgtttggatcttcgcactctcgctgtgctgacaaattccaccctgtccagctcaaggttctgtatcttgtgtatttcagtaattattaggaatgtgatcttgtacaatcagatttgattatacaaaatcttatcagtcagtgtacaaatatctgataggtcataatgtgcaggccagtagggcccatgtgatggagcagccctgggccatgcacagcagcatagttttttttttttttttgcaaattactagcaatgccatggtctgttcatgcgcttctgctggttgccctaggattagatatgatatcgtaaataatattagattgagttggttcttgattctagagattggtctcttaagagtcaaatcaccccatcaacataaggataggattatctcgcttttggttagaaaagaactaggtcaatagttcctaattcctatctccttcctatgcccttatggattggcttccgggcttcggcatggtcgtgctgcttgagttcatgggcatagtgctcatgacagagatcattttttttttcctgcatgactatttcaactttccatgtcatgttggatagtttttcatctatgttgtgctagtaatgatataaaactaaaattcgatgaataaattatgtcaccagcataacttttctctctctttgtttggcagtgatccacataatatatctttccattacttaatacccgaaggaggcaacgataaattgtcctacctcaagctaaaagtcttgctacctgattcagatctcactgttactaggtgagcacacaaattagcatgacccttcttgtatcttgtcactgtggacattctcatatttgtgccccttgcagtcagaagcaaatcaaggacaagctaaacgttgccactccagaaggaaattttctttggttattccacactgaattgtcaccctttcttatcgcaaaatctcagttgtcgaaaaagagatttgtttatatcgctgcaggcatgca

SEQ ID NO: 3026 - DNA, 1009 bp, Zea mays
agagcttaaaaggcgatcagctaagccattggggggatttataggatgttgtccaaactccatagaacacactcggcgtaatcctggaagataatcatgctgaggggggctaacaggaggggtcataaatttcatcaagatgcttcctgaaaaatacaggaaaactcgattaaaaaatccttgtctttccctaaacacccaatgaagctaagtgttccagcatccaagcacatcgtaagtaaagcggttataacttaccagacttcatatcacgccaggaagaagatcgtgccattccaaaatttgacgcagatgtctctcctcgatgtgaaccgccactgttaaacctagtatttttcataaccacttgttcaacaccaataagggacagtgctctccgaccaatagttgcaattgttgggtcaggatctttagaaacagaatacatagttgatataaattgagaataaatgacattatcaacaggcctcgatctagtgtagctgaaaccaccattacttgcattccccctcagtaatatgcctgaatctgagtgttgggaagaatcatctgactcaggagagccatgcatgatactacttgttgcaattgggttgcttgtagaaattcttccatcacgaccagcggcaccgctatcactggcaaccctcaacacaggaccaatcctgccttgtagaatattgttgggactgtaaacattgcttggattacttatatttgccaacgatggtagtgatttcagcaatgaattgggttgaggtttccaatactcggaagcaacagatttgagatgtttgttgtgacccaacgcaaagcgagtaagcgctggaaaaacatcagttcaacccaaaaccaatgccataaggttaaaagaaatctcctatattcaagacactaaaacaagtgttcaattaaaaaattctagttttccaatgcatgtacctatagcaacctcagatctaacaaggggactgccatctgaagagat

SEQ ID NO: 3027 - DNA, 1326 bp, Zea mays
atcttgcatgcctgcagtttgaatgtagtaaaaatagtagatttttatctgtccatatttttaatagtatggtcttgtactcattatattattatgtatatttacctctgtacaaacattgacacatgtgcaggtgtataataattacttttttaaaaaatttgtattacctccgtctttgaatatttgttgctcgtagtatgtgttaaaaactgcaataggtaaaccatgcatgtgtgtcatggaaagtgtcactagagttctaaaaaaagtaccttataagggcatgtataatgcttagacactggaacagttctccaaacataacaaacaactaagaggctttattggacaacaaaatgtctctaaatcataaatgtattaactctaaatacagatcaactacgctgaagtgtctattatgcttgaaaattgtgtaagagacaggttcttcgcgaacaaacggtcttctaattttttttcgcttacctcccttgagactgctcaagatacatatatttaatggtgctgtaaatgccctaacaatcttcgttattgtagcacttggagaaatgttccatttgatatatataggtaaatgtgatacaacacaataacacttattggggatgtaaataagaacacatatatgtagcatgggcaatagaagtatgtgtcactgtgaagcctggctatatagtagtagcacatttattaattattaattaaggtccagtaacacagcctttggtgttactaatttaaaaccctgtatcgcattgcactagtatcatcatcatcctcacgcagcctgtgggactaggagcagcttctccttcctcgagaccgtgatcccaaacacctcggtcatgtccacgtcctccgccttcatccccgccggcagctgccagtcgaaccggtacatgaggttggacagcatcgcctcgatggtcgcggacgccgagtggaccccggggcacatcctccggccggacccgaacgccaggaactggaactcgttgggcttgaggtcgacgccgccggccacgtccccgctgaggaacctctccgggacgaactcgttctcgcgctcccagtagccgctgtggcggccgagcgcccaggcgttgacgacgacgcgggtgttggccgggatggtgtagccggcgacctcgcaggcgtccagggagtagtgcgggaggaggagcgggaccggcgggtgcaggcggagcgtctccttgatgacggccttgaggtaggtcatgccggggaggttgtcctcggtgaccatctcctgccccgccggcacgttccgccgcacttctt

SEQ ID NO: 3028 - DNA, 639 bp, Zea mays
gatggtttcgtgtatcaaatcttattcaacggttttgtcctatttgagcaatatccaacagtagggtagcacaactgacgaacagagcttattatatgttacagtaatttataaggtaacatttttttaaaaaaagctaacagatgttcaagagcaatataaatacctgtgggattccttctgagtggttccatttttccacaaggctaattatcctgtggttgattgagaccagaaaaagaaattgcctcagatttcagcattaacataaaacccaagccaacacactgataaaagcgtataccggtgtgacatgtcattcatatagaagatgggagggctcgtgtctaagcatacagcatgaaactggttgctatctgcacaagttaatttggcaaaggattcaaagtcacggttcttgatagcttcttccattttcaacacccgacctggcaccactgtctgaaacacatggacaaccagtgcagcacacgttaatcataggaaaagaaataatagtcaaagcaacaaatcaaattgccaaaacacttacaatattaaaattccaaaattgaaagtaaatcatgatctttttagcactttagtctccaaatagttaaagctgaagacaattcaagt

SEQ ID NO: 3029 - DNA, 1219 bp, Zea mays
taaacagcaaagtaacagaaatcaggaacataccattacaaacaccatcacatgtctcctgcatttcgtcataggttcctcggtgcgattcaacttcgagaaaccaacgtagatccgtccggtccgatgccactgcacaattcaggtttaagccttgagaagtgaggacagtttacccgtgcgaaggcgtgcgattcaaggccgctggtgaggaggtcagcgacgtccttcttgaggaacttgaccatcgcttgcttcttccgccgcagcagatccagccgggtccgggtgcacttgatcgcgtgcttgctacaccaaacagcaactaaatcagcggttggggtagtagaaatcaaacaaatacaggtgacaggtcaaatcgagaatgcaggaatctggaaaaacagcgggaaagcggaacacagatcaagaacaggagcaggaacgctcgcaagtccggggaacagttccttggattcgcagaaggagatgagaagtggagctaaaggattcggatcgagggacgagcggaatgcggctaatcaaacattcgccctccttttctcccgggcaaacagaaaagctgaacagatcgccggcgaaggaagctcaaaacaatcgatttcgagctcgggtgtccagaaagaaaaaagaaaaaaaaacaggcggcgagtttcgagaacagccgggcctgaagatcccagccacgcgacaaaccgagccggcagggaggattcctgtaccatttgttgtagaacttggagttgagcagactgtcgaacatcttgcccggctccctcggtggtcggcggtcccctctcctgcgcttctctctgctcccttctcttcggctcttctcctacagctccgccctcggcttttagccagtggcagaggaggtggtgggaggcacgcagagcggcagaggcagaggcggggcggccaaagctgctgcgagctgtggcgtcaaagcatcagaaagaggggagaaaaagggaggagagagagagagagaggtggtggactggtggtggtggtggcctggtggagtgggggaagatggctgggtggaggtagtggagaaggaaggaaaatatgagctgttgatgaggagaagccaggtggccatgaccagcaggtatcattctgctgcatgcactagaaacggtgggtgaagaagccaacagcggttactgtttccggaaatttaagttggtcg

SEQ ID NO: 3030 - DNA, 736 bp, Zea mays
aaataacaaatacacagtgttaaaacacacagtaatacactagtacaagcagagaattatctacaatgctgaacagataaaattgagaaagaaagagtctgcttacagctaggggtggtcaacttaagagtcctgaagcaaatgtcgtagagggcctcgttgtcaagaaccatacactcatcagcgttctcaaccaactggtggacagaaagagtggcgttgtatggctcaaccacagtatcagatactttcggtgaggggaaaactgagaatgtcagcatcatgcggtcagggtactcctccctgatctttgagatcaacagcgtacccataccagatccagtaccgccaccaagggagtggcatacttggaatcctgaagaaacaaatagactgagttagtgctaaatgcatgataattaagcttagtatcttgggtgattggaaaagaatggcaaccaaaatacatgaaacacataggtgatttagtaatcacagtcagaacagctttttgtgtatggcaattgttcaagcaacaagtgcaagggaaatactaaactttggtataaattgaatagaaaaaatgtttctggtggtgtgtcaaaaaatgacaacagcatacaagatagatactcaaatgtaaaattactaagcaatcagcaataaccaataagtaccaatggcatcgacgtataatgcagaaatataagacatgaactaaaacgagtgaaatggc

SEQ ID NO: 3031 - DNA, 747 bp, Zea mays
tcatcaaggagggcctgctggagagcgtggcggggaacccggggctgtgcgtggcgttccggctgaacctgacggacccggcgctgccgctgtgcccgcggccgagcctgcggcgcgggctggccaggagacgtgtgggtggtgggcgtgtgcgcgctggcgtgcgccgtggcgacgctggcgctggcgcggcggtgggtgctgcgggcgcggcggtacgcggggcaggacaaggggctggcgtcgtcgtctccggcgtcgagcgagtcgtacgacgtgacgagcttccataagctgagcttcgaccagcacgagatcctggaggcgctgatcgacaagaacatcgtggggcacggcggctccgggaccgtgtacaagatcgagctcagcggcggcgagctggtggcggtgaagaagctgtgggtgtcgtcgaagcggcggctgcgtgggccgagcagcaagcaggtggactgggcggcggtgaccagcaccaccaccaacagcggagacagcgacggcggatggctgggcgaccgcgagctccgcacggaggtggagacgctgggcagcatccggcacaagaacatcgtgaagctctactgctgctactcgggcgccgactgcaacctgctggtgtacgagtacatgcccgaacggcatcctatgggaggcgctgcacggctgctacctgctgctggactggccgacgcgccaccgcgtggggcttcgcgtggcgcaggggctcgc

SEQ ID NO: 3032 - DNA, 1106 bp, Zea mays
gcggctccacggccaggcacaacaagcccggtgtctccgaccaccgagcaagggtcgctcccgttctcccgcgtcccagcgcaccagcccccgggagtcggcacgtccgcgccgcggcccaggatctcctcgtctatcctgtccagcaccgggtcgtcctcgtggaacttgcgggcgaacggcgcgtcgctggcgaccatgcggtccaggtcctccgccgtcaagtagtgcgggtgctgcttcggagggttgtcccacgagatgtagtgcaggtcgtggttcaccgtcgtgttcttgaactcctccgcgttgcacacaacggtgtggaagtatccttccggcgacgagatgaagtttgagtagtacatgagcactgtgcgaggtaggttgtcccagccccatatgcagtattccacaaagggcctggacagtgccatccaggcagaacctgcgatgtcataggctcatcaggtgcttctatatctgaatcagtaactgacatatatagatgcctggttatctatatgagctgtctggacctagagtagtgtttatatctaagctgtagtgtctgtttaagaaattggaatcaattaatttcctgcctacacagagaagtgcaaacctcctttggggggagatggctaagcatggataatggatgtagaacctgaacaccatatttatattaatgaaaaaacctgatttttgtgggaaaagttcattgacacggtttcattaatatataaattagtaactgacacataaaacaaggatagcctttcaaaaattaatggcagctaacataaatggatcaggggagtaatcgagccaggaatgccttggttggtttccagaacaggaggtcatttttacatgcaaataaatgtgttgccatacaaatgttctctactacaggcaacaaacaaatagaatcacaaatgtttgttccagcaataagatcaaacaaaataagattatacagatggaaaggtaattttttttaccaaggagaatttcaggcagcgatatactacactgtacaaaaaaaaaagttaaaaaaataccacagctgtatgcactattttgaagaagacctaaggtaa

SEQ ID NO: 3033 - DNA, 1067 bp, Zea mays
cttgcatgcctgcagagcaagagccagctctcctgatgcacgaaccaaaggaaaagcacttttcaggatgcttatagatgaaaattaatctcttataaaaataaaagagttctgaagaataatagtaaccttgagttgaggtcaaacttgtctctcttgtgcttcaaagcatataacacactcacagtcacaccccagatcacattgtgaggaagaagataaaaggataagccaccaaagaatgtcaactagcggttctaccatcccagtaacaaagccagcgagggcagtggtcaacttgtctaactcaagtgttaatctatggtcttcagaaatacttgtacctgacaggctgaatacctgaagacatataccagggtaacttagctactgtcaaaacccacagtattacctccacgcaaatatgcaatcttattctcaaggccagatcccaagcacaagatagtacaaggcacggacagtcggacacatttagaaaaaggactgaggtatcaattgaccaaaacttttgcagaaaatacttgtgttcttgttagagaatgttcagtttgtgttagagggcaataacagaaaggttatctttgcttcccatggcttgttacttcttcgttcttcctgtccatctcaaccgtaccataattgtcacttttggcaactaccaactaccgatgccaagcattttagcaactacataatcagagagtggttctgcacaaatgacacatctgaagatgcaccacttcatacccaacctaacttaacctcctgaagctgcccattcgaaacctgtgcagcaccaaaatgatccccaggtgtgtatttgagttattttattcaaaaatcatttttctccttttctttgcaatcaagcttcagctttgagaccaagtcgtccaggatgaaatatatctcctgattctcaggttgcctctccctaattttgaattcatcaacaatctcatttaagtttaccagacgatgtccagggctgaacctctcatctctctctttcatgatagccttcaccctgtgaacttcttcccatc

SEQ ID NO: 3034 - DNA, 746 bp, Zea mays
tagctccgtccagctcgacggttctctcttagcagctaaggaaggcgacataaattataaaaggcgccacttgagggcagggccaaggaaagttgtggtttccaactcctcacctcacacactctcttcttctctccttcgttctccctcgcaaagtcagggtcactgaaaggagcggaagagcccaagtagttcttcgccaccggtaccgcatcgatcatcatggtgttctcctcgctcccgatcttcctagaccctcccaattggggccaggtaattggtttatccaatcatatactcttcgttccttacttttagtttcgtcatgcacaagcatgacgaactggttttctttctctccgtttccttatcattatttgagagtgaatcctggctttttccaatacgaacttcaaatctctggttgattgatcgcaaatttgcgattcgcaagtttgtttactacccatgctcatgccctggttgagcacttgagcatagacacaaaaggaagggcatcattataggcatgttcttgaatataccgtgctttgaattccagcctttattaattgattcgttatacatatacatacagatgcagatgcagatgcagccaccgctccagtgtctcctcggcagcggcggtggcagcgaccaccaccacctcatgccttctccgtccggcctggcgccgctgcccgggggtcctgctgacacagcggcgagcgctccggcgggaggcg

SEQ ID NO: 3035 - DNA, 1327 bp, Zea mays
attgctgctgtggtcgtcgtcgatggcagcactagcggagctgtttgttgcagcagtgtcgccagcgtgagccctcccatggccgtctggcaggatggcaaacccagacggcaggacgaaaacgttgctcctctcgcggccgtccatgatgccacgcatcaagttctcctcaacgaggctgtacaccactagagagcatgacacgtcggtggtcgtctcttgcaggatcagcactttgctgtccgtcccatcagtgtccacctacagttaatacaacggaagcaaaaaaacaaaaacgatactaataagctaggtaaaattattgcaagagtcgttaaggagatttacatacatctggtaagatacaaaaacaagaggcgtcaagactcacagaactagtggattggaggacggagacggcgttgccatggaggcgcgaagacgtggcgacggagcccagttcctgcacttcaccgccatcggcatgggcatcccactcaccacggcgctgcaaatcgaagaggtactcgcggacacgcattggcggcgtgcctggcagccacacggtggtggtggcgctcagaaccgtgacggctggttcccctggcatgatgtcggcgcagttccataccgccaggcgcaccactgcctccaccctctaggcgccggctgccactgctaacgcgccactcgtcaacgctgctggttgccggcacagtcaccggcccggagacggcggcgtagaagctcgctgtcattcggcgcgccagctccatgacgctccttctccccacgcccagcgtcgatatggctaccatcacagttatttatgtttccatgcatatgaatataaaggcagcagaattttgttgttttgttcgtttctttgttttttttttacctgagaagctgctgctactgcttggaagaacaaggctggatcgcaggacagtgatgtactcgcactgcctctggagacatctgagccaacggtaggcaccaagggcctgcccagattgtaggaaaggtctgaagagggatggcacactagtctcgtcgtactcggcgtggacgacccatgtgacctgcaatgcacaaacgattagacagattacatacactctcgatcgaattctgtgaactggaatgtgagatgtatgcaatagatagtaaaaattctctcacaaaaattaacagagacataagtacggtgatccaaaagtttttgtactgagtaccttgcaatagccaccgctcatgtcctcaaggaggcagccggagggcagcaacctgcaggtcgactggtgaggctcaccaggtaccgagc

SEQ ID NO: 3036 - DNA, 1121 bp, Zea mays
agccaatacagtatggtaactgataccgtcaagactcacgatcaaaatactgagttcatgaattgattagtaacttgagcattttacctaccatcaacgttgaaaagagtcttccggtttcgcctacacctccaccagaataatgaaccaacggcaaggaacagaaggctgatgcaggcagttgtagcaccaaatgcaattgcaactttatggctcttagcttttgcaggaatcacagttcctttagataaaaattatcattagatcaatttgctaactacgtacaaaattatacttgaatatctgagctaattgagcacaagtgtctttaatataattgctagcatcatgaactgattgattctgcataccctgtgtgttattcagtccgtaagacattggcataggtaaagacccataacaatcttgttccatggttgctgcacagatcagtggattccctacaatgctgcaagcgaatggtgtgaatactattcctggtaactcaaaatttggaggtaaatatgtttcagtggaagtggaaattttgatcaagataaataacagcaggctatagccttacttgaaagtccttgtcagggaccctgggattggaccactcaaattattgtaggacagatccctgagagaaatgcaagttaacagtgatcaatgatcaccacatagccaacacaggacacatatcacaacagcaaaacaagcaatgagtactcacaggaaaataaggtgtgacaaattagttgaagatgaagggaaggcaccagacaatgtgttgttgttaagcctcctagtaacagcacaatgttggagtaattaaaagtaagaatagacacttgtgtctcctgagaaacaacaggacatgaatagaaaacctccagaatagcattcaagacaagtacggtggaacaaacttccaactgttcaaagctagtacagtggagcagaattgcactcacaaatactgaaggctttcaaggtggcccacagagcttgggatttctccagagaagtggttgctggacagatcaagcgttttgagctttcttagctttccaatctctgctgggattaacccgtttatgtgttgttctgcaggcatc

SEQ ID NO: 3037 - DNA, 1286 bp, Zea mays
  unsure (1)..(1286): unsure at all n locations
tcttgcatgcctgcaggacgcttcaatgtcgttaaatgaagtttctgcggttgtttctgtcttgcttggttttgcaccgtcaacatccctaccagctatttcttcttcgaaggttatttaaacttcatcctgctggaacaagctaacctctacatgccccccccccctctggcagaatgtctcagccattgtttttcgattttcagttgaacaaagttcttcttcctaatccatttgatagaccgcgtgctgttttcctcgtgcaaattgctgggttcaatggtatgccagttgttatggaatgctttgtatcattatttgctaatttctgtgcattgtgaactagcaactaaatttcccatcctgcttgtgtgttggtctcagttcctagcttcgtatctgaaggcagcaacattttcaagaccaggattgaaggtgcaaacatcgctgatacagggcttacaggtttaactgtctatcttgcagcttattatagtggatctgtacatctctctctcgctctacttctgaacctggatgccccacttcttgggttcttatcttgttgttattgatatattctttttatccattatttactttacagataaggatgacttaattgtcattcattcagatgaatctctagatctctctcgatcagattatcttgataatgaactttccagcttggtaagcaagacaaatgcagtttgatgtataacatttctatttacaaattgtaagccgatattttttttcaggcaaactggttggagggatcttatcagaagtctaccggcaaactagtcattcccttggagaatggaaacagtcttactttgcaacttgataaggttagcactccatctattgcacacaaaaatgcttcctacctacctcgctgaacccacataactgaatatgtttcctcaggcataattcacacaggtgcacagcttagcaaccccgtagatgtttgtcccccctcttgattgcatttttttgtcacagccactccataatttattatcacgaaataaaatgttgcagtatgtatacgtgtaactaaatatctcactgcattttatccgtgcttgtgtattttttacgtctcaagtcccggctccattgcaatgcattcatttgcaggaagcagacaaggaattcatgtccagcttggcttcccttcttaagactattgaaagggcgatccaggttcatgaagatttctcaggtgtcgtgaaccctgcaggtcgacgttagagctaccagggtnaccgaga

SEQ ID NO: 3038 - DNA, 1192 bp, Zea mays
tacagaagacacgagctttctatacatctgaagactgaagtagtgagaagcgtcctccattttgattagcgaggtgaaaaagctagctagctgtcgcgtgatctggtaacatgcactccgaatactctagttattaggtgaagattaaccgggtcgtagctaggctggattcaaactcccgctttaacagcatgcgaacgtacagagcggggagagagagagagagagtcgatatatattctccccatatattccttgtcaatcgtcatgaatttcgacaggaaaggtgaaaagagggcagctccatgcgagagaattttaccttttcacctttattactgctcctgcttttcgtggctccgctgatgattgcgattcaccaccaccaccaccaccgctctagctagctgctgacgcccttccgatccatcagcaatctccacattccctgtcgcccgccggccccaagaccatgagctagctagagcacgcctttacctcgacatgcatggtcgtctcggtcgatcgcacaacactcaaaccctcgctacggctacgtacagcaccggccttcttagctttctttctccagcgatcgatcgtctccggccggccggccggtctccccatatataaactcgcgaggacgctcgatcccttctcgtctagtagtcgttagcatagccctagccctcagctttccgtttttacatatagtacgcactctctcgctcgatccgctacatcggtcgcgcgcctagctctacaaagtttgaagctttgtagctctacatctacagagttcattagcatgaggcttcaccatttccatgtggcttacttggataaagcggcaggctcgccgccgccgtcgtcgtcaccaccatccatctcaccagcatctcacagtcacagctcgtcgtctgctgccaccatcgtccctctggccctccagcaatactgtctacgcccgcttgcgcccaagatctccttccctgaggcgaggaagatggtcgtccttcctgagttcgctcgcgtcaggaatgcttcttcgaggctgctaaactgcacggttaggctataaaccaaagagagagcccatgtactagctagctaggaggacagtagtagaaacacatatctctagcatgcatggtgtacgtacgtatctcttaattttcattgtatcaaa

SEQ ID NO: 3039 - DNA, 1240 bp, Zea mays
aaaaaagcggtaaagcttagcggcgaaggcgatccccaaagccaaagcgaggagataaaaactgagtgatcgcgattcgcgatggcgttgctgaatgctggccctgccgccgcactggcctcctcgtcctcctcctctccccctccatgccgcgcggaacgatggagctggagatcgtcgaggtgggcccgtccagccgcccgctgcaatacgtctctcgcccgccatttccacctccaccgccgccgccgccaccgccaccattgcagcagcagcagcaaggggaagcaggggacgccaatgcggcgccgcccctggtgcagcatttcgacagcgagaagctcccgcagacgctcgtctccgagatccgccccttcctgcgcgccgccaacgacatcgaggccgagaatccgcgcgtcgcgtacctgtgtaagttcacgtgtggtcacgcactgtttactctgtctctgccgctgctgttccggtacccggcgcaccacccacctgttcgtggaaatgcccggctgccggcctcatcctggcacgcgccacggtgggtggcattcgaacgtctgccctgcatacgtctacttcatggttttggagtttggggttggtaacacgtccgaatgcatgcacgttcgtctggctctgtttctgattccatcgatcggaacaagtgatctttcagctcctggaccaaacgtccaaaccgaatatttggtggttagttttgttaccatctgtctccgtctcagaatattctggccctccttgatcctctccctccgaccgtctgcaaggtggtagactggtagttgatcgcgatgagtttgcctttgcttgtctcaacaaccacggatgcttcgtgcttgctcttggcttcggtgacagagacgctgtttcagttatgcgtagtaccttgaagtttctgcaaggggaaagtgggtgtttggctgattgagagcacatcatcacctggaatattctgtcatttccccttttgtgctgccgaattgtgttttcaactgatatattctaaatggtagttattttctgaggagcatcacatgcctacttttttatgatcagtgggtcaacttcaagtttctgctgcacagaacattcgtcggccacctctactccatgtactttctcgtgcttgactgagcgatctgttggaagccttgacatagagtttgttagatacgcatgcaagccacaatacctcagtttttca

SEQ ID NO: 3040 - DNA, 1236 bp, Zea mays
acaatcttgtttccttctctcccctccccaaaccccagcgcggcctccgccaccgcgttccgggacgagtcaccgctccgtcggcacggcagcttgctccagcccacgccacgcgctacgtcgtcgcggtcgatcctcccgtgaggcagccgtgtcgctaggcaccgcctatttctcgaacaaagtcgctcgctaccatggcggcagcatccgccgccgaagctaacagcgtgagcaatgacgaattcctcgtacggtacgcaaagcttctagatgcctctcgccagctttagcgcccaaagcaaaatttgacctgggcgtttgttgtttgcagcgacgacgtgccggggctgctcgccgctctcaaggagatgaaggacggactggacctcgtcaggggcaaggtcgaggccatcacccggaaggtaatccagtcatggttcccccctccaagcttccttcgcctctcccagtttcttaaacctccaattgggtacgatggtgggatgaaccctggttcgctctcctcgcgtgtcgataggtcaaggcgaaccagttgccggcgggcaacgggatcgggtacctagaagcgaagaaccacatgcttcttggctactgccaggacatcgtctactacctgctccgcaagaccaaggggctctcggtggatggccaccccgttgtacggagccttgtcgagattaggctgtttctggagaaggtttgcttgtgcttctgatgccgattcttcatttccctaccccgtttgctagagctactgctgctgcggcggctgtttggtagattcgtccgaatgacaaggtcaccgcgctttctgttgaatttggcgtggtagattcgtccgattgacaagaaggcagagtaccaaatccagaagctcaccaatgccgctgacaatgcaactgctcgagagaaggcaggaaatgcagaggtgaaggggaaggacgggcattcggatgaggaagacctcctgatgtataggccaaacccagagatgatggacacaaagcctggtcctgatgggcaggtgatgcttttcactttcttaatgattctatacacttgttacattgctaaagagatgccagatgcttccttttatattaattaataacttgtctgcacttgcaatattggaacaaatcagttggtttagcacaaatatcaataagtgcaatgtcattcacgtgaacagattttcccatctttcctgct

SEQ ID NO: 3041 - DNA, 487 bp, Zea mays
aatcctcgagggcttgctgaggcaacccttttgtttcggaaccgaagactagccagtcccctggcctgtaggagaaatcctaatttcaaaacacgggacaacattaaccaagtgaatgtgtaccatttccgtaagaaaatcttcggaattgcagattagttcagatatacccacagcgacagttttcattgtggcgacggcgaggatatactacagtcctacttgaagaagcagcggctacttactgaatggatgtgtgtgcctcttttggtgaacgccaacagccttttatctccttcctaatggggccaaaagaacgtgatgatgctgaaaagtaatcggcagttaaatatacgggagaataatggataatccaacatcacctgtttcatgaaataatcacagaagtggtcccaagagtcatgaatcttgacaacaacgtatcttaaaggcagcgtttaaggaagaacaccgacgtctaatttct

SEQ ID NO: 3042 - DNA, 1259 bp, Zea mays
tgcatgtgctcaaattgctggagaagggacgggaaattgattgcactatagttctgtgtatcttggtttctattgccatcttctgtcacttgcagaatctgggagtatggatttgctgaagatgtgcgcttaatattttcactgaatggcacagttttcagtcgagtcctcaagatcttgaaggccgcactttgctgcataaacatataaaccccacgatgtgttatctctcccgacagaatctggttagaagtttgacctcatagaggaacagtgaacaagaacaacagtagaaagactacattccacatataaatagaatacagcagtagaaaagcaccaaaagatctgatgaagatgcaagtgaaatatgacgaccatggagataactttttacatcacaaagctactgcaacagatagtttcagtgtacaattacaattagcctccttatttatagatgaggctcctgacaactataccgaaataaataatctaaataacagcttgcctaactaatagatagtatcaaacagcccttatactaggaaactaaccattcttttaggaaacagatattcttagtggaagtagggatgaaacaaaaggggcagagccagtgctggaggctcccacataagtggtaagaccgtcttcaacagttcacccatatggtcactcaaaacactgttttgcactgtaggctgcactgttcgcatagtggagtttgaatatggggatgaagatgggtaagctgctggagatagcctaaggaagggataaaccgaggcaagtctttcccccgcaaatgcggagaggttgcttcgaacccgtgacctggcaacttagtgagacagctcgcaccactgcaccaggcctgcccttcggaagtagggatgaaatagcaaagattaattaattatttcaacacaaaataaaaataatatcttcaaaaggccaaatgaattcatgagatacatgtcttaatttaatattacaatagctgatgatatgcttacaactggatgaaaattattctataaactgtccaagaagctaaattgttataagtctggagcatggagcatgcagcatgagctttttgtctagtgcatgttactcgaacattgattaggcgttaagcaaagaaaagttgcaggaactgtaacagatgatagatattgaacatacctgaggcaacagcatcaggagaccataaagagttttcagaagccaggtgtgctttccaggctcaagaa

SEQ ID NO: 3043 - DNA, 768 bp, Zea mays
cctgcagaatgtgccgttgccgtgttcacacgtatatactccaacaacagccatccatagcccataggtccaacgatccagccacggataatcctcagtcaaatcaaacatctatctagccagtaggtagcaattaaattccagcatcatgctttctcaggccacagattaattagctatccattatattatggagctagatcaattaaactgtgtgagtgcccattgagttaattaatataattaagccgcctgcacagctagcgcacgatatatacgatgcatcacaggagtgattagctagagagacggaacatgccgcctatccgtgttaattaacagcgctaggatcaggcttcggggagggacagggctatccagcaagctagcgaaaccggccaatagatcgatcggaccgcgacctctggcgcatcatcgccgccggccgttatcatcaccgccgcgcgccggggccggatgcaattcgacaggacaaaccaccgtgccatctccttgcgccccaccctccctacacccgtatcccaccatatccagccacccgctttgcaggaccagctgctaattaatattccttctcttctattcctagcttccctgcacgtacacgacgacggccggccgcgggaacatacacaccggcctctcgatcaaaaacacagtaaagtaactgtaatctgctggatctttcagtctaatactgtgggtgactagctattagtcaataataataatactaagaataacgag

SEQ ID NO: 3044 - DNA, 1183 bp, Zea mays
ttggattatcaggtctaggttttggtggtggatttgaaaggctgcattatctgtaagaaacacgtttgatcttctaattcaaaattagagggaagaacacgatatatctgatttctgatctgcaccatttcttgctattttgtccagtgcaggcttgagagggtgtgggatcctgtacttgtcgctggagctaaaaagaggataagctattacttcttaaaagaggtgaaacctctattactttatgtacagcgttaacgtttttagatctccaatgcggataacctaacattatattctctagttcgaaatgtggctagattttgatcaaaatcctctttatgccctcttgcacgagtctatctactgtgaggtaacttgtgaaccttaggctagtacttactatgtttatggtcctactagcactcctgaagtcctattttgtttatggtcttggattcagggctcttcatcaaaatggtctgctgaaaagattcatggcgaatatgggagtttgtttgaccctattaaagctacagaagaaggccgagctgtgtactttactggagaggtactcgtttggacatcttgctggacccttgggtaaaatcaaattaaaaaaggagcttgtgtaatgtcaataaccttccatgtgtgtgtttattctttcatcttgagacaaaactataggcagaagctgtcaactatcctactacatttttttcaacatacgcttccctaaaattcgatataattaatgtattcatttttttttgttacgcagatggtgttcccttgcatgttcgatgacatccctgctctacgagacctaaaggaggctgcctgtttgttagctgagaaggaagactggcctccgctctatgatgtcagcgtgttgaacaacaataaggtgcgttgttcataagggtcgtaccataattcatactgtaagggctagtttgggaaccacattttcctaagggatttttatttttccaaggaaaattagttcattttcacatggaaaaatgtagttcccaaactagccctaaaagaagtttccatctatttattcacatactatacatgatcagagtccagggaaaaaaataattcggtatttccagctgactccggtctggatggcagtcatgtattagttcgctgatcgcactatcgcagt

SEQ ID NO: 3045 - DNA, 1063 bp, Zea mays
cgagtctatcgccgcacgcgcacgggcttcgccaccagctcgaccacggcgcgcggccgaggatcgccggcggcctcatcgtcggccacccggcagctcgggacgacatctcgtgcttgctcaccattggcaccgccccgcacaagaaaccatcagacgtcaagtcggccgcggcggcgccggcgccgcagctgatgctgtttgggaaaccgattctcaccgagcagcagatatctctaggctttcggccgctgccggcgccgaagaagagcccgtccggcgacgttgctgagactgagaggacgatgagcaacaactcggatgcctcgagcccagctgggactgggagtgggagcacgccgtccatcagtggaggcgccccgtcgtcgtgccaggacaacaaggcggcggcgacggcgacggcgactgatgacgacgatctcctcgggcactgcaaggtgttcatgcagtcggaggacgtcgggcgcacgctcgacctctcggctgtcgcgtcgtacgaggagctctaccagaggctggccgacatgttcggcgtcgacagggccgagctgacaagccatgtcttctaccgcgacggcgcttctggagcgctcaagcacgccggcgacgagcctttcaggtccgtacggtggttttcgtcagtctgaagcggcgttcggttcctgtgtcgcttacttgctagtgttcctggccgtggtgctaagcattccaacctaactactagacacggttatcttcaagcatcaaactcatctaggtgttctttccttggaagcatccgatcctcatggtactttgacttggatcgcttcaagctaggactaggacatctccatgtggtttcctatcgtactgatgtacgattacttctgaatttgcagtgagttcaccaagaccgctcggaggctgaccatacaaacggacgcgaggtagaagaaggcggcagacaatgaagctctcgtcgcctgtacaaccggggggagctagcgagccgcggcggcgatctcgaaggacgatcgccacttgcagagtgctggtgcag

SEQ ID NO: 3046 - DNA, 1259 bp, Zea mays
attttgcatgcctgcagactagaatattttgaccgatattggatttggattagtaatagtttgcctcaaagaaaacaggtgtatgtcatggggctggcagctatttgctgggcaatttggggaaccagaaactctgtgtttcgataacaagagtgaaatcttctactgagattgtttgatattgtttgcgtaacgtgttgctttctcgcttattggataggcctttgtaaacgagtttatcctcgacttcacatctttcactcggatgatgacctgcttctgtcttccttcaacaaagacgttactatgttcacaaagactttatctcttgaagataaacttgtttacaagaattaaaaaaattcactgccacaaagcatgaaagagtgaaacacgcatacaccgcgaaataaattgctaaatggttactaagcttcgaagatcaatgagatagaggactagtttggaaacttaaatcccctatgggatcccagagattaagggggaaatagcttaattttctcctcaatccccgagaatcctgaaggggatttaaatttccaaactagccctaaaataatctaggtaatatggtagaaggattcgagaacacagttggttacagacgacaaatggtaccagaatcatttgatccaagtagatagcccaaagacttccactcagtcactgatcgcctgagcactgaactgacatataggagaaaattgtgtttatgacaaactcacacgtgcgcatcgaatacaactagatgaagtttatataggaaaaataaggggcaaaatatagatgcccaagttatttaaaacctaacagccttatgatgctaaagtggttccaggttttctatacagaacacatcatctagacaagagaatcagttgagcaaactacgtcgatatcaacagaaactgacaggaatgcaaaggatcgctaagctggtttactcacttgcacctgcttgtacatctggtgcctcaaccgaggtatcctctatagtcctctccgctggagcgtcctcattttgtgtttcaattgtggcaccaatagcagttttttcggcgttggtggtatttgcatctggtggcgcgacaatcgcatccttcagagtattctcaactgtagtcgaattctcatgtgccacaactgtggcattctctacaggtttctcagctgctgtagatttatcatctagcaccttaacatcttctaccatgtcctcagctgttctagcttaaacc

SEQ ID NO: 3047 - DNA, 1173 bp, Zea mays
cttgcatgcctgcaggctttagttctattgagctggatattttagttcgacggattaatggtgtactctagtagccacaaagaccgcgatgcttgtgatgcgcgagtattcctttgctcttttctaatcgaacactaaccgggctcgttccgtcctgtactccggttggctgtagcgcctggaatcagtgggaaaacgatgcaggagcagttgtattaatgtcgtctttttttgagagagatgagtggctgatattaatgtcaaagctgtcatggacaggaaaactgtttacctggagtttgttagatagctcagtctttaaaatgatgggttcctgcggggacatcaaacccggaccatggtggtgtagtccaatttcacgttttagaggttggggatgagaattaagatgtcaaaaccttgcagggattttggtttctgctgattctaactttatcaggatggttacatgtacaagcgagggttaaaattagtcatgaaattcccttttgctattttttttcttcaaattagcttcaaggaaatgttttacttgtgaccttgttgactagttctgctcaaaactttactgactgtaaaataacaaaaaaaattgttgaaataatcaaaagcagtgttaccccaactgtacctgcttatgtgtagggaagcacttcaagtttccttttattctttaactaattccagactcacatgaagactgtagtaggggtagcacttcaagttttcttttcttctttgaccaatcccagactcccatgtagactgtagtaggggaaacacttcaagttttcatttcttctttgactaattccaggctcccacatatattgtagtagtagaaggcacagcgggcatggtttgtgggactgtaattagtaatgcagatgtcgagcttattggtcacacattatttcattctgttactttctctagtgtttggcctagtattgaaatgtttgaatttccagatcattttctaccaccatgttgttccatacaacgaaatggtgaaggacgaatttgcttttctagccaaaggacccaaggtcctaccttgcatcaccatcagaaattcttcgaatggaaatcctcctattgtaggatatcacatcgatcattaaatacttctgttaatgcttcggggcaaca

SEQ ID NO: 3048 - DNA, 1311 bp, Zea mays
acgtggccctgaagatccaaaagagtgcgcctgagtttgcgcaagctgctcttcatgaaatcgagttcctgtcagagatcaccaagaaggacccattgaactgcaaatgcattattcagctgatagatcacttcaagcacacggggcctaacggacagcatatctgcctcgtctttgagttactgggagatagcttgcttaagctggtacagtacaaccggtacaaaggcatcgggttcgatagggtgaggcaaatatgcaagtcgatcttggtaggtcttgactacttgcacaatgagcttggcatcatccactcagatttgaagctcgagaaccttctccttctctcgaccattgatccctccaaggaccccattcgctctggcctcaaaccttgccttgagaggcctgagggaaaccctaacggtgaagctgggattaacgcgattgagaataagctaaagatgagagcaaggagggtgcttgcaaagcttgctgagaaaagaaaatcagctgtggaatcttcacgctcagaaaggagcttgggtggaattgatcttacatgcaagattgtggactttgggaatgcttgctgggctgacaagcaatttacagattttattcagacaaggcagtacggggcaccagaggtcattctaggtgcaggatactcgttttctgttgacatgtggtcatttgcgtgtatcgcttttgagctcgcaaccggagaaatgctatttacacccaaggaaggccatggatacagtgaagatgaggtatatatcgcattcctcatgagcctagctattttgttcatctttgagttggcttcaattatgcagtgcatgcccacaatcccattatagactgatccgatttaatgaagtgaaaaagtaagcactgacatggacacacattgtatgttatccgtaagatgaagtatgtctaaactcagaaaacaaccatagtcaacatgaatatgcttagcactagaatttggagctgtacaaaaaaacaaaaaaaccctccattactcctgtaattctgtttaccttgaagagctacagcaaataatatttgcacccaaaaaaaatatcatgggaatggttttcatttcagccttcaagattaaaaactgctattgttctcaactttgaatattacaatagtctgaaatgccagttccaatacagacattgaaatttcggttaatttggcatcttggcattatcatgaaagctaagccttgcaaactctagttgattattatcttttagtcctttagttacttgattgaggaccgaaggttgt

SEQ ID NO: 3049 - DNA, 1112 bp, Zea mays
acctgcaggcgtggcggcagcactgttgcgagacagcgggacgactgccatgacgatgctctgtagtctgcatcgcatgtacgagggctaaccagccccctcatggatatgcaccagcaccaggccgcagcggccggccgccggcagccatagaaaaaaaaagagagaaataaagggtcaacaagggacccggacggagtgcaatgccatgcgatgcggccttggaaacgtatagggacggacgggagtaaatgtcgtcgggctagctctcgcgtttgcagattttgtagtagggcgccattgacatcttccttccctgctttctcggcactgcgctgctgcttcatgcatgcatgcatgagcatgcatgagccacacctatctgaagctgtaataaagaaaacctcatggtggttgatggaaaggttcggctgtttggaccgttgcatgggtgctccagttgaggcatatgtgaatcataaaatacgtatactactgaatcttaagtcgtatctttacatacacacatatatgtttaatgtagagactttggaggactagttatataccactcaaaaatttcagtgcatgcagatgcatggagaaggaacatacatgcatgcatggtcgaattgaacgctggcacttgcttgttgtgaagaaagcttcagggatacatagtcaatgcaaaggaaagagaaagacagagggaaagagatcagagagtgagagagaaaacaatgggccaaaggggttgtttggttgtttggttcagcattttttcgttcagctttttcaaaaatttggatgtagggagaatctggttaccgggagaatctaaatatcatgagaattacgttcggagaaagattaagatgttcataaggtttaaaaactataaagcgatggattcttaccattatcattataacaactcggccccgattatgtgtttatgttgattttttatgatttttaccaaatcgatttttatagaagctgactgaaaagctaagcgtttgacagtccatagcagtttttggtgtccagaatctgaaaaggctgaataaaacagggccaatgtaatatgaccatacttgagagtgatggaa

SEQ ID NO: 3050 - DNA, 738 bp, Zea mays
ttgcatgcctgcagcttgcacgctttctttgcagttttgctttttagtaggctgttgtgtatatgaccatgttaagagaagtgccatagacagttttgaagtttttagggtttaatagggtaagatattcaccactcagcggtatcagtgaccctgtggcctcttgaattgatgtgcaaataagtgccaaaagttgtaatagtatacaacgctcatggttacaaagtgattatagtcttttttcatgttttcccaagcgtggttaaacataatcatttttatctatcatgtatttaatatcgtgggcacatgatcaaaggggcataactcacatgcatttgttagctagctttcagagtacaaattatataggttattaagtatttagatactcgtcttatttcctgtcgctactcgtgcacctgctatctttaaatatttcgttctcacaaactgactggaaattgtttgtctctgacagtgctagatggggctgcgtaatcatatactccctctgtcccaaattaaaaattgttttatctttttaatagattcatacaatagttaatgtatgtgttctatatatgtatctagattcattttcatccatataagtatagatataaaaatatagagctaaaacgtctactattttaaagggaaatttggatccataccattaaaagatcaccactgtggatccataccattactatctcacttacatgtgggtccaca

SEQ ID NO: 3051 - DNA, 778 bp, Zea mays
gcatgcctgcagctttgtcgttgcgcacgtcgtcgtcgctgtacacgccggcgaggaagtcgtggaagtccgcgatggtcttgttgtcccggagccgcgtggagttgacggcgaggtagtcgtggtagcgggtgcccacgacggcgcccgggaagcagtgcgtcctcttgtccctgagcaggtcgatggcgtggtaccgcgagaggcctgcgagtatctcgccgtaggtgccggcccagcgcgggctgtacgagagcaccgcgagcacggcgcggcggcggaggtgctgcgccgtcagccacagcggcaggaatccatcgttgaagacgtggaacatgttgtggctgtacccgcccgccgtgacgacgaggaccggcgcgtcgtgccggacgtcgcaccggtgcgcggcggcggcggcctcctccggccgggccacccggagcgtgacctcgtggatggtcttggtgatgtaggcgtcccacttgcgcgtgtagggccgtatccgctcctccgcggcgggtggctccggcgctgacgacgctgctcgcggcgggaacagcatgagggccagggacgcggcgttcgtgcgcacgtctgccggccattgaagcaaaacgtcggagtggtagtcggatcggtctctatcaaatgggtgtgggttgggctagggatcgaaacaccggggtaggccccaaccttggtttgttccaaggaaacacaaacctggctttacgggtttatccgtcggctcttagctgatgagttccgacctaccctt

SEQ ID NO: 3052 - DNA, 1028 bp, Zea mays
ttcgcgttgccacctgctgcgaagtaagggctcgacgtcgcgacggcggtggcgtccgtgccgtccacctggatggcaaggtccttgccggtaccctccagacccagcaccgagagcttctcgacgaccagccccttgtgcaggctgtagcttcccatcagcacctccgaccgcaccgtcacagcctttccgcgcacgctcgcgtggaagcgcacgtacgacgcctggccttccgcgagcaccatctccgggcgctcgtcgtcgtccacgtacaccgcgccctccgcgtcggcctgcgtcgccccgaacgggaacgcgaccacgagcgtgaacggcgtcgcccgggcgtccttggagacgaacccgccgcgctgcatcggcaggatcgtgttctggtacacgtgcacgttgatctcgttcagcggcgcgtccagcttcactggggccccgctcctggacaccaccaccttactcatgtcgaacaggttgtaccaggtgcccggcgggaacatggcgctcaccgaagtggcgccctgctcgaggaccggggacaccatgacgccgggaccgagcaggaactgcgtgctcagcccgtagcacggcgtgaagtcggggaaggagaagaacaccggccgcgccacgggggccccggtcaggtgcgcctggtagttgagcgtgtacaggtaggggagcagcttgtaccgcatgccgagcgcgttccgagcagacttcgccacggagtcccagacatacagctcctgcctcggtgacgcgaagttggcatggtccctggagaaggggtagaaggccccgagctcaatccacctgttgcagagctcctcagtcggcgacgggtagaaaccgcagatgtcagagccaaccatgggcatgccgaagatgccaaagttgagcatggttgagatcgagtaacggagattttcccacgtgcccttgttatctccggtccagtgcgcggcatacgcccccgacccgacgaacgtggagcgggtcaggatgaacggcctctt

SEQ ID NO: 3053 - DNA, 1028 bp, Zea mays
cgatctgcagccacacacacgcaccatgcagttgcttgtaagatcgaaaatgatcctcatcactggcctagcctgagctagctaggaggacgaaccgatcgacgaacgcaagtgccagcagatagctagatatccgatccgtgcatgtacataccatgcagttggatcctctgggcttgactttcttgtcatggcaggtcgtcgcgtagatgttgtacgcgtcgatgttgccgagctggttgtaggcggcgtccttggtccccgagcagagcggcgagttgtcctcggcgttcttgcagcgctggccgatgagcgtgtgcgccgtgtccgacaggaacgcgtgctgccacaggtactcgtacaacgcgctctgctccgccgcgaactccaggatggcgttcccgatctgcatggcatgcatatatatagcgcagcgcgcgagcgcgcacacacgattatgtttatatactcgccccattattcgtgccggccggtgacgaagacagctacttagtagttaccgaccgcgattcccttgaggttgacggaggccatgtccttgggccgcgcgttcttggcggcgaggatggaggcggcgagctccgggacgtagtggccggcgtagctctcgccggcgatgaagaagtcgcggcccttgtactccgggaagcggtccagccacttgagcaggaactggagcgagtcgtccgcggtcatgttgtcgcccatcaccttgtacacgttcgtgttggcggcgtacgagaagcccacgcccacggggctctccaggtacagcacgttcgccactgcatcatgatatcttaattatttgtatagcttcttgctaggattatcttttttagcacgtgtacaattgtcatttgtcaatcatttatcattccgtagatagacactgacctgtgttccaggcgtatttaaaattgcagagtgtcttgccatccgtgtccacacggaacggacctatctcctggaatgctccgattccaaatgaagagcagccaggcctg

SEQ ID NO: 3054 - DNA, 1399 bp, Zea mays
aagcgccgtgcaatcagtttgtgtgtagggtttacattttgtgtgtagggtttaccaccaaaaaaccttcagttttggtgcactaaaatacaaggccttttcatctcttacaccagcaagcacctcatccgccaacaacgaatccaattggtactagagaacaagcaatcaccttttaactggtaatagagcaaggagatgaacaagtcctcgagctcaatccatactgtacaaatgtagctcatcatccgccaacaacgaatctccagaaacactcggactgtagcagacacattttgactgtacgtagcagagaattaagacctattttgactgtagtacacacataactggaactggttccatggtgaacttctctgccacaccatccacaagcacaagtgcaggaaaatgaactatcttctctattgcattggctggagtatttatactaattgccacatgaatgatatagcaattgtgcacatgaaaacaaaagccctagccacagttatcacttcattctgtcagagaaatacatattggcaattgtgcacaaccaaggaatgaatgatatagcaactgaaatagcggagcaatacaagcggcaaaaacagggaaccgcggggacggcagcattaacgacggattggcttctgacttgagcctgaattctggagcttcaagagaagaggggtgacgtcaaggtgcctgtttagaacatgaaatgttttaaatattgagaaactcatcaattgtgctggaaaaaatgaattagtagaacctgtaccttctcatttatttcaaagtggcaactctaaggaagccagtgcggttatttgtagaaagctcttccaacgaacgtgcgaaatctttggccagctttctccatcaggttcttggcagttcttcatcaagacgggacaatcccatatagttatgcgctggagggaggatggcagatctggtaaagatgttatgttggggcaatgttctatagaaagactctccagacttgagagagattttagatttctaggcagggactctgttttgcaccatgaaaagttcaggtgcttgacggatgagagatttgcaggttcttcaaatgaaactgacggctccttgcaatctgaaagagtaagatatggtggggctgtaaacccttcagccattagcatgtggttgagaaatacagagctactaaccgtgagcgattcctggacacgaaactgtgagatgcacttggcagtgaggtttgcaacatctactaaacttaggtgcttaaggtgcagggaagacaagccttcaacaaagcaaagatcagggaggccatttagacataatgattcaagggaggtcaggtggccaatctataagcatggggagcttgtgcagg

SEQ ID NO: 3055 - DNA, 1036 bp, Zea mays
atatagcttctcattcagaggtatctgctttgtcaaataaaatttgagtacttggctatatttgtagcacactacctttggataattgtatgatactccattaacgaagctagatttttacataggcaaacagggttatacaccatgtagttctttatgtacacatggcagaccaatttgtctctgaaacgagccattagtccacaaatgttatatttaaaaattatagattaagttactagttacataggctttcaaccactactcttcaactatattggtttagtttactattgctgtattcattgtgtaatgcttacactatacttagtgtctaatgttcagacctccaatggcaagagcaaatgcaccttgtgtctcagcatccggcaaaatcctactgccacaacctgtggacatgttttctactggtaaaagttgttttttacaatgatcatgtattgagtcttgacagatataaattttacacttgagccatcaacagtagtgatgaacctgccatcctggcttacttctgcactagtgacagaagcctgctaattttaggtcacgtacatcaaaagttttacatacgctccagtaaaaaagccatttagcaatttggtaaacaaccgtaaaatgggtatacatgtactaaataacatattgatcttgaattcaacaatagaaacacaatgcatgaataatcagcaaataaatacttaattactaatctttgtttacttttggttttagcttcatcatcttatgagaattgttctggcaggatgtggatcttaactggtacccaataaaattagaaagcaagaacaatgagatttacaatggtagcaaagtgtgttatctttatacataaacttcttaggagatggaatcatggtgtaaagcattttgtattgcagctactgctgacaaggaaacaaataagccggcatgctaagctgagcgataagttcctcaattctttttgtcagtaccttaaggagtctgtagtcctgtttttctttcagggttc

SEQ ID NO: 3056 - DNA, 1185 bp, Zea mays
atacagccatacattaaatggcagaaatgagaactgtaaacacaaaactaggaaatgggcatgataaccaaataattcaaatttgaataaaaaaaacaacatgaaaggattgcacgtggaaacatttggccagctcaaagtatcagattttcatttctagaacatcactcgtagaattgaattgtatgatggctatcaatctccagcctcaatggttcccactccacagcatatggtatttacttaagtaaaacataaatgtacctgaaatgtgattgggagagacgtcaacagttcaaaaagcttattaacaacactggcaactgcatctggatgatgcttcaagaaagggcccaaagcatccaaataatgaccatgaataactgcaaggttaggttctgtccactttaaagaaagaagctgttgaagtaagcctggttgacaagcagaaggaaacttagcaccctgtagaccaaactgtaaagcaaaaataatgtaagttaggttcagtgaaaccttcaaaaatcttgtgcagttgggatttcgtatccaaatcagttttcccacaatcaactgagccatcgaaaatagcattgacaactgcttcaagccccagttgagccccttccattgcatcaagatcctgtaaccaaatttcattttgcagaggtagataaacatctgaattagaaggtaatccttggctggccaaatgaaaatggaaagaaaaacctttagtttaggtttatgcggtaagccctctttcaaaaatagatcctaggcagcgtctaggcaataggcaagatgcatgcctttcctagcacctaggtgttttcccatcaagagtggcttagggcttgatctctgtatgaatttcaaacacattggagatgatggaaggtgacttatgatcatagaactcgtgatgggtggatgataatgccaaattgtttcttttaatgtgctaacattctctatttaacattatactgtaactctactaattgaagtacaattgtgaagaaactcctatgcaatcctaggcactaatcagagcttgaccacctgcctagtgcctagacttattacaacattgggtaaacatatgcagctaatccaacctgtggggacttagttgcttgattagcatctccaaagacaacatttattctctgaactacaatt

SEQ ID NO: 3057 - DNA, 1039 bp, Zea mays
aacctgagcatcggcaccagcacgccgtccagcgaccggttgaagaaggcctgggacggcgggaacgagtcgaggatgatggacgacgagtgcggcgtcgagaccttgatgtaccggtccagcgccgcggccaccagcgcgttctggaggtagcgcatggcgggcatgagcagcggcgccgcgctcggctgcgccgagagcacctcggaccccacggcgatggccgtgatgttcacggcggggaagtgcgcggccacgttgcgcgccacccagttggccgccgtcgcgttcgagttgccgatggccagcagctgctcgttgggcacggacacgatgacgcggatgccggtgttggacagcgccgccagcatcgccgggtccgcgtcgtagagacgcacgtggcggatgttctgcgaccggagcagcgtggtgatctgcgtcggcgctggcaccgacgacatggccgtgccaatgttcacgccaatgtacgcacctgtacgcgatgacaacaataacaaataaatgcagagaaccaaagtgtaagaaatctttctttcttgatgtaagttacgaacgagtgatagaaatctaacgacggtaacaagagcatcacagttttcctggtaaaaaacgccaaaactaacgatcagatgtatatatgatcttctgattaatgcgagacaggaaattgcgttgtaaggcagcaatcctcaatataaaaacgcattctttcgagcaaagctgtgtggaagaaaaaataaaataaatcgttcgtacagtctagagtaatgtaagaaaggacgaaatgcatgataccaccatgcgttttcgtagcgaaaacaaacaaacaaacaaaagggaaatcgagctagctgtaaaagcacaagacaggccaacttggtacggggaaagacgttggaaacaggagccccctcaccatgctgctgtcccgggcccggccatccacagaaaatcctgggcaatgtgcagtggccagtgaccacgttgatcctagctgctgttgctgcaggcatgcaaa

SEQ ID NO: 3058 - DNA, 1196 bp, Zea mays
tactgtgcgcctcgcctggcgcggtgaagagcctccagaacccactctccaccatcggctcctcctcctcctcctcgtcagtgccagtggtcgggagccgtgtgaggccggacttgaagttgtccacccactcgccgcacgtggcggtgccgcggaacgcgaccacgacgtcgcggcggccgagccgctcgatctcgctctcgtcgtcgcacaccgccacgaagccgatgtagctggagccgcagggcggcgacgacggaagccacccgggcaccgaggtggacgcggcgtggaggaggcgggtgacccggtaccccgtgcccggcatcccggcgcggcgcagaagggagcggctcgggaaccggcaggagccgtaggacggcgcgccgccgtcgaagtcgaagctcgcgtaggccgcgcgcacgaactccccgtaccggaccagctcgcctcgtagcgcgccgtccagcgggctcagcaagccgtcccagtcgcgcgcgccctggagctccgcccacttgcttccgatccgctgcgccgagggcgtggacgccggcgtgcagggcgcgaaggagctcctggtgacggtgcagccgctggtgcgccgccggccgccgcgcgccattgggacgctagggtagcaggtgcgggatccggagatagccgccgccgccgccgccatttgtgctctgatcgatcgagcttgctgactgatcagctgtgtgactgtgactgtgagcaacagaagcttgttgtgtggcgcgatatatataaaactggcgggaacgaggaaacacatggctgggaggagttgcttgcgatttgaaaccggcgaaacggcgggaagaaaggaagctggcgtgcacaggcaagcagcgcgtgtgcctttcgtctccaatgctcctcctgcttgcgtatttcaggtaaggatgagctgctgtccatggccgtcgtcgagttccagttcggctgcaccaggagcctagctagttagctccctgaattctggttacaaaagttgatcggccgaaccacccgaaagcatgcggctcgtctcggttcgcgtgtgcctgcatatatatgcatgtacacgtatatgtatgtgtgtgtaaaatgccagcatgttttttttttggtgaagtattgtatataacggaacattttgcacgagtttgtgtagtttggtgtgaaggacc

SEQ ID NO: 3059 - DNA, 1097 bp, Zea mays
atctcaagatctattggagatgtatatctaaagaaaccagagtataatagagaaccgcttcacagcaagtttcggcttcgagaaaccttccagaggccgatccttagttctgaacctcaaattactgaacatcgaatacagccaaacgatcaatttgttatatttgcttctgatggtctatgggagcacctcagcaataaggaagcagttgaccttgtccaaagtagtccccgaaatgtatgttttcttctctcgcactacaatttctatgagttgaaatccacttttcttttgacgcttgttaccgttccatctaattggctttttgataaatatatcctgtggattatgttgtgcttttattggatagcaattctcttaaattgatagtttgcagatttggcttttcaaatgctacagttgaatgaatcgagtcaaactggaacttttgagtaaaatatataaaatgtggatgtaactcacaagaatgtcatacaagcttttacataatctgcattgcgaagcttaagcatacctaatgcctgtgaaagtgtagttaatttcgacaatttcacaacgcttgattgttctgtgctgtgaaacatatccttcagtgatttgactagtttgttcttgtgaaataacccagtcactatcgcattataataccttcaagtttctaaccgtctgtctgtcagcatgtttcccctatcctcatttattcacttcctctgaacctgtaattccctttcccccagggaatcgctcggagactagtgaaagccgcgatgcaagaagctgccaagaagagggagatgagatattcagacctcaagaagatcgaccgtggtgtgagaaggcatttccacgacgatataactgtcgtcgtggtgttcatgccatgagcaaagctagctggagcaaaagcccctcggtttctcttcgagggggcggtgtcacccttcctgcggagtccctcgcacctttctcagctccggcatggttgaagagcaccaactgaagctgctgctactcttgaaaggaagagcacagtgcaggtctgcaggtcgactgtagagctcaccagggtaccgaga

SEQ ID NO: 3060 - DNA, 1229 bp, Zea mays
ctcgcggccaacagaaggctggacaatttgtgtcagaaaatactcataagatgagtgacatatatctaaagaactacttcacctgaagctgagctagccttgcacaggtgcgtaaagctggagatggtgactctttgagaagcgcaatactgaaatgtctcatccattcagcccagtcttccctagtactcctttgagaagcctcaccggcactccgcaaccggacatcattgacctggagcagtcaaaagacttcattctaaaaataccaacagagatagaggctacacgtaaaagacaaaacacaaaagcatagctacatgtcagacatgatatgaagaaaatcaaaacagagcattgatttatacctagaatagcttatattcttcatgttcatgttcatggcattccagatatctttttgcagctatttgtttactgggagtgggaaaaataagttcctacttatgcacagcatatttttatcatcacaaatgaacatcagggatcccgtgtgtggtccaagctctttcaaatattttaagtcatcatatactaaaaagctgtgtcctggcaatatgtttatgtcaaagcccaagcaagaggtcatgtgtcttttcctaacaccaaaatcactgggataccattttagaatccattaaaacattgttataagcagtatagataagtaccatttcagcttgtcaaggcatgataaaagatgtagggtacaagagatgaaatgtattatgagtaaaaggctaagcatattacttgatgacttcttgcttgtcgctgtgtttcatcagctatctcagaaggtgtaccatcacaatcatcaagggggtcactaatgacatcaggtggacattgtgtgtacttttgcacagacaagttttcagtgatgagtagctctcgcctcagtagccgattttcaatctcatcccattttctgtactgtaagaaatgacaagaataattacacaaacatccaaaatggtataagcatgaaatcaatgatttcagagggtgagtgagtagggtgtttctgctctcctctttgtactatattcctcttcttaatgaaatgatatccagctctagtgttttcaaaacagaaaaaaaaagataacatacccgcaagtggtgcttcacaagaattttgcgtattgatggtatgaagatagtaaagtcttctccaagggcatgtgcgaggcagcagagcgctt

SEQ ID NO: 3061 - DNA, 1056 bp, Zea mays
tcgacctgcagaggaatactcgtttctgatggctactaatcttgaatctgcatatcacttgtgccaaattgcacatcctcttttgaaattatctgggtcaggcagcattatattcatatcatctgttgctggagcgataggaatctttagtggaactatatatgctatgactaaaggtaacagccgtactcaatactaaacaaccttctatctcttggtcgtatatgcatgtggcatgtataaacagctaaaattcttgtttaggtgccattaaccagctaaccaagaatttagcttgtgaatgggctaaggacaacataagagccaactctgtcgctccgtggtacatcaccacttcacttacggaaggagtaagaatcttctattgtttcatattaacgacttaagtatatcatattccctccattctaaactataggttgttgtgttttttctagatatatatcttttgctacacacatgaatatacattatatctagatacatattaaaagttatatatttaaaaactagaatgacttccaatttgaaatgaagtatctcctacattataaccctaatccgttgtttcctctgactactgctttcttttgtgcagattttggcaaataagaactttgaggaacaagttgtgagtcgaactccgcttggacgtgtcggagaacctggagaagtatcggcacttgttgcttttctttgcatgccgggttccacttatattagcggccagacgattgcggtcgacggaggtatgactgtgaacgggttttaccctcccaagccctaggcggcagctgccatgtttctttgtgctgaggaaacgacaatagctgttgttcttggttgttgagaaaaaaaatctaataaaatgtatgtaaaggtaaggttgtcatgttgatactgttcattacattacataattctatcagggcaatgtgaagaacgttgtgtttagatctgaccggtgttagcaaccctgcaatgacgcgagctagctttgacagttaattttctgggatttttttttctaacaat

SEQ ID NO: 3062 - DNA, 857 bp, Zea mays
cagcagcagcaatagcaagaggatggagatcaacagcagcagcaacagcaagaggatggagatcaacagcagcagcaagaggatggcaggaaccggttctgagtccggggggaagttcctagacttcgaattcttttagctagttttgagttaacgatacttgttgcagttccagacttgtaggtgtagttccatactggagtgctagcgtttggcatgtctgaccggtcccaagtctgttgcttgttgagagttgcggctcatcccatgtcactagacagtagacactagtagttacttagtcaaagagtaagccatgaagtttgagtagtcgaaggaacgatttgtcatcgtgtctgtttccattacaagttatatagccttatcagattttttttactacatgatcagcaacgaaatacaccatgtagtttgcctaagcattctgtactgtaccaaaatgtgaatgtcccataatatgaagtggaacagaggaagatacagagttaccgaccacctcaataaacatacgctatacgttagtatacggtgcactacacgaccaggttctctgctgcgccgatgaggcccatgccggcggcggggctccggtgccgcatgagcacgcgcagctgcgcccgctggcactcgaggttggacaccagatccacccgctcctcgcgcgggcgcgggcgcaggcgcaggcgcgcggccctggggaactccacgaaccccttgatccccctccggatgtgcgggttctcgccgccgccgccgggctctcgccggtgcggcttaccgtgctgcgggctctgttgcccgccgtgctggctcgccgacttgctgccgttggggct

SEQ ID NO: 3063 - DNA, 1059 bp, Zea mays
aaatcagagactcaagtcctcctgcctgtggcttccgctacccagctctagctccagctccaactccaagaggtggcaagaacggctggccttgcagctccggtagaccatggtggtgacgacggtgtccaggacacaaaccatggcgtggatgtaggcgacgagcagcccctcccagagcatccccggtgtgaccctgccggtagccgcgtacggccgcatgaccctgagctggaacagcgcctcgacggcggcggcggcgaggctggccggcagggacgcggccacggcggtggcggcgtcgccggaccggagcagcatgaggaccgccttgagcacggcgtgcgcgccgccgcggccctcggcggccgccaccaccgtggccaggttgcacgcggcggacgcgttggccagcgcgacggagtacacgatcacgccggccgccgacagcgccagcacggccctgccgctgccgctgccggggctggaggtggaggtgggttggggagcggcgcccagcaggtgcatcgcctcggcggcgttgaacgcggcgagcagcgcggagaacacggcggcgttggcgagcagcagcgcgaggcagttggcgagctgcgtgcacgccatcgccgggtacgacgagcgcaggagctgagcgaacgtgccgctctcgttccggcggcggcagcattgggtggcgtgcggtggtggcggcgagcagtcgcagcagcggtgcacggcgcaggccttggccaggagcaggaaggagagcgcgaagggcgcggcggcgagggacgcgcaggcgcgctgcgacaggcggtggctgagcaggaagagcagctgcgacgccggcgggaagccagcggccacgagcgcccggcgcaggcgccgcgagagcaggtgcgaagcgcccagcaccgccgggtgcgtccgcgacagcagcgccgcggcggagaatggcagcgccagcagcgacgccgccgggtggtagtgccggatgaaggcgtgcagcgccgcgcggaccatcttgccggcgccgcccatcatcatcatccccacccc

SEQ ID NO: 3064 - DNA, 673 bp, Zea mays
aagtgcagaacaagtaaaaacaactaccacacctcaggtacctttaagcttctgatagcactaaatatattgcacacatagtttcccttataaaaggaataaaatgtgacattcagtaaatttcatctgagtctctagacagtaaggaaactggagggtttcagtatattctacaagttctgcctttctgggtgcccccagggatcaaaagcaggtctagttatcaaccaatgcaagcagctaaatttcgttaattttaggtaataacaatttcctaagaaggtccgaaataccacaaaagatccaacaaattaccttccacaaaaaagtcccactgcttttagcaactatatggggggtgtttggtttggggaaaacctccataatcttctcctcactatttgtttgatgtccggaatggagtggtttaatccatcactactcatcccacaaaagctaataattagtataggcataacgaatgggttgattccaccaaaattaatgggacgaacagatgaactcatgatgcaccacttcatctacgaatggggtggttcctcaaaccaaacaccccttaaatgtatgaactatgaagtgaaccagttttatcttcaaacaatgacaccatgagatgaaataagcagatagtctaaatacacttaaatataag

SEQ ID NO: 3065 - DNA, 763 bp, Zea mays
cagcttgcatgcctgcagagcctcctcgaggaaggcgagttgatgatggggagcgatgtggagaatgaggaacaaaagggaggcaccaagtccaaatatgaagcagaggtatttgagttgcagtatcctatgagttgcgtcttcttttgatacttattaggtgtggttttcttgctacgatactgtgttaatcatttgtgaatgggttgtcactatgattctagatagtgcaattacatttaaacaagttttattatgcagttaattttcaagaatagcctattgtttgaatccaaatgaaggttatgcttatgatgttaaattggttctaacagatactcttatttttttgctaccaggatctacaaaacgacataagcagttttcaacgttcttatttttttgcttacatttgtatttgtatgcatcttctaatgtcgatatacaccacaggttcttccaccagtcccaaaaattgaaatacagttggaaccacatcatcagactcttccagtagggactatttcagctgtaagtcttatatttcctgcgcaggtcccttttgtgatactttaatatttgtttttcatattccatgcaagaaaagttggtgttatccttatatttatgtgtatttagactatctgcttatttcatctcatggtgtcattgtttgaagataaaactggttcacttcatagttcatacatttaaggtgtgtttggtttgaggaaccaccccattcatagatgaagtggtgcac

SEQ ID NO: 3066 - DNA, 1110 bp, Zea mays
gggagataaacataccactgttgcggcccataagcttcacgacaccgatgccgttctccgcactttcagcctcgacatgagcagcattgatggccctctgggcctcctccacagcagtgtcaaatccaaacgacttgtcaatcacctgcataagcagttcaggatgaagctacaatcaggaatggacaataattagctatttttttttcaaatacgcaggaggagcagatcgtaccgcgatgtcgttatcaatagtctttgggacaccgacaacagagcacttgagaccccgtctccggacttcctgaaaccatgtttcagaaattttgagtcacacatcgtttccgcatctaacaacaattcccagaaccgtctggatgcatgtgttacctcataaattacagaagcgcctttctgagtgccatcgcctccgataatatagacctggttaatgccacggtcctgaagacaatcaacgattttggcagtgtcatgccctcctcttgaggttccgaggacagtcccgcctctcttatggatgtcgttcaccgactttggtgtcaacgcaacagtgtttttagaatagaaacccttgtatccaccctacacattacacacacataattagtccagaaatgaaacaaggccggctcgaaatgttttataagtatcatcctcacaacattagacaacataatgtggcaaggtggcaacatgagaagtctatcattgttttgctatcaataattgtaatcttgaccaatccaattaataaaataaacagttgagaaatggttcagatgttgtgatcccggattattcttttttttttaaaaaaaacatgttcaaattaactagtaaacaatgttttttcacaggacgaacaccattaacctcctcggtcctcacctctatgccgacgacgctggagacgccatacatatcatacaagccgcaaacaagctcgcggatgaccgtgttcaatcccgggcagaggcctccacaggtgacaatggcggcgttcacctcatcggactggaagtacacccgctgccgtggcccggcacgccggaagtgggtgcccctggcactggtcttatgaacaacaat

SEQ ID NO: 3067 - DNA, 1108 bp, Zea mays
tataagcttgcgaatccaacaaggatggtggcggctatatatatatgtgtgtgtgacttgtttgtctgaacaagaaacagagagcagcacgctgcatgctggaaactggaaggaatgcttgctcactcacactcacctgtcgtctgggcatcggcttgacgggggccggggagtactgcatttgcatgtagccgctcaaagcagccccgtttaagggagactgcaagaacaaggaaaatgcacaacaaaactgaaattagtcgcggcaccgtgtaataagcgagcgcaaacgaacggctgcgggggtagtgggtggcgcaccttgaatcccgtcgtggtggagaaggcgtacgagaagtcggcggcattgcccatctctgtcatctgggcatcatcagcgccgccatagccgccgttggcctcccccgagctcgtcgcctgggaaattaaggagcatatacatggcgtcgtcaccaatcacgaaggacagaggtgggattgcaagcacgacgcgtacgcgcaacgcatgggcaggggcacgccacgtgctaccacccaccctaccttggagtagacaaagaagggcggcgagctggccgtgtcctcgagcagagacgacgcggcggcggcggcggcggcagccctcttgttcttctgccgcctcgccgcggcggccgtctcctcacgcctccccttcctctccgcattggcgtgcgcagcggcggcgccaccttcgacgtcgttgccggcggagctgtgctggcgcgggccggaggaggcgtcggagatcatagacaggtcgtcctcctccgagtagtactcgcagtagtacggctggcacggcttgccgctgaagcgcgcggtgccgcaggagtaggaagaggtgtggtcgtcgaggtaggtggtccagccggactggcagccgctgctgcactcggagctcgccgccatcgccatcgccagcttctcgtccattcctcccccaccgcacagctgcgccggctctcgaacaatgccacaccgcacgtacgcggcgtccctgtctgtctacgctcttctctactctcccacccgtccacccctaacgaatccctcacgagccaagcca

SEQ ID NO: 3068 - DNA, 1033 bp, Zea mays
cttgcatgcctgcagcatccatgcagactggatattttgacttattgccatgcgtccataagctgatgatgtatagatgcctagccttacttgccaaggaccacaagttcttgaagtagtaggtgttttaaatcattgggcttgttcgctttgctctcaatctatgtggattgagtgggtttaaatcctaaacaagtcaaaatctttcataattttttccaatcccatccaatccacatgggataggaataaccgaacaagaccttaaatggaagctcctggtttcttatgttgtatggttttgctaactgctaagcgtaggattagcaggtgccaggtgtggttctgttctggactaggcaggctcttatctgggctttagtacaactcctggtttcttatgtttgatggctcttatttgtgtcagcaggccggaatgtttaattgcccccatgtattgttttggacaggcctaatggtagtttgaactgtgtatgtgaggtgcttgttcatgccttatgcagaaataatactgttatcatttgaccgtcttcatccactccaacagcactctgtcatgctatatggagcttgattcaattctgatcgtggaagaggagggaaagcccgattagataatgttcttgggtaatagatattgacagaaggaaattctgagactagtttctttgctagcctatgcggcatggacgttcactttctcttgaatctctgcaaagctaattatactttaccatcttcctttttaaaaggaaattaagatattctagaaggctgcataggctagcaatttttaaggtcttgctacagagccttcttcatggggtccatcttctttgagccatgaaaaagattgtggaagacttgggctccccctaaatgcaagtttttcctttggttagctataaggaataaatgttggactgctgacaggctccaaatgagaggattgcagtactcggtgtgttgttccctatgtgatcaggtgcaggaaacaatccaacatatccta

SEQ ID NO: 3069 - DNA, 728 bp, Zea mays
acgaaggccgcaccgtgcagaagtaccagctcaaccgcgtcgtcagggagcttcggaagtacggtcgcttcaagcacgccctggaggtacaccacccaacccttgtccacgtctccaccgccgacgcttcggaagctctcccactcgcctcctgctcgatgtattgccaacctggttcctgacgtgaccctgctcgtcccgcgctcaaaatgcagatatgcgagtggatgcggacccagccggagatgcggctgcttccgggggatcacgcggtgcaccttgacctcgtcgccaaggtcaggggactcgccagtgccaccaagttcttcgaggacatgccggagcgcgccaaggggccgtccacctgcaacgcgctgctgcattcatacgtacagaatggcgcaagagagaaggccgaggccatgctggcggagatggcccgtgttgggtacctcacctgtgccctgcccttcaaccacatgatgtcgctctacatggcgactggtgagctcgagcgggtgccagaaatgatcaaggagctaaggaggtacacactccccgacctcgttacctacaacatatggctgacatactgctccaaaaaagacagcgtgaagagtgcccaaaaaggtccttggtctgatgaaagaagactgcgttggttccggatgggataacccttaactttggtcggtggcatttacattaacggccggactccctgtgga

SEQ ID NO: 3070 - DNA, 1281 bp, Zea mays
ttggtagcatgtaggaatttttttttacttcctgcttttgctcaactaccggcagcagctacatatgggagtataggactatgtcgaaaacaagtgctactctattaggtcaaaacagtaccatggcttgagccttgaatactaacagctgaaacccaggctaagttatttccatgtttaaaatagttttggtgcttgaaactaataaatgtatacaaaagcacgataaaatgaataatgctgtttttttcaagcagacatagatgacctaggaggtctgaaaaggtagaaatcatccaattgaaaataaaactctagctatggatttgaaaaaatcagaatcgccaggaatctcatcttcagtaatgataaggtgctaaaggggacaaacccagtgtcggaggctcccacatgagtgaggtctagggaagggataaaccgaggcaagcctccctgcttagaacccgcgacctggtgactcagtaagacaaatcccgtgcatcaggcctgcccttccatgataagatgccgattcactaaaaatacattcaatcaggccacaacaaattgaataggccacagcaaaatgaataaacaacaacatacaccatgattacacaataatcatgataaatagacttaagaaggctaataagaatttttctcaaatctcagagaataaacagccagttgattcatacagagcatcttagtttctggtgtgtcaacaagactagcaatgcctttaaaaggggcacaagacatccggctgaaaatagacaagagcaagtctagctctggattgacaggatgggacagaagcaaatctgatcttcatcgttgacaattagatggcaattcactcaaaattgcattcagccagacagaaggaaaccaatggaaccacaaaacaatggctcggcgacaagagagccgagttatattcttcttcagttatataatcctacacataacagaaggctactgagcgatatatacaatcacgagcttaaatgcatttacggattgctaacaaaacaatgactgaaactaatacatctagccactagacagaagttcttaaaagcatagcagggaaacgaaagttatgtaccgtcacttgttttgaacatttggcaagcaggcagcaggtactgcatccatccccccgcagacaggtagcttagtggacgcagacctggtgcttccaacgcattggatactcgagacatcgcaggcaccttgtcccaacacctggccgctaacagcgccctgcattcc

SEQ ID NO: 3071 - DNA, 1920 bp, Zea mays
aacttgaagttgcatgataactcggggaatgaaattccccataacattattgctatttcagatatggtaattccatggaatatcatatctgcacagctgagatgacactcaatctctacttttgttcaatatgctatgtattttccttgtcttatgaaataattttttttttaacatgaagcatggcaactacattaatactactgtttttctgaaatttagaatggtgaagctcctaagagaatggagaatgattgttctactggaggaccatctggagaaagcacttcatatcaatttaatgaaaataactggctttctagtgagcaaactgcaaataattatttctcaagaactttcagtagtggtgttgttcctactgagtggggaaggcccaatgcaccactttggggtggtagggttataggacggcggcaagttagatgcattagaggaagttcttgcctatctactgatgaatacaacacttttatgaatatatttgagaggggttctcttctctactgcaatatgtcctttgatgcgctgctaagtgtgcgaaagcaactcgaagaatttggattcccttgcaaagctgtcaatgatggtctatggctacaggtatttaaagttttaaactactccctggccttgtggtactttgttccttttaagagtgtttataaaaccttgatgctttgttattgtagatgcttctgtgtcacagggtgcaagcgatagttgctgacacttgcaggaactgttgccttacgaataattcttgtgcttgcaagcaagcatatgtgagctcacatacacaccactacaggcaggaacatgaccggagcagtgtttccggcaccataggtaatgtctaccttgcggatgcccagggcgatgggaatggtgtacttgggcctgtccgtgttaacgtaagaggagcagttgatggccttgccggtattgggagagggaactcaaatgtgcctggtgcagcctgggctcctacacgttacgtcttctcacgtgtcccttacgggctcggttcaagaaatgcccagcaatttgccaatgatgaatcagaacctagaattgaccgcaatggagatatttcagcagatggtctgactgcattggttaaccttagccaagaaaacagtgctgcccatccacaggctgaaagtctatttgagacagggatgcagacaagatatcgcagtgttgcatctgtttccactccaggtggttcttctgtccagatgcaggagtcaaaggagcatgaacttggatcagattgggaaaccacaaaggatgcaactatatcattagacatgaaaacacctcttagccattttccacctttccgctttgggtaagactacttatttttctgtttctgtgattctgtcatcaatgagtactgcattggatggtgtctaggtaaagtatggttgttatttcttccatttttttagaatgtcccagttatctcatgaatcatttgaaagtttgaggactgtttacttctagaataccaattgggcctattgccttgtcggtgaactgccatggcagaaataagaaaagtaaaattaaattaaacataaggctagctaaccaaggcatgttctgctgtttgttctttgtcatatttaggtagtaaatgattagaattgggttgtgcacattggttctttgtttctgacatggcttgacctttctcacagggttgagttcgaggatgtgcacaggcttgctgatggtcaagtgaaacattcgactgaagtgttttatgcaggctctctatggaaggtcagcattgttttcctgaatgtatccatccttatatgggcaaaatccaatgaagtaattggtatacacatgtccaggtgagtggtcagccattcaatgatgaggatc

SEQ ID NO: 3072 - DNA, 1171 bp, Zea mays
atcaagtttcgagcctactcttttcactacagaacatgcttctgcaacaccaccttttgtaagtgcctcatcaaggagtctagcccaaatttctcgaagaattttgctatcagcatctccagagtaattagcgaagctcagcatttccaggcaaacctaacaaaaaaagcatgccaagtctttttgagagaaaacatttgctaataacccaacatagatgcaagatttggtagatacagggaactcctactaccaacggcaacaaacagacaaatagtgcctaaacccattttatgtagagttaatttagaaaccttctgtcctaaggctctctccaatcagtccccttatacatctccccttatctatactttctaatatattttactacctacccttaaaatattctccccatacatttggtctccaattattctccctatacaactcaccttatacagtatacactataactcaattaattaacatgtatttgtgaccttttgaaattttaaaaaaatcatacaatatttgtagtaccataatacacactattatcatgtcatggggcttaattagggttaaaacatgttaattaacgtatagggggagcaaagtgctccccttatatacattgggagattcctgtctccctgtacatagggggagctatagggagatccaacgagggggcttatagggagaaccgttggagaagaaaaccacctacacccgggtggtaatgggctttaaattttacgctataaaatttaagaatcagatcggattaggatcaagctctatttatattcacttttgaactaaaattaattaaggtctcaaacaaattgtgaagaaacatttggatcgtgatccattattccattaccacccctacctacatctccccctctacatatggttaggagagctttagggtgtgcccttggagaaagccttactgtgtatagttacaagtaaatagggtttgatgcacccaatactataagaattaaggataagaatacacacaaggtgcttaaggccatgtttggttgagttgtggcttctaaaaaaactgttgtaagctatgggctgtagaaaaagtcagggtgtgccgtagactgagaatgtagaaaaccgtttggtgaaaaatgctgcaagcagcaag

SEQ ID NO: 3073 - DNA, 1012 bp, Zea mays
tctcgatgcagctcactctgagagcttatttttaagtaggatttttggttccgaaggtagatgtcctctccatctgaaagaagcttccgacaaaatactgaagagatgtggtggcctaccactggcaatcgtcacagtcgctagcctattggccactaagggtatcacaaaagaggaatgggagaagacgctcaagtccattggttcagcacttgagattcaagatacagacgtggaagagatgaagaagattcttctgattagctacaacgatctcccctaccacttgaagacatgcttgttgtatctaggcgtgtttcctgaagactatgagatcaagagggaccggttgataagaaggtgggtcgctgaaggctttatcaccgcagaaggtggacaagacatggaggagataggagaatgctatttcaacgaccttatcaacaggagcatgatccagcctgttggcattcagtgtgatggtcgcgccgacgcttgccgtgtccatgacatggttcttgatctcatcgtatccaaatcagccgaagaaaactttctaaccttgtgtggtgacggggatcacaggatggcgcgacgagataaggctcgtcggctatccatcaactaccatgcccgggatggtattgtagtgccagagaatatggtcgtttctaatgttcgatccctcacaatctttgggcacgctgaggacatgtctgctctttccaacttcctgttcttgagggttctagatctagaaaacagggtggtgctggaatacaattaccttaggcacataggcaggctacgtcagctgaggtatctccgactcagttcaagaagaatagctgcgctccctgaacagataggagacctacagaacttgcagaccttggatctgaggtggacaaggctgaaaagattgccacggagcgttgttctgctacgccgactgacatgcttgctggtcaacagtttagaattgcccgaagggattgggaacatgcaagct

SEQ ID NO: 3074 - DNA, 1105 bp, Zea mays
aggaaaggtacgccatggaaatcaaatctgaaacatctggccatcctggacaggtaaatggtgtttctcaagtaccatattcaaaagtagaggtgcctgttgtaaaaacagacccacagagttccagcagccatcctgttgctggaaaacctgttactggccttttggacaaaaactgaagcctgggtgttccaggtttgtattcggggtgttgcaatgatcaagggaatcatgttttcaccctcctaatttgttgatcagatacatgtatcagtcttgatagataatctagattttagggaattccaatttattctcattggtcagagtaagtgtgatgctggaatgtggatagttagtttagtcataaatgccaaccttgtcgtattttctacattgtagtttctcccttttcttttccttgtctacatttcatcattttgccatccacctaattcgagccaagatatggctgggtggatgtttatttcaaaataaaaaaaaaaagtcaaaaggaagaaaaggtaacactggagagatgagcctagatgtcattgttgcactgatgctattcttaactcgcagatctttgtagcaccagcaggtgctacaccgattccatggctttacaacttggagctgccattgtgatatttgattgctaacccgcaagataatcgtaactatctccacattcacaaccgctggccattactgaatctctttggcacctttttcgtctttgttgcgttgttttccataattttagatgtaaaatacccccttcgcccttgaacgtgaaattcagtagccgaagcattcagttcaggaaggattcgggcgtatgttcttattaggctcgtacaagtccaagtcctggtactaggagaacgattttaatcacactaacctgtacagaaaattggtgatgcttatacaataaaaaatgggcttgcatacagttacattgcataattacattcagcatgcttgcagagaacccatgacagagtgcttgctgtcaactgtcgcctacaaaggttactgccccaggattcgagatcctgagcttttgatgtctgctagaaagtctttcctggcaggc

SEQ ID NO: 3075 - DNA, 802 bp, Zea mays
atattgaagagcgaagatgtcaaaaaaaaatgtgacctttatattcacaaatcacttggagacgctcggtgtcacggtatggtacacctgacattgcaggtattcaacggagcaaaactataggtaaaagaacgccttaaatcccgtcttttgaaccgttacaaatcactagaagaaatgcgaaaaatgacgaaacttaactaactactcacatctctgggcatggaagaacatgagcgccttgtgcagcgcgacggtgtagtcgtcgggcggtggcagcgggcggtgccgcctggggatggccttggcgatcccggccacggcccccgcgaacacggcggcggcgaggagcacgccgagcgtccagacgaagagcttgcggctgacgaggaggcagccgatgtcgacgtacttgttcttgttgcggggctggtcggcggtccccgccagcagccagctctgctgcgtctcgtcgagcgtccgcgacagcgcggcccggtcgatgtccaggttgcggctgcggtcgtcgtccgtggccgagtcgtggcatatctccagcgggccgccccagggatccctcccgtacatgctcatctcgcccccttccaacaggctggtacagagcctccccttcctctagctcctcgtgagaccgcagggaagaggtgggaaggaattgctggaagagaggccgaccgagtctgaaccgtgtcgggggaaggaaaggtaccattttattgggaccggacgggaccgaaatcacggagggggcgctgtctgatgaatgtgctggactggctgc

SEQ ID NO: 3076 - DNA, 740 bp, Zea mays
gcatgcctgcagatggtatcatttgattcatttcctaccaatacgcagaagatagccacaaaaagcgttacatgacatcaccgtcaagagctcaccttggaaaggcgaggcttcaacccttccaggggtgatgtggcctccccgccagcgtcttctggcgggttgatcacctcgctctcgcctgacttgtcctcattgtccttctcctcatgctcttcctcaccctgcccccctaagctagagagcattgcgggcttcccactggccgcatcctcgacggcgaccgccgcatccgttgcacagatgatgtcatcaaccgcatcgcccatctcgaccaagccgccactgatccaccgccgagggaaacgaggtgcacgcgagatcagaaacgccgaatgcgccgcagatctgggccaagcaaccgcaagagaaatcccggtggcacctatggggctggagggggtgggagaatgtttctttacctcgcccgtggggaatgctagggaatgacggtgcggaggagcacagcgagaggggtaagggaggcggcggcccacccgctttacgggagaagggccccctgtggctatggaaggaaaggtgacagcgggggatgtaagtgcttctggttgtgtttgggccggaactggttagttacccgtcgatcaatctcgctgattttaagggttccctttgccgttgttctccatatatactggttgcttttagccttaaaagac

SEQ ID NO: 3077 - DNA, 1254 bp, Zea mays
aaggaaagggcaggaagaagtgagtgatgccaaggttgagtggtgtggccgtgtgggagagactgaagctcacatgtcaatacattgggacatggtacctactgttagagtggacacgctaactagttcaacctaaaagtttaagctgatggtagaaggtaatcaatccacttatacatttcaacaccctcactcgcgtgcagtcagagaaaaaggcacaaacgtggaaataaatgggtggaggcataaataaaaccactgccaggatttgaactcgacacctctggccttgatatcatattaaagtggacgcactaaccagttcaacacaaaatcttaacttgatgggagaaggtagtcaatccatttatacacttcaacacctactagagattacacacagcctttaacaagattcaatgggttagattttttttggtggggctggggagggtgcgaggtcacatagactgagttaaccagaatatctacgaaacttaatttttttagggatctgcaaaacttaacttggacatgcagtttttttatggttctggaataatacctacagtttcattaaaataactcaatataaagtttagcaattaaatcttgactgtaacttcagtcatagcaggattcccatatgtcacatttactccatatttggacagttaaaacaacctagaactgcacagttattgttcctaggatgctgcaatctcgcatttacttactcttttcacaattgcatagttacattgagctcaatgagcttcaaaaatcatcaaaacaacaaagtatgaactgtatacacttacggtgtcaacaattccttcctaaaaggtagtccatcagtgatgacagtatatgtgacaaccgcagccatgaatatccccaaaatgctgaaaataacccttccaattacaacataagagcactttctttgggatagattaccttgcctgaaaatgtttcaagaacaaatgtcaagacaaattagcaagaacttaattttgttggatatctcattcaatcaacagggtcaacatgtgggactacaatatgcagagtagcagaaaggaatatggtggaacaaaatttgctgcttcagtatatcagacaacatttagaagcatctaacctggggctttaagtatgctagctaagtagcccaaggtatataaatctaaataactagtcgtgaagattttggcactctacctgataaatagaaggtcaagaggatcttgg

SEQ ID NO: 3078 - DNA, 1211 bp, Zea mays
agtagcgctgaagagcagcctctacggcatccacagcatcatattctgttacctgaagaagatcaggaattgaccaagccgttagacactaataaattatagaagcaatactcctaaatgaaatacataaagagaagggcaatgaggggaagacgctagagttataaactacacacaggcagaaactctgcaatcaatcataaatgcaccctacgagtaaacaaatggtcacataacttctcccaatgacaatcattatagataacataggtaatcgcaattcgtaaggtgaatcactaaggaggcttccaactttgtatatacactgatttggagcagtttgaacatagcctacatattatttgcatgaagaaagtaacaagactacataataatacaagatggaatcatcagtgcagtcttctgagtagaaagtgtataacagtagagatggctgataagaatttttaactcaccgtaattggttcctccatgtccaacatactaagaattgttgaccagcatttctccatattcaccgatgcaccaaacagccaccctaactaaactttcctaaatatatcaacatagaagagatctatgcacattagatacataatccaagagtatacatgacaaagaacatttattatttctccacacctgttcactagatgcttgcaatgctttatataatgacctgactgaatatccttgaagttcagatgcattactcactagaactataagagcatgccatacatcatccttcacatgattaccagcctgtggacataaaaaggtacagtattaattggaatctttaatttacatctgcaacagaaattcatgctcatacatttacagctcaattatttacttagcggaagggaaatcatatagaaacaaaggtgtgtgcaacactaaatgtggtagattatttggcaattggcattttggtttagtaagttggtcttgaatcttttcactggtggagttaccacatctggaaggaaaaggtgtgggtgacaaggattcgataatagacattgctggcactgtgtagatcatagatcagaactcccgaacatagtattccagtgaatgcttaatagtagtccgtaaccctgatcaagtatgctaatctttctctccttaagttaggtaaaaaaaacaagactactctactgaatatacgagcaactagtata

SEQ ID NO: 3079 - DNA, 772 bp, Zea mays
atcttgcatgcctgcaggcatatctgttctgacatggtgatgtaacctttgataattatttgaagcgaactgatttcttcctctctccacacgtccagtgggtggcctattcttgcgcaatttctacagcatccaacaaggcagacaaaattatcatgaatacgggacaaagctaaagtaatcctactatgtagtgaactcataagaataatgccataatggagacatcttcaaggttattgcatatgaagaagggtaataactctaataacatgataaatagattacaaggagattattatgtgcacacatgtacaacatttggaacagaaagaacacatgggcaagtaacagatacagattgttcagaaatgttattttaagttctacaagcatatttagaatgtccatggagggaacatactcggtcagaaaagtaggtgcctgttccacgggtcctcatagccataggatcatctggttgaataaatggactccacacaagatagccagatgggtaaggagggcaagggactgcaccattcatgctagcatatgaatatggattttttcttcctcgaccatttgaagggcacgtgttctgacattgcagggatggtggagcaggccttccagaggaaaacgggtttactggattatcttgctggaacccttgcgcatactgaagattatggaagtatgtctcaaaaatctcccatggagatcttttcaagatgttatttattgggttccccccaaattggggaaattt

SEQ ID NO: 3080 - DNA, 1203 bp, Zea mays
tgctggttgcagccgccggcgttggtcatgatggctttcatggaggtgagcaggcggccgtaggtgaccccttggggctcgcattccaccgccttgatgaagctgtgggtcatggcccccaccgtcgcgcaggcctccggcgtctgcaacagaacatggcgcgcgtcgcgtgtcgaaccaatcgcaaagagattagatcgagcgagcgttacgttcatggcgaccatatatagtaggagtataggatgggtgtgcagtgcagtgcactgaccatgctgaacttgcttttgccgtcgctgtagccgctgataagcaccgcctggccgccgctcgtgcccttgcagacgcccgacggtggacggtgatcctcccactgccagttcccggtcctagacagacagagagaggaatggagatatgttttagatgtacggccgggcacggggatttccagcaccggacgacgagcttccaaatataattacctggacatgttgcagaggaaggggaggtcgaggacggaatcactgtggcacgcgtcgaccacggcgtggagcttggcgccgggcaccagcggccggacgatggtctcgttgatctcgtcgtccaggatggggcccttctggaacgagtccaccgggcagatggcctcgtcgtacccgtcctgctcgtcgcagtccgcgtcggcgacctgcgcgcccagcccagagaagtggaacaccagggagtcgccgctgctgcacccctgcaccagccactgcatcgccatccggatgttgtccttggtgggcacccggaacgggtccttctggtcgtctgcgtgcaccggtccggtccggtccattcagttccttgcgacaaacagagatgcgtacgtggacggttccattgcataccagtgagcatgatgatgccgtcgctggggaaggcgaagcgctggcagaggagctgcctcatgcacttgacgtcgttgatggggccccgcagctcgccgcagccccggcgcgcgccgccgtacgtgatgccgatcaggacggcgcgcttcttgccgcggccgccgcacggcgggaagcccgcgacggaagccggcctcgtcagcgccggcagcgggagccgcgaggacagcgaccgccggatgcgagtcacgccgcagcattgcgcgcactggatggcgcgctcgccggcgcacacggtcaggctcgc

SEQ ID NO: 3081 - DNA, 1281 bp, Zea mays
agcttgcatgcctgcaggaggcagcgctgtggccgctgtcgtgtggaccggtcctactaaatggtagggctggaccgcatgccccctagggatggcaatggatgtcatttatccgcgtacccgcggataaaaaactcgttgggtacggttttaggtacgagtctgtacccatggatacggatacggatagcacttgatatccgcggatatttttaaaacggatacgaaaaatcaatatccatacctgaatacccgaatatccgttaaaattacacccatcccacaggcccacgggccacatcgccacagcccacaacgccacaagcattctccaggctcccgggcacagagcgcagatctccagctcgtcctcagtccctgcgtcgctgactccctgcacagctcgttctcagtccctgcatcgctgactccctacgcgcctggccgcctgcgacctgctcccctcagttcctgcatgtgctacctcccctcagtccctggctccagcgcggctgtcccggtgtaaagtacaggttattccagatgcaacgacttgttgattgttttttcacccaaatacaagtacatgttattccagatgcaacgacttgttgattgtttgaatttgttagatttatatattttgtatgtgtagtgggcaaacggatttatccgcggatatccgttacccgcgggtaacggatgtggatactgtttgttatccatggcgggtaacgggtacgggtttggatatcggatataagtcgcggatatggatgtccagagacactatccgcggatattttacccattgtcatccctaatgcccccaatcagtgactgactgctgctcctgccttgcggcccttgcagctgctgacattctcccagccccgtcccagtaaaaattttttttaaaaactaggagccggccgcaccctgagcagggtgagtgagtactcggctctctagcgccgctgtagtaaagcggagcaagctgccctgagtagtgagtgagtagtgagtgactagtgagtgctccgctccggcgctccggccaccaccggcctgtgaacgcctgagccacgccacgacgcgcagcagaagagacgctgtggctgtacagtagcgtacaaacgtccgtcgtccgtccggtaggagtacagttcagttgttgagcattgcattgaacgcgcaggggcctggcgggctgtcctctcgcctcgcgggccaccgggaacgtcagtcagtcggtgatcctacgcagctacgcctacgcta

SEQ ID NO: 3082 - DNA, 994 bp, Zea mays
ttttcgcgcggctgaactaccgcgaccgcgccagcatggcctcagcgtgccgggcttggcgagcgctgggctcgtcatcctgcttgtggagcacgctcgacctccgcgcacatcgctatgaccgggaggtggcgtcatcgcttgcctcgcggtgcgggagccttcgtcggatacgcctgcgcggccacgaggcagcagaggccgtcccggccctctgcgcgcatggtctccgcgaggtggtggccgatggctgccgcggcctcacggatgccacgctcgctgtcctcgccgcgcggcatgaggacctccagagcctccagatcgggcccgatcctctcgagcgcatatccagtgacgccctccgccacgtcgctctttgttgctcccaactccgccgcctgcgcctctcgggtctccgtgaagctgacgcggatgccgtcggagcgctcgcccgctgctgccccctcctcgaggacgtggctttcctcgattgcggcaccgtggatgagaccgctcttgctggtatccactctctccgcttcctctctgtagcaggatgccggaacctgaaatgggctactgcatccacctgctggactcagctttcctccctcattgcccttgacgtctcccgcactgatgtttcaccaagtgctgtttcacggctcatttcccatgccaaaaccctcaagcttatatgcacgctgaactgcatttctgttgaggaggaacagcttcataatcctgctgtatttagtaactctaagggcaaggtcgtgctaacgattaacagtgacatctttagatcttttgagaccatgtttccaattgtggatgctaaagagcacggggttttccatcagtgtaactggagtcacaaagacaagatacctggtgatataacaacatggctcgagtggatcctgtcacagtcacttctccgaattgcagagtccaacccacaaggcatggatggtttttggctgcaggtcga

SEQ ID NO: 3083 - DNA, 1083 bp, Zea mays
atctctttccgatgatgacatccccacactaaaaatcatcaagctttgtagaacctttcagaagtattattatgaataatctaaagatacttttaggatgcaaatttggcaacctgtcacaaaaggtattcaggtaccaaactaccaaggaaagacaaatgtatggaaaagcaaaggttatggagagaaagacacacactcaacttattgtttcttgtgtggcatctttgaagcagtgaaagatagcatcagcttagcttggcaacaatttcaaactgtttctaataactgtgcagctttgtaatcactattcctgaatacaagtgcaccaaactttccttaatatccctttgcttgatccataggctgataatctaaaggtacttttagaatgcaaatttggcaaccagtcacataaggtattcaggtaccaaactaccaaggaaagacaaatgtatggaaaagcaaaggttatggagagaaagacacacactcaacttattatttcttgtgtggcatctttgaagcagtgaaggatagcatcagcttagcttggcaacaatttcaaactgtttctaatatctgtgcagctttgtaatcactattcctgaatacaagtgcaccaaactttccttaatatcccttcgcctgatccataggctcacatgcaaatcacctatctcataatgttgattgattaggcaatactatttacatcattataattcctgtccatgagtacaactggacttctatttggagtctaagggagtagcaaagtacatggtaaatgaaacatccaattgcaaaagaatactgccactttgtcaaatgacactatgacagttcaaatccattgtctgtccagtctccagaccttacaagccaaagggaagcctggctaaggtcaaactatgcacatgcatcttgtccatagctgtctgttgagtttaagatactcctaaataaaatacatagataacaaacttgctgaattgaaaatagtcgatttcacattattcctgggtgtgtctgaaacatggcactaactctttaacctcaccatcagctagagaaaaaaca

SEQ ID NO: 3084 - DNA, 1176 bp, Zea mays
ttttgcacaagatatctcgagctagattacacaaactttaaactactcctatcttattagaaaccaaacttttcttttttataaactactcgtatataaaagtagagtgcaggtcatcagtttggagacgcagagctgcactatggccagcttctccttgaaaccacagcacaatggcagcagcagcaggatctaccatactatctgtagtgctactgcctccgaatggaggtcgctcctgcggtcccgaagcagtgtttcatggagctggaagaagcacacaaggttgcgattgcgatgctgtcagggttccaatgggggtgatgacagccgtctgagccaaaacaccggcattttccacccatcgatatggggggatttcttccttggttgctctagcagccctgaagaagctgctgcttcgtcccaacaaaaggttcatttcatctatctctctattctatatatggactgatcgaccacttatttcctgtcgtcccactatattaggcttggatggaacgatgcgatgaactgaaggaagaagtgggtcgtctgatggtagtagaagcaaactcaccattgcatgagaggctgcatttcatagacgcgctggagagcctgtgcttggaccacctgctgaaagaagagatcggtgctgcgctgacgcagatcgagaccgccggtgtcagtgacgactgcgacattgggacggtctctctctggttttacttgctccggaaacaccgccgcagggcgtcgccaggtaaataatctcagccaaaaaaacacgcacttgaggttcgtgaggttcaaattaaagacgccattgctgcatgcatgcatgcagatgtgttcgtgaggttcagagacgcggagggaggtttccaggcgaacgatcctggggacctactgaggctctacaacgctgcgcatttcaggacccatggggagacaatactcgatgaagccatcgcgttcgcgagaagccgtctggagatgatgctgccctacgtgaaagggccattgttggcgcatgaagtcagatcctcgctggagatcccgctgcctagaagggtcaggatctacgagtcaaagtattacatccatgcgtatgagacaagtggaacgctgcatgagaaggtactgcaacttgccaagctgaactccaacgtt

SEQ ID NO: 3085 - DNA, 749 bp, Zea mays
ttgaggtggacaaactacctgaggccggacatcaagaggggcaagttcagcttgcaagaagagcagaccatcatccagcttcacgctcttttaggcaacaggtgagtaccaatgaaattagtcaactccagatcgttacaaagtgatcctttggcttatgtatcttatctgccctctttctgctaagagaagactgctgccagccacttagtgacaatttacaaattagcaaagagaagaaatgatagccagtgtatttatactgaattagaaacgattttctagtgcatttgtactttttaatctgccatttcatctccccttccttcacaacgtagaatttcggcacacatggtatattggtagatgaaaacaagatgttaatttcaaagtatacctttgtttcatggtactgtttcaggtggtcggccattgcaacacatctaccaaatcgcacggacaacgagatcaagaaccactggaacacgcacctcaagaaaaggctggccaagattgggatcgatcctgtcacccacaaatctacctgtggcactctcactggcaccacgaacgacagatcagccaaggccgcggcaagcctcagccacatggcacaatgggagaatgcccgcctcgaggctgaggcacggctggctcgagaatcgaagacacgaacagcaacaccgacgccatctgcactccatgcgcagccaatggatctacctgcctctgctggttctcctggcttg

SEQ ID NO: 3086 - DNA, 923 bp, Zea mays
aaacactaggggagattccatcaaagacaattcgattccgatgattccaaataatccaggctcccaaggcaataagggagttgacacccttcataatcatatctccagagccattgtcaatcatctaccaccaacccgtaaaagacaccgtactaggtgtaggagccagattttgtagtctgaaaatgcacatcagccggaaccagaattctctcgcaaaaacacaagaaaccaaaatgtgatccaaagtttcagactcttggtcacaaagtggacatttctccggatgatcaagtcctctctttgccaacctatctgctgtctagcatctatttagcaccgatagccagaggaagaagtggcatttagagggggcccaagttttccaaactctttcatagtgaccgaaatgcacagacccgatgaacaacccgtcatatgcagccttagcagaataagtcccatttgcagcaatactaaaagtatgtttgtcttctatgcctggcagcagctcaaaatctgaaattaaattccaaagatgaagataatccaataatactcccaccgagagtgatcctgtgatatcagcaatccatcttctatctgtcaatgcttcctgaaccgtccttctgttagtgatttttttcggaatggtatcaaataatctaggaaccaaatctgctattttctgcccatgaatccatttatcagtccagaacaaagtattagccccattaccaacctttgaagtcaacaccatcgagaagaaagcccttgctttatctggaacctggataggagggctgcaccaaggtcggttaggctcagtcttttggagccaaagccatatcatgtgcagggcctagataagttctttaagactagaaatgccaaacccgcccagctgcaggtcaactctagag

SEQ ID NO: 3087 - DNA, 1299 bp, Zea mays
ctagccaagacgctgacgacgaaccaactcttttatgtaagggagcagtttgaactgctgggcccaaacaagaacggctatatctcattgcaaaatctgaaatcggtcagtaattagttttacgtttctcgcgcttcactgtgtgtgtatatatatatatatctttttctctttcacctatgcaattgctcaaaggtaaatggaacgtgcaggctttagtgaagaactccaccgacgcgatgaaggactctagggttgttgactttgttaacacggtaagtcccccggagacccagactaccttctgttctaagtagtgttggtacatgagatgtctcaaacaaaccgcttactggcgtttcgtcgcggcactaggtgtgcactcttcagtacaggaagctggacttcgaagagttcgccgcttccgccatcagtgtttaccagatggaagccttggagacgtgggagcagcacgcgcggcgtgcgtacgagctgttcgacaaggaaggaaaccgacccatcgtgatcgaagagcttgcatcggtacgactccgatccatccatctgttgagacaaacaactgggttcactggacatcgcgtcgctcacgttggtaagctttggtttggcaggaactcgggcttggcccgtcggtgcctctccacgttgtcctccaggactggatccggcacgccgacgggaagctgagcttcctggggttcataaagctcttgcacggggtgtcgtcgcgctcgatccccaaggcctagccatgcgccatccattactcatccctgcccatccatatccatcaagaaccaaggagatgatgaccggtggctaagccagtctctggctggtgcgtgcgtgcgtgcgtgccgtgtgtattgtgttctgttcgagagtggctggagggtggtggacggcctgaaactgttgcatgatgaggagagatgcttggtagtcctgtgaggtaaaagaggcagttagaaggctggtgcctgtgccttgtaccacttgtaccccatcccttgccacgtggattgctggcggcggcggcgtcgtcgtcgttgtactgaagtaaggtgctgtgtagacgagtgtacagatgatggaggataggagaaaatgagtactacgatggaagggccgtaagatttgcggctgctgtgctgtttgtcaatcgccaatgggcaatggctgcttgcagtgcagctgtggcctgtgtcgagctctctcctctttgcctgcgccgtcagagaacaggaacgtcgcagcgcgtcactgcaggcatgcaag

SEQ ID NO: 3088 - DNA, 1038 bp, Zea mays
ttgagaaaagtgtggccctagtccttgtgttcttaagatggtcaggtctttagtttgttcttttatttcctttgtaatgtaatgatttgctatgtctgccgcctttaacggcggtttgttttagtcctcttcggaccttttctttccttcttaatataataatgcgcagatcttctgcgcgttcgagaaaaaaaggatagacttagctttaattcagttctcatctgcttattctctataaacttattcagtgttaaataaatagggtactgaattgattagataaatccatatttcaccaagacaattgtagtttttttccatatatattatctgctttatcttattaccagatgcccatgttgaggcatcatgcttaaattaaacacataatactgcttgcccctgagaaccccctttttttcttaataatctctgttgttgtttaaagaggcctaaattttatggaaaaaaaatcacactttacaggtaaaacagaatatatctacgctagagtcagagagtctgctcgttttgctgatgaggttatttcttatccttcatattacttgacagaagattgtattggatacctgaagtagggtcttagttggtcaacagaattttcatgagttaaaaagttcttcctcgtgtattcgtggtgtttataaacaatggactttctggtgatggaatgggaatgataaatatctgttgcattttgtcagcctttcttagagcaccttgcttgtatttggatcagcacactaatctagtcattccattttttaattattggtgacatatggctaactctaatgcctaaacagatttaatgctccatcctatttaccattagtcaacctccacgtttgtaataaactaggggctatgttttcttgtgcgaagaattaataattcaagaagctatcaatgcttagcaataattacttaattagtaagtactgtgttcagagtctgtctttccagtgcctggctcgacatgtgtgccttggcatattcctttctatttcctgc

SEQ ID NO: 3089 - DNA, 1129 bp, Zea mays
ataatgacaacaataatactaagtacatggtcggcagttccgaacaaaaaaaaaatctacggcgaacccatgaggcaggcgccagggaagacctgtgctgagcgctgctgtagcctcggcgaggtgctcagcagccacgtacgatggggaaagccaagcagggtggaggcacgacgaagtggggctttgtgtgatgaaggaagggagctgagccgagcgctactgctgctgcacgagggaggcacagtggggaaaccaggaaatcgtcgagagcacaagcaattcagtttgggctccaaactagcataacaagagttggcttaatggaggtcgggctggggctatttcagagggaaaatgagaattaacaatccccaacacacacctgcatgtttaccacgcaaggtggaagctcagggaaaaagtccagcacacctttactgcatgtatgacacctcatcaacagtgaagcagctgaatcatccaagagataggctttacacccttcctgcatctatcctcggggtggtgaatttttgacaataaactttcctttctcataagtctcttttgggctggcatatcctagaattccctatatcaatttggtggatggagatacttccatcagattattctgaaactgctcctgctgttttactcgactgaaacctcaagttcagctccccttttctcttcgttcttaacacaacatgcccacttcattgccccaaggttattcagtaaacatagcttttcccggttactgtagtttgtataggctaaaaagacctatagtcaaatctagagtacccacaagtggggtacattactctgagctcgaacttccttatctgaaccaatcaacagccattaacgtctgacagagccattttgcgaccccttttctcctaagtttatgtagtaccaggtccagatgacttaaaggaatttatgcacctatacatgatctctcattttgctacaaaactctcaattcaaaaaccacagggattggctgcacagggactctaaactgagcaccaacactgagattcagtctctgccagttactatttctagtctgaaatttcagactacactaactgctctgaacttcttcagttcg

SEQ ID NO: 3090 - DNA, 1215 bp, Zea mays
aaaagagggcaaagaatggcagatcttatcattttcggatacatatagtgttaaaaagaaagccatgagcacaagcaagtgcctgccatgctctgcgtagctgcatagtacattcatgtacattgcggaataaaacaacaatgcacactctgaaataagaaaaataaaggcctactgtaaggcatagttgcaaagattaaatgctttcggaaaagccacagcacgcaacatggccatgataaaaaagcaataaataaaagatatttgttaaataaaaatgcaaatagtggcatgacaaagagacacatctgtgcggcctcaacagcaatatatatacctagaatggttattattcaggaccataaaatggtcagaccctatcaccagggggcaggtccacagtattagtaattctgtcccctgacagcaatgacctgtgtcaactcaatgaaaaattactgtgggcaaaagagacaatgacacagcatgtccatcatagctacgctagcgacatcaatggttcataattctagatccgcccttgcttatcagttaatcaaagtggcatgcaaagtccgatagagaaaagacagcaaagctagtgtcagatttgtacatggaatcatgcaagcatcatgttttctccatttaccagcatactgcaacactggacgccttaccattttgtcatcgttgcttcggcaagcgattccaatagcaccttgggcaactgccggaagcatttcttccactgatagtacagctgttgcattttctgccatttttagccgccttaatccagccagcgccaacaatgtagcagacacatctccttccttgagtttccttaaccgtgtctgaacatttcctctgaagttaactacctgcaaaacattgaatactgttacttaagcgagactaatcaaggtcaatgcctaatcataacacacttctaaatatttttttaaaaatacagatacaggcttctaaatatttaagtacaggactaaggcaagaatatacaactgtcaaccggacaaaatactctttataacaaaagaaaaagaaaattgcaataatgcctctaggatggacattttttcacatgtatgacattgaaaacaacagcttcagaatcatacaaatgaaaaatgtacatattggtaagagtttttttaacagtttataatagagttaaaaactgcaggcatgcaa

SEQ ID NO: 3091 - DNA, 850 bp, Zea mays
agggttgcttgacttgtgtggtcgctctgggatgaagggtaagatgatgtattcccatcgccttttgtttctagctgtcttgctttcttaaatttagagttcagttccgattgctttgcaaattagactttttgcgtagatttgtactaggcttttttgcgtagatttgtacatgtgcagcaagcaactcgttgcagatgatctattgacaattatgatggaccttctaacaatcttctcttttcctttcaggggccttatgacataaatcaaccaaatgcagactgatcttagttgattttgtaagtagtgatgtattttaggttcatattcatgatattcttttattcatcgtctgtattacaaatgaaaaggacggaaaagtaatatatacttttcttacacagtagtgatgtattgtaggttcatattcattatatattgtttcattcaccgtatgtattacaaatgaaaagggcggaaaagtgcaagaacattgaacctctggttcagatctctgatagcgtcaagatgaaagggctgtttcctcagttccgttttgtttcgtttttggatgaattttccatttcttgacactacatgatttctttccagattgtatgggtggagagaaatgaaaccctgtacaaaattaatgatgcgggctcgtaatgtatgctgtccttgctattctgtctcgagaaaaatatgatgttccgtccctctggaataaaaaaacaaaaatgcatttagacatttcgggtacatgaattctgttttgagaaaaactggatgtggagggtttcagtaatcccagatttacatatttcgtccacgaaataatggactt

SEQ ID NO: 3092 - DNA, 1138 bp, Zea mays
cccgtgcaccctctagagtctacctgcaggaaattaaattgttttatattcaaaattaaatataagaaaatcccctctaatcttcctcactccaccttacctgaaactcatgcttggccagcttgggaagacgctctcatgtctgaggtgctagtttgctacagtgacacaactatggcttcaagcacatacataccatacaatactggggtcatgatgaaatgtggttgtttctatctctgaaacaaccttgaaatgaaagttgttcctgctctttgttatatgtggtgctgtctttgtatactgaaacttgggtcaaccataatgtagttcatgttctaatacccaagaggccaagatgctaccaccctttttgggctccatttcatactgtaattagttcaagatacaagtcaaaggaagtaaactgtaatccctgatccctttgcttgttggtattaatatacattaaacttgtgataacaaggaaagaatggtgatacatttaggccagcacttaattcttgctgccctgctggactgtacgtatttgtatcaaggaccatttcaagcctaactctattagtacacaaaaataagttacccaaaaaaaaaggagattgggtgctcaagtgttggggtcggagacaattctctcgatctcttccagcaaccgctccttctcttcggccaagtcctcgttcttctgttgaagctcctcgatctgcttggtctgctctgaatctttcctgcaaccaaccgtgtgtataaacattttaacaaacaggtttacaaagggaggtttgtgatcgctccacaaggattttccttagaaactcgtgtccttgcttgcagcagtgtacccacctgttcatgaaggacagattaagctttagcgaccgaacctccttctctagggtttcgcagcgcttaagaacggcctgcatgtcggacggtattactggtgtagagcttctttccttcgcttctgccattctgaaccataagaacgtaatggaacatcacatactgtatggtaattatcaattaatgtggaccatttttttaagaaggggggagcatcacatacttgcgggagcgctcaaccctgcgctttttcataggatctccattatca

SEQ ID NO: 3093 - DNA, 1278 bp, Zea mays
tcatgatccaattttgtttgttactatctgcaatttagaacaactatcaaatacgatgattttgtggccgaactttttgttctgccatcttgccatccaatggaaatagatgctaacagcactaaatcaaggcaccttagctgtaaagtcaagtactgctgaaacatgtattttagaaggaatgtaaaagatatttagcaaagaaaaacatttgtcatagaactaaaattccagttgctcactacggttgagtaaagaggtcacgagaaaaatacctaagcttatcgactggagtgcagcccagatcaattttacatactggacagtggtccagatcctcatcattgatcttattatagatacaatttctacaaactgcataatacaaagatcacaagaaaaatagaggtgagaacataatataaaaatattaataaggtacagcacaatgcttcatttcaagtagaatagaaatttgctgtctaaacagaagttcttttcagaaggacaggcatggcacagtggtgagaaaccttccaaccgagctaaaaggtcatgggtttgacgcaaactctctgcaaaatgcaggggtaacgcttgcctcagttattcctccccaagaccctgggagctgctagcattgagtctgtcctttaaacaaaagttcttttcaattgaaaacataatagatccatgtcatgacaagtaaaatgatacatgtaaaagaacaagacatgtcgatatttgtactagcgtggaccatacagcatgagattcatatggatcctactatttcaaaagcacacacaacatgaacagttacaccaattcactcacacatgcagagtaaccaagtaaattgcaactatttacagtctatgatggtacattgtggcttcaaaagctgtgtacagttccactgattacaggaaaacattcgtcgaacgcccactgaataccaagagggggtgttaatcctgaactcaaactggatagcaactcaaatcacagcaccggaggcttaataacgttctcctgaacattatctcaacaggaaccaaagcatttcacggattgggggcaaagatgggcaatcaacagcacgggaatcaaagtgcacgtaaaatgcacatgctgaagcccagcattgatgcaacattgcatcacgattcaataaagagaattgcagctcagcctggaaaggcaagaatagaaagcaaggaagctaccgtggtcaactcgaactagatttacgtggagtccagagtggaggtgcga

SEQ ID NO: 3094 - DNA, 1387 bp, Zea mays
agcttgcatgcctgcagcagcaataaggggagctatatccacaatagaatacccatgaatccacttatctttccaaaataaagttgaaataccattaccaatggtggtagtcactgctatctgaaataaagctcgggcctgggaagatattttaagatccaggccactccaaggcttcgaaggagcagttttttgtagccaaagccatcgcaattgtagggcccagttcatcttttggagattaggaattccaaggccccctaaatcaagaggccgagagattttatcccaagctacaaggcaattacctcctctagcctcctttcttcctttccacaagaagttccgttgaattttatcaatggctttgataacccatttaggagcattaagagcaataaataagtaaactgagatggcagagaggacagatttgataagagtgattcttcccgcaagatttaaaagctcagccttccatcctggaagcttggcagcaattttatctatccagtgagcgagatccccagcactaagttttttgctgcttagagggagaccaagataggttgtgggaaatttttttgaggcacatcccaaggtctgaacagccagcgcagtcctctcagtattgcactggattgggtaggagaaacttttttgcaagttagtatgaagacctgaggcaacaccaaaacacctcaaaatttctctgactaccactaagtccccagaaactggttttacaaacacagcaacatcatctgcaaacattgaaaccctttggctaatgtttctgccagcaagggggtgtaataaaccacactcatctgccctgatgaataggctattaagaacatccatgactaggatgaataaaaggggatataaaggatcaccttgtctcaacccacgcttgagatttataggctgtccaggcactccattgacaagaacttgagtggaagatgtccatagcaggttcaaaatcagattgcaccaaccctgcccaaaacctaagtgtcgaagaatttccagcagaaatgcccaatgcactgagtcaaaggcctttttaatgtccagcttcaagaaaattgcagggatttttttctggtgcaacatcttggcagtttgactaaccataataaagttatcatgaatacatcttccccgaatgaaggcactttgatttgtgctaaccattttatccagctcaggagctaacctgttagctagaattttagtgagaagtttcgcaaaactgtgaactaggctgattggtctaaaatcacccggaagaatagcctcaacatgctttggaatgagagtaatatatgctgaattcaacaaatcaagccttccaagagatccttgttggagaaataag

SEQ ID NO: 3095 - DNA, 995 bp, Zea mays
atttgtttgattgaatgctctatgatttttttgcttgccctgttttttgctgtctccggtccataccagaactctcatgcatgcatcgtctgatatatctgtagctctctatgtggcgctgcaacgatgagcttcgcgttcgtgccgaagagctccacagttcgtctggttccaaagttaccaagtattacataggtaaccacaaacagaagcatttatgtttgcttaatttttgcctgccgtacaggcttttgcaaaagtctccactagtgttttcaaattaatttgagggctcttttggcaagttttctgaagtgtatttgctggcgcagaattctggaagcaaattcctccaaacgagccctaccgggtgatactaggccatgtaagggacaagctgtacaacacacgcgagcgtgctcgccatctgctggcatctggagtttctgaaatttcagcggaatcgtcatttaccagtatcgaagaggtaaatatcgtcatgtatatatattatatatattcatagtatgacatcagcactgcaactaacaaaaaaaatcactatactgtcgtgcatgcatgcagttccttgagccacttgagctgtgctacaaatcactgtgtgactgcggcgacaaggccatcgcggacgggagcctcctggacctcctgcgccaggtgttcacgttcgggctctccctggtgaagctggacatccggcaggagtcggagcggcacaccgacgtgatcgacgccatcaccacgcacctcggcatcgggtcgtaccgcgagtggtccgaggacaagaggcaggagtggctgctgtcggagctgcgaggcaagcgcccgctgctgcccccggaccttccccagaccgacgagatcgccgacgtcatcggcgcgttccacgtcctcgcggagctcccgcccgacagcttcggcccctacatcatctccatggcgacggccccctcggacgtgctcgccgtagagct

SEQ ID NO: 3096 - DNA, 1154 bp, Zea mays
agttccagcaaaagactgaaagaaagatacaagcaaatttagtcaatggcaacccttctggcttcaatcataaagatgacacaatgctcattagtagtagcgtgagctatatacaagaatacagctacattttgcacaatttactgtgaaaaccataacctatgccccagaacataaaatggaaactggaagataagcggaactacagttacttgacagcacacatccaacaacgatcctgcctttcctacccaacacacacacacaaacacggaaaacaaaaaaaagaagcagaaaagcaaaatgatgataagcaataattgtgaaattcgtagaatatagaatagaaatgggagctaggagcagcagtagttggcaattggcattagtagagatgaagacaaaatggtgaactcctatttgctttataaaaggaaattgaggaagatagcagttaataacatagctgtaacaaaatcagtgatatgtacacatgtaccatactgaaaggaaattgtggaagatagcagttaataatacaactgtaaccaaatcagtgatatgtacacatgaaccttaccgtaccacaacagtgacgttcttagtcaaaatttcaaatgaaagaacaaaatcacttactcttccagcacttaagagtgaacagctaggaggagatgggtgtccagtatttgcttcttgccctgcaacgaatattgtaatgagtatgacatgtcgaactattgaacttagaaaagcatcaccgaagcagttgtacaaaaactaattagattcccataaggaaaaaccactatatgttttcggattaactagaacttccatcaacatggcaacaattggttttctgacaaccagcaagcaatacagaatgagcagaaatgttgtcacactcaagtcacaatctcatatgagtaacggaccatgatttcggacgccgagcactgtcattacacatggatgatcaagcacatgcaaatattagcaacactacttatcaaggagaagcttccaactgaaattggaaccaaaacgcaaaaaaaaaattccaaggctcaaaagcatcaagactcactgctgactacccccagctgacgcttaagttttggacacagtaattcagccgatagaaaggatca

SEQ ID NO: 3097 - DNA, 1064 bp, Zea mays
tcatgtctggtgatctgagggagttcatcctgctcttgcaaggctgcaagcccatccgccgccctctagccactagcatcttccgggacgcgcagatgttcggccgacatgtcgagaaaagagaggatcatcaacttcctgctgcacgaggacgtctatcggcggaccacggagcttggtgtgctgcctattgttggtgacagcggagtcgggaagacaaccctggtgcaatacacctgcgacgacgctagagtgcgcgcccacttcccagtgatcatgctgtacagtttcacatctacctacgatgtcaaaaacaaccaaggaacttgtccaagcgacgacccactggagttgatcaagagtagcgacgacagtttttgggacacacgcaggaggtgcctgatgatatttgaggacgtggacatgtgcaggaagcagatgctggaggagttcttgcagaaccaccgccgcagagaggcggcgggggtagtcaagatgatcgtcaccacgaacaaccggcgtgtcgcgaacgacgtcgggacggtggagccgatcgtgctaaggccgttgccgtgccctgagtactggttcttcttcaaggcccacgcgttcgccggcagagacgtcgaggagaacccgaggctcatctctgcggggaaagcgatagcgaggaagctgaacggctcattcttcggcgccaagatcgtcggagggctgctcacggatcacccggatccaagggtctggtgcaaggtcctgaggagcagcattggagggatgtctccccttggtgacggcgtcggttacatctcggacttggctgaaaacttgctgcccggccatgtgaacatgtgcagggtgacgctctctaaggacccggcatttcctccccagacggcgacaccgcagttggctatgttcaaggatctgcacggcgctgttcctcatgacagcgagttggcctgctgggcagacgacgcccggtttgggagtgtgagtgcaagtcagtactgccgttctttaaccattactatattgctcgttgctcttgcacttgcaccgta

SEQ ID NO: 3098 - DNA, 428 bp, Zea mays
gtcgacctgcagagaaaacaaaatttcttttattgcttcgaatgatcaatctttttttttggaaagaaggaccaatcaaatgataatcatgctcgtaacataatagcagagagtaggagtgacaaaatagcaatttttccctgataatttggaccctgcaacctcccctatccacagctcacactcagagtcacagtcaccaacaaactgccagcgcaccaccaacaaaccctaattattccattccccaacggcgaccgcatctagcggtccagtgtagcccaagcggcagccggcaggcgcccagcagcagcattgcaggttgcagcaaagcgagcgagagtgagacagagctcacaagcctaacaccctctctccttcacctcccacatgcgctgatgcgccgcaagaagcacttggaccggggt

SEQ ID NO: 3099 - DNA, 1060 bp, Zea mays
tagctggagctgcgcccgcgtcacgtggcatcgtccgctatgggttgccgactccgacacgccgtcccacccaacccgatcgcacggatacaggagtcggtgcaactgaaacggtgcggagactggcgggtagggtaggtgcctcgtcggctcgtcgccgtcgcgatcagcaattagtggagtggagtagtatgcctgaccaacgcgactggtcgactgctagcccgtagctgcgctgttggcctgttgccatgccatatccgtcgagctgaagcctgaagcaaccaccatttcgatacgcgcgagggaacggggccggccggccggccggggatcggaactgaagtgtgggcacacaagagtcacaacagggggagtgggggacattccaatcagttccctgcgtgtgagcgatgcagcgggacgcgagaagctggtcgccggcgccggccacggacgccgccggcccttacgcgatgccttcgcccgtgcagccgtcgaccaagagtccgtgcgcggtggcggtgccacaaagtcacctgaactatatgtattcttccctgctgcccgacgcttatccctgacgtttcttttttttctctctctctcgatcggttgttccgcgcgcgcgcaggcacgaaggagacggtgaagaatgcgctgtcgcggtgggggcggaaggtcggggaggcgaccaggaaggccgagggcctgtcgcgcaacacatggcagcactgtgggcgactctgctctgttcatcaactctctctacctatatacaccatcgccgatcagactggtgtaagctttgtgatttgtggaactgatcgcaactgatttcctgggcagtgaggacggcgccgagcatcgcggaggccgcggtggggaggatcgcgcaggggaccaaggtgctggcggagggcggccacgacaggatattccgccaggccttcagcgccccgcccgacgagcagctgcgcaagtcctacgcttgctacctctccacggccgccggcccggtgatgggcgtcctgtacctgtccacggccagggtcgcctt

SEQ ID NO: 3100 - DNA, 1223 bp, Zea mays
gtgcctgtggctcactgcactaccagaacacaactcgctagctctgcatcatccgtcgttctggtgagcgagcgagcgagtgagagacctagctagactgaccggcggccgccggcaggccgagaacgaagcgtttgtgcatgtatgaaagtttcgatttttatactgtcgtctacgaattgttccttgatataaatggttgttgttagtgcttcatcgatctgatctcagtgaaggagcaggagccatggcggaccagcagcagccacagcagcagccgcaggagatggacgttgaccgtaccggtggcctcgaactgcctccagggttccgcttccacccgagcgactttgagattgtcagccactacctcaagaataaggtgcacgacagggactacagctgcatcgccatcgcggacgccgacctaaacaagaccgagccatgggacctcccgagtatgtaactaacgagcgacctcgatcgatcgatctatctgtgcatgcagctagcggatgctgctgctagtgctagactaggcatgctagtgatcttgctaggtgtggactgactgatacacggtgcttgtttcgatcgcatgcatgccgcagaagttgcaaagatgggcgagaaggagtggtacttcttctaccagaaggaccgcaagtacccgacggggctgagggcgaaccgggccactgaggcgggttattggaaggcgaccggcaaggacaaggaggtctacgatccccttgcagcggaagggctgctgctggtcggcatgaagaagacgctcgtgttctacaaaggcagggctcccaggggtgacaaaaccaactgggtgatgcacgagtacaggctcgaaggcagcggtaggctccctgctagtcctgcatccgcatccggctcagccaccaacatcgctgcggccatgatgaaagcttcagcttcggcttgcaaggtgcgtggtaccagtaatatatatcaatcaagttcagcaaccatgatgcatgcatccacatactactttctttgtttgcttgcccgcccacggtcacggcttaattacaaatgaaatccgcgcaggatgagtgggtggtctgtcgtgtgttcaacaagaccaccgggatcaagaagacggctgcgccggcataccaggtggccatggccggtgctgagatggatcagaatcagaacaacattccggccatccccatccccat

SEQ ID NO: 3101 - DNA, 1002 bp, Zea mays
tgcatgcctgccagtgggtgttaaaattaacgcctcctccatcagctccggttacatctgcttccccgtcccagctccatctctagcgaagttttcccccacctacattgctctgtgtagctggcacttatggaagcagcgaaaccagttcgcctttagaagagagctgactcgagttgtttgtactctccgtaccccgtctgtgggcttacaggctttaaactctgtaataggagcctcgctttggcatggtgtgaatccctcgtcctcggcgttacccacatgtaatcctctgtctactgtactcccccctagggtcttagcaatgcctttgcaatatatcaggtgggagattcccccctccgtccgtcgacaataaaaaaaatgaattagtaccttgacttttcatgtcattatcccttggctactcttcgctaacaacacgcatcagatcttctttattggttgcagatgcaccatcagaagttcactttctggtgatccacttttgtaggtgtggagagatatcatgatccacatgagaattgattttagactagtaatacagtgcactgcaatttcccgaaaaaaaaactgttattactggtgtatactccctcttatactaataatacatatcacccacatcgttagatttactaataaatatatgtttagtctaaaaaagaattactgtattattttaagaggagggggggtacttttcaagtggaatacccaaaatacgcacctgctccatgacgagaaggacgagatcaccagcgagtttaccaccagcaggagaggagaggagaggagagggagagagatcataagcgctagcctagctatctagctagctgatagattatcacggcctgctgctgattattactgataattaactagacccaaccaggaccggtctcgcgtagtcgcatggcaaaggaaaccacttgtcgtccactcatgcatgctgcatgctgaaccaggaggaaacat

SEQ ID NO: 3102 - DNA, 1019 bp, Zea mays
ttgcatgcctgcagaagcatattcagcaccttcaattgtgctaacatctcgttcacatgatgggtttcatgtttttgatgatttccgcgaagcttatggatggctgcgccataacacagatgcagatgacaaggtataactttgttcttataattacactatctgtgttatttctgacagcaatatgatatttattttggtaggttgcatcttggtgggactatggttatcagacaactgcaatggcaaacagaactgttattgtggacaataatacatggaataacacacacattgcaacagttgggactgcaatggcatctccagaaaaagtagcatgggagatcttcaattctttagatgtcaaatatgtgcttgttatctttggaggttattacatttttggcttctagaagcaaacaattaccttaagcaagtgctgtcattcacctaaaactgatgattctttttcagggcttattggctacccaagtgatgatattaataagttcctctggatggttcgaatcggaggtggtgtattccctcaaataaaggaagcagattaccttgtaagttactaagttgtggacttacctcttggaattccttgccaatcaaaaggaatgtgatctgcatttattaattaagggagagttctggacaatactactgtccttcaatgagtgacattttggttttgtcttaagtaaaagcattttatgtttgaccaagtttatatagaagattatcaatatttatagcaccaaatagatttactatgaaaatatatttcatgatgaatctaatgattttatgactggcgtcatggtgccagggccagcgtggctgaacgtcaagccaccgtggcgggtgctgcacaaggcttcggtttgctccggtttcttgagattagttgttggcttttgttaggggatttggttgttgcatcttaggtcaagtctgttaggctttggggtacaagtacgtggagtattcatttgaaaagaattaagcaa

SEQ ID NO: 3103 - DNA, 1124 bp, Zea mays
gtgaatccgcccctagacagagggagagggagtatgtcataggaaagtctaaatatagacataaaacttcattccctacttaagtgaaatgcagagctattgcaaacgtgtttaaaaaaacaaagtctagacacgttacatcagcattctagaccatatatatgtacatgcgttttgtacgacgtggttttgtgtctattttcgaagtactttctgcacatgctcttttacttttcttacccccacactcatgccctctgccttctcttgccacaactcttggtgccgtagtacgcgtggctgactgcatatattcaattcaacaaaaggacacttgttcgcttcgatttctcactccttcatgcccataatatatcttcagagaccagtagtggcgagttcatcgaggcggtaaacccaaacgcattcgccgccatttcaacatctgtgagctctgtcaggtattccggcatgtcaggcaccatgaacaagtccccaaagctctcatcctgaactccatgggcatacgacgtcgagctgctgctgctttggttgacaattggcacgccgccgtcgtcatgcgttgctggctcaacgacgacattatttggatgaactatgcggccatggctgttgcaaatgtgctggccgtagtagtcaacgtcgaacaacctcaccgttccgtagtttccaccaccttccttctgctgcactgtcttagttgcagggcaccctagctctttactgtaggcacatctgtagtaactcctggttaaacataacctcatgcatcagagaccttttttaattttggatatatcgaaaataagattactactttattttgggctgaaatagatgagaaatttgatacccaaaattcaatatagaaatcgaacatacactaaatgcatacatcagtgcagatgttttctttccatacatacaaacatacgtacctagaatgctttgctttggagatccacttctgcccgtactttctccactgatacccatcaaagtttggtgcttgtgtcacaactgaactcactacgtgttttgcattcttcctaccattaccaagagaaagcaatcaagattctaagctccccctgcaggcatgc

SEQ ID NO: 3104 - DNA, 1325 bp, Zea mays
cgttctgcagggccattaattataagcaggttccactattttggttgtttctacaaagttctgttagtttgttatttttttaagtcagatgataaaaaagaaataattaatctagcgaatcaccagtttgcaaacagctttcgcgtagtccaagggtagtcctaggtatcaatgttcacagaagaaattaggaaaacaacatgcacacaactatatagcggaaagcctccaaaagtaacataagaaaaatagatgcaagaacatgcctaatgaaagtataatccaccataggtcaacgattgtcataaaaaatatataccaacctgacatgtcaatagatcaatagcaaagtgatgaccaaacaaagatatgttatcatcattgtgaactgcttgaagcagtgctctttcaatctctcttccagtcatatcggcagaatggacaattctgttgtgagaatgaccaccttcccttgcaaggtgcagcctaccatcttcaccatggtcgaatgaggcacccatggcaattagttccttgacacgctctggaccttctgtgcaaactacctgaaagacagcacaaatgttatttatctgctaacaaatatgaattaacaactgtacaaatgcatgaaagaatttgttcacaagcgacgatctgttgtaaaatgcatctatataacattgaggcaattgaaaaaccactgtaaatggcggatgctaacgcttaccctgacaatctcttcatcgcacagataagcccctgcaacaattgtgtctttcatgtgactttctacagaatccgaggggcatagaacggcactaacaccgccttgtgcatagtttgtgttgctctcatgaggctctgccttggtgataatagcaacagagccgtgttttgaaacttccagagcataccttaggccagcaacaccgctgccaataaccacaaaatcaaagaattttgtggcatcgtcttgcaggcaggaaagagtagaggctctgatggcgctgatcctctgcctcacatgatgttgggagacagtagcagatgttgcgcccatgaaacgaggcacgctacctagtctgtttaagcagaattaacgcactgtcaccagactaaacaatacaacagtggtaccacatgaaggagctgtcacatgagactgagaggtgcaaattgcaatatgtaactcgattaactgaaaacactttacatgtttggtccttattttagccacttctctgatatttcaggtgtaatttttgcttggtgggttttttattctcagaaccgaaaattgcagattatacctacaaaactgg

SEQ ID NO: 3105 - DNA, 768 bp, Zea mays
atatatgcagcaggtgatctttattgttagcttcaactaataagagtcacttgcaaaaccctattttttttacgatggctaacataaaaaacaggcaagtatgacttacgattgcaacaccatgcttatctgcacgagtgatgtacacaaaaaatgtggatatgatcaccgaagtgagaggtgcgattgcagatacccagaagagctttttattccttttcccctgaattatttaaaagcaacgacagtatgatcacatagagtcaattgaaagccaagatgagatcttgccatcttggagcatgtaatgtgtattgtcttacaatgtacttggcaaccagaaggaatgccaggaaggacgctcctatcagtattgtctgccaattccactgcaataaatagcacgaacatacattgtgtttaacactaaagtctcaaaaaatcgtggttctcatcaggcaggtaaaaggatccacacggtacaggtacagtcagtgtcttaccccatggtgaacgtttccccaaactgatttcatcacagatacaatatcagatttcttggtgaagtctgcaattccaaggaaccctttcagctgctgaagagcgatggtgatggcagcaccagccatgaatccgacaatggcagcatgagacaagaactctatgataaaccctagcctgtggcagagtcgagttcagattcagactatatgagatgatcgtgccaaaggagctacgaactgaagtaacagccactagctaagctag

SEQ ID NO: 3106 - DNA, 1370 bp, Zea mays
tccgagtattcataatgacaaagacaacggtccaggtataggcaaacctcacagccttatggagcgaaacgcaacagcacgaacctctcaggtttgcatttctttttaaaaatatttttctttgtttttgaacattgtccatgctgaacttgctttgtctttttagattgagtttgtgcttgtaatagctagcgattgtttccattgcgattgaaaatgatatcagcacctatatcatgtcaatattttgcattaaacattgggtgtgtacatttttgtattattctgttgattgagtttttagtatgaattattctctacattgctcctgctctgcaaaatcggtatgacatgtctaatagctgtaggatttgtttcactttagtaagttagttactgaaattaggacttggaattacgaatgctctactacggtccctcttcgcgtgacacttaaaagtaaacttactgtagtctaatttgagctcaatcaaggcgcctcataccgttctagataggtagcttataggatagcttggtatcataaccgcaaaatctaacttaaattgtttatggtcgtgtttctcaaaaataaaacgtttgtttgcagtgggaggagtcacatggtcttgatggttcggaaccaccatcaccaccgagaccgtgcttgcctagcccaaggagactaccaccttctcctttgccaccgcctggaaacaaaaacactaagcggagaaagacaaggaggtggagcttgttcgaagaagaaaccttaagaaagggtgttgaagagtatgttaccttgtcttgatgttcagttgttatcgtttgacatgtcagttattattattattgctgttgctgtatgttcctgctctgtttgtttcacgtgtaggtatggtgttggcaattggagggatattctagataacaatgctgaggctttggccggcaggacaccggtgggtaattttattattacagttaagttgctgtggtttgcaatcaaggtagtgactggttgtattgtaggtggacttgaaggacaagtggaggaacatgcttttccgttgatgtaacggggaaacatgtagctggacatgctttactagggtaaagtacatagcatgtagtcgtcgtacatcacagcactcttggtcaagcttttctggcagctgctgctacatgattttgtgtcacggtgttgtagcaaccgcagcccaaacggttggcttttctggcagttgcacagcagcagactcttggtcaagcttttttggcagctgctaaatgattttgtattttggtgtagtagcagccgcagcccaaacggttggcttttctggcagctgcacagcagacctgggtct

SEQ ID NO: 3107 - DNA, 1156 bp, Zea mays
agtatatatatggagatattatcattgctgtcgtcgctgtcgtggcaacccctcagcaaagtagctgatgttcataataaaaaagcaaataacaacgacagtttgacgcagcgtgatggcgtctccaatcttaatccatccgatccttgccctgtcctgtgctctcaaatcttcaatccattcggaaaggttcatccaccttcaggcagagcacagtcctcactcctcagtctacactccacactccacactccacacgcaagcacgcacggcgggcggcggtcgcccacctggtacctggtaccggaacaccagagctcaaggtcggccatggattcgccactgctgagcacacccgctctgctggcgctgtccctgctccttctagcgctctacatcgctcgccggcgccgcggcggtggcaagaaccggaactaccctcccgtggcgggcaccgtgttccaccagctgctccacttcaggcggctgatggagtaccagacggagctcgcccacaggtaccgcacgttccgcatgctcaccccgacctgcaactacgtgtacaccgtggagcccgccaacgtggagtacatcctcaagaccaacttcggcaactacggcaagggggcgatgatccacgacgtgatggaggacctcctcggcgacggcatcttcaacgtggacggcgccaggtggcggcaccagcggaaggtggcgagccacgagttctccacgcgggtgctgcgcgactacagcagcggcgtgttccgcgacacggccgcggagctcgctgggatcgttgcggtggcggcgcggggcgccgggcccggggagaggccgctggacgtcgcggacctcctgatgcggtcgacgctggactccatgttcaaggtcgggttcggggtcgacctgggctcgctgtccggctgcggcgacgacgagggcgcggcggcgttcgccagggcgttcgacgacgccagcgagcaggtcctgtaccgcttcttcgacccgtcctggaaggtcaagaggctcctcggtgtctcgtcggagggggccatgaaggggtcgatccgcaccatcgatcaattcgtgtacggcgtcatcgacaggaagatcaagcagatgggcagggaccaagaattcgtgagcgagctct

SEQ ID NO: 3108 - DNA, 1363 bp, Zea mays
cagcttgcatgcctgcagtcacaagagccatagcacgcaactcagcctttgtactcgaacgagaaactactgactgcttcttagtcttccaagcaataagagaatcaccaagaaaaacacaataggcagaaagtgatcaacgatcggaggaatcactagcccaagtagcatcacaataagcttgcagttgcaacgagctagagcatagaatgaagagaatgaacaagcgcctagatatggtcccatgaagataccgaaggacacgaagcaagtgactatagtgaacctgggtgggaggctgggagctgaaacaaaccgactcaggatacaggtcaccagtgaggaagtcccaaagtcgcaaaccagcaccggacatcgccaagatgagaacggcactaaataaagaagtcgaagatgagcccatagcaacagtcgacggcgagagtgcaaaataagcagcaagcgatccgttgagcgaaagcaaacgaaccgaatagaaagatgggatcagcacgagcgaggaagcaggtgcacctgatcggattcggaccaatctcctcgcaattggatttgaaatcgttggaggtcctactcgtggaagacaggtcgaatccacacgctggagaggacaaattcgccgaccagagaggagattccgtccctcgattagcatccgattgaaatacacgatcaaggttcttgcgattgggatttgattctcgcgattggaatttgatcccactggagctgaaggtcttgctcgtggaagacaggtccgaatcccaccaaatcaaggaaactcaatccgagataagcacgaagacaagccacaggcgcaccatatcgatcccaactaagctggcggatcctcacagcaaaggggagaaacgcccgtaagggggagaggaaaactaaccctataacctgattctaggtcccatattatgaatagcacatatgcattatgtagcaactagcccaaataaatacaagtacaggaggagtacaaatatacagaaaaccccttatacaaataacacccctatctatctaacacacattaagttggccagaaggaataattacctcaagaagctcagaaccccatgggggacttgtatgtagagtatggcgatcatactcaacaaaaaagtcccttatcctttcattaattgggaacaatgaagagcagagccttaaacgtaacctgaaaacagttttcccatcttccagatagtccattctctcctgtataaaaactgaaaattagagaagaatcttaccacagatatacttccataaatgaaatttctgcaactaaggtggcaccgagaaacacaaaatcaagaagcaaacctttcca

SEQ ID NO: 3109 - DNA, 1270 bp, Zea mays
atgcggatgcgggggatctcgtcgcgcggcgggttgaccatgccggagttgaagatggcctccagaatccggatctgctccggcctggggttccaccgtggcttcggatccggggcccgctcctcgccacctactactacacatgcatataaatcgagagacaggaacaatcgactacaggagtcagcttcacctctcgatctctgtgatccccaacccacccacctcgcaacgaaaaacaaaccctacaacatacgtactactagtctactactactactctctagtggcatggcatgcaagagagacagtagtatcatgcatgtacatggtcgatcggcgtgggtgcatggctgcatgctgactaacctgagagggagtgtttgagacagcggccggtggtggtggtggtgctcgcgccgccagctgagaggagggacggcggtgagctgctgatgtcaggctgcgtcgtctgacacggctcggcggcgtgcttggacctgaacatgctcggccagtgactgttgttgaaggacgaggaggccatgctgagctgatttcttcttcttcttctttcttttcttctcccttccgcagcaccagatcttctccttgtgagctctcgacgatactctaaaacagcggcagctagagattctatatatactactaccagtcagctaccagtgagctccctaccctgctgtcgcaccttctcgctacacgctacggggtcggtctttcaccaggctcggctaggctgagaacgctcgcacactgctggtgctgggctgctggctacctcttataatggcagcacctaccctcggtcgtctcgcgctcgcgcagcgttgccatgcaatgaatggtcggtctcccagttctacactactggccgagcgaggccagtctctccagtccagtctcgccctgcttggagatgcgtgctcgcgagacccggtcgcgtggcgttgcatcgggagggaactcgctgtaccatgccggatgggtactgcaacgtgcgaaggtacggccgggcgagctggctgctacagtagtagtagcatatatacgcctgctgccactgccactgccaagcaaggtagacacgaaaaaccgaagcgtccccgatgccgtgtcctgccatttctgacggtgcctttcggggcgtgatggcgacctccgggcgtcgcctcgcctttccgatcccatttgccggaaggaatgagaactgcaggacgactctagagaatccccgggggccgagctc

SEQ ID NO: 3110 - DNA, 803 bp, Zea mays
cttgcatgcctgcaggcgtgcctgggaagacgacgaccgcgccgcgccggagagactagctagccggaggccggccgggggcggcggcggcggcggcaacagaagctaccactgccggtgctcatcgtcctgcacctgaagcagcagcagcagctgatctgatcgacatacagttcgtgttcggcagctagcccctctagccatgctcggagaggtttaattaattacgcagcggactccttcgatgggggtggatttttggtgatcattctgggggtatgtataaacctgcaacctacccttgcaaggattagtttttcttcttctgtttttcttctttcaagtttcaccgaggtggagtggaggttgaccgacattattctgttcttcccgcatattcttgtgagattttgattccaatcagtgtctatcaattcaatttcgatctccctctctgtaaccacatgtcgtgtggcgtgcgtgcgtgtaaaaaatcgagaaaaccgagcctgccctgtccgggcttcagcttgtttgttctagctagctcgatctagcggaaacgactgccgtaccctttctgtttatttttagttggcactggatagtggaaaattgaactatctagcgacaactaagaagaaacatatgaagtataagtgagacgtgtaagcgagtcttctgaattttaaattataatctaattaattccttcaccaccagcttgtataccttttataaaaaaatctctaacaaaactacaatacacttttggtagatctggtctaaagataaaaaagctc

SEQ ID NO: 3111 - DNA, 1026 bp, Zea mays
gcatgcctgcagacggcggcgacgatgctgctggggacggggccggggtcatcggggccatcggggcacctggggtcatcggggccatcggggcacctggggtggcggcatcgaccacgttgatggcgagattcatgccgttgaggcagtggttgggcttgttgcagatgaaccacaccatgccgggctggtccagcggcacgacgtcgctgccgctggtccagttccccagttgcaggttggcgctcaggtcgcacgccgcgaaggcgtccttgccgaccttcaccaccgtgtggttctccttggggtacacgaacactgcgagagagagagagagagatgttagagtcgtcaaataattcttcatctcatgcaatggtgtgttgccgtctctcgcgtgacgagcgtacgtacgcagggtgtcgccgaccgtgaacgtcttgccgtcggtccagccggtctcgttgaacttggccctccagccgcctacgtctccgaccgtccactgcgtggcggaggccagcgacgcgaggcacgcgacggcggccaggagaagcagcacttgcttggagttggcggacgccattagttgccgcgcgctgcgcttcgtcgtcgtcgtcccaggagtgactcttgctgctgctgtggcggcggctgtagctttggcaagcaggagtgacactcttgtctatttatacagccatagcagagaggcacggcgcgcggcagatcaaagcgctagctatagttaggcttgactactagagatcgaacacaccgttgcgacgatgtgaagtcagcttcgtctgcacagcaacagcaaagagctagcatcggtatcgccacacaaatggactgttgctccatgcagctgataaaagcgaggtgaagtgtgcatcgggatcatctatcactccagcctgcacttgcagggagggaggcatcgtggaaggcggcaacaatgcattatgccgcattatattgctagctgtttcttccggccggcccctgaagattcgtctcgcg

SEQ ID NO: 3112 - DNA, 1174 bp, Zea mays
ggtttctctatgttttctaggtttgagatttctattttctctattttatgaataatattgcattaattggcttgcagcgacacccgttcctgcacatccacacctaataattccagccccctcaccccagtttacacaagctagtggttcagaccaaagagcaagttgaactgtgcatccaaacatttgtaccttgaggtttgcttttttctgctctgttaccatcttgttttctatctgacaattaggttacaactgacttcagtgttttggttcatggcaggtacccttagattgcagcaggactaaaaagagcagtgttgctgtattcacagcatttgttcttgcctggcaagcaatcatccttgcattcataaggtacaaaccttgtcttatctggtttctgtccttaatacctagtttcatgaatatatatatttttattttgcattttgttctttgtatgctcactgctgtgctccatgttctgctaaaataccgagctaagtattgcttaaaagaaaaaataaagggagaaaagctcttattacatgaaaagttcttcaaaagcaagagaaaaggacatgaagtcaaagatcttcttacaagcagtaaaatcattctgaagcaaaaccaaaagtgcatcctttgtatcaaacttaattagattgctatattgattgatagatgccctgcaaagctaaatgaaccttaattgtatcgccactagaatggaaaacttttgcatcagaactgtggttcctgtaccatgatgcggatcttcattgttttttgccattctgttttgggatgtttcttccttgcggtctgactattactgataggttatgtttgtcatggaaaaaacacaggttgtcgttatcatggtcaacagatgtacctggaaaccatgaagttgcccctatggatggggcaagtgatccaagagtaacagttgctcttgcagtttcgctcagtttaaatcgcaagcgtgatggaaatgtagcttatgctggaatggagtccagcatatgtaagatggattaatccaatggagatcagccttcaggtgattgtgcatctgaaaattcgtgttggtgtgtggtccctagtcccagtcaccgtgcacagggtctgatgatcaagaagtgtgtcctgtcctgtacaagtctgc

SEQ ID NO: 3113 - DNA, 1118 bp, Zea mays
agcttgcatgcctgcagctgccggcatgctgccgccgccctctcaagacattggacctcttccccactaagagcactggactcaaggacgagtgcagcagctccaagtcgtcctcttgctccacatccactaactaatttaagcatcgtcattattaaatcgctttagtttctacattgttggcttctggtatttctttgatttgctagctagtagattcggtcatcgtctcaagtgtgtcattatatcgttgcgttgcgttgtattgtgtgttgttataactacgtttaagtttcagtactttatctcaatttatctatatatctatcttggtgacttgttttatcactcaggatatttcttggacaaaaaaaaaaaacagctgaaaccagtagggtacatgtcatgaaaaacaatgaaagcgtgaaaatcagtctaggagcacggaacatttaaaatatatactagaaagtgagcccaataaaaagaacctgtggccaattacctagattgtcatatttgatatgttgcaacaaacaaaaacctaggaatcgcaaaccaaaaatagtgaaaaaaaatcatgacctcaggtatgcgagctctataatcacaagtgtagtaaattcaaaaactccttatttgttagtagaaactgtcagaggtgaagactcggcctcgctgctctcagcaccacggcaccgtggaagatgaactgctctcacagaacacatgaacacacagtttcttttggacagaccaaatcgagcggcctacctcctttttgtgtttttcttttattgtagtcgctatgcatcgtaggacgtccaagcctccaaccatgtccacttcttgcgccataactcgcaggaaatgagcgcaacaagtttgagtggaggtctgggcgccgaacacgcgctccaccgcgtcacgttcacacatcgtgcgtggtgatcacgctcggacgtggctcaggacaagccctggctcgcgtccgtttatttctagaatttaaactctaaaaactaccgccaaaaactatgatcaggagctgaagtatctaacaatctccccctacttcggctcccctgatatcaacaacttacatgactccaatcttt

SEQ ID NO: 3114 - DNA, 1216 bp, Zea mays
acagacaccacgatatccagcccataatgagcccggtagagtaagactcaacaacaaacgtatttttcagaccacttatgaataccatccggcccaacatctagccaggccagcccactaataaaccggacgaatactcttccacgggctcactaccgtgcgcggctatataagctgagattccgacgcgaacgtctttctaaaccctacccgactccgccgccgcccgccgctccgcctcagcgcatagcccgccgcgacctcatcgatcaccttcagctttcaatcatggtgagttccccgccaaaactgtatccaccaccaagatccagggcgtccttctgactcgcacatggactaatttgttttgcgcaggcggacgtcgatgtcgaaccggaggttgccgccggagctcccaagaagaggacgttccgcaagtacagctaccgcggcgtcgacctagatgcgcttctcgacatgtccacggacgacctcgtccagctcttccccgcgcgcgccaggagaaggtacctttcgtgccacgactcgtttgtttccgtagtatttttgtttgctgagtttgttttgataggttccagaggggtctgaagaggaagcccatggcgctcatcaagaagctgcgcaaggcggtcagtttccaaccgcttagttttcattaccactttttgttagcgtgttccgatcaagataagtgcgtggatcgttatgctgtcatgatttacccgtacgatatgaggtgtgatcttggtgtcaaaattttgatcaaatctcagcgcctattgttgtttagtgtaaatatcgtcttgaaagaagatgcaattaatcaaccagaagactgtttacttgaatgcttggcaaggttgctagtatgagtgttgcaattacaaatgtcgtagcaaggttgctagtattgactgtagcaattacaaatgttgaatcttgttatctatgtctagaaggagaatttgttgtattttgtagagctcctatatcatttgttctctcttttctctagacaaataaggttgttggtttagaaattgcttactgaatggtgcatacttctccattttctttgttatgtagtctgctgttttgtgacctgccttgtatcaatcataccattgttgtgtctgccgaatactattgggatattgataaatcaaagtttctatcctgaatgtacagtatgcta

SEQ ID NO: 3115 - DNA, 1040 bp, Zea mays
atactaaatattcaaaattcaaagttgatttggtaattgatactggaggtaggagaacgaaaggaatgccgaagcctatacgattatatcacaaaaacaaactcacaagacgcctacacgagcagggcggtagcaagaagagaagacgaccagtccaccaaggatggctgcgaggctggcagcaggcatgaaattgaattccaaaatcataatctacctgctgcaaaaatcttgtcttgtactcgttaaccggtgggcgcagaagcggcagcgtcgtccgccggctcccacgccgacgcggtgagcagggagaggtccttccagcccagcttaaggcacgcgtcctcctccaccagcgtgtaccccttccacggatacatgccgaggagcagcctggcctgcgcggcagggctcccggccagggacactggccggaacccggcgtgccgcagctcgtggctccaccgctccacgcgcacctcccctgtccgcttgggcccccctacggccacgatgttgcgtatctccgcgcccaggagctgtcgctcaaccgcgtaccgctcggcggactcctcctcggccgcgccggcgccgtctcccagcgcgtcgaacagcgccgagtagtagtgcagcgcctccacgaaccggcccaggaaatcgccgctgtggcccaggtcctgttccacgatggtgatcagcttcgggcgcaggctccggagcagccgcaccgtgcccacgtccgaccccgtcacgtcatagaggcagtggtgcatccagtgcaccacggtggcctcgtcatcccgccgccgctggcgcgagccgaggagcgccgcggcgtcggcgacgtgcccgatcttcccctcgatgggtcggaactcgaacgggaggccgagcgaggccgcgaagtcggcgaggcggcggccagtggcctcgaggacgtcgagcgacgcgccgagcccggtgatccggagcgaccgcggcttgcgcgggcgggacgcgaggatgtggaagagccccggccactgcaggcatgcaagact

SEQ ID NO: 3116 - DNA, 1093 bp, Zea mays
aggatgacgatatgatgaacacaaaaactgttacctgcactttgcactgaaccagaggttttcctccacggtgaggttcccatggacgatgtcgtcttgcggcacgaagccaatgatcttcttgtaagagcggatgttgacgtcctttccattaacgaggacagagcccgtcatcttgtagccgttgagcttcccggtgacggcgttgaggaacgtggtcttgccggcgcctgacgggcccatgacagcagtcacacgccccggccggagctcgccgttgatggacctcagcagcttcttcttcttattattcccgagcatcaacgtcaggtccctgaactcgaccttgagcaacggcctcgttatctccctctgctgatccttggccatggcaaccaccccggtgaaggtcaggttcctgctctcctgctgctgctggaacttctccttctcgatctcgccgtacgcgtacttgaacacctgtgtatgggtggacctgtgctttcccttgggcgcaggcttgtcctccttcgtgtccaccacgacgacctctccgccgtcgctgacgtcgacaacaaccgacggcatcaccacctccgtgatctcgctcctgctctcggacgcaaacacggcagagtctgacatctcctgcgtcatcagcggcgcctcctgcaccctgcggctggagctgtgcgggtccaccggctgccgaaacgacacccgtctcgagaacgtgcgcgagagatggccctgcatgccgctcacatgcctcctcgcgaactgtttcgccgccctccacccctcctgcgccttcagctgctgccgggccagctggatggcgttctccctcgacctcgctttcctccgctcgcggatgctcaggaacttgtccgagcagttgtatatgaccagtagcagcaggcacagagcagcctgggtatataaaaatactagccattaagtcactgcgttggaattacaaaaccatgcgagagggagtatctactagtacctaccactatgcaagctccaaggatcttgacgttttcgttctccgtgttctcatcgcaggagccctttattatgcgctctg

SEQ ID NO: 3117 - DNA, 1196 bp, Zea mays
acccagtgaattcgttgaattactttggctcagccacaaagacacatggtacgttaacaatttaactaaactttcagttcttctaagagtacctttgtttcataggtactctgccattatagacacttatccactgtgttgcaggcattcccaccctgatcttcttctttggttgttcatctgcttcttcctctataaaaaatcggcctctcttttgaccaaattgatgtataagctttagagaagatgcaagggaggttagaaaaaaccaaaataatgtgtttttaaatgacaaaggcaaaatatgaacataccttctgagcaccatcagtgttaattggtctgacatctggatttgaacctactacacttagtacactatgaaaaagtgatgcgcattttgcatagtcgggttcttcatcaaacttcaagttgacaacatactctacaaactttctgaaaggatgtgggcaaaagcaacagagagatactggaaaggtggccattttcttcttgcagacaaggaagcttttgttgtcaccctatagatgcaaaataaacatcaagtacacatatacatcactcaaatcaatacaagtggctggaggatcctatattttacctgataaccttgccaaggtagacatcctcgtagaagaaagactagtgtatatgctagagattctaaatcatccctcctgctacctgttctcccaagatgtgcatgaacactagcatagcgaaatgttcccctgaaacagcagcagtaacagtgtatcataacagtaagactagtatctccttcatttgattcaactataagaagcataagcaccacagctttactagctactgtgacaatatgtttagtgtaccatctcaacagagactaagagactgattccatgtccagttaaagaatggctactaccatgcataccaatcaggaccatttgaccagtagtgactagaataggtgagttcattgcagcaagatgttcataaggagtaaaaactgtactgatcaaggaaacatgcaagctcacatgtgttaggatcaagccggcccacacaagtgagtacctcactcaaactcacacacaacactttggctaggctagaggtagaagaggaacagtgaggtgagcacagaacacacacacacaaggaaagtgctggtgctgctgcatgagaga

SEQ ID NO: 3118 - DNA, 1353 bp, Zea mays
attcgaccctaaagaaaacaaaacgggcgccgggtattagtgcatgtatacaacctatttaacatggagcttattgaggaatctctaagtgctaagtgagaaaaaaaaaaagagacgcgcgtgctcttcgcgatgtgtctcttagcactgtatttataatacaatgttttagaattgtatcatgcagcctcttaaatcgtctctcgtatattagaaaactgaactggtgtctcgctgtacatgcccttattattcggcagggcaaggcaacacggccgcagcatgtgaacaagataattaaaacaggcgcagcatgtgaagcggagataattaaaacaacctcagacatggaagacaaatgatctagctggcagggcaataacttcaacttgcattggtccatatgattattagggggggatgtcagctgtgctaatggcacatgcttagaaagacatggtatatatccctgtccctgcccagatagagtagagacagacatgcatggcatgggtcatgggccgccgaatataatcccgaggcgatggattattggaagaatgggacctcgctcggtggcatgcatgccaaaccccaatacgatccgcggaattattagcggctcgcgtggcatgctttacaaagtccgccacgggcggggacccgtaccacacgcgcgtgcgactcaggccacggccgcgcgcagcgcagctcccgccgtgacgagagaaccacacagactacagacaggcctttatttcgtcggaatattccgacgtgtccccaaccagcaataacagcacatctgcgtgcgccctgccctgcccggcctgattggacggccgtggtgcgcggctgcgcgccccccgtgcaccgatcgtgtcgtgcccatcacatcaagtcatgcatcaacgagcggtttatttactttgattttttttttggatccattggcccggggttccatttccattccatgcatggacaccgctgcaagtgcaagctctaacggagatgtgtgttggcatgcatgtgcaagcaggtgcccttctactgggcggcgcagttcacgggggcgatgtgcgcggcgttcgtgctcaaggcggtgctccaccccatcgccgtgatcggcaccaccacgccgtcggggccgcactggcacgcgctcctcatcgagatcgtcgtcaccttcaacatgatgttcgtcacctgcgccgtcgccaccgactccagggcggtcagtagtacttgaaagctagctacctactttatcagcttgttgcttgctttgcctctcgatctccctcctaacgaccacgttgttcttggtgtggctttgattttgttttggct

SEQ ID NO: 3119 - DNA, 1267 bp, Zea mays
ttttgcatgcctgcagctctgatcatcgtgggcccaccaatatcaatattttcaatgccatcctcaaaagagatgttaccagaggtgactttgtcataaaagggatacaaattcaccacaaccacatcaaatgtccctgtgccccaagaaaagagtttttagttcatatacagtttgttgacctacaaagttagcagaaagattgaaccttgttgtgtgacaattaaaattcataagcaatgttaaatggtggaataataaattcaccaattccatgatcttttagtgccttcaaatgatgctcctggtctctcctggcaagaataccaccatgtatacttgggtgcaatgttttcactcgtccatcaagctgaaataacgatacatgcagacaatatgtgaagacgagaaaagaattatgttcattaccactaacaacattctgtagatgctcaaaccatttcagggaaatgtgtgatttcttcaacttttgttacactgactcctgctgcttccagactggatgctgttccaccagtggaaacgatggaatacctatggggacaaaacgttgtttatgagatacttcattgctgttgctgagttagaattttactttgttctttacctcgaacttgcatccttattttttatactatacagaagtaatatacatcatatcatctacaagtaagaattcctactacctaaaacaccctggcagacaaattctggaaacaagacatattcttaccccaaaccctgaagaccattgccaagataagccaagtccgttttatccgacaaggatatcaatacttgtttctttcctgaaactgtaggataccaacaacagttaataaacccgaagtaagcccccggtgagttaggaaataatgggtatcaaaaaacacacgcacaattttatgggcagctagagcataggtatattcataaacataactgatcccttaattaattcaatttccagaaacgtgaaattagccgcgaccatgactcatgagaaacatccaatctaggatattagagataaccaactagacgaaatcatcccaataagatttcttcagtcacggtacacaaaaaggcaagcttttacctatacagctccacgacaaacactagagcacatgaacaaagaaatgaaaaactttaattaccgctgggcttggtatgcgccgctgccacggcggggccagcagaccgcgccaccgccgagagggacgacgcaagggccacgcgatca

SEQ ID NO: 3120 - DNA, 1062 bp, Zea mays
ttgctgcctgcatacacaagcgtttacctttatctcatcacatgacgaaagtgtttggaacttggatggagagatgtttcaggcatgtgaggtatctgtccaagcgtgccgggggcttgtcaacttctttgcttcggggccagagctgtagtaatgatactcgtaagttcctctttgcatgaacgaaggatgccaggagttcatattttttatttagagagtcccttatttcgacatgttgacatgttgacatgttgtgatgttgtacactcttatttgtattttagtggagacctagaacactttgttgatagatatactgttaatatttgttgatagctatgtggcatggaaactacaacccatttgtgctatagaatagaggaacaaaaggttttgattgaattaatgaagtaaaagtttattttctgttttgcgagaaaaaataatgaattgaagtgtatccacatgtttgaacaattcccaattagagatactctgcctcctgaatgcggtaaatgtcactacttttctatacaactttggtaaaatttagtatggtttgatttaggacagctgaggtctgggaataagctccgtttggtttgaaggactaaagattagtccttctattttagtctaatttagtctctgaattgctaaacggtaattgctaaacggtaggactaaaacagactaaactgctttagtcttctctcaagcatattttgcccctcgtttattttagttacactaatgatgacagaatgttaagaattattttagccttaaatcatttaatatgttctatatacttttagtcctaagaatcaaacacgcttaagtgagacgcacctgacaggggaaccaggcattaccttcaattctgttgcaagtctggaaggccaaatatggcggcacatttaggtagtcagcattgtcgaggaaccctactaatgtctaatacttcctctgttttttatttgtcatgttttagtaaaaaataaattagcgggcgataaatattcgagaacggatgtagtattttttatgtacaggttc

SEQ ID NO: 3121 - DNA, 1188 bp, Zea mays
agaaggatattgaaggaatgaaacaacatttcttatgtgatggttctagcacttgaatatgcatgtgctcggaactcatcaaaccaaagtagtaagcacatagacatatggcataaggacataaataaaatatggtacaagcatgtcagaaactactttgatacgcatgtgtgatgtgtcctgtcctgtatacagaacatgatgcatgactgagacatccgagggtaaaatagttgaataaattacataaattcattgacacaaaacctccctctaatactagatacaagttattttaccaatggaaacacaaattgagggtttgatttgaatgcaaggatttcacatgaatcagttccattttacagcaaaaacagaggaacagtaaatgtttcccatgttccaaacagggcctaaagtgcaagagaaaatgacattgctgccctccgtttcttttgtcgctacatggtccaccataaaatgctttaagtaagattgagagtgcaacatgaagaaactagagtcatatacctcaaagttgtaaaacgacttatacttagttcatgggtaagtcaaaatgttttatatatggcttcatagggactacaccacagtagaattttgtaaatcggaaaatggtaaattcaaatatgcttcagatagatcttttcaattgctgctacgaaagcaggtagactgagtgttggcagttgtaattgggaaagttgattcaaagatggaatggtgaatacatttgtaccgaataaaagcttcagaaaagaaaacataagcaaaaacagttttctaatcatgcatctatgcataccactttttgaagccacaaactcttttcattctccaactgctttattgtctcatgtaatttatcctgcattgcaatgctttattgtctgattaagtcatttagagaagtgtggaacaaaaataaagccacatgatcgacataaatatataactattgaacgaatactgtgaagttactatatattatcaattcaagtgctgatcaaattaacaagtattttaagaaaatgaaaaaagatgtcgcatttgcaatatcacaaaccaacaaaatactcacgagtttggcttcatgaagtctatgcatgtcaagctccacactagactctgacagtccaacactcctctgatctgcaggcatgcaag

SEQ ID NO: 3122 - DNA, 710 bp, Zea mays
aaagctgatgtagatggctaattaatgtatcaactgaagcgccggcttgattctccggtcactgaatgccttatcatgagcccctggccactccagcgtcggctgtctggaggttgaagttgaagatgctcggccagcaaggtgggctggctcaaaacaaaagtttttcttttaaaatttcttatttatttttaacttaaaatatttataaataaattgaacctttattatatatacacacacggttatcacacattcacaccatcactctcgtatgatctgatacccaaaatacacaccaagacgacgtcaactccagtggttgcatccaagtatgggccaaaaacattcgccacacattccaatccaagtaacaacaagattatgaaacacaaaaaaaaaaaaaaacttggtggtccttgctcttcctattctatagtgagaccgtaagccttggaagaagaaaaacaatggcattgtagtcagatcaatcatggagttgtggcgtgtgatagatccaccagagtcacatgaaaccggaggccctgtagcttaacgaataacgaagcttcccaacaagtcactgttcccgccataaaaccatgcagattaaaaagcaacaaccaaatatagccagaccccagacccagacaccagagggcatggcattgcagcgaggccgcgcgcggcagatagatgcagagattctc

SEQ ID NO: 3123 - DNA, 1179 bp, Zea mays
tgtgcgatcgtccatggcaagagaatctgaagataagggagagtggtcgtaaaagcatgtagagggtaattttgtccccttggatactaaatacatggaaacaaattataaaaggaagaatatagagtaaagggtagtataatcaattagaaatcgtttatagtaccttttttgcgaaacaaatctttcagatggcattattgcgaagcgcaatgtttagaatcctaaatatgtatttttctcttattcataattacccgcactcatgcaccattggagtgatcacttaatcctcgcttttttcgtccatagcttggatggactatagaactttagatctttcctatgatacgtagtactacctctattccaaattattagatatttttgctttttctagattcataacttttgttatgcatgtaaatactcccttcgtcctaggacataacgcgtaaccacctctcgttcagaaaccaagaaatgtatttaattctctctatcaacactagcactactgtattgatatacatgtgtctagagagagagcgccttatatcatgggacaagactaaaaaaggttacgccttatattacgggacggagggagtatacaattatacactatgtctagattagatacataataaaaccaatgtatctagaaaagccacaacttcctataatttgaaatagagggagtatagcctttattatatgttaggctacatgttttcatgcagcgaatttaaaatctgatatgacatcagtccacatgctagaatcaagagtgataagtcggtgtgtcagtgctgcataaagaataaagaattgttaagttgctactggaaaccagtaaaacactgcactttgtatagaagatttttgtgtaggctgtagatcatttctgattcagtattcctacactgattaacttgccatctgatttttgttgttaatgtgtacacaatatatcttgttaatttttatacctcaatgtagtcttaattaccatgcttgttagagctgaaatgacacaaaaagctgtgatgttatcaacacttcaattacgagggtctaataattaaaatagtaatcaggtatttatctgatattaggctgtgtagaataggatctactaatgctccttcgcatgtggatgctacttaatttgctact

SEQ ID NO: 3124 - DNA, 1100 bp, Zea mays
cgtcgaggaaccccacgccgcggggctccagcttcaaccacaccgacttctactccatggtcggccgcagctccaacttcgccgccggggacgcgttcggcctgcgcacgggcgccacgcccaggccgtccaactacgaggaggacccgcagggcaaggcgaacaagtacggccagtacccggcgcccaacccggccatggcggcgcagcccgccaagggcctcaagaaggcggccaatgggcaggccaagggcgaggacggcaaggacctacacatgttcgtgtggagctccagcgcgtcgcccgtgtccgacgtgttcggcaatggcgccgccgagtacaacgacgcggccgccgtcaaggaggtccgcatggccgtcgcctccccgcgcaaaggtagcttctcctcgtttttggcttttgagctccttccttcctgctttggctgcgctgcatgctctcagacacacctgttctgttcttgttggacgttttagttgcggcggacgggaggaaggagcggggcgaggacttcgcggagcgggacgacttcagcttcgggaacaggggcgcggcggagagggacgcggaagccggcgacgagaaggcggcggcggcggcggcggctgcgcaggggaatgcaggcgccgtggctgcgcccgcggcgatgccaccgacgagcgtgatgacgcggctgatcctcatcatggtgtggcgcaaactcatccgtaaccccaacacctactccagcctcatcggcctcatctggtcgctcgtctgcttcaggtaaccaacggcaccggcgcggcgtgcttgaaattagtagtgggcgttgcatctttcgctaacctgtttcgtttctggacacgaacgcatacgcaggtggaacttcgagatgccggcgatcatcctcaagtccatctcgatcctctccgacgccgggctcggcatggccatgttcagcctcggtccgtggatctcaaaaccctctctgctgcctcctctgtctggagtcgcatcgccacgccacctatggaacagttaacccccttgtactgacaccgcgcgtgacgtcgccttcctccgtgcagggctgttca

SEQ ID NO: 3125 - DNA, 1022 bp, Zea mays
cggcatggctccatcagactgctcattctgcaatggtagcatatctggtgcccacaagacacaatcattcccatgtggcttctcaacaggccgaagaacatgctgatgctttccagattttcttgcttgctgaggtcttgataggccactttcagtactatttgttccatctgctgaattaacatgctcctgattcatagctgtaagtgaaagtccaccaacagttatacttccaacagttacaatagtaccttcaatcggaacaatagagctactgataataacaccaccagtatgtgtttttggctcggtagagattttcactgtattctgttcattaaacaccacaggtggatgtttagaaataactgaaacatcatctacctttttcttactcctcaaatgccgggttcccttcttgttctgagatgggggatcatcatgtggtgcaacaacagccgttactgtgtcgacaggaacatcaacatttttctgcacactggaatcagtggttactgaagcacttgccttctcgccagaaattttctcctctgaaacaacctgtcttttcctgtagccttgcttagtctttaccatactgatattatgcgactgtgagatactcttctgtacaacatgctccatgttgctgtgtgtgttcttgaccaaagatgaggtggtatgagcatcatgcgctttgccaccatctaaagcatttgattgtgcagtagactgggcctgtatctgaaccatagtatgattgggatcattaggaggcagaagagcagtaagcctatcaggcgtaacaacatcatgttgttcagttgaagtgtcaagtttagcattcacatcaagtccaatctgttgcttatcatgtgcatcatcagtttctacttttgtatcatttgatttcttctgaagtactgatgatcgcctgttcaattcttccaactttgcgagtgcttttgctttttggttctttatccgttcctcttcctcagctttcatcctttttgcacgtt

SEQ ID NO: 3126 - DNA, 1018 bp, Zea mays
agctgccagagggtggtgaagcttcaacagttgttccagagcttgcagaagcggtcgagcccctctgtaagattgagccgctcttcttgttgaagggagaggacctcatcttccggaccttcttctcgggggaagaagcactggtgttgttatcctcagtagccctgagcatctcatctattttcttctgcgttgccttgccttgagccggcgcccttttcctggcggcagcaggagccttcggcttcacagcggcagcaggcttccttcctctacctttcttctgagcttggacctctaggacttcctcatcaacatcagatagtatcgtcgccaaggatgatgacgccttctttcgtccgcctcttttgcttgctccctctgtcgctttgttttcattctgctgttctgttaattctgttacttcagtttccatggctgcaaagttacagaatccatcagctatttttttttacagaaaactctccatttttatcattcaaatagaccacgatgacaaattctactttgacagtaccagaatgatccggagaggagtcgctgatattaaaagctgccagacggtcttttaacgacggcatgtcaacttcttcgtccacatgggcacttgcctgtgagatttttaaatttgaattgttaataaaaccgacaaaaaacccattatacacaaattagttgaaaagatagctttgagaatcttactttcttggattgtttcttttgattttcagcagccacataatctccatcttcagacgcagaatcatttgccttagaaagtataattcttttgtcagcaaattgcaactaaatagtactcagtaaactcagggttagcatttgattctaaccttgctggatgttttcttcggttgagctccacgctttgcaaccgctggttcaaaatcatcatctgtggcagccgatcagagtttcaacattggttcagagttcaaacagagggaatcatttccataggaatgacacgggaaacgtt

SEQ ID NO: 3127 - DNA, 1029 bp, Zea mays
gccagtgccagtgccacaccaagacaccatcgatatgatctgctttttttttccttttggttcttggcaagagaaaaaaaaaagatgatgatgccatttcttccacgcatgcatcacttgctagcagtggatatttagatactatggaacccacccggccggtcgtcatcagctatatatacattcggtagctgagatagatggatagatatcatgattatatatggtgataagctaacatgcaagcaagagacatagccccacggccacaccccatgtccgtaccgtacgcatgcaactactagtaagtgtatggagatgtagtcagcttgctatcgttaaacaaggggatcaaaccctaattaattggtgtcggctgcccggcctgctcatggtcatgtatgtggcagcaggattgtactcgatcgcaagccggccggccggcaccaagctagctcttgtcttatctccatgcaagcctgtccgtctctgatcccaccggaccggaacgagcgatggaacgcagcacgtatatacgccgggcccggccgggttcatggacatgccatgtttgatgtttcgtacgtgcgcgcatgcatgcacgtatacgatacgcgtgagagcggtacgtacgtaccgtgagaagacgcggccgcagtcgcaggagtggccgcgggtgccgcaggtcttgaggtgggccttgtagtcggactgcacggcgtagcccttggcgcagcgggcgcacacccactgccgccgcccgccgtgcttgcgccggaagtgcttcttgatgcccaccaggtcgcccagcgcgtgggcggggtcgtggtggaggcagctcggctcggggcacacgaacacgcgcttccggggcgcgccgccgcctgcaccacctcctgtgccgctgctgttattagcgtcggcggcgccgccgccgccgccagcagcagcagcaggaggcggcggcgcccgcttcacgagccgccacggcaccttgtggcgccgccggtgcatctgcaggcatgcaag

SEQ ID NO: 3128 - DNA, 1107 bp, Zea mays
gcttgttgattggcatgcctgcagcggactctgcactgcacgcggtgtcgaactggagaggctgctggtggcgctgcccagacgacggagccacgaggcccagcgccggcacgtacgtaggacccatgcatgcatgctctccgtccggtaggcacacggtggtggccggacagctagccaccgtcgtccgggtctccgtacgaccgcgttgaactgtgcaggtacgtgcaggcgtggacgtcgagctggagcactcgcccagtggcccggccgggccttatctaccttgctcgtggactctggaattctggatcaccgtcgcgccccgcccgcattcattgctcggcgtctacccccagcatgcacacggcagatgagtaactgctggagtcgagtttatggttgcgtgcgacagtgttgtcgcgtcgtcggtcggaccccacatggaagcggatgcgatgcatggcccatcccccctagtggctcgagcagctgctactgtgcgcctgtgtgcccgcaaggccgcaatccatgtgaccatgccggcgcggcgcataccgtacggtccggaatcacggacgcgtaccccctcgcttttgtgcataggaaatgtgcgcgtctttctatgcgcgcgtgcttgcattttgcatgcatcgtcggccctcgccagtcctcttgctactccatccatccatccatgcgtcgaaatctatgccttggtccggccatgcgcggtttcgtacgtacttgttgttcttgggactagactatggacatgtctggtgcagatttttttaccggcttttcccagaatctagctgtggggagaatctaactgtgtagagaatctaattatcattaggattacgtgcagaggaagataacgttgtccatggggctcaagatttataaagtgacggattactactattacgacgactcaaccgattatatatttatgttgattttgaatgatttttatccaaacgaattttatagaaactgtctgaaaagctgagtgtttggtagtccgcagcagattttagtgaccagaaactccgaaaaggcgaaacaaacggggctatatgggcctgcacccgcagtcca

SEQ ID NO: 3129 - DNA, 1058 bp, Zea mays
aacctgcgccgcgtcgacgtccgcggcaacagcttctggggcaacgccaccgacctgctcgccaagctccgcaacgccgagcacgtcgacctcagcgacaacctcttcacggggaccatcgatttggacctccgcagcctctccagcatcgggaacacggtcaggtatctcaacctcagccacaacaacctggacgggggcttcttccggaacgagacggtgggggcgttcaagaacttggcggtccttgatttgagcaacaacgggcttgctgggacagtgccgaggctcgatgcctggttctcgctcgagtttttcagcgttgccgggaatgggctattcgggatgatgcctgagacactcctccagaattccatgcggcttgtcgaggttgatctcagcaggaacggcttctcaggtaatcttgtcgattttgtgatctatcagagtaggaatcccactacatacaagttcaatggtggtgatctatttaatatttcttatgtgtttttttatattcccttggcaatgcgagtggccagtgcttccgctgccgaagcgctttagttgcaagctgccgatcatattttgggcgttggtaaacatgcatgtctctcatggcgatgaattcattatgatgacatttcaaaatgattacggcatcttgaatctgggagactccatttgttcccaacttcgcaagatttgatgagcgacgtgctcttgcatgaatatagcattgcattttgtggtttggatagtgtgccgttttctttggacggatatcatcagcaaccttctagctgcatgcatgctggcttacagttagttttggactatttctccccttgtttgagctgtgcttatctcttttgcatcatttgtgatattagcaacagtttgttatgtatctaaccaaactattaagcataaaccagcaattgatatttgcccccctattaaaccaactattatgttgattcttggtctgtacgaattaatctaggccttttttctggatctgtgtccgctaacctcacttttttcacataggattt

SEQ ID NO: 3130 - DNA, 736 bp, Zea mays
cttgcatgcctgcaggggcaggtaggcagctgcgcttacccgactgtctgcggcgcgtacggcatctgcgtcagcgggcagtgcacgtgcccatccgcgacgtacttcaggcaggtcgacgaccgccggaccgacctcggctgcgtgcccgtggccccgatctcatgtgcctcgacgcaggaccaccggctcctcgctctgagcaacgtttcttacttcaactacgtggataccaaggccgcgctgcctcggatgatcgacgaagagagctgcaagaaggcatgcttgcagaactgctcctgcaaagccgcgttcttccagtacggcggcaacgacacctcccggggctcctgttacctgccgacgcaggtcttctcgatgcaggtgaaccagtggcaagaaactcactacagctcttctgcgtacctcaaggtgcaggtcacaaggtctcctcctcctcctcctgtccctggtccctcgaattcgaatgggacggccatacccgcagggaaaggaaggagaaggactcgtgaagctgccatcgttggctccgcacttgcgggggccattgctttactagccgtgatcgtcgttacctcggttgttctccggaggcgatatcggcgtagagatgacgaggacgacgaggatggccttggagaagtgccaggtatgatgacgaccaggttcacgttcgagcagctgagagcagcgacagagcagttcagcaagatgt

SEQ ID NO: 3131 - DNA, 1182 bp, Zea mays
tgcatgcctgcagtggctgctgctgctgttcgctctgctcgggacgtccatggtcatcggcgacggcgtgctcacccctgctgtctccggtcgcacctcccctccttgccttaactgtcgtcaatatccattggttggtaccatgaatctgacatgtgcttctgtttctcttttcagtgttctcagcggtttcggggctcaagctgtcaatggtcaatgaacagcaccaatgtaggtcgattttatttcttcttgatcatgtttcgtttactgttgcttgatgacgatgtggtacctgctggttctggtctgattgctgcttggattgtgacctttctgtttcgtgtctgaaaagtggatttctgtttttgacatgttgatttgcagatgttttgcttccagtaacatgtgtgatcctggtaggcttgttcgccttgcaacacttcggcacgcacagggtcggattcctcttcgcgcctattgtttgcttgtggcttctctgcataagcaccataggggtctacaacatcttcatttggaatccccatatctataaagccctgtcaccatactacatgtaccgatttctccagaagacacaagttggaggctggatgtcactgggtgggatccttttatgtgtaaccggtaaggaaagaagatactcctaggcgattgcatgccacacttcgactctgccactttgcataaatgatgaagatgcattgacacttcaaaactgtcgaaatactttaggttctgaagctatgtatgcggaccttggacatttctctcagtcttcaatcaaggtatgcaatagaatgggttcatgtgcaaaaattaataatcatgtacaatatcgaccatataaatgcaccagctatattctcacatacttactctcgctacacaaataatctagtgtcatagtttaggggaagtaaatccataggaattgatttagagaaccaatggaattttaaaaatagtggatattggattgtatctgagacagtgtgaatagaaaagttacagagttactaccaatatggcctattcagagggaggcagagtctagagtttctgcgcctgtctctgaaggacagccttcagaacattcctctgtaattctgacttacaagcacaaaaaaatggcttatgagcatagtctgcaggcatgca

SEQ ID NO: 3132 - DNA, 757 bp, Zea mays
atcatttaaccagccgaggcgtggctcagatatggaaggtgacacatgaactttttcccctacttcaaatggttgtgccttctcgatatctgcaactgagcaaagaaaaagcttgcttctaaagcagaaagcaacacccacatctccatcatcttgtagactatgaactatcccaatactatttcgagtcacatcctcccatccatatttgggtgagggaactgtcactttgactctaatccaatcgccaacctgcaaatataaatggaaggtaatgatccaaagaaaatcgattaaggcattaacatgaatattaaaaagtttataccttgaagttctcaatcttttccatgtccgatggatctgcctgccatggtgcagcccgattaggaatatcaatgatgagcaggccatcactctcgatgtcaattattttcccaacactgtgatgagtctcaccgccccatgcatatctgggctctgcaacagacctctttacacatacttggtccccaatctggaatttcgttttgcaaaaacaagaacataactaagaaaaaacaaacaggcaccaaaattccacgaaagcacaaatatacgaaaggtgagtttccattgctgtatagccctactgaatctagttagaattgtaaaatagacagtaaaaattgatctttatggtaatataaccttaagggtggtcaaaataaacaccccaaccagtacaaaggggagcccttatatgtaaagggattgg

SEQ ID NO: 3133 - DNA, 1024 bp, Zea mays
aacacggggaactttctcaagcacgcgccgatggcaagagcggcgccatgtacgagccggcggcttcccagccgatgtataccgccctggccagctagctctacaagcactacatcatctacaagttcttcatcaacaagtagaaaaagctattttgcctggaacttgtggttcggttcatccaactatccaagttaacatttcagccattgaataatgtcttagatgaatacaggctcatgccactttcaattgacaactttatgtccaaaatgtctctgttccatcgtgatcttttgggtttgctgataacctcatttttacccttattcgtgtttttttctcaattttgctcttctagtgctatagatcataagagcaaaactgagaaaaaaaagataaaaattagaaagttggcaaaactaagggtacaaatttaaaaaccgtgttatttattcagaaggaaatcaggccaatcaactaagatgttagcttacaatttgcaacgaatactccacctgtctttagaattttaacacagattaagaatacaacatgtcgagtgcgtagctatatataaataaaatacttcgaaacaacatatcccagatctatatatcggagtacacactaatatcttcctgacagaaagtgatctcatgtaagcagcagtgcaagctcactgaattaacatgtgttcatcggataaacaacttcggcaatgaagagtcttagcaattacagttctcaaaattttaaattgcaatttttcagaaacctcggcagccaactttttgttttcatgtaacaaaattaggtccctaacaaaacgaaggagctagcatcacatgatcactcttcctcttcgtcgtcaccgcctccaccagaagccttcttttggttctttctcttcacccttccaggttctccaccaccaagtgggctggtaagagagaagtcgatgtgcttctctgagtcaactctcaccatgaatgagggaatgttgacaagttgcctcccaact

SEQ ID NO: 3134 - DNA, 998 bp, Zea mays
aagcaggtgctttggttcgtactgtcttttctaaaatgtttatgttattggatcgctttttgttccagtttgttcaacgtaagattcaaacatgactatttgattgccaatgtgtatctaggcttttatgcattacctttatgattgttctagctactaaaatgtgtacctttgtagcattatttattcatctatattgcttgtcatcatttaaatgtgcatttttcttcttcatgaaactgattttattgttattatacactatacaggtttccttgtttacaaatcccatatggctggtgaaaacaagactgcaactacaaacagctaaacaccattcttctcagtattctggcttttctggtaatatgtgctttctttaagtacttacatataaatgcaaatgttgtataggaagtagtcagtagtcactcatattgttgggtacatgtatttaagtctggtttagcaattaacaaaacacatcatactggtgtaactttgaactctgttcagcatgatctgtgctcattctcagttctagtagaagttctggaagctatgcttatttatgtgggtttagataagaaggtcctgtttctacttctacgaagtatctttctgaagttcaattgctgagatgttgggttgaatggaattgtagtgtagggtgtaccaaggggagtttgcttgacaatggtgatttgagtagtcctcctaacgcatatgatgcacctaacaattatggatgtaatcaatctaaataataacctagctgttccttagatacatacatatatttattttgttttctcaaactacaataattaattcatatcctaggaaactaactacttattttgggagaatggacattcttattggggatggggaaggttcttccgttctaatattgtcttgtccactgctgttttatctctaggactattaatgcaagttatttgctattccagtaccgcaagcagcaagcaaactca

SEQ ID NO: 3135 - DNA, 1070 bp, Zea mays
actgggctgcgagatgcataaacccgccggatgaaggatggagtgctttcacgttattgccgccggcagctgcgagcaagagtttccctgggtcagcgagggtcacggcagaggaagccgaaacggatccaaaggacatggaaggggttgcggacgaacctgacatggcgctctgctggtgcgatgcctgctgctgctgctgctgctgcgtcttgtcgcctggtcgcttctggtagaggcctagggcagcagcacctccggctcccggagccggaggagcgtaggtgttggatatgaagaaatggccttgcgggaatggctgctgtttcatcgatgctggctgcgtatgtgagtgctgcttgctcccaggattggaaccaggcgatgcattaggctgctggccaaggatggatggcatggccatactgaaatgattcgtgggagtagtcctggagccagacgtcgacgcggagttcttggctgactgctgctgtggtgatggcagttggacaggctgctgaacaccctttgcatttcctgtggcgggtgggctgccaccggtacttttggacaccgaattggatggtgaaccagaagcaacaggggcgtttgaagatcgagatagatcccctcctccggtagaaaggtttgttagagaaggtcctacctttgatgaacttaaggaagtctgtgattggtgaccaggagtgtagagagcctgcatagggacttttgcttgttgctggtggagactactgttcttcatcataatcaaattagggggtgtggcggcaggggtagtcgtagcagtagatgaaggtgtccctctccctgaggatgccttcaactggggggattgaactctcccttgggcagcacttgatgggtacatcatattctgaaaattagccatgtttatacggtcttggtacccacctgcactgttctgtgtacttggtgcagcagatctgggccgattcagatggtgatgctgaattagctgctgatgctgctggtgcttttgttgcgcttgcatctgaaggtgctgctgctgctgctgagaaatgctg

SEQ ID NO: 3136 - DNA, 1301 bp, Zea mays
tgcatgcctgcagatcatgtaatccaaattacaatatgatattcaccaacaacttaagcgattcatcattgttgttaatatatttagtgataccatgaagatcggaagagccatatacatgcatgaaatccacctctcaatgtggtcaatgtcagaaacctggaaagatgaatgagaatgatgagaaaaaagcacagtttatcacaaatcaagaacacaaaacaaagcttaatttctgtactacggaaaaaggtttgtgcgaacttatcctcatacatttccaatatgcttctataaacatccaagtaacaaaaaaaaattgaaactagtgcagtttctacagaattaatctgttcttttgcatatcatcatacagtaaatttgtttccaatactgttcacataatatacttacgttgaattgtgaattcagatcagcctgtgcttgaataatttcaattagttcttgaaaggactctctaggagcagaatccccaaatatgctcaagcttcgcaagaaccccatgaatagttcgaattctgaaccagttacatcttgcacactctgaataatgtcatttgttcaagctcaacacataacataactagagaattgaaagatgtaaacaatcatatggtcaaaaactgaaaacagacaacatactttctttatcaaatccgttataaatctctccatttctgcttgaggtttcagcagctctgctttaagaggaaagacctgaatccaaaaaaacacacaaccacattcttgatctagcacactacaaattatcatcaacagaacatgtaatccctacattcagctatgtaccttgtctcgaagaaaacaaataatcttctcacgaatctctgatccttgctccacatgcttaaataaaggttgtaatgaatctggccaatataaggtaccaattaacagaaggaaccaatgacatctaaaaatgaactgaaaaggagaattcatacaatacaagcatagtgtgcatttcaaaaaaaaaaatcccaaacaaacgaaggcatgttcaaacttcaaaacttctgaaatgcatgtgcagttaaattagaaacttttgtgacggattggcatagacgctaaactaatagccaacaaaaaggcagatattacaacttaaagatatgtgtattacatagctctaggtttctcgatccagctaacatcccctcttggtatcagaggtcctagttttgctgcatttttgtgaagctgctgtttattttggagaacagaggtacagctggcctgatctgcaggcatgcaag

SEQ ID NO: 3137 - DNA, 707 bp, Zea mays
tgagggtgagggtgatcatgagaactgctgtcaggaggaaaaaaatcctaccagcagatgcttgccatggaaagaaagaaacagtattccttggcgagcatggctatgtctggaactcatggaccaagtgtggctgataagcagctagctagttggttacctcgacttgatcttgaagaaatttgatgtaaccgatggcctccatgagcacagatgcggtatcagtctgcacatacatagtagtgttagtgtcaggtatatatttatatatatagagagagagttaataatatatgtaatcctgcctgccctccaaaaccctaataatgctgaataatcgtgacgacggccgggtaccttgccaaacggtgagacgagctgctgaagagcagcgatccggtcccctaatttctctttccttacctaatcagggaacagaattagtactatatatatatgattggatattaggttggtgttactgtcaattaacgttgatcgaaatgacgaaacgatcgagacggcacgagacccagcctagagtatacgagtaccttgaaagaagggacgatggtggaggaccgctgctcgactcgaggcttcttcgacgacggcaccactggcagtgctgggcgtgctgctgccgccgccatgctttgacatgccgcttcgtgctgcgcgcggcctccacaagacgcgcccatctg

SEQ ID NO: 3138 - DNA, 740 bp, Zea mays
gtgtgctggcagccagtctagtgcatgctctctcgctctccgatgagatcctggccgaagcaaaggtagagagagagcaggtcggagcagaagctaggcccagccgggccgggcccatgctgtacaaagaggaggaggaggagtacaacaggccggccgggctctcccttttgctctgcatccattgcagcagccttttagggttggagagtgaccgcccggccgcgccatcttttttccgcccaatatcgtcgtaccgcccataccctcctccggctctggcctcgctgcacttgcatcgtcttcacttaactcctcgcaggctttgttgtgtttgcaggggactaataaagccgtttgcagtgcgctgctggcgccctgcccgtgccctgtcaccaccatacgactaattacacacaccttattcatatatatataatacaccctccatatagatatatatagttgatgatatagaaaagagagcatgcatgggtgacagggctttgttctgttgaagaacgcaacgtgatcttaattcttccctagctaagatcagcggtcctccatcgtttctgatgaacgcgcgtgcgtgcgtgcgcctttgcagtgcatgcagatgggcgcgtcttgtggaggccgcgcgcagcacgaagcggcatgtcaaagcatggcggcggcagcagcacgccccagcactgccagtggtgccgtcgtcgaagaagcctcgagtcgagcag

SEQ ID NO: 3139 - DNA, 1331 bp, Zea mays
agcagccaaacgcccaacatttgttttagtcattttttcaccaaaagaaataggatctagttcccgcatgcaggatatagattgggtgcttagggaagggataaagttcagtttattaagcaaggcaaatatctttgctggccttcccacatatgctgttgtctatattgtcaagataaacatatgtaattataccctccccccccccccccccccaacacacacacacacaaaggaaaggcaaggaaagaaaataacatatgtatttttaagcatttttttaaatcgttaatacataattaggtctgggcttccttttgtcatgtgctatgtagtaaaaaatgtttctgacataaaattattgtatatgcccatatgtcattagacctcacccaaagtgccatccccagaaaatcttatcggaagaagttcagctgattgcctccaagtttggttctgtttacttccttaactatttcagttagtttaatttatctcttaacaagatttaccttttttatttctctatgtacaaggcctgaatcttttggcaaatggaagctgttcaagtttctgatttttctctcatgtttcaaaggttgttttctggttagtgctgaatttccaggtgtttttatgccgaactttggcatttgaacttgcacttcgacttctgttctttttttaacttccggacaagtttgctaaacttgatcacttcaacttccgagcatttgcaaaatttctagagatttatgctgaacttccacaagttcgatttcaagggttgttcttaacttgttcttatgtttgttcttatgttgtctctcgcagatcgtgcatatgatcatacaaactacgtgtgaagtttaaaataggagattgaatggaagataatagagggcatgtttgtaatctgtccagattttattaaacaagttggattatataatctaaatggattataatctaaaataaacaggtcagtacgagtaagatgctggagacagccttacttccgctttattttaagtcttcattagcaatgtttcgaggtccaatagtctcccaacggatatgtggatttggattagctatcagagatgtcaactgtcaaatattgacataggaaaaattcgttcacttgtcgaaggctcccactgaacccaatcccgctcccactctcagaattgctgttgttgttaccatatattacgaggagagcaaaatttacatgaacaatagagatagcatgttcccagcctcccaggttatatcagatgagcatactagttacataagaagccatatcccagaaactgcaggtcgac

SEQ ID NO: 3140 - DNA, 974 bp, Zea mays
atacccaaggggaatggagttaacacaggcaagtatagcatggtttcagaacaataatctcgcaccaccataccttcgacattgttggatatctccaaacaattatctggttctgggagtacccgtgggtgctaacaagctcattcacattctttgaccacgcaagattgcagacctgtcaagtcatttggcatccttagcatttgaaaaaccaaacaagatgtccgagcctacccctcccccgattttatacgaaaatttgcctgcctacacagtgtcacagtggtatgagaacatctcaagcagaatccacagtgaaagcaaatatgtcttggagttctattcttctttttggttaattccctttctgtttctattgttgatgcatctttttaacgtaatgacaggagccctgcctttcaattaataagaaatagaattaatccagtttatatgggaaaccaggcctcaattttttttttcattttcgctttctttcccttggtgcttcgtgttgtgggtttcagctctagcctaccctaacttgcttgggactaaaaggcgttgttgtggttttcctctatttggatatttcagtggaacttcggcttctaacatatattggttaaaaataacttggcattttaaacctcaagtcctcgatgctaaggagtttagaacatttcttctatttcttatatttacaaatggaccactgtgatatactcttcagaaaatgattgcaatttttgtaatgatgagaagagagataaacgaggattgaaggttttgacacattgagagctacctggctgccagtgtccacacagctcaatgattgcaacttttgtaatgatgagaagagagataaacaagggttgcgggtattaacagattgaagactacctggctgccagtgtccacacaactcaagtgtgtatttgtggtcgtattacagaatcgtatgcatctat

SEQ ID NO: 3141 - DNA, 951 bp, Zea mays
agcaggacctctcatccagaacctcccaactccacccagaaggcctctcatcattctatgggtcctgctatccttcctgattgacctggcccattcttaagctctgctccagagtgcagcctctcaggactcaagatcactgccccttgatccttgagctcagagataacaagccaagaaagcgcaggtttcacttcgagtccttttggactaaactggatgggtttcaggatattgttcagtctgcttggaactctgttgatctggatagttgtcccttcctgacccttgataaaaaactgaaggcgacggctaaacagttgaaagcctggagtgccaacaaggttggtcatgtgagatctcagcttgctttggccaaagaggtgctacacagggtggaaatggctcaggatgagagacagctcacgacagttgaggtatggttcaagaacaggctgaaaaggcattgtatgttttttttcgaaagcgcaggagaactgcgcatcattatattaagtagaaggaaaagagggtccaaaatagaccacagtacaaaaagctcccctaaggaggtttaaaacaaagaaaaagaaaacaatccatgataaacaaatacaaccctacaacaggcagctaggggccactgttggttgcggcaagaaaggagagacccttagctcctgccatttcccccaactgttgttcatcccttgcctgacagagagttgcggaaacactaggggataatccatcaaagacaaaaggcattgtatgttgctgtcctccttcaagcgcaccatggctagacttcgctctagaatctcttggctcaaagaaggagatgctaacaccaagttctttcatctccatgcccggcaccgcaaaaggaagaattttgtagcaaaacttttggatggagatcgaattttgactgctcataatgagaaagct

SEQ ID NO: 3142 - DNA, 1054 bp, Zea mays
aatcccgcttctgttctttcccaggcagcaacccaacagcgaacccataaagctacacagaaacatcttatcttaattctcatggttctacaggaggaatatcagaattaacacacaggaatcaggtacagtttgccgcatcaccttggcaataatatatagtaagttaaacttaccttgtgaaaccaatgcgtttgagaaaaaaaataacatgtgaaatagttcatggtggccagaagatacatcgcaagcatgacgagagaaatctgaaagaacaaatcaattgaaacaaacatatattccattcataagaccatcattattcgtggacaagggttgactttacaatttgacagttttgccaaactcggattccttgggcggtcggggcgcaaaaaacgactattacaatccactacacagacttttggctctaatttcctatatataaggacgcatagattggcccttacaaaccgggaacgtgtccacgttcctcattccggaaacatttgttccgttccgaaaacgcaggaacaatctcgtccccgtagtgttacaatctttttcaagtactgtaccacgttcccgttcctcaaccccatcaatccgggaacctggctactaaggatcattggcacatagatgatgtattccaggtcaagcactagctttctatatcaataccagtaccaggacggttactcatcggcgttgttggcattgaactccttgagaggctcatggtccgtttttctttggtgatcgttgcctttcatcgacgaacgaaatgaattttctgagactgcgcttcgatgtcgatgatcctgagtccgcggagattgctgatcccggctgctcatgtctcaggtactggcgcagcgtgatgccaaagtaaatgagcagggcgaggacacatgctgcgccacaaatgaggaacaggcccatgaagctctcaaggcggagctggttcgagtccacaaactcagtgttgtcagatgaacaatcgcctgtcttgagccacttgtcatggatccgctgcaggcatgcaaga

SEQ ID NO: 3143 - DNA, 1250 bp, Zea mays
tgaatgggttgcatggtgagatcccagcgaacctgagcaactgcaaggagctcagggttttcaacatcagtgtgaataccctatccggtggtattcctccatcgtttgggtcgctgttgaaactcgagttctttgggcttcatcggagcaacctcaccggcggcattccccagtccttgggtaacctgtcatcactcctggcatttgacgccagtgagaattttaatctgggtggcaacataccagacgtgctagggagactaaccaagctggattttctcaggctagcttctgctggccttagtggaaaaatcccagtctcattgtttaacctatcatccattagggtacttgacttgggaaacaatgatctatctgctgtcctgcctgctgacattggtttcactctaccaagaattcagtccctttctttatacaactgcgggctcaaagggcgcatccccatgtcaataggcaacatgacacgactccatctgatccagcttcacatcaacaatctacaggggattgctccgcctgaaattggtaggctgaaagatcttgaggtgttgaacttgcagtctaaccagcttgaggataagtgggacagggactggcctctgatacaatcactagggaattgcagtagactgtttgcactcagcctttcctataacaggtttcaaggcatgcttcccccttctcttgtcaaccttaccatttggatacaacaaatcttgataaatggaaacaagataagtggttcgatacccacagagataggtaaactcagcaaccttcgtgttcttgcaatcgctgataatgccttgactggcaccattccagacaccattggtggtcttcacaacatgactgggctagatgtctctggcaacaacttatctggtgagatcccatctctgcttgttgcaaaccttacccagctttctttcctggatctctcacagaacgagttggaaggaagaatacctgagagctttgagaatatgagaaatattgcaatcctggacttgtcttacaataagttcagtggcatgataccaaagcagcttgtcagtctctcttctttaaccctgttcctcaacctgtctcacaacaccttctcaggtccaataccttcacaagtaggtcgactgagcagccttggggttttagacttgtcgaacaacaggctctcaggagaggtaccgcgggcactcttccagtgccaagcaatggagtacttattt

SEQ ID NO: 3144 - DNA, 1145 bp, Zea mays
cttgcatgcctgcagctgcagcatgtatgtcagatacatgctagagctaggtttcaaatcaatcagaatcaaatcagtgcatggcttcatgcgcaacggcaagcagtcaaaaggacagtgacagtggaggtggagcagcgtatgcgctcctgccaaataatttaatgacaaatctgaaggtcatgcgatctcgtccgtccgatcgcagagcggcgagcggtttggactggggagtgggagggccggagtcggggtgatcctgtcggacggcaaccggagccgtctgtttgaaagcacgtgaataccccgcccggggaggcgaccgttatacgaccacgcggcggggcgggtgacggccggccggccgggccccctcgagctgtcccgcccgtccaacacctcacgctgcggcccactagccgttggcctccgtcgctttttctcctttcaaattcgctcccttccctttcccttccctctcacgctgcctcgccgcatctagccagcctgatatccctgctccgaagaacaaaccaaaaacaaaataaaacacgctctaaatctttccagtactccctctctatctctctcatccttcgaatcccaaggaggaggccagagaggagagagtgtgtgggacactgggactatagactagagagacgttgccgttgctggttgttgttattaacgccgccccctgcattcctatgctcctcgttctcccggggctcctccgtccgtaaggcaccgccgccgcgtctcggctggaccgacaggccggccgatccgtctcctcctcctcctcctcctgcgggtgcgcttcacagatcgctgcgctctctccacgcggaccggggaccgtttcttgaatcgaatcttgagccaccgccgtgtgctgtgcagctgtgcaggtcggcttcggggacgatggcggcgagggcggctgatgagaacagaaggccgggggtggggaggcccgcgccatgcgtccgaggtgcgatgatttagatgtttgctgcgtcgcgagtccgttgctctgatctcctggtttgtgcagacatggggagccggcgcgcgctcacggacatcaagaacctcgtcggggttgccccgaacccctgcgccgtcgccaagaagcccgt

SEQ ID NO: 3145 - DNA, 1072 bp, Zea mays
gcctgcagctgttcgaactgctgtagctgcaaaatattgtagcattcgcagccagattaaagtcgcagcctgcggctaaaatctatagagacaaaatattgcatcattcacagccggattaaagtcgcagccagatcttaaaggcgctgacacatgttatattaaaaccggcatttcaatctcgaaattctaaatggtaggagcgcgtctcacacttttctcccccacccacaaagtagcagtatactattagtgcagtacacgatagacgtgaatgaacgattcacacagccttcacgccaagctctagcagcagcagggtaacttttggtgcaaactctactcctcctcgtcccactcgtccttcttgtacgacaccagcgtgtccaccttatgaatctgccactccaccagcacaggaactgtgaattagcaaccgaatcgagaaccagatcggtgatactgataccgagtagatagagcggctctgctataccttggtgtcgaaggagtgcagcttaaccatctgcgggttgtcgatgagcttggcgtcactctcgacccaggtgcccggagcgtcgacgtccgtgtccgtgtaggccagcacgtcgaacacgcctgaccagttcgggaggagaggagaccagagtcagccacggttgcagttgcagactttgcagcgccggtttccaaaaggaaggcgaaaatacaggaagcgactggatgccggttgcggcccttacatggctcgtcgaggcaggggaggtaggtgatgcaagacgcgatctggcgcatgatggcctggatctccctcatgatctccttgtcgctcttctccttgatggccctgacgaacatcagaagacgacgctatcaatgtcaagccatggcaggctgacacaatgcgcagcgtctacttgggattggttatgggtcgcgcgcaggaagatgggggataagatagtgtgtggcgcgcaccccttctcgacgacctcggcgtcggtgacgatgttgaagttccagcgctcgagcacctcgctggtggctttgctcattatgaccagcacgatcc

SEQ ID NO: 3146 - DNA, 1367 bp, Zea mays
taccgttaccgtcaagggcttgtctaatcaaggaatgagttggtaatcgatgcaggattaatgggaacaggaggagcaacgtatgattactcttccactatggccattggacagcgagacagatccctgtggcaaggtcagtgctgaaagcccggagccggtcatgccagttcttggcaccttgctctgctcagtgctcgtccccttttcagtgctcttcaatgtcaaagctcagaaagctgtgtgggcttgggtcatggcgtcgccacgtactgtcgcctcaatccccctcgcccggccaactttctccagccactgtttccaccacgcacaggcacagcggcacagctgccagttcacaaagcatggcgtgatgttgaactgttgacggcgagaggggcggcggcagcagcaggctgtgctcgatggcttctccctctgagacgctgcgagagcctactgccaatctcatcatggtaatgatttggacctgtcgtcgtgcaacagaaatcggcgatcttcgcaaacttttgttggagattttctgtgttgtttgcctttccgaatttccatgctcattttacaaaagaaaaaagcttcacgagaatacgagattattcgttcgcatggacatggagattggagagtactactctccttttctaaacacaacacaattccatgcattccctgcgttttgactaggagatcagtggtccatctgagtgacaggggctttgctccctttttggagcacctactcctgttgcacacgcgcgccggagaggaggtacatgtttgaccacaaccatgctctgatctcgcaaggaaactgacggagcgaaaagaatgggatagatgtggtctggggatgaatgcatgcgtttattatattgctttcatttcatcccttccttattgcttcaacatgcttgcgatcatggcatttccgagcaggctggaggttctccagcagcagcgagcacaagaacaagaaccgttacattcttgctctcaagggacaaatgcagctttgtagctgacaacaatttagcaacagttgcactctaccactcctacacacttgccttctctgacttgtactccatggaatgggaataaaaaaggaaagggtaccctctttccagtctgtggacttttttggctcaaacatgatccacagaaaagagagaaccaaaacctggtgttgccaagttcttgaatcttgatccctgcgccaagaaagtcagccatctttgatacgatcaaacaaaaggagccaaaagatggcttgggggcaagaatctcactttttttcctgctctttggtgctcaagcctgcaggtcgactatagagcaaaccgggg

SEQ ID NO: 3147 - DNA, 1005 bp, Zea mays
gcaggttccgcctgcgaggcttcaccctcaaggtggacgccctcgaggaggccgccgccttcctcgaccgcttccccgacgccgaggacgacgcgctcgatctcctcctcgacgagctcgacaaggaaccgcgtaagctagctttcccgtttaggttcccgcgcgccgtttgctgtctgctgttgtaactggtggctctcattctgatgcttgtggctctgggcgtgtgtttggtgggcgcagtgcagtcgtcgatactggaccgggacgcggtcaggcgcgtggtggcgctgcttgtcgaggccgaggaggcgctcgatgtggcgtcgccagcggccacaagcgcaaggtctgcgctgcgggtggtggacgcgttcctcgtgccgcggttccactacgatccaatcaagaaagtattttacgagtatgtgaacgctgactcttctttatggatctgggaaattctccacggggacttgagtattggttcgttctttttaggcttctcaattgaaccggggttagagattgctattttgccaaaattggatgctaaaatagggattttgattcatggttgggtaccttatatgccacaaaggcactatctaagtatctgaccccctacccacacaaagtacctgatccgctttaatcacccacaaaccttttagcagctgctaattagcagaataaaatgtgttaggtcagtttgagtgctgctaatattctattgtgttttacaaggtgttagatgaatcatattaggaaattgctgctgaatacttagaattgcctggttatgtagagcgcgtcacttgctgaaagagctcgtgttgcgtataatttggccatactttaggaagtgtacacgaccatgtttctatttgatactctatgctgggattttatatgcattgcaggcacacaggcagattagctgtccatggagaagctgaagataaagcttccctttataggaataggtatcgagtgctgctgcag

SEQ ID NO: 3148 - DNA, 794 bp, Zea mays
acgacccccggcggatcgcgtggcggtacgcccgctcctggctcgcgctcgacgtcgcgtccaccgtgcccaccgaggtgtaccgccgggtcctgccgcgccaggcccggagctacaacttcttcggcatgctccggctctggcgcctgcaccgcgtcggcacgctcttcgcacagtacgtgcgcacgcacgtcgtcgttgttgttggatgctttttttttgaactgatgaacaacgacgttgctttgcttggttccttcatctctactctgcttagactggagaaggacaggaagttccgctacttctgggttcgatgcacaaggctcatctgcgtacgtgagctcgatgattctgcctgcctgcctgccgtttgcattccactagctcgtcagtctcatcagcagactgatcagcaaataatggaactgtctttctgtctgcgcgcgcaggtgacgctgttcgcggtgcactgcgcggggtgcttctactacctgctggcggacaggtacccggacccggggcacacgtggctgagctcctccatgccgggcttcaagcaacagagcgtgtggaagcggtacgccgcgtccatgtactggtccatcaccacgctcaccaccgtcgggtacggggacatgcacgcccgtgaacaccgggcgagatggtgtttaccacgttctacatgctctttgaaccttcgggctaaccggcttaaccttattgggcaacaattaaccaaccctcgttctttccaacggcaaccaggcccgcacccatggaaaataccgttc

SEQ ID NO: 3149 - DNA, 720 bp, Zea mays
  unsure (1)..(720): unsure at all n locations
ggcggcagctggtgccgcaccgcgaagctcgtcgccgccttgatcgcgtccctctggtgtgggtacggtggattcattcattcggtcgggtgtccatggattcatgtcgatcgcaagctagcattggctgccgacgaccgacgtacgacagaagagaacagaagaagaagcatagcatagggtagtccggccggccgtacgtatttcctggtgcggctggtgccgtggacgacgaggttggtcatgttgccgatgaggtaggcggtgaggccgaggttgaagagcatgtagaacgtggtgaacaccatctcgcccgtgttcacggcgtgcatgtcgccgtacccgacggtggtgagcgtggtgatggaccagtacatggacgcggcgtaccgcttccacacgctctgctgcttgaagtccggcatggaggagctcagccacgtgtgccccgggtccgggtacctgtccgccagcaggtagtagaagcaccccgcgcagtgcaccgcgaacagcgtcacctgcgcgcgcagacagaaagacagttccattatttgctgatcagtctgctgatgagactgacgagctagtggaatgcaaacggcaggcaggcaggcagaatcatcgagctcacgtacgcagatgagccttgtgcatcgaacccagaagtagcggaacttcctgtncttctccagtctaagcagagtagagatgaaggaacca

SEQ ID NO: 3150 - DNA, 1139 bp, Zea mays
agttgatctccagcgtctagaggtgctccttttttttctctctctataaccaatctacaacttgcttgaactctttaaatagctggccctcttcttaatcagatacttgccggaagctacttctgtgttgctggagcgctcattggcatcataaatcctgggaggatgactttgtttggtacccttttgattatctgggtctggggtatggtgaaagaagcactatttgggaagccagtgaacagtgatctgactcaatcaacttatgtctacccaaccattttgattgcacttatctgtgcattcatgtcaataacttacaacgtaaagaagacagcaagaagtagtactcctgtttctatcgctaagccactgataagttctgccaagtcaaaactgaagtagacttacaagtttaatcctcgtaactcttttgagatatttatttatgtgcaaaaaaaaacaggtttgaggatgacctgaggatgcttttggtgtatatctgactctttcaatactgtaacattcagttttctttattgtattaacaattcgcaagggcacaccgtctgtaatgtttacaaaaaaaaccagctaaatcttggttttcccccaatgtttctgctatctaggcaggtttaattcagtttcatattgtatccaataagattgtagtctattttaccacaaggatggaaagttgtaattcctgacaggttctgggtcagttgttattcttctgtgtttggattttcatttggggggtcatggtatttggagttattaaagaaattgttcagaactgacagctgataaacatcgatcacacagattgaaatgagcaaaggacacatgcagtgatctcatctttttccagttgacaaggtggtccatcattgcagcaatattgctgtcctatgctcttagcatttgtgctgttgtattgtgcaacaacggcacggctgaatatgcaagtggctcttattgccctgcctcatggtctccatctgtgcttatgtttccgcctcgcaagttgcaagcaaagtcaactgagatgctgatgagatctctctgaggcccagatatgtgaaaacacgcaaggagaaatcccgaccaagaatctagctaggaaccaataa

SEQ ID NO: 3151 - DNA, 1319 bp, Zea mays
catgttcttgggtgttgtatttgcagttgctgagctccgaggtttctctttcaaatccagacatgctcgaatcggtgcagtagcattgacattcgcatctatgcagctagtaaatgcgtatcttcgaccgcataaaacagagaatggagagaccccgcctggaaacagagtagtttgggaatatctccatgttttgaccgggagatctgctgcgcttgctggtaccttggcgctctttactggcttgcagcatcttgggcaccgatatggcagtaagactatcaagggacttacatgcgggctaatcttatgggttataagtgttactttgttaacagcttactttgagtatatggcaattaagcgaaggacagcaggtgttgatggtctttcaggaaattgggtgcttggcaacactgaggaagatgatacagtcgaacttttgcaatctaacagggtagtcagtaaaatggagtctaatttgtcacctgaaccaatggaagtacagctcgagccacttaaaggatgagataaaattctcagcatgcatatggacataaaagtatgttaactaaaattctttatagatagaacgagcggcatatacgtctcaggataaaagaagtttcagtttcgcattttttgttgatataaagggaatattagtgagaatctcatctttgacttgctcgagaggtactatcatgccacatggtatagataggtttttcttttgtcttgtggagcttaggtcctcgtctttaatctcctaacttcttagcaacaatctatgtatacctgtacaattttggtatagttatcataattcataactgaaaagaggatacagtttttttctttctttaaatgtcacatgactcgagcattttcacatatggtactagctgacattatttgtttgtcatatgttgtgtatgtaaattatgtgacttggaactagaaacagccatccaacgaaaccacagtgctcctacattttctaaaatcagttatccacattttatatgtaggctacagttatcctttgtgctaacttttgccttcttaataccaaacctgtggcaatctatgccaacctgatgcattgggccatgtttggtaccaactgaaaggggctcaatgttgtgttgatctgcatcttggtatacctttgtacctgatttcatgatatgtcatgccaaaataccagaaatgcatttacttataaactacatattcatgtctgccttttatctgcaaaagctgctatgacacgcaggagaaagtagttgcccacttgtattccactaacagctcag

SEQ ID NO: 3152 - DNA, 1076 bp, Zea mays
actttctgttttagtatatatcattaactcggttgatattaagtcctcgtatgcaaattgggctgggactaccatgtgcctagccaaaacatgaaaatgtatgagagtcagaatcctacaaaactacaaaaggaaggataatgataagagtcataatgataaatctggaagacctctgagatattgatcttgcaattatagtgtttgttttgttttgtttttttggtgtgcgaattttagacatggttgtgatgtgcttgcaacagggaacaacagaccgggccagatgattgaagggcagactttcacaataggttcgcggcatcctagctcattccacgccgactaaaggcagccatgtctgggttccgtcttccgctctggacgtggtggttcctgcattcgtggctgatgctagcggcgcctaactttgttgtgcagagccgatcatatcgatggggagcatcgagtgcgacatgtgggacgacggctggactgccgtgacgacggacggcagcttggcggcgcagttcgagcacaccatactgatcaccaggaccggagccgagatcctcacgaagtgctaggaggaaaggaaatcgcatgtgcccgaatagccgacggtaggtaacctgtattcgtgaggcggtgaggccgtgaggatgcttgaggtgacctattttgtctcgcaaaatgggcgtgctacagaatagtgaagaaaagggttgagagattgcaaatggcaggtttgggcaaagaggaccaagttctaggcgtccgggacacgactctgtgtctggcgttcccttctgttgtcgacatcccgtggttcagttgagcccatgtctcgtgacgttctcctcccgccagttggcccaccgcttgccgttggcgcgttggcgtcatggcagcggccaccgtccgggttgcctcggtgggagtagttatgccgccgctcgtcgcatagcgcgccctgccgcgtaccgcggcgccgaaacgtggagccgaagcgaggcgcacgcgccgcgcctccacggcatcgggcacgagcgcacgggccgtgggccatgcggcgg

SEQ ID NO: 3153 - DNA, 1121 bp, Zea mays
agagatcaaggcacaggaggtcaaggtttcggtgcaacagcaagggctatagcggcggcgccaacatagtctgcatcaatggttctccgggcattggcaagactgagctggcattggagtttgcttgcaggtactcacagaggtacaagatggtgctgtggattggaggcgaagctcggtatctgaggcaaaacatactcaatgtatccatgaatctgggactggatatcagtgctgaggctgagaaggagaggggcaggatcaggagcttcgaggaacaggagttcgacgcgttccagcgggtgaagagggagctgttccgcgacgtgccctatctgctcataatcgacaatctcgagagcgagagggattggtgggaaggcaaggacctccatgacttcattccaaggaacaccggagcaacacatgtcatcgtgacaacacgtcttccacgcgtgatgaacctcgagccgatgcagctgccgcagctctcgtacatcgatgcgatggccttgatacaggggaagagaaagaaggactatctgcctgaagaagccgaagtcctcaggaagttcgatgagcggttaggcaggctgagctttggcctgtgggttgtcggttcgctgctttctgagctcatgatcgctccttcaactctgtttgaggctgttgatcgaatatcgctgaacgagaatctgttccccattggcgccaacgacgatggattctgccgcaacaattctttcttggtgaaggtcttggtcttctgctttgctctgatggaccgagcaaaaggaggaagccttacgtcaaggatggtcatcgccggttcttggttagctccaactcctgtatcgtccacgctactagctgcaaccgcgagcaagctaccgatgaaaggaagtggtatgcacctgtttggtgaatctctcaggactgcatttctatgtggcacacattgtttcctagctccaaacgggcggaaggctgaggtggagtcggcaatcttgcttgtcaaccttgggttggcaaggaaggcaaacaggcatcctggttgctggatccagttccatcctatcacgcagctcttcggcaagatcaggggaggtttggtgcctacg

SEQ ID NO: 3154 - DNA, 714 bp, Zea mays
cttctactatagtcacaatcacaaaaacgggcgacgagggcaaccaaacaagctattaatttcacagcctagcatttaggagacgtacaaccatagtcacaaaaacgggcgacgagggcgatgattcaactgctactgctagctgcgcaccagcaccaccggtttctttccggaaagatgttagctcgtctggttctgggacacgacacgagagtatgcgcaagccaacccgagcatgctacctggctacctgctattgttcgttgtccagaaacatgtcatggatgatgttgtgtggagagtgtaggggagagtgaggatagggaaggggcgaagcagggacacagaattctgctgtttttttataaaaaaaaataaatgaccttgagattgagtactgttattattacatgcctgaaaattgcccacatggatgtacgtggcctgtcatttaggggatatttgtgtcgtcgccaatgatttcaaaaacgacaatgaaaactatgctaacgcccaaagcacggtaacacaatcatttaactcatgccaactgaaacatgacatcaatgaatctctaaggggaagagaaggtaaatccatgtgctcaaaccgtgccatgaataacattaaaattattccagtatattctaacatcctaacgagggaactggctatcgctggctgggtaaattcttccaactttgcagtggaaga

SEQ ID NO: 3155 - DNA, 1044 bp, Zea mays
acaacaggtagtcctagccgatccaatcaaagccatagcaacgattctagtaaacatgacttattcagaatacaatattcacctgccatttaaaaaaaaatacaacagcatttacgttactgccccctgaataaaaatggattcaaagtttcatacatgaagcaggctgtcacgaaagaagctaaagcagcagaacagcagacagctatgaacaatgttcctaacatatttacattcctatattgcaagtaagcctcatcatccgaagttctgaacattacaatcttctcagtgcgtaaggaacagaagaagtcctgagttggataataatttatgaagcttaggagatttcattcttgtcacctttcatcgttccagaggaagacggttccccactggaagccggtgaggcagcagcctgttgaggctccttcagagaagtggacattcctgaaacttcctacggaaaagagaaagcaaatgatgtatgctgtcattatatgagccttatggatcacagccaaacgggtactataacagaattgattcctgaaaatctacatatttctctagttcaattcagaatcaccttctatcctagatttttcagattcatgttatccatgttaccaagctattgtgtccttacaaaatctacaattgacagtaaggtgaactaaaatcaaatttccaagaatctacagctgaactaaatagaccctcagtaaggtgagtgtttttttaggttgcggtcatatccttttcttttactggtgctaaggagatttgtagtttccttttgggtgtgatgttttgtaagggtcccttttttcttcttaattcaatgatacacaattctccttagtgttcaaaaagaaaaacaattcttcgcaaaagaaaaacatatgattaattcacaagatagaggcaactttgattataataaagataaatataccttcataagatgtaacctgagatcagtagggcgaacatcctcaccaatgcaaaccataacaaattgtgaatagtgaaaaagaacat

SEQ ID NO: 3156 - DNA, 1118 bp, Zea mays
aaagaaaaaaaaaagacaggaaaatgagtgtccttgtcaccaagacacgtacttcaataataagcaagagggacatcaaacaacatatctgacacatcatagtaatgttaggctcagaacttctaacgttgctcatggttcttaagcaatccattgggatggcagtagtacgcatgaacagcacactttgtagtggtttcagcttcatgaaacaaatgcgaaagaattagccaggagattcttggtaacttttggcttgatttgttagtttgcctgaacagttgcatcctccacaaccaagacagccggcaacagaaaactttaaaaccaacatgtcatatgatccggatgtacaggctctgcctcctacagaccaacagccaatctagaaatggtcccttactgtcatttatgtctccgtcgtgagattagccactagcatctgtctagagccggtggcaagcctgtcaatccatatacaagagccagccagacaccagtaccaccaccactccctctttacttgatagacaactacccttaaggaccatttcatcactattggcccagcacagcttggcaaaggtggactaggcatgctacagtagttacatatgccagcctgtaggtttggagtttatttgtgcatcgaactttcagtctcgatgaacagatttcattatagtaaggggcacatggcgtagtaatagcaccgacaaactaatacaaaaggatgtcatcatcaccatccttgacacccaagagttattaatagcattaccaagaatggatttcatatctcatgtgtcatgaatgcatagtagatagttcattagattcaactgttctatacagtacatgggaaggacaaacaactcgacatggaggcaccatgctgtgtgaggtggatttgatagatgtacacttacacttacacatgaaactatttgatgactaagagcataaatgcatgtcatatcttaaagcaatctgacaaaggtgttccagtatgatcatgtaatgtgccaatagtcacataaagaccatgggactacctgataatgctttattcaataatgaacctttgattaggagggtcccaggaatttgttcaaaca

SEQ ID NO: 3157 - DNA, 1014 bp, Zea mays
tcttgcatgcctgcagccgccgcacgatctcgtacttgtgctccgggaacacgcccgcgaacccgtccgccttctcgatcagctcgtccacggggagcccgcccgtgtcgccgtccttgagcagggagctggacgggtacatgttggtgcccatgccgaggcgccgcccggtctccttgccgatggccagctggtctccggtgatcatcttcacgttcacgcccaggttcagcgcgcgccggatcgtctcggcgctgtcgtgcctcggcgggtcgaacagcggaagcacggccaggaactgccacggagtgcccggcgcgtccttgttgccctcggggaccctctgccgcgccacggccagcgagcgcagcccgcggtccgcgaacttggcgatgatggcgtgcacccgccggctgaggtcctcccggagccggcacaggtcgatgatctacgggggcacgcagcacgcaagtacgtacaagttggaggcacaaagtcgtctctttatcatgagaaaagaagagaagaggggtgctgacctgctcgggggcacctttgctgacgcggtgccatgacccgtcggagtcgatgtaggtgatggcggtgcgcttgtcgacggggttaaacggcatgaagtgcacctcctggatgccggcacgggcctgcgtgagaatgccatggcatgcatcgtgagatccatgaattcgccactggtttatgtgtgccagtcagtcagactagggttcaacgtcgcatacctcccttgggtccgcgagcattccgacgatggacgcgtcgatggcgtcctggttctcagttctggatgctcgagctgcgtacaggactacggagtccttgtccagatccctcacaaacggctgaaaccaaacgcacatttggttcttctgttcacgtgtacagggtacacagacaggaaagacagatgcgcacctcgatcatgttcttgtcaacggtgagcttgttcagggtgagcgtgccggtcttgtcactgca

SEQ ID NO: 3158 - DNA, 1030 bp, Zea mays
ttgcagatgatgacagcatagcagatatgatagaggaaggcaacagcgattgtggatatacccatgactgtaaagcctttgagaatagaaattcctttttgctctcaagctttgagcactctaaattttgacacccacgaggacagctctgaccaatggctccagtgatgctacttctgccaaaacttgtattgagcttgtgacacctgttacaagtggtacacgctctgacgatcagtagtactttgcaatcagtattgcatccaaaagggctataactggcatgtggtcaaatataactttaagaatatcaactcagggaatgttatagattcaagcaacatagagaccatgttaatacagtttctaactggcaaaaactttcaatacagaaaagcaagggaagctagtgcacacccaccacttcacagatgacgatgaaacaaactgcaaactagtctttaaggtaaaatccagaggagctttttccccaggaacagtgatcttagaagggcatatgtctgaaggcttcgacacagtaccaccaacttgtccattagggccgttgagcccagaagccacaaaagcatcacgagctccaaaccctttcagtaccttttcctaataaagagcaatagaaatcttagctggtgttataagtttataacagatgataagttgcaagaggaagaatgattattaccatatcaaatttgttagaaccagtctgcttctcatcgcctacatgaagctcagatacactccgcagagcattttcactgcatttctcaactttcttgaaacctggctttgcagcctccatggttggaactaaagtgtccaacttagcagtgtcaccatgaccactgaattaggataaagaagccgagtaagagcttaataaacaatgaaaagattgaatctaaagttctgcattcagatcattaccatagaagtgaagatgatgcaaaatttgaggctggtgtaccattaacaaacttagaaaccttctcattattctgtaagacat

SEQ ID NO: 3159 - DNA, 1086 bp, Zea mays
atggctccctccagaattcatgtaacatgtgcattagtttatgggccttcaccaacaggaaggatccaccaaggagtttgttcaacatggatgaaggtaggctctcgaagtaaactcttttgtgggcattaagctcttgaattaccagcaacaacaagctttccaacagtctgatttattattctttgatttgatcatatgcttggcagaatacaattcctctggaatatagcgaagaatgcagctgggctcccatatttgtgaggcaatcaaatttcaagttacctgctgacccatccactccgattatcatgattggtcctgggacagggctggctccttttagaggtttcttgcaggtttgttttggcaaggagtccaatgggtgtatatttgcagttctgcttgagagcacctagcttaacttatccttccgctctctctattggcaggaaaggttagcactgaaacaatctggagcagaactgggcacttcaatccttttctttggatgcaggaaccgtaatatggtaaagatcaccagttatgacaattgcatgtgttcttgttgtgtttctcagcaaatattgatggaactcaatctgaattgtcactcttaaggactacatatatgaagatgagctgcaaactttccttgaggagggggcgctttctgagctaattgttgcattctctcgggaagggccaactaaagaatatgtgcagcataagatggtggagaaggtcagatacaatatacactcttccttaatatactgttacttctcgagtgtttcaaatattcaatgtcctagaaggtttgctcaactaaatttacttctttctgataccaggccacagaaatttggaacatcatctcacatggtggttacttatatgtatgcggtgatgccaagggaatggctagagacgtacacaggatgcttcatacagtagtccaagagcaggtacataaccgcaacccatcgtctagatggctattatgaagtttactatgttgtttgtaacatctcattttgtttcacttcagggatctttggatagctccaaaaccgagagctatgt

SEQ ID NO: 3160 - DNA, 1075 bp, Zea mays
cggtcatccggcggtgttcttccggcctttcgtactgtcgctcatgaatcccgttctgtcgtgaatttgcatgcagtagcttgaactagaatgcctgcgaattagtctgccttctgtttttattcatcggagccaggttacgatatggtggtagtagctgtgatgagcactgctttcttctgacacctcttgtatgagcagggactttgttccctccgttgagcagattcagcaactctctgagctcctccctcgcattttttctgagctaacctggccatttgctccgtcatttagcattttattacgagtttgtgagatcgtaggtctttactttttcttagatgacgcctactgtgctgcgacgagctactccttatttctgacaccttgtgtgagccttgagcagattagcaactctctggatcgtcaatttcgtttgctattcttgatatgcactttgttcaattagtgaatttgcattcgtcaatctgactagtgacttacatgaatccttttcgtttggcatcagaggatgaaagcttgaaacaatcttaggacaccttctgacacagcgcgttacatcacgttgtgaatgagaaggcaattcttttctgatgatgctgtgcttcaatatgttacaaatcacatgtttttggattatttgttgtctacttttgtttgtgggttgggagcatgtgcgctatttctttcacccatatttcattttttttatgatgatgtgttgatgtagttatccttcaatttgccgcctgttttagttgtgataacttgatagaaaattgcctagcttcctgatgattaacctgttaaccaatgaaatcagctacatttgcaatttgttttgaactagatttgtaatggcatttaatcctagaattgcattcacctagatttgctgtgtttagattcttctgtgcagttctagggaatgtttgttttagtttcctgaatctgccatgagagtagtttggctatgttgtcccagtgaagatcccaagacctaccgataggaagtgccgtttgacactgcaaacagcagctgcctctctca

SEQ ID NO: 3161 - DNA, 1101 bp, Zea mays
ggacccctttagagtctacctgcagaggatcctgtcgggcgctggtcatggcgtgctcaagtacatgggcatgctgccttgagtaagttgagtttcatcgcatcctccatttgggggataggaagcatagtactaatattatgtactgcatccctaaacaaaccaatccctagaatcacctaaaagaaccacacaaagtcaaacaatctgaaatttaacaaatttataaaaaaaggtaataatatctatgaaacaaaatttgtccgtgccgaaacagctggagtaggttgctcacctcaacagcggcggatccaggattgatccaagagggggctaccaagataagactataaaaaaatttataccaaacaaaaaaaatataattaatgtttaatatgacacaagaagcaagatatactttaaacattcaagaaatatgtagtctaaaaataagttgatacgaattctagaaatacaataatcttgcacataccgtggactgcggcagtgctccggcctccgagcgagcgcgctgcgcggctgcgggctacgctccgtggctggcgcctccgcgtctggcggtggcagcctggcgggcgagcacgttgtgggcaggtgcaaggtgagtgcgctgcgcggttgcgggctgcggcggcctgcggctccgggctgcggcgctccacggccgggctggcgcctccacgcctggcgccctggcggtggcgggcgagcgcgttgtggtcctgcgggctgcggtcaccatggccgtcgccaacagggtccagctgtcgcagctcgccaggagcagcacaacgccacgtggctcttgaagcagctggagcgtgacgtccgcgccacgctccagcaggacaaggaggcgcagcggctgggcaagtccgacgtacagaacgccgtggaccgggtgctcgcgctcgacgctgtcgctggcgagcggcggccggcggctggtctggagctggaggaggcaggtggcgggtagagctgtagagagaggcagggagcgacggctggagctggggctggacgtctatggttagatcacgcggcgatgggtctttactgggccacgaatgctgaccg

SEQ ID NO: 3162 - DNA, 1095 bp, Zea mays
tccccgttctccgacagtgtcaggattgcggtggacaggtctatttgcagaggggagtcccttggaaatgcctgacaaagtgagttttgtaagagctatgtttaaattaataatgaaacaaagttgctgaattctggatattagacttctactgcaaataagtgcaaggaaggctccataatcttagagaatgtgaccctttctagggatgacccgcgggtactcgcgtgtttcgtatccgatgtatgtgggcacaagcatgaaagcttacccacaggtacgctttcaggctggtaaaagttagggtcgcaggtatactcgcgtgcggataaatactttaccgcaccatacccgacccgctgccatccctagccctttctcttaagaaaaactaaccttagagtgtaccataagctatgtgaacagtagacgggttgctcgtagttaatgctgtgacactactctgataatattgaatggcttataagatatgtttctatttatatttctactagaatagaatgtatttcaggacaacttaaagttcaatgcacttacaaagccccatccaccgctggtgaaatctgagccagcaacagcaatcttgcagtaagttgacaaaaacagctcaacataggggcgctcatcaacaatagccataacacctcctttcttgggacctagcttgagattttcagcatactcttcaggagaaccaagagcttttagcctcgactgtgagatgttcagttccttaatcatgtattcttcgacaaaagaaccaacttggaaaccaataggataatcactatttttcaggtcatcaagtcctcttatagatgtatcaagctgttgcacggttaggatggaagtaagacttgcagtgtagcttgattgaatgatcaatacaacaaatagccatatgagcaaaacaccacgtcctaaggtactcattgtgttttctcctggtaataaaaaaataagagtagaggtaccacgtgagaacagagggtcagttactcagttatactgaaggacagaacaggaaaggctagtttactcactatgtgcaaaaaacagagtcgaaaaactgaa

SEQ ID NO: 3163 - DNA, 1085 bp, Zea mays
agcacagaaaaaagaacatcactaacaagtggagaatgacctattgtggaaatttttgacatcgatgagttgtttaaaaccaaatccaaaatttattagtgcaaaagatttggagaaaataaattgtagctgcaaacaattcgaaggtactcagtcaacattgtgaatatttttcctccttagccaactcttaaactaagtagcacttaagtattaaagctgaatccagaagttcattgtgcttctcgtataacatcagaaatgggcattcatcaattgatgtcgggttgtcttttcaaaccactctcaagtttctcaaactatatgaagcttgccatataactttaactgtggcttatatatctagagtgtttacattaagagcagattaattaatcaaaaagaactataaacttatgtaaatcgtgaaaaataatggccagaattgtttgttatattacatggaagttcaaacatcagtatcttcaacaaaatgaagtattcttaaagcactattattcagattgtacaaaaaagaagaaataccaaccaatacagttcaagcgaacagcatcattttgagttttgagtaggacttcaagagagagttgaagcaagcttctgccaattgccagaaggtccaaatctccagtttcacatatatcgtcccatggggtggcatttagtaaagcgagtttgtatagaacaaagagtatctctccacgaatttcatcgctgtatagagaaagttaaagatgctgccagataagctgtttgaaaggcaagagataatcaccagaattcagttgtagtcaccttggaagtcggagatcattaataagatttaagaaaagagaacatttgtcccctatatatgctccagcatctttggtagagttcagcaaaagccccaaacaatgtagctgcactgacataaaagaaagatacatacataagaaggtaaatcaatttaatagaagttataagagaagaaccactgtgcctcacatctttaatggatccagtctatctcactcaagcgacgactgataagtgatgagataaaaccgctgcaggcatgcaaa

SEQ ID NO: 3164 - DNA, 1145 bp, Zea mays
agaaggccacggatctccagcgggtaagtgacagacaggggcgggcggcgggccgacaaattcagaggccctgtactaaacttcaaaagaggtcttattttatagaaaaaatataattaaaattacattataatataatttatgtattctgaattgcaaaaggtttactagataattcttttaaatctatctattttttacgaaattatattgtaatagagtatataaataagcatacatattaatagatgcgttggaagagcaatagtctagctgctaactgagttcagcttagatggtgtaatgttagtctgttcattgatgcatattatttaggcttactactgagctaagaagttttttaggcccctcagaattttggaccctgcgcggtcgcacttgtggcacatgcatcaggcccggccctggtgacagattcccgcatcatgattcgatgctgctcagttcgttggttggatatatggaacaaatagttggttgtctgctagtttattccaacccactaataagctggctactgatgtgcgctgatgccctcatgccctgagaggctgagactcgatacgtttcttctctgccaaatttcaagtgtacatggatactgaatgaaatgaagttccagaacatggtgaaaagcaacggaacatggaagttgttctacactgcacctcgattcatattcctcccgcatgtcatcagcttccctggatgttccttatgtagtggagtggagactattagctgattcgctaagtgctgcgacccacatttcagtttctgcttgtttgcgtagcattgcggtgaagaaaccgagaactaaaaaaatgcatgacttcattacgtgcattgggatctaacagtggactgagcttccaaccataacattgtacttagatgcttgggtgatctgcttcgaatgttttagtcagttttacttgtgcattgctagctccataacatgatttacatttggtagttaatttatttaacttacgcatgctgccatttattatcacatctcttctaaaaggcatttcattacatttgttaatgctgcaaactcttgttccattttttggaccagctgaaccattatgataagtagaagtatctctatgtttttt

SEQ ID NO: 3165 - DNA, 731 bp, Zea mays
aattttgcatgcctgcagcgatgaatgccgagagaaagggatgagggtcgaccaagcccgaaggaaccgccggatctgagtgtttcagagaaagcacaataccatactccatatatttatgcaactatttcatttgccagtcagacgtgtatgggcattgcataaacatgcacaagactgcatttttgtttccctcttgaaatggagaagtaaaaaaacatcaactttaagttaataaaatcaaatgaatcacggcccatatatagaatgaagatgctgtatcagtcctgtactctgtagtctgtactgatggtactctgtggatgggagcgagcagtcttggttcttgaagtaacagcaatgaacagaacggcgtgtggtgtggtccttgatcattttttcggttagccttcctgagtctctctagtagggccgctgctttggattgccatgcgctgctatagatcatacttggaggaggcgagcaggagctcctccgcgccgactttcatgttggggcccgaggcgaacttgacgaggcggctgctgtcggggacgaccgcggtctcgacgatgaacacgccgcagacagggcggtggtcggagaacttggactcgccgcggatgtaggacaggtgcactatcccttcgccgtgccagaggatgcggtcgcacctgcgggcgcacgcaggattttgttttggattttgttttcattcgcagcagcagta

SEQ ID NO: 3166 - DNA, 1103 bp, Zea mays
tgctccccgaaccccgcattcctagatccatacacgcgcacgcacaaaaatcctccctttttttttctaaaagaaaaaaagctgtccctgctctgtctcaccggggatccggctggatttctgcttcgtgatgatggcgcaggagctcaagaacctgcggccgcagctctacaccgcctccgagtactgcgagaagtcctacctccacagcgagcagaagcagaagtgagtcgcgttccctgctcctgcattttactgccacacaaagggagaaggaatcactactactcacttcctagtcttaccacggcgcccagccatggttgctcttcgtacaattgcatcttgcatgctgtatctagcactgttttgtcatttcgcctaagggttgaaggatccaatcgaagcgtgggtgcagcatgtgctggtagcaactacacccaactacctatgataggtgtagacgactgagccaactaaggcaaggacggcaacaggtgtgaggaagggacttgatgtgtgagatgtggctagaaaacaaactctactggctagagaaagatataattttttggtatcatctggagttttggagttacctgacaactgtccctgtactgttcgtagtctgaattttgtcactgcattgaaattttagcaacggggaccccctcttgtagtcttgtttcacagtgcagaataaatttcagaaatatagggtgcagacattcacatcttttcttttattaatgatgagtcgatagtgtactgaactcgagcttgcagtatatactcttatttcaacacaggacatgttgaactgtaacattcaggtcatattatgacagctgaagctgttaatttatgtcagggtgctggacaacctgaaagactatgccttacgagccgtcgtcaacgcggttgatcatctgggtactgttgcgtacaaactgaccgatcttttcgagcagcaagcttccgaggtgtcgacatatgaactgaaagtcgcacgcctgaaccaggtaatcacacttatcttcagtacttgcatcttgcagcgatgaaaccatgccagttcaattgctgacgatctatctccaaat

SEQ ID NO: 3167 - DNA, 1189 bp, Zea mays
cactcttattattctgtcagacatgttggattggtccttcggtgagggggctggtccagatgaaggcaagctcttggatcaccagcccttacggcttaacaacgatgattatgagcgggttcaacagattcctgtcaagaaggttggtggcttggtcgcatttgtgccttcctttgttgttttttccccttctgaaacaatcatctctctttcctatgacagggagccaacttccgcgacctaaagggcgtgagggttggagcaaacaatattgttgagtgggatccagaaatcgagcgtgtgaaactttcatctgggaaaccactggtatgtgtgctatttcgtgctgttgtttctataactgcgcaacatttattttacatattcaaactcataactgacgagatgctgcaactactgtaagattcaaggctaacccatgacaacattttgcacacatctttgttatctaggttcctgactatgcaatgtcattcatcaagggcaaatcactcaagtaagtttcaaaacaactttttttttgtttttttttgtgtgggaaaagtaggttattgtttacttgtgcttacatatgatgttgcaggccgtttgggcgcctgtggtgggacgagacagttcctacagttgtaaccagagcagagcctcacaaccaggtcagcttcagaaaggccactccttttcgccaatccctgcatctgtatttactattagcgtgtgttcccatatgatcattaccgaacatgttgtccacacaggttataattcatccgactcaagcaagggtcctcactatccgggagaacgcaaggttacagggcttccccgattactaccgattgtttggcccgatcaaggagaagtaagttcctgttttcaagttgcctgtaccagatctagtcactattgaaagttttcagcagcaagccattcatcagttagttacagctcttgaaagccttacctctgaacatgtgtgctttctctgatggtgataggtacattcaagtcgggaacgcagtggctgtccctgttgcccgggcactgggctactgtctggggcaagcctacctgggtgaatctgaggggagtgaccctctgtaccagctgcctccaagtttcacctctgttggaggacgcactgcggggcaggcgagggcctctcctgttg

SEQ ID NO: 3168 - DNA, 1335 bp, Zea mays
ctgttgcgacgctgcgtgttggttttcttcgatgacatattgatatacagtccgtcctggtcagcccaccttcaacatgtcagagcagtgatgactttacttcgcaccaacagtttatttgtcaagaaatctaaatgcagctttggagccacttctattgtatacctgggacatgtcatctcagaatcaggggtctctatggacagtgacaaagtcgaagcaatcaccgcctggccaacacctaaatcagctcgtgggctgcgaggatttctgggaattgcgggctattaccgcaaatttattaaggactttggcacaattgcagctcccctaaccaaactcctcaaaaaagacagttttgcatggtcagcagaagcagccacaacctttacagcactcaaggaggcactgtctacagcaccggttttgcaccttccggagttcaccaaatcattcatcgtggattgtgacgcatccggttcagggtttggggcagtgctacatcaagacaacggcccaattgccttcttcagtagaccgttcgccacacggcacttgaagctcgctgcttatgaacgcgagctcatcggtctggtgcaggcagtacgtcattggaggccgtacttatggggccgtcggtttctggttcgaacagaccattttgccctcaagttcatgttggaccagcgcctctcaactgttccgcaacaccactggattagtaaactgttcgggtttgatttttccgttgaatatcgacccggacgttttaacacagtggcggatgctctctcccgcagggacgctgaagcaatggagtccctagccatatctgtaccatcgttccagctatatgatgaaatacgcagtgatggcagcagcagaccggaatggaaacaactacatgaacagatcctcaatggcacccaatcggcgccatggcacatccaagagggcctaatactacatgggtccagggtatttgtaccacctacatcacccacaataattcatattctacagctagcacatggcgcgggacatggggggttccaaaagacattacacaggcttcgcgcagacttctacattccaaatgacagaactctggttcgtgactttgtcaaatcatgtacagtctgccagaaaaacaaaaccgaggccttacacccagcagggttgctgcaacccttagaagttccctcacaagtttgggcagacatagcgatggactttgtggaaggcctcccaaaggtgcacggcaaatcagtcatattagctgtggtggatcggttctccaaatatgcccatttcattgccctgggacatccttat

SEQ ID NO: 3169 - DNA, 1204 bp, Zea mays
aggagaagatcaagtttgtcggctagattagcgattcagcctatattaacacgaacccgtggtagccacgttcatatttcctttcactctcaaacgaccaaaatttcaatggagaaccaaacgacggcggctgcggaggaccatatcagcaagctgccggacgacgttctcgtccacatcctctccctgtgcccttatatactctcatgagaacggtttcggtttcaacatcgtggcagcgcctcctctcccaacaactcccagacctgatcttctacttgtcgtatcctgtgcacaaggatttgtccatggaaacgccgagcgaggagcgcgtccagagcatggcgcggacgctccgccgccggtgccacggcacagcagcagactacactatcaagaatcttcgtctggtctacagaaaggacgtggccatggaatgccggtacgtagacgagttcatcgcgctcgccaacgccacgaagctggagctcgccccccacatgggcgccgagtccttctcctcctcacttgtcgcggacgcagccggcgactggtccgtcgagctgccgccggctacggtcgagttggaggtgcagccgttctgctttgccgtgaggccgccgcgcatccacggccccggcgtcaacgtccttcggtcccttacgctgcatgggcacacggtggttcgcaaggacttcccgctcgccgtcaccgtgttcccgtcgctggaggacctgcacatcggcaactgcacccttgctgccagtatgaccatctcgtcggacaccatgcctcgcctcaaacacctccgcttcaccgaggtcagcgtgagcgcggatgacaccaaagccgccatcaccgtgctcgcagatgacctgaggactctccgcatgtcatgccggcggtgtagctatactgtatcgccatcggagccgctcatgttcacgtgcggcgggcacggctcggccttgttcaccaaatactctttgttccacttacgcgcacccaagctggcggtgttcgagtggcgatgctgctatgctgatgaggtgcgcgttgacgccgtgggccgcctctccgacgtcgcgatcgagatcgccgccggtaggacgcggacgagggttcccataggcatggaacctaagttcgtgacagtacagcaacgtgacaaacttatgaccgacatccttcaagagcttatgcc

SEQ ID NO: 3170 - DNA, 1186 bp, Zea mays
atgagcgcgcccacgatgaccaccaggctcacccactccatgatgagaaggcagtccatggtgtcgcgcttgaagtccgaggtcatgccctcgtccatgaacgggtcgtcgtcctcatcctcgaaggcacctgacttgccgatgggccctgatttgccaatgagccccgacttgccgataagacccgaccggagctggccggacttgggcggcagccccttggagacaaatgactttcggggatccacctcgctggcgggggcgctcgacgtcgacggtggcgggggatccattagccgagatcgcgtcttgctgcgcgccagcagggaggaaccggtggacgtcgacgtgcagcgtagcacctcggcagtgtccaagtcgatggtgctctggttccggttgtggctggcgtcgtaggaggaggaggacgccgacgacgtggacggggagaaccgtttccggggatcctggaacgagacgcgcagctccctggaggcgttgacagatgtcggcgcgcgtggcggccttctcatctcgtccacctcgaagtcggggtcgatggacagctcgccgccagcggccgcctgcttccggaggaagctgccaatgaggcggctcggcggatcttcgctggactccccgccgccggccgaagactgcggcgtgcggttcttgaaactgaacgactcgccggagcggggcgcatcgcccccagcgctggaggtcgacgcgctcgagccggacgcagacgccgcgagcatgctcaccgcgccgccggcccgcggcgtgctgaccgcggagctgtgcccggacatgcctccggccgcgtggagggagaccggcgagtgcggctcggcgtcgatcttcacgacgacctcccggcggtcgccgtcgctgggctggtcagcgcgttccttgtcctggtcgtgttcgaagtcgaaggaccccgaccgggacgaggcgttggacccgtacaacctgatgctgctcctccgctgctgatccatggccccggcagtgggcaacccaaacgacgaatcagctgctcaggaacaggccgtctcgctggatattagcggggaaactctgctcggaacgcggggcggcagagagacattgcgcggacgctcatgcatgcgctcgcgccgcaccgggggtgcgcggtgcgcctgctgctttggagcta

SEQ ID NO: 3171 - DNA, 735 bp, Zea mays
tagctccaagcagcaggcgcgctcccgcccggtccgcgacccggcgcggcgagcatgcatgagcgtgcacacatgcctgcctgccggcccgcgttccgaaccgactcccccctctaacatccagcgagccggcctcggtctgttcccaagcggctgattcgtctgggttgcccactgctgcccggggccatggatcagcagcggaagagcagcctcaggtcgtacgggtccaacgcctcgtcccagtcagggtccttcgacttcaaccacgaccaggacacggaacgcgccggccagcccggcggcgacgaccgccgggaggtcgtcgtcaagatcgacgccgagccgcactcgccggtctccctccacgcggccggcggcgtgtccgggcacagctccgcggccagcacgccgcgggccggtggcgcggcggtgcgcattctcgcgccgtctgcgtccgggtcgagcgcgtcgacctccagcgtcgggggcgacgcgtccggctccggcgaatcgttcagcttcaggaaacgcccgccgcagtctccggccggcggggaccccggcgaggatccgccgagccgcctcatcggcagcttcctccggaagcaggcggcggcccgcggcgagctgtccttcgaccccgacttcgaggtgggaggagatgagaaaggccgtccacgcgcgcccgaccttctggtcaacgccctcccaggggaggctgccgccgttttc

SEQ ID NO: 3172 - DNA, 1115 bp, Zea mays
aagatgaaaaggatgaataactaataagtatttagtcaattgcccatgagacaagcgactcaagaacttccatcaaatttaaaattccatagagtagaaaaaacatgtcaaatatgtcaagcagttatctgtagattcccacaatgtattgccagataaagaatcatgtaaaaaaaacagagaagcagggcaactgtaaatagtgattgtcatctagtatgcaccgtccatatgtcaaaaagagtacaatctgcaattcctggacctatctatattcctagtcctagcacctcaaggatataaaattatcctttgaagatttcaatacaaaattatagtttaaattaattgatttgtgtctgatgtgagagaaacttgtatgaaaaagaccacaatagcaaatgatgactcatgaagtgaattgtcaatctctaccacaaattacgcatgaaagggaactgcacctaccaacacacttccccttttgtagcagtagcattgcccagaatcagactacatgatatgtcactatatttttaaagaccacgtcagttggtttctggttttgatgtctcagatatactgcggaaaccaatacacaatggattctattgctataaacaagcatatgatagtagcaagtagcagtcactacatcactttagagtggtagaagtagaactatccaaaacaaaacagaatgttaaatcatgcaaacaccaatccttacactgccataccaataatggagtaaatatttatctgatttacctttggatgagatttcatcatcgtccattggaagaactggaagagggtatggaggaacattaggcctacccaccatatgcacaggtggtttcgacgaagaatctgaaaccttctcctacataaattggtagctgtcagtgcaaatctctaatttaaggagtgtgtgataggaacacacacacatatagtgacactgtgcaaccagatatctgttatgtgtggaaattactgcaacaattgatttaaatggagtacaatcaggaaaaatatttggaaacctttttgtccttgcttttcttagacgagttgtgatcctctttctttcttttggcgctctccttttt

SEQ ID NO: 3173 - DNA, 1030 bp, Zea mays
aatcacgtggaaatggtttagagctcgcgcaacggctcaacatcgcgatcgacgttgctcaggccatcacctacctgcacgagtacaaaggtacgaagctaactcagttcatgttctacagatcaaatcaaactgcgatgtggttgtggttgtcgcaactcatggtgaaagtgaaacagagtaaattggtctgttagaacaagaagtgggaccaatctgattgcctgaaactcacaaggtaccatggtgggtttcagagcgtccgatcatccatggcggcatccggtcgtcgggcgtgctactgaccgacgcgctgacggcgaaggtggccggctttgggctggccgggactgcggcctcggggtcgggctcaggctccgacgcaacgccggcgaggagcgccgccgggtacgtggacccggagtacctgagcacgtaccagctgaccgacaagagcgacgtgtacgccttcggcgtcctcctcgtggagctagccaccggccggccgcccgtcgagcgcagccgcggcggcgaggcccggctcaccaccaaatgggtaagagaagaaaaaaaaaacaagcggagcatgatatgtaaccgcagcagagctagggaaactcacagtaaaagctgtgccgtgcaggcgttgcagaagtgcagagcaggggaagccgtggtggccatggaccccaggatgcggcggagcccggcgtcggtggccgcagtggagaggacgctggcgctggcagcgcagagcgtcgcggcggccagggatgagcggccgtccatgcggcggtgcagcgagctgctgtggaccatccggagagactaccaccgccaggaggagccgcgctgcggcgccgtcgctgcggaacgtagcgacgagtgggtcatcaggtagcttagcttgccagttgaatggatatgattctgctttggattgatcggcatggaactgtaactagcctgtaagtgaatgcgaagttctaggaagctgcaggtcgactctgtaggtccccagggaccgagc

SEQ ID NO: 3174 - DNA, 1035 bp, Zea mays
tgctccacggcgcccgctgggtgacggcgcgccacgagccgggcaccatcatcgtccacgtgggggacgccctggagatcctcagcaacggctgctacaccagcgtcctccaccgcggcctcgtcaaccgggaggccgtgcgcatctcctgggtcgtcttctgcgagccgccaccagactccgtgctgctgcacccgctgccggagcttgtcacggaaggccaccccgcaaggttcacgccgcgcacattcaagcagcacctggatcgcaagcttttcaagaagaaacagcagcacaaagcaaaagcagagaaagaggatggcggcaatggtgaccaccaccaccacgagccgccgccgcagaccaactgatgggctgcacatgtctttccatccgcccacgcatatcttctctcgcgaaattaataaggatccatcagcattttccatatatttatattagtttcatgctcctacgttactacgagaaaaaaaatagtatctatgatatataaaatccatgtgttaaaatattactgtaacactaatattatatatgttgttacgaaatcaatataataaaataatttgatataccaaaacactaattattattctataattttgttagcgtaactaaaagttaagatttatatactttaaaagatatataagattgtaccatcactagtaaaaaaaataaacaataccaatattttataaaatatgagtatacaacgattacataaaaatacacaagagatttattatcatcgatcctaactcaaattatttaccaacaaccaaaatgttgttaatctcctgcaccatccatctcctgacgcactacgacgatgaaaactggtgtattataagagtagagagtagaggctacttccggtcaacccaaaaatccttataatcatcaaaatatttcaaatataatctcaattgccttttgtttgacgagtctcatgacaaatggaaatcaaatacaatctcactggctctaaaactttcggctgcaggcatgcaa

SEQ ID NO: 3175 - DNA, 1295 bp, Zea mays
aaacaaacaggttgtataagacaagtggtctcacaatgaacaaaaagagggaaccaacgtaatctaagtgattccaaagattgtgctagaatgagttggagaacaagaatgggacttattgtggaagaacatatttaacagagaatccagattatatctcgtaatcatagaaacatcctccaacttgtttaaggcatcttccaagcatgctttactgcttataacgacatatatgacaaggccacaagggtcatatgttccagcaattcatgaattccactctggcaaaaaaaaagtggagtttcctatttcgacagtatttaagtaaaaggaaattttcagttccccttctctgagtaatcattcagttgtctggaagagcacaatattcataagctatttctttaatgccaacttgccgttaggactagtcacgtggataaaaacacaagtaattgtgtcaattgtaagtgtcaaaaaacacataaacattatcaaaaaaatttcttctgacaagaaaatgatggttttaaaagttctaatgttccaaaactcgaaagatttgaaacattgggaatttgctggagtccataaactccaggatctaggcctaagtcgggttgaggggatacttaagtagccttgcttggtcatgtccttttttatcttccagtgattgtataatttctctaaacctcggctgcaacccctttgttctcctaagcaagacaaagtgggttgtttgtatttctctctctattaatacaaagatacaggtctcctgtgtgtttgagaaaaaaaaagttctcagcaggaaaagtaatcaaatttttaaaaaataatgacagaacacaaaagacaccttgttaccttaagtgcacttagataatcaactagatcattctcaaagggtgtttttttattcatatcgactgtgtctttccagggaaaatcttgcatccatagtccctgacttttgtaattccagtcaacatgtatcaaatttgctgtgtgcacaacaattcgaattccttgaggatacacaagcaacatagccttagaatggtgtgttccaaatgaaattgggagtggaggcctgtgaaggatccaatttgcaggcttcagcttctgcaaaccaatcatgaacatgaacatgaaaatgagaaaaagaaagaaagaaacacacaagacaacaaacacgtttcactatttttgcaaccttcataagctctaatgaagcaccatcttgcccatgtagaaccaggacatgtggaaccttcctcaaacttgggcac

SEQ ID NO: 3176 - DNA, 1170 bp, Zea mays
tgcatgcctgcagtaaagcctcatgaacacaaaaaggaacatgtatgacacagacttacttcaagaagatgactgtcaaactcagctggcaaatcatatacatatatcagtggcctttttttctgaacaacggccttaacaccaatggtggtactgttcaaagttttcagatctggtaaattcactggtgtctggagccacgagggccagtcatatgcaagcgaatatgctgatgggatactgcaatcaatcccaaaatatccactgtcacactgaagaagatactggatgagattacagcttacagaagtggaaaaacacaaaacaacacaccacattaaaatgttaaatttaacaaaattattccatttcattaaatccctgaaacatactttacagaaaccaccacggcaatgcccatgtccagagcactggttgatgcagctgcattcagcacgtgtctcacagaactgcccccagagaccatcatatttgcaatcacattcttctttaaacttcactttggatgaatatgcgtcctcagggaccacattacaccatcctaacttactgttgtttgttgtaagtatgttttccaggtcaggtgttttccaatcagtaagctttggaccatcaggttttgcaggtaaactagaaagatagataagagaagattagtagtactttcaaaaaagaaagaagtttagtagtaatattaaagtagctcaaaaacaaataatcagattgagtatcagtgatagtcttacattgttttaaaaccacaagcttctgccacaggacgatctgggtattttgtcccaggcccacaaaagcacattgcccttgttttatcacagtgagctgcacagatggaaactatccattgacctacaggccattctggggagcttggaaggttgcattccaagttcagaacctcctcacatcctttccctgtatcaatgaagccatattgtgaggagtcttgattaggaatacatcactacaaatttaaatgttattggaatctaacattagcaaggaaacaatatatatgccacctttctacagttcgcactctcatgttcttctattttttaaatgaaatagttgttttttagtaaacccaaaaggccaaaaccatagaaagttcaaagaacaatccattca

SEQ ID NO: 3177 - DNA, 1238 bp, Zea mays
tcaagttcacactacccataggtttcatattatgttctcgtatctgaacagattgtaatatatttcacagattaatatggcctagaccacagacacccaaaatgacataacacaatggcaaagatgctaatataagcgcacctgatgcatggttatctgctattaatatgaccatcttgcagggtataggctctctatttgtttcccaacatggtaagctgttgtctgcataagagctctattaatgcccacatggtcaactgacctaatacccatagaccatagctaagtaaggattatttggcaaataaaaaatttgaatggcacacagtggttgcaacaagagatatgactagggcagttggttgttaaacaaaccaaggatcaaggtcagaattgaagacgacagttttgcatgatatgcaacattcagggatgttactcggtcaaacggtcggtacaatgtattgctttatcaaggatgttggccgtcatccgtgtaatgaacagaatggtcacctagagcagttcacagtcacaggtcttttcaccaatatagaaaatgtattgttaacagttgcaatgagctcatgtgcatgcagctgaacgaaaataacagcaagagtgacgaacaaatttacagtccatcctaatatggtatgtaacttctggccgtgttgctgtattgcttcaatgaaagatgccaaagccaatccgtttgatcaacagaatgggcacaaagtgcagttcactaactgcatgtttggatcccatgaattgaaaccaatatctagaaagtgcttctcattttattattagattacttttcaattcctctcaattcctgggaaccaaacaaggcctaagtcttatcatggatatagtccattgggatagccagctatcagtttagtcttaacagtcgtggtatgctcatgtgcagtatgctgaagcatcataagagcagtaccgcagtagtggcacacaaactaccaggcgttctgactatagccaaccagaaacataatagctagcccagagggaaaacgagaaaggaatgctactcacggcaaaggcgacaagggcggtggctagggcgaggaagccgtacttggccatgccctcggagaggccgacgaaggtgctggcgatgccgaacatgatcctccacagcgcgacgcagacgacgactgcccccgcgccgacgaggatcatgtagttgcgccgccagaaggcct

SEQ ID NO: 3178 - DNA, 1052 bp, Zea mays
cttgcatgtctgcaggcgctggtcagggggcagctggtgaggaggcaggccaacgccacgctccgccgcatgcaggccctcgtcgacgcgcagtcccgcctgcgcgcccagcgcgcgcgcatgctggacgcggaccacgccacgccgccagcggcctaccagcgccgctcaccgcaccatcccattccgatgcgccgcagctcctacgtacgtcccacgcgcgcacacacttgcatgacaaattagctctgcatttcaaaaataaactccagcctagacacgccgccgctgccgctgcccgctgctgagtactagccatgtggtgtctcgcatgcaggaggcgatggaccggtcgggggaggagcacgtgaaggtcgtggagatggacgccggcgacccggcgcgacgcgggcggagcagctgctcggcggcggccaccgagtccagggagcgccgcctcgccgagtactaccaccaaggcggcggcgggcagtgctcgcccgcgccgttcctcttcgcccccgacctcagcccgcagcgcggctacagcggccacctggaggacgtgttcgcgttcgaccccgcggcgacggcgcgcagcagcccgtacgtgcccccatacgacgacggcgccgacggctacggcgtcgtcccgagctacatggccaacaccgagtcgtcccgcgccaaggcccggtcccagagcgcgccgcgccagcgcaccgacgcggcgctggagcgccagcccagcaggcgccgcgcccagcagggagcgcccaggaagatgcagcgctcgtcgtcgcacgtcggcgtgccggcggcggccgcgtacgggtacccggcgcagccgtgggcgggcgtcaggctggaccggtccagcgcgtcgctggtgggcagcgagtgcggctcgaccagctccgtgctcaccgcggccaccgtcggctactgccgctcgctcgtcggattcgaggtgaatcacatgttttgttacaatcggaatttgcaaaattgatatttgttcctgtactgacgatcgtcttcttggttgagct

SEQ ID NO: 3179 - DNA, 1017 bp, Zea mays
aaggttactcattcacaaatagggcagataaaatttataccatgtatatctaacaagaacgtattttggccaattctgtggatcccagaaattcttctttatgtcaggatgaacttccacgtctgccagtgaattaaatggtcagtggctagggtactagatcggccatgtaagacatgtttatatcataatatcttaatataaaatttactgctcacatagaacaaaggggaaagagagggaaaaagtatagtaaacaagatgatgcattccattatgatgtttgcaagctttggaaggtgacatgtctatagcatattggagtttaaaacatgtgcagtagacatcatataaggctcaggaattgttaaaacaagccaatcatattcttgattgacagagaaatcatgtacgtgtgtttagtgaatattttcaaatatgctagcacacacaacaggttaacagtagtaaaagataactttacatggtaataagttttcaaagacagcaacacatgacaatgatgtaagctctagctttttagttagcagatctagaacctagacataattttagcagatgatcttgggaatgcagaaatttctcaattatacagtaattcgacaggaaacagttcatttttcacaggaaaagtgtaggaaacaggaaaaattccttcattctgaaggggcctaaaaatctaaaaggaatataatgacatgaacaaaaaaataaatgtaataaggacagacagtacattacatacagtggtgaggcatgtccacaactttagctgtcaccccaagtatatcatttccagagtacttctgtgaaatccacagcaaatgctattaaacaaaagaaaccaaaagacccactaggattgtgtaaacaaaaagccaagcaacgaccatatccctcaccaaatggaaatcgatcagtggaacttcagaggttttgcgatttataacataaagccaaggaacatggaacttttcatgtccaatttgaaatgtt

SEQ ID NO: 3180 - DNA, 1102 bp, Zea mays
caaacagccattcttgtgtaagaactaacacaaaatggtttcttgatcctatagaaacaggcatggtaatgaatcattggaaattcaattctgccttggattgccaggtaaaaaggcctgtttatttcatttcaacattaaagtaaagaacaaattgaacatgcaagacaatctccctcatgtactcgtgtagaaggatgtcgtcacacaaaacaagggtatagtttcgttgaagagaaacatctattgcttactttgatgattggatgagatggttgaacatgaatagctggcgacgttaagaccacaccttctacatgaagttctacagaaggatccagcgcggcctttggacattcatgcaaacaggaaaaataattgaaattccaatcctgcttatgtgacttacggtcttactgaaaaggtcaattaagtcaaacattattgctttaccttcaaaacaatagctccacctgtggagtgcccaaataagaagcacggcaaaccatggttttcctccaatacaacatcctccagaaattctttctgcacaggaaggaacttcaaaaatagattgagaaaatactgcaagaaaaaaaaactgcaacttgaaatttatatctgtgcacaattctgtatgtacgaaacagtaccaagtcaccaacagcatgatcaagtgacgaaacatatccatgaactccatcacttccaccatgtccttcggagacaaaatacaagaagatgaaaatcaaacaactgccagatacgcataacaagagaagaaatgaaagtaaaaaaatcagttccatgccatagcatagaagagaaaggactagttaagagtagcacatgcaacattgagtcaataaaaaggtccaagatctgctaaatatgaaaaccttctgatcactgcacttgtatcattatatcatttatagcagatattcagaataaagtccaagtcagactcaatctggcccaacagctctgtttagtcaaaataaagtataagaaacatttggagaggctttcattgagacatcctaccacaatgtgacatgcagaattaaacagaggtagcgacctcatgatactgaagctc

SEQ ID NO: 3181 - DNA, 1111 bp, Zea mays
tgaatgcgcaggccacatggtacttcagcatctgccagagctgttctaccaaatcaatgtgagtgacatgaacaactcctctccagagtccagaacatggactgtcatgagtgttgcgtccctgaacaacttcagttactcaaactaatctgttgatggtcaactgaggttcacaaatcatgattccaggtaacagaaccatcttgactcggaacaactaattccatacactgcctcagttgctggaacagtaagagtgtatcactgaaacctacatgcgaatggaactgtttgttatgtcatgactaataaggaacatgaaaaaatgaaggacttaaactctaataatataggcctcattacctctagagaagttttgaccctgaattatcctgcaacttgccagcattcgagtatcgcaacagaactctggaaattggataagggcggcacccaaaaaatctaataatattatgcaaacccctctctccatgcaacgcattcggtgaacttagatggttgagatatgtgtttccttcgtagatataactaagctgctggcacagtagtacacctataccagcattgactgataaactagcgaatgctagatataccagaactagacctcttgctgacaagaagaaggcagagcctgcaaccgtagtaataatctccaaccatattttccaaaagctcattgaatcacgagatgatgctaggtttggaaaatcaacagagggccatatctggtagcttgcatatatggtcatcccagcagcataagaacaactaatgaccacagaaataagaaaaatgacaaacacttgatgatttgaagctcccacacagttgccaatctgcacttgaacagaaggggtgatgaataaacaagtgaagtctaacaatcaacaaaacaataatgtagcagaatgcagttatcatacttacaaatgggcagtgatgatccatgtccaccacacacattttacaagatcggcagtgatgtgctctggggggctttggtttattacagtatgtacaaaaagtatagttctcaagatcccttttcccaaccaagggatagctgccccaacgtacatttgttggc

SEQ ID NO: 3182 - DNA, 1025 bp, Zea mays
aataggatcttatcattatttccctgcggtccataaacacaagtaagccaccaggggctcccatttccattgagaaattgtactgagacgctattattccggatatactgcgtgcctgtgacaaccacatcttgtttccaagccaccaaaatcccaccactggcgccaacagcaggtagctcgataaaattaagaaactcggagcctaaggctgataggaggacccctctggtaacgacatccaatttagtttcttgtaagcaaatgatatcaatttttgaggaagtaactaaagaacggactgagtcttgcctagccgaggaatttaatcctcttacattccatatcagaacacgttccggattcattgacacaagggcgatgagaacaacaaaaggaaaaacaaagcagatccaatcctagaccctacaattggtcaggaacctgccagccaaacaaggctgcaagggcttttacatgaatatcagacaaagatgtcttgaaaagatcagcatactcctcttgagccctctggtcaatccccacattatcagcaattataccaactgccttcatgattttcttgatagcacgtctgtcaaggtcagaggcattaaattcaacgcctacaccagcaactctgcggctgcgacgtggcaccgatctggagggcaatttgttgtccttcttcttcaagatgactggaggagcaggaagcaatttagaaggttgccgagtaacagatttaatgaactcttctctctgcaaagactgggaagtctcctgctcgccagaaggagaaggaagaagactgggagccaccccagctggagacatcagaatgtctgccacagccgcagtaggctcaaccaaactcgaaataggttcagaacttgtaaaagttattgccgtggctggagacacaatagcatctgccacaaccccgataatgactgggccctgaccaacgtgatatgtcccatcagcagccaaaccagtcgccgaagctggagaaattatagcat

SEQ ID NO: 3183 - DNA, 1181 bp, Zea mays
agcttgcatgcctgcagcggtacgggcccaacgaactcgagcggcacgccccgccgtcggtctggaagctcgtcctcgagcagtttgatgacacgctcgtgcgcatcctgctcctggcggccgtcgtctccttcgtgctcgcgctttacgacggcgcagaaggcggcgaggtgggcgtcaccgccttcgtcgagccgctcgtcatcttccttatcctcatcgtcaacgccgtcgtcggcgtctggcaagagagcaacgccgagaaggcgctcgaggcgctcaaggagatccagtcggagcacgcaaccgtcaagcgtcatgggcggtggtcgcatggcctccccgcgcgcgacctcgtccccggggacattgttgagctccgggtcggggacaaggttcctgcggacatgcgcgtgctccagctcatcagctcgaccctccgcgtcgagcagggatctctcaccggcgagaccgcttctgttaacaagaccagccacaagatcgagttggaggacactgacatccagggaaaggagtgcatggtttttgccggcaccactgttgtcaatggcagtgctgtctgtgttgtgacgggcactggcatggcgactgaaattggcaagatccacgcccagatccaggaggcatctcaggaggaggacgacacgccacttaagaagaagctcaatgagtttggtgaggcgctaactgccataattggggtgatctgtgccttggtctggctcatcaacttgaagtatttcctttcctgggagtatgttgacgggtggcctaggaatttcaaattctcatttgagaagtgcacatattactttgagattgcagtggcactggccgttgcagcaattccagagggcttgcctgctgtgatcaccacatgcttggcactcggcacaaggaagatggcacagaagaatgcccttgtgaggaagctgccgagtgtggaaacattgggttgtacaactgtgatttgctctgataagaccggaactttgaccacaaaccagatgtcagcagtgaagcttgtggcaattgggaggtggcctgatactcttaggagctttaaggttgatggaaccacttatgatccaactgatgggaagatacatgattggccaagcttgagcatggatgaaaatctccagatgatcgcaaagatt

SEQ ID NO: 3184 - DNA, 1124 bp, Zea mays
caaccgccgctaaccgccccctggcacgccggccccgcgggccgcggtttagccgaaccaaggcaaatagtggcgttcgcagtcgcactgacgcagcccagggcggggcctaccggcttaggcagcggaacacgacgagctgtgcctcccagtcccggtcctgggtcgtcggctactcggccacggccacggccacagccaccaggcacaacaaccgcacaggcagcgacggctcacggcacgaagcggaaaccggtgcctagtccgcgtcgcggccgatagggggtcagctcggcgggttcgggttcgagttcgacatcccccgcctatgcccgcgcgctcgtgcgggcgtgtacgcaacgcacacgcgtccgtccgcggtgtgtccggtcgcccccgcgcgtgttcgtgttcggcaatcggcatgcagccaggttgaccaacccaccggaatggccggcacttcatgctcgcatgtttgcaacgtgctgccgggtcccatactgtagtttttgttttgtttttttgcgctagcagcagctgtttggcgatcgtttcggctcgatcggaggggaaaacggctaagattcccatgctcggttgccgactgatccagctagcgctccagctttgggattgagtggaggccacgcacgaggcacaggatcgggagacctcgcgtttcgacgtagtggtagcgtgcaagctgttccaattcatatatatagcagcgttatttctaatggagatgtcttcaactgcttcacaccacgcgcgagcgttctcgagttggttcggtcccggatcagcgatcagatcaaccgaaaaccacgacccatggcttcatgtttcgtttgcttttgaacaatggcaggatacacgcctacgatgcgtgcacgacgacctgtttgcgtcgacggagaggcgatgcaagcggagagaagacgcaaagaagacttggtttccgccgcaggtagcagcacaagcaacgacgacgtgcggtgtatggcacgtgagccacacgacgcggtccgggtcgactagcctccggccacagcgcatcaccgccgccgccatgaggaggttgactgtgctcgcttgcttgatttttcattcatgcatat

SEQ ID NO: 3185 - DNA, 958 bp, Zea mays
tgctccaggaacaagtgccgtccaccagatccaggctcggcatgttcgtgatcgaggacaagggcggcgccatcgcgctgatgctggcgtcgctcctgttcctgggcacctggccggccgtgctcaccctgctggagcgccggggccggctgccgcagcacacgtacctggactactccatcaccaacctcctcgcggccgtgctcatcgcgctcaccttcggccagctcggggacagcaggcgcggcatgcccaacttcttcacgcagctcggccaggacaactggccctccgtgctgttcgccatggccgggggcgtcgtgctcagcgtcggcaacctctccacccagtacgcttgggcctatgtgggcctctccgtcactgaggtcatcagctccagcatggtggtggtcataggtaggttcgcatcatcgttagtaataatcatcacatgagagggaagggaaagggagggacctcaatgatcatgcacatttgcttcttctcccattaaaaatgagatataattcggagtctagcaacaccttgcctgctgacatttttcttttcaaatggaagcaaatcagcagtggttgtctgacagaccaagtttcgtttctgttctgtcagctttgaaatggaagaaaaagtctttgttttgatttccacgtcttccaattcttgtgttcttcaggcaccacgctgaactacttcctggacaaccgcatcaacagggcagagattctgttccctggtgtggcgtgcttcctcgtcgccgtcatccttggctccgctgtccattcctccaatgcagctgacaatgagcagaaactcggtgcctccacgaatgcctacaaactcgggtatctttctgatcattcatttcaacctcctgatctgagtagtttgccatttacatctttaatctttttatttatagactgctctgactgtcgtt

SEQ ID NO: 3186 - DNA, 1298 bp, Zea mays
  unsure (1)..(1298): unsure at all n locations
tgccaagggaggagaggagaggagacgtgtaggttgtggagactgttggcggctaggttagaacaggagaggagagggtactctaaattagactgtagatgggctaaaaaaggcccaataactaaaccctagtcgggacgaccaggacacacaactcggacgactagtcgccctagtcgacgattagtccgacgaccaggacgactaggtcttctagtcgagtcgtccagcaaatcgtgtcctaattgccgaccagcccgactaatcgcgattagtcggacgacttgaatcattgactccaatttctttcagcacaggaagatgatgctggctgtccaagtaatttaagtgccaacttctttaattctggagcagaatggccatgaaatctccaccacatttttggttccatataccttctatcctcaagtgagtcaaatgaattgaatccaggtccaaacaaagagaaattagcatactgcagcttaatcttttttaattcttcaccagaaaaatacctcctgaaacaagcatttctcatctctgagttttcctcattattatgaggagcttgtcggttggggacctcattgatccatgcatcggtgtaataatttggatttagtgagtgtgccaagcaatgcaagggcgtgttgctttttgtccatcgacttaccaagatgtcatgcacatatgagtaaaagatagattcttcatgtgtctctttcatttcatgacgatagatcatgctcttcaccttctatatcattgtgtcccacatctcatatatcaaatggaggcatagcttgtcagtatcagctgcccgtatcatagcatagatagggtcagtgaaaactaaggaaataggcgcacttgatcccaacacagatcattcacaatcttctccttgacaaattgagcctgacgtggattatcttccctataggcactccacttttcactcactaccatcactgaaagagcatcttttatagcaataaatctcttcaacatcacaacagcagaggcnaatcttgtgtcagcaatggcaaggaatttcagattgctttgctcattgaacatagacaacctcatggagtgattcatgatgaaanttttttaatcatgctggcatctccaatgacttcgctaatccactggaattcagtataacacacatcttcaatttccctagaagcacatatgctcttcaaagcaagattcaaagtatgcacaacacaaggggtccaaaaaatatgagggtgcttctgctcaactatgatgccagcagctctgca

SEQ ID NO: 3187 - DNA, 1315 bp, Zea mays
aacagacgcccaggcctgagttaccacatcctgaaaaccctccatcttagtccagaaagcttggaagtgaaacctcccttttcctctgctgaaatcatgaagcccaaacagcaaagggcaatggtcggagtcatccgtggctgagctctggagaagagaatctgggaattgttcctcccaatctgttgtgcagaaaaccctatccaatttgaccagggtaggattagagtgcccatttgaccatgtatacttccggccaatcaacggaatttcattaagagccaaatcatttgcccatctcctgaatctacccatcatggcacggtctaaattattattattcttttcttcctcccttaaaatcagattgaagtccccgagcacaagccatggcccattacagagagctctaacttctctaagagattgcaaaaactgaatcttgtcacggttcccttgtggaccatacacacaagtaagccgccatggtgagctggtgctagaatgaaaattcacagagacgctatgttcatccaccctactgcccgcacaaacactaatgctatttttccaagccaccaagatgccaccactagcaccaacagaaggtaggattgtaggaatacaaaattgtcaaaagctggttctagcatccgcaataaaaggaaccgagaaacatccaccattttagtttcttcaagacaaaccacatcaactcgagcagaatccaccaaagtgcgtacagcatcctgtctagcagacccattaaggcctcgcacattccaaattagaatttttgaaggatccataggggaagaaaaaagaacgactaccagcgagggacacccaaaaaaaaatcatcagcagattggtccgccttgcagcatctccataggcctagaccacccaaatagcgctgccatggccgtgatctgcacctctgaaagccctttgctgaaaaccctggcatactcatcaaggtcttctggccttagactttcagtttcttccgcattcccaatacccagttccttcaaaatgcgcttcttgccctgcgtggccggtggaggaggaggcaacctctccactcctactccagcgacccttctgctgcgtcgggggaccacctcattggctgtaactttgccttgtcgcggccttctgactggcgccctcagaattccacctgctggtttggtcagcctatcaataaactttatagcagccgaagggggggggcgtggacgtgtgtaacagctgctttggttgactgtccttcttcctcctctgccgaaaatatgtaatgatgcccgaa

SEQ ID NO: 3188 - DNA, 611 bp, Zea mays
cttgcatgcctgcagcgccgcctgccgactcttctccccgatacttcttgtacgtctcgaagaactccctgttctccttctccagctccttccacactgctatagcagcatgtatagtataataatgccaagaagaggtcaatgagatcgatacgatcgagtcgactactagtagctttaatttggcgtggacgacaacttaactactcttgaaataatctcgattaatcgcttgcttgcaagagtgccgcctacggcctacctgtggatgtgatgacgggcatcactttggcgtgcttctccaacgtctccatgcactcctccttgttcagcttgtagcagatgcacttctcgatcagatgctgcacctggacatcaaaccccttgcatccatcattcaccatgcatgcatgcattgcattgcattttccagtccaacacaaggccatcgggtcgtatactcgtatgtatctcaacaagcgcggcggcggcagatcgtaggtccgcccgcgctgccgcgcatgcacttattaccagtctgacgtacgaagccgccggtgacgaggaggcggcgtcgtcgtcgtccatggtcgccgcctacgccgagagag

SEQ ID NO: 3189 - DNA, 1068 bp, Zea mays
acaatacaaccaaattcagaccaccctcagccgaacagggaaggttgggacccattttactcctatttttatgtagcaccaagtccgtcgccctttaggaaatttgttccttttactttggtctaccactttgttatataaagcatgacccacaacgccctaaaatagtctcaagaatccaccaaagttgagccaaaagaactgaactcagacttggttaatctgaaccttgttcagtgcatcactgcctgacagcaccactttgagcaatctttacacctagctccatgtagctctagggtcaaatagcttaaccaagtttgcactactacaatatccctacaatgtttctataatgacaaataactagagactcatggtttaaaagttacagtatttcaaagttgaaccaacttcacaaaaattcagtttcagcttctgaactaaactcagtcaccaacatctgatagtccaactttgagcaaccttttctccaatttttgtgcaggatcaaaccctccaatattaaatactttttctcaccaacctatggtctttaacttctatatatactccacagctcaacaccctatgtattaggcacaaatgagttccaaaatcagccaaaacactgcaatttcagacttagtgcactgttctgaatctgaaaatgcaaagatctgttaacccctctttggactatcttttctactagtagcatatagttttagggctatcacacttaataaggattgttctccaacagtcactctaaaagttttatatagtgacccatagccaaatactcctggattccaaactacaagaacccaaagtttgcacaaaaacacagaagttcagactctaaatttattaagtctgaaatccacaatttctgacagctttattttggaccagttttactccaagttccaaatagctttagggctataaccattaaccaaatttatacatcaacatgtggtctttcactttggtacaaaagctttaaccaatcactgtatatatcagccaccaacaggctccaagttttcttcggaatacaaa

SEQ ID NO: 3190 - DNA, 1012 bp, Zea mays
tgctttgtctagatgaatgcacagccaatgttgacaaccaaacagcttccctgttgcaaaatactatttctgctgaatgcaaaggcatgactgttctcaccatagcgcatcgtatttcaacagtgatgaagatggacaatattctagttcttgatcaaggaaaactggtaagttgcgctactaggattgacattttgaaggaccattgcaaaaaccaaagtggaatgtgggaatgaactcagaacatatgtaccgaaataacatttcacaaatcacaagaatgatatatcataacaaatacaaatgaggatgccacatctgttcaaaatttatgttaaacacagtcttaaaccaagtgacagaccaaaatggatcaacgttttaattaattaattctatgacagaccaggtcatgagtatgcttttgttcaaatgccttattgtccgattaaatgtcggagttatctaacactatgccgctccactttaggttgaagaaggaaacccagaagcccttatgaatcacagacactcaagattcgctcagcatgtcaaggcctctcagatgtgattatgggagcatggtttcctactatgttatgctaggcctttttacttttttagagttagaacttagacaatatttactatggagcaatgagcttgtaagaacagttccgaattgacaccactagctaatatggctaatagaggctttgaccctctccgaatcattgaacatgatgatcccctagctgttaaaattccatgctttgttactaacagggaatggatctcagaacctgtttctaaacaagtactgttcataaaacccttatttcatcgattgcttttcagttctcatggtttttgttttggtaaggagtagctgtattcaagtctagtggcatggtgcttgattgctcgctaaaagttaggcaatgcaaggatggattgaaatgcaaaaggcacaacgggcaatgagggaaaatgcaggggatttaataaccat

SEQ ID NO: 3191 - DNA, 1110 bp, Zea mays
gctgcatcttggtaactagtagcgaggatcccaagctggcgggatcccagttggcagcagcagaagagaggagacttttggccgtctccaatggctagttatttcactagctagattcactttattttctatgtggatagaaaatatataaaaaacgagaatagatatcgatgagtaaatagatagaaaattttatgtattccaaaaaaactgagtgtattatatgtggggactaaatactagtggtatgataaattactattttattttttttctcttagcttcacatcaactagctatttgaaatagacgctcttaggacgtttgtaatggtcctagctagctagtagctaggaaacctccatatcatttatatagcttaggggtgtttggttagagagactaaaaattagtctctagtttttagtcacatttagtcctttttttgccaaacactagaactaaaatatggactaaaatgatttagtttttagtccttcacatatgtgctaaaagggactaaaccatattaattccacatttacccctcatttagttcaattcaattgtactaatagcactaatagcagaagaatgttaaatgtcattttagtcttcttatgagtcatttagtatattcttactatttttagcccctaaaaccaaacatgttagggactaaactttagtccctctaactaaactttagtccctacactaaagaaaccaaacatgaccttatactaatagataatgatatactatgctatctatttagctagctttttgtgtttctcatatctgaaagtacaccggaaacatgatggtatagagtgcatcatctttgtggtctttttgtgtggaggttggctatatatacagcacaggaaataatatttcaatttgtgcaaataaaaatgagaacgaaaatagcttacgatattctcaaaggatagtgacgatgattatcagtggcttccggctgctactgatttggggctaaactcgatttagctaggagtaatgtagggtacagacttgggtctaaactcgatttagctaggagacgccctaggcctgctcgaccccagcccctaccatgcagtccat

SEQ ID NO: 3192 - DNA, 1134 bp, Zea mays
accacaggttgatctgtttgctgatgcagattttcaatcggcaaccgcaagtacagatacagctgcaaatacagatgtcaaggtttgtttctccacatgttaaggcttctttatacacgttagaatattatctactattatacattcctacaattaattggatcactcagaagaggatgaacaaaactatgaggcactgttgcagtgttccaaactaaaattaaggcaaaatttttccactggagactgaaactgaactttactgccatttactatatcacaatgaaatttcattattaacctaggtacaaagaactgtggctctttgccacagggcaccacaaccactactccactagaataggaattcattgaattcagatgagtgttggtgaacagactattttgctcttcaggttgctgcacaggacaccacaactactttggcagatgtatgtccatctaaagaaactcgatgacataatagaacttttgaaataataaatttgcctactcttgtgtcatcaaaacgctcatgcttgatcccattagttgtcatcggcataagaagtaaacataattcaactaagtagactcacagactcaaataagtacggaactttgtttgagcttcagtaattttatgcattacacacactgagatatccatcttgcatttgtagcttcatatagaccacatgccattaaataaataagcagtgctaaaacaatgacataaacatgaattctgtacaaacaacataatgtcctcaacacaattttcatgacagctacaagacaaacattcttaccctgacaaaataattgaacctttgtttttgaaatttactggttagcgccagacatgcagcttatagacaggggtttgggcaccatgtttattttttttacaataaatacacagtgggaaactaaaataatggttgtggtgccctttggcaaagagcgatggttttgtgatggtatgtagctaaactgtgcaagttttgtgtgaaatagcaaataccagcaaagttaattgtcttgtggcaattttttcaaaaaaaaatgttattaaatcatgtagatctacaatcctctatcatgatacatgtttgcttataatagaaaaat

SEQ ID NO: 3193 - DNA, 1242 bp, Zea mays
cctaacgagtcgacctgcagcctctggtgaaagcgaggttcctgatgatgatggcaccgtatcactgtatgttctctgacctgcaaattgagaaaatagttattagagaaaagcctattttccttaccagcttgtgacaatgtggacgagcaagtataaatgccacatagtattatagtaaaaacctaaaccctaatacttagttacttactgtgtctaggggaaaacgtgttctgatactgtcctaatatacactggtggcagaggataatggtgtttcaccaaatacagcatagtgctgtaaagtggctgccttttgagaataaacttaggtcatgtttgtttaccctctagattatataatccagcttaaataagttaagagacaaacaaacagcataaagtattaggtggattatataatctagaatacctagattatgataatccataagtagatcattaggtgcttatataatccataagctggattatataatcctgaaaggaaacaaacagcagggccttggctggttgaaaccaccaccatacagtgacttgtttgataaaattgtttgtctactctacttacccctgctgtgtccaggttcataatcccttatttctgaactgagttcgtaacagtcatgcttgtttccttgccgtcagctgacgcttactgacacctgagtctgctttgctcccacttgttcagatctcagaagagtttcaaaggtctgcacattagctccatcctccgtggctcccgtagctacaagaaggcactaaagaggcaaatggagctgctagacgacgacaccattgtgcctgatagccagcccgcggatggcctttggggctgaacatggttatcgtcaagagaagcgccgaccctgcttcatccttttttgccattgtccacctgatacgctggtgggctttataagttgtctaaaacacatgcccgaatgcgtgatgtcgctgatggcattgccatacgccacacgcagttcccttattttgtcgggcttaagctgtgatctgcctgaggatgaatcgatgatgttcatgatacagcttaccagctatatatatgtgttaatgtatgtaagaatgatacgcacgcttagtctctcacccatgagccatgggtccgttgagtcctgactgaccatcgccagaagttgtggtttgtgacaggaaattccatccttctggcttatctgttgtgtattttgcgta

SEQ ID NO: 3194 - DNA, 962 bp, Zea mays
catcttgctgcctgcgaacttacagttggagaggatatttgtcaaccttttatttttagagcaactcccacaatagccctcaaaacagggtcaacaaggcccttactttttatttgagggctccctcgcttttgagggccggttttctgggccacactctagcatagcaatggccctcaaaatagagctctcaaactcattctagcagagaatctgagaatgacacatcacacacgagaccttgttatcattgtctttttcttgggtaaaacactctgggacctgggctcatggttgtggtcgggcacgtcataatggagggaccctggactcatggttgtggctgggcgcgccatcatggagagtcacagtcacaactgccaaagagttgcggctgggcgcgccatcgtggggagtcacggttgcgccgccaggggagttgcagtcaccagtcaggcgcgccgaagttgtgtttttgacctgggcacctatatttaatttagctacgagggcacaaataggagccctgcttgatttgctcttaaatacagtagctttccccccaccccaaattgttggaatacacttttctcttttgctaaaaaaatcaatataccgcgttgttttacagatgtattttcatgagtagtaacagcactctttgcccaggctggagaagacagcaaccgcggtcgctcgggctggttttctcccacttcccaggaggaaggtcatgcattgcagatcccggagttcctacagaggaaagggcgtccagggtttccacgagtctgaacacactttggttcaatgtttttcttgtcatagtttggtacgatgtaggtttggtttctgggtctcttagttagcaaggtagagcagatgttcctgaaccgcatactaatctgtgtgcaaacttcgtcgcctgagtacattggctgggctgctttgcttctcaggaa

SEQ ID NO: 3195 - DNA, 1284 bp, Zea mays
aggtacccgcataagtttattggccttgacaaggcgtcaagtgtcttcaagagtgctgtcaggacaatactatctgttcttaagtcatctgccttttcaagggattgcctggtggcctctggagtaagcttctgtgcggcaattcaggttttcatgagcacagaggagatttcctggttcatttctcaaggtctatttggcatctatgcaaatcatgaagatagaaaaaatcagtctgtgcacaatgtattttcggactttgatctgtgtgaacaaatcagagatctttcagtgttgagtagactttgtctgctaagagggattttgacatctattccaaggacagtactcaacatgcaccaacttcattccagtggacctttatggactgttttatatgatggaattttacctgagctttgcaagcattgtgagaacccagttgatagccacttcaatttccatgctcttacagtgacacaaatatgtttgcagcagataaagacatcggtttcatctgatatcaccgacttctctggggactataagcctttttcaagagatgttgtcaaccgtatattgggaatcatatggcgcaacctggaagatcctttgagtcagacagtaaaacaggtgcatttgatctttgatctcctattagatattgaactatgtattgcatcagaagaccgtgaacataacaacaacttgttcctttgcaatgttgcaaatgatttacttcgcttaggtccacgatgcaaagggagatatgtccctttagcttctttgacaaagcgattgggtgccaaatctcttctaacattgaaatcaaatctgctttcagaaacagcttatgcgtacatagatgatgatgtttgttgtgctgtcaccacatttttaaaatccttcctggaggctttaagaggtgaatgttggaatgatgatggtgttgagctaggatatgatgccttcagagctttgtgcttgcctcctttcatgcggggacttgtatctggaaattcaaaactacgttctaacttaaatacttatgctctacctgctctaattgaagttgatgcagagagcatattcacaatgcttggattcatctccattggccctagcacaaatgaaactaaactagatgttgttttgaaaaatgaccagtgtatagctgcactggtttgtctgcttaaggtctcacggcatctggctcttgttgaaggggacattgatttagatcttgatgcattgtcacagattcagcagatggatagtaagggt

SEQ ID NO: 3196 - DNA, 734 bp, Zea mays
gagtccttgtattgtagtatgaagccagggacatggatgaacttcagtcgaagctgaaccaagcgatgcaagagttgggtgagcttctgcaagatagaagaagcctagctgcttgcaacgggagtacgctggaatggtgcatttcctgatctgttggcttgcaaatcttgtaagctggtaaccctactgtgcaaaattgataatgagtgttttctatttgagcagtaaatggtgtttgttcttgtatttaatggcagatccaaaaaagaaggaagagaagcatgtgagaaagagaattgtgaacggatgcaactcaccgtacacaaatcatactattagctaagccttcccactatcattagatgaatagcatcaacctctatagacaggaagcatgcatataaactttacactaccccaataaatacccgaaatacacacaagtttggaatattatactaattacaaattactgtgtcaattagtactcgaccaatcaagtgtttctgaatattgtctatacttagattaaattgctgtttacgcagttgtagacattcagcagagaaatgcatcgactcattttttttgtctaggttgggccgtggagatccacttgcattagtgattgtttggttcctagcatgtaatttgtctcgcataaaagaatattataattgattttttaatataaacacatgccaatttagtccaacatttcatcatagtatgac

SEQ ID NO: 3197 - DNA, 710 bp, Zea mays
attttttcagatatttgtcagcctgtacacattgctgactgttcattatcctgagtgtgttctgactgtagagctgtagtgcaattaatatagactgatctttcatgtgacttcgttaatcttttcaagcactccatcaggctcacatggtatatagtgaacatgcatgatgcactagctaatcctaaaaaaagttaactgcttttcatgccttattcgttactactcgtatgctaaagcaatgagcggcagaactgcactatttttatccattattcgcagaaagatactaactgtagcttgcttcctccccacattttcttgacaggtatctgatagctctgcacaccacagactaccaacaacctatgctcttcctcaatacccttgccgtcagtgtgcttgtggtcgcgaaactaccgaatatgcacaaggtccggattttcggaataaatgccgagaactgagcaacgtcatccttcgccagacatttaccctatatgcgcttttcagaacggttttgtgtgttcccccccccttctagtgcctttagttgggctcatcagagcaccagtgttgaaaaagttgttagcaggatgggccttggtcgctgtatagagagatgctcggaggcgtgctgtacatctgatgtgcacggattctgtacactcttaatgttgctatatatacgggttgttgcaagcatctga

SEQ ID NO: 3198 - DNA, 1141 bp, Zea mays
tgcatgcctgcagggtatggaagaaaaggatgcgccgtcaggccatggcccatggccagtttctgcaatggcgtcgccctcaagccaccaacacgaggttgccgacgggcgcttgacggacacgaagtggcgttagttaggtcctgcgaacggcggcgagagctgtgctgtgttttggagcccggcccggcaggacgacgtctagactcgggagtcgggagtgacattctggttgtggccactagcccacgaagatgctcaacctgtgtgccgagcgggccgcccgacgtagtaatgaagcctccggattttggcagaggcccgtcaaaatgacgtgatgagcccagtccgctagaaaggcccaactctcatcgagactcagagcatctccaagagactagctaaataagtcgctaagctaaattttggctactaaatagcaaaataaatctccaacagactagctatatgactcgcaagctatctacctctctaaattgtctctctcactagctaaatttagctagccacatgactagtcaaactaaatagatagtctgttggactgatatgctatatatatagtgtaatctttataaaaacgtaaatagatagtcaaatagagaggaaaaaatgaagagtctcttggagatgctctcaggaatgtatatttatagtgtgtgtatagtgtacatgttgctgtgatccggccttcaacgccatgattcagttcgtgacaatttacatcaaagtctcaagaatttcacaacattttacaaaaggcgcgcgagcacgatcttccgtccaacatccgcttccacgccgccacacatttgacatttacatgaccgcgcgcggcgtcaatttccattcccccacgatccagagttccagaccacaggcgcccccgatcgtcgtcagttccggaagctgctcctgcaactctgcgacgcaatgtgcacgtccttgctcagcccggcggcggtgatcccgcagtccacggctagcctcctctgcccgaacccgagcgcgccgacgtgcacctgcacggtgacctccacggccagctggagcgcgaggtggtccttggacccgctgaaccccttctccaccgccctgggcgtgcgcccgttgtgcttca

SEQ ID NO: 3199 - DNA, 904 bp, Zea mays
agtacgcggccgcgccagaatctgtcccgcgagtgccaacccacacagtggtctactggatgtttggcaacttgtcctgtgcagaagctcggagctccaatgcctctggctgcctcagtgacgagagtgagtgccacgatgagcctccgcgagggtataaatgccagtgtggccaaggctacgttgggaacccctacatgccgaacggttgccaaggtacgcatcttccggttcaggttcaacttgtaccatgtgattactttgcactaattagtaataacttgtttttactcatggtaatagatgttaatgagtgcacacagacagatccaccgccatgctttgggcaatgcataaatacaataggatcatatgattgcatctgcccatctggcacctcgggcaaccccagagtaaaagatgggtgtagtccaagcaaattgaaattatcaggtaacaataaaaaaatcatgatatctcttgtttatattctaaggaactaagcctagcttagtttgccatgagggtggatgtacaccaatatcgcccaaactcaagttctcatcgagacgaatttgggtgcctatttcttcttaattaagtcacctagttcctcctacattggtcgattattttaccaacactcttgtagtgtagcgatggactttcctttcttatttttattaatataatgatgggtacatctcctaccgtttccataaaagaaaaggttcgtcgaagtaaataatctgaattccattttttcacaaattacccaggattgatcattgcaatcggacttggaagtggtattgccattctgctgtttgttttcgccattgtcgtcataaggagaaaggtcaaggctcggaaagctagaataacgaaagagtttttcttcaag

SEQ ID NO: 3200 - DNA, 1174 bp, Zea mays
ttgtatgggtctgaacttcctgcaaggatttctcaatcaagtctgaattacagctataaggatctgaagaaagcaacgtgttccttcagcgtagagaacaagataggacaaggcagcaatggtactgtgtacaaggtatatatatgtaggtatacgttttttttaaggatgttagtctcttgcagcaagactgcaaagggcctggcactcaaagaggttgcaacaatttcacacgcaggctgttcttcctggtgggaatgaagtcgctgcaaagagattgttcctgaacacgaaacaatgtctcgatcagttcttcaatgaagttgacgtgataagccaggtacgtcacaaaaatctggtgaaactgctcggatgcagcgttgatggcccggaaagcttcttgatatatgagtaccacttgaacaggagcttagatctgtccatattcggtaactccgaactcgtttccatcctgtcgtatattcctcctgcatggacatggacatggacatgaacatgatagatgtgtgtgcagctgatggccagcagaagaggcgtctggattggcagcaaaggttcgatgttatttttggcgtagcagagggcctctgctacctccacgaagagtcagaaactcggatcatccaccgggacatcaaagccagcaacgtcctgttggaccagaagctgaagcccaagataactgactttgggcttgctcgagtcctatgcggtgacaggactcatcttaccacagggattgccgggacagtgtaagagtacaaagacttgccttaattacctagctaccatgcatgcatgcatgctgcctgagagatggctcgtcaataatgtgcagtggttatatggctcctgagtatgttgtccatggccacctcaccaagaaggccgacgtgtacagcttcggcgtgctggctgtcgagatcgtcaccgggaagcggtgttgtgggtccacagggtctcactctggtcactcacttctagcacaggtttgaaaccatctctgaacgtagaggcatatatagatctggctaattaatgagatgagatctggatttggcacgataatacacgtcgtgtacgttgtggatggttggtttgcaggtttggcatagttacaagaccaacacgacggagaaagtcgttgacacga

SEQ ID NO: 3201 - DNA, 1010 bp, Zea mays
acaaggtcattgactgacccaaattgctgaccaacataggagccaactcaaacaactctgacccagcatttccacagtaatcaacaatgctccgaatcaagcaccgtacctctctgattctccgtggcaagaatgcctgcacgatcaaagcaaacaaaccaactgactgagatgacccgtataacctcacacactccctgaaggttatatttctggcagcatcccagttcgaagcccgcaatgcttgtgtgatcaagggaagcagacgacaacttctataatcaccgtaagcggaactctgactgggctcttcattatcagagctgttcaaccaacaagcctgagaggaaaggtgtgtcactgggcgatagctcctgattacacgggcttggtgcagaaacaatggggccgcccggcgcatagacaagggacgctgatcccctccttacattgacagtaccaccagaagcagggatgagctgtgcataaactacacttcatggaccaatcttactttcaagccgatgaaaaggaccacctgagagaaaagaggttatagcttttgaatcacatcaaattctcgtcaaagaaatccgataaaaagaaacatggtcaccacaactgtaagtgatcaatagctgcaactaactcatgtttgaagcaagagatccagcctttctactcctaaaaaaatatctagcatggttattaaagcggtaaaacgttaaaacgttatgaaccaacttttcaacgtttaaaagaacgttgaaacgtcttttcagactaacataaaacatgatatactcttttaacctcttttccggaaggtagatgagacacatatacaagtttcaatgggaatattcaaacaggtaaaagaagaaacgaaaagaaaaccatgtgtggcttcttcagaaggaacccagtaaaaacagtgtgcttgaagcaatagcacgcagacacactctcaacattatatttgagcatcagaccaaaatcactacagcaga

SEQ ID NO: 3202 - DNA, 1035 bp, Zea mays
actcagctgctcaagatatcgccttctaccaacaaggaggtaaattgcgtggaactgtttgccaaatactacattacaaaggaaaattgcattatgttgtctgtatcatagctgctgaccttataaccaactactcccgacatagcttctgttggttttcttctctattttctgatattgtttcttgttgtcgcatcatatattcatatcctgtcaagcatgctttttttttaagttgcacatgccagcaatgagaacttcactacgaatgggccatcatgcatgctacagctctagaattttgagtgtttactagcaggctagtgtattcgtttactagcatgctacagcaatgagaacctcactactgccttatctgtttacaaacaagctagtgtatcagtttactagcaaccacccaagtcatacatgtgatggggcctcaaaatgttggagcatccctcgttttttaatggcgcctgcaaatgctaatgaacgcacactcttctttgcgtttcagaaaatcagcgacgcggttggaccgttaaaccgcatcaacgacattctcgttgctggcaaccacccaagtcacggtgtccatgggcatgcccgtgcaggctgaatgcagtcagttcgcgaacccatcgggcgtcctggacccatatactatcatgtgtcgctttgagaatcggctcaagacaaaccatcgggcaggactggagtagttgtccaaggactgaggatgtttatgcagacacaagtatgtttggtggctcgatgtatgtgaattccaaaactccatctgggtatgtaaatatttgtatgggtttagtttggttgctttttcgtttggtcatctcatgaaacctctgctggtggtttccttgtctatattactgtcttatttggggttcgttcatgcatgcatacatgtgatggggcataatatcactggattttatttcaccgtcatgttggctggctggctgctaccgtgaaggtagcctggttgttgcagtcccttgtatattttct

SEQ ID NO: 3203 - DNA, 1141 bp, Zea mays
acccggtttcctcttagtcgacctgcagacatgagttcagtgcatatgggaatgtccggcctttaaatggcagctatttcgcttcggcgactggacgggttcacaattggaatggcatccagcaagagatcacgggcagggtgcagcggaaagttctttatgagatcagttctgctgttcgaatatttgggagtgccaatgatactgaagtgcgtgctactctgtgggtacaagaatatggtcgtgagcgatatgtgggactggccaagtaagttgtttttgtttcttgttctctgttgataatgctctttttcagagccaatgacattattccttttctttctataaccaaagaaatcagacttctgatcagcaatggacacatttgaaaggaaagttcctccttcatgctccctttaccaaagctgttattttcatagaagggcctcctgctggaattgacattcttgtagatggtcttgtcttatctccagcaagaaagctccaagctgcaccatgcccaaaaattgaggtttgtaggctaactgcttcttacagtctgagattatttgcttgtgaatgatcttgactcttgagacttgtgaaaccttttttttcttgttataactttcatctgtcatgatactgtaaaactgtcctctctaatcgaagaatatttatttactcaatattgcagaatgttctgtatggaactaatctattgcacaataatggcttcactcgtgggctttctgggtggagtcctatgggttcatgtcgattgagtatccagactgaagcaccccatatgttaccttctatcttgaaagaccgtgcaagccagaagcatataagtggtcattatatccttgccacgaaccgcacagatgtttggatgggtccttcgcaggtcataactgataagctaagattgcatgtcacttacagagtatctgcttgggtacgagttggttctggaggacatggacgtcaccatgtaaatgtctgtcttgctgtggataaaaaccaatgggtcaatggtgggcaagtggatgctgatggggatcaatggtatgaaataaaaggagcattcaaacttgaaaagcagccatccaaagttactgcatatgttcaaggccct

SEQ ID NO: 3204 - DNA, 1380 bp, Zea mays
tgcatgcctgcagcttgaagtggcaaaagagagcagaattcttaatgttttggagacatggctgcttgggcgcttgaagaaatgctctctggctcttgcctccttgatccgctcgatggctaggactagatcaagaattgcttggctcaaagatggtgatgctaatacaaagctcttctactcttggtctcgttatcggaaaagaaaaaatttcatagccaaaattcatgacggagagcagcttgtgaccagtcatagtgataaggcagaggtgtttcggtccttttattctgatctgattggtatagggcagcaaaggtccagatctgtcaaccttgacaccatagaaatgcagcacattgaccttcaggggctcgaacaacaattctctgaggaggaggtgtggaataccatcaaacagctccctccggacaaagccccggggcctgatgggttcacaggccgtttctataagacttgctggtcaatcatcaaaaaagatattatggctgctatcttgactgtttggaacaaggattttcggaatttcagatatctcaacacagccttcatcactcttttacctaagaaagaggatgccatccttgccaaggactttcggcctattagcttgatccatagcttcgcaaagttaatcacgaaggtcatggcaaacagacttagtggttatatggacaagctgatttctaagaaccaaaatgtgtttatcaagggcagattcatccaagacaatttcatgttagttcagcagactgcaagattgctgcacgctcaaaaacagcccagaattcttctcaagctggacatttccaaggccttcgattcggtatcttggtccttcttacttgaagtgttggaaaaagttggattcggccccatatggagagatgtgattagtgggctgcttatgacctcctctacccaaattatgcttaatggagtgcctggggaatacattcaacacaagaggggcctgcgacagggggactcgttgtcccctcttctcttcatcatcgttatggatgttctcaatggcctaattgtcaaagctgctgatgagggcatgctccaacccctttcaacacgctccatccagcaccgaatatcgctctatgctgatgatgtggtgatattcttgagaccggctgctagtgatctgcacttggtaaccaggattttggagctgtttggggatgcctcggggcttaaaaccaatgttcagaaaagcagtatggcccccattcactgctctccggtagacatggaaatagtaacccagatttttccttgcaaagttgaaatgttccctcttaaatatctcgggctacctctttctctcaggaagttaaccaaggagca

SEQ ID NO: 3205 - DNA, 1218 bp, Zea mays
cagcttgcatgcctgcagttcaattgaaactgactctgaccaccaccatctttgaaggccgccggagatgcattttgggttgtcatgcagccttgcagggatcgatatatagctatctatctccgtacgttcgtgcgggggaatggggaacgaggtggatttggaatttggcttttccatgatgccgccgccgacgcgcgcgtgtgatggcagaggctggcgcagccgcagccacgagtggtgtggctgccgtacgtgaaggtggccaacagtgacgccactatcatgcatgctgccgacgacagcgaggtgcttttatcactgctctgctagctccaaagaaggcatcgttggcgcgggggtgactgcgaccttcaggcttagcttcattatttttatttttactttagctttgcgattgcgtagtggttttcattattgcatatcttatcatcgtgaagcgcgcgcggggtggaccgtgttggccagttttgcgccgcaactagcttcatgttctctcctttcctttcgtctaaaaaaattaaaggacgatggctagcacaaacgaaaatagtagactgaaaaaacctgatttttaggcgtttaatctcgaatgaaaaaaccgcgtcgacatcgtccttatctggagaacgcgcaacatcttaaatcggaagctgacgagacacacagaaccggcgggggcggggccgggtcaaaccgaaacgatgatagcaacagctggtcagcgcgcactccggtcaaatgtcatgggaaaacggatcggagaaacaaccgcgagcctagctagctctcctgtctcagggcgcacgcacgcacgcgtcgcgaagccgcgttcttcttcaccgcaccggccggacactacgtacgtccgtgtccgtccacatttttcacagcatgcacagccagccaccagtccaccaccaccagctaagctaccggacatgcatgcgcatgtcgaccagtcgttgccgccgcttctcgattgacagccgatcgaaggtaatgaatgctacgactaaggacggcttcatcgaccaattctccctagcttggttacgactgcgacagagtaaaaaggcaaggccttgttgtcgccattattagcttagcattggcacagcggtaactgtcagccgcgccggcggccgacatgctgcttattgcttggatcggacgagaactgcaggcatgcaagat

SEQ ID NO: 3206 - DNA, 1020 bp, Zea mays
tcagccgacgaagccgacccccacgagcaggtgctccccaacggcgacatctacacgggccagtggcgcggcgccgtgccccacggcgccggcaagtacctctgggcggacgggtgcatgtatgagggcgagtggcgccgcggcaaggccaccggccgcggcaggttctcctggccctcgggcgccacctacgagggcgagttcctcgacggcttcatgcacggcgccggcacctacgttggtgcctcgggggacacctaccgcggcgtctgggccaagaacctcgagcatggcgccggcgagaaacgctacgctaacggcgactgctacgacggcgagtggcgcgcggggctccccgatggttgcggacgctacgcctggcgcgacggcaccgagtacgccggcggctggcgcgctgggctcatccacggccgcggcacgctcgtctgggccaatggcaatcgctacgatggcggttgggagggcggccgaccccgcgggcagggcacgttccgctgggccgacggcagcctctacgttggcttctggggccgcgaggcgcccagcggcgccgtccaccagaagggcgtttactacccgtccccggcggcgatgggcaactccccccgggcgcgcgacccgagggaggtgtttgcacgtgacctgccggagtgcgtgcgctccggaaccgaggcccaatcagcgctcacgtctctgagatccctcaaatggctgatgcggtcggtcagcgggcgcggcagctcgtcgtctggctggagcaatggctcgggaggcagcctcgtgcacttctgggggtcggacggggaggtcaagtgcgaccttggggacgactggagacggcggagcgtcagagaagggagggggctgccaccaccgtcgcccgctctggttccatacctgcccaacggcgcgcccctgcggttgtccaagaagcagggggtgaccattgccaaagggcataagaactatgagctaatgctcaatctgcaggcatgcaag

SEQ ID NO: 3207 - DNA, 1251 bp, Zea mays
aggttggtcgttttggattacttgcctcatcaggtgatttcagttgtgcttgatcgatacttgtaaggaaaacttcaaattagtgccctgctacatttaatcgagaaattcataaaactatgttctacctgaggacctttcaggcatactagctgggcagcctttggttcaaaaatttgtaggatgcataacggcagtgcatacattcgccaatttccaacggtttagctgcctaatcaattccgattagtaaaattgtttgctctggtactcgtatgacatctctttgatatagcatgtactgaagctattagggagtagatcccatattcccaccatgactgtgagactgtttgaaattgtgaatctgtttgaaattatggttccattatgtgagtccagcagtacgcaatttggttacgatattctctgtccctcagcagtcacttatgctttattcatgatcagtgaccaatgtgacaatgccctttctgcttacgtttcacttagagcacctgtgcttcgctagtttccaaagatgtatgattgtggtttattgcacaattatgacctccattttcttttgcttggtggtcagagattcgggttccatgacgacttatcaaagaagatgacatcgttgcctgtcagctcggcttcttgtgtgcgagaagaatctcagctgcaactggcaaaaacatcaagcaaccctgtccatcgatggaacccttctcttcctgacggtagaagtaaaccctccagatcccatgctgcatttggtagaattttcagtttattcatacgagcatagtagtatttcagaagaaaaaaactgggcctgaagatgattgtgttctaattaggtccattcttcttatctcgttcactgtgtgtccagactattcattgagacccatagtttcattgtagctctattttgatttgtgtgccttaacaggtgtgggtcctactgaggatgttgagcgcaaatttcagcatatggcaagttcagtgcataaggtagggatggtgcttgattcagtgcaaaccgacgttatgcagctaaacagagccatgaaggaagccacactagattgtaagtcctaattggtacctgaatttataatgcagaagttacactttgtttatgagtttttgcactataattatgtcctggcgcgtcactgaaagcatgcatttgtcatgcttagctggaagcatacagcaaaagattgttctcctagacgcttt

SEQ ID NO: 3208 - DNA, 1180 bp, Zea mays
aaccgtttcttgcgtctccaacctccatgagtcctattgctctttgaaggtcccagtctctggctcaacaacaaagtcaggcaacagcagaatttcagacacagaaaacaagcaggggcgtcagttatcagggatgcttcgtgtcgaagcaaaagcaagcgaatcgtatgcatactgagcgtcattatcagtgctgcttcgcacggaatcgaaatgaaggattcaaagccatctggataggcacagagaaagcagcatgtctacgcgtgacaggttgctacacctacaccagacgaatagaatagaataaagtaggaggagcaccaccaaactgaaaaaaaaaaggcacgtggacgagaacagaatattttatataattaagtaattgcaagaaaaaaaagaagggaaaaaggaaaccgtgcaatcagcaactatacgtcggaaattggaaagcacccaacaagaatcagataagaaaggcagggctacaacaacaacaagtaccctcgatcagcaacggatgcagcaatcggaggcacgcaaacctccgtcgcagacctcgcggtgaatcgaacaggggaagaacccacgacgcgagcaaagactgtttcttgtactcagcagaaaaagaagagcaggcagcagcgaaacttttccagcaattccctttgcagatataggacgcgaataggtcctccctttttttttattgccgcagctccaccgacacacccgacggtaatcaaacagttttggctgatttggtgacaaggatcacgggggaatggcgaagtggcgagccgcagctgcgaccgcgattagcaaacccagggagcgacgcaaaacggaaatcagaacggcgtccccccacccgaaaagttgggcacgaggatgagaaacaagcaaaagaacgtgggcgtggtcgctttgccacgcagccgagacttcgggagcttccagatcctcgtctcgcttaccttggatcgatcagcgaggacgagagcgatggcgcaccggaatagaggtagtgggtgatgactgatgagcgtgtggggaggcccttaaataggtggcagcaggaatcttttcaccgtgccatacctgctagccgttcttcattttatcatcttttattttatatgtaattatttttgccaccattcgtggtggtggagatgct

SEQ ID NO: 3209 - DNA, 1220 bp, Zea mays
cagtttgcatgcctgcagacggccaatgagtacaactatggaatcttaactttccagtgtgactgtgtaccaatgcaacagtcatacaatgctaccattaaatggaacatgattgatatgactggtgaccatgcaagcgatgaagatttgtcaagctgaggtcaccagtgaatgtctatcttgcggcctatttcacattccacgttgtctacactctacagtgccagaagagtgttttgcacgtccacttattcatattggtgagctcagcctcagtactcaaaagcatcagttctcagtgctagcttttgccttttctttgttgattaataaactgccccaggagtatgccataaaagagactaagagaacaagcaagttgctggcaaagtttaaactcatcaaacaaagaattattgagaagtatagatgtcggggagaatttggtacaaactccagttcagctttttttttcgcgatggggcacagcacgtttttcattaagcggacaggaaccaatcagcttttgagaagggcgtcttaactcctagtaactcttacccaaatgacttatgaagaaatgcttacgtagtgtggaagatggatgagcttcccctgacttcttcttgaaggaaagcttcaaagaaggcatcttcattgaatgagtagggctcgagggagttctcttcttctcgttcaccccaacagcagaggcaatgcatggcagacaattattcggcagaagcccgcaattgtccagtatcctacctccaccgtgcgtggtatccgcaccagaaacactcaccgcatcttcatggctaatggacgtccttacaccattctccgagctccccttcgacagttcgctggactttggctttttatggtgctgctcgcctgattgagcagctccattgaagctcccaccgttgccatctttcatgctcaatgcagcttcattctcgaagccattcaatgagaaagcatctgtaagataacaaataagttcaatcagttaaatggaaaggcatgttaaaatgggggcgaaaactcagcaggttcagctaatcattggaacaatgctgtgcgggggacctggctacaaggctactacgacatcgctcttaccatcttgcacgctgtggaaatcgtcttcagcatccgactcgctcatcgccaaggaatcgtaccagtcctcctcaatgctccctgtccctgag

SEQ ID NO: 3210 - DNA, 1312 bp, Zea mays
ttgaggctgacaaaattgtgggtagagcccgtgtcaagaagagctgtgagggtgtatccccgaatgtcgacttgcagttgcatggtgccctctgagcggatgcctgttaaggcgtggagtgaaataatgggtgctggatcctctggattggattcatcctcgattcctgtatcctcttcagaatctgtgacctccagatagaatagacgcgggcaccgatgaccacgaacgtattgttcgtcacagttgtaacacagtccctgtttgcggcgctcagccatctcgccgggggtgagcttcttaaatggacgttgtgcccccgtgctggttggtgctgctactgttatagtggactgttgtgctggaataggaaatgatggctgctggggaggcctcgacggcttgctggtagttgatgtatggtggacgtcgagtgcctgagcccttcgttcatatgctcttgctaaacttaatgcatgattgagatcccgaggagccataagttcgacatcgatcttgatacgctctggaagacctgccgtgaagagttgtaccttctgttccggagtgagtggcgtggtgtgagccagtaaatcccagaacctctcctgataatcctccactgttgtccggaatggaagccttgccaattccccgagtgggttgctgcgaagcggtggtccaaatcggagttggcatagctgcttgaaacgcccccatgacaggggtggttcatcacgcaagagctggctgtaccaagtccgtgcagcaccgagcatgtgatatgaagccaaccagactttctcctcttccaacgtgcgctgtccctcgaagaattgttcacatcgagtcaaccagtgcattggatcttccttgccatcaaaggttgcaaactccaagcggtggaagcgaggaacagcagcagatggtggtggagagaaagcactgggtatggtgtgcggtagtgggggaaaggatggaatgggagacggtgaatgtggtaacggcagcaggtgcggtggaagtgaggtggtggtgtgtgctggtgcagatatggtggtgggtggtggtggaaggtggccatcggccgctgtcatagccggtggcagtccaccatatccaggcatgccgtaggggcagtctggtggcggcgccatggccgatgttcctggggtggattccaccgcggcaatgcgggaggacatggaggccatctgcgtggcgaagagccccagttggcgctggacttcagcaagggcggtggtgattgctgccaactccgacggctgggatgaagctgcaggcatgcaag

SEQ ID NO: 3211 - DNA, 949 bp, Zea mays
tttagagaatgccttgttgactcaggcggcaacacaatacctgccgcacaggcacagctccaaccaaaagcggctagctagctgctgctgaagctgaactgccggatcctcaagggttcatcagcaacttaccgagctgccttatccggttacccggcacagcacaggtgatgactcttgagccatcatcgtttaattatatatatataatattagcatgcgcgcgcgctaatggagagcgatgcatggtgttaggccaggagctagcgttcccaattgcgatgaggatgatggatggtaccgtggaaagccacacagcaataactccatctccgcccgagctagctagctagctgtcgtctgtcgatcgattccctgcggcgagagcgaggccagcagcagagaaaagtagctcgccgccgcccgtcgccggtcggtacatgcatgtagcgtagacgtccactgatgaggaagaggaattggctcctttttggactttgtttatttcagtcatctcaaggtcgattggttgactccgcaatgaagcctggcctggcctggccctatcccctgtgtcaacgccaggttcgacgtttgaagcacttggaggccggccatctttgagtcttgcaagggatctacagtaatttttttttattggcgagtgatgaagcactgctgctgctttgcttgttttggtttgacacgccgcctccgagtgtgaaataaaggctgaatgtgttgggttgggcatgcctttagcctgatctacagcgagacattcagacatatatactgatttttttttcccgtggccgaggataaggtggaaaaccggctggtaatttgtagctgaacctacatgtggaaagctcagaaagaaggcaaagctccgttggttgaactgaaaagagccccaaaccgaactgaaacatacgtatattttgca

SEQ ID NO: 3212 - DNA, 1231 bp, Zea mays
ggtacccggcttacctgtagaaccgacctgcagcacgcgcccgaacatgagacgctccaggttggacgggaagccgcgctcgctcaggtaattggccagcgtcctgtcgccctgaagatgataccaaaagtattaggaaaaaaaaaacagttgaattccatcgaaatgtcaatcaaatgcatatacctcaaacttccagacgagccacttgccgcccttgacgaactccgccttgttcttgtcggcgacgaagctcccgaggaagtcggcgcacgactccggcgccgctctcgacacgcggtagttgaaccactcctcgtagtccccacactccttcgcccccaccgtcatgaccttgatctgaattataatgataacatttttacatgggatttgcacaaaatggtgttttcacagttcactctatctatagtgttttttttaaaaaaaaatcaggataacactgccaagaaagaaagtgtgatctacggagactaaacgtttctcattttctttggtttttacaaaaaaggattacctaacaaaagataatatatttaaaagatgttgataaggtaatcccaaatgttgttttttgcaatactgatgaaaccatatgatgcttgtgttttagttgccatatatgactaggttcatttggcacttttgtcattgaaccaactttgtagtgtatcaatgtgtttgatatttggctcaatagattgtctttcaagcctaaaatctgaattttagttggtgcaactgctctatgttaagctatttgattgagtagaaatgatatggcttttaatagaactacaattaattgtttcatgtaggttatttttaggaaaacgtatttgatagcaagtttagctgctttttaaagaaggggagagagatgttttgaagatgggatgtaaaaagttggaagtcactgttatggggatttttagtttttccaggattgtagctcgacagtcgacaccacagcaatttcagcaccggggccgggcgctgcttaccttcttgagtatgaccttctccttgtacctgtcgtcgttctggaggctcgtcttggccttgccggaccgctcctccacgacggcgccgttcttcggcaccacggcgccggcatacaccaccccgaaggagccctccccgatgcgctcgccgacgacgaagtcgctcatcttgaggctccgccggcccagcacgctgtccagcgcca

SEQ ID NO: 3213 - DNA, 776 bp, Zea mays
  unsure (1)..(776): unsure at all n locations
gtagaaaaaatagatttgatctctaatgcccacagctcacaaaacagtctaaattggatattttacagtaggtagtggtctcttgatttttagcgaggaattttaaccttatccccatccaattatacaggtgagagcagcgggggaaatgatcttcttcagatttccaatttgatcactgaaccactgaatcagccaccactgtccacagcaccttccctgtttaagtcatgttaggcacaaacccatatggcaacagaccaaaccttcttaaccaaatttatactccaactatatccctaccactttggtatcacacccccaggctgataccataaagagaaaaagttatgatgtcccaaagtagagcaaaaactgctgcacacccaatttcagttaactgaaacagctctacactaagcgtgacagagagttttgcaactcctttttctctaaattatacacagtagcaagccaactctttgtatgaaacttgttctcctttaaatgttcgtttactttgccgcagaaatcctaaccgaaatcgccttggattaattatcaccaagctccaaatttgggtaaaaacacacagattcagactaagacctttcactaagtctgaatccccaacacctgacagtccacattttaaccactttcactccagtattcatgtagaaccacacaaggatcacaataggaanacttactcaccactaaagctctccaagtttgccatagttatctcagaccaaatgtacatgggatcaaat

SEQ ID NO: 3214 - DNA, 961 bp, Zea mays
gtgtgtgccttcctctaaattcaagccatctcgtttcgttgtggaaggtccgttgtttgttaggccagtaggttagccaaatccagcctcggatttgccagttcatagtctgtcctaacgctgcaccacataccttccaccagacactgtctccgtactcgtcacgtgcgaaaatgacaccgccctgctttgtgaaggggcggtacgcatttgagtacctgtcacggaaccaggccttcggttggagcagagaaatctttgaaggttttgaggaataaacctccctcccgttgacgccgtcatgaagaaaccagttcaaggttgcagtgttcccatgcacagactgctcgaatttccagggcttcatggctagtgtaaggctttcagttactgacgccttcaggccaaatgcgtttgggggttcaaatgaaccctcaaagcccttctcgatgccgaattcgtgtgtggggttgtcgttggacttgccgacagaaacagagagcacatcagattgttgcgtaggtgtgatttgcagcatcacacgagatgggaagtgcttctcttcggagccatatccacgctccgccataagggtctcggagaccaaagagtccacatcacacctgtgatagctgccaaaagtgagtggtttttttccccccttttatgttgttttattattagatagtccatgtatatggacaaatgtttttttcaataaagttgatttatatagttaatcatagtatgaatttctaggaaagagaatataaacctgaatccagttcatgttatagaaacacctggttcttacatgttaaaagaactgaccttacgttgtccaccttcacctcgacatcgatccagttatcccttcttgtcgttctataggccagctgaatgacacactcgacttgttgataaatgagtgagaagaggagacgctcatcctgtggtgtct

SEQ ID NO: 3215 - DNA, 1968 bp, Zea mays
attacaatcaaatcgttgaaggtagcctacgagtaaaataaatttccacaggataggatggttttttggacaaaaaaagggaaccccgaataagcagaatcgaactgactccaatccatccgtatataaaccagctgctataatccagttgctggagaagaacaccagcccaaatataataagaaacaagaaatttaggagtgccaataaaagagtaggtactaggtagcctatgagggaagtagggaactaaattttccaagaacatttgacaggatatggttattattgaacaaacacaggaaacaagaacatttgacaggaatagctcagacttattattgctcatgcagaatgcagaatcgaacttaggccccaatccatccatatacaatccagttgctggaaaaaaaacaacctccacccttcaatcgacgaacgtaagcatagctcgacccttcaaccaaactccacccttcacccttcaaccgacctctcccaaaactacagattcactaacgaagcattaagggagcctatgtgtgaagttaactttcaaagaacattgacaggaggatggttagtgaacaaacacaaggaactctgaacaattccaaacttctgattgcacaagcagaagcaggatcaaactcgcctccaacccatctatccatgagttgctggagaaaaccatcaccccaatgtaaaattgcagcggatagaaatttaataatatgaagagaggtaggtaaatatatccaaacgatattctcgccgatgctacgagctcccactccagtcaacacctcaatctacttccaaaactaagttgcctctgcaaatctagccagcgtcatttccaatcaagctttagagcaagtctggtgctaatctttgcaccaatatgatgatatcagaatgagaaacgacgaatgaaccataagcaaacctccacccttcaactgatctttccataaccagcaaagaccctccttgcatctgaagtttaagaaggacaaacaaccagaaggccacaagcgagatcagcagttaacataagaatggactgaaggtctccacacaattcacctggtatgcaggctacaactgcactatcggtttctgatggtaccacaacaggagatgaacaattgagcctgaaaccaccgaatccatgtccaagtgacaaaaccaatgaaccattggatctgacagaatactaacctatctccgaactcagacaaacagatcgccacacaacgtcatgacgaactcagatcagatccaatcctgcaaccgacatgctgagaaggcgaagacgaaacaagatcgacgataactagacgatttgccttaaaaataaaccgcaaatccaacaatcccgccaccaaacacatgcccactcccgcgtggcacgaaagcagaatgccccaaggggatctgcaagagcacgtaaccgcaacagcagcagaacagatcagccggagaagaaaccatcccagctcgaagtcgaaacagagagtacagagaaggaagaaatggaaaacgcaaacacgccagtgacgaagtgacaaagggcaagacgggacaggcaaggtgcttgaatagcaacaccgacacgaagagaagaaaaaccagagtgcaaggaaaatccacctccaatgtccgcatctcgaaccttgctgctaatactactactactgttccagcgatatcattggagagtcagaatgttagccaatcattcagatctgaaatcactgaaaacaagtgatggaaccaacacaaccggaatgatttctaacctgccccagttttaaatatcagttcttcgctacagggatttccaattgccaaacttaccctgcaaacacatgtaaaagcgaggacaaaaatgtagataaagctaatcccaaaccaaaacaagtatcatgaccgttggactaccaattacttgagctaaatgat

SEQ ID NO: 3216 - DNA, 1244 bp, Zea mays
atgggcgtcggcctgccgtctgacttgtactacgcaggacagttcgcaggcggcggcggcggcggcttgacgacgacgtcgtcgtcgttgcagcaccagatggccaagtccgaccaccagtgggcggcagctgagtcgtcgctgcacagcatgctgggttcagtcatccagacagaggctgacgaacaggtaatttatttatttaccatatctaacccacgttgaataaccatataggcatatatacatacgcacgcatgcatgcaaacgctacttgtgttggaagaacttgacatgcatatcaaagtaccaaacatggcatgtttccttgagttccttattatgcatagaaaataaaataaaataaaataaaaacatggcatcaggcttcttcctggattggccaaatggtcacagtgccatgccatgcaaacggcggtagaagctagctagccagaggaaagacgatgcatccgtacgtatatcttgttgtttgtctgaagctatagctcggccttgatgcttctagttggaatctgcgcagagagccctgcatgcgatgatatttttgggtcctcgttaatatcggaacgtgcgtacgtgacaatagcgcagtccaaaaccaccgtgttgcttctcatgaacacgtgtcgtctacgtacgcgacggcgacggcgacggcaattggcgttgactagtacaatttgagtatttcagttatatttcgtgagcatttctttttgcgaattattattttgtgatcaagtttagagttcttgtgtgatgtccaaatttgatgcgcagttattaacgtactccactcatgatgcatgcaggagcaggacagcggccttcagctggtgcacctgctgctggcgtgcgccgacttcgtctccaagggggaccagccgtcggcgctgcgccacctgcacctcctccgccgcgtcgcctccccgctgggcgactccatgcagcgcgtcgcctcctacttcgccgacgccctagccgcccgcctctcctccaacaacccgtcctcctcctccgccggcgccggcgccggcgccggcgtcgcgccctacacgttccccccgtcgccggacacgctcaaggtgtaccagatcctgtaccaggcctgcccctacatcaagttcgcgcacttcaccgccaaccaggccatcttcgaggccttccacggcgaggaccgcgtccacgtcgtcgacctcgacatcctgcaggcatgcaag

SEQ ID NO: 3217 - DNA, 1322 bp, Zea mays
aaacatctgatttgggagattatgggtgctatttcctatctctcatcttatctatcgcatgacaggtaaatctgcggcgccctcgattgtcgattcggccgggggtgcagaaatccgatgataacctattattccagattccatgaagtgcgcgtgaaagttacaaacatatctcgaggaatcagctttctaaagcacgcgttctgacttctgagttactttgttttggtatgtttcttggtgatattgactattgagggcctggatctatgcgctcgtagaaatgcctaatctcttgtaaataggttgtggtttcaacctcatttccgagctgactagatggtcgatttatttttatgggggctattctaatccgtcagcctgatgattagcattctttgcacaaaaaacggagatctgaatgtgctttccgtcgaagcctgcttgaccgctgtggtgggtcatgtgagctcagctcgttgatctccctgactactacctccgtggctccgttccaaattataagtaattttctctcagggaaactaccagctactacacacacatgcatgcatctatctatctatctatatatatatatatatatatcctcgcccttcttccaccactgactggctgagcaggctccgggagatgcatatgtagatgcaagagttatgaaggctatcccagattggattgcggtgcctaaattcatttttaacttgtttaacgagttctttatcactatctgaaaagctgttcctattatagagtactgcaatgcaccgtggtctgcttgtgatttggtcagcatcacattaatgattttgctttagcttgactgatattcgaggtacaaaatgcagtatttaaccctatggacaaaactggaagattatgtgaattaaagaaagttgcatctgctgtgctcctggttcatgggggcacaatggcatgatgactatctaggggaatctctgatgctaatgctaatacaaattttcttatctagcttacacggtggataggttaatgcgtgtagaaccatgctagtgatagatatcctttgaacctggagtaaagcattttatatgcttatttacggccataaaagttttctggcatctcatatgtgactgagataagccattttagcttgggtgttggttgcctggaattaagtcactatctgttgatcctttcctttcagaaacatgtttggtttgtgtgttgtcatatttttgccacttcaccgcataagaaaaatgtcagatagtgagaagattgaagaaagacaagaacatctgcaggcatgcaaa

SEQ ID NO: 3218 - DNA, 1026 bp, Zea mays
ttcatgttttgaaagcacttgtaataactctaagcattgtgtaacaaacgtggtgctacacccataacaactatttggagaccttggtattgaaaatgctggtaatgcattggtgtcactagaacttttttggtgtagatatgtcattaaaacacggcggagcccttgcaatgtctgaacacttttgctcacagaatcaaaagcggctttgcatttttcaccatatagaacaccaagaagtgcaatcttgcgatttaccttgcatgtgggcccaggcaaggacaccatcatctgctggacagcatccttctgctgcgagtctacctcctgttcacctatgcttgacacaagtttgatgagaggctttttaaatcccatcagttgctggtaccgcctatgagcattttctgactctgactctattgctgccaatccttttctcatgtcatcatcattttccatgttgtcaaatgaaaaactaggttttgccatgaagtggaattcaaaacgaccatatttgctgtatccacactcattgcagagaaaagagtcaagattttcatagttaatatttctacactgccggcactgatatgcattttcatggcaattactacatatgccatgtttatcagtgacagacctgctacaccgtgggcattgcagtgactcaagggaagaagcttgaagattctcataaaatgaatcaagttcaatcatgaaattgcatgctgtaatcggaatgggaaattcaaccttcaattctgtctgattaaatgtaagatggcagctcttagcacgcttccaaagagtccaattattcttcaattctgataagtcagtcacaggcctgttgttgtaatacaggttaagtactttgaccgatttagacttacgagcatcataaacgttcattgtaactgactgtatagtaaagcttccagtgcattttattataattctgttgtcagtaaattttgtctcagacttgagggtttcaagcttcgtccttgaatacggaacatc

SEQ ID NO: 3219 - DNA, 1168 bp, Zea mays
ttttttgcaatagcctcttgccttgctcgttcttcttccatagacaaccgcagggcgagtgccaactctggatctacatttgggtccacaccaaattcaaatccagatgctccagtagctacggcagctgctgcggaagcagcaaaaccacttccaccttcttcaccagtaaatataggagtgctggataaagaaagaaaaataaggttaacatatatgcagcataagaaaacttagaacgcaggaacatggcacccaattaccttaggaggacatcagagagagcattttcaccaggagggacatgaacaatgtgactgctatcactgctgttaacagcagcgatcaatgcttccagtttctcaggcttttcatcatcggattcaccaaagtcaacaatgtcaagagcaacattgttctttttcagcttcttcccgattgtctccaaaattttcttgtcgtacttcacaggactgatacacatgacgagattcattaacctaaattcaaagagaattaataattgtcatacaagttaacccacccaggcctaccttccgatgaatgctataatcctctgctgctgcctcttgttctggcgatgctttagcgcaagctgagcaacctggattgccgcagccaagtttgcctcagcaccaacttccaaccctatacagcacattgttgtgcaccaactggtcaggaaactacaagtaccatgatctaacaacttatgagacagcttaagcagctgcactgaatccctaaactaattggcgaaattcgcccagcacaatagtaaagcaaagattttgggatcgatgtgagcttaccgtgcatacaggcgagaatcttcccgaggtcgctggtgggagtgacaagcacgcggacgcccttcccggccatcgtcatcacgcctactgtgttctccgggttcgactgcacccactcaacaaccagaagcaatcagatccggaatcccagaaaccctagcccacaggaaacatcgaaagttcgatcgattgaataggtggatggagagaccgccggttggcacctgggtcttggcaccgcatatgaggttgacggcatcggcctgcgcctggaaccgcgacggggcgtagtcgccgttccgcatccactccgagttgtctatgcagatcatcgt

SEQ ID NO: 3220 - DNA, 1347 bp, Zea mays
aatggtaatgatacacataaatccactgagtatacagctaagaattcacaaaacaagaaaacaatgtaacttggagaaccatacaattttaaactcaacatggaaattgaaagtgcatttcgttttaattaagcatgaacctataattattaattagagctagatgccatagccattagcatgaaaagcaaagctatacctttgtagtaagatattctttaacagctgcttcctgatttagtcgtgctatgagatcctccatatcagtttttgctgcccctattctttgttgcattgtgatcaaaagtctagtcaacttctgtttttgatcatttggaaggatgacttgtgcatccatatcatacaaaagatgcatatctaaaccagtaagatgttctgtttgactaatatgtccatccaccacagcaccatcccaaagggaactactaacccctggaatagataattcaattcctcttaaagaactcaaatcactcccaatactttcagcagagtccttcctagcatggccgggattagatacacggtcctcatctgaaacaactcccctataagacgctactgaaccattcctaccatcatgttccaatacaaggttccctttcctgtgattcaaggcattactaacaagctcatcggactgatctaagatagcttctccaagcacaccattaccagttgctcctgtcagactgctgccacgagtaagagtttgatttatttgattggactcagcaagagaaccagaagcaggtccatcaggatgtggagaagaggcagtactgctttttgtagaagaacctacttcagaaggacgcccattccgttcttggaaatctaaatttattataacagtataattaaattctctgctaacatatttaacatgcatgataaatacagtgaataatatacatagagaaaactataattaaagtagcacatacatgaacgtgcagcagcttcaagctcaaaaaaagcagcaacaggagcacttcttgacaagtcaatgtcagaaagtaacttttgcatccactcctccaatgcatgccttctctgcaatcataatagtttgagacaagtccaagaagcagaatacaaaagagtatactatttcacgtaaagcatccagttgacatagggagaagaggaaattaagtaattaacaaagtacattgagttttaaaatacattttacctcttctagaagcaacctgcttgaatttattcttaagaaagcatgcttcggaggagccgacgggacatcttttctgggaaatgcgctcttaagctgcaggtcgactctgtaggtcccccgagaccgag

SEQ ID NO: 3221 - DNA, 1122 bp, Zea mays
gcagaatagtgtgcaaattaatagcacttctcttcaacacatccacagggtccatgagattttccttttctaggcggccactgcctttcagtggaacacggtctgcttgtgcattacaagtttcatagctgccttttgtttcaaattttgaacctgaaactttaatatcatcctcatgaaagaaatctagctgcttcacaggcaaaggtgagctaattatatgctgacagtttactgccagtgattcaactttatttgacaatttctctatatgatgtgtatcattgctgcctactgtgttttgacagtcaagctcatcccttcctgatctaggaagagtcttaaagaatgctgctactgcacaagatgacttgtcttctgctgcatcaaattctggccttccacggaccttatcagcctgggcagatatcccatcagcgagttcaattgctgcattccagaactcctcaccaggtgaagtaagagaattcctcgatacagactttagggtttccacaggtgctagagaaaacccaacttttatctgtgcagtacttggggtaaagctacatctttgcaaggccgaaaacccaacacaactcacatgttccccctcaacagattcctgatgaaaaggaaataatgagaagttcaaaaggaaaagaggaaaacaaagaaacggttccaggtttgacttgttcaggcataactaaacctccacagcctctgagccaccatggtgattgatgcattgcttcatggaagctacattatcatctaactcctgcaaagaaccaaactaagagttgaaactcatgaaatcacttatcatatgacgatgctaaagatggatggatagtgtatcttgatccaacctttagagcttcaaagccaccacaatgggcaactcgctgcttcttgacatagtcgttgtcacaaggaaccaagaatgactgggacgcactccgcttctgcttcatctggcactgctcgctgtaatcacagtcacccctcaaaggcaggatagcactggaacaacaaaattagacccgtaacttgcaaaataacagttattggaaccaatactataactccccttatgtttcacactgtgcgcgctca

SEQ ID NO: 3222 - DNA, 1369 bp, Zea mays
tctgcttgtctccgcgccctaagaccattacctgtcatactttaatttagtgataaaactcctctgtaagattctgctacttatttcttaatgaaattgggggggggatgcttccctacgttcaaaaaaaatctatttgacgtcataaatctttgtaattctatctgtatttttggtcaaacttgggatgctttgactcatacaagaaagttggaatgatttataatttggaatggagagagtacatgtataacttattgccttattggcctaggtcatcttccccgaatgcaataatcaaaaccctagttccaaactttaaactaagttcaagagtacgtcagcatcttacctacgaagcatgagacctatgacaagtgactcgccattttgcccacggtcaacaacctgaaccaagaaaagaatggggggaaaatcaattagtcaaaaccccatgaaaactttgtttaacaactgcgaacataacttacagggaaaccattatgcttgttagttcgcaaaacagaaatgatatcaacaacccttgaaacacgtggtaggcagacaaccttaaataggtggcaaaagattggatgcatcataactggtaaagtgatacatggtaatttccacggtccacttaaaaagacaaatggagtaaaaacttcagaaccttttgattcttgcacgcatccccttgcattcatatttctcatgacttgcttaggcctggagtccagtaaagggatgccccttaatcgggcttgctcttcatataatccttcattaaaaaagtcaccaaccgcctatataaactgaaatcagcagacacattccattcattgtgttcagctagttgtcatggattgtaaagttagtaccttagaaaccagaagaacaagcatgatcaatggcaagagtttcaagttgtttgtaatctcaaccatgataacacataaagatacagtcattctcattgaacctccaagaaacgatgcagcaccaaggagtgcatacctacaacaatattgacaacgaatagaaattgtgtcaaattctcgccaagaaactatcaaataacatccccgttgaacaaaagaatagtgagtcaaggtctattcaacgcagaataataataacaacaataataataataatagtaataataataataattataacaataagcgagcataaattaatacggcaatattgcatgtgtggataaaaagagatggcaaggactcacgtgccctcctcaatgtttagtttcttatagaacttgacaacaaacattccaacaagccttccatatgtagatccaatcattattacgggaacaaacggccaggggaatacagcggttaca

SEQ ID NO: 3223 - DNA, 1338 bp, Zea mays
gcagtcttgcatgcctgcagattgaaggattgcccgatatatacgtcttggggtacagattttctcaaatttcgttcgttgccaacttggtatgcatattgcatatacaactctaatgcatttggacgttcgcaaaggtttcaggagatcgtgcctctgaacgcgggcaacgtgctggtcgtggaggacaacgagccggcgggcaagtggatggagctcatctaccaggccctgaacaggccgccggcccaccaggacggggagtcctcgggcgacgagctctcgccgccggcgtccacctcctcctcccgctacccccagccgtcccagggccggcaagtcggccgcgaccccagcaacaacgccgccatccccaagtcctccagcggcggcgtgctcttcgcgcagaggcccccgcccccgcccctcaggatggtcaacaagagctaccgcgtcgacaacgcgctggccaagacgtgcacctgcatgtccgacccgcccggcatgcagcgccgggcgcgggagatgcgcgagttcctctaccgcgtcgaggccgccgccgcctcgccgggccgcggcgccgacgaagaaacgctggccttcatcgaaggcggcggcatgaactactgcctcatcgcgaggaagcagatggtcgggatcttcctgtcggtgtgggtgcggcgggagctcgtgcagtacgtcggccaccttcgggtcgactgcgtcggccggggcatcatgggccgcctcgggaacaaggtctccgagcgcgcgtttcttctctcgtgcttcgtgcatgccgaaccttacgatcgagcgagcgagcgtctgacggaccctgaaatcaccagggatgcatcgccatgagcatgacgctgcaccacaccagcatctgcttcgtgtgctgccacctggcgtccggcgagaaggagggcgacgaggtgcggaggaactccgacgtcgccgagatcctcaagaacgcgcagttcgcgcgcatctgcaaggtgcccggccagcgcgttcccgagaagatcatcgaccacgagtaagcaggctaagcgtccactggaaatagaacgtggcaattggcagggcagatcattcttctacacctctgccgcttactttttattacgcctctgaatcaatcaatgcccatgcgtccaatgcagccggatcatctggcttggggatttgaactaccgagtctcgttgagctacgaggaaactaaggcgctgctggaggagaacaaatgggacgtcttgttggagaaagatcaggtaccaactgctagagtgctagtatgaaacaagagttttcagacatgctacagtgct

SEQ ID NO: 3224 - DNA, 1196 bp, Zea mays
ccggcgataccgctaaagctcgacctgcagtcagccgcttgagctggcacgtcagccgcttcagcgggtccgtcagcttgagcttgtccgtcagccgcttcagcggccctgccagcagccgcttgagcgggcccggcagcgcgagctccccgcggcggaaccacggcatcgccagggtgaaggcgacggccatgagcacgagcatggcgagccccgtccacccctccgtgcccttcacgaaccaccagtagttgcgcgggcggggcaccccgaagtactgcgccaggggcgcgtacgcggcgtccgtggcgcggagcagccgcgggaagtcgcacgtcaggtgggacaccacgtggagcccggcgccgacggtgatgcccgcggccaccaccatgtggaagctgatgttgtcgtcgaagggcaccacgcggcccacgccggtgtggttgcggacccaggtgatggtgttccggcacacagggagcaggatcagcgccatgttgaacttgagcgtctcggcgccgcccttggccacgcacacgcagtaccccatcacctggaacacgtaccggcgccggtactgggcgaacttccacgcgaagagacccacgcagacgcacagccacaggagcaccacccacacgcgccgccagttgtcctccaggaagtactgcgtgcgccggcgccagcgccggagagggttcggctcgggcgtcggacggaggctctggctcctcagcatctggctcatgtccttgccggtgccgatgctcaccaactggctggggtcctccagcagcctctccaggttgcgcacctcgatgtagccgagtttgtccgggtccagctcctccatgatcagccgggcgtactcctccgcctgctctgtgatcttcgacagcttgttctcggacgccctctgcgtgatggtctgcatgcgctccgccatgccgcagatacatccatcagggcaggaatagaagaaaggcaaggctgtgtccgtttgtgcttgtccggcattatattgctgttccggctaaaccaactggagaaaggctgctgaaaaagttacctgtctgaccttctcctcagacatcctgccgtccgcgtccgcgtccaccctgcaagggtaaccgaagggaggttaatttggtcactcacggtccgtaattaagggagtacctgttactaatact

SEQ ID NO: 3225 - DNA, 1319 bp, Zea mays
atcatcatggtgtccctgtttgccccgtggccatgctgatcgatttgcaaacactcaagtgagatcgatgtgtgaaaatcgcaggcgcagtcacaatattcataaacgaaaagtgcgtcgagtgctgatgttctctggtaccttgacatgcaggatggagacagcgtcgtcgcttccgacaccattggcgacacgaacctcctccttcacggagcctccgttcaccagtacgtcccactgccacaccacccatcacaattggtaacggatcgtgctgttgccatgccatgtggccctgaggacggagagagaccagtaccttggcacgcagcagattgttcttgagcaggtcgaacgctttcctcatgcgcagcggcagcaggaacgacgcgcacgcgcacacgaccgcggtgttgttgctgctgctgctgccttcgctttgcctcttgtacatgatcttgatgtcctgttccgtgcccacaccgcactggacggtccaggcgtcgtcagggaaggcggcgacgctgctggtgtagtcggccagaagattgtctgccagcttcatgatagtcttcctcccccttgaagtgactgagaccacaatgcgatgcgaggaggttcacgtgaacagcgagagtctcatctcatcagatagtaaatcagacatgctgcaattgctcgttaccgttgagggtacagttggtgacatggaacacatctctgatccgcgcgcactgtcgcgccatgctcgtcacccagcgcctggccccgaagaggacaccgctcaggcatggatggaagatgtcatgaatgctagtgtcatctactcgaacgtgatcgatggcgctgacctgcgaaacatatgctcaatactagtataatgtaatggtagttctaaggttttccttactggtagtggtagtgtggcagtgacacataccttgcagctgttgtaccttatgggctggatcagcatccccgatggcatcttgcggcacctggcgccgtcgtccaaagacacgtcgacgacagcaaaggctccctgttccagcttcttgcagcagcgcacgaacgtgcacttccgagccgccaccaggggcgaggggaacgccagctcaacagtcatctgtcgtttccagtgcaaaagggactgtgagtagcagctagtacttagtaataagaggactaattaataccaagcaactcataccatctgcacagccccatcatagctctcctcgcgactggtaggccagttgtacaccttgtcggtggctgcaccggacacgagtccagggaacatcgtgccatagctctct

SEQ ID NO: 3226 - DNA, 1242 bp, Zea mays
tgcatgcctgcaggcaaaccttagtagtctatgataaagcttgtgcaaaccttgttagtgttaagaaaaaggttaaacttttttcctgaatatttttgtatctccaatgattttctgatgattgccaaatggctattgtattcaaatagtgtacatctttatgttgtggataatctccactgaatagctaaaactttatactctaaactttggcatccatgctatcatcatatcacacagattcaggtactttctatcgagtgttctgaagaggctaggaaggtggagcacgcgctagagtgggaggaagctttgaagcagacggtgtctgatgagaaggcgaaacagctcgaggtcatcagtgaagtcgagcaagcaggaaaatcattcacccgagaggcttattcaaggtacaagacagaaatggctgccagcatgatctgtcaggataaggtgcagattgttgatgcgattttgacaaagagcagaagttgcaggcggtattcgaagagagatatagagcttgccactgacaacttctctgaagaaaggaagatcggtgagggtggttatggcaatgtgtacaggtgcaccctcgaccacactgaagtagctgtgaaggtcattcaggaaaactccattgacaaaactgatgagttcctgaaggaggtaactgatggttcctacattcgaagacaccattcaatattcacactacattcaatattcacactactggagtcttttgatacgaagtcaaagttgtctgaaccaaaaacaaaatttcgcgcaggttgagattcttagccagcttcgccatcccaacctggttttgttgcttggtttctgtcccgaaattggctgcctggtgtacgaatatctgaagaacgggagcctagaagaccagctcttcaacagcgaagggtgccaaccactgcactggttcctccggttccaggtcgtcttcgaggtgtcctgcggactcgcattcctgcacgcgagaagcccagagcctgtcgttcaccgcgacctgaaaccggccaacatcttgctggacaggaactacgtgggcaaggtcggcgacgtcggtttcgcgaagctcgtctctgatctcgtgcccgactggcagaccgagtacaaggacacgagcgtcgccggcacgctgtactacacggaccccgagtaccagcagaccggcaccgtgcgtcccaagtccgacgtgttcgcgctgggagtcgtcat

SEQ ID NO: 3227 - DNA, 1127 bp, Zea mays
acggtcaaaggaaagaaaatctcgatatataacagaactggagcggaaggttcaaactcttcagacagaggctactactctttcagcacagctgacactattccaggttcctttcatccttctgtttgtctcatgtattgctgaattgtgttcagttcatttattttggtgtgaaaataacacggtgcatagtgacactttatttattatatactgtgcaaccagctgcactccatagtccatacttgtaacttgtatgagctaaactctaattgctttacaaatgaacagttaaaacaatattttatttggactggtgcacatgcaatgagatctataacacattctaggatagtttatgtgatcatgttgagtattgattaatgccacatgtagtgattagggtgaactgttccttggggttgttttgtgtagttttctcaacgattggagatctgaatagtaatacttggtaggtggcagtaaaaaaactgtgttctcggtttagcagcactgtagttttttggcaactatactatccccattgatccaattcattgcaataagctccttgttacttggttaaccttatactagcaacttcaaattttaagcagaaaaccctgtattttcagcagatcttgtctggttccattttctgaatctacgagcaatgtgtcctcgtcttttgtgttaagagtaaattgcatggccggttcctaaagtattatgtgattttcgtctaggttcccaaactataaaattccgtatttggctccctaatgtattcatgccttattcggttgcacaattatcgagggggattgaatccctctctattcaatttcgaatagcaagggatttaatcccttcatttcacctctaaccgaacaggaaggaagagcattatccactcgtgaatcaccaataatagctatcttcagctccgacacatacgtgagacgcccacccctcacatctacgacccttcgagttccgtctgtgattagatactcaatgatacggcgcaaagtcgatatacaagaactcaaggcggcctcctgctacaatactgcacccgccatcgtcctatgccatcgtgagattgctgcaatgcaggtgtgcaa

SEQ ID NO: 3228 - DNA, 704 bp, Zea mays
aagcagagcaaatacctcagcgccccctttcaaagttgatgcgggacctcccagatccaccatcataatcatccctcattgaggacccaccactcgccttcatggttcctccacctccaatcttctccacagctttcttacccttcttcacctcagtcaagaactgatccagaccaaatggatcattttcttcctgcttatcgaactccacaggcctgtctcgcttgccagtcctctctgaagcaccagtaaatcccttgtcaggcttgaacctctcagtcttcataaccttctccaactgttcatctgcatcaccatatacatcagaatccccatccttcttaggcctgtatagcgtggacatcgtggactgcgctgtgaagagacccttagagtagatattgtactgatcatctgtggcaaaaccagagtccattcccttgtcctggttgaacaaccgctggtcatacatgacctcaccaccttttgcagcaccagtgcttgccataccaagagcaatcttctcactgatatcacgatccctgtctctcgtgatcttactcttcttgcccattgcagcatccttggctttcagcctcctctccctctccctctcgcgtgtgcgctcctcacgaattttatcacgctcaatccgtgcttccctctcttctctagactccctgcgctgctcacgtgattcccgg

SEQ ID NO: 3229 - DNA, 739 bp, Zea mays
ccccaccaggaatagttgcctcggttctcagggcaacagtgtgcatgaccttaacagctttcaagggaaatctgtcgcaaaatcaaagtcataagcttagcgccatgcatctgtcgtgatcttcaacatatatcacggaagggaaacacaccagaagacttgcaaatatatgcatacaacccaaaacaaggcaacagcttttttaactaaaactacaaaaagtattaacatatatgtttgcaacaatatcgttctagcagctttattctttgaataattgagccaaaccaggcaatccattgttagttagttcgataaaacttcaaaggaaactgaaagaatacatgccgtatagatgttaggttcctgatttgatacactgaaaatatagttaaacagtaaattccatttccatagaaggaaacataaggggcagcaattccatccataacattatttttcaggtattaattcatacgttacttatgatatatctggaacttttgaagaatgcagtcaccaaataacaataatatagcagtgcaaaagcatactaaaacaaacatagtgtccatggaacacaaaaaatatatatgattacaatgtatatataaatttaatgtcatatctggccatatagttagggcagctccaacaatgacatttcaggtctcagctacctcatagagatccacctcagcatttttcttacgtggaagagagaaaagctaccttttat

SEQ ID NO: 3230 - DNA, 1195 bp, Zea mays
ttgttttctgaaaatcgcaggggcttgttcgcaaacatgccatggcgacagggtatcagacgatttcggccgatggatctgcccttgacggctgtgattagattgttataccacacgaaccagtacacaccgaccgccgcaggatcaagatccaatggcacgaaatcagacacacccaagctcgactcacagatctccgatcccggaccgacaaccatgatgcaacaaagtgaaaggggacctccacatccaatcagaaccgttcatcaagcggtcaacggattggattctaattacgcgagttctaatcctaagagcaggatgtccgatcaacgggcgagagaagccctagccgaaggggaatgcagatctaaccagcgtcgttaggtccctatctaacgaccgacgctcatcacccacctcacaacgccggagtttggcgacgttccctgccccacgatggtcgagctcaccagagcatgccaaacccgacctcgtgaggaagtctgtctcccaattgatgctaatcgaaatacaaaccatgatgaccgtgctcatagggttcttaccgaaaatttatgcacagagccaccaggtccccggtgaagcgagggtcagccgcatccatgaatccgcggtggagaatcccagtctccatggttgtccatcgctcccgcaacagccacaaagatgctccttgaactccaggggttgaccctggccatccgccgacggtggggtggcgctgcaagcatgagtcgaccgcggcaggttgtgtttccgcggtgctcacaattatcggcgagcaattgaccctaggaccgaccgcaactccacacgatgagggtgccaacggttgcgtggactccggtgaaggacgcacgcgggtccggggactctcccccccaatttgttgatcccctcattctctcacctcgatttctttctctctctctgattcctccctgcaatggcgcaccacgaacggatggacgaaggaaggggaggtcggtcttatacctcgggcagaaggaggttgggcgcgagtacttcggatcgccaggagggggacctgcccagcaatcgcgccgatttaggggggaaagaatcggtcgcaggcgcgagagtctgttgagggaaggtagatggagattctgcgtagctggccccacatggcggtgaaacgacacaccca

SEQ ID NO: 3231 - DNA, 1052 bp, Zea mays
atgaaacacgaacactcaaatgaacacgcttaatgcgttagatatatagaccagttcaacacttcaacgtgcactcgatatagttcgagcatttcctccttgatgacacgacccacaatatatcaatactattcaggtggggatcccccttggcagtttttttttaaaaaaaaatcagtgtcataagtaagaaatacattgctaattttgctatataataatcaacatgaagctagagcatgcaaaatgttcctggcccgggataaaatccatcatacatcgtacgctagaaacaagagagcacagcaccagttgagggaaggatgcggaacgcattgccatatataatcaacatggaaatccaccccccaactgatgggtgatccggaagcaaactacgatttaaccacgcaacagctgatatctgaaatgatgactccggtacaacacattacgcatacggggcagttcatatgaagagccccattctagtaatatatatcccccgaccactagattctacaggggatgtcgaaaacttgaacatgttccgacatccatcacgcaaaccagtccaccgattcccttgcttgcgcgcatcatcatgccgctttggcctttgatagcgccttcttcctctgggagagcatgtaacggtacatgtgtgggcttcctgcggtggtccaaagcggaaacgatgcgccttcttatactggcactaatggcgaatagcaaaatggaaggagatttttgaggaggggaaggcttacctggaacatagatcaggagggcaaggacagatgaatagaagtaatcgtatgagaagttccatttgttgggcatcctaatacagtatttctccgatgcctgaaattggtcccgcaaaaaaaaagatcggttaaaaagatagttatacgatgaacaacacgcggaccttttcagttttctagtaagatcagtgtaccttcatgtaaggcaaggcaatgtagatcagaccaacttcactagagataccagtaggatacaacaacataaaggtgctgtaccgcaag

SEQ ID NO: 3232 - DNA, 1038 bp, Zea mays
acagcaagtgttaacatgttctttgtataagtaatttatccataaacaaaactctacccttcatggtttattaacacaatcatatcaatgcatatgcgttcaccaagcatatttcatacaacatatcatcacacttgcctagcaattaactaaggaacttgtgtaataaacgaaagagtagtcatactcggctagactaaaataaagtcataagcaatctagaactaaaccaaacattagaagataatgaggactaagacagaacttcagcttcataaaatcaatacatgtaatgtaatcaatagtaatagagcttatcggtgagttgcttaagacattaaacccaacctacacatcaccgatagaccacttataacatatagaaccaatttagtcactttcgacccatacttccctaaaggttgtggaggatcagtacacaagaaacccttatagatcaggagattacttcatggcacaccaaaactaaatttgacttgagatgatgaaatcaacgacgctgtctggtttacgtgtatcaccgaacacatgaggagcgtcacgctaggactatgcccccaagttattaaacacctggaatatctctcccatactacacagtacacacatatgaaattagcacaaaactacggctacagatctagaaatcgtcacacaacacactgacgctatgaacaagaaaaccatcgtgactaatacatattcaattcaccaacaaaccaactaacaacaaaagtaaatcggctcaccatgactaaaattgactgtggatacgacgacgacagactacatgtttaggcatttcggcgaacacatgacacgtgaggtatgacaccaatggttagctgcgagaaatgatagtagcttatcgattcagtcccttcaacaaatacaaaggatgcaagcaagcggggacagcagggggctcaccggggtgaacaacgtcgtgaccgaggctgcgcaagcgcgacgtgctgctcgacaaccaccaaggtgctgctgcaggcatgcaagatg

SEQ ID NO: 3233 - DNA, 994 bp, Zea mays
tgtcagcatatcaaatgattgtaggtgatgattacacccagtccgaatgtgtcattaaaaatatataattgtacagcaccagttggttgagttaagtacagttgttacatctatctccagttctccacaccacctcacacaggtcacagctgtatcatcttcttcttcctctctctctctctctctaccaacccaaagtcacaaattagcttctttccccgcccctacatgctacatgtcagatttggtcaagctaccattcactgagattttatctcatctatacaaatcaaaaatttaaattagacacaaaaggatgcatctgaagaacttctttccctctctgttattttctgtttctttcttcttttgaaaattaaccgtttttatggacatcaactaatgcagcctatgtatgtataccaaccgtgaaaaagtaaaaagagaagagacaaaaaaaaaagaaaccccgtgatattttacatcgttgagtgagacctgccatgggtgacgggtcggctcgagccgaggccgagaccaaagccgaagccgaagccgagctcgcgtgtgtggaacgggctcgggtcgtcggactcggagcgcgaacgcgaacgcgacaggtcggagccgccgtgccgggagctgttgtgtccggcggcggccacgacggactcctcgcacagggtgacggcccactccagctccgccaccacctcggacatgatcggcctcgcgcgcccccgtggtcggacgcactccgaggcgatcttggcgacgcgcgccaccgcctccacctcgtgcccgcgcggcggcggcacgcgctcgtccaggatctttgtgacgctgcccgcctcgaccgccggcacggcgaactcgaccacgttccggggggacccgctgccgtcctggttcgtccgatggatggccttgcggccggtgaccagctccagcagcaccacgccgaagctgtacacgtcgctgcgctccgtcagtt

SEQ ID NO: 3234 - DNA, 1209 bp, Zea mays
accctcttatcctctagtagtcgacctgcaggaaactggtgcacataactgtaggattagtgtttttccttatgtggcctttgttcaggtaaagtaaaaattaggccaccagcaaagacaaaaattcctcctcctccagtcgtagcgtatcaacctgactgcatacaaatagttcctttccttgctcatttcgttttcagctcagatgatgtgtttgctccatctctcgctccgcttatcatcatcatcaacatcatgaaagtgacagtgattggacttggtttcgtgaaagctgaaggtgtggttaactccatgactaggcatggagaccgcaggtatgttttgtagtgatcatatatttgttgctaccatgctgcttgaatgcattgcggaggaggctgtggttttgctattatgcatatacttttgctgtgcccatcaggattgtgtagctgccatatgtcgccaattggattgtgtaatagcggatacttgacctttgtagctggattttgctaaacgtaggtttactgatgggatttttccccatttgtttctttctcctcttaaacaaaacgtgccaaggcagtgctctgaaaaaaataccatctctttttttctgccaactctgatgaagaactgacgattccatgcttttgcctcttgactccagagaacttctcaagggcccgctgtattatgcctgtgctataactctgacaacaatagttttctggaggacatctcccatctcaatcgcggtgatctgcaatttgtgtgccggagacggtattaacttgcttctttcttcgatcgcaactacaatctgtgcctcaatgcctgttctctagccacaatctctctttgtttgttcacgtgaaacctgaacccagcacaccgtttcctttcaggtgttgctgacatagctgggagacgattcgggcatgttaagctccctcacaaccctgaaaaatcatatgccgggagcatcgcaatgttcttggcaggtttcatcgcatcagtactgtacgcaaacagactatctgttatacctatttctatccaacactattgctgtaacctgaactgaaactgctataaatgtgttgtggtatgtgtatatgaaaccaggttcatgtgctacttcaacattttcgggtttgttgagaagagctggaccatggttgctgcctttggtgtgatatccct

SEQ ID NO: 3235 - DNA, 1111 bp, Zea mays
attcaccctgtggttgtggcggtattctggatcaacatagccaaatgttcctctgacttcagagcttacgtgcgacacacctaagtcgatgactctagagagtccaaaatctgacagcttgggttccatatcaaccccaagaagtatattggttggctgtcatagaaagtgtgagtttgactaaacatgaatctatagatgtgctgaagactttcagatcatgcaacaaaccttgatgtcacggtgaacgatgcagccttcagggtatatgtgcaggaaccaaaggccacaagcacttccaagtgctatctgaagcctctgaatccatggaaggttcttgtcttttcctagaatcaaaatttcctttttcttcaattatgcaacaacgtatagagttctagtcgtcactttaaatgtttaggctatcatgttactcaccaaatagccattctgataggttaccgttgatgcacagctcatacacaagaaaacactcctcctgcccgtcacagtaacctcttaatgacacaaggttcgggtgcctgacatgtgacaggcttttaacttcccttaggaaggtttctgcatgctcattcttaacaatgtgcttcactgcaacaggccagccatttgtcagcactcctctgtataccttgcctggaaccacaagatgaaccagttgcacaccataaaggacaacatatacttgaacagttaggtttctaagtctcgtgttctttgatgaaaaatatactttctcttgatttatggtatagataccataactgtgaatcaggtattgtgaacacgtacctgcaataccctgtccaatgacgtttgatggactcaagttttcagttgctgtgtatatttctttgatcgacatcggcttgcaggtagtctcctcatactcaagggatgccaacgcgacctctgcaagaaaaaaaaacatgtgcaacttcttattgctattagtgggtaaaaaaaacatctatctcagtaacttctatatgcatatggatgtgcaattaattagtgaaattaccaatatcgtttcttgatggttgggacttgctggctcttctcgtaacactgcagagacagcaagtca

SEQ ID NO: 3236 - DNA, 1164 bp, Zea mays
tccttattagctttaaatttgttatcactccttgaatatgttttactaacctgaatagttaacaggtgcgtattgcccgtattttcaatacatatggtcctcgtatgtgcctcgacgatggtcgtgtggtcagcaattttgttgcacaggtttgtttgctacacattatagactatttttcttagttgtgatatttatgcatttaaacatctatatgatcgtccttgcaggcactgcgaaggcaaccgatgacagtctatggtgacggaaaacaaactcgaagtttccaatatgttgctgatctggtaagcactgaacagccttattatgcattttggtgtgtggactgtgatctatgtgggtcttctgtgctgttgttacctctgcaatttcactgggcaatactcttctgcatctgtatatcttaagaatcaatacaaaatgtacataactttgttatgattcattctaccataatattttttttactattcagtcacagactcattgtaatagattgctagcaccaattttctagaggcaccagggaattagctattcatattgttatcacttatattataatttgtagagagaatgttctgtgactaaatcttattgggctttgtttataacgtacatgtgagatgaatgctcacccatggcttcacatacctttgcatgcctcttatttaagttgtttttgtaatcttgctccatatgttcttaggttgctggattgatggctctaatggagagtgatcacattggtcctttcaacttgggaaacccaggagagtttaccatgttggagctagcacaggtttgtagacaatttgttaaaaaaaacttaaagtgcacaattgacaatagcaccttccccaggttgtgaaggaaacaattgacccaatggcaaccattgaattcaaacccaacacagctgatgatccccatatgagaaagccggatatcaccaaggctaagcaactgctacattgggagcccaacgtctctctcagagaaggccttccgtttatggtcaaagacttccgtcaaaggatctcggatgagttaatcgagggaatcctacgatacctggggaccgggtttggattctgaaactttgctggaaattaccaggcaggaagctttttaattggtttg

SEQ ID NO: 3237 - DNA, 1058 bp, Zea mays
aaggaaaggtgccatcctgcctgctgttctgctgccctgcctgctgtcctctacccacagaccacgagacttattccaacaattctccccctaagtcttgtgcgtcgtcttgttggacagtttgaccatcccggccctggagcaaagctcaaggaacttgatcctcctaaggggcttggtgagcaggtccgcaagctgatccttggtgttgatgtagcgcgccttgatgttcccttctgccaaacaatcacggatgaagtggtacctcacccggatgtgcttgcttagttcatggaacacggggttcttggccaacgcaagggcggactgactgtccacccggagtttcactgctccaacgtctctctcgaggagatcaccgagcaggcgagcaagccagagcgcctgagtagaagcggtggaggccactatgtactcggtctcgcagctggacatggccaccacctgctgcttgaccgattgccagctggtggggcacttgccgaggaagaagaggatcctgcttgtgctcttgctggtgttgatgtcgccggcatggtcgctgtcgctgtacccgacaaggtgtgcctcctcagggcacctcgggtagtaaagaccgtggtcaagagtccccgcaacatagcgaacgatcctcttcacaacctgctcatgctccgtcgtcggtcgctgcaggaaccgactaacgtagttggcgaagtatgccagatccggtcgtgtgtggacgaggtagcgaaggctctccacaagacgccgatactgagtagcgtccacctttttcgtcatgctgtcacggctcagcttcaatctctcgtccatcggagtgagagctgtgttgcaattagtgagcccagccagctcaacaatgcgcttggcgtaggtggtctggcgaagtgtgtgtaagcaacgggactcttactctcatcgagaggatgacactatgagttggggcgattttctgtttattttctcaaacactacacaatgccatagccttaggagggttggagacacatatttatagctctaggggctgaact

SEQ ID NO: 3238 - DNA, 1356 bp, Zea mays
cagcttgcatgcctgcagctggccgcggtcatcaccccgccaccgtagagctggaagttatgtgcgtcgatggcaaccgacaccggctggttggcgacggccgcggcgagcgctgcctcgtcgccgctcggcacgtcctggtagccgctgatggcggccaccggctgcacggactggcacatggcctgcgcggcggtgtacgggtaggcgtcctcggtggcgaggccgccgttgccggcgatgtattggaaggcattgtcgatgtagccgccgttgcagccgttgttcccctcggtgtcgcagtccagcacctgctgctccgataacgacaccaagttgcccgtcgtaatctggtggatgccctccacggccgccaccgcagcgaaggcccagcaacaacctgcacaatggatgcatgcatgcatgcattttattagagcattacttacagtctactgtatggaataaaattgaatcatcgaatatataattattattaccacactggccctggttcttgataccggtgaccgcgcctttctgcctccagtcaaccgtctgctggtcgtcgtcggcgtctgaaagagtcacgttcccgtacttgaaaccggccatcttctttgcccctgccgggactggtctcaagccagtgtacatggccatgaactcgtcgttggtcatgtcggcgaactcgttgagctccatccgatagctcttcttgtcgtcacctgcggcattggacgcgtcaacaaaatcggcgttcgccttgaatacctggaaccggtgcgccttctcagcctcgtccctgtaggtgcggccgtgctccgccatccactgctgatgcctcactttcatggcttcctcgccatagccaccggtggaggtggacgacaggtctcgggcctcggccatcatggttttcacagcaagaatcgtcagggccaccgctgtgaatgcgatcacggttttgttgacgacaatgtagggcgccatgatatatatagctagttgtgcaagtaccagacgtactcccagtaagcgaatgcaatggcgaagctagagctagctagtgcatgcactgctttgtgtgcagtctaagggcaccatggcgggtttatatagagatcgagagagcttgagcggcggcgatgaactgaccaactcgggactccctagctagcttctatgctgtcgcggcccggtcatcacgtcagtggtagtactaacttgcacgtcagttaagttgaggtccatgtcaatggtcaaaggcctacaattcgttggaagtgcccatccaacgtatacgtagatcggttaatgttggcatcctctctcgtctcatctaatagggtcgtt

SEQ ID NO: 3239 - DNA, 1286 bp, Zea mays
agctcgtacttggtgacctcaccagtcgacctgcagatctcctttaaaatccaatcctactctaagaagagagccaacaacagaaacatatataactttactataagaatactgctttctaaagtactacttgaaatgtatttatctatagtgacataaataatattcaattcaatgaaattccaatgtcattaccgggtcaccggattcaaacaacctatgtgaaagaaaggcagcaacatcatacctgcaacatataaggttgccatgcatgtaagaatattagaatacaaatgttttaaaagaaaaggaaaatagaaacggatgagataatttcaagggcatagagcaggaagccagaaaccacttctgttgccaataaaagcgcttatgaacttacagtgaatgaattcaaaggtacatttatggttctctatgtgtgccactaatgggtcacaccacatgtaacaaataaatttagaaaaacattcctcacaaacgtcatcccttccccttcttttctttcaaacattttgctatggagtatggatataatgtaattccaatgctttcagcaaaagtagagtgacatgtatacaattaatcctaaagaagtatgagaaatggtaatattttggtaccatgcaccatcacgagctgacttggcctcaaactcaactgagacactttccacaggattcttccctgattgtcaacaaaggtaataaaaatcagagaaaaaatggacatggtaaccgatgatttaatggcaatgcatatatcgagtgcacaaaactaaaatcaatgatacaactgaatccctgtttggcaggtcccagatccatgatcatgtgttcctggagctagggaatgcacagcttcaaaaaataattggatatgaagctctaccaaacagaaccttaataatctaatgtccagaagcaatgaagcagcacatgataagttgccctcacaatcaacattttaacaggcattgacagctgagattatggtcactagcaaccttgtaggtactaggtagggcaggttgcagccagcaaaaaaaccctcaagctcatcatgaataaatttttgtagctgtccaccaatatgttggataacaaacatttcgagggctttgcacaaaacaaatcccccatttgtgctgcatggcacatgcacagcagctggctggcttgctcagtatcatacagcactggttgactaatatagcaggtagaacgagttgctcattagcaggtagaacagccactatatccatgact

SEQ ID NO: 3240 - DNA, 1021 bp, Zea mays
caattgcagtgagcagtgtgttcgtcatttcgtcagcacacggttacaatgactggtcagttcatctctataaagatagctttacgttcttggtactcgtgctttcacgattagtccctgtattgggtcgcagtgtcacaaacaaagccgcaaacagttcagttgggctgagtgggcaacaaatgttcttggactctaatggagctacactaccatccctatagcatcctagtttaactcagcgaccaggtaggggagtaggatgcaagacgtgctatgggctgggagattacctgtacaagttgatgtgcagtttgaacttgtgaaggagtgccttcaatcatgactcgaacctcttgaccgtttccgattttctcaagaacgacaactgctccactaacagaacgaatgagttcaacgttttctccccttacgccaattatctctccaacatctgccagcgggatttgcattgtccgtgtaatctgaaagccaaaatgtcatgtaaggcagcacaaatgtcattgtcgcaaaagatgattccagcagctagctagagcttaaccttattattactagtttggcaactccatttttccaaggacccaagggtaaaaagtgggaaaataggaatcatctgggaaaatggagttgtcaaactagtcctaaaaaaaggaaaatgacatggggaaaaatggaattcaaaaggaacctggatatatacaatagatcataacttcaaccaaattagacaaacaaaatgaaaaaaaatatttcagctatagctatggggtacatcataagacctttgttattaacgaatcagctggttggctgagatctcgagagtacggggcatgaaaagatggatcatgtccatacaagaatctactgccttttgggttaccacgactctgctgatcagacaacaaaaaaacagggaaaaattagatgcaaagacaaaatgcatataacctttgaaatatgaacgaaaatcagcaaggaagctaacaacatgtgc

SEQ ID NO: 3241 - DNA, 1138 bp, Zea mays
ttaaattacggtacaaaagggatccatgaactctctggcttagattacgacgacatacatacgtaccttcctagtaaactctctgaattaatcgctcccgatacctgatggcggcggcacacgtttggaagcagcgttagatacaccttgtgacgggtggtactggtaaggcgtcgtcaaggcttccatgttcttattcttacccctgctccgtacacttcggcggtgtcgaagaaggttattccgcagtcgatgctcgcgtcaaacgctcctttggccgccttcagcttcgtatctggcgttttcccagagcgttcaccgatgtgatcagagggcagccattaccattcccatgttttgcaatgaaaaaagcaccagcaggcagcaaccgttcgatggaattggcaggcgactagtgatacgtgctcttacagctggagaacgtctaattagaacaagggaatgccaaagttttaggctgagttggacttcggtcaaacgtcaaagcagcagcagccagcaagcgcaaaagatgcacgggaagtgtgagcggaggttcaggccaagtaaaacttcttcttccaacgagatatgctagcaacaagggagcacgggtgtaggatggtttcccacactttctggccctgtgctgtgatgggtctcggtttcgccgtgtgatttcagcttcagtgtcgtacatacgtggttcaggtagcagggctggaggattgattcagaaactcacgggctatttactaaaacggcgctgatttttcatggcatttataagttggtgtggggggtgtttcagactgtaatacataattcttgttcgtggaaataaccaggaagaaagaaatcctgagccaagaagcaaaacagacagcgcacgcggcgagagcggagaaacgtacgcaccgtcccaccggaactcgttccagtaggtggtgtctgccccaggaccacgccccgacgccgagcttggtgacggctacgccggaccctcccagggccaccttcccgccctcctcccttgccgtgcccgccgcggcggcggcgtcggacgccaccgcttggggcggccggaacgcccggcgccgccgccgggtgaacatgaacggcaggccgccgccggaga

SEQ ID NO: 3242 - DNA, 701 bp, Zea mays
attcctgcaacaccaatgttgacacccacgacatccttgatggttatgttgcttatggtgggaagcgcgttcctgtcgtagccatcgtcagggtgttcaccatagtttccagtgatcctgatggctatggaaacgtcgtcgaagctgacgtcagctacatacacgttcttcacgtaccctccgcgccccggggctgtcttgatgcggataccgtgcaccgagttgacgatccggaccccctccgctcggacgtccgatatgccgcctgacatctcgcttccaaaggcgagcccggcgctgttccttgtctgtcctgtgatgttgcggatgctgatgttggagctggggtgggcgaaggagatgccgtactcgtcccacccgctcttgatgacgacaatgtcgtcgccgtttctgacgtagcagtcttcgatgcagacgtttgtggatgagtctggatgatggggtttcaagctgcattagtaccacacatgcgacagagaaaacgaaaaaggagatcataaaggaaagcacacagttcaggacttcatgacatacatgaaatgtgtctgacaggaaatactgtgccatggtgccatacatcaagaaataacattttgaagtttttgaactttatgcaataactatggtcattcacttaattaggacatatatatatcagagaaaagaagggcaagcctaga

SEQ ID NO: 3243 - DNA, 1205 bp, Zea mays
attacactgggcgagaggtcaacgtcgacaatttcttcgctgttctgcttggcaacaaaactgctctcaggggtgggagcggcaaggttgtggacagtggccccaatgatcatatatttgttttctacagtgaccatgggggtcctggcgtccttggtctgtactcgctactaattgctactgatttcattcagattagatgattcattagataaaatatcatttcgtacatgcatgtagaaccaaagtatacacagttatttactctgtgtaaaaaattcaggaatgcctacgtatccatatctctatggtgatgacctcgtagatgtcctgaagaagaagcatgctgccgggacctacaaaagcctggtatcattagcttttgttcagttctgctctgaaatgttgtgatatgtgaagcaagggcttgaggtatatgcgtattcttccaccttttttaggtcttttaccttgaagcatgcgaatctgggagcatctttgagggcctcctgccgaatgacataaatgtgtatgcgaccaccgcgtcaaatgcagaggagagtagctgggggacgtactgccctggcgagttcccgagccctccaccggagtatgacacttgcttgggagacctgtatagtgttgcttggatggaagacaggtacttgattcttcgtgtcatttttcactgcatttcggtactgtgaaatattgtccagatcctgccaaaccaattcacatgtctgttttggtttcattcacatcaattagttaacaaagtacttgataaaccaataagttaaagtatcgtacagaatttttattcagaaatgattaaccaatttagtatgatactagtacctgatgacctggctaccttgtctttattaattaaagtcagatgcagaaggatatgcatgtgttactcttgctctacttttagttttaggtgcacatgcttgtcaagaaatttattagtttgccccacgatatgatgcctcaaagtcacagcagttattttggaccatgtgctctgtactgaacctctttaaaaaagaatgaactgaacttgccaatttgcgcagttccctttatggaaaatagagaagaaatgaaatagtagtaaaatcagttcgccaacacctattctgctgtccttcccaactcacactttacactatgagatggaccagatgtaataccag

SEQ ID NO: 3244 - DNA, 1669 bp, Zea mays
ccttctgctgattgcggccgtcccgaccggagtctgcctgcgagggcctcgtccacgtgtggctggactgtggagtgtctttgggtttcctctgagactcgactttgcgctggtggagctcttcggatctggcgtatttttcaaatagctgatacagctcttggaggttcttctgcggatccctgatgcagtggctgtaaaggacgccggcccgaaggccgctgatggcgtagtggatggcgatctggtcatcaaccgaaggcagttgtgacttgagggtcagaaacttgcggtagtactcccgcagagtctctttttccgtctgcttgcagagtgaaagctcagccaaggcgttggtgtctgggcggtacccttggaagttgagcaagaatttgtcccggagacttctccaggagtcgatggacaatgggggcaacctggtgtaccaggtgagagctgggccttcgagggcgatgatgaaagacttggccatcatggcgtcgtcccctctggatgatgcaacggcgacctgatagctcatgatgtactgtgctgggtcagtgttgccgttgtacttgggataggtccctgccctgaagttggcgggccatggtgacacttgcaggtgtggcgctaggggacttcgctcgtcaaggtagttgacaccttggaatgccgcggcgtgtgggatggcgtggccgtgctgagggaagtacaggtcttcgacttgtgcgcgctgctgtaggggtggcccatgatgcaggccgaggtggccttcgcgctgcatcagcgcgatctcgcgctcgagctcctgggccttctgctcttcgtcgcgtatcatctgtcgcaccttggctagtgcggacacacgttggcgcttggcttccagtatctctttctgcctctggagattgcggttcttgaggcgcagggcgcgcagctgtagctgttcttctgttgagacgccgaggacctcgccgtcctcggtgagatccgcgccctgcactggggcgaagcctgggggcggctgcgattgtccttcgggcccgcaggtgcggaaggtgtcgtcttcgcaggtgcggggaatgttgtcttcagtgggctcttggtgggtggattgggtgagggcgagggccttgccctttcttgcggccagcagtgctgccttcgcagcctcgtcagccttcgggttagctctcttgggtgccatcgcgggtggtcttgtcgtagcacgaacggtgggcgccaaatgttggaacttgctctcagcagcaaggaagccaacaagggtgaacggtggtgacaacagggttacgtgcacgggggcaaaagctctgttaatctagcctctcacgggcactgtgcgggggtatttataggtatctgagtgcccagcgccttgtgttaaggacgcatgtgccctcagacacctagtttatccccagaatattcccataaagcagggttacaagccgtaattacaagaatgcctttacaaactaggcccgtaacacaaaggcggccacgcggggcccgttacaatgggccagatcacacgtgggcctcagagcaggacgaggccgtgctacggggagacgtcaccgcaggccttcgtctggtgctgaatgaagcgaagggtgtccctgcccgttttgtcttcgtcaaacca

SEQ ID NO: 3245 - DNA, 1074 bp, Zea mays
ctgaagctggaaggctgcaaattcatggccaatggactaaaagccattgggacctcttgtgtttctttaagggagctaagtcttagcaagtcatctggagtgacagatacagaactctcttttgttgtgtcaaggctaaagaacctgctgaagctggacattacctgttgtcgcagtattactgatgtttcactagcggccataactagttcatgcacttccctcatctctctgaggatggagtcttgtagccatgtttccagtggagcactccaactgattgggaagcactgttctcacttggaagagttggaccttactgacagtgatttggatgatgaaggtacatattgaactggctactatattattcttcgccagatggacataaagctgactctgaatattttctgtacaggattgaaagctcttgccagatgtagcgaactttcgagcctaaaaattggcatttgcttgaagataagtgatgaaggtcttagccacattggaaggtcttgcccaaaactccgcgagattgatttgtacaggtcattattagacatgccttgcggttctctttgtttagttgacttttgtcagtaaactaacttatgttctctgtttcaggtgtggaggcattagcgatgatggaattattcaaattgcgcagggttgtccgatgctagagtctatcaacctatcatactgcacagaaataacagaccgttcactgatttcactctcaaaatgcgcaaagctgaatactttggagatccgtggctgccccagtgtttcatcgattgggctctcagaaatagcgatggggtgcaggctgctttccaagcttgatattaagaaatgcttcgggattaatgatgttggaatgctttacctttcccagttcgctcatagcctccgtcaggtattatccttctctcctgtaactgtaacaggaatctcgtgataccatgtgtgttctgcaattgtgctaataccatgtatgtctcgttacagataaacttgtcatactgttcagtcaccgatgttgggctcctttccctttctagcatatcc

SEQ ID NO: 3246 - DNA, 1332 bp, Zea mays
ttgcatgcctgcagtgcctgcctgtgtaacatgcaagttcggtattttcctttcctttggtgatgccttagataaccttttgttataatcttctagcaattccatctcaagaagctcaaaaagacgcttgctctttctgttttctttcaagaatttggcatgctgatcacaataggaagtggtttctgttgcacagctacaattggtgtttagatctgtatctgaaagacctctgtttgagttttgagattctctactttggagatcatttcccagatcagctccagccatttcctcaactatctcatccctggccaacttctcactagttgaaccctgtgtagccaaatttttctcttcactgctggtacagtttggctgaacctgcaaggcactttcatcacaaccctttccaggtgaaatattttgttttccaaaattaccaacttgttcttgtttcccactgtcactctggaactggtcactatcatcatgaggagcatccacagaagcagcaactgattcaccctcttcatgagtagatacatgatcactcctttcagagctgtcttcataaacccagagcaatccttccagttctctatcaatggccttgtatagattgctcattaaaaagtcaggcacatcagggccactaaatccatcataaattccaatgaacaaccatccttgctcttcggatagaacaacatgaaccctatcttcccctgcctttccatgagcccactgaaggttccttgtcacgttatactcatgttcaggtatccggggttccaatccatcctgtgagccttctgatctggactttgcgtcccttgcccagggcagttgagtcataggatgcgagagaaacttttgaacccagcctggattttgtgagctcctgctgaatgttctggacaatgcggttttcatgggtctgctgatcctatgtacaagacgcccgagacgagccttcctcccgccataggaaagaggtgctgagaagttgcttctgctgccaccatcgatggggcctgacatgaaggctcccttgtccaatggcccagacatgaagccggagcccttgtccagcgggccggacgcgaatcctctctccagcgggcccgacaggaaggtgttgagcgcccccgagcctcgcggcaccggctgcaagggcacggcggcgaaggaggcggtgctctcgaacgcggcggcgggctcctgcacgtcaccggcgagggagacggcgaggttgcccgtcctggcggaggacgcgttcgcgctgacggaggcccccgatatggtccggaaggtggtctcgccgaagct

SEQ ID NO: 3247 - DNA, 743 bp, Zea mays
gacctgcagaagcaatccgggggaatccatggcgtgacacaagctatctggcagcaattacttaataactagctaacagattattgatgccttttgcaaccccgcatcatcaccttgtactcagggctatctcgcttccggagcagttccatgccgcaggcctgcgctttattatttgggagagatcaagagtagtgtgtatatatatgtagcgatgattttttttttttttggacaacaaaggatatggagcttatatatgacaacaaagcctacacctacttaccttctcatagaagcttatggcacggtcaaggtcgccgacgcggagcatcacctggcacaagggttccggagttccaggcctctcgatgatctcaaacttgtagccgtcggggtcctccacgaaggcgatgacggtctcgccgcccttgacaggaccggcttccctgatgacctttccagcctttgctcttatgagctctaccgtcttggccacctgtttcacgaatcatccagatgatcccaagcatggtacgttctctattctaactcatcgatggagcagtcttaggttcgccatcttacgtcctcgactgcgatgccgaaatggccgaacccttcgcctatgtcatatttgtcaaccccgtaatctgtgaatggattcagcaagatcaggaacctggaaaccgcagactgcacagtacaggggtcaaagggggggggggggggggtgttttggc

SEQ ID NO: 3248 - DNA, 556 bp, Zea mays
agtggtgccggagggaaaactcgggtgtacgtatgcgtgtacgatttgaggtgccatcgggaaaactggcgactccttccagctagccgcagcacatttttaacaaattgaattgggactgatgagcacgcgcgcgcccgagtttaagcaagcaatggctggatacgtatgcgttgcgtgtacgatttgggtgtcatctgctctgattttgatcttgacgtcatcgtgtctgtgacatcagagatgatccgatcggaggcggctgggggttcggttgctatgctagagtcctgtccagctcattagctcaagcgcctgccttgccttacccacccggcccccgtgatctctaccgcgctagtgctgctgactcaccatcgctcgcctcgcctctgcatgtgaagcacgcgctaccgctgctgactcatcgttgcctcgccactgcatgtgaagcatgacacggcacggtagggtgtttttttttgttgatttccggcatggtagctagggggcttggggcaagcagagctggaaaaaaaatggattctacaacgcc

SEQ ID NO: 3249 - DNA, 701 bp, Zea mays
aaggcgagcagcacgtccctggagcgcttcctggggtcgctgaccgacgcgccaaacttcctgtcgttccgggccaggaaatccttccagccgccgtcacagcccctcaggccgctcttctgcgtgaacctcaccacctcgacgagcacctggcgcagacggaacgggtgagcgaaacgaggcggcctgcccggtcccggtgggctgctgtgttggcgcgccgccccctacctctttgtcggcgccggcgagccgcttggccatcgtacggctgcgcggagacgagaagcagcgggggggcggaggcggtagtaaccgcgagtggttgtggtcggcgtcggcggcgccgcggcggcggtggtggtcgtcgagtggcggcggacggctcggggtaacggccggagaaaaaccctttttttgcactcaggaaagtagccaggccgactgaatgaatagcacgattgcaggtggggggccgccgatggtccttactcttcggcccgaagttgaagaagcccgtttggcttgaaaacatgggctttcatgatttcggtcggttctgagtactgggcccagttggcggcgttgtagaatccattttttttccagctctgcttgccccaagccccctagctaccatgccggaaaataaacaaaaaaaaaacacccctaccggggccgtggtcaatgccttaacattg

SEQ ID NO: 3250 - DNA, 1367 bp, Zea mays
atactgcactacaccccgatacaaggaagaggtttgatgttccttgtcatggctgctcagaggaacacacgagctactgtcagaactaaccaaagccggaggtttgccatccacatccacggagttaaatataccataagccacaggatgtccatctgcttgtcttctgctcactttaggttcagcttgatgcacttgttcaggctctgctgaacttgaggagcctgcatggtgtattccataagatccacactcaggaatttttgctagcatatttgatttcactgttagtgactctaatactgtatcagctccatttcttgtcgatgagttttctgccaggcagtttttagcttgcctagggaaggcactaacgctaccagaacccacatctttctccatagccacattttttagaggcggaatttcatcaaagtgttcttccttaactgatttcctttttttagctttcgctgcactggtattaggaacgctagatgaattgtcctgatctgctagtaactttcctgccacagttgcgagcaaatccattgcacacatatcatcattctcatctttctttcttctggtagaacgtttcccctgcattacagttgattgttacatggattcaatggccatattgtgattaaagaaaaacacctaatcaaaagaacatgtacccgagctgagtttggaacacgtggcatagttggaattcgatggcccgcgggaactataacccaacttcttgcgcaccataaaatcttgatcacttgatgtcaccacctatatagcgggctttcacggacagcaaagtggtacaaataccacgttgatcaaccgatcacctttatctgtacaaaactaactcgaatttagtaaacattcactcatcacagatagttcaagaaccggggacgagtctagggtcactagaaattccgctcaaagaacataacccaaattgttttcttgcagcaaatgatttttttggcgattacaaaaataccaccaaattccttcctgtcctacctcatccatgtatgtgtgcgcctcttatacgacgggcgtagaaaccagagagagagagagagagagacagagagagagagagagagagagagagaggaggatgaatagcataggactacatgcctgcaagagcgtgcgcggtgtctcggcattcggcaatcggcgtcgttgtcatgtagcttggcagccccgtcacatgttctctttcacgttgtcaatggaatggggatgtgaagatcctgcggaagctcagtggtgaggtcagatgagcgagctcgagcgggctggatgtgctgcttgcttctcccccccgacgggtgcagcttccagat

SEQ ID NO: 3251 - DNA, 1165 bp, Zea mays
cttctcttctacactacaactgaaatactttgtcttgatgtaaaatatgctatagttatgctatgacatacaataaattgtggtattataaactacggttttgagaaacagagttcccaaacaggcccttacatgttgaattgatctcatcctattggggacataatgttgcagttatttaagttgatcaagtactgttattcacaggtcatgggattgaatcctccctttgggactaaagcctctcttgcgaaccagttcatcaacaaagctctcactttcaagccaaagcttataatactcattgttcccaaggaaactgaaaggtttcccatctccctatcgttctgcatgtttttttttataaaagatatctaaatatctaataccattccattcttggcgttggatagattggacaagaaatacccaccatatgagctaatatggcaggactcagatcagctctcgggaaaggtacttctaggcagtagtagtctccttgaatacatcatatcctcagaatgttgctatgttctttactgacattttctgttgggaaactatgcagtcattctatctacctggatctctggatgctgacaacaaggtgatggagcaatggaatgtgtcacctcctccgctttctctgtggagtcgtagtgactgggctgagaggcactccgagattgccaaatcaatggggcacatctcgaatgaaattggtgacttgcaaagggatctggctgcatctatacataccacagagcacgtggaggcagatgatgcaggggttgcaggcatgtctccatgtttactagatcagttgttgtctgacacgttccatgacccaacaacttctccaggggactgctggaatgataccagcggccgatcacggcaaccatgcaactacgaaacagcaggacaaggaaggggcgatccaacctacaatcatacaacagaaagctgctctgatatgagcatttcattgtcggagagtgatgttcagagaaaagatcaagcttcgccaatgccagagcatggaggcaccggctctgatatgagcatttcattgtcggagagtgatgttcggagaaaaggtcaagcctgggatgctgtggaagtgctctgcgagcggcagtccacggcattcaacctccac

SEQ ID NO: 3252 - DNA, 1166 bp, Zea mays
aagcgcctcgacggacacaaccggcgccgccgcaagccgcagccggaccctctcagccctgctgccggcttgtttggcgatcaccaccatggtaagtaagttcgcttctcacgccagtcggtttcggtttcagggagaaggcaaggcatgtcaattagatctgaacatgcatgcatgcatgagaactcggagctgacaacacttgtggcaccattgctatgcaaccaaacatttcacatgttacaggtgctgccatccatccaatgtaaggagaccaaaaggaacttgtctaccatcagtcctgcactgtcatgatgaatgtagactaccgctcgaaagcaaccgtagttcaattaatcaacctttgtcataattgatcaggaaaatttctctgaagttgcatgcttctgatgtttgaaagcgtgctacacacgaattcctcagaaccttcctagcgactcgtgctttgtcataacaaaaaaagtaactgagaacatcagaaagaaacggacttggctgcattctaccatgtactgattgtctgattcaacctgtgcttctgcccgtgttgttttgatccattgcctcgttgttgatctggccaaacatgaaacatctgacctagtttattcttcccatgtgttgtccaggaggagtgacaaggttcacatcgtacccacaccgcttcaccacatccatcgcaaagcccgaatggggggcggtcgtcaagacggagaccgacgcgttccaagaccagtactaccctgccgtccacctcaacggcgccggcgccggcgccctcttccacgacaaggaccggaagcacctcccattcctgaccaaccacaacaatggatgccagccattcaccgtcaccacgacggcttcctcagagagcagcagcaagcacagcaacggcaactgtgctctctctcttctgtcagacaacccgacaccagcacaggcacagacggccacgatccctaccgcgcagcccctcgtcgccacggcatcgcagtacggcaggctccctggcggcgacgacgacgacgtctccctcgccgggatgtcgtacatgagggtgggagacagccggcaggcttccaatctgacaacgtcctcacccggtcctgccactgcaggtcgactgtagagtgtacagcggg

SEQ ID NO: 3253 - DNA, 1023 bp, Zea mays
tgactagacaagttaacttcatcaagaatcagaagggtaataaagaaaagatacactagtagattaaacaataatctagacaaccaaaagtcaaagcataaacttccaaacacttgcctcataagctgactgaagctttttgaaagattcacaagccaatggatttcccatatttttatcaggatgtacaagcaggacctagagaaacaaaacacaagaccgtaaaaaagaggacaatgatatgcatttctattgtgcaaggggttgtggtgtagtaccattctgtgatattcttttttcagggccttttggtcaatgcttctattacgaggcacacccaaaacttcataatggtttgaaccatccattatcctcttaatctcatccgatgaactagaatcagatttcactattttactaggaggttcttctttttgtacatgtaacacatcttggatgggcgctgagcagtatggtttcgcagaagacacggtcacaggttcactgtcaggaactgatgggaattcacaactacgatagaactcatccataactggatcagaatccttcatgtcttcaaactggctttcttcagtgcttccttcgtatccttgcgccaacttattaagaagatcatttgtcaagaaagaaaggtttagtgtcaagaagactccgagccacccaacacgaacagccacagaataaatagcatatgacgtcaaaacaggtgtcacatatcgagcatgtttcaaagagcacatacaacctgcattaacacatagaagcctatcatcaggtttagagtcaaataaatatgactactaggaaaaaaagaagcaggttagagacttgtaggaaatataagtattatcaggagcagatttgtaagtttaaataaacaaacctccagcaactagaagcattcctgtaatccagaagtagccatacatccacataatcaatatgccaaacagcccaacaatgagaaggccaggtgtatagcccatatagtgaacaactgct

SEQ ID NO: 3254 - DNA, 1191 bp, Zea mays
ggaacagcgcgtccagcttgatgaacgtggcgaggctctcgacgagctccgtctcgaaggagtccacgtcctggtgcacgtcgcggtagccgtagcgcacgatgcagcggtaggagcggtgtcccggcgggccgacgcggccgacgaggtagcgctcggcggggagcacgtgcggcaccggcactgacttgacgcagacgaagaccagcacccggtggaacgccggcaggttggtgacgaagcgggagaagttggcgggcacgccggaggtgaggtcggtgtagacgaggccgatgcccgggacgcgcaccatgcccagcttgtcgcccagcgccagcagccactccagggtcaccttgttgtgcatgtcgtactcgtacttcctgatggtggtgtggtgccacacgaacatgacggcgagcaggatgagggccaggaggatgggcacccacgcgccgtccaggaacttgatcagcgacgccgagaagtagagcgcctcgatggagccgaagaagaggaagaaggcgagggccagccagggggagcggtcccagcacagcatgatcaccaggggcatgaggcacgtggtcaccagcatcaccgtgatcacggccaagcctgcgcagcgattcagaaatcagaatcatagggtttgatcagttctctggacattattatagcatatcgatcagtgccaactgccaagaggacatcattaccagacgcgttccccatgtgcttggtgttacggaaaccaacagtgacagcaacgcagaggatcatgaggatccagttgacctcagggatgtatatctggccatgaactttgtcagacgtgtgcacgactttcaccctagggaagcagctcagagactggctctggttgatgatggagaaggtcccgctgatgatggcctggctgcccaccacggacgccaagatggccagcaccagcacaggccaccgtacacactctgcgttcatcacagaggcaaaatccccgtgaatctctgaaaccatactttgtgtgggaatgaacaaggaaaccagcttcggatgtacgcataccaggaactgcaatgtagaacccgatctggtagcttgcgtcaaggttatggtgctgggacagataagcagcttggcccatgtaacccaggatcagtgaagggtacactagagaagtgaaagcaa

SEQ ID NO: 3255 - DNA, 570 bp, Zea mays
atctggcaatcttgttgatgctgttcgtgttcttcgacatctgcatgacgagcagatccatgtcggcctgcacacctttaatatgttactgcaacacacagctgaagcaaacatctttactctttttgccaaggtattcaggtacctgctgctttcagaacttactcctgattcaacttcatatatgaatgttgcattggccctccagaagttggatgactgtgaaatgatactcaaatttgtaagagaaattttggaaatcacacactctagagatgctacagttatgaatcgcattatctttgccacagccaaatacggacacattgataaaagtttggtaattttcgaagagttgaagaaatatgaaaccagcttggatgttgtcacgttcaacactgttttggacatgctagggaaagctggacgggtggaccaaatgcttggtgaggtgaagctaatggaaaaacttaggcattttcctgacattgtgacatacaatacactaataaactgcctgcgaaggcttggtagactagatttgtgcaaaaggtttgctttggaaatggt

SEQ ID NO: 3256 - DNA, 1017 bp, Zea mays
ctgcagagataagatgtgacgcgttattagtatatgaatataaaaatgagcctgctttttgttagtatgctgagcatgaccatgtaaatggctcaacttttttaaaattaagatcatagttattaaggcggtaaggcgagcgcccccccttttacctttcaagtggtaaggcgaggcgacaccttaattatatatataaaaatatataaaattagaccaaatattatttatatttcactaattcaaaggtaataagcaagttagcatacctataagacctagtaggcccattttagcctagtaaaagagagaaatagaaaaaagaaaaaagcccactagtcaacctagtctagcccaacagttttagggttacctcacccaacacccctcagttctccctctccctccccacgtctctccttctccctgctcgccgccaccgccacgacctgcgcacctcagccgccgcgccctgcacgctgccgccagcgggacctgcgcacagctgccgccatgatttgtgcgcctcagccaccatgtcctgccgccggcgggacctgtgcgccaccatcgccgcgctctgcgcgcggttgctgcctcttccccgcgcaccgcctcagccttttccccacgccttacactcacggtaaggcgaccacgacgccttgccctccagcctcgccttaccgctttagcgacgctaagcatgattaagatgcatatttgactggatcaagaggtagacccttccatgtattacccatacacattatagtaaacatcgtttcaattattttgcttaaagtgatctaatactggttagggcttttatcctttcgccatagagtcccaaattttttttagtaaatacccatgcagaaaatttacattctcaatacccatctgtgcttacatggctatgttctttgcagaatacctgtttccttcttaatagatttatctaaagtgttcttcatttttaggttgatatatcaagagatgctgcaggcatgcaag

SEQ ID NO: 3257 - DNA, 1199 bp, Zea mays
caattagcgtctagccatgcaccaccaccactcaactaccgtctagcaaccatggagacagaccggagacagcagcagtagtgcagctcgcaatatgcaaggcacacaacagcgcgcacaccagcatcgatttaaatttatttttatgtttatagggataggatggatatatttctcgtcaagaaaaaaaagatgattctaatacaacacttggactaataaaagccaagtagagcgaaatttctccttttacatgctcttgcttttcatggacatgatgaactatatgatttagcattatcttagttcagtctaaaaaattagccttatcttatttcagtttaattttttatccttatcttagtagaccctcctttaatccattcctagatccgccactggttagcatcctgtattactttacagagcatacgcttgtatgacaaataagatgcaatatcaccgtaggactaaaaacaaaattcaaatatgactatagctagtaattacattatgtactatttagtaaatatccagttatctggtactatcgaggatacctctttcttattatgaactgaattagtagaaagctgtagctgagagcaccgtactctaaatttcaatgtggatagtccctgtccccctatacaagagcaagttaagaaaaattgacgtgatgttagaatcacaatgcatcaacagaacaaaaaaacatctaaaaacagagcacatccacctcacccaaaaagtagctactattcatggcgactgggaatccaggaggaagcagccatgactctaaccaaggaagccttgatgatcttaactgaaaattactagccttcatacagccttcctttctaaatgtctggtgatgctgatgctagcaagcagtggtcggtccagtatagaagaggggcgtagcgtatacatgtacaccgataatttgaaagaaagaagttagcaggcatgatacatgtatgacagaattaggtcagttccggacacagatagtttatattggagtttgggtgcaccgtgcacggtttcgcacagcatgaagggagaaggggcgagaatacctggtgcgggttctcgccgacgaagaacccaatgaagacctagcgaagggctcagtcgctcgaccagcgtcgccgcaattgaagaggcgagttgaatcaagtgcgaggcggcgt

SEQ ID NO: 3258 - DNA, 1031 bp, Zea mays
gacctgcagtcataagctagttttcttcatattgtgctccagggcagtgatttgggtcccatgttcaagatctaaagttgatagcctgatagaaaaaaaaatcagtgtcattactttcaagacgaggtaaatgttgattcatctaacttccatctgttatgtgcagagggtactgtatttgctattagtttcctacaagacctgaacatttcagttagcatagcgcacaacgtaatgaaaaatatttgcccttttgtttgagacatgaatgaaattcgacctatgtgcttctgtagaatcctataacattttgttgagaattaaaggaattcaacgaggacaattcatgggtttatccagcacttgttattaccccagctgcaatgtactactatctttcatcttcgttttgtttaagaacaccaacaatccaaaagggttatctagttagttttcagtaggaattcgaatcgcgggttttgctcagctgagccgattggattgctccgaaggaaaatctctggtcattcctacaaaataaaatggagccacctaatggatgtaattcataggcaacctgggaactcaaacttcataggcaagttggcgactttcagtttcctcctagttctaaatctcaagaaattacccacaacatccctaggacgtctcaacaactctcctctaccattacgtatcacaccactctgcacaaagattgacggttggggcaaaacaaaacaaataaaagctctaaaattatctcgacgaaatggtttcctgcgtctcggagaagacagacagagagattcagatagggaaacgtaccctgcgacggagaccacccggcccgactccgactggctggccggccgggcagccggggcctcgccggccgatgggcgccccgctgattccaccacgaaacttcgccgccgcccgggacgtggcgccgacggcgagcagcttcgccttgcctcctccctcctcaacctgcggcctgtactactggcactctgcaggcatgcaag

SEQ ID NO: 3259 - DNA, 1211 bp, Zea mays
acgactctacacagtagatcgacgcagagaagcatatgctacaatactgcattcagcaagtgaatacgtctgcggcgcgatctcggcagcgcaaagcatccgccaggcaggatcaacaagagacctggtcatccttgtggacgacaccataagtgaccaccaccgcaaggggcttggaggcggcggggtggaaggtcagagtgatccagaggatccggaaccccaaggcggagcgcgacgcctacaacgagtggaactacagcaagttcaggctgtggcagctcacggattacgacaaggtcatcttcatcgacgcggatctcctcatcctgaggaacatcgacttcctgttcgccatgccggagatcacggcgacggggaacaacgccacgctcttcaactcgggagtgatggtcgtcgagccttcgaactgcacgttccggctactgatggagcacatcgacgagataacgtcgtacaacggcggggaccaggggtacctgaacgagatattcacgtggtggcaccggatcccgaagcacatgaacttcctgaagcatttctgggagggcgacgagcgaggaggtgaaggcgaagaagacccggctgttcggcgcgaacccgccggtcctgtacgtgctccactacctggggcggaagccgtggctgtgcttccgggactacgactgcaactggaacgtggagatcctgcgggagttcgcgagcgacgtcgcgcacgcccgctggtggaaggtgcacaaccggatgcccaggaagctccagagctactgccttctgaggtcgagcctgaaggccgggctggagtgggagcggcggcaggccgagaaggcgaacttcacggacgggcattggaagcggaacgtaacggacccgaggctgaagacctgcttcgagaagttctgcttctgggagagcatgctgtggcactggggcgagaagagcaagagcaactcgacgacgacgcggaacagcgccgtgccggcaacgacaacgacaacgcctgctgctgcgagcctgtcgagctcgtgagacttgtagatagctctgtctgccgagagtagtataccagtaccagatacagaacttctgaagctctccatacatacatagcgacagctctgtaaaggtagctatgtaggccttttccttccccgaatgactatataccttcgtcttcgttcgccgtcaca

SEQ ID NO: 3260 - DNA, 1257 bp, Zea mays
caacggcgtggccaccatcatcggcaagatcggtctggtattcgcggtgctcacgttcaccgttctcatggcacggtttctcgtgggcaaggcgcacgcgcccggcgggctcttgcggtggaggggagcagatgcgctctccatactcaacttcttcgccgtcgcggtcaccatcatcgtagtcgccgtgcccgaggggctgccgctcgccgtcacgctcagcctggcattcgccatgaagaagctcatggaggagcgcgcgctcgtgcggcacctctcggcgtgcgagaccatggggtcggcgagctgcatctgcacggacaagaccggcacgctcaccacgaaccacatggtcgtcgagaaggtctgggcgtccggggcggcgcagacagtgagcaccgccaagggtttcgacgagctcaggtcatcggtgtcggagaacttcacgagggtgctcctggagggagtcttccactgctccggctcggaggtcgtcacgggcaaggacggaaggactagcgtcatgggcacgcccaccgagacggccatcctggagttcggtctcgaggtggagaagtacatgggggtggagcacgccggcgccaagaagctcaaggtggagcccttcaactcggtgaagaagaccatggccgtggtcatcgcgtccccgaacagcggccggccacccgcgcgcgttcctcaagggtgcgtccgaggtggtcctgagccggtgcagctccgtcatcgacggcaccgggagcgtggagaagctcacggaggcgaaggcgaagcgcgtgggcagcgccatcgacgcgttcgcgtgcgaggcgctgcgcacgctctgcctggcgtaccaggacgtcggcggcgctggcgacgtccccggcgacgggtacacgctcatcgcggtgttcggcatcaaggacccgctccgcccgggcgtgagggaggccgtgaggacgtgccacgatgcgggcatcaacgtccgcatggtcaccggcgacaacatcaacacggcgaaggcgatcgcgagggagtgtggcatcctcaccgatgacggcgtcgccatcgagggacccgagttccgggcgaagagacccaacgagatgagagagctcatacccaaaatccaggtacgtagctggaggagtacatctcttcttcctctctgaagaatgattttttttttttttttttttttgcatggggaaagtgacccgattggcctgtcgtctgtgtctgtctgcaggcatgcaa

SEQ ID NO: 3261 - DNA, 792 bp, Zea mays
ttgcatgcctgcagcacgctcaagactgacaacaaaccgcttagtccacctcctcgatcttggggccagggccgccgctgccggcaggggcgtcctcgtccatgccgccagcgccgcccatgtcttcacccgcgccctggtacatcttggcgatgatggggttgcagaggctctccagctccttcatcttgtcctcgaactcgtccgcctcggcgagctggttggcgtccagccagctgatggccgcgtcgatggcgtcctcgatcttcttcttgtcatcggccggcagcttggacgcaatcttctcgtccttgatcgtgttgcgcatgttgtaggagtagttctccagcgagttcttggcctccaccttcttcttgtgctcctcatcctcagacttgtacttctcagcgtcctgaaccatcttctcgatctcctccttggagagacggcccttgtcgttggtgattgtgatcttgttcttctgccccgttgtcttgtcctcggcagacacgttcaggatgccgttggcgtcgatgtcaaagcacacggtgatctgtggcacaccacggggtgcaggggggatgccggagagctcgaacttgcccagcaggttgttgtcgcgtgtccgggtccttttaccctggtagacctggatcaggacaccgggctggttgtcctagtaggtggagaatacctgctccttcttggggggatgggggggttcctcgggatcagcactgtcataacctctccagcgtctccaaacccagggacagagggtgacgtccagca

SEQ ID NO: 3262 - DNA, 1051 bp, Zea mays
atgcaaaagaacgaatagctccaacaatatgactcctctcctactaataaaacgcaaagctaccaaactattgaaaaatatgcaaaataaagaaagttagggggtaaacaaaagccctagatggaacacaattagatagataggtcatgtattgccactaacaaatcgtgaacggtgaagaactcgtagagaaaccgtacaacaggttcggttgaacacgacgaggtcggggacacaatacgatacgacgggcgctgggacagcgcatggagaatatatgacaagtgatgcgcgtacaaaatacgatttacagtacaggtaccttcagcaaacattggctaaccttaatttggagggcgcagccgcagacagagcaaaaatgcaggttttccattggcttggacattgctgcaccaaaagatttttgactgctaacgacttgattaaggggatggctaaacgatctcatccgtgagccttgtggattggagcccgaaacaccgtaacacttatatgtaaaggctatcttcagaaaaaggagatctgggcaatattacattacagagctggtgccatattttccatagctgacgtttggaaaagatgcagagctacctatatggctatatcacaagccgctaaagaaggtttttgatggaatcataaactatttctggtggcacatctgaagggagagcaatagaaaaaaaacattccaacaaaagaccacacgtccaataaaaagtcgcttccgtgtgcaaggatgacattatttcacgagcaacttggctttgcagccaggtaatattacagcgcagttcgtccgttctctttgtccctggcctcatcttctttttaacttacagatgctatatatgcatatagcgtagagaaccacgtgcacacgccatgtagcaatttatcattagcgtctgtcaatttatccctggtctcgtcgctggctgtgccactcacagtctgtcagctccaagggagatggtacatgcgacggagcagaaagacatctgaatggcggtggaaatcagaaaca

SEQ ID NO: 3263 - DNA, 1191 bp, Zea mays
tccacctaacaatctgaattctctgtcaagtttcacacggtacagtgaaagacttgcaaggggcactgaattggcaggttattgctgctcccttttcccagactgcttgtgtattgtgctccatcgtgtaacgctactgtgcagaaatagatcacagaaagaaaactttcgtcagcgatatagaattcaaaatggtgatcgtggtgcacggttttgaatctttcttgcggcactctagtaccaagttcatctttgtactgagcaaaagcttctgcttgaactgtgccactgactggcggacccaagtgcacccatgggctttttatactaattcaatctgtcttccactcttgaatttccatgatggagacgcaaatattgatgaactataatttactaggaattccttagataaaacaaatgggtaagcacgttatcaccagggctttctgatcttagtgatctgccatgcacgtaacgaagtacacgaataacaaactcaaccaatctctaagctgatccaaccatgtctcattcaacagatgggagccaagtccagggagctccacagcagcacgtcgccgtcaccgtcgctcgcctcagacgacgagcttgtcgcctccggggcgccgccaccgggtgaacgctcctcacgaggcggcttgacttcctctgctgtatccgttgatggttcctgctcgtgctgctgctgaactatctctcgctgcttcttccggcacgcctccctcagcccggagagctgatcacgcacggcgtggccaccggcggcggcgccgaggcgcatcttgatgcactccgagacgccgctgagcgcgtagagcgacgccgagatcttcctctcgtagtccatcctgctcatcatcagctcctgaacggccgtggccggctcgccggcggcggcctccaccgcgccgccgagctctgccgccaccacctcgaacggcgagcagagcccgccctcgcaccccgcgcccggcgacgcggtctgctggtccatgaactggaagtccagctcctcctcctcctcttcctcctcttcctcctcttcttcctcgtcctctatttcttgtgagctgttctcgtcgctgccgcagtcgtagctcaagaagtcgtcgacttggaaggcgcactcctcgccgccgccgtacggttccgcgcaccgccaagcgt

SEQ ID NO: 3264 - DNA, 652 bp, Zea mays
agcgggaacggagttggaaattgtggggggaggaccggagtttcgtagccgtcggcgacgacggacgtggtcctgccctttctcttccttccctccgcatctgatctgcctgtctgcgctgctcgtctggtctggtctggtctggcctggcaacccccctcctcccctcttcggtcgcctttgccttttgcctttgcagcctttttgcaccctgcctacctcccctcctagtctcctactaccccttcctccccctccgcctcccaccggcccacccccactctcttcttctccactcggccgggcactctccttgccccggcctcacaccatcacatgtccacaatgctgccgtcctccagatcgaggtgacttactttcgccccctcccctgctcccggactcttgcgttttctctctcttttatttatttatttgctcgcgctcttgttccgcctgtcggttttctcttctttcttgaatgacagatctagtatccagtaatccagttagagccgcctgtcgctcttgctgccgtagttgcctccttgtcaaatatgtgtatactgggctactggctcgtgtgatttccgccacacgccaatgtgccctttctttaaaagccgtttcatctttgcaaaatctcgaaatc

SEQ ID NO: 3265 - DNA, 1287 bp, Zea mays
tccatggactttggctaaaggacaagacaccttcaccccaattagtgcagtagtaagcaatgatttttcttccctgtgcttggagttggttggtggtggataaggacaatatgttttatttatttgtactcacttgttataattacacctcaatgaatcaatgccatattcaggttagtcatgcagaagtgttgttagataaaaacacttgatctttgttgccttccatgctctccgcaggcatctagtgacatgaaatgtgtaatcccatcattattacacaccatgttttttacttaagttaacaataatttctccatcaaccaggttccaaaatcagctgtcactaatcccgatgatctcgagctctggctgaaggtctctcaaatgtgtactgaatttgtttaatgttacctgaattgctagagcatatggtgtacaattgactaccaactgcatccaggtagatgatgaactaaggcagaaaggaccgacaagcgacatgctattcaagattccttttctgataagctatatcagttccatcatgacattaatggagggtgatgtgatactaacaggtagtgacatcttctctacgtgtagcttgtttttgcatctgaagtttctctgtggcttattcatttgttcctcaacaggtactcctgagggtgtgggtcctgtccgagtaggtcagaagattacagctggtataactgacctaattgatgttgagttcgatgttcagaggcgcaatcggtcattttccacatgatgcaataagcaagaaagtaatggtaagcaacataagatagtaaaggtgcatgcttttatttgttgtgtgactgaaaataatatcaggcaattgatttcatataagcaaaacctgtttacccatagcaagaccagtctgatcagagagggcaccatcgtatccatgttcgaggacatccttgaagatgtactacaattggacagccagatggtgtatatgtatagggtatagggccaatatgccagaactgtgttatggggcatcatcataacaaattgtgctaaagctacgttgtcctactccacattctcacatatacatatcaatcaaaacctgaagtacatgaactacttatcagttagaagctgtgctgtatgaactattgttaccgtgatttctttaaaagaatatatgctattgttggattagttataatgatcttaacaatttcaatagtaattattgatgcctatgcgggattcagcgacttaattatttctggctcgtgctgt

SEQ ID NO: 3266 - DNA, 1303 bp, Zea mays
ttgcatgcctgcagcccaagcaaactaagtggggtctcaatgtcactgatccactgccaattctgaagagcatgggccaccgatctagaagaaatagctcgtttcccaacattagccacaacagcaggggcaaaatcttggatacaagacccatccaaccaccgatctgtccaaaataaagtattatgcccattaccaaccagagaaacaatagaagcagtaaagaatctcttgacaatttgttgaataggcaagtccaaaccagaccacggcttggtaggatcagttttttctagccatagccatctagcttgtagcgcccaactctggtacagcaggttagaaatcccaagcccaccgagatccaaaggccttgtaacaatgtcccacgacacaaggcaattgccaccatttacctcctttcttcctttccaaataaatcctctccgaatcttatctatagaattaatcacccacttggggattttcattgcaatgagaaggtagatcgggatggctgaaagcacaaagcgcaccatagttgtcctgccagcgaaactaagcaaccgagccttccaattaggaagtcggtctgcaactttctcgacccaaaccatgagatcagattttctgagctttttatctgaaattggcagtcccaaataagtgcaaggaaaggaggaagcagtgcactgaagagtattgcagcccatctgtaccgcctgctcattacacctgattgggataacaaaacttttttgcaaattagataccaatcccgtggctgaaccaaagcagtccaaaatcgttttgacacattgaaaatcttcctcaaaaggttgaacaaaaaggaccacatcatcagcataaatggacagtctgttacggatattagcaccctccaagctgtgcagcagccccctattttcagccaggttaaacagactgttgagaatatccataaccaatacgaacaacattggagagagaggatcaccctggcgaagccctctccggtgcctaataggaataccaggagacccattcaaaagcacttgcgtagaagaagaggccagaatattggagatcatatttcgccacacaggaccaaacccaagatatgaaagcacttcaagcaagaaggcccaagagaccgagtcaaatgctttggagatatccagcttcaagagcaaactagagactctcttcttgtggagagatttaattgaatgctgcaccaacataaagttatcgtgaatcgatcggcctctcacaaaggcactctgattagatgccaccaact

SEQ ID NO: 3267 - DNA, 1132 bp, Zea mays
atgttgggcttcatgtcccggaaccacccgatctgggtgtggagcgagccggagctccacacggcgcgcgccagcccgtgctcctcgaagaaggccatgtccagcgccgtggcgcccgtgatggcgaagttggcgccgcggcggaacgtcgcgttcttcgccttggacggtggcagcagcggcagccccagctcctgcgctgctcacgcgagcgcaccacagacagacagacagacagacggttcatcagctcctgcgcgggttgccaacctctaccgggaaagcggacgcatgcgttgcctaccgatgaagtcgatgacgacgcggccgtcggagacgcgccccgtgggatagccgaagtaggtcatgccgtacggcgcgtgcgccgtggccaagtagtccgggatgccgtccacgcacaggttgccggtgtccgacagggagtcgccgaagctgaagacggccgcgtactcccgcgccacggccgcccgcgccagcagcagagccaggcacgccagcagcagacgcgtcatggtgcagcggcggtggccctgcttcggtcccgcgtccacggcggccctgccctgactgcttaaactttcctgtcgggacccggtcgtcggacgggcacacggcctgccggctcaacacggatgttgttgttaatgatgatagatggattgaagagcaagattactaccagttccacggtttgatcaggtcctctggttcgaagtccagacatggacaggccaaagcgagtggttaatacactgatgtcacaggcagacgacggcatcaagttgagtttcttcttctttccatttcaaagtcagcattcttgattatactggtgtcttattacaacaatgaaagaatatacaatggggtggctgccctcaatcgcaatatctaaacaaaatggttcaaaacttgggcagccacgagaactaataaactttccagtaaatataaaccgagaagctaacggtagaattccgggaaaaatggccagcctttggcctctgtttctgtaaggggggtcacgttagtctttagtccctgtttctgaggttggttagtcttctagttcatgtacccacggcagttaggagccttgcacaggcatgga

SEQ ID NO: 3268 - DNA, 1025 bp, Zea mays
aggtactctagggatatcagaatgatgagcaagcacagcaactgctaactcagctggctgtaacaccaacctgtcccacttcgtcgttctctctctcacaaggaatcatccgttataagggccaagtgtggctgggaaacaatagtgttgtgcaatccaaggttatttcagcaatgcacgattcagcgcttggtggacattcgggttttccggtaacatatcgttgcattaaacaactgttttactggaagggcatgaaacatgacattcaccagtacatccaatcttgcagcacctgtcaacaggccaaaccggatagatctcactacccaagactgttggcacctcttcccattccgcctcatgtgtgacattctatttctatggactttatagaaggacttcccaagtctggattgatggactgcattctcgtggtcgtggatcgtttctccaagtatagtcactttctcgctctgtcacatcctttttcagcaaccaaggtggccaaattatttctggaccatatatacaagttgcatggaatgcccgacaacattgtatccgatcgcgatcgagtattcaccagtacattttggcagcaattattccatctcacgggggctcagttgtgcatgagttcagcgtatcacccctaatctgacggtcagacggaacgggtaaatcaatgcatcgagacatatatttgcgatgttttgtgcacgcgtgtccaaacaaatggtttcagtggcttccggtggcagaattctggtacaacactaactttcattccgccatagccagatcacctttcgaagtgttatatggacatacacctaagcattttggactccagatcggtttagcagttgcaactcctgatttggcgacatggctccaagagagggaaatggtgtccaatctggtgaaacaacatttgtacagagcacaagcacgaatgaagaagcaagccgacaagcacagatcagaaagggagttctaggtgggagatcaagtttatctta

SEQ ID NO: 3269 - DNA, 1019 bp, Zea mays
cgtactgggctatgggctgtgaacctgttgccagtcgggtgagtgcacgaggccccgcccactttctgcttctcccgtattgccgtgccctcttccctctccctgctcgctctctccctctcgtcgctttctttcctggtcgcgccgcccttcatcaggtctcctccgccttagccggtgaagagcgaccaggtacgcgtacgccccttccccttccttcacctccctctgcgaaatcgagcacccgaaaccctaactaagctacatgtattcggattcggatccgatccaatttccatggatatgtgtactacatatccactaacttcgatttctggcaaaaactattgtcggataaaccatgccctataaatgatgcgcccatgactatgctgcatgtttcagttgattttttttctctcgaaaagttgttgagttgcgaaatttcagagcataggctcctcactaagtttcgcctcatgtttgcattttaggcccaataaataatcaccatggctcatcaaaagcgtgaaggcagctacgccgatgatgatagtacatccaagcgcatcaaaggcaccgacactgcttctgaaacgggggacagtgtagagtctagtgtttcacagcaaatggatgctgaagctaggaggacctgccaaaaggaaagcgaagcaccatcggacaaatgcgtttcagatggggaatgcgctgcaaactctaaggttttgggtgagcagaagatggtattgactgttgtcgaggctgatgcggcggacgacaagggttgcaggcacactatggaggacgcctgggtggtgctccccaatgctggtgcagaatccccaggaagcttgaggtcatcatctttcctgttcatattaagtactcgcatgcattgctgatgtatgtagtttgaggtgtactggatggtgcaggtgcgtacattttgcgatttatgacgggcatggtggtcgcttggcggcagattatgcacagaagcatttgcatcagaatgt

SEQ ID NO: 3270 - DNA, 1236 bp, Zea mays
agggcagcaatcactgtcctataggtcaccacatcaggtttcactccatggtctctcatttcattgaagatgatcatagccttatctagcattccacagtttgcatatgccttgatcagcacattaaaagtataaaagtcaggtgcaataccgtcacctagcatcaaatcgaagagatctgtcatatcaactaaacatcctttagtagcgtacccgttgagcataatattgtaggagaaaacatcaggattttggcccttcattgccattgtgtcaaaaacatctctagcttccttgatttttccatacttgcaaagggaacccatcaacatgctcaaagtaacaacatctggtaagatgctgtgtcttctcatttctttaaataccctaaccgcctccttccactgtcctgtggaggagtatccatatatcaagttattatatgtccagttatttggcagaacacgtttattgaccatttgtcgaaggaaagcctctgccttgtccattgctcttgccttacacagggcatggaccacagagttataagtcactaaatcaggtggaatgccccgctgtaccatttctttgaatagatcacatgctttatttacgtcaccctccttaaaaaagccgtcgattactgtattgtaggcaaccacgttgggcgagcagacagctcccccttcagccatcatccgtagcaaatcatctgcctggccactctttccttggtcgcagaggctcttcagaagtatgctgtacgagaaaacatcgggcacacagcccaactcaggcgttctgtggagaaggatgtccaaagcctcgtctgtccgcttcgcttcacaaaagccctcgagaaggtggttagcgatgatgatattgacgcgcaagcctgtcctgaggagctggccgaagaacgccagcgctagctctgggcggtgcgcgcgggtgcagcagtccatgaggatggcgtaggtgtgggatgtgggggacagcacccgcggtccttgagcccgagacgccgcgcggttgaagagcgcgacggcgagggcagggccactcccgcaggcggcggaggacggcgcacgcgcgagcgccgcgaggaagccgttcagatctcgatcgagaacgggcgtgcctcgacgctgcaactcgtcgagcaggtcgtgtgcctcctcagggcggagcgtcccctcccgcacgcgcgccgtggcggcggctaggaaggggggc

SEQ ID NO: 3271 - DNA, 781 bp, Zea mays
tttgcatgcctgcaggcatgtcgacgtaatagtttacatggttgaagcaaagtgcaagaggctggaaaggcaaagtgactcgtgacgactgagctactgtgtttgtcgctccattagtgcctgcaacaatagtataggatacaaagatatgcacaatacattaatccatgcaccagaaatttaatagaaggcatcgttacctcgtaaattaaaagatgaaaagtccaaccaatatacaagacaaaagattggtattatattgcattaagaaaaaaaaaatcttcatgcaagcggagaaattgaaacatgcatgtgtgtttgcacctggatcactgtatacaacttgggacatttcatctttgcttcttcctttcaataccattacatcatcttcaccttctgaaactagggcattggagccactactagctgaaaagaacaaaacatataaaaataagtctcgatcgtttaccaaaaagtgtccacaacaaatatatgaagaaaagaagaatagtgcttacgacttaaatatgtaagggcccaaaggtagagcatgttgaacaaaataatgaatcctacaagggctccaatggaaagccaaaatccccattctccagtaaacaatcctttggatttaagaattgctttgcctactgttggcgcgtcaataatcgtgtcattgtttggctgtagtaaaaaaaaagactatcattaaatccaaaactaaaaaaacaccctttccaagattagtttattaaaatcatgggttatataaaaaaaa

SEQ ID NO: 3272 - DNA, 1010 bp, Zea mays
gggataaaggtatttggaggatccctggacaatgtgaaaggctgcactgatcaggtggagaatggaatgaagttgtcacttgggaaggacattgagatactatgcctacacacgccttggtatgctgtttgctatgctccttcctttctttattataacgtaagtcccacctctccatttatggtataatgtcagtgctgatgcataccagctcaaagaactatgttggctcaacgtttgattgtcattcaagcatgttttataataagtaaacttatgtgggacccatgggtgactcaggagtggtttgcatgtgaggcttaaatagccgaattctgtgtggggacagaacattattatgcaatagaacagtgagtgcaggaacctttcgtcggcgcattatccctctcaatttctcctgtgtctcatgccttggcgagtggttgtcggcaaacaaggctcgtgacagctggtatcagcgcagtgtaggtggcaggattattttagaaactatgtagtacaacaataaccattgccaaagttgtatgaaatttacacaagtcaccatctccaaagtcatatgaaaattatggactcaatagaataacagttcactttagaaattttgctgttctctttggtagacacattcttgtattcttggaatctccatgcaactgatgagtggcatgaccatgtcattaatcctgagaaacttagttgagctctttgataaaatctcaatttagtgtgagccttatatatgtgttttctctgtaaaatcttgttgattaggtccctatcatttttctttcaacagccacactaaaggtcatatcagctactatgttactagtaaggagggtgaagatccagcggtcttcaccggagataccttggttagtatacacatctttcttagagcgatggtttcctttggttgttatatcataacctttttttttttgaaatacagttcattgctgggtgtgggaagttttttgagggtt

SEQ ID NO: 3273 - DNA, 1080 bp, Zea mays
agatttcaaagaacatgtgtgtacacatggcatttcatagaacgactgttcacctgtttttgagcccaaggtagcaccaatcataaatcacagttgccctcagagatacatgcgcatcttattctcttgtagtatcacaattacagattgaataactggagcacaataaagagagctcacaagttgggtaacagagatatagaccacaacacttggttacccattgccgcttatgccatgtcagacaatccacatgagaaaaaaaatactgatttcgactcaactgtgcaggcccgcctggcacaaccagatgctctaagcaagggtgtagtattccctctcgtgctggtcagagtcgagagcaacaaggacatagatcgcgtagatgattccggggacgtagccaaggattgtgagcagcaggcagatgcagaactctatctgttaagaagacaagaaagcgtaccgtcagtatgttccagggatagtaaaatgtcatcaacagagttaccacgacaaaaacagacaattgtatatgtcactgctccatcccacgctgagtttcattcatggttcagattagtcaaattagttgtctgatttacccactccttcccatcaggagaaaaattgtggttgcgaaatggatgctgctggcttgtcctataacagagcatcactgtcacatcacatcaacgtaatgggcttctgagggctacggaaacatcaaacatgaatttatgacctagtcaaatggccaacacgggaacgaagcagatcaggtactacagtttatgcagggatctacgagggcacggcataagattcagaggcagttcatcgtttgacgcccctatattttggaattcagaccaagcacggtccgaatacgcttggagccgaacaatccgcctactgaaacctagcccgaagctaggcaggctcgcgggggcaaacgggccgtgaaatcaactagctaggaatcaacgagcaggtccgcgccaagaggcgtgcgcacggagcatcatcggatcatggggtgaccggtggcgaagggaaggaagggaaggggggcttact

SEQ ID NO: 3274 - DNA, 1141 bp, Zea mays
tcagggtgtgcagggtatgcgaccgctcagggccccaaggtccgtagggccccgtttatccatcttatatccaaatacatgtacgttgcggataaatttctattctcagttttttgttgcgtctctttgattttctggcaatcatctctttgaggtcgcgcagcagtctgcttgatgacaaatactaaaattggcgtgggaaggacggaaggtatggtacacctgtgcctgtcgcgttgcttaattctagcctaccggagggccgaccctaataatctatattgcttaatcctagtttagtttgctgaactttgtcttcagaaaatttgctctaatgtatttagatttggtttacggtgcattttaaggtttatgctagtttgacaaattaaaagtaaaaatactctctcaaaagtcaaaacaagtgcagagttatattacataatttgtataattttacgactcataaaataatgtaacagtgtctccagtcatcattttgaataacattgtgtaaatcaacaacttcttttattttttggatattatttaaaagttgaaaaaatagttgactcaaactttcgtatagggtcttcgtataaattttcgcttggggcccccaaaatgtcagaaccggccctgaccgtctgcgtctggctggccccggccggacggaccggacagatcgagcggcgccgttaactggaaggcgaacaagaaggcgagccagagagagagagagagagcacgcgcattgaggcgaggcccggggaccagtgcgggtggatctggaggcacggctgctcggtgctggggacctaaccttacccaatccgcctgtttcgttctctcattgcatgcctcccgccatcatcacgctgcactgcctgcttgctttgcttccatccatccctttcccttggttccttctcccttctccgatccatatggtattgctgctaccaggatattggatgccacacaaccatatgacgttggatttccggcagcccaaaatttagattgcgtacccctgcgctaatacgattgggagaggcctctgaatttctggttagattcccgccagccgcagcgcgcgcgacgtggctctaaatcaagagacacagacttgaatgctgct

SEQ ID NO: 3275 - DNA, 1019 bp, Zea mays
ttatagtccagggcctagatgataaccctatacaagtttagtgtcattgcctacttacactgtcagaagtgtacttgttggaatataagtgaattgtccacctcttcctttcagcttaaacttgggttgagctagttgatacatacaacttaatagggtatcaaagtcagaggtctcgagttcgaatcctagttagcgcaattaaataaaataattgatgttcgcttctattccacgtctgagaactaagagagcctcgacaagagggagagtgttggaatataagtgaattgtccaccttctcctatcagcttaggcttttgggttgaactgattagtgcatgcaacctaatagtattatataaaaatataggtcaaagagtgttcacataaatcttgcccccccccctagtctgattatttttcatgaaataagtttgtcttcaacttttcttgcgatgcattttcttcatttgtttattgtcaaaattgaaagcatatgagcactttagaagtttccctcatatcttccggcaaaccttatgtttggttacgtagtacctcaataccttaagaatttgaatatacttcgtagtttataggtgactatcgacaaaattactttttctggaatgaactggtaaaactttttctcgaaaagagcaagagaactgtgcctcgttatattaagaagaaagaaaagaaggtctaaagtagaccaggtaatggtataaggacttccttacggaggtcgaaaactcagtaacctgagaagatccatctaaacaaactaaaaaacactatgtgccaatctccgggattggggcagtaaggagggccaagctcttggcaacatccagttcccacatttctctttcttcctccgctcttctgatagctgtttccaagttaggagaaagaccatcaaatacgcatctatttctgtggttccaaattgtccaaagccccaggataattaacgagttgagaccttttctagcaatccgttgcagctggtc

SEQ ID NO: 3276 - DNA, 710 bp, Zea mays
  unsure (1)..(710): unsure at all n locations
aagcaactgaactgggaaagaaggccagggagttaaaaaaagctgctgaagccctacaccaagaagaaagaagtgggaacaagggccggaaatggcgcaaaaatgtgaaggctttagaaaaggtacatattgtattgaaattgctctttccacacattggtaatgtttgtatgttacttttacaaaaatgacaactatatttatccttttacatgtggtgtcataaaataatcccaagagattagttaatgtcatttgtcctttacagttgtaggcatgctacttcaaatacgtaaaagttatgtacctatttgtttggtgcaatggtaacaacttgggtccctgagggtgtcactactggggaatgctgcgctttgcaatactttagtcatgtctgtcgatgatcagaataaagaagttatcacttccaaaactttggcttaaagaaaacttggaagtatttttaacatgtatttatagaagtcattgcattttggagttttagtggttaacaagttctctagttgagttagtgtgaatgtgcatgccatattatgcttgtgtggtgttcatatggaatcatggtccttaattattgtagtgtagaccttttccccaatgttcctgccatatctttttttttgtattgtagtgaactagtgacactgactgctaaactcgctgtttcaaatatcangagttattactcc

SEQ ID NO: 3277 - DNA, 1074 bp, Zea mays
agcaccattgccctctctgaatttagcttcagatccatcagtcggcttcctacagcgttgcctgtgtttcttgcttttctttttgctcttccttcttgatggccttgcattatcactcggcttggtaaagctgttgactaagaaatctgaatcagacatgctattggatgttgtggtcttatcttccagtagccttgatgaattatcctgccatcttctgtgagatacatcttgagcattaaggtgcaggaacaaaatcgatggtgaggacgatgtttcagggttctcttctggagatgtaggtcgagatgaaggatcctcacttgcactctcggtgagcgatagtgatttgaagtcgtaacagaaattgaagggaataactgtcacaataacacacctggcaagtaagtgaataccacaattattaattaacaaaggataaccgaccaaggattggcagaggaaaaacattagaatggcattttgcttccaggtggaccgtaaaattctttgttgcaaacattttttttctgcaatctggcataaattaagggaggaagaaagataaaaacatgaggtcaactcagaaaggagagacataatgcataagctggtaatgtggaacaggtggaattagaatagaacatctgagtacctctgttgctgctgccttgcctcgaggcgagctacttgacgctcctggataaacgtagcaagcaaagcattagacagagcagagtttgcgcacattgtctcagtgaaactaagaaagttcaagggaaaaaaagtgcatacaaactgaaggttgagtgggttcttcctctctgatgatctcccaaacaggcggcgaggcctcctatttacaacagcaccagcaacagttctagaagacattccaagttcaggtggcatttcgcatgaatccttatcctgcaagtaggacagaagaaaaaatgcacatgagcaagtgcatgctgaagcgtggcagcttttgggcactccagtgacaaggaaatcagtcgatcctgcatgttggcctgcaggtcgactgttgagctcaccagggtaccgagc

SEQ ID NO: 3278 - DNA, 1123 bp, Zea mays
gggaatctgaaaacattaccacccttttcaggctagaattcttaggaagaccctaggcggtgggatgaggcaggttggagttctttctgccgctgcttatgttgctgttcgtgacaccgtgggaaagcttgcggatgatcacaggaaggctaaagccttggcaggtttcaaaaatttagtagtattttctttctttctttcttttgagtccaacttcacttcatttttgttgtgcacagttcacaagcactgaacagcccctctgctttgaaacaccttcactaatacatgcatatccaagatttcctattgtatataacctcttttcgttattctactaataaagtttcagcaaaacttttgtcgcacctccccccacccacaaaaaaaaaacatgcatacaaggaaaacaaacactgctcgtttcatggtatttctagaaaagaaaccagatccttgttagactgaattcctgaacccgtaactatgttttttttttcctcagagggcctgaagaaaattaaacagcttacggtggattcgtcttcagtcgagaccaatatggtcagtgtcaatgatgaagcgctatattttccttattttccacaatgtaaaccggaaaggtccagcatatgacattcctttactttgtataaggtgttcttcgatatcgtggatccacgcatttcaccgagcaagctatgccaagtcttggaacagcgcaatgttcttgcaatgccagcaagttcaaaaaggtgaaactccattccttttgcccccattacaagatgaagctccattcttcggtctcctttttcaattatagaaaacattcattggaggtgaccgataaatgggatctgaattctgtcggtgatatggtttcttttgaccaaaatttgggaaaggaactgtcaatttgcaagaaaaccatatagattctctccaaacaagttaacataaaaaacctacacataacataactttgagtgaatatcaaactccattggtaaacacagtcccaaattttacaacaaacagacctttaaatattgcaagctactgggttgattggttggcaggcaaatcatatcacatagcaagtcagaaccttaatctaaac

SEQ ID NO: 3279 - DNA, 846 bp, Zea mays
atcttgcatgcctgcagcacgacgccgacctccaccccggcgtcgcgggcctccgccagggacaccgtgccgggcgtcttgtcgatggacaccagctccaccttggccggccggcccaacccgaagtcagtctcgtacacaccgtaccgcggggacccgcccaccgacatcgggcgctccgggaccagcgacaggatcttgtggaaccacccgcctgccccatccagcacgccgccgtcgagcgccgcgacggccgcgccgatcgccgcggccgcagccgccacgccgtcgccgcccagcagctcgcccgtgcccacctccacgaagcacggccggaggcagttgcccaggtactcctgcgggatcggcggcgccaggcggcgccggcactccaccgagaacagcaggtgcgcgcggggccgctccccgccgcccacgcgtgccaggcaggcccacgccagcgcgcacgccaccgtgaacgccgagcagtggacgcggcccgtgccgccgccgtccgccgcgaccttggcggccacgcgccgcttcagcgcgtcgatgcggtcgcgggtgagcgcgaacgacgcgatgacaagcttcggctgtgggcctgccgccggcggcggaggcggaggcgggccgttgcctgccagctggcgcatttcgtcgagcgtcctgccggcgaggccctcggggtcggctgaccacgccacgggtccaagaaaaaggcgggcggcgggtacccgtcgttccgccgcccgcccgttttaggcccacgccgggcaacttggagcggggcccccaggttcccctgaatggaaagtggccgttgttaagcctgggaagttc

SEQ ID NO: 3280 - DNA, 919 bp, Zea mays
  unsure (1)..(919): unsure at all n locations
tccatgtacttcgcgttcacgctctccacctcctgcctgagcgcgttgacgtcgtcctccttcttgcccgccctgccgagcgcgccggccatctttgcctgctccgatagcagcacctgcaccacgacgcggagcggcagccgctcgttctgcgccgcgtggagccgcgcctcccgcgacagcttcccgcagtccaccgcccggcacagccgcttccgctcgtgctcggtcaccgtcggatgcgctttcaggtaggagtcgacggcgcggtacagctcgtcgtggcacacgcgtgccgactccggcaacgactcggccagcgcctggaatttgcccagggacaggttccggtcccgggacacctcggagaggtagctgtccatcaggctcgccatgcgcagcgctctggagctttgctgttcctgcttctccttgtcgcggccggactgctcctgcaccacgaattgctccaccagccgctgcacgaggtcgacgtcgtaggcggcctcggagcgggcgtaggggtacgacggcaccaggatgtcgagcagtttcgcctggtcgagctgcatgcccacgtgcttctccacctccgtgaccagcgccggcgccgccttgaggacgacggccaggcggagcagccggaggaggaagctgcatgagaggcagtccttctgcggtgggatgatgctgatcaggctctcgacgatcctnctctgctcactagcctncgttccgtctgcgcgtatcgccctcgctggcaacgatcatttgagacaccgcgctgcgcgcaccatgatgtgtcttgtgcagagcacgagaacattgagctcctgtgtgcctagcggcatcttgcgcgggaacccatgactaacatctacaccgcggcgtttgttcggcgctgatatgacactccagc

SEQ ID NO: 3281 - DNA, 792 bp, Zea mays
gagtccgtcgcggcgaaggcgtgcaccaaccccagggccgtgcgctgggcctacgctggcaggacgtcgtcgtcgcccaataagtcgcccacggccggcaccgccggcaacagccagcagcagcccgggccgccggccgactggtgggtggaggacatctgcgtgctgaggatcgatcacttcgtgcgcgtcgtcaccgccgtccaggccagaggcatgcggcccgacctcatcggggccgccatcacgcgctatgcctccaaatggctctcctccgctggcctcctcgccaacaaggacagccctgcatcgcgtggcggcggcggcggcggtgtgctccaaatgatcgttgccagcgagggcgatgacgcgcagacggagacggaggctagtgagcagaggaggatcgtcgagagcctgatcagcatcatcccaccgcagaaggactgcctctcatgcagcttcctcctccggctgctccgcctggccgtcgtcctcaaggcggcgccggcgctggtcacggaggtggagaagcacgtgggcatgcagctcgaccaggcgaaactgctcgacatcctggtgccgtcgtacccctacgcccgctccgaggccgcctacgacgtcgacctcgtgcagcggctggtggagcaattcgtggtgcaggagcagtccggccgcgacaaggagaagcaggaacagcacagctccagagcgctgcgcatggcgagcctgatggacagctacctctccgaggtgtcccgggaccggaacctggtccctgggcaatttcag

SEQ ID NO: 3282 - DNA, 1154 bp, Zea mays
tatatacaaaatatatacttgccctacaaatataacctcaagaggccagtgatagataccaatggtcatggaatcatggttggtactcatattgttaggaatttcgtggcatagccagtggaccaagctggaaaagaagacttatgctgttcatgatgaaaaaaagagatagtatattattgggctttaatagaatcgttttgtacttgaaagttctaatcgagatttttaaaggtgttgtttgcattgaaacctccactgatgttggcatatcttgtcttgactaagcgtcattttagcacacaattattgttgttaatcgattagacatgacagcttacatagaagaaaacaaagggctgaattgcaaatataacctataactctagcttaatcatattccttaactaacaggtcagatacaactccagagatgacgggccattccaaactaggaaaaacagtggtgacatcacaaaatgatccaagtgattagcaagggggcaaaatcaatgggtgcaggataatgcatagcaaccactggtactgatcatggcatcatgcaaagtgcattttactttagcatgccgcatatgtcgtatgtgagaacactgtcaaggtgttctactaagtactaacatcacaaaacagacagcttgaggtgtggccagagaaaatgcggagatgctgacttggagcgaaaagagaggccgcttagttgcatggataggctcatattttcctctaagtgaaccaaattttacaaatggtagatatgcaagggctggttttaaggtcagtcatgaccaagttcactagagatcagggaagacatccatgatgacaagaccatgtcatagaaactgcatcctagtgctggtgaacttaaaatacaagaattggtccaaaaaatgtcaacaggggaatagaaattaacgactatacctaaacagatgtgtccattactgtaaatgtgtggatgcatcggtgctggatgcagaaatataacctgcaacaaaggaagacaacattacaaaaaaaaaggcactaaaacccgaagcacacgcaaacgcaataatcaatcgggggagaagatattgacctgaggtgcctccatgggataatgctcggagaaatccacctgcaggcggcag

SEQ ID NO: 3283 - DNA, 758 bp, Zea mays
cagcttgcatgcctgcagatgaccactacaccaaaatcatacacttcctacggttttttaacttcctacaatttttataataaaccgtaggaaataaataacttccgagagacaactggtagctctaggaaataaacataacttcacatgctgacccgtgcgttctgtcaagcgagccgttaacttcctagaggcagccgtaggaagttagcatggtcagctaacttcctatggcctcctctaggaagttagcttttagttgctgatctgcggttgtggtcaaacaaaaagctaactttctactgctgacactaggaagttagcatgggtagctaacttcctacggcctcctctcgaaagttagatttcagcttttgaccagtcaaacgaaaagctaacttcctatagctggctttaggaagttagcatgggcagctaacttcctacggctggctttagaaagttagcgtgggcagctaacttcctacgacctcctctaggaagttacttaacttcctagagtacatgcacaaactctagtaagttttgtaacttcccctctaggaagttacttaacttcctagagtacatgcacaaactctaggaagttttgtaacttcctacggctttactctagcaagttatattttttatattaaacatctacttaaccttatcctcttctcttccctttctcactcccgtgtctcttccaccaaatcgaagccggcgccgtcgtacgttgcttccacccgtcg

SEQ ID NO: 3284 - DNA, 1185 bp, Zea mays
gtgcccatcaacctcttcaactaaactaccctggcgaaagctacagtcccacctaaataaatagcaaagaaagatcaaccagattactattatatactccctttgttttctattacaagacatttttcacatgcagtagagctgtgtgcctgtgtatcattatatgggaagaaaacagaaggggaagaccacttacaaacacacacaccccacacacaaagcgaactgtgtcattaggaccatactttggccaacaattactatttactccatgagtaccacacttatgtgatacaaaactaagcataagtaactatgtttaaatataaactaataatgtaaaaattgcgtcctttagaatacttgttggttaaaggcttgtcactacgaaataggcctaattcaaatgggggtatttgtattagggaaaccactaagttaaaggactagttgcttactcatatcttgttgcatccatgctcatcatcagcccaaaaatggcttcacatgtggcttccactactccaacagccctcatagctcggctacagcttcttgcctacatggcatgaggtagcatgttgtcatcaacttccagaattattttggagaagaaaaggcattacaattagaacatacaaggtattcaacttccagaagttcttcataaatgcgcaaccctgccaatgcaaaccggtaagccatcccaactttaaacaccctccaaggaaggattaacaccaaaggaaagaaacacagacttgccattttggcatcgaagtagtcgccaattcttcttagaatagagttgagtgggctcattctgaccggacataccaaaatcagcatctttggtccaatcatgtattgaatcgggaggacctaacaacagaaatcatatggtgaatcaaaacacaaatgctgcaaatcagtacacaacttcacaaatatcagctagcatgacttcttaccattccctatagttgtcctgcgaactaaagtaggtcgttcctcttcatcttcagctctagattagtaataagtttctagctaattcagtaaaatgccttacacaagatactcgaagacatggaatgtcacttacgcactgtcatgatctgacaaggagaactgccctccaaggtccatgtcaaagtctattgtagcgaacgacttatgggtttt

SEQ ID NO: 3285 - DNA, 1273 bp, Zea mays
ctgctgctctgcagtgtgccatcgcatgcacgttgcgcgcaaacgcaatataattagcgtatgcatgtatgtatatgcgtgcgtgtagcgtgtatctatagcatgccgagatcgatgaacagagagctcttacaatggagatcgcggcatgtgcgatgtcaatgacgtcaatgattgaaatgattgagccgtctgccaaatggattgcattacttgtcagcactactgaggcggcggccagtgtgattaattcagtaatatatatgtttttccaggaggccatgcattctgttctcccctgaaaaattatacgcacctctgtccatcactggaagatgcaagaacttgcgctcctgcatggtccgtagggcgtccagtataggcatgtcgaccgtggcaaattcagggtcaggggtcatgacctatacagtagtttgcattacatcatgtcatatatatagttaaaaaaaatgtatgaaactcaggtgtgtacttgctttacttaccttctctaccggagtcgcgtccgctgacaggttcttggcaaccaggcgcatcaagatatcccttgaactggcatgcatgacagaggcaagcagtgtattatgtatggcgagggttcgaattcataagggcaatgcctgaaagagagcaaatacaatgcgcatatgaaaattttattcagttcaaattcacttacgtcaggatgccttgcggcttgctccccacagccactacgactgaggtcgcatgcgcttccaccatcctcttggtcgctgcaaggaccgaatcaccaggcgacaccatgacgaccctgtcctccatgcatgtaaaagcttacagatatgagacgtcgatcgctatacacatattataatctagagaggataatttaaccaaacgtacgttgagtcttcgccgacaatggcagacaagcagggcctgaacatttgctccttgagagcttcgacgatggagtacttgtcgtcgccagccgcgacgttggcgatcgccgccttccccttctcggacgccctctccatccgggagatggcgtcgtagaggcacttggcgatgtccagcatggccaccacctcgccgttgtccaccaccggcaggtgcctgaacttgcctgatcgatcgatgcatcaaatggatcggtccatgagcatgcatcatgcacaagcagacaagacacacacggttattagtcatatgctatcattgtgcaggcaggttcttcgtagatctacgacgtgccttgaaccatctt

SEQ ID NO: 3286 - DNA, 1127 bp, Zea mays
ttctatggcaagacgtgcccggcggccgaaggcgtcatcagcgacatcgtcaacaacgaaatcgctatggaccggggcatctcccctggcctcattcgcctcttctttcacgactgcttcatcacggtaactagctagctagttagcactcacatttgctcatgcctatgctgcaatgcaagtgcaaccgcaccgtgagctggttctcgtgcagggttgcgacgcttccattctcctggacgagtcgcccgccggcgacgtcccagagaaggagtcgtccgccaacggcttcaccctggtcgggctcagaaccatcgacatcgccaagtccaccgtagagggcatgtgccccggcaaggtctcgtgcgcagacatcctggccttcgcggcgcgcgacgccgccgtggccgcgggcctcccgagatacgaggtcgcggcggggcgccgcgacggcatgcgctcgaacatggacgacctcccgggcaacttccccgtgccgggccaccacgtgccgcgcctcaccgagctcttcagccagcgggggctctcccaggaggacctcgtgctgctctccggcgcgcactccatcggcggcgcgcactgcttcatgttctccaaccgcatctacaacttctcccaggacgccgacgtcgaccccacgctggacccggagtacgccaagtggctgcgccagatgtgcccgccgcggcagcccggcgacgaccccgagcaagcgcccaaggtgaagttcgacgcgcagacgggggagcggctcgacgtcgcgtactactccgagctgctcgcccgccgcggcctgctcacctcggacaacgccctcatcgaggacccgcagacgagggcgatggtggagaacttcgcccggaacgagccactgtggcagcagaagttttcccaggcgatgcagaaggtcgggatgcttgacgtgctcatcggcgagggcaagggccaggtaaggaagcagtgccgcctggtgaacgggcaggagaaggaggagaagcagcagcagccgcaggaggagcaggaggagcagcagccaccggagctggaggaggaggagcagcagcagccgcatcagccacagcttccatggttcctgcaggcatgca

SEQ ID NO: 3287 - DNA, 1419 bp, Zea mays
tctatgtgacgtatattctgtatgcgggccttttggagtgtgcaggacaggttctgatgagcaatgcttctgcttgccaggtttcagaccagcttccgcaagaagttggcgtcttggagcatggagtcaaggatgtgttaggcaaacagatatccaatgtgctgagtcaaatatatcaagtggcataaaggagagtgatgcgtttctcaagatcaccaacatcaagttttcacaaaacccaataaaactgaaagtccaaagcatggaggggtgcagatctatatgcttgagtacttgctcttgcactgcatatgcacacaagcaggattgcaatatctggaatagtgaactctgggatcttaaacaactacctaatggtaatactgatggttcagatatgtatatacgtcttgcagcatctgatcatgtagttcaagatagcgaaaaaaaggcacaccatctgaggcttattgtgctatttgcagtgctgggtagtatttttatggcactatgtgctcttagcataacagttaagatgtttcaaaggacttcatctagaaaggctttctcagataattactctctcgtcgtctatgattactcgtttttgcggcactgcacaaagaacttttcagatagagtggggcaaggtagctttggttcagtgttcaaaggattgctcccagactccaaaccgatagctgtcaagaagcttcaaggcatgaaacaaggagagaagcaatttcacaccgaggtgagggctttagggaaaattcaccataacaatctagtccacctcattgggttctgcttgagaggggctgaaaggatgttggtgtatgactttatggtgaatggatctttagatgctcatctcttcaaggatgaaaagatattggattggaacactagatttttaattattctaggtgttgcaaagggattacagtatctccatgatgaatgtcaggagtgcatcatacattgtgatataaagcctgaaaacgtacttcttgatgtaaacttcagtccgaaactggctgactttggtctggcgaagcttatggatagacattttagcagggccttgacaactatgagaggaacagcagggtatcttgcaccagagtggattggaggtctgcccataacaccaaaagcagatgtgtacagctatggaatgatgctgtttgagatcatttcgggcagaaggaattcagaattgatggagagcggagccataaggtactttccagtgtgggccgcaataaggataagtgaaggtgacatttctgaaattttggatcccagactaagtgccgtgaattttcaagagctagagagagcatgcaaggttgcatgctggtgcattcaggacaatgaggctcacaggccaaccatgcgacagatagttcatat

SEQ ID NO: 3288 - DNA, 1085 bp, Zea mays
agcttgcatgcctgcagcagcacagcagcagctgattgagtatgaaaagaagctttttggttctaatgatggcagcatagcagctcaaccttttgctccagtggattcgctcccttctcttggatttggctttccaaaaccaccaggcgacatccaagcgcctacatttaatcagcaggctccagcatctatctttgagcgcgttaccccgaacagcttccccagtaatttcatattcggagccgaaagaactagtgatagtgatgcgaaacttccagatagcaacaatttcggtgtggtaaactcgtcgactgggagtgatagcatgatggacagctcctaggatggttttgccttcacggaggctatctccagcagcttaatcctcaactcctcatctctcgtttcaaatttcacttccactcttgtacaactatagcctgatatacaaaagaaatgtctcagtcgcaaatttagtcaggtttctcgggatgtttttttttatttctgagaaggaaacgcatttttgtaatagtatgttgtaatatttgccagtattactaaattgctgctgtgcattttaacaatcatgagtgtgcttttttatgtaacttttctagggtaattcacgataacaacttacgctggaaagtttgaatcaaaggttacacatgtgcttgttaagatgtacagatttgtgggctcggaaaatgtaattcacgataacaatcatgagtgtgcttgctcgctgctcgggcgctccagtcgcgaccaccccctcccccggctgtattcgcgacgactcggcttgctgcccctcgccccttcctccctgctccatggattagcatccgcacatcaggaaggtcttgaggaagctacgactgacactgaagaggcttcttgtggttgaaccctttgtcacctacgggtaatataacagcaacattccacaaggctatgatcggttatcttgttcttttttagtatcacgtttttttgtattcatcattgctcctgggagcatgttcaacagcaaagacatgctttcttttgtgacacaggaaaggcacatctgcagagcg

SEQ ID NO: 3289 - DNA, 1121 bp, Zea mays
ccataaggctcgtctcgccggcaccactggagccgaacacttcatgtacgaccttctccacgtccagcgcttcggcctccaccaccgcgccggagttagcatcgttttcatcaggcgacgggatgaacggcgggcgcgccacgtcgaggacgcggtcccagtcgacgcctctaaagaaggcgtggcgcttgacgccgcgcgcgcctagtcgcttcccggggtccttctcgaggagcctggtgatgaggtcgcacaacggcgtcgcttcgccgggcagctccggcggcgcggtgaggacgcggtgaaacgtctcccgccggctccggccccggaatggggtgcatccgtacagcatctcgtagatcaccacgccgaggccccaccagtccacggcgtagtcgtgcccgctgccggctacgatctccggcgccacgtagtcctccgtgcccacgaacgagttcgacttggctggcgtccgaacgcccggcggcgagcagcatgacgacgaagacgcggacggggcagtcatggaagtgaacaacggggactggggcgaagctacgtggcggcgggagaagcacgcgaaaaccgtagatgccttcgtgttcttgttcctgcgcctgtggcgatgtgaggaaggtaaaagcgagctggcgcgtgctggggccgcgtccggcggcggcgggggcagaggcggcggcaacgtggtagagaggtcgaagtcgacgagcatgacgtggcctgattcctggatgaggacgttctccggcttgaggtcgcggtacacgacgccgaggccgtgaaggtgctcgagcgcgagcaccagctccgccgcgtagaaccggatgacggattccgggaacgtggtctgggcgcgccagcggcgccggagcgacttgaggtctgccgccggggcagcggttgatgacgaagccgacgacggcgtcggtggccacgacgccgcggagggacgggagcagcgggtggcggagcgcgagcagaacgtcgcgctcgaaccagatcctccggtgcccgtctccgccgcacgtgcctcctgctggccccgccgctcccttgtgccgcgcggcggcgcgggacatggccttgagcgccatgggctc

SEQ ID NO: 3290 - DNA, 1297 bp, Zea mays
gtagaaagaagaaatcagaaccagagcatatgttctgattaattaaaaacgaatgcaaggtaatacaagttggaagcacacattgacaagacatgaaaaggcactaacaacgatattccaaataattattcagtcatgagaaataaaatagcatagaaagaacactgggaggctaaagaattgaagaagttcccaccagcatgcccgctttgtgatcaggctgagaaaaatatttaagacatccacatctcatgagcattcgcttgacagatttggaccctaattttacaatagctccatctgcccttttgctcaaggatccaatatttccttctctggttgtggtgtggcaccattaaaggcgttccaaaggatttgcgcaaaggcctcaatagtctgatcatcttagttgcttggggattatggaagcaccgaaatgcttgtgttttttaagctaatatgcctagcatagagatgctgcttcaatctatggccaatgagagtaatctatggtgtatagtgggagcttcagccttacatgagttccttgctaggttgttggtcttggatccctaggtctttggtcgtttaaggcagctggtcgtgtattcctagtttattttcgagtatgccgtattgactaaaccccatgtgggggtacctggaagggggtttcttacttccctcccaggagtgtctgtttactcctctaagtgaaatcatgtgcagctctcatgcgtagttcaagaaaaataattgaagaccttgcagattttactgccatgggatatatttgatggtaaccgtgtctgtgtcagtacactgactaaagagaccaaaaaatccatatggccttggtatgcgctaaaaggtggttgacagcctgcatgtatctaagatacctagctaaatgctgcaaattgtaaagctccctacaaacatagactaaataaattaaaataccaacagaaaatgaaaaagctctatcttctagaatatcacaagctcattttaatttggaaaaaaatccctcccttcgagaaaagaaagggcatacttatggtatgcgtatatggatcattctaataatctaatttggaatatgctgaaatttaaaaatctaacatatcatgaaaacagcttccagattcgggatggtaacctctctttcttcctccccatcatttttcagggtattttccttctcaagctccattggggccagacaaaccagtgccttccaagaaggtccaagcccttcctttcccctctctgatctcttggagcgtcgtttctg

SEQ ID NO: 3291 - DNA, 1345 bp, Zea mays
aatggccccttcatttcggtaggttcttgatggcaaaggcacatatctcgttgccagctgattggcattgcactcaaggaatcgtacggacagagccatttcgccacggctgagttgagctcaggatggtatccagtgtatgtggcatccaattcctggcagtaactggagttgaccagtatacatatcaaattccaacagttcaaactgacaaacgtttcagacttcttccatgcagaatttggttctgcatgctctggttgatgaacaatgctgctgtacttggatcatcaaaagaacaacaaacaatgtatcggtttcagacacaggtagttaggacttaggatagtgttatcgatagcaagaaaaacgcaactttgaagagggacatcaagtaaactctgacagagaaacatcaagtgaacttaaaacttgtatagagcattgtacgatcacacacacacacacacacactactatgttttgtgtcactcatctcatccgccactgatttcttggaacgatcagatcagatgagatcagatgggcgcagtcctcgggttcctggacttgttgacgaggaacagcttcttgaggagcctgagcatcagcatgaggctccacttccggcgccggaccaccctgccgtcctgtgggtggtgtggatgcttgcccttgcagtgcttctccagatcgacgacgaccatcttgtcgtcgtcgtcgaggtcgagccagctcatcgccaaccgttccttgttgatcacagggctcagcgggcacagcggcggcacgctggcgagctcctcgttgaagtcctcccacagcatgtccatcttctcctcctcctcctcctcctcttcttcctcctccccagcaacggtggcgaggaaccaccgcgagggggagccgccgaggccgagctggtgcggggggaacgctgatggaacgagctggcctcctgcgtgaagagtggggaaagtgaagtcatcatccatgcctgatgcgagcctgcaaatgtttcaggtgtaggagcatgtgtgtgtgtgtgtgtgtggtgttgatgtatgtctctactaccgctactcctttagccccttagtatctctctatatatgtgtgtaattctacatatgtggaacacttggtctgtactgctgccatggatggtgcaacatcctcatctacctacctggaattggcttgtccgttgaattgaagacgtagcttcagtcatggagttccaactttgaagacatggatgacagagcaatcactgttcttggattaatgcacactgttgatcagcgaaatgacaggcactcatgctgcaaatgattcacttgtt

SEQ ID NO: 3292 - DNA, 1224 bp, Zea mays
tgcatgcctgcagagagatgctgctaggctgctagctggtacggcagctacagtgtcaaggcgctactgcttgatctggtttataattttctcaccttttgttgttaacaggaagtcgtccaatgagcctataactccagcagtaagctaaccgtgcaatacttcattgctgaggaatatttagcttccttattaatagataattaatttggtacggcaatctttgcagaattttctgtcgttgaggcattcaacaagccccctaacacttagcattagttgatttagaccatgcatgcattaggtttagttgagttcaagtcaagattagtatttcgaaccctattagctagctagctagacacattagctagcatggtcctcaagagattaaacttaggaagatcacctgcccaattgcacaaatgctccagagagatttgccgaaactggccgcgccggaccctggagcacttcacatatgcgcgcgtgcgcatcactaattatgaagttaatgaagcacgtaaaggatggtttctttcttctgatagctttctattacctcatgtacgaactgatgatcatttagcttaccaacgtggacatatatgtacgtactagctagctaagctgattgatatatatatagtctgctctgattgttcaaggaatcacactacacataccaccgaagtgtttcagccagcaactttcagtcttcatgcctattgagctttaaaatcaatggaatcaatgacaagtatttaaaattgtgatgcattattagcaaccaagcaagaatacaagttgccatattgatccacacatatgagtacaatcacatatagtcaagctgatatatgtacatacatggaaataaagcatgtgtgtgataaaaaaacaagatccccatctctctattactctattaatttgggttccattgtcggttgtacttgtacacgcaagtactgtatgcacaattataaatggattaacagaatactgcctacaagaattcatcacttattgaatatctcaacattatacatctataaagaaatatactgtcataatgtggtataaacttgggtagctgattgagaattggcagctagctaggttaattagaaccaattgattttcccttgttaaggtaataagttctttttggaggtgcatgcacaagggttttatgcaataagataaagcaaagcagcagga

SEQ ID NO: 3293 - DNA, 725 bp, Zea mays
atcccaatgcaggagctgtagttccagcaaataagactaagaggtcaccagagcagggacaccgcagaatcaggcggccgttctctgttgctgaagtagaagcacttgtgctcgcagtcgaaaagcttggaaccggaaggtataatttcttgtacccccccccccccccctattcgacctgacataatttattgccttctgtatttctcactgtatagttatatggatatcatgtaggtggcgagatgttaaacttcgcgcttttgacaatgcaaagcaccgtacctacgttgaccttaaggtaataactgccaaatgcctgtctttgacgtcaactctcataattagtttccttactgtccttttctgattattgattgattttctttttttgccgaaccttttatttgctgtggaaggagtctttcttttgcacgggattatatacttatgcgttatgcaagatccttagtgaggttaggttcattggccgatttaaccaatagtttggcgcttgtgggttttaggcctcctcacccaactggagcgtgctgttttcgtgttgtttgtttagaagtttccgggcagagacttgttctcgaaaaagcttttgtccctgtgattcagatggtgctgtccctacgcatcaactttgtagtttggctgggtcatgcgagtagaaacaaaggagataggagacctattcttgcacgtcaactaacccg

SEQ ID NO: 3294 - DNA, 953 bp, Zea mays
agcgtcacgtaggagggagtactagtacgtcgccggccggacggccgggtcgacgacgataacgatcggtcgatggatggatgggtgaatggatttgacgtgcgtgatggaacagcagaacacttggcaatgcaacgacccgtggtccgatgcgtccgtggcagcaggcacgggcttgctgatggatcatttaatatatatatatatatatatatatatatatataaggcataggaatgcatagaaaagaaaaaaaaaaaagagatggtcagaggagctggtggcgctgtcccgtccgtgcacggttacacttacccacgcacgcagagggatcggaggagctggtggtgctggtggcgcgctagctagctctctagataattgcgcgcgagcatgcactgcactgcactgcaccgcacggcccgtatcctcatggtatttagtgaccaaattgttctacccgccaccgcctgcatgcggctgctgcactgcatctgcatgctgcggcagtgcgcacacacgcgcatgcttaattctctctccgggtctggtgggctgctggctctagctatagctgcctctgtgtggttgtacacaacgagagatacttttgtttcgtgctgccgctgctgccggccggctgagactgcctgcttgcaagtttcaaggcagccccgtgacttccatggaacagcaacacaccagacctgctgagacctcactcacacacacccaactctggcctctcgatcgatctcacaggtcgagagagaggagagagagagagagagagagagcagtatagtagtacagtggatactagtagtaaatggagagagttatgaccatctatccagactccagagaggggtgcaagtgcaatgcaaagctagctaggcagggggaggggagggatccactttcgaggagggcagtgcatgcaatgcaatgca

SEQ ID NO: 3295 - DNA, 1287 bp, Zea mays
gctcggtgcctggggaggctatacagtcgacctgcagctccaccacaccgcgcctgctgctagactccaagcttgaataaactagtgctgaattcgccgataaccaagaaggaaatctccagcgtccagcgtccagcccatagtgaatctcccggagtcgcccaaaccacagcgacaaccatggccgccgccgcctgctattcgccagcgcgcatcatcatctcctgctcagccaccaccacctcctcatcgtcgtcagcgcgcacgctgcgcgtcgccgtagtggggggtggccccgcgggcgcgtcggctgccgaggcgctggcctcggcgggggcccggacgttcctcctcgagcgcagccccgcgggcgccaagccctgcggcggtgccatcccactctgtatgctggacgagttcgccatcccgcgggacctcgttgaccgccgcgtcacccggatgcgcgtgctctccccctccaacctcgcagccgacttctcccgcgcgctgccccccggggcgcacatccccatgctccgccgcgaggtgctcgactccttcctccgccgccgcgccgtcgaggccggggccgagctcgtcccgggcctcgtcacctcgctctcgctccccgcgggggcccgccgacccctacctcgtccactacatctcgtcctccccggagggcgtgggagcgggacggagcgtgctggaggtggacgccatcgtcggcgcggacggcgccaacaaccgcgtggcgcgcgaggtcggggccggggactacacgacggccatcgcgttccaggagcgcatccgcctccccgacgccggcatggcgtactacgacgacctcgccgagatgtacgtgggcggggacgtgtccccggacttctacggctgggtgttccccaagtgcgaccacgtggccgtcgggaccggcaccgtcgccgccaagccggagatcaagcgcctccagtccggcatccgggcgcgcgcgggccccaagatcgccggcggccgcgtagtcaaggtggaggcccacccgatcccagagcacccgcgcccgcgccgcgtcgtggggcgcgtggccctagtcggcgacgcggcggggtacgtcacgcggtgctccggcgagggcatctacttcgcggcaaagtcggggcggctgtgcgggcaggccatggcggaggagtgggtgcgcacgggctccgtgacggaggccgggctgaggcgcggctacctgcggcgttgggacgacgagttcctgctcatgttccggttcctggacct

SEQ ID NO: 3296 - DNA, 776 bp, Zea mays
atgttggatcggagtaataaataaactaatttctacttgatggctctgttaggcacagctgctgcttattgaaaaagcagcttatctgataagatggtgaaaagtagcttctgcttgttggctgtttttagtgtattctgataagaagctaaactgataatctgctgcagaagttagctgtttggcagaacttctgcttaaatttgtgaagaagctgaaaataagctgtgtcaaacagggccgatgtctacccctttattacaccacagaaatgtactatttttgtgtgtgtgtataaataggttccacaaaacttaaccaactgaacatctactacgctttagttgcgtacatatatctatctatctctacttggctagtattgcccagcttgcttgtcccattatctctacttggctccgacagcaaccactgtgacgatttcgatggtgtgaaactgtgactgtgagtgcgttgcgatcagcgtcgtcctggaattcacgcggaaaagaaaaggaaaaaaaggcccgaaggaaaacggctgctgccgctgtgggacaaaaacaaacagacgtggctgcgtctggaatccggtgggtgacaagggcgcctggatttgtgcctgccaaaagcccccaaaatatgtgctgctgcctgctgctttagggcttgttcggttattcccaatacacatggattggatgggattggaaaaaattgtgaagaggtttgactttgttgggattcaaacccatccaatcccgctcaatcacatg

SEQ ID NO: 3297 - DNA, 754 bp, Zea mays
atcctctttagtctacctgcaggcataccaccaggtcctgtcgacagtgtcagagctgagacgcggccatggccatgcactcttgttgttttctattctatgtttttccctgaaaatatagtttttgagttggaatttaatggatatgtgcgaaatcattgagctaccgaatcattggagtatgattgatggattcgcggagagccacagccctggtcaagtatctcaagccaaattgttctgaattttcatgaaaacgaatttgtccgaaattcgctccaagaacaaccaaccgtacgtattattttccttggacactcaagtgagagtgaaatgagtttattttcagctcattaagctaagataaacaagcacgtgacaaagatttttttttaccaccatgcttcttgcgaggaagataggtaccaattacggttggactaatctaaggtacaaccattaccccagtccgaagttatcccagacccagagatgtgcctcaccctcacgggagtcgggacactgaactcattaccaacttgtaggctgcccagcggtggataccatgccaaccgtactgtcaagatgtgggccgtttcctttgcgatttctcgtggccatctcatctgacctcacattcaattgttcttccctttcagctgggcaagtggagcacttgatcctgaaggtactgccgctcacagtagcgtgacatcaatcaagaggtatgtctgcatcatctcaggatttaatt

SEQ ID NO: 3298 - DNA, 1152 bp, Zea mays
aacagatccgtttcgccgatgtggggtgcggatttggcggtttgcttgtagggctctcgcctctcttcccagatacgctcatgattggcatggagctcagggacaaggtaatcctattattttgccttttatttctcccttgatttatttggacgccttgtagactgttccaagcttaaagttactggtagtattatgaagataaacaatgcgtttgacatgcttttgaatataaaaatgttaaaatcttagaaataaatcaaatttgaccacatgcttatcatgtaacattacgagtttatatgccaatcatctgcaacatgttccagtttggtttgtgatacgaatttagtattctgtgacaccaactttctttcttacataattattatttgcttcagctttgcagtaaatgtgtggttaaaatttagtctgctgtagatttctacttagaaaacgatgtggttttagaaagttgttttgttcagaaatttcaaatagcctagtttaggatccactgggaaatatctgttactcattttgcttgtcatttgtgatggtacaggtaacggagtatgtgaaggagaggattttagctctaagagcggcaaacccaggacagtatgataacatatccgttgtccgcacgaactcgatgaaatacattccaaattacttcagaaaggctcagctcaccaagatgttcttcctgttccccgatccccacttcaaggagaagaaccacaggaggagggttatcagcatgcagctgttagacgaatatgcttacgtgatggaagtgggaggaatcatatataccatcactgatgtcgaggagctcggagagtggatgcggtcgtgtctagagaaacacccgttattcgaaaccgttcctgaggaagagattaaggctgaccctgttttcaaattactgtctactgccactgaagaaagccagaaggtggcaagaaatggaggacagactttctatgccatcttcaggcggatctccttacaagaagaataagtcgcttagagattataagctagatcgtgttacgtgtgtttgtcagttttatacattttttttttaaaaaaatttagcagtaggtgtacttggtactaaatattgcaatgttgctttgcaaggtt

SEQ ID NO: 3299 - DNA, 1294 bp, Zea mays
aaatggttgccccaacccagtctgctttcatcaagaaacggttcatacaggacaacttcatgttagtgcaacaaacagtccattttcttcaccgaaagaaacagccctgcattcttttcaaattagatattacaaaggctttcgactcaatatcttgggcttttttattgaagtcgtgaagaagtttggatttgggcagatttggtgtgatattattagtggactgttggctacctcttctactcagattttagtcaatgagattccaggtgagcgtattctgtaccaaagggggctgaggcaaggcgatgccctctcgcctatgctctttattttagtaatggatattctatcacagctgattcagcaggcgtctgaggaaggtctcttgcaaccattgtcctcaaaaccattgcaacatcgcatttctctttatgcggatgatgtgatgattttcctgcggcccgaccctcctgacataagtttgttgctgaacattcttcaactgtttggtacagcttcaggcctcaaaactaatgtccagaaaagtaatgtgcttccaaatcattgctcaagtgatacggttgttgtggctaaaagtatgcttccttgtgagttctctgctttcccttgcacctatctgggcctccccttagcgttatataagttgcctcgatcccagatctgtatgttgatcaataaagtggcatccatgctcccagggtggaaagctgagatgatgaaccgagctggcagggcagtatacgttcagtttgttatgactgcaaaaataatttatactgcaatggctattgatttgccttactgggccatcaaggaaattgataaactccgaaaaggctttttgtggaggggcagaaaagagggtaatggagggctctgtttgctcgtgtggcctaaagttactagatcaaaggaactgggtggtctggggctgcatgatttaaaatcgttatgctgggctcttcgggttagatggccttggttgcaaaagactgagtctaataaaccttggaccgttttttctactcattctagtaaagaggttcagaagctctttgaggcggctgtggttacagtagtgggggatggtaccaatacactcttctggaaggacagatggttaattgcaataggagtgttagtaagattgacccctcttgtagccatggtccctagaagaaggatcaacaaaaggctggtcagtgatgccctaacttttagagtgttgctggaattttttgagctgtatcatgttcttgaggatgttgtt

SEQ ID NO: 3300 - DNA, 1227 bp, Zea mays
agtctccgcgaccgaagaaaccaccagccacgccgctgtcttgtctcggcgactctggtggataggtaacccccacccccacccccacccagtagcgtgcagctcctctggtcactcgagactggaccaagataccaagttgagtgaaacacgtgcacctgctctggtcaggtttctgcgaaactggccaagcaacttgttgcagttgcagctcatctttccgtcagttttggccttttggcttctatatatcatataataccggctaccgatgccattgccacgcatgcatagctgatgatggtcggactctgagctcctctccgtgccaagtttctctgcacccatcgcttcagctcaccggttctcccccctgcactgcgctggctgtatggctcctcccttcgcgtgcgccatgcacggccgcgccctgctagcagcagcagcagcagcgctgctcgcgtcggccgtcacgctcacgcttctcccctccgccgccgcgcagccgtgggtgggcccgtggccgacgtgcgacgacaccaccggcaactactcggccggcagcgcctacgccaaaaacatcaagcagctcatcctcagcctccaggcaaacgcgtccaacacgcccgccctcttcgcgacgggctccgccggcgcgggcgccgacgccgtgtacgggctcatactctgccgcggcgacctcagccccaccgactgcttcgactgcggcaccaacgccggccaggacgtgtaccgggtctgcaacggcacccgagacgccgcgctcgtctacaaccagtgctacgtccgcctcgcccccacggacttcctcgccaccaccaacaacaccggcatgagagacctcatcaacggcaacagcgtccccgcgggcgtcgacgtggcggcctacgacggcgccatcaccaggctgctcaacgccaccgtgcgctacgcggtggacagctccgccccgtccttgtctcccaggaagtacttcgccacggggcagatggcgggggtcgacccgcggttcccgaccggcatctggtccatggcgcagtgcgcgggggacatatcgccggtgcagtgccggagctgcctggacgacttgctggcgcagtggtggcagaagttcgacagcaaggagatcggcgcgaggctcgacggttcgcgatgcaacctcaggttcgaaacggggaacttctacaccggcagcccgatggtgaa

SEQ ID NO: 3301 - DNA, 1222 bp, Zea mays
atcacagatgctgtggttattgcaaggtatctaggtgcaacacttgtactcccagacatcagaggaaatgaattaggaaataagcggtatgcttctttgacaagaagacaattttcagtacccttaagctgaaccctgttgcagatacataaatgatgcaaatccttgtccatacagtatcagcctttaactttttggaattcaaaatcgttttcataaatgccacagttcttgtccatctcagtaatgacactaagttttattcacagaaaattccaagacatgtacaatgtggataagttcgtgaggagcctggatggtgttgtcgaagtaatagaggatatacctgatgaagtgagtgctaagaagccagcagtcatcagagtaccgaaccgtgtgactgaaagcttcatcacaggcaccatccagcccatcttccaaaaaaacaagtacttaagactagcggtcattttctcttccgtaagtttaaggccaaaggagacgaacaacaaggacatggacacaactgcttgccttgcgatgttcggtggcctcgagctgaagcacgaatattctgaggtggccagaaaaatgctggataggcttcaagaattaagcaagaagtcagatgggaaggtcttggcgatcgatttgcggaccgacttgctggaacagaagagttgcaagacaacccgcggcgctcgaagaaaaggctgctatagccctgatgaggtcctggctttcctgaggagtgttggcttctctgctaacacaaccatctacttgacagagacttcgtggcacaaaggcctggatgttctgaaggaagaattcccaaacacttggtataaggtaaggaagttactccccgcgtccaatgagtgtcaattatattctgttttgtccaaagttttattcctaaatgctaaaaattgaaagatgatccctagttgccttgccatggtataaaagctgccatactattctgtcttatatgctaacttactgacatataaggtagtcttttatataaaaaaactgtcaatactattgcataggaaaacaaacatagtgctcgctcacgggatacatacaccccgtttgtgcattgccttttttttcggacttcacgtacgcaatcatgcttttttaggtaaaataagtagtatgcctttgtgtttctgcaggtcgagtctagaggatacacgggtaccgaggtgtc

SEQ ID NO: 3302 - DNA, 1110 bp, Zea mays
caagatcctctatagtcgtctctgcagttgaatcatgtgcataggacgcgagatgttgtaattagaaatgacgcaaagcttaggaatgacactgacagagatattacggatgataagacataccttgatcagggttttacacgcccgaaggtatatcacatcaataataatgaaatgttgagcacatgttctgttgccaaggatacattaactgagattgcactgccagaaatttgaagttcttttagtgtgttatcctgcatttgttttgcaatattttctttgtgatgtgtgttggcaagaagaaaaagatataattatgcgaggtggatagagttataagaacacagtaagctgtctccacaagtccacagttgatccttgcacttgcacatgtactccacagttaaccatttcaaattttgattacttttctacagttgggatatctgaaaatttatacatgtggatttgtctaaagtttcataacagaatgtatttgctatactttataaatatattacaacaaatatcagtagtcaaggttttgttttgcggaccatcaaccatgtcaatgtccaaaatattgcttatttatgagttatgactgggttgagtcctattttctcatggaattgtcattaagtaaacttagctagcatgctatcggtttggtactttggtggggtggggtcgtatatagcatgtgtcatttcctgtaccataaatccactctttaagatgcattcgtattaatcctgttttcttttatctaaatatatttttaggttcttttcttgttgcctctcaaaagttttgcacggcgcattgtgaagaggttgatccagctttccccattgccacaaaaggtaagttttcattttaaattttcaattatccctatacatacatttgatcctgttttttgctgatacaatagctgatagggttatgtgcagatataaccatatcaattgctcgctctcatatgctttgtatttctagtgctaagtgatatatttctcttttctctaggatagtgccatgggacaatttaaaaaggagtttggtgaatcacatgacgaggggatacctgaacatagcacaaaa

SEQ ID NO: 3303 - DNA, 1025 bp, Zea mays
atggcactttgtttgttcacagcgaggaatatggcatctgataactggcagtagcactagcattttttttcagatccatctatacagcaatcaggtgacttgaagcctaccatcactttattcttttttactattggactaaaatgggtggctaagatcaaacctctctggctctctctctcccttatccacttcctatcccagctcgccacctatccacacgcactgccacaagccagatgcatgcatggctgcatactaagtccccttccaccacagcccggcagtaaactccctgtgtccctccctccaccgtcagcaccttcttcatcaaatccagtcaacttcgtcctcgtccaccaaacaggcttcccacccagctctccactgacaccgcccctaaacacttgaagcttgatactgcctccacaccaacagtccaccaccatggcaatcaacacccccgtggcagccttgccataccatccagcgctgggctgggaagctccccgcaatccctctaagcccggaggccacaggtaaggcccaaacccccaaccctgaccctagtttcaaaggggttggtgaagccaccgttgtggcgttcattgattgactggaaaaaaatcgagtgaggggaggcttcaaatcacttgagtgaggtttagctttcatgttcttttccgaaactaaacttcggtaacaataaaataaattgaaaccactagccactaaagtagctactgctatcatatagcacatagtagtttattgcagaactttaccctcaagaaacggacatagaatgcagggcgcctatcaggatcctttgcttccgctaagacgttctggtggaccaagacatcggatgctttgtcaacattgatatccagctgatagctacggtatgagaaaacaaaagaagaaccaatgttattgttagcttcatgattaattgattatacaagtaagacaatggaagaattaattaattgccctatagcaatcctaatgcggaaacagag

SEQ ID NO: 3304 - DNA, 1057 bp, Zea mays
gcgccattgcgacgaggtccgacggcgtggccagccggttgtccttggtcggcggcaccaccgtgtccttccagggcccgatgcccaccacgtacctcttcatgtagtccaggtactcgccggaggtgatctcgtcgtacggctggttggtgtcctcggtccgcacggtcacgtcgtcgataaggaagacgagcggcgagtccgtgaggccggccgcgcggaccagcgacgtcggcgcgaaagactggacgaagaccggcctggcgcgccacgccggcgacatgtacttgccgccgtagccgtacttcttcagcgtcgcgatgaacttgtcctcgtacttcttcccgtcagcccactgcacgtgcttgttcatgaacacagggttcttcatctccgggtagatcccgaccaccctcttggcgttcagcgcgacgtcgatgaactcgtcgaacgtgatgatcggcgagacgcctgcggaaaaaaaacgaggccagcttgtctgtgaacgccgttgttcgtacttcgtacagttcagagggaacagaaagcagctaataatggtgctccgcccatggggtctcgccggccgggagaccggatcgacttgctcaccgttgtgggacttgtcacggaagtcccatcgctgcttcgcccgcagcgtcttgagctccgccagcgtgaaatcagctgcgacagttgacttcgtgttaaccacaagatggatcgacaatgagacggaagtgaaacaaactaccgatcgactggatgcatgcaacgggcggcgtactgtccacgtactgacgaagtatccggtgacgttggcccactgcacctcgagggtgcgccggcggccggcgaactccgggtggtcggcgacgtcggtggtgccgtcgagcgtggtgtcgtggaagcagacgaggtggccgtccttggtggcctcgatgtccgcctcgatgaagtccgcgccctcgtcgatggcgcgcgcgtaggccgccgccgtctcctcggggagctccccgttggagccccggtgcgcgatgttgaaggggcgcgacgt

SEQ ID NO: 3305 - DNA, 1062 bp, Zea mays
agtcgacctgcagatcgatcgctctgcggtggagagcttcggtggaggcggcagggtgtgcatcatggccagggtctatccggcggcgctcgtcgacgacggcggcactcgcatgtacgcgttcaacaatggcactagcaccgtcagagtgccccggctagaagcgtggagcatgaggagggcacaggttaacaagggatgaggaggaacacaaggccatttgatagctagaggagaggaacagagcatgggcacatgaattaaacacacactgctggtttaatttgctggaattaatcaatcaatcaatcaacaaacacacgaagattaaatcaaaacactctctactcctacactaaatttcagtacaacgaccttgcattgctacttaatccgatccggcgatcggtcggcatcgtcatggctactgcgcatctctgactctgaatgtggccgagtcggtgctcgtgcagaggaggaggaagaagacgaggccagccggtggtgctcgtgcttgagcgccctctcgacgagcatgttgaggaagttcatgagctgcacggcgtgcgcgagcgccgtgagcgggtcgtcggcgcgcgtcatgttgggcgcgaacaccatggccacgttgcgcgtgcccatcttgttagccttctcctcccgcgccacgtccgccatcaggttcaccgcccagtccagcagcgccgccctgggcgccggcagcctggcgccgcagagccgcgcgcagtcctcctccgtctggcaccgcgtcacctcatccgccggcagcgcgtccagcagcccgccagggagctcacggaaccacgcctgcttgcacgtcgtgccgtgcgtgcgtgcgtgcgttgtcagatcatcagatacgcaatgcaacaaatgcaatggcggtaccgtaccttgatgaggcctgcgatgcagtgcacgtccacgccgtctggcacgacgcccgagttgttgagctggtccctggcgtactgctcctgggcgccgtcggcggccaccctgaagatgccctccgccctgaggccgccctgtcgacgaggg

SEQ ID NO: 3306 - DNA, 1110 bp, Zea mays
aaccattttttgaagagaaacatatctcaattttccgggtttgtttggacagacaatcaagtaagtctttccatgacagtactgttagactattaattaggctgatcatgcctgccatatgtgccttggtgtttatggtagttgatcatagattaggcaagaatctctattgattgggtgctttttataaaccttagacgatccttgcctatattatacaccccttgtacctaggtagctcatattctatcaagtaccatacatgtgtaaaagaaaattcttccccatgtcatgtgcttagctctatcattagtggatcacctcttttaagattcatggttgttgtaatactatactagcctaatggctataatgatatgacatagaatgctctaagaagtgatgagttttctttattatttcagtcgtggttatctcatgtatattctgtattaatccaatcatgacactgttgttagctttgttatactttttaataagatgaccttttttttgcaactatgcttggattatttaggctttgtgtgttgttggtcatgtttgcgctacctgtatgtgatgttcatcaggaaaagcacaggaccaaaataaaggaaaagcttgagaaatttaacaaggagaagttgctagatttttgtgaaattctggacgttattgtaaaagtaactacaaagaaggttagttggctgagctttgtttatgcatgagcagtgagatctttagtaatggtcggtgatttgctgaaattcaggaagaagtttctgccaagctcttggaatttttagagtctccttgtgttaccagggatgttattctcactgataaaaaggtataacttttggaaatgctatgcatgaaatactctggtgatacacctatgattttttttggcctggggcctcctaaagtaatgtgattggctggttatgtccttaagggcagcactatatgcttagcagtactcaacttactagctctgagcttggcactgtgaactgaagtgtctgtcctgttctctgtcattgtagaaggggaagaaacgcggaaggaaatctaaagtaagtcgtgaggtaacttctgaaggtgctt

SEQ ID NO: 3307 - DNA, 1026 bp, Zea mays
aggaacaatgtcgaacgacgattcagaacgttatcgcaatgcatacctcctgcatgaccagatcgcgagcgaccttcatggagttcttgcccaccatcccagcgaggaggtgctcggcgccgaggttcgatgtcatgatgatcacggtgttcctgaagtccaccgtcctgccttgcccatccgtcagcctgccgtcgtcgaggacctggagcagggtgttgaacacggcgacatgggccttctcgacctcgtcgaacaggatcacgctgtacggcctcctcctcacttgttcagtcagctgcccaccctcttcatggccgacgtagcttcagtcacaggtccggctcatgtcagaacaagagttcatcgcaattcgctgttaaaaatacgaagatgcatgcattttctgctacttacccaggtggtgctccgatgaggcgagcaaccgagtgctgctccatgtactccgacatgtcgatgcggacaagaaggttctcgtcgtcgaacagctgttcggctagggccttggccagctcagttttccccacgccagtcggacccaggaagaggaacgagccagtgggctgttgtggcctgccaagaccggccctcgacctcagcaccgcctctgcgacggcgctcacagcctctgtctggccgaccaccctctggtgaagcctgtcagccaggccgaccagcctctccttgtcgttctggccaagccgggtcactggaatacccgtccaacggctcaccacctgcccatagaacgaaacaccatttcagcacgctgcacgactacgctactaggagacgatcggcaattcggcattgctctgcaaattttttgtggcggtgaacaagaacaataacatacctctgcaatttgttcagggccgacggtttcggtgagcatcaggttctcccctgtttcgctctccagcttggagatcgcggcgtcgatttcctggagggcgccgtacttgagatcggccacacgggccaggtccatccggcgctcggcct

SEQ ID NO: 3308 - DNA, 1171 bp, Zea mays
atgatggcgaccacggccttagcctcgatcatggcgaagttctgaccgatgcacgacctaggtccgctggagaaggccagcagcgcgttggggtgcttggccgccctggtcaccccgttctggaacctctccggcctaaactcgccggcgtcatcgccccagacctccgcgtcccggtggatcgtcgcgatcgggatggtcaggatggcgccctcgggcacccggacgccgccgaggtcgaggtccgcccccgccttcctctggatcagggacactgggccgtacagccgcagcgtctccaggaggaacatgttgaccagcctcagcctattgagcgcgtcgccagtggggacctcgtccgcgccgcactcctgccggacctcctcccggagccggccctgccactccgggtgcgtgctcagcaggaagcaggcccaggtgagcaggtgcgacgtggtgtcgtagccggcgaagaagaaggtcttgcactcgtcgacgatctcgtccatgctcagcgtcggcgcctcgccgccgtgctccaccgccgcctccagcatgagcccgagcaggtcgtggccgtagccgccgccagcggtgtccttgccggcgacggcgaggcgtgccttgatgatgtccatgagcatgcccctcacccgcctgtccagctcccgcgtccgtaggttattccgggtggggaggtaccttagcgctgggatctggacgtcgaaagcggtggagaaggccaggaactggagctccctctgcgccaggaacacctgcctcccctccctgtagctgctcccgaacgccgtgcgcgagatcacgtcggcggtgagctcctcgaactggctgctcagctcgacgacctccgcgtcgccgcctttggccagcctcgcctcccactcggaaatcatggacagggcgcagtcggacatggtcgccgtcatcgtcttgagcttgtccatgttgaaggccgggtgcacgaccttgcggtggcgcttccactcgtcgccgtcggtgaggaggaggcccctgccgagcaggcgggtgacgtattggttgatgtggttcttggggtagaggccggtgcggtcgaagagcacctgcctgaccaggttcacgtccgccaggcacaggttcggcgtcgccccgttccagtacaggaacgtcc

SEQ ID NO: 3309 - DNA, 1153 bp, Zea mays
gcaatgattgtccttccaattacttcatcctttcctggggccaccctgtcctctacactcaaaactaggtgctcttcaaatggctcagctgcaacaaacatcaagtcctcattccacaatggattcaaagtccggcttgccaatgccctggttctttggacttggttgcctagcattgctttgacataaacttcagggaacctagtcttgtcatttggtataagatcctgggcttcaatgacatttacacggagataccaaagctttggagttagatacactttggacctaatgcttgcaaggccatcaccagggacggaggctgcatcagaatgccatgcttcagggaacgcttcatcagcttgagtacccatccaaacagccagcatcaactcccccttcaccttgtgcccattgcggtcttccaaccgataccattgtggagccaatgggctatcaggtggcactctctttgggacctcattcaaatcaaatataacacgtccaatgaagtcatccttgacaagatccttgtccttgaccagaatctccacaactgatgactggatgcgctcctttgcaaaggcaaagacctgattccactccgggttgttcttcttctcgaaatgcccagtctggcccttataatttcctagtttcacctcaacataaggatcacaactcccagtgatgtccttgttcggaagttcctttgcttttaccactcttacataaaggtactgcatctgctcaaccaggtcatatgtggttgtgagcttgtcaccagcagctgcaccaccaaggtgaggtgtggtttccttcaaggagtactcctccggacggagcggtggcctctgcatcatcttgttcgaagacaagcttacaccaaacttctactcacggacttgacaaagtgccaagaaaacccagtcgtcgcttgtcctaagaaaagtaaacagctagctttagatagttgctacaaggaaagaacattaatgaacaataatatgaattaagatgaaactactacctctgcaacaaacttgtcgtgctacacggcttaagagtattttgaacagttcctcatcttgctctgcggggggggaccatttgaattgaagagaatgacctccacatcaccattcaggggaaa

SEQ ID NO: 3310 - DNA, 1243 bp, Zea mays
atcatcaaacagtgatcagcattgtggtttgataatttgttttaggaggagagtccactgttgagaactgccagatcctccagactagggtgaaccgttccaaatctgataaagcatgggtagcgcaagcagagatgcagggtttttcctgcgatattatgtttactggtgagcgaataacttttttgtttcaaccgtggtcttgaaatattggcttgctattgagcacgactagaaacaacaataatttgagtactagcattagcatatcttcttggcattggcaataaattgcatattagtttatagttatgttttacatttaaatctgtcgatggcagagaaatatatggcatatagtttgaacatggtactatggtagaagaaaagattataatagaggcagggtagaaacattgaattcaaatatttaatatttgaaaacgtgttagccgtgctaaatggtagtatttctgtttaagttcacatgatgccttactttttatttttctttacctggaactacagaagctccctttttacagataagggatctcattactggttaggtgatttagagatatttaaaaggaaattgtcacatatgatatacatatattaccatccacagctttgtttgtttacctggtatttaatctatgtatgtagttttccagttctgtttgggccttgtcctgtcttcatatttgctatctcattctaaggtgcgactttgagagaggacagtgtatgtacccaagttgaatgtcataatttagattgatttttttttttgtatttcagtgccattagtactttctattcgatttagatgtcgataattaggatcttgtttatgcttcattgtggccataagcatgctgatgtatttcacggatagactgagcattgatgtaagacagtttctatcgaggaatcttttttttttcttctgaagtttgtgtgccagtatctgctccactgactggaacaaattcattggtccaacagattggatcattggactgatctcaactccttgtttagtttgtatcgccaactgttatataccatattgggcactcaatccgaagcttcgatttatatgtgatgaagtgttcttgtatatgcagtctgatttgtaattgtattactactcaatctctgaacagataaggagctagatataattgagatggctgtgtacggggacgtcattcgtccagggaagcaatgtcgctgc

SEQ ID NO: 3311 - DNA, 1036 bp, Zea mays
cgaagcagctagagaaaaagagctagccatgcacaccgcggccaccaagcctctcctcgtcttctcgtcttcgttttcttcacgtccatggcggtcgtctcccatgcatcgtccctacgcttccaatacatcgaccgtcgtcacaacttcaccgccaagcaggcgagcacctcctcctcgtcgtccccgtcctctgcacacggcagccgcgaccgccgcccttcgttcgcgctagtgcgccgcgacgcagtcaccggctcgacgtacccctcgcgtcgccacgcggtgctcgacctcgtggcccgcgacaatgcgcgcgccgagtacctcgctagtcgcctgtcccccgcggcgtaccagccgacgggcttctccggctcggagtcgaaggtggtgtcgggcctcgacgagggcagcggcgagtacttcgtccgcgtcggcatcggctcgccgcccacggagcagtacctcgtggtggactccggcagcgacgtcatctgggtgcagtgcaagccgtgcctggagtgctacgcgcaggctgacccgctcttcgaccccgccacgtcggcgaccttctccgccgtgccgtgcggctcggccgtctgccggacgctgcgtacctccgggtgcggcgactccggtgggtgcgactacgaggtgtcctacggggacgggtcctacaccaagggcgcgctcgcgctggagacgctcacgctgggcggcacggcggtggagggcgtcgccattggctgcggccaccgcaaccgcggcctcttcgtcggggcggcggggctgctgggcctcggctggggccccatgtcgctggtcgggcagctcggcggcgcggccggcggcgcgttcagctactgcctcgcgagccgcggcgtcgtcggcgacgccgggtcgctcgtgctcggtcggagcgaggcggtgccggagggcgccgtgtgggtgccgctcgtgcggaacccgcaggcgccgagcttctactacgtcggcctgtccgggatcggcgtcggcgacgagaggctgccga

SEQ ID NO: 3312 - DNA, 813 bp, Zea mays
acgcactcggactccgcgtccagcgcgctcgtcgcctcgtccagcagcaggatggccgggtccttgagcaccgccctggcgatggcgatccgttgcttctgcccgcctgacagctgcatcccctgctcgccgaccgccgtcctgtacccatcgggcagctggctcacgaagccgtgcacgttcgccgtcttcgccgcctccaccacctcctcctcgctcgcgccttccttgccgtacgcgatgttttccaggatgctcgacgcgaagaggactggctcctgctgcaccaggccgatcttgagccgcagggacttcaagttcagcgtccggatgtccttgccatcgatggccactttccctccgcacgggtcgtagaaccgctcgatgagagcaatgacggtgctcttccctgagccgctggctccgactagcgcctggctgcgcccagcttggattttcaggttgaagtccttgaagatttggatgtccgggcgtgctggatacgaaaagtcgacatgccgcaactcaatgtcacctcggatggtggtgaccctctctgactctggatcgtcaggctcgattcttgttgctctgttgaggatgccaaagatggatcggatggattcacctccgcggatgatctccggggccaggccttaccgtctcggctacggagttggcggtcaccaccaggacaacaaaaaccttgatgaccttggagaaggtggacccatgtgaccgcacgagatgagaaccttaccagaggatgagcgcctctgaggagtttaagcaaagctgggacaggccaaaccg

SEQ ID NO: 3313 - DNA, 756 bp, Zea mays
aacatgacttcccttatgacttctttcgtggttggatttatcatcgagtggagagtggcaatacttattctggccactttccctctgcttgtgcttgccaactttgctcaggtaatttcttggcctacttttaagtgattgatgtctgcccctggacttgaacagcaaaatatatgtggtaatgacaactttcacactaattctgaaatgagaacgttgtttctttttgtgctttcagcaactttcaatgaagggctttgctggtgacacggcaaaggcacatgccaggagcagtatggttgcaggtgaagcagtgagcaatatccgcaccgtagcggcgttcaacgctcaaagcaagatcctgtcactcttcagccatgaactgcgtgtgccagagcagcaaatcctccgccgcagccagacatctggtcttctgtttggcctgtcacagctctgcttatactcctcagaagcgctcatcctctggtatggttctcatctcgtgcggtcacatgggtccaccttctccaaggtcatcaaggtttttgttgtcctggtggtgactgccaactcggtagccgagacggtgagcctggccccagagatcatccgcggaggtgagtccatccgatccatccttcggcatcctcaacagagcaacgagaatcgagcctgacgatccagagtcagagcgtgtcaccaccatccgaggggacatcgagctgcggcatgtagactttttgtatccagcacgcc

SEQ ID NO: 3314 - DNA, 475 bp, Zea mays
tcttgcataactgcagaacatgacttcccttatgacttctttcgtggttggatttatcattgaatggagagtggcaatacttattctggccactttccctctgcttgtgcttgccaactttgctcaggtaattccgggcctacttttatttttgtcatcttgagacttaacctaccgttcaagtccatctttaaggaaacgcgtcttgctaatttaattgcttgtcaaaatcagaacagctcttagttctttatactggctgtgtagaacatatgtactgatggcttgtttcattttgtgttctcagcaactttcaatgaagggcttcgctggtgacactgcaaaggcacatgccaagagcagtatggttgctggtgaaggggtgagcaatatccgcaccgtggcggccttcaacgctcaaagcaagatcttgtcactcttcagccacgaactgcgtgtcccagagcagcaaatc

SEQ ID NO: 3315 - DNA, 1050 bp, Zea mays
cacgcctgcagaactgatttcaggatcaaattgaccattaccagcatcagtctgatgcatcatgtttccagtagcacatttcaagaaacggtcactgtttctggtgggtgtatcagagcgattcttagtcatcccagaaaccaattgattaccagacatgcttttctcactggtcataagctggatgttatctggctcaggaacacttttggtatcggaaaaatcatcttccaaaaccctgacggtctttgttctttttcttcttttcatttgcatgttgttgactgcaagtacatcaatcagttctgggaaagcattacaccgacttaactcagcatccctcctgctcattttgaagtcttccttcaggtcagttaaagcctccccatcatgttcagctgacatctttgaaggtgaaagatcctgttcaagtgcctgaagtagcagcaagcagccatttccatcagattcagatctatcagataacttatattccgctcccccatgctcactagaattatcatgcttataactaggcctgcttcttctgcctctcttacgcttgaacttacccaaaaaatttgtttgaagtatttgttccatgatggaccttgggttttttgcagcattgttcattctggcctttgagcagctatttaatgcagtgacctgcttctgattttgcttccagaatgcatctgtactttgagtctgctgtttaagtgcatggattcgctgtgtacacccattatgatagaactttggtttcttgttccttaccattaatgatggaagatcaggactgcgacgatccatgtcctccaagttttccactgcttcattctccttctcggtgattggaacaaggcaagtgtcatcacttttgtcagcaaactttttattcttcaacaatatatttcctccttgttgatgtatcttagaaagagggctaccatttttattagaataaacgttgttagatgtgggaaggctatttattctttcatcagctaaagttttctttgtcagctctaattcagtaattgccct

SEQ ID NO: 3316 - DNA, 1000 bp, Zea mays
gcagtttccacgagttcctgatcctgaacaacacccaacaccacattcactagcgcaacccctgctccccttctcccaccacccagggacatagcccagtgcgacatcaaactcgaacgttgtcagcactggcttcttgaaaccctccccccagtcgatcgacaagcgtggacaagcaatttgcacccaggcatcaatggaatctccaaatagctccatcctcgccggggaaagctccgacatgagcaccactgtgtgttccaactctttctcctccaaatgctccaccaccctgtcgagaaccttggtgctcccctgcctccccagggtgccaagtacgactccccagctcttggccttcctggccgccagcaccgccgctttcctcgcctgcttcatgccaacatggtcatactcctccagcacgagaaccccgaggaatgggtcgaaacggtaggccttcaccccgggattggcgatcataaacgcctcgaggtggaacctcccgtcggcgacgaacaccacggcgcccacctcctccgacttcttgagcgtcggggcggtgcaacccaggatctcgccggcggacagcggcttcgcctgcggcacgacgatgtcgtggtagccctctaccgtgagcatctcgcgcgcggcgtggaccgcggcgatgaactgcacggtcccggcgatggcgaggcggggcgcggccgctgggtccgggaaggcagctcggacggcggcggcgaggcgggcggcgtccacgcggatctcgacgaagacgtagagcaccgggaggagtgaggccgtgacggggacgaggcaggagtggccgtagtggacgaggaggtcggcggcgagcgccctggcggggcggtcagcgaggcagcaggccccgtaggtggcgtcggcgaggacgaggacgtcgttgtcggcgccgggctcgaggtagggcgcgaggaggtgcgacagtgggagcgcgaagaggagcaggccccgggga

SEQ ID NO: 3317 - DNA, 795 bp, Zea mays
  unsure (1)..(795): unsure at all n locations
ggttgtgatcataggtacggggtacctatacatgccacagtactacgtaggacgtggataactggatgcccgcacgcggctgtggccaccgtatctccacgccgcgctcgtgcccagccgtcacgcgctccgccggtccggggtcatccgtgtggaaccatcgctttccctgaccactccactccggctccggcagcaaggaaaacgagcgagtggaggcgctgacgaaaccgagcagcggacggagaggagcccggaccagtgacctccgtccaccgcagaaaaaacacgaggacctcgcgcctccgcccgcagccacagtccagcagctccagtccacgcccgcctgagtacctgaccagagagagctatatctacttcgcccgcgccagctgatcccctcgcctcgcgatcgccaccacagaccacaccaacaatcccctcccttctccccggggccgggcttgtcttcttcctcccgattcgttttcttttttcttttcttccgctgctgcaaaatctcgtgctggcgcggcccgaggccagaggagagaggactcctcggatccttatccctcacgcatctcccgcctcgccttccgccacacgttccgcgcctctacagctctcgacctcgtctggatttttttccccgacccgattttcgcatcagctccttctgccccaccgggctcggtntcctcccctggtttctttttcatcaactcgtcaccgggctcacccgctagtttcctttaagaggagggtggtaccccccaattaattccatttacc

SEQ ID NO: 3318 - DNA, 1284 bp, Zea mays
cttgcatgcctgcagccaccagcaccaagcaccatgggcgagaagccatctacatctgtcaaaccaaggccccagtcgccaccgacaacgatagcagcgggtcccagcagcaagtgggcggcaaggcgtttcaagtcctcaatgccggcacaggtgcttctgccaaaagtcacgccaacaccagacattgatacctttgatggagttgcagatgtccactgtccacttgcccgccagtgccacccctgtttaatggggccgtcgctgtctaagtccctggccgccgccgagcgcttgtgtgacagctgacaagtaacggtggcaacagcagcaggctttgaaggtggctgtggacacccacatcagcatctgcgtttagtccctgcgctgcgcacaggctaatttgcaacaaggaggtgcacagcagagtgtccaacaagaccatggtgcagccggtggttgcggtgagggtaatgatagccgtcactgcttacacattgggtcatccatgcccattgggcattatcaactagttctggggatggataaagcggggtggatgattttcaggtatggggactgggtaacccattttttgcccaacggcatcactagaaacaaccctttggttcttagacagtaggaatataagaacaagaaccctcgttgtacagtatgtaactggaaacaagaatggccgccacacaaataattactaaatataaaaaaagcatatgacctgattgacagtacagtcctatcaatgtttttccttttcattttctattaatccgataaaatatatgcattttcatatattgacacaatctccatggcaacacatttaccagtgatttctttaacaaccttatttcaaacaacacaaactaatacttttatgtgttttcattcaacagcaaatgcaagcggtcaatctatgcaaactttaaactgttcttggtgcaatcttaattagtttaacaaaagaagatgctgaatagaaacatgtattcacacaaatagggaatatacaatgcttaatacagcggtactgaaaatctcagcatttagttgggtcaccactttaattcattgcatatttgcattgcatccctatagccataattcaaaagtattctgacttggtaagttttgatggacccagtagcccaagaaaaacaaaactagtatccctaatcaacgtcgaagaaacatcaaacatcataattgaatagctaatgcatactgcaggtcgactcgttaggctcaccaggtaccgagcaa

SEQ ID NO: 3319 - DNA, 698 bp, Zea mays
agctcgtcaggatctgcgccgtaggagaagctgcccggggctgggtcttgggggcccttccaagagaccagctgttgcagtgcatgcttacggtgggtgactctaaatttcatgccaggcagaagagtgtcggccgggtaatcgaagctttgccataagacggcgccctgtgaactccggaggatgaagtttccagtgttgtcaagcgtggcttctccggcggtggtctccggctccgacgacgcagcagcgctggtgtttgccatccaaagcgtctggccgtccgcgctggacaaaacaagatcggacgtgttcgtcagggcaagtgttgcagaggaagggtccgtgattattggggttccacggttggcaacccacacgacgttgtccttgggaatgttggcgtaccatataccaacatagtagtagtgtttcttgtccgggttggacggggagaagaagcccagggcaaaagtgccgtcatcggaggtgagcgtgcttccaacagtgagcggcttgttgggaaggatgcggttgtccgatgatactggaggaggcagtagtaagctagacgagcaaaaacacagcaagatgattctgtggattggaaggaggcccattgtttgcaagaaagtgaggattcgacctctctagtggctgtggctggttgggtggacacaatggcaaaggcaaagaat

SEQ ID NO: 3320 - DNA, 1162 bp, Zea mays
tctcggtaccctggtgagctctacagtcgacctgcagtgaaaacatacacaactgaacaggaattttcttgccctcaaccatatgattgttcaaagctggaagccaaaacagtggaaatgaagaactccaattacactctttcttttgatacaagtcgtggtctcctccagacagtaactcgtcacaaggacgggcaacaaactgtgataggtgaagaaattggcatgtacaaaagtcatggaagcggggcatacttatttaaaccagttggggatgctcgctcaattgtcgaggaaggaggacatttcatccttactgaagggccattggttcaagaagcccattctcttccaaagacagagtggcgtaagtcacctctctcacatagtacacgcatctacaattgtggggacgctatacaggacatgctgatcgagaaggaataccatgttgagcttgttggccatgcttttaatgatagggaattgattgtcagatacaagacagatattgacaaccaaaggatcttctattctgatctaaatggctttcagatgagtaagaggcagacatatgataagattcctctacagggaaattattacccaatgccatcacttgccttcttgcaggattcacatggtaatcgattttctgtacactccaagcaatcattgggcgcagcaagcttgaaaaatggatggctagagattatgttggatcgtaggttggttcaggatgatggccgtggtctggggcagggagtaatggacaacaagcccatgaatgttatatttcatctcctcacagaatccaatgtctcagctttgcctaaaacccatagtttgcatactcttcaaccttccatcctctcgcatcgtgttggggcgcacctgaactacccgatgcatgcttttatgagcaaaaaacctcatgaaaaatccttcaagcgggctcaacagtcatttgctccattaactgcttctttgccatgtgatatacatattgtgaacctgaaggtccctcggcccctaagatttcctcacaccgaatcagcagagccaaaatttgctgttctgttgcagaggagaggctgggacgcatcatactgcaaaaggggtggactgcaggtcgacgtcagagcataccaggggtaccgag

SEQ ID NO: 3321 - DNA, 1290 bp, Zea mays
tgcatgcctgcaggtgtgctcaacttctcgatctggtactaattcactacagcgtactgtgtttacccaagatcgattaaatcatcatgggggtgtttggtttaaggaatcactacatccaaattgaggtggtgcatcataggttcattcctcaaatttggtgggatgacctcattcctcatattagtactaactaactaactatgaggaatgaggtggtgatggatcaactcattccattccacaaaccaaataaaaatagtgaggagtgagaagatgatgaactagctcattcctcaaaccaaacaccctacatatatcttctctcgttcctggatgtcatcgacactgattcctctttgttttgttggagcagcagtacgtacgcgcagcgcaggcccagctgattgcgccatggaagatcatcatcatcatacagcaacgattgcgcacacgtggttggcggcgatggcgatcgccgtgctccctatcctctccgtcctgattctggctgccaccaagcacaagcagatgggaagaaccgtcttcgcccctcccaagcgccgagagccgccggtggcggagggcgctcctctcctcggcgtcctgcctgccatcctcaccaggagcttgcaaggcgtgatctgcgaccagtacttgaagctcggcagcgtgttcacgctgagctccttgggagtgaaggtgacgttcctggtgggccccgaggtgtccgcccacttcttccatgccgccgagtcggagatcagcatcggcgacgtctacaaggtcaccgtccccatctttggcaaaggggtcggctatgacgtcgacaacgacacgcgcaacgagcagcacaggttcttcgccgacactttgaggccggccaagctcaggagccatgcccgtctcatggtccgcgaggtggaggagtacttcgccaggtgggggcagtccggcacggtcgatctgaagcaacaggttgaggacgttctcttgctgattgcgagccggtgcctgctggggaaggaggttcgggatcacatgcacgacgaggtgtcctcgctcctccgcgagcttatcggcggcctgcacctagtgagccttttcttcccgtacctgccgaccccggctcaccgccgccgcgaccgagcgcgcgccaggctcgaggagatattctccgggatcgccaggctgcgcaagagctcatgctcatccggccgcggcgccggggacgacggcgaccgcgaccacgacatgctgcaggtcgtctctagaggaaccccgggtacc

SEQ ID NO: 3322 - DNA, 1074 bp, Zea mays
cagagatttttctgatagatcagagggcacaggaactgtccgagttgtttcaaggcctcctcaaatcgcctccacgaaggatggtagatctgatatgcctcaaagtccaaaagcaccaatacgcacagctgatcgagaaaatcagtggaggtcatcagggactggatctgaagaatctctctctctcagagatactcagagcggacgagggagagtagaaagttctactgatgacgtaatattttggcttttggcatgcaatttggttaaatcatgatgatttcactaactataagtttttaccagaatgatcactctgtaagtgggtcaggaactgttgtgttacgctctccaagagcatctcagttgtactcaacagctagcaaccacagtgccaaggtaagttacaaacactacttatacatttttaagattaacatccttactgtctatgtaagacatggcaaagatagaactgaggagcagcagctaacacatctttacttcttagcctcccagcagattctcctcttatgaagatatgtctaatagtgggacagttgttcggacccaaaatgaagacccagaaactccacgatcttcaaggtcaaggctggggatccaagaaaaaacatcaaatgctcctcttgaggatagtgccattaaccttgcagaggtgatgcacattaacaatttgttggcagttttttgtttgtggttattagtcgatgcataattataatgtacatggtggtacatgcaggcaaaggctgctttgcaggctgggttaagaaagggaaatgctcgagaaagaccttttatcaacaggcatgaaaagggatcacatgagcatagatcttctggagtaaatagtcaagaggttcaaaggtatttcaagcttacctttacctgtgtttaatttcattgatagaaacactttgcccttattattaaagtttttttaaaccaaagtgtgttctttatcctagcgaggatgtggacacgcagaaaggtcacaaattacggcaattacctgatgggcagtcagcctctcgtgctagttctgtagcttca

SEQ ID NO: 3323 - DNA, 1290 bp, Zea mays
gggacatcctctcgaacggtggtgctgtccaagaaatggctcacattgccaacggccgggaccatggcaactgtgtctccctccttcgtgtcaatgtaagtgctcctcttggtgccttattttctttcagaaaaattagtggccaattttgatccgcgccctgagaaaaattcctgaattaacaatcattttttttgtcactgctgttacgcatgcagagtgcaaactcgaaccagagcaacatgctgatcctccaggagagctgcaccgacgcctcgggctcgtacgtggtgtacgcgccggtggacgtggtggcgatgaacgtggtgctcaacggcggcgacccggactacgtggccctgctgccgtcgggcttcgccatcctccccgacggaccaccgccggccggtgcggctccgtcccacggagagggcttggacactggcggcggcgggtccctcctgacggtggcgttccagatcttggtggactccgtccccaccgccaagctctccctcggctccgtagccaccgtgaacagcctcatcgcctgcaccgtcgagcgcatcaaggccgccgtctgtgcggaagccggcaacccgcagtagccatccatgcgatatagaggtataccttacatacatgtagccatccatacacagctagcttcagtaatttgagtcgaaattaaatacaattacacgtcgaatttgaaccgtttgaatgttttgtaggagggagaagggggacatgcagcaaggttttgtggaaatgttagtggggagtcaagaacgcacctcagactctccttgccgtgtggtgctcatactgaaaggaaaaagaaggcgtcaccactatgcaaggggggatggttcgggtattgacttcgccgtccaatcaaactactactacagatcgaaaggacgtacgggtgctgtggagaagatggatcgatgctgtttctagggtttacttcctcattgttcgtggtgctgccgtagttcaggctaaggtgcctgtgcctgctcgcagtcgtagctagagaacacagagatttgttgcctctgatctttcctttttggatttgcaaagatttgtagatcagtcatttcgtaaaccgatgcgccttggctaaaacgcgcccgttcgttgttgttcgatcgtagctgccttttgctattcataaaacgatgcaatttcaaccactgagtttcttctagcttcttgttttcagagaattttgaaaacggaaacagcaggggtgaaaaatccaatggaggcgggtgcaac

SEQ ID NO: 3324 - DNA, 1105 bp, Zea mays
ggttctcggggatcctgtatagtctacctgcaggacgcctccgtctccttgttcaggttgatcagctccgacgacccccctgctgcctccctgcccttcagtgccagtatctgcatgcatcagaagcgatcgattgattaatcgctggctgttagtatatatcagtgtacaaatgttctggcccgcccaaccaaaatgttctgttgatatgccaagtatccggagaggagatgatcgcgtaatcagtgatcgctactggcacagtggcacggagatgagagatgcgggccggccgggaccggaacggccatcatgaagccattgactgcgccagcaccagcagctagccgcagcatcttcctcgctcaacactccacgcaactctgcctgcatattctgctgctgacctttcgaaaaatcctctctctttctgcaattctgcctttggcctttgcagttgctccagcagcaagattccacacaggcaggcagggccaggcggggtagctagtacgtttaggcgcgcagacaatgaggcaaaggcagcagcgccccagggcagggaggacgacgcatccaacaacctttttttctggctgttgcgtgcactgaaacccacatggatcccagctgagctacgagtgagctgtgcggccaagctgaaccgtcagcccccccaatcattgagctgggaagccagccatggaccgaccggcgcgcgcccagatcagcatcgcgatgcggatcacaaattcacaattcaggcacgcagttgcctagatccgatccgggacggccgcgagtagccgccgccgccgatctaggaccgatcagacgcgcagagagatgagatgtgatgcagttgctgatcgaattgtacgtacgtacgtacgtactgatacggtcggtacagacctcggcttggagcttcttgttgtgggagaggagggcgtcgttgtcggccttgacggcgtcgagctggcgcctcagcgcgtcgtagtccttctccagctgcttcgccttccaccgcgcgcgccggttctggaaccagatggccacctgccgcggctgcaggtcggctctagcggatcaaccgggtaccgag

SEQ ID NO: 3325 - DNA, 1181 bp, Zea mays
tagcctagctagcagctactagctgctagtacaggcttgatgcgagattcatggtactgctgcacggcatggcatggtcccaagtcccagcttgagtatcgtagcgtcgggtagaaaaaaaaaacaaaacaatgagtactgaaggaagcagtacatttgcaagcactcggatcccaatcatacgagtactggctgtggcaaaagctgtgcaacgtacgtagtacaatgcgcacgtcatttgcagtgcaaatccgacgagaaaagctaaaagctaaggcgcacagaaagtgtgtagtatggtctgtgacgaggcacagagacgagacgagaggaccgggatctgaacgggcatgatgaagccattgactgcgccagcagcagcatcttcctcgttcaagactcgacgcaggtcactcagctctgcctgcatattctgctgctgacctttccaaaagctctctctctctctctctctctctctctctctctctctctctctctgcctttgcagttgctccagcagcaagattccacaaaggcaggcagggcagggcagggcctggccaggcggtggtagtatagtacgtgtacgcgcgcaggcaaatgagtcaaggcaggtgaaaaaggcagcggcgcccagggccgggagggccacgcatccaacaaccttttctgctgcgtgcactgaaacccacatggatcccagctgagctgtgctgtgcggctaagctgctgagccgccacccaccaatcattgagctgggaagccagccatggacgaccgacccacgcccacgcccagatcaacatcgcgatgcggatgcggatcacagttcgcgcacgcaggggcgacgcacccggcaagcgcacgcagctagcctagatccgggacggccgcgagtggctacccggcgccggcgaggatcggaggacgccgcgccagagatcgagacgatcgagcacgagagatgatcggatcggatcgcatgcgtgtacgctatcacacacagacctcggcttggagcttcttgttgtgggagaggagggcgtcgttgtcggccttgacggcgtccagctggcgcttcagcgcgtcgtagtccttctccagctgcttcgtcttccaccgcgcccgccggttctggaaccagatggccacctgccgcggctgcaggcatgcaaga

SEQ ID NO: 3326 - DNA, 1075 bp, Zea mays
cagcttgcatgcctgcagtatctatttgactcattacaaggaacaagagttctgaactgtggacacacaatgcacttgacatgttttgaagaaatggtggcgcataacaagtaaatctctacacctttgctaaaatataaacttgtattgacacttcattttcattctttgaacctactctgagacagttttggttatggtaacttctatctgtgtttgatgctacagatacacttgtccaatatgctctaaaacagctcttgatttgacacatcattgggaaatgttggatcaagaggtatcaaatttctttctcgctggtagcagcatgcatactgacagagaaacaatgtttggtggtaacttaagattcaaaatctaggatgtgtattcctgtctatcaccttaaataatttggaaccgatttcagaagaagaaaacatttcagcaatcatgaaacattctttccagatgagatgatattgtagaaaaattagtaatatcatttggttggatatgaaaagggtcactctagaaatatacttacacctgtatgctgaatatgttttgttctgggcagctatattatgttgtttcctggtgcttgctgattgactgatggttagttccttgtcattttgtagatcgaagccacgatcatgcctcttgtgtatcgctacaaggtattctttccggtgtatgtatgcagcccaactcctagctagcttagtacattaacccaaggataataagttcatgacttggttatttgtgatgtaaatcagaaaccttcaccgttaggcgcttttcataacctacctagaaaacctctctagtcttttactggtgaatcatctatggtatagtggaataatagccacctttaactttatatctacgttctgttcgatttaggctagccatttaaatagaccagaagctaatatttccatgctgattcattaaacgtacctaacgcttttgtcctgtgtggaaaaatggcagatttgggtgctttgcaacgattgcaacaaggtctcagaggtgaactttcacgtgattggccacaagtgca

SEQ ID NO: 3327 - DNA, 1066 bp, Zea mays
aagaaactaggcttattagattctgctctccctttgcatttcaaagatgatgtgttcgccgacaaggaaatcccacaatggaatgttgctagtgttcatacagaatctgagcttctttcagaatatcttataataccagaagtgaagcacgatgacttgaaccatcttaacttggaggaaggtctctcaaaaagcgagaatataaacccaaataagattactgagggccctgggaactgtcagctcgaagggaccattcgtgggaatctatttgacaatttggatactgatggaattgaagaaggtgaagagatctgcccactggacaaggatgaaatcacccccaatggatcaggtaacataataatggagaggagcaatatagttttaaagcctaccatttcccaacagttgatggattctatttcccctctcaatttagatcatggcgacttttctgaaaatgagaactccatgctgaacactggagatcagatgaaattaaatgaacctgtctctgagaatcttaacccattaattccaactgatgaaaaatatctgaagagccaaactgaggagtgtatgcccatttcatatctggaattcaaagatgatatccttctggatagggaaaactcagtgctggctccgagaaagtacgaggctatgtcccctgtgagacaggaaaatctgttctcagacaaagagaacgtgactcctgcctctaaggtgaagaccgttgttaggggagttcttggtacaaggatggataattcagtgtcagcagcaaatgcttcaaataagaagaaagttcttgggtcaagggtagataattcagtgtcaacagagaatagctcaaataagaagcaatgtgaattatcatcgaagtccaaaaaagtccacacagtagattttgatgttttctattcggataaggagaacttgactcctatatcttcaggaggcatgaaagcaaggaagtgttttcccaaggacctctcagtcgacttagaccaagatcaggaagcattctgctcagacaaggagaacttgacaccactatctt

SEQ ID NO: 3328 - DNA, 1182 bp, Zea mays
atcaaccttatatatgcatgcatcttgatcgatcgtgacagaaatcacgtaccacgcacttgcattatattcgcgccagccagccggtcctatatatatttcactaaaacataggagtatatgcatgatggatatgcagatcctcgcaaggacgcgatcacctatatcccgggcgtggcatccatcgagccgagcgagctcatgtcgtaccttcaggagacggacaccacctccgtcgtccaccgcatcatcttcagggcgttcgacgaggcccgccgcgccgactacgtcctgtgcaacaccgtggaggagctggagccgtcgaccatcgccgcgctgcgcgccgacaggcccttctacgccgtgggccccatcttcccggcgggcttcgcgcgcagcgccgtggccacgtccatgtggcccgagtccgacgactgctcgcggtggctgggcgcacagccgcccggctccgtgctctacatctccttcggcagctacgcgcacgtgaccaagcaggagctgcgcgagatcgcgggcggcgtgctggccagcggcgcccggttcctgtgggtcatgcgcccggacatcgtcagctccgacgacccgcgcccgctgcccgagggcttcgccgaggccgcggccgccgcgggccgaggtctcgtcgtccagtggtgctgccaggtggaggtgctctcccaccccgccgtcgccgccttcctcacgcactgcggctggaactccgtcctggagagcgtctgggcgggggtgcccatgctctgcttcccgctgctcacggaccagctcaccaaccgccgcctcgtcgtgcgggagtggggcgccggcgtctccatcggggaccgcggcgcggtgcacgccgacgaggtcagggcgcggattcaagggatcttggccggggaagacggcctcaagctcagggaccaggtcaggaagctgagggccacactcgaggctgccgtggcgcccggtggctcgtcgcggcgcaacttcgacgacttcgtcgacgagctcaagagaaagctccaggacgccagctgagctggccccagaatacagctgcgatgtaggccttgtatccttagcgtcagcgtgtacggcgtcacataaacttgtcttgatcgaagcgtgtatgcagtgagcagtgtacggtaggacaatattgtt

SEQ ID NO: 3329 - DNA, 1086 bp, Zea mays
gaagttgaaccttcttttaaggaaccagattccgcattcttgaggatctcacacacctctggcggaagttgccagctgctaacctgtaagcaactcagcgagcaataagacatacataaactcatgagataccaaaataccaatgcaaccccattagtgtatatgttggatgttgctaagctattaagccatggtctagaccttaccttttgtttgttatcataataatatttctttccatcacttgtagttactatgctccagttagtaccagccaatttatccctagaagagattcagattccatgtcgcattaaatttgtgaacatgaacaaatatagaagacaagctaggatgcattcatcagataaaaagaacaattaaaaggggatactgaatctagtggctagtgcatactttagctagtaattttgcaatcaaattgttatacgctctatcatacaatagcatttaatatcttcattatgatttgataagcaaattggatctttctgtgtcaagagttttcattatgtctaactaaacagaataaattgaacatgcaatgcagtggaatatacaatactaaatgttagcagcatgctcagattaaaaaacaccagggattcatgtaactcagcaaaagtcaggtcttcatcacaccattttaaagcacaacaaaaataatgtggctaagcagaatggcagggcagcataactaaagctatttcttgtgtaggtgcataagaattcagagactccgacagccctcgctttgattagtgatcaggttcctatcataattcatagctggcgaactgctatctaaaatgaatccttgttttagagacttccagttcgtgtaaccaaatgtcttcataactttccaaggcaataagaattcagaaatcatggtatcattcacaataaattggttgcgccttcgagaactccaaagagaataaagtgggacaaattaacttcaacaaaatacttgcaaatttagagtagacaaacatagttcagtataaacatgagaccagacataccaagaaactggaactggttctgttgcaaccttctcaa

SEQ ID NO: 3330 - DNA, 1198 bp, Zea mays
ttcatctgcgcatagaacctggcgatgaactcctccgccttgacgtccaccccggcgtcctcgccaccctcccctgccaccgaccctgcggtgctcgcgtggcacgcctccgccaccacccgctccagcagctgctcgtcatcgccacagcagctcagctcgtcctcctcctcctcctcctcgacgtggcgcgcgctccgtgggtcgtcggcgtagcagtacccgccagcggcctcgtccacctcgcctgaggcggcgctgctgaagaagtagcggtcgtcggcgcagaggcccggggtggccggcgcgatgcaggggatgaggcggagcacgcgcgcggacggggtgcggaaccggaacgccggcgtctcgtcgatggagtactcgcgctcgccgccgtggcggagccggtcgccgcgcgcgccgtggcggcggagcgtgcggagcaggcgcaggctgtgcgccgcgccgcccttccgcgcccacagcaccgccagccgcagcagccgccacgcccgcgtcccgaacgacggcttcctcagcgccgccattgcgtgcgcgcgctgcgcgttgaatggggggaaatgcgggcgctggatcgttgctttgctctggccctgctttgctttgctttgctttgctcaggtgactgcttgcttgcttgcttcgaaggttggcgagaggggattgagatatgagttggggcagaaagaggcagaatataaataggagctggcggggcgttgcttgcgcgggcgcgggcgcgggaggaggaagcgaacgcgtttagcagctgcccgcccgcccgcccgcccgcttatacttggcagttggcgttaagctggaggcagtgtgcacatgacatgattgggcgggggcccggccgccaggacgaaggtgagttaggtgaccatgccgccatggcaagtacgccggccacggttcagaccttcggcttgctgctacagccggaaaccggaggcgttggtgtgcgtgattgggtagagaggcctggtactggtagaagggcaatcggggacggagacttcctccgcttgatgggcgggacggccggacgggggtgggcatttggtcggccctagtcctagtggctggcgagcggattcctgggtctccctgagctcgcagtcgttttcgtttcccccacacggtttcgcccggagctcgcagttcgtgt

SEQ ID NO: 3331 - DNA, 1205 bp, Zea mays
aggaagtggcactgaaaattgctgctcagcgcttgacatcatgttgacagtgccctgagaagaggaggaagccactggctcccatctgagcttcccattaggattcctcctacacaccacatccttgtgatcttggctgtagatagagcacctgccactccactgacactctgcacggcgatgcgcatcaccacaacggaaacacaccagccccagcccgggcttaggaatagcccgaaacctctgagtacttcctcccgaagtacccgagtcagaggatttgccacggtaaggatggtggcgctgatgctgagacttgcccctcttgtgggctggacctctagtgttgcccctcctcgtgtcctggctacgaggctgatcaacacccgaagacttctgcgactccatggtgtactggtgttgcatttccacacccagcgcctgctccactgtagtacggaagtccaccaacggaaaggcccccagtgcatgcctgatagaaggcttcaggccctgacggaactggctcgccttctccatctcattataagccacatgagggacaaagcggaccatcttgttgaagcccacttcatactcggtgacagacttcttctcttgcttgaaagactgcaaatcaatcttcattttctccagaaaagtgaccgggtagaacctcctctcaaactgcctgatgaaaacatcctaggacaggactcctggtgaagaggagtgagctgcctgcacgcctctccaccaaatttgatcctctcccttcagcagctgtgtaccaaagcgagcacgatcaccatacacaatctcaaagacgtccatcttatcctccacgtaagtcagccaatccgccgcctcgaccgaagtaccactgccatcaaaggtgtccagcttcatgcccatccactgcatcagagaaagaccacaacggggaggggtgcctcagcctcgtcacccagagcagcacccccagggacagcgcccccgggcactcctccacctccagcaccctgagcagcacccacaggggcaacaggaatagcttgcctcagaatggccaactcctgctgcatggcctgcattgcggctaacattgccgccggactcatagaatccccactaggaacttgcgggctgccacgagccctacgaggcggcatagcgcaggcgactcagagattcccaggtacgag

SEQ ID NO: 3332 - DNA, 1093 bp, Zea mays
ttgcatgcctgcagcatgctgcggctgtactgtacgtccatggcagcgatcgaattgatttggtccctcccagcaaagatggccacgagaaatttatggagggggctcgctagacccacagaagaagcatcgcaatcagtaccattcattcatagcacacagttggccaagctggttgtacagtcaagcacacaggcggccgtgtctaaacttctctgctcgctttttccgcctcccttcgtttagagagagagagagagatttgaatttgaatctaaattggatacggtcgtagaaattccaagtgtttctgtgaaatttcgacctacattatattgatcgaccgcgcgccgttctcgttgcttgaacaaaggcaagagatggatgatcgacgacggatccaaaggcagatcgagtcaagagatcgaccggaggaagaacgtactttgtgaatgaacccaacgaagcagcgtacgtgctggcacactggagcctacatctacatgcactgaagctgttggcgattgatgtggccctccactcgcgctgtcgtcgttcctgccgtccttttcctgtccccgggtgttttttattggctacagggagccagccagccagccggggacagaccagcgctgcccgttccacatgccgccatgcatcgtgcatgcatgttagcagaagcagtaattacgtgaagagtagttaaagctagctaacgaccacgtactcgtgccaaactcgtccgctgtttgtgttagtataacgcatgccggcaccaatagttacactgttatagtagagagaaaatttcccaacggagcaggcctcagtgatgatccgagaggtcgagatgacgtcgaagttacaccacggcaaacggggcctgcacgtactgcatgctcagtgatgctctcgacgagggcgtcgtcgaagttaccatggggccgcgggtagggcagggcaggcggtggaagaatgatgccatgcatcatggtaggtaggtaggtgaatgaagctggagcggcactgaaacctagaagtaattcgtcgtctggccgggcctggagccctagatcgctcgcttgtgcct

SEQ ID NO: 3333 - DNA, 1095 bp, Zea mays
tacatgggaacaataactggtataagtgatatggatcctttaaggtggaaaaactcccaatggcgcaatattcaggtttgacctgatcaatcatactaaatacgcaaaccttgctgcatctccctttctttttcaagataagtgtttgtacatgcaggttgcatgggatgaagcagcaccaagtgagagacgcaccagggtttccctttgggaggttgaacctgttatcgctccattcttcatttatccctcgccattgttcactgcaaaacgtccgaggcaacctggggtaacaggtaaatacagaagtacaattattggcccaacagcattcaattctattaatgaatgtatcattgaagctcttaattgcatttccttccaaattgataataataatttccttgtctgcgtacttgattaattttttgttgtattctgatcatatctgtagatgatgatagctcagaaatggacaatctttttaagcggaccatgccatggtttggtgaggaggttggcaagagagatctgagtactcaaaacggtttagttcctggattaagtttggttcagtggatgaatatgcaacacaacccctctcttgccaacacggttatgcaaccggaattgctaaattcgttagctggaaaacctgtacaaactctggctgcggctgatctatctaggcaaattagcttccagccccagttcctgcaacaaaataacatccagttcaacacttcgctgctacctccccaaaaccaacagaccgaacagttagcaaatgtaatagctacaccaaaccaattgggaagtgttatagtaccacaaaaggcagttcaaaattgcagttctgaacagaaacagaatctggttacacaaccactgcaagtcagccaaccaatggttagtgtggcacagcctcaacttgtccatactcaactccagcaacctcaagtagttctccaggctcagcctcagcaacctcaagtcattgtccaagctcaactacaacaacagcaacctctggttcaaaatcacaccaccatacaaagtggccttcaacaaaaccagcttctgcaggcatgcaag

SEQ ID NO: 3334 - DNA, 1175 bp, Zea mays
atcgaagtgtaacatgtttctcaactcgggttgcgtctgtttctcgtttggcttcttctatccggcttcttgaaggatttggtttcttcgccgccggccggagctggacggccggcctgtcaattttacttcggttgtcgaaggattcgctctcttcctccgcctgttatttccgcgctctgtcgttctggtatttggatttcatgttcctgtcgaagtttggttgatccgaaatatgcatctctacgctggtttcgcgaattccagccgccgttctttactctcctgttcttggactccgcgtttttaaggattctgcacgcaaacgtctcatgtttacctgtctcatgtttacctggccgtctcccaaattccgctgctttcccggcagtttctggaaaaagaacgagccatccatttgttgttgtttcagatttgccccctccgatccttttgtggcccagagatggccagtcatgtagtttatcgctctgccgccggagtcaaatttctgattggtctgcggccgccttctcttccgagttgcggagttcttagtgatttttgttcttccctccacgcctcgctttacttgatttcgtttcaacgagctggttcatgttggaattttgcggtcgttttgttctctctccctaaggcgctgggcctggtgatcgttctgttcgagtgctcgtttcatagccgtttccaacaacggagcgggcgatctgtcacttgcattttgcagccgatctccttgttcgatgtcacatagctaagactcgcctcgcctcttgattcgttgcaggtaccaaaggctgagcccggactgcctcccgctcggcaacggcggtggcggaggcggaggcgccgtgccccgcaagcaggcgtccagatcctcctacatcagagaggacgacgccccggccgtggccacggatggctcccgcctcgcatcgtacctggcggcctcctcgcacgagcccaagccgctgcgggcccgcgcgccgcagccggcgcctctctcctcggtggccggccggagcccagcgcgcgaccacgcacaccaccaccacacctccgactcctccgacaccgcctccccgagctccaccggcggcggcggcggcgccgtcgtcggcgacgtgctgctgcaggtcgactctagagggatg

SEQ ID NO: 3335 - DNA, 723 bp, Zea mays
  unsure (1)..(723): unsure at all n locations
attcgaacaaccaccaagctaggtcagtgcgtggcttattagctcctcagagatgaattaataggaattagctgtacatggaaactactcttggttgcgcttctgaattgcacttgacccaggaccagggtgaaggtaggcagggatcaccgccttccattgcaacatcagccaaggacgacgacgacgacgacgccagggccaggctcagggtcgccatcacaggtccatccggtgagccgagttccatgtgcatgtacttgtatatctccaaggcgttgagaattggccccttggacgaatcgttggtcttcctcagcgccaaggacaggacgaaaggcagcgagatgttggggaagcctggctcgtagagccggtacttgcccggcgcgttctcgccgatgtccaccgtgggcttgctcacgtccgccagccccgggatgtagagcttgaacttgcgcgtctccgggaccaagaactcctcgatctcagccaggtacgagaaggcccagccgttgcccgggaagcctgggaggtcgaggcgataggtgagctcgcccagcgacccgaccaccgccgtctgcatcaccttctgcggnggcctctcgctgccggccacgaagacgggcctgtcggtggagacgttgacggtgccggcggccacgtccaccaggtagttggccctcctcaccatgtccgacttccagatcctgtcgtaggggt

SEQ ID NO: 3336 - DNA, 1270 bp, Zea mays
atttgggcgctttgatcctccaccacccgcaccgccgctggtgcgcgtgccggtcgccggcgccgttcctcttctcggcgtggacgagcctcttgagctcggccttggtcttcttcagccgggcctcgtactcctttttccacgtggcgaactggctcttgagcgtcttgagctcctccaccgacctggcgctgccaggagtggacgacgacgtcggcagcctgctggcctccgccaccgcgcgcgcgttgtgctcgaacgcctccctccccgtctggaactccctggccagctggttcactaccggctccgccagtgtcgtcctctcgctctcgtcggcagcggcgggctcggaaccgcgctgctggcgcctcactgacgatggctgagacgacggcggaaggcctccacgagatgatccctggatgtgcctcgtcgatccatctctccttacgcttacgccagcggtctggctgtgactgtgagccatctgcatgcagctccacggtggttagtatatatgcacgatgcatgcatgcatggacgaagaaagaattgaagaagagcaaaagttttgtattgcacttgtacctgtaacgaagtgatctgcctctccacagatttcatcctgacctcgcattccgagagccgggattcgtagtgctgcacctgccgttgcagcgtggcgatgagctgctctttctgcctcatctcctcgtctttctgcttcacctcctcctctgccttggccgcccgtctttccagctcccgaccgaccagacatttctcctcatcgtcttcctgaaacatacacatccacacgtaccaaaccaccattaatatatttccttccaaaccatcttctcaagccgacgatgatgtttcaaaaggaaaaaaaaaagggggggatggttaattcgtggcacacctgcgttggctgcggtaccggggatggccggtggatccacggagccgctgctgtgccgccgggcctatgcagcgccgggagtctgcctcgccccgtcgggcggctgggcagcgccggtggcggctcctcttctttgggcttgctgctggcttcttccggcttgcctatccctcgctgcatgagcgcgtccagcatcacctccatggagctcagcgccgaggacagcgacgcggccatcgcgcatggtagtagtggcgaccaaacaatgcaggtctctctctcacacacacgcttgtcttgcaaaaccttggaacccttgtttgagcacgctggcaggcatgc

SEQ ID NO: 3337 - DNA, 1260 bp, Zea mays
attttgcatgaatgattggcaatatcttgactaaatatcttccatagtttttttaaactttgatcatcttttatctttgctctggaaaagtggaaatcatgactaactgttgatggtccaattttattaccaggcaccataagagatggcttgctgagaaattaggacctggtattgcaaacaaagagcatgaattcacaatgaagatacttgctattgatgcaaaaaattatcatgcttggtctcataggcaggtatgcgtacccattttctgtattctaagtttccaaatttgggtactaagctaaactgagtatcagtaaaatctttcttctactaacgggattgcttaattcaattgttatagtgggttcttcaagcgttggggggatgggagactgaattagaatactgtgaccacttacttaaggaagacgtcttcaataattcagcttggaatcaggtcatgctctattatttccgccttaaaattttcttgttttcccatcatgtttgagaaaattttccagtttttatgcagtttaacttgcattgcttcattattttagttcgcagatcatcccatgttaatttcatacaattagtatggataactgtatgcattctgatttacttcctgtattttaaagtctacggcattatagaaattacaatcgcctatgtaaacattttctctgttatttgtaaaaaaatgtatataagatcatgtctatgtaaccaacataggtagtacatatctgtcaaagctgggcaaagttgattgtatgactattcttgacattcatattgcctgttacatcctgctgtgtcctgtgctgcttcctaagtgtttttttttctgctgactgatagggatcagctattaagcttgcactgaagtatctttaactttttctccaacagagatactttgttataacaagatcaccatttcttggtggccttgcggcaatgcgtgattcagaagtagactacacaattgaagctattctagcaaacgctcagaatgaaagcccctggaggtacctcaagggtctatacaagggtgagaataacctgctagtagaggacgagcgcatctctgctgtttgtttcaaggtcctgaagaatgattggacttgtgtatttgctttgagtttgctgctcgatcttctctgcactggtttgcagccttcagatgaacttaggtccactcttgaaacaataaggagctcccatcctgaaaccgcggatgctgat

SEQ ID NO: 3338 - DNA, 1112 bp, Zea mays
tggtttaaaaaatgatataatatgaatggtctaaaaagataatatagaagtatttcagcataatattgaggattaagataagaacatattaggttcacaggaaaaaaaaatgagggtgcttttgaaactcaacttggtgatggacaataaaataagattatttatagtttttagaataattgtgccaactggttgcaaatggatgcctcaaatgtttacacttcaatttaatcatgccacaggaaaatttgtgaaagtttagttccacactgagaaaaacaatccaactttatttattgatacctttatttttaggtgcaaacatcaaataaccaaaattctaacatgtcagtatttacctgataaaaggaagctaatctaacatagccagtcttgcactcatggccatcgtctgttctatgagagataattgcagttgacagaggtgaaaggttgataatttcacgagacagctggacctttggaaacaaaaggtagtggacataattaggaaacactcgatcactgtcttagttggaaaatggttctcttgtggttaatgaatttttaacagaatggctactgcaatttgatgagctctgtaggcacagatcatacatttcaaattacacatataaaaatcttaagattttacaattcttcgttcagcaagttaggcattacctccttttgtcttaaacccccacacctttcatcgtcagttccctggatataaatatgcatcggtaagaaagtaaatacaaagacgaggagcaacgtttccatggctgagttcaccaaattacataaaggggattcaggatatgatataatataatagaagcctagtatgccagacttcggtgaaccaaaaaaacgcgatgtttttttagttctataaaccaaaaccttggccacttattcaatctctgaatgttttttttaaacaagtgccttaatgttgaactggcacatctcaagttgaagtatacttcacaaccagcaaaatagatttaactgaagctaagtatctactatgaagctcaaggtaaggaaatacatctaacaacttcactttcactgttgttcctacacggcctctaagcctctga

SEQ ID NO: 3339 - DNA, 1198 bp, Zea mays
cttgcatgcctgcagctctcgccgccgaggtcctgggcgccgtcgacaaaccacctccctcccccgtctctcgtcgtctcggaaggaacggccgcccgtcgcgccaaggattcaaggtgcgtgcaccgcgcttcttgcagagagaaggtgcgctggtataagtatgctgattctctgctactgcctgttacgatttctgccatgttctctcgtttcctcccagctgtgccagtgcctgtgttcgccggtttggggggacagatcaccatgtcttgtcacacaactttgtaatctcgtagtgatggttcgtggtgctcattgtgtgtcggtagggaagatttaatttcacgatgccgcagacaagatcatccaggaaggcccaggacagatctgcaatgagcaacgcccactgttcattccttccgttcctttcctatccccactgttgagaccatgtcgtcacttcatcatctcatcatggatccagcctgtaaccatttcgcccttaaaaaaagatactactaggggttgattaataatagatagatgcacacagacaaaaatagaaaaagtcagctgttgcagtggcgtggttcgttttgcggtgggaggggaagggaggggacatataaggacaagtgcgtttccagcagcatacggcgcccggatacggatagagctatagatggatcacgcattcaggccctgatgcgagcgctccccccgccatttccttcaacttctgctaaatagcctaatacccccatcggccgatcggctcctctacctgcatttgccgattggcgtcttcctcgtcaacgaccagatccatcccctctccacccggggacggggggtctagaacgtcgtcaggtcgtccttatccgcgtgctggccttcggatttcggctgccgcgttggtttaacacaaaccacgcgtccatgcctgccgcttccgcaggctccatgccactgccacctgggtgggttttctttccgggggcacatcacacatggcgtccgtccgcgtaggcacagaaggcttctcctggagttcagtggctattccctactaactgctaactggcagcagcttctggatcgggccatcggggtcggtggatctcactgttttcttttcctgctgcttgctgcatttttcgcagggtgtgggagctgagttgggaggaggactgct

SEQ ID NO: 3340 - DNA, 1254 bp, Zea mays
atcttctctgcctcagctttctcgctggcagccaacctcagcctagcagctgttccattaaccgacagcaacagttcagaaatactggaacagagacacatcgtactcgatgtttcgtgaagataatgccgtacaatatatcttccaaaatgaaagcagatgagacgttacttaaattgatttcttcaaaaagaaaggtacttagtttgtactcagtgaaaacatcagtataaacaagtttgttcatcaccaacaaacaaattaaactatgtgcaaatgattccagaaaacaaaaaaaaaacatctaaataacattgacgtgataacgttaacaggtataagaaaaccagcaatatgggagatggttttggtgtccatgtttatttcatgaacaatgaacataatattgatgggaatactactacagtactgcacacttgacaacattaggtgacatcttgatgataactatcaagttgtgccctgcttggtgcttgccatgccactgacgcacaaaatccatcccatttccccctttctagatgatgtatacttatttcgttggatgcatatagcattgctcaaatatcaagttgtaaaatttaacaggtggttctaacaaagaaatccacgtgcagttcatgtttcaactatgaacaagaaatatgtgcaacttgcctgcattgatctcattcatagctctcttcacatgctcatcaggctcaatatcaacaatcagagtctgcacaatctcgtatccatacatagacattgcctatacagtgaagaaaaatgttaccaaaacttccatgctctagaagaccaacaaatgatgaacacagaccttttcaagttcattttctacagctttggcgatttcattcttctgctcaaaggcatcatccaagttcatcttcggaacacttgccctgatgactgaacatgagcaaagttctattagcattgaatgagcgaagtgaggatgaaaataaatagaaccaacaatattcaggtgactcctactgtcctacactactactactacatgagcaaaggaaaaaaagaatactgattaacatccatgcacgtggtggagtaatggattttgcaattacaaacaagtagcacccttaccatcaaaaacatatgactggatttgctccctggtgttactaagcctgtaaaatgcatcagatgccttatcggcaagggcacgatattgcacagatgccacaacattgacgaagacattat

SEQ ID NO: 3341 - DNA, 975 bp, Zea mays
aggcggcggcagggctggactccacggccgacgaaggcccgcagatcatatactcctatagcgacgtcttcaccggcttcgccgcgcggctcacggacgaggaggcagaggcgctgagggccacggacgggtgcgtgcggctgtacccggaggtgttcctgccgctcgccaccacccgctcgccgggcttcctcggcctccacctggggaacgagggcttctggagccgctccggattcgggcgcggggtggtgattgggatcctggacacggggatcctgcccagccacccgtccttcggcgacgacgggctccagccgccgcccaaggggtggaaggggacctgcgagttcaagagcatcgccgggggcggatgcaacaacaagatcatcggggcgcgcgcgttcgggagcgcggcggtgaactcgacggcgccgcccgtcgacgacgcgggccacggcacgcacacggccagcacggccgccggcaacttcgtggagaacgccaacatcaggggcaacgcggacggcacggcgtccgggatggcgccgcacgcgcacctctccatctacaaggtgtgcacgcgcagccgctgctccatcatggacatcatcgccgggctggacgccgccgtcaaggacggcgtcgacgtgctgtccttctccatcggcgcctactcgggcacgcagttcaactacgaccccatcgccatcgcggcgttcaaggccacggagcgaggcatcttcgtcagctgcgccgcgggcaacgcggggccagagcccggcacggtcggcaacggcgcgccgtggatgctcaccgtcgcggcgggcaccatggaccgcgcgatacggaccaatgtcaagctcggcaacggcgaggagttccacggcgagtccctgttccagccgaggaacaactccgccgcggacccggtcccgctggtgtaccccggcgcggacggcttcgacgcgagcc

SEQ ID NO: 3342 - DNA, 1188 bp, Zea mays
tgcatgcctgcaggaacgcgagctcgtggcggcggcggcggaaatcgatgaagaagcggccgcgcgcgccgcccgcgccgcgcgcgaacaataccgtgtccccggcaccgaggcgcttctctttcacgaagcggctccatcccttggtcatcacgtagctctggctgctgttccagtacgagtagcggaagcgccacgccttccccgcccggtcctcgaagctgagcaccagccccgccttcccgcctcccgcggctgctgccgccgccgccgccgcggcggacgaggcgtccagcgcggggaagtagcgctccgcgtgctgctttgggatgaccaggcgattgagcttccccacgtcgctcggggtgaccaccttctcgaacatgtgctccttctccacccaggccacgccgccgcgaggcctctcggaatcctcaacgacacgggcatgcgcatgcgcgggcgtgaactccatggggctccccgctccgctcacgcttctcgagcgagctccggctgctgctacagctgttgactattgactagtatgctatttcagggatctggtggagtatgtaacagtactatatgccacaactattttaggagggggtttagggttagattagctcaatattatatgtggatgcagctctgtcgaacttcctaggatagcaggtggttggctagctgctggataaagagtgctatttgttcttgtaacaggacaggactggtgatcaaaggatactccgataaaggccggggaaaaatggtgtgtttggtttgcaattgtgagatcttcagcaaaggcgctgtggttgtagatcagtaggcttcagtttacatgagacatggaggggaaaaggttgggaagagaaatacaaagcaagccccagctagctttcttaaagaggaagatgaagcggcatctagcatcctactactagctgaggccggtgggagaggaagaggaggggcgagagcgagagggactataggccgtcgatgtgaggggtggggcccacgagcgacgaatgatagggcttgagatcatgtgagtatgcatgtcactctcagctcaacctattgggatccccccacctctctagctagctcctccatccatggatggatggatggagatgatctcgcggctgcagcgtcgcactgtagaggatacagcgg

SEQ ID NO: 3343 - DNA, 1056 bp, Zea mays
gtcttcgctgacggaaggttttccagccccatcaacttggcaatcagaccgggcatcctcacctttgaaccatccttctcgccactcgtagcattgcccttgcaattggttgcagcaccggcgagctgcgagggcgagatgtggttccgtctgtaactctgagacatgccgtgaggaacgatctgcatgaacgtatctgacgggctcttcgcatcgtcggcctgctcggtccctgaatcatcgtcgacgatctctaccagccttgcagaggcagagctcgtcgaacgcggcgcggagctcttccagctctccgtgccctccagcagcagcaccttgccgtcgttccctgagctccccatttccatgtagtctgtagcgtcctggagcatcatgagcatgttgagcgactcctcgaggtccatggcacctctgagcagctgcttcccgatctcaaccgagcccctcctcgcgccggcagcaccgccggaggagtacgccacgagaatgtcgttgagattctggacgccgatcgccaccttgccgacgtgcgcgccaggagccaggaggcgccgcgcctgcgacgccatcctgcacggctcgccgaagaacgcggagccgccgctgccgccctggcgcgccacgagatgcacgttctggagcttgccgctgttgctgagcgcgagggccagcgccatctgcacgtccacgccgccggcgttcgccgcgggcgccgtctgcttgcctcctcgtcctccttgtaacggcacggtggcgtgcgaatcggcgatggccggcgcgtcatggcggcgcggcgtccctggtctggcaatggagctgctgctgctgccttgtcggtgctgcaagtgcagagcaaacgtaaagattgtaaaagtgagtaaaatttaagcaggcacagtaactgcttcggattgggtctctgcgggtttactattacgctcgtttgtgcttctgatcttgtcgccacccgaggccgaggagctgcttgttgttgtggcttctgaacttgaggtggtttctgagcattcgaataagcat

SEQ ID NO: 3344 - DNA, 980 bp, Zea mays
tttgcatgcctgcatgtgcatatgtgatatgtaatagctcgacaatgcagctcagacacatattggttcagcccacaaccatgaacatgaagattagtgacagaaacgaaacagaaatgggtcatattatacaacaatttaaaaggtcattaggttaacaccttagctcacagaaatgcagagtggctaaaaaagggagaacataatcattaagtgtcacgcagtggtaaacgaaaatgaactatcaacggtaacccaggatcaaaaattcaatgtagattgtagatgtgtaataatgtgtccgaaagatcaagtgctgtttgtagccataatgctataaatacttgaacaacatatagtgaaagaaataagaaaggtggccataaagttattaaagctcataactgaaacttagatgtgcaaagttctacagcatgtcagcaccttatataggcaacaccatagatcatagcaacagcaaagatgatctggagtaaaggatccagcattaagggagtaaaccctaatgttatgtttggttcatatcttatttactaacattggtatgaactcatgcacatggcgtttccaaaaacctgttcgggccctaaacggccttacctgtgcttgataatcccagatgcagacactccccgagtacagactcgacaggatcctgcacaatgcaatccacatataatcaacaagcacaccaaaacggtaagcacaagcagcagaaatggctggaaattcagtgaacgacccattacaggatcggaacttaccatggctccgtggggtgcaaatccaccgacttgaccctctccgaccgttgagcgaacttccgctaatcaccaccaaagaaacaaaatcaaactaaaatcagagcaaaatcaaagcgataagaacagtagtagaaggacaacttggaaaccgagatccagtgaggacgggcaggcgcaccttgatctccaacctga

SEQ ID NO: 3345 - DNA, 1202 bp, Zea mays
gagctcacagacatgaaccacggcctccaaatcatcaccattaacatgaaaaatcggcgcatccaatgctttcgctacatctgtgcaatactgagaggatctccctgaccttggatcagtagtgaaagcaacctggttgttgaccacgatatgtattgtcccaccagtggtgtagttttcaagggcactgagatgcagtgtctcatacacaacgccctgccctgagaaactaccatcaccatgcagcaacacgcccaaattcttggtcctgtcacggtcattggaatagtactgtttcgctcttgtcttcccagcaacaacaggatcgactgcttccaaatgacttgggttcgcaaccaatgacagatggatttgtttcccgcccctggtaggcctgtcatatgaagttccaagatggtatttgacatcaccagtacctgtatacaacccctccccttcattgacaggcttggtaccaccactaaactcactaaatatctgtcgcaagggcttcctcacaacatttcccaagacatttaacctgcctctgtgtggcatcccaatgacaatactctctacaccaagatcagctgctctgtcaaacatctccttcatgccagggatcagagtctcagcgccttcaagaccaaaccgttttgcagtcgtccacttggtcgccaagaaattctcaaactgtgtactccagataagcctatccagcatgacctgacgacgatcataagtgtactcccttgggttaactgtttcgatcctatccctgagccagttgcacttctccctgtcaggtatgtgcatgtactcatacccaatggtgccgcagtaagcctgctcgagccgctccagcacggaacgcagtgtctgcactggccggttctcggacaagaacccagccatcatccacaccccaaggaagaactcacggtccaagtctgcctcagagaacccatagaaccccgggtccagcacatccgggactgggcgctcctcaagccccagtgggtcgagcttggccttcaggtggccgctcacctggtacgcccttacgagcagcagcagcctcatgctctcctggatggtctgcccggagaggccaggcgaggtggcggcagcctggccgacgaagttgcggaaaaagttgtcccaggactcgtcgacggagttggggtcggcctcccatgctc

SEQ ID NO: 3346 - DNA, 1281 bp, Zea mays
tcgtagtaacggaacatagcttccgaacgagcgtacagcccatggattccattcagtgtacgcggagatattggctcgggaacccggactggtccggacggcgcgtttgtgtgagtttggacgggatttccggccggcgacaccgggcgcggcggcgaacaatgcggtttctcggcacggccgcgtagcaggctagcagaggaaggcggggagccccgggtctcgccgaaccgacgtcgtttcggcgggctacggccggccggaacgcgaggcaactgacacacgcccggagcagcaccccgtccttggtggtgtgtgactcgcggccaccttctgcgccggctcgtcggagctccgccgccctgcggcgtgcccgtccacggggaggcccgccgtcgtagctgcatttgcgttgccacgctccgatccgatctctggagatgatcgatggagagtgacccgagctcttgctgctgatggtgttgcgggaagaaagtgtaccgggcgtcacgagctacctccttcaactggtttcgtccacgaaatctttggagatgctcgacggcgcacgaatccgttcgaatggttggatctgatctcgcgttggggagatgaactgggcgagtttggagagtttttttttgttacagaggtggcctgaaagaggtcaaagcaggcagggccgtggttgggcgtcgtcgcgcgtgatggaaacgggcggcgtcaaatccacgctccaatagctctgcggaactgcaatcggcgcgagtgagtggtcgtggcggatgaacacgcgtgtggatgatggatcggatcggatcgtcaggggatcgggtactaagatagctacggctgcatagcaggtgcgtcgtcgtcctccgtggttgcttacccgagctgcggacacgccatacgtggagtcgtggagagtaccttcatccatggagatcacagtctgaactctcgagctcgatcgtaaggacgagctaactaccgtggtgcgaaatggtgataatcatctccgtccccgatccgatccacctccacggcgctgatggcgcggcgcagggcagtgacggtcgaggtggaacctgcgcctggctgccttggatcaagttcccggggtcttggatctcggcggcgcccttgcccttgatgacttcgacttcgacgcgtcccttccccgtacaaaaccacacagagatatccgatgatccggcgacggaaaaccagctcgtgttggtggcgttgtgtcgaccgggacgtcgctgcagggcaaca

SEQ ID NO: 3347 - DNA, 1042 bp, Zea mays
atggccacagcaggtatgtgatgaacgcgaactgagatcgaaccgtgacagccaggagcagaaagtggtgatgctgcctgtgcctgctgttgtgtggcatccgttttgctgtcgttgggcaggcttgcgatggcatggcatggctgtggggattttttacgaatagaaatcttaaaaaaggaaaggatccaaggcccccctttttattattgttgttattatctcaagggcttggccgattgggttcactgtttcacattactctctagtgggcaatgccagtccaatcgatctcacttgcttgccagacaaagccctcagcctcatgttgtaggtcgtgtgtggagcgagccggccagccactagctgccaccgttatgtgcatgcacgcgacatctatcgatctatctatgcagtcagtgcaacctctttcattcgatccggaccttccttgcttgatcgccttgcgtcgtcgtccatggcctttctatctatcctgtacgagtgcaactgggtcattccatctgtatgagtgcaagtgcaactcgggtgctctgggaaacatgcatgtgtggttgctgtgcgtgccgcatcatatatgggaaagggaaacactactacttcgcttgcacattgcacctttttttttgtgtgtgtgtgtgtgtttctgtcatgaggcattagtgcttttggcgttgcatgcatccatgcccggccggcccgcttggagttgcatcgatgcgctcagaagatgatcaagtgtacgtacggatcggagagggggcctgctctggcctccatcgagcgtagcatccactcaaaggccaacatcttatttataggttcctctcgccattgtctccggcatgcatgtatgatcaagagaaaacccgactgtgccaaatttcacaatgccgttccatcaatctactagcatcagttatccttgtgctgtgcttactgtatggtatcacgcgcgcgcgcgcactttgcagcctagagaacggactccatcgccacgtgccggagccggtgacgatgg

SEQ ID NO: 3348 - DNA, 1102 bp, Zea mays
atcttgcatgcctgcagaagctgcccacctacgaccgcatgcgccagggtatcctccgccgggcgctcgacgaccaagaacagcagagcggagacggcgacgtcgaggtcgtcgacatccacaagctggccgccggcgacgggggccgtgcgctcttggagcgcctcttccaggaggacagcgacccattcctgcgccggctcagggacagaatcgacatggttggcatcgagctccccaccgtggaagttcgctacgagcagttgacggtgcaggctgacgtggttgctgccggccgcgccctccccacgctctggaacgcggccaccaattttctccaggtctctgccatgcatcagctagctttccgttttcttttgtttactagtgatactactagctaattaacttactcgatcgatcatgtgattgatgccattgcagggtctcattggacggtttggttcctcaaacaagaggaacatcaccatacttaagaatgtcaatggtatcctcaagccatccaggtagtacatgccattcattacttttcttgcatccaacccaactatatactgctcttagtcttacgtacgtcatccatcctcagcgaaaaaaagtgattaccatattttcttaatatacattattattgcttatcctattatttttttaggatgacgcttcttcttgggcctccatcctcagggaagagcacactcatgcgagcactcgctggcaagcttgacaaaaatctcaaggttgttccaccattatattctgtcagtttggcttgtgtgtacgatcgacatgcatgctaaatccttccttctgccgcaaaaaaaaaaaaaaaaaaacccaggtctctggcaacatcacatattgtggccatccaatttcagagttctatccagagaggactagcgcatatgttggtcagtatgatctccataacgccgagatgactgtaagagagacgcttgatttctccaggcggtgcctaggcgttggtgccagatatgagatgattgcagaacttgctagaagggagcgggatgcaggcattaagccagatcctgagattgatgctttcatgaaagct

SEQ ID NO: 3349 - DNA, 991 bp, Zea mays
actcctcgccggcgatggatttcatgaaggttttcgatcagactgtgcgtgagatgtaagttctaaccctgtctatgatctcgttgccgtcgttagattctgagagatgtttattggattcgaaccttcggatcttgatctgcgtgttgcgcgtgtattcgtgcagaaagagggaggtcaatctgaaggtactcaaggtccccgagatcgagcagaaggtcggatctcgcttggctcagatcttagcactatctctctgtaaaaaaatccccctttatgtgatggagtcgtagttctttgattggttcatgtggtgggtgagagagcaatcatttcacgatatcctgtagtttggatgtattttctgtatgacttaattattttatttctacagtttgaatggacacgagtttacattgccaaattatgatattatcaattcagtaaaatttatgttgaattttgtatcattagtaatctatatggtacctgaaacaccactttttctgtacactaaggtgccgtttggttcacatattggtaacgtaatgggtaaccaataacgttagatcatgtttgtttgagtctaaccgtaatcgataccatactacaaatggatacctttgttaccgctggtattcgagtgtgaatcgttaccattaccatttacgttacatttcgtgaaccaaacgacacctaaatatgatggcatgcagcgtattattacaaacttgtgtttgcttgctttaattaagtaaaattataaaaagtgcttcacacgacatattatgtggagtaaccatgtatgcctttccttgttacatttaaaaattcaggtacttgatgcaacaagtgatgaaccgtggggcccccatggaagtgctctttcagaacttgcacacgctaccaagaagttgtaagttctagtcacttgtgctgtgtcttcacaactgcttattgtcgatgctcaaactatgcttggaaaatctgc

SEQ ID NO: 3350 - DNA, 999 bp, Zea mays
tcttgcatgcctgcagcacaaactcgtgctctggtacactcgccggacgcctggagcgaggtcgcagtcgtacgaggacaacatcaagaagatcatcgatttcagcacagtgtgtctctcggatggctgtagttgatgtgggagattcctaacttcagttcagctgactgctgtttccttttgaatacttgaaggtcgaatcgttctgggtttgctactgccaccttgcgcgcccttcttccctgccgagccccactgaccttcatctcttcaaggatggcatccgtcccctctgggaggtattgttctgaatgtggcattctctgtcgtctctctgtctacgtgtacgatgtctgtccatgttgcaaatggttaatggtttttaattggccaggatcctgcaaaccagaatggtggcaagtggataattagattcaaaaaggcagtttcaggtcgattttgggaggatttggtaagtgaacttgtactatcaatgtatgtgcttttactagattgtttgctgccgtttatcatattttggttgaacccaaactcatccattacttgagcccctactatatgatgatatagtcacataggcctgtttgataccatatgcaaaatgatctcagcttattatgagctcgtccaccttggtagcatcctatcgtcttttgtgttgaatcactcttagatgggcaagttatcatatggaatgccatggtgataaaccaacccattctttcatgtattgtatgccaatcaagattgtgctagttctttatacattggaatgggttagtaattactcctcatgtgtcatgaccaaaatgcagataagaaatgagggacatgattatgccattagaatcatgtgatggcaagttgaacccatcttgatgaaacaaaaaacaagttgatggtaggattatttttatgcagcgagacatgttttggtgtggacaatttgaaagtcgaaacttgtcccaaccatattct

SEQ ID NO: 3351 - DNA, 1184 bp, Zea mays
gcatgtcgtcaacgccactagctcactgcccttcttcccttgtatcagcacatgtaggtaacgtgataaaccaaacataaagtacacctgcgttgccgtgtgcataaacagcacatgtttaaatctatgctggaattcatataccaggcaaaaaatgtacagtaaaaactttacagtgataaaaggtggcacatcatgtttccagatgattccagcagaaaattttaggcaggccttaacgcaacacatttcgggttcccagttgttcactgctaaccttaatttttttccagattctaattgtacaaaagaatatgttctcaaaggaccaaaaaaaaactagggttactgcaacccaaacgaatctagtcttgtccatccaaccccataaagcaaataattggcctactctacttttccctcggcagctatcctaacatattttaaacctaaaaaaacatctgttacccactcgtgcgacaattctcgactgaaaacaacttttacagcttaactcgtgaaaccaaatgcacctcacttcttaaaagaggcagcagttgttttagttgcgcttttttgcttgagggtcatttgccaccagcaccatctatggcaatgttccccaactctagagccattgcctctctttcttcactctctttcttctgcttctctgaaacaccgtcacctgaattctgtgctgagtcaggcagtgttttaggttgctgtcggaggggaccaacatcaagccatggatgctgaagcaactgagcagctgtagggcgcttctcaggaacaaaatcaagtattggaacaagaaaatccgccatcccatgagcatttatttcagtgaactcatacttctccatcagcaccttgttgagaggccagaaccgcaagcgtcggatgtgcctcaaatccccgtaccgattgaagaaatcacgtgagtaccgaccacccaacgcgatctgggaaacattattcgtataccaaaattaaggacacgctgaactttttcttaaaaactatggcaagttaaaattgaaaccttgcttacctttcgaggcatcattcctagcagttccatcatcagtgcaaggtgatcctgcattacaaggaatttctcagaatataactccatcttgggaagggagcaagtcaaatcattcaaatttttttgcaaa

SEQ ID NO: 3352 - DNA, 1036 bp, Zea mays
atgggaccggctcacagtttatgctactgccgctcgtatttcgagagcgatgaaacccccatcttgagcctagtgctcgtgtgtgccagcactagtagcggattattctgcacttgttgtcacgatccacgccttaataacattcctgacaccacggagcgagctatcggccaaccacacgaacatgcgcctacgccttttcaatagaaaaatccccatccacccccatggaaagcaccatccgaagccactgtctcgtgcgtgccccgagctcgttttcctcggcttttttttttaccggccgcgccccatcaccatgccatggcggctgccactagtggagctccagcacaatccccgcttctccgacgcctgccacctttggtaaaaacaggaggattcaatttcaatggctgtcgctgccatgtgttttcacaggcccggacctaggctctgagacaggagagagagagagaggaatttaccactcggccgcccccgttcctgtgtcgcccgcgccggacagtcccaagcaggtcaaacctgcgctgctgtgccgctggagagagaggttctaatgctcttctgtcccgcgccgcattaatttcgcgattttgagaggtctagtactccggtccggtgtagccgtgtaggaggacgcaagggcaaggcaagaccacccttttcattttctatttttaccgcgcctcgcgtccgtccacagtgccggcaggcttcttggctcgttgctctcgttccgctcggcttctgcgttcgcctttgccgcctcgctgctgctccactgatcacgttataaggcttccgcgcaggcgagctgctgctgctgctgctgccgccgccgccgccttgtcgggtaacgagcgacctcgacgtcggccgtctccagtggtcacatgctcgaggtcctggacatggcgccgccgccaccaccgccgccgccgccgccgcatgcgcggcaccatcagggggcagccaagggcggccacgcggagcggaggaagcaaccgctgcaggc

SEQ ID NO: 3353 - DNA, 975 bp, Zea mays
tgctcctttcgtcctccgctagcgagcgaatcgctggctcgaccccgcggcgggaggtatcccgccttcgatctggtgcgcgccctcctcgaaccccccctcgccctcctcatctggcttccgcttgggtccggtcagcgccaagctgtgcgctgggcgaaacttccggaagcttcagggtttatccggcattccgcttcccgcgacggcgctcgaccggttcgctggtctaacggagtttctagctgagtagctgggatttcttgttggagcgtcgctctccggcgcttatttcatttatatttgtctgtgcctcaggttcacgggccaattcgttgcttcgtggggctttggagtttcgagccaatcttgccccttaaagtgtcggtggcagcgtcttgtgatcatcatgagctttgtgttccgagggagcaggaccgacatcgaggccggtggcttcccagggttcgctcccgagcgccgcgccatggtgagtgtctgtctgagcttaaaccagttttcttgtcctgatgtctgatcccattcgtttgtgtgtttgcgtatagcgaattcatgcagggagcaggccggtgaatagcaattccttggcttttcttctaactggtaatccgtttgcgcctgtctattaacgatactgttgagctgctaaagactattcttcggttaactttgtgttttttgttgggcagttcttgttttgttcatggtactgaactcgcaccagatctctcccaatcttttggtaagttttcgtgctcagtggtcagtgcgaggtgtccacgagtcaattaaagttggtttcttattcgtacaaagcatgcaactcttgaacagtttaataactacatatttgtcggatgatcctttcttctctcttagctttggcttgtcttgggagtcttcctaatggccacgagcctcagaatgtatgccacgtgccagcagcttgctcat

SEQ ID NO: 3354 - DNA, 1315 bp, Zea mays
cttgcatgcctgcaggcattatggctggcgtggactccggcatttggatggatgcacatccaccagcaagatgacaaggacccaacaggcaacagggcagaggagagaacaggcgcaggagtcatggagcgaaacgcctcttccaatgctcatctgtccatcgcgggcgccgggcggtcctgaaacgaagctcaccaacaccaaccatgccgggtgggtgccgggtgcgcgcgtgggcagagtggcgctggacggccggcgggcggggcgccggccgagaggtccagccctagccccatgcccctcatccccagtcgggcctggctgcgtggcatgccggcttgcactggcggcttaccggcaagtgcaagccgtcagcacgtgcagctctgctctcgtacctaaagagtcacatgctcctccgactccggtgccccccccaccccaaaaatctcgcattgatcgccgcacattttcgatgcgagagcacaggcgcgtcagatttaaaaatagtccggtgcggtggagcacggcacggcggagcggagcactgtacagtcacgaggccgtgcccagagcgcagcgtaacacgacaagagagggtttggtatagcagacagcagtatccctttacagttctagccccaaaaaactcttatgagccctgctacttgggggccgtggggttagcggcagcgccttctcgtccggcttctgaagcttgtttcttggcaacgctagccaaacaaacgggcgaagtaggcgccgctccgcgcgtcaagctctctgacgggaggaagagccgaaaataccagcttcgcctggctggctggctggttccgtgacctctagagggcgcgtcggggctagcggagcggagtcgctggggcacgtcgtggccgggcggaggagacgaggggcgccggacgcaacacaccagcacaggagcggcgagtcggaatcgccggacgtggagcaggctactcgaggctccgagggtgtccgcgtggcgaacaacgagcggacgtagtagttgcggtagatggggagggcctagcgctagccgcccagccccgttccggcatgcactccggccgacgcgtctcttcccaatcccacaacgacgagacgggacgagacgagacggcgtgcaggtgcagtgcctttgccattctctcgtctctcctcgcatcgatggctcgacgcatctttctccaccccggcagcatccttgtctctatccctctttctacctactccgctccgtcctccgttggggccggcggggccctgagctgagacgagtccaatcggt

SEQ ID NO: 3355 - DNA, 1179 bp, Zea mays
atctcgttgaaggtatcgaccgggccgggcaggcagaagtggacgcagtcggacgacatccacggctgcgggccgccgtgcgcgaacgggtcgcggtgcatgtaaagcccggggtggccgtcgggccgcatgaccgccagcttcgtcacgtccagcacctccaccctgcttgcgccgccgccatgcctggccctcgccgcctccacctcctcgtagacgaggccgaccagctccatgtcgaggtggcgtggttccttctccccctccttgtacggctccttcctcgggcacatggtggtgagggtgttgccctcgaagtggcccggcgagaaggtggcgatgaccacggtccgtgcccggccgccgtcggcgccagcgccagagaccagccggtccagcgccatccggtacgccaccttcatgggccaggcgtagccgatgtcctcctccgggctgagctcctggtggccgtggtggccgatccgcgcgctgccgttgtagtagatggcgccgttcagcggccagtgcgcgatggagaagaccaccacgtccatggtgtcggcgtcggccgcccaccggtcgtcgagcgcgtcgaggtgcacatggttcatgttctgcggcaggctgtcgttcagcgccttgcccgtggccctggcgacgaagggcgcccagtagaaggacaccgtcacgtcgtacgccgggaacgcccagcgccacaggttgaacttgcgcgggtccgggtcccggtacacgacgcggtgcgggacggcggcgcccaggaggcagaccagggactgcgcctggttccgcgacatggagtcgccgacgaaggccacgtgcttgccgcgcaccgccgagaggaacgcccgggcgctgaacgccggcagccggcaccccgccggctgccaccgccagtccaggtagcccgtgtcgggccgcccgttgcggatgcagtcgtggctgtccttcacgtggcactccgtgccgttgtaccgccgcgcgtggcccggcgcgtacacccacctcccctccgtgtagttgcagctctgcggcctggatgtgaagcgatcgacgtgagcaaacgacaaacagatcatgcatgcatggagataagctggtgaatgaatgcaatgcaacgtacgtacccagatgagacgaagttgtatgtgtcgtcgacgt

SEQ ID NO: 3356 - DNA, 1231 bp, Zea mays
catcttgcatgcctgcagccagtgcgtcacccaggccgtgcagcacgtcgaggtcgagtgcggcggcgcgccctccggccaggtctacctcgacaagtgctacatcagctacagctactacccccacggcgtgccccacggcggcggcaccggaggtcagtctcccacttctgccttacctaggctacgcccttcgatttgacaacttggtgccttggctttgcttgcaagttccattcacgttcagcattcagattcaatttgttgtggatggctccgtggatacattgccccaactgatgaatcgggcaaatgctgcattgttgttcaagtgcatccagttatcagtgacatttaaacgttcatgcgggtgcctagtttacgactgaaagtttttgttagaagatttgtttgtatgtgtgtaggtgagatcttggcagtgccctctgttcactcgtgcttcagaattgatttgattgatagcgattggtacctttttggttgttcctctggttgtttgggggcaaatttatgtagattagtcgtccactctcagtctcaggtgtatcattgtatacattagaatccttgactggtccagaaccataggtaggtgtgactcttctgttgaagtggaactttgatcgagatgtggcatggtcttgctcttatcttgtctgcccagtttatgaattggcagacatggatacgtttgtttgccatgccatgtctttcctcttccacttccacattctacatgtttctttagctaattagttcagcttaggagatgttcattaccgaacctccttcaacccacattgcttggctcacgctttctgtaggtaccatatggtagtagggtagtgcagtttccattttgccaccttgtttatgcatctgtctattcaagctttggtaaaagttgtgttcattgcctttttgccttttcttcggggatttaccgggagatatgcctgtatgattgtccacatgattagaccgtggtgcccctggcctgatcaatcgatttgcctcttcgtgttgtgcatctcagggcagcagacagcaaagactgtagccattgtgctcgggggagccgtaggcctgggtttcgtggtcatctgcttgcttttcgccaggagcctggtcaagaagaaggatggtggtgagttagtggaaacacgagcacgagcagcaccatggctctcttctttgggctgccaccatt

SEQ ID NO: 3357 - DNA, 682 bp, Zea mays
atgacggtgtgcataagggcagacgatctgctcttcaacgtctaggcccagggtctgcggttcagcctagggaagaagacttggctgctgttcgggcatattcagtgcttggttcctccccacctcaggcgagcgcggaccagcaccttgcggttcttcaggccttggatgtggaagtcccatggactccatctgaggccttattattgtctcctccggttgaggctgtcatgtctactactgctatgttgggggccatggctccgggccctgagcatatccagggtcccttggaccctgttgatgagccagggaccgtggagcagctggcgcccagtactgaggattctatagctgtcacctctattccttccgcgaatttacctctgcttacttgggaagaggatagacttggtgctgctgtggttccagacattgtgtctaaccagggtattcctcaccctgttgagaggcataggtctgttgagccgcaggatgctgccattaatcgcagaggtggcctcccttccaaccttcaggtatattttaggcgaaagcgtcactctaagaaatgttctgcgccggatgcgcctgctgtttctttcaatgacctggagaaaatcatcaagccagtggtacagctgctgcccatgccgggttgccaagattagaagcagtaaga

SEQ ID NO: 3358 - DNA, 1168 bp, Zea mays
acaaaaacatcagcaaagacagtttgaaaatgcaaaggaaaaaatcaaggtcaaatacatggcattaataaaggactaacgatgtgcggagccgcggacagaataatatgagctagcatgggtttgatttgcacatattatactaactcccagtgaatactttctttattcagagaatgcattcaataaacgaccatatacttccacactttcagttttcaaaaactgaaaaacaagaaaattacttgaaaacttgctacaatttataacagattgattgaaatgttgcctttggtatcaaacaaagcaacatgttgtcaggagaccagggcaagtaaaacacaaggagaggctaaaaaaataagaagtaaaacacaaggaaaggctaaaataatggcgtgaaagaaactagggcttcggaataggaaccagaactcagaatataggttgtgaacaaaacaggaaaattcttttcttgatcaccaggatacaaagcatacccatttgtgaggattaactcaactacctagccctatctatctatggatcatcagactggagccactgactgaaaccaaatgaactccaagactcgacttccgtattttattattctcagggttataaaaagtgctaggtgtagatgatttagcatgtgcactgatcaccaaccttttcatgtggacaagtctcatttgtgctatctgaagaaatgggtgaagtgttctttctaggaggaagtttattttgctagcccagaaatccactgtctacttgaccccctgaacaaaatttggctcgatttactagccaaactattttagttagtccaatgtactctattcaggcctagattatagcaagcttcaactaaatattgcaacagaagtacaacatttggaaaacgcaatgcagaatattcatatattgaagttagaggtgtcagggtaccttaacaattatttctttttcaggccacttataaactgtatctgatggcctacttctctcatgaacttttgacgtcatcatctgcgttcatttcgctaaatgaaagaactgcttctgcatattgtatagtagcacaatataaatgatggattaccttggttaacacaaatgcttgtcaagtgtcgaattggatccatgttctgcaggcatcaaaatg

SEQ ID NO: 3359 - DNA, 1153 bp, Zea mays
tgcatgcctgcagttaaccattgctattggtttaggcaagaaccggaattatagatcttttcaaccacgatattgagccaagttatacagttcctggccgataccggactgtatacacaatttagggcctgtttggaaggatagtatttttaccgttttgaagcaatgctatatagtatttgatgatactgtggtggtatttgaagccaaaaggtgtttgggtgctactaataaaacacggtttcaaatatcatgatctatctaaaactgtagtatttttagagttttggaaactccactcaacacctcagttttcttatgtttcttcacgcatgtccggctcccgcccaccccacgcccacccacgccgtagttctgttctactgcattcgtgatttagcgatagatgacgggctatgcatgttgtaatggtgtatttccttcacttccaaacataccttggtattttttttaaaaaaactttggttttgtcgtggttttagtatttttatcatgaccaaatctaaaccatagtatttcaaaacggtagtatctaaaaactttgctgccaaacacgcccttacaagttagtcaccatcactgctattttaaccccccacggtaatagaagtagatttggatgcgaaatagacatcactagataatatttcttttttttttctctggacatcaccagaaaattgccgagaagaaagtgaatgtggagatatggtcaaaatgcaaatatcatggaagcagtacaaaatgcagcatcttttttttttcttcatgtttttgaaatggtgggcgggggatcagcactggtactctaggttatggatgctgaaggttcctacaacactggtacaaaaaaaaaaatagccaggagggaacagctaagctgtgtgaagtaaattagatgaccaataaatgatcgacctatatataatgtcttcgatattcatagaaggaagagaaacagcactcacagaagcttggcattcttcatccaaagagctctacggagcctcttggattgcttgcggaagtgaaaggcgctgtcttgcatggtggatgtcttgtcgacaaggagcgagatgcgatcgcctctgtcaagaattttctctatgttgtcgaccatgacggtgtgtat

SEQ ID NO: 3360 - DNA, 1223 bp, Zea mays
tatttacatgccggacttgataaatacggtgtcaacactactactcaggctacccttctcacgaaggtaaggcttctgtatttcaagttgctaattgtgatgcatcctagatgtgataagcttcatgttttactaaaggtggctcacctaatattctaaaacaagtaaaatgcaaaattgaactgtataagtagacctcaatgttgctatgtgtcatgcgttaggtcagattccttcaagtagacacacaacaaactagcaggggcatctaattatgtcatctcattgtatggttgtatcataggtcgatgaacatacagacaaagatatcaaaacttagcgggcccttttactgttattggcatcagttgtgtaggtgcattaatatcagttgccacttgacatgacagcttctttgaatattgaagatggctgtaaactgtgttttaaattatgcccttttatggataggcactggacataacaaattaagttattcagatgatttttttccaggacccagcatgtaatacttacatttctatgaactaacagtcactcttgacattattatgtttccttgtgattggcactattagaaatgaggtcgtaactgctagttattgtctcaatagttcaacagggacattggagagagacccgtgtctaaatttcacccttatgttttcttggcattgtttttttaacacgaatcttcaaacaagtgcggaagtgccttccctttttgctttaggaagtaaacccaataagcttggaagtagcatatataatgtgctcggcatggctttgcttccaatatgtcaaaaccgcttatattgatatcctttttgctcaaccactagagtttcgccacgtaggtatatataattgaagtatgctctttgaatttctgacaaattttcttgtagctggatgcttcagaattttttgattatgtgaaaattgaccatttgaaagatgcattagtctatagtgatattttttttctcgaacacgcaggagatgtgcgtatctttatattaagaagagagagagagagtaaccaatagaacacacaccacaccctgattcttagattacattcgcgcctgttacaaaaggatgatcctctacacgcactggatgcaacgaaaccccaggaattgggatggccaggagggatagccctctagcaccagccatctcccaaagctctcgctcct

SEQ ID NO: 3361 - DNA, 1102 bp, Zea mays
ggaataattaaatgctttgtcaataaagttttagatagttacttggtgaagatatatatatatatatatacacacacacaataaatgtgtaaaaaccgagatttaaatcaaaatgttgcctttttcagcaatagttttctgagatatatagtcaaaattccatgtggacaacaataagaatttgctatggaatgctgaaagtgaactttcctgcttcatatattagcttatttgtggtagaaaggtcacctatttcattgcaaatacttactcgtatccaatggcatatttgatgagagtcatgatcctgttcctaacagagtcatatgcacctaagaatccactgtgaacctaaaacatggtgtgaaaacatgtcaggtagcagaaatatgagaacagacacataaatagaaggaagagtgtagacgactaacttgaacttcttgtttgaagtcaccacctagcctctcagggtttagtctgcaatcaggttcaaaacatgttgtcattgttgtgtcaaaggaacacaaaataacaagaaaaaatactactaccatagctacaatttcttccttaaatcttacccagcaggtacaagcattaagtcggttcgcaaatccttccaccttgactaggtagacatgcagaaatcaatgcaaagcaaagtgaataaagcttgaatatatgccaaattataaagtgaatttgccattaatagaacacaaggctttcatgttaatgcatacttgttcggttccacgaaaggcaacaaccaaccttcttcgagaagaatcgcaccatatggcaacctgaacatgttaatataagctaccaaaacaaaggagactggaaactcattgataccgcaacaaaactcacttgtgtgtctgttgaaatattgtcaagaaaacatatcttttcaaagtccgacttgatgaaactgttacgtcccagtgaagtggcaagcatagcccatgcctccatggcagtctctgcacttgcaaacaagcgccgcatatcctctgcttcctgtgcatcaatggacagtaacgcagatgaaacagtatcagccttttgaacagaatctgcaggcatgcaagct

SEQ ID NO: 3362 - DNA, 797 bp, Zea mays
  unsure (1)..(797): unsure at all n locations
tcgacctgcagactgaaaccctcatcctaatcgatacagcttctgaacccacccacccacccacacaagtctccacggagtttcttggttccttttattacgcaagaggaaaagaataaaacaaaagaaaagcgcgaggcagtaggcccttgataccgcaaaagattcgttcgatagcccattcacaccaggccggcccaaccgcccgcgaccaaccccagccacccccaacaagccgcgtgtcggtgagtcgtgagtaccgtagccgcgtcgacggggaggcccagtcacactcgcatcgcacgccacctcgcccgacgtcgggtagtgcttgttgggaacgcgtctcagcgaggcatctgtcatatcgactgcctcgtcggagtcccggcgaggatgagctcctctgacctggggcatgacctgcacgccacgtcgggatctggaacccgcctcgcctcccacgtgacatcatgggcaagaagaacggcagagaaggatcggaacggcacgtgcagtctcgcagtcgcagctgacggccgcctccttccttccccacttcagcagccacccctctcgccccccaccctataaatactccccgaaacccatctgcttaaacattacttatccgtctcaaagcagcctagtgccgcanagtcagtccagtccacaggccttcttcaagcagatatatagcaatacccgccatgggcaactgcacggcgtcgcaacgcgcagcggagtcgtgggccgacaacngccagtgggaggaggcggcgtcatcgtcgccgttg

SEQ ID NO: 3363 - DNA, 993 bp, Zea mays
acagcaataggataggacacggatcgacacccgccgctaggcgcaagccacacacaaggaagtgaggcacggcgatatacctcgtggccggaggcgcgcgccaccgctggtccaccgccatgctggtccccgcccagtcggcaccggcgccgccgttgtgctctctccgctccctatcgtcacactacctcctccttccgtcccacttcctcccccctggcggcgtccttcccccgctccgccgcggcgacctcgccatccgcatgggcggcgggccgcgcaccttccccggcggcgtgtccaagtggcagtggaagcgtatgcaggccaagaaggcgcggcagctcctcaaggcgcgcctggcccgcgagcgccagctctacgagatgcgcaagcgcgtcgagctccgcgacgccgtggcgcacctcgagcggccctgggacgcgggctcctccgccggcgcgtccgccgtggctcccactctgctctccgtcgcggccgaggaccagctcagggcgctcgcggaccgcttccaccgccccggcggcgtggacctgtggaacgaccgcgacgggccccgcgtcttcgcgtccccggccacaggcgccgcctccgccaggttcttccccaggaacgccttccacagcatccagccctacgcgctcgtcggcgccggcggagaggcgagcgcgcagggtgttcgtgagaatgccgcggaggatggcgcgcacagtagcattgcgaccgatcgcgagcctgcggttgaactcacggaaagggatgatggaacatgggagccggtggatgcactcggcgacgccgatgtcagcgacgccggtgactggacctcggaagacgatgacgacgaagctgctgctactcctgaatcagagggcatgggagatgccggttcttggcgtgagcaacgagccatggtaaggagaaatggaaggagcaacggtgcagcaagatgggaatctgcaggcatgcaag

SEQ ID NO: 3364 - DNA, 1179 bp, Zea mays
gcctcatcaccataaataaaaaaggaatagagaaatacagtttgcaggttgcagcatccagtatttgcggcctctggcgttcggtgtcttgctcattcactcttgccatcaaatccacgatccaccacccatccagctgaatgaagggtcagtcagtcagtccaatgcagagcacctcacctgcacgaccctgaactcgacgaatgaatactaccgccgctccaccaccaaccaccatggactggttcattgtagcatcgacggccgagtcaccgtcagtcgctcacaaacatgagtactcgtaacttggaatcctcctcatctttgtgggcgtgcacgaactggctgacactaacaaccattcgctcgcgcttaagaggcagataaacctagctcgcggggattagccggcggaaatggccggtggtgggggcagggactcggtggcaccaagtgacacgggacttgtgagctaccgctctctcgggtcctcctttcctccggtggggcctctcgccatcctcgccgctttattcttatgcaaatcattattgtgccgctgctgctgctgctacaacgctctcctctctatcggcatacgaagaatttcgccgagttcttttttttcctctgtattttgttttgtccaagccatcagcacctcatctcctcctacacgaaccttctctgtttttctgatcgtctcactttccttgccagctcccacttcgcatctacttgtcgccctccgtccgctcgatgcacccagacaatgtttttttttttgagcaatgtccaatgtgggaggaaaaagaaacatttcgtgtcaatcggcgcttggcatcaccccgtggcggtgtactctcgtcgccgccgggtggtggtggtaaaggggcccgctcggcgcccgccgccacacgcgtcggtctctgcccccgccagggcgccaggcacacacgggtcagcttctgtgctagtctcggccgatttgatttggctgacggggacggtctacccgacgcgggcttttttttttttgtttaacctttttgcgagttagccccggctaatcagctgcttatttacatgtgagatccgtgctgtgtgaggggtgtttggacttcggaaagtcccatttccagcacatacacggttgttggtctcagtcgtaacgccaaa

SEQ ID NO: 3365 - DNA, 985 bp, Zea mays
ctgggcagcacaacagcatccacagatcagactgagcacagtaacgtccacgaacttgctgatcccttccccctgcgcaagtgacaatctcgttctcacctggagctggaggcatgtcgaacaacatggtctcttgcattgggtagcgtgcacgtttttgtaaaagatgtcatattccatttaaaaaattgagacacgcgacccaagaagcatttctttaatcgagacggtacggtgacttttggttggcccgctgaatttgatcggtcagaacctgtggctctctgctggagtgcactactagcttgatccgaagaacggaaaagtacacggcaatggcggcttctcttctgctgtattttgaccgtgctgattgctgaagaaagaaagaaagaaagaaaagctcagctggtactctgtagtctgtactcctcccgatatgatgctcggttacaaagtacatcaaacacagagaagaccccttcggtcgaaggagaaaaaccacagacgtcggtcagcaacaatatgactatttttccgatgattatagattgcagtagatttactataaggtgtcgatctcccagcgacagacctccgctttacttgccaagttagtcgctttcttcagaatttagatcacaaactcaacatgccccgaataacggaccagactcttcttcagtcgtcgcctcaactcctctccgtcttccaacttttctgctttaccgccctatataaccctcggtcggcaggccgcatgcaccaaccaacacaacacgaactagaactaggcgtggctcaccgttcgagatggccgcggcagtgactcgccgggtcggtctccacgtcgaggcgaccaatggcggcgccgacgacgagagcaggcgcaatagctcggcagctgaccactcgccagtggccaagcggatcaacgacgccgccgccaacgccaagcgcaacgacgtctgggtggccgcccagg

SEQ ID NO: 3366 - DNA, 1120 bp, Zea mays
agctaggtatctcagaagatggtgagcatttgtctgtatagcattcaagtacctgcaagggaaacaaatgagtatgcaaatttactggtatattctgaacatttataacattaaacatcaattcaaagacaaaaaatagtagtgacatcatactggattacagttataaaaaaattgaatctgaatcaaactcagttttttttttctggagaaagaaacgattataaaaacctactagtggaaaacagtgtagttttagacttccatgtataccacctaatacatttatgaggaagaactccaactgaaataaagcattcactattcactaattattgaatcgaaatatcaatgtgcatctaaacaaaaataaggaaatgtggaagtatattttaatatcttgagaactgttgataataagttgttgcttccgaaactactattgccagaatgctacaaatcacaaatcataattttatgtcagcatatgacgagtcttgagattttaacagacaaacctgtcctggaagaacagatcaatgatcccatttctaccattttcatggttaaagaagatgaacagagcccaatgcatcagccatatcctgttctggagctgattcagaggtgatgagaagttctgccaaaagataaggaaggaacaaggttactaatataacatatacaaagagcaaaaaacacactacgaaacattgatggtagaacctttgaatcaattatttccttcaagcggttgaattcctccaatgccacatcccagttctgcattaggatttctgctgctagctttccccatagggcactcacacttcgctcagtatctgtgcacaaagcacgatactggtacaggtactcagcagcccaggagtagttaccacactcaaactgaaatttggcatactgatacagagcttcaatctggtcaggaccaatctgcattgttaaacaaggatttagttcgttagcatttagcacagaagaggctataacaataaaagtgcacagcttcaacattccatatgaattttgatcttagttaatgtgcactgtgctttctcgacagtgctccagcagcaaaaactctgactcgggattgtcc

SEQ ID NO: 3367 - DNA, 1056 bp, Zea mays
agctagaatccccacagccgccaacgtgggactccccaggagtggaaaaaaattcgacggcggccgaaagaggtaatccctaatccgtaacaaattacccctaaaatggcaattttggcaccgaacatgcgtcgaaccaccagacaggaacctgaaaccgaccaccccaaggtagcatgaacgagagcccgaatcaaagcgaacccccccccccaccaccaccaccacccacacacacacagtcctgcggtgcagaggacgggtggcaccaaatcggtgtcgccaagccgcagcgctcggccgtggtggacccccaggaggaaggaagagcggttcaaaccccgtgcggagggagagcagtagcactgaccctttcgaaagctggctgggaacccgccgccgccgccgcttccgatgccaaccgatggaggacgaggtcggagcggagccgcgcgcgaaggtacctccgatccgggggttccgatcgaggtcgagtgaggacggccgtgggagcaggcggtgatgtggtgcggcgtcgggaccggacggacccgctcgccgctggaccgaggaggccggggcgacggggtggggttagcgggagaggatggcgagggccgggggaggggaatgtgggagactggaaggggaaaagatcaacaaaggcgaggcagaagaaagcgagtgaacgaacgagaggctcagtggggtaaagcaatcgcggggggtcattagctaggaggttagccacgtggcgggggagatatgggatcagcgcgggacccgagggatggatggtgggcgggggatttgtaagtgacccaggggcctctgtgcaaaacggtcgccctgtcggagtctaggctgccaagggcccaggccaaacggcgcggcgttggtcgcaacgggccaaacggcagcgcgtacgccgacgttggcgtcgcgtgccgaacccgcacccggacctgggccgcggcccgcccccggtcctgctgcgcacgagtgaggagaggcccggaccccggaggcgttctacctatccacagtgacgtactg

SEQ ID NO: 3368 - DNA, 1126 bp, Zea mays
agctcatgcagaacgcaacgcactcttttgcatggtgaattaaacgaccccaagagcaagagtggtggttgtaaatcgtaattacgttcctgtcaatgatcctaaattaggtacgcagatatatttgctaaatcctgtgacgccaaccatgatgttgttcttcttcttcttcttttttacctcgatgatacagtggcgcttggttgggcgggcctaacacgacacctgcgcactgtacctaccaggtacagtacactgtaaccgtaagtgatatatatatgctgtgggcgtgtggtattaatctggaaatcgacactgctgcctgttaaaagaaaagaaaaaactggggtaaggaactgcataccattttgatcgtctggtctggttgaagaattgaagtcgggcgagcatccgaggccgatatgtctctgccgtctgcctcttgtttcttgaatacccagcgccttcctacttgtactctgcaatcctgcattgtcggagaggcactgcatacagcagtgtaatagtaatactgaggcaataaacggtaggtataccgtgttggtatatcactactatattcgagtccagatgtttatgggtcaatcgcacagtggtatgtccatccactccactgtcttagctactgtatttagtttagacgcttgatgagaccaactcctcaagacatgaaggatttttttttttttttgaacttgcctccgatagcaccacaggcacttgcgtttcagtaaagagatgtgatagagaacagtactgtctgtctacttcttgaagtagcgatagggaaacctggcttcctcagtcactgcacaaatttcagttttcagtagaacatattttacagatcaagttcttcttccctcgcttttctccgtctgtttctgaaagaaaaaaaaaagtgtccaggaccagtcaatgtgcagcacggaactactgatggagtagtacagtagtaaactccctgtgctttttacctcttgactcttgtagtcttgttcctcctcttgataaggccgggtggtttttttttttgggtgcgcagcttgcgtggtgttttgggtacttgttacacctagggatctctccttgagcctcgcagctg

SEQ ID NO: 3369 - DNA, 843 bp, Zea mays
atcttgctgcctgcagctgccaaacttggctgccttcaccatcgaattttacttgcaaatttgtttccgctctcgtggcggctagctaggcgctaagcgctactactactactgtactagtaacgaacaccgtcatagcatcttcgaaattacacaaaataaagagatctttggccccggcacgccggcgacgacgaggaccggtcggcgaggcccgcgtcatcggagccgacccatatcagcgagcttccgggaggcgttgcgccccgaacgacgcgagccgccggtggctgtctcccagcgcggaggggtccggaggctggcaccggcgcccggccgccggcggagctgggccggacgagcgggcctcaggcacacggcgagccccgagactccgtccccgctggcgcccgagcccgcgccgtgccgccgccggtgctgctgtctggcgggcgacggcgaggggaaccaccagctgccgccgccgggggactcaggctcctcgtcctgcggcgccgggaaggactcaggctcctcgcccggcctccgcttgcggcggatgatcgccgagagccacgaggtggaccgccggggaggctccttcctgttcctgcccgcctcttcccgttccctcccgtgccgaacgcgcaggctgactccgaagatcgctgacatgaaaggaccgtcgcggtgcggaccagcttacctcttgctgccagacgtcggtgaccatccccgtccccggacttcgttagccgcggaaacgcagaaccccgaaccttgcgggcgttgccgggaaaaaaaacggaatgctccggcttggtggcgaggttaccacgggac

SEQ ID NO: 3370 - DNA, 689 bp, Zea mays
ctcgcgatctgcctctgctccttccttcctctcgacactctgctgctgcgggcctgcggctggccgacctgatgagcgcagggagatgaggtgcaagctccacccttacgccaacgccgtgggcgtctgcgcggcctgcctccgcgaccgcctcctcgctctggccgccgagcgcgcccaggccgccgccgaggccagcagcgacgggggctacgggagcagcagcagctcgcccccgcccctacacctgcccgcgcggcgccaccgccagcacggccacgacgaggcaagaaccgggacgttcccacgctccgtgtcgccgtacgtgcagcgccggcgctccgacgcctgcgcctactacgcgacctcctcctcgtcgtcgtcgtcgtccgcgtaccagcaccagccgagcctcctcttcttccgcacgccgcaggtcgggcccgcgttccgcggcgacgagcccggggacggggaggacaccggcggcggcagcaggaggaagctggccgcgccgcggcggtcctttctgtcagcgatcttcggcggcaggctgcggcggcgggcacgggcgggaacgggaagaggcccgcaggaacaggaaggagccctccccggcggtccacctcgtggctcttggccgatcatcccgccgcaagcggaaggcccggcgaggagcctgagttctt

SEQ ID NO: 3371 - DNA, 1046 bp, Zea mays
atggtggtggccggcgggatcgccgacgcgctcacgttcacggccgcgtccagcagcacgtcctcccagtacacggccgtgcggttcttggacaccaccagcgggtgcaccgcgctgacgtaccgctccaggagctggctcagcgtggcgccgtgctccaggtcggactggaccatggggtcggcctgccagcaacccggggtgacctcgtcggcgccggcgtggtagaagccgtccgggaagagggaggtcaggtcgttgaccacgttggtgatgacttcgtacgtcttgggcgccagcgggttcagctggccggcgcccggctcggcggcgaggcggtggttccagtcgccgtcgggcagccagaacttgcccgcgcaggacacggcctccgggtacgcgccggcccacgaagctgtgtggcctataaagagagagttatatgagaggttaaataattgggccgtaaaaaccagaatccaatggaaccataacacgagaaactggcccgtcgaaagcaaagccgatgcagtaagctggaaaacagagtgggcagaactcacgggcacggcttaccaggcgagtcgatctccggcacgacgcggacgccgcggctcatggcgaactcgacgatgcgctcgacatcctcgacggtgtaccgcatgttctctccgtaggcgcccttctcggcgagcgacggctcggagggcagcacgatggggaacgactgcgagtccgtgatgtgccagtggaacacgttcatcttgttggccgccatggcgtcgatggtccgcaggatgtcggccacggggaagtaggtcctgccggtgtcgagcatcagcccgcggtgcgggtacaggggccggtcctcgacgcgcacgccggcggccaccagcaggaggtccccgcggccggcccgccacgacagctgcgagaacgtctccagcccgcgcatggcgccccacgcggtggccgcggtcaccgtggcggcgcccgtggggaggatctccagcgtgtaggactcgtccacgccgtgctgcaggtcg

SEQ ID NO: 3372 - DNA, 1110 bp, Zea mays
ttgcatgcctgcagagtaggatctgctgctaccatcgtcaccacatctacctcttccactgctgaagtcaccaatgcgcccgtgctctggtatgagaaccccagcagagaaaggtgaatgcactgcaaaattagcttctgccagaacaccatcaaagcaaggaacaagcggtgagacagcggcataagcccccggaatgccagctggatggccaaggggcccgctcttcgacttgggccgtctatgatgcggagccggtgcagacatccttcccatcccatcacaggaaaccggacttaggatccacttctccgcgtcctcccatttcgacggcagcttcctcccattgttaaacggaagcacaaccccactgcccccataccgtctattgctaccagtgcccagcggcacgcgctctgaactccaacccttggagtactgcatgctgcctgcacaatgccggttgtagttcggagtcccagggctcgggaacgtgcctgtgcctgtgcctgatctgctccgggatgatgtcgtcgagctcttgctcattcctcccgggttaccaatcaagcatctcggcgagagcactagcagctcaacacctccagcgctgttgagctcatgcaaggccgtcgggcgcgccagtgcagacctctctgacttgagtcgacgctgcttctggcactctaccacacaaacagattccaccatcaataagcaatcactttgaccagttccctcaacaacacaactagcattcatttctactagtaaacggcattacctctcactgagtgggagaacgaatgatttgttgcttttgccacttcctccgattctgcggagcttgctccgtctctcccctcttcctcgtctgcgcgacaaagctattagagcgcatgacgacaaaaatgggacaacataggagcacgagcactgggatttcagcgggatgaacgccacgaacctggcgcaaccgtgccccgcgaggcgaagccactgccgccgcttgggaggggcagcagcgcggaggagtgcgccggatctggatcggccgcgccgcgtggccccaccggctgcaggtcgacgttagacgtacaagggtgcggg

SEQ ID NO: 3373 - DNA, 1256 bp, Zea mays
atcggagacatccctccttggtctcttccatttctttgtagatgatgtgccgtcgtcctcgaaatcctcctcctccctgcccctgtgcagataggtccacagctttttgtcgttgtcatacagcacgcaagggtcgcgctcgtaatgcagacggtcgagagctccgctgacgacttgattgattgcagcctctttattggcttcttcatggtttaggtattgtgaatctctgagtagtgtgcagacatctgctctagttccagtccttgcaggcaacctagacgcagcatcccttacaagacacaggatggtgacatgtggcggccgatcaggtaagagcatggggtgacccctcgctttcgctgttggctttccacctcctcttctcaagggagcaactatagacttctccccatcaacagcagtatagcaaaatgctctatcaggtattgagtacctcaaaaattcctcacgctggaaatatgcccttgcttcatctgagcttgggcttatagtgttcagacttttttgcgctttaagctccttgaacctttccttcaaatccaagtttgcaggatttggtggtggaggtggtggaagggaacctatctgcttaagggtttcctgaccacttttcagccaattagaaaatgcatcaaccaacttaacaagcatcttgtgtggtatactccatgcttcagcagaagtttcttcatcagggtcatcatatgatgaaacagaaggtactggaccaacccagaaccaacttttgtttgacttctcataggcaactaatgctttccagccctttgcacctagaggagctgttctagatgaaagtactttcaatactcctcgaactaaatcttggaggggctcctgtgtttcaagtatcctaggatctccaggattttctctaattcgattgacaatctcttgaacagtaagcgccggtgcattgattggtacagtctgttctacagcactggcatttgcatcctcaaggacctgttcagtttgatctgttgcactttgttcttgatggggcgttttgctgcgctctccactgttgaaccactttttgccctcctctccatccggttgcgtcgctgtggctggaggagtatcttcagcaggagtgaccatagccttctttacggcagttaaaagatgtacaacagagaacgaaaaaccagtatggatcgttggtgttatcggtacatacttcttgttgggcttctcatccttctcaggct

SEQ ID NO: 3374 - DNA, 1063 bp, Zea mays
catcttgcatgcctgcagaagctcaggttgttgatccgtaggtaccacttcatgaatcttgtccataaagcctgcccaatctcccattcctgtgaatcaaacaaagcaaggttagtggaatgtcacacacatataaagaattaaaagcatgccttgtttatatttccactgacctaacaggcgactaacaaatggcttcacatcaaaaacttcaaactcgtcaatgtgctcgccagttccaatgaatataacaggactttttgttgctgcgaccctggaaagaacaaaggatacaagatatgttaagctgctaataggctctgaagtgttatgagttgcttaagtaagttgttcagtgaaaggtatcctaaacacacacatatgaaggaacaaaaatgttgcagacagcagaaattaaagacatcatagacaagatagtgctgtccgcacagcgcacagagcacagaagtccaggatgaagtacatttatcctgaaatgtgaatgcagaagctgttttaagagtaacacaacactatcccataatcccatctagctccaatacttgctaaaaattaaataatgaatgaacaaaattgagtgctcattacatcatttcctagaacaaaataatgtggaattatcttgtgaaaaatgaatctggaccatagcgaagccaagaaatattccaatggagagcatctacttcaggttctttggaagcaatttttgtaagctatgaaacaggaaactaaaccaaggccataatgcaccaaaagagagaatactaacgcgctaagggcaccaccgccttttgcgtgaccatccatttttgtaataatcacagcaccaacagaaacactttgtttaaatgcctgtgcttgatcaaatgcagcctgaccaatactactgtccatcacaaaaatcaccaggtctggtttctgaaagaaaaatacaagaatggcagtaaattttcattagatttcttcaaaacaggggcatgcccagagcgtagtacagttaggtaggactaccctgaaatctggcccagacatttttagtact

SEQ ID NO: 3375 - DNA, 1141 bp, Zea mays
agctggatggagccatgggatattgtcgctggtgaggttgatgttgacttgctcttgatcaagatgctggctagtagatggaggaggtggctctttttaccatgaaagaaacatggcaccagaatattaaattgcttgccttgacctctaaggtcgatggagctgtatatttatacaggcaggaaccgcctattacaagaggaattctgcttggttacaacatctgaaccgattctgactctaaataaactggacacatgcattctgttctattttatctctaacttctaatctgagtcggtttctaatctagcccataagatcctggacaactaaggtcgtagcctatgtatagcatattctaacaatgtcaaccccttctgctggataatatcagctcatgacatcacaccacagctggttgatgaggacatgttgtggataattcaaggcccaaagattggaatggattctttttaggtttggtttgatatatgcatgttaatcgctaatgaatacttgttacattcaagttgatttagattgttgatgtcaaggaactttaatgcatgggaccattcaatccatgtctgtatgtggtactatcatttgtctataatagtctactttcccctctttttgtggagtgacttgtgattataacctattgtcataattgtgggcccacgattccgtagcatgcggcacaaagatcaaattggagaaattgtttgagcactagatgcacagttgctaaaagaaaagtgcttgatgccattccactttgaatgcaacagtgtcttgctaacatacttttctgcattggtttttatagcaaatttctttgatgtttctatagtgatgtccggaccaaggctttccaggctactgatcagttcttgcaaatagcaaagcaacaccatgaaaaggtatgcatatctagtttcctatgatgtatctactttgctggatcactttaaccaaccaatattttgcttttaatggtgtgccacatgttgtattctctttatatgttctgaagcactcattgtcttaagacttgagtagggcagaaggtaaaatcactgcaggcagcaagaggctttttttttttatttacatactctatttacaattctcc

SEQ ID NO: 3376 - DNA, 1246 bp, Zea mays
tgccgtttcagtttctaatttgttgtttatttgattctgcatgttgttttactttgaccatgagaaagcagtctctttttctagtctggttataagagcatctctattatatagttctctaaagcaacccatggaaggtccgtctctggcctacggatggaacagggtgtggggcagacgagatctcggtttaaatccgagtcagcactgcgatcggattggacccagcgaagcgaagcaacgctctcccaactgatacacccgcggacccgccccgcccaccttctggcttctgctcgtctcgtgagccttagcgcttaagcttgccgtcttccgccccttataagaagcccgccgcccgcccgccgccgtcactctcggcctcggcagcaaactaacaaggcacatcgtacgctcgaggagaggagctgcgcgttcgtggtgtgcatggcggaatcggcgatctaccggctgccggaggagtgcgtggcatacgccatctcgctgacgacgcccggcgacgcgtgccactcgtccgcggtgtcgccggccttcagggccgccgcggactccgacgccgtctgggcgcggttcctgccgccggaccacgccgacatcctggcgcgcgccgacgacccgggcgccgtcaccgccggctgcgcgtccaagaaggagctcttctcgcgcctctgcgacagccccgtcctcctcgacggcgccaccatggtacgctagtccaccactgcatgtgatctgcattgttaccagctggcagctgctactgctgctaactgcgtgcgtgtcgtatgcatgcgtgcaagcagagctttgggctggagaggcggagcggcgccaagtgcttcatgttgtcggcgagggcgctcagcaggaaaaacgacccttcgcgctggacgtgggccgctagcccgccaggatccaggtggccctttgttttttttttgtattactacacagtacacacacgtgtgtcaccatgcatgcctctacatctgttcatgcatgcatgcgcgcacgtattccaaaggtccttcgtgacaaagcacgtctcttacgcatgcaacttgcaacctcacgaaagcctacctcagcgcgcgcggaaacgacacaccctgtccatgaccatgagtccatgaccataactgcactgcatgcatggttgcacatccttctgccatcaaagaaaccatgtgaccgatcgacccatcaggttcccggaggtggtgaa

SEQ ID NO: 3377 - DNA, 1193 bp, Zea mays
aggagatctgtaagtctgttgcaaaagagaagaagccaccacctcaatattcaagagtagtaggtgtaggacttcctggggagctgtggaagatgattggtgaatgtttgcagttccgagcttcaagaagaccatccttccaggacatgctgaaaattttccttcgacaccttctggacataccacggagcccacctgctagtcctgagaagtaattccatctgattttgtattacttttacgctaaaacatgatacatggaagcttaaagctttggagaacctttacctgaaaatgtagaagtattatcgatcaaattatcttcgagctaaccattcctgaagattcctttacttggtggtgtaccagcaaatgttgaaatgtcttcgagctaaccgttcttgaaacatacttgcatattgttttccccgacttaatttttgacctagctacttgcttatgcagtgatttcgcaaatgaaaacttgcccaatggcatggaacctccaacaacctccatcctagagatggttcgttataatccaaatgccttgcatcatcttgtatgcgaaggagatgctgctggtgttaggtttatctctggcaactcttgtatagttgcatgtatatcatatactttttcacactaagccttttgcaaataccagggatctacttgcgaaggttgcatcagagagaaatggtagtttcatccgttctctcttagaagcacaaaatacagatggactcactgccctacatttagcatgtcgccgaggctcggcagagcttgtggaagtttttgtggcttaccaagagaatgtagatatattagataaggatgaagacccacctatagtatttgctttggctgctggctctccacgatgtgttcgtgcacttgtaggcaggtctgctagtatcaattctaggcttagagaaggcctgggtcctactcttgcccatgtctgtgctcatcatggtcaaccagagtgcatgcaagtatgtcgtcatgctcacctcatgtcgtttaagcttgctggttcctactttttagattatgtatgtgttatgtaggagctgctgatggctggagctgatcccaacgcagtagatggcgaaggtgaatctgtcctgcatattgccgtggccaggagatatactgattgtgctattgctgtacttgaaaatgga

SEQ ID NO: 3378 - DNA, 753 bp, Zea mays
tggctgtctcggcgccggtcttcggttcggacggcggcgccaggagctccgggatcaaggtgcgtgccgcggcgccggaatctcgccccgtctgctgcttttttttttctctccctacgagggaatcttctgcgattcggtcggtggcggcggcggcggcggcggcgctgggttggtagatgactgaatagtttgactaatgggtagttcccgtagtactagattggtaacaacagggagtcagagctcgaatgttagatgccgttgctagatcgaggctaggcgctgttctgcgcggatcggtttgatgaatggcttgtataggccatccgtaaccctgcatgcacatcttcagtaattcagagcgctcgctgctgaaactcggcggtgtacctgtcagccattctattctatatttctacgccgatgattttgaactcgcggcgatgaaggctatagacggcgctctaacttctaagcttggcctttcgttgtgctccagggcaacaacaatgttagcttcggcagcaaatcatgggtcggcggcacattggcctgggagagcagctgctcggtgcgggtgcggcccaagcacgccagcaaggtgctctgcatgtccgtccagcaggcgagcaagagtaaggtctccgtcgcgccgctccatctcgagagcgccaggagccacctttcaacacgtacaagcccaaagagcccttcacgggcaccattgtctcggtcgagagtctggttcgg

SEQ ID NO: 3379 - DNA, 1111 bp, Zea mays
gcaaaccgtgcagctccggccagtgcttcccgcagaaggaccccttgtatgacccgagccactcgtcgacgtatagtgccgtcccttgcgcctccgacgtgtgcaagaagctcgccgccgatgcgtacggcagcggctgtacgagtgggaaacagtgcgggtttgccatctcgtatgcggacggaacaagcacggtgggtgcgtacagccaggacaagctaacgctggcgcctggggccatcgtacaaaatttctacttcggttgtggccatggcaagcacgcggtgcgtggcttgttcgacggcgtccttgggctcggccgcttacgggagtcgctcggcgcacggtacggtggcgtcttctcgtactgcctcccttcagtgagcagcaagcctgggtttcttgcccttggcgcaggaaagaatccatctggctttgtcttcacgccgatgggcacggtcccagggcagccaacgttctcaacggtgacgctcgccgggatcaatgtcggcggcaaaaagcttgacctccggccgtcggcgttcagcgggggcatgatcgtagactctggtaccgtcatcacgggactccagtcgacggcgtaccgggcactgcggtcggcattcagaaaggccatggaggcataccggctgcttccaaatggtgatcttgacacttgctacaacttgacaggttataagaatgtcgttgtacccaagattgccctgacgttcactggtggagccactatcaacctcgatgttcccaacggaattctagtgaatggctgcctcgcctttgcagagtccgggccggatggtagcgccggagtcctcggcaatgtcaaccagcgagcatttgaggtgctattcgacaccagtacaagtaaattcggcttccgggctaaggcctgttgatgtaagcaaaccgaataacaagataatagtcaagggcaagttttttttatttcgaaatgcttgcataaaaagccaaaaaaaatatcaaggttgacaatctctactataaagcatcaattttcatggtttccatcgtcatacttttttaaaaaaaaagatcttatactttttactaatctaacctgcaggtcgac

SEQ ID NO: 3380 - DNA, 1205 bp, Zea mays
agcttgcatgcctgcagctagccaatgccttcgtatagaagcaaaaaatcacagaaaagtaagggccatgctgcccgctacttgttactatgattgctacctactactgtacatgttactatagcccactgctgtcatattgactaggaggaaggaagtagtcactgttcctatgagttatgacaaaagagagatgtgagagtagcagattattttacaatgacctaccacaaagatgcacgagtactccagtagtatagattctaatatagtgtatccacagttcaatgctgaaacaaagcttcacaaggttataaattcatcggcagaaacctcacttattacacaacaatataatcaggtagataagttgtactagtctgaagttaggccatggaatatttaaaaacgcttgccagcacaacattgccttgatttacataaatgtttaaagtatatacctgcatcaaaccccgctgataccagaattatatcaggatcaaaaactttagtgacaggaagcagtacatggtcccatgcagcaatataatcagcatcaccacacttgccatgctcccagggaacattgatgttataccctttaccagcttcttccccgatgaaacaatgagaagcatccccttcagcaggatagaagcttccataatcaaatctacaaaacaaacattagaacaataaacatttattatatctttagaacaatagatattttattatagcttcattaaggtgactacaagtgatagagataaacagaggttttgtggcagattttctattccattaagccacaccacaaaccatggaaggattgggtacataaagaagaagcaaacttggaaactaagaaagcttcagcgtatgctatagtagatgctaatctaggattctaggtgctaagaaagataagaagataaggtgctgacatatgcaccaactaatcctaagataagcacaaggcttagtctatcaacaaacacacactttcttttttttctcgaacacgcaggagagttgtgtatcattatatttaagagaaaaacaaaagtttaggccaaaagatggaccaaatacaacacctccttatggaggccagaagcaggcatacagaaaaagatccatcaagaaaaacagttaggcgacctctctcctaaactctgaactatggccataatattctaaga

SEQ ID NO: 3381 - DNA, 526 bp, Zea mays
gctcggtcttgggggtccaacagagtcgacctgcagcaatggggtgcacatttgtgtggttatgggatgccaacatgagttagacttcatcgaaaggatgatttaaaaatttaagtccaaattgcaaaaagcttttcaatgacagctgaatgacaatagcatgaaagatcctatcagcggtaccaaaaacacgcggcgtggacccagccagcatggagaccgacggacggagtcccgggcttcgtattcgttccacgccagccagccgcagcccttccagcccgggagcgccggccaaactctgaaagcgaacccaggtctccttcaattcaacacgatgcgcgcctcccagaagggcagaaggcggaagccaccggcgccagcacggcgaaatcggggcgggcagcagcaggagcagcacgcaccgtcgcagcgcggtcagggccagtataaaaacgccgtcgcattccaaagccgccggtttccacacaccacaccacaccacagccagccgggggtggttcgg

SEQ ID NO: 3382 - DNA, 1137 bp, Zea mays
actcagcaggggagcatctggtggatcagggaggggccgtgttgatgagatttacctcaaactgcggaccagtacaggtttgtttgtgctgcgagtagtataaccatttaagcaactatgcagctgtttttctttccgtttcaccagcatcgtacagaacaaggtgttgagtatatgctcatacttttggtgatggtgtaaggtgttgaaaaatgatatgcgtaaattgaacgatgatgaaataacagctgggatatgtatgcttgtgagttttgcacgctctgtgttggcaagttgcctgtagagcagtataatcatttacgggtacatgtttatatgttctaacattggtgaacccacacataatttctgtactaaatatgctttgttagtttgcttttatttgctgtgctgctttatgaaatcctcaccgtatttttcttgccttttgttcagctccctcattaaagctgattgatttacctgggatagaccagcgagctgttgatgattccatggtaggtatttgaattatttctaaactatttttgctatacatagatgcttagagattaggtggagtgctgattaactggttgcaccataatatccacaatgaactttcatcagaccattggagctgttgatgattccatggtaggtatttgaattatttctaaactatttttgctagacatagatgcttagagattaggtggagtgctgattaactggttgcaccataatatccacaatgaactttcatcagaccattgaatcttgaaacacaagctacacattttatcttgggaccaataaaaaaacttgacctgcgcgggtaaaacagccccatgtattgcattaagaagtccttatgcaagtcaagaaaacccttggacccatgtcctacccatacacagcggcaccgtagctcatatgagaatgaccacagccagggctgggtcttagagttgtgctttggtgtagaactggtgaggagatttttaaccccagtacgaaattatctctcacagggagtcgaactcaggacttgattagcgctactctgaccacctaaccaactcagctagagtccctttcgcatcttaggaccactagaacatagctttcgtttct

SEQ ID NO: 3383 - DNA, 1058 bp, Zea mays
cctcacgagtcgacctgcagctggtctgcatctgccacaaagcatgattttgtggggtggatatgcgggttcccataaaaaacacgccctgcctgcaagcctactaaatatacagttaaaaccttttggcagagtctaccatgatcctccaatccattgccacccacccacacccaacacaaaaccaaaaggctaatctagctgccaagttatctatccaaaactgtaattgtcataaacagatgctaaaaatccagttacatctcattgtgagagcctaaaatgaacttcacctgtaactggtcaacactagtaaatcaaaggacctgtctatacaatattattctggtaaaaaaatctcttccagcacccgatgttctggccactggatggagattgaatggccagggtcctattcatctttgagcaaactgcttcttcccgagctctactgcggtactgccccaatgccactgccatcccatgcgccttcaccctgccgcagcaggctagggttttgctgaagccagcatggaactccagcaagaaattaacccgcatgcggcaaccacctccttatccctcactccaccgccggtgttccccaagcctcaactccactagacagaaatcctcctgatgggctagtggtgtcattgctgctttgcctcgctgccagcccagcaaaagccgtcaggcaagaaactcccattgtccatccccaaaacccaaccccaaagaccaaacaccaaactctaatagtataatctcaatagagatctcaccagatttggggaggacaaggttgtgccattcgtttatttgccaaatacaactgggtgccaactgccaccagacgaaacaccctagcattctccaaagtccaaaccaaacgtccaatctagccccaagattataagggcgtaaccaacagtacgtgcttaaattgccagctcttgtgaaattctattgggcgaataggagatagagcaatgagctagtgctgctgctgccacagtaagctccctctctcagctccgttgctctgcaggcatgca

SEQ ID NO: 3384 - DNA, 1153 bp, Zea mays
aactcacacattggatgcccagcaaaaccattgcgctctacctcagagccatccacttcagagtcgccagtcttcatatgctgagctaactgtgacttcaaataaagcttttgttcacaaatgaacaccttcaaaacacacgaaaccatttcaataaataatcatgaatataaaaatcgcaagtgtaatttagagtgtaaattacatgaccccggttctacaatgttgactataggacaacaatgaccaataaaaaattagtgaacactcgtatggccaagtcacataattagcaattgatagcacaatgtcaagcatgctagttgcaagcaataattaggtattcagcttaaatagttcaaataggctattcatgtcaattgtctgtagtgggttgagatgcatactctggaaaacatctttaaattaaaccatgttatatacataaacgaataaattctgctcattatactaagcaaaaaaaaaactacaggaaggaaacaacatttttcaatttcaaaatatattgtacagtaacataaaacagctcactaggtaagctatagcataggtaccagcgtcatatactgatagacaagacaaactgcactgaactgtacatgcacaatgaaaggcctataaactaaaaagaaaccattatgcatgaaatagaaacaaagaaaaatcagctctagattattcaaaacatgtctaaagtttgatgctaaatttgacagcataatccatgaaatcaactatgcacgcagtataaatgtcccttcagttgttcaatgctcctgaacttgcttttgcgctttgcttgagcaacctgatcttctgcgttgtcacaaacattacaggaaagttgacacatggtccgtatcatccggtagtggtccgcatcatcaaagtatgcctttgtatcttcatggtaccagaaatccccagctttgccctcatttaccccatcaggtaacacagagaaatcagtgatcactctagtgtatttacccatggcctgtgaaatggaaacacaatgtataattatattcacatggatactattcatatgcaatcttattgttttcaaacacagagaaatcaatggcaccaggtgctgggtctctgtgccggcccataggcatgcagtgca

SEQ ID NO: 3385 - DNA, 1004 bp, Zea mays
caggccgatctatggcaaaacagcctgtgctacctcaaatccatggctctcaagtgcgctgctgagctcggcatacccactgccatctacagcctaggcggtgctgcctcgcttcccgatctgatcgcctcactgtccctcccccaggctaagctacatttccttggccgcctcatgcggctgctgtcgtcctcgggcgtcttcgccgtggttgagtccccagaggctgtctactccctcacaccactgtcatacctcctggtggacggcatcgctgccgataacaatcacatggaccatgcacctttcctactcactgtgacgtcagcacactacattgacctggcaatagacctagctgactggttcaagaaggaagccaagacacctcctttcgatcacaagcacgcagcatcgctgttcgaggagagtatggagcgcaaggctcccgggttccacaagatgtcaatactaggtttgttggtccatgacaactttgcaaccagcattgccgtgcgggagtaccaggacgtattccagggggtgaagtcagtgactgactgctgttaccatggggatggcacaacagggaaggccctcgccaaggccttcccactgatcaagatcacagtactggaccttccgcaggagattcgcaagataccggctgatggtgttgttaactatgttggaggtgacatgttcaaatccatcccacgtgctcaaatggtgttacttaaggtaaatagtgtttcttcactgcaaaaatataatatatatgagttcatgcataatttggaaataacattttttgtgtagataacaccacctcatatatacttaagagtatcttattatctatgatatgatgagcttgacgacctctacaattttcctgagctccatatatataatatattttaatattcctgagacttcccatgcatggcatgcagatggtgctgcaccactggagtgatgaggactgcgtgaagatccttgcc

SEQ ID NO: 3386 - DNA, 1135 bp, Zea mays
gaatattaccttaatttgcgggtacagatttgaacatttttgccgccattgtttctatttgaactcattgatattggtgcaacatgttgttagcagttgacagaaacctgttcaagcatgcacttgatcatggtggtttgaactaactacttccccctcctctcaggaaattcttgatggcgttacagacattgatatggtggttaatctgaaactaagagaagatgttatagtagagaagtgccttggcagaaggatttgtggccaatgtggaaagaacttcaatttggcctgcattgatgttaagggtgaaaatggactcccaccaatctacatggcaccactgttgcccccaaacaactgcatgtcgaagcttattacccgagctgatgataccgaagaggtggtcagaaatcggcttcagatatataatgacatggtatggatctatgtgcaattcatacttatcattgataataaaatgtatgacatattctcattaatgtttaaactgtgacatactgagtatgccatgctgattggtcattttgattctgcaaggttttcatgcaacttaagcgcctgtgtcatttgcattatttgtgtagacagaaatgttgtgctgttaaagatgttgaaacatactcactcttctaaattacaagacgttttggctttactctgtatctagacataatgtatatgcactacaaaagctgtgtatctagaaaaacaaaaacttcttatgatttagaacggtaggaatatataatagttagatgtagagtcgttgggttgcatgagataatatggagcattccagggttgccttgatgtcttaagcatccgttacatttgattccccgaagatattttgcactgtgtagatttggttcagcatagcactgttctcgttggcgtgttgacgcagtgaaactttaaagaattcaggctctgatacttagcatttggtttcctggcctttttgcagagtcaacctgtggaaggtttctaccgagagcaggggaagctcttggaatttgacttgcctggtgggatccctgaatcttggccaaagctgctccaggttctaaacctcgaggaccaagaggagttgaggttggctgcaggtcga

SEQ ID NO: 3387 - DNA, 1146 bp, Zea mays
cagtttgcatgcctgcagtaccccgcgctacaagcgaggggagggagaagggggcagcggctgcgttgtcgctggtggaggtgaggaggctgtgcacggcgcaggacgtcgtggctggtctagagatagaacttgtagatagggttaggaggctgatagggacacatttgtgggccgtgtgtaccagaggaggcctaggccgaattgaagatgatggtgccaggtgcagttaagtcaattagtcagttagcatgtttttagcagattagaaattaaataagattcgttttaaatcagttaaagatttagtaggagtttgttagatcctgagttatcaacctggactcatcctataagagaccagggatagtttgtattagggattattgaagaaaagattaatctcccagtataagggataccttggtcgcgctggctggacgtcccagcaagcgcgccaccgccagggatcctccgcattcttcccaccaatatttcctgcgctcttgcgccacttctcctgctgtgttgcttgctgcccatagatcccccgcaagatcaaaaaggtcccatcatttggtatcagagatgaccagcgccatgacatctgagtccggctctgggactgatcctgatggacgcgccatcgcagattccctacgccaacttcttgatcaacagacccaaatgctggctcaaatcaccactatcaacaagaggtttgagtcccacgaccggcgacttgctcatatggagaaagcgcccacggacgaggattcttcaatcccgccgcatggtggtaacattggtggcagctgcggcggcggcgccgcgactggtgccagcgacgaggccttcagccaccgggacagccacagggaggactacaccagcaggcccaaggcgaattttccggcatacggcggcgattcagacccccttgacttggctgacaaagtgtgacacctatttccgaggtatgaggacaccacgggaggaccgtgtgtggctggcatctgtctacctcgacggggcggctgctgagtggtattacaccatcgagcgtgactacggtactatcgcgtggagtagtttctccgagttggtgcatctgcggtttgggccaccacgcagcgagcagcaaag

SEQ ID NO: 3388 - DNA, 933 bp, Zea mays
agcctgaatcagcttctgtgcttgggcttcataatgcatcattgctagctgaaaatatgcactctactaggcaaattattgttgaacaggctggtgcattgctgtctgtaagtctcatatttcaaaatcttgctggttccaattagctaatcttagtttatcttcttaccactttatttaacgtcttctgttcattgctattgacttgatgatgtttgtgtgttacttgatctttgctgataggaaacctcatatatttctgacagtaaacatgtaaatttgcatttgctgctatttgaatgttgtgtgttatctgcattattactttggtactgcaagatttgtgttttgtagatccatggaccctcaatttccatcttttaaaatccagtcaccaatagtaggatcaaatcggatgctctacagtggcatccaatccaatgattgcaagtcgcctggttgctccccaggattgaccaggtgactaatcgcgattaggcgacgaccagggcgactagttgacccctagtcgtcctagaccttttagacttgtagttacacttatataggtatatacatatataaatatacctatatacattatataaattagaacaaacagctacataaacaaaatagcagtttgcaaacagagacataagtacaagtcactactcatcagtcatcactggcttaggattacgacagcaaccatccgggagagggggggggagcaggaggaaccttgagatgacgagctcatcaagtcaatggtgctggagtagccgctgatatctggactggagcaggcgagcagccaagcaggcagaggggcgcaggcgccgttgaatggagcaggacagcagggggtgcaggtgagcagccgccggtgctggagttctgcacttctagggcagctgcaggcatgcaagc

SEQ ID NO: 3389 - DNA, 1240 bp, Zea mays
agctcggtactggtggacctatcgagtcgacctgcaggttctatgtccagctcatgaggattcctttgagtcgtggtggaagtctagcagctctcgggcatctgattttttgagaaaaggttttaattctcttgtgatcctaggtgcttggaccatttggaagcataggaatagatgcgtttttgatggttgtaatcccagcctggtcactgcccttagagtggctagggaagaggcggtgctatggtccctgactggtgccaaggctctgtccttcctccaagttgatgagttgctagcttagatcagtgttgtgggtcgtgtttcctccatgatagtcggtgatccttagttagtttataagtggtgtgtgtgtgtgttctgtaccgggattctatccccctttctattctttctattaatgcaatgatacgcagctctcctgcgtattccagaaaaaaaaatttaagctgtaactgaaagattttggctcccagatgtgggggctgaaattgcaagttagtcccttccggccaagcccggtcttcaatacatgttaaaaacattcaagaaaatgattgctgttgtagttccatcctaatatcctattcatatatctagagtttatggacgagtttcctaattcaactgtgtaatatggctttcatgtgtgcactaaatagttaaaactaatagaaaagatttcagcttacagtgtcatgttatgactggaagagtatatggccgccggcctaaacagcctgtaagcgggccagcaataggggcctcggcctagttagataagtgcggcgatcgccgatcagccagcagataaggctagggagtaaaaataggagagagttgttagatcccctgaaataaagttagagtttgttaggccaaggctatgtaaaagcatcttcattgtattcatctgtaagcaagtttaatctaaagaaagagattacacttgcctcatcttgttacctgttctttgtcgggcgtggtgctcttttcaagttcatcacgcgcacggccctcctccaaccctcttcccaacagccacacatacaaccttcgtagtaggggtgatcgtatcaacttggtatcggtcatgcaaggttccaataatgatgatcacatggcctccgccacccagtcaccaacgctggagacgatcaccgacgtccagcgacagctcggagacttcgccacctagatgtcttccatgtcgtctcgg

SEQ ID NO: 3390 - DNA, 982 bp, Zea mays
ttctcctgcaactcagtgttttcacgttctttctctttaacaacctccaaggtcctgatcatctgaactctgatagcaactatctcttcctctgaattcttaatagaattgacaaaacttagctctttggaatgccattcctcatgtgcactctttgcttctgctttcagtctttcaactgttttcgtaaggcaaaccttctcatagtttgcctcatcaagcaatagctcatagttctccttagtattcttcagactcaagctcagctcctctacctgtgcctgagcacgctcaatctcatcttgtttgagaaggtacttctcttgcgcctctctggattcagctgacatttcctgtaaggctgaggccagaccctccattgccttcttagttttctcaagctcatctttgtttgcctcgagcttgtcagccagctggttcttctgttcattcaaggtctcaatttctaagctagtactcttatcactgttcagggcctccattttctcttcttccactgtatggagcttcagcctaagcccttcaacctctgtccatagatccgccgcctctttttctgctgcatctgcccgttggccggacacaccaatatcattcttgagctttgtcagctcatcctccgagaacctgactttgtcacgaagagcagcaacttcagattctctgtcacgaagcaaactacttgttgaatccaattcttccattgctgaattcaaagattcacccttcaaaatattagactgatcagcctcttccaatctgacctcgagaagctgtgccttcttctgccattcatcagctaactgctttgacttggaaccaaaattcctagcatcatcaacatcactctcgagttcatcaatcatgcgctccaatcgaactgccttttcttcagcagccttttttttctgaagctcaagctttaatgcaaagttctgttcttcaagattctgtatcctct

SEQ ID NO: 3391 - DNA, 800 bp, Zea mays
agtctctatcctgatatttccataaactaggcctgtttttattatactttgcagttgcatgaaatttcagaaccataaccatatgggctataattgaacttgtctcattaacaggacgtaccatatctcccgaaaatacattggtcaaaaaactcaagactgaaagatgttatttgccaatttcaagcggtaggtgaactgtttatatcgcctaaaacatatggttgtcctattcgtggattgttatgttgtgttgttctatgttattgggttcacacaatcagcacttgaaaatcttgcaagagttctggaatacgatggacgagattgataaggtcctttggattgttgatccaacaaagccgtcttatgctatgtctcatcgtcgtatagctttaggtaattcccttactcgtctgcaagtgatagttgtggtccccttatttatgtttgcttagattgctatttgtgcctgaaatcaccaggtgacgattgctacattttgttgcaagttgatgcacgcaagcccaactccttaccagagtaaggtcagattttaggactatttgaagccaaccatggttgatcccatgcgtcacgatttcttctaggtgtcgcttcttgggcacagatggcaaacttgatcagctgataataaaatggagaaagaatcgtaaaaaatggtatactcacatatttcctgcattgcattgtacatgttttcttatatactaatgtagatgtactattgtatttttttcaataaatatatttcctgaacttttgcctatgaacatgtg

SEQ ID NO: 3392 - DNA, 1092 bp, Zea mays
cttgcatgcctgcagcaccgcactccgtactgtttgcatgttgcgctgctccttcgctaggccgactgcgaccgggagcgacgacgaaggaacaaggaacggaggaggtcaggtattcgcgtgattgagcggagcaagacgaatttggaaactgcgggcgcggcagcggaaggcagggcagggcggcggctcccgggttctctcccgtgcggctggcgttgcggtagggaatatttgcctgcggtcggtgacgccagcagcagaccagactggatttgcctgtttgggccttgttggagaaaatgttattttgggcctacttttggactcctcgcttcaggagctcaacaaggctttgggcctcgggtgagatattggcggaattcgagacgtgcaaagaaactacgatgatctctccggaagccgtaacgttctctctccatgttcactttccaacacaacatgtataataataaatattctataatctttatctagttctggtaaaatcattaaacactacagatatttttttatacgtatagatcattgcactaggtgccatagcccatagccaatctaaccctccaagagatcggacaaatttttagtagtgctactggtactaggtcttccatcagcagaaaaagtcaggggatcagggtctcagctctcactgtcagggacatcgacccaggaaccaatggcacaagggccatcaggcatcaggcccgcctaatgcttcctcttgttcgccttccactgcttcactatgtaggctactgcctcgcccatcggtgctctccggtcctccttgaagttccacagctccggtatggggtacctgccgcttggattgtactcgttcatctcaagaagggccttgacgaccacatcgtgcgcctgcacacccagttcagccttcaaagcttgcagcttctcatcatcctcccgaattatttcctgcaccatcgagtgagtgttttagacacagcaagcaggccaagcatgcttcaccacaggttagctaagcatttcaagcaagagtcagcttcagacgggattttcctgtgacaagttctttttctgttt

SEQ ID NO: 3393 - DNA, 1180 bp, Zea mays
atcttgcatgcctgcagcagaaccgtagaagtagcagtctgctgaagatgaacagccgggagcgcgacggggaagaaggcgcgggcgtgacgacctcacaggtttgcgccaacagggagacgagcgcttccaggcgcccaggatggagcagactggatctggctgcggacggcggcagatcttactgagacaggctggacaacgatgctggagccgccctagacgggcggagttgcagcctagcgccgtgccctggatgcggacggtgggcggcctcccaggcggatacttagacacgcaacaggcgtggccttccaggtgatgtgcggacgcgcgacggccttaggcggacgtgcgacggaggccgggagggacgacgacggctgggagacacaacggctgaaggagcgaaaaaaacgggccttaactggagccaccaggttgtgggccaaacaagtcatcttgactgcatgacattgaaggggagtaagggctgtttgctccaccccacgtttttgtatcagactaccagccagcaggctatacacctgccacactttgtccacatgacagtattactatgtgtctcttacaggagggcgggcctgtttgcattttgaaactttgcatataggtttgttagtcacactaattttgttggatttttttcttgaacacactagagagctgtgtatcttttatattgagaagaaaaggggtactgaaacactggaggatcaccacctagagaggtgtagtaggtttctttgtgttagatggatcagtttttgtatgacttgtttttggtccatttctgggccttgacctcttttcttctgttgcacaattctcccacatgtttgtgaaaaaaaagattgcctagcgccttttgtaaccttgacaccaagtataaccttgacaccaagtatccggacagtcaacaaggtgatggccttggtggccactaggccccacaactttgcttcctcatagaccgaagcaaggataccttaaggttaggcgaagcaacatcaaagacaatgattccgataggtctaaagtgaccaggctccaagaataattaatgatttgagaccctacatatcttgaccagtggcaatctctttgatcggtaccaccaaacttcaaaggatggctcagctggctggggagcaaggtt

SEQ ID NO: 3394 - DNA, 1146 bp, Zea mays
tccaattataagcagctgcatctgtccgatcagatatgagtcactagtgcaaggtcaattgatccttttggcatgtcttctgcatctctgcaacagtggaataagcaaatcacaagttcacaactaggtcccgcataacttaccatcctccagggtgattgtaagcttgttttctattttcagtaacaaacatgggatgatgattttcaaaccggcagattttccccccaataaacacatccagggaccaagttacctgtgactggagaaaaaaataaaatacgaataatgttagctgcttgtttttgcaacggtccagtattgcttgaccgcgaagagtatcttctcaggtacaagagggccaccctcatgatcagccaatcttgtcttccacctcatggcattggctattttctccacttttacaagaacatcaaccttgtcacgaattatgactgcaccctccgggcgtaagattctgtccatttccaggagtatatcttcaaactgacatctgttcaagaacacaaatattagttaggaagttttattttattcacaaacttgtcccactgcaaatttacagatgccacatgcttacttgttttggtacaagctgaagatgccattagaatgtataaggtcatatgtccttggataagtagagaacccttcacacctgaaccaagaataattgtatgaagaacaaatgaacatttgataagagaaaaaaacagtatcttgcaatgcaccaaaactggcagacatacggtaagtcaataacgcaaagagaaatatataaaaaaggattttttaaagcaaaaaaaaactcatactagtgaacaaagcaccaatgtgaagaattcacatgatgaccttggtgacaagcttttctagggtgcacctagtggatatctatgtgttgatctctaccacctgtctacccatactcaaattttgggacattggatcttattagaatattccatccaggggctctcctttcttttaccttttgcccttttcatccaaccatcatattcttcctacaaccacgcgtccacgccccaaggaggaccccagggctctgcctgctcacctccccctatctccattggcagcctccgtcttgtcctcctcccattt

SEQ ID NO: 3395 - DNA, 1028 bp, Zea mays
aagcagctcccgttcctcctccccgcgatgacctccggtcaactccgacttcttcttcggctccagcgacgaagacgtcttcgaccccgatgccggccacccgctccggccggagtttccggagctgaaggcggccatcgacgccgccatcgccgagctaggcggcgccgcgctccccaagcgcaactggagcgcgcccaaggatgccacattcatgtctgccgatggcacaactcagtgcagtgcacgtgcttcgccgaggttgccttgctgctccgctatttcgactgtgtggctcactgaccttgcctacgcgaggcaatcatgcgaggattttgtgcgcccggcgggtgctcgacggaatgtccaaaaactggatctaacactgccttgtatgcagcatttacaaatgcagtgtctgccaagataccaactggatcacctggtgtcacagaacttgatacatttgtcgagtcaaattgtacaattgagttgctgcacgaagttctcatggttccgtcatagcatactgtgacatctcggagcattgccatcatgttcttaaaaagattgccaggttcagccagtcctttagatgatgagcgctctatcttttcccttactgatattgagtggagtaattcctcgtatggatttaaaccattgtaaaatgaactcgtaacaaaatcatgtccttttgaaggatcataacaattggtgcttccgctgcacctttccagaaagttgtagcagtcctccactaagttgctagagtataacctaccagtcctttgcagttgttgtcccaagaaaccaatctgctcaactaatttcttcagagttgaatctttttttgggtcaaccagcagaccaagggcagaggaattaataatggagtccacagttaacttgttgaacttatcggtctcaagcgaactactttgatttgccttctgcattgcacaccggccatcaagacctttcaagcttatgctgaaaccatccataagcagtgattccattaggag

SEQ ID NO: 3396 - DNA, 1267 bp, Zea mays
tgcatgaagggcttctctgtgagatcacccagggactgggagctgggggaccgaagagatgggtgcgcgaggaacacccagttagactgcgcaagtgacacaggtctcacagataggttcttcgccgtgcaaggcgtcaggctgccccaagacgcaaacaaaatgcaggctgctacgagtggagatgagtgctcagggatctgcttgcgtgactgctcctgcactgcatattcctactggaacggagactgctccgtttggcgtgggaaactgtacaacgtgaaacaacagtctgatgcttcttctagtggagatggggaaacgctctacatccgccttgctgcaaaggaggtggcaatgcagaagagaggaatcagcgttggtgttgccgtcggtgtcgccatcggtgctaccgctgccgcttcgatcctcctagcaggtctgatgattcggaggaggaaagcgaagtggtttcctcgcacgctccaagatgctcaggccggcattggaatcatcgcgtttcggtatgccgatttgcagcgagcaactaggaacttctcagaaaggttagggggaggcagttttggttcggtattcaaggggtgctacctaggtgacccggttaccctgctggcagtgaaaaggctcgacgggtgccccccaaggagagaagcagttcagagcagaagtgaattcagttgggatcatccagcacatcaatctagtcagactgatcggattctgttgcgaggatgataagaggctacttgtgtatgaatacatgccgaatcactctctcgacctacatttgttcaaggccaacggtacagttttggattggaatctcaggtaccagatagctattggagttgcaagaggactgacctacttgcacactagctgtcgggactgcatcatacactgtgacatcaagccagagaacatactccttgacgcatcttttgtgcctaagatcgcagattttggaatggcaaaggttttggggagagagtttagccatgcggtgaccacaatgagaggcactattgggtacctcgcgcctgaatggattagtgggacagccgttacatctaaagtcgatgtgtacagctatgggatggttttgtttgaagtcatatcgggaaggaagaattcgagtccagagtactttggggatggcgattactcaagttttttccctatgcaggttgcacgcaagcttcgcagtggacacgttgagagtctggtggatggaaagctgcaggtc

SEQ ID NO: 3397 - DNA, 1038 bp, Zea mays
catctggtcaatatatccgtgctactctaccttatattcgtcgaacttaccgtaagaacctaggggacaaactgcacttattaatgttagtgacaaaacctgaagcatctccaaaaattcacagaatttatggcttcaaacatccttgctctatttttaggcgtaccgtctagcattggcagcactaatcacctgagaacttcttcatgacattctttctttgtctcacttctagcggagtaacattctgctatgtttcttatgtaaaaaagccccctttttataacaggaatgattttttgtgttttagaaaatggtaaagaacaattggcttgtctatcgtgtactggatacgtacttcgagatcagaattcacaaaaaacaatagtcaaatctgttacacatagttgtactcatcatggagatgtgcaggaaatcccttatatggtaggaaagatgcagtctgtttaagaagattataggaatatatatagcaaaatcattatcttggttacccacttttattgattggctgattgctttttcaagatgcagatatttctcaattaagtttatatacaatgcagtatttttattttattttttgtagtgcgttggagaagacattgatgatttgcagtacacacctaaacccgaatttgaggggtattttagagttaagaatgttcaaactgaggtatcaggaactatcgttatattgtttagcataatatcaaccgtatgcatcatacttattttgctataacccctttatttttgttgtctatagttggatctacttaaagcatggttttctcacatgcaagaggttaagcctggcatttatgttacatacaacgatgacttttttgactggccatttttagagaagagggctgcacaccatggaataaaaatgaatgaggtgcgttgttgatttaattcactttaggttttattaggaagaatgggtaatttggttattataatcttgtattgtggaagcacttttagaaaatatgatctcctttaagctaa

SEQ ID NO: 3398 - DNA, 1303 bp, Zea mays
cagcttgcatgcctgcaggatgtcaggatggcgatgaaggtgttcccgttgtacatcccgagctccagcgcacgctctccagccgccagagcttgcctcccaagtccgttctgaccaagcccctgaatcaccgagttccacgacacgacgtccctgacagccatttcttccaacacctgctcaagatcaagcgtcgcgccgcagctgctgtacatgctgatcagagaattgctgacgaacacgttactccggccgaacccgtcctttacggcgcgtgcatgcacttgcctcccaaacgcaaggagtgccagcaccgagcagatgtgcagaactgttgtgtatattgaggcgtttacctcggcatcgccgccacaatggccatacgatctgaccagatcgatgaagaggcggagagcgtcttctccgagtctgttctcccccaggcagcatattatgatgttccacgtcgaggtatccttttccctcatacttctgaatagatcaagggccctgtcgacgagcttatgccgggaatatccgtccatcatggtgttccaagagcagatgtcccttcgccgcattccgtggaacaccttctcggcgtccgacagtgcgccaagtttggcgtgcgcatcaaccaaagcattccacacgaaacaggacctgctcctctcgtccaggagcttgaagacgaccccatggagctgcaacagcatggctggtgactggacacccacgcaggccttgagcagggagctgaacgtgtgcgagttgggcagcaccccccgcgcaaagaactcggcgtagagcgccacgaagagctccaccgccttaccaggctcgccgttccggacgtggcacgacaccatggccgtccaggtgaagacgttgtgctgatcaagtgtgagctcctcgaagagaagccgagcctcggcggccgcagctccgccggcgcgggagaggcccccgatcatggtggcgtaagaggtggcgttcctcctgggcatcttccggaagaaggagagcgcccagtcggtgcggccggcgtcgacgagcgcagccagcgcggcgttccaggacacctgactcttcacaggcattgcctcgaacatctcgagggccctctcagcctgcccacctctgccggcttcggtgacctcgattgtcctacgggcgaggcgagacaagcgcggcggatcctggactgccttggcgagcttccacgacgccattttccgtgacttccgaggcaggttggaacgctgccgcttctcctagtctcctctcctccctgcaggcatgc

SEQ ID NO: 3399 - DNA, 721 bp, Zea mays
ttacagcgttgattgtccaattcttccattgtgaagcggtgactcctctccaggatggtcagcgagttgctagaatcacgatacaatctgtcaagactgtcacgagaagcagcaaggatacgtttttcttcctgcaagcaaaaatcaactccctcaaaaaccaagcaagtaataggagcacaacaaggcaaagcacagtttcataagtcaccttttcagaatcgagctgagcatgaagagaagaactcagtgcattggcatcatccaaggcagcagagacttggcccagctcagtttggctctgagagtatttttcctcgaagtcagcacaccgctggaccaattcagcctgatctcgggaatgtttttcctcaagagttgaaatctgccgagtcattcctagcaagagacaatcaaacaaaacggggtcagaaggtaaagcagtctacagtgaaggcaaagagaagcaaaaaagcactaaccagcgttggtcgcctccaattcagagacgcgatgctgatgtgacactggattccaacatgcaagagatgaagctacttctgggacagaagcaccctgtagcctcagctggctagccatcccatccaccaaagcctgatgaggagaacagatgagtgtaatgacagcagttcatgcaatgtaaaaatcaagctaaaatacatcacagtacctggaggttggaaaagaacgaaggatcccc

SEQ ID NO: 3400 - DNA, 1265 bp, Zea mays
aacacaggaggaatactggacacatcactatcaaataaggtcgaggcaaagccaaactgtaggacccacatgttccccagcagactcctgccttctaacaccgcatgtgatttggactatctttggggtagctgataggagcatctaccctaaagaatgcgaagggggggagtgtcctcactttatttaacatgcattgtgaaaaaggcacacatcgctagattttatctgtgttgcattcatattaaatttagccgtttatcattatacactgatttttgtagacgtcactaccgaactcgacttgtttgtcaaatgtttcaaacacaaatacctgaaagttgggtactctctctattctgatgtaaccctgcaactgcaacgtatcttctgccttccggccggtgataaagacaagacagttaattggtggtccgtggtgtggttgatgtaaaatatattgaagcatatttctattgttgattgcattaattgtcgacaaataaataagagacgtcttatcttactatattattacatacatataaaaaagaacttttatatgctttatgatttttttacaaaggttgacctcaaaaaagaagttgtataattgtatctcaactcggcataattatccgaagttcaatgaaacgcttcatttacagagagaaaaaaacaattggtcgtttacccataaattagggataataagacaatttggtgtggcgatagtgggaactggggtgcttctctttcatggttgaacgagagttgaaatcacggatgtctgttcttatttgtttacgtattgggcgcgcgcgtgatatgatggccacgcgagccgggctctttatgtgatgttgatcgatgcaactcaccatttgattggagaggaacctaatccgtcattccatatggacgttagctgcaaaaagtaatcaagtgcagcgtgcaaatatatttgtgcgaaataataaaatatttaaggcaaaagacgacgtcgtttcggttatctgttgcagcgtctcttgcaagcatatgtataacaaaatgcaacttttgtcatgccagggagagcccagtaacacggctgaggatcggaggagatgagtcacaggctagctaacccagatgaatcaaagataggcaatcacgcgctaacaaattccgcgtctaataataatatatgagccgcaagctaataaaataaaggttgtaaaatagaagtatagctacacagatgagggttacacaggagcggt

SEQ ID NO: 3401 - DNA, 945 bp, Zea mays
agtactaccagcagctgcaatccgtgatctcctcgttcgagactgttgcagggctgagcaacgcggcccccttcgctttcatggctcttcggacgatgtcgaagcacttcaagtgtctgaaggggatggtgatgagccagctacggaacacgagcaaggtcatcgccaaccatgggattattgccaaggacgatatggcgaacttcgcgctcatgggtggtggagcaggcctcctgaggggaaacagcgtgaacgcgttcagccagcctcacaacatttggaggcctcaaagagggcttcctgagcgtgcagtgtctgttcttcgctcatggctgtttgagcacttcttgcatccgtaagtacatgaatgccatgtcttctgatcttgtttgctatctttgaagtatttcagctttggtatatgtagtcagctattgaattcgggtgtggagcagtagtactacatatttgccattttgaaactactatgctatgatgataaggtgaatctgataatggctaaattctttgttgtatttgaagttttttttttcaaattgtgcatgcactttttttttgctaatgataagtgcacaatggccattgctagtgataagtccagagttatgttttggaagatgagaataattaatgctaggattgtttttttctttagtcacaaattgtgaaatataattggtgttgattcattactatatatctggttacatgttctttcactgtcaataataacgtattgtttcagattttctcatggtgcccacatgttagctcatccctttgtacatcagattgcaacctttgtatacagcgaccttagacatcaacaagaagtctagcgtattgttgtcattatacttgttttgatatcgccatctagggcatgtgctcccggtggatgcatagggggcacattgtgttgct

SEQ ID NO: 3402 - DNA, 1272 bp, Zea mays
agcctgttcttccgtcatcacaaactgaaaatgtactgtgtcaagtttgcctcgagtcaaagcaacctcaagatcctcttactgcatcgtatacatgtaatggcagttcgaggtatgcagtttgagcagacagtgtgctacatattattgtgcccaaatagctatgctctcaccattggctagataattaatatgtctaagagatatctgcctgatctggttagatgctaagtaacttaactttttttgttctatctaggttcatagtttgagttttggttgtaaattttgcctttttcccccttaaatcatatttaattttttgcatttagatcttacttccttctatcccttgtttttgggctgtagtctgagtcgaagttccaaggaggctttgttaaagaacatatcatcaggcaagaagggtgggagtgccggcaaagtaacaaacaagttggtacactataagcgtattatctttccttatttagtatgtgtgcatgagctcattggtattttttgggtacttcagggataacagactacacaaattggtctttaatgttctgcttgatggcacagaagtagcttactatgttgatgggcaggttgttagactaaggctatcttctggttttcttcaattcactttgtgtttgctttggtttataatttgcattgcatgatgcagagaaaggttgatgggtatatcaaggatcatagaatctactgtaatcactgcaatagagtggtctcactctttctctcatttaagtaatttcttcaggttcatcgtacattttataatataattaaacttttttatgcggaaaattcaggttagcccatcagcatttgaagctcatgcaggtgagggatcaaggcgcaaaccgtaagtctttatgttcttgtgtttaaattatgccaactcagggttatcatggttgaccttactttgttacattgctgctaggtatgataacatattcacatcaaacggagtatcattgcatgagctggcgatgaaaatatcaaaggatatggaactgtcagaacgcgagacagatgatctgtgcagagaatgtggtcaggggggagacattttcccgtgcaaaatttgtccaaggtcatttcatccaggtagttttgcaagttcttggaattaactacaagctctggaatatcctttttggttatttcttcgtgaattgtttctcttcttttttttgtgtgtgtgagaacggttttaacaactggctcgcttgttatacc

SEQ ID NO: 3403 - DNA, 1529 bp, Zea mays
  unsure (1)..(1529): unsure at all n locations
atttgttcgcatactacttgatgacttggaatcaagaatatcagtacagttcagccgggttagttcccttgttgagcctaagctgctcggtgtgactattcattacgggctgattttctgtccactgcttggtcagatctttatttcttctctcttttcagtttattgatgaagcatgccatcaaattgagcgtaacgaaagaaatgtgcggcaaactggaattctagcctacattccaaggtatttgcactggatggattagcactgtgatttatttgtaattccagtctttagtgctactccctctgtcccaatatactagtcgttttaggcctatattttttatccatattcaaattgatgacaatgaacctagacacttatataaaactcatatatcaaatattttatgaatctattaagaccctaaaacgaatactattttgggacggaggaagtacaatttaagactaccccctgttctttttataaggcttattgggattcggagatttttttctagtgtactttctactttgacagtcaatttctcatacaatacctcattaattactataaaaccagcgtcacattttgttgatataaatgtcataaattaagcacacatatcatttgactagttgctagttggaatttatgatgtttgacattttcaaatcctaatataccttgtataaacaaatggagggagtactcttatgttatgagcggcagatggctgcgagggttagagggcgatggctagggtttgagggcgacaactagggttatcggcgctgtggaggtcggccgcagggctttgcccacagccggcaagagagaagggatttccttctaatcttttgcttaccttcaattgatacaatccttctccttatatagagagggttacttgacctctaagcactaaatctaatcttatctctaattctaatcttatcccaaactaggcttatctttatctaacctacctgaggcctgaggggccctgacacttaaaattgactgaagtgttgtgtatttcacttttgtggattaaaacctagttccctgtagttggttcatcttttccagggctgctgagctgatttagtctattattctcaattttcttgtcaaaattcagtgtctttctggattctgctagatattatattgaacagtgattagctagtattgtaccgatgctctatgtctagtaagtttttactttcttgatgtatatcattctacaaatctacaacttgttacattcgaaatgatgctggtgtgaagcatgtgaatccaagttgctttatgagccacaacagcaatttataaacgactttctggtaaagacaagacatgtctgacagaccgagaagggaataacccttcaggtgaattgaacaataaaaatggaaaacaaaacatattatagtaaaacttgaggcaggactgctactcttttagtggtggggtagtgagtgaatgccatntgatccaacattctttagaatttgcttcc

SEQ ID NO: 3404 - DNA, 1083 bp, Zea mays
actgacctcctccgcctcctcccctgcctgcccttcatcgagggcaccgccaccgtgccggcggacacttgctgcgccaaccttggcagcatggtgcacgacgagccgcagtgcctctgccaggccctcagcaaccccagcacggcccccgtcgccgtcaacatgacgcgcgtgatggccatgcctcggctctgccgcctcgacctcccgcccgccaccggcgcctgcgcaggtaatactcgtacgcacgcgatctccattacgtgcacggacattttgcctccccttctcgtgccagggatttgacactcactgtctgaagctgtgtttgatgatgagccctcttgcagttgccggtcttcttccccatggaccatcaccgccgctgccaccgccgccgccgccacccgggcggtcactccacacgcaagcgccaactccagtgctccagcgaccctcaccacgccagcgacgccaacgccgacgacaccacgtatgataccgtcaccatcggtgagcagtcagacgccgccgcgatacagccgggggtccaagatgatagctgacggcttctctgtcactcttggtttcgtggcatttgtgtcagtcctagctttctgaagaattgggcggcattcgtcaggcagttagaattatggcttagagaaacttagttgcttttccgatgggcgcttgtttcctagagagacaacccgcccaggaaaaaaaatactgtatgtccatcccggttgttcttgttcggctacaagatttgtgttttcagttgcaaactcactgccaccaagtacagaatccactcaactgcacactgatcaatgatccaaacgatcacaatatatatatatatatatataacacggtaaacagctaatcctcttcctctaagcaaagaaggtaggcaactaaacccacaacggggacgaaccgcaccacactcacaagccgagcagcatccgccttcacgttcccaagattgtccccgatcagccacggctggaatacggagtacagaaacatatcccagagaaacgcgtaagcaagccgctccgagaacaggtagct

SEQ ID NO: 3405 - DNA, 1259 bp, Zea mays
ttgcatgcctgcaggcatgcatggggcgaggcaaccgatggccgcttgtgctggagatccacgcgacatcagtcgtgcgtgggcttggggctgaccgccttataggcaacttgctgatcgatctgtatgcaaagaatgggctcgtgtggcaggcacggcaggtattcaaggagctttcttccagggaccatgtctcatgggttgccatgctgtcagggtatgcacagagtggtcttggaaaggaagctttcaggctttacagccagatgcattggactgctgttattcctacgccatatgttttgtctagtgtgctgagtgcttgcactaaaggaaaactttttgctcaaggtcggatgatccatgcccaagtttacaagcaagcattctgttcggagacctttgtgggcaatgcacttattgcactttacttaggatttggatcctttaagctagcagaaagggtattttgtgacatgctgttctgtgatcgagtgacattcaatacattgatctcaggacatgctcaatgtggacatggtgagtgtgctttgcagatttttgatgagatgcagttgtcagggctcaggcctgattgtgtgacagttgccagtctgcttgcagcctgtgcttctgtgggagatcttcaaaaggggaagcaactccattcatatttactgaaagcaggtatgtcttttgattacataactgaaggctcactcctcgatctgtatgtgaaatgtggtgacattgaaacagcacatgatatcttcaatctgggtgataggacaaacgtggtactgtggaatttaatgcttgtggcatatgggcagattagtgatctagcaaaatcttttgaaatctttggtcagatgcaagctacaggtatacaccccaaccaattcacctacccgtgcattttgaggacttgcacttgcactgggcaaattgaacttggagagcagattcattcattaagcataaaaaatggattcgaatctgatatgtatgttagtggtgtcttgatagatatgtattctaaatacggatgtcttgataaagctcgaaaaattctggaaatgcttgaaaaaagagatgtggtttcttggacctcaatgattgctggatatgtgcagcatgacttttgtgaagaggctcttgcaacattcaaagaaatgcaggactgtggagtttggccagataacataggactggctagtgctgcaagtgcttgtgctgggatcaaagcaatgcgccag

SEQ ID NO: 3406 - DNA, 1035 bp, Zea mays
gagtcagtgctgcccatcttgccggcgacctgagccccgttgacgaaatcgtcgtcctcttgagccgaggaagctatatctggcatgtaaccgttgctgcctccgatctcgcttggattggcgaagtaactgttcaggtcatcttggatgggtacggcggcatcagaggcggagtcggatggggagccattgaatggcatgctgagggacgacatatcagacacggcagggaacaatgtgttcatgccagttacccgcttcactgagtcctctgccatcttcacctgaaaacatgatgcattcccacgttccatcagaatggccaagaacacccagttacgtatggaaggccatggattatctctgaaatctaggggtgggagttgattcacctagtgctagcagttgaaacaacccaaagtgcctaattcaacagatgcagggctcacacagcacaggcaaagcagtgtacctttgctcttaaggtttcgacatctgcctttagcaccctattgtcaacagcagcctcattgaacttctgattaacgtcagcaagtcgccttagcagcgaagagttctcaactcttaactgtgctacctgtaacaagacatgcacaactctagctcgttagccaagccaggggcccaagaacattttggatctgtcaagtgtcaacacataaaaatgatagcataacccatcggacctgtgcctccagttcattcaagtgagctgcctttctgcttctcgaacgcctggctgattctcggttggattgcttcctggaaacagtcaggaagactggctcaactcatctattcggttgtggcatcaagcaaacaaacggaccactctaaatgagaattggtccactaaataatactagtgcctttataagaaaacaatggcaatacaaattacaattattatggcatacaatatacaagagcgtccacggacttgtcaaggaatgtcatttaggtccacaaactttaaaaatgtgtttctgagtcactaaacttgttaagtggtgc

SEQ ID NO: 3407 - DNA, 1218 bp, Zea mays
  unsure (1)..(1218): unsure at all n locations
cttgcatgcctgcagtgcaccacttaacaagtttagtgactcagaaacacattttttaaagtttgtggacctaaatgacattccttgacaagtttgtggacgctcttgtatattgtatgccataataattgtaatttgtattgccattgttttcttatataggcactagtattatttagtggacaaattctcatttagagtggtctgtttgttcttaaggccggcaataattttagccttactgtaaaactggtgttggcttgatgccacaaccgaatagatgagctgagccagtcttcctgactgtttccaggaagcaatccaaccgagaatcagccaggcgttcgagaagcagaaaggcagctcacttgaatgaactggaggcacaggtctgatgggttatgctattgtttttatgtgttgacacttgacagatccaaaatgttcttgggtccctggcttggctaacgagctagagttgtgcatgtcttgttacaggtatcacagttaagagttgagaactcttcgctcctaaggcgacttgctgacgttaatcagaagttcaatgaggctgctgttgacaatagggtgcttaaggcagatgttgaaaccttaagagcaaaggtacactgctttgcctgtgctgtgtgagccctgcatctgttgaattaggcactttgggttgtttcaactgctagcactaggtgaatcaactccctcccctagatttcagagataatccatggccttccattcgttctcgggtgttcttggccattctgatggaacgtgggaatgcatcatgttttcaggtgcagatggctgaggactcagtgtagcgggttactggcatgatcactttgttccctgccgtgtctgatatgtcgtccctcagcatgccattcattggctccccttccgtttccgcctctgatgccgccgttcccttccaagttgacctgatcagttacttcgccaatcctagcgtgttcggtggctgcttcggtttcatttngtttttggttctgtggttggtgggttgtttgtttttgtcttggggttttgtttctggctcctgtttnctttctctttttttccttttcnnntttttntttgtttgtattcatnttcttcttgttttggtgtttggttgtttttgttttttggtttgggttgtggtcttcttggttcttgttttgtgggttggtttgggtttgt

SEQ ID NO: 3408 - DNA, 1293 bp, Zea mays
agcttgcatgcctgcagggatcacctccaaactggccagcatcagctgtaggcgcaatgatcctttgggccccaggtgctgcctcaattgggtatggctgttctctagttgataaaaaagattgtatagctactggaccacaagggctggcagaggcaagccatggtgatatattactcatggcagcactattcatcctaacaggaacttgtggtaggaattgaatactgcttgtatttttagaaggtaggctctttggtgcaggttcagtgccaacatcatcaaggcctggtccactattaagatcaaagtccctcgagctattcatgccagcattagagaaaactccatgtaacgatcttgttgacaacaatggcacttcaactctgtgcgaagcacttggcacaaattggccattatctgcaacttcatcagctctgttcagatcaaattcaataccagcgcttcgtgaagagccatctcgacttctcgtatttccagattcagaacaggtagtctgtgcagaactctgtgggatatcttcctcgagagcttggtcatctgcaacattcaaatcaaaaccaagcgtgggacgagactgcttaccagcagcatgagaaactgaaatgtcgcgtgcagcagcaggaatctccaaaatcttccttggttcagcaggacgaaatgcactcgtagctgctgaacctttccacccaatctcaggctttgctcttagtaggttttctggaggaacaaagggtcctttagctggtgcagctactgtaactgaagctggctgcaaccccgttgtaataggcgaagtgaatggcaaaatcccagttaaattgattgctgaagaacatacaacaggcgagatagttggctcagactgatgcccatcatctccaggtattccttcattcaagtcgaaatcaagcttggctgtagcatttgacttggtgttagcggctagagaagaaccttcgtctgataagacatggtcttctttttcgtcctcttttccactcacaccatcacaggatttctttgaactctgcattgcactttgctcgctttgctgagaattgacaccttcagattttacatggctattggattcacttgaactgtcttttgattctttcatctccttattcacatttgccacaccaactggagacgctgctgctacaactagtttgggaacatcaggcaaaaaggaagaagcatgttccttcttttcagcctcgttctgcactatgctactattgcccaggacatcagtttttctcacct

SEQ ID NO: 3409 - DNA, 724 bp, Zea mays
ttgcagtagcagtacacacatccaaccaatccgccgatccagtccagctttgccatgtcgttgcggtgtcttgctgcccagcccaccgccggcgcctacagcttcgttccatcgtcgtgttgccgatatgatgcctggccaccatcaccgtactatgggcaggcacaggtgctttttttcttttgttttttgtttttcagaaaaaatgacacccacagctggtcagaaacgatatcatctatagaaaatgattgcggtcggaaatttaatcgattttataattaatctatgctgacgtgtataatacaatgttgatagatatataaaatttaaatttttaaaatggtaattttcgaaaacgatattgtatctacagtaacagatacgattataaagtccaggttacggaattttcggaaacagttttcatcccccacagcccacaggtggtcggtcggtcggccatctcggctccacgatagctgcaatcgctttatcagcctcctcggcccatgcaggattgaccggacttgctattgggctgcttgctcctagtgctttcggccttttccgggaggaactggaaggggagggagcaggacctgtttgtttgagtttttcttagcattaaaagttgttgcggacttgtaaatgtcccgcagcatgtttttttaagactcggtttagttaaaaatcataccaaaatcaatataaacataaaatc

SEQ ID NO: 3410 - DNA, 1012 bp, Zea mays
gtcgacctgcagagcgtgccggggctggtgatcctgtacggcagcatcgtgaagaagaagtgggccgtgaactcggcgttcatggcgctgtacgcgttcgccgccgtgtggctgtgctgggtcatgtggggctaccagatgtccttcggccagaagctgctccctttctggggcaaggccggccacacgctcggccagggcttcctcctcagccaggcggggctcccggcgaccacgcacttcttccacggcagcggcgtcgtggagacgggcgagatcacgcccttgtatcccatggcgtccatggtctacttccagtgcgtgttcgccgccatcacgctcatcctgctcgccggctccctgctcggccgcatgaacttcaaggcgtggatgctcttcgtcccgctctggctcaccttctcctacaccatcggcgccttctccatctggggcgggggcttcctcttccactggggcgtcatcgactactccggcggctacgtcatccacctctcctcgggcgtcgcgggcttcaccgccgcctactgggtcgggcccaggctcaccaaggacagggagaggttcccgccaaacaacgtcctgctcatgctcaccggcgccggcatcctgtggatgggctgggccggcttcaacggcggagacccctacgccgccaacatcgactcctccatcgccgtggtcaacaccaacatctgcgccgccaccagcctcctcgtctggacctgcctcgacgtcatcttcttcaagaagccctccgtcatcggcgccgtccagggcatgatcacgggtctcgtctgcatcactcccggcgcaggtacagtacatatacacgattctgtctacaatcactactctactctactactgccagtgccagcctgatgatggttcttgtaggcctggtccagggctgggcggcgatcgtgatgggcatgctctcgggcagcatcccgtggtgcacgatgatggtggtgcacaagcgctcccgcct

SEQ ID NO: 3411 - DNA, 678 bp, Zea mays
aggtgtactccgagctactacgtggggagtcgggcgggccggtgaatactcacaggcaaatgcacaaatcttacagaagcaaacgggtccggaattcacggttacaagcagttcagcctgacggcgacgactgctggtccaaggaaaagcaaacgatgcgagcggcgccggcgcagcggcggcctgagacagtctacgatgcatgcacgtgcacgagagaaactaaacggcggcgagcgggccggggagagagcgctggatgctagctgcgctgcgctgcgcacccctgggtcggtcggcttcggcttttagtagtcggtggaggggagctgctcgtgggtgtgggagatgaagagcagctcgtagatgacgccggcgaggccgccgccgatgagggggccgacccagtacacccactggtagccccactcccagctgacgagggcggggccgaaggacacggcggggttcatggacgcgccgtcaaaggcgccgcccaccaggatgttggcccccacgatgaagccgatggcaatgggggcgatggtgcccaggctgcccttcttcgggtccaccgccgtcgcgtacaccgtgtacaccagcccgaaggtcatcacgatctccagcaccagcgcctcccacaccgacacgcccgtaagcccgaagtggccgtgggct

SEQ ID NO: 3412 - DNA, 1190 bp, Zea mays
tgcttgaactaggttccctttctgaggatcggctgctgagagtgcttctatggacattatcattttcgggcaggccttcgttaccaatcccgtgtgaaggtgttttgtaggagtccttcaacctctgccttgttacaatggagcagagcagctgataccatctggagagtgcttgagcctcctcctgcttcttctccacagctcgtctctgctcctcttcttctgcatatgcctagtgggtatgaaagcatgagtatctatcttgtcagttttagaacagaattggctgacggtatatggtgtgaaatatgacgggggtgaggaaaagggacacttagcttgttttggacaccaatgcaaagcatttatgcaattcccatcagtatcagagaacccctaaattactaggattcatattcaaaataacagtaacttctcggattttgttttcaattgtttaaataacttcatcttttaataagacacgttactaaatcacacaatagatcaggtatagataatgataacagcatgatgaaaggtttcaaatattgaaaaaaaaaacattctcccataaaaacatacctccaggatagcacttctgaactcggtacagacaacaatcccatcaaagactggaaggcaccgaccactgcgataatcaaatccgaccatagcaggagcgtagtcgatgccaagtctctttgcaacctggaataatcttggtaacctcaagtgtacagtaccaggcggaaggcacttatctgaccatacatcaacttggcctcgttcattcttggagacattttagcatggatcagtatggaacaccagaaaacaaggaccgaagaccaaaggatccaaatggcaagccattgtcaaaatgagttaaaaaatacctttggcacaacgccattcacagcatgaggaagttgcagtggttccagttgccattcaccatatagttccaaggttggttttagaccatcttcgttgccacttgattgaactgactgggcattgaaagtcctctttggacgtgtaaccacctaaaccggggcattgaatcagcatcaaaactaggtaaactaaaacccagtgcttctattacaaacctttgcaggcaactcgttttctcggacttgcaggccctcccgcaaccatccatgtcttgactgcaggcggcaagg

SEQ ID NO: 3413 - DNA, 1040 bp, Zea mays
gttcttgatcgataaaacatttcttagttctgttaatatcaagtcaggcagtgctgctgcaccataggtgtagcttagatgtcaaccatgcagcatagtgcaccacatatccttgtaggatcagaggccaaagggaacacttcactgggcaggagcttgcagagtttgtgccaaatattgcaagttactagttgctgtgaaagaagttcacacgttgtcgccagttgttttaaacctctttctgaatccggcttgcttgtcttattagagtttctcctgttactgtatctttgacagtttgtcgggagtgcattttggagaaaataaatgatgaggaaattgactgttgcccagtatgcaacattgatcttggctgcgatcctgaagagaaactcaggtgaattagtttttctaatttttgagtttcttctgtaaaacatagtttctactttctgctcacccagttctggcaatgccttctgcatccattttttttacaagtgcaaccatgaagatgaagcattagtatgatctatggtgtgaagtcctatacatcatgctgttgctaatgagtaataaaactgtgtatcttggagacttctctaagaaactcagccagtaatggcaccaagatatagggatggtcaaagtgcagagatgttcagacaagtgaactctatcataaatatagtttggccttttaggtttagcggtttaaaatacttggaatataaacattaactttccctctacactgtcatttcctttttaatcacatattcacatatcacatttattgaagcagtgtttagtccatgttctattaatagttttacgatgatatgctctatttttgacataagcttgtaatacaccttaacggatcatgccttttaatttgacaaaagtaggagaaaccggcctctcatgctccaccacctaggcacctacgttttgaactgtagttcttttttgactactttttgcctcaagtacccgttttttattgtgtgaaacggacttttcaagccaatgtgctg

SEQ ID NO: 3414 - DNA, 476 bp, Zea mays
ttatacacgagaaccaaaaaaaccgtgagagagataattggaacatatagtaattataataggctaatcattatacatctcgactataaaaaataatctgtaaatatccttatagccatccgtttgcaatattatgaaacttgctcttacaatttgggtacccaccgggagcttccagtggctcgtacgctgctactcccccgtgctttatcgctagtaaccgagatggatctcgtatttctctctctgcttctttaattaataacattttaatcatggcgtctgcgtcggtgcacaggtgattgcgtcctaacccaagccggtccatttattaatttaaaggttttgacaccaaacagatctggctgatgggcatgaggagaggatggtcgcctgtcggttgtcatctggcagctacgtttgctccggttcccgtttcttttttaaccgggggagcaaagcatatcgctttcggt

SEQ ID NO: 3415 - DNA, 1104 bp, Zea mays
acaaacagtcgtttcactattttctacaacccccggtatgatcatactttattgtacttggtcttgtttgtgcactgaagtaacatgaccatcctttgtcagggccagcccttctgagtttgtgattccactggctaagtatgtgaaagctgtctaccacacacgtgtgtctgttggaatgcggtttcggatgctttttgagacagaggaatcaagcgtcagacggtgagttgaaacttgtactgtgcatacagcatgaaaactatgaatgccttacggctgcctcttcttccagatacatgggtacgatcacatgcataagtgatctggactcagagcgttggccaaattcacactggcgttctgtgaaggtgaattctttagaactgttgtatgattacaatctacaaaacaattatcaataccatctctagttaaatattaaatgttcaattttcaaagccatctgtttattccgttgtatgatctttatgtgtccctttttgggaacatttttgcatcttaatgatggtttctttttctttgggttattgatacgtaggttggttgggatgagtctacagctggtgataaacagccaagagtttcactctgggagattgaaccactgatggcctttccgatgtacccaactgcctttccattaaggctaaagcgtccgtgggcttcagggctacctatgttcaatggtaggctgactgttgaccagaatgcccagtattcatggtaatggttcatttcagtttatattcaaaccaatttctctttgtatgcaggtgggaggagtgatgagttcgctcgttattcttctctcatgtggctccgagatggaaacagaggggctcaatcactgaacttccagggacttggagcatcaccatggcttcaaccaagaatagattatccattattaggtctgaagccagatacttaccagcagatggctgctgctgcactggaagaaattagagctggggatcatttgaagcagatatcttctctcctgccagtgcaacagccacaaaatttgagtggtggattagatcctttatatggaaatcctgttctgcaggcatgcaagct

SEQ ID NO: 3416 - DNA, 1188 bp, Zea mays
gtgttcctgccagtctgaagagctaggttcagacaagttgaccttgtcatttgcaaactcagttattccaaagtcaacgatataaaatattatatagtagacaaaaacaattgatgtagcagatattacaaaattaaacaaatatcaggtgatgatgaagcagaggtctggcactacttacaggaggcaaagtcgttggagctgacacctgctggtgcccagacggcactagaggaggcacatgagttacactctgtcctgggcctgtactccagggttgcactacaggagggatcgatgttggttgatactgaaatgtcggagttaacaagttagtagcttagtctaagtctagtaacacagaaatcatatggaaataactaactcaaagagtgactaataggactaactgtataggtcaggggttgcataggagcacccatggtgagcaaatggcccccagcatacgcagcttgttgctgtggttgcataggtgctgatgacattggtctagctggctgatataccatgggaaccccttgtgatacaggtggaacttgatttgagtgaggcatgtgctgcccaggttgtggaaaatgtggcatttgccctggcatgccaacgttagcccccggcataggctcaccaacagaacggaactgttgtgctgctggtggcacgaactgaggaggaggctgcgaaggaatcactggcctaaactgaaagggcagcatgaggagcaacattagaaacgtagcctagaattctggaagcaacaaatgtgtaaagaaacaaaaatctggaattcagtttacctgcataggcattggtggtccaagattttgtggctgagcgctagaacccatcatgggaggtctgggaggctgcttataagataataaagatgatgagcactatgtacactacaggtgacatgacaaaatgatattgacagcatgtgacagcagttgcctgaggcagcccagaagcctgcatattactggccatcaagccaccatcaaaataccagcaaagagtaggaagagcacctccagagatcacagctgtaaacaatccagtgtaaaccatccaaagtatggacaaaaaaaaattgactgctgagaaaagccacttatcaaaagaagctgaaaaaagccatttgaggtgattggtacctgcaggcatgca

SEQ ID NO: 3417 - DNA, 1308 bp, Zea mays
agcaggccgcattgatctatttatataggcagagaactgccgaggataacatcctaggggggtaactctgcctaacagaatctgctctattttaggctaatctataacagagttatcccctgaatatctacgtagcttatcttatcagattagctacgtttacacagcagaggcctacgaccagattacaagcttttcaatctaacagagacctttggctttgataccatgttagagtaagtgcactaaccagatcaactcaaaagcttaagttgatgggagaaggtagtcaatccacatacatttcaacactatgaagaattacaagcagctatttgttgctcccatgctgccggtgacattgggcgccgtgcctaggcttctactccacatcgaacagcagctcctaataatccgtggatgacatcatggttggattggatctgtggcccagctagacaatgatgtcctggaaaacagcctagatgtagtctggcaactcgccggaggtgagggcgtgccacatgcctgtgtagagtttgagcgtcttgtcctggcttgccacctaccggtacaacagtttgctcaccaatgactcgatcacctttgtctgctcatcgtctacaattaagaacggcaacaggccctcagcgtggggccatgctacaacaactacatcgagactgggagctttgccaccctgccgcgtggcggcaataggccccgcgagacgttggtggtgctgctcgttgccccgctggatcaggtgctcgcccgggaaaaggcacgcgaggaatacgtgaacgtgtgactgcacggatttttccgcactagggctcattttcccaagtgccaaaagattgggaattgtggctgggagttgttggagatgtttttttttcaatattgtcgcaaattctggattggaagtgttttggaactcttggagatgctcttatgagtgacctttttggggtgggagtgtttagttgttacgggtatggactatggagtgtaggctcaagttgagatttcatagttgaatgttattctactatttggctgcctctttagtgcataaatttatgaccgagacatgttttattttgttgtttggttgccacgacaaaaacaaaatctttaagcattgatactaatccctcagtagtatgtttttttattaagttatttggttagttcattccttccatcatatttatttgtttggagtgttatatctgatgaacttttggtttttgccagtgcattgtgatagaagacgcgcttgctggtgttcaagctgctaat

SEQ ID NO: 3418 - DNA, 1268 bp, Zea mays
cggtacccctggtatgctctgacgtcgacctgcagctgctcagcgtcgcctgcctcgtcatcaccgtcgcctccgccgcaggctccgttgccgggatcgtctctgacctcaaagtgtacaaaccgttcgtcaccacctcctgatcgaccgtacgtcctagcttccgtgcagttcaaaacacatacgcacgcacagatcattaattggcgcctagtatatatgtgcagtcgtctttaattaaattaactaggcattaatcgatcgataattaccactacgtcgttctagtgatgcgcgtagcttgcatcatcgctcgctgatttaatttccattgtttttctttgatgatctggttagccgaaatggctagtgaattaagagaaaacaaatagtagcagtactgtgtgagtaatcccaagtcaaatacgttattgaagttgtcggcggtacaaaacgcttgtaaaatgtttgtgtttcaattaatcaagaagaattgtacgtgtttcatatatgaggaaaagaaaaaggacatatgtttgttcctacaacttctaaataaacaacttgatcgagatgttttcttcatggtacgtctttaatggcaaaaattcagcgtcggcgattcatgatgctagagagccacatttttaatacatagattgttgaatggtttccgtttcgatacgaagtgtagaaaacgtacgtgcatgctacacataaacagatctgccatgtttaatccatatagagttctttctagcccattttttttttctaccacgttcattgaaataatagtgaatatagacgtacatgtaaactatatttatatgttacttaatgaatatgtaactactagctagtctaaaacgaattatatttttgaacggatggaagtgtaagttaaaaggatcgtggatcgttgccgctagacgtgcggcgtgatgcgtggaaggataacgtgtagatgtagtagaagtagtcgaacgtccgcgtgtgcaagcagcagcagccaatatgtatacacacgacctactcaaaatcgttgctaatgattttttgttataaaagtcttgctagtgaagttgtattgtaagggtctactaacattcgtatacgtgtcgtgattgcttcttacgcatatgcctcctccatatatgcaagcacagcacacatgcacagacacgccggacgcgcatcgtcgctctcccgagtcgtcgcaactagctagctagctagctagcagaacaggagcatcaatcgtctgc

SEQ ID NO: 3419 - DNA, 1215 bp, Zea mays
agccatcaccgcatccacgagctcgcccatggcagccagtctcccacccgccttaggtgtcagagtagggcgagggtgacgccttaccaggccggaccaccttaccatataggcgatgcttaagcgtcgtctaggcgacgccttaaaaactatagctcagatatgtaattgtgcacagaactaactggaattattaaaattatgtttgctgcaattttgactgtagcaggaaagtattatacaaactcacattgcacataagttttagttgatcatatcaacaagaatatagctacttcacaaaaataatcaaaactttaggtctgttgtttacaatatatgtgtagtcaagaaccaaccacaaaacaccagaattttcgaacatatagacatataagtgttaaggcccataaggcccatattgcctatatgcctatatatatgctacagtacccgtgggggtgattatctcgcctaatccaaggttagtaacatggtatcagaggaggtcacgaaaccctaatttttttttagccgccttcgcggctgtttcccgcccaaccgccgtcgcggtccttccccacccagccgccgtcgtggctcttcatcttcctcatctagccgccgccgtcacggatccggctgcccctgcctctgctccgtcgcgcggatcgccgcagtcgcggatccgccccttcctctgctccgtcgcggatccgactgcccctgcctctgctccgtcgcggatccagccgccatcgcggatccggcggatccggccgcccctcagcctctgcgcgcgaggcgccgcggatccggccgtcctgtcccgcgcggccgcggatccggcctttgcggcggccgtccctgtgcgcgcggatccagccgcgccgatccggccgtggatcctgccgtccctgtgcgcagcgtgctcccctgtgctcctgcgcgcgaggtgccgcgcgctctgcgttcctgctgtccctgggtccctgtgcagatctgtctgctctgcatcttcaacaacagggacgctgtctgcctgctgtccctgcgccaatcgaagatttgcgcagatccgcccgccgttcctgcgcacggcctgctctgcgcaagatccgacgtccagggagtgcgcagatccggctgctgtcaaatcctgccgcatctgccgtcccgctgtccctcgtcaccatcgcagtcacctcgtcttgt

SEQ ID NO: 3420 - DNA, 1259 bp, Zea mays
ttgcttctcaagttctttaccatgcttgaaagcccgcagtgcttcctctggtttaccttctgattttaaagttttgtaccttttcttctcttctacagcatgttggcgcaactcctctggggtgaaaatagatgcggtattgttaagttcataattgtgtgcttcagcagaaaggctttcatctccttttgcgtccgtactgaggttagaagaagttcgtctggaggtactggcactgcttgtggttctcccaggaagcaaagaatccagagattggatacgctctccacctccaagaatttcacttagaatttcatcctctggtttcgaagcagattttgtggtagctgtagaaatagatgacatattacaaattaaaaatgtctgcatggtaacaccaaaaagttttcttggtttgattgtgcaccatttatcatagatcagtctcatgcatgcataacacactattttatttgaataaatccacaatatatgttagctcccatagattgtaatttgagaatttttcatgtgcaatataatgataatcaaaatactgtgtataatatagaaatatgaaaaagttacacctttacatatgtacgaatagatctttgtaagtatatcagatcaaagatcaaacttattttgttgcaagtggttaggctgcaagtcacttgtagttgtagctgacaaaaggtaaaccgtaaaccacagaataaaatgatttccccgagatgaacaaaatattgtcaaaactgtttaattgttcgctagtgagaagctgcaagcaccatcattacaagcatctgtgtttcagagcataaggatatagttcccataaagcataatcaaatgtaaaaaaacaaccagtccaaaccttgtgcccaagcatccaaaatggtcaaatgtgttctatattatgacgatagccaaatttcgacttaaactgcatccccattggtttccatgctgatagtcagattttaaacaacaggccttgattgctattatgatttccacaaatgtactatttaaacatatttcatagcagtagtgtcaaccaaatcacatatattcactgaaacacgtgagtgatcagaagaataaggaaaaggaaatgaacctcttgtagctctatttttgtgcccatatctcaactcatggcgtgcttcttcctcaagctttttgcaaggatcacaaattctaacaggtgaatcaccctgtccacgtaaaaccatcctctgctgggtgcagct

SEQ ID NO: 3421 - DNA, 1171 bp, Zea mays
cttgcatgcctgcagaacaaaatattacaaccagaccagtgctcaatgaatactggcattgctattcatgatcatgacaaaaaatacttcttcaattaaaatgtcaaacacttaaataatgtcagatgttcataccttgaaagaagcttatctgcaaacacttcagcaatgctaaaagatccatatgctgtaaaaacattttgggaaggagttatagttcagatatcaatatctatgtaatataagcagcaagcaatgagaaacaaaatgcagatattttcagatttgtcaattggctacactaaaatttctcattcttacgctattattaaggcccttgttaaatgcaaaaaaaaaaaagaaggaattttcagaacacaatgttttgctaagagaatttgttttttttaaactacatggtgtttggatgtaataactaataaattttatagttttaaaaaacatactattgccaaaaatcatagcctttttagaatttaagaaactcaatctcgagcctaccttttctaaactgtgatattacatagcctttgatttctaaaattgtaatttgtcaagaccatggttctcccctttctgggaactaggaggacacaccaaacagtaagtctataaggctgtctctagcaaatcgtgcatatgatcgtgtaaaacactattttgcattgtagactacactgttcacaaagtgaagttcgaaatagaagatgagatgggagataggatgagtaagccgctggacaaaaatgatgtacatgcaacattagctaagattattatgtcagtaaagtttgtgcccatgcaatgttaactaagattatttatgtcaggtaaaaatcagtgggtactaaatccagaatattaattgaatatcaaacacaaccagcttaatgattccataaagtacaacaacatatgtgcagcggcacagctttgctgcataatgctaaaagtagcaaaaccaaaaagtttgtacagcattttcatcaatccactaaaacgagtttattagctaatattgaaaagcatactaaaaaatcatctcattacagacctgcccaatacaaaagcatccgctctttctcttgttcatccttcttctctatagctctgaaagtggagtatacaggtagaccaatcccaacagcac

SEQ ID NO: 3422 - DNA, 1259 bp, Zea mays
tggagaactgttcaggaatcttcctctattgatactgtaggttcaattgcttcagcagttggcattgttttagacaatttttgtttgattctgcattgacaacaaaggttttcccaaatggtttcccacttaggttgaaaatgatgatttgattgcctacggcctgatcccagaatttattggaaggttgccaataacagttggcctgaccaatcttagtgaagagcaattggttcaagtagtaaatttctttgattttttaatttaaagcaatatttcttaaaattaccatctcaaatatttccaccacctcaaaatattagaaattctctttgcaggtgctcatggagcccaaaaacgcaataggaaagcaatacaagaagctattcaaaatgaatgatgttagtttgtgattcgttttggccaacgaaataattgcaacatttggccgatttttttttactttaaacgataatttataaccaagaaagttatttatgttcatgtttcctccataaggtcaagcttcatttcactgataatgctttgaggatgatagcaaagaacgcactcgcaaaagaaacaggagcccgaggactgcggcctataatggaggacatttgacagaagcaatgtttgaggttgacttgttttttgattttgccatgccagtgggtaatccaatatcagcctggttgatagcactttggtcattccgttgcagattcctgatggtagacacggaaaagagaaggttattgctgttcttgttgacgaagagtctgtaggaccactacactctcgagggtgtcgagcaaaaatttttcgggatgatggagccttggaactgtatgtttaccagaacaatatcaaactgcccgggctgattcagagcaaccccagacgcagacgcattttccggctctgccttctagtcgcattatcggcaacaaagctttggatttaccagacaattccttgtttttcatcgatatatgaatggattgcatggatactatgcaaggtctacaattttacacaataaaatatgatgaggttgattttcgtgttaaactgttcacacagcaaaagaatggctggaccccacgttctgctttcttcggtagcttgcaatgattttgcaacaacaattcgtatcatttacacgctactggtagcaaacagacagttgttttgatactgaacctgaacaaatggaaaatggtttccaatggttacacatcaaaattatgtttgta

SEQ ID NO: 3423 - DNA, 1323 bp, Zea mays
attgtggtccagaacatacctgttaaattcatccgagtcactggcaagcaagaaaaataggtcaccctcactcagatcagaatctagacggacaggagcactatatccccttaacaaagaaggaactggcctctcaggaatgtttttaaacataaactcttcttctttctaaataacataaaagcacattcaagtattagaaaaaaaatgtcaagagatgcttaaatttgatacaactaggcgccatgtacaggcaaccacaggccaattactgactaaaaatattattgcagaaatttgaggtcttgcaaagggcttctgaataaatgtaaataaatataaataacaaggtcgcaattgtagtagagcaccaacagtgtagcactgaatgaacaaatactagcctgccctaactgcacaatatgcaaaagattcacaaatcaaaccatgttaaggctctctccagcagcttatccatccacatactcatattcaaactccactctacgaacagtgcggtctaaagtgcaaaacagtattttgggtgaccatatggctatatgggtgaactgctagacacggtctaattaagttcatttcttgacgggaaagcttgaaggaagataatcatggttgctttcacctttttaaactgaagcacagtagtgaagacgggctggtcatcagtagagagtgtttggagacttccatcactgtaaacggaagtgaggggcatatcttttccagtagagtcaacaagtccaacagcaacaggtatgaacataggctccttaaccggctggccaggagtgggtggtacttcttggctgaaaaaaatagaaaaggcagatggtttagaaatgtactattttcaccaattactacaatgtaggaagaaacattatcagggcatgtaaatcccatacactagcatcaatgaaaacgaatatatagagagaattcggaacgatagttcaatatatatctaattgtaagtactaaagatccataagtacttcagaaccagagaatgtggaagcttacctaagtttcaaagagaatgtctgagaactaggatcatatgaagatgccaccttgactataggcgtacctgcttgagagtacctattggatggtttacaattagatagtgatcacaagtaacgataaaaaacatgattcaaagataagtgtctactaccattgtaaaaagtttggcagttgtgcattatttgcatcacacatggctgcatagaagtcttcacaagtgacagcttgcccatcatgccttttaaaataaagatccatgccctgcaggcatgc

SEQ ID NO: 3424 - DNA, 1247 bp, Zea mays
atctggatttccctttgggcaatggatcaaccatatggccttcagatggttgggcatggaaaacacctgactcagcggaagctgtaaatggagctaacgatgagattcctccactccctgatgaccagattttccagccagatgaactggaacaactgttgcagtcaatacaagaagattcccatttgggctcaactatcattgaccccatgcattcttccatgacaaattcagttctgcctgaggacgattatttgatgttctatgatgcacccttcgattccactatgtgtgatgggtatggacagaatggaattcttggctccgcagcagccaatctatctggcattggcatgatggaggatggtatggcatactttgatgcaatggatgataattcatttaatgacattctgggctccatacagcagtcagctggtagcagttcccatgcttttaatggcccagtccttacccaagaggtatgctatcatttggagcaagagatgaagttgccgtatttgtttcaaatcatagacatgtactggtgatcacccaaatatttctacttttacaggtcaacaatactatgtttacatatagtccaactcaaaaggttttagaacctaatattgtagttggcgcaccatcgtctgctaggttacctgaagctggtagtcagttaaattgtgttgttttaccaggtaatcttattattagaaattacaatagaccggctgtatcttgatctatgatggaaaaaggagcatttttcacacatgttgcactagattattttatgtgagatgtatttagttaccctcattgagcaaatgagcaagagcaagattgaagtattagatgatttgtgttgttgagaatctagctcaatcttgcttacttggggcagggttatatgcagctggcatgcattttcctggtcattagcttacacctgtaaatggacattgttgacaagttttttgtgttgtgttccacagatggtcaggctaagagtagtactattggaaagggatttgtaaagattttggactcaatctccgctcccccagcttttgctggagaattcccagctatccaccgcaaatctttggctcatatttctggggggcgccccaacacactccatgtttctgctgaagtgatccgcgtaggaagtttagctgttccttctggcgcagataagtgggcgctgcaaaaggatcaaggcatggagctggtctttt

SEQ ID NO: 3425 - DNA, 1069 bp, Zea mays
cttgcatgcctgcagcacagtcgtcagcctgggttttctgtacctcctcaacagtagcgacgagcacactacacttacggacgagaaggccatgcaggcgccggccagccacggcggcatctggagcccagtaaacgggaacagcgcgcccgcggcaatagggatcgccacgacgttgtaggccatcgcgaagaagtagttccaccggatccggctgaacgtcttcctggataggtcgatcgcggtgatcacgtcttccaggttgttgcgcaccagcacgtagtccgcggcctcgatggcaatgtccgttcccccgccgatggccatcccgacgtcggctgctgctagggctggggagtcgttgatgccatcgccaaccatggcgacggtgcccccgtccttctggagggagcgaacaacgtcagcttttccggctggcatcacctctgctctcacgtcctcaataccaacctgtcgaagtacaacagcacgagcaaatgaaaatggaaagacaagttaacatgtgaaacttatgaataaattgaagccaaagaaaaagaccacacaaagacgagcctaacctccttagcaacagcttgcgcggtcctccaattatctcctgtgagcatcactggatggacacccaacttttttagtccttccactacaacagcagcctcccgtttcagggggtcggttatgcccatcaaacccacaaaatcgccatcatatgccacaagtatgcctgtttttgcattcgattccaggtctatcaagaaagtttctgcttctgggggaatggtcacaccgttttcagtcatcaaagaacggtttccgacctgccaatgccaatacattagttttaaagataagcaaaggtttattcagagacagtgagacagccatataacagagggagtattttggaggaaaattggaagataccataacatgccatatacagcagcccagacaatgtaaattaaaagggatatggaagcatgacattcacctatgactcaccaaaacatgcttcccattgatcgagcactgaactcctttgccaggt

SEQ ID NO: 3426 - DNA, 1084 bp, Zea mays
tccatgggatagggacggtccaatggcgatcatgctagcaggcagcatagcaagcaggcaggccactgtgccgtcccctgtcctgtgcattaactccgatcctccgccgtgatcggagagaccaaccacccgatcccacggccgatccgatccgatcagcttgctcgcaatattgttgctagtaccagtgtttacacgtactaagcaccatcattgacccctcagtattgctcccagaacagaactgacactgaggcgtgaggtctgtctgaggtgtgtgattaataaaacagatgatgattatccctaaatcgattccaaagctcccagcctgccaccacgtagtgacgtagttagtggagcctcaacgctccacacacttggttcgcactagcatcggtacgtagttatttttacaggtgttgccgagcgggcgggggcgagtgtcatctcctttcgtttcttttagagttttttctttttggtcgttcgtggtggtggtggcaatagcggcggacttgcggtcgttgtggctcgccgtacctaaggagggcaaccacttcggttgcggctcgctccctgcggcgaatcattcattagccagtggcgctcgtcgtcccgcgtgccgtccactcgggctcttgatcgaccacccaccctgtccactcgagcgcccctgtttctggcggctggcgccggtggcccggcgggcctgcctctgccctcttggctcttgcggttgcggctgtcatttttttggtggttggagcacgcgcactgctccgggcgtcctgaacaacggacctggacgtggacggcccggccggtgcaccttgtcgctagtcgctacccaagcccaattgcccatcccgcgcgttcaaccaccaccacgccgcaccgcgcgttcaggttcaggattgctgccttgtcttcttccccggtccgcaagaggggaaagagaagttgaggtctgccagcaggcctaccctgctctgtaaaactcatctaaatctgatgtactgccacctgcatgttcatggctagatccggcagcatatagcggcagggtgagatatttctagct

SEQ ID NO: 3427 - DNA, 1899 bp, Zea mays
tggagcacgtctcgcactctcgctcatctccttgctctccgatcgctgtcagcctcacaccctttgaggcattcctagacgacgaggagggctgctatcgcgccgactcgacctcgccgccactgtttcccccctcctcacgtgagagtatcgtgtcgtacacatgccacctcttagagagctgacatgggcagcgactattccgtctggtgttcatatcaatcactgcaaccagggtttacaatttcgggcggaaatttccggaatttcgatggggtccgaaaaatatatgttttcgaaattagtattttttaatataaattatatcattttttgttttaaaaatattaaatctatttgattttgatctacaattgccgaaatttcgaaaatttcctgttttttcgccgaggaccgaaattttttcttttctgaaatcgtaaaccctgactgcaaccagaagccgtgggatgggatcgttactacgatcacccggacaggaagagtttcggtagcctttgcacccggatgttcttggtcaaataccatatatactttcgttcttagaagtgccgcagagtttcatattgagatctcctccagatattgctcaggtactttcctgtgtgataaatgtgtgtcccagtggaacaaatggtagttttctgattcattcaagttatggccgaaagtctagcaacaatggtatctagtagacttaagacaaatattttgggagagagtatacaacaactattgacttcagttcagacagtcatgccgtctcactagtagccacaataatacttaggctctctctccttctctctctcagaaaaagaaaaaaaatcctaattcagcgtccaaccttcatggcaaactagcttatatattcccttcccattctaaacaagcagtatctgtaaaccttattgcatttctgtaatgcatttcaacaattcgctcctgtatgtgttcatatgcactctaatttccattatttgacgtttttgtgttagcagttcattttcgaagcagttgctcagaattgtacaagacttgcatatcaacaaaatggactgcgcctactacagaattgcctagatcgtgtcagccagaaacaaaaggattatatttttacacaactctcttatgagagccttttccttgctcaagattccagtgggtatgaatgtggatatatagcactgttccaaacatccaaaaccttaatgtgcataaagttcttttgccttgcttcatgtctgcattgatgtttctgatatcttttatgttcttccacagaaactggattgttcaggacgttctgcggaggggagatccctcccacattgaaatcattgcttcctgcctgagaaatcattacgtgacactcgcaaaaaataagtatagcagcaatgtagtcgaatggtgtttaagggtattccacgaagaagagagatcagtcattgtatatgaattcattagctattctcacttcagagatctggtgacagacgagtttgccaattttgctctctctactgctcttcaaacatgcgaggtaagtttgcaaatttagtcctgctactgctattgtaacatgttaagtggtcactcatttgtttatcttctccaggttcctctccgaaacatcttggcaaatgccatcctttcccaaaatatcattatacggaatcaacactgtacgaagatctttagcatattagccaaatttaggtttatttaacggaatcttttgaggtaaactatactttgaaaatctatattgacatagttttaattgataccatattgatatttaaacatccaggcagagaattttgaagtagcaaattgcaattgagcagatgattttctactatggtctttcgcttt

SEQ ID NO: 3428 - DNA, 1295 bp, Zea mays
aagctaatgcatattttgctggcagctaatgactccaatgtttcaagccaattatctggaaattactttgattaatgaggataaagcagattggtcgaccatgatgctccaatgtttcagtgctacatgcaggcttggtaagtttggagttatttttttttaagatgtagaaagagtaatttagaagtttcactcacatggatgtgtccattaccccttccttttccctttaattaaaggggcagaacgaatgttggaggctctcacatgagtagggtctagagaagggataaaccgaggcaaatctttccctgccaaatgcagagagactgcttcgaatccgtgacctggccatttagcgagacagctctccccacacaactaagcctgcccttctccttttcctgttaactgtcggcaaaaagttttagtgtctttattttgataagcaacatcttgcgtgcctttatctcggtagaaaagatggcttctgtgatgtgttcagtagaaatgttttttttatatgacaatcagatagattgcttttccctgcgcttccactctctttacaaaccttgtgtaaaagcagatctttaaaagtaggctgaatatgtgtcatgtcatgtggctttcacattggagataccaatccttaattgtgtcctataaggaaggaataaagctctgatgtaaacgaaggatcaaagggaagtataaaactttgagcatcttgggacagctagtttcttcttgcttcatgactgcatcctggttggagaacaaataccctgctgtacttttgcctctatttattcaccaattggtcatcgaacaggtcgcagctcacaacaccatttgtaagcaggtgatcttccattcagcaaccttctcagctggtacaagtccgagagcacgctacaatggcgaggatgggagttgctattctggtctgcgtagtggttttagccctggacgtcacagctggcatactaggaattgaggcgcaggctgctcagaacaaggtaatgtttcaaggtattggtatttttttttactaaccgaaaatcacagaggggttttgaaaacgaaatgtttcgtagtctatggttttgcttcatcatgcatggctggtaatggtattttagctcaatggtctctgagattatctaattgacgactgatgttgttggtgtttgtatttggtactgcttccacagactaagaaggtgacgatcctcttcatccagtgcgagaaaccagtgtacagagcgtaccagcttggcctcgcagctgca

SEQ ID NO: 3429 - DNA, 1073 bp, Zea mays
cagtaaataaacagaagtttcaaattgacaggcttagacgaagcagaaatgcggaactctaaaagagaaacaaagcatacattgaataagggttgaaattacaaaatttccaaacaaactccctttaaattaactgctcaatatttaattatgtatccaagagtacattggcatcacgagagtgcactacaggatatgttaatttataaccgatattcatattgtcaatctgaatgaacacaatatctcatgtgtacacaacaaaaaacttaggattgaaattgatttaaacagtaccacactattgcaaacataccattgattgaaatgaaatatcataagaaaagcaagaacaatcagtcaaggctcagattttggataacaaaccaatttactagagcaagcaccatcatgttttgctgataaaccaatgaaatatctacctaccatgaactaaggtgactaggcaatagtaggttagatatacttgggagttagaatgcttacagatagcagctggaatcacttcttgcacaggttaaacaaaaggcatgttcacaagggatctgaaaccatgaaaaatgtcatcacactactatacggtccaactgtttatatcagaaaagaaactatacagtgaatattcacatatagcacttattcagggaacaggtaaaaccacaggaacataaattacggaatatactgaaataacgtattaaaaatatgattccagactattacatactatgtatgtagcacggatatgcgagaaggcccttgtatcatgtattgaatatgtatcttatacgaacacggaacatatgcatgatgcagccacaataagtatccatggagtatcaggaataaaaataaatatatgaatatcaaatacttggccttatacatatcagcccatctattcctctgttaaatatggccctgcccagttaaaggcaatcactactcgctcaggtcattccatgccctggccaccacagcaaaacaagtgggcgcacagctgcaccgcctccctgtcatcccaactccagcagtactgcaggcatgcaaga

SEQ ID NO: 3430 - DNA, 974 bp, Zea mays
catcttgcatgcctgcaggtactgtttggactttcattgactacatgttattgtttaaaacctgaaatgttcatttcccacttgtctctttcttcagtttaaattgttcaatattccatgtctctgccgttgcttgtttcttgtgatgatcccattcggtagttgtggaaggctggaagctaaacgttaaaaagtaactttttgtcactattgtttctaatatgtgaatgattctcctatgcagcaatcaaaatgatgattaataatttaatatcatgtttatgtttaactttaacatcattatctttatggaaaatgtaatagtctatcaaagaattatctgtaacttattttgcatgtcatgctactattgtaggtagtgctgttattaagaaacaatgttttttacttttcctacggttgacgttgatgatgacttgtagataaatgctgaaaatgagacagagatgaaaggttaattatggaaatatagattgctctgttcctagacggattgttttgttgtccttgtttatttgagaaacaaaaacaatacaatgagatacaaccatttgttgtgccttgtagagatgcgggttaaggaagcttatgtatcttgtcgaaggtgatccaaatacttcaaaaggatcagcagcaagcataaaaacagcgtatgaacactgcccatttcacctgaatcgatagtattaggcctcgacagtaatacctttttctctttgttatgtgtcttactgttattatccttatgatgaatatgtggtgtgtgtgtatacataaagtatttaagaaagcatatatgtgatctcttagttgtgccatgtgtttattttcagctgctttaccactgagattttcgaaggatttgatgttctgcgtaccaatgggtatactgataccatgagaacatatggttatcttacactctcgataatggattactacagcacaaattt

SEQ ID NO: 3431 - DNA, 1200 bp, Zea mays
agcttgcatgcctgcagctaatcaatcctacaccacgccgtctgctgaatctcgttgtgttcatcaccactggttatccttgctcgatgtttgctgtttactgctgctactagcgctgtgtgttctcctcttccccctcagagcgagccttcgaacgagacccgcagctgcaccgccggcctggaccgctgctgcgacggcgcgctggccaggccgtccagcatcttgaccacgtccaccgtgtcgtccaggtagtacctggccatgctcggcttcttgcccaccgtgcacgcgaacacctcgctgctggccggcagcttcacgccgctgttggaggccgggcacacgatgctctcgaacatgtcctcgtccgaccggtcgtcgccgatgcacagcacgaagtccggcggcttccccgtcctcaccatcgacgacaggaggctgtccactaccacgcctttgctgatgccctgcacgacagcacggagatattttcacgcgtgttatttatgccatttgctgctctccccctctctcgccagtcccaggaatttcccaattgtgattgcggacaaatggatgatggttcagttgcgtggcaggttgctttcggaggggggaggggcacaattaaaaagaccgtggatttcccaggccacacgggaatggtccatgctgattcacattctatttgtgcagaagatacagattgtcccagccatgcatgtagtggattggattggatcggatcgatccttatccgatgcattttttgtttgacagctacgtctagtcggtgggcatgattcatacacatccagaaaaaaaaaagtgaactgaatgaacagccaacgaacagcagcagctatggaataaattaatgagcagaaagagaaaaaaaagacacgcatccggctcgccgctcacctgggggttaacctcgacgatgtgctggcctctcttcaccaccacgggctcgttggccagcacgttctcgagatggtcgagcagttccttagcctggcaggaaccgaagtccggatccgcctcgtggtggtgccacacgatggcgctctccttgtgctcgatgtaggagccatctgttgcctccgtgtacagctgcatcaccggctccgcggtcttcttccagtcgaagtcggcggccaacccggaggtatcccatggcgcgtccctgctcca

SEQ ID NO: 3432 - DNA, 1186 bp, Zea mays
cttgcatgcctgcagaccgcccacttgtcgacgccgacgagcctcgcgtgcagcgccgcctgcacgtcccgccggttgaggtacctcaccgtctcgtcctccacgcacacgtcgacccgctgcccgacctgctcctgcgcgcattccatttccgcatcagagtcgattcttcttcttcttgttcgtcagggcagacagacgagacggcgtataatacgtacgtgcggcgagagggtcttggactgggagagcacggacgagaggaagacgtcgagcgtgacgtcgtacttgtcgacgaagcggctggtctcgcgcgtcacccggttcatcaccctggcgcacagcggcgacagcgcgccgccgtagtactcggcgacgtagcgggagtagttgcaggcggaggtgaaggcgcggaacgtggcgtcggagatgaggccgtgcgaccagaagtactcggcgcgggagttgaagtccgtcgcgaactccagcaccgggttgcccagctgattcggttcacggaccgacggccgatgcccatcgtcagatcagaggcaaagaacgagcagagtttcagtgcagagacaggtccagggttcagggttgcttacggcgacgcctttgaggttgaagatcctctcctccttgttgttgaactccaccatggcctcggcgagctgcgggatgtagtgccctgcatagcattcccgaaaccgaaacagaggcagcgttaattaatagcatgtttctcgatcgaaacaacgaccatgctagctgaatgatagctgtgtatattgtatatactccctgtcctcctacctgcgtagctttctccggcgatgtacaggtccctgcccctgtactgtgggaacttttggagccacctttgcaggaacaccatgttgtccatggcttcattggtccagaccagacgtgcatgcagtgcagaggtggtggagaaagttagaagggatcatcatcactcccagtcacacgcactgctgccgctgctacgtactgctactgctcaaacaaaaagatagagagcatggcagcatgcccctctcctcccctcccctccttgcgtgtcacttttcttacacacaccaccaccaccatttttcttcagcgcaaaacaaacaaaaaaaatcgctgtttttttatgcttcgcttttgctgcaggcatgca

SEQ ID NO: 3433 - DNA, 1366 bp, Zea mays
agacccggttatcctatatagtcgacctgcagcaaggatccttccaaaatctcagccaaatccaaaaactgcacccagaaagcataggaaagagctccctgaacatcttgaacccacctcaaattagtcaatgcttccttcaccaatctacttttggtaacctttctaggaatagaggcaaacacagccggggcaatctcttggatgcagtgcccatgcagccatttatcagtccaaaaaagcgtgtttaatccatttccaattacagtgaacacagcagaattgaaaaggcacaccacttcctttgtgaaatgaagcggaaacgcagcccacggcctccctggatctgatttctgcaaccaaagccacctgactctaagggcccaaccaaacagttttaaatcaaaaagaccaagaccacccaattctttaggacgagtgactttactccaagccaaggaacagtgccctcccttgatttctttcctgcctttccaaaggaaagctctccttaatctgtcaattgccttgattgcccaagcagggagatccagggccatagccaaatacacaaatctggaagtcataaccgactgaatataaacagcccgaccagccttggtcataagcaccgccttccagccagggagcatgactgcaatacgatcaatgatagattgcaattgaggcctagatagacgttttaaggataacggaagcccaagatatttgcatgggaaattagacaactggcaaggtaaagatgcctgcactgaagccagaacttcctcatcacaatgaattgggaaaacattactcttctgaatgttggtcttcagacccgaggcttcaccaaaaagatgcaaaatccccttaaatacctcaatatcaaccacatccggccgaaggaaaacaaccacatcatccgcatataaagagatccggtggtgaaggaatctcgaagaaaggggctggaggacccctaccgtagaggcacgctgcaccataatattaagaacatccataaccaagacgaaaagcataggagacaatgggtccccctgacgcaaaccccgccgatgataaatgacttctcccgggcatccattaagcaaaatttgagtcgaggaagaggacaacaagccgcaaacgacgttgcaccatatctgcccaaaacccagcttgatgaggacttcaattaaaaaagcccaggaaacactatcaaaagccttagaaatatccagtttgaccatgacacggggctgtttttgttgctgcaaaaaacgggcagtgtgctgtaccagcataaaattatcttgaataaaccttttcttgatgaaagcagattgattaggcgagacaatgt

SEQ ID NO: 3434 - DNA, 1109 bp, Zea mays
ctgcaggtggcaatacgaagatatcctttctttatataaaaacatcatatgtgcacgctgtgccggcatggtcttaattagtttggatcgaggtgtgtgtgtgccttacattttgatgtttgattggagtaagtcgcaatagattaagctctttcaaaactaggaaaatcacgaagcctgaattatatttagctggagtgtttcgtaaccgattgatttattggttttatttgaattcatgtttgttgcagagagcaaatttaacttgagtttggagatcatgtatatacagtcctttgcttctgagggcgtgctgaggtccacttgcgcgtggcttaaactttgacactactgcctcgctggagagaaagtagagatggaccaaacatcggttatgttacttatgtaatgcctccgtcctaaattatgtaatttcaattaatttcctcgaaaataacttaagactcactaaagttatatgacaaaattagaatatttggactatccatttttttaaataacatgtaatttaaaatggatgggacggagagagtgctaaacaagataaaattctgagaggatctacgcacggtcaattagctagggtaattgaaatatgcaaaatgtattttggtgcaccgtctcctagagctttcatgcgcgtactttcccggtgctcgctcgatgactactaagctgtttggtgtgaggaatgatctagtacatcgtcttctcactcctcacttttttttgtttggtttgtggaatggattgagttgatccatcatcactacattccttatgactactaagctgtttggtctgaggaatgatctagtacatcgtcttctcactcctcacttttttgtttggtttgtggaatggattgagttgatccatcatcaccacattccttatagttatttagttagtactaatatgaggaatgaggtcattccaccaaatttgaggaatggatccatgatgcaccaccacattttggatgaaatgattcctcaaaccaaacacccctacctgaccaaaatggcaacgagagcatacgtatccgttgggctcttgatcgagctagctagctgcaggcatgcaag

SEQ ID NO: 3435 - DNA, 1151 bp, Zea mays
tgcagagtgtaaacttctcatcgatttctttatatgagagtttctatcagttatagatgataaatcatgtgggagatcgtcggctcgtggctattgtagcacatgattcatgctgcaccgaaactattgatgcccttgacacaataataactcgttgccattgaaaatcgcagttttgtgctgattttgtttgtttggatgccataggttgtgttcgacgaggatcagctagcttaccaaatcggggaaactactgaaatactgtcaagaggttatctatgtgcaaccccacactgtgtgcaggtattgttgaaaccaaaattcatctcgataactaagcatgtgtttttcgcatacattttactggttttgtgatgtgataactaatgtcctacagtttttttaatgctattgtttctaggcacccagcagcgaaaatgcttcaaatgttgaccgctctacttttgccttgttcatgcaaccagattggtacgtccaagctttgttcttcttatattatatgtgtcatattagccatttagcccacttttgctttcctttcgtgtaccaaataatttgctggccgtattgtattgagtattgagcatgctatttccatctgggaactagcgaggctagctggtccgtcgttctgcaaatattgctgatcatgggctttcaaattcaattttttttctctgttcaaccgtttggcaggaatgagaagctgaagtttccaagcgaaatcccctatcaccaagaggttcgtgtgatctgctgatctctatactcttgcggtcggaactcgtaatttcctccccccaaatgattaagcttgtgttgaccttgaccagttgattccaccaaacggaacgctgactttcggggagtactcagaaaggctggtagacaagtattaccagacaacaacgtagagcatacctcaagaaaagctaccgtccatacgttcgtaccatcaagtgtgttcttgtgtattcatttttagctttgatcataactctgtacaaaatatagtcgatcatcgaatcgaatacagcgcacagtaatgtatcacgcctattgctttgggtgaatttacgtatactactacgactaagaagctaatgtttagatgctaatctaatatacat

SEQ ID NO: 3436 - DNA, 1156 bp, Zea mays
aaaaacccaccaaggttgcacgcacgcacgcgtgtgagggtcacacgtgtttcatccggtgcagccaaacaaacatagccgcattttaaatcaacgcatctatggagtctagatgtggccggcgcgacaaccaatcacgccctaagcttccgtagaggtaaccacggagactccctccaaacaacaaacatctatgcaacgtacattttagcaaaaacaggcatttggtgttacaatggagacgcaatacactttagcaaagctacattattcagaacacgagaccaccaataaggcaataatggtcttgtttttttttaaacacatgcttcactccacgcgtgatggttatctattaagcctccagcgccatccgacaggactggaagtctgtaacacgcagggcgggcgggcgatcacagtggatccgcacggtcgtcttgttcaacgttgacgctggccgtcccgagctcccaggcctccatcttggacacggtcactgggtgagctccgttgttgaacaggtacaggtggctactgccgcctgccgccacgtgctcagggtacactcgcgccgtgatgcacgtccggcccccgcctccgaagctctcgacgacagagtggtcgatctgttgttttttttgtcaacgttagcgccgttaaacgtcgtcatgcatgcttcagttcagctaagaaccaagacaagaagctctctcaccagtgttctcagcgatatgcccctgtccttctcgacgtccacgtcaacgaatcctgcgtagaatggcttgtgcaccccctctttcgtcgacgacctgtacttgcacgtttgcagcgaaaatgcatgcaaaatgatagttgtcagtatgtttgtttggaggagtctgaaccggtagcaaaacagacgcgtccggttcagctagcagagttgctgcatattatgcagtatatatacctcgtcaggtcggcgcacatgagcaccttgtacgtgccaccgtgcctaaacacctggaagaagacggtggtctgctcccgcatgtcgccggacgccatcaccaccagcccgaacggcccgacgccgccgcgcgggcccggcgaggaggcgttcttctccgcgcacgcgcgcagcttgtggggatcgtgctgcaggcatgcaaaa

SEQ ID NO: 3437 - DNA, 1268 bp, Zea mays
tggtcaatgcggttttatcttcactgccaacatacttcatgtgtacacttagaatcccaaaatctgtcatcaagtaaattgacaagtacagaaaacattgcttatgaagaggggcatacatccacgcaagaaagcctccataggcagcatggtccctggcatgtcgacaaaaagttcaaggggggcttggcatcctcaacctatccatacactacgaaagtttaatgatgaagaacttacacaagttttttagtcgattggacataccttgggtaaaccttgtatggaataatcactatagagaaggaaagattccctctgaaaacaagattgggtccttttgctggaaagacatcctgaataacctaagctcttttagatgattttcaaaggtcaacatgcaagatggtcgtactgtccggctgtggtgtgatgaatggaataatacaaccctcttcacgaaatacccaaagcttttctcttatgccgcaaacaaaaacatcacagttttgcatgcgagggagattggacaacctcagaacatgttccacctccccatgtcggttcaggctttcaatcaattgcagtttctcttgataacaatgcaagctcaaccgctattggaagaacatgacagatggacatataaatgggactctcccaggtttttatctcagaaagcatacaaacatataacaaaagcaccaccaacaccactgacgttcaccttgctgtggaaatcaaaatgctaacccaaacagaaggtattcttttggttgcttctgcacaaccgtctcaacacaatggcaatgcttagaagaaaaaatatggagttggattcgtacacgtgtgaaaattatattctacagaaagaagaaacggttaccgtacccacctcttcctcaggtgcaattttgcaagaagatgctggcagacaattggattgacaccgccgaaaacatctgacatacacaatgtgatgagattaacttttcaacagcttgacaaaaactgaaaagtggaagcagtgatggtcatgctatggtgcatatggaagtgtagaaatggatggctatttgaaaacataccgccttcagtacaagggtgccagacgctgttcagaaaagagatgcttcttatctgttatagaatgaagcaagaaatagtggaggaggtcaaacaatggatgaccactttgtaatgtcgcttgtgcatatccgtcacatgtaaaaacagtatatacacatttaatcaatgaataaaaaata

SEQ ID NO: 3438 - DNA, 1008 bp, Zea mays
agagaggccaccagccgatccgatcgatcggatcggatcgcggcaccagatctcgaccaccgccggaactgggcgggcgcgaagcagatgatgcggcgattaattaaccggcgtagcagcggctggggatctacctgcatcacgtcgatccacccgcggtagatcgatgggaccgtcacaacaaggacaaggtacggattaggtttcttgtactggtaggaatggatggtggttacttatgaatgcatgtgttgaattccgtacacgtgagagagagagagagagagtgatggtgcgtagggctggttaatttcgtcgtctcagcttctttcccgtgcaatttaacctcaacctatgtgcatactacaagaaaagggttgttgttaattaccagtgtctgaaattgtggcttttctaaactccaggtggcagtacacacatacctttgtttcttaatccttgccgcacttgactatcagggggtaataaatcatgatccaaatttgctttcacaaaatgatagaaaactaaataaattttagtttaaaatgactaaaattatgtttcgatcctaatctaattcaatacttaaattttataatataaaatttagagctcattgtcacctatatctctgcaatgttctgcgtacgttttttttttgaaaatagatagatagagtatagtaatatttagccagggtccgttagtttcttccggctggtcatgctttaataattgagctgcatgttttttaagcgatatccattttttttctcatcattgcgtgcacagttagcgcagatatatatattttttatcttttttttgcatgcttttattctctgaaagggcgatgggcattttccaggaacgaataaaaagagcagtgcgatttggcctgtcgttctgtcgtagactgtggggcgatgtttttctggaagcgtgcaatctggtagatcttttggttgtgtaaagggagaaaaaagatggcgctggctgcttgct

SEQ ID NO: 3439 - DNA, 1142 bp, Zea mays
agattgtgatgggcctcgaggaggcgttcaacataacagtcgacgaaacaagcgcacaggacatcgcaacagtgcaggacgctgcggaccttatcgagaagctcatgctggaggcacctccaaaggtcgtctagatccagcaaccttgcgatcgacgaccttgtgtttgatctatgttgtgtgttaatttgttcgtgttgccccatttgttctttcttgatgattcaagatgaggttttgtattggtgttgctgaggtgaattagatagccccaaaggccacatgaagcagatgaggacagttcattccactttgaatttgtatgttgtaacttgtagtgctgctatagagaaaccaatggactgttatgaagagtcaatgcaactgttgcttttttagttttgggaagtcacacacatgaaagtctgaatcagatgcagtactaattgttgagcttggggtgcagatatatgcaaataccaggatgtcaggtgcttccccatggtattgttaatgttaaccacaagtccagaaccacaagcgttaatgaattttcagctttgtggttgctcgatcacaacttgagttataagccagattaaggacaggattaagaagaaagtttttttaatgagagaaccagtgataatggaacacattaacaataattttacccatgtggcagtttttttactgttacctataaaatcaactttcagctgaaagctgtagcatcggtcacaaactgtcacaagagaacagtgccactcaaattcggcaggatccagcacgcaaggaagcttggaggatgacactatggatttgggacaaatgaaatccacaaatttttccgctggagagcgcgatcctctgaaaagtatagacaacttttttccaaaaaaaagaaaagaggaaaaaaatgttatcttctacctccttagctgctcttctccatggccgcccccattatcctttccgtccgtcgaaggcgcatcttttcctagctctccccaacaaccctacccgtttcctggcctccgcctccgtccgggtcgcctatcctccccggtggcatctccgcgccgccgacggggagcgggacaaccgcgtgcaggagctgagggtgcccgattcttggctga

SEQ ID NO: 3440 - DNA, 1113 bp, Zea mays
gcatgcctgcagaaaaataagctcagcaccttttgatctccctatccagtttctttgcatttccttgatactctcgggccaatcaagatcattcaaatcttcaagaagacgatcagcataagatgttatcctcagcatccactggcgcattggctatacaacaggggagaaaatggatagtcacaatatgacttttctgcatataggtacttactacttagcaatgatgcattgaaacaaacaagttccgcagattctaaagcatacctttcgtataacaggatagccaccacgttcgctcacaccatctactacttcttcattcgccaggacagttccaagagcagggcaccaattgacaggtacctcagcctgattgtaagatatcaatgccagcctaaaaatcattgaaaaccaaaaatgcaacactaagaacataaaaacagaaccctaaagatgaacagtacaaaatagtttatcactagaaataaagaaagtgtgaaacaggaattataacaaatgataagcatatttgtaacctaaggttcaacaagaatggcagaaaatagtgtttctgacctgataagcaagtcctctctttaacagttgaaggaaaatccattgtgtccatttataataacccggctctgtcgtggagatttcacgatcccaatcatatgaaaaacccaacgatttaagctgcaaaaatgagaaaacatgttcttaatgaaccactagtagtcaaagtatgatacataaaactttcacttctctttcagtaggtaaagacaataaaaaagtaaatatttatccatggttcacagtaactacaaattgcaagattagtgttttttttctaaatggaatggcatggacatttcttttgtgttttctcaaaagaaatgtagcacattacttttcaactgcatagttgatacaaatcaaacattgctcagtactgatctgctgattacacaaagaagcaccccacaatcattaaaaaaaaaaggtccacaaaagagttatacggttacttcgttttacatcttattaagatctgcatacatgtttatattgctctagagcacttgacagtgccacagtcatatcagc

SEQ ID NO: 3441 - DNA, 1166 bp, Zea mays
atgctctatcctttactaatcaatactcttgatatgttggtaccattttgcggcgataataataataataataatatatggatatgtataatgttagtataaagatgtcttttatgactttgtatatctgtgaacacaccatatggatatcctttactactgaatatttggcaatctccctatgccaaatgcggcgtacccatttttgaacccaaatgaatgtcagcctttatttccctattaatgtgcatataaaaataatccatcaagatataagatatcagagttgatctgatagaatctggtgtgcccgccttcattcattttatttcttccccgtattcgcactcttgcatctccttccattgtttgctgtgtcttcctcgcagagagagagagagcgagagagacagacagagacagagggagagaatgcagaggtctctctggagacacacctcgtcccctgcctgtgtccacgccatcgaaagttccgacgatggctcgcgccgctccaccgacgaagagccacgcaagaaggtgaacaagaaggtaatgaagttacttctcctgcccttgaagcacaggcagcgcatcccccaagcgttcagatcgctctcttggggtgccaagaaggaggacgccagcaagaaggatgggagtcctcgtgagcgtgaggagagcgacgacgcggatacgttcgcgtccgcgaacagctccgagctgcgctcctcctccaggggcatcgacgacgactcccaggccccgtcgttccggctcagcccgccgccgatcttcccaaccggcagcgtcgaacgccgccctcccccggcctctcccgtgaagatcgtccgaaagcttccgttcgggtacgtgattggccgtcagctggacgcccccgcgctacagccgccgccatctgtgacgacgctgtcaagaaatgtcaagacggtggtgatgccattgatggcttggctgcacctccggtcgaggtcgctggcgctcaagaagaaggccggccgtgctttcaaaaaggcgtgtcagcgaggcagcaggcgtgatgagcgtgaaggtgtacaagaaaccgacgatggttgttgcggcaacgacgatgaagatgtgttctggaagaaggatgtgaagggacttcgctgcaggcatgcaag

SEQ ID NO: 3442 - DNA, 1040 bp, Zea mays
tggggaggccagtgcccgccgcccgcgccgccgatcgcgagggacaggcctcccgaggtccccggatcgccgccgttgctcaggaactgcgactgccgcgatttgcacaccaaacaaaacaaggcgtcagcaagccacccacacccagctcgcgcggcgcctagcaagggagggaacacatgaaggaaatccgatgcggatacccacttgcggatgcctgggtccgaacggcaacggcagctggtgggcgactcgcaagacagcaggaggcggaggaggcagcatctgggtctggggttgcttggagctcgcgtccagctgcgccggccaccgtacccggtggttgaaacgtgacaaagcttgctttattaggcaacattttacaagacacgcctcgttgatgcggaacgcgagaccgaaccgaacgggtacctttgctttcgtgctccggggcgcggccgtctgccagtcgacgtcgaacgccatggggacgcgctggtccgaggtctcgtcttcgccgccgcctcttccgccgccgccgtcgtcaaggctgccccttttgttccccgccgagctccccagcgacaggtccaggttgtgattgtggtcatcgccaccgccgcccgtcgacgctgcacggcgaaacagcggaccgtcagagcttgcctgtataggctgtagcctgtagcgaaatcgccgcacagcgacgagggggcgcgatcgtggcggagatcgcgggcgggggatagacgaacccgccggctcgagctcctcggcgtaaatgctgggatcgaagtttgtcaccgcgtccttgccgttgcacttgatggccgcgcggtcgtacgccctgcacacacacacacacacacacgacccgacaatcccacagacacagacacggggcatccatccatcagtcagtttcgcggcccagaggggggtggcggtgctccgagaaacgcctcgcgggcacacagtgcggtccaattattttacctggcggcttcctcctcggtgtcgaacaggcccaagtagacgta

SEQ ID NO: 3443 - DNA, 1012 bp, Zea mays
cagcaccagaagacaacgaaatgaaacactcaacaaacatacatcaacacactaaatggcgacatctagtacctccttcaggatatatggagttgtagtgcacctcagcccaaaaactcaagcatataactgcacaacaggacttctgagtttagatagccaaaacctctgctcatcaacaaaaacacccattgggaaatatgcccgagatatatacagagtgagaaggtttacttaggcaaacaatactcagattttgatgtgagggcaggtacaacaactcgataacaattaaattagaaaataaacattacctcttctggatttctcaacaacaggaagaatctcaatataacatgtatctctgaatgatgtcaggatgaagatctttacaccgtactgcaaaagcaagtgcacgcacttgagtttcatatcatatatatacacaaaaatacaataaaaagggccaatagtatactatgatcccagtcccagaaattcaagcatgactgacagactcctttgattttttttttgtccaacaaaagaaattctaatatactcctaacagagacagcatggtagcagaagaagcgaaatcgcagcagatatttgaaacaacaggaatgttgaacagaaaaacagcatctgtaacatcatagctcgtttaatcttattttctgattgtgcctgcaatgaaaataaaagttgtatagatatgctgaacactcatttcgcgagcttcgcttccagctatgattttttttaattttttttttgtaatttcgtgtgcacttatgtactttgtaccctctaccataattgattaggcagaactgctgcctctaccataaaattttaaaagtatgctaaccactgaagccacataaattagccacacagggtacttgtgaaactggaggatttaattggtacctttaccaaatacatagtgtcagatgtacattaacacaaaaacaaaaagatcaagagcaaaaaaagtttaccgagt

SEQ ID NO: 3444 - DNA, 947 bp, Zea mays
agaagttctgaatcaagaccactggctgaaaaacgtcacgaacagctttctgatgacggcaaggttaggagaggcacacagaccaacggtaggatcaaagacgactgggttaccaggaacggggagtttcttggcatttttgtttgcaatcacttctgcaagcctgcccaggggttactttctcctgttatcgcaccgaaagcgcggcacgacgacggcagcctggacctgattctcgtccatggaagcggcaggctgagactgttttgcttctttgttgcctatcagctctgctggcatcttctactcccctacgtggaatatgtcaaggtatgtatcgtgactttctttgtatctgtttacagcgcttgttgcggcggttcatgtacctatagggcttacagtcccagctgtagatatccttgagcttagtagcatgctctttcctagaacataggactccatcagtttgtcttggcttcttagatgaccgtgcactgatgtggcattttgttgttgcgacaatgatttgctcgcagataaaagaagtgaaggttaggccagttggcagtacccacagtggttgtggcgtcgacggtgagcttcttgatggagagcgcggtgctgaatggcagtgctcgctgcttccagcacaaggcaggctgcttggccaggatcccggtgctttcaactagttagggctcgttcggttagctctcaatccatgtggattgagtgagattagatgagtttgaatcccaaacaaattaaacttcttaattttttccaatcccatctaatccatgtgtattgggaataaccgaacaaggctttactgttttatctgtccagcagtaccgaggttgttggttaatttcatgataagagagcgagtttcagcaatgttcgtatactgattatacagtattctgtctctatagattgta

SEQ ID NO: 3445 - DNA, 1208 bp, Zea mays
agctagaggcccagagcagcggagtgctggcgcgacagtggtcctgtgcggcagagagatggatcggcatggctgtggaagatctatgcgacgacacggcgcgacagcgcttgtgtccagtctccctctcgcgacggcacgactcgctcggtaatgacgcgacatggattgatgtgctacgcgctacgcgacttcgctcggttctctctgacctggacttgggggcagccgccactcacctaggagagaaagtgcagaggagaaatgagggcgctaggctttgggagagaggagggcaggcgggccttgccgagcgagtactaaaagcagcatgccttctcacatgaacaatatatgtctcgagttgctctcttaacattgcacgattggcgtattgttcacattagtattaccctgactaccggttgcggaaccccttgaaagcggctgaaaaaaatctcctcatttatccaaacaaagagtagcgataatcatgaacaaatcaactacctattgctgcaaaaatgcaaatctaaacaaaattacaataatcatcaacaatcaacagatcacctgccagcctgctggagtctgaacgggaggcagggagtgtcggtcaacgcaaaagcaactgtgcctcagccctcagaaaagtctcgcttgtgaagattcggagctgtttggagtggggtgtctcgtggcttggcaatgatcgcaccttgttcctcctcttgtgccggtgtttgtagtcgtcgtcgagtttcctttggccttgtgctgcccgtcttggggagtcggagcggagctgctcgtcacttgtgttgagctcggcaacgatgactcgggatggacattgtgtgtggggttgctgttctttggtttgtttgtgcgcccctgtgtaggttttgggcccgatttctcttaaaactgggtcaattcctttcttcttaatggagaggcaaagcttctgccattacgttcaaaaaaaaattcaacatctgggtttatctttggcaccctagcccacaacccactgtttctcttcctgttggaggtggagcatgacgatcaaggagatttccaaggctaaaaggaaaggagtgaattctattcggggattttctcggccgggaccatgtttcggtctcttcttaatataataccgggagggcggtctttccctccccggccgagtttttttttggagt

SEQ ID NO: 3446 - DNA, 1114 bp, Zea mays
caccaggctgcgtgagtgtgagtttggatggcctagtaagcgctaagactgggcccaaacaagcgtagaggagattattatccgtcttccttggggggcctgtcaaacttatagaattctctacagttttcttcggagcatatttccagatttttatgtttgattagactaaaacaaactcgtatctcgaactgtttcagaattctgacagcacggacacgttaaattgtactccttcagtcccaaaatataattcgttttagattaatcacatacatacgaatacgaatgtactctgatacactgtttatacggtaacacgtgggtcccgtcgaaataaaaaagaggcgcgtattctcaatctgctgcggaagtagtattcgaaaggtacaaactcctgggctttcttaatttctctatagaaacgggtagtggtgaagatgctctaactctctctctctctctgaatattttggactgaagcaagaaaccgaaccgtgtacccaacaacgatttcccatggcgtggcgactgacgactgatgtccggcgcgccggccccacccttcctctcgatcgcggtagctctagctcggcatgctcatgagatgatgatgaccgacgtcacgcagctgtccagggctggagaaggagagggacccaaggcgccgcgccgggcacttttcaagaaccgcgaggtggccaccgcccatcgcatcatccatgacccatctcgatggatcgatcgtttatagtgcaggcgatgtgatgccggccggcgggcgccacgggtaataaagcagatagcagccgaacacatgaggacgggtagctcgcggggcggggcgtgctttgccattgcatgcgatgcggatgcgttgtgttcctctggcctggttctggttctggttggttggtggcgtttacgacggctgtgcctgggcggatgccggttggtcatgatgccgccgtcagctccgtccaacgcaccgagccggtggacgatcggtcggtcgtcacgctgccgctgtgcttacttcatctgcaaatcctgttcctgtgtccacctacgactgtgactgggaatggggcgccgggcgaagctgcaggcatgc

SEQ ID NO: 3447 - DNA, 1020 bp, Zea mays
aaaattaattcagaaataagaaaattaggccgtcatcaatgatcaatccaattcatgcatatcgttgtgcttggaccatgcattcttttattttttttaaatagtaaaagaataaaagaagaatcatgacgcaatttcgttcagcttttgcaatgaaagtacgtttgtcaaaataaacttttgcaatgaaaaatctaaggtggcaattcatagatttctgtcactggcacagcataaatatatttgttctaagaatacgctttaagcagttgcctccaaaaaatacacttgtcaaacaaaagagcgggggaaacgggggagccagagccacgaaacaatcggtgtcccttcattttctcctgcccttctccccttccacacgaactaaaatatctccgcttctgcatttttccaaaaagcttcatggtctcgcccaatttatcggatccatcgccctcgtcacgtgacccctaccgccacctagaaaaagctcccccggccttccacagcttctcccattccactcggtgctttgcccgaggcccggagaagccttatcgcctcctccttgcacgccgaccgatcgccacaatcccccaccgctcgcctgcctggtgcccgccatgccggagatcaagtgcggcgcggccgagaaggtgaagccggcggcgagcccggaggcggagaagcccgcggacatcgctggcaacatctcctaccacgcgcagtacagcccccacttctcaccgttcgcgttcgggccggagcaggccttctacgccaccgccgagagcgtccgcgaccacctcatccaggtgagagagagagagagagagagcgcgcgcgcgcgcgcagaagccgatcctttagcctctctcgctgctgcccgcactgcactgaggcggaggcgtgatccgtgtgcttttccctcgcgcgcgcgcgtgcacagagatggaacgagacgtacttgcatttccacaagacggatccgaagcagacgtactacctgtccatggagta

SEQ ID NO: 3448 - DNA, 1081 bp, Zea mays
tgcatgcctgcagctacgcgctcagctaccgcgacggctcctactcccgcggcgtgctggcgcacgacaggctgagcctggccggggaggtcatcgacggcttcgtgttcgggtgcggcaccagcaaccagggcccgccgttcggcggcacgtcgggcctcatggggctcggccgcagccagctctcgctcgtgtcccagaccgtggaccagttcggcggcgtgttctcctactgcctcccgctcagcagggagtccgacgcgtcgggctcgctggtgctgggcgacgacccgtcggcgtaccgcaactcgaccccggtcgtgtacacctcgatggtgtccaactccgacccgctgctccaggggcccttctacctggtgaacctgaccgggatcacggtcggcggccaggaggtggagtccacgggcttctcggccagggcgatcgtcgactcgggcaccgtgatcaccagcctcgtgccgtcggtctacaacgccgtcagggccgagttcatgagccagctcgcggagtacccgcaggcgccagggttctccatcctcgacacctgcttcaacatgaccgggctcaaggaagtccaggtgcccagcctgactctcgtgttcgacggcggcgcggaggtggaggtggactccggcggcgtgctctacttcgtcagcagcgactcctcacaggtgtgcctggccgtggcctccctgaaatccgaggacgagacctccatcatcggcaactaccagcagaagaacctgagggtcgtcttcgacacctcggcgtctcaggttggtttcgcgcaggagacgtgtggttatatttgactttgactcggattgggattgggattgggatgcagcgggcggccatgggctctatatatgtgaatacctttatacttacttgcagatttgtttcgagattacccctggtgattggcaaatggtaacaaggtgttcagttgttggcaaatgaacaagcactgctcgcggttacctttttttttttttttaccctggcttcccgccgtttctctgtgcttcatccgagatcaatttgcgctgcaggcatg

SEQ ID NO: 3449 - DNA, 1132 bp, Zea mays
cttgcatgcctgcagattgcacataccggtagtgacacgcttcttttgtcctcctgagatacctctgatcatagagtctccaaccattgtatccgcacagatctccagacccagaatctgcaaaagaaatacaattactgttagggggcatatccatttctcgtattttctttttctgcggtatatttttacttaccttgaggatgtaatctgtaaccacgctctcctgaccttccacggagatagcctgtatgcacagaagcacaaataactttgagtaacctttgtcacttccaatgtaaacacatgatttggtttgaattaaatgaatttttaccttcatgtaaacatcgacatcaggatctggttttaatgttggcttctttctcccttcttgaaagctcagtaagcatgtctgtgtaatttgaaaacaccatcaggttcacttcaccgaaggtgaataattatctgtgttcctttccaatgtctgtctttacataccataacgtgttccgactccttgacatcttgcagaaaaggcaagtgtttcccggaccgtcatttcgccgacgtgaacatcgtgctgcccgatgtatgccgatgtcctctgagggacaaattcatccatgtcatgaccattgtaagtcactcttcctgacacctgaaaattaccattgcaagttcacctattcagtacagtttacagctatctctctctctcccaatatataccctttttccctagaattcagaagttcacaatcaagaaattatcgcaagatgtgataccttcagattggagtcaagtttccctgccaaagccagaagtagacttgttttcccggatccaggaggtccaagcagcaaggacgttcacattctgaaagaagtgccagttagtaagtacaactacagaaaaactgaaaaccttgcactttaaaattctttggcttcttacctgccgggtcttatgaccccactgatatcgtgaaggatggagacaggcctcttcccgctagagacgatgtgcatagcacttagtacatcctatgatggtagcagctcacaagagttagtagccgaaggaatttcttctccgtggctgcctaggaagcatggaggggtgcccgct

SEQ ID NO: 3450 - DNA, 534 bp, Zea mays
cagcgatattggatctgtcgtgagtatgattgacaggattgctggatcagcgcctggtaatggttctagagctgctgtaggagaagatcttgtcgctatgacaaagtgccgcttgcaagccaggaacttcataactcatgacgggagtggtgcatcaaagaaaatgaagcgggacacgagtgctatgcctcttaatgtgtcatcagctggaagcgtgaatgatagcttgaagcaatcatatggtgttggtactccagagctacaatcaactgcaacctcacgtgtcaagtggcaaagggctgaggtgtgttcccttctttacaatgtttgttgataagctgtgtagaccattggttctacatgtagtcgtccgtgacttgcatgtttcgacctaaaagggcaaacattgtttattccttatccaaactctttgcaaccttgtaggtaaaccatgctctgatggaggagattcaggagataaaccaacagcttatagatacagagctccatgtctctgaggatgatgctgagtcc

SEQ ID NO: 3451 - DNA, 1009 bp, Zea mays
atggtgtaatgattatggaatagtgagggttccaaggtcgatcgccgttgtcatcattattaaagcttgcttgctctccctccctctctctctctctgaataaagttctgccaaagtggaggtaactttatggagtagtagaacaatagactagcatttgagctgtgatagaaaattggctaatcggaagtgtgaagaaaagtgggaggacaagctaggcaaatggctgtaaggacaaagtaaactttcctaaagtactgctgataaagtgataaaaaggaatgctggctatcttgttggtcccaaaactgacatatcatttcagattgaactgatgattgctgaattactatggtcgtacctgcattttgtcgattttattttgatttggtccaaaggtgactatagtttggatggtccccttatcataagctcctacttttccaccccaacatttcctccagtttagaaacactatatacttatacaatgaaaccaggctgctaatagctgtttcccgttctcatgcttttttttatgtactccggccgtacataaatatatgacaccgttgacttttttaaaaaaaaactttgaccactcattttattttaaaaaaaatgagttatagtttattttgttatgatttgttttatcacttacggttgtttgagtgtgacttaaaattttacattttcaaataaatatgttcaataaaacgaagtggtcaaagttttgaaaaaaaagatcaacagcatcatatatttatttgtgaacggaggtagtatattattttgtcctgtggtaggagtcggttatttatgtcatgctcggggcaataaaaaaaaactaccttaatttagcatgactgctagaactttttcagttatgaaccaatgataaatatgcaatttttcttgctgggctttatctgtgtcgctaatgctaaattcttccttgtttcctacaggttgccacgtatcaagatcctcgagatgcctgctcagca

SEQ ID NO: 3452 - DNA, 1282 bp, Zea mays
aaattaccaaccttaagagtcaggcagggtcgagaaacagcaaaactgaaagcaattacaagagtagtagcagaaacgccagccccaacaaatggtggattcattattagactagcaataacaccccaaacttcagttgctaatgcaatcccatacagaataagaaaggcatagctgtaaaaaaaaagacaacattagagcatgttctcaactgaaactagaacttttaggatgggacagaacagagataagaatacattatgaccaaccctgaactcaaaaaaggcaaacaggtagcacgagaaagaatatacttgtacctaacatttttagcagagtctgcatgagcatcataaacgtatacaggcaatactcttggcgaatacactacgattggcggtgatagaaggacctgagaagggcacacccattcagcattagaagaaaattctacagtatactgagaactagaaagcgatcagcaacagttatcttagtgcatgacaaaacttacagtcaaagcccttccagtgagaagaaatataaatgagaaataacctatagatgctccaacaaaaggctttcctgcaaagttcagaagccaagtaaatacaagactaaatgatagcaataactcaaaccaataaacaaagtgaaataaaggacagatgggcatagaaaaaagatcatcagtcaccgtgaaataaacccatcaggaaggcagccaaggctaagagaaaagcaatggaacaaacaagcagcatctgtgtcctcgttagatagaagttgttagatgtccagtagtggatgaccccaataacaaatacaaggaacagaatggctacgaggcaagcaactccaacctgtataaagatgacatgtgaattatagcctattgtaattgaaaactaacgtcccaggtcacataaactttacttacagtccagggcctgattgtgacaataacagctgcaaccgcaccaaacaacagcaacattcccatgccaacaaaaaggtaaacgccacgagaaatcttccaatcatcatccttcctgaaattatttgcaattttgatctcagtggatcagaaatacagaggggaataaaatgctaaagacagtcctttttataccatttgtaaagcccagtgaacagtgagaaaaatgctggaatgcaaagcaagggaagtaatgctgcaaggaaatcagcctttagaggaacaccatcctctcgtgaatttaccactccccagtaggatgcaccgcaaaaagacacaagaaca

SEQ ID NO: 3453 - DNA, 1098 bp, Zea mays
gcctccaggttgaggttgacccccgccgcccacctcggcgggagcctgttcgccgtcgcggccttgccggaatcatcgatgcggtcgaacaagacgacgcggcagtagagcaggaacgccatgaggccgccgatgagcacgaggtcgttgtcgttgtcgctgacgctgccggtctccaggcgctccagcagctcggcctccaggaacgcggcctcctcggagcagtccagccaggtgtcgaccccgacgcaggcgagcacgagcctggcgtcctctgcgtcgggcgacacgccgctcgcgaaccgcgcgagcactgagcgcacggcccgcgccgcgcggtcgtcctccgggtccggccgcagacgagacgccgcgcgccacgcctgccgggacaccagccccgcgagctcctcggcgtccgcggacgccctgacgacgtcccccggcagcgcgtccattgccgtggcgacggagcccagcagcacccggagctcggaggccgccagctcggcgttcatgagcacccacaggcgcgcccccttccgggcgcagtcggcgagcaggagccgcagcttttgtagcgccacgtgtagctccgagaggcccagcacggccgcctgatccggagccggagcgtcgcggacgatgccgtctaggagcacgaggaccaagccgacgatccggacagcctcgcgcgccgcgccacggagcgccgggagcgcgtccacgtcagcggcgcggaggccggcgatgtccgcggcgagggagatcagcgacgccagcagcggcgccggctcgatggcctcgcacgggtacaccgccggcagcgccagcatccgtcggcgcggcggcggcgccatcttctttgggtgtcggacgaagcaaagcaaacaacctgcaagagggggtaatgggaacggacgagcagacgacgtcgacgattcctctctgtatcgcctcttgtcgcggcggccggccaaatttggaagcgcgcctacttataggagtgcgggcacacgtgttgccctcaaaggtcggatagggacacgtgtcgatgcgtccacgtggacggtgcctggtggggccgatggatggtga

SEQ ID NO: 3454 - DNA, 1018 bp, Zea mays
tgcttggagaagaaggccctctcctgtgtcctgccctccatcatagctggtcccgacctcactcctcagcatgttcgtgaacaaggacaagggcgtcgccatcgcccgatgctgtcgtcgctcttgttcctgggcacctggccggtcgtgctcacgctgctggagcgccgaggccggctgccgcagcacatgtacctggactactccttcaccaacctcctcggcaccgtgctcgtcgcgctcatcttcgcccagcttggaggcaccaagcacagcatgcctaacttcttcacgcagttcagccagcaggacaactggccttctgtgttgttcgcgatggcaggcagtgtcgtgcacagcgtcaggaacctcaccacccagtactttactgtttctatttgatcttttcaatcattcctgatcttgtcttttacaggacgtctgttgagatggttgcttgcataggtatagaggcaatctcgaggtaactacgtgaccagcattcattttaaaaattatgtctggtatatatattaggacattatattgtcgtctttttcaactcatgtggttctttataggttgttattcttcaatgtttcaaatagtatgacttctgaagctacacaggctctatggagacacacatctataagtgaatggtgtttcatcaatgaggtaaacaactaagcatagaccttgaatatcatcatgaaggttctttccttttgagaaaggatgcatagcgaactaagagtgtgtttggttcgagaaacgaagtgatccatcttcttctcactcctcacttttttatttggtttgtggaatagaatgagttcatccatcaccaccccattcctcataagctaataattaatatatacattaggagtgagttgatttcaccaaaattgatggaataaacttatgatgcatcacctcataaagcatagagtgactccacaaaccaaatacaccataaatgatccagtgtcttctttaagaagcaacatgttat

SEQ ID NO: 3455 - DNA, 1146 bp, Zea mays
gagtttttttcctggagtcaattatctcgtggattatccgaaaatcatacaaatgcttcttgcctcatagtttatcctcaagatatatgtgtttcaccagcagcctctgcaactgcaatcacctttcttaattgtgtggtacctattgacatcccgtactacaattactctgtcgatcaccatgctagcatacttgaagaattcatgacaatgagcacatattctcaagttcttaactattctcaacacctttcctgatggtgcagcaccactgatcaacccatatgcaagggccaatctttcactatgatgccaaagtctctcatctgtctccttgtaccctaacttctctacctctagaatcaattcagtcagtttgtcatatatttctagcagctgttcatgtcttctttcgtttgcaacgaacacatgtaccagccctctaacctcaatccaactcctgccaccttccttcctgactccatggtccctcattgcagtccatgcctcagcctcctcgttctttttcccagcagctgagtagacgttggcaagcaggacataagccgagtcatccttgggattaatctccagaagcctctgtcccatggattctgccaggtcaaccttgcggtgaaccacacagcccattagaagcgtccgccacactgctgcatccggtttgcatggcattgtacaagcaacactctctgcatcctctagatgccccatccgtgccattgcacccaccacgcaagtataatgctcaaggtcaggcttcacactgtactttgactgcattgtttccaaccaaaactcagcttcagtggctgctccggcattactacatgccgtgagaacagcaaggaatgttagcccatcaggagcaaaacccagctccatcatctggttaaacagtccaatgaccgcttgcacatctccctgctgagcatgagcagacagcaccgtgttccatgtaatcaggttccggtcagcacccaaccccttaaaaaccctggctgcatcatccacacctccagccttaccataagcatccaccagggcagtcccaacacacacattcccatcaagcccaaccaccaccgcatgcgcgtgaatcccacaagtctgctccagcacagcaag

SEQ ID NO: 3456 - DNA, 1127 bp, Zea mays
agctcttcgcccaggtcctttccgacacctccaccaacgccctcaccgccttgcaggccatcgcacacggcagcgacctccaggatccatcatccttgaatagcacagccacgggtgccgtggagccggccagtatcttgttgccagcggagggcagcagctgctgcaaggacgcggtgagcatggctttcttcagaggcatggaagaggccaacaaattcttgcccggcgacgacggcggcggctacacggtggactgtaggggcaggaagaagaggcttgacggagatgacgagggggagggcaggagcagcaagcaaatggcagctgacggcgaggagtcggaggaatccgccgcgcgggagatgctagaccggctgatgctcaatggcgacgacgaaccaatgcttgccgacatccaggagctgcgcgctgccatggacatggcgaagacgcacccggggaggcccggcggcagggcgcatggagtggacctccactccatgctcctccactgcgccgacgccttggccagcaacaaccgccacagcgcggccgatctcctggcgcggatcaggcgccactcctcgctgtgcggggacgccacgcagcggctggcgcactggttcgccgaggggctcgagcttcggctcaacggcacggggagcctgcactaccggtcgtcgtcgttaatggcgaagagcgcgtcctgcgcgggtgccccgctcaaggcgcagcagttcttcatggcctcatgctgcttcctcccggtgagcatcctcttcgccaacaagactatctacaacgccgccgcggggaggaagaagctgcacatcgtgcactacggtctggagcatgggctccaatgggcgagcctgctccggtggctcgcgcacagggagggcgggccaccggaggtgcggctcaccggcatcgacgtcccacagcccgggttccgtccagcgcggctcatcgaggaggcggggcgccgagtccacgcctgcgcgcgccggctcggcgtgccgttcaggttccgcggcatcgcgtcgagaccggaagcggtccgcgcgggcgacctgggcatcgatcccgacgaggtgctggtcatctgcaggcatgcaagcttg

SEQ ID NO: 3457 - DNA, 1301 bp, Zea mays
tcagagctgcgacgttccggcttccgggggatctggatcttggctgactggacaattgcgaggcgttgacgggcttctaaagcgtggctggattgctggatctcctttctgccccgcgactcgatgatatctctttgtattggtaattattggatgaaatttcgataattattagatcggagagatgttggtcgcggcggtccgtgcctaactgaaggcaaggtaaggtccgagacaaaagaggggaaaaggatacatgaaaaagaagtgagatgtgacatcttgaaggcctttgccatgttgggtgcgctcgcatggcaggcatcgtaataaagatgttggttttgtgtgctgggtgggagatcgcacagggaattgtttttttcatccctgggttctcccgcccattgtgtccccgtgccctgcttcgtgttgtttggcttctcgtcctacgcttcatcaccggtgctgctgcaaattgaacggcgtttctcatctcacggcgtgctgcaaattgaacggggctacatcgcaacgcaacacacaaggtacaaaccggatctaaacattttcaatttacagcaaagttagcaagttactgaaatcaccatcaatcgttcaaaacttcgcgcgccacaaacttctacgccttttctacgccatgcatatgcagttcattcacccaacgcttatcccgtaaggcctataaagcacatgccaaaggcgttcattcactctgtaaggcgttcttgttcttcacccaacgcttctcgcacgggggtcttctattgaccattgaagaaaaacatttgactggagatagcatctggaatatatgaatctagtataacgaactaggtctgaaaatctgggcaattccagattcgattctcatgtgagatgataaaaacgtcataattatcctgcgtactaaaaaatattcgctagttgagtcgttccggcatatacaaaattattagctacagttgttcctgcatgcgtgtaatgtccttcggtgaacttgtctgtcattatcatttaaaaacgtatctagatgcattacggaagatttttagtttcctttgttatatttgagaagttatatattgtatatacagagagatgcagctgtgtattatttgctgtagcttcgattgcgagacgcatggttgcagtcattttattgtagttagtttatatgatacgtcgttgtcaccgcatgaagattaactgctgtgccatatgaagacctcctgcctcatcacggtgtttgtatataagatcacactgcaggcatcgca

SEQ ID NO: 3458 - DNA, 770 bp, Zea mays
aatcatctctttcaagaggggcagatgaagaagagcaggatacagcgcaatctgggataagcgcgtttgggaatgttatcgctgatttcaagcttgccatttccaatgcagaaagtagagcacaaaatgctgagacaaggtgtacacagctcactcgaacgaatgttcagcttaatggggagttgaacactcttaaaagtcagggatcagatagggctggcttattggagacgaaacttaaggaatcagacactcagttagagcatgcaagagcatcggttgatgctattgttgaacaacagggtatgttaagatcctccatgtctgatatggaactggtgattgaagatctgaaggaaaagtacttgaaagctgaaaccagggccgagagtgctgaatcaaaatgtgcattgttgacagataccaatttagaactcagtgaagagctgtcatttctgagaggccgagtagaaaggctagaaaactcactgcatgaagctaaccaactaaaggtgtccagtgcaaaagacattgctagtaaaactaagactatcatggacttggttgcaaaactttccttggaaagagaacgccttcatgttcaggtacggatgttcttatttaggataggttatggtatcaccctttttttttctgctgtatatcggtgtatgtatgtgatttggatgttatagaaagcaaatatactctaataaagcataatgattgaaagcctacaaattgaatggttgctttaatgatattaatgt

SEQ ID NO: 3459 - DNA, 1046 bp, Zea mays
gtcgacctgcagatctccactgaggtttaactgtgtcctggagactcggcctcaatggcttgtcctcgctctcgatgcctccaccaatctcatcctcaacaccggacggcggtcacggcgcacgcgagcagggttgctcacgaatcgcaggatcgcgggcagacggcggaccgaaagaagaatgtcgcacgtggccatgtctcggccgcgccccgctcctccgtcacagcctcatagtcacaggctcccagcctcccgcgtccggagtccggatccggacacgcgctcgaggccacccgcgctgtcccgcctccggcagcgatggcggccgccgcgcgccccgcgtccgcccacctcctcctcctcgccccgctcccttctcctccccgcctttcgcatctcatccacacccgcagactctacgcactcgcccccgcccgccgccctgcggccgtgcgcgcgcgccgcgaaccctctcctccctccgcgccctccccttctgccccggctgactcgttcgattgcgtcggaactggctcggatgtcgagtgcttcgtcgacgccggcgccgaagacgccgctcccctccttcccgcgctctccgcaggcgcgtccaaggacgatgggaagagcgagggcgacgcggcggtctcggcttcccctgctgggagggagctctgggagtgggcatctctggtgtcgcccttcttcttctggggcacggctatggtggccatgaagggggtcataccccgcacgggtcccttcttcgtcgccgcgatacgcctgctccccgcgggcgcactgctagttgccttcgctgccgcgcgcggcaggaagcagccctccggctgggaggcctggctcgccatcgctgcgttcggactcatcgacgcggcctgcttccaggtgcataatcatggccatgttgagtgttgacagctcaagacgtgagcttttaatgtgatgtctgtgcctctgtgcttcttggaatcaaaaggcggtgccttttcttgcttgctttcgcagggctttctcgcggaggg

SEQ ID NO: 3460 - DNA, 1053 bp, Zea mays
tcgacctgcagagaagctatatacatcaatacattgtcctatatcatcattagccttatcatgtgacgtaaccctggcacaaaactccaaagtgccatggatgcaccaaccaatagtgtccaattccaatacatatacaaaacgcagaagtcacctctgtagcatatcacacaagcaacaagcagcacaaagctggaggttatggcatcattatttatccttttttttcctccagcaagatcagtcctctttttttcctttctctctaatcatggaacaaacctaaggaagagctaaagatctcctttggaatgaaggaattgaaagggattatatgtaggatgattggattcatataggaacgtttcctgctggaacattttggaaaaggaaacatttatttcctccattgaatatttgacttgaattgtatgtttctaaactgagctccaacattactgtggttacgattgctttaagatgtccaatgcacaatacttctctcttctatgtatgaagttcttccggccaaaagagaacattcctgtgtttgctctgtaacgcatccaaatgcctctgttgtattttctctaaaagtgcctttattttgtacaattcatacatttggaactttatatttctaggttgttccgcaagaggcataaacaatttctctagtagagcccatttttataatttttttaataaaagatgcttaactattgcatttgcatcagcctagcttacagagaccaaaaaaaaagttaccatagaaattgaaattggaggcgtctttagacctagatcggagagaattaagagagatatattttttatttaattttgagtaggaataaatttaatccccaactgctcaccctttatcccctgtcagccaccaacggcaagtgcccccacaaggccacaagatgcctctcctaccgaaaaaggaaacaaatttggccagcgctactgcgctacagcaaagtcgtgtataaaagtcgcccatctgcacagccatccattgggagtagatcgaggaccatcctcgct

SEQ ID NO: 3461 - DNA, 1134 bp, Zea mays
ctggcttcttttgctaaagagggcctatgattaacagttggaaacgaccataacaaaatagacacaagttctggcctggcacacagagatacctatgcaaatcatcagcatcaacacttctctggttgaacctaaatagaggattagatcataggagaacattcaagaacaaacgcagaaaacagatttagttggccaacagcgaagggctaaagaagtcagcaaatttagtagtaggcctgaagccagcaattcattagcgtagacctaaagaagccaacaaatccatcatcagaggccaagttttgagttacattgactaatgactatgaggtaagaaacagggcatggatctcaagcagcggcaggcttgcgcagctcactctcaccatgggcaaagtggcatttgccgccataagagcatgacccttttgcgaagttctcacacatcttggtcttgaagttgcttcctatgccactgatgctaacaatcagctcgatgaccatagcactagcgttcctgatctgatcaaaggtgccctcaaactcaatgtttttcaagctggtgtctgattcatggcggtcctcctgaatgaccaccttggcccctgtgacggaagatatttgctttatgttagctccacccttcccaatgatgccacctgcaagggacgcatcgacactgatcttggccgtggcataagcgccgaagctagctggagtggccaaaccagggttggccataggtggaggcgccataggtggaggcgccatgggtggaggcgccataggtagaggtgccataggtggaggcgccataggtggaggtgccatgggtggaggcgccataggtggaggcgccataggtagaggtgccataggtggaggcgccataggtggaggtgccatgggtagaggtgccataggtggaggcgccataggtagaggtgccatagttggaggtgccatgggtggaggcgccataggtggaggtgccataggtggaggtgcaaaataaccggttggtggtggtccgatggggggtggcatatagttgtccatcatagacttgccaagctccctttcaccatgtgcaaagtggcatctgtccccccatttgcatccctctgcaag

SEQ ID NO: 3462 - DNA, 1257 bp, Zea mays
agattgttccaggccttgccagccaacacgtagcggatggcgaacttgaacaggtcgagcgggacgaaggtgacgacgctgtagagccagatgacgcccgcccacccccacccgattcctctgatgtgggcgaacccaaagtcggcccacactgcaatcagagtggcaacctgcaaccacaaagcggcggtcaggtcagctggctgggcagaggtgaaacgagatggtgatcaataggcagtaggacatacgatctgcgcgatcacgaacgctgcgcacagcaagaagccggggcgttcggcgaagcaccagctgcgagaccgcgtcacgaagatgagagcctggctgatgatgctgacttgcaggtacagggcagacatcatctcctcggtgctgccgcgcagagatctcacgtggaaggtgttctgcgttgacacaacgagagagagagagagaatggcagtgaataatcgccctggcaaagatctaggttgttaatgaaggaatgcttacagagaagaagtctgtgctcctcatggcccagaagaacaccacggtcatcacagccatgtaggttccatacaccacgcccgtggcaaagatctcattcagcttccagctatcggggagcggcgacggtttgactctgtccttggcaatagtcatgatagtgcctggaatcattcatataatagcaatgcatagagattaacgaacagtacgcatgcaattgaacaacgcctctgatgaagtagggggcagtgcaagctcaccatcgtttagaatggcgatgaccaggatcataaatggcgagaaatcaaatttccatatcaatgcaatcagcaagaatccgagctgcacgttcacagttcataagaatttcagacaatactctctagattctttgcaaggcctatgtcaaaacaaaaaaaaattaacttaccacaatacgaatagtgatcgacaccgcgtatatctgaccaaaaacaagagaacggattagggtcaggtcagaattgatcgacacaatcgccagaggaagaatgctcacagtgtagttcttcattctctggaagatggccctgctggtgagcacggcactgatgatgacactgaggccttcttgggtaagaacgatgtcggaggcgctccgtgccgcatcagtggctcccgccacggcgattccgatgtcggcttttttcagggcgggcgcgtcgttcaccccgtctcccgtcatcccgcagatgtgcttcatct

SEQ ID NO: 3463 - DNA, 1237 bp, Zea mays
agcttgcatgcctgcagcgcccaaccagtgcctctgccgcgtggagcagagcagcttccgttgccctccttctccgggtggagcgccacccctgccatagcgctgctgtccgccattaccggcgtagccgctggctgagtctgggccgagcgctggctgttccttgctcggtgtgccacaatgaagaaaggttgttccctgctcggtgtgcggcaacgacgaaaggcatatgggcaagagacaaggctctgatgaacagtgataaatagtgcactttaatccttttcttttttttcagaaatcagctggatgtttgacatttttgacatttcatagaaattcacacaaaactcttaaaatagaaagttcagttttgttgaactctaaaaccaaacacaggatggagccgttctgttttacttcatcttggaaccaaacaaaaaacagagcgactctgttctgactgccaaacacagaacaaactcgttctatccttagaatctggaatagagccgctccatccaaataaactccggaaccaaacactaccttactgaatgctgtggtacctttgcttttgcaaccttttcaggttagtagaacacagctcaaccatataaagagactgaagcaatctggggatggtattcagaccaagcatgtttcacgtgtaattggcggccttgataaatctcatgtgaaaccttatggagctttattagaggatgaacagaggagactgcgcgagcattggtcagtaatgcttactttagcatgtatatcttttgtagatcatttttcttatgaggaagtatttacgtgacaggctggaaatgtcttgcaatgatttacctgctgcctttgaggttcttagggaaaggaaggtgctgatggagaaatcaataaagttattaggccttgagcttcagcagaagaatgtatctgtcttgagaaaggttcgctgtgacttgtccttcaattctttttcttaagtctctaatttttgtcttgagggaagtgatttacttgaatgtgtaaaaaatacagtggatgagaataccgttgtatgcttacttctgttatgtatcttccccatttacaatgtatcatagcattcgccactatagatgagaataccatgactataaagatactgaattgtaatagaggcatctagtatgaaagccataggcagtatttcattatgaatggtgaattgccctgcaggcatgcaaga

(The sequence listing continues in the following parts.)
